United States Patent Application Publication US 2013/0031665 A1 - sequence listing, part 4

SEQ ID NO: 12560 - DNA, 1057 bp, Glycine max
  Gm_smallRNAprecursor_5393
caagaccaatacaatttacaattttcgcaattggtttttgcaatggtgggacttctttggaccaatcccagagatattcccagaaacagtccaacaaggatttgctcaatttgagagacaataaaattcgcaggaatcacgaattccagcagatcttaaatacttttcaagctttgcattgtcatggatcttctcatggcaatatccttacagcaagactgaaaagacaaaccaatatccatcactacaaagacacacatttgtaaaatggtggacacaatttgactcatccaaagcagatccagaacaagtaaaagtctggttccaatcccatccagaattcctcaaagcagctaatcaagaaacttctgtgtttttgaaccaaaagtctcatctggcagcatttttagcaggatcgaaatcaaaggaggtcctagctaaaaatctaaaggaagttctacaaatgttacagcaggaagaagaaggttcatcctcaaagaaggaagaaacaagttctgctgaagaagaagaagaagaccccttttaccaaaacgaagatgattgttttggtatctgtttagattaaatttaatttcggtcacaaaaccgtctgtttgtaattaatgtgtaattaatgctggaccatacaacctgtcctctagccattaaagtcccggtcaaaactacttgtcttgtaacaagcagtcaaatagtcccggtcaaaactaccggcaactaccggtcttaggtttttggctatataaggagtcctcaagtagtgttcaaactaaattgttcgcaaaaaaaagaaaaactttttcatttattcagatccaagaagttctgtaacatatagccttatggaaatatttctatggaaccaaatgaaggcaaagatattagagaatgttataatcatgtctagactattgcgctatttttcccgtatctcttttcgatcaaattcttcttcttcatcttcttcaagaaattccaatttattaagtgatcaagataaccagacccaagaggtcgcccccaaacacaatctcttcaa

SEQ ID NO: 12561 - DNA, 1057 bp, Glycine max; identical to SEQ ID NO: 12560
  Gm_smallRNAprecursor_5394

SEQ ID NO: 12562 - DNA, 1057 bp, Glycine max; identical to SEQ ID NO: 12560
  Gm_smallRNAprecursor_5395

SEQ ID NO: 12563 - DNA, 1057 bp, Glycine max; identical to SEQ ID NO: 12560
  Gm_smallRNAprecursor_5396

SEQ ID NO: 12564 - DNA, 1033 bp, Glycine max
  Gm_smallRNAprecursor_5397
cggtcaaaactaccggcaactaccggtcttaggtttttggctatataaggagtcctcaagtagtgttcaaactaaattgttcgcaaaaaaaagaaaaactttttcatttattcagatccaagaagttctgtaacatatagccttatggaaatatttctatggaaccaaatgaaggcaaagatattagagaatgttataatcatgtctagactattgcgctatttttcccgtatctcttttcgatcaaattcttcttcttcatcttcttcaagaaattccaatttattaagtgatcaagataaccagacccaagaggtcgcccccaaacacaatctcttcaatgaggaagtccgattcgaagatatcaatcaaaacatggatgactggaacattccagaaatccctcaggatcaactatacgtttctgaaacaattaaggacaaacacaactttgattacataatcaaaatagtagaaaaaaatattcctctaggacaagatataggggaagaatttcatttactttcaaaaaattcaatttatgaacatagccgtaagtataaatatctacacatcggttgtgtacaagtagccatcaagcccttaattgacatgggcatagatgcagcagttttaatgtgtctaagagatattaggcataataaatttgaagactccctaattggaacagtcgaaaccagcctaggacaaggtccaatatattttaattgttatccaaacaaaacagtgagtctgatggacataaacattcttgactccctgttcttaaacatccactttcatggccttgacatgaaagaaggatcgatcccaacaaccttaatttataggatccaatacaaggtcatgaatacttgtgcatctagagtcctgttaaaacctcaaaaaggagaaacaactttgtttatcactgatatgacaaaggctaacgtttctctcccgagaaaaataaaatgggatgaagtaactctttccgaaagatgggttatggataaggccacaccgtctgttc

SEQ ID NO: 12565 - DNA, 1047 bp, Glycine max
  Gm_smallRNAprecursor_5398
gtttttggctatataaggagtcctcaagtagtgttcaaactaaattgttcgcaaaaaaaagaaaaactttttcatttattcagatccaagaagttctgtaacatatagccttatggaaatatttctatggaaccaaatgaaggcaaagatattagagaatgttataatcatgtctagactattgcgctatttttcccgtatctcttttcgatcaaattcttcttcttcatcttcttcaagaaattccaatttattaagtgatcaagataaccagacccaagaggtcgcccccaaacacaatctcttcaatgaggaagtccgattcgaagatatcaatcaaaacatggatgactggaacattccagaaatccctcaggatcaactatacgtttctgaaacaattaaggacaaacacaactttgattacataatcaaaatagtagaaaaaaatattcctctaggacaagatataggggaagaatttcatttactttcaaaaaattcaatttatgaacatagccgtaagtataaatatctacacatcggttgtgtacaagtagccatcaagcccttaattgacatgggcatagatgcagcagttttaatgtgtctaagagatattaggcataataaatttgaagactccctaattggaacagtcgaaaccagcctaggacaaggtccaatatattttaattgttatccaaacaaaacagtgagtctgatggacataaacattcttgactccctgttcttaaacatccactttcatggccttgacatgaaagaaggatcgatcccaacaaccttaatttataggatccaatacaaggtcatgaatacttgtgcatctagagtcctgttaaaacctcaaaaaggagaaacaactttgtttatcactgatatgacaaaggctaacgtttctctcccgagaaaaataaaatgggatgaagtaactctttccgaaagatgggttatggataaggccacaccgtctgttccccgacccgctccaaccatagagcatattaagcaagataactccag

SEQ ID NO: 12566 - DNA, 1046 bp, Glycine max
  Gm_smallRNAprecursor_5399
gctttgtgcattgtacagcaacttccagtattttcgggcaggatgtcctggacattgtatccgacatcttggatcctgcagctttgtgcattgtacagcaacttccagtattttcgggcaggatgtcccggacattgtatctgacatcttggatcctgcagcttcaattcttcatttgacatttcatcttgccttgtgcattgtgcagcccgatcttattctttgacataacgttggacatcatgtgcagcaactccagctttccttcaatgtctaagtgcttatgttttaacaaaatcttagccaatcttttaaaactccgtagagctaagcactaacagttttgaccgggactatttgactatttgttacaagacaagtagttttgaccgggactttaatggctagaggacaggttgtattgtccaacattaattacacattaattacaaacagacggttttgtgaccgaaattaaatttaatctaaacagataccaaaacaatcatcttcgttttggtaaaaggggtcttcttcttcttcttcagcagaacttgtttcttccttctttgaggatgaaccttcttcttcctgctgtaacatttgcagaacttcctttagatttttagctaggacctcctttgatttcgatcctgctaaaaatgctgtcagatgagacttttggttcaaaaacacagaagtttctggatcagctgctttgaggaattctggatgggattgaaaccagacttttacttgttctggatctgctttggatgagtcaaattgtgtccaccattttacaaatgtgtgtctttgtagtgatggatattggtttgtcttttcagtcttgctgtaaggatattgccatgagaagatccatgacagtgcaaagcttgaaaagtatttaagatctactggaattcgtgattcctgcgaattttattgtctctgaaattgagcaaatccttgttggactgtttctgggaatatctctgggattggtccaaagaagtcccaccattgcaaaaaccaattgggaaaat

SEQ ID NO: 12567 - DNA, 1114 bp, Glycine max
  Gm_smallRNAprecursor_5400
ggactttaatggctagaggacaggttgtattgtccaacattaattacacattaattacaaacagacggttttgtgaccgaaattaaatttaatctaaacagataccaaaacaatcatcttcgttttggtaaaaggggtcttcttcttcttcttcagcagaacttgtttcttccttctttgaggatgaaccttcttcttcctgctgtaacatttgcagaacttcctttagatttttagctaggacctcctttgatttcgatcctgctaaaaatgctgtcagatgagacttttggttcaaaaacacagaagtttctggatcagctgctttgaggaattctggatgggattgaaaccagacttttacttgttctggatctgctttggatgagtcaaattgtgtccaccattttacaaatgtgtgtctttgtagtgatggatattggtttgtcttttcagtcttgctgtaaggatattgccatgagaagatccatgacagtgcaaagcttgaaaagtatttaagatctactggaattcgtgattcctgcgaattttattgtctctgaaattgagcaaatccttgttggactgtttctgggaatatctctgggattggtccaaagaagtcccaccattgcaaaaaccaattgggaaaattgtaaattgtattggtcttgaaatatatcagccatgaatgcttgaagcgagtattttggtgccaaaacaccttagtccaagcatcaacataatcccaataggtataacctaccggatcaaatggaactgaaaatctctttcctttgttcaagtccgaaccgaagtgtcttggttgaagaacttttagtatttggattgtggagtgggtgtttaatgtttggtcttttgggtctttgaaatgttggtagatactgaatttgaatctaccaaaatcaattcatagaaagttcttgtcttcaggatggtggttggtttgtagtgaagtcctggtgggaaagccttagtcgtcgccttgaagggatttttgtcccaaaattcaggttccatctgcaaaacagttacaaatttatttttataaatataattgttagtttttttggtaggtggtgtttgagctttg

SEQ ID NO: 12568 - DNA, 1162 bp, Glycine max
  Gm_smallRNAprecursor_5401
gttttgtgaccgaaattaaatttaatctaaacagataccaaaacaatcatcttcgttttggtaaaaggggtcttcttcttcttcttcagcagaacttgtttcttccttctttgaggatgaaccttcttcttcctgctgtaacatttgcagaacttcctttagatttttagctaggacctcctttgatttcgatcctgctaaaaatgctgtcagatgagacttttggttcaaaaacacagaagtttctggatcagctgctttgaggaattctggatgggattgaaaccagacttttacttgttctggatctgctttggatgagtcaaattgtgtccaccattttacaaatgtgtgtctttgtagtgatggatattggtttgtcttttcagtcttgctgtaaggatattgccatgagaagatccatgacagtgcaaagcttgaaaagtatttaagatctactggaattcgtgattcctgcgaattttattgtctctgaaattgagcaaatccttgttggactgtttctgggaatatctctgggattggtccaaagaagtcccaccattgcaaaaaccaattgggaaaattgtaaattgtattggtcttgaaatatatcagccatgaatgcttgaagcgagtattttggtgccaaaacaccttagtccaagcatcaacataatcccaataggtataacctaccggatcaaatggaactgaaaatctctttcctttgttcaagtccgaaccgaagtgtcttggttgaagaacttttagtatttggattgtggagtgggtgtttaatgtttggtcttttgggtctttgaaatgttggtagatactgaatttgaatctaccaaaatcaattcatagaaagttcttgtcttcaggatggtggttggtttgtagtgaagtcctggtgggaaagccttagtcgtcgccttgaagggatttttgtcccaaaattcaggttccatctgcaaaacagttacaaatttatttttataaatataattgttagtttttttggtaggtggtgtttgagctttggctaaaggtagtttccctttaggattggtagttgttttggtgattgatgcattctggatcattgtttgtaaatttgattcagattcatcatcagattctgaggcaatgtctgccc

SEQ ID NO: 12569 - DNA, 1165 bp, Glycine max
  Gm_smallRNAprecursor_5402
gttttgtgaccgaaattaaatttaatctaaacagataccaaaacaatcatcttcgttttggtaaaaggggtcttcttcttcttcttcagcagaacttgtttcttccttctttgaggatgaaccttcttcttcctgctgtaacatttgcagaacttcctttagatttttagctaggacctcctttgatttcgatcctgctaaaaatgctgtcagatgagacttttggttcaaaaacacagaagtttctggatcagctgctttgaggaattctggatgggattgaaaccagacttttacttgttctggatctgctttggatgagtcaaattgtgtccaccattttacaaatgtgtgtctttgtagtgatggatattggtttgtcttttcagtcttgctgtaaggatattgccatgagaagatccatgacagtgcaaagcttgaaaagtatttaagatctactggaattcgtgattcctgcgaattttattgtctctgaaattgagcaaatccttgttggactgtttctgggaatatctctgggattggtccaaagaagtcccaccattgcaaaaaccaattgggaaaattgtaaattgtattggtcttgaaatatatcagccatgaatgcttgaagcgagtattttggtgccaaaacaccttagtccaagcatcaacataatcccaataggtataacctaccggatcaaatggaactgaaaatctctttcctttgttcaagtccgaaccgaagtgtcttggttgaagaacttttagtatttggattgtggagtgggtgtttaatgtttggtcttttgggtctttgaaatgttggtagatactgaatttgaatctaccaaaatcaattcatagaaagttcttgtcttcaggatggtggttggtttgtagtgaagtcctggtgggaaagccttagtcgtcgccttgaagggatttttgtcccaaaattcaggttccatctgcaaaacagttacaaatttatttttataaatataattgttagtttttttggtaggtggtgtttgagctttggctaaaggtagtttccctttaggattggtagttgttttggtgattgatgcattctggatcattgtttgtaaatttgattcagattcatcatcagattctgaggcaatgtctgcccgag

SEQ ID NO: 12570 - DNA, 1129 bp, Glycine max
  Gm_smallRNAprecursor_5403
ctgcaaaacagttacaaatttatttttataaatataattgttagtttttttggtaggtggtgtttgagctttggctaaaggtagtttccctttaggattggtagttgttttggtgattgatgcattctggatcattgtttgtaaatttgattcagattcatcatcagattctgaggcaatgtctgcccgagattttttgattatttttggaaatttggttagacccatgtcttgaagggcctgaagggtttcaattggccatgcatagtcggccgatgtttggttggcagttgctggtttgggagattcctgagtggatggcttaggtttgattgaggcaatttgggttgatgacccttctaaattggttttctgggtagatgacctagcctgggttggtgacccagaagaggttgatgatttcttaatggttggctctggaagagccagtctggctcctttgcctgtacttcttcctccccttagggagatttccgatgccttaggaggcattaccacttttctgtaagaattcacggataaggtagtcaggtaatgaatttgaggtgcccttgatgtattctatgtcaaaatcaaagacacttagaattgcttgccatcttgcaaaaatttgttttgaggcaaggtttttaacatctttttgtaaaatatctttggctgatttacaatcaactctgattaaaaaattttggtttaataaatccgattgaaatatggaaatgcacaacacaattgttaaaacttcctttttaacagttgaatattttaattatgcagaattccaatgttttgatgtatatgcaatgacatgatcttggccatggactctttgtttgaggatgccaccatagcctatgtctgaagcatcagtttcgacaattttaaatgcctgtggaataggaagatacagacattttatggattggactttgattttgatttctttaactgtttgtgtatggaggtcagaccaaggaggcggatttttcttcagcctatcatgcaatggcttgacaatattgtttaaataggggacaaattctcctacgtaatttagaatacctagaaatctttgtaactgggttttgtctaagatttggttgggaaa

SEQ ID NO: 12571 - DNA, 1115 bp, Glycine max
  Gm_smallRNAprecursor_5404
caaatttatttttataaatataattgttagtttttttggtaggtggtgtttgagctttggctaaaggtagtttccctttaggattggtagttgttttggtgattgatgcattctggatcattgtttgtaaatttgattcagattcatcatcagattctgaggcaatgtctgcccgagattttttgattatttttggaaatttggttagacccatgtcttgaagggcctgaagggtttcaattggccatgcatagtcggccgatgtttggttggcagttgctggtttgggagattcctgagtggatggcttaggtttgattgaggcaatttgggttgatgacccttctaaattggttttctgggtagatgacctagcctgggttggtgacccagaagaggttgatgatttcttaatggttggctctggaagagccagtctggctcctttgcctgtacttcttcctccccttagggagatttccgatgccttaggaggcattaccacttttctgtaagaattcacggataaggtagtcaggtaatgaatttgaggtgcccttgatgtattctatgtcaaaatcaaagacacttagaattgcttgccatcttgcaaaaatttgttttgaggcaaggtttttaacatctttttgtaaaatatctttggctgatttacaatcaactctgattaaaaaattttggtttaataaatccgattgaaatatggaaatgcacaacacaattgttaaaacttcctttttaacagttgaatattttaattatgcagaattccaatgttttgatgtatatgcaatgacatgatcttggccatggactctttgtttgaggatgccaccatagcctatgtctgaagcatcagtttcgacaattttaaatgcctgtggaataggaagatacagacattttatggattggactttgattttgatttctttaactgtttgtgtatggaggtcagaccaaggaggcggatttttcttcagcctatcatgcaatggcttgacaatattgtttaaataggggacaaattctcctacgtaatttagaatacctagaaatctttgtaactgggttttgtctaagatttggttgggaaa

SEQ ID NO: 12572 - DNA, 1218 bp, Glycine max
  Gm_smallRNAprecursor_5405
tggcttaggtttgattgaggcaatttgggttgatgacccttctaaattggttttctgggtagatgacctagcctgggttggtgacccagaagaggttgatgatttcttaatggttggctctggaagagccagtctggctcctttgcctgtacttcttcctccccttagggagatttccgatgccttaggaggcattaccacttttctgtaagaattcacggataaggtagtcaggtaatgaatttgaggtgcccttgatgtattctatgtcaaaatcaaagacacttagaattgcttgccatcttgcaaaaatttgttttgaggcaaggtttttaacatctttttgtaaaatatctttggctgatttacaatcaactctgattaaaaaattttggtttaataaatccgattgaaatatggaaatgcacaacacaattgttaaaacttcctttttaacagttgaatattttaattatgcagaattccaatgttttgatgtatatgcaatgacatgatcttggccatggactctttgtttgaggatgccaccatagcctatgtctgaagcatcagtttcgacaattttaaatgcctgtggaataggaagatacagacattttatggattggactttgattttgatttctttaactgtttgtgtatggaggtcagaccaaggaggcggatttttcttcagcctatcatgcaatggcttgacaatattgtttaaataggggacaaattctcctacgtaatttagaatacctagaaatctttgtaactgggttttgtctaagatttggttgggaaatttgctagcaaactcaattgacctttctattggaatgattgtaccttgatatatattgtgaccaaggaatcgaattcgagtttggaaaagattgatttttgatttggagactgccaaaccattctgtttgatgatatggatgaaagtctggagatgtttgaaatgttggtcaatgttttgggaaaagattaaaacatcatctatgtagacaatgacaaattttgaatagggattaaaaatatcattcataactttttgaaattctgaaggggcattcttcagtccgaatggcatcacattccattcatattgcccgaaaggtatagtaaacgccgttttgtacctatctgattcttggatttggatttgccagaatccagatttcatatcaaattttgaaaatatct

SEQ ID NO: 12573 - DNA, 1232 bp, Glycine max
  Gm_smallRNAprecursor_5406
aattgcttgccatcttgcaaaaatttgttttgaggcaaggtttttaacatctttttgtaaaatatctttggctgatttacaatcaactctgattaaaaaattttggtttaataaatccgattgaaatatggaaatgcacaacacaattgttaaaacttcctttttaacagttgaatattttaattatgcagaattccaatgttttgatgtatatgcaatgacatgatcttggccatggactctttgtttgaggatgccaccatagcctatgtctgaagcatcagtttcgacaattttaaatgcctgtggaataggaagatacagacattttatggattggactttgattttgatttctttaactgtttgtgtatggaggtcagaccaaggaggcggatttttcttcagcctatcatgcaatggcttgacaatattgtttaaataggggacaaattctcctacgtaatttagaatacctagaaatctttgtaactgggttttgtctaagatttggttgggaaatttgctagcaaactcaattgacctttctattggaatgattgtaccttgatatatattgtgaccaaggaatcgaattcgagtttggaaaagattgatttttgatttggagactgccaaaccattctgtttgatgatatggatgaaagtctggagatgtttgaaatgttggtcaatgttttgggaaaagattaaaacatcatctatgtagacaatgacaaattttgaatagggattaaaaatatcattcataactttttgaaattctgaaggggcattcttcagtccgaatggcatcacattccattcatattgcccgaaaggtatagtaaacgccgttttgtacctatctgattcttggatttggatttgccagaatccagatttcatatcaaattttgaaaatatctttgcagaatttaatctattaagtaagtcttttttgtttggaataggatacctaatccattgtaatgcttgatttagtggtttgtaatttatgactaagcgaggtgttccacgctcaatctcagattgtttgttgacataaaaagccacacaagaccatgggcttttgcttttccggattaggcctttatcaagcaaatccttgatttccttttggcagtgttgaaggagttcttcgttcatttggattggtctggcttttgtgggaatttgtttttcccaaaattctttctcataagggagat

SEQ ID NO: 12574 - DNA, 1241 bp, Glycine max
  Gm_smallRNAprecursor_5407
aatggcttgacaatattgtttaaataggggacaaattctcctacgtaatttagaatacctagaaatctttgtaactgggttttgtctaagatttggttgggaaatttgctagcaaactcaattgacctttctattggaatgattgtaccttgatatatattgtgaccaaggaatcgaattcgagtttggaaaagattgatttttgatttggagactgccaaaccattctgtttgatgatatggatgaaagtctggagatgtttgaaatgttggtcaatgttttgggaaaagattaaaacatcatctatgtagacaatgacaaattttgaatagggattaaaaatatcattcataactttttgaaattctgaaggggcattcttcagtccgaatggcatcacattccattcatattgcccgaaaggtatagtaaacgccgttttgtacctatctgattcttggatttggatttgccagaatccagatttcatatcaaattttgaaaatatctttgcagaatttaatctattaagtaagtcttttttgtttggaataggatacctaatccattgtaatgcttgatttagtggtttgtaatttatgactaagcgaggtgttccacgctcaatctcagattgtttgttgacataaaaagccacacaagaccatgggcttttgcttttccggattaggcctttatcaagcaaatccttgatttccttttggcagtgttgaaggagttcttcgttcatttggattggtctggcttttgtgggaatttgtttttcccaaaattctttctcataagggagatcaacaatatgtttctttctatcccaaaatgcatgtggcaaatcagaagagacagttgattcaatatgatttaataaagattgaattttttcctttacttggggttttcccagtcgtatctgaatattattaaaagatacttcttcttttaagaagttaatttgattaatcttattttctataagatttatatttttggagattggtttagtagaaaaattaaatataatttttcttcctaagtaatttgtggttattccttcattagatatttgaataggaaacaaggctcgaatgaagggggttcctaggattacttcgttcttaaggttttttaccagaagaaagtttgtgttaatcctaagaccttggttctcaatgattgcatttgatagcttaaaattaatttttaattttgagccgtttgc

SEQ ID NO: 12575 - DNA, 1171 bp, Glycine max
  Gm_smallRNAprecursor_5408
ctctgtaccacctaaagtctgctaaggttctacacttaagatttgataataattctgcagacctatctttccacaaggattggtctccaatgaaatgttgggctattgtaaaaattaatgtgttaacagtgtcaggaatctctttatcatcgtcattagtaatgacttttccattgagatccgtcttaactgcgctgtaaattttttattgctcttcactagtgagataattatcccaccatcctttcagttgtccagaaaatcctgccactaagatatctataatggtctcttttgaacattcatgggaggtttggtaagttgtagctaccatggtcatatgttggagtgtattcatgatgttatacttcactacaaaccaaccaccatcctgaagacaagaactttttatgaattgattttgatagattcaaattcagtatctatcaaacatttcaaagaccaaaaagaccaaacattaaacacccactccacaatccaaatactaaaagttcttcaaccaagacactttggttcggacttgaacaaaggaaagagattttcagttccattagatccggtaggttatacctattgggattatgttgatgcttggactaaggtgttttggcaccaaaatacccgcttcaagcattcatggctgatatatttcaagaccaatacaatttacaattttcccaattggttttttgcaatgatgggacttctttggaccaatccctgagatattcccagaaagagtccaacaaggatttgctcaatttgagagacaatacaattcgcaggaatcatgaattctagcagatcttaaatacttttcaagctttgcactgtcatggatcttctcatggcaatatccttacaacaagactgaaaagacaaactaatatccatcactacaaagacacgcatttgtaaaatggtggacacaatttgactcatccaaagcagatccagaacaagtaaaagtctggttccaatcccatccagaattcctcaaagcagctgatccagaaacttctgtgtttttgaaccaaaagtctcatctggcagcatttttagcaggatcgaaatcaaaggaggtcctagctaaaaatctaaaggaagttctgcaaatgttacaacaggaagaaaaaggttcatcctcaaa

SEQ ID NO: 12576 - DNA, 1166 bp, Glycine max
  Gm_smallRNAprecursor_5409
ctgtaccacctaaagtctgctaaggttctacacttaagatttgataataattctgcagacctatctttccacaaggattggtctccaatgaaatgttgggctattgtaaaaattaatgtgttaacagtgtcaggaatctctttatcatcgtcattagtaatgacttttccattgagatccgtcttaactgcgctgtaaattttttattgctcttcactagtgagataattatcccaccatcctttcagttgtccagaaaatcctgccactaagatatctataatggtctcttttgaacattcatgggaggtttggtaagttgtagctaccatggtcatatgttggagtgtattcatgatgttatacttcactacaaaccaaccaccatcctgaagacaagaactttttatgaattgattttgatagattcaaattcagtatctatcaaacatttcaaagaccaaaaagaccaaacattaaacacccactccacaatccaaatactaaaagttcttcaaccaagacactttggttcggacttgaacaaaggaaagagattttcagttccattagatccggtaggttatacctattgggattatgttgatgcttggactaaggtgttttggcaccaaaatacccgcttcaagcattcatggctgatatatttcaagaccaatacaatttacaattttcccaattggttttttgcaatgatgggacttctttggaccaatccctgagatattcccagaaagagtccaacaaggatttgctcaatttgagagacaatacaattcgcaggaatcatgaattctagcagatcttaaatacttttcaagctttgcactgtcatggatcttctcatggcaatatccttacaacaagactgaaaagacaaactaatatccatcactacaaagacacgcatttgtaaaatggtggacacaatttgactcatccaaagcagatccagaacaagtaaaagtctggttccaatcccatccagaattcctcaaagcagctgatccagaaacttctgtgtttttgaaccaaaagtctcatctggcagcatttttagcaggatcgaaatcaaaggaggtcctagctaaaaatctaaaggaagttctgcaaatgttacaacaggaagaaaaaggttcatcctc

SEQ ID NO: 12577 - DNA, 1169 bp, Glycine max
  Gm_smallRNAprecursor_5410
ctgtaccacctaaagtctgctaaggttctacacttaagatttgataataattctgcagacctatctttccacaaggattggtctccaatgaaatgttgggctattgtaaaaattaatgtgttaacagtgtcaggaatctctttatcatcgtcattagtaatgacttttccattgagatccgtcttaactgcgctgtaaattttttattgctcttcactagtgagataattatcccaccatcctttcagttgtccagaaaatcctgccactaagatatctataatggtctcttttgaacattcatgggaggtttggtaagttgtagctaccatggtcatatgttggagtgtattcatgatgttatacttcactacaaaccaaccaccatcctgaagacaagaactttttatgaattgattttgatagattcaaattcagtatctatcaaacatttcaaagaccaaaaagaccaaacattaaacacccactccacaatccaaatactaaaagttcttcaaccaagacactttggttcggacttgaacaaaggaaagagattttcagttccattagatccggtaggttatacctattgggattatgttgatgcttggactaaggtgttttggcaccaaaatacccgcttcaagcattcatggctgatatatttcaagaccaatacaatttacaattttcccaattggttttttgcaatgatgggacttctttggaccaatccctgagatattcccagaaagagtccaacaaggatttgctcaatttgagagacaatacaattcgcaggaatcatgaattctagcagatcttaaatacttttcaagctttgcactgtcatggatcttctcatggcaatatccttacaacaagactgaaaagacaaactaatatccatcactacaaagacacgcatttgtaaaatggtggacacaatttgactcatccaaagcagatccagaacaagtaaaagtctggttccaatcccatccagaattcctcaaagcagctgatccagaaacttctgtgtttttgaaccaaaagtctcatctggcagcatttttagcaggatcgaaatcaaaggaggtcctagctaaaaatctaaaggaagttctgcaaatgttacaacaggaagaaaaaggttcatcctcaaa

SEQ ID NO: 12578 - DNA, 1107 bp, Glycine max
  Gm_smallRNAprecursor_5411
taccacctaaagtctgctaaggttctacacttaagatttgataataattctgcagacctatctttccacaaggattggtctccaatgaaatgttgggctattgtaaaaattaatgtgttaacagtgtcaggaatctctttatcatcgtcattagtaatgacttttccattgagatccgtcttaactgcgctgtaaattttttattgctcttcactagtgagataattatcccaccatcctttcagttgtccagaaaatcctgccactaagatatctataatggtctcttttgaacattcatgggaggtttggtaagttgtagctaccatggtcatatgttggagtgtattcatgatgttatacttcactacaaaccaaccaccatcctgaagacaagaactttttatgaattgattttgatagattcaaattcagtatctatcaaacatttcaaagaccaaaaagaccaaacattaaacacccactccacaatccaaatactaaaagttcttcaaccaagacactttggttcggacttgaacaaaggaaagagattttcagttccattagatccggtaggttatacctattgggattatgttgatgcttggactaaggtgttttggcaccaaaatacccgcttcaagcattcatggctgatatatttcaagaccaatacaatttacaattttcccaattggttttttgcaatgatgggacttctttggaccaatccctgagatattcccagaaagagtccaacaaggatttgctcaatttgagagacaatacaattcgcaggaatcatgaattctagcagatcttaaatacttttcaagctttgcactgtcatggatcttctcatggcaatatccttacaacaagactgaaaagacaaactaatatccatcactacaaagacacgcatttgtaaaatggtggacacaatttgactcatccaaagcagatccagaacaagtaaaagtctggttccaatcccatccagaattcctcaaagcagctgatccagaaacttctgtgtttttgaaccaaaagtctcatctggcagcatttttagcaggatcgaaatcaaaggaggtcctagct

SEQ ID NO: 12579 - DNA, 1107 bp, Glycine max; identical to SEQ ID NO: 12578
  Gm_smallRNAprecursor_5412

SEQ ID NO: 12580 - DNA, 1108 bp, Glycine max
  Gm_smallRNAprecursor_5413
taccacctaaagtctgctaaggttctacacttaagatttgataataattctgcagacctatctttccacaaggattggtctccaatgaaatgttgggctattgtaaaaattaatgtgttaacagtgtcaggaatctctttatcatcgtcattagtaatgacttttccattgagatccgtcttaactgcgctgtaaattttttattgctcttcactagtgagataattatcccaccatcctttcagttgtccagaaaatcctgccactaagatatctataatggtctcttttgaacattcatgggaggtttggtaagttgtagctaccatggtcatatgttggagtgtattcatgatgttatacttcactacaaaccaaccaccatcctgaagacaagaactttttatgaattgattttgatagattcaaattcagtatctatcaaacatttcaaagaccaaaaagaccaaacattaaacacccactccacaatccaaatactaaaagttcttcaaccaagacactttggttcggacttgaacaaaggaaagagattttcagttccattagatccggtaggttatacctattgggattatgttgatgcttggactaaggtgttttggcaccaaaatacccgcttcaagcattcatggctgatatatttcaagaccaatacaatttacaattttcccaattggttttttgcaatgatgggacttctttggaccaatccctgagatattcccagaaagagtccaacaaggatttgctcaatttgagagacaatacaattcgcaggaatcatgaattctagcagatcttaaatacttttcaagctttgcactgtcatggatcttctcatggcaatatccttacaacaagactgaaaagacaaactaatatccatcactacaaagacacgcatttgtaaaatggtggacacaatttgactcatccaaagcagatccagaacaagtaaaagtctggttccaatcccatccagaattcctcaaagcagctgatccagaaacttctgtgtttttgaaccaaaagtctcatctggcagcatttttagcaggatcgaaatcaaaggaggtcctagcta

SEQ ID NO: 12581 - DNA, 1108 bp, Glycine max; identical to SEQ ID NO: 12580
  Gm_smallRNAprecursor_5414

SEQ ID NO: 12582 - DNA, 1102 bp, Glycine max
  Gm_smallRNAprecursor_5415
cacctaaagtctgctaaggttctacacttaagatttgataataattctgcagacctatctttccacaaggattggtctccaatgaaatgttgggctattgtaaaaattaatgtgttaacagtgtcaggaatctctttatcatcgtcattagtaatgacttttccattgagatccgtcttaactgcgctgtaaattttttattgctcttcactagtgagataattatcccaccatcctttcagttgtccagaaaatcctgccactaagatatctataatggtctcttttgaacattcatgggaggtttggtaagttgtagctaccatggtcatatgttggagtgtattcatgatgttatacttcactacaaaccaaccaccatcctgaagacaagaactttttatgaattgattttgatagattcaaattcagtatctatcaaacatttcaaagaccaaaaagaccaaacattaaacacccactccacaatccaaatactaaaagttcttcaaccaagacactttggttcggacttgaacaaaggaaagagattttcagttccattagatccggtaggttatacctattgggattatgttgatgcttggactaaggtgttttggcaccaaaatacccgcttcaagcattcatggctgatatatttcaagaccaatacaatttacaattttcccaattggttttttgcaatgatgggacttctttggaccaatccctgagatattcccagaaagagtccaacaaggatttgctcaatttgagagacaatacaattcgcaggaatcatgaattctagcagatcttaaatacttttcaagctttgcactgtcatggatcttctcatggcaatatccttacaacaagactgaaaagacaaactaatatccatcactacaaagacacgcatttgtaaaatggtggacacaatttgactcatccaaagcagatccagaacaagtaaaagtctggttccaatcccatccagaattcctcaaagcagctgatccagaaacttctgtgtttttgaaccaaaagtctcatctggcagcatttttagcaggatcgaaatcaaaggaggtcctag

SEQ ID NO: 12583 - DNA, 1169 bp, Glycine max
  Gm_smallRNAprecursor_5416
gttggagtgtattcatgatgttatacttcactacaaaccaaccaccatcctgaagacaagaactttttatgaattgattttgatagattcaaattcagtatctatcaaacatttcaaagaccaaaaagaccaaacattaaacacccactccacaatccaaatactaaaagttcttcaaccaagacactttggttcggacttgaacaaaggaaagagattttcagttccattagatccggtaggttatacctattgggattatgttgatgcttggactaaggtgttttggcaccaaaatacccgcttcaagcattcatggctgatatatttcaagaccaatacaatttacaattttcccaattggttttttgcaatgatgggacttctttggaccaatccctgagatattcccagaaagagtccaacaaggatttgctcaatttgagagacaatacaattcgcaggaatcatgaattctagcagatcttaaatacttttcaagctttgcactgtcatggatcttctcatggcaatatccttacaacaagactgaaaagacaaactaatatccatcactacaaagacacgcatttgtaaaatggtggacacaatttgactcatccaaagcagatccagaacaagtaaaagtctggttccaatcccatccagaattcctcaaagcagctgatccagaaacttctgtgtttttgaaccaaaagtctcatctggcagcatttttagcaggatcgaaatcaaaggaggtcctagctaaaaatctaaaggaagttctgcaaatgttacaacaggaagaaaaaggttcatcctcaaagaaggaagaaacaagttctgctgaagaagaagaagaagaccccttttaccaaaatgaagatgattgttttggtatctgtttagattaaatttaatttcggtcacaaaaccgtctgtttgtaattaatgtgtaattaatgctggaaaatacaacctgtcctgtagccattaaagtcccggtcaaaactacttgtcttgtaacaaatagtcaaatagtcccggtcaaaactactggcaactaccggtcttaggtttttggctatataaggagtcctcaagtatgttgtgaggcaccctttcatttggccattttcatgtttctgaagagagttgctctgaaa

SEQ ID NO: 12584 - DNA, 1173 bp, Glycine max
  Gm_smallRNAprecursor_5417
gttggagtgtattcatgatgttatacttcactacaaaccaaccaccatcctgaagacaagaactttttatgaattgattttgatagattcaaattcagtatctatcaaacatttcaaagaccaaaaagaccaaacattaaacacccactccacaatccaaatactaaaagttcttcaaccaagacactttggttcggacttgaacaaaggaaagagattttcagttccattagatccggtaggttatacctattgggattatgttgatgcttggactaaggtgttttggcaccaaaatacccgcttcaagcattcatggctgatatatttcaagaccaatacaatttacaattttcccaattggttttttgcaatgatgggacttctttggaccaatccctgagatattcccagaaagagtccaacaaggatttgctcaatttgagagacaatacaattcgcaggaatcatgaattctagcagatcttaaatacttttcaagctttgcactgtcatggatcttctcatggcaatatccttacaacaagactgaaaagacaaactaatatccatcactacaaagacacgcatttgtaaaatggtggacacaatttgactcatccaaagcagatccagaacaagtaaaagtctggttccaatcccatccagaattcctcaaagcagctgatccagaaacttctgtgtttttgaaccaaaagtctcatctggcagcatttttagcaggatcgaaatcaaaggaggtcctagctaaaaatctaaaggaagttctgcaaatgttacaacaggaagaaaaaggttcatcctcaaagaaggaagaaacaagttctgctgaagaagaagaagaagaccccttttaccaaaatgaagatgattgttttggtatctgtttagattaaatttaatttcggtcacaaaaccgtctgtttgtaattaatgtgtaattaatgctggaaaatacaacctgtcctgtagccattaaagtcccggtcaaaactacttgtcttgtaacaaatagtcaaatagtcccggtcaaaactactggcaactaccggtcttaggtttttggctatataaggagtcctcaagtatgttgtgaggcaccctttcatttggccattttcatgtttctgaagagagttgctctgaaacaag

SEQ ID NO: 12585 - DNA, 1078 bp, Glycine max
  Gm_smallRNAprecursor_5418
ttcaaattcagtatctatcaaacatttcaaagaccaaaaagaccaaacattaaacacccactccacaatccaaatactaaaagttcttcaaccaagacactttggttcggacttgaacaaaggaaagagattttcagttccattagatccggtaggttatacctattgggattatgttgatgcttggactaaggtgttttggcaccaaaatacccgcttcaagcattcatggctgatatatttcaagaccaatacaatttacaattttcccaattggttttttgcaatgatgggacttctttggaccaatccctgagatattcccagaaagagtccaacaaggatttgctcaatttgagagacaatacaattcgcaggaatcatgaattctagcagatcttaaatacttttcaagctttgcactgtcatggatcttctcatggcaatatccttacaacaagactgaaaagacaaactaatatccatcactacaaagacacgcatttgtaaaatggtggacacaatttgactcatccaaagcagatccagaacaagtaaaagtctggttccaatcccatccagaattcctcaaagcagctgatccagaaacttctgtgtttttgaaccaaaagtctcatctggcagcatttttagcaggatcgaaatcaaaggaggtcctagctaaaaatctaaaggaagttctgcaaatgttacaacaggaagaaaaaggttcatcctcaaagaaggaagaaacaagttctgctgaagaagaagaagaagaccccttttaccaaaatgaagatgattgttttggtatctgtttagattaaatttaatttcggtcacaaaaccgtctgtttgtaattaatgtgtaattaatgctggaaaatacaacctgtcctgtagccattaaagtcccggtcaaaactacttgtcttgtaacaaatagtcaaatagtcccggtcaaaactactggcaactaccggtcttaggtttttggctatataaggagtcctcaagtatgttgtgaggcaccctttcatttggccattttcatgtttctgaagagagttgctct

SEQ ID NO: 12586 - DNA, 1079 bp, Glycine max
  Gm_smallRNAprecursor_5419
ttcaaattcagtatctatcaaacatttcaaagaccaaaaagaccaaacattaaacacccactccacaatccaaatactaaaagttcttcaaccaagacactttggttcggacttgaacaaaggaaagagattttcagttccattagatccggtaggttatacctattgggattatgttgatgcttggactaaggtgttttggcaccaaaatacccgcttcaagcattcatggctgatatatttcaagaccaatacaatttacaattttcccaattggttttttgcaatgatgggacttctttggaccaatccctgagatattcccagaaagagtccaacaaggatttgctcaatttgagagacaatacaattcgcaggaatcatgaattctagcagatcttaaatacttttcaagctttgcactgtcatggatcttctcatggcaatatccttacaacaagactgaaaagacaaactaatatccatcactacaaagacacgcatttgtaaaatggtggacacaatttgactcatccaaagcagatccagaacaagtaaaagtctggttccaatcccatccagaattcctcaaagcagctgatccagaaacttctgtgtttttgaaccaaaagtctcatctggcagcatttttagcaggatcgaaatcaaaggaggtcctagctaaaaatctaaaggaagttctgcaaatgttacaacaggaagaaaaaggttcatcctcaaagaaggaagaaacaagttctgctgaagaagaagaagaagaccccttttaccaaaatgaagatgattgttttggtatctgtttagattaaatttaatttcggtcacaaaaccgtctgtttgtaattaatgtgtaattaatgctggaaaatacaacctgtcctgtagccattaaagtcccggtcaaaactacttgtcttgtaacaaatagtcaaatagtcccggtcaaaactactggcaactaccggtcttaggtttttggctatataaggagtcctcaagtatgttgtgaggcaccctttcatttggccattttcatgtttctgaagagagttgctctg

SEQ ID NO: 12587 - DNA, 1055 bp, Glycine max
  Gm_smallRNAprecursor_5420
cttcaaccaagacactttggttcggacttgaacaaaggaaagagattttcagttccattagatccggtaggttatacctattgggattatgttgatgcttggactaaggtgttttggcaccaaaatacccgcttcaagcattcatggctgatatatttcaagaccaatacaatttacaattttcccaattggttttttgcaatgatgggacttctttggaccaatccctgagatattcccagaaagagtccaacaaggatttgctcaatttgagagacaatacaattcgcaggaatcatgaattctagcagatcttaaatacttttcaagctttgcactgtcatggatcttctcatggcaatatccttacaacaagactgaaaagacaaactaatatccatcactacaaagacacgcatttgtaaaatggtggacacaatttgactcatccaaagcagatccagaacaagtaaaagtctggttccaatcccatccagaattcctcaaagcagctgatccagaaacttctgtgtttttgaaccaaaagtctcatctggcagcatttttagcaggatcgaaatcaaaggaggtcctagctaaaaatctaaaggaagttctgcaaatgttacaacaggaagaaaaaggttcatcctcaaagaaggaagaaacaagttctgctgaagaagaagaagaagaccccttttaccaaaatgaagatgattgttttggtatctgtttagattaaatttaatttcggtcacaaaaccgtctgtttgtaattaatgtgtaattaatgctggaaaatacaacctgtcctgtagccattaaagtcccggtcaaaactacttgtcttgtaacaaatagtcaaatagtcccggtcaaaactactggcaactaccggtcttaggtttttggctatataaggagtcctcaagtatgttgtgaggcaccctttcatttggccattttcatgtttctgaagagagttgctctgaaacaagatttttgtaagtgcttctttcaagtttcaataaatttctattttttcatccctc

SEQ ID NO: 12588 - DNA, 1215 bp, Glycine max
  Gm_smallRNAprecursor_5421
cttcaaccaagacactttggttcggacttgaacaaaggaaagagattttcagttccattagatccggtaggttatacctattgggattatgttgatgcttggactaaggtgttttggcaccaaaatacccgcttcaagcattcatggctgatatatttcaagaccaatacaatttacaattttcccaattggttttttgcaatgatgggacttctttggaccaatccctgagatattcccagaaagagtccaacaaggatttgctcaatttgagagacaatacaattcgcaggaatcatgaattctagcagatcttaaatacttttcaagctttgcactgtcatggatcttctcatggcaatatccttacaacaagactgaaaagacaaactaatatccatcactacaaagacacgcatttgtaaaatggtggacacaatttgactcatccaaagcagatccagaacaagtaaaagtctggttccaatcccatccagaattcctcaaagcagctgatccagaaacttctgtgtttttgaaccaaaagtctcatctggcagcatttttagcaggatcgaaatcaaaggaggtcctagctaaaaatctaaaggaagttctgcaaatgttacaacaggaagaaaaaggttcatcctcaaagaaggaagaaacaagttctgctgaagaagaagaagaagaccccttttaccaaaatgaagatgattgttttggtatctgtttagattaaatttaatttcggtcacaaaaccgtctgtttgtaattaatgtgtaattaatgctggaaaatacaacctgtcctgtagccattaaagtcccggtcaaaactacttgtcttgtaacaaatagtcaaatagtcccggtcaaaactactggcaactaccggtcttaggtttttggctatataaggagtcctcaagtatgttgtgaggcaccctttcatttggccattttcatgtttctgaagagagttgctctgaaacaagatttttgtaagtgcttctttcaagtttcaataaatttctattttttcatccctcttctctctctttaccaatcctgtgcggctctgccgccgcttcggtttctttgtttatgaaaacctgggatttgtaaaccggtctccggtgtgcccttgatatctgttttacaagtttatattttctatttcatttatcatactgcattcttacttcctat

SEQ ID NO: 12589 - DNA, 1216 bp, Glycine max
  Gm_smallRNAprecursor_5422
cttcaaccaagacactttggttcggacttgaacaaaggaaagagattttcagttccattagatccggtaggttatacctattgggattatgttgatgcttggactaaggtgttttggcaccaaaatacccgcttcaagcattcatggctgatatatttcaagaccaatacaatttacaattttcccaattggttttttgcaatgatgggacttctttggaccaatccctgagatattcccagaaagagtccaacaaggatttgctcaatttgagagacaatacaattcgcaggaatcatgaattctagcagatcttaaatacttttcaagctttgcactgtcatggatcttctcatggcaatatccttacaacaagactgaaaagacaaactaatatccatcactacaaagacacgcatttgtaaaatggtggacacaatttgactcatccaaagcagatccagaacaagtaaaagtctggttccaatcccatccagaattcctcaaagcagctgatccagaaacttctgtgtttttgaaccaaaagtctcatctggcagcatttttagcaggatcgaaatcaaaggaggtcctagctaaaaatctaaaggaagttctgcaaatgttacaacaggaagaaaaaggttcatcctcaaagaaggaagaaacaagttctgctgaagaagaagaagaagaccccttttaccaaaatgaagatgattgttttggtatctgtttagattaaatttaatttcggtcacaaaaccgtctgtttgtaattaatgtgtaattaatgctggaaaatacaacctgtcctgtagccattaaagtcccggtcaaaactacttgtcttgtaacaaatagtcaaatagtcccggtcaaaactactggcaactaccggtcttaggtttttggctatataaggagtcctcaagtatgttgtgaggcaccctttcatttggccattttcatgtttctgaagagagttgctctgaaacaagatttttgtaagtgcttctttcaagtttcaataaatttctattttttcatccctcttctctctctttaccaatcctgtgcggctctgccgccgcttcggtttctttgtttatgaaaacctgggatttgtaaaccggtctccggtgtgcccttgatatctgttttacaagtttatattttctatttcatttatcatactgcattcttacttcctatc

SEQ ID NO: 12590 - DNA, 1064 bp, Glycine max
  Gm_smallRNAprecursor_5423
tttcaagaccaatacaatttacaattttcccaattggttttttgcaatgatgggacttctttggaccaatccctgagatattcccagaaagagtccaacaaggatttgctcaatttgagagacaatacaattcgcaggaatcatgaattctagcagatcttaaatacttttcaagctttgcactgtcatggatcttctcatggcaatatccttacaacaagactgaaaagacaaactaatatccatcactacaaagacacgcatttgtaaaatggtggacacaatttgactcatccaaagcagatccagaacaagtaaaagtctggttccaatcccatccagaattcctcaaagcagctgatccagaaacttctgtgtttttgaaccaaaagtctcatctggcagcatttttagcaggatcgaaatcaaaggaggtcctagctaaaaatctaaaggaagttctgcaaatgttacaacaggaagaaaaaggttcatcctcaaagaaggaagaaacaagttctgctgaagaagaagaagaagaccccttttaccaaaatgaagatgattgttttggtatctgtttagattaaatttaatttcggtcacaaaaccgtctgtttgtaattaatgtgtaattaatgctggaaaatacaacctgtcctgtagccattaaagtcccggtcaaaactacttgtcttgtaacaaatagtcaaatagtcccggtcaaaactactggcaactaccggtcttaggtttttggctatataaggagtcctcaagtatgttgtgaggcaccctttcatttggccattttcatgtttctgaagagagttgctctgaaacaagatttttgtaagtgcttctttcaagtttcaataaatttctattttttcatccctcttctctctctttaccaatcctgtgcggctctgccgccgcttcggtttctttgtttatgaaaacctgggatttgtaaaccggtctccggtgtgcccttgatatctgttttacaagtttatattttctatttcatttatcatactgcattcttacttcctatctgt

SEQ ID NO: 12591 - DNA, 1059 bp, Glycine max
  Gm_smallRNAprecursor_5424
ttcaagaccaatacaatttacaattttcccaattggttttttgcaatgatgggacttctttggaccaatccctgagatattcccagaaagagtccaacaaggatttgctcaatttgagagacaatacaattcgcaggaatcatgaattctagcagatcttaaatacttttcaagctttgcactgtcatggatcttctcatggcaatatccttacaacaagactgaaaagacaaactaatatccatcactacaaagacacgcatttgtaaaatggtggacacaatttgactcatccaaagcagatccagaacaagtaaaagtctggttccaatcccatccagaattcctcaaagcagctgatccagaaacttctgtgtttttgaaccaaaagtctcatctggcagcatttttagcaggatcgaaatcaaaggaggtcctagctaaaaatctaaaggaagttctgcaaatgttacaacaggaagaaaaaggttcatcctcaaagaaggaagaaacaagttctgctgaagaagaagaagaagaccccttttaccaaaatgaagatgattgttttggtatctgtttagattaaatttaatttcggtcacaaaaccgtctgtttgtaattaatgtgtaattaatgctggaaaatacaacctgtcctgtagccattaaagtcccggtcaaaactacttgtcttgtaacaaatagtcaaatagtcccggtcaaaactactggcaactaccggtcttaggtttttggctatataaggagtcctcaagtatgttgtgaggcaccctttcatttggccattttcatgtttctgaagagagttgctctgaaacaagatttttgtaagtgcttctttcaagtttcaataaatttctattttttcatccctcttctctctctttaccaatcctgtgcggctctgccgccgcttcggtttctttgtttatgaaaacctgggatttgtaaaccggtctccggtgtgcccttgatatctgttttacaagtttatattttctatttcatttatcatactgcattcttacttcctat

SEQ ID NO: 12592 - DNA, 1060 bp, Glycine max
  Gm_smallRNAprecursor_5425
ttcaagaccaatacaatttacaattttcccaattggttttttgcaatgatgggacttctttggaccaatccctgagatattcccagaaagagtccaacaaggatttgctcaatttgagagacaatacaattcgcaggaatcatgaattctagcagatcttaaatacttttcaagctttgcactgtcatggatcttctcatggcaatatccttacaacaagactgaaaagacaaactaatatccatcactacaaagacacgcatttgtaaaatggtggacacaatttgactcatccaaagcagatccagaacaagtaaaagtctggttccaatcccatccagaattcctcaaagcagctgatccagaaacttctgtgtttttgaaccaaaagtctcatctggcagcatttttagcaggatcgaaatcaaaggaggtcctagctaaaaatctaaaggaagttctgcaaatgttacaacaggaagaaaaaggttcatcctcaaagaaggaagaaacaagttctgctgaagaagaagaagaagaccccttttaccaaaatgaagatgattgttttggtatctgtttagattaaatttaatttcggtcacaaaaccgtctgtttgtaattaatgtgtaattaatgctggaaaatacaacctgtcctgtagccattaaagtcccggtcaaaactacttgtcttgtaacaaatagtcaaatagtcccggtcaaaactactggcaactaccggtcttaggtttttggctatataaggagtcctcaagtatgttgtgaggcaccctttcatttggccattttcatgtttctgaagagagttgctctgaaacaagatttttgtaagtgcttctttcaagtttcaataaatttctattttttcatccctcttctctctctttaccaatcctgtgcggctctgccgccgcttcggtttctttgtttatgaaaacctgggatttgtaaaccggtctccggtgtgcccttgatatctgttttacaagtttatattttctatttcatttatcatactgcattcttacttcctatc

SEQ ID NO: 12593 - DNA, 1060 bp, Glycine max; identical to SEQ ID NO: 12592
  Gm_smallRNAprecursor_5426

SEQ ID NO: 12594 - DNA, 1063 bp, Glycine max
  Gm_smallRNAprecursor_5427
ttcaagaccaatacaatttacaattttcccaattggttttttgcaatgatgggacttctttggaccaatccctgagatattcccagaaagagtccaacaaggatttgctcaatttgagagacaatacaattcgcaggaatcatgaattctagcagatcttaaatacttttcaagctttgcactgtcatggatcttctcatggcaatatccttacaacaagactgaaaagacaaactaatatccatcactacaaagacacgcatttgtaaaatggtggacacaatttgactcatccaaagcagatccagaacaagtaaaagtctggttccaatcccatccagaattcctcaaagcagctgatccagaaacttctgtgtttttgaaccaaaagtctcatctggcagcatttttagcaggatcgaaatcaaaggaggtcctagctaaaaatctaaaggaagttctgcaaatgttacaacaggaagaaaaaggttcatcctcaaagaaggaagaaacaagttctgctgaagaagaagaagaagaccccttttaccaaaatgaagatgattgttttggtatctgtttagattaaatttaatttcggtcacaaaaccgtctgtttgtaattaatgtgtaattaatgctggaaaatacaacctgtcctgtagccattaaagtcccggtcaaaactacttgtcttgtaacaaatagtcaaatagtcccggtcaaaactactggcaactaccggtcttaggtttttggctatataaggagtcctcaagtatgttgtgaggcaccctttcatttggccattttcatgtttctgaagagagttgctctgaaacaagatttttgtaagtgcttctttcaagtttcaataaatttctattttttcatccctcttctctctctttaccaatcctgtgcggctctgccgccgcttcggtttctttgtttatgaaaacctgggatttgtaaaccggtctccggtgtgcccttgatatctgttttacaagtttatattttctatttcatttatcatactgcattcttacttcctatctgt

SEQ ID NO: 12595 - DNA, 1056 bp, Glycine max
  Gm_smallRNAprecursor_5428
aagaccaatacaatttacaattttcccaattggttttttgcaatgatgggacttctttggaccaatccctgagatattcccagaaagagtccaacaaggatttgctcaatttgagagacaatacaattcgcaggaatcatgaattctagcagatcttaaatacttttcaagctttgcactgtcatggatcttctcatggcaatatccttacaacaagactgaaaagacaaactaatatccatcactacaaagacacgcatttgtaaaatggtggacacaatttgactcatccaaagcagatccagaacaagtaaaagtctggttccaatcccatccagaattcctcaaagcagctgatccagaaacttctgtgtttttgaaccaaaagtctcatctggcagcatttttagcaggatcgaaatcaaaggaggtcctagctaaaaatctaaaggaagttctgcaaatgttacaacaggaagaaaaaggttcatcctcaaagaaggaagaaacaagttctgctgaagaagaagaagaagaccccttttaccaaaatgaagatgattgttttggtatctgtttagattaaatttaatttcggtcacaaaaccgtctgtttgtaattaatgtgtaattaatgctggaaaatacaacctgtcctgtagccattaaagtcccggtcaaaactacttgtcttgtaacaaatagtcaaatagtcccggtcaaaactactggcaactaccggtcttaggtttttggctatataaggagtcctcaagtatgttgtgaggcaccctttcatttggccattttcatgtttctgaagagagttgctctgaaacaagatttttgtaagtgcttctttcaagtttcaataaatttctattttttcatccctcttctctctctttaccaatcctgtgcggctctgccgccgcttcggtttctttgtttatgaaaacctgggatttgtaaaccggtctccggtgtgcccttgatatctgttttacaagtttatattttctatttcatttatcatactgcattcttacttcctat

SEQ ID NO: 12596 - DNA, 1056 bp, Glycine max; identical to SEQ ID NO: 12595
  Gm_smallRNAprecursor_5429

SEQ ID NO: 12597 - DNA, 1057 bp, Glycine max
  Gm_smallRNAprecursor_5430
aagaccaatacaatttacaattttcccaattggttttttgcaatgatgggacttctttggaccaatccctgagatattcccagaaagagtccaacaaggatttgctcaatttgagagacaatacaattcgcaggaatcatgaattctagcagatcttaaatacttttcaagctttgcactgtcatggatcttctcatggcaatatccttacaacaagactgaaaagacaaactaatatccatcactacaaagacacgcatttgtaaaatggtggacacaatttgactcatccaaagcagatccagaacaagtaaaagtctggttccaatcccatccagaattcctcaaagcagctgatccagaaacttctgtgtttttgaaccaaaagtctcatctggcagcatttttagcaggatcgaaatcaaaggaggtcctagctaaaaatctaaaggaagttctgcaaatgttacaacaggaagaaaaaggttcatcctcaaagaaggaagaaacaagttctgctgaagaagaagaagaagaccccttttaccaaaatgaagatgattgttttggtatctgtttagattaaatttaatttcggtcacaaaaccgtctgtttgtaattaatgtgtaattaatgctggaaaatacaacctgtcctgtagccattaaagtcccggtcaaaactacttgtcttgtaacaaatagtcaaatagtcccggtcaaaactactggcaactaccggtcttaggtttttggctatataaggagtcctcaagtatgttgtgaggcaccctttcatttggccattttcatgtttctgaagagagttgctctgaaacaagatttttgtaagtgcttctttcaagtttcaataaatttctattttttcatccctcttctctctctttaccaatcctgtgcggctctgccgccgcttcggtttctttgtttatgaaaacctgggatttgtaaaccggtctccggtgtgcccttgatatctgttttacaagtttatattttctatttcatttatcatactgcattcttacttcctatc

SEQ ID NO: 12598 - DNA, 1057 bp, Glycine max; identical to SEQ ID NO: 12597
  Gm_smallRNAprecursor_5431

SEQ ID NO: 12599 - DNA, 1057 bp, Glycine max; identical to SEQ ID NO: 12597
  Gm_smallRNAprecursor_5432

SEQ ID NO: 12600 - DNA, 1057 bp, Glycine max; identical to SEQ ID NO: 12597
  Gm_smallRNAprecursor_5433

SEQ ID NO: 12601 - DNA, 1119 bp, Glycine max
  Gm_smallRNAprecursor_5434
acgtttcccctcatcaaagcattgtacccatttttgtttgggtaattgatcaagccattcagctgcacttggcttattcgcacgaatatccctaagatgtcgccagtgcatcttctccgtgtatgcgtaccttgtaaatatttaatcaatgtattatgttataaaatttgattgaaagaaaattataacgaataaataaaatagattctcactagccaacataagtggtttctttaaatgtttgcagtttgagttacgacgaagaaagttttgtgcaatgtggcgcaggcaaaagaaatgggatgtgtcctggacccataagttacttgggttgttgtaggcacttataattgaggggtgtcggtctgaaataagagaaatgttaatttgcggagtaacatgtcttttcaaattctttagaaaaaaccctcaagctgaagttgtctccccttctacaatgacataggcaatcgggaagatatggttagctccatcttgtgcggtagctatcaacagtgtgccagtatactttccgtaaagccatgtaccatctacttgtataatgggtttgcaatatgcaaaaccattaatgcatggaccaaatgaccaaaagacacgtttaaacaatcttttgcccggtactatttctcccctctcataagtcccgggaacacaagattgcaaagctccgaaaagttttggcagtttgacatatgatttcaatacaccaaattcagtggcatcatatttagctactttacaacaattcgatgcaccgcattcgtttggagaacaaggtcaaagttcttcagctgcaacaaccaacattgaaaatactaacatagaacaacaacatgatcatgacgtggaagaaccagacatactgcaaagaagaaatccgcgacgtaatcggcgtccaccaccttgtgggactagtcatcgtcttggtcattgaagtataaaatgttgtgataatgggatcaaatatgtttaagtacccctgtaacggcatcatcaaatatgatttggacccttgcaactatggttaagtacccatgttctgcatttctttaaaattatgtcgaacacattaatgatctttgtgactcattttttcta

SEQ ID NO: 12602 - DNA, 1173 bp, Glycine max
  Gm_smallRNAprecursor_5435
acgtttcccctcatcaaagcattgtacccatttttgtttgggtaattgatcaagccattcagctgcacttggcttattcgcacgaatatccctaagatgtcgccagtgcatcttctccgtgtatgcgtaccttgtaaatatttaatcaatgtattatgttataaaatttgattgaaagaaaattataacgaataaataaaatagattctcactagccaacataagtggtttctttaaatgtttgcagtttgagttacgacgaagaaagttttgtgcaatgtggcgcaggcaaaagaaatgggatgtgtcctggacccataagttacttgggttgttgtaggcacttataattgaggggtgtcggtctgaaataagagaaatgttaatttgcggagtaacatgtcttttcaaattctttagaaaaaaccctcaagctgaagttgtctccccttctacaatgacataggcaatcgggaagatatggttagctccatcttgtgcggtagctatcaacagtgtgccagtatactttccgtaaagccatgtaccatctacttgtataatgggtttgcaatatgcaaaaccattaatgcatggaccaaatgaccaaaagacacgtttaaacaatcttttgcccggtactatttctcccctctcataagtcccgggaacacaagattgcaaagctccgaaaagttttggcagtttgacatatgatttcaatacaccaaattcagtggcatcatatttagctactttacaacaattcgatgcaccgcattcgtttggagaacaaggtcaaagttcttcagctgcaacaaccaacattgaaaatactaacatagaacaacaacatgatcatgacgtggaagaaccagacatactgcaaagaagaaatccgcgacgtaatcggcgtccaccaccttgtgggactagtcatcgtcttggtcattgaagtataaaatgttgtgataatgggatcaaatatgtttaagtacccctgtaacggcatcatcaaatatgatttggacccttgcaactatggttaagtacccatgttctgcatttctttaaaattatgtcgaacacattaatgatctttgtgactcattttttctatagtttgaacgtcaaagaatccaaaaaaaattatttcgtgcaccagttccatcg

SEQ ID NO: 12603 - DNA, 1048 bp, Glycine max
  Gm_smallRNAprecursor_5436
gtgtatgcgtaccttgtaaatatttaatcaatgtattatgttataaaatttgattgaaagaaaattataacgaataaataaaatagattctcactagccaacataagtggtttctttaaatgtttgcagtttgagttacgacgaagaaagttttgtgcaatgtggcgcaggcaaaagaaatgggatgtgtcctggacccataagttacttgggttgttgtaggcacttataattgaggggtgtcggtctgaaataagagaaatgttaatttgcggagtaacatgtcttttcaaattctttagaaaaaaccctcaagctgaagttgtctccccttctacaatgacataggcaatcgggaagatatggttagctccatcttgtgcggtagctatcaacagtgtgccagtatactttccgtaaagccatgtaccatctacttgtataatgggtttgcaatatgcaaaaccattaatgcatggaccaaatgaccaaaagacacgtttaaacaatcttttgcccggtactatttctcccctctcataagtcccgggaacacaagattgcaaagctccgaaaagttttggcagtttgacatatgatttcaatacaccaaattcagtggcatcatatttagctactttacaacaattcgatgcaccgcattcgtttggagaacaaggtcaaagttcttcagctgcaacaaccaacattgaaaatactaacatagaacaacaacatgatcatgacgtggaagaaccagacatactgcaaagaagaaatccgcgacgtaatcggcgtccaccaccttgtgggactagtcatcgtcttggtcattgaagtataaaatgttgtgataatgggatcaaatatgtttaagtacccctgtaacggcatcatcaaatatgatttggacccttgcaactatggttaagtacccatgttctgcatttctttaaaattatgtcgaacacattaatgatctttgtgactcattttttctatagtttgaacgtcaaagaatccaaaaaaaattatttcgtgcaccagt

SEQ ID NO: 12604 - DNA, 1050 bp, Glycine max
  Gm_smallRNAprecursor_5437
gtgtatgcgtaccttgtaaatatttaatcaatgtattatgttataaaatttgattgaaagaaaattataacgaataaataaaatagattctcactagccaacataagtggtttctttaaatgtttgcagtttgagttacgacgaagaaagttttgtgcaatgtggcgcaggcaaaagaaatgggatgtgtcctggacccataagttacttgggttgttgtaggcacttataattgaggggtgtcggtctgaaataagagaaatgttaatttgcggagtaacatgtcttttcaaattctttagaaaaaaccctcaagctgaagttgtctccccttctacaatgacataggcaatcgggaagatatggttagctccatcttgtgcggtagctatcaacagtgtgccagtatactttccgtaaagccatgtaccatctacttgtataatgggtttgcaatatgcaaaaccattaatgcatggaccaaatgaccaaaagacacgtttaaacaatcttttgcccggtactatttctcccctctcataagtcccgggaacacaagattgcaaagctccgaaaagttttggcagtttgacatatgatttcaatacaccaaattcagtggcatcatatttagctactttacaacaattcgatgcaccgcattcgtttggagaacaaggtcaaagttcttcagctgcaacaaccaacattgaaaatactaacatagaacaacaacatgatcatgacgtggaagaaccagacatactgcaaagaagaaatccgcgacgtaatcggcgtccaccaccttgtgggactagtcatcgtcttggtcattgaagtataaaatgttgtgataatgggatcaaatatgtttaagtacccctgtaacggcatcatcaaatatgatttggacccttgcaactatggttaagtacccatgttctgcatttctttaaaattatgtcgaacacattaatgatctttgtgactcattttttctatagtttgaacgtcaaagaatccaaaaaaaattatttcgtgcaccagttc

SEQ ID NO: 12605 - DNA, 1051 bp, Glycine max
  Gm_smallRNAprecursor_5438
gtgtatgcgtaccttgtaaatatttaatcaatgtattatgttataaaatttgattgaaagaaaattataacgaataaataaaatagattctcactagccaacataagtggtttctttaaatgtttgcagtttgagttacgacgaagaaagttttgtgcaatgtggcgcaggcaaaagaaatgggatgtgtcctggacccataagttacttgggttgttgtaggcacttataattgaggggtgtcggtctgaaataagagaaatgttaatttgcggagtaacatgtcttttcaaattctttagaaaaaaccctcaagctgaagttgtctccccttctacaatgacataggcaatcgggaagatatggttagctccatcttgtgcggtagctatcaacagtgtgccagtatactttccgtaaagccatgtaccatctacttgtataatgggtttgcaatatgcaaaaccattaatgcatggaccaaatgaccaaaagacacgtttaaacaatcttttgcccggtactatttctcccctctcataagtcccgggaacacaagattgcaaagctccgaaaagttttggcagtttgacatatgatttcaatacaccaaattcagtggcatcatatttagctactttacaacaattcgatgcaccgcattcgtttggagaacaaggtcaaagttcttcagctgcaacaaccaacattgaaaatactaacatagaacaacaacatgatcatgacgtggaagaaccagacatactgcaaagaagaaatccgcgacgtaatcggcgtccaccaccttgtgggactagtcatcgtcttggtcattgaagtataaaatgttgtgataatgggatcaaatatgtttaagtacccctgtaacggcatcatcaaatatgatttggacccttgcaactatggttaagtacccatgttctgcatttctttaaaattatgtcgaacacattaatgatctttgtgactcattttttctatagtttgaacgtcaaagaatccaaaaaaaattatttcgtgcaccagttcc

SEQ ID NO: 12606 - DNA, 1036 bp, Glycine max
  Gm_smallRNAprecursor_5439
cgtaccttgtaaatatttaatcaatgtattatgttataaaatttgattgaaagaaaattataacgaataaataaaatagattctcactagccaacataagtggtttctttaaatgtttgcagtttgagttacgacgaagaaagttttgtgcaatgtggcgcaggcaaaagaaatgggatgtgtcctggacccataagttacttgggttgttgtaggcacttataattgaggggtgtcggtctgaaataagagaaatgttaatttgcggagtaacatgtcttttcaaattctttagaaaaaaccctcaagctgaagttgtctccccttctacaatgacataggcaatcgggaagatatggttagctccatcttgtgcggtagctatcaacagtgtgccagtatactttccgtaaagccatgtaccatctacttgtataatgggtttgcaatatgcaaaaccattaatgcatggaccaaatgaccaaaagacacgtttaaacaatcttttgcccggtactatttctcccctctcataagtcccgggaacacaagattgcaaagctccgaaaagttttggcagtttgacatatgatttcaatacaccaaattcagtggcatcatatttagctactttacaacaattcgatgcaccgcattcgtttggagaacaaggtcaaagttcttcagctgcaacaaccaacattgaaaatactaacatagaacaacaacatgatcatgacgtggaagaaccagacatactgcaaagaagaaatccgcgacgtaatcggcgtccaccaccttgtgggactagtcatcgtcttggtcattgaagtataaaatgttgtgataatgggatcaaatatgtttaagtacccctgtaacggcatcatcaaatatgatttggacccttgcaactatggttaagtacccatgttctgcatttctttaaaattatgtcgaacacattaatgatctttgtgactcattttttctatagtttgaacgtcaaagaatccaaaaaaaattatttcgtgca

SEQ ID NO: 12607 - DNA, 1038 bp, Glycine max
  Gm_smallRNAprecursor_5440
cgtaccttgtaaatatttaatcaatgtattatgttataaaatttgattgaaagaaaattataacgaataaataaaatagattctcactagccaacataagtggtttctttaaatgtttgcagtttgagttacgacgaagaaagttttgtgcaatgtggcgcaggcaaaagaaatgggatgtgtcctggacccataagttacttgggttgttgtaggcacttataattgaggggtgtcggtctgaaataagagaaatgttaatttgcggagtaacatgtcttttcaaattctttagaaaaaaccctcaagctgaagttgtctccccttctacaatgacataggcaatcgggaagatatggttagctccatcttgtgcggtagctatcaacagtgtgccagtatactttccgtaaagccatgtaccatctacttgtataatgggtttgcaatatgcaaaaccattaatgcatggaccaaatgaccaaaagacacgtttaaacaatcttttgcccggtactatttctcccctctcataagtcccgggaacacaagattgcaaagctccgaaaagttttggcagtttgacatatgatttcaatacaccaaattcagtggcatcatatttagctactttacaacaattcgatgcaccgcattcgtttggagaacaaggtcaaagttcttcagctgcaacaaccaacattgaaaatactaacatagaacaacaacatgatcatgacgtggaagaaccagacatactgcaaagaagaaatccgcgacgtaatcggcgtccaccaccttgtgggactagtcatcgtcttggtcattgaagtataaaatgttgtgataatgggatcaaatatgtttaagtacccctgtaacggcatcatcaaatatgatttggacccttgcaactatggttaagtacccatgttctgcatttctttaaaattatgtcgaacacattaatgatctttgtgactcattttttctatagtttgaacgtcaaagaatccaaaaaaaattatttcgtgcacc

SEQ ID NO: 12608 - DNA, 1137 bp, Glycine max
  Gm_smallRNAprecursor_5441
ggttttccctaggcagaacttctctctctaaaacctggttttgagactatctgaaagggtgcctcacaaagggaacgaggactcctttaaatagacccaatgttttactgtttcaacagtatcggtaatgtttaccagaactgttacaaaaactttttcaaattacattattatcgggaaccgaataattagttacaataattcatgattactacaactaactaatcatcgtctaacgatataccaaaatagtcatcctcattctagtagaatggatcatcttcttggtcatcattattctcggatgattcggcttccttcttggggggttcttcttcttcttcttcctgttgaagtagttggagaacttccttaagattctgagcaagactctttttagattttgagcttgctaagaatgctgcaagttgagacttttgattcagaaacaaagatgtctctggatcagcaggcttgagaaactcagggttgctctgaaaccagttcttgacttgttctggagtagcctttgaggtatcaaattgtgaccaccactttacaaaggcatgtctctgcaatgatggatattgtttgttgttttcggtttttccatatctgtattgccatgaaaaaatccatgacaaggcaaaactggaaaagtactttaaatctgccagaattcttgtttccttgatattgaagagcttggtgaattgttggaatccctgctggacttcttctggaaatatctgcgaaattggtccgaagtagttccaccattggaggaaccaatttggaaaattatacacagtgttattcttgaagtaaattagccacgaatgcttaaatttactattttgatgccagaacacattggtccaggcgtcaatgtagtcccaataattatatcctgcaggatcaaaaggtgcaggaaattttttgggttggtttaagtttgagccataatgtcgtggctacataacctttaggatttggattgtggtatgggtatttagatttggatctttggggtctttgaagtgtttaatagatactgagtttgtatctattagaatgaattcgtagaattttctggttttatttgtggccgttggcctataatggaatcctgggggg

SEQ ID NO: 12609 - DNA, 1137 bp, Glycine max; identical to SEQ ID NO: 12608
  Gm_smallRNAprecursor_5442

SEQ ID NO: 12610 - DNA, 1033 bp, Glycine max
  Gm_smallRNAprecursor_5443
actgtttcaacagtatcggtaatgtttaccagaactgttacaaaaactttttcaaattacattattatcgggaaccgaataattagttacaataattcatgattactacaactaactaatcatcgtctaacgatataccaaaatagtcatcctcattctagtagaatggatcatcttcttggtcatcattattctcggatgattcggcttccttcttggggggttcttcttcttcttcttcctgttgaagtagttggagaacttccttaagattctgagcaagactctttttagattttgagcttgctaagaatgctgcaagttgagacttttgattcagaaacaaagatgtctctggatcagcaggcttgagaaactcagggttgctctgaaaccagttcttgacttgttctggagtagcctttgaggtatcaaattgtgaccaccactttacaaaggcatgtctctgcaatgatggatattgtttgttgttttcggtttttccatatctgtattgccatgaaaaaatccatgacaaggcaaaactggaaaagtactttaaatctgccagaattcttgtttccttgatattgaagagcttggtgaattgttggaatccctgctggacttcttctggaaatatctgcgaaattggtccgaagtagttccaccattggaggaaccaatttggaaaattatacacagtgttattcttgaagtaaattagccacgaatgcttaaatttactattttgatgccagaacacattggtccaggcgtcaatgtagtcccaataattatatcctgcaggatcaaaaggtgcaggaaattttttgggttggtttaagtttgagccataatgtcgtggctacataacctttaggatttggattgtggtatgggtatttagatttggatctttggggtctttgaagtgtttaatagatactgagtttgtatctattagaatgaattcgtagaattttctggttttatttgtggccgttggcctataatggaatcctggggggaa

SEQ ID NO: 12611 - DNA, 1105 bp, Glycine max
  Gm_smallRNAprecursor_5444
tcgagaatgtttctgtccatcagactcactgttttgttcggataacaattaaaatatactggaccttgtcctaggcttgtttcgactgttccaattaaggagtcttcaaatttattatgcctaatatctcttagacacattaacactactgcatctatgcccatgtctattaagggcttgatggctacttgtacacagccgatgtgtaaatatttatactttcgactatgttcataaattgagttttttgaaagtaaatggaattcttcccctatgtcttgccctagaggaatattgttttctactgttttgattatgtaatcaaagttgtgtttatctttaattgtttcaggaacgtgtagttgatcctgagggatttctgggatgttccagtcatccatattttggttaatatctttgaatcggacttcctcatcgaagagattgtgtttaggggcgacctcttgggtctggttatcttgatcgtttaataagtttgaatttctggaagaagttgatgaagaggaattagaccgaaaggaaatacgcgaaaaagaacgcagtaatctagacatgattataaaatcctccaatatctttgccctcatttggttccatagaaatatttccgtaagtaaatatgtaacaaaattttttggatctgaattatttttaagaaaaactttttttttaaaaaaaaaaaacagtttgaacggcaaccctatagccaccagtacattatgtcttgatattttggttaaacagtacaccttagccttactgccctttatccaccacgggtcttaatgctacagtaccattcaactaaaatattagactgttgtacttccaagaagtattgttcaaacatctactatacaaattaaaatatgactcatactatataagatgtcagatccataaactttgttatcatacgcccttacggactgtattcctacttccccatcaggctctgatatatatatatatatatatatatatatatatatatatatatatatatatatatatatatatatatatattatgaagactagtgaggatcatatttattttttaaaaagacttggtattggaagaa

SEQ ID NO: 12612 - DNA, 1201 bp, Glycine max
  Gm_smallRNAprecursor_5445
gaaagatgattacctgatatgagaggaacggaagggcctcaagccctgtttagcattgctattccaatggatgccattcagctaggtggattaaacggctacagaaattaaagccactacgattcacacccaacattgcgataactccagtttataacaacggttgcaggctcagcccacaactcaccaccaaaaattcgttgaccttttgcataaacagggacaggaaaaaaaatttaaaattttaaaaaataaaaaaataaaagctacagattaataaaaataatattgaatattgggaaaatagaaataaaagagagaacagaagcttcggacgccatcaaagagaaacgtcaacgacagagtccattattataattaaattataataaataacaaaatgttcaacaatttacctctctgtctctctctctctttttccttggggaaaatgacaaaatggaagaaccctatctctgcggctccgaaagcctgaaattccaggacgaatcgacggcttttagaagtcagactcggaatcggaaccctaaatccaaaattcaatggagaaagctgcaaatgccacagaagcaagccgagggaaacgaaaaccctattacaattgtgattgttaatgatgaggggaatgcggtgaaatgggggggggggggggatcgtaatgcagaaaaaccctaggcggaagaaatcgatcgatcgggaagacagagagagaacaaaaaaatgattaaatacagcgaagctaaaaagaggggcagaatagcaattaaattttttgttcaatttttaggaggaatccaacgacggtaacaggttggccacgttggggatcactcattttatcacactataaatacaatttataactgtttctactttctagcataggattacaaccatatctcattattagacacgccatgtaagcatttttatagcagttcaaattaatatttataatttataatacatatacacaacaatctattgaagtactttttttttattaatttaatgaaagacaacttttgttttcttaatgttttctggttcaatgacaaagaaataaacgttttttgttcttagtgtgactagtaacctttttaagtttttttattgtatcaaactcaaaatttagttgaaattgacaataagagattatttttatctaataatattggag

SEQ ID NO: 12613 - DNA, 1077 bp, Glycine max
  Gm_smallRNAprecursor_5446
gtcactctcgcttagccacagtagtgtttcagctaagcgagaggatcttgcttagccattgttagtgtttttttgttgtcgcactaagcgcacgtctgttatttctgtaggcgcgctaaggatgtgagaacaaggtagcgggtgcattgtctagaagaatgacattcagccatttctatgatcagattttttgatgagaaagagttggagtctgaagttttggctgacccgaaactgaagaaaattatgcaggatttattggtaaatggatctgcacatccaggatactccttacaggataaaaaattatggtataaaggcaagttagtgatttctaaaacgtctcccaaagtgcaaacacttatgacaaagtatcacagctctgttgtagggggtcattcagggtttttcaaaacatttaaaaggatagcaatgttaatgacggatggcggttcatggcggaaagtcaaaaatccgccataaaaatatggcggatggcatagcggaaaatggcggatgtcatggcggacaaaaaaaaaaaaaacatatatataaactcattgaaattgaaaaaaacaaaggattgcattcaaataaactaaaaaagtttgataaattcatacaataatcaagtaccaacaccaaataaactcattaaaaagaggactgaacagaaaaaaaaaattgtggtgtcaaatagaaaaaaaaattaaaaatgggactgtcgaaagtaaaagggggtgtcaaatagaaaaacagaaaaaaaagctgcagacagcaaaaaggggtgtcaagcagcaaaaataaaaaaaaaggctttggcccacccaccaatataagtcacggtcgcgattctggctaggttgtcttctccgttcgcattgctgtcgttcacgccatgctcgtcgccgtcgttcgcgttgccgtgggtggtcgctgccgtgctcgtcgccaccgtgggtcgtcgctggttgcaggtgtgggtggttccgaggtcgtgactggttgcacgggtcgtgggtcgtcgcgctgtgttggagcttcgaggtcgagggttgcagctgcatccgcctcgcc

SEQ ID NO: 12614 - DNA, 1115 bp, Glycine max
  Gm_smallRNAprecursor_5447
ctattctttgataaaaattaaatattaatctcttgattcaaattcatttaaggaattatttttttataagtataaataaaaaattaaactcataatcatatataaatataaagtaacaaagttatttaccaattctctaaaatgcccataagtttataaattttttattatttctgcctcacatttagttttacaaagatgactaaaatacactcaaaacataatgtggaaaaaaaagaagataaaataaggcacaagcgtgtgaatattatcattatttcatcggagggaagggcatatgccatctatctagatagatcatgcctctacaagaattggtccaaaatatttgagtgaatcactctcagtcctctctctcataatcccttttcaacaggaatttcctattataaaaatgttggctgcgagcaaacttcttactatattatgtagcagcaggtcattattatatacgttgatgccgatatgttgcctttatctgcatttgcacctgcactttaattacttggtttctctgtgacataaataaatataaatatgtcaggtaagagaaatatattatatataatatgggaatagaggtaccgagaacgaggtgcaggtgcatctgcaggtgaatgtcatattggattattggctatggtttaactttactcaagcttttggtttgtattcagtggctggcttgttttgttgcagctgcttgtgcttccaagtattttttatcataaagggtcagatatatatatatatatcattgcctctttctttgaatatacacggtccattttgcttattgagctcttctatctccttctaaatgtactgcaacatgtgctacttaatttttttgttatatatacacacgcacacagacacagttcctatatatgcagatctagatccacgtacggaggtggaggcaatcgaatccataacgttcaaatttttacaaaggtagaatgagcttctaactcagctagaacagtagccttagtcagaatatattaatgtctgaatgttctgttaacctacttgcttcctttcccctattaattaactactgtttccagaattaccaagaattaaagaat

SEQ ID NO: 12615 - DNA, 1079 bp, Glycine max
  Gm_smallRNAprecursor_5448
agatagaagaaccaagaactatcatgatactaatctatcatgaaaactctagaaagacctaaagtaatgtagaaacattcaccaccattgagaggttggtgacttgagtctataaataggcaattggtatgttgtaattaatcatccaagaaatcaatgacatagccttctttttaaaacaattctctaaaactatcaactatcgtctaataaactaccaacagtggtatcagagctatgttcagtcatacattgagcgtagttatattacctacctctattccaaaatcctcccaactacttcaaaaatttcctttatactattaacccactacaatagtattttttttaagctaaggataacactactcaatcgtcaactatttctgtccctatcttcaatggtgaaaattatgatttctggcgtgttaaaatagaaacatatttttcatctcaagatttatgggacatagtagaagaaggcttcactgttcccgcgaatacttcagctcttaatgcatctcaagaaaaagagttgaagaaaaataaatagaaaaattcaaaggcgttgttcaccttgcaacaagcggtgactgatccaattttcccaagaattatgggagctaagactgccaaagaagcgtggaacacattgcaggaggagtttcaaggaagtgttaaggtacgtgccattaaacttcaatctctaagaagagattttgaactattgaagataaaggagtctgagacagttaaaaattactattctaaagttaaagaaatagttaatcaaatgagagcttttggggaagatattcttgacaagaaaattattgagaaaattctaattactatgccccaaaagtttgacccaatcgtgacaacgattgaggaaaccaaagatttgtccactctatcagagacagaacttgtgggctctcttaaagcatatgagcaaagactgtataaacataaagaagatacacttgaaaatgccttctagtcaaagtttaaattttagccccaaaacaaagaaaatggaggaaagaaaaattatggagaaacttccagaagaagag

SEQ ID NO: 12616 - DNA, 1079 bp, Glycine max
  Gm_smallRNAprecursor_5449
tataagatagaagaatctagaactatcatgatactaatctatcatgaaaactctagaaagacctaaagtaatgtagaaacattcaccaccattgagaggtttgagcctataaataggcaattggtatgttgtaattgttaatccaagaaatcaatgacataaccttctttctaaaataattctctaaaactatcaactatcatctaaccaactaccaatagtggtatcagagctacgctcggtcatacagtgggcgtagttatattacctacctaccattccaaaatcctcccaactacttcaaaaatttcttttgtactattaacccactccaataatattttttttctaagctatggataacattactcaatcgtcaactatttttgtccctatcttcaatggtgaaaattatggtttctagcgtgttaaaatggaaacatatttttcatctcaagatttatgggacatagtagaagaaggcttcaccgttcccacggatacttcagctcttaatgcatctcaagaaaaagagttgaagaaaaataaacagaaaaattcaaaggcgttgttcaccttgcaacaagcggtgactgatccaattttcccaagaattatgggcctaagactgccaaagaagcgttgaacacattgcaggaggagtttcaaggaagtgttaaggtacgtgccgttaaacttcaatctctaagaagagattttgaactattgaagatgaaggagtctgagatagttaaagattactattctaaagttaaagaaatagttaatcaaatgagagcttttgggaaagatattattaacaagaaaattgttgagaaaattctaattactatgccccaaaagtttgacccaatcgtgataacgattgaggaaaccaaagatctgtccactctatcagagacagatcttgtgggctctcttgaagcatatgagcaaagactgtatagatataaagaagatatacttgaaaatgccttctagtcaaagtttaaatttcatccccaaaacaaagaaaatggaggaaagaaaaattatggagaaacttctagaagaagaga

SEQ ID NO: 12617 - DNA, 1181 bp, Glycine max
  Gm_smallRNAprecursor_5450
ctatattgatcgaccccattttgttcatcagcaacataatgtacaaccaccagtcggtgtactcgaggttggcatgatcttcgatgacaaatcacaatgtattcgagcaatcaaagaatacaacatcagaaatcattttgattgcagaacaatttactctgaccaaagaaggctacacttcgtctgcaagttacatgaaaatggttgtacatggagcttgggcgcatgcaattcaaagaggcataacaaatggattatcaagagtatcagaggtcatcacacttgtctcgtgccgatgcttagacaaaatcatcgccaactcgacaaacacgtcatagcacagatcatccaaccaattgtcaaaacaaacccaactgtctccatcaagacattgattgcagagatcaaaacgttcatgaattataccccatcctacaagaagacatggttagcaaagcaaaaagaattggagatgattcatggaaactgggaagaatcatatgccaaactgccaaaacttttcggagctttgcaatcttgtgttcccgggactgtggtcgctgctcaaacagaatccttgtatgaggggggagaaatagtaccgggcaaaagattgtttaaacgtgtcttttgatcatttggtccatgcatggttttgcatattgcaaacccattgtacaagtagatggtacatggctttacggaaagtatactggcacactgttgatagctaccgcacaagatggagctaaccatatcttcccgattgcctatgccattgtagaaggggagacaacttcagcttggggttttttctaaagaatttgagaagacatgttactccgcaaattaacatttctcttatttcagaccgacacccctcaattataagtgcctacaacaacccaagtaacttatgggtccaggacacatcccatttcttttgcctgcgccacattgcacaaaactttcttcgtggtaactcaaactgcaaacatttaaagaaaccacttatgttggctggtgagaatctattttatttattcgttataattttctttcaatcaaattttataacataatacattgattaaatatttacagggtacgcatacacggagaagatgcactggcgacatcttggggatattcgtgcgaataagccaagtgcagctgaatgg

SEQ ID NO: 12618 - DNA, 1051 bp, Glycine max
  Gm_smallRNAprecursor_5451
actggcgacatcttggggatattcgtgcgaataagccaagtgcagctgaatggcttgatcaattacccaaacaaaaatgggtacaatgctttgatgaggggaaacgttggggacatatgactaccaatttttcggagtctgttaattccatgttaaaaaacacaagacatttaccggtgtcatcattggttgaggagacctatttcaagaccgcactactctttgctaatagaggtcgacaaactcaggcaatgatcaactccggctcacagtattctgaagtcgtcttcgatgcaatcaatagtggtcaacaagaatctaatacacacattgtaaatgaattcgacagacacaatcacacttttattataaccgagactcaatccccacttgaaacacccagatcacctggaaggtttagagtaatgttacaatcccaaaagtgtgattgtggtgaatttcaggctaaacatttaccgtgttctcacatcatggctgcctgtaaatctgtcaatgttgatcccatgacctatgtgccgatgatattcactttacaacacattttgcacatctacgacaactcctttggtttatcgccacacgaatcaatgtggcaaaaatatgaaggagatcagtggagtcctgatccaaggagaaagaggactgcaaagggtcgtccagtttcaactcgcattcctactgagatggacgaagacgaaaatgaacgagcaagtagaaaaaaatgtggactttgccggcaacatggtcatagcataaataattgtcctaatgtatcctcatcttagtttttccatagacaaatgtcattgtttaaatattttattgatgacgtagtataatgttcttatataaataaattgttaaaagctttagttttatcatttttaattaaatctaaaaacataaacaaactaattatatttagtaaaatagttaaattaaaaattttaaaattcagattattatacaaaataaatatttactaaaataaatatattattatacaaaattcagattttaaaatatatat

SEQ ID NO: 12619 - DNA, 1052 bp, Glycine max
  Gm_smallRNAprecursor_5452
actggcgacatcttggggatattcgtgcgaataagccaagtgcagctgaatggcttgatcaattacccaaacaaaaatgggtacaatgctttgatgaggggaaacgttggggacatatgactaccaatttttcggagtctgttaattccatgttaaaaaacacaagacatttaccggtgtcatcattggttgaggagacctatttcaagaccgcactactctttgctaatagaggtcgacaaactcaggcaatgatcaactccggctcacagtattctgaagtcgtcttcgatgcaatcaatagtggtcaacaagaatctaatacacacattgtaaatgaattcgacagacacaatcacacttttattataaccgagactcaatccccacttgaaacacccagatcacctggaaggtttagagtaatgttacaatcccaaaagtgtgattgtggtgaatttcaggctaaacatttaccgtgttctcacatcatggctgcctgtaaatctgtcaatgttgatcccatgacctatgtgccgatgatattcactttacaacacattttgcacatctacgacaactcctttggtttatcgccacacgaatcaatgtggcaaaaatatgaaggagatcagtggagtcctgatccaaggagaaagaggactgcaaagggtcgtccagtttcaactcgcattcctactgagatggacgaagacgaaaatgaacgagcaagtagaaaaaaatgtggactttgccggcaacatggtcatagcataaataattgtcctaatgtatcctcatcttagtttttccatagacaaatgtcattgtttaaatattttattgatgacgtagtataatgttcttatataaataaattgttaaaagctttagttttatcatttttaattaaatctaaaaacataaacaaactaattatatttagtaaaatagttaaattaaaaattttaaaattcagattattatacaaaataaatatttactaaaataaatatattattatacaaaattcagattttaaaatatatatt

SEQ ID NO: 12620 - DNA, 1060 bp, Glycine max
  Gm_smallRNAprecursor_5453
tactataatataaagttgaaaaaaattgggccgcacttataccgccaaagtaagggtatttcatataatttcttttttacttgtttaattttttatatatttaataaatcatataagtttctcaattcctttttaattgtcatatttttttaatttatttgtttttatttatgtgtcatttacaaattttaagatcacattaattacttttttaataatgagtatttcctctgtttttatatataagatcaaattatctaactcatcagattaaaaaaagtgattattttaatttataacaataaatttatcttaaatttataattttttttaaaattattcttgtcattaatatttttctctcgtctaatgattttgttaatatattttatttcttcttttaatgagtggtatttctagtttaaatataattaaagcaaaaatatatttttgatccttataaatatcaaaatctatgaagcaccaacaccgacacagataccggacacgacacggacacggacacgtggacacctgtaatgtccaaaatatagaacgtagtacgggtgtcgtgtcggtgtcggacactgacacggacgcgtgtcggacaccggacacgacaaaaggctgaagtgtccgtgcttcatagatcaaaatattcaaaatttcttttttcaaaaaataaattgactgtattttttcaactttatcagttacttataattatgactgatgtaaaaattcccaaacgaacaatactcactagagtcacttctgtaattgaaaatccaatatgttgcctttcttcgttagagcaacttttgtaattggccaaatcaaaaagagaaaaaaaattaagattttggacatcaagatgaaaaagacccaataatcaaagctgaagatggaggaaggccacatcaggttctacttcttcccttgcacagtccccttagggggagataaggttgatggtgttgaatttgaaccactaatttgtttggttcactcgctaatgctcgcttctctcgtcctcattgcttgttttctatcttgtgag

SEQ ID NO: 12621 - DNA, 1061 bp, Glycine max
  Gm_smallRNAprecursor_5454
tactataatataaagttgaaaaaaattgggccgcacttataccgccaaagtaagggtatttcatataatttcttttttacttgtttaattttttatatatttaataaatcatataagtttctcaattcctttttaattgtcatatttttttaatttatttgtttttatttatgtgtcatttacaaattttaagatcacattaattacttttttaataatgagtatttcctctgtttttatatataagatcaaattatctaactcatcagattaaaaaaagtgattattttaatttataacaataaatttatcttaaatttataattttttttaaaattattcttgtcattaatatttttctctcgtctaatgattttgttaatatattttatttcttcttttaatgagtggtatttctagtttaaatataattaaagcaaaaatatatttttgatccttataaatatcaaaatctatgaagcaccaacaccgacacagataccggacacgacacggacacggacacgtggacacctgtaatgtccaaaatatagaacgtagtacgggtgtcgtgtcggtgtcggacactgacacggacgcgtgtcggacaccggacacgacaaaaggctgaagtgtccgtgcttcatagatcaaaatattcaaaatttcttttttcaaaaaataaattgactgtattttttcaactttatcagttacttataattatgactgatgtaaaaattcccaaacgaacaatactcactagagtcacttctgtaattgaaaatccaatatgttgcctttcttcgttagagcaacttttgtaattggccaaatcaaaaagagaaaaaaaattaagattttggacatcaagatgaaaaagacccaataatcaaagctgaagatggaggaaggccacatcaggttctacttcttcccttgcacagtccccttagggggagataaggttgatggtgttgaatttgaaccactaatttgtttggttcactcgctaatgctcgcttctctcgtcctcattgcttgttttctatcttgtgagt

SEQ ID NO: 12622 - DNA, 1046 bp, Glycine max
  Gm_smallRNAprecursor_5455
agttgaaaaaaattgggccgcacttataccgccaaagtaagggtatttcatataatttcttttttacttgtttaattttttatatatttaataaatcatataagtttctcaattcctttttaattgtcatatttttttaatttatttgtttttatttatgtgtcatttacaaattttaagatcacattaattacttttttaataatgagtatttcctctgtttttatatataagatcaaattatctaactcatcagattaaaaaaagtgattattttaatttataacaataaatttatcttaaatttataattttttttaaaattattcttgtcattaatatttttctctcgtctaatgattttgttaatatattttatttcttcttttaatgagtggtatttctagtttaaatataattaaagcaaaaatatatttttgatccttataaatatcaaaatctatgaagcaccaacaccgacacagataccggacacgacacggacacggacacgtggacacctgtaatgtccaaaatatagaacgtagtacgggtgtcgtgtcggtgtcggacactgacacggacgcgtgtcggacaccggacacgacaaaaggctgaagtgtccgtgcttcatagatcaaaatattcaaaatttcttttttcaaaaaataaattgactgtattttttcaactttatcagttacttataattatgactgatgtaaaaattcccaaacgaacaatactcactagagtcacttctgtaattgaaaatccaatatgttgcctttcttcgttagagcaacttttgtaattggccaaatcaaaaagagaaaaaaaattaagattttggacatcaagatgaaaaagacccaataatcaaagctgaagatggaggaaggccacatcaggttctacttcttcccttgcacagtccccttagggggagataaggttgatggtgttgaatttgaaccactaatttgtttggttcactcgctaatgctcgcttctctcgtcctcattgcttgttttctatcttgtga

SEQ ID NO: 12623 - DNA, 1053 bp, Glycine max
  Gm_smallRNAprecursor_5456
agttgaaaaaaattgggccgcacttataccgccaaagtaagggtatttcatataatttcttttttacttgtttaattttttatatatttaataaatcatataagtttctcaattcctttttaattgtcatatttttttaatttatttgtttttatttatgtgtcatttacaaattttaagatcacattaattacttttttaataatgagtatttcctctgtttttatatataagatcaaattatctaactcatcagattaaaaaaagtgattattttaatttataacaataaatttatcttaaatttataattttttttaaaattattcttgtcattaatatttttctctcgtctaatgattttgttaatatattttatttcttcttttaatgagtggtatttctagtttaaatataattaaagcaaaaatatatttttgatccttataaatatcaaaatctatgaagcaccaacaccgacacagataccggacacgacacggacacggacacgtggacacctgtaatgtccaaaatatagaacgtagtacgggtgtcgtgtcggtgtcggacactgacacggacgcgtgtcggacaccggacacgacaaaaggctgaagtgtccgtgcttcatagatcaaaatattcaaaatttcttttttcaaaaaataaattgactgtattttttcaactttatcagttacttataattatgactgatgtaaaaattcccaaacgaacaatactcactagagtcacttctgtaattgaaaatccaatatgttgcctttcttcgttagagcaacttttgtaattggccaaatcaaaaagagaaaaaaaattaagattttggacatcaagatgaaaaagacccaataatcaaagctgaagatggaggaaggccacatcaggttctacttcttcccttgcacagtccccttagggggagataaggttgatggtgttgaatttgaaccactaatttgtttggttcactcgctaatgctcgcttctctcgtcctcattgcttgttttctatcttgtgagtctgat

SEQ ID NO: 12624 - DNA, 1053 bp, Glycine max; identical to SEQ ID NO: 12623
  Gm_smallRNAprecursor_5457

SEQ ID NO: 12625 - DNA, 1054 bp, Glycine max
  Gm_smallRNAprecursor_5458
agttgaaaaaaattgggccgcacttataccgccaaagtaagggtatttcatataatttcttttttacttgtttaattttttatatatttaataaatcatataagtttctcaattcctttttaattgtcatatttttttaatttatttgtttttatttatgtgtcatttacaaattttaagatcacattaattacttttttaataatgagtatttcctctgtttttatatataagatcaaattatctaactcatcagattaaaaaaagtgattattttaatttataacaataaatttatcttaaatttataattttttttaaaattattcttgtcattaatatttttctctcgtctaatgattttgttaatatattttatttcttcttttaatgagtggtatttctagtttaaatataattaaagcaaaaatatatttttgatccttataaatatcaaaatctatgaagcaccaacaccgacacagataccggacacgacacggacacggacacgtggacacctgtaatgtccaaaatatagaacgtagtacgggtgtcgtgtcggtgtcggacactgacacggacgcgtgtcggacaccggacacgacaaaaggctgaagtgtccgtgcttcatagatcaaaatattcaaaatttcttttttcaaaaaataaattgactgtattttttcaactttatcagttacttataattatgactgatgtaaaaattcccaaacgaacaatactcactagagtcacttctgtaattgaaaatccaatatgttgcctttcttcgttagagcaacttttgtaattggccaaatcaaaaagagaaaaaaaattaagattttggacatcaagatgaaaaagacccaataatcaaagctgaagatggaggaaggccacatcaggttctacttcttcccttgcacagtccccttagggggagataaggttgatggtgttgaatttgaaccactaatttgtttggttcactcgctaatgctcgcttctctcgtcctcattgcttgttttctatcttgtgagtctgatg

SEQ ID NO: 12626 - DNA, 1054 bp, Glycine max; identical to SEQ ID NO: 12625
  Gm_smallRNAprecursor_5459

SEQ ID NO: 12627 - DNA, 1055 bp, Glycine max
  Gm_smallRNAprecursor_5460
agttgaaaaaaattgggccgcacttataccgccaaagtaagggtatttcatataatttcttttttacttgtttaattttttatatatttaataaatcatataagtttctcaattcctttttaattgtcatatttttttaatttatttgtttttatttatgtgtcatttacaaattttaagatcacattaattacttttttaataatgagtatttcctctgtttttatatataagatcaaattatctaactcatcagattaaaaaaagtgattattttaatttataacaataaatttatcttaaatttataattttttttaaaattattcttgtcattaatatttttctctcgtctaatgattttgttaatatattttatttcttcttttaatgagtggtatttctagtttaaatataattaaagcaaaaatatatttttgatccttataaatatcaaaatctatgaagcaccaacaccgacacagataccggacacgacacggacacggacacgtggacacctgtaatgtccaaaatatagaacgtagtacgggtgtcgtgtcggtgtcggacactgacacggacgcgtgtcggacaccggacacgacaaaaggctgaagtgtccgtgcttcatagatcaaaatattcaaaatttcttttttcaaaaaataaattgactgtattttttcaactttatcagttacttataattatgactgatgtaaaaattcccaaacgaacaatactcactagagtcacttctgtaattgaaaatccaatatgttgcctttcttcgttagagcaacttttgtaattggccaaatcaaaaagagaaaaaaaattaagattttggacatcaagatgaaaaagacccaataatcaaagctgaagatggaggaaggccacatcaggttctacttcttcccttgcacagtccccttagggggagataaggttgatggtgttgaatttgaaccactaatttgtttggttcactcgctaatgctcgcttctctcgtcctcattgcttgttttctatcttgtgagtctgatgc

SEQ ID NO: 12628 - DNA, 1055 bp, Glycine max; identical to SEQ ID NO: 12627
  Gm_smallRNAprecursor_5461

SEQ ID NO: 12629 - DNA, 1082 bp, Glycine max
  Gm_smallRNAprecursor_5462
agttgaaaaaaattgggccgcacttataccgccaaagtaagggtatttcatataatttcttttttacttgtttaattttttatatatttaataaatcatataagtttctcaattcctttttaattgtcatatttttttaatttatttgtttttatttatgtgtcatttacaaattttaagatcacattaattacttttttaataatgagtatttcctctgtttttatatataagatcaaattatctaactcatcagattaaaaaaagtgattattttaatttataacaataaatttatcttaaatttataattttttttaaaattattcttgtcattaatatttttctctcgtctaatgattttgttaatatattttatttcttcttttaatgagtggtatttctagtttaaatataattaaagcaaaaatatatttttgatccttataaatatcaaaatctatgaagcaccaacaccgacacagataccggacacgacacggacacggacacgtggacacctgtaatgtccaaaatatagaacgtagtacgggtgtcgtgtcggtgtcggacactgacacggacgcgtgtcggacaccggacacgacaaaaggctgaagtgtccgtgcttcatagatcaaaatattcaaaatttcttttttcaaaaaataaattgactgtattttttcaactttatcagttacttataattatgactgatgtaaaaattcccaaacgaacaatactcactagagtcacttctgtaattgaaaatccaatatgttgcctttcttcgttagagcaacttttgtaattggccaaatcaaaaagagaaaaaaaattaagattttggacatcaagatgaaaaagacccaataatcaaagctgaagatggaggaaggccacatcaggttctacttcttcccttgcacagtccccttagggggagataaggttgatggtgttgaatttgaaccactaatttgtttggttcactcgctaatgctcgcttctctcgtcctcattgcttgttttctatcttgtgagtctgatgcctaacttttgttgggttcaatgtcaca

SEQ ID NO: 12630 - DNA, 1082 bp, Glycine max; identical to SEQ ID NO: 12629
  Gm_smallRNAprecursor_5463

SEQ ID NO: 12631 - DNA, 1033 bp, Glycine max
  Gm_smallRNAprecursor_5464
tataatttcttttttacttgtttaattttttatatatttaataaatcatataagtttctcaattcctttttaattgtcatatttttttaatttatttgtttttatttatgtgtcatttacaaattttaagatcacattaattacttttttaataatgagtatttcctctgtttttatatataagatcaaattatctaactcatcagattaaaaaaagtgattattttaatttataacaataaatttatcttaaatttataattttttttaaaattattcttgtcattaatatttttctctcgtctaatgattttgttaatatattttatttcttcttttaatgagtggtatttctagtttaaatataattaaagcaaaaatatatttttgatccttataaatatcaaaatctatgaagcaccaacaccgacacagataccggacacgacacggacacggacacgtggacacctgtaatgtccaaaatatagaacgtagtacgggtgtcgtgtcggtgtcggacactgacacggacgcgtgtcggacaccggacacgacaaaaggctgaagtgtccgtgcttcatagatcaaaatattcaaaatttcttttttcaaaaaataaattgactgtattttttcaactttatcagttacttataattatgactgatgtaaaaattcccaaacgaacaatactcactagagtcacttctgtaattgaaaatccaatatgttgcctttcttcgttagagcaacttttgtaattggccaaatcaaaaagagaaaaaaaattaagattttggacatcaagatgaaaaagacccaataatcaaagctgaagatggaggaaggccacatcaggttctacttcttcccttgcacagtccccttagggggagataaggttgatggtgttgaatttgaaccactaatttgtttggttcactcgctaatgctcgcttctctcgtcctcattgcttgttttctatcttgtgagtctgatgcctaacttttgttgggttcaatgtcacag

SEQ ID NO: 12632 - DNA, 1111 bp, Glycine max
  Gm_smallRNAprecursor_5465
gcctgcagggagtggtggtattgcccatgccttgtttgtctccaaagatcgcagaattcccaagattcgaatccaaacccgtcaagttgagaaccttttggataagaggattattgtggatgttgattcttgggattgtcagtctcgatatccatcaggccattgtgtgcgaactataggggagataggtgatagagatactgaaagcgaggtatggaatattggattttgtacgatttctctctttgtatcaatagtgggaaaaattagtataatcatcagtcactagagcaagtcattaggaacttggcaacttgcttgtgctctctgcaacttactcagcttgtttaaaaactgggggggttgagggtcagttccgtcagcaacaaataactgtcaagagagaacaaaatccaaaaccctttcaattctgaagatttcgctctctttcttcttgagaaacaaactctccttcgcttcagaagcttcttcctctgatttctgaccatgaattcccaaaccactgagtttcccatgaatgaagctcgacttggaagcaatatcttatagcttcaagctccctttcatcaggcatggggaactcagtggtttgggaattcatggtcagaaataagaggaagaagcttctgaagttagagggaaagtgaaggagggtttgtttctcaagaaaaaggaagagagcgaaatctgcagaatcgaaagggttttggatttttttctctcttgattgttgtttgttgctgactgaactggctctcaatcccgccagtttttaaactttcatatatacgacgtcgtgtggatagaactaagaagcggcatcgttttgtctccgatttatgtttactttactttttcctagatttattttttaactataataatacaattaattaataactattgacaaattgtgaatagttcaatttaatttgtaatgcacaaacatgaaaacaaatattaagattaaatgattttctctaataggacaacactggtcatgtaataataattatttaattttaaggtcttaattagatgcatgaaaatagtttattttagttattgcagcagtaatcttttaactata

SEQ ID NO: 12633 - DNA, 1190 bp, Glycine max
  Gm_smallRNAprecursor_5466
taaataattgttatgcaaaatatttttggtttctccataacatattaacattaacccatgttattggtttgttttctacttcagatactattcatctgctgcttgtattgttaattgaaactcacacttctttgttcatggagctggacttggagcttgtatattaggtacaggtacactgttgtctcttcttctctgtctaccttttttctctgcttgtcaaattaatattccgaactttatattgagtaccctaagcacagtatgtatttctagattgcaattcattaatgaagactagtgtgactatcagtaatgactgcaccaactgagtgttggctctgattttcttctcatttctttccttgtgcattcaaacacatgcgttcatgtatacagtttcattgaactcccgctagtacttaagcaaaatccctttgcttccttgtgaatatctgtagtttgcttttcctggattcacataaacagcaaattttgggccttgaagtcatgatctcagataaatgagaaaaaaatttatggtcaatccaaggccaatgtttttttagttctagatgatgtagtttccagttcatgaactaactaacactcttgtgctggaaaagatcatcatctagaactaaaaacacattggccttggattgaccataaaaatttttctcatttatctgagatcatgacttcaaggcccaaaatttgctgtttatgtgaatccaggaaaagcaaactacagatattcactgtttccaatcgcaaccattctttacaaatctatatttgatgtttactaaggtaaacttttaatttcagctacatccaacaagtacagtattaaggaaaagaaggcagatatagggtttaagaaatggaagctagaagagaagagaggtacctggagagcacagaaaccttctttctctggggtcttaatctgagacacaatgttatcatccacccaaagcacagtaattggaattctagcaccccatttatcccatagcgcgctcattccacacttcaccgcaataagcccagttcgcttggaattaggggtcatcgcactgggcttcggttcaattatccgagaccgaatcgccgccgcatcggagctcagaaatcggagcgacaactgcgaatcgacggcgacacgttgcagacgagaaacgagg

SEQ ID NO: 12634 - DNA, 1182 bp, Glycine max
  Gm_smallRNAprecursor_5467
ttagagaattagtcgctcagctaacattaaaactttttataccagtcgagagtgtttatattttatggggaattggggatacttcatatgtaatggaaaaattacattcaaccacgatttggttatttattcttaacatttttcgtcattattatatcattatgtcattatctattttggtgacccaaattaattttgattgatccctggcctcgttgttttctggtctttagttttgatctttagagtgttggtgcacccaacattctaaaaaaatgacaaaattatttttgtttggttttcctattccggatcaattgatccggaagtctcttcctattcaacttgatccggaagaagaaaaattaaaatttagttaattatacaagatatttaaagatatttatttcattaattataatataattaaatatatttatttattttattaattataatatatttataaatattgatttattataaataattaatgctaatcaatcataatcataattcatgttaattaatcaattatgctaatcaatcataattccctaaaagaggatataaataatttcagagttagcaatcataatgcagtttttgaaattgttaactctgaaattatttatatcttcttttagggaattatgattgattagcataattgattgattagcatgaattatgattatgattgattgattagcatgattgattgattctgaaaattgttaactctgaaattatttatatcctcttttagggaattatgattgattaacatgattgactgattaacatgaattatgattatgattgattaacattaattatttataataaatcaatatttataaatatattataattaataaaataaataaatatatttaattatattataattaatgaaataaatatctttaaatatcttgtataattaaaaaaaattatttttcctcttccggatcaacttgatccgaaagaaaaaaatcaaacaaagataattttatcatttttttagaatgctgggtgcacctagcaacactatgatctttatccatttgtagtgggtcacgatatttgggatgggcttacggcttacttcattttgggcaatgttaaacgcatccccatttcgctaagcccactcccctccttttaaaaaatcctaaa

SEQ ID NO: 12635 - DNA, 1079 bp, Glycine max
  Gm_smallRNAprecursor_5468
taaggaaattcctagaaccttctcttcttctggaagtttctccataatttttctttcctccattttctttgttttggggctgaaatttaagctttgactggaaggcattttcaagtgtatcttctttatgcctatacagtctttgctcatatgcttcaagagagtccacaagttctatctctgatagagtggacagatctttgatttcctcaatcgttgtcatgattgggtcaaacttttggggcatagtaattagaattttctcaacaattttcttgtcaagaatatcttccccaaaagctctcatttgattaactatttctttaactttaaaatagtaatatttaattgtctcagactccttcatcttcaatagttcaaaatctcttcatagagattgaagtttaatggcatgtaccttaacacttccttgaaactcctcctgcaatgtgttccacgcttctttggcagtcttagctcccataattcttgggaaaattggatcagtcaccgcttgttgcaaggtgaataacgcctttgaatatttttgtttatttttcttcaactctttttcttgagatgcattaagagctgaagtatctgcgggaacggtgaaaccttcttctactatgtcacataaatcttgagatgaaaaatatgtttccattttaacacactagaaatcataattttcaccattgaagatagggacagaaatagttgacgattgaatagtgttatccatagcttagaaaaaatattattggagtgggttaatagtacaaaggaaatttttgaagtagttgggaggattttggaatggtaggtaggtaatataactacactcaatgtatgaccgaacgtaactctaataccactgttgggagttgattagatgatagttgatagttgatagttttagagaattgttttagaaagaaggttatatcattgatttcttggatgatcaattacaacataccaattgtctatttataggctcaagtcaccaacctctcaatggtgatgaatgtttctacattactttaggtctttctagagttttcatgatagattag

SEQ ID NO: 12636 - DNA, 1077 bp, Glycine max
  Gm_smallRNAprecursor_5469
agccatggcggtcgtggcggttatggcggggtggcggaaaatggcgtccctcccgcaccccacacgcgcacccagccgcgacacccgtagccgcacgcgcacgcagccgcgacgacctccggcagcgacgcaccggcacaaacggcggcgacgagctccggtggcgacgagctctggcagcgacgcacctgtcacgaacggcggcctacagcgagaagttctcgcggagaagacgaagctgtcgcgaagaagaagaaggcgtaggtttttttatttttgctgtttgacaccccctgttttctatctgcagctttttttttccttttgctatttgacacccctttatacttttaacagtcccatttttttttttcgtatttgacaccacaatttttttttctgttcagtcctcttttaaatggctgagtttatttgaactctttaatgagtttatttggtgttggtacttgattattgtatgaactcatgaaattttttaatttatttgaatgcaatcctttgtttttttcaatttcaatgagtttatatatatgttttttttttttggtccgccatgacatccgccattttccgctacgccatccgccatatttttatggcggattttttactttccgccatgaaccgccatccgccattaacaacattgtgatagatcatgatcttttcattttgtagaacatccaacccctgatgttgatatggtttccaaaatagaatgtataaggagttttgtttcatttttttttttggtattttatttttatttcccccttctgtttcagttttatgtcatttaaagtttgggaaaatggtgggtatgaagcatatgtatgctaaagggtgttgtttgtttgtgtttttttttgtatggcttctcctttattttgaactccaacctgagaagtatttgaagcaaatgagtgatttttaattttacgatttttttcataattattttagccaagtgtggattgtttttaattttttttaaactatactaatttactaatttgtttttattttgcttttttattatttttatgtgtctcatct

SEQ ID NO: 12637 - DNA, 1093 bp, Glycine max
  Gm_smallRNAprecursor_5470
atttcgatcacatggtacaatcacaatcatactagagaacagagaggttgaagaagacacaaattttggtagcttgtaaagtataaatataataataagcaagtaaagaggttacaaaattatgatttacgaaaacagaagaatattgaaattaacacaaaacagaacaactggccaaaatccgaaactacggaggaagccaccgacaccaaaacagcatatcaaaatgctttgatttgggatatgggataagaacattgtccatcacaattagcttgatttgcaaagtcgaaaacagtttcaaactgtgtttgcaagactgcaaccattaatattgaggtttcagatgtgtcaagttttaagttgcagtttcacacgtgccaagttttaaatccggttgcaatcgaagatcttgcaaataaataccagtgagaagggacagcatctatcactccagccctttgtcgtgtccggtgtccgactagcatccgtgtccgacaccgacacaacacccgtactacgttctatattttctatattttggacattataggtgtccacgtgtctatatatatatatatatatatatgtgtcgtgtccggtgtccatgtcggtgtcagtccttcataagacagtaaacttaaaaatgaaattaaaggaaagcagggatcatccaaatacagaatcacaaattttacacagtcaaatttggatccaactcctctaaagtgaacaatttcactctatagactaaagcaagtaatcaaaatcgtttgattacaagatcaaccattcagtttgttatcaaccactgtgattaattaccttactcaaacttctctgaaatcgttgatattatgtttgtttttttcttagataaaaaacctagaagagctaaccagcatagcatggaatcgaaattcagttgatacaataaataaatttgtatccgatggcgaaaagacaattaattcggtttcaaaaggaggggagatccaaatctagttaaggtgcagtgcactgttttcatagtaattttgcaggttaacgaaggaggggaaaatgggagtaataataataagcagagaaaaga

SEQ ID NO: 12638 - DNA, 1137 bp, Glycine max
  Gm_smallRNAprecursor_5471
tgaggatgaggatcaacagttgtttgatcacatcaatcaccaaagtgatgaccaaagtgatgaccaaaccgatgacgagggtgttggcagaccaacgacacctccatcacctccattgcaatatcagtaacctaggtgtccagtagacttgaactttgaccacctaccacactacattgatcaataccattttgttcattagcaacacaatgtacaaccaccagtcgctatactcgaggttggcttgaccttcgatgacaaagcacaatgtattcgagcaatcaaagaatacaacatcagaaatcattttgattgcagaacagtttactctgaccagaaaaggctaaacttcatctccaagttacatgaaaatggttgtacatggagcttgggcgcatgcaattcaaagaggcataacaaatggattatcaagagcatcaaaggtcatcacacttgtctcatgccgatgctcagacaagatcatcgccaactcaacaaacacgtcatagcatagatcatccaaccaattgtcaaaacaaacccaaccgtctccatcaagacgttgattgcagagatcaaaacgttcatgaattatacgccatcctacaagaagacatggttagcaaagcaaagagcgttggagatgattcatggaaactgggaagaatcatacaccaaactgccaaaacttttcggagctttgcaatcttgtatccccgggactgtggtcgctgctcaaacagaatccttgtatgaggggggacaaatagtaccgggcaaaagattgttcaaacgtgtcttttggtcatttggtccatgcattaatggttttgcatattgcaaacccatagtacaagtagatggtacatggctttacgggaagtatattggcacaagttgatagctaccgcacaagatggagctaatcatatattcccaattgcttacgccattgtagaaggggagacaacttcagcttggggggttttttctaaagaatttgagaagacatgttactctgcaaattaacatttctctcatttcagaccgacacccctcaattataagtgcctacaacaacccaagtaacttatgggtccaggacacatcctatttcttttgtctgcgccatattgc

SEQ ID NO: 12639 - DNA, 1067 bp, Glycine max
  Gm_smallRNAprecursor_5472
aggatcaacagttgtttgatcacatcaatcaccaaagtgatgaccaaagtgatgaccaaaccgatgacgagggtgttggcagaccaacgacacctccatcacctccattgcaatatcagtaacctaggtgtccagtagacttgaactttgaccacctaccacactacattgatcaataccattttgttcattagcaacacaatgtacaaccaccagtcgctatactcgaggttggcttgaccttcgatgacaaagcacaatgtattcgagcaatcaaagaatacaacatcagaaatcattttgattgcagaacagtttactctgaccagaaaaggctaaacttcatctccaagttacatgaaaatggttgtacatggagcttgggcgcatgcaattcaaagaggcataacaaatggattatcaagagcatcaaaggtcatcacacttgtctcatgccgatgctcagacaagatcatcgccaactcaacaaacacgtcatagcatagatcatccaaccaattgtcaaaacaaacccaaccgtctccatcaagacgttgattgcagagatcaaaacgttcatgaattatacgccatcctacaagaagacatggttagcaaagcaaagagcgttggagatgattcatggaaactgggaagaatcatacaccaaactgccaaaacttttcggagctttgcaatcttgtatccccgggactgtggtcgctgctcaaacagaatccttgtatgaggggggacaaatagtaccgggcaaaagattgttcaaacgtgtcttttggtcatttggtccatgcattaatggttttgcatattgcaaacccatagtacaagtagatggtacatggctttacgggaagtatattggcacaagttgatagctaccgcacaagatggagctaatcatatattcccaattgcttacgccattgtagaaggggagacaacttcagcttggggggttttttctaaagaatttgagaagacatgttactctgcaaattaacatttctctcatttcagaccgacacccctcaattataagtgcctac

SEQ ID NO: 12640 - DNA, 1154 bp, Glycine max
  Gm_smallRNAprecursor_5473
aaaattattaattttataaaataaaaaattatattatatttaagccttttatgtaaaggatgtgacggttacacacttgtaccccataaaagttggacttaatatatatatatatatatatatatatatatatatatatatatgtgtgtgtgtgtgtgtgtgtgtgtgtgtgtgtgtgtgtgtgtgtgtgataaatgcaaagaaaatataaacttgtaaaacagatatcaagggcacaccagagaccggcttacaaatcccaggttttcataaacaaagaaaccgaagcggcggcagagccgcacaggattggtaaagagagagaagagggatgaaaatataaatctattgaaacttgaaagaagtgcttacaaaaatcttgttttagagcacctctcttcagaaacctgaaaaatggccaaatgaaagggtgcctcacaacatacttgaggactccttatatagccaaaaatctaagaccgatagttgccggtagttttgaccgggactatttgactgtttgtttcaagacaagtagttttgaccgggactttaatggctataggacaggtagtattgtccagcattaattacacattaattacaaacagacggttttgtgaccgaaattaaatttaatctaaatagataccaaaacaatcatcttcgttttggtaaaaggggtcttcttcttcttcttcagcataacttgtttcttccttctttgaggatgaaccttcttcttcctactgtaacatttgcagaacttcctttagatttttagttaggacctcctttgatttcgatcctgctaaaaatgctgccagatgagacttttggttcaaaaacacagaagtttctgaatcagctgctttgaggaattctggatgggattggaaccagattgttacttgttctggatttgctttggatgagtcaaattgtgtccaccattttacaaatgcgtgtctttgtagtgatggatattggtttatcttttcagtcttgctgtaacgatattgccatgagaagatccatgacagtgcaaagcttgaaaagtattaaagatctgctggaattcgtgattcctacgaattgtattgtcaatcaaattgagcaaatccttgttggactgtttctgggaatatctctgg

SEQ ID NO: 12641 - DNA, 1078 bp, Glycine max
  Gm_smallRNAprecursor_5474
cttacaaaaatcttgttttagagcacctctcttcagaaacctgaaaaatggccaaatgaaagggtgcctcacaacatacttgaggactccttatatagccaaaaatctaagaccgatagttgccggtagttttgaccgggactatttgactgtttgtttcaagacaagtagttttgaccgggactttaatggctataggacaggtagtattgtccagcattaattacacattaattacaaacagacggttttgtgaccgaaattaaatttaatctaaatagataccaaaacaatcatcttcgttttggtaaaaggggtcttcttcttcttcttcagcataacttgtttcttccttctttgaggatgaaccttcttcttcctactgtaacatttgcagaacttcctttagatttttagttaggacctcctttgatttcgatcctgctaaaaatgctgccagatgagacttttggttcaaaaacacagaagtttctgaatcagctgctttgaggaattctggatgggattggaaccagattgttacttgttctggatttgctttggatgagtcaaattgtgtccaccattttacaaatgcgtgtctttgtagtgatggatattggtttatcttttcagtcttgctgtaacgatattgccatgagaagatccatgacagtgcaaagcttgaaaagtattaaagatctgctggaattcgtgattcctacgaattgtattgtcaatcaaattgagcaaatccttgttggactgtttctgggaatatctctgggattggtccaaagaagtcccaccattgcaaaaaccaattgggaaaattgtaaattgtattggtcttgaaatatatcagccatgaatgcttgaagcgggtattttggtgccaaaacaccttagtccaagcatcaacataatcccaataggtataacctatcagatcaaatggaactgaaaatctctttcctttgttcaagtccgaaccaaagtgtcttggttgaagaacttttagtatttggattgtggagtgggtgtttaatgtttggtcttttgggtctttgaaatgttt

SEQ ID NO: 12642 - DNA, 1164 bp, Glycine max
  Gm_smallRNAprecursor_5475
cttacaaaaatcttgttttagagcacctctcttcagaaacctgaaaaatggccaaatgaaagggtgcctcacaacatacttgaggactccttatatagccaaaaatctaagaccgatagttgccggtagttttgaccgggactatttgactgtttgtttcaagacaagtagttttgaccgggactttaatggctataggacaggtagtattgtccagcattaattacacattaattacaaacagacggttttgtgaccgaaattaaatttaatctaaatagataccaaaacaatcatcttcgttttggtaaaaggggtcttcttcttcttcttcagcataacttgtttcttccttctttgaggatgaaccttcttcttcctactgtaacatttgcagaacttcctttagatttttagttaggacctcctttgatttcgatcctgctaaaaatgctgccagatgagacttttggttcaaaaacacagaagtttctgaatcagctgctttgaggaattctggatgggattggaaccagattgttacttgttctggatttgctttggatgagtcaaattgtgtccaccattttacaaatgcgtgtctttgtagtgatggatattggtttatcttttcagtcttgctgtaacgatattgccatgagaagatccatgacagtgcaaagcttgaaaagtattaaagatctgctggaattcgtgattcctacgaattgtattgtcaatcaaattgagcaaatccttgttggactgtttctgggaatatctctgggattggtccaaagaagtcccaccattgcaaaaaccaattgggaaaattgtaaattgtattggtcttgaaatatatcagccatgaatgcttgaagcgggtattttggtgccaaaacaccttagtccaagcatcaacataatcccaataggtataacctatcagatcaaatggaactgaaaatctctttcctttgttcaagtccgaaccaaagtgtcttggttgaagaacttttagtatttggattgtggagtgggtgtttaatgtttggtcttttgggtctttgaaatgtttgatagatgctgaatttgaatctaccaaaatcaattcataaaaagttcttgtcttcaggatggtggttggtttgtagtgaaatccta

SEQ ID NO: 12643 - DNA, 1077 bp, Glycine max
  Gm_smallRNAprecursor_5476
ttacaaaaatcttgttttagagcacctctcttcagaaacctgaaaaatggccaaatgaaagggtgcctcacaacatacttgaggactccttatatagccaaaaatctaagaccgatagttgccggtagttttgaccgggactatttgactgtttgtttcaagacaagtagttttgaccgggactttaatggctataggacaggtagtattgtccagcattaattacacattaattacaaacagacggttttgtgaccgaaattaaatttaatctaaatagataccaaaacaatcatcttcgttttggtaaaaggggtcttcttcttcttcttcagcataacttgtttcttccttctttgaggatgaaccttcttcttcctactgtaacatttgcagaacttcctttagatttttagttaggacctcctttgatttcgatcctgctaaaaatgctgccagatgagacttttggttcaaaaacacagaagtttctgaatcagctgctttgaggaattctggatgggattggaaccagattgttacttgttctggatttgctttggatgagtcaaattgtgtccaccattttacaaatgcgtgtctttgtagtgatggatattggtttatcttttcagtcttgctgtaacgatattgccatgagaagatccatgacagtgcaaagcttgaaaagtattaaagatctgctggaattcgtgattcctacgaattgtattgtcaatcaaattgagcaaatccttgttggactgtttctgggaatatctctgggattggtccaaagaagtcccaccattgcaaaaaccaattgggaaaattgtaaattgtattggtcttgaaatatatcagccatgaatgcttgaagcgggtattttggtgccaaaacaccttagtccaagcatcaacataatcccaataggtataacctatcagatcaaatggaactgaaaatctctttcctttgttcaagtccgaaccaaagtgtcttggttgaagaacttttagtatttggattgtggagtgggtgtttaatgtttggtcttttgggtctttgaaatgttt

SEQ ID NO: 12644 - DNA, 1163 bp, Glycine max
  Gm_smallRNAprecursor_5477
ttacaaaaatcttgttttagagcacctctcttcagaaacctgaaaaatggccaaatgaaagggtgcctcacaacatacttgaggactccttatatagccaaaaatctaagaccgatagttgccggtagttttgaccgggactatttgactgtttgtttcaagacaagtagttttgaccgggactttaatggctataggacaggtagtattgtccagcattaattacacattaattacaaacagacggttttgtgaccgaaattaaatttaatctaaatagataccaaaacaatcatcttcgttttggtaaaaggggtcttcttcttcttcttcagcataacttgtttcttccttctttgaggatgaaccttcttcttcctactgtaacatttgcagaacttcctttagatttttagttaggacctcctttgatttcgatcctgctaaaaatgctgccagatgagacttttggttcaaaaacacagaagtttctgaatcagctgctttgaggaattctggatgggattggaaccagattgttacttgttctggatttgctttggatgagtcaaattgtgtccaccattttacaaatgcgtgtctttgtagtgatggatattggtttatcttttcagtcttgctgtaacgatattgccatgagaagatccatgacagtgcaaagcttgaaaagtattaaagatctgctggaattcgtgattcctacgaattgtattgtcaatcaaattgagcaaatccttgttggactgtttctgggaatatctctgggattggtccaaagaagtcccaccattgcaaaaaccaattgggaaaattgtaaattgtattggtcttgaaatatatcagccatgaatgcttgaagcgggtattttggtgccaaaacaccttagtccaagcatcaacataatcccaataggtataacctatcagatcaaatggaactgaaaatctctttcctttgttcaagtccgaaccaaagtgtcttggttgaagaacttttagtatttggattgtggagtgggtgtttaatgtttggtcttttgggtctttgaaatgtttgatagatgctgaatttgaatctaccaaaatcaattcataaaaagttcttgtcttcaggatggtggttggtttgtagtgaaatccta

SEQ ID NO: 12645 - DNA, 1131 bp, Glycine max
  Gm_smallRNAprecursor_5478
acaagtagttttgaccgggactttaatggctataggacaggtagtattgtccagcattaattacacattaattacaaacagacggttttgtgaccgaaattaaatttaatctaaatagataccaaaacaatcatcttcgttttggtaaaaggggtcttcttcttcttcttcagcataacttgtttcttccttctttgaggatgaaccttcttcttcctactgtaacatttgcagaacttcctttagatttttagttaggacctcctttgatttcgatcctgctaaaaatgctgccagatgagacttttggttcaaaaacacagaagtttctgaatcagctgctttgaggaattctggatgggattggaaccagattgttacttgttctggatttgctttggatgagtcaaattgtgtccaccattttacaaatgcgtgtctttgtagtgatggatattggtttatcttttcagtcttgctgtaacgatattgccatgagaagatccatgacagtgcaaagcttgaaaagtattaaagatctgctggaattcgtgattcctacgaattgtattgtcaatcaaattgagcaaatccttgttggactgtttctgggaatatctctgggattggtccaaagaagtcccaccattgcaaaaaccaattgggaaaattgtaaattgtattggtcttgaaatatatcagccatgaatgcttgaagcgggtattttggtgccaaaacaccttagtccaagcatcaacataatcccaataggtataacctatcagatcaaatggaactgaaaatctctttcctttgttcaagtccgaaccaaagtgtcttggttgaagaacttttagtatttggattgtggagtgggtgtttaatgtttggtcttttgggtctttgaaatgtttgatagatgctgaatttgaatctaccaaaatcaattcataaaaagttcttgtcttcaggatggtggttggtttgtagtgaaatcctagtgggaaagccttgaccgttgccttgaagggatttttgtcccaaaattcaggttccatctacaaaacaattacaaatttatttttataaatataattgttagtttgtttggtaggtggtgtttaagcttt

SEQ ID NO: 12646 - DNA, 1170 bp, Glycine max
  Gm_smallRNAprecursor_5479
gcataacttgtttcttccttctttgaggatgaaccttcttcttcctactgtaacatttgcagaacttcctttagatttttagttaggacctcctttgatttcgatcctgctaaaaatgctgccagatgagacttttggttcaaaaacacagaagtttctgaatcagctgctttgaggaattctggatgggattggaaccagattgttacttgttctggatttgctttggatgagtcaaattgtgtccaccattttacaaatgcgtgtctttgtagtgatggatattggtttatcttttcagtcttgctgtaacgatattgccatgagaagatccatgacagtgcaaagcttgaaaagtattaaagatctgctggaattcgtgattcctacgaattgtattgtcaatcaaattgagcaaatccttgttggactgtttctgggaatatctctgggattggtccaaagaagtcccaccattgcaaaaaccaattgggaaaattgtaaattgtattggtcttgaaatatatcagccatgaatgcttgaagcgggtattttggtgccaaaacaccttagtccaagcatcaacataatcccaataggtataacctatcagatcaaatggaactgaaaatctctttcctttgttcaagtccgaaccaaagtgtcttggttgaagaacttttagtatttggattgtggagtgggtgtttaatgtttggtcttttgggtctttgaaatgtttgatagatgctgaatttgaatctaccaaaatcaattcataaaaagttcttgtcttcaggatggtggttggtttgtagtgaaatcctagtgggaaagccttgaccgttgccttgaagggatttttgtcccaaaattcaggttccatctacaaaacaattacaaatttatttttataaatataattgttagtttgtttggtaggtggtgtttaagctttggctaaaggtagtttccctttaggattggtagctgttttggtcattgatgcattttggatcactgtttgtaaatttgattcagattcatcatcagattctgaggcaatgtctgcccaagattttttgattatttttggaaatttggttatacccatgtcttgaagggcctgaagggtttcaattggccatgcatagtcggccgatgtttgt

SEQ ID NO: 12647 - DNA, 1107 bp, Glycine max
  Gm_smallRNAprecursor_5480
gcagaacttcctttagatttttagttaggacctcctttgatttcgatcctgctaaaaatgctgccagatgagacttttggttcaaaaacacagaagtttctgaatcagctgctttgaggaattctggatgggattggaaccagattgttacttgttctggatttgctttggatgagtcaaattgtgtccaccattttacaaatgcgtgtctttgtagtgatggatattggtttatcttttcagtcttgctgtaacgatattgccatgagaagatccatgacagtgcaaagcttgaaaagtattaaagatctgctggaattcgtgattcctacgaattgtattgtcaatcaaattgagcaaatccttgttggactgtttctgggaatatctctgggattggtccaaagaagtcccaccattgcaaaaaccaattgggaaaattgtaaattgtattggtcttgaaatatatcagccatgaatgcttgaagcgggtattttggtgccaaaacaccttagtccaagcatcaacataatcccaataggtataacctatcagatcaaatggaactgaaaatctctttcctttgttcaagtccgaaccaaagtgtcttggttgaagaacttttagtatttggattgtggagtgggtgtttaatgtttggtcttttgggtctttgaaatgtttgatagatgctgaatttgaatctaccaaaatcaattcataaaaagttcttgtcttcaggatggtggttggtttgtagtgaaatcctagtgggaaagccttgaccgttgccttgaagggatttttgtcccaaaattcaggttccatctacaaaacaattacaaatttatttttataaatataattgttagtttgtttggtaggtggtgtttaagctttggctaaaggtagtttccctttaggattggtagctgttttggtcattgatgcattttggatcactgtttgtaaatttgattcagattcatcatcagattctgaggcaatgtctgcccaagattttttgattatttttggaaatttggttatacccatgtcttgaagggcctgaagggtttcaattggccatgcatagtcggccgatg

SEQ ID NO: 12648 - DNA, 1107 bp, Glycine max; identical to SEQ ID NO: 12647
  Gm_smallRNAprecursor_5481

SEQ ID NO: 12649 - DNA, 1108 bp, Glycine max
  Gm_smallRNAprecursor_5482
gcagaacttcctttagatttttagttaggacctcctttgatttcgatcctgctaaaaatgctgccagatgagacttttggttcaaaaacacagaagtttctgaatcagctgctttgaggaattctggatgggattggaaccagattgttacttgttctggatttgctttggatgagtcaaattgtgtccaccattttacaaatgcgtgtctttgtagtgatggatattggtttatcttttcagtcttgctgtaacgatattgccatgagaagatccatgacagtgcaaagcttgaaaagtattaaagatctgctggaattcgtgattcctacgaattgtattgtcaatcaaattgagcaaatccttgttggactgtttctgggaatatctctgggattggtccaaagaagtcccaccattgcaaaaaccaattgggaaaattgtaaattgtattggtcttgaaatatatcagccatgaatgcttgaagcgggtattttggtgccaaaacaccttagtccaagcatcaacataatcccaataggtataacctatcagatcaaatggaactgaaaatctctttcctttgttcaagtccgaaccaaagtgtcttggttgaagaacttttagtatttggattgtggagtgggtgtttaatgtttggtcttttgggtctttgaaatgtttgatagatgctgaatttgaatctaccaaaatcaattcataaaaagttcttgtcttcaggatggtggttggtttgtagtgaaatcctagtgggaaagccttgaccgttgccttgaagggatttttgtcccaaaattcaggttccatctacaaaacaattacaaatttatttttataaatataattgttagtttgtttggtaggtggtgtttaagctttggctaaaggtagtttccctttaggattggtagctgttttggtcattgatgcattttggatcactgtttgtaaatttgattcagattcatcatcagattctgaggcaatgtctgcccaagattttttgattatttttggaaatttggttatacccatgtcttgaagggcctgaagggtttcaattggccatgcatagtcggccgatgt

SEQ ID NO: 12650 - DNA, 1101 bp, Glycine max
  Gm_smallRNAprecursor_5483
gaacttcctttagatttttagttaggacctcctttgatttcgatcctgctaaaaatgctgccagatgagacttttggttcaaaaacacagaagtttctgaatcagctgctttgaggaattctggatgggattggaaccagattgttacttgttctggatttgctttggatgagtcaaattgtgtccaccattttacaaatgcgtgtctttgtagtgatggatattggtttatcttttcagtcttgctgtaacgatattgccatgagaagatccatgacagtgcaaagcttgaaaagtattaaagatctgctggaattcgtgattcctacgaattgtattgtcaatcaaattgagcaaatccttgttggactgtttctgggaatatctctgggattggtccaaagaagtcccaccattgcaaaaaccaattgggaaaattgtaaattgtattggtcttgaaatatatcagccatgaatgcttgaagcgggtattttggtgccaaaacaccttagtccaagcatcaacataatcccaataggtataacctatcagatcaaatggaactgaaaatctctttcctttgttcaagtccgaaccaaagtgtcttggttgaagaacttttagtatttggattgtggagtgggtgtttaatgtttggtcttttgggtctttgaaatgtttgatagatgctgaatttgaatctaccaaaatcaattcataaaaagttcttgtcttcaggatggtggttggtttgtagtgaaatcctagtgggaaagccttgaccgttgccttgaagggatttttgtcccaaaattcaggttccatctacaaaacaattacaaatttatttttataaatataattgttagtttgtttggtaggtggtgtttaagctttggctaaaggtagtttccctttaggattggtagctgttttggtcattgatgcattttggatcactgtttgtaaatttgattcagattcatcatcagattctgaggcaatgtctgcccaagattttttgattatttttggaaatttggttatacccatgtcttgaagggcctgaagggtttcaattggccatgcatagtcggccg

SEQ ID NO: 12651 - DNA, 1098 bp, Glycine max
  Gm_smallRNAprecursor_5484
gtgtctttgtagtgatggatattggtttatcttttcagtcttgctgtaacgatattgccatgagaagatccatgacagtgcaaagcttgaaaagtattaaagatctgctggaattcgtgattcctacgaattgtattgtcaatcaaattgagcaaatccttgttggactgtttctgggaatatctctgggattggtccaaagaagtcccaccattgcaaaaaccaattgggaaaattgtaaattgtattggtcttgaaatatatcagccatgaatgcttgaagcgggtattttggtgccaaaacaccttagtccaagcatcaacataatcccaataggtataacctatcagatcaaatggaactgaaaatctctttcctttgttcaagtccgaaccaaagtgtcttggttgaagaacttttagtatttggattgtggagtgggtgtttaatgtttggtcttttgggtctttgaaatgtttgatagatgctgaatttgaatctaccaaaatcaattcataaaaagttcttgtcttcaggatggtggttggtttgtagtgaaatcctagtgggaaagccttgaccgttgccttgaagggatttttgtcccaaaattcaggttccatctacaaaacaattacaaatttatttttataaatataattgttagtttgtttggtaggtggtgtttaagctttggctaaaggtagtttccctttaggattggtagctgttttggtcattgatgcattttggatcactgtttgtaaatttgattcagattcatcatcagattctgaggcaatgtctgcccaagattttttgattatttttggaaatttggttatacccatgtcttgaagggcctgaagggtttcaattggccatgcatagtcggccgatgtttgtttggcggttgccgatttgggagattcctgagtggatggctcaggtttgattgaggtaatctgggttgatgacccttctaaattggttttctgggtagatgacccagcctgggttggtgacccagaagaggttgatgatttcttaattgttggctctggaagagccagtctggctcctttgcctgtacttct

SEQ ID NO: 12652 - DNA, 1031 bp, Glycine max
  Gm_smallRNAprecursor_5485
ctttttgtaaaatatctttggctgatttacaatcaactctgattaaaaatttttggtttaataaatccgattgaaatttggaaatgcacaaaacaattgctaaaacttcctttttaacagttgaatattttaattatgcaggattccaatgttttgatgtatatgcgatgacatgatcttggccatggactctttgtttgaggatgccaccataacctatgtctgaagcatcagtttcgacagttttaaatgcctgtggaataagaagatacagatattttatggattggactttgactttgatttctttaactgtttgtgtatggaggtcagaccaaggaggcggatttttctttagcctatcatgcaatggcttgacaatattgtttaaataggggacaaattctcctacgtaatttagacaacctagaaatctttgtaactgggttttgtctaagatttggttgggaaatttgctagcaaactctattgatctttctattggaatgattgtaccttgatatatattgtgaccaaggaatcgaattcgagtttggaaaagattgatttttgatttggagactgccaaaccattctgtttgatgatatggatgaaggtctggagatgtttgaaatgttggtcaatgttttgggaaaagattaaaacatcatctatttagacaatgacaaattttgaatagggattaaaaatatcattcattaatttttgaaattctgaaggggcattctttagtccgaatggcatcacattccattcatattgcccaaaaggtacagtgaacgttgttttgtacctatctgattcttggacttggattttccagaatccagatttcatatcaaattttgaaaatatctttgcaaaatttaatctattaagtaagtcttttttgtttggaataggatacctaatccattgcaatgcttgatttagtggtttgtaatttatgactaagcggggtgttccactctcaatctcagattgtttgttgacataaaaagccgcacaa

SEQ ID NO: 12653 - DNA, 1202 bp, Glycine max
  Gm_smallRNAprecursor_5486
tacacaaaatgggagtattaagtacttattacctatctttaacaaaaagtaattacaacactacaaaataaccataaatgggaggagttagataaaattttcacaattttattacacaaaagttagtcgtattcattgactaacaataatacataatagttaaacttgtataataattattttaatttaaagaaccaattgttagtccaccaatatttgtcgagaaataaatcaaaccaacttgaacatagtttgagactcgactcaacaattgacttgttgaaattggttcatgaaccaaataagttgaacttgagttaaaagttgagttcgttaaaaataaatgagttgagctacatatagcttgctttggttgattcattaactatatatatatatatatatatatatatatatataactgctgcatctatgcccatgtcaattaaaggcttgatggctacttgtacacagccgatgtgtagatatttatacttacggctatgttcataaattgaattttttgaaagtaaatgaaattcttcccctatatcttgtcctagaggaatattgttttctactattttgattatgtaatcaaagttgtgtttgtcagagtttagtatcagaggtcaatgtccataagggcatatgttaactgaacttatggatctgaaccatgtacagtaattttaatttaaacagtatgtgtttgaacagtattttctgaaagcacagcagtttgatattttagttgaatgatattgtagcagtaagtcccgtggttgagaaagggcagttagactaaggtgtaaggcagtcggcccctataacggtaatatactggtggctataggagtagtgttcaaactatattgtctgtaaaaaaaaatatttttcatttattcagattcaagaagttctgtaacatatagccttatggaaatatttctatggaaccaaatgaaggcaaagatattagagaatgttataatcatgtctagactattgcgatctttttcccgtatctcttttcgatcaaattcctcctcatcatcttcttcaagaaactccaatttattaaatgatcaagataaccagacccaagaggtcgcccccaaacacaatctcttcgatgaggaagtccgattcgaagatatcaatcaaaacatggatgactggaacattccagaaatccctca

SEQ ID NO: 12654 - DNA, 1244 bp, Glycine max
  Gm_smallRNAprecursor_5487
tacacaaaatgggagtattaagtacttattacctatctttaacaaaaagtaattacaacactacaaaataaccataaatgggaggagttagataaaattttcacaattttattacacaaaagttagtcgtattcattgactaacaataatacataatagttaaacttgtataataattattttaatttaaagaaccaattgttagtccaccaatatttgtcgagaaataaatcaaaccaacttgaacatagtttgagactcgactcaacaattgacttgttgaaattggttcatgaaccaaataagttgaacttgagttaaaagttgagttcgttaaaaataaatgagttgagctacatatagcttgctttggttgattcattaactatatatatatatatatatatatatatatatataactgctgcatctatgcccatgtcaattaaaggcttgatggctacttgtacacagccgatgtgtagatatttatacttacggctatgttcataaattgaattttttgaaagtaaatgaaattcttcccctatatcttgtcctagaggaatattgttttctactattttgattatgtaatcaaagttgtgtttgtcagagtttagtatcagaggtcaatgtccataagggcatatgttaactgaacttatggatctgaaccatgtacagtaattttaatttaaacagtatgtgtttgaacagtattttctgaaagcacagcagtttgatattttagttgaatgatattgtagcagtaagtcccgtggttgagaaagggcagttagactaaggtgtaaggcagtcggcccctataacggtaatatactggtggctataggagtagtgttcaaactatattgtctgtaaaaaaaaatatttttcatttattcagattcaagaagttctgtaacatatagccttatggaaatatttctatggaaccaaatgaaggcaaagatattagagaatgttataatcatgtctagactattgcgatctttttcccgtatctcttttcgatcaaattcctcctcatcatcttcttcaagaaactccaatttattaaatgatcaagataaccagacccaagaggtcgcccccaaacacaatctcttcgatgaggaagtccgattcgaagatatcaatcaaaacatggatgactggaacattccagaaatccctcaggatcaactatacgttcctgaaacaattaaggacaaacacaa

SEQ ID NO: 12655 - DNA, 1199 bp, Glycine max
  Gm_smallRNAprecursor_5488
aaagtaattacaacactacaaaataaccataaatgggaggagttagataaaattttcacaattttattacacaaaagttagtcgtattcattgactaacaataatacataatagttaaacttgtataataattattttaatttaaagaaccaattgttagtccaccaatatttgtcgagaaataaatcaaaccaacttgaacatagtttgagactcgactcaacaattgacttgttgaaattggttcatgaaccaaataagttgaacttgagttaaaagttgagttcgttaaaaataaatgagttgagctacatatagcttgctttggttgattcattaactatatatatatatatatatatatatatatatataactgctgcatctatgcccatgtcaattaaaggcttgatggctacttgtacacagccgatgtgtagatatttatacttacggctatgttcataaattgaattttttgaaagtaaatgaaattcttcccctatatcttgtcctagaggaatattgttttctactattttgattatgtaatcaaagttgtgtttgtcagagtttagtatcagaggtcaatgtccataagggcatatgttaactgaacttatggatctgaaccatgtacagtaattttaatttaaacagtatgtgtttgaacagtattttctgaaagcacagcagtttgatattttagttgaatgatattgtagcagtaagtcccgtggttgagaaagggcagttagactaaggtgtaaggcagtcggcccctataacggtaatatactggtggctataggagtagtgttcaaactatattgtctgtaaaaaaaaatatttttcatttattcagattcaagaagttctgtaacatatagccttatggaaatatttctatggaaccaaatgaaggcaaagatattagagaatgttataatcatgtctagactattgcgatctttttcccgtatctcttttcgatcaaattcctcctcatcatcttcttcaagaaactccaatttattaaatgatcaagataaccagacccaagaggtcgcccccaaacacaatctcttcgatgaggaagtccgattcgaagatatcaatcaaaacatggatgactggaacattccagaaatccctcaggatcaactatacgttcctgaaacaattaaggacaaacacaa

SEQ ID NO: 12656 - DNA, 1051 bp, Glycine max
  Gm_smallRNAprecursor_5489
aatacataatagttaaacttgtataataattattttaatttaaagaaccaattgttagtccaccaatatttgtcgagaaataaatcaaaccaacttgaacatagtttgagactcgactcaacaattgacttgttgaaattggttcatgaaccaaataagttgaacttgagttaaaagttgagttcgttaaaaataaatgagttgagctacatatagcttgctttggttgattcattaactatatatatatatatatatatatatatatatataactgctgcatctatgcccatgtcaattaaaggcttgatggctacttgtacacagccgatgtgtagatatttatacttacggctatgttcataaattgaattttttgaaagtaaatgaaattcttcccctatatcttgtcctagaggaatattgttttctactattttgattatgtaatcaaagttgtgtttgtcagagtttagtatcagaggtcaatgtccataagggcatatgttaactgaacttatggatctgaaccatgtacagtaattttaatttaaacagtatgtgtttgaacagtattttctgaaagcacagcagtttgatattttagttgaatgatattgtagcagtaagtcccgtggttgagaaagggcagttagactaaggtgtaaggcagtcggcccctataacggtaatatactggtggctataggagtagtgttcaaactatattgtctgtaaaaaaaaatatttttcatttattcagattcaagaagttctgtaacatatagccttatggaaatatttctatggaaccaaatgaaggcaaagatattagagaatgttataatcatgtctagactattgcgatctttttcccgtatctcttttcgatcaaattcctcctcatcatcttcttcaagaaactccaatttattaaatgatcaagataaccagacccaagaggtcgcccccaaacacaatctcttcgatgaggaagtccgattcgaagatatcaatcaaaacatggatgactggaacattccagaaatcc

SEQ ID NO: 12657 - DNA, 1097 bp, Glycine max
  Gm_smallRNAprecursor_5490
aatacataatagttaaacttgtataataattattttaatttaaagaaccaattgttagtccaccaatatttgtcgagaaataaatcaaaccaacttgaacatagtttgagactcgactcaacaattgacttgttgaaattggttcatgaaccaaataagttgaacttgagttaaaagttgagttcgttaaaaataaatgagttgagctacatatagcttgctttggttgattcattaactatatatatatatatatatatatatatatatataactgctgcatctatgcccatgtcaattaaaggcttgatggctacttgtacacagccgatgtgtagatatttatacttacggctatgttcataaattgaattttttgaaagtaaatgaaattcttcccctatatcttgtcctagaggaatattgttttctactattttgattatgtaatcaaagttgtgtttgtcagagtttagtatcagaggtcaatgtccataagggcatatgttaactgaacttatggatctgaaccatgtacagtaattttaatttaaacagtatgtgtttgaacagtattttctgaaagcacagcagtttgatattttagttgaatgatattgtagcagtaagtcccgtggttgagaaagggcagttagactaaggtgtaaggcagtcggcccctataacggtaatatactggtggctataggagtagtgttcaaactatattgtctgtaaaaaaaaatatttttcatttattcagattcaagaagttctgtaacatatagccttatggaaatatttctatggaaccaaatgaaggcaaagatattagagaatgttataatcatgtctagactattgcgatctttttcccgtatctcttttcgatcaaattcctcctcatcatcttcttcaagaaactccaatttattaaatgatcaagataaccagacccaagaggtcgcccccaaacacaatctcttcgatgaggaagtccgattcgaagatatcaatcaaaacatggatgactggaacattccagaaatccctcaggatcaactatacgttcctgaaacaattaaggacaaacacaa

SEQ ID NO: 12658 - DNA, 1043 bp, Glycine max
  Gm_smallRNAprecursor_5491
ttagtccaccaatatttgtcgagaaataaatcaaaccaacttgaacatagtttgagactcgactcaacaattgacttgttgaaattggttcatgaaccaaataagttgaacttgagttaaaagttgagttcgttaaaaataaatgagttgagctacatatagcttgctttggttgattcattaactatatatatatatatatatatatatatatatataactgctgcatctatgcccatgtcaattaaaggcttgatggctacttgtacacagccgatgtgtagatatttatacttacggctatgttcataaattgaattttttgaaagtaaatgaaattcttcccctatatcttgtcctagaggaatattgttttctactattttgattatgtaatcaaagttgtgtttgtcagagtttagtatcagaggtcaatgtccataagggcatatgttaactgaacttatggatctgaaccatgtacagtaattttaatttaaacagtatgtgtttgaacagtattttctgaaagcacagcagtttgatattttagttgaatgatattgtagcagtaagtcccgtggttgagaaagggcagttagactaaggtgtaaggcagtcggcccctataacggtaatatactggtggctataggagtagtgttcaaactatattgtctgtaaaaaaaaatatttttcatttattcagattcaagaagttctgtaacatatagccttatggaaatatttctatggaaccaaatgaaggcaaagatattagagaatgttataatcatgtctagactattgcgatctttttcccgtatctcttttcgatcaaattcctcctcatcatcttcttcaagaaactccaatttattaaatgatcaagataaccagacccaagaggtcgcccccaaacacaatctcttcgatgaggaagtccgattcgaagatatcaatcaaaacatggatgactggaacattccagaaatccctcaggatcaactatacgttcctgaaacaattaaggacaaacacaa

SEQ ID NO: 12659 - DNA, 1203 bp, Glycine max
  Gm_smallRNAprecursor_5492
gaacatagtttgagactcgactcaacaattgacttgttgaaattggttcatgaaccaaataagttgaacttgagttaaaagttgagttcgttaaaaataaatgagttgagctacatatagcttgctttggttgattcattaactatatatatatatatatatatatatatatatataactgctgcatctatgcccatgtcaattaaaggcttgatggctacttgtacacagccgatgtgtagatatttatacttacggctatgttcataaattgaattttttgaaagtaaatgaaattcttcccctatatcttgtcctagaggaatattgttttctactattttgattatgtaatcaaagttgtgtttgtcagagtttagtatcagaggtcaatgtccataagggcatatgttaactgaacttatggatctgaaccatgtacagtaattttaatttaaacagtatgtgtttgaacagtattttctgaaagcacagcagtttgatattttagttgaatgatattgtagcagtaagtcccgtggttgagaaagggcagttagactaaggtgtaaggcagtcggcccctataacggtaatatactggtggctataggagtagtgttcaaactatattgtctgtaaaaaaaaatatttttcatttattcagattcaagaagttctgtaacatatagccttatggaaatatttctatggaaccaaatgaaggcaaagatattagagaatgttataatcatgtctagactattgcgatctttttcccgtatctcttttcgatcaaattcctcctcatcatcttcttcaagaaactccaatttattaaatgatcaagataaccagacccaagaggtcgcccccaaacacaatctcttcgatgaggaagtccgattcgaagatatcaatcaaaacatggatgactggaacattccagaaatccctcaggatcaactatacgttcctgaaacaattaaggacaaacacaactttgattacataatcaaaacagtagaaaataatattcctctaggacaagatataggggaagaatttcatttactttcaaaaaattcaatttatgaacatagccgtaagtataaatatctacacatcggctgtgtacaagtagccatcaagcccttaattgacataggcatagatgcagcagttttaatgtgtctaagagat

SEQ ID NO: 12660 - DNA, 1157 bp, Glycine max
  Gm_smallRNAprecursor_5493
gtatcagaggtcaatgtccataagggcatatgttaactgaacttatggatctgaaccatgtacagtaattttaatttaaacagtatgtgtttgaacagtattttctgaaagcacagcagtttgatattttagttgaatgatattgtagcagtaagtcccgtggttgagaaagggcagttagactaaggtgtaaggcagtcggcccctataacggtaatatactggtggctataggagtagtgttcaaactatattgtctgtaaaaaaaaatatttttcatttattcagattcaagaagttctgtaacatatagccttatggaaatatttctatggaaccaaatgaaggcaaagatattagagaatgttataatcatgtctagactattgcgatctttttcccgtatctcttttcgatcaaattcctcctcatcatcttcttcaagaaactccaatttattaaatgatcaagataaccagacccaagaggtcgcccccaaacacaatctcttcgatgaggaagtccgattcgaagatatcaatcaaaacatggatgactggaacattccagaaatccctcaggatcaactatacgttcctgaaacaattaaggacaaacacaactttgattacataatcaaaacagtagaaaataatattcctctaggacaagatataggggaagaatttcatttactttcaaaaaattcaatttatgaacatagccgtaagtataaatatctacacatcggctgtgtacaagtagccatcaagcccttaattgacataggcatagatgcagcagttttaatgtgtctaagagatattaggcataataaatttgaagactccctaattggaacagtcgaaaccagcctaggacaaggtccaatatattttaattgttacccaaacaaaacagtgagtctgatggatagatacattcttgactctctgttcttaaacatccactttcatggccttgacatgaaagaaggatcaatcccagcagccttaatttataggatccagtacaaggtcatgaatacttgtgcatctagagtcttattaaaacctcaaaaaggagaaacaactttgtatatcactgatatgacaaaggctaacgtttctctcccgagaaaaataaaatgggatgaa

SEQ ID NO: 12661 - DNA, 1104 bp, Glycine max
  Gm_smallRNAprecursor_5494
ttattaatgatttcgttttagaaacaatggccctattggacataggggttgattcaaactgcattttagaaggattaattcctacaaaattctttgagaaaacctcagaaaaattaagtacggcaaacggctcaaaattaaaaattaattttaagctatcaaatgcaatcattgagaaccaaggtcttaggattaacacaaactttcttctggtaaaaaaccttaagaacgaagtaatcctaggaacccccttccttcgagccttgtttcctattcaaatatctaatgaaggaataaccacaaattacttaggaagaaaaattatatttaatttttctactaaaccaatctccagaaatataaatcttatagaaaataagattaatcaaattaacttcttaaaagaagaagtatcttttaataatattcagatacaactgggaaaatcccaagtaaaagaaaaaattcaatctttattaaatcatattgaatcaactatctgttctgatttgccacatgcattttgggatagaaagaaacatattgttgatctcccttatgagaaagaatttagggaaaaacaaattcccacaaaagccagaccaatccaaatgaacgaagaactccttcaatactgccaaaaggaaatcaaggatttgcttgataaaggcctaatccggaaaagcaaaagcccatggtcttgtgcggctttttatgtcaacaaacaatctgagattgagcgtggaacaccccgcttagtcataaattacaaaccactaaatcaagcattacaatggattaggtatcctattccaaacaaaaaagacttacttaatagattaaattctgcaaagatattttcaaaatttgatatgaaatctggattctggcaaatccaaatccaagaatcagataggtacaaaacggcgtttactgtacctttcgggcaatatgaatggaatgtgatgtcattcggactgaagaatgccccttcagaatttcaaaaaattatgaatgatatttttaatccctattcaaaatttgtcattgtctacatagatgatgttttaatcttttcccaaaacattgaccaacatttcaaac

SEQ ID NO: 12662 - DNA, 1239 bp, Glycine max
  Gm_smallRNAprecursor_5495
ctcagaaaaattaagtacggcaaacggctcaaaattaaaaattaattttaagctatcaaatgcaatcattgagaaccaaggtcttaggattaacacaaactttcttctggtaaaaaaccttaagaacgaagtaatcctaggaacccccttccttcgagccttgtttcctattcaaatatctaatgaaggaataaccacaaattacttaggaagaaaaattatatttaatttttctactaaaccaatctccagaaatataaatcttatagaaaataagattaatcaaattaacttcttaaaagaagaagtatcttttaataatattcagatacaactgggaaaatcccaagtaaaagaaaaaattcaatctttattaaatcatattgaatcaactatctgttctgatttgccacatgcattttgggatagaaagaaacatattgttgatctcccttatgagaaagaatttagggaaaaacaaattcccacaaaagccagaccaatccaaatgaacgaagaactccttcaatactgccaaaaggaaatcaaggatttgcttgataaaggcctaatccggaaaagcaaaagcccatggtcttgtgcggctttttatgtcaacaaacaatctgagattgagcgtggaacaccccgcttagtcataaattacaaaccactaaatcaagcattacaatggattaggtatcctattccaaacaaaaaagacttacttaatagattaaattctgcaaagatattttcaaaatttgatatgaaatctggattctggcaaatccaaatccaagaatcagataggtacaaaacggcgtttactgtacctttcgggcaatatgaatggaatgtgatgtcattcggactgaagaatgccccttcagaatttcaaaaaattatgaatgatatttttaatccctattcaaaatttgtcattgtctacatagatgatgttttaatcttttcccaaaacattgaccaacatttcaaacatctccagactttcatccatatcatcaaacaaaatggtttggcagtctccaaatcaaaaatcaatcttttccaaactcgaattcgattccttggtcacaatatatatcaaggtacaatcattccaatagaaaggtcaattgagtttgctagcaaatttcccaaccaaatcttagacaaaacccagttactaagatttctaggttgtctaaattacgtaggagaatttgtcccctattt

SEQ ID NO: 12663 - DNA, 1232 bp, Glycine max
  Gm_smallRNAprecursor_5496
atagaaagaaacatattgttgatctcccttatgagaaagaatttagggaaaaacaaattcccacaaaagccagaccaatccaaatgaacgaagaactccttcaatactgccaaaaggaaatcaaggatttgcttgataaaggcctaatccggaaaagcaaaagcccatggtcttgtgcggctttttatgtcaacaaacaatctgagattgagcgtggaacaccccgcttagtcataaattacaaaccactaaatcaagcattacaatggattaggtatcctattccaaacaaaaaagacttacttaatagattaaattctgcaaagatattttcaaaatttgatatgaaatctggattctggcaaatccaaatccaagaatcagataggtacaaaacggcgtttactgtacctttcgggcaatatgaatggaatgtgatgtcattcggactgaagaatgccccttcagaatttcaaaaaattatgaatgatatttttaatccctattcaaaatttgtcattgtctacatagatgatgttttaatcttttcccaaaacattgaccaacatttcaaacatctccagactttcatccatatcatcaaacaaaatggtttggcagtctccaaatcaaaaatcaatcttttccaaactcgaattcgattccttggtcacaatatatatcaaggtacaatcattccaatagaaaggtcaattgagtttgctagcaaatttcccaaccaaatcttagacaaaacccagttactaagatttctaggttgtctaaattacgtaggagaatttgtcccctatttaaacaatattgtcaagccattgcatgataggctgaagaaaaatccgcctccttggtctgacctccatacacaaacagttaaagaaatcaaagtcaaactctaatccataaaatgtctgtatcttcctattccacaggcatttaaaattgtcgaaattgatgcttcagacataggttatggtggcatcctcaaacaaagagtccatggccaagatcatgtcattgcatatacatcaaaacattggaatcctgcacaattaaaatattcaactgttaaaaaggaagttttagcaattgttttgtgcatttccaaatttcaatcagatttattaaaccaaaattttttaatcagagttgattgtaaatcagccaaagatattttacaaaaagatgttaaaaaccttgcctcaaaacaaatt

SEQ ID NO: 12664 - DNA, 1218 bp, Glycine max
  Gm_smallRNAprecursor_5497
ttaatagattaaattctgcaaagatattttcaaaatttgatatgaaatctggattctggcaaatccaaatccaagaatcagataggtacaaaacggcgtttactgtacctttcgggcaatatgaatggaatgtgatgtcattcggactgaagaatgccccttcagaatttcaaaaaattatgaatgatatttttaatccctattcaaaatttgtcattgtctacatagatgatgttttaatcttttcccaaaacattgaccaacatttcaaacatctccagactttcatccatatcatcaaacaaaatggtttggcagtctccaaatcaaaaatcaatcttttccaaactcgaattcgattccttggtcacaatatatatcaaggtacaatcattccaatagaaaggtcaattgagtttgctagcaaatttcccaaccaaatcttagacaaaacccagttactaagatttctaggttgtctaaattacgtaggagaatttgtcccctatttaaacaatattgtcaagccattgcatgataggctgaagaaaaatccgcctccttggtctgacctccatacacaaacagttaaagaaatcaaagtcaaactctaatccataaaatgtctgtatcttcctattccacaggcatttaaaattgtcgaaattgatgcttcagacataggttatggtggcatcctcaaacaaagagtccatggccaagatcatgtcattgcatatacatcaaaacattggaatcctgcacaattaaaatattcaactgttaaaaaggaagttttagcaattgttttgtgcatttccaaatttcaatcagatttattaaaccaaaattttttaatcagagttgattgtaaatcagccaaagatattttacaaaaagatgttaaaaaccttgcctcaaaacaaatttttgcaagatggcaagcaattctaagtgtctttgattttgacataaaatacatcaagggcacctcaaattcattacctgactaccttacccgtgaattcttacagaaaagtggtaatggctcctaaggcatcaggaatctccttaaggggaggaagaagtacaggcaaaggagccagactggctcttccagagccaaccattaagaaatcatcaacctcttctgggtcaccaacccaggctgggtaatctacccagaaaaccaatttagaagggtcatcaacccagatt

SEQ ID NO: 12665 - DNA, 1115 bp, Glycine max
  Gm_smallRNAprecursor_5498
tcaattgagtttgctagcaaatttcccaaccaaatcttagacaaaacccagttactaagatttctaggttgtctaaattacgtaggagaatttgtcccctatttaaacaatattgtcaagccattgcatgataggctgaagaaaaatccgcctccttggtctgacctccatacacaaacagttaaagaaatcaaagtcaaactctaatccataaaatgtctgtatcttcctattccacaggcatttaaaattgtcgaaattgatgcttcagacataggttatggtggcatcctcaaacaaagagtccatggccaagatcatgtcattgcatatacatcaaaacattggaatcctgcacaattaaaatattcaactgttaaaaaggaagttttagcaattgttttgtgcatttccaaatttcaatcagatttattaaaccaaaattttttaatcagagttgattgtaaatcagccaaagatattttacaaaaagatgttaaaaaccttgcctcaaaacaaatttttgcaagatggcaagcaattctaagtgtctttgattttgacataaaatacatcaagggcacctcaaattcattacctgactaccttacccgtgaattcttacagaaaagtggtaatggctcctaaggcatcaggaatctccttaaggggaggaagaagtacaggcaaaggagccagactggctcttccagagccaaccattaagaaatcatcaacctcttctgggtcaccaacccaggctgggtaatctacccagaaaaccaatttagaagggtcatcaacccagattgcctcaatcaaacctgagccatccactcaggaatctcccaaaccggtaaccgccaaacaaacatcggccgactatgcatggccaattgaaacccttcaggcccttcaagacatgggtctaaccaaatttccaaaaataatcaaaaaatcttgggtagacattgcctcagaatctgatgatgaatttgaatcaaatttacaaacaatgatccaaaatgcatcaatgaccaaaacaactaccaatcctaaagggaaactacctttagccaaagctcaaacaccacctaccaaacaaactaacaatt

SEQ ID NO: 12666 - DNA, 1174 bp, Glycine max
  Gm_smallRNAprecursor_5499
acaaagagtccatggccaagatcatgtcattgcatatacatcaaaacattggaatcctgcacaattaaaatattcaactgttaaaaaggaagttttagcaattgttttgtgcatttccaaatttcaatcagatttattaaaccaaaattttttaatcagagttgattgtaaatcagccaaagatattttacaaaaagatgttaaaaaccttgcctcaaaacaaatttttgcaagatggcaagcaattctaagtgtctttgattttgacataaaatacatcaagggcacctcaaattcattacctgactaccttacccgtgaattcttacagaaaagtggtaatggctcctaaggcatcaggaatctccttaaggggaggaagaagtacaggcaaaggagccagactggctcttccagagccaaccattaagaaatcatcaacctcttctgggtcaccaacccaggctgggtaatctacccagaaaaccaatttagaagggtcatcaacccagattgcctcaatcaaacctgagccatccactcaggaatctcccaaaccggtaaccgccaaacaaacatcggccgactatgcatggccaattgaaacccttcaggcccttcaagacatgggtctaaccaaatttccaaaaataatcaaaaaatcttgggtagacattgcctcagaatctgatgatgaatttgaatcaaatttacaaacaatgatccaaaatgcatcaatgaccaaaacaactaccaatcctaaagggaaactacctttagccaaagctcaaacaccacctaccaaacaaactaacaattatatttataaaaataaatttacaactgttttgcagatggaacctgaattttgggacaaaaatcccttcaaggcgacggccaaggctttcccaccaggatttcactacaaaccaaccaccatcctgaaaacaagaactttttatgaattgattttggtagattcaaactcagtatctatcaaacatttcaaagacccaaaagaccaaacattaaacacccactcgacaatccaaatactaaaagttcttcaaccaagacactttggttcggacttgaacaaaggaaagagattttcagttccatttgatccggtaggttatacctattgggattatgttgatgcttggactaaggt

SEQ ID NO: 12667 - DNA, 1173 bp, Glycine max
  Gm_smallRNAprecursor_5500
caaagagtccatggccaagatcatgtcattgcatatacatcaaaacattggaatcctgcacaattaaaatattcaactgttaaaaaggaagttttagcaattgttttgtgcatttccaaatttcaatcagatttattaaaccaaaattttttaatcagagttgattgtaaatcagccaaagatattttacaaaaagatgttaaaaaccttgcctcaaaacaaatttttgcaagatggcaagcaattctaagtgtctttgattttgacataaaatacatcaagggcacctcaaattcattacctgactaccttacccgtgaattcttacagaaaagtggtaatggctcctaaggcatcaggaatctccttaaggggaggaagaagtacaggcaaaggagccagactggctcttccagagccaaccattaagaaatcatcaacctcttctgggtcaccaacccaggctgggtaatctacccagaaaaccaatttagaagggtcatcaacccagattgcctcaatcaaacctgagccatccactcaggaatctcccaaaccggtaaccgccaaacaaacatcggccgactatgcatggccaattgaaacccttcaggcccttcaagacatgggtctaaccaaatttccaaaaataatcaaaaaatcttgggtagacattgcctcagaatctgatgatgaatttgaatcaaatttacaaacaatgatccaaaatgcatcaatgaccaaaacaactaccaatcctaaagggaaactacctttagccaaagctcaaacaccacctaccaaacaaactaacaattatatttataaaaataaatttacaactgttttgcagatggaacctgaattttgggacaaaaatcccttcaaggcgacggccaaggctttcccaccaggatttcactacaaaccaaccaccatcctgaaaacaagaactttttatgaattgattttggtagattcaaactcagtatctatcaaacatttcaaagacccaaaagaccaaacattaaacacccactcgacaatccaaatactaaaagttcttcaaccaagacactttggttcggacttgaacaaaggaaagagattttcagttccatttgatccggtaggttatacctattgggattatgttgatgcttggactaaggt

SEQ ID NO: 12668 - DNA, 1173 bp, Glycine max; identical to SEQ ID NO: 12667
  Gm_smallRNAprecursor_5501

SEQ ID NO: 12669 - DNA, 1248 bp, Glycine max
  Gm_smallRNAprecursor_5502
cccttcaagacatgggtctaaccaaatttccaaaaataatcaaaaaatcttgggtagacattgcctcagaatctgatgatgaatttgaatcaaatttacaaacaatgatccaaaatgcatcaatgaccaaaacaactaccaatcctaaagggaaactacctttagccaaagctcaaacaccacctaccaaacaaactaacaattatatttataaaaataaatttacaactgttttgcagatggaacctgaattttgggacaaaaatcccttcaaggcgacggccaaggctttcccaccaggatttcactacaaaccaaccaccatcctgaaaacaagaactttttatgaattgattttggtagattcaaactcagtatctatcaaacatttcaaagacccaaaagaccaaacattaaacacccactcgacaatccaaatactaaaagttcttcaaccaagacactttggttcggacttgaacaaaggaaagagattttcagttccatttgatccggtaggttatacctattgggattatgttgatgcttggactaaggtgttttggcaccaaaatacccgtttcaagcattcatggctgatatatttcaagaccaatacaatttacaattttcccaattggtttttgcaatggtgggacttctttggaccaatcccagagatattcccagaaatagtcctacaaggattttctcaatttgagagacaatacaattcgcaggaatcatgaattccagcagatcttaaatacttttcaagctttgcactgtcatggatcttctcatggcaatatcgttacagcaagactgaaaagacaaaccaatatccatcactacaaagacacgcatttgtaaaatggtggacacaatttgactcatccaaagcggatccagaacaagtgaaactctggttccaatcccatccagaattcctcaaagcagctaatccagaaacttctgtgtttttgaaccaaaagtctcatctggcagcatttttagcaggatcgaaatcaaaggaggtcttagctaaaaatctaaaggaagttctgcaaatgttacagcaggaagaagaaggttcatcctcaaagaaggaagaaacaagttctgctgaagaagaagaagaagaagaccccttttaccaaaacgaagatgattgttttggtatctgtttagattaaatttaatttcggtcacaaaaccgtctgtttgtaattaatgtgtaattaatgc

SEQ ID NO: 12670 - DNA, 1189 bp, Glycine max
  Gm_smallRNAprecursor_5503
gacaatccaaatactaaaagttcttcaaccaagacactttggttcggacttgaacaaaggaaagagattttcagttccatttgatccggtaggttatacctattgggattatgttgatgcttggactaaggtgttttggcaccaaaatacccgtttcaagcattcatggctgatatatttcaagaccaatacaatttacaattttcccaattggtttttgcaatggtgggacttctttggaccaatcccagagatattcccagaaatagtcctacaaggattttctcaatttgagagacaatacaattcgcaggaatcatgaattccagcagatcttaaatacttttcaagctttgcactgtcatggatcttctcatggcaatatcgttacagcaagactgaaaagacaaaccaatatccatcactacaaagacacgcatttgtaaaatggtggacacaatttgactcatccaaagcggatccagaacaagtgaaactctggttccaatcccatccagaattcctcaaagcagctaatccagaaacttctgtgtttttgaaccaaaagtctcatctggcagcatttttagcaggatcgaaatcaaaggaggtcttagctaaaaatctaaaggaagttctgcaaatgttacagcaggaagaagaaggttcatcctcaaagaaggaagaaacaagttctgctgaagaagaagaagaagaagaccccttttaccaaaacgaagatgattgttttggtatctgtttagattaaatttaatttcggtcacaaaaccgtctgtttgtaattaatgtgtaattaatgctggacaatactatctgtcctgtagccattaaagtcccggtcaaaactacttgtcttgtaacaaacagtcaaatagtcccggtcaaaactaccggcaactaccggtcttagatttttggctatataaggagtcctcaagtatgttgtgaggcaccctttcatttggccatttttcaggtttctgaagagaggtgctctgaaacaagatttttgtaagcgcttctttcaagtttcaataaatttctattttttcatctctcttctctctctttaccgatcctgtgcggctctgccgccgcttcgatttctttgtttatgaaaacctgggatttgtaagctggtctccgatgtgcccttaatatctgtttt

SEQ ID NO: 12671 - DNA, 1049 bp, Glycine max
  Gm_smallRNAprecursor_5504
tcaagaccaatacaatttacaattttcccaattggtttttgcaatggtgggacttctttggaccaatcccagagatattcccagaaatagtcctacaaggattttctcaatttgagagacaatacaattcgcaggaatcatgaattccagcagatcttaaatacttttcaagctttgcactgtcatggatcttctcatggcaatatcgttacagcaagactgaaaagacaaaccaatatccatcactacaaagacacgcatttgtaaaatggtggacacaatttgactcatccaaagcggatccagaacaagtgaaactctggttccaatcccatccagaattcctcaaagcagctaatccagaaacttctgtgtttttgaaccaaaagtctcatctggcagcatttttagcaggatcgaaatcaaaggaggtcttagctaaaaatctaaaggaagttctgcaaatgttacagcaggaagaagaaggttcatcctcaaagaaggaagaaacaagttctgctgaagaagaagaagaagaagaccccttttaccaaaacgaagatgattgttttggtatctgtttagattaaatttaatttcggtcacaaaaccgtctgtttgtaattaatgtgtaattaatgctggacaatactatctgtcctgtagccattaaagtcccggtcaaaactacttgtcttgtaacaaacagtcaaatagtcccggtcaaaactaccggcaactaccggtcttagatttttggctatataaggagtcctcaagtatgttgtgaggcaccctttcatttggccatttttcaggtttctgaagagaggtgctctgaaacaagatttttgtaagcgcttctttcaagtttcaataaatttctattttttcatctctcttctctctctttaccgatcctgtgcggctctgccgccgcttcgatttctttgtttatgaaaacctgggatttgtaagctggtctccgatgtgcccttaatatctgttttacaagtttatattttcctttccatttatcatactgcatt

SEQ ID NO: 12672 - DNA, 1216 bp, Glycine max
  Gm_smallRNAprecursor_5505
caatacaatttacaattttcccaattggtttttgcaatggtgggacttctttggaccaatcccagagatattcccagaaatagtcctacaaggattttctcaatttgagagacaatacaattcgcaggaatcatgaattccagcagatcttaaatacttttcaagctttgcactgtcatggatcttctcatggcaatatcgttacagcaagactgaaaagacaaaccaatatccatcactacaaagacacgcatttgtaaaatggtggacacaatttgactcatccaaagcggatccagaacaagtgaaactctggttccaatcccatccagaattcctcaaagcagctaatccagaaacttctgtgtttttgaaccaaaagtctcatctggcagcatttttagcaggatcgaaatcaaaggaggtcttagctaaaaatctaaaggaagttctgcaaatgttacagcaggaagaagaaggttcatcctcaaagaaggaagaaacaagttctgctgaagaagaagaagaagaagaccccttttaccaaaacgaagatgattgttttggtatctgtttagattaaatttaatttcggtcacaaaaccgtctgtttgtaattaatgtgtaattaatgctggacaatactatctgtcctgtagccattaaagtcccggtcaaaactacttgtcttgtaacaaacagtcaaatagtcccggtcaaaactaccggcaactaccggtcttagatttttggctatataaggagtcctcaagtatgttgtgaggcaccctttcatttggccatttttcaggtttctgaagagaggtgctctgaaacaagatttttgtaagcgcttctttcaagtttcaataaatttctattttttcatctctcttctctctctttaccgatcctgtgcggctctgccgccgcttcgatttctttgtttatgaaaacctgggatttgtaagctggtctccgatgtgcccttaatatctgttttacaagtttatattttcctttccatttatcatactgcattctaacttcctatttgtccgtttgatcttattccgctaaaagaatatatatatatatatatatatatatatatatatatatatatatatatatatatatcttttgaaagaaatgtataaataaaaacatgtacaataactataattaacatatatataattattaaattttataa

SEQ ID NO: 12673 - DNA, 1110 bp, Glycine max
  Gm_smallRNAprecursor_5506
gatcgacatttggcaaagggactgcttcgatccattttgtgaagtaatcaataccaactataatataacgctggttcttagaagaggcaggcttgatttcaccaattaggtccaaagcccatcctctgaaaggccaaggtttgattatggagtgtaattcactagcaggtacatgctgtatccctgcatgcttttggcattcctgacagcctttagcaaattctatgcagtctttcaacatcgaaggccaatacaaaccttgtcgaaataaaaagccatttcattttatggcctgcttgatgtgatccacaagccccactgtgaacatgggaaactgccaagtatgcttctgattcacttagacattttagcaacactccttctgcagtctttttaaacaaatcatttcccacaatcacgtaatttaaagccctatatttgatctttcgagccacattgcctattggattttccaaatattcaataatggactttctccaatcattatctaacatattgtcaatggccaaaatttgaattttttcctgaagatcattcatactttcatcttcattattttgtggtatacttgcccccacaagttttggcattggcaatttagtgcttaatggctctggtaacaccagtttatcttttatttcgattaactgagttaacttttccttcgacattttgtaccctgaagctatttgggctaaatcatttgcttctcggttttcttgtcgaggtacatgctcaatgttgatataatcgaaatgattcagaagagaacttgctataacaaaatattttgctaagtgttcattaacacatttgtattcttgtgttaattgcctcaacactaattctgaatcacctcttatattaacatttcttgcccccaggctaattaaaatttcaaggcctgtaattagagcttcatactcagcctcattattagaacaaagccctctgattttatatttgaacttagttggaactttattgggggatattattaaaattccaattccagttccatgtttgtgtttcgatccatcgaaatacaaaacccaaggctctgtatcgacataatcttgcagcatctcg

SEQ ID NO: 12674 - DNA, 1083 bp, Glycine max
  Gm_smallRNAprecursor_5507
aaagggactgcttcgatccattttgtgaagtaatcaataccaactataatataacgctggttcttagaagaggcaggcttgatttcaccaattaggtccaaagcccatcctctgaaaggccaaggtttgattatggagtgtaattcactagcaggtacatgctgtatccctgcatgcttttggcattcctgacagcctttagcaaattctatgcagtctttcaacatcgaaggccaatacaaaccttgtcgaaataaaaagccatttcattttatggcctgcttgatgtgatccacaagccccactgtgaacatgggaaactgccaagtatgcttctgattcacttagacattttagcaacactccttctgcagtctttttaaacaaatcatttcccacaatcacgtaatttaaagccctatatttgatctttcgagccacattgcctattggattttccaaatattcaataatggactttctccaatcattatctaacatattgtcaatggccaaaatttgaattttttcctgaagatcattcatactttcatcttcattattttgtggtatacttgcccccacaagttttggcattggcaatttagtgcttaatggctctggtaacaccagtttatcttttatttcgattaactgagttaacttttccttcgacattttgtaccctgaagctatttgggctaaatcatttgcttctcggttttcttgtcgaggtacatgctcaatgttgatataatcgaaatgattcagaagagaacttgctataacaaaatattttgctaagtgttcattaacacatttgtattcttgtgttaattgcctcaacactaattctgaatcacctcttatattaacatttcttgcccccaggctaattaaaatttcaaggcctgtaattagagcttcatactcagcctcattattagaacaaagccctctgattttatatttgaacttagttggaactttattgggggatattattaaaattccaattccagttccatgtttgtgtttcgatccatcgaaatacaaaacccaaggctctgtatcgacataatc

SEQ ID NO: 12675 - DNA, 1176 bp, Glycine max
  Gm_smallRNAprecursor_5508
agccacaatctgacccttaacagatttcaaaggcttgtacgttaaagaatattctgttaatgctaaagcccattttccaattctactgtgtaaaatcggtttagacaacatgtgcttaataatatcataatgagaatacacataaacatcaacaggctttatatattgcttaagttttgcacaagagaaatacagacaaagacaaagtttttctatggcagtatatctagtttctgcatcatttagtacacgactaagatagtaaattgcatgttctatgccatcatcatcttcctgagccaacatgctaccaatggtcttgtcagacgcagcaatatacaacttcatagacttgtttcgactaggaggcattaacacaggaggcttgatcagatattctttaatttcatcgaaagccttttgatgctcttcattccatttgaatggttcatctttcttgagtcgaagtgatggcgaaaaaatctgagctttgccacttagattcgaaatgaatcgcctcaagaagttgatttttcctagcaaagactgaagctgttttttggtcgaaggaggcttcgtctcaagaatagcctttgtcttattttgatttatctcaatgccttttttatgcaccacaaaaccaaggaaatctcctgcatgcacacaaaaagcacactttaatggattcatttttaatccatgtttcctcattcgttcgaaagattgcctaagataatccaaatggctatcttctgaggaggatttgatgattatatcatcaatataaatttgcataaatgtgtcaataaaatcatgaaacatggaattcatggccctttgataagtggccccagcatttttcaacccaaagggcataaccacccattcataagtgcctaaagcaccagggcatcgaaatgctgttttcgacacatcattttcagcaataaatatttggttataaccagaataaccatctaacatgcttaaaaattcgaaaccagctgccgaatctaccaacatttccgctactggcatagcatattcatctttaggtgtagcattatttagatccctaaaatctatgcatactctaagagttccattctttttaatgacagggactatatttgctaaccattcgacatacctggcagccctgatgaatttacacct

SEQ ID NO: 12676 - DNA, 1157 bp, Glycine max
  Gm_smallRNAprecursor_5509
caattctactgtgtaaaatcggtttagacaacatgtgcttaataatatcataatgagaatacacataaacatcaacaggctttatatattgcttaagttttgcacaagagaaatacagacaaagacaaagtttttctatggcagtatatctagtttctgcatcatttagtacacgactaagatagtaaattgcatgttctatgccatcatcatcttcctgagccaacatgctaccaatggtcttgtcagacgcagcaatatacaacttcatagacttgtttcgactaggaggcattaacacaggaggcttgatcagatattctttaatttcatcgaaagccttttgatgctcttcattccatttgaatggttcatctttcttgagtcgaagtgatggcgaaaaaatctgagctttgccacttagattcgaaatgaatcgcctcaagaagttgatttttcctagcaaagactgaagctgttttttggtcgaaggaggcttcgtctcaagaatagcctttgtcttattttgatttatctcaatgccttttttatgcaccacaaaaccaaggaaatctcctgcatgcacacaaaaagcacactttaatggattcatttttaatccatgtttcctcattcgttcgaaagattgcctaagataatccaaatggctatcttctgaggaggatttgatgattatatcatcaatataaatttgcataaatgtgtcaataaaatcatgaaacatggaattcatggccctttgataagtggccccagcatttttcaacccaaagggcataaccacccattcataagtgcctaaagcaccagggcatcgaaatgctgttttcgacacatcattttcagcaataaatatttggttataaccagaataaccatctaacatgcttaaaaattcgaaaccagctgccgaatctaccaacatttccgctactggcatagcatattcatctttaggtgtagcattatttagatccctaaaatctatgcatactctaagagttccattctttttaatgacagggactatatttgctaaccattcgacatacctggcagccctgatgaatttacacctcagcaacctttcgatctcttccttgatcttggacatgatttctggtgcgaatcttctt

SEQ ID NO: 12677 - DNA, 1133 bp, Glycine max
  Gm_smallRNAprecursor_5510
acggatggcatagcggaaaataacggatgtcatgacggacaaaaaaaaaatacatatatataaactcattgaaattgaaaaaaataatggattacattcaaataaactaaaagtttcatgagttcatacaataatcaattaccaacaccaaataaactcattaaagagttcaaaataagaaaatgataaaaacataatgtaaagtgcaaagtgaaggttgaggctctaatcatcttcttcaatcccaacataatcatcttcgttgttatcatatggtaatggagcatctccctcttccccatcaaacacctcaaaattgaccatgatttcttcttcagattcaagatcaatattctcctcaatctagatcctcatcattttcttggactgttttttgctttcttgatgaagatccaacaaccattgcctgttttttagaagtttgggcagtagtaacacttgttgttttttgttttttacgcctagtatacatcctacactctccaacccccgaagcctgatacacagttgcccaatttagagcatcatcatcttcaaataccaaatcatttccagcatcattatcaccatcttgatccatctctcccacgagccattcattgcacacatcaatatcattaagagaaattggatcaatttcatctcttgcattatatctttgcttcaattgttggttgttattgcacacatcaatatcttttcttggaagctgcaacgttacccgacttcccaatcaggtgttgtttggatctggttattcctccctttgtgattttttcacagaaattacaaacaatggtgtttctatctccttccaccggtgaatgacaatattttcagcctgggtctgtcttatttttcctcgttgcacttgcagtagcagcatcgaatgatggttcaaccatttaaaagaggactgaacagaaaaaaaaaattgtggtgtcaaataaaataaaaaataaaaatgggactgtcaaaagtaaaaagagggtgtcaaatagcaaaagggaaaaaaaagctgcagacaaagaaaaggggtgtcaaacagcaaaagcaaaactaaaaaaaaaataaagcttgcgcccaccactgagttggatcgcgatgttcac

SEQ ID NO: 12678 - DNA, 1033 bp, Glycine max
  Gm_smallRNAprecursor_5511
tggatagatcaatatgtgtaatagtattcattggatgaatattaacaagtctcatttattaattttacacatataaaagatgaatgtaggaatctgatcattgaacttactcaaataaaattttctaatggttgatattatcttagattgtcaatagaaaattctcaagaagaaatgtaaatcttttttttacctgagattatcatagcaggttattttttatattttaattctagactttgatcctaatgtttagagcactagttgaatggacattggatataaataaatatgtgtaaaattgatgattatttaagaaggaattcatcaactctggttaacgagtttgagctttatgaataaaataggcaaaattgcacttttggtccaccaatttatctccaatttcgaatttgatccccctataatttaattcacaaatttggtccccagttttataaattcctacaaaattggtcctgcaagcccgatttggatgttgaccgttaacctcagacgttgactgccacgtgtcaatgccacatgtcaacgtcaaagtgattccctgtaaaggcttcatttttttaggtaaaattgcacttttggtccccagttttactccaatttcgattttggtccccttataatttaattcacacatttggtctcccagttttataaatccctttataaattcatccaaatttcattattcgagaagttgtatttcaaatttcaaactaaaatatcattgtcatacataggtcacttaagcagtcgtatatacataatatcgcatgggggagcaaaaaaaaaaaagagggagttattatagaacctgttaaagtaagagatctgaaaatttcagacctaggttgggattcatgcgccactttcccaagttgaacaactccggaagtgggagagagataaagagtgatttttctctgggttccaagtgagtgaaaaacttgcgatgaaaaagaagtgcgaaatttatcaagacctaccatgtctctagcaccagtggcta

SEQ ID NO: 12679 - DNA, 1213 bp, Glycine max
  Gm_smallRNAprecursor_5512
ttaccggaactgttacaaaacttttacaaattacatttcttaaaagattctgacaaattagttacaataattcatgattactacaactaattaatcatcgtctaatgatataccgaaacaatcatcttcattttggtagaatggatcgtcttcttggtcatcattagtctctgatgattcagcttccttcttggaaggttcttcttccacttcctgttgaagtagttggagaacttctttgagattctgagcaagactctctttagattttgagcttgctaagaatgctgccagttgcgacttctgattcaggaatagagacgtctctggatcagcaggtttaaggaactcaggattgctctggaaccagttcttgacttgatctggagcagcctttgaagtatcgaattgtgaccaccattttacaaaggcgtgtctctgtaacggtggatattgcttgctgtttcagtttttccgtatctgtattgccatgaaaaaatccatgacaaggcaaaactggaaaaatattttaaatctgctagaatacgtgattccttgccattatagagcttgttgaattgttggaatccctgttggacttcttctgggaatatctgtggaattggtctgaagtagttccaccattggaggaaccaatttggaaaattatacacagtattatttttaaagtaaattagccatgaatgcttgaatttactattttgatgccagaacacattggtccaggcgtcgatgtaatcccaataattatatcctgcggggtcaaatggagcagaaatttttttgggttggtttaggtttgagccataatgttgtggctgcataacctttaggatttggattgtggaatgggtatttagatttggatctttggggtctttgaagtgtttaatagatactgagttcgtatctattagaatgaattcgtagaatttacgggttttgtttgtggctattggcctgtaatggaatcctggggggaatactttggcggttgctttgaagggattcttgtcccagtattctggttccatttgtaaaacattgaaaaacttgttttttgaaatataactgttgttgggttgtgatgttgattcttgttgagtcaacaattggcttggtctttggttgcagacagttttggtctgtttggccttttggatttgtttttgcagatctgtttcagaatcat

SEQ ID NO: 12680 - DNA, 1148 bp, Glycine max
  Gm_smallRNAprecursor_5513
agaatacgtgattccttgccattatagagcttgttgaattgttggaatccctgttggacttcttctgggaatatctgtggaattggtctgaagtagttccaccattggaggaaccaatttggaaaattatacacagtattatttttaaagtaaattagccatgaatgcttgaatttactattttgatgccagaacacattggtccaggcgtcgatgtaatcccaataattatatcctgcggggtcaaatggagcagaaatttttttgggttggtttaggtttgagccataatgttgtggctgcataacctttaggatttggattgtggaatgggtatttagatttggatctttggggtctttgaagtgtttaatagatactgagttcgtatctattagaatgaattcgtagaatttacgggttttgtttgtggctattggcctgtaatggaatcctggggggaatactttggcggttgctttgaagggattcttgtcccagtattctggttccatttgtaaaacattgaaaaacttgttttttgaaatataactgttgttgggttgtgatgttgattcttgttgagtcaacaattggcttggtctttggttgcagacagttttggtctgtttggccttttggatttgtttttgcagatctgtttcagaatcatcgtctgattctgaggccatttctgcccaggtctttttggccaattttggtattttggtgaggcctatatcttctaaggccaagagagtttgtattgaccaggcatagtcagccatagtctgtttggttgttgttggttttggggattcctgagttgatgactcaggtttgtcggtagttatctgggtcaatgacccttcaatctttcctttctgggttgatgacccagtctgggtaggtgacccagaagatgttgtagttgcctttttggttattggctctggtagagccagtagaacctcttttccttttgtactggatcttcctcctctgccggaggaactagacaccttaggaggcatcgggaattttctgtaaaaattcacgggtgaggtagtcaggtagagagttggaagagcccttgatatattctatattaaaatcaaagacacttaaaattgcttgccatcttgcaa

SEQ ID NO: 12681 - DNA, 1149 bp, Glycine max
  Gm_smallRNAprecursor_5514
agaatacgtgattccttgccattatagagcttgttgaattgttggaatccctgttggacttcttctgggaatatctgtggaattggtctgaagtagttccaccattggaggaaccaatttggaaaattatacacagtattatttttaaagtaaattagccatgaatgcttgaatttactattttgatgccagaacacattggtccaggcgtcgatgtaatcccaataattatatcctgcggggtcaaatggagcagaaatttttttgggttggtttaggtttgagccataatgttgtggctgcataacctttaggatttggattgtggaatgggtatttagatttggatctttggggtctttgaagtgtttaatagatactgagttcgtatctattagaatgaattcgtagaatttacgggttttgtttgtggctattggcctgtaatggaatcctggggggaatactttggcggttgctttgaagggattcttgtcccagtattctggttccatttgtaaaacattgaaaaacttgttttttgaaatataactgttgttgggttgtgatgttgattcttgttgagtcaacaattggcttggtctttggttgcagacagttttggtctgtttggccttttggatttgtttttgcagatctgtttcagaatcatcgtctgattctgaggccatttctgcccaggtctttttggccaattttggtattttggtgaggcctatatcttctaaggccaagagagtttgtattgaccaggcatagtcagccatagtctgtttggttgttgttggttttggggattcctgagttgatgactcaggtttgtcggtagttatctgggtcaatgacccttcaatctttcctttctgggttgatgacccagtctgggtaggtgacccagaagatgttgtagttgcctttttggttattggctctggtagagccagtagaacctcttttccttttgtactggatcttcctcctctgccggaggaactagacaccttaggaggcatcgggaattttctgtaaaaattcacgggtgaggtagtcaggtagagagttggaagagcccttgatatattctatattaaaatcaaagacacttaaaattgcttgccatcttgcaaa

SEQ ID NO: 12682 - DNA, 1147 bp, Glycine max
  Gm_smallRNAprecursor_5515
gaatacgtgattccttgccattatagagcttgttgaattgttggaatccctgttggacttcttctgggaatatctgtggaattggtctgaagtagttccaccattggaggaaccaatttggaaaattatacacagtattatttttaaagtaaattagccatgaatgcttgaatttactattttgatgccagaacacattggtccaggcgtcgatgtaatcccaataattatatcctgcggggtcaaatggagcagaaatttttttgggttggtttaggtttgagccataatgttgtggctgcataacctttaggatttggattgtggaatgggtatttagatttggatctttggggtctttgaagtgtttaatagatactgagttcgtatctattagaatgaattcgtagaatttacgggttttgtttgtggctattggcctgtaatggaatcctggggggaatactttggcggttgctttgaagggattcttgtcccagtattctggttccatttgtaaaacattgaaaaacttgttttttgaaatataactgttgttgggttgtgatgttgattcttgttgagtcaacaattggcttggtctttggttgcagacagttttggtctgtttggccttttggatttgtttttgcagatctgtttcagaatcatcgtctgattctgaggccatttctgcccaggtctttttggccaattttggtattttggtgaggcctatatcttctaaggccaagagagtttgtattgaccaggcatagtcagccatagtctgtttggttgttgttggttttggggattcctgagttgatgactcaggtttgtcggtagttatctgggtcaatgacccttcaatctttcctttctgggttgatgacccagtctgggtaggtgacccagaagatgttgtagttgcctttttggttattggctctggtagagccagtagaacctcttttccttttgtactggatcttcctcctctgccggaggaactagacaccttaggaggcatcgggaattttctgtaaaaattcacgggtgaggtagtcaggtagagagttggaagagcccttgatatattctatattaaaatcaaagacacttaaaattgcttgccatcttgcaa

SEQ ID NO: 12683 - DNA, 1031 bp, Glycine max
  Gm_smallRNAprecursor_5516
ccttctgtaaaatgtctttggctgatttgcaatcaacccttactaaaaatttttgatttaataaatcagattgaaatctggaaatgcataaaacaattgctaaaacttcttttttaacagttgaatactttaattgtgtaggattccaatgttttgaagtatatgcgatgacatgttcttgaccgtgaatttgctgtttgaggataccaccgtaaccgatgtctgatgcatcagtttcgacaactttgaatgcttgtggaatgggaagatacaaacattttatggattggactttgactttgatttctttaactgtttgggtatggaggtcagaccaaggaggcggatttttctttagcctattatgcaatggtttgacaatattatttaagtaggggacaaattctcctacgtaatttagacaacctagaaatctttgtaactgggttttgtctaagatttggttgggaaatttgctagcaaactctattgacctttcgattggaatgattgtaccttgataaatattgtgaccaaggaatcgaattcgagtttggaaaagattgatttttgatttggagactgccaaaccattttgtttaatgatatggatgaaggtttggagatgtttgaaatgttggtcaatgttttgggaaaagattaaaacatcatctatgtagacaatgacaaattttgaatagggattaaaaatatcattcataattttttgaaattctgaaggggcattctttagtccgaatggcatcacattccattcatattgcccgaaaggtacagtaaacgctgttttgtacctatctgattcttggatttggatttgccaaaatccagatttcatatcaaattttgaaaatatctttgcagaatttaatctgttaagcaaatcctttttgtttggaataggatatctaatccattgtaatgcttgatttagtggtttgtaatttatgactaagcggggtgttccacgctcaatctcagattgtttgttgacataaaaagccgcacaa

SEQ ID NO: 12684 - DNA, 1159 bp, Glycine max
  Gm_smallRNAprecursor_5517
acccatctttcgggaagagttacctcatcccgttttatttttctcgggagagaaacgttagcctttgtcatatcagtgctaaacaaggttgtttctcctttttgaggttttaacaggactctagatgcacaagtattcatgaccttgtactggatcctataaattaaggctgctgggattgatccttctttcatgtcaaggccatgaaagtggatgtttaagaacagagagtcaagaatgtttctgtccatcagactcactgttttgtttggataacagttaaaatatattggaccttgtcctaggctggtttcgactgttccaattagggagtcttcaaattgattatgcctaatgtctcttagacacattaaaactgctgcatctatgcccatatcaattaagggcttgatggctacttgtacacaaccgatgtgtagatatttatacttacggctatgttcataaattgaattttttgaaagcaaatgaaattcttcccctatatcttgtcctagaggaatattgttttctactgttttgattatgtaatcaaagttgtgtttgtcttttattgtttcaggaacgtatagttgatcctgagggatttctggaatgttccagtcatccatgttttgattgatatcttcgaatcggacttcctcatcgaagagattgtgttttggggcgacctcttgggtcttgttgtcttgatcatttaataaattggagtttcttgaagaagatgatgaggaggagtttgagcgaaaagagatacgggaaaaagatcgtaatagtctagacatgattataatattctctaatatctttgccctcatttggttccataggaatatctccgtaagtaaatatgtcacaaaatttttttggatatatattattagtaattatatttgatgtttgattattttgttgtgttattttatccgtaattattttcaaggaggttaatttagttaatagaggggtgtgggtagataaaaatataacttctcaaagaagcctctcgagaaagcttctcaaagaagccacgaggaagcttctcaagaaagcctcttaatgaagcttctcaagcaagctacatgaagctgtctcggtaaaaacgcttcccagccttcgttaactgttggatcttctc

SEQ ID NO: 12685 - DNA, 1197 bp, Glycine max
  Gm_smallRNAprecursor_5518
gttttaacaggactctagatgcacaagtattcatgaccttgtactggatcctataaattaaggctgctgggattgatccttctttcatgtcaaggccatgaaagtggatgtttaagaacagagagtcaagaatgtttctgtccatcagactcactgttttgtttggataacagttaaaatatattggaccttgtcctaggctggtttcgactgttccaattagggagtcttcaaattgattatgcctaatgtctcttagacacattaaaactgctgcatctatgcccatatcaattaagggcttgatggctacttgtacacaaccgatgtgtagatatttatacttacggctatgttcataaattgaattttttgaaagcaaatgaaattcttcccctatatcttgtcctagaggaatattgttttctactgttttgattatgtaatcaaagttgtgtttgtcttttattgtttcaggaacgtatagttgatcctgagggatttctggaatgttccagtcatccatgttttgattgatatcttcgaatcggacttcctcatcgaagagattgtgttttggggcgacctcttgggtcttgttgtcttgatcatttaataaattggagtttcttgaagaagatgatgaggaggagtttgagcgaaaagagatacgggaaaaagatcgtaatagtctagacatgattataatattctctaatatctttgccctcatttggttccataggaatatctccgtaagtaaatatgtcacaaaatttttttggatatatattattagtaattatatttgatgtttgattattttgttgtgttattttatccgtaattattttcaaggaggttaatttagttaatagaggggtgtgggtagataaaaatataacttctcaaagaagcctctcgagaaagcttctcaaagaagccacgaggaagcttctcaagaaagcctcttaatgaagcttctcaagcaagctacatgaagctgtctcggtaaaaacgcttcccagccttcgttaactgttggatcttctcgaaatttggtctgggggttcatttgatagatgtccacgatatgaccgttgcgatctctgatacaatgtctggcatctgaggaaggcttcctttcccgcgagcagaagcacttaagtgtttcaacctttgcttttcgtgtagcct

SEQ ID NO: 12686 - DNA, 1189 bp, Glycine max
  Gm_smallRNAprecursor_5519
atggaggcctgaaacacatacttttcacatgagatgcggagagtgtactatcactctacaagacgtctctgtgttgttaggtataagtgtggatggtttaccattaatcggtccaacaaatcttgattgggatgatttatgtgaggacttattgggagtcagaccataagaaggtgaaattaaaggtagtgtggttaaattaagttggctggctcaccattttgatcaaattaataatgacgacgacgaagaacaagtacgaaggtttgcccgtgcatggatactgagatttattggaggtgtcttgttcgttgacaaaaccagtaacattgtttcgctaaggtaccttcaatttttacgtgactttgaagaatgtagcagatatgcatggggagctgccgtagttggttttctatacagagagatgtgcagtgccaccgattataaaactaaatcaatcggaggtatgtgcatcttactacaattgtgggcatgggaacgatgtccaaccttggctccaaagaggactccttcccaaatagaaaatataccactagggcacaggtcagtcatttttaatagcgtctttcatttcaatagaataaatggttttagggtatattaaattttattctttgtaggtggctgcgacgtggaaaccaacatatcgacaatgatgatgtgaaagtttttcgtcgcaagttggatattatgaaacatcatgaggtaagaaccatgctactgtatttgtaaaataaaaaattatatgtcttattttactacaatgttcacaactatgttgttatatgcagtttgtgtgggagccttacccatcaaccgttatatcattgttgcctcgtgtgggagccttacccatcaaccgttatatcatgttgcctcccgtttgtttagtcggaagtctcgcgtggcaccaaccggacagagtcttgagacaatttgggatgcagcaaccagttctagagtctccttcacaacccctaaacattcatggcataacattaaaggggaaacatgacgaaaattgggggcaattgttcgccccaatgattcagcagtggaataatcgccatgcatttagggtcgacgcatatccccgacaagaaggcctattgagttttaactcggactacatggtctggtataggcgaaagacaaagatgtttgttga

SEQ ID NO: 12687 - DNA, 1044 bp, Glycine max
  Gm_smallRNAprecursor_5520
aaccctccaaggggtttggattgcaattttctcctccctcagctgaagaagtaatgttggatgattcagacttacaaccactggaggaggcttggggccatagccttattggctatgtagctggcagatttccggggaaaaaggctcttatggaatgctgccagaaatggggtgtgaatttttcatattcaacccatgagagtggctggttggtattccgatttcagaatgaagaggatatgaaccaagtcatatctgcaggaccatacttcattttccaaagacccctgttattgaaggtaatgcctcccttttttgattttggaaacgaggagcttagcaagatcccagtgtgggtaaagctcagaaatctgtcccttgagctgtggaatccccaggctctaggaaagattctttccaaagttggtctgcccatccgtacggaccagctgactgcctctaaaggctctatatcatttgcccgcgcactagtggaggtggatgcttctatggacctcattgaagaggtccgctttagactcccaaatggtaaggtcttcactcagaaagttgaatttgaaaataggcccacattctgaaagcactgcaaaatgattgggcaccgtttagccaattgtaaagctgtgcctggagctaaaattgatcctgccgtagttagcacccctgtggttcaatcacaagtggttggcccagcagatcttgatgtgaccagaatccttaatagccctggaagtcaaaaggttgttcaacctaaccataactggttgcaaagggcccggtcaagcttgctccagactctgtcattggtccaagtatagataggaccatgactgttcaagctacctagaccaaggtcagagtagcagtccacaaagtcctgaatctcgtaggaagttggctctgctccattgaatctgtctgatggagagaggatagtgttgaaatctctagtgaggagccaggggcaatccatggtggcattaatcttgttcagacttacccataaggaccttctggccacaa

SEQ ID NO: 12688 - DNA, 1184 bp, Glycine max
  Gm_smallRNAprecursor_5521
ggattttggtcacatcaagatctgctggaccaaccacttgtgattgaaccacaggggtgctaactaaggcagggtcatctttagctccgggcacagctttacaattggctaaacggtgcccaatcattttgcagtgcttgcagaatgtgggcctgttttcaaattcaactttctgagtgaagaccttaccatttgggagtctaaagcggacctcttcaatgaggtccatagaagcatccacctccactagagcgcgggcaaaagatatagagcctttagaggcagtcagctagtccgtacggatgggcaggccaactttggaaagaatctttcctagagcttggggattccacagctcaaggggcaaatttctgagctttacccacacagggatcttgttgagctcctcgtttccaaaatcaaaaaagggaggcattaccttcaataacaggggtctttggaaaatgaagtatggtcctgcagatatgacttggttcatatcctcttcattctgaaatcggaataccaaccagccactctcatgggttgaatatgaaaaattcacaccccatttctggcagcattccataagagcctttttcctcggaaatctgccagctacatagccaataaggctatagccccaagcctcctccagtggttgtaagtctgaatcatccaacagtacttcttcagctgagggaggagaaaattgcaatccaaaccccttggagggtttcctgttatccttgaacaggttaacccagggttttgttgcctctgtatttgcagttggaggtaccaattcggagtcactggatggatgaagaggattcctcatctgaagaggtatcatcctcccctagagtataagagtcctctggggaaaagacagtctttctcctacagtcagacaatatatcaaacacctgggctgcattcacttttgctacttaagaatttgacttaggcctattgtcgaacacttggtgtgcagtggtagagctagaagcatgagctccttgaccttcaccagcgaccccaactacaacagtagtagaagagatagggtccttacccgaacctaccactgctgcgcaacttggcttagacatttttccaaacacttggtgtgcagtgtttgttttgtcttggtgttagaacaagaaactcgcacaccctgg

SEQ ID NO: 12689 - DNA, 1089 bp, Glycine max
  Gm_smallRNAprecursor_5522
tttgttggaaacggtgcaactcaattgttgcttctcgaatgggaaagctagtggtgatgtgaagagtctaaacatgaatacttgtggaagtaaccgaacagttttttgttaatggtttcagaagtgattggactttagtgttgtttctgctgtgcatgtaatagctgggccttaaatgggcaaattttttctatgaagtattcgacttaatgggttaattaataggttaatcatgtaaacttcaccgaaccactaaactattttacacgttcttgtggtggtaattgaatttctcgatgcttattttgttattagtaaaatcacgtatatatatatatatatatatatatagatcaaacggacagataagaagtaagaatacagtataataaatgaaagaaaaatataaacttgaaaacagatatcaagggcacaccggagaccggcttacaaaccccaggttttcataaacaaagaaaccgaagcggcggcagagccgcacaggatcggtgaagggagaagagagaaagatgaaaaatagaaatttattgaatctagaaagaagcgcttacaaaaatcttgtttcagagcacctctcttcagaaacctgaaaatggctaaatgaaagggtgcctcacaacatacttgaggactccttatatagccaaatatctaagaccggtagttgctggtagttttgaccgggactatttgactgtttgttacaagacaagtagttttgaccgggactttaatggctacaggacaggtagtattgtccagcattaattacacattaattacaaatatacggttttgtgaccgaaattaaatttaatctaaacagataccaaaacaatcatcttcgttttggtaaaagggattttcttcttcttcttcagcagaacttgtttcttccttctttgaggatgaagcttcttcttcctactgtaacatttgcagaacttccttcagatttttagctaagacttcctttgatgtcgatcctgctaaaaatgctgccagatgagacttttggttccaaaacacagaagtttctggatcagctgctttgaggaattctggatg

SEQ ID NO: 12690 - DNA, 1199 bp, Glycine max
  Gm_smallRNAprecursor_5523
tcagaagtgattggactttagtgttgtttctgctgtgcatgtaatagctgggccttaaatgggcaaattttttctatgaagtattcgacttaatgggttaattaataggttaatcatgtaaacttcaccgaaccactaaactattttacacgttcttgtggtggtaattgaatttctcgatgcttattttgttattagtaaaatcacgtatatatatatatatatatatatatagatcaaacggacagataagaagtaagaatacagtataataaatgaaagaaaaatataaacttgaaaacagatatcaagggcacaccggagaccggcttacaaaccccaggttttcataaacaaagaaaccgaagcggcggcagagccgcacaggatcggtgaagggagaagagagaaagatgaaaaatagaaatttattgaatctagaaagaagcgcttacaaaaatcttgtttcagagcacctctcttcagaaacctgaaaatggctaaatgaaagggtgcctcacaacatacttgaggactccttatatagccaaatatctaagaccggtagttgctggtagttttgaccgggactatttgactgtttgttacaagacaagtagttttgaccgggactttaatggctacaggacaggtagtattgtccagcattaattacacattaattacaaatatacggttttgtgaccgaaattaaatttaatctaaacagataccaaaacaatcatcttcgttttggtaaaagggattttcttcttcttcttcagcagaacttgtttcttccttctttgaggatgaagcttcttcttcctactgtaacatttgcagaacttccttcagatttttagctaagacttcctttgatgtcgatcctgctaaaaatgctgccagatgagacttttggttccaaaacacagaagtttctggatcagctgctttgaggaattctggatgggattggaaccagagttttacttgttctggatccgctttggatgagtcaaattgtgtccatcattttacaaatgcgtgtctttgtagtgatggatattggtttgtcttttcagtcttgctgtaacgatattgccatgagaatatccatgacagtgcaaagcttgaaaagtatttaagatctgctggaattcatgattcctgcgaattgtattgtttcttaaattgag

SEQ ID NO: 12691 - DNA, 1141 bp, Glycine max
  Gm_smallRNAprecursor_5524
attcgacttaatgggttaattaataggttaatcatgtaaacttcaccgaaccactaaactattttacacgttcttgtggtggtaattgaatttctcgatgcttattttgttattagtaaaatcacgtatatatatatatatatatatatatagatcaaacggacagataagaagtaagaatacagtataataaatgaaagaaaaatataaacttgaaaacagatatcaagggcacaccggagaccggcttacaaaccccaggttttcataaacaaagaaaccgaagcggcggcagagccgcacaggatcggtgaagggagaagagagaaagatgaaaaatagaaatttattgaatctagaaagaagcgcttacaaaaatcttgtttcagagcacctctcttcagaaacctgaaaatggctaaatgaaagggtgcctcacaacatacttgaggactccttatatagccaaatatctaagaccggtagttgctggtagttttgaccgggactatttgactgtttgttacaagacaagtagttttgaccgggactttaatggctacaggacaggtagtattgtccagcattaattacacattaattacaaatatacggttttgtgaccgaaattaaatttaatctaaacagataccaaaacaatcatcttcgttttggtaaaagggattttcttcttcttcttcagcagaacttgtttcttccttctttgaggatgaagcttcttcttcctactgtaacatttgcagaacttccttcagatttttagctaagacttcctttgatgtcgatcctgctaaaaatgctgccagatgagacttttggttccaaaacacagaagtttctggatcagctgctttgaggaattctggatgggattggaaccagagttttacttgttctggatccgctttggatgagtcaaattgtgtccatcattttacaaatgcgtgtctttgtagtgatggatattggtttgtcttttcagtcttgctgtaacgatattgccatgagaatatccatgacagtgcaaagcttgaaaagtatttaagatctgctggaattcatgattcctgcgaattgtattgtttcttaaattgagaaaatccttgttggactatttctg

SEQ ID NO: 12692 - DNA, 1154 bp, Glycine max
  Gm_smallRNAprecursor_5525
attcgacttaatgggttaattaataggttaatcatgtaaacttcaccgaaccactaaactattttacacgttcttgtggtggtaattgaatttctcgatgcttattttgttattagtaaaatcacgtatatatatatatatatatatatatagatcaaacggacagataagaagtaagaatacagtataataaatgaaagaaaaatataaacttgaaaacagatatcaagggcacaccggagaccggcttacaaaccccaggttttcataaacaaagaaaccgaagcggcggcagagccgcacaggatcggtgaagggagaagagagaaagatgaaaaatagaaatttattgaatctagaaagaagcgcttacaaaaatcttgtttcagagcacctctcttcagaaacctgaaaatggctaaatgaaagggtgcctcacaacatacttgaggactccttatatagccaaatatctaagaccggtagttgctggtagttttgaccgggactatttgactgtttgttacaagacaagtagttttgaccgggactttaatggctacaggacaggtagtattgtccagcattaattacacattaattacaaatatacggttttgtgaccgaaattaaatttaatctaaacagataccaaaacaatcatcttcgttttggtaaaagggattttcttcttcttcttcagcagaacttgtttcttccttctttgaggatgaagcttcttcttcctactgtaacatttgcagaacttccttcagatttttagctaagacttcctttgatgtcgatcctgctaaaaatgctgccagatgagacttttggttccaaaacacagaagtttctggatcagctgctttgaggaattctggatgggattggaaccagagttttacttgttctggatccgctttggatgagtcaaattgtgtccatcattttacaaatgcgtgtctttgtagtgatggatattggtttgtcttttcagtcttgctgtaacgatattgccatgagaatatccatgacagtgcaaagcttgaaaagtatttaagatctgctggaattcatgattcctgcgaattgtattgtttcttaaattgagaaaatccttgttggactatttctgggaatatctctgg

SEQ ID NO: 12693 - DNA, 1061 bp, Glycine max
  Gm_smallRNAprecursor_5526
tatatatatatagatcaaacggacagataagaagtaagaatacagtataataaatgaaagaaaaatataaacttgaaaacagatatcaagggcacaccggagaccggcttacaaaccccaggttttcataaacaaagaaaccgaagcggcggcagagccgcacaggatcggtgaagggagaagagagaaagatgaaaaatagaaatttattgaatctagaaagaagcgcttacaaaaatcttgtttcagagcacctctcttcagaaacctgaaaatggctaaatgaaagggtgcctcacaacatacttgaggactccttatatagccaaatatctaagaccggtagttgctggtagttttgaccgggactatttgactgtttgttacaagacaagtagttttgaccgggactttaatggctacaggacaggtagtattgtccagcattaattacacattaattacaaatatacggttttgtgaccgaaattaaatttaatctaaacagataccaaaacaatcatcttcgttttggtaaaagggattttcttcttcttcttcagcagaacttgtttcttccttctttgaggatgaagcttcttcttcctactgtaacatttgcagaacttccttcagatttttagctaagacttcctttgatgtcgatcctgctaaaaatgctgccagatgagacttttggttccaaaacacagaagtttctggatcagctgctttgaggaattctggatgggattggaaccagagttttacttgttctggatccgctttggatgagtcaaattgtgtccatcattttacaaatgcgtgtctttgtagtgatggatattggtttgtcttttcagtcttgctgtaacgatattgccatgagaatatccatgacagtgcaaagcttgaaaagtatttaagatctgctggaattcatgattcctgcgaattgtattgtttcttaaattgagaaaatccttgttggactatttctgggaatatctctgggattggtccaaagaagtcccatcattgcaaaaaccaattgggaaaat

SEQ ID NO: 12694 - DNA, 1063 bp, Glycine max
  Gm_smallRNAprecursor_5527
tatatatatatagatcaaacggacagataagaagtaagaatacagtataataaatgaaagaaaaatataaacttgaaaacagatatcaagggcacaccggagaccggcttacaaaccccaggttttcataaacaaagaaaccgaagcggcggcagagccgcacaggatcggtgaagggagaagagagaaagatgaaaaatagaaatttattgaatctagaaagaagcgcttacaaaaatcttgtttcagagcacctctcttcagaaacctgaaaatggctaaatgaaagggtgcctcacaacatacttgaggactccttatatagccaaatatctaagaccggtagttgctggtagttttgaccgggactatttgactgtttgttacaagacaagtagttttgaccgggactttaatggctacaggacaggtagtattgtccagcattaattacacattaattacaaatatacggttttgtgaccgaaattaaatttaatctaaacagataccaaaacaatcatcttcgttttggtaaaagggattttcttcttcttcttcagcagaacttgtttcttccttctttgaggatgaagcttcttcttcctactgtaacatttgcagaacttccttcagatttttagctaagacttcctttgatgtcgatcctgctaaaaatgctgccagatgagacttttggttccaaaacacagaagtttctggatcagctgctttgaggaattctggatgggattggaaccagagttttacttgttctggatccgctttggatgagtcaaattgtgtccatcattttacaaatgcgtgtctttgtagtgatggatattggtttgtcttttcagtcttgctgtaacgatattgccatgagaatatccatgacagtgcaaagcttgaaaagtatttaagatctgctggaattcatgattcctgcgaattgtattgtttcttaaattgagaaaatccttgttggactatttctgggaatatctctgggattggtccaaagaagtcccatcattgcaaaaaccaattgggaaaattg

SEQ ID NO: 12695 - DNA, 1063 bp, Glycine max; identical to SEQ ID NO: 12694
  Gm_smallRNAprecursor_5528

SEQ ID NO: 12696 - DNA, 1064 bp, Glycine max
  Gm_smallRNAprecursor_5529
tatatatatatagatcaaacggacagataagaagtaagaatacagtataataaatgaaagaaaaatataaacttgaaaacagatatcaagggcacaccggagaccggcttacaaaccccaggttttcataaacaaagaaaccgaagcggcggcagagccgcacaggatcggtgaagggagaagagagaaagatgaaaaatagaaatttattgaatctagaaagaagcgcttacaaaaatcttgtttcagagcacctctcttcagaaacctgaaaatggctaaatgaaagggtgcctcacaacatacttgaggactccttatatagccaaatatctaagaccggtagttgctggtagttttgaccgggactatttgactgtttgttacaagacaagtagttttgaccgggactttaatggctacaggacaggtagtattgtccagcattaattacacattaattacaaatatacggttttgtgaccgaaattaaatttaatctaaacagataccaaaacaatcatcttcgttttggtaaaagggattttcttcttcttcttcagcagaacttgtttcttccttctttgaggatgaagcttcttcttcctactgtaacatttgcagaacttccttcagatttttagctaagacttcctttgatgtcgatcctgctaaaaatgctgccagatgagacttttggttccaaaacacagaagtttctggatcagctgctttgaggaattctggatgggattggaaccagagttttacttgttctggatccgctttggatgagtcaaattgtgtccatcattttacaaatgcgtgtctttgtagtgatggatattggtttgtcttttcagtcttgctgtaacgatattgccatgagaatatccatgacagtgcaaagcttgaaaagtatttaagatctgctggaattcatgattcctgcgaattgtattgtttcttaaattgagaaaatccttgttggactatttctgggaatatctctgggattggtccaaagaagtcccatcattgcaaaaaccaattgggaaaattgt

SEQ ID NO: 12697 - DNA, 1057 bp, Glycine max
  Gm_smallRNAprecursor_5530
atatatatagatcaaacggacagataagaagtaagaatacagtataataaatgaaagaaaaatataaacttgaaaacagatatcaagggcacaccggagaccggcttacaaaccccaggttttcataaacaaagaaaccgaagcggcggcagagccgcacaggatcggtgaagggagaagagagaaagatgaaaaatagaaatttattgaatctagaaagaagcgcttacaaaaatcttgtttcagagcacctctcttcagaaacctgaaaatggctaaatgaaagggtgcctcacaacatacttgaggactccttatatagccaaatatctaagaccggtagttgctggtagttttgaccgggactatttgactgtttgttacaagacaagtagttttgaccgggactttaatggctacaggacaggtagtattgtccagcattaattacacattaattacaaatatacggttttgtgaccgaaattaaatttaatctaaacagataccaaaacaatcatcttcgttttggtaaaagggattttcttcttcttcttcagcagaacttgtttcttccttctttgaggatgaagcttcttcttcctactgtaacatttgcagaacttccttcagatttttagctaagacttcctttgatgtcgatcctgctaaaaatgctgccagatgagacttttggttccaaaacacagaagtttctggatcagctgctttgaggaattctggatgggattggaaccagagttttacttgttctggatccgctttggatgagtcaaattgtgtccatcattttacaaatgcgtgtctttgtagtgatggatattggtttgtcttttcagtcttgctgtaacgatattgccatgagaatatccatgacagtgcaaagcttgaaaagtatttaagatctgctggaattcatgattcctgcgaattgtattgtttcttaaattgagaaaatccttgttggactatttctgggaatatctctgggattggtccaaagaagtcccatcattgcaaaaaccaattgggaaaa

SEQ ID NO: 12698 - DNA, 1058 bp, Glycine max
  Gm_smallRNAprecursor_5531
atatatatagatcaaacggacagataagaagtaagaatacagtataataaatgaaagaaaaatataaacttgaaaacagatatcaagggcacaccggagaccggcttacaaaccccaggttttcataaacaaagaaaccgaagcggcggcagagccgcacaggatcggtgaagggagaagagagaaagatgaaaaatagaaatttattgaatctagaaagaagcgcttacaaaaatcttgtttcagagcacctctcttcagaaacctgaaaatggctaaatgaaagggtgcctcacaacatacttgaggactccttatatagccaaatatctaagaccggtagttgctggtagttttgaccgggactatttgactgtttgttacaagacaagtagttttgaccgggactttaatggctacaggacaggtagtattgtccagcattaattacacattaattacaaatatacggttttgtgaccgaaattaaatttaatctaaacagataccaaaacaatcatcttcgttttggtaaaagggattttcttcttcttcttcagcagaacttgtttcttccttctttgaggatgaagcttcttcttcctactgtaacatttgcagaacttccttcagatttttagctaagacttcctttgatgtcgatcctgctaaaaatgctgccagatgagacttttggttccaaaacacagaagtttctggatcagctgctttgaggaattctggatgggattggaaccagagttttacttgttctggatccgctttggatgagtcaaattgtgtccatcattttacaaatgcgtgtctttgtagtgatggatattggtttgtcttttcagtcttgctgtaacgatattgccatgagaatatccatgacagtgcaaagcttgaaaagtatttaagatctgctggaattcatgattcctgcgaattgtattgtttcttaaattgagaaaatccttgttggactatttctgggaatatctctgggattggtccaaagaagtcccatcattgcaaaaaccaattgggaaaat

SEQ ID NO: 12699 - DNA, 1083 bp, Glycine max
  Gm_smallRNAprecursor_5532
atatatatagatcaaacggacagataagaagtaagaatacagtataataaatgaaagaaaaatataaacttgaaaacagatatcaagggcacaccggagaccggcttacaaaccccaggttttcataaacaaagaaaccgaagcggcggcagagccgcacaggatcggtgaagggagaagagagaaagatgaaaaatagaaatttattgaatctagaaagaagcgcttacaaaaatcttgtttcagagcacctctcttcagaaacctgaaaatggctaaatgaaagggtgcctcacaacatacttgaggactccttatatagccaaatatctaagaccggtagttgctggtagttttgaccgggactatttgactgtttgttacaagacaagtagttttgaccgggactttaatggctacaggacaggtagtattgtccagcattaattacacattaattacaaatatacggttttgtgaccgaaattaaatttaatctaaacagataccaaaacaatcatcttcgttttggtaaaagggattttcttcttcttcttcagcagaacttgtttcttccttctttgaggatgaagcttcttcttcctactgtaacatttgcagaacttccttcagatttttagctaagacttcctttgatgtcgatcctgctaaaaatgctgccagatgagacttttggttccaaaacacagaagtttctggatcagctgctttgaggaattctggatgggattggaaccagagttttacttgttctggatccgctttggatgagtcaaattgtgtccatcattttacaaatgcgtgtctttgtagtgatggatattggtttgtcttttcagtcttgctgtaacgatattgccatgagaatatccatgacagtgcaaagcttgaaaagtatttaagatctgctggaattcatgattcctgcgaattgtattgtttcttaaattgagaaaatccttgttggactatttctgggaatatctctgggattggtccaaagaagtcccatcattgcaaaaaccaattgggaaaattgtaaattgtattggtcttgaaata

SEQ ID NO: 12700 - DNA, 1056 bp, Glycine max
  Gm_smallRNAprecursor_5533
tatatatagatcaaacggacagataagaagtaagaatacagtataataaatgaaagaaaaatataaacttgaaaacagatatcaagggcacaccggagaccggcttacaaaccccaggttttcataaacaaagaaaccgaagcggcggcagagccgcacaggatcggtgaagggagaagagagaaagatgaaaaatagaaatttattgaatctagaaagaagcgcttacaaaaatcttgtttcagagcacctctcttcagaaacctgaaaatggctaaatgaaagggtgcctcacaacatacttgaggactccttatatagccaaatatctaagaccggtagttgctggtagttttgaccgggactatttgactgtttgttacaagacaagtagttttgaccgggactttaatggctacaggacaggtagtattgtccagcattaattacacattaattacaaatatacggttttgtgaccgaaattaaatttaatctaaacagataccaaaacaatcatcttcgttttggtaaaagggattttcttcttcttcttcagcagaacttgtttcttccttctttgaggatgaagcttcttcttcctactgtaacatttgcagaacttccttcagatttttagctaagacttcctttgatgtcgatcctgctaaaaatgctgccagatgagacttttggttccaaaacacagaagtttctggatcagctgctttgaggaattctggatgggattggaaccagagttttacttgttctggatccgctttggatgagtcaaattgtgtccatcattttacaaatgcgtgtctttgtagtgatggatattggtttgtcttttcagtcttgctgtaacgatattgccatgagaatatccatgacagtgcaaagcttgaaaagtatttaagatctgctggaattcatgattcctgcgaattgtattgtttcttaaattgagaaaatccttgttggactatttctgggaatatctctgggattggtccaaagaagtcccatcattgcaaaaaccaattgggaaaa

SEQ ID NO: 12701 - DNA, 1056 bp, Glycine max; identical to SEQ ID NO: 12700
  Gm_smallRNAprecursor_5534

SEQ ID NO: 12702 - DNA, 1057 bp, Glycine max
  Gm_smallRNAprecursor_5535
tatatatagatcaaacggacagataagaagtaagaatacagtataataaatgaaagaaaaatataaacttgaaaacagatatcaagggcacaccggagaccggcttacaaaccccaggttttcataaacaaagaaaccgaagcggcggcagagccgcacaggatcggtgaagggagaagagagaaagatgaaaaatagaaatttattgaatctagaaagaagcgcttacaaaaatcttgtttcagagcacctctcttcagaaacctgaaaatggctaaatgaaagggtgcctcacaacatacttgaggactccttatatagccaaatatctaagaccggtagttgctggtagttttgaccgggactatttgactgtttgttacaagacaagtagttttgaccgggactttaatggctacaggacaggtagtattgtccagcattaattacacattaattacaaatatacggttttgtgaccgaaattaaatttaatctaaacagataccaaaacaatcatcttcgttttggtaaaagggattttcttcttcttcttcagcagaacttgtttcttccttctttgaggatgaagcttcttcttcctactgtaacatttgcagaacttccttcagatttttagctaagacttcctttgatgtcgatcctgctaaaaatgctgccagatgagacttttggttccaaaacacagaagtttctggatcagctgctttgaggaattctggatgggattggaaccagagttttacttgttctggatccgctttggatgagtcaaattgtgtccatcattttacaaatgcgtgtctttgtagtgatggatattggtttgtcttttcagtcttgctgtaacgatattgccatgagaatatccatgacagtgcaaagcttgaaaagtatttaagatctgctggaattcatgattcctgcgaattgtattgtttcttaaattgagaaaatccttgttggactatttctgggaatatctctgggattggtccaaagaagtcccatcattgcaaaaaccaattgggaaaat

SEQ ID NO: 12703 - DNA, 1059 bp, Glycine max
  Gm_smallRNAprecursor_5536
tatatatagatcaaacggacagataagaagtaagaatacagtataataaatgaaagaaaaatataaacttgaaaacagatatcaagggcacaccggagaccggcttacaaaccccaggttttcataaacaaagaaaccgaagcggcggcagagccgcacaggatcggtgaagggagaagagagaaagatgaaaaatagaaatttattgaatctagaaagaagcgcttacaaaaatcttgtttcagagcacctctcttcagaaacctgaaaatggctaaatgaaagggtgcctcacaacatacttgaggactccttatatagccaaatatctaagaccggtagttgctggtagttttgaccgggactatttgactgtttgttacaagacaagtagttttgaccgggactttaatggctacaggacaggtagtattgtccagcattaattacacattaattacaaatatacggttttgtgaccgaaattaaatttaatctaaacagataccaaaacaatcatcttcgttttggtaaaagggattttcttcttcttcttcagcagaacttgtttcttccttctttgaggatgaagcttcttcttcctactgtaacatttgcagaacttccttcagatttttagctaagacttcctttgatgtcgatcctgctaaaaatgctgccagatgagacttttggttccaaaacacagaagtttctggatcagctgctttgaggaattctggatgggattggaaccagagttttacttgttctggatccgctttggatgagtcaaattgtgtccatcattttacaaatgcgtgtctttgtagtgatggatattggtttgtcttttcagtcttgctgtaacgatattgccatgagaatatccatgacagtgcaaagcttgaaaagtatttaagatctgctggaattcatgattcctgcgaattgtattgtttcttaaattgagaaaatccttgttggactatttctgggaatatctctgggattggtccaaagaagtcccatcattgcaaaaaccaattgggaaaattg

SEQ ID NO: 12704 - DNA, 1059 bp, Glycine max; identical to SEQ ID NO: 12703
  Gm_smallRNAprecursor_5537

SEQ ID NO: 12705 - DNA, 1082 bp, Glycine max
  Gm_smallRNAprecursor_5538
tatatatagatcaaacggacagataagaagtaagaatacagtataataaatgaaagaaaaatataaacttgaaaacagatatcaagggcacaccggagaccggcttacaaaccccaggttttcataaacaaagaaaccgaagcggcggcagagccgcacaggatcggtgaagggagaagagagaaagatgaaaaatagaaatttattgaatctagaaagaagcgcttacaaaaatcttgtttcagagcacctctcttcagaaacctgaaaatggctaaatgaaagggtgcctcacaacatacttgaggactccttatatagccaaatatctaagaccggtagttgctggtagttttgaccgggactatttgactgtttgttacaagacaagtagttttgaccgggactttaatggctacaggacaggtagtattgtccagcattaattacacattaattacaaatatacggttttgtgaccgaaattaaatttaatctaaacagataccaaaacaatcatcttcgttttggtaaaagggattttcttcttcttcttcagcagaacttgtttcttccttctttgaggatgaagcttcttcttcctactgtaacatttgcagaacttccttcagatttttagctaagacttcctttgatgtcgatcctgctaaaaatgctgccagatgagacttttggttccaaaacacagaagtttctggatcagctgctttgaggaattctggatgggattggaaccagagttttacttgttctggatccgctttggatgagtcaaattgtgtccatcattttacaaatgcgtgtctttgtagtgatggatattggtttgtcttttcagtcttgctgtaacgatattgccatgagaatatccatgacagtgcaaagcttgaaaagtatttaagatctgctggaattcatgattcctgcgaattgtattgtttcttaaattgagaaaatccttgttggactatttctgggaatatctctgggattggtccaaagaagtcccatcattgcaaaaaccaattgggaaaattgtaaattgtattggtcttgaaata

SEQ ID NO: 12706 - DNA, 1055 bp, Glycine max
  Gm_smallRNAprecursor_5539
atatatagatcaaacggacagataagaagtaagaatacagtataataaatgaaagaaaaatataaacttgaaaacagatatcaagggcacaccggagaccggcttacaaaccccaggttttcataaacaaagaaaccgaagcggcggcagagccgcacaggatcggtgaagggagaagagagaaagatgaaaaatagaaatttattgaatctagaaagaagcgcttacaaaaatcttgtttcagagcacctctcttcagaaacctgaaaatggctaaatgaaagggtgcctcacaacatacttgaggactccttatatagccaaatatctaagaccggtagttgctggtagttttgaccgggactatttgactgtttgttacaagacaagtagttttgaccgggactttaatggctacaggacaggtagtattgtccagcattaattacacattaattacaaatatacggttttgtgaccgaaattaaatttaatctaaacagataccaaaacaatcatcttcgttttggtaaaagggattttcttcttcttcttcagcagaacttgtttcttccttctttgaggatgaagcttcttcttcctactgtaacatttgcagaacttccttcagatttttagctaagacttcctttgatgtcgatcctgctaaaaatgctgccagatgagacttttggttccaaaacacagaagtttctggatcagctgctttgaggaattctggatgggattggaaccagagttttacttgttctggatccgctttggatgagtcaaattgtgtccatcattttacaaatgcgtgtctttgtagtgatggatattggtttgtcttttcagtcttgctgtaacgatattgccatgagaatatccatgacagtgcaaagcttgaaaagtatttaagatctgctggaattcatgattcctgcgaattgtattgtttcttaaattgagaaaatccttgttggactatttctgggaatatctctgggattggtccaaagaagtcccatcattgcaaaaaccaattgggaaaa

SEQ ID NO: 12707 - DNA, 1058 bp, Glycine max
  Gm_smallRNAprecursor_5540
atatatagatcaaacggacagataagaagtaagaatacagtataataaatgaaagaaaaatataaacttgaaaacagatatcaagggcacaccggagaccggcttacaaaccccaggttttcataaacaaagaaaccgaagcggcggcagagccgcacaggatcggtgaagggagaagagagaaagatgaaaaatagaaatttattgaatctagaaagaagcgcttacaaaaatcttgtttcagagcacctctcttcagaaacctgaaaatggctaaatgaaagggtgcctcacaacatacttgaggactccttatatagccaaatatctaagaccggtagttgctggtagttttgaccgggactatttgactgtttgttacaagacaagtagttttgaccgggactttaatggctacaggacaggtagtattgtccagcattaattacacattaattacaaatatacggttttgtgaccgaaattaaatttaatctaaacagataccaaaacaatcatcttcgttttggtaaaagggattttcttcttcttcttcagcagaacttgtttcttccttctttgaggatgaagcttcttcttcctactgtaacatttgcagaacttccttcagatttttagctaagacttcctttgatgtcgatcctgctaaaaatgctgccagatgagacttttggttccaaaacacagaagtttctggatcagctgctttgaggaattctggatgggattggaaccagagttttacttgttctggatccgctttggatgagtcaaattgtgtccatcattttacaaatgcgtgtctttgtagtgatggatattggtttgtcttttcagtcttgctgtaacgatattgccatgagaatatccatgacagtgcaaagcttgaaaagtatttaagatctgctggaattcatgattcctgcgaattgtattgtttcttaaattgagaaaatccttgttggactatttctgggaatatctctgggattggtccaaagaagtcccatcattgcaaaaaccaattgggaaaattg

SEQ ID NO: 12708 - DNA, 1058 bp, Glycine max; identical to SEQ ID NO: 12707
  Gm_smallRNAprecursor_5541

SEQ ID NO: 12709 - DNA, 1081 bp, Glycine max
  Gm_smallRNAprecursor_5542
atatatagatcaaacggacagataagaagtaagaatacagtataataaatgaaagaaaaatataaacttgaaaacagatatcaagggcacaccggagaccggcttacaaaccccaggttttcataaacaaagaaaccgaagcggcggcagagccgcacaggatcggtgaagggagaagagagaaagatgaaaaatagaaatttattgaatctagaaagaagcgcttacaaaaatcttgtttcagagcacctctcttcagaaacctgaaaatggctaaatgaaagggtgcctcacaacatacttgaggactccttatatagccaaatatctaagaccggtagttgctggtagttttgaccgggactatttgactgtttgttacaagacaagtagttttgaccgggactttaatggctacaggacaggtagtattgtccagcattaattacacattaattacaaatatacggttttgtgaccgaaattaaatttaatctaaacagataccaaaacaatcatcttcgttttggtaaaagggattttcttcttcttcttcagcagaacttgtttcttccttctttgaggatgaagcttcttcttcctactgtaacatttgcagaacttccttcagatttttagctaagacttcctttgatgtcgatcctgctaaaaatgctgccagatgagacttttggttccaaaacacagaagtttctggatcagctgctttgaggaattctggatgggattggaaccagagttttacttgttctggatccgctttggatgagtcaaattgtgtccatcattttacaaatgcgtgtctttgtagtgatggatattggtttgtcttttcagtcttgctgtaacgatattgccatgagaatatccatgacagtgcaaagcttgaaaagtatttaagatctgctggaattcatgattcctgcgaattgtattgtttcttaaattgagaaaatccttgttggactatttctgggaatatctctgggattggtccaaagaagtcccatcattgcaaaaaccaattgggaaaattgtaaattgtattggtcttgaaata

SEQ ID NO: 12710 - DNA, 1055 bp, Glycine max
  Gm_smallRNAprecursor_5543
ggatcggtgaagggagaagagagaaagatgaaaaatagaaatttattgaatctagaaagaagcgcttacaaaaatcttgtttcagagcacctctcttcagaaacctgaaaatggctaaatgaaagggtgcctcacaacatacttgaggactccttatatagccaaatatctaagaccggtagttgctggtagttttgaccgggactatttgactgtttgttacaagacaagtagttttgaccgggactttaatggctacaggacaggtagtattgtccagcattaattacacattaattacaaatatacggttttgtgaccgaaattaaatttaatctaaacagataccaaaacaatcatcttcgttttggtaaaagggattttcttcttcttcttcagcagaacttgtttcttccttctttgaggatgaagcttcttcttcctactgtaacatttgcagaacttccttcagatttttagctaagacttcctttgatgtcgatcctgctaaaaatgctgccagatgagacttttggttccaaaacacagaagtttctggatcagctgctttgaggaattctggatgggattggaaccagagttttacttgttctggatccgctttggatgagtcaaattgtgtccatcattttacaaatgcgtgtctttgtagtgatggatattggtttgtcttttcagtcttgctgtaacgatattgccatgagaatatccatgacagtgcaaagcttgaaaagtatttaagatctgctggaattcatgattcctgcgaattgtattgtttcttaaattgagaaaatccttgttggactatttctgggaatatctctgggattggtccaaagaagtcccatcattgcaaaaaccaattgggaaaattgtaaattgtattggtcttgaaatatatcagccatgaatgcttgaagcgggtattttggcgccaaaacaccttagtccaagcatcaacgtaatcccaataggtataacctaccggatcaaatggaactgaaaatctctttcctttgttcaagtccgaa

SEQ ID NO: 12711 - DNA, 1173 bp, Glycine max
  Gm_smallRNAprecursor_5544
gaaagaagcgcttacaaaaatcttgtttcagagcacctctcttcagaaacctgaaaatggctaaatgaaagggtgcctcacaacatacttgaggactccttatatagccaaatatctaagaccggtagttgctggtagttttgaccgggactatttgactgtttgttacaagacaagtagttttgaccgggactttaatggctacaggacaggtagtattgtccagcattaattacacattaattacaaatatacggttttgtgaccgaaattaaatttaatctaaacagataccaaaacaatcatcttcgttttggtaaaagggattttcttcttcttcttcagcagaacttgtttcttccttctttgaggatgaagcttcttcttcctactgtaacatttgcagaacttccttcagatttttagctaagacttcctttgatgtcgatcctgctaaaaatgctgccagatgagacttttggttccaaaacacagaagtttctggatcagctgctttgaggaattctggatgggattggaaccagagttttacttgttctggatccgctttggatgagtcaaattgtgtccatcattttacaaatgcgtgtctttgtagtgatggatattggtttgtcttttcagtcttgctgtaacgatattgccatgagaatatccatgacagtgcaaagcttgaaaagtatttaagatctgctggaattcatgattcctgcgaattgtattgtttcttaaattgagaaaatccttgttggactatttctgggaatatctctgggattggtccaaagaagtcccatcattgcaaaaaccaattgggaaaattgtaaattgtattggtcttgaaatatatcagccatgaatgcttgaagcgggtattttggcgccaaaacaccttagtccaagcatcaacgtaatcccaataggtataacctaccggatcaaatggaactgaaaatctctttcctttgttcaagtccgaaccaaagtgtcttggttgaagaacttttagtatctggattgtcgagtgggtgtttaatgtttggtcttttggatctttgaaacgtttgatagatactgagtttgaatctaccaaaatcaattcataaaaagttcttgtcttcaggatggtggttggtttgtagtgaaatcctg

SEQ ID NO: 12712 - DNA, 1164 bp, Glycine max
  Gm_smallRNAprecursor_5545
gcttacaaaaatcttgtttcagagcacctctcttcagaaacctgaaaatggctaaatgaaagggtgcctcacaacatacttgaggactccttatatagccaaatatctaagaccggtagttgctggtagttttgaccgggactatttgactgtttgttacaagacaagtagttttgaccgggactttaatggctacaggacaggtagtattgtccagcattaattacacattaattacaaatatacggttttgtgaccgaaattaaatttaatctaaacagataccaaaacaatcatcttcgttttggtaaaagggattttcttcttcttcttcagcagaacttgtttcttccttctttgaggatgaagcttcttcttcctactgtaacatttgcagaacttccttcagatttttagctaagacttcctttgatgtcgatcctgctaaaaatgctgccagatgagacttttggttccaaaacacagaagtttctggatcagctgctttgaggaattctggatgggattggaaccagagttttacttgttctggatccgctttggatgagtcaaattgtgtccatcattttacaaatgcgtgtctttgtagtgatggatattggtttgtcttttcagtcttgctgtaacgatattgccatgagaatatccatgacagtgcaaagcttgaaaagtatttaagatctgctggaattcatgattcctgcgaattgtattgtttcttaaattgagaaaatccttgttggactatttctgggaatatctctgggattggtccaaagaagtcccatcattgcaaaaaccaattgggaaaattgtaaattgtattggtcttgaaatatatcagccatgaatgcttgaagcgggtattttggcgccaaaacaccttagtccaagcatcaacgtaatcccaataggtataacctaccggatcaaatggaactgaaaatctctttcctttgttcaagtccgaaccaaagtgtcttggttgaagaacttttagtatctggattgtcgagtgggtgtttaatgtttggtcttttggatctttgaaacgtttgatagatactgagtttgaatctaccaaaatcaattcataaaaagttcttgtcttcaggatggtggttggtttgtagtgaaatcctg

SEQ ID NO: 12713 - DNA, 1163 bp, Glycine max
  Gm_smallRNAprecursor_5546
cttacaaaaatcttgtttcagagcacctctcttcagaaacctgaaaatggctaaatgaaagggtgcctcacaacatacttgaggactccttatatagccaaatatctaagaccggtagttgctggtagttttgaccgggactatttgactgtttgttacaagacaagtagttttgaccgggactttaatggctacaggacaggtagtattgtccagcattaattacacattaattacaaatatacggttttgtgaccgaaattaaatttaatctaaacagataccaaaacaatcatcttcgttttggtaaaagggattttcttcttcttcttcagcagaacttgtttcttccttctttgaggatgaagcttcttcttcctactgtaacatttgcagaacttccttcagatttttagctaagacttcctttgatgtcgatcctgctaaaaatgctgccagatgagacttttggttccaaaacacagaagtttctggatcagctgctttgaggaattctggatgggattggaaccagagttttacttgttctggatccgctttggatgagtcaaattgtgtccatcattttacaaatgcgtgtctttgtagtgatggatattggtttgtcttttcagtcttgctgtaacgatattgccatgagaatatccatgacagtgcaaagcttgaaaagtatttaagatctgctggaattcatgattcctgcgaattgtattgtttcttaaattgagaaaatccttgttggactatttctgggaatatctctgggattggtccaaagaagtcccatcattgcaaaaaccaattgggaaaattgtaaattgtattggtcttgaaatatatcagccatgaatgcttgaagcgggtattttggcgccaaaacaccttagtccaagcatcaacgtaatcccaataggtataacctaccggatcaaatggaactgaaaatctctttcctttgttcaagtccgaaccaaagtgtcttggttgaagaacttttagtatctggattgtcgagtgggtgtttaatgtttggtcttttggatctttgaaacgtttgatagatactgagtttgaatctaccaaaatcaattcataaaaagttcttgtcttcaggatggtggttggtttgtagtgaaatcctg

SEQ ID NO: 12714 - DNA, 1130 bp, Glycine max
  Gm_smallRNAprecursor_5547
cagaaacctgaaaatggctaaatgaaagggtgcctcacaacatacttgaggactccttatatagccaaatatctaagaccggtagttgctggtagttttgaccgggactatttgactgtttgttacaagacaagtagttttgaccgggactttaatggctacaggacaggtagtattgtccagcattaattacacattaattacaaatatacggttttgtgaccgaaattaaatttaatctaaacagataccaaaacaatcatcttcgttttggtaaaagggattttcttcttcttcttcagcagaacttgtttcttccttctttgaggatgaagcttcttcttcctactgtaacatttgcagaacttccttcagatttttagctaagacttcctttgatgtcgatcctgctaaaaatgctgccagatgagacttttggttccaaaacacagaagtttctggatcagctgctttgaggaattctggatgggattggaaccagagttttacttgttctggatccgctttggatgagtcaaattgtgtccatcattttacaaatgcgtgtctttgtagtgatggatattggtttgtcttttcagtcttgctgtaacgatattgccatgagaatatccatgacagtgcaaagcttgaaaagtatttaagatctgctggaattcatgattcctgcgaattgtattgtttcttaaattgagaaaatccttgttggactatttctgggaatatctctgggattggtccaaagaagtcccatcattgcaaaaaccaattgggaaaattgtaaattgtattggtcttgaaatatatcagccatgaatgcttgaagcgggtattttggcgccaaaacaccttagtccaagcatcaacgtaatcccaataggtataacctaccggatcaaatggaactgaaaatctctttcctttgttcaagtccgaaccaaagtgtcttggttgaagaacttttagtatctggattgtcgagtgggtgtttaatgtttggtcttttggatctttgaaacgtttgatagatactgagtttgaatctaccaaaatcaattcataaaaagttcttgtcttcaggatggtggttggtttgtagtgaaatcctg

SEQ ID NO: 12715 - DNA, 1189 bp, Glycine max
  Gm_smallRNAprecursor_5548
actgtttgttacaagacaagtagttttgaccgggactttaatggctacaggacaggtagtattgtccagcattaattacacattaattacaaatatacggttttgtgaccgaaattaaatttaatctaaacagataccaaaacaatcatcttcgttttggtaaaagggattttcttcttcttcttcagcagaacttgtttcttccttctttgaggatgaagcttcttcttcctactgtaacatttgcagaacttccttcagatttttagctaagacttcctttgatgtcgatcctgctaaaaatgctgccagatgagacttttggttccaaaacacagaagtttctggatcagctgctttgaggaattctggatgggattggaaccagagttttacttgttctggatccgctttggatgagtcaaattgtgtccatcattttacaaatgcgtgtctttgtagtgatggatattggtttgtcttttcagtcttgctgtaacgatattgccatgagaatatccatgacagtgcaaagcttgaaaagtatttaagatctgctggaattcatgattcctgcgaattgtattgtttcttaaattgagaaaatccttgttggactatttctgggaatatctctgggattggtccaaagaagtcccatcattgcaaaaaccaattgggaaaattgtaaattgtattggtcttgaaatatatcagccatgaatgcttgaagcgggtattttggcgccaaaacaccttagtccaagcatcaacgtaatcccaataggtataacctaccggatcaaatggaactgaaaatctctttcctttgttcaagtccgaaccaaagtgtcttggttgaagaacttttagtatctggattgtcgagtgggtgtttaatgtttggtcttttggatctttgaaacgtttgatagatactgagtttgaatctaccaaaatcaattcataaaaagttcttgtcttcaggatggtggttggtttgtagtgaaatcctggtgggaaagccttggccatcgccttgaagggatttttgtcccaaaattcaggttccatctgcaaaacagttaacaatttatttttataaatataattgttagtttgtttggtgggtggtgtttgagctttggctaaaggtagttttcctttagtattggtggttgttttggtc

SEQ ID NO: 12716 - DNA, 1190 bp, Glycine max
  Gm_smallRNAprecursor_5549
actgtttgttacaagacaagtagttttgaccgggactttaatggctacaggacaggtagtattgtccagcattaattacacattaattacaaatatacggttttgtgaccgaaattaaatttaatctaaacagataccaaaacaatcatcttcgttttggtaaaagggattttcttcttcttcttcagcagaacttgtttcttccttctttgaggatgaagcttcttcttcctactgtaacatttgcagaacttccttcagatttttagctaagacttcctttgatgtcgatcctgctaaaaatgctgccagatgagacttttggttccaaaacacagaagtttctggatcagctgctttgaggaattctggatgggattggaaccagagttttacttgttctggatccgctttggatgagtcaaattgtgtccatcattttacaaatgcgtgtctttgtagtgatggatattggtttgtcttttcagtcttgctgtaacgatattgccatgagaatatccatgacagtgcaaagcttgaaaagtatttaagatctgctggaattcatgattcctgcgaattgtattgtttcttaaattgagaaaatccttgttggactatttctgggaatatctctgggattggtccaaagaagtcccatcattgcaaaaaccaattgggaaaattgtaaattgtattggtcttgaaatatatcagccatgaatgcttgaagcgggtattttggcgccaaaacaccttagtccaagcatcaacgtaatcccaataggtataacctaccggatcaaatggaactgaaaatctctttcctttgttcaagtccgaaccaaagtgtcttggttgaagaacttttagtatctggattgtcgagtgggtgtttaatgtttggtcttttggatctttgaaacgtttgatagatactgagtttgaatctaccaaaatcaattcataaaaagttcttgtcttcaggatggtggttggtttgtagtgaaatcctggtgggaaagccttggccatcgccttgaagggatttttgtcccaaaattcaggttccatctgcaaaacagttaacaatttatttttataaatataattgttagtttgtttggtgggtggtgtttgagctttggctaaaggtagttttcctttagtattggtggttgttttggtca

SEQ ID NO: 12717 - DNA, 1145 bp, Glycine max
  Gm_smallRNAprecursor_5550
gctacaggacaggtagtattgtccagcattaattacacattaattacaaatatacggttttgtgaccgaaattaaatttaatctaaacagataccaaaacaatcatcttcgttttggtaaaagggattttcttcttcttcttcagcagaacttgtttcttccttctttgaggatgaagcttcttcttcctactgtaacatttgcagaacttccttcagatttttagctaagacttcctttgatgtcgatcctgctaaaaatgctgccagatgagacttttggttccaaaacacagaagtttctggatcagctgctttgaggaattctggatgggattggaaccagagttttacttgttctggatccgctttggatgagtcaaattgtgtccatcattttacaaatgcgtgtctttgtagtgatggatattggtttgtcttttcagtcttgctgtaacgatattgccatgagaatatccatgacagtgcaaagcttgaaaagtatttaagatctgctggaattcatgattcctgcgaattgtattgtttcttaaattgagaaaatccttgttggactatttctgggaatatctctgggattggtccaaagaagtcccatcattgcaaaaaccaattgggaaaattgtaaattgtattggtcttgaaatatatcagccatgaatgcttgaagcgggtattttggcgccaaaacaccttagtccaagcatcaacgtaatcccaataggtataacctaccggatcaaatggaactgaaaatctctttcctttgttcaagtccgaaccaaagtgtcttggttgaagaacttttagtatctggattgtcgagtgggtgtttaatgtttggtcttttggatctttgaaacgtttgatagatactgagtttgaatctaccaaaatcaattcataaaaagttcttgtcttcaggatggtggttggtttgtagtgaaatcctggtgggaaagccttggccatcgccttgaagggatttttgtcccaaaattcaggttccatctgcaaaacagttaacaatttatttttataaatataattgttagtttgtttggtgggtggtgtttgagctttggctaaaggtagttttcctttagtattggtggttgttttggt

SEQ ID NO: 12718 - DNA, 1146 bp, Glycine max
  Gm_smallRNAprecursor_5551
gctacaggacaggtagtattgtccagcattaattacacattaattacaaatatacggttttgtgaccgaaattaaatttaatctaaacagataccaaaacaatcatcttcgttttggtaaaagggattttcttcttcttcttcagcagaacttgtttcttccttctttgaggatgaagcttcttcttcctactgtaacatttgcagaacttccttcagatttttagctaagacttcctttgatgtcgatcctgctaaaaatgctgccagatgagacttttggttccaaaacacagaagtttctggatcagctgctttgaggaattctggatgggattggaaccagagttttacttgttctggatccgctttggatgagtcaaattgtgtccatcattttacaaatgcgtgtctttgtagtgatggatattggtttgtcttttcagtcttgctgtaacgatattgccatgagaatatccatgacagtgcaaagcttgaaaagtatttaagatctgctggaattcatgattcctgcgaattgtattgtttcttaaattgagaaaatccttgttggactatttctgggaatatctctgggattggtccaaagaagtcccatcattgcaaaaaccaattgggaaaattgtaaattgtattggtcttgaaatatatcagccatgaatgcttgaagcgggtattttggcgccaaaacaccttagtccaagcatcaacgtaatcccaataggtataacctaccggatcaaatggaactgaaaatctctttcctttgttcaagtccgaaccaaagtgtcttggttgaagaacttttagtatctggattgtcgagtgggtgtttaatgtttggtcttttggatctttgaaacgtttgatagatactgagtttgaatctaccaaaatcaattcataaaaagttcttgtcttcaggatggtggttggtttgtagtgaaatcctggtgggaaagccttggccatcgccttgaagggatttttgtcccaaaattcaggttccatctgcaaaacagttaacaatttatttttataaatataattgttagtttgtttggtgggtggtgtttgagctttggctaaaggtagttttcctttagtattggtggttgttttggtc

SEQ ID NO: 12719 - DNA, 1100 bp, Glycine max
  Gm_smallRNAprecursor_5552
gcagaacttgtttcttccttctttgaggatgaagcttcttcttcctactgtaacatttgcagaacttccttcagatttttagctaagacttcctttgatgtcgatcctgctaaaaatgctgccagatgagacttttggttccaaaacacagaagtttctggatcagctgctttgaggaattctggatgggattggaaccagagttttacttgttctggatccgctttggatgagtcaaattgtgtccatcattttacaaatgcgtgtctttgtagtgatggatattggtttgtcttttcagtcttgctgtaacgatattgccatgagaatatccatgacagtgcaaagcttgaaaagtatttaagatctgctggaattcatgattcctgcgaattgtattgtttcttaaattgagaaaatccttgttggactatttctgggaatatctctgggattggtccaaagaagtcccatcattgcaaaaaccaattgggaaaattgtaaattgtattggtcttgaaatatatcagccatgaatgcttgaagcgggtattttggcgccaaaacaccttagtccaagcatcaacgtaatcccaataggtataacctaccggatcaaatggaactgaaaatctctttcctttgttcaagtccgaaccaaagtgtcttggttgaagaacttttagtatctggattgtcgagtgggtgtttaatgtttggtcttttggatctttgaaacgtttgatagatactgagtttgaatctaccaaaatcaattcataaaaagttcttgtcttcaggatggtggttggtttgtagtgaaatcctggtgggaaagccttggccatcgccttgaagggatttttgtcccaaaattcaggttccatctgcaaaacagttaacaatttatttttataaatataattgttagtttgtttggtgggtggtgtttgagctttggctaaaggtagttttcctttagtattggtggttgttttggtcattgacgcattttggatcattgtttgtagatttgattcagattcatcatcagattctgaggcaatgtctgcccaagattttttgattttttttggaaa

SEQ ID NO: 12720 - DNA, 1098 bp, Glycine max
  Gm_smallRNAprecursor_5553
agaacttgtttcttccttctttgaggatgaagcttcttcttcctactgtaacatttgcagaacttccttcagatttttagctaagacttcctttgatgtcgatcctgctaaaaatgctgccagatgagacttttggttccaaaacacagaagtttctggatcagctgctttgaggaattctggatgggattggaaccagagttttacttgttctggatccgctttggatgagtcaaattgtgtccatcattttacaaatgcgtgtctttgtagtgatggatattggtttgtcttttcagtcttgctgtaacgatattgccatgagaatatccatgacagtgcaaagcttgaaaagtatttaagatctgctggaattcatgattcctgcgaattgtattgtttcttaaattgagaaaatccttgttggactatttctgggaatatctctgggattggtccaaagaagtcccatcattgcaaaaaccaattgggaaaattgtaaattgtattggtcttgaaatatatcagccatgaatgcttgaagcgggtattttggcgccaaaacaccttagtccaagcatcaacgtaatcccaataggtataacctaccggatcaaatggaactgaaaatctctttcctttgttcaagtccgaaccaaagtgtcttggttgaagaacttttagtatctggattgtcgagtgggtgtttaatgtttggtcttttggatctttgaaacgtttgatagatactgagtttgaatctaccaaaatcaattcataaaaagttcttgtcttcaggatggtggttggtttgtagtgaaatcctggtgggaaagccttggccatcgccttgaagggatttttgtcccaaaattcaggttccatctgcaaaacagttaacaatttatttttataaatataattgttagtttgtttggtgggtggtgtttgagctttggctaaaggtagttttcctttagtattggtggttgttttggtcattgacgcattttggatcattgtttgtagatttgattcagattcatcatcagattctgaggcaatgtctgcccaagattttttgattttttttggaaa

SEQ ID NO: 12721 - DNA, 1101 bp, Glycine max
  Gm_smallRNAprecursor_5554
gaacttccttcagatttttagctaagacttcctttgatgtcgatcctgctaaaaatgctgccagatgagacttttggttccaaaacacagaagtttctggatcagctgctttgaggaattctggatgggattggaaccagagttttacttgttctggatccgctttggatgagtcaaattgtgtccatcattttacaaatgcgtgtctttgtagtgatggatattggtttgtcttttcagtcttgctgtaacgatattgccatgagaatatccatgacagtgcaaagcttgaaaagtatttaagatctgctggaattcatgattcctgcgaattgtattgtttcttaaattgagaaaatccttgttggactatttctgggaatatctctgggattggtccaaagaagtcccatcattgcaaaaaccaattgggaaaattgtaaattgtattggtcttgaaatatatcagccatgaatgcttgaagcgggtattttggcgccaaaacaccttagtccaagcatcaacgtaatcccaataggtataacctaccggatcaaatggaactgaaaatctctttcctttgttcaagtccgaaccaaagtgtcttggttgaagaacttttagtatctggattgtcgagtgggtgtttaatgtttggtcttttggatctttgaaacgtttgatagatactgagtttgaatctaccaaaatcaattcataaaaagttcttgtcttcaggatggtggttggtttgtagtgaaatcctggtgggaaagccttggccatcgccttgaagggatttttgtcccaaaattcaggttccatctgcaaaacagttaacaatttatttttataaatataattgttagtttgtttggtgggtggtgtttgagctttggctaaaggtagttttcctttagtattggtggttgttttggtcattgacgcattttggatcattgtttgtagatttgattcagattcatcatcagattctgaggcaatgtctgcccaagattttttgattttttttggaaatttggttagacccatgtcttgaagggcctgaagggtttcaattggccatgcatagtcggccg

SEQ ID NO: 12722 - DNA, 1140 bp, Glycine max
  Gm_smallRNAprecursor_5555
tttttagctaagacttcctttgatgtcgatcctgctaaaaatgctgccagatgagacttttggttccaaaacacagaagtttctggatcagctgctttgaggaattctggatgggattggaaccagagttttacttgttctggatccgctttggatgagtcaaattgtgtccatcattttacaaatgcgtgtctttgtagtgatggatattggtttgtcttttcagtcttgctgtaacgatattgccatgagaatatccatgacagtgcaaagcttgaaaagtatttaagatctgctggaattcatgattcctgcgaattgtattgtttcttaaattgagaaaatccttgttggactatttctgggaatatctctgggattggtccaaagaagtcccatcattgcaaaaaccaattgggaaaattgtaaattgtattggtcttgaaatatatcagccatgaatgcttgaagcgggtattttggcgccaaaacaccttagtccaagcatcaacgtaatcccaataggtataacctaccggatcaaatggaactgaaaatctctttcctttgttcaagtccgaaccaaagtgtcttggttgaagaacttttagtatctggattgtcgagtgggtgtttaatgtttggtcttttggatctttgaaacgtttgatagatactgagtttgaatctaccaaaatcaattcataaaaagttcttgtcttcaggatggtggttggtttgtagtgaaatcctggtgggaaagccttggccatcgccttgaagggatttttgtcccaaaattcaggttccatctgcaaaacagttaacaatttatttttataaatataattgttagtttgtttggtgggtggtgtttgagctttggctaaaggtagttttcctttagtattggtggttgttttggtcattgacgcattttggatcattgtttgtagatttgattcagattcatcatcagattctgaggcaatgtctgcccaagattttttgattttttttggaaatttggttagacccatgtcttgaagggcctgaagggtttcaattggccatgcatagtcggccgatgtttgtttggcggttgccggtttgggagattcctgagtggatggctcaggt

SEQ ID NO: 12723 - DNA, 1224 bp, Glycine max
  Gm_smallRNAprecursor_5556
tgctttgaggaattctggatgggattggaaccagagttttacttgttctggatccgctttggatgagtcaaattgtgtccatcattttacaaatgcgtgtctttgtagtgatggatattggtttgtcttttcagtcttgctgtaacgatattgccatgagaatatccatgacagtgcaaagcttgaaaagtatttaagatctgctggaattcatgattcctgcgaattgtattgtttcttaaattgagaaaatccttgttggactatttctgggaatatctctgggattggtccaaagaagtcccatcattgcaaaaaccaattgggaaaattgtaaattgtattggtcttgaaatatatcagccatgaatgcttgaagcgggtattttggcgccaaaacaccttagtccaagcatcaacgtaatcccaataggtataacctaccggatcaaatggaactgaaaatctctttcctttgttcaagtccgaaccaaagtgtcttggttgaagaacttttagtatctggattgtcgagtgggtgtttaatgtttggtcttttggatctttgaaacgtttgatagatactgagtttgaatctaccaaaatcaattcataaaaagttcttgtcttcaggatggtggttggtttgtagtgaaatcctggtgggaaagccttggccatcgccttgaagggatttttgtcccaaaattcaggttccatctgcaaaacagttaacaatttatttttataaatataattgttagtttgtttggtgggtggtgtttgagctttggctaaaggtagttttcctttagtattggtggttgttttggtcattgacgcattttggatcattgtttgtagatttgattcagattcatcatcagattctgaggcaatgtctgcccaagattttttgattttttttggaaatttggttagacccatgtcttgaagggcctgaagggtttcaattggccatgcatagtcggccgatgtttgtttggcggttgccggtttgggagattcctgagtggatggctcaggtttgattgaggcaatctgggttgatgacccttctaaattggttttctgggtagatgacccagcctgggttggtgacccagaagaggttgatgatttcttgatggttggctctggaagagccagtctggctcctttgcctgtactctttcctccccttagggagattcccgatgcctt

SEQ ID NO: 12724 - DNA, 1159 bp, Glycine max
  Gm_smallRNAprecursor_5557
ctggatccgctttggatgagtcaaattgtgtccatcattttacaaatgcgtgtctttgtagtgatggatattggtttgtcttttcagtcttgctgtaacgatattgccatgagaatatccatgacagtgcaaagcttgaaaagtatttaagatctgctggaattcatgattcctgcgaattgtattgtttcttaaattgagaaaatccttgttggactatttctgggaatatctctgggattggtccaaagaagtcccatcattgcaaaaaccaattgggaaaattgtaaattgtattggtcttgaaatatatcagccatgaatgcttgaagcgggtattttggcgccaaaacaccttagtccaagcatcaacgtaatcccaataggtataacctaccggatcaaatggaactgaaaatctctttcctttgttcaagtccgaaccaaagtgtcttggttgaagaacttttagtatctggattgtcgagtgggtgtttaatgtttggtcttttggatctttgaaacgtttgatagatactgagtttgaatctaccaaaatcaattcataaaaagttcttgtcttcaggatggtggttggtttgtagtgaaatcctggtgggaaagccttggccatcgccttgaagggatttttgtcccaaaattcaggttccatctgcaaaacagttaacaatttatttttataaatataattgttagtttgtttggtgggtggtgtttgagctttggctaaaggtagttttcctttagtattggtggttgttttggtcattgacgcattttggatcattgtttgtagatttgattcagattcatcatcagattctgaggcaatgtctgcccaagattttttgattttttttggaaatttggttagacccatgtcttgaagggcctgaagggtttcaattggccatgcatagtcggccgatgtttgtttggcggttgccggtttgggagattcctgagtggatggctcaggtttgattgaggcaatctgggttgatgacccttctaaattggttttctgggtagatgacccagcctgggttggtgacccagaagaggttgatgatttcttgatggttggctctggaagagccagtctggctcctttgcctgtactctttcctccccttag

SEQ ID NO: 12725 - DNA, 1098 bp, Glycine max
  Gm_smallRNAprecursor_5558
gtgtctttgtagtgatggatattggtttgtcttttcagtcttgctgtaacgatattgccatgagaatatccatgacagtgcaaagcttgaaaagtatttaagatctgctggaattcatgattcctgcgaattgtattgtttcttaaattgagaaaatccttgttggactatttctgggaatatctctgggattggtccaaagaagtcccatcattgcaaaaaccaattgggaaaattgtaaattgtattggtcttgaaatatatcagccatgaatgcttgaagcgggtattttggcgccaaaacaccttagtccaagcatcaacgtaatcccaataggtataacctaccggatcaaatggaactgaaaatctctttcctttgttcaagtccgaaccaaagtgtcttggttgaagaacttttagtatctggattgtcgagtgggtgtttaatgtttggtcttttggatctttgaaacgtttgatagatactgagtttgaatctaccaaaatcaattcataaaaagttcttgtcttcaggatggtggttggtttgtagtgaaatcctggtgggaaagccttggccatcgccttgaagggatttttgtcccaaaattcaggttccatctgcaaaacagttaacaatttatttttataaatataattgttagtttgtttggtgggtggtgtttgagctttggctaaaggtagttttcctttagtattggtggttgttttggtcattgacgcattttggatcattgtttgtagatttgattcagattcatcatcagattctgaggcaatgtctgcccaagattttttgattttttttggaaatttggttagacccatgtcttgaagggcctgaagggtttcaattggccatgcatagtcggccgatgtttgtttggcggttgccggtttgggagattcctgagtggatggctcaggtttgattgaggcaatctgggttgatgacccttctaaattggttttctgggtagatgacccagcctgggttggtgacccagaagaggttgatgatttcttgatggttggctctggaagagccagtctggctcctttgcctgtactctt

SEQ ID NO: 12726 - DNA, 1098 bp, Glycine max
  Gm_smallRNAprecursor_5559
ttggtttgtcttttcagtcttgctgtaacgatattgccatgagaatatccatgacagtgcaaagcttgaaaagtatttaagatctgctggaattcatgattcctgcgaattgtattgtttcttaaattgagaaaatccttgttggactatttctgggaatatctctgggattggtccaaagaagtcccatcattgcaaaaaccaattgggaaaattgtaaattgtattggtcttgaaatatatcagccatgaatgcttgaagcgggtattttggcgccaaaacaccttagtccaagcatcaacgtaatcccaataggtataacctaccggatcaaatggaactgaaaatctctttcctttgttcaagtccgaaccaaagtgtcttggttgaagaacttttagtatctggattgtcgagtgggtgtttaatgtttggtcttttggatctttgaaacgtttgatagatactgagtttgaatctaccaaaatcaattcataaaaagttcttgtcttcaggatggtggttggtttgtagtgaaatcctggtgggaaagccttggccatcgccttgaagggatttttgtcccaaaattcaggttccatctgcaaaacagttaacaatttatttttataaatataattgttagtttgtttggtgggtggtgtttgagctttggctaaaggtagttttcctttagtattggtggttgttttggtcattgacgcattttggatcattgtttgtagatttgattcagattcatcatcagattctgaggcaatgtctgcccaagattttttgattttttttggaaatttggttagacccatgtcttgaagggcctgaagggtttcaattggccatgcatagtcggccgatgtttgtttggcggttgccggtttgggagattcctgagtggatggctcaggtttgattgaggcaatctgggttgatgacccttctaaattggttttctgggtagatgacccagcctgggttggtgacccagaagaggttgatgatttcttgatggttggctctggaagagccagtctggctcctttgcctgtactctttcctccccttagggagattcc

SEQ ID NO: 12727 - DNA, 1035 bp, Glycine max
  Gm_smallRNAprecursor_5560
ggcggttgccggtttgggagattcctgagtggatggctcaggtttgattgaggcaatctgggttgatgacccttctaaattggttttctgggtagatgacccagcctgggttggtgacccagaagaggttgatgatttcttgatggttggctctggaagagccagtctggctcctttgcctgtactctttcctccccttagggagattcccgatgccttaggaggcattaccacttttctgtaagaattcacgggtaaggtagtcaggtaatgagtttgaggtgcccatgatgtattctatgtcaaaatcaaagacacttagaattgtttgccatcttgcaaaaatttgttttgaggcaaggtttttaacatctttttgtaaaatatctttggctgatttacaatcaaccctgattagaaatttttgtttaataaatctgattgaaatttggaaatgcacaaaacaattgctaaaatttcttttttaacagttgaatattttaattgtgcaggattccaatgttttgatgtatatgcaatgacatgatcttggccatggactctttgtttgaggatgccaccataatctatgtctgaagcatcagtttcgacaattttaaatgcctgtggaataggaagatacagacattttatggattggactttgactttgatttctttaaccgtttgtgtatggaggtcagaccaaggaggcagatttttcttcatcctatcatgcaatggcttgacaatattgcttaaatagggggaaaattctcctacgtaatttagacaacctagaaatctttgtaactgggttttgtctaagatttggttgggaaatttgctagcaaactctattgacctttcgattggaatgattgtaccttgatatatattgtgaccaaggaatcgaattcgagtttggaaaagattgattttttatttggagactgccaaaccattttgtttgatgatatgtatgaaggtctggagatgtttgaaatgttggtcaatgttttgggaaaagattaa

SEQ ID NO: 12728 - DNA, 1247 bp, Glycine max
  Gm_smallRNAprecursor_5561
ttgatgatttcttgatggttggctctggaagagccagtctggctcctttgcctgtactctttcctccccttagggagattcccgatgccttaggaggcattaccacttttctgtaagaattcacgggtaaggtagtcaggtaatgagtttgaggtgcccatgatgtattctatgtcaaaatcaaagacacttagaattgtttgccatcttgcaaaaatttgttttgaggcaaggtttttaacatctttttgtaaaatatctttggctgatttacaatcaaccctgattagaaatttttgtttaataaatctgattgaaatttggaaatgcacaaaacaattgctaaaatttcttttttaacagttgaatattttaattgtgcaggattccaatgttttgatgtatatgcaatgacatgatcttggccatggactctttgtttgaggatgccaccataatctatgtctgaagcatcagtttcgacaattttaaatgcctgtggaataggaagatacagacattttatggattggactttgactttgatttctttaaccgtttgtgtatggaggtcagaccaaggaggcagatttttcttcatcctatcatgcaatggcttgacaatattgcttaaatagggggaaaattctcctacgtaatttagacaacctagaaatctttgtaactgggttttgtctaagatttggttgggaaatttgctagcaaactctattgacctttcgattggaatgattgtaccttgatatatattgtgaccaaggaatcgaattcgagtttggaaaagattgattttttatttggagactgccaaaccattttgtttgatgatatgtatgaaggtctggagatgtttgaaatgttggtcaatgttttgggaaaagattaaaacatcatctatgtagacaatgacaaattttgaatagggattaaaaatatcattcataatttgttgaaattctgaaggggcattcttcagtctgaatggcatcacattccattcatattgcccgaaaggtacagtaaacgttgttttgtacctaactgattcttggatttggatctgccaaaatccagatttcatatcaaattttgaaaatatctttgcagaatttaatctgttaagcaaatcttttttgtttggaataggatatctaatccattgtaatgctttatttagtggtttgtaatttatgactaagcggggtgttccacgctcaatctcagat

SEQ ID NO: 12729 - DNA, 1246 bp, Glycine max
  Gm_smallRNAprecursor_5562
tgatgatttcttgatggttggctctggaagagccagtctggctcctttgcctgtactctttcctccccttagggagattcccgatgccttaggaggcattaccacttttctgtaagaattcacgggtaaggtagtcaggtaatgagtttgaggtgcccatgatgtattctatgtcaaaatcaaagacacttagaattgtttgccatcttgcaaaaatttgttttgaggcaaggtttttaacatctttttgtaaaatatctttggctgatttacaatcaaccctgattagaaatttttgtttaataaatctgattgaaatttggaaatgcacaaaacaattgctaaaatttcttttttaacagttgaatattttaattgtgcaggattccaatgttttgatgtatatgcaatgacatgatcttggccatggactctttgtttgaggatgccaccataatctatgtctgaagcatcagtttcgacaattttaaatgcctgtggaataggaagatacagacattttatggattggactttgactttgatttctttaaccgtttgtgtatggaggtcagaccaaggaggcagatttttcttcatcctatcatgcaatggcttgacaatattgcttaaatagggggaaaattctcctacgtaatttagacaacctagaaatctttgtaactgggttttgtctaagatttggttgggaaatttgctagcaaactctattgacctttcgattggaatgattgtaccttgatatatattgtgaccaaggaatcgaattcgagtttggaaaagattgattttttatttggagactgccaaaccattttgtttgatgatatgtatgaaggtctggagatgtttgaaatgttggtcaatgttttgggaaaagattaaaacatcatctatgtagacaatgacaaattttgaatagggattaaaaatatcattcataatttgttgaaattctgaaggggcattcttcagtctgaatggcatcacattccattcatattgcccgaaaggtacagtaaacgttgttttgtacctaactgattcttggatttggatctgccaaaatccagatttcatatcaaattttgaaaatatctttgcagaatttaatctgttaagcaaatcttttttgtttggaataggatatctaatccattgtaatgctttatttagtggtttgtaatttatgactaagcggggtgttccacgctcaatctcagat

SEQ ID NO: 12730 - DNA, 1031 bp, Glycine max
  Gm_smallRNAprecursor_5563
tctttttgtaaaatatctttggctgatttacaatcaaccctgattagaaatttttgtttaataaatctgattgaaatttggaaatgcacaaaacaattgctaaaatttcttttttaacagttgaatattttaattgtgcaggattccaatgttttgatgtatatgcaatgacatgatcttggccatggactctttgtttgaggatgccaccataatctatgtctgaagcatcagtttcgacaattttaaatgcctgtggaataggaagatacagacattttatggattggactttgactttgatttctttaaccgtttgtgtatggaggtcagaccaaggaggcagatttttcttcatcctatcatgcaatggcttgacaatattgcttaaatagggggaaaattctcctacgtaatttagacaacctagaaatctttgtaactgggttttgtctaagatttggttgggaaatttgctagcaaactctattgacctttcgattggaatgattgtaccttgatatatattgtgaccaaggaatcgaattcgagtttggaaaagattgattttttatttggagactgccaaaccattttgtttgatgatatgtatgaaggtctggagatgtttgaaatgttggtcaatgttttgggaaaagattaaaacatcatctatgtagacaatgacaaattttgaatagggattaaaaatatcattcataatttgttgaaattctgaaggggcattcttcagtctgaatggcatcacattccattcatattgcccgaaaggtacagtaaacgttgttttgtacctaactgattcttggatttggatctgccaaaatccagatttcatatcaaattttgaaaatatctttgcagaatttaatctgttaagcaaatcttttttgtttggaataggatatctaatccattgtaatgctttatttagtggtttgtaatttatgactaagcggggtgttccacgctcaatctcagattgtttgttgacataaaaagccgcacaa

SEQ ID NO: 12731 - DNA, 1079 bp, Glycine max
  Gm_smallRNAprecursor_5564
actcagatctggttagtcctactggaattgaacgggttctaactgaaaaagaccttctggctgactcatattcagacctagaggcttttatccttgatgaaaaagaatttctcctatttaaggttatctctacctttccgaagttatcttgcttaatatgctctatggttggagcgggtcggggaacaaacggtgtcgccttatccataaccaatctttcgggaagagttacttcatcccattttatttttctcgggagagaaacgttagcctttgtcatatcagtgataaacaaagttgtttctcctttttgaggttttaatagggctctagatgcacaagtattcatgaccttgtactggatcctataaattaaggttgctgggattgatccttctttcatgtcaaggccatgaaagtggatgtttaagaacagagagtcaagaatggttcagatccataagttcagttaacatatgccctgatggggaagtaggaatagtgtccgtaagggcatatgttaattgaacttatggatctgaaccatgtacaataattttaatttaaatagtatgtgtttgaacagtattttctggaagcacaacaatctgatattttagttgaatgatactgtagcagtaagtcccgtggttgagaaagggcagtaaggctaaggtgtattgttcaaataaaatattgagacataatatactggtggctataggagtaatgttcaaactatattgtctgtaaaaaaaagaattttctttcatttttcagatccaagaagttttgtaacatatagccttatggaaatatttctatggaaccaaatgaaggcaaagatattagagaatgatataatcatgtctagactattgcgatctttttcccgtatctcttttcgctcaaattcctcctcttcatcttcttcaagaaactccaatctattaaatgatcaagataaccagacccaagaggtcgccccaaaacacaatctcttcgatgaggaagtccgattcgaagatatcaatcaaaacatggatgactggaacattccagaaatccctcaggatcaa

SEQ ID NO: 12732 - DNA, 1080 bp, Glycine max
  Gm_smallRNAprecursor_5565
actcagatctggttagtcctactggaattgaacgggttctaactgaaaaagaccttctggctgactcatattcagacctagaggcttttatccttgatgaaaaagaatttctcctatttaaggttatctctacctttccgaagttatcttgcttaatatgctctatggttggagcgggtcggggaacaaacggtgtcgccttatccataaccaatctttcgggaagagttacttcatcccattttatttttctcgggagagaaacgttagcctttgtcatatcagtgataaacaaagttgtttctcctttttgaggttttaatagggctctagatgcacaagtattcatgaccttgtactggatcctataaattaaggttgctgggattgatccttctttcatgtcaaggccatgaaagtggatgtttaagaacagagagtcaagaatggttcagatccataagttcagttaacatatgccctgatggggaagtaggaatagtgtccgtaagggcatatgttaattgaacttatggatctgaaccatgtacaataattttaatttaaatagtatgtgtttgaacagtattttctggaagcacaacaatctgatattttagttgaatgatactgtagcagtaagtcccgtggttgagaaagggcagtaaggctaaggtgtattgttcaaataaaatattgagacataatatactggtggctataggagtaatgttcaaactatattgtctgtaaaaaaaagaattttctttcatttttcagatccaagaagttttgtaacatatagccttatggaaatatttctatggaaccaaatgaaggcaaagatattagagaatgatataatcatgtctagactattgcgatctttttcccgtatctcttttcgctcaaattcctcctcttcatcttcttcaagaaactccaatctattaaatgatcaagataaccagacccaagaggtcgccccaaaacacaatctcttcgatgaggaagtccgattcgaagatatcaatcaaaacatggatgactggaacattccagaaatccctcaggatcaac

SEQ ID NO: 12733 - DNA, 1157 bp, Glycine max
  Gm_smallRNAprecursor_5566
gtaggaatagtgtccgtaagggcatatgttaattgaacttatggatctgaaccatgtacaataattttaatttaaatagtatgtgtttgaacagtattttctggaagcacaacaatctgatattttagttgaatgatactgtagcagtaagtcccgtggttgagaaagggcagtaaggctaaggtgtattgttcaaataaaatattgagacataatatactggtggctataggagtaatgttcaaactatattgtctgtaaaaaaaagaattttctttcatttttcagatccaagaagttttgtaacatatagccttatggaaatatttctatggaaccaaatgaaggcaaagatattagagaatgatataatcatgtctagactattgcgatctttttcccgtatctcttttcgctcaaattcctcctcttcatcttcttcaagaaactccaatctattaaatgatcaagataaccagacccaagaggtcgccccaaaacacaatctcttcgatgaggaagtccgattcgaagatatcaatcaaaacatggatgactggaacattccagaaatccctcaggatcaactatacgttccggaaacaattaaagacaaacaaaactttgattacataatcaaaacagtagaaaacaatattcctctaggacaagatataggggaagaatttcatttactttcaaaaaattcaatttatgaacatagccgtaagtataaatatctacacatcggttgtgtacaagtatccatcaagcccttaattgatatgggcataaatgcagcagttttaatgtgtctaagagatattaggcataaccaatttgaagactccctaattggaacagtcgaaaccagcctaggacaaggtccaatatattttaattgttatccaaacaaaacagtgagtctgatggacagaaacattcttgactctctattcttaaacatccactttcatggccttgacatgaaagaaggatcaatcccagcagccttaatttatagtatctagtacaaggtcatgaatacttgggcatctagagtcctgttaaaacctcaaaaaggagaaacaactttgtttatcactgatatgacaaaggctaacgtttctctcccgagacaaataaaatgggatgaa

SEQ ID NO: 12734 - DNA, 1198 bp, Glycine max
  Gm_smallRNAprecursor_5567
acagaaagaaaaatattgttgatctcccttatgagaaagactttagggaaaaacaaattcctacaaaagccagaccaatccaaatgaatgaagaacttctccaatactgtaaaaaagaaatcaaggatttgcttgataaaggcctaatccggaaaagcaaaagcccatggtcttgtgcggctttttatgtcaacaaacaatctgagattgagcgtggaacaccccgcttagtcataaattacaaaccactaaataaagcattacaatggattagatatcctattccaaacaaaaaagatttgcttaacagattaaattctgcaaagatattttcaaaatttgatatgaaatctggattttggcagatccaaatccaagaatcaaataggtgcaaaacagcgtttactgtaccttttgggcaatatgaatagaatgtgatgccattcggactgaagaatgccccttcagaatttcaaaaaattatgaatgatatttttaatccctattcaaaatttgtcattgtctacatagatgatgttttaatcttttcccaaaacattgaccaacatttcaaacatctccagaccttcatccatatcatcaaacagaatggtttggcagtctccaaatcaaaaatcaatcttttcaaaactcgaattcaattccttggtcacaatatatatcaaggtacaatcattccaatcgaaaggtcaatagagtttgctagcaaatttcccaaccaaatcttagacaaaacccagttacaaagatttctaggttgtctaaattacgtaggagaatttgtcccctatttaaacaatattgtcaagccattgcatgataggctgaagaaaaatccgcctccttggtctgacctcgatacacaaatagttaaagaaatcaaagtcaaagtccaatccataaaatgtctgtatcttcctattccacaggcattcaaaattgtcgaaactgatgcttcagacataggttatggtggcatcctcaaacaaagagtccatggccaagatcatgtcattgcatatacatcaaaacattggaatcctgcacaattaaaatattcaactgttaaaaaagaagttttagcaattgttttgtgcatttccaaatttcaatcggatttattaaaccaaatatttttaatcaaggctgattgtaaatcagccgaagatattttaca

SEQ ID NO: 12735 - DNA, 1232 bp, Glycine max
  Gm_smallRNAprecursor_5568
acagaaagaaaaatattgttgatctcccttatgagaaagactttagggaaaaacaaattcctacaaaagccagaccaatccaaatgaatgaagaacttctccaatactgtaaaaaagaaatcaaggatttgcttgataaaggcctaatccggaaaagcaaaagcccatggtcttgtgcggctttttatgtcaacaaacaatctgagattgagcgtggaacaccccgcttagtcataaattacaaaccactaaataaagcattacaatggattagatatcctattccaaacaaaaaagatttgcttaacagattaaattctgcaaagatattttcaaaatttgatatgaaatctggattttggcagatccaaatccaagaatcaaataggtgcaaaacagcgtttactgtaccttttgggcaatatgaatagaatgtgatgccattcggactgaagaatgccccttcagaatttcaaaaaattatgaatgatatttttaatccctattcaaaatttgtcattgtctacatagatgatgttttaatcttttcccaaaacattgaccaacatttcaaacatctccagaccttcatccatatcatcaaacagaatggtttggcagtctccaaatcaaaaatcaatcttttcaaaactcgaattcaattccttggtcacaatatatatcaaggtacaatcattccaatcgaaaggtcaatagagtttgctagcaaatttcccaaccaaatcttagacaaaacccagttacaaagatttctaggttgtctaaattacgtaggagaatttgtcccctatttaaacaatattgtcaagccattgcatgataggctgaagaaaaatccgcctccttggtctgacctcgatacacaaatagttaaagaaatcaaagtcaaagtccaatccataaaatgtctgtatcttcctattccacaggcattcaaaattgtcgaaactgatgcttcagacataggttatggtggcatcctcaaacaaagagtccatggccaagatcatgtcattgcatatacatcaaaacattggaatcctgcacaattaaaatattcaactgttaaaaaagaagttttagcaattgttttgtgcatttccaaatttcaatcggatttattaaaccaaatatttttaatcaaggctgattgtaaatcagccgaagatattttacaaaaagatgttaaaaaacttgcctcaaaacaaatt

SEQ ID NO: 12736 - DNA, 1107 bp, Glycine max
  Gm_smallRNAprecursor_5569
caatctgagattgagcgtggaacaccccgcttagtcataaattacaaaccactaaataaagcattacaatggattagatatcctattccaaacaaaaaagatttgcttaacagattaaattctgcaaagatattttcaaaatttgatatgaaatctggattttggcagatccaaatccaagaatcaaataggtgcaaaacagcgtttactgtaccttttgggcaatatgaatagaatgtgatgccattcggactgaagaatgccccttcagaatttcaaaaaattatgaatgatatttttaatccctattcaaaatttgtcattgtctacatagatgatgttttaatcttttcccaaaacattgaccaacatttcaaacatctccagaccttcatccatatcatcaaacagaatggtttggcagtctccaaatcaaaaatcaatcttttcaaaactcgaattcaattccttggtcacaatatatatcaaggtacaatcattccaatcgaaaggtcaatagagtttgctagcaaatttcccaaccaaatcttagacaaaacccagttacaaagatttctaggttgtctaaattacgtaggagaatttgtcccctatttaaacaatattgtcaagccattgcatgataggctgaagaaaaatccgcctccttggtctgacctcgatacacaaatagttaaagaaatcaaagtcaaagtccaatccataaaatgtctgtatcttcctattccacaggcattcaaaattgtcgaaactgatgcttcagacataggttatggtggcatcctcaaacaaagagtccatggccaagatcatgtcattgcatatacatcaaaacattggaatcctgcacaattaaaatattcaactgttaaaaaagaagttttagcaattgttttgtgcatttccaaatttcaatcggatttattaaaccaaatatttttaatcaaggctgattgtaaatcagccgaagatattttacaaaaagatgttaaaaaacttgcctcaaaacaaatttttgcaagatggcaagcaattctaagtgtctttgattttgacatagaatacatcaagggcacctcaaattca

SEQ ID NO: 12737 - DNA, 1151 bp, Glycine max
  Gm_smallRNAprecursor_5570
ttaacagattaaattctgcaaagatattttcaaaatttgatatgaaatctggattttggcagatccaaatccaagaatcaaataggtgcaaaacagcgtttactgtaccttttgggcaatatgaatagaatgtgatgccattcggactgaagaatgccccttcagaatttcaaaaaattatgaatgatatttttaatccctattcaaaatttgtcattgtctacatagatgatgttttaatcttttcccaaaacattgaccaacatttcaaacatctccagaccttcatccatatcatcaaacagaatggtttggcagtctccaaatcaaaaatcaatcttttcaaaactcgaattcaattccttggtcacaatatatatcaaggtacaatcattccaatcgaaaggtcaatagagtttgctagcaaatttcccaaccaaatcttagacaaaacccagttacaaagatttctaggttgtctaaattacgtaggagaatttgtcccctatttaaacaatattgtcaagccattgcatgataggctgaagaaaaatccgcctccttggtctgacctcgatacacaaatagttaaagaaatcaaagtcaaagtccaatccataaaatgtctgtatcttcctattccacaggcattcaaaattgtcgaaactgatgcttcagacataggttatggtggcatcctcaaacaaagagtccatggccaagatcatgtcattgcatatacatcaaaacattggaatcctgcacaattaaaatattcaactgttaaaaaagaagttttagcaattgttttgtgcatttccaaatttcaatcggatttattaaaccaaatatttttaatcaaggctgattgtaaatcagccgaagatattttacaaaaagatgttaaaaaacttgcctcaaaacaaatttttgcaagatggcaagcaattctaagtgtctttgattttgacatagaatacatcaagggcacctcaaattcattacctaactaccttacccgtgaattcttacagaaaagtggtaatgcctcctaaggcatcgggaatctccctacggggaggaaggagtacaggcaaaggagccagactggctcttccagagccaaccatcaagaaatcatccacctcttc

SEQ ID NO: 12738 - DNA, 1218 bp, Glycine max
  Gm_smallRNAprecursor_5571
ttaacagattaaattctgcaaagatattttcaaaatttgatatgaaatctggattttggcagatccaaatccaagaatcaaataggtgcaaaacagcgtttactgtaccttttgggcaatatgaatagaatgtgatgccattcggactgaagaatgccccttcagaatttcaaaaaattatgaatgatatttttaatccctattcaaaatttgtcattgtctacatagatgatgttttaatcttttcccaaaacattgaccaacatttcaaacatctccagaccttcatccatatcatcaaacagaatggtttggcagtctccaaatcaaaaatcaatcttttcaaaactcgaattcaattccttggtcacaatatatatcaaggtacaatcattccaatcgaaaggtcaatagagtttgctagcaaatttcccaaccaaatcttagacaaaacccagttacaaagatttctaggttgtctaaattacgtaggagaatttgtcccctatttaaacaatattgtcaagccattgcatgataggctgaagaaaaatccgcctccttggtctgacctcgatacacaaatagttaaagaaatcaaagtcaaagtccaatccataaaatgtctgtatcttcctattccacaggcattcaaaattgtcgaaactgatgcttcagacataggttatggtggcatcctcaaacaaagagtccatggccaagatcatgtcattgcatatacatcaaaacattggaatcctgcacaattaaaatattcaactgttaaaaaagaagttttagcaattgttttgtgcatttccaaatttcaatcggatttattaaaccaaatatttttaatcaaggctgattgtaaatcagccgaagatattttacaaaaagatgttaaaaaacttgcctcaaaacaaatttttgcaagatggcaagcaattctaagtgtctttgattttgacatagaatacatcaagggcacctcaaattcattacctaactaccttacccgtgaattcttacagaaaagtggtaatgcctcctaaggcatcgggaatctccctacggggaggaaggagtacaggcaaaggagccagactggctcttccagagccaaccatcaagaaatcatccacctcttctgggtcaccaacccaggctgggtcatctacccagaaaaccaatttagaagggtcattaacccagatt

SEQ ID NO: 12739 - DNA, 1038 bp, Glycine max
  Gm_smallRNAprecursor_5572
taccttttgggcaatatgaatagaatgtgatgccattcggactgaagaatgccccttcagaatttcaaaaaattatgaatgatatttttaatccctattcaaaatttgtcattgtctacatagatgatgttttaatcttttcccaaaacattgaccaacatttcaaacatctccagaccttcatccatatcatcaaacagaatggtttggcagtctccaaatcaaaaatcaatcttttcaaaactcgaattcaattccttggtcacaatatatatcaaggtacaatcattccaatcgaaaggtcaatagagtttgctagcaaatttcccaaccaaatcttagacaaaacccagttacaaagatttctaggttgtctaaattacgtaggagaatttgtcccctatttaaacaatattgtcaagccattgcatgataggctgaagaaaaatccgcctccttggtctgacctcgatacacaaatagttaaagaaatcaaagtcaaagtccaatccataaaatgtctgtatcttcctattccacaggcattcaaaattgtcgaaactgatgcttcagacataggttatggtggcatcctcaaacaaagagtccatggccaagatcatgtcattgcatatacatcaaaacattggaatcctgcacaattaaaatattcaactgttaaaaaagaagttttagcaattgttttgtgcatttccaaatttcaatcggatttattaaaccaaatatttttaatcaaggctgattgtaaatcagccgaagatattttacaaaaagatgttaaaaaacttgcctcaaaacaaatttttgcaagatggcaagcaattctaagtgtctttgattttgacatagaatacatcaagggcacctcaaattcattacctaactaccttacccgtgaattcttacagaaaagtggtaatgcctcctaaggcatcgggaatctccctacggggaggaaggagtacaggcaaaggagccagactggctcttccagagccaaccatcaagaaatcatcc

SEQ ID NO: 12740 - DNA, 1071 bp, Glycine max
  Gm_smallRNAprecursor_5573
taccttttgggcaatatgaatagaatgtgatgccattcggactgaagaatgccccttcagaatttcaaaaaattatgaatgatatttttaatccctattcaaaatttgtcattgtctacatagatgatgttttaatcttttcccaaaacattgaccaacatttcaaacatctccagaccttcatccatatcatcaaacagaatggtttggcagtctccaaatcaaaaatcaatcttttcaaaactcgaattcaattccttggtcacaatatatatcaaggtacaatcattccaatcgaaaggtcaatagagtttgctagcaaatttcccaaccaaatcttagacaaaacccagttacaaagatttctaggttgtctaaattacgtaggagaatttgtcccctatttaaacaatattgtcaagccattgcatgataggctgaagaaaaatccgcctccttggtctgacctcgatacacaaatagttaaagaaatcaaagtcaaagtccaatccataaaatgtctgtatcttcctattccacaggcattcaaaattgtcgaaactgatgcttcagacataggttatggtggcatcctcaaacaaagagtccatggccaagatcatgtcattgcatatacatcaaaacattggaatcctgcacaattaaaatattcaactgttaaaaaagaagttttagcaattgttttgtgcatttccaaatttcaatcggatttattaaaccaaatatttttaatcaaggctgattgtaaatcagccgaagatattttacaaaaagatgttaaaaaacttgcctcaaaacaaatttttgcaagatggcaagcaattctaagtgtctttgattttgacatagaatacatcaagggcacctcaaattcattacctaactaccttacccgtgaattcttacagaaaagtggtaatgcctcctaaggcatcgggaatctccctacggggaggaaggagtacaggcaaaggagccagactggctcttccagagccaaccatcaagaaatcatccacctcttctgggtcaccaacccaggctgggtca

SEQ ID NO: 12741 - DNA, 1121 bp, Glycine max
  Gm_smallRNAprecursor_5574
gtgatgccattcggactgaagaatgccccttcagaatttcaaaaaattatgaatgatatttttaatccctattcaaaatttgtcattgtctacatagatgatgttttaatcttttcccaaaacattgaccaacatttcaaacatctccagaccttcatccatatcatcaaacagaatggtttggcagtctccaaatcaaaaatcaatcttttcaaaactcgaattcaattccttggtcacaatatatatcaaggtacaatcattccaatcgaaaggtcaatagagtttgctagcaaatttcccaaccaaatcttagacaaaacccagttacaaagatttctaggttgtctaaattacgtaggagaatttgtcccctatttaaacaatattgtcaagccattgcatgataggctgaagaaaaatccgcctccttggtctgacctcgatacacaaatagttaaagaaatcaaagtcaaagtccaatccataaaatgtctgtatcttcctattccacaggcattcaaaattgtcgaaactgatgcttcagacataggttatggtggcatcctcaaacaaagagtccatggccaagatcatgtcattgcatatacatcaaaacattggaatcctgcacaattaaaatattcaactgttaaaaaagaagttttagcaattgttttgtgcatttccaaatttcaatcggatttattaaaccaaatatttttaatcaaggctgattgtaaatcagccgaagatattttacaaaaagatgttaaaaaacttgcctcaaaacaaatttttgcaagatggcaagcaattctaagtgtctttgattttgacatagaatacatcaagggcacctcaaattcattacctaactaccttacccgtgaattcttacagaaaagtggtaatgcctcctaaggcatcgggaatctccctacggggaggaaggagtacaggcaaaggagccagactggctcttccagagccaaccatcaagaaatcatccacctcttctgggtcaccaacccaggctgggtcatctacccagaaaaccaatttagaagggtcattaacccagattgcctcaatcaaacctgagccatccactcaggaat

SEQ ID NO: 12742 - DNA, 1122 bp, Glycine max
  Gm_smallRNAprecursor_5575
gtgatgccattcggactgaagaatgccccttcagaatttcaaaaaattatgaatgatatttttaatccctattcaaaatttgtcattgtctacatagatgatgttttaatcttttcccaaaacattgaccaacatttcaaacatctccagaccttcatccatatcatcaaacagaatggtttggcagtctccaaatcaaaaatcaatcttttcaaaactcgaattcaattccttggtcacaatatatatcaaggtacaatcattccaatcgaaaggtcaatagagtttgctagcaaatttcccaaccaaatcttagacaaaacccagttacaaagatttctaggttgtctaaattacgtaggagaatttgtcccctatttaaacaatattgtcaagccattgcatgataggctgaagaaaaatccgcctccttggtctgacctcgatacacaaatagttaaagaaatcaaagtcaaagtccaatccataaaatgtctgtatcttcctattccacaggcattcaaaattgtcgaaactgatgcttcagacataggttatggtggcatcctcaaacaaagagtccatggccaagatcatgtcattgcatatacatcaaaacattggaatcctgcacaattaaaatattcaactgttaaaaaagaagttttagcaattgttttgtgcatttccaaatttcaatcggatttattaaaccaaatatttttaatcaaggctgattgtaaatcagccgaagatattttacaaaaagatgttaaaaaacttgcctcaaaacaaatttttgcaagatggcaagcaattctaagtgtctttgattttgacatagaatacatcaagggcacctcaaattcattacctaactaccttacccgtgaattcttacagaaaagtggtaatgcctcctaaggcatcgggaatctccctacggggaggaaggagtacaggcaaaggagccagactggctcttccagagccaaccatcaagaaatcatccacctcttctgggtcaccaacccaggctgggtcatctacccagaaaaccaatttagaagggtcattaacccagattgcctcaatcaaacctgagccatccactcaggaatc

SEQ ID NO: 12743 - DNA, 1247 bp, Glycine max
  Gm_smallRNAprecursor_5576
cccttcaagacatgggtctaaccaaatttccaaaaataatcaaaaaatcttgggcagacattgcctcagaatctaatgattaatctgaatcaaatctacaaaaaatgatctaaaatgcgtcaatgaccaaaacaaccaccaatactaaaggaaaactacctttagccaaagctcaaaccccacccaccaaaaaaactaacaattatatttataaaaataaattgttaaatgttttgcagatggaacctgaattttgggacaaatatcccttcaaggcaacggccaaggctttcccaccaggatttcactacaaaccaaccaccatcctgaagacaagaactttttacgaattgattttggtagattcaaactcagtatctatcaaacatttcaaagatccaaaagaccaaacattaaacacccactcgacaatccagatactaaaagttcttcaaccaagacactttggttcggacttgaacaaaggaaagagattttcagttccatttgatccggtaggttatacctattgggattacgttgattcttggactaaggtgttttggcaccaaaatacccgcttcaagcattcatggctgatatatttcaagaccaatacaatttacaattttcccaattggtttttgcaatggtgggacttctttggaccaatcctagagatattccctgaaacagtccaacaaggatttgctcaatttaagaaacaatacaattcgcaggaatcacgaattccagcagatcttaaatacttttcaagctttgcactatcatggatattttcatggcaatatcgttacagcaagactgaaaagacaaaccaatatccatcactacaaagacacgcatttgtaaaatggtggacacaatttgactcatccaaagcggatccagaacaagtaaaactctggttccaatcccatccagaattcctcaaagcagctgatccagaaacttctgtgtttttgaaccaaaagtctcatctggcagcatttttagcaggatcgacatcaaaggaagtcttagctaaaaatctgaaggaagttctacaaatgttacagcaagaagaaaaagcttcatcctcaaagaaggaagaaacaagttctgctgaagaagaagaagaagatccctttttaccaaaacgaagatgattgttttggtatctgtttagattaaatttaatttcggtcacaaaaccgtatatttgtaattaatgtgtaattaatgca

SEQ ID NO: 12744 - DNA, 1248 bp, Glycine max
  Gm_smallRNAprecursor_5577
cccttcaagacatgggtctaaccaaatttccaaaaataatcaaaaaatcttgggcagacattgcctcagaatctaatgattaatctgaatcaaatctacaaaaaatgatctaaaatgcgtcaatgaccaaaacaaccaccaatactaaaggaaaactacctttagccaaagctcaaaccccacccaccaaaaaaactaacaattatatttataaaaataaattgttaaatgttttgcagatggaacctgaattttgggacaaatatcccttcaaggcaacggccaaggctttcccaccaggatttcactacaaaccaaccaccatcctgaagacaagaactttttacgaattgattttggtagattcaaactcagtatctatcaaacatttcaaagatccaaaagaccaaacattaaacacccactcgacaatccagatactaaaagttcttcaaccaagacactttggttcggacttgaacaaaggaaagagattttcagttccatttgatccggtaggttatacctattgggattacgttgattcttggactaaggtgttttggcaccaaaatacccgcttcaagcattcatggctgatatatttcaagaccaatacaatttacaattttcccaattggtttttgcaatggtgggacttctttggaccaatcctagagatattccctgaaacagtccaacaaggatttgctcaatttaagaaacaatacaattcgcaggaatcacgaattccagcagatcttaaatacttttcaagctttgcactatcatggatattttcatggcaatatcgttacagcaagactgaaaagacaaaccaatatccatcactacaaagacacgcatttgtaaaatggtggacacaatttgactcatccaaagcggatccagaacaagtaaaactctggttccaatcccatccagaattcctcaaagcagctgatccagaaacttctgtgtttttgaaccaaaagtctcatctggcagcatttttagcaggatcgacatcaaaggaagtcttagctaaaaatctgaaggaagttctacaaatgttacagcaagaagaaaaagcttcatcctcaaagaaggaagaaacaagttctgctgaagaagaagaagaagatccctttttaccaaaacgaagatgattgttttggtatctgtttagattaaatttaatttcggtcacaaaaccgtatatttgtaattaatgtgtaattaatgcag

SEQ ID NO: 12745 - DNA, 1189 bp, Glycine max
  Gm_smallRNAprecursor_5578
gacaatccagatactaaaagttcttcaaccaagacactttggttcggacttgaacaaaggaaagagattttcagttccatttgatccggtaggttatacctattgggattacgttgattcttggactaaggtgttttggcaccaaaatacccgcttcaagcattcatggctgatatatttcaagaccaatacaatttacaattttcccaattggtttttgcaatggtgggacttctttggaccaatcctagagatattccctgaaacagtccaacaaggatttgctcaatttaagaaacaatacaattcgcaggaatcacgaattccagcagatcttaaatacttttcaagctttgcactatcatggatattttcatggcaatatcgttacagcaagactgaaaagacaaaccaatatccatcactacaaagacacgcatttgtaaaatggtggacacaatttgactcatccaaagcggatccagaacaagtaaaactctggttccaatcccatccagaattcctcaaagcagctgatccagaaacttctgtgtttttgaaccaaaagtctcatctggcagcatttttagcaggatcgacatcaaaggaagtcttagctaaaaatctgaaggaagttctacaaatgttacagcaagaagaaaaagcttcatcctcaaagaaggaagaaacaagttctgctgaagaagaagaagaagatccctttttaccaaaacgaagatgattgttttggtatctgtttagattaaatttaatttcggtcacaaaaccgtatatttgtaattaatgtgtaattaatgcaggacaatactacctgtcctgtagccattaaagtcccggtcaaaactacttgtcttgtaacaaacggtcaaatagtcccagtcaaaactaccggcaactaccggtcttagatttttggctatataaggagtcctcaagtatgttgtgaggcaccctttcatttagccatttttcaagtttctgaagagaggtgctctgaaacaagatttttgtatgcgcttcattctagattcaataaatttatatttttcatctttctctcttctcccttcaccgatcctgtgcggctcttccgccgcttcggtttctttgtttatgaaaaactggggtttgtaagccggtctctggtgtgcccttgatatctattttc

SEQ ID NO: 12746 - DNA, 1047 bp, Glycine max
  Gm_smallRNAprecursor_5579
tcaagaccaatacaatttacaattttcccaattggtttttgcaatggtgggacttctttggaccaatcctagagatattccctgaaacagtccaacaaggatttgctcaatttaagaaacaatacaattcgcaggaatcacgaattccagcagatcttaaatacttttcaagctttgcactatcatggatattttcatggcaatatcgttacagcaagactgaaaagacaaaccaatatccatcactacaaagacacgcatttgtaaaatggtggacacaatttgactcatccaaagcggatccagaacaagtaaaactctggttccaatcccatccagaattcctcaaagcagctgatccagaaacttctgtgtttttgaaccaaaagtctcatctggcagcatttttagcaggatcgacatcaaaggaagtcttagctaaaaatctgaaggaagttctacaaatgttacagcaagaagaaaaagcttcatcctcaaagaaggaagaaacaagttctgctgaagaagaagaagaagatccctttttaccaaaacgaagatgattgttttggtatctgtttagattaaatttaatttcggtcacaaaaccgtatatttgtaattaatgtgtaattaatgcaggacaatactacctgtcctgtagccattaaagtcccggtcaaaactacttgtcttgtaacaaacggtcaaatagtcccagtcaaaactaccggcaactaccggtcttagatttttggctatataaggagtcctcaagtatgttgtgaggcaccctttcatttagccatttttcaagtttctgaagagaggtgctctgaaacaagatttttgtatgcgcttcattctagattcaataaatttatatttttcatctttctctcttctcccttcaccgatcctgtgcggctcttccgccgcttcggtttctttgtttatgaaaaactggggtttgtaagccggtctctggtgtgcccttgatatctattttcaagtttatatttttctttcatttatcatactgcattc

SEQ ID NO: 12747 - DNA, 1214 bp, Glycine max
  Gm_smallRNAprecursor_5580
caatacaatttacaattttcccaattggtttttgcaatggtgggacttctttggaccaatcctagagatattccctgaaacagtccaacaaggatttgctcaatttaagaaacaatacaattcgcaggaatcacgaattccagcagatcttaaatacttttcaagctttgcactatcatggatattttcatggcaatatcgttacagcaagactgaaaagacaaaccaatatccatcactacaaagacacgcatttgtaaaatggtggacacaatttgactcatccaaagcggatccagaacaagtaaaactctggttccaatcccatccagaattcctcaaagcagctgatccagaaacttctgtgtttttgaaccaaaagtctcatctggcagcatttttagcaggatcgacatcaaaggaagtcttagctaaaaatctgaaggaagttctacaaatgttacagcaagaagaaaaagcttcatcctcaaagaaggaagaaacaagttctgctgaagaagaagaagaagatccctttttaccaaaacgaagatgattgttttggtatctgtttagattaaatttaatttcggtcacaaaaccgtatatttgtaattaatgtgtaattaatgcaggacaatactacctgtcctgtagccattaaagtcccggtcaaaactacttgtcttgtaacaaacggtcaaatagtcccagtcaaaactaccggcaactaccggtcttagatttttggctatataaggagtcctcaagtatgttgtgaggcaccctttcatttagccatttttcaagtttctgaagagaggtgctctgaaacaagatttttgtatgcgcttcattctagattcaataaatttatatttttcatctttctctcttctcccttcaccgatcctgtgcggctcttccgccgcttcggtttctttgtttatgaaaaactggggtttgtaagccggtctctggtgtgcccttgatatctattttcaagtttatatttttctttcatttatcatactgcattcttacttcctatctgtccgtttgatcttattccgctgacctatatatatataggtatctgactgtgtgtctgtgtcaagctggtagtggtagatagctagggtgcagttcatggattctttgtaattctccattttgagtttcaacaataatatctctttttgagcctggatgaa

SEQ ID NO: 12748 - DNA, 1155 bp, Glycine max
  Gm_smallRNAprecursor_5581
tcagagtttagatgcgtcaacgaaattttgtttttggtgaaaatgcgatgtacaaatcccattatctgtaatggaattgtggttcatttggttaatcatattgtggatgtagtgacgctatgattaaacctacttccctaaaagcacctcttgggagggcaaaaaggcaatgtaagtagtggggtgggatttaaaacccagtgaaagtatcttgtgattaggattaagttgatatttgggaagaaattagtttcacactaaaaggtataggatgttttgttttaaaaaaaaacaacaatcagtgaataatactttcttttataagtttgggcccccatgtgtttccgaacacaagagtttggtgtagcccaaatcgaaacgacagtacttggtctctgctttactttagggtgttgctaggtgcacccagcattattgctggtgcacccagcacttaagatgaaatgacgaaaatatccttgatccgtaaaccatttaagttgatccgtaaaagtcttacggatcaacttgatccgtaaactttttacggattaatttgatccgtagaagccttatggatcaagttgatccgtaagctttttacagatcaacttgatccgtattgttctgtaaaaggcttacggatcaagttgatccgtatcaaccttacggatcaacttgatccgtacgatttacggaccatcctcacacacacccatcacaaatgcgaaaaaagtatagggacagttttgatattttaataaaatgctgggtgcacctagcaacaccctttactttaaagcctcttgaattgtaaaaggtgtgaatgttgggctttcccctagggtccaagatgagtcaatttactggttaacctcctagctagggtgagtaaaatggttcctgacttattaaaaattcattgttttgaaaactagaccaaattggccggttagaccagaaaattgatgaactggttcggccattggtttatagaacctgttgaaagaaaaattggttaaaacttagtaaaaactggtcaaatatcgattcacgatgaattaataaaaaatacaatatcattttgattttcattgttcaatcaaaaatgccattttcttttttatcaatctaaaatgccatattcttttttac

SEQ ID NO: 12749 - DNA, 1200 bp, Glycine max
  Gm_smallRNAprecursor_5582
ttgttcatcagcaacacaatgtacaaccaccagtcggtatactcgaggttggcatgaccttcaatgacaaagcacaatgtattcgagcaatcaaagaatacaacatcagaaatcattttgattgcagaacaatttactctgactagagaaggctaaacttcgtctgcaagttacatgaaaatggttgtacatggagcttgggcgcatgcaattcaaagaggcataacaaatggattatcaagagtatcagaggtcattacacttgtctcgtgccaatgctcagacaagatcatcgccaactcgacaaacacgtcatagcacagatcatccaaccaattgtcaaaacaaacccaatcgtctccatcaagacgttgattgtagagatcaaaacgttcatgaattataccatatcctacaagaagacatagttagcaaagcaaagagcgttggagatgattcatggaaactgggaagaatcatatgccaaactgccaaaacttttcggagctttgcaatcttgtgttcccgggactatggtcgctgctcaaacagaatccttgtatgaggggggagaaatagtatcgggtaaaagattctttaaacgtgtcttttggtcatttgcttcgtgcattaatggttttgcatattgcaaacccatagtacaagtagatggtacatggctttacgggaagtatactggcacactgttgatagctaccgcacaacatggagctaaccatatcttcccgattgcctatcccattgtagaaggggagacaacttcagcttggggtttttttttaaagaatttgagaagacatgttactccataaattaacatttctctcattttagactgacacacccctcaattataagtgcctacaacaacccaagtaacttatgggtccaggacacatcccacttcttttgcctgtgccacattgcacaaaactttcttcgcggtaactcaaactgcaaacatttaaagaaaccactcatgttggctggtgagaatctattttatttattcgttataattttctttcaatcaaattttataacataatacattgattgaatatttacaggttacgcatacacggagaagatgcactggcgacatcttggggatattcgtgcgaataagccaagtgcaactgaatggcttgatcaattacgcaaacaaaaatgggtaca

SEQ ID NO: 12750 - DNA, 1083 bp, Glycine max
  Gm_smallRNAprecursor_5583
aaattaattaagagaaaattaaataggggtataaaatttaaggcaaacacatataacggttttcgaacaaattaattattataattataagatctgaaaataaagtttgcatagtaattccgcatctaccaaaatcgtgagcccaaattcccttgattttgcatagatcaaatcaatacctgatcggtttaattccagaaagaagccaaattgttggggaatcatcatatcctcttcctcatcatcgtcacaaatctacccaattggtacaagtttattctctcataatactgcatctgagaattctgatcacatatagagatatatctgaaaagtcgatggtttaaatctgaaaatgatttaaattaagtcaaatcacaaaagaaaaaggaaaaaaaatactttgcaataattttatccctatatataattggataggaagatttagagaagaatctggagtttgagataagctagtccgttgttgaccctatctgtatcttcccacagctttattgaaccgcaaaacaagatttgggagtaagagtgccatggcatgcatgcaaaggaactctttggatgcagttcaagaaagctgtggaagaatacaaagagagccatgatattgaagactgaatataccccacaaacccatatgtagggttttctttattctttttttaaaagaaaaataaaagcatggaaggttcataacataattagaaccctaatcaagaggaagggacagaggtccagaataggagaaggctaagctaagagagagaaaaggtgtaggtgtaggggaggagatggtatggtatttataggagaatttaggcgtttttataaacttttttattttaatttaattttctttttccatcaatccctagaagaatatctggccgaagagactacatattactgaacccacctttctcgaaccctaattaaaaagctgactagcttgatcccattagagattagattagacccctaaaatataataattataatcaacaaacctatgtaaagttttcttttcattggtgcaaaatgtcgtttaatatttgtgcggctacg

SEQ ID NO: 12751 - DNA, 1083 bp, Glycine max; identical to SEQ ID NO: 12750
  Gm_smallRNAprecursor_5584

SEQ ID NO: 12752 - DNA, 1084 bp, Glycine max
  Gm_smallRNAprecursor_5585
aaattaattaagagaaaattaaataggggtataaaatttaaggcaaacacatataacggttttcgaacaaattaattattataattataagatctgaaaataaagtttgcatagtaattccgcatctaccaaaatcgtgagcccaaattcccttgattttgcatagatcaaatcaatacctgatcggtttaattccagaaagaagccaaattgttggggaatcatcatatcctcttcctcatcatcgtcacaaatctacccaattggtacaagtttattctctcataatactgcatctgagaattctgatcacatatagagatatatctgaaaagtcgatggtttaaatctgaaaatgatttaaattaagtcaaatcacaaaagaaaaaggaaaaaaaatactttgcaataattttatccctatatataattggataggaagatttagagaagaatctggagtttgagataagctagtccgttgttgaccctatctgtatcttcccacagctttattgaaccgcaaaacaagatttgggagtaagagtgccatggcatgcatgcaaaggaactctttggatgcagttcaagaaagctgtggaagaatacaaagagagccatgatattgaagactgaatataccccacaaacccatatgtagggttttctttattctttttttaaaagaaaaataaaagcatggaaggttcataacataattagaaccctaatcaagaggaagggacagaggtccagaataggagaaggctaagctaagagagagaaaaggtgtaggtgtaggggaggagatggtatggtatttataggagaatttaggcgtttttataaacttttttattttaatttaattttctttttccatcaatccctagaagaatatctggccgaagagactacatattactgaacccacctttctcgaaccctaattaaaaagctgactagcttgatcccattagagattagattagacccctaaaatataataattataatcaacaaacctatgtaaagttttcttttcattggtgcaaaatgtcgtttaatatttgtgcggctacga

SEQ ID NO: 12753 - DNA, 1079 bp, Glycine max
  Gm_smallRNAprecursor_5586
attaattaagagaaaattaaataggggtataaaatttaaggcaaacacatataacggttttcgaacaaattaattattataattataagatctgaaaataaagtttgcatagtaattccgcatctaccaaaatcgtgagcccaaattcccttgattttgcatagatcaaatcaatacctgatcggtttaattccagaaagaagccaaattgttggggaatcatcatatcctcttcctcatcatcgtcacaaatctacccaattggtacaagtttattctctcataatactgcatctgagaattctgatcacatatagagatatatctgaaaagtcgatggtttaaatctgaaaatgatttaaattaagtcaaatcacaaaagaaaaaggaaaaaaaatactttgcaataattttatccctatatataattggataggaagatttagagaagaatctggagtttgagataagctagtccgttgttgaccctatctgtatcttcccacagctttattgaaccgcaaaacaagatttgggagtaagagtgccatggcatgcatgcaaaggaactctttggatgcagttcaagaaagctgtggaagaatacaaagagagccatgatattgaagactgaatataccccacaaacccatatgtagggttttctttattctttttttaaaagaaaaataaaagcatggaaggttcataacataattagaaccctaatcaagaggaagggacagaggtccagaataggagaaggctaagctaagagagagaaaaggtgtaggtgtaggggaggagatggtatggtatttataggagaatttaggcgtttttataaacttttttattttaatttaattttctttttccatcaatccctagaagaatatctggccgaagagactacatattactgaacccacctttctcgaaccctaattaaaaagctgactagcttgatcccattagagattagattagacccctaaaatataataattataatcaacaaacctatgtaaagttttcttttcattggtgcaaaatgtcgtttaatatttgtgcggcta

SEQ ID NO: 12754 - DNA, 1094 bp, Glycine max
  Gm_smallRNAprecursor_5587
gatgatcaaagttctgaaagtgcgccagagttttgtattgatgcaggatctactggaaatgttgctaggtttataaaccattgttgtgagcccaatctgtttgttcaatgtgttttgagcacacaccatgatttgagattggctcgtgtaatgctgtttgctgcggacaacataccccctttgcaggtaactcattttctatattttacccaccaatttatctgtggtatttttagcaatatcttgattaatctctttgattgcttgcaggaattaacgtatgactatggttatgagcttgatagcgtcttggattctgatgggaagatcaagcaaatgccatgctattgtggagcctcatactgcaggaagcgattattctaaatgttacaggaaaagttgtatgtggtcttttttgcaaaactatcgcggtttcgagtatttgttatttaacttgagctgcaagctatgaagcacggacactccagtctgttgtcgtgtccggtgtccgacacgcgtccgtgtcagtgtctgacaccgacacgacacccgtattacgttctatattttggatattacaggtgtccacatgtccgtatccgtgtcgtgtccgatgtccatgtcggtgttggtgcttcataggctgcaagtgctctctagtcatgtgtggttgatgtgcgcagtatatatgttttgtgctgcaatggcagcaaaggaacattggaattttttgtgcaaattcaaggaaatatatagattcattttttgctaaaaaaaaaatcaaatattcgctcttgacttaatctatctataatatctttacatataggttctacaaagggagagaataatacatgctatttgtttttgtggtttatacttttcatacaatgctttctacaaaatacaaatatatatttgtttcactttttttttttgtttgatacaagttctaatacatgttttttcggtgcaaaatgtatttcagttctaattaatacttgtttcactctttgagttacatttttttttattcgttgaccttttctttgaagtgcacttgggttttgtttgctagttgcatgtattgtaat

SEQ ID NO: 12755 - DNA, 1094 bp, Glycine max; identical to SEQ ID NO: 12754
  Gm_smallRNAprecursor_5588

SEQ ID NO: 12756 - DNA, 1033 bp, Glycine max
  Gm_smallRNAprecursor_5589
tctaggtagatacccttagagagaatatctttaattaatggctcagcttccctcatgcttccaaatcttttcaagttgttcaataagatatcaaatatgatattgttttcctccaatccccacgatttcatttccttatagaaaccagcagcagcctcatgttgacctgccctataatagccgtcaagtaaaatagcaaaaacaaaagcatttggcataatattcatttggaccattgtccttaacacatcaactgctttgttgagcattccttttttggcatatccatttataatagaagaaaaggcaataacatttggaagaacatgttccttctccattttttgcaacgctgactctgcaaattccacgtctccgaacttacaatgaccatcaagcaatgccgtataagtgacacagtttgggacaagattgagctttaaaatactttggaacattgcctcagcctataaagcacggacaccccaatcccttgccgtgtccggtgtccgacacgcgtccgtgtcagcgtccgacaccgacacgacacccgtactacgttctatattttggacattataggtgtccacgtgtccgtgtcgatgcttcataggcctcaacctctttatatttcccaactttgaaaagtccatccatcatagttgtacacaaaactagatcaaaagaaatgccccgaacagccatttggctttgatgattaaaagcttccattaccctccctgattttaataatgcactaattgttgggaaaactcggactttcctgcttcgtgaagtttaagataggcacttagtaattaaagatagtaatgggagcacacaattataattctccaatatggagattattccactatacaaaatgatagtagggttacaaggacgtgcttacaaaattgactcactttatggaggctcacactcaagcttgagaatagagactttccaagctatttatcttctctctcaaagaggttctctaactttctagctttctcactctaagaagtgg

SEQ ID NO: 12757 - DNA, 1032 bp, Glycine max
  Gm_smallRNAprecursor_5590
ctaggtagatacccttagagagaatatctttaattaatggctcagcttccctcatgcttccaaatcttttcaagttgttcaataagatatcaaatatgatattgttttcctccaatccccacgatttcatttccttatagaaaccagcagcagcctcatgttgacctgccctataatagccgtcaagtaaaatagcaaaaacaaaagcatttggcataatattcatttggaccattgtccttaacacatcaactgctttgttgagcattccttttttggcatatccatttataatagaagaaaaggcaataacatttggaagaacatgttccttctccattttttgcaacgctgactctgcaaattccacgtctccgaacttacaatgaccatcaagcaatgccgtataagtgacacagtttgggacaagattgagctttaaaatactttggaacattgcctcagcctataaagcacggacaccccaatcccttgccgtgtccggtgtccgacacgcgtccgtgtcagcgtccgacaccgacacgacacccgtactacgttctatattttggacattataggtgtccacgtgtccgtgtcgatgcttcataggcctcaacctctttatatttcccaactttgaaaagtccatccatcatagttgtacacaaaactagatcaaaagaaatgccccgaacagccatttggctttgatgattaaaagcttccattaccctccctgattttaataatgcactaattgttgggaaaactcggactttcctgcttcgtgaagtttaagataggcacttagtaattaaagatagtaatgggagcacacaattataattctccaatatggagattattccactatacaaaatgatagtagggttacaaggacgtgcttacaaaattgactcactttatggaggctcacactcaagcttgagaatagagactttccaagctatttatcttctctctcaaagaggttctctaactttctagctttctcactctaagaagtgg

SEQ ID NO: 12758 - DNA, 1037 bp, Glycine max
  Gm_smallRNAprecursor_5591
ggtagatacccttagagagaatatctttaattaatggctcagcttccctcatgcttccaaatcttttcaagttgttcaataagatatcaaatatgatattgttttcctccaatccccacgatttcatttccttatagaaaccagcagcagcctcatgttgacctgccctataatagccgtcaagtaaaatagcaaaaacaaaagcatttggcataatattcatttggaccattgtccttaacacatcaactgctttgttgagcattccttttttggcatatccatttataatagaagaaaaggcaataacatttggaagaacatgttccttctccattttttgcaacgctgactctgcaaattccacgtctccgaacttacaatgaccatcaagcaatgccgtataagtgacacagtttgggacaagattgagctttaaaatactttggaacattgcctcagcctataaagcacggacaccccaatcccttgccgtgtccggtgtccgacacgcgtccgtgtcagcgtccgacaccgacacgacacccgtactacgttctatattttggacattataggtgtccacgtgtccgtgtcgatgcttcataggcctcaacctctttatatttcccaactttgaaaagtccatccatcatagttgtacacaaaactagatcaaaagaaatgccccgaacagccatttggctttgatgattaaaagcttccattaccctccctgattttaataatgcactaattgttgggaaaactcggactttcctgcttcgtgaagtttaagataggcacttagtaattaaagatagtaatgggagcacacaattataattctccaatatggagattattccactatacaaaatgatagtagggttacaaggacgtgcttacaaaattgactcactttatggaggctcacactcaagcttgagaatagagactttccaagctatttatcttctctctcaaagaggttctctaactttctagctttctcactctaagaagtggattcactc

SEQ ID NO: 12759 - DNA, 1142 bp, Glycine max
  Gm_smallRNAprecursor_5592
cccaaattggtagccttccatgaagattgagttcccctaactgttgaatactgcagttgtcgctgccctttccaacataaaacgaactcaacacctgaagattctttagttttccaatatgcattggcatctttctcactttagtgtacataaattcaagacagcgcaaattggtgagtttatgcaaatttgagggtagctcctccaaaaggtagcaatgattcagcttcaagacttgcaagttacagagaaaacacgttgaatcaggtagtttttttatgccagtatcggaaaggtctaacgaacgaagatgcttaagattgcctacagagtcaggcatctcttgaaggtcacaaaaagacaaagataggatgcgtaagaacttaaacttggagaacaacttatctactagtttcctaccaccccaacgacgcatatgttgtcctggaaatgtgggcataaatgtccgtagccttttagcatgatataaactctcgtacccatccaaatattgatcgtattgagatacaaatgaaaaatgacggacttttgatatactttttggtttatcaacttctaacctgaaacagatgtccccacaaacatattttgccaaatcattgagaaggtcatgcatgacaaaatacttttctctacttgatcgttgaaagaaggaccttgataatagatcattgaagtattgttcaccaatttcttcttgaggattactctgttgagagcactgtacaaaattttgagtcacccagaactgaattaagctctccttgtgaaacttgtgatctttggggaataaggcacactgtgcgaaacatctcttgagatgagaaggaagatggtaatagctcaacaataaagcagggatgattttactgtcttctatcggtaactcccatagcttgcttttcagtacacgttcccattgtgaaaaagatggctttttgtgtaaaagacatccaactgtttctaaggctagaggcaacccatggcacttctcaactatctttatcccaatatccttcagctcagcattcaactcaggataatcatcttggaatgcatgctgagagaaaacttgccagctgtgatcttctcgtaattgctttagtccacgtacttcgttt

SEQ ID NO: 12760 - DNA, 1039 bp, Glycine max
  Gm_smallRNAprecursor_5593
ttgaaggtcacaaaaagacaaagataggatgcgtaagaacttaaacttggagaacaacttatctactagtttcctaccaccccaacgacgcatatgttgtcctggaaatgtgggcataaatgtccgtagccttttagcatgatataaactctcgtacccatccaaatattgatcgtattgagatacaaatgaaaaatgacggacttttgatatactttttggtttatcaacttctaacctgaaacagatgtccccacaaacatattttgccaaatcattgagaaggtcatgcatgacaaaatacttttctctacttgatcgttgaaagaaggaccttgataatagatcattgaagtattgttcaccaatttcttcttgaggattactctgttgagagcactgtacaaaattttgagtcacccagaactgaattaagctctccttgtgaaacttgtgatctttggggaataaggcacactgtgcgaaacatctcttgagatgagaaggaagatggtaatagctcaacaataaagcagggatgattttactgtcttctatcggtaactcccatagcttgcttttcagtacacgttcccattgtgaaaaagatggctttttgtgtaaaagacatccaactgtttctaaggctagaggcaacccatggcacttctcaactatctttatcccaatatccttcagctcagcattcaactcaggataatcatcttggaatgcatgctgagagaaaacttgccagctgtgatcttctcgtaattgctttagtccacgtacttcgtttgaatgcatgattgaagcaaccttgttactgcgagtcgtgacaagaattttacttcccttagccccatatttaagaggagtttgtaaagccttccattgatctcgatgttcgttccaaacatcatccagaacgagaagatattttttccccgacaacttttctttcaatcttccatgaaccatttctaggtcgtctccactgtcatcttttgagttagtgattttgttaagaatgtttttg

SEQ ID NO: 12761 - DNA, 1055 bp, Glycine max
  Gm_smallRNAprecursor_5594
gaaggaccttgataatagatcattgaagtattgttcaccaatttcttcttgaggattactctgttgagagcactgtacaaaattttgagtcacccagaactgaattaagctctccttgtgaaacttgtgatctttggggaataaggcacactgtgcgaaacatctcttgagatgagaaggaagatggtaatagctcaacaataaagcagggatgattttactgtcttctatcggtaactcccatagcttgcttttcagtacacgttcccattgtgaaaaagatggctttttgtgtaaaagacatccaactgtttctaaggctagaggcaacccatggcacttctcaactatctttatcccaatatccttcagctcagcattcaactcaggataatcatcttggaatgcatgctgagagaaaacttgccagctgtgatcttctcgtaattgctttagtccacgtacttcgtttgaatgcatgattgaagcaaccttgttactgcgagtcgtgacaagaattttacttcccttagccccatatttaagaggagtttgtaaagccttccattgatctcgatgttcgttccaaacatcatccagaacgagaagatattttttccccgacaacttttctttcaatcttccatgaaccatttctaggtcgtctccactgtcatcttttgagttagtgattttgttaagaatgtttttggttaccatcaaaacatcaaaatcatccgacacacagacccagactttgatgtcaaatttagcctccactatccttgggttgttatacacatgttgggcaagcgtggtcttacccatcccacccatccccacaatcgaaagtattgatagctcgttatgattgtcagtgtcagaagtcagccaattaaggatcgtagctttgtcatcatctctgccataaataacactttcaaccaccaaagatgtggatgacaatttctgtgacactttactacccgatcctgatccaaccccaacaccactaacattattcaaacctagatcatccttttggtctaaaagag

SEQ ID NO: 12762 - DNA, 1127 bp, Glycine max
  Gm_smallRNAprecursor_5595
ccaaggatgtaaatgaacaagagctactcccgtaaaaatcagcattaatactcacaatcccatcaaaccctccaattgaaagctccttcagaaatggaaagagtctaaggggaggcaaacgttggcaagatcgacagttctccaaggttaaggacaccacattcaataatgaattgttgaataaccaccttggaaattgtttacccccatagttcctgatcttcaacttctccaagtgtttggaaggctgtagattctcgattacaatttcatctctttttttcattgaatcattggggttccagtctgaatcccattctaactctagctcgacaaggtgtgttttattttttaaatccactgccaatgcatctgagggattctcaacattctgcaggttctcaattgatagacttccatgaagattgagttctcctagctgctggatactgaactccctacttttgccaacattaaacgaactcattaatacttgaagatactccagttttcccaaatgtgctggtacctttctcactccagtatacattaattcaaggcgatgcaaatcagtgagtttatgcaaatttgagggcagctccttcaaatgttcacaaccatttagcttcagtatttgcaagttgtagagtgaacatattgattcaggtagtttttctattccagtattggataagtctaaggaacggagatatttgagattacccacagagtcaggcacctctcttaggtcatgacaaacagacagagataagacacgtaagtaattaaacttggagaacaattcatgtattgacatctcgcaatcccaatatttgtcacttgttggcatataagtacgtaacttttttgtgtcacatagagttccaaacccatcaaaacatttaacgtcaattaaaaaatgacgggttgcttttggtgtaccttttgtttgattcccatccaatctgaaacaaatgtccccacaaataaatcttgccaaatcgttgagaaggtcatgcatgacaaaatctgttctctctgtgttgcttgattgttgaaagaagcaccttgataatagatcattgaagtattgttcaccaacttcttctggactcttaccctgttga

SEQ ID NO: 12763 - DNA, 1113 bp, Glycine max
  Gm_smallRNAprecursor_5596
attaatacttgaagatactccagttttcccaaatgtgctggtacctttctcactccagtatacattaattcaaggcgatgcaaatcagtgagtttatgcaaatttgagggcagctccttcaaatgttcacaaccatttagcttcagtatttgcaagttgtagagtgaacatattgattcaggtagtttttctattccagtattggataagtctaaggaacggagatatttgagattacccacagagtcaggcacctctcttaggtcatgacaaacagacagagataagacacgtaagtaattaaacttggagaacaattcatgtattgacatctcgcaatcccaatatttgtcacttgttggcatataagtacgtaacttttttgtgtcacatagagttccaaacccatcaaaacatttaacgtcaattaaaaaatgacgggttgcttttggtgtaccttttgtttgattcccatccaatctgaaacaaatgtccccacaaataaatcttgccaaatcgttgagaaggtcatgcatgacaaaatctgttctctctgtgttgcttgattgttgaaagaagcaccttgataatagatcattgaagtattgttcaccaacttcttctggactcttaccctgttgagaacattgtagaaatttttcagccatccacaattgtattaagcactccttatcaaactcataatctttggggaataaggcacaataagcaaaacatctcttgagatgagaaggaagatggtgatagcttagtgctaaagcaggtacaatatcactacgctctattgaaaattcccatatctcgctctgcaatatgcttttccattccgtaacagatgacttgttgtgtaatagacttcccattgttttcaaggccagaggaagtcctttacatttttcaactatcttcataccaatctccttgcaatctggatttggttgaatattatcatcttggaatgcatgtttagcaaacaacttccagcaatgatcttcttgtaattgctccaggaggtgttcttctgacctcatggtagaagcaacttccttactacgtgtggtggcaataattctactcccctgagccccaaaa

SEQ ID NO: 12764 - DNA, 1162 bp, Glycine max
  Gm_smallRNAprecursor_5597
tgaacatattgattcaggtagtttttctattccagtattggataagtctaaggaacggagatatttgagattacccacagagtcaggcacctctcttaggtcatgacaaacagacagagataagacacgtaagtaattaaacttggagaacaattcatgtattgacatctcgcaatcccaatatttgtcacttgttggcatataagtacgtaacttttttgtgtcacatagagttccaaacccatcaaaacatttaacgtcaattaaaaaatgacgggttgcttttggtgtaccttttgtttgattcccatccaatctgaaacaaatgtccccacaaataaatcttgccaaatcgttgagaaggtcatgcatgacaaaatctgttctctctgtgttgcttgattgttgaaagaagcaccttgataatagatcattgaagtattgttcaccaacttcttctggactcttaccctgttgagaacattgtagaaatttttcagccatccacaattgtattaagcactccttatcaaactcataatctttggggaataaggcacaataagcaaaacatctcttgagatgagaaggaagatggtgatagcttagtgctaaagcaggtacaatatcactacgctctattgaaaattcccatatctcgctctgcaatatgcttttccattccgtaacagatgacttgttgtgtaatagacttcccattgttttcaaggccagaggaagtcctttacatttttcaactatcttcataccaatctccttgcaatctggatttggttgaatattatcatcttggaatgcatgtttagcaaacaacttccagcaatgatcttcttgtaattgctccaggaggtgttcttctgacctcatggtagaagcaacttccttactacgtgtggtggcaataattctactcccctgagccccaaaaacaagatgttttagcacagcttcccatttaagtcggttttcgttccaaacgtcatccaaaacaagaagaaatctcttccccgtcaatttttctttcaatcttccgtgaaccatctctaggtctctactatcatcagtcgatttagtgatggcctcaagaattgttcttgttaccctgaaagcatcaaaatcatctgaaacacagacccaagct

SEQ ID NO: 12765 - DNA, 1053 bp, Glycine max
  Gm_smallRNAprecursor_5598
acgggttgcttttggtgtaccttttgtttgattcccatccaatctgaaacaaatgtccccacaaataaatcttgccaaatcgttgagaaggtcatgcatgacaaaatctgttctctctgtgttgcttgattgttgaaagaagcaccttgataatagatcattgaagtattgttcaccaacttcttctggactcttaccctgttgagaacattgtagaaatttttcagccatccacaattgtattaagcactccttatcaaactcataatctttggggaataaggcacaataagcaaaacatctcttgagatgagaaggaagatggtgatagcttagtgctaaagcaggtacaatatcactacgctctattgaaaattcccatatctcgctctgcaatatgcttttccattccgtaacagatgacttgttgtgtaatagacttcccattgttttcaaggccagaggaagtcctttacatttttcaactatcttcataccaatctccttgcaatctggatttggttgaatattatcatcttggaatgcatgtttagcaaacaacttccagcaatgatcttcttgtaattgctccaggaggtgttcttctgacctcatggtagaagcaacttccttactacgtgtggtggcaataattctactcccctgagccccaaaaacaagatgttttagcacagcttcccatttaagtcggttttcgttccaaacgtcatccaaaacaagaagaaatctcttccccgtcaatttttctttcaatcttccgtgaaccatctctaggtctctactatcatcagtcgatttagtgatggcctcaagaattgttcttgttaccctgaaagcatcaaaatcatctgaaacacagacccaagctttgacatcaaatctagcctcctcgatcctagggtcattgaatacaagttgagcaagtgtggtcttacccatcccacccatgcccacaatagaaagtatcgatggctggttaggattgccgttgtcagatgtcagccaatcaaaaatcatttttttgtcttcatc

SEQ ID NO: 12766 - DNA, 1108 bp, Glycine max
  Gm_smallRNAprecursor_5599
agcctcatcctccacatttttcatccaaaagactttattgcagttcaaaatgttaccatcatatattgtgttgctgaaagagcctctactacacttgactggaatttccccttttgcttcttgattttcctccattccttaagaaagggatgcatttgatctcaccggttgaacaggtcctctaacaacaactccatgatattgcttttctctattgagttcctccctttagcctttagaatctattccaaaaattgatcatttttacgatctacctccccagatttattggcgcttggcccaactttagttgagataacactaatagacagagttggaccctttataagtagaatgctgctaggtgcacccagcactaaccacgaaaagacataaataccccctacagatcaagttgatccgtaagttaatttttaagacttacggatcaacttaatccgtaagtattttacggatcaagttgatccataagttgatttttaagacttacggatcaagttgatccgtaagtcttttacggatcaagttgacctgtaagttgatttttaagacttacgaattaagttgatccataagttttttacggatcaagttgatccgtaagtcttaaaaatcaacttatggatcaacttgatccgtaagcgaagaaattaacaggggtaattttgtcattttcaaagaatgttgggtgcaccaacaataatgttgggtgcacctagcaacactcgtataagtaacaacacctcgtgtttattggaaatagtaaaaaatggctcattattggacttggtgccctcatgttgttcacgacctaaacccaatttgccctaggccttcatttctttttaacatcttgatcctccttatcctttgttaattgggttttttatccatcctcccttttgtctgctacttcaacaccaacagacaaaggctcgtgggccctctctactttttcaaatttgaaatgtctcccttatcttttccactttcactactaggtactacctcgaccctcatgctccccaaattttgcatgagatttcccaatggccaatatcggttgttttttaattacttttttgtc

SEQ ID NO: 12767 - DNA, 1080 bp, Glycine max
  Gm_smallRNAprecursor_5600
aagactttattgcagttcaaaatgttaccatcatatattgtgttgctgaaagagcctctactacacttgactggaatttccccttttgcttcttgattttcctccattccttaagaaagggatgcatttgatctcaccggttgaacaggtcctctaacaacaactccatgatattgcttttctctattgagttcctccctttagcctttagaatctattccaaaaattgatcatttttacgatctacctccccagatttattggcgcttggcccaactttagttgagataacactaatagacagagttggaccctttataagtagaatgctgctaggtgcacccagcactaaccacgaaaagacataaataccccctacagatcaagttgatccgtaagttaatttttaagacttacggatcaacttaatccgtaagtattttacggatcaagttgatccataagttgatttttaagacttacggatcaagttgatccgtaagtcttttacggatcaagttgacctgtaagttgatttttaagacttacgaattaagttgatccataagttttttacggatcaagttgatccgtaagtcttaaaaatcaacttatggatcaacttgatccgtaagcgaagaaattaacaggggtaattttgtcattttcaaagaatgttgggtgcaccaacaataatgttgggtgcacctagcaacactcgtataagtaacaacacctcgtgtttattggaaatagtaaaaaatggctcattattggacttggtgccctcatgttgttcacgacctaaacccaatttgccctaggccttcatttctttttaacatcttgatcctccttatcctttgttaattgggttttttatccatcctcccttttgtctgctacttcaacaccaacagacaaaggctcgtgggccctctctactttttcaaatttgaaatgtctcccttatcttttccactttcactactaggtactacctcgaccctcatgctccccaaattttgcatgagatttcccaatggccaatatcggttgttttttaattacttttttgtc

SEQ ID NO: 12768 - DNA, 1166 bp, Glycine max
  Gm_smallRNAprecursor_5601
gttacaattaaatttttttgtcacttttctttaattcaaattatttatattcacatttttttataaaaaaattcacaaataaaaccaattaggatgtttaaaatttaatttcatttaaaactaatattttaacttataaaattaacataataaatacatattttttataattaatattttattaagcacaatgcacaaccaaatctattttataaattatattctaatcaatattatctttttgataaaaattgtaatattatgtttcaacatataaattatattttagatttataataaaaaatatatattatgatataatattatttttaattattgataattgttttaaaaatattaaaatcttatttaaaaataaaaataaaacaatacttcatattgaatatccattaattttgtattactaacatttactttatgcaattctcatttttattatgttgactaaattactcttaataagtcttaatacttccttcctcaaatgtctcaaccttatattctcttttccttcttatatgccccatttttattatgtagactaaattactcttaataagtctaatacttcctgcctcaaatgtctcaaccttatattctcttttccttcttatatgccccatattttctctgtgtcatcccctccatatcttctcagtgcatttgaaggtggaagtataagtcatctctagaaatgatgagggtgttttgtttcatctttgcatagttttgatgagggtagattgaaaaaaacaaaaatcaaaatgttgttctggaatggatattttataatacacatgcaatttgagaatgtatttcagaagacaaagttcaaaactctattctaagatgggtattgcggaacacgtttcaggatttacaagtattttatagaatactcattccataatttccttgtacatctaaaatgtgttcatgaatacctattccaaaagataacaaatcaaaattattgtatttcaaaatggatatttcaaaacacattttgggatttagaagtctattataaaataatcattttgtaatatatttgtaaatctgaaatgtgttatgaaatacatattctaaaagccaaaaaatcaaaagttctaattacagaataacaattgcataacatatttctg

SEQ ID NO: 12769 - DNA, 1070 bp, Glycine max
  Gm_smallRNAprecursor_5602
tttaaaatttaatttcatttaaaactaatattttaacttataaaattaacataataaatacatattttttataattaatattttattaagcacaatgcacaaccaaatctattttataaattatattctaatcaatattatctttttgataaaaattgtaatattatgtttcaacatataaattatattttagatttataataaaaaatatatattatgatataatattatttttaattattgataattgttttaaaaatattaaaatcttatttaaaaataaaaataaaacaatacttcatattgaatatccattaattttgtattactaacatttactttatgcaattctcatttttattatgttgactaaattactcttaataagtcttaatacttccttcctcaaatgtctcaaccttatattctcttttccttcttatatgccccatttttattatgtagactaaattactcttaataagtctaatacttcctgcctcaaatgtctcaaccttatattctcttttccttcttatatgccccatattttctctgtgtcatcccctccatatcttctcagtgcatttgaaggtggaagtataagtcatctctagaaatgatgagggtgttttgtttcatctttgcatagttttgatgagggtagattgaaaaaaacaaaaatcaaaatgttgttctggaatggatattttataatacacatgcaatttgagaatgtatttcagaagacaaagttcaaaactctattctaagatgggtattgcggaacacgtttcaggatttacaagtattttatagaatactcattccataatttccttgtacatctaaaatgtgttcatgaatacctattccaaaagataacaaatcaaaattattgtatttcaaaatggatatttcaaaacacattttgggatttagaagtctattataaaataatcattttgtaatatatttgtaaatctgaaatgtgttatgaaatacatattctaaaagccaaaaaatcaaaagttctaattacagaataacaattgcataacatatttctg

SEQ ID NO: 12770 - DNA, 1090 bp, Glycine max
  Gm_smallRNAprecursor_5603
caaaatcactaaatccaaagatgacagtggagacgacctagaaatggttcatggaagattgaaagaaaagttgtcggggaataaatatcttttcgttctggatgatgtttggaacgaagatcgagaccaatggaaggctttacaaactcctcttaaatatggggctaagggaagtaaaattcttgtcacgactcgcagtaacaatgttgcttcaaccatgcagtcaaacaaagtacatgaactaaagcaattacgagaagatcacagctggcaagttttcgctcagcatgcattccaagatgattatcctaagttgaatgctgagctgaaggagattggtataaagataattgagaagtgccaagggttgcctctagccttagaaacagttggatgtcttttacacaaaaagccatctatttcacaatgggaaggtgtattgaaaagcaagatatgggagttaccaaaagaagaaagtaaaatcatccctgctttattgttgagctatttccatcttccttctcatctcaagagatgtttcgcttattgtgccttattccccaaagatcacgagttttacaaggagggtttaattcagttatgggtggctgaaaattttgtacaatgctctacccagagtaatcctcaagaagaaattggtgaacaatacttcaatgatctattatcaaggtccttctttcaacgatcaagtagagaagagtgttttgtcatgcatgaccttctcaatgatttggcaaaatatgtttgtggggacatctgtttcaggttacaagttgataaaccaaaaagcatatcaaaagtccgtcatttttcatttgtaactgaaaatgatcaatattttgatgggtacgggagtttatatcatgctcaaaggctacgaacatttatgcccatgactgagcctctactacttataaattggggtggtaggaaactagtagatgagttgttctcgaagtttaagttcttacgcatcttatctttgtctctttgtgaccttaaagagatgcctgactctgtaggcaatcttaaccatcttcgttcgttagacctttcctatacttccata

SEQ ID NO: 12771 - DNA, 1242 bp, Glycine max
  Gm_smallRNAprecursor_5604
caaaatcactaaatccaaagatgacagtggagacgacctagaaatggttcatggaagattgaaagaaaagttgtcggggaataaatatcttttcgttctggatgatgtttggaacgaagatcgagaccaatggaaggctttacaaactcctcttaaatatggggctaagggaagtaaaattcttgtcacgactcgcagtaacaatgttgcttcaaccatgcagtcaaacaaagtacatgaactaaagcaattacgagaagatcacagctggcaagttttcgctcagcatgcattccaagatgattatcctaagttgaatgctgagctgaaggagattggtataaagataattgagaagtgccaagggttgcctctagccttagaaacagttggatgtcttttacacaaaaagccatctatttcacaatgggaaggtgtattgaaaagcaagatatgggagttaccaaaagaagaaagtaaaatcatccctgctttattgttgagctatttccatcttccttctcatctcaagagatgtttcgcttattgtgccttattccccaaagatcacgagttttacaaggagggtttaattcagttatgggtggctgaaaattttgtacaatgctctacccagagtaatcctcaagaagaaattggtgaacaatacttcaatgatctattatcaaggtccttctttcaacgatcaagtagagaagagtgttttgtcatgcatgaccttctcaatgatttggcaaaatatgtttgtggggacatctgtttcaggttacaagttgataaaccaaaaagcatatcaaaagtccgtcatttttcatttgtaactgaaaatgatcaatattttgatgggtacgggagtttatatcatgctcaaaggctacgaacatttatgcccatgactgagcctctactacttataaattggggtggtaggaaactagtagatgagttgttctcgaagtttaagttcttacgcatcttatctttgtctctttgtgaccttaaagagatgcctgactctgtaggcaatcttaaccatcttcgttcgttagacctttcctatacttccataaaaaaactacctgattcaatgtgttttctctgtaacttgcaagtcttgaagctgaatttttgtgtccatttggaggagctaccctcaaatttgcataaactcaccaatttgcgctgtcttgaatttatgtacactgaagtgagaaagatgcc

SEQ ID NO: 12772 - DNA, 1132 bp, Glycine max
  Gm_smallRNAprecursor_5605
ctggatctagagttagaatggaatgagcaccagaaccttgatgattcaataaaagaaagacaagtacttgagaatctgcaaccttcaagacatttggagaaattgtcaattcggaactacggtggtactcaatttcctagttggttatcggataattcattatgtaatgtggtgtccttaaccttgatgaactgtaaatatttcctatgtttgcctccccttggacttttgccatttctgaaggagctttcaattggagggcttgatgggatcgtgagtattaatgctgattttttcgggagtagctcttgttcatttacatccttggaatctttgaagttcttcaatatgaaggaatgggaagaatgggaatgtaaaggtgtgacaggtgcttttccacgtcttcaacgtctttctatagaggattgtcccaagctgaaagggcacttgccagagcaactatgtcatttaaattatctaaagatttctgggtgcgaacaacttgtaccttctgctctcagtgccccagatattcatcaattatacctagtagactgtggagagctgcaaattgatcatctaacaactttgaaagagcttaccattgaaggtcacaacgtggaggcagccttactcgaacagattgggcgcaattactcttgttcaaataacaatattcccatgcacagttgctatgatttccttctaagcttggacatcaatggtggctgcgactctctaacgaccattcacttagatatcttcccaatactcaggcgacttgatatcaggaagtggcctaatctaaagaggatttcacaggggcaggctcataatcatctccagactctgtgtgtcggatcgtgcccccaattagaatcattgcctgaaggaatgcatgtcctccttccatctcttgatgatctgtggatagaggattgtccaaaagttgaaatgtttcccgaaggaggtttgccatcaaatttaaaaagtatgggtctctatggtagttacaaacttatgtccttattgaaaactgccttgggaggcaatcactctctagaaagattatctattggaggagtggatgttgagtgtcttcctgaggaaggtgtactgccacactctcttc

SEQ ID NO: 12773 - DNA, 1090 bp, Glycine max
  Gm_smallRNAprecursor_5606
caaaatcactaaatcaaaagaagacagtggagacgacctagaaatggttcatggaagattgaaagaaaagttgtcggggaataaatatcttctggttctggatgatgtttggaacgaagatcgagaccaatggaaggctttacaaactcctcttaaatacggggctaagggaagtaaaattcttgtcacgactcgcagtaacaaggttgcttcaatcatgcagtcaaacaaagtacatgaactaaagcaattacaagaagatcacagctggcaagttttcgctcagcatgcattccaagatgattatcctaagttgaatgagcagctgaaggagattggtataaagatagttgagaagtgccaagggttgcctctagccttagaaacagttggatgtcttttacacacaaagccatctgtttcacaatgggaaggtgtattgaaaagcaagatatgggagttaccgaaagaagatagtaaaatcatccctgctttattgttgagctattaccatcttccttctcatctcaagagatgtttcgcttattgtgccttattccctaaagatcacgagttttacaaggatagcttaattcagttatgggtggctgaaaattttgtacaatgctctcaagagagtactcctcaagaagaaattggtgaacaatacttcaatgatctattatcaaggtccttctttcaacgatcaagtagagaaaagtgttttgtcatgcatgatcttctcaatgatttggcaaaatatgtttgtggggacatctgtttcagattaggagttgataaaacaaaaagtatatcaaaagtccgtcatttttcatttgtacctgaataccatcaatattttgatgggtacgggagtttatatcatgctaaaaggctacggacatttatgcccacacttccaggacgagatatgtatatttggggttgtaggaaactagtagatgagttgtgctccaagtttaagttcttacgcatcttatctttgtttcgttgtgatcttatagagatgcctgactctgtaggcaatcttaagcatcttcgttcgttagacctttctaaaacttacata

SEQ ID NO: 12774 - DNA, 1233 bp, Glycine max
  Gm_smallRNAprecursor_5607
taaatcaaaagaagacagtggagacgacctagaaatggttcatggaagattgaaagaaaagttgtcggggaataaatatcttctggttctggatgatgtttggaacgaagatcgagaccaatggaaggctttacaaactcctcttaaatacggggctaagggaagtaaaattcttgtcacgactcgcagtaacaaggttgcttcaatcatgcagtcaaacaaagtacatgaactaaagcaattacaagaagatcacagctggcaagttttcgctcagcatgcattccaagatgattatcctaagttgaatgagcagctgaaggagattggtataaagatagttgagaagtgccaagggttgcctctagccttagaaacagttggatgtcttttacacacaaagccatctgtttcacaatgggaaggtgtattgaaaagcaagatatgggagttaccgaaagaagatagtaaaatcatccctgctttattgttgagctattaccatcttccttctcatctcaagagatgtttcgcttattgtgccttattccctaaagatcacgagttttacaaggatagcttaattcagttatgggtggctgaaaattttgtacaatgctctcaagagagtactcctcaagaagaaattggtgaacaatacttcaatgatctattatcaaggtccttctttcaacgatcaagtagagaaaagtgttttgtcatgcatgatcttctcaatgatttggcaaaatatgtttgtggggacatctgtttcagattaggagttgataaaacaaaaagtatatcaaaagtccgtcatttttcatttgtacctgaataccatcaatattttgatgggtacgggagtttatatcatgctaaaaggctacggacatttatgcccacacttccaggacgagatatgtatatttggggttgtaggaaactagtagatgagttgtgctccaagtttaagttcttacgcatcttatctttgtttcgttgtgatcttatagagatgcctgactctgtaggcaatcttaagcatcttcgttcgttagacctttctaaaacttacataaaaaaactgcctgattcaatttgttttctctgtaacttgcaagtcttgaagctgaattcttgtgaccatttggaggagctaccctcaaatttgcataaactcaccaatttgcgctgtcttgaatttatgtacactaaagtgagaaagatgcc

SEQ ID NO: 12775 - DNA, 1227 bp, Glycine max
  Gm_smallRNAprecursor_5608
catcactaaatcgactgatgatagtagagacctagagatggttcacggaagattgaaagaaaaattgacggggaagagatttcttcttgttttggatgacgtttggaacgaaaaccgacttaaatgggaagctgtgctaaaacatcttggttttggggctcaggggagtagaattattgccaccacacgtagtaaggaagttgcttctaccatgaggtcaaaagaacacctcctggagcaattacaagaagatcattgctggaagttgtttgctaaacatgcattccaagatgataatattcaaccaaatccagattgcaaggagattggtatgaagatagttgaaaaatgtaaaggacttcctctggccttgaaaacaatgggaagtctattacacaacaagtcatctgttacggaatggaaaagcatattgcagagcgagatatgggaattttcaacagagcgtagtgatattgtacctgctttagcactaagctatcaccatcttccttctcatctcaagagatgtttgcttatgtgccttattccccaaagattatgagttgataggagtgctttatacaattgtggatggctgaaaaatttctacaatgttctcaacagggtaagagtccaggagaagttggtgaacaatacttcaatgatctattatcaaggtgcttctttcaacaatcaagcaacacagagagaacagattttgtcatgcatgaccttctcaacgatttggcaagatttatttgtggggacatttgtttcagattggatgggaatcaaacaaaaggtacaccaaaagcaacccgtcattttttaattgacgttaaatgttttgatgggtttggaactctatgtgacacaaaaaagttacgtacttatatgccaacaagttacaaatattgggattgcgagatgtcaatacacgaattgttctccaagtttaattacttacgtgtcttatctctgtttgattgtcatgacctaagagaggtgcctgactctgtgggtaatctcaaatatctccgttcgttagacttatccaatactaaaatagaaaaactacctgaatcaatatgttcactctacaacttgcaaatactgaagctaaatggttgtagacatttgaaggagctgccctcaaatttgcataaactcactgatttgcatcggcttgaattaatagaaactggagtgagaaaggtaccagcacat

SEQ ID NO: 12776 - DNA, 1234 bp, Glycine max
  Gm_smallRNAprecursor_5609
catcactaaatcgactgatgatagtagagacctagagatggttcacggaagattgaaagaaaaattgacggggaagagatttcttcttgttttggatgacgtttggaacgaaaaccgacttaaatgggaagctgtgctaaaacatcttggttttggggctcaggggagtagaattattgccaccacacgtagtaaggaagttgcttctaccatgaggtcaaaagaacacctcctggagcaattacaagaagatcattgctggaagttgtttgctaaacatgcattccaagatgataatattcaaccaaatccagattgcaaggagattggtatgaagatagttgaaaaatgtaaaggacttcctctggccttgaaaacaatgggaagtctattacacaacaagtcatctgttacggaatggaaaagcatattgcagagcgagatatgggaattttcaacagagcgtagtgatattgtacctgctttagcactaagctatcaccatcttccttctcatctcaagagatgtttgcttatgtgccttattccccaaagattatgagttgataggagtgctttatacaattgtggatggctgaaaaatttctacaatgttctcaacagggtaagagtccaggagaagttggtgaacaatacttcaatgatctattatcaaggtgcttctttcaacaatcaagcaacacagagagaacagattttgtcatgcatgaccttctcaacgatttggcaagatttatttgtggggacatttgtttcagattggatgggaatcaaacaaaaggtacaccaaaagcaacccgtcattttttaattgacgttaaatgttttgatgggtttggaactctatgtgacacaaaaaagttacgtacttatatgccaacaagttacaaatattgggattgcgagatgtcaatacacgaattgttctccaagtttaattacttacgtgtcttatctctgtttgattgtcatgacctaagagaggtgcctgactctgtgggtaatctcaaatatctccgttcgttagacttatccaatactaaaatagaaaaactacctgaatcaatatgttcactctacaacttgcaaatactgaagctaaatggttgtagacatttgaaggagctgccctcaaatttgcataaactcactgatttgcatcggcttgaattaatagaaactggagtgagaaaggtaccagcacatttgggaa

SEQ ID NO: 12777 - DNA, 1150 bp, Glycine max
  Gm_smallRNAprecursor_5610
agcaattacaagaagatcattgctggaagttgtttgctaaacatgcattccaagatgataatattcaaccaaatccagattgcaaggagattggtatgaagatagttgaaaaatgtaaaggacttcctctggccttgaaaacaatgggaagtctattacacaacaagtcatctgttacggaatggaaaagcatattgcagagcgagatatgggaattttcaacagagcgtagtgatattgtacctgctttagcactaagctatcaccatcttccttctcatctcaagagatgtttgcttatgtgccttattccccaaagattatgagttgataggagtgctttatacaattgtggatggctgaaaaatttctacaatgttctcaacagggtaagagtccaggagaagttggtgaacaatacttcaatgatctattatcaaggtgcttctttcaacaatcaagcaacacagagagaacagattttgtcatgcatgaccttctcaacgatttggcaagatttatttgtggggacatttgtttcagattggatgggaatcaaacaaaaggtacaccaaaagcaacccgtcattttttaattgacgttaaatgttttgatgggtttggaactctatgtgacacaaaaaagttacgtacttatatgccaacaagttacaaatattgggattgcgagatgtcaatacacgaattgttctccaagtttaattacttacgtgtcttatctctgtttgattgtcatgacctaagagaggtgcctgactctgtgggtaatctcaaatatctccgttcgttagacttatccaatactaaaatagaaaaactacctgaatcaatatgttcactctacaacttgcaaatactgaagctaaatggttgtagacatttgaaggagctgccctcaaatttgcataaactcactgatttgcatcggcttgaattaatagaaactggagtgagaaaggtaccagcacatttgggaaaactggagtatcttcaagtattaatgagttcgtttaatgttggcaaaagtagggagttcagtatccagcagttaggagaactcaatcttcatggaagtctatcaataaggcaactgcagaatgttgagaatccatcagatgcattagcggtg

SEQ ID NO: 12778 - DNA, 1119 bp, Glycine max
  Gm_smallRNAprecursor_5611
aataaggcaactgcagaatgttgagaatccctcagatgcattagcggtggatttaaaaaataaaacacatcttgtcgaggtagagttagaatgggattcagacaggaaccctgatgattcaacaaaagaaagggatgaaattgtaatcgagaatctacagccttccaaacacttggagaagttgaggatgaggaactatgggggtactcaatttcctagttggttatcggataattcatcatgtaatgtggtgtccttaaccttggacaactgtcaatcttgccaacgtttgcctccccttggacttttgccatttctgaaggagctttcaattggagggcttgatgggatcgtgagtattaatgatgattttttcgggagtagctcttcttcatttacatccttggaatctttgaagttcttcgatatgaaggaatgggaagaatgggaatgtaaaggtgtgacaggtgcttttccacgtcttcaacgtctttctatattgcattgtcccaagctgaaaggtttgcctccccttggacttttgccatttctgaaggagctttcaattggagggcttgatgggattgtgagtattaatgctgattttttcgggagtagctcttcttcatttgcatccttggaaatactggagttctcccggatgaaggaatgggaagaatgggaatgtaaaggtgtgacgggtgcttttccacgtcttcaacgtctttccataaaggattgtcccaagctgaaagggcacttgccagagcaactatgtcatttaaatgatctaaagatttctgggtgcgaacaacttgtaccttctgctctcagtgccccagatattcatgaattggttggtggttctcttctttctgctttccttcaggttgcatttgagaagcttgcttctcttcaagttcggggcttctttcgtggaagaaagcttgatgaaaagctgctcaacaacttggaaatcaagctgaactccatacaggctctggctgatgatgcagaactaaagcagttcagagatccacttgtcagaaactggcttcttaaggtcaaagatgctgtgtttgacgcagaggatatcttggatgaaatacaacatgagat

SEQ ID NO: 12779 - DNA, 1198 bp, Glycine max
  Gm_smallRNAprecursor_5612
agtaggagtccagaagaagtcggtgaacaatacttcaatgatcttttgtcaaggtccttctttcaacaatcaagcaacataaagggaacaccttttgtcatgcatgaccttctaaatgatttggcaaaatatgtttgtggggacatctgcttcaggttggaagatgatcaagtaacaaatataccgaagacaacccgtcatttttcagttgctagcaattacgttaaatgctttgatgggtttcgaactttatacaatgctgaaaggttacgcacatttatgtcatcaagtgaggaaatgagttttcattactacaatcgttggcagtgcaagatgtcaacagatgaattgttctccaagtttaagttcttacgtgtcttatctctgtctggttattctaacctaacagaggctcctgactctgtaggtaatcttaaatatctccattcattagacctctcaaatactgacatagaaaaattacccgaatcaacatgttcactctacaacttgctaatactgaagctaaatggttgtaaacatttgaaggagctgccctcaaatttgcataaactcactaatttgcatagccttgaattaataaatactggagtgagaaaggtaccagcacatttgggaaaactgaagtatcttcaggtatcaatgagtccgtttaaggttggcaaaagtagggagttcagtatccagcagctaggagaactcaatcttcatggaagtctatcaattcagaacctgcagaatgtggagaatccctcagatgcattagcggtggatttaaaaaataaaacacaccttgtcgaggtagagttgagatgggattttttctggaaccctgatgattcaacgaaagaaagggatgaaattgtaattgagaatctacagccttccaaacacttggagaagttgacgatgaggcattatgggggtaaacaatttccgaggtggttattcaacaattcattattgaatgtggtgtccttaaccttggagaactgtcaatcttgccaacgtttgcctccccttggacttttgccatttctgaaggagctttcaattgaagggcttgatgggattgtgagtattaatgctgattttttcgggagtagctcttgttcatttacatccttggaatctttgaagttcttcgatatggaggaatgggaagaatgggaatata

SEQ ID NO: 12780 - DNA, 1092 bp, Glycine max
  Gm_smallRNAprecursor_5613
gtttttgcatttttatcctccagcctttcaagctttattttagacatgattctaaattctgtaatattaacatgttttccctttattcaacttgagtgtgtttgaatcaatgttgttaatggcggatggcggttcatggcggaaagtcaaaaatccgccataaaaatatggcggatggcgtagcggaaaatggcggatgtcatggcggacacaaaaaaaaaaaaaacatatatataaactcattgaaattgaaaaaaacaaaggattgcattcaaataaactaaaaaagtttcatgagttcatacaataatcaagtaccaacaccaaataaactcattaaagagttcaaaataagaaaatgataaaaacataatgcaaagtgcaaagtgaaggttgaggctctaatcatcttctccaatcccaacataatcatcttcgttgttatcatatggtaatggagcatctccctctccctcttccccatcagacgcctcaaaattgaccatgatttcttcttcttcagattcaacatcaatattctcctcaacatctagatcctcatcattttcttggactgctttttgcttccttgatgaagatccaacaaccattgcctgttttttagaagtttgggcagcagcaacacttgttttttgctttttccgcctagtatacatcctacactctccaacccccgaagcctgatacacagttgcccaatttagagcatcatcatcttcaaataccaaatcatttccagcatcattatcatcatcttgatccatctctcccacgagccattcattgcatacatcaatatcattaagagaaattggatcaatttcatctcttgcattatatctttgcttcaattgttggttgtatttgacaaacaccaaatcatgcaacctcttgtgctcaagcctatttctttttttggaatgaatctacaacataacaaataaatgttgatttcaatctcaaatatactccaaatataacttgatcatcaaaattaaataaaattaaaaagtatagttagagttttgtcacaattacttgctcaaacacactccaatttctttcacatcc

SEQ ID NO: 12781 - DNA, 1133 bp, Glycine max
  Gm_smallRNAprecursor_5614
ggaaaatggcggatgtcatggcggacacaaaaaaaaaaaaaacatatatataaactcattgaaattgaaaaaaacaaaggattgcattcaaataaactaaaaaagtttcatgagttcatacaataatcaagtaccaacaccaaataaactcattaaagagttcaaaataagaaaatgataaaaacataatgcaaagtgcaaagtgaaggttgaggctctaatcatcttctccaatcccaacataatcatcttcgttgttatcatatggtaatggagcatctccctctccctcttccccatcagacgcctcaaaattgaccatgatttcttcttcttcagattcaacatcaatattctcctcaacatctagatcctcatcattttcttggactgctttttgcttccttgatgaagatccaacaaccattgcctgttttttagaagtttgggcagcagcaacacttgttttttgctttttccgcctagtatacatcctacactctccaacccccgaagcctgatacacagttgcccaatttagagcatcatcatcttcaaataccaaatcatttccagcatcattatcatcatcttgatccatctctcccacgagccattcattgcatacatcaatatcattaagagaaattggatcaatttcatctcttgcattatatctttgcttcaattgttggttgtatttgacaaacaccaaatcatgcaacctcttgtgctcaagcctatttctttttttggaatgaatctacaacataacaaataaatgttgatttcaatctcaaatatactccaaatataacttgatcatcaaaattaaataaaattaaaaagtatagttagagttttgtcacaattacttgctcaaacacactccaatttctttcacatcctgaagcactgcaagtcaaactcaaaatcttaatagccagcttctgcaaatttggagtttgtgacccaaacattcgccaccaatatgctgcaataccaattaccaaccaagagcataacttagaattctgaattctaacactaatacataaaaaaaatagtatgataaaagtttcttactaggagaatgggttttcctttgagccattgcaaagtcggaaccaaag

SEQ ID NO: 12782 - DNA, 1092 bp, Glycine max
  Gm_smallRNAprecursor_5615
ctcccagctatcattattgaagttgcccatgcttgagatgaaggagctttgctgtctactaatccgaaaaagttgattatacttctgctcaagagtgtaatctgcccaatgttgttaatgacggatggcggttcatggcggaaagtcaaaaatccgccataaaaatatggcggatggcgtagcggaaaatggcggatgtcatggcggacacaaaaaaaaaaaaaaacatatatataaactcattgaaattgaaaaaaacaaaggattgcattcaaataaactaaaaaagtttcatgagttcatacaataatcaagtaccaacaccaaataaactcattaaagagttcaaaataagaaaatgataaaaacataatgcaaagtgcaaagtgaaggttgaggctctaatcatcttctccaatcccaacataatcatcttcgttgttatcatatggtaatggagcatctccctctccctcttccccatcagacgcctcaaaattgaccatgatttcttcttcttcagattcaacatcaatattctcctcaacatctagatcctcatcattttcttggactgctttttgcttccttgatgaagatccaacaaccattgcctgttttttagaagtttgggcagcagcaacacttgttttttgctttttccgcctagtatacatcctacactctccaacccccgaagcctgatacacagttgcccaatttagagcatcatcatcttcaaataccaaatcatttccagcatcattatcatcatcttgatccatctctcccacgagccattcattgcatacatcaatatcattaagagaaattggatcaatttcatctcttgcattatatctttgcttcaattgttggttgtatttgacaaacaccaaatcatgcaacctcttgtgctcaagcctatttctttttttggaatgaatctacaacataacaaataaatgttgatttcaatctcaaatatactccaaatataacttgatcatcaaaattaaataaaattaaaaagtatagttagagttttgtcacaattacttgctcaaacacactccaatttctttcacatcc

SEQ ID NO: 12783 - DNA, 1133 bp, Glycine max
  Gm_smallRNAprecursor_5616
gaaaatggcggatgtcatggcggacacaaaaaaaaaaaaaaacatatatataaactcattgaaattgaaaaaaacaaaggattgcattcaaataaactaaaaaagtttcatgagttcatacaataatcaagtaccaacaccaaataaactcattaaagagttcaaaataagaaaatgataaaaacataatgcaaagtgcaaagtgaaggttgaggctctaatcatcttctccaatcccaacataatcatcttcgttgttatcatatggtaatggagcatctccctctccctcttccccatcagacgcctcaaaattgaccatgatttcttcttcttcagattcaacatcaatattctcctcaacatctagatcctcatcattttcttggactgctttttgcttccttgatgaagatccaacaaccattgcctgttttttagaagtttgggcagcagcaacacttgttttttgctttttccgcctagtatacatcctacactctccaacccccgaagcctgatacacagttgcccaatttagagcatcatcatcttcaaataccaaatcatttccagcatcattatcatcatcttgatccatctctcccacgagccattcattgcatacatcaatatcattaagagaaattggatcaatttcatctcttgcattatatctttgcttcaattgttggttgtatttgacaaacaccaaatcatgcaacctcttgtgctcaagcctatttctttttttggaatgaatctacaacataacaaataaatgttgatttcaatctcaaatatactccaaatataacttgatcatcaaaattaaataaaattaaaaagtatagttagagttttgtcacaattacttgctcaaacacactccaatttctttcacatcctgaagcactgcaagtcaaactcaaaatcttaatagccagcttctgcaaatttggagtttgtgacccaaacattcgccaccaatatgctgcaataccaattaccaaccaagagcataacttagaattctgaattctaacactaatacataaaaaaaatagtatgataaaagtttcttactaggagaatgggttttcctttgagccattgcaaagtcggaaccaaag

SEQ ID NO: 12784 - DNA, 1048 bp, Glycine max
  Gm_smallRNAprecursor_5617
atttgtttgacaaggagtgtttaattcagttctggatggctcaaaaattgctacaatgccatcaacagagtaagagtccagaagaaattggtgaacagtacttcaatgatctattatcgaggtccttcttccaagaatcaagcaacatagaggggggaaggtgttttgtcatgcatgaccttctcaatgatttggcaaaatatgttagcgaggacatgtgtttcaggctggaagttgatcaagcaaaaaccataccaaaagcaacccgtcatttttcagttgtggtcaatgattatcgatattttgaaggttttggaactttatatgatacaaaaaggttgcatacgtttatgtcaacaactgactgcagagattctcatgaatattattggaggtgcaggatgtcaatacatgagttgatctccaagtttaagttcttacgcttcttatctttgtcttattggcatagactcacagaggtgcctgactctattggcaatcttaaacatcttcgttctttagacctttcccatactagcataagaaaactaccagagtcaacttgttcactctacaacttgcaaatactgaaactgaatgattgtaaatatttgaaggagctgccctcaaatttacataaactcacctatttgcgataccttgaatttatgaatactggagtgagaaagctgccagcacatttgggaaaacagaagaaccttctagtattgataaattcgtttgatgttgggaaaagtagggaattcactattcagcagttaggagaactcaatcttcatggaaggctatcaattggtaggctgcagaatgttgagaatccatcggatgcctcagctgtggatttgaaaaataaaacacaccttatgcagctagaattaaaatgggattacaatgggaaccttgatgattcttccaaagaaagggatgaaattgtaattgagaatctagagccttccaaacacttggagaggttgtcaatcaggaactatggtggtaaacattttccaaattggttactacataattc

SEQ ID NO: 12785 - DNA, 1178 bp, Glycine max
  Gm_smallRNAprecursor_5618
tttttcaaatccactgctaatgcatccgagggactctcgacattctgcaggttctgaattgatagacttccatgaagattgagttctcctagctgctggatactgaactccctacttttgccaaccttaaacggactcattgatacctgaagatacttcagttttcccaaatgtgctggtacctttctcactccagtatctattaattcaaggcgatgcaaatcagtgagtttatgtaaatttgagggcagctccttcaatttattacaaccatttagcttcagtatttgcaagttgtagagtgaacatgttgattcaggtaatttttcaatgtcagtatttgaaaggtctaatgaatggagatatttaagattacccacagagtcaggcacctctcttaggctacaacaatgagataaagataagacacgtaagaacttaaacttggagaccagttcatgtatcgacatattgcaattccaaaaagtgaagtcaccaaaattcattttctcacttgttggcatatatgaacgtaacttttttgcatcacatagagttccaaacccatcaaagtatcgaacgtgtttgattgcaactgaaaaatgacgggttgcttttggtgtaccttttgtttgatcaccatccaatctgaaacaaatgtccccacaaataaatcttgccaaatcgttgagaaggtcatgcatgacaaaatgtgttctctttgtgttgcttgattgttgaaagaagcaccttgataatagatcattgaagtattgttcaccaacttcttctggtctcttaccctgttgagaacattgtagaaatttttcagccatccacaattgtattaagcactccttatcaaacacataatctttggggaataaggcacaataagcaaaacatctcttgagatgagaaggaagatggtgatagcttagtgctaaagcaggtacaatatcactacgctctgttgaaaattcccatatctcgctctgccatatgcttttccattccgtaacagatgacttgtcgtgtaatagacttcccattgttttcaaggccagaggaagtcctttacattttttaactatcttcgtaccaatctccttgcaatctggatttggttgaatattatcatcttggaatgcatgtttagcaaacaacttccagcaatg

SEQ ID NO: 12786 - DNA, 1137 bp, Glycine max
  Gm_smallRNAprecursor_5619
ctcattgatacctgaagatacttcagttttcccaaatgtgctggtacctttctcactccagtatctattaattcaaggcgatgcaaatcagtgagtttatgtaaatttgagggcagctccttcaatttattacaaccatttagcttcagtatttgcaagttgtagagtgaacatgttgattcaggtaatttttcaatgtcagtatttgaaaggtctaatgaatggagatatttaagattacccacagagtcaggcacctctcttaggctacaacaatgagataaagataagacacgtaagaacttaaacttggagaccagttcatgtatcgacatattgcaattccaaaaagtgaagtcaccaaaattcattttctcacttgttggcatatatgaacgtaacttttttgcatcacatagagttccaaacccatcaaagtatcgaacgtgtttgattgcaactgaaaaatgacgggttgcttttggtgtaccttttgtttgatcaccatccaatctgaaacaaatgtccccacaaataaatcttgccaaatcgttgagaaggtcatgcatgacaaaatgtgttctctttgtgttgcttgattgttgaaagaagcaccttgataatagatcattgaagtattgttcaccaacttcttctggtctcttaccctgttgagaacattgtagaaatttttcagccatccacaattgtattaagcactccttatcaaacacataatctttggggaataaggcacaataagcaaaacatctcttgagatgagaaggaagatggtgatagcttagtgctaaagcaggtacaatatcactacgctctgttgaaaattcccatatctcgctctgccatatgcttttccattccgtaacagatgacttgtcgtgtaatagacttcccattgttttcaaggccagaggaagtcctttacattttttaactatcttcgtaccaatctccttgcaatctggatttggttgaatattatcatcttggaatgcatgtttagcaaacaacttccagcaatgatcttcttgtaattgctccaggaggtgttcttttgacctcatggtagaagcaacttccttactacgtgtggtggcaataattctactcccctga

SEQ ID NO: 12787 - DNA, 1137 bp, Glycine max; identical to SEQ ID NO: 12786
  Gm_smallRNAprecursor_5620

SEQ ID NO: 12788 - DNA, 1138 bp, Glycine max
  Gm_smallRNAprecursor_5621
ctcattgatacctgaagatacttcagttttcccaaatgtgctggtacctttctcactccagtatctattaattcaaggcgatgcaaatcagtgagtttatgtaaatttgagggcagctccttcaatttattacaaccatttagcttcagtatttgcaagttgtagagtgaacatgttgattcaggtaatttttcaatgtcagtatttgaaaggtctaatgaatggagatatttaagattacccacagagtcaggcacctctcttaggctacaacaatgagataaagataagacacgtaagaacttaaacttggagaccagttcatgtatcgacatattgcaattccaaaaagtgaagtcaccaaaattcattttctcacttgttggcatatatgaacgtaacttttttgcatcacatagagttccaaacccatcaaagtatcgaacgtgtttgattgcaactgaaaaatgacgggttgcttttggtgtaccttttgtttgatcaccatccaatctgaaacaaatgtccccacaaataaatcttgccaaatcgttgagaaggtcatgcatgacaaaatgtgttctctttgtgttgcttgattgttgaaagaagcaccttgataatagatcattgaagtattgttcaccaacttcttctggtctcttaccctgttgagaacattgtagaaatttttcagccatccacaattgtattaagcactccttatcaaacacataatctttggggaataaggcacaataagcaaaacatctcttgagatgagaaggaagatggtgatagcttagtgctaaagcaggtacaatatcactacgctctgttgaaaattcccatatctcgctctgccatatgcttttccattccgtaacagatgacttgtcgtgtaatagacttcccattgttttcaaggccagaggaagtcctttacattttttaactatcttcgtaccaatctccttgcaatctggatttggttgaatattatcatcttggaatgcatgtttagcaaacaacttccagcaatgatcttcttgtaattgctccaggaggtgttcttttgacctcatggtagaagcaacttccttactacgtgtggtggcaataattctactcccctgag

SEQ ID NO: 12789 - DNA, 1231 bp, Glycine max
  Gm_smallRNAprecursor_5622
catcactaaatcgactgatgatagtagagacctagagatggttcacggaagattgaaagaaaaattgacggggaagagatttcttcttgttttggatgacgtttggaacgaaaaccgacttaaatgggaagctgtgctaaaacatcttgtttttggggctcaggggagtagaattattgccaccacacgtagtaaggaagttgcttctaccatgaggtcaagagaacacctcctggagcaattacaagaagatcattgctggaagttgtttgctaaacatgcattccaagatgataatattcaaccaaatccagattgcaaggagattggtacgaagatagttgaaaaatgtaaaggacttcctctggccttgaaaacaatgggaagtctattacacgacaagtcatctgttacggaatggaaaagcatattgcagagcgagatatgggaattttcaacagagcgtagtgatattgtacctgctttagcactaagctatcaccatcttccttctcatctcaagagatgttttgcttattgtgccttattccccaaagattatttgtttgataaggagtgcttaatacaattgtggatggctgaaaaatttctacaatgttctcaacaggataagagtccagaagaagttggtgaacaatacttcaatgatctattatcaaggtgtttctttcaacaatcaagcaacacaaagagaacacaatttgtcatgcatgaccttctcaacgatttggcaagatttatttgtggggacatttgtttcagattggatggtgatcaaacaaaaggtacaccaaaagcaacccgtcatttttcagttgcaatcgaacacgttcgatactttgatgggtttggaactccatgtgacgcaaaaaagttacgttcatatatgccaacaagtgagaaaatgaattttggttacttcccttattgggattgcaatatgtcgatacatgaattattctccaagtttaagttcttacgtgtcttatctttatctgattgttctaacctaagagaggtgcctgactctgtgggtaatcttaaatatctccattccttagacctctcaaatactggcataaaaaaactacctgaatcaacatgttcactctacaacttgcaaatactgaagctaaatggttgtaataaattgaaggagctgccctcaaatttacataaactcactgatttgcatcgccttgaattaata

SEQ ID NO: 12790 - DNA, 1238 bp, Glycine max
  Gm_smallRNAprecursor_5623
catcactaaatcgactgatgatagtagagacctagagatggttcacggaagattgaaagaaaaattgacggggaagagatttcttcttgttttggatgacgtttggaacgaaaaccgacttaaatgggaagctgtgctaaaacatcttgtttttggggctcaggggagtagaattattgccaccacacgtagtaaggaagttgcttctaccatgaggtcaagagaacacctcctggagcaattacaagaagatcattgctggaagttgtttgctaaacatgcattccaagatgataatattcaaccaaatccagattgcaaggagattggtacgaagatagttgaaaaatgtaaaggacttcctctggccttgaaaacaatgggaagtctattacacgacaagtcatctgttacggaatggaaaagcatattgcagagcgagatatgggaattttcaacagagcgtagtgatattgtacctgctttagcactaagctatcaccatcttccttctcatctcaagagatgttttgcttattgtgccttattccccaaagattatttgtttgataaggagtgcttaatacaattgtggatggctgaaaaatttctacaatgttctcaacaggataagagtccagaagaagttggtgaacaatacttcaatgatctattatcaaggtgtttctttcaacaatcaagcaacacaaagagaacacaatttgtcatgcatgaccttctcaacgatttggcaagatttatttgtggggacatttgtttcagattggatggtgatcaaacaaaaggtacaccaaaagcaacccgtcatttttcagttgcaatcgaacacgttcgatactttgatgggtttggaactccatgtgacgcaaaaaagttacgttcatatatgccaacaagtgagaaaatgaattttggttacttcccttattgggattgcaatatgtcgatacatgaattattctccaagtttaagttcttacgtgtcttatctttatctgattgttctaacctaagagaggtgcctgactctgtgggtaatcttaaatatctccattccttagacctctcaaatactggcataaaaaaactacctgaatcaacatgttcactctacaacttgcaaatactgaagctaaatggttgtaataaattgaaggagctgccctcaaatttacataaactcactgatttgcatcgccttgaattaataaacactg

SEQ ID NO: 12791 - DNA, 1112 bp, Glycine max
  Gm_smallRNAprecursor_5624
gagatggttcacggaagattgaaagaaaaattgacggggaagagatttcttcttgttttggatgacgtttggaacgaaaaccgacttaaatgggaagctgtgctaaaacatcttgtttttggggctcaggggagtagaattattgccaccacacgtagtaaggaagttgcttctaccatgaggtcaagagaacacctcctggagcaattacaagaagatcattgctggaagttgtttgctaaacatgcattccaagatgataatattcaaccaaatccagattgcaaggagattggtacgaagatagttgaaaaatgtaaaggacttcctctggccttgaaaacaatgggaagtctattacacgacaagtcatctgttacggaatggaaaagcatattgcagagcgagatatgggaattttcaacagagcgtagtgatattgtacctgctttagcactaagctatcaccatcttccttctcatctcaagagatgttttgcttattgtgccttattccccaaagattatttgtttgataaggagtgcttaatacaattgtggatggctgaaaaatttctacaatgttctcaacaggataagagtccagaagaagttggtgaacaatacttcaatgatctattatcaaggtgtttctttcaacaatcaagcaacacaaagagaacacaatttgtcatgcatgaccttctcaacgatttggcaagatttatttgtggggacatttgtttcagattggatggtgatcaaacaaaaggtacaccaaaagcaacccgtcatttttcagttgcaatcgaacacgttcgatactttgatgggtttggaactccatgtgacgcaaaaaagttacgttcatatatgccaacaagtgagaaaatgaattttggttacttcccttattgggattgcaatatgtcgatacatgaattattctccaagtttaagttcttacgtgtcttatctttatctgattgttctaacctaagagaggtgcctgactctgtgggtaatcttaaatatctccattccttagacctctcaaatactggcataaaaaaactacctgaatcaacatgttcactctacaacttgcaaat

SEQ ID NO: 12792 - DNA, 1177 bp, Glycine max
  Gm_smallRNAprecursor_5625
tcctggagcaattacaagaagatcattgctggaagttgtttgctaaacatgcattccaagatgataatattcaaccaaatccagattgcaaggagattggtacgaagatagttgaaaaatgtaaaggacttcctctggccttgaaaacaatgggaagtctattacacgacaagtcatctgttacggaatggaaaagcatattgcagagcgagatatgggaattttcaacagagcgtagtgatattgtacctgctttagcactaagctatcaccatcttccttctcatctcaagagatgttttgcttattgtgccttattccccaaagattatttgtttgataaggagtgcttaatacaattgtggatggctgaaaaatttctacaatgttctcaacaggataagagtccagaagaagttggtgaacaatacttcaatgatctattatcaaggtgtttctttcaacaatcaagcaacacaaagagaacacaatttgtcatgcatgaccttctcaacgatttggcaagatttatttgtggggacatttgtttcagattggatggtgatcaaacaaaaggtacaccaaaagcaacccgtcatttttcagttgcaatcgaacacgttcgatactttgatgggtttggaactccatgtgacgcaaaaaagttacgttcatatatgccaacaagtgagaaaatgaattttggttacttcccttattgggattgcaatatgtcgatacatgaattattctccaagtttaagttcttacgtgtcttatctttatctgattgttctaacctaagagaggtgcctgactctgtgggtaatcttaaatatctccattccttagacctctcaaatactggcataaaaaaactacctgaatcaacatgttcactctacaacttgcaaatactgaagctaaatggttgtaataaattgaaggagctgccctcaaatttacataaactcactgatttgcatcgccttgaattaataaacactggagtgagaaaggtaccagcacatttgggaaaactgaagtatcttcaggtatcaatgagtccgtttaaggttggcaaaagtagggagttcagtatccagcagctaggagaactcaatcttcatggaagtctatcaattcagaacctgcagaatgtcgagagtccctcgga

SEQ ID NO: 12793 - DNA, 1179 bp, Glycine max
  Gm_smallRNAprecursor_5626
tcctggagcaattacaagaagatcattgctggaagttgtttgctaaacatgcattccaagatgataatattcaaccaaatccagattgcaaggagattggtacgaagatagttgaaaaatgtaaaggacttcctctggccttgaaaacaatgggaagtctattacacgacaagtcatctgttacggaatggaaaagcatattgcagagcgagatatgggaattttcaacagagcgtagtgatattgtacctgctttagcactaagctatcaccatcttccttctcatctcaagagatgttttgcttattgtgccttattccccaaagattatttgtttgataaggagtgcttaatacaattgtggatggctgaaaaatttctacaatgttctcaacaggataagagtccagaagaagttggtgaacaatacttcaatgatctattatcaaggtgtttctttcaacaatcaagcaacacaaagagaacacaatttgtcatgcatgaccttctcaacgatttggcaagatttatttgtggggacatttgtttcagattggatggtgatcaaacaaaaggtacaccaaaagcaacccgtcatttttcagttgcaatcgaacacgttcgatactttgatgggtttggaactccatgtgacgcaaaaaagttacgttcatatatgccaacaagtgagaaaatgaattttggttacttcccttattgggattgcaatatgtcgatacatgaattattctccaagtttaagttcttacgtgtcttatctttatctgattgttctaacctaagagaggtgcctgactctgtgggtaatcttaaatatctccattccttagacctctcaaatactggcataaaaaaactacctgaatcaacatgttcactctacaacttgcaaatactgaagctaaatggttgtaataaattgaaggagctgccctcaaatttacataaactcactgatttgcatcgccttgaattaataaacactggagtgagaaaggtaccagcacatttgggaaaactgaagtatcttcaggtatcaatgagtccgtttaaggttggcaaaagtagggagttcagtatccagcagctaggagaactcaatcttcatggaagtctatcaattcagaacctgcagaatgtcgagagtccctcggatg

SEQ ID NO: 12794 - DNA, 1175 bp, Glycine max
  Gm_smallRNAprecursor_5627
ctggagcaattacaagaagatcattgctggaagttgtttgctaaacatgcattccaagatgataatattcaaccaaatccagattgcaaggagattggtacgaagatagttgaaaaatgtaaaggacttcctctggccttgaaaacaatgggaagtctattacacgacaagtcatctgttacggaatggaaaagcatattgcagagcgagatatgggaattttcaacagagcgtagtgatattgtacctgctttagcactaagctatcaccatcttccttctcatctcaagagatgttttgcttattgtgccttattccccaaagattatttgtttgataaggagtgcttaatacaattgtggatggctgaaaaatttctacaatgttctcaacaggataagagtccagaagaagttggtgaacaatacttcaatgatctattatcaaggtgtttctttcaacaatcaagcaacacaaagagaacacaatttgtcatgcatgaccttctcaacgatttggcaagatttatttgtggggacatttgtttcagattggatggtgatcaaacaaaaggtacaccaaaagcaacccgtcatttttcagttgcaatcgaacacgttcgatactttgatgggtttggaactccatgtgacgcaaaaaagttacgttcatatatgccaacaagtgagaaaatgaattttggttacttcccttattgggattgcaatatgtcgatacatgaattattctccaagtttaagttcttacgtgtcttatctttatctgattgttctaacctaagagaggtgcctgactctgtgggtaatcttaaatatctccattccttagacctctcaaatactggcataaaaaaactacctgaatcaacatgttcactctacaacttgcaaatactgaagctaaatggttgtaataaattgaaggagctgccctcaaatttacataaactcactgatttgcatcgccttgaattaataaacactggagtgagaaaggtaccagcacatttgggaaaactgaagtatcttcaggtatcaatgagtccgtttaaggttggcaaaagtagggagttcagtatccagcagctaggagaactcaatcttcatggaagtctatcaattcagaacctgcagaatgtcgagagtccctcgga

SEQ ID NO: 12795 - DNA, 1165 bp, Glycine max
  Gm_smallRNAprecursor_5628
gcaattacaagaagatcattgctggaagttgtttgctaaacatgcattccaagatgataatattcaaccaaatccagattgcaaggagattggtacgaagatagttgaaaaatgtaaaggacttcctctggccttgaaaacaatgggaagtctattacacgacaagtcatctgttacggaatggaaaagcatattgcagagcgagatatgggaattttcaacagagcgtagtgatattgtacctgctttagcactaagctatcaccatcttccttctcatctcaagagatgttttgcttattgtgccttattccccaaagattatttgtttgataaggagtgcttaatacaattgtggatggctgaaaaatttctacaatgttctcaacaggataagagtccagaagaagttggtgaacaatacttcaatgatctattatcaaggtgtttctttcaacaatcaagcaacacaaagagaacacaatttgtcatgcatgaccttctcaacgatttggcaagatttatttgtggggacatttgtttcagattggatggtgatcaaacaaaaggtacaccaaaagcaacccgtcatttttcagttgcaatcgaacacgttcgatactttgatgggtttggaactccatgtgacgcaaaaaagttacgttcatatatgccaacaagtgagaaaatgaattttggttacttcccttattgggattgcaatatgtcgatacatgaattattctccaagtttaagttcttacgtgtcttatctttatctgattgttctaacctaagagaggtgcctgactctgtgggtaatcttaaatatctccattccttagacctctcaaatactggcataaaaaaactacctgaatcaacatgttcactctacaacttgcaaatactgaagctaaatggttgtaataaattgaaggagctgccctcaaatttacataaactcactgatttgcatcgccttgaattaataaacactggagtgagaaaggtaccagcacatttgggaaaactgaagtatcttcaggtatcaatgagtccgtttaaggttggcaaaagtagggagttcagtatccagcagctaggagaactcaatcttcatggaagtctatcaattcagaacctgcagaatgtcgagagtccc

SEQ ID NO: 12796 - DNA, 1082 bp, Glycine max
  Gm_smallRNAprecursor_5629
tttacaaggacaaattctaaaattttcgatatttagatgacaaaatatattttagatattaaaaaaaacataaaacacttcaattcacagcacagtaaacttctatcatggctagcagttaaaactttaattttttcttttaagcaaaaggcagggacaagttgcagcagaggaaaggaaggcatatcctaatcaggttcacaccccaatctctccctctgtttcataatgacagcaaaccccaaatatattgaaaaaatataaagaaattacaacaaagattgagggacataaatcaaatcccaaagatgataagaaaacaactatttgattctataaaaaggacgattgttcctatttctaaagaaagactcaccaatgaaaatagaaataggacgttgttaaatgcacccagcattttttgaaaatgtcaaaactgtccttgtactttcttcgcatttgtgatgagtgtgcgtgagggtggtccgtaaatcgtacggatcaagttgatccgtaagtcttttacagatcaagttgattcatatgttgatattaagtgcatacagatcaagttgattcgtaaaagacttacggatcaacttaaaagacttacggatcaagggtatttcagtcttttccccttaagtgctgcagtaataatgttagatacacctagcaacacccatagaaataatgccccacaaaataaaaatttaaaacctaaaacccattaattttgaatttttttgttccattaagtgttttacagaatatttaaattactcaattatcataataatttactatcaagcatgcacttagattataaatttataatatactcattgataatttttaaatatttaataaaatttctctcaatgtttaaaaaagtactgttaaacgtaaaaatataaactcatttgatattttaaaaataaaaatccaatttttcaatttgatttttaaaaactgaccaaataaaagtaacatatgtcataattaaaataaattgagcagtttcaagaaataaacatgggaaaaattcctctaatccaaaaaataaatatgtgaaaattgtg

SEQ ID NO: 12797 - DNA, 1222 bp, Glycine max
  Gm_smallRNAprecursor_5630
gatatgttggttataatagagtgattatatttgaacactagacactctaccaatatttggaccctaagtaatagaacaaagaataatttcttacatcataccgggaaatatggagacgtaaaaggcggagtgaagttactcttttcaaaaacgacggtataaaagtaatgaaaaatagcattagattagagtaccattaaaaataatgagtaaaaaaaaaaaaatattagcaaggtacctagtcaagataatgtaaaattaaacctattaaatttcaatttagcgaaagcaacaagatgtaaggtccaagtgtccatcatatcatgcatgtaaggagggagattttggcaatttgcaccccaaacacataagggtgttgctaggtgcacccaattttattgtttgtgcacccagcattttttttaaatgtcaaaactgtttctgcgctttcttcgcatttgtgatgggtgtgcgtgagggtgatccgtaaatcgtacggatcaagttgatccgtatgttgatattaagcgtatacggatcaagttgatccgtaaaaaacttacggatcaagttgattcgtaaagcttctacggatcaaattgattcgtatattgatattaagtgcatacggatcaacttgatccgtaaaaggcttacggatcaagttaatccgtaaggcttctatggatcaagttgatccgtaaaaggcttacggatcaagttgatctgtaagtcttttacggatcaacttaaaagtcttacaaataaaggatattttagtctttttttccttaagtgttgagtgcaccagcaataatgctgggtgcagctagcaacacccaacacataaacatagttaggcctgaaatgagcccaatcctcaagcttgtttacaggtccaaaccacaaaatatcttatgaactctcaaaatgctcctcacctaagtaatgtaggacttggtctctttaaacttttaagctctccataacacccaccattatcaaggatttaatgttaaagcatcttgagtttcacatgccaacattcaaaaatttcgtccactcagtcaaaatttacttaaatgattaaatagcttttacaattttttgttgagtaggatattgtaattgatgccactagtcaatatgatccttccttttttttggtttgcaggagggcactatggctcaaaacaaggaacagaaacagactacacagcta

SEQ ID NO: 12798 - DNA, 1036 bp, Glycine max
  Gm_smallRNAprecursor_5631
tttggatattaattaaacgttaactacaattagtgtacacacacataaaatatatataagtagaacttttatttaaatcacgtaccttaacaacaatccacctagcagcagccttggatttcggttgtggagtatcatcaagtcctttcaaagcactagtgttgaatataaggaacattaaaatattgatgttgttgagttatgccaatgaaaatgtattgaaaacaatactgacctgttaattattcccttaaggtagttgtctggcctgttatgcaaagaacaaaaccaaacaactaggttttccttaggtagaatgacgaccatttgccagtgtccactgcagtagagacgaatatagtttattgtagtagtatagattatttaaattcaattattgtgtttgacttacctattcagataggctccaaggtaaacatctcgttttgaactctgtatccaactcttgatgtaactttcggattcaaattgtgattgtccagatctctgaatggactgtggctcgaggaatccatacacatcagaattccccgctcgcacacttgtctcagtcagatggctgtgttgttaagtcaaagttaattatgtatgaatttaaaacaattactttggtaattaatagtaatctaaaatgacttacagaatccacaactgtataactgatatgctgagacattgaccaccatgtgcaatttcagagagatctttgtgctttatatacaacgggaagttttgattaaacaccccgaatatggtagcatcccacataacctggagcggcttcaaaaacagttgtgggatggtcaatgtcatcaggtacaagtgtaaggattaatggtgagaattaaatctctggtagtcacggagacaaaatgcaacataaagattatcgttgtacctattaaactttgtaaggattgctcaatctcccaagaagccttagtcactgcaataaatctccaagtggccaatgctcatattaatttacaagaaagaatctttctatacaaagaac

SEQ ID NO: 12799 - DNA, 1092 bp, Glycine max
  Gm_smallRNAprecursor_5632
aatgtaaaattacattatggattagcttttccagaatgtaaaaaaggtcatgaaagaactgcctagtgaatctggctattaggctgtgccaatgtcagtcccatgcaatgttgttaatggcggatggcggttcatggcggaaagtcaaaaatccgccataaaaatatggcggatggcgtagcggaaaatggcggatgtcatggcggacacaaaaaaaaaaaaaaacatatatataaactcattgaaattgaaaaaaaacaaaggattgcattcaaataaactaaaaaagtttcatgagttcatacaataatcaagtaccaacaccaaataaactcattaaagagttcaaaataagaaaatgataaaaacataatgcaaagtgcaaagtgaaggttgaggctctaatcatcttctccaatcccaacataatcatcttcgttgttatcatatggtaatggagcatctccctctccctcttccccatcagacgcctcaaaattgaccatgatttcttcttcttcagattcaacatcaatattctcctcaacatctagatcctcatcattttcttggactgctttttgcttccttgatgaagatccaacaaccattgcctattttttagaagtttgggcagcagcaacacttgttttttgctttttccgcctagtatacatcctacactctccaacccccgaagcctgatacacagttgcccaatttagagcatcatcatcttcaaataccaaatcatttccagcatcattatcatcatcttgatccatctctcccacgagccattcattgcatacatcaatatcattaagagaaattggatcaatttcatctcttgcattatatctttgcttcaattgttggttgtatttgacaaacaccaaatcatgcaacctcttgtgctcaagcctatttctttttttggaatgaatctacaacataacaaataaatgttgatttcaatctcaaatatactccaaatataacttgatcatcaaaattaaataaaattaaaaagtatagttagagttttatcacaattacttgctcaaacacactctaatttctttcacatct

SEQ ID NO: 12800 - DNA, 1133 bp, Glycine max
  Gm_smallRNAprecursor_5633
aaaatggcggatgtcatggcggacacaaaaaaaaaaaaaaacatatatataaactcattgaaattgaaaaaaaacaaaggattgcattcaaataaactaaaaaagtttcatgagttcatacaataatcaagtaccaacaccaaataaactcattaaagagttcaaaataagaaaatgataaaaacataatgcaaagtgcaaagtgaaggttgaggctctaatcatcttctccaatcccaacataatcatcttcgttgttatcatatggtaatggagcatctccctctccctcttccccatcagacgcctcaaaattgaccatgatttcttcttcttcagattcaacatcaatattctcctcaacatctagatcctcatcattttcttggactgctttttgcttccttgatgaagatccaacaaccattgcctattttttagaagtttgggcagcagcaacacttgttttttgctttttccgcctagtatacatcctacactctccaacccccgaagcctgatacacagttgcccaatttagagcatcatcatcttcaaataccaaatcatttccagcatcattatcatcatcttgatccatctctcccacgagccattcattgcatacatcaatatcattaagagaaattggatcaatttcatctcttgcattatatctttgcttcaattgttggttgtatttgacaaacaccaaatcatgcaacctcttgtgctcaagcctatttctttttttggaatgaatctacaacataacaaataaatgttgatttcaatctcaaatatactccaaatataacttgatcatcaaaattaaataaaattaaaaagtatagttagagttttatcacaattacttgctcaaacacactctaatttctttcacatcttgaagcactgcaagtcaaactcaaaatcttaatagtcagcttctgcaaatttggagtttgtgacccaaacattcgccaccaatatgctgcaataccaattaccaaccaagagcataacttagaattctgaattctaacactaatacataaaaaaaatagtatgataaaagtttcttactaggagaatgagttttcctttgagccattgcaaagtcggaaccaaag

SEQ ID NO: 12801 - DNA, 1130 bp, Glycine max
  Gm_smallRNAprecursor_5634
tacaagattggtgctgaccactttggttccgactttgcaatggctcaaaggaaaacccattctcctagtaagaaacttttatcatactatttttttttatgtattagtgttataattcagaattctaagttatgctcttggttggtaattggtattgcagcatattggtgacgaatgtttgggtcacaaactccaaatttgcagaagctagctattaaaattttgagtttgacttgcagtgcttcaggatgtgaaagaaattggagtgtgtttgaacaagtaattgtgacaaaactctaactatactttttaattttatttaattttgatgatcaagttttatttggagtatatttgagattgaaatcaacatttatttgttatgttgtagattcattccaaaaaaagaaatagacttgagcacaagaggttgcatgatttggtgtttgacaaatacaaccaacaatagaagcaaagatataatgcaatagatgaaattgatccaatttctcttaatgatattgatgtatgcaatgaatggctcgtgggagagatggatcgagatgatgataatgatgctggaaatgatttggtatttgaagatgatgatgctctaaattgggcaactgtgtatcaggcttcgggggttggagagtgtaggatgtatactaggcggaaaaagcaaaaaacaagtgttgctgctgtccaaacttctaaaaaaacaggcaatggttgttggatcttcatcaaggaagcaaaaagcagtccaagaaaatgatgaggatctagatgttgaggagaatattgatgctgaatctgaagaagaagaaatcatggtcaattttgaggcgtctgatggggaagagggagagggagatgctccattaccatatgataacaatgaagatgattatgttgggattggagaagatgattagagcctcaaccttcactttgcactttgcattatgtttttatcattttcttattttgaactctttaatgagtttatttggtgttggtacttgattattgcatgaactcatgaaacttttttagtttatttgaatgcaatcctttgtttttttcaatttcaatgagtttatatatatatatatatatatattttg

SEQ ID NO: 12802 - DNA, 1152 bp, Glycine max
  Gm_smallRNAprecursor_5635
ctaatttaggccaactaagtcatggttatttttgactgtgcaattgaaactgtttttggaggaatgttatatcattagaagaacacatgtggtggatatgagttttagatttaaaagtccaatcaaatattcaatccatattcaattaaagggattggatttacaatccaaaaatttggatttagatataaaatcaatccattaaaatgaatttaaggtagtttgggcaaggtggattatgcttgattttatataattggtttttttaacagccctagctctacattggcatctatgaacaattgtgctcacaaagtattttttttatttacttgagtgtattaaataattagtatttttactcccataaaaaaataaaggtataattacatttttggtctcctagtttatctctagttttagatttgatcccctaagaatttaatttacgaatcaggtcctcctattttaaaaaatcgtgcaaaattgacccctaggccacaattggacgttgaccgttagcaagtgatgttgactgtcacgtgtcacgttcttattggatgatggctgtcatgtgtcatgttctgattgaatgtcaactccatgaaagatgaaatgcattgttgttttcattgaccaatcagaacatggcacgtgacagtcaacatcacttgttaacggtcaacgtcgaattgtggcacgggggaccaacattgcacgattttacaaaatagaaggacctaattcgtgaattaaattactaggggaccaaatccaaaactggagataaactgagggaccaaaaatacaattttgccaaaaataaatattgccttttaaatatttaaaaaaaaagttatataagataaaagaaaaataaattaaattaatacttattttacccgcgttaagcttacacattttggttctttttatgacaaaattgtgcattttataaaattttataatatttttcgactatgaaaataattcaactattttccccaattaaaaaaatcttttagatccaccactgtccagagcctccagccattaagtcgttaactctttctgccatcaacaatattaatcatattcctccccttgtcaccttcttactttctacgtcttccatactgctatcatgggcct

SEQ ID NO: 12803 - DNA, 1035 bp, Glycine max
  Gm_smallRNAprecursor_5636
gaatccggaaacagcctctttgcatatgcaagggtaaggttgcgtacaatatccctcccccataccttcgcatagcgaagagcctctgggcaatggggtacgaagttttagaggacgaaccctggtacagcggtaaagttgtgccttggtgacttgttggtcatgggttcgaatccggaaacagcctctttgcatatgcaagggtaaggctgcgaagagcctccgggcaatggggtacaaagtttttttaaacttgtgatatgagagagcctaacaactacacactagttgtctgactttggctgcttgttgattgcttcttggctgggaattcacccttgttatctgctttaacgatgaatatagattttttcaatgtttactttactttaccctaaactgctctaaatttttcaatatctacatcataccttgcttaagttttcctagaactactgaactatggtcacaacctatgaagcacggacacttcagccctatgccgtgtccggtgtccgacacgcgtccgtgtcggtgtccgacaccgacacgacacccttattacgttctatattttggacattacaggtatccacgtgtccgtgtcgtgtcgtgtccggtgtccgtgtcggtgtcggtgcttcataggtcacaactcacaagtttatgttacaagacttttgagattgaaagatgtggtaacaaagtatagataattggtgaccataaaacaggaaatgatattgtatcttaggattggctgaggcatgcaaaatgcagagctgaagtaattttactatcacaggtaataggtaggatgcaatagcaaaagaacaaagatgttaattaatttgtttttgagtatttaacaaaaatgttaagacaatttcaggggtggaacctacaactttttgcttaggaaacaaatgctttatccactgagctacaggcgctaactgtcattaaagtttttatgcaaaataccatataacgtaatgatgaacgttaccacacattaacttcatccgacatttg

SEQ ID NO: 12804 - DNA, 1106 bp, Glycine max
  Gm_smallRNAprecursor_5637
gaatccggaaacagcctctttgcatatgcaagggtaaggttgcgtacaatatccctcccccataccttcgcatagcgaagagcctctgggcaatggggtacgaagttttagaggacgaaccctggtacagcggtaaagttgtgccttggtgacttgttggtcatgggttcgaatccggaaacagcctctttgcatatgcaagggtaaggctgcgaagagcctccgggcaatggggtacaaagtttttttaaacttgtgatatgagagagcctaacaactacacactagttgtctgactttggctgcttgttgattgcttcttggctgggaattcacccttgttatctgctttaacgatgaatatagattttttcaatgtttactttactttaccctaaactgctctaaatttttcaatatctacatcataccttgcttaagttttcctagaactactgaactatggtcacaacctatgaagcacggacacttcagccctatgccgtgtccggtgtccgacacgcgtccgtgtcggtgtccgacaccgacacgacacccttattacgttctatattttggacattacaggtatccacgtgtccgtgtcgtgtcgtgtccggtgtccgtgtcggtgtcggtgcttcataggtcacaactcacaagtttatgttacaagacttttgagattgaaagatgtggtaacaaagtatagataattggtgaccataaaacaggaaatgatattgtatcttaggattggctgaggcatgcaaaatgcagagctgaagtaattttactatcacaggtaataggtaggatgcaatagcaaaagaacaaagatgttaattaatttgtttttgagtatttaacaaaaatgttaagacaatttcaggggtggaacctacaactttttgcttaggaaacaaatgctttatccactgagctacaggcgctaactgtcattaaagtttttatgcaaaataccatataacgtaatgatgaacgttaccacacattaacttcatccgacatttgatatgtatgaaaatattatgaaaaatattatctgatactatcatataagattttgattaattaggttaatt

SEQ ID NO: 12805 - DNA, 1106 bp, Glycine max; identical to SEQ ID NO: 12804
  Gm_smallRNAprecursor_5638

SEQ ID NO: 12806 - DNA, 1106 bp, Glycine max; identical to SEQ ID NO: 12804
  Gm_smallRNAprecursor_5639

SEQ ID NO: 12807 - DNA, 1111 bp, Glycine max
  Gm_smallRNAprecursor_5640
gaatccggaaacagcctctttgcatatgcaagggtaaggttgcgtacaatatccctcccccataccttcgcatagcgaagagcctctgggcaatggggtacgaagttttagaggacgaaccctggtacagcggtaaagttgtgccttggtgacttgttggtcatgggttcgaatccggaaacagcctctttgcatatgcaagggtaaggctgcgaagagcctccgggcaatggggtacaaagtttttttaaacttgtgatatgagagagcctaacaactacacactagttgtctgactttggctgcttgttgattgcttcttggctgggaattcacccttgttatctgctttaacgatgaatatagattttttcaatgtttactttactttaccctaaactgctctaaatttttcaatatctacatcataccttgcttaagttttcctagaactactgaactatggtcacaacctatgaagcacggacacttcagccctatgccgtgtccggtgtccgacacgcgtccgtgtcggtgtccgacaccgacacgacacccttattacgttctatattttggacattacaggtatccacgtgtccgtgtcgtgtcgtgtccggtgtccgtgtcggtgtcggtgcttcataggtcacaactcacaagtttatgttacaagacttttgagattgaaagatgtggtaacaaagtatagataattggtgaccataaaacaggaaatgatattgtatcttaggattggctgaggcatgcaaaatgcagagctgaagtaattttactatcacaggtaataggtaggatgcaatagcaaaagaacaaagatgttaattaatttgtttttgagtatttaacaaaaatgttaagacaatttcaggggtggaacctacaactttttgcttaggaaacaaatgctttatccactgagctacaggcgctaactgtcattaaagtttttatgcaaaataccatataacgtaatgatgaacgttaccacacattaacttcatccgacatttgatatgtatgaaaatattatgaaaaatattatctgatactatcatataagattttgattaattaggttaattagata

SEQ ID NO: 12808 - DNA, 1111 bp, Glycine max; identical to SEQ ID NO: 12807
  Gm_smallRNAprecursor_5641

SEQ ID NO: 12809 - DNA, 1111 bp, Glycine max; identical to SEQ ID NO: 12807
  Gm_smallRNAprecursor_5642

SEQ ID NO: 12810 - DNA, 1111 bp, Glycine max; identical to SEQ ID NO: 12807
  Gm_smallRNAprecursor_5643

SEQ ID NO: 12811 - DNA, 1112 bp, Glycine max
  Gm_smallRNAprecursor_5644
gaatccggaaacagcctctttgcatatgcaagggtaaggttgcgtacaatatccctcccccataccttcgcatagcgaagagcctctgggcaatggggtacgaagttttagaggacgaaccctggtacagcggtaaagttgtgccttggtgacttgttggtcatgggttcgaatccggaaacagcctctttgcatatgcaagggtaaggctgcgaagagcctccgggcaatggggtacaaagtttttttaaacttgtgatatgagagagcctaacaactacacactagttgtctgactttggctgcttgttgattgcttcttggctgggaattcacccttgttatctgctttaacgatgaatatagattttttcaatgtttactttactttaccctaaactgctctaaatttttcaatatctacatcataccttgcttaagttttcctagaactactgaactatggtcacaacctatgaagcacggacacttcagccctatgccgtgtccggtgtccgacacgcgtccgtgtcggtgtccgacaccgacacgacacccttattacgttctatattttggacattacaggtatccacgtgtccgtgtcgtgtcgtgtccggtgtccgtgtcggtgtcggtgcttcataggtcacaactcacaagtttatgttacaagacttttgagattgaaagatgtggtaacaaagtatagataattggtgaccataaaacaggaaatgatattgtatcttaggattggctgaggcatgcaaaatgcagagctgaagtaattttactatcacaggtaataggtaggatgcaatagcaaaagaacaaagatgttaattaatttgtttttgagtatttaacaaaaatgttaagacaatttcaggggtggaacctacaactttttgcttaggaaacaaatgctttatccactgagctacaggcgctaactgtcattaaagtttttatgcaaaataccatataacgtaatgatgaacgttaccacacattaacttcatccgacatttgatatgtatgaaaatattatgaaaaatattatctgatactatcatataagattttgattaattaggttaattagatat

SEQ ID NO: 12812 - DNA, 1112 bp, Glycine max; identical to SEQ ID NO: 12811
  Gm_smallRNAprecursor_5645

SEQ ID NO: 12813 - DNA, 1113 bp, Glycine max
  Gm_smallRNAprecursor_5646
gaatccggaaacagcctctttgcatatgcaagggtaaggttgcgtacaatatccctcccccataccttcgcatagcgaagagcctctgggcaatggggtacgaagttttagaggacgaaccctggtacagcggtaaagttgtgccttggtgacttgttggtcatgggttcgaatccggaaacagcctctttgcatatgcaagggtaaggctgcgaagagcctccgggcaatggggtacaaagtttttttaaacttgtgatatgagagagcctaacaactacacactagttgtctgactttggctgcttgttgattgcttcttggctgggaattcacccttgttatctgctttaacgatgaatatagattttttcaatgtttactttactttaccctaaactgctctaaatttttcaatatctacatcataccttgcttaagttttcctagaactactgaactatggtcacaacctatgaagcacggacacttcagccctatgccgtgtccggtgtccgacacgcgtccgtgtcggtgtccgacaccgacacgacacccttattacgttctatattttggacattacaggtatccacgtgtccgtgtcgtgtcgtgtccggtgtccgtgtcggtgtcggtgcttcataggtcacaactcacaagtttatgttacaagacttttgagattgaaagatgtggtaacaaagtatagataattggtgaccataaaacaggaaatgatattgtatcttaggattggctgaggcatgcaaaatgcagagctgaagtaattttactatcacaggtaataggtaggatgcaatagcaaaagaacaaagatgttaattaatttgtttttgagtatttaacaaaaatgttaagacaatttcaggggtggaacctacaactttttgcttaggaaacaaatgctttatccactgagctacaggcgctaactgtcattaaagtttttatgcaaaataccatataacgtaatgatgaacgttaccacacattaacttcatccgacatttgatatgtatgaaaatattatgaaaaatattatctgatactatcatataagattttgattaattaggttaattagatatg

SEQ ID NO: 12814 - DNA, 1117 bp, Glycine max
  Gm_smallRNAprecursor_5647
gaatccggaaacagcctctttgcatatgcaagggtaaggttgcgtacaatatccctcccccataccttcgcatagcgaagagcctctgggcaatggggtacgaagttttagaggacgaaccctggtacagcggtaaagttgtgccttggtgacttgttggtcatgggttcgaatccggaaacagcctctttgcatatgcaagggtaaggctgcgaagagcctccgggcaatggggtacaaagtttttttaaacttgtgatatgagagagcctaacaactacacactagttgtctgactttggctgcttgttgattgcttcttggctgggaattcacccttgttatctgctttaacgatgaatatagattttttcaatgtttactttactttaccctaaactgctctaaatttttcaatatctacatcataccttgcttaagttttcctagaactactgaactatggtcacaacctatgaagcacggacacttcagccctatgccgtgtccggtgtccgacacgcgtccgtgtcggtgtccgacaccgacacgacacccttattacgttctatattttggacattacaggtatccacgtgtccgtgtcgtgtcgtgtccggtgtccgtgtcggtgtcggtgcttcataggtcacaactcacaagtttatgttacaagacttttgagattgaaagatgtggtaacaaagtatagataattggtgaccataaaacaggaaatgatattgtatcttaggattggctgaggcatgcaaaatgcagagctgaagtaattttactatcacaggtaataggtaggatgcaatagcaaaagaacaaagatgttaattaatttgtttttgagtatttaacaaaaatgttaagacaatttcaggggtggaacctacaactttttgcttaggaaacaaatgctttatccactgagctacaggcgctaactgtcattaaagtttttatgcaaaataccatataacgtaatgatgaacgttaccacacattaacttcatccgacatttgatatgtatgaaaatattatgaaaaatattatctgatactatcatataagattttgattaattaggttaattagatatgacaa

SEQ ID NO: 12815 - DNA, 1117 bp, Glycine max; identical to SEQ ID NO: 12814
  Gm_smallRNAprecursor_5648

SEQ ID NO: 12816 - DNA, 1118 bp, Glycine max
  Gm_smallRNAprecursor_5649
gaatccggaaacagcctctttgcatatgcaagggtaaggttgcgtacaatatccctcccccataccttcgcatagcgaagagcctctgggcaatggggtacgaagttttagaggacgaaccctggtacagcggtaaagttgtgccttggtgacttgttggtcatgggttcgaatccggaaacagcctctttgcatatgcaagggtaaggctgcgaagagcctccgggcaatggggtacaaagtttttttaaacttgtgatatgagagagcctaacaactacacactagttgtctgactttggctgcttgttgattgcttcttggctgggaattcacccttgttatctgctttaacgatgaatatagattttttcaatgtttactttactttaccctaaactgctctaaatttttcaatatctacatcataccttgcttaagttttcctagaactactgaactatggtcacaacctatgaagcacggacacttcagccctatgccgtgtccggtgtccgacacgcgtccgtgtcggtgtccgacaccgacacgacacccttattacgttctatattttggacattacaggtatccacgtgtccgtgtcgtgtcgtgtccggtgtccgtgtcggtgtcggtgcttcataggtcacaactcacaagtttatgttacaagacttttgagattgaaagatgtggtaacaaagtatagataattggtgaccataaaacaggaaatgatattgtatcttaggattggctgaggcatgcaaaatgcagagctgaagtaattttactatcacaggtaataggtaggatgcaatagcaaaagaacaaagatgttaattaatttgtttttgagtatttaacaaaaatgttaagacaatttcaggggtggaacctacaactttttgcttaggaaacaaatgctttatccactgagctacaggcgctaactgtcattaaagtttttatgcaaaataccatataacgtaatgatgaacgttaccacacattaacttcatccgacatttgatatgtatgaaaatattatgaaaaatattatctgatactatcatataagattttgattaattaggttaattagatatgacaaa

SEQ ID NO: 12817 - DNA, 1118 bp, Glycine max; identical to SEQ ID NO: 12816
  Gm_smallRNAprecursor_5650

SEQ ID NO: 12818 - DNA, 1118 bp, Glycine max; identical to SEQ ID NO: 12816
  Gm_smallRNAprecursor_5651

SEQ ID NO: 12819 - DNA, 1105 bp, Glycine max
  Gm_smallRNAprecursor_5652
aatccggaaacagcctctttgcatatgcaagggtaaggttgcgtacaatatccctcccccataccttcgcatagcgaagagcctctgggcaatggggtacgaagttttagaggacgaaccctggtacagcggtaaagttgtgccttggtgacttgttggtcatgggttcgaatccggaaacagcctctttgcatatgcaagggtaaggctgcgaagagcctccgggcaatggggtacaaagtttttttaaacttgtgatatgagagagcctaacaactacacactagttgtctgactttggctgcttgttgattgcttcttggctgggaattcacccttgttatctgctttaacgatgaatatagattttttcaatgtttactttactttaccctaaactgctctaaatttttcaatatctacatcataccttgcttaagttttcctagaactactgaactatggtcacaacctatgaagcacggacacttcagccctatgccgtgtccggtgtccgacacgcgtccgtgtcggtgtccgacaccgacacgacacccttattacgttctatattttggacattacaggtatccacgtgtccgtgtcgtgtcgtgtccggtgtccgtgtcggtgtcggtgcttcataggtcacaactcacaagtttatgttacaagacttttgagattgaaagatgtggtaacaaagtatagataattggtgaccataaaacaggaaatgatattgtatcttaggattggctgaggcatgcaaaatgcagagctgaagtaattttactatcacaggtaataggtaggatgcaatagcaaaagaacaaagatgttaattaatttgtttttgagtatttaacaaaaatgttaagacaatttcaggggtggaacctacaactttttgcttaggaaacaaatgctttatccactgagctacaggcgctaactgtcattaaagtttttatgcaaaataccatataacgtaatgatgaacgttaccacacattaacttcatccgacatttgatatgtatgaaaatattatgaaaaatattatctgatactatcatataagattttgattaattaggttaatt

SEQ ID NO: 12820 - DNA, 1109 bp, Glycine max
  Gm_smallRNAprecursor_5653
aatccggaaacagcctctttgcatatgcaagggtaaggttgcgtacaatatccctcccccataccttcgcatagcgaagagcctctgggcaatggggtacgaagttttagaggacgaaccctggtacagcggtaaagttgtgccttggtgacttgttggtcatgggttcgaatccggaaacagcctctttgcatatgcaagggtaaggctgcgaagagcctccgggcaatggggtacaaagtttttttaaacttgtgatatgagagagcctaacaactacacactagttgtctgactttggctgcttgttgattgcttcttggctgggaattcacccttgttatctgctttaacgatgaatatagattttttcaatgtttactttactttaccctaaactgctctaaatttttcaatatctacatcataccttgcttaagttttcctagaactactgaactatggtcacaacctatgaagcacggacacttcagccctatgccgtgtccggtgtccgacacgcgtccgtgtcggtgtccgacaccgacacgacacccttattacgttctatattttggacattacaggtatccacgtgtccgtgtcgtgtcgtgtccggtgtccgtgtcggtgtcggtgcttcataggtcacaactcacaagtttatgttacaagacttttgagattgaaagatgtggtaacaaagtatagataattggtgaccataaaacaggaaatgatattgtatcttaggattggctgaggcatgcaaaatgcagagctgaagtaattttactatcacaggtaataggtaggatgcaatagcaaaagaacaaagatgttaattaatttgtttttgagtatttaacaaaaatgttaagacaatttcaggggtggaacctacaactttttgcttaggaaacaaatgctttatccactgagctacaggcgctaactgtcattaaagtttttatgcaaaataccatataacgtaatgatgaacgttaccacacattaacttcatccgacatttgatatgtatgaaaatattatgaaaaatattatctgatactatcatataagattttgattaattaggttaattagat

SEQ ID NO: 12821 - DNA, 1110 bp, Glycine max
  Gm_smallRNAprecursor_5654
aatccggaaacagcctctttgcatatgcaagggtaaggttgcgtacaatatccctcccccataccttcgcatagcgaagagcctctgggcaatggggtacgaagttttagaggacgaaccctggtacagcggtaaagttgtgccttggtgacttgttggtcatgggttcgaatccggaaacagcctctttgcatatgcaagggtaaggctgcgaagagcctccgggcaatggggtacaaagtttttttaaacttgtgatatgagagagcctaacaactacacactagttgtctgactttggctgcttgttgattgcttcttggctgggaattcacccttgttatctgctttaacgatgaatatagattttttcaatgtttactttactttaccctaaactgctctaaatttttcaatatctacatcataccttgcttaagttttcctagaactactgaactatggtcacaacctatgaagcacggacacttcagccctatgccgtgtccggtgtccgacacgcgtccgtgtcggtgtccgacaccgacacgacacccttattacgttctatattttggacattacaggtatccacgtgtccgtgtcgtgtcgtgtccggtgtccgtgtcggtgtcggtgcttcataggtcacaactcacaagtttatgttacaagacttttgagattgaaagatgtggtaacaaagtatagataattggtgaccataaaacaggaaatgatattgtatcttaggattggctgaggcatgcaaaatgcagagctgaagtaattttactatcacaggtaataggtaggatgcaatagcaaaagaacaaagatgttaattaatttgtttttgagtatttaacaaaaatgttaagacaatttcaggggtggaacctacaactttttgcttaggaaacaaatgctttatccactgagctacaggcgctaactgtcattaaagtttttatgcaaaataccatataacgtaatgatgaacgttaccacacattaacttcatccgacatttgatatgtatgaaaatattatgaaaaatattatctgatactatcatataagattttgattaattaggttaattagata

SEQ ID NO: 12822 - DNA, 1110 bp, Glycine max; identical to SEQ ID NO: 12821
  Gm_smallRNAprecursor_5655

SEQ ID NO: 12823 - DNA, 1116 bp, Glycine max
  Gm_smallRNAprecursor_5656
aatccggaaacagcctctttgcatatgcaagggtaaggttgcgtacaatatccctcccccataccttcgcatagcgaagagcctctgggcaatggggtacgaagttttagaggacgaaccctggtacagcggtaaagttgtgccttggtgacttgttggtcatgggttcgaatccggaaacagcctctttgcatatgcaagggtaaggctgcgaagagcctccgggcaatggggtacaaagtttttttaaacttgtgatatgagagagcctaacaactacacactagttgtctgactttggctgcttgttgattgcttcttggctgggaattcacccttgttatctgctttaacgatgaatatagattttttcaatgtttactttactttaccctaaactgctctaaatttttcaatatctacatcataccttgcttaagttttcctagaactactgaactatggtcacaacctatgaagcacggacacttcagccctatgccgtgtccggtgtccgacacgcgtccgtgtcggtgtccgacaccgacacgacacccttattacgttctatattttggacattacaggtatccacgtgtccgtgtcgtgtcgtgtccggtgtccgtgtcggtgtcggtgcttcataggtcacaactcacaagtttatgttacaagacttttgagattgaaagatgtggtaacaaagtatagataattggtgaccataaaacaggaaatgatattgtatcttaggattggctgaggcatgcaaaatgcagagctgaagtaattttactatcacaggtaataggtaggatgcaatagcaaaagaacaaagatgttaattaatttgtttttgagtatttaacaaaaatgttaagacaatttcaggggtggaacctacaactttttgcttaggaaacaaatgctttatccactgagctacaggcgctaactgtcattaaagtttttatgcaaaataccatataacgtaatgatgaacgttaccacacattaacttcatccgacatttgatatgtatgaaaatattatgaaaaatattatctgatactatcatataagattttgattaattaggttaattagatatgacaa

SEQ ID NO: 12824 - DNA, 1117 bp, Glycine max
  Gm_smallRNAprecursor_5657
aatccggaaacagcctctttgcatatgcaagggtaaggttgcgtacaatatccctcccccataccttcgcatagcgaagagcctctgggcaatggggtacgaagttttagaggacgaaccctggtacagcggtaaagttgtgccttggtgacttgttggtcatgggttcgaatccggaaacagcctctttgcatatgcaagggtaaggctgcgaagagcctccgggcaatggggtacaaagtttttttaaacttgtgatatgagagagcctaacaactacacactagttgtctgactttggctgcttgttgattgcttcttggctgggaattcacccttgttatctgctttaacgatgaatatagattttttcaatgtttactttactttaccctaaactgctctaaatttttcaatatctacatcataccttgcttaagttttcctagaactactgaactatggtcacaacctatgaagcacggacacttcagccctatgccgtgtccggtgtccgacacgcgtccgtgtcggtgtccgacaccgacacgacacccttattacgttctatattttggacattacaggtatccacgtgtccgtgtcgtgtcgtgtccggtgtccgtgtcggtgtcggtgcttcataggtcacaactcacaagtttatgttacaagacttttgagattgaaagatgtggtaacaaagtatagataattggtgaccataaaacaggaaatgatattgtatcttaggattggctgaggcatgcaaaatgcagagctgaagtaattttactatcacaggtaataggtaggatgcaatagcaaaagaacaaagatgttaattaatttgtttttgagtatttaacaaaaatgttaagacaatttcaggggtggaacctacaactttttgcttaggaaacaaatgctttatccactgagctacaggcgctaactgtcattaaagtttttatgcaaaataccatataacgtaatgatgaacgttaccacacattaacttcatccgacatttgatatgtatgaaaatattatgaaaaatattatctgatactatcatataagattttgattaattaggttaattagatatgacaaa

SEQ ID NO: 12825 - DNA, 1112 bp, Glycine max
  Gm_smallRNAprecursor_5658
ggaaacagcctctttgcatatgcaagggtaaggttgcgtacaatatccctcccccataccttcgcatagcgaagagcctctgggcaatggggtacgaagttttagaggacgaaccctggtacagcggtaaagttgtgccttggtgacttgttggtcatgggttcgaatccggaaacagcctctttgcatatgcaagggtaaggctgcgaagagcctccgggcaatggggtacaaagtttttttaaacttgtgatatgagagagcctaacaactacacactagttgtctgactttggctgcttgttgattgcttcttggctgggaattcacccttgttatctgctttaacgatgaatatagattttttcaatgtttactttactttaccctaaactgctctaaatttttcaatatctacatcataccttgcttaagttttcctagaactactgaactatggtcacaacctatgaagcacggacacttcagccctatgccgtgtccggtgtccgacacgcgtccgtgtcggtgtccgacaccgacacgacacccttattacgttctatattttggacattacaggtatccacgtgtccgtgtcgtgtcgtgtccggtgtccgtgtcggtgtcggtgcttcataggtcacaactcacaagtttatgttacaagacttttgagattgaaagatgtggtaacaaagtatagataattggtgaccataaaacaggaaatgatattgtatcttaggattggctgaggcatgcaaaatgcagagctgaagtaattttactatcacaggtaataggtaggatgcaatagcaaaagaacaaagatgttaattaatttgtttttgagtatttaacaaaaatgttaagacaatttcaggggtggaacctacaactttttgcttaggaaacaaatgctttatccactgagctacaggcgctaactgtcattaaagtttttatgcaaaataccatataacgtaatgatgaacgttaccacacattaacttcatccgacatttgatatgtatgaaaatattatgaaaaatattatctgatactatcatataagattttgattaattaggttaattagatatgacaaa

SEQ ID NO: 12826 - DNA, 1111 bp, Glycine max
  Gm_smallRNAprecursor_5659
gaaacagcctctttgcatatgcaagggtaaggttgcgtacaatatccctcccccataccttcgcatagcgaagagcctctgggcaatggggtacgaagttttagaggacgaaccctggtacagcggtaaagttgtgccttggtgacttgttggtcatgggttcgaatccggaaacagcctctttgcatatgcaagggtaaggctgcgaagagcctccgggcaatggggtacaaagtttttttaaacttgtgatatgagagagcctaacaactacacactagttgtctgactttggctgcttgttgattgcttcttggctgggaattcacccttgttatctgctttaacgatgaatatagattttttcaatgtttactttactttaccctaaactgctctaaatttttcaatatctacatcataccttgcttaagttttcctagaactactgaactatggtcacaacctatgaagcacggacacttcagccctatgccgtgtccggtgtccgacacgcgtccgtgtcggtgtccgacaccgacacgacacccttattacgttctatattttggacattacaggtatccacgtgtccgtgtcgtgtcgtgtccggtgtccgtgtcggtgtcggtgcttcataggtcacaactcacaagtttatgttacaagacttttgagattgaaagatgtggtaacaaagtatagataattggtgaccataaaacaggaaatgatattgtatcttaggattggctgaggcatgcaaaatgcagagctgaagtaattttactatcacaggtaataggtaggatgcaatagcaaaagaacaaagatgttaattaatttgtttttgagtatttaacaaaaatgttaagacaatttcaggggtggaacctacaactttttgcttaggaaacaaatgctttatccactgagctacaggcgctaactgtcattaaagtttttatgcaaaataccatataacgtaatgatgaacgttaccacacattaacttcatccgacatttgatatgtatgaaaatattatgaaaaatattatctgatactatcatataagattttgattaattaggttaattagatatgacaaa

SEQ ID NO: 12827 - DNA, 1095 bp, Glycine max
  Gm_smallRNAprecursor_5660
cagcctctttgcatatgcaagggtaaggttgcgtacaatatccctcccccataccttcgcatagcgaagagcctctgggcaatggggtacgaagttttagaggacgaaccctggtacagcggtaaagttgtgccttggtgacttgttggtcatgggttcgaatccggaaacagcctctttgcatatgcaagggtaaggctgcgaagagcctccgggcaatggggtacaaagtttttttaaacttgtgatatgagagagcctaacaactacacactagttgtctgactttggctgcttgttgattgcttcttggctgggaattcacccttgttatctgctttaacgatgaatatagattttttcaatgtttactttactttaccctaaactgctctaaatttttcaatatctacatcataccttgcttaagttttcctagaactactgaactatggtcacaacctatgaagcacggacacttcagccctatgccgtgtccggtgtccgacacgcgtccgtgtcggtgtccgacaccgacacgacacccttattacgttctatattttggacattacaggtatccacgtgtccgtgtcgtgtcgtgtccggtgtccgtgtcggtgtcggtgcttcataggtcacaactcacaagtttatgttacaagacttttgagattgaaagatgtggtaacaaagtatagataattggtgaccataaaacaggaaatgatattgtatcttaggattggctgaggcatgcaaaatgcagagctgaagtaattttactatcacaggtaataggtaggatgcaatagcaaaagaacaaagatgttaattaatttgtttttgagtatttaacaaaaatgttaagacaatttcaggggtggaacctacaactttttgcttaggaaacaaatgctttatccactgagctacaggcgctaactgtcattaaagtttttatgcaaaataccatataacgtaatgatgaacgttaccacacattaacttcatccgacatttgatatgtatgaaaatattatgaaaaatattatctgatactatcatataagattttgattaattaggttaatt

SEQ ID NO: 12828 - DNA, 1100 bp, Glycine max
  Gm_smallRNAprecursor_5661
cagcctctttgcatatgcaagggtaaggttgcgtacaatatccctcccccataccttcgcatagcgaagagcctctgggcaatggggtacgaagttttagaggacgaaccctggtacagcggtaaagttgtgccttggtgacttgttggtcatgggttcgaatccggaaacagcctctttgcatatgcaagggtaaggctgcgaagagcctccgggcaatggggtacaaagtttttttaaacttgtgatatgagagagcctaacaactacacactagttgtctgactttggctgcttgttgattgcttcttggctgggaattcacccttgttatctgctttaacgatgaatatagattttttcaatgtttactttactttaccctaaactgctctaaatttttcaatatctacatcataccttgcttaagttttcctagaactactgaactatggtcacaacctatgaagcacggacacttcagccctatgccgtgtccggtgtccgacacgcgtccgtgtcggtgtccgacaccgacacgacacccttattacgttctatattttggacattacaggtatccacgtgtccgtgtcgtgtcgtgtccggtgtccgtgtcggtgtcggtgcttcataggtcacaactcacaagtttatgttacaagacttttgagattgaaagatgtggtaacaaagtatagataattggtgaccataaaacaggaaatgatattgtatcttaggattggctgaggcatgcaaaatgcagagctgaagtaattttactatcacaggtaataggtaggatgcaatagcaaaagaacaaagatgttaattaatttgtttttgagtatttaacaaaaatgttaagacaatttcaggggtggaacctacaactttttgcttaggaaacaaatgctttatccactgagctacaggcgctaactgtcattaaagtttttatgcaaaataccatataacgtaatgatgaacgttaccacacattaacttcatccgacatttgatatgtatgaaaatattatgaaaaatattatctgatactatcatataagattttgattaattaggttaattagata

SEQ ID NO: 12829 - DNA, 1100 bp, Glycine max; identical to SEQ ID NO: 12828
  Gm_smallRNAprecursor_5662

SEQ ID NO: 12830 - DNA, 1101 bp, Glycine max
  Gm_smallRNAprecursor_5663
cagcctctttgcatatgcaagggtaaggttgcgtacaatatccctcccccataccttcgcatagcgaagagcctctgggcaatggggtacgaagttttagaggacgaaccctggtacagcggtaaagttgtgccttggtgacttgttggtcatgggttcgaatccggaaacagcctctttgcatatgcaagggtaaggctgcgaagagcctccgggcaatggggtacaaagtttttttaaacttgtgatatgagagagcctaacaactacacactagttgtctgactttggctgcttgttgattgcttcttggctgggaattcacccttgttatctgctttaacgatgaatatagattttttcaatgtttactttactttaccctaaactgctctaaatttttcaatatctacatcataccttgcttaagttttcctagaactactgaactatggtcacaacctatgaagcacggacacttcagccctatgccgtgtccggtgtccgacacgcgtccgtgtcggtgtccgacaccgacacgacacccttattacgttctatattttggacattacaggtatccacgtgtccgtgtcgtgtcgtgtccggtgtccgtgtcggtgtcggtgcttcataggtcacaactcacaagtttatgttacaagacttttgagattgaaagatgtggtaacaaagtatagataattggtgaccataaaacaggaaatgatattgtatcttaggattggctgaggcatgcaaaatgcagagctgaagtaattttactatcacaggtaataggtaggatgcaatagcaaaagaacaaagatgttaattaatttgtttttgagtatttaacaaaaatgttaagacaatttcaggggtggaacctacaactttttgcttaggaaacaaatgctttatccactgagctacaggcgctaactgtcattaaagtttttatgcaaaataccatataacgtaatgatgaacgttaccacacattaacttcatccgacatttgatatgtatgaaaatattatgaaaaatattatctgatactatcatataagattttgattaattaggttaattagatat

SEQ ID NO: 12831 - DNA, 1102 bp, Glycine max
  Gm_smallRNAprecursor_5664
cagcctctttgcatatgcaagggtaaggttgcgtacaatatccctcccccataccttcgcatagcgaagagcctctgggcaatggggtacgaagttttagaggacgaaccctggtacagcggtaaagttgtgccttggtgacttgttggtcatgggttcgaatccggaaacagcctctttgcatatgcaagggtaaggctgcgaagagcctccgggcaatggggtacaaagtttttttaaacttgtgatatgagagagcctaacaactacacactagttgtctgactttggctgcttgttgattgcttcttggctgggaattcacccttgttatctgctttaacgatgaatatagattttttcaatgtttactttactttaccctaaactgctctaaatttttcaatatctacatcataccttgcttaagttttcctagaactactgaactatggtcacaacctatgaagcacggacacttcagccctatgccgtgtccggtgtccgacacgcgtccgtgtcggtgtccgacaccgacacgacacccttattacgttctatattttggacattacaggtatccacgtgtccgtgtcgtgtcgtgtccggtgtccgtgtcggtgtcggtgcttcataggtcacaactcacaagtttatgttacaagacttttgagattgaaagatgtggtaacaaagtatagataattggtgaccataaaacaggaaatgatattgtatcttaggattggctgaggcatgcaaaatgcagagctgaagtaattttactatcacaggtaataggtaggatgcaatagcaaaagaacaaagatgttaattaatttgtttttgagtatttaacaaaaatgttaagacaatttcaggggtggaacctacaactttttgcttaggaaacaaatgctttatccactgagctacaggcgctaactgtcattaaagtttttatgcaaaataccatataacgtaatgatgaacgttaccacacattaacttcatccgacatttgatatgtatgaaaatattatgaaaaatattatctgatactatcatataagattttgattaattaggttaattagatatg

SEQ ID NO: 12832 - DNA, 1107 bp, Glycine max
  Gm_smallRNAprecursor_5665
cagcctctttgcatatgcaagggtaaggttgcgtacaatatccctcccccataccttcgcatagcgaagagcctctgggcaatggggtacgaagttttagaggacgaaccctggtacagcggtaaagttgtgccttggtgacttgttggtcatgggttcgaatccggaaacagcctctttgcatatgcaagggtaaggctgcgaagagcctccgggcaatggggtacaaagtttttttaaacttgtgatatgagagagcctaacaactacacactagttgtctgactttggctgcttgttgattgcttcttggctgggaattcacccttgttatctgctttaacgatgaatatagattttttcaatgtttactttactttaccctaaactgctctaaatttttcaatatctacatcataccttgcttaagttttcctagaactactgaactatggtcacaacctatgaagcacggacacttcagccctatgccgtgtccggtgtccgacacgcgtccgtgtcggtgtccgacaccgacacgacacccttattacgttctatattttggacattacaggtatccacgtgtccgtgtcgtgtcgtgtccggtgtccgtgtcggtgtcggtgcttcataggtcacaactcacaagtttatgttacaagacttttgagattgaaagatgtggtaacaaagtatagataattggtgaccataaaacaggaaatgatattgtatcttaggattggctgaggcatgcaaaatgcagagctgaagtaattttactatcacaggtaataggtaggatgcaatagcaaaagaacaaagatgttaattaatttgtttttgagtatttaacaaaaatgttaagacaatttcaggggtggaacctacaactttttgcttaggaaacaaatgctttatccactgagctacaggcgctaactgtcattaaagtttttatgcaaaataccatataacgtaatgatgaacgttaccacacattaacttcatccgacatttgatatgtatgaaaatattatgaaaaatattatctgatactatcatataagattttgattaattaggttaattagatatgacaaa

SEQ ID NO: 12833 - DNA, 1072 bp, Glycine max
  Gm_smallRNAprecursor_5666
taaggttgcgtacaatatccctcccccataccttcgcatagcgaagagcctctgggcaatggggtacgaagttttagaggacgaaccctggtacagcggtaaagttgtgccttggtgacttgttggtcatgggttcgaatccggaaacagcctctttgcatatgcaagggtaaggctgcgaagagcctccgggcaatggggtacaaagtttttttaaacttgtgatatgagagagcctaacaactacacactagttgtctgactttggctgcttgttgattgcttcttggctgggaattcacccttgttatctgctttaacgatgaatatagattttttcaatgtttactttactttaccctaaactgctctaaatttttcaatatctacatcataccttgcttaagttttcctagaactactgaactatggtcacaacctatgaagcacggacacttcagccctatgccgtgtccggtgtccgacacgcgtccgtgtcggtgtccgacaccgacacgacacccttattacgttctatattttggacattacaggtatccacgtgtccgtgtcgtgtcgtgtccggtgtccgtgtcggtgtcggtgcttcataggtcacaactcacaagtttatgttacaagacttttgagattgaaagatgtggtaacaaagtatagataattggtgaccataaaacaggaaatgatattgtatcttaggattggctgaggcatgcaaaatgcagagctgaagtaattttactatcacaggtaataggtaggatgcaatagcaaaagaacaaagatgttaattaatttgtttttgagtatttaacaaaaatgttaagacaatttcaggggtggaacctacaactttttgcttaggaaacaaatgctttatccactgagctacaggcgctaactgtcattaaagtttttatgcaaaataccatataacgtaatgatgaacgttaccacacattaacttcatccgacatttgatatgtatgaaaatattatgaaaaatattatctgatactatcatataagattttgattaattaggttaatt

SEQ ID NO: 12834 - DNA, 1077 bp, Glycine max
  Gm_smallRNAprecursor_5667
taaggttgcgtacaatatccctcccccataccttcgcatagcgaagagcctctgggcaatggggtacgaagttttagaggacgaaccctggtacagcggtaaagttgtgccttggtgacttgttggtcatgggttcgaatccggaaacagcctctttgcatatgcaagggtaaggctgcgaagagcctccgggcaatggggtacaaagtttttttaaacttgtgatatgagagagcctaacaactacacactagttgtctgactttggctgcttgttgattgcttcttggctgggaattcacccttgttatctgctttaacgatgaatatagattttttcaatgtttactttactttaccctaaactgctctaaatttttcaatatctacatcataccttgcttaagttttcctagaactactgaactatggtcacaacctatgaagcacggacacttcagccctatgccgtgtccggtgtccgacacgcgtccgtgtcggtgtccgacaccgacacgacacccttattacgttctatattttggacattacaggtatccacgtgtccgtgtcgtgtcgtgtccggtgtccgtgtcggtgtcggtgcttcataggtcacaactcacaagtttatgttacaagacttttgagattgaaagatgtggtaacaaagtatagataattggtgaccataaaacaggaaatgatattgtatcttaggattggctgaggcatgcaaaatgcagagctgaagtaattttactatcacaggtaataggtaggatgcaatagcaaaagaacaaagatgttaattaatttgtttttgagtatttaacaaaaatgttaagacaatttcaggggtggaacctacaactttttgcttaggaaacaaatgctttatccactgagctacaggcgctaactgtcattaaagtttttatgcaaaataccatataacgtaatgatgaacgttaccacacattaacttcatccgacatttgatatgtatgaaaatattatgaaaaatattatctgatactatcatataagattttgattaattaggttaattagata

SEQ ID NO: 12835 - DNA, 1077 bp, Glycine max; identical to SEQ ID NO: 12834
  Gm_smallRNAprecursor_5668

SEQ ID NO: 12836 - DNA, 1078 bp, Glycine max
  Gm_smallRNAprecursor_5669
taaggttgcgtacaatatccctcccccataccttcgcatagcgaagagcctctgggcaatggggtacgaagttttagaggacgaaccctggtacagcggtaaagttgtgccttggtgacttgttggtcatgggttcgaatccggaaacagcctctttgcatatgcaagggtaaggctgcgaagagcctccgggcaatggggtacaaagtttttttaaacttgtgatatgagagagcctaacaactacacactagttgtctgactttggctgcttgttgattgcttcttggctgggaattcacccttgttatctgctttaacgatgaatatagattttttcaatgtttactttactttaccctaaactgctctaaatttttcaatatctacatcataccttgcttaagttttcctagaactactgaactatggtcacaacctatgaagcacggacacttcagccctatgccgtgtccggtgtccgacacgcgtccgtgtcggtgtccgacaccgacacgacacccttattacgttctatattttggacattacaggtatccacgtgtccgtgtcgtgtcgtgtccggtgtccgtgtcggtgtcggtgcttcataggtcacaactcacaagtttatgttacaagacttttgagattgaaagatgtggtaacaaagtatagataattggtgaccataaaacaggaaatgatattgtatcttaggattggctgaggcatgcaaaatgcagagctgaagtaattttactatcacaggtaataggtaggatgcaatagcaaaagaacaaagatgttaattaatttgtttttgagtatttaacaaaaatgttaagacaatttcaggggtggaacctacaactttttgcttaggaaacaaatgctttatccactgagctacaggcgctaactgtcattaaagtttttatgcaaaataccatataacgtaatgatgaacgttaccacacattaacttcatccgacatttgatatgtatgaaaatattatgaaaaatattatctgatactatcatataagattttgattaattaggttaattagatat

SEQ ID NO: 12837 - DNA, 1084 bp, Glycine max
  Gm_smallRNAprecursor_5670
taaggttgcgtacaatatccctcccccataccttcgcatagcgaagagcctctgggcaatggggtacgaagttttagaggacgaaccctggtacagcggtaaagttgtgccttggtgacttgttggtcatgggttcgaatccggaaacagcctctttgcatatgcaagggtaaggctgcgaagagcctccgggcaatggggtacaaagtttttttaaacttgtgatatgagagagcctaacaactacacactagttgtctgactttggctgcttgttgattgcttcttggctgggaattcacccttgttatctgctttaacgatgaatatagattttttcaatgtttactttactttaccctaaactgctctaaatttttcaatatctacatcataccttgcttaagttttcctagaactactgaactatggtcacaacctatgaagcacggacacttcagccctatgccgtgtccggtgtccgacacgcgtccgtgtcggtgtccgacaccgacacgacacccttattacgttctatattttggacattacaggtatccacgtgtccgtgtcgtgtcgtgtccggtgtccgtgtcggtgtcggtgcttcataggtcacaactcacaagtttatgttacaagacttttgagattgaaagatgtggtaacaaagtatagataattggtgaccataaaacaggaaatgatattgtatcttaggattggctgaggcatgcaaaatgcagagctgaagtaattttactatcacaggtaataggtaggatgcaatagcaaaagaacaaagatgttaattaatttgtttttgagtatttaacaaaaatgttaagacaatttcaggggtggaacctacaactttttgcttaggaaacaaatgctttatccactgagctacaggcgctaactgtcattaaagtttttatgcaaaataccatataacgtaatgatgaacgttaccacacattaacttcatccgacatttgatatgtatgaaaatattatgaaaaatattatctgatactatcatataagattttgattaattaggttaattagatatgacaaa

SEQ ID NO: 12838 - DNA, 1071 bp, Glycine max
  Gm_smallRNAprecursor_5671
aaggttgcgtacaatatccctcccccataccttcgcatagcgaagagcctctgggcaatggggtacgaagttttagaggacgaaccctggtacagcggtaaagttgtgccttggtgacttgttggtcatgggttcgaatccggaaacagcctctttgcatatgcaagggtaaggctgcgaagagcctccgggcaatggggtacaaagtttttttaaacttgtgatatgagagagcctaacaactacacactagttgtctgactttggctgcttgttgattgcttcttggctgggaattcacccttgttatctgctttaacgatgaatatagattttttcaatgtttactttactttaccctaaactgctctaaatttttcaatatctacatcataccttgcttaagttttcctagaactactgaactatggtcacaacctatgaagcacggacacttcagccctatgccgtgtccggtgtccgacacgcgtccgtgtcggtgtccgacaccgacacgacacccttattacgttctatattttggacattacaggtatccacgtgtccgtgtcgtgtcgtgtccggtgtccgtgtcggtgtcggtgcttcataggtcacaactcacaagtttatgttacaagacttttgagattgaaagatgtggtaacaaagtatagataattggtgaccataaaacaggaaatgatattgtatcttaggattggctgaggcatgcaaaatgcagagctgaagtaattttactatcacaggtaataggtaggatgcaatagcaaaagaacaaagatgttaattaatttgtttttgagtatttaacaaaaatgttaagacaatttcaggggtggaacctacaactttttgcttaggaaacaaatgctttatccactgagctacaggcgctaactgtcattaaagtttttatgcaaaataccatataacgtaatgatgaacgttaccacacattaacttcatccgacatttgatatgtatgaaaatattatgaaaaatattatctgatactatcatataagattttgattaattaggttaatt

SEQ ID NO: 12839 - DNA, 1075 bp, Glycine max
  Gm_smallRNAprecursor_5672
aaggttgcgtacaatatccctcccccataccttcgcatagcgaagagcctctgggcaatggggtacgaagttttagaggacgaaccctggtacagcggtaaagttgtgccttggtgacttgttggtcatgggttcgaatccggaaacagcctctttgcatatgcaagggtaaggctgcgaagagcctccgggcaatggggtacaaagtttttttaaacttgtgatatgagagagcctaacaactacacactagttgtctgactttggctgcttgttgattgcttcttggctgggaattcacccttgttatctgctttaacgatgaatatagattttttcaatgtttactttactttaccctaaactgctctaaatttttcaatatctacatcataccttgcttaagttttcctagaactactgaactatggtcacaacctatgaagcacggacacttcagccctatgccgtgtccggtgtccgacacgcgtccgtgtcggtgtccgacaccgacacgacacccttattacgttctatattttggacattacaggtatccacgtgtccgtgtcgtgtcgtgtccggtgtccgtgtcggtgtcggtgcttcataggtcacaactcacaagtttatgttacaagacttttgagattgaaagatgtggtaacaaagtatagataattggtgaccataaaacaggaaatgatattgtatcttaggattggctgaggcatgcaaaatgcagagctgaagtaattttactatcacaggtaataggtaggatgcaatagcaaaagaacaaagatgttaattaatttgtttttgagtatttaacaaaaatgttaagacaatttcaggggtggaacctacaactttttgcttaggaaacaaatgctttatccactgagctacaggcgctaactgtcattaaagtttttatgcaaaataccatataacgtaatgatgaacgttaccacacattaacttcatccgacatttgatatgtatgaaaatattatgaaaaatattatctgatactatcatataagattttgattaattaggttaattagat

SEQ ID NO: 12840 - DNA, 1076 bp, Glycine max
  Gm_smallRNAprecursor_5673
aaggttgcgtacaatatccctcccccataccttcgcatagcgaagagcctctgggcaatggggtacgaagttttagaggacgaaccctggtacagcggtaaagttgtgccttggtgacttgttggtcatgggttcgaatccggaaacagcctctttgcatatgcaagggtaaggctgcgaagagcctccgggcaatggggtacaaagtttttttaaacttgtgatatgagagagcctaacaactacacactagttgtctgactttggctgcttgttgattgcttcttggctgggaattcacccttgttatctgctttaacgatgaatatagattttttcaatgtttactttactttaccctaaactgctctaaatttttcaatatctacatcataccttgcttaagttttcctagaactactgaactatggtcacaacctatgaagcacggacacttcagccctatgccgtgtccggtgtccgacacgcgtccgtgtcggtgtccgacaccgacacgacacccttattacgttctatattttggacattacaggtatccacgtgtccgtgtcgtgtcgtgtccggtgtccgtgtcggtgtcggtgcttcataggtcacaactcacaagtttatgttacaagacttttgagattgaaagatgtggtaacaaagtatagataattggtgaccataaaacaggaaatgatattgtatcttaggattggctgaggcatgcaaaatgcagagctgaagtaattttactatcacaggtaataggtaggatgcaatagcaaaagaacaaagatgttaattaatttgtttttgagtatttaacaaaaatgttaagacaatttcaggggtggaacctacaactttttgcttaggaaacaaatgctttatccactgagctacaggcgctaactgtcattaaagtttttatgcaaaataccatataacgtaatgatgaacgttaccacacattaacttcatccgacatttgatatgtatgaaaatattatgaaaaatattatctgatactatcatataagattttgattaattaggttaattagata

SEQ ID NO: 12841 - DNA, 1076 bp, Glycine max; identical to SEQ ID NO: 12840
  Gm_smallRNAprecursor_5674

SEQ ID NO: 12842 - DNA, 1082 bp, Glycine max
  Gm_smallRNAprecursor_5675
aaggttgcgtacaatatccctcccccataccttcgcatagcgaagagcctctgggcaatggggtacgaagttttagaggacgaaccctggtacagcggtaaagttgtgccttggtgacttgttggtcatgggttcgaatccggaaacagcctctttgcatatgcaagggtaaggctgcgaagagcctccgggcaatggggtacaaagtttttttaaacttgtgatatgagagagcctaacaactacacactagttgtctgactttggctgcttgttgattgcttcttggctgggaattcacccttgttatctgctttaacgatgaatatagattttttcaatgtttactttactttaccctaaactgctctaaatttttcaatatctacatcataccttgcttaagttttcctagaactactgaactatggtcacaacctatgaagcacggacacttcagccctatgccgtgtccggtgtccgacacgcgtccgtgtcggtgtccgacaccgacacgacacccttattacgttctatattttggacattacaggtatccacgtgtccgtgtcgtgtcgtgtccggtgtccgtgtcggtgtcggtgcttcataggtcacaactcacaagtttatgttacaagacttttgagattgaaagatgtggtaacaaagtatagataattggtgaccataaaacaggaaatgatattgtatcttaggattggctgaggcatgcaaaatgcagagctgaagtaattttactatcacaggtaataggtaggatgcaatagcaaaagaacaaagatgttaattaatttgtttttgagtatttaacaaaaatgttaagacaatttcaggggtggaacctacaactttttgcttaggaaacaaatgctttatccactgagctacaggcgctaactgtcattaaagtttttatgcaaaataccatataacgtaatgatgaacgttaccacacattaacttcatccgacatttgatatgtatgaaaatattatgaaaaatattatctgatactatcatataagattttgattaattaggttaattagatatgacaa

SEQ ID NO: 12843 - DNA, 1083 bp, Glycine max
  Gm_smallRNAprecursor_5676
aaggttgcgtacaatatccctcccccataccttcgcatagcgaagagcctctgggcaatggggtacgaagttttagaggacgaaccctggtacagcggtaaagttgtgccttggtgacttgttggtcatgggttcgaatccggaaacagcctctttgcatatgcaagggtaaggctgcgaagagcctccgggcaatggggtacaaagtttttttaaacttgtgatatgagagagcctaacaactacacactagttgtctgactttggctgcttgttgattgcttcttggctgggaattcacccttgttatctgctttaacgatgaatatagattttttcaatgtttactttactttaccctaaactgctctaaatttttcaatatctacatcataccttgcttaagttttcctagaactactgaactatggtcacaacctatgaagcacggacacttcagccctatgccgtgtccggtgtccgacacgcgtccgtgtcggtgtccgacaccgacacgacacccttattacgttctatattttggacattacaggtatccacgtgtccgtgtcgtgtcgtgtccggtgtccgtgtcggtgtcggtgcttcataggtcacaactcacaagtttatgttacaagacttttgagattgaaagatgtggtaacaaagtatagataattggtgaccataaaacaggaaatgatattgtatcttaggattggctgaggcatgcaaaatgcagagctgaagtaattttactatcacaggtaataggtaggatgcaatagcaaaagaacaaagatgttaattaatttgtttttgagtatttaacaaaaatgttaagacaatttcaggggtggaacctacaactttttgcttaggaaacaaatgctttatccactgagctacaggcgctaactgtcattaaagtttttatgcaaaataccatataacgtaatgatgaacgttaccacacattaacttcatccgacatttgatatgtatgaaaatattatgaaaaatattatctgatactatcatataagattttgattaattaggttaattagatatgacaaa

SEQ ID NO: 12844 - DNA, 1081 bp, Glycine max
  Gm_smallRNAprecursor_5677
aggttgcgtacaatatccctcccccataccttcgcatagcgaagagcctctgggcaatggggtacgaagttttagaggacgaaccctggtacagcggtaaagttgtgccttggtgacttgttggtcatgggttcgaatccggaaacagcctctttgcatatgcaagggtaaggctgcgaagagcctccgggcaatggggtacaaagtttttttaaacttgtgatatgagagagcctaacaactacacactagttgtctgactttggctgcttgttgattgcttcttggctgggaattcacccttgttatctgctttaacgatgaatatagattttttcaatgtttactttactttaccctaaactgctctaaatttttcaatatctacatcataccttgcttaagttttcctagaactactgaactatggtcacaacctatgaagcacggacacttcagccctatgccgtgtccggtgtccgacacgcgtccgtgtcggtgtccgacaccgacacgacacccttattacgttctatattttggacattacaggtatccacgtgtccgtgtcgtgtcgtgtccggtgtccgtgtcggtgtcggtgcttcataggtcacaactcacaagtttatgttacaagacttttgagattgaaagatgtggtaacaaagtatagataattggtgaccataaaacaggaaatgatattgtatcttaggattggctgaggcatgcaaaatgcagagctgaagtaattttactatcacaggtaataggtaggatgcaatagcaaaagaacaaagatgttaattaatttgtttttgagtatttaacaaaaatgttaagacaatttcaggggtggaacctacaactttttgcttaggaaacaaatgctttatccactgagctacaggcgctaactgtcattaaagtttttatgcaaaataccatataacgtaatgatgaacgttaccacacattaacttcatccgacatttgatatgtatgaaaatattatgaaaaatattatctgatactatcatataagattttgattaattaggttaattagatatgacaa

SEQ ID NO: 12845 - DNA, 1080 bp, Glycine max
  Gm_smallRNAprecursor_5678
ggttgcgtacaatatccctcccccataccttcgcatagcgaagagcctctgggcaatggggtacgaagttttagaggacgaaccctggtacagcggtaaagttgtgccttggtgacttgttggtcatgggttcgaatccggaaacagcctctttgcatatgcaagggtaaggctgcgaagagcctccgggcaatggggtacaaagtttttttaaacttgtgatatgagagagcctaacaactacacactagttgtctgactttggctgcttgttgattgcttcttggctgggaattcacccttgttatctgctttaacgatgaatatagattttttcaatgtttactttactttaccctaaactgctctaaatttttcaatatctacatcataccttgcttaagttttcctagaactactgaactatggtcacaacctatgaagcacggacacttcagccctatgccgtgtccggtgtccgacacgcgtccgtgtcggtgtccgacaccgacacgacacccttattacgttctatattttggacattacaggtatccacgtgtccgtgtcgtgtcgtgtccggtgtccgtgtcggtgtcggtgcttcataggtcacaactcacaagtttatgttacaagacttttgagattgaaagatgtggtaacaaagtatagataattggtgaccataaaacaggaaatgatattgtatcttaggattggctgaggcatgcaaaatgcagagctgaagtaattttactatcacaggtaataggtaggatgcaatagcaaaagaacaaagatgttaattaatttgtttttgagtatttaacaaaaatgttaagacaatttcaggggtggaacctacaactttttgcttaggaaacaaatgctttatccactgagctacaggcgctaactgtcattaaagtttttatgcaaaataccatataacgtaatgatgaacgttaccacacattaacttcatccgacatttgatatgtatgaaaatattatgaaaaatattatctgatactatcatataagattttgattaattaggttaattagatatgacaa

SEQ ID NO: 12846 - DNA, 1127 bp, Glycine max
  Gm_smallRNAprecursor_5679
attaattctgggtataaatctggaaacagttgatagggaaaaggaagcaagtaggtttacagaacataattaatatcattcaaacattaattctgactaagggtgctgtgccagctagctagctgagttagaaactcattctacctttgtcaaaatttgaacgttaattacggattggattccaccctccgtgcgtacatggatctagatctgcataggaactgtgtctgtgtgcgtgtgtatctatataccacaaaaaatagcacatgttgtagtacattaagaaggagatatggatcatatatagaagagctcaaggagcaaaatggaccgtacatgtatattcaaattcaaagaagaggcaatgatatgtcttaccctttataataaaaaacttggaagcacaagcagctgcaacaacagaagctagccactgaacgcaaacaaatagcttgagtatataaagttaaaccatggccaataatccaatatggcattcacctgcagatgcacctgcacctcgttctcggtccctctattcccatattatataataatatattgatctcttcagtcctcaactgacatagttatattatttatatgtcacagagaaactgagtacttaaagtgcaggtgcaaatgcagataaaggcaacatatcggcatcaacgtatataataatgaccagctgctatataatatagcaagctaagtatatagctagtaagaagtttgctcgcaagccaacacttttataataggaaattcctgttgaaagggattatgagagagagagcaagagagggctgagagtgattcactcaaagattttggaccaattcttgtagagacataatctatctagataaatggcatatgtccttcctcctataaaataatgataatattcacaccagacgcttgtgcttattttatcttcttttttttcgttttgagtgtattttagtcattttggtaaaaccaaatgtgaggcacaaagaatagaaattctataagcttgtcaacatataacatgttggatagataattttttattattaatggatagataattttatcttttaagtacatgataatgtattcaattattgatttatatgtat

SEQ ID NO: 12847 - DNA, 1093 bp, Glycine max
  Gm_smallRNAprecursor_5680
gataaagtgatgtttcaatatatattaagaaacctgaaaagacaccatttttcgagcattttctgttgaaaaggaatactcatagatctgtgaagtcagcacataaaggacctaacagccgctccactcagcctccaaaatccaaatagccaatgttcgataacctaggattgtctgcaaatgcaaaagggctaattagtgtacaataataatatttaaaaagaatgaagaagcatagacaataaggccatccattaatgtgaataaataaaaatttgtcactgcaaattgcaaacaaaagatatataaaagccacctgacaacaacagaaaggaaagcagcacaaagaatcacctgtcttgttatgcatcatgatctcatggacagtatctggaagtctgagctgtgtgtagacctacacacactttttttttatctcctctcttttattggggggttcaactagtacttgttcaactttttaaagccgtttatggctgatgcagcatcatcaagattctcacatcaaaaagaccgatggattggcagagcacttggattgcatcatagtcccacccaccttcatttgcatgtgaatcttgatgatgctacatccgcaaacaacgactgtcaatctgtccatgcaactatagctgctgacaaagaaaggtacatatacacatatgcgcatatatatttagaagcttgcattattaccaaacttagtgaaacttatataggggtaaaaagacttataggttactcagagtgaagaccaattaatgtcacggaaaattgtctagagaaaaaataaaataaaaagaaggggggaacaacatcaaacagagagaaagcaaagagcgggtaaaaaatagaaaagaaagaggggacacggaaaattgagattttatgtggaattttagcagcaaggccacgaggagtagctgatgtggcttgttgccagtggttagtgtatgtttggcacacgaggccagttggggtacccaaatggaatctaaccacatgaactcaattcatacctcaagaacaaaagaaaagccaaaaccccaattaaaaaaaagaaaaaaaaaac

SEQ ID NO: 12848 - DNA, 1078 bp, Glycine max
  Gm_smallRNAprecursor_5681
attcaaaatcaaaagagacataaatgtaaaaatcagttaaaaaataagcctaatgaacaattttaaaaaaatatgattagattttcagttttataactattcatgatatttatttttcatataatttttttatcattatgtcatttttttatgaacattaattggttctcataatttttatgtagatgggatgaagttaatgagataaattttacattttacattttaaattgataaaaaaaaatttaaactatctccgaaaataaaaaacgataaggtccaaataaaataaaataaattgttctttttcatagtctttaaggtgtgctgggatatgagatttaaacatgtgttgttctattcagactcaaaaacacacaaggccttcacctatctatcatctttagagtgttgctaggtgcaccaaatattattgttgatgcacccagcattttttgaaaatgacaaaactgtcctgttaatttctctccttacggatcaacttgatccgtaaaagacttacagatcaacttgattcgtaagtcttaaaaatcaacttatggatcaacttgatccgtaaaagacttacggatcaagttgatccataagtcttaaaaattaacttatgaatcaacttgattcgtaaagggtatttctatcttttcgtggttagtgctcgatgcaccaacaataatacttggtgcacctagcagcactctcatctttatagtattgatattgcaattgtatcacatgtggagaaaggcggacaaatgccaaaacggtagcatttttttgtttaactagatgaggcccatagagatatgaatcacctgttgttagttgatgacatgggttcagcttttccacgtaactcgtgtttttcacttttttctctctttttttcctcatacctcttgtaataaaaagaaaaattccttcatggcttatttctataaatttacctaatccaacacaagttcattcacaaatgttgaaatttaaatttaataaatttggttatatgtctaatttctttgattaaagttcaaccctttgaattaaccccaatgcttta

SEQ ID NO: 12849 - DNA, 1054 bp, Glycine max
  Gm_smallRNAprecursor_5682
taaaaatcagttaaaaaataagcctaatgaacaattttaaaaaaatatgattagattttcagttttataactattcatgatatttatttttcatataatttttttatcattatgtcatttttttatgaacattaattggttctcataatttttatgtagatgggatgaagttaatgagataaattttacattttacattttaaattgataaaaaaaaatttaaactatctccgaaaataaaaaacgataaggtccaaataaaataaaataaattgttctttttcatagtctttaaggtgtgctgggatatgagatttaaacatgtgttgttctattcagactcaaaaacacacaaggccttcacctatctatcatctttagagtgttgctaggtgcaccaaatattattgttgatgcacccagcattttttgaaaatgacaaaactgtcctgttaatttctctccttacggatcaacttgatccgtaaaagacttacagatcaacttgattcgtaagtcttaaaaatcaacttatggatcaacttgatccgtaaaagacttacggatcaagttgatccataagtcttaaaaattaacttatgaatcaacttgattcgtaaagggtatttctatcttttcgtggttagtgctcgatgcaccaacaataatacttggtgcacctagcagcactctcatctttatagtattgatattgcaattgtatcacatgtggagaaaggcggacaaatgccaaaacggtagcatttttttgtttaactagatgaggcccatagagatatgaatcacctgttgttagttgatgacatgggttcagcttttccacgtaactcgtgtttttcacttttttctctctttttttcctcatacctcttgtaataaaaagaaaaattccttcatggcttatttctataaatttacctaatccaacacaagttcattcacaaatgttgaaatttaaatttaataaatttggttatatgtctaatttctttgattaaagttcaaccctttgaattaaccccaatgctttaat

SEQ ID NO: 12850 - DNA, 1095 bp, Glycine max
  Gm_smallRNAprecursor_5683
aaattcctctctaaattgtccaatgttttctcaaataatgtcaagtattgcctagatgaatcaggcatgttgagctattaaatttgaaagtggctttatatgctatgaagaatgtcctttgataaatcttttagcattccctttaatgagcattttgggttcatcttataatattttataggcttaaatatctgtttggtatctgtaagttagcgttttttacctttggtcattgagttcatttttctaattttagttcttgtaagttcttttcagttttgatccttgtaatatattttgctcatttttagtccttgtaagcttgtgtttttctaattttggtccctataagcacgaacttatagggactataacttaaaaaattagaatcttatagggaccaatattgaaaaaatgcaaactttcagggactaaaaatgggcaaaatatcttttagggaccaaaattggaaaagtgtaaacttataggaactaaaattagaaaaatgaactcaatgaccaaaggtaaaaaaacgctaacttacagataccaaaaagatatttaagcctataaaatattataagatggacccaaaatgctcattaaagggaatgctaatagatttaacaaaggacattcttcatagcatataaagccactttcaaatttaatagctcattttgtaaaaccagaacacacttgacacttttagaaacaaaagaaaggatgtacatcttgggggaggataagttgaattagataaaaaagattgcacaaagaactgaaagaagttataaggacaatatccaattacaattgaatgggaaagagtcttataagtttgcattaaagttttgatgctttggaacttttattgtacaactaaccaatctttatctttattcaggatggaaaaagagccaccttcaactcttatgtggactttgttcttgttggctcaggtttgtgcatattttttagatgatgttttgatacattattttgtgggttcctccatattttttctactcattgaatttttattggtgcagcattatgacagacggggccaatatgaaattgctctttttaaaa

SEQ ID NO: 12851 - DNA, 1035 bp, Glycine max
  Gm_smallRNAprecursor_5684
agtttggatatcagatatttagaaggtttatgaagggaagctctgcgatacaagtaagattgatatctacttaagcatgatgcttcatcaaatgaggaaactagaagtccatcaaggagtttgtcattagcaatattggtagtagtagatagggatagagcattcttcttcccatcttcaactgaattattctttggacctgtagatgttgaaatcaagaaaataaaaatcatatatacacatttttatacaacatttatatatccagattacaatgcattgaaacttcagttatggtggctttaactccattaaagtgaatgaattagatgaaataactgctagaaattaaaatatgagcgctttaattaatggtaacctaccggtgtgggaattaattggtattttcttaagtattgaacagaataattatgccaactctaagtacaagaaagcttaagtgtttatcagtatctatgaaacacggacatcccagttccttgtcgtgtccggtgttcgacacgcgtccgtgtcagtgtccgacaccgacacgacacccgtactacgttctatattttggacattacaggtgtccacgtgtctgtgtccgtatcgtgtccgatgtccgtgtcggtgtcgatgcttcatagatcagtattgttataaatagacccttatagtgatcttaaaagtaataaaattgtcagaaaatcaagaaatagaatagactgaaagtaagctggaaacaagagtatgtattaccaatatcagagaaggacattagataaagtaactctagtaatggattaaaggcataatattacaagattaatgatgctaggaatagattccaaacaacgtacgaaattacctacagttgactcattaaatgagtttttacccccttgttttaaggcatcagtagtagcattcttggcattaaatccttggatgagatcaaaaattgagttttggtgtctgacagtaaatgtgactaaaatagggaaggttatgaaagtcagaatcagaaatgtt

SEQ ID NO: 12852 - DNA, 1035 bp, Glycine max; identical to SEQ ID NO: 12851
  Gm_smallRNAprecursor_5685

SEQ ID NO: 12853 - DNA, 1036 bp, Glycine max
  Gm_smallRNAprecursor_5686
agtttggatatcagatatttagaaggtttatgaagggaagctctgcgatacaagtaagattgatatctacttaagcatgatgcttcatcaaatgaggaaactagaagtccatcaaggagtttgtcattagcaatattggtagtagtagatagggatagagcattcttcttcccatcttcaactgaattattctttggacctgtagatgttgaaatcaagaaaataaaaatcatatatacacatttttatacaacatttatatatccagattacaatgcattgaaacttcagttatggtggctttaactccattaaagtgaatgaattagatgaaataactgctagaaattaaaatatgagcgctttaattaatggtaacctaccggtgtgggaattaattggtattttcttaagtattgaacagaataattatgccaactctaagtacaagaaagcttaagtgtttatcagtatctatgaaacacggacatcccagttccttgtcgtgtccggtgttcgacacgcgtccgtgtcagtgtccgacaccgacacgacacccgtactacgttctatattttggacattacaggtgtccacgtgtctgtgtccgtatcgtgtccgatgtccgtgtcggtgtcgatgcttcatagatcagtattgttataaatagacccttatagtgatcttaaaagtaataaaattgtcagaaaatcaagaaatagaatagactgaaagtaagctggaaacaagagtatgtattaccaatatcagagaaggacattagataaagtaactctagtaatggattaaaggcataatattacaagattaatgatgctaggaatagattccaaacaacgtacgaaattacctacagttgactcattaaatgagtttttacccccttgttttaaggcatcagtagtagcattcttggcattaaatccttggatgagatcaaaaattgagttttggtgtctgacagtaaatgtgactaaaatagggaaggttatgaaagtcagaatcagaaatgttc

SEQ ID NO: 12854 - DNA, 1037 bp, Glycine max
  Gm_smallRNAprecursor_5687
agtttggatatcagatatttagaaggtttatgaagggaagctctgcgatacaagtaagattgatatctacttaagcatgatgcttcatcaaatgaggaaactagaagtccatcaaggagtttgtcattagcaatattggtagtagtagatagggatagagcattcttcttcccatcttcaactgaattattctttggacctgtagatgttgaaatcaagaaaataaaaatcatatatacacatttttatacaacatttatatatccagattacaatgcattgaaacttcagttatggtggctttaactccattaaagtgaatgaattagatgaaataactgctagaaattaaaatatgagcgctttaattaatggtaacctaccggtgtgggaattaattggtattttcttaagtattgaacagaataattatgccaactctaagtacaagaaagcttaagtgtttatcagtatctatgaaacacggacatcccagttccttgtcgtgtccggtgttcgacacgcgtccgtgtcagtgtccgacaccgacacgacacccgtactacgttctatattttggacattacaggtgtccacgtgtctgtgtccgtatcgtgtccgatgtccgtgtcggtgtcgatgcttcatagatcagtattgttataaatagacccttatagtgatcttaaaagtaataaaattgtcagaaaatcaagaaatagaatagactgaaagtaagctggaaacaagagtatgtattaccaatatcagagaaggacattagataaagtaactctagtaatggattaaaggcataatattacaagattaatgatgctaggaatagattccaaacaacgtacgaaattacctacagttgactcattaaatgagtttttacccccttgttttaaggcatcagtagtagcattcttggcattaaatccttggatgagatcaaaaattgagttttggtgtctgacagtaaatgtgactaaaatagggaaggttatgaaagtcagaatcagaaatgttct

SEQ ID NO: 12855 - DNA, 1099 bp, Glycine max
  Gm_smallRNAprecursor_5688
tatcagatatttagaaggtttatgaagggaagctctgcgatacaagtaagattgatatctacttaagcatgatgcttcatcaaatgaggaaactagaagtccatcaaggagtttgtcattagcaatattggtagtagtagatagggatagagcattcttcttcccatcttcaactgaattattctttggacctgtagatgttgaaatcaagaaaataaaaatcatatatacacatttttatacaacatttatatatccagattacaatgcattgaaacttcagttatggtggctttaactccattaaagtgaatgaattagatgaaataactgctagaaattaaaatatgagcgctttaattaatggtaacctaccggtgtgggaattaattggtattttcttaagtattgaacagaataattatgccaactctaagtacaagaaagcttaagtgtttatcagtatctatgaaacacggacatcccagttccttgtcgtgtccggtgttcgacacgcgtccgtgtcagtgtccgacaccgacacgacacccgtactacgttctatattttggacattacaggtgtccacgtgtctgtgtccgtatcgtgtccgatgtccgtgtcggtgtcgatgcttcatagatcagtattgttataaatagacccttatagtgatcttaaaagtaataaaattgtcagaaaatcaagaaatagaatagactgaaagtaagctggaaacaagagtatgtattaccaatatcagagaaggacattagataaagtaactctagtaatggattaaaggcataatattacaagattaatgatgctaggaatagattccaaacaacgtacgaaattacctacagttgactcattaaatgagtttttacccccttgttttaaggcatcagtagtagcattcttggcattaaatccttggatgagatcaaaaattgagttttggtgtctgacagtaaatgtgactaaaatagggaaggttatgaaagtcagaatcagaaatgttctgaagctcttgaaactccgctctgctctatccatcgtgactagcttgaaggcatgcagcttcagatatcaa

SEQ ID NO: 12856 - DNA, 1098 bp, Glycine max
  Gm_smallRNAprecursor_5689
atcagatatttagaaggtttatgaagggaagctctgcgatacaagtaagattgatatctacttaagcatgatgcttcatcaaatgaggaaactagaagtccatcaaggagtttgtcattagcaatattggtagtagtagatagggatagagcattcttcttcccatcttcaactgaattattctttggacctgtagatgttgaaatcaagaaaataaaaatcatatatacacatttttatacaacatttatatatccagattacaatgcattgaaacttcagttatggtggctttaactccattaaagtgaatgaattagatgaaataactgctagaaattaaaatatgagcgctttaattaatggtaacctaccggtgtgggaattaattggtattttcttaagtattgaacagaataattatgccaactctaagtacaagaaagcttaagtgtttatcagtatctatgaaacacggacatcccagttccttgtcgtgtccggtgttcgacacgcgtccgtgtcagtgtccgacaccgacacgacacccgtactacgttctatattttggacattacaggtgtccacgtgtctgtgtccgtatcgtgtccgatgtccgtgtcggtgtcgatgcttcatagatcagtattgttataaatagacccttatagtgatcttaaaagtaataaaattgtcagaaaatcaagaaatagaatagactgaaagtaagctggaaacaagagtatgtattaccaatatcagagaaggacattagataaagtaactctagtaatggattaaaggcataatattacaagattaatgatgctaggaatagattccaaacaacgtacgaaattacctacagttgactcattaaatgagtttttacccccttgttttaaggcatcagtagtagcattcttggcattaaatccttggatgagatcaaaaattgagttttggtgtctgacagtaaatgtgactaaaatagggaaggttatgaaagtcagaatcagaaatgttctgaagctcttgaaactccgctctgctctatccatcgtgactagcttgaaggcatgcagcttcagatatcaa

SEQ ID NO: 12857 - DNA, 1068 bp, Glycine max
  Gm_smallRNAprecursor_5690
gggaagctctgcgatacaagtaagattgatatctacttaagcatgatgcttcatcaaatgaggaaactagaagtccatcaaggagtttgtcattagcaatattggtagtagtagatagggatagagcattcttcttcccatcttcaactgaattattctttggacctgtagatgttgaaatcaagaaaataaaaatcatatatacacatttttatacaacatttatatatccagattacaatgcattgaaacttcagttatggtggctttaactccattaaagtgaatgaattagatgaaataactgctagaaattaaaatatgagcgctttaattaatggtaacctaccggtgtgggaattaattggtattttcttaagtattgaacagaataattatgccaactctaagtacaagaaagcttaagtgtttatcagtatctatgaaacacggacatcccagttccttgtcgtgtccggtgttcgacacgcgtccgtgtcagtgtccgacaccgacacgacacccgtactacgttctatattttggacattacaggtgtccacgtgtctgtgtccgtatcgtgtccgatgtccgtgtcggtgtcgatgcttcatagatcagtattgttataaatagacccttatagtgatcttaaaagtaataaaattgtcagaaaatcaagaaatagaatagactgaaagtaagctggaaacaagagtatgtattaccaatatcagagaaggacattagataaagtaactctagtaatggattaaaggcataatattacaagattaatgatgctaggaatagattccaaacaacgtacgaaattacctacagttgactcattaaatgagtttttacccccttgttttaaggcatcagtagtagcattcttggcattaaatccttggatgagatcaaaaattgagttttggtgtctgacagtaaatgtgactaaaatagggaaggttatgaaagtcagaatcagaaatgttctgaagctcttgaaactccgctctgctctatccatcgtgactagcttgaaggcatgcagcttcagat

SEQ ID NO: 12858 - DNA, 1080 bp, Glycine max
  Gm_smallRNAprecursor_5691
gggaagctctgcgatacaagtaagattgatatctacttaagcatgatgcttcatcaaatgaggaaactagaagtccatcaaggagtttgtcattagcaatattggtagtagtagatagggatagagcattcttcttcccatcttcaactgaattattctttggacctgtagatgttgaaatcaagaaaataaaaatcatatatacacatttttatacaacatttatatatccagattacaatgcattgaaacttcagttatggtggctttaactccattaaagtgaatgaattagatgaaataactgctagaaattaaaatatgagcgctttaattaatggtaacctaccggtgtgggaattaattggtattttcttaagtattgaacagaataattatgccaactctaagtacaagaaagcttaagtgtttatcagtatctatgaaacacggacatcccagttccttgtcgtgtccggtgttcgacacgcgtccgtgtcagtgtccgacaccgacacgacacccgtactacgttctatattttggacattacaggtgtccacgtgtctgtgtccgtatcgtgtccgatgtccgtgtcggtgtcgatgcttcatagatcagtattgttataaatagacccttatagtgatcttaaaagtaataaaattgtcagaaaatcaagaaatagaatagactgaaagtaagctggaaacaagagtatgtattaccaatatcagagaaggacattagataaagtaactctagtaatggattaaaggcataatattacaagattaatgatgctaggaatagattccaaacaacgtacgaaattacctacagttgactcattaaatgagtttttacccccttgttttaaggcatcagtagtagcattcttggcattaaatccttggatgagatcaaaaattgagttttggtgtctgacagtaaatgtgactaaaatagggaaggttatgaaagtcagaatcagaaatgttctgaagctcttgaaactccgctctgctctatccatcgtgactagcttgaaggcatgcagcttcagatatcaatttattt

SEQ ID NO: 12859 - DNA, 1067 bp, Glycine max
  Gm_smallRNAprecursor_5692
ggaagctctgcgatacaagtaagattgatatctacttaagcatgatgcttcatcaaatgaggaaactagaagtccatcaaggagtttgtcattagcaatattggtagtagtagatagggatagagcattcttcttcccatcttcaactgaattattctttggacctgtagatgttgaaatcaagaaaataaaaatcatatatacacatttttatacaacatttatatatccagattacaatgcattgaaacttcagttatggtggctttaactccattaaagtgaatgaattagatgaaataactgctagaaattaaaatatgagcgctttaattaatggtaacctaccggtgtgggaattaattggtattttcttaagtattgaacagaataattatgccaactctaagtacaagaaagcttaagtgtttatcagtatctatgaaacacggacatcccagttccttgtcgtgtccggtgttcgacacgcgtccgtgtcagtgtccgacaccgacacgacacccgtactacgttctatattttggacattacaggtgtccacgtgtctgtgtccgtatcgtgtccgatgtccgtgtcggtgtcgatgcttcatagatcagtattgttataaatagacccttatagtgatcttaaaagtaataaaattgtcagaaaatcaagaaatagaatagactgaaagtaagctggaaacaagagtatgtattaccaatatcagagaaggacattagataaagtaactctagtaatggattaaaggcataatattacaagattaatgatgctaggaatagattccaaacaacgtacgaaattacctacagttgactcattaaatgagtttttacccccttgttttaaggcatcagtagtagcattcttggcattaaatccttggatgagatcaaaaattgagttttggtgtctgacagtaaatgtgactaaaatagggaaggttatgaaagtcagaatcagaaatgttctgaagctcttgaaactccgctctgctctatccatcgtgactagcttgaaggcatgcagcttcagat

SEQ ID NO: 12860 - DNA, 1079 bp, Glycine max
  Gm_smallRNAprecursor_5693
ggaagctctgcgatacaagtaagattgatatctacttaagcatgatgcttcatcaaatgaggaaactagaagtccatcaaggagtttgtcattagcaatattggtagtagtagatagggatagagcattcttcttcccatcttcaactgaattattctttggacctgtagatgttgaaatcaagaaaataaaaatcatatatacacatttttatacaacatttatatatccagattacaatgcattgaaacttcagttatggtggctttaactccattaaagtgaatgaattagatgaaataactgctagaaattaaaatatgagcgctttaattaatggtaacctaccggtgtgggaattaattggtattttcttaagtattgaacagaataattatgccaactctaagtacaagaaagcttaagtgtttatcagtatctatgaaacacggacatcccagttccttgtcgtgtccggtgttcgacacgcgtccgtgtcagtgtccgacaccgacacgacacccgtactacgttctatattttggacattacaggtgtccacgtgtctgtgtccgtatcgtgtccgatgtccgtgtcggtgtcgatgcttcatagatcagtattgttataaatagacccttatagtgatcttaaaagtaataaaattgtcagaaaatcaagaaatagaatagactgaaagtaagctggaaacaagagtatgtattaccaatatcagagaaggacattagataaagtaactctagtaatggattaaaggcataatattacaagattaatgatgctaggaatagattccaaacaacgtacgaaattacctacagttgactcattaaatgagtttttacccccttgttttaaggcatcagtagtagcattcttggcattaaatccttggatgagatcaaaaattgagttttggtgtctgacagtaaatgtgactaaaatagggaaggttatgaaagtcagaatcagaaatgttctgaagctcttgaaactccgctctgctctatccatcgtgactagcttgaaggcatgcagcttcagatatcaatttattt

SEQ ID NO: 12861 - DNA, 1066 bp, Glycine max
  Gm_smallRNAprecursor_5694
gaagctctgcgatacaagtaagattgatatctacttaagcatgatgcttcatcaaatgaggaaactagaagtccatcaaggagtttgtcattagcaatattggtagtagtagatagggatagagcattcttcttcccatcttcaactgaattattctttggacctgtagatgttgaaatcaagaaaataaaaatcatatatacacatttttatacaacatttatatatccagattacaatgcattgaaacttcagttatggtggctttaactccattaaagtgaatgaattagatgaaataactgctagaaattaaaatatgagcgctttaattaatggtaacctaccggtgtgggaattaattggtattttcttaagtattgaacagaataattatgccaactctaagtacaagaaagcttaagtgtttatcagtatctatgaaacacggacatcccagttccttgtcgtgtccggtgttcgacacgcgtccgtgtcagtgtccgacaccgacacgacacccgtactacgttctatattttggacattacaggtgtccacgtgtctgtgtccgtatcgtgtccgatgtccgtgtcggtgtcgatgcttcatagatcagtattgttataaatagacccttatagtgatcttaaaagtaataaaattgtcagaaaatcaagaaatagaatagactgaaagtaagctggaaacaagagtatgtattaccaatatcagagaaggacattagataaagtaactctagtaatggattaaaggcataatattacaagattaatgatgctaggaatagattccaaacaacgtacgaaattacctacagttgactcattaaatgagtttttacccccttgttttaaggcatcagtagtagcattcttggcattaaatccttggatgagatcaaaaattgagttttggtgtctgacagtaaatgtgactaaaatagggaaggttatgaaagtcagaatcagaaatgttctgaagctcttgaaactccgctctgctctatccatcgtgactagcttgaaggcatgcagcttcagat

SEQ ID NO: 12862 - DNA, 1071 bp, Glycine max
  Gm_smallRNAprecursor_5695
gaagctctgcgatacaagtaagattgatatctacttaagcatgatgcttcatcaaatgaggaaactagaagtccatcaaggagtttgtcattagcaatattggtagtagtagatagggatagagcattcttcttcccatcttcaactgaattattctttggacctgtagatgttgaaatcaagaaaataaaaatcatatatacacatttttatacaacatttatatatccagattacaatgcattgaaacttcagttatggtggctttaactccattaaagtgaatgaattagatgaaataactgctagaaattaaaatatgagcgctttaattaatggtaacctaccggtgtgggaattaattggtattttcttaagtattgaacagaataattatgccaactctaagtacaagaaagcttaagtgtttatcagtatctatgaaacacggacatcccagttccttgtcgtgtccggtgttcgacacgcgtccgtgtcagtgtccgacaccgacacgacacccgtactacgttctatattttggacattacaggtgtccacgtgtctgtgtccgtatcgtgtccgatgtccgtgtcggtgtcgatgcttcatagatcagtattgttataaatagacccttatagtgatcttaaaagtaataaaattgtcagaaaatcaagaaatagaatagactgaaagtaagctggaaacaagagtatgtattaccaatatcagagaaggacattagataaagtaactctagtaatggattaaaggcataatattacaagattaatgatgctaggaatagattccaaacaacgtacgaaattacctacagttgactcattaaatgagtttttacccccttgttttaaggcatcagtagtagcattcttggcattaaatccttggatgagatcaaaaattgagttttggtgtctgacagtaaatgtgactaaaatagggaaggttatgaaagtcagaatcagaaatgttctgaagctcttgaaactccgctctgctctatccatcgtgactagcttgaaggcatgcagcttcagatatcaa

SEQ ID NO: 12863 - DNA, 1078 bp, Glycine max
  Gm_smallRNAprecursor_5696
gctctgcgatacaagtaagattgatatctacttaagcatgatgcttcatcaaatgaggaaactagaagtccatcaaggagtttgtcattagcaatattggtagtagtagatagggatagagcattcttcttcccatcttcaactgaattattctttggacctgtagatgttgaaatcaagaaaataaaaatcatatatacacatttttatacaacatttatatatccagattacaatgcattgaaacttcagttatggtggctttaactccattaaagtgaatgaattagatgaaataactgctagaaattaaaatatgagcgctttaattaatggtaacctaccggtgtgggaattaattggtattttcttaagtattgaacagaataattatgccaactctaagtacaagaaagcttaagtgtttatcagtatctatgaaacacggacatcccagttccttgtcgtgtccggtgttcgacacgcgtccgtgtcagtgtccgacaccgacacgacacccgtactacgttctatattttggacattacaggtgtccacgtgtctgtgtccgtatcgtgtccgatgtccgtgtcggtgtcgatgcttcatagatcagtattgttataaatagacccttatagtgatcttaaaagtaataaaattgtcagaaaatcaagaaatagaatagactgaaagtaagctggaaacaagagtatgtattaccaatatcagagaaggacattagataaagtaactctagtaatggattaaaggcataatattacaagattaatgatgctaggaatagattccaaacaacgtacgaaattacctacagttgactcattaaatgagtttttacccccttgttttaaggcatcagtagtagcattcttggcattaaatccttggatgagatcaaaaattgagttttggtgtctgacagtaaatgtgactaaaatagggaaggttatgaaagtcagaatcagaaatgttctgaagctcttgaaactccgctctgctctatccatcgtgactagcttgaaggcatgcagcttcagatatcaatttatttaat

SEQ ID NO: 12864 - DNA, 1060 bp, Glycine max
  Gm_smallRNAprecursor_5697
ctgcgatacaagtaagattgatatctacttaagcatgatgcttcatcaaatgaggaaactagaagtccatcaaggagtttgtcattagcaatattggtagtagtagatagggatagagcattcttcttcccatcttcaactgaattattctttggacctgtagatgttgaaatcaagaaaataaaaatcatatatacacatttttatacaacatttatatatccagattacaatgcattgaaacttcagttatggtggctttaactccattaaagtgaatgaattagatgaaataactgctagaaattaaaatatgagcgctttaattaatggtaacctaccggtgtgggaattaattggtattttcttaagtattgaacagaataattatgccaactctaagtacaagaaagcttaagtgtttatcagtatctatgaaacacggacatcccagttccttgtcgtgtccggtgttcgacacgcgtccgtgtcagtgtccgacaccgacacgacacccgtactacgttctatattttggacattacaggtgtccacgtgtctgtgtccgtatcgtgtccgatgtccgtgtcggtgtcgatgcttcatagatcagtattgttataaatagacccttatagtgatcttaaaagtaataaaattgtcagaaaatcaagaaatagaatagactgaaagtaagctggaaacaagagtatgtattaccaatatcagagaaggacattagataaagtaactctagtaatggattaaaggcataatattacaagattaatgatgctaggaatagattccaaacaacgtacgaaattacctacagttgactcattaaatgagtttttacccccttgttttaaggcatcagtagtagcattcttggcattaaatccttggatgagatcaaaaattgagttttggtgtctgacagtaaatgtgactaaaatagggaaggttatgaaagtcagaatcagaaatgttctgaagctcttgaaactccgctctgctctatccatcgtgactagcttgaaggcatgcagcttcagat

SEQ ID NO: 12865 - DNA, 1072 bp, Glycine max
  Gm_smallRNAprecursor_5698
ctgcgatacaagtaagattgatatctacttaagcatgatgcttcatcaaatgaggaaactagaagtccatcaaggagtttgtcattagcaatattggtagtagtagatagggatagagcattcttcttcccatcttcaactgaattattctttggacctgtagatgttgaaatcaagaaaataaaaatcatatatacacatttttatacaacatttatatatccagattacaatgcattgaaacttcagttatggtggctttaactccattaaagtgaatgaattagatgaaataactgctagaaattaaaatatgagcgctttaattaatggtaacctaccggtgtgggaattaattggtattttcttaagtattgaacagaataattatgccaactctaagtacaagaaagcttaagtgtttatcagtatctatgaaacacggacatcccagttccttgtcgtgtccggtgttcgacacgcgtccgtgtcagtgtccgacaccgacacgacacccgtactacgttctatattttggacattacaggtgtccacgtgtctgtgtccgtatcgtgtccgatgtccgtgtcggtgtcgatgcttcatagatcagtattgttataaatagacccttatagtgatcttaaaagtaataaaattgtcagaaaatcaagaaatagaatagactgaaagtaagctggaaacaagagtatgtattaccaatatcagagaaggacattagataaagtaactctagtaatggattaaaggcataatattacaagattaatgatgctaggaatagattccaaacaacgtacgaaattacctacagttgactcattaaatgagtttttacccccttgttttaaggcatcagtagtagcattcttggcattaaatccttggatgagatcaaaaattgagttttggtgtctgacagtaaatgtgactaaaatagggaaggttatgaaagtcagaatcagaaatgttctgaagctcttgaaactccgctctgctctatccatcgtgactagcttgaaggcatgcagcttcagatatcaatttattt

SEQ ID NO: 12866 - DNA, 1060 bp, Glycine max
  Gm_smallRNAprecursor_5699
atacaagtaagattgatatctacttaagcatgatgcttcatcaaatgaggaaactagaagtccatcaaggagtttgtcattagcaatattggtagtagtagatagggatagagcattcttcttcccatcttcaactgaattattctttggacctgtagatgttgaaatcaagaaaataaaaatcatatatacacatttttatacaacatttatatatccagattacaatgcattgaaacttcagttatggtggctttaactccattaaagtgaatgaattagatgaaataactgctagaaattaaaatatgagcgctttaattaatggtaacctaccggtgtgggaattaattggtattttcttaagtattgaacagaataattatgccaactctaagtacaagaaagcttaagtgtttatcagtatctatgaaacacggacatcccagttccttgtcgtgtccggtgttcgacacgcgtccgtgtcagtgtccgacaccgacacgacacccgtactacgttctatattttggacattacaggtgtccacgtgtctgtgtccgtatcgtgtccgatgtccgtgtcggtgtcgatgcttcatagatcagtattgttataaatagacccttatagtgatcttaaaagtaataaaattgtcagaaaatcaagaaatagaatagactgaaagtaagctggaaacaagagtatgtattaccaatatcagagaaggacattagataaagtaactctagtaatggattaaaggcataatattacaagattaatgatgctaggaatagattccaaacaacgtacgaaattacctacagttgactcattaaatgagtttttacccccttgttttaaggcatcagtagtagcattcttggcattaaatccttggatgagatcaaaaattgagttttggtgtctgacagtaaatgtgactaaaatagggaaggttatgaaagtcagaatcagaaatgttctgaagctcttgaaactccgctctgctctatccatcgtgactagcttgaaggcatgcagcttcagatatcaa

SEQ ID NO: 12867 - DNA, 1070 bp, Glycine max
  Gm_smallRNAprecursor_5700
atacaagtaagattgatatctacttaagcatgatgcttcatcaaatgaggaaactagaagtccatcaaggagtttgtcattagcaatattggtagtagtagatagggatagagcattcttcttcccatcttcaactgaattattctttggacctgtagatgttgaaatcaagaaaataaaaatcatatatacacatttttatacaacatttatatatccagattacaatgcattgaaacttcagttatggtggctttaactccattaaagtgaatgaattagatgaaataactgctagaaattaaaatatgagcgctttaattaatggtaacctaccggtgtgggaattaattggtattttcttaagtattgaacagaataattatgccaactctaagtacaagaaagcttaagtgtttatcagtatctatgaaacacggacatcccagttccttgtcgtgtccggtgttcgacacgcgtccgtgtcagtgtccgacaccgacacgacacccgtactacgttctatattttggacattacaggtgtccacgtgtctgtgtccgtatcgtgtccgatgtccgtgtcggtgtcgatgcttcatagatcagtattgttataaatagacccttatagtgatcttaaaagtaataaaattgtcagaaaatcaagaaatagaatagactgaaagtaagctggaaacaagagtatgtattaccaatatcagagaaggacattagataaagtaactctagtaatggattaaaggcataatattacaagattaatgatgctaggaatagattccaaacaacgtacgaaattacctacagttgactcattaaatgagtttttacccccttgttttaaggcatcagtagtagcattcttggcattaaatccttggatgagatcaaaaattgagttttggtgtctgacagtaaatgtgactaaaatagggaaggttatgaaagtcagaatcagaaatgttctgaagctcttgaaactccgctctgctctatccatcgtgactagcttgaaggcatgcagcttcagatatcaatttatttaat

SEQ ID NO: 12868 - DNA, 1062 bp, Glycine max
  Gm_smallRNAprecursor_5701
atataaaaatcgtaaaattatatgaatcaaataagtaatttaacaaaaaaatataatggactagttcaaacctaaaaacgccactccactttaggcaggtaggatacctgaatcagatggtccacgtcaaaaaacacttccatgttacaatattcaaacattgccagccactttcaccttcctgaaattcaccagcttcatatttttaatgtttgaaatttacactaaccttgcatgtttcattacttcgtttgacaaaccatctatttgaaaattttccaatgtactgcttcatatagcgccttttaaatttacactttttcacacattataaaaaatgaggaacacaattgaggcaccataaacatgaaacctatgaagcaccgacaccgacacaaacactggacacgacacgaacacagacacgtgaacacctgtaatgtccaaaatattgaacgtaatacgggtgtcgtgtccgtgtcagacactgacacggatgcgtgtcggacactgacacggatgcgtgttggacaccagacacggatgcgtttcggacactgatacggatgcgtgttggacaccagacacggatgcgtgttgaacaccagacacgacaagggactggagtgtccgtgcttcatagcatgaaacatgtcatgacagcaacattataccttcctttctaactacaagtacattgaaatataatgattggataaaaatcactggaaattggaatgaacaaataagaaaccactgccttacttcagctcttaaaacatcttttgaaaatttataaattcctcaatataagcttaaacaaaacaagcacctattgtttatcagtctttgtcaatcgttcctgtagctgaatacaaagttctgatattcgggacagcaatttacactgttggtctagcgaatttaatgaatacatacttgttaatttgatgggattaccaagcagctgttggagctgacaacagagctgtgatgcttcagggtcatttatgcaagttttagatataagtcgcagcaatttaaaggtttggtcttgggacg

SEQ ID NO: 12869 - DNA, 1070 bp, Glycine max
  Gm_smallRNAprecursor_5702
atataaaaatcgtaaaattatatgaatcaaataagtaatttaacaaaaaaatataatggactagttcaaacctaaaaacgccactccactttaggcaggtaggatacctgaatcagatggtccacgtcaaaaaacacttccatgttacaatattcaaacattgccagccactttcaccttcctgaaattcaccagcttcatatttttaatgtttgaaatttacactaaccttgcatgtttcattacttcgtttgacaaaccatctatttgaaaattttccaatgtactgcttcatatagcgccttttaaatttacactttttcacacattataaaaaatgaggaacacaattgaggcaccataaacatgaaacctatgaagcaccgacaccgacacaaacactggacacgacacgaacacagacacgtgaacacctgtaatgtccaaaatattgaacgtaatacgggtgtcgtgtccgtgtcagacactgacacggatgcgtgtcggacactgacacggatgcgtgttggacaccagacacggatgcgtttcggacactgatacggatgcgtgttggacaccagacacggatgcgtgttgaacaccagacacgacaagggactggagtgtccgtgcttcatagcatgaaacatgtcatgacagcaacattataccttcctttctaactacaagtacattgaaatataatgattggataaaaatcactggaaattggaatgaacaaataagaaaccactgccttacttcagctcttaaaacatcttttgaaaatttataaattcctcaatataagcttaaacaaaacaagcacctattgtttatcagtctttgtcaatcgttcctgtagctgaatacaaagttctgatattcgggacagcaatttacactgttggtctagcgaatttaatgaatacatacttgttaatttgatgggattaccaagcagctgttggagctgacaacagagctgtgatgcttcagggtcatttatgcaagttttagatataagtcgcagcaatttaaaggtttggtcttgggacgaagatgaa

SEQ ID NO: 12870 - DNA, 1071 bp, Glycine max
  Gm_smallRNAprecursor_5703
atataaaaatcgtaaaattatatgaatcaaataagtaatttaacaaaaaaatataatggactagttcaaacctaaaaacgccactccactttaggcaggtaggatacctgaatcagatggtccacgtcaaaaaacacttccatgttacaatattcaaacattgccagccactttcaccttcctgaaattcaccagcttcatatttttaatgtttgaaatttacactaaccttgcatgtttcattacttcgtttgacaaaccatctatttgaaaattttccaatgtactgcttcatatagcgccttttaaatttacactttttcacacattataaaaaatgaggaacacaattgaggcaccataaacatgaaacctatgaagcaccgacaccgacacaaacactggacacgacacgaacacagacacgtgaacacctgtaatgtccaaaatattgaacgtaatacgggtgtcgtgtccgtgtcagacactgacacggatgcgtgtcggacactgacacggatgcgtgttggacaccagacacggatgcgtttcggacactgatacggatgcgtgttggacaccagacacggatgcgtgttgaacaccagacacgacaagggactggagtgtccgtgcttcatagcatgaaacatgtcatgacagcaacattataccttcctttctaactacaagtacattgaaatataatgattggataaaaatcactggaaattggaatgaacaaataagaaaccactgccttacttcagctcttaaaacatcttttgaaaatttataaattcctcaatataagcttaaacaaaacaagcacctattgtttatcagtctttgtcaatcgttcctgtagctgaatacaaagttctgatattcgggacagcaatttacactgttggtctagcgaatttaatgaatacatacttgttaatttgatgggattaccaagcagctgttggagctgacaacagagctgtgatgcttcagggtcatttatgcaagttttagatataagtcgcagcaatttaaaggtttggtcttgggacgaagatgaat

SEQ ID NO: 12871 - DNA, 1049 bp, Glycine max
  Gm_smallRNAprecursor_5704
tgaatcaaataagtaatttaacaaaaaaatataatggactagttcaaacctaaaaacgccactccactttaggcaggtaggatacctgaatcagatggtccacgtcaaaaaacacttccatgttacaatattcaaacattgccagccactttcaccttcctgaaattcaccagcttcatatttttaatgtttgaaatttacactaaccttgcatgtttcattacttcgtttgacaaaccatctatttgaaaattttccaatgtactgcttcatatagcgccttttaaatttacactttttcacacattataaaaaatgaggaacacaattgaggcaccataaacatgaaacctatgaagcaccgacaccgacacaaacactggacacgacacgaacacagacacgtgaacacctgtaatgtccaaaatattgaacgtaatacgggtgtcgtgtccgtgtcagacactgacacggatgcgtgtcggacactgacacggatgcgtgttggacaccagacacggatgcgtttcggacactgatacggatgcgtgttggacaccagacacggatgcgtgttgaacaccagacacgacaagggactggagtgtccgtgcttcatagcatgaaacatgtcatgacagcaacattataccttcctttctaactacaagtacattgaaatataatgattggataaaaatcactggaaattggaatgaacaaataagaaaccactgccttacttcagctcttaaaacatcttttgaaaatttataaattcctcaatataagcttaaacaaaacaagcacctattgtttatcagtctttgtcaatcgttcctgtagctgaatacaaagttctgatattcgggacagcaatttacactgttggtctagcgaatttaatgaatacatacttgttaatttgatgggattaccaagcagctgttggagctgacaacagagctgtgatgcttcagggtcatttatgcaagttttagatataagtcgcagcaatttaaaggtttggtcttgggacgaagatgaat

SEQ ID NO: 12872 - DNA, 1047 bp, Glycine max
  Gm_smallRNAprecursor_5705
gaatcaaataagtaatttaacaaaaaaatataatggactagttcaaacctaaaaacgccactccactttaggcaggtaggatacctgaatcagatggtccacgtcaaaaaacacttccatgttacaatattcaaacattgccagccactttcaccttcctgaaattcaccagcttcatatttttaatgtttgaaatttacactaaccttgcatgtttcattacttcgtttgacaaaccatctatttgaaaattttccaatgtactgcttcatatagcgccttttaaatttacactttttcacacattataaaaaatgaggaacacaattgaggcaccataaacatgaaacctatgaagcaccgacaccgacacaaacactggacacgacacgaacacagacacgtgaacacctgtaatgtccaaaatattgaacgtaatacgggtgtcgtgtccgtgtcagacactgacacggatgcgtgtcggacactgacacggatgcgtgttggacaccagacacggatgcgtttcggacactgatacggatgcgtgttggacaccagacacggatgcgtgttgaacaccagacacgacaagggactggagtgtccgtgcttcatagcatgaaacatgtcatgacagcaacattataccttcctttctaactacaagtacattgaaatataatgattggataaaaatcactggaaattggaatgaacaaataagaaaccactgccttacttcagctcttaaaacatcttttgaaaatttataaattcctcaatataagcttaaacaaaacaagcacctattgtttatcagtctttgtcaatcgttcctgtagctgaatacaaagttctgatattcgggacagcaatttacactgttggtctagcgaatttaatgaatacatacttgttaatttgatgggattaccaagcagctgttggagctgacaacagagctgtgatgcttcagggtcatttatgcaagttttagatataagtcgcagcaatttaaaggtttggtcttgggacgaagatgaa

SEQ ID NO: 12873 - DNA, 1155 bp, Glycine max
  Gm_smallRNAprecursor_5706
atcgtggaaaatcgcaatgagttgaaaatctgctataacatatagcgtatagtgtggcaggcaaatatcggaagcaacataccagttgaaatataatatatatatatatatattacgattaaatatgtataaaaaattaagctatatgcaaaaaggataaacattgacataatattaactcaaaagttaaattgtgcaagacaaaatatgttggaaacattaaaaaaagagctaaatactaaagaagtcctagtaaaggagtggagaagaaggctggagggttctgaattttgggaggaaggatttatgtaaaggagatgtttaagtggcaatgatcttcaaaggttgaaggcaatacaaataaaaaaggagtgaataggcaatttagtccttgaaattatattcattttgcatattagtctctaacttaatgttaaatttaaaatagtccctatctttgcataagtgttgcaaaatagttcttccgttaaattttaaagtaacgctgttagtgaggtcaattttagtgccacgtgaactatccaacgtggcactaaaggatgacgtggcatggcacgtggacgtgcctcctaaaagttgtcacgtcatttgatgataacaaaacgagtaaatagacaatttagtccctggctttgtacctctgttgcatattagtccctaacttaatgaaaaattcaaaataatccctatcttttgcataagtgttgcaaaatagtctctaatttaaaagatgtcagaaatcgtgcttaaagtgtccatgcattgcgaaggtgtaccttgcacgatttctggcggcatagattcctccttggattccttgtcatcttttgattcctctagttttttctattcttctttcttttcttctttctctgcttttttctcctccactttgttttcctctggttttttctcttcctattcagaacacacaaaaaaaaaaaatcagaacccgaaatgatacattgatggtaattgaagaaataaaaaaggaaaagagaatggttatgcaaactttatccattggtgttgacgactatagagataaggttgttgctgtggatttttggttctttttatttgtgcaagtgtgtgtgggttctttttcgtatatatgcctcaattggttcagaa

SEQ ID NO: 12874 - DNA, 1197 bp, Glycine max
  Gm_smallRNAprecursor_5707
tggcggcatagattcctccttggattccttgtcatcttttgattcctctagttttttctattcttctttcttttcttctttctctgcttttttctcctccactttgttttcctctggttttttctcttcctattcagaacacacaaaaaaaaaaaatcagaacccgaaatgatacattgatggtaattgaagaaataaaaaaggaaaagagaatggttatgcaaactttatccattggtgttgacgactatagagataaggttgttgctgtggatttttggttctttttatttgtgcaagtgtgtgtgggttctttttcgtatatatgcctcaattggttcagaaccattagatttgaagaagtcactcattctatcatcatcaaatgatgtggcactaaaattgacctcactaacaacgttactttaaaatttaatggaatgactattttgcaacacttatgcaaaaaatatgaactattttgaatttttcattaagttagggactaatatgcaataggggtacaaagtcagaaactaaattgtctatttactcgttttattatcatcaaatgacgtgacatcttttaagaggcatgtcatcctttagagccacgttggatagttcacgtgacactaaaattgacctcactaacagcgttactttaaaatttaacggaaggactattttgcaacacttatgcaaagataggagctattttgaatttaacattaagttagagactaatatgtaaaatgggtacaatctcagagactaaattgcctattcactcaataaaaaaggttatgttgggcctattttataataagaaagcccaagtcacatttgactctaactccatagtttaaaaacttatgtgagttttagtatagaataaaacaaaaagaaatatgaatctttattatgttttaaaaaggcacataagcccaatttgtccaagacccataaatctcctttatgggaacctaaatctgaaactacctcaactttgctctatcggggttgagaaactttgtggctatacaatttctgaatagagacacaagatccaccacgtgagtttaacaaaaccaaaaaccttgtccgcaagcccaaaacaactctaaactgaagtgttgtgcagactgtagacgcgacccgaatccacacctaacccagtttgctttttttcataat

SEQ ID NO: 12875 - DNA, 1064 bp, Glycine max
  Gm_smallRNAprecursor_5708
aataaatattcactgtttaaattgattattagatacgatcacatgatgaggatttagagaaatttttgtatgagcacaaacataacaactctcactcctcggcacaaccaataaaaattttacagttaataaattaaaaattaataaaatctaacatttattttcttaaaaaaattcactcctacaaatcagccaaccttccataattaaaatttttaaaatataaaaaacaaaaactaacaaaatagcctcttgcattccgactctttccttccccttctgttcctaacacgtcttctcctttctcctcactttccactccatgtacctatttcatttcattgagaacgtgaatactttgtgtttgtaactgattttaaattgattaaatgtatgtttcttttaagagttaattgacatttcctggactttaacaaaattacataagccttctttcttccctcttgagtacattactcttaccctatgaagcaccaacactgacacggacaccggacacgacacggacacgtggacacctgtaatgtccaaaatatagaacgtagtacgggtgtcgtgtcggtgtcgaacactgacacggacgcgtgtcggacaccggacacgacaagggactgaagtgtccgtgcttcatagctcttacccccttttgtcaacactgttaaataataaaaataagtaaaattttaaaagtcattctctcattttgttatttccattatgctcttctcacttaagtctttcactcttccctttcaaacttcaaaagacaaggtgtggcggcactggagtggattgttcaaacttcaaaagacaaggtgtggcggcactggagtggattgccaatgtttgagcagttcacatggtagaggatgtcgtcatttgtgaagtcgaagactgagtccacaactctattctgtaactttccaacaactcctttcactatggttgaataaatcgaaaatgtttttttttttctgaagcaaccatgtgaagaaaaatggtccaaagaaggcatttactagagtgtgagctttgatttctag

SEQ ID NO: 12876 - DNA, 1080 bp, Glycine max
  Gm_smallRNAprecursor_5709
caaatgaatttgatccccttgattgtagactatgtttacaggatgcgtatagattccttaaaagtatgtcataatgtgtgactagaattctcttgaacatgtgagttgtctagttgctctaccttgaaaaagtataaattaacggatgacacttgaaaatgctactaaccattgcaatattctgtctgtctatcattttattagaaagaaagaaagagctgcttaggaatggtatttatcaaaccatagtagatatgacgcttggaggagcagcagggtgccgcggtgccgtgctgctattgcacactattaactactatgaatcaaactaaacttaagagaataagtttttatttttacttgttaaatttaacattttcaagtttcatgttttgtcaaaacatttagaattgtaatgtatgatatccaatgttgttaatggcggatggcggttcatggcggaaagtcaaaaatccgccataaaaatatggcagatggcgtagcggaaaatggcggatgtcatggcggacaaaaaaaaaaatatatatatatatataaactcattgaaattgaaaaaaacaaaggattgcattcaaataaactaaaaaagtttgatgagttcatacaataatcaagtaccaacaccaaataaactcattaaaaagaggactgaacagaaaaaaaaaattgtggtgtcaaatagaaaaaaaaaattaaaaatgggactgtcgaaagtaaatggggggtgtcaaatagaaaaacggaaaaaaaagctgcagacaacaaaaaggggtgtcaagcagcaaaaacaaaaaaaaaggctttggcccacccaccagtataagtcgcggtcgcggttctggctgggtcgtcttctccgttcgcgttgccgtcgttcacgctgtgttcgtcgccgtcgttcgcgttgccgtggatggtcgctgccgtgctcgtcgccgccgtgggtcgtcgctggttgcaggtgtgggtggttccgaggtcgtggctggtttgcaggggttgtgggtcgtcgctggttgcatgggtcgtgctgtgttggagcttcgaggtcgaggtttg

SEQ ID NO: 12877 - DNA, 1162 bp, Glycine max
  Gm_smallRNAprecursor_5710
gttttgtgaccgaaattaaatttaatctaaatagataccaaaacaatcatcttcgttttggtaaaaggggtcttcttcttcttcttcagcataacttgtttcttccttctttgaggatgaaccttcttcttcctactgtaacatttgcagaacttcctttagatttttagttaggacctcctttgatttcgatcctgctaaaaatgctgccagatgagacttttggttcaaaaacacagaagtttctgaatcagctgctttgaggaattctggatgggattggaaccagattgttacttgttctggatttgctttggatgagtcaaattgtgtccaccattttacaaatgcgtgtctttgtagtgatggatattggtttatcttttcagtcttgctgtaacgatattgccatgagaagatccatgacagtgcaaagcttgaaaagtattaaagatctgctggaattcgtgattcctacgaattgtattgtcaatcaaattgagcaaatccttgttggactgtttctgggaatatctctgggattggtccaaagaagtcccaccattgcaaaaaccaattgggaaaattgtaaattgtattggtcttgaaatatatcagccatgaatgcttgaagcgggtattttggtgccaaaacaccttagtccaagcatcaacataatcccaataggtataacctatcagatcaaatggaactgaaaatctctttcctttgttcaagtccgaaccaaagtgtcttggttgaagaacttttagtatttggattgtggagtgggtgtttaatgtttggtcttttgggtctttgaaatgtttgatagatgctgaatttgaatctaccaaaatcaattcataaaaagttcttgtcttcaggatggtggttggtttgtagtgaaatcctagtgggaaagccttgaccgttgccttgaagggatttttgtcccaaaattcaggttccatctacaaaacaattacaaatttatttttataaatataattgttagtttgtttggtaggtggtgtttaagctttggctaaaggtagtttccctttaggattggtagctgttttggtcattgatgcattttggatcactgtttgtaaatttgattcagattcatcatcagattctgaggcaatgtctgcc

SEQ ID NO: 12878 - DNA, 1165 bp, Glycine max
  Gm_smallRNAprecursor_5711
gttttgtgaccgaaattaaatttaatctaaatagataccaaaacaatcatcttcgttttggtaaaaggggtcttcttcttcttcttcagcataacttgtttcttccttctttgaggatgaaccttcttcttcctactgtaacatttgcagaacttcctttagatttttagttaggacctcctttgatttcgatcctgctaaaaatgctgccagatgagacttttggttcaaaaacacagaagtttctgaatcagctgctttgaggaattctggatgggattggaaccagattgttacttgttctggatttgctttggatgagtcaaattgtgtccaccattttacaaatgcgtgtctttgtagtgatggatattggtttatcttttcagtcttgctgtaacgatattgccatgagaagatccatgacagtgcaaagcttgaaaagtattaaagatctgctggaattcgtgattcctacgaattgtattgtcaatcaaattgagcaaatccttgttggactgtttctgggaatatctctgggattggtccaaagaagtcccaccattgcaaaaaccaattgggaaaattgtaaattgtattggtcttgaaatatatcagccatgaatgcttgaagcgggtattttggtgccaaaacaccttagtccaagcatcaacataatcccaataggtataacctatcagatcaaatggaactgaaaatctctttcctttgttcaagtccgaaccaaagtgtcttggttgaagaacttttagtatttggattgtggagtgggtgtttaatgtttggtcttttgggtctttgaaatgtttgatagatgctgaatttgaatctaccaaaatcaattcataaaaagttcttgtcttcaggatggtggttggtttgtagtgaaatcctagtgggaaagccttgaccgttgccttgaagggatttttgtcccaaaattcaggttccatctacaaaacaattacaaatttatttttataaatataattgttagtttgtttggtaggtggtgtttaagctttggctaaaggtagtttccctttaggattggtagctgttttggtcattgatgcattttggatcactgtttgtaaatttgattcagattcatcatcagattctgaggcaatgtctgcccaa

SEQ ID NO: 12879 - DNA, 1129 bp, Glycine max
  Gm_smallRNAprecursor_5712
ctacaaaacaattacaaatttatttttataaatataattgttagtttgtttggtaggtggtgtttaagctttggctaaaggtagtttccctttaggattggtagctgttttggtcattgatgcattttggatcactgtttgtaaatttgattcagattcatcatcagattctgaggcaatgtctgcccaagattttttgattatttttggaaatttggttatacccatgtcttgaagggcctgaagggtttcaattggccatgcatagtcggccgatgtttgtttggcggttgccgatttgggagattcctgagtggatggctcaggtttgattgaggtaatctgggttgatgacccttctaaattggttttctgggtagatgacccagcctgggttggtgacccagaagaggttgatgatttcttaattgttggctctggaagagccagtctggctcctttgcctgtacttcttcctcctcttagggagattcccgatgccttaggaggcattaccacttttctgtaagaattcacgggtaaggtagtcaggtaatgaatttgaggtgcccttgatgttttctatgtcaaaatcaaagacacttagaattgcttgccatcttgcaaaaatttgttttgaggcaaggtttttaacatctttttgtaaaatatctttggctgatttacaatcaactctgattaaaaatttttggtttaataaatccgattgaaatttggaaatgcacaaaacaattgctaaaacttcctttttaacagttgaatattttaattatgcaggattccaatgttttgatgtatatgcgatgacatgatcttggccatggactctttgtttgaggatgccaccataacctatgtctgaagcatcagtttcgacagttttaaatgcctgtggaataagaagatacagatattttatggattggactttgactttgatttctttaactgtttgtgtatggaggtcagaccaaggaggcggatttttctttagcctatcatgcaatggcttgacaatattgtttaaataggggacaaattctcctacgtaatttagacaacctagaaatctttgtaactgggttttgtctaagatttggttgggaaa

SEQ ID NO: 12880 - DNA, 1115 bp, Glycine max
  Gm_smallRNAprecursor_5713
caaatttatttttataaatataattgttagtttgtttggtaggtggtgtttaagctttggctaaaggtagtttccctttaggattggtagctgttttggtcattgatgcattttggatcactgtttgtaaatttgattcagattcatcatcagattctgaggcaatgtctgcccaagattttttgattatttttggaaatttggttatacccatgtcttgaagggcctgaagggtttcaattggccatgcatagtcggccgatgtttgtttggcggttgccgatttgggagattcctgagtggatggctcaggtttgattgaggtaatctgggttgatgacccttctaaattggttttctgggtagatgacccagcctgggttggtgacccagaagaggttgatgatttcttaattgttggctctggaagagccagtctggctcctttgcctgtacttcttcctcctcttagggagattcccgatgccttaggaggcattaccacttttctgtaagaattcacgggtaaggtagtcaggtaatgaatttgaggtgcccttgatgttttctatgtcaaaatcaaagacacttagaattgcttgccatcttgcaaaaatttgttttgaggcaaggtttttaacatctttttgtaaaatatctttggctgatttacaatcaactctgattaaaaatttttggtttaataaatccgattgaaatttggaaatgcacaaaacaattgctaaaacttcctttttaacagttgaatattttaattatgcaggattccaatgttttgatgtatatgcgatgacatgatcttggccatggactctttgtttgaggatgccaccataacctatgtctgaagcatcagtttcgacagttttaaatgcctgtggaataagaagatacagatattttatggattggactttgactttgatttctttaactgtttgtgtatggaggtcagaccaaggaggcggatttttctttagcctatcatgcaatggcttgacaatattgtttaaataggggacaaattctcctacgtaatttagacaacctagaaatctttgtaactgggttttgtctaagatttggttgggaaa

SEQ ID NO: 12881 - DNA, 1232 bp, Glycine max
  Gm_smallRNAprecursor_5714
aattgcttgccatcttgcaaaaatttgttttgaggcaaggtttttaacatctttttgtaaaatatctttggctgatttacaatcaactctgattaaaaatttttggtttaataaatccgattgaaatttggaaatgcacaaaacaattgctaaaacttcctttttaacagttgaatattttaattatgcaggattccaatgttttgatgtatatgcgatgacatgatcttggccatggactctttgtttgaggatgccaccataacctatgtctgaagcatcagtttcgacagttttaaatgcctgtggaataagaagatacagatattttatggattggactttgactttgatttctttaactgtttgtgtatggaggtcagaccaaggaggcggatttttctttagcctatcatgcaatggcttgacaatattgtttaaataggggacaaattctcctacgtaatttagacaacctagaaatctttgtaactgggttttgtctaagatttggttgggaaatttgctagcaaactctattgatctttctattggaatgattgtaccttgatatatattgtgaccaaggaatcgaattcgagtttggaaaagattgatttttgatttggagactgccaaaccattctgtttgatgatatggatgaaggtctggagatgtttgaaatgttggtcaatgttttgggaaaagattaaaacatcatctatttagacaatgacaaattttgaatagggattaaaaatatcattcattaatttttgaaattctgaaggggcattctttagtccgaatggcatcacattccattcatattgcccaaaaggtacagtgaacgttgttttgtacctatctgattcttggacttggattttccagaatccagatttcatatcaaattttgaaaatatctttgcaaaatttaatctattaagtaagtcttttttgtttggaataggatacctaatccattgcaatgcttgatttagtggtttgtaatttatgactaagcggggtgttccactctcaatctcagattgtttgttgacataaaaagccgcacaagaccatgggcttttgcttttccggattaggcctttatcaagcaaatccttgatttccttttggcagtattgaaggagttcttcgttcatttggattagtctggcttttgtgggaatttgtttttccctaaagtctttctcataagggagat

SEQ ID NO: 12882 - DNA, 1205 bp, Glycine max
  Gm_smallRNAprecursor_5715
ttttgaggcaaggtttttaacatctttttgtaaaatatctttggctgatttacaatcaactctgattaaaaatttttggtttaataaatccgattgaaatttggaaatgcacaaaacaattgctaaaacttcctttttaacagttgaatattttaattatgcaggattccaatgttttgatgtatatgcgatgacatgatcttggccatggactctttgtttgaggatgccaccataacctatgtctgaagcatcagtttcgacagttttaaatgcctgtggaataagaagatacagatattttatggattggactttgactttgatttctttaactgtttgtgtatggaggtcagaccaaggaggcggatttttctttagcctatcatgcaatggcttgacaatattgtttaaataggggacaaattctcctacgtaatttagacaacctagaaatctttgtaactgggttttgtctaagatttggttgggaaatttgctagcaaactctattgatctttctattggaatgattgtaccttgatatatattgtgaccaaggaatcgaattcgagtttggaaaagattgatttttgatttggagactgccaaaccattctgtttgatgatatggatgaaggtctggagatgtttgaaatgttggtcaatgttttgggaaaagattaaaacatcatctatttagacaatgacaaattttgaatagggattaaaaatatcattcattaatttttgaaattctgaaggggcattctttagtccgaatggcatcacattccattcatattgcccaaaaggtacagtgaacgttgttttgtacctatctgattcttggacttggattttccagaatccagatttcatatcaaattttgaaaatatctttgcaaaatttaatctattaagtaagtcttttttgtttggaataggatacctaatccattgcaatgcttgatttagtggtttgtaatttatgactaagcggggtgttccactctcaatctcagattgtttgttgacataaaaagccgcacaagaccatgggcttttgcttttccggattaggcctttatcaagcaaatccttgatttccttttggcagtattgaaggagttcttcgttcatttggattagtctggcttttgtgggaatttgtttttccctaaagtctttctcataagggagat

SEQ ID NO: 12883 - DNA, 1034 bp, Glycine max
  Gm_smallRNAprecursor_5716
atttaaaatatctaatacattttagtttcttattttcttatacataagtacttatagaaaagttttatctaaacacaactataacaagtttagttcaacttttccttcttttttttccataaatattaaccgtttcaaaaatatatcataaaattgctataaagaaagtaaatgttgtatgtagaggtggcagaatgggtagtctaattcaggtttaaaattttaagctatatcgtgtaggtttgggccggtccaatgcgagttgtgggctacaaagggtcgggttaaaaaagtctaatttcaatttgcgcatctaaaatgaagctcaagccctataaaaatgacgtatttttgcaagctaaccctgtattgagacatgattggttcaagttaaaggtttgtgtttgatttaggtctaaaattaagttcaaatcctacattttaggctaatgctaggtgtacctagtattattgctggtgcacccagcacttaaagggaaaagactgaaatatccttgatccataaaccttttaagttgatctgtaagccttttaagttgatccgtaaaagatttacagatcaagttgatccttaagccttttatggatcaacttgatccataaaaaccttatggattaacttgatccgtatgcttaatatcaacatacagatcaacttgatccgtatcaaccttacggatcaacttgatccgtatgatttacagaccactctctcacacacccagcacaaatacgaaaaaagcacagggacaattttgacattttcaaaaaaaaatgctgagtgcaccagcaataatgctgggtgcacctaacatgagcctacattttacatgcagtttgaggcccaaactagtccaacctattttatttttatcaaagttaaggaaattcaaacacatgtccttaagatatagataagcaacttaatcaaatttaaattttatttgaataaatttttcgatgaacactttcaaaaaaaaaaagtaaataaattaaatttctcccataagtta

SEQ ID NO: 12884 - DNA, 1157 bp, Glycine max
  Gm_smallRNAprecursor_5717
atcagaggtcaatgtccataagggcatatgttaactgaacttatggatctgaaccatgtacagtaattttaatttaaacagtatgtgtttgaacagtattttctgaaagcacagcagtttgatattttagttgaatgatattgtagcagtaagtcccgtggttgagaaagggcagttagactaaggtgtaaggcagtcggcccctataacggtaatatactggtggctataggagtagtgttcaaactatattgtctgtaaaaaaaaatatttttcatttattcagattcaagaagttctgtaacatatagccttatggaaatatttctatggaaccaaatgaaggcaaagatattagagaatgttataatcatgtctagactattgcgatctttttcccgtatctcttttcgatcaaattcctcctcatcatcttcttcaagaaactccaatttattaaatgatcaagataaccagacccaagaggtcgcccccaaacacaatctcttcgatgaggaagtccgattcgaagatatcaatcaaaacatggatgactggaacattccagaaatccctcaggatcaactatacgttcctgaaacaattaaggacaaacacaactttgattacataatcaaaacagtagaaaataatattcctctaggacaagatataggggaagaatttcatttactttcaaaaaattcaatttatgaacatagccgtaagtataaatatctacacatcggctgtgtacaagtagccatcaagcccttaattgacataggcatagatgcagcagttttaatgtgtctaagagatattaggcataataaatttgaagactccctaattggaacagtcgaaaccagcctaggacaaggtccaatatattttaattgttacccaaacaaaacagtgagtctgatggatagatacattcttgactctctgttcttaaacatccactttcatggccttgacatgaaagaaggatcaatcccagcagccttaatttataggatccagtacaaggtcatgaatacttgtgcatctagagtcttattaaaacctcaaaaaggagaaacaactttgtatatcactgatatgacaaaggctaacgtttctctcccgagaaaaataaaatgggatgaagt

SEQ ID NO: 12885 - DNA, 1033 bp, Glycine max
  Gm_smallRNAprecursor_5718
gcagttagactaaggtgtaaggcagtcggcccctataacggtaatatactggtggctataggagtagtgttcaaactatattgtctgtaaaaaaaaatatttttcatttattcagattcaagaagttctgtaacatatagccttatggaaatatttctatggaaccaaatgaaggcaaagatattagagaatgttataatcatgtctagactattgcgatctttttcccgtatctcttttcgatcaaattcctcctcatcatcttcttcaagaaactccaatttattaaatgatcaagataaccagacccaagaggtcgcccccaaacacaatctcttcgatgaggaagtccgattcgaagatatcaatcaaaacatggatgactggaacattccagaaatccctcaggatcaactatacgttcctgaaacaattaaggacaaacacaactttgattacataatcaaaacagtagaaaataatattcctctaggacaagatataggggaagaatttcatttactttcaaaaaattcaatttatgaacatagccgtaagtataaatatctacacatcggctgtgtacaagtagccatcaagcccttaattgacataggcatagatgcagcagttttaatgtgtctaagagatattaggcataataaatttgaagactccctaattggaacagtcgaaaccagcctaggacaaggtccaatatattttaattgttacccaaacaaaacagtgagtctgatggatagatacattcttgactctctgttcttaaacatccactttcatggccttgacatgaaagaaggatcaatcccagcagccttaatttataggatccagtacaaggtcatgaatacttgtgcatctagagtcttattaaaacctcaaaaaggagaaacaactttgtatatcactgatatgacaaaggctaacgtttctctcccgagaaaaataaaatgggatgaagtaactcttcccgaaagatgggttatggataaggccacaccgtctgttc

SEQ ID NO: 12886 - DNA, 1168 bp, Glycine max
  Gm_smallRNAprecursor_5719
atggtcttgtgcggctttttatgtcaacaaacaatctgagattgagcgtggaacaccccgcttagtcataaattacaaaccactaaatcaagcattacaatggattaggtatcctattccaaacaaaaaagacttacttaatagattaaattctgcaaagatattttcaaaatttgatatgaaatctggattctggcaaatccaaatccaagaatcagataggtacaaaacggcgtttactgtacctttcgggcaatatgaatggaatgtgatgtcattcggactgaagaatgccccttcagaatttcaaaaaattatgaatgatatttttaatccctattcaaaatttgtcattgtctacatagatgatgttttaatcttttcccaaaacattgaccaacatttcaaacatctccagactttcatccatatcatcaaacaaaatggtttggcagtctccaaatcaaaaatcaatcttttccaaactcgaattcgattccttggtcacaatatatatcaaggtacaatcattccaatagaaaggtcaattgagtttgctagcaaatttcccaaccaaatcttagacaaaacccagttactaagatttctaggttgtctaaattacgtaggagaatttgtcccctatttaaacaatattgtcaagccattgcatgataggctgaagaaaaatccgcctccttggtctgacctccatacacaaacagttaaagaaatcaaagtcaaactctaatccataaaatgtctgtatcttcctattccacaggcatttaaaattgtcgaaattgatgcttcagacataggttatggtggcatcctcaaacaaagagtccatggccaagatcatgtcattgcatatacatcaaaacattggaatcctgcacaattaaaatattcaactgttaaaaaggaagttttagcaattgttttgtgcatttccaaatttcaatcagatttattaaaccaaaattttttaatcagagttgattgtaaatcagccaaagatattttacaaaaagatgttaaaaaccttgcctcaaaacaaatttttgcaagatggcaagcaattctaagtgtctttgattttgacataaaatacatcaagggcacctcaaattcattacctgactaccttacccgtgaattctta

SEQ ID NO: 12887 - DNA, 1095 bp, Glycine max
  Gm_smallRNAprecursor_5720
tgaatggaatgtgatgtcattcggactgaagaatgccccttcagaatttcaaaaaattatgaatgatatttttaatccctattcaaaatttgtcattgtctacatagatgatgttttaatcttttcccaaaacattgaccaacatttcaaacatctccagactttcatccatatcatcaaacaaaatggtttggcagtctccaaatcaaaaatcaatcttttccaaactcgaattcgattccttggtcacaatatatatcaaggtacaatcattccaatagaaaggtcaattgagtttgctagcaaatttcccaaccaaatcttagacaaaacccagttactaagatttctaggttgtctaaattacgtaggagaatttgtcccctatttaaacaatattgtcaagccattgcatgataggctgaagaaaaatccgcctccttggtctgacctccatacacaaacagttaaagaaatcaaagtcaaactctaatccataaaatgtctgtatcttcctattccacaggcatttaaaattgtcgaaattgatgcttcagacataggttatggtggcatcctcaaacaaagagtccatggccaagatcatgtcattgcatatacatcaaaacattggaatcctgcacaattaaaatattcaactgttaaaaaggaagttttagcaattgttttgtgcatttccaaatttcaatcagatttattaaaccaaaattttttaatcagagttgattgtaaatcagccaaagatattttacaaaaagatgttaaaaaccttgcctcaaaacaaatttttgcaagatggcaagcaattctaagtgtctttgattttgacataaaatacatcaagggcacctcaaattcattacctgactaccttacccgtgaattcttacagaaaagtggtaatggctcctaaggcatcaggaatctccttaaggggaggaagaagtacaggcaaaggagccagactggctcttccagagccaaccattaagaaatcatcaacctcttctgggtcaccaacccaggctgggtaatctacccagaaaaccaatttagaagggtcatcaacccaga

SEQ ID NO: 12888 - DNA, 1095 bp, Glycine max; identical to SEQ ID NO: 12887
  Gm_smallRNAprecursor_5721

SEQ ID NO: 12889 - DNA, 1095 bp, Glycine max; identical to SEQ ID NO: 12887
  Gm_smallRNAprecursor_5722

SEQ ID NO: 12890 - DNA, 1095 bp, Glycine max; identical to SEQ ID NO: 12887
  Gm_smallRNAprecursor_5723

SEQ ID NO: 12891 - DNA, 1166 bp, Glycine max
  Gm_smallRNAprecursor_5724
tgaatggaatgtgatgtcattcggactgaagaatgccccttcagaatttcaaaaaattatgaatgatatttttaatccctattcaaaatttgtcattgtctacatagatgatgttttaatcttttcccaaaacattgaccaacatttcaaacatctccagactttcatccatatcatcaaacaaaatggtttggcagtctccaaatcaaaaatcaatcttttccaaactcgaattcgattccttggtcacaatatatatcaaggtacaatcattccaatagaaaggtcaattgagtttgctagcaaatttcccaaccaaatcttagacaaaacccagttactaagatttctaggttgtctaaattacgtaggagaatttgtcccctatttaaacaatattgtcaagccattgcatgataggctgaagaaaaatccgcctccttggtctgacctccatacacaaacagttaaagaaatcaaagtcaaactctaatccataaaatgtctgtatcttcctattccacaggcatttaaaattgtcgaaattgatgcttcagacataggttatggtggcatcctcaaacaaagagtccatggccaagatcatgtcattgcatatacatcaaaacattggaatcctgcacaattaaaatattcaactgttaaaaaggaagttttagcaattgttttgtgcatttccaaatttcaatcagatttattaaaccaaaattttttaatcagagttgattgtaaatcagccaaagatattttacaaaaagatgttaaaaaccttgcctcaaaacaaatttttgcaagatggcaagcaattctaagtgtctttgattttgacataaaatacatcaagggcacctcaaattcattacctgactaccttacccgtgaattcttacagaaaagtggtaatggctcctaaggcatcaggaatctccttaaggggaggaagaagtacaggcaaaggagccagactggctcttccagagccaaccattaagaaatcatcaacctcttctgggtcaccaacccaggctgggtaatctacccagaaaaccaatttagaagggtcatcaacccagattgcctcaatcaaacctgagccatccactcaggaatctcccaaaccggtaaccgccaaacaaacatcggcc

SEQ ID NO: 12892 - DNA, 1166 bp, Glycine max; identical to SEQ ID NO: 12891
  Gm_smallRNAprecursor_5725

SEQ ID NO: 12893 - DNA, 1167 bp, Glycine max
  Gm_smallRNAprecursor_5726
tgaatggaatgtgatgtcattcggactgaagaatgccccttcagaatttcaaaaaattatgaatgatatttttaatccctattcaaaatttgtcattgtctacatagatgatgttttaatcttttcccaaaacattgaccaacatttcaaacatctccagactttcatccatatcatcaaacaaaatggtttggcagtctccaaatcaaaaatcaatcttttccaaactcgaattcgattccttggtcacaatatatatcaaggtacaatcattccaatagaaaggtcaattgagtttgctagcaaatttcccaaccaaatcttagacaaaacccagttactaagatttctaggttgtctaaattacgtaggagaatttgtcccctatttaaacaatattgtcaagccattgcatgataggctgaagaaaaatccgcctccttggtctgacctccatacacaaacagttaaagaaatcaaagtcaaactctaatccataaaatgtctgtatcttcctattccacaggcatttaaaattgtcgaaattgatgcttcagacataggttatggtggcatcctcaaacaaagagtccatggccaagatcatgtcattgcatatacatcaaaacattggaatcctgcacaattaaaatattcaactgttaaaaaggaagttttagcaattgttttgtgcatttccaaatttcaatcagatttattaaaccaaaattttttaatcagagttgattgtaaatcagccaaagatattttacaaaaagatgttaaaaaccttgcctcaaaacaaatttttgcaagatggcaagcaattctaagtgtctttgattttgacataaaatacatcaagggcacctcaaattcattacctgactaccttacccgtgaattcttacagaaaagtggtaatggctcctaaggcatcaggaatctccttaaggggaggaagaagtacaggcaaaggagccagactggctcttccagagccaaccattaagaaatcatcaacctcttctgggtcaccaacccaggctgggtaatctacccagaaaaccaatttagaagggtcatcaacccagattgcctcaatcaaacctgagccatccactcaggaatctcccaaaccggtaaccgccaaacaaacatcggccg

SEQ ID NO: 12894 - DNA, 1167 bp, Glycine max; identical to SEQ ID NO: 12893
  Gm_smallRNAprecursor_5727

SEQ ID NO: 12895 - DNA, 1035 bp, Glycine max
  Gm_smallRNAprecursor_5728
attgtctacatagatgatgttttaatcttttcccaaaacattgaccaacatttcaaacatctccagactttcatccatatcatcaaacaaaatggtttggcagtctccaaatcaaaaatcaatcttttccaaactcgaattcgattccttggtcacaatatatatcaaggtacaatcattccaatagaaaggtcaattgagtttgctagcaaatttcccaaccaaatcttagacaaaacccagttactaagatttctaggttgtctaaattacgtaggagaatttgtcccctatttaaacaatattgtcaagccattgcatgataggctgaagaaaaatccgcctccttggtctgacctccatacacaaacagttaaagaaatcaaagtcaaactctaatccataaaatgtctgtatcttcctattccacaggcatttaaaattgtcgaaattgatgcttcagacataggttatggtggcatcctcaaacaaagagtccatggccaagatcatgtcattgcatatacatcaaaacattggaatcctgcacaattaaaatattcaactgttaaaaaggaagttttagcaattgttttgtgcatttccaaatttcaatcagatttattaaaccaaaattttttaatcagagttgattgtaaatcagccaaagatattttacaaaaagatgttaaaaaccttgcctcaaaacaaatttttgcaagatggcaagcaattctaagtgtctttgattttgacataaaatacatcaagggcacctcaaattcattacctgactaccttacccgtgaattcttacagaaaagtggtaatggctcctaaggcatcaggaatctccttaaggggaggaagaagtacaggcaaaggagccagactggctcttccagagccaaccattaagaaatcatcaacctcttctgggtcaccaacccaggctgggtaatctacccagaaaaccaatttagaagggtcatcaacccagattgcctcaatcaaacctgagccatccactcagga

SEQ ID NO: 12896 - DNA, 1035 bp, Glycine max; identical to SEQ ID NO: 12895
  Gm_smallRNAprecursor_5729

SEQ ID NO: 12897 - DNA, 1037 bp, Glycine max
  Gm_smallRNAprecursor_5730
aaacattgaccaacatttcaaacatctccagactttcatccatatcatcaaacaaaatggtttggcagtctccaaatcaaaaatcaatcttttccaaactcgaattcgattccttggtcacaatatatatcaaggtacaatcattccaatagaaaggtcaattgagtttgctagcaaatttcccaaccaaatcttagacaaaacccagttactaagatttctaggttgtctaaattacgtaggagaatttgtcccctatttaaacaatattgtcaagccattgcatgataggctgaagaaaaatccgcctccttggtctgacctccatacacaaacagttaaagaaatcaaagtcaaactctaatccataaaatgtctgtatcttcctattccacaggcatttaaaattgtcgaaattgatgcttcagacataggttatggtggcatcctcaaacaaagagtccatggccaagatcatgtcattgcatatacatcaaaacattggaatcctgcacaattaaaatattcaactgttaaaaaggaagttttagcaattgttttgtgcatttccaaatttcaatcagatttattaaaccaaaattttttaatcagagttgattgtaaatcagccaaagatattttacaaaaagatgttaaaaaccttgcctcaaaacaaatttttgcaagatggcaagcaattctaagtgtctttgattttgacataaaatacatcaagggcacctcaaattcattacctgactaccttacccgtgaattcttacagaaaagtggtaatggctcctaaggcatcaggaatctccttaaggggaggaagaagtacaggcaaaggagccagactggctcttccagagccaaccattaagaaatcatcaacctcttctgggtcaccaacccaggctgggtaatctacccagaaaaccaatttagaagggtcatcaacccagattgcctcaatcaaacctgagccatccactcaggaatctcccaaaccggtaaccgccaaacaaacatcggcc

SEQ ID NO: 12898 - DNA, 1208 bp, Glycine max
  Gm_smallRNAprecursor_5731
ctaaggcatcaggaatctccttaaggggaggaagaagtacaggcaaaggagccagactggctcttccagagccaaccattaagaaatcatcaacctcttctgggtcaccaacccaggctgggtaatctacccagaaaaccaatttagaagggtcatcaacccagattgcctcaatcaaacctgagccatccactcaggaatctcccaaaccggtaaccgccaaacaaacatcggccgactatgcatggccaattgaaacccttcaggcccttcaagacatgggtctaaccaaatttccaaaaataatcaaaaaatcttgggtagacattgcctcagaatctgatgatgaatttgaatcaaatttacaaacaatgatccaaaatgcatcaatgaccaaaacaactaccaatcctaaagggaaactacctttagccaaagctcaaacaccacctaccaaacaaactaacaattatatttataaaaataaatttacaactgttttgcagatggaacctgaattttgggacaaaaatcccttcaaggcgacggccaaggctttcccaccaggatttcactacaaaccaaccaccatcctgaaaacaagaactttttatgaattgattttggtagattcaaactcagtatctatcaaacatttcaaagacccaaaagaccaaacattaaacacccactcgacaatccaaatactaaaagttcttcaaccaagacactttggttcggacttgaacaaaggaaagagattttcagttccatttgatccggtaggttatacctattgggattatgttgatgcttggactaaggtgttttggcaccaaaatacccgtttcaagcattcatggctgatatatttcaagaccaatacaatttacaattttcccaattggtttttgcaatggtgggacttctttggaccaatcccagagatattcccagaaatagtcctacaaggattttctcaatttgagagacaatacaattcgcaggaatcatgaattccagcagatcttaaatacttttcaagctttgcactgtcatggatcttctcatggcaatatcgttacagcaagactgaaaagacaaaccaatatccatcactacaaagacacgcatttgtaaaatggtggacacaatttgactcatccaaagcggatccagaacaagtgaaactctggttccaatcccat

SEQ ID NO: 12899 - DNA, 1208 bp, Glycine max; identical to SEQ ID NO: 12898
  Gm_smallRNAprecursor_5732

SEQ ID NO: 12900 - DNA, 1211 bp, Glycine max
  Gm_smallRNAprecursor_5733
ctaaggcatcaggaatctccttaaggggaggaagaagtacaggcaaaggagccagactggctcttccagagccaaccattaagaaatcatcaacctcttctgggtcaccaacccaggctgggtaatctacccagaaaaccaatttagaagggtcatcaacccagattgcctcaatcaaacctgagccatccactcaggaatctcccaaaccggtaaccgccaaacaaacatcggccgactatgcatggccaattgaaacccttcaggcccttcaagacatgggtctaaccaaatttccaaaaataatcaaaaaatcttgggtagacattgcctcagaatctgatgatgaatttgaatcaaatttacaaacaatgatccaaaatgcatcaatgaccaaaacaactaccaatcctaaagggaaactacctttagccaaagctcaaacaccacctaccaaacaaactaacaattatatttataaaaataaatttacaactgttttgcagatggaacctgaattttgggacaaaaatcccttcaaggcgacggccaaggctttcccaccaggatttcactacaaaccaaccaccatcctgaaaacaagaactttttatgaattgattttggtagattcaaactcagtatctatcaaacatttcaaagacccaaaagaccaaacattaaacacccactcgacaatccaaatactaaaagttcttcaaccaagacactttggttcggacttgaacaaaggaaagagattttcagttccatttgatccggtaggttatacctattgggattatgttgatgcttggactaaggtgttttggcaccaaaatacccgtttcaagcattcatggctgatatatttcaagaccaatacaatttacaattttcccaattggtttttgcaatggtgggacttctttggaccaatcccagagatattcccagaaatagtcctacaaggattttctcaatttgagagacaatacaattcgcaggaatcatgaattccagcagatcttaaatacttttcaagctttgcactgtcatggatcttctcatggcaatatcgttacagcaagactgaaaagacaaaccaatatccatcactacaaagacacgcatttgtaaaatggtggacacaatttgactcatccaaagcggatccagaacaagtgaaactctggttccaatcccatcca

SEQ ID NO: 12901 - DNA, 1098 bp, Glycine max
  Gm_smallRNAprecursor_5734
ggaatctccttaaggggaggaagaagtacaggcaaaggagccagactggctcttccagagccaaccattaagaaatcatcaacctcttctgggtcaccaacccaggctgggtaatctacccagaaaaccaatttagaagggtcatcaacccagattgcctcaatcaaacctgagccatccactcaggaatctcccaaaccggtaaccgccaaacaaacatcggccgactatgcatggccaattgaaacccttcaggcccttcaagacatgggtctaaccaaatttccaaaaataatcaaaaaatcttgggtagacattgcctcagaatctgatgatgaatttgaatcaaatttacaaacaatgatccaaaatgcatcaatgaccaaaacaactaccaatcctaaagggaaactacctttagccaaagctcaaacaccacctaccaaacaaactaacaattatatttataaaaataaatttacaactgttttgcagatggaacctgaattttgggacaaaaatcccttcaaggcgacggccaaggctttcccaccaggatttcactacaaaccaaccaccatcctgaaaacaagaactttttatgaattgattttggtagattcaaactcagtatctatcaaacatttcaaagacccaaaagaccaaacattaaacacccactcgacaatccaaatactaaaagttcttcaaccaagacactttggttcggacttgaacaaaggaaagagattttcagttccatttgatccggtaggttatacctattgggattatgttgatgcttggactaaggtgttttggcaccaaaatacccgtttcaagcattcatggctgatatatttcaagaccaatacaatttacaattttcccaattggtttttgcaatggtgggacttctttggaccaatcccagagatattcccagaaatagtcctacaaggattttctcaatttgagagacaatacaattcgcaggaatcatgaattccagcagatcttaaatacttttcaagctttgcactgtcatggatcttctcatggcaatatcgttacagcaagactgaaaagacaaaccaa

SEQ ID NO: 12902 - DNA, 1190 bp, Glycine max
  Gm_smallRNAprecursor_5735
acaggcaaaggagccagactggctcttccagagccaaccattaagaaatcatcaacctcttctgggtcaccaacccaggctgggtaatctacccagaaaaccaatttagaagggtcatcaacccagattgcctcaatcaaacctgagccatccactcaggaatctcccaaaccggtaaccgccaaacaaacatcggccgactatgcatggccaattgaaacccttcaggcccttcaagacatgggtctaaccaaatttccaaaaataatcaaaaaatcttgggtagacattgcctcagaatctgatgatgaatttgaatcaaatttacaaacaatgatccaaaatgcatcaatgaccaaaacaactaccaatcctaaagggaaactacctttagccaaagctcaaacaccacctaccaaacaaactaacaattatatttataaaaataaatttacaactgttttgcagatggaacctgaattttgggacaaaaatcccttcaaggcgacggccaaggctttcccaccaggatttcactacaaaccaaccaccatcctgaaaacaagaactttttatgaattgattttggtagattcaaactcagtatctatcaaacatttcaaagacccaaaagaccaaacattaaacacccactcgacaatccaaatactaaaagttcttcaaccaagacactttggttcggacttgaacaaaggaaagagattttcagttccatttgatccggtaggttatacctattgggattatgttgatgcttggactaaggtgttttggcaccaaaatacccgtttcaagcattcatggctgatatatttcaagaccaatacaatttacaattttcccaattggtttttgcaatggtgggacttctttggaccaatcccagagatattcccagaaatagtcctacaaggattttctcaatttgagagacaatacaattcgcaggaatcatgaattccagcagatcttaaatacttttcaagctttgcactgtcatggatcttctcatggcaatatcgttacagcaagactgaaaagacaaaccaatatccatcactacaaagacacgcatttgtaaaatggtggacacaatttgactcatccaaagcggatccagaacaagtgaaactctggttccaatcccatccagaattcctcaaagcagc

SEQ ID NO: 12903 - DNA, 1171 bp, Glycine max
  Gm_smallRNAprecursor_5736
tcccaaaccggtaaccgccaaacaaacatcggccgactatgcatggccaattgaaacccttcaggcccttcaagacatgggtctaaccaaatttccaaaaataatcaaaaaatcttgggtagacattgcctcagaatctgatgatgaatttgaatcaaatttacaaacaatgatccaaaatgcatcaatgaccaaaacaactaccaatcctaaagggaaactacctttagccaaagctcaaacaccacctaccaaacaaactaacaattatatttataaaaataaatttacaactgttttgcagatggaacctgaattttgggacaaaaatcccttcaaggcgacggccaaggctttcccaccaggatttcactacaaaccaaccaccatcctgaaaacaagaactttttatgaattgattttggtagattcaaactcagtatctatcaaacatttcaaagacccaaaagaccaaacattaaacacccactcgacaatccaaatactaaaagttcttcaaccaagacactttggttcggacttgaacaaaggaaagagattttcagttccatttgatccggtaggttatacctattgggattatgttgatgcttggactaaggtgttttggcaccaaaatacccgtttcaagcattcatggctgatatatttcaagaccaatacaatttacaattttcccaattggtttttgcaatggtgggacttctttggaccaatcccagagatattcccagaaatagtcctacaaggattttctcaatttgagagacaatacaattcgcaggaatcatgaattccagcagatcttaaatacttttcaagctttgcactgtcatggatcttctcatggcaatatcgttacagcaagactgaaaagacaaaccaatatccatcactacaaagacacgcatttgtaaaatggtggacacaatttgactcatccaaagcggatccagaacaagtgaaactctggttccaatcccatccagaattcctcaaagcagctaatccagaaacttctgtgtttttgaaccaaaagtctcatctggcagcatttttagcaggatcgaaatcaaaggaggtcttagctaaaaatctaaaggaagttctgcaaatgttacagcaggaagaagaaggttcatcctcaaag

SEQ ID NO: 12904 - DNA, 1166 bp, Glycine max
  Gm_smallRNAprecursor_5737
ccaaaccggtaaccgccaaacaaacatcggccgactatgcatggccaattgaaacccttcaggcccttcaagacatgggtctaaccaaatttccaaaaataatcaaaaaatcttgggtagacattgcctcagaatctgatgatgaatttgaatcaaatttacaaacaatgatccaaaatgcatcaatgaccaaaacaactaccaatcctaaagggaaactacctttagccaaagctcaaacaccacctaccaaacaaactaacaattatatttataaaaataaatttacaactgttttgcagatggaacctgaattttgggacaaaaatcccttcaaggcgacggccaaggctttcccaccaggatttcactacaaaccaaccaccatcctgaaaacaagaactttttatgaattgattttggtagattcaaactcagtatctatcaaacatttcaaagacccaaaagaccaaacattaaacacccactcgacaatccaaatactaaaagttcttcaaccaagacactttggttcggacttgaacaaaggaaagagattttcagttccatttgatccggtaggttatacctattgggattatgttgatgcttggactaaggtgttttggcaccaaaatacccgtttcaagcattcatggctgatatatttcaagaccaatacaatttacaattttcccaattggtttttgcaatggtgggacttctttggaccaatcccagagatattcccagaaatagtcctacaaggattttctcaatttgagagacaatacaattcgcaggaatcatgaattccagcagatcttaaatacttttcaagctttgcactgtcatggatcttctcatggcaatatcgttacagcaagactgaaaagacaaaccaatatccatcactacaaagacacgcatttgtaaaatggtggacacaatttgactcatccaaagcggatccagaacaagtgaaactctggttccaatcccatccagaattcctcaaagcagctaatccagaaacttctgtgtttttgaaccaaaagtctcatctggcagcatttttagcaggatcgaaatcaaaggaggtcttagctaaaaatctaaaggaagttctgcaaatgttacagcaggaagaagaaggttcatcctca

SEQ ID NO: 12905 - DNA, 1169 bp, Glycine max
  Gm_smallRNAprecursor_5738
ccaaaccggtaaccgccaaacaaacatcggccgactatgcatggccaattgaaacccttcaggcccttcaagacatgggtctaaccaaatttccaaaaataatcaaaaaatcttgggtagacattgcctcagaatctgatgatgaatttgaatcaaatttacaaacaatgatccaaaatgcatcaatgaccaaaacaactaccaatcctaaagggaaactacctttagccaaagctcaaacaccacctaccaaacaaactaacaattatatttataaaaataaatttacaactgttttgcagatggaacctgaattttgggacaaaaatcccttcaaggcgacggccaaggctttcccaccaggatttcactacaaaccaaccaccatcctgaaaacaagaactttttatgaattgattttggtagattcaaactcagtatctatcaaacatttcaaagacccaaaagaccaaacattaaacacccactcgacaatccaaatactaaaagttcttcaaccaagacactttggttcggacttgaacaaaggaaagagattttcagttccatttgatccggtaggttatacctattgggattatgttgatgcttggactaaggtgttttggcaccaaaatacccgtttcaagcattcatggctgatatatttcaagaccaatacaatttacaattttcccaattggtttttgcaatggtgggacttctttggaccaatcccagagatattcccagaaatagtcctacaaggattttctcaatttgagagacaatacaattcgcaggaatcatgaattccagcagatcttaaatacttttcaagctttgcactgtcatggatcttctcatggcaatatcgttacagcaagactgaaaagacaaaccaatatccatcactacaaagacacgcatttgtaaaatggtggacacaatttgactcatccaaagcggatccagaacaagtgaaactctggttccaatcccatccagaattcctcaaagcagctaatccagaaacttctgtgtttttgaaccaaaagtctcatctggcagcatttttagcaggatcgaaatcaaaggaggtcttagctaaaaatctaaaggaagttctgcaaatgttacagcaggaagaagaaggttcatcctcaaag

SEQ ID NO: 12906 - DNA, 1107 bp, Glycine max
  Gm_smallRNAprecursor_5739
aaccggtaaccgccaaacaaacatcggccgactatgcatggccaattgaaacccttcaggcccttcaagacatgggtctaaccaaatttccaaaaataatcaaaaaatcttgggtagacattgcctcagaatctgatgatgaatttgaatcaaatttacaaacaatgatccaaaatgcatcaatgaccaaaacaactaccaatcctaaagggaaactacctttagccaaagctcaaacaccacctaccaaacaaactaacaattatatttataaaaataaatttacaactgttttgcagatggaacctgaattttgggacaaaaatcccttcaaggcgacggccaaggctttcccaccaggatttcactacaaaccaaccaccatcctgaaaacaagaactttttatgaattgattttggtagattcaaactcagtatctatcaaacatttcaaagacccaaaagaccaaacattaaacacccactcgacaatccaaatactaaaagttcttcaaccaagacactttggttcggacttgaacaaaggaaagagattttcagttccatttgatccggtaggttatacctattgggattatgttgatgcttggactaaggtgttttggcaccaaaatacccgtttcaagcattcatggctgatatatttcaagaccaatacaatttacaattttcccaattggtttttgcaatggtgggacttctttggaccaatcccagagatattcccagaaatagtcctacaaggattttctcaatttgagagacaatacaattcgcaggaatcatgaattccagcagatcttaaatacttttcaagctttgcactgtcatggatcttctcatggcaatatcgttacagcaagactgaaaagacaaaccaatatccatcactacaaagacacgcatttgtaaaatggtggacacaatttgactcatccaaagcggatccagaacaagtgaaactctggttccaatcccatccagaattcctcaaagcagctaatccagaaacttctgtgtttttgaaccaaaagtctcatctggcagcatttttagcaggatcgaaatcaaaggaggtcttagcta

SEQ ID NO: 12907 - DNA, 1107 bp, Glycine max; identical to SEQ ID NO: 12906
  Gm_smallRNAprecursor_5740

SEQ ID NO: 12908 - DNA, 1108 bp, Glycine max
  Gm_smallRNAprecursor_5741
aaccggtaaccgccaaacaaacatcggccgactatgcatggccaattgaaacccttcaggcccttcaagacatgggtctaaccaaatttccaaaaataatcaaaaaatcttgggtagacattgcctcagaatctgatgatgaatttgaatcaaatttacaaacaatgatccaaaatgcatcaatgaccaaaacaactaccaatcctaaagggaaactacctttagccaaagctcaaacaccacctaccaaacaaactaacaattatatttataaaaataaatttacaactgttttgcagatggaacctgaattttgggacaaaaatcccttcaaggcgacggccaaggctttcccaccaggatttcactacaaaccaaccaccatcctgaaaacaagaactttttatgaattgattttggtagattcaaactcagtatctatcaaacatttcaaagacccaaaagaccaaacattaaacacccactcgacaatccaaatactaaaagttcttcaaccaagacactttggttcggacttgaacaaaggaaagagattttcagttccatttgatccggtaggttatacctattgggattatgttgatgcttggactaaggtgttttggcaccaaaatacccgtttcaagcattcatggctgatatatttcaagaccaatacaatttacaattttcccaattggtttttgcaatggtgggacttctttggaccaatcccagagatattcccagaaatagtcctacaaggattttctcaatttgagagacaatacaattcgcaggaatcatgaattccagcagatcttaaatacttttcaagctttgcactgtcatggatcttctcatggcaatatcgttacagcaagactgaaaagacaaaccaatatccatcactacaaagacacgcatttgtaaaatggtggacacaatttgactcatccaaagcggatccagaacaagtgaaactctggttccaatcccatccagaattcctcaaagcagctaatccagaaacttctgtgtttttgaaccaaaagtctcatctggcagcatttttagcaggatcgaaatcaaaggaggtcttagctaa

SEQ ID NO: 12909 - DNA, 1108 bp, Glycine max; identical to SEQ ID NO: 12908
  Gm_smallRNAprecursor_5742

SEQ ID NO: 12910 - DNA, 1102 bp, Glycine max
  Gm_smallRNAprecursor_5743
cggtaaccgccaaacaaacatcggccgactatgcatggccaattgaaacccttcaggcccttcaagacatgggtctaaccaaatttccaaaaataatcaaaaaatcttgggtagacattgcctcagaatctgatgatgaatttgaatcaaatttacaaacaatgatccaaaatgcatcaatgaccaaaacaactaccaatcctaaagggaaactacctttagccaaagctcaaacaccacctaccaaacaaactaacaattatatttataaaaataaatttacaactgttttgcagatggaacctgaattttgggacaaaaatcccttcaaggcgacggccaaggctttcccaccaggatttcactacaaaccaaccaccatcctgaaaacaagaactttttatgaattgattttggtagattcaaactcagtatctatcaaacatttcaaagacccaaaagaccaaacattaaacacccactcgacaatccaaatactaaaagttcttcaaccaagacactttggttcggacttgaacaaaggaaagagattttcagttccatttgatccggtaggttatacctattgggattatgttgatgcttggactaaggtgttttggcaccaaaatacccgtttcaagcattcatggctgatatatttcaagaccaatacaatttacaattttcccaattggtttttgcaatggtgggacttctttggaccaatcccagagatattcccagaaatagtcctacaaggattttctcaatttgagagacaatacaattcgcaggaatcatgaattccagcagatcttaaatacttttcaagctttgcactgtcatggatcttctcatggcaatatcgttacagcaagactgaaaagacaaaccaatatccatcactacaaagacacgcatttgtaaaatggtggacacaatttgactcatccaaagcggatccagaacaagtgaaactctggttccaatcccatccagaattcctcaaagcagctaatccagaaacttctgtgtttttgaaccaaaagtctcatctggcagcatttttagcaggatcgaaatcaaaggaggtcttagc

SEQ ID NO: 12911 - DNA, 1098 bp, Glycine max
  Gm_smallRNAprecursor_5744
caagacatgggtctaaccaaatttccaaaaataatcaaaaaatcttgggtagacattgcctcagaatctgatgatgaatttgaatcaaatttacaaacaatgatccaaaatgcatcaatgaccaaaacaactaccaatcctaaagggaaactacctttagccaaagctcaaacaccacctaccaaacaaactaacaattatatttataaaaataaatttacaactgttttgcagatggaacctgaattttgggacaaaaatcccttcaaggcgacggccaaggctttcccaccaggatttcactacaaaccaaccaccatcctgaaaacaagaactttttatgaattgattttggtagattcaaactcagtatctatcaaacatttcaaagacccaaaagaccaaacattaaacacccactcgacaatccaaatactaaaagttcttcaaccaagacactttggttcggacttgaacaaaggaaagagattttcagttccatttgatccggtaggttatacctattgggattatgttgatgcttggactaaggtgttttggcaccaaaatacccgtttcaagcattcatggctgatatatttcaagaccaatacaatttacaattttcccaattggtttttgcaatggtgggacttctttggaccaatcccagagatattcccagaaatagtcctacaaggattttctcaatttgagagacaatacaattcgcaggaatcatgaattccagcagatcttaaatacttttcaagctttgcactgtcatggatcttctcatggcaatatcgttacagcaagactgaaaagacaaaccaatatccatcactacaaagacacgcatttgtaaaatggtggacacaatttgactcatccaaagcggatccagaacaagtgaaactctggttccaatcccatccagaattcctcaaagcagctaatccagaaacttctgtgtttttgaaccaaaagtctcatctggcagcatttttagcaggatcgaaatcaaaggaggtcttagctaaaaatctaaaggaagttctgcaaatgttacagcaggaagaagaaggttcatcctca

SEQ ID NO: 12912 - DNA, 1099 bp, Glycine max
  Gm_smallRNAprecursor_5745
caagacatgggtctaaccaaatttccaaaaataatcaaaaaatcttgggtagacattgcctcagaatctgatgatgaatttgaatcaaatttacaaacaatgatccaaaatgcatcaatgaccaaaacaactaccaatcctaaagggaaactacctttagccaaagctcaaacaccacctaccaaacaaactaacaattatatttataaaaataaatttacaactgttttgcagatggaacctgaattttgggacaaaaatcccttcaaggcgacggccaaggctttcccaccaggatttcactacaaaccaaccaccatcctgaaaacaagaactttttatgaattgattttggtagattcaaactcagtatctatcaaacatttcaaagacccaaaagaccaaacattaaacacccactcgacaatccaaatactaaaagttcttcaaccaagacactttggttcggacttgaacaaaggaaagagattttcagttccatttgatccggtaggttatacctattgggattatgttgatgcttggactaaggtgttttggcaccaaaatacccgtttcaagcattcatggctgatatatttcaagaccaatacaatttacaattttcccaattggtttttgcaatggtgggacttctttggaccaatcccagagatattcccagaaatagtcctacaaggattttctcaatttgagagacaatacaattcgcaggaatcatgaattccagcagatcttaaatacttttcaagctttgcactgtcatggatcttctcatggcaatatcgttacagcaagactgaaaagacaaaccaatatccatcactacaaagacacgcatttgtaaaatggtggacacaatttgactcatccaaagcggatccagaacaagtgaaactctggttccaatcccatccagaattcctcaaagcagctaatccagaaacttctgtgtttttgaaccaaaagtctcatctggcagcatttttagcaggatcgaaatcaaaggaggtcttagctaaaaatctaaaggaagttctgcaaatgttacagcaggaagaagaaggttcatcctcaa

SEQ ID NO: 12913 - DNA, 1244 bp, Glycine max
  Gm_smallRNAprecursor_5746
caagacatgggtctaaccaaatttccaaaaataatcaaaaaatcttgggtagacattgcctcagaatctgatgatgaatttgaatcaaatttacaaacaatgatccaaaatgcatcaatgaccaaaacaactaccaatcctaaagggaaactacctttagccaaagctcaaacaccacctaccaaacaaactaacaattatatttataaaaataaatttacaactgttttgcagatggaacctgaattttgggacaaaaatcccttcaaggcgacggccaaggctttcccaccaggatttcactacaaaccaaccaccatcctgaaaacaagaactttttatgaattgattttggtagattcaaactcagtatctatcaaacatttcaaagacccaaaagaccaaacattaaacacccactcgacaatccaaatactaaaagttcttcaaccaagacactttggttcggacttgaacaaaggaaagagattttcagttccatttgatccggtaggttatacctattgggattatgttgatgcttggactaaggtgttttggcaccaaaatacccgtttcaagcattcatggctgatatatttcaagaccaatacaatttacaattttcccaattggtttttgcaatggtgggacttctttggaccaatcccagagatattcccagaaatagtcctacaaggattttctcaatttgagagacaatacaattcgcaggaatcatgaattccagcagatcttaaatacttttcaagctttgcactgtcatggatcttctcatggcaatatcgttacagcaagactgaaaagacaaaccaatatccatcactacaaagacacgcatttgtaaaatggtggacacaatttgactcatccaaagcggatccagaacaagtgaaactctggttccaatcccatccagaattcctcaaagcagctaatccagaaacttctgtgtttttgaaccaaaagtctcatctggcagcatttttagcaggatcgaaatcaaaggaggtcttagctaaaaatctaaaggaagttctgcaaatgttacagcaggaagaagaaggttcatcctcaaagaaggaagaaacaagttctgctgaagaagaagaagaagaagaccccttttaccaaaacgaagatgattgttttggtatctgtttagattaaatttaatttcggtcacaaaaccgtctgtttgtaattaatgtgtaattaatgct

SEQ ID NO: 12914 - DNA, 1146 bp, Glycine max
  Gm_smallRNAprecursor_5747
aatgatccaaaatgcatcaatgaccaaaacaactaccaatcctaaagggaaactacctttagccaaagctcaaacaccacctaccaaacaaactaacaattatatttataaaaataaatttacaactgttttgcagatggaacctgaattttgggacaaaaatcccttcaaggcgacggccaaggctttcccaccaggatttcactacaaaccaaccaccatcctgaaaacaagaactttttatgaattgattttggtagattcaaactcagtatctatcaaacatttcaaagacccaaaagaccaaacattaaacacccactcgacaatccaaatactaaaagttcttcaaccaagacactttggttcggacttgaacaaaggaaagagattttcagttccatttgatccggtaggttatacctattgggattatgttgatgcttggactaaggtgttttggcaccaaaatacccgtttcaagcattcatggctgatatatttcaagaccaatacaatttacaattttcccaattggtttttgcaatggtgggacttctttggaccaatcccagagatattcccagaaatagtcctacaaggattttctcaatttgagagacaatacaattcgcaggaatcatgaattccagcagatcttaaatacttttcaagctttgcactgtcatggatcttctcatggcaatatcgttacagcaagactgaaaagacaaaccaatatccatcactacaaagacacgcatttgtaaaatggtggacacaatttgactcatccaaagcggatccagaacaagtgaaactctggttccaatcccatccagaattcctcaaagcagctaatccagaaacttctgtgtttttgaaccaaaagtctcatctggcagcatttttagcaggatcgaaatcaaaggaggtcttagctaaaaatctaaaggaagttctgcaaatgttacagcaggaagaagaaggttcatcctcaaagaaggaagaaacaagttctgctgaagaagaagaagaagaagaccccttttaccaaaacgaagatgattgttttggtatctgtttagattaaatttaatttcggtcacaaaaccgtctgtttgtaattaatgtgtaattaatgct

SEQ ID NO: 12915 - DNA, 1144 bp, Glycine max
  Gm_smallRNAprecursor_5748
tgatccaaaatgcatcaatgaccaaaacaactaccaatcctaaagggaaactacctttagccaaagctcaaacaccacctaccaaacaaactaacaattatatttataaaaataaatttacaactgttttgcagatggaacctgaattttgggacaaaaatcccttcaaggcgacggccaaggctttcccaccaggatttcactacaaaccaaccaccatcctgaaaacaagaactttttatgaattgattttggtagattcaaactcagtatctatcaaacatttcaaagacccaaaagaccaaacattaaacacccactcgacaatccaaatactaaaagttcttcaaccaagacactttggttcggacttgaacaaaggaaagagattttcagttccatttgatccggtaggttatacctattgggattatgttgatgcttggactaaggtgttttggcaccaaaatacccgtttcaagcattcatggctgatatatttcaagaccaatacaatttacaattttcccaattggtttttgcaatggtgggacttctttggaccaatcccagagatattcccagaaatagtcctacaaggattttctcaatttgagagacaatacaattcgcaggaatcatgaattccagcagatcttaaatacttttcaagctttgcactgtcatggatcttctcatggcaatatcgttacagcaagactgaaaagacaaaccaatatccatcactacaaagacacgcatttgtaaaatggtggacacaatttgactcatccaaagcggatccagaacaagtgaaactctggttccaatcccatccagaattcctcaaagcagctaatccagaaacttctgtgtttttgaaccaaaagtctcatctggcagcatttttagcaggatcgaaatcaaaggaggtcttagctaaaaatctaaaggaagttctgcaaatgttacagcaggaagaagaaggttcatcctcaaagaaggaagaaacaagttctgctgaagaagaagaagaagaagaccccttttaccaaaacgaagatgattgttttggtatctgtttagattaaatttaatttcggtcacaaaaccgtctgtttgtaattaatgtgtaattaatgct

SEQ ID NO: 12916 - DNA, 1078 bp, Glycine max
  Gm_smallRNAprecursor_5749
attcaaactcagtatctatcaaacatttcaaagacccaaaagaccaaacattaaacacccactcgacaatccaaatactaaaagttcttcaaccaagacactttggttcggacttgaacaaaggaaagagattttcagttccatttgatccggtaggttatacctattgggattatgttgatgcttggactaaggtgttttggcaccaaaatacccgtttcaagcattcatggctgatatatttcaagaccaatacaatttacaattttcccaattggtttttgcaatggtgggacttctttggaccaatcccagagatattcccagaaatagtcctacaaggattttctcaatttgagagacaatacaattcgcaggaatcatgaattccagcagatcttaaatacttttcaagctttgcactgtcatggatcttctcatggcaatatcgttacagcaagactgaaaagacaaaccaatatccatcactacaaagacacgcatttgtaaaatggtggacacaatttgactcatccaaagcggatccagaacaagtgaaactctggttccaatcccatccagaattcctcaaagcagctaatccagaaacttctgtgtttttgaaccaaaagtctcatctggcagcatttttagcaggatcgaaatcaaaggaggtcttagctaaaaatctaaaggaagttctgcaaatgttacagcaggaagaagaaggttcatcctcaaagaaggaagaaacaagttctgctgaagaagaagaagaagaagaccccttttaccaaaacgaagatgattgttttggtatctgtttagattaaatttaatttcggtcacaaaaccgtctgtttgtaattaatgtgtaattaatgctggacaatactatctgtcctgtagccattaaagtcccggtcaaaactacttgtcttgtaacaaacagtcaaatagtcccggtcaaaactaccggcaactaccggtcttagatttttggctatataaggagtcctcaagtatgttgtgaggcaccctttcatttggccatttttcaggtttctgaagagaggtg

SEQ ID NO: 12917 - DNA, 1079 bp, Glycine max
  Gm_smallRNAprecursor_5750
attcaaactcagtatctatcaaacatttcaaagacccaaaagaccaaacattaaacacccactcgacaatccaaatactaaaagttcttcaaccaagacactttggttcggacttgaacaaaggaaagagattttcagttccatttgatccggtaggttatacctattgggattatgttgatgcttggactaaggtgttttggcaccaaaatacccgtttcaagcattcatggctgatatatttcaagaccaatacaatttacaattttcccaattggtttttgcaatggtgggacttctttggaccaatcccagagatattcccagaaatagtcctacaaggattttctcaatttgagagacaatacaattcgcaggaatcatgaattccagcagatcttaaatacttttcaagctttgcactgtcatggatcttctcatggcaatatcgttacagcaagactgaaaagacaaaccaatatccatcactacaaagacacgcatttgtaaaatggtggacacaatttgactcatccaaagcggatccagaacaagtgaaactctggttccaatcccatccagaattcctcaaagcagctaatccagaaacttctgtgtttttgaaccaaaagtctcatctggcagcatttttagcaggatcgaaatcaaaggaggtcttagctaaaaatctaaaggaagttctgcaaatgttacagcaggaagaagaaggttcatcctcaaagaaggaagaaacaagttctgctgaagaagaagaagaagaagaccccttttaccaaaacgaagatgattgttttggtatctgtttagattaaatttaatttcggtcacaaaaccgtctgtttgtaattaatgtgtaattaatgctggacaatactatctgtcctgtagccattaaagtcccggtcaaaactacttgtcttgtaacaaacagtcaaatagtcccggtcaaaactaccggcaactaccggtcttagatttttggctatataaggagtcctcaagtatgttgtgaggcaccctttcatttggccatttttcaggtttctgaagagaggtgc

SEQ ID NO: 12918 - DNA, 1245 bp, Glycine max
  Gm_smallRNAprecursor_5751
attaaacacccactcgacaatccaaatactaaaagttcttcaaccaagacactttggttcggacttgaacaaaggaaagagattttcagttccatttgatccggtaggttatacctattgggattatgttgatgcttggactaaggtgttttggcaccaaaatacccgtttcaagcattcatggctgatatatttcaagaccaatacaatttacaattttcccaattggtttttgcaatggtgggacttctttggaccaatcccagagatattcccagaaatagtcctacaaggattttctcaatttgagagacaatacaattcgcaggaatcatgaattccagcagatcttaaatacttttcaagctttgcactgtcatggatcttctcatggcaatatcgttacagcaagactgaaaagacaaaccaatatccatcactacaaagacacgcatttgtaaaatggtggacacaatttgactcatccaaagcggatccagaacaagtgaaactctggttccaatcccatccagaattcctcaaagcagctaatccagaaacttctgtgtttttgaaccaaaagtctcatctggcagcatttttagcaggatcgaaatcaaaggaggtcttagctaaaaatctaaaggaagttctgcaaatgttacagcaggaagaagaaggttcatcctcaaagaaggaagaaacaagttctgctgaagaagaagaagaagaagaccccttttaccaaaacgaagatgattgttttggtatctgtttagattaaatttaatttcggtcacaaaaccgtctgtttgtaattaatgtgtaattaatgctggacaatactatctgtcctgtagccattaaagtcccggtcaaaactacttgtcttgtaacaaacagtcaaatagtcccggtcaaaactaccggcaactaccggtcttagatttttggctatataaggagtcctcaagtatgttgtgaggcaccctttcatttggccatttttcaggtttctgaagagaggtgctctgaaacaagatttttgtaagcgcttctttcaagtttcaataaatttctattttttcatctctcttctctctctttaccgatcctgtgcggctctgccgccgcttcgatttctttgtttatgaaaacctgggatttgtaagctggtctccgatgtgcccttaatatctgttttacaagtttatattttcctttccatttatcatactgcattct

SEQ ID NO: 12919 - DNA, 1246 bp, Glycine max
  Gm_smallRNAprecursor_5752
attaaacacccactcgacaatccaaatactaaaagttcttcaaccaagacactttggttcggacttgaacaaaggaaagagattttcagttccatttgatccggtaggttatacctattgggattatgttgatgcttggactaaggtgttttggcaccaaaatacccgtttcaagcattcatggctgatatatttcaagaccaatacaatttacaattttcccaattggtttttgcaatggtgggacttctttggaccaatcccagagatattcccagaaatagtcctacaaggattttctcaatttgagagacaatacaattcgcaggaatcatgaattccagcagatcttaaatacttttcaagctttgcactgtcatggatcttctcatggcaatatcgttacagcaagactgaaaagacaaaccaatatccatcactacaaagacacgcatttgtaaaatggtggacacaatttgactcatccaaagcggatccagaacaagtgaaactctggttccaatcccatccagaattcctcaaagcagctaatccagaaacttctgtgtttttgaaccaaaagtctcatctggcagcatttttagcaggatcgaaatcaaaggaggtcttagctaaaaatctaaaggaagttctgcaaatgttacagcaggaagaagaaggttcatcctcaaagaaggaagaaacaagttctgctgaagaagaagaagaagaagaccccttttaccaaaacgaagatgattgttttggtatctgtttagattaaatttaatttcggtcacaaaaccgtctgtttgtaattaatgtgtaattaatgctggacaatactatctgtcctgtagccattaaagtcccggtcaaaactacttgtcttgtaacaaacagtcaaatagtcccggtcaaaactaccggcaactaccggtcttagatttttggctatataaggagtcctcaagtatgttgtgaggcaccctttcatttggccatttttcaggtttctgaagagaggtgctctgaaacaagatttttgtaagcgcttctttcaagtttcaataaatttctattttttcatctctcttctctctctttaccgatcctgtgcggctctgccgccgcttcgatttctttgtttatgaaaacctgggatttgtaagctggtctccgatgtgcccttaatatctgttttacaagtttatattttcctttccatttatcatactgcattcta

SEQ ID NO: 12920 - DNA, 1060 bp, Glycine max
  Gm_smallRNAprecursor_5753
atttcaagaccaatacaatttacaattttcccaattggtttttgcaatggtgggacttctttggaccaatcccagagatattcccagaaatagtcctacaaggattttctcaatttgagagacaatacaattcgcaggaatcatgaattccagcagatcttaaatacttttcaagctttgcactgtcatggatcttctcatggcaatatcgttacagcaagactgaaaagacaaaccaatatccatcactacaaagacacgcatttgtaaaatggtggacacaatttgactcatccaaagcggatccagaacaagtgaaactctggttccaatcccatccagaattcctcaaagcagctaatccagaaacttctgtgtttttgaaccaaaagtctcatctggcagcatttttagcaggatcgaaatcaaaggaggtcttagctaaaaatctaaaggaagttctgcaaatgttacagcaggaagaagaaggttcatcctcaaagaaggaagaaacaagttctgctgaagaagaagaagaagaagaccccttttaccaaaacgaagatgattgttttggtatctgtttagattaaatttaatttcggtcacaaaaccgtctgtttgtaattaatgtgtaattaatgctggacaatactatctgtcctgtagccattaaagtcccggtcaaaactacttgtcttgtaacaaacagtcaaatagtcccggtcaaaactaccggcaactaccggtcttagatttttggctatataaggagtcctcaagtatgttgtgaggcaccctttcatttggccatttttcaggtttctgaagagaggtgctctgaaacaagatttttgtaagcgcttctttcaagtttcaataaatttctattttttcatctctcttctctctctttaccgatcctgtgcggctctgccgccgcttcgatttctttgtttatgaaaacctgggatttgtaagctggtctccgatgtgcccttaatatctgttttacaagtttatattttcctttccatttatcatactgcattctaacttc

SEQ ID NO: 12921 - DNA, 1067 bp, Glycine max
  Gm_smallRNAprecursor_5754
atttcaagaccaatacaatttacaattttcccaattggtttttgcaatggtgggacttctttggaccaatcccagagatattcccagaaatagtcctacaaggattttctcaatttgagagacaatacaattcgcaggaatcatgaattccagcagatcttaaatacttttcaagctttgcactgtcatggatcttctcatggcaatatcgttacagcaagactgaaaagacaaaccaatatccatcactacaaagacacgcatttgtaaaatggtggacacaatttgactcatccaaagcggatccagaacaagtgaaactctggttccaatcccatccagaattcctcaaagcagctaatccagaaacttctgtgtttttgaaccaaaagtctcatctggcagcatttttagcaggatcgaaatcaaaggaggtcttagctaaaaatctaaaggaagttctgcaaatgttacagcaggaagaagaaggttcatcctcaaagaaggaagaaacaagttctgctgaagaagaagaagaagaagaccccttttaccaaaacgaagatgattgttttggtatctgtttagattaaatttaatttcggtcacaaaaccgtctgtttgtaattaatgtgtaattaatgctggacaatactatctgtcctgtagccattaaagtcccggtcaaaactacttgtcttgtaacaaacagtcaaatagtcccggtcaaaactaccggcaactaccggtcttagatttttggctatataaggagtcctcaagtatgttgtgaggcaccctttcatttggccatttttcaggtttctgaagagaggtgctctgaaacaagatttttgtaagcgcttctttcaagtttcaataaatttctattttttcatctctcttctctctctttaccgatcctgtgcggctctgccgccgcttcgatttctttgtttatgaaaacctgggatttgtaagctggtctccgatgtgcccttaatatctgttttacaagtttatattttcctttccatttatcatactgcattctaacttcctatttg

SEQ ID NO: 12922 - DNA, 1062 bp, Glycine max
  Gm_smallRNAprecursor_5755
tttcaagaccaatacaatttacaattttcccaattggtttttgcaatggtgggacttctttggaccaatcccagagatattcccagaaatagtcctacaaggattttctcaatttgagagacaatacaattcgcaggaatcatgaattccagcagatcttaaatacttttcaagctttgcactgtcatggatcttctcatggcaatatcgttacagcaagactgaaaagacaaaccaatatccatcactacaaagacacgcatttgtaaaatggtggacacaatttgactcatccaaagcggatccagaacaagtgaaactctggttccaatcccatccagaattcctcaaagcagctaatccagaaacttctgtgtttttgaaccaaaagtctcatctggcagcatttttagcaggatcgaaatcaaaggaggtcttagctaaaaatctaaaggaagttctgcaaatgttacagcaggaagaagaaggttcatcctcaaagaaggaagaaacaagttctgctgaagaagaagaagaagaagaccccttttaccaaaacgaagatgattgttttggtatctgtttagattaaatttaatttcggtcacaaaaccgtctgtttgtaattaatgtgtaattaatgctggacaatactatctgtcctgtagccattaaagtcccggtcaaaactacttgtcttgtaacaaacagtcaaatagtcccggtcaaaactaccggcaactaccggtcttagatttttggctatataaggagtcctcaagtatgttgtgaggcaccctttcatttggccatttttcaggtttctgaagagaggtgctctgaaacaagatttttgtaagcgcttctttcaagtttcaataaatttctattttttcatctctcttctctctctttaccgatcctgtgcggctctgccgccgcttcgatttctttgtttatgaaaacctgggatttgtaagctggtctccgatgtgcccttaatatctgttttacaagtttatattttcctttccatttatcatactgcattctaacttccta

SEQ ID NO: 12923 - DNA, 1063 bp, Glycine max
  Gm_smallRNAprecursor_5756
tttcaagaccaatacaatttacaattttcccaattggtttttgcaatggtgggacttctttggaccaatcccagagatattcccagaaatagtcctacaaggattttctcaatttgagagacaatacaattcgcaggaatcatgaattccagcagatcttaaatacttttcaagctttgcactgtcatggatcttctcatggcaatatcgttacagcaagactgaaaagacaaaccaatatccatcactacaaagacacgcatttgtaaaatggtggacacaatttgactcatccaaagcggatccagaacaagtgaaactctggttccaatcccatccagaattcctcaaagcagctaatccagaaacttctgtgtttttgaaccaaaagtctcatctggcagcatttttagcaggatcgaaatcaaaggaggtcttagctaaaaatctaaaggaagttctgcaaatgttacagcaggaagaagaaggttcatcctcaaagaaggaagaaacaagttctgctgaagaagaagaagaagaagaccccttttaccaaaacgaagatgattgttttggtatctgtttagattaaatttaatttcggtcacaaaaccgtctgtttgtaattaatgtgtaattaatgctggacaatactatctgtcctgtagccattaaagtcccggtcaaaactacttgtcttgtaacaaacagtcaaatagtcccggtcaaaactaccggcaactaccggtcttagatttttggctatataaggagtcctcaagtatgttgtgaggcaccctttcatttggccatttttcaggtttctgaagagaggtgctctgaaacaagatttttgtaagcgcttctttcaagtttcaataaatttctattttttcatctctcttctctctctttaccgatcctgtgcggctctgccgccgcttcgatttctttgtttatgaaaacctgggatttgtaagctggtctccgatgtgcccttaatatctgttttacaagtttatattttcctttccatttatcatactgcattctaacttcctat

SEQ ID NO: 12924 - DNA, 1063 bp, Glycine max; identical to SEQ ID NO: 12923
  Gm_smallRNAprecursor_5757

SEQ ID NO: 12925 - DNA, 1066 bp, Glycine max
  Gm_smallRNAprecursor_5758
tttcaagaccaatacaatttacaattttcccaattggtttttgcaatggtgggacttctttggaccaatcccagagatattcccagaaatagtcctacaaggattttctcaatttgagagacaatacaattcgcaggaatcatgaattccagcagatcttaaatacttttcaagctttgcactgtcatggatcttctcatggcaatatcgttacagcaagactgaaaagacaaaccaatatccatcactacaaagacacgcatttgtaaaatggtggacacaatttgactcatccaaagcggatccagaacaagtgaaactctggttccaatcccatccagaattcctcaaagcagctaatccagaaacttctgtgtttttgaaccaaaagtctcatctggcagcatttttagcaggatcgaaatcaaaggaggtcttagctaaaaatctaaaggaagttctgcaaatgttacagcaggaagaagaaggttcatcctcaaagaaggaagaaacaagttctgctgaagaagaagaagaagaagaccccttttaccaaaacgaagatgattgttttggtatctgtttagattaaatttaatttcggtcacaaaaccgtctgtttgtaattaatgtgtaattaatgctggacaatactatctgtcctgtagccattaaagtcccggtcaaaactacttgtcttgtaacaaacagtcaaatagtcccggtcaaaactaccggcaactaccggtcttagatttttggctatataaggagtcctcaagtatgttgtgaggcaccctttcatttggccatttttcaggtttctgaagagaggtgctctgaaacaagatttttgtaagcgcttctttcaagtttcaataaatttctattttttcatctctcttctctctctttaccgatcctgtgcggctctgccgccgcttcgatttctttgtttatgaaaacctgggatttgtaagctggtctccgatgtgcccttaatatctgttttacaagtttatattttcctttccatttatcatactgcattctaacttcctatttg

SEQ ID NO: 12926 - DNA, 1059 bp, Glycine max
  Gm_smallRNAprecursor_5759
caagaccaatacaatttacaattttcccaattggtttttgcaatggtgggacttctttggaccaatcccagagatattcccagaaatagtcctacaaggattttctcaatttgagagacaatacaattcgcaggaatcatgaattccagcagatcttaaatacttttcaagctttgcactgtcatggatcttctcatggcaatatcgttacagcaagactgaaaagacaaaccaatatccatcactacaaagacacgcatttgtaaaatggtggacacaatttgactcatccaaagcggatccagaacaagtgaaactctggttccaatcccatccagaattcctcaaagcagctaatccagaaacttctgtgtttttgaaccaaaagtctcatctggcagcatttttagcaggatcgaaatcaaaggaggtcttagctaaaaatctaaaggaagttctgcaaatgttacagcaggaagaagaaggttcatcctcaaagaaggaagaaacaagttctgctgaagaagaagaagaagaagaccccttttaccaaaacgaagatgattgttttggtatctgtttagattaaatttaatttcggtcacaaaaccgtctgtttgtaattaatgtgtaattaatgctggacaatactatctgtcctgtagccattaaagtcccggtcaaaactacttgtcttgtaacaaacagtcaaatagtcccggtcaaaactaccggcaactaccggtcttagatttttggctatataaggagtcctcaagtatgttgtgaggcaccctttcatttggccatttttcaggtttctgaagagaggtgctctgaaacaagatttttgtaagcgcttctttcaagtttcaataaatttctattttttcatctctcttctctctctttaccgatcctgtgcggctctgccgccgcttcgatttctttgtttatgaaaacctgggatttgtaagctggtctccgatgtgcccttaatatctgttttacaagtttatattttcctttccatttatcatactgcattctaacttccta

SEQ ID NO: 12927 - DNA, 1059 bp, Glycine max; identical to SEQ ID NO: 12926
  Gm_smallRNAprecursor_5760

SEQ ID NO: 12928 - DNA, 1060 bp, Glycine max
  Gm_smallRNAprecursor_5761
caagaccaatacaatttacaattttcccaattggtttttgcaatggtgggacttctttggaccaatcccagagatattcccagaaatagtcctacaaggattttctcaatttgagagacaatacaattcgcaggaatcatgaattccagcagatcttaaatacttttcaagctttgcactgtcatggatcttctcatggcaatatcgttacagcaagactgaaaagacaaaccaatatccatcactacaaagacacgcatttgtaaaatggtggacacaatttgactcatccaaagcggatccagaacaagtgaaactctggttccaatcccatccagaattcctcaaagcagctaatccagaaacttctgtgtttttgaaccaaaagtctcatctggcagcatttttagcaggatcgaaatcaaaggaggtcttagctaaaaatctaaaggaagttctgcaaatgttacagcaggaagaagaaggttcatcctcaaagaaggaagaaacaagttctgctgaagaagaagaagaagaagaccccttttaccaaaacgaagatgattgttttggtatctgtttagattaaatttaatttcggtcacaaaaccgtctgtttgtaattaatgtgtaattaatgctggacaatactatctgtcctgtagccattaaagtcccggtcaaaactacttgtcttgtaacaaacagtcaaatagtcccggtcaaaactaccggcaactaccggtcttagatttttggctatataaggagtcctcaagtatgttgtgaggcaccctttcatttggccatttttcaggtttctgaagagaggtgctctgaaacaagatttttgtaagcgcttctttcaagtttcaataaatttctattttttcatctctcttctctctctttaccgatcctgtgcggctctgccgccgcttcgatttctttgtttatgaaaacctgggatttgtaagctggtctccgatgtgcccttaatatctgttttacaagtttatattttcctttccatttatcatactgcattctaacttcctat

SEQ ID NO: 12929 - DNA, 1060 bp, Glycine max; identical to SEQ ID NO: 12928
  Gm_smallRNAprecursor_5762

SEQ ID NO: 12930 - DNA, 1060 bp, Glycine max; identical to SEQ ID NO: 12928
  Gm_smallRNAprecursor_5763

SEQ ID NO: 12931 - DNA, 1060 bp, Glycine max; identical to SEQ ID NO: 12928
  Gm_smallRNAprecursor_5764

SEQ ID NO: 12932 - DNA, 1155 bp, Glycine max
  Gm_smallRNAprecursor_5765
gacttctttggaccaatcccagagatattcccagaaatagtcctacaaggattttctcaatttgagagacaatacaattcgcaggaatcatgaattccagcagatcttaaatacttttcaagctttgcactgtcatggatcttctcatggcaatatcgttacagcaagactgaaaagacaaaccaatatccatcactacaaagacacgcatttgtaaaatggtggacacaatttgactcatccaaagcggatccagaacaagtgaaactctggttccaatcccatccagaattcctcaaagcagctaatccagaaacttctgtgtttttgaaccaaaagtctcatctggcagcatttttagcaggatcgaaatcaaaggaggtcttagctaaaaatctaaaggaagttctgcaaatgttacagcaggaagaagaaggttcatcctcaaagaaggaagaaacaagttctgctgaagaagaagaagaagaagaccccttttaccaaaacgaagatgattgttttggtatctgtttagattaaatttaatttcggtcacaaaaccgtctgtttgtaattaatgtgtaattaatgctggacaatactatctgtcctgtagccattaaagtcccggtcaaaactacttgtcttgtaacaaacagtcaaatagtcccggtcaaaactaccggcaactaccggtcttagatttttggctatataaggagtcctcaagtatgttgtgaggcaccctttcatttggccatttttcaggtttctgaagagaggtgctctgaaacaagatttttgtaagcgcttctttcaagtttcaataaatttctattttttcatctctcttctctctctttaccgatcctgtgcggctctgccgccgcttcgatttctttgtttatgaaaacctgggatttgtaagctggtctccgatgtgcccttaatatctgttttacaagtttatattttcctttccatttatcatactgcattctaacttcctatttgtccgtttgatcttattccgctaaaagaatatatatatatatatatatatatatatatatatatatatatatatatatatatatcttttgaaagaaatgtataaataaaaacatgtacaataactataattaacatatatat

SEQ ID NO: 12933 - DNA, 1142 bp, Glycine max
  Gm_smallRNAprecursor_5766
caatcccagagatattcccagaaatagtcctacaaggattttctcaatttgagagacaatacaattcgcaggaatcatgaattccagcagatcttaaatacttttcaagctttgcactgtcatggatcttctcatggcaatatcgttacagcaagactgaaaagacaaaccaatatccatcactacaaagacacgcatttgtaaaatggtggacacaatttgactcatccaaagcggatccagaacaagtgaaactctggttccaatcccatccagaattcctcaaagcagctaatccagaaacttctgtgtttttgaaccaaaagtctcatctggcagcatttttagcaggatcgaaatcaaaggaggtcttagctaaaaatctaaaggaagttctgcaaatgttacagcaggaagaagaaggttcatcctcaaagaaggaagaaacaagttctgctgaagaagaagaagaagaagaccccttttaccaaaacgaagatgattgttttggtatctgtttagattaaatttaatttcggtcacaaaaccgtctgtttgtaattaatgtgtaattaatgctggacaatactatctgtcctgtagccattaaagtcccggtcaaaactacttgtcttgtaacaaacagtcaaatagtcccggtcaaaactaccggcaactaccggtcttagatttttggctatataaggagtcctcaagtatgttgtgaggcaccctttcatttggccatttttcaggtttctgaagagaggtgctctgaaacaagatttttgtaagcgcttctttcaagtttcaataaatttctattttttcatctctcttctctctctttaccgatcctgtgcggctctgccgccgcttcgatttctttgtttatgaaaacctgggatttgtaagctggtctccgatgtgcccttaatatctgttttacaagtttatattttcctttccatttatcatactgcattctaacttcctatttgtccgtttgatcttattccgctaaaagaatatatatatatatatatatatatatatatatatatatatatatatatatatatatcttttgaaagaaatgtataaataaaaacatgtacaataactataattaacatatatat

SEQ ID NO: 12934 - DNA, 1044 bp, Glycine max
  Gm_smallRNAprecursor_5767
cgcacttctttttcatcgtaagtttttcactcacttggaacccagaacaaaatcactctttgtctctctcccacttccgggattgttcaacttgggaaagtggcgcatgaatcccaacctcggtatgaaattttcagatctcttactttaacaggttctgtaataacttttttttttctctttttttgttcccccatgcggtattatgtgtatacgactgcttaagtggcctatgtatgacaatgatatttttgtttgaaatttgaaatacaacttctccagtaatgaaatttggctgaatttataaagggatttataaaacttaggcaccaaatatgcaaattaaattataaggggaccaaaatcgaaattggagtaaaactggggaccaaaactacaattttacctacaaaaaatgaagcattaacagggaaccactcagactttgacacgtggcattgacacttgacattgacatgtggcagtcacacatggcagtcaacgtctgaggttaacggtcaacgtcgaaatctggcttccaagaccaattttgcagggatttataaaactggggaccaaatttgtaaattaaattatagagggaccaaatccaaaattagagataaactaggaaaccaaagtgtaattttgccaaaataaaaataaaaactgattcggtgcttatgcaaattcttgacgcttccgtgtttcattagctttcacatcttgcatccttcaaatctcatcctcttcacaaaaattcaaaaagcctaacgtctcgctatcactgttaatgtttacctctactattaatcaaaaccttccaagcccaaccacgtgaaaattgaccgaaaccttagaagaactcttcaaaatcgtgttgatttttccaagacttaataccccctcagggacaagttaaagtctacgtaatcacacattcttttaatattggaaaaatgaggtcccctaagtccatgtcttaaatatcaataattataagcatacatttattttcctatcgcgtatgtatgtaaaattcaa

SEQ ID NO: 12935 - DNA, 1131 bp, Glycine max
  Gm_smallRNAprecursor_5768
gatggcatagcggaaaataacggatgtcatgacggacaaaaaaaaaatacatatatataaactcattgaaattgaaaaaaataatggattacattcaaataaactaaaagtttcatgagttcatacaataatcaattaccaacaccaaataaactcattaaagagttcaaaataagaaaatgataaaaacataatgtaaagtgcaaagtgaaggttgaggctctaatcatcttcttcaatcccaacataatcatcttcgttgttatcatatggtaatggagcatctccctcttccccatcaaacacctcaaaattgaccatgatttcttcttcagattcaagatcaatattctcctcaatctagatcctcatcattttcttggactgttttttgctttcttgatgaagatccaacaaccattgcctgttttttagaagtttgggcagtagtaacacttgttgttttttgttttttacgcctagtatacatcctacactctccaacccccgaagcctgatacacagttgcccaatttagagcatcatcatcttcaaataccaaatcatttccagcatcattatcaccatcttgatccatctctcccacgagccattcattgcacacatcaatatcattaagagaaattggatcaatttcatctcttgcattatatctttgcttcaattgttggttgttattgcacacatcaatatcttttcttggaagctgcaacgttacccgacttcccaatcaggtgttgtttggatctggttattcctccctttgtgattttttcacagaaattacaaacaatggtgtttctatctccttccaccggtgaatgacaatattttcagcctgggtctgtcttatttttcctcgttgcacttgcagtagcagcatcgaatgatggttcaaccatttaaaagaggactgaacagaaaaaaaaaattgtggtgtcaaataaaataaaaaataaaaatgggactgtcaaaagtaaaaagagggtgtcaaatagcaaaagggaaaaaaaagctgcagacaaagaaaaggggtgtcaaacagcaaaagcaaaactaaaaaaaaaataaagcttgcgcccaccactgagttggatcgcgatgttcact

SEQ ID NO: 12936 - DNA, 1061 bp, Glycine max
  Gm_smallRNAprecursor_5769
cttggcacagtaagaaacaaaatagtgttgctttatccactgcagaagcggaatatatttctgccgacagttgttgtgctcaaatcttatggatgaagcaacaactttctgattatggaatccttcttgaccatatacctattagatgtgataatacaagtgcaattaatctctccaagaatccagttcaacactctagaactaaacatataaaaattaggcaccattttcttagagatcatgttctaaagggagattgtgtattagagtttgttgatactaagaatcaacttgctgatattttcacaaaacctctccccaaagaagcattcttctctattagaagggaattaggcctcttagatgttagtgatttagataaataaagattgattgattaatttactcttatgattgattgtttatgttaagtatgttactttgattgattttgtttaaattcttgttattatgatagaatttatgaattcctgtgtgttttatatttgaatgcttgaattaagtgcattagtagtgataattaataatattagatgtatttagcatagacataggtaattttttagaaactagcctagtttatgctctggtaatcgattaccatccagtataatcgattacacaagaacaggcagcctgtaatcaattacgacatcctgtaatcgattaccataaggcttattactcctgtaatcgattaccaagccttgtaatcaattacaactcgtcctcgtcaataaatacccatgaaaccagtgttgttgcgcagccaaggcctctcctcgtgcctcctccatccccaaatctttaaaccttcgtatcttactcaaatcttcaccaaaacacgtcccgtaaagcccaatcttcctctttttcactcctctttcacttccaccgattgaaatccactaaaacttcatcaaatggcagaaccatcgaagaagagaaagggatcatcctccaccgccgctgctactgcccatcgccgccacggaccatccaaagcacccacaacacctattcatccctctttgtcatct

SEQ ID NO: 12937 - DNA, 1056 bp, Glycine max
  Gm_smallRNAprecursor_5770
tatttgtgtttggtgtaacaccctgatatatatatatatatatatatatatatatatatatatatatatatatatatatatatatatatatatatatatatatatatttcgccttcatgattcaataaatccatgacaaggctcaaacggacagataggaagtaagaatgcagtatgataccagagatcaacggaataagatcaaacggacagataggaagtaagaatgcagtatgataaatgaaggcgcaatataaattgtaaagcagatatcaagggcacaccgaaacggcttacaaacccaggtttttgaaaacaaagaaaccgaagcggcggcagagccgcacaggatcggtgaggggagaagggagatatgaaaaacagaacttgaaatttattgaaactgaaagaaaagcttacaaagagtttttccctaggcagatcttctctctctaaaaacctgattctgagactatctgaaagggtgcctcacaaagggaacgaggactcctttaaatagactcaatttttactgtttctacagtgtcggtaatgtttaccggaactgttacaaaacttttacaaattacatttcttaaaagattctgacaaattagttacaataattcatgattactacaactaattaatcatcgtctaatgatataccgaaacaatcatcttcattttggtagaatggatcgtcttcttggtcatcattagtctctgatgattcagcttccttcttggaaggttcttcttccacttcctgttgaagtagttggagaacttctttgagattctgagcaagactctctttagattttgagcttgctaagaatgctgccagttgcgacttctgattcaggaatagagacgtctctggatcagcaggtttaaggaactcaggattgctctggaaccagttcttgacttgatctggagcagcctttgaagtatcgaattgtgaccaccattttacaaaggcgtgtctctgtaacggtggatattgcttgctgtttcagtttttccgtatctgtattgccatgaaaaaat

SEQ ID NO: 12938 - DNA, 1215 bp, Glycine max
  Gm_smallRNAprecursor_5771
atatatatatatatatatatatatatatatatatatatatatatatatatatttcgccttcatgattcaataaatccatgacaaggctcaaacggacagataggaagtaagaatgcagtatgataccagagatcaacggaataagatcaaacggacagataggaagtaagaatgcagtatgataaatgaaggcgcaatataaattgtaaagcagatatcaagggcacaccgaaacggcttacaaacccaggtttttgaaaacaaagaaaccgaagcggcggcagagccgcacaggatcggtgaggggagaagggagatatgaaaaacagaacttgaaatttattgaaactgaaagaaaagcttacaaagagtttttccctaggcagatcttctctctctaaaaacctgattctgagactatctgaaagggtgcctcacaaagggaacgaggactcctttaaatagactcaatttttactgtttctacagtgtcggtaatgtttaccggaactgttacaaaacttttacaaattacatttcttaaaagattctgacaaattagttacaataattcatgattactacaactaattaatcatcgtctaatgatataccgaaacaatcatcttcattttggtagaatggatcgtcttcttggtcatcattagtctctgatgattcagcttccttcttggaaggttcttcttccacttcctgttgaagtagttggagaacttctttgagattctgagcaagactctctttagattttgagcttgctaagaatgctgccagttgcgacttctgattcaggaatagagacgtctctggatcagcaggtttaaggaactcaggattgctctggaaccagttcttgacttgatctggagcagcctttgaagtatcgaattgtgaccaccattttacaaaggcgtgtctctgtaacggtggatattgcttgctgtttcagtttttccgtatctgtattgccatgaaaaaatccatgacaaggcaaaactggaaaaatattttaaatctgctagaatacgtgattccttgccattatagagcttgttgaattgttggaatccctgttggacttcttctgggaatatctgtggaattggtctgaagtagttccaccattggaggaaccaatttggaaaattatacacagtattatttttaaagtaaattagccatgaatgcttgaat

SEQ ID NO: 12939 - DNA, 1138 bp, Glycine max
  Gm_smallRNAprecursor_5772
cacaccgaaacggcttacaaacccaggtttttgaaaacaaagaaaccgaagcggcggcagagccgcacaggatcggtgaggggagaagggagatatgaaaaacagaacttgaaatttattgaaactgaaagaaaagcttacaaagagtttttccctaggcagatcttctctctctaaaaacctgattctgagactatctgaaagggtgcctcacaaagggaacgaggactcctttaaatagactcaatttttactgtttctacagtgtcggtaatgtttaccggaactgttacaaaacttttacaaattacatttcttaaaagattctgacaaattagttacaataattcatgattactacaactaattaatcatcgtctaatgatataccgaaacaatcatcttcattttggtagaatggatcgtcttcttggtcatcattagtctctgatgattcagcttccttcttggaaggttcttcttccacttcctgttgaagtagttggagaacttctttgagattctgagcaagactctctttagattttgagcttgctaagaatgctgccagttgcgacttctgattcaggaatagagacgtctctggatcagcaggtttaaggaactcaggattgctctggaaccagttcttgacttgatctggagcagcctttgaagtatcgaattgtgaccaccattttacaaaggcgtgtctctgtaacggtggatattgcttgctgtttcagtttttccgtatctgtattgccatgaaaaaatccatgacaaggcaaaactggaaaaatattttaaatctgctagaatacgtgattccttgccattatagagcttgttgaattgttggaatccctgttggacttcttctgggaatatctgtggaattggtctgaagtagttccaccattggaggaaccaatttggaaaattatacacagtattatttttaaagtaaattagccatgaatgcttgaatttactattttgatgccagaacacattggtccaggcgtcgatgtaatcccaataattatatcctgcggggtcaaatggagcagaaatttttttgggttggtttaggtttgagccataatgttgtggctgcataacctttaggatttgg

SEQ ID NO: 12940 - DNA, 1040 bp, Glycine max
  Gm_smallRNAprecursor_5773
cttacaaacccaggtttttgaaaacaaagaaaccgaagcggcggcagagccgcacaggatcggtgaggggagaagggagatatgaaaaacagaacttgaaatttattgaaactgaaagaaaagcttacaaagagtttttccctaggcagatcttctctctctaaaaacctgattctgagactatctgaaagggtgcctcacaaagggaacgaggactcctttaaatagactcaatttttactgtttctacagtgtcggtaatgtttaccggaactgttacaaaacttttacaaattacatttcttaaaagattctgacaaattagttacaataattcatgattactacaactaattaatcatcgtctaatgatataccgaaacaatcatcttcattttggtagaatggatcgtcttcttggtcatcattagtctctgatgattcagcttccttcttggaaggttcttcttccacttcctgttgaagtagttggagaacttctttgagattctgagcaagactctctttagattttgagcttgctaagaatgctgccagttgcgacttctgattcaggaatagagacgtctctggatcagcaggtttaaggaactcaggattgctctggaaccagttcttgacttgatctggagcagcctttgaagtatcgaattgtgaccaccattttacaaaggcgtgtctctgtaacggtggatattgcttgctgtttcagtttttccgtatctgtattgccatgaaaaaatccatgacaaggcaaaactggaaaaatattttaaatctgctagaatacgtgattccttgccattatagagcttgttgaattgttggaatccctgttggacttcttctgggaatatctgtggaattggtctgaagtagttccaccattggaggaaccaatttggaaaattatacacagtattatttttaaagtaaattagccatgaatgcttgaatttactattttgatgccagaacacattggtccaggcgtcgatgtaatcccaataattatatcc

SEQ ID NO: 12941 - DNA, 1119 bp, Glycine max
  Gm_smallRNAprecursor_5774
aaagaaaagcttacaaagagtttttccctaggcagatcttctctctctaaaaacctgattctgagactatctgaaagggtgcctcacaaagggaacgaggactcctttaaatagactcaatttttactgtttctacagtgtcggtaatgtttaccggaactgttacaaaacttttacaaattacatttcttaaaagattctgacaaattagttacaataattcatgattactacaactaattaatcatcgtctaatgatataccgaaacaatcatcttcattttggtagaatggatcgtcttcttggtcatcattagtctctgatgattcagcttccttcttggaaggttcttcttccacttcctgttgaagtagttggagaacttctttgagattctgagcaagactctctttagattttgagcttgctaagaatgctgccagttgcgacttctgattcaggaatagagacgtctctggatcagcaggtttaaggaactcaggattgctctggaaccagttcttgacttgatctggagcagcctttgaagtatcgaattgtgaccaccattttacaaaggcgtgtctctgtaacggtggatattgcttgctgtttcagtttttccgtatctgtattgccatgaaaaaatccatgacaaggcaaaactggaaaaatattttaaatctgctagaatacgtgattccttgccattatagagcttgttgaattgttggaatccctgttggacttcttctgggaatatctgtggaattggtctgaagtagttccaccattggaggaaccaatttggaaaattatacacagtattatttttaaagtaaattagccatgaatgcttgaatttactattttgatgccagaacacattggtccaggcgtcgatgtaatcccaataattatatcctgcggggtcaaatggagcagaaatttttttgggttggtttaggtttgagccataatgttgtggctgcataacctttaggatttggattgtggaatgggtatttagatttggatctttggggtctttgaagtgtttaatagatactgagttcgtatctattagaatgaattcgtagaatttacgggttttgttt

SEQ ID NO: 12942 - DNA, 1085 bp, Glycine max
  Gm_smallRNAprecursor_5775
tatctgaaagggtgcctcacaaagggaacgaggactcctttaaatagactcaatttttactgtttctacagtgtcggtaatgtttaccggaactgttacaaaacttttacaaattacatttcttaaaagattctgacaaattagttacaataattcatgattactacaactaattaatcatcgtctaatgatataccgaaacaatcatcttcattttggtagaatggatcgtcttcttggtcatcattagtctctgatgattcagcttccttcttggaaggttcttcttccacttcctgttgaagtagttggagaacttctttgagattctgagcaagactctctttagattttgagcttgctaagaatgctgccagttgcgacttctgattcaggaatagagacgtctctggatcagcaggtttaaggaactcaggattgctctggaaccagttcttgacttgatctggagcagcctttgaagtatcgaattgtgaccaccattttacaaaggcgtgtctctgtaacggtggatattgcttgctgtttcagtttttccgtatctgtattgccatgaaaaaatccatgacaaggcaaaactggaaaaatattttaaatctgctagaatacgtgattccttgccattatagagcttgttgaattgttggaatccctgttggacttcttctgggaatatctgtggaattggtctgaagtagttccaccattggaggaaccaatttggaaaattatacacagtattatttttaaagtaaattagccatgaatgcttgaatttactattttgatgccagaacacattggtccaggcgtcgatgtaatcccaataattatatcctgcggggtcaaatggagcagaaatttttttgggttggtttaggtttgagccataatgttgtggctgcataacctttaggatttggattgtggaatgggtatttagatttggatctttggggtctttgaagtgtttaatagatactgagttcgtatctattagaatgaattcgtagaatttacgggttttgtttgtggctattggcctgtaatggaatcctgggggg

SEQ ID NO: 12943 - DNA, 1085 bp, Glycine max; identical to SEQ ID NO: 12942
  Gm_smallRNAprecursor_5776

SEQ ID NO: 12944 - DNA, 1084 bp, Glycine max
  Gm_smallRNAprecursor_5777
atctgaaagggtgcctcacaaagggaacgaggactcctttaaatagactcaatttttactgtttctacagtgtcggtaatgtttaccggaactgttacaaaacttttacaaattacatttcttaaaagattctgacaaattagttacaataattcatgattactacaactaattaatcatcgtctaatgatataccgaaacaatcatcttcattttggtagaatggatcgtcttcttggtcatcattagtctctgatgattcagcttccttcttggaaggttcttcttccacttcctgttgaagtagttggagaacttctttgagattctgagcaagactctctttagattttgagcttgctaagaatgctgccagttgcgacttctgattcaggaatagagacgtctctggatcagcaggtttaaggaactcaggattgctctggaaccagttcttgacttgatctggagcagcctttgaagtatcgaattgtgaccaccattttacaaaggcgtgtctctgtaacggtggatattgcttgctgtttcagtttttccgtatctgtattgccatgaaaaaatccatgacaaggcaaaactggaaaaatattttaaatctgctagaatacgtgattccttgccattatagagcttgttgaattgttggaatccctgttggacttcttctgggaatatctgtggaattggtctgaagtagttccaccattggaggaaccaatttggaaaattatacacagtattatttttaaagtaaattagccatgaatgcttgaatttactattttgatgccagaacacattggtccaggcgtcgatgtaatcccaataattatatcctgcggggtcaaatggagcagaaatttttttgggttggtttaggtttgagccataatgttgtggctgcataacctttaggatttggattgtggaatgggtatttagatttggatctttggggtctttgaagtgtttaatagatactgagttcgtatctattagaatgaattcgtagaatttacgggttttgtttgtggctattggcctgtaatggaatcctgggggg

SEQ ID NO: 12945 - DNA, 1032 bp, Glycine max
  Gm_smallRNAprecursor_5778
aatttttactgtttctacagtgtcggtaatgtttaccggaactgttacaaaacttttacaaattacatttcttaaaagattctgacaaattagttacaataattcatgattactacaactaattaatcatcgtctaatgatataccgaaacaatcatcttcattttggtagaatggatcgtcttcttggtcatcattagtctctgatgattcagcttccttcttggaaggttcttcttccacttcctgttgaagtagttggagaacttctttgagattctgagcaagactctctttagattttgagcttgctaagaatgctgccagttgcgacttctgattcaggaatagagacgtctctggatcagcaggtttaaggaactcaggattgctctggaaccagttcttgacttgatctggagcagcctttgaagtatcgaattgtgaccaccattttacaaaggcgtgtctctgtaacggtggatattgcttgctgtttcagtttttccgtatctgtattgccatgaaaaaatccatgacaaggcaaaactggaaaaatattttaaatctgctagaatacgtgattccttgccattatagagcttgttgaattgttggaatccctgttggacttcttctgggaatatctgtggaattggtctgaagtagttccaccattggaggaaccaatttggaaaattatacacagtattatttttaaagtaaattagccatgaatgcttgaatttactattttgatgccagaacacattggtccaggcgtcgatgtaatcccaataattatatcctgcggggtcaaatggagcagaaatttttttgggttggtttaggtttgagccataatgttgtggctgcataacctttaggatttggattgtggaatgggtatttagatttggatctttggggtctttgaagtgtttaatagatactgagttcgtatctattagaatgaattcgtagaatttacgggttttgtttgtggctattggcctgtaatggaatcctgggg

SEQ ID NO: 12946 - DNA, 1069 bp, Glycine max
  Gm_smallRNAprecursor_5779
tttaccggaactgttacaaaacttttacaaattacatttcttaaaagattctgacaaattagttacaataattcatgattactacaactaattaatcatcgtctaatgatataccgaaacaatcatcttcattttggtagaatggatcgtcttcttggtcatcattagtctctgatgattcagcttccttcttggaaggttcttcttccacttcctgttgaagtagttggagaacttctttgagattctgagcaagactctctttagattttgagcttgctaagaatgctgccagttgcgacttctgattcaggaatagagacgtctctggatcagcaggtttaaggaactcaggattgctctggaaccagttcttgacttgatctggagcagcctttgaagtatcgaattgtgaccaccattttacaaaggcgtgtctctgtaacggtggatattgcttgctgtttcagtttttccgtatctgtattgccatgaaaaaatccatgacaaggcaaaactggaaaaatattttaaatctgctagaatacgtgattccttgccattatagagcttgttgaattgttggaatccctgttggacttcttctgggaatatctgtggaattggtctgaagtagttccaccattggaggaaccaatttggaaaattatacacagtattatttttaaagtaaattagccatgaatgcttgaatttactattttgatgccagaacacattggtccaggcgtcgatgtaatcccaataattatatcctgcggggtcaaatggagcagaaatttttttgggttggtttaggtttgagccataatgttgtggctgcataacctttaggatttggattgtggaatgggtatttagatttggatctttggggtctttgaagtgtttaatagatactgagttcgtatctattagaatgaattcgtagaatttacgggttttgtttgtggctattggcctgtaatggaatcctggggggaatactttggcggttgctttgaagggattcttgtcccagtattctggttccatttgtaaaacattg

SEQ ID NO: 12947 - DNA, 1067 bp, Glycine max
  Gm_smallRNAprecursor_5780
taccggaactgttacaaaacttttacaaattacatttcttaaaagattctgacaaattagttacaataattcatgattactacaactaattaatcatcgtctaatgatataccgaaacaatcatcttcattttggtagaatggatcgtcttcttggtcatcattagtctctgatgattcagcttccttcttggaaggttcttcttccacttcctgttgaagtagttggagaacttctttgagattctgagcaagactctctttagattttgagcttgctaagaatgctgccagttgcgacttctgattcaggaatagagacgtctctggatcagcaggtttaaggaactcaggattgctctggaaccagttcttgacttgatctggagcagcctttgaagtatcgaattgtgaccaccattttacaaaggcgtgtctctgtaacggtggatattgcttgctgtttcagtttttccgtatctgtattgccatgaaaaaatccatgacaaggcaaaactggaaaaatattttaaatctgctagaatacgtgattccttgccattatagagcttgttgaattgttggaatccctgttggacttcttctgggaatatctgtggaattggtctgaagtagttccaccattggaggaaccaatttggaaaattatacacagtattatttttaaagtaaattagccatgaatgcttgaatttactattttgatgccagaacacattggtccaggcgtcgatgtaatcccaataattatatcctgcggggtcaaatggagcagaaatttttttgggttggtttaggtttgagccataatgttgtggctgcataacctttaggatttggattgtggaatgggtatttagatttggatctttggggtctttgaagtgtttaatagatactgagttcgtatctattagaatgaattcgtagaatttacgggttttgtttgtggctattggcctgtaatggaatcctggggggaatactttggcggttgctttgaagggattcttgtcccagtattctggttccatttgtaaaacattg

SEQ ID NO: 12948 - DNA, 1067 bp, Glycine max; identical to SEQ ID NO: 12947
  Gm_smallRNAprecursor_5781

SEQ ID NO: 12949 - DNA, 1070 bp, Glycine max
  Gm_smallRNAprecursor_5782
acaactaattaatcatcgtctaatgatataccgaaacaatcatcttcattttggtagaatggatcgtcttcttggtcatcattagtctctgatgattcagcttccttcttggaaggttcttcttccacttcctgttgaagtagttggagaacttctttgagattctgagcaagactctctttagattttgagcttgctaagaatgctgccagttgcgacttctgattcaggaatagagacgtctctggatcagcaggtttaaggaactcaggattgctctggaaccagttcttgacttgatctggagcagcctttgaagtatcgaattgtgaccaccattttacaaaggcgtgtctctgtaacggtggatattgcttgctgtttcagtttttccgtatctgtattgccatgaaaaaatccatgacaaggcaaaactggaaaaatattttaaatctgctagaatacgtgattccttgccattatagagcttgttgaattgttggaatccctgttggacttcttctgggaatatctgtggaattggtctgaagtagttccaccattggaggaaccaatttggaaaattatacacagtattatttttaaagtaaattagccatgaatgcttgaatttactattttgatgccagaacacattggtccaggcgtcgatgtaatcccaataattatatcctgcggggtcaaatggagcagaaatttttttgggttggtttaggtttgagccataatgttgtggctgcataacctttaggatttggattgtggaatgggtatttagatttggatctttggggtctttgaagtgtttaatagatactgagttcgtatctattagaatgaattcgtagaatttacgggttttgtttgtggctattggcctgtaatggaatcctggggggaatactttggcggttgctttgaagggattcttgtcccagtattctggttccatttgtaaaacattgaaaaacttgttttttgaaatataactgttgttgggttgtgatgttgattcttgttgagtcaacaattggcttggtctttggttg

SEQ ID NO: 12950 - DNA, 1232 bp, Glycine max
  Gm_smallRNAprecursor_5783
aattgcttgccatcttgcaaaaatctgttttgaggcaaggttttttacatccttctgtaaaatgtctttggctgatttgcaatcaacccttactaaaaatttttgatttaataaatcagattgaaatctggaaatgcataaaacaattgctaaaacttcttttttaacagttgaatactttaattgtgtaggattccaatgttttgaagtatatgcgatgacatgttcttgaccgtgaatttgctgtttgaggataccaccgtaaccgatgtctgatgcatcagtttcgacaactttgaatgcttgtggaatgggaagatacaaacattttatggattggactttgactttgatttctttaactgtttgggtatggaggtcagaccaaggaggcggatttttctttagcctattatgcaatggtttgacaatattatttaagtaggggacaaattctcctacgtaatttagacaacctagaaatctttgtaactgggttttgtctaagatttggttgggaaatttgctagcaaactctattgacctttcgattggaatgattgtaccttgataaatattgtgaccaaggaatcgaattcgagtttggaaaagattgatttttgatttggagactgccaaaccattttgtttaatgatatggatgaaggtttggagatgtttgaaatgttggtcaatgttttgggaaaagattaaaacatcatctatgtagacaatgacaaattttgaatagggattaaaaatatcattcataattttttgaaattctgaaggggcattctttagtccgaatggcatcacattccattcatattgcccgaaaggtacagtaaacgctgttttgtacctatctgattcttggatttggatttgccaaaatccagatttcatatcaaattttgaaaatatctttgcagaatttaatctgttaagcaaatcctttttgtttggaataggatatctaatccattgtaatgcttgatttagtggtttgtaatttatgactaagcggggtgttccacgctcaatctcagattgtttgttgacataaaaagccgcacaagaccatgggcttttgcttttccggattaggcctttatcaagcaaatccttgatttctttttgacagtattgaagaagttcttcattcatttggattggtctggctttggtggggatttgtttttccctaaagtctttctcataagggagat

SEQ ID NO: 12951 - DNA, 1196 bp, Glycine max
  Gm_smallRNAprecursor_5784
aaggttttttacatccttctgtaaaatgtctttggctgatttgcaatcaacccttactaaaaatttttgatttaataaatcagattgaaatctggaaatgcataaaacaattgctaaaacttcttttttaacagttgaatactttaattgtgtaggattccaatgttttgaagtatatgcgatgacatgttcttgaccgtgaatttgctgtttgaggataccaccgtaaccgatgtctgatgcatcagtttcgacaactttgaatgcttgtggaatgggaagatacaaacattttatggattggactttgactttgatttctttaactgtttgggtatggaggtcagaccaaggaggcggatttttctttagcctattatgcaatggtttgacaatattatttaagtaggggacaaattctcctacgtaatttagacaacctagaaatctttgtaactgggttttgtctaagatttggttgggaaatttgctagcaaactctattgacctttcgattggaatgattgtaccttgataaatattgtgaccaaggaatcgaattcgagtttggaaaagattgatttttgatttggagactgccaaaccattttgtttaatgatatggatgaaggtttggagatgtttgaaatgttggtcaatgttttgggaaaagattaaaacatcatctatgtagacaatgacaaattttgaatagggattaaaaatatcattcataattttttgaaattctgaaggggcattctttagtccgaatggcatcacattccattcatattgcccgaaaggtacagtaaacgctgttttgtacctatctgattcttggatttggatttgccaaaatccagatttcatatcaaattttgaaaatatctttgcagaatttaatctgttaagcaaatcctttttgtttggaataggatatctaatccattgtaatgcttgatttagtggtttgtaatttatgactaagcggggtgttccacgctcaatctcagattgtttgttgacataaaaagccgcacaagaccatgggcttttgcttttccggattaggcctttatcaagcaaatccttgatttctttttgacagtattgaagaagttcttcattcatttggattggtctggctttggtggggatttgtttttccctaaagtctttctcataagggagat

SEQ ID NO: 12952 - DNA, 1076 bp, Glycine max
  Gm_smallRNAprecursor_5785
ccatctttcgggaagagttacctcatcccgttttatttttctcgggagagaaacgttagcctttgtcatatcagtgctaaacaaggttgtttctcctttttgaggttttaacaggactctagatgcacaagtattcatgaccttgtactggatcctataaattaaggctgctgggattgatccttctttcatgtcaaggccatgaaagtggatgtttaagaacagagagtcaagaatgtttctgtccatcagactcactgttttgtttggataacagttaaaatatattggaccttgtcctaggctggtttcgactgttccaattagggagtcttcaaattgattatgcctaatgtctcttagacacattaaaactgctgcatctatgcccatatcaattaagggcttgatggctacttgtacacaaccgatgtgtagatatttatacttacggctatgttcataaattgaattttttgaaagcaaatgaaattcttcccctatatcttgtcctagaggaatattgttttctactgttttgattatgtaatcaaagttgtgtttgtcttttattgtttcaggaacgtatagttgatcctgagggatttctggaatgttccagtcatccatgttttgattgatatcttcgaatcggacttcctcatcgaagagattgtgttttggggcgacctcttgggtcttgttgtcttgatcatttaataaattggagtttcttgaagaagatgatgaggaggagtttgagcgaaaagagatacgggaaaaagatcgtaatagtctagacatgattataatattctctaatatctttgccctcatttggttccataggaatatctccgtaagtaaatatgtcacaaaatttttttggatatatattattagtaattatatttgatgtttgattattttgttgtgttattttatccgtaattattttcaaggaggttaatttagttaatagaggggtgtgggtagataaaaatataacttctcaaagaagcctctcgagaaagcttctcaaagaagccacgaggaagcttctcaagaaagcctct

SEQ ID NO: 12953 - DNA, 1159 bp, Glycine max
  Gm_smallRNAprecursor_5786
ccatctttcgggaagagttacctcatcccgttttatttttctcgggagagaaacgttagcctttgtcatatcagtgctaaacaaggttgtttctcctttttgaggttttaacaggactctagatgcacaagtattcatgaccttgtactggatcctataaattaaggctgctgggattgatccttctttcatgtcaaggccatgaaagtggatgtttaagaacagagagtcaagaatgtttctgtccatcagactcactgttttgtttggataacagttaaaatatattggaccttgtcctaggctggtttcgactgttccaattagggagtcttcaaattgattatgcctaatgtctcttagacacattaaaactgctgcatctatgcccatatcaattaagggcttgatggctacttgtacacaaccgatgtgtagatatttatacttacggctatgttcataaattgaattttttgaaagcaaatgaaattcttcccctatatcttgtcctagaggaatattgttttctactgttttgattatgtaatcaaagttgtgtttgtcttttattgtttcaggaacgtatagttgatcctgagggatttctggaatgttccagtcatccatgttttgattgatatcttcgaatcggacttcctcatcgaagagattgtgttttggggcgacctcttgggtcttgttgtcttgatcatttaataaattggagtttcttgaagaagatgatgaggaggagtttgagcgaaaagagatacgggaaaaagatcgtaatagtctagacatgattataatattctctaatatctttgccctcatttggttccataggaatatctccgtaagtaaatatgtcacaaaatttttttggatatatattattagtaattatatttgatgtttgattattttgttgtgttattttatccgtaattattttcaaggaggttaatttagttaatagaggggtgtgggtagataaaaatataacttctcaaagaagcctctcgagaaagcttctcaaagaagccacgaggaagcttctcaagaaagcctcttaatgaagcttctcaagcaagctacatgaagctgtctcggtaaaaacgcttcccagccttcgttaactgttggatcttctcga

SEQ ID NO: 12954 - DNA, 1105 bp, Glycine max
  Gm_smallRNAprecursor_5787
ctgttttgtttggataacagttaaaatatattggaccttgtcctaggctggtttcgactgttccaattagggagtcttcaaattgattatgcctaatgtctcttagacacattaaaactgctgcatctatgcccatatcaattaagggcttgatggctacttgtacacaaccgatgtgtagatatttatacttacggctatgttcataaattgaattttttgaaagcaaatgaaattcttcccctatatcttgtcctagaggaatattgttttctactgttttgattatgtaatcaaagttgtgtttgtcttttattgtttcaggaacgtatagttgatcctgagggatttctggaatgttccagtcatccatgttttgattgatatcttcgaatcggacttcctcatcgaagagattgtgttttggggcgacctcttgggtcttgttgtcttgatcatttaataaattggagtttcttgaagaagatgatgaggaggagtttgagcgaaaagagatacgggaaaaagatcgtaatagtctagacatgattataatattctctaatatctttgccctcatttggttccataggaatatctccgtaagtaaatatgtcacaaaatttttttggatatatattattagtaattatatttgatgtttgattattttgttgtgttattttatccgtaattattttcaaggaggttaatttagttaatagaggggtgtgggtagataaaaatataacttctcaaagaagcctctcgagaaagcttctcaaagaagccacgaggaagcttctcaagaaagcctcttaatgaagcttctcaagcaagctacatgaagctgtctcggtaaaaacgcttcccagccttcgttaactgttggatcttctcgaaatttggtctgggggttcatttgatagatgtccacgatatgaccgttgcgatctctgatacaatgtctggcatctgaggaaggcttcctttcccgcgagcagaagcacttaagtgtttcaacctttgcttttcgtgtagccttggaaaaacgccatttccttctcctcctttcttccaaaaccatttccaacatcccaagcac

SEQ ID NO: 12955 - DNA, 1158 bp, Glycine max
  Gm_smallRNAprecursor_5788
attaaagttttcttcacatgtattatattttattttgcagtagcaatgacatcttcatcatcatcttcatcacatattaacattaaatctgaccccatcgatactgatgtattatggatgcaacctaagcatgtttcagaacatgtttggaatggggaagaagaaaggaaattacatatcagacgagctgtccccacgtatcaaggggaagaacaaattccagaacaaaattttccttttcttcaacaatctggtttcgggtggattatcaagatgggatacttaaaaataaatgcctcactaattagtgctctgatagaaagatggaggcctgaaacacatacttttcacatgagatgcggagagtgtactatcactctacaagacgtctctgtgttgttaggtataagtgtggatggtttaccattaatcggtccaacaaatcttgattgggatgatttatgtgaggacttattgggagtcagaccataagaaggtgaaattaaaggtagtgtggttaaattaagttggctggctcaccattttgatcaaattaataatgacgacgacgaagaacaagtacgaaggtttgcccgtgcatggatactgagatttattggaggtgtcttgttcgttgacaaaaccagtaacattgtttcgctaaggtaccttcaatttttacgtgactttgaagaatgtagcagatatgcatggggagctgccgtagttggttttctatacagagagatgtgcagtgccaccgattataaaactaaatcaatcggaggtatgtgcatcttactacaattgtgggcatgggaacgatgtccaaccttggctccaaagaggactccttcccaaatagaaaatataccactagggcacaggtcagtcatttttaatagcgtctttcatttcaatagaataaatggttttagggtatattaaattttattctttgtaggtggctgcgacgtggaaaccaacatatcgacaatgatgatgtgaaagtttttcgtcgcaagttggatattatgaaacatcatgaggtaagaaccatgctactgtatttgtaaaataaaaaattatatgtcttattttactacaatgttcacaactatgttgttatatgcagtttgtgtgggagccttacccatc

SEQ ID NO: 12956 - DNA, 1155 bp, Glycine max
  Gm_smallRNAprecursor_5789
taaagttttcttcacatgtattatattttattttgcagtagcaatgacatcttcatcatcatcttcatcacatattaacattaaatctgaccccatcgatactgatgtattatggatgcaacctaagcatgtttcagaacatgtttggaatggggaagaagaaaggaaattacatatcagacgagctgtccccacgtatcaaggggaagaacaaattccagaacaaaattttccttttcttcaacaatctggtttcgggtggattatcaagatgggatacttaaaaataaatgcctcactaattagtgctctgatagaaagatggaggcctgaaacacatacttttcacatgagatgcggagagtgtactatcactctacaagacgtctctgtgttgttaggtataagtgtggatggtttaccattaatcggtccaacaaatcttgattgggatgatttatgtgaggacttattgggagtcagaccataagaaggtgaaattaaaggtagtgtggttaaattaagttggctggctcaccattttgatcaaattaataatgacgacgacgaagaacaagtacgaaggtttgcccgtgcatggatactgagatttattggaggtgtcttgttcgttgacaaaaccagtaacattgtttcgctaaggtaccttcaatttttacgtgactttgaagaatgtagcagatatgcatggggagctgccgtagttggttttctatacagagagatgtgcagtgccaccgattataaaactaaatcaatcggaggtatgtgcatcttactacaattgtgggcatgggaacgatgtccaaccttggctccaaagaggactccttcccaaatagaaaatataccactagggcacaggtcagtcatttttaatagcgtctttcatttcaatagaataaatggttttagggtatattaaattttattctttgtaggtggctgcgacgtggaaaccaacatatcgacaatgatgatgtgaaagtttttcgtcgcaagttggatattatgaaacatcatgaggtaagaaccatgctactgtatttgtaaaataaaaaattatatgtcttattttactacaatgttcacaactatgttgttatatgcagtttgtgtgggagccttacccat

SEQ ID NO: 12957 - DNA, 1045 bp, Glycine max
  Gm_smallRNAprecursor_5790
tgccagatttttgtggtctcccagtcttagcatctaattgcatctcatcaactcgtgctggcttctgggaaggcaccttttttattttcttttgagttttggttttaacctgaataaaaccctcctcgtcaggctcatatctagcaccacctgctcctttcagcacagatgagtgcttatgaacaggaacaaaaatagcaccttgagattgttggacatgaggggcagccagctggttaggatgatcatctttctgagttccagagctaatatggatgctggcagcagactggttaggctgaaccttctgagttccagaactattaaggattttggtcacatcaagatctgctggaccaaccacttgtgattgaaccacaggggtgctaactaaggcagggtcatctttagctccgggcacagctttacaattggctaaacggtgcccaatcattttgcagtgcttgcagaatgtgggcctgttttcaaattcaactttctgagtgaagaccttaccatttgggagtctaaagcggacctcttcaatgaggtccatagaagcatccacctccactagagcgcgggcaaaagatatagagcctttagaggcagtcagctagtccgtacggatgggcaggccaactttggaaagaatctttcctagagcttggggattccacagctcaaggggcaaatttctgagctttacccacacagggatcttgttgagctcctcgtttccaaaatcaaaaaagggaggcattaccttcaataacaggggtctttggaaaatgaagtatggtcctgcagatatgacttggttcatatcctcttcattctgaaatcggaataccaaccagccactctcatgggttgaatatgaaaaattcacaccccatttctggcagcattccataagagcctttttcctcggaaatctgccagctacatagccaataaggctatagccccaagcctcctccagtggttgtaagtctgaatcatccaacagtacttcttcagctgagggaggagaaaattgcaa

SEQ ID NO: 12958 - DNA, 1046 bp, Glycine max
  Gm_smallRNAprecursor_5791
caaacggacagataagaagtaagaatacagtataataaatgaaagaaaaatataaacttgaaaacagatatcaagggcacaccggagaccggcttacaaaccccaggttttcataaacaaagaaaccgaagcggcggcagagccgcacaggatcggtgaagggagaagagagaaagatgaaaaatagaaatttattgaatctagaaagaagcgcttacaaaaatcttgtttcagagcacctctcttcagaaacctgaaaatggctaaatgaaagggtgcctcacaacatacttgaggactccttatatagccaaatatctaagaccggtagttgctggtagttttgaccgggactatttgactgtttgttacaagacaagtagttttgaccgggactttaatggctacaggacaggtagtattgtccagcattaattacacattaattacaaatatacggttttgtgaccgaaattaaatttaatctaaacagataccaaaacaatcatcttcgttttggtaaaagggattttcttcttcttcttcagcagaacttgtttcttccttctttgaggatgaagcttcttcttcctactgtaacatttgcagaacttccttcagatttttagctaagacttcctttgatgtcgatcctgctaaaaatgctgccagatgagacttttggttccaaaacacagaagtttctggatcagctgctttgaggaattctggatgggattggaaccagagttttacttgttctggatccgctttggatgagtcaaattgtgtccatcattttacaaatgcgtgtctttgtagtgatggatattggtttgtcttttcagtcttgctgtaacgatattgccatgagaatatccatgacagtgcaaagcttgaaaagtatttaagatctgctggaattcatgattcctgcgaattgtattgtttcttaaattgagaaaatccttgttggactatttctgggaatatctctgggattggtccaaagaagtcccatcattgcaaaaaccaattgggaaaat

SEQ ID NO: 12959 - DNA, 1031 bp, Glycine max
  Gm_smallRNAprecursor_5792
acaagtagttttgaccgggactttaatggctacaggacaggtagtattgtccagcattaattacacattaattacaaatatacggttttgtgaccgaaattaaatttaatctaaacagataccaaaacaatcatcttcgttttggtaaaagggattttcttcttcttcttcagcagaacttgtttcttccttctttgaggatgaagcttcttcttcctactgtaacatttgcagaacttccttcagatttttagctaagacttcctttgatgtcgatcctgctaaaaatgctgccagatgagacttttggttccaaaacacagaagtttctggatcagctgctttgaggaattctggatgggattggaaccagagttttacttgttctggatccgctttggatgagtcaaattgtgtccatcattttacaaatgcgtgtctttgtagtgatggatattggtttgtcttttcagtcttgctgtaacgatattgccatgagaatatccatgacagtgcaaagcttgaaaagtatttaagatctgctggaattcatgattcctgcgaattgtattgtttcttaaattgagaaaatccttgttggactatttctgggaatatctctgggattggtccaaagaagtcccatcattgcaaaaaccaattgggaaaattgtaaattgtattggtcttgaaatatatcagccatgaatgcttgaagcgggtattttggcgccaaaacaccttagtccaagcatcaacgtaatcccaataggtataacctaccggatcaaatggaactgaaaatctctttcctttgttcaagtccgaaccaaagtgtcttggttgaagaacttttagtatctggattgtcgagtgggtgtttaatgtttggtcttttggatctttgaaacgtttgatagatactgagtttgaatctaccaaaatcaattcataaaaagttcttgtcttcaggatggtggttggtttgtagtgaaatcctggtgggaaagccttggccatcgccttgaagg

SEQ ID NO: 12960 - DNA, 1247 bp, Glycine max
  Gm_smallRNAprecursor_5793
tacaggacaggtagtattgtccagcattaattacacattaattacaaatatacggttttgtgaccgaaattaaatttaatctaaacagataccaaaacaatcatcttcgttttggtaaaagggattttcttcttcttcttcagcagaacttgtttcttccttctttgaggatgaagcttcttcttcctactgtaacatttgcagaacttccttcagatttttagctaagacttcctttgatgtcgatcctgctaaaaatgctgccagatgagacttttggttccaaaacacagaagtttctggatcagctgctttgaggaattctggatgggattggaaccagagttttacttgttctggatccgctttggatgagtcaaattgtgtccatcattttacaaatgcgtgtctttgtagtgatggatattggtttgtcttttcagtcttgctgtaacgatattgccatgagaatatccatgacagtgcaaagcttgaaaagtatttaagatctgctggaattcatgattcctgcgaattgtattgtttcttaaattgagaaaatccttgttggactatttctgggaatatctctgggattggtccaaagaagtcccatcattgcaaaaaccaattgggaaaattgtaaattgtattggtcttgaaatatatcagccatgaatgcttgaagcgggtattttggcgccaaaacaccttagtccaagcatcaacgtaatcccaataggtataacctaccggatcaaatggaactgaaaatctctttcctttgttcaagtccgaaccaaagtgtcttggttgaagaacttttagtatctggattgtcgagtgggtgtttaatgtttggtcttttggatctttgaaacgtttgatagatactgagtttgaatctaccaaaatcaattcataaaaagttcttgtcttcaggatggtggttggtttgtagtgaaatcctggtgggaaagccttggccatcgccttgaagggatttttgtcccaaaattcaggttccatctgcaaaacagttaacaatttatttttataaatataattgttagtttgtttggtgggtggtgtttgagctttggctaaaggtagttttcctttagtattggtggttgttttggtcattgacgcattttggatcattgtttgtagatttgattcagattcatcatcagattctgaggcaatgtctgcccaagattttttgattttttttggaaatttgg

SEQ ID NO: 12961 - DNA, 1072 bp, Glycine max
  Gm_smallRNAprecursor_5794
gcttcttcttcctactgtaacatttgcagaacttccttcagatttttagctaagacttcctttgatgtcgatcctgctaaaaatgctgccagatgagacttttggttccaaaacacagaagtttctggatcagctgctttgaggaattctggatgggattggaaccagagttttacttgttctggatccgctttggatgagtcaaattgtgtccatcattttacaaatgcgtgtctttgtagtgatggatattggtttgtcttttcagtcttgctgtaacgatattgccatgagaatatccatgacagtgcaaagcttgaaaagtatttaagatctgctggaattcatgattcctgcgaattgtattgtttcttaaattgagaaaatccttgttggactatttctgggaatatctctgggattggtccaaagaagtcccatcattgcaaaaaccaattgggaaaattgtaaattgtattggtcttgaaatatatcagccatgaatgcttgaagcgggtattttggcgccaaaacaccttagtccaagcatcaacgtaatcccaataggtataacctaccggatcaaatggaactgaaaatctctttcctttgttcaagtccgaaccaaagtgtcttggttgaagaacttttagtatctggattgtcgagtgggtgtttaatgtttggtcttttggatctttgaaacgtttgatagatactgagtttgaatctaccaaaatcaattcataaaaagttcttgtcttcaggatggtggttggtttgtagtgaaatcctggtgggaaagccttggccatcgccttgaagggatttttgtcccaaaattcaggttccatctgcaaaacagttaacaatttatttttataaatataattgttagtttgtttggtgggtggtgtttgagctttggctaaaggtagttttcctttagtattggtggttgttttggtcattgacgcattttggatcattgtttgtagatttgattcagattcatcatcagattctgaggcaatgtctgcccaagattttttgattttttttggaaatttgg

SEQ ID NO: 12962 - DNA, 1174 bp, Glycine max
  Gm_smallRNAprecursor_5795
cgggtattttggcgccaaaacaccttagtccaagcatcaacgtaatcccaataggtataacctaccggatcaaatggaactgaaaatctctttcctttgttcaagtccgaaccaaagtgtcttggttgaagaacttttagtatctggattgtcgagtgggtgtttaatgtttggtcttttggatctttgaaacgtttgatagatactgagtttgaatctaccaaaatcaattcataaaaagttcttgtcttcaggatggtggttggtttgtagtgaaatcctggtgggaaagccttggccatcgccttgaagggatttttgtcccaaaattcaggttccatctgcaaaacagttaacaatttatttttataaatataattgttagtttgtttggtgggtggtgtttgagctttggctaaaggtagttttcctttagtattggtggttgttttggtcattgacgcattttggatcattgtttgtagatttgattcagattcatcatcagattctgaggcaatgtctgcccaagattttttgattttttttggaaatttggttagacccatgtcttgaagggcctgaagggtttcaattggccatgcatagtcggccgatgtttgtttggcggttgccggtttgggagattcctgagtggatggctcaggtttgattgaggcaatctgggttgatgacccttctaaattggttttctgggtagatgacccagcctgggttggtgacccagaagaggttgatgatttcttgatggttggctctggaagagccagtctggctcctttgcctgtactctttcctccccttagggagattcccgatgccttaggaggcattaccacttttctgtaagaattcacgggtaaggtagtcaggtaatgagtttgaggtgcccatgatgtattctatgtcaaaatcaaagacacttagaattgtttgccatcttgcaaaaatttgttttgaggcaaggtttttaacatctttttgtaaaatatctttggctgatttacaatcaaccctgattagaaatttttgtttaataaatctgattgaaatttggaaatgcacaaaacaattgctaaaatttcttttttaacagttgaatattttaattgtgcaggattccaatgttttgatgtatatgcaatgacatgat

SEQ ID NO: 12963 - DNA, 1173 bp, Glycine max
  Gm_smallRNAprecursor_5796
gggtattttggcgccaaaacaccttagtccaagcatcaacgtaatcccaataggtataacctaccggatcaaatggaactgaaaatctctttcctttgttcaagtccgaaccaaagtgtcttggttgaagaacttttagtatctggattgtcgagtgggtgtttaatgtttggtcttttggatctttgaaacgtttgatagatactgagtttgaatctaccaaaatcaattcataaaaagttcttgtcttcaggatggtggttggtttgtagtgaaatcctggtgggaaagccttggccatcgccttgaagggatttttgtcccaaaattcaggttccatctgcaaaacagttaacaatttatttttataaatataattgttagtttgtttggtgggtggtgtttgagctttggctaaaggtagttttcctttagtattggtggttgttttggtcattgacgcattttggatcattgtttgtagatttgattcagattcatcatcagattctgaggcaatgtctgcccaagattttttgattttttttggaaatttggttagacccatgtcttgaagggcctgaagggtttcaattggccatgcatagtcggccgatgtttgtttggcggttgccggtttgggagattcctgagtggatggctcaggtttgattgaggcaatctgggttgatgacccttctaaattggttttctgggtagatgacccagcctgggttggtgacccagaagaggttgatgatttcttgatggttggctctggaagagccagtctggctcctttgcctgtactctttcctccccttagggagattcccgatgccttaggaggcattaccacttttctgtaagaattcacgggtaaggtagtcaggtaatgagtttgaggtgcccatgatgtattctatgtcaaaatcaaagacacttagaattgtttgccatcttgcaaaaatttgttttgaggcaaggtttttaacatctttttgtaaaatatctttggctgatttacaatcaaccctgattagaaatttttgtttaataaatctgattgaaatttggaaatgcacaaaacaattgctaaaatttcttttttaacagttgaatattttaattgtgcaggattccaatgttttgatgtatatgcaatgacatgat

SEQ ID NO: 12964 - DNA, 1176 bp, Glycine max
  Gm_smallRNAprecursor_5797
gggtattttggcgccaaaacaccttagtccaagcatcaacgtaatcccaataggtataacctaccggatcaaatggaactgaaaatctctttcctttgttcaagtccgaaccaaagtgtcttggttgaagaacttttagtatctggattgtcgagtgggtgtttaatgtttggtcttttggatctttgaaacgtttgatagatactgagtttgaatctaccaaaatcaattcataaaaagttcttgtcttcaggatggtggttggtttgtagtgaaatcctggtgggaaagccttggccatcgccttgaagggatttttgtcccaaaattcaggttccatctgcaaaacagttaacaatttatttttataaatataattgttagtttgtttggtgggtggtgtttgagctttggctaaaggtagttttcctttagtattggtggttgttttggtcattgacgcattttggatcattgtttgtagatttgattcagattcatcatcagattctgaggcaatgtctgcccaagattttttgattttttttggaaatttggttagacccatgtcttgaagggcctgaagggtttcaattggccatgcatagtcggccgatgtttgtttggcggttgccggtttgggagattcctgagtggatggctcaggtttgattgaggcaatctgggttgatgacccttctaaattggttttctgggtagatgacccagcctgggttggtgacccagaagaggttgatgatttcttgatggttggctctggaagagccagtctggctcctttgcctgtactctttcctccccttagggagattcccgatgccttaggaggcattaccacttttctgtaagaattcacgggtaaggtagtcaggtaatgagtttgaggtgcccatgatgtattctatgtcaaaatcaaagacacttagaattgtttgccatcttgcaaaaatttgttttgaggcaaggtttttaacatctttttgtaaaatatctttggctgatttacaatcaaccctgattagaaatttttgtttaataaatctgattgaaatttggaaatgcacaaaacaattgctaaaatttcttttttaacagttgaatattttaattgtgcaggattccaatgttttgatgtatatgcaatgacatgatctt

SEQ ID NO: 12965 - DNA, 1129 bp, Glycine max
  Gm_smallRNAprecursor_5798
ctgcaaaacagttaacaatttatttttataaatataattgttagtttgtttggtgggtggtgtttgagctttggctaaaggtagttttcctttagtattggtggttgttttggtcattgacgcattttggatcattgtttgtagatttgattcagattcatcatcagattctgaggcaatgtctgcccaagattttttgattttttttggaaatttggttagacccatgtcttgaagggcctgaagggtttcaattggccatgcatagtcggccgatgtttgtttggcggttgccggtttgggagattcctgagtggatggctcaggtttgattgaggcaatctgggttgatgacccttctaaattggttttctgggtagatgacccagcctgggttggtgacccagaagaggttgatgatttcttgatggttggctctggaagagccagtctggctcctttgcctgtactctttcctccccttagggagattcccgatgccttaggaggcattaccacttttctgtaagaattcacgggtaaggtagtcaggtaatgagtttgaggtgcccatgatgtattctatgtcaaaatcaaagacacttagaattgtttgccatcttgcaaaaatttgttttgaggcaaggtttttaacatctttttgtaaaatatctttggctgatttacaatcaaccctgattagaaatttttgtttaataaatctgattgaaatttggaaatgcacaaaacaattgctaaaatttcttttttaacagttgaatattttaattgtgcaggattccaatgttttgatgtatatgcaatgacatgatcttggccatggactctttgtttgaggatgccaccataatctatgtctgaagcatcagtttcgacaattttaaatgcctgtggaataggaagatacagacattttatggattggactttgactttgatttctttaaccgtttgtgtatggaggtcagaccaaggaggcagatttttcttcatcctatcatgcaatggcttgacaatattgcttaaatagggggaaaattctcctacgtaatttagacaacctagaaatctttgtaactgggttttgtctaagatttggttgggaaat

SEQ ID NO: 12966 - DNA, 1115 bp, Glycine max
  Gm_smallRNAprecursor_5799
acaatttatttttataaatataattgttagtttgtttggtgggtggtgtttgagctttggctaaaggtagttttcctttagtattggtggttgttttggtcattgacgcattttggatcattgtttgtagatttgattcagattcatcatcagattctgaggcaatgtctgcccaagattttttgattttttttggaaatttggttagacccatgtcttgaagggcctgaagggtttcaattggccatgcatagtcggccgatgtttgtttggcggttgccggtttgggagattcctgagtggatggctcaggtttgattgaggcaatctgggttgatgacccttctaaattggttttctgggtagatgacccagcctgggttggtgacccagaagaggttgatgatttcttgatggttggctctggaagagccagtctggctcctttgcctgtactctttcctccccttagggagattcccgatgccttaggaggcattaccacttttctgtaagaattcacgggtaaggtagtcaggtaatgagtttgaggtgcccatgatgtattctatgtcaaaatcaaagacacttagaattgtttgccatcttgcaaaaatttgttttgaggcaaggtttttaacatctttttgtaaaatatctttggctgatttacaatcaaccctgattagaaatttttgtttaataaatctgattgaaatttggaaatgcacaaaacaattgctaaaatttcttttttaacagttgaatattttaattgtgcaggattccaatgttttgatgtatatgcaatgacatgatcttggccatggactctttgtttgaggatgccaccataatctatgtctgaagcatcagtttcgacaattttaaatgcctgtggaataggaagatacagacattttatggattggactttgactttgatttctttaaccgtttgtgtatggaggtcagaccaaggaggcagatttttcttcatcctatcatgcaatggcttgacaatattgcttaaatagggggaaaattctcctacgtaatttagacaacctagaaatctttgtaactgggttttgtctaagatttggttgggaaat

SEQ ID NO: 12967 - DNA, 1228 bp, Glycine max
  Gm_smallRNAprecursor_5800
gatgatttcttgatggttggctctggaagagccagtctggctcctttgcctgtactctttcctccccttagggagattcccgatgccttaggaggcattaccacttttctgtaagaattcacgggtaaggtagtcaggtaatgagtttgaggtgcccatgatgtattctatgtcaaaatcaaagacacttagaattgtttgccatcttgcaaaaatttgttttgaggcaaggtttttaacatctttttgtaaaatatctttggctgatttacaatcaaccctgattagaaatttttgtttaataaatctgattgaaatttggaaatgcacaaaacaattgctaaaatttcttttttaacagttgaatattttaattgtgcaggattccaatgttttgatgtatatgcaatgacatgatcttggccatggactctttgtttgaggatgccaccataatctatgtctgaagcatcagtttcgacaattttaaatgcctgtggaataggaagatacagacattttatggattggactttgactttgatttctttaaccgtttgtgtatggaggtcagaccaaggaggcagatttttcttcatcctatcatgcaatggcttgacaatattgcttaaatagggggaaaattctcctacgtaatttagacaacctagaaatctttgtaactgggttttgtctaagatttggttgggaaatttgctagcaaactctattgacctttcgattggaatgattgtaccttgatatatattgtgaccaaggaatcgaattcgagtttggaaaagattgattttttatttggagactgccaaaccattttgtttgatgatatgtatgaaggtctggagatgtttgaaatgttggtcaatgttttgggaaaagattaaaacatcatctatgtagacaatgacaaattttgaatagggattaaaaatatcattcataatttgttgaaattctgaaggggcattcttcagtctgaatggcatcacattccattcatattgcccgaaaggtacagtaaacgttgttttgtacctaactgattcttggatttggatctgccaaaatccagatttcatatcaaattttgaaaatatctttgcagaatttaatctgttaagcaaatcttttttgtttggaataggatatctaatccattgtaatgctttatttagtggtttgtaatttatgactaagcggggtgttc

SEQ ID NO: 12968 - DNA, 1232 bp, Glycine max
  Gm_smallRNAprecursor_5801
gaattgtttgccatcttgcaaaaatttgttttgaggcaaggtttttaacatctttttgtaaaatatctttggctgatttacaatcaaccctgattagaaatttttgtttaataaatctgattgaaatttggaaatgcacaaaacaattgctaaaatttcttttttaacagttgaatattttaattgtgcaggattccaatgttttgatgtatatgcaatgacatgatcttggccatggactctttgtttgaggatgccaccataatctatgtctgaagcatcagtttcgacaattttaaatgcctgtggaataggaagatacagacattttatggattggactttgactttgatttctttaaccgtttgtgtatggaggtcagaccaaggaggcagatttttcttcatcctatcatgcaatggcttgacaatattgcttaaatagggggaaaattctcctacgtaatttagacaacctagaaatctttgtaactgggttttgtctaagatttggttgggaaatttgctagcaaactctattgacctttcgattggaatgattgtaccttgatatatattgtgaccaaggaatcgaattcgagtttggaaaagattgattttttatttggagactgccaaaccattttgtttgatgatatgtatgaaggtctggagatgtttgaaatgttggtcaatgttttgggaaaagattaaaacatcatctatgtagacaatgacaaattttgaatagggattaaaaatatcattcataatttgttgaaattctgaaggggcattcttcagtctgaatggcatcacattccattcatattgcccgaaaggtacagtaaacgttgttttgtacctaactgattcttggatttggatctgccaaaatccagatttcatatcaaattttgaaaatatctttgcagaatttaatctgttaagcaaatcttttttgtttggaataggatatctaatccattgtaatgctttatttagtggtttgtaatttatgactaagcggggtgttccacgctcaatctcagattgtttgttgacataaaaagccgcacaaggccatgggcttttgcttttccagattagacctttatcaagcaaatccttgatttctttttgacagtattggagaagttcttcattcatttggattggtctggcttttgtgggaatttgtttttccctaaagtctttctcataagggagat

SEQ ID NO: 12969 - DNA, 1196 bp, Glycine max
  Gm_smallRNAprecursor_5802
caaggtttttaacatctttttgtaaaatatctttggctgatttacaatcaaccctgattagaaatttttgtttaataaatctgattgaaatttggaaatgcacaaaacaattgctaaaatttcttttttaacagttgaatattttaattgtgcaggattccaatgttttgatgtatatgcaatgacatgatcttggccatggactctttgtttgaggatgccaccataatctatgtctgaagcatcagtttcgacaattttaaatgcctgtggaataggaagatacagacattttatggattggactttgactttgatttctttaaccgtttgtgtatggaggtcagaccaaggaggcagatttttcttcatcctatcatgcaatggcttgacaatattgcttaaatagggggaaaattctcctacgtaatttagacaacctagaaatctttgtaactgggttttgtctaagatttggttgggaaatttgctagcaaactctattgacctttcgattggaatgattgtaccttgatatatattgtgaccaaggaatcgaattcgagtttggaaaagattgattttttatttggagactgccaaaccattttgtttgatgatatgtatgaaggtctggagatgtttgaaatgttggtcaatgttttgggaaaagattaaaacatcatctatgtagacaatgacaaattttgaatagggattaaaaatatcattcataatttgttgaaattctgaaggggcattcttcagtctgaatggcatcacattccattcatattgcccgaaaggtacagtaaacgttgttttgtacctaactgattcttggatttggatctgccaaaatccagatttcatatcaaattttgaaaatatctttgcagaatttaatctgttaagcaaatcttttttgtttggaataggatatctaatccattgtaatgctttatttagtggtttgtaatttatgactaagcggggtgttccacgctcaatctcagattgtttgttgacataaaaagccgcacaaggccatgggcttttgcttttccagattagacctttatcaagcaaatccttgatttctttttgacagtattggagaagttcttcattcatttggattggtctggcttttgtgggaatttgtttttccctaaagtctttctcataagggagat

SEQ ID NO: 12970 - DNA, 1080 bp, Glycine max
  Gm_smallRNAprecursor_5803
gatgtttgaaatgttggtcaatgttttgggaaaagattaaaacatcatctatgtagacaatgacaaattttgaatagggattaaaaatatcattcataatttgttgaaattctgaaggggcattcttcagtctgaatggcatcacattccattcatattgcccgaaaggtacagtaaacgttgttttgtacctaactgattcttggatttggatctgccaaaatccagatttcatatcaaattttgaaaatatctttgcagaatttaatctgttaagcaaatcttttttgtttggaataggatatctaatccattgtaatgctttatttagtggtttgtaatttatgactaagcggggtgttccacgctcaatctcagattgtttgttgacataaaaagccgcacaaggccatgggcttttgcttttccagattagacctttatcaagcaaatccttgatttctttttgacagtattggagaagttcttcattcatttggattggtctggcttttgtgggaatttgtttttccctaaagtctttctcataagggagatcaacaatatgtttctttctgtcccaaaatgcatgtggcaattcagaacagacggtcgattcaatatgatttaataaagattgaattttttcttttacttggggttttcccagttgtatctgaatattattaaaagatacttcttcttttaagaagttaatttgattaatcttattttctataagatttatatttctggaaattggtttagtagaaaaattaaatataatttttcttcctaaataatttgtggttattccttcattagatatttggatgggaaacagggctctaatgaagggcgttcctaagattgcttcactcttaaggttttttaccagaagaaagtttgtgttaatcttaagaccttggtttgcatttgatagcttaaaattaatttttaattttgagccatttgtcgtacttaatttttctgaggttttctcaaagaattttgtaggaattaatccttctaaaatgcagtttgaatcagcccctgtgtcaaatagggcctttgtttcta

SEQ ID NO: 12971 - DNA, 1157 bp, Glycine max
  Gm_smallRNAprecursor_5804
aggaatagtgtccgtaagggcatatgttaattgaacttatggatctgaaccatgtacaataattttaatttaaatagtatgtgtttgaacagtattttctggaagcacaacaatctgatattttagttgaatgatactgtagcagtaagtcccgtggttgagaaagggcagtaaggctaaggtgtattgttcaaataaaatattgagacataatatactggtggctataggagtaatgttcaaactatattgtctgtaaaaaaaagaattttctttcatttttcagatccaagaagttttgtaacatatagccttatggaaatatttctatggaaccaaatgaaggcaaagatattagagaatgatataatcatgtctagactattgcgatctttttcccgtatctcttttcgctcaaattcctcctcttcatcttcttcaagaaactccaatctattaaatgatcaagataaccagacccaagaggtcgccccaaaacacaatctcttcgatgaggaagtccgattcgaagatatcaatcaaaacatggatgactggaacattccagaaatccctcaggatcaactatacgttccggaaacaattaaagacaaacaaaactttgattacataatcaaaacagtagaaaacaatattcctctaggacaagatataggggaagaatttcatttactttcaaaaaattcaatttatgaacatagccgtaagtataaatatctacacatcggttgtgtacaagtatccatcaagcccttaattgatatgggcataaatgcagcagttttaatgtgtctaagagatattaggcataaccaatttgaagactccctaattggaacagtcgaaaccagcctaggacaaggtccaatatattttaattgttatccaaacaaaacagtgagtctgatggacagaaacattcttgactctctattcttaaacatccactttcatggccttgacatgaaagaaggatcaatcccagcagccttaatttatagtatctagtacaaggtcatgaatacttgggcatctagagtcctgttaaaacctcaaaaaggagaaacaactttgtttatcactgatatgacaaaggctaacgtttctctcccgagacaaataaaatgggatgaagt

SEQ ID NO: 12972 - DNA, 1033 bp, Glycine max
  Gm_smallRNAprecursor_5805
taaggctaaggtgtattgttcaaataaaatattgagacataatatactggtggctataggagtaatgttcaaactatattgtctgtaaaaaaaagaattttctttcatttttcagatccaagaagttttgtaacatatagccttatggaaatatttctatggaaccaaatgaaggcaaagatattagagaatgatataatcatgtctagactattgcgatctttttcccgtatctcttttcgctcaaattcctcctcttcatcttcttcaagaaactccaatctattaaatgatcaagataaccagacccaagaggtcgccccaaaacacaatctcttcgatgaggaagtccgattcgaagatatcaatcaaaacatggatgactggaacattccagaaatccctcaggatcaactatacgttccggaaacaattaaagacaaacaaaactttgattacataatcaaaacagtagaaaacaatattcctctaggacaagatataggggaagaatttcatttactttcaaaaaattcaatttatgaacatagccgtaagtataaatatctacacatcggttgtgtacaagtatccatcaagcccttaattgatatgggcataaatgcagcagttttaatgtgtctaagagatattaggcataaccaatttgaagactccctaattggaacagtcgaaaccagcctaggacaaggtccaatatattttaattgttatccaaacaaaacagtgagtctgatggacagaaacattcttgactctctattcttaaacatccactttcatggccttgacatgaaagaaggatcaatcccagcagccttaatttatagtatctagtacaaggtcatgaatacttgggcatctagagtcctgttaaaacctcaaaaaggagaaacaactttgtttatcactgatatgacaaaggctaacgtttctctcccgagacaaataaaatgggatgaagtaactcttcccaaaagatgggttatggataaggccacaccgtctgttc

SEQ ID NO: 12973 - DNA, 1126 bp, Glycine max
  Gm_smallRNAprecursor_5806
taacattaacacaaactttcttctggtaaaaaccttaagaatgaagtaatcttaggaacgcccttcattagagccctgtttcccatccaaatatctaatgaaggaataaccacacattatttaggaagaaaaattatatttaatttttctactaaaccaatttccagaaatacaaatcttatagaaaataagattaatcaaattaacttcttaaaagaagaagtatcttttaataatattcaaatacaattgggaaaaccccaagtaaaagaaaaaattcaatctttattaaatcatattgaatcgaccgtctgttctgaattgccacatgcattttgggacagaaagaaaaatattgttgatctcccttatgagaaagactttagggaaaaacaaattcctacaaaagccagaccaatccaaatgaatgaagaacttctccaatactgtaaaaaagaaatcaaggatttgcttgataaaggcctaatccggaaaagcaaaagcccatggtcttgtgcggctttttatgtcaacaaacaatctgagattgagcgtggaacaccccgcttagtcataaattacaaaccactaaataaagcattacaatggattagatatcctattccaaacaaaaaagatttgcttaacagattaaattctgcaaagatattttcaaaatttgatatgaaatctggattttggcagatccaaatccaagaatcaaataggtgcaaaacagcgtttactgtaccttttgggcaatatgaatagaatgtgatgccattcggactgaagaatgccccttcagaatttcaaaaaattatgaatgatatttttaatccctattcaaaatttgtcattgtctacatagatgatgttttaatcttttcccaaaacattgaccaacatttcaaacatctccagaccttcatccatatcatcaaacagaatggtttggcagtctccaaatcaaaaatcaatcttttcaaaactcgaattcaattccttggtcacaatatatatcaaggtacaatcattccaatcgaaaggtcaatagagtttgctagcaaatttcccaaccaaatcttagacaaaacccagttacaaagatttctaggttgtctaa

SEQ ID NO: 12974 - DNA, 1168 bp, Glycine max
  Gm_smallRNAprecursor_5807
atggtcttgtgcggctttttatgtcaacaaacaatctgagattgagcgtggaacaccccgcttagtcataaattacaaaccactaaataaagcattacaatggattagatatcctattccaaacaaaaaagatttgcttaacagattaaattctgcaaagatattttcaaaatttgatatgaaatctggattttggcagatccaaatccaagaatcaaataggtgcaaaacagcgtttactgtaccttttgggcaatatgaatagaatgtgatgccattcggactgaagaatgccccttcagaatttcaaaaaattatgaatgatatttttaatccctattcaaaatttgtcattgtctacatagatgatgttttaatcttttcccaaaacattgaccaacatttcaaacatctccagaccttcatccatatcatcaaacagaatggtttggcagtctccaaatcaaaaatcaatcttttcaaaactcgaattcaattccttggtcacaatatatatcaaggtacaatcattccaatcgaaaggtcaatagagtttgctagcaaatttcccaaccaaatcttagacaaaacccagttacaaagatttctaggttgtctaaattacgtaggagaatttgtcccctatttaaacaatattgtcaagccattgcatgataggctgaagaaaaatccgcctccttggtctgacctcgatacacaaatagttaaagaaatcaaagtcaaagtccaatccataaaatgtctgtatcttcctattccacaggcattcaaaattgtcgaaactgatgcttcagacataggttatggtggcatcctcaaacaaagagtccatggccaagatcatgtcattgcatatacatcaaaacattggaatcctgcacaattaaaatattcaactgttaaaaaagaagttttagcaattgttttgtgcatttccaaatttcaatcggatttattaaaccaaatatttttaatcaaggctgattgtaaatcagccgaagatattttacaaaaagatgttaaaaaacttgcctcaaaacaaatttttgcaagatggcaagcaattctaagtgtctttgattttgacatagaatacatcaagggcacctcaaattcattacctaactaccttacccgtgaattctta

SEQ ID NO: 12975 - DNA, 1095 bp, Glycine max
  Gm_smallRNAprecursor_5808
tgaatagaatgtgatgccattcggactgaagaatgccccttcagaatttcaaaaaattatgaatgatatttttaatccctattcaaaatttgtcattgtctacatagatgatgttttaatcttttcccaaaacattgaccaacatttcaaacatctccagaccttcatccatatcatcaaacagaatggtttggcagtctccaaatcaaaaatcaatcttttcaaaactcgaattcaattccttggtcacaatatatatcaaggtacaatcattccaatcgaaaggtcaatagagtttgctagcaaatttcccaaccaaatcttagacaaaacccagttacaaagatttctaggttgtctaaattacgtaggagaatttgtcccctatttaaacaatattgtcaagccattgcatgataggctgaagaaaaatccgcctccttggtctgacctcgatacacaaatagttaaagaaatcaaagtcaaagtccaatccataaaatgtctgtatcttcctattccacaggcattcaaaattgtcgaaactgatgcttcagacataggttatggtggcatcctcaaacaaagagtccatggccaagatcatgtcattgcatatacatcaaaacattggaatcctgcacaattaaaatattcaactgttaaaaaagaagttttagcaattgttttgtgcatttccaaatttcaatcggatttattaaaccaaatatttttaatcaaggctgattgtaaatcagccgaagatattttacaaaaagatgttaaaaaacttgcctcaaaacaaatttttgcaagatggcaagcaattctaagtgtctttgattttgacatagaatacatcaagggcacctcaaattcattacctaactaccttacccgtgaattcttacagaaaagtggtaatgcctcctaaggcatcgggaatctccctacggggaggaaggagtacaggcaaaggagccagactggctcttccagagccaaccatcaagaaatcatccacctcttctgggtcaccaacccaggctgggtcatctacccagaaaaccaatttagaagggtcattaacccaga

SEQ ID NO: 12976 - DNA, 1095 bp, Glycine max; identical to SEQ ID NO: 12975
  Gm_smallRNAprecursor_5809

SEQ ID NO: 12977 - DNA, 1095 bp, Glycine max; identical to SEQ ID NO: 12975
  Gm_smallRNAprecursor_5810

SEQ ID NO: 12978 - DNA, 1095 bp, Glycine max; identical to SEQ ID NO: 12975
  Gm_smallRNAprecursor_5811

SEQ ID NO: 12979 - DNA, 1035 bp, Glycine max
  Gm_smallRNAprecursor_5812
attgtctacatagatgatgttttaatcttttcccaaaacattgaccaacatttcaaacatctccagaccttcatccatatcatcaaacagaatggtttggcagtctccaaatcaaaaatcaatcttttcaaaactcgaattcaattccttggtcacaatatatatcaaggtacaatcattccaatcgaaaggtcaatagagtttgctagcaaatttcccaaccaaatcttagacaaaacccagttacaaagatttctaggttgtctaaattacgtaggagaatttgtcccctatttaaacaatattgtcaagccattgcatgataggctgaagaaaaatccgcctccttggtctgacctcgatacacaaatagttaaagaaatcaaagtcaaagtccaatccataaaatgtctgtatcttcctattccacaggcattcaaaattgtcgaaactgatgcttcagacataggttatggtggcatcctcaaacaaagagtccatggccaagatcatgtcattgcatatacatcaaaacattggaatcctgcacaattaaaatattcaactgttaaaaaagaagttttagcaattgttttgtgcatttccaaatttcaatcggatttattaaaccaaatatttttaatcaaggctgattgtaaatcagccgaagatattttacaaaaagatgttaaaaaacttgcctcaaaacaaatttttgcaagatggcaagcaattctaagtgtctttgattttgacatagaatacatcaagggcacctcaaattcattacctaactaccttacccgtgaattcttacagaaaagtggtaatgcctcctaaggcatcgggaatctccctacggggaggaaggagtacaggcaaaggagccagactggctcttccagagccaaccatcaagaaatcatccacctcttctgggtcaccaacccaggctgggtcatctacccagaaaaccaatttagaagggtcattaacccagattgcctcaatcaaacctgagccatccactcagga

SEQ ID NO: 12980 - DNA, 1035 bp, Glycine max; identical to SEQ ID NO: 12979
  Gm_smallRNAprecursor_5813

SEQ ID NO: 12981 - DNA, 1113 bp, Glycine max
  Gm_smallRNAprecursor_5814
attgtctacatagatgatgttttaatcttttcccaaaacattgaccaacatttcaaacatctccagaccttcatccatatcatcaaacagaatggtttggcagtctccaaatcaaaaatcaatcttttcaaaactcgaattcaattccttggtcacaatatatatcaaggtacaatcattccaatcgaaaggtcaatagagtttgctagcaaatttcccaaccaaatcttagacaaaacccagttacaaagatttctaggttgtctaaattacgtaggagaatttgtcccctatttaaacaatattgtcaagccattgcatgataggctgaagaaaaatccgcctccttggtctgacctcgatacacaaatagttaaagaaatcaaagtcaaagtccaatccataaaatgtctgtatcttcctattccacaggcattcaaaattgtcgaaactgatgcttcagacataggttatggtggcatcctcaaacaaagagtccatggccaagatcatgtcattgcatatacatcaaaacattggaatcctgcacaattaaaatattcaactgttaaaaaagaagttttagcaattgttttgtgcatttccaaatttcaatcggatttattaaaccaaatatttttaatcaaggctgattgtaaatcagccgaagatattttacaaaaagatgttaaaaaacttgcctcaaaacaaatttttgcaagatggcaagcaattctaagtgtctttgattttgacatagaatacatcaagggcacctcaaattcattacctaactaccttacccgtgaattcttacagaaaagtggtaatgcctcctaaggcatcgggaatctccctacggggaggaaggagtacaggcaaaggagccagactggctcttccagagccaaccatcaagaaatcatccacctcttctgggtcaccaacccaggctgggtcatctacccagaaaaccaatttagaagggtcattaacccagattgcctcaatcaaacctgagccatccactcaggaatctcccaaaccggcaaccgccaaacaaacatcggccgactatgcatggccaattgaaacccttcaggcccttcaaga

SEQ ID NO: 12982 - DNA, 1113 bp, Glycine max; identical to SEQ ID NO: 12981
  Gm_smallRNAprecursor_5815

SEQ ID NO: 12983 - DNA, 1114 bp, Glycine max
  Gm_smallRNAprecursor_5816
attgtctacatagatgatgttttaatcttttcccaaaacattgaccaacatttcaaacatctccagaccttcatccatatcatcaaacagaatggtttggcagtctccaaatcaaaaatcaatcttttcaaaactcgaattcaattccttggtcacaatatatatcaaggtacaatcattccaatcgaaaggtcaatagagtttgctagcaaatttcccaaccaaatcttagacaaaacccagttacaaagatttctaggttgtctaaattacgtaggagaatttgtcccctatttaaacaatattgtcaagccattgcatgataggctgaagaaaaatccgcctccttggtctgacctcgatacacaaatagttaaagaaatcaaagtcaaagtccaatccataaaatgtctgtatcttcctattccacaggcattcaaaattgtcgaaactgatgcttcagacataggttatggtggcatcctcaaacaaagagtccatggccaagatcatgtcattgcatatacatcaaaacattggaatcctgcacaattaaaatattcaactgttaaaaaagaagttttagcaattgttttgtgcatttccaaatttcaatcggatttattaaaccaaatatttttaatcaaggctgattgtaaatcagccgaagatattttacaaaaagatgttaaaaaacttgcctcaaaacaaatttttgcaagatggcaagcaattctaagtgtctttgattttgacatagaatacatcaagggcacctcaaattcattacctaactaccttacccgtgaattcttacagaaaagtggtaatgcctcctaaggcatcgggaatctccctacggggaggaaggagtacaggcaaaggagccagactggctcttccagagccaaccatcaagaaatcatccacctcttctgggtcaccaacccaggctgggtcatctacccagaaaaccaatttagaagggtcattaacccagattgcctcaatcaaacctgagccatccactcaggaatctcccaaaccggcaaccgccaaacaaacatcggccgactatgcatggccaattgaaacccttcaggcccttcaagac

SEQ ID NO: 12984 - DNA, 1114 bp, Glycine max; identical to SEQ ID NO: 12983
  Gm_smallRNAprecursor_5817

SEQ ID NO: 12985 - DNA, 1158 bp, Glycine max
  Gm_smallRNAprecursor_5818
ctaaggcatcgggaatctccctacggggaggaaggagtacaggcaaaggagccagactggctcttccagagccaaccatcaagaaatcatccacctcttctgggtcaccaacccaggctgggtcatctacccagaaaaccaatttagaagggtcattaacccagattgcctcaatcaaacctgagccatccactcaggaatctcccaaaccggcaaccgccaaacaaacatcggccgactatgcatggccaattgaaacccttcaggcccttcaagacatgggtctaaccaaatttccaaaaataatcaaaaaatcttgggcagacattgcctcagaatctaatgattaatctgaatcaaatctacaaaaaatgatctaaaatgcgtcaatgaccaaaacaaccaccaatactaaaggaaaactacctttagccaaagctcaaaccccacccaccaaaaaaactaacaattatatttataaaaataaattgttaaatgttttgcagatggaacctgaattttgggacaaatatcccttcaaggcaacggccaaggctttcccaccaggatttcactacaaaccaaccaccatcctgaagacaagaactttttacgaattgattttggtagattcaaactcagtatctatcaaacatttcaaagatccaaaagaccaaacattaaacacccactcgacaatccagatactaaaagttcttcaaccaagacactttggttcggacttgaacaaaggaaagagattttcagttccatttgatccggtaggttatacctattgggattacgttgattcttggactaaggtgttttggcaccaaaatacccgcttcaagcattcatggctgatatatttcaagaccaatacaatttacaattttcccaattggtttttgcaatggtgggacttctttggaccaatcctagagatattccctgaaacagtccaacaaggatttgctcaatttaagaaacaatacaattcgcaggaatcacgaattccagcagatcttaaatacttttcaagctttgcactatcatggatattttcatggcaatatcgttacagcaagactgaaaagacaaaccaatatccatcactacaaagacacgcatttgtaaaatggtggacacaatttg

SEQ ID NO: 12986 - DNA, 1208 bp, Glycine max
  Gm_smallRNAprecursor_5819
ctaaggcatcgggaatctccctacggggaggaaggagtacaggcaaaggagccagactggctcttccagagccaaccatcaagaaatcatccacctcttctgggtcaccaacccaggctgggtcatctacccagaaaaccaatttagaagggtcattaacccagattgcctcaatcaaacctgagccatccactcaggaatctcccaaaccggcaaccgccaaacaaacatcggccgactatgcatggccaattgaaacccttcaggcccttcaagacatgggtctaaccaaatttccaaaaataatcaaaaaatcttgggcagacattgcctcagaatctaatgattaatctgaatcaaatctacaaaaaatgatctaaaatgcgtcaatgaccaaaacaaccaccaatactaaaggaaaactacctttagccaaagctcaaaccccacccaccaaaaaaactaacaattatatttataaaaataaattgttaaatgttttgcagatggaacctgaattttgggacaaatatcccttcaaggcaacggccaaggctttcccaccaggatttcactacaaaccaaccaccatcctgaagacaagaactttttacgaattgattttggtagattcaaactcagtatctatcaaacatttcaaagatccaaaagaccaaacattaaacacccactcgacaatccagatactaaaagttcttcaaccaagacactttggttcggacttgaacaaaggaaagagattttcagttccatttgatccggtaggttatacctattgggattacgttgattcttggactaaggtgttttggcaccaaaatacccgcttcaagcattcatggctgatatatttcaagaccaatacaatttacaattttcccaattggtttttgcaatggtgggacttctttggaccaatcctagagatattccctgaaacagtccaacaaggatttgctcaatttaagaaacaatacaattcgcaggaatcacgaattccagcagatcttaaatacttttcaagctttgcactatcatggatattttcatggcaatatcgttacagcaagactgaaaagacaaaccaatatccatcactacaaagacacgcatttgtaaaatggtggacacaatttgactcatccaaagcggatccagaacaagtaaaactctggttccaatcccat

SEQ ID NO: 12987 - DNA, 1208 bp, Glycine max; identical to SEQ ID NO: 12986
  Gm_smallRNAprecursor_5820

SEQ ID NO: 12988 - DNA, 1211 bp, Glycine max
  Gm_smallRNAprecursor_5821
ctaaggcatcgggaatctccctacggggaggaaggagtacaggcaaaggagccagactggctcttccagagccaaccatcaagaaatcatccacctcttctgggtcaccaacccaggctgggtcatctacccagaaaaccaatttagaagggtcattaacccagattgcctcaatcaaacctgagccatccactcaggaatctcccaaaccggcaaccgccaaacaaacatcggccgactatgcatggccaattgaaacccttcaggcccttcaagacatgggtctaaccaaatttccaaaaataatcaaaaaatcttgggcagacattgcctcagaatctaatgattaatctgaatcaaatctacaaaaaatgatctaaaatgcgtcaatgaccaaaacaaccaccaatactaaaggaaaactacctttagccaaagctcaaaccccacccaccaaaaaaactaacaattatatttataaaaataaattgttaaatgttttgcagatggaacctgaattttgggacaaatatcccttcaaggcaacggccaaggctttcccaccaggatttcactacaaaccaaccaccatcctgaagacaagaactttttacgaattgattttggtagattcaaactcagtatctatcaaacatttcaaagatccaaaagaccaaacattaaacacccactcgacaatccagatactaaaagttcttcaaccaagacactttggttcggacttgaacaaaggaaagagattttcagttccatttgatccggtaggttatacctattgggattacgttgattcttggactaaggtgttttggcaccaaaatacccgcttcaagcattcatggctgatatatttcaagaccaatacaatttacaattttcccaattggtttttgcaatggtgggacttctttggaccaatcctagagatattccctgaaacagtccaacaaggatttgctcaatttaagaaacaatacaattcgcaggaatcacgaattccagcagatcttaaatacttttcaagctttgcactatcatggatattttcatggcaatatcgttacagcaagactgaaaagacaaaccaatatccatcactacaaagacacgcatttgtaaaatggtggacacaatttgactcatccaaagcggatccagaacaagtaaaactctggttccaatcccatcca

SEQ ID NO: 12989 - DNA, 1166 bp, Glycine max
  Gm_smallRNAprecursor_5822
ccaaaccggcaaccgccaaacaaacatcggccgactatgcatggccaattgaaacccttcaggcccttcaagacatgggtctaaccaaatttccaaaaataatcaaaaaatcttgggcagacattgcctcagaatctaatgattaatctgaatcaaatctacaaaaaatgatctaaaatgcgtcaatgaccaaaacaaccaccaatactaaaggaaaactacctttagccaaagctcaaaccccacccaccaaaaaaactaacaattatatttataaaaataaattgttaaatgttttgcagatggaacctgaattttgggacaaatatcccttcaaggcaacggccaaggctttcccaccaggatttcactacaaaccaaccaccatcctgaagacaagaactttttacgaattgattttggtagattcaaactcagtatctatcaaacatttcaaagatccaaaagaccaaacattaaacacccactcgacaatccagatactaaaagttcttcaaccaagacactttggttcggacttgaacaaaggaaagagattttcagttccatttgatccggtaggttatacctattgggattacgttgattcttggactaaggtgttttggcaccaaaatacccgcttcaagcattcatggctgatatatttcaagaccaatacaatttacaattttcccaattggtttttgcaatggtgggacttctttggaccaatcctagagatattccctgaaacagtccaacaaggatttgctcaatttaagaaacaatacaattcgcaggaatcacgaattccagcagatcttaaatacttttcaagctttgcactatcatggatattttcatggcaatatcgttacagcaagactgaaaagacaaaccaatatccatcactacaaagacacgcatttgtaaaatggtggacacaatttgactcatccaaagcggatccagaacaagtaaaactctggttccaatcccatccagaattcctcaaagcagctgatccagaaacttctgtgtttttgaaccaaaagtctcatctggcagcatttttagcaggatcgacatcaaaggaagtcttagctaaaaatctgaaggaagttctacaaatgttacagcaagaagaaaaagcttcatcctca

SEQ ID NO: 12990 - DNA, 1169 bp, Glycine max
  Gm_smallRNAprecursor_5823
ccaaaccggcaaccgccaaacaaacatcggccgactatgcatggccaattgaaacccttcaggcccttcaagacatgggtctaaccaaatttccaaaaataatcaaaaaatcttgggcagacattgcctcagaatctaatgattaatctgaatcaaatctacaaaaaatgatctaaaatgcgtcaatgaccaaaacaaccaccaatactaaaggaaaactacctttagccaaagctcaaaccccacccaccaaaaaaactaacaattatatttataaaaataaattgttaaatgttttgcagatggaacctgaattttgggacaaatatcccttcaaggcaacggccaaggctttcccaccaggatttcactacaaaccaaccaccatcctgaagacaagaactttttacgaattgattttggtagattcaaactcagtatctatcaaacatttcaaagatccaaaagaccaaacattaaacacccactcgacaatccagatactaaaagttcttcaaccaagacactttggttcggacttgaacaaaggaaagagattttcagttccatttgatccggtaggttatacctattgggattacgttgattcttggactaaggtgttttggcaccaaaatacccgcttcaagcattcatggctgatatatttcaagaccaatacaatttacaattttcccaattggtttttgcaatggtgggacttctttggaccaatcctagagatattccctgaaacagtccaacaaggatttgctcaatttaagaaacaatacaattcgcaggaatcacgaattccagcagatcttaaatacttttcaagctttgcactatcatggatattttcatggcaatatcgttacagcaagactgaaaagacaaaccaatatccatcactacaaagacacgcatttgtaaaatggtggacacaatttgactcatccaaagcggatccagaacaagtaaaactctggttccaatcccatccagaattcctcaaagcagctgatccagaaacttctgtgtttttgaaccaaaagtctcatctggcagcatttttagcaggatcgacatcaaaggaagtcttagctaaaaatctgaaggaagttctacaaatgttacagcaagaagaaaaagcttcatcctcaaag

SEQ ID NO: 12991 - DNA, 1107 bp, Glycine max
  Gm_smallRNAprecursor_5824
aaccggcaaccgccaaacaaacatcggccgactatgcatggccaattgaaacccttcaggcccttcaagacatgggtctaaccaaatttccaaaaataatcaaaaaatcttgggcagacattgcctcagaatctaatgattaatctgaatcaaatctacaaaaaatgatctaaaatgcgtcaatgaccaaaacaaccaccaatactaaaggaaaactacctttagccaaagctcaaaccccacccaccaaaaaaactaacaattatatttataaaaataaattgttaaatgttttgcagatggaacctgaattttgggacaaatatcccttcaaggcaacggccaaggctttcccaccaggatttcactacaaaccaaccaccatcctgaagacaagaactttttacgaattgattttggtagattcaaactcagtatctatcaaacatttcaaagatccaaaagaccaaacattaaacacccactcgacaatccagatactaaaagttcttcaaccaagacactttggttcggacttgaacaaaggaaagagattttcagttccatttgatccggtaggttatacctattgggattacgttgattcttggactaaggtgttttggcaccaaaatacccgcttcaagcattcatggctgatatatttcaagaccaatacaatttacaattttcccaattggtttttgcaatggtgggacttctttggaccaatcctagagatattccctgaaacagtccaacaaggatttgctcaatttaagaaacaatacaattcgcaggaatcacgaattccagcagatcttaaatacttttcaagctttgcactatcatggatattttcatggcaatatcgttacagcaagactgaaaagacaaaccaatatccatcactacaaagacacgcatttgtaaaatggtggacacaatttgactcatccaaagcggatccagaacaagtaaaactctggttccaatcccatccagaattcctcaaagcagctgatccagaaacttctgtgtttttgaaccaaaagtctcatctggcagcatttttagcaggatcgacatcaaaggaagtcttagcta

SEQ ID NO: 12992 - DNA, 1107 bp, Glycine max; identical to SEQ ID NO: 12991
  Gm_smallRNAprecursor_5825

SEQ ID NO: 12993 - DNA, 1108 bp, Glycine max
  Gm_smallRNAprecursor_5826
aaccggcaaccgccaaacaaacatcggccgactatgcatggccaattgaaacccttcaggcccttcaagacatgggtctaaccaaatttccaaaaataatcaaaaaatcttgggcagacattgcctcagaatctaatgattaatctgaatcaaatctacaaaaaatgatctaaaatgcgtcaatgaccaaaacaaccaccaatactaaaggaaaactacctttagccaaagctcaaaccccacccaccaaaaaaactaacaattatatttataaaaataaattgttaaatgttttgcagatggaacctgaattttgggacaaatatcccttcaaggcaacggccaaggctttcccaccaggatttcactacaaaccaaccaccatcctgaagacaagaactttttacgaattgattttggtagattcaaactcagtatctatcaaacatttcaaagatccaaaagaccaaacattaaacacccactcgacaatccagatactaaaagttcttcaaccaagacactttggttcggacttgaacaaaggaaagagattttcagttccatttgatccggtaggttatacctattgggattacgttgattcttggactaaggtgttttggcaccaaaatacccgcttcaagcattcatggctgatatatttcaagaccaatacaatttacaattttcccaattggtttttgcaatggtgggacttctttggaccaatcctagagatattccctgaaacagtccaacaaggatttgctcaatttaagaaacaatacaattcgcaggaatcacgaattccagcagatcttaaatacttttcaagctttgcactatcatggatattttcatggcaatatcgttacagcaagactgaaaagacaaaccaatatccatcactacaaagacacgcatttgtaaaatggtggacacaatttgactcatccaaagcggatccagaacaagtaaaactctggttccaatcccatccagaattcctcaaagcagctgatccagaaacttctgtgtttttgaaccaaaagtctcatctggcagcatttttagcaggatcgacatcaaaggaagtcttagctaa

SEQ ID NO: 12994 - DNA, 1108 bp, Glycine max; identical to SEQ ID NO: 12993
  Gm_smallRNAprecursor_5827

SEQ ID NO: 12995 - DNA, 1098 bp, Glycine max
  Gm_smallRNAprecursor_5828
caagacatgggtctaaccaaatttccaaaaataatcaaaaaatcttgggcagacattgcctcagaatctaatgattaatctgaatcaaatctacaaaaaatgatctaaaatgcgtcaatgaccaaaacaaccaccaatactaaaggaaaactacctttagccaaagctcaaaccccacccaccaaaaaaactaacaattatatttataaaaataaattgttaaatgttttgcagatggaacctgaattttgggacaaatatcccttcaaggcaacggccaaggctttcccaccaggatttcactacaaaccaaccaccatcctgaagacaagaactttttacgaattgattttggtagattcaaactcagtatctatcaaacatttcaaagatccaaaagaccaaacattaaacacccactcgacaatccagatactaaaagttcttcaaccaagacactttggttcggacttgaacaaaggaaagagattttcagttccatttgatccggtaggttatacctattgggattacgttgattcttggactaaggtgttttggcaccaaaatacccgcttcaagcattcatggctgatatatttcaagaccaatacaatttacaattttcccaattggtttttgcaatggtgggacttctttggaccaatcctagagatattccctgaaacagtccaacaaggatttgctcaatttaagaaacaatacaattcgcaggaatcacgaattccagcagatcttaaatacttttcaagctttgcactatcatggatattttcatggcaatatcgttacagcaagactgaaaagacaaaccaatatccatcactacaaagacacgcatttgtaaaatggtggacacaatttgactcatccaaagcggatccagaacaagtaaaactctggttccaatcccatccagaattcctcaaagcagctgatccagaaacttctgtgtttttgaaccaaaagtctcatctggcagcatttttagcaggatcgacatcaaaggaagtcttagctaaaaatctgaaggaagttctacaaatgttacagcaagaagaaaaagcttcatcctca

SEQ ID NO: 12996 - DNA, 1099 bp, Glycine max
  Gm_smallRNAprecursor_5829
caagacatgggtctaaccaaatttccaaaaataatcaaaaaatcttgggcagacattgcctcagaatctaatgattaatctgaatcaaatctacaaaaaatgatctaaaatgcgtcaatgaccaaaacaaccaccaatactaaaggaaaactacctttagccaaagctcaaaccccacccaccaaaaaaactaacaattatatttataaaaataaattgttaaatgttttgcagatggaacctgaattttgggacaaatatcccttcaaggcaacggccaaggctttcccaccaggatttcactacaaaccaaccaccatcctgaagacaagaactttttacgaattgattttggtagattcaaactcagtatctatcaaacatttcaaagatccaaaagaccaaacattaaacacccactcgacaatccagatactaaaagttcttcaaccaagacactttggttcggacttgaacaaaggaaagagattttcagttccatttgatccggtaggttatacctattgggattacgttgattcttggactaaggtgttttggcaccaaaatacccgcttcaagcattcatggctgatatatttcaagaccaatacaatttacaattttcccaattggtttttgcaatggtgggacttctttggaccaatcctagagatattccctgaaacagtccaacaaggatttgctcaatttaagaaacaatacaattcgcaggaatcacgaattccagcagatcttaaatacttttcaagctttgcactatcatggatattttcatggcaatatcgttacagcaagactgaaaagacaaaccaatatccatcactacaaagacacgcatttgtaaaatggtggacacaatttgactcatccaaagcggatccagaacaagtaaaactctggttccaatcccatccagaattcctcaaagcagctgatccagaaacttctgtgtttttgaaccaaaagtctcatctggcagcatttttagcaggatcgacatcaaaggaagtcttagctaaaaatctgaaggaagttctacaaatgttacagcaagaagaaaaagcttcatcctcaa

SEQ ID NO: 12997 - DNA, 1244 bp, Glycine max
  Gm_smallRNAprecursor_5830
caagacatgggtctaaccaaatttccaaaaataatcaaaaaatcttgggcagacattgcctcagaatctaatgattaatctgaatcaaatctacaaaaaatgatctaaaatgcgtcaatgaccaaaacaaccaccaatactaaaggaaaactacctttagccaaagctcaaaccccacccaccaaaaaaactaacaattatatttataaaaataaattgttaaatgttttgcagatggaacctgaattttgggacaaatatcccttcaaggcaacggccaaggctttcccaccaggatttcactacaaaccaaccaccatcctgaagacaagaactttttacgaattgattttggtagattcaaactcagtatctatcaaacatttcaaagatccaaaagaccaaacattaaacacccactcgacaatccagatactaaaagttcttcaaccaagacactttggttcggacttgaacaaaggaaagagattttcagttccatttgatccggtaggttatacctattgggattacgttgattcttggactaaggtgttttggcaccaaaatacccgcttcaagcattcatggctgatatatttcaagaccaatacaatttacaattttcccaattggtttttgcaatggtgggacttctttggaccaatcctagagatattccctgaaacagtccaacaaggatttgctcaatttaagaaacaatacaattcgcaggaatcacgaattccagcagatcttaaatacttttcaagctttgcactatcatggatattttcatggcaatatcgttacagcaagactgaaaagacaaaccaatatccatcactacaaagacacgcatttgtaaaatggtggacacaatttgactcatccaaagcggatccagaacaagtaaaactctggttccaatcccatccagaattcctcaaagcagctgatccagaaacttctgtgtttttgaaccaaaagtctcatctggcagcatttttagcaggatcgacatcaaaggaagtcttagctaaaaatctgaaggaagttctacaaatgttacagcaagaagaaaaagcttcatcctcaaagaaggaagaaacaagttctgctgaagaagaagaagaagatccctttttaccaaaacgaagatgattgttttggtatctgtttagattaaatttaatttcggtcacaaaaccgtatatttgtaattaatgtgtaattaatgcagg

SEQ ID NO: 12998 - DNA, 1146 bp, Glycine max
  Gm_smallRNAprecursor_5831
aatgatctaaaatgcgtcaatgaccaaaacaaccaccaatactaaaggaaaactacctttagccaaagctcaaaccccacccaccaaaaaaactaacaattatatttataaaaataaattgttaaatgttttgcagatggaacctgaattttgggacaaatatcccttcaaggcaacggccaaggctttcccaccaggatttcactacaaaccaaccaccatcctgaagacaagaactttttacgaattgattttggtagattcaaactcagtatctatcaaacatttcaaagatccaaaagaccaaacattaaacacccactcgacaatccagatactaaaagttcttcaaccaagacactttggttcggacttgaacaaaggaaagagattttcagttccatttgatccggtaggttatacctattgggattacgttgattcttggactaaggtgttttggcaccaaaatacccgcttcaagcattcatggctgatatatttcaagaccaatacaatttacaattttcccaattggtttttgcaatggtgggacttctttggaccaatcctagagatattccctgaaacagtccaacaaggatttgctcaatttaagaaacaatacaattcgcaggaatcacgaattccagcagatcttaaatacttttcaagctttgcactatcatggatattttcatggcaatatcgttacagcaagactgaaaagacaaaccaatatccatcactacaaagacacgcatttgtaaaatggtggacacaatttgactcatccaaagcggatccagaacaagtaaaactctggttccaatcccatccagaattcctcaaagcagctgatccagaaacttctgtgtttttgaaccaaaagtctcatctggcagcatttttagcaggatcgacatcaaaggaagtcttagctaaaaatctgaaggaagttctacaaatgttacagcaagaagaaaaagcttcatcctcaaagaaggaagaaacaagttctgctgaagaagaagaagaagatccctttttaccaaaacgaagatgattgttttggtatctgtttagattaaatttaatttcggtcacaaaaccgtatatttgtaattaatgtgtaattaatgcagg

SEQ ID NO: 12999 - DNA, 1144 bp, Glycine max
  Gm_smallRNAprecursor_5832
tgatctaaaatgcgtcaatgaccaaaacaaccaccaatactaaaggaaaactacctttagccaaagctcaaaccccacccaccaaaaaaactaacaattatatttataaaaataaattgttaaatgttttgcagatggaacctgaattttgggacaaatatcccttcaaggcaacggccaaggctttcccaccaggatttcactacaaaccaaccaccatcctgaagacaagaactttttacgaattgattttggtagattcaaactcagtatctatcaaacatttcaaagatccaaaagaccaaacattaaacacccactcgacaatccagatactaaaagttcttcaaccaagacactttggttcggacttgaacaaaggaaagagattttcagttccatttgatccggtaggttatacctattgggattacgttgattcttggactaaggtgttttggcaccaaaatacccgcttcaagcattcatggctgatatatttcaagaccaatacaatttacaattttcccaattggtttttgcaatggtgggacttctttggaccaatcctagagatattccctgaaacagtccaacaaggatttgctcaatttaagaaacaatacaattcgcaggaatcacgaattccagcagatcttaaatacttttcaagctttgcactatcatggatattttcatggcaatatcgttacagcaagactgaaaagacaaaccaatatccatcactacaaagacacgcatttgtaaaatggtggacacaatttgactcatccaaagcggatccagaacaagtaaaactctggttccaatcccatccagaattcctcaaagcagctgatccagaaacttctgtgtttttgaaccaaaagtctcatctggcagcatttttagcaggatcgacatcaaaggaagtcttagctaaaaatctgaaggaagttctacaaatgttacagcaagaagaaaaagcttcatcctcaaagaaggaagaaacaagttctgctgaagaagaagaagaagatccctttttaccaaaacgaagatgattgttttggtatctgtttagattaaatttaatttcggtcacaaaaccgtatatttgtaattaatgtgtaattaatgcagg

SEQ ID NO: 13000 - DNA, 1159 bp, Glycine max
  Gm_smallRNAprecursor_5833
gaattttgggacaaatatcccttcaaggcaacggccaaggctttcccaccaggatttcactacaaaccaaccaccatcctgaagacaagaactttttacgaattgattttggtagattcaaactcagtatctatcaaacatttcaaagatccaaaagaccaaacattaaacacccactcgacaatccagatactaaaagttcttcaaccaagacactttggttcggacttgaacaaaggaaagagattttcagttccatttgatccggtaggttatacctattgggattacgttgattcttggactaaggtgttttggcaccaaaatacccgcttcaagcattcatggctgatatatttcaagaccaatacaatttacaattttcccaattggtttttgcaatggtgggacttctttggaccaatcctagagatattccctgaaacagtccaacaaggatttgctcaatttaagaaacaatacaattcgcaggaatcacgaattccagcagatcttaaatacttttcaagctttgcactatcatggatattttcatggcaatatcgttacagcaagactgaaaagacaaaccaatatccatcactacaaagacacgcatttgtaaaatggtggacacaatttgactcatccaaagcggatccagaacaagtaaaactctggttccaatcccatccagaattcctcaaagcagctgatccagaaacttctgtgtttttgaaccaaaagtctcatctggcagcatttttagcaggatcgacatcaaaggaagtcttagctaaaaatctgaaggaagttctacaaatgttacagcaagaagaaaaagcttcatcctcaaagaaggaagaaacaagttctgctgaagaagaagaagaagatccctttttaccaaaacgaagatgattgttttggtatctgtttagattaaatttaatttcggtcacaaaaccgtatatttgtaattaatgtgtaattaatgcaggacaatactacctgtcctgtagccattaaagtcccggtcaaaactacttgtcttgtaacaaacggtcaaatagtcccagtcaaaactaccggcaactaccggtcttagatttttggctatataaggagtcctcaagtatgttgtgaggcaccctttcat

SEQ ID NO: 13001 - DNA, 1078 bp, Glycine max
  Gm_smallRNAprecursor_5834
attcaaactcagtatctatcaaacatttcaaagatccaaaagaccaaacattaaacacccactcgacaatccagatactaaaagttcttcaaccaagacactttggttcggacttgaacaaaggaaagagattttcagttccatttgatccggtaggttatacctattgggattacgttgattcttggactaaggtgttttggcaccaaaatacccgcttcaagcattcatggctgatatatttcaagaccaatacaatttacaattttcccaattggtttttgcaatggtgggacttctttggaccaatcctagagatattccctgaaacagtccaacaaggatttgctcaatttaagaaacaatacaattcgcaggaatcacgaattccagcagatcttaaatacttttcaagctttgcactatcatggatattttcatggcaatatcgttacagcaagactgaaaagacaaaccaatatccatcactacaaagacacgcatttgtaaaatggtggacacaatttgactcatccaaagcggatccagaacaagtaaaactctggttccaatcccatccagaattcctcaaagcagctgatccagaaacttctgtgtttttgaaccaaaagtctcatctggcagcatttttagcaggatcgacatcaaaggaagtcttagctaaaaatctgaaggaagttctacaaatgttacagcaagaagaaaaagcttcatcctcaaagaaggaagaaacaagttctgctgaagaagaagaagaagatccctttttaccaaaacgaagatgattgttttggtatctgtttagattaaatttaatttcggtcacaaaaccgtatatttgtaattaatgtgtaattaatgcaggacaatactacctgtcctgtagccattaaagtcccggtcaaaactacttgtcttgtaacaaacggtcaaatagtcccagtcaaaactaccggcaactaccggtcttagatttttggctatataaggagtcctcaagtatgttgtgaggcaccctttcatttagccatttttcaagtttctgaagagaggtgct

SEQ ID NO: 13002 - DNA, 1079 bp, Glycine max
  Gm_smallRNAprecursor_5835
attcaaactcagtatctatcaaacatttcaaagatccaaaagaccaaacattaaacacccactcgacaatccagatactaaaagttcttcaaccaagacactttggttcggacttgaacaaaggaaagagattttcagttccatttgatccggtaggttatacctattgggattacgttgattcttggactaaggtgttttggcaccaaaatacccgcttcaagcattcatggctgatatatttcaagaccaatacaatttacaattttcccaattggtttttgcaatggtgggacttctttggaccaatcctagagatattccctgaaacagtccaacaaggatttgctcaatttaagaaacaatacaattcgcaggaatcacgaattccagcagatcttaaatacttttcaagctttgcactatcatggatattttcatggcaatatcgttacagcaagactgaaaagacaaaccaatatccatcactacaaagacacgcatttgtaaaatggtggacacaatttgactcatccaaagcggatccagaacaagtaaaactctggttccaatcccatccagaattcctcaaagcagctgatccagaaacttctgtgtttttgaaccaaaagtctcatctggcagcatttttagcaggatcgacatcaaaggaagtcttagctaaaaatctgaaggaagttctacaaatgttacagcaagaagaaaaagcttcatcctcaaagaaggaagaaacaagttctgctgaagaagaagaagaagatccctttttaccaaaacgaagatgattgttttggtatctgtttagattaaatttaatttcggtcacaaaaccgtatatttgtaattaatgtgtaattaatgcaggacaatactacctgtcctgtagccattaaagtcccggtcaaaactacttgtcttgtaacaaacggtcaaatagtcccagtcaaaactaccggcaactaccggtcttagatttttggctatataaggagtcctcaagtatgttgtgaggcaccctttcatttagccatttttcaagtttctgaagagaggtgctc

SEQ ID NO: 13003 - DNA, 1055 bp, Glycine max
  Gm_smallRNAprecursor_5836
tcttcaaccaagacactttggttcggacttgaacaaaggaaagagattttcagttccatttgatccggtaggttatacctattgggattacgttgattcttggactaaggtgttttggcaccaaaatacccgcttcaagcattcatggctgatatatttcaagaccaatacaatttacaattttcccaattggtttttgcaatggtgggacttctttggaccaatcctagagatattccctgaaacagtccaacaaggatttgctcaatttaagaaacaatacaattcgcaggaatcacgaattccagcagatcttaaatacttttcaagctttgcactatcatggatattttcatggcaatatcgttacagcaagactgaaaagacaaaccaatatccatcactacaaagacacgcatttgtaaaatggtggacacaatttgactcatccaaagcggatccagaacaagtaaaactctggttccaatcccatccagaattcctcaaagcagctgatccagaaacttctgtgtttttgaaccaaaagtctcatctggcagcatttttagcaggatcgacatcaaaggaagtcttagctaaaaatctgaaggaagttctacaaatgttacagcaagaagaaaaagcttcatcctcaaagaaggaagaaacaagttctgctgaagaagaagaagaagatccctttttaccaaaacgaagatgattgttttggtatctgtttagattaaatttaatttcggtcacaaaaccgtatatttgtaattaatgtgtaattaatgcaggacaatactacctgtcctgtagccattaaagtcccggtcaaaactacttgtcttgtaacaaacggtcaaatagtcccagtcaaaactaccggcaactaccggtcttagatttttggctatataaggagtcctcaagtatgttgtgaggcaccctttcatttagccatttttcaagtttctgaagagaggtgctctgaaacaagatttttgtatgcgcttcattctagattcaataaatttatatttttcatcttt

SEQ ID NO: 13004 - DNA, 1216 bp, Glycine max
  Gm_smallRNAprecursor_5837
tcttcaaccaagacactttggttcggacttgaacaaaggaaagagattttcagttccatttgatccggtaggttatacctattgggattacgttgattcttggactaaggtgttttggcaccaaaatacccgcttcaagcattcatggctgatatatttcaagaccaatacaatttacaattttcccaattggtttttgcaatggtgggacttctttggaccaatcctagagatattccctgaaacagtccaacaaggatttgctcaatttaagaaacaatacaattcgcaggaatcacgaattccagcagatcttaaatacttttcaagctttgcactatcatggatattttcatggcaatatcgttacagcaagactgaaaagacaaaccaatatccatcactacaaagacacgcatttgtaaaatggtggacacaatttgactcatccaaagcggatccagaacaagtaaaactctggttccaatcccatccagaattcctcaaagcagctgatccagaaacttctgtgtttttgaaccaaaagtctcatctggcagcatttttagcaggatcgacatcaaaggaagtcttagctaaaaatctgaaggaagttctacaaatgttacagcaagaagaaaaagcttcatcctcaaagaaggaagaaacaagttctgctgaagaagaagaagaagatccctttttaccaaaacgaagatgattgttttggtatctgtttagattaaatttaatttcggtcacaaaaccgtatatttgtaattaatgtgtaattaatgcaggacaatactacctgtcctgtagccattaaagtcccggtcaaaactacttgtcttgtaacaaacggtcaaatagtcccagtcaaaactaccggcaactaccggtcttagatttttggctatataaggagtcctcaagtatgttgtgaggcaccctttcatttagccatttttcaagtttctgaagagaggtgctctgaaacaagatttttgtatgcgcttcattctagattcaataaatttatatttttcatctttctctcttctcccttcaccgatcctgtgcggctcttccgccgcttcggtttctttgtttatgaaaaactggggtttgtaagccggtctctggtgtgcccttgatatctattttcaagtttatatttttctttcatttatcatactgcattcttacttcctat

SEQ ID NO: 13005 - DNA, 1217 bp, Glycine max
  Gm_smallRNAprecursor_5838
tcttcaaccaagacactttggttcggacttgaacaaaggaaagagattttcagttccatttgatccggtaggttatacctattgggattacgttgattcttggactaaggtgttttggcaccaaaatacccgcttcaagcattcatggctgatatatttcaagaccaatacaatttacaattttcccaattggtttttgcaatggtgggacttctttggaccaatcctagagatattccctgaaacagtccaacaaggatttgctcaatttaagaaacaatacaattcgcaggaatcacgaattccagcagatcttaaatacttttcaagctttgcactatcatggatattttcatggcaatatcgttacagcaagactgaaaagacaaaccaatatccatcactacaaagacacgcatttgtaaaatggtggacacaatttgactcatccaaagcggatccagaacaagtaaaactctggttccaatcccatccagaattcctcaaagcagctgatccagaaacttctgtgtttttgaaccaaaagtctcatctggcagcatttttagcaggatcgacatcaaaggaagtcttagctaaaaatctgaaggaagttctacaaatgttacagcaagaagaaaaagcttcatcctcaaagaaggaagaaacaagttctgctgaagaagaagaagaagatccctttttaccaaaacgaagatgattgttttggtatctgtttagattaaatttaatttcggtcacaaaaccgtatatttgtaattaatgtgtaattaatgcaggacaatactacctgtcctgtagccattaaagtcccggtcaaaactacttgtcttgtaacaaacggtcaaatagtcccagtcaaaactaccggcaactaccggtcttagatttttggctatataaggagtcctcaagtatgttgtgaggcaccctttcatttagccatttttcaagtttctgaagagaggtgctctgaaacaagatttttgtatgcgcttcattctagattcaataaatttatatttttcatctttctctcttctcccttcaccgatcctgtgcggctcttccgccgcttcggtttctttgtttatgaaaaactggggtttgtaagccggtctctggtgtgcccttgatatctattttcaagtttatatttttctttcatttatcatactgcattcttacttcctatc

SEQ ID NO: 13006 - DNA, 1058 bp, Glycine max
  Gm_smallRNAprecursor_5839
atttcaagaccaatacaatttacaattttcccaattggtttttgcaatggtgggacttctttggaccaatcctagagatattccctgaaacagtccaacaaggatttgctcaatttaagaaacaatacaattcgcaggaatcacgaattccagcagatcttaaatacttttcaagctttgcactatcatggatattttcatggcaatatcgttacagcaagactgaaaagacaaaccaatatccatcactacaaagacacgcatttgtaaaatggtggacacaatttgactcatccaaagcggatccagaacaagtaaaactctggttccaatcccatccagaattcctcaaagcagctgatccagaaacttctgtgtttttgaaccaaaagtctcatctggcagcatttttagcaggatcgacatcaaaggaagtcttagctaaaaatctgaaggaagttctacaaatgttacagcaagaagaaaaagcttcatcctcaaagaaggaagaaacaagttctgctgaagaagaagaagaagatccctttttaccaaaacgaagatgattgttttggtatctgtttagattaaatttaatttcggtcacaaaaccgtatatttgtaattaatgtgtaattaatgcaggacaatactacctgtcctgtagccattaaagtcccggtcaaaactacttgtcttgtaacaaacggtcaaatagtcccagtcaaaactaccggcaactaccggtcttagatttttggctatataaggagtcctcaagtatgttgtgaggcaccctttcatttagccatttttcaagtttctgaagagaggtgctctgaaacaagatttttgtatgcgcttcattctagattcaataaatttatatttttcatctttctctcttctcccttcaccgatcctgtgcggctcttccgccgcttcggtttctttgtttatgaaaaactggggtttgtaagccggtctctggtgtgcccttgatatctattttcaagtttatatttttctttcatttatcatactgcattcttacttcc

SEQ ID NO: 13007 - DNA, 1065 bp, Glycine max
  Gm_smallRNAprecursor_5840
atttcaagaccaatacaatttacaattttcccaattggtttttgcaatggtgggacttctttggaccaatcctagagatattccctgaaacagtccaacaaggatttgctcaatttaagaaacaatacaattcgcaggaatcacgaattccagcagatcttaaatacttttcaagctttgcactatcatggatattttcatggcaatatcgttacagcaagactgaaaagacaaaccaatatccatcactacaaagacacgcatttgtaaaatggtggacacaatttgactcatccaaagcggatccagaacaagtaaaactctggttccaatcccatccagaattcctcaaagcagctgatccagaaacttctgtgtttttgaaccaaaagtctcatctggcagcatttttagcaggatcgacatcaaaggaagtcttagctaaaaatctgaaggaagttctacaaatgttacagcaagaagaaaaagcttcatcctcaaagaaggaagaaacaagttctgctgaagaagaagaagaagatccctttttaccaaaacgaagatgattgttttggtatctgtttagattaaatttaatttcggtcacaaaaccgtatatttgtaattaatgtgtaattaatgcaggacaatactacctgtcctgtagccattaaagtcccggtcaaaactacttgtcttgtaacaaacggtcaaatagtcccagtcaaaactaccggcaactaccggtcttagatttttggctatataaggagtcctcaagtatgttgtgaggcaccctttcatttagccatttttcaagtttctgaagagaggtgctctgaaacaagatttttgtatgcgcttcattctagattcaataaatttatatttttcatctttctctcttctcccttcaccgatcctgtgcggctcttccgccgcttcggtttctttgtttatgaaaaactggggtttgtaagccggtctctggtgtgcccttgatatctattttcaagtttatatttttctttcatttatcatactgcattcttacttcctatctgt

SEQ ID NO: 13008 - DNA, 1060 bp, Glycine max
  Gm_smallRNAprecursor_5841
tttcaagaccaatacaatttacaattttcccaattggtttttgcaatggtgggacttctttggaccaatcctagagatattccctgaaacagtccaacaaggatttgctcaatttaagaaacaatacaattcgcaggaatcacgaattccagcagatcttaaatacttttcaagctttgcactatcatggatattttcatggcaatatcgttacagcaagactgaaaagacaaaccaatatccatcactacaaagacacgcatttgtaaaatggtggacacaatttgactcatccaaagcggatccagaacaagtaaaactctggttccaatcccatccagaattcctcaaagcagctgatccagaaacttctgtgtttttgaaccaaaagtctcatctggcagcatttttagcaggatcgacatcaaaggaagtcttagctaaaaatctgaaggaagttctacaaatgttacagcaagaagaaaaagcttcatcctcaaagaaggaagaaacaagttctgctgaagaagaagaagaagatccctttttaccaaaacgaagatgattgttttggtatctgtttagattaaatttaatttcggtcacaaaaccgtatatttgtaattaatgtgtaattaatgcaggacaatactacctgtcctgtagccattaaagtcccggtcaaaactacttgtcttgtaacaaacggtcaaatagtcccagtcaaaactaccggcaactaccggtcttagatttttggctatataaggagtcctcaagtatgttgtgaggcaccctttcatttagccatttttcaagtttctgaagagaggtgctctgaaacaagatttttgtatgcgcttcattctagattcaataaatttatatttttcatctttctctcttctcccttcaccgatcctgtgcggctcttccgccgcttcggtttctttgtttatgaaaaactggggtttgtaagccggtctctggtgtgcccttgatatctattttcaagtttatatttttctttcatttatcatactgcattcttacttcctat

SEQ ID NO: 13009 - DNA, 1061 bp, Glycine max
  Gm_smallRNAprecursor_5842
tttcaagaccaatacaatttacaattttcccaattggtttttgcaatggtgggacttctttggaccaatcctagagatattccctgaaacagtccaacaaggatttgctcaatttaagaaacaatacaattcgcaggaatcacgaattccagcagatcttaaatacttttcaagctttgcactatcatggatattttcatggcaatatcgttacagcaagactgaaaagacaaaccaatatccatcactacaaagacacgcatttgtaaaatggtggacacaatttgactcatccaaagcggatccagaacaagtaaaactctggttccaatcccatccagaattcctcaaagcagctgatccagaaacttctgtgtttttgaaccaaaagtctcatctggcagcatttttagcaggatcgacatcaaaggaagtcttagctaaaaatctgaaggaagttctacaaatgttacagcaagaagaaaaagcttcatcctcaaagaaggaagaaacaagttctgctgaagaagaagaagaagatccctttttaccaaaacgaagatgattgttttggtatctgtttagattaaatttaatttcggtcacaaaaccgtatatttgtaattaatgtgtaattaatgcaggacaatactacctgtcctgtagccattaaagtcccggtcaaaactacttgtcttgtaacaaacggtcaaatagtcccagtcaaaactaccggcaactaccggtcttagatttttggctatataaggagtcctcaagtatgttgtgaggcaccctttcatttagccatttttcaagtttctgaagagaggtgctctgaaacaagatttttgtatgcgcttcattctagattcaataaatttatatttttcatctttctctcttctcccttcaccgatcctgtgcggctcttccgccgcttcggtttctttgtttatgaaaaactggggtttgtaagccggtctctggtgtgcccttgatatctattttcaagtttatatttttctttcatttatcatactgcattcttacttcctatc

SEQ ID NO: 13010 - DNA, 1061 bp, Glycine max; identical to SEQ ID NO: 13009
  Gm_smallRNAprecursor_5843

SEQ ID NO: 13011 - DNA, 1064 bp, Glycine max
  Gm_smallRNAprecursor_5844
tttcaagaccaatacaatttacaattttcccaattggtttttgcaatggtgggacttctttggaccaatcctagagatattccctgaaacagtccaacaaggatttgctcaatttaagaaacaatacaattcgcaggaatcacgaattccagcagatcttaaatacttttcaagctttgcactatcatggatattttcatggcaatatcgttacagcaagactgaaaagacaaaccaatatccatcactacaaagacacgcatttgtaaaatggtggacacaatttgactcatccaaagcggatccagaacaagtaaaactctggttccaatcccatccagaattcctcaaagcagctgatccagaaacttctgtgtttttgaaccaaaagtctcatctggcagcatttttagcaggatcgacatcaaaggaagtcttagctaaaaatctgaaggaagttctacaaatgttacagcaagaagaaaaagcttcatcctcaaagaaggaagaaacaagttctgctgaagaagaagaagaagatccctttttaccaaaacgaagatgattgttttggtatctgtttagattaaatttaatttcggtcacaaaaccgtatatttgtaattaatgtgtaattaatgcaggacaatactacctgtcctgtagccattaaagtcccggtcaaaactacttgtcttgtaacaaacggtcaaatagtcccagtcaaaactaccggcaactaccggtcttagatttttggctatataaggagtcctcaagtatgttgtgaggcaccctttcatttagccatttttcaagtttctgaagagaggtgctctgaaacaagatttttgtatgcgcttcattctagattcaataaatttatatttttcatctttctctcttctcccttcaccgatcctgtgcggctcttccgccgcttcggtttctttgtttatgaaaaactggggtttgtaagccggtctctggtgtgcccttgatatctattttcaagtttatatttttctttcatttatcatactgcattcttacttcctatctgt

SEQ ID NO: 13012 - DNA, 1057 bp, Glycine max
  Gm_smallRNAprecursor_5845
caagaccaatacaatttacaattttcccaattggtttttgcaatggtgggacttctttggaccaatcctagagatattccctgaaacagtccaacaaggatttgctcaatttaagaaacaatacaattcgcaggaatcacgaattccagcagatcttaaatacttttcaagctttgcactatcatggatattttcatggcaatatcgttacagcaagactgaaaagacaaaccaatatccatcactacaaagacacgcatttgtaaaatggtggacacaatttgactcatccaaagcggatccagaacaagtaaaactctggttccaatcccatccagaattcctcaaagcagctgatccagaaacttctgtgtttttgaaccaaaagtctcatctggcagcatttttagcaggatcgacatcaaaggaagtcttagctaaaaatctgaaggaagttctacaaatgttacagcaagaagaaaaagcttcatcctcaaagaaggaagaaacaagttctgctgaagaagaagaagaagatccctttttaccaaaacgaagatgattgttttggtatctgtttagattaaatttaatttcggtcacaaaaccgtatatttgtaattaatgtgtaattaatgcaggacaatactacctgtcctgtagccattaaagtcccggtcaaaactacttgtcttgtaacaaacggtcaaatagtcccagtcaaaactaccggcaactaccggtcttagatttttggctatataaggagtcctcaagtatgttgtgaggcaccctttcatttagccatttttcaagtttctgaagagaggtgctctgaaacaagatttttgtatgcgcttcattctagattcaataaatttatatttttcatctttctctcttctcccttcaccgatcctgtgcggctcttccgccgcttcggtttctttgtttatgaaaaactggggtttgtaagccggtctctggtgtgcccttgatatctattttcaagtttatatttttctttcatttatcatactgcattcttacttcctat

SEQ ID NO: 13013 - DNA, 1057 bp, Glycine max; identical to SEQ ID NO: 13012
  Gm_smallRNAprecursor_5846

SEQ ID NO: 13014 - DNA, 1058 bp, Glycine max
  Gm_smallRNAprecursor_5847
caagaccaatacaatttacaattttcccaattggtttttgcaatggtgggacttctttggaccaatcctagagatattccctgaaacagtccaacaaggatttgctcaatttaagaaacaatacaattcgcaggaatcacgaattccagcagatcttaaatacttttcaagctttgcactatcatggatattttcatggcaatatcgttacagcaagactgaaaagacaaaccaatatccatcactacaaagacacgcatttgtaaaatggtggacacaatttgactcatccaaagcggatccagaacaagtaaaactctggttccaatcccatccagaattcctcaaagcagctgatccagaaacttctgtgtttttgaaccaaaagtctcatctggcagcatttttagcaggatcgacatcaaaggaagtcttagctaaaaatctgaaggaagttctacaaatgttacagcaagaagaaaaagcttcatcctcaaagaaggaagaaacaagttctgctgaagaagaagaagaagatccctttttaccaaaacgaagatgattgttttggtatctgtttagattaaatttaatttcggtcacaaaaccgtatatttgtaattaatgtgtaattaatgcaggacaatactacctgtcctgtagccattaaagtcccggtcaaaactacttgtcttgtaacaaacggtcaaatagtcccagtcaaaactaccggcaactaccggtcttagatttttggctatataaggagtcctcaagtatgttgtgaggcaccctttcatttagccatttttcaagtttctgaagagaggtgctctgaaacaagatttttgtatgcgcttcattctagattcaataaatttatatttttcatctttctctcttctcccttcaccgatcctgtgcggctcttccgccgcttcggtttctttgtttatgaaaaactggggtttgtaagccggtctctggtgtgcccttgatatctattttcaagtttatatttttctttcatttatcatactgcattcttacttcctatc

SEQ ID NO: 13015 - DNA, 1058 bp, Glycine max; identical to SEQ ID NO: 13014
  Gm_smallRNAprecursor_5848

SEQ ID NO: 13016 - DNA, 1058 bp, Glycine max; identical to SEQ ID NO: 13014
  Gm_smallRNAprecursor_5849

SEQ ID NO: 13017 - DNA, 1058 bp, Glycine max; identical to SEQ ID NO: 13014
  Gm_smallRNAprecursor_5850

SEQ ID NO: 13018 - DNA, 1198 bp, Glycine max
  Gm_smallRNAprecursor_5851
acagtccaacaaggatttgctcaatttaagaaacaatacaattcgcaggaatcacgaattccagcagatcttaaatacttttcaagctttgcactatcatggatattttcatggcaatatcgttacagcaagactgaaaagacaaaccaatatccatcactacaaagacacgcatttgtaaaatggtggacacaatttgactcatccaaagcggatccagaacaagtaaaactctggttccaatcccatccagaattcctcaaagcagctgatccagaaacttctgtgtttttgaaccaaaagtctcatctggcagcatttttagcaggatcgacatcaaaggaagtcttagctaaaaatctgaaggaagttctacaaatgttacagcaagaagaaaaagcttcatcctcaaagaaggaagaaacaagttctgctgaagaagaagaagaagatccctttttaccaaaacgaagatgattgttttggtatctgtttagattaaatttaatttcggtcacaaaaccgtatatttgtaattaatgtgtaattaatgcaggacaatactacctgtcctgtagccattaaagtcccggtcaaaactacttgtcttgtaacaaacggtcaaatagtcccagtcaaaactaccggcaactaccggtcttagatttttggctatataaggagtcctcaagtatgttgtgaggcaccctttcatttagccatttttcaagtttctgaagagaggtgctctgaaacaagatttttgtatgcgcttcattctagattcaataaatttatatttttcatctttctctcttctcccttcaccgatcctgtgcggctcttccgccgcttcggtttctttgtttatgaaaaactggggtttgtaagccggtctctggtgtgcccttgatatctattttcaagtttatatttttctttcatttatcatactgcattcttacttcctatctgtccgtttgatcttattccgctgacctatatatatataggtatctgactgtgtgtctgtgtcaagctggtagtggtagatagctagggtgcagttcatggattctttgtaattctccattttgagtttcaacaataatatctctttttgagcctggatgaaaatcgccaacaataagtgcagcaatttccggaacgttaggcatattatatacacaaccatctt

SEQ ID NO: 13019 - DNA, 1076 bp, Glycine max
  Gm_smallRNAprecursor_5852
agtggtcgacattgatgacgaagctgcagacctccaacgcctggacagggcaagagtgctcattaagacaccatggcaccccacaattaaccacaggatgctggcatatccattaacaaggtcgaatatgtcaataatatcgtggaggagacatgttacagcccctgtagctgtaaaagcaatggggacagagcctgatgtcgaaatacaaaatgtttgtcggcaagtcatcggcagaagccatgtacgtgggagcagtagagagtgaccagcacaaaagcaaaggggagaatctattgtctgctggtcaatgtattaaacaaagacccatggacattagtcaggaccctctgccaggtagaccaatcaacattaggcctagcgacaatagtactagccatggggttgagtctccatgtgatgctgacaatgttgttaatggcggatgacggttcatgacagaaagtaaaaaatccgccataaaaatatggcggatggcgtagcggaaaatggcggatgtcatgacggacaaaaaaaaaaaaacatatatataaactcattgaaattgaaaaaaacaaaggattgcattcaaataaactaaaaaagtttgatgagttcatacaataatcaagtaccaacaccaaataaactcattaaaaagaggactgaacagaaaaaaaaataaaattgtggtgtcaaatagaaaaaaaaaattaaaaatgggactgtcgaaagtaaaaggggggtgtcaaatagaaaaacggaaaaaaaagctgcagacaacaaaaaggggtgtcaagcagcaaaaacaaaaaaaaaaggctttggcccacccccaccagtataagtcacggttctggctgggtcgtcttctccgttcgcgttgccatcgttcacgccgtgctcgtcgccgccattcgcgttgccgtgggtggtcgctgccatgctcgtcgccgccgtgggtcgttgctggttgcaggtgtgggtggttccgaggtcgtggctggtcgcagggatcgtgggtcgtcgcgctgtgttggagcttcgaggtcgagggttgcagctgcatccgccat

SEQ ID NO: 13020 - DNA, 1065 bp, Glycine max
  Gm_smallRNAprecursor_5853
cagcttttagccatcgattagttctacagcttttaactaacttatcagttacttttacatgaaataacctagaaataaaaccaagaaattaaacaaagtagacacctgttgtacattaacttattctcagctgactacaaccgatcgaatagctggcaaagctgcttacttgcaacaactatgtggcaaagtatatcattgcaccatatctttcttttgaatgtattgtatggttattagtttgccataaaaaataaccaattagaatcattagatgaaatgaaagagaatttatcttcgtctgcgggcatatttcattattgggaggtagataccttctcatcaccagttcctcctaatcctataaattacttacagaagatattaagaacacataatatatcttcttctgccattggattgataattaacaaagaagtgaatcaaacagatcgaatcgtctatatatgcatgcttcaggtttgttaatttgtggaggtgacagaagagagtgagcacttggctctttcctagcatggatctaagttcacgccaaaagccgtgtgctctctctctatctgtcaccacctcctttaattccctcccctcttcatttcttactagctaggatcttttgcctgtagcatatatataaacttgaaagttctatattagtacttcaattgcatgatatattcaagtgcaagtcatcactcatcatatgcatatttcagttgccaattataaaataacaggtaatataaggaatataaagaaaaagaatcaaattataatgatcatggatacctgttcctatgtgactgttaatgtgttaaatttttttcttcattaatgccaactatatgaagatgtttatatatattgtgaggattgccatggagactgtttgtatgctggcactggtgatctcatgcagcagcagctcattagatatcccaaactagatgatgcaaaacttgcaatgtatgggactcgaatttctgctctgtacatattcatctacaattttgcatgtatgtatgtagtcaaagattagaacttcag

SEQ ID NO: 13021 - DNA, 1185 bp, Glycine max
  Gm_smallRNAprecursor_5854
ctacattgatcgacactattttgttcatcagcaacacaatgtacaaccaccagtcggtatactcgaggttggcatgaccttcaatgacaaagcacaatgtattcgagcaatcaaagaatacaacatcagaaatcattttgattgcagaacaatttactctgactagagaaggctaaacttcgtctgcaagttacatgaaaatggttgtacatggagcttgggcgcatgcaattcaaagaggcataacaaatggattatcaagagtatcagaggtcattacacttgtctcgtgccaatgctcagacaagatcatcgccaactcgacaaacacgtcatagcacagatcatccaaccaattgtcaaaacaaacccaatcgtctccatcaagacgttgattgtagagatcaaaacgttcatgaattataccatatcctacaagaagacatagttagcaaagcaaagagcgttggagatgattcatggaaactgggaagaatcatatgccaaactgccaaaacttttcggagctttgcaatcttgtgttcccgggactatggtcgctgctcaaacagaatccttgtatgaggggggagaaatagtatcgggtaaaagattctttaaacgtgtcttttggtcatttgcttcgtgcattaatggttttgcatattgcaaacccatagtacaagtagatggtacatggctttacgggaagtatactggcacactgttgatagctaccgcacaacatggagctaaccatatcttcccgattgcctatcccattgtagaaggggagacaacttcagcttggggtttttttttaaagaatttgagaagacatgttactccataaattaacatttctctcattttagactgacacacccctcaattataagtgcctacaacaacccaagtaacttatgggtccaggacacatcccacttcttttgcctgtgccacattgcacaaaactttcttcgcggtaactcaaactgcaaacatttaaagaaaccactcatgttggctggtgagaatctattttatttattcgttataattttctttcaatcaaattttataacataatacattgattgaatatttacaggttacgcatacacggagaagatgcactggcgacatcttggggatattcgtgcgaataagccaagtgcaactgaa

SEQ ID NO: 13022 - DNA, 1071 bp, Glycine max
  Gm_smallRNAprecursor_5855
cacactccctttctgaacgagatcttagatctctcgttgatgctttaaaagaaccctaatctcatctcatggctattgcttggtgcaccagcattattgcttccaaaataaataaatgaatgaatgaatgagcataccactccctctctctctctctttctcaccactcactcgctttgcctggctgcttgttttgatctgtttcattctttcttttctttttatgtgacctttggaacttcactctctctctctctctctctctctctctcaaccctaagaggctgtgaagatggtttcggagtgtggacccgatggatctgccgccgtcaaacctcctcgccggtggcgcggcaactttatcgcttttgattttgttgcagccatccctggcggtgttgtttttcgatgaccgataccatcgctgtgccagatctgagcctcaccaattccctaatctaagaactctccctcattggcgttgtcttaacgcagtgtttggcagaggtgtatggagtgagagaagggaaagggtattttccgattctgtcgttactctcttccctctctcattccatacatcgtctgacgaacgtatcgttgattggttctgcatggttgcattttctgtttgtttttagccttactttttttcccgttaaagtaacttatgagtatctgtggttacttcatttctaatttcttatgtttatgagtatctgtggtttcttcatttctaatttccccaggttagacgagggagggaagactatcatgtgagagagactcacactggattataagggtgagttgaagtcgcaattccgacaaaagtggactagagtaatgatctgcttttgggtgatgaactggagtcatgtgttaacactagtattttgtgtttgagcgatctatagaactaggagaatgatttttgtactagcactttaattattttgtcaaacaataatcttaccagagtttacattttttattttctgtatgatgttcaacggtttgaggcaagcaacgaagactggttgcacttcgttttatttttgtttttccagt

SEQ ID NO: 13023 - DNA, 1067 bp, Glycine max
  Gm_smallRNAprecursor_5856
cactccctttctgaacgagatcttagatctctcgttgatgctttaaaagaaccctaatctcatctcatggctattgcttggtgcaccagcattattgcttccaaaataaataaatgaatgaatgaatgagcataccactccctctctctctctctttctcaccactcactcgctttgcctggctgcttgttttgatctgtttcattctttcttttctttttatgtgacctttggaacttcactctctctctctctctctctctctctctcaaccctaagaggctgtgaagatggtttcggagtgtggacccgatggatctgccgccgtcaaacctcctcgccggtggcgcggcaactttatcgcttttgattttgttgcagccatccctggcggtgttgtttttcgatgaccgataccatcgctgtgccagatctgagcctcaccaattccctaatctaagaactctccctcattggcgttgtcttaacgcagtgtttggcagaggtgtatggagtgagagaagggaaagggtattttccgattctgtcgttactctcttccctctctcattccatacatcgtctgacgaacgtatcgttgattggttctgcatggttgcattttctgtttgtttttagccttactttttttcccgttaaagtaacttatgagtatctgtggttacttcatttctaatttcttatgtttatgagtatctgtggtttcttcatttctaatttccccaggttagacgagggagggaagactatcatgtgagagagactcacactggattataagggtgagttgaagtcgcaattccgacaaaagtggactagagtaatgatctgcttttgggtgatgaactggagtcatgtgttaacactagtattttgtgtttgagcgatctatagaactaggagaatgatttttgtactagcactttaattattttgtcaaacaataatcttaccagagtttacattttttattttctgtatgatgttcaacggtttgaggcaagcaacgaagactggttgcacttcgttttatttttgtttttcca

SEQ ID NO: 13024 - DNA, 1065 bp, Glycine max
  Gm_smallRNAprecursor_5857
actccctttctgaacgagatcttagatctctcgttgatgctttaaaagaaccctaatctcatctcatggctattgcttggtgcaccagcattattgcttccaaaataaataaatgaatgaatgaatgagcataccactccctctctctctctctttctcaccactcactcgctttgcctggctgcttgttttgatctgtttcattctttcttttctttttatgtgacctttggaacttcactctctctctctctctctctctctctctcaaccctaagaggctgtgaagatggtttcggagtgtggacccgatggatctgccgccgtcaaacctcctcgccggtggcgcggcaactttatcgcttttgattttgttgcagccatccctggcggtgttgtttttcgatgaccgataccatcgctgtgccagatctgagcctcaccaattccctaatctaagaactctccctcattggcgttgtcttaacgcagtgtttggcagaggtgtatggagtgagagaagggaaagggtattttccgattctgtcgttactctcttccctctctcattccatacatcgtctgacgaacgtatcgttgattggttctgcatggttgcattttctgtttgtttttagccttactttttttcccgttaaagtaacttatgagtatctgtggttacttcatttctaatttcttatgtttatgagtatctgtggtttcttcatttctaatttccccaggttagacgagggagggaagactatcatgtgagagagactcacactggattataagggtgagttgaagtcgcaattccgacaaaagtggactagagtaatgatctgcttttgggtgatgaactggagtcatgtgttaacactagtattttgtgtttgagcgatctatagaactaggagaatgatttttgtactagcactttaattattttgtcaaacaataatcttaccagagtttacattttttattttctgtatgatgttcaacggtttgaggcaagcaacgaagactggttgcacttcgttttatttttgtttttcc

SEQ ID NO: 13025 - DNA, 1066 bp, Glycine max
  Gm_smallRNAprecursor_5858
actccctttctgaacgagatcttagatctctcgttgatgctttaaaagaaccctaatctcatctcatggctattgcttggtgcaccagcattattgcttccaaaataaataaatgaatgaatgaatgagcataccactccctctctctctctctttctcaccactcactcgctttgcctggctgcttgttttgatctgtttcattctttcttttctttttatgtgacctttggaacttcactctctctctctctctctctctctctctcaaccctaagaggctgtgaagatggtttcggagtgtggacccgatggatctgccgccgtcaaacctcctcgccggtggcgcggcaactttatcgcttttgattttgttgcagccatccctggcggtgttgtttttcgatgaccgataccatcgctgtgccagatctgagcctcaccaattccctaatctaagaactctccctcattggcgttgtcttaacgcagtgtttggcagaggtgtatggagtgagagaagggaaagggtattttccgattctgtcgttactctcttccctctctcattccatacatcgtctgacgaacgtatcgttgattggttctgcatggttgcattttctgtttgtttttagccttactttttttcccgttaaagtaacttatgagtatctgtggttacttcatttctaatttcttatgtttatgagtatctgtggtttcttcatttctaatttccccaggttagacgagggagggaagactatcatgtgagagagactcacactggattataagggtgagttgaagtcgcaattccgacaaaagtggactagagtaatgatctgcttttgggtgatgaactggagtcatgtgttaacactagtattttgtgtttgagcgatctatagaactaggagaatgatttttgtactagcactttaattattttgtcaaacaataatcttaccagagtttacattttttattttctgtatgatgttcaacggtttgaggcaagcaacgaagactggttgcacttcgttttatttttgtttttcca

SEQ ID NO: 13026 - DNA, 1066 bp, Glycine max; identical to SEQ ID NO: 13025
  Gm_smallRNAprecursor_5859

SEQ ID NO: 13027 - DNA, 1064 bp, Glycine max
  Gm_smallRNAprecursor_5860
ctccctttctgaacgagatcttagatctctcgttgatgctttaaaagaaccctaatctcatctcatggctattgcttggtgcaccagcattattgcttccaaaataaataaatgaatgaatgaatgagcataccactccctctctctctctctttctcaccactcactcgctttgcctggctgcttgttttgatctgtttcattctttcttttctttttatgtgacctttggaacttcactctctctctctctctctctctctctctcaaccctaagaggctgtgaagatggtttcggagtgtggacccgatggatctgccgccgtcaaacctcctcgccggtggcgcggcaactttatcgcttttgattttgttgcagccatccctggcggtgttgtttttcgatgaccgataccatcgctgtgccagatctgagcctcaccaattccctaatctaagaactctccctcattggcgttgtcttaacgcagtgtttggcagaggtgtatggagtgagagaagggaaagggtattttccgattctgtcgttactctcttccctctctcattccatacatcgtctgacgaacgtatcgttgattggttctgcatggttgcattttctgtttgtttttagccttactttttttcccgttaaagtaacttatgagtatctgtggttacttcatttctaatttcttatgtttatgagtatctgtggtttcttcatttctaatttccccaggttagacgagggagggaagactatcatgtgagagagactcacactggattataagggtgagttgaagtcgcaattccgacaaaagtggactagagtaatgatctgcttttgggtgatgaactggagtcatgtgttaacactagtattttgtgtttgagcgatctatagaactaggagaatgatttttgtactagcactttaattattttgtcaaacaataatcttaccagagtttacattttttattttctgtatgatgttcaacggtttgaggcaagcaacgaagactggttgcacttcgttttatttttgtttttcc

SEQ ID NO: 13028 - DNA, 1064 bp, Glycine max; identical to SEQ ID NO: 13027
  Gm_smallRNAprecursor_5861

SEQ ID NO: 13029 - DNA, 1065 bp, Glycine max
  Gm_smallRNAprecursor_5862
ctccctttctgaacgagatcttagatctctcgttgatgctttaaaagaaccctaatctcatctcatggctattgcttggtgcaccagcattattgcttccaaaataaataaatgaatgaatgaatgagcataccactccctctctctctctctttctcaccactcactcgctttgcctggctgcttgttttgatctgtttcattctttcttttctttttatgtgacctttggaacttcactctctctctctctctctctctctctctcaaccctaagaggctgtgaagatggtttcggagtgtggacccgatggatctgccgccgtcaaacctcctcgccggtggcgcggcaactttatcgcttttgattttgttgcagccatccctggcggtgttgtttttcgatgaccgataccatcgctgtgccagatctgagcctcaccaattccctaatctaagaactctccctcattggcgttgtcttaacgcagtgtttggcagaggtgtatggagtgagagaagggaaagggtattttccgattctgtcgttactctcttccctctctcattccatacatcgtctgacgaacgtatcgttgattggttctgcatggttgcattttctgtttgtttttagccttactttttttcccgttaaagtaacttatgagtatctgtggttacttcatttctaatttcttatgtttatgagtatctgtggtttcttcatttctaatttccccaggttagacgagggagggaagactatcatgtgagagagactcacactggattataagggtgagttgaagtcgcaattccgacaaaagtggactagagtaatgatctgcttttgggtgatgaactggagtcatgtgttaacactagtattttgtgtttgagcgatctatagaactaggagaatgatttttgtactagcactttaattattttgtcaaacaataatcttaccagagtttacattttttattttctgtatgatgttcaacggtttgaggcaagcaacgaagactggttgcacttcgttttatttttgtttttcca

SEQ ID NO: 13030 - DNA, 1068 bp, Glycine max
  Gm_smallRNAprecursor_5863
atatatatattcattttttttctttttctttggtttctttttgttgcttaaaatctcatttacctgtcaattacatttcttttcttgatttgtcttttttggaaagattattgttctttacccatctggcgtgtttgtatgtgacccactgcgcactcaccgggaaagtaagccattttgtgggtaaattgcacctttgtaagtgaagtgaaccctactctcacccttccccccctctctctctctttcatacccctcctctctataaagctggtagattgatattataaatggtagagtggtccacgagaaactttgtatgggcatggttatttctcacttctcaccctcctttactttcttatgctaaatcctccttcccctatatctccaccctcaacccctttttctcattataacttttggtgcctagatggtgtgtgtgtgtgcgcgcgagagatctgagctcaattttcctctctcaagtcctggtcatgcttttccacagctttcttgaacttcttatgcatcttatatctctccacctccaggattttaagccctagaagctcaagaaagctgtgggagaatatggcaattcaggcttttaattgctttcatttggtaccatcacttgcaagatttcagagtacaaggtgaacacacacatcttcctcttcatcaattctctagtttcatccttatcttttcattcacggtaactctcactaccctctttcatcttataagttataccgggggtgtgatgttgatgagtgtaaattaaatatatgtgatctctttctctggaaaaattttcagtgtgatatacataataatctcttaatctagagattttatggctttgttatatataagattcactttacctgatgaatttatagccttgttgatgcataattctttaatttgatccggtcaaattgttttctttctgtttaatttcatttaagggaagaattggaaaatacccactttaattaattattatccgaatttaccagttctgttttctgtgagaaaatgggtaggttcttttctcttgag

SEQ ID NO: 13031 - DNA, 1068 bp, Glycine max; identical to SEQ ID NO: 13030
  Gm_smallRNAprecursor_5864

SEQ ID NO: 13032 - DNA, 1068 bp, Glycine max; identical to SEQ ID NO: 13030
  Gm_smallRNAprecursor_5865

SEQ ID NO: 13033 - DNA, 1069 bp, Glycine max
  Gm_smallRNAprecursor_5866
atatatatattcattttttttctttttctttggtttctttttgttgcttaaaatctcatttacctgtcaattacatttcttttcttgatttgtcttttttggaaagattattgttctttacccatctggcgtgtttgtatgtgacccactgcgcactcaccgggaaagtaagccattttgtgggtaaattgcacctttgtaagtgaagtgaaccctactctcacccttccccccctctctctctctttcatacccctcctctctataaagctggtagattgatattataaatggtagagtggtccacgagaaactttgtatgggcatggttatttctcacttctcaccctcctttactttcttatgctaaatcctccttcccctatatctccaccctcaacccctttttctcattataacttttggtgcctagatggtgtgtgtgtgtgcgcgcgagagatctgagctcaattttcctctctcaagtcctggtcatgcttttccacagctttcttgaacttcttatgcatcttatatctctccacctccaggattttaagccctagaagctcaagaaagctgtgggagaatatggcaattcaggcttttaattgctttcatttggtaccatcacttgcaagatttcagagtacaaggtgaacacacacatcttcctcttcatcaattctctagtttcatccttatcttttcattcacggtaactctcactaccctctttcatcttataagttataccgggggtgtgatgttgatgagtgtaaattaaatatatgtgatctctttctctggaaaaattttcagtgtgatatacataataatctcttaatctagagattttatggctttgttatatataagattcactttacctgatgaatttatagccttgttgatgcataattctttaatttgatccggtcaaattgttttctttctgtttaatttcatttaagggaagaattggaaaatacccactttaattaattattatccgaatttaccagttctgttttctgtgagaaaatgggtaggttcttttctcttgagt

SEQ ID NO: 13034 - DNA, 1069 bp, Glycine max; identical to SEQ ID NO: 13033
  Gm_smallRNAprecursor_5867

SEQ ID NO: 13035 - DNA, 1069 bp, Glycine max; identical to SEQ ID NO: 13033
  Gm_smallRNAprecursor_5868

SEQ ID NO: 13036 - DNA, 1074 bp, Glycine max
  Gm_smallRNAprecursor_5869
gactttatctcacacttgtacttcatcaatacttctgatctctctttgctttttttgaatttttgtctcaaacaattacatgaagtgaaacctctctcctctacatatctacctcatagaataacacttatgttaatatatacaaaacaaatacaatcatacaagagataacaccctgacaacacctctatcatatgttagttaagcctacatatctttttttttaaaaaaattacctgaaccattggatttgttgatgcaatgtcttttattggtatccttttgatccactattgacaagttacccttctcaaatgcttgtggattctgattactatcaaaggtaagacaatcagtagtgtgactagatttttgtgtagaggaaaaccatgtttaaggtaacattggtcttcaatatgataaagtttatgataataagtgcattgtttgacattctgtgattcttatccttcattaaaatttcccgttccgttatcattacgcacacatctgatacgtccaaatatgtatctaagaagtatttgattttaaaaaaaaatattgtaagacacaacgactcaagatggatgaatagggatcagatatgactcaattgtttcacataccaatatgatacggcttgagtcattttttgaattttttagtattttataattttattgtttttagtttaggattcttaaaataaaagaaatgtctaaacctaaacaaaatgcaacttctctccttttctcaacataaataaagcacaacacaccatttccatcttctccgagcatgaaaactcctatcttgtagttcttccaacgaggggatttattttgttggcaattgggtctctctccgtacaatgctcaaaccataattttattgaataaatttgttttgccactcaacaattgtatttgcaatgtttgataaaacaaaatttgcatatgtgcattgttttaatagcactcaagatcttctacgtaattgcattttaacaccaacattattacactttattttgcatttacatataaattttttataactttttattaacatatc

SEQ ID NO: 13037 - DNA, 1082 bp, Glycine max
  Gm_smallRNAprecursor_5870
aaaaaatgaagacaaagagcacaacaaatttgataaaaattagcagaatttgtattgggaaatctaaatgaagtcaaaaactgaaagatggtcacgtatatcatggtagcactactatagtatgagaaaagccgctatgatcccaattgaaaaccgctctgctgtttgaattctgtagctgcctaggaccacttcactcccctactctgctatattgccactatatagtgctatttataactcactacaatgctcatacggatacccaacatcttctctaatacaagaagatcctcaaaaccatgaaggaatacaagtgcagcacacattagagaaagataacacatgctcaaacactcattttgtatttaacaactcagttacaatgcccgcaaatgacttacggatcaagttgatccgtaagtcttaaaaatcaacttgtggattaatttgatccgtaagaaacttgcggatcaagttgaagtaaaagatttacggaccaacttgatccgtaaaagacttatggatcaacttaatccgtaagtcttaaaaatcaacttgcggattagcttgatccgtaaaagacttacggatcaacttgatccgtaagttttaaaagtctacttgcggatcatgttgattcgcaagcttcttacggatcaagttgatctgtaagtcacttgtggatcaacttgatccgtaagaagcttgcagatcatctatatcaattgtggatcaactcattacatatgcggaccaacctgaatgtgctggatgcacaaaaatattttaaaaaatatacaggaatatttttgtcttttcatgttaagtgttgagtgcaccagcaataatgctgggtgcacctagcaacacccttaaattttacaaaacacacctcccatatttacttattatacacctcctttcaatttagatcccgtgaaaagagagaaaaaccttcctttatcatcacattgattgggagtaatattctgattgataattttttatacgttaccttcctttattggaggtattggctggagtagctggagaggtttccagcggtgtggtgttcgatg

SEQ ID NO: 13038 - DNA, 1133 bp, Glycine max
  Gm_smallRNAprecursor_5871
cccttatccatagattaacaagagagtgtggcagtacaccttcctcaggaagacactcaacatccactcctccaatagataatctttctagagagtgattgcctcccaatgcacttttcaataagtagataagtttgtaactaccaccaaagagacccattccttttaaatttgatggcaaacctccttcgggaaacatttcaacttttggacaatcctctatgtgcagccgatcaagagatggaaggaggacatgcattccttcaggcaatgattctaattgggggcactctctcataccaagactctggagatgattatgagcctgcccctgtgaaatcctctttagattaggacacttcctgataaaaatcttcctgagtattgggaagatatctagcggaaaggtcgttagagagtcgcagccaccattgatgtccaagcttagaaggaaatcatagcaactgtgcatgggaatattgttatttgaacaagagtaattgcgcccaatctgttcgagtaaggctgcctccacgttgtgaccttcaatggtaagctctttcaaagttgttggatgatcaatttgcagctcttcacagtctgctaggtataattgatgaatatcaggggcactgagagcagaaggtacaagttgttggcacccagaaatctttagataatttaaatgacatagttgctctggcaagtgccctttcagcttgggacaacactccatagaaagacgttgaagacgtggaaaagcacctgtcacacctttacattcccattcttcccattccttcatatcggagaacttcaaagattccaaggatgtaaatgaacaagagctactcccgaaaaaatcagcattaatactcacaatcccatcaagccctttaattgaaagctccttcagaaatggcaaaagtccaagggcaggcaaacctttcagcttgggacaacgcactataaaaagacgttgaagacgtggaaaagcacctgtcacacctttacattcccattcttcccattccttcatctggcagaactccagtgtttccaaggatgcaaatgaagaagagcgactcccgaaaaaatcagcattaatactcacaatcccatcaaacccttca

SEQ ID NO: 13039 - DNA, 1238 bp, Glycine max
  Gm_smallRNAprecursor_5872
tacttgaagatactccagttttcccaaatgtgctggtacctttctcactccagtatacattaattcaaggcgatgcaaatcagtgagtttatgcaaatttgagggcagctccttcaaatgttcacaaccatttagcttcagtatttgcaagttgtagagtgaacatattgattcaggtagtttttctattccagtattggataagtctaaggaacggagatatttgagattacccacagagtcaggcacctctcttaggtcatgacaaacagacagagataagacacgtaagtaattaaacttggagaacaattcatgtattgacatctcgcaatcccaatatttgtcacttgttggcatataagtacgtaacttttttgtgtcacatagagttccaaacccatcaaaacatttaacgtcaattaaaaaatgacgggttgcttttggtgtaccttttgtttgattcccatccaatctgaaacaaatgtccccacaaataaatcttgccaaatcgttgagaaggtcatgcatgacaaaatctgttctctctgtgttgcttgattgttgaaagaagcaccttgataatagatcattgaagtattgttcaccaacttcttctggactcttaccctgttgagaacattgtagaaatttttcagccatccacaattgtattaagcactccttatcaaactcataatctttggggaataaggcacaataagcaaaacatctcttgagatgagaaggaagatggtgatagcttagtgctaaagcaggtacaatatcactacgctctattgaaaattcccatatctcgctctgcaatatgcttttccattccgtaacagatgacttgttgtgtaatagacttcccattgttttcaaggccagaggaagtcctttacatttttcaactatcttcataccaatctccttgcaatctggatttggttgaatattatcatcttggaatgcatgtttagcaaacaacttccagcaatgatcttcttgtaattgctccaggaggtgttcttctgacctcatggtagaagcaacttccttactacgtgtggtggcaataattctactcccctgagccccaaaaacaagatgttttagcacagcttcccatttaagtcggttttcgttccaaacgtcatccaaaacaagaagaaatctcttccccgtcaatttttctttcaatcttccgtgaaccatctctaggtctctactat

SEQ ID NO: 13040 - DNA, 1113 bp, Glycine max
  Gm_smallRNAprecursor_5873
tgcaaatttgagggcagctccttcaaatgttcacaaccatttagcttcagtatttgcaagttgtagagtgaacatattgattcaggtagtttttctattccagtattggataagtctaaggaacggagatatttgagattacccacagagtcaggcacctctcttaggtcatgacaaacagacagagataagacacgtaagtaattaaacttggagaacaattcatgtattgacatctcgcaatcccaatatttgtcacttgttggcatataagtacgtaacttttttgtgtcacatagagttccaaacccatcaaaacatttaacgtcaattaaaaaatgacgggttgcttttggtgtaccttttgtttgattcccatccaatctgaaacaaatgtccccacaaataaatcttgccaaatcgttgagaaggtcatgcatgacaaaatctgttctctctgtgttgcttgattgttgaaagaagcaccttgataatagatcattgaagtattgttcaccaacttcttctggactcttaccctgttgagaacattgtagaaatttttcagccatccacaattgtattaagcactccttatcaaactcataatctttggggaataaggcacaataagcaaaacatctcttgagatgagaaggaagatggtgatagcttagtgctaaagcaggtacaatatcactacgctctattgaaaattcccatatctcgctctgcaatatgcttttccattccgtaacagatgacttgttgtgtaatagacttcccattgttttcaaggccagaggaagtcctttacatttttcaactatcttcataccaatctccttgcaatctggatttggttgaatattatcatcttggaatgcatgtttagcaaacaacttccagcaatgatcttcttgtaattgctccaggaggtgttcttctgacctcatggtagaagcaacttccttactacgtgtggtggcaataattctactcccctgagccccaaaaacaagatgttttagcacagcttcccatttaagtcggttttcgttccaaacgtcatccaaaacaagaagaaatctcttccccgtcaatttttctttc

SEQ ID NO: 13041 - DNA, 1102 bp, Glycine max
  Gm_smallRNAprecursor_5874
gattgttcaccatttccctttctcgattttccgctgacacacccaatgtctttcccatcttcgggatattcgtagcctcatcctccacatttttcatccaaaagactttattgcagttcaaaatgttaccatcatatattgtgttgctgaaagagcctctactacacttgactggaatttccccttttgcttcttgattttcctccattccttaagaaagggatgcatttgatctcaccggttgaacaggtcctctaacaacaactccatgatattgcttttctctattgagttcctccctttagcctttagaatctattccaaaaattgatcatttttacgatctacctccccagatttattggcgcttggcccaactttagttgagataacactaatagacagagttggaccctttataagtagaatgctgctaggtgcacccagcactaaccacgaaaagacataaataccccctacagatcaagttgatccgtaagttaatttttaagacttacggatcaacttaatccgtaagtattttacggatcaagttgatccataagttgatttttaagacttacggatcaagttgatccgtaagtcttttacggatcaagttgacctgtaagttgatttttaagacttacgaattaagttgatccataagttttttacggatcaagttgatccgtaagtcttaaaaatcaacttatggatcaacttgatccgtaagcgaagaaattaacaggggtaattttgtcattttcaaagaatgttgggtgcaccaacaataatgttgggtgcacctagcaacactcgtataagtaacaacacctcgtgtttattggaaatagtaaaaaatggctcattattggacttggtgccctcatgttgttcacgacctaaacccaatttgccctaggccttcatttctttttaacatcttgatcctccttatcctttgttaattgggttttttatccatcctcccttttgtctgctacttcaacaccaacagacaaaggctcgtgggccctctctactttttcaaatttgaaatgtctcccttatcttttccactttcactactaggtactac

SEQ ID NO: 13042 - DNA, 1089 bp, Glycine max
  Gm_smallRNAprecursor_5875
acccttagaatttaacttttaacttttaaaaacaaaaatctcatttgcctagttgttgaatttacaggaataacctagcataaacaaattcctatgaaaatgactatactcttttatggaaaaaatactacactactcgatatgcttgccaatgatataacactagcataagatcttgagtccctagctaatgtatgggcaacatgattttttgcctcctaatataactcaccacaaagtttgaaaaattaagaagataagctctacattttgtgaaaagaaagaaaatatgagggaaaaaaaacaatagagcatgttgacaaatcatctatcatggtcttgtaatctaacttaatgacggcattttcatgctgacaaaccatctatcattgtcttgtaaactaactcaatgacaatattttgtacacccacttctaatctccattttaaagcttgtaatctatgaagcaccgataccgacacggacaccggacacgacacggatacggacacgtggacacctgtaatgtccaaaatatagaacgtaatacgggtgtcgtttcggtgtcggacactggcacggacacgtgtcggacaccggacacgacaaagggctgaagtgtccgtgcttcatagcttgtaatagaccctggattcaacttcttaaggatcgaggattccaggttgccatagtgattttgctttaatgaaatgggcatgttcatcatggagatagataccaactccaagacagtgatactccttgaaaatagcaacatcattgttgcattttatttgttcagaacatggattttccaaaaccgagaccaaaatgttttgctgctagatggacttgtcaagtgaaagttttcgagcatgagatcactcatgcaaatattgtatggcaagtgaaactaatacttacagttggagttcaatttcccccaaaattttgtcctttcgttgatgccaaatacaataaagtgtgattgcaaaattacaattttgttccgttagagagttataaagaatataaaagataaattgatttaccttcaacttgttgcaccttgtgaataatctaattct

SEQ ID NO: 13043 - DNA, 1054 bp, Glycine max
  Gm_smallRNAprecursor_5876
gaaagtgatatttatggcagagataaagacaaaaaaatgatttttgattggctgacatctgacaatggcaatcctaaccagccatcgatactttctattgtgggcatgggtgggatgggtaagaccacacttgctcaacatgtattcaatgaccctaggatcgaggaggctagatttgatgtcaaagcttgggtctgtgtttcagatgattttgatgctttcagggtaacaagaacaattcttgaggccatcactaaatcgactgatgatagtagagacctagagatggttcacggaagattgaaagaaaaattgacggggaagagatttcttcttgttttggatgacgtttggaacgaaaaccgacttaaatgggaagctgtgctaaaacatcttggttttggggctcaggggagtagaattattgccaccacacgtagtaaggaagttgcttctaccatgaggtcaaaagaacacctcctggagcaattacaagaagatcattgctggaagttgtttgctaaacatgcattccaagatgataatattcaaccaaatccagattgcaaggagattggtatgaagatagttgaaaaatgtaaaggacttcctctggccttgaaaacaatgggaagtctattacacaacaagtcatctgttacggaatggaaaagcatattgcagagcgagatatgggaattttcaacagagcgtagtgatattgtacctgctttagcactaagctatcaccatcttccttctcatctcaagagatgtttgcttatgtgccttattccccaaagattatgagttgataggagtgctttatacaattgtggatggctgaaaaatttctacaatgttctcaacagggtaagagtccaggagaagttggtgaacaatacttcaatgatctattatcaaggtgcttctttcaacaatcaagcaacacagagagaacagattttgtcatgcatgaccttctcaacgatttggcaagatttatttgtggggacatttgtttcagattggatgggaatcaaacaaaaggtac

SEQ ID NO: 13044 - DNA, 1126 bp, Glycine max
  Gm_smallRNAprecursor_5877
gaaaaatttctacaatgttctcaacagggtaagagtccaggagaagttggtgaacaatacttcaatgatctattatcaaggtgcttctttcaacaatcaagcaacacagagagaacagattttgtcatgcatgaccttctcaacgatttggcaagatttatttgtggggacatttgtttcagattggatgggaatcaaacaaaaggtacaccaaaagcaacccgtcattttttaattgacgttaaatgttttgatgggtttggaactctatgtgacacaaaaaagttacgtacttatatgccaacaagttacaaatattgggattgcgagatgtcaatacacgaattgttctccaagtttaattacttacgtgtcttatctctgtttgattgtcatgacctaagagaggtgcctgactctgtgggtaatctcaaatatctccgttcgttagacttatccaatactaaaatagaaaaactacctgaatcaatatgttcactctacaacttgcaaatactgaagctaaatggttgtagacatttgaaggagctgccctcaaatttgcataaactcactgatttgcatcggcttgaattaatagaaactggagtgagaaaggtaccagcacatttgggaaaactggagtatcttcaagtattaatgagttcgtttaatgttggcaaaagtagggagttcagtatccagcagttaggagaactcaatcttcatggaagtctatcaataaggcaactgcagaatgttgagaatccatcagatgcattagcggtggatttaaaaaataaaacacaccttgtcgaggtagagttagaatgggattcagactggaaccctgatgattcaacaaaagaaagggatgtaatcgagaatctacagccttccaaacacttggagaagttgaggatgaggaactatgggggtactcaatttccaaggtggttattcaacaattcatcatgtagtgtggtgtccttaaccttgaagaactgtaaatattgcctatgtttgcctccccttggacttttgccatctctgaaggaactttcaattaaagggcttgatgggatcgtgagtatcaatgctgattttttcgggagtagctcttgtt

SEQ ID NO: 13045 - DNA, 1126 bp, Glycine max
  Gm_smallRNAprecursor_5878
aggagtccagaagaagtcggtgaacaatacttcaacgatcttttgtcaaggtccttctttcaacaatcaagcaacatagagggaaaaccttttgtcatgcatgaccttctcaatgatttggcaaaatatgtttgtggggacttctgcttcaggttggaagatgatcaaccaaaacatataccaaagacaacccgtcatttttcagttgcaagcaatcacgttaaatgctttgatgggtttggaactttatacaatgctgaaaggttacgcacatttatgtcattaagtgaggaaacgagttttcataactacagtcgttggtattgcaagatgtcaacacgtgaattattctccaagtttaagttcttacgtgtcttatctgtgtctgattattctaacctaacagagttgcctgactccgtaggtaatcttaaatatctccattccttagacctctcaaatactggcatagaaaaactacctgaatcaacatgttcactctacaacttgcaaatactgaagctaaatggttgtaaacatttgaaggagctgccctcaaatttgcataaactcactgatttgcatcgccttgaattaatgtatactggagtgagaaaggtaccagcacatttgggaaaactggagtatcttcaagtattaatgagttcgtttaatgttggcaaaagtagggagttcagtatccagcagctaggagaactcaatcttcatggaagtctatcaattgagaacctgcagaatgttgagaatccctctgatgcattggctgtggatttaaaaaataaaacacaccttgtcgagctagagttagaatgggattcagactggaaccccgatgattcaacaaaagaaagggatgaaattgtaatcgagaatctacagccttccaaacacttggagaagttgacgatgaggaactatgggggtaaacaatttcctagttggttatcggataattcatcattgaatgtggtgtccttaagcttgaggaactgtcaatcttgccaacgtttgcctccccttggacttttgccatttctgaaggagctttcaattgaagggcttgatgggattgtgagtattaatgctgattttttcgggagtagct

SEQ ID NO: 13046 - DNA, 1226 bp, Glycine max
  Gm_smallRNAprecursor_5879
tcagttttcccaaatgcattggcacctttctcactttagttcctataaattcaaggtgacgcaaattgatgagtttgtgcaaattatatggaagctcctccaaattgcgacaaaatcccaccttcagtatttgcaggttatagagagaacatattgaatcaggtagtttttttatgcgggtaccagagaggtctaatgaacgaagatgtttaagatcatctacagaatcaggcacatctgtaaggccagaacaataagacaaagataagacgtgtaagaacttaaacctagagaactcatgtatagacatgttgcaatgccaaccacaaagaaaattcattcccccacttgttggcataaatgtacgtaaccttttagtatcatatgaagccccaaatccatcaaaatattgaacatgattgattgcaactgaaaaatgacgggttgtttttggtgtactttttgctctatcaactcccaacctgaaacagatgtccccacaaacatattttgccaaatcattgagaaggtcatgcatgacaaaacatgttggaaatctgcttgattgttgaaagaaggaccttgacagcagatcatcaaagtactgttcaccaacttcttctggactctgactctggttaaggcagtgaagaaaattttcagccatccacaacagaattaaatgctccttgtcaaacttataatctttggggaataaggaacaataagcaaagcatctcttgagatgtgaaggaaggtggttatagctcaataacaaagcaggaataatttcactatcttcttttggtaagtcccatattttgctcgttaatacacttccccattccgaaacagacgactttgtgtgtaaaagacttccaattgttttcaaggctagaggcaatcctttacacttttcaactatctttataccaatctccttcaactcaggatttaacagactattatcatcttggaatgcatgtttaccaaaaacttgccaacagtgatcttcttgtaactggtttaggtgatgtactttatttgaccgcataatggaagcaactttcttactgcgtgtagtgacaagaattctacttccctgagctccatatttaagcggagtttgcacggcttcccagttctctcgattttcattccaaatgtcgtctaaaacaagaagaaatctctttcctgccaatttatctttcaaccttccctgaacc

SEQ ID NO: 13047 - DNA, 1079 bp, Glycine max
  Gm_smallRNAprecursor_5880
aacagcaatattaatactatagaggactctgattcatctacatgtctaccaaggaaactccatgatagaagccatatgctctgtgccaaataaagttacaaaagtactgctctcttagaaaattatatattggtccccaaagacgaaagagcagcataagtttcccactgctgcaaagctttaaacttgctatttgtttttgcatttttatcctccagccttacaaaagtactgctctcttagaaacttatatattggtccccaaagatgaaagagcagcataagtttcccactgctgcaaagctttaaacttgctgtttgtttttgcatttttatcctccagcctttcaagctttattttagacatgattctaaattctgtaatattaacatgttttccctttattcaacttgagtgtgtttgaatcaatgttgttaatggcggatggcggttcatggcggaaagtcaaaaatccgccataaaaatatggcggatggcgtagcggaaaatggcggatgtcatggcggacacaaaaaaaaaaaaaacatatatataaactcattgaaattgaaaaaaacaaaggattgcattcaaataaactaaaaaagtttcatgagttcatacaataatcaagtaccaacaccaaataaactcattaaagagttcaaaataagaaaatgataaaaacataatgcaaagtgcaaagtgaaggttgaggctctaatcatcttctccaatcccaacataatcatcttcgttgttatcatatggtaatggagcatctccctctccctcttccccatcagacgcctcaaaattgaccatgatttcttcttcttcagattcaacatcaatattctcctcaacatctagatcctcatcattttcttggactgctttttgcttccttgatgaagatccaacaaccattgcctgttttttagaagtttgggcagcagcaacacttgttttttgctttttccgcctagtatacatcctacactctccaacccccgaagcctgatacacagttgcccaatttagagcatcatcatcttcaaataccaaatcatttcca

SEQ ID NO: 13048 - DNA, 1131 bp, Glycine max
  Gm_smallRNAprecursor_5881
aaatggcggatgtcatggcggacacaaaaaaaaaaaaaacatatatataaactcattgaaattgaaaaaaacaaaggattgcattcaaataaactaaaaaagtttcatgagttcatacaataatcaagtaccaacaccaaataaactcattaaagagttcaaaataagaaaatgataaaaacataatgcaaagtgcaaagtgaaggttgaggctctaatcatcttctccaatcccaacataatcatcttcgttgttatcatatggtaatggagcatctccctctccctcttccccatcagacgcctcaaaattgaccatgatttcttcttcttcagattcaacatcaatattctcctcaacatctagatcctcatcattttcttggactgctttttgcttccttgatgaagatccaacaaccattgcctgttttttagaagtttgggcagcagcaacacttgttttttgctttttccgcctagtatacatcctacactctccaacccccgaagcctgatacacagttgcccaatttagagcatcatcatcttcaaataccaaatcatttccagcatcattatcatcatcttgatccatctctcccacgagccattcattgcatacatcaatatcattaagagaaattggatcaatttcatctcttgcattatatctttgcttcaattgttggttgtatttgacaaacaccaaatcatgcaacctcttgtgctcaagcctatttctttttttggaatgaatctacaacataacaaataaatgttgatttcaatctcaaatatactccaaatataacttgatcatcaaaattaaataaaattaaaaagtatagttagagttttgtcacaattacttgctcaaacacactccaatttctttcacatcctgaagcactgcaagtcaaactcaaaatcttaatagccagcttctgcaaatttggagtttgtgacccaaacattcgccaccaatatgctgcaataccaattaccaaccaagagcataacttagaattctgaattctaacactaatacataaaaaaaatagtatgataaaagtttcttactaggagaatgggttttcctttgagccattgcaaagtcggaaccaaagt

SEQ ID NO: 13049 - DNA, 1080 bp, Glycine max
  Gm_smallRNAprecursor_5882
ctgtatattaatgtttcttcttaggagattgtccttggtgggaagtctatttttaaggagtctccagcagaaaactgttgcccgagggggaattttcaacttccagatttgcttatatatcttcccatcagagtttgctgtactaggaatagtgcagagattgtaagctgatttagtagtgtactgaccatggggttcagctaaccacaccatagagtctttactatgcctctgaataggaatggagcttatttcctccataaactgcacaactatatcattttcatgatcaaaaagatttctcctccacctgaggtcccactcccagctatcattattgaagttgcccatgcttgagatgaaggagctttgctgtctactaatccgaaaaagttgattatacttctgctcaagagtgtaatctgcccaatgttgttaatgacggatggcggttcatggcggaaagtcaaaaatccgccataaaaatatggcggatggcgtagcggaaaatggcggatgtcatggcggacacaaaaaaaaaaaaaaacatatatataaactcattgaaattgaaaaaaacaaaggattgcattcaaataaactaaaaaagtttcatgagttcatacaataatcaagtaccaacaccaaataaactcattaaagagttcaaaataagaaaatgataaaaacataatgcaaagtgcaaagtgaaggttgaggctctaatcatcttctccaatcccaacataatcatcttcgttgttatcatatggtaatggagcatctccctctccctcttccccatcagacgcctcaaaattgaccatgatttcttcttcttcagattcaacatcaatattctcctcaacatctagatcctcatcattttcttggactgctttttgcttccttgatgaagatccaacaaccattgcctgttttttagaagtttgggcagcagcaacacttgttttttgctttttccgcctagtatacatcctacactctccaacccccgaagcctgatacacagttgcccaatttagagcatcatcatcttcaaataccaaatcatttcca

SEQ ID NO: 13050 - DNA, 1131 bp, Glycine max
  Gm_smallRNAprecursor_5883
aatggcggatgtcatggcggacacaaaaaaaaaaaaaaacatatatataaactcattgaaattgaaaaaaacaaaggattgcattcaaataaactaaaaaagtttcatgagttcatacaataatcaagtaccaacaccaaataaactcattaaagagttcaaaataagaaaatgataaaaacataatgcaaagtgcaaagtgaaggttgaggctctaatcatcttctccaatcccaacataatcatcttcgttgttatcatatggtaatggagcatctccctctccctcttccccatcagacgcctcaaaattgaccatgatttcttcttcttcagattcaacatcaatattctcctcaacatctagatcctcatcattttcttggactgctttttgcttccttgatgaagatccaacaaccattgcctgttttttagaagtttgggcagcagcaacacttgttttttgctttttccgcctagtatacatcctacactctccaacccccgaagcctgatacacagttgcccaatttagagcatcatcatcttcaaataccaaatcatttccagcatcattatcatcatcttgatccatctctcccacgagccattcattgcatacatcaatatcattaagagaaattggatcaatttcatctcttgcattatatctttgcttcaattgttggttgtatttgacaaacaccaaatcatgcaacctcttgtgctcaagcctatttctttttttggaatgaatctacaacataacaaataaatgttgatttcaatctcaaatatactccaaatataacttgatcatcaaaattaaataaaattaaaaagtatagttagagttttgtcacaattacttgctcaaacacactccaatttctttcacatcctgaagcactgcaagtcaaactcaaaatcttaatagccagcttctgcaaatttggagtttgtgacccaaacattcgccaccaatatgctgcaataccaattaccaaccaagagcataacttagaattctgaattctaacactaatacataaaaaaaatagtatgataaaagtttcttactaggagaatgggttttcctttgagccattgcaaagtcggaaccaaagt

SEQ ID NO: 13051 - DNA, 1178 bp, Glycine max
  Gm_smallRNAprecursor_5884
tttcaaatccactgctaatgcatccgagggactctcgacattctgcaggttctgaattgatagacttccatgaagattgagttctcctagctgctggatactgaactccctacttttgccaaccttaaacggactcattgatacctgaagatacttcagttttcccaaatgtgctggtacctttctcactccagtatctattaattcaaggcgatgcaaatcagtgagtttatgtaaatttgagggcagctccttcaatttattacaaccatttagcttcagtatttgcaagttgtagagtgaacatgttgattcaggtaatttttcaatgtcagtatttgaaaggtctaatgaatggagatatttaagattacccacagagtcaggcacctctcttaggctacaacaatgagataaagataagacacgtaagaacttaaacttggagaccagttcatgtatcgacatattgcaattccaaaaagtgaagtcaccaaaattcattttctcacttgttggcatatatgaacgtaacttttttgcatcacatagagttccaaacccatcaaagtatcgaacgtgtttgattgcaactgaaaaatgacgggttgcttttggtgtaccttttgtttgatcaccatccaatctgaaacaaatgtccccacaaataaatcttgccaaatcgttgagaaggtcatgcatgacaaaatgtgttctctttgtgttgcttgattgttgaaagaagcaccttgataatagatcattgaagtattgttcaccaacttcttctggtctcttaccctgttgagaacattgtagaaatttttcagccatccacaattgtattaagcactccttatcaaacacataatctttggggaataaggcacaataagcaaaacatctcttgagatgagaaggaagatggtgatagcttagtgctaaagcaggtacaatatcactacgctctgttgaaaattcccatatctcgctctgccatatgcttttccattccgtaacagatgacttgtcgtgtaatagacttcccattgttttcaaggccagaggaagtcctttacattttttaactatcttcgtaccaatctccttgcaatctggatttggttgaatattatcatcttggaatgcatgtttagcaaacaacttccagcaatgat

SEQ ID NO: 13052 - DNA, 1174 bp, Glycine max
  Gm_smallRNAprecursor_5885
tcaaatccactgctaatgcatccgagggactctcgacattctgcaggttctgaattgatagacttccatgaagattgagttctcctagctgctggatactgaactccctacttttgccaaccttaaacggactcattgatacctgaagatacttcagttttcccaaatgtgctggtacctttctcactccagtatctattaattcaaggcgatgcaaatcagtgagtttatgtaaatttgagggcagctccttcaatttattacaaccatttagcttcagtatttgcaagttgtagagtgaacatgttgattcaggtaatttttcaatgtcagtatttgaaaggtctaatgaatggagatatttaagattacccacagagtcaggcacctctcttaggctacaacaatgagataaagataagacacgtaagaacttaaacttggagaccagttcatgtatcgacatattgcaattccaaaaagtgaagtcaccaaaattcattttctcacttgttggcatatatgaacgtaacttttttgcatcacatagagttccaaacccatcaaagtatcgaacgtgtttgattgcaactgaaaaatgacgggttgcttttggtgtaccttttgtttgatcaccatccaatctgaaacaaatgtccccacaaataaatcttgccaaatcgttgagaaggtcatgcatgacaaaatgtgttctctttgtgttgcttgattgttgaaagaagcaccttgataatagatcattgaagtattgttcaccaacttcttctggtctcttaccctgttgagaacattgtagaaatttttcagccatccacaattgtattaagcactccttatcaaacacataatctttggggaataaggcacaataagcaaaacatctcttgagatgagaaggaagatggtgatagcttagtgctaaagcaggtacaatatcactacgctctgttgaaaattcccatatctcgctctgccatatgcttttccattccgtaacagatgacttgtcgtgtaatagacttcccattgttttcaaggccagaggaagtcctttacattttttaactatcttcgtaccaatctccttgcaatctggatttggttgaatattatcatcttggaatgcatgtttagcaaacaacttccagcaatg

SEQ ID NO: 13053 - DNA, 1165 bp, Glycine max
  Gm_smallRNAprecursor_5886
tccactgctaatgcatccgagggactctcgacattctgcaggttctgaattgatagacttccatgaagattgagttctcctagctgctggatactgaactccctacttttgccaaccttaaacggactcattgatacctgaagatacttcagttttcccaaatgtgctggtacctttctcactccagtatctattaattcaaggcgatgcaaatcagtgagtttatgtaaatttgagggcagctccttcaatttattacaaccatttagcttcagtatttgcaagttgtagagtgaacatgttgattcaggtaatttttcaatgtcagtatttgaaaggtctaatgaatggagatatttaagattacccacagagtcaggcacctctcttaggctacaacaatgagataaagataagacacgtaagaacttaaacttggagaccagttcatgtatcgacatattgcaattccaaaaagtgaagtcaccaaaattcattttctcacttgttggcatatatgaacgtaacttttttgcatcacatagagttccaaacccatcaaagtatcgaacgtgtttgattgcaactgaaaaatgacgggttgcttttggtgtaccttttgtttgatcaccatccaatctgaaacaaatgtccccacaaataaatcttgccaaatcgttgagaaggtcatgcatgacaaaatgtgttctctttgtgttgcttgattgttgaaagaagcaccttgataatagatcattgaagtattgttcaccaacttcttctggtctcttaccctgttgagaacattgtagaaatttttcagccatccacaattgtattaagcactccttatcaaacacataatctttggggaataaggcacaataagcaaaacatctcttgagatgagaaggaagatggtgatagcttagtgctaaagcaggtacaatatcactacgctctgttgaaaattcccatatctcgctctgccatatgcttttccattccgtaacagatgacttgtcgtgtaatagacttcccattgttttcaaggccagaggaagtcctttacattttttaactatcttcgtaccaatctccttgcaatctggatttggttgaatattatcatcttggaatgcatgtttagcaaacaacttccagc

SEQ ID NO: 13054 - DNA, 1113 bp, Glycine max
  Gm_smallRNAprecursor_5887
ttacaaccatttagcttcagtatttgcaagttgtagagtgaacatgttgattcaggtaatttttcaatgtcagtatttgaaaggtctaatgaatggagatatttaagattacccacagagtcaggcacctctcttaggctacaacaatgagataaagataagacacgtaagaacttaaacttggagaccagttcatgtatcgacatattgcaattccaaaaagtgaagtcaccaaaattcattttctcacttgttggcatatatgaacgtaacttttttgcatcacatagagttccaaacccatcaaagtatcgaacgtgtttgattgcaactgaaaaatgacgggttgcttttggtgtaccttttgtttgatcaccatccaatctgaaacaaatgtccccacaaataaatcttgccaaatcgttgagaaggtcatgcatgacaaaatgtgttctctttgtgttgcttgattgttgaaagaagcaccttgataatagatcattgaagtattgttcaccaacttcttctggtctcttaccctgttgagaacattgtagaaatttttcagccatccacaattgtattaagcactccttatcaaacacataatctttggggaataaggcacaataagcaaaacatctcttgagatgagaaggaagatggtgatagcttagtgctaaagcaggtacaatatcactacgctctgttgaaaattcccatatctcgctctgccatatgcttttccattccgtaacagatgacttgtcgtgtaatagacttcccattgttttcaaggccagaggaagtcctttacattttttaactatcttcgtaccaatctccttgcaatctggatttggttgaatattatcatcttggaatgcatgtttagcaaacaacttccagcaatgatcttcttgtaattgctccaggaggtgttcttttgacctcatggtagaagcaacttccttactacgtgtggtggcaataattctactcccctgagccccaaaaacaagatgtttcagcacagcttcccatttaagtcggtttttgttccaaacgttatccaaaacaagaagaaatctctcccgtcaatttcttttcaat

SEQ ID NO: 13055 - DNA, 1054 bp, Glycine max
  Gm_smallRNAprecursor_5888
gaaagtgatatttatggcagagatgaagacaaaaaaatgatttttgattggctgacatctgacaatggcaatcctaaccagccatggatactttctattgtgggcatgggtgggatgggtaagaccacacttgctcaacatgtattcaatgaccctaggatccaggaggctagatttgatgtcaaagcttgggtctgtgtttcagatgattttgatgctttcagggtaacaagaacaattcttgaggccatcactaaatcgactgatgatagtagagacctagagatggttcacggaagattgaaagaaaaattgacggggaagagatttcttcttgttttggatgacgtttggaacgaaaaccgacttaaatgggaagctgtgctaaaacatcttgtttttggggctcaggggagtagaattattgccaccacacgtagtaaggaagttgcttctaccatgaggtcaagagaacacctcctggagcaattacaagaagatcattgctggaagttgtttgctaaacatgcattccaagatgataatattcaaccaaatccagattgcaaggagattggtacgaagatagttgaaaaatgtaaaggacttcctctggccttgaaaacaatgggaagtctattacacgacaagtcatctgttacggaatggaaaagcatattgcagagcgagatatgggaattttcaacagagcgtagtgatattgtacctgctttagcactaagctatcaccatcttccttctcatctcaagagatgttttgcttattgtgccttattccccaaagattatttgtttgataaggagtgcttaatacaattgtggatggctgaaaaatttctacaatgttctcaacaggataagagtccagaagaagttggtgaacaatacttcaatgatctattatcaaggtgtttctttcaacaatcaagcaacacaaagagaacacaatttgtcatgcatgaccttctcaacgatttggcaagatttatttgtggggacatttgtttcagattggatggtgatcaaacaaaag

SEQ ID NO: 13056 - DNA, 1163 bp, Glycine max
  Gm_smallRNAprecursor_5889
gaggctagatttgatgtcaaagcttgggtctgtgtttcagatgattttgatgctttcagggtaacaagaacaattcttgaggccatcactaaatcgactgatgatagtagagacctagagatggttcacggaagattgaaagaaaaattgacggggaagagatttcttcttgttttggatgacgtttggaacgaaaaccgacttaaatgggaagctgtgctaaaacatcttgtttttggggctcaggggagtagaattattgccaccacacgtagtaaggaagttgcttctaccatgaggtcaagagaacacctcctggagcaattacaagaagatcattgctggaagttgtttgctaaacatgcattccaagatgataatattcaaccaaatccagattgcaaggagattggtacgaagatagttgaaaaatgtaaaggacttcctctggccttgaaaacaatgggaagtctattacacgacaagtcatctgttacggaatggaaaagcatattgcagagcgagatatgggaattttcaacagagcgtagtgatattgtacctgctttagcactaagctatcaccatcttccttctcatctcaagagatgttttgcttattgtgccttattccccaaagattatttgtttgataaggagtgcttaatacaattgtggatggctgaaaaatttctacaatgttctcaacaggataagagtccagaagaagttggtgaacaatacttcaatgatctattatcaaggtgtttctttcaacaatcaagcaacacaaagagaacacaatttgtcatgcatgaccttctcaacgatttggcaagatttatttgtggggacatttgtttcagattggatggtgatcaaacaaaaggtacaccaaaagcaacccgtcatttttcagttgcaatcgaacacgttcgatactttgatgggtttggaactccatgtgacgcaaaaaagttacgttcatatatgccaacaagtgagaaaatgaattttggttacttcccttattgggattgcaatatgtcgatacatgaattattctccaagtttaagttcttacgtgtcttatctttatctgattgttctaacctaagagaggtgcctgactctgtgggtaatcttaaatatctccattcctt

SEQ ID NO: 13057 - DNA, 1113 bp, Glycine max
  Gm_smallRNAprecursor_5890
gctgtgctaaaacatcttgtttttggggctcaggggagtagaattattgccaccacacgtagtaaggaagttgcttctaccatgaggtcaagagaacacctcctggagcaattacaagaagatcattgctggaagttgtttgctaaacatgcattccaagatgataatattcaaccaaatccagattgcaaggagattggtacgaagatagttgaaaaatgtaaaggacttcctctggccttgaaaacaatgggaagtctattacacgacaagtcatctgttacggaatggaaaagcatattgcagagcgagatatgggaattttcaacagagcgtagtgatattgtacctgctttagcactaagctatcaccatcttccttctcatctcaagagatgttttgcttattgtgccttattccccaaagattatttgtttgataaggagtgcttaatacaattgtggatggctgaaaaatttctacaatgttctcaacaggataagagtccagaagaagttggtgaacaatacttcaatgatctattatcaaggtgtttctttcaacaatcaagcaacacaaagagaacacaatttgtcatgcatgaccttctcaacgatttggcaagatttatttgtggggacatttgtttcagattggatggtgatcaaacaaaaggtacaccaaaagcaacccgtcatttttcagttgcaatcgaacacgttcgatactttgatgggtttggaactccatgtgacgcaaaaaagttacgttcatatatgccaacaagtgagaaaatgaattttggttacttcccttattgggattgcaatatgtcgatacatgaattattctccaagtttaagttcttacgtgtcttatctttatctgattgttctaacctaagagaggtgcctgactctgtgggtaatcttaaatatctccattccttagacctctcaaatactggcataaaaaaactacctgaatcaacatgttcactctacaacttgcaaatactgaagctaaatggttgtaataaattgaaggagctgccctcaaatttacataaactcactgatttgcatcgccttgaattaataaacactggagtg

SEQ ID NO: 13058 - DNA, 1137 bp, Glycine max
  Gm_smallRNAprecursor_5891
aaaacatcttgtttttggggctcaggggagtagaattattgccaccacacgtagtaaggaagttgcttctaccatgaggtcaagagaacacctcctggagcaattacaagaagatcattgctggaagttgtttgctaaacatgcattccaagatgataatattcaaccaaatccagattgcaaggagattggtacgaagatagttgaaaaatgtaaaggacttcctctggccttgaaaacaatgggaagtctattacacgacaagtcatctgttacggaatggaaaagcatattgcagagcgagatatgggaattttcaacagagcgtagtgatattgtacctgctttagcactaagctatcaccatcttccttctcatctcaagagatgttttgcttattgtgccttattccccaaagattatttgtttgataaggagtgcttaatacaattgtggatggctgaaaaatttctacaatgttctcaacaggataagagtccagaagaagttggtgaacaatacttcaatgatctattatcaaggtgtttctttcaacaatcaagcaacacaaagagaacacaatttgtcatgcatgaccttctcaacgatttggcaagatttatttgtggggacatttgtttcagattggatggtgatcaaacaaaaggtacaccaaaagcaacccgtcatttttcagttgcaatcgaacacgttcgatactttgatgggtttggaactccatgtgacgcaaaaaagttacgttcatatatgccaacaagtgagaaaatgaattttggttacttcccttattgggattgcaatatgtcgatacatgaattattctccaagtttaagttcttacgtgtcttatctttatctgattgttctaacctaagagaggtgcctgactctgtgggtaatcttaaatatctccattccttagacctctcaaatactggcataaaaaaactacctgaatcaacatgttcactctacaacttgcaaatactgaagctaaatggttgtaataaattgaaggagctgccctcaaatttacataaactcactgatttgcatcgccttgaattaataaacactggagtgagaaaggtaccagcacatttgggaaaactgaa

SEQ ID NO: 13059 - DNA, 1137 bp, Glycine max; identical to SEQ ID NO: 13058
  Gm_smallRNAprecursor_5892

SEQ ID NO: 13060 - DNA, 1138 bp, Glycine max
  Gm_smallRNAprecursor_5893
aaaacatcttgtttttggggctcaggggagtagaattattgccaccacacgtagtaaggaagttgcttctaccatgaggtcaagagaacacctcctggagcaattacaagaagatcattgctggaagttgtttgctaaacatgcattccaagatgataatattcaaccaaatccagattgcaaggagattggtacgaagatagttgaaaaatgtaaaggacttcctctggccttgaaaacaatgggaagtctattacacgacaagtcatctgttacggaatggaaaagcatattgcagagcgagatatgggaattttcaacagagcgtagtgatattgtacctgctttagcactaagctatcaccatcttccttctcatctcaagagatgttttgcttattgtgccttattccccaaagattatttgtttgataaggagtgcttaatacaattgtggatggctgaaaaatttctacaatgttctcaacaggataagagtccagaagaagttggtgaacaatacttcaatgatctattatcaaggtgtttctttcaacaatcaagcaacacaaagagaacacaatttgtcatgcatgaccttctcaacgatttggcaagatttatttgtggggacatttgtttcagattggatggtgatcaaacaaaaggtacaccaaaagcaacccgtcatttttcagttgcaatcgaacacgttcgatactttgatgggtttggaactccatgtgacgcaaaaaagttacgttcatatatgccaacaagtgagaaaatgaattttggttacttcccttattgggattgcaatatgtcgatacatgaattattctccaagtttaagttcttacgtgtcttatctttatctgattgttctaacctaagagaggtgcctgactctgtgggtaatcttaaatatctccattccttagacctctcaaatactggcataaaaaaactacctgaatcaacatgttcactctacaacttgcaaatactgaagctaaatggttgtaataaattgaaggagctgccctcaaatttacataaactcactgatttgcatcgccttgaattaataaacactggagtgagaaaggtaccagcacatttgggaaaactgaag

SEQ ID NO: 13061 - DNA, 1138 bp, Glycine max; identical to SEQ ID NO: 13060
  Gm_smallRNAprecursor_5894

SEQ ID NO: 13062 - DNA, 1179 bp, Glycine max
  Gm_smallRNAprecursor_5895
ctggagcaattacaagaagatcattgctggaagttgtttgctaaacatgcattccaagatgataatattcaaccaaatccagattgcaaggagattggtacgaagatagttgaaaaatgtaaaggacttcctctggccttgaaaacaatgggaagtctattacacgacaagtcatctgttacggaatggaaaagcatattgcagagcgagatatgggaattttcaacagagcgtagtgatattgtacctgctttagcactaagctatcaccatcttccttctcatctcaagagatgttttgcttattgtgccttattccccaaagattatttgtttgataaggagtgcttaatacaattgtggatggctgaaaaatttctacaatgttctcaacaggataagagtccagaagaagttggtgaacaatacttcaatgatctattatcaaggtgtttctttcaacaatcaagcaacacaaagagaacacaatttgtcatgcatgaccttctcaacgatttggcaagatttatttgtggggacatttgtttcagattggatggtgatcaaacaaaaggtacaccaaaagcaacccgtcatttttcagttgcaatcgaacacgttcgatactttgatgggtttggaactccatgtgacgcaaaaaagttacgttcatatatgccaacaagtgagaaaatgaattttggttacttcccttattgggattgcaatatgtcgatacatgaattattctccaagtttaagttcttacgtgtcttatctttatctgattgttctaacctaagagaggtgcctgactctgtgggtaatcttaaatatctccattccttagacctctcaaatactggcataaaaaaactacctgaatcaacatgttcactctacaacttgcaaatactgaagctaaatggttgtaataaattgaaggagctgccctcaaatttacataaactcactgatttgcatcgccttgaattaataaacactggagtgagaaaggtaccagcacatttgggaaaactgaagtatcttcaggtatcaatgagtccgtttaaggttggcaaaagtagggagttcagtatccagcagctaggagaactcaatcttcatggaagtctatcaattcagaacctgcagaatgtcgagagtccctcggatgca

SEQ ID NO: 13063 - DNA, 1054 bp, Glycine max
  Gm_smallRNAprecursor_5896
gaaagtgatatttatggcagagacgaagacaaaaaaatgatttttgattggctgacatctgacaacggcaatcctaaccagccatcgatactttctattgtgggcatgggtgggatgggtaagaccacacttgctcaacatgtattcaatgaccctaggatccaggagactaaatttgctgtcaaagcttgggtctgtgtttcagatgattttgatgttttcagggtaacaagaacaattcttgaggccatcactaaatcgactgatgatagtagagacctagagatggttcacggaagattgaaagaaaaattgacggggaagaaatttcttcttgttttggatgacgtttggaacgaaaaccgacttaaatgggaagctgtgctaaaacctcttgtttttggagctcaggggagtagaattattgccaccacacgtagtaaggaagttgcttctaccatgaggtcaaaagaacacctcctggagcaattacaagaagatcattgctggaagttgtttgctaaacatgcattccaagatgataatattcaaccaaatccagattgcaaggagattggcacgaagatagttgaaaaatgtaaaggacttcctctggccttgaaaacaatgggaagtctattacacaacaagtcatctgttagggaatgggaaagcatattgcagagcgagatatgggaattttcaacagagtgtagtggtattgtaccggctttagcactaagctatcaccatcttccttctcatctaaagagatgttttgcttattgtgccttattccccaaagattatgagtttgataaggagtgcttaatacaattgtggatggctgaaaattttctacaatgtcctcaacagggtaagagtccagaagaagttgctgaacagtacttcaatgatctattatcaaggtgcttctttcaacaatcaagtaacatagagggaacacattttgtcatgcatgaccttctcaacgatttggcaaaatatatttgtggggacatttgtttcagatcagacgatgaccaagcaaaag

SEQ ID NO: 13064 - DNA, 1128 bp, Glycine max
  Gm_smallRNAprecursor_5897
gtataaggattttctttcctttttaaattcttttttattacaaaatcacatgactgtttgtgtattttttttttaatagtttagttttgttaaatgtttcatttcaaaatttaattttcaagcaattttagtgttggtaactgaatcatgtattgccacgttgaaatttattttttatttaaaatttgatgttttataacaaaataaacatgtaggcaataagaagacataacaagcaaagcatcccaatccccaatcccaaaagaaaatctccactgagttttttcttctttaaagtaataatttcgtaacattaaaataacatattgccaactctttaaatatatgcatgaggatatgtttaatattagtatatttaggcaaaattacatttttagtcctccagtttatttcaaattttggattttagtttttcattaatttaattcacgaattgagtcttcttattttgtaaaatcgtgtaatattggtccttcaggtcacaattggacgttgactgttgattgtcacgtgtcacgttcttattggatgatgacggtcacatgttatgttttgcttggatatcaactccatgaaagatgaaatacattgttgttttcattgaccaatcagaacatgacacgtgacagtcaacctcacttgctaacggtcaacgtccaattgtgacatgagagaccaacattacacgattttataaaataggaggacccaattcgtgaattaagttaccggaagatcaattctaaaactaaaaataaactgaaggaccaaaaatgtaactttacctaaatttattgcgaacaaattgaatagacaaaattatggggtaaaatggttgaaaactgcaatgcttataactttcgtgactcttctaatgggtacactcgatatcaaaattcaaaatgaagcccattaagtactcgcaagatgaccacacactactctctggatatcttaaacgcaaatttccaacacaatgcctcaaatgcaccaacctttttacttctttaagatgcatatcaaactaaacatcatagatcatcaatctaaaataatgaccatatgacagatcccatagttaacagcttcaaagatcagcatgaaaac

SEQ ID NO: 13065 - DNA, 1038 bp, Glycine max
  Gm_smallRNAprecursor_5898
ttagtgttggtaactgaatcatgtattgccacgttgaaatttattttttatttaaaatttgatgttttataacaaaataaacatgtaggcaataagaagacataacaagcaaagcatcccaatccccaatcccaaaagaaaatctccactgagttttttcttctttaaagtaataatttcgtaacattaaaataacatattgccaactctttaaatatatgcatgaggatatgtttaatattagtatatttaggcaaaattacatttttagtcctccagtttatttcaaattttggattttagtttttcattaatttaattcacgaattgagtcttcttattttgtaaaatcgtgtaatattggtccttcaggtcacaattggacgttgactgttgattgtcacgtgtcacgttcttattggatgatgacggtcacatgttatgttttgcttggatatcaactccatgaaagatgaaatacattgttgttttcattgaccaatcagaacatgacacgtgacagtcaacctcacttgctaacggtcaacgtccaattgtgacatgagagaccaacattacacgattttataaaataggaggacccaattcgtgaattaagttaccggaagatcaattctaaaactaaaaataaactgaaggaccaaaaatgtaactttacctaaatttattgcgaacaaattgaatagacaaaattatggggtaaaatggttgaaaactgcaatgcttataactttcgtgactcttctaatgggtacactcgatatcaaaattcaaaatgaagcccattaagtactcgcaagatgaccacacactactctctggatatcttaaacgcaaatttccaacacaatgcctcaaatgcaccaacctttttacttctttaagatgcatatcaaactaaacatcatagatcatcaatctaaaataatgaccatatgacagatcccatagttaacagcttcaaagatcagcatgaaaactactgcttaagaattatataatatgaagtttaacaaa

SEQ ID NO: 13066 - DNA, 1081 bp, Glycine max
  Gm_smallRNAprecursor_5899
agggagtgtttatcttgaagaaaaacaggaaaaggttatgttagagcaagaaaaagacaagggcaatttagggaaaataattaaagaagaaaagtgaactatactagtaaataagaaggtgcaaataataacttccttttcaaaatgtaattatttcatataatgtccttaaatgggcctatattaaagtaacaataattccaagcagttttgcccactagaaaatgggcagttgcttcgtgcaccctacaaattgcttcctacacgtataaattacattttgaactgatgacatcttttacattttgaaagactaatcctaaatgtaaaattacattatggattagcttttccagaatgtaaaaaaggtcatgaaagaactgcctagtgaatctggctattaggctgtgccaatgtcagtcccatgcaatgttgttaatggcggatggcggttcatggcggaaagtcaaaaatccgccataaaaatatggcggatggcgtagcggaaaatggcggatgtcatggcggacacaaaaaaaaaaaaaaacatatatataaactcattgaaattgaaaaaaaacaaaggattgcattcaaataaactaaaaaagtttcatgagttcatacaataatcaagtaccaacaccaaataaactcattaaagagttcaaaataagaaaatgataaaaacataatgcaaagtgcaaagtgaaggttgaggctctaatcatcttctccaatcccaacataatcatcttcgttgttatcatatggtaatggagcatctccctctccctcttccccatcagacgcctcaaaattgaccatgatttcttcttcttcagattcaacatcaatattctcctcaacatctagatcctcatcattttcttggactgctttttgcttccttgatgaagatccaacaaccattgcctattttttagaagtttgggcagcagcaacacttgttttttgctttttccgcctagtatacatcctacactctccaacccccgaagcctgatacacagttgcccaatttagagcatcatcatcttcaaataccaaatcatttcca

SEQ ID NO: 13067 - DNA, 1131 bp, Glycine max
  Gm_smallRNAprecursor_5900
atggcggatgtcatggcggacacaaaaaaaaaaaaaaacatatatataaactcattgaaattgaaaaaaaacaaaggattgcattcaaataaactaaaaaagtttcatgagttcatacaataatcaagtaccaacaccaaataaactcattaaagagttcaaaataagaaaatgataaaaacataatgcaaagtgcaaagtgaaggttgaggctctaatcatcttctccaatcccaacataatcatcttcgttgttatcatatggtaatggagcatctccctctccctcttccccatcagacgcctcaaaattgaccatgatttcttcttcttcagattcaacatcaatattctcctcaacatctagatcctcatcattttcttggactgctttttgcttccttgatgaagatccaacaaccattgcctattttttagaagtttgggcagcagcaacacttgttttttgctttttccgcctagtatacatcctacactctccaacccccgaagcctgatacacagttgcccaatttagagcatcatcatcttcaaataccaaatcatttccagcatcattatcatcatcttgatccatctctcccacgagccattcattgcatacatcaatatcattaagagaaattggatcaatttcatctcttgcattatatctttgcttcaattgttggttgtatttgacaaacaccaaatcatgcaacctcttgtgctcaagcctatttctttttttggaatgaatctacaacataacaaataaatgttgatttcaatctcaaatatactccaaatataacttgatcatcaaaattaaataaaattaaaaagtatagttagagttttatcacaattacttgctcaaacacactctaatttctttcacatcttgaagcactgcaagtcaaactcaaaatcttaatagtcagcttctgcaaatttggagtttgtgacccaaacattcgccaccaatatgctgcaataccaattaccaaccaagagcataacttagaattctgaattctaacactaatacataaaaaaaatagtatgataaaagtttcttactaggagaatgagttttcctttgagccattgcaaagtcggaaccaaagt

SEQ ID NO: 13068 - DNA, 1132 bp, Glycine max
  Gm_smallRNAprecursor_5901
acaagattggtgctgaccactttggttccgactttgcaatggctcaaaggaaaacccattctcctagtaagaaacttttatcatactatttttttttatgtattagtgttataattcagaattctaagttatgctcttggttggtaattggtattgcagcatattggtgacgaatgtttgggtcacaaactccaaatttgcagaagctagctattaaaattttgagtttgacttgcagtgcttcaggatgtgaaagaaattggagtgtgtttgaacaagtaattgtgacaaaactctaactatactttttaattttatttaattttgatgatcaagttttatttggagtatatttgagattgaaatcaacatttatttgttatgttgtagattcattccaaaaaaagaaatagacttgagcacaagaggttgcatgatttggtgtttgacaaatacaaccaacaatagaagcaaagatataatgcaatagatgaaattgatccaatttctcttaatgatattgatgtatgcaatgaatggctcgtgggagagatggatcgagatgatgataatgatgctggaaatgatttggtatttgaagatgatgatgctctaaattgggcaactgtgtatcaggcttcgggggttggagagtgtaggatgtatactaggcggaaaaagcaaaaaacaagtgttgctgctgtccaaacttctaaaaaaacaggcaatggttgttggatcttcatcaaggaagcaaaaagcagtccaagaaaatgatgaggatctagatgttgaggagaatattgatgctgaatctgaagaagaagaaatcatggtcaattttgaggcgtctgatggggaagagggagagggagatgctccattaccatatgataacaatgaagatgattatgttgggattggagaagatgattagagcctcaaccttcactttgcactttgcattatgtttttatcattttcttattttgaactctttaatgagtttatttggtgttggtacttgattattgcatgaactcatgaaacttttttagtttatttgaatgcaatcctttgtttttttcaatttcaatgagtttatatatatatatatatatatattttgtcc

SEQ ID NO: 13069 - DNA, 1092 bp, Glycine max
  Gm_smallRNAprecursor_5902
gtttgacttgcagtgcttcaggatgtgaaagaaattggagtgtgtttgaacaagtaattgtgacaaaactctaactatactttttaattttatttaattttgatgatcaagttttatttggagtatatttgagattgaaatcaacatttatttgttatgttgtagattcattccaaaaaaagaaatagacttgagcacaagaggttgcatgatttggtgtttgacaaatacaaccaacaatagaagcaaagatataatgcaatagatgaaattgatccaatttctcttaatgatattgatgtatgcaatgaatggctcgtgggagagatggatcgagatgatgataatgatgctggaaatgatttggtatttgaagatgatgatgctctaaattgggcaactgtgtatcaggcttcgggggttggagagtgtaggatgtatactaggcggaaaaagcaaaaaacaagtgttgctgctgtccaaacttctaaaaaaacaggcaatggttgttggatcttcatcaaggaagcaaaaagcagtccaagaaaatgatgaggatctagatgttgaggagaatattgatgctgaatctgaagaagaagaaatcatggtcaattttgaggcgtctgatggggaagagggagagggagatgctccattaccatatgataacaatgaagatgattatgttgggattggagaagatgattagagcctcaaccttcactttgcactttgcattatgtttttatcattttcttattttgaactctttaatgagtttatttggtgttggtacttgattattgcatgaactcatgaaacttttttagtttatttgaatgcaatcctttgtttttttcaatttcaatgagtttatatatatatatatatatatattttgtccgccataacatccgtcattttccgctacgccatccgtcatatttttatggcggattttgactttccgccatgaaccgtcatctgccattaacaatattgtggtgatgtcatgactttatgtgttatgtatatatcctggaacagtgcttattagctgataaagcctgggggttttgtagccctcaa

SEQ ID NO: 13070 - DNA, 1092 bp, Glycine max; identical to SEQ ID NO: 13069
  Gm_smallRNAprecursor_5903

SEQ ID NO: 13071 - DNA, 1055 bp, Glycine max
  Gm_smallRNAprecursor_5904
cacgtttctgtaactttgattgagtaaaaggaatttggtttttttaaggtgtccaaaattgtcagtttaagctaattatttactatcattttgatttctaaatatatgtcaatattatcatttaagttatattttttcttgaaactttgattaaagtgattaactaacagatttcattttcaagtacttatttatttatttttagtttcagaaattaatgtgacagcaaatcaacaatacacactttttgctacaataatttttaatttttaatcctatcccagttctaccggtcaatactgtaggctcacaagactcgtcgctgcttcatgggatgttagttcctgtatttccactattgcttccaatccaaaatgctaaatgtaatgaagtattgagtgttgttaggtgcacccagtatttaattaaaatattaaaactgtccctacgctttttttgtatttgtgatgggtgtatgtgaggatgatccataaattgtacgaatcaagttgatccgtaaggtttctacggattaagttgatccgtaagatttttacggatcaacttaaatggcttacggatcaaggatattttcatcattttttcttaagtgctgggtacaccagtaataatactgggtgcacctagcaacaccctgaagtatttcggattaaactttctaaaatggaatggagccttgggctacatttaggcccattttcttttaacgtcgtgttgttgtttcacaactcatactagtggacaatgatatatatatataaaattttactgaactagagaatgatgatctaatattgagatttggtgtttttttctttcatattggtttaaattaattagggtccgtttggggtggtatgtagtgttttcaaaaattttaaaatcaacaactaatttttaattttagtttcaaaaaatttataaaccagtttttaaaatatgatcggtttcaaataaattaattttgaaagtttcatatcgtattaaaattagtttaaaagtgtttatgtgtgatggtaatgataatgataaca

SEQ ID NO: 13072 - DNA, 1185 bp, Glycine max
  Gm_smallRNAprecursor_5905
gtgcatgttgttggatatgaaaagaaagaagagaaacctagcatgaatataaatatcagttgggtcacaaacacactttttacatgttatgttcaaaagactaaatgactaaatgacttaaagttattccttggcattatttttctttgagctaaaatatcagaagaattaagtactgttaaaacatcctatatatatatatatatatatatatatatatatatatatatatatatttaatttagcctcttatttattctttgcaagttttgtagcatattgtgaccctacaaattgagaaattattagacgtttctcactaccacaaaaagaagcttttacatcggtggaaaaccagtatctacgacgggtccaacaccgtctttgttccaggtgtcgttgtatgtcgacaacaacgacatcgatcaacctagcacccgcctttgtaatgcaacaatacaacgtcagtgactacaacagacgttataaataaggattcaacgacgcacattatgaagaacccgtcgttgttgtgatccatttcaatgacggatagcccaagatacgtcgttgttttgttccatttcaacgtcgggttagaaaggcccaacgttgtttggcagtatgtcaacgtcggtgtccctagcacctgtcgttgttggtaaataacaatataaagacgggtttagagaatgatcgtcgttgaagtattttgcctgctgacgaaatttgtgttatgccattcaaatttaatttgagaagagatgatatataattaaaatattcaatttacgaaagaaattaaaatatttaatttacgaaaaaaattaataacacttaattatttgttagtgacagattagctatcatatcctaaatcatgtaatgatctctcttaatgaaagacttcatgcaattgctttcccacctagaattaatttgagaagagatgataacgatgcagtgtctacctcaggctttggtgctggtccattctagctatatctggaagaaacatgtggaaggcttctgaccatgaaatttgccccaagtttgtggcagatgggttgccccacctgtaacttctggcaggtaagttgaagaaactctcttgggactttcttgcaaaaggggttcggaacacttcaacttgctgatgccgtaaactttgcagaagctcttgtg

SEQ ID NO: 13073 - DNA, 1153 bp, Glycine max
  Gm_smallRNAprecursor_5906
aactaagtcatggttatttttgactgtgcaattgaaactgtttttggaggaatgttatatcattagaagaacacatgtggtggatatgagttttagatttaaaagtccaatcaaatattcaatccatattcaattaaagggattggatttacaatccaaaaatttggatttagatataaaatcaatccattaaaatgaatttaaggtagtttgggcaaggtggattatgcttgattttatataattggtttttttaacagccctagctctacattggcatctatgaacaattgtgctcacaaagtattttttttatttacttgagtgtattaaataattagtatttttactcccataaaaaaataaaggtataattacatttttggtctcctagtttatctctagttttagatttgatcccctaagaatttaatttacgaatcaggtcctcctattttaaaaaatcgtgcaaaattgacccctaggccacaattggacgttgaccgttagcaagtgatgttgactgtcacgtgtcacgttcttattggatgatggctgtcatgtgtcatgttctgattgaatgtcaactccatgaaagatgaaatgcattgttgttttcattgaccaatcagaacatggcacgtgacagtcaacatcacttgttaacggtcaacgtcgaattgtggcacgggggaccaacattgcacgattttacaaaatagaaggacctaattcgtgaattaaattactaggggaccaaatccaaaactggagataaactgagggaccaaaaatacaattttgccaaaaataaatattgccttttaaatatttaaaaaaaaagttatataagataaaagaaaaataaattaaattaatacttattttacccgcgttaagcttacacattttggttctttttatgacaaaattgtgcattttataaaattttataatatttttcgactatgaaaataattcaactattttccccaattaaaaaaatcttttagatccaccactgtccagagcctccagccattaagtcgttaactctttctgccatcaacaatattaatcatattcctccccttgtcaccttcttactttctacgtcttccatactgctatcatgggcctgcagttttagaca

SEQ ID NO: 13074 - DNA, 1126 bp, Glycine max
  Gm_smallRNAprecursor_5907
tatttttgactgtgcaattgaaactgtttttggaggaatgttatatcattagaagaacacatgtggtggatatgagttttagatttaaaagtccaatcaaatattcaatccatattcaattaaagggattggatttacaatccaaaaatttggatttagatataaaatcaatccattaaaatgaatttaaggtagtttgggcaaggtggattatgcttgattttatataattggtttttttaacagccctagctctacattggcatctatgaacaattgtgctcacaaagtattttttttatttacttgagtgtattaaataattagtatttttactcccataaaaaaataaaggtataattacatttttggtctcctagtttatctctagttttagatttgatcccctaagaatttaatttacgaatcaggtcctcctattttaaaaaatcgtgcaaaattgacccctaggccacaattggacgttgaccgttagcaagtgatgttgactgtcacgtgtcacgttcttattggatgatggctgtcatgtgtcatgttctgattgaatgtcaactccatgaaagatgaaatgcattgttgttttcattgaccaatcagaacatggcacgtgacagtcaacatcacttgttaacggtcaacgtcgaattgtggcacgggggaccaacattgcacgattttacaaaatagaaggacctaattcgtgaattaaattactaggggaccaaatccaaaactggagataaactgagggaccaaaaatacaattttgccaaaaataaatattgccttttaaatatttaaaaaaaaagttatataagataaaagaaaaataaattaaattaatacttattttacccgcgttaagcttacacattttggttctttttatgacaaaattgtgcattttataaaattttataatatttttcgactatgaaaataattcaactattttccccaattaaaaaaatcttttagatccaccactgtccagagcctccagccattaagtcgttaactctttctgccatcaacaatattaatcatattcctccccttgtcaccttcttactttctacgtcttccatactgctatcatgggcct

SEQ ID NO: 13075 - DNA, 1179 bp, Glycine max
  Gm_smallRNAprecursor_5908
gaaagatgattacctgatacgagaggaacggaagggcctcaagccctgtttagcattgctattctaatggatgccattcagctaggtggattaaacggctacagaaattaaagccagtacgattcacacccaacattgcgataactccagtttataacaacggttgcaggctcagcccacaactcaccaccaaaaaattcgttgacctttagcataaacaggaacaggaaaaaaatttaaaattaaaaaaatataaaaaaaaataaaagctacagattaataaagtaatttttattgaatatcgggaaaatggaaataaaagagagaacagaagctttggacgccatcaaagagaaacgtcaacgacggagtccattattataattaaattacaataaataataaaatgttcaacaatttacccctctctctctctttttccttggggaacatgacaaaatggaagaaccctatctctgcggctccgagagcctgaaattccaggacgaatcgacggcttttagaagtaagactcggaatcggaaccctaaatccaaaattcaatcgagaaagctgcaattaccacagaagcaagccgaaggaaacgaaaaccctattgcaattgtgattgtgaatgcggtgggatgggtaatcggaatgcagaaaaaccctaggcggaagaaatcgatcgatcgggaagaaagagagtgagccaaaaaatgattaaatacatcgaagctaaaaagaggggcagaatagcaattaaaatttttgttcaaattttatttttaggaggaatccaacaacggtaacaggttggccacgttggggatcacaatataaatacaacttataactgtttctagcattaggattacaatcatttttaattggtttaattaagtttttcagttaatgacgtgagaagagaatgtcgtcatcactattaataacgtgtcaataataaaaaaaaaatattcaccatttaatagaagaagactaataacatgaaaagttgaaacaaaaattttataagtaattattcgacaaaaaatgaatttttagataaattcaaaaataatttattttttagttatgaacaacttaactaaagtcaatctgaaaaataattttttagttaaaaaatcataaaaaatatttttatcaaaataaataatt

SEQ ID NO: 13076 - DNA, 1100 bp, Glycine max
  Gm_smallRNAprecursor_5909
atacgtctaaagcatatcatccaagtttgattgtatgaatctgaataaaaactcatactgcaattacatttaagatcttcaattctcaagccgacaatctcattttacaatacgaatttttttttttttttttgaaggcaaaattatagtattattaatatataagccaaacagtaccaaaggtactgagtgaaacagatacaaagcactcaaggtgccaccttcctaaaacaacccaacaaaaaaccccactattatagataaatgacaaattaacagaaggactccagaagattggtagaccactggttaaaaggaatgttaaagcctttctccgtagctttaagccaagtccacgcatgaaataaagcatcatccatcacgttgggaggttgaaatggggtgcccttaaacagtagggaattcctatgctgccaaatagtactagttagagcaatccaccaaatacagcgcctattatgatctatgaagcaccaacaccgacacggacaccggacacgaacggatacggacacgtggacacctgtaatgtccaaaatatagaacgtaatacgtgtgtcgtgtcagtgtcggacactgacacggacgcgtgtcggacaccggacacgacaagacactggagtgtccgtgcttcatagattatgattcctcagcgcctattatttgaatgaagattcacatgacaaatgcattttgaacatcaattttaggcattacatccctattttatagtattttttttttaataaaccaatgttagctaacttcaaaagggcgagccctggtgcagcggtaaagttgtgctttggtgacttgttggtcatgggttcgaatccgcaaacaacctctttgcatatgcaagggtaaggttgcgtacaacatccctcccccataccttcgcatagcgaagagcctctgggcaatggggtacgaaaaaatgttagctaacttcaccctagagcttgcaatcccgactaggttggcaccccaaacactaaagatcccccagccactaaccaagaaattcattgcaaaagatgaagaaaatacagaagaccatggggggcatgaaccaaacc

SEQ ID NO: 13077 - DNA, 1100 bp, Glycine max; identical to SEQ ID NO: 13076
  Gm_smallRNAprecursor_5910

SEQ ID NO: 13078 - DNA, 1082 bp, Glycine max
  Gm_smallRNAprecursor_5911
agtttgattgtatgaatctgaataaaaactcatactgcaattacatttaagatcttcaattctcaagccgacaatctcattttacaatacgaatttttttttttttttttgaaggcaaaattatagtattattaatatataagccaaacagtaccaaaggtactgagtgaaacagatacaaagcactcaaggtgccaccttcctaaaacaacccaacaaaaaaccccactattatagataaatgacaaattaacagaaggactccagaagattggtagaccactggttaaaaggaatgttaaagcctttctccgtagctttaagccaagtccacgcatgaaataaagcatcatccatcacgttgggaggttgaaatggggtgcccttaaacagtagggaattcctatgctgccaaatagtactagttagagcaatccaccaaatacagcgcctattatgatctatgaagcaccaacaccgacacggacaccggacacgaacggatacggacacgtggacacctgtaatgtccaaaatatagaacgtaatacgtgtgtcgtgtcagtgtcggacactgacacggacgcgtgtcggacaccggacacgacaagacactggagtgtccgtgcttcatagattatgattcctcagcgcctattatttgaatgaagattcacatgacaaatgcattttgaacatcaattttaggcattacatccctattttatagtattttttttttaataaaccaatgttagctaacttcaaaagggcgagccctggtgcagcggtaaagttgtgctttggtgacttgttggtcatgggttcgaatccgcaaacaacctctttgcatatgcaagggtaaggttgcgtacaacatccctcccccataccttcgcatagcgaagagcctctgggcaatggggtacgaaaaaatgttagctaacttcaccctagagcttgcaatcccgactaggttggcaccccaaacactaaagatcccccagccactaaccaagaaattcattgcaaaagatgaagaaaatacagaagaccatggggggcatgaaccaaacccatgg

SEQ ID NO: 13079 - DNA, 1089 bp, Glycine max
  Gm_smallRNAprecursor_5912
agtttgattgtatgaatctgaataaaaactcatactgcaattacatttaagatcttcaattctcaagccgacaatctcattttacaatacgaatttttttttttttttttgaaggcaaaattatagtattattaatatataagccaaacagtaccaaaggtactgagtgaaacagatacaaagcactcaaggtgccaccttcctaaaacaacccaacaaaaaaccccactattatagataaatgacaaattaacagaaggactccagaagattggtagaccactggttaaaaggaatgttaaagcctttctccgtagctttaagccaagtccacgcatgaaataaagcatcatccatcacgttgggaggttgaaatggggtgcccttaaacagtagggaattcctatgctgccaaatagtactagttagagcaatccaccaaatacagcgcctattatgatctatgaagcaccaacaccgacacggacaccggacacgaacggatacggacacgtggacacctgtaatgtccaaaatatagaacgtaatacgtgtgtcgtgtcagtgtcggacactgacacggacgcgtgtcggacaccggacacgacaagacactggagtgtccgtgcttcatagattatgattcctcagcgcctattatttgaatgaagattcacatgacaaatgcattttgaacatcaattttaggcattacatccctattttatagtattttttttttaataaaccaatgttagctaacttcaaaagggcgagccctggtgcagcggtaaagttgtgctttggtgacttgttggtcatgggttcgaatccgcaaacaacctctttgcatatgcaagggtaaggttgcgtacaacatccctcccccataccttcgcatagcgaagagcctctgggcaatggggtacgaaaaaatgttagctaacttcaccctagagcttgcaatcccgactaggttggcaccccaaacactaaagatcccccagccactaaccaagaaattcattgcaaaagatgaagaaaatacagaagaccatggggggcatgaaccaaacccatgggagggaa

SEQ ID NO: 13080 - DNA, 1095 bp, Glycine max
  Gm_smallRNAprecursor_5913
ttgggaaggtcagttctattactaacattcttctgcttaaatagtttggggttgtgttattgtatgttgtttctgacttcagctctgatttttctcactttccaggcagacattttggaacagatcattcttgagatagagagttctattaagaccactagtcaataccctggagggtgggaattaaaatatgtgttataaatatacttttgtctgagatcaaatttggtgcttatgttaatgtttattgtgttaggagttaggagagaggggagagaaagttagtaacggttggaatgcttaattagttagttgaatgatgtctaatgttgatatcaatagttgagtggattgataagtaattcagaaaattcctctctaaattgtccaatgttttctcaaataatgtcaagtattgcctagatgaatcaggcatgttgagctattaaatttgaaagtggctttatatgctatgaagaatgtcctttgataaatcttttagcattccctttaatgagcattttgggttcatcttataatattttataggcttaaatatctgtttggtatctgtaagttagcgttttttacctttggtcattgagttcatttttctaattttagttcttgtaagttcttttcagttttgatccttgtaatatattttgctcatttttagtccttgtaagcttgtgtttttctaattttggtccctataagcacgaacttatagggactataacttaaaaaattagaatcttatagggaccaatattgaaaaaatgcaaactttcagggactaaaaatgggcaaaatatcttttagggaccaaaattggaaaagtgtaaacttataggaactaaaattagaaaaatgaactcaatgaccaaaggtaaaaaaacgctaacttacagataccaaaaagatatttaagcctataaaatattataagatggacccaaaatgctcattaaagggaatgctaatagatttaacaaaggacattcttcatagcatataaagccactttcaaatttaatagctcattttgtaaaaccagaacacacttgacacttttagaaacaaaagaaagga

SEQ ID NO: 13081 - DNA, 1119 bp, Glycine max
  Gm_smallRNAprecursor_5914
tacttagcccatgggctcgaaatctaccctaaggctcatgagaaccctagggccttcccttggatctctagcctaatctacttggagtcttctatccaatgcccttgcggggtaggattgcatcacataacttgtaaatattcaatcaatctattatgttataaaatttgattgaaagaaaattttaacgaataaataaaatagattctcaccagccaaaatgaatggtttctttaaatatttatagtttgagttaccgcgaagaaatttttgtgcaatgtggcataggcaaaagaaatgagatgtgttctggacccataagttacttgggttgttgtaggcacttataattgaggggtgacattctgaaatgagagaaatgttaatttgcagagtaacatgtcttctcaaattctttagaaaaaaaccccaagctgaagttgtctccccttctacaatggcgtaggcaattgggaagatatggttagttccatcttgtgcggtagctatcaacagtgtgccagtatacttcccgtaaagccatgtaccatctacttgtactatgggtttgcaatatgcaaaaccattaatgtatggaccaaatgaccaaaagacacgtttaaacaatcttttgcccggtactatttctccccatcatacaaggattctgtttgagcagtgaccactgtcccgggaacacaagattgcaaagctccaaaaagttttggcagtttggcgtatgattcttcccagtttccatgaatcatctccaacgctctttgctttgctgaccatgtcttcttgtaggatgggatataattcatgaacattttgatctctgcaatcaacgtcttgatggagacggttgagtttgttttgacaattggttggatgatctgtgctatgacgtgtttgtcgagttggcgatgattttgtttgagcatcgtcacgagataagtgtgatgacctctgatactcttgataatccatttgttatgcctctttgaattgcatgcgcctaagctccatgtataaccattttcatgtaacttacaaatgaagtttagccttctctggtcagagtaaattgttctgcaatcaaaatgatttctgatgttg

SEQ ID NO: 13082 - DNA, 1074 bp, Glycine max
  Gm_smallRNAprecursor_5915
tgcatcacataacttgtaaatattcaatcaatctattatgttataaaatttgattgaaagaaaattttaacgaataaataaaatagattctcaccagccaaaatgaatggtttctttaaatatttatagtttgagttaccgcgaagaaatttttgtgcaatgtggcataggcaaaagaaatgagatgtgttctggacccataagttacttgggttgttgtaggcacttataattgaggggtgacattctgaaatgagagaaatgttaatttgcagagtaacatgtcttctcaaattctttagaaaaaaaccccaagctgaagttgtctccccttctacaatggcgtaggcaattgggaagatatggttagttccatcttgtgcggtagctatcaacagtgtgccagtatacttcccgtaaagccatgtaccatctacttgtactatgggtttgcaatatgcaaaaccattaatgtatggaccaaatgaccaaaagacacgtttaaacaatcttttgcccggtactatttctccccatcatacaaggattctgtttgagcagtgaccactgtcccgggaacacaagattgcaaagctccaaaaagttttggcagtttggcgtatgattcttcccagtttccatgaatcatctccaacgctctttgctttgctgaccatgtcttcttgtaggatgggatataattcatgaacattttgatctctgcaatcaacgtcttgatggagacggttgagtttgttttgacaattggttggatgatctgtgctatgacgtgtttgtcgagttggcgatgattttgtttgagcatcgtcacgagataagtgtgatgacctctgatactcttgataatccatttgttatgcctctttgaattgcatgcgcctaagctccatgtataaccattttcatgtaacttacaaatgaagtttagccttctctggtcagagtaaattgttctgcaatcaaaatgatttctgatgttgtattctttgattgctctaatacattgtgctttgtcatcgaaggtcatgccaacctcgagtataccgattggtg

SEQ ID NO: 13083 - DNA, 1076 bp, Glycine max
  Gm_smallRNAprecursor_5916
tgcatcacataacttgtaaatattcaatcaatctattatgttataaaatttgattgaaagaaaattttaacgaataaataaaatagattctcaccagccaaaatgaatggtttctttaaatatttatagtttgagttaccgcgaagaaatttttgtgcaatgtggcataggcaaaagaaatgagatgtgttctggacccataagttacttgggttgttgtaggcacttataattgaggggtgacattctgaaatgagagaaatgttaatttgcagagtaacatgtcttctcaaattctttagaaaaaaaccccaagctgaagttgtctccccttctacaatggcgtaggcaattgggaagatatggttagttccatcttgtgcggtagctatcaacagtgtgccagtatacttcccgtaaagccatgtaccatctacttgtactatgggtttgcaatatgcaaaaccattaatgtatggaccaaatgaccaaaagacacgtttaaacaatcttttgcccggtactatttctccccatcatacaaggattctgtttgagcagtgaccactgtcccgggaacacaagattgcaaagctccaaaaagttttggcagtttggcgtatgattcttcccagtttccatgaatcatctccaacgctctttgctttgctgaccatgtcttcttgtaggatgggatataattcatgaacattttgatctctgcaatcaacgtcttgatggagacggttgagtttgttttgacaattggttggatgatctgtgctatgacgtgtttgtcgagttggcgatgattttgtttgagcatcgtcacgagataagtgtgatgacctctgatactcttgataatccatttgttatgcctctttgaattgcatgcgcctaagctccatgtataaccattttcatgtaacttacaaatgaagtttagccttctctggtcagagtaaattgttctgcaatcaaaatgatttctgatgttgtattctttgattgctctaatacattgtgctttgtcatcgaaggtcatgccaacctcgagtataccgattggtggt

SEQ ID NO: 13084 - DNA, 1077 bp, Glycine max
  Gm_smallRNAprecursor_5917
tgcatcacataacttgtaaatattcaatcaatctattatgttataaaatttgattgaaagaaaattttaacgaataaataaaatagattctcaccagccaaaatgaatggtttctttaaatatttatagtttgagttaccgcgaagaaatttttgtgcaatgtggcataggcaaaagaaatgagatgtgttctggacccataagttacttgggttgttgtaggcacttataattgaggggtgacattctgaaatgagagaaatgttaatttgcagagtaacatgtcttctcaaattctttagaaaaaaaccccaagctgaagttgtctccccttctacaatggcgtaggcaattgggaagatatggttagttccatcttgtgcggtagctatcaacagtgtgccagtatacttcccgtaaagccatgtaccatctacttgtactatgggtttgcaatatgcaaaaccattaatgtatggaccaaatgaccaaaagacacgtttaaacaatcttttgcccggtactatttctccccatcatacaaggattctgtttgagcagtgaccactgtcccgggaacacaagattgcaaagctccaaaaagttttggcagtttggcgtatgattcttcccagtttccatgaatcatctccaacgctctttgctttgctgaccatgtcttcttgtaggatgggatataattcatgaacattttgatctctgcaatcaacgtcttgatggagacggttgagtttgttttgacaattggttggatgatctgtgctatgacgtgtttgtcgagttggcgatgattttgtttgagcatcgtcacgagataagtgtgatgacctctgatactcttgataatccatttgttatgcctctttgaattgcatgcgcctaagctccatgtataaccattttcatgtaacttacaaatgaagtttagccttctctggtcagagtaaattgttctgcaatcaaaatgatttctgatgttgtattctttgattgctctaatacattgtgctttgtcatcgaaggtcatgccaacctcgagtataccgattggtggtt

SEQ ID NO: 13085 - DNA, 1064 bp, Glycine max
  Gm_smallRNAprecursor_5918
cataacttgtaaatattcaatcaatctattatgttataaaatttgattgaaagaaaattttaacgaataaataaaatagattctcaccagccaaaatgaatggtttctttaaatatttatagtttgagttaccgcgaagaaatttttgtgcaatgtggcataggcaaaagaaatgagatgtgttctggacccataagttacttgggttgttgtaggcacttataattgaggggtgacattctgaaatgagagaaatgttaatttgcagagtaacatgtcttctcaaattctttagaaaaaaaccccaagctgaagttgtctccccttctacaatggcgtaggcaattgggaagatatggttagttccatcttgtgcggtagctatcaacagtgtgccagtatacttcccgtaaagccatgtaccatctacttgtactatgggtttgcaatatgcaaaaccattaatgtatggaccaaatgaccaaaagacacgtttaaacaatcttttgcccggtactatttctccccatcatacaaggattctgtttgagcagtgaccactgtcccgggaacacaagattgcaaagctccaaaaagttttggcagtttggcgtatgattcttcccagtttccatgaatcatctccaacgctctttgctttgctgaccatgtcttcttgtaggatgggatataattcatgaacattttgatctctgcaatcaacgtcttgatggagacggttgagtttgttttgacaattggttggatgatctgtgctatgacgtgtttgtcgagttggcgatgattttgtttgagcatcgtcacgagataagtgtgatgacctctgatactcttgataatccatttgttatgcctctttgaattgcatgcgcctaagctccatgtataaccattttcatgtaacttacaaatgaagtttagccttctctggtcagagtaaattgttctgcaatcaaaatgatttctgatgttgtattctttgattgctctaatacattgtgctttgtcatcgaaggtcatgccaacctcgagtataccgattg

SEQ ID NO: 13086 - DNA, 1130 bp, Glycine max
  Gm_smallRNAprecursor_5919
attaatgcattacaagatcctaattggaaaatggccatgaccgacgaatataatgctcttattgaaaataagacgtgggacttagtgccccgtccaactgatgctaatgttatccgaagtttgtggcttttcaggcataaaaagaaagctgatggttcatttgaaaggtacaaggctcggctagtaggtaatggttcgaatcaacagactggtgtcgattgcggagaaacctttagtcccgtagttaaaccagcaactattcgaacggttctcagtattgctctttccaaatcatggggtcttcatcagttggatgtcaaaaatgctttcctacatggtaatctcaatgaaaccgtgtacatgtaccaacctgctggcttccgcaatccgcaataccctgattatgtatgcttgttgaagaagtctctctatggtcttaaacaagcacctcgtgcttggtaccaacgcttcactgattttgttgctaccttgggcttttctcatagtatatgtgataactcattattcacctaccacaatggcaatgacacggcctacatccttctttatgtagatgatatcattctcactgcatcctctgacactctacgccaatctatcatgtctaaactgagttccgaatttgctatgaaagatttgggtcctcttagttattttctaggtatctcagttaccaggcattccagtggtatgtttctctctcaacataaatatgctgaagaaatcattgagagagcttccatgtcctcctgcaaaccggtttcaactccagtggatacaaaagcaaaactcagtggaacctctggcaacccatatcatgatccatctgaatatagaagtcttgctggtgctttgcaataccttactttcacaagacctgatatttcttatgccgttcagcaagtatgtcttttcatgcatgatccaagaacacaacacatgaatgccttgaagcgaatcattcgatacatcaaaggcaccatcactcacggtttacatctctctccctcctcagttgacaaactcaccacatatactgatgctgactgggggggatgtccggacacccgcaggtccacgtccggttattgtgtttatcttggagataa

SEQ ID NO: 13087 - DNA, 1044 bp, Glycine max
  Gm_smallRNAprecursor_5920
gccccgtccaactgatgctaatgttatccgaagtttgtggcttttcaggcataaaaagaaagctgatggttcatttgaaaggtacaaggctcggctagtaggtaatggttcgaatcaacagactggtgtcgattgcggagaaacctttagtcccgtagttaaaccagcaactattcgaacggttctcagtattgctctttccaaatcatggggtcttcatcagttggatgtcaaaaatgctttcctacatggtaatctcaatgaaaccgtgtacatgtaccaacctgctggcttccgcaatccgcaataccctgattatgtatgcttgttgaagaagtctctctatggtcttaaacaagcacctcgtgcttggtaccaacgcttcactgattttgttgctaccttgggcttttctcatagtatatgtgataactcattattcacctaccacaatggcaatgacacggcctacatccttctttatgtagatgatatcattctcactgcatcctctgacactctacgccaatctatcatgtctaaactgagttccgaatttgctatgaaagatttgggtcctcttagttattttctaggtatctcagttaccaggcattccagtggtatgtttctctctcaacataaatatgctgaagaaatcattgagagagcttccatgtcctcctgcaaaccggtttcaactccagtggatacaaaagcaaaactcagtggaacctctggcaacccatatcatgatccatctgaatatagaagtcttgctggtgctttgcaataccttactttcacaagacctgatatttcttatgccgttcagcaagtatgtcttttcatgcatgatccaagaacacaacacatgaatgccttgaagcgaatcattcgatacatcaaaggcaccatcactcacggtttacatctctctccctcctcagttgacaaactcaccacatatactgatgctgactgggggggatgtccggacacccgcaggtccacgtccggttattgtgtttatcttggagataa

SEQ ID NO: 13088 - DNA, 1083 bp, Glycine max
  Gm_smallRNAprecursor_5921
caaagggactgcttcgatccattttgtaaagtaatcgacaccaactatgatataacgctggttcttagaagaagcaggcttgatttcaccaattaagtccaaagcccatcctctgaaaggccaaggtttgattatggagtgtaactcactagcaggtacatgctgtatccctgcatgcttttggcattcctgacagcctttagcaaattctatgcagtctcttaacatcgaaggccaatacaaaccctgtcgaaataaaagccatttcattttatggcctgcttgatgtgatccacaggcaccactgtgaacatgggaaactgccaagtatgcttctgattcacttatacattttagcaacactccttctgcagtctttttaaacaaatcatttcccacaaccacgtaatttaaagccctatatttgacctttcgagccacattgcctattggattttccaaatattcaacaatggactttctccaatcattatctaacatattgtcaatggccaaaatttgaatttttccctggaaaccatccatgctttcatcttcattattttgtggtatacttgcccccacaagttttggcattggcaacttagtgcttaatggctctggtgacatcagtttatcttttatttcgatcaactgagttaacttttccttcgacattttgtaccctgaagctatttgggctaaatcatttgcttctttgttttctagtcgaggtatatgttcaatgttaatgtaatcaaaatgattcagaagagaacttgccataacaaaatattttgctaagtgttcattaacacatttgtattcttgtgttaattgcctcaacactaattctgaatcacctcttatgttaacatttcttgcccccaagctaattaaaatttcaaggcctgcaattagagcctcatactcagcctcattattagaacaaagccctttgattttatatttgaatttagttggaactttattgggggatattattaaaactccaattccagttccatgtttgtgtttcgaaccattgaaatacaaaatccaaggctctgtatcgacatagtc

SEQ ID NO: 13089 - DNA, 1114 bp, Glycine max
  Gm_smallRNAprecursor_5922
tatctaacatattgtcaatggccaaaatttgaatttttccctggaaaccatccatgctttcatcttcattattttgtggtatacttgcccccacaagttttggcattggcaacttagtgcttaatggctctggtgacatcagtttatcttttatttcgatcaactgagttaacttttccttcgacattttgtaccctgaagctatttgggctaaatcatttgcttctttgttttctagtcgaggtatatgttcaatgttaatgtaatcaaaatgattcagaagagaacttgccataacaaaatattttgctaagtgttcattaacacatttgtattcttgtgttaattgcctcaacactaattctgaatcacctcttatgttaacatttcttgcccccaagctaattaaaatttcaaggcctgcaattagagcctcatactcagcctcattattagaacaaagccctttgattttatatttgaatttagttggaactttattgggggatattattaaaactccaattccagttccatgtttgtgtttcgaaccattgaaatacaaaatccaaggctctgtatcgacatagtcttgcggcatttcgatcactgagtgatctacaataaaatctgccacaatttgacccttaacagatttcaaaggcttgtacgttaaagaatattctgttaatgctaaagcccattttccaattctactgtgtaaaataggttttgacaacatgtgcttaataatatcataatgagaatacacataaacatcaacaggctttatatattgcttaagttttgcacaagagaaatacaaacaaagacaaagtttttctatggcagtatatctagtttctgcatcatttagtacacgactaagataataaattgcatgctctacgccatcatcatcttcctgagccaacatgctaccaatagtcttgtcagacgcagcaatatacaacttcatagtcttatttcgactaggaggcattaacacaggaggcttgatcagatattctttaatttcatcgaaagccttttgatgctcttcaccccatttgaatggttcatctttcttgagtcgaagtaatggcgaaaaaat

SEQ ID NO: 13090 - DNA, 1176 bp, Glycine max
  Gm_smallRNAprecursor_5923
tgccacaatttgacccttaacagatttcaaaggcttgtacgttaaagaatattctgttaatgctaaagcccattttccaattctactgtgtaaaataggttttgacaacatgtgcttaataatatcataatgagaatacacataaacatcaacaggctttatatattgcttaagttttgcacaagagaaatacaaacaaagacaaagtttttctatggcagtatatctagtttctgcatcatttagtacacgactaagataataaattgcatgctctacgccatcatcatcttcctgagccaacatgctaccaatagtcttgtcagacgcagcaatatacaacttcatagtcttatttcgactaggaggcattaacacaggaggcttgatcagatattctttaatttcatcgaaagccttttgatgctcttcaccccatttgaatggttcatctttcttgagtcgaagtaatggcgaaaaaatttgagctttgccacttagattcgaaatgaatcgcctcaagaagttaatttttcttagcaaagactgaagctgttttttggtcgaaggaggcttcgtctccagaatagcctttgtcttgttttgatttatctcaatgccttttttatgcaccacaaaaccaaggaaatctcctgcatgcacacaaaaagcacactttaatggattcatttttaatccatgttccctcattcgttcgaaagattgcctaaggtaatccaaatggctatcttccgaggaggatttgatgattatatcatcaatataaacttgcataaatgtgtcaataaaatcatgaaacatggaattcatggccctttgataagtggccccagcattcttcaacccaaaaggcataactacccattcataagtgcctagagcaccagggcatcaaaatgctgtttttgacacatcactttcagcaataaatatttggttataaccagaataaccatctaacatgcttaaaaattcgaagccagctgctgaatctactaacatttctgctactggcataacatattcatctttaggtgtagcattatttaaatccctaaaatctatgcatattctaagagttccattctttttaatgacagggactatatttgctaaccattcaacatacctggcagatctgatgaatttactcct

SEQ ID NO: 13091 - DNA, 1039 bp, Glycine max
  Gm_smallRNAprecursor_5924
atttctggtgcgaatcttcttggtagttgttttactggtctttttccctccttaataggtaatttcagttcgaccatttccctgcttaacccaggcatttcgtgataatcccaagcaaagcagtctttaaattctctaagaagaggcaccagcttttcttttagacttgaggtgatattggcactgatataggttggcctttttatcgagccatctccaatgtcgatctcctccaaaggatcttgagcctgcatctttggcgcctcacttatgggatttttttcaaaacccagtggctcatcatcataaatgcagtccagtcttcgatcctctgtttctttgttttcatgatcttcgatcttggcttcaactgccatattttgttggaattcagcctcaagggccgtatttagtctactttcggccatataagccgtaattctggcccatgcagtggcctcgggcatattaatcttcatatatattccacccagttggtggaatgactccatcttcagaggaaacagcatcaatttcttccctctcccatataaacccatgggtaggatggagtttgacagagtggataaccttgtcacttggctcgaaagcaatctccttgtcaccacaaggtgctatgttagccaaatttttgtcaaaggtttgtggagtaacattgtcaacctctgacttatagaagctttgatctgcctctatattttcaacaatcccatcctccctccagataatgagtttctggtggagagtagatggcacagccccaactccatggatccattcccttcctaatagcaagttaaaattagccttggactgtatcaccagaaatagagttggtcgaactatactgcctacagcaacatctacttgaatggctcccaaagaatagccagttttgccctcataattagagagcacaatgttgtgggcagatagatcagtgtcatgtttcccgatcttgtagagcatagatcgaggcattaagttgacagccgctcctccatctatgagcactttg

SEQ ID NO: 13092 - DNA, 1179 bp, Glycine max
  Gm_smallRNAprecursor_5925
aaacaagcactagtgttaaagcgttgaagttgttgtggaagctattaatgaactctagaaacaaaacagcggaattgatgtcgatccaccagaaaaagtgtaatgccatatgggaaggcagctaaaactgaactgaccaagattgttcaagacaagccttttagggtccttgtttatagagaagatcgctatggtcgttctgtaggtgatatatattataattgtatcatttttgtagaagtatccatttcatgtatacgaaatggatacattttgtcattttgctctttatgtatacattaatccatgtttgatgtttctactttctcattttaatgatattaaagaagggtttagcatgacactacacagcctataaaaaaacgaccaaagctagaaacagcaagtaacccatgttctggtcctttcactattttttcaaagttatatacacctaactttcttaagttctcatgttagtggggaaaataagctagagccagagcgtcttggcttatgggcttcaaaaaatcctgagaaaccatgggaatggagaaagaacaaacgagaagctgcgtaacagcgccttgattcagcattacttatgtaaatcaatacgctgttatgcagcttctcgtttggtctttctccattcccatgacttctcaggattttttgaagcccataacccaacacgctttgctctgacttgtttttcccattaacttgagaacttaagagagtcaggatctgtatataactttgaaaaaatagtgaaagaatctgaacatgggttacttgttgaatgccgcgtttgtcatagactatgtagtgacatgctaaacccttctttaacatcattaaaatgagaaacttagacagtagaaacatcaaacatggattaatgtatacataaagagcaaaatgataaaatgtatacatgaaatggatacctgtacaaaaatgatgcaattacactatataatatatatcacctacaaaaccatcataacgatcttctccataaacaaggaccctcgaaggcttgcttccttaaacaatcttggtcagttcagttttagctgtctttccataagacattgcactttctgatgcatcaattcccctgtttttgtttctaaagttcattaataggtttccacaacaacttaacactct

SEQ ID NO: 13093 - DNA, 1121 bp, Glycine max
  Gm_smallRNAprecursor_5926
ttgttgtggaagctattaatgaactctagaaacaaaacagcggaattgatgtcgatccaccagaaaaagtgtaatgccatatgggaaggcagctaaaactgaactgaccaagattgttcaagacaagccttttagggtccttgtttatagagaagatcgctatggtcgttctgtaggtgatatatattataattgtatcatttttgtagaagtatccatttcatgtatacgaaatggatacattttgtcattttgctctttatgtatacattaatccatgtttgatgtttctactttctcattttaatgatattaaagaagggtttagcatgacactacacagcctataaaaaaacgaccaaagctagaaacagcaagtaacccatgttctggtcctttcactattttttcaaagttatatacacctaactttcttaagttctcatgttagtggggaaaataagctagagccagagcgtcttggcttatgggcttcaaaaaatcctgagaaaccatgggaatggagaaagaacaaacgagaagctgcgtaacagcgccttgattcagcattacttatgtaaatcaatacgctgttatgcagcttctcgtttggtctttctccattcccatgacttctcaggattttttgaagcccataacccaacacgctttgctctgacttgtttttcccattaacttgagaacttaagagagtcaggatctgtatataactttgaaaaaatagtgaaagaatctgaacatgggttacttgttgaatgccgcgtttgtcatagactatgtagtgacatgctaaacccttctttaacatcattaaaatgagaaacttagacagtagaaacatcaaacatggattaatgtatacataaagagcaaaatgataaaatgtatacatgaaatggatacctgtacaaaaatgatgcaattacactatataatatatatcacctacaaaaccatcataacgatcttctccataaacaaggaccctcgaaggcttgcttccttaaacaatcttggtcagttcagttttagctgtctttccataagacattgcactttctgatgcatcaattcccctgtttttgtttctaaagttcatt

SEQ ID NO: 13094 - DNA, 1035 bp, Glycine max
  Gm_smallRNAprecursor_5927
attgcattgcattcgaaatgtaaagtttacaaaacttaaaaatggttcacaatcatacattttccttgcgtactcgtttctctctgcgctgggtactttgagtatataaggattttgtagaaatgatttgcgaccccgaaatctgactaaaaactgctatatatagacattcgaaaataaactgccctaacggtcgaacactatcctaatgccaagtgtcctgctacgtacaccttacatgcacataactgctccttagaacggttatcctcattgctcgaagtcgaactgattttgtgaagttttgtcagaaattgtgctaagtccagaaatcttgctgccttgacttcgactcgaccatacgccaactcgaatcgcccaatggttcgaagccctttttcttgtcttagccttgtacttcgtaaatacttccttgagcctgggaatccctttcaaaaacctcttctctcttttcgattcgaacaagtcctgacaagattcttgctctttaatacgcttcgaaactcgagacgacatctaatgcgtatttagagcatattttagctcataaaaaatatgggctaacaaattgcccccaaaaaatgtctgcttcgattcgagatcgaaggaagatgagaagttgacatttttttttctcttcttctaccagttttcctgaaacggcgtcatgatcgcacgttcactgtgtaaccgtcgcctcgatctcccactacccatcattaattccacttttctaggcaaagtgggacacgtgtcatgctggggaatcggaagggaaatctgatgtgattgatttttgaccattgattattatattgttttttccccttttaaaaatgaaactccataaatagcgccagaaaactccagaaaacccttcagcttctctgcttccaaaacccttcttcttcttgttgtatctccggcgaaaccttttcattttcagacatcaacttactactcctttcatcatcaacctcaccgtgtctctgagctttgccattgttctccgtg

SEQ ID NO: 13095 - DNA, 1086 bp, Glycine max
  Gm_smallRNAprecursor_5928
tcaaaagaacaaggtgacaatcaacctgttgacgtccaaccaccttcgaccgatattgacggcactgaagtagaggctactccttctgttgctgagatgggcaaccctgtcgatcaaccggactcaccacaagaacaacctgccgtcgaggtatcatcctcttaatgtgttttaaatcatagcttatacgaaactatttgttaacctttttccatgataattcgaatcaggtacaacaaaatgtttctgtagaagaaataccctcacatgctcgaacatctcccactcctgagacggatgcagtgaatgttgaagaacagggtgaaggtcaaggcattggatccagcagtcctcatggatcgagtcaaaaaagttcatccgaagaaaacttttccgatgaagaggccatagaagaggctgaagctggaggttcggacatttacccggcgtcttcgacatctaagctttccgctagcatagggatcgcagaagatacattcattcaaatgcaagacgaagaccctgctgcagcccttcgactcctgctgaccacaagtcaagccgacatctcaagtgaaaagattcctggtgcttcgtcctcatctgatgccgaaataaactcttcagtacgccaagattctctgctcttgaagttatccatggaatacgcacgggaagatgtgcttaaatccattgaagagaacccctctgctgcctttgggcacctgaactttttgaagaaattgcacaacccccttacctctgatgagattctaggcaaagttatccaaatcgaggccatcattgaccaatttgcaagtactgtgcagaaaaaacgcgaaaatggcgccagactggatgcccagaaacaggcacatatccttctgctcgaaaaagcccgagctgctcaacatgaagtcgaacgtctcaccaaagaggcgaaagaaggatcttctgagatcaaagcctgtgatgataacatctcctcctgggaggcaactattacggatttgctgtctcaggtcgatgatctaaggcaaaaaattgtgacggagcaggccaaacgcaaggaactccaggagaagg

SEQ ID NO: 13096 - DNA, 1110 bp, Glycine max
  Gm_smallRNAprecursor_5929
tgatcaacatttggcaaagggactgcttcgatccattttgtaaagtaatcgataccaactataatataatgctggttcttagaagaggcaggcttgatttcaccaattatgtccaaagcccatcctctgaaaggccaaggtttgattatggagtgtaactcactagcaggtacatgctgtatccctgcatgcttttggcattcctgacagcctttagcaaattctatgcagtcttttaacatcgaaggccaatacaaaccttgtcgaaataaaagccatttcattttatggcctgcttgatgtgatccacaagccccactgtgaacatgggaaactgctaagtatgcttctgattcacttagacattttaacaacactccttctgcagtctttttaaacaaatcatttcccataaccacgtaatttaaagccctatatttgacctttcgagccacattgcctattggattttccaaatattcaacaatggactttctccaatcattatctaacatattgtcaatggccaaaatttgaatttttccctggaaatcatccatgctttcatcttcattattttgtggtatacttgcccccacaagttttggcattggcaatttagtgcttaatggctctggtaacaccagtttatcttttatttcgatcaactgagttaactttcccttcgacattttgtaccctgaagctatttgggctaaatcatttgcttcttggttttcttgtcgaggtatatgctcaatgttaatgtaatcgaaatgattcagaagagaacttgctatcacaaaatattttgctaagtgtttattaacacatttgtattcttgtgttaattgcctcaacactaattctgaatcacctcttatgttaacatttcttgcccccaggctaattaaaatttcaaggcctgtaattagagcctcatactcagcctcattattagaacaaagccctttgattttatatttgaatttagttggaactttattgggggatattattaaaactccaattccagttccatgtttgtgtttcgaaccatcgaaatacaaaatccaaggctctgtatccacatagtcttgcggcatttcg

SEQ ID NO: 13097 - DNA, 1083 bp, Glycine max
  Gm_smallRNAprecursor_5930
caaagggactgcttcgatccattttgtaaagtaatcgataccaactataatataatgctggttcttagaagaggcaggcttgatttcaccaattatgtccaaagcccatcctctgaaaggccaaggtttgattatggagtgtaactcactagcaggtacatgctgtatccctgcatgcttttggcattcctgacagcctttagcaaattctatgcagtcttttaacatcgaaggccaatacaaaccttgtcgaaataaaagccatttcattttatggcctgcttgatgtgatccacaagccccactgtgaacatgggaaactgctaagtatgcttctgattcacttagacattttaacaacactccttctgcagtctttttaaacaaatcatttcccataaccacgtaatttaaagccctatatttgacctttcgagccacattgcctattggattttccaaatattcaacaatggactttctccaatcattatctaacatattgtcaatggccaaaatttgaatttttccctggaaatcatccatgctttcatcttcattattttgtggtatacttgcccccacaagttttggcattggcaatttagtgcttaatggctctggtaacaccagtttatcttttatttcgatcaactgagttaactttcccttcgacattttgtaccctgaagctatttgggctaaatcatttgcttcttggttttcttgtcgaggtatatgctcaatgttaatgtaatcgaaatgattcagaagagaacttgctatcacaaaatattttgctaagtgtttattaacacatttgtattcttgtgttaattgcctcaacactaattctgaatcacctcttatgttaacatttcttgcccccaggctaattaaaatttcaaggcctgtaattagagcctcatactcagcctcattattagaacaaagccctttgattttatatttgaatttagttggaactttattgggggatattattaaaactccaattccagttccatgtttgtgtttcgaaccatcgaaatacaaaatccaaggctctgtatccacatagtc

SEQ ID NO: 13098 - DNA, 1176 bp, Glycine max
  Gm_smallRNAprecursor_5931
agccacaatttgacccttaacagatttcaaaggcttgtacgttaaagaatattctgttaatgctaaagcccattttccaattctactgtgtaaaataggttttgacaacatgtgcttaataatatcataatgagaatacacataaacatcaacaggctttatatattgcttaagttttgcacaagagaaatacaaacaaagacaaagtttttctatggccgtatatctagtttctgcatcatttagtacacgactaagataataaattgcatgctctacgccatcatcatcttcctgagccaacatgctaccaatggtcttgtcagacgcagcaatatacaacttcatagtcttgtttcgactaggaggcattaacacgggaggcttgatcagatattctttaatttcatcgaaagccttttgatgctcttcattccatttgaatggttcatctttcttgagtcgaagtaatggcgaaaaaatttgagctttgccacttagattcgaaatgaatcgcctcaagaagttgatttttcctagcaaagactgaagctgttttttggtcgaaggaggcttcgtctcaagaatagcctttgtcttgttttgatttatctcaatgccttttttatgcaccacaaaaccaaggaaatctcctgcacgcacacaaaaagcacactttaatggattcatttttaatccatgtttcctcattcgttcgaaagattgcctaaggtaatccaaatggctatcttctgaagaggatttgatgattatatcatcaatataaacttgcataaatgtgtcaataaaatcatgaaacatggaattcatggccctttgataagtggccccagcatttttcaacccaaagggcataaccacccattcataagtgcctaaagcaccagggcatcgaaatgctgtttttgacacatcattttcaacaataaatatttggttataaccagaataaccatctaacatacttaaaaattcgaaaccagctgctgaatctaccaacatttctgctactggcatagcatattcatctttaggtgtagcattgtttaaatccctaaaatctatgcatactcttagagttccattctttttaatgacagggactatatttgctaaccattcgacatacctggcagacctgatgaatttacacct

SEQ ID NO: 13099 - DNA, 1157 bp, Glycine max
  Gm_smallRNAprecursor_5932
caattctactgtgtaaaataggttttgacaacatgtgcttaataatatcataatgagaatacacataaacatcaacaggctttatatattgcttaagttttgcacaagagaaatacaaacaaagacaaagtttttctatggccgtatatctagtttctgcatcatttagtacacgactaagataataaattgcatgctctacgccatcatcatcttcctgagccaacatgctaccaatggtcttgtcagacgcagcaatatacaacttcatagtcttgtttcgactaggaggcattaacacgggaggcttgatcagatattctttaatttcatcgaaagccttttgatgctcttcattccatttgaatggttcatctttcttgagtcgaagtaatggcgaaaaaatttgagctttgccacttagattcgaaatgaatcgcctcaagaagttgatttttcctagcaaagactgaagctgttttttggtcgaaggaggcttcgtctcaagaatagcctttgtcttgttttgatttatctcaatgccttttttatgcaccacaaaaccaaggaaatctcctgcacgcacacaaaaagcacactttaatggattcatttttaatccatgtttcctcattcgttcgaaagattgcctaaggtaatccaaatggctatcttctgaagaggatttgatgattatatcatcaatataaacttgcataaatgtgtcaataaaatcatgaaacatggaattcatggccctttgataagtggccccagcatttttcaacccaaagggcataaccacccattcataagtgcctaaagcaccagggcatcgaaatgctgtttttgacacatcattttcaacaataaatatttggttataaccagaataaccatctaacatacttaaaaattcgaaaccagctgctgaatctaccaacatttctgctactggcatagcatattcatctttaggtgtagcattgtttaaatccctaaaatctatgcatactcttagagttccattctttttaatgacagggactatatttgctaaccattcgacatacctggcagacctgatgaatttacacctcagcagcctttcgatctcttccttaattttggacatgatttctggtgcgaatcttctt

SEQ ID NO: 13100 - DNA, 1039 bp, Glycine max
  Gm_smallRNAprecursor_5933
ggagtggattcatggagttggggctgtgccatctacccttcaccagaagctcattatctggagggaggatgggattgttgaaaatatagaggcggatcaaagcttctataagtcagaggtcgataatgttactgcacaaacctttgacaaaaagttggctaacatagcaccttgtggtgacaaggaggctgttgtcgaatcaagtgacaatgttatccactctgtcaaactccatcctacctatgggtttatatgggagagggaggaaattgatgttgttccctctgaagatggagtcattccaccaactgggtggaatatacatgaagattaatatgactgaggccactgcatgggccagaattacggcttatatggccgaaaataaactaaatacggcctttgaggctgaatctcaacaaaatatggcagttgaagccaggatcgaagatcatgaaaacaaagaaacaaaggatcgaagactggattgcatttatgacgatgagccgctgggttttgagaaaaatcccataagtgaggtgccaaagatgcaggctcaagatcctttggaggagatcgacattggagatggctcgataaaaagaccaacctatatcagtgccaatatcacctcaagtctaaaagaaaagctggtacctcttcttagagaatttaaagactgttttgcttggaattaccacgaaatgcctgggttaagcagagaaatggtcgaaatgaaattacctattaaggaaggaaaaagaccaataaaacaactaccaagaagattcgcaccagaaatcatgtccaaaattaaggaagagatcgaaaggctgctgaggtgtaaattcatcaggtctgccaggtatgtcgaatggttagcaaatatagtccctgtcattaaaaagaatggaactctaagagtatgcatagattttagggatttaaacaatgctacacctaaagatgaatatgctatgccagtagcagaaatgttggtagattcagcagctggtttcgaatttttaagcatgttaga

SEQ ID NO: 13101 - DNA, 1125 bp, Glycine max
  Gm_smallRNAprecursor_5934
gccaatatcacctcaagtctaaaagaaaagctggtacctcttcttagagaatttaaagactgttttgcttggaattaccacgaaatgcctgggttaagcagagaaatggtcgaaatgaaattacctattaaggaaggaaaaagaccaataaaacaactaccaagaagattcgcaccagaaatcatgtccaaaattaaggaagagatcgaaaggctgctgaggtgtaaattcatcaggtctgccaggtatgtcgaatggttagcaaatatagtccctgtcattaaaaagaatggaactctaagagtatgcatagattttagggatttaaacaatgctacacctaaagatgaatatgctatgccagtagcagaaatgttggtagattcagcagctggtttcgaatttttaagcatgttagatggttattctggttataaccaaatatttattgctgaagatgatgtgtcaaaaacagcatttcgatgccctggtgctttaggcacttatgaatgggtggttatgccctttgggttgaaaaatgctggggccacttatcaaagggccatgaattccatgtttcatgattttattgacacatttatgcaagtttatattgatgatataatcatcaaatcctcttcagaagatagccatttggattaccttaggcaatctttcgaacgaatgaggaaatatggattaaaaatgaatccattaaagtgtgctttttgtgtgcgtgcaggagatttccttggttttgtggtgcataaaaaaggcattgagataaatcaaaacaagacaaaggctattcttgagacgaagcctccttcgaccaaaaaacagcttcagtctttgctaggaaaaatcaacttcttgaggcgattcatttcgaatctaagtggcaaagctcaaattttttcgccattacttcgactcaagaaagatgaaccattcaaatggaatgaagagcatcaaaaggctttcgatgaaattaaagaatatctgatcaagcctcccgtgttaatgcctcctagtcgaaacaagactatgaagttgtatattgctgcgtctgacaagaccattggtagcatgttggctcaggaagatgatgatggcgtagagcat

SEQ ID NO: 13102 - DNA, 1046 bp, Glycine max
  Gm_smallRNAprecursor_5935
aggtatgtcgaatggttagcaaatatagtccctgtcattaaaaagaatggaactctaagagtatgcatagattttagggatttaaacaatgctacacctaaagatgaatatgctatgccagtagcagaaatgttggtagattcagcagctggtttcgaatttttaagcatgttagatggttattctggttataaccaaatatttattgctgaagatgatgtgtcaaaaacagcatttcgatgccctggtgctttaggcacttatgaatgggtggttatgccctttgggttgaaaaatgctggggccacttatcaaagggccatgaattccatgtttcatgattttattgacacatttatgcaagtttatattgatgatataatcatcaaatcctcttcagaagatagccatttggattaccttaggcaatctttcgaacgaatgaggaaatatggattaaaaatgaatccattaaagtgtgctttttgtgtgcgtgcaggagatttccttggttttgtggtgcataaaaaaggcattgagataaatcaaaacaagacaaaggctattcttgagacgaagcctccttcgaccaaaaaacagcttcagtctttgctaggaaaaatcaacttcttgaggcgattcatttcgaatctaagtggcaaagctcaaattttttcgccattacttcgactcaagaaagatgaaccattcaaatggaatgaagagcatcaaaaggctttcgatgaaattaaagaatatctgatcaagcctcccgtgttaatgcctcctagtcgaaacaagactatgaagttgtatattgctgcgtctgacaagaccattggtagcatgttggctcaggaagatgatgatggcgtagagcatgcaatttattatcttagtcgtgtactaaatgatgcagaaactagatatactgccatagaaaaactttgtctttgtttgtatttctcttgtgcaaaacttaagtaatatataaagcctgttgatgtttatgtgtattctcattatgatattattaagcacatgtt

SEQ ID NO: 13103 - DNA, 1052 bp, Glycine max
  Gm_smallRNAprecursor_5936
actgaagagtttatttcggcatcagatgaggacgaagcaccaggaatcttttcacttgagatgtcggcttgacttgtggtcagcaggagtcgaagggctgcagcagggtcttcgtcttgcatttgaatgaatgtatcttctgcgatccctatgctagcggaaagcttagatgtcgaagacgccgggtaaatgtccgaacctccagcttcagcctcttctatggcctcttcatcggaaaagttttcttcggatgaacttttttgactcgatccatgaggactgctggatccaatgccttgaccttcaccctgttcttcaacattcactgcatccgtctcaggagtgggagatgttcgagcatgtgagggtatttcttctacagaaacattttgttgtacctgattcgaattatcatggaaaaaggttaacaaatagtttcgtataagctatgatttaaaacacattaagaggatgatacctcgacggcaggttgttcttgtggtgagtccggttgatcgacagggttgcccatctcagcaacagaaggagtagcctctacttcagtgccgtcaatatcggtcgaaggtggttggacgtcaacaggttgattgtcaccttgttcttttgaaggcttggtctttttctttttcttcttgattggttcaccaccctcaacagccacagaaggttcaggctcgacctgctttactttctttttctttttaggcatttgagcctgggaattgcctgcctctgtttgttcagcagacttggtcgaagtcgcaggtaactttctttttcttataagaggtctttccttttcttcctgcattacgagggtaaagaattgtcagaatatagacttgaaagaaagctataatattgacattagaaataaaacttgcatctttctcttcgtctaattcgacgaccgcatgcttcgagcgttttgaagtcgtggtagtatcaatgctatcatctttcttttgactctgaaaaaataaagaaatatgaggcaagacgttaagagtaaaagataagttcagaagagt

SEQ ID NO: 13104 - DNA, 1200 bp, Glycine max
  Gm_smallRNAprecursor_5937
caaaaagattggaaggatctaatgtcttgatttcctttattgaccttcattttctttttttttttatgatttgctatacctgtagcagtattgactataactattctcatttttgtattctttttacttttgattaatttattatttactctgaagaaatatacttatgtcattttttctgctcaactccagatgataatatgtcattcaaaaaagtgaagggactgaatgcatttttgacttgcagaaaaccagtatatatggtactatttagagtatgtgctttatttcactagattctggacaacctagcaaagagcttaatcctgtattagctattattctacaaaggtatgatgattcatttatttggccattatgaatagtttattctaaagtcttgaagacagtcctaaatttgaaatagcttttgttttttttgtcttttgtttcttttgtattagctattattctacaaaggtatgatttcctttatcaaatactcttacttcaaccatcctctcatgtaactcctgtttgcactaaagattgtccaaaaggaatattgttttatgcagaagacaaattacatcggataagaaaaatcacaccacataattgctgcattgctttagatctctatttctgcataaaacaatattccttttggacaatctttagtgcaaacaggagtcacatgagaggatggttgaattaagagtatttgacaaaggaaatcatacctttgtagaataatagctaatacaaaaaaaacaaaagacgaaagaaacaaaagctatttcaaatttaggactgtcttcaagactttagaataaactattcataatggtcaaataaatgaatcatcatacctttgtagaataatagctaataaaggattaagctccttgctaggttgtccagaatctagtgaaataaagcacatactccaaatagtaccatatatactggttttctacaagtcaaaaatgcattcagtcccttcactttttgaatgatatattatcatctggagttgaacagaaaaaatgacataagtatatttcttcagaataaataacaaattaatcaaaagtaaaaagaatacaaaaatgagaatagttatagtcaatactgctacaggtatagcaaatcataaaaagaaaaaagaaaatgaaggtcaataaaggaaatcaagac

SEQ ID NO: 13105 - DNA, 1033 bp, Glycine max
  Gm_smallRNAprecursor_5938
agattggaaggatctaatgtcttgatttcctttattgaccttcattttctttttttttttatgatttgctatacctgtagcagtattgactataactattctcatttttgtattctttttacttttgattaatttattatttactctgaagaaatatacttatgtcattttttctgctcaactccagatgataatatgtcattcaaaaaagtgaagggactgaatgcatttttgacttgcagaaaaccagtatatatggtactatttagagtatgtgctttatttcactagattctggacaacctagcaaagagcttaatcctgtattagctattattctacaaaggtatgatgattcatttatttggccattatgaatagtttattctaaagtcttgaagacagtcctaaatttgaaatagcttttgttttttttgtcttttgtttcttttgtattagctattattctacaaaggtatgatttcctttatcaaatactcttacttcaaccatcctctcatgtaactcctgtttgcactaaagattgtccaaaaggaatattgttttatgcagaagacaaattacatcggataagaaaaatcacaccacataattgctgcattgctttagatctctatttctgcataaaacaatattccttttggacaatctttagtgcaaacaggagtcacatgagaggatggttgaattaagagtatttgacaaaggaaatcatacctttgtagaataatagctaatacaaaaaaaacaaaagacgaaagaaacaaaagctatttcaaatttaggactgtcttcaagactttagaataaactattcataatggtcaaataaatgaatcatcatacctttgtagaataatagctaataaaggattaagctccttgctaggttgtccagaatctagtgaaataaagcacatactccaaatagtaccatatatactggttttctacaagtcaaaaatgcattcagtcccttcactttttgaatgatatattatcatctggagtt

SEQ ID NO: 13106 - DNA, 1190 bp, Glycine max
  Gm_smallRNAprecursor_5939
agattggaaggatctaatgtcttgatttcctttattgaccttcattttctttttttttttatgatttgctatacctgtagcagtattgactataactattctcatttttgtattctttttacttttgattaatttattatttactctgaagaaatatacttatgtcattttttctgctcaactccagatgataatatgtcattcaaaaaagtgaagggactgaatgcatttttgacttgcagaaaaccagtatatatggtactatttagagtatgtgctttatttcactagattctggacaacctagcaaagagcttaatcctgtattagctattattctacaaaggtatgatgattcatttatttggccattatgaatagtttattctaaagtcttgaagacagtcctaaatttgaaatagcttttgttttttttgtcttttgtttcttttgtattagctattattctacaaaggtatgatttcctttatcaaatactcttacttcaaccatcctctcatgtaactcctgtttgcactaaagattgtccaaaaggaatattgttttatgcagaagacaaattacatcggataagaaaaatcacaccacataattgctgcattgctttagatctctatttctgcataaaacaatattccttttggacaatctttagtgcaaacaggagtcacatgagaggatggttgaattaagagtatttgacaaaggaaatcatacctttgtagaataatagctaatacaaaaaaaacaaaagacgaaagaaacaaaagctatttcaaatttaggactgtcttcaagactttagaataaactattcataatggtcaaataaatgaatcatcatacctttgtagaataatagctaataaaggattaagctccttgctaggttgtccagaatctagtgaaataaagcacatactccaaatagtaccatatatactggttttctacaagtcaaaaatgcattcagtcccttcactttttgaatgatatattatcatctggagttgaacagaaaaaatgacataagtatatttcttcagaataaataacaaattaatcaaaagtaaaaagaatacaaaaatgagaatagttatagtcaatactgctacaggtatagcaaatcataaaaagaaaaaagaaaatgaaggtcaataaaggaaatc

SEQ ID NO: 13107 - DNA, 1173 bp, Glycine max
  Gm_smallRNAprecursor_5940
aggatctaatgtcttgatttcctttattgaccttcattttctttttttttttatgatttgctatacctgtagcagtattgactataactattctcatttttgtattctttttacttttgattaatttattatttactctgaagaaatatacttatgtcattttttctgctcaactccagatgataatatgtcattcaaaaaagtgaagggactgaatgcatttttgacttgcagaaaaccagtatatatggtactatttagagtatgtgctttatttcactagattctggacaacctagcaaagagcttaatcctgtattagctattattctacaaaggtatgatgattcatttatttggccattatgaatagtttattctaaagtcttgaagacagtcctaaatttgaaatagcttttgttttttttgtcttttgtttcttttgtattagctattattctacaaaggtatgatttcctttatcaaatactcttacttcaaccatcctctcatgtaactcctgtttgcactaaagattgtccaaaaggaatattgttttatgcagaagacaaattacatcggataagaaaaatcacaccacataattgctgcattgctttagatctctatttctgcataaaacaatattccttttggacaatctttagtgcaaacaggagtcacatgagaggatggttgaattaagagtatttgacaaaggaaatcatacctttgtagaataatagctaatacaaaaaaaacaaaagacgaaagaaacaaaagctatttcaaatttaggactgtcttcaagactttagaataaactattcataatggtcaaataaatgaatcatcatacctttgtagaataatagctaataaaggattaagctccttgctaggttgtccagaatctagtgaaataaagcacatactccaaatagtaccatatatactggttttctacaagtcaaaaatgcattcagtcccttcactttttgaatgatatattatcatctggagttgaacagaaaaaatgacataagtatatttcttcagaataaataacaaattaatcaaaagtaaaaagaatacaaaaatgagaatagttatagtcaatactgctacaggtatagcaaatcataaaaagaaaaaagaaaatgaaggtcaata

SEQ ID NO: 13108 - DNA, 1174 bp, Glycine max
  Gm_smallRNAprecursor_5941
aggatctaatgtcttgatttcctttattgaccttcattttctttttttttttatgatttgctatacctgtagcagtattgactataactattctcatttttgtattctttttacttttgattaatttattatttactctgaagaaatatacttatgtcattttttctgctcaactccagatgataatatgtcattcaaaaaagtgaagggactgaatgcatttttgacttgcagaaaaccagtatatatggtactatttagagtatgtgctttatttcactagattctggacaacctagcaaagagcttaatcctgtattagctattattctacaaaggtatgatgattcatttatttggccattatgaatagtttattctaaagtcttgaagacagtcctaaatttgaaatagcttttgttttttttgtcttttgtttcttttgtattagctattattctacaaaggtatgatttcctttatcaaatactcttacttcaaccatcctctcatgtaactcctgtttgcactaaagattgtccaaaaggaatattgttttatgcagaagacaaattacatcggataagaaaaatcacaccacataattgctgcattgctttagatctctatttctgcataaaacaatattccttttggacaatctttagtgcaaacaggagtcacatgagaggatggttgaattaagagtatttgacaaaggaaatcatacctttgtagaataatagctaatacaaaaaaaacaaaagacgaaagaaacaaaagctatttcaaatttaggactgtcttcaagactttagaataaactattcataatggtcaaataaatgaatcatcatacctttgtagaataatagctaataaaggattaagctccttgctaggttgtccagaatctagtgaaataaagcacatactccaaatagtaccatatatactggttttctacaagtcaaaaatgcattcagtcccttcactttttgaatgatatattatcatctggagttgaacagaaaaaatgacataagtatatttcttcagaataaataacaaattaatcaaaagtaaaaagaatacaaaaatgagaatagttatagtcaatactgctacaggtatagcaaatcataaaaagaaaaaagaaaatgaaggtcaataa

SEQ ID NO: 13109 - DNA, 1172 bp, Glycine max
  Gm_smallRNAprecursor_5942
ggatctaatgtcttgatttcctttattgaccttcattttctttttttttttatgatttgctatacctgtagcagtattgactataactattctcatttttgtattctttttacttttgattaatttattatttactctgaagaaatatacttatgtcattttttctgctcaactccagatgataatatgtcattcaaaaaagtgaagggactgaatgcatttttgacttgcagaaaaccagtatatatggtactatttagagtatgtgctttatttcactagattctggacaacctagcaaagagcttaatcctgtattagctattattctacaaaggtatgatgattcatttatttggccattatgaatagtttattctaaagtcttgaagacagtcctaaatttgaaatagcttttgttttttttgtcttttgtttcttttgtattagctattattctacaaaggtatgatttcctttatcaaatactcttacttcaaccatcctctcatgtaactcctgtttgcactaaagattgtccaaaaggaatattgttttatgcagaagacaaattacatcggataagaaaaatcacaccacataattgctgcattgctttagatctctatttctgcataaaacaatattccttttggacaatctttagtgcaaacaggagtcacatgagaggatggttgaattaagagtatttgacaaaggaaatcatacctttgtagaataatagctaatacaaaaaaaacaaaagacgaaagaaacaaaagctatttcaaatttaggactgtcttcaagactttagaataaactattcataatggtcaaataaatgaatcatcatacctttgtagaataatagctaataaaggattaagctccttgctaggttgtccagaatctagtgaaataaagcacatactccaaatagtaccatatatactggttttctacaagtcaaaaatgcattcagtcccttcactttttgaatgatatattatcatctggagttgaacagaaaaaatgacataagtatatttcttcagaataaataacaaattaatcaaaagtaaaaagaatacaaaaatgagaatagttatagtcaatactgctacaggtatagcaaatcataaaaagaaaaaagaaaatgaaggtcaata

SEQ ID NO: 13110 - DNA, 1168 bp, Glycine max
  Gm_smallRNAprecursor_5943
atctaatgtcttgatttcctttattgaccttcattttctttttttttttatgatttgctatacctgtagcagtattgactataactattctcatttttgtattctttttacttttgattaatttattatttactctgaagaaatatacttatgtcattttttctgctcaactccagatgataatatgtcattcaaaaaagtgaagggactgaatgcatttttgacttgcagaaaaccagtatatatggtactatttagagtatgtgctttatttcactagattctggacaacctagcaaagagcttaatcctgtattagctattattctacaaaggtatgatgattcatttatttggccattatgaatagtttattctaaagtcttgaagacagtcctaaatttgaaatagcttttgttttttttgtcttttgtttcttttgtattagctattattctacaaaggtatgatttcctttatcaaatactcttacttcaaccatcctctcatgtaactcctgtttgcactaaagattgtccaaaaggaatattgttttatgcagaagacaaattacatcggataagaaaaatcacaccacataattgctgcattgctttagatctctatttctgcataaaacaatattccttttggacaatctttagtgcaaacaggagtcacatgagaggatggttgaattaagagtatttgacaaaggaaatcatacctttgtagaataatagctaatacaaaaaaaacaaaagacgaaagaaacaaaagctatttcaaatttaggactgtcttcaagactttagaataaactattcataatggtcaaataaatgaatcatcatacctttgtagaataatagctaataaaggattaagctccttgctaggttgtccagaatctagtgaaataaagcacatactccaaatagtaccatatatactggttttctacaagtcaaaaatgcattcagtcccttcactttttgaatgatatattatcatctggagttgaacagaaaaaatgacataagtatatttcttcagaataaataacaaattaatcaaaagtaaaaagaatacaaaaatgagaatagttatagtcaatactgctacaggtatagcaaatcataaaaagaaaaaagaaaatgaaggtcaa

SEQ ID NO: 13111 - DNA, 1156 bp, Glycine max
  Gm_smallRNAprecursor_5944
tgtcttgatttcctttattgaccttcattttctttttttttttatgatttgctatacctgtagcagtattgactataactattctcatttttgtattctttttacttttgattaatttattatttactctgaagaaatatacttatgtcattttttctgctcaactccagatgataatatgtcattcaaaaaagtgaagggactgaatgcatttttgacttgcagaaaaccagtatatatggtactatttagagtatgtgctttatttcactagattctggacaacctagcaaagagcttaatcctgtattagctattattctacaaaggtatgatgattcatttatttggccattatgaatagtttattctaaagtcttgaagacagtcctaaatttgaaatagcttttgttttttttgtcttttgtttcttttgtattagctattattctacaaaggtatgatttcctttatcaaatactcttacttcaaccatcctctcatgtaactcctgtttgcactaaagattgtccaaaaggaatattgttttatgcagaagacaaattacatcggataagaaaaatcacaccacataattgctgcattgctttagatctctatttctgcataaaacaatattccttttggacaatctttagtgcaaacaggagtcacatgagaggatggttgaattaagagtatttgacaaaggaaatcatacctttgtagaataatagctaatacaaaaaaaacaaaagacgaaagaaacaaaagctatttcaaatttaggactgtcttcaagactttagaataaactattcataatggtcaaataaatgaatcatcatacctttgtagaataatagctaataaaggattaagctccttgctaggttgtccagaatctagtgaaataaagcacatactccaaatagtaccatatatactggttttctacaagtcaaaaatgcattcagtcccttcactttttgaatgatatattatcatctggagttgaacagaaaaaatgacataagtatatttcttcagaataaataacaaattaatcaaaagtaaaaagaatacaaaaatgagaatagttatagtcaatactgctacaggtatagcaaatcataaaaagaaaaaagaaaatgaa

SEQ ID NO: 13112 - DNA, 1140 bp, Glycine max
  Gm_smallRNAprecursor_5945
tttcctttattgaccttcattttctttttttttttatgatttgctatacctgtagcagtattgactataactattctcatttttgtattctttttacttttgattaatttattatttactctgaagaaatatacttatgtcattttttctgctcaactccagatgataatatgtcattcaaaaaagtgaagggactgaatgcatttttgacttgcagaaaaccagtatatatggtactatttagagtatgtgctttatttcactagattctggacaacctagcaaagagcttaatcctgtattagctattattctacaaaggtatgatgattcatttatttggccattatgaatagtttattctaaagtcttgaagacagtcctaaatttgaaatagcttttgttttttttgtcttttgtttcttttgtattagctattattctacaaaggtatgatttcctttatcaaatactcttacttcaaccatcctctcatgtaactcctgtttgcactaaagattgtccaaaaggaatattgttttatgcagaagacaaattacatcggataagaaaaatcacaccacataattgctgcattgctttagatctctatttctgcataaaacaatattccttttggacaatctttagtgcaaacaggagtcacatgagaggatggttgaattaagagtatttgacaaaggaaatcatacctttgtagaataatagctaatacaaaaaaaacaaaagacgaaagaaacaaaagctatttcaaatttaggactgtcttcaagactttagaataaactattcataatggtcaaataaatgaatcatcatacctttgtagaataatagctaataaaggattaagctccttgctaggttgtccagaatctagtgaaataaagcacatactccaaatagtaccatatatactggttttctacaagtcaaaaatgcattcagtcccttcactttttgaatgatatattatcatctggagttgaacagaaaaaatgacataagtatatttcttcagaataaataacaaattaatcaaaagtaaaaagaatacaaaaatgagaatagttatagtcaatactgctacaggtatagcaaatcataaaaagaaaaaag

SEQ ID NO: 13113 - DNA, 1140 bp, Glycine max; identical to SEQ ID NO: 13112
  Gm_smallRNAprecursor_5946

SEQ ID NO: 13114 - DNA, 1139 bp, Glycine max
  Gm_smallRNAprecursor_5947
ttcctttattgaccttcattttctttttttttttatgatttgctatacctgtagcagtattgactataactattctcatttttgtattctttttacttttgattaatttattatttactctgaagaaatatacttatgtcattttttctgctcaactccagatgataatatgtcattcaaaaaagtgaagggactgaatgcatttttgacttgcagaaaaccagtatatatggtactatttagagtatgtgctttatttcactagattctggacaacctagcaaagagcttaatcctgtattagctattattctacaaaggtatgatgattcatttatttggccattatgaatagtttattctaaagtcttgaagacagtcctaaatttgaaatagcttttgttttttttgtcttttgtttcttttgtattagctattattctacaaaggtatgatttcctttatcaaatactcttacttcaaccatcctctcatgtaactcctgtttgcactaaagattgtccaaaaggaatattgttttatgcagaagacaaattacatcggataagaaaaatcacaccacataattgctgcattgctttagatctctatttctgcataaaacaatattccttttggacaatctttagtgcaaacaggagtcacatgagaggatggttgaattaagagtatttgacaaaggaaatcatacctttgtagaataatagctaatacaaaaaaaacaaaagacgaaagaaacaaaagctatttcaaatttaggactgtcttcaagactttagaataaactattcataatggtcaaataaatgaatcatcatacctttgtagaataatagctaataaaggattaagctccttgctaggttgtccagaatctagtgaaataaagcacatactccaaatagtaccatatatactggttttctacaagtcaaaaatgcattcagtcccttcactttttgaatgatatattatcatctggagttgaacagaaaaaatgacataagtatatttcttcagaataaataacaaattaatcaaaagtaaaaagaatacaaaaatgagaatagttatagtcaatactgctacaggtatagcaaatcataaaaagaaaaaag

SEQ ID NO: 13115 - DNA, 1139 bp, Glycine max; identical to SEQ ID NO: 13114
  Gm_smallRNAprecursor_5948

SEQ ID NO: 13116 - DNA, 1135 bp, Glycine max
  Gm_smallRNAprecursor_5949
cctttattgaccttcattttctttttttttttatgatttgctatacctgtagcagtattgactataactattctcatttttgtattctttttacttttgattaatttattatttactctgaagaaatatacttatgtcattttttctgctcaactccagatgataatatgtcattcaaaaaagtgaagggactgaatgcatttttgacttgcagaaaaccagtatatatggtactatttagagtatgtgctttatttcactagattctggacaacctagcaaagagcttaatcctgtattagctattattctacaaaggtatgatgattcatttatttggccattatgaatagtttattctaaagtcttgaagacagtcctaaatttgaaatagcttttgttttttttgtcttttgtttcttttgtattagctattattctacaaaggtatgatttcctttatcaaatactcttacttcaaccatcctctcatgtaactcctgtttgcactaaagattgtccaaaaggaatattgttttatgcagaagacaaattacatcggataagaaaaatcacaccacataattgctgcattgctttagatctctatttctgcataaaacaatattccttttggacaatctttagtgcaaacaggagtcacatgagaggatggttgaattaagagtatttgacaaaggaaatcatacctttgtagaataatagctaatacaaaaaaaacaaaagacgaaagaaacaaaagctatttcaaatttaggactgtcttcaagactttagaataaactattcataatggtcaaataaatgaatcatcatacctttgtagaataatagctaataaaggattaagctccttgctaggttgtccagaatctagtgaaataaagcacatactccaaatagtaccatatatactggttttctacaagtcaaaaatgcattcagtcccttcactttttgaatgatatattatcatctggagttgaacagaaaaaatgacataagtatatttcttcagaataaataacaaattaatcaaaagtaaaaagaatacaaaaatgagaatagttatagtcaatactgctacaggtatagcaaatcataaaaagaaaaa

SEQ ID NO: 13117 - DNA, 1129 bp, Glycine max
  Gm_smallRNAprecursor_5950
tttattgaccttcattttctttttttttttatgatttgctatacctgtagcagtattgactataactattctcatttttgtattctttttacttttgattaatttattatttactctgaagaaatatacttatgtcattttttctgctcaactccagatgataatatgtcattcaaaaaagtgaagggactgaatgcatttttgacttgcagaaaaccagtatatatggtactatttagagtatgtgctttatttcactagattctggacaacctagcaaagagcttaatcctgtattagctattattctacaaaggtatgatgattcatttatttggccattatgaatagtttattctaaagtcttgaagacagtcctaaatttgaaatagcttttgttttttttgtcttttgtttcttttgtattagctattattctacaaaggtatgatttcctttatcaaatactcttacttcaaccatcctctcatgtaactcctgtttgcactaaagattgtccaaaaggaatattgttttatgcagaagacaaattacatcggataagaaaaatcacaccacataattgctgcattgctttagatctctatttctgcataaaacaatattccttttggacaatctttagtgcaaacaggagtcacatgagaggatggttgaattaagagtatttgacaaaggaaatcatacctttgtagaataatagctaatacaaaaaaaacaaaagacgaaagaaacaaaagctatttcaaatttaggactgtcttcaagactttagaataaactattcataatggtcaaataaatgaatcatcatacctttgtagaataatagctaataaaggattaagctccttgctaggttgtccagaatctagtgaaataaagcacatactccaaatagtaccatatatactggttttctacaagtcaaaaatgcattcagtcccttcactttttgaatgatatattatcatctggagttgaacagaaaaaatgacataagtatatttcttcagaataaataacaaattaatcaaaagtaaaaagaatacaaaaatgagaatagttatagtcaatactgctacaggtatagcaaatcataaaaaga

SEQ ID NO: 13118 - DNA, 1129 bp, Glycine max; identical to SEQ ID NO: 13117
  Gm_smallRNAprecursor_5951

SEQ ID NO: 13119 - DNA, 1130 bp, Glycine max
  Gm_smallRNAprecursor_5952
tttattgaccttcattttctttttttttttatgatttgctatacctgtagcagtattgactataactattctcatttttgtattctttttacttttgattaatttattatttactctgaagaaatatacttatgtcattttttctgctcaactccagatgataatatgtcattcaaaaaagtgaagggactgaatgcatttttgacttgcagaaaaccagtatatatggtactatttagagtatgtgctttatttcactagattctggacaacctagcaaagagcttaatcctgtattagctattattctacaaaggtatgatgattcatttatttggccattatgaatagtttattctaaagtcttgaagacagtcctaaatttgaaatagcttttgttttttttgtcttttgtttcttttgtattagctattattctacaaaggtatgatttcctttatcaaatactcttacttcaaccatcctctcatgtaactcctgtttgcactaaagattgtccaaaaggaatattgttttatgcagaagacaaattacatcggataagaaaaatcacaccacataattgctgcattgctttagatctctatttctgcataaaacaatattccttttggacaatctttagtgcaaacaggagtcacatgagaggatggttgaattaagagtatttgacaaaggaaatcatacctttgtagaataatagctaatacaaaaaaaacaaaagacgaaagaaacaaaagctatttcaaatttaggactgtcttcaagactttagaataaactattcataatggtcaaataaatgaatcatcatacctttgtagaataatagctaataaaggattaagctccttgctaggttgtccagaatctagtgaaataaagcacatactccaaatagtaccatatatactggttttctacaagtcaaaaatgcattcagtcccttcactttttgaatgatatattatcatctggagttgaacagaaaaaatgacataagtatatttcttcagaataaataacaaattaatcaaaagtaaaaagaatacaaaaatgagaatagttatagtcaatactgctacaggtatagcaaatcataaaaagaa

SEQ ID NO: 13120 - DNA, 1173 bp, Glycine max
  Gm_smallRNAprecursor_5953
tttattgaccttcattttctttttttttttatgatttgctatacctgtagcagtattgactataactattctcatttttgtattctttttacttttgattaatttattatttactctgaagaaatatacttatgtcattttttctgctcaactccagatgataatatgtcattcaaaaaagtgaagggactgaatgcatttttgacttgcagaaaaccagtatatatggtactatttagagtatgtgctttatttcactagattctggacaacctagcaaagagcttaatcctgtattagctattattctacaaaggtatgatgattcatttatttggccattatgaatagtttattctaaagtcttgaagacagtcctaaatttgaaatagcttttgttttttttgtcttttgtttcttttgtattagctattattctacaaaggtatgatttcctttatcaaatactcttacttcaaccatcctctcatgtaactcctgtttgcactaaagattgtccaaaaggaatattgttttatgcagaagacaaattacatcggataagaaaaatcacaccacataattgctgcattgctttagatctctatttctgcataaaacaatattccttttggacaatctttagtgcaaacaggagtcacatgagaggatggttgaattaagagtatttgacaaaggaaatcatacctttgtagaataatagctaatacaaaaaaaacaaaagacgaaagaaacaaaagctatttcaaatttaggactgtcttcaagactttagaataaactattcataatggtcaaataaatgaatcatcatacctttgtagaataatagctaataaaggattaagctccttgctaggttgtccagaatctagtgaaataaagcacatactccaaatagtaccatatatactggttttctacaagtcaaaaatgcattcagtcccttcactttttgaatgatatattatcatctggagttgaacagaaaaaatgacataagtatatttcttcagaataaataacaaattaatcaaaagtaaaaagaatacaaaaatgagaatagttatagtcaatactgctacaggtatagcaaatcataaaaagaaaaaagaaaatgaaggtcaataaaggaaatcaagacattagatc

SEQ ID NO: 13121 - DNA, 1128 bp, Glycine max
  Gm_smallRNAprecursor_5954
ttattgaccttcattttctttttttttttatgatttgctatacctgtagcagtattgactataactattctcatttttgtattctttttacttttgattaatttattatttactctgaagaaatatacttatgtcattttttctgctcaactccagatgataatatgtcattcaaaaaagtgaagggactgaatgcatttttgacttgcagaaaaccagtatatatggtactatttagagtatgtgctttatttcactagattctggacaacctagcaaagagcttaatcctgtattagctattattctacaaaggtatgatgattcatttatttggccattatgaatagtttattctaaagtcttgaagacagtcctaaatttgaaatagcttttgttttttttgtcttttgtttcttttgtattagctattattctacaaaggtatgatttcctttatcaaatactcttacttcaaccatcctctcatgtaactcctgtttgcactaaagattgtccaaaaggaatattgttttatgcagaagacaaattacatcggataagaaaaatcacaccacataattgctgcattgctttagatctctatttctgcataaaacaatattccttttggacaatctttagtgcaaacaggagtcacatgagaggatggttgaattaagagtatttgacaaaggaaatcatacctttgtagaataatagctaatacaaaaaaaacaaaagacgaaagaaacaaaagctatttcaaatttaggactgtcttcaagactttagaataaactattcataatggtcaaataaatgaatcatcatacctttgtagaataatagctaataaaggattaagctccttgctaggttgtccagaatctagtgaaataaagcacatactccaaatagtaccatatatactggttttctacaagtcaaaaatgcattcagtcccttcactttttgaatgatatattatcatctggagttgaacagaaaaaatgacataagtatatttcttcagaataaataacaaattaatcaaaagtaaaaagaatacaaaaatgagaatagttatagtcaatactgctacaggtatagcaaatcataaaaaga

SEQ ID NO: 13122 - DNA, 1128 bp, Glycine max; identical to SEQ ID NO: 13121
  Gm_smallRNAprecursor_5955

SEQ ID NO: 13123 - DNA, 1127 bp, Glycine max
  Gm_smallRNAprecursor_5956
tattgaccttcattttctttttttttttatgatttgctatacctgtagcagtattgactataactattctcatttttgtattctttttacttttgattaatttattatttactctgaagaaatatacttatgtcattttttctgctcaactccagatgataatatgtcattcaaaaaagtgaagggactgaatgcatttttgacttgcagaaaaccagtatatatggtactatttagagtatgtgctttatttcactagattctggacaacctagcaaagagcttaatcctgtattagctattattctacaaaggtatgatgattcatttatttggccattatgaatagtttattctaaagtcttgaagacagtcctaaatttgaaatagcttttgttttttttgtcttttgtttcttttgtattagctattattctacaaaggtatgatttcctttatcaaatactcttacttcaaccatcctctcatgtaactcctgtttgcactaaagattgtccaaaaggaatattgttttatgcagaagacaaattacatcggataagaaaaatcacaccacataattgctgcattgctttagatctctatttctgcataaaacaatattccttttggacaatctttagtgcaaacaggagtcacatgagaggatggttgaattaagagtatttgacaaaggaaatcatacctttgtagaataatagctaatacaaaaaaaacaaaagacgaaagaaacaaaagctatttcaaatttaggactgtcttcaagactttagaataaactattcataatggtcaaataaatgaatcatcatacctttgtagaataatagctaataaaggattaagctccttgctaggttgtccagaatctagtgaaataaagcacatactccaaatagtaccatatatactggttttctacaagtcaaaaatgcattcagtcccttcactttttgaatgatatattatcatctggagttgaacagaaaaaatgacataagtatatttcttcagaataaataacaaattaatcaaaagtaaaaagaatacaaaaatgagaatagttatagtcaatactgctacaggtatagcaaatcataaaaaga

SEQ ID NO: 13124 - DNA, 1127 bp, Glycine max; identical to SEQ ID NO: 13123
  Gm_smallRNAprecursor_5957

SEQ ID NO: 13125 - DNA, 1118 bp, Glycine max
  Gm_smallRNAprecursor_5958
gaccttcattttctttttttttttatgatttgctatacctgtagcagtattgactataactattctcatttttgtattctttttacttttgattaatttattatttactctgaagaaatatacttatgtcattttttctgctcaactccagatgataatatgtcattcaaaaaagtgaagggactgaatgcatttttgacttgcagaaaaccagtatatatggtactatttagagtatgtgctttatttcactagattctggacaacctagcaaagagcttaatcctgtattagctattattctacaaaggtatgatgattcatttatttggccattatgaatagtttattctaaagtcttgaagacagtcctaaatttgaaatagcttttgttttttttgtcttttgtttcttttgtattagctattattctacaaaggtatgatttcctttatcaaatactcttacttcaaccatcctctcatgtaactcctgtttgcactaaagattgtccaaaaggaatattgttttatgcagaagacaaattacatcggataagaaaaatcacaccacataattgctgcattgctttagatctctatttctgcataaaacaatattccttttggacaatctttagtgcaaacaggagtcacatgagaggatggttgaattaagagtatttgacaaaggaaatcatacctttgtagaataatagctaatacaaaaaaaacaaaagacgaaagaaacaaaagctatttcaaatttaggactgtcttcaagactttagaataaactattcataatggtcaaataaatgaatcatcatacctttgtagaataatagctaataaaggattaagctccttgctaggttgtccagaatctagtgaaataaagcacatactccaaatagtaccatatatactggttttctacaagtcaaaaatgcattcagtcccttcactttttgaatgatatattatcatctggagttgaacagaaaaaatgacataagtatatttcttcagaataaataacaaattaatcaaaagtaaaaagaatacaaaaatgagaatagttatagtcaatactgctacaggtatagcaaatcataa

SEQ ID NO: 13126 - DNA, 1167 bp, Glycine max
  Gm_smallRNAprecursor_5959
gaccttcattttctttttttttttatgatttgctatacctgtagcagtattgactataactattctcatttttgtattctttttacttttgattaatttattatttactctgaagaaatatacttatgtcattttttctgctcaactccagatgataatatgtcattcaaaaaagtgaagggactgaatgcatttttgacttgcagaaaaccagtatatatggtactatttagagtatgtgctttatttcactagattctggacaacctagcaaagagcttaatcctgtattagctattattctacaaaggtatgatgattcatttatttggccattatgaatagtttattctaaagtcttgaagacagtcctaaatttgaaatagcttttgttttttttgtcttttgtttcttttgtattagctattattctacaaaggtatgatttcctttatcaaatactcttacttcaaccatcctctcatgtaactcctgtttgcactaaagattgtccaaaaggaatattgttttatgcagaagacaaattacatcggataagaaaaatcacaccacataattgctgcattgctttagatctctatttctgcataaaacaatattccttttggacaatctttagtgcaaacaggagtcacatgagaggatggttgaattaagagtatttgacaaaggaaatcatacctttgtagaataatagctaatacaaaaaaaacaaaagacgaaagaaacaaaagctatttcaaatttaggactgtcttcaagactttagaataaactattcataatggtcaaataaatgaatcatcatacctttgtagaataatagctaataaaggattaagctccttgctaggttgtccagaatctagtgaaataaagcacatactccaaatagtaccatatatactggttttctacaagtcaaaaatgcattcagtcccttcactttttgaatgatatattatcatctggagttgaacagaaaaaatgacataagtatatttcttcagaataaataacaaattaatcaaaagtaaaaagaatacaaaaatgagaatagttatagtcaatactgctacaggtatagcaaatcataaaaagaaaaaagaaaatgaaggtcaataaaggaaatcaagacattagatc

SEQ ID NO: 13127 - DNA, 1040 bp, Glycine max
  Gm_smallRNAprecursor_5960
tcaaaaaagtgaagggactgaatgcatttttgacttgcagaaaaccagtatatatggtactatttagagtatgtgctttatttcactagattctggacaacctagcaaagagcttaatcctgtattagctattattctacaaaggtatgatgattcatttatttggccattatgaatagtttattctaaagtcttgaagacagtcctaaatttgaaatagcttttgttttttttgtcttttgtttcttttgtattagctattattctacaaaggtatgatttcctttatcaaatactcttacttcaaccatcctctcatgtaactcctgtttgcactaaagattgtccaaaaggaatattgttttatgcagaagacaaattacatcggataagaaaaatcacaccacataattgctgcattgctttagatctctatttctgcataaaacaatattccttttggacaatctttagtgcaaacaggagtcacatgagaggatggttgaattaagagtatttgacaaaggaaatcatacctttgtagaataatagctaatacaaaaaaaacaaaagacgaaagaaacaaaagctatttcaaatttaggactgtcttcaagactttagaataaactattcataatggtcaaataaatgaatcatcatacctttgtagaataatagctaataaaggattaagctccttgctaggttgtccagaatctagtgaaataaagcacatactccaaatagtaccatatatactggttttctacaagtcaaaaatgcattcagtcccttcactttttgaatgatatattatcatctggagttgaacagaaaaaatgacataagtatatttcttcagaataaataacaaattaatcaaaagtaaaaagaatacaaaaatgagaatagttatagtcaatactgctacaggtatagcaaatcataaaaagaaaaaagaaaatgaaggtcaataaaggaaatcaagacattagatccttccaatctttttgtgaaatattagctgaaccaaacaa

SEQ ID NO: 13128 - DNA, 1218 bp, Glycine max
  Gm_smallRNAprecursor_5961
gcagaaaaccagtatatatggtactatttagagtatgtgctttatttcactagattctggacaacctagcaaagagcttaatcctgtattagctattattctacaaaggtatgatgattcatttatttggccattatgaatagtttattctaaagtcttgaagacagtcctaaatttgaaatagcttttgttttttttgtcttttgtttcttttgtattagctattattctacaaaggtatgatttcctttatcaaatactcttacttcaaccatcctctcatgtaactcctgtttgcactaaagattgtccaaaaggaatattgttttatgcagaagacaaattacatcggataagaaaaatcacaccacataattgctgcattgctttagatctctatttctgcataaaacaatattccttttggacaatctttagtgcaaacaggagtcacatgagaggatggttgaattaagagtatttgacaaaggaaatcatacctttgtagaataatagctaatacaaaaaaaacaaaagacgaaagaaacaaaagctatttcaaatttaggactgtcttcaagactttagaataaactattcataatggtcaaataaatgaatcatcatacctttgtagaataatagctaataaaggattaagctccttgctaggttgtccagaatctagtgaaataaagcacatactccaaatagtaccatatatactggttttctacaagtcaaaaatgcattcagtcccttcactttttgaatgatatattatcatctggagttgaacagaaaaaatgacataagtatatttcttcagaataaataacaaattaatcaaaagtaaaaagaatacaaaaatgagaatagttatagtcaatactgctacaggtatagcaaatcataaaaagaaaaaagaaaatgaaggtcaataaaggaaatcaagacattagatccttccaatctttttgtgaaatattagctgaaccaaacaaaaattttgtcctacatacatggttagttgtcaaccagatggcatatacatccataaacagtcatatcatactcattcgcactatgctgacacactgcttttgaaaaatgcatgacagtataatagtttggaccttgtcaatgatatcatttccagtcattgacacagaaaacagccaactgatcttccagtcattgacacagaaaacagccaac

SEQ ID NO: 13129 - DNA, 1127 bp, Glycine max
  Gm_smallRNAprecursor_5962
gaaaaccagtatatatggtactatttagagtatgtgctttatttcactagattctggacaacctagcaaagagcttaatcctgtattagctattattctacaaaggtatgatgattcatttatttggccattatgaatagtttattctaaagtcttgaagacagtcctaaatttgaaatagcttttgttttttttgtcttttgtttcttttgtattagctattattctacaaaggtatgatttcctttatcaaatactcttacttcaaccatcctctcatgtaactcctgtttgcactaaagattgtccaaaaggaatattgttttatgcagaagacaaattacatcggataagaaaaatcacaccacataattgctgcattgctttagatctctatttctgcataaaacaatattccttttggacaatctttagtgcaaacaggagtcacatgagaggatggttgaattaagagtatttgacaaaggaaatcatacctttgtagaataatagctaatacaaaaaaaacaaaagacgaaagaaacaaaagctatttcaaatttaggactgtcttcaagactttagaataaactattcataatggtcaaataaatgaatcatcatacctttgtagaataatagctaataaaggattaagctccttgctaggttgtccagaatctagtgaaataaagcacatactccaaatagtaccatatatactggttttctacaagtcaaaaatgcattcagtcccttcactttttgaatgatatattatcatctggagttgaacagaaaaaatgacataagtatatttcttcagaataaataacaaattaatcaaaagtaaaaagaatacaaaaatgagaatagttatagtcaatactgctacaggtatagcaaatcataaaaagaaaaaagaaaatgaaggtcaataaaggaaatcaagacattagatccttccaatctttttgtgaaatattagctgaaccaaacaaaaattttgtcctacatacatggttagttgtcaaccagatggcatatacatccataaacagtcatatcatactcattcgcactatgctgacacactgcttttgaaaaatgcatgacagtataatagt

SEQ ID NO: 13130 - DNA, 1089 bp, Glycine max
  Gm_smallRNAprecursor_5963
gccattatgaatagtttattctaaagtcttgaagacagtcctaaatttgaaatagcttttgttttttttgtcttttgtttcttttgtattagctattattctacaaaggtatgatttcctttatcaaatactcttacttcaaccatcctctcatgtaactcctgtttgcactaaagattgtccaaaaggaatattgttttatgcagaagacaaattacatcggataagaaaaatcacaccacataattgctgcattgctttagatctctatttctgcataaaacaatattccttttggacaatctttagtgcaaacaggagtcacatgagaggatggttgaattaagagtatttgacaaaggaaatcatacctttgtagaataatagctaatacaaaaaaaacaaaagacgaaagaaacaaaagctatttcaaatttaggactgtcttcaagactttagaataaactattcataatggtcaaataaatgaatcatcatacctttgtagaataatagctaataaaggattaagctccttgctaggttgtccagaatctagtgaaataaagcacatactccaaatagtaccatatatactggttttctacaagtcaaaaatgcattcagtcccttcactttttgaatgatatattatcatctggagttgaacagaaaaaatgacataagtatatttcttcagaataaataacaaattaatcaaaagtaaaaagaatacaaaaatgagaatagttatagtcaatactgctacaggtatagcaaatcataaaaagaaaaaagaaaatgaaggtcaataaaggaaatcaagacattagatccttccaatctttttgtgaaatattagctgaaccaaacaaaaattttgtcctacatacatggttagttgtcaaccagatggcatatacatccataaacagtcatatcatactcattcgcactatgctgacacactgcttttgaaaaatgcatgacagtataatagtttggaccttgtcaatgatatcatttccagtcattgacacagaaaacagccaactgatcttccagtcattgacacagaaaacagccaac

SEQ ID NO: 13131 - DNA, 1046 bp, Glycine max
  Gm_smallRNAprecursor_5964
aggtatgtcgaatggttagcaaatatagtccctgtcattaaaaagaatggaactcttagagtatgcatagattttagggatttaaataatgctacacctaaagatgaatatgctatgccagtagcggaaatgttggtagattcagcagctggcttcgaatttttaagcatgttagatggttattctggttataaccaaatatttattgctgaaagtgatgtgtcaaaaacagcatttcgatgccctggtgctttaggcacttatgaatgggtggttatgccctttgggttgaaaaatgctggggccacttatcaaagggccatgaattccatgtttcatgattttattgacacatttatgcaagtttatattgatgatataatcatcaaatcctcctcataagatagccatttggattaccttaggcaatctttcgaacgaatgaggaaacatggattaaaaatgaatccattaaagtgtgctttttgtgtgcgtgcaggagatttccttggttttgtggtgcataaaaaaggcattgagataaatcaaaacaagacaaaggctattcttgagacgaagcctccttcgaccaaaaaacagcttcagtctttgctaggaaaaatcaacttcttgaggcgattcatctcgaatctaagtggcaaagctcaaattttttcgccattacttcgactcaagaaaaatgaaccattcaaatgggatgaagtgcatcaaaaggctttcgatgaaattaaagaatatctgatcaagcctcctgtgttaatgcctcctagtcgaaacaagactatgaagttgtatattgctgcgtctgacaagaccattggtagcatgttggctcaggaagatgatgatggcgtagagcatgcaatttattatcttagtcgtgtactaaatgatgcagaaactagatataatgccatagaaaaactttgtctttgtttgtatttctcttgtgcaaaacttaagcaatatataaagcctgttgatgtttatgtatattctcattatgatattattaagcacatgtt

SEQ ID NO: 13132 - DNA, 1176 bp, Glycine max
  Gm_smallRNAprecursor_5965
agccacaatctgacccttaacagatttcaaaggcttgtacgttaaagaatattctgttaatgctaaagcccattttccaattctactgtgtaaaatcggttttgacaacatgtgtttaataatatcataatgagaatacacataaacatcaacaggctttatatattgcttaagttttgcacaagagaaatacagacaaagacaaagtttttctatggcagtatatctagtttctgcatcatttagtacacgactaagataataaattgcatgttctatgccatcatcatcttcctgagccaacatgctaccaatggtcttgtcagacgcagcaatatacaacttcatagacttgtttcgactaggaggcattaacacaggaggcttgatcagatattctttaatttcatcgaaagccttttgatgctcttcattccatttgaatggttcatctttcttgagtcgaagtaatggcgaaaaaatctgagctttgccacttagattcgaaatgaatcgcctcaagaagttgatttttcctagcaaagactgaagctgttttttggtcgaaggaggcttcgtctcaagaatagcctttgtcttattttgatttatctcaatgccttttttatgcaccacaaaaccaaggaaatctcctgcacgtacacaaaaagcacactttaatggattcatttttaatccatgtttcctcattcgttcgaaagattgccttagataatccaaatggctatcttctgaggaggatttgatgattatatcatcaatataaatttgcataaatgtgtcaataaaatcatgaaacatggaattcatggccctttgataagtggccccagcatttttcaacccaaagggcataaccacccattcataagtgcctaaagcaccagggcatcgaaatgctgttttcgacacatcatcttcagcaataaatatttggttataaccagaataaccatctaacatgcttaaaaattcgaaaccagctgccgaatctaccaacatttccgctactggcatagcatattcatctttaggtgtagcattatttaaatccctaaaatctatgcatactctaagagttccattctttttaatgacagggactatatttgctaaccattcgacatacctggcagccctgatgaatttacacct

SEQ ID NO: 13133 - DNA, 1157 bp, Glycine max
  Gm_smallRNAprecursor_5966
caattctactgtgtaaaatcggttttgacaacatgtgtttaataatatcataatgagaatacacataaacatcaacaggctttatatattgcttaagttttgcacaagagaaatacagacaaagacaaagtttttctatggcagtatatctagtttctgcatcatttagtacacgactaagataataaattgcatgttctatgccatcatcatcttcctgagccaacatgctaccaatggtcttgtcagacgcagcaatatacaacttcatagacttgtttcgactaggaggcattaacacaggaggcttgatcagatattctttaatttcatcgaaagccttttgatgctcttcattccatttgaatggttcatctttcttgagtcgaagtaatggcgaaaaaatctgagctttgccacttagattcgaaatgaatcgcctcaagaagttgatttttcctagcaaagactgaagctgttttttggtcgaaggaggcttcgtctcaagaatagcctttgtcttattttgatttatctcaatgccttttttatgcaccacaaaaccaaggaaatctcctgcacgtacacaaaaagcacactttaatggattcatttttaatccatgtttcctcattcgttcgaaagattgccttagataatccaaatggctatcttctgaggaggatttgatgattatatcatcaatataaatttgcataaatgtgtcaataaaatcatgaaacatggaattcatggccctttgataagtggccccagcatttttcaacccaaagggcataaccacccattcataagtgcctaaagcaccagggcatcgaaatgctgttttcgacacatcatcttcagcaataaatatttggttataaccagaataaccatctaacatgcttaaaaattcgaaaccagctgccgaatctaccaacatttccgctactggcatagcatattcatctttaggtgtagcattatttaaatccctaaaatctatgcatactctaagagttccattctttttaatgacagggactatatttgctaaccattcgacatacctggcagccctgatgaatttacacctcagcagcctttcgatctcttccttaatcttggacatgatttctggtgcgaatcttctt

SEQ ID NO: 13134 - DNA, 1058 bp, Glycine max
  Gm_smallRNAprecursor_5967
aaatgtattataaaatagttagtattttaatttttaatataatactaattatttttttatttatattctttataatattaatgatatgattaattataaaaataaaaaataaattaatgatgataatattaattttataaaattattattatcttttatctatttattgatttttattaatatgtataaaataaccttaaacaataattataatgggactgagtaagtattttaatatcatcttctaaaaaaatttattctaaaaaaatatattataaaattaattatttataataaatcaatatttataaatatattataattaataaaataaatatctttaaatgtataaattatattttaaatttttaataaacaattacggatcaagttgatccgtaagcttattacagatcaacttgatccgaaagctggcgtctcactcttatggatcaacttgatccgaaagttatggatcaacttgatctggaagttacggatcaagttgatccggaagtctcttacagatcaaattgatccataagtctcttaccgatcaagttgatccgtaagtctcttacgaatcaatgtacggatcaacttgatctgcaagaggaaaaattagcagggacaattttgtcatttttaaataatgttgggtgcactcagcaacactctaaccttttttaatgggttttttttggcttaaaaaaagtttagattaaggaaagaagcccccttgtacgccctttttcaaaagtataataaaactcattaaataggtttaaaaacctatttttaaagagactaataagactaaacttatagtaaaatctcccctctcaaccattcaaaccaacgttgatagcaacgttaagcgtttaaatacaacagatacaaatatcgtaccattacattacaaatttgtttcttgtacacccatagaatgaatggacaaatatgtggttcccttcccttccctttcctcctcccagccaacatcttccacagccgccaccgctacctaaccacagcaccaccagatctgccacccaata

SEQ ID NO: 13135 - DNA, 1056 bp, Glycine max
  Gm_smallRNAprecursor_5968
aatgtattataaaatagttagtattttaatttttaatataatactaattatttttttatttatattctttataatattaatgatatgattaattataaaaataaaaaataaattaatgatgataatattaattttataaaattattattatcttttatctatttattgatttttattaatatgtataaaataaccttaaacaataattataatgggactgagtaagtattttaatatcatcttctaaaaaaatttattctaaaaaaatatattataaaattaattatttataataaatcaatatttataaatatattataattaataaaataaatatctttaaatgtataaattatattttaaatttttaataaacaattacggatcaagttgatccgtaagcttattacagatcaacttgatccgaaagctggcgtctcactcttatggatcaacttgatccgaaagttatggatcaacttgatctggaagttacggatcaagttgatccggaagtctcttacagatcaaattgatccataagtctcttaccgatcaagttgatccgtaagtctcttacgaatcaatgtacggatcaacttgatctgcaagaggaaaaattagcagggacaattttgtcatttttaaataatgttgggtgcactcagcaacactctaaccttttttaatgggttttttttggcttaaaaaaagtttagattaaggaaagaagcccccttgtacgccctttttcaaaagtataataaaactcattaaataggtttaaaaacctatttttaaagagactaataagactaaacttatagtaaaatctcccctctcaaccattcaaaccaacgttgatagcaacgttaagcgtttaaatacaacagatacaaatatcgtaccattacattacaaatttgtttcttgtacacccatagaatgaatggacaaatatgtggttcccttcccttccctttcctcctcccagccaacatcttccacagccgccaccgctacctaaccacagcaccaccagatctgccacccaat

SEQ ID NO: 13136 - DNA, 1055 bp, Glycine max
  Gm_smallRNAprecursor_5969
atgtattataaaatagttagtattttaatttttaatataatactaattatttttttatttatattctttataatattaatgatatgattaattataaaaataaaaaataaattaatgatgataatattaattttataaaattattattatcttttatctatttattgatttttattaatatgtataaaataaccttaaacaataattataatgggactgagtaagtattttaatatcatcttctaaaaaaatttattctaaaaaaatatattataaaattaattatttataataaatcaatatttataaatatattataattaataaaataaatatctttaaatgtataaattatattttaaatttttaataaacaattacggatcaagttgatccgtaagcttattacagatcaacttgatccgaaagctggcgtctcactcttatggatcaacttgatccgaaagttatggatcaacttgatctggaagttacggatcaagttgatccggaagtctcttacagatcaaattgatccataagtctcttaccgatcaagttgatccgtaagtctcttacgaatcaatgtacggatcaacttgatctgcaagaggaaaaattagcagggacaattttgtcatttttaaataatgttgggtgcactcagcaacactctaaccttttttaatgggttttttttggcttaaaaaaagtttagattaaggaaagaagcccccttgtacgccctttttcaaaagtataataaaactcattaaataggtttaaaaacctatttttaaagagactaataagactaaacttatagtaaaatctcccctctcaaccattcaaaccaacgttgatagcaacgttaagcgtttaaatacaacagatacaaatatcgtaccattacattacaaatttgtttcttgtacacccatagaatgaatggacaaatatgtggttcccttcccttccctttcctcctcccagccaacatcttccacagccgccaccgctacctaaccacagcaccaccagatctgccacccaat

SEQ ID NO: 13137 - DNA, 1044 bp, Glycine max
  Gm_smallRNAprecursor_5970
aatagttagtattttaatttttaatataatactaattatttttttatttatattctttataatattaatgatatgattaattataaaaataaaaaataaattaatgatgataatattaattttataaaattattattatcttttatctatttattgatttttattaatatgtataaaataaccttaaacaataattataatgggactgagtaagtattttaatatcatcttctaaaaaaatttattctaaaaaaatatattataaaattaattatttataataaatcaatatttataaatatattataattaataaaataaatatctttaaatgtataaattatattttaaatttttaataaacaattacggatcaagttgatccgtaagcttattacagatcaacttgatccgaaagctggcgtctcactcttatggatcaacttgatccgaaagttatggatcaacttgatctggaagttacggatcaagttgatccggaagtctcttacagatcaaattgatccataagtctcttaccgatcaagttgatccgtaagtctcttacgaatcaatgtacggatcaacttgatctgcaagaggaaaaattagcagggacaattttgtcatttttaaataatgttgggtgcactcagcaacactctaaccttttttaatgggttttttttggcttaaaaaaagtttagattaaggaaagaagcccccttgtacgccctttttcaaaagtataataaaactcattaaataggtttaaaaacctatttttaaagagactaataagactaaacttatagtaaaatctcccctctcaaccattcaaaccaacgttgatagcaacgttaagcgtttaaatacaacagatacaaatatcgtaccattacattacaaatttgtttcttgtacacccatagaatgaatggacaaatatgtggttcccttcccttccctttcctcctcccagccaacatcttccacagccgccaccgctacctaaccacagcaccaccagatctgccacccaat

SEQ ID NO: 13138 - DNA, 1154 bp, Glycine max
  Gm_smallRNAprecursor_5971
ctatgcatgatatatattgaaagaactaagctaataatactaaaaattgtaattcatgacaaacttcttaagttataatatatttttatcacttgtttttacaatctaaatatatttataattttttctttatatatatatatatatatatatatatatatatatatatatatatatatatatatatatattaccaagaatcattacgttcaatgctatgagaataatcaagaggtcggagaggtgattgggtaaaataattccatgcatgacatattgatatattaggattcaaatttataatattacagataaagtttaagaaaccgaagcggcggtagagccgcacaggatcggtgaggggagaagggagatgtggaaaatagaacttgaaatttattgaaaccaaaagaaaagcttacaaagagtttttccctaggcagagcttctctctctaaaaacctgattctgagactatctcaaagggtgcctcacaacgggaacgaggactcctttaaatagactcaatttttactgtttctacagtgtcggtaatgtttaccggaactgttacaaattacattatttaaaagaaactgacaaattagttacaataattcatgattactacaactaattaatcgtcgtctaatgatataccaaaacagtcatcttcattctggtagaatggatcatcttcttggtcatcattagtctcggatgattcagcttccttctttgaaggttcttcttccacttcctgttgaagtagttggagaacttctttgagattctgagtaagactctctttagattttgagcttgctaagaatgctgccagttgcaacttctgatttagaaacaaagatgtctccggatcagcaggtttaaggaactcaggattgctctggaatcagttcttgacttaatctggagcagcctttgaagtatcgaattgtgaccaccattttacaaaggcgtgtctctgtagcggtggatattgcttgctgttttcagttccatgacaaggaaaaactggaaaagtactttaaatctgccggaatacgtgattccttgctattatagagcttgttgaattgttggaatccctgttggacttcttctgggaatatttatggaattggtccgaagta

SEQ ID NO: 13139 - DNA, 1184 bp, Glycine max
  Gm_smallRNAprecursor_5972
aaattagttacaataattcatgattactacaactaattaatcgtcgtctaatgatataccaaaacagtcatcttcattctggtagaatggatcatcttcttggtcatcattagtctcggatgattcagcttccttctttgaaggttcttcttccacttcctgttgaagtagttggagaacttctttgagattctgagtaagactctctttagattttgagcttgctaagaatgctgccagttgcaacttctgatttagaaacaaagatgtctccggatcagcaggtttaaggaactcaggattgctctggaatcagttcttgacttaatctggagcagcctttgaagtatcgaattgtgaccaccattttacaaaggcgtgtctctgtagcggtggatattgcttgctgttttcagttccatgacaaggaaaaactggaaaagtactttaaatctgccggaatacgtgattccttgctattatagagcttgttgaattgttggaatccctgttggacttcttctgggaatatttatggaattggtccgaagtagttccaccattggaggaaccaatttggaaaattatacgccgtattatttttgaagtaaatcagccatgaatgcttgaatttactattttgatgccagaacacattggtccaggcgtcaatgtaatcccaataattatatcctgcagggtcaaatggtgcataaatttttttgggttggtttaaatttgagccataatgttgtggctgcataacctttaagatttggattgtggaatgggtatttagatttggatctttggggtctttgaagtgtttaatagatactgagtttgtatctattagaatgaattcatagaatttgcgggttttgtttgtggctattggcctgtaatggaatcccggggggaatactttggcggttgctttgaaaggattcttgtccaagtattctggttccatttgtagaacattgaaaaatttgttttttgaaatataactgttgctgggttgtggcgttgattcttgttgagtcaacgattggcttggtttttggttacagacagttttggtctgtttggctttttggatttgtttttgcagatctgtttcagaatcatcgtctgattctgaggccatttctgcccaggtctttttggctaattttggtatt

SEQ ID NO: 13140 - DNA, 1127 bp, Glycine max
  Gm_smallRNAprecursor_5973
ggacaaattctcctacgtaatttagacaacctagaaatctttgtaattgggttttgtctaagatttggttgggaaatttgctagcaaactctattgatctttcgattggaatgattgtaccttggtaaatattgtggccaaggaatcgaattcgagtttggaaaagattgatctttgatttggagactgccaaaccattttgtttgatgatatggatgaaggtttggagatgtttgaaatgttggtcaatgttttgggaaaagattaaaacatcatctatgtagacaatgacaaattttgaatagggattaaaaatatcattcataattttttgaaattctgaaggggcattcttcagttcgaatggcatcacattccattcataatgcccgaaaggtacagtaaacgctgttttgtacctatctgattcttggatttggatttgccaaaatccagatttcatatcaaattttgaaaatatctttgcagaatttagtctgttaagcaaatcttttttgtttggaataggatatctaatccattgtaatgcttgatttagtggtttgtaatttatgaccaagcgaggtgttccacgctcaatctcagattgcttgttgacataaaaagccgcacaagaccatgggcttttgcttttccggattaggcctttatcaagcaaatccttgatttctttttgacaatactgaagaagttcttcattcatttggattggtctggctttggtgggaatttgtttttccctaaagtctttctcataagggagatcaacaatatgtttctttctatcccaaaatgcatgtggtaattcagaacagacgattgattcaatatgatctaataaagattaaattttttcttttacctggggttttcccagttgtgtctgaatattactaaaagatacttcttcttttaagaagttaatttgattaatcttattttctataagatttatatttctggaaattggtttagtagaaaaattaaatataatttttcttcctaaataatttgtggttattccttcattagatatttggatgggaagtagggctctaatgaaaggcgttcctaagattacctcattcttaaggttttttaccaga

SEQ ID NO: 13141 - DNA, 1159 bp, Glycine max
  Gm_smallRNAprecursor_5974
acccatctttcgggaagagttacttcatcccattttatttttctcgggagagaaacgttagcctttgtcatatcagtgataaacaaagttgtttctcctttttgaggttttaacaagactctagatgcacaagtattcatgaccttgtactggatcctataaattaaggctgctgggattgatccttctttcatgtcaaggccatgaaagtggatgtttaagaacagagagtcaagaatgtttctgtccatcagactcactattttgtttggataacaattaaaatatattggaccttgtcctaggctggtttcgactgttccaattagggagtcttcaaattgattatgcctaatgtctcttagacacattaaaactgttgcatctatgcccatatcaattaagggcttaatggctacttgtacacaaccgatgtgtagatatttatacttacggctatgttcataaattgaattttttgaaagtaaatgaaattcttcccctatatcttgtcctagaggaatattgttttctactgttttgattatgtaatcaaagttgtgtttgtccttaattgtttcaggaacgtatagttgatcctgagggatttctggaatgttccagtcatccatgttttgattgatatcttcgaatcggacttcctcatcgaagagattgtgttttgtgacgacctcttgggtctagttatcttgatcatttaataaattggagtttcttgaagaagatgatgaggaggagtttgagcgaaaagagatacgggaaaaagatcgtaatagtctagacatgattataatattctctaatatctttgccttcctttggttccatagaaatatctccgtaagtaaatatgtcacaaaatttttctggatctgaattatttttaagaaaaactctttttttttttgaatgatagtttgaacgccaatcctatagccaccagtatattatgtcttgtcttgatatttaggttaaatagtacaccttagccttaccgccctttatccatcacgggtcttactgctacagtaccattcaactaaaatattagactgctgtacttccaggaagtactgttcaaacatttactgtacaaatcaaaataaatattacttatactatacaaggtttcagatcc

SEQ ID NO: 13142 - DNA, 1197 bp, Glycine max
  Gm_smallRNAprecursor_5975
gttttaacaagactctagatgcacaagtattcatgaccttgtactggatcctataaattaaggctgctgggattgatccttctttcatgtcaaggccatgaaagtggatgtttaagaacagagagtcaagaatgtttctgtccatcagactcactattttgtttggataacaattaaaatatattggaccttgtcctaggctggtttcgactgttccaattagggagtcttcaaattgattatgcctaatgtctcttagacacattaaaactgttgcatctatgcccatatcaattaagggcttaatggctacttgtacacaaccgatgtgtagatatttatacttacggctatgttcataaattgaattttttgaaagtaaatgaaattcttcccctatatcttgtcctagaggaatattgttttctactgttttgattatgtaatcaaagttgtgtttgtccttaattgtttcaggaacgtatagttgatcctgagggatttctggaatgttccagtcatccatgttttgattgatatcttcgaatcggacttcctcatcgaagagattgtgttttgtgacgacctcttgggtctagttatcttgatcatttaataaattggagtttcttgaagaagatgatgaggaggagtttgagcgaaaagagatacgggaaaaagatcgtaatagtctagacatgattataatattctctaatatctttgccttcctttggttccatagaaatatctccgtaagtaaatatgtcacaaaatttttctggatctgaattatttttaagaaaaactctttttttttttgaatgatagtttgaacgccaatcctatagccaccagtatattatgtcttgtcttgatatttaggttaaatagtacaccttagccttaccgccctttatccatcacgggtcttactgctacagtaccattcaactaaaatattagactgctgtacttccaggaagtactgttcaaacatttactgtacaaatcaaaataaatattacttatactatacaaggtttcagatccataaaatttgttaacatatatccttacaaatagtattcctacttccccatcaggctctgataccaaagattagcggaataagatcaaacggacagataggaagtaagaatgcagtatgataaatgaggaaaatataaacttgta

SEQ ID NO: 13143 - DNA, 1186 bp, Glycine max
  Gm_smallRNAprecursor_5976
ttaccaatcacgaaatcaaaatcgagaaattttagatgaatggaaagagagagagagagagagagagactacgagaaacttcgagctggtcgaggaggagatgcgaaagaagatgtgggcggcgcaggtggtgttcggaattatgagggagcggtttgagacgacggtgacggtgtgagaagagggaatcaaatgaagaagggtgttgctaggtacacccatcattattactggtgcacccagcacttaacgtgaaaagacaaaaatactcttgcatatttttaaaaatgtttttatccacccagttcattcaggttgatccgcatatgcaatgagttgatctccagttgatatagatgatccgcaaacttcttacggatcaacttgatccgcaagtgacttacaaatcaacttgatccgtaaaaagtttgcagatcaacttgatctgtaagaagcttgcagatcaagttaatccgcgagttgatttttaagacttatggatcaagttgatccgtaagtcttttatgtatcaagttgatccgcgagttgatttttaagacttacaaatcaagttgatctgtaagtcttttacggatcaagttgatccgcgagttgattttcaagacatacagatcaagttgattcgtaagtcttttacggatcaaattaatccgcgagttgatttttaagacttacggatcaagttgatccataagtctttcacggatcaagttgatccgtaagtcttttacggatcaacaattggcagtacaaaaattataagcttcaaacggttgcaacttttgataaaaatgtccgtttgagacccataatatgttaaaatgctcaaaattgaaggaggaatcccccggtaaatttccaaaggggatttggtcaactcatttttccaaaaaatgcatctaagtagctgaaaaataggatttaagattaaaaaaaaataggatttggtcaacttgatctgtaagcttcttacatatcaacttgatccacaagttgatttttaagacttacagatcaggttgatccgtaaaatacttacggatcaacttgattcgtaagtcctaaaaatcaacttgcgaatcaacttgatccgtaaagggataaagaaggcaggagtaatttggtcatttttaaagaatgctgggtgcacctagcaacactcaat

SEQ ID NO: 13144 - DNA, 1052 bp, Glycine max
  Gm_smallRNAprecursor_5977
cgagctggtcgaggaggagatgcgaaagaagatgtgggcggcgcaggtggtgttcggaattatgagggagcggtttgagacgacggtgacggtgtgagaagagggaatcaaatgaagaagggtgttgctaggtacacccatcattattactggtgcacccagcacttaacgtgaaaagacaaaaatactcttgcatatttttaaaaatgtttttatccacccagttcattcaggttgatccgcatatgcaatgagttgatctccagttgatatagatgatccgcaaacttcttacggatcaacttgatccgcaagtgacttacaaatcaacttgatccgtaaaaagtttgcagatcaacttgatctgtaagaagcttgcagatcaagttaatccgcgagttgatttttaagacttatggatcaagttgatccgtaagtcttttatgtatcaagttgatccgcgagttgatttttaagacttacaaatcaagttgatctgtaagtcttttacggatcaagttgatccgcgagttgattttcaagacatacagatcaagttgattcgtaagtcttttacggatcaaattaatccgcgagttgatttttaagacttacggatcaagttgatccataagtctttcacggatcaagttgatccgtaagtcttttacggatcaacaattggcagtacaaaaattataagcttcaaacggttgcaacttttgataaaaatgtccgtttgagacccataatatgttaaaatgctcaaaattgaaggaggaatcccccggtaaatttccaaaggggatttggtcaactcatttttccaaaaaatgcatctaagtagctgaaaaataggatttaagattaaaaaaaaataggatttggtcaacttgatctgtaagcttcttacatatcaacttgatccacaagttgatttttaagacttacagatcaggttgatccgtaaaatacttacggatcaacttgattcgtaagtcctaaaaatcaacttgcgaatcaacttgatccgtaaagggataaagaaggca

SEQ ID NO: 13145 - DNA, 1052 bp, Glycine max; identical to SEQ ID NO: 13144
  Gm_smallRNAprecursor_5978

SEQ ID NO: 13146 - DNA, 1146 bp, Glycine max
  Gm_smallRNAprecursor_5979
cgagctggtcgaggaggagatgcgaaagaagatgtgggcggcgcaggtggtgttcggaattatgagggagcggtttgagacgacggtgacggtgtgagaagagggaatcaaatgaagaagggtgttgctaggtacacccatcattattactggtgcacccagcacttaacgtgaaaagacaaaaatactcttgcatatttttaaaaatgtttttatccacccagttcattcaggttgatccgcatatgcaatgagttgatctccagttgatatagatgatccgcaaacttcttacggatcaacttgatccgcaagtgacttacaaatcaacttgatccgtaaaaagtttgcagatcaacttgatctgtaagaagcttgcagatcaagttaatccgcgagttgatttttaagacttatggatcaagttgatccgtaagtcttttatgtatcaagttgatccgcgagttgatttttaagacttacaaatcaagttgatctgtaagtcttttacggatcaagttgatccgcgagttgattttcaagacatacagatcaagttgattcgtaagtcttttacggatcaaattaatccgcgagttgatttttaagacttacggatcaagttgatccataagtctttcacggatcaagttgatccgtaagtcttttacggatcaacaattggcagtacaaaaattataagcttcaaacggttgcaacttttgataaaaatgtccgtttgagacccataatatgttaaaatgctcaaaattgaaggaggaatcccccggtaaatttccaaaggggatttggtcaactcatttttccaaaaaatgcatctaagtagctgaaaaataggatttaagattaaaaaaaaataggatttggtcaacttgatctgtaagcttcttacatatcaacttgatccacaagttgatttttaagacttacagatcaggttgatccgtaaaatacttacggatcaacttgattcgtaagtcctaaaaatcaacttgcgaatcaacttgatccgtaaagggataaagaaggcaggagtaatttggtcatttttaaagaatgctgggtgcacctagcaacactcaatgaagaaagagacgggttgtgggggactcaaatgaaataata

SEQ ID NO: 13147 - DNA, 1054 bp, Glycine max
  Gm_smallRNAprecursor_5980
gttcggaattatgagggagcggtttgagacgacggtgacggtgtgagaagagggaatcaaatgaagaagggtgttgctaggtacacccatcattattactggtgcacccagcacttaacgtgaaaagacaaaaatactcttgcatatttttaaaaatgtttttatccacccagttcattcaggttgatccgcatatgcaatgagttgatctccagttgatatagatgatccgcaaacttcttacggatcaacttgatccgcaagtgacttacaaatcaacttgatccgtaaaaagtttgcagatcaacttgatctgtaagaagcttgcagatcaagttaatccgcgagttgatttttaagacttatggatcaagttgatccgtaagtcttttatgtatcaagttgatccgcgagttgatttttaagacttacaaatcaagttgatctgtaagtcttttacggatcaagttgatccgcgagttgattttcaagacatacagatcaagttgattcgtaagtcttttacggatcaaattaatccgcgagttgatttttaagacttacggatcaagttgatccataagtctttcacggatcaagttgatccgtaagtcttttacggatcaacaattggcagtacaaaaattataagcttcaaacggttgcaacttttgataaaaatgtccgtttgagacccataatatgttaaaatgctcaaaattgaaggaggaatcccccggtaaatttccaaaggggatttggtcaactcatttttccaaaaaatgcatctaagtagctgaaaaataggatttaagattaaaaaaaaataggatttggtcaacttgatctgtaagcttcttacatatcaacttgatccacaagttgatttttaagacttacagatcaggttgatccgtaaaatacttacggatcaacttgattcgtaagtcctaaaaatcaacttgcgaatcaacttgatccgtaaagggataaagaaggcaggagtaatttggtcatttttaaagaatgctgggtgcacctagcaacactcaat

SEQ ID NO: 13148 - DNA, 1054 bp, Glycine max; identical to SEQ ID NO: 13147
  Gm_smallRNAprecursor_5981

SEQ ID NO: 13149 - DNA, 1042 bp, Glycine max
  Gm_smallRNAprecursor_5982
gaatcaaatgaagaagggtgttgctaggtacacccatcattattactggtgcacccagcacttaacgtgaaaagacaaaaatactcttgcatatttttaaaaatgtttttatccacccagttcattcaggttgatccgcatatgcaatgagttgatctccagttgatatagatgatccgcaaacttcttacggatcaacttgatccgcaagtgacttacaaatcaacttgatccgtaaaaagtttgcagatcaacttgatctgtaagaagcttgcagatcaagttaatccgcgagttgatttttaagacttatggatcaagttgatccgtaagtcttttatgtatcaagttgatccgcgagttgatttttaagacttacaaatcaagttgatctgtaagtcttttacggatcaagttgatccgcgagttgattttcaagacatacagatcaagttgattcgtaagtcttttacggatcaaattaatccgcgagttgatttttaagacttacggatcaagttgatccataagtctttcacggatcaagttgatccgtaagtcttttacggatcaacaattggcagtacaaaaattataagcttcaaacggttgcaacttttgataaaaatgtccgtttgagacccataatatgttaaaatgctcaaaattgaaggaggaatcccccggtaaatttccaaaggggatttggtcaactcatttttccaaaaaatgcatctaagtagctgaaaaataggatttaagattaaaaaaaaataggatttggtcaacttgatctgtaagcttcttacatatcaacttgatccacaagttgatttttaagacttacagatcaggttgatccgtaaaatacttacggatcaacttgattcgtaagtcctaaaaatcaacttgcgaatcaacttgatccgtaaagggataaagaaggcaggagtaatttggtcatttttaaagaatgctgggtgcacctagcaacactcaatgaagaaagagacgggttgtgggggactcaaatgaaataata

SEQ ID NO: 13150 - DNA, 1092 bp, Glycine max
  Gm_smallRNAprecursor_5983
tgtaaaaaaatagatatagcataaaaatttgaagtaattaaagaatcaaatcaattcttgaaaaaatcatatcttaattagcatgtgtaactgttgtaacaatagttaatggcaaatcgaaaaaattactagctaagtcgcggacaatgtcgctttctttaagacgtttcatgacactgtcaaaaaatgtgcaagcagactatcaaccacgaggtcctcaggataaaacagctcagatcactgtataagattctcattgcactaagggaaccttttctagaattacaccctcttttatgacttgaaaagtcactctaaagccacccaaaaatatgacttgaaaagtcattctaacagccaaccgaaaatatgacttgaaaagtcactctaatagccaaccaaaaagtatgacttaaaaagtcactattatagtcaatcgaaaatatgacttaaaaagtcactcttatagccaaccgaaaaatatgacttaaaaagtcacacttatagccaaccgaaaatatgacttaaaaagtcactattatagccaatcgaaattttagagcgacagaaagaaagagggagaagtttgccggaaatgcatcgactgaaatatgggagggagaaagaaaagttgaggaaatgcttctcaactggggcaatgaaaaaaagaagaaacaagctctctatatatagggagtgaaacactattcaagtgtttatcgtgagcgatgtgggacttgaagcctttgtttttctcttttttttttcaaactttcatccacattctcttttgttctaacaatcccgcacttgaaatttgaaaagaagattttcgaggatttcataaaattgtgcataaacaaaggtgtcatacaacttgaacctttgcatagtgagtaagattcagattttactagagtgactcgaagtcttgaactctgtctccgacatcaaaccacacacaaccttttcataggtgtattttataaagcccgtacgttaaaggtcatgcacgtttatcccggtatagtgagcgctctagaaatttttgcccaaaatttcatatgaagcgacccccacttcaacattcac

SEQ ID NO: 13151 - DNA, 1093 bp, Glycine max
  Gm_smallRNAprecursor_5984
cctggaatataaaaccttcatttcggattaacctttgggagttgctaggtgcatccagcaatattgttggtgcacccagcaatttattgaaactatcattttacccttcattaaaaaagtttaaaatatttaaatagttttcttctcctctctcggaatcactcagccacttcttctttcttctgcttttcttcctttgcttacctcttccgcgagccttctcctccaccgcgagcccacctgctgcttctttcggttggacgccatttccgttcgaggtaggtgtccctaatcttccctttgcttttattatgcactgtagttgtagcatttagggtaggttagaagaaccttaggttaggggaaccttagggtagaagacgagagcaggagacgccggaaaaaatggggaaatggctgacggcggagtcttccggaagttccggaagaaccttttccggaaagtttccggaagaagtgttcttccggaagtaaccaaacgtcttccggaagaacacttcttccggaagactcccggaaaaggttcttccgggaactttccggaagaagtggttcatccggaagaatttcggaagacgccctcttccggaagaactttcaaatttccggaagaccttttcggaagaatcacttcttccggaatgtttccggaagaaccacttcttccggaagtggtttttttgttttttttttttgctttttattttttttttaatttttttaaacagaaattgttttgttttttttaaaatgaattattgtatttattttggttattttgttttttagattttatgaaaaatgaggtttgggtttttgatgtgatgttttttttataatttaaattgtgtatttttactaaatattaatttgtaaattatttgttttattacaaatgaagtattttattttctaaaaaaattgtggatgtttactaaataattttttttacattagttgtttaatttttttttaaaattaagttgtggatgtttagtaatgaattatttttatattagttgtgtttttttttttataaatgaagttgtttatttattttttttaaaaaaat

SEQ ID NO: 13152 - DNA, 1232 bp, Glycine max
  Gm_smallRNAprecursor_5985
tattaaatcatattgaatcaactatctgttctgattttccacatacattttgggaccgaaagaaacatattgttgatctcccttatgagaaagactttagggaaaaacaaattcccacaaaagccagaccaatccaaatgaatgaagaacttcttcaatactgccaaaaggaaatcaaggatttgcttgataaaggcttaatccggaaaagcaaaaacccatggtcttgtacggctttttatgtcaacaaacaatctgagattgagcgtggaacaccctgcttagtcctaaattacaaaccactaaaccaagcattacaatggattaggtatcctattccaaacaaaaaatatttgcttaacaaattaaattttgcaaagatattttgaaaatttgatatgaaatctggattttgggaaatccaaatccaagaatcagataggtacaaaacaacgtttgcccattcagaatttcaaaaaattatgaatgatatttttaatccctattcaaaatttgtcattgtctacatagatgatgttttaatcttttcccaaaacattgaccaacatttaaaacatctccaaactttcatccatatcatcaaacagaatggtttggcagtctccaaatcaaaaatcaatcttttccaaactcgaattcgattccttggtcacaatatatatcaaggtacaatcattccaatagaaaggtcaatagagattgctagcaaatttcccaaccaaatcttagacaaaacccagttacaaagatttctaggttgtctaaattatgtaggagaatttgtcccctatttagacaatattgtcaagccattgcatgataggctgaagaaaaatccgcctccttggtctgacctccatacacaaacagttaaagaaatcaaactcaaagtccaatccataaaatgtctgtatcttcctattccacaagcatttaaaattgtcgaaactgatgcatcagacataggttatggtggcatcatcaaacaaagagtccatgaccaagatcatgtcattccatatacatcaaaacattggaatcctgcacaattaaaatattcaactgttaaaaaggaagttttagcaattgttatgtgcatttccaaatttcaatcggatttattaaaccaaaattttttaatcagggttgattgtaaatcagcccaagatattttacaaaaagatgttaaaaaccttgcctcaaaacaaatt

SEQ ID NO: 13153 - DNA, 1048 bp, Glycine max
  Gm_smallRNAprecursor_5986
acggctttttatgtcaacaaacaatctgagattgagcgtggaacaccctgcttagtcctaaattacaaaccactaaaccaagcattacaatggattaggtatcctattccaaacaaaaaatatttgcttaacaaattaaattttgcaaagatattttgaaaatttgatatgaaatctggattttgggaaatccaaatccaagaatcagataggtacaaaacaacgtttgcccattcagaatttcaaaaaattatgaatgatatttttaatccctattcaaaatttgtcattgtctacatagatgatgttttaatcttttcccaaaacattgaccaacatttaaaacatctccaaactttcatccatatcatcaaacagaatggtttggcagtctccaaatcaaaaatcaatcttttccaaactcgaattcgattccttggtcacaatatatatcaaggtacaatcattccaatagaaaggtcaatagagattgctagcaaatttcccaaccaaatcttagacaaaacccagttacaaagatttctaggttgtctaaattatgtaggagaatttgtcccctatttagacaatattgtcaagccattgcatgataggctgaagaaaaatccgcctccttggtctgacctccatacacaaacagttaaagaaatcaaactcaaagtccaatccataaaatgtctgtatcttcctattccacaagcatttaaaattgtcgaaactgatgcatcagacataggttatggtggcatcatcaaacaaagagtccatgaccaagatcatgtcattccatatacatcaaaacattggaatcctgcacaattaaaatattcaactgttaaaaaggaagttttagcaattgttatgtgcatttccaaatttcaatcggatttattaaaccaaaattttttaatcagggttgattgtaaatcagcccaagatattttacaaaaagatgttaaaaaccttgcctcaaaacaaatttttgcaagatggtaagcaattcaaagtgtctttgattttgacatag

SEQ ID NO: 13154 - DNA, 1048 bp, Glycine max; identical to SEQ ID NO: 13153
  Gm_smallRNAprecursor_5987

SEQ ID NO: 13155 - DNA, 1049 bp, Glycine max
  Gm_smallRNAprecursor_5988
acggctttttatgtcaacaaacaatctgagattgagcgtggaacaccctgcttagtcctaaattacaaaccactaaaccaagcattacaatggattaggtatcctattccaaacaaaaaatatttgcttaacaaattaaattttgcaaagatattttgaaaatttgatatgaaatctggattttgggaaatccaaatccaagaatcagataggtacaaaacaacgtttgcccattcagaatttcaaaaaattatgaatgatatttttaatccctattcaaaatttgtcattgtctacatagatgatgttttaatcttttcccaaaacattgaccaacatttaaaacatctccaaactttcatccatatcatcaaacagaatggtttggcagtctccaaatcaaaaatcaatcttttccaaactcgaattcgattccttggtcacaatatatatcaaggtacaatcattccaatagaaaggtcaatagagattgctagcaaatttcccaaccaaatcttagacaaaacccagttacaaagatttctaggttgtctaaattatgtaggagaatttgtcccctatttagacaatattgtcaagccattgcatgataggctgaagaaaaatccgcctccttggtctgacctccatacacaaacagttaaagaaatcaaactcaaagtccaatccataaaatgtctgtatcttcctattccacaagcatttaaaattgtcgaaactgatgcatcagacataggttatggtggcatcatcaaacaaagagtccatgaccaagatcatgtcattccatatacatcaaaacattggaatcctgcacaattaaaatattcaactgttaaaaaggaagttttagcaattgttatgtgcatttccaaatttcaatcggatttattaaaccaaaattttttaatcagggttgattgtaaatcagcccaagatattttacaaaaagatgttaaaaaccttgcctcaaaacaaatttttgcaagatggtaagcaattcaaagtgtctttgattttgacataga

SEQ ID NO: 13156 - DNA, 1049 bp, Glycine max; identical to SEQ ID NO: 13155
  Gm_smallRNAprecursor_5989

SEQ ID NO: 13157 - DNA, 1050 bp, Glycine max
  Gm_smallRNAprecursor_5990
acggctttttatgtcaacaaacaatctgagattgagcgtggaacaccctgcttagtcctaaattacaaaccactaaaccaagcattacaatggattaggtatcctattccaaacaaaaaatatttgcttaacaaattaaattttgcaaagatattttgaaaatttgatatgaaatctggattttgggaaatccaaatccaagaatcagataggtacaaaacaacgtttgcccattcagaatttcaaaaaattatgaatgatatttttaatccctattcaaaatttgtcattgtctacatagatgatgttttaatcttttcccaaaacattgaccaacatttaaaacatctccaaactttcatccatatcatcaaacagaatggtttggcagtctccaaatcaaaaatcaatcttttccaaactcgaattcgattccttggtcacaatatatatcaaggtacaatcattccaatagaaaggtcaatagagattgctagcaaatttcccaaccaaatcttagacaaaacccagttacaaagatttctaggttgtctaaattatgtaggagaatttgtcccctatttagacaatattgtcaagccattgcatgataggctgaagaaaaatccgcctccttggtctgacctccatacacaaacagttaaagaaatcaaactcaaagtccaatccataaaatgtctgtatcttcctattccacaagcatttaaaattgtcgaaactgatgcatcagacataggttatggtggcatcatcaaacaaagagtccatgaccaagatcatgtcattccatatacatcaaaacattggaatcctgcacaattaaaatattcaactgttaaaaaggaagttttagcaattgttatgtgcatttccaaatttcaatcggatttattaaaccaaaattttttaatcagggttgattgtaaatcagcccaagatattttacaaaaagatgttaaaaaccttgcctcaaaacaaatttttgcaagatggtaagcaattcaaagtgtctttgattttgacatagaa

SEQ ID NO: 13158 - DNA, 1047 bp, Glycine max
  Gm_smallRNAprecursor_5991
cggctttttatgtcaacaaacaatctgagattgagcgtggaacaccctgcttagtcctaaattacaaaccactaaaccaagcattacaatggattaggtatcctattccaaacaaaaaatatttgcttaacaaattaaattttgcaaagatattttgaaaatttgatatgaaatctggattttgggaaatccaaatccaagaatcagataggtacaaaacaacgtttgcccattcagaatttcaaaaaattatgaatgatatttttaatccctattcaaaatttgtcattgtctacatagatgatgttttaatcttttcccaaaacattgaccaacatttaaaacatctccaaactttcatccatatcatcaaacagaatggtttggcagtctccaaatcaaaaatcaatcttttccaaactcgaattcgattccttggtcacaatatatatcaaggtacaatcattccaatagaaaggtcaatagagattgctagcaaatttcccaaccaaatcttagacaaaacccagttacaaagatttctaggttgtctaaattatgtaggagaatttgtcccctatttagacaatattgtcaagccattgcatgataggctgaagaaaaatccgcctccttggtctgacctccatacacaaacagttaaagaaatcaaactcaaagtccaatccataaaatgtctgtatcttcctattccacaagcatttaaaattgtcgaaactgatgcatcagacataggttatggtggcatcatcaaacaaagagtccatgaccaagatcatgtcattccatatacatcaaaacattggaatcctgcacaattaaaatattcaactgttaaaaaggaagttttagcaattgttatgtgcatttccaaatttcaatcggatttattaaaccaaaattttttaatcagggttgattgtaaatcagcccaagatattttacaaaaagatgttaaaaaccttgcctcaaaacaaatttttgcaagatggtaagcaattcaaagtgtctttgattttgacatag

SEQ ID NO: 13159 - DNA, 1071 bp, Glycine max
  Gm_smallRNAprecursor_5992
gattttgggaaatccaaatccaagaatcagataggtacaaaacaacgtttgcccattcagaatttcaaaaaattatgaatgatatttttaatccctattcaaaatttgtcattgtctacatagatgatgttttaatcttttcccaaaacattgaccaacatttaaaacatctccaaactttcatccatatcatcaaacagaatggtttggcagtctccaaatcaaaaatcaatcttttccaaactcgaattcgattccttggtcacaatatatatcaaggtacaatcattccaatagaaaggtcaatagagattgctagcaaatttcccaaccaaatcttagacaaaacccagttacaaagatttctaggttgtctaaattatgtaggagaatttgtcccctatttagacaatattgtcaagccattgcatgataggctgaagaaaaatccgcctccttggtctgacctccatacacaaacagttaaagaaatcaaactcaaagtccaatccataaaatgtctgtatcttcctattccacaagcatttaaaattgtcgaaactgatgcatcagacataggttatggtggcatcatcaaacaaagagtccatgaccaagatcatgtcattccatatacatcaaaacattggaatcctgcacaattaaaatattcaactgttaaaaaggaagttttagcaattgttatgtgcatttccaaatttcaatcggatttattaaaccaaaattttttaatcagggttgattgtaaatcagcccaagatattttacaaaaagatgttaaaaaccttgcctcaaaacaaatttttgcaagatggtaagcaattcaaagtgtctttgattttgacatagaatatatcaagggcacctcaaattcattaccagactaccttacccgtgaattcttatagaaaagtggtaatccctcctaaggcatcaggaatctccctaaggggaggacgaagtacaggcaaaggatcaagactggctctttcggagccaaccactaagaaatcatcaacctcttctgggtcaccaacccagactgggtca

SEQ ID NO: 13160 - DNA, 1045 bp, Glycine max
  Gm_smallRNAprecursor_5993
tccaaaaataatcaaaaactcttgggcagacattgccttagaatctgatgatgattctgaatcaaatttacaaacaatgatccaaaatgcatcaatgaccaaaatagctaccaatcctaaagggaaactacctttagccaaagcgcaaacaccacctaccaaacaaactaacaattatatttataaaaataaatttttaactgttttgcagatggaacctgaattttgggacaaaaatcccttcaaggcgacggccaaggctttcccaccaggatttcactacaaaccaaccaccatcttgaagacaagaactttttatgaattgattttggtagattcaaattctgtatctatcaaacatttcaatgacccaaaagaccaaacattaaacacccactccacaatccaaatactaaaagttcttcaaccaagacactttggttcggacttgaataaaggaaagagattttcagttccatttgatccggtaagttatacctattgggattatgttgatgcttggactaaggtgttttggcaccaaaatacccgcttcaagcattcatggctgatatatttcaagaccaatacaatttacaattttcccaattggtttttacaatggtgggacttctttggaccaattccagagatattcccagaaacagtccaacaaggatttgctcaaattgagaggcaataccattcacaggaatcatgaattccaacagatcttaaatacttctcaagctttgcactgtcatggatcttctcatggcaatatcgttacagcaagactgaaaagacaaaccaatatccatcactacaaagacacacatttgtaaaatggtggtcacaatttgactcatccaaagcagatccagaacaagtaaaactctcgttccaatcccatccagaattcctcaaagcaactgatccagaaacttctgtgtttttgaaccaaaagtctcatctggcagcatttttagcaggatcgaaatcaaaggagatcctacctaaaaatctaaaggaagttatgaaaatg

SEQ ID NO: 13161 - DNA, 1163 bp, Glycine max
  Gm_smallRNAprecursor_5994
aaaaataatcaaaaactcttgggcagacattgccttagaatctgatgatgattctgaatcaaatttacaaacaatgatccaaaatgcatcaatgaccaaaatagctaccaatcctaaagggaaactacctttagccaaagcgcaaacaccacctaccaaacaaactaacaattatatttataaaaataaatttttaactgttttgcagatggaacctgaattttgggacaaaaatcccttcaaggcgacggccaaggctttcccaccaggatttcactacaaaccaaccaccatcttgaagacaagaactttttatgaattgattttggtagattcaaattctgtatctatcaaacatttcaatgacccaaaagaccaaacattaaacacccactccacaatccaaatactaaaagttcttcaaccaagacactttggttcggacttgaataaaggaaagagattttcagttccatttgatccggtaagttatacctattgggattatgttgatgcttggactaaggtgttttggcaccaaaatacccgcttcaagcattcatggctgatatatttcaagaccaatacaatttacaattttcccaattggtttttacaatggtgggacttctttggaccaattccagagatattcccagaaacagtccaacaaggatttgctcaaattgagaggcaataccattcacaggaatcatgaattccaacagatcttaaatacttctcaagctttgcactgtcatggatcttctcatggcaatatcgttacagcaagactgaaaagacaaaccaatatccatcactacaaagacacacatttgtaaaatggtggtcacaatttgactcatccaaagcagatccagaacaagtaaaactctcgttccaatcccatccagaattcctcaaagcaactgatccagaaacttctgtgtttttgaaccaaaagtctcatctggcagcatttttagcaggatcgaaatcaaaggagatcctacctaaaaatctaaaggaagttatgaaaatgttacagcaggaagaagaaggttcatccttaaagaaggaagaaacaagttctgctgaagtagaagaagaagaagatcccttttaccaaaacgaagatgattgttttggtatctgtttagatt

SEQ ID NO: 13162 - DNA, 1058 bp, Glycine max
  Gm_smallRNAprecursor_5995
aaactaacaattatatttataaaaataaatttttaactgttttgcagatggaacctgaattttgggacaaaaatcccttcaaggcgacggccaaggctttcccaccaggatttcactacaaaccaaccaccatcttgaagacaagaactttttatgaattgattttggtagattcaaattctgtatctatcaaacatttcaatgacccaaaagaccaaacattaaacacccactccacaatccaaatactaaaagttcttcaaccaagacactttggttcggacttgaataaaggaaagagattttcagttccatttgatccggtaagttatacctattgggattatgttgatgcttggactaaggtgttttggcaccaaaatacccgcttcaagcattcatggctgatatatttcaagaccaatacaatttacaattttcccaattggtttttacaatggtgggacttctttggaccaattccagagatattcccagaaacagtccaacaaggatttgctcaaattgagaggcaataccattcacaggaatcatgaattccaacagatcttaaatacttctcaagctttgcactgtcatggatcttctcatggcaatatcgttacagcaagactgaaaagacaaaccaatatccatcactacaaagacacacatttgtaaaatggtggtcacaatttgactcatccaaagcagatccagaacaagtaaaactctcgttccaatcccatccagaattcctcaaagcaactgatccagaaacttctgtgtttttgaaccaaaagtctcatctggcagcatttttagcaggatcgaaatcaaaggagatcctacctaaaaatctaaaggaagttatgaaaatgttacagcaggaagaagaaggttcatccttaaagaaggaagaaacaagttctgctgaagtagaagaagaagaagatcccttttaccaaaacgaagatgattgttttggtatctgtttagattaaatttattttcggtcaaaaaaccgtctgtttgtaattaatgtgtacttaattttg

SEQ ID NO: 13163 - DNA, 1049 bp, Glycine max
  Gm_smallRNAprecursor_5996
tcaagaccaatacaatttacaattttcccaattggtttttacaatggtgggacttctttggaccaattccagagatattcccagaaacagtccaacaaggatttgctcaaattgagaggcaataccattcacaggaatcatgaattccaacagatcttaaatacttctcaagctttgcactgtcatggatcttctcatggcaatatcgttacagcaagactgaaaagacaaaccaatatccatcactacaaagacacacatttgtaaaatggtggtcacaatttgactcatccaaagcagatccagaacaagtaaaactctcgttccaatcccatccagaattcctcaaagcaactgatccagaaacttctgtgtttttgaaccaaaagtctcatctggcagcatttttagcaggatcgaaatcaaaggagatcctacctaaaaatctaaaggaagttatgaaaatgttacagcaggaagaagaaggttcatccttaaagaaggaagaaacaagttctgctgaagtagaagaagaagaagatcccttttaccaaaacgaagatgattgttttggtatctgtttagattaaatttattttcggtcaaaaaaccgtctgtttgtaattaatgtgtacttaattttggacaatactacctgtcctgtagccattaaagtcccggtcaaaactacttgtcttgtaacaaaaagtcaaatagttccgatcaaaactaccggcaactaccggtctcagatttttggctatataaggagtcctcaaccatgttgtgaggtaccctttcatttggccatttttctggtttctgaagagaggtgctctgaaagaaaacttttgtaagcgcttctttcaagtttcaataaatttctattttccaactcttttctctccctccaccaatcctgtgcggctctgccgccgcttcggtttctttgtttatgaaaacctgggatttgtaagccggtctcttgtgtgcccttgatatttgttttacaaatttatattttcatttccatttatcatactgcattc

SEQ ID NO: 13164 - DNA, 1188 bp, Glycine max
  Gm_smallRNAprecursor_5997
gggacttctttggaccaattccagagatattcccagaaacagtccaacaaggatttgctcaaattgagaggcaataccattcacaggaatcatgaattccaacagatcttaaatacttctcaagctttgcactgtcatggatcttctcatggcaatatcgttacagcaagactgaaaagacaaaccaatatccatcactacaaagacacacatttgtaaaatggtggtcacaatttgactcatccaaagcagatccagaacaagtaaaactctcgttccaatcccatccagaattcctcaaagcaactgatccagaaacttctgtgtttttgaaccaaaagtctcatctggcagcatttttagcaggatcgaaatcaaaggagatcctacctaaaaatctaaaggaagttatgaaaatgttacagcaggaagaagaaggttcatccttaaagaaggaagaaacaagttctgctgaagtagaagaagaagaagatcccttttaccaaaacgaagatgattgttttggtatctgtttagattaaatttattttcggtcaaaaaaccgtctgtttgtaattaatgtgtacttaattttggacaatactacctgtcctgtagccattaaagtcccggtcaaaactacttgtcttgtaacaaaaagtcaaatagttccgatcaaaactaccggcaactaccggtctcagatttttggctatataaggagtcctcaaccatgttgtgaggtaccctttcatttggccatttttctggtttctgaagagaggtgctctgaaagaaaacttttgtaagcgcttctttcaagtttcaataaatttctattttccaactcttttctctccctccaccaatcctgtgcggctctgccgccgcttcggtttctttgtttatgaaaacctgggatttgtaagccggtctcttgtgtgcccttgatatttgttttacaaatttatattttcatttccatttatcatactgcattcttacttcctatctgtccgtttgatcctattccactgacctctaatatctgtttaacaaatttatattttcatttccatttttcatactacattcttacttcctatctgtctgtttgatcttattccgctgacctctggtcttgtttccaagggtaatatatatcccctctgatggcataagcatgat

SEQ ID NO: 13165 - DNA, 1162 bp, Glycine max
  Gm_smallRNAprecursor_5998
aggacactaatattgacgtctctcgacaacattcgtagtactatctcttggattatgttgtctctcagtaccatcgttatgattggaaaaaccatctcctttgaggctcattctccggagaataaaaatctttcctaagggtttcctgataccagaggtcagcagaataagatcaaacggacagataggaagtaagaatgcagtatgataaatggaaatgaaaatataaatttgtaaaaaagatatcaagggcacaccggagactggcttacaaatcccaggttttcataaacaaagaaaccgaagcggcggcagagccgcacaatatcagtggagggagagagaaaagagttggaaaatagaaatttattgaaacttgaaagaagcgcttacaaaagttttctttcagagcacctctcttcagaaacctaaaaaatggccaaatgaaagggtacctcacaacatggttgaggactccttatatagccaaaaatctgagactggtagttgccggtagttttgactagaactatttgactgtttgttacaagacaagtagttttgatcgggactttaatggctacaggacaggtggtattgtccaaaattatttacacattaattacaaacagacggttttgtgaccgaaaataaatttaatctaaacagataccaaaacaatcatctttattttggtaaaaggggtcttcttcttcttcttcagcagaacttgtttcttccttctttgaggatgaaccttcttcttcctgttgtaacatttgcagaacttcctttagatttttagtttggatctcctttgatttcgatcttgctaaaaatactgccagatgagacttttggttcaaaaacacagaagtttctggatcaactgctttgaggaattctggatgggattggaacgagagttttacttgttctggatctgctttggatgagtcaaattgtgaccaccattttacaaatgcgtgtctttgtagtgatggatattggtttgtcttttcagtcttgctgtaatgatattgccatgaaaagatccatgacagtgcaaagcttgagaagtatttaagatctgttggaattcgtgattcctgcaaattgttttgtctctcaaattgagcaaatccttgttggactgtttcgg

SEQ ID NO: 13166 - DNA, 1119 bp, Glycine max
  Gm_smallRNAprecursor_5999
cttggattatgttgtctctcagtaccatcgttatgattggaaaaaccatctcctttgaggctcattctccggagaataaaaatctttcctaagggtttcctgataccagaggtcagcagaataagatcaaacggacagataggaagtaagaatgcagtatgataaatggaaatgaaaatataaatttgtaaaaaagatatcaagggcacaccggagactggcttacaaatcccaggttttcataaacaaagaaaccgaagcggcggcagagccgcacaatatcagtggagggagagagaaaagagttggaaaatagaaatttattgaaacttgaaagaagcgcttacaaaagttttctttcagagcacctctcttcagaaacctaaaaaatggccaaatgaaagggtacctcacaacatggttgaggactccttatatagccaaaaatctgagactggtagttgccggtagttttgactagaactatttgactgtttgttacaagacaagtagttttgatcgggactttaatggctacaggacaggtggtattgtccaaaattatttacacattaattacaaacagacggttttgtgaccgaaaataaatttaatctaaacagataccaaaacaatcatctttattttggtaaaaggggtcttcttcttcttcttcagcagaacttgtttcttccttctttgaggatgaaccttcttcttcctgttgtaacatttgcagaacttcctttagatttttagtttggatctcctttgatttcgatcttgctaaaaatactgccagatgagacttttggttcaaaaacacagaagtttctggatcaactgctttgaggaattctggatgggattggaacgagagttttacttgttctggatctgctttggatgagtcaaattgtgaccaccattttacaaatgcgtgtctttgtagtgatggatattggtttgtcttttcagtcttgctgtaatgatattgccatgaaaagatccatgacagtgcaaagcttgagaagtatttaagatctgttggaattcgtgattcctgcaaattgttttgtctctcaaattgagcaaatccttgttggactgtttcgggga

SEQ ID NO: 13167 - DNA, 1120 bp, Glycine max
  Gm_smallRNAprecursor_6000
cttggattatgttgtctctcagtaccatcgttatgattggaaaaaccatctcctttgaggctcattctccggagaataaaaatctttcctaagggtttcctgataccagaggtcagcagaataagatcaaacggacagataggaagtaagaatgcagtatgataaatggaaatgaaaatataaatttgtaaaaaagatatcaagggcacaccggagactggcttacaaatcccaggttttcataaacaaagaaaccgaagcggcggcagagccgcacaatatcagtggagggagagagaaaagagttggaaaatagaaatttattgaaacttgaaagaagcgcttacaaaagttttctttcagagcacctctcttcagaaacctaaaaaatggccaaatgaaagggtacctcacaacatggttgaggactccttatatagccaaaaatctgagactggtagttgccggtagttttgactagaactatttgactgtttgttacaagacaagtagttttgatcgggactttaatggctacaggacaggtggtattgtccaaaattatttacacattaattacaaacagacggttttgtgaccgaaaataaatttaatctaaacagataccaaaacaatcatctttattttggtaaaaggggtcttcttcttcttcttcagcagaacttgtttcttccttctttgaggatgaaccttcttcttcctgttgtaacatttgcagaacttcctttagatttttagtttggatctcctttgatttcgatcttgctaaaaatactgccagatgagacttttggttcaaaaacacagaagtttctggatcaactgctttgaggaattctggatgggattggaacgagagttttacttgttctggatctgctttggatgagtcaaattgtgaccaccattttacaaatgcgtgtctttgtagtgatggatattggtttgtcttttcagtcttgctgtaatgatattgccatgaaaagatccatgacagtgcaaagcttgagaagtatttaagatctgttggaattcgtgattcctgcaaattgttttgtctctcaaattgagcaaatccttgttggactgtttcggggaa

SEQ ID NO: 13168 - DNA, 1120 bp, Glycine max; identical to SEQ ID NO: 13167
  Gm_smallRNAprecursor_6001

SEQ ID NO: 13169 - DNA, 1121 bp, Glycine max
  Gm_smallRNAprecursor_6002
cttggattatgttgtctctcagtaccatcgttatgattggaaaaaccatctcctttgaggctcattctccggagaataaaaatctttcctaagggtttcctgataccagaggtcagcagaataagatcaaacggacagataggaagtaagaatgcagtatgataaatggaaatgaaaatataaatttgtaaaaaagatatcaagggcacaccggagactggcttacaaatcccaggttttcataaacaaagaaaccgaagcggcggcagagccgcacaatatcagtggagggagagagaaaagagttggaaaatagaaatttattgaaacttgaaagaagcgcttacaaaagttttctttcagagcacctctcttcagaaacctaaaaaatggccaaatgaaagggtacctcacaacatggttgaggactccttatatagccaaaaatctgagactggtagttgccggtagttttgactagaactatttgactgtttgttacaagacaagtagttttgatcgggactttaatggctacaggacaggtggtattgtccaaaattatttacacattaattacaaacagacggttttgtgaccgaaaataaatttaatctaaacagataccaaaacaatcatctttattttggtaaaaggggtcttcttcttcttcttcagcagaacttgtttcttccttctttgaggatgaaccttcttcttcctgttgtaacatttgcagaacttcctttagatttttagtttggatctcctttgatttcgatcttgctaaaaatactgccagatgagacttttggttcaaaaacacagaagtttctggatcaactgctttgaggaattctggatgggattggaacgagagttttacttgttctggatctgctttggatgagtcaaattgtgaccaccattttacaaatgcgtgtctttgtagtgatggatattggtttgtcttttcagtcttgctgtaatgatattgccatgaaaagatccatgacagtgcaaagcttgagaagtatttaagatctgttggaattcgtgattcctgcaaattgttttgtctctcaaattgagcaaatccttgttggactgtttcggggaat

SEQ ID NO: 13170 - DNA, 1121 bp, Glycine max; identical to SEQ ID NO: 13169
  Gm_smallRNAprecursor_6003

SEQ ID NO: 13171 - DNA, 1061 bp, Glycine max
  Gm_smallRNAprecursor_6004
gcagaataagatcaaacggacagataggaagtaagaatgcagtatgataaatggaaatgaaaatataaatttgtaaaaaagatatcaagggcacaccggagactggcttacaaatcccaggttttcataaacaaagaaaccgaagcggcggcagagccgcacaatatcagtggagggagagagaaaagagttggaaaatagaaatttattgaaacttgaaagaagcgcttacaaaagttttctttcagagcacctctcttcagaaacctaaaaaatggccaaatgaaagggtacctcacaacatggttgaggactccttatatagccaaaaatctgagactggtagttgccggtagttttgactagaactatttgactgtttgttacaagacaagtagttttgatcgggactttaatggctacaggacaggtggtattgtccaaaattatttacacattaattacaaacagacggttttgtgaccgaaaataaatttaatctaaacagataccaaaacaatcatctttattttggtaaaaggggtcttcttcttcttcttcagcagaacttgtttcttccttctttgaggatgaaccttcttcttcctgttgtaacatttgcagaacttcctttagatttttagtttggatctcctttgatttcgatcttgctaaaaatactgccagatgagacttttggttcaaaaacacagaagtttctggatcaactgctttgaggaattctggatgggattggaacgagagttttacttgttctggatctgctttggatgagtcaaattgtgaccaccattttacaaatgcgtgtctttgtagtgatggatattggtttgtcttttcagtcttgctgtaatgatattgccatgaaaagatccatgacagtgcaaagcttgagaagtatttaagatctgttggaattcgtgattcctgcaaattgttttgtctctcaaattgagcaaatccttgttggactgtttcggggaatatctctggaattggtccaaagaagtcccaccattgtaaaaaccaattgggaaaat

SEQ ID NO: 13172 - DNA, 1063 bp, Glycine max
  Gm_smallRNAprecursor_6005
gcagaataagatcaaacggacagataggaagtaagaatgcagtatgataaatggaaatgaaaatataaatttgtaaaaaagatatcaagggcacaccggagactggcttacaaatcccaggttttcataaacaaagaaaccgaagcggcggcagagccgcacaatatcagtggagggagagagaaaagagttggaaaatagaaatttattgaaacttgaaagaagcgcttacaaaagttttctttcagagcacctctcttcagaaacctaaaaaatggccaaatgaaagggtacctcacaacatggttgaggactccttatatagccaaaaatctgagactggtagttgccggtagttttgactagaactatttgactgtttgttacaagacaagtagttttgatcgggactttaatggctacaggacaggtggtattgtccaaaattatttacacattaattacaaacagacggttttgtgaccgaaaataaatttaatctaaacagataccaaaacaatcatctttattttggtaaaaggggtcttcttcttcttcttcagcagaacttgtttcttccttctttgaggatgaaccttcttcttcctgttgtaacatttgcagaacttcctttagatttttagtttggatctcctttgatttcgatcttgctaaaaatactgccagatgagacttttggttcaaaaacacagaagtttctggatcaactgctttgaggaattctggatgggattggaacgagagttttacttgttctggatctgctttggatgagtcaaattgtgaccaccattttacaaatgcgtgtctttgtagtgatggatattggtttgtcttttcagtcttgctgtaatgatattgccatgaaaagatccatgacagtgcaaagcttgagaagtatttaagatctgttggaattcgtgattcctgcaaattgttttgtctctcaaattgagcaaatccttgttggactgtttcggggaatatctctggaattggtccaaagaagtcccaccattgtaaaaaccaattgggaaaatcg

SEQ ID NO: 13173 - DNA, 1063 bp, Glycine max; identical to SEQ ID NO: 13172
  Gm_smallRNAprecursor_6006

SEQ ID NO: 13174 - DNA, 1064 bp, Glycine max
  Gm_smallRNAprecursor_6007
gcagaataagatcaaacggacagataggaagtaagaatgcagtatgataaatggaaatgaaaatataaatttgtaaaaaagatatcaagggcacaccggagactggcttacaaatcccaggttttcataaacaaagaaaccgaagcggcggcagagccgcacaatatcagtggagggagagagaaaagagttggaaaatagaaatttattgaaacttgaaagaagcgcttacaaaagttttctttcagagcacctctcttcagaaacctaaaaaatggccaaatgaaagggtacctcacaacatggttgaggactccttatatagccaaaaatctgagactggtagttgccggtagttttgactagaactatttgactgtttgttacaagacaagtagttttgatcgggactttaatggctacaggacaggtggtattgtccaaaattatttacacattaattacaaacagacggttttgtgaccgaaaataaatttaatctaaacagataccaaaacaatcatctttattttggtaaaaggggtcttcttcttcttcttcagcagaacttgtttcttccttctttgaggatgaaccttcttcttcctgttgtaacatttgcagaacttcctttagatttttagtttggatctcctttgatttcgatcttgctaaaaatactgccagatgagacttttggttcaaaaacacagaagtttctggatcaactgctttgaggaattctggatgggattggaacgagagttttacttgttctggatctgctttggatgagtcaaattgtgaccaccattttacaaatgcgtgtctttgtagtgatggatattggtttgtcttttcagtcttgctgtaatgatattgccatgaaaagatccatgacagtgcaaagcttgagaagtatttaagatctgttggaattcgtgattcctgcaaattgttttgtctctcaaattgagcaaatccttgttggactgtttcggggaatatctctggaattggtccaaagaagtcccaccattgtaaaaaccaattgggaaaatcgt

SEQ ID NO: 13175 - DNA, 1057 bp, Glycine max
  Gm_smallRNAprecursor_6008
gaataagatcaaacggacagataggaagtaagaatgcagtatgataaatggaaatgaaaatataaatttgtaaaaaagatatcaagggcacaccggagactggcttacaaatcccaggttttcataaacaaagaaaccgaagcggcggcagagccgcacaatatcagtggagggagagagaaaagagttggaaaatagaaatttattgaaacttgaaagaagcgcttacaaaagttttctttcagagcacctctcttcagaaacctaaaaaatggccaaatgaaagggtacctcacaacatggttgaggactccttatatagccaaaaatctgagactggtagttgccggtagttttgactagaactatttgactgtttgttacaagacaagtagttttgatcgggactttaatggctacaggacaggtggtattgtccaaaattatttacacattaattacaaacagacggttttgtgaccgaaaataaatttaatctaaacagataccaaaacaatcatctttattttggtaaaaggggtcttcttcttcttcttcagcagaacttgtttcttccttctttgaggatgaaccttcttcttcctgttgtaacatttgcagaacttcctttagatttttagtttggatctcctttgatttcgatcttgctaaaaatactgccagatgagacttttggttcaaaaacacagaagtttctggatcaactgctttgaggaattctggatgggattggaacgagagttttacttgttctggatctgctttggatgagtcaaattgtgaccaccattttacaaatgcgtgtctttgtagtgatggatattggtttgtcttttcagtcttgctgtaatgatattgccatgaaaagatccatgacagtgcaaagcttgagaagtatttaagatctgttggaattcgtgattcctgcaaattgttttgtctctcaaattgagcaaatccttgttggactgtttcggggaatatctctggaattggtccaaagaagtcccaccattgtaaaaaccaattgggaaaa

SEQ ID NO: 13176 - DNA, 1058 bp, Glycine max
  Gm_smallRNAprecursor_6009
gaataagatcaaacggacagataggaagtaagaatgcagtatgataaatggaaatgaaaatataaatttgtaaaaaagatatcaagggcacaccggagactggcttacaaatcccaggttttcataaacaaagaaaccgaagcggcggcagagccgcacaatatcagtggagggagagagaaaagagttggaaaatagaaatttattgaaacttgaaagaagcgcttacaaaagttttctttcagagcacctctcttcagaaacctaaaaaatggccaaatgaaagggtacctcacaacatggttgaggactccttatatagccaaaaatctgagactggtagttgccggtagttttgactagaactatttgactgtttgttacaagacaagtagttttgatcgggactttaatggctacaggacaggtggtattgtccaaaattatttacacattaattacaaacagacggttttgtgaccgaaaataaatttaatctaaacagataccaaaacaatcatctttattttggtaaaaggggtcttcttcttcttcttcagcagaacttgtttcttccttctttgaggatgaaccttcttcttcctgttgtaacatttgcagaacttcctttagatttttagtttggatctcctttgatttcgatcttgctaaaaatactgccagatgagacttttggttcaaaaacacagaagtttctggatcaactgctttgaggaattctggatgggattggaacgagagttttacttgttctggatctgctttggatgagtcaaattgtgaccaccattttacaaatgcgtgtctttgtagtgatggatattggtttgtcttttcagtcttgctgtaatgatattgccatgaaaagatccatgacagtgcaaagcttgagaagtatttaagatctgttggaattcgtgattcctgcaaattgttttgtctctcaaattgagcaaatccttgttggactgtttcggggaatatctctggaattggtccaaagaagtcccaccattgtaaaaaccaattgggaaaat

SEQ ID NO: 13177 - DNA, 1056 bp, Glycine max
  Gm_smallRNAprecursor_6010
aataagatcaaacggacagataggaagtaagaatgcagtatgataaatggaaatgaaaatataaatttgtaaaaaagatatcaagggcacaccggagactggcttacaaatcccaggttttcataaacaaagaaaccgaagcggcggcagagccgcacaatatcagtggagggagagagaaaagagttggaaaatagaaatttattgaaacttgaaagaagcgcttacaaaagttttctttcagagcacctctcttcagaaacctaaaaaatggccaaatgaaagggtacctcacaacatggttgaggactccttatatagccaaaaatctgagactggtagttgccggtagttttgactagaactatttgactgtttgttacaagacaagtagttttgatcgggactttaatggctacaggacaggtggtattgtccaaaattatttacacattaattacaaacagacggttttgtgaccgaaaataaatttaatctaaacagataccaaaacaatcatctttattttggtaaaaggggtcttcttcttcttcttcagcagaacttgtttcttccttctttgaggatgaaccttcttcttcctgttgtaacatttgcagaacttcctttagatttttagtttggatctcctttgatttcgatcttgctaaaaatactgccagatgagacttttggttcaaaaacacagaagtttctggatcaactgctttgaggaattctggatgggattggaacgagagttttacttgttctggatctgctttggatgagtcaaattgtgaccaccattttacaaatgcgtgtctttgtagtgatggatattggtttgtcttttcagtcttgctgtaatgatattgccatgaaaagatccatgacagtgcaaagcttgagaagtatttaagatctgttggaattcgtgattcctgcaaattgttttgtctctcaaattgagcaaatccttgttggactgtttcggggaatatctctggaattggtccaaagaagtcccaccattgtaaaaaccaattgggaaaa

SEQ ID NO: 13178 - DNA, 1056 bp, Glycine max; identical to SEQ ID NO: 13177
  Gm_smallRNAprecursor_6011

SEQ ID NO: 13179 - DNA, 1057 bp, Glycine max
  Gm_smallRNAprecursor_6012
aataagatcaaacggacagataggaagtaagaatgcagtatgataaatggaaatgaaaatataaatttgtaaaaaagatatcaagggcacaccggagactggcttacaaatcccaggttttcataaacaaagaaaccgaagcggcggcagagccgcacaatatcagtggagggagagagaaaagagttggaaaatagaaatttattgaaacttgaaagaagcgcttacaaaagttttctttcagagcacctctcttcagaaacctaaaaaatggccaaatgaaagggtacctcacaacatggttgaggactccttatatagccaaaaatctgagactggtagttgccggtagttttgactagaactatttgactgtttgttacaagacaagtagttttgatcgggactttaatggctacaggacaggtggtattgtccaaaattatttacacattaattacaaacagacggttttgtgaccgaaaataaatttaatctaaacagataccaaaacaatcatctttattttggtaaaaggggtcttcttcttcttcttcagcagaacttgtttcttccttctttgaggatgaaccttcttcttcctgttgtaacatttgcagaacttcctttagatttttagtttggatctcctttgatttcgatcttgctaaaaatactgccagatgagacttttggttcaaaaacacagaagtttctggatcaactgctttgaggaattctggatgggattggaacgagagttttacttgttctggatctgctttggatgagtcaaattgtgaccaccattttacaaatgcgtgtctttgtagtgatggatattggtttgtcttttcagtcttgctgtaatgatattgccatgaaaagatccatgacagtgcaaagcttgagaagtatttaagatctgttggaattcgtgattcctgcaaattgttttgtctctcaaattgagcaaatccttgttggactgtttcggggaatatctctggaattggtccaaagaagtcccaccattgtaaaaaccaattgggaaaat

SEQ ID NO: 13180 - DNA, 1059 bp, Glycine max
  Gm_smallRNAprecursor_6013
aataagatcaaacggacagataggaagtaagaatgcagtatgataaatggaaatgaaaatataaatttgtaaaaaagatatcaagggcacaccggagactggcttacaaatcccaggttttcataaacaaagaaaccgaagcggcggcagagccgcacaatatcagtggagggagagagaaaagagttggaaaatagaaatttattgaaacttgaaagaagcgcttacaaaagttttctttcagagcacctctcttcagaaacctaaaaaatggccaaatgaaagggtacctcacaacatggttgaggactccttatatagccaaaaatctgagactggtagttgccggtagttttgactagaactatttgactgtttgttacaagacaagtagttttgatcgggactttaatggctacaggacaggtggtattgtccaaaattatttacacattaattacaaacagacggttttgtgaccgaaaataaatttaatctaaacagataccaaaacaatcatctttattttggtaaaaggggtcttcttcttcttcttcagcagaacttgtttcttccttctttgaggatgaaccttcttcttcctgttgtaacatttgcagaacttcctttagatttttagtttggatctcctttgatttcgatcttgctaaaaatactgccagatgagacttttggttcaaaaacacagaagtttctggatcaactgctttgaggaattctggatgggattggaacgagagttttacttgttctggatctgctttggatgagtcaaattgtgaccaccattttacaaatgcgtgtctttgtagtgatggatattggtttgtcttttcagtcttgctgtaatgatattgccatgaaaagatccatgacagtgcaaagcttgagaagtatttaagatctgttggaattcgtgattcctgcaaattgttttgtctctcaaattgagcaaatccttgttggactgtttcggggaatatctctggaattggtccaaagaagtcccaccattgtaaaaaccaattgggaaaatcg

SEQ ID NO: 13181 - DNA, 1059 bp, Glycine max; identical to SEQ ID NO: 13180
  Gm_smallRNAprecursor_6014

SEQ ID NO: 13182 - DNA, 1055 bp, Glycine max
  Gm_smallRNAprecursor_6015
ataagatcaaacggacagataggaagtaagaatgcagtatgataaatggaaatgaaaatataaatttgtaaaaaagatatcaagggcacaccggagactggcttacaaatcccaggttttcataaacaaagaaaccgaagcggcggcagagccgcacaatatcagtggagggagagagaaaagagttggaaaatagaaatttattgaaacttgaaagaagcgcttacaaaagttttctttcagagcacctctcttcagaaacctaaaaaatggccaaatgaaagggtacctcacaacatggttgaggactccttatatagccaaaaatctgagactggtagttgccggtagttttgactagaactatttgactgtttgttacaagacaagtagttttgatcgggactttaatggctacaggacaggtggtattgtccaaaattatttacacattaattacaaacagacggttttgtgaccgaaaataaatttaatctaaacagataccaaaacaatcatctttattttggtaaaaggggtcttcttcttcttcttcagcagaacttgtttcttccttctttgaggatgaaccttcttcttcctgttgtaacatttgcagaacttcctttagatttttagtttggatctcctttgatttcgatcttgctaaaaatactgccagatgagacttttggttcaaaaacacagaagtttctggatcaactgctttgaggaattctggatgggattggaacgagagttttacttgttctggatctgctttggatgagtcaaattgtgaccaccattttacaaatgcgtgtctttgtagtgatggatattggtttgtcttttcagtcttgctgtaatgatattgccatgaaaagatccatgacagtgcaaagcttgagaagtatttaagatctgttggaattcgtgattcctgcaaattgttttgtctctcaaattgagcaaatccttgttggactgtttcggggaatatctctggaattggtccaaagaagtcccaccattgtaaaaaccaattgggaaaa

SEQ ID NO: 13183 - DNA, 1058 bp, Glycine max
  Gm_smallRNAprecursor_6016
ataagatcaaacggacagataggaagtaagaatgcagtatgataaatggaaatgaaaatataaatttgtaaaaaagatatcaagggcacaccggagactggcttacaaatcccaggttttcataaacaaagaaaccgaagcggcggcagagccgcacaatatcagtggagggagagagaaaagagttggaaaatagaaatttattgaaacttgaaagaagcgcttacaaaagttttctttcagagcacctctcttcagaaacctaaaaaatggccaaatgaaagggtacctcacaacatggttgaggactccttatatagccaaaaatctgagactggtagttgccggtagttttgactagaactatttgactgtttgttacaagacaagtagttttgatcgggactttaatggctacaggacaggtggtattgtccaaaattatttacacattaattacaaacagacggttttgtgaccgaaaataaatttaatctaaacagataccaaaacaatcatctttattttggtaaaaggggtcttcttcttcttcttcagcagaacttgtttcttccttctttgaggatgaaccttcttcttcctgttgtaacatttgcagaacttcctttagatttttagtttggatctcctttgatttcgatcttgctaaaaatactgccagatgagacttttggttcaaaaacacagaagtttctggatcaactgctttgaggaattctggatgggattggaacgagagttttacttgttctggatctgctttggatgagtcaaattgtgaccaccattttacaaatgcgtgtctttgtagtgatggatattggtttgtcttttcagtcttgctgtaatgatattgccatgaaaagatccatgacagtgcaaagcttgagaagtatttaagatctgttggaattcgtgattcctgcaaattgttttgtctctcaaattgagcaaatccttgttggactgtttcggggaatatctctggaattggtccaaagaagtcccaccattgtaaaaaccaattgggaaaatcg

SEQ ID NO: 13184 - DNA, 1058 bp, Glycine max; identical to SEQ ID NO: 13183
  Gm_smallRNAprecursor_6017

SEQ ID NO: 13185 - DNA, 1163 bp, Glycine max
  Gm_smallRNAprecursor_6018
ttacaaaagttttctttcagagcacctctcttcagaaacctaaaaaatggccaaatgaaagggtacctcacaacatggttgaggactccttatatagccaaaaatctgagactggtagttgccggtagttttgactagaactatttgactgtttgttacaagacaagtagttttgatcgggactttaatggctacaggacaggtggtattgtccaaaattatttacacattaattacaaacagacggttttgtgaccgaaaataaatttaatctaaacagataccaaaacaatcatctttattttggtaaaaggggtcttcttcttcttcttcagcagaacttgtttcttccttctttgaggatgaaccttcttcttcctgttgtaacatttgcagaacttcctttagatttttagtttggatctcctttgatttcgatcttgctaaaaatactgccagatgagacttttggttcaaaaacacagaagtttctggatcaactgctttgaggaattctggatgggattggaacgagagttttacttgttctggatctgctttggatgagtcaaattgtgaccaccattttacaaatgcgtgtctttgtagtgatggatattggtttgtcttttcagtcttgctgtaatgatattgccatgaaaagatccatgacagtgcaaagcttgagaagtatttaagatctgttggaattcgtgattcctgcaaattgttttgtctctcaaattgagcaaatccttgttggactgtttcggggaatatctctggaattggtccaaagaagtcccaccattgtaaaaaccaattgggaaaatcgtaaattgtattggtcttgaaatatatcagccatgaatgcttgaagcgggtatcttggtgccaaaacaccttaatccaagcatcaacatagtcttgaaatatatcagccatgaatgcttgaagcgggtattttggtgccaaaacaccttagtccaagcatcaacataatctcaataggtataacctaccggatcaaatggaactgaaaatctctttcctttgttcaagtccgaaccaaagtgtcttggttgaataacttttagtatttggattgtggagtgggtgtttaatgtttggtcttttgggtctttgaaatgtttgatagatac

SEQ ID NO: 13186 - DNA, 1130 bp, Glycine max
  Gm_smallRNAprecursor_6019
agaaacctaaaaaatggccaaatgaaagggtacctcacaacatggttgaggactccttatatagccaaaaatctgagactggtagttgccggtagttttgactagaactatttgactgtttgttacaagacaagtagttttgatcgggactttaatggctacaggacaggtggtattgtccaaaattatttacacattaattacaaacagacggttttgtgaccgaaaataaatttaatctaaacagataccaaaacaatcatctttattttggtaaaaggggtcttcttcttcttcttcagcagaacttgtttcttccttctttgaggatgaaccttcttcttcctgttgtaacatttgcagaacttcctttagatttttagtttggatctcctttgatttcgatcttgctaaaaatactgccagatgagacttttggttcaaaaacacagaagtttctggatcaactgctttgaggaattctggatgggattggaacgagagttttacttgttctggatctgctttggatgagtcaaattgtgaccaccattttacaaatgcgtgtctttgtagtgatggatattggtttgtcttttcagtcttgctgtaatgatattgccatgaaaagatccatgacagtgcaaagcttgagaagtatttaagatctgttggaattcgtgattcctgcaaattgttttgtctctcaaattgagcaaatccttgttggactgtttcggggaatatctctggaattggtccaaagaagtcccaccattgtaaaaaccaattgggaaaatcgtaaattgtattggtcttgaaatatatcagccatgaatgcttgaagcgggtatcttggtgccaaaacaccttaatccaagcatcaacatagtcttgaaatatatcagccatgaatgcttgaagcgggtattttggtgccaaaacaccttagtccaagcatcaacataatctcaataggtataacctaccggatcaaatggaactgaaaatctctttcctttgttcaagtccgaaccaaagtgtcttggttgaataacttttagtatttggattgtggagtgggtgtttaatgtttggtcttttgggtctttgaaatgtttgatagatac

SEQ ID NO: 13187 - DNA, 1131 bp, Glycine max
  Gm_smallRNAprecursor_6020
acaagtagttttgatcgggactttaatggctacaggacaggtggtattgtccaaaattatttacacattaattacaaacagacggttttgtgaccgaaaataaatttaatctaaacagataccaaaacaatcatctttattttggtaaaaggggtcttcttcttcttcttcagcagaacttgtttcttccttctttgaggatgaaccttcttcttcctgttgtaacatttgcagaacttcctttagatttttagtttggatctcctttgatttcgatcttgctaaaaatactgccagatgagacttttggttcaaaaacacagaagtttctggatcaactgctttgaggaattctggatgggattggaacgagagttttacttgttctggatctgctttggatgagtcaaattgtgaccaccattttacaaatgcgtgtctttgtagtgatggatattggtttgtcttttcagtcttgctgtaatgatattgccatgaaaagatccatgacagtgcaaagcttgagaagtatttaagatctgttggaattcgtgattcctgcaaattgttttgtctctcaaattgagcaaatccttgttggactgtttcggggaatatctctggaattggtccaaagaagtcccaccattgtaaaaaccaattgggaaaatcgtaaattgtattggtcttgaaatatatcagccatgaatgcttgaagcgggtatcttggtgccaaaacaccttaatccaagcatcaacatagtcttgaaatatatcagccatgaatgcttgaagcgggtattttggtgccaaaacaccttagtccaagcatcaacataatctcaataggtataacctaccggatcaaatggaactgaaaatctctttcctttgttcaagtccgaaccaaagtgtcttggttgaataacttttagtatttggattgtggagtgggtgtttaatgtttggtcttttgggtctttgaaatgtttgatagatactaaatttgaatctaccaaaatcaattcataaaaagttcttgtcttcaggatgatcgttggtttgtagtgaaatcctgatgggaaagccttggccgacgccttgaagggatttttgtcccaaaatccaggt

SEQ ID NO: 13188 - DNA, 1199 bp, Glycine max
  Gm_smallRNAprecursor_6021
ggacaggtggtattgtccaaaattatttacacattaattacaaacagacggttttgtgaccgaaaataaatttaatctaaacagataccaaaacaatcatctttattttggtaaaaggggtcttcttcttcttcttcagcagaacttgtttcttccttctttgaggatgaaccttcttcttcctgttgtaacatttgcagaacttcctttagatttttagtttggatctcctttgatttcgatcttgctaaaaatactgccagatgagacttttggttcaaaaacacagaagtttctggatcaactgctttgaggaattctggatgggattggaacgagagttttacttgttctggatctgctttggatgagtcaaattgtgaccaccattttacaaatgcgtgtctttgtagtgatggatattggtttgtcttttcagtcttgctgtaatgatattgccatgaaaagatccatgacagtgcaaagcttgagaagtatttaagatctgttggaattcgtgattcctgcaaattgttttgtctctcaaattgagcaaatccttgttggactgtttcggggaatatctctggaattggtccaaagaagtcccaccattgtaaaaaccaattgggaaaatcgtaaattgtattggtcttgaaatatatcagccatgaatgcttgaagcgggtatcttggtgccaaaacaccttaatccaagcatcaacatagtcttgaaatatatcagccatgaatgcttgaagcgggtattttggtgccaaaacaccttagtccaagcatcaacataatctcaataggtataacctaccggatcaaatggaactgaaaatctctttcctttgttcaagtccgaaccaaagtgtcttggttgaataacttttagtatttggattgtggagtgggtgtttaatgtttggtcttttgggtctttgaaatgtttgatagatactaaatttgaatctaccaaaatcaattcataaaaagttcttgtcttcaggatgatcgttggtttgtagtgaaatcctgatgggaaagccttggccgacgccttgaagggatttttgtcccaaaatccaggttccatctgcaaaacagttaaaaatttatttttataaatatagtttttagtttgtttggcaggtggtgtttgtgctttggctaaaggtagtttccctttagga

SEQ ID NO: 13189 - DNA, 1177 bp, Glycine max
  Gm_smallRNAprecursor_6022
gcagaacttgtttcttccttctttgaggatgaaccttcttcttcctgttgtaacatttgcagaacttcctttagatttttagtttggatctcctttgatttcgatcttgctaaaaatactgccagatgagacttttggttcaaaaacacagaagtttctggatcaactgctttgaggaattctggatgggattggaacgagagttttacttgttctggatctgctttggatgagtcaaattgtgaccaccattttacaaatgcgtgtctttgtagtgatggatattggtttgtcttttcagtcttgctgtaatgatattgccatgaaaagatccatgacagtgcaaagcttgagaagtatttaagatctgttggaattcgtgattcctgcaaattgttttgtctctcaaattgagcaaatccttgttggactgtttcggggaatatctctggaattggtccaaagaagtcccaccattgtaaaaaccaattgggaaaatcgtaaattgtattggtcttgaaatatatcagccatgaatgcttgaagcgggtatcttggtgccaaaacaccttaatccaagcatcaacatagtcttgaaatatatcagccatgaatgcttgaagcgggtattttggtgccaaaacaccttagtccaagcatcaacataatctcaataggtataacctaccggatcaaatggaactgaaaatctctttcctttgttcaagtccgaaccaaagtgtcttggttgaataacttttagtatttggattgtggagtgggtgtttaatgtttggtcttttgggtctttgaaatgtttgatagatactaaatttgaatctaccaaaatcaattcataaaaagttcttgtcttcaggatgatcgttggtttgtagtgaaatcctgatgggaaagccttggccgacgccttgaagggatttttgtcccaaaatccaggttccatctgcaaaacagttaaaaatttatttttataaatatagtttttagtttgtttggcaggtggtgtttgtgctttggctaaaggtagtttccctttaggattggtagctgttttggtcattgatgcattttggatcattgtttgtaaatttgattcagaatcatcatcagattctgaggcaatgtctgcccaagattttttgattatttttggaaa

SEQ ID NO: 13190 - DNA, 1175 bp, Glycine max
  Gm_smallRNAprecursor_6023
agaacttgtttcttccttctttgaggatgaaccttcttcttcctgttgtaacatttgcagaacttcctttagatttttagtttggatctcctttgatttcgatcttgctaaaaatactgccagatgagacttttggttcaaaaacacagaagtttctggatcaactgctttgaggaattctggatgggattggaacgagagttttacttgttctggatctgctttggatgagtcaaattgtgaccaccattttacaaatgcgtgtctttgtagtgatggatattggtttgtcttttcagtcttgctgtaatgatattgccatgaaaagatccatgacagtgcaaagcttgagaagtatttaagatctgttggaattcgtgattcctgcaaattgttttgtctctcaaattgagcaaatccttgttggactgtttcggggaatatctctggaattggtccaaagaagtcccaccattgtaaaaaccaattgggaaaatcgtaaattgtattggtcttgaaatatatcagccatgaatgcttgaagcgggtatcttggtgccaaaacaccttaatccaagcatcaacatagtcttgaaatatatcagccatgaatgcttgaagcgggtattttggtgccaaaacaccttagtccaagcatcaacataatctcaataggtataacctaccggatcaaatggaactgaaaatctctttcctttgttcaagtccgaaccaaagtgtcttggttgaataacttttagtatttggattgtggagtgggtgtttaatgtttggtcttttgggtctttgaaatgtttgatagatactaaatttgaatctaccaaaatcaattcataaaaagttcttgtcttcaggatgatcgttggtttgtagtgaaatcctgatgggaaagccttggccgacgccttgaagggatttttgtcccaaaatccaggttccatctgcaaaacagttaaaaatttatttttataaatatagtttttagtttgtttggcaggtggtgtttgtgctttggctaaaggtagtttccctttaggattggtagctgttttggtcattgatgcattttggatcattgtttgtaaatttgattcagaatcatcatcagattctgaggcaatgtctgcccaagattttttgattatttttggaaa

SEQ ID NO: 13191 - DNA, 1207 bp, Glycine max
  Gm_smallRNAprecursor_6024
ggaaatttggttagacccatgtcttgaagggcttgaagggtttcaattggctatgcatagtcggccgatatttgtttggcagttgccggtttgagagattcctgagtggatggctcaggtttgattgaggtaatctgggttgatgacccttctaaattggttttctaggtagatgacccagcctgggttggtgacccagaagaggttgatgatttcttagtggttggctccgaaagagccagtcttgatcctttgcctgtacttcgtcctccccttagggagattcctgatgccttaggaggcattaccacttttctgtaagaattcatgtgtaaggtagttaggtaatgaaattgaggtgcccttgatatattctatgtcaaaatcaaagacacttagaattgcttgccatcttgcaaaaaaattttttgaggcaaggtttttaacatctttgtgtaaaatatctttggctggtttacaatcaaccctgattaaaaaattttggtttaataaatccgattgaaatttggaaatgcacataacaattgctaaaacttcctttttaacagttgaatattttaattgtgtaggattccaatgttttgatgtatatggaatgacatgatcttggccatggactctttgtttgatgatgccaccataacctatgtctgatgcatcagtttcgacaattttaaatgcttgtggaataggaagatacagacattttatggattggactttgagtttgatttctttaactatttgtgtatggaggtcagaccaaggaggcggatttttcttcagcctatcatgcaatggcttgacaatattgtttaaataggggacaaattctcctacataatttagacaacctagaaatctttgtaactgggttttgtctaagatttggttgggaaatttgctagcaaactctattgacctttctattggaatgattgtaccttgatatatattgtgaccaaggaattgaattcgagtttggaaaagattgattttttatttggagactgtcaaaccattctgtttgataatatggatgaaagtttggagatgttttaaatgttggtcaatgttttgggaaaagattaaaacatcttttacttccctttctagattgtttatctttgtttgaagatcttggattgttgttggtttggctgaagagttttctaaccttttgaat

SEQ ID NO: 13192 - DNA, 1166 bp, Glycine max
  Gm_smallRNAprecursor_6025
ttcaattggctatgcatagtcggccgatatttgtttggcagttgccggtttgagagattcctgagtggatggctcaggtttgattgaggtaatctgggttgatgacccttctaaattggttttctaggtagatgacccagcctgggttggtgacccagaagaggttgatgatttcttagtggttggctccgaaagagccagtcttgatcctttgcctgtacttcgtcctccccttagggagattcctgatgccttaggaggcattaccacttttctgtaagaattcatgtgtaaggtagttaggtaatgaaattgaggtgcccttgatatattctatgtcaaaatcaaagacacttagaattgcttgccatcttgcaaaaaaattttttgaggcaaggtttttaacatctttgtgtaaaatatctttggctggtttacaatcaaccctgattaaaaaattttggtttaataaatccgattgaaatttggaaatgcacataacaattgctaaaacttcctttttaacagttgaatattttaattgtgtaggattccaatgttttgatgtatatggaatgacatgatcttggccatggactctttgtttgatgatgccaccataacctatgtctgatgcatcagtttcgacaattttaaatgcttgtggaataggaagatacagacattttatggattggactttgagtttgatttctttaactatttgtgtatggaggtcagaccaaggaggcggatttttcttcagcctatcatgcaatggcttgacaatattgtttaaataggggacaaattctcctacataatttagacaacctagaaatctttgtaactgggttttgtctaagatttggttgggaaatttgctagcaaactctattgacctttctattggaatgattgtaccttgatatatattgtgaccaaggaattgaattcgagtttggaaaagattgattttttatttggagactgtcaaaccattctgtttgataatatggatgaaagtttggagatgttttaaatgttggtcaatgttttgggaaaagattaaaacatcttttacttccctttctagattgtttatctttgtttgaagatcttggattgttgttggtttggctgaagagttttctaaccttttgaat

SEQ ID NO: 13193 - DNA, 1166 bp, Glycine max; identical to SEQ ID NO: 13192
  Gm_smallRNAprecursor_6026

SEQ ID NO: 13194 - DNA, 1167 bp, Glycine max
  Gm_smallRNAprecursor_6027
ttcaattggctatgcatagtcggccgatatttgtttggcagttgccggtttgagagattcctgagtggatggctcaggtttgattgaggtaatctgggttgatgacccttctaaattggttttctaggtagatgacccagcctgggttggtgacccagaagaggttgatgatttcttagtggttggctccgaaagagccagtcttgatcctttgcctgtacttcgtcctccccttagggagattcctgatgccttaggaggcattaccacttttctgtaagaattcatgtgtaaggtagttaggtaatgaaattgaggtgcccttgatatattctatgtcaaaatcaaagacacttagaattgcttgccatcttgcaaaaaaattttttgaggcaaggtttttaacatctttgtgtaaaatatctttggctggtttacaatcaaccctgattaaaaaattttggtttaataaatccgattgaaatttggaaatgcacataacaattgctaaaacttcctttttaacagttgaatattttaattgtgtaggattccaatgttttgatgtatatggaatgacatgatcttggccatggactctttgtttgatgatgccaccataacctatgtctgatgcatcagtttcgacaattttaaatgcttgtggaataggaagatacagacattttatggattggactttgagtttgatttctttaactatttgtgtatggaggtcagaccaaggaggcggatttttcttcagcctatcatgcaatggcttgacaatattgtttaaataggggacaaattctcctacataatttagacaacctagaaatctttgtaactgggttttgtctaagatttggttgggaaatttgctagcaaactctattgacctttctattggaatgattgtaccttgatatatattgtgaccaaggaattgaattcgagtttggaaaagattgattttttatttggagactgtcaaaccattctgtttgataatatggatgaaagtttggagatgttttaaatgttggtcaatgttttgggaaaagattaaaacatcttttacttccctttctagattgtttatctttgtttgaagatcttggattgttgttggtttggctgaagagttttctaaccttttgaata

SEQ ID NO: 13195 - DNA, 1247 bp, Glycine max
  Gm_smallRNAprecursor_6028
tgatgatttcttagtggttggctccgaaagagccagtcttgatcctttgcctgtacttcgtcctccccttagggagattcctgatgccttaggaggcattaccacttttctgtaagaattcatgtgtaaggtagttaggtaatgaaattgaggtgcccttgatatattctatgtcaaaatcaaagacacttagaattgcttgccatcttgcaaaaaaattttttgaggcaaggtttttaacatctttgtgtaaaatatctttggctggtttacaatcaaccctgattaaaaaattttggtttaataaatccgattgaaatttggaaatgcacataacaattgctaaaacttcctttttaacagttgaatattttaattgtgtaggattccaatgttttgatgtatatggaatgacatgatcttggccatggactctttgtttgatgatgccaccataacctatgtctgatgcatcagtttcgacaattttaaatgcttgtggaataggaagatacagacattttatggattggactttgagtttgatttctttaactatttgtgtatggaggtcagaccaaggaggcggatttttcttcagcctatcatgcaatggcttgacaatattgtttaaataggggacaaattctcctacataatttagacaacctagaaatctttgtaactgggttttgtctaagatttggttgggaaatttgctagcaaactctattgacctttctattggaatgattgtaccttgatatatattgtgaccaaggaattgaattcgagtttggaaaagattgattttttatttggagactgtcaaaccattctgtttgataatatggatgaaagtttggagatgttttaaatgttggtcaatgttttgggaaaagattaaaacatcttttacttccctttctagattgtttatctttgtttgaagatcttggattgttgttggtttggctgaagagttttctaaccttttgaatatgttgcttacatcaaatttattgtttgtaataaaatccttttgtctaggttttacctctaaagttttcttaagtttttccaaaaaaaccttcttttcctgggggtcaggtatggaattgattgcttcaaacaagagatcctgttctctcgttagagtattgatttgcccatcatcatcatcttttgatgatagttggtcatcttgttggattagatttagtttttcatcagaaagcatggaggat

SEQ ID NO: 13196 - DNA, 1246 bp, Glycine max
  Gm_smallRNAprecursor_6029
gatgatttcttagtggttggctccgaaagagccagtcttgatcctttgcctgtacttcgtcctccccttagggagattcctgatgccttaggaggcattaccacttttctgtaagaattcatgtgtaaggtagttaggtaatgaaattgaggtgcccttgatatattctatgtcaaaatcaaagacacttagaattgcttgccatcttgcaaaaaaattttttgaggcaaggtttttaacatctttgtgtaaaatatctttggctggtttacaatcaaccctgattaaaaaattttggtttaataaatccgattgaaatttggaaatgcacataacaattgctaaaacttcctttttaacagttgaatattttaattgtgtaggattccaatgttttgatgtatatggaatgacatgatcttggccatggactctttgtttgatgatgccaccataacctatgtctgatgcatcagtttcgacaattttaaatgcttgtggaataggaagatacagacattttatggattggactttgagtttgatttctttaactatttgtgtatggaggtcagaccaaggaggcggatttttcttcagcctatcatgcaatggcttgacaatattgtttaaataggggacaaattctcctacataatttagacaacctagaaatctttgtaactgggttttgtctaagatttggttgggaaatttgctagcaaactctattgacctttctattggaatgattgtaccttgatatatattgtgaccaaggaattgaattcgagtttggaaaagattgattttttatttggagactgtcaaaccattctgtttgataatatggatgaaagtttggagatgttttaaatgttggtcaatgttttgggaaaagattaaaacatcttttacttccctttctagattgtttatctttgtttgaagatcttggattgttgttggtttggctgaagagttttctaaccttttgaatatgttgcttacatcaaatttattgtttgtaataaaatccttttgtctaggttttacctctaaagttttcttaagtttttccaaaaaaaccttcttttcctgggggtcaggtatggaattgattgcttcaaacaagagatcctgttctctcgttagagtattgatttgcccatcatcatcatcttttgatgatagttggtcatcttgttggattagatttagtttttcatcagaaagcatggaggat

SEQ ID NO: 13197 - DNA, 1153 bp, Glycine max
  Gm_smallRNAprecursor_6030
ggaggcattaccacttttctgtaagaattcatgtgtaaggtagttaggtaatgaaattgaggtgcccttgatatattctatgtcaaaatcaaagacacttagaattgcttgccatcttgcaaaaaaattttttgaggcaaggtttttaacatctttgtgtaaaatatctttggctggtttacaatcaaccctgattaaaaaattttggtttaataaatccgattgaaatttggaaatgcacataacaattgctaaaacttcctttttaacagttgaatattttaattgtgtaggattccaatgttttgatgtatatggaatgacatgatcttggccatggactctttgtttgatgatgccaccataacctatgtctgatgcatcagtttcgacaattttaaatgcttgtggaataggaagatacagacattttatggattggactttgagtttgatttctttaactatttgtgtatggaggtcagaccaaggaggcggatttttcttcagcctatcatgcaatggcttgacaatattgtttaaataggggacaaattctcctacataatttagacaacctagaaatctttgtaactgggttttgtctaagatttggttgggaaatttgctagcaaactctattgacctttctattggaatgattgtaccttgatatatattgtgaccaaggaattgaattcgagtttggaaaagattgattttttatttggagactgtcaaaccattctgtttgataatatggatgaaagtttggagatgttttaaatgttggtcaatgttttgggaaaagattaaaacatcttttacttccctttctagattgtttatctttgtttgaagatcttggattgttgttggtttggctgaagagttttctaaccttttgaatatgttgcttacatcaaatttattgtttgtaataaaatccttttgtctaggttttacctctaaagttttcttaagtttttccaaaaaaaccttcttttcctgggggtcaggtatggaattgattgcttcaaacaagagatcctgttctctcgttagagtattgatttgcccatcatcatcatcttttgatgatagttggtcatcttgttggattagatttagtttttcatcagaaagcatggag

SEQ ID NO: 13198 - DNA, 1168 bp, Glycine max
  Gm_smallRNAprecursor_6031
ggaggcattaccacttttctgtaagaattcatgtgtaaggtagttaggtaatgaaattgaggtgcccttgatatattctatgtcaaaatcaaagacacttagaattgcttgccatcttgcaaaaaaattttttgaggcaaggtttttaacatctttgtgtaaaatatctttggctggtttacaatcaaccctgattaaaaaattttggtttaataaatccgattgaaatttggaaatgcacataacaattgctaaaacttcctttttaacagttgaatattttaattgtgtaggattccaatgttttgatgtatatggaatgacatgatcttggccatggactctttgtttgatgatgccaccataacctatgtctgatgcatcagtttcgacaattttaaatgcttgtggaataggaagatacagacattttatggattggactttgagtttgatttctttaactatttgtgtatggaggtcagaccaaggaggcggatttttcttcagcctatcatgcaatggcttgacaatattgtttaaataggggacaaattctcctacataatttagacaacctagaaatctttgtaactgggttttgtctaagatttggttgggaaatttgctagcaaactctattgacctttctattggaatgattgtaccttgatatatattgtgaccaaggaattgaattcgagtttggaaaagattgattttttatttggagactgtcaaaccattctgtttgataatatggatgaaagtttggagatgttttaaatgttggtcaatgttttgggaaaagattaaaacatcttttacttccctttctagattgtttatctttgtttgaagatcttggattgttgttggtttggctgaagagttttctaaccttttgaatatgttgcttacatcaaatttattgtttgtaataaaatccttttgtctaggttttacctctaaagttttcttaagtttttccaaaaaaaccttcttttcctgggggtcaggtatggaattgattgcttcaaacaagagatcctgttctctcgttagagtattgatttgcccatcatcatcatcttttgatgatagttggtcatcttgttggattagatttagtttttcatcagaaagcatggaggatgaagcttctgct

SEQ ID NO: 13199 - DNA, 1159 bp, Glycine max
  Gm_smallRNAprecursor_6032
atccatttttcagggagagttacttcatcccattttattattctttttaaagaaacattggcttttgtcatatcagtgataaataaggttgtttctcccttttgtggttgtaataggactctagacgcacaggtattcatgaccttgtactggatcctataaattaaggctgctgaaattgatccttctttcatgtcaaggccatgaaagtggatgtttaagaacagagagtcaagaatgtttctgtccatcagactcactgtcttgtttggataacaattaaaatatattggaccttgtcctaggctggtttcgactgttccaattaaggagtcttcaaatttattatgcctaatatctcttagacacattaaaactgttgcatctatgcctatgtcaattaagggcttgatggctacttgtacacagtcgatgtgtagatatttatacttacagctatgttcataaattgaattttttgaaagtaaatgaaattcttcccctatatcttgtcctagaggaatattgttttctactattttgattatgtaatcaaagttgtgtttgtccttaattgtttcaggaacatatagttgatcttgagggatttctggaatgttccagtcatccatgttttgattgatatcttcgaatcgaacttcctcatcgaagagattgtgtttgggggtgacctcttgggtctggttatcttgatcacttaataaattggaatatcttgaagaagatgatgaagaagaatttgatcgaaaagagatatgggaaaaagagcgcaatagtctagacatgattataacattctctaatatctttgccttcatttggttccatagaaatatttccataaggctatatgttacagaacttcttggatctaaacaaatgaaaaagattttttttttttacggacaatatagtttgaacactactcctatagccatcagtatattatgtatattatgtctcaatattttatttgaacaatacaccttagtcttactgccctttctcaaccacgggacttactgctacagtataattcaactaaaatatcagattgttgtgcttccagaaaatattgttcaaacatatactatttaaattaaaactactgtacatggttcagatccataagttcaca

SEQ ID NO: 13200 - DNA, 1036 bp, Glycine max
  Gm_smallRNAprecursor_6033
aataccatgttcttacctcatcacgtttcataatatctaacttgcgacgaaaaaatctcatatgatcattgctgatatgttggtttccacgtcgcagccacctacaaagattaaaatttaatataccctaaaatcatttattctattgaaatgaaagacgcttttaaaaatgactaacctgtgccccagtggtctacttgggaaggagtcctctttggagccaaggttggacatcgttcccatgcccacatttgtagtaagatgcacatacctccgattgatttagttttataatcggtggcactgcacatctctctgtatagaaaagcaagtacagcaggtccccatgcatatgtgtcgcagtcttgaaagtcacgtaaaaattgaaggtgccttagcgaaactttgttactgtttttgtcaacgaacaagacacttccaatgaatctcagtatccatgcacgggcaaaccttcgtacttgttcttcgacgtcatcgttatttatttgtgcaaaatggtgagccagccaacttaatttaaccacactacctttaatttcaccttcttgtggtctgactcccaataatttctcacataaatcagcccaatcaagatttgttggaccgattaatggtaaaccatccacacgtatacctaacaatacacagacgtcttggagagtaatagtacactcttcgcatctcatgtgaaacgtatgtgtttccggcctccatctttctatcagagcactaattaatgagacatttatttttaagtatcccatcttcataatcgagtaaaaaccagattgtcgaagaaaatgaaaaatttgctctggaatttcttcttccccttgatatgtggggacagctcgtctgatatgtaatttccgattttcttccccatttcaaacatgttctgaaacatgcttaggttgcatccgtaatacatcaccatcgatggaggcagacttaattttaatatgtgatggacatgacgatgaagattccattactactgcaaaataaaatataa

SEQ ID NO: 13201 - DNA, 1037 bp, Glycine max
  Gm_smallRNAprecursor_6034
aataccatgttcttacctcatcacgtttcataatatctaacttgcgacgaaaaaatctcatatgatcattgctgatatgttggtttccacgtcgcagccacctacaaagattaaaatttaatataccctaaaatcatttattctattgaaatgaaagacgcttttaaaaatgactaacctgtgccccagtggtctacttgggaaggagtcctctttggagccaaggttggacatcgttcccatgcccacatttgtagtaagatgcacatacctccgattgatttagttttataatcggtggcactgcacatctctctgtatagaaaagcaagtacagcaggtccccatgcatatgtgtcgcagtcttgaaagtcacgtaaaaattgaaggtgccttagcgaaactttgttactgtttttgtcaacgaacaagacacttccaatgaatctcagtatccatgcacgggcaaaccttcgtacttgttcttcgacgtcatcgttatttatttgtgcaaaatggtgagccagccaacttaatttaaccacactacctttaatttcaccttcttgtggtctgactcccaataatttctcacataaatcagcccaatcaagatttgttggaccgattaatggtaaaccatccacacgtatacctaacaatacacagacgtcttggagagtaatagtacactcttcgcatctcatgtgaaacgtatgtgtttccggcctccatctttctatcagagcactaattaatgagacatttatttttaagtatcccatcttcataatcgagtaaaaaccagattgtcgaagaaaatgaaaaatttgctctggaatttcttcttccccttgatatgtggggacagctcgtctgatatgtaatttccgattttcttccccatttcaaacatgttctgaaacatgcttaggttgcatccgtaatacatcaccatcgatggaggcagacttaattttaatatgtgatggacatgacgatgaagattccattactactgcaaaataaaatataat

SEQ ID NO: 13202 - DNA, 1053 bp, Glycine max
  Gm_smallRNAprecursor_6035
ccaacttaatttaaccacactacctttaatttcaccttcttgtggtctgactcccaataatttctcacataaatcagcccaatcaagatttgttggaccgattaatggtaaaccatccacacgtatacctaacaatacacagacgtcttggagagtaatagtacactcttcgcatctcatgtgaaacgtatgtgtttccggcctccatctttctatcagagcactaattaatgagacatttatttttaagtatcccatcttcataatcgagtaaaaaccagattgtcgaagaaaatgaaaaatttgctctggaatttcttcttccccttgatatgtggggacagctcgtctgatatgtaatttccgattttcttccccatttcaaacatgttctgaaacatgcttaggttgcatccgtaatacatcaccatcgatggaggcagacttaattttaatatgtgatggacatgacgatgaagattccattactactgcaaaataaaatataatacaataaatttacaaatcaatttatacattatttgtagataatataaattaaactacgcacatttataaaaacgttattaaatatatattatacaaatttaaataaataaataaatattattatttcataacaaaatatattatataaataataaaatttaaatatattctacaaataataaaatttaaatatattctacaaataatttcaaatacatacacacacaaatttaaataattaacataatatattctacaattaacaaataaataattaaataaaatatggactaacaaataaattaaaatacaaacaaatattaaaatgccaaaaattatttaaacaatatatatatacaaaaataataataatgtacaatatatcatatatttaataacgtaaatttcctaaaacaaagaatattaacctacaaactaaaaataaaacctaccatgtactaacgtaaattaccctatcatatatatatatatatatatacacacacgtgtgcctaactaaagctaatatgtctaactaaaata

SEQ ID NO: 13203 - DNA, 1245 bp, Glycine max
  Gm_smallRNAprecursor_6036
ttatacattatttgtagataatataaattaaactacgcacatttataaaaacgttattaaatatatattatacaaatttaaataaataaataaatattattatttcataacaaaatatattatataaataataaaatttaaatatattctacaaataataaaatttaaatatattctacaaataatttcaaatacatacacacacaaatttaaataattaacataatatattctacaattaacaaataaataattaaataaaatatggactaacaaataaattaaaatacaaacaaatattaaaatgccaaaaattatttaaacaatatatatatacaaaaataataataatgtacaatatatcatatatttaataacgtaaatttcctaaaacaaagaatattaacctacaaactaaaaataaaacctaccatgtactaacgtaaattaccctatcatatatatatatatatatatacacacacgtgtgcctaactaaagctaatatgtctaactaaaatatcacacatatataacatataatatatcataatatatatttaataacgtaaatttcataaaacaaaaaatattaacctacaaactaaaaataaaacctaccatatactaacataaactaccctatcatatatatatatatatatatatatatatatatatatatatatatatatatatatatatattaaaaaaattcaaaccaaaaataactaaatcaaataatataacttatcaactcatttatttaaaactcaaaattgtttagccaaatattattacaaaagctcaaaattatttagcctaatattacaaaagttcaaaatttacgtgtgcctagattttagatatatatacctaaagctaatattaacttgtgtctaatattacaaaaactaatattacatgtgcctaattaaagctaatatgtttaactaaaatatcatacatatacaacacatataatatctcagaatatatacaataatcaaataatattttcataccaactaaccaaataatattttcatgctaattaacctaaccttcgaatacatattaatacataaaaattaacaatagaatacatattaaaactaactaacctaatcttaaaatacctattaatactaactaacttaatttttttataatattaagaacataatacataaatattatttaattaaaaaatacttaccagtaattatgaaggagaaagagcac

SEQ ID NO: 13204 - DNA, 1188 bp, Glycine max
  Gm_smallRNAprecursor_6037
ccctcttcatgcttattttaatttatacatgtgaaccatcatcatccaaagtgacgatgaatttaggtaggcgcgggtatcaaatatacacacaattgaatattgttaataagctagatgttatcttatttggttcactaatctagtccttgtagaaaataaaaattatagttaaaaacaccaattgggcgtcaggatatcctgactgctgccattgggcgaccagagcaccctagccgtgtttgtgctgttggagccggtgtcaccataaagcaatactttggatcgacttcacgaacgtcccacaattcttccttcccgcctggttgccctaggaagactttatgagggatccacaacagttcacaacatccctttgttgcatggccaagtcaaggttggtgttgagtaggttaaagatgcagaggctctcgttcttgtacccactgacgaggttaccttagtggggcagacacttaacaccttccttgcttggccaacacatcttgtgaagcgtttatcagaataggtattttactttgattatatgtttatttttttcaattaattttttcactgtaatcaaagcttgctaattaactatgtttttatcaacaggcagctgtgtctccagcaaaacctccagaaagcccagatgaagaggtcgatgatcccctgtacttgatgacattgaccatcccacaactgtttttgaagccgctccaggttatgtgggatgctaccatattcggggtgtttaatcaaaacttcccattgtatataaagcacgaagatctcactgaaattgcacacggtggtcaatgtctcagcatatctgttatacagttgtggattctgtaagtcattttagattactattaattaccaaagtaattgttttaaattcatacataattaactttgacttaacaacacagccatctgactgagacaagtgtgcgagcggggaattctgatgtgtatggattcctcgagccacagtccattcagaaatctgggcaatcacaatttgaatcggaaagttacatcaagaattggatacagagttcaaaacgagatgtttaccttggagcctacctgaatgggtaagtcaaacacaataattgaatttaaataatctatactactacaataacccatattcgtctctactgcagcggacactgg

SEQ ID NO: 13205 - DNA, 1085 bp, Glycine max
  Gm_smallRNAprecursor_6038
ttagttctatgtcctacatgttttattttcttgtcatgtttactttcaataaagcaattatgagaatcaaatgacaccaaaaatcaaggttatcaaactcgagagtttacgtagactcgtaagagttccatagactcaacacatagattcgtaagagtctacttcatataaaaataataacaaaatatctataaataacatactaattaaacatttcaacaatataataaagaaaaatagtaaatcataaagttcaaaatatttaaataaccaagtctggtaataatacatcactactagataacaacttacaaaggttctagtagtggtagatcattctcatcgagagtttgatgttattagagaaaagggtttgatattattagaggtgagaatttggtatttgagaataacacactaaatgaaggtatgttgaatgctaaacagacagaaaacaataaaaaattacttacattttggtctaatttttttaacttgctaactcgttgactcgatggtaaacttgagagtctaccgagtttacttagagtttatagagtttacccaaagtctactaaaaaaagagtttactcaagagtcaactcgcagagaacaagtggaatcgtaaacttgtaagagttagccaattaacttgagagtttgataaccatgccaaaaatcctttatcacataattgactaacacttaataaactatgcttaagaccatcaacaagtaaaacattttctatggaggtagagggattcgtacctattttttcgactccaagaattttacctttgttgttgtcttcataggtcacatgtccactattctttggagaaatatgagtaaactttgatgcatctcctatcatgtgtttggagcaaccgctatcaatgtactaactttgcttcaaggagtcctcttcttcgctttcatagtctttggccatgaggtctagatttacgattttgttttttgaatcacttgatgaatccatgtcattatcttcccaagtgatatatgttttctttcctttcttatctttgaaagttttcttgttaggtttttccattcttctt

SEQ ID NO: 13206 - DNA, 1052 bp, Glycine max
  Gm_smallRNAprecursor_6039
tcatgtttactttcaataaagcaattatgagaatcaaatgacaccaaaaatcaaggttatcaaactcgagagtttacgtagactcgtaagagttccatagactcaacacatagattcgtaagagtctacttcatataaaaataataacaaaatatctataaataacatactaattaaacatttcaacaatataataaagaaaaatagtaaatcataaagttcaaaatatttaaataaccaagtctggtaataatacatcactactagataacaacttacaaaggttctagtagtggtagatcattctcatcgagagtttgatgttattagagaaaagggtttgatattattagaggtgagaatttggtatttgagaataacacactaaatgaaggtatgttgaatgctaaacagacagaaaacaataaaaaattacttacattttggtctaatttttttaacttgctaactcgttgactcgatggtaaacttgagagtctaccgagtttacttagagtttatagagtttacccaaagtctactaaaaaaagagtttactcaagagtcaactcgcagagaacaagtggaatcgtaaacttgtaagagttagccaattaacttgagagtttgataaccatgccaaaaatcctttatcacataattgactaacacttaataaactatgcttaagaccatcaacaagtaaaacattttctatggaggtagagggattcgtacctattttttcgactccaagaattttacctttgttgttgtcttcataggtcacatgtccactattctttggagaaatatgagtaaactttgatgcatctcctatcatgtgtttggagcaaccgctatcaatgtactaactttgcttcaaggagtcctcttcttcgctttcatagtctttggccatgaggtctagatttacgattttgttttttgaatcacttgatgaatccatgtcattatcttcccaagtgatatatgttttctttcctttcttatctttgaaagttttcttgttaggtttttccattcttctt

SEQ ID NO: 13207 - DNA, 1051 bp, Glycine max
  Gm_smallRNAprecursor_6040
atttaagatattttttggtgaatatatattttaaaatctaaattttgtataataatatatttattttagtaaatatttattttgtataataatctgaattttaaaatttttaatttaactattttactaaatataattagtttgtttatgtttttagatttaattaaaaataataaaactaaagcttttaacaatttatttatataagaacattatactacgtcatcaataaaatatttaaacaatgacatttgtctaaggaaaaactaagatgaggatacattaggacaattatttctgctatgaccatgttgttgacaaagtccacatttttttctacttgctcgttcattttcgtcttcgtccatctcagtaggaatgcgagttgaaactggacgaccctttacaatcctctttctccttggatcaggaccctactgatctccttcatattcttgccacattgattcgtgtggcaataaaccaaaggagttgtcgtagatgtgcaaaatgtgttgtaaagtgaatatcatcggcacataggtcatgggatcaacattgacagatttacaggcagccatgacgtgagaacacggtaaatgtttagcctgaaattcaccacaatcacacttttgggattgtaacattactctaaaccttccaggtggtctgggtgtttcaagtggggattgagtctcggttataataaaagtgtgattgtgtctatcgaattcatttacaatgtgtgtattagattcttgttgaccactattgattgcatcgaagacgacttcagaatactgtgagccggagttgatcattgcctgagtttttgacctctattagcaaagagttgtgcggtcttgaaataggtctcctcaaccaatgatgacaccgacaaatgtcttgtgtttttgaacatggaattaacagactccgacaaattggtagtcatatgtccccaacgtttccccttatcaaagcattgtacccatttttgtttgggtaattgatcaagccattcagctgcacttggcttattcgcacgaat

SEQ ID NO: 13208 - DNA, 1091 bp, Glycine max
  Gm_smallRNAprecursor_6041
ggacaattatttctgctatgaccatgttgttgacaaagtccacatttttttctacttgctcgttcattttcgtcttcgtccatctcagtaggaatgcgagttgaaactggacgaccctttacaatcctctttctccttggatcaggaccctactgatctccttcatattcttgccacattgattcgtgtggcaataaaccaaaggagttgtcgtagatgtgcaaaatgtgttgtaaagtgaatatcatcggcacataggtcatgggatcaacattgacagatttacaggcagccatgacgtgagaacacggtaaatgtttagcctgaaattcaccacaatcacacttttgggattgtaacattactctaaaccttccaggtggtctgggtgtttcaagtggggattgagtctcggttataataaaagtgtgattgtgtctatcgaattcatttacaatgtgtgtattagattcttgttgaccactattgattgcatcgaagacgacttcagaatactgtgagccggagttgatcattgcctgagtttttgacctctattagcaaagagttgtgcggtcttgaaataggtctcctcaaccaatgatgacaccgacaaatgtcttgtgtttttgaacatggaattaacagactccgacaaattggtagtcatatgtccccaacgtttccccttatcaaagcattgtacccatttttgtttgggtaattgatcaagccattcagctgcacttggcttattcgcacgaatatccccaagatgtcgccagtgcatcttctccgtgtatgcgtaccctgtaaatatttaatcaatgtattatgttataaaatttgattgaaagaaaattataacaaataaataaaatagattctcaccagccaacataagtggtttctttaaatgtttgcagtttgagttaccacgaagaaagttttgtgcaatgtggcgcaggcaaaagaaatgggatgtgtcctggacccataagttacttgggttgttgtaggcacttataattgaggggtgtcggtctgaaataagagaaatgttaatttgcggagtaacatgtcttctcaaa

SEQ ID NO: 13209 - DNA, 1040 bp, Glycine max
  Gm_smallRNAprecursor_6042
attcgcacgaatatccccaagatgtcgccagtgcatcttctccgtgtatgcgtaccctgtaaatatttaatcaatgtattatgttataaaatttgattgaaagaaaattataacaaataaataaaatagattctcaccagccaacataagtggtttctttaaatgtttgcagtttgagttaccacgaagaaagttttgtgcaatgtggcgcaggcaaaagaaatgggatgtgtcctggacccataagttacttgggttgttgtaggcacttataattgaggggtgtcggtctgaaataagagaaatgttaatttgcggagtaacatgtcttctcaaattctttagaaaaaacccccaagctgaagttgtctccccttctacaatggcataggcaatcgggaagatatggttagctccatcttgtgcggtagctatcaacagtgtgccagtatactttccgtaaagccatgtaccatctacttgtacaatgggtttgcaatatgcaaaaccattaatgcatggaccaaatgaccaaaagacacgtttaaacaatcttttgcccggtactatttctcccccctcatacaaggattctgtttgagcagcgaccacagtcccgggaacacaagattgcaaagctccgaaaagttttggcagtttgacatatgattcttcccagtttccatgaatcatctccaatgctttttgctttgctaaccatgtcttcttgtaggatggggtataattcatgaacgttttgatctctacaatcaatgtcttgatggagacagttgggtttgttttgacaattggttggatgatctgtgctatgacgtgtttgtcgagttggcgatgatcttgtctaagcatcggcacgagacaagtgtgatgacctctgatactcttgataatccatttgttatgcctctttgaattgcatgcgcccaagctccatgtacaaccattttcatgtaacttgcagacgaagtgtagccttctttggtcagagtaaattgttctgcaatcaaaatgatttctga

SEQ ID NO: 13210 - DNA, 1071 bp, Glycine max
  Gm_smallRNAprecursor_6043
gtcctgaaatttactctaatttattttgtcacaatctagatgagtaacaaaatttgcagtatccaaaccattgaaacctgaaagaactactcaagccaccaaaacagaattaaggaggtagcagacctgtatgtgttagcatcaagagattgaaatgattggaaggccttcgtgttcaatacggctgcgattccactaggttggctcagaaattcactgatgtgatatttattgcctccaagatcatcattatatgttggcagaataattctctccttttttgcagcaaacaaatttgccttctttttgtcatttgaattcatggaagttaatgccttcaccttgagatccattttcctaaatatttcaattcatggtaaaaaaaagctaacaattcttagcaaagatctcaattcacaatatttgagttccacaacaaatccaacaaaaaaaaaaacaaaaataagaacaaattactctgacacccctgtgatttcttaagattgcacatcatacccttgcctttttaacccgtacagtacccccttaaggagagatattgtaaagtaaggcaaagatattgtgtgcaatctcaagaaactacaagggaatgtcaatataatttgctctaaaaataaacaagaagtactacaagatctcatcagtacacaagtacacatagcaagggaaaactttatccttaaagcaagttcacacaatataactcggataagttgaagctatacggcaggttgaatagttaaaagaaaagagaaggggagtaaggttacggattcgatacccactgttaacaaaactaacattctaacaactatatataaaaaaaaactaactagctaacccgtggctgaatttttgtgtggtgggggatgaacgtgtgacccaaaattgtccatgtccgtaccatttgttgctcaaaaggatagcttttgctgcaaaatcaaagcaccagggattaggctaaaacagagaaagagaactcagaatgggagtgtttgattgcagagagaagagaaaggaaatggtagttagagtgatcacccattaatc

SEQ ID NO: 13211 - DNA, 1112 bp, Glycine max
  Gm_smallRNAprecursor_6044
ttcccgagtgtccttcacaaccactgaatacccatggcataacgctgaaaggcaaacaagatgaaaattggagacaattgttcgccccaatgatcaatcaatggaacaatcgagctgagtttagggtcgacgtttattcccgacaagaggacctattgagttttaactctgactacatggtctggtataggcgaaaaacgaagatgtttgtcgacccgaagaatgcaaacacaactacattggtatttatttgtttttgaatttttaagttcaaattattttttaaagcatcgacattaatttcctcatcctaataattgcagggtgaagttgcagagacattacaatatatggtgtcaccacacgcgaggaacatatggacagttgatgatctcgtgccttatgtggagaagataacgattttatccgaagagcaagagagaatcactgagcctgtggcacatggtccaacatcagaacgtcgatttccaccacaagagtttcacatgcttcagtcaagtgttgaaactcagggttttggcagatgaagggaggctgttgaagcggaagaattttcccaacaaatggaggagcgtggccatggaatgtattacacgccaccaacattttctcagtatccttcacagatgtatcagtatcctttcgaaggtcatcacactgatacttctgtaagagaacattcgttcgggggtgtcgcggaaatacatccttatttttcatggccgactatgaccccttcacagcaacatgatgccccaattgcaacacctaatgccccattaggtccgcaatggaatgtacccggagcaatacctgatatgggtgacttattaggtgttgatttgtgtcacaaattttctgctgaggctgagcaagtagaagcagggagacatcgcggccgaagaaatcctgatcgtcaaacgcgaagatgggatcgaccatgtggcacatcctcacgtcatcacggacatcataatgaattattttccgtctctgtttaaatttgttgtatgcttgtcatttgaatttgacacttaatctatcgtatgcagtttattaaagcttagtaatggatacagtttatgtcacac

SEQ ID NO: 13212 - DNA, 1039 bp, Glycine max
  Gm_smallRNAprecursor_6045
ggagtggattcatggagttggggctgtgccatctacccttcaccagaagctcattatctggagggaggatgggattgtggaaaatatagaggcggatcaaagcttctataagtcagaggtcgataatgttactgcacaaacctttgataaaaagttggctaacatagcaccttgtggtgacaaagaggctgttgtcgaatcgagtgacaatgttgtccactctgtcaaactccatcctacttatgggtttatatgggagagggaggaaattgatgctgttccctctgaagatggagtcattccgccaactgggtggaatacatatgaagattaatatgactgaggccactgcatgggccagaattacggcttatatggccgaaaatagactaaatacggcctttgaggctgaatctcaacaaaatatggcagttgaagccaagatcgaagatcatgaaaacaaagaaacaaaggatcgaagactggattgtatttatgatgatgagccgctgggttttgagaaaaatcccataagtgaggtgccaaagatgcaggctcaagatcctttggaagaagtcgatattggagatggctcgattaataggccaacttatatcagtgccaatatcacctcaagtttaaaagaaaagctggtgcctcttcttagagagtttaaagactgttttgcttgggattaccacgaaatgcctgggttaagcagagaaatggtcgaaatgaagttacctattaaggagggaaaaagaccagtaaaacaactaccaagaagattcgcaccagaaatcatgtccaagattaaggaagagatcgaaaggctgctgaggtgtaaattcatcagggctgccaggtatgtcgaatggttagcaaatatagtccctgtcattaaaaagaatggaactcttagagtatgcatagattttagggatttaaataatgctacacctaaagatgaatatgctatgccagtagcggaaatgttggtagattcggcagctggtttcgaatttttaagcatgttaga

SEQ ID NO: 13213 - DNA, 1084 bp, Glycine max
  Gm_smallRNAprecursor_6046
caagttacaggtttcatatatgtccaccaaagatcttactcgtcttggagtagactctggtgatgatagttcttgatcttgttgttgtggtggaggtgaaggtggttcacctgggtcttctagatcagcttcttcttgaggtagttgagcgggtataagaacattcttctccactttttcttcatcccaattgcaagaagcatactcattaacttcaacatctcgactgatgacgagtttcttagtttgcaagttgtagacacggtagcccttagagatattgctatacccaaggaagatacctcgtatagtcttatcttcaagcttgtgcctcttcacgtctggaatatgaatgtagcatatagatccaaagacccttaggtgttttgctgatggcttcttcccgttccaagcttcaattggagtcttgtcttttacagacttagttggacatctgttgagtatgtaaacagcagtgtagactgcttcagcccagaatgtgttaggtagtcccttctccttgagcattgatctagtcatttccataattgtgtgattctttctctcaaacacttcattttgttgaggagaatatgcgactgtaagttgtcgctcaatgccttcatcctcacaaaatctttcaaactcgcaagaggtgtactctttgtcgtgatcacttcttagtacttttatccgtttttcactttgattttcagcaagggccttgaactttttgaatactccaaatacttctgatttttcttttagaaaatatacctatgtcattctagagaagtcatcaataaagagtatgaagtacctgttgttttcatgtgatggcgtcctcattggtccacagacgtcggtatgtatcagctccaatagatctttcgctctccatgctccgcttgttgagaaaggaaattggtgttgcttaccaaggagacatccttcacacacttgattgttctcctttatgcttggaagatctctcatcatgttcttctcatgtaacaacttcaaggcatgagtgttgaagtggccaaatctttgatgccatagccatgaatcatcaacttgtacc

SEQ ID NO: 13214 - DNA, 1079 bp, Glycine max
  Gm_smallRNAprecursor_6047
taaggaaattcctagaaccttctcttcttctggaagtttctccataaattttctttcttccattttctttgttttggggctgaaatttaaagtttgactggaaggcattttcaagtgcatcttctttatgcctatacaatctttgctcatatgcttcaagagagcccaagtgttctgtctttgatagagtggacagatctttggtttcctcaatcgttgtcacgattgggtcaaacttttggggcatagtaattagaattttctcaacaattttcttgtcaagaatatcttccccaaaagctctcatttaattaactatttccttaactttagaatagtaatctttaactgtctcagactccttcatcttcaatagtttaaaatctcttcttagagattgaagtttaacgacatgtaccttaacacttccttgaaactcctcctgcaatgtgttccacgcttctttgctagtcttagctcccataattcttgggaaaattggatcagtcaccgcttgttgcaaggtgaacaacgtctttgaatttttctgtttatttttcttcaactctttttcttgagatgcattaagagctgaagtatccgcgcgaatagtgaagccttattctactatgtcccataaatcttgagatgaaaaatatgtttccattttaacacgttagaaatcataattttcaccattgaagacagggacagaaatagttgacgattgagtagtgttatccatagcttagaaaaaaatattattggagtgggttaatagtacaaaggaaatttttgaagtagttgggaggattttggaatggtaggtaggtaatgttggatcaagtggcctcggaataattaagaaggggggttgaattaattattaatgaacctttactaattaaaaatctatccttcttaatgttactagattcaattaggcttttactataatgttaagaaagtaaataacaaaaatagaaacttaaccaaaagtaaaagcaataattaaagtgcacagcagaaattaaagagtgtagggaagaagaagacaaacacaagaatttatactagtt

SEQ ID NO: 13215 - DNA, 1036 bp, Glycine max
  Gm_smallRNAprecursor_6048
attttataaaattagaattaatataagtaatatatttttataaaatttaaattataaaacaaatatttgttactaatggcaatcaattttgggtttttgaaaacttctaccagtaattcagaacgtttgttgtctccttcatcgttactaataatggcatcgggtcccttgtcattaatctcttgttcctatgatggttgaaagattggacctccattgatgtggttacgaaggtaacgtgaactagcagagataccatggtgttacgcagatcagcacgaagttcaggcccccactgtctgatttcagtatcttcttcaatcataagtaactttgcgcatgagtcgtcaacatgacccatcaacccacataggtagtagtaattaagttgccaatctctcatatttgaaaaagacctcatttgattctccaccaagtttttatttttattttcttggatttcttgggtttacggctatgaagcacggacacctcagtcccttgtcgtgtccggtgtccgacacgcgtccgtgtcagtgtccgacaccgacacgacacccgtattacgttctatattttggatattgcaggtgtccacgtatccgtgtccgtgtcgtgtccggtgtctgtgtcgatgtcagtgcttcataggtttacggacatccaatagaacacttatttgcatgtatgaacgataaatatgagtataattctttttgtcatactccaaacttccccagaaagtttccaattcttaatcctatagttcatgagccataaagccaattggtagattgtgaacttgcacccaaaaaggaacatgataaagagagatacctgcaggatcttctccatctttaatgataccctgaattaagaggtgtttgtcaaagctccatgggccacccttgagtacattttagatatccaattgatggaaaaactggaaaaggaaagttcctgtcggaattccgtgatcgtgactccttgaagtggctgccaaaatattggacaacttctctttcataatatagac

SEQ ID NO: 13216 - DNA, 1037 bp, Glycine max
  Gm_smallRNAprecursor_6049
attttataaaattagaattaatataagtaatatatttttataaaatttaaattataaaacaaatatttgttactaatggcaatcaattttgggtttttgaaaacttctaccagtaattcagaacgtttgttgtctccttcatcgttactaataatggcatcgggtcccttgtcattaatctcttgttcctatgatggttgaaagattggacctccattgatgtggttacgaaggtaacgtgaactagcagagataccatggtgttacgcagatcagcacgaagttcaggcccccactgtctgatttcagtatcttcttcaatcataagtaactttgcgcatgagtcgtcaacatgacccatcaacccacataggtagtagtaattaagttgccaatctctcatatttgaaaaagacctcatttgattctccaccaagtttttatttttattttcttggatttcttgggtttacggctatgaagcacggacacctcagtcccttgtcgtgtccggtgtccgacacgcgtccgtgtcagtgtccgacaccgacacgacacccgtattacgttctatattttggatattgcaggtgtccacgtatccgtgtccgtgtcgtgtccggtgtctgtgtcgatgtcagtgcttcataggtttacggacatccaatagaacacttatttgcatgtatgaacgataaatatgagtataattctttttgtcatactccaaacttccccagaaagtttccaattcttaatcctatagttcatgagccataaagccaattggtagattgtgaacttgcacccaaaaaggaacatgataaagagagatacctgcaggatcttctccatctttaatgataccctgaattaagaggtgtttgtcaaagctccatgggccacccttgagtacattttagatatccaattgatggaaaaactggaaaaggaaagttcctgtcggaattccgtgatcgtgactccttgaagtggctgccaaaatattggacaacttctctttcataatatagact

SEQ ID NO: 13217 - DNA, 1038 bp, Glycine max
  Gm_smallRNAprecursor_6050
attttataaaattagaattaatataagtaatatatttttataaaatttaaattataaaacaaatatttgttactaatggcaatcaattttgggtttttgaaaacttctaccagtaattcagaacgtttgttgtctccttcatcgttactaataatggcatcgggtcccttgtcattaatctcttgttcctatgatggttgaaagattggacctccattgatgtggttacgaaggtaacgtgaactagcagagataccatggtgttacgcagatcagcacgaagttcaggcccccactgtctgatttcagtatcttcttcaatcataagtaactttgcgcatgagtcgtcaacatgacccatcaacccacataggtagtagtaattaagttgccaatctctcatatttgaaaaagacctcatttgattctccaccaagtttttatttttattttcttggatttcttgggtttacggctatgaagcacggacacctcagtcccttgtcgtgtccggtgtccgacacgcgtccgtgtcagtgtccgacaccgacacgacacccgtattacgttctatattttggatattgcaggtgtccacgtatccgtgtccgtgtcgtgtccggtgtctgtgtcgatgtcagtgcttcataggtttacggacatccaatagaacacttatttgcatgtatgaacgataaatatgagtataattctttttgtcatactccaaacttccccagaaagtttccaattcttaatcctatagttcatgagccataaagccaattggtagattgtgaacttgcacccaaaaaggaacatgataaagagagatacctgcaggatcttctccatctttaatgataccctgaattaagaggtgtttgtcaaagctccatgggccacccttgagtacattttagatatccaattgatggaaaaactggaaaaggaaagttcctgtcggaattccgtgatcgtgactccttgaagtggctgccaaaatattggacaacttctctttcataatatagactc

SEQ ID NO: 13218 - DNA, 1034 bp, Glycine max
  Gm_smallRNAprecursor_6051
tttataaaattagaattaatataagtaatatatttttataaaatttaaattataaaacaaatatttgttactaatggcaatcaattttgggtttttgaaaacttctaccagtaattcagaacgtttgttgtctccttcatcgttactaataatggcatcgggtcccttgtcattaatctcttgttcctatgatggttgaaagattggacctccattgatgtggttacgaaggtaacgtgaactagcagagataccatggtgttacgcagatcagcacgaagttcaggcccccactgtctgatttcagtatcttcttcaatcataagtaactttgcgcatgagtcgtcaacatgacccatcaacccacataggtagtagtaattaagttgccaatctctcatatttgaaaaagacctcatttgattctccaccaagtttttatttttattttcttggatttcttgggtttacggctatgaagcacggacacctcagtcccttgtcgtgtccggtgtccgacacgcgtccgtgtcagtgtccgacaccgacacgacacccgtattacgttctatattttggatattgcaggtgtccacgtatccgtgtccgtgtcgtgtccggtgtctgtgtcgatgtcagtgcttcataggtttacggacatccaatagaacacttatttgcatgtatgaacgataaatatgagtataattctttttgtcatactccaaacttccccagaaagtttccaattcttaatcctatagttcatgagccataaagccaattggtagattgtgaacttgcacccaaaaaggaacatgataaagagagatacctgcaggatcttctccatctttaatgataccctgaattaagaggtgtttgtcaaagctccatgggccacccttgagtacattttagatatccaattgatggaaaaactggaaaaggaaagttcctgtcggaattccgtgatcgtgactccttgaagtggctgccaaaatattggacaacttctctttcataatatagac

SEQ ID NO: 13219 - DNA, 1033 bp, Glycine max
  Gm_smallRNAprecursor_6052
aaattagaattaatataagtaatatatttttataaaatttaaattataaaacaaatatttgttactaatggcaatcaattttgggtttttgaaaacttctaccagtaattcagaacgtttgttgtctccttcatcgttactaataatggcatcgggtcccttgtcattaatctcttgttcctatgatggttgaaagattggacctccattgatgtggttacgaaggtaacgtgaactagcagagataccatggtgttacgcagatcagcacgaagttcaggcccccactgtctgatttcagtatcttcttcaatcataagtaactttgcgcatgagtcgtcaacatgacccatcaacccacataggtagtagtaattaagttgccaatctctcatatttgaaaaagacctcatttgattctccaccaagtttttatttttattttcttggatttcttgggtttacggctatgaagcacggacacctcagtcccttgtcgtgtccggtgtccgacacgcgtccgtgtcagtgtccgacaccgacacgacacccgtattacgttctatattttggatattgcaggtgtccacgtatccgtgtccgtgtcgtgtccggtgtctgtgtcgatgtcagtgcttcataggtttacggacatccaatagaacacttatttgcatgtatgaacgataaatatgagtataattctttttgtcatactccaaacttccccagaaagtttccaattcttaatcctatagttcatgagccataaagccaattggtagattgtgaacttgcacccaaaaaggaacatgataaagagagatacctgcaggatcttctccatctttaatgataccctgaattaagaggtgtttgtcaaagctccatgggccacccttgagtacattttagatatccaattgatggaaaaactggaaaaggaaagttcctgtcggaattccgtgatcgtgactccttgaagtggctgccaaaatattggacaacttctctttcataatatagactctaa

SEQ ID NO: 13220 - DNA, 1095 bp, Glycine max
  Gm_smallRNAprecursor_6053
aaattagaattaatataagtaatatatttttataaaatttaaattataaaacaaatatttgttactaatggcaatcaattttgggtttttgaaaacttctaccagtaattcagaacgtttgttgtctccttcatcgttactaataatggcatcgggtcccttgtcattaatctcttgttcctatgatggttgaaagattggacctccattgatgtggttacgaaggtaacgtgaactagcagagataccatggtgttacgcagatcagcacgaagttcaggcccccactgtctgatttcagtatcttcttcaatcataagtaactttgcgcatgagtcgtcaacatgacccatcaacccacataggtagtagtaattaagttgccaatctctcatatttgaaaaagacctcatttgattctccaccaagtttttatttttattttcttggatttcttgggtttacggctatgaagcacggacacctcagtcccttgtcgtgtccggtgtccgacacgcgtccgtgtcagtgtccgacaccgacacgacacccgtattacgttctatattttggatattgcaggtgtccacgtatccgtgtccgtgtcgtgtccggtgtctgtgtcgatgtcagtgcttcataggtttacggacatccaatagaacacttatttgcatgtatgaacgataaatatgagtataattctttttgtcatactccaaacttccccagaaagtttccaattcttaatcctatagttcatgagccataaagccaattggtagattgtgaacttgcacccaaaaaggaacatgataaagagagatacctgcaggatcttctccatctttaatgataccctgaattaagaggtgtttgtcaaagctccatgggccacccttgagtacattttagatatccaattgatggaaaaactggaaaaggaaagttcctgtcggaattccgtgatcgtgactccttgaagtggctgccaaaatattggacaacttctctttcataatatagactctaaatggctttttcgttaagaatctgccaactaaacacaaggcaggattgaatttgttattggta

SEQ ID NO: 13221 - DNA, 1032 bp, Glycine max
  Gm_smallRNAprecursor_6054
aattagaattaatataagtaatatatttttataaaatttaaattataaaacaaatatttgttactaatggcaatcaattttgggtttttgaaaacttctaccagtaattcagaacgtttgttgtctccttcatcgttactaataatggcatcgggtcccttgtcattaatctcttgttcctatgatggttgaaagattggacctccattgatgtggttacgaaggtaacgtgaactagcagagataccatggtgttacgcagatcagcacgaagttcaggcccccactgtctgatttcagtatcttcttcaatcataagtaactttgcgcatgagtcgtcaacatgacccatcaacccacataggtagtagtaattaagttgccaatctctcatatttgaaaaagacctcatttgattctccaccaagtttttatttttattttcttggatttcttgggtttacggctatgaagcacggacacctcagtcccttgtcgtgtccggtgtccgacacgcgtccgtgtcagtgtccgacaccgacacgacacccgtattacgttctatattttggatattgcaggtgtccacgtatccgtgtccgtgtcgtgtccggtgtctgtgtcgatgtcagtgcttcataggtttacggacatccaatagaacacttatttgcatgtatgaacgataaatatgagtataattctttttgtcatactccaaacttccccagaaagtttccaattcttaatcctatagttcatgagccataaagccaattggtagattgtgaacttgcacccaaaaaggaacatgataaagagagatacctgcaggatcttctccatctttaatgataccctgaattaagaggtgtttgtcaaagctccatgggccacccttgagtacattttagatatccaattgatggaaaaactggaaaaggaaagttcctgtcggaattccgtgatcgtgactccttgaagtggctgccaaaatattggacaacttctctttcataatatagactctaa

SEQ ID NO: 13222 - DNA, 1094 bp, Glycine max
  Gm_smallRNAprecursor_6055
aattagaattaatataagtaatatatttttataaaatttaaattataaaacaaatatttgttactaatggcaatcaattttgggtttttgaaaacttctaccagtaattcagaacgtttgttgtctccttcatcgttactaataatggcatcgggtcccttgtcattaatctcttgttcctatgatggttgaaagattggacctccattgatgtggttacgaaggtaacgtgaactagcagagataccatggtgttacgcagatcagcacgaagttcaggcccccactgtctgatttcagtatcttcttcaatcataagtaactttgcgcatgagtcgtcaacatgacccatcaacccacataggtagtagtaattaagttgccaatctctcatatttgaaaaagacctcatttgattctccaccaagtttttatttttattttcttggatttcttgggtttacggctatgaagcacggacacctcagtcccttgtcgtgtccggtgtccgacacgcgtccgtgtcagtgtccgacaccgacacgacacccgtattacgttctatattttggatattgcaggtgtccacgtatccgtgtccgtgtcgtgtccggtgtctgtgtcgatgtcagtgcttcataggtttacggacatccaatagaacacttatttgcatgtatgaacgataaatatgagtataattctttttgtcatactccaaacttccccagaaagtttccaattcttaatcctatagttcatgagccataaagccaattggtagattgtgaacttgcacccaaaaaggaacatgataaagagagatacctgcaggatcttctccatctttaatgataccctgaattaagaggtgtttgtcaaagctccatgggccacccttgagtacattttagatatccaattgatggaaaaactggaaaaggaaagttcctgtcggaattccgtgatcgtgactccttgaagtggctgccaaaatattggacaacttctctttcataatatagactctaaatggctttttcgttaagaatctgccaactaaacacaaggcaggattgaatttgttattggta

SEQ ID NO: 13223 - DNA, 1066 bp, Glycine max
  Gm_smallRNAprecursor_6056
ttataaaatttaaattataaaacaaatatttgttactaatggcaatcaattttgggtttttgaaaacttctaccagtaattcagaacgtttgttgtctccttcatcgttactaataatggcatcgggtcccttgtcattaatctcttgttcctatgatggttgaaagattggacctccattgatgtggttacgaaggtaacgtgaactagcagagataccatggtgttacgcagatcagcacgaagttcaggcccccactgtctgatttcagtatcttcttcaatcataagtaactttgcgcatgagtcgtcaacatgacccatcaacccacataggtagtagtaattaagttgccaatctctcatatttgaaaaagacctcatttgattctccaccaagtttttatttttattttcttggatttcttgggtttacggctatgaagcacggacacctcagtcccttgtcgtgtccggtgtccgacacgcgtccgtgtcagtgtccgacaccgacacgacacccgtattacgttctatattttggatattgcaggtgtccacgtatccgtgtccgtgtcgtgtccggtgtctgtgtcgatgtcagtgcttcataggtttacggacatccaatagaacacttatttgcatgtatgaacgataaatatgagtataattctttttgtcatactccaaacttccccagaaagtttccaattcttaatcctatagttcatgagccataaagccaattggtagattgtgaacttgcacccaaaaaggaacatgataaagagagatacctgcaggatcttctccatctttaatgataccctgaattaagaggtgtttgtcaaagctccatgggccacccttgagtacattttagatatccaattgatggaaaaactggaaaaggaaagttcctgtcggaattccgtgatcgtgactccttgaagtggctgccaaaatattggacaacttctctttcataatatagactctaaatggctttttcgttaagaatctgccaactaaacacaaggcaggattgaatttgttattggta

SEQ ID NO: 13224 - DNA, 1189 bp, Glycine max
  Gm_smallRNAprecursor_6057
atggaggtcggaaacacatacgtttcacatgagatgtggagaatgtactattactctccaagacgtctctgtattgttaggtataagtgtggatgatttatcattaatcggttcaacaaatcttgattgggctgatttatgtgaggaattattgggagtaagaccacaagaagatgaaattagaggtagtgtggttaaattaagttggctggctcaccattttgcacaaataaataacgacgacgacgaagaacaagtacgaaagtttgcccgtgcatggatactgagattcattggaggtgtcttgttcgttgacaaaagcagtaacaaagttttgctaaggtaccttcaatttttacgtgactttgaagaatgtggcagatatgcatggggagccgccgtacttggttttctatagagagagatgtgcaatgccaccgattataaaactaaatcaatcggaggtatgtgcatcttactacaaatgttggcatgggaacgatgtccaaccttggctccaaagaggactccttcccaagtagaaaatacaccactggggcacaggtttgtcatttttaacaacgtctttcatttcaatagaataaatggttttagcatatattaaattttaatctttgtaggtggctgcgatgttgaaaccaacatatcggcaatgatgatgtgagagtttttcgtcgcaagttggatattatgaaacgtcatgaggtaagaacatgctattgtatttgtaaaataaaaaattatatgtgttattttactaaaatgttcacaactatgttgttatatgtagtttgtgtgggagccgtacccatcaaccgttatatcactgttgccacccgtttgtttagtcggaagtctcgcctggtacgcggtggtgccactaatttgtttccaagttattgagtggcaccaaccggacaaagtattgagacaatttgggatgcagcaaccaattccagagtctccttcacaacccttaaacattcatggcataacattaaaagggaaacatgacgaaaattgggggcaattgttcatcccaatgattcatcagtggaataatcgccatgcatttagggtcgacgcttatccccgacaagaaggcctattgagctttaactcggactacatggtctggtataggcgaaagacaaagatgtttgttgac

SEQ ID NO: 13225 - DNA, 1158 bp, Glycine max
  Gm_smallRNAprecursor_6058
gaatgtttattaacaatgaaagcatggcttctatgaggactagtactaggtgctataacttttagatctaagagggtttttatgtgacttttgcattcttcttgttcgaaatttccatactgaatatctttggttttaattatcagatctaggtttatgatttctaatttgcatataactggatatttttcccaatattttgtagggtcttctcctattatgctagttttatttaatccatctataatttgttgtatattatcaaaggttataattttgttaatttttacagatttgtaatcagattctgctacagatagttcatattgtagctttgtttcagtttttatgctttctaaaatactttcatagtaagaatcatgggatgtgtcgtatctttctatagtgtttgtattaccatgatttttttattcttttattttacaactgtcgggtgtatcacaaggacattgtttattattgttgagggtatcaccacgctttgttcgtaactctgatgtgagttcatctattataggtgacatttgtgagtttgtagagattaataggtaatcttttgtaatagtaattgatctattattatgtatagtaaaattgagtcctaaaatcattttttctttagcaggtcataagtctaccacatctgctttatttataaaaattttattaccaaaaatttcacaatttgtggataattgaatagtgaaatttcgtgtttctatatcatttgttattatgtctctagacattgttctagttttgattattatattgcttttaaaacaattgtgcttaggtacaacactttggcatatagaagtaaaagaacaaccagtatctaccaagccttgcagaattatttttgtttggttaaatttatttattttaggaaaatttattttaactaaaatgtgtaggcttttgtttttttctttattacaaattatagggatgcaatctttattttgtaatgccataaacccgctagtatgttcttcagaaaagtttggatttttttctttttcaaaattttcataaagaaaatctaccattttttctatttggtttaacctcatctctagagtggagatccagttattcataattttatttccagaatcattttctttctttgaa

SEQ ID NO: 13226 - DNA, 1233 bp, Glycine max
  Gm_smallRNAprecursor_6059
tatcataaccttgtcctcttaagttactaatatcaagtccaatattaaaaattctaaaaaaggtcttttccaattgtatcatctatttttaaaaattctaaaaaatattcaaaaacttgtatttgagttaaagaaatatctacacattgtaatacaaaaaaatatttgttctagatgacttgcatcatgagtacaatcaagtatgattgaaaaatattttacattcttaatatttttataatattaaaactatgttttttctattattttttatgaatattataagaaaatatgagtcatatatatatatatatatatatatatatatatatatatatatatatatatatatatatatatatatatatatatatcagagcctgatggggaagtaggaatactgtccgtaaggacatatgttaaacaaattttatggatctgaaaattgaaaccttgtatagtacgagtaatattttattttgatttgtacagtacatgtttgaacagtacttcctggaagtacaacagtataatattttagttgaatggtactgtagcagtaagacccgtggcggataaagggcagtaaggctaaggtgtactgtttaaccaaaatatcaagacataacatactggtggctataggatcgccgttcaaactaataaaaaaaagagttttttcttaaaaataattcagatccaaaattttttgttacgtatctacttacggaaatatttctatggaaccaaatgagggcgaagatattagaggattttataatcatgtctagactcctgcgttctttttcgcgtatttcctttcggtctaattcctcttcatcaacttcttccagaaattcaaacttattaaatgatcaagataaccagacccaagaggtcgcccctaaacacaatctcttcaatgaggaagtccgattcgaagatattaatcaaaacatggatgactggaacatcccagaaatccctcagaatcaactatacgtttctgaaacaattaaagataaacacaactttgactacataatcaaaacagtagaaaacaatattcctctagggcaagacataggggaagaattccatttactttcaaaaaattcaatttatgaacatagtcgaaagtataaatatttacacatcggttgtgtacaagtagccatcaagcccttaatagacatgggcatagatgcagcagtgttaatgtgtctaatagat

SEQ ID NO: 13227 - DNA, 1107 bp, Glycine max
  Gm_smallRNAprecursor_6060
tttttataatattaaaactatgttttttctattattttttatgaatattataagaaaatatgagtcatatatatatatatatatatatatatatatatatatatatatatatatatatatatatatatatatatatatatatcagagcctgatggggaagtaggaatactgtccgtaaggacatatgttaaacaaattttatggatctgaaaattgaaaccttgtatagtacgagtaatattttattttgatttgtacagtacatgtttgaacagtacttcctggaagtacaacagtataatattttagttgaatggtactgtagcagtaagacccgtggcggataaagggcagtaaggctaaggtgtactgtttaaccaaaatatcaagacataacatactggtggctataggatcgccgttcaaactaataaaaaaaagagttttttcttaaaaataattcagatccaaaattttttgttacgtatctacttacggaaatatttctatggaaccaaatgagggcgaagatattagaggattttataatcatgtctagactcctgcgttctttttcgcgtatttcctttcggtctaattcctcttcatcaacttcttccagaaattcaaacttattaaatgatcaagataaccagacccaagaggtcgcccctaaacacaatctcttcaatgaggaagtccgattcgaagatattaatcaaaacatggatgactggaacatcccagaaatccctcagaatcaactatacgtttctgaaacaattaaagataaacacaactttgactacataatcaaaacagtagaaaacaatattcctctagggcaagacataggggaagaattccatttactttcaaaaaattcaatttatgaacatagtcgaaagtataaatatttacacatcggttgtgtacaagtagccatcaagcccttaatagacatgggcatagatgcagcagtgttaatgtgtctaatagatattaggcataataaatttgaagattccttaattggaacagtcgaaaccagcctaggacaaggtccagtatattttaattgttatccaaacaaaacagtgagtctaa

SEQ ID NO: 13228 - DNA, 1162 bp, Glycine max
  Gm_smallRNAprecursor_6061
ttattaatgattttgttctagaaacaatggccctattcgacacaggggctgactcaaactgtattctagaaggattaatttctacaaaattctttgaaaaaacctcagagaaacttagtacagcaaacaactcaaaattaaaaattaattttaagttatcaaatgcaattattgaaaaccaaggtcttaggattaaaacaaactttcttttggtaaaaaaccttaaaaatgaagtaatcctaggaactcccttcataagagctctatttcctatccaaatatctaatgaaggaataactacaagttatttaggaaggaaaattatatttaatttttctactaagccaatctccaaaaatataaatcttatagaaaataagattaaccaaattaacttcttaaaagaagaagtatcgtttaataatatccaagtacaactaggaaaaccccaaataaaggagaaaatccaatctttattaagtcatatagaataaactgtttgttctgaattgccacatgcattttgggacagaaagaaacatattgttgatcttccttatgaaaaagattttagggaaaaacaaattcccacaaaatctagaccaatccaaatgaatgaagaactccttcaatattgccaaaaagaaattaaagatttacttgataaaggtttaattcggaaaagtaaaagtccatggtcttgtgcggctttttacgtcaacaaacaatccgagattgagcgaggaacaccccgcttagtcataaattataaaccgttaaatcaagcattacaatggatcaggtatcctattccaaataaaaaagacctacttaacagattgaattctgcaaaggtattttcaaaatttgacatgaaatccggattctggcaaatccaaatccaagaatcagataggtacaaaacgacgtttactgtacctttcgggcaatatgagtggaatgtaatgccattcggactgaagaatgccccttcagaatttcaaaaaatcatgaatgatattttcaatccttattcaaaattcgtcattgtttacattgatgatgttttaatcttctcccaagatattgatcaacatttcaaacacctccagactttcatccatattattaaacaaaatggtttggcagtctccaaatcaaa

SEQ ID NO: 13229 - DNA, 1108 bp, Glycine max
  Gm_smallRNAprecursor_6062
aagcgcctttgattttaacatagaatatatcaagggctcttcaaactctctacctgactacctcactcgtgaatttttacagaaaattcccgatgcctcctaaggtgtctagctcctccagcaaaggaggaagatccagtactaaaggaaaagatgttctattggctctaccagagccaataaccaagaaggcaactgcatcatcttctgggtcacctacccagactgggtcatcaacccagaaaggaaagcttgaagggtcattgacctagataactaccattaaacctgagtcatcaactcaggaatctccaaaaccaacaacaacaaaacagaccgtggctgactatgcctggtcaatacaaactctcctggccttagaagacataggcctcaccagagtaccaaaattggccaaaaagacctgggcagaaatggcctcagaatcagacgatgattctgaaacagatctgcaaaaacaaatccaaaaggccaaacagaccaaaactgtctgtaaccaaaaaccaagccaaccgttgactcaacaagaatcaacaccacaacccagcaacaactatatttcaaaaaacaaattcttcaatgttttacaaatggaaccagaatactgggacaagaatccttttaaggcaaccgccaaagtatttcccccgggatttcattataggccaacagccacaaacaaaaccagaaaattctatgaattcattctaatagatacaaactccgtatctattaaacatttcaaggaccccaaagatccaaacctaaacacccactccacaatccagatcttaaaggtgatacagccacgacattatggctcaaacttaaaccaacccaaaatttttttgcaccttttgaccctacaggatataattattgggattacattgacgcctggaccaatgtgttctggcatcaaaatagtaaattcaagcattcatggctaatttacttccaaaataacactgtgtataattttccaaattggttcctccaatggtggaactacttcagacaaattccacagatatttccagaagaagtccaacagggattccaacaattcagcaagctcttcaatagc

SEQ ID NO: 13230 - DNA, 1071 bp, Glycine max
  Gm_smallRNAprecursor_6063
ccaaacagaccaaaactgtctgtaaccaaaaaccaagccaaccgttgactcaacaagaatcaacaccacaacccagcaacaactatatttcaaaaaacaaattcttcaatgttttacaaatggaaccagaatactgggacaagaatccttttaaggcaaccgccaaagtatttcccccgggatttcattataggccaacagccacaaacaaaaccagaaaattctatgaattcattctaatagatacaaactccgtatctattaaacatttcaaggaccccaaagatccaaacctaaacacccactccacaatccagatcttaaaggtgatacagccacgacattatggctcaaacttaaaccaacccaaaatttttttgcaccttttgaccctacaggatataattattgggattacattgacgcctggaccaatgtgttctggcatcaaaatagtaaattcaagcattcatggctaatttacttccaaaataacactgtgtataattttccaaattggttcctccaatggtggaactacttcagacaaattccacagatatttccagaagaagtccaacagggattccaacaattcagcaagctcttcaatagcaaggaatcaagaattccggcagatttaaaatacttttccagttttccttgtcatggattttttcatggcaatacagatatggaaaacctgaaaatagcaagtagtatccaccattgcagagacacgcctttgtaaagtggtggtcacaattcgatacctcaaaggctgctccagaacaagtcaagaactggtttcagagcaaccctgagtttctcagacctgctgatccagagacatctttgtttctgaatcagaagtctcaacttgcagcattcttggcaagctcaaaatctaaagaaagtcttgctcagaatcttaaggaagttctccaactacttcaacaggaagaagaagaagaaccccccaagaaggaagccgaatcatccgaaaataatgatgaccaagaagattacccattctaccagaatgaggatgactgttttggtatatcgtta

SEQ ID NO: 13231 - DNA, 1157 bp, Glycine max
  Gm_smallRNAprecursor_6064
aagatccaaacctaaacacccactccacaatccagatcttaaaggtgatacagccacgacattatggctcaaacttaaaccaacccaaaatttttttgcaccttttgaccctacaggatataattattgggattacattgacgcctggaccaatgtgttctggcatcaaaatagtaaattcaagcattcatggctaatttacttccaaaataacactgtgtataattttccaaattggttcctccaatggtggaactacttcagacaaattccacagatatttccagaagaagtccaacagggattccaacaattcagcaagctcttcaatagcaaggaatcaagaattccggcagatttaaaatacttttccagttttccttgtcatggattttttcatggcaatacagatatggaaaacctgaaaatagcaagtagtatccaccattgcagagacacgcctttgtaaagtggtggtcacaattcgatacctcaaaggctgctccagaacaagtcaagaactggtttcagagcaaccctgagtttctcagacctgctgatccagagacatctttgtttctgaatcagaagtctcaacttgcagcattcttggcaagctcaaaatctaaagaaagtcttgctcagaatcttaaggaagttctccaactacttcaacaggaagaagaagaagaaccccccaagaaggaagccgaatcatccgaaaataatgatgaccaagaagattacccattctaccagaatgaggatgactgttttggtatatcgttagatgatgattagttagttgtagtaatcacgaattattgtaactaattactcggtacccgataataatgtaatttgtaaagagtttttgtaacagttccggtaaacattaccgacactgtagaaacagtaaaattttgggtctatttaaaggagtcctcgttccctttgtgaggcaccctttcagatagtctcaaaaccaggttttagagagagaagctctgcctagggaaaaactctttgtaagcttttctttcgatttaaataaattcaaagttatatttttcacatctcccttctcccttcaccgatcctgtgcggctctgccgccgcttcggtttctttgttttcgaaaacctggggtttgtaag

SEQ ID NO: 13232 - DNA, 1166 bp, Glycine max
  Gm_smallRNAprecursor_6065
gtgatatcctggaaattttgagaattcaaatgacctatgtgatctcaaaacaaatcacttggggaaaatttgagaattcaaatgacctatgtgatatcctgaaaatttctacctggaattttgtaagcgatatatttaaaataattatatatataagtattattcagtatatatatataccagagatcagcgggaaggatacaaacggacagataggaagtaagagtaatgctatatgacaaatgcagaaattaaaaacctgtaaaacagttatcaagggcacaccggaatccggcttacaaacccaggtttttgaaaacaaagaaaccgaagtggcggcagagccacacaggatcggtgaagggagaagggagatgtgaaaaatagaactttgaatttattgaaatcgaaagaaaagcttacaaagaggttttccctaggcagagcttctctctctaaaacctggttttgagactatctgaaagggtgcctcacaaagggaacgaggactcctttaaatagacccaatgttttactgtttcaacagtatcgataatgtttaccggaactgttacaaaaactttttcaaattacattattatcgggaaccgaataattagttagactaattcatgattactacaactaactaatcatcatctaacgatataccaaaacagtcatcctcattctggtagaatgggtcatcttcttggtcatcattattctcggatgattcggcttccttcttggggggttcttcttcttcttcctgttgaagtagctggagaacttccttaagattctgagcaagactctctttagattttgagcttgctaagaatgctgcaagttgagacttttaatttagaaacaatgatgtctctggatcagcaggcttgagaaactcagggttgctctgaaaccagttcttgacttgttctggagcagcctttgaggtatcaaattgtgaccaccactttacaaaggcatgtctctgcaatggtggatattgtttgctgttttcggtttttccatatctgtattgccatgaaaaaatccatgacaaggaaaaactggaaaagtactttaaatctgccggaattcttgattccttgctattgaagagcttggtgaattgttggaatccctgttggacttcttct

SEQ ID NO: 13233 - DNA, 1037 bp, Glycine max
  Gm_smallRNAprecursor_6066
ttgtattgaccaggcatagtcagccacaatctgttttgttgttgttggttttggggattcctgagttgatgactcaggttttatctgggtcaatgacccttcaagctttcctttctgggttgatgacccagtctgagtaggtgacccagaagatgatgtagttgccttcttggttattggctctggtagagccaatataacatcttttcctttagtaccggatcttcctcctctgtcgaaggagctagacaccttaggaggcatcgggaattttctgtaaaaattcacgggtgaggtagttaggtagagagtttgaaaagcccttgatatattctatgttaaaatcaaagacgcttaaaattgcctgccatattgcaaaaatttgttttgaggcaaggttttttacatccttttgtaaaatgtctttggctgatttgcagtcaacccttactaaaaatttttgattcaataaatcagattgaaatttggaaatgcacaaaacaattgctaaaacttcctttttaacagttgaatattttaattgtgcaggattccaatgttttgaagtatatgcaatgacatgttcttgaccatgtatttgctgtttcaggataccaccgtaaccgatgtctgatgcatcagtttcgacaattttgaatgcctgtggaatgggaagatacatacattttatggattggactttgactttgatttctttgactgtttgagtatggaggtcagaccaaggaggcggattctttttcagcctatcatgtaatggtttgacaatattgtttagataggggaaaaattctcctacataatttaggcaccccagaaatcgttgtaactaggtcttgtctaagatttggttagggaatttgctggcaaactctattgatctttctattggaatgattgcgccttggtatatattgtgcccaaggaatcgtatccgtgtctgaaaaagatttatctttgatttggagactgccaaaccattctgtttaatgatatggatgaaagtatggaggtgt

SEQ ID NO: 13234 - DNA, 1038 bp, Glycine max
  Gm_smallRNAprecursor_6067
ttgtattgaccaggcatagtcagccacaatctgttttgttgttgttggttttggggattcctgagttgatgactcaggttttatctgggtcaatgacccttcaagctttcctttctgggttgatgacccagtctgagtaggtgacccagaagatgatgtagttgccttcttggttattggctctggtagagccaatataacatcttttcctttagtaccggatcttcctcctctgtcgaaggagctagacaccttaggaggcatcgggaattttctgtaaaaattcacgggtgaggtagttaggtagagagtttgaaaagcccttgatatattctatgttaaaatcaaagacgcttaaaattgcctgccatattgcaaaaatttgttttgaggcaaggttttttacatccttttgtaaaatgtctttggctgatttgcagtcaacccttactaaaaatttttgattcaataaatcagattgaaatttggaaatgcacaaaacaattgctaaaacttcctttttaacagttgaatattttaattgtgcaggattccaatgttttgaagtatatgcaatgacatgttcttgaccatgtatttgctgtttcaggataccaccgtaaccgatgtctgatgcatcagtttcgacaattttgaatgcctgtggaatgggaagatacatacattttatggattggactttgactttgatttctttgactgtttgagtatggaggtcagaccaaggaggcggattctttttcagcctatcatgtaatggtttgacaatattgtttagataggggaaaaattctcctacataatttaggcaccccagaaatcgttgtaactaggtcttgtctaagatttggttagggaatttgctggcaaactctattgatctttctattggaatgattgcgccttggtatatattgtgcccaaggaatcgtatccgtgtctgaaaaagatttatctttgatttggagactgccaaaccattctgtttaatgatatggatgaaagtatggaggtgtt

SEQ ID NO: 13235 - DNA, 1130 bp, Glycine max
  Gm_smallRNAprecursor_6068
acactttggttctgactttgcaatggctcaaaggaaaactcattctcctagtaagaaacttttaccatatgacaaatacaaatactataccatttttttatgtattaatgttataattcagaattctaagttatgctcttggttggtaattggtattgcagcatattggtggcgaatgtttgggtcacaaactctaaatttgcagaagctagctattaaaatttagagtttgacttgcagtgcttcaggatgtgaaagaaattggagtgtgtttgagcaagtaattgtgacaaaactctaactatacttttaattttatttaattttgatggtcaagttttatttggagtatatttgagattgaaatcaacatttatttgttatgttgtagattcattccaaaaaaagaaataggcttgagcacaagaggttgcatgatttggtgtttgtcaaatacaaccaacaattgaagcaaagatataatgcaagagatgaaattgatccaatttctcttaatgatattgatgtgtgcaatgaatggctcgtgggagagatggatgaagatgatgataatgatgctggaaatgatttggtatttgaagatgatgatgctctaaattggacaactgtgtatcaggcttcgggggttggagagcctcaaccttcacttagcactttgcattatgtttttatccttttcttattttgaactctttaatgagtttatttggtgttgatacttggttattgtatgaactcatgaaacttttttaacttttttagtttatttgaatgcaatccattgttttttttcaatttcaatgagtttatttggtgttggtacttggttatttataattatatatatgtatattttttttttgtccgccatgacatccgtcattttccgctacaccatccgccatatttttatggtggatttttggctttccaccatgaaccgccgtccaccattaacaacattgttcttcactcataagcctctgctcatttaagaacttcaaactcctttgatcagtcctaattaaaaatttcttacctagcaaataatgcctccaatttttcatagctaacaccactaccatcaattccctctcatatactgactt

SEQ ID NO: 13236 - DNA, 1035 bp, Glycine max
  Gm_smallRNAprecursor_6069
ccaatgtagccgtctttgcattttgtgggtcaacaaacatctttgtctttcgcctatatcagaccatgtagtccgagttaaagctcaataggccttcttgtcggggataagcgtcgaccctaaatgcatggcgattattccactgatgaatcattggggcgaacaattgccccaattttcgtcatgtttcccttttaatgttatgccatgaatgtttaagggttgtgaaagagactctggaattggttgctgcatcccaaattgtctcaatactctgtccagttggtgccactcaataacttgaaaacaaattagtggcaccaccgcgtaccacgcgagacttccgactaaacaaacgggaggcaacagtgatataacggttgatgagtacagctcctacacaaactgcatataacaacatagttgtgaacattttagtaaaataacacatataattttttattttacaaatacaatagcatgttcttacctcgtgacatttcataatatccaacttgcgacgaaaaaatctcacatcatcattgccgatatgttggtttccacgtcgcagccacctacaaagattaaaatttaatatatgctaaaaccatttattctattgaaatgaaagacactgttaaaaatgactaacctttgccccagtggtgtattttctacttgggaaggagtcctctttggagccaaggttggacatcgttcccatgcccacatttgtagtaagatgcacatacctccgattgatttagttttataatcggtggcattgcacatctctctgtatagaaaaccaagtacggcagctccccatgcatatctgccacattcttcaaagtcacgtaaaaattgaaggtaccttagcgaaactttgttactgcttttgtcaacgaacaagacacctccaatgaatctcagtatccatgcacgagcaaaccttcgtacttgttcttcgtcgtcgtcattatttatttgtgcaaaatggtgagccagccaacttaatttaaccacactacctct

SEQ ID NO: 13237 - DNA, 1182 bp, Glycine max
  Gm_smallRNAprecursor_6070
caaacggctcaaaattaaaaattaattttaagctatcaaatgcaatcattgaaaaccaaggtcttaggatcaacacaaactttcttctggtaaaaaaccttaagaatgaagtaatcttaggaacgcccttcattagagccctgtttcccatccaaatatctaatgaaggaataaccacaaattatttaggaagaaatattatatttaatttttctactaaaccaatttccagaaatataaatttcatagagaataagattaatcaaattaacttcttaaaagaagaagtatcttttaataatattcagatacaactaggaaaaccccaagtaaaagataaaattcaatctttactaaatcatattgaatcaactgtctgttctgatttgccacatgcattttgggacagaaagaaacatattgttgatctcccctatgagaaagactttagagaaaaacaaattcccacaaaagccagaccgatccaaatgaatgaagaacttcttcaatactgtcaaaaggaaatcaaggatttgcttgataaaggcctaatccggaaaagcaaaagcccatggtcttgtgcggctttttatgtcaacaaacaatctgagattgagcgtggaacacctcgcttagtcataaattacaaaccactaaatcaagcattacaatggattagatatcctattccaaacaaaagagatttgcttaacagattaaattctgcaaagatattttcaaaatttgatatgaaatctggattttggcaaatccaaatccaagaatcagataggtacaaaacagcgtttactgtacctttcgggcaatatgagtggaacgtaatgccattcggactgaagaatgccccttcagaatttcaaaaaattatgaatgatatttttaatccctattcaaaatttgtcattgtctacatagatgatgttttaatcttttcccaaaacattgaccagcatttcaaacatctccaaaccttcatccatatcatcaaacaaaatggtttggcagtctccaaatcaaaaatcaatcttttccaaacacgaattcgattccttggtcacaatatttatcaaggtacaattgttccaatcgaaaggtcaattgagtttgctagcaaattccccaaccaaatcttagacaaaacccagttacaaagattcctag

SEQ ID NO: 13238 - DNA, 1234 bp, Glycine max
  Gm_smallRNAprecursor_6071
acagaaagaaacatattgttgatctcccctatgagaaagactttagagaaaaacaaattcccacaaaagccagaccgatccaaatgaatgaagaacttcttcaatactgtcaaaaggaaatcaaggatttgcttgataaaggcctaatccggaaaagcaaaagcccatggtcttgtgcggctttttatgtcaacaaacaatctgagattgagcgtggaacacctcgcttagtcataaattacaaaccactaaatcaagcattacaatggattagatatcctattccaaacaaaagagatttgcttaacagattaaattctgcaaagatattttcaaaatttgatatgaaatctggattttggcaaatccaaatccaagaatcagataggtacaaaacagcgtttactgtacctttcgggcaatatgagtggaacgtaatgccattcggactgaagaatgccccttcagaatttcaaaaaattatgaatgatatttttaatccctattcaaaatttgtcattgtctacatagatgatgttttaatcttttcccaaaacattgaccagcatttcaaacatctccaaaccttcatccatatcatcaaacaaaatggtttggcagtctccaaatcaaaaatcaatcttttccaaacacgaattcgattccttggtcacaatatttatcaaggtacaattgttccaatcgaaaggtcaattgagtttgctagcaaattccccaaccaaatcttagacaaaacccagttacaaagattcctaggttgtctaaattacgtaggtgaatttgtcccctacttaaacaatattgtcaaaccattgcatgataggctaaagaaaaatctgcctccttggtctgacctccatacccaaacagttaaagaaatcaaagtcaaagtccaatccataaaatgtttgtatcttctcattccacaggcattcaaaattgtcgaaactgatgcatcagacatcggttacggtggcatcctcaaacaacaagtacatggttaagaacatgtcatcgcatatacttcaaaacactggaatcctgcacaattaaagtattcaactgttaaaaaagaagttttagcaatttttttgtgcatttccaaatttcaatctgatttattaaatcaaaattttttagtaagagttgactgcaaatcagccaaagatattttacagaaggatgtaaaaaaccttgcctcaaaacagatttt

SEQ ID NO: 13239 - DNA, 1131 bp, Glycine max
  Gm_smallRNAprecursor_6072
caatgttttacaaatggaaccagaatattgggacaagaatcctttcaaagcaaccgccaaagtattcccccagggattccattacaggccaatagccgcaaacaaaacccgcaaattctacgaattcatcctaatagatacgaactcagtatctattaaacacttcaaagaccccaaagatccaaatttaaatacccattccacaatccaaatcctgaaggttatgcagccacgacattatggctcaaacttaaaccaacccaaaaaattctctgcaccatttgatcctgcagggtataattattgggattacgttgacgcctggaccaatgtgttctggcatcaaaatagtaaattcaagcattcatggctgatttacttcaaaaataatactgcatataattttccaaattggttcctccaatggtggaactacttcggaccaattccacaaatatttccagaagaagtccaacagggattcgaacaattcaacaagctctataatagcaaggaatcacgaattccggcagatttaaagtatttttccagttttgccttatcatggatcttttcatggcaatacagatacggaaaaactgaaaacaacaagcaatatccaccgttacagagacacgcctttgtaaaatggtggtcacaattcgatacttcaaaggctgctccagatcaagtcaagaactggttccagagcaatcctgagttccttaaaccagctgatccggagacatctttgtttctaaatcagaagtcgcaactggcagcattcttagcaagctcaaaatctaaagaaagtcttgctcagaatctcaaagaagttctccaactacttcaacaggaagtggaagaagaaccttccaagaaggaagctgaatcatcagagactaatgatgaccaagaagatgatccattctaccagaatgaagatgactgttttggtatatcattggacgacgattaattagttgtaataatcatgaattattgtaactaatttgtcagtttcttttaaataatgtaatttgtaaaaagttttgtaacagtttcggtaaacattatcgatactgtagaaacagtaaaaattgggtctatttaaaggagtcctcgtcccct

SEQ ID NO: 13240 - DNA, 1131 bp, Glycine max; identical to SEQ ID NO: 13239
  Gm_smallRNAprecursor_6073

SEQ ID NO: 13241 - DNA, 1086 bp, Glycine max
  Gm_smallRNAprecursor_6074
taaatacccattccacaatccaaatcctgaaggttatgcagccacgacattatggctcaaacttaaaccaacccaaaaaattctctgcaccatttgatcctgcagggtataattattgggattacgttgacgcctggaccaatgtgttctggcatcaaaatagtaaattcaagcattcatggctgatttacttcaaaaataatactgcatataattttccaaattggttcctccaatggtggaactacttcggaccaattccacaaatatttccagaagaagtccaacagggattcgaacaattcaacaagctctataatagcaaggaatcacgaattccggcagatttaaagtatttttccagttttgccttatcatggatcttttcatggcaatacagatacggaaaaactgaaaacaacaagcaatatccaccgttacagagacacgcctttgtaaaatggtggtcacaattcgatacttcaaaggctgctccagatcaagtcaagaactggttccagagcaatcctgagttccttaaaccagctgatccggagacatctttgtttctaaatcagaagtcgcaactggcagcattcttagcaagctcaaaatctaaagaaagtcttgctcagaatctcaaagaagttctccaactacttcaacaggaagtggaagaagaaccttccaagaaggaagctgaatcatcagagactaatgatgaccaagaagatgatccattctaccagaatgaagatgactgttttggtatatcattggacgacgattaattagttgtaataatcatgaattattgtaactaatttgtcagtttcttttaaataatgtaatttgtaaaaagttttgtaacagtttcggtaaacattatcgatactgtagaaacagtaaaaattgggtctatttaaaggagtcctcgtcccctttgtgaggcacctttttagatagtctcagaatcaggttttagagagagaagctctgcctagggaaaaactctttgtaagcttttctttcagtttcaataaatttcaagttctatttttcatatctcccttctcccctcaccga

SEQ ID NO: 13242 - DNA, 1137 bp, Glycine max
  Gm_smallRNAprecursor_6075
taaatacccattccacaatccaaatcctgaaggttatgcagccacgacattatggctcaaacttaaaccaacccaaaaaattctctgcaccatttgatcctgcagggtataattattgggattacgttgacgcctggaccaatgtgttctggcatcaaaatagtaaattcaagcattcatggctgatttacttcaaaaataatactgcatataattttccaaattggttcctccaatggtggaactacttcggaccaattccacaaatatttccagaagaagtccaacagggattcgaacaattcaacaagctctataatagcaaggaatcacgaattccggcagatttaaagtatttttccagttttgccttatcatggatcttttcatggcaatacagatacggaaaaactgaaaacaacaagcaatatccaccgttacagagacacgcctttgtaaaatggtggtcacaattcgatacttcaaaggctgctccagatcaagtcaagaactggttccagagcaatcctgagttccttaaaccagctgatccggagacatctttgtttctaaatcagaagtcgcaactggcagcattcttagcaagctcaaaatctaaagaaagtcttgctcagaatctcaaagaagttctccaactacttcaacaggaagtggaagaagaaccttccaagaaggaagctgaatcatcagagactaatgatgaccaagaagatgatccattctaccagaatgaagatgactgttttggtatatcattggacgacgattaattagttgtaataatcatgaattattgtaactaatttgtcagtttcttttaaataatgtaatttgtaaaaagttttgtaacagtttcggtaaacattatcgatactgtagaaacagtaaaaattgggtctatttaaaggagtcctcgtcccctttgtgaggcacctttttagatagtctcagaatcaggttttagagagagaagctctgcctagggaaaaactctttgtaagcttttctttcagtttcaataaatttcaagttctatttttcatatctcccttctcccctcaccgatcctgtgcggctctgccgccgcttcggtttctttgttttcaaaaacctggg

SEQ ID NO: 13243 - DNA, 1121 bp, Glycine max
  Gm_smallRNAprecursor_6076
cattccacaatccaaatcctgaaggttatgcagccacgacattatggctcaaacttaaaccaacccaaaaaattctctgcaccatttgatcctgcagggtataattattgggattacgttgacgcctggaccaatgtgttctggcatcaaaatagtaaattcaagcattcatggctgatttacttcaaaaataatactgcatataattttccaaattggttcctccaatggtggaactacttcggaccaattccacaaatatttccagaagaagtccaacagggattcgaacaattcaacaagctctataatagcaaggaatcacgaattccggcagatttaaagtatttttccagttttgccttatcatggatcttttcatggcaatacagatacggaaaaactgaaaacaacaagcaatatccaccgttacagagacacgcctttgtaaaatggtggtcacaattcgatacttcaaaggctgctccagatcaagtcaagaactggttccagagcaatcctgagttccttaaaccagctgatccggagacatctttgtttctaaatcagaagtcgcaactggcagcattcttagcaagctcaaaatctaaagaaagtcttgctcagaatctcaaagaagttctccaactacttcaacaggaagtggaagaagaaccttccaagaaggaagctgaatcatcagagactaatgatgaccaagaagatgatccattctaccagaatgaagatgactgttttggtatatcattggacgacgattaattagttgtaataatcatgaattattgtaactaatttgtcagtttcttttaaataatgtaatttgtaaaaagttttgtaacagtttcggtaaacattatcgatactgtagaaacagtaaaaattgggtctatttaaaggagtcctcgtcccctttgtgaggcacctttttagatagtctcagaatcaggttttagagagagaagctctgcctagggaaaaactctttgtaagcttttctttcagtttcaataaatttcaagttctatttttcatatctcccttctcccctcaccgatcctgtgcggctctgccgccgcttcggtttctttgttttcaaa

SEQ ID NO: 13244 - DNA, 1048 bp, Glycine max
  Gm_smallRNAprecursor_6077
attccacaatccaaatcctgaaggttatgcagccacgacattatggctcaaacttaaaccaacccaaaaaattctctgcaccatttgatcctgcagggtataattattgggattacgttgacgcctggaccaatgtgttctggcatcaaaatagtaaattcaagcattcatggctgatttacttcaaaaataatactgcatataattttccaaattggttcctccaatggtggaactacttcggaccaattccacaaatatttccagaagaagtccaacagggattcgaacaattcaacaagctctataatagcaaggaatcacgaattccggcagatttaaagtatttttccagttttgccttatcatggatcttttcatggcaatacagatacggaaaaactgaaaacaacaagcaatatccaccgttacagagacacgcctttgtaaaatggtggtcacaattcgatacttcaaaggctgctccagatcaagtcaagaactggttccagagcaatcctgagttccttaaaccagctgatccggagacatctttgtttctaaatcagaagtcgcaactggcagcattcttagcaagctcaaaatctaaagaaagtcttgctcagaatctcaaagaagttctccaactacttcaacaggaagtggaagaagaaccttccaagaaggaagctgaatcatcagagactaatgatgaccaagaagatgatccattctaccagaatgaagatgactgttttggtatatcattggacgacgattaattagttgtaataatcatgaattattgtaactaatttgtcagtttcttttaaataatgtaatttgtaaaaagttttgtaacagtttcggtaaacattatcgatactgtagaaacagtaaaaattgggtctatttaaaggagtcctcgtcccctttgtgaggcacctttttagatagtctcagaatcaggttttagagagagaagctctgcctagggaaaaactctttgtaagcttttctttcagtttcaataaatttcaagttctat

SEQ ID NO: 13245 - DNA, 1048 bp, Glycine max; identical to SEQ ID NO: 13244
  Gm_smallRNAprecursor_6078

SEQ ID NO: 13246 - DNA, 1080 bp, Glycine max
  Gm_smallRNAprecursor_6079
attccacaatccaaatcctgaaggttatgcagccacgacattatggctcaaacttaaaccaacccaaaaaattctctgcaccatttgatcctgcagggtataattattgggattacgttgacgcctggaccaatgtgttctggcatcaaaatagtaaattcaagcattcatggctgatttacttcaaaaataatactgcatataattttccaaattggttcctccaatggtggaactacttcggaccaattccacaaatatttccagaagaagtccaacagggattcgaacaattcaacaagctctataatagcaaggaatcacgaattccggcagatttaaagtatttttccagttttgccttatcatggatcttttcatggcaatacagatacggaaaaactgaaaacaacaagcaatatccaccgttacagagacacgcctttgtaaaatggtggtcacaattcgatacttcaaaggctgctccagatcaagtcaagaactggttccagagcaatcctgagttccttaaaccagctgatccggagacatctttgtttctaaatcagaagtcgcaactggcagcattcttagcaagctcaaaatctaaagaaagtcttgctcagaatctcaaagaagttctccaactacttcaacaggaagtggaagaagaaccttccaagaaggaagctgaatcatcagagactaatgatgaccaagaagatgatccattctaccagaatgaagatgactgttttggtatatcattggacgacgattaattagttgtaataatcatgaattattgtaactaatttgtcagtttcttttaaataatgtaatttgtaaaaagttttgtaacagtttcggtaaacattatcgatactgtagaaacagtaaaaattgggtctatttaaaggagtcctcgtcccctttgtgaggcacctttttagatagtctcagaatcaggttttagagagagaagctctgcctagggaaaaactctttgtaagcttttctttcagtttcaataaatttcaagttctatttttcatatctcccttctcccctcaccgatcc

SEQ ID NO: 13247 - DNA, 1120 bp, Glycine max
  Gm_smallRNAprecursor_6080
attccacaatccaaatcctgaaggttatgcagccacgacattatggctcaaacttaaaccaacccaaaaaattctctgcaccatttgatcctgcagggtataattattgggattacgttgacgcctggaccaatgtgttctggcatcaaaatagtaaattcaagcattcatggctgatttacttcaaaaataatactgcatataattttccaaattggttcctccaatggtggaactacttcggaccaattccacaaatatttccagaagaagtccaacagggattcgaacaattcaacaagctctataatagcaaggaatcacgaattccggcagatttaaagtatttttccagttttgccttatcatggatcttttcatggcaatacagatacggaaaaactgaaaacaacaagcaatatccaccgttacagagacacgcctttgtaaaatggtggtcacaattcgatacttcaaaggctgctccagatcaagtcaagaactggttccagagcaatcctgagttccttaaaccagctgatccggagacatctttgtttctaaatcagaagtcgcaactggcagcattcttagcaagctcaaaatctaaagaaagtcttgctcagaatctcaaagaagttctccaactacttcaacaggaagtggaagaagaaccttccaagaaggaagctgaatcatcagagactaatgatgaccaagaagatgatccattctaccagaatgaagatgactgttttggtatatcattggacgacgattaattagttgtaataatcatgaattattgtaactaatttgtcagtttcttttaaataatgtaatttgtaaaaagttttgtaacagtttcggtaaacattatcgatactgtagaaacagtaaaaattgggtctatttaaaggagtcctcgtcccctttgtgaggcacctttttagatagtctcagaatcaggttttagagagagaagctctgcctagggaaaaactctttgtaagcttttctttcagtttcaataaatttcaagttctatttttcatatctcccttctcccctcaccgatcctgtgcggctctgccgccgcttcggtttctttgttttcaaa

SEQ ID NO: 13248 - DNA, 1070 bp, Glycine max
  Gm_smallRNAprecursor_6081
tcaaacttaaaccaacccaaaaaattctctgcaccatttgatcctgcagggtataattattgggattacgttgacgcctggaccaatgtgttctggcatcaaaatagtaaattcaagcattcatggctgatttacttcaaaaataatactgcatataattttccaaattggttcctccaatggtggaactacttcggaccaattccacaaatatttccagaagaagtccaacagggattcgaacaattcaacaagctctataatagcaaggaatcacgaattccggcagatttaaagtatttttccagttttgccttatcatggatcttttcatggcaatacagatacggaaaaactgaaaacaacaagcaatatccaccgttacagagacacgcctttgtaaaatggtggtcacaattcgatacttcaaaggctgctccagatcaagtcaagaactggttccagagcaatcctgagttccttaaaccagctgatccggagacatctttgtttctaaatcagaagtcgcaactggcagcattcttagcaagctcaaaatctaaagaaagtcttgctcagaatctcaaagaagttctccaactacttcaacaggaagtggaagaagaaccttccaagaaggaagctgaatcatcagagactaatgatgaccaagaagatgatccattctaccagaatgaagatgactgttttggtatatcattggacgacgattaattagttgtaataatcatgaattattgtaactaatttgtcagtttcttttaaataatgtaatttgtaaaaagttttgtaacagtttcggtaaacattatcgatactgtagaaacagtaaaaattgggtctatttaaaggagtcctcgtcccctttgtgaggcacctttttagatagtctcagaatcaggttttagagagagaagctctgcctagggaaaaactctttgtaagcttttctttcagtttcaataaatttcaagttctatttttcatatctcccttctcccctcaccgatcctgtgcggctctgccgccgcttcggtttctttgttttc

SEQ ID NO: 13249 - DNA, 1071 bp, Glycine max
  Gm_smallRNAprecursor_6082
tcaaacttaaaccaacccaaaaaattctctgcaccatttgatcctgcagggtataattattgggattacgttgacgcctggaccaatgtgttctggcatcaaaatagtaaattcaagcattcatggctgatttacttcaaaaataatactgcatataattttccaaattggttcctccaatggtggaactacttcggaccaattccacaaatatttccagaagaagtccaacagggattcgaacaattcaacaagctctataatagcaaggaatcacgaattccggcagatttaaagtatttttccagttttgccttatcatggatcttttcatggcaatacagatacggaaaaactgaaaacaacaagcaatatccaccgttacagagacacgcctttgtaaaatggtggtcacaattcgatacttcaaaggctgctccagatcaagtcaagaactggttccagagcaatcctgagttccttaaaccagctgatccggagacatctttgtttctaaatcagaagtcgcaactggcagcattcttagcaagctcaaaatctaaagaaagtcttgctcagaatctcaaagaagttctccaactacttcaacaggaagtggaagaagaaccttccaagaaggaagctgaatcatcagagactaatgatgaccaagaagatgatccattctaccagaatgaagatgactgttttggtatatcattggacgacgattaattagttgtaataatcatgaattattgtaactaatttgtcagtttcttttaaataatgtaatttgtaaaaagttttgtaacagtttcggtaaacattatcgatactgtagaaacagtaaaaattgggtctatttaaaggagtcctcgtcccctttgtgaggcacctttttagatagtctcagaatcaggttttagagagagaagctctgcctagggaaaaactctttgtaagcttttctttcagtttcaataaatttcaagttctatttttcatatctcccttctcccctcaccgatcctgtgcggctctgccgccgcttcggtttctttgttttca

SEQ ID NO: 13250 - DNA, 1041 bp, Glycine max
  Gm_smallRNAprecursor_6083
tgcaccatttgatcctgcagggtataattattgggattacgttgacgcctggaccaatgtgttctggcatcaaaatagtaaattcaagcattcatggctgatttacttcaaaaataatactgcatataattttccaaattggttcctccaatggtggaactacttcggaccaattccacaaatatttccagaagaagtccaacagggattcgaacaattcaacaagctctataatagcaaggaatcacgaattccggcagatttaaagtatttttccagttttgccttatcatggatcttttcatggcaatacagatacggaaaaactgaaaacaacaagcaatatccaccgttacagagacacgcctttgtaaaatggtggtcacaattcgatacttcaaaggctgctccagatcaagtcaagaactggttccagagcaatcctgagttccttaaaccagctgatccggagacatctttgtttctaaatcagaagtcgcaactggcagcattcttagcaagctcaaaatctaaagaaagtcttgctcagaatctcaaagaagttctccaactacttcaacaggaagtggaagaagaaccttccaagaaggaagctgaatcatcagagactaatgatgaccaagaagatgatccattctaccagaatgaagatgactgttttggtatatcattggacgacgattaattagttgtaataatcatgaattattgtaactaatttgtcagtttcttttaaataatgtaatttgtaaaaagttttgtaacagtttcggtaaacattatcgatactgtagaaacagtaaaaattgggtctatttaaaggagtcctcgtcccctttgtgaggcacctttttagatagtctcagaatcaggttttagagagagaagctctgcctagggaaaaactctttgtaagcttttctttcagtttcaataaatttcaagttctatttttcatatctcccttctcccctcaccgatcctgtgcggctctgccgccgcttcggtttctttgttttc

SEQ ID NO: 13251 - DNA, 1172 bp, Glycine max
  Gm_smallRNAprecursor_6084
gaccaatgtgttctggcatcaaaatagtaaattcaagcattcatggctgatttacttcaaaaataatactgcatataattttccaaattggttcctccaatggtggaactacttcggaccaattccacaaatatttccagaagaagtccaacagggattcgaacaattcaacaagctctataatagcaaggaatcacgaattccggcagatttaaagtatttttccagttttgccttatcatggatcttttcatggcaatacagatacggaaaaactgaaaacaacaagcaatatccaccgttacagagacacgcctttgtaaaatggtggtcacaattcgatacttcaaaggctgctccagatcaagtcaagaactggttccagagcaatcctgagttccttaaaccagctgatccggagacatctttgtttctaaatcagaagtcgcaactggcagcattcttagcaagctcaaaatctaaagaaagtcttgctcagaatctcaaagaagttctccaactacttcaacaggaagtggaagaagaaccttccaagaaggaagctgaatcatcagagactaatgatgaccaagaagatgatccattctaccagaatgaagatgactgttttggtatatcattggacgacgattaattagttgtaataatcatgaattattgtaactaatttgtcagtttcttttaaataatgtaatttgtaaaaagttttgtaacagtttcggtaaacattatcgatactgtagaaacagtaaaaattgggtctatttaaaggagtcctcgtcccctttgtgaggcacctttttagatagtctcagaatcaggttttagagagagaagctctgcctagggaaaaactctttgtaagcttttctttcagtttcaataaatttcaagttctatttttcatatctcccttctcccctcaccgatcctgtgcggctctgccgccgcttcggtttctttgttttcaaaaacctgggtttgtaagccgtttcggtgtgcccttgatatctgctttacaattttataattcttacgtttgattttatcatactgctttcttacttcctatctgtccgtttgatcttattccgctgatctctggtatatatatatatatatatatatatatatatatatatatatatata

SEQ ID NO: 13252 - DNA, 1055 bp, Glycine max
  Gm_smallRNAprecursor_6085
agtaaatgaaattcttcccctacttcttgtcctagaggaatattgttttctactgttttgattatgtaatcaaagttgtgtttgtcttttattgtctcaggaacgtatagttgatcctgagggatttctggaatgttccagtcatccatattttgattgatatcttcgaatcggacttcctcatcgaagagattgtgttttggggcgacctcttgggtctggttgtcttgatcatttaatagattggagtttcttgaagaagatgataaggaggagtttgagcgaaaagagatacgagaaaaagatcgtaagagtctagacatgattatgatattctctaatatctttgccctcatttggttccatagaaatatctccgtaagtaaatatgtcacaaaatttttctggatctgaattatttttaagaaaactctttttttttttttttttttgaaaaatagtttgaacggaaatcctatagccaccagtgtattatgtcttgatattttggttaaacagtacaccttagccttactgcccttttatccaacacgggtcttactgctacagtaccattcaactaaaatattagactgctgtacttccaggaaatactgttcaaacatttactgtacaaatcaaagtaaaatattaaatgtactatacaaaacttttagtttcagatccataaaatttgttaacatatgtccttacggacagtattcctacttccccatcaggctctgataccagagatcagcggaatacgatcaaacggacggataggaagtaagaatgcagtatgataaaattaaacttaagaattataaacttgtaaagcagatatcaagggcacaccgaaacggcttacaaacccaggtttttgaaaacaaagaaaccgaagcggcggcagagccgcacaggatcggtgaggggagaagggagatatgaaaattagaacttgaaatttattgaaaccgaaagaaaagcttacaaagagtttttccctaggcagagcttctctctctaaaaacctgattctgagtctatctgaa

SEQ ID NO: 13253 - DNA, 1147 bp, Glycine max
  Gm_smallRNAprecursor_6086
gaattcgtgattccttgctattatagaggttgttgaattgttcgaatccctgttggacttcttctggaaatatttgtggaattggtccgaagtagttccaccattggaggaaccaatttggaaaattgtatgcagtattatttttgaagtaaatcagccatgaatgcttgaatttactattttgatgccagaacacattggtccaggcgtcaacgtaatcccaataattataccctgcagggtcagatggtgtagagaatttttcgggttggtttaagtttgagccataatgtcgtggctgcataactttcaggatttggattgtggaatgggtatttaaatttggatctttggggtctttgaagtgtttaatagatactgagtttgtatctattaggatgaattcgtagaatttgcgggttttatttgcggctattggcctgtaatggaatccctgggggaatactttggcggttgctttgaaaggatttttgtcccaatattctggttccatttgtaaaacattgaaaaatttgttttttgaaatgtaacttttactgggttgtggtgttgatccttgttgagtcaacgattggcttggtttttggttacagacggttttggtctgtttggctttttggatttgtttttgcagatctgtttcagaatcatcgtctgattctgaggccatttctgcccaggtctttttggctaattttggtattttggtgaggcctatatcctctaaggccaggagagtttgtattgaccaggcatagtcagccacggtctgtttggttgttgttggttttggagattcctgagttgatgactcagatttgacggtagttgtttgggtcaatgacccttcaagttttcctttctgggttgatgacccagtctgggtaggtgacccaggagatgttgtagttgcctttttggttattggctctggtagagccagtagaacttctttacctttcgtactggatcttcctcctctgccggaggaactagacaccttaggaggcatcgggaattttctgtaaaaattcacgggtgaggtagtcaggtagagagttggaagagcccttgatatattctatattaaaatcaaagacacttaaaattgcttgccatcttgcaa

SEQ ID NO: 13254 - DNA, 1203 bp, Glycine max
  Gm_smallRNAprecursor_6087
ttggtcatcttgttggattaggtttaggttttcatcggaaagtacggaggatgaagtttctgtttctgtttcctcctccgaggtttctatgagcaaattgtttatttgctcttcaattgagggttctaggttaaggtttcttaacttcttctttagtctacaatatttgctaatgtggccttgttttccacaattgtagcacgttatttttttattttattttttgtttaggattttctatttctctactggttgagggtttttgagagtatcttcgttttgaaaatcttctgttattggctggcttatgatcgtaaggacatactgtccgtaaggacatatattaacaaattttatggatctggtagtcaggtagagtaggaatactgtccgtaaggacatatgttaacaaattttatggatctgaaactaaaagttttgtatagtacatttaatattttactttgatttgtacagtaaacgtttgaacagtatttcctggaagtacagcagtctaatattttagttgaatggtactgtagcagtaagacccgtgttggataaaagggcagtaaggctaaggtgtactgtttaaccaaaatatcaagacataatacactggtggctataggattgccgttcaaactatttttcaaaaaaaaaaaaaaaaagagttttcttaaaaataattcagatccagaaaaattttgtgacatatttacttacggagatatttctatggaaccaaatgagggcaaagatattagagaatatcataatcatgtctagactcttacgatctttttctcatatctcttttcgctcaaactcctccttatcatcttcttcaagaaactccaatctattaaatgatcaagacaaccagacccaagaggtcgccccaaaacacaatctcttcgatgaggaagtccgattcgaagatatcaatcaaaatatggatgactggaacattccagaaatccctcaggatcaactatacgttcctgagacaataaaagacaaacacaactttgattacataatcaaaacagtagaaaacaatattcctctaggacaagaagtaggggaagaatttcatttactttcaaaaaattcaattcatgaacatagtcgtaagtataaatatctacacatcggttgtgtacaagtagccatcaagcccttaattgatatgggcataga

SEQ ID NO: 13255 - DNA, 1186 bp, Glycine max
  Gm_smallRNAprecursor_6088
aggttaaggtttcttaacttcttctttagtctacaatatttgctaatgtggccttgttttccacaattgtagcacgttatttttttattttattttttgtttaggattttctatttctctactggttgagggtttttgagagtatcttcgttttgaaaatcttctgttattggctggcttatgatcgtaaggacatactgtccgtaaggacatatattaacaaattttatggatctggtagtcaggtagagtaggaatactgtccgtaaggacatatgttaacaaattttatggatctgaaactaaaagttttgtatagtacatttaatattttactttgatttgtacagtaaacgtttgaacagtatttcctggaagtacagcagtctaatattttagttgaatggtactgtagcagtaagacccgtgttggataaaagggcagtaaggctaaggtgtactgtttaaccaaaatatcaagacataatacactggtggctataggattgccgttcaaactatttttcaaaaaaaaaaaaaaaaagagttttcttaaaaataattcagatccagaaaaattttgtgacatatttacttacggagatatttctatggaaccaaatgagggcaaagatattagagaatatcataatcatgtctagactcttacgatctttttctcatatctcttttcgctcaaactcctccttatcatcttcttcaagaaactccaatctattaaatgatcaagacaaccagacccaagaggtcgccccaaaacacaatctcttcgatgaggaagtccgattcgaagatatcaatcaaaatatggatgactggaacattccagaaatccctcaggatcaactatacgttcctgagacaataaaagacaaacacaactttgattacataatcaaaacagtagaaaacaatattcctctaggacaagaagtaggggaagaatttcatttactttcaaaaaattcaattcatgaacatagtcgtaagtataaatatctacacatcggttgtgtacaagtagccatcaagcccttaattgatatgggcatagatgcagcagttttaatgtgtctaagagacattaggcataaccaatttgaagactccctaattggaacagtcgaaaccagcctaggacaaggtccaatatattttaattgtt

SEQ ID NO: 13256 - DNA, 1142 bp, Glycine max
  Gm_smallRNAprecursor_6089
gatgggtctgatgggtatgagaggaacaagaatttggattgtgggagtgacaagtttttgcatgtaaagaacgtgaagttaccgtagacaacctatgtgtttgtgaacaggagcatgaacccaagggagtgtcaggatttttgcctcagggattgttcttgcactgcttatgccaacattcagatcacaaacgaaggaagtggatgcgtgacgtggagtggtgaactcatagatatgaggctgtatagaagcggatgcgtgacgtggaatggtgatttgtagatatgaggttgtattgttacgtcttgcttgctcgggaatttgaagccatagtttgaaaatccaacaccttgaggacaaggtgtttttgatgggctcgggaaccaatgttacgtcttgaaattcgaggaccaagacaagcttattgagagagaagaagagagagcttttttgatatttctttcttatacatatatatattgctagctgctagggaacaaactcccaacaacaataacaaaaggataagcgcaatcatggaatatcctaatagaatgatatccataacattctacactatctaaatggtgcgatttggtatgcctactacatgatgtctactacgtactatatgcatgatgcctcctgttaatcatgttgttaaccttcctcttgggcctagtagtgcttactgcctgcagatcccctgtgtcattcataccccccccccccccgtgtcattcgtatcactcaatcaactgggggcatttaatgtgaagcttttgtaaatgtactcaaggaacttatcaaaactcatatacctgaattcccttcatgaacacaatatcttttaagtgctgcaagcaaaaagtcacaggagttaaaaaaaaaactagagtaacagttcatgtggaatgaaatgagaattgcataataataaagaatcgaaagaattgtttcaacctcattgtggtcatgaagcaagatgggagtattcttcattggggagaaactgagcacaggaattcctttctgtttgaggtatcgagcattagttgtggatgcaagaatttcaggccttgaaagtttttctccaatagatgatatagcttacttgaaatctgaccaccgtggataggaat

SEQ ID NO: 13257 - DNA, 1069 bp, Glycine max
  Gm_smallRNAprecursor_6090
aattacaatggattgagttgtgcctattcaaaactttgacaaacttccaatatgagaaatataaaaaaaaaaaaaaaaaactgctacaattatgattatgaccctttatgttttgacacaaaaataagttcaaattataaaaatcaatctgcaaacgttttgtattaaattttgacatgaaaaactaagaaatattaagaattatgttaaatttatttcaattaattgataccaaaaaaaaggctaaaatttagcaattaataaaaatttagaaacacttttacatataaaattttggtcccttatttaatttaatccagaattagttcgtacattttaaaagaaagacatttaggcatcacatattaatgttttaaatttatgtaattttttataataactttaattgttgaattatggtttttttcgtgaatacactctctctcctattttttctcaatatacataggggtgggaataggtcaggccggcctacaggggcctacgacctgacctacataaagtctggtctgaactggcctctcagacttttttaaaagcctattaaattaaatagatcagacttaggcttattagaaaataggctggcctatatatatatatatatatatatatatatatatatatatatatatatatatatatatatacttatattattttttgggtacaattaatttttaaaaaaaactatcagactttgattacacattactactccataatttctatccctataatcaagtaagactttaattacaatttaggtgtgagtcatgtgcccttttatatttttcattgtttttattggctatcaggtcaggctaggcttttaaaaaggtcaggctgagccaaaataaaagtctttgataggctatataggccaggctcaagcctcaaaaattcatcgtaggctaggcttaggcctttcaaaacctggtctgacctattcccacccctaaatatacatcactttgtaatttaatttccaatctacactactttgaactttgtgctttaattcacacaacgtggtcaaagaaatcag

SEQ ID NO: 13258 - DNA, 1106 bp, Glycine max
  Gm_smallRNAprecursor_6091
tagaataaggataagtgctatggaagcttattctggaagataattggtataaattaggcaaattgacttcagggggtttcttttagaaactaattcccaatcagggtctgttttgaaatattttacgaaggggtctattttatgtgagcgttttgctgaggggaatgacgaaacacatatttcgccaagaggaatagcgaaataggtgcatatttcgccgagaggaacaacgaaataggtgcatatttcgccaacagaaacagcgaaataggtgcataggggtgtagtgtgcataatggatttcgctatccttattagcgaaacaggtgcaacatgtggatttcgccatcttcattggcgaaataggtgatgctgttgcttttttacaccatttaaattttgccatcaactggaccagatttataattttttttttgtcacttattgtattatattttattttgtaatactataaaaaagcaacagcaccacctatttcgccaacgaaaatggaaaaatccacatgttgtacctatttcgtcaatgaggatgacgaaattcactttgcacactatgcacctatttcgctgttcctcttagcaaaacatgtgtttcgccatttcccttagcaaaacactcacacaaaacagacacccttcgcaaaatgtttcaaaaatgatcctgattggaaattagtttctaaatgagaccccctgaggtcaatttgctaagattaccttcccgaatagaaattccttatgaaaggattatttttgtccatataagtaaaatgggagatgcaggattcaaatgtcctgatccagctttataaggcccatttcacagaagcccaaagatgaagaaatcgcaggaaggctccagagaaacgaaaaaggcgaatatttcccccgagtgtatattacaaaacaccaattcagttcacttcaacgctgagattggagaacaaagaaaaaaaaaacgtagaaggaaggttaagacttaagcgaggttatagcaatgttctttttcttcgtgggagggttgcagcaagagatacggcaagtgctgaaatccggtgtgggcaagtgcacgttctgcgccaacaa

SEQ ID NO: 13259 - DNA, 1187 bp, Glycine max
  Gm_smallRNAprecursor_6092
atcggcttcacgaacgtctcgcagttcttcctccatgcctcctgaagacctagaacagctgacccaacaaatcagagaccaactggaggagtcaatcacagaaaaagtgactcgaaagatgatggaatccttcagccagatgcagtcccaatttcagtctcagatgcaatcacagggacttgcactacctccagagccagagtttggtccctcaggtcctcgtgtcagcacaaaggagagttgcgttgctccctcagggaacgatccagggacgggtgactcagacaaatgcgggctatatattgaagaaaatccttcccgcctggttgccctaggaagactttatgtgggatccacaacagttcacaacatccctttgttgcatggccaagtcaaggttggtgttgaggagattaaagatgcagaggctctcgttcttgtacccactgacaaggttaccttagtggggcagacacttaacaccttccttgcttggccaacacatcttgtgaagcgtttatcagaacatgtatttttctctgattatatgtttatttttttcaattaatttgttcactgcaatcaaaacttgctaattaactatgttttatcgacaggcagctgtgtctccagcaaaacctctagaaagcccagatgaagaggtcgatgatcccctgtacctgatgacattgaccatcccacaactgtttttgaagtcgctccaggttatgtgggatgctaccatattcagggtgtttaatcaaaacttcccgttgtatataaagcacgaagatctctctgaaattgcacatggtggtcaatgtctcagcatatctgttatacagttgtggattctgtaagtcattttagattactattaattaccaaagtaatttttttaaattcatacataattaactttgacttaacaacacaaccatctgactgagacaagtgtgcgagcggggaattctgatgtgtatggattcctcgagccacagtccattcagagatctgggcaatcacaatttgaatccgaaagttacatcaagagttggatacagagttcaaaacgagatgtttaccttggagtctacctgaatgggtaagtcaaacacaataattgaatttaaataatctatactactacaataacccatattcgtctctactgcagcggacactgg

SEQ ID NO: 13260 - DNA, 1032 bp, Glycine max
  Gm_smallRNAprecursor_6093
attttactgtttcaacagtatcagtaatgtttaccggaactgttacaaaaacttttacaaattacattattatcgggaaccgaataattagttacaataattcatgattactacaactaactaatcatcgtctaacgatataccaaagcagtcatcttcattttggtagaatggatcatcttcctggtcatcattattctcggatgattcggcttctttcttggggagttcttcttcttcttcttgttgaagtagttggagaacttccttaagattctgagcaagactctctttagattttgagcttgctaagaacgctgcaagttgagacttttgattcagaaacaaagatgtctctggatcagcaggcttgagaaactcagagttgctctgaaaccagttcttgacttgttctggagcagcctttggggtatcgaattgtgaccaccattttacaaaggcatgtctctgcaatggtgggtactgtttgctgttttcggtttttccatatctgtattgccatcaaaaaatccatgacaaggcaaaactggaaaagtactttaaatctgccggaattcttgattccttgctattgaagagcttgctgaattgttggaatccctgttggacttcttctggaaatatttgcggaattggtccgaagtagttccaccattggaggaaccaatttggaaaattatacatagtgttattcttgaagtaaattagccatgaatgcttaaatttactattttgatgccaaaacacattggtccaggcgtcaatgtagttccaataattgtatcctacaggatcaaaaggtgcagagaattttttgggttggtttaagtttgagccataatgtcatggctgcataacctttagaatttggattgtggaatgggtatttaggtttggatctttggggatctttgaagggtttaatagatactgagtttgtatctattagaatgaattcgtagaattttttggttttatttgtggctgttggcctataatgcaatcccgggg

SEQ ID NO: 13261 - DNA, 1033 bp, Glycine max
  Gm_smallRNAprecursor_6094
attttactgtttcaacagtatcagtaatgtttaccggaactgttacaaaaacttttacaaattacattattatcgggaaccgaataattagttacaataattcatgattactacaactaactaatcatcgtctaacgatataccaaagcagtcatcttcattttggtagaatggatcatcttcctggtcatcattattctcggatgattcggcttctttcttggggagttcttcttcttcttcttgttgaagtagttggagaacttccttaagattctgagcaagactctctttagattttgagcttgctaagaacgctgcaagttgagacttttgattcagaaacaaagatgtctctggatcagcaggcttgagaaactcagagttgctctgaaaccagttcttgacttgttctggagcagcctttggggtatcgaattgtgaccaccattttacaaaggcatgtctctgcaatggtgggtactgtttgctgttttcggtttttccatatctgtattgccatcaaaaaatccatgacaaggcaaaactggaaaagtactttaaatctgccggaattcttgattccttgctattgaagagcttgctgaattgttggaatccctgttggacttcttctggaaatatttgcggaattggtccgaagtagttccaccattggaggaaccaatttggaaaattatacatagtgttattcttgaagtaaattagccatgaatgcttaaatttactattttgatgccaaaacacattggtccaggcgtcaatgtagttccaataattgtatcctacaggatcaaaaggtgcagagaattttttgggttggtttaagtttgagccataatgtcatggctgcataacctttagaatttggattgtggaatgggtatttaggtttggatctttggggatctttgaagggtttaatagatactgagtttgtatctattagaatgaattcgtagaattttttggttttatttgtggctgttggcctataatgcaatcccggggg

SEQ ID NO: 13262 - DNA, 1031 bp, Glycine max
  Gm_smallRNAprecursor_6095
ttttactgtttcaacagtatcagtaatgtttaccggaactgttacaaaaacttttacaaattacattattatcgggaaccgaataattagttacaataattcatgattactacaactaactaatcatcgtctaacgatataccaaagcagtcatcttcattttggtagaatggatcatcttcctggtcatcattattctcggatgattcggcttctttcttggggagttcttcttcttcttcttgttgaagtagttggagaacttccttaagattctgagcaagactctctttagattttgagcttgctaagaacgctgcaagttgagacttttgattcagaaacaaagatgtctctggatcagcaggcttgagaaactcagagttgctctgaaaccagttcttgacttgttctggagcagcctttggggtatcgaattgtgaccaccattttacaaaggcatgtctctgcaatggtgggtactgtttgctgttttcggtttttccatatctgtattgccatcaaaaaatccatgacaaggcaaaactggaaaagtactttaaatctgccggaattcttgattccttgctattgaagagcttgctgaattgttggaatccctgttggacttcttctggaaatatttgcggaattggtccgaagtagttccaccattggaggaaccaatttggaaaattatacatagtgttattcttgaagtaaattagccatgaatgcttaaatttactattttgatgccaaaacacattggtccaggcgtcaatgtagttccaataattgtatcctacaggatcaaaaggtgcagagaattttttgggttggtttaagtttgagccataatgtcatggctgcataacctttagaatttggattgtggaatgggtatttaggtttggatctttggggatctttgaagggtttaatagatactgagtttgtatctattagaatgaattcgtagaattttttggttttatttgtggctgttggcctataatgcaatcccgggg

SEQ ID NO: 13263 - DNA, 1037 bp, Glycine max
  Gm_smallRNAprecursor_6096
gaccagacatagtcagccacggtctgttttgttgttgttggttttggggattcctgagttgatgactcaggtttaacggtagttatctgggtcaatgacccttcacgctttcctttctgggttgatgacccagtctgagtaggtgacccagaagatgatgtagttgccttcttggttattggctctggtagagccaatataacatctttacctttagtactggatcttcctcctctgccggaggagctagacaccttaggaggcatcgggaattttctgtaaaaattcatgggtgaggtagtcaggtagagagtttgaagagcccttgatatattctgttaaaatcaaagacgcttaaaattgcttgccatcttgcaaaaatttgttttgaggcaaggttttttacatccttttgtaaaatgtctttggctgatttgcagtcaacccttactaaaaatttttgattcaataaatcagattgaaatttggaaatgcacaaaacaattgctaaaacttcctttttaacagttgaatattttaattgtgcaggattccaatgttttgaagtatatgcaatgacatgttcttgaccatgtatttgctgtttaaggatgccaccgtaaccaatgtctgatgcatcagtttcgacaattttgaatgcctgtggaatgggaagatacaaacattttatggattggactttgactttgatttctttgactgtttgagtatggaggtcagaccaagaaggcggattctttttcagcctatcatgtaatggtttgacaatattgtttagataggggacaaattctcctacataatttaggcaccccagaaatcgttgtaactgggtcttgtctaagatttggttagggaatttgctggcaaattctattgatctttctattgggatgattgtgccttggtatatattgtgtccaaggaatcgtatccgagtctggaaaagattgatctttgatttggagactggcaaaccattctgtttaatgatatggatgaaagtctggaggtgt

SEQ ID NO: 13264 - DNA, 1038 bp, Glycine max
  Gm_smallRNAprecursor_6097
gaccagacatagtcagccacggtctgttttgttgttgttggttttggggattcctgagttgatgactcaggtttaacggtagttatctgggtcaatgacccttcacgctttcctttctgggttgatgacccagtctgagtaggtgacccagaagatgatgtagttgccttcttggttattggctctggtagagccaatataacatctttacctttagtactggatcttcctcctctgccggaggagctagacaccttaggaggcatcgggaattttctgtaaaaattcatgggtgaggtagtcaggtagagagtttgaagagcccttgatatattctgttaaaatcaaagacgcttaaaattgcttgccatcttgcaaaaatttgttttgaggcaaggttttttacatccttttgtaaaatgtctttggctgatttgcagtcaacccttactaaaaatttttgattcaataaatcagattgaaatttggaaatgcacaaaacaattgctaaaacttcctttttaacagttgaatattttaattgtgcaggattccaatgttttgaagtatatgcaatgacatgttcttgaccatgtatttgctgtttaaggatgccaccgtaaccaatgtctgatgcatcagtttcgacaattttgaatgcctgtggaatgggaagatacaaacattttatggattggactttgactttgatttctttgactgtttgagtatggaggtcagaccaagaaggcggattctttttcagcctatcatgtaatggtttgacaatattgtttagataggggacaaattctcctacataatttaggcaccccagaaatcgttgtaactgggtcttgtctaagatttggttagggaatttgctggcaaattctattgatctttctattgggatgattgtgccttggtatatattgtgtccaaggaatcgtatccgagtctggaaaagattgatctttgatttggagactggcaaaccattctgtttaatgatatggatgaaagtctggaggtgtt

SEQ ID NO: 13265 - DNA, 1157 bp, Glycine max
  Gm_smallRNAprecursor_6098
atttcatggatctgaacttatgtacaataattgttttcaagattgtacaatacttttaatttaaaagtatatgtttgaacaatatttctggaagtacaacagtctgatattttagttgaatgatacagtagcagtaagtcccgtggatgagaaagggtagtaaggctaaggtgtattgttcaaataaaatattaaagacataatatactggtggctataggagtaatgttcaaactatattgtctgtaaaaagaagagttaaaattttattttcagatccaagaaatttagtaacatataaccttttggaaacatttctatggaaccacatgaaggcaaagatactagaggatgaattaaatatgtctcatcttttacgttctttctcctgtatttatttaagatctaactcatcttcatcttcatcctcaatgaattctccaaaaaacaccaatttgctcaatgaacaagaaaaccagacccacgaggtcgcccctaaacacaatctcttcgatgaggaggttcaattcgaagatataaaccaaaacatggatgattggaatatcccagaaatccctcaggatacattgtatgtccccaagacaattaaagacaaacctaattttgattacataatcaaaactgtagacaataatattcctctaggacaagatataggggaagaattccatttactttcaaaaaattcaatttatgaacatagtcgtaaatacaaatatctatacataggatgtgtacaagtagccatcaagccgttaattgagatgggtatagatgtaacaatattaatgtgccttagagacattaggtattacaaatttgaagactccttgataggagtggtagaaacaagcctgggactaggtccggtatacttcaattgttatccaaaaaaaaacagtgagtctgatggacgaacattcttgactctttgttcttaaatatccactttcatggccttgacatgaaagaaggatcaattatggcagccttaatctgtaggattgagtacaaagtcatgaacacttgtgctcaagagtcctattaaaaccacaaagaggaaagatgactttgtttatcactgatatgacaaaggtcaatgtttctctcccaagaacaataaaatgggatgaggt

SEQ ID NO: 13266 - DNA, 1164 bp, Glycine max
  Gm_smallRNAprecursor_6099
tccaatttttctcaaattggatcctacaagtcctaaatcatgtataaatcgtatttaaaccaaaaacaagcttcaggtcaaggtaaatctaaatctaggtatccaaaacccatcaattgagtgaattttcaaggtttgagaagtgaaaatgagaatggggtaattttggagtaaactctcatctcaaacaagtctataacattaatttagacttgctcaaactggttttatggcaaaaactccactgattcaaaatttgacccctcaacacctaatttaccgtagaaatggctcttgctttcacctttgtcactcattttctcatttgctctgcccaagccttcctacaagtcctaattgacattctaaactagaatcaactcactttagactccaatttccactaaccccaaatttagcttttcaaaccctcaaaatctcacacgtttccacccacatcactaccattctcacatttaaccctaggttaactctccccatcatctctaccagttttctaccaacaatttcagcacacaaacatcacaaagcatcatcataaaaccctaaaacagaatgggtagctttactcacatcaaacacgtcaagtttagcatgttttcaacaaatttcttcacaaataactaccataaggcataaacctagtagaactacccatcatatctcccaaaaacccaatacccacgaatttcatgtgaaaagaagtccacctatacctgaaattcgaagtcccacaacgtagaggtgtgcttcacgactccgaaaatagcttccttttgcaatttggagtagaagtgatgagcaattttgtagcttcaatggaggcttcaatggagaggaagaagaagagaaaaagctacgagaaagagggaggaaaagcttttctgaattctggtgaaaaaggagagagagaatttggcttttattttaaaaagatcttctcttcctttttttctaaaagccatgccacatgtctcattttgagtggagcaaaaggggccacactttttctcttgatgtgacttcatactcagccacaaggggagaaaaatttgaccttttgaatgctaaaatcctgccttggtttgcgtgctgcttctctggttccagtccctcgcgtttctttgcacccgtcggggctcg

SEQ ID NO: 13267 - DNA, 1170 bp, Glycine max
  Gm_smallRNAprecursor_6100
ctgagtatgaagtcacatcaagagaaaaagtgggcccctttcgctccacccaaaatgagacatgtggcatggcttttagaaaaaggaaagagaaaatctttttaaaataaaagccaaattctctctcttcattcagattttagaaaagcttttcctcccccttcccacattgcttttctcttcttcttcctctgcattgaagcctccattaaagctccaaaattgctcatcacttctactccaaattgcaaaaggaagccattttcggagtcgtgaaacgctcctctacgttgtgggacttcaaatttcaggtatgggtggactttttctcacatgaaattcgtgggtattgggtctttgggagatatgatgggtagttctactaggtttatgccttatggtagttatttgtgaaggagtttgttgaaagcatgctaaacttgacatgtttgatgtgagtaaagctatccattctgttttagggttttatgatgatgctttgtgatatttgtatgctgaaattgttggtagaaaactggtagagatgatggggagagttaacctagggttaaatgtgagaatggtagtgatgtgagtggaaaagtgtgagattttgagggtttgaaaagctaaatttggggttagtggtaattggagtctaaagtgagttgatcctagtttaaaatgtcaattaggacttgtaggaaagcttgggcagagcaaatgagaaaaatgagtgacaaatgtgaaagcaagagtcatttctagggtaaattgggtgttgaggggtcaaatcttgaatcggtagagttttcgccttaaaatcactttgagcaagtctaaattaatgttatatacttgtttgagatgagaatttactccaaaattaccccattctcattttcacttctcaaaccttgaaaattcactcaattaatgggttttggatacctagatttggatttaccttgatctgaagcttgtttttggtttaaatacaatttatacatgatttaggacttgtaggatccaatttgagcaaaattggatgtgggcaagatggatttcgaaatctgccctattatgcagaaaaatgttgttgaattgtgcagcagaatttttcaacatatgcagaaaatgcttgtgcttttctggttatgggagaggtag

SEQ ID NO: 13268 - DNA, 1157 bp, Glycine max
  Gm_smallRNAprecursor_6101
atggctaaatgaaagggcatatgttaactgaacttacggatctgaagcatgtacagtaattttaatttaaacagtatgtgtttgaacagtattttctggaagcacagcagtctgatattttagttgaatgatactgtagcagtaagtcccgtggatgagaaagggcagtaaggctaaggtgtattgttcaaacaaaatattgagacataatatactggtggctataggagtaatgttcaaactatattgtcggtgaaaaaaaaaaaatcttctttttcatttattcagatccaagaagttctgtaacatatagccttatgggaagattcctattgaaccaaatgaaggcaaagatattagagaatgttttaattatgtctagattattgcgatccttttcccgtatctcttttcgctcaaattcctcctcttcatcttcttcaagaaacaccaatctcttaaatgatcaagataaccagacccaagaggtcgccccaaaacacaatctcttcgatgaggaagtccgattcgaagatattaatcaaaacatggatgactggaacattccagaaatccctcaggatcaactatacgttcctgaaacaattaaagacaaacacaactttgattacataatcaaaacagtagaaaacaatattcctctaggacaagatataggggaagaatttcatctactttcaaaaaattcaatttatgaacatagccgtaagtataaatatctacacatcggttgtgtacaagtagccatcaagcccttaattgatatgggcatagatgcagcagttttaatgtgtctaagagatattaggcataatcaatttgaagactccctaattggaacagtcgaaatcagcctaggacagggtccaatatattttaattgttatccaaacaaaacagtgagtctgatggacagaaacattcttgactctctgttcttaaacatccactttcatggccttgacatgaaagaaggatcaatcctagcagccttaatttataggatccagtacaaggtcatgaatacttgtgcatctagagtcctgttaaaacctcaaaaaggagaaacaaccttgtttatcactgatatgacaaaggctaacgtgtctctcccgagaaaaataaaatgggatgag

SEQ ID NO: 13269 - DNA, 1080 bp, Glycine max
  Gm_smallRNAprecursor_6102
atgatttcgttttagaaacaatggccctatttgatacaggggctgattcaaactgcattttagaaggattaattcctacaaaattctttgagaaaacctcagaaaaattaagtacggcaaacggctcaaaattaaaaattaattttaagctatcaaatgcaataattgaaaaccaaggtcttaagattaacacaaactttcttctggtaaaaaaccttaagaatgaagtaatcttaggaacgcccttcattagagccctgtttcccatccaaatatctaatgaaggaataaccacaaattatttaggaagaaaaattatatttaatttttctactaaaccaatttccagaaatataaatcttatagaaaataagattaatcaaattaacttcttaaaagaagaagtatcttttaataatattcagatacaactgggaaaaccccaagtaaaagaaagaattcaatctttattaaatcatattgaatcgaccgtttgttccgaattgccacatgcattttgggacagaaagaaacatattgtcgatctcccttatgagaaagactttagggaaaaacaaattcccacaaaagccagaccaatccaaatgaatgaagaacttcttcaatactgtcaaaaggaaatcaaggatttgcttgataaaggcctaatccggaaaagcaaaagcccatggtcttgtgcggctttttatgttaacaaacaatctgagattgagcgtggaacaccctgcttagtcataaattacaaaccattaaatcaagcattacaatggattagatatcctattccaaacaaaaaagatttgcttaacagattaaattctgcaaagatattttcaaaatttgatatgaaatctggattttggcaaatccaaatccaagaatcagataggtacaaaacagcgtttactgtacctttcgggcaatatgaatggaacgtgatgccattcggactgaagaatgccccttcagaatttcaaaaaattatgaacgatatttttaatccttattcaaaatttgtcattgtctacatagatgatgttttaatcttttcccaaaaca

SEQ ID NO: 13270 - DNA, 1073 bp, Glycine max
  Gm_smallRNAprecursor_6103
tgtacctttcgggcaatatgaatggaacgtgatgccattcggactgaagaatgccccttcagaatttcaaaaaattatgaacgatatttttaatccttattcaaaatttgtcattgtctacatagatgatgttttaatcttttcccaaaacattgaccaacatttcaaacatctccaaaccttcatacatatcatcaaacaaaatggtttggcagtctccaaatcaaaaatcaatcttttccaaactcgaattcgattccttggtcacaatatatatcaaggtacaatcattccaatcgaaaggtcaatagagtttgctagcaaattccccaaccaaatcttagacaaaacccagttacaaagatttctaggttgtctaaattacgtaggagaatttgtcccctatttaaataatattgtcaagccattacatgataggctgaagaaaaatccacctccttggtctgacctccatacacaaacggttaaagaaatcaaagtcaaagtccaatccattaaatgtctgtatcttcctattccacaggcatttaaaattgtcgaaactgatgcttcagacataggttatggtggcatcctcaaacaaagagtccatggccaagatcatgtcattgcatatacatcaaaacattggaatcctgcacaattaaaatattcaactgttaaaaaaagaggttttagcaattgttttgtgcatttccaaatttcaatcggatttattaaaccaaaaatttttaatcagggttgattgtaaatcagccaaagatattttacaaaaagatgttaaaaaccttgcctcaaaacaaatttttgcacgatggcaagcaattttaagtgtctttgattttgacatagaatacatcaagggcacctcaaattcactacctgactaccttacccgtgaattcttacagaaaagtggtaatgcctcctaaggcatcgggaatctccctacggggaggaaggagtacaggcaaaggagccaggctggctcttccagagccaaccatcaagaaatcatctacctcttctgggtcaccaacccaggctgggtc

SEQ ID NO: 13271 - DNA, 1071 bp, Glycine max
  Gm_smallRNAprecursor_6104
tacctttcgggcaatatgaatggaacgtgatgccattcggactgaagaatgccccttcagaatttcaaaaaattatgaacgatatttttaatccttattcaaaatttgtcattgtctacatagatgatgttttaatcttttcccaaaacattgaccaacatttcaaacatctccaaaccttcatacatatcatcaaacaaaatggtttggcagtctccaaatcaaaaatcaatcttttccaaactcgaattcgattccttggtcacaatatatatcaaggtacaatcattccaatcgaaaggtcaatagagtttgctagcaaattccccaaccaaatcttagacaaaacccagttacaaagatttctaggttgtctaaattacgtaggagaatttgtcccctatttaaataatattgtcaagccattacatgataggctgaagaaaaatccacctccttggtctgacctccatacacaaacggttaaagaaatcaaagtcaaagtccaatccattaaatgtctgtatcttcctattccacaggcatttaaaattgtcgaaactgatgcttcagacataggttatggtggcatcctcaaacaaagagtccatggccaagatcatgtcattgcatatacatcaaaacattggaatcctgcacaattaaaatattcaactgttaaaaaaagaggttttagcaattgttttgtgcatttccaaatttcaatcggatttattaaaccaaaaatttttaatcagggttgattgtaaatcagccaaagatattttacaaaaagatgttaaaaaccttgcctcaaaacaaatttttgcacgatggcaagcaattttaagtgtctttgattttgacatagaatacatcaagggcacctcaaattcactacctgactaccttacccgtgaattcttacagaaaagtggtaatgcctcctaaggcatcgggaatctccctacggggaggaaggagtacaggcaaaggagccaggctggctcttccagagccaaccatcaagaaatcatctacctcttctgggtcaccaacccaggctgggtc

SEQ ID NO: 13272 - DNA, 1115 bp, Glycine max
  Gm_smallRNAprecursor_6105
caatagagtttgctagcaaattccccaaccaaatcttagacaaaacccagttacaaagatttctaggttgtctaaattacgtaggagaatttgtcccctatttaaataatattgtcaagccattacatgataggctgaagaaaaatccacctccttggtctgacctccatacacaaacggttaaagaaatcaaagtcaaagtccaatccattaaatgtctgtatcttcctattccacaggcatttaaaattgtcgaaactgatgcttcagacataggttatggtggcatcctcaaacaaagagtccatggccaagatcatgtcattgcatatacatcaaaacattggaatcctgcacaattaaaatattcaactgttaaaaaaagaggttttagcaattgttttgtgcatttccaaatttcaatcggatttattaaaccaaaaatttttaatcagggttgattgtaaatcagccaaagatattttacaaaaagatgttaaaaaccttgcctcaaaacaaatttttgcacgatggcaagcaattttaagtgtctttgattttgacatagaatacatcaagggcacctcaaattcactacctgactaccttacccgtgaattcttacagaaaagtggtaatgcctcctaaggcatcgggaatctccctacggggaggaaggagtacaggcaaaggagccaggctggctcttccagagccaaccatcaagaaatcatctacctcttctgggtcaccaacccaggctgggtcatctacccagaaaaccaatttagaagggtcatcaacccagattgcctcaatcaaacctgagccatccactcaggaatctcccaaaccggcaaccgccaaacaaacatcggccgactatgcatggccaattgaaacccttcaggcccttcaagacatgggtctgaccaaatttccaaaaataatcaaaaaatcttgggcagacattgcctcagaatctgatgatgaatctgaatcaaatttacaaacaatgatccaaaatgcgtcaatgaccaaaacagccaccaatactaaaggaaaactacctttagccaaagctcaaacaccacctaccaaacaaactaacaatt

SEQ ID NO: 13273 - DNA, 1174 bp, Glycine max
  Gm_smallRNAprecursor_6106
caaagagtccatggccaagatcatgtcattgcatatacatcaaaacattggaatcctgcacaattaaaatattcaactgttaaaaaaagaggttttagcaattgttttgtgcatttccaaatttcaatcggatttattaaaccaaaaatttttaatcagggttgattgtaaatcagccaaagatattttacaaaaagatgttaaaaaccttgcctcaaaacaaatttttgcacgatggcaagcaattttaagtgtctttgattttgacatagaatacatcaagggcacctcaaattcactacctgactaccttacccgtgaattcttacagaaaagtggtaatgcctcctaaggcatcgggaatctccctacggggaggaaggagtacaggcaaaggagccaggctggctcttccagagccaaccatcaagaaatcatctacctcttctgggtcaccaacccaggctgggtcatctacccagaaaaccaatttagaagggtcatcaacccagattgcctcaatcaaacctgagccatccactcaggaatctcccaaaccggcaaccgccaaacaaacatcggccgactatgcatggccaattgaaacccttcaggcccttcaagacatgggtctgaccaaatttccaaaaataatcaaaaaatcttgggcagacattgcctcagaatctgatgatgaatctgaatcaaatttacaaacaatgatccaaaatgcgtcaatgaccaaaacagccaccaatactaaaggaaaactacctttagccaaagctcaaacaccacctaccaaacaaactaacaattatatttataaaaataaattgttaactgttttgcagatggaacctgaattttgggacaaaaatcccttcaaggcgacggccaaggctttcccaccaggatttcactacaaaccaaccactatcctgaagacaagaactttttatgaattgattttggtagattcaaactcagtatctatcaaacatttcaaagatccaaaagaccaaaccttaaacacccactcaaccatccaaatactaaaagttcttcaaccaagacactttggttcggacttgaacaaaggaaagagattttcagttccatttgatccagtaggttatacctattgggattacgttgatgcttggactaaggt

SEQ ID NO: 13274 - DNA, 1173 bp, Glycine max
  Gm_smallRNAprecursor_6107
aaagagtccatggccaagatcatgtcattgcatatacatcaaaacattggaatcctgcacaattaaaatattcaactgttaaaaaaagaggttttagcaattgttttgtgcatttccaaatttcaatcggatttattaaaccaaaaatttttaatcagggttgattgtaaatcagccaaagatattttacaaaaagatgttaaaaaccttgcctcaaaacaaatttttgcacgatggcaagcaattttaagtgtctttgattttgacatagaatacatcaagggcacctcaaattcactacctgactaccttacccgtgaattcttacagaaaagtggtaatgcctcctaaggcatcgggaatctccctacggggaggaaggagtacaggcaaaggagccaggctggctcttccagagccaaccatcaagaaatcatctacctcttctgggtcaccaacccaggctgggtcatctacccagaaaaccaatttagaagggtcatcaacccagattgcctcaatcaaacctgagccatccactcaggaatctcccaaaccggcaaccgccaaacaaacatcggccgactatgcatggccaattgaaacccttcaggcccttcaagacatgggtctgaccaaatttccaaaaataatcaaaaaatcttgggcagacattgcctcagaatctgatgatgaatctgaatcaaatttacaaacaatgatccaaaatgcgtcaatgaccaaaacagccaccaatactaaaggaaaactacctttagccaaagctcaaacaccacctaccaaacaaactaacaattatatttataaaaataaattgttaactgttttgcagatggaacctgaattttgggacaaaaatcccttcaaggcgacggccaaggctttcccaccaggatttcactacaaaccaaccactatcctgaagacaagaactttttatgaattgattttggtagattcaaactcagtatctatcaaacatttcaaagatccaaaagaccaaaccttaaacacccactcaaccatccaaatactaaaagttcttcaaccaagacactttggttcggacttgaacaaaggaaagagattttcagttccatttgatccagtaggttatacctattgggattacgttgatgcttggactaaggt

SEQ ID NO: 13275 - DNA, 1173 bp, Glycine max; identical to SEQ ID NO: 13274
  Gm_smallRNAprecursor_6108

SEQ ID NO: 13276 - DNA, 1130 bp, Glycine max
  Gm_smallRNAprecursor_6109
caaacctgagccatccactcaggaatctcccaaaccggcaaccgccaaacaaacatcggccgactatgcatggccaattgaaacccttcaggcccttcaagacatgggtctgaccaaatttccaaaaataatcaaaaaatcttgggcagacattgcctcagaatctgatgatgaatctgaatcaaatttacaaacaatgatccaaaatgcgtcaatgaccaaaacagccaccaatactaaaggaaaactacctttagccaaagctcaaacaccacctaccaaacaaactaacaattatatttataaaaataaattgttaactgttttgcagatggaacctgaattttgggacaaaaatcccttcaaggcgacggccaaggctttcccaccaggatttcactacaaaccaaccactatcctgaagacaagaactttttatgaattgattttggtagattcaaactcagtatctatcaaacatttcaaagatccaaaagaccaaaccttaaacacccactcaaccatccaaatactaaaagttcttcaaccaagacactttggttcggacttgaacaaaggaaagagattttcagttccatttgatccagtaggttatacctattgggattacgttgatgcttggactaaggtgttttggcaccaaaatacccgcttcaaacattcatggctgatatatttcaagaccaacacaatttacaattttcccaattggtttttgcaatggtgggacttctttggaccaatcccagagatattcccaaaaacagtccaacaaggattttcccaatttaagaaacaatacaattcgcaggaatcaagaattccagcagatcttaaatacttttcaagctttgcactgtcatggatattctcatggcaatatcgttacagcaagactgaaaagacaaaccaatatccatcactacaaagacacgcatttgtaaaatggtggacacaatttgactcatccaaagcggatgcagaacaagtaaaactatggttccaatcccatccagaattcctcaaagcagctgatccagagacttctgtgtttttgaaccaaaagtctcatctggcagcatttttagcaggatcgacatcaaaggagg

SEQ ID NO: 13277 - DNA, 1124 bp, Glycine max
  Gm_smallRNAprecursor_6110
tgagccatccactcaggaatctcccaaaccggcaaccgccaaacaaacatcggccgactatgcatggccaattgaaacccttcaggcccttcaagacatgggtctgaccaaatttccaaaaataatcaaaaaatcttgggcagacattgcctcagaatctgatgatgaatctgaatcaaatttacaaacaatgatccaaaatgcgtcaatgaccaaaacagccaccaatactaaaggaaaactacctttagccaaagctcaaacaccacctaccaaacaaactaacaattatatttataaaaataaattgttaactgttttgcagatggaacctgaattttgggacaaaaatcccttcaaggcgacggccaaggctttcccaccaggatttcactacaaaccaaccactatcctgaagacaagaactttttatgaattgattttggtagattcaaactcagtatctatcaaacatttcaaagatccaaaagaccaaaccttaaacacccactcaaccatccaaatactaaaagttcttcaaccaagacactttggttcggacttgaacaaaggaaagagattttcagttccatttgatccagtaggttatacctattgggattacgttgatgcttggactaaggtgttttggcaccaaaatacccgcttcaaacattcatggctgatatatttcaagaccaacacaatttacaattttcccaattggtttttgcaatggtgggacttctttggaccaatcccagagatattcccaaaaacagtccaacaaggattttcccaatttaagaaacaatacaattcgcaggaatcaagaattccagcagatcttaaatacttttcaagctttgcactgtcatggatattctcatggcaatatcgttacagcaagactgaaaagacaaaccaatatccatcactacaaagacacgcatttgtaaaatggtggacacaatttgactcatccaaagcggatgcagaacaagtaaaactatggttccaatcccatccagaattcctcaaagcagctgatccagagacttctgtgtttttgaaccaaaagtctcatctggcagcatttttagcaggatcgacatcaaaggagg

SEQ ID NO: 13278 - DNA, 1157 bp, Glycine max
  Gm_smallRNAprecursor_6111
cactcaggaatctcccaaaccggcaaccgccaaacaaacatcggccgactatgcatggccaattgaaacccttcaggcccttcaagacatgggtctgaccaaatttccaaaaataatcaaaaaatcttgggcagacattgcctcagaatctgatgatgaatctgaatcaaatttacaaacaatgatccaaaatgcgtcaatgaccaaaacagccaccaatactaaaggaaaactacctttagccaaagctcaaacaccacctaccaaacaaactaacaattatatttataaaaataaattgttaactgttttgcagatggaacctgaattttgggacaaaaatcccttcaaggcgacggccaaggctttcccaccaggatttcactacaaaccaaccactatcctgaagacaagaactttttatgaattgattttggtagattcaaactcagtatctatcaaacatttcaaagatccaaaagaccaaaccttaaacacccactcaaccatccaaatactaaaagttcttcaaccaagacactttggttcggacttgaacaaaggaaagagattttcagttccatttgatccagtaggttatacctattgggattacgttgatgcttggactaaggtgttttggcaccaaaatacccgcttcaaacattcatggctgatatatttcaagaccaacacaatttacaattttcccaattggtttttgcaatggtgggacttctttggaccaatcccagagatattcccaaaaacagtccaacaaggattttcccaatttaagaaacaatacaattcgcaggaatcaagaattccagcagatcttaaatacttttcaagctttgcactgtcatggatattctcatggcaatatcgttacagcaagactgaaaagacaaaccaatatccatcactacaaagacacgcatttgtaaaatggtggacacaatttgactcatccaaagcggatgcagaacaagtaaaactatggttccaatcccatccagaattcctcaaagcagctgatccagagacttctgtgtttttgaaccaaaagtctcatctggcagcatttttagcaggatcgacatcaaaggaggtcttagctaaaaatctgaaggaagttctacaaatgttacaac

SEQ ID NO: 13279 - DNA, 1138 bp, Glycine max
  Gm_smallRNAprecursor_6112
acatgggtctgaccaaatttccaaaaataatcaaaaaatcttgggcagacattgcctcagaatctgatgatgaatctgaatcaaatttacaaacaatgatccaaaatgcgtcaatgaccaaaacagccaccaatactaaaggaaaactacctttagccaaagctcaaacaccacctaccaaacaaactaacaattatatttataaaaataaattgttaactgttttgcagatggaacctgaattttgggacaaaaatcccttcaaggcgacggccaaggctttcccaccaggatttcactacaaaccaaccactatcctgaagacaagaactttttatgaattgattttggtagattcaaactcagtatctatcaaacatttcaaagatccaaaagaccaaaccttaaacacccactcaaccatccaaatactaaaagttcttcaaccaagacactttggttcggacttgaacaaaggaaagagattttcagttccatttgatccagtaggttatacctattgggattacgttgatgcttggactaaggtgttttggcaccaaaatacccgcttcaaacattcatggctgatatatttcaagaccaacacaatttacaattttcccaattggtttttgcaatggtgggacttctttggaccaatcccagagatattcccaaaaacagtccaacaaggattttcccaatttaagaaacaatacaattcgcaggaatcaagaattccagcagatcttaaatacttttcaagctttgcactgtcatggatattctcatggcaatatcgttacagcaagactgaaaagacaaaccaatatccatcactacaaagacacgcatttgtaaaatggtggacacaatttgactcatccaaagcggatgcagaacaagtaaaactatggttccaatcccatccagaattcctcaaagcagctgatccagagacttctgtgtttttgaaccaaaagtctcatctggcagcatttttagcaggatcgacatcaaaggaggtcttagctaaaaatctgaaggaagttctacaaatgttacaacaggaagaagaagcttcatcctcaaagaaggaagaaacaagttctgctgaagaagacgaagaagatcc

SEQ ID NO: 13280 - DNA, 1147 bp, Glycine max
  Gm_smallRNAprecursor_6113
acaatgatccaaaatgcgtcaatgaccaaaacagccaccaatactaaaggaaaactacctttagccaaagctcaaacaccacctaccaaacaaactaacaattatatttataaaaataaattgttaactgttttgcagatggaacctgaattttgggacaaaaatcccttcaaggcgacggccaaggctttcccaccaggatttcactacaaaccaaccactatcctgaagacaagaactttttatgaattgattttggtagattcaaactcagtatctatcaaacatttcaaagatccaaaagaccaaaccttaaacacccactcaaccatccaaatactaaaagttcttcaaccaagacactttggttcggacttgaacaaaggaaagagattttcagttccatttgatccagtaggttatacctattgggattacgttgatgcttggactaaggtgttttggcaccaaaatacccgcttcaaacattcatggctgatatatttcaagaccaacacaatttacaattttcccaattggtttttgcaatggtgggacttctttggaccaatcccagagatattcccaaaaacagtccaacaaggattttcccaatttaagaaacaatacaattcgcaggaatcaagaattccagcagatcttaaatacttttcaagctttgcactgtcatggatattctcatggcaatatcgttacagcaagactgaaaagacaaaccaatatccatcactacaaagacacgcatttgtaaaatggtggacacaatttgactcatccaaagcggatgcagaacaagtaaaactatggttccaatcccatccagaattcctcaaagcagctgatccagagacttctgtgtttttgaaccaaaagtctcatctggcagcatttttagcaggatcgacatcaaaggaggtcttagctaaaaatctgaaggaagttctacaaatgttacaacaggaagaagaagcttcatcctcaaagaaggaagaaacaagttctgctgaagaagacgaagaagatcccttttaccaaaacgaagatgattgttttggtatctgtttagattaaatttaatttcggtcacaaaaccgtctgtttgtaattaatgtgtaatgctggacaa

SEQ ID NO: 13281 - DNA, 1158 bp, Glycine max
  Gm_smallRNAprecursor_6114
caagacactttggttcggacttgaacaaaggaaagagattttcagttccatttgatccagtaggttatacctattgggattacgttgatgcttggactaaggtgttttggcaccaaaatacccgcttcaaacattcatggctgatatatttcaagaccaacacaatttacaattttcccaattggtttttgcaatggtgggacttctttggaccaatcccagagatattcccaaaaacagtccaacaaggattttcccaatttaagaaacaatacaattcgcaggaatcaagaattccagcagatcttaaatacttttcaagctttgcactgtcatggatattctcatggcaatatcgttacagcaagactgaaaagacaaaccaatatccatcactacaaagacacgcatttgtaaaatggtggacacaatttgactcatccaaagcggatgcagaacaagtaaaactatggttccaatcccatccagaattcctcaaagcagctgatccagagacttctgtgtttttgaaccaaaagtctcatctggcagcatttttagcaggatcgacatcaaaggaggtcttagctaaaaatctgaaggaagttctacaaatgttacaacaggaagaagaagcttcatcctcaaagaaggaagaaacaagttctgctgaagaagacgaagaagatcccttttaccaaaacgaagatgattgttttggtatctgtttagattaaatttaatttcggtcacaaaaccgtctgtttgtaattaatgtgtaatgctggacaatactacctgtcctgtagccattaaagtcccggtcaaaactacttgtcttgtaacaaacagtcaaatagtcccggtcaaaactaccggcaactactggtcttagatttttggttatataaggagtcctcaagcatgttgtgaggcaccctttcatttagccatttttcaggtttcggaagagaggtgctctgaaacaagatttttgtaagcgcttctttctagatccaataaatttctatttttcatatatatatatatatcttcaccgatcctgtgcggctctgccgccgcttcgatttctttgtttatgaaaacctgggatttgtaagccggtctctggtgtgaaacatgaatttgaaaaatatt

SEQ ID NO: 13282 - DNA, 1172 bp, Glycine max
  Gm_smallRNAprecursor_6115
caagacactttggttcggacttgaacaaaggaaagagattttcagttccatttgatccagtaggttatacctattgggattacgttgatgcttggactaaggtgttttggcaccaaaatacccgcttcaaacattcatggctgatatatttcaagaccaacacaatttacaattttcccaattggtttttgcaatggtgggacttctttggaccaatcccagagatattcccaaaaacagtccaacaaggattttcccaatttaagaaacaatacaattcgcaggaatcaagaattccagcagatcttaaatacttttcaagctttgcactgtcatggatattctcatggcaatatcgttacagcaagactgaaaagacaaaccaatatccatcactacaaagacacgcatttgtaaaatggtggacacaatttgactcatccaaagcggatgcagaacaagtaaaactatggttccaatcccatccagaattcctcaaagcagctgatccagagacttctgtgtttttgaaccaaaagtctcatctggcagcatttttagcaggatcgacatcaaaggaggtcttagctaaaaatctgaaggaagttctacaaatgttacaacaggaagaagaagcttcatcctcaaagaaggaagaaacaagttctgctgaagaagacgaagaagatcccttttaccaaaacgaagatgattgttttggtatctgtttagattaaatttaatttcggtcacaaaaccgtctgtttgtaattaatgtgtaatgctggacaatactacctgtcctgtagccattaaagtcccggtcaaaactacttgtcttgtaacaaacagtcaaatagtcccggtcaaaactaccggcaactactggtcttagatttttggttatataaggagtcctcaagcatgttgtgaggcaccctttcatttagccatttttcaggtttcggaagagaggtgctctgaaacaagatttttgtaagcgcttctttctagatccaataaatttctatttttcatatatatatatatatcttcaccgatcctgtgcggctctgccgccgcttcgatttctttgtttatgaaaacctgggatttgtaagccggtctctggtgtgaaacatgaatttgaaaaatattaccttttttgataa

SEQ ID NO: 13283 - DNA, 1046 bp, Glycine max
  Gm_smallRNAprecursor_6116
tcaagaccaacacaatttacaattttcccaattggtttttgcaatggtgggacttctttggaccaatcccagagatattcccaaaaacagtccaacaaggattttcccaatttaagaaacaatacaattcgcaggaatcaagaattccagcagatcttaaatacttttcaagctttgcactgtcatggatattctcatggcaatatcgttacagcaagactgaaaagacaaaccaatatccatcactacaaagacacgcatttgtaaaatggtggacacaatttgactcatccaaagcggatgcagaacaagtaaaactatggttccaatcccatccagaattcctcaaagcagctgatccagagacttctgtgtttttgaaccaaaagtctcatctggcagcatttttagcaggatcgacatcaaaggaggtcttagctaaaaatctgaaggaagttctacaaatgttacaacaggaagaagaagcttcatcctcaaagaaggaagaaacaagttctgctgaagaagacgaagaagatcccttttaccaaaacgaagatgattgttttggtatctgtttagattaaatttaatttcggtcacaaaaccgtctgtttgtaattaatgtgtaatgctggacaatactacctgtcctgtagccattaaagtcccggtcaaaactacttgtcttgtaacaaacagtcaaatagtcccggtcaaaactaccggcaactactggtcttagatttttggttatataaggagtcctcaagcatgttgtgaggcaccctttcatttagccatttttcaggtttcggaagagaggtgctctgaaacaagatttttgtaagcgcttctttctagatccaataaatttctatttttcatatatatatatatatcttcaccgatcctgtgcggctctgccgccgcttcgatttctttgtttatgaaaacctgggatttgtaagccggtctctggtgtgaaacatgaatttgaaaaatattaccttttttgataaaattgtctacaaggttttttctaa

SEQ ID NO: 13284 - DNA, 1209 bp, Glycine max
  Gm_smallRNAprecursor_6117
caacacaatttacaattttcccaattggtttttgcaatggtgggacttctttggaccaatcccagagatattcccaaaaacagtccaacaaggattttcccaatttaagaaacaatacaattcgcaggaatcaagaattccagcagatcttaaatacttttcaagctttgcactgtcatggatattctcatggcaatatcgttacagcaagactgaaaagacaaaccaatatccatcactacaaagacacgcatttgtaaaatggtggacacaatttgactcatccaaagcggatgcagaacaagtaaaactatggttccaatcccatccagaattcctcaaagcagctgatccagagacttctgtgtttttgaaccaaaagtctcatctggcagcatttttagcaggatcgacatcaaaggaggtcttagctaaaaatctgaaggaagttctacaaatgttacaacaggaagaagaagcttcatcctcaaagaaggaagaaacaagttctgctgaagaagacgaagaagatcccttttaccaaaacgaagatgattgttttggtatctgtttagattaaatttaatttcggtcacaaaaccgtctgtttgtaattaatgtgtaatgctggacaatactacctgtcctgtagccattaaagtcccggtcaaaactacttgtcttgtaacaaacagtcaaatagtcccggtcaaaactaccggcaactactggtcttagatttttggttatataaggagtcctcaagcatgttgtgaggcaccctttcatttagccatttttcaggtttcggaagagaggtgctctgaaacaagatttttgtaagcgcttctttctagatccaataaatttctatttttcatatatatatatatatcttcaccgatcctgtgcggctctgccgccgcttcgatttctttgtttatgaaaacctgggatttgtaagccggtctctggtgtgaaacatgaatttgaaaaatattaccttttttgataaaattgtctacaaggttttttctaacaagtcgagatgttaatgaaaaaatatgctaaatgaataaaagacgatcgtgttgataacttttaaatataatgtaattggaggaaaataatagagaaaaaaaaaatagagaaaaggagagtttagaaagaatgagaattgtgtattttcatttaaagatgagtaatata

SEQ ID NO: 13285 - DNA, 1036 bp, Glycine max
  Gm_smallRNAprecursor_6118
tttggatattaattaaacgttaactacaattagtgtacacacacataaaatatatataagtagaacttttatttaaatcacgtaccttaacaacaatccacctagcagcagccttggatttaggttgtggagtatcattaagtcctttcaaagcactagtgttgaatatgaggaacattaaaatattgatgttgttgagttatgccaatgaaaatgtattgtaaacaatactaacctgttaattattcccttaaggtagttgtctggtctattatgtaaagaacaaaaccagacaactaggttttccttaggcagaatgacgaccatttgccagtgtccgctgcagtagagacgaatatgggttattgtagtagtatagattatttaaattaaattgttgtgtttgacttacccattcaggtaggctccaaggtaaacatctcgttttgaactctgtatccaactcttgatgtaactttcggattcaaattgtgattgcccagatctctgaatggactgtggctcgaggaatccatacacatcagaattccccgctctcacacttgtctcggtcatatgactatgttgttaagccaaagttaattatgtatgaatttaaaacaattactttggtaattaatagtaatctaaaatgacttacagaatccacaactgtataacagatatgcagagacattgaccaccgtgtgcaatttcagagaaatctccgtgctttatatataacgggaagttttgattaaacaccccgaatatggtaacatcccacataacctggacaggcttcaaaaacagttgagggatggtcaatgtcatcaggtataggggatcatcgacctcttcattcgggctttctggaggttttgctggagacacagctgcctgttgatcaaacatagttaattagcaagttttgattacagtgaacaaattaattgaaaaaataaacatacaatcagagtaaaatacatgttctaataaacgcttcacaagatgtgttggccaagcatggaaggta

SEQ ID NO: 13286 - DNA, 1052 bp, Glycine max
  Gm_smallRNAprecursor_6119
ctgagggagcaacacaactctcctttgtgctgacacgaggacttgagggaccaacctctggctctggaggtagtgcaagtccctgtgattgcatctgagactgaaactgggactgcatctggctgaaggatgccatcatcttttgagtcactttttatgtgattgactcctccagttggtcttagatttgttgggtcagctgttctaggtcttcaggaggcatggaggaagaactgcgggatgttcgtgaagccgatccaaagtattgctttatgtttacaccggctccaacagcacgaacacgaccagggtgctctggtcgcccaatggcagcagtcaggatatcctgacgtccataggggacgaacgatccctgtgacgcctgctcatccaaagaatcctgtaccgaacacatatttgtccaaggaattcacaaaatacacaaagataattacaattattaattaaaaataacttacaatcctgtcagctatttcctttgctgcctcagacgtcatctgtccagttttcttcgtgcggtcatcttccatttcacgtggcgtctgatgggagatggagggtcaatgatgctctcagtgcttccaaactaggtagcttcttctagtctttgctttgtcttctcagccatgagcttttcttctaaatattcataacccccacgagacaatatgttgggggtagtgttttgcttctgggaggcctgtgcctttttccgcacatcctgcaaaagtttaacattaatgaaaatgattattacaataaattataagaagtgattttgttgtggaaaacaactaaaatgaaaaagtacatacctcctatgaggggtctctgcgggtctgacaaaactggtcccatttctctttgctaatgccatatttttcacagacaatgtcgtccacaccgtccttgtcggctgcaagtgcccatttcctagtcaagtcagatttaaactgcctccagcgctcaccgacaatctgaagaattttcttctttgtcctactgtcagaagcttcagggatttcaaattc

SEQ ID NO: 13287 - DNA, 1140 bp, Glycine max
  Gm_smallRNAprecursor_6120
gagagagctctcaaatctaggaagctgacgcccaagtatctgggtccgtatcaaattttaaagaaggttgggcctatagcttatcaaatcgctttacctccgagcttatcaaatttgcaccctgtgtttcatgtctctcaactgagatgatacaacccggatccatcacatgtactcgcactgaacgaagtacaagtgaaggataacctcacctataaagcacaacctcagaagattactgatcgaagaatgaagtcactgagaggtaaaaagatcgcgttggtgaaagtgtagtggggacccgacgagggtgattcaacttgggagttagaggatagggtgacagagttgtacccaagtttgttcctagagtagttaatttcggggacgaaattccttaaagggtgggagtattgtgacatcctagaatttctacctggaattttgtaagtattacatttacataattatataaatatatattattcagtgtatatattcctggtagaagtatgtacattgggggagaaatacgcgggttagactaattaacgaagagtaacccataattggacaattatagattaattctcaattaattagtctataaattaccgttttgcgtgcaacttataattaaacaaaaccaacctttgaaccacgctcagggtctcattcttagcattttgatatatatatatttcctatctttgaaaacggaccccgactggtgcagagaaacgtgaagaactgcaaccagagaggcggcacgcaaaccaagacaggattttagcatccaaaaaggtctagttttttcttctttatggctgagtatgtggtcaaatcaaaggaaaaggtgggccctttttgctccaattaaaagaggacatgtggaattgcgtttgaaaagaaaatgaaaaagaaaagaaaaatcattttataaaaagccaagtcttctctctctttctccagaaatttccagcaactcccttttctccagaaaaggggagaaaaaaaaattcccatggtttctgctatttaatttattactattaaaccagtcattatttagggatgtcacaggcaccattgaagaggattccaatgtggccccacaagtcgaaacaggctttgacaaac

SEQ ID NO: 13288 - DNA, 1130 bp, Glycine max
  Gm_smallRNAprecursor_6121
accgagttgcatctttacaagattggtgctgaccacttaaaggaaaacccattctcctagtaagaaacttttatcatactatttttttttatgtattagtgatttagtgttataattcagaattctaagttatgctcttggttggtaattggtattgcagcatattggtggcgaatgtttgggtcacaaactccaaatttgcagaagctggctattaagattttgagtttgacttgcagtgcttcaggatgtgaaagaaattggagtgtgtttgagcaagtaattgtgacaaaactctaaccatactttttaattttatttaattttgatgatcaagttatatttggagtatatttgagattgaaatcaacatttatttgttatgttgtagattcattccaaaaaaagaaagaggcttgagcacaagaggttgcatgatttggtgtttgtcaaatacaaccaacaattgaagcaaagatataatgcaagagatgaaattgatccaatttctcttaatgatattgatgtatgcaatgaatggctcgtgggagagatggatcaagatgatgataatgatgctggaaatgatttggtatttgaagatgatgatgctctaaattgggcaactgtgtatcaggcttcgggggttggagagtgtaggatgtatactaggcggaaaaaacaaaaaacaagtgttgctgctgcccaaactactaaaaaacaggcaatggttgttggatcttcatcaaggaagcaaaaagcagtccaagaaaatgatgaggatctagatgttgaggagaatattgatgttgaatctgaagaagaagaaatcatggtcaattttgaggcgtctgatggggaagagggagagggagatgctccattaccatatgataacaacgaagatgattatgttgggattggagaagatgattagagcctcaaccttcactttgcactttgcattatgcttttatcattttcttattttgaactctttaatgagtttatttggtgttggtacttgattattgtatgaactcatgaaacttttttagtttatttgaatgcaatcctttgtttttttcaatttcaatgagtttatatatatgtttttttttttttgtccg

SEQ ID NO: 13289 - DNA, 1077 bp, Glycine max
  Gm_smallRNAprecursor_6122
tcaagatgatgataatgatgctggaaatgatttggtatttgaagatgatgatgctctaaattgggcaactgtgtatcaggcttcgggggttggagagtgtaggatgtatactaggcggaaaaaacaaaaaacaagtgttgctgctgcccaaactactaaaaaacaggcaatggttgttggatcttcatcaaggaagcaaaaagcagtccaagaaaatgatgaggatctagatgttgaggagaatattgatgttgaatctgaagaagaagaaatcatggtcaattttgaggcgtctgatggggaagagggagagggagatgctccattaccatatgataacaacgaagatgattatgttgggattggagaagatgattagagcctcaaccttcactttgcactttgcattatgcttttatcattttcttattttgaactctttaatgagtttatttggtgttggtacttgattattgtatgaactcatgaaacttttttagtttatttgaatgcaatcctttgtttttttcaatttcaatgagtttatatatatgtttttttttttttgtccgccatgacatccgccattttccgctacgccatccgccatatttttatggcggatttttgactttccgccatgaaccgccatccgccattaacaacattgagtagaagctagtcagttgtaagtagttagttagccaattctgttagttagttagttagcaaattctgttagtctctaacagaattgtgtatatattgtttgtaaacctgaagttcattgagtcaataaatgatattttacttcttcatttctctgtctctctctctctctcaattctcttagtctagaaactctatgactaacagacaaaatgaacaatagcactgcaaatcaaaagaaaccactgaaatttctggccataaaactttgaatacatttcagtattggatgtctttctttacatatagcaaaatcatccttctattattagatgtacaattttacaaaccttctttcactttgaggcactactgtgattgtctggggtaacataataaagtgccttc

SEQ ID NO: 13290 - DNA, 1187 bp, Glycine max
  Gm_smallRNAprecursor_6123
atcggcttcacgaacgtctcgcagttcttcctccatgcctcctgaagacctagaacagctgacccaacaaatcagagaccaactggaggagtcaatcacagaaaaagtgactcgaaagataatggaatccttaagccaaatgcagtcccagtttcagtctcagatgcaatcacaaggacttgcactacctccagagccagaggttggtccctcaggtcctcgtgtcagcacaaaggagagttgcgttgctccctcagggaacgatctagggacaggtgactcagacaaatgcgggctatatattgaagaaaatccttcccgcctggttgccctaggaagactttatgtggtatccacaacagttcacaacatccctttgttgcatggccaagtcaaggttggtgttgaggagattaaagatgcagaggctctcgttcctgtacccactgatgaggttaccttagtggggcagacacttaacaccttccttgcttggtcaacacatcttgtgaagcgtttatcagaacaggtattttactctgattatatgtttatttttttcaattaatttgttcattgtaatcaaaacttgctaattaactatgttttatcaacaggcagttgtgtctccagcaaaacctccaaaaagcccagatgaagaggtcgatgatcccctgtacctaatgacattgaccatcccacaactgtttttgaagccgctctaggttatgtaggatgctaccatattcggggtgtttaatcaaaacttcccattgtatataaagcacgaagatctctctgaaattgcacacggtggtcaatgtctcagcatatctgttatacagttgtggattttgtaagtcattttagattactattaattaccaaagtaattgttttaaattcatacataatttactttgacttaacaacacagtcatctgactgagacaagtgtgcgagcggggaattctgatgtgtatggattcctcgagccacagtccattcagagatctgggcaatcacaatttgaatacgaaagttacatcaagagttggatacagatttcaaaacgagatgtttaccttggagcctacctaaatgggtaagtcaaacacgataattgaatttaaataatctatactactacaataacccatattcgtctctactgcagcggacactgg

SEQ ID NO: 13291 - DNA, 1157 bp, Glycine max
  Gm_smallRNAprecursor_6124
tagtaagaatattttgtatttatttaaagaaagccttctttccttttgtttatttatcatgtacaaattttttattttgaagtaataaattttgtggttagaatcaaatttgaagctcaaatttaagtgtattaatgttgtgaattagattttttatttaaaaattattagcagtaattatttgtaagcctttttttttatggttttgcgtctgaaatttttttaagtgtaacccttccattttgtgtctgaaatttttttgaagttgaaagacgcttttaaaaatgactaacctgtgccccagtggtttattttctacttgggaaggagtcctctttggagccaaggttggacatcgttcccatgcctcatttgtagtaagatacacatacctccgattgatttagttttacaatcggtggcactgcacatttctctgtatagaaaagcaagtacggcagctccccatgcatatgtgctacagtcttcaaagtcacgtaaaaattgaaggtaccttagcgaaactttgttactgcttttgtcaacgaacaagacacctccaatgaatcttagtatccatgcacaggcaaaccttcgtacttgttcttcgtcgtcgtggttatttatttgtgcaaaatggtgagccagccaacttaatttaaccacactacctttaatttcaccttcttgtggtctgactcccaataattcctcacataaatcaacccaattaagatttgtttgaccgattaatggtaaaccatccacacgtagacctaacaatacagagacgtcttggagagtaatagtacactatctgcatctcatgtgaaacgtatgtgtttccggcctccatctttctatcaaagcactaattaatgaggcatttattttcaagtatcccatcttcataatccagtaaaaaccagattgtcaaagaaaaggaaaaatttgctctggaatttcttcttccccttgatacgtggggatagctcgtttgatatgtaatttccgatcttcttccccattccaaacatgttcagaaacatgcttaggttgcatccataagacatcattgtcgatcaggccagacttaattttaatatgtgatggacatgacgatgaagatgtcattgatactgcaaaataaaatataa

SEQ ID NO: 13292 - DNA, 1158 bp, Glycine max
  Gm_smallRNAprecursor_6125
tagtaagaatattttgtatttatttaaagaaagccttctttccttttgtttatttatcatgtacaaattttttattttgaagtaataaattttgtggttagaatcaaatttgaagctcaaatttaagtgtattaatgttgtgaattagattttttatttaaaaattattagcagtaattatttgtaagcctttttttttatggttttgcgtctgaaatttttttaagtgtaacccttccattttgtgtctgaaatttttttgaagttgaaagacgcttttaaaaatgactaacctgtgccccagtggtttattttctacttgggaaggagtcctctttggagccaaggttggacatcgttcccatgcctcatttgtagtaagatacacatacctccgattgatttagttttacaatcggtggcactgcacatttctctgtatagaaaagcaagtacggcagctccccatgcatatgtgctacagtcttcaaagtcacgtaaaaattgaaggtaccttagcgaaactttgttactgcttttgtcaacgaacaagacacctccaatgaatcttagtatccatgcacaggcaaaccttcgtacttgttcttcgtcgtcgtggttatttatttgtgcaaaatggtgagccagccaacttaatttaaccacactacctttaatttcaccttcttgtggtctgactcccaataattcctcacataaatcaacccaattaagatttgtttgaccgattaatggtaaaccatccacacgtagacctaacaatacagagacgtcttggagagtaatagtacactatctgcatctcatgtgaaacgtatgtgtttccggcctccatctttctatcaaagcactaattaatgaggcatttattttcaagtatcccatcttcataatccagtaaaaaccagattgtcaaagaaaaggaaaaatttgctctggaatttcttcttccccttgatacgtggggatagctcgtttgatatgtaatttccgatcttcttccccattccaaacatgttcagaaacatgcttaggttgcatccataagacatcattgtcgatcaggccagacttaattttaatatgtgatggacatgacgatgaagatgtcattgatactgcaaaataaaatataat

SEQ ID NO: 13293 - DNA, 1155 bp, Glycine max
  Gm_smallRNAprecursor_6126
gtaagaatattttgtatttatttaaagaaagccttctttccttttgtttatttatcatgtacaaattttttattttgaagtaataaattttgtggttagaatcaaatttgaagctcaaatttaagtgtattaatgttgtgaattagattttttatttaaaaattattagcagtaattatttgtaagcctttttttttatggttttgcgtctgaaatttttttaagtgtaacccttccattttgtgtctgaaatttttttgaagttgaaagacgcttttaaaaatgactaacctgtgccccagtggtttattttctacttgggaaggagtcctctttggagccaaggttggacatcgttcccatgcctcatttgtagtaagatacacatacctccgattgatttagttttacaatcggtggcactgcacatttctctgtatagaaaagcaagtacggcagctccccatgcatatgtgctacagtcttcaaagtcacgtaaaaattgaaggtaccttagcgaaactttgttactgcttttgtcaacgaacaagacacctccaatgaatcttagtatccatgcacaggcaaaccttcgtacttgttcttcgtcgtcgtggttatttatttgtgcaaaatggtgagccagccaacttaatttaaccacactacctttaatttcaccttcttgtggtctgactcccaataattcctcacataaatcaacccaattaagatttgtttgaccgattaatggtaaaccatccacacgtagacctaacaatacagagacgtcttggagagtaatagtacactatctgcatctcatgtgaaacgtatgtgtttccggcctccatctttctatcaaagcactaattaatgaggcatttattttcaagtatcccatcttcataatccagtaaaaaccagattgtcaaagaaaaggaaaaatttgctctggaatttcttcttccccttgatacgtggggatagctcgtttgatatgtaatttccgatcttcttccccattccaaacatgttcagaaacatgcttaggttgcatccataagacatcattgtcgatcaggccagacttaattttaatatgtgatggacatgacgatgaagatgtcattgatactgcaaaataaaatataa

SEQ ID NO: 13294 - DNA, 1036 bp, Glycine max
  Gm_smallRNAprecursor_6127
tttaagtgtattaatgttgtgaattagattttttatttaaaaattattagcagtaattatttgtaagcctttttttttatggttttgcgtctgaaatttttttaagtgtaacccttccattttgtgtctgaaatttttttgaagttgaaagacgcttttaaaaatgactaacctgtgccccagtggtttattttctacttgggaaggagtcctctttggagccaaggttggacatcgttcccatgcctcatttgtagtaagatacacatacctccgattgatttagttttacaatcggtggcactgcacatttctctgtatagaaaagcaagtacggcagctccccatgcatatgtgctacagtcttcaaagtcacgtaaaaattgaaggtaccttagcgaaactttgttactgcttttgtcaacgaacaagacacctccaatgaatcttagtatccatgcacaggcaaaccttcgtacttgttcttcgtcgtcgtggttatttatttgtgcaaaatggtgagccagccaacttaatttaaccacactacctttaatttcaccttcttgtggtctgactcccaataattcctcacataaatcaacccaattaagatttgtttgaccgattaatggtaaaccatccacacgtagacctaacaatacagagacgtcttggagagtaatagtacactatctgcatctcatgtgaaacgtatgtgtttccggcctccatctttctatcaaagcactaattaatgaggcatttattttcaagtatcccatcttcataatccagtaaaaaccagattgtcaaagaaaaggaaaaatttgctctggaatttcttcttccccttgatacgtggggatagctcgtttgatatgtaatttccgatcttcttccccattccaaacatgttcagaaacatgcttaggttgcatccataagacatcattgtcgatcaggccagacttaattttaatatgtgatggacatgacgatgaagatgtcattgatactgcaaaataaaatataa

SEQ ID NO: 13295 - DNA, 1037 bp, Glycine max
  Gm_smallRNAprecursor_6128
tttaagtgtattaatgttgtgaattagattttttatttaaaaattattagcagtaattatttgtaagcctttttttttatggttttgcgtctgaaatttttttaagtgtaacccttccattttgtgtctgaaatttttttgaagttgaaagacgcttttaaaaatgactaacctgtgccccagtggtttattttctacttgggaaggagtcctctttggagccaaggttggacatcgttcccatgcctcatttgtagtaagatacacatacctccgattgatttagttttacaatcggtggcactgcacatttctctgtatagaaaagcaagtacggcagctccccatgcatatgtgctacagtcttcaaagtcacgtaaaaattgaaggtaccttagcgaaactttgttactgcttttgtcaacgaacaagacacctccaatgaatcttagtatccatgcacaggcaaaccttcgtacttgttcttcgtcgtcgtggttatttatttgtgcaaaatggtgagccagccaacttaatttaaccacactacctttaatttcaccttcttgtggtctgactcccaataattcctcacataaatcaacccaattaagatttgtttgaccgattaatggtaaaccatccacacgtagacctaacaatacagagacgtcttggagagtaatagtacactatctgcatctcatgtgaaacgtatgtgtttccggcctccatctttctatcaaagcactaattaatgaggcatttattttcaagtatcccatcttcataatccagtaaaaaccagattgtcaaagaaaaggaaaaatttgctctggaatttcttcttccccttgatacgtggggatagctcgtttgatatgtaatttccgatcttcttccccattccaaacatgttcagaaacatgcttaggttgcatccataagacatcattgtcgatcaggccagacttaattttaatatgtgatggacatgacgatgaagatgtcattgatactgcaaaataaaatataat

SEQ ID NO: 13296 - DNA, 1104 bp, Glycine max
  Gm_smallRNAprecursor_6129
ttatgtataataagtgttgtctcgagtggaagcacataaggtttatctaagagattcttttataaggtttatatatatatatatatatatatatatatatatatatatatatattaagtacgacaaacgactcaaaattaaaaattaattttaagctatcaaatgcaatcattgaaaaccaaggtcttaagattaacacaaactttcttctggtaaaaaaccttaagaatgaagtaatcctaggaacgcccttcattagagccctgtttcccatccaaatatctaatgaaggaataaccacaaattatttaggaagaaaaattatatttaatttttctaccaaaccaatttccagaaatataaatcttatagaaaataagattaattaaattaacttcttaaaagaagaagtatcttttaataatatttagatacaactggaaaaaccacaagtaaaagaaaaaattcaatctttattaaatcatattgaatcgattgtctgttctgatttgccacatgcattttgggacagaaagaaacatattgttgatctcccttatgagaaagactttagggaaaaacaaattcccacaaaagccagaacaatccaaatgaacgaagaacttcttcaatactgccaaaaggaaatcaaggatttgcttgataaaggcctaatctggaaaagcaaaagcccatggtcttgtgcagctttttatgtcaacaaacaatctgagattgagcgtggaacaccccgcttagtcataaattacaaaccactaaaccaagcattacaatggattagatatcctattccaaacaaaaacgatttgcttaacagattaaattcagcaaagatattttcaaaatttgatatgaaatctggattttggcaaatccaaatccaagaatcagataggtacaaaacaacatttactgtacctttcgggcaatatgaatggaatgtgatgccattcggactgaagaatgccccttcagaatttcaaaaaattatgaatgatatttttaatccctattcaaaatttgtcattgtctacatagatgatgttttaatcttttcccaaaacattgaccaacatttcaaac

SEQ ID NO: 13297 - DNA, 1232 bp, Glycine max
  Gm_smallRNAprecursor_6130
acagaaagaaacatattgttgatctcccttatgagaaagactttagggaaaaacaaattcccacaaaagccagaacaatccaaatgaacgaagaacttcttcaatactgccaaaaggaaatcaaggatttgcttgataaaggcctaatctggaaaagcaaaagcccatggtcttgtgcagctttttatgtcaacaaacaatctgagattgagcgtggaacaccccgcttagtcataaattacaaaccactaaaccaagcattacaatggattagatatcctattccaaacaaaaacgatttgcttaacagattaaattcagcaaagatattttcaaaatttgatatgaaatctggattttggcaaatccaaatccaagaatcagataggtacaaaacaacatttactgtacctttcgggcaatatgaatggaatgtgatgccattcggactgaagaatgccccttcagaatttcaaaaaattatgaatgatatttttaatccctattcaaaatttgtcattgtctacatagatgatgttttaatcttttcccaaaacattgaccaacatttcaaacatctccagaccttcatccatatcatcaaacagaatggtttggtagtctccaaatcaaaaatcaatcttttccaaactcgaattcgattccttggtcacaatatatatcaaggtacaatcattccaatagaaaggtcaatagagtttgctagcaaatttcccaaccaaatcttagacaaaacccagttacaaagatttctaggttgtctaaataacgtaggagaatttgtcccctatttaaacaatattgccaagccattgcatgataggctgaagaaaaatccgtctccttggtctgacctccatacacaaacagttaaagaaatcaaagtcaaagtccaatccataaaatgtctgtatcttcctattccacaggcatttaaaattgtcgaaactgatgcttcagacataggttatggtggcatcctcaaacaaagagtccatggccaagatcatgtcattgcatatacatcaaaacattagaatcctgcacaattaaaatattcaactgttaaaaaggaagttttagcaattgttttgtgcattttcaaatttcaatcggatttattaaaccaaaattttttaatcagagttgattgtaaatcagccaaagatattttacaaaaagatgtcaaaaaccttgcctcaaaacaaatt

SEQ ID NO: 13298 - DNA, 1218 bp, Glycine max
  Gm_smallRNAprecursor_6131
ttaacagattaaattcagcaaagatattttcaaaatttgatatgaaatctggattttggcaaatccaaatccaagaatcagataggtacaaaacaacatttactgtacctttcgggcaatatgaatggaatgtgatgccattcggactgaagaatgccccttcagaatttcaaaaaattatgaatgatatttttaatccctattcaaaatttgtcattgtctacatagatgatgttttaatcttttcccaaaacattgaccaacatttcaaacatctccagaccttcatccatatcatcaaacagaatggtttggtagtctccaaatcaaaaatcaatcttttccaaactcgaattcgattccttggtcacaatatatatcaaggtacaatcattccaatagaaaggtcaatagagtttgctagcaaatttcccaaccaaatcttagacaaaacccagttacaaagatttctaggttgtctaaataacgtaggagaatttgtcccctatttaaacaatattgccaagccattgcatgataggctgaagaaaaatccgtctccttggtctgacctccatacacaaacagttaaagaaatcaaagtcaaagtccaatccataaaatgtctgtatcttcctattccacaggcatttaaaattgtcgaaactgatgcttcagacataggttatggtggcatcctcaaacaaagagtccatggccaagatcatgtcattgcatatacatcaaaacattagaatcctgcacaattaaaatattcaactgttaaaaaggaagttttagcaattgttttgtgcattttcaaatttcaatcggatttattaaaccaaaattttttaatcagagttgattgtaaatcagccaaagatattttacaaaaagatgtcaaaaaccttgcctcaaaacaaatttttgcaagatggcaaacaattctaagtgtctttgattttgacatagaatacatcaagggcacctcaaattcattacctgactaccttacccgtgaattcttacagaagagtggtaatgcctcctaaggcatcgggaatctccctaaggggaggaagaagtacaggcaaaggagccagactggctcttccagagccaaccattaagaaataatcaacctcttctgggtcaccaacccaggctgggtcatctacccagaaaaccaatttagaagggtcatcaacccagatt

SEQ ID NO: 13299 - DNA, 1071 bp, Glycine max
  Gm_smallRNAprecursor_6132
tacctttcgggcaatatgaatggaatgtgatgccattcggactgaagaatgccccttcagaatttcaaaaaattatgaatgatatttttaatccctattcaaaatttgtcattgtctacatagatgatgttttaatcttttcccaaaacattgaccaacatttcaaacatctccagaccttcatccatatcatcaaacagaatggtttggtagtctccaaatcaaaaatcaatcttttccaaactcgaattcgattccttggtcacaatatatatcaaggtacaatcattccaatagaaaggtcaatagagtttgctagcaaatttcccaaccaaatcttagacaaaacccagttacaaagatttctaggttgtctaaataacgtaggagaatttgtcccctatttaaacaatattgccaagccattgcatgataggctgaagaaaaatccgtctccttggtctgacctccatacacaaacagttaaagaaatcaaagtcaaagtccaatccataaaatgtctgtatcttcctattccacaggcatttaaaattgtcgaaactgatgcttcagacataggttatggtggcatcctcaaacaaagagtccatggccaagatcatgtcattgcatatacatcaaaacattagaatcctgcacaattaaaatattcaactgttaaaaaggaagttttagcaattgttttgtgcattttcaaatttcaatcggatttattaaaccaaaattttttaatcagagttgattgtaaatcagccaaagatattttacaaaaagatgtcaaaaaccttgcctcaaaacaaatttttgcaagatggcaaacaattctaagtgtctttgattttgacatagaatacatcaagggcacctcaaattcattacctgactaccttacccgtgaattcttacagaagagtggtaatgcctcctaaggcatcgggaatctccctaaggggaggaagaagtacaggcaaaggagccagactggctcttccagagccaaccattaagaaataatcaacctcttctgggtcaccaacccaggctgggtca

SEQ ID NO: 13300 - DNA, 1066 bp, Glycine max
  Gm_smallRNAprecursor_6133
attatatttataaaaataaatttacaactgttttgcagatggaacctgaattttgggacaaaaatcccttcaaggcgacggccaaggctttcccaccaggatttcactacaaaccaaccaccatcctgaagacaagaactttttatgaattgattttggtagattaaaactcagtatctatcaaacatttcaaagacccaaaagaccaaacattaaacacccactcgacaatccaaatacttaaagttcttcaaccaagacactttggtttggacttgaacaaaggaaagagatttttcagttccatttgatccggtaggttatacctattggaattatgttgatgcttggactaaggttttttggtaccaaaatacccacttcaagcattcatggctgatatatttcaagaccaatacgatttacaattttcccaattggtttttgcaatggtgggacttctttggaccaatcccaaagatattcccagaaacagtccaacaaggatttgctcaatttgagtttgagagacaatacaattcgcaggaatcacgaattccagcagatcttaaatacttttcaagctttgcactgtcatggatcttctcatggcaatatcgttacagcaagactgaaaagacaaaccaatatccatcactacaaagacacgcgtttgtaaaatggtggacacaatttgactcatccaaagcggatccagaacaagtaaaactctggttccaatcccatccagaatttctcaaagccgctgatccaaaaacttctgtgtttttgaaccaaaagtctcatctggcaccatctttagcaggatcgaaatcaaaggaggtcttagctaaaaatctaaagaaagttttgcaaatgttacagcaggaagaagaaggttcatcctgaaagaaggaagaaacaagttctgctgaagaagaagaagaccctttttacgaaaacgaagatgattgttttggtatctgtttagattaaatttaatttcggtcacaaaaccgtctgtttgtaattaatgtgtaattaatgctggacaatactacctgtc

SEQ ID NO: 13301 - DNA, 1086 bp, Glycine max
  Gm_smallRNAprecursor_6134
attatatttataaaaataaatttacaactgttttgcagatggaacctgaattttgggacaaaaatcccttcaaggcgacggccaaggctttcccaccaggatttcactacaaaccaaccaccatcctgaagacaagaactttttatgaattgattttggtagattaaaactcagtatctatcaaacatttcaaagacccaaaagaccaaacattaaacacccactcgacaatccaaatacttaaagttcttcaaccaagacactttggtttggacttgaacaaaggaaagagatttttcagttccatttgatccggtaggttatacctattggaattatgttgatgcttggactaaggttttttggtaccaaaatacccacttcaagcattcatggctgatatatttcaagaccaatacgatttacaattttcccaattggtttttgcaatggtgggacttctttggaccaatcccaaagatattcccagaaacagtccaacaaggatttgctcaatttgagtttgagagacaatacaattcgcaggaatcacgaattccagcagatcttaaatacttttcaagctttgcactgtcatggatcttctcatggcaatatcgttacagcaagactgaaaagacaaaccaatatccatcactacaaagacacgcgtttgtaaaatggtggacacaatttgactcatccaaagcggatccagaacaagtaaaactctggttccaatcccatccagaatttctcaaagccgctgatccaaaaacttctgtgtttttgaaccaaaagtctcatctggcaccatctttagcaggatcgaaatcaaaggaggtcttagctaaaaatctaaagaaagttttgcaaatgttacagcaggaagaagaaggttcatcctgaaagaaggaagaaacaagttctgctgaagaagaagaagaccctttttacgaaaacgaagatgattgttttggtatctgtttagattaaatttaatttcggtcacaaaaccgtctgtttgtaattaatgtgtaattaatgctggacaatactacctgtcctgtagccattaaagtcccg

SEQ ID NO: 13302 - DNA, 1189 bp, Glycine max
  Gm_smallRNAprecursor_6135
caaatacttaaagttcttcaaccaagacactttggtttggacttgaacaaaggaaagagatttttcagttccatttgatccggtaggttatacctattggaattatgttgatgcttggactaaggttttttggtaccaaaatacccacttcaagcattcatggctgatatatttcaagaccaatacgatttacaattttcccaattggtttttgcaatggtgggacttctttggaccaatcccaaagatattcccagaaacagtccaacaaggatttgctcaatttgagtttgagagacaatacaattcgcaggaatcacgaattccagcagatcttaaatacttttcaagctttgcactgtcatggatcttctcatggcaatatcgttacagcaagactgaaaagacaaaccaatatccatcactacaaagacacgcgtttgtaaaatggtggacacaatttgactcatccaaagcggatccagaacaagtaaaactctggttccaatcccatccagaatttctcaaagccgctgatccaaaaacttctgtgtttttgaaccaaaagtctcatctggcaccatctttagcaggatcgaaatcaaaggaggtcttagctaaaaatctaaagaaagttttgcaaatgttacagcaggaagaagaaggttcatcctgaaagaaggaagaaacaagttctgctgaagaagaagaagaccctttttacgaaaacgaagatgattgttttggtatctgtttagattaaatttaatttcggtcacaaaaccgtctgtttgtaattaatgtgtaattaatgctggacaatactacctgtcctgtagccattaaagtcccggtcaaaactacttgtcttgtaacaaacagtcaaatagtcccggtcaaaactaccggcaactaccggccttagatttttagctatataaggagtcctcaagtatgttgtgaggcaccctttcatttggccatttttcaggtttctgaagagaggtgctctgaaacaagatttttgtaagcgcttctttcaagtttcaataaatttctattttcatccctcttctctctctttaccgatcctgtgcggctctgccgccgcttcgatttctttgtttatgaaaacctgggatttgtaagtcggtctccggtgtgcccttgatatctgttttacaagttt

SEQ ID NO: 13303 - DNA, 1210 bp, Glycine max
  Gm_smallRNAprecursor_6136
gatttacaattttcccaattggtttttgcaatggtgggacttctttggaccaatcccaaagatattcccagaaacagtccaacaaggatttgctcaatttgagtttgagagacaatacaattcgcaggaatcacgaattccagcagatcttaaatacttttcaagctttgcactgtcatggatcttctcatggcaatatcgttacagcaagactgaaaagacaaaccaatatccatcactacaaagacacgcgtttgtaaaatggtggacacaatttgactcatccaaagcggatccagaacaagtaaaactctggttccaatcccatccagaatttctcaaagccgctgatccaaaaacttctgtgtttttgaaccaaaagtctcatctggcaccatctttagcaggatcgaaatcaaaggaggtcttagctaaaaatctaaagaaagttttgcaaatgttacagcaggaagaagaaggttcatcctgaaagaaggaagaaacaagttctgctgaagaagaagaagaccctttttacgaaaacgaagatgattgttttggtatctgtttagattaaatttaatttcggtcacaaaaccgtctgtttgtaattaatgtgtaattaatgctggacaatactacctgtcctgtagccattaaagtcccggtcaaaactacttgtcttgtaacaaacagtcaaatagtcccggtcaaaactaccggcaactaccggccttagatttttagctatataaggagtcctcaagtatgttgtgaggcaccctttcatttggccatttttcaggtttctgaagagaggtgctctgaaacaagatttttgtaagcgcttctttcaagtttcaataaatttctattttcatccctcttctctctctttaccgatcctgtgcggctctgccgccgcttcgatttctttgtttatgaaaacctgggatttgtaagtcggtctccggtgtgcccttgatatctgttttacaagtttatattttcatttccatttatcatactgcattcatacttcctatctgtctgtttgatcttattccgctgacctctggtatcagggcctgatggggaagtaggaatagtgtccgtaagggcatatgttaactgaacttatggatctgaaccatgtacagtagttttaacttaaacagtatatgtttgaacagtattttctggaagcaca

SEQ ID NO: 13304 - DNA, 1079 bp, Glycine max
  Gm_smallRNAprecursor_6137
gtaattaatgtgtaattaatgctggacaatactacctgtcctgtagccattaaagtcccggtcaaaactacttgtcttgtaacaaacagtcaaatagtcccggtcaaaactaccggcaactaccggccttagatttttagctatataaggagtcctcaagtatgttgtgaggcaccctttcatttggccatttttcaggtttctgaagagaggtgctctgaaacaagatttttgtaagcgcttctttcaagtttcaataaatttctattttcatccctcttctctctctttaccgatcctgtgcggctctgccgccgcttcgatttctttgtttatgaaaacctgggatttgtaagtcggtctccggtgtgcccttgatatctgttttacaagtttatattttcatttccatttatcatactgcattcatacttcctatctgtctgtttgatcttattccgctgacctctggtatcagggcctgatggggaagtaggaatagtgtccgtaagggcatatgttaactgaacttatggatctgaaccatgtacagtagttttaacttaaacagtatatgtttgaacagtattttctggaagcacaacagtctgatattttagttgaatgatactgtatcagtaagtcccgtggttgagaaagggcagtaagactaaggtgtattgttcaaataaaatattgagacataatatactggtggctataggagtagtgttcaaactatattgaccataaaaaaaaaatctttttcatttgttcagatccaagaagttctgtaacatatagccttatggaaatatttctatggaaccaaatgaaggcaaagatattagagaatgttataatcatgtctagactattgcgatctttttcccgtatttcttttcgatcaaattcctccgcatcatcttcttcaagaaactccaatttattaaatgatcaagataaccagacccaagaggtcgcccccaaacacaatctcttcgatgaggaagtccgattcgaagatatcaatcaaaacatggatgactggaacattccagaaatccctcggatcaact

SEQ ID NO: 13305 - DNA, 1080 bp, Glycine max
  Gm_smallRNAprecursor_6138
gtaattaatgtgtaattaatgctggacaatactacctgtcctgtagccattaaagtcccggtcaaaactacttgtcttgtaacaaacagtcaaatagtcccggtcaaaactaccggcaactaccggccttagatttttagctatataaggagtcctcaagtatgttgtgaggcaccctttcatttggccatttttcaggtttctgaagagaggtgctctgaaacaagatttttgtaagcgcttctttcaagtttcaataaatttctattttcatccctcttctctctctttaccgatcctgtgcggctctgccgccgcttcgatttctttgtttatgaaaacctgggatttgtaagtcggtctccggtgtgcccttgatatctgttttacaagtttatattttcatttccatttatcatactgcattcatacttcctatctgtctgtttgatcttattccgctgacctctggtatcagggcctgatggggaagtaggaatagtgtccgtaagggcatatgttaactgaacttatggatctgaaccatgtacagtagttttaacttaaacagtatatgtttgaacagtattttctggaagcacaacagtctgatattttagttgaatgatactgtatcagtaagtcccgtggttgagaaagggcagtaagactaaggtgtattgttcaaataaaatattgagacataatatactggtggctataggagtagtgttcaaactatattgaccataaaaaaaaaatctttttcatttgttcagatccaagaagttctgtaacatatagccttatggaaatatttctatggaaccaaatgaaggcaaagatattagagaatgttataatcatgtctagactattgcgatctttttcccgtatttcttttcgatcaaattcctccgcatcatcttcttcaagaaactccaatttattaaatgatcaagataaccagacccaagaggtcgcccccaaacacaatctcttcgatgaggaagtccgattcgaagatatcaatcaaaacatggatgactggaacattccagaaatccctcggatcaacta

SEQ ID NO: 13306 - DNA, 1238 bp, Glycine max
  Gm_smallRNAprecursor_6139
ctcagaaaaattaagtacggcaaacaactcaaaattaaaaattaattttaagctatcaaatgaaatcattgaaaaccaaggtcttaagattaacacaaactttcttctagtaaaaaaccttaagaatgaagtaatcctaggaacgcccttcattagagccctgtttcccatccaaatatctaatgaaggaataaccacaaattatttaggaagaaaaattaaatttaatttttctactaaaccaatttccagaaatataaatcttatagaaaataagattaatcaaattaacttcttaacagaagaagtatcttttaataatattcagatacaactgggaaaaccccaagtaaaagaaaaaattcaatctttattaaatcatattgaatcgattgtctgttctgatttaccacatgcattttgggacagaaagaaacatattgttgatctcccttatgagaaagactttagggaaaaacaaattcccacaaaagccagaccaatccaaatgaacgaagaatttcttcaatactgccaaaaggaaatcaaggatttgcttgataaaggcctaatccggaaaacaaaagcccatggtcttgtgcggatttttatgtcaacaaacaatctaagattgagcgtggaacaccccgcttagtcctaaattgcaaaccactaaaccaagcattacaatggattagatatcctattccaaacaaaaaagatttgcttaatagattaaattctgcaaagatattttcaaaatttgatatgaaatctggattttggcaaatccaaatccaagaatcagataggtacaaaacaacatttattgtacctttcgggcaatatgaatggaatgtgatgccattcggactaaagaatgccccttcagaatttcaaaaaattatgaatgatatttttaatccttattcaaaatttgtcattgtctacatagatgatgttttaatctttttccaaaacattgaccaacatttcaaacatctccagaccttcatccatatcatcaaatagaatggtttggcagtctccaaatcaaaaatcaatcttttccaaactcgaattcgattccttggtcacaatatatatcaaggtacaatcattccaatagaaaggtcaatagagtttgctagcaaatttcccaaccaaatcttagacaaaacccagttacaaagatttctaggttgtctaaattacgtaggagaatttgtcccctattt

SEQ ID NO: 13307 - DNA, 1218 bp, Glycine max
  Gm_smallRNAprecursor_6140
ttaatagattaaattctgcaaagatattttcaaaatttgatatgaaatctggattttggcaaatccaaatccaagaatcagataggtacaaaacaacatttattgtacctttcgggcaatatgaatggaatgtgatgccattcggactaaagaatgccccttcagaatttcaaaaaattatgaatgatatttttaatccttattcaaaatttgtcattgtctacatagatgatgttttaatctttttccaaaacattgaccaacatttcaaacatctccagaccttcatccatatcatcaaatagaatggtttggcagtctccaaatcaaaaatcaatcttttccaaactcgaattcgattccttggtcacaatatatatcaaggtacaatcattccaatagaaaggtcaatagagtttgctagcaaatttcccaaccaaatcttagacaaaacccagttacaaagatttctaggttgtctaaattacgtaggagaatttgtcccctatttaaacaatattgccaagccattgcatgataggctgaagaaaaatccgtctccttggtctgacctccatacacaaacagttaaagaaatcaaagtcaaagtccaatccataaaatgtctgtatcttcctattccacagacatttaaaattgtcgaaactgatgcttcagacataggttatggtggcatcctcaaacaaagagtccatggccaagatcatgtcattgcatatacatcaaaacattagaatcctgcacaattaaaatattcaactgttaaaaaggaagttttagcaattgttttgtgcattttcaaatttcaatcggatttattaaaccaaaattttttaatcagagttgattgtaaatcagccaaagatattttacaaaaagatgtcaaaaaccttgcctcaaaacaaatttttgcaagatggcaaacaattctaagtgtctttgattttgacatagaatacatcaagggcccctcaaattcattacctaactaccttacccgtgaattcttacagaaaagtggtaatgcctcctaaggcatcgggaatctccctaaggggaggaagaagtacaggcaaaggagccagactggctcttccagagccaaccattaagaaatcatcaacctcttatgggtcaccaacctaggctgggtcatctacccagaaaaccaatttagaagggtcatcaacccagatt

SEQ ID NO: 13308 - DNA, 1071 bp, Glycine max
  Gm_smallRNAprecursor_6141
tacctttcgggcaatatgaatggaatgtgatgccattcggactaaagaatgccccttcagaatttcaaaaaattatgaatgatatttttaatccttattcaaaatttgtcattgtctacatagatgatgttttaatctttttccaaaacattgaccaacatttcaaacatctccagaccttcatccatatcatcaaatagaatggtttggcagtctccaaatcaaaaatcaatcttttccaaactcgaattcgattccttggtcacaatatatatcaaggtacaatcattccaatagaaaggtcaatagagtttgctagcaaatttcccaaccaaatcttagacaaaacccagttacaaagatttctaggttgtctaaattacgtaggagaatttgtcccctatttaaacaatattgccaagccattgcatgataggctgaagaaaaatccgtctccttggtctgacctccatacacaaacagttaaagaaatcaaagtcaaagtccaatccataaaatgtctgtatcttcctattccacagacatttaaaattgtcgaaactgatgcttcagacataggttatggtggcatcctcaaacaaagagtccatggccaagatcatgtcattgcatatacatcaaaacattagaatcctgcacaattaaaatattcaactgttaaaaaggaagttttagcaattgttttgtgcattttcaaatttcaatcggatttattaaaccaaaattttttaatcagagttgattgtaaatcagccaaagatattttacaaaaagatgtcaaaaaccttgcctcaaaacaaatttttgcaagatggcaaacaattctaagtgtctttgattttgacatagaatacatcaagggcccctcaaattcattacctaactaccttacccgtgaattcttacagaaaagtggtaatgcctcctaaggcatcgggaatctccctaaggggaggaagaagtacaggcaaaggagccagactggctcttccagagccaaccattaagaaatcatcaacctcttatgggtcaccaacctaggctgggtca

SEQ ID NO: 13309 - DNA, 1115 bp, Glycine max
  Gm_smallRNAprecursor_6142
tcaatagagtttgctagcaaatttcccaaccaaatcttagacaaaacccagttacaaagatttctaggttgtctaaattacgtaggagaatttgtcccctatttaaacaatattgccaagccattgcatgataggctgaagaaaaatccgtctccttggtctgacctccatacacaaacagttaaagaaatcaaagtcaaagtccaatccataaaatgtctgtatcttcctattccacagacatttaaaattgtcgaaactgatgcttcagacataggttatggtggcatcctcaaacaaagagtccatggccaagatcatgtcattgcatatacatcaaaacattagaatcctgcacaattaaaatattcaactgttaaaaaggaagttttagcaattgttttgtgcattttcaaatttcaatcggatttattaaaccaaaattttttaatcagagttgattgtaaatcagccaaagatattttacaaaaagatgtcaaaaaccttgcctcaaaacaaatttttgcaagatggcaaacaattctaagtgtctttgattttgacatagaatacatcaagggcccctcaaattcattacctaactaccttacccgtgaattcttacagaaaagtggtaatgcctcctaaggcatcgggaatctccctaaggggaggaagaagtacaggcaaaggagccagactggctcttccagagccaaccattaagaaatcatcaacctcttatgggtcaccaacctaggctgggtcatctacccagaaaaccaatttagaagggtcatcaacccagattgtctcaatcaaacctgggccatccactcaggaatctcccaaaccggcaaccgccaaacaaacatcggccgactatgcatggccaattgaaacccttcaagcccttcaagacatgggtctaaccaaatttccaaaaataataaaaaaaatccttggcagacattacctcagaatctgatgatgaatctgaatcaaatttacaaacaatgatccaaaatacatcaatgacggaaacagccaccaatcctaaagggaaactacctttagccaaagctcaaacaccacctaccaaacaaactaacaat

SEQ ID NO: 13310 - DNA, 1247 bp, Glycine max
  Gm_smallRNAprecursor_6143
ccttcaagacatgggtctaaccaaatttccaaaaataataaaaaaaatccttggcagacattacctcagaatctgatgatgaatctgaatcaaatttacaaacaatgatccaaaatacatcaatgacggaaacagccaccaatcctaaagggaaactacctttagccaaagctcaaacaccacctaccaaacaaactaacaattatatttataaaaataaatttacaactgttttgcagatggaacctgaattttggggcaaaaatcccttcatgacgacgacctaggctttcccaccaacatttcactacaaaccaaccaccatcctgaagacaagaactttttatgaattgattttggtagattcaaactcagtatctatcaaaaatttcaaagacccaaaagaccaaacattaaacacccacttgacaatccaaatactaaaagttcttcaaccaagacactttggtttggacttgaacaaaggaaaaagatttttagttccatttgatccggtaggttatacctatagggattatgttgatgcttggactaaggtgttttggcaccaaaatacccgctttaagcattcatggctgatatatttcaagaccaatacaatttacaattttcccaattggtttttgcaatggtgggacttctttggaccaatcccaaagatattcccagaaacagtccaacaaggatttgctcaatttgagagacaatacaattcgcaggaatcacgaattccagcagatcttaaatacttttcaagctttgcactgtcatggatcttctcatggcaatatcgttatagcaagactgaaaagacaaaccaatatccatcactacaaagacacgcgtttgtaaaatggtggacacaatttgactaatccaaagcggatccagaacaagtaaaactctggttccaatcccatctagaattcctcaaagccgctgatccagaaacttctgtgtttttgaaccaaaagtctcatctggcaccatctttagcaggattgaaatcaaaggaggtcttagctaaaaatctaaaggaagttttgcaaatgttacagcaggaagaagaaggttcatcctgaaataaggaagaaacaagttctgctgaagaagaagaagaagaccctttttaccaaaacgaagatgattgttttggtatctgtttagattaaatttaatttcggtcacaaaaccgtctgtatgtaattaatgtgtaattaatgctg

SEQ ID NO: 13311 - DNA, 1248 bp, Glycine max
  Gm_smallRNAprecursor_6144
ccttcaagacatgggtctaaccaaatttccaaaaataataaaaaaaatccttggcagacattacctcagaatctgatgatgaatctgaatcaaatttacaaacaatgatccaaaatacatcaatgacggaaacagccaccaatcctaaagggaaactacctttagccaaagctcaaacaccacctaccaaacaaactaacaattatatttataaaaataaatttacaactgttttgcagatggaacctgaattttggggcaaaaatcccttcatgacgacgacctaggctttcccaccaacatttcactacaaaccaaccaccatcctgaagacaagaactttttatgaattgattttggtagattcaaactcagtatctatcaaaaatttcaaagacccaaaagaccaaacattaaacacccacttgacaatccaaatactaaaagttcttcaaccaagacactttggtttggacttgaacaaaggaaaaagatttttagttccatttgatccggtaggttatacctatagggattatgttgatgcttggactaaggtgttttggcaccaaaatacccgctttaagcattcatggctgatatatttcaagaccaatacaatttacaattttcccaattggtttttgcaatggtgggacttctttggaccaatcccaaagatattcccagaaacagtccaacaaggatttgctcaatttgagagacaatacaattcgcaggaatcacgaattccagcagatcttaaatacttttcaagctttgcactgtcatggatcttctcatggcaatatcgttatagcaagactgaaaagacaaaccaatatccatcactacaaagacacgcgtttgtaaaatggtggacacaatttgactaatccaaagcggatccagaacaagtaaaactctggttccaatcccatctagaattcctcaaagccgctgatccagaaacttctgtgtttttgaaccaaaagtctcatctggcaccatctttagcaggattgaaatcaaaggaggtcttagctaaaaatctaaaggaagttttgcaaatgttacagcaggaagaagaaggttcatcctgaaataaggaagaaacaagttctgctgaagaagaagaagaagaccctttttaccaaaacgaagatgattgttttggtatctgtttagattaaatttaatttcggtcacaaaaccgtctgtatgtaattaatgtgtaattaatgctgg

SEQ ID NO: 13312 - DNA, 1163 bp, Glycine max
  Gm_smallRNAprecursor_6145
aaaataataaaaaaaatccttggcagacattacctcagaatctgatgatgaatctgaatcaaatttacaaacaatgatccaaaatacatcaatgacggaaacagccaccaatcctaaagggaaactacctttagccaaagctcaaacaccacctaccaaacaaactaacaattatatttataaaaataaatttacaactgttttgcagatggaacctgaattttggggcaaaaatcccttcatgacgacgacctaggctttcccaccaacatttcactacaaaccaaccaccatcctgaagacaagaactttttatgaattgattttggtagattcaaactcagtatctatcaaaaatttcaaagacccaaaagaccaaacattaaacacccacttgacaatccaaatactaaaagttcttcaaccaagacactttggtttggacttgaacaaaggaaaaagatttttagttccatttgatccggtaggttatacctatagggattatgttgatgcttggactaaggtgttttggcaccaaaatacccgctttaagcattcatggctgatatatttcaagaccaatacaatttacaattttcccaattggtttttgcaatggtgggacttctttggaccaatcccaaagatattcccagaaacagtccaacaaggatttgctcaatttgagagacaatacaattcgcaggaatcacgaattccagcagatcttaaatacttttcaagctttgcactgtcatggatcttctcatggcaatatcgttatagcaagactgaaaagacaaaccaatatccatcactacaaagacacgcgtttgtaaaatggtggacacaatttgactaatccaaagcggatccagaacaagtaaaactctggttccaatcccatctagaattcctcaaagccgctgatccagaaacttctgtgtttttgaaccaaaagtctcatctggcaccatctttagcaggattgaaatcaaaggaggtcttagctaaaaatctaaaggaagttttgcaaatgttacagcaggaagaagaaggttcatcctgaaataaggaagaaacaagttctgctgaagaagaagaagaagaccctttttaccaaaacgaagatgattgttttggtatctgtttagattaaa

SEQ ID NO: 13313 - DNA, 1060 bp, Glycine max
  Gm_smallRNAprecursor_6146
aattatatttataaaaataaatttacaactgttttgcagatggaacctgaattttggggcaaaaatcccttcatgacgacgacctaggctttcccaccaacatttcactacaaaccaaccaccatcctgaagacaagaactttttatgaattgattttggtagattcaaactcagtatctatcaaaaatttcaaagacccaaaagaccaaacattaaacacccacttgacaatccaaatactaaaagttcttcaaccaagacactttggtttggacttgaacaaaggaaaaagatttttagttccatttgatccggtaggttatacctatagggattatgttgatgcttggactaaggtgttttggcaccaaaatacccgctttaagcattcatggctgatatatttcaagaccaatacaatttacaattttcccaattggtttttgcaatggtgggacttctttggaccaatcccaaagatattcccagaaacagtccaacaaggatttgctcaatttgagagacaatacaattcgcaggaatcacgaattccagcagatcttaaatacttttcaagctttgcactgtcatggatcttctcatggcaatatcgttatagcaagactgaaaagacaaaccaatatccatcactacaaagacacgcgtttgtaaaatggtggacacaatttgactaatccaaagcggatccagaacaagtaaaactctggttccaatcccatctagaattcctcaaagccgctgatccagaaacttctgtgtttttgaaccaaaagtctcatctggcaccatctttagcaggattgaaatcaaaggaggtcttagctaaaaatctaaaggaagttttgcaaatgttacagcaggaagaagaaggttcatcctgaaataaggaagaaacaagttctgctgaagaagaagaagaagaccctttttaccaaaacgaagatgattgttttggtatctgtttagattaaatttaatttcggtcacaaaaccgtctgtatgtaattaatgtgtaattaatgctggacaatactacct

SEQ ID NO: 13314 - DNA, 1080 bp, Glycine max
  Gm_smallRNAprecursor_6147
aattatatttataaaaataaatttacaactgttttgcagatggaacctgaattttggggcaaaaatcccttcatgacgacgacctaggctttcccaccaacatttcactacaaaccaaccaccatcctgaagacaagaactttttatgaattgattttggtagattcaaactcagtatctatcaaaaatttcaaagacccaaaagaccaaacattaaacacccacttgacaatccaaatactaaaagttcttcaaccaagacactttggtttggacttgaacaaaggaaaaagatttttagttccatttgatccggtaggttatacctatagggattatgttgatgcttggactaaggtgttttggcaccaaaatacccgctttaagcattcatggctgatatatttcaagaccaatacaatttacaattttcccaattggtttttgcaatggtgggacttctttggaccaatcccaaagatattcccagaaacagtccaacaaggatttgctcaatttgagagacaatacaattcgcaggaatcacgaattccagcagatcttaaatacttttcaagctttgcactgtcatggatcttctcatggcaatatcgttatagcaagactgaaaagacaaaccaatatccatcactacaaagacacgcgtttgtaaaatggtggacacaatttgactaatccaaagcggatccagaacaagtaaaactctggttccaatcccatctagaattcctcaaagccgctgatccagaaacttctgtgtttttgaaccaaaagtctcatctggcaccatctttagcaggattgaaatcaaaggaggtcttagctaaaaatctaaaggaagttttgcaaatgttacagcaggaagaagaaggttcatcctgaaataaggaagaaacaagttctgctgaagaagaagaagaagaccctttttaccaaaacgaagatgattgttttggtatctgtttagattaaatttaatttcggtcacaaaaccgtctgtatgtaattaatgtgtaattaatgctggacaatactacctgtcctgtagccattaaagtc

SEQ ID NO: 13315 - DNA, 1046 bp, Glycine max
  Gm_smallRNAprecursor_6148
tcaagaccaatacaatttacaattttcccaattggtttttgcaatggtgggacttctttggaccaatcccaaagatattcccagaaacagtccaacaaggatttgctcaatttgagagacaatacaattcgcaggaatcacgaattccagcagatcttaaatacttttcaagctttgcactgtcatggatcttctcatggcaatatcgttatagcaagactgaaaagacaaaccaatatccatcactacaaagacacgcgtttgtaaaatggtggacacaatttgactaatccaaagcggatccagaacaagtaaaactctggttccaatcccatctagaattcctcaaagccgctgatccagaaacttctgtgtttttgaaccaaaagtctcatctggcaccatctttagcaggattgaaatcaaaggaggtcttagctaaaaatctaaaggaagttttgcaaatgttacagcaggaagaagaaggttcatcctgaaataaggaagaaacaagttctgctgaagaagaagaagaagaccctttttaccaaaacgaagatgattgttttggtatctgtttagattaaatttaatttcggtcacaaaaccgtctgtatgtaattaatgtgtaattaatgctggacaatactacctgtcctgtagccattaaagtcccggtcaaaactacttgtcttgtaacaaacagtcaaatagtcccggtcaaaactaccggcaactaccggtcttagatttttggctatataaggagtcctcaagtatgttgtgaggcaccctttcatttggccattttcaggtttctgaagagaggtgctctgaaacaagatttttgtaagcgcttctttcaagtttcaataaatttctattttcatccctcttctatctctttaccgatcctgtgcggctctaccgccgcttcagtttctttgtttatgaaaacctgtgatttgtaagccggtctccgatgtacccttgacatctgttttacaagtttatattttcatttccatttatcatactgcattctt

SEQ ID NO: 13316 - DNA, 1213 bp, Glycine max
  Gm_smallRNAprecursor_6149
caatacaatttacaattttcccaattggtttttgcaatggtgggacttctttggaccaatcccaaagatattcccagaaacagtccaacaaggatttgctcaatttgagagacaatacaattcgcaggaatcacgaattccagcagatcttaaatacttttcaagctttgcactgtcatggatcttctcatggcaatatcgttatagcaagactgaaaagacaaaccaatatccatcactacaaagacacgcgtttgtaaaatggtggacacaatttgactaatccaaagcggatccagaacaagtaaaactctggttccaatcccatctagaattcctcaaagccgctgatccagaaacttctgtgtttttgaaccaaaagtctcatctggcaccatctttagcaggattgaaatcaaaggaggtcttagctaaaaatctaaaggaagttttgcaaatgttacagcaggaagaagaaggttcatcctgaaataaggaagaaacaagttctgctgaagaagaagaagaagaccctttttaccaaaacgaagatgattgttttggtatctgtttagattaaatttaatttcggtcacaaaaccgtctgtatgtaattaatgtgtaattaatgctggacaatactacctgtcctgtagccattaaagtcccggtcaaaactacttgtcttgtaacaaacagtcaaatagtcccggtcaaaactaccggcaactaccggtcttagatttttggctatataaggagtcctcaagtatgttgtgaggcaccctttcatttggccattttcaggtttctgaagagaggtgctctgaaacaagatttttgtaagcgcttctttcaagtttcaataaatttctattttcatccctcttctatctctttaccgatcctgtgcggctctaccgccgcttcagtttctttgtttatgaaaacctgtgatttgtaagccggtctccgatgtacccttgacatctgttttacaagtttatattttcatttccatttatcatactgcattcttacttcctatctgtccgtttgatcttattccgctgacctctctctctctctctctctctctctctctctctctatatatatatatatatatatatatatatatatatatatacacacacacattttattaattaaggaaaaagacttataattccactttagctttatctagttt

SEQ ID NO: 13317 - DNA, 1170 bp, Glycine max
  Gm_smallRNAprecursor_6150
agtatgaagtcacatcaagagaaaaaggtgggccctttttgctccacttaaaatgagacatgcgacattgctttaaaaaaaaagagaaaagaaaatcatttttaataaaagcccaactcttctctctcttccttcagcaaatttcagaaacttctccctccttcccacgttacttttcttcttccttcttctccaccattgttgtccattgaagcttcaaaattgctcatcatttctgctccaaattgcaaggagaagccattttcggagtcttgaagcacacctctacttcgtggggcttcaaatttcaggtatgggtggacttcttctcacatgaaattcgtgggtgttgggtttttaggagttatgatggatagttctactaggttattgccttagggtagttatttgtgaaggaatttgttgatatcatgctaaacttgacatgtttgatgtgagtaaagctacccattatgtttcagggttttatgatgatgctttgtgatatttgtatgctgaaattgttgatagaaaactggtagagatgatggggagagttaacttagggttaaatgtgagaatgataatgttttaggtagaaaagtgtgagattttgagggttagagaagccaaatttggggttagtggaaattggagtctaaagtgagttgatcctagtttaaaatgtcaattaggacttgtagaaaagcttggacagagcaaataagaaaagaatgagtgacaaatgtgaaagaaaagagccatttcttgggtgaattgggtgttgagaggtcaaattttgaatcggtggagttttcaccttaaaacaagtttgaacaagtctaaatcaatgttatagacttgattgagatgagagtttaccccaaaattatccaattctcattttcactcttcaaaccttgaaaattcactaaattgaggggttttggatacctatattttgatttgccttggtctgaagtttgcttttggtttaaatatgatttatacatgatttaggacttgtaggatccaatttgagaaaaattggatgtgggcaagttggatttcgaaatctgccattttatgcagaacaatgctgtcaaaattgtgcagcagtttttttacatagtgcagaaaaatgcttatgcattgctagttacaggaagg

SEQ ID NO: 13318 - DNA, 1164 bp, Glycine max
  Gm_smallRNAprecursor_6151
ccacgttacttttcttcttccttcttctccaccattgttgtccattgaagcttcaaaattgctcatcatttctgctccaaattgcaaggagaagccattttcggagtcttgaagcacacctctacttcgtggggcttcaaatttcaggtatgggtggacttcttctcacatgaaattcgtgggtgttgggtttttaggagttatgatggatagttctactaggttattgccttagggtagttatttgtgaaggaatttgttgatatcatgctaaacttgacatgtttgatgtgagtaaagctacccattatgtttcagggttttatgatgatgctttgtgatatttgtatgctgaaattgttgatagaaaactggtagagatgatggggagagttaacttagggttaaatgtgagaatgataatgttttaggtagaaaagtgtgagattttgagggttagagaagccaaatttggggttagtggaaattggagtctaaagtgagttgatcctagtttaaaatgtcaattaggacttgtagaaaagcttggacagagcaaataagaaaagaatgagtgacaaatgtgaaagaaaagagccatttcttgggtgaattgggtgttgagaggtcaaattttgaatcggtggagttttcaccttaaaacaagtttgaacaagtctaaatcaatgttatagacttgattgagatgagagtttaccccaaaattatccaattctcattttcactcttcaaaccttgaaaattcactaaattgaggggttttggatacctatattttgatttgccttggtctgaagtttgcttttggtttaaatatgatttatacatgatttaggacttgtaggatccaatttgagaaaaattggatgtgggcaagttggatttcgaaatctgccattttatgcagaacaatgctgtcaaaattgtgcagcagtttttttacatagtgcagaaaaatgcttatgcattgctagttacaggaagggtagtacatctcgggttccaggcattttatagaagatcccaacggtcaaaatgtatatttatgtactaggaacctccagtaaaattttcaaggcgatccaacgattaacaaatcagatcgaagagaatgttactgagtaaattttgcctattatgcag

SEQ ID NO: 13319 - DNA, 1236 bp, Glycine max
  Gm_smallRNAprecursor_6152
ttacttttcttcttccttcttctccaccattgttgtccattgaagcttcaaaattgctcatcatttctgctccaaattgcaaggagaagccattttcggagtcttgaagcacacctctacttcgtggggcttcaaatttcaggtatgggtggacttcttctcacatgaaattcgtgggtgttgggtttttaggagttatgatggatagttctactaggttattgccttagggtagttatttgtgaaggaatttgttgatatcatgctaaacttgacatgtttgatgtgagtaaagctacccattatgtttcagggttttatgatgatgctttgtgatatttgtatgctgaaattgttgatagaaaactggtagagatgatggggagagttaacttagggttaaatgtgagaatgataatgttttaggtagaaaagtgtgagattttgagggttagagaagccaaatttggggttagtggaaattggagtctaaagtgagttgatcctagtttaaaatgtcaattaggacttgtagaaaagcttggacagagcaaataagaaaagaatgagtgacaaatgtgaaagaaaagagccatttcttgggtgaattgggtgttgagaggtcaaattttgaatcggtggagttttcaccttaaaacaagtttgaacaagtctaaatcaatgttatagacttgattgagatgagagtttaccccaaaattatccaattctcattttcactcttcaaaccttgaaaattcactaaattgaggggttttggatacctatattttgatttgccttggtctgaagtttgcttttggtttaaatatgatttatacatgatttaggacttgtaggatccaatttgagaaaaattggatgtgggcaagttggatttcgaaatctgccattttatgcagaacaatgctgtcaaaattgtgcagcagtttttttacatagtgcagaaaaatgcttatgcattgctagttacaggaagggtagtacatctcgggttccaggcattttatagaagatcccaacggtcaaaatgtatatttatgtactaggaacctccagtaaaattttcaaggcgatccaacgattaacaaatcagatcgaagagaatgttactgagtaaattttgcctattatgcagaaaaatggtggtgcagtgcaggtcaggggaaaggaagtatatatcgtgttctagatattttatagaagatcccaacg

SEQ ID NO: 13320 - DNA, 1127 bp, Glycine max
  Gm_smallRNAprecursor_6153
tctcacatgaaattcgtgggtgttgggtttttaggagttatgatggatagttctactaggttattgccttagggtagttatttgtgaaggaatttgttgatatcatgctaaacttgacatgtttgatgtgagtaaagctacccattatgtttcagggttttatgatgatgctttgtgatatttgtatgctgaaattgttgatagaaaactggtagagatgatggggagagttaacttagggttaaatgtgagaatgataatgttttaggtagaaaagtgtgagattttgagggttagagaagccaaatttggggttagtggaaattggagtctaaagtgagttgatcctagtttaaaatgtcaattaggacttgtagaaaagcttggacagagcaaataagaaaagaatgagtgacaaatgtgaaagaaaagagccatttcttgggtgaattgggtgttgagaggtcaaattttgaatcggtggagttttcaccttaaaacaagtttgaacaagtctaaatcaatgttatagacttgattgagatgagagtttaccccaaaattatccaattctcattttcactcttcaaaccttgaaaattcactaaattgaggggttttggatacctatattttgatttgccttggtctgaagtttgcttttggtttaaatatgatttatacatgatttaggacttgtaggatccaatttgagaaaaattggatgtgggcaagttggatttcgaaatctgccattttatgcagaacaatgctgtcaaaattgtgcagcagtttttttacatagtgcagaaaaatgcttatgcattgctagttacaggaagggtagtacatctcgggttccaggcattttatagaagatcccaacggtcaaaatgtatatttatgtactaggaacctccagtaaaattttcaaggcgatccaacgattaacaaatcagatcgaagagaatgttactgagtaaattttgcctattatgcagaaaaatggtggtgcagtgcaggtcaggggaaaggaagtatatatcgtgttctagatattttatagaagatcccaacggtcaaaattcatatttatgtattaggaacctccagtaaaaaattcaagg

SEQ ID NO: 13321 - DNA, 1119 bp, Glycine max
  Gm_smallRNAprecursor_6154
gaaattcgtgggtgttgggtttttaggagttatgatggatagttctactaggttattgccttagggtagttatttgtgaaggaatttgttgatatcatgctaaacttgacatgtttgatgtgagtaaagctacccattatgtttcagggttttatgatgatgctttgtgatatttgtatgctgaaattgttgatagaaaactggtagagatgatggggagagttaacttagggttaaatgtgagaatgataatgttttaggtagaaaagtgtgagattttgagggttagagaagccaaatttggggttagtggaaattggagtctaaagtgagttgatcctagtttaaaatgtcaattaggacttgtagaaaagcttggacagagcaaataagaaaagaatgagtgacaaatgtgaaagaaaagagccatttcttgggtgaattgggtgttgagaggtcaaattttgaatcggtggagttttcaccttaaaacaagtttgaacaagtctaaatcaatgttatagacttgattgagatgagagtttaccccaaaattatccaattctcattttcactcttcaaaccttgaaaattcactaaattgaggggttttggatacctatattttgatttgccttggtctgaagtttgcttttggtttaaatatgatttatacatgatttaggacttgtaggatccaatttgagaaaaattggatgtgggcaagttggatttcgaaatctgccattttatgcagaacaatgctgtcaaaattgtgcagcagtttttttacatagtgcagaaaaatgcttatgcattgctagttacaggaagggtagtacatctcgggttccaggcattttatagaagatcccaacggtcaaaatgtatatttatgtactaggaacctccagtaaaattttcaaggcgatccaacgattaacaaatcagatcgaagagaatgttactgagtaaattttgcctattatgcagaaaaatggtggtgcagtgcaggtcaggggaaaggaagtatatatcgtgttctagatattttatagaagatcccaacggtcaaaattcatatttatgtattaggaacctccagtaaaaaattcaagg

SEQ ID NO: 13322 - DNA, 1157 bp, Glycine max
  Gm_smallRNAprecursor_6155
ggttattgccttagggtagttatttgtgaaggaatttgttgatatcatgctaaacttgacatgtttgatgtgagtaaagctacccattatgtttcagggttttatgatgatgctttgtgatatttgtatgctgaaattgttgatagaaaactggtagagatgatggggagagttaacttagggttaaatgtgagaatgataatgttttaggtagaaaagtgtgagattttgagggttagagaagccaaatttggggttagtggaaattggagtctaaagtgagttgatcctagtttaaaatgtcaattaggacttgtagaaaagcttggacagagcaaataagaaaagaatgagtgacaaatgtgaaagaaaagagccatttcttgggtgaattgggtgttgagaggtcaaattttgaatcggtggagttttcaccttaaaacaagtttgaacaagtctaaatcaatgttatagacttgattgagatgagagtttaccccaaaattatccaattctcattttcactcttcaaaccttgaaaattcactaaattgaggggttttggatacctatattttgatttgccttggtctgaagtttgcttttggtttaaatatgatttatacatgatttaggacttgtaggatccaatttgagaaaaattggatgtgggcaagttggatttcgaaatctgccattttatgcagaacaatgctgtcaaaattgtgcagcagtttttttacatagtgcagaaaaatgcttatgcattgctagttacaggaagggtagtacatctcgggttccaggcattttatagaagatcccaacggtcaaaatgtatatttatgtactaggaacctccagtaaaattttcaaggcgatccaacgattaacaaatcagatcgaagagaatgttactgagtaaattttgcctattatgcagaaaaatggtggtgcagtgcaggtcaggggaaaggaagtatatatcgtgttctagatattttatagaagatcccaacggtcaaaattcatatttatgtattaggaacctccagtaaaaaattcaaggcgatccaacggttatcgaatcagatcgaagagaatgttactgaggtatgtgagtaggaaaaactatggaatttgaatgagttttgtgt

SEQ ID NO: 13323 - DNA, 1078 bp, Glycine max
  Gm_smallRNAprecursor_6156
aaacagagtggaggcagaaaactctgcacaaaactcattcatattccatagtttttcctactcacatacctcagtaacattctcttcgttccgacttgctaaccgttggatcgccttgaaatttttaatggaggttcctaatacaaatatctaaattttgaccgttgggatctgctatcaaatatctagaacaggatagatactgcctttcccgtgacctgcactgcagcaccatttttctacataataggcaaagtttactcagtaacattctcttcgttctgattcgttaaccgttggatcgctttgaaaattttactggaggttcctagtacataaatatacattttgaccgttgggatctgctagaaaatacccagaaccagagaggtactacccttcctgtgactagcaatgcataagcattttctgcacatgttaaaaaaactgctgcacaattcaacaacatttttctgcataacatggcagatttcgaaatccaacttgcccacatccaattttgctcaaattggatcctacaagtcctaaatcatgtataaatcatatttaaaccaaaagcaagcttcagatcaaggtaaatcaaaatctaggcatccaaaacccatcaatttagtgaattttcaaggttcgagaagtgaaaatgagaattgggtaattttggggtaaactctcatctcaatcaagtctataacattgatttagacttgctcaaacttgttttaaggtgaaaactccaccgattcaaaatttgacctctcaacacccaattcacccaagaaatgactcttttctttcacatttgtcactcatttttttcttatttgctctgcccaagcttttctataagtcctaattgatattctaaactaggatcaactcactttagactccaatttccactaaccccaaatttggcttttcaaaccctcaaaatctcacacttttccactcacatcactaccattttcacatttaaccctaagttaactctcaccatcatctctaccagttttctaccaacaatttcagcatacaaatatcacaaagcatcatcata

SEQ ID NO: 13324 - DNA, 1237 bp, Glycine max
  Gm_smallRNAprecursor_6157
ttgcttttcttcttccttcttctccaccattgttgtccattgaagcttcaaaattgctcatcatttctgctccaaattgcaaggagaagccattttcggagtcttgaagcacacctctacttcgtggggcttcaaattccaggtatgggtggacttcttctcacatgaaattcgtgggtgttgggtttttgggagttatgatgggtagttctactaggttattgccttagggtagttatttgtgaaggaatttgttgaaatcatgctaaacttgacatgtttgatgtgagtaaagctacccattatgttttagggttttatgatgatgctttgtgatatttgtatactgaaattgttgatagaaaactggtagagatgatggggagagttaacttagggttaaatgtgagaatgataatgttgtaggtagaaaagtgtgagattttgagggttagagaagccaaatttggggttagtggaaattggagtctaaagtgagttgatcctagtttaaaatgtcaattaagacttgtagaaaagcttgggcagagcaaataagaaaaaaaatgagtgacaaatgtgaaagaaaaaagccatttcttgggtgaattgggtgttgagaggtcaaattttgaatcggtggagttttcaccttaaaaccagtttgagcaagtctaaatcaatgttatagactttattgagatgagattttaccccaaaattatccaattctcattttcactcttcaaaccttgaaaattcactaaattgaggggttttggatacctatattttgattggccttggtctgaagtttgcttttggtttaaatatgatttatacatgatttaggacttgtaggatccaatttgagcaaaattggatgtgggcaagttggatttcgaaatctgtcattttatgcagaacaatgctgtcaaaattgtgcagcagtttttttagcagatctcaacggtcaaaattggaagtatatattgtgttctagatatttgttatcagatcccaacggtcaaaatttatatttttgtattaggaacttccagtaaaaacttcaaggcgatccaacggttagcgaatcagaatgaagagaatgttattgaggtatgtgagtaggaaaaactatggaatttgaatgagttttgtgttgagttttctgcctccactctgtttttcttggtttagggtagtttcatgataaatggaattgaattgttggata

SEQ ID NO: 13325 - DNA, 1051 bp, Glycine max
  Gm_smallRNAprecursor_6158
atttaagatattttttggtgaatatatattttaaaatctgaattttgtataataatatatttattttagtaaatatttattttgtataataatctgaattttaaaatttttaatttaactattttactaaatataattagtttgtttatgtttttagatttaattaaaaatgataaaactaaagcttttaacaatttatttatataagaacattatactacgtcatcaataaaatatttaaacaatgacatttgtctaaggaaaaactaagatgaggatacattaggataattatttctgctatgaccatgttgccggcaaagtccacatttttttctacttgctcgttcattttcgtcttcgtccatctcagtaggaatgcgagttgaaacgggacgaccctttgcagtcctctttctccttggatcaggaccccactgatctccttcatattcttgccacattgattcgtgtggcaataaaccaaaggagttgtcgtagatgtgcaaaatgtgttgtaaagtgaatatcatcggcacataggtcatgggatcaacattgacagatttacaggcagccatgacgtgagaacacggtaaatgtttagcctgaaattcaccacaatcacacttttgggattgtaacattactctaaaccttccaggtggtctaggtgtttcaagtggggattgagtctcggttataataaaagtgtgattgtgtctgtcgaattcatttacaatgtgtgtattagattcttgtttaccactattgattgcatcgaagacgacttcagaatactgtgagccggagttgatcattgcctgagtttgtcgacctctattagcaaagagttgtgcggtcttgaaataggtctcctcaaccaatgatgacaccggcaaatgtcttgtgttttttaacatggaattaacagactccgacaaattggtagtcatatgtccccaacgtttcccctcatcaaagcattgtacccatttttgtttgggtaattgatcaagccattcagctgcacttggcttattcgcacgaa

SEQ ID NO: 13326 - DNA, 1167 bp, Glycine max
  Gm_smallRNAprecursor_6159
aataatatatttattttagtaaatatttattttgtataataatctgaattttaaaatttttaatttaactattttactaaatataattagtttgtttatgtttttagatttaattaaaaatgataaaactaaagcttttaacaatttatttatataagaacattatactacgtcatcaataaaatatttaaacaatgacatttgtctaaggaaaaactaagatgaggatacattaggataattatttctgctatgaccatgttgccggcaaagtccacatttttttctacttgctcgttcattttcgtcttcgtccatctcagtaggaatgcgagttgaaacgggacgaccctttgcagtcctctttctccttggatcaggaccccactgatctccttcatattcttgccacattgattcgtgtggcaataaaccaaaggagttgtcgtagatgtgcaaaatgtgttgtaaagtgaatatcatcggcacataggtcatgggatcaacattgacagatttacaggcagccatgacgtgagaacacggtaaatgtttagcctgaaattcaccacaatcacacttttgggattgtaacattactctaaaccttccaggtggtctaggtgtttcaagtggggattgagtctcggttataataaaagtgtgattgtgtctgtcgaattcatttacaatgtgtgtattagattcttgtttaccactattgattgcatcgaagacgacttcagaatactgtgagccggagttgatcattgcctgagtttgtcgacctctattagcaaagagttgtgcggtcttgaaataggtctcctcaaccaatgatgacaccggcaaatgtcttgtgttttttaacatggaattaacagactccgacaaattggtagtcatatgtccccaacgtttcccctcatcaaagcattgtacccatttttgtttgggtaattgatcaagccattcagctgcacttggcttattcgcacgaatatccccaagatgtcggcagtgcatcttcgtgtatgcgtaccctgtaaatatttaatcaatgtattatgttataaaatttgattgaaagaaaattataacgaataaataaaatagattctcaccagccaacataagtggtttctttaaatgtttgcagtttgagtt

SEQ ID NO: 13327 - DNA, 1092 bp, Glycine max
  Gm_smallRNAprecursor_6160
ggataattatttctgctatgaccatgttgccggcaaagtccacatttttttctacttgctcgttcattttcgtcttcgtccatctcagtaggaatgcgagttgaaacgggacgaccctttgcagtcctctttctccttggatcaggaccccactgatctccttcatattcttgccacattgattcgtgtggcaataaaccaaaggagttgtcgtagatgtgcaaaatgtgttgtaaagtgaatatcatcggcacataggtcatgggatcaacattgacagatttacaggcagccatgacgtgagaacacggtaaatgtttagcctgaaattcaccacaatcacacttttgggattgtaacattactctaaaccttccaggtggtctaggtgtttcaagtggggattgagtctcggttataataaaagtgtgattgtgtctgtcgaattcatttacaatgtgtgtattagattcttgtttaccactattgattgcatcgaagacgacttcagaatactgtgagccggagttgatcattgcctgagtttgtcgacctctattagcaaagagttgtgcggtcttgaaataggtctcctcaaccaatgatgacaccggcaaatgtcttgtgttttttaacatggaattaacagactccgacaaattggtagtcatatgtccccaacgtttcccctcatcaaagcattgtacccatttttgtttgggtaattgatcaagccattcagctgcacttggcttattcgcacgaatatccccaagatgtcggcagtgcatcttcgtgtatgcgtaccctgtaaatatttaatcaatgtattatgttataaaatttgattgaaagaaaattataacgaataaataaaatagattctcaccagccaacataagtggtttctttaaatgtttgcagtttgagttaccacgaagaaagttttgtgcaatgtggcgcaggcaaaagaaatgggatgtgtcctggacccataagttacttgggttgttgtaggcacttataattgaggggtgtcagtctgaaataagagaaatgttaatttgcatagtaacatgtcttctcaaattc

SEQ ID NO: 13328 - DNA, 1185 bp, Glycine max
  Gm_smallRNAprecursor_6161
tttgtttgggtaattgatcaagccattcagctgcacttggcttattcgcacgaatatccccaagatgtcggcagtgcatcttcgtgtatgcgtaccctgtaaatatttaatcaatgtattatgttataaaatttgattgaaagaaaattataacgaataaataaaatagattctcaccagccaacataagtggtttctttaaatgtttgcagtttgagttaccacgaagaaagttttgtgcaatgtggcgcaggcaaaagaaatgggatgtgtcctggacccataagttacttgggttgttgtaggcacttataattgaggggtgtcagtctgaaataagagaaatgttaatttgcatagtaacatgtcttctcaaattctttagaaaaaacccccaagctgaagttgtctccccttctacaatggcataggcaatcgggaagatatggttagctccatcttgtgcggtagctatcaacagtgtgccagtatactttccgtaaagccatgtaccatctacttgtacaatgggtttgcaatatgcaaaaccattaatgcatggaccaaatgaccaaaagacacgtgtaaacaatcttttgcccggtactatttctcccccctcatacaaggattctgtttgagcagcgaccacagtcccgggaacacaagattacaaaactccgaaaagttttggcagtttggcatatgattcttcccaatttccatgaatcatctccaatgctttttgctttgctaaccatgtcttcttgtaggatggggtataattcatgaacgttttgatctctgcaatcaatgtcttgatggagacagttgggtttgttttgacaattggttggatgatctgtgctatgatgtgtttgtcgagttggcgatgatcttgtctaagcatcggcacgagacaagtgtgatgacctctgatactcttgataatccatttgttatgcctctttgaattgcatgcgcccaagctccatgtacaaccattttcatgtaacttgcagacgaagtgtagccttctttggtcagagtaaattgttctgcaatcaaaatgatttctgatattgtattctttgattgctcgaatacattgtgatttgtcatcgaaggtcatgccaacctcgagtacaccgactggtggttgtacattgtgttgctgatgaacaa

SEQ ID NO: 13329 - DNA, 1039 bp, Glycine max
  Gm_smallRNAprecursor_6162
ggaatggattcatggagttggggctgtgccatctacccttcaccagaaactcattatctggagggaggatgggattgttgaaaatatagaggcggatcaaagcttctataagtcggaggtcgataatgttactacacaaacctttgacaaaaagttggctaacatagcaccttgtggtgacaaggaggctgttgtcgaatcaagtgacaatgttatccactctgtcaaactccatccgacctatgggtttatatgggagagggaggaaatcgatgttgttccctctgaagatggagtcattccaccaactgggtggaatatgtatgaagattaatatgactgaggccactgcattggccagaattacggcttatatggccgaaaatagactaaatacggcctttgaggctgaatctcaacaaaatatggcagttgaagccaagatcgaagatcatgaaaataaagaaacaaaggatcgaagactggattgcatttatgacgatgagccgctgggttttgagaaaaatcccataagtgaggtgccaaagatgcaggctcaagatcctttggaggagatcgacattggagatggctcgataaaaaggccaacctatatcagtgccaatatcacctcaagtctaaaagaaaagctggtgcctcttcttagagaattcaaagactgttttgcttgggattaccacgaaatgcctgggttaagcagagaaatggtcgaaatgaaattaccgattaaggagggaaaaagaccagtaaaacaactaccaagaagattcgcaccagaaattacgttcaaaattaaggaagagatcgaaaggctgctgaggtgtaaattcatcagatctgccaggtatgtcgaatggttagcaaatatagtccctgtcattaaaaagaatggaactcttagagtatgcatagattttagggatttaaataatgctacacctaaagatgaatatgcgatgccagtaacggaaatgttggtagattcagcagctggcttcgaatttttaagcatgttaga

SEQ ID NO: 13330 - DNA, 1046 bp, Glycine max
  Gm_smallRNAprecursor_6163
aggtatgtcgaatggttagcaaatatagtccctgtcattaaaaagaatggaactcttagagtatgcatagattttagggatttaaataatgctacacctaaagatgaatatgcgatgccagtaacggaaatgttggtagattcagcagctggcttcgaatttttaagcatgttagatggttattctggttataaccaaatatttattgctgaaagtgatgtgtcaaaaacagcatttcgatgtcctggtgctttaggcacttatgaatgggtggttatgccttttgggttgaaaaatgctggggccacttatcaaagggccatgaattccatgtttcatgattttattgacacatttatgcaagtttatattgatgatataatcatcaaatcctcctcagaagatagccatttggattaccttaggcaatctttcgaacgaatgaggaaacatggattaaaaatgaatccattaaagtgtgctttttgtgtacgtgcaggagatttccttggttttgtggtgcataaaaaaggcattgagataaatcaaaacaagacaaaggctattcttgagacgaagcctccttcgaccaaaaaacagcttcagtctttgctaggaaaaattaacttcttgaggcgattcatttcgaatctaagtggcaaagctcaaattttttcgccattacttcgactcaagaaagatgaaccattcagatgggatgaagagcatcaaaaggctttcgatgaaattaaagaatatctgatcaagcctcccgtgttaatgcctcctagtcgaaataagactatgaagttgtatattgctgcgtctgacaagaccattggtagcatgttggctcaggaagatgatgatggcatagaacatgcaatttattatcttagtcgtgtactaaatgatgcagaaactagatatactgccatagaaaaactttgtctttgtctgtatttctcttgtgcaaaacttaagcaatatataaagcctgttgatgtttatgtgtattctcattatgatattattaagcacatgtt

SEQ ID NO: 13331 - DNA, 1036 bp, Glycine max
  Gm_smallRNAprecursor_6164
tttggatattaattaaacgttaactacaattagtgtacacacacataaaatatatataagtagaacttttatttaaatcacgtaccttaacaacaatccacctagcaacagccttggatttcggttgtggagtatcatcaagtcctttcaaagcactagtgttgaatataaggaacattaaaatattgatgttgttgagttatgccaatgaaaatgtattgaaaacaatactgacctgttaattattcccttaaggtagttgtctggcctgttatgcaaagaataaaaccagacaactaggttttccttaggtagaatgacgaccatttgccagtgtccactgcagtagagacgaatatgggttattgtattagtatagattatttaaattcaattattgtgtttgacttacctattcagataggctccaaggtaaacatctcgttttgaactctgtatccaactcctgatgtaactttcggattcaaattgtgattgcccagatctctgaatggactgtggctcgaggaatccatacacatcagaattccccgctcgcacacttgtctcagtcagatggttgtgttgttaagtcaaagttaattatgtatgaatttaaaacaattactttggtaattaatagtaatgtaaaatgacttacagaatccacaactgtataacagatatgctgagacattgaccaccatgtgcaatttcagagagatcttcgtgctttatatacaacgggaagttttgattaaacaccccgaatatggtagcatcccacataacctagagcggcttcaaaaacagttgtgggatagtcaatgtcatcaggtacaggggatcatcgacctcttcatccgggctttctagaggttttgctggagacacagctgcctattgataaaacatagttaattagcaagttttgattacagtgaacaaattaattgaaaaaaataaacatataatcagagtaaaatacctgttctaataaacgcttcacaagatgtgttggccaagcaaggaaagt

SEQ ID NO: 13332 - DNA, 1035 bp, Glycine max
  Gm_smallRNAprecursor_6165
aatgtcgccgtctttgcattttctgggtcaacaaacatctttgtctttcgcctataccagaccatgtagtccgagttaaaactcaataggccttcttgtcggggataagcgtcgaccctaaatgcatgtcgattattccactgctgaatcattggggcgaacaattgccccaaattttcgtcatgtttcccctttaatgttatgccatgaatgtttaggggttgtgaaggagactctggaactggttgctgcatcccaaattgtctcaagactctgtccggttggtgccactcaataacttggaaataaattagtgggaccaccgcgtaccacgcgatacttccgactaaacaaaccagaggcaacaatgatataacggttgatgagtaaggctcccacaaaaactgcatataacaacatagttgtgaacattgtagtaaaataagacatataattttttattttacaaatacaatagcatggttcttacctcatgatgtttcataatatccaacttgcgacgaaaaactttcacatcatcattgccgatatgttggtttccacgtcgcagccacctacaaagaataaaatttaatataccctaaaaccatttattctattgaaatgaaagacgctgttaaaaatgactgacctgtgccctagtggtgtattttctatttgggaaggagtcctctttggagccaaggttggacatcgttcccatgcccacaattgtagtaagatgcacatacctccgattgatttagttttataatcggtggcactgcacatctctctatatagaaaaccaagtgcggcagctccccatgcatatctgccacattcttcaaagtcacgtaaaaattgaaggtaccttactgaaactctgttactggttttgtcaacgaacaagacacctccaataaatctcagtatccatgcacggacaaaccttcgtacttgttcttcatcgtcgtcattatttatttgatcaaaatggtgagccagccaacttaatttaattacattactttt

SEQ ID NO: 13333 - DNA, 1035 bp, Glycine max
  Gm_smallRNAprecursor_6166
caatgtagtcgtctttgcattttgtgggtcaacaaacatctttgtctttcgcctataccacaccatgtagtccgagttaaagctcaataggccttcttgtcggggataagcgtcgaccctaaatgcatggcgattattccactgatcaatcattggggcgaacaattggccccaattttcgtcatgtttcccttttaatgttatgccatgaatgtttaagggttgtgaaggagactctggaattggttgttgcatcccaaattgtctcaatactttgtccggttggtgccactcaataacttggaaacaaattagtggcaccaccgcgtaccacgcgagacttccgactaaacaaacgggaggcaacagtgatataacggttgatgggtacggctcccacacaaacggcatataacaacatagttgtgaacattttagtaaaataacacatataattttttattttacaaatacaacagcatgttcttacctcatgacgtttcataatatccaacttgcgacgaaaaactctcacatcatcattgccgatatgttggtttccacgtcgcagccacctacaaagattaaaatttaatatatgctaaaaccatttattctattgaaatgaaagacgctgttaaaaatgactaacctgtgccccaatggtgtattttctacttgggaaggagtcctctttggagccaaggttggacatcgttcccatgcccacatttgtagtaagatacacatacctccgattgatttagttttataatcggtggcattgcacatctctctgtatagaaaaccaagtacggcagctccccatgcatatctgccacattcttcaaagtcacgtaaaaattgaaggtaccttagcgaaactttgttactgcttttgtcaacgaacaagacacctccaatgaatctcagtatccatgcacgggcaaaccttcgtatttgttcttcgtcgtcgtcattatttatttgggcaaaatggtgagccagccaacttaatttaaccacactacctct

SEQ ID NO: 13334 - DNA, 1063 bp, Glycine max
  Gm_smallRNAprecursor_6167
atcgaatgaaccatttaaaaggcagaaatcataaagtgaaacgtaaattgcattcgaaatgtaaagtttacagaaatttaaaatggttcacaaacaaacatacattctccttgtgtactcgtttctctctgcgctgggtactttgagtgtataaggatttgtataaatgaattgcgaccccgaaatctgactaaaaactgctatatatagacattcgaaaataaactaccctaacggtcgaacactatccgaatgccatgtgtcctgccacgtacatcttacatgcacataactgctccttagaacggttatccatcttgctcgaagtcgaagttgattttgtgaagttttgtcggaaattgtgctaagtccagaaatctagctgcctcgatttcgactcgagtatacaccagttcgaatcgcccaatgattcgaagtcctctttcttgtcttagctttgtacttcgcaaatacttctttgaacctgggaataccttcttaaagactctcctctcttttcgattcgagcaagtcctgaccagactcttgctctgtaatacgcttcgaaactcgagacgacatctaatgcatacttagagcatattttagctcgtcgaaaatatgggctaacaaattgcccccaaaaaatgtccgcttcgattcgagatcgaaggaagatgagaagttgacattttttctcttcttctaccagttttcctgaaacggcgacacgatggcacgtttaatggtaaccgtcgcctcgatctcccacttcccatcattaattccacctttctaggcagagtgggacacgtgtcacgctggggagtcaaaagggaaatctgatgtgattgatttctgacccttgattattatattattttcccttttttaaagtgaaacctccataaatagcgccaaaaaacctcagagaaaccctttcagcttctttgcttctgaaacccttcttctttgctgattcgtatccattatctccggcgaggcttccttattctcagataaccacttgctactcctttcatcatcaaactcaccgaatctc

SEQ ID NO: 13335 - DNA, 1086 bp, Glycine max
  Gm_smallRNAprecursor_6168
aagtcttcaaaagaacaaggtgagaatcaacctgttgacgtccaaccaccttcgactgatgttgacggcactgaagcagaaactactccctctattgctgagatgggcaaccctgtcgagcaaccggacttaccacaagaacaacctaccgtcgaggtatcattcttaatgtaattttaatcatagcttatacgaaactatttgttaaccttttccatgacaattcgaatcaggtacaaaatgtttctgtagaagaaataccctcatgtgctcgaacctctcctgctcctgagacggatgcagtgaatgttgaggaacagggtgaaggtcaaggtattcgatccagcagtcctcatggatcgagtcagaaaagttcatctgaagaacacttttccgatgaagaagccatgcaagaggctgaagctggaggttcagacattttcccggcgtcttcgacatctaagctttccgctagcatagggatcgcagaggatacatttattcaaatgcaagacgaagaccctgctgcagcccttcgactcctgctgaacaccagtcaagccaacacctcaagtgaaaaaattcctggtgcttcgtcctcatctgatgctgacatgacctcttcagtacgccaagattgcctgcttttgaagttatcaatggaatacgcacgggcagacgtacttaaatccattgaagagaacccctccgctgcttttgggcacttgaactttttgaagaaattgcacaaccctctcacttctgacgagattctaggcaaagttatccaaatcgagtctattatcaatcaatttgcaagtactgtgcagaaaaagcgcgaaaatgacgccagactggatgcccagaaacaggcacatatccttctgctcgagaaagcccgagcagctcaacaagaagtcgaacgtcttaccaaagaggcaaaagaaaggtcttctgacgtcaaagcctgtgatgataacatttcctcctgggaggcaactattacgaatttactgtctcaggtcgatgatctaaggcagaaaattgtaacagagcaggccaaacgcaaggaactccaggagaagg

SEQ ID NO: 13336 - DNA, 1110 bp, Glycine max
  Gm_smallRNAprecursor_6169
tgatcaacatttggcaaagggactgcttcgatccattttgtaaagtaatcgataccaactataatataacgctggttcttagaagaagcaggcttgatttcaccaattaagtccaaagcccatcctctgaaaggccaaggtttgattatggagtgtaactcactagcaggtacatgctgtatccctgcatgcttttggcactcctgacagcctttagcaaattctatgcagtctttcaacatcgaaggccaatacaaaccttgccgaaataaaagccatttcattttatggcctgcttgatgtgatccacaagccccactgtgaacatgggaaactgccaagtatgcttctgattcacttagacattttagcaatactccttctgcagtctttttaaacaaatcatttcccataatcacgtaatttaaagccctatatttgatctttcgagccacattgcctattggattttccaaatattcaataatggactttctccaatcattatctaacatattgtcaatggccaaaatttgaattttttcctgaagatcattcatactttcatcttcattattttgtggtatacttgcccccacaagttttggcattggcaatttagtgcttaatggctctggtaacaccagtttatcttttatttcgatcaactgagttaacttttccttcgacattttgtatcctgaagctatttgggctaaatcatttgcttctcggttttcttgtcgaggtacatgctcaatgttaatataatcgaaatgattcagaagagaacttgctataacaaaatattttgctaaatgttcattaacacatttgtattcttgtgttaattgcctcaacactaattctgaatcacctcttatattaacatttcttgcccccaggctaattaaaatttcaaggcctgtaattagagcttcatactcagcctcattattagaacaaagccctttgattttatatttgaacttagttggaactttattgggggatattattaaaactccaattccagttccatgtttgtgtttcgatccatcgaaatacaaaatccaaggctctgtatcgacataatcttgcggcatctcg

SEQ ID NO: 13337 - DNA, 1083 bp, Glycine max
  Gm_smallRNAprecursor_6170
caaagggactgcttcgatccattttgtaaagtaatcgataccaactataatataacgctggttcttagaagaagcaggcttgatttcaccaattaagtccaaagcccatcctctgaaaggccaaggtttgattatggagtgtaactcactagcaggtacatgctgtatccctgcatgcttttggcactcctgacagcctttagcaaattctatgcagtctttcaacatcgaaggccaatacaaaccttgccgaaataaaagccatttcattttatggcctgcttgatgtgatccacaagccccactgtgaacatgggaaactgccaagtatgcttctgattcacttagacattttagcaatactccttctgcagtctttttaaacaaatcatttcccataatcacgtaatttaaagccctatatttgatctttcgagccacattgcctattggattttccaaatattcaataatggactttctccaatcattatctaacatattgtcaatggccaaaatttgaattttttcctgaagatcattcatactttcatcttcattattttgtggtatacttgcccccacaagttttggcattggcaatttagtgcttaatggctctggtaacaccagtttatcttttatttcgatcaactgagttaacttttccttcgacattttgtatcctgaagctatttgggctaaatcatttgcttctcggttttcttgtcgaggtacatgctcaatgttaatataatcgaaatgattcagaagagaacttgctataacaaaatattttgctaaatgttcattaacacatttgtattcttgtgttaattgcctcaacactaattctgaatcacctcttatattaacatttcttgcccccaggctaattaaaatttcaaggcctgtaattagagcttcatactcagcctcattattagaacaaagccctttgattttatatttgaacttagttggaactttattgggggatattattaaaactccaattccagttccatgtttgtgtttcgatccatcgaaatacaaaatccaaggctctgtatcgacataatc

SEQ ID NO: 13338 - DNA, 1157 bp, Glycine max
  Gm_smallRNAprecursor_6171
caattctactgtgtaaaatcggtttggacaacatgtgcttaataatatcataatgagaatacacataaacatcaacaggctttatatattgcttaagttttgcacaagagaaatacagacaaagacaaagtttttctatggcagtatatctagtttctgcatcatttagtacacgactaagataataaattgcatgttctatgccatcatcatcttcctgagccaacatgctaccaatggtcttgtcagacgcagcaatatacaacttcatagacttgtttcgactaggaggcattaacacaggaggcttgatcagatattctttaatttcatcgaaagccttttgatgctcttcattccatttgaatggttcatctttcttgagtcgaagtaatggcgaaaaaatctgagctttgccacttagattcgaaatgaatctcctcaagaagttgatttttcctagcaaagactgaagctgttttttggtcgaaggaggcttcgtctcaagaatagcctttgtcttattttgatttatctcaatgccttttttatgcaccacaaaaccaaggaaatctcctgcacgcacacaaaaagcacactttaatggattcatttttaatccatgtttcctcattcgttcgaaagattgcctaagataatccaaatggctatcttctgaggaggatttgatgattatatcatcaatataaatttgcataaatgtgtcaataaaatcatgaaacatggaattcatggccctttgataagtggccccagcatttttcaacctaaaaggcataaccacccattcataagtgcctaaagcaccagggcatcgaaatgctgttttcgacacatcattttcagcaataaatatttggttataaccagaataaccatctaacatgcttaaaaattcgaaaccagctgccgaatctaccaacatttccgctactggcatagcatattcatctttaggtgtagcattatttaaatccctaaaatctatgcatactctaagagttccattctttttaatgacagggactatatttgctaaccattcgacatacctggcagctctgatgaatttacacctcagcagcctttcgatctcttccttgatcttggacatgatttctggtgcgaatcttctt

SEQ ID NO: 13339 - DNA, 1039 bp, Glycine max
  Gm_smallRNAprecursor_6172
atttctggtgcgaatcttcttggtagttgttttactggtctttttccctccttaataggtaacttcatttcgaccatttttctgcttaacccaggcatttcgtggtaatcccaagcaaaacagtctttaaactctctaagaagaggcaccagcttttcttttaaacttgaggtgatattggcactgatataagttggcctattaatcgagccatctccaatatcgacctcttccaaaggatcttgagcctgcatctttgacgcctcacttatgggatttttctcaaaacccagcggctcatcatcataaatacaatccagtcttcgatcctttgtttctttgttttgatgatcttcgatcttggcttcaactgccatattttgttgagattcagcctcaaaggccgtatttagtctattttcggccatataagccgtaattctggcccatgcagtggcctcagtcatattaatcttcatatgtattccacccagttggtggaatgactccatcttcagagggaacagcatcaatttcctccctctcccatataaacccataggtaggatggagtttgacagagtggacaacattgtcactcgattcgacaacagcctccttgtcaccacaaggtgctatgttagccaactttttgtcaaaggtttgtgcagtaacattatcgacctctgacttatagaagctttgatccgcctctatattttctacaatcccatcctccctccagataatgagcttctggtgaagggtggatggcacagccccaactccatgaatccactcccttcctaatagcaagttaaaattagccttagactgtatcaccaggaaaagagttggtcgaactatactgcctacagcaacatctacttgaatggctcccaaagaatagccagttttaccctcataattcgacagcacaatgttgtgggcagatagatcagtgtcatgtttcccgatcttgtagagcatggatcggggcattaagttgacagccgctcctccatcaatgagcactttg

SEQ ID NO: 13340 - DNA, 1063 bp, Glycine max
  Gm_smallRNAprecursor_6173
atcgaatgaaccatttaaaaggcagaaatcataaagtgaaacgtaaattgcattcgaaatgtaaagtttacagaaatttaaaatggttcacaaacaaacatacattctccttgtgtactcgtttctctctgcgctgggtactttgagtgtataaggatttgtataaatgaattgcgaccccgaaatctgactaaaaactgctatatatagacattcgaaaataaactaccctaacggtcgaacactatccgaatgccatgtgtcctgccacgtacatcttacatgcacataactgctccttagaacggttatccatcttgctcgaagtcgaagttgattttgtgaagttttgtcggaaattgtgctaagtccagaaatctagctgcctcgatttcgactcgagtatacaccagttcgaatcgcccaatgattcgaagtcctctttcttgtcttagctttgtacttcgcaaatacttctttgaacctgggaataccttcttaaagactctcctctcttttcgattcgagcaagtcctgaccagactcttgctctgtaatacgcttcgaaactcgagacgacatctaatgcatacttagagcatattttagctcgtcgaaaatatgggctaacaggtatgttcttaatttattctttgaatgaaagagacatctagttttcaatagttattgttgatagtggaatattgaaaataagtttaaaaaacttatggaaacttacaagataacttcacataatgattctagtcaacaaataaaattgttcctaagtttgtgggacttagaattacagaattcaaggatgtgaattctttttatccgaataaatggcttcacatgcaccaagttgtgaaaaatcaagtcattcaaattctatagtagtctttgttgaaaagaaaacatactgaaatttgatttctagtaacagatttgaaggaatgtaacaattttgcaccttctgatgaaaatataaatttgtatgtaaaatatgtaatttttgatcaatgagatatattcaataaagcattttggaaaatgatttcaa

SEQ ID NO: 13341 - DNA, 1054 bp, Glycine max
  Gm_smallRNAprecursor_6174
tgctttaatagctgaagcaatcgataacactatgggcatttccatgacaaataacttggagttcccttgtaacatgctagatcggctagggagaaatactcttttatcattgacaaggttgaaaggcatttggttggatagaagactcaaagcctaaagttactttatctctagactttgttatgagccttggttttatagtattcaagagaatagagagtgttgccagttctcctttttattcaactccacattgaatgccaatgacaagcagaattctgcttatctgctattccttccttagttcttgtgcagttgtgccaatgacatttcagttattattttcttcttctggagttggttgaaggaattatcaaaagatttctcgtactcacgcacagtgggcagcatctccaggggattacttctatgctatgaagtacggacactccagtcccttgccgtgtccggtattcgacacgtgtccatgtcagtgtctgacaccgacacgacacccatactacgttctatattttggacattacaggtgtctacgtgtccgtgtcgtgtccggtgtccgtgtcggtgcttcatagcttctatgagcttatgtagaagtgatctttgtgtcttctactgttttgtgcttgtttggatcgtggctgtatggtgattttttagcacatgttttgtaaggattctggtcttcagcatgtggggatggacaattactttgtagggtgcttcatgtggttggttacttcatatttatatgtttgcatggtaaatgtcgagtaaccaattatggaaatatacttgttttttatctatgtaaatgtgttttggtaccccttgtacctctttattaatatacatgttatttgctgataaaaaaataaaatgaagggatatattgattcattcaaattgaagagtagttttacttcatttgaattgacaagaagtcttgctttaatctaaggattataatgtttcatgcaacgcattttcacctgtcacctaaacgacaaatattagtagtaatattgaacgt

SEQ ID NO: 13342 - DNA, 1065 bp, Glycine max
  Gm_smallRNAprecursor_6175
tgctttaatagctgaagcaatcgataacactatgggcatttccatgacaaataacttggagttcccttgtaacatgctagatcggctagggagaaatactcttttatcattgacaaggttgaaaggcatttggttggatagaagactcaaagcctaaagttactttatctctagactttgttatgagccttggttttatagtattcaagagaatagagagtgttgccagttctcctttttattcaactccacattgaatgccaatgacaagcagaattctgcttatctgctattccttccttagttcttgtgcagttgtgccaatgacatttcagttattattttcttcttctggagttggttgaaggaattatcaaaagatttctcgtactcacgcacagtgggcagcatctccaggggattacttctatgctatgaagtacggacactccagtcccttgccgtgtccggtattcgacacgtgtccatgtcagtgtctgacaccgacacgacacccatactacgttctatattttggacattacaggtgtctacgtgtccgtgtcgtgtccggtgtccgtgtcggtgcttcatagcttctatgagcttatgtagaagtgatctttgtgtcttctactgttttgtgcttgtttggatcgtggctgtatggtgattttttagcacatgttttgtaaggattctggtcttcagcatgtggggatggacaattactttgtagggtgcttcatgtggttggttacttcatatttatatgtttgcatggtaaatgtcgagtaaccaattatggaaatatacttgttttttatctatgtaaatgtgttttggtaccccttgtacctctttattaatatacatgttatttgctgataaaaaaataaaatgaagggatatattgattcattcaaattgaagagtagttttacttcatttgaattgacaagaagtcttgctttaatctaaggattataatgtttcatgcaacgcattttcacctgtcacctaaacgacaaatattagtagtaatattgaacgttgagatgagac

SEQ ID NO: 13343 - DNA, 1051 bp, Glycine max
  Gm_smallRNAprecursor_6176
atttaagatattttttggtgaatatatattttaaaatctgaattttgtataataatatatttattttagtaaatatttattttgtataataatctgaattttaaaatttttaatttaactattttattaaatataattagtttgtttatgttattagatttaattaaaaatgataaaactaaagcttttaacaatttatttatataagaacattatactacgtcatcaataaaatatttaaacaatgacatttgtctaaggaaaaactaagatgaggatacattaggacaattatttctgctatgaccatgttgccggcaaagtccacatttttttctacttgctcgttcattttcgtcttcgtccatctcagtaggaatgcgagttgaaacgggacgaccctttgcagtcctctttctccttggatcaggaccccactgatctccttcatattcttgccacattgattcgtgtggcaataaaccaaaggagttgtcgtagatgtgcaaaatgtgttgtaaagtgaatatcatcggcacataggtcatgggatcaacattgacagatttacaggcagccatgacgtgagaacacggtaaatgtttatcctgaaattcaccacaatcacacttttgggattgtaacattactctaaaccttccaggtggtctgggtgtttcaagtggggattgagtctcggttataataaaagtgtgattgtgtctgtcgaattcatttacaatgtgtgtattagattcttgttgaccactattgattgcatcgaagaagacttcagaatactgtgagccggagttgatcatttcctgagtttgtcgacctctattagcaaagagttgtgcggtcttgaaataggtctcctcaaccaatgatgacaccagcaaatgtcttgtgttttttaacatgaaattaacagactccgacaaattggtagtcatatgtccccaacgtttcccctcatcaaagcattgtacccatttttgtttgggtaattgatcaagccattcagctgcacttggcttattcgcacgaa

SEQ ID NO: 13344 - DNA, 1167 bp, Glycine max
  Gm_smallRNAprecursor_6177
aataatatatttattttagtaaatatttattttgtataataatctgaattttaaaatttttaatttaactattttattaaatataattagtttgtttatgttattagatttaattaaaaatgataaaactaaagcttttaacaatttatttatataagaacattatactacgtcatcaataaaatatttaaacaatgacatttgtctaaggaaaaactaagatgaggatacattaggacaattatttctgctatgaccatgttgccggcaaagtccacatttttttctacttgctcgttcattttcgtcttcgtccatctcagtaggaatgcgagttgaaacgggacgaccctttgcagtcctctttctccttggatcaggaccccactgatctccttcatattcttgccacattgattcgtgtggcaataaaccaaaggagttgtcgtagatgtgcaaaatgtgttgtaaagtgaatatcatcggcacataggtcatgggatcaacattgacagatttacaggcagccatgacgtgagaacacggtaaatgtttatcctgaaattcaccacaatcacacttttgggattgtaacattactctaaaccttccaggtggtctgggtgtttcaagtggggattgagtctcggttataataaaagtgtgattgtgtctgtcgaattcatttacaatgtgtgtattagattcttgttgaccactattgattgcatcgaagaagacttcagaatactgtgagccggagttgatcatttcctgagtttgtcgacctctattagcaaagagttgtgcggtcttgaaataggtctcctcaaccaatgatgacaccagcaaatgtcttgtgttttttaacatgaaattaacagactccgacaaattggtagtcatatgtccccaacgtttcccctcatcaaagcattgtacccatttttgtttgggtaattgatcaagccattcagctgcacttggcttattcgcacgaatatccccaagatgtcgccagtgcatcttctccgtgtatgcgtaccctgtaaatatttaatcaatgtattatgttataaaatttgattgaaagaaaattataacgaataaataaaatagattttcaccagccaacataagtggtttctttaaatgtttgcagtttga

SEQ ID NO: 13345 - DNA, 1185 bp, Glycine max
  Gm_smallRNAprecursor_6178
gtttgggtaattgatcaagccattcagctgcacttggcttattcgcacgaatatccccaagatgtcgccagtgcatcttctccgtgtatgcgtaccctgtaaatatttaatcaatgtattatgttataaaatttgattgaaagaaaattataacgaataaataaaatagattttcaccagccaacataagtggtttctttaaatgtttgcagtttgagttaccacgaagaaagttttgtgcaatgtggcacaggcaaaagaaatgggatgtgtcctggacccataagttacttgggttgttgtaggcacttataattgaggagtgtcggtctgaaataagagaaatgttaatttgcggagtaacatgtcttctcaaattctttagaaaaaacctccaagctgaagttgtctccccttctacaatggcataggcaatcgggaagatatggttagctccatcttgtgcggtagctatcaacagtgtgccagtatactttccataaagccatgtaccatctacttgtacaatgggtttgcaatatgcaaaaccattaatgcatggaccaaatgaccaaaagacacgtttaaacaatcttttgctcggtactatttctcccccctcatacaaggattctgtttgagcagcgaccacagtcccgggaacacaagattgcaaagctccgaaaagttttggcagtttggcatatgattcttcccagtttccatgaatcatctccaatgctttttgctttgctaaccatgtcttcttgtaggatggggtataattcatgaacgttttgatctctgcaatcaatgtcttgatgaagacagttgggtttgttttgacaattggttggatgatctgtgttatgacgtgtttgtcgagttggcgatgatcttgtctaagcatcggcacgagacaagtgtgatgacctctgatactcttgataatccatttgttatgcctctttgaattgcatgcgcccaagctccatgtacaaccattttcatgtaacttgcagacgaagtgtagccttctttggtcagagtaaattgttctgcaatcaaaatgatttctgatgttgtattctttgattgctcgaatacattgtgatttgtcatcgaatgtcatgccaacctcgagtacaccgactggtggttgcacattgtgttgctgataaacaa

SEQ ID NO: 13346 - DNA, 1040 bp, Glycine max
  Gm_smallRNAprecursor_6179
attcgcacgaatatccccaagatgtcgccagtgcatcttctccgtgtatgcgtaccctgtaaatatttaatcaatgtattatgttataaaatttgattgaaagaaaattataacgaataaataaaatagattttcaccagccaacataagtggtttctttaaatgtttgcagtttgagttaccacgaagaaagttttgtgcaatgtggcacaggcaaaagaaatgggatgtgtcctggacccataagttacttgggttgttgtaggcacttataattgaggagtgtcggtctgaaataagagaaatgttaatttgcggagtaacatgtcttctcaaattctttagaaaaaacctccaagctgaagttgtctccccttctacaatggcataggcaatcgggaagatatggttagctccatcttgtgcggtagctatcaacagtgtgccagtatactttccataaagccatgtaccatctacttgtacaatgggtttgcaatatgcaaaaccattaatgcatggaccaaatgaccaaaagacacgtttaaacaatcttttgctcggtactatttctcccccctcatacaaggattctgtttgagcagcgaccacagtcccgggaacacaagattgcaaagctccgaaaagttttggcagtttggcatatgattcttcccagtttccatgaatcatctccaatgctttttgctttgctaaccatgtcttcttgtaggatggggtataattcatgaacgttttgatctctgcaatcaatgtcttgatgaagacagttgggtttgttttgacaattggttggatgatctgtgttatgacgtgtttgtcgagttggcgatgatcttgtctaagcatcggcacgagacaagtgtgatgacctctgatactcttgataatccatttgttatgcctctttgaattgcatgcgcccaagctccatgtacaaccattttcatgtaacttgcagacgaagtgtagccttctttggtcagagtaaattgttctgcaatcaaaatgatttctga

SEQ ID NO: 13347 - DNA, 1105 bp, Glycine max
  Gm_smallRNAprecursor_6180
ctaaaataaaaataaataatttaatattaattcatccacattttaatttttacattccctctaccttcaaattcttttttttatccctctttcctctcctatcttccttcaaactccacttttcattatttttattttgctattcgattttcaaataataaaatcactatattaaatagtactagtaatggatataacaggggaagggtttcagacaaattcggtacactaatactacatgtgcatttatcatgatttgtcctccggtttgtcggtaatggagtaggtagggaatccaacaattaacacgtgttgaaacattgactgctttggacggatgcatgtgtaagtagtttaggaaagggaatattataaaattggtcttactttatttttaattttgaatttaatcactcaattttttaattcacgaatttggtctttttattttacaaaatcatgtaatgttgatcttccgacgtttactgttaacaagtaatgttaacggtcacatgtcacgttcttataattgtcatgtattatgttttgattgaatgtcaattccattaaaaataaaatgtattgttattttcattaatcaatcagaacatgacacgtgacagtcatcatttaataaaatcgtaacacatgacatttaatattcctttataacagtcaacgtccaattgtgatatgaaagatcaacattatacaattttataaaatagggggaccaaatttatgaattaaaaaattgagagtaaatccaaaattggagatatcaattttataattttgcctttggttggccctccgtatatatacgtagatgcttttagtttgggagtattatttgagaagagtggttctaaagatagcttacttcctacacaaacctgtatatatatatatatatatatttgagaagagtaatatacttttttaattgataaaatttattgtatattgtatagacaatttaaaatatttttttgggtactttttttataaaaggcttttttataagctaaacttttattagaatttagtggtgcataataagacgtgcccacagaaggtcaccaccgtacaataaatcgaaact

SEQ ID NO: 13348 - DNA, 1106 bp, Glycine max
  Gm_smallRNAprecursor_6181
ctaaaataaaaataaataatttaatattaattcatccacattttaatttttacattccctctaccttcaaattcttttttttatccctctttcctctcctatcttccttcaaactccacttttcattatttttattttgctattcgattttcaaataataaaatcactatattaaatagtactagtaatggatataacaggggaagggtttcagacaaattcggtacactaatactacatgtgcatttatcatgatttgtcctccggtttgtcggtaatggagtaggtagggaatccaacaattaacacgtgttgaaacattgactgctttggacggatgcatgtgtaagtagtttaggaaagggaatattataaaattggtcttactttatttttaattttgaatttaatcactcaattttttaattcacgaatttggtctttttattttacaaaatcatgtaatgttgatcttccgacgtttactgttaacaagtaatgttaacggtcacatgtcacgttcttataattgtcatgtattatgttttgattgaatgtcaattccattaaaaataaaatgtattgttattttcattaatcaatcagaacatgacacgtgacagtcatcatttaataaaatcgtaacacatgacatttaatattcctttataacagtcaacgtccaattgtgatatgaaagatcaacattatacaattttataaaatagggggaccaaatttatgaattaaaaaattgagagtaaatccaaaattggagatatcaattttataattttgcctttggttggccctccgtatatatacgtagatgcttttagtttgggagtattatttgagaagagtggttctaaagatagcttacttcctacacaaacctgtatatatatatatatatatatttgagaagagtaatatacttttttaattgataaaatttattgtatattgtatagacaatttaaaatatttttttgggtactttttttataaaaggcttttttataagctaaacttttattagaatttagtggtgcataataagacgtgcccacagaaggtcaccaccgtacaataaatcgaaactt

SEQ ID NO: 13349 - DNA, 1052 bp, Glycine max
  Gm_smallRNAprecursor_6182
ttaataaatttatgaataaaatattttcagaaaataacctcgagtagaccgtgatagtattttgatcactaattgatggaatcttggagtctgcttgtatatctatgaatagaaaaatagccccacgagtggcatggatgatatcttttaaaggccataaattattttcaaggaaatcaaagaatttgttaaaggcggaagggtcttaaaaatagaaagaaagaatatgctatgtaatgaaacttctcctatacagtggggtccccacccgtgcaacacgagagtaatttatttcatttactatttagtactatatcattaaataaagagtgttgctaggtgcacccaacacttaacatgaaaagataaaaatatccctatgtatttttaaaaatatttttgtgcactcagcttattcatattgattggtatatgtaatgagttgatccgcataggttttagttgatccaaagctgatatagatgatccacagtagatttttaagacttacggatcaagttgatccgcaagttgatttttaagatttacggatcaagttgatccgtaagtcttttatggatcaacttgatccgttacggatcaagttgatctgcaagttgatttttaagacttacagatcaagttgattcttaagtcttttatgaatcaacttgattcgtgagcttcttatggaccaacttgattcacaagttgatttttaagacttatggatcaacttgatccacaagttgatttttaagacttacggatcaagttgatccgcaagttaatttttaagacttatggatcattacggatcaacttgatccgtaagctttacggatcaacttgatccataagctttacggatcaacttgatccgcaagcttcttacgaatcaagttgatccacaagttgatttttaagatttacggatcaagttgatccgtaaaagacttacggatcaacttgatcggtaagtcttaaaaatcaacttgatcctcaagttgatccgtaaagggagaaagaaggcaaggataattttgccattt

SEQ ID NO: 13350 - DNA, 1040 bp, Glycine max
  Gm_smallRNAprecursor_6183
aagactttatttaataaacacttgatgaatatgcctacttaaacacattttattttgaagtcataaaattagtttaatattgagaagagagatttacatttaagatttacttgattaaagagaaaaaggaaagagaagttgcagctttgtattcttcattaatattctaacaaaagattaactactagcatttgtaaatcaaataaaaattgattaaaaaactaaaagaatccaactctcaattagttaagaatgaaggttgttataaacctcttcatacatgttattcttacgagtcaaaatatgaatcagaaaaaaaaaaacatttgattaaaagcgaactacattgggaagttaatgggcgtaattggacattgggcctaatgggctgtttgctaagcacccgcaacgacatttaattcaactgagtgttactaggtacatccagcattctttgaaaatgacaaaattatttctgccaatttctctccttacggatcaacttgatccgtaaaagacttacagatcaacttgatccgtaaaagacttacggatcaagttaatccgtaagtcttaaaaattaacttatggatcaatttgatccgtaaggggtatttctgtcttttcgtggttagtgttggatgcaccaataataatgttgggtgcacctaacaacactctaattcgacggacaattggctaacatcgggagggagagaaacttgactaaaaaacaaaacaaaaacaaactagtctggacaacaaataattgggcaatcagagagcgagcctaacccattaagaattaaccaaagtcaagtaaatattggtttcaagaagtatttaaaaaaaattctatttttatatttttttatttaaaaacattcttaataaaaatattcgtatatgagatctaatattcacatctagatttttatcattttttgtattataaatctaaggagtatattggattagggtttaaaaagattattttactaaaaaacaagtcttgtgaattttaaagattatataaaaat

SEQ ID NO: 13351 - DNA, 1062 bp, Glycine max
  Gm_smallRNAprecursor_6184
gaaaactttgagcattaacagatcgaaggaagcaaggaagagattagggtttccatgtcctaagccaaccaacaaatatagtaaatatttagcgaggactgagagaacgcaacctaatacaaagaaggaaattaaggcatgttagtgctaccaacctctcccttttatctctaatttgcgtagccaacttattagggtctgcagaagaagaaaacaaaacagcaagcagtatggtggtaataatcctttcgggaggaggagaaagtcatggtcttcgtatcatatataagttagatgataacagatcgaacacagtattgtataagcattacaagaatcacgattaagtatatatttgaaaaatatatatagaaacagaaaaataatggtttagggagatcgatgtaacgttgtggtggctctttcttttatttaccttttaattgttgagagatgaataaatatcatgaaggctttacaaagagcagacaacagaactcagttgacagtatgcccacctccaacttcacgaacatgtggctcagagagagagtaggaagtggaggtggacagaatgccaataaactctgttagcaaccctttgctaaaccctcatgaagagaagaagatagtgtgaaggaatattgaataagaagttgagggtgtgtgaatcgtgatggctgcagcggcaggtatttaagatgtgatggagcttgacttacttcacagtaaatgaaatgagagagagagagagagaaaaaaaaaactaaattaactacatagtattattaatattaggtaaatgtttatcagtattataagagtactagttatgaaatttaaaataaaatattttcattagaaaacaaaagattatattatctgtaattttttttataatttatataataaacatttttaaaattttaaattaatattctaaaagacactaattagatacgccttggtatcattattatcccattactgaaaagaaaaggaaagaagtgaagggaaggagacgtagtcgcaggcgcaaaagattgataagcgattgagact

SEQ ID NO: 13352 - DNA, 1135 bp, Glycine max
  Gm_smallRNAprecursor_6185
tgagctgaaaataggatagttgacaacatgacatgattcatcattaatttcaatgggattaggttgatgcaaagacagtaacagatagtgattttttaaccgtgtatgtttacgtagtaaacccaagagaatcagcctagcccctcgttgaagattagatgtgcgtaaacaaagaaactttatagaagctgatgcattgcacagacagattatcgagtcaggatatcgattagtcttgtttttctttttattatatctatatttttttaaccaggaaatataggattcgattaagataatgttcaaacaagaactagtgttatagtgttaagttgttgtgaaagttgttaatgaactctagaaacaaaataggagaattgatgtatcaggtacaatgtcatatggttaggaagttaagacggaacttacaaagattgttcaagacagatatttgagaattcgtgttcataagaaagatgactatgatcgctttatagatgatgtatattgtcatgtcatttttgtataggtattcattgatttcaagtatatattttgtcatttcaagtatatatattaatgtatacacaaagagaataacaaaatgtatacttgaaatggatgaatacttatacaaaaatgacatgacaatatacatcacctacaaagtgatcatagttatctttctcgtaaatacggatccacaaatatatatcttgaacaatctttgtaagtttcgtcttagcttcttagccatatggcagtgcaccttgtgcatcaatttcccttatgcattaatttttctattttgtttctagagttcattaacagtttccataacaaattgacactctaacactagttctcgttagagcattatcttaattgaatcatatatttcctgattatgatttcctgatttttaataagaattgtcttaaataagcaaacaattaaaagagaaataccaagaatcgataatatgtctgtgcaatgcattagcttctataaagttcctttgtttaggcgcatctaatcttcgacgacaggctgcaagtacatggactgggatcaaggctgattttcttgggtctactatgctaacatatacggttaaagaatcattatctgtgac

SEQ ID NO: 13353 - DNA, 1131 bp, Glycine max
  Gm_smallRNAprecursor_6186
agctgaaaataggatagttgacaacatgacatgattcatcattaatttcaatgggattaggttgatgcaaagacagtaacagatagtgattttttaaccgtgtatgtttacgtagtaaacccaagagaatcagcctagcccctcgttgaagattagatgtgcgtaaacaaagaaactttatagaagctgatgcattgcacagacagattatcgagtcaggatatcgattagtcttgtttttctttttattatatctatatttttttaaccaggaaatataggattcgattaagataatgttcaaacaagaactagtgttatagtgttaagttgttgtgaaagttgttaatgaactctagaaacaaaataggagaattgatgtatcaggtacaatgtcatatggttaggaagttaagacggaacttacaaagattgttcaagacagatatttgagaattcgtgttcataagaaagatgactatgatcgctttatagatgatgtatattgtcatgtcatttttgtataggtattcattgatttcaagtatatattttgtcatttcaagtatatatattaatgtatacacaaagagaataacaaaatgtatacttgaaatggatgaatacttatacaaaaatgacatgacaatatacatcacctacaaagtgatcatagttatctttctcgtaaatacggatccacaaatatatatcttgaacaatctttgtaagtttcgtcttagcttcttagccatatggcagtgcaccttgtgcatcaatttcccttatgcattaatttttctattttgtttctagagttcattaacagtttccataacaaattgacactctaacactagttctcgttagagcattatcttaattgaatcatatatttcctgattatgatttcctgatttttaataagaattgtcttaaataagcaaacaattaaaagagaaataccaagaatcgataatatgtctgtgcaatgcattagcttctataaagttcctttgtttaggcgcatctaatcttcgacgacaggctgcaagtacatggactgggatcaaggctgattttcttgggtctactatgctaacatatacggttaaagaatcattatctgtg

SEQ ID NO: 13354 - DNA, 1038 bp, Glycine max
  Gm_smallRNAprecursor_6187
aaaattcagtatacgtcagccatgtgattagttttcttaagacccggaccattatacaaaaggattgtggcaaatgttattaatctctttctatgtattcatgccaagcctaacatgatgctctatcttttcacagtattcagcaaagcttttgaagaaacctgatcagtgccgagcagtttatgcatgctctcatctcttttgggttgatgatcaagatggtattaaagatggagaaaggtatgctggtaactgctcaaattggtttaactaggatgattatatcggtttcatgcatctttgcctcttacttatgttttctgaaataatgatcttctttcgacaatatggaatcaagtttcataaagtatttatgcttctgcatcataaaaaaaaaacttcgtaccccattgcccagaggctcttcgctatgcgaaggtatgggggagggatgttgtacgcagccttacccttgcatatgcaaagaggctgtttccggattcgaacctatgaccaacaagtcaccaaggcacaactttaccgctgcaccagggttcgccctctatgcttctgcatcatgatttatcaaatgtaattatggctctgcataattgatgcacatgtttagaattgcttaaattaatttggggtagaactttactgtatgctgaacagtcttcaaattgtcatctttcgtcttttctgtttctttctcttggggtggggctgttgactgtttgattacagggtattgctttgccttaagcgtgctttgaggattgcaaatgctgctcaacaaatggccaatgcagcaaggggtagcagtggtccagtgacgctctttgttgaaatactgaacaagttggttaccttttgctataaaactacttgttatactatcttcatgactttcttacttacggatgagagtgggttccaggtacatttactattttgagaaaggaaacccgcagatcactagttctactatccaagggcttatagaattgatcatgaccgagatgcagagtgactctg

SEQ ID NO: 13355 - DNA, 1097 bp, Glycine max
  Gm_smallRNAprecursor_6188
ataatgaacgaaaatcttacttagaataacactccaaacaataatatttttaaaaatatgcatatatatatacatataaatatatttaaatatttattgaaatatttattatatatatttattaaaatttaataaatatatatagtaaatatttattaaatttagtgcattcgttttcttttcttgcttgcgaaagctgtacagtgttagtgcattcgttttcttgttgcagccgttttcttggtgggtagtccaatgaaggtcttagccgctctgtcttgctacttttcaaaaactcattcaacactccttccatactagaaacctggataaacggcacagtttgttgtgaatgggatggagtcacgtgcgacatcatctcaggccatgtcatggatcttaaccttagcttacttaatcttcaaggtcagtcttatcccaactgcaccatcttcagcctaagccaccttcaacaacttgatctaagctccaattacttctttggtgacatttcctccacaatctctcacttgtccaaattacagtcacttgacctcagtttcaactccgtgagaatgagacttgattcatacacatggaacaaactcattcaaaatgctactaatttagcagagcttcatttaggtggtgtggacatgtcttttatcgaaaatagctcaatgtcattgctaacctatttgtcttcctctctcatctctcttattatctcacagacaccaaattagatgggaagttgccaactgaaagcctcttacccaatcttataagactgtatttgaatacaaatgaaaagctgagagttgaactttcaacgtccaactggaatactactaaggctcttggatctctcttatattgctttctcaggaaacattcccgattccattggccatttgaagtctcgaactatttttgagtagttgcaattttgatggaatggttccctcatcattgtttaatctaactcaactctccattttagatcttagcaacaactcacgaaccaattggtgaattctcatcttattctttcaaatacttgtcactctccaagaacaaattgcaaggtaattttc

SEQ ID NO: 13356 - DNA, 1064 bp, Glycine max
  Gm_smallRNAprecursor_6189
taatgcttcttcagtattcaagcataaggatcatcactcaatcatttgatgttgtaggatgaacttctaaattaatagttttaaaatagttagtggatgattatgtttttttgtcatgtttttcgcttcctaattttgtatatgaaaaagtgttttgttccaagtgtagaatttatttcaatgatttttacactttaaatgattgtatatgttttcaattcatgtaaataggatactgtttactttagtcactttaaattaaattagcctattttgatctctcatttataaaaatatgctatagtaatctttattttcataaattaaggagaaaagataaaattgaattcactaaacacttaacacattgaactgactcattgcatttaggagcatactgacaaggctcctaaaagatcatatgctgttaaacatgtctgtaactttgcctgtgttagcccatattttcgacgagctaaaatatgctctaagtatgcattagatgtcgtctcgagtttcgaagcgtattacagagcaagagtctggtcaggacctgctcgaatcgaaaagagaggagagtctttaagaaggaattcccaggttcaaaggagtatttacgaagtacaaagctaagacaagaaagaggacttcgagctattgggcaattcgaactggtgtatggacgagtcgaagtaatttctgaacaaatcttcaccaaattagttcgatctcgagtaatgtggataaccgttctagggagcggttatatgtgcatgcaaggtgtacgtagcaggatacttggcgttaggatagcgttcgaccgttagggcagtttattttcgaaaatctatatatagcagttttttagtcagatttcaaggtcgcaaatcatttctacaaaatccttagatactcaaagtacccagcgcagagagaaacgagtacacaaggagaatgtatgtttgtgaaccattttaagttttctgtaaactttacatttcgaatgcaatgcatttttcatttcactttagaattcctgtcttttaaatggttcattcgatcga

SEQ ID NO: 13357 - DNA, 1040 bp, Glycine max
  Gm_smallRNAprecursor_6190
agttgagaatgttggaatcaacaaagtgctcattgatggaggagcggctgtcaacttaatgcctcgatctatgctctacaagatcgggaaacatgacacagatctatctgcccacaacattgtgctttcgaattatgagggtaaaactggctattctttgggagccattcaagtagatgttgctgtaggcagtatagttcgaccaactcttttcctggtgatacagtctaaggctaattttaacttgctattaggaagggagtggattcatggagttggggctgtgccatctacccttcaccagaagctcattatctggagggaggatgggattgtggaaaatatagaggcggatcaaagcttctataagtcagaggtcgataatgttactgcacaaacctttgacaaaaagttggctaacatagcaccttgtggtgacaaggaggctattgtcgaatcaagtgacaatgttatccactctgtcaaactccatccgacctatgggtttatatgggagagggaggaaattaatgctgttccctctgaagatggagtcattccaccaactgggtggaatatgtatgaagattaaaatgactgaggccactgcattggccagaattacggcttatatggccgaaaatagactaaatacggcctttgaggctgagtctcaacaaaatatggcagttgaagccaagatcgaagatcatgagaatgaagaaacaaaggatcgaagactggattgcatatatgacgatgagccgctgggtttcgagaaaaatcccgtaagtgaggtgccaaagatgcaggctcaagatcctttggaggaaatcgacattggagatggctcgatgaaaaggccaacatatatcagtgccaatatcacctcaagtctaaaagaaaagttggtgcctcttcttagagaatttaaagactgttttgcttgggattaccacgaaatgcctgggttgagcagagaaatggtcgaaatgaaattaccaattaaggagggaagaagaccagtaaaacaactacca

SEQ ID NO: 13358 - DNA, 1157 bp, Glycine max
  Gm_smallRNAprecursor_6191
aagaccagtaaaacaactaccaagaagatttgcgccagaaatcatgtccaaaattaaggaagaaatcgaaaggctgctgaggtgtaaattcatcagatctgccaggtatgtcgaatggttagcaaatatagtccctgtcattaaaaagaatggaactcttagagtatgcatagattttagggatttaaataatgctacacctaaagatgaatatgctatgccaatagcggaaatgttggtagattcggcagccggcttcgaatttttaagcatgttagatggttattctggttataaccaaatatttattgctgaaagtgatgtgtcgaaaacagcatttcgatgccctggtgctttaggcacttatgaatgggtggttatgccctttggtttgaaaaatgctggggccacttatcagagggccatgaattccatgtttcatgattttattgacacatttatgcaaatttatattgatgatataatcatcaaatcctcctcagaagatagccatttggattatcttaggcaatctttcgaacgaatgaggaaacatggattaaaaatgaatccattaaagtgtgctttttgtgtgcgtgcaggagatttcctgggatttgtggtacataaaaagggcattgagataaatcaaaataagacaaaggctattcttgagacgaagcctccttcgaccaaaaaacagcttcagtctttgctaggaaaaatcaacttcttgaggcgattcatttcgaatctaagtggcaaagctcaaattttttcgccattacttcgactcaagaaagatgaaccattcaaatggaatgaagagcatcaaaaggctttcgatgaaattaaagaatatctgatcaagcctcctgtgttaatgcctcctagtcgaaacaagactatgaagttgtatattgctgcgtctgacaagaccattggtagcatgttggctcaggaagatgatgatggcatagaacatgcaatttattatcttagtcgtgtactaaatgatgcagaaactagatatacggccatagaaaaactttgtctttgtctgtatttctcttgtgcaaaacttaagcaatatataaagcctgttgatgtttatgtgtattctcattatgatattattaaacacatgttgtcaaaac

SEQ ID NO: 13359 - DNA, 1175 bp, Glycine max
  Gm_smallRNAprecursor_6192
aagaaatcgaaaggctgctgaggtgtaaattcatcagatctgccaggtatgtcgaatggttagcaaatatagtccctgtcattaaaaagaatggaactcttagagtatgcatagattttagggatttaaataatgctacacctaaagatgaatatgctatgccaatagcggaaatgttggtagattcggcagccggcttcgaatttttaagcatgttagatggttattctggttataaccaaatatttattgctgaaagtgatgtgtcgaaaacagcatttcgatgccctggtgctttaggcacttatgaatgggtggttatgccctttggtttgaaaaatgctggggccacttatcagagggccatgaattccatgtttcatgattttattgacacatttatgcaaatttatattgatgatataatcatcaaatcctcctcagaagatagccatttggattatcttaggcaatctttcgaacgaatgaggaaacatggattaaaaatgaatccattaaagtgtgctttttgtgtgcgtgcaggagatttcctgggatttgtggtacataaaaagggcattgagataaatcaaaataagacaaaggctattcttgagacgaagcctccttcgaccaaaaaacagcttcagtctttgctaggaaaaatcaacttcttgaggcgattcatttcgaatctaagtggcaaagctcaaattttttcgccattacttcgactcaagaaagatgaaccattcaaatggaatgaagagcatcaaaaggctttcgatgaaattaaagaatatctgatcaagcctcctgtgttaatgcctcctagtcgaaacaagactatgaagttgtatattgctgcgtctgacaagaccattggtagcatgttggctcaggaagatgatgatggcatagaacatgcaatttattatcttagtcgtgtactaaatgatgcagaaactagatatacggccatagaaaaactttgtctttgtctgtatttctcttgtgcaaaacttaagcaatatataaagcctgttgatgtttatgtgtattctcattatgatattattaaacacatgttgtcaaaacctattttacacagtagaattggaaaatgggctttagccttaacagaatattctttaacatacaagcctttgaaatct

SEQ ID NO: 13360 - DNA, 1110 bp, Glycine max
  Gm_smallRNAprecursor_6193
tattgtagatcactcactgatcgaaatgccgcaagactatgtcgatacagagccttgggttttgtatttcgatggttcgaaacacaaatatggaactggaattggagttttaataatatcccccaataaagttccaactaaattcaaatataaaatcaaagggctttgttctaataatgaggctgagtatgaggctctaattacaggccttgaaattttaattagcctgggggcaagaaatgttaacataaggggtgattcagaattagtagtgaagcaattaacacaagaatacaaatgtgttaatgaacacttagcaaaatattttgttatggccagttctcttctgaatcatttcgattacattaacattgagcatatacctcgactagaaaaccaagaagcaaatgatttagcccaaatagcttcagggtacaaaatgtcgaaggaaaaactaactcagttgatcgagataaaagataaactggtgttaccagagccattaagcactaaattgccaatgccaaaacttgtgggggcaagtacaccacaaaataatgaagatgaaagtatgaatgatcttcagggaaaaattcaaattttggccattgacaatatgttagataatgattggagaaagtccattattgaatatttggaaaatccaataggcaatgtggctcgaaagatcaaatatagggctttaaattacgtgactgtggggaatgatttgttcaaaaagactgcagaaggagtgttgctaaaatgtctaagtgaatcagaagcatacttggcagtttcccatgttcacagtggggcttgtggatcacatcaagcaggccataaaatgaaatggtttttatttcgacaaggtttgtattggccttcgatgttaaaagactgtatagaatttgctaaaggctgtcaagaatgccaaaagcatgcagggatacagcatgtacctgctagtgagttacactccataatcaaaccttggcctttcagaggatgggctttggacttaattggtgaaatcaagcctgcctcttctaagaaccagcgttatattatagttggtatcgattactttacaaaatggatcgaagcagt

SEQ ID NO: 13361 - DNA, 1082 bp, Glycine max
  Gm_smallRNAprecursor_6194
cactgatcgaaatgccgcaagactatgtcgatacagagccttgggttttgtatttcgatggttcgaaacacaaatatggaactggaattggagttttaataatatcccccaataaagttccaactaaattcaaatataaaatcaaagggctttgttctaataatgaggctgagtatgaggctctaattacaggccttgaaattttaattagcctgggggcaagaaatgttaacataaggggtgattcagaattagtagtgaagcaattaacacaagaatacaaatgtgttaatgaacacttagcaaaatattttgttatggccagttctcttctgaatcatttcgattacattaacattgagcatatacctcgactagaaaaccaagaagcaaatgatttagcccaaatagcttcagggtacaaaatgtcgaaggaaaaactaactcagttgatcgagataaaagataaactggtgttaccagagccattaagcactaaattgccaatgccaaaacttgtgggggcaagtacaccacaaaataatgaagatgaaagtatgaatgatcttcagggaaaaattcaaattttggccattgacaatatgttagataatgattggagaaagtccattattgaatatttggaaaatccaataggcaatgtggctcgaaagatcaaatatagggctttaaattacgtgactgtggggaatgatttgttcaaaaagactgcagaaggagtgttgctaaaatgtctaagtgaatcagaagcatacttggcagtttcccatgttcacagtggggcttgtggatcacatcaagcaggccataaaatgaaatggtttttatttcgacaaggtttgtattggccttcgatgttaaaagactgtatagaatttgctaaaggctgtcaagaatgccaaaagcatgcagggatacagcatgtacctgctagtgagttacactccataatcaaaccttggcctttcagaggatgggctttggacttaattggtgaaatcaagcctgcctcttctaagaaccagcgttatattatagttggtatcgattactttacaaaa

SEQ ID NO: 13362 - DNA, 1064 bp, Glycine max
  Gm_smallRNAprecursor_6195
tgatgatgaaaggagtagcaagttgttatctgagaataaggaagcctcgccggagataatggatacgaatcagcaaagaagaagggtttcagaagcaaagaagaagaaaggtttcggggtttcagaagtaaagaagctaaaggggtttctctgaggttttttggcgctatttatggaggtttcactttaaaaaagggaaaataatataataagaatcaagggtcagaaatcaatcacatcagatttcccttttgactccccagcgtgacacgtgtcccactctgcctagaaaggtggaattaatgatgagtagtgggagatcgaggcgacggttaccattaaacgtgccatcgtgtcgccgtttcaggaaaactggtagaagaagagaaaaaatgtcaacttctcatcttccttcgatctcgaatcgaagcggacattttttgggggcaatttgttagcccatatttttgacgagctaaaatatgctctaagtatgcattagatgtcgtctcgagtttcgaagcgtattacagagcaagagtctggtcaggacctgctcgaatcgaaaagagaggagagtctttaagaaggaattcccaggttcaaaggagtatttacgaagtacaaagctaagacaagaaagaggacttcgagctattgggcaattcgaactggtgtatggacgagtcgaagtaatttctgaacaaatcttcaccaaattagttcgatctcgagtaatgtggataaccgttctagggagcggttatatgtgcatgcaaggtgtacgtagcaggatacttggcgttaggatagcgttcgaccgttagggcagtttattttcgaaaatctatatatagcagttttttagtcagatttcaaggtcgcaaatcatttctacaaaatccttagatactcaaagtacccagcgcagagagaaacgagtacacaaggagaatgtatgtttgtgaaccattttaagttttctgtaaactttacatttcgaatgcaatgcatttttcatttcactttagaattcctgtcttttaaatggttcattcgatcga

SEQ ID NO: 13363 - DNA, 1046 bp, Glycine max
  Gm_smallRNAprecursor_6196
tgtgtaaaataggttttgacaacatgtgcttaataatatcataatgagaatacacataaacatcaacaggctttatatattgcttaagttttgcacaagagaaatacaaacaaagacaaagtttttctatggcagtatatctagtttctgcatcatttagtacacgactaagataataaattgcatgctctacgccatcatcatcttcctgagccaacatgctaccaatagtcttgtcagacgcagcaatatacaacttcatagtcttatttcgactaggaggcattaacacaggaggcttgatcagatattctttaatttcatcgaaagccttttgatgctcttcaccccatttgaatggttcatctttcttgagtcgaagtaatggcgaaaaaatttgagctttgccacttagattcgaaatgaatcgcctcaagaagttaatttttcttagcaaagactgaagctgttttttggtcgaaggaggcttcgtctccagaatagcctttgtcttgttttgatttatctcaatgccttttttatgcaccacaaaaccaaggaaatctcctgcatgcacacaaaaagcacactttaatggattcatttttaatccatgttccctcattcgttcgaaagattgcctaaggtaatccaaatggctatcttccgaggaggatttgatgattatatcatcaatataaacttgcataaatgtgtcaataaaatcatgaaacatggaattcatggccctttgataagtggccccagcattcttcaacccaaaaggcataactacccattcataagtgcctagagcaccagggcatcaaaatgctgtttttgacacatcactttcagcaataaatatttggttataaccagaataaccatctaacatgcttaaaaattcgaagccagctgctgaatctactaacatttctgctactggcataacatattcatctttaggtgtagcattatttaaatccctaaaatctatgcatattctaagagttccattctttttaatgacagggactatattt

SEQ ID NO: 13364 - DNA, 1104 bp, Glycine max
  Gm_smallRNAprecursor_6197
cttttctttgggaagacagggaataaaattctaatatatattgccagcccaacttgtagagaatttccaataatggatagctgacccattgtcgggtaaattttctttcggggtgtctggattgttatggaatggggtctacatctcaatcaatatcataatttcttgagagaaaaaaaacattttcagattattctgcaaatcttaataaatatagtattaatcaattcatggacagtttttgaaacaaaagaaacaatgatggaaagagagtttttgttgttaatataagcactagcaatagctctcttttggtatgaaagcctctccttcaaccctcaaactcagagccatccatgatccttctactttccttcagcacaaaagcctgcagagagaggagagaagggttacacacacttatatatatctatgtgaaacaccaaagaattaagaaggtgaagtttggttattatattccactgcaactggaggaggcatccaaagggatcgcattgatcccaaatttcagatttataaatttgtctttctcttcccttgtcaatatttgggatcatttctcttcccttctcaatatttgggatcatgctatccctttggattcctcctttggtggcttctactgtatacaatggttaattttggtggactgcctctaattactgcatcagaaaccatcagatgcttaatacccagttcatggcctagaaactgcattctgcatatgaaagagagtggtatgattcatgtaagtccatattatatattgaccttggtattgctctcttggtcttacaaaaccaatttatttaatctttcctttcttctttttatttatttattttatttttatttttaactgtgctagatgggattgtggtgtgattcatgtaatcaattcaatttcagtagtcagtggaataagacttttgttgttgttgacttttttttttttttttcctttttcattcttttcattctattaagtgataacaagttaacttttttacagaaccccatatattatactcttaaatttagaagaagaaaaaaagacttaatgattataccttattcatgctt

SEQ ID NO: 13365 - DNA, 1104 bp, Glycine max; identical to SEQ ID NO: 13364
  Gm_smallRNAprecursor_6198

SEQ ID NO: 13366 - DNA, 1035 bp, Glycine max
  Gm_smallRNAprecursor_6199
gttgagacccgtttttcttcctccggagcctcttacactggatgtgaaatggtaggagaaactcttgtaagttctaatatatattttttttacacttttttaggttatgtttgtagattcttcagttgatcttgttatatgcgagagttcaccaattcttgtaaaatattactcatgcactcatgattggtcatgtaaataccaaaataggagaggagaaagaagagaaaagtaatttgcttttacacgatttcgttgtcttctaggatatgaacctaattctttaattggtacctctgatgaagcagtttggactaagctggtgtgctatttggtaatgtgttttttactatgttaagtggttgggctgattatgaaaaaaaacatctatgggggaggtattttatgtgcggtgtgctactgtgctttatgtttggttatgaatacagtcttcaagaacttattatcctgttagcccatatttttgatgagctaaaatatgctctaaatacgcattagatgtcgtctcgagtttcgaagcgtattaaagagcaagaatcttgtcaggacttgttcgaatcgaaaagagagaagaggtttttgaaagggattcccaggctcaaggaagtatttacgaagtacaaggctaagacaagaaaaagggcttcgaaccattgggcgattcgagttggcgtatggtcgagtcgaagccaaggcagcaagatttctggacttagcacaatttctgacaaaacttcacaaaatcagttcgacttcgagcaatgaggataaccgttctaaggagcagttatgtgcatgtaaggtgtacgtagcaggacacttggcattaggatagtgttcgaccgttagggcagtttattttcgaatgtctatatatagcagtttttagtcagatttcggggtcgcaaatcatatatacaaatccttatacactcaaagtacccagcgcagagagaaacgagtacgcaaggagaatgtatgtttgtgaaccattttaagttcctgtaaacttta

SEQ ID NO: 13367 - DNA, 1051 bp, Glycine max
  Gm_smallRNAprecursor_6200
ggaaacaagaagagaaggtaactcttctgaacttatcttttactcttaacgtcttgcctcatatttctttattttttcagagtcaaaagaaagatgatagcattgatactaccacgacttcaaaacgctcgaagcatgcggtcgtcgaattagacgaagagaaagatgcaagttttatttctaatgtcaatattatagctttctttcaagtctatattctgacaattctttaccctcgtaatgcaggaagaaaaggaaagacctcttataagaaaaagaaagttacctgcgacttcgaccaagtctgctgaacaaacagaggcaggcaattcccaggctcaaatgcctaaaaagaaaaagaaagtaaagcaggtcgagcctgaaccttctgtggctgttgagggtggtgaaccaatcaagaagaaaaagaaaaagaccaagccttcaaaagaacaaggtgacaatcaacctgttgacgtccaaccaccttcgaccgatattgacggcactgaagtagaggctactccttctgttgctgagatgggcaaccctgtcgatcaaccggactcaccacaagaacaacctgccgtcgaggtatcatcctcttaatgtgttttaaatcatagcttatacgaaactatttgttaacctttttccatgataattcgaatcaggtacaacaaaatgtttctgtagaagaaataccctcacatgctcgaacatctcccactcctgagacggatgcagtgaatgttgaagaacagggtgaaggtcaaggcattggatccagcagtcctcatggatcgagtcaaaaaagttcatccgaagaaaacttttccgatgaagaggccatagaagaggctgaagctggaggttcggacatttacccggcgtcttcgacatctaagctttccgctagcatagggatcgcagaagatacattcattcaaatgcaagacgaagaccctgctgcagcccttcgactcctgctgaccacaagtcaagccgacatctcaagtgaaaagattcctggtgcttcgtcctcatctga

SEQ ID NO: 13368 - DNA, 1046 bp, Glycine max
  Gm_smallRNAprecursor_6201
tgtgtaaaataggttttgacaacatgtgcttaataatatcataatgagaatacacataaacatcaacaggctttatatattgcttaagttttgcacaagagaaatacaaacaaagacaaagtttttctatggccgtatatctagtttctgcatcatttagtacacgactaagataataaattgcatgctctacgccatcatcatcttcctgagccaacatgctaccaatggtcttgtcagacgcagcaatatacaacttcatagtcttgtttcgactaggaggcattaacacgggaggcttgatcagatattctttaatttcatcgaaagccttttgatgctcttcattccatttgaatggttcatctttcttgagtcgaagtaatggcgaaaaaatttgagctttgccacttagattcgaaatgaatcgcctcaagaagttgatttttcctagcaaagactgaagctgttttttggtcgaaggaggcttcgtctcaagaatagcctttgtcttgttttgatttatctcaatgccttttttatgcaccacaaaaccaaggaaatctcctgcacgcacacaaaaagcacactttaatggattcatttttaatccatgtttcctcattcgttcgaaagattgcctaaggtaatccaaatggctatcttctgaagaggatttgatgattatatcatcaatataaacttgcataaatgtgtcaataaaatcatgaaacatggaattcatggccctttgataagtggccccagcatttttcaacccaaagggcataaccacccattcataagtgcctaaagcaccagggcatcgaaatgctgtttttgacacatcattttcaacaataaatatttggttataaccagaataaccatctaacatacttaaaaattcgaaaccagctgctgaatctaccaacatttctgctactggcatagcatattcatctttaggtgtagcattgtttaaatccctaaaatctatgcatactcttagagttccattctttttaatgacagggactatattt

SEQ ID NO: 13369 - DNA, 1125 bp, Glycine max
  Gm_smallRNAprecursor_6202
acgactaagataataaattgcatgctctacgccatcatcatcttcctgagccaacatgctaccaatggtcttgtcagacgcagcaatatacaacttcatagtcttgtttcgactaggaggcattaacacgggaggcttgatcagatattctttaatttcatcgaaagccttttgatgctcttcattccatttgaatggttcatctttcttgagtcgaagtaatggcgaaaaaatttgagctttgccacttagattcgaaatgaatcgcctcaagaagttgatttttcctagcaaagactgaagctgttttttggtcgaaggaggcttcgtctcaagaatagcctttgtcttgttttgatttatctcaatgccttttttatgcaccacaaaaccaaggaaatctcctgcacgcacacaaaaagcacactttaatggattcatttttaatccatgtttcctcattcgttcgaaagattgcctaaggtaatccaaatggctatcttctgaagaggatttgatgattatatcatcaatataaacttgcataaatgtgtcaataaaatcatgaaacatggaattcatggccctttgataagtggccccagcatttttcaacccaaagggcataaccacccattcataagtgcctaaagcaccagggcatcgaaatgctgtttttgacacatcattttcaacaataaatatttggttataaccagaataaccatctaacatacttaaaaattcgaaaccagctgctgaatctaccaacatttctgctactggcatagcatattcatctttaggtgtagcattgtttaaatccctaaaatctatgcatactcttagagttccattctttttaatgacagggactatatttgctaaccattcgacatacctggcagacctgatgaatttacacctcagcagcctttcgatctcttccttaattttggacatgatttctggtgcgaatcttcttggtagttgttttactggtctttttccttccttaataggtaatttcatttcgaccatttctctgcttaacccaggcatttcgtggtaatcccaagcaaaacagtctttaaattctctaagaagaggcaccagcttttcttt

SEQ ID NO: 13370 - DNA, 1038 bp, Glycine max
  Gm_smallRNAprecursor_6203
ggttataaccagaataaccatctaacatacttaaaaattcgaaaccagctgctgaatctaccaacatttctgctactggcatagcatattcatctttaggtgtagcattgtttaaatccctaaaatctatgcatactcttagagttccattctttttaatgacagggactatatttgctaaccattcgacatacctggcagacctgatgaatttacacctcagcagcctttcgatctcttccttaattttggacatgatttctggtgcgaatcttcttggtagttgttttactggtctttttccttccttaataggtaatttcatttcgaccatttctctgcttaacccaggcatttcgtggtaatcccaagcaaaacagtctttaaattctctaagaagaggcaccagcttttctttcagacttgaggtgatattggcactgatataggttggcctttttatcgagccatctccaatgtcgatttcctccaaaggatcttgagcctgcatctttggcacctcacttatgggatttttctcaaaacccagcggctcatcatcataaatacaatccagtcttcgatcctttgtttctttgttttcatgatcttcgatcttggcttcaactgccatattttgttgagattcagcctcaaaggccgtatttagtctattttcggccatataagccgtaattctggcccatgcagtggcctcagtcatattaatcttcatatatattccacccagttggtggaatgactccatcttcggagggaacaacatcaatttcctccctctcccatataaacccataggtaggatggagtttgacagagtggataacattgtcacttgattcgacaacagcctccttgttaccacaaggtgctatgttagccaactttttgtcaaaggtttgtgcagtaacactatcaacctctgacttatagaagctttgatctgcctctatattttcaacaatcccatcctccctccaaataatgagtttctggtggagggtagatggcacagcc

SEQ ID NO: 13371 - DNA, 1142 bp, Glycine max
  Gm_smallRNAprecursor_6204
atgatcttcgatcttggcttcaactgccatattttgttgagattcagcctcaaaggccgtatttagtctattttcggccatataagccgtaattctggcccatgcagtggcctcagtcatattaatcttcatatatattccacccagttggtggaatgactccatcttcggagggaacaacatcaatttcctccctctcccatataaacccataggtaggatggagtttgacagagtggataacattgtcacttgattcgacaacagcctccttgttaccacaaggtgctatgttagccaactttttgtcaaaggtttgtgcagtaacactatcaacctctgacttatagaagctttgatctgcctctatattttcaacaatcccatcctccctccaaataatgagtttctggtggagggtagatggcacagccccaactccatgaacccattcccttcctaatagcaagttaaaattagccttagactgtatcaccaggaacagagttggtcgaactatactgcctacagcaacatctacttgaatggctcccaatgaatagccagttttgccctcataattagagagcacaatgttgtgagcagatagatcagtgtcatgtttcccgatcttgtagagcatagatcgaggcattaagttgacagccgctcctccatctattagcactttgttgattccaatattctcaacctttgccctgatgaaaagaggtttgagatgacttttcatctgaaaatctggcttttcgaaataagctaattgttcttccacacagccattattcataacatagtagcacactggctttgggtcagccatatcaaaatgatcgaactcactttcgatctcagtaacctcagactgtacgtcgtattcagatggcaagatagataccacacagatgacatcaaagtctggttcagaatccagtagatcctcatcttccatcttatcttcatccatcggaggcaggagtctctcctttactggcctcctagacacttctttatactggcccgtttgcagattctgttgggccaatttcttctgacgctggaacctgcgccattgggtcctcgtcataggattctttcctttgtaattgttcctataagagtac

SEQ ID NO: 13372 - DNA, 1141 bp, Glycine max
  Gm_smallRNAprecursor_6205
tgatcttcgatcttggcttcaactgccatattttgttgagattcagcctcaaaggccgtatttagtctattttcggccatataagccgtaattctggcccatgcagtggcctcagtcatattaatcttcatatatattccacccagttggtggaatgactccatcttcggagggaacaacatcaatttcctccctctcccatataaacccataggtaggatggagtttgacagagtggataacattgtcacttgattcgacaacagcctccttgttaccacaaggtgctatgttagccaactttttgtcaaaggtttgtgcagtaacactatcaacctctgacttatagaagctttgatctgcctctatattttcaacaatcccatcctccctccaaataatgagtttctggtggagggtagatggcacagccccaactccatgaacccattcccttcctaatagcaagttaaaattagccttagactgtatcaccaggaacagagttggtcgaactatactgcctacagcaacatctacttgaatggctcccaatgaatagccagttttgccctcataattagagagcacaatgttgtgagcagatagatcagtgtcatgtttcccgatcttgtagagcatagatcgaggcattaagttgacagccgctcctccatctattagcactttgttgattccaatattctcaacctttgccctgatgaaaagaggtttgagatgacttttcatctgaaaatctggcttttcgaaataagctaattgttcttccacacagccattattcataacatagtagcacactggctttgggtcagccatatcaaaatgatcgaactcactttcgatctcagtaacctcagactgtacgtcgtattcagatggcaagatagataccacacagatgacatcaaagtctggttcagaatccagtagatcctcatcttccatcttatcttcatccatcggaggcaggagtctctcctttactggcctcctagacacttctttatactggcccgtttgcagattctgttgggccaatttcttctgacgctggaacctgcgccattgggtcctcgtcataggattctttcctttgtaattgttcctataagagtac

SEQ ID NO: 13373 - DNA, 1141 bp, Glycine max; identical to SEQ ID NO: 13372
  Gm_smallRNAprecursor_6206

SEQ ID NO: 13374 - DNA, 1040 bp, Glycine max
  Gm_smallRNAprecursor_6207
agttgagaatgttggaatcaacaaagtgctcatagatggaggagcggctgttaacttaatgcctcgatctatgctccacaagatcgggaaacatgacactgatctatctgcccacaacattgtgctttcgaattatgagggtaaaactggctattctttgggaaccattcaagtagatgttgctgtaggcagtatagttcgaccaactcttttcctggtgatacagtctaaggctaattttaacttgctattaggaagggagtggattcatggagttggggctgtgccatctacccttcaccagaagctcattatctggagggaggatgggattgttgaaaatatagaggcggatcaaagcttctataagtcagaggtcgataatgttactgcacaaacctttgacaaaaagttggctaacatagcaccttgtggtgacaaggaggctgttgtcgaatcaagtgacaatgttatccactctgtcaaactccatcctacctatgggtttatatgggagagggaggaaattgatgttgttccctctgaagatggagtcattccaccaactgggtggaatatacatgaagattaatatgactgaggccactgcatgggccagaattacggcttatatggccgaaaataaactaaatacggcctttgaggctgaatctcaacaaaatatggcagttgaagccaggatcgaagatcatgaaaacaaagaaacaaaggatcgaagactggattgcatttatgacgatgagccgctgggttttgagaaaaatcccataagtgaggtgccaaagatgcaggctcaagatcctttggaggagatcgacattggagatggctcgataaaaagaccaacctatatcagtgccaatatcacctcaagtctaaaagaaaagctggtacctcttcttagagaatttaaagactgttttgcttggaattaccacgaaatgcctgggttaagcagagaaatggtcgaaatgaaattacctattaaggaaggaaaaagaccaataaaacaactacca

SEQ ID NO: 13375 - DNA, 1157 bp, Glycine max
  Gm_smallRNAprecursor_6208
aagaccaataaaacaactaccaagaagattcgcaccagaaatcatgtccaaaattaaggaagagatcgaaaggctgctgaggtgtaaattcatcaggtctgccaggtatgtcgaatggttagcaaatatagtccctgtcattaaaaagaatggaactctaagagtatgcatagattttagggatttaaacaatgctacacctaaagatgaatatgctatgccagtagcagaaatgttggtagattcagcagctggtttcgaatttttaagcatgttagatggttattctggttataaccaaatatttattgctgaagatgatgtgtcaaaaacagcatttcgatgccctggtgctttaggcacttatgaatgggtggttatgccctttgggttgaaaaatgctggggccacttatcaaagggccatgaattccatgtttcatgattttattgacacatttatgcaagtttatattgatgatataatcatcaaatcctcttcagaagatagccatttggattaccttaggcaatctttcgaacgaatgaggaaatatggattaaaaatgaatccattaaagtgtgctttttgtgtgcgtgcaggagatttccttggttttgtggtgcataaaaaaggcattgagataaatcaaaacaagacaaaggctattcttgagacgaagcctccttcgaccaaaaaacagcttcagtctttgctaggaaaaatcaacttcttgaggcgattcatttcgaatctaagtggcaaagctcaaattttttcgccattacttcgactcaagaaagatgaaccattcaaatggaatgaagagcatcaaaaggctttcgatgaaattaaagaatatctgatcaagcctcccgtgttaatgcctcctagtcgaaacaagactatgaagttgtatattgctgcgtctgacaagaccattggtagcatgttggctcaggaagatgatgatggcgtagagcatgcaatttattatcttagtcgtgtactaaatgatgcagaaactagatatactgccatagaaaaactttgtctttgtttgtatttctcttgtgcaaaacttaagtaatatataaagcctgttgatgtttatgtgtattctcattatgatattattaagcacatgttgtcaaaac

SEQ ID NO: 13376 - DNA, 1175 bp, Glycine max
  Gm_smallRNAprecursor_6209
aagagatcgaaaggctgctgaggtgtaaattcatcaggtctgccaggtatgtcgaatggttagcaaatatagtccctgtcattaaaaagaatggaactctaagagtatgcatagattttagggatttaaacaatgctacacctaaagatgaatatgctatgccagtagcagaaatgttggtagattcagcagctggtttcgaatttttaagcatgttagatggttattctggttataaccaaatatttattgctgaagatgatgtgtcaaaaacagcatttcgatgccctggtgctttaggcacttatgaatgggtggttatgccctttgggttgaaaaatgctggggccacttatcaaagggccatgaattccatgtttcatgattttattgacacatttatgcaagtttatattgatgatataatcatcaaatcctcttcagaagatagccatttggattaccttaggcaatctttcgaacgaatgaggaaatatggattaaaaatgaatccattaaagtgtgctttttgtgtgcgtgcaggagatttccttggttttgtggtgcataaaaaaggcattgagataaatcaaaacaagacaaaggctattcttgagacgaagcctccttcgaccaaaaaacagcttcagtctttgctaggaaaaatcaacttcttgaggcgattcatttcgaatctaagtggcaaagctcaaattttttcgccattacttcgactcaagaaagatgaaccattcaaatggaatgaagagcatcaaaaggctttcgatgaaattaaagaatatctgatcaagcctcccgtgttaatgcctcctagtcgaaacaagactatgaagttgtatattgctgcgtctgacaagaccattggtagcatgttggctcaggaagatgatgatggcgtagagcatgcaatttattatcttagtcgtgtactaaatgatgcagaaactagatatactgccatagaaaaactttgtctttgtttgtatttctcttgtgcaaaacttaagtaatatataaagcctgttgatgtttatgtgtattctcattatgatattattaagcacatgttgtcaaaacctattttacacagtagaattggaaaatgggctttagcattaacagaatattctttaacgtacaagcctttgaaatct

SEQ ID NO: 13377 - DNA, 1114 bp, Glycine max
  Gm_smallRNAprecursor_6210
aatctaagtggcaaagctcaaattttttcgccattacttcgactcaagaaagatgaaccattcaaatggaatgaagagcatcaaaaggctttcgatgaaattaaagaatatctgatcaagcctcccgtgttaatgcctcctagtcgaaacaagactatgaagttgtatattgctgcgtctgacaagaccattggtagcatgttggctcaggaagatgatgatggcgtagagcatgcaatttattatcttagtcgtgtactaaatgatgcagaaactagatatactgccatagaaaaactttgtctttgtttgtatttctcttgtgcaaaacttaagtaatatataaagcctgttgatgtttatgtgtattctcattatgatattattaagcacatgttgtcaaaacctattttacacagtagaattggaaaatgggctttagcattaacagaatattctttaacgtacaagcctttgaaatctattaagggtcaaattgtggcagattttattgtagatcactcagtaatcgagatgccgcaagactatgtcgatacagagccttggattttgtatttcgatggatcgaaacacaaacatggaactggaattggagttttaataatatcccccaataaagttccaactaagttcaaatataaaatcaaagggctttgttctaataatgaggctgagtatgaagctctaattacaggccttgaaattttaattagcctgggggcaagaaatgttaacataaggggtgattcagaattagtgttgaggcaattaacacaagaatacaaatgtgttaatgaacacttagcgaaatattttgttatagcaagttctcttctgaatcatttcgattatattaacattgagcatatacctcgacaagaaaaccaagaagcaaatgatttagcccaaatagcttcagggtacaaaatgtcgaaggaaaagttaactcagttgatcgaaataaaagataaactggtgttaccagagccattaagcactaaattgccaatgccaaaacttgtgggggcaagtataccacaaaataatgaagatgaaagcatgaatgatctccaggaaaaaattcaaattttgg

SEQ ID NO: 13378 - DNA, 1110 bp, Glycine max
  Gm_smallRNAprecursor_6211
tattgtagatcactcagtaatcgagatgccgcaagactatgtcgatacagagccttggattttgtatttcgatggatcgaaacacaaacatggaactggaattggagttttaataatatcccccaataaagttccaactaagttcaaatataaaatcaaagggctttgttctaataatgaggctgagtatgaagctctaattacaggccttgaaattttaattagcctgggggcaagaaatgttaacataaggggtgattcagaattagtgttgaggcaattaacacaagaatacaaatgtgttaatgaacacttagcgaaatattttgttatagcaagttctcttctgaatcatttcgattatattaacattgagcatatacctcgacaagaaaaccaagaagcaaatgatttagcccaaatagcttcagggtacaaaatgtcgaaggaaaagttaactcagttgatcgaaataaaagataaactggtgttaccagagccattaagcactaaattgccaatgccaaaacttgtgggggcaagtataccacaaaataatgaagatgaaagcatgaatgatctccaggaaaaaattcaaattttggccattgacaatatgttagataatgattggagaaagtccattattgaatatttggaaaatccaataggcaacgtggctcgaaagatcaaatatagggctttaaattacgtgattgtgggaaatgatttgtttaaaaagactgcagaaggagtgttgctgaaatgtctaagtgaatcagaagcatacttggcagtttcccatgttcacagtggggcttgtggatcacatcaagcaggccataaaatgaaatggcttttatttcgacaaggtttgtattggccttcgatgttaaaagactgcatagaatttgctaaaggctgtcaggaatgccaaaagcatgcagggatacagcatgtacctgctaatgagttacactccataatcaaaccttggcctttcagaggatgggctttggacttaattggtgaaatcaagcctgcttcttctaagaaccagcgttatattatagttggtatcgattactttacaaaatggatcgaagcagt

SEQ ID NO: 13379 - DNA, 1082 bp, Glycine max
  Gm_smallRNAprecursor_6212
cagtaatcgagatgccgcaagactatgtcgatacagagccttggattttgtatttcgatggatcgaaacacaaacatggaactggaattggagttttaataatatcccccaataaagttccaactaagttcaaatataaaatcaaagggctttgttctaataatgaggctgagtatgaagctctaattacaggccttgaaattttaattagcctgggggcaagaaatgttaacataaggggtgattcagaattagtgttgaggcaattaacacaagaatacaaatgtgttaatgaacacttagcgaaatattttgttatagcaagttctcttctgaatcatttcgattatattaacattgagcatatacctcgacaagaaaaccaagaagcaaatgatttagcccaaatagcttcagggtacaaaatgtcgaaggaaaagttaactcagttgatcgaaataaaagataaactggtgttaccagagccattaagcactaaattgccaatgccaaaacttgtgggggcaagtataccacaaaataatgaagatgaaagcatgaatgatctccaggaaaaaattcaaattttggccattgacaatatgttagataatgattggagaaagtccattattgaatatttggaaaatccaataggcaacgtggctcgaaagatcaaatatagggctttaaattacgtgattgtgggaaatgatttgtttaaaaagactgcagaaggagtgttgctgaaatgtctaagtgaatcagaagcatacttggcagtttcccatgttcacagtggggcttgtggatcacatcaagcaggccataaaatgaaatggcttttatttcgacaaggtttgtattggccttcgatgttaaaagactgcatagaatttgctaaaggctgtcaggaatgccaaaagcatgcagggatacagcatgtacctgctaatgagttacactccataatcaaaccttggcctttcagaggatgggctttggacttaattggtgaaatcaagcctgcttcttctaagaaccagcgttatattatagttggtatcgattactttacaaaa

SEQ ID NO: 13380 - DNA, 1137 bp, Glycine max
  Gm_smallRNAprecursor_6213
ataggcaacgtggctcgaaagatcaaatatagggctttaaattacgtgattgtgggaaatgatttgtttaaaaagactgcagaaggagtgttgctgaaatgtctaagtgaatcagaagcatacttggcagtttcccatgttcacagtggggcttgtggatcacatcaagcaggccataaaatgaaatggcttttatttcgacaaggtttgtattggccttcgatgttaaaagactgcatagaatttgctaaaggctgtcaggaatgccaaaagcatgcagggatacagcatgtacctgctaatgagttacactccataatcaaaccttggcctttcagaggatgggctttggacttaattggtgaaatcaagcctgcttcttctaagaaccagcgttatattatagttggtatcgattactttacaaaatggatcgaagcagtccctttgccaaatgttgatcaggaagcagtaattagtttcattcaaaatcatattatttataggtatggtattcctgaaacaattaccactgatcaaggttcagtttttactggacgaaaaatgaaagaatttgcccaaaaaactggctttcgattattaacctcaacaccatattacgcgcaagcaaatggtcaggtcgaagcagccaataagattgtaattaacttgattaaaaaacacattgcccaaaagccaagaaattggaataaaacgttagatcaagttttatgggcatgtagaaattctcctaaggaatcaactaatactaccccatttcgactgacttatgggcatgatgctgtacttccggtcgaaatacatttgcaatcagccagggtacaaaaacaaatggacattccaatcgaccattattggaaaatgatgtcagatgagttggttgatttagatgaggagagattgagagcattagaagttttgactaaacaaaaagaaagagttgctaaagcttataataagaaagtaaagtcaaaaacttttaatattggagatttagtttggaaggttatcctgcccatggatagtaaggatcgagccttgggcaaatggtccccaaattgggaaggaccgtttaaaataattcagatctattcgaatggtgcttatgagttagaa

SEQ ID NO: 13381 - DNA, 1086 bp, Glycine max
  Gm_smallRNAprecursor_6214
agcttctgaatcgaattagcggccttctcctggagttccttgcgtttggcctgctccgtcacaattttttgccttagatcatcgacctgagacagcaaatccgtaatagttgcctcccaggaggagatgttatcatcacaggctttgatctcagaagatccttctttcgcctctttggtgagacgttcgacttcatgttgagcagctcgggctttttcgagcagaaggatatgtgcctgtttctgggcatccagtctggcgccattttcgcgtttttctgcacagtacttgcaaattggtcaatgatggcctcgatttggataactttgcctagaatctcatcagaggtaagggggttgtgcaatttcttcaaaaagttcaggtgcccaaaggcagcagaggggttctcttcaatggatttaaacacatcttcccgtgcgtattccatggataacttcaagagcagagaatcttggcgtactgaagagtttatttcggcatcagatgaggacgaagcaccaggaatcttttcacttgagatgtcggcttgacttgtggtcagcaggagtcgaagggctgcagcagggtcttcgtcttgcatttgaatgaatgtatcttctgcgatccctatgctagcggaaagcttagatgtcgaagacgccgggtaaatgtccgaacctccagcttcagcctcttctatggcctcttcatcggaaaagttttcttcggatgaacttttttgactcgatccatgaggactgctggatccaatgccttgaccttcaccctgttcttcaacattcactgcatccgtctcaggagtgggagatgttcgagcatgtgagggtatttcttctacagaaacattttgttgtacctgattcgaattatcatggaaaaaggttaacaaatagtttcgtataagctatgatttaaaacacattaagaggatgatacctcgacggcaggttgttcttgtggtgagtccggttgatcgacagggttgcccatctcagcaacagaaggagtagcctctacttcagtgccgtcaatatcggtcgaaggtggttggacgtcaacaggttg

SEQ ID NO: 13382 - DNA, 1035 bp, Glycine max
  Gm_smallRNAprecursor_6215
cagtgagtaaaagcttggactcacggagaacaatggcaaagctcagagacacggtgaggttgatgatgaaaggagtagtaagttgatgtctgaaaatgaaaaggtttcgccggagatacaacaagaagaagaagggttttggaagcagagaagctgaagggttttctggagttttctggcgctatttatggagtttcatttttaaaaggggaaaaaacaatataataatcaatggtcaaaaatcaatcacatcagatttcccttccgattccccagcatgacacgtgtcccactttgcctagaaaagtggaattaatgatgggtagtgggagatcgaggcgacggttacacagtgaacgtgcgatcatgacgccgtttcaggaaaactggtagaagaagagaaaaaaaaatgtcaacttctcatcttccttcaatctcgaatcgaagcagacattttttgggggcaatttgttagcccatatttttgatgagctaaaatatgctctaaatacgcattagatgtcgtctcgagtttcgaagcgtattaaagagcaagaatcttgtcaggacttgttcgaatcgaaaagagagaagaggtttttgaaagggattcccaggctcaaggaagtatttacgaagtacaaggctaagacaagaaaaagggcttcgaaccattgggcgattcgagttggcgtatggtcgagtcgaagtcaaggcagcaagatttctggacttagcacaatttctgacaaaacttcacaaaatcagttcgacttcgagcaatgaggataaccgttctaaggagcagttatgtgcatgtaaggtgtacgtagcaggacacttggcattaggatagtgttcgaccgttagggcagtttattttcgaatgtctatatatagcagtttttagtcagatttcggggtcgcaaatcatatatacaaatccttatacactcaaagtacccagcgcagagagaaacgagtacgcaaggagaatgtatgtttgtgaaccattttaagttcctgtaaacttta

SEQ ID NO: 13383 - DNA, 1127 bp, Glycine max
  Gm_smallRNAprecursor_6216
agaaatagagatttgaagcaatgcagcaattatgattttatagttcaaaagcagtgtgtcagcatagtgcgaatgagtacgatatgacaatttatggatgtatatgccatctggttgacaactaaccatgtatataggacaaaatttttgtttgattcagctaatatttcacaaaaagattggaaggatctaatgtcttgatttcctttattgaccttcattttctttttttttttatgatttgctatacctgtagcagtattgactataactattctcatttttgtattctttttacttttgattaatttattatttactctgaagaaatatacttatgtcattttttctgctcaactccagatgataatatgtcattcaaaaaagtgaagggactgaatgcatttttgacttgcagaaaaccagtatatatggtactatttagagtatgtgctttatttcactagattctggacaacctagcaaagagcttaatcctgtattagctattattctacaaaggtatgatgattcatttatttggccattatgaatagtttattctaaagtcttgaagacagtcctaaatttgaaatagcttttgttttttttgtcttttgtttcttttgtattagctattattctacaaaggtatgatttcctttatcaaatactcttacttcaaccatcctctcatgtaactcctgtttgcactaaagattgtccaaaaggaatattgttttatgcagaagacaaattacatcggataagaaaaatcacaccacataattgctgcattgctttagatctctatttctgcataaaacaatattccttttggacaatctttagtgcaaacaggagtcacatgagaggatggttgaattaagagtatttgacaaaggaaatcatacctttgtagaataatagctaatacaaaaaaaacaaaagacgaaagaaacaaaagctatttcaaatttaggactgtcttcaagactttagaataaactattcataatggtcaaataaatgaatcatcatacctttgtagaataatagctaataaaggattaagctccttgctaggttgtccagaatctagtgaaataaagcacatactccaaata

SEQ ID NO: 13384 - DNA, 1140 bp, Glycine max
  Gm_smallRNAprecursor_6217
tcctttattgaccttcattttctttttttttttatgatttgctatacctgtagcagtattgactataactattctcatttttgtattctttttacttttgattaatttattatttactctgaagaaatatacttatgtcattttttctgctcaactccagatgataatatgtcattcaaaaaagtgaagggactgaatgcatttttgacttgcagaaaaccagtatatatggtactatttagagtatgtgctttatttcactagattctggacaacctagcaaagagcttaatcctgtattagctattattctacaaaggtatgatgattcatttatttggccattatgaatagtttattctaaagtcttgaagacagtcctaaatttgaaatagcttttgttttttttgtcttttgtttcttttgtattagctattattctacaaaggtatgatttcctttatcaaatactcttacttcaaccatcctctcatgtaactcctgtttgcactaaagattgtccaaaaggaatattgttttatgcagaagacaaattacatcggataagaaaaatcacaccacataattgctgcattgctttagatctctatttctgcataaaacaatattccttttggacaatctttagtgcaaacaggagtcacatgagaggatggttgaattaagagtatttgacaaaggaaatcatacctttgtagaataatagctaatacaaaaaaaacaaaagacgaaagaaacaaaagctatttcaaatttaggactgtcttcaagactttagaataaactattcataatggtcaaataaatgaatcatcatacctttgtagaataatagctaataaaggattaagctccttgctaggttgtccagaatctagtgaaataaagcacatactccaaatagtaccatatatactggttttctacaagtcaaaaatgcattcagtcccttcactttttgaatgatatattatcatctggagttgaacagaaaaaatgacataagtatatttcttcagaataaataacaaattaatcaaaagtaaaaagaatacaaaaatgagaatagttatagtcaatactgctacaggtatagcaaatcataaaaagaaaaaagaa

SEQ ID NO: 13385 - DNA, 1139 bp, Glycine max
  Gm_smallRNAprecursor_6218
cctttattgaccttcattttctttttttttttatgatttgctatacctgtagcagtattgactataactattctcatttttgtattctttttacttttgattaatttattatttactctgaagaaatatacttatgtcattttttctgctcaactccagatgataatatgtcattcaaaaaagtgaagggactgaatgcatttttgacttgcagaaaaccagtatatatggtactatttagagtatgtgctttatttcactagattctggacaacctagcaaagagcttaatcctgtattagctattattctacaaaggtatgatgattcatttatttggccattatgaatagtttattctaaagtcttgaagacagtcctaaatttgaaatagcttttgttttttttgtcttttgtttcttttgtattagctattattctacaaaggtatgatttcctttatcaaatactcttacttcaaccatcctctcatgtaactcctgtttgcactaaagattgtccaaaaggaatattgttttatgcagaagacaaattacatcggataagaaaaatcacaccacataattgctgcattgctttagatctctatttctgcataaaacaatattccttttggacaatctttagtgcaaacaggagtcacatgagaggatggttgaattaagagtatttgacaaaggaaatcatacctttgtagaataatagctaatacaaaaaaaacaaaagacgaaagaaacaaaagctatttcaaatttaggactgtcttcaagactttagaataaactattcataatggtcaaataaatgaatcatcatacctttgtagaataatagctaataaaggattaagctccttgctaggttgtccagaatctagtgaaataaagcacatactccaaatagtaccatatatactggttttctacaagtcaaaaatgcattcagtcccttcactttttgaatgatatattatcatctggagttgaacagaaaaaatgacataagtatatttcttcagaataaataacaaattaatcaaaagtaaaaagaatacaaaaatgagaatagttatagtcaatactgctacaggtatagcaaatcataaaaagaaaaaagaa

SEQ ID NO: 13386 - DNA, 1139 bp, Glycine max; identical to SEQ ID NO: 13385
  Gm_smallRNAprecursor_6219

SEQ ID NO: 13387 - DNA, 1135 bp, Glycine max
  Gm_smallRNAprecursor_6220
tttattgaccttcattttctttttttttttatgatttgctatacctgtagcagtattgactataactattctcatttttgtattctttttacttttgattaatttattatttactctgaagaaatatacttatgtcattttttctgctcaactccagatgataatatgtcattcaaaaaagtgaagggactgaatgcatttttgacttgcagaaaaccagtatatatggtactatttagagtatgtgctttatttcactagattctggacaacctagcaaagagcttaatcctgtattagctattattctacaaaggtatgatgattcatttatttggccattatgaatagtttattctaaagtcttgaagacagtcctaaatttgaaatagcttttgttttttttgtcttttgtttcttttgtattagctattattctacaaaggtatgatttcctttatcaaatactcttacttcaaccatcctctcatgtaactcctgtttgcactaaagattgtccaaaaggaatattgttttatgcagaagacaaattacatcggataagaaaaatcacaccacataattgctgcattgctttagatctctatttctgcataaaacaatattccttttggacaatctttagtgcaaacaggagtcacatgagaggatggttgaattaagagtatttgacaaaggaaatcatacctttgtagaataatagctaatacaaaaaaaacaaaagacgaaagaaacaaaagctatttcaaatttaggactgtcttcaagactttagaataaactattcataatggtcaaataaatgaatcatcatacctttgtagaataatagctaataaaggattaagctccttgctaggttgtccagaatctagtgaaataaagcacatactccaaatagtaccatatatactggttttctacaagtcaaaaatgcattcagtcccttcactttttgaatgatatattatcatctggagttgaacagaaaaaatgacataagtatatttcttcagaataaataacaaattaatcaaaagtaaaaagaatacaaaaatgagaatagttatagtcaatactgctacaggtatagcaaatcataaaaagaaaaaag

SEQ ID NO: 13388 - DNA, 1130 bp, Glycine max
  Gm_smallRNAprecursor_6221
tattgaccttcattttctttttttttttatgatttgctatacctgtagcagtattgactataactattctcatttttgtattctttttacttttgattaatttattatttactctgaagaaatatacttatgtcattttttctgctcaactccagatgataatatgtcattcaaaaaagtgaagggactgaatgcatttttgacttgcagaaaaccagtatatatggtactatttagagtatgtgctttatttcactagattctggacaacctagcaaagagcttaatcctgtattagctattattctacaaaggtatgatgattcatttatttggccattatgaatagtttattctaaagtcttgaagacagtcctaaatttgaaatagcttttgttttttttgtcttttgtttcttttgtattagctattattctacaaaggtatgatttcctttatcaaatactcttacttcaaccatcctctcatgtaactcctgtttgcactaaagattgtccaaaaggaatattgttttatgcagaagacaaattacatcggataagaaaaatcacaccacataattgctgcattgctttagatctctatttctgcataaaacaatattccttttggacaatctttagtgcaaacaggagtcacatgagaggatggttgaattaagagtatttgacaaaggaaatcatacctttgtagaataatagctaatacaaaaaaaacaaaagacgaaagaaacaaaagctatttcaaatttaggactgtcttcaagactttagaataaactattcataatggtcaaataaatgaatcatcatacctttgtagaataatagctaataaaggattaagctccttgctaggttgtccagaatctagtgaaataaagcacatactccaaatagtaccatatatactggttttctacaagtcaaaaatgcattcagtcccttcactttttgaatgatatattatcatctggagttgaacagaaaaaatgacataagtatatttcttcagaataaataacaaattaatcaaaagtaaaaagaatacaaaaatgagaatagttatagtcaatactgctacaggtatagcaaatcataaaaagaaaa

SEQ ID NO: 13389 - DNA, 1128 bp, Glycine max
  Gm_smallRNAprecursor_6222
attgaccttcattttctttttttttttatgatttgctatacctgtagcagtattgactataactattctcatttttgtattctttttacttttgattaatttattatttactctgaagaaatatacttatgtcattttttctgctcaactccagatgataatatgtcattcaaaaaagtgaagggactgaatgcatttttgacttgcagaaaaccagtatatatggtactatttagagtatgtgctttatttcactagattctggacaacctagcaaagagcttaatcctgtattagctattattctacaaaggtatgatgattcatttatttggccattatgaatagtttattctaaagtcttgaagacagtcctaaatttgaaatagcttttgttttttttgtcttttgtttcttttgtattagctattattctacaaaggtatgatttcctttatcaaatactcttacttcaaccatcctctcatgtaactcctgtttgcactaaagattgtccaaaaggaatattgttttatgcagaagacaaattacatcggataagaaaaatcacaccacataattgctgcattgctttagatctctatttctgcataaaacaatattccttttggacaatctttagtgcaaacaggagtcacatgagaggatggttgaattaagagtatttgacaaaggaaatcatacctttgtagaataatagctaatacaaaaaaaacaaaagacgaaagaaacaaaagctatttcaaatttaggactgtcttcaagactttagaataaactattcataatggtcaaataaatgaatcatcatacctttgtagaataatagctaataaaggattaagctccttgctaggttgtccagaatctagtgaaataaagcacatactccaaatagtaccatatatactggttttctacaagtcaaaaatgcattcagtcccttcactttttgaatgatatattatcatctggagttgaacagaaaaaatgacataagtatatttcttcagaataaataacaaattaatcaaaagtaaaaagaatacaaaaatgagaatagttatagtcaatactgctacaggtatagcaaatcataaaaagaaa

SEQ ID NO: 13390 - DNA, 1129 bp, Glycine max
  Gm_smallRNAprecursor_6223
attgaccttcattttctttttttttttatgatttgctatacctgtagcagtattgactataactattctcatttttgtattctttttacttttgattaatttattatttactctgaagaaatatacttatgtcattttttctgctcaactccagatgataatatgtcattcaaaaaagtgaagggactgaatgcatttttgacttgcagaaaaccagtatatatggtactatttagagtatgtgctttatttcactagattctggacaacctagcaaagagcttaatcctgtattagctattattctacaaaggtatgatgattcatttatttggccattatgaatagtttattctaaagtcttgaagacagtcctaaatttgaaatagcttttgttttttttgtcttttgtttcttttgtattagctattattctacaaaggtatgatttcctttatcaaatactcttacttcaaccatcctctcatgtaactcctgtttgcactaaagattgtccaaaaggaatattgttttatgcagaagacaaattacatcggataagaaaaatcacaccacataattgctgcattgctttagatctctatttctgcataaaacaatattccttttggacaatctttagtgcaaacaggagtcacatgagaggatggttgaattaagagtatttgacaaaggaaatcatacctttgtagaataatagctaatacaaaaaaaacaaaagacgaaagaaacaaaagctatttcaaatttaggactgtcttcaagactttagaataaactattcataatggtcaaataaatgaatcatcatacctttgtagaataatagctaataaaggattaagctccttgctaggttgtccagaatctagtgaaataaagcacatactccaaatagtaccatatatactggttttctacaagtcaaaaatgcattcagtcccttcactttttgaatgatatattatcatctggagttgaacagaaaaaatgacataagtatatttcttcagaataaataacaaattaatcaaaagtaaaaagaatacaaaaatgagaatagttatagtcaatactgctacaggtatagcaaatcataaaaagaaaa

SEQ ID NO: 13391 - DNA, 1127 bp, Glycine max
  Gm_smallRNAprecursor_6224
ttgaccttcattttctttttttttttatgatttgctatacctgtagcagtattgactataactattctcatttttgtattctttttacttttgattaatttattatttactctgaagaaatatacttatgtcattttttctgctcaactccagatgataatatgtcattcaaaaaagtgaagggactgaatgcatttttgacttgcagaaaaccagtatatatggtactatttagagtatgtgctttatttcactagattctggacaacctagcaaagagcttaatcctgtattagctattattctacaaaggtatgatgattcatttatttggccattatgaatagtttattctaaagtcttgaagacagtcctaaatttgaaatagcttttgttttttttgtcttttgtttcttttgtattagctattattctacaaaggtatgatttcctttatcaaatactcttacttcaaccatcctctcatgtaactcctgtttgcactaaagattgtccaaaaggaatattgttttatgcagaagacaaattacatcggataagaaaaatcacaccacataattgctgcattgctttagatctctatttctgcataaaacaatattccttttggacaatctttagtgcaaacaggagtcacatgagaggatggttgaattaagagtatttgacaaaggaaatcatacctttgtagaataatagctaatacaaaaaaaacaaaagacgaaagaaacaaaagctatttcaaatttaggactgtcttcaagactttagaataaactattcataatggtcaaataaatgaatcatcatacctttgtagaataatagctaataaaggattaagctccttgctaggttgtccagaatctagtgaaataaagcacatactccaaatagtaccatatatactggttttctacaagtcaaaaatgcattcagtcccttcactttttgaatgatatattatcatctggagttgaacagaaaaaatgacataagtatatttcttcagaataaataacaaattaatcaaaagtaaaaagaatacaaaaatgagaatagttatagtcaatactgctacaggtatagcaaatcataaaaagaaa

SEQ ID NO: 13392 - DNA, 1127 bp, Glycine max; identical to SEQ ID NO: 13391
  Gm_smallRNAprecursor_6225

SEQ ID NO: 13393 - DNA, 1118 bp, Glycine max
  Gm_smallRNAprecursor_6226
ccttcattttctttttttttttatgatttgctatacctgtagcagtattgactataactattctcatttttgtattctttttacttttgattaatttattatttactctgaagaaatatacttatgtcattttttctgctcaactccagatgataatatgtcattcaaaaaagtgaagggactgaatgcatttttgacttgcagaaaaccagtatatatggtactatttagagtatgtgctttatttcactagattctggacaacctagcaaagagcttaatcctgtattagctattattctacaaaggtatgatgattcatttatttggccattatgaatagtttattctaaagtcttgaagacagtcctaaatttgaaatagcttttgttttttttgtcttttgtttcttttgtattagctattattctacaaaggtatgatttcctttatcaaatactcttacttcaaccatcctctcatgtaactcctgtttgcactaaagattgtccaaaaggaatattgttttatgcagaagacaaattacatcggataagaaaaatcacaccacataattgctgcattgctttagatctctatttctgcataaaacaatattccttttggacaatctttagtgcaaacaggagtcacatgagaggatggttgaattaagagtatttgacaaaggaaatcatacctttgtagaataatagctaatacaaaaaaaacaaaagacgaaagaaacaaaagctatttcaaatttaggactgtcttcaagactttagaataaactattcataatggtcaaataaatgaatcatcatacctttgtagaataatagctaataaaggattaagctccttgctaggttgtccagaatctagtgaaataaagcacatactccaaatagtaccatatatactggttttctacaagtcaaaaatgcattcagtcccttcactttttgaatgatatattatcatctggagttgaacagaaaaaatgacataagtatatttcttcagaataaataacaaattaatcaaaagtaaaaagaatacaaaaatgagaatagttatagtcaatactgctacaggtatagcaaatcataaaa

SEQ ID NO: 13394 - DNA, 1110 bp, Glycine max
  Gm_smallRNAprecursor_6227
tattgtagatcactcagtgatcgaaatgccgcaagactatgtcgatacagagccttggattttgtatttcgatggttcgaaacacaaacgtggaactggaattggagttttaataatatctcccaataaagttccaactaaattcaaatataaaatcaaagggctttgttttaataataaggctgagtatgaggctctaattacaggccttgaaattttaattagcttgggggcaagaaatgttaacataaggggtgattcagaactagtgttgagacaattaacacaagaatacaaatgtattaatgaacacttagcaaaatattttgttatggcaagttctcttctgaatcatttcgattacattaacattgagcatatacctcgacaagaaaaccaagaagcaaatgatttagcccaaatagcttcagggtacaaaatgtcgaaggaaaagttaactcagttgatcgaaataaaagataaactggtattaccagagccattaagcactaaattgccaatgccaaaacttgtgggggcaagtacaccacaaaataatgaagatgaaagcatagatgatctccagggaaaaattcaaattttggccattgacaatatgttagataatgattggagaaagtccattgttgaatatttggaaaatccaataggtaatgtggctcgaaaggtcaaatatagggctttaaattacgtgattgtgggaaatgatttgtttaaaaagactgcagaaggagtgttgctaaaatgtctaagtgaatcagaagcatacttggcagtttcccatgttcacagtggggcctgtggatcacatcaagcaggccataaaatgaaatggcttttatttcgacaaggtttgtattggccttcgatgttaaaagactgcatagaatttgctaaaggctgtcaggaatgccaaaagcatgcagggatacagcatgtacctgctagtgagttacactccataatcaaaccttggcctttcagaggatgggctttggacctaattggtgaaatcaagcctgcttcttctaagaaccagcgttatattatagttggtatcgattactttacaaaatggatcgaagcagt

SEQ ID NO: 13395 - DNA, 1082 bp, Glycine max
  Gm_smallRNAprecursor_6228
cagtgatcgaaatgccgcaagactatgtcgatacagagccttggattttgtatttcgatggttcgaaacacaaacgtggaactggaattggagttttaataatatctcccaataaagttccaactaaattcaaatataaaatcaaagggctttgttttaataataaggctgagtatgaggctctaattacaggccttgaaattttaattagcttgggggcaagaaatgttaacataaggggtgattcagaactagtgttgagacaattaacacaagaatacaaatgtattaatgaacacttagcaaaatattttgttatggcaagttctcttctgaatcatttcgattacattaacattgagcatatacctcgacaagaaaaccaagaagcaaatgatttagcccaaatagcttcagggtacaaaatgtcgaaggaaaagttaactcagttgatcgaaataaaagataaactggtattaccagagccattaagcactaaattgccaatgccaaaacttgtgggggcaagtacaccacaaaataatgaagatgaaagcatagatgatctccagggaaaaattcaaattttggccattgacaatatgttagataatgattggagaaagtccattgttgaatatttggaaaatccaataggtaatgtggctcgaaaggtcaaatatagggctttaaattacgtgattgtgggaaatgatttgtttaaaaagactgcagaaggagtgttgctaaaatgtctaagtgaatcagaagcatacttggcagtttcccatgttcacagtggggcctgtggatcacatcaagcaggccataaaatgaaatggcttttatttcgacaaggtttgtattggccttcgatgttaaaagactgcatagaatttgctaaaggctgtcaggaatgccaaaagcatgcagggatacagcatgtacctgctagtgagttacactccataatcaaaccttggcctttcagaggatgggctttggacctaattggtgaaatcaagcctgcttcttctaagaaccagcgttatattatagttggtatcgattactttacaaaa

SEQ ID NO: 13396 - DNA, 1056 bp, Glycine max
  Gm_smallRNAprecursor_6229
atgcatgatatatattgaaagaactaagctaataatactaaaaattgtaattcatgacaaacttcttaagttataatatatttttatcacttgtttttacaatctaaatatatttataattttttctttatatatatatatatatatatatatatatatatatatatatatatatatatatatatatattaccaagaatcattacgttcaatgctatgagaataatcaagaggtcggagaggtgattgggtaaaataattccatgcatgacatattgatatattaggattcaaatttataatattacagataaagtttaagaaaccgaagcggcggtagagccgcacaggatcggtgaggggagaagggagatgtggaaaatagaacttgaaatttattgaaaccaaaagaaaagcttacaaagagtttttccctaggcagagcttctctctctaaaaacctgattctgagactatctcaaagggtgcctcacaacgggaacgaggactcctttaaatagactcaatttttactgtttctacagtgtcggtaatgtttaccggaactgttacaaattacattatttaaaagaaactgacaaattagttacaataattcatgattactacaactaattaatcgtcgtctaatgatataccaaaacagtcatcttcattctggtagaatggatcatcttcttggtcatcattagtctcggatgattcagcttccttctttgaaggttcttcttccacttcctgttgaagtagttggagaacttctttgagattctgagtaagactctctttagattttgagcttgctaagaatgctgccagttgcaacttctgatttagaaacaaagatgtctccggatcagcaggtttaaggaactcaggattgctctggaatcagttcttgacttaatctggagcagcctttgaagtatcgaattgtgaccaccattttacaaaggcgtgtctctgtagcggtggatattgcttgctgttttcagttccatgacaaggaaaaactggaaaagtactttaaatctgc

SEQ ID NO: 13397 - DNA, 1204 bp, Glycine max
  Gm_smallRNAprecursor_6230
gacaaacttcttaagttataatatatttttatcacttgtttttacaatctaaatatatttataattttttctttatatatatatatatatatatatatatatatatatatatatatatatatatatatatatattaccaagaatcattacgttcaatgctatgagaataatcaagaggtcggagaggtgattgggtaaaataattccatgcatgacatattgatatattaggattcaaatttataatattacagataaagtttaagaaaccgaagcggcggtagagccgcacaggatcggtgaggggagaagggagatgtggaaaatagaacttgaaatttattgaaaccaaaagaaaagcttacaaagagtttttccctaggcagagcttctctctctaaaaacctgattctgagactatctcaaagggtgcctcacaacgggaacgaggactcctttaaatagactcaatttttactgtttctacagtgtcggtaatgtttaccggaactgttacaaattacattatttaaaagaaactgacaaattagttacaataattcatgattactacaactaattaatcgtcgtctaatgatataccaaaacagtcatcttcattctggtagaatggatcatcttcttggtcatcattagtctcggatgattcagcttccttctttgaaggttcttcttccacttcctgttgaagtagttggagaacttctttgagattctgagtaagactctctttagattttgagcttgctaagaatgctgccagttgcaacttctgatttagaaacaaagatgtctccggatcagcaggtttaaggaactcaggattgctctggaatcagttcttgacttaatctggagcagcctttgaagtatcgaattgtgaccaccattttacaaaggcgtgtctctgtagcggtggatattgcttgctgttttcagttccatgacaaggaaaaactggaaaagtactttaaatctgccggaatacgtgattccttgctattatagagcttgttgaattgttggaatccctgttggacttcttctgggaatatttatggaattggtccgaagtagttccaccattggaggaaccaatttggaaaattatacgccgtattatttttgaagtaaatcagccatgaatgcttgaatttactattttgatgccagaacacattgg

SEQ ID NO: 13398 - DNA, 1145 bp, Glycine max
  Gm_smallRNAprecursor_6231
cgttcaatgctatgagaataatcaagaggtcggagaggtgattgggtaaaataattccatgcatgacatattgatatattaggattcaaatttataatattacagataaagtttaagaaaccgaagcggcggtagagccgcacaggatcggtgaggggagaagggagatgtggaaaatagaacttgaaatttattgaaaccaaaagaaaagcttacaaagagtttttccctaggcagagcttctctctctaaaaacctgattctgagactatctcaaagggtgcctcacaacgggaacgaggactcctttaaatagactcaatttttactgtttctacagtgtcggtaatgtttaccggaactgttacaaattacattatttaaaagaaactgacaaattagttacaataattcatgattactacaactaattaatcgtcgtctaatgatataccaaaacagtcatcttcattctggtagaatggatcatcttcttggtcatcattagtctcggatgattcagcttccttctttgaaggttcttcttccacttcctgttgaagtagttggagaacttctttgagattctgagtaagactctctttagattttgagcttgctaagaatgctgccagttgcaacttctgatttagaaacaaagatgtctccggatcagcaggtttaaggaactcaggattgctctggaatcagttcttgacttaatctggagcagcctttgaagtatcgaattgtgaccaccattttacaaaggcgtgtctctgtagcggtggatattgcttgctgttttcagttccatgacaaggaaaaactggaaaagtactttaaatctgccggaatacgtgattccttgctattatagagcttgttgaattgttggaatccctgttggacttcttctgggaatatttatggaattggtccgaagtagttccaccattggaggaaccaatttggaaaattatacgccgtattatttttgaagtaaatcagccatgaatgcttgaatttactattttgatgccagaacacattggtccaggcgtcaatgtaatcccaataattatatcctgcagggtcaaatggtgcataaatttttttgggttggtttaaatttgagccataat

SEQ ID NO: 13399 - DNA, 1146 bp, Glycine max
  Gm_smallRNAprecursor_6232
cgttcaatgctatgagaataatcaagaggtcggagaggtgattgggtaaaataattccatgcatgacatattgatatattaggattcaaatttataatattacagataaagtttaagaaaccgaagcggcggtagagccgcacaggatcggtgaggggagaagggagatgtggaaaatagaacttgaaatttattgaaaccaaaagaaaagcttacaaagagtttttccctaggcagagcttctctctctaaaaacctgattctgagactatctcaaagggtgcctcacaacgggaacgaggactcctttaaatagactcaatttttactgtttctacagtgtcggtaatgtttaccggaactgttacaaattacattatttaaaagaaactgacaaattagttacaataattcatgattactacaactaattaatcgtcgtctaatgatataccaaaacagtcatcttcattctggtagaatggatcatcttcttggtcatcattagtctcggatgattcagcttccttctttgaaggttcttcttccacttcctgttgaagtagttggagaacttctttgagattctgagtaagactctctttagattttgagcttgctaagaatgctgccagttgcaacttctgatttagaaacaaagatgtctccggatcagcaggtttaaggaactcaggattgctctggaatcagttcttgacttaatctggagcagcctttgaagtatcgaattgtgaccaccattttacaaaggcgtgtctctgtagcggtggatattgcttgctgttttcagttccatgacaaggaaaaactggaaaagtactttaaatctgccggaatacgtgattccttgctattatagagcttgttgaattgttggaatccctgttggacttcttctgggaatatttatggaattggtccgaagtagttccaccattggaggaaccaatttggaaaattatacgccgtattatttttgaagtaaatcagccatgaatgcttgaatttactattttgatgccagaacacattggtccaggcgtcaatgtaatcccaataattatatcctgcagggtcaaatggtgcataaatttttttgggttggtttaaatttgagccataatg

SEQ ID NO: 13400 - DNA, 1038 bp, Glycine max
  Gm_smallRNAprecursor_6233
cccagaagatcatgtagttgcctttttggttattggctctggtagagccaataaaacctcttttctttttgtactggatctccctcctctgccggaggaactagacaccttaggaggcatcgggaattttctgtaaaaattcacgggtgaggtagtcaggtagagagttggaagagcccttgatatattctatattaaaatcaaagacgcttaaaattgcttgccatcttgcaaaaatctgttttgaggcaaggttttttacatccttctgtaaaatgtctttggctgatttgcagtcaacccttaccaaaattttttgatttaatagatcagattgaaatttggaaatgcacaaaacaattgctaaaacttcttttttaacagttgaatactttaattgtgcaggattccaatgttttgaagtatatgcgatgacatgttcttgaccatggacttgttgtttgaggatgccaccgtaaccgatgtctaatgcatcagtttcgacaattttgaatgcctgtggaatgggaagatacagacattttatggattggactttgactttgatttctttaattgtttgggtatagaggtcagaccaaggaggcgaatttttctttagcctatcatgcaatggcttgacaatattgtttaagtaggggacaaattctcctacgtaatttagacaacctagaaatctttgtaattgggttttgtctaagatttggttgggaaatttgctagcaaactctattgatctttcgattggaatgattgtaccttggtaaatattgtggccaaggaatcgaattcgagtttggaaaagattgatctttgatttggagactgccaaaccattttgtttgatgatatggatgaaggtttggagatgtttgaaatgttggtcaatgttttgggaaaagattaaaacatcatctatgtagacaatgacaaattttgaatagggattaaaaatatcattcataattttttgaaattctgaaggggcattcttcagttcgaatggcatcacattcc

SEQ ID NO: 13401 - DNA, 1232 bp, Glycine max
  Gm_smallRNAprecursor_6234
aattgcttgccatcttgcaaaaatctgttttgaggcaaggttttttacatccttctgtaaaatgtctttggctgatttgcagtcaacccttaccaaaattttttgatttaatagatcagattgaaatttggaaatgcacaaaacaattgctaaaacttcttttttaacagttgaatactttaattgtgcaggattccaatgttttgaagtatatgcgatgacatgttcttgaccatggacttgttgtttgaggatgccaccgtaaccgatgtctaatgcatcagtttcgacaattttgaatgcctgtggaatgggaagatacagacattttatggattggactttgactttgatttctttaattgtttgggtatagaggtcagaccaaggaggcgaatttttctttagcctatcatgcaatggcttgacaatattgtttaagtaggggacaaattctcctacgtaatttagacaacctagaaatctttgtaattgggttttgtctaagatttggttgggaaatttgctagcaaactctattgatctttcgattggaatgattgtaccttggtaaatattgtggccaaggaatcgaattcgagtttggaaaagattgatctttgatttggagactgccaaaccattttgtttgatgatatggatgaaggtttggagatgtttgaaatgttggtcaatgttttgggaaaagattaaaacatcatctatgtagacaatgacaaattttgaatagggattaaaaatatcattcataattttttgaaattctgaaggggcattcttcagttcgaatggcatcacattccattcataatgcccgaaaggtacagtaaacgctgttttgtacctatctgattcttggatttggatttgccaaaatccagatttcatatcaaattttgaaaatatctttgcagaatttagtctgttaagcaaatcttttttgtttggaataggatatctaatccattgtaatgcttgatttagtggtttgtaatttatgaccaagcgaggtgttccacgctcaatctcagattgcttgttgacataaaaagccgcacaagaccatgggcttttgcttttccggattaggcctttatcaagcaaatccttgatttctttttgacaatactgaagaagttcttcattcatttggattggtctggctttggtgggaatttgtttttccctaaagtctttctcataagggagat

SEQ ID NO: 13402 - DNA, 1205 bp, Glycine max
  Gm_smallRNAprecursor_6235
ttttgaggcaaggttttttacatccttctgtaaaatgtctttggctgatttgcagtcaacccttaccaaaattttttgatttaatagatcagattgaaatttggaaatgcacaaaacaattgctaaaacttcttttttaacagttgaatactttaattgtgcaggattccaatgttttgaagtatatgcgatgacatgttcttgaccatggacttgttgtttgaggatgccaccgtaaccgatgtctaatgcatcagtttcgacaattttgaatgcctgtggaatgggaagatacagacattttatggattggactttgactttgatttctttaattgtttgggtatagaggtcagaccaaggaggcgaatttttctttagcctatcatgcaatggcttgacaatattgtttaagtaggggacaaattctcctacgtaatttagacaacctagaaatctttgtaattgggttttgtctaagatttggttgggaaatttgctagcaaactctattgatctttcgattggaatgattgtaccttggtaaatattgtggccaaggaatcgaattcgagtttggaaaagattgatctttgatttggagactgccaaaccattttgtttgatgatatggatgaaggtttggagatgtttgaaatgttggtcaatgttttgggaaaagattaaaacatcatctatgtagacaatgacaaattttgaatagggattaaaaatatcattcataattttttgaaattctgaaggggcattcttcagttcgaatggcatcacattccattcataatgcccgaaaggtacagtaaacgctgttttgtacctatctgattcttggatttggatttgccaaaatccagatttcatatcaaattttgaaaatatctttgcagaatttagtctgttaagcaaatcttttttgtttggaataggatatctaatccattgtaatgcttgatttagtggtttgtaatttatgaccaagcgaggtgttccacgctcaatctcagattgcttgttgacataaaaagccgcacaagaccatgggcttttgcttttccggattaggcctttatcaagcaaatccttgatttctttttgacaatactgaagaagttcttcattcatttggattggtctggctttggtgggaatttgtttttccctaaagtctttctcataagggagat

SEQ ID NO: 13403 - DNA, 1076 bp, Glycine max
  Gm_smallRNAprecursor_6236
ccatctttcgggaagagttacttcatcccattttatttttctcgggagagaaacgttagcctttgtcatatcagtgataaacaaagttgtttctcctttttgaggttttaacaagactctagatgcacaagtattcatgaccttgtactggatcctataaattaaggctgctgggattgatccttctttcatgtcaaggccatgaaagtggatgtttaagaacagagagtcaagaatgtttctgtccatcagactcactattttgtttggataacaattaaaatatattggaccttgtcctaggctggtttcgactgttccaattagggagtcttcaaattgattatgcctaatgtctcttagacacattaaaactgttgcatctatgcccatatcaattaagggcttaatggctacttgtacacaaccgatgtgtagatatttatacttacggctatgttcataaattgaattttttgaaagtaaatgaaattcttcccctatatcttgtcctagaggaatattgttttctactgttttgattatgtaatcaaagttgtgtttgtccttaattgtttcaggaacgtatagttgatcctgagggatttctggaatgttccagtcatccatgttttgattgatatcttcgaatcggacttcctcatcgaagagattgtgttttgtgacgacctcttgggtctagttatcttgatcatttaataaattggagtttcttgaagaagatgatgaggaggagtttgagcgaaaagagatacgggaaaaagatcgtaatagtctagacatgattataatattctctaatatctttgccttcctttggttccatagaaatatctccgtaagtaaatatgtcacaaaatttttctggatctgaattatttttaagaaaaactctttttttttttgaatgatagtttgaacgccaatcctatagccaccagtatattatgtcttgtcttgatatttaggttaaatagtacaccttagccttaccgccctttatccatcacgggtcttactgctacagtaccattcaactaaaatattagactgct

SEQ ID NO: 13404 - DNA, 1159 bp, Glycine max
  Gm_smallRNAprecursor_6237
ccatctttcgggaagagttacttcatcccattttatttttctcgggagagaaacgttagcctttgtcatatcagtgataaacaaagttgtttctcctttttgaggttttaacaagactctagatgcacaagtattcatgaccttgtactggatcctataaattaaggctgctgggattgatccttctttcatgtcaaggccatgaaagtggatgtttaagaacagagagtcaagaatgtttctgtccatcagactcactattttgtttggataacaattaaaatatattggaccttgtcctaggctggtttcgactgttccaattagggagtcttcaaattgattatgcctaatgtctcttagacacattaaaactgttgcatctatgcccatatcaattaagggcttaatggctacttgtacacaaccgatgtgtagatatttatacttacggctatgttcataaattgaattttttgaaagtaaatgaaattcttcccctatatcttgtcctagaggaatattgttttctactgttttgattatgtaatcaaagttgtgtttgtccttaattgtttcaggaacgtatagttgatcctgagggatttctggaatgttccagtcatccatgttttgattgatatcttcgaatcggacttcctcatcgaagagattgtgttttgtgacgacctcttgggtctagttatcttgatcatttaataaattggagtttcttgaagaagatgatgaggaggagtttgagcgaaaagagatacgggaaaaagatcgtaatagtctagacatgattataatattctctaatatctttgccttcctttggttccatagaaatatctccgtaagtaaatatgtcacaaaatttttctggatctgaattatttttaagaaaaactctttttttttttgaatgatagtttgaacgccaatcctatagccaccagtatattatgtcttgtcttgatatttaggttaaatagtacaccttagccttaccgccctttatccatcacgggtcttactgctacagtaccattcaactaaaatattagactgctgtacttccaggaagtactgttcaaacatttactgtacaaatcaaaataaatattacttatactatacaaggtttcagatccat

SEQ ID NO: 13405 - DNA, 1105 bp, Glycine max
  Gm_smallRNAprecursor_6238
ctattttgtttggataacaattaaaatatattggaccttgtcctaggctggtttcgactgttccaattagggagtcttcaaattgattatgcctaatgtctcttagacacattaaaactgttgcatctatgcccatatcaattaagggcttaatggctacttgtacacaaccgatgtgtagatatttatacttacggctatgttcataaattgaattttttgaaagtaaatgaaattcttcccctatatcttgtcctagaggaatattgttttctactgttttgattatgtaatcaaagttgtgtttgtccttaattgtttcaggaacgtatagttgatcctgagggatttctggaatgttccagtcatccatgttttgattgatatcttcgaatcggacttcctcatcgaagagattgtgttttgtgacgacctcttgggtctagttatcttgatcatttaataaattggagtttcttgaagaagatgatgaggaggagtttgagcgaaaagagatacgggaaaaagatcgtaatagtctagacatgattataatattctctaatatctttgccttcctttggttccatagaaatatctccgtaagtaaatatgtcacaaaatttttctggatctgaattatttttaagaaaaactctttttttttttgaatgatagtttgaacgccaatcctatagccaccagtatattatgtcttgtcttgatatttaggttaaatagtacaccttagccttaccgccctttatccatcacgggtcttactgctacagtaccattcaactaaaatattagactgctgtacttccaggaagtactgttcaaacatttactgtacaaatcaaaataaatattacttatactatacaaggtttcagatccataaaatttgttaacatatatccttacaaatagtattcctacttccccatcaggctctgataccaaagattagcggaataagatcaaacggacagataggaagtaagaatgcagtatgataaatgaggaaaatataaacttgtaaagcagatatcaagggcacaccgaaacggcttacaaacccaggtttttgaaaacaaagaaa

SEQ ID NO: 13406 - DNA, 1203 bp, Glycine max
  Gm_smallRNAprecursor_6239
agacacattaaaactgttgcatctatgcccatatcaattaagggcttaatggctacttgtacacaaccgatgtgtagatatttatacttacggctatgttcataaattgaattttttgaaagtaaatgaaattcttcccctatatcttgtcctagaggaatattgttttctactgttttgattatgtaatcaaagttgtgtttgtccttaattgtttcaggaacgtatagttgatcctgagggatttctggaatgttccagtcatccatgttttgattgatatcttcgaatcggacttcctcatcgaagagattgtgttttgtgacgacctcttgggtctagttatcttgatcatttaataaattggagtttcttgaagaagatgatgaggaggagtttgagcgaaaagagatacgggaaaaagatcgtaatagtctagacatgattataatattctctaatatctttgccttcctttggttccatagaaatatctccgtaagtaaatatgtcacaaaatttttctggatctgaattatttttaagaaaaactctttttttttttgaatgatagtttgaacgccaatcctatagccaccagtatattatgtcttgtcttgatatttaggttaaatagtacaccttagccttaccgccctttatccatcacgggtcttactgctacagtaccattcaactaaaatattagactgctgtacttccaggaagtactgttcaaacatttactgtacaaatcaaaataaatattacttatactatacaaggtttcagatccataaaatttgttaacatatatccttacaaatagtattcctacttccccatcaggctctgataccaaagattagcggaataagatcaaacggacagataggaagtaagaatgcagtatgataaatgaggaaaatataaacttgtaaagcagatatcaagggcacaccgaaacggcttacaaacccaggtttttgaaaacaaagaaatcgaagcggcggcagagccgcacaggatcggtgaggggagaagggagatgtggaaaatagaacttgaaatttattgaaaccgaaagaaaagcttacaaagagtttttcctaggcagagcttctctctctaaaaacctgattctgagactatctcaaatatatatatatatatatatatatatatatatatatatatatatat

SEQ ID NO: 13407 - DNA, 1092 bp, Glycine max
  Gm_smallRNAprecursor_6240
actccaaatttgcagaagctagctattaaattttgagtttgacttgcagtgcttcaggatgtgaaagaaattggagtgtgtttgagcaagtaattgtgacaaaactctaactatactttttaattttatttaattttgatgatcaagttttatttggagtatatttgagattgaaatcaacatttatttgttatgttgtagattcattccaaaaaaagaaataggcttgagcacaagaggttgcatgatttggtgtttgtcaaatacaaccaacaattaaggcaaagatataatgcaagagatgaaattaatccaatttctcttaatgatattgatgtgtgcaatgaatggcctgtgggagagatggatcaagatgatgataatgatgttggaaatgatttggtatcaggcttcgagggttggagagtataggatgtatactaggcggaaaaagcaaaaaacaacaagtgttgttgctgcacaaacttctaaaaaacatgcaatggttgttggatcttcatcaaggaagcaaaaagaagtccaagaaaatgatgaggatctagattttgaggagaatattaatcttgaatctgaagaagaagaaatcatggtcaattttgaggcgtctgatggggaagagggagagggagatgctccattaccatatgataataacgaagatgattatgttgggattggagaagatgattagagtctcaaccttcactttgcactttgcattatggttttatcattttcttattttcaactctttaatgagtttatttggtgttggtacttgattattgtatgaactcatgaaacttttttagtttatttgaatgcaatcctttgtttttttcaatttcaatgagtttatatatatgtatattttttttttgtccgccatgacatccgccatttttcgctacgccatccgtcatatttttatggcaaatttttggctttccgccatgaaccgccatctgttattaacaacattgttttatattctattaggcattaatccattactagttttaggtttaaaatagacctttttaggagagaatacacactctagactgaact

SEQ ID NO: 13408 - DNA, 1092 bp, Glycine max; identical to SEQ ID NO: 13407
  Gm_smallRNAprecursor_6241

SEQ ID NO: 13409 - DNA, 1035 bp, Glycine max
  Gm_smallRNAprecursor_6242
taaagttttcttcacatgtattatattttattttgtagtagcaatggcatcttcatcatcattttcatcacatattaacattaagtctggctccatcgatactcatgtattatggatgcaacctaagcatgtttcagaacatgtttggaatgaggaagaaaaaaggaaattacatatcagacgagctgtccccatgtatcaaggggaagaacaaattctagagcaaatttttccttttcttcaacaatctggtttcggctagattatcaagatgagatacttaaaaataaatgcctcattaattagtgctctgatagaaaaatggaggccagaaacacatacgtttcacatgagatgtggagagtgtactattactctacaagacgtctctgtattgttaggtataagtgtggatggtttaccattaatcggtccaacaaatcttgattgggctgatttatgtgaggaattattgggagtcagaccacaagaagatgaaattaaaggtagtgtggttaaattaagttggctggctcaccattttgcacaaataaataatgacgacgacgaagaacaagtacgaaggtttgcccgtgcatggatactgagattcattggaggtgtcttgttcgttgacaaaaccagtaacagagtttcgctaaggtacctttaatttttacgtgactttgaagaatgtggcagatatgcatagggagctgccgtacttggttttctatacagagagatgtgcagtgccaccgattataaaactaaatcaatcggaggtatgtgcatcttactacaattgtgggcatgggaacgatgtccaaccttggctccaaagaggactcattcccaagtagaaaatacaccactgaggcacaggtcagtcttttttaacagcatctttcatttcaatagaataaatggttttagggtatattaaattttattctttgtaggtggctgcgacgtggaaaccaacatattggcaatgatgatgtgaaagtttttcgtcacaagttggatattatg

SEQ ID NO: 13410 - DNA, 1070 bp, Glycine max
  Gm_smallRNAprecursor_6243
gggcttataaaagaccgttggtatagcagcaaagaataatgaacttgtggttggggttgttgcatatacatatgtaaagatcataaagttaatttttacacttgtttttctaatttctccttttttttctttttagttgttataattagaatattataaataagtgagcaatggaagataaacccacatttattccgtgtatacgtgatgcaagcattccttctttctggctctatataaaccctgcatccttcacctcttcacacaagggcattcaagtttgtcatttcatttgttccatatatagaaagtgaacttttgttgaatgtagagagaaagagtgagaaaaaggccctgtttgtttctctctccctaaccctcatcctacccatttcagaagcagcaggttattattactattagctttagttataaggagtagtgatacacatcagatttcattaattctatggagatatattaatgaagggtaagagaggtgacagaagagagtgagcacacatggtattttcttggatgatataagatttcatgcttgaaactatgcgtgctcattctctatctgtcacccatcatcatttctttcttgttatcctttgtgatattatatatatatatatatattgtttctttctttctcactttcccttttatatgctattaagtaaccctagctagcaacttggactcttgcagtcatatcattcaatagtatatatgttatatgcgcatcacattccttatcacaggtatgtcttttccatattactgttgttcttgcatatatggatatttcttgattagcatgccgtcttttccaaattagcatgctgatttgaagtatatcagtttcctaatgaaaggcatttttttttttatttctgcttgtctgaggcacatgtgtgcgctttgttttcacaaatacaagtatgtgtgactctaattagttgatgaattttgattttatgctctcagttaacctacgaatctaatacctttaagaggttaaatgttgactaattaaagcacctatggaaaatcctagaaag

SEQ ID NO: 13411 - DNA, 1071 bp, Glycine max
  Gm_smallRNAprecursor_6244
gggcttataaaagaccgttggtatagcagcaaagaataatgaacttgtggttggggttgttgcatatacatatgtaaagatcataaagttaatttttacacttgtttttctaatttctccttttttttctttttagttgttataattagaatattataaataagtgagcaatggaagataaacccacatttattccgtgtatacgtgatgcaagcattccttctttctggctctatataaaccctgcatccttcacctcttcacacaagggcattcaagtttgtcatttcatttgttccatatatagaaagtgaacttttgttgaatgtagagagaaagagtgagaaaaaggccctgtttgtttctctctccctaaccctcatcctacccatttcagaagcagcaggttattattactattagctttagttataaggagtagtgatacacatcagatttcattaattctatggagatatattaatgaagggtaagagaggtgacagaagagagtgagcacacatggtattttcttggatgatataagatttcatgcttgaaactatgcgtgctcattctctatctgtcacccatcatcatttctttcttgttatcctttgtgatattatatatatatatatatattgtttctttctttctcactttcccttttatatgctattaagtaaccctagctagcaacttggactcttgcagtcatatcattcaatagtatatatgttatatgcgcatcacattccttatcacaggtatgtcttttccatattactgttgttcttgcatatatggatatttcttgattagcatgccgtcttttccaaattagcatgctgatttgaagtatatcagtttcctaatgaaaggcatttttttttttatttctgcttgtctgaggcacatgtgtgcgctttgttttcacaaatacaagtatgtgtgactctaattagttgatgaattttgattttatgctctcagttaacctacgaatctaatacctttaagaggttaaatgttgactaattaaagcacctatggaaaatcctagaaagt

SEQ ID NO: 13412 - DNA, 1069 bp, Glycine max
  Gm_smallRNAprecursor_6245
ggcttataaaagaccgttggtatagcagcaaagaataatgaacttgtggttggggttgttgcatatacatatgtaaagatcataaagttaatttttacacttgtttttctaatttctccttttttttctttttagttgttataattagaatattataaataagtgagcaatggaagataaacccacatttattccgtgtatacgtgatgcaagcattccttctttctggctctatataaaccctgcatccttcacctcttcacacaagggcattcaagtttgtcatttcatttgttccatatatagaaagtgaacttttgttgaatgtagagagaaagagtgagaaaaaggccctgtttgtttctctctccctaaccctcatcctacccatttcagaagcagcaggttattattactattagctttagttataaggagtagtgatacacatcagatttcattaattctatggagatatattaatgaagggtaagagaggtgacagaagagagtgagcacacatggtattttcttggatgatataagatttcatgcttgaaactatgcgtgctcattctctatctgtcacccatcatcatttctttcttgttatcctttgtgatattatatatatatatatatattgtttctttctttctcactttcccttttatatgctattaagtaaccctagctagcaacttggactcttgcagtcatatcattcaatagtatatatgttatatgcgcatcacattccttatcacaggtatgtcttttccatattactgttgttcttgcatatatggatatttcttgattagcatgccgtcttttccaaattagcatgctgatttgaagtatatcagtttcctaatgaaaggcatttttttttttatttctgcttgtctgaggcacatgtgtgcgctttgttttcacaaatacaagtatgtgtgactctaattagttgatgaattttgattttatgctctcagttaacctacgaatctaatacctttaagaggttaaatgttgactaattaaagcacctatggaaaatcctagaaag

SEQ ID NO: 13413 - DNA, 1070 bp, Glycine max
  Gm_smallRNAprecursor_6246
ggcttataaaagaccgttggtatagcagcaaagaataatgaacttgtggttggggttgttgcatatacatatgtaaagatcataaagttaatttttacacttgtttttctaatttctccttttttttctttttagttgttataattagaatattataaataagtgagcaatggaagataaacccacatttattccgtgtatacgtgatgcaagcattccttctttctggctctatataaaccctgcatccttcacctcttcacacaagggcattcaagtttgtcatttcatttgttccatatatagaaagtgaacttttgttgaatgtagagagaaagagtgagaaaaaggccctgtttgtttctctctccctaaccctcatcctacccatttcagaagcagcaggttattattactattagctttagttataaggagtagtgatacacatcagatttcattaattctatggagatatattaatgaagggtaagagaggtgacagaagagagtgagcacacatggtattttcttggatgatataagatttcatgcttgaaactatgcgtgctcattctctatctgtcacccatcatcatttctttcttgttatcctttgtgatattatatatatatatatatattgtttctttctttctcactttcccttttatatgctattaagtaaccctagctagcaacttggactcttgcagtcatatcattcaatagtatatatgttatatgcgcatcacattccttatcacaggtatgtcttttccatattactgttgttcttgcatatatggatatttcttgattagcatgccgtcttttccaaattagcatgctgatttgaagtatatcagtttcctaatgaaaggcatttttttttttatttctgcttgtctgaggcacatgtgtgcgctttgttttcacaaatacaagtatgtgtgactctaattagttgatgaattttgattttatgctctcagttaacctacgaatctaatacctttaagaggttaaatgttgactaattaaagcacctatggaaaatcctagaaagt

SEQ ID NO: 13414 - DNA, 1102 bp, Glycine max
  Gm_smallRNAprecursor_6247
tcgattaagagatttcgttcttaccaatcacgaaatcaaaatcgagaaattttagatgaatggaaagagagagagagagagagagagactacgagaaacttcgagctggtcgaggaggagatgcgaaagaagatgtgggcggcgcaggtggtgttcggaattatgagggagcggtttgagacgacggtgacggtgtgagaagagggaatcaaatgaagaagggtgttgctaggtacacccatcattattactggtgcacccagcacttaacgtgaaaagacaaaaatactcttgcatatttttaaaaatgtttttatccacccagttcattcaggttgatccgcatatgcaatgagttgatctccagttgatatagatgatccgcaaacttcttacggatcaacttgatccgcaagtgacttacaaatcaacttgatccgtaaaaagtttgcagatcaacttgatctgtaagaagcttgcagatcaagttaatccgcgagttgatttttaagacttatggatcaagttgatccgtaagtcttttatgtatcaagttgatccgcgagttgatttttaagacttacaaatcaagttgatctgtaagtcttttacggatcaagttgatccgcgagttgattttcaagacatacagatcaagttgattcgtaagtcttttacggatcaaattaatccgcgagttgatttttaagacttacggatcaagttgatccataagtctttcacggatcaagttgatccgtaagtcttttacggatcaacaattggcagtacaaaaattataagcttcaaacggttgcaacttttgataaaaatgtccgtttgagacccataatatgttaaaatgctcaaaattgaaggaggaatcccccggtaaatttccaaaggggatttggtcaactcatttttccaaaaaatgcatctaagtagctgaaaaataggatttaagattaaaaaaaaataggatttggtcaacttgatctgtaagcttcttacatatcaacttgatccacaagttgatttttaagacttacagatcaggttgatccgtaaaatacttacggatcaacttgattcgtaagtc

SEQ ID NO: 13415 - DNA, 1078 bp, Glycine max
  Gm_smallRNAprecursor_6248
aacttgattttgcataaaaataaccaaacaactctttcttcgtttggagtactgaaccgtacaaccaacgtcagtaataatttccatggggttattgaagagattaatgaccttggaaaagggccacaattgtatgggctcatttgtcctgtacaaacccgcactttagaaatgagagttacaggatgactaatattagatgagtgctgtgaggtgcacccaacatttttgttggtgcacccagcaaaatttgtaaataccaaaaatgtccctgggtttttttccttataaaagcttttttattttcctgcgcttcacaactgccgtttttgttcattgtttttctctgtttttgtggtttttgtatggcattgtctcgggttcattgtgaacggttaggtgcgatgaaggtgaaggtgcgttgcggtggtcgacggtgacaaacgaggtacgcagaaggtgggggctgtgtcgtggacgtacggattacttacggatcaagttgatccgtaagagacttacatatcaacttgatctgtaaattggtgtgccactattacagatcaagttgatccgtaagagacttacggatcaacttgatttgtaagaagagtaactatttttaaagtgtgatgcttttcgaattcagtttccatttattttaaaattattaatttgtttgtatgaccattttttgtttgagttggttaaatggacaaagatgagtgaatgcatgaaataatgtctgaacaagcggatatggattatgaaaatgcagaagcatgtggtgcgaatgaaccacatgttaattgttcaaatgcattcaatacttctcaggttataatgttaatgtttgtcacagatttaataaaataaatactggtagaaaacttaaattatgtgaattgttttgtaggtgtttgagtgccgagagaatgttttgcggtgggctcgatccgttgctcatgaaaacggatttgtggtggtgattttaaggttggacacaaacacaggtagtagaggaaggactacgtttgtgttaattggctgtgaaaggagtgacaagtataggtgtagg

SEQ ID NO: 13416 - DNA, 1079 bp, Glycine max
  Gm_smallRNAprecursor_6249
aacttgattttgcataaaaataaccaaacaactctttcttcgtttggagtactgaaccgtacaaccaacgtcagtaataatttccatggggttattgaagagattaatgaccttggaaaagggccacaattgtatgggctcatttgtcctgtacaaacccgcactttagaaatgagagttacaggatgactaatattagatgagtgctgtgaggtgcacccaacatttttgttggtgcacccagcaaaatttgtaaataccaaaaatgtccctgggtttttttccttataaaagcttttttattttcctgcgcttcacaactgccgtttttgttcattgtttttctctgtttttgtggtttttgtatggcattgtctcgggttcattgtgaacggttaggtgcgatgaaggtgaaggtgcgttgcggtggtcgacggtgacaaacgaggtacgcagaaggtgggggctgtgtcgtggacgtacggattacttacggatcaagttgatccgtaagagacttacatatcaacttgatctgtaaattggtgtgccactattacagatcaagttgatccgtaagagacttacggatcaacttgatttgtaagaagagtaactatttttaaagtgtgatgcttttcgaattcagtttccatttattttaaaattattaatttgtttgtatgaccattttttgtttgagttggttaaatggacaaagatgagtgaatgcatgaaataatgtctgaacaagcggatatggattatgaaaatgcagaagcatgtggtgcgaatgaaccacatgttaattgttcaaatgcattcaatacttctcaggttataatgttaatgtttgtcacagatttaataaaataaatactggtagaaaacttaaattatgtgaattgttttgtaggtgtttgagtgccgagagaatgttttgcggtgggctcgatccgttgctcatgaaaacggatttgtggtggtgattttaaggttggacacaaacacaggtagtagaggaaggactacgtttgtgttaattggctgtgaaaggagtgacaagtataggtgtagga

SEQ ID NO: 13417 - DNA, 1079 bp, Glycine max; identical to SEQ ID NO: 13416
  Gm_smallRNAprecursor_6250

SEQ ID NO: 13418 - DNA, 1079 bp, Glycine max
  Gm_smallRNAprecursor_6251
gaatctagaactatcatgatactaatctatcatgaaaactctagaaagtcctaaagtaatgtagaaacaatcaccaccattgagaggttggtgacttgagcctataaataggcaattggtatgttgtaatttatcatccaagaaatcaatgacatagcctttttcctaaaacaatcctctaaaactatcaactatcaactatcatctaataaactaccaacagtggtatcagagctacgttcggtcatacattgggcgtagttatattacctacctaccattccaaaatcctcccaactacttcaaaaatttcctttgtacaattaacccactccaataatattttttctaagctatggataacactactcaatcgtcaactatttttgtccctatcttcaatggtgaaaattatgatttctggcttgttaaaatggaaacatatttttcatctcaagatttatgggacatagtagaagaaggcttcactgttaccgcggatacttcagctcttaatgcatctcaagaaaaagagttgaagaaaaataaacaaaaaaattcaaaggcgttgttcaccttgcaacaagcggtgactgatccaattttctcaagaattattggagctaagactgccaaagaagtgtggaacacattgtaggaggagtttcaaggaagtgttaaggtacgtgccgttaaacttcaatctctaagaagagattttgaactattgaagatgaaggagtttgagacagttaaatattactattctaaagttaaagaaatagttaatcaaatgaaagcttttggggaagatattcttgacaagaaaattgttgagaaaattctaattactatgccccaaaagtttgacccattcgtgacaatgattgaggaaaccaaagatctgtccactctatcagagacaaaacttgtgggctctcttgaagcatataagcaaagactgtataggcataaagaaaatacacttgaaaatgccttccagtcaaagtttaaatgtcagtcccaaaacaaagaaaatggtggaaagaaaaattatggaaaaacttccagaagaagag

SEQ ID NO: 13419 - DNA, 1085 bp, Glycine max
  Gm_smallRNAprecursor_6252
tgccgaaccagtataaaactcttgtgtgtttgtctccttcttccctactcttttaatttccgctgtgcactttaattcttgcttttacttttggttaagtttcttttctattctttattttcttaacaacatagtaaacgcctaagaagagtaatttttaattagtaaaggttcattaataattaattcaaccccccccccccttcttaattattctgaggccacttgatccaacaatacggacgtctatggaccaatgaggatgccatcacatgagaacaataggtacttcatactcttcattgatgactcctctagaatgacatgggtatattttctaaaagaaaaatcaaaagtctttggagtattcaaaatgttcaaggtccttgctgaaaatcaaagtggaaaatagataaaagtactaagaagtgatcgcggcaaagagtacacctttcgcgagtttgaaagattttgtgaggatgaaggcattgagcgaaaacttacagtcgcatattctcctcaacaaaatggagtgtttgagagaaagaatcgcacagttatggaaatggctagatcgatgctcaaggagaagggactacctaacatattctgggctgaagcagtctacactactgtttacatgctcaacagatgtccaactaagtctgtaaaagacaagactccaattgaagcttggaacgggaagaagccatcagcaaagcacctaagggtatttggatctatatgctacattcatgttccggacatgaaaaggcacaagcttgaagacaagactatacgaggtatcttccttgggtatagcaatatctctaagggttaccgtgtgtacaacttgcaaactaagaaactcgtcatcaatcgagatgttgaagttgatgagtatgcttcttggaattaggatgaagaaaaggtaaaaaaagtggagaagaatgttcttatacctgctcaactacctcaagaagaagctgaggaagaagacccaggtgaaccaccttcacctccaccacaacaacaagattaagaactatcatcaccagagtctactccaagacgagtaagatctt

SEQ ID NO: 13420 - DNA, 1042 bp, Glycine max
  Gm_smallRNAprecursor_6253
tgttctttgattttggagattctatattaataaggtaaaacgccctgaacaaattgagcatttatgttaacatttattttctttcatccaagggatgcagtgtgtccgtagtttttttggcattgaactcgaatcattaggtggcatacttcatttttattactttcatgatgagaccaactatatttttcagttttggttcttaatttctcattgtgtgttcaaattcagtggaactacttcagcttaatgatagtctttcattagaaagctttaatacaataaagaaaaacggacagggtatatgaagttaatggcaaaggtttcacgttttattactgttaactcttgggagttgctacttgcacccagcattattgttagggcacccaacaaatagtgaagtggcgaaactgcccttcaacaattcttgttccggaagaagattttttctggaaacttttcggaaaacctctttccggaaattttccggaagaaccttcttccggaagaagaatttgtgacttccggaagtactcagaaactacttctggaagaacgtcatccggaatgttttcggaagaagcttctcccggaagatttccattttcttctggaagaaggttcttccggaagttagtttttttagaaaaaaatattttattttgtaataatttacttttaatggataaactaaattataaaataattaatattattatacataaataattaaataattagtgaacgtaattatgactaatatttataatttgttttttacacgcatgtcaaatattaatttgtgtgacaatttagtataatttaaaccctaaaaattaattaattcataaattttattaaaaatataaattatttattatgataacatttaatttctattaaaaaagttaatatataatgaaaaaatgattattattttataacaaaatgaagaaaaatgaattttcattttataataataagtaaaaataaaataatatttaatgcgtatgtaatgatgattttgcccttgtgtaat

SEQ ID NO: 13421 - DNA, 1122 bp, Glycine max
  Gm_smallRNAprecursor_6254
gcttcccctcatcgaagcattgtacccatttttgtttgggtaattgattaagccattcaactacacttggcttattcgcacgaatatccccaagatgtcaccagtgcatcttctccatgtatgcgcaacctgtaaatattcaatcaatctattatgttataaaatttgattgaaagaaaattatagcgaataaataaaatagattctcaccagccaatatgagtgatttctttaaatgtttgcagtttgagttaccgtgaagaaagttttgtgcaatgtggtgcaggcaaaagaaatgggatgtgtcctggacccataagttacttgggttgttgtaggcacttataattcaggagtgttggtctgaaataataagagaaatgttaatttgcggagtaacatgtcttctcaaattctttagaaaaaaccccaagctaaagttgtcttcccttctacaatggcgtaggcaatcgggaagatatggttagctccatcttgtgcggtagctatcaacagtgtgctagtatacttcttcccgtaaagacatgtatcatctacttgtactatgggtttgtaatttgaaaaaccattaatgcatggaccgaatgaccaaaagacacgtttaaacaatcttttgcccggtactatttctcccccctcatacaaggattctgtttgagcagcgaccacaatcctgggaacataagattgcaaagctccgaaaagttttggcagtttggcatatgattcttctcagtttccatggatcatctccaacgctctttgctttactaaccatgtcttcttgtaggatgaggtataattcatgaacattttgatctctgtaatcaacatcttaatggagacggttgggtttgttttgacaattggttagatgatttgtgctatgacgtgtttgtcaagttgacgatgatcttgtctgagcatcggcacgagacaagtgtgatgatctatgatactcttgataatccatttgttatgcctctttgaattgcatgcgcccaagctccatgtacaaccattttcatgtaacttgcagacaaagtttagccttctctggttagagtaaattgttctgcaatcaaaatgatttctgatgtt

SEQ ID NO: 13422 - DNA, 1165 bp, Glycine max
  Gm_smallRNAprecursor_6255
tttactgtattttttttcttatatgtaaatataaataatataaggttatgccatagggacatggtcatttttacccctaacaatcttagaagtaaatatagaccatgtttttacgccatacccttacaccatttatatttacatattagcaaaaagaaacagtaaaatcttaaggacaaatagttaagaaacttgttcattagctgcaaatatccttccctcctcaagtgcaaacttcttgcgtagccgctcttggtgcttagaaaatcccaaaaacaaatccctcttattactagctattttgaattctttagttcctgaatatacaaccttcaaattgttgctcgttcccctctttgagaatgaggaggatcttcataggacttcattcagctgatgtttgtcggcagtttcatcatccaccacccttttcttctgtgccttctcacgttcattgttgttaaacccatatttatgccttcttcccttcatgtcttgtttgatcacaactttagctgaatctcccatcttcagcatagttgaatctcctgtcttattgtccaatgccacattttgatggcctgtatctctttgttcgtatgttctactgcttcagcttcataatgcatagagcaatcagaattttccagtcatcaccaaaggcttctgcatcagcgttgacactctccaccctatttggtttatgcttctgtgttttcttccatgcttcctccttataattctcagatttattggaggtcccactagaaggatcaacaccaatccgtgcctattcctcctctaccagctcaatatctttcgtttcacctttgcttttgaaaactacactgtaatttacaaaacaaaagttgaaaggaaagatattgacctgatagacgaggaagaagcacagattggtggtgatcgttctagtgcaacctcgaataaagctgagattcataacgaggaggcacggaagaaaacacagaagcataaaccaaagagggtggagagtgtcaatgttgatgcagaagcctttggtgatcactcggaaattctgattgctttatgcattctgaagctgaagcactagaacatacgaagaaaagagatacaggccatcaaagtgtggcattggacaatgagacaggagtttcaactatgc

SEQ ID NO: 13423 - DNA, 1168 bp, Glycine max
  Gm_smallRNAprecursor_6256
aaaggaaatcaaggatttgcttgataaaggcttaatccggaaaagcaaaaacccatggtcttgtacggctttttatgtcaacaaacaatctgagattgagcgtggaacaccctgcttagtcctaaattacaaaccactaaaccaagcattacaatggattaggtatcctattccaaacaaaaaatatttgcttaacaaattaaattttgcaaagatattttgaaaatttgatatgaaatctggattttgggaaatccaaatccaagaatcagataggtacaaaacaacgtttgcccattcagaatttcaaaaaattatgaatgatatttttaatccctattcaaaatttgtcattgtctacatagatgatgttttaatcttttcccaaaacattgaccaacatttaaaacatctccaaactttcatccatatcatcaaacagaatggtttggcagtctccaaatcaaaaatcaatcttttccaaactcgaattcgattccttggtcacaatatatatcaaggtacaatcattccaatagaaaggtcaatagagattgctagcaaatttcccaaccaaatcttagacaaaacccagttacaaagatttctaggttgtctaaattatgtaggagaatttgtcccctatttagacaatattgtcaagccattgcatgataggctgaagaaaaatccgcctccttggtctgacctccatacacaaacagttaaagaaatcaaactcaaagtccaatccataaaatgtctgtatcttcctattccacaagcatttaaaattgtcgaaactgatgcatcagacataggttatggtggcatcatcaaacaaagagtccatgaccaagatcatgtcattccatatacatcaaaacattggaatcctgcacaattaaaatattcaactgttaaaaaggaagttttagcaattgttatgtgcatttccaaatttcaatcggatttattaaaccaaaattttttaatcagggttgattgtaaatcagcccaagatattttacaaaaagatgttaaaaaccttgcctcaaaacaaatttttgcaagatggtaagcaattcaaagtgtctttgattttgacatagaatatatcaagggcacctcaaattcattaccagactaccttacccgtgaattctta

SEQ ID NO: 13424 - DNA, 1166 bp, Glycine max
  Gm_smallRNAprecursor_6257
aatccaagaatcagataggtacaaaacaacgtttgcccattcagaatttcaaaaaattatgaatgatatttttaatccctattcaaaatttgtcattgtctacatagatgatgttttaatcttttcccaaaacattgaccaacatttaaaacatctccaaactttcatccatatcatcaaacagaatggtttggcagtctccaaatcaaaaatcaatcttttccaaactcgaattcgattccttggtcacaatatatatcaaggtacaatcattccaatagaaaggtcaatagagattgctagcaaatttcccaaccaaatcttagacaaaacccagttacaaagatttctaggttgtctaaattatgtaggagaatttgtcccctatttagacaatattgtcaagccattgcatgataggctgaagaaaaatccgcctccttggtctgacctccatacacaaacagttaaagaaatcaaactcaaagtccaatccataaaatgtctgtatcttcctattccacaagcatttaaaattgtcgaaactgatgcatcagacataggttatggtggcatcatcaaacaaagagtccatgaccaagatcatgtcattccatatacatcaaaacattggaatcctgcacaattaaaatattcaactgttaaaaaggaagttttagcaattgttatgtgcatttccaaatttcaatcggatttattaaaccaaaattttttaatcagggttgattgtaaatcagcccaagatattttacaaaaagatgttaaaaaccttgcctcaaaacaaatttttgcaagatggtaagcaattcaaagtgtctttgattttgacatagaatatatcaagggcacctcaaattcattaccagactaccttacccgtgaattcttatagaaaagtggtaatccctcctaaggcatcaggaatctccctaaggggaggacgaagtacaggcaaaggatcaagactggctctttcggagccaaccactaagaaatcatcaacctcttctgggtcaccaacccagactgggtcatctacccagaaaaccaattttgaagggtcatcgacccagtttacctcaatcaaacctgagccatccactcaggaatctcccaaaccggcaaccgccaaacaaacatcggcc

SEQ ID NO: 13425 - DNA, 1166 bp, Glycine max; identical to SEQ ID NO: 13424
  Gm_smallRNAprecursor_6258

SEQ ID NO: 13426 - DNA, 1167 bp, Glycine max
  Gm_smallRNAprecursor_6259
aatccaagaatcagataggtacaaaacaacgtttgcccattcagaatttcaaaaaattatgaatgatatttttaatccctattcaaaatttgtcattgtctacatagatgatgttttaatcttttcccaaaacattgaccaacatttaaaacatctccaaactttcatccatatcatcaaacagaatggtttggcagtctccaaatcaaaaatcaatcttttccaaactcgaattcgattccttggtcacaatatatatcaaggtacaatcattccaatagaaaggtcaatagagattgctagcaaatttcccaaccaaatcttagacaaaacccagttacaaagatttctaggttgtctaaattatgtaggagaatttgtcccctatttagacaatattgtcaagccattgcatgataggctgaagaaaaatccgcctccttggtctgacctccatacacaaacagttaaagaaatcaaactcaaagtccaatccataaaatgtctgtatcttcctattccacaagcatttaaaattgtcgaaactgatgcatcagacataggttatggtggcatcatcaaacaaagagtccatgaccaagatcatgtcattccatatacatcaaaacattggaatcctgcacaattaaaatattcaactgttaaaaaggaagttttagcaattgttatgtgcatttccaaatttcaatcggatttattaaaccaaaattttttaatcagggttgattgtaaatcagcccaagatattttacaaaaagatgttaaaaaccttgcctcaaaacaaatttttgcaagatggtaagcaattcaaagtgtctttgattttgacatagaatatatcaagggcacctcaaattcattaccagactaccttacccgtgaattcttatagaaaagtggtaatccctcctaaggcatcaggaatctccctaaggggaggacgaagtacaggcaaaggatcaagactggctctttcggagccaaccactaagaaatcatcaacctcttctgggtcaccaacccagactgggtcatctacccagaaaaccaattttgaagggtcatcgacccagtttacctcaatcaaacctgagccatccactcaggaatctcccaaaccggcaaccgccaaacaaacatcggccg

SEQ ID NO: 13427 - DNA, 1167 bp, Glycine max; identical to SEQ ID NO: 13426
  Gm_smallRNAprecursor_6260

SEQ ID NO: 13428 - DNA, 1037 bp, Glycine max
  Gm_smallRNAprecursor_6261
aaacattgaccaacatttaaaacatctccaaactttcatccatatcatcaaacagaatggtttggcagtctccaaatcaaaaatcaatcttttccaaactcgaattcgattccttggtcacaatatatatcaaggtacaatcattccaatagaaaggtcaatagagattgctagcaaatttcccaaccaaatcttagacaaaacccagttacaaagatttctaggttgtctaaattatgtaggagaatttgtcccctatttagacaatattgtcaagccattgcatgataggctgaagaaaaatccgcctccttggtctgacctccatacacaaacagttaaagaaatcaaactcaaagtccaatccataaaatgtctgtatcttcctattccacaagcatttaaaattgtcgaaactgatgcatcagacataggttatggtggcatcatcaaacaaagagtccatgaccaagatcatgtcattccatatacatcaaaacattggaatcctgcacaattaaaatattcaactgttaaaaaggaagttttagcaattgttatgtgcatttccaaatttcaatcggatttattaaaccaaaattttttaatcagggttgattgtaaatcagcccaagatattttacaaaaagatgttaaaaaccttgcctcaaaacaaatttttgcaagatggtaagcaattcaaagtgtctttgattttgacatagaatatatcaagggcacctcaaattcattaccagactaccttacccgtgaattcttatagaaaagtggtaatccctcctaaggcatcaggaatctccctaaggggaggacgaagtacaggcaaaggatcaagactggctctttcggagccaaccactaagaaatcatcaacctcttctgggtcaccaacccagactgggtcatctacccagaaaaccaattttgaagggtcatcgacccagtttacctcaatcaaacctgagccatccactcaggaatctcccaaaccggcaaccgccaaacaaacatcggcc

SEQ ID NO: 13429 - DNA, 1208 bp, Glycine max
  Gm_smallRNAprecursor_6262
ctaaggcatcaggaatctccctaaggggaggacgaagtacaggcaaaggatcaagactggctctttcggagccaaccactaagaaatcatcaacctcttctgggtcaccaacccagactgggtcatctacccagaaaaccaattttgaagggtcatcgacccagtttacctcaatcaaacctgagccatccactcaggaatctcccaaaccggcaaccgccaaacaaacatcggccgactatgcatggccaattgaaacccttcaggcccttcaagacatgggtctaatcaaatttccaaaaataatcaaaaactcttgggcagacattgccttagaatctgatgatgattctgaatcaaatttacaaacaatgatccaaaatgcatcaatgaccaaaatagctaccaatcctaaagggaaactacctttagccaaagcgcaaacaccacctaccaaacaaactaacaattatatttataaaaataaatttttaactgttttgcagatggaacctgaattttgggacaaaaatcccttcaaggcgacggccaaggctttcccaccaggatttcactacaaaccaaccaccatcttgaagacaagaactttttatgaattgattttggtagattcaaattctgtatctatcaaacatttcaatgacccaaaagaccaaacattaaacacccactccacaatccaaatactaaaagttcttcaaccaagacactttggttcggacttgaataaaggaaagagattttcagttccatttgatccggtaagttatacctattgggattatgttgatgcttggactaaggtgttttggcaccaaaatacccgcttcaagcattcatggctgatatatttcaagaccaatacaatttacaattttcccaattggtttttacaatggtgggacttctttggaccaattccagagatattcccagaaacagtccaacaaggatttgctcaaattgagaggcaataccattcacaggaatcatgaattccaacagatcttaaatacttctcaagctttgcactgtcatggatcttctcatggcaatatcgttacagcaagactgaaaagacaaaccaatatccatcactacaaagacacacatttgtaaaatggtggtcacaatttgactcatccaaagcagatccagaacaagtaaaactctcgttccaatcccat

SEQ ID NO: 13430 - DNA, 1208 bp, Glycine max; identical to SEQ ID NO: 13429
  Gm_smallRNAprecursor_6263

SEQ ID NO: 13431 - DNA, 1211 bp, Glycine max
  Gm_smallRNAprecursor_6264
ctaaggcatcaggaatctccctaaggggaggacgaagtacaggcaaaggatcaagactggctctttcggagccaaccactaagaaatcatcaacctcttctgggtcaccaacccagactgggtcatctacccagaaaaccaattttgaagggtcatcgacccagtttacctcaatcaaacctgagccatccactcaggaatctcccaaaccggcaaccgccaaacaaacatcggccgactatgcatggccaattgaaacccttcaggcccttcaagacatgggtctaatcaaatttccaaaaataatcaaaaactcttgggcagacattgccttagaatctgatgatgattctgaatcaaatttacaaacaatgatccaaaatgcatcaatgaccaaaatagctaccaatcctaaagggaaactacctttagccaaagcgcaaacaccacctaccaaacaaactaacaattatatttataaaaataaatttttaactgttttgcagatggaacctgaattttgggacaaaaatcccttcaaggcgacggccaaggctttcccaccaggatttcactacaaaccaaccaccatcttgaagacaagaactttttatgaattgattttggtagattcaaattctgtatctatcaaacatttcaatgacccaaaagaccaaacattaaacacccactccacaatccaaatactaaaagttcttcaaccaagacactttggttcggacttgaataaaggaaagagattttcagttccatttgatccggtaagttatacctattgggattatgttgatgcttggactaaggtgttttggcaccaaaatacccgcttcaagcattcatggctgatatatttcaagaccaatacaatttacaattttcccaattggtttttacaatggtgggacttctttggaccaattccagagatattcccagaaacagtccaacaaggatttgctcaaattgagaggcaataccattcacaggaatcatgaattccaacagatcttaaatacttctcaagctttgcactgtcatggatcttctcatggcaatatcgttacagcaagactgaaaagacaaaccaatatccatcactacaaagacacacatttgtaaaatggtggtcacaatttgactcatccaaagcagatccagaacaagtaaaactctcgttccaatcccatcca

SEQ ID NO: 13432 - DNA, 1098 bp, Glycine max
  Gm_smallRNAprecursor_6265
ggaatctccctaaggggaggacgaagtacaggcaaaggatcaagactggctctttcggagccaaccactaagaaatcatcaacctcttctgggtcaccaacccagactgggtcatctacccagaaaaccaattttgaagggtcatcgacccagtttacctcaatcaaacctgagccatccactcaggaatctcccaaaccggcaaccgccaaacaaacatcggccgactatgcatggccaattgaaacccttcaggcccttcaagacatgggtctaatcaaatttccaaaaataatcaaaaactcttgggcagacattgccttagaatctgatgatgattctgaatcaaatttacaaacaatgatccaaaatgcatcaatgaccaaaatagctaccaatcctaaagggaaactacctttagccaaagcgcaaacaccacctaccaaacaaactaacaattatatttataaaaataaatttttaactgttttgcagatggaacctgaattttgggacaaaaatcccttcaaggcgacggccaaggctttcccaccaggatttcactacaaaccaaccaccatcttgaagacaagaactttttatgaattgattttggtagattcaaattctgtatctatcaaacatttcaatgacccaaaagaccaaacattaaacacccactccacaatccaaatactaaaagttcttcaaccaagacactttggttcggacttgaataaaggaaagagattttcagttccatttgatccggtaagttatacctattgggattatgttgatgcttggactaaggtgttttggcaccaaaatacccgcttcaagcattcatggctgatatatttcaagaccaatacaatttacaattttcccaattggtttttacaatggtgggacttctttggaccaattccagagatattcccagaaacagtccaacaaggatttgctcaaattgagaggcaataccattcacaggaatcatgaattccaacagatcttaaatacttctcaagctttgcactgtcatggatcttctcatggcaatatcgttacagcaagactgaaaagacaaaccaa

SEQ ID NO: 13433 - DNA, 1190 bp, Glycine max
  Gm_smallRNAprecursor_6266
acaggcaaaggatcaagactggctctttcggagccaaccactaagaaatcatcaacctcttctgggtcaccaacccagactgggtcatctacccagaaaaccaattttgaagggtcatcgacccagtttacctcaatcaaacctgagccatccactcaggaatctcccaaaccggcaaccgccaaacaaacatcggccgactatgcatggccaattgaaacccttcaggcccttcaagacatgggtctaatcaaatttccaaaaataatcaaaaactcttgggcagacattgccttagaatctgatgatgattctgaatcaaatttacaaacaatgatccaaaatgcatcaatgaccaaaatagctaccaatcctaaagggaaactacctttagccaaagcgcaaacaccacctaccaaacaaactaacaattatatttataaaaataaatttttaactgttttgcagatggaacctgaattttgggacaaaaatcccttcaaggcgacggccaaggctttcccaccaggatttcactacaaaccaaccaccatcttgaagacaagaactttttatgaattgattttggtagattcaaattctgtatctatcaaacatttcaatgacccaaaagaccaaacattaaacacccactccacaatccaaatactaaaagttcttcaaccaagacactttggttcggacttgaataaaggaaagagattttcagttccatttgatccggtaagttatacctattgggattatgttgatgcttggactaaggtgttttggcaccaaaatacccgcttcaagcattcatggctgatatatttcaagaccaatacaatttacaattttcccaattggtttttacaatggtgggacttctttggaccaattccagagatattcccagaaacagtccaacaaggatttgctcaaattgagaggcaataccattcacaggaatcatgaattccaacagatcttaaatacttctcaagctttgcactgtcatggatcttctcatggcaatatcgttacagcaagactgaaaagacaaaccaatatccatcactacaaagacacacatttgtaaaatggtggtcacaatttgactcatccaaagcagatccagaacaagtaaaactctcgttccaatcccatccagaattcctcaaagcaac

SEQ ID NO: 13434 - DNA, 1171 bp, Glycine max
  Gm_smallRNAprecursor_6267
tcccaaaccggcaaccgccaaacaaacatcggccgactatgcatggccaattgaaacccttcaggcccttcaagacatgggtctaatcaaatttccaaaaataatcaaaaactcttgggcagacattgccttagaatctgatgatgattctgaatcaaatttacaaacaatgatccaaaatgcatcaatgaccaaaatagctaccaatcctaaagggaaactacctttagccaaagcgcaaacaccacctaccaaacaaactaacaattatatttataaaaataaatttttaactgttttgcagatggaacctgaattttgggacaaaaatcccttcaaggcgacggccaaggctttcccaccaggatttcactacaaaccaaccaccatcttgaagacaagaactttttatgaattgattttggtagattcaaattctgtatctatcaaacatttcaatgacccaaaagaccaaacattaaacacccactccacaatccaaatactaaaagttcttcaaccaagacactttggttcggacttgaataaaggaaagagattttcagttccatttgatccggtaagttatacctattgggattatgttgatgcttggactaaggtgttttggcaccaaaatacccgcttcaagcattcatggctgatatatttcaagaccaatacaatttacaattttcccaattggtttttacaatggtgggacttctttggaccaattccagagatattcccagaaacagtccaacaaggatttgctcaaattgagaggcaataccattcacaggaatcatgaattccaacagatcttaaatacttctcaagctttgcactgtcatggatcttctcatggcaatatcgttacagcaagactgaaaagacaaaccaatatccatcactacaaagacacacatttgtaaaatggtggtcacaatttgactcatccaaagcagatccagaacaagtaaaactctcgttccaatcccatccagaattcctcaaagcaactgatccagaaacttctgtgtttttgaaccaaaagtctcatctggcagcatttttagcaggatcgaaatcaaaggagatcctacctaaaaatctaaaggaagttatgaaaatgttacagcaggaagaagaaggttcatccttaaag

SEQ ID NO: 13435 - DNA, 1166 bp, Glycine max
  Gm_smallRNAprecursor_6268
ccaaaccggcaaccgccaaacaaacatcggccgactatgcatggccaattgaaacccttcaggcccttcaagacatgggtctaatcaaatttccaaaaataatcaaaaactcttgggcagacattgccttagaatctgatgatgattctgaatcaaatttacaaacaatgatccaaaatgcatcaatgaccaaaatagctaccaatcctaaagggaaactacctttagccaaagcgcaaacaccacctaccaaacaaactaacaattatatttataaaaataaatttttaactgttttgcagatggaacctgaattttgggacaaaaatcccttcaaggcgacggccaaggctttcccaccaggatttcactacaaaccaaccaccatcttgaagacaagaactttttatgaattgattttggtagattcaaattctgtatctatcaaacatttcaatgacccaaaagaccaaacattaaacacccactccacaatccaaatactaaaagttcttcaaccaagacactttggttcggacttgaataaaggaaagagattttcagttccatttgatccggtaagttatacctattgggattatgttgatgcttggactaaggtgttttggcaccaaaatacccgcttcaagcattcatggctgatatatttcaagaccaatacaatttacaattttcccaattggtttttacaatggtgggacttctttggaccaattccagagatattcccagaaacagtccaacaaggatttgctcaaattgagaggcaataccattcacaggaatcatgaattccaacagatcttaaatacttctcaagctttgcactgtcatggatcttctcatggcaatatcgttacagcaagactgaaaagacaaaccaatatccatcactacaaagacacacatttgtaaaatggtggtcacaatttgactcatccaaagcagatccagaacaagtaaaactctcgttccaatcccatccagaattcctcaaagcaactgatccagaaacttctgtgtttttgaaccaaaagtctcatctggcagcatttttagcaggatcgaaatcaaaggagatcctacctaaaaatctaaaggaagttatgaaaatgttacagcaggaagaagaaggttcatcctta

SEQ ID NO: 13436 - DNA, 1169 bp, Glycine max
  Gm_smallRNAprecursor_6269
ccaaaccggcaaccgccaaacaaacatcggccgactatgcatggccaattgaaacccttcaggcccttcaagacatgggtctaatcaaatttccaaaaataatcaaaaactcttgggcagacattgccttagaatctgatgatgattctgaatcaaatttacaaacaatgatccaaaatgcatcaatgaccaaaatagctaccaatcctaaagggaaactacctttagccaaagcgcaaacaccacctaccaaacaaactaacaattatatttataaaaataaatttttaactgttttgcagatggaacctgaattttgggacaaaaatcccttcaaggcgacggccaaggctttcccaccaggatttcactacaaaccaaccaccatcttgaagacaagaactttttatgaattgattttggtagattcaaattctgtatctatcaaacatttcaatgacccaaaagaccaaacattaaacacccactccacaatccaaatactaaaagttcttcaaccaagacactttggttcggacttgaataaaggaaagagattttcagttccatttgatccggtaagttatacctattgggattatgttgatgcttggactaaggtgttttggcaccaaaatacccgcttcaagcattcatggctgatatatttcaagaccaatacaatttacaattttcccaattggtttttacaatggtgggacttctttggaccaattccagagatattcccagaaacagtccaacaaggatttgctcaaattgagaggcaataccattcacaggaatcatgaattccaacagatcttaaatacttctcaagctttgcactgtcatggatcttctcatggcaatatcgttacagcaagactgaaaagacaaaccaatatccatcactacaaagacacacatttgtaaaatggtggtcacaatttgactcatccaaagcagatccagaacaagtaaaactctcgttccaatcccatccagaattcctcaaagcaactgatccagaaacttctgtgtttttgaaccaaaagtctcatctggcagcatttttagcaggatcgaaatcaaaggagatcctacctaaaaatctaaaggaagttatgaaaatgttacagcaggaagaagaaggttcatccttaaag

SEQ ID NO: 13437 - DNA, 1107 bp, Glycine max
  Gm_smallRNAprecursor_6270
aaccggcaaccgccaaacaaacatcggccgactatgcatggccaattgaaacccttcaggcccttcaagacatgggtctaatcaaatttccaaaaataatcaaaaactcttgggcagacattgccttagaatctgatgatgattctgaatcaaatttacaaacaatgatccaaaatgcatcaatgaccaaaatagctaccaatcctaaagggaaactacctttagccaaagcgcaaacaccacctaccaaacaaactaacaattatatttataaaaataaatttttaactgttttgcagatggaacctgaattttgggacaaaaatcccttcaaggcgacggccaaggctttcccaccaggatttcactacaaaccaaccaccatcttgaagacaagaactttttatgaattgattttggtagattcaaattctgtatctatcaaacatttcaatgacccaaaagaccaaacattaaacacccactccacaatccaaatactaaaagttcttcaaccaagacactttggttcggacttgaataaaggaaagagattttcagttccatttgatccggtaagttatacctattgggattatgttgatgcttggactaaggtgttttggcaccaaaatacccgcttcaagcattcatggctgatatatttcaagaccaatacaatttacaattttcccaattggtttttacaatggtgggacttctttggaccaattccagagatattcccagaaacagtccaacaaggatttgctcaaattgagaggcaataccattcacaggaatcatgaattccaacagatcttaaatacttctcaagctttgcactgtcatggatcttctcatggcaatatcgttacagcaagactgaaaagacaaaccaatatccatcactacaaagacacacatttgtaaaatggtggtcacaatttgactcatccaaagcagatccagaacaagtaaaactctcgttccaatcccatccagaattcctcaaagcaactgatccagaaacttctgtgtttttgaaccaaaagtctcatctggcagcatttttagcaggatcgaaatcaaaggagatcctaccta

SEQ ID NO: 13438 - DNA, 1107 bp, Glycine max; identical to SEQ ID NO: 13437
  Gm_smallRNAprecursor_6271

SEQ ID NO: 13439 - DNA, 1108 bp, Glycine max
  Gm_smallRNAprecursor_6272
aaccggcaaccgccaaacaaacatcggccgactatgcatggccaattgaaacccttcaggcccttcaagacatgggtctaatcaaatttccaaaaataatcaaaaactcttgggcagacattgccttagaatctgatgatgattctgaatcaaatttacaaacaatgatccaaaatgcatcaatgaccaaaatagctaccaatcctaaagggaaactacctttagccaaagcgcaaacaccacctaccaaacaaactaacaattatatttataaaaataaatttttaactgttttgcagatggaacctgaattttgggacaaaaatcccttcaaggcgacggccaaggctttcccaccaggatttcactacaaaccaaccaccatcttgaagacaagaactttttatgaattgattttggtagattcaaattctgtatctatcaaacatttcaatgacccaaaagaccaaacattaaacacccactccacaatccaaatactaaaagttcttcaaccaagacactttggttcggacttgaataaaggaaagagattttcagttccatttgatccggtaagttatacctattgggattatgttgatgcttggactaaggtgttttggcaccaaaatacccgcttcaagcattcatggctgatatatttcaagaccaatacaatttacaattttcccaattggtttttacaatggtgggacttctttggaccaattccagagatattcccagaaacagtccaacaaggatttgctcaaattgagaggcaataccattcacaggaatcatgaattccaacagatcttaaatacttctcaagctttgcactgtcatggatcttctcatggcaatatcgttacagcaagactgaaaagacaaaccaatatccatcactacaaagacacacatttgtaaaatggtggtcacaatttgactcatccaaagcagatccagaacaagtaaaactctcgttccaatcccatccagaattcctcaaagcaactgatccagaaacttctgtgtttttgaaccaaaagtctcatctggcagcatttttagcaggatcgaaatcaaaggagatcctacctaa

SEQ ID NO: 13440 - DNA, 1108 bp, Glycine max; identical to SEQ ID NO: 13439
  Gm_smallRNAprecursor_6273

SEQ ID NO: 13441 - DNA, 1102 bp, Glycine max
  Gm_smallRNAprecursor_6274
cggcaaccgccaaacaaacatcggccgactatgcatggccaattgaaacccttcaggcccttcaagacatgggtctaatcaaatttccaaaaataatcaaaaactcttgggcagacattgccttagaatctgatgatgattctgaatcaaatttacaaacaatgatccaaaatgcatcaatgaccaaaatagctaccaatcctaaagggaaactacctttagccaaagcgcaaacaccacctaccaaacaaactaacaattatatttataaaaataaatttttaactgttttgcagatggaacctgaattttgggacaaaaatcccttcaaggcgacggccaaggctttcccaccaggatttcactacaaaccaaccaccatcttgaagacaagaactttttatgaattgattttggtagattcaaattctgtatctatcaaacatttcaatgacccaaaagaccaaacattaaacacccactccacaatccaaatactaaaagttcttcaaccaagacactttggttcggacttgaataaaggaaagagattttcagttccatttgatccggtaagttatacctattgggattatgttgatgcttggactaaggtgttttggcaccaaaatacccgcttcaagcattcatggctgatatatttcaagaccaatacaatttacaattttcccaattggtttttacaatggtgggacttctttggaccaattccagagatattcccagaaacagtccaacaaggatttgctcaaattgagaggcaataccattcacaggaatcatgaattccaacagatcttaaatacttctcaagctttgcactgtcatggatcttctcatggcaatatcgttacagcaagactgaaaagacaaaccaatatccatcactacaaagacacacatttgtaaaatggtggtcacaatttgactcatccaaagcagatccagaacaagtaaaactctcgttccaatcccatccagaattcctcaaagcaactgatccagaaacttctgtgtttttgaaccaaaagtctcatctggcagcatttttagcaggatcgaaatcaaaggagatcctacc

SEQ ID NO: 13442 - DNA, 1131 bp, Glycine max
  Gm_smallRNAprecursor_6275
cgacggccaaggctttcccaccaggatttcactacaaaccaaccaccatcttgaagacaagaactttttatgaattgattttggtagattcaaattctgtatctatcaaacatttcaatgacccaaaagaccaaacattaaacacccactccacaatccaaatactaaaagttcttcaaccaagacactttggttcggacttgaataaaggaaagagattttcagttccatttgatccggtaagttatacctattgggattatgttgatgcttggactaaggtgttttggcaccaaaatacccgcttcaagcattcatggctgatatatttcaagaccaatacaatttacaattttcccaattggtttttacaatggtgggacttctttggaccaattccagagatattcccagaaacagtccaacaaggatttgctcaaattgagaggcaataccattcacaggaatcatgaattccaacagatcttaaatacttctcaagctttgcactgtcatggatcttctcatggcaatatcgttacagcaagactgaaaagacaaaccaatatccatcactacaaagacacacatttgtaaaatggtggtcacaatttgactcatccaaagcagatccagaacaagtaaaactctcgttccaatcccatccagaattcctcaaagcaactgatccagaaacttctgtgtttttgaaccaaaagtctcatctggcagcatttttagcaggatcgaaatcaaaggagatcctacctaaaaatctaaaggaagttatgaaaatgttacagcaggaagaagaaggttcatccttaaagaaggaagaaacaagttctgctgaagtagaagaagaagaagatcccttttaccaaaacgaagatgattgttttggtatctgtttagattaaatttattttcggtcaaaaaaccgtctgtttgtaattaatgtgtacttaattttggacaatactacctgtcctgtagccattaaagtcccggtcaaaactacttgtcttgtaacaaaaagtcaaatagttccgatcaaaactaccggcaactaccggtctcagatttttggctatataaggagtcctcaaccatgttgtgaggtaccctttc

SEQ ID NO: 13443 - DNA, 1060 bp, Glycine max
  Gm_smallRNAprecursor_6276
atttcaagaccaatacaatttacaattttcccaattggtttttacaatggtgggacttctttggaccaattccagagatattcccagaaacagtccaacaaggatttgctcaaattgagaggcaataccattcacaggaatcatgaattccaacagatcttaaatacttctcaagctttgcactgtcatggatcttctcatggcaatatcgttacagcaagactgaaaagacaaaccaatatccatcactacaaagacacacatttgtaaaatggtggtcacaatttgactcatccaaagcagatccagaacaagtaaaactctcgttccaatcccatccagaattcctcaaagcaactgatccagaaacttctgtgtttttgaaccaaaagtctcatctggcagcatttttagcaggatcgaaatcaaaggagatcctacctaaaaatctaaaggaagttatgaaaatgttacagcaggaagaagaaggttcatccttaaagaaggaagaaacaagttctgctgaagtagaagaagaagaagatcccttttaccaaaacgaagatgattgttttggtatctgtttagattaaatttattttcggtcaaaaaaccgtctgtttgtaattaatgtgtacttaattttggacaatactacctgtcctgtagccattaaagtcccggtcaaaactacttgtcttgtaacaaaaagtcaaatagttccgatcaaaactaccggcaactaccggtctcagatttttggctatataaggagtcctcaaccatgttgtgaggtaccctttcatttggccatttttctggtttctgaagagaggtgctctgaaagaaaacttttgtaagcgcttctttcaagtttcaataaatttctattttccaactcttttctctccctccaccaatcctgtgcggctctgccgccgcttcggtttctttgtttatgaaaacctgggatttgtaagccggtctcttgtgtgcccttgatatttgttttacaaatttatattttcatttccatttatcatactgcattcttacttcc

SEQ ID NO: 13444 - DNA, 1067 bp, Glycine max
  Gm_smallRNAprecursor_6277
atttcaagaccaatacaatttacaattttcccaattggtttttacaatggtgggacttctttggaccaattccagagatattcccagaaacagtccaacaaggatttgctcaaattgagaggcaataccattcacaggaatcatgaattccaacagatcttaaatacttctcaagctttgcactgtcatggatcttctcatggcaatatcgttacagcaagactgaaaagacaaaccaatatccatcactacaaagacacacatttgtaaaatggtggtcacaatttgactcatccaaagcagatccagaacaagtaaaactctcgttccaatcccatccagaattcctcaaagcaactgatccagaaacttctgtgtttttgaaccaaaagtctcatctggcagcatttttagcaggatcgaaatcaaaggagatcctacctaaaaatctaaaggaagttatgaaaatgttacagcaggaagaagaaggttcatccttaaagaaggaagaaacaagttctgctgaagtagaagaagaagaagatcccttttaccaaaacgaagatgattgttttggtatctgtttagattaaatttattttcggtcaaaaaaccgtctgtttgtaattaatgtgtacttaattttggacaatactacctgtcctgtagccattaaagtcccggtcaaaactacttgtcttgtaacaaaaagtcaaatagttccgatcaaaactaccggcaactaccggtctcagatttttggctatataaggagtcctcaaccatgttgtgaggtaccctttcatttggccatttttctggtttctgaagagaggtgctctgaaagaaaacttttgtaagcgcttctttcaagtttcaataaatttctattttccaactcttttctctccctccaccaatcctgtgcggctctgccgccgcttcggtttctttgtttatgaaaacctgggatttgtaagccggtctcttgtgtgcccttgatatttgttttacaaatttatattttcatttccatttatcatactgcattcttacttcctatctgt

SEQ ID NO: 13445 - DNA, 1062 bp, Glycine max
  Gm_smallRNAprecursor_6278
tttcaagaccaatacaatttacaattttcccaattggtttttacaatggtgggacttctttggaccaattccagagatattcccagaaacagtccaacaaggatttgctcaaattgagaggcaataccattcacaggaatcatgaattccaacagatcttaaatacttctcaagctttgcactgtcatggatcttctcatggcaatatcgttacagcaagactgaaaagacaaaccaatatccatcactacaaagacacacatttgtaaaatggtggtcacaatttgactcatccaaagcagatccagaacaagtaaaactctcgttccaatcccatccagaattcctcaaagcaactgatccagaaacttctgtgtttttgaaccaaaagtctcatctggcagcatttttagcaggatcgaaatcaaaggagatcctacctaaaaatctaaaggaagttatgaaaatgttacagcaggaagaagaaggttcatccttaaagaaggaagaaacaagttctgctgaagtagaagaagaagaagatcccttttaccaaaacgaagatgattgttttggtatctgtttagattaaatttattttcggtcaaaaaaccgtctgtttgtaattaatgtgtacttaattttggacaatactacctgtcctgtagccattaaagtcccggtcaaaactacttgtcttgtaacaaaaagtcaaatagttccgatcaaaactaccggcaactaccggtctcagatttttggctatataaggagtcctcaaccatgttgtgaggtaccctttcatttggccatttttctggtttctgaagagaggtgctctgaaagaaaacttttgtaagcgcttctttcaagtttcaataaatttctattttccaactcttttctctccctccaccaatcctgtgcggctctgccgccgcttcggtttctttgtttatgaaaacctgggatttgtaagccggtctcttgtgtgcccttgatatttgttttacaaatttatattttcatttccatttatcatactgcattcttacttcctat

SEQ ID NO: 13446 - DNA, 1063 bp, Glycine max
  Gm_smallRNAprecursor_6279
tttcaagaccaatacaatttacaattttcccaattggtttttacaatggtgggacttctttggaccaattccagagatattcccagaaacagtccaacaaggatttgctcaaattgagaggcaataccattcacaggaatcatgaattccaacagatcttaaatacttctcaagctttgcactgtcatggatcttctcatggcaatatcgttacagcaagactgaaaagacaaaccaatatccatcactacaaagacacacatttgtaaaatggtggtcacaatttgactcatccaaagcagatccagaacaagtaaaactctcgttccaatcccatccagaattcctcaaagcaactgatccagaaacttctgtgtttttgaaccaaaagtctcatctggcagcatttttagcaggatcgaaatcaaaggagatcctacctaaaaatctaaaggaagttatgaaaatgttacagcaggaagaagaaggttcatccttaaagaaggaagaaacaagttctgctgaagtagaagaagaagaagatcccttttaccaaaacgaagatgattgttttggtatctgtttagattaaatttattttcggtcaaaaaaccgtctgtttgtaattaatgtgtacttaattttggacaatactacctgtcctgtagccattaaagtcccggtcaaaactacttgtcttgtaacaaaaagtcaaatagttccgatcaaaactaccggcaactaccggtctcagatttttggctatataaggagtcctcaaccatgttgtgaggtaccctttcatttggccatttttctggtttctgaagagaggtgctctgaaagaaaacttttgtaagcgcttctttcaagtttcaataaatttctattttccaactcttttctctccctccaccaatcctgtgcggctctgccgccgcttcggtttctttgtttatgaaaacctgggatttgtaagccggtctcttgtgtgcccttgatatttgttttacaaatttatattttcatttccatttatcatactgcattcttacttcctatc

SEQ ID NO: 13447 - DNA, 1063 bp, Glycine max; identical to SEQ ID NO: 13446
  Gm_smallRNAprecursor_6280

SEQ ID NO: 13448 - DNA, 1066 bp, Glycine max
  Gm_smallRNAprecursor_6281
tttcaagaccaatacaatttacaattttcccaattggtttttacaatggtgggacttctttggaccaattccagagatattcccagaaacagtccaacaaggatttgctcaaattgagaggcaataccattcacaggaatcatgaattccaacagatcttaaatacttctcaagctttgcactgtcatggatcttctcatggcaatatcgttacagcaagactgaaaagacaaaccaatatccatcactacaaagacacacatttgtaaaatggtggtcacaatttgactcatccaaagcagatccagaacaagtaaaactctcgttccaatcccatccagaattcctcaaagcaactgatccagaaacttctgtgtttttgaaccaaaagtctcatctggcagcatttttagcaggatcgaaatcaaaggagatcctacctaaaaatctaaaggaagttatgaaaatgttacagcaggaagaagaaggttcatccttaaagaaggaagaaacaagttctgctgaagtagaagaagaagaagatcccttttaccaaaacgaagatgattgttttggtatctgtttagattaaatttattttcggtcaaaaaaccgtctgtttgtaattaatgtgtacttaattttggacaatactacctgtcctgtagccattaaagtcccggtcaaaactacttgtcttgtaacaaaaagtcaaatagttccgatcaaaactaccggcaactaccggtctcagatttttggctatataaggagtcctcaaccatgttgtgaggtaccctttcatttggccatttttctggtttctgaagagaggtgctctgaaagaaaacttttgtaagcgcttctttcaagtttcaataaatttctattttccaactcttttctctccctccaccaatcctgtgcggctctgccgccgcttcggtttctttgtttatgaaaacctgggatttgtaagccggtctcttgtgtgcccttgatatttgttttacaaatttatattttcatttccatttatcatactgcattcttacttcctatctgt

SEQ ID NO: 13449 - DNA, 1059 bp, Glycine max
  Gm_smallRNAprecursor_6282
caagaccaatacaatttacaattttcccaattggtttttacaatggtgggacttctttggaccaattccagagatattcccagaaacagtccaacaaggatttgctcaaattgagaggcaataccattcacaggaatcatgaattccaacagatcttaaatacttctcaagctttgcactgtcatggatcttctcatggcaatatcgttacagcaagactgaaaagacaaaccaatatccatcactacaaagacacacatttgtaaaatggtggtcacaatttgactcatccaaagcagatccagaacaagtaaaactctcgttccaatcccatccagaattcctcaaagcaactgatccagaaacttctgtgtttttgaaccaaaagtctcatctggcagcatttttagcaggatcgaaatcaaaggagatcctacctaaaaatctaaaggaagttatgaaaatgttacagcaggaagaagaaggttcatccttaaagaaggaagaaacaagttctgctgaagtagaagaagaagaagatcccttttaccaaaacgaagatgattgttttggtatctgtttagattaaatttattttcggtcaaaaaaccgtctgtttgtaattaatgtgtacttaattttggacaatactacctgtcctgtagccattaaagtcccggtcaaaactacttgtcttgtaacaaaaagtcaaatagttccgatcaaaactaccggcaactaccggtctcagatttttggctatataaggagtcctcaaccatgttgtgaggtaccctttcatttggccatttttctggtttctgaagagaggtgctctgaaagaaaacttttgtaagcgcttctttcaagtttcaataaatttctattttccaactcttttctctccctccaccaatcctgtgcggctctgccgccgcttcggtttctttgtttatgaaaacctgggatttgtaagccggtctcttgtgtgcccttgatatttgttttacaaatttatattttcatttccatttatcatactgcattcttacttcctat

SEQ ID NO: 13450 - DNA, 1059 bp, Glycine max; identical to SEQ ID NO: 13449
  Gm_smallRNAprecursor_6283

SEQ ID NO: 13451 - DNA, 1060 bp, Glycine max
  Gm_smallRNAprecursor_6284
caagaccaatacaatttacaattttcccaattggtttttacaatggtgggacttctttggaccaattccagagatattcccagaaacagtccaacaaggatttgctcaaattgagaggcaataccattcacaggaatcatgaattccaacagatcttaaatacttctcaagctttgcactgtcatggatcttctcatggcaatatcgttacagcaagactgaaaagacaaaccaatatccatcactacaaagacacacatttgtaaaatggtggtcacaatttgactcatccaaagcagatccagaacaagtaaaactctcgttccaatcccatccagaattcctcaaagcaactgatccagaaacttctgtgtttttgaaccaaaagtctcatctggcagcatttttagcaggatcgaaatcaaaggagatcctacctaaaaatctaaaggaagttatgaaaatgttacagcaggaagaagaaggttcatccttaaagaaggaagaaacaagttctgctgaagtagaagaagaagaagatcccttttaccaaaacgaagatgattgttttggtatctgtttagattaaatttattttcggtcaaaaaaccgtctgtttgtaattaatgtgtacttaattttggacaatactacctgtcctgtagccattaaagtcccggtcaaaactacttgtcttgtaacaaaaagtcaaatagttccgatcaaaactaccggcaactaccggtctcagatttttggctatataaggagtcctcaaccatgttgtgaggtaccctttcatttggccatttttctggtttctgaagagaggtgctctgaaagaaaacttttgtaagcgcttctttcaagtttcaataaatttctattttccaactcttttctctccctccaccaatcctgtgcggctctgccgccgcttcggtttctttgtttatgaaaacctgggatttgtaagccggtctcttgtgtgcccttgatatttgttttacaaatttatattttcatttccatttatcatactgcattcttacttcctatc

SEQ ID NO: 13452 - DNA, 1060 bp, Glycine max; identical to SEQ ID NO: 13451
  Gm_smallRNAprecursor_6285

SEQ ID NO: 13453 - DNA, 1060 bp, Glycine max; identical to SEQ ID NO: 13451
  Gm_smallRNAprecursor_6286

SEQ ID NO: 13454 - DNA, 1060 bp, Glycine max; identical to SEQ ID NO: 13451
  Gm_smallRNAprecursor_6287

SEQ ID NO: 13455 - DNA, 1060 bp, Glycine max
  Gm_smallRNAprecursor_6288
ggactttaatggctacaggacaggtggtattgtccaaaattatttacacattaattacaaacagacggttttgtgaccgaaaataaatttaatctaaacagataccaaaacaatcatctttattttggtaaaaggggtcttcttcttcttcttcagcagaacttgtttcttccttctttgaggatgaaccttcttcttcctgttgtaacatttgcagaacttcctttagatttttagtttggatctcctttgatttcgatcttgctaaaaatactgccagatgagacttttggttcaaaaacacagaagtttctggatcaactgctttgaggaattctggatgggattggaacgagagttttacttgttctggatctgctttggatgagtcaaattgtgaccaccattttacaaatgcgtgtctttgtagtgatggatattggtttgtcttttcagtcttgctgtaatgatattgccatgaaaagatccatgacagtgcaaagcttgagaagtatttaagatctgttggaattcgtgattcctgcaaattgttttgtctctcaaattgagcaaatccttgttggactgtttcggggaatatctctggaattggtccaaagaagtcccaccattgtaaaaaccaattgggaaaatcgtaaattgtattggtcttgaaatatatcagccatgaatgcttgaagcgggtatcttggtgccaaaacaccttaatccaagcatcaacatagtcttgaaatatatcagccatgaatgcttgaagcgggtattttggtgccaaaacaccttagtccaagcatcaacataatctcaataggtataacctaccggatcaaatggaactgaaaatctctttcctttgttcaagtccgaaccaaagtgtcttggttgaataacttttagtatttggattgtggagtgggtgtttaatgtttggtcttttgggtctttgaaatgtttgatagatactaaatttgaatctaccaaaatcaattcataaaaagttcttgtcttcaggatgatcgttggtttgtagtgaaatcct

SEQ ID NO: 13456 - DNA, 1049 bp, Glycine max
  Gm_smallRNAprecursor_6289
gctacaggacaggtggtattgtccaaaattatttacacattaattacaaacagacggttttgtgaccgaaaataaatttaatctaaacagataccaaaacaatcatctttattttggtaaaaggggtcttcttcttcttcttcagcagaacttgtttcttccttctttgaggatgaaccttcttcttcctgttgtaacatttgcagaacttcctttagatttttagtttggatctcctttgatttcgatcttgctaaaaatactgccagatgagacttttggttcaaaaacacagaagtttctggatcaactgctttgaggaattctggatgggattggaacgagagttttacttgttctggatctgctttggatgagtcaaattgtgaccaccattttacaaatgcgtgtctttgtagtgatggatattggtttgtcttttcagtcttgctgtaatgatattgccatgaaaagatccatgacagtgcaaagcttgagaagtatttaagatctgttggaattcgtgattcctgcaaattgttttgtctctcaaattgagcaaatccttgttggactgtttcggggaatatctctggaattggtccaaagaagtcccaccattgtaaaaaccaattgggaaaatcgtaaattgtattggtcttgaaatatatcagccatgaatgcttgaagcgggtatcttggtgccaaaacaccttaatccaagcatcaacatagtcttgaaatatatcagccatgaatgcttgaagcgggtattttggtgccaaaacaccttagtccaagcatcaacataatctcaataggtataacctaccggatcaaatggaactgaaaatctctttcctttgttcaagtccgaaccaaagtgtcttggttgaataacttttagtatttggattgtggagtgggtgtttaatgtttggtcttttgggtctttgaaatgtttgatagatactaaatttgaatctaccaaaatcaattcataaaaagttcttgtcttcaggatgatcgttggtttgtagtgaaatcct

SEQ ID NO: 13457 - DNA, 1057 bp, Glycine max
  Gm_smallRNAprecursor_6290
gctacaggacaggtggtattgtccaaaattatttacacattaattacaaacagacggttttgtgaccgaaaataaatttaatctaaacagataccaaaacaatcatctttattttggtaaaaggggtcttcttcttcttcttcagcagaacttgtttcttccttctttgaggatgaaccttcttcttcctgttgtaacatttgcagaacttcctttagatttttagtttggatctcctttgatttcgatcttgctaaaaatactgccagatgagacttttggttcaaaaacacagaagtttctggatcaactgctttgaggaattctggatgggattggaacgagagttttacttgttctggatctgctttggatgagtcaaattgtgaccaccattttacaaatgcgtgtctttgtagtgatggatattggtttgtcttttcagtcttgctgtaatgatattgccatgaaaagatccatgacagtgcaaagcttgagaagtatttaagatctgttggaattcgtgattcctgcaaattgttttgtctctcaaattgagcaaatccttgttggactgtttcggggaatatctctggaattggtccaaagaagtcccaccattgtaaaaaccaattgggaaaatcgtaaattgtattggtcttgaaatatatcagccatgaatgcttgaagcgggtatcttggtgccaaaacaccttaatccaagcatcaacatagtcttgaaatatatcagccatgaatgcttgaagcgggtattttggtgccaaaacaccttagtccaagcatcaacataatctcaataggtataacctaccggatcaaatggaactgaaaatctctttcctttgttcaagtccgaaccaaagtgtcttggttgaataacttttagtatttggattgtggagtgggtgtttaatgtttggtcttttgggtctttgaaatgtttgatagatactaaatttgaatctaccaaaatcaattcataaaaagttcttgtcttcaggatgatcgttggtttgtagtgaaatcctgatgggaa

SEQ ID NO: 13458 - DNA, 1058 bp, Glycine max
  Gm_smallRNAprecursor_6291
gctacaggacaggtggtattgtccaaaattatttacacattaattacaaacagacggttttgtgaccgaaaataaatttaatctaaacagataccaaaacaatcatctttattttggtaaaaggggtcttcttcttcttcttcagcagaacttgtttcttccttctttgaggatgaaccttcttcttcctgttgtaacatttgcagaacttcctttagatttttagtttggatctcctttgatttcgatcttgctaaaaatactgccagatgagacttttggttcaaaaacacagaagtttctggatcaactgctttgaggaattctggatgggattggaacgagagttttacttgttctggatctgctttggatgagtcaaattgtgaccaccattttacaaatgcgtgtctttgtagtgatggatattggtttgtcttttcagtcttgctgtaatgatattgccatgaaaagatccatgacagtgcaaagcttgagaagtatttaagatctgttggaattcgtgattcctgcaaattgttttgtctctcaaattgagcaaatccttgttggactgtttcggggaatatctctggaattggtccaaagaagtcccaccattgtaaaaaccaattgggaaaatcgtaaattgtattggtcttgaaatatatcagccatgaatgcttgaagcgggtatcttggtgccaaaacaccttaatccaagcatcaacatagtcttgaaatatatcagccatgaatgcttgaagcgggtattttggtgccaaaacaccttagtccaagcatcaacataatctcaataggtataacctaccggatcaaatggaactgaaaatctctttcctttgttcaagtccgaaccaaagtgtcttggttgaataacttttagtatttggattgtggagtgggtgtttaatgtttggtcttttgggtctttgaaatgtttgatagatactaaatttgaatctaccaaaatcaattcataaaaagttcttgtcttcaggatgatcgttggtttgtagtgaaatcctgatgggaaa

SEQ ID NO: 13459 - DNA, 1072 bp, Glycine max
  Gm_smallRNAprecursor_6292
taaaaatactgccagatgagacttttggttcaaaaacacagaagtttctggatcaactgctttgaggaattctggatgggattggaacgagagttttacttgttctggatctgctttggatgagtcaaattgtgaccaccattttacaaatgcgtgtctttgtagtgatggatattggtttgtcttttcagtcttgctgtaatgatattgccatgaaaagatccatgacagtgcaaagcttgagaagtatttaagatctgttggaattcgtgattcctgcaaattgttttgtctctcaaattgagcaaatccttgttggactgtttcggggaatatctctggaattggtccaaagaagtcccaccattgtaaaaaccaattgggaaaatcgtaaattgtattggtcttgaaatatatcagccatgaatgcttgaagcgggtatcttggtgccaaaacaccttaatccaagcatcaacatagtcttgaaatatatcagccatgaatgcttgaagcgggtattttggtgccaaaacaccttagtccaagcatcaacataatctcaataggtataacctaccggatcaaatggaactgaaaatctctttcctttgttcaagtccgaaccaaagtgtcttggttgaataacttttagtatttggattgtggagtgggtgtttaatgtttggtcttttgggtctttgaaatgtttgatagatactaaatttgaatctaccaaaatcaattcataaaaagttcttgtcttcaggatgatcgttggtttgtagtgaaatcctgatgggaaagccttggccgacgccttgaagggatttttgtcccaaaatccaggttccatctgcaaaacagttaaaaatttatttttataaatatagtttttagtttgtttggcaggtggtgtttgtgctttggctaaaggtagtttccctttaggattggtagctgttttggtcattgatgcattttggatcattgtttgtaaatttgattcagaatcatcatcagattctgaggcaatgtctgcccaagattttttgattatttttggaaatttgg

SEQ ID NO: 13460 - DNA, 1071 bp, Glycine max
  Gm_smallRNAprecursor_6293
taaattggttttctaggtagatgacccagcctgggttggtgacccagaagaggttgatgatttcttagtggttggctccgaaagagccagtcttgatcctttgcctgtacttcgtcctccccttagggagattcctgatgccttaggaggcattaccacttttctgtaagaattcatgtgtaaggtagttaggtaatgaaattgaggtgcccttgatatattctatgtcaaaatcaaagacacttagaattgcttgccatcttgcaaaaaaattttttgaggcaaggtttttaacatctttgtgtaaaatatctttggctggtttacaatcaaccctgattaaaaaattttggtttaataaatccgattgaaatttggaaatgcacataacaattgctaaaacttcctttttaacagttgaatattttaattgtgtaggattccaatgttttgatgtatatggaatgacatgatcttggccatggactctttgtttgatgatgccaccataacctatgtctgatgcatcagtttcgacaattttaaatgcttgtggaataggaagatacagacattttatggattggactttgagtttgatttctttaactatttgtgtatggaggtcagaccaaggaggcggatttttcttcagcctatcatgcaatggcttgacaatattgtttaaataggggacaaattctcctacataatttagacaacctagaaatctttgtaactgggttttgtctaagatttggttgggaaatttgctagcaaactctattgacctttctattggaatgattgtaccttgatatatattgtgaccaaggaattgaattcgagtttggaaaagattgattttttatttggagactgtcaaaccattctgtttgataatatggatgaaagtttggagatgttttaaatgttggtcaatgttttgggaaaagattaaaacatcttttacttccctttctagattgtttatctttgtttgaagatcttggattgttgttggtttggctgaagagttttctaaccttttgaatatgttgcttacatcaa

SEQ ID NO: 13461 - DNA, 1131 bp, Glycine max
  Gm_smallRNAprecursor_6294
gttggctccgaaagagccagtcttgatcctttgcctgtacttcgtcctccccttagggagattcctgatgccttaggaggcattaccacttttctgtaagaattcatgtgtaaggtagttaggtaatgaaattgaggtgcccttgatatattctatgtcaaaatcaaagacacttagaattgcttgccatcttgcaaaaaaattttttgaggcaaggtttttaacatctttgtgtaaaatatctttggctggtttacaatcaaccctgattaaaaaattttggtttaataaatccgattgaaatttggaaatgcacataacaattgctaaaacttcctttttaacagttgaatattttaattgtgtaggattccaatgttttgatgtatatggaatgacatgatcttggccatggactctttgtttgatgatgccaccataacctatgtctgatgcatcagtttcgacaattttaaatgcttgtggaataggaagatacagacattttatggattggactttgagtttgatttctttaactatttgtgtatggaggtcagaccaaggaggcggatttttcttcagcctatcatgcaatggcttgacaatattgtttaaataggggacaaattctcctacataatttagacaacctagaaatctttgtaactgggttttgtctaagatttggttgggaaatttgctagcaaactctattgacctttctattggaatgattgtaccttgatatatattgtgaccaaggaattgaattcgagtttggaaaagattgattttttatttggagactgtcaaaccattctgtttgataatatggatgaaagtttggagatgttttaaatgttggtcaatgttttgggaaaagattaaaacatcttttacttccctttctagattgtttatctttgtttgaagatcttggattgttgttggtttggctgaagagttttctaaccttttgaatatgttgcttacatcaaatttattgtttgtaataaaatccttttgtctaggttttacctctaaagttttcttaagtttttccaaaaaaaccttcttttcctgggggtcaggtatggaattgattgcttcaaacaagagatcctgttc

SEQ ID NO: 13462 - DNA, 1132 bp, Glycine max
  Gm_smallRNAprecursor_6295
gttggctccgaaagagccagtcttgatcctttgcctgtacttcgtcctccccttagggagattcctgatgccttaggaggcattaccacttttctgtaagaattcatgtgtaaggtagttaggtaatgaaattgaggtgcccttgatatattctatgtcaaaatcaaagacacttagaattgcttgccatcttgcaaaaaaattttttgaggcaaggtttttaacatctttgtgtaaaatatctttggctggtttacaatcaaccctgattaaaaaattttggtttaataaatccgattgaaatttggaaatgcacataacaattgctaaaacttcctttttaacagttgaatattttaattgtgtaggattccaatgttttgatgtatatggaatgacatgatcttggccatggactctttgtttgatgatgccaccataacctatgtctgatgcatcagtttcgacaattttaaatgcttgtggaataggaagatacagacattttatggattggactttgagtttgatttctttaactatttgtgtatggaggtcagaccaaggaggcggatttttcttcagcctatcatgcaatggcttgacaatattgtttaaataggggacaaattctcctacataatttagacaacctagaaatctttgtaactgggttttgtctaagatttggttgggaaatttgctagcaaactctattgacctttctattggaatgattgtaccttgatatatattgtgaccaaggaattgaattcgagtttggaaaagattgattttttatttggagactgtcaaaccattctgtttgataatatggatgaaagtttggagatgttttaaatgttggtcaatgttttgggaaaagattaaaacatcttttacttccctttctagattgtttatctttgtttgaagatcttggattgttgttggtttggctgaagagttttctaaccttttgaatatgttgcttacatcaaatttattgtttgtaataaaatccttttgtctaggttttacctctaaagttttcttaagtttttccaaaaaaaccttcttttcctgggggtcaggtatggaattgattgcttcaaacaagagatcctgttct

SEQ ID NO: 13463 - DNA, 1049 bp, Glycine max
  Gm_smallRNAprecursor_6296
attgaggtgcccttgatatattctatgtcaaaatcaaagacacttagaattgcttgccatcttgcaaaaaaattttttgaggcaaggtttttaacatctttgtgtaaaatatctttggctggtttacaatcaaccctgattaaaaaattttggtttaataaatccgattgaaatttggaaatgcacataacaattgctaaaacttcctttttaacagttgaatattttaattgtgtaggattccaatgttttgatgtatatggaatgacatgatcttggccatggactctttgtttgatgatgccaccataacctatgtctgatgcatcagtttcgacaattttaaatgcttgtggaataggaagatacagacattttatggattggactttgagtttgatttctttaactatttgtgtatggaggtcagaccaaggaggcggatttttcttcagcctatcatgcaatggcttgacaatattgtttaaataggggacaaattctcctacataatttagacaacctagaaatctttgtaactgggttttgtctaagatttggttgggaaatttgctagcaaactctattgacctttctattggaatgattgtaccttgatatatattgtgaccaaggaattgaattcgagtttggaaaagattgattttttatttggagactgtcaaaccattctgtttgataatatggatgaaagtttggagatgttttaaatgttggtcaatgttttgggaaaagattaaaacatcttttacttccctttctagattgtttatctttgtttgaagatcttggattgttgttggtttggctgaagagttttctaaccttttgaatatgttgcttacatcaaatttattgtttgtaataaaatccttttgtctaggttttacctctaaagttttcttaagtttttccaaaaaaaccttcttttcctgggggtcaggtatggaattgattgcttcaaacaagagatcctgttctctcgttagagtattgatttgcccatcatcatcatcttttgatgatag

SEQ ID NO: 13464 - DNA, 1049 bp, Glycine max; identical to SEQ ID NO: 13463
  Gm_smallRNAprecursor_6297

SEQ ID NO: 13465 - DNA, 1050 bp, Glycine max
  Gm_smallRNAprecursor_6298
attgaggtgcccttgatatattctatgtcaaaatcaaagacacttagaattgcttgccatcttgcaaaaaaattttttgaggcaaggtttttaacatctttgtgtaaaatatctttggctggtttacaatcaaccctgattaaaaaattttggtttaataaatccgattgaaatttggaaatgcacataacaattgctaaaacttcctttttaacagttgaatattttaattgtgtaggattccaatgttttgatgtatatggaatgacatgatcttggccatggactctttgtttgatgatgccaccataacctatgtctgatgcatcagtttcgacaattttaaatgcttgtggaataggaagatacagacattttatggattggactttgagtttgatttctttaactatttgtgtatggaggtcagaccaaggaggcggatttttcttcagcctatcatgcaatggcttgacaatattgtttaaataggggacaaattctcctacataatttagacaacctagaaatctttgtaactgggttttgtctaagatttggttgggaaatttgctagcaaactctattgacctttctattggaatgattgtaccttgatatatattgtgaccaaggaattgaattcgagtttggaaaagattgattttttatttggagactgtcaaaccattctgtttgataatatggatgaaagtttggagatgttttaaatgttggtcaatgttttgggaaaagattaaaacatcttttacttccctttctagattgtttatctttgtttgaagatcttggattgttgttggtttggctgaagagttttctaaccttttgaatatgttgcttacatcaaatttattgtttgtaataaaatccttttgtctaggttttacctctaaagttttcttaagtttttccaaaaaaaccttcttttcctgggggtcaggtatggaattgattgcttcaaacaagagatcctgttctctcgttagagtattgatttgcccatcatcatcatcttttgatgatagt

SEQ ID NO: 13466 - DNA, 1050 bp, Glycine max; identical to SEQ ID NO: 13465
  Gm_smallRNAprecursor_6299

SEQ ID NO: 13467 - DNA, 1047 bp, Glycine max
  Gm_smallRNAprecursor_6300
ttgaggtgcccttgatatattctatgtcaaaatcaaagacacttagaattgcttgccatcttgcaaaaaaattttttgaggcaaggtttttaacatctttgtgtaaaatatctttggctggtttacaatcaaccctgattaaaaaattttggtttaataaatccgattgaaatttggaaatgcacataacaattgctaaaacttcctttttaacagttgaatattttaattgtgtaggattccaatgttttgatgtatatggaatgacatgatcttggccatggactctttgtttgatgatgccaccataacctatgtctgatgcatcagtttcgacaattttaaatgcttgtggaataggaagatacagacattttatggattggactttgagtttgatttctttaactatttgtgtatggaggtcagaccaaggaggcggatttttcttcagcctatcatgcaatggcttgacaatattgtttaaataggggacaaattctcctacataatttagacaacctagaaatctttgtaactgggttttgtctaagatttggttgggaaatttgctagcaaactctattgacctttctattggaatgattgtaccttgatatatattgtgaccaaggaattgaattcgagtttggaaaagattgattttttatttggagactgtcaaaccattctgtttgataatatggatgaaagtttggagatgttttaaatgttggtcaatgttttgggaaaagattaaaacatcttttacttccctttctagattgtttatctttgtttgaagatcttggattgttgttggtttggctgaagagttttctaaccttttgaatatgttgcttacatcaaatttattgtttgtaataaaatccttttgtctaggttttacctctaaagttttcttaagtttttccaaaaaaaccttcttttcctgggggtcaggtatggaattgattgcttcaaacaagagatcctgttctctcgttagagtattgatttgcccatcatcatcatcttttgatgata

SEQ ID NO: 13468 - DNA, 1048 bp, Glycine max
  Gm_smallRNAprecursor_6301
ttgaggtgcccttgatatattctatgtcaaaatcaaagacacttagaattgcttgccatcttgcaaaaaaattttttgaggcaaggtttttaacatctttgtgtaaaatatctttggctggtttacaatcaaccctgattaaaaaattttggtttaataaatccgattgaaatttggaaatgcacataacaattgctaaaacttcctttttaacagttgaatattttaattgtgtaggattccaatgttttgatgtatatggaatgacatgatcttggccatggactctttgtttgatgatgccaccataacctatgtctgatgcatcagtttcgacaattttaaatgcttgtggaataggaagatacagacattttatggattggactttgagtttgatttctttaactatttgtgtatggaggtcagaccaaggaggcggatttttcttcagcctatcatgcaatggcttgacaatattgtttaaataggggacaaattctcctacataatttagacaacctagaaatctttgtaactgggttttgtctaagatttggttgggaaatttgctagcaaactctattgacctttctattggaatgattgtaccttgatatatattgtgaccaaggaattgaattcgagtttggaaaagattgattttttatttggagactgtcaaaccattctgtttgataatatggatgaaagtttggagatgttttaaatgttggtcaatgttttgggaaaagattaaaacatcttttacttccctttctagattgtttatctttgtttgaagatcttggattgttgttggtttggctgaagagttttctaaccttttgaatatgttgcttacatcaaatttattgtttgtaataaaatccttttgtctaggttttacctctaaagttttcttaagtttttccaaaaaaaccttcttttcctgggggtcaggtatggaattgattgcttcaaacaagagatcctgttctctcgttagagtattgatttgcccatcatcatcatcttttgatgatag

SEQ ID NO: 13469 - DNA, 1049 bp, Glycine max
  Gm_smallRNAprecursor_6302
ttgaggtgcccttgatatattctatgtcaaaatcaaagacacttagaattgcttgccatcttgcaaaaaaattttttgaggcaaggtttttaacatctttgtgtaaaatatctttggctggtttacaatcaaccctgattaaaaaattttggtttaataaatccgattgaaatttggaaatgcacataacaattgctaaaacttcctttttaacagttgaatattttaattgtgtaggattccaatgttttgatgtatatggaatgacatgatcttggccatggactctttgtttgatgatgccaccataacctatgtctgatgcatcagtttcgacaattttaaatgcttgtggaataggaagatacagacattttatggattggactttgagtttgatttctttaactatttgtgtatggaggtcagaccaaggaggcggatttttcttcagcctatcatgcaatggcttgacaatattgtttaaataggggacaaattctcctacataatttagacaacctagaaatctttgtaactgggttttgtctaagatttggttgggaaatttgctagcaaactctattgacctttctattggaatgattgtaccttgatatatattgtgaccaaggaattgaattcgagtttggaaaagattgattttttatttggagactgtcaaaccattctgtttgataatatggatgaaagtttggagatgttttaaatgttggtcaatgttttgggaaaagattaaaacatcttttacttccctttctagattgtttatctttgtttgaagatcttggattgttgttggtttggctgaagagttttctaaccttttgaatatgttgcttacatcaaatttattgtttgtaataaaatccttttgtctaggttttacctctaaagttttcttaagtttttccaaaaaaaccttcttttcctgggggtcaggtatggaattgattgcttcaaacaagagatcctgttctctcgttagagtattgatttgcccatcatcatcatcttttgatgatagt

SEQ ID NO: 13470 - DNA, 1159 bp, Glycine max
  Gm_smallRNAprecursor_6303
ccatttttcagggagagttacttcatcccattttattattctttttaaagaaacattggcttttgtcatatcagtgataaataaggttgtttctcccttttgtggttgtaataggactctagacgcacaggtattcatgaccttgtactggatcctataaattaaggctgctgaaattgatccttctttcatgtcaaggccatgaaagtggatgtttaagaacagagagtcaagaatgtttctgtccatcagactcactgtcttgtttggataacaattaaaatatattggaccttgtcctaggctggtttcgactgttccaattaaggagtcttcaaatttattatgcctaatatctcttagacacattaaaactgttgcatctatgcctatgtcaattaagggcttgatggctacttgtacacagtcgatgtgtagatatttatacttacagctatgttcataaattgaattttttgaaagtaaatgaaattcttcccctatatcttgtcctagaggaatattgttttctactattttgattatgtaatcaaagttgtgtttgtccttaattgtttcaggaacatatagttgatcttgagggatttctggaatgttccagtcatccatgttttgattgatatcttcgaatcgaacttcctcatcgaagagattgtgtttgggggtgacctcttgggtctggttatcttgatcacttaataaattggaatatcttgaagaagatgatgaagaagaatttgatcgaaaagagatatgggaaaaagagcgcaatagtctagacatgattataacattctctaatatctttgccttcatttggttccatagaaatatttccataaggctatatgttacagaacttcttggatctaaacaaatgaaaaagattttttttttttacggacaatatagtttgaacactactcctatagccatcagtatattatgtatattatgtctcaatattttatttgaacaatacaccttagtcttactgccctttctcaaccacgggacttactgctacagtataattcaactaaaatatcagattgttgtgcttccagaaaatattgttcaaacatatactatttaaattaaaactactgtacatggttcagatccataagttcacagt

SEQ ID NO: 13471 - DNA, 1044 bp, Glycine max
  Gm_smallRNAprecursor_6304
tacataggccacttaagtagtcatatacacataataccgcatgggggaacaaagaaagaaaacaaatagggggttattacaaaacctgttaaagtaagagatctgaaaatttcagacccaggttgggattcatgcgccactttcccaagttgaacaaccccgtaagtgggagagaaacaaagagtgatttttctctggattccaagtgagtgaaaaacttgggatgaaaaagaagtgcgagatttattaagacctaccatgtctctagcaccagtggctaaaccattcaaaagaccaattttgcaggaacaatttataaagggatttataaaattgggggactaaatgtgtgaattaaactatagggggaccaaaatcgaaattggagtaaaactagaggaccaaaagtgtaattttacctacaaaaaatgaagcctttacagggaaccactcaaacgttgacacgtggcattaacacgtggcattgacaagtggcagtcaacgtctgaggttaacggtcaatgtccaaatcgggcttccaggaccaattttgcagggatttataaaactgggggaccaaatttgtgaattaaattatagggggaccaaatccgtaattggagataaagtgggggaccaattttacaattttgccaaaatagaacaagaaaagaggagacttgatcaaataaaagagtgacggatgaaggaaaacatttatcaagaataagggtgcagttatagagcataaaagagaatattggaaggatctgaagcgagatatatgggaagttacgtgttaacaatacaacgtgacaaaaaacatatatagtgtgatattagagataagtgggttacaaggaagctaattagctttggctataaaaaggaaccacttgcagtgcatcttgaatggaaaaaaatatagatacttggaaattttttcaaaaaagggtgcatttcctccttttttttttggataaaattgaaaaacctttattcttttgttccttctacacaatgcttggttgacaaagatcctat

SEQ ID NO: 13472 - DNA, 1056 bp, Glycine max
  Gm_smallRNAprecursor_6305
acttttgcgggttttatgctgtgcaactgacacagtcaatttaatgttgtgtttgaccataacgtttaggaattagtatttagtgcatatattacttagttaattaataagtgaaataaaaatgtataatgtattaacgatattcagttactgtggttagatttgtgttatatatagcagagatcagcggaataagatcaaacagacagataggaagtaagaatgcagtatgataaaatcaaacgtaagaattataaacttgtaaagcagatatcaagggcacaccgaaacggcttacaaacccaggtttttgaaaacaaagaaaccgaagcggcgacagagccgcacaggatcggtgagggaagaagggagatatgaaaaatagaacttgaaatttattgaaaccgaaagaaaagcttacaaagattttttccctaggcagagcttctctctctaaaacctgattctgagactatctgaaagggtgcctcacaaaggggacgaggactcctttaaatagacccaatttttactgtttctacagtatcggtaatgtttaccggaactgttacaaaactttttacaaattacattatttaaaagaaactgacaaattagttacaataattcatgattattacaactaattaatcttcgtccaatgatatgccaaaacagtcatcttcattctggtagaatggatcatcttcttggtcatcattagtctctgatgattcaatttccttcttggaaggttcttcttccacttcctgttgaagtagatggagaacttctttgagattctgagcaagactttctttagattttgagcttgctaagaatgctgccagttgcgacttctgatttagaaacaaagatgtctccggatcagcaggtttaaggaactcaggattgctctggaaccagttcttgacttgatctggagcagcctttgaagtatcgaattgtgaccaccattttacaaaggcgtgtctctgtaacggtggatattgcttgttgttttcagtttttccgtatctgtattgccatgaaaag

SEQ ID NO: 13473 - DNA, 1071 bp, Glycine max
  Gm_smallRNAprecursor_6306
cggcttacaaacccaggtttttgaaaacaaagaaaccgaagcggcgacagagccgcacaggatcggtgagggaagaagggagatatgaaaaatagaacttgaaatttattgaaaccgaaagaaaagcttacaaagattttttccctaggcagagcttctctctctaaaacctgattctgagactatctgaaagggtgcctcacaaaggggacgaggactcctttaaatagacccaatttttactgtttctacagtatcggtaatgtttaccggaactgttacaaaactttttacaaattacattatttaaaagaaactgacaaattagttacaataattcatgattattacaactaattaatcttcgtccaatgatatgccaaaacagtcatcttcattctggtagaatggatcatcttcttggtcatcattagtctctgatgattcaatttccttcttggaaggttcttcttccacttcctgttgaagtagatggagaacttctttgagattctgagcaagactttctttagattttgagcttgctaagaatgctgccagttgcgacttctgatttagaaacaaagatgtctccggatcagcaggtttaaggaactcaggattgctctggaaccagttcttgacttgatctggagcagcctttgaagtatcgaattgtgaccaccattttacaaaggcgtgtctctgtaacggtggatattgcttgttgttttcagtttttccgtatctgtattgccatgaaaagatctatgacaaggcaaaactggaaaaatactttaaatctgccggaattcgtgattccttgctattatagagcttgttgaattgttcgaatccctattggacttcttctggaaatatttgtggaattggtccgaagtagttccaccattggaggaaccaatttggaaaattatatgcagtattatttttgaagtaaatcagccatgaatgcttgaatttactattttgatgccagaacacattggtccaggcgtcaacgtaatcccaataattataccctgcaggatcaaatggtgcagagaattt

SEQ ID NO: 13474 - DNA, 1072 bp, Glycine max
  Gm_smallRNAprecursor_6307
cggcttacaaacccaggtttttgaaaacaaagaaaccgaagcggcgacagagccgcacaggatcggtgagggaagaagggagatatgaaaaatagaacttgaaatttattgaaaccgaaagaaaagcttacaaagattttttccctaggcagagcttctctctctaaaacctgattctgagactatctgaaagggtgcctcacaaaggggacgaggactcctttaaatagacccaatttttactgtttctacagtatcggtaatgtttaccggaactgttacaaaactttttacaaattacattatttaaaagaaactgacaaattagttacaataattcatgattattacaactaattaatcttcgtccaatgatatgccaaaacagtcatcttcattctggtagaatggatcatcttcttggtcatcattagtctctgatgattcaatttccttcttggaaggttcttcttccacttcctgttgaagtagatggagaacttctttgagattctgagcaagactttctttagattttgagcttgctaagaatgctgccagttgcgacttctgatttagaaacaaagatgtctccggatcagcaggtttaaggaactcaggattgctctggaaccagttcttgacttgatctggagcagcctttgaagtatcgaattgtgaccaccattttacaaaggcgtgtctctgtaacggtggatattgcttgttgttttcagtttttccgtatctgtattgccatgaaaagatctatgacaaggcaaaactggaaaaatactttaaatctgccggaattcgtgattccttgctattatagagcttgttgaattgttcgaatccctattggacttcttctggaaatatttgtggaattggtccgaagtagttccaccattggaggaaccaatttggaaaattatatgcagtattatttttgaagtaaatcagccatgaatgcttgaatttactattttgatgccagaacacattggtccaggcgtcaacgtaatcccaataattataccctgcaggatcaaatggtgcagagaatttt

SEQ ID NO: 13475 - DNA, 1040 bp, Glycine max
  Gm_smallRNAprecursor_6308
cttacaaacccaggtttttgaaaacaaagaaaccgaagcggcgacagagccgcacaggatcggtgagggaagaagggagatatgaaaaatagaacttgaaatttattgaaaccgaaagaaaagcttacaaagattttttccctaggcagagcttctctctctaaaacctgattctgagactatctgaaagggtgcctcacaaaggggacgaggactcctttaaatagacccaatttttactgtttctacagtatcggtaatgtttaccggaactgttacaaaactttttacaaattacattatttaaaagaaactgacaaattagttacaataattcatgattattacaactaattaatcttcgtccaatgatatgccaaaacagtcatcttcattctggtagaatggatcatcttcttggtcatcattagtctctgatgattcaatttccttcttggaaggttcttcttccacttcctgttgaagtagatggagaacttctttgagattctgagcaagactttctttagattttgagcttgctaagaatgctgccagttgcgacttctgatttagaaacaaagatgtctccggatcagcaggtttaaggaactcaggattgctctggaaccagttcttgacttgatctggagcagcctttgaagtatcgaattgtgaccaccattttacaaaggcgtgtctctgtaacggtggatattgcttgttgttttcagtttttccgtatctgtattgccatgaaaagatctatgacaaggcaaaactggaaaaatactttaaatctgccggaattcgtgattccttgctattatagagcttgttgaattgttcgaatccctattggacttcttctggaaatatttgtggaattggtccgaagtagttccaccattggaggaaccaatttggaaaattatatgcagtattatttttgaagtaaatcagccatgaatgcttgaatttactattttgatgccagaacacattggtccaggcgtcaacgtaatcccaataattatacc

SEQ ID NO: 13476 - DNA, 1068 bp, Glycine max
  Gm_smallRNAprecursor_6309
cttacaaacccaggtttttgaaaacaaagaaaccgaagcggcgacagagccgcacaggatcggtgagggaagaagggagatatgaaaaatagaacttgaaatttattgaaaccgaaagaaaagcttacaaagattttttccctaggcagagcttctctctctaaaacctgattctgagactatctgaaagggtgcctcacaaaggggacgaggactcctttaaatagacccaatttttactgtttctacagtatcggtaatgtttaccggaactgttacaaaactttttacaaattacattatttaaaagaaactgacaaattagttacaataattcatgattattacaactaattaatcttcgtccaatgatatgccaaaacagtcatcttcattctggtagaatggatcatcttcttggtcatcattagtctctgatgattcaatttccttcttggaaggttcttcttccacttcctgttgaagtagatggagaacttctttgagattctgagcaagactttctttagattttgagcttgctaagaatgctgccagttgcgacttctgatttagaaacaaagatgtctccggatcagcaggtttaaggaactcaggattgctctggaaccagttcttgacttgatctggagcagcctttgaagtatcgaattgtgaccaccattttacaaaggcgtgtctctgtaacggtggatattgcttgttgttttcagtttttccgtatctgtattgccatgaaaagatctatgacaaggcaaaactggaaaaatactttaaatctgccggaattcgtgattccttgctattatagagcttgttgaattgttcgaatccctattggacttcttctggaaatatttgtggaattggtccgaagtagttccaccattggaggaaccaatttggaaaattatatgcagtattatttttgaagtaaatcagccatgaatgcttgaatttactattttgatgccagaacacattggtccaggcgtcaacgtaatcccaataattataccctgcaggatcaaatggtgcagagaattt

SEQ ID NO: 13477 - DNA, 1069 bp, Glycine max
  Gm_smallRNAprecursor_6310
cttacaaacccaggtttttgaaaacaaagaaaccgaagcggcgacagagccgcacaggatcggtgagggaagaagggagatatgaaaaatagaacttgaaatttattgaaaccgaaagaaaagcttacaaagattttttccctaggcagagcttctctctctaaaacctgattctgagactatctgaaagggtgcctcacaaaggggacgaggactcctttaaatagacccaatttttactgtttctacagtatcggtaatgtttaccggaactgttacaaaactttttacaaattacattatttaaaagaaactgacaaattagttacaataattcatgattattacaactaattaatcttcgtccaatgatatgccaaaacagtcatcttcattctggtagaatggatcatcttcttggtcatcattagtctctgatgattcaatttccttcttggaaggttcttcttccacttcctgttgaagtagatggagaacttctttgagattctgagcaagactttctttagattttgagcttgctaagaatgctgccagttgcgacttctgatttagaaacaaagatgtctccggatcagcaggtttaaggaactcaggattgctctggaaccagttcttgacttgatctggagcagcctttgaagtatcgaattgtgaccaccattttacaaaggcgtgtctctgtaacggtggatattgcttgttgttttcagtttttccgtatctgtattgccatgaaaagatctatgacaaggcaaaactggaaaaatactttaaatctgccggaattcgtgattccttgctattatagagcttgttgaattgttcgaatccctattggacttcttctggaaatatttgtggaattggtccgaagtagttccaccattggaggaaccaatttggaaaattatatgcagtattatttttgaagtaaatcagccatgaatgcttgaatttactattttgatgccagaacacattggtccaggcgtcaacgtaatcccaataattataccctgcaggatcaaatggtgcagagaatttt

SEQ ID NO: 13478 - DNA, 1048 bp, Glycine max
  Gm_smallRNAprecursor_6311
ggaagaagggagatatgaaaaatagaacttgaaatttattgaaaccgaaagaaaagcttacaaagattttttccctaggcagagcttctctctctaaaacctgattctgagactatctgaaagggtgcctcacaaaggggacgaggactcctttaaatagacccaatttttactgtttctacagtatcggtaatgtttaccggaactgttacaaaactttttacaaattacattatttaaaagaaactgacaaattagttacaataattcatgattattacaactaattaatcttcgtccaatgatatgccaaaacagtcatcttcattctggtagaatggatcatcttcttggtcatcattagtctctgatgattcaatttccttcttggaaggttcttcttccacttcctgttgaagtagatggagaacttctttgagattctgagcaagactttctttagattttgagcttgctaagaatgctgccagttgcgacttctgatttagaaacaaagatgtctccggatcagcaggtttaaggaactcaggattgctctggaaccagttcttgacttgatctggagcagcctttgaagtatcgaattgtgaccaccattttacaaaggcgtgtctctgtaacggtggatattgcttgttgttttcagtttttccgtatctgtattgccatgaaaagatctatgacaaggcaaaactggaaaaatactttaaatctgccggaattcgtgattccttgctattatagagcttgttgaattgttcgaatccctattggacttcttctggaaatatttgtggaattggtccgaagtagttccaccattggaggaaccaatttggaaaattatatgcagtattatttttgaagtaaatcagccatgaatgcttgaatttactattttgatgccagaacacattggtccaggcgtcaacgtaatcccaataattataccctgcaggatcaaatggtgcagagaattttttgggttggtttaagtttgagccataatgtcgtggctgcataacct

SEQ ID NO: 13479 - DNA, 1047 bp, Glycine max
  Gm_smallRNAprecursor_6312
gaagaagggagatatgaaaaatagaacttgaaatttattgaaaccgaaagaaaagcttacaaagattttttccctaggcagagcttctctctctaaaacctgattctgagactatctgaaagggtgcctcacaaaggggacgaggactcctttaaatagacccaatttttactgtttctacagtatcggtaatgtttaccggaactgttacaaaactttttacaaattacattatttaaaagaaactgacaaattagttacaataattcatgattattacaactaattaatcttcgtccaatgatatgccaaaacagtcatcttcattctggtagaatggatcatcttcttggtcatcattagtctctgatgattcaatttccttcttggaaggttcttcttccacttcctgttgaagtagatggagaacttctttgagattctgagcaagactttctttagattttgagcttgctaagaatgctgccagttgcgacttctgatttagaaacaaagatgtctccggatcagcaggtttaaggaactcaggattgctctggaaccagttcttgacttgatctggagcagcctttgaagtatcgaattgtgaccaccattttacaaaggcgtgtctctgtaacggtggatattgcttgttgttttcagtttttccgtatctgtattgccatgaaaagatctatgacaaggcaaaactggaaaaatactttaaatctgccggaattcgtgattccttgctattatagagcttgttgaattgttcgaatccctattggacttcttctggaaatatttgtggaattggtccgaagtagttccaccattggaggaaccaatttggaaaattatatgcagtattatttttgaagtaaatcagccatgaatgcttgaatttactattttgatgccagaacacattggtccaggcgtcaacgtaatcccaataattataccctgcaggatcaaatggtgcagagaattttttgggttggtttaagtttgagccataatgtcgtggctgcataacct

SEQ ID NO: 13480 - DNA, 1120 bp, Glycine max
  Gm_smallRNAprecursor_6313
aaagaaaagcttacaaagattttttccctaggcagagcttctctctctaaaacctgattctgagactatctgaaagggtgcctcacaaaggggacgaggactcctttaaatagacccaatttttactgtttctacagtatcggtaatgtttaccggaactgttacaaaactttttacaaattacattatttaaaagaaactgacaaattagttacaataattcatgattattacaactaattaatcttcgtccaatgatatgccaaaacagtcatcttcattctggtagaatggatcatcttcttggtcatcattagtctctgatgattcaatttccttcttggaaggttcttcttccacttcctgttgaagtagatggagaacttctttgagattctgagcaagactttctttagattttgagcttgctaagaatgctgccagttgcgacttctgatttagaaacaaagatgtctccggatcagcaggtttaaggaactcaggattgctctggaaccagttcttgacttgatctggagcagcctttgaagtatcgaattgtgaccaccattttacaaaggcgtgtctctgtaacggtggatattgcttgttgttttcagtttttccgtatctgtattgccatgaaaagatctatgacaaggcaaaactggaaaaatactttaaatctgccggaattcgtgattccttgctattatagagcttgttgaattgttcgaatccctattggacttcttctggaaatatttgtggaattggtccgaagtagttccaccattggaggaaccaatttggaaaattatatgcagtattatttttgaagtaaatcagccatgaatgcttgaatttactattttgatgccagaacacattggtccaggcgtcaacgtaatcccaataattataccctgcaggatcaaatggtgcagagaattttttgggttggtttaagtttgagccataatgtcgtggctgcataaccttcaggatttggattgtggaatgggtatttaaatttggatctttggggtctttgaagtgtttaatagatactgagtttgtatctattaggatgaattcgtagaatttgcgggttttgttt

SEQ ID NO: 13481 - DNA, 1198 bp, Glycine max
  Gm_smallRNAprecursor_6314
aagaaaagcttacaaagattttttccctaggcagagcttctctctctaaaacctgattctgagactatctgaaagggtgcctcacaaaggggacgaggactcctttaaatagacccaatttttactgtttctacagtatcggtaatgtttaccggaactgttacaaaactttttacaaattacattatttaaaagaaactgacaaattagttacaataattcatgattattacaactaattaatcttcgtccaatgatatgccaaaacagtcatcttcattctggtagaatggatcatcttcttggtcatcattagtctctgatgattcaatttccttcttggaaggttcttcttccacttcctgttgaagtagatggagaacttctttgagattctgagcaagactttctttagattttgagcttgctaagaatgctgccagttgcgacttctgatttagaaacaaagatgtctccggatcagcaggtttaaggaactcaggattgctctggaaccagttcttgacttgatctggagcagcctttgaagtatcgaattgtgaccaccattttacaaaggcgtgtctctgtaacggtggatattgcttgttgttttcagtttttccgtatctgtattgccatgaaaagatctatgacaaggcaaaactggaaaaatactttaaatctgccggaattcgtgattccttgctattatagagcttgttgaattgttcgaatccctattggacttcttctggaaatatttgtggaattggtccgaagtagttccaccattggaggaaccaatttggaaaattatatgcagtattatttttgaagtaaatcagccatgaatgcttgaatttactattttgatgccagaacacattggtccaggcgtcaacgtaatcccaataattataccctgcaggatcaaatggtgcagagaattttttgggttggtttaagtttgagccataatgtcgtggctgcataaccttcaggatttggattgtggaatgggtatttaaatttggatctttggggtctttgaagtgtttaatagatactgagtttgtatctattaggatgaattcgtagaatttgcgggttttgtttgcggctattggcctataatggaatccctgggggaatactttggcggttgctttgaaaggattcttgtcccagtattctg

SEQ ID NO: 13482 - DNA, 1180 bp, Glycine max
  Gm_smallRNAprecursor_6315
cctacataatttagacaacctagaaatctttgtaactgggttttgtctaagatttggttggggaatttgctagcaaactcaattgacctttcgattggaacaattgtaccttgataaatattgtgaccaaggaatcgaattcgtgtttggaaaagattgatttttgatttggagactgccaaaccattttgtttgatgatatggatgaaagtttggagatgtttgaaatgctggtcaatgttttgggaaaagattaaaacatcatctatgtagacaatgacaaattttgaatagggattaaaaatatcattcataattttttgaaattctgaaggggcattcttcagtccgaatggcattacgttccactcatattgcccgaaaggtacagtaaacgctgttttgtacctatctgattcttggatttggatttgccaaaatccagatttcatatcagactttgaaaatatctttgcagaatttaatctgttaagcaaatctcttttgtttggaataggatatctaatccattgtaatgcttgatttagtggtttgtaatttatgactaagcggggtgttccacgctaaatctcagattgtttgttgacataaaaagccgcacaagaccatgggcttttgcttttccggattaggcctttatcaagcaaatccttgatttccttttgacagtattgaagaagttcttcattcatttggatcggtctggcttttgtgggaatttgtttttccctaaagtctttctcataggggagatcaacaatatgtttctttctgtcccaaaatgcatgtggcaaatcagaacagacagttgattcaatatgatttagtaaagattgaattttatcttttacttggggttttcctagttgtatctgaatattattaaaagatacttcttcttttaagaagttaatttgattaatcttattttctatgaaatttatatttctggaaattggtttagtagaaaaattaaatataatctttcttcctaaataatttgtggttattccttcattagatatttggatgggaaacagggctctaatgaagggcgttcctaagattacttcattcttaaggtttttttaccagaagaaagtttgtgttgatcctaagaccttggttttcaatgattgcatttgatagcttaaaatta

SEQ ID NO: 13483 - DNA, 1177 bp, Glycine max
  Gm_smallRNAprecursor_6316
actcactgttttgtttggataacagttaaaatatattggaccttgtcctaggctggtttcgactgttccaattagggagtcttcaaattgattatgcctaatgtctcttagacacattaaaactgctgcatctatgcccatatcaattaagggcttgatggctacttgtacacaaccgatgtgtagatatttatacttacggctatgttcataaattgaattttttgaaagtaaatgaaattcttcccctacatcttgtcctagaggaatattgttttctactgttttgattatgtaatcaaagttgtgtttgtcttttattgtttcaggaacgtagagttgatcctgagggatttctggaatgttccagtcatccatgttttgattgatatctttgaatcggacttcctcatcgaagagattgtgttttggggcgacctcttgggtctggttgtcttgatcatttaatagattagagtttcttgaagaagatgatgaggaggagtttgagcgaaaagagatgcgagaaaaagatcgtaagagtctagacatgattatgatattctctaatatctttgccctcatttggttccatagaaatatctccgtaagtaaatatgtcacaatttttctggatctgaattatttttaagaaaactctttttttttgtgaaaaatagtttgaacggcaatcctatagccgccactgtattatgtcttgatattttggttaaacagtacaccttagccttactgccctttatccaacacgggtcttactgctacagtaccgttcaactaaaatattagactgctgtacttccaggaagtactgttcaaacacttactgtacaaatcaaaatattaaatgtactatacaagacttttagttctagatccataaaatttgttaacatatgtccttacggacagtactcctacttccccatcaggctctgataccagagatcagcggaataagatcaaacggacatataggaagtaagaatgcagtatgataaaatcaaacgtaagaattataaacttgtaaagcatatatatatatatatatatatatatatatatatatatatatatatatatatatatatattcaacctttcaaataagatgacattcgcatacttttatttagagtaaatatttatttttattt

SEQ ID NO: 13484 - DNA, 1178 bp, Glycine max
  Gm_smallRNAprecursor_6317
actcactgttttgtttggataacagttaaaatatattggaccttgtcctaggctggtttcgactgttccaattagggagtcttcaaattgattatgcctaatgtctcttagacacattaaaactgctgcatctatgcccatatcaattaagggcttgatggctacttgtacacaaccgatgtgtagatatttatacttacggctatgttcataaattgaattttttgaaagtaaatgaaattcttcccctacatcttgtcctagaggaatattgttttctactgttttgattatgtaatcaaagttgtgtttgtcttttattgtttcaggaacgtagagttgatcctgagggatttctggaatgttccagtcatccatgttttgattgatatctttgaatcggacttcctcatcgaagagattgtgttttggggcgacctcttgggtctggttgtcttgatcatttaatagattagagtttcttgaagaagatgatgaggaggagtttgagcgaaaagagatgcgagaaaaagatcgtaagagtctagacatgattatgatattctctaatatctttgccctcatttggttccatagaaatatctccgtaagtaaatatgtcacaatttttctggatctgaattatttttaagaaaactctttttttttgtgaaaaatagtttgaacggcaatcctatagccgccactgtattatgtcttgatattttggttaaacagtacaccttagccttactgccctttatccaacacgggtcttactgctacagtaccgttcaactaaaatattagactgctgtacttccaggaagtactgttcaaacacttactgtacaaatcaaaatattaaatgtactatacaagacttttagttctagatccataaaatttgttaacatatgtccttacggacagtactcctacttccccatcaggctctgataccagagatcagcggaataagatcaaacggacatataggaagtaagaatgcagtatgataaaatcaaacgtaagaattataaacttgtaaagcatatatatatatatatatatatatatatatatatatatatatatatatatatatatatattcaacctttcaaataagatgacattcgcatacttttatttagagtaaatatttatttttatttt

SEQ ID NO: 13485 - DNA, 1169 bp, Glycine max
  Gm_smallRNAprecursor_6318
tgctagaaaattcctggaacccgagatgtactactcttcctgtgactagcaatgcataagcatttttctgcactatgtaaaaaaaactgctgcacaattttgacagcattgttctgcataaaatggcagatttcgaaatccatttttgctctaattggatcctacaagtcctaaatcatgtataaatcatatttaaaccaaaagcaaacttcaaaccaaggcaaatcaaaatataggtatccaaaacccctcaatttagtgaattttcaaggtttgaagagtgaaaatgagaattggataattttggggtaaactctcatctcaatcaagtctataacattgatttagacttgctcaaactggttttaaggtgaaaattccaccgattcaaaatttgacctctcaacacccaattcacccaagaaatggctcttttctttcacatttgtcactcatttttttcttatttgctctgcccaagcttttctacaagtcctaattgacattttaaactaggatcaactcactttagactccaatttccactaaccccaaatttggcttctctaaccctcaaaatctcacacttttctacttacaacattatcattctcacatttaaccctaagttaactctccccatcatctctaccagttttctatcaacaatttcagcatacaaatatcacaaaacatcatcataaaaccctaaaacagaatgggtagctttactcacatcaaacatgtcaagtttagcatgatttcaacaaattccttcacaaataactaccctaaggaaataacctagtagaactacccatcataactcccaaaaacccaaaacccacgaatttcatgtgagaagaaatccacctatacctaaaatttgaagccccacaatgtagaggtgtgctccaagacttcgaaaatggcttccccttgcaatttggagtagaaatgaggaggaatttagagcttaaatggaggcttcaatggtggagaagaagaaagaagaaaagcaatgtggaagggaggaaaagctttctgaaatttctgaatgaagagagagaatttggctttttaaaaaaaattattttcttttcctatttttttttctcataaagcactctccacttgtcccattttaagtggagcaataagggcccacc

SEQ ID NO: 13486 - DNA, 1119 bp, Glycine max
  Gm_smallRNAprecursor_6319
acgtttccccttatcaaagcattgtacccatttttgtttgggtaattgatcaagccattcagctgcacttggcttattcgcacgaatatccccaagatgtcgccagtgcatcttctccgtgtatgcgtaccctgtaaatatttaatcaatgtattatgttataaaatttgattgaaagaaaattataacaaataaataaaatagattctcaccagccaacataagtggtttctttaaatgtttgcagtttgagttaccacgaagaaagttttgtgcaatgtggcgcaggcaaaagaaatgggatgtgtcctggacccataagttacttgggttgttgtaggcacttataattgaggggtgtcggtctgaaataagagaaatgttaatttgcggagtaacatgtcttctcaaattctttagaaaaaacccccaagctgaagttgtctccccttctacaatggcataggcaatcgggaagatatggttagctccatcttgtgcggtagctatcaacagtgtgccagtatactttccgtaaagccatgtaccatctacttgtacaatgggtttgcaatatgcaaaaccattaatgcatggaccaaatgaccaaaagacacgtttaaacaatcttttgcccggtactatttctcccccctcatacaaggattctgtttgagcagcgaccacagtcccgggaacacaagattgcaaagctccgaaaagttttggcagtttgacatatgattcttcccagtttccatgaatcatctccaatgctttttgctttgctaaccatgtcttcttgtaggatggggtataattcatgaacgttttgatctctacaatcaatgtcttgatggagacagttgggtttgttttgacaattggttggatgatctgtgctatgacgtgtttgtcgagttggcgatgatcttgtctaagcatcggcacgagacaagtgtgatgacctctgatactcttgataatccatttgttatgcctctttgaattgcatgcgcccaagctccatgtacaaccattttcatgtaacttgcagacgaagtgtagccttctttggtcagagtaaattgttctgcaatcaaaatgatttctgatgtt

SEQ ID NO: 13487 - DNA, 1200 bp, Glycine max
  Gm_smallRNAprecursor_6320
acgtttccccttatcaaagcattgtacccatttttgtttgggtaattgatcaagccattcagctgcacttggcttattcgcacgaatatccccaagatgtcgccagtgcatcttctccgtgtatgcgtaccctgtaaatatttaatcaatgtattatgttataaaatttgattgaaagaaaattataacaaataaataaaatagattctcaccagccaacataagtggtttctttaaatgtttgcagtttgagttaccacgaagaaagttttgtgcaatgtggcgcaggcaaaagaaatgggatgtgtcctggacccataagttacttgggttgttgtaggcacttataattgaggggtgtcggtctgaaataagagaaatgttaatttgcggagtaacatgtcttctcaaattctttagaaaaaacccccaagctgaagttgtctccccttctacaatggcataggcaatcgggaagatatggttagctccatcttgtgcggtagctatcaacagtgtgccagtatactttccgtaaagccatgtaccatctacttgtacaatgggtttgcaatatgcaaaaccattaatgcatggaccaaatgaccaaaagacacgtttaaacaatcttttgcccggtactatttctcccccctcatacaaggattctgtttgagcagcgaccacagtcccgggaacacaagattgcaaagctccgaaaagttttggcagtttgacatatgattcttcccagtttccatgaatcatctccaatgctttttgctttgctaaccatgtcttcttgtaggatggggtataattcatgaacgttttgatctctacaatcaatgtcttgatggagacagttgggtttgttttgacaattggttggatgatctgtgctatgacgtgtttgtcgagttggcgatgatcttgtctaagcatcggcacgagacaagtgtgatgacctctgatactcttgataatccatttgttatgcctctttgaattgcatgcgcccaagctccatgtacaaccattttcatgtaacttgcagacgaagtgtagccttctttggtcagagtaaattgttctgcaatcaaaatgatttctgatgttgtattctttgattgctcgaatacattgtgatttgtcatcgaaggtcatgccaacctcgagtacaccgactggtggttgtac

SEQ ID NO: 13488 - DNA, 1075 bp, Glycine max
  Gm_smallRNAprecursor_6321
gtgtatgcgtaccctgtaaatatttaatcaatgtattatgttataaaatttgattgaaagaaaattataacaaataaataaaatagattctcaccagccaacataagtggtttctttaaatgtttgcagtttgagttaccacgaagaaagttttgtgcaatgtggcgcaggcaaaagaaatgggatgtgtcctggacccataagttacttgggttgttgtaggcacttataattgaggggtgtcggtctgaaataagagaaatgttaatttgcggagtaacatgtcttctcaaattctttagaaaaaacccccaagctgaagttgtctccccttctacaatggcataggcaatcgggaagatatggttagctccatcttgtgcggtagctatcaacagtgtgccagtatactttccgtaaagccatgtaccatctacttgtacaatgggtttgcaatatgcaaaaccattaatgcatggaccaaatgaccaaaagacacgtttaaacaatcttttgcccggtactatttctcccccctcatacaaggattctgtttgagcagcgaccacagtcccgggaacacaagattgcaaagctccgaaaagttttggcagtttgacatatgattcttcccagtttccatgaatcatctccaatgctttttgctttgctaaccatgtcttcttgtaggatggggtataattcatgaacgttttgatctctacaatcaatgtcttgatggagacagttgggtttgttttgacaattggttggatgatctgtgctatgacgtgtttgtcgagttggcgatgatcttgtctaagcatcggcacgagacaagtgtgatgacctctgatactcttgataatccatttgttatgcctctttgaattgcatgcgcccaagctccatgtacaaccattttcatgtaacttgcagacgaagtgtagccttctttggtcagagtaaattgttctgcaatcaaaatgatttctgatgttgtattctttgattgctcgaatacattgtgatttgtcatcgaaggtcatgccaacctcgagtacaccgactggtg

SEQ ID NO: 13489 - DNA, 1077 bp, Glycine max
  Gm_smallRNAprecursor_6322
gtgtatgcgtaccctgtaaatatttaatcaatgtattatgttataaaatttgattgaaagaaaattataacaaataaataaaatagattctcaccagccaacataagtggtttctttaaatgtttgcagtttgagttaccacgaagaaagttttgtgcaatgtggcgcaggcaaaagaaatgggatgtgtcctggacccataagttacttgggttgttgtaggcacttataattgaggggtgtcggtctgaaataagagaaatgttaatttgcggagtaacatgtcttctcaaattctttagaaaaaacccccaagctgaagttgtctccccttctacaatggcataggcaatcgggaagatatggttagctccatcttgtgcggtagctatcaacagtgtgccagtatactttccgtaaagccatgtaccatctacttgtacaatgggtttgcaatatgcaaaaccattaatgcatggaccaaatgaccaaaagacacgtttaaacaatcttttgcccggtactatttctcccccctcatacaaggattctgtttgagcagcgaccacagtcccgggaacacaagattgcaaagctccgaaaagttttggcagtttgacatatgattcttcccagtttccatgaatcatctccaatgctttttgctttgctaaccatgtcttcttgtaggatggggtataattcatgaacgttttgatctctacaatcaatgtcttgatggagacagttgggtttgttttgacaattggttggatgatctgtgctatgacgtgtttgtcgagttggcgatgatcttgtctaagcatcggcacgagacaagtgtgatgacctctgatactcttgataatccatttgttatgcctctttgaattgcatgcgcccaagctccatgtacaaccattttcatgtaacttgcagacgaagtgtagccttctttggtcagagtaaattgttctgcaatcaaaatgatttctgatgttgtattctttgattgctcgaatacattgtgatttgtcatcgaaggtcatgccaacctcgagtacaccgactggtggt

SEQ ID NO: 13490 - DNA, 1078 bp, Glycine max
  Gm_smallRNAprecursor_6323
gtgtatgcgtaccctgtaaatatttaatcaatgtattatgttataaaatttgattgaaagaaaattataacaaataaataaaatagattctcaccagccaacataagtggtttctttaaatgtttgcagtttgagttaccacgaagaaagttttgtgcaatgtggcgcaggcaaaagaaatgggatgtgtcctggacccataagttacttgggttgttgtaggcacttataattgaggggtgtcggtctgaaataagagaaatgttaatttgcggagtaacatgtcttctcaaattctttagaaaaaacccccaagctgaagttgtctccccttctacaatggcataggcaatcgggaagatatggttagctccatcttgtgcggtagctatcaacagtgtgccagtatactttccgtaaagccatgtaccatctacttgtacaatgggtttgcaatatgcaaaaccattaatgcatggaccaaatgaccaaaagacacgtttaaacaatcttttgcccggtactatttctcccccctcatacaaggattctgtttgagcagcgaccacagtcccgggaacacaagattgcaaagctccgaaaagttttggcagtttgacatatgattcttcccagtttccatgaatcatctccaatgctttttgctttgctaaccatgtcttcttgtaggatggggtataattcatgaacgttttgatctctacaatcaatgtcttgatggagacagttgggtttgttttgacaattggttggatgatctgtgctatgacgtgtttgtcgagttggcgatgatcttgtctaagcatcggcacgagacaagtgtgatgacctctgatactcttgataatccatttgttatgcctctttgaattgcatgcgcccaagctccatgtacaaccattttcatgtaacttgcagacgaagtgtagccttctttggtcagagtaaattgttctgcaatcaaaatgatttctgatgttgtattctttgattgctcgaatacattgtgatttgtcatcgaaggtcatgccaacctcgagtacaccgactggtggtt

SEQ ID NO: 13491 - DNA, 1063 bp, Glycine max
  Gm_smallRNAprecursor_6324
cgtaccctgtaaatatttaatcaatgtattatgttataaaatttgattgaaagaaaattataacaaataaataaaatagattctcaccagccaacataagtggtttctttaaatgtttgcagtttgagttaccacgaagaaagttttgtgcaatgtggcgcaggcaaaagaaatgggatgtgtcctggacccataagttacttgggttgttgtaggcacttataattgaggggtgtcggtctgaaataagagaaatgttaatttgcggagtaacatgtcttctcaaattctttagaaaaaacccccaagctgaagttgtctccccttctacaatggcataggcaatcgggaagatatggttagctccatcttgtgcggtagctatcaacagtgtgccagtatactttccgtaaagccatgtaccatctacttgtacaatgggtttgcaatatgcaaaaccattaatgcatggaccaaatgaccaaaagacacgtttaaacaatcttttgcccggtactatttctcccccctcatacaaggattctgtttgagcagcgaccacagtcccgggaacacaagattgcaaagctccgaaaagttttggcagtttgacatatgattcttcccagtttccatgaatcatctccaatgctttttgctttgctaaccatgtcttcttgtaggatggggtataattcatgaacgttttgatctctacaatcaatgtcttgatggagacagttgggtttgttttgacaattggttggatgatctgtgctatgacgtgtttgtcgagttggcgatgatcttgtctaagcatcggcacgagacaagtgtgatgacctctgatactcttgataatccatttgttatgcctctttgaattgcatgcgcccaagctccatgtacaaccattttcatgtaacttgcagacgaagtgtagccttctttggtcagagtaaattgttctgcaatcaaaatgatttctgatgttgtattctttgattgctcgaatacattgtgatttgtcatcgaaggtcatgccaacctcgagtacaccgac

SEQ ID NO: 13492 - DNA, 1065 bp, Glycine max
  Gm_smallRNAprecursor_6325
cgtaccctgtaaatatttaatcaatgtattatgttataaaatttgattgaaagaaaattataacaaataaataaaatagattctcaccagccaacataagtggtttctttaaatgtttgcagtttgagttaccacgaagaaagttttgtgcaatgtggcgcaggcaaaagaaatgggatgtgtcctggacccataagttacttgggttgttgtaggcacttataattgaggggtgtcggtctgaaataagagaaatgttaatttgcggagtaacatgtcttctcaaattctttagaaaaaacccccaagctgaagttgtctccccttctacaatggcataggcaatcgggaagatatggttagctccatcttgtgcggtagctatcaacagtgtgccagtatactttccgtaaagccatgtaccatctacttgtacaatgggtttgcaatatgcaaaaccattaatgcatggaccaaatgaccaaaagacacgtttaaacaatcttttgcccggtactatttctcccccctcatacaaggattctgtttgagcagcgaccacagtcccgggaacacaagattgcaaagctccgaaaagttttggcagtttgacatatgattcttcccagtttccatgaatcatctccaatgctttttgctttgctaaccatgtcttcttgtaggatggggtataattcatgaacgttttgatctctacaatcaatgtcttgatggagacagttgggtttgttttgacaattggttggatgatctgtgctatgacgtgtttgtcgagttggcgatgatcttgtctaagcatcggcacgagacaagtgtgatgacctctgatactcttgataatccatttgttatgcctctttgaattgcatgcgcccaagctccatgtacaaccattttcatgtaacttgcagacgaagtgtagccttctttggtcagagtaaattgttctgcaatcaaaatgatttctgatgttgtattctttgattgctcgaatacattgtgatttgtcatcgaaggtcatgccaacctcgagtacaccgactg

SEQ ID NO: 13493 - DNA, 1215 bp, Glycine max
  Gm_smallRNAprecursor_6326
attataaaatatgaggataaaattaagatgcaattcctttgatgtttttacttttattctttaattacaattagactttccctttagtaacttatgttgagttttagtgtaaatcctaatgtaaatgatcaaaatcagactttattgtgattaaagactacacaaaaatgtacttagaacattacatccaaattttgtccaaaatatgatagttgtgataaactagaaatggaaaacgtaataacaaaaattacatgttcacttatcaatcttggggtagctctcttgctagtctcctgcatggctccagccaataaaatttcatccaatataaaatatgcctgccaaaatcaagctcgattttaaccacagattaagataaacactgaatagtaaatagtagttttcttttcatccattaaatcattagcattcttatatatgactttcaaatttatatttattaaattttatagtgcagtaaaggcatccgaaaggtccccttaaaaaccggttcataagggggtgacctacccagctatataagcacttatcaagtttgttaaacatccgatgtgggactattctcaacacgccccctcgagccagggctcgtcaccacaaagcgagggctggcggcacccaccgggcagaatatggctctgatatcatattaaattttatagtgcagcaaagacatctgaaaggtccccttaaaaaccggttcataagggggtggcctacccagttatataagcacttatcaagtttgttaaacatccgatgtgggactattctcaacaatattaaaaataagaaaatatgattgatcacaaagaagactacaaccaacttgcaaggatcctagtcttatttaccgtataaactatataatgtagcatgatattagattatctgatttttttgagggggtatccaatattgttgaattgtgtgcactattagaaagaatacagtttgagataaaatgaattaccttatgaaaattaaagattaaatccagctcacaaacctggcaagataagtaagagaaacatattcaggttctgaagtatgtgtgcaaattattaataactttagaattcaacaatttacgatactaatactgccaaaataatgatccaatgtctcaacatagtgatgaataatggccaaggtctccaattcattgtcttcgtgataattgcaaataca

SEQ ID NO: 13494 - DNA, 1207 bp, Glycine max
  Gm_smallRNAprecursor_6327
taaaatatgaggataaaattaagatgcaattcctttgatgtttttacttttattctttaattacaattagactttccctttagtaacttatgttgagttttagtgtaaatcctaatgtaaatgatcaaaatcagactttattgtgattaaagactacacaaaaatgtacttagaacattacatccaaattttgtccaaaatatgatagttgtgataaactagaaatggaaaacgtaataacaaaaattacatgttcacttatcaatcttggggtagctctcttgctagtctcctgcatggctccagccaataaaatttcatccaatataaaatatgcctgccaaaatcaagctcgattttaaccacagattaagataaacactgaatagtaaatagtagttttcttttcatccattaaatcattagcattcttatatatgactttcaaatttatatttattaaattttatagtgcagtaaaggcatccgaaaggtccccttaaaaaccggttcataagggggtgacctacccagctatataagcacttatcaagtttgttaaacatccgatgtgggactattctcaacacgccccctcgagccagggctcgtcaccacaaagcgagggctggcggcacccaccgggcagaatatggctctgatatcatattaaattttatagtgcagcaaagacatctgaaaggtccccttaaaaaccggttcataagggggtggcctacccagttatataagcacttatcaagtttgttaaacatccgatgtgggactattctcaacaatattaaaaataagaaaatatgattgatcacaaagaagactacaaccaacttgcaaggatcctagtcttatttaccgtataaactatataatgtagcatgatattagattatctgatttttttgagggggtatccaatattgttgaattgtgtgcactattagaaagaatacagtttgagataaaatgaattaccttatgaaaattaaagattaaatccagctcacaaacctggcaagataagtaagagaaacatattcaggttctgaagtatgtgtgcaaattattaataactttagaattcaacaatttacgatactaatactgccaaaataatgatccaatgtctcaacatagtgatgaataatggccaaggtctccaattcattgtcttcgtgataattgcaaa

SEQ ID NO: 13495 - DNA, 1040 bp, Glycine max
  Gm_smallRNAprecursor_6328
agttgagaatgttggaatcaacaaagtgctcattgatggaggagcggctgtcaacttaatgcctcgatctatgctctacaagatcgggaaacatgacactgatctatctgcccacaacattgtgctttcgaattatgagggtaaaactggctattctttgggagccattcaagtagatgttgctgtaggcagtatagttcgaccaactcttttcctggtgatacagtctaaggctaattttaacttgctattaggaagggagtggattcatggagttggggctgtgccatctacccttcaccagaagctcattatctggagggaggatgggattgtggaaaatatagaggcggatcaaagcttctataagtcagaggtcgataatgttactgcacaaacctttgataaaaagttggctaacatagcaccttgtggtgacaaagaggctgttgtcgaatcgagtgacaatgttgtccactctgtcaaactccatcctacttatgggtttatatgggagagggaggaaattgatgctgttccctctgaagatggagtcattccgccaactgggtggaatacatatgaagattaatatgactgaggccactgcatgggccagaattacggcttatatggccgaaaatagactaaatacggcctttgaggctgaatctcaacaaaatatggcagttgaagccaagatcgaagatcatgaaaacaaagaaacaaaggatcgaagactggattgtatttatgatgatgagccgctgggttttgagaaaaatcccataagtgaggtgccaaagatgcaggctcaagatcctttggaagaagtcgatattggagatggctcgattaataggccaacttatatcagtgccaatatcacctcaagtttaaaagaaaagctggtgcctcttcttagagagtttaaagactgttttgcttgggattaccacgaaatgcctgggttaagcagagaaatggtcgaaatgaagttacctattaaggagggaaaaagaccagtaaaacaactacca

SEQ ID NO: 13496 - DNA, 1157 bp, Glycine max
  Gm_smallRNAprecursor_6329
aagaccagtaaaacaactaccaagaagattcgcaccagaaatcatgtccaagattaaggaagagatcgaaaggctgctgaggtgtaaattcatcagggctgccaggtatgtcgaatggttagcaaatatagtccctgtcattaaaaagaatggaactcttagagtatgcatagattttagggatttaaataatgctacacctaaagatgaatatgctatgccagtagcggaaatgttggtagattcggcagctggtttcgaatttttaagcatgttagatggttattctggttataaccaaatatttattgctgaaaatgatgtgtcgaaaacagcatttcgatgccctggtgctttaggcacttatgaatgggtggttatgccctttgggttgaaaaatgctggggccacttatcaaagggccatgaattccatgtttcatgattttattgacacatttatgcaaatttatattgatgatataatcatcaaatcctcctcagaagatagccatttggattatcttaggcaatctttcgaacgaatgaggaaacatggattaaaaatgaatccattaaagtgtgctttttgtgtgcgtgcaggagatttccttggttttgtggtgcataaaaaaggcattgagataaatcaaaataagacaaaggctattcttgagacgaagcctccgtcgaccaaaaaacaacttcagtctttgctaggaaaaatcaacttcttgaggcgattcatttcgaatctaagtggcaaagctcagattttttcgccattacttcgactcaagaaagatgaaccattcaaatggaatgaagagcatcaaaaggctttcgatgaaattaaagaatatctgatcaagcctcctgtgttaatgcctcctagtcgaaacaagtctatgaaattgtatattgctgcgtctgacaagaccattggtagcatgttggctcaggaagatgatgatggcatagaacatgcaatttattatcttagtcgtgtactaaatgatgcagaaactagatatactgccatagaaaaactttgtctttgtctgtatttctcttgtgcaaaacttaagcaatatataaagcctgttgatgtttatgtgtattctcattatgatattattaagcacatgttgtcaaaac

SEQ ID NO: 13497 - DNA, 1175 bp, Glycine max
  Gm_smallRNAprecursor_6330
aagagatcgaaaggctgctgaggtgtaaattcatcagggctgccaggtatgtcgaatggttagcaaatatagtccctgtcattaaaaagaatggaactcttagagtatgcatagattttagggatttaaataatgctacacctaaagatgaatatgctatgccagtagcggaaatgttggtagattcggcagctggtttcgaatttttaagcatgttagatggttattctggttataaccaaatatttattgctgaaaatgatgtgtcgaaaacagcatttcgatgccctggtgctttaggcacttatgaatgggtggttatgccctttgggttgaaaaatgctggggccacttatcaaagggccatgaattccatgtttcatgattttattgacacatttatgcaaatttatattgatgatataatcatcaaatcctcctcagaagatagccatttggattatcttaggcaatctttcgaacgaatgaggaaacatggattaaaaatgaatccattaaagtgtgctttttgtgtgcgtgcaggagatttccttggttttgtggtgcataaaaaaggcattgagataaatcaaaataagacaaaggctattcttgagacgaagcctccgtcgaccaaaaaacaacttcagtctttgctaggaaaaatcaacttcttgaggcgattcatttcgaatctaagtggcaaagctcagattttttcgccattacttcgactcaagaaagatgaaccattcaaatggaatgaagagcatcaaaaggctttcgatgaaattaaagaatatctgatcaagcctcctgtgttaatgcctcctagtcgaaacaagtctatgaaattgtatattgctgcgtctgacaagaccattggtagcatgttggctcaggaagatgatgatggcatagaacatgcaatttattatcttagtcgtgtactaaatgatgcagaaactagatatactgccatagaaaaactttgtctttgtctgtatttctcttgtgcaaaacttaagcaatatataaagcctgttgatgtttatgtgtattctcattatgatattattaagcacatgttgtcaaaaccgattttacacagtagaattggaaaatgggctttagcattaacagaatattctttaacgtacaagcctttgaaatct

SEQ ID NO: 13498 - DNA, 1110 bp, Glycine max
  Gm_smallRNAprecursor_6331
tattgtagatcattcattgatcgagatgccgcaagattatgtcgatacagagccttggattttgtatttcgatggatcgaaacacaaacatggaactggaattggagttttaataatatcccccaataaagttccaactaagttcaaatataaaatcaaagggctttgttctaataatgaggctgagtatgaagctctaattacaggccttgaaattttaattagcctgggggcaagaaatgttaatataagaggtgattcagaattagtgttgaggcaattaacacaagaatacaaatgtgttaatgaacacttagcaaaatattttgttatagcaagttctcttctgaatcatttcgattatatcaacattgagcatgtacctcgacaagaaaaccgagaagcaaatgatttagcccaaatagcttcagggtacaaaatgtcgaaggaaaagttaactcagttgatcgaaataaaagataaactggtgttaccagagccattaagcactaaattgccaatgccaaaacttgtgggggcaagtacaccacaaaataatggagatgaaagcatggatgatctccagggaaaaattcaaattttggccattgacaatatgttagataatgattggagaaagtccattattgaatatttggaaaatccaataggcaatgtgactcgaaagatcaaatatagggctttaaattacgtgattatgggaaatgatttgtttaaaaagactgcagaaggagtattgttaaaatgtttaagtgaatcagaagcatacttggcagtttcccatgttcacagtggggcttgtggatcacatcaagcaggccataaaatgaaatggcttttatttcgacaaggtttgtattggccttcgatgttaaaagactgcatagaattgctaaagctgtcaggaatgcccaaaagcatccagggatacagcatgtacctgctagtgaattacactccataatcaaaccttggcctttcaaaggatgggctttggatttaattggtgaaatcaagcctgcttcttctaagaaccagcgttatattatagttggtatcgattactttacaaaatggatcgaagcagtc

SEQ ID NO: 13499 - DNA, 1082 bp, Glycine max
  Gm_smallRNAprecursor_6332
cattgatcgagatgccgcaagattatgtcgatacagagccttggattttgtatttcgatggatcgaaacacaaacatggaactggaattggagttttaataatatcccccaataaagttccaactaagttcaaatataaaatcaaagggctttgttctaataatgaggctgagtatgaagctctaattacaggccttgaaattttaattagcctgggggcaagaaatgttaatataagaggtgattcagaattagtgttgaggcaattaacacaagaatacaaatgtgttaatgaacacttagcaaaatattttgttatagcaagttctcttctgaatcatttcgattatatcaacattgagcatgtacctcgacaagaaaaccgagaagcaaatgatttagcccaaatagcttcagggtacaaaatgtcgaaggaaaagttaactcagttgatcgaaataaaagataaactggtgttaccagagccattaagcactaaattgccaatgccaaaacttgtgggggcaagtacaccacaaaataatggagatgaaagcatggatgatctccagggaaaaattcaaattttggccattgacaatatgttagataatgattggagaaagtccattattgaatatttggaaaatccaataggcaatgtgactcgaaagatcaaatatagggctttaaattacgtgattatgggaaatgatttgtttaaaaagactgcagaaggagtattgttaaaatgtttaagtgaatcagaagcatacttggcagtttcccatgttcacagtggggcttgtggatcacatcaagcaggccataaaatgaaatggcttttatttcgacaaggtttgtattggccttcgatgttaaaagactgcatagaattgctaaagctgtcaggaatgcccaaaagcatccagggatacagcatgtacctgctagtgaattacactccataatcaaaccttggcctttcaaaggatgggctttggatttaattggtgaaatcaagcctgcttcttctaagaaccagcgttatattatagttggtatcgattactttacaaaat

SEQ ID NO: 13500 - DNA, 1054 bp, Glycine max
  Gm_smallRNAprecursor_6333
taatttattgtttgtcaggcggaatttgaaatccctgaagcttctgacagtaggacaaagaagaaaattctttagactgtcggcgagcgctggaggcagtttaaatctggcttgactaggaaatgagcacttgcagccaacaaggacggtgtggatgacattgtctgtgaaaaatacggcattagcaaggagaaatgggcccagttttgtcagacccgcagagacacctcgtgggaggtatgtactttgtcattttagttgttttccacaaaaaaatcacttcttataattcattgtagtaaccattttcattaatgttcaacttttgcaggatgtgcggaaaaaggcacaggccatccagaaacaaaacattgccccccacgtgttgtctcgtgggggttatgaatatttagaacaaaagctcatggctgagaagacaaagaaaagactggaagaagtttcccagtccggaagcactgagggcgtcattgaccctccatctcccatcagacgccacgtgaagtggaaggtgactcgcacgaagaaaactgggcagatgacgtctgaggcagcaaaggaaatagctaagaagattgtaagtcatttttaattaatatttgtaattatctttgtgtattctgtgaattccttggaaaatatgtgttctgtacaggattctttggacgagcaggcgtcacagggatcgttcatcccccatggacgccaggatgtcctgactgctgccgttgggcaaccagagcaccctggccgtgttcatgctgctggagctggtatcaccataaagcaatactttggatcggctccacgaacgtctcgcagttcttccttcatggctcctgaagacctacaatagctgacccaacaaatcagggaccaactggaggagtcaatcacagaaaaagtgactcgacagctgatggcatccttcagccagatgcagtccaagtttcagtctcagatgcaattacaggaacttgcaccgcctccggagccagaggttggtccctcaggtgctcgtgtcagcacaaaggag

SEQ ID NO: 13501 - DNA, 1036 bp, Glycine max
  Gm_smallRNAprecursor_6334
agaccacaagaagatgaaattagaggtagtgtggttaaattaagttggctggctcaccattttgcacaaataaataacgacgacgacgaagaacaagtacgaaagtttgcccgtgcatggatactgagattcattggaggtgtcttgttcgttgacaaaagcagtaacaaagttttgctaaggtaccttcaatttttacgtgactttgaagaatgtggcagatatgcatggggagccgccgtacttggttttctatagagagagatgtgcaatgccaccgattataaaactaaatcaatcggaggtatgtgcatcttactacaaatgttggcatgggaacgatgtccaaccttggctccaaagaggactccttcccaagtagaaaatacaccactggggcacaggtttgtcatttttaacaacgtctttcatttcaatagaataaatggttttagcatatattaaattttaatctttgtaggtggctgcgatgttgaaaccaacatatcggcaatgatgatgtgagagtttttcgtcgcaagttggatattatgaaacgtcatgaggtaagaacatgctattgtatttgtaaaataaaaaattatatgtgttattttactaaaatgttcacaactatgttgttatatgtagtttgtgtgggagccgtacccatcaaccgttatatcactgttgccacccgtttgtttagtcggaagtctcgcctggtacgcggtggtgccactaatttgtttccaagttattgagtggcaccaaccggacaaagtattgagacaatttgggatgcagcaaccaattccagagtctccttcacaacccttaaacattcatggcataacattaaaagggaaacatgacgaaaattgggggcaattgttcatcccaatgattcatcagtggaataatcgccatgcatttagggtcgacgcttatccccgacaagaaggcctattgagctttaactcggactacatggtctggtataggcgaaagacaaagatgtttgttgacccacaaa

SEQ ID NO: 13502 - DNA, 1150 bp, Glycine max
  Gm_smallRNAprecursor_6335
aaccttgcctcaaaacaaatttttgcaagatggcaagcaattttaagcgcctttgattttaacatagaatatatcaagggctcttcaaactctctacctgactacctcactcgtgaatttttacagaaaattcccgatgcctcctaaggtgtctagctcctccagcaaaggaggaagatccagtactaaaggaaaagatgttctattggctctaccagagccaataaccaagaaggcaactgcatcatcttctgggtcacctacccagactgggtcatcaacccagaaaggaaagcttgaagggtcattgacctagataactaccattaaacctgagtcatcaactcaggaatctccaaaaccaacaacaacaaaacagaccgtggctgactatgcctggtcaatacaaactctcctggccttagaagacataggcctcaccagagtaccaaaattggccaaaaagacctgggcagaaatggcctcagaatcagacgatgattctgaaacagatctgcaaaaacaaatccaaaaggccaaacagaccaaaactgtctgtaaccaaaaaccaagccaaccgttgactcaacaagaatcaacaccacaacccagcaacaactatatttcaaaaaacaaattcttcaatgttttacaaatggaaccagaatactgggacaagaatccttttaaggcaaccgccaaagtatttcccccgggatttcattataggccaacagccacaaacaaaaccagaaaattctatgaattcattctaatagatacaaactccgtatctattaaacatttcaaggaccccaaagatccaaacctaaacacccactccacaatccagatcttaaaggtgatacagccacgacattatggctcaaacttaaaccaacccaaaatttttttgcaccttttgaccctacaggatataattattgggattacattgacgcctggaccaatgtgttctggcatcaaaatagtaaattcaagcattcatggctaatttacttccaaaataacactgtgtataattttccaaattggttcctccaatggtggaactacttcagacaaattccacagatatttccagaagaagtccaacagggattccaacaattcagcaagctcttcaata

SEQ ID NO: 13503 - DNA, 1148 bp, Glycine max
  Gm_smallRNAprecursor_6336
accttgcctcaaaacaaatttttgcaagatggcaagcaattttaagcgcctttgattttaacatagaatatatcaagggctcttcaaactctctacctgactacctcactcgtgaatttttacagaaaattcccgatgcctcctaaggtgtctagctcctccagcaaaggaggaagatccagtactaaaggaaaagatgttctattggctctaccagagccaataaccaagaaggcaactgcatcatcttctgggtcacctacccagactgggtcatcaacccagaaaggaaagcttgaagggtcattgacctagataactaccattaaacctgagtcatcaactcaggaatctccaaaaccaacaacaacaaaacagaccgtggctgactatgcctggtcaatacaaactctcctggccttagaagacataggcctcaccagagtaccaaaattggccaaaaagacctgggcagaaatggcctcagaatcagacgatgattctgaaacagatctgcaaaaacaaatccaaaaggccaaacagaccaaaactgtctgtaaccaaaaaccaagccaaccgttgactcaacaagaatcaacaccacaacccagcaacaactatatttcaaaaaacaaattcttcaatgttttacaaatggaaccagaatactgggacaagaatccttttaaggcaaccgccaaagtatttcccccgggatttcattataggccaacagccacaaacaaaaccagaaaattctatgaattcattctaatagatacaaactccgtatctattaaacatttcaaggaccccaaagatccaaacctaaacacccactccacaatccagatcttaaaggtgatacagccacgacattatggctcaaacttaaaccaacccaaaatttttttgcaccttttgaccctacaggatataattattgggattacattgacgcctggaccaatgtgttctggcatcaaaatagtaaattcaagcattcatggctaatttacttccaaaataacactgtgtataattttccaaattggttcctccaatggtggaactacttcagacaaattccacagatatttccagaagaagtccaacagggattccaacaattcagcaagctcttcaat

SEQ ID NO: 13504 - DNA, 1149 bp, Glycine max
  Gm_smallRNAprecursor_6337
accttgcctcaaaacaaatttttgcaagatggcaagcaattttaagcgcctttgattttaacatagaatatatcaagggctcttcaaactctctacctgactacctcactcgtgaatttttacagaaaattcccgatgcctcctaaggtgtctagctcctccagcaaaggaggaagatccagtactaaaggaaaagatgttctattggctctaccagagccaataaccaagaaggcaactgcatcatcttctgggtcacctacccagactgggtcatcaacccagaaaggaaagcttgaagggtcattgacctagataactaccattaaacctgagtcatcaactcaggaatctccaaaaccaacaacaacaaaacagaccgtggctgactatgcctggtcaatacaaactctcctggccttagaagacataggcctcaccagagtaccaaaattggccaaaaagacctgggcagaaatggcctcagaatcagacgatgattctgaaacagatctgcaaaaacaaatccaaaaggccaaacagaccaaaactgtctgtaaccaaaaaccaagccaaccgttgactcaacaagaatcaacaccacaacccagcaacaactatatttcaaaaaacaaattcttcaatgttttacaaatggaaccagaatactgggacaagaatccttttaaggcaaccgccaaagtatttcccccgggatttcattataggccaacagccacaaacaaaaccagaaaattctatgaattcattctaatagatacaaactccgtatctattaaacatttcaaggaccccaaagatccaaacctaaacacccactccacaatccagatcttaaaggtgatacagccacgacattatggctcaaacttaaaccaacccaaaatttttttgcaccttttgaccctacaggatataattattgggattacattgacgcctggaccaatgtgttctggcatcaaaatagtaaattcaagcattcatggctaatttacttccaaaataacactgtgtataattttccaaattggttcctccaatggtggaactacttcagacaaattccacagatatttccagaagaagtccaacagggattccaacaattcagcaagctcttcaata

SEQ ID NO: 13505 - DNA, 1168 bp, Glycine max
  Gm_smallRNAprecursor_6338
gacaaattccacagatatttccagaagaagtccaacagggattccaacaattcagcaagctcttcaatagcaaggaatcaagaattccggcagatttaaaatacttttccagttttccttgtcatggattttttcatggcaatacagatatggaaaacctgaaaatagcaagtagtatccaccattgcagagacacgcctttgtaaagtggtggtcacaattcgatacctcaaaggctgctccagaacaagtcaagaactggtttcagagcaaccctgagtttctcagacctgctgatccagagacatctttgtttctgaatcagaagtctcaacttgcagcattcttggcaagctcaaaatctaaagaaagtcttgctcagaatcttaaggaagttctccaactacttcaacaggaagaagaagaagaaccccccaagaaggaagccgaatcatccgaaaataatgatgaccaagaagattacccattctaccagaatgaggatgactgttttggtatatcgttagatgatgattagttagttgtagtaatcacgaattattgtaactaattactcggtacccgataataatgtaatttgtaaagagtttttgtaacagttccggtaaacattaccgacactgtagaaacagtaaaattttgggtctatttaaaggagtcctcgttccctttgtgaggcaccctttcagatagtctcaaaaccaggttttagagagagaagctctgcctagggaaaaactctttgtaagcttttctttcgatttaaataaattcaaagttatatttttcacatctcccttctcccttcaccgatcctgtgcggctctgccgccgcttcggtttctttgttttcgaaaacctggggtttgtaagccggagtccagtgtgccctggtatatatgtgtgtgtgtgtgcgcgcgcgctaaatcaaggcttttagttgctttatccttgggtcaatcctaaacctaagcttgaatcactttgaaactagacaccaagcaactaccatcaaaaccgccaacaaccatgtcaccacaatcaacaactaattgctcaattttcatcatcaatgggagaacacaagcctcaccatgatttacgataatcaccaagttcaaccctggccaaaaataatgcaccttgt

SEQ ID NO: 13506 - DNA, 1057 bp, Glycine max
  Gm_smallRNAprecursor_6339
gatatcctggaaattttgagaattcaaatgacctatgtgatctcaaaacaaatcacttggggaaaatttgagaattcaaatgacctatgtgatatcctgaaaatttctacctggaattttgtaagcgatatatttaaaataattatatatataagtattattcagtatatatatataccagagatcagcgggaaggatacaaacggacagataggaagtaagagtaatgctatatgacaaatgcagaaattaaaaacctgtaaaacagttatcaagggcacaccggaatccggcttacaaacccaggtttttgaaaacaaagaaaccgaagtggcggcagagccacacaggatcggtgaagggagaagggagatgtgaaaaatagaactttgaatttattgaaatcgaaagaaaagcttacaaagaggttttccctaggcagagcttctctctctaaaacctggttttgagactatctgaaagggtgcctcacaaagggaacgaggactcctttaaatagacccaatgttttactgtttcaacagtatcgataatgtttaccggaactgttacaaaaactttttcaaattacattattatcgggaaccgaataattagttagactaattcatgattactacaactaactaatcatcatctaacgatataccaaaacagtcatcctcattctggtagaatgggtcatcttcttggtcatcattattctcggatgattcggcttccttcttggggggttcttcttcttcttcctgttgaagtagctggagaacttccttaagattctgagcaagactctctttagattttgagcttgctaagaatgctgcaagttgagacttttaatttagaaacaatgatgtctctggatcagcaggcttgagaaactcagggttgctctgaaaccagttcttgacttgttctggagcagcctttgaggtatcaaattgtgaccaccactttacaaaggcatgtctctgcaatggtggatattgtttgctgttttcggtttttccatatctgtattgccatgaaaaaa

SEQ ID NO: 13507 - DNA, 1158 bp, Glycine max
  Gm_smallRNAprecursor_6340
atcaagggcacaccggaatccggcttacaaacccaggtttttgaaaacaaagaaaccgaagtggcggcagagccacacaggatcggtgaagggagaagggagatgtgaaaaatagaactttgaatttattgaaatcgaaagaaaagcttacaaagaggttttccctaggcagagcttctctctctaaaacctggttttgagactatctgaaagggtgcctcacaaagggaacgaggactcctttaaatagacccaatgttttactgtttcaacagtatcgataatgtttaccggaactgttacaaaaactttttcaaattacattattatcgggaaccgaataattagttagactaattcatgattactacaactaactaatcatcatctaacgatataccaaaacagtcatcctcattctggtagaatgggtcatcttcttggtcatcattattctcggatgattcggcttccttcttggggggttcttcttcttcttcctgttgaagtagctggagaacttccttaagattctgagcaagactctctttagattttgagcttgctaagaatgctgcaagttgagacttttaatttagaaacaatgatgtctctggatcagcaggcttgagaaactcagggttgctctgaaaccagttcttgacttgttctggagcagcctttgaggtatcaaattgtgaccaccactttacaaaggcatgtctctgcaatggtggatattgtttgctgttttcggtttttccatatctgtattgccatgaaaaaatccatgacaaggaaaaactggaaaagtactttaaatctgccggaattcttgattccttgctattgaagagcttggtgaattgttggaatccctgttggacttcttctggaaatatctgtggaattggtccgaagtagttccaccattggaggaaccaatttggaaaattatacacagtgttattcttgaagtaaattagccatgaatgcttaattttactattttgatgccataacacattggtccaggcgtcaatgtagtcccaataattatatcctgcaggatcaaaaggtgcaaaaatttttttgggttggtttaagtttgagccataatgtcgtggctgcataacctttaggatttggattgtggaa

SEQ ID NO: 13508 - DNA, 1110 bp, Glycine max
  Gm_smallRNAprecursor_6341
tactgtttcaacagtatcgataatgtttaccggaactgttacaaaaactttttcaaattacattattatcgggaaccgaataattagttagactaattcatgattactacaactaactaatcatcatctaacgatataccaaaacagtcatcctcattctggtagaatgggtcatcttcttggtcatcattattctcggatgattcggcttccttcttggggggttcttcttcttcttcctgttgaagtagctggagaacttccttaagattctgagcaagactctctttagattttgagcttgctaagaatgctgcaagttgagacttttaatttagaaacaatgatgtctctggatcagcaggcttgagaaactcagggttgctctgaaaccagttcttgacttgttctggagcagcctttgaggtatcaaattgtgaccaccactttacaaaggcatgtctctgcaatggtggatattgtttgctgttttcggtttttccatatctgtattgccatgaaaaaatccatgacaaggaaaaactggaaaagtactttaaatctgccggaattcttgattccttgctattgaagagcttggtgaattgttggaatccctgttggacttcttctggaaatatctgtggaattggtccgaagtagttccaccattggaggaaccaatttggaaaattatacacagtgttattcttgaagtaaattagccatgaatgcttaattttactattttgatgccataacacattggtccaggcgtcaatgtagtcccaataattatatcctgcaggatcaaaaggtgcaaaaatttttttgggttggtttaagtttgagccataatgtcgtggctgcataacctttaggatttggattgtggaatgggtatttagatttggatctttggggtctttgaagtgtttaatagatactgagtttgtatctattaggatgaattcgtagaattttctggttttatttatggccgttgacctataatggaatcttggagggaatactttggcggttgccttgaaaggattcttgtcccagtattctggttccatttgtaaaacattgaagaatttttttttt

SEQ ID NO: 13509 - DNA, 1070 bp, Glycine max
  Gm_smallRNAprecursor_6342
caactaactaatcatcatctaacgatataccaaaacagtcatcctcattctggtagaatgggtcatcttcttggtcatcattattctcggatgattcggcttccttcttggggggttcttcttcttcttcctgttgaagtagctggagaacttccttaagattctgagcaagactctctttagattttgagcttgctaagaatgctgcaagttgagacttttaatttagaaacaatgatgtctctggatcagcaggcttgagaaactcagggttgctctgaaaccagttcttgacttgttctggagcagcctttgaggtatcaaattgtgaccaccactttacaaaggcatgtctctgcaatggtggatattgtttgctgttttcggtttttccatatctgtattgccatgaaaaaatccatgacaaggaaaaactggaaaagtactttaaatctgccggaattcttgattccttgctattgaagagcttggtgaattgttggaatccctgttggacttcttctggaaatatctgtggaattggtccgaagtagttccaccattggaggaaccaatttggaaaattatacacagtgttattcttgaagtaaattagccatgaatgcttaattttactattttgatgccataacacattggtccaggcgtcaatgtagtcccaataattatatcctgcaggatcaaaaggtgcaaaaatttttttgggttggtttaagtttgagccataatgtcgtggctgcataacctttaggatttggattgtggaatgggtatttagatttggatctttggggtctttgaagtgtttaatagatactgagtttgtatctattaggatgaattcgtagaattttctggttttatttatggccgttgacctataatggaatcttggagggaatactttggcggttgccttgaaaggattcttgtcccagtattctggttccatttgtaaaacattgaagaatttttttttttgaaatatagctattgctgggttgtggtgttgattattgttgagccaacgattggcttggtttttggtt

SEQ ID NO: 13510 - DNA, 1110 bp, Glycine max
  Gm_smallRNAprecursor_6343
ccggaattcttgattccttgctattgaagagcttggtgaattgttggaatccctgttggacttcttctggaaatatctgtggaattggtccgaagtagttccaccattggaggaaccaatttggaaaattatacacagtgttattcttgaagtaaattagccatgaatgcttaattttactattttgatgccataacacattggtccaggcgtcaatgtagtcccaataattatatcctgcaggatcaaaaggtgcaaaaatttttttgggttggtttaagtttgagccataatgtcgtggctgcataacctttaggatttggattgtggaatgggtatttagatttggatctttggggtctttgaagtgtttaatagatactgagtttgtatctattaggatgaattcgtagaattttctggttttatttatggccgttgacctataatggaatcttggagggaatactttggcggttgccttgaaaggattcttgtcccagtattctggttccatttgtaaaacattgaagaatttttttttttgaaatatagctattgctgggttgtggtgttgattattgttgagccaacgattggcttggtttttggttacagacagttttggtctgtttggccttttggatttgtttttgtaggtctatttcagaatcatcgtctgattctgaggccatttctgcccaggtctttttggccaattttggtactctggtgaggcctatgtcttctaaggccaggagagtttgtattgaccaggcatagtcagccacaatctgttttgttgttgttggttttggggattcctgagttgatgactcaggttttatctgggtcaatgacccttcaagctttcctttctgggttgatgacccagtctgagtaggtgacccagaagatgatgtagttgccttcttggttattggctctggtagagccaatataacatcttttcctttagtaccggatcttcctcctctgtcgaaggagctagacaccttaggaggcatcgggaattttctgtaaaaattcacgggtgaggtagttaggtagagagtttgaaaagcccttgatatattctatgttaaaatc

SEQ ID NO: 13511 - DNA, 1121 bp, Glycine max
  Gm_smallRNAprecursor_6344
ttgttgttgttggttttggggattcctgagttgatgactcaggttttatctgggtcaatgacccttcaagctttcctttctgggttgatgacccagtctgagtaggtgacccagaagatgatgtagttgccttcttggttattggctctggtagagccaatataacatcttttcctttagtaccggatcttcctcctctgtcgaaggagctagacaccttaggaggcatcgggaattttctgtaaaaattcacgggtgaggtagttaggtagagagtttgaaaagcccttgatatattctatgttaaaatcaaagacgcttaaaattgcctgccatattgcaaaaatttgttttgaggcaaggttttttacatccttttgtaaaatgtctttggctgatttgcagtcaacccttactaaaaatttttgattcaataaatcagattgaaatttggaaatgcacaaaacaattgctaaaacttcctttttaacagttgaatattttaattgtgcaggattccaatgttttgaagtatatgcaatgacatgttcttgaccatgtatttgctgtttcaggataccaccgtaaccgatgtctgatgcatcagtttcgacaattttgaatgcctgtggaatgggaagatacatacattttatggattggactttgactttgatttctttgactgtttgagtatggaggtcagaccaaggaggcggattctttttcagcctatcatgtaatggtttgacaatattgtttagataggggaaaaattctcctacataatttaggcaccccagaaatcgttgtaactaggtcttgtctaagatttggttagggaatttgctggcaaactctattgatctttctattggaatgattgcgccttggtatatattgtgcccaaggaatcgtatccgtgtctgaaaaagatttatctttgatttggagactgccaaaccattctgtttaatgatatggatgaaagtatggaggtgtttaaaatgttgatcaatatcttgggagaagattaaaacatcatcaatgtaaacaatgacgaattttgaataaggattgaaaatatcattcatgattttttgaaattctgaaggggcatt

SEQ ID NO: 13512 - DNA, 1121 bp, Glycine max; identical to SEQ ID NO: 13511
  Gm_smallRNAprecursor_6345

SEQ ID NO: 13513 - DNA, 1161 bp, Glycine max
  Gm_smallRNAprecursor_6346
gtgtctgaaaaagatttatctttgatttggagactgccaaaccattctgtttaatgatatggatgaaagtatggaggtgtttaaaatgttgatcaatatcttgggagaagattaaaacatcatcaatgtaaacaatgacgaattttgaataaggattgaaaatatcattcatgattttttgaaattctgaaggggcattcttcagtccgaatgacattacattccactcatattgcccgaaaggtacagtaaacgctgttttgtacctatctgattcttggatttggatttgccagaatccggatttcatgtcaaattttgaaaatacctttgcagaatttaatctgttaagtaggtcttttttatttggaataggatacctgatccattgtaatgcttgatttaacggtttgtaatttatgactaagcggggtgttcctcgctcaatctcggattgtttgttgacgtaaaaagccgcacaagaccatggacttttacttttccgaattaaacctttatcaagtaaatctttaatttctttttggcaatattgaaggagttcttcattcatttggattggtctagcttttgtgggaatttgtttttccctaaaatctttctcataaggaagatcaacaatatgtttctttctgtcccaaaatgcatgtggcaattcagaacaaactgttgattctatataacttaataaagattggattttctcctttatttggggttttcctagttgtatttggatattattaaacgatgcttcttgttttaagaagttaatttgattaatcttattctctgtaaaatttatatttctggagattggtttagtagaaaaattaaatataatttttcttcctaaataacttgtagttattccttcattagatatttggatgggaaataaagctcttatgaagggagttcctaggattacttcgttcttaaggctttttaccagaagaaagtttgtgttaatcctaagaccttggttttcaataattgcatttgataacttaaagttaatttttaattttgagccgtttgctgtactaagtttctccgaggttttctcaaagaattttataggaattaatccttctaaaatacagttgagtcagcccctgtgtcgaatagggccattgtttc

SEQ ID NO: 13514 - DNA, 1165 bp, Glycine max
  Gm_smallRNAprecursor_6347
aaaacggaccccgacgggtgcagagaaacgcgagggactagaactagagaaatggcatgcaaaccaaggcagggtttttgcatttcaaaagctcagatttttttctcttcttgtggctgagtatgagtcacatcaagagaaaaaaatgggccctttttgttccactcaaaatgggacaagtggcaagtgctttagaaaataaaataatagaaaaaggaaatcattctttctcataaaaagccacgttctctctcctcactcagccaaaaaaaaaaattcataagcttttccctcattctcacgttgcttttcttctcccattctcatccaccattgtttcccattaaagctccaaactttgctcaccatttctactccaaattgcaaaaggaagccattttcggagtcgtgaagcgcacctctacgttgtgggacttcaaatttcaggtttgggtagacttcttctcacatgattttcgtgggtattgggtttttgggagatatgatgggtagttctactaggtttatgccttatggtagttatttgtgaaggaatttgttgaaagcatgctaaacttgtcatgtttgatgtgagccaaatatacccattctgttttagggttttataatgatgttttgtgatgcttgtgtgctgaaatcgttggtagaaaactggtagagatgatggggagagttaacctagggttgaatgtgagaatggtagtgatgtgagtggaaaagtgtgaggttttgagggtttgaaaagctaaatttggggttagtggtaattgaaggctaaagtgagttaatcctagtttaaaatgtcatttaggacttgtgggaaagcttgggctgagcaaatgaggaaaacgagtgaccaaagtgaaagcaagagccatttctagggtaaattgggtgttgaggggtcaaattttgattcggtggagttttcgtcgtaaaaccagtttgagcaagtttagattaatgttatagacttgtttgagatgagagtttgctccaaaattaccccattctcattttcaattctcaaaccttgaaaatccactaaattgaggggttttagacacctagattttgaattgctttggtttgaagcttgtctttggtttagatatgatttatacatgatttaggacttttagga

SEQ ID NO: 13515 - DNA, 1089 bp, Glycine max
  Gm_smallRNAprecursor_6348
aaaaaattttgggaaaagaagaaagaaagttgtgaatagaaaaagagggggaagatcaccaatgtgaaaaaaggtgtggttgtaaaaagcaagccaaatttctttcttggtgacttttatatactttccttttgcgtgcaaatcataaagctacttgtgcatgcatcttgctctgtggaatgtgttattttggttggttgttttcgtagcggtctcacacaactgctacgaacccctgcactatgcatgaaccaacaacaagcaacatacatgttcccctcaaaaacactactagaaaaaagcgattttacgacggtcaaataggggatacaacgatgtttttcgaacgccgttgaatgtggtgtcgtcgaagcttaaaaatttcaacaacgggtcccaaaacaccgtctttgaaagtgagcaactttcaaagacggtgcttacctcaacaacgtctttaaaagtaggcattctaagacgttgctgaagtaatcaccgtctttgaatgcctactttcaaagacattgttgaggtaagcaccgtctttgaaagtacgcattctaagatggtgcttacctcaacaacgtctttgaaagtaggcattctaagacgttactgatgtaagcaccgtttttgaattgaatattacttttaattatttatattttttctggttgatatcccatcagaaaaatataaataattaaaaataatatatattagcatgattataattaatattaatggtaaaatttatttaataaataaatatttaaatgatagattaaataaaaataagagatatatgtattatttgtatttaatctatcatttaaatattaattattaaattaaattttaatactaattacaatagattaagaaaataaattttactattaattacaacaaattaagaaaattgaattctaaacaaatttttaataaaaattacaatagattaaaataattttaattagaaaggcaaaatgtatgtgaattaattttccattaccttaaatcaactgatgtcaagaaattaaattataatgttcattactctactcataatcactagtgatacttcat

SEQ ID NO: 13516 - DNA, 1132 bp, Glycine max
  Gm_smallRNAprecursor_6349
cactttggttctgactttgcaatggctcaaaggaaaactcattctcctagtaagaaacttttaccatatgacaaatacaaatactataccatttttttatgtattaatgttataattcagaattctaagttatgctcttggttggtaattggtattgcagcatattggtggcgaatgtttgggtcacaaactctaaatttgcagaagctagctattaaaatttagagtttgacttgcagtgcttcaggatgtgaaagaaattggagtgtgtttgagcaagtaattgtgacaaaactctaactatacttttaattttatttaattttgatggtcaagttttatttggagtatatttgagattgaaatcaacatttatttgttatgttgtagattcattccaaaaaaagaaataggcttgagcacaagaggttgcatgatttggtgtttgtcaaatacaaccaacaattgaagcaaagatataatgcaagagatgaaattgatccaatttctcttaatgatattgatgtgtgcaatgaatggctcgtgggagagatggatgaagatgatgataatgatgctggaaatgatttggtatttgaagatgatgatgctctaaattggacaactgtgtatcaggcttcgggggttggagagcctcaaccttcacttagcactttgcattatgtttttatccttttcttattttgaactctttaatgagtttatttggtgttgatacttggttattgtatgaactcatgaaacttttttaacttttttagtttatttgaatgcaatccattgttttttttcaatttcaatgagtttatttggtgttggtacttggttatttataattatatatatgtatattttttttttgtccgccatgacatccgtcattttccgctacaccatccgccatatttttatggtggatttttggctttccaccatgaaccgccgtccaccattaacaacattgttcttcactcataagcctctgctcatttaagaacttcaaactcctttgatcagtcctaattaaaaatttcttacctagcaaataatgcctccaatttttcatagctaacaccactaccatcaattccctctcatatactgacttgag

SEQ ID NO: 13517 - DNA, 1188 bp, Glycine max
  Gm_smallRNAprecursor_6350
agccgtctttgcattttgtgggtcaacaaacatctttgtctttcgcctatatcagaccatgtagtccgagttaaagctcaataggccttcttgtcggggataagcgtcgaccctaaatgcatggcgattattccactgatgaatcattggggcgaacaattgccccaattttcgtcatgtttcccttttaatgttatgccatgaatgtttaagggttgtgaaagagactctggaattggttgctgcatcccaaattgtctcaatactctgtccagttggtgccactcaataacttgaaaacaaattagtggcaccaccgcgtaccacgcgagacttccgactaaacaaacgggaggcaacagtgatataacggttgatgagtacagctcctacacaaactgcatataacaacatagttgtgaacattttagtaaaataacacatataattttttattttacaaatacaatagcatgttcttacctcgtgacatttcataatatccaacttgcgacgaaaaaatctcacatcatcattgccgatatgttggtttccacgtcgcagccacctacaaagattaaaatttaatatatgctaaaaccatttattctattgaaatgaaagacactgttaaaaatgactaacctttgccccagtggtgtattttctacttgggaaggagtcctctttggagccaaggttggacatcgttcccatgcccacatttgtagtaagatgcacatacctccgattgatttagttttataatcggtggcattgcacatctctctgtatagaaaaccaagtacggcagctccccatgcatatctgccacattcttcaaagtcacgtaaaaattgaaggtaccttagcgaaactttgttactgcttttgtcaacgaacaagacacctccaatgaatctcagtatccatgcacgagcaaaccttcgtacttgttcttcgtcgtcgtcattatttatttgtgcaaaatggtgagccagccaacttaatttaaccacactacctctaatttcatcttatgtggtctgactcccaataattcctcacataaatcagcccaatcaagatttgttggaccgattaatggtaaaccatccacacttatacctaacaatacagagacgtcttggagagtaatagtacattctccgcatctcatgtgaaacg

SEQ ID NO: 13518 - DNA, 1231 bp, Glycine max
  Gm_smallRNAprecursor_6351
taaatacccattccacaatccaaatcctgaaggttatgcagccacgacattatggctcaaacttaaaccaacccaaaaaattctctgcaccatttgatcctgcagggtataattattgggattacgttgacgcctggaccaatgtgttctggcatcaaaatagtaaattcaagcattcatggctgatttacttcaaaaataatactgcatataattttccaaattggttcctccaatggtggaactacttcggaccaattccacaaatatttccagaagaagtccaacagggattcgaacaattcaacaagctctataatagcaaggaatcacgaattccggcagatttaaagtatttttccagttttgccttatcatggatcttttcatggcaatacagatacggaaaaactgaaaacaacaagcaatatccaccgttacagagacacgcctttgtaaaatggtggtcacaattcgatacttcaaaggctgctccagatcaagtcaagaactggttccagagcaatcctgagttccttaaaccagctgatccggagacatctttgtttctaaatcagaagtcgcaactggcagcattcttagcaagctcaaaatctaaagaaagtcttgctcagaatctcaaagaagttctccaactacttcaacaggaagtggaagaagaaccttccaagaaggaagctgaatcatcagagactaatgatgaccaagaagatgatccattctaccagaatgaagatgactgttttggtatatcattggacgacgattaattagttgtaataatcatgaattattgtaactaatttgtcagtttcttttaaataatgtaatttgtaaaaagttttgtaacagtttcggtaaacattatcgatactgtagaaacagtaaaaattgggtctatttaaaggagtcctcgtcccctttgtgaggcacctttttagatagtctcagaatcaggttttagagagagaagctctgcctagggaaaaactctttgtaagcttttctttcagtttcaataaatttcaagttctatttttcatatctcccttctcccctcaccgatcctgtgcggctctgccgccgcttcggtttctttgttttcaaaaacctgggtttgtaagccgtttcggtgtgcccttgatatctgctttacaattttataattcttacgtttgattttatcatactgctttcttacttcctatct

SEQ ID NO: 13519 - DNA, 1124 bp, Glycine max
  Gm_smallRNAprecursor_6352
attccacaatccaaatcctgaaggttatgcagccacgacattatggctcaaacttaaaccaacccaaaaaattctctgcaccatttgatcctgcagggtataattattgggattacgttgacgcctggaccaatgtgttctggcatcaaaatagtaaattcaagcattcatggctgatttacttcaaaaataatactgcatataattttccaaattggttcctccaatggtggaactacttcggaccaattccacaaatatttccagaagaagtccaacagggattcgaacaattcaacaagctctataatagcaaggaatcacgaattccggcagatttaaagtatttttccagttttgccttatcatggatcttttcatggcaatacagatacggaaaaactgaaaacaacaagcaatatccaccgttacagagacacgcctttgtaaaatggtggtcacaattcgatacttcaaaggctgctccagatcaagtcaagaactggttccagagcaatcctgagttccttaaaccagctgatccggagacatctttgtttctaaatcagaagtcgcaactggcagcattcttagcaagctcaaaatctaaagaaagtcttgctcagaatctcaaagaagttctccaactacttcaacaggaagtggaagaagaaccttccaagaaggaagctgaatcatcagagactaatgatgaccaagaagatgatccattctaccagaatgaagatgactgttttggtatatcattggacgacgattaattagttgtaataatcatgaattattgtaactaatttgtcagtttcttttaaataatgtaatttgtaaaaagttttgtaacagtttcggtaaacattatcgatactgtagaaacagtaaaaattgggtctatttaaaggagtcctcgtcccctttgtgaggcacctttttagatagtctcagaatcaggttttagagagagaagctctgcctagggaaaaactctttgtaagcttttctttcagtttcaataaatttcaagttctatttttcatatctcccttctcccctcaccgatcctgtgcggctctgccgccgcttcggtttctttgttttcaaaaacc

SEQ ID NO: 13520 - DNA, 1123 bp, Glycine max
  Gm_smallRNAprecursor_6353
ttccacaatccaaatcctgaaggttatgcagccacgacattatggctcaaacttaaaccaacccaaaaaattctctgcaccatttgatcctgcagggtataattattgggattacgttgacgcctggaccaatgtgttctggcatcaaaatagtaaattcaagcattcatggctgatttacttcaaaaataatactgcatataattttccaaattggttcctccaatggtggaactacttcggaccaattccacaaatatttccagaagaagtccaacagggattcgaacaattcaacaagctctataatagcaaggaatcacgaattccggcagatttaaagtatttttccagttttgccttatcatggatcttttcatggcaatacagatacggaaaaactgaaaacaacaagcaatatccaccgttacagagacacgcctttgtaaaatggtggtcacaattcgatacttcaaaggctgctccagatcaagtcaagaactggttccagagcaatcctgagttccttaaaccagctgatccggagacatctttgtttctaaatcagaagtcgcaactggcagcattcttagcaagctcaaaatctaaagaaagtcttgctcagaatctcaaagaagttctccaactacttcaacaggaagtggaagaagaaccttccaagaaggaagctgaatcatcagagactaatgatgaccaagaagatgatccattctaccagaatgaagatgactgttttggtatatcattggacgacgattaattagttgtaataatcatgaattattgtaactaatttgtcagtttcttttaaataatgtaatttgtaaaaagttttgtaacagtttcggtaaacattatcgatactgtagaaacagtaaaaattgggtctatttaaaggagtcctcgtcccctttgtgaggcacctttttagatagtctcagaatcaggttttagagagagaagctctgcctagggaaaaactctttgtaagcttttctttcagtttcaataaatttcaagttctatttttcatatctcccttctcccctcaccgatcctgtgcggctctgccgccgcttcggtttctttgttttcaaaaacc

SEQ ID NO: 13521 - DNA, 1105 bp, Glycine max
  Gm_smallRNAprecursor_6354
ctgttttgtttggataacaattaaaatatattggaccttgtcctaggctggtttcgactgttccaattagggagtcttcaaattggttatgcctaatgtctcttagacacattaaaactgctgcatctatgcccatatcaattaagggcttgatggctacttgtacacaaccgatgtgtagatatttatacttacgactatgttcatgaattgaattttttgaaagtaaatgaaattcttcccctacttcttgtcctagaggaatattgttttctactgttttgattatgtaatcaaagttgtgtttgtcttttattgtctcaggaacgtatagttgatcctgagggatttctggaatgttccagtcatccatattttgattgatatcttcgaatcggacttcctcatcgaagagattgtgttttggggcgacctcttgggtctggttgtcttgatcatttaatagattggagtttcttgaagaagatgataaggaggagtttgagcgaaaagagatacgagaaaaagatcgtaagagtctagacatgattatgatattctctaatatctttgccctcatttggttccatagaaatatctccgtaagtaaatatgtcacaaaatttttctggatctgaattatttttaagaaaactctttttttttttttttttttgaaaaatagtttgaacggaaatcctatagccaccagtgtattatgtcttgatattttggttaaacagtacaccttagccttactgcccttttatccaacacgggtcttactgctacagtaccattcaactaaaatattagactgctgtacttccaggaaatactgttcaaacatttactgtacaaatcaaagtaaaatattaaatgtactatacaaaacttttagtttcagatccataaaatttgttaacatatgtccttacggacagtattcctacttccccatcaggctctgataccagagatcagcggaatacgatcaaacggacggataggaagtaagaatgcagtatgataaaattaaacttaagaattataaacttgtaaagcagatatcaagggcacaccgaaacggcttacaaacccaggt

SEQ ID NO: 13522 - DNA, 1206 bp, Glycine max
  Gm_smallRNAprecursor_6355
agacacattaaaactgctgcatctatgcccatatcaattaagggcttgatggctacttgtacacaaccgatgtgtagatatttatacttacgactatgttcatgaattgaattttttgaaagtaaatgaaattcttcccctacttcttgtcctagaggaatattgttttctactgttttgattatgtaatcaaagttgtgtttgtcttttattgtctcaggaacgtatagttgatcctgagggatttctggaatgttccagtcatccatattttgattgatatcttcgaatcggacttcctcatcgaagagattgtgttttggggcgacctcttgggtctggttgtcttgatcatttaatagattggagtttcttgaagaagatgataaggaggagtttgagcgaaaagagatacgagaaaaagatcgtaagagtctagacatgattatgatattctctaatatctttgccctcatttggttccatagaaatatctccgtaagtaaatatgtcacaaaatttttctggatctgaattatttttaagaaaactctttttttttttttttttttgaaaaatagtttgaacggaaatcctatagccaccagtgtattatgtcttgatattttggttaaacagtacaccttagccttactgcccttttatccaacacgggtcttactgctacagtaccattcaactaaaatattagactgctgtacttccaggaaatactgttcaaacatttactgtacaaatcaaagtaaaatattaaatgtactatacaaaacttttagtttcagatccataaaatttgttaacatatgtccttacggacagtattcctacttccccatcaggctctgataccagagatcagcggaatacgatcaaacggacggataggaagtaagaatgcagtatgataaaattaaacttaagaattataaacttgtaaagcagatatcaagggcacaccgaaacggcttacaaacccaggtttttgaaaacaaagaaaccgaagcggcggcagagccgcacaggatcggtgaggggagaagggagatatgaaaattagaacttgaaatttattgaaaccgaaagaaaagcttacaaagagtttttccctaggcagagcttctctctctaaaaacctgattctgagtctatctgaagggtgcctcacaaaggggacgaggactcctt

SEQ ID NO: 13523 - DNA, 1056 bp, Glycine max
  Gm_smallRNAprecursor_6356
cattcaactaaaatattagactgctgtacttccaggaaatactgttcaaacatttactgtacaaatcaaagtaaaatattaaatgtactatacaaaacttttagtttcagatccataaaatttgttaacatatgtccttacggacagtattcctacttccccatcaggctctgataccagagatcagcggaatacgatcaaacggacggataggaagtaagaatgcagtatgataaaattaaacttaagaattataaacttgtaaagcagatatcaagggcacaccgaaacggcttacaaacccaggtttttgaaaacaaagaaaccgaagcggcggcagagccgcacaggatcggtgaggggagaagggagatatgaaaattagaacttgaaatttattgaaaccgaaagaaaagcttacaaagagtttttccctaggcagagcttctctctctaaaaacctgattctgagtctatctgaagggtgcctcacaaaggggacgaggactcctttaaatagacccaatttttactgtttctacagtatcggtaatgtttaccggaactgttacaaaactttttacaaattatattatttaaaagaaactgacaaattagttacaataattcatgattatttcaactaattaatcgtcgtccaatgatataccaaaacagtcatcttcattctggtagaatggatcatcttcttggtcatcattagtctctgatgattcagcttccttcttggaaggttcttcttccacttcctgttgaagtagttggagaacttctttgagattctgagcaagactttctttagattttgagcttgctaagaatgctgccagttgcgacttctgatttagaaacaaagatgtctccggatcagcaggtttaaggaactcaggattgctctggaaccagttcttgacttggtctggagcagcctttgaagtatcgaattgtgaccaccattttacaaaggcgtgtctctgtaacggtggatattgcttgttgttttcagttttcccgtatctgtatttccatgaaaag

SEQ ID NO: 13524 - DNA, 1216 bp, Glycine max
  Gm_smallRNAprecursor_6357
actgtacaaatcaaagtaaaatattaaatgtactatacaaaacttttagtttcagatccataaaatttgttaacatatgtccttacggacagtattcctacttccccatcaggctctgataccagagatcagcggaatacgatcaaacggacggataggaagtaagaatgcagtatgataaaattaaacttaagaattataaacttgtaaagcagatatcaagggcacaccgaaacggcttacaaacccaggtttttgaaaacaaagaaaccgaagcggcggcagagccgcacaggatcggtgaggggagaagggagatatgaaaattagaacttgaaatttattgaaaccgaaagaaaagcttacaaagagtttttccctaggcagagcttctctctctaaaaacctgattctgagtctatctgaagggtgcctcacaaaggggacgaggactcctttaaatagacccaatttttactgtttctacagtatcggtaatgtttaccggaactgttacaaaactttttacaaattatattatttaaaagaaactgacaaattagttacaataattcatgattatttcaactaattaatcgtcgtccaatgatataccaaaacagtcatcttcattctggtagaatggatcatcttcttggtcatcattagtctctgatgattcagcttccttcttggaaggttcttcttccacttcctgttgaagtagttggagaacttctttgagattctgagcaagactttctttagattttgagcttgctaagaatgctgccagttgcgacttctgatttagaaacaaagatgtctccggatcagcaggtttaaggaactcaggattgctctggaaccagttcttgacttggtctggagcagcctttgaagtatcgaattgtgaccaccattttacaaaggcgtgtctctgtaacggtggatattgcttgttgttttcagttttcccgtatctgtatttccatgaaaagatccatgataaggcaaaactagaaaaatactttaaatctgccggaattcgtgattccttgctattatagaggttgttgaattgttcgaatccctgttggacttcttctggaaatatttgtggaattggtccgaagtagttccaccattggaggaaccaatttggaaaattgtatgcagtattatttttgaagtaaatcagccatgaatgcttgaa

SEQ ID NO: 13525 - DNA, 1138 bp, Glycine max
  Gm_smallRNAprecursor_6358
cacaccgaaacggcttacaaacccaggtttttgaaaacaaagaaaccgaagcggcggcagagccgcacaggatcggtgaggggagaagggagatatgaaaattagaacttgaaatttattgaaaccgaaagaaaagcttacaaagagtttttccctaggcagagcttctctctctaaaaacctgattctgagtctatctgaagggtgcctcacaaaggggacgaggactcctttaaatagacccaatttttactgtttctacagtatcggtaatgtttaccggaactgttacaaaactttttacaaattatattatttaaaagaaactgacaaattagttacaataattcatgattatttcaactaattaatcgtcgtccaatgatataccaaaacagtcatcttcattctggtagaatggatcatcttcttggtcatcattagtctctgatgattcagcttccttcttggaaggttcttcttccacttcctgttgaagtagttggagaacttctttgagattctgagcaagactttctttagattttgagcttgctaagaatgctgccagttgcgacttctgatttagaaacaaagatgtctccggatcagcaggtttaaggaactcaggattgctctggaaccagttcttgacttggtctggagcagcctttgaagtatcgaattgtgaccaccattttacaaaggcgtgtctctgtaacggtggatattgcttgttgttttcagttttcccgtatctgtatttccatgaaaagatccatgataaggcaaaactagaaaaatactttaaatctgccggaattcgtgattccttgctattatagaggttgttgaattgttcgaatccctgttggacttcttctggaaatatttgtggaattggtccgaagtagttccaccattggaggaaccaatttggaaaattgtatgcagtattatttttgaagtaaatcagccatgaatgcttgaatttactattttgatgccagaacacattggtccaggcgtcaacgtaatcccaataattataccctgcagggtcagatggtgtagagaatttttcgggttggtttaagtttgagccataatgtcgtggctgcataactttcaggatttg

SEQ ID NO: 13526 - DNA, 1071 bp, Glycine max
  Gm_smallRNAprecursor_6359
cggcttacaaacccaggtttttgaaaacaaagaaaccgaagcggcggcagagccgcacaggatcggtgaggggagaagggagatatgaaaattagaacttgaaatttattgaaaccgaaagaaaagcttacaaagagtttttccctaggcagagcttctctctctaaaaacctgattctgagtctatctgaagggtgcctcacaaaggggacgaggactcctttaaatagacccaatttttactgtttctacagtatcggtaatgtttaccggaactgttacaaaactttttacaaattatattatttaaaagaaactgacaaattagttacaataattcatgattatttcaactaattaatcgtcgtccaatgatataccaaaacagtcatcttcattctggtagaatggatcatcttcttggtcatcattagtctctgatgattcagcttccttcttggaaggttcttcttccacttcctgttgaagtagttggagaacttctttgagattctgagcaagactttctttagattttgagcttgctaagaatgctgccagttgcgacttctgatttagaaacaaagatgtctccggatcagcaggtttaaggaactcaggattgctctggaaccagttcttgacttggtctggagcagcctttgaagtatcgaattgtgaccaccattttacaaaggcgtgtctctgtaacggtggatattgcttgttgttttcagttttcccgtatctgtatttccatgaaaagatccatgataaggcaaaactagaaaaatactttaaatctgccggaattcgtgattccttgctattatagaggttgttgaattgttcgaatccctgttggacttcttctggaaatatttgtggaattggtccgaagtagttccaccattggaggaaccaatttggaaaattgtatgcagtattatttttgaagtaaatcagccatgaatgcttgaatttactattttgatgccagaacacattggtccaggcgtcaacgtaatcccaataattataccctgcagggtcagatggtgtagagaattt

SEQ ID NO: 13527 - DNA, 1072 bp, Glycine max
  Gm_smallRNAprecursor_6360
cggcttacaaacccaggtttttgaaaacaaagaaaccgaagcggcggcagagccgcacaggatcggtgaggggagaagggagatatgaaaattagaacttgaaatttattgaaaccgaaagaaaagcttacaaagagtttttccctaggcagagcttctctctctaaaaacctgattctgagtctatctgaagggtgcctcacaaaggggacgaggactcctttaaatagacccaatttttactgtttctacagtatcggtaatgtttaccggaactgttacaaaactttttacaaattatattatttaaaagaaactgacaaattagttacaataattcatgattatttcaactaattaatcgtcgtccaatgatataccaaaacagtcatcttcattctggtagaatggatcatcttcttggtcatcattagtctctgatgattcagcttccttcttggaaggttcttcttccacttcctgttgaagtagttggagaacttctttgagattctgagcaagactttctttagattttgagcttgctaagaatgctgccagttgcgacttctgatttagaaacaaagatgtctccggatcagcaggtttaaggaactcaggattgctctggaaccagttcttgacttggtctggagcagcctttgaagtatcgaattgtgaccaccattttacaaaggcgtgtctctgtaacggtggatattgcttgttgttttcagttttcccgtatctgtatttccatgaaaagatccatgataaggcaaaactagaaaaatactttaaatctgccggaattcgtgattccttgctattatagaggttgttgaattgttcgaatccctgttggacttcttctggaaatatttgtggaattggtccgaagtagttccaccattggaggaaccaatttggaaaattgtatgcagtattatttttgaagtaaatcagccatgaatgcttgaatttactattttgatgccagaacacattggtccaggcgtcaacgtaatcccaataattataccctgcagggtcagatggtgtagagaatttt

SEQ ID NO: 13528 - DNA, 1040 bp, Glycine max
  Gm_smallRNAprecursor_6361
cttacaaacccaggtttttgaaaacaaagaaaccgaagcggcggcagagccgcacaggatcggtgaggggagaagggagatatgaaaattagaacttgaaatttattgaaaccgaaagaaaagcttacaaagagtttttccctaggcagagcttctctctctaaaaacctgattctgagtctatctgaagggtgcctcacaaaggggacgaggactcctttaaatagacccaatttttactgtttctacagtatcggtaatgtttaccggaactgttacaaaactttttacaaattatattatttaaaagaaactgacaaattagttacaataattcatgattatttcaactaattaatcgtcgtccaatgatataccaaaacagtcatcttcattctggtagaatggatcatcttcttggtcatcattagtctctgatgattcagcttccttcttggaaggttcttcttccacttcctgttgaagtagttggagaacttctttgagattctgagcaagactttctttagattttgagcttgctaagaatgctgccagttgcgacttctgatttagaaacaaagatgtctccggatcagcaggtttaaggaactcaggattgctctggaaccagttcttgacttggtctggagcagcctttgaagtatcgaattgtgaccaccattttacaaaggcgtgtctctgtaacggtggatattgcttgttgttttcagttttcccgtatctgtatttccatgaaaagatccatgataaggcaaaactagaaaaatactttaaatctgccggaattcgtgattccttgctattatagaggttgttgaattgttcgaatccctgttggacttcttctggaaatatttgtggaattggtccgaagtagttccaccattggaggaaccaatttggaaaattgtatgcagtattatttttgaagtaaatcagccatgaatgcttgaatttactattttgatgccagaacacattggtccaggcgtcaacgtaatcccaataattatacc

SEQ ID NO: 13529 - DNA, 1068 bp, Glycine max
  Gm_smallRNAprecursor_6362
cttacaaacccaggtttttgaaaacaaagaaaccgaagcggcggcagagccgcacaggatcggtgaggggagaagggagatatgaaaattagaacttgaaatttattgaaaccgaaagaaaagcttacaaagagtttttccctaggcagagcttctctctctaaaaacctgattctgagtctatctgaagggtgcctcacaaaggggacgaggactcctttaaatagacccaatttttactgtttctacagtatcggtaatgtttaccggaactgttacaaaactttttacaaattatattatttaaaagaaactgacaaattagttacaataattcatgattatttcaactaattaatcgtcgtccaatgatataccaaaacagtcatcttcattctggtagaatggatcatcttcttggtcatcattagtctctgatgattcagcttccttcttggaaggttcttcttccacttcctgttgaagtagttggagaacttctttgagattctgagcaagactttctttagattttgagcttgctaagaatgctgccagttgcgacttctgatttagaaacaaagatgtctccggatcagcaggtttaaggaactcaggattgctctggaaccagttcttgacttggtctggagcagcctttgaagtatcgaattgtgaccaccattttacaaaggcgtgtctctgtaacggtggatattgcttgttgttttcagttttcccgtatctgtatttccatgaaaagatccatgataaggcaaaactagaaaaatactttaaatctgccggaattcgtgattccttgctattatagaggttgttgaattgttcgaatccctgttggacttcttctggaaatatttgtggaattggtccgaagtagttccaccattggaggaaccaatttggaaaattgtatgcagtattatttttgaagtaaatcagccatgaatgcttgaatttactattttgatgccagaacacattggtccaggcgtcaacgtaatcccaataattataccctgcagggtcagatggtgtagagaattt

SEQ ID NO: 13530 - DNA, 1069 bp, Glycine max
  Gm_smallRNAprecursor_6363
cttacaaacccaggtttttgaaaacaaagaaaccgaagcggcggcagagccgcacaggatcggtgaggggagaagggagatatgaaaattagaacttgaaatttattgaaaccgaaagaaaagcttacaaagagtttttccctaggcagagcttctctctctaaaaacctgattctgagtctatctgaagggtgcctcacaaaggggacgaggactcctttaaatagacccaatttttactgtttctacagtatcggtaatgtttaccggaactgttacaaaactttttacaaattatattatttaaaagaaactgacaaattagttacaataattcatgattatttcaactaattaatcgtcgtccaatgatataccaaaacagtcatcttcattctggtagaatggatcatcttcttggtcatcattagtctctgatgattcagcttccttcttggaaggttcttcttccacttcctgttgaagtagttggagaacttctttgagattctgagcaagactttctttagattttgagcttgctaagaatgctgccagttgcgacttctgatttagaaacaaagatgtctccggatcagcaggtttaaggaactcaggattgctctggaaccagttcttgacttggtctggagcagcctttgaagtatcgaattgtgaccaccattttacaaaggcgtgtctctgtaacggtggatattgcttgttgttttcagttttcccgtatctgtatttccatgaaaagatccatgataaggcaaaactagaaaaatactttaaatctgccggaattcgtgattccttgctattatagaggttgttgaattgttcgaatccctgttggacttcttctggaaatatttgtggaattggtccgaagtagttccaccattggaggaaccaatttggaaaattgtatgcagtattatttttgaagtaaatcagccatgaatgcttgaatttactattttgatgccagaacacattggtccaggcgtcaacgtaatcccaataattataccctgcagggtcagatggtgtagagaatttt

SEQ ID NO: 13531 - DNA, 1048 bp, Glycine max
  Gm_smallRNAprecursor_6364
gggagaagggagatatgaaaattagaacttgaaatttattgaaaccgaaagaaaagcttacaaagagtttttccctaggcagagcttctctctctaaaaacctgattctgagtctatctgaagggtgcctcacaaaggggacgaggactcctttaaatagacccaatttttactgtttctacagtatcggtaatgtttaccggaactgttacaaaactttttacaaattatattatttaaaagaaactgacaaattagttacaataattcatgattatttcaactaattaatcgtcgtccaatgatataccaaaacagtcatcttcattctggtagaatggatcatcttcttggtcatcattagtctctgatgattcagcttccttcttggaaggttcttcttccacttcctgttgaagtagttggagaacttctttgagattctgagcaagactttctttagattttgagcttgctaagaatgctgccagttgcgacttctgatttagaaacaaagatgtctccggatcagcaggtttaaggaactcaggattgctctggaaccagttcttgacttggtctggagcagcctttgaagtatcgaattgtgaccaccattttacaaaggcgtgtctctgtaacggtggatattgcttgttgttttcagttttcccgtatctgtatttccatgaaaagatccatgataaggcaaaactagaaaaatactttaaatctgccggaattcgtgattccttgctattatagaggttgttgaattgttcgaatccctgttggacttcttctggaaatatttgtggaattggtccgaagtagttccaccattggaggaaccaatttggaaaattgtatgcagtattatttttgaagtaaatcagccatgaatgcttgaatttactattttgatgccagaacacattggtccaggcgtcaacgtaatcccaataattataccctgcagggtcagatggtgtagagaatttttcgggttggtttaagtttgagccataatgtcgtggctgcataactt

SEQ ID NO: 13532 - DNA, 1047 bp, Glycine max
  Gm_smallRNAprecursor_6365
ggagaagggagatatgaaaattagaacttgaaatttattgaaaccgaaagaaaagcttacaaagagtttttccctaggcagagcttctctctctaaaaacctgattctgagtctatctgaagggtgcctcacaaaggggacgaggactcctttaaatagacccaatttttactgtttctacagtatcggtaatgtttaccggaactgttacaaaactttttacaaattatattatttaaaagaaactgacaaattagttacaataattcatgattatttcaactaattaatcgtcgtccaatgatataccaaaacagtcatcttcattctggtagaatggatcatcttcttggtcatcattagtctctgatgattcagcttccttcttggaaggttcttcttccacttcctgttgaagtagttggagaacttctttgagattctgagcaagactttctttagattttgagcttgctaagaatgctgccagttgcgacttctgatttagaaacaaagatgtctccggatcagcaggtttaaggaactcaggattgctctggaaccagttcttgacttggtctggagcagcctttgaagtatcgaattgtgaccaccattttacaaaggcgtgtctctgtaacggtggatattgcttgttgttttcagttttcccgtatctgtatttccatgaaaagatccatgataaggcaaaactagaaaaatactttaaatctgccggaattcgtgattccttgctattatagaggttgttgaattgttcgaatccctgttggacttcttctggaaatatttgtggaattggtccgaagtagttccaccattggaggaaccaatttggaaaattgtatgcagtattatttttgaagtaaatcagccatgaatgcttgaatttactattttgatgccagaacacattggtccaggcgtcaacgtaatcccaataattataccctgcagggtcagatggtgtagagaatttttcgggttggtttaagtttgagccataatgtcgtggctgcataactt

SEQ ID NO: 13533 - DNA, 1198 bp, Glycine max
  Gm_smallRNAprecursor_6366
aagaaaagcttacaaagagtttttccctaggcagagcttctctctctaaaaacctgattctgagtctatctgaagggtgcctcacaaaggggacgaggactcctttaaatagacccaatttttactgtttctacagtatcggtaatgtttaccggaactgttacaaaactttttacaaattatattatttaaaagaaactgacaaattagttacaataattcatgattatttcaactaattaatcgtcgtccaatgatataccaaaacagtcatcttcattctggtagaatggatcatcttcttggtcatcattagtctctgatgattcagcttccttcttggaaggttcttcttccacttcctgttgaagtagttggagaacttctttgagattctgagcaagactttctttagattttgagcttgctaagaatgctgccagttgcgacttctgatttagaaacaaagatgtctccggatcagcaggtttaaggaactcaggattgctctggaaccagttcttgacttggtctggagcagcctttgaagtatcgaattgtgaccaccattttacaaaggcgtgtctctgtaacggtggatattgcttgttgttttcagttttcccgtatctgtatttccatgaaaagatccatgataaggcaaaactagaaaaatactttaaatctgccggaattcgtgattccttgctattatagaggttgttgaattgttcgaatccctgttggacttcttctggaaatatttgtggaattggtccgaagtagttccaccattggaggaaccaatttggaaaattgtatgcagtattatttttgaagtaaatcagccatgaatgcttgaatttactattttgatgccagaacacattggtccaggcgtcaacgtaatcccaataattataccctgcagggtcagatggtgtagagaatttttcgggttggtttaagtttgagccataatgtcgtggctgcataactttcaggatttggattgtggaatgggtatttaaatttggatctttggggtctttgaagtgtttaatagatactgagtttgtatctattaggatgaattcgtagaatttgcgggttttatttgcggctattggcctgtaatggaatccctgggggaatactttggcggttgctttgaaaggatttttgtcccaatattctg

SEQ ID NO: 13534 - DNA, 1180 bp, Glycine max
  Gm_smallRNAprecursor_6367
cctacgtaatttagacaacctagaaatctttgtaactgggttttgtctaagatttggttggggaatttgctagcaaactcaattgacctttcgattggaacaattgtaccttgataaatactgtgaccaaggaatcgaattcgtgtttggaaaagattgatttttgatttggagactgccaaaccattttgtttgatgatatggatgaaggtttggagatgtttgaaatgctggtcaatgttttgggaaaagattaaaacatcatctatgtagacaatgacaaattttgaatagggattaaaaatatcattcataattttttgaaattctgaaggggcattcttcagtccgaatggcattacgttccactcatattgcccgaaaggtacagtaaaagttgttttgtacctatctgattcttggatttggatttgccaaaatccagatttcatatcaaattttgaaaatatctttgcagaatttaatctgttaagcaaatctcttttgtttggaataggatatctaatccattgtaatgcttgatttagtggtttgtaatttatgactaagcgaggtgttccacgctcaatctcagattgtttgttgacataaaaagccgcacaagaccatgggcttttgcttttccggattaggcctttatcaagcaaatccttgatttccttttgacagtattgaagaagttcttcattcatttggatcggtctggcttttgtgggaatttgtttttctctaaagtctttctcataggggagatcaacaatatgtttctttctgtcccaaaatgcatgtggcaaatcagaacagacagttgattcaatatgatttagtaaagattgaattttttcttttacttggggttttcctagttgtagctgaatattattaaaagatacttcttcttttaagaagttaatttgattaatcttattctctatgaaatttatatttctggaaattggtttagtagaaaaattgaatataatctttcttcctaaatgatttgtggttattccttcattagatatttggatgggaaacagggctctaatgaagggcgttcctaagattacttcattcttaaggttttttaccagaagaaagtttgtgttgctcctaagaccttggttttcaatgattgcatttgatagcttaaaattaa

SEQ ID NO: 13535 - DNA, 1040 bp, Glycine max
  Gm_smallRNAprecursor_6368
agttgagaatgttggaatcaacaaagtgctcattgatggaggagcggctgtcaacttaatgcctcgatctatgctctacaagatcgggaaacatgacactgatctatctgcccacaacattgtgctttcgaattatgagggtaaaactggctattctttgggagccattcaagtagatgttgttgtaggcagtatagttcgaccaactcttttcctggtgatacagtctaaggctaattttaacttgctattaggaagggagtggattcatggagttggggctgtgccatctacccttcaccagaagctcattatctggagggaggatgggattgtggaaaatatagaggcggatcaaagcttctataagtcagaggtcgataatgttactgcacaaacctttgacaaaaagttggctaacatagcaccttgtggtgacaaggaggctgttgtcgaatcgagtgacaatgttgtccactctgtcaaactccatcctacctatgggtttatatgggagagggaggaaattgatgctgttccctctgaagatggagtcattccaccaactgggtggaatacatatgaagattaatatgactgaggccactgcatgggccagaattacggcttatatggccgaaaatagactaaatacggcctttgaggctgaatctcaacaaaatatggcagttgaagccaagatcgaagatcatgaaaacaaagaaacagaggatcgaagactggattgtatttatgatgatgagccgctgggttttgagaaaaatcccataagtgaggcgccaaagatgcaggctcaagatcctttggaagaggtcgatattggagatggctcgattaataggccaacttatatcagtgccaatatcacctcaagtttaaaagaaaagctggtgcctcttcttagagagtttaaagactgttttgcttgggattaccacgaaatgcctgggttaagcagagaaatggtcgaaatgaagttacctattaaggagggaaaaagaccagtaaaacaactacca

SEQ ID NO: 13536 - DNA, 1157 bp, Glycine max
  Gm_smallRNAprecursor_6369
aagaccagtaaaacaactaccaagaagattcgcaccagaaatcatgtccaagattaaggaagagatcgaaaggctgctgaggtgtaaattcatcagggctgccaggtatgtcgaatggttagcaaatatagtccctgtcattaaaaagaatggaactcttagagtatgcatagattttagggatttaaataatgctacacctaaagatgaatatgctatgccagtagcggaaatgttggtcgattcggcagctggtttcgaatttttaagcatgttagatggttattctggttataaccaaatatttattgctgaaagtgatgtgtcgaaaacagcatttcgatgccctggtgctttaggcacttatgaatgggtggttatgccctttgggttgaaaaatgctggggccacttatcaaagggccatgaattccatgtttcatgattttattgacacatttatgcaaatttatattgatgatataatcatcaaatcctcctcagaagatagccatttggattaccttaggcaatctttcgaacgaatgaggaaacatggattaaaaatgaatccattaaagtgtgctttttgtgtgcgtgcaggagatttccttggttttgtggtgcataaaaaaggcattgagataaatcaaaataagacaaaggctattcttgagacgaagcctccttcgaccaaaaaacagcttcagtctttgctaggaaaaatcaacttcttgaggcgattcatttcgaatctaagtggcaaagctcagattttttcgccattacttcgactcaagaaagatgaaccattcaaatggaatgaagagcatcaaaaggctttcgatgaaattaaagaatatctgatcaagcctcctgtgttaatgcctcctagtcgaaacaagtctatgaagttgtatattgctgcgtctgacaagaccattggtagcatgttggctcaggaagatgatgatggcatagaacatgcaatttattatcttagtcgtgtactaaatgatgcagaaactagatatactgccatagaaaaactttgtctttgtctgtatttctcttgtgcaaaacttaagcaatatataaagcctgttgatgtttatgtgtattctcattatgatattattaagcacatgttgtcaaaac

SEQ ID NO: 13537 - DNA, 1175 bp, Glycine max
  Gm_smallRNAprecursor_6370
aagagatcgaaaggctgctgaggtgtaaattcatcagggctgccaggtatgtcgaatggttagcaaatatagtccctgtcattaaaaagaatggaactcttagagtatgcatagattttagggatttaaataatgctacacctaaagatgaatatgctatgccagtagcggaaatgttggtcgattcggcagctggtttcgaatttttaagcatgttagatggttattctggttataaccaaatatttattgctgaaagtgatgtgtcgaaaacagcatttcgatgccctggtgctttaggcacttatgaatgggtggttatgccctttgggttgaaaaatgctggggccacttatcaaagggccatgaattccatgtttcatgattttattgacacatttatgcaaatttatattgatgatataatcatcaaatcctcctcagaagatagccatttggattaccttaggcaatctttcgaacgaatgaggaaacatggattaaaaatgaatccattaaagtgtgctttttgtgtgcgtgcaggagatttccttggttttgtggtgcataaaaaaggcattgagataaatcaaaataagacaaaggctattcttgagacgaagcctccttcgaccaaaaaacagcttcagtctttgctaggaaaaatcaacttcttgaggcgattcatttcgaatctaagtggcaaagctcagattttttcgccattacttcgactcaagaaagatgaaccattcaaatggaatgaagagcatcaaaaggctttcgatgaaattaaagaatatctgatcaagcctcctgtgttaatgcctcctagtcgaaacaagtctatgaagttgtatattgctgcgtctgacaagaccattggtagcatgttggctcaggaagatgatgatggcatagaacatgcaatttattatcttagtcgtgtactaaatgatgcagaaactagatatactgccatagaaaaactttgtctttgtctgtatttctcttgtgcaaaacttaagcaatatataaagcctgttgatgtttatgtgtattctcattatgatattattaagcacatgttgtcaaaaccgattttacatagtagaattggaaaatgggctttagcattaacagaatattctttaacgtacaagcctttgaaatct

SEQ ID NO: 13538 - DNA, 1054 bp, Glycine max
  Gm_smallRNAprecursor_6371
acctaatttattgtttgtcaggcggaatttgaaatccatgaagcttctgacagtaggacaaagaagaaagttcttcagactgtcggcgagcggtggaggcagtttaaatttgatttgacgaggaaatgggcacttgcagccaacaaggacggtgtcgatgacactctgtgaaaaatatggcattagcaaggagaaatgggcccagttttgtcagacctgttgagactcctcgtgggaggtatgtactttgtcattttagttgttttccataaaaaaatcacttcttgtaattcattgtagtaatcatttccattaatgttcgatttttgcaggatctgcgaaaaaggcacaggccatccagaagcaaaacatcgccccccatgtgttgtctcgtggaggttatgaatatttagaacaaaagctcatggttgagaagacaaagaaaagactagaggaagctgcccaatccggaagcattgagggcatcattgaccctccatctcccatcagacgccacgtgaagtggaagatggctcgcaccaagaaaactgggcagatgacgtctgaggcagcaaaggaaatcactgagaagattgtaagtcattttcaattaagaattataattatctttgcttattctatgaatgccttggacaaatatatgtgttctgtacaagattctttggatgagcaggcgtcacagggatcgttcatcccccatggacgtcaggatgttctaactgctgccattgggcgactagaactccttggctatgtccgtgctgctggagccggtgtcaccataaagcaatacttcggatcggctccacgaacctcccgcggttcttcctctatgcctcctgaagacctacaacagctgacccaacaaatcaaggaccagttggaggatttgatcacataaaaagtgactcgacagctgatggcatccttcagccagatgcagtcccagtttcagtcacagatgcaatcacagggacttgcactgcctccagagcttgaggtaggtccctcaggtgctcgtttcagcacaaag

SEQ ID NO: 13539 - DNA, 1037 bp, Glycine max
  Gm_smallRNAprecursor_6372
ttagtggggcagacacttaacaccttccttgcttggccaacacatcttgtgaagcgtttatcagaacatgtatttttctctgattatatgtttatttttttcaattaatttgttcactgcaatcaaaacttgctaattaactatgttttatcgacaggcagctgtgtctccagcaaaacctctagaaagcccagatgaagaggtcgatgatcccctgtacctgatgacattgaccatcccacaactgtttttgaagtcgctccaggttatgtgggatgctaccatattcagggtgtttaatcaaaacttcccgttgtatataaagcacgaagatctctctgaaattgcacatggtggtcaatgtctcagcatatctgttatacagttgtggattctgtaagtcattttagattactattaattaccaaagtaatttttttaaattcatacataattaactttgacttaacaacacaaccatctgactgagacaagtgtgcgagcggggaattctgatgtgtatggattcctcgagccacagtccattcagagatctgggcaatcacaatttgaatccgaaagttacatcaagagttggatacagagttcaaaacgagatgtttaccttggagtctacctgaatgggtaagtcaaacacaataattgaatttaaataatctatactactacaataacccatattcgtctctactgcagcggacactggcaaatggtcgtcattctgcctaaggaaaacctagttgtcttgttttgttctttacataacaggccagacaactaccttaagggaataattaacaggtcagtattgttttcaatacattttcattggcataactcaacaacattaatattttaatgttcctcatattcaacactagtgctttgaaaggacttgatgatactccacaaccgaaatccaaggctgctgctaggtggattgttgttaaggtacgtgatttaaataaaagttctacttatatatattttatatgtgtgtacactaattgtagtta

SEQ ID NO: 13540 - DNA, 1057 bp, Glycine max
  Gm_smallRNAprecursor_6373
acataaaatttatactttgttaacatcaaaaccttagggattcagttgtttggtacaatccaatgtaacttggatgcaaccagactaaacagtttcatgtactttttaaacttgtgtttagtatattttttgtttgcactttaagggtttctttatttaatagtatttactcaatatatatatatatatatatatatatatacgaacggatagataggaagtaggagtaacgcaatatgacaaataaaaatgcaaaagtgtaaaatagttatcaagggcacaccggaatccggcttacaaacccaggtttttgaaaacaaagaaactgaagcggcggcagagccgcacaggatcggtgatgggagaagggagatgtgaaaaatagaactttgaatttattgaaatcgaaagaaaagctttcaaagaggttttccctaggcagagcttctctctctaaaacttggttttgagactatctgaaagggtgcctcacaaagggaacgaggactcctttaaatagacccaatattttactgtttcaacagtatcagtaatgtttaccggaactgttacaaaaacttttacaaattacattattatcgggaaccgaataattagttacaataattcatgattactacaactaactaatcatcgtctaacgatataccaaagcagtcatcttcattttggtagaatggatcatcttcctggtcatcattattctcggatgattcggcttctttcttggggagttcttcttcttcttcttgttgaagtagttggagaacttccttaagattctgagcaagactctctttagattttgagcttgctaagaacgctgcaagttgagacttttgattcagaaacaaagatgtctctggatcagcaggcttgagaaactcagagttgctctgaaaccagttcttgacttgttctggagcagcctttggggtatcgaattgtgaccaccattttacaaaggcatgtctctgcaatggtgggtactgtttgctgttttcggtttttccatatctgtattgccatcaaaaaa

SEQ ID NO: 13541 - DNA, 1137 bp, Glycine max
  Gm_smallRNAprecursor_6374
agaggttttccctaggcagagcttctctctctaaaacttggttttgagactatctgaaagggtgcctcacaaagggaacgaggactcctttaaatagacccaatattttactgtttcaacagtatcagtaatgtttaccggaactgttacaaaaacttttacaaattacattattatcgggaaccgaataattagttacaataattcatgattactacaactaactaatcatcgtctaacgatataccaaagcagtcatcttcattttggtagaatggatcatcttcctggtcatcattattctcggatgattcggcttctttcttggggagttcttcttcttcttcttgttgaagtagttggagaacttccttaagattctgagcaagactctctttagattttgagcttgctaagaacgctgcaagttgagacttttgattcagaaacaaagatgtctctggatcagcaggcttgagaaactcagagttgctctgaaaccagttcttgacttgttctggagcagcctttggggtatcgaattgtgaccaccattttacaaaggcatgtctctgcaatggtgggtactgtttgctgttttcggtttttccatatctgtattgccatcaaaaaatccatgacaaggcaaaactggaaaagtactttaaatctgccggaattcttgattccttgctattgaagagcttgctgaattgttggaatccctgttggacttcttctggaaatatttgcggaattggtccgaagtagttccaccattggaggaaccaatttggaaaattatacatagtgttattcttgaagtaaattagccatgaatgcttaaatttactattttgatgccaaaacacattggtccaggcgtcaatgtagttccaataattgtatcctacaggatcaaaaggtgcagagaattttttgggttggtttaagtttgagccataatgtcatggctgcataacctttagaatttggattgtggaatgggtatttaggtttggatctttggggatctttgaagggtttaatagatactgagtttgtatctattagaatgaattcgtagaattttttggttttatttgtggctgttggcctataatgcaatcccggggg

SEQ ID NO: 13542 - DNA, 1137 bp, Glycine max; identical to SEQ ID NO: 13541
  Gm_smallRNAprecursor_6375

SEQ ID NO: 13543 - DNA, 1069 bp, Glycine max
  Gm_smallRNAprecursor_6376
ttaccggaactgttacaaaaacttttacaaattacattattatcgggaaccgaataattagttacaataattcatgattactacaactaactaatcatcgtctaacgatataccaaagcagtcatcttcattttggtagaatggatcatcttcctggtcatcattattctcggatgattcggcttctttcttggggagttcttcttcttcttcttgttgaagtagttggagaacttccttaagattctgagcaagactctctttagattttgagcttgctaagaacgctgcaagttgagacttttgattcagaaacaaagatgtctctggatcagcaggcttgagaaactcagagttgctctgaaaccagttcttgacttgttctggagcagcctttggggtatcgaattgtgaccaccattttacaaaggcatgtctctgcaatggtgggtactgtttgctgttttcggtttttccatatctgtattgccatcaaaaaatccatgacaaggcaaaactggaaaagtactttaaatctgccggaattcttgattccttgctattgaagagcttgctgaattgttggaatccctgttggacttcttctggaaatatttgcggaattggtccgaagtagttccaccattggaggaaccaatttggaaaattatacatagtgttattcttgaagtaaattagccatgaatgcttaaatttactattttgatgccaaaacacattggtccaggcgtcaatgtagttccaataattgtatcctacaggatcaaaaggtgcagagaattttttgggttggtttaagtttgagccataatgtcatggctgcataacctttagaatttggattgtggaatgggtatttaggtttggatctttggggatctttgaagggtttaatagatactgagtttgtatctattagaatgaattcgtagaattttttggttttatttgtggctgttggcctataatgcaatcccgggggaaatactttggcggttgccttgaaaggattcttgtcccagtattctggttccatttgcaagacatt

SEQ ID NO: 13544 - DNA, 1070 bp, Glycine max
  Gm_smallRNAprecursor_6377
caactaactaatcatcgtctaacgatataccaaagcagtcatcttcattttggtagaatggatcatcttcctggtcatcattattctcggatgattcggcttctttcttggggagttcttcttcttcttcttgttgaagtagttggagaacttccttaagattctgagcaagactctctttagattttgagcttgctaagaacgctgcaagttgagacttttgattcagaaacaaagatgtctctggatcagcaggcttgagaaactcagagttgctctgaaaccagttcttgacttgttctggagcagcctttggggtatcgaattgtgaccaccattttacaaaggcatgtctctgcaatggtgggtactgtttgctgttttcggtttttccatatctgtattgccatcaaaaaatccatgacaaggcaaaactggaaaagtactttaaatctgccggaattcttgattccttgctattgaagagcttgctgaattgttggaatccctgttggacttcttctggaaatatttgcggaattggtccgaagtagttccaccattggaggaaccaatttggaaaattatacatagtgttattcttgaagtaaattagccatgaatgcttaaatttactattttgatgccaaaacacattggtccaggcgtcaatgtagttccaataattgtatcctacaggatcaaaaggtgcagagaattttttgggttggtttaagtttgagccataatgtcatggctgcataacctttagaatttggattgtggaatgggtatttaggtttggatctttggggatctttgaagggtttaatagatactgagtttgtatctattagaatgaattcgtagaattttttggttttatttgtggctgttggcctataatgcaatcccgggggaaatactttggcggttgccttgaaaggattcttgtcccagtattctggttccatttgcaagacattgaagaatttgtttttggaaatatagctattgctgggttgtggtgttgattcttgttgggtcaactgttggcttggtttttggtt

SEQ ID NO: 13545 - DNA, 1121 bp, Glycine max
  Gm_smallRNAprecursor_6378
tgttggttttggggattcctgagttgatgactcaggtttaacggtagttatctgggtcaatgacccttcacgctttcctttctgggttgatgacccagtctgagtaggtgacccagaagatgatgtagttgccttcttggttattggctctggtagagccaatataacatctttacctttagtactggatcttcctcctctgccggaggagctagacaccttaggaggcatcgggaattttctgtaaaaattcatgggtgaggtagtcaggtagagagtttgaagagcccttgatatattctgttaaaatcaaagacgcttaaaattgcttgccatcttgcaaaaatttgttttgaggcaaggttttttacatccttttgtaaaatgtctttggctgatttgcagtcaacccttactaaaaatttttgattcaataaatcagattgaaatttggaaatgcacaaaacaattgctaaaacttcctttttaacagttgaatattttaattgtgcaggattccaatgttttgaagtatatgcaatgacatgttcttgaccatgtatttgctgtttaaggatgccaccgtaaccaatgtctgatgcatcagtttcgacaattttgaatgcctgtggaatgggaagatacaaacattttatggattggactttgactttgatttctttgactgtttgagtatggaggtcagaccaagaaggcggattctttttcagcctatcatgtaatggtttgacaatattgtttagataggggacaaattctcctacataatttaggcaccccagaaatcgttgtaactgggtcttgtctaagatttggttagggaatttgctggcaaattctattgatctttctattgggatgattgtgccttggtatatattgtgtccaaggaatcgtatccgagtctggaaaagattgatctttgatttggagactggcaaaccattctgtttaatgatatggatgaaagtctggaggtgtttaaaatgttgatcaatattttgggagaagattaaaacatcatcaatgtaaacaatgacgaattttgaataaggattgaaaatatcattcatgattttttgaaattctgaaggggcatt

SEQ ID NO: 13546 - DNA, 1121 bp, Glycine max; identical to SEQ ID NO: 13545
  Gm_smallRNAprecursor_6379

SEQ ID NO: 13547 - DNA, 1161 bp, Glycine max
  Gm_smallRNAprecursor_6380
gagtctggaaaagattgatctttgatttggagactggcaaaccattctgtttaatgatatggatgaaagtctggaggtgtttaaaatgttgatcaatattttgggagaagattaaaacatcatcaatgtaaacaatgacgaattttgaataaggattgaaaatatcattcatgattttttgaaattctgaaggggcattcttcagtccgaatggcattacattccactcatattgcccgaaaggtacagtaaacgctgttttgtacctatctgattcttgaatttggatttgccagaatccggatttcatgtcaaattttgagaatacctttgcagaatttaatctgttaagtaggtcttttttgtttggaataggatacctgatccattgtaatgcttgatttaacggtttgtaatttatgactaagcggggtgttcctcgctcaatttcggattgtttgttgacgtaaaaagccgcacaagaccatggacttttacttttccgaattaaacctttatcaagtaaatctttaatttctttttggcaatattgaaggagttcttcattcatttggattggtcttgcttttgtgggaatttgttttttcctaaaatctttctcataaggaagatcaacaatatgtttctttctgtcccaaaatgcatgtggcaattcagaacaaacggttgattctatatgacttaataaagattggattttcttctttatttggggttttcctagttgtatttggatattatataacgatacttcttcttttaagaagttaatttgattaatcttattctttataaaatttatatttctggagattggtttagtagaaaaattaaatataatttttcttcctaaataacttgtagttattcattcattagatatttggatgggaaataaagctcttatgaagggagttcctaggattacctcgttcttaaggttttttaccagaagaaagtttgtgttaatcttaagaccttggttttcaataattgcatttgataacttaaagttaatttttaattttgagccatttgttgtactaagtttctccgaggttttctcaaagaattttgtaggaattaatccttctaaaatacagtttgagtcagcccctgtgtcgaatagagccattgtct

SEQ ID NO: 13548 - DNA, 1058 bp, Glycine max
  Gm_smallRNAprecursor_6381
aatatgaggatttaattttataacaaattttatatgtttatttttttaatttaatattttattaaaaattattttattcctaatctttctcattcaattcttaatttcataattctgaattccttggtgagtactacaggccactatagcataaagcattggtaatatgtcttatgcagaatgaagatcaagtgtttcaacaatgtaaccagaggtggtatcataagtgctagccacaaggttgataataataataataataataataataataataataataataataatgcagaatgaagatcaattatgcagtaaactttattgagggcaaaatccaccctccgtaatatgcccctagatatagtatagtattccaagtttagtttgacggtagaatatgcccctagatttggcggatacgttaagtgtgaagcatggttatcaaactctcgagttaactcgctaactcttacgagtttccgagtccacttgtcctctacgagttgactcttgagtaaattctttttttagtagactctaggtaaactctataaactctaagtaaactcggtagactcttgagtttaccaccgagtcaacgagttagcaagttaaaaaaattagacaaaaatgtaagtaattttttattgttttctgtctgtttagcattcaacataccttttaatatgttattctcaaatacaaaattctcacctttaataatatcaaactcttgttctctaataaaatcaccctcgatgagaataatctaccactactataacctctacaagttattgtttaatggtgatgtattattactagacttggttatttaaatattctgaactttatgatttactgttttgctttattatattgttgaaattttaattagtatgttatttatagatattttgttattatttttatatgaagtagactcttacgagtctacgagttgagtctacgaatcgagtctataaaactctcacgagtctgcgtaaactctcgaatttgataactttggtgtgaagtgtgaagcaaaactagaa

SEQ ID NO: 13549 - DNA, 1053 bp, Glycine max
  Gm_smallRNAprecursor_6382
tatgaggatttaattttataacaaattttatatgtttatttttttaatttaatattttattaaaaattattttattcctaatctttctcattcaattcttaatttcataattctgaattccttggtgagtactacaggccactatagcataaagcattggtaatatgtcttatgcagaatgaagatcaagtgtttcaacaatgtaaccagaggtggtatcataagtgctagccacaaggttgataataataataataataataataataataataataataataataatgcagaatgaagatcaattatgcagtaaactttattgagggcaaaatccaccctccgtaatatgcccctagatatagtatagtattccaagtttagtttgacggtagaatatgcccctagatttggcggatacgttaagtgtgaagcatggttatcaaactctcgagttaactcgctaactcttacgagtttccgagtccacttgtcctctacgagttgactcttgagtaaattctttttttagtagactctaggtaaactctataaactctaagtaaactcggtagactcttgagtttaccaccgagtcaacgagttagcaagttaaaaaaattagacaaaaatgtaagtaattttttattgttttctgtctgtttagcattcaacataccttttaatatgttattctcaaatacaaaattctcacctttaataatatcaaactcttgttctctaataaaatcaccctcgatgagaataatctaccactactataacctctacaagttattgtttaatggtgatgtattattactagacttggttatttaaatattctgaactttatgatttactgttttgctttattatattgttgaaattttaattagtatgttatttatagatattttgttattatttttatatgaagtagactcttacgagtctacgagttgagtctacgaatcgagtctataaaactctcacgagtctgcgtaaactctcgaatttgataactttggtgtgaagtgtgaagcaaaacta

SEQ ID NO: 13550 - DNA, 1033 bp, Glycine max
  Gm_smallRNAprecursor_6383
aaaaggttcttacgaaaattgtcaaaggtagtattatacttgtacttgacctaattcatcaatatcactacataaacaattagtcaaactaaaactagtaatatgatcccatttgctagctctcctctcttattttctaaggactttataagtaactttatattcttttaaactacttggtgtcaattcataatttatgtgtttactgaagaacaaagtcgttttgttctgtaaaagaaaatttgatgcaaaattacatttttggtcccccagtttatctccagttttggatttggtcccccagtaatttaattcatgaatttggtccttctattttgtaaaatcgtgcaatgttggtcccccaagctacaattggacgttgaccgttaacaagtgatgctaactgccacgtgccacattcttattagatgatgattgccatgtgtcatattctgattggtcaatgaaaacaacaatgtatttcatctttcatgaagttgacatccaatcagaacatgacacgtggcagtcatcatccaataagaacgtgacacgtggtagtcaacatcacttgttatgctataaaactcagggaccaaatttacaattttgtcaaaattttacattacaatttcccatttatgctataatataaggatttcattttttaagtggaagtctggattttatgtttactaaaattctaatgctatcatgtgatacactatatagtttatagaacaatattgtaacctatttggtatcaccttacatgatgaattgaatgtactatgtataggttagtcatcaagctcctataattgtaggttttggtgctgaaatctcaacttccaatgttgagggttgcttctcaagggtatgtggtgtagctccatgtagagcttgtaggccttggatcttcttcatcaatggagtcatttgcttcttgagaatcaatggcagccgaatcgagaagaaggaaaggtgattggagatgccacttcaaggagaaaatgattcaagaacaagctca

SEQ ID NO: 13551 - DNA, 1164 bp, Glycine max
  Gm_smallRNAprecursor_6384
gatatatatattgcctactttcaaaaacgagccccgacgggtgcaaagaaacgcgaggaactggaaccagagaagcggcacacaaaccaaggcaggaatttagcattcaagaggtcaaatttttctctccttgtggctgagtatgaagtcacatcaagagaaaaagtgggcccctttcgctccacccaaaatgagacatgtggcatggcttttagaaaaaggaaagagaaaatctttttaaaataaaagccaaattctctctcttcattcagattttagaaaagcttttcctcccccttcccacattgcttttctcttcttcttcctctgcattgaagcctccattaaagctccaaaattgctcatcacttctactccaaattgcaaaaggaagccattttcggagtcgtgaaacgctcctctacgttgtgggacttcaaatttcaggtatgggtggactttttctcacatgaaattcgtgggtattgggtctttgggagatatgatgggtagttctactaggtttatgccttatggtagttatttgtgaaggagtttgttgaaagcatgctaaacttgacatgtttgatgtgagtaaagctatccattctgttttagggttttatgatgatgctttgtgatatttgtatgctgaaattgttggtagaaaactggtagagatgatggggagagttaacctagggttaaatgtgagaatggtagtgatgtgagtggaaaagtgtgagattttgagggtttgaaaagctaaatttggggttagtggtaattggagtctaaagtgagttgatcctagtttaaaatgtcaattaggacttgtaggaaagcttgggcagagcaaatgagaaaaatgagtgacaaatgtgaaagcaagagtcatttctagggtaaattgggtgttgaggggtcaaatcttgaatcggtagagttttcgccttaaaatcactttgagcaagtctaaattaatgttatatacttgtttgagatgagaatttactccaaaattaccccattctcattttcacttctcaaaccttgaaaattcactcaattaatgggttttggatacctagatttggatttaccttgatctgaagcttgtttttggtttaaatacaatttatacatgatttaggacttgtagga

SEQ ID NO: 13552 - DNA, 1153 bp, Glycine max
  Gm_smallRNAprecursor_6385
ttcgttgactctgacatatgtacctggcagttccagtcatccatgttttgattaatatcttcgaatcggacttcctcatcgaagagattgtgttttggggcgacctcttgggtctggttatcttgatcatttaagagattggtgtttcttgaagaagatgaagaggaggaatttgagcgaaaagagatacgggaaaaggatcgcaataatctagacataattaaaacattctctaatatctttgccttcatttggttccataggaatcttcccataaggctatatgttacagaacttcttggatctgaataaatgaaaaagaagattttttttttttcaccgacaatatagtttgaacattactcctatagccaccagtatattatgtctcaatattttgtttgaacaatacaccttagccttactgccctttctcatccacgggacttactgctacagtatcattcaactaaaatatcagactgctgtgcttccagaaaatactgttcaaacacatactgtttaaattaaaattactgtacatgcttcagatccgtaagttcagttaacatatgcccttacggacactattcctacttccccatcaggctctgataccagaggtcagcggagtaggatcaaacggacagataggaagtaagaatgcagtatgattgaaatgaaaatataaacttgaaaatagatatcaagggcacaccgaaacggcttacaaacccaggtttttgaaaacaaagaaaccgaagcggcggcagagccgcacaggatcggtggagggagaagagagaaggatgaaaaatagaaatttattggatctagaaagaagcgcttacaaaaatcttgtttcagagcacctctcttccgaaacctgaaaaatggctaaatgaaagggcatatgttaactgaacttacggatctgaagcatgtacagtaattttaatttaaacagtatgtgtttgaacagtattttctggaagcacagcagtctgatattttagttgaatgatactgtagcagtaagtcccgtggatgagaaagggcagtaaggctaaggtgtattgttcaaacaaaatattgagacataatatactggtggctataggagtaatgttcaaactatattgtcggtgaaaaa

SEQ ID NO: 13553 - DNA, 1064 bp, Glycine max
  Gm_smallRNAprecursor_6386
ttgactctgacatatgtacctggcagttccagtcatccatgttttgattaatatcttcgaatcggacttcctcatcgaagagattgtgttttggggcgacctcttgggtctggttatcttgatcatttaagagattggtgtttcttgaagaagatgaagaggaggaatttgagcgaaaagagatacgggaaaaggatcgcaataatctagacataattaaaacattctctaatatctttgccttcatttggttccataggaatcttcccataaggctatatgttacagaacttcttggatctgaataaatgaaaaagaagattttttttttttcaccgacaatatagtttgaacattactcctatagccaccagtatattatgtctcaatattttgtttgaacaatacaccttagccttactgccctttctcatccacgggacttactgctacagtatcattcaactaaaatatcagactgctgtgcttccagaaaatactgttcaaacacatactgtttaaattaaaattactgtacatgcttcagatccgtaagttcagttaacatatgcccttacggacactattcctacttccccatcaggctctgataccagaggtcagcggagtaggatcaaacggacagataggaagtaagaatgcagtatgattgaaatgaaaatataaacttgaaaatagatatcaagggcacaccgaaacggcttacaaacccaggtttttgaaaacaaagaaaccgaagcggcggcagagccgcacaggatcggtggagggagaagagagaaggatgaaaaatagaaatttattggatctagaaagaagcgcttacaaaaatcttgtttcagagcacctctcttccgaaacctgaaaaatggctaaatgaaagggcatatgttaactgaacttacggatctgaagcatgtacagtaattttaatttaaacagtatgtgtttgaacagtattttctggaagcacagcagtctgatattttagttgaatgatactgtagcagtaagtcccgtggatgagaaagggcagtaaggct

SEQ ID NO: 13554 - DNA, 1157 bp, Glycine max
  Gm_smallRNAprecursor_6387
ggctaaatgaaagggcatatgttaactgaacttacggatctgaagcatgtacagtaattttaatttaaacagtatgtgtttgaacagtattttctggaagcacagcagtctgatattttagttgaatgatactgtagcagtaagtcccgtggatgagaaagggcagtaaggctaaggtgtattgttcaaacaaaatattgagacataatatactggtggctataggagtaatgttcaaactatattgtcggtgaaaaaaaaaaaatcttctttttcatttattcagatccaagaagttctgtaacatatagccttatgggaagattcctattgaaccaaatgaaggcaaagatattagagaatgttttaattatgtctagattattgcgatccttttcccgtatctcttttcgctcaaattcctcctcttcatcttcttcaagaaacaccaatctcttaaatgatcaagataaccagacccaagaggtcgccccaaaacacaatctcttcgatgaggaagtccgattcgaagatattaatcaaaacatggatgactggaacattccagaaatccctcaggatcaactatacgttcctgaaacaattaaagacaaacacaactttgattacataatcaaaacagtagaaaacaatattcctctaggacaagatataggggaagaatttcatctactttcaaaaaattcaatttatgaacatagccgtaagtataaatatctacacatcggttgtgtacaagtagccatcaagcccttaattgatatgggcatagatgcagcagttttaatgtgtctaagagatattaggcataatcaatttgaagactccctaattggaacagtcgaaatcagcctaggacagggtccaatatattttaattgttatccaaacaaaacagtgagtctgatggacagaaacattcttgactctctgttcttaaacatccactttcatggccttgacatgaaagaaggatcaatcctagcagccttaatttataggatccagtacaaggtcatgaatacttgtgcatctagagtcctgttaaaacctcaaaaaggagaaacaaccttgtttatcactgatatgacaaaggctaacgtgtctctcccgagaaaaataaaatgggatgaggt

SEQ ID NO: 13555 - DNA, 1047 bp, Glycine max
  Gm_smallRNAprecursor_6388
cataatatactggtggctataggagtaatgttcaaactatattgtcggtgaaaaaaaaaaaatcttctttttcatttattcagatccaagaagttctgtaacatatagccttatgggaagattcctattgaaccaaatgaaggcaaagatattagagaatgttttaattatgtctagattattgcgatccttttcccgtatctcttttcgctcaaattcctcctcttcatcttcttcaagaaacaccaatctcttaaatgatcaagataaccagacccaagaggtcgccccaaaacacaatctcttcgatgaggaagtccgattcgaagatattaatcaaaacatggatgactggaacattccagaaatccctcaggatcaactatacgttcctgaaacaattaaagacaaacacaactttgattacataatcaaaacagtagaaaacaatattcctctaggacaagatataggggaagaatttcatctactttcaaaaaattcaatttatgaacatagccgtaagtataaatatctacacatcggttgtgtacaagtagccatcaagcccttaattgatatgggcatagatgcagcagttttaatgtgtctaagagatattaggcataatcaatttgaagactccctaattggaacagtcgaaatcagcctaggacagggtccaatatattttaattgttatccaaacaaaacagtgagtctgatggacagaaacattcttgactctctgttcttaaacatccactttcatggccttgacatgaaagaaggatcaatcctagcagccttaatttataggatccagtacaaggtcatgaatacttgtgcatctagagtcctgttaaaacctcaaaaaggagaaacaaccttgtttatcactgatatgacaaaggctaacgtgtctctcccgagaaaaataaaatgggatgaggtaactcttcccgaaagatgggttatgaataaggccacaccgtctattccccgacccgctccaaccatagagcatattaagcaagataactccgg

SEQ ID NO: 13556 - DNA, 1126 bp, Glycine max
  Gm_smallRNAprecursor_6389
aagattaacacaaactttcttctggtaaaaaaccttaagaatgaagtaatcttaggaacgcccttcattagagccctgtttcccatccaaatatctaatgaaggaataaccacaaattatttaggaagaaaaattatatttaatttttctactaaaccaatttccagaaatataaatcttatagaaaataagattaatcaaattaacttcttaaaagaagaagtatcttttaataatattcagatacaactgggaaaaccccaagtaaaagaaagaattcaatctttattaaatcatattgaatcgaccgtttgttccgaattgccacatgcattttgggacagaaagaaacatattgtcgatctcccttatgagaaagactttagggaaaaacaaattcccacaaaagccagaccaatccaaatgaatgaagaacttcttcaatactgtcaaaaggaaatcaaggatttgcttgataaaggcctaatccggaaaagcaaaagcccatggtcttgtgcggctttttatgttaacaaacaatctgagattgagcgtggaacaccctgcttagtcataaattacaaaccattaaatcaagcattacaatggattagatatcctattccaaacaaaaaagatttgcttaacagattaaattctgcaaagatattttcaaaatttgatatgaaatctggattttggcaaatccaaatccaagaatcagataggtacaaaacagcgtttactgtacctttcgggcaatatgaatggaacgtgatgccattcggactgaagaatgccccttcagaatttcaaaaaattatgaacgatatttttaatccttattcaaaatttgtcattgtctacatagatgatgttttaatcttttcccaaaacattgaccaacatttcaaacatctccaaaccttcatacatatcatcaaacaaaatggtttggcagtctccaaatcaaaaatcaatcttttccaaactcgaattcgattccttggtcacaatatatatcaaggtacaatcattccaatcgaaaggtcaatagagtttgctagcaaattccccaaccaaatcttagacaaaacccagttacaaagatttctaggttgtctaa

SEQ ID NO: 13557 - DNA, 1063 bp, Glycine max
  Gm_smallRNAprecursor_6390
gtttcccatccaaatatctaatgaaggaataaccacaaattatttaggaagaaaaattatatttaatttttctactaaaccaatttccagaaatataaatcttatagaaaataagattaatcaaattaacttcttaaaagaagaagtatcttttaataatattcagatacaactgggaaaaccccaagtaaaagaaagaattcaatctttattaaatcatattgaatcgaccgtttgttccgaattgccacatgcattttgggacagaaagaaacatattgtcgatctcccttatgagaaagactttagggaaaaacaaattcccacaaaagccagaccaatccaaatgaatgaagaacttcttcaatactgtcaaaaggaaatcaaggatttgcttgataaaggcctaatccggaaaagcaaaagcccatggtcttgtgcggctttttatgttaacaaacaatctgagattgagcgtggaacaccctgcttagtcataaattacaaaccattaaatcaagcattacaatggattagatatcctattccaaacaaaaaagatttgcttaacagattaaattctgcaaagatattttcaaaatttgatatgaaatctggattttggcaaatccaaatccaagaatcagataggtacaaaacagcgtttactgtacctttcgggcaatatgaatggaacgtgatgccattcggactgaagaatgccccttcagaatttcaaaaaattatgaacgatatttttaatccttattcaaaatttgtcattgtctacatagatgatgttttaatcttttcccaaaacattgaccaacatttcaaacatctccaaaccttcatacatatcatcaaacaaaatggtttggcagtctccaaatcaaaaatcaatcttttccaaactcgaattcgattccttggtcacaatatatatcaaggtacaatcattccaatcgaaaggtcaatagagtttgctagcaaattccccaaccaaatcttagacaaaacccagttacaaagatttctaggttgtctaaattacgtaggagaa

SEQ ID NO: 13558 - DNA, 1234 bp, Glycine max
  Gm_smallRNAprecursor_6391
cccaagtaaaagaaagaattcaatctttattaaatcatattgaatcgaccgtttgttccgaattgccacatgcattttgggacagaaagaaacatattgtcgatctcccttatgagaaagactttagggaaaaacaaattcccacaaaagccagaccaatccaaatgaatgaagaacttcttcaatactgtcaaaaggaaatcaaggatttgcttgataaaggcctaatccggaaaagcaaaagcccatggtcttgtgcggctttttatgttaacaaacaatctgagattgagcgtggaacaccctgcttagtcataaattacaaaccattaaatcaagcattacaatggattagatatcctattccaaacaaaaaagatttgcttaacagattaaattctgcaaagatattttcaaaatttgatatgaaatctggattttggcaaatccaaatccaagaatcagataggtacaaaacagcgtttactgtacctttcgggcaatatgaatggaacgtgatgccattcggactgaagaatgccccttcagaatttcaaaaaattatgaacgatatttttaatccttattcaaaatttgtcattgtctacatagatgatgttttaatcttttcccaaaacattgaccaacatttcaaacatctccaaaccttcatacatatcatcaaacaaaatggtttggcagtctccaaatcaaaaatcaatcttttccaaactcgaattcgattccttggtcacaatatatatcaaggtacaatcattccaatcgaaaggtcaatagagtttgctagcaaattccccaaccaaatcttagacaaaacccagttacaaagatttctaggttgtctaaattacgtaggagaatttgtcccctatttaaataatattgtcaagccattacatgataggctgaagaaaaatccacctccttggtctgacctccatacacaaacggttaaagaaatcaaagtcaaagtccaatccattaaatgtctgtatcttcctattccacaggcatttaaaattgtcgaaactgatgcttcagacataggttatggtggcatcctcaaacaaagagtccatggccaagatcatgtcattgcatatacatcaaaacattggaatcctgcacaattaaaatattcaactgttaaaaaaagaggttttagcaattgttttgtgcatttccaaatttcaatcggatttattaaaccaaa

SEQ ID NO: 13559 - DNA, 1080 bp, Glycine max
  Gm_smallRNAprecursor_6392
aaaagcaaaagcccatggtcttgtgcggctttttatgttaacaaacaatctgagattgagcgtggaacaccctgcttagtcataaattacaaaccattaaatcaagcattacaatggattagatatcctattccaaacaaaaaagatttgcttaacagattaaattctgcaaagatattttcaaaatttgatatgaaatctggattttggcaaatccaaatccaagaatcagataggtacaaaacagcgtttactgtacctttcgggcaatatgaatggaacgtgatgccattcggactgaagaatgccccttcagaatttcaaaaaattatgaacgatatttttaatccttattcaaaatttgtcattgtctacatagatgatgttttaatcttttcccaaaacattgaccaacatttcaaacatctccaaaccttcatacatatcatcaaacaaaatggtttggcagtctccaaatcaaaaatcaatcttttccaaactcgaattcgattccttggtcacaatatatatcaaggtacaatcattccaatcgaaaggtcaatagagtttgctagcaaattccccaaccaaatcttagacaaaacccagttacaaagatttctaggttgtctaaattacgtaggagaatttgtcccctatttaaataatattgtcaagccattacatgataggctgaagaaaaatccacctccttggtctgacctccatacacaaacggttaaagaaatcaaagtcaaagtccaatccattaaatgtctgtatcttcctattccacaggcatttaaaattgtcgaaactgatgcttcagacataggttatggtggcatcctcaaacaaagagtccatggccaagatcatgtcattgcatatacatcaaaacattggaatcctgcacaattaaaatattcaactgttaaaaaaagaggttttagcaattgttttgtgcatttccaaatttcaatcggatttattaaaccaaaaatttttaatcagggttgattgtaaatcagccaaagatattttacaaaaagatgttaaaaaccttgcctcaaaacaaat

SEQ ID NO: 13560 - DNA, 1095 bp, Glycine max
  Gm_smallRNAprecursor_6393
tgaatggaacgtgatgccattcggactgaagaatgccccttcagaatttcaaaaaattatgaacgatatttttaatccttattcaaaatttgtcattgtctacatagatgatgttttaatcttttcccaaaacattgaccaacatttcaaacatctccaaaccttcatacatatcatcaaacaaaatggtttggcagtctccaaatcaaaaatcaatcttttccaaactcgaattcgattccttggtcacaatatatatcaaggtacaatcattccaatcgaaaggtcaatagagtttgctagcaaattccccaaccaaatcttagacaaaacccagttacaaagatttctaggttgtctaaattacgtaggagaatttgtcccctatttaaataatattgtcaagccattacatgataggctgaagaaaaatccacctccttggtctgacctccatacacaaacggttaaagaaatcaaagtcaaagtccaatccattaaatgtctgtatcttcctattccacaggcatttaaaattgtcgaaactgatgcttcagacataggttatggtggcatcctcaaacaaagagtccatggccaagatcatgtcattgcatatacatcaaaacattggaatcctgcacaattaaaatattcaactgttaaaaaaagaggttttagcaattgttttgtgcatttccaaatttcaatcggatttattaaaccaaaaatttttaatcagggttgattgtaaatcagccaaagatattttacaaaaagatgttaaaaaccttgcctcaaaacaaatttttgcacgatggcaagcaattttaagtgtctttgattttgacatagaatacatcaagggcacctcaaattcactacctgactaccttacccgtgaattcttacagaaaagtggtaatgcctcctaaggcatcgggaatctccctacggggaggaaggagtacaggcaaaggagccaggctggctcttccagagccaaccatcaagaaatcatctacctcttctgggtcaccaacccaggctgggtcatctacccagaaaaccaatttagaagggtcatcaacccag

SEQ ID NO: 13561 - DNA, 1095 bp, Glycine max; identical to SEQ ID NO: 13560
  Gm_smallRNAprecursor_6394

SEQ ID NO: 13562 - DNA, 1095 bp, Glycine max; identical to SEQ ID NO: 13560
  Gm_smallRNAprecursor_6395

SEQ ID NO: 13563 - DNA, 1095 bp, Glycine max; identical to SEQ ID NO: 13560
  Gm_smallRNAprecursor_6396

SEQ ID NO: 13564 - DNA, 1035 bp, Glycine max
  Gm_smallRNAprecursor_6397
attgtctacatagatgatgttttaatcttttcccaaaacattgaccaacatttcaaacatctccaaaccttcatacatatcatcaaacaaaatggtttggcagtctccaaatcaaaaatcaatcttttccaaactcgaattcgattccttggtcacaatatatatcaaggtacaatcattccaatcgaaaggtcaatagagtttgctagcaaattccccaaccaaatcttagacaaaacccagttacaaagatttctaggttgtctaaattacgtaggagaatttgtcccctatttaaataatattgtcaagccattacatgataggctgaagaaaaatccacctccttggtctgacctccatacacaaacggttaaagaaatcaaagtcaaagtccaatccattaaatgtctgtatcttcctattccacaggcatttaaaattgtcgaaactgatgcttcagacataggttatggtggcatcctcaaacaaagagtccatggccaagatcatgtcattgcatatacatcaaaacattggaatcctgcacaattaaaatattcaactgttaaaaaaagaggttttagcaattgttttgtgcatttccaaatttcaatcggatttattaaaccaaaaatttttaatcagggttgattgtaaatcagccaaagatattttacaaaaagatgttaaaaaccttgcctcaaaacaaatttttgcacgatggcaagcaattttaagtgtctttgattttgacatagaatacatcaagggcacctcaaattcactacctgactaccttacccgtgaattcttacagaaaagtggtaatgcctcctaaggcatcgggaatctccctacggggaggaaggagtacaggcaaaggagccaggctggctcttccagagccaaccatcaagaaatcatctacctcttctgggtcaccaacccaggctgggtcatctacccagaaaaccaatttagaagggtcatcaacccagattgcctcaatcaaacctgagccatccactcagg

SEQ ID NO: 13565 - DNA, 1035 bp, Glycine max; identical to SEQ ID NO: 13564
  Gm_smallRNAprecursor_6398

SEQ ID NO: 13566 - DNA, 1114 bp, Glycine max
  Gm_smallRNAprecursor_6399
attgtctacatagatgatgttttaatcttttcccaaaacattgaccaacatttcaaacatctccaaaccttcatacatatcatcaaacaaaatggtttggcagtctccaaatcaaaaatcaatcttttccaaactcgaattcgattccttggtcacaatatatatcaaggtacaatcattccaatcgaaaggtcaatagagtttgctagcaaattccccaaccaaatcttagacaaaacccagttacaaagatttctaggttgtctaaattacgtaggagaatttgtcccctatttaaataatattgtcaagccattacatgataggctgaagaaaaatccacctccttggtctgacctccatacacaaacggttaaagaaatcaaagtcaaagtccaatccattaaatgtctgtatcttcctattccacaggcatttaaaattgtcgaaactgatgcttcagacataggttatggtggcatcctcaaacaaagagtccatggccaagatcatgtcattgcatatacatcaaaacattggaatcctgcacaattaaaatattcaactgttaaaaaaagaggttttagcaattgttttgtgcatttccaaatttcaatcggatttattaaaccaaaaatttttaatcagggttgattgtaaatcagccaaagatattttacaaaaagatgttaaaaaccttgcctcaaaacaaatttttgcacgatggcaagcaattttaagtgtctttgattttgacatagaatacatcaagggcacctcaaattcactacctgactaccttacccgtgaattcttacagaaaagtggtaatgcctcctaaggcatcgggaatctccctacggggaggaaggagtacaggcaaaggagccaggctggctcttccagagccaaccatcaagaaatcatctacctcttctgggtcaccaacccaggctgggtcatctacccagaaaaccaatttagaagggtcatcaacccagattgcctcaatcaaacctgagccatccactcaggaatctcccaaaccggcaaccgccaaacaaacatcggccgactatgcatggccaattgaaacccttcaggcccttcaaga

SEQ ID NO: 13567 - DNA, 1114 bp, Glycine max; identical to SEQ ID NO: 13566
  Gm_smallRNAprecursor_6400

SEQ ID NO: 13568 - DNA, 1115 bp, Glycine max
  Gm_smallRNAprecursor_6401
attgtctacatagatgatgttttaatcttttcccaaaacattgaccaacatttcaaacatctccaaaccttcatacatatcatcaaacaaaatggtttggcagtctccaaatcaaaaatcaatcttttccaaactcgaattcgattccttggtcacaatatatatcaaggtacaatcattccaatcgaaaggtcaatagagtttgctagcaaattccccaaccaaatcttagacaaaacccagttacaaagatttctaggttgtctaaattacgtaggagaatttgtcccctatttaaataatattgtcaagccattacatgataggctgaagaaaaatccacctccttggtctgacctccatacacaaacggttaaagaaatcaaagtcaaagtccaatccattaaatgtctgtatcttcctattccacaggcatttaaaattgtcgaaactgatgcttcagacataggttatggtggcatcctcaaacaaagagtccatggccaagatcatgtcattgcatatacatcaaaacattggaatcctgcacaattaaaatattcaactgttaaaaaaagaggttttagcaattgttttgtgcatttccaaatttcaatcggatttattaaaccaaaaatttttaatcagggttgattgtaaatcagccaaagatattttacaaaaagatgttaaaaaccttgcctcaaaacaaatttttgcacgatggcaagcaattttaagtgtctttgattttgacatagaatacatcaagggcacctcaaattcactacctgactaccttacccgtgaattcttacagaaaagtggtaatgcctcctaaggcatcgggaatctccctacggggaggaaggagtacaggcaaaggagccaggctggctcttccagagccaaccatcaagaaatcatctacctcttctgggtcaccaacccaggctgggtcatctacccagaaaaccaatttagaagggtcatcaacccagattgcctcaatcaaacctgagccatccactcaggaatctcccaaaccggcaaccgccaaacaaacatcggccgactatgcatggccaattgaaacccttcaggcccttcaagac

SEQ ID NO: 13569 - DNA, 1115 bp, Glycine max; identical to SEQ ID NO: 13568
  Gm_smallRNAprecursor_6402

SEQ ID NO: 13570 - DNA, 1091 bp, Glycine max
  Gm_smallRNAprecursor_6403
caattttaagtgtctttgattttgacatagaatacatcaagggcacctcaaattcactacctgactaccttacccgtgaattcttacagaaaagtggtaatgcctcctaaggcatcgggaatctccctacggggaggaaggagtacaggcaaaggagccaggctggctcttccagagccaaccatcaagaaatcatctacctcttctgggtcaccaacccaggctgggtcatctacccagaaaaccaatttagaagggtcatcaacccagattgcctcaatcaaacctgagccatccactcaggaatctcccaaaccggcaaccgccaaacaaacatcggccgactatgcatggccaattgaaacccttcaggcccttcaagacatgggtctgaccaaatttccaaaaataatcaaaaaatcttgggcagacattgcctcagaatctgatgatgaatctgaatcaaatttacaaacaatgatccaaaatgcgtcaatgaccaaaacagccaccaatactaaaggaaaactacctttagccaaagctcaaacaccacctaccaaacaaactaacaattatatttataaaaataaattgttaactgttttgcagatggaacctgaattttgggacaaaaatcccttcaaggcgacggccaaggctttcccaccaggatttcactacaaaccaaccactatcctgaagacaagaactttttatgaattgattttggtagattcaaactcagtatctatcaaacatttcaaagatccaaaagaccaaaccttaaacacccactcaaccatccaaatactaaaagttcttcaaccaagacactttggttcggacttgaacaaaggaaagagattttcagttccatttgatccagtaggttatacctattgggattacgttgatgcttggactaaggtgttttggcaccaaaatacccgcttcaaacattcatggctgatatatttcaagaccaacacaatttacaattttcccaattggtttttgcaatggtgggacttctttggaccaatcccagagatattcccaaaaacagtccaacaaggattttcccaatt

SEQ ID NO: 13571 - DNA, 1192 bp, Glycine max
  Gm_smallRNAprecursor_6404
aaagtggtaatgcctcctaaggcatcgggaatctccctacggggaggaaggagtacaggcaaaggagccaggctggctcttccagagccaaccatcaagaaatcatctacctcttctgggtcaccaacccaggctgggtcatctacccagaaaaccaatttagaagggtcatcaacccagattgcctcaatcaaacctgagccatccactcaggaatctcccaaaccggcaaccgccaaacaaacatcggccgactatgcatggccaattgaaacccttcaggcccttcaagacatgggtctgaccaaatttccaaaaataatcaaaaaatcttgggcagacattgcctcagaatctgatgatgaatctgaatcaaatttacaaacaatgatccaaaatgcgtcaatgaccaaaacagccaccaatactaaaggaaaactacctttagccaaagctcaaacaccacctaccaaacaaactaacaattatatttataaaaataaattgttaactgttttgcagatggaacctgaattttgggacaaaaatcccttcaaggcgacggccaaggctttcccaccaggatttcactacaaaccaaccactatcctgaagacaagaactttttatgaattgattttggtagattcaaactcagtatctatcaaacatttcaaagatccaaaagaccaaaccttaaacacccactcaaccatccaaatactaaaagttcttcaaccaagacactttggttcggacttgaacaaaggaaagagattttcagttccatttgatccagtaggttatacctattgggattacgttgatgcttggactaaggtgttttggcaccaaaatacccgcttcaaacattcatggctgatatatttcaagaccaacacaatttacaattttcccaattggtttttgcaatggtgggacttctttggaccaatcccagagatattcccaaaaacagtccaacaaggattttcccaatttaagaaacaatacaattcgcaggaatcaagaattccagcagatcttaaatacttttcaagctttgcactgtcatggatattctcatggcaatatcgttacagcaagactgaaaagacaaaccaatatccatcactacaaagacacgcatttgtaaaatggtggacacaatttgactcatccaaagcggatg

SEQ ID NO: 13572 - DNA, 1158 bp, Glycine max
  Gm_smallRNAprecursor_6405
ctaaggcatcgggaatctccctacggggaggaaggagtacaggcaaaggagccaggctggctcttccagagccaaccatcaagaaatcatctacctcttctgggtcaccaacccaggctgggtcatctacccagaaaaccaatttagaagggtcatcaacccagattgcctcaatcaaacctgagccatccactcaggaatctcccaaaccggcaaccgccaaacaaacatcggccgactatgcatggccaattgaaacccttcaggcccttcaagacatgggtctgaccaaatttccaaaaataatcaaaaaatcttgggcagacattgcctcagaatctgatgatgaatctgaatcaaatttacaaacaatgatccaaaatgcgtcaatgaccaaaacagccaccaatactaaaggaaaactacctttagccaaagctcaaacaccacctaccaaacaaactaacaattatatttataaaaataaattgttaactgttttgcagatggaacctgaattttgggacaaaaatcccttcaaggcgacggccaaggctttcccaccaggatttcactacaaaccaaccactatcctgaagacaagaactttttatgaattgattttggtagattcaaactcagtatctatcaaacatttcaaagatccaaaagaccaaaccttaaacacccactcaaccatccaaatactaaaagttcttcaaccaagacactttggttcggacttgaacaaaggaaagagattttcagttccatttgatccagtaggttatacctattgggattacgttgatgcttggactaaggtgttttggcaccaaaatacccgcttcaaacattcatggctgatatatttcaagaccaacacaatttacaattttcccaattggtttttgcaatggtgggacttctttggaccaatcccagagatattcccaaaaacagtccaacaaggattttcccaatttaagaaacaatacaattcgcaggaatcaagaattccagcagatcttaaatacttttcaagctttgcactgtcatggatattctcatggcaatatcgttacagcaagactgaaaagacaaaccaatatccatcactacaaagacacgcatttgtaaaatggtggacacaatttg

SEQ ID NO: 13573 - DNA, 1167 bp, Glycine max
  Gm_smallRNAprecursor_6406
ctaaggcatcgggaatctccctacggggaggaaggagtacaggcaaaggagccaggctggctcttccagagccaaccatcaagaaatcatctacctcttctgggtcaccaacccaggctgggtcatctacccagaaaaccaatttagaagggtcatcaacccagattgcctcaatcaaacctgagccatccactcaggaatctcccaaaccggcaaccgccaaacaaacatcggccgactatgcatggccaattgaaacccttcaggcccttcaagacatgggtctgaccaaatttccaaaaataatcaaaaaatcttgggcagacattgcctcagaatctgatgatgaatctgaatcaaatttacaaacaatgatccaaaatgcgtcaatgaccaaaacagccaccaatactaaaggaaaactacctttagccaaagctcaaacaccacctaccaaacaaactaacaattatatttataaaaataaattgttaactgttttgcagatggaacctgaattttgggacaaaaatcccttcaaggcgacggccaaggctttcccaccaggatttcactacaaaccaaccactatcctgaagacaagaactttttatgaattgattttggtagattcaaactcagtatctatcaaacatttcaaagatccaaaagaccaaaccttaaacacccactcaaccatccaaatactaaaagttcttcaaccaagacactttggttcggacttgaacaaaggaaagagattttcagttccatttgatccagtaggttatacctattgggattacgttgatgcttggactaaggtgttttggcaccaaaatacccgcttcaaacattcatggctgatatatttcaagaccaacacaatttacaattttcccaattggtttttgcaatggtgggacttctttggaccaatcccagagatattcccaaaaacagtccaacaaggattttcccaatttaagaaacaatacaattcgcaggaatcaagaattccagcagatcttaaatacttttcaagctttgcactgtcatggatattctcatggcaatatcgttacagcaagactgaaaagacaaaccaatatccatcactacaaagacacgcatttgtaaaatggtggacacaatttgactcatcca

SEQ ID NO: 13574 - DNA, 1208 bp, Glycine max
  Gm_smallRNAprecursor_6407
ctaaggcatcgggaatctccctacggggaggaaggagtacaggcaaaggagccaggctggctcttccagagccaaccatcaagaaatcatctacctcttctgggtcaccaacccaggctgggtcatctacccagaaaaccaatttagaagggtcatcaacccagattgcctcaatcaaacctgagccatccactcaggaatctcccaaaccggcaaccgccaaacaaacatcggccgactatgcatggccaattgaaacccttcaggcccttcaagacatgggtctgaccaaatttccaaaaataatcaaaaaatcttgggcagacattgcctcagaatctgatgatgaatctgaatcaaatttacaaacaatgatccaaaatgcgtcaatgaccaaaacagccaccaatactaaaggaaaactacctttagccaaagctcaaacaccacctaccaaacaaactaacaattatatttataaaaataaattgttaactgttttgcagatggaacctgaattttgggacaaaaatcccttcaaggcgacggccaaggctttcccaccaggatttcactacaaaccaaccactatcctgaagacaagaactttttatgaattgattttggtagattcaaactcagtatctatcaaacatttcaaagatccaaaagaccaaaccttaaacacccactcaaccatccaaatactaaaagttcttcaaccaagacactttggttcggacttgaacaaaggaaagagattttcagttccatttgatccagtaggttatacctattgggattacgttgatgcttggactaaggtgttttggcaccaaaatacccgcttcaaacattcatggctgatatatttcaagaccaacacaatttacaattttcccaattggtttttgcaatggtgggacttctttggaccaatcccagagatattcccaaaaacagtccaacaaggattttcccaatttaagaaacaatacaattcgcaggaatcaagaattccagcagatcttaaatacttttcaagctttgcactgtcatggatattctcatggcaatatcgttacagcaagactgaaaagacaaaccaatatccatcactacaaagacacgcatttgtaaaatggtggacacaatttgactcatccaaagcggatgcagaacaagtaaaactatggttccaatcccat

SEQ ID NO: 13575 - DNA, 1208 bp, Glycine max; identical to SEQ ID NO: 13574
  Gm_smallRNAprecursor_6408

SEQ ID NO: 13576 - DNA, 1211 bp, Glycine max
  Gm_smallRNAprecursor_6409
ctaaggcatcgggaatctccctacggggaggaaggagtacaggcaaaggagccaggctggctcttccagagccaaccatcaagaaatcatctacctcttctgggtcaccaacccaggctgggtcatctacccagaaaaccaatttagaagggtcatcaacccagattgcctcaatcaaacctgagccatccactcaggaatctcccaaaccggcaaccgccaaacaaacatcggccgactatgcatggccaattgaaacccttcaggcccttcaagacatgggtctgaccaaatttccaaaaataatcaaaaaatcttgggcagacattgcctcagaatctgatgatgaatctgaatcaaatttacaaacaatgatccaaaatgcgtcaatgaccaaaacagccaccaatactaaaggaaaactacctttagccaaagctcaaacaccacctaccaaacaaactaacaattatatttataaaaataaattgttaactgttttgcagatggaacctgaattttgggacaaaaatcccttcaaggcgacggccaaggctttcccaccaggatttcactacaaaccaaccactatcctgaagacaagaactttttatgaattgattttggtagattcaaactcagtatctatcaaacatttcaaagatccaaaagaccaaaccttaaacacccactcaaccatccaaatactaaaagttcttcaaccaagacactttggttcggacttgaacaaaggaaagagattttcagttccatttgatccagtaggttatacctattgggattacgttgatgcttggactaaggtgttttggcaccaaaatacccgcttcaaacattcatggctgatatatttcaagaccaacacaatttacaattttcccaattggtttttgcaatggtgggacttctttggaccaatcccagagatattcccaaaaacagtccaacaaggattttcccaatttaagaaacaatacaattcgcaggaatcaagaattccagcagatcttaaatacttttcaagctttgcactgtcatggatattctcatggcaatatcgttacagcaagactgaaaagacaaaccaatatccatcactacaaagacacgcatttgtaaaatggtggacacaatttgactcatccaaagcggatgcagaacaagtaaaactatggttccaatcccatcca

SEQ ID NO: 13577 - DNA, 1098 bp, Glycine max
  Gm_smallRNAprecursor_6410
ggaatctccctacggggaggaaggagtacaggcaaaggagccaggctggctcttccagagccaaccatcaagaaatcatctacctcttctgggtcaccaacccaggctgggtcatctacccagaaaaccaatttagaagggtcatcaacccagattgcctcaatcaaacctgagccatccactcaggaatctcccaaaccggcaaccgccaaacaaacatcggccgactatgcatggccaattgaaacccttcaggcccttcaagacatgggtctgaccaaatttccaaaaataatcaaaaaatcttgggcagacattgcctcagaatctgatgatgaatctgaatcaaatttacaaacaatgatccaaaatgcgtcaatgaccaaaacagccaccaatactaaaggaaaactacctttagccaaagctcaaacaccacctaccaaacaaactaacaattatatttataaaaataaattgttaactgttttgcagatggaacctgaattttgggacaaaaatcccttcaaggcgacggccaaggctttcccaccaggatttcactacaaaccaaccactatcctgaagacaagaactttttatgaattgattttggtagattcaaactcagtatctatcaaacatttcaaagatccaaaagaccaaaccttaaacacccactcaaccatccaaatactaaaagttcttcaaccaagacactttggttcggacttgaacaaaggaaagagattttcagttccatttgatccagtaggttatacctattgggattacgttgatgcttggactaaggtgttttggcaccaaaatacccgcttcaaacattcatggctgatatatttcaagaccaacacaatttacaattttcccaattggtttttgcaatggtgggacttctttggaccaatcccagagatattcccaaaaacagtccaacaaggattttcccaatttaagaaacaatacaattcgcaggaatcaagaattccagcagatcttaaatacttttcaagctttgcactgtcatggatattctcatggcaatatcgttacagcaagactgaaaagacaaaccaa

SEQ ID NO: 13578 - DNA, 1190 bp, Glycine max
  Gm_smallRNAprecursor_6411
acaggcaaaggagccaggctggctcttccagagccaaccatcaagaaatcatctacctcttctgggtcaccaacccaggctgggtcatctacccagaaaaccaatttagaagggtcatcaacccagattgcctcaatcaaacctgagccatccactcaggaatctcccaaaccggcaaccgccaaacaaacatcggccgactatgcatggccaattgaaacccttcaggcccttcaagacatgggtctgaccaaatttccaaaaataatcaaaaaatcttgggcagacattgcctcagaatctgatgatgaatctgaatcaaatttacaaacaatgatccaaaatgcgtcaatgaccaaaacagccaccaatactaaaggaaaactacctttagccaaagctcaaacaccacctaccaaacaaactaacaattatatttataaaaataaattgttaactgttttgcagatggaacctgaattttgggacaaaaatcccttcaaggcgacggccaaggctttcccaccaggatttcactacaaaccaaccactatcctgaagacaagaactttttatgaattgattttggtagattcaaactcagtatctatcaaacatttcaaagatccaaaagaccaaaccttaaacacccactcaaccatccaaatactaaaagttcttcaaccaagacactttggttcggacttgaacaaaggaaagagattttcagttccatttgatccagtaggttatacctattgggattacgttgatgcttggactaaggtgttttggcaccaaaatacccgcttcaaacattcatggctgatatatttcaagaccaacacaatttacaattttcccaattggtttttgcaatggtgggacttctttggaccaatcccagagatattcccaaaaacagtccaacaaggattttcccaatttaagaaacaatacaattcgcaggaatcaagaattccagcagatcttaaatacttttcaagctttgcactgtcatggatattctcatggcaatatcgttacagcaagactgaaaagacaaaccaatatccatcactacaaagacacgcatttgtaaaatggtggacacaatttgactcatccaaagcggatgcagaacaagtaaaactatggttccaatcccatccagaattcctcaaagcagc

SEQ ID NO: 13579 - DNA, 1148 bp, Glycine max
  Gm_smallRNAprecursor_6412
tgcctcaatcaaacctgagccatccactcaggaatctcccaaaccggcaaccgccaaacaaacatcggccgactatgcatggccaattgaaacccttcaggcccttcaagacatgggtctgaccaaatttccaaaaataatcaaaaaatcttgggcagacattgcctcagaatctgatgatgaatctgaatcaaatttacaaacaatgatccaaaatgcgtcaatgaccaaaacagccaccaatactaaaggaaaactacctttagccaaagctcaaacaccacctaccaaacaaactaacaattatatttataaaaataaattgttaactgttttgcagatggaacctgaattttgggacaaaaatcccttcaaggcgacggccaaggctttcccaccaggatttcactacaaaccaaccactatcctgaagacaagaactttttatgaattgattttggtagattcaaactcagtatctatcaaacatttcaaagatccaaaagaccaaaccttaaacacccactcaaccatccaaatactaaaagttcttcaaccaagacactttggttcggacttgaacaaaggaaagagattttcagttccatttgatccagtaggttatacctattgggattacgttgatgcttggactaaggtgttttggcaccaaaatacccgcttcaaacattcatggctgatatatttcaagaccaacacaatttacaattttcccaattggtttttgcaatggtgggacttctttggaccaatcccagagatattcccaaaaacagtccaacaaggattttcccaatttaagaaacaatacaattcgcaggaatcaagaattccagcagatcttaaatacttttcaagctttgcactgtcatggatattctcatggcaatatcgttacagcaagactgaaaagacaaaccaatatccatcactacaaagacacgcatttgtaaaatggtggacacaatttgactcatccaaagcggatgcagaacaagtaaaactatggttccaatcccatccagaattcctcaaagcagctgatccagagacttctgtgtttttgaaccaaaagtctcatctggcagcatttttagcaggatcgacatcaaaggaggtcttagcta

SEQ ID NO: 13580 - DNA, 1149 bp, Glycine max
  Gm_smallRNAprecursor_6413
tgcctcaatcaaacctgagccatccactcaggaatctcccaaaccggcaaccgccaaacaaacatcggccgactatgcatggccaattgaaacccttcaggcccttcaagacatgggtctgaccaaatttccaaaaataatcaaaaaatcttgggcagacattgcctcagaatctgatgatgaatctgaatcaaatttacaaacaatgatccaaaatgcgtcaatgaccaaaacagccaccaatactaaaggaaaactacctttagccaaagctcaaacaccacctaccaaacaaactaacaattatatttataaaaataaattgttaactgttttgcagatggaacctgaattttgggacaaaaatcccttcaaggcgacggccaaggctttcccaccaggatttcactacaaaccaaccactatcctgaagacaagaactttttatgaattgattttggtagattcaaactcagtatctatcaaacatttcaaagatccaaaagaccaaaccttaaacacccactcaaccatccaaatactaaaagttcttcaaccaagacactttggttcggacttgaacaaaggaaagagattttcagttccatttgatccagtaggttatacctattgggattacgttgatgcttggactaaggtgttttggcaccaaaatacccgcttcaaacattcatggctgatatatttcaagaccaacacaatttacaattttcccaattggtttttgcaatggtgggacttctttggaccaatcccagagatattcccaaaaacagtccaacaaggattttcccaatttaagaaacaatacaattcgcaggaatcaagaattccagcagatcttaaatacttttcaagctttgcactgtcatggatattctcatggcaatatcgttacagcaagactgaaaagacaaaccaatatccatcactacaaagacacgcatttgtaaaatggtggacacaatttgactcatccaaagcggatgcagaacaagtaaaactatggttccaatcccatccagaattcctcaaagcagctgatccagagacttctgtgtttttgaaccaaaagtctcatctggcagcatttttagcaggatcgacatcaaaggaggtcttagctaa

SEQ ID NO: 13581 - DNA, 1249 bp, Glycine max
  Gm_smallRNAprecursor_6414
tgcctcaatcaaacctgagccatccactcaggaatctcccaaaccggcaaccgccaaacaaacatcggccgactatgcatggccaattgaaacccttcaggcccttcaagacatgggtctgaccaaatttccaaaaataatcaaaaaatcttgggcagacattgcctcagaatctgatgatgaatctgaatcaaatttacaaacaatgatccaaaatgcgtcaatgaccaaaacagccaccaatactaaaggaaaactacctttagccaaagctcaaacaccacctaccaaacaaactaacaattatatttataaaaataaattgttaactgttttgcagatggaacctgaattttgggacaaaaatcccttcaaggcgacggccaaggctttcccaccaggatttcactacaaaccaaccactatcctgaagacaagaactttttatgaattgattttggtagattcaaactcagtatctatcaaacatttcaaagatccaaaagaccaaaccttaaacacccactcaaccatccaaatactaaaagttcttcaaccaagacactttggttcggacttgaacaaaggaaagagattttcagttccatttgatccagtaggttatacctattgggattacgttgatgcttggactaaggtgttttggcaccaaaatacccgcttcaaacattcatggctgatatatttcaagaccaacacaatttacaattttcccaattggtttttgcaatggtgggacttctttggaccaatcccagagatattcccaaaaacagtccaacaaggattttcccaatttaagaaacaatacaattcgcaggaatcaagaattccagcagatcttaaatacttttcaagctttgcactgtcatggatattctcatggcaatatcgttacagcaagactgaaaagacaaaccaatatccatcactacaaagacacgcatttgtaaaatggtggacacaatttgactcatccaaagcggatgcagaacaagtaaaactatggttccaatcccatccagaattcctcaaagcagctgatccagagacttctgtgtttttgaaccaaaagtctcatctggcagcatttttagcaggatcgacatcaaaggaggtcttagctaaaaatctgaaggaagttctacaaatgttacaacaggaagaagaagcttcatcctcaaagaaggaagaaacaagttctgctgaagaagacgaagaagatccc

SEQ ID NO: 13582 - DNA, 1134 bp, Glycine max
  Gm_smallRNAprecursor_6415
caaacctgagccatccactcaggaatctcccaaaccggcaaccgccaaacaaacatcggccgactatgcatggccaattgaaacccttcaggcccttcaagacatgggtctgaccaaatttccaaaaataatcaaaaaatcttgggcagacattgcctcagaatctgatgatgaatctgaatcaaatttacaaacaatgatccaaaatgcgtcaatgaccaaaacagccaccaatactaaaggaaaactacctttagccaaagctcaaacaccacctaccaaacaaactaacaattatatttataaaaataaattgttaactgttttgcagatggaacctgaattttgggacaaaaatcccttcaaggcgacggccaaggctttcccaccaggatttcactacaaaccaaccactatcctgaagacaagaactttttatgaattgattttggtagattcaaactcagtatctatcaaacatttcaaagatccaaaagaccaaaccttaaacacccactcaaccatccaaatactaaaagttcttcaaccaagacactttggttcggacttgaacaaaggaaagagattttcagttccatttgatccagtaggttatacctattgggattacgttgatgcttggactaaggtgttttggcaccaaaatacccgcttcaaacattcatggctgatatatttcaagaccaacacaatttacaattttcccaattggtttttgcaatggtgggacttctttggaccaatcccagagatattcccaaaaacagtccaacaaggattttcccaatttaagaaacaatacaattcgcaggaatcaagaattccagcagatcttaaatacttttcaagctttgcactgtcatggatattctcatggcaatatcgttacagcaagactgaaaagacaaaccaatatccatcactacaaagacacgcatttgtaaaatggtggacacaatttgactcatccaaagcggatgcagaacaagtaaaactatggttccaatcccatccagaattcctcaaagcagctgatccagagacttctgtgtttttgaaccaaaagtctcatctggcagcatttttagcaggatcgacatcaaaggaggtctt

SEQ ID NO: 13583 - DNA, 1129 bp, Glycine max
  Gm_smallRNAprecursor_6416
agccatccactcaggaatctcccaaaccggcaaccgccaaacaaacatcggccgactatgcatggccaattgaaacccttcaggcccttcaagacatgggtctgaccaaatttccaaaaataatcaaaaaatcttgggcagacattgcctcagaatctgatgatgaatctgaatcaaatttacaaacaatgatccaaaatgcgtcaatgaccaaaacagccaccaatactaaaggaaaactacctttagccaaagctcaaacaccacctaccaaacaaactaacaattatatttataaaaataaattgttaactgttttgcagatggaacctgaattttgggacaaaaatcccttcaaggcgacggccaaggctttcccaccaggatttcactacaaaccaaccactatcctgaagacaagaactttttatgaattgattttggtagattcaaactcagtatctatcaaacatttcaaagatccaaaagaccaaaccttaaacacccactcaaccatccaaatactaaaagttcttcaaccaagacactttggttcggacttgaacaaaggaaagagattttcagttccatttgatccagtaggttatacctattgggattacgttgatgcttggactaaggtgttttggcaccaaaatacccgcttcaaacattcatggctgatatatttcaagaccaacacaatttacaattttcccaattggtttttgcaatggtgggacttctttggaccaatcccagagatattcccaaaaacagtccaacaaggattttcccaatttaagaaacaatacaattcgcaggaatcaagaattccagcagatcttaaatacttttcaagctttgcactgtcatggatattctcatggcaatatcgttacagcaagactgaaaagacaaaccaatatccatcactacaaagacacgcatttgtaaaatggtggacacaatttgactcatccaaagcggatgcagaacaagtaaaactatggttccaatcccatccagaattcctcaaagcagctgatccagagacttctgtgtttttgaaccaaaagtctcatctggcagcatttttagcaggatcgacatcaaaggaggtcttagc

SEQ ID NO: 13584 - DNA, 1107 bp, Glycine max
  Gm_smallRNAprecursor_6417
aaccggcaaccgccaaacaaacatcggccgactatgcatggccaattgaaacccttcaggcccttcaagacatgggtctgaccaaatttccaaaaataatcaaaaaatcttgggcagacattgcctcagaatctgatgatgaatctgaatcaaatttacaaacaatgatccaaaatgcgtcaatgaccaaaacagccaccaatactaaaggaaaactacctttagccaaagctcaaacaccacctaccaaacaaactaacaattatatttataaaaataaattgttaactgttttgcagatggaacctgaattttgggacaaaaatcccttcaaggcgacggccaaggctttcccaccaggatttcactacaaaccaaccactatcctgaagacaagaactttttatgaattgattttggtagattcaaactcagtatctatcaaacatttcaaagatccaaaagaccaaaccttaaacacccactcaaccatccaaatactaaaagttcttcaaccaagacactttggttcggacttgaacaaaggaaagagattttcagttccatttgatccagtaggttatacctattgggattacgttgatgcttggactaaggtgttttggcaccaaaatacccgcttcaaacattcatggctgatatatttcaagaccaacacaatttacaattttcccaattggtttttgcaatggtgggacttctttggaccaatcccagagatattcccaaaaacagtccaacaaggattttcccaatttaagaaacaatacaattcgcaggaatcaagaattccagcagatcttaaatacttttcaagctttgcactgtcatggatattctcatggcaatatcgttacagcaagactgaaaagacaaaccaatatccatcactacaaagacacgcatttgtaaaatggtggacacaatttgactcatccaaagcggatgcagaacaagtaaaactatggttccaatcccatccagaattcctcaaagcagctgatccagagacttctgtgtttttgaaccaaaagtctcatctggcagcatttttagcaggatcgacatcaaaggaggtcttagcta

SEQ ID NO: 13585 - DNA, 1107 bp, Glycine max; identical to SEQ ID NO: 13584
  Gm_smallRNAprecursor_6418

SEQ ID NO: 13586 - DNA, 1108 bp, Glycine max
  Gm_smallRNAprecursor_6419
aaccggcaaccgccaaacaaacatcggccgactatgcatggccaattgaaacccttcaggcccttcaagacatgggtctgaccaaatttccaaaaataatcaaaaaatcttgggcagacattgcctcagaatctgatgatgaatctgaatcaaatttacaaacaatgatccaaaatgcgtcaatgaccaaaacagccaccaatactaaaggaaaactacctttagccaaagctcaaacaccacctaccaaacaaactaacaattatatttataaaaataaattgttaactgttttgcagatggaacctgaattttgggacaaaaatcccttcaaggcgacggccaaggctttcccaccaggatttcactacaaaccaaccactatcctgaagacaagaactttttatgaattgattttggtagattcaaactcagtatctatcaaacatttcaaagatccaaaagaccaaaccttaaacacccactcaaccatccaaatactaaaagttcttcaaccaagacactttggttcggacttgaacaaaggaaagagattttcagttccatttgatccagtaggttatacctattgggattacgttgatgcttggactaaggtgttttggcaccaaaatacccgcttcaaacattcatggctgatatatttcaagaccaacacaatttacaattttcccaattggtttttgcaatggtgggacttctttggaccaatcccagagatattcccaaaaacagtccaacaaggattttcccaatttaagaaacaatacaattcgcaggaatcaagaattccagcagatcttaaatacttttcaagctttgcactgtcatggatattctcatggcaatatcgttacagcaagactgaaaagacaaaccaatatccatcactacaaagacacgcatttgtaaaatggtggacacaatttgactcatccaaagcggatgcagaacaagtaaaactatggttccaatcccatccagaattcctcaaagcagctgatccagagacttctgtgtttttgaaccaaaagtctcatctggcagcatttttagcaggatcgacatcaaaggaggtcttagctaa

SEQ ID NO: 13587 - DNA, 1108 bp, Glycine max; identical to SEQ ID NO: 13586
  Gm_smallRNAprecursor_6420

SEQ ID NO: 13588 - DNA, 1102 bp, Glycine max
  Gm_smallRNAprecursor_6421
cggcaaccgccaaacaaacatcggccgactatgcatggccaattgaaacccttcaggcccttcaagacatgggtctgaccaaatttccaaaaataatcaaaaaatcttgggcagacattgcctcagaatctgatgatgaatctgaatcaaatttacaaacaatgatccaaaatgcgtcaatgaccaaaacagccaccaatactaaaggaaaactacctttagccaaagctcaaacaccacctaccaaacaaactaacaattatatttataaaaataaattgttaactgttttgcagatggaacctgaattttgggacaaaaatcccttcaaggcgacggccaaggctttcccaccaggatttcactacaaaccaaccactatcctgaagacaagaactttttatgaattgattttggtagattcaaactcagtatctatcaaacatttcaaagatccaaaagaccaaaccttaaacacccactcaaccatccaaatactaaaagttcttcaaccaagacactttggttcggacttgaacaaaggaaagagattttcagttccatttgatccagtaggttatacctattgggattacgttgatgcttggactaaggtgttttggcaccaaaatacccgcttcaaacattcatggctgatatatttcaagaccaacacaatttacaattttcccaattggtttttgcaatggtgggacttctttggaccaatcccagagatattcccaaaaacagtccaacaaggattttcccaatttaagaaacaatacaattcgcaggaatcaagaattccagcagatcttaaatacttttcaagctttgcactgtcatggatattctcatggcaatatcgttacagcaagactgaaaagacaaaccaatatccatcactacaaagacacgcatttgtaaaatggtggacacaatttgactcatccaaagcggatgcagaacaagtaaaactatggttccaatcccatccagaattcctcaaagcagctgatccagagacttctgtgtttttgaaccaaaagtctcatctggcagcatttttagcaggatcgacatcaaaggaggtcttagc

SEQ ID NO: 13589 - DNA, 1123 bp, Glycine max
  Gm_smallRNAprecursor_6422
aacaaacatcggccgactatgcatggccaattgaaacccttcaggcccttcaagacatgggtctgaccaaatttccaaaaataatcaaaaaatcttgggcagacattgcctcagaatctgatgatgaatctgaatcaaatttacaaacaatgatccaaaatgcgtcaatgaccaaaacagccaccaatactaaaggaaaactacctttagccaaagctcaaacaccacctaccaaacaaactaacaattatatttataaaaataaattgttaactgttttgcagatggaacctgaattttgggacaaaaatcccttcaaggcgacggccaaggctttcccaccaggatttcactacaaaccaaccactatcctgaagacaagaactttttatgaattgattttggtagattcaaactcagtatctatcaaacatttcaaagatccaaaagaccaaaccttaaacacccactcaaccatccaaatactaaaagttcttcaaccaagacactttggttcggacttgaacaaaggaaagagattttcagttccatttgatccagtaggttatacctattgggattacgttgatgcttggactaaggtgttttggcaccaaaatacccgcttcaaacattcatggctgatatatttcaagaccaacacaatttacaattttcccaattggtttttgcaatggtgggacttctttggaccaatcccagagatattcccaaaaacagtccaacaaggattttcccaatttaagaaacaatacaattcgcaggaatcaagaattccagcagatcttaaatacttttcaagctttgcactgtcatggatattctcatggcaatatcgttacagcaagactgaaaagacaaaccaatatccatcactacaaagacacgcatttgtaaaatggtggacacaatttgactcatccaaagcggatgcagaacaagtaaaactatggttccaatcccatccagaattcctcaaagcagctgatccagagacttctgtgtttttgaaccaaaagtctcatctggcagcatttttagcaggatcgacatcaaaggaggtcttagctaaaaatctgaaggaagttctacaaatgttaca

SEQ ID NO: 13590 - DNA, 1080 bp, Glycine max
  Gm_smallRNAprecursor_6423
ccaaaaataatcaaaaaatcttgggcagacattgcctcagaatctgatgatgaatctgaatcaaatttacaaacaatgatccaaaatgcgtcaatgaccaaaacagccaccaatactaaaggaaaactacctttagccaaagctcaaacaccacctaccaaacaaactaacaattatatttataaaaataaattgttaactgttttgcagatggaacctgaattttgggacaaaaatcccttcaaggcgacggccaaggctttcccaccaggatttcactacaaaccaaccactatcctgaagacaagaactttttatgaattgattttggtagattcaaactcagtatctatcaaacatttcaaagatccaaaagaccaaaccttaaacacccactcaaccatccaaatactaaaagttcttcaaccaagacactttggttcggacttgaacaaaggaaagagattttcagttccatttgatccagtaggttatacctattgggattacgttgatgcttggactaaggtgttttggcaccaaaatacccgcttcaaacattcatggctgatatatttcaagaccaacacaatttacaattttcccaattggtttttgcaatggtgggacttctttggaccaatcccagagatattcccaaaaacagtccaacaaggattttcccaatttaagaaacaatacaattcgcaggaatcaagaattccagcagatcttaaatacttttcaagctttgcactgtcatggatattctcatggcaatatcgttacagcaagactgaaaagacaaaccaatatccatcactacaaagacacgcatttgtaaaatggtggacacaatttgactcatccaaagcggatgcagaacaagtaaaactatggttccaatcccatccagaattcctcaaagcagctgatccagagacttctgtgtttttgaaccaaaagtctcatctggcagcatttttagcaggatcgacatcaaaggaggtcttagctaaaaatctgaaggaagttctacaaatgttacaacaggaagaagaagcttcatcctcaaagaag

SEQ ID NO: 13591 - DNA, 1062 bp, Glycine max
  Gm_smallRNAprecursor_6424
tcttgggcagacattgcctcagaatctgatgatgaatctgaatcaaatttacaaacaatgatccaaaatgcgtcaatgaccaaaacagccaccaatactaaaggaaaactacctttagccaaagctcaaacaccacctaccaaacaaactaacaattatatttataaaaataaattgttaactgttttgcagatggaacctgaattttgggacaaaaatcccttcaaggcgacggccaaggctttcccaccaggatttcactacaaaccaaccactatcctgaagacaagaactttttatgaattgattttggtagattcaaactcagtatctatcaaacatttcaaagatccaaaagaccaaaccttaaacacccactcaaccatccaaatactaaaagttcttcaaccaagacactttggttcggacttgaacaaaggaaagagattttcagttccatttgatccagtaggttatacctattgggattacgttgatgcttggactaaggtgttttggcaccaaaatacccgcttcaaacattcatggctgatatatttcaagaccaacacaatttacaattttcccaattggtttttgcaatggtgggacttctttggaccaatcccagagatattcccaaaaacagtccaacaaggattttcccaatttaagaaacaatacaattcgcaggaatcaagaattccagcagatcttaaatacttttcaagctttgcactgtcatggatattctcatggcaatatcgttacagcaagactgaaaagacaaaccaatatccatcactacaaagacacgcatttgtaaaatggtggacacaatttgactcatccaaagcggatgcagaacaagtaaaactatggttccaatcccatccagaattcctcaaagcagctgatccagagacttctgtgtttttgaaccaaaagtctcatctggcagcatttttagcaggatcgacatcaaaggaggtcttagctaaaaatctgaaggaagttctacaaatgttacaacaggaagaagaagcttcatcctcaaagaag

SEQ ID NO: 13592 - DNA, 1146 bp, Glycine max
  Gm_smallRNAprecursor_6425
aatgatccaaaatgcgtcaatgaccaaaacagccaccaatactaaaggaaaactacctttagccaaagctcaaacaccacctaccaaacaaactaacaattatatttataaaaataaattgttaactgttttgcagatggaacctgaattttgggacaaaaatcccttcaaggcgacggccaaggctttcccaccaggatttcactacaaaccaaccactatcctgaagacaagaactttttatgaattgattttggtagattcaaactcagtatctatcaaacatttcaaagatccaaaagaccaaaccttaaacacccactcaaccatccaaatactaaaagttcttcaaccaagacactttggttcggacttgaacaaaggaaagagattttcagttccatttgatccagtaggttatacctattgggattacgttgatgcttggactaaggtgttttggcaccaaaatacccgcttcaaacattcatggctgatatatttcaagaccaacacaatttacaattttcccaattggtttttgcaatggtgggacttctttggaccaatcccagagatattcccaaaaacagtccaacaaggattttcccaatttaagaaacaatacaattcgcaggaatcaagaattccagcagatcttaaatacttttcaagctttgcactgtcatggatattctcatggcaatatcgttacagcaagactgaaaagacaaaccaatatccatcactacaaagacacgcatttgtaaaatggtggacacaatttgactcatccaaagcggatgcagaacaagtaaaactatggttccaatcccatccagaattcctcaaagcagctgatccagagacttctgtgtttttgaaccaaaagtctcatctggcagcatttttagcaggatcgacatcaaaggaggtcttagctaaaaatctgaaggaagttctacaaatgttacaacaggaagaagaagcttcatcctcaaagaaggaagaaacaagttctgctgaagaagacgaagaagatcccttttaccaaaacgaagatgattgttttggtatctgtttagattaaatttaatttcggtcacaaaaccgtctgtttgtaattaatgtgtaatgctggacaat

SEQ ID NO: 13593 - DNA, 1169 bp, Glycine max
  Gm_smallRNAprecursor_6426
cgacggccaaggctttcccaccaggatttcactacaaaccaaccactatcctgaagacaagaactttttatgaattgattttggtagattcaaactcagtatctatcaaacatttcaaagatccaaaagaccaaaccttaaacacccactcaaccatccaaatactaaaagttcttcaaccaagacactttggttcggacttgaacaaaggaaagagattttcagttccatttgatccagtaggttatacctattgggattacgttgatgcttggactaaggtgttttggcaccaaaatacccgcttcaaacattcatggctgatatatttcaagaccaacacaatttacaattttcccaattggtttttgcaatggtgggacttctttggaccaatcccagagatattcccaaaaacagtccaacaaggattttcccaatttaagaaacaatacaattcgcaggaatcaagaattccagcagatcttaaatacttttcaagctttgcactgtcatggatattctcatggcaatatcgttacagcaagactgaaaagacaaaccaatatccatcactacaaagacacgcatttgtaaaatggtggacacaatttgactcatccaaagcggatgcagaacaagtaaaactatggttccaatcccatccagaattcctcaaagcagctgatccagagacttctgtgtttttgaaccaaaagtctcatctggcagcatttttagcaggatcgacatcaaaggaggtcttagctaaaaatctgaaggaagttctacaaatgttacaacaggaagaagaagcttcatcctcaaagaaggaagaaacaagttctgctgaagaagacgaagaagatcccttttaccaaaacgaagatgattgttttggtatctgtttagattaaatttaatttcggtcacaaaaccgtctgtttgtaattaatgtgtaatgctggacaatactacctgtcctgtagccattaaagtcccggtcaaaactacttgtcttgtaacaaacagtcaaatagtcccggtcaaaactaccggcaactactggtcttagatttttggttatataaggagtcctcaagcatgttgtgaggcaccctttcatttagccatttttcaggtttcggaagagaggtgctctgaaacaa

SEQ ID NO: 13594 - DNA, 1173 bp, Glycine max
  Gm_smallRNAprecursor_6427
cgacggccaaggctttcccaccaggatttcactacaaaccaaccactatcctgaagacaagaactttttatgaattgattttggtagattcaaactcagtatctatcaaacatttcaaagatccaaaagaccaaaccttaaacacccactcaaccatccaaatactaaaagttcttcaaccaagacactttggttcggacttgaacaaaggaaagagattttcagttccatttgatccagtaggttatacctattgggattacgttgatgcttggactaaggtgttttggcaccaaaatacccgcttcaaacattcatggctgatatatttcaagaccaacacaatttacaattttcccaattggtttttgcaatggtgggacttctttggaccaatcccagagatattcccaaaaacagtccaacaaggattttcccaatttaagaaacaatacaattcgcaggaatcaagaattccagcagatcttaaatacttttcaagctttgcactgtcatggatattctcatggcaatatcgttacagcaagactgaaaagacaaaccaatatccatcactacaaagacacgcatttgtaaaatggtggacacaatttgactcatccaaagcggatgcagaacaagtaaaactatggttccaatcccatccagaattcctcaaagcagctgatccagagacttctgtgtttttgaaccaaaagtctcatctggcagcatttttagcaggatcgacatcaaaggaggtcttagctaaaaatctgaaggaagttctacaaatgttacaacaggaagaagaagcttcatcctcaaagaaggaagaaacaagttctgctgaagaagacgaagaagatcccttttaccaaaacgaagatgattgttttggtatctgtttagattaaatttaatttcggtcacaaaaccgtctgtttgtaattaatgtgtaatgctggacaatactacctgtcctgtagccattaaagtcccggtcaaaactacttgtcttgtaacaaacagtcaaatagtcccggtcaaaactaccggcaactactggtcttagatttttggttatataaggagtcctcaagcatgttgtgaggcaccctttcatttagccatttttcaggtttcggaagagaggtgctctgaaacaagatt

SEQ ID NO: 13595 - DNA, 1078 bp, Glycine max
  Gm_smallRNAprecursor_6428
attcaaactcagtatctatcaaacatttcaaagatccaaaagaccaaaccttaaacacccactcaaccatccaaatactaaaagttcttcaaccaagacactttggttcggacttgaacaaaggaaagagattttcagttccatttgatccagtaggttatacctattgggattacgttgatgcttggactaaggtgttttggcaccaaaatacccgcttcaaacattcatggctgatatatttcaagaccaacacaatttacaattttcccaattggtttttgcaatggtgggacttctttggaccaatcccagagatattcccaaaaacagtccaacaaggattttcccaatttaagaaacaatacaattcgcaggaatcaagaattccagcagatcttaaatacttttcaagctttgcactgtcatggatattctcatggcaatatcgttacagcaagactgaaaagacaaaccaatatccatcactacaaagacacgcatttgtaaaatggtggacacaatttgactcatccaaagcggatgcagaacaagtaaaactatggttccaatcccatccagaattcctcaaagcagctgatccagagacttctgtgtttttgaaccaaaagtctcatctggcagcatttttagcaggatcgacatcaaaggaggtcttagctaaaaatctgaaggaagttctacaaatgttacaacaggaagaagaagcttcatcctcaaagaaggaagaaacaagttctgctgaagaagacgaagaagatcccttttaccaaaacgaagatgattgttttggtatctgtttagattaaatttaatttcggtcacaaaaccgtctgtttgtaattaatgtgtaatgctggacaatactacctgtcctgtagccattaaagtcccggtcaaaactacttgtcttgtaacaaacagtcaaatagtcccggtcaaaactaccggcaactactggtcttagatttttggttatataaggagtcctcaagcatgttgtgaggcaccctttcatttagccatttttcaggtttcggaagagaggtgctctgaa

SEQ ID NO: 13596 - DNA, 1079 bp, Glycine max
  Gm_smallRNAprecursor_6429
attcaaactcagtatctatcaaacatttcaaagatccaaaagaccaaaccttaaacacccactcaaccatccaaatactaaaagttcttcaaccaagacactttggttcggacttgaacaaaggaaagagattttcagttccatttgatccagtaggttatacctattgggattacgttgatgcttggactaaggtgttttggcaccaaaatacccgcttcaaacattcatggctgatatatttcaagaccaacacaatttacaattttcccaattggtttttgcaatggtgggacttctttggaccaatcccagagatattcccaaaaacagtccaacaaggattttcccaatttaagaaacaatacaattcgcaggaatcaagaattccagcagatcttaaatacttttcaagctttgcactgtcatggatattctcatggcaatatcgttacagcaagactgaaaagacaaaccaatatccatcactacaaagacacgcatttgtaaaatggtggacacaatttgactcatccaaagcggatgcagaacaagtaaaactatggttccaatcccatccagaattcctcaaagcagctgatccagagacttctgtgtttttgaaccaaaagtctcatctggcagcatttttagcaggatcgacatcaaaggaggtcttagctaaaaatctgaaggaagttctacaaatgttacaacaggaagaagaagcttcatcctcaaagaaggaagaaacaagttctgctgaagaagacgaagaagatcccttttaccaaaacgaagatgattgttttggtatctgtttagattaaatttaatttcggtcacaaaaccgtctgtttgtaattaatgtgtaatgctggacaatactacctgtcctgtagccattaaagtcccggtcaaaactacttgtcttgtaacaaacagtcaaatagtcccggtcaaaactaccggcaactactggtcttagatttttggttatataaggagtcctcaagcatgttgtgaggcaccctttcatttagccatttttcaggtttcggaagagaggtgctctgaaa

SEQ ID NO: 13597 - DNA, 1058 bp, Glycine max
  Gm_smallRNAprecursor_6430
accttaaacacccactcaaccatccaaatactaaaagttcttcaaccaagacactttggttcggacttgaacaaaggaaagagattttcagttccatttgatccagtaggttatacctattgggattacgttgatgcttggactaaggtgttttggcaccaaaatacccgcttcaaacattcatggctgatatatttcaagaccaacacaatttacaattttcccaattggtttttgcaatggtgggacttctttggaccaatcccagagatattcccaaaaacagtccaacaaggattttcccaatttaagaaacaatacaattcgcaggaatcaagaattccagcagatcttaaatacttttcaagctttgcactgtcatggatattctcatggcaatatcgttacagcaagactgaaaagacaaaccaatatccatcactacaaagacacgcatttgtaaaatggtggacacaatttgactcatccaaagcggatgcagaacaagtaaaactatggttccaatcccatccagaattcctcaaagcagctgatccagagacttctgtgtttttgaaccaaaagtctcatctggcagcatttttagcaggatcgacatcaaaggaggtcttagctaaaaatctgaaggaagttctacaaatgttacaacaggaagaagaagcttcatcctcaaagaaggaagaaacaagttctgctgaagaagacgaagaagatcccttttaccaaaacgaagatgattgttttggtatctgtttagattaaatttaatttcggtcacaaaaccgtctgtttgtaattaatgtgtaatgctggacaatactacctgtcctgtagccattaaagtcccggtcaaaactacttgtcttgtaacaaacagtcaaatagtcccggtcaaaactaccggcaactactggtcttagatttttggttatataaggagtcctcaagcatgttgtgaggcaccctttcatttagccatttttcaggtttcggaagagaggtgctctgaaacaagatttttgtaagcgcttctttct

SEQ ID NO: 13598 - DNA, 1036 bp, Glycine max
  Gm_smallRNAprecursor_6431
tccaaatactaaaagttcttcaaccaagacactttggttcggacttgaacaaaggaaagagattttcagttccatttgatccagtaggttatacctattgggattacgttgatgcttggactaaggtgttttggcaccaaaatacccgcttcaaacattcatggctgatatatttcaagaccaacacaatttacaattttcccaattggtttttgcaatggtgggacttctttggaccaatcccagagatattcccaaaaacagtccaacaaggattttcccaatttaagaaacaatacaattcgcaggaatcaagaattccagcagatcttaaatacttttcaagctttgcactgtcatggatattctcatggcaatatcgttacagcaagactgaaaagacaaaccaatatccatcactacaaagacacgcatttgtaaaatggtggacacaatttgactcatccaaagcggatgcagaacaagtaaaactatggttccaatcccatccagaattcctcaaagcagctgatccagagacttctgtgtttttgaaccaaaagtctcatctggcagcatttttagcaggatcgacatcaaaggaggtcttagctaaaaatctgaaggaagttctacaaatgttacaacaggaagaagaagcttcatcctcaaagaaggaagaaacaagttctgctgaagaagacgaagaagatcccttttaccaaaacgaagatgattgttttggtatctgtttagattaaatttaatttcggtcacaaaaccgtctgtttgtaattaatgtgtaatgctggacaatactacctgtcctgtagccattaaagtcccggtcaaaactacttgtcttgtaacaaacagtcaaatagtcccggtcaaaactaccggcaactactggtcttagatttttggttatataaggagtcctcaagcatgttgtgaggcaccctttcatttagccatttttcaggtttcggaagagaggtgctctgaaacaagatttttgtaagcgcttctttct

SEQ ID NO: 13599 - DNA, 1055 bp, Glycine max
  Gm_smallRNAprecursor_6432
tcttcaaccaagacactttggttcggacttgaacaaaggaaagagattttcagttccatttgatccagtaggttatacctattgggattacgttgatgcttggactaaggtgttttggcaccaaaatacccgcttcaaacattcatggctgatatatttcaagaccaacacaatttacaattttcccaattggtttttgcaatggtgggacttctttggaccaatcccagagatattcccaaaaacagtccaacaaggattttcccaatttaagaaacaatacaattcgcaggaatcaagaattccagcagatcttaaatacttttcaagctttgcactgtcatggatattctcatggcaatatcgttacagcaagactgaaaagacaaaccaatatccatcactacaaagacacgcatttgtaaaatggtggacacaatttgactcatccaaagcggatgcagaacaagtaaaactatggttccaatcccatccagaattcctcaaagcagctgatccagagacttctgtgtttttgaaccaaaagtctcatctggcagcatttttagcaggatcgacatcaaaggaggtcttagctaaaaatctgaaggaagttctacaaatgttacaacaggaagaagaagcttcatcctcaaagaaggaagaaacaagttctgctgaagaagacgaagaagatcccttttaccaaaacgaagatgattgttttggtatctgtttagattaaatttaatttcggtcacaaaaccgtctgtttgtaattaatgtgtaatgctggacaatactacctgtcctgtagccattaaagtcccggtcaaaactacttgtcttgtaacaaacagtcaaatagtcccggtcaaaactaccggcaactactggtcttagatttttggttatataaggagtcctcaagcatgttgtgaggcaccctttcatttagccatttttcaggtttcggaagagaggtgctctgaaacaagatttttgtaagcgcttctttctagatccaataaatttctatttttcatatatatata

SEQ ID NO: 13600 - DNA, 1215 bp, Glycine max
  Gm_smallRNAprecursor_6433
tcttcaaccaagacactttggttcggacttgaacaaaggaaagagattttcagttccatttgatccagtaggttatacctattgggattacgttgatgcttggactaaggtgttttggcaccaaaatacccgcttcaaacattcatggctgatatatttcaagaccaacacaatttacaattttcccaattggtttttgcaatggtgggacttctttggaccaatcccagagatattcccaaaaacagtccaacaaggattttcccaatttaagaaacaatacaattcgcaggaatcaagaattccagcagatcttaaatacttttcaagctttgcactgtcatggatattctcatggcaatatcgttacagcaagactgaaaagacaaaccaatatccatcactacaaagacacgcatttgtaaaatggtggacacaatttgactcatccaaagcggatgcagaacaagtaaaactatggttccaatcccatccagaattcctcaaagcagctgatccagagacttctgtgtttttgaaccaaaagtctcatctggcagcatttttagcaggatcgacatcaaaggaggtcttagctaaaaatctgaaggaagttctacaaatgttacaacaggaagaagaagcttcatcctcaaagaaggaagaaacaagttctgctgaagaagacgaagaagatcccttttaccaaaacgaagatgattgttttggtatctgtttagattaaatttaatttcggtcacaaaaccgtctgtttgtaattaatgtgtaatgctggacaatactacctgtcctgtagccattaaagtcccggtcaaaactacttgtcttgtaacaaacagtcaaatagtcccggtcaaaactaccggcaactactggtcttagatttttggttatataaggagtcctcaagcatgttgtgaggcaccctttcatttagccatttttcaggtttcggaagagaggtgctctgaaacaagatttttgtaagcgcttctttctagatccaataaatttctatttttcatatatatatatatatcttcaccgatcctgtgcggctctgccgccgcttcgatttctttgtttatgaaaacctgggatttgtaagccggtctctggtgtgaaacatgaatttgaaaaatattaccttttttgataaaattgtctacaaggttttttctaacaagtcgagat

SEQ ID NO: 13601 - DNA, 1216 bp, Glycine max
  Gm_smallRNAprecursor_6434
tcttcaaccaagacactttggttcggacttgaacaaaggaaagagattttcagttccatttgatccagtaggttatacctattgggattacgttgatgcttggactaaggtgttttggcaccaaaatacccgcttcaaacattcatggctgatatatttcaagaccaacacaatttacaattttcccaattggtttttgcaatggtgggacttctttggaccaatcccagagatattcccaaaaacagtccaacaaggattttcccaatttaagaaacaatacaattcgcaggaatcaagaattccagcagatcttaaatacttttcaagctttgcactgtcatggatattctcatggcaatatcgttacagcaagactgaaaagacaaaccaatatccatcactacaaagacacgcatttgtaaaatggtggacacaatttgactcatccaaagcggatgcagaacaagtaaaactatggttccaatcccatccagaattcctcaaagcagctgatccagagacttctgtgtttttgaaccaaaagtctcatctggcagcatttttagcaggatcgacatcaaaggaggtcttagctaaaaatctgaaggaagttctacaaatgttacaacaggaagaagaagcttcatcctcaaagaaggaagaaacaagttctgctgaagaagacgaagaagatcccttttaccaaaacgaagatgattgttttggtatctgtttagattaaatttaatttcggtcacaaaaccgtctgtttgtaattaatgtgtaatgctggacaatactacctgtcctgtagccattaaagtcccggtcaaaactacttgtcttgtaacaaacagtcaaatagtcccggtcaaaactaccggcaactactggtcttagatttttggttatataaggagtcctcaagcatgttgtgaggcaccctttcatttagccatttttcaggtttcggaagagaggtgctctgaaacaagatttttgtaagcgcttctttctagatccaataaatttctatttttcatatatatatatatatcttcaccgatcctgtgcggctctgccgccgcttcgatttctttgtttatgaaaacctgggatttgtaagccggtctctggtgtgaaacatgaatttgaaaaatattaccttttttgataaaattgtctacaaggttttttctaacaagtcgagatg

SEQ ID NO: 13602 - DNA, 1053 bp, Glycine max
  Gm_smallRNAprecursor_6435
cttcaaccaagacactttggttcggacttgaacaaaggaaagagattttcagttccatttgatccagtaggttatacctattgggattacgttgatgcttggactaaggtgttttggcaccaaaatacccgcttcaaacattcatggctgatatatttcaagaccaacacaatttacaattttcccaattggtttttgcaatggtgggacttctttggaccaatcccagagatattcccaaaaacagtccaacaaggattttcccaatttaagaaacaatacaattcgcaggaatcaagaattccagcagatcttaaatacttttcaagctttgcactgtcatggatattctcatggcaatatcgttacagcaagactgaaaagacaaaccaatatccatcactacaaagacacgcatttgtaaaatggtggacacaatttgactcatccaaagcggatgcagaacaagtaaaactatggttccaatcccatccagaattcctcaaagcagctgatccagagacttctgtgtttttgaaccaaaagtctcatctggcagcatttttagcaggatcgacatcaaaggaggtcttagctaaaaatctgaaggaagttctacaaatgttacaacaggaagaagaagcttcatcctcaaagaaggaagaaacaagttctgctgaagaagacgaagaagatcccttttaccaaaacgaagatgattgttttggtatctgtttagattaaatttaatttcggtcacaaaaccgtctgtttgtaattaatgtgtaatgctggacaatactacctgtcctgtagccattaaagtcccggtcaaaactacttgtcttgtaacaaacagtcaaatagtcccggtcaaaactaccggcaactactggtcttagatttttggttatataaggagtcctcaagcatgttgtgaggcaccctttcatttagccatttttcaggtttcggaagagaggtgctctgaaacaagatttttgtaagcgcttctttctagatccaataaatttctatttttcatatatatat

SEQ ID NO: 13603 - DNA, 1054 bp, Glycine max
  Gm_smallRNAprecursor_6436
cttcaaccaagacactttggttcggacttgaacaaaggaaagagattttcagttccatttgatccagtaggttatacctattgggattacgttgatgcttggactaaggtgttttggcaccaaaatacccgcttcaaacattcatggctgatatatttcaagaccaacacaatttacaattttcccaattggtttttgcaatggtgggacttctttggaccaatcccagagatattcccaaaaacagtccaacaaggattttcccaatttaagaaacaatacaattcgcaggaatcaagaattccagcagatcttaaatacttttcaagctttgcactgtcatggatattctcatggcaatatcgttacagcaagactgaaaagacaaaccaatatccatcactacaaagacacgcatttgtaaaatggtggacacaatttgactcatccaaagcggatgcagaacaagtaaaactatggttccaatcccatccagaattcctcaaagcagctgatccagagacttctgtgtttttgaaccaaaagtctcatctggcagcatttttagcaggatcgacatcaaaggaggtcttagctaaaaatctgaaggaagttctacaaatgttacaacaggaagaagaagcttcatcctcaaagaaggaagaaacaagttctgctgaagaagacgaagaagatcccttttaccaaaacgaagatgattgttttggtatctgtttagattaaatttaatttcggtcacaaaaccgtctgtttgtaattaatgtgtaatgctggacaatactacctgtcctgtagccattaaagtcccggtcaaaactacttgtcttgtaacaaacagtcaaatagtcccggtcaaaactaccggcaactactggtcttagatttttggttatataaggagtcctcaagcatgttgtgaggcaccctttcatttagccatttttcaggtttcggaagagaggtgctctgaaacaagatttttgtaagcgcttctttctagatccaataaatttctatttttcatatatatata

SEQ ID NO: 13604 - DNA, 1041 bp, Glycine max
  Gm_smallRNAprecursor_6437
accaagacactttggttcggacttgaacaaaggaaagagattttcagttccatttgatccagtaggttatacctattgggattacgttgatgcttggactaaggtgttttggcaccaaaatacccgcttcaaacattcatggctgatatatttcaagaccaacacaatttacaattttcccaattggtttttgcaatggtgggacttctttggaccaatcccagagatattcccaaaaacagtccaacaaggattttcccaatttaagaaacaatacaattcgcaggaatcaagaattccagcagatcttaaatacttttcaagctttgcactgtcatggatattctcatggcaatatcgttacagcaagactgaaaagacaaaccaatatccatcactacaaagacacgcatttgtaaaatggtggacacaatttgactcatccaaagcggatgcagaacaagtaaaactatggttccaatcccatccagaattcctcaaagcagctgatccagagacttctgtgtttttgaaccaaaagtctcatctggcagcatttttagcaggatcgacatcaaaggaggtcttagctaaaaatctgaaggaagttctacaaatgttacaacaggaagaagaagcttcatcctcaaagaaggaagaaacaagttctgctgaagaagacgaagaagatcccttttaccaaaacgaagatgattgttttggtatctgtttagattaaatttaatttcggtcacaaaaccgtctgtttgtaattaatgtgtaatgctggacaatactacctgtcctgtagccattaaagtcccggtcaaaactacttgtcttgtaacaaacagtcaaatagtcccggtcaaaactaccggcaactactggtcttagatttttggttatataaggagtcctcaagcatgttgtgaggcaccctttcatttagccatttttcaggtttcggaagagaggtgctctgaaacaagatttttgtaagcgcttctttctagatccaataaatttctatttttcata

SEQ ID NO: 13605 - DNA, 1031 bp, Glycine max
  Gm_smallRNAprecursor_6438
gacactttggttcggacttgaacaaaggaaagagattttcagttccatttgatccagtaggttatacctattgggattacgttgatgcttggactaaggtgttttggcaccaaaatacccgcttcaaacattcatggctgatatatttcaagaccaacacaatttacaattttcccaattggtttttgcaatggtgggacttctttggaccaatcccagagatattcccaaaaacagtccaacaaggattttcccaatttaagaaacaatacaattcgcaggaatcaagaattccagcagatcttaaatacttttcaagctttgcactgtcatggatattctcatggcaatatcgttacagcaagactgaaaagacaaaccaatatccatcactacaaagacacgcatttgtaaaatggtggacacaatttgactcatccaaagcggatgcagaacaagtaaaactatggttccaatcccatccagaattcctcaaagcagctgatccagagacttctgtgtttttgaaccaaaagtctcatctggcagcatttttagcaggatcgacatcaaaggaggtcttagctaaaaatctgaaggaagttctacaaatgttacaacaggaagaagaagcttcatcctcaaagaaggaagaaacaagttctgctgaagaagacgaagaagatcccttttaccaaaacgaagatgattgttttggtatctgtttagattaaatttaatttcggtcacaaaaccgtctgtttgtaattaatgtgtaatgctggacaatactacctgtcctgtagccattaaagtcccggtcaaaactacttgtcttgtaacaaacagtcaaatagtcccggtcaaaactaccggcaactactggtcttagatttttggttatataaggagtcctcaagcatgttgtgaggcaccctttcatttagccatttttcaggtttcggaagagaggtgctctgaaacaagatttttgtaagcgcttctttctagatccaataaatttctatttt

SEQ ID NO: 13606 - DNA, 1138 bp, Glycine max
  Gm_smallRNAprecursor_6439
ggttcggacttgaacaaaggaaagagattttcagttccatttgatccagtaggttatacctattgggattacgttgatgcttggactaaggtgttttggcaccaaaatacccgcttcaaacattcatggctgatatatttcaagaccaacacaatttacaattttcccaattggtttttgcaatggtgggacttctttggaccaatcccagagatattcccaaaaacagtccaacaaggattttcccaatttaagaaacaatacaattcgcaggaatcaagaattccagcagatcttaaatacttttcaagctttgcactgtcatggatattctcatggcaatatcgttacagcaagactgaaaagacaaaccaatatccatcactacaaagacacgcatttgtaaaatggtggacacaatttgactcatccaaagcggatgcagaacaagtaaaactatggttccaatcccatccagaattcctcaaagcagctgatccagagacttctgtgtttttgaaccaaaagtctcatctggcagcatttttagcaggatcgacatcaaaggaggtcttagctaaaaatctgaaggaagttctacaaatgttacaacaggaagaagaagcttcatcctcaaagaaggaagaaacaagttctgctgaagaagacgaagaagatcccttttaccaaaacgaagatgattgttttggtatctgtttagattaaatttaatttcggtcacaaaaccgtctgtttgtaattaatgtgtaatgctggacaatactacctgtcctgtagccattaaagtcccggtcaaaactacttgtcttgtaacaaacagtcaaatagtcccggtcaaaactaccggcaactactggtcttagatttttggttatataaggagtcctcaagcatgttgtgaggcaccctttcatttagccatttttcaggtttcggaagagaggtgctctgaaacaagatttttgtaagcgcttctttctagatccaataaatttctatttttcatatatatatatatatcttcaccgatcctgtgcggctctgccgccgcttcgatttctttgtttatgaaaacctgggatttgtaagccggtctctggtgtgaaacatgaatttg

SEQ ID NO: 13607 - DNA, 1139 bp, Glycine max
  Gm_smallRNAprecursor_6440
ggttcggacttgaacaaaggaaagagattttcagttccatttgatccagtaggttatacctattgggattacgttgatgcttggactaaggtgttttggcaccaaaatacccgcttcaaacattcatggctgatatatttcaagaccaacacaatttacaattttcccaattggtttttgcaatggtgggacttctttggaccaatcccagagatattcccaaaaacagtccaacaaggattttcccaatttaagaaacaatacaattcgcaggaatcaagaattccagcagatcttaaatacttttcaagctttgcactgtcatggatattctcatggcaatatcgttacagcaagactgaaaagacaaaccaatatccatcactacaaagacacgcatttgtaaaatggtggacacaatttgactcatccaaagcggatgcagaacaagtaaaactatggttccaatcccatccagaattcctcaaagcagctgatccagagacttctgtgtttttgaaccaaaagtctcatctggcagcatttttagcaggatcgacatcaaaggaggtcttagctaaaaatctgaaggaagttctacaaatgttacaacaggaagaagaagcttcatcctcaaagaaggaagaaacaagttctgctgaagaagacgaagaagatcccttttaccaaaacgaagatgattgttttggtatctgtttagattaaatttaatttcggtcacaaaaccgtctgtttgtaattaatgtgtaatgctggacaatactacctgtcctgtagccattaaagtcccggtcaaaactacttgtcttgtaacaaacagtcaaatagtcccggtcaaaactaccggcaactactggtcttagatttttggttatataaggagtcctcaagcatgttgtgaggcaccctttcatttagccatttttcaggtttcggaagagaggtgctctgaaacaagatttttgtaagcgcttctttctagatccaataaatttctatttttcatatatatatatatatcttcaccgatcctgtgcggctctgccgccgcttcgatttctttgtttatgaaaacctgggatttgtaagccggtctctggtgtgaaacatgaatttga

SEQ ID NO: 13608 - DNA, 1141 bp, Glycine max
  Gm_smallRNAprecursor_6441
ggttcggacttgaacaaaggaaagagattttcagttccatttgatccagtaggttatacctattgggattacgttgatgcttggactaaggtgttttggcaccaaaatacccgcttcaaacattcatggctgatatatttcaagaccaacacaatttacaattttcccaattggtttttgcaatggtgggacttctttggaccaatcccagagatattcccaaaaacagtccaacaaggattttcccaatttaagaaacaatacaattcgcaggaatcaagaattccagcagatcttaaatacttttcaagctttgcactgtcatggatattctcatggcaatatcgttacagcaagactgaaaagacaaaccaatatccatcactacaaagacacgcatttgtaaaatggtggacacaatttgactcatccaaagcggatgcagaacaagtaaaactatggttccaatcccatccagaattcctcaaagcagctgatccagagacttctgtgtttttgaaccaaaagtctcatctggcagcatttttagcaggatcgacatcaaaggaggtcttagctaaaaatctgaaggaagttctacaaatgttacaacaggaagaagaagcttcatcctcaaagaaggaagaaacaagttctgctgaagaagacgaagaagatcccttttaccaaaacgaagatgattgttttggtatctgtttagattaaatttaatttcggtcacaaaaccgtctgtttgtaattaatgtgtaatgctggacaatactacctgtcctgtagccattaaagtcccggtcaaaactacttgtcttgtaacaaacagtcaaatagtcccggtcaaaactaccggcaactactggtcttagatttttggttatataaggagtcctcaagcatgttgtgaggcaccctttcatttagccatttttcaggtttcggaagagaggtgctctgaaacaagatttttgtaagcgcttctttctagatccaataaatttctatttttcatatatatatatatatcttcaccgatcctgtgcggctctgccgccgcttcgatttctttgtttatgaaaacctgggatttgtaagccggtctctggtgtgaaacatgaatttgaaa

SEQ ID NO: 13609 - DNA, 1187 bp, Glycine max
  Gm_smallRNAprecursor_6442
ggttcggacttgaacaaaggaaagagattttcagttccatttgatccagtaggttatacctattgggattacgttgatgcttggactaaggtgttttggcaccaaaatacccgcttcaaacattcatggctgatatatttcaagaccaacacaatttacaattttcccaattggtttttgcaatggtgggacttctttggaccaatcccagagatattcccaaaaacagtccaacaaggattttcccaatttaagaaacaatacaattcgcaggaatcaagaattccagcagatcttaaatacttttcaagctttgcactgtcatggatattctcatggcaatatcgttacagcaagactgaaaagacaaaccaatatccatcactacaaagacacgcatttgtaaaatggtggacacaatttgactcatccaaagcggatgcagaacaagtaaaactatggttccaatcccatccagaattcctcaaagcagctgatccagagacttctgtgtttttgaaccaaaagtctcatctggcagcatttttagcaggatcgacatcaaaggaggtcttagctaaaaatctgaaggaagttctacaaatgttacaacaggaagaagaagcttcatcctcaaagaaggaagaaacaagttctgctgaagaagacgaagaagatcccttttaccaaaacgaagatgattgttttggtatctgtttagattaaatttaatttcggtcacaaaaccgtctgtttgtaattaatgtgtaatgctggacaatactacctgtcctgtagccattaaagtcccggtcaaaactacttgtcttgtaacaaacagtcaaatagtcccggtcaaaactaccggcaactactggtcttagatttttggttatataaggagtcctcaagcatgttgtgaggcaccctttcatttagccatttttcaggtttcggaagagaggtgctctgaaacaagatttttgtaagcgcttctttctagatccaataaatttctatttttcatatatatatatatatcttcaccgatcctgtgcggctctgccgccgcttcgatttctttgtttatgaaaacctgggatttgtaagccggtctctggtgtgaaacatgaatttgaaaaatattaccttttttgataaaattgtctacaaggttttttctaaca

SEQ ID NO: 13610 - DNA, 1080 bp, Glycine max
  Gm_smallRNAprecursor_6443
tcaaacattcatggctgatatatttcaagaccaacacaatttacaattttcccaattggtttttgcaatggtgggacttctttggaccaatcccagagatattcccaaaaacagtccaacaaggattttcccaatttaagaaacaatacaattcgcaggaatcaagaattccagcagatcttaaatacttttcaagctttgcactgtcatggatattctcatggcaatatcgttacagcaagactgaaaagacaaaccaatatccatcactacaaagacacgcatttgtaaaatggtggacacaatttgactcatccaaagcggatgcagaacaagtaaaactatggttccaatcccatccagaattcctcaaagcagctgatccagagacttctgtgtttttgaaccaaaagtctcatctggcagcatttttagcaggatcgacatcaaaggaggtcttagctaaaaatctgaaggaagttctacaaatgttacaacaggaagaagaagcttcatcctcaaagaaggaagaaacaagttctgctgaagaagacgaagaagatcccttttaccaaaacgaagatgattgttttggtatctgtttagattaaatttaatttcggtcacaaaaccgtctgtttgtaattaatgtgtaatgctggacaatactacctgtcctgtagccattaaagtcccggtcaaaactacttgtcttgtaacaaacagtcaaatagtcccggtcaaaactaccggcaactactggtcttagatttttggttatataaggagtcctcaagcatgttgtgaggcaccctttcatttagccatttttcaggtttcggaagagaggtgctctgaaacaagatttttgtaagcgcttctttctagatccaataaatttctatttttcatatatatatatatatcttcaccgatcctgtgcggctctgccgccgcttcgatttctttgtttatgaaaacctgggatttgtaagccggtctctggtgtgaaacatgaatttgaaaaatattaccttttttgataaaattgtctacaaggttttttctaacaagtcgaga

SEQ ID NO: 13611 - DNA, 1081 bp, Glycine max
  Gm_smallRNAprecursor_6444
tcaaacattcatggctgatatatttcaagaccaacacaatttacaattttcccaattggtttttgcaatggtgggacttctttggaccaatcccagagatattcccaaaaacagtccaacaaggattttcccaatttaagaaacaatacaattcgcaggaatcaagaattccagcagatcttaaatacttttcaagctttgcactgtcatggatattctcatggcaatatcgttacagcaagactgaaaagacaaaccaatatccatcactacaaagacacgcatttgtaaaatggtggacacaatttgactcatccaaagcggatgcagaacaagtaaaactatggttccaatcccatccagaattcctcaaagcagctgatccagagacttctgtgtttttgaaccaaaagtctcatctggcagcatttttagcaggatcgacatcaaaggaggtcttagctaaaaatctgaaggaagttctacaaatgttacaacaggaagaagaagcttcatcctcaaagaaggaagaaacaagttctgctgaagaagacgaagaagatcccttttaccaaaacgaagatgattgttttggtatctgtttagattaaatttaatttcggtcacaaaaccgtctgtttgtaattaatgtgtaatgctggacaatactacctgtcctgtagccattaaagtcccggtcaaaactacttgtcttgtaacaaacagtcaaatagtcccggtcaaaactaccggcaactactggtcttagatttttggttatataaggagtcctcaagcatgttgtgaggcaccctttcatttagccatttttcaggtttcggaagagaggtgctctgaaacaagatttttgtaagcgcttctttctagatccaataaatttctatttttcatatatatatatatatcttcaccgatcctgtgcggctctgccgccgcttcgatttctttgtttatgaaaacctgggatttgtaagccggtctctggtgtgaaacatgaatttgaaaaatattaccttttttgataaaattgtctacaaggttttttctaacaagtcgagat

SEQ ID NO: 13612 - DNA, 1082 bp, Glycine max
  Gm_smallRNAprecursor_6445
tcaaacattcatggctgatatatttcaagaccaacacaatttacaattttcccaattggtttttgcaatggtgggacttctttggaccaatcccagagatattcccaaaaacagtccaacaaggattttcccaatttaagaaacaatacaattcgcaggaatcaagaattccagcagatcttaaatacttttcaagctttgcactgtcatggatattctcatggcaatatcgttacagcaagactgaaaagacaaaccaatatccatcactacaaagacacgcatttgtaaaatggtggacacaatttgactcatccaaagcggatgcagaacaagtaaaactatggttccaatcccatccagaattcctcaaagcagctgatccagagacttctgtgtttttgaaccaaaagtctcatctggcagcatttttagcaggatcgacatcaaaggaggtcttagctaaaaatctgaaggaagttctacaaatgttacaacaggaagaagaagcttcatcctcaaagaaggaagaaacaagttctgctgaagaagacgaagaagatcccttttaccaaaacgaagatgattgttttggtatctgtttagattaaatttaatttcggtcacaaaaccgtctgtttgtaattaatgtgtaatgctggacaatactacctgtcctgtagccattaaagtcccggtcaaaactacttgtcttgtaacaaacagtcaaatagtcccggtcaaaactaccggcaactactggtcttagatttttggttatataaggagtcctcaagcatgttgtgaggcaccctttcatttagccatttttcaggtttcggaagagaggtgctctgaaacaagatttttgtaagcgcttctttctagatccaataaatttctatttttcatatatatatatatatcttcaccgatcctgtgcggctctgccgccgcttcgatttctttgtttatgaaaacctgggatttgtaagccggtctctggtgtgaaacatgaatttgaaaaatattaccttttttgataaaattgtctacaaggttttttctaacaagtcgagatg

SEQ ID NO: 13613 - DNA, 1057 bp, Glycine max
  Gm_smallRNAprecursor_6446
atttcaagaccaacacaatttacaattttcccaattggtttttgcaatggtgggacttctttggaccaatcccagagatattcccaaaaacagtccaacaaggattttcccaatttaagaaacaatacaattcgcaggaatcaagaattccagcagatcttaaatacttttcaagctttgcactgtcatggatattctcatggcaatatcgttacagcaagactgaaaagacaaaccaatatccatcactacaaagacacgcatttgtaaaatggtggacacaatttgactcatccaaagcggatgcagaacaagtaaaactatggttccaatcccatccagaattcctcaaagcagctgatccagagacttctgtgtttttgaaccaaaagtctcatctggcagcatttttagcaggatcgacatcaaaggaggtcttagctaaaaatctgaaggaagttctacaaatgttacaacaggaagaagaagcttcatcctcaaagaaggaagaaacaagttctgctgaagaagacgaagaagatcccttttaccaaaacgaagatgattgttttggtatctgtttagattaaatttaatttcggtcacaaaaccgtctgtttgtaattaatgtgtaatgctggacaatactacctgtcctgtagccattaaagtcccggtcaaaactacttgtcttgtaacaaacagtcaaatagtcccggtcaaaactaccggcaactactggtcttagatttttggttatataaggagtcctcaagcatgttgtgaggcaccctttcatttagccatttttcaggtttcggaagagaggtgctctgaaacaagatttttgtaagcgcttctttctagatccaataaatttctatttttcatatatatatatatatcttcaccgatcctgtgcggctctgccgccgcttcgatttctttgtttatgaaaacctgggatttgtaagccggtctctggtgtgaaacatgaatttgaaaaatattaccttttttgataaaattgtctacaaggttttttctaacaagtcga

SEQ ID NO: 13614 - DNA, 1064 bp, Glycine max
  Gm_smallRNAprecursor_6447
atttcaagaccaacacaatttacaattttcccaattggtttttgcaatggtgggacttctttggaccaatcccagagatattcccaaaaacagtccaacaaggattttcccaatttaagaaacaatacaattcgcaggaatcaagaattccagcagatcttaaatacttttcaagctttgcactgtcatggatattctcatggcaatatcgttacagcaagactgaaaagacaaaccaatatccatcactacaaagacacgcatttgtaaaatggtggacacaatttgactcatccaaagcggatgcagaacaagtaaaactatggttccaatcccatccagaattcctcaaagcagctgatccagagacttctgtgtttttgaaccaaaagtctcatctggcagcatttttagcaggatcgacatcaaaggaggtcttagctaaaaatctgaaggaagttctacaaatgttacaacaggaagaagaagcttcatcctcaaagaaggaagaaacaagttctgctgaagaagacgaagaagatcccttttaccaaaacgaagatgattgttttggtatctgtttagattaaatttaatttcggtcacaaaaccgtctgtttgtaattaatgtgtaatgctggacaatactacctgtcctgtagccattaaagtcccggtcaaaactacttgtcttgtaacaaacagtcaaatagtcccggtcaaaactaccggcaactactggtcttagatttttggttatataaggagtcctcaagcatgttgtgaggcaccctttcatttagccatttttcaggtttcggaagagaggtgctctgaaacaagatttttgtaagcgcttctttctagatccaataaatttctatttttcatatatatatatatatcttcaccgatcctgtgcggctctgccgccgcttcgatttctttgtttatgaaaacctgggatttgtaagccggtctctggtgtgaaacatgaatttgaaaaatattaccttttttgataaaattgtctacaaggttttttctaacaagtcgagatgtta

SEQ ID NO: 13615 - DNA, 1059 bp, Glycine max
  Gm_smallRNAprecursor_6448
tttcaagaccaacacaatttacaattttcccaattggtttttgcaatggtgggacttctttggaccaatcccagagatattcccaaaaacagtccaacaaggattttcccaatttaagaaacaatacaattcgcaggaatcaagaattccagcagatcttaaatacttttcaagctttgcactgtcatggatattctcatggcaatatcgttacagcaagactgaaaagacaaaccaatatccatcactacaaagacacgcatttgtaaaatggtggacacaatttgactcatccaaagcggatgcagaacaagtaaaactatggttccaatcccatccagaattcctcaaagcagctgatccagagacttctgtgtttttgaaccaaaagtctcatctggcagcatttttagcaggatcgacatcaaaggaggtcttagctaaaaatctgaaggaagttctacaaatgttacaacaggaagaagaagcttcatcctcaaagaaggaagaaacaagttctgctgaagaagacgaagaagatcccttttaccaaaacgaagatgattgttttggtatctgtttagattaaatttaatttcggtcacaaaaccgtctgtttgtaattaatgtgtaatgctggacaatactacctgtcctgtagccattaaagtcccggtcaaaactacttgtcttgtaacaaacagtcaaatagtcccggtcaaaactaccggcaactactggtcttagatttttggttatataaggagtcctcaagcatgttgtgaggcaccctttcatttagccatttttcaggtttcggaagagaggtgctctgaaacaagatttttgtaagcgcttctttctagatccaataaatttctatttttcatatatatatatatatcttcaccgatcctgtgcggctctgccgccgcttcgatttctttgtttatgaaaacctgggatttgtaagccggtctctggtgtgaaacatgaatttgaaaaatattaccttttttgataaaattgtctacaaggttttttctaacaagtcgagat

SEQ ID NO: 13616 - DNA, 1060 bp, Glycine max
  Gm_smallRNAprecursor_6449
tttcaagaccaacacaatttacaattttcccaattggtttttgcaatggtgggacttctttggaccaatcccagagatattcccaaaaacagtccaacaaggattttcccaatttaagaaacaatacaattcgcaggaatcaagaattccagcagatcttaaatacttttcaagctttgcactgtcatggatattctcatggcaatatcgttacagcaagactgaaaagacaaaccaatatccatcactacaaagacacgcatttgtaaaatggtggacacaatttgactcatccaaagcggatgcagaacaagtaaaactatggttccaatcccatccagaattcctcaaagcagctgatccagagacttctgtgtttttgaaccaaaagtctcatctggcagcatttttagcaggatcgacatcaaaggaggtcttagctaaaaatctgaaggaagttctacaaatgttacaacaggaagaagaagcttcatcctcaaagaaggaagaaacaagttctgctgaagaagacgaagaagatcccttttaccaaaacgaagatgattgttttggtatctgtttagattaaatttaatttcggtcacaaaaccgtctgtttgtaattaatgtgtaatgctggacaatactacctgtcctgtagccattaaagtcccggtcaaaactacttgtcttgtaacaaacagtcaaatagtcccggtcaaaactaccggcaactactggtcttagatttttggttatataaggagtcctcaagcatgttgtgaggcaccctttcatttagccatttttcaggtttcggaagagaggtgctctgaaacaagatttttgtaagcgcttctttctagatccaataaatttctatttttcatatatatatatatatcttcaccgatcctgtgcggctctgccgccgcttcgatttctttgtttatgaaaacctgggatttgtaagccggtctctggtgtgaaacatgaatttgaaaaatattaccttttttgataaaattgtctacaaggttttttctaacaagtcgagatg

SEQ ID NO: 13617 - DNA, 1060 bp, Glycine max; identical to SEQ ID NO: 13616
  Gm_smallRNAprecursor_6450

SEQ ID NO: 13618 - DNA, 1063 bp, Glycine max
  Gm_smallRNAprecursor_6451
tttcaagaccaacacaatttacaattttcccaattggtttttgcaatggtgggacttctttggaccaatcccagagatattcccaaaaacagtccaacaaggattttcccaatttaagaaacaatacaattcgcaggaatcaagaattccagcagatcttaaatacttttcaagctttgcactgtcatggatattctcatggcaatatcgttacagcaagactgaaaagacaaaccaatatccatcactacaaagacacgcatttgtaaaatggtggacacaatttgactcatccaaagcggatgcagaacaagtaaaactatggttccaatcccatccagaattcctcaaagcagctgatccagagacttctgtgtttttgaaccaaaagtctcatctggcagcatttttagcaggatcgacatcaaaggaggtcttagctaaaaatctgaaggaagttctacaaatgttacaacaggaagaagaagcttcatcctcaaagaaggaagaaacaagttctgctgaagaagacgaagaagatcccttttaccaaaacgaagatgattgttttggtatctgtttagattaaatttaatttcggtcacaaaaccgtctgtttgtaattaatgtgtaatgctggacaatactacctgtcctgtagccattaaagtcccggtcaaaactacttgtcttgtaacaaacagtcaaatagtcccggtcaaaactaccggcaactactggtcttagatttttggttatataaggagtcctcaagcatgttgtgaggcaccctttcatttagccatttttcaggtttcggaagagaggtgctctgaaacaagatttttgtaagcgcttctttctagatccaataaatttctatttttcatatatatatatatatcttcaccgatcctgtgcggctctgccgccgcttcgatttctttgtttatgaaaacctgggatttgtaagccggtctctggtgtgaaacatgaatttgaaaaatattaccttttttgataaaattgtctacaaggttttttctaacaagtcgagatgtta

SEQ ID NO: 13619 - DNA, 1056 bp, Glycine max
  Gm_smallRNAprecursor_6452
caagaccaacacaatttacaattttcccaattggtttttgcaatggtgggacttctttggaccaatcccagagatattcccaaaaacagtccaacaaggattttcccaatttaagaaacaatacaattcgcaggaatcaagaattccagcagatcttaaatacttttcaagctttgcactgtcatggatattctcatggcaatatcgttacagcaagactgaaaagacaaaccaatatccatcactacaaagacacgcatttgtaaaatggtggacacaatttgactcatccaaagcggatgcagaacaagtaaaactatggttccaatcccatccagaattcctcaaagcagctgatccagagacttctgtgtttttgaaccaaaagtctcatctggcagcatttttagcaggatcgacatcaaaggaggtcttagctaaaaatctgaaggaagttctacaaatgttacaacaggaagaagaagcttcatcctcaaagaaggaagaaacaagttctgctgaagaagacgaagaagatcccttttaccaaaacgaagatgattgttttggtatctgtttagattaaatttaatttcggtcacaaaaccgtctgtttgtaattaatgtgtaatgctggacaatactacctgtcctgtagccattaaagtcccggtcaaaactacttgtcttgtaacaaacagtcaaatagtcccggtcaaaactaccggcaactactggtcttagatttttggttatataaggagtcctcaagcatgttgtgaggcaccctttcatttagccatttttcaggtttcggaagagaggtgctctgaaacaagatttttgtaagcgcttctttctagatccaataaatttctatttttcatatatatatatatatcttcaccgatcctgtgcggctctgccgccgcttcgatttctttgtttatgaaaacctgggatttgtaagccggtctctggtgtgaaacatgaatttgaaaaatattaccttttttgataaaattgtctacaaggttttttctaacaagtcgagat

SEQ ID NO: 13620 - DNA, 1056 bp, Glycine max; identical to SEQ ID NO: 13619
  Gm_smallRNAprecursor_6453

SEQ ID NO: 13621 - DNA, 1057 bp, Glycine max
  Gm_smallRNAprecursor_6454
caagaccaacacaatttacaattttcccaattggtttttgcaatggtgggacttctttggaccaatcccagagatattcccaaaaacagtccaacaaggattttcccaatttaagaaacaatacaattcgcaggaatcaagaattccagcagatcttaaatacttttcaagctttgcactgtcatggatattctcatggcaatatcgttacagcaagactgaaaagacaaaccaatatccatcactacaaagacacgcatttgtaaaatggtggacacaatttgactcatccaaagcggatgcagaacaagtaaaactatggttccaatcccatccagaattcctcaaagcagctgatccagagacttctgtgtttttgaaccaaaagtctcatctggcagcatttttagcaggatcgacatcaaaggaggtcttagctaaaaatctgaaggaagttctacaaatgttacaacaggaagaagaagcttcatcctcaaagaaggaagaaacaagttctgctgaagaagacgaagaagatcccttttaccaaaacgaagatgattgttttggtatctgtttagattaaatttaatttcggtcacaaaaccgtctgtttgtaattaatgtgtaatgctggacaatactacctgtcctgtagccattaaagtcccggtcaaaactacttgtcttgtaacaaacagtcaaatagtcccggtcaaaactaccggcaactactggtcttagatttttggttatataaggagtcctcaagcatgttgtgaggcaccctttcatttagccatttttcaggtttcggaagagaggtgctctgaaacaagatttttgtaagcgcttctttctagatccaataaatttctatttttcatatatatatatatatcttcaccgatcctgtgcggctctgccgccgcttcgatttctttgtttatgaaaacctgggatttgtaagccggtctctggtgtgaaacatgaatttgaaaaatattaccttttttgataaaattgtctacaaggttttttctaacaagtcgagatg

SEQ ID NO: 13622 - DNA, 1057 bp, Glycine max; identical to SEQ ID NO: 13621
  Gm_smallRNAprecursor_6455

SEQ ID NO: 13623 - DNA, 1057 bp, Glycine max; identical to SEQ ID NO: 13621
  Gm_smallRNAprecursor_6456

SEQ ID NO: 13624 - DNA, 1057 bp, Glycine max; identical to SEQ ID NO: 13621
  Gm_smallRNAprecursor_6457

SEQ ID NO: 13625 - DNA, 1151 bp, Glycine max
  Gm_smallRNAprecursor_6458
tgggacttctttggaccaatcccagagatattcccaaaaacagtccaacaaggattttcccaatttaagaaacaatacaattcgcaggaatcaagaattccagcagatcttaaatacttttcaagctttgcactgtcatggatattctcatggcaatatcgttacagcaagactgaaaagacaaaccaatatccatcactacaaagacacgcatttgtaaaatggtggacacaatttgactcatccaaagcggatgcagaacaagtaaaactatggttccaatcccatccagaattcctcaaagcagctgatccagagacttctgtgtttttgaaccaaaagtctcatctggcagcatttttagcaggatcgacatcaaaggaggtcttagctaaaaatctgaaggaagttctacaaatgttacaacaggaagaagaagcttcatcctcaaagaaggaagaaacaagttctgctgaagaagacgaagaagatcccttttaccaaaacgaagatgattgttttggtatctgtttagattaaatttaatttcggtcacaaaaccgtctgtttgtaattaatgtgtaatgctggacaatactacctgtcctgtagccattaaagtcccggtcaaaactacttgtcttgtaacaaacagtcaaatagtcccggtcaaaactaccggcaactactggtcttagatttttggttatataaggagtcctcaagcatgttgtgaggcaccctttcatttagccatttttcaggtttcggaagagaggtgctctgaaacaagatttttgtaagcgcttctttctagatccaataaatttctatttttcatatatatatatatatcttcaccgatcctgtgcggctctgccgccgcttcgatttctttgtttatgaaaacctgggatttgtaagccggtctctggtgtgaaacatgaatttgaaaaatattaccttttttgataaaattgtctacaaggttttttctaacaagtcgagatgttaatgaaaaaatatgctaaatgaataaaagacgatcgtgttgataacttttaaatataatgtaattggaggaaaataatagagaaaaaaaaaatagagaaaaggagagtttagaaagaatgagaattgtgtattttcat

SEQ ID NO: 13626 - DNA, 1138 bp, Glycine max
  Gm_smallRNAprecursor_6459
gaccaatcccagagatattcccaaaaacagtccaacaaggattttcccaatttaagaaacaatacaattcgcaggaatcaagaattccagcagatcttaaatacttttcaagctttgcactgtcatggatattctcatggcaatatcgttacagcaagactgaaaagacaaaccaatatccatcactacaaagacacgcatttgtaaaatggtggacacaatttgactcatccaaagcggatgcagaacaagtaaaactatggttccaatcccatccagaattcctcaaagcagctgatccagagacttctgtgtttttgaaccaaaagtctcatctggcagcatttttagcaggatcgacatcaaaggaggtcttagctaaaaatctgaaggaagttctacaaatgttacaacaggaagaagaagcttcatcctcaaagaaggaagaaacaagttctgctgaagaagacgaagaagatcccttttaccaaaacgaagatgattgttttggtatctgtttagattaaatttaatttcggtcacaaaaccgtctgtttgtaattaatgtgtaatgctggacaatactacctgtcctgtagccattaaagtcccggtcaaaactacttgtcttgtaacaaacagtcaaatagtcccggtcaaaactaccggcaactactggtcttagatttttggttatataaggagtcctcaagcatgttgtgaggcaccctttcatttagccatttttcaggtttcggaagagaggtgctctgaaacaagatttttgtaagcgcttctttctagatccaataaatttctatttttcatatatatatatatatcttcaccgatcctgtgcggctctgccgccgcttcgatttctttgtttatgaaaacctgggatttgtaagccggtctctggtgtgaaacatgaatttgaaaaatattaccttttttgataaaattgtctacaaggttttttctaacaagtcgagatgttaatgaaaaaatatgctaaatgaataaaagacgatcgtgttgataacttttaaatataatgtaattggaggaaaataatagagaaaaaaaaaatagagaaaaggagagtttagaaagaatgagaattgtgtattttcat

SEQ ID NO: 13627 - DNA, 1194 bp, Glycine max
  Gm_smallRNAprecursor_6460
aacagtccaacaaggattttcccaatttaagaaacaatacaattcgcaggaatcaagaattccagcagatcttaaatacttttcaagctttgcactgtcatggatattctcatggcaatatcgttacagcaagactgaaaagacaaaccaatatccatcactacaaagacacgcatttgtaaaatggtggacacaatttgactcatccaaagcggatgcagaacaagtaaaactatggttccaatcccatccagaattcctcaaagcagctgatccagagacttctgtgtttttgaaccaaaagtctcatctggcagcatttttagcaggatcgacatcaaaggaggtcttagctaaaaatctgaaggaagttctacaaatgttacaacaggaagaagaagcttcatcctcaaagaaggaagaaacaagttctgctgaagaagacgaagaagatcccttttaccaaaacgaagatgattgttttggtatctgtttagattaaatttaatttcggtcacaaaaccgtctgtttgtaattaatgtgtaatgctggacaatactacctgtcctgtagccattaaagtcccggtcaaaactacttgtcttgtaacaaacagtcaaatagtcccggtcaaaactaccggcaactactggtcttagatttttggttatataaggagtcctcaagcatgttgtgaggcaccctttcatttagccatttttcaggtttcggaagagaggtgctctgaaacaagatttttgtaagcgcttctttctagatccaataaatttctatttttcatatatatatatatatcttcaccgatcctgtgcggctctgccgccgcttcgatttctttgtttatgaaaacctgggatttgtaagccggtctctggtgtgaaacatgaatttgaaaaatattaccttttttgataaaattgtctacaaggttttttctaacaagtcgagatgttaatgaaaaaatatgctaaatgaataaaagacgatcgtgttgataacttttaaatataatgtaattggaggaaaataatagagaaaaaaaaaatagagaaaaggagagtttagaaagaatgagaattgtgtattttcatttaaagatgagtaatatatttatagatacaaaaggtaatgagagagttaaaaaaattaatgcaaataaagataaacaaaaa

SEQ ID NO: 13628 - DNA, 1060 bp, Glycine max
  Gm_smallRNAprecursor_6461
cattatatgaaaatttataattaaatggatggtaaaatgtgtgaaaaactgaaagcatcatggtaaaatgttcaaaaaaaaacttaagtgataaaatttataaaataataaaatagttaagaggtaaagcatacaatttagctaaaaattattgttaagaaattgcgttacttttgtatcttaatcatatattgaattctaaacatctaaacttataagctacatatggttgaaaagggtgaaaaacatccaaataattgatatggctgctttgctatggcttagttttttccactatttcttcgtaaatcttagcgatcatggcttttgataatacgtatgttccttggagtttccttggtgaagcttcctagtagcctcagatcacgaaatcggaaaacacaatgccaaaaatgttcgatcagatattaaacaagcgtgtgacaatactacaaaaaggatattctaccacacacattctacgacggttataactgatccgtcttagaatgtgacgcggtgtcatttttgtaattaagacaatgaaaattgtttttgacgacacacattctaagacggttatcaggaaccatcttagaatgtgattgggtgacaatgttgtaattaggggatatgaaaccatgatgattattaacacaaaatcgtcttggtttttgattcccaaatctgaaatccctagcttcaattcccccctcgaactattacactgttgtccctcccccgaactctccctctctagctcacccactctcgattacaccctcgaactctcgcattatccctccctcgaagtctccctttgtagctcacccactctcgattgcgtccattattaactcttgcactgtccctcacccactgtcctttgtgacgtccctcactttggttgtgtactcagtggcagtcaaaagcctgtctctgtggtgttgcccgtccattcgttgtaaggccatcctcacacaggtaaaaaccttcccttctttgaacattcacttttccattgattgcaagtgaaatgaacttccccttattcttgaaa

SEQ ID NO: 13629 - DNA, 1132 bp, Glycine max
  Gm_smallRNAprecursor_6462
ccgagttgcatctttacaagattggtgctgaccacttaaaggaaaacccattctcctagtaagaaacttttatcatactatttttttttatgtattagtgatttagtgttataattcagaattctaagttatgctcttggttggtaattggtattgcagcatattggtggcgaatgtttgggtcacaaactccaaatttgcagaagctggctattaagattttgagtttgacttgcagtgcttcaggatgtgaaagaaattggagtgtgtttgagcaagtaattgtgacaaaactctaaccatactttttaattttatttaattttgatgatcaagttatatttggagtatatttgagattgaaatcaacatttatttgttatgttgtagattcattccaaaaaaagaaagaggcttgagcacaagaggttgcatgatttggtgtttgtcaaatacaaccaacaattgaagcaaagatataatgcaagagatgaaattgatccaatttctcttaatgatattgatgtatgcaatgaatggctcgtgggagagatggatcaagatgatgataatgatgctggaaatgatttggtatttgaagatgatgatgctctaaattgggcaactgtgtatcaggcttcgggggttggagagtgtaggatgtatactaggcggaaaaaacaaaaaacaagtgttgctgctgcccaaactactaaaaaacaggcaatggttgttggatcttcatcaaggaagcaaaaagcagtccaagaaaatgatgaggatctagatgttgaggagaatattgatgttgaatctgaagaagaagaaatcatggtcaattttgaggcgtctgatggggaagagggagagggagatgctccattaccatatgataacaacgaagatgattatgttgggattggagaagatgattagagcctcaaccttcactttgcactttgcattatgcttttatcattttcttattttgaactctttaatgagtttatttggtgttggtacttgattattgtatgaactcatgaaacttttttagtttatttgaatgcaatcctttgtttttttcaatttcaatgagtttatatatatgtttttttttttttgtccgcca

SEQ ID NO: 13630 - DNA, 1092 bp, Glycine max
  Gm_smallRNAprecursor_6463
agtttgacttgcagtgcttcaggatgtgaaagaaattggagtgtgtttgagcaagtaattgtgacaaaactctaaccatactttttaattttatttaattttgatgatcaagttatatttggagtatatttgagattgaaatcaacatttatttgttatgttgtagattcattccaaaaaaagaaagaggcttgagcacaagaggttgcatgatttggtgtttgtcaaatacaaccaacaattgaagcaaagatataatgcaagagatgaaattgatccaatttctcttaatgatattgatgtatgcaatgaatggctcgtgggagagatggatcaagatgatgataatgatgctggaaatgatttggtatttgaagatgatgatgctctaaattgggcaactgtgtatcaggcttcgggggttggagagtgtaggatgtatactaggcggaaaaaacaaaaaacaagtgttgctgctgcccaaactactaaaaaacaggcaatggttgttggatcttcatcaaggaagcaaaaagcagtccaagaaaatgatgaggatctagatgttgaggagaatattgatgttgaatctgaagaagaagaaatcatggtcaattttgaggcgtctgatggggaagagggagagggagatgctccattaccatatgataacaacgaagatgattatgttgggattggagaagatgattagagcctcaaccttcactttgcactttgcattatgcttttatcattttcttattttgaactctttaatgagtttatttggtgttggtacttgattattgtatgaactcatgaaacttttttagtttatttgaatgcaatcctttgtttttttcaatttcaatgagtttatatatatgtttttttttttttgtccgccatgacatccgccattttccgctacgccatccgccatatttttatggcggatttttgactttccgccatgaaccgccatccgccattaacaacattgagtagaagctagtcagttgtaagtagttagttagccaattctgttagttagttagttagcaaattctgttagtctctaacagaattgtg

SEQ ID NO: 13631 - DNA, 1092 bp, Glycine max; identical to SEQ ID NO: 13630
  Gm_smallRNAprecursor_6464

SEQ ID NO: 13632 - DNA, 1054 bp, Glycine max
  Gm_smallRNAprecursor_6465
acttctaacagcgtcgaagaaaaagaagctgacgacgttcatgctaatcgtaatgatcatgatgaaggagaattaattaacatcgtctaacgtaattttctaatataatatttcattttggtacattcatttacataactcatacagtgttttttgataatattaactaactcaactttttctctttaaaggaccatggctactccacctgccttgcctcctcctcctcctcctcatacagtgtactttgtcattttagttgttttccacaacaaaatcacttcttataatttattgtaataatcattttcattaatgttcaacttttgcaagatgtgcgaaaaaaggcacaggcctcccagaagcaaaacactgcccccacgtattgtctcgtgggggttatgaatatttagaagaaaagctcatggctgagaagacaaagaaaagactggaagaagctgcccagtctggaagcactgaggacatcattgaccctccatctcccatcagacgccacgtgaaatggaagatggcccgcacgaagaaaactggacagatgacgtctgaggcagcaaaggaaatagctgacaggattgtaagtcatttttaattaataattgtaattatctttgtgtattttgtgaattccttggacaaatatgtgttcggtacaggattctttggacgagtaggcgtcacagggatcgttcgtcccccatggacgtcaggatatcttgacttctgccattgggcgaccagagcaccctggccgtgtttgtgctattggagtcggtgtcaacataaagcaatactttggatcggcttcacgaacgtctcgcagttcttcctccatgcctcctgaagacctagaacagctgacccaacaaatcagagaccaactggaggagtcaatcacagaaaaagtgactcgaaagataatggaatccttaagccaaatgcagtcccagtttcagtctcagatgcaatcacaaggacttgcactacctccagagccagaggttggtccctcaggtcctcgtgtcagcacaaagga

SEQ ID NO: 13633 - DNA, 1037 bp, Glycine max
  Gm_smallRNAprecursor_6466
ttagtggggcagacacttaacaccttccttgcttggtcaacacatcttgtgaagcgtttatcagaacaggtattttactctgattatatgtttatttttttcaattaatttgttcattgtaatcaaaacttgctaattaactatgttttatcaacaggcagttgtgtctccagcaaaacctccaaaaagcccagatgaagaggtcgatgatcccctgtacctaatgacattgaccatcccacaactgtttttgaagccgctctaggttatgtaggatgctaccatattcggggtgtttaatcaaaacttcccattgtatataaagcacgaagatctctctgaaattgcacacggtggtcaatgtctcagcatatctgttatacagttgtggattttgtaagtcattttagattactattaattaccaaagtaattgttttaaattcatacataatttactttgacttaacaacacagtcatctgactgagacaagtgtgcgagcggggaattctgatgtgtatggattcctcgagccacagtccattcagagatctgggcaatcacaatttgaatacgaaagttacatcaagagttggatacagatttcaaaacgagatgtttaccttggagcctacctaaatgggtaagtcaaacacgataattgaatttaaataatctatactactacaataacccatattcgtctctactgcagcggacactggcaaatggtcgtcattctgcctaaggaaaacctagttgtctggttttgttctttacataacaggccagacaactaccttaagggaataattaacaggtcagtattgttttcaatacattttcattggtataactcaacaacatcaatattttaatgttcctcatattcaacactagtgctttgaaaggacttgatgatactccacaaccgaaatccaaggctgctgctaggtggattgttgttaaggtacgtgatttaaataaaagttctacttatatatattttatgtgtgtgtacactaattgtagtta

SEQ ID NO: 13634 - DNA, 1123 bp, Glycine max
  Gm_smallRNAprecursor_6467
ctgtcggaggatcatagaaactttccctgtttgtacaatgacgaatatgaaagttcggatgtacaaggcaacacatagtaccaatacagcctcataagggcacaaatacaagggtaccaatggttcttctcagcatcagataaatgagagtttgatttaataagagaaactcatgacacaaagcttttgtagccatcatacaatgggaagttcttcattcctttcccggttgaccacaacaacaaattggtccaattcttccaagaagaaaagaaagataaagatatttacgaagccagtggatattttctgttatggaaatatctaagacgaagaagatattattgttacaaaatcaacaaagaactaaaggcagaagtatcctatcaaaatacagctgtaaagttaagacgagaatctttattgttgcaaagactttcacattgagtctatctacaaaatttatttgtaaaaatggttttgcaacaaagtaaatgaacagtaactttactgctcttgactgaagggacctttgtcttttcctttccatttttttatataaagggtctttgggctcagttgtgcacaaagcggagaacactagaaagataagtgagagaatcagagaggaaaaagtttgtaataatgttttgtgtaataatagtaagtttcgtttcggatcttccccctcttccccttttgatttttctatcaatctgaagtataacatctaccatgtctagttaatttctccgaaggcacccttaaggagccttagttatcttcatttagaaaatgtgaatatgacttagaacccaaatgtttattttactgttgattttttttttttgaaaacttgggatttgtgagcctgcaaaggtgtgcctttgatatctatttttgaaaagcaatgaaaatcctttctggttaggctagtgcttagaggaaaataagatcattgtaagacccaaagagtgagggttggtaaggatttccagtactcgcttaataccaaaaaaccgataaggatcttggatataaaaaaaaaaaaagtctgagatcattatattctatatttttcttaaataagataacttataatgtcaacttaaggagtatcatt

SEQ ID NO: 13635 - DNA, 1168 bp, Glycine max
  Gm_smallRNAprecursor_6468
atggtcttgtgcagctttttatgtcaacaaacaatctgagattgagcgtggaacaccccgcttagtcataaattacaaaccactaaaccaagcattacaatggattagatatcctattccaaacaaaaacgatttgcttaacagattaaattcagcaaagatattttcaaaatttgatatgaaatctggattttggcaaatccaaatccaagaatcagataggtacaaaacaacatttactgtacctttcgggcaatatgaatggaatgtgatgccattcggactgaagaatgccccttcagaatttcaaaaaattatgaatgatatttttaatccctattcaaaatttgtcattgtctacatagatgatgttttaatcttttcccaaaacattgaccaacatttcaaacatctccagaccttcatccatatcatcaaacagaatggtttggtagtctccaaatcaaaaatcaatcttttccaaactcgaattcgattccttggtcacaatatatatcaaggtacaatcattccaatagaaaggtcaatagagtttgctagcaaatttcccaaccaaatcttagacaaaacccagttacaaagatttctaggttgtctaaataacgtaggagaatttgtcccctatttaaacaatattgccaagccattgcatgataggctgaagaaaaatccgtctccttggtctgacctccatacacaaacagttaaagaaatcaaagtcaaagtccaatccataaaatgtctgtatcttcctattccacaggcatttaaaattgtcgaaactgatgcttcagacataggttatggtggcatcctcaaacaaagagtccatggccaagatcatgtcattgcatatacatcaaaacattagaatcctgcacaattaaaatattcaactgttaaaaaggaagttttagcaattgttttgtgcattttcaaatttcaatcggatttattaaaccaaaattttttaatcagagttgattgtaaatcagccaaagatattttacaaaaagatgtcaaaaaccttgcctcaaaacaaatttttgcaagatggcaaacaattctaagtgtctttgattttgacatagaatacatcaagggcacctcaaattcattacctgactaccttacccgtgaattctta

SEQ ID NO: 13636 - DNA, 1095 bp, Glycine max
  Gm_smallRNAprecursor_6469
tgaatggaatgtgatgccattcggactgaagaatgccccttcagaatttcaaaaaattatgaatgatatttttaatccctattcaaaatttgtcattgtctacatagatgatgttttaatcttttcccaaaacattgaccaacatttcaaacatctccagaccttcatccatatcatcaaacagaatggtttggtagtctccaaatcaaaaatcaatcttttccaaactcgaattcgattccttggtcacaatatatatcaaggtacaatcattccaatagaaaggtcaatagagtttgctagcaaatttcccaaccaaatcttagacaaaacccagttacaaagatttctaggttgtctaaataacgtaggagaatttgtcccctatttaaacaatattgccaagccattgcatgataggctgaagaaaaatccgtctccttggtctgacctccatacacaaacagttaaagaaatcaaagtcaaagtccaatccataaaatgtctgtatcttcctattccacaggcatttaaaattgtcgaaactgatgcttcagacataggttatggtggcatcctcaaacaaagagtccatggccaagatcatgtcattgcatatacatcaaaacattagaatcctgcacaattaaaatattcaactgttaaaaaggaagttttagcaattgttttgtgcattttcaaatttcaatcggatttattaaaccaaaattttttaatcagagttgattgtaaatcagccaaagatattttacaaaaagatgtcaaaaaccttgcctcaaaacaaatttttgcaagatggcaaacaattctaagtgtctttgattttgacatagaatacatcaagggcacctcaaattcattacctgactaccttacccgtgaattcttacagaagagtggtaatgcctcctaaggcatcgggaatctccctaaggggaggaagaagtacaggcaaaggagccagactggctcttccagagccaaccattaagaaataatcaacctcttctgggtcaccaacccaggctgggtcatctacccagaaaaccaatttagaagggtcatcaacccaga

SEQ ID NO: 13637 - DNA, 1095 bp, Glycine max; identical to SEQ ID NO: 13636
  Gm_smallRNAprecursor_6470

SEQ ID NO: 13638 - DNA, 1095 bp, Glycine max; identical to SEQ ID NO: 13636
  Gm_smallRNAprecursor_6471

SEQ ID NO: 13639 - DNA, 1095 bp, Glycine max; identical to SEQ ID NO: 13636
  Gm_smallRNAprecursor_6472

SEQ ID NO: 13640 - DNA, 1166 bp, Glycine max
  Gm_smallRNAprecursor_6473
tgaatggaatgtgatgccattcggactgaagaatgccccttcagaatttcaaaaaattatgaatgatatttttaatccctattcaaaatttgtcattgtctacatagatgatgttttaatcttttcccaaaacattgaccaacatttcaaacatctccagaccttcatccatatcatcaaacagaatggtttggtagtctccaaatcaaaaatcaatcttttccaaactcgaattcgattccttggtcacaatatatatcaaggtacaatcattccaatagaaaggtcaatagagtttgctagcaaatttcccaaccaaatcttagacaaaacccagttacaaagatttctaggttgtctaaataacgtaggagaatttgtcccctatttaaacaatattgccaagccattgcatgataggctgaagaaaaatccgtctccttggtctgacctccatacacaaacagttaaagaaatcaaagtcaaagtccaatccataaaatgtctgtatcttcctattccacaggcatttaaaattgtcgaaactgatgcttcagacataggttatggtggcatcctcaaacaaagagtccatggccaagatcatgtcattgcatatacatcaaaacattagaatcctgcacaattaaaatattcaactgttaaaaaggaagttttagcaattgttttgtgcattttcaaatttcaatcggatttattaaaccaaaattttttaatcagagttgattgtaaatcagccaaagatattttacaaaaagatgtcaaaaaccttgcctcaaaacaaatttttgcaagatggcaaacaattctaagtgtctttgattttgacatagaatacatcaagggcacctcaaattcattacctgactaccttacccgtgaattcttacagaagagtggtaatgcctcctaaggcatcgggaatctccctaaggggaggaagaagtacaggcaaaggagccagactggctcttccagagccaaccattaagaaataatcaacctcttctgggtcaccaacccaggctgggtcatctacccagaaaaccaatttagaagggtcatcaacccagattgcctcaatcaaacctgagccatccactcaggaatctcccaaaccggcaaccgccaaacaaacatcggcc

SEQ ID NO: 13641 - DNA, 1166 bp, Glycine max; identical to SEQ ID NO: 13640
  Gm_smallRNAprecursor_6474

SEQ ID NO: 13642 - DNA, 1167 bp, Glycine max
  Gm_smallRNAprecursor_6475
tgaatggaatgtgatgccattcggactgaagaatgccccttcagaatttcaaaaaattatgaatgatatttttaatccctattcaaaatttgtcattgtctacatagatgatgttttaatcttttcccaaaacattgaccaacatttcaaacatctccagaccttcatccatatcatcaaacagaatggtttggtagtctccaaatcaaaaatcaatcttttccaaactcgaattcgattccttggtcacaatatatatcaaggtacaatcattccaatagaaaggtcaatagagtttgctagcaaatttcccaaccaaatcttagacaaaacccagttacaaagatttctaggttgtctaaataacgtaggagaatttgtcccctatttaaacaatattgccaagccattgcatgataggctgaagaaaaatccgtctccttggtctgacctccatacacaaacagttaaagaaatcaaagtcaaagtccaatccataaaatgtctgtatcttcctattccacaggcatttaaaattgtcgaaactgatgcttcagacataggttatggtggcatcctcaaacaaagagtccatggccaagatcatgtcattgcatatacatcaaaacattagaatcctgcacaattaaaatattcaactgttaaaaaggaagttttagcaattgttttgtgcattttcaaatttcaatcggatttattaaaccaaaattttttaatcagagttgattgtaaatcagccaaagatattttacaaaaagatgtcaaaaaccttgcctcaaaacaaatttttgcaagatggcaaacaattctaagtgtctttgattttgacatagaatacatcaagggcacctcaaattcattacctgactaccttacccgtgaattcttacagaagagtggtaatgcctcctaaggcatcgggaatctccctaaggggaggaagaagtacaggcaaaggagccagactggctcttccagagccaaccattaagaaataatcaacctcttctgggtcaccaacccaggctgggtcatctacccagaaaaccaatttagaagggtcatcaacccagattgcctcaatcaaacctgagccatccactcaggaatctcccaaaccggcaaccgccaaacaaacatcggccg

SEQ ID NO: 13643 - DNA, 1167 bp, Glycine max; identical to SEQ ID NO: 13642
  Gm_smallRNAprecursor_6476

SEQ ID NO: 13644 - DNA, 1113 bp, Glycine max
  Gm_smallRNAprecursor_6477
attgtctacatagatgatgttttaatcttttcccaaaacattgaccaacatttcaaacatctccagaccttcatccatatcatcaaacagaatggtttggtagtctccaaatcaaaaatcaatcttttccaaactcgaattcgattccttggtcacaatatatatcaaggtacaatcattccaatagaaaggtcaatagagtttgctagcaaatttcccaaccaaatcttagacaaaacccagttacaaagatttctaggttgtctaaataacgtaggagaatttgtcccctatttaaacaatattgccaagccattgcatgataggctgaagaaaaatccgtctccttggtctgacctccatacacaaacagttaaagaaatcaaagtcaaagtccaatccataaaatgtctgtatcttcctattccacaggcatttaaaattgtcgaaactgatgcttcagacataggttatggtggcatcctcaaacaaagagtccatggccaagatcatgtcattgcatatacatcaaaacattagaatcctgcacaattaaaatattcaactgttaaaaaggaagttttagcaattgttttgtgcattttcaaatttcaatcggatttattaaaccaaaattttttaatcagagttgattgtaaatcagccaaagatattttacaaaaagatgtcaaaaaccttgcctcaaaacaaatttttgcaagatggcaaacaattctaagtgtctttgattttgacatagaatacatcaagggcacctcaaattcattacctgactaccttacccgtgaattcttacagaagagtggtaatgcctcctaaggcatcgggaatctccctaaggggaggaagaagtacaggcaaaggagccagactggctcttccagagccaaccattaagaaataatcaacctcttctgggtcaccaacccaggctgggtcatctacccagaaaaccaatttagaagggtcatcaacccagattgcctcaatcaaacctgagccatccactcaggaatctcccaaaccggcaaccgccaaacaaacatcggccgactatgcatggccaattgaaacctttcaggcccttcaaga

SEQ ID NO: 13645 - DNA, 1113 bp, Glycine max; identical to SEQ ID NO: 13644
  Gm_smallRNAprecursor_6478

SEQ ID NO: 13646 - DNA, 1114 bp, Glycine max
  Gm_smallRNAprecursor_6479
attgtctacatagatgatgttttaatcttttcccaaaacattgaccaacatttcaaacatctccagaccttcatccatatcatcaaacagaatggtttggtagtctccaaatcaaaaatcaatcttttccaaactcgaattcgattccttggtcacaatatatatcaaggtacaatcattccaatagaaaggtcaatagagtttgctagcaaatttcccaaccaaatcttagacaaaacccagttacaaagatttctaggttgtctaaataacgtaggagaatttgtcccctatttaaacaatattgccaagccattgcatgataggctgaagaaaaatccgtctccttggtctgacctccatacacaaacagttaaagaaatcaaagtcaaagtccaatccataaaatgtctgtatcttcctattccacaggcatttaaaattgtcgaaactgatgcttcagacataggttatggtggcatcctcaaacaaagagtccatggccaagatcatgtcattgcatatacatcaaaacattagaatcctgcacaattaaaatattcaactgttaaaaaggaagttttagcaattgttttgtgcattttcaaatttcaatcggatttattaaaccaaaattttttaatcagagttgattgtaaatcagccaaagatattttacaaaaagatgtcaaaaaccttgcctcaaaacaaatttttgcaagatggcaaacaattctaagtgtctttgattttgacatagaatacatcaagggcacctcaaattcattacctgactaccttacccgtgaattcttacagaagagtggtaatgcctcctaaggcatcgggaatctccctaaggggaggaagaagtacaggcaaaggagccagactggctcttccagagccaaccattaagaaataatcaacctcttctgggtcaccaacccaggctgggtcatctacccagaaaaccaatttagaagggtcatcaacccagattgcctcaatcaaacctgagccatccactcaggaatctcccaaaccggcaaccgccaaacaaacatcggccgactatgcatggccaattgaaacctttcaggcccttcaagac

SEQ ID NO: 13647 - DNA, 1114 bp, Glycine max; identical to SEQ ID NO: 13646
  Gm_smallRNAprecursor_6480

SEQ ID NO: 13648 - DNA, 1211 bp, Glycine max
  Gm_smallRNAprecursor_6481
ctaaggcatcgggaatctccctaaggggaggaagaagtacaggcaaaggagccagactggctcttccagagccaaccattaagaaataatcaacctcttctgggtcaccaacccaggctgggtcatctacccagaaaaccaatttagaagggtcatcaacccagattgcctcaatcaaacctgagccatccactcaggaatctcccaaaccggcaaccgccaaacaaacatcggccgactatgcatggccaattgaaacctttcaggcccttcaagacatgggtctaaccaaatttccaaaaataatcaaaaaatcttgggcagacattgcctcaaaatctgatgatgaatctgaatcaaatttacagacaatgatccaaaatgcatcaatgaccaaaacagccaccaatcctaaagggaaactacctttagccaaagctcaaacaccacctaccaaacaaactaacaattatatttataaaaataaatttacaactgttttgcagatggaacctgaattttgggacaaaaatcccttcaaggcgacggccaaggctttcccaccaggatttcactacaaaccaaccaccatcctgaagacaagaactttttatgaattgattttggtagattaaaactcagtatctatcaaacatttcaaagacccaaaagaccaaacattaaacacccactcgacaatccaaatacttaaagttcttcaaccaagacactttggtttggacttgaacaaaggaaagagatttttcagttccatttgatccggtaggttatacctattggaattatgttgatgcttggactaaggttttttggtaccaaaatacccacttcaagcattcatggctgatatatttcaagaccaatacgatttacaattttcccaattggtttttgcaatggtgggacttctttggaccaatcccaaagatattcccagaaacagtccaacaaggatttgctcaatttgagtttgagagacaatacaattcgcaggaatcacgaattccagcagatcttaaatacttttcaagctttgcactgtcatggatcttctcatggcaatatcgttacagcaagactgaaaagacaaaccaatatccatcactacaaagacacgcgtttgtaaaatggtggacacaatttgactcatccaaagcggatccagaacaagtaaaactctggttccaatc

SEQ ID NO: 13649 - DNA, 1098 bp, Glycine max
  Gm_smallRNAprecursor_6482
ggaatctccctaaggggaggaagaagtacaggcaaaggagccagactggctcttccagagccaaccattaagaaataatcaacctcttctgggtcaccaacccaggctgggtcatctacccagaaaaccaatttagaagggtcatcaacccagattgcctcaatcaaacctgagccatccactcaggaatctcccaaaccggcaaccgccaaacaaacatcggccgactatgcatggccaattgaaacctttcaggcccttcaagacatgggtctaaccaaatttccaaaaataatcaaaaaatcttgggcagacattgcctcaaaatctgatgatgaatctgaatcaaatttacagacaatgatccaaaatgcatcaatgaccaaaacagccaccaatcctaaagggaaactacctttagccaaagctcaaacaccacctaccaaacaaactaacaattatatttataaaaataaatttacaactgttttgcagatggaacctgaattttgggacaaaaatcccttcaaggcgacggccaaggctttcccaccaggatttcactacaaaccaaccaccatcctgaagacaagaactttttatgaattgattttggtagattaaaactcagtatctatcaaacatttcaaagacccaaaagaccaaacattaaacacccactcgacaatccaaatacttaaagttcttcaaccaagacactttggtttggacttgaacaaaggaaagagatttttcagttccatttgatccggtaggttatacctattggaattatgttgatgcttggactaaggttttttggtaccaaaatacccacttcaagcattcatggctgatatatttcaagaccaatacgatttacaattttcccaattggtttttgcaatggtgggacttctttggaccaatcccaaagatattcccagaaacagtccaacaaggatttgctcaatttgagtttgagagacaatacaattcgcaggaatcacgaattccagcagatcttaaatacttttcaagctttgcactgtcatggatcttctcatggcaatatcgttacagcaagactgaaaagac

SEQ ID NO: 13650 - DNA, 1250 bp, Glycine max
  Gm_smallRNAprecursor_6483
aagacatgggtctaaccaaatttccaaaaataatcaaaaaatcttgggcagacattgcctcaaaatctgatgatgaatctgaatcaaatttacagacaatgatccaaaatgcatcaatgaccaaaacagccaccaatcctaaagggaaactacctttagccaaagctcaaacaccacctaccaaacaaactaacaattatatttataaaaataaatttacaactgttttgcagatggaacctgaattttgggacaaaaatcccttcaaggcgacggccaaggctttcccaccaggatttcactacaaaccaaccaccatcctgaagacaagaactttttatgaattgattttggtagattaaaactcagtatctatcaaacatttcaaagacccaaaagaccaaacattaaacacccactcgacaatccaaatacttaaagttcttcaaccaagacactttggtttggacttgaacaaaggaaagagatttttcagttccatttgatccggtaggttatacctattggaattatgttgatgcttggactaaggttttttggtaccaaaatacccacttcaagcattcatggctgatatatttcaagaccaatacgatttacaattttcccaattggtttttgcaatggtgggacttctttggaccaatcccaaagatattcccagaaacagtccaacaaggatttgctcaatttgagtttgagagacaatacaattcgcaggaatcacgaattccagcagatcttaaatacttttcaagctttgcactgtcatggatcttctcatggcaatatcgttacagcaagactgaaaagacaaaccaatatccatcactacaaagacacgcgtttgtaaaatggtggacacaatttgactcatccaaagcggatccagaacaagtaaaactctggttccaatcccatccagaatttctcaaagccgctgatccaaaaacttctgtgtttttgaaccaaaagtctcatctggcaccatctttagcaggatcgaaatcaaaggaggtcttagctaaaaatctaaagaaagttttgcaaatgttacagcaggaagaagaaggttcatcctgaaagaaggaagaaacaagttctgctgaagaagaagaagaccctttttacgaaaacgaagatgattgttttggtatctgtttagattaaatttaatttcggtcacaaaaccgtctgtttgtaattaatgtgtaattaatgctggacaa

SEQ ID NO: 13651 - DNA, 1159 bp, Glycine max
  Gm_smallRNAprecursor_6484
gggacaaaaatcccttcaaggcgacggccaaggctttcccaccaggatttcactacaaaccaaccaccatcctgaagacaagaactttttatgaattgattttggtagattaaaactcagtatctatcaaacatttcaaagacccaaaagaccaaacattaaacacccactcgacaatccaaatacttaaagttcttcaaccaagacactttggtttggacttgaacaaaggaaagagatttttcagttccatttgatccggtaggttatacctattggaattatgttgatgcttggactaaggttttttggtaccaaaatacccacttcaagcattcatggctgatatatttcaagaccaatacgatttacaattttcccaattggtttttgcaatggtgggacttctttggaccaatcccaaagatattcccagaaacagtccaacaaggatttgctcaatttgagtttgagagacaatacaattcgcaggaatcacgaattccagcagatcttaaatacttttcaagctttgcactgtcatggatcttctcatggcaatatcgttacagcaagactgaaaagacaaaccaatatccatcactacaaagacacgcgtttgtaaaatggtggacacaatttgactcatccaaagcggatccagaacaagtaaaactctggttccaatcccatccagaatttctcaaagccgctgatccaaaaacttctgtgtttttgaaccaaaagtctcatctggcaccatctttagcaggatcgaaatcaaaggaggtcttagctaaaaatctaaagaaagttttgcaaatgttacagcaggaagaagaaggttcatcctgaaagaaggaagaaacaagttctgctgaagaagaagaagaccctttttacgaaaacgaagatgattgttttggtatctgtttagattaaatttaatttcggtcacaaaaccgtctgtttgtaattaatgtgtaattaatgctggacaatactacctgtcctgtagccattaaagtcccggtcaaaactacttgtcttgtaacaaacagtcaaatagtcccggtcaaaactaccggcaactaccggccttagatttttagctatataaggagtcctcaagtatgttgtgaggcaccctttcatttgg

SEQ ID NO: 13652 - DNA, 1131 bp, Glycine max
  Gm_smallRNAprecursor_6485
caaggctttcccaccaggatttcactacaaaccaaccaccatcctgaagacaagaactttttatgaattgattttggtagattaaaactcagtatctatcaaacatttcaaagacccaaaagaccaaacattaaacacccactcgacaatccaaatacttaaagttcttcaaccaagacactttggtttggacttgaacaaaggaaagagatttttcagttccatttgatccggtaggttatacctattggaattatgttgatgcttggactaaggttttttggtaccaaaatacccacttcaagcattcatggctgatatatttcaagaccaatacgatttacaattttcccaattggtttttgcaatggtgggacttctttggaccaatcccaaagatattcccagaaacagtccaacaaggatttgctcaatttgagtttgagagacaatacaattcgcaggaatcacgaattccagcagatcttaaatacttttcaagctttgcactgtcatggatcttctcatggcaatatcgttacagcaagactgaaaagacaaaccaatatccatcactacaaagacacgcgtttgtaaaatggtggacacaatttgactcatccaaagcggatccagaacaagtaaaactctggttccaatcccatccagaatttctcaaagccgctgatccaaaaacttctgtgtttttgaaccaaaagtctcatctggcaccatctttagcaggatcgaaatcaaaggaggtcttagctaaaaatctaaagaaagttttgcaaatgttacagcaggaagaagaaggttcatcctgaaagaaggaagaaacaagttctgctgaagaagaagaagaccctttttacgaaaacgaagatgattgttttggtatctgtttagattaaatttaatttcggtcacaaaaccgtctgtttgtaattaatgtgtaattaatgctggacaatactacctgtcctgtagccattaaagtcccggtcaaaactacttgtcttgtaacaaacagtcaaatagtcccggtcaaaactaccggcaactaccggccttagatttttagctatataaggagtcctcaagtatgttgtgaggcaccctttcatttgg

SEQ ID NO: 13653 - DNA, 1054 bp, Glycine max
  Gm_smallRNAprecursor_6486
agaccaatacgatttacaattttcccaattggtttttgcaatggtgggacttctttggaccaatcccaaagatattcccagaaacagtccaacaaggatttgctcaatttgagtttgagagacaatacaattcgcaggaatcacgaattccagcagatcttaaatacttttcaagctttgcactgtcatggatcttctcatggcaatatcgttacagcaagactgaaaagacaaaccaatatccatcactacaaagacacgcgtttgtaaaatggtggacacaatttgactcatccaaagcggatccagaacaagtaaaactctggttccaatcccatccagaatttctcaaagccgctgatccaaaaacttctgtgtttttgaaccaaaagtctcatctggcaccatctttagcaggatcgaaatcaaaggaggtcttagctaaaaatctaaagaaagttttgcaaatgttacagcaggaagaagaaggttcatcctgaaagaaggaagaaacaagttctgctgaagaagaagaagaccctttttacgaaaacgaagatgattgttttggtatctgtttagattaaatttaatttcggtcacaaaaccgtctgtttgtaattaatgtgtaattaatgctggacaatactacctgtcctgtagccattaaagtcccggtcaaaactacttgtcttgtaacaaacagtcaaatagtcccggtcaaaactaccggcaactaccggccttagatttttagctatataaggagtcctcaagtatgttgtgaggcaccctttcatttggccatttttcaggtttctgaagagaggtgctctgaaacaagatttttgtaagcgcttctttcaagtttcaataaatttctattttcatccctcttctctctctttaccgatcctgtgcggctctgccgccgcttcgatttctttgtttatgaaaacctgggatttgtaagtcggtctccggtgtgcccttgatatctgttttacaagtttatattttcatttccatttatcatactgcattcatacttcct

SEQ ID NO: 13654 - DNA, 1061 bp, Glycine max
  Gm_smallRNAprecursor_6487
agaccaatacgatttacaattttcccaattggtttttgcaatggtgggacttctttggaccaatcccaaagatattcccagaaacagtccaacaaggatttgctcaatttgagtttgagagacaatacaattcgcaggaatcacgaattccagcagatcttaaatacttttcaagctttgcactgtcatggatcttctcatggcaatatcgttacagcaagactgaaaagacaaaccaatatccatcactacaaagacacgcgtttgtaaaatggtggacacaatttgactcatccaaagcggatccagaacaagtaaaactctggttccaatcccatccagaatttctcaaagccgctgatccaaaaacttctgtgtttttgaaccaaaagtctcatctggcaccatctttagcaggatcgaaatcaaaggaggtcttagctaaaaatctaaagaaagttttgcaaatgttacagcaggaagaagaaggttcatcctgaaagaaggaagaaacaagttctgctgaagaagaagaagaccctttttacgaaaacgaagatgattgttttggtatctgtttagattaaatttaatttcggtcacaaaaccgtctgtttgtaattaatgtgtaattaatgctggacaatactacctgtcctgtagccattaaagtcccggtcaaaactacttgtcttgtaacaaacagtcaaatagtcccggtcaaaactaccggcaactaccggccttagatttttagctatataaggagtcctcaagtatgttgtgaggcaccctttcatttggccatttttcaggtttctgaagagaggtgctctgaaacaagatttttgtaagcgcttctttcaagtttcaataaatttctattttcatccctcttctctctctttaccgatcctgtgcggctctgccgccgcttcgatttctttgtttatgaaaacctgggatttgtaagtcggtctccggtgtgcccttgatatctgttttacaagtttatattttcatttccatttatcatactgcattcatacttcctatctgtc

SEQ ID NO: 13655 - DNA, 1056 bp, Glycine max
  Gm_smallRNAprecursor_6488
gaccaatacgatttacaattttcccaattggtttttgcaatggtgggacttctttggaccaatcccaaagatattcccagaaacagtccaacaaggatttgctcaatttgagtttgagagacaatacaattcgcaggaatcacgaattccagcagatcttaaatacttttcaagctttgcactgtcatggatcttctcatggcaatatcgttacagcaagactgaaaagacaaaccaatatccatcactacaaagacacgcgtttgtaaaatggtggacacaatttgactcatccaaagcggatccagaacaagtaaaactctggttccaatcccatccagaatttctcaaagccgctgatccaaaaacttctgtgtttttgaaccaaaagtctcatctggcaccatctttagcaggatcgaaatcaaaggaggtcttagctaaaaatctaaagaaagttttgcaaatgttacagcaggaagaagaaggttcatcctgaaagaaggaagaaacaagttctgctgaagaagaagaagaccctttttacgaaaacgaagatgattgttttggtatctgtttagattaaatttaatttcggtcacaaaaccgtctgtttgtaattaatgtgtaattaatgctggacaatactacctgtcctgtagccattaaagtcccggtcaaaactacttgtcttgtaacaaacagtcaaatagtcccggtcaaaactaccggcaactaccggccttagatttttagctatataaggagtcctcaagtatgttgtgaggcaccctttcatttggccatttttcaggtttctgaagagaggtgctctgaaacaagatttttgtaagcgcttctttcaagtttcaataaatttctattttcatccctcttctctctctttaccgatcctgtgcggctctgccgccgcttcgatttctttgtttatgaaaacctgggatttgtaagtcggtctccggtgtgcccttgatatctgttttacaagtttatattttcatttccatttatcatactgcattcatacttcctatc

SEQ ID NO: 13656 - DNA, 1057 bp, Glycine max
  Gm_smallRNAprecursor_6489
gaccaatacgatttacaattttcccaattggtttttgcaatggtgggacttctttggaccaatcccaaagatattcccagaaacagtccaacaaggatttgctcaatttgagtttgagagacaatacaattcgcaggaatcacgaattccagcagatcttaaatacttttcaagctttgcactgtcatggatcttctcatggcaatatcgttacagcaagactgaaaagacaaaccaatatccatcactacaaagacacgcgtttgtaaaatggtggacacaatttgactcatccaaagcggatccagaacaagtaaaactctggttccaatcccatccagaatttctcaaagccgctgatccaaaaacttctgtgtttttgaaccaaaagtctcatctggcaccatctttagcaggatcgaaatcaaaggaggtcttagctaaaaatctaaagaaagttttgcaaatgttacagcaggaagaagaaggttcatcctgaaagaaggaagaaacaagttctgctgaagaagaagaagaccctttttacgaaaacgaagatgattgttttggtatctgtttagattaaatttaatttcggtcacaaaaccgtctgtttgtaattaatgtgtaattaatgctggacaatactacctgtcctgtagccattaaagtcccggtcaaaactacttgtcttgtaacaaacagtcaaatagtcccggtcaaaactaccggcaactaccggccttagatttttagctatataaggagtcctcaagtatgttgtgaggcaccctttcatttggccatttttcaggtttctgaagagaggtgctctgaaacaagatttttgtaagcgcttctttcaagtttcaataaatttctattttcatccctcttctctctctttaccgatcctgtgcggctctgccgccgcttcgatttctttgtttatgaaaacctgggatttgtaagtcggtctccggtgtgcccttgatatctgttttacaagtttatattttcatttccatttatcatactgcattcatacttcctatct

SEQ ID NO: 13657 - DNA, 1057 bp, Glycine max; identical to SEQ ID NO: 13656
  Gm_smallRNAprecursor_6490

SEQ ID NO: 13658 - DNA, 1060 bp, Glycine max
  Gm_smallRNAprecursor_6491
gaccaatacgatttacaattttcccaattggtttttgcaatggtgggacttctttggaccaatcccaaagatattcccagaaacagtccaacaaggatttgctcaatttgagtttgagagacaatacaattcgcaggaatcacgaattccagcagatcttaaatacttttcaagctttgcactgtcatggatcttctcatggcaatatcgttacagcaagactgaaaagacaaaccaatatccatcactacaaagacacgcgtttgtaaaatggtggacacaatttgactcatccaaagcggatccagaacaagtaaaactctggttccaatcccatccagaatttctcaaagccgctgatccaaaaacttctgtgtttttgaaccaaaagtctcatctggcaccatctttagcaggatcgaaatcaaaggaggtcttagctaaaaatctaaagaaagttttgcaaatgttacagcaggaagaagaaggttcatcctgaaagaaggaagaaacaagttctgctgaagaagaagaagaccctttttacgaaaacgaagatgattgttttggtatctgtttagattaaatttaatttcggtcacaaaaccgtctgtttgtaattaatgtgtaattaatgctggacaatactacctgtcctgtagccattaaagtcccggtcaaaactacttgtcttgtaacaaacagtcaaatagtcccggtcaaaactaccggcaactaccggccttagatttttagctatataaggagtcctcaagtatgttgtgaggcaccctttcatttggccatttttcaggtttctgaagagaggtgctctgaaacaagatttttgtaagcgcttctttcaagtttcaataaatttctattttcatccctcttctctctctttaccgatcctgtgcggctctgccgccgcttcgatttctttgtttatgaaaacctgggatttgtaagtcggtctccggtgtgcccttgatatctgttttacaagtttatattttcatttccatttatcatactgcattcatacttcctatctgtc

SEQ ID NO: 13659 - DNA, 1053 bp, Glycine max
  Gm_smallRNAprecursor_6492
caatacgatttacaattttcccaattggtttttgcaatggtgggacttctttggaccaatcccaaagatattcccagaaacagtccaacaaggatttgctcaatttgagtttgagagacaatacaattcgcaggaatcacgaattccagcagatcttaaatacttttcaagctttgcactgtcatggatcttctcatggcaatatcgttacagcaagactgaaaagacaaaccaatatccatcactacaaagacacgcgtttgtaaaatggtggacacaatttgactcatccaaagcggatccagaacaagtaaaactctggttccaatcccatccagaatttctcaaagccgctgatccaaaaacttctgtgtttttgaaccaaaagtctcatctggcaccatctttagcaggatcgaaatcaaaggaggtcttagctaaaaatctaaagaaagttttgcaaatgttacagcaggaagaagaaggttcatcctgaaagaaggaagaaacaagttctgctgaagaagaagaagaccctttttacgaaaacgaagatgattgttttggtatctgtttagattaaatttaatttcggtcacaaaaccgtctgtttgtaattaatgtgtaattaatgctggacaatactacctgtcctgtagccattaaagtcccggtcaaaactacttgtcttgtaacaaacagtcaaatagtcccggtcaaaactaccggcaactaccggccttagatttttagctatataaggagtcctcaagtatgttgtgaggcaccctttcatttggccatttttcaggtttctgaagagaggtgctctgaaacaagatttttgtaagcgcttctttcaagtttcaataaatttctattttcatccctcttctctctctttaccgatcctgtgcggctctgccgccgcttcgatttctttgtttatgaaaacctgggatttgtaagtcggtctccggtgtgcccttgatatctgttttacaagtttatattttcatttccatttatcatactgcattcatacttcctatc

SEQ ID NO: 13660 - DNA, 1053 bp, Glycine max; identical to SEQ ID NO: 13659
  Gm_smallRNAprecursor_6493

SEQ ID NO: 13661 - DNA, 1054 bp, Glycine max
  Gm_smallRNAprecursor_6494
caatacgatttacaattttcccaattggtttttgcaatggtgggacttctttggaccaatcccaaagatattcccagaaacagtccaacaaggatttgctcaatttgagtttgagagacaatacaattcgcaggaatcacgaattccagcagatcttaaatacttttcaagctttgcactgtcatggatcttctcatggcaatatcgttacagcaagactgaaaagacaaaccaatatccatcactacaaagacacgcgtttgtaaaatggtggacacaatttgactcatccaaagcggatccagaacaagtaaaactctggttccaatcccatccagaatttctcaaagccgctgatccaaaaacttctgtgtttttgaaccaaaagtctcatctggcaccatctttagcaggatcgaaatcaaaggaggtcttagctaaaaatctaaagaaagttttgcaaatgttacagcaggaagaagaaggttcatcctgaaagaaggaagaaacaagttctgctgaagaagaagaagaccctttttacgaaaacgaagatgattgttttggtatctgtttagattaaatttaatttcggtcacaaaaccgtctgtttgtaattaatgtgtaattaatgctggacaatactacctgtcctgtagccattaaagtcccggtcaaaactacttgtcttgtaacaaacagtcaaatagtcccggtcaaaactaccggcaactaccggccttagatttttagctatataaggagtcctcaagtatgttgtgaggcaccctttcatttggccatttttcaggtttctgaagagaggtgctctgaaacaagatttttgtaagcgcttctttcaagtttcaataaatttctattttcatccctcttctctctctttaccgatcctgtgcggctctgccgccgcttcgatttctttgtttatgaaaacctgggatttgtaagtcggtctccggtgtgcccttgatatctgttttacaagtttatattttcatttccatttatcatactgcattcatacttcctatct

SEQ ID NO: 13662 - DNA, 1054 bp, Glycine max; identical to SEQ ID NO: 13661
  Gm_smallRNAprecursor_6495

SEQ ID NO: 13663 - DNA, 1054 bp, Glycine max; identical to SEQ ID NO: 13661
  Gm_smallRNAprecursor_6496

SEQ ID NO: 13664 - DNA, 1054 bp, Glycine max; identical to SEQ ID NO: 13661
  Gm_smallRNAprecursor_6497

SEQ ID NO: 13665 - DNA, 1142 bp, Glycine max
  Gm_smallRNAprecursor_6498
caatcccaaagatattcccagaaacagtccaacaaggatttgctcaatttgagtttgagagacaatacaattcgcaggaatcacgaattccagcagatcttaaatacttttcaagctttgcactgtcatggatcttctcatggcaatatcgttacagcaagactgaaaagacaaaccaatatccatcactacaaagacacgcgtttgtaaaatggtggacacaatttgactcatccaaagcggatccagaacaagtaaaactctggttccaatcccatccagaatttctcaaagccgctgatccaaaaacttctgtgtttttgaaccaaaagtctcatctggcaccatctttagcaggatcgaaatcaaaggaggtcttagctaaaaatctaaagaaagttttgcaaatgttacagcaggaagaagaaggttcatcctgaaagaaggaagaaacaagttctgctgaagaagaagaagaccctttttacgaaaacgaagatgattgttttggtatctgtttagattaaatttaatttcggtcacaaaaccgtctgtttgtaattaatgtgtaattaatgctggacaatactacctgtcctgtagccattaaagtcccggtcaaaactacttgtcttgtaacaaacagtcaaatagtcccggtcaaaactaccggcaactaccggccttagatttttagctatataaggagtcctcaagtatgttgtgaggcaccctttcatttggccatttttcaggtttctgaagagaggtgctctgaaacaagatttttgtaagcgcttctttcaagtttcaataaatttctattttcatccctcttctctctctttaccgatcctgtgcggctctgccgccgcttcgatttctttgtttatgaaaacctgggatttgtaagtcggtctccggtgtgcccttgatatctgttttacaagtttatattttcatttccatttatcatactgcattcatacttcctatctgtctgtttgatcttattccgctgacctctggtatcagggcctgatggggaagtaggaatagtgtccgtaagggcatatgttaactgaacttatggatctgaaccatgtacagtagttttaacttaaacagtatatgtttgaaca

SEQ ID NO: 13666 - DNA, 1033 bp, Glycine max
  Gm_smallRNAprecursor_6499
agtaagactaaggtgtattgttcaaataaaatattgagacataatatactggtggctataggagtagtgttcaaactatattgaccataaaaaaaaaatctttttcatttgttcagatccaagaagttctgtaacatatagccttatggaaatatttctatggaaccaaatgaaggcaaagatattagagaatgttataatcatgtctagactattgcgatctttttcccgtatttcttttcgatcaaattcctccgcatcatcttcttcaagaaactccaatttattaaatgatcaagataaccagacccaagaggtcgcccccaaacacaatctcttcgatgaggaagtccgattcgaagatatcaatcaaaacatggatgactggaacattccagaaatccctcggatcaactatacgttcctgaaacaattaaggacaaacacaactttgattacataatcaaaacagtagaaaacaatattcctctaggacaaaatataggggaagaatttcatttactttctaaaaattcaatttatgaacatagccgtaagtataaatatccacacatcggctgtgtacaagtagccatcaagcccttaattgacatgggcatagatgcaacagttttaatgtgtctaagagatattaggcataataaatttgaagactccctaattggaacagttgaaaccagcctaggacaaggtccaatatattttaattgttatccaaacaaaacattgagtctgatggacagaaacattcttgactctctgttcttaaacatccactttcatggccttgacataaaagaaggattaatcccagtagccttaatttataggatccagtacaaggtcatgaatacttgtgcatctagagtcctgttaaaacctcaaaaaggagaaacaactttgtttatcactgatatgacaaaggctaacgtttctctcccgagaaaaataaaatgggatgaagtaactcttcccgaaagatgggttatggataaggccacaccgtcttttc

SEQ ID NO: 13667 - DNA, 1168 bp, Glycine max
  Gm_smallRNAprecursor_6500
atggtcttgtgcggatttttatgtcaacaaacaatctaagattgagcgtggaacaccccgcttagtcctaaattgcaaaccactaaaccaagcattacaatggattagatatcctattccaaacaaaaaagatttgcttaatagattaaattctgcaaagatattttcaaaatttgatatgaaatctggattttggcaaatccaaatccaagaatcagataggtacaaaacaacatttattgtacctttcgggcaatatgaatggaatgtgatgccattcggactaaagaatgccccttcagaatttcaaaaaattatgaatgatatttttaatccttattcaaaatttgtcattgtctacatagatgatgttttaatctttttccaaaacattgaccaacatttcaaacatctccagaccttcatccatatcatcaaatagaatggtttggcagtctccaaatcaaaaatcaatcttttccaaactcgaattcgattccttggtcacaatatatatcaaggtacaatcattccaatagaaaggtcaatagagtttgctagcaaatttcccaaccaaatcttagacaaaacccagttacaaagatttctaggttgtctaaattacgtaggagaatttgtcccctatttaaacaatattgccaagccattgcatgataggctgaagaaaaatccgtctccttggtctgacctccatacacaaacagttaaagaaatcaaagtcaaagtccaatccataaaatgtctgtatcttcctattccacagacatttaaaattgtcgaaactgatgcttcagacataggttatggtggcatcctcaaacaaagagtccatggccaagatcatgtcattgcatatacatcaaaacattagaatcctgcacaattaaaatattcaactgttaaaaaggaagttttagcaattgttttgtgcattttcaaatttcaatcggatttattaaaccaaaattttttaatcagagttgattgtaaatcagccaaagatattttacaaaaagatgtcaaaaaccttgcctcaaaacaaatttttgcaagatggcaaacaattctaagtgtctttgattttgacatagaatacatcaagggcccctcaaattcattacctaactaccttacccgtgaattctta

SEQ ID NO: 13668 - DNA, 1095 bp, Glycine max
  Gm_smallRNAprecursor_6501
tgaatggaatgtgatgccattcggactaaagaatgccccttcagaatttcaaaaaattatgaatgatatttttaatccttattcaaaatttgtcattgtctacatagatgatgttttaatctttttccaaaacattgaccaacatttcaaacatctccagaccttcatccatatcatcaaatagaatggtttggcagtctccaaatcaaaaatcaatcttttccaaactcgaattcgattccttggtcacaatatatatcaaggtacaatcattccaatagaaaggtcaatagagtttgctagcaaatttcccaaccaaatcttagacaaaacccagttacaaagatttctaggttgtctaaattacgtaggagaatttgtcccctatttaaacaatattgccaagccattgcatgataggctgaagaaaaatccgtctccttggtctgacctccatacacaaacagttaaagaaatcaaagtcaaagtccaatccataaaatgtctgtatcttcctattccacagacatttaaaattgtcgaaactgatgcttcagacataggttatggtggcatcctcaaacaaagagtccatggccaagatcatgtcattgcatatacatcaaaacattagaatcctgcacaattaaaatattcaactgttaaaaaggaagttttagcaattgttttgtgcattttcaaatttcaatcggatttattaaaccaaaattttttaatcagagttgattgtaaatcagccaaagatattttacaaaaagatgtcaaaaaccttgcctcaaaacaaatttttgcaagatggcaaacaattctaagtgtctttgattttgacatagaatacatcaagggcccctcaaattcattacctaactaccttacccgtgaattcttacagaaaagtggtaatgcctcctaaggcatcgggaatctccctaaggggaggaagaagtacaggcaaaggagccagactggctcttccagagccaaccattaagaaatcatcaacctcttatgggtcaccaacctaggctgggtcatctacccagaaaaccaatttagaagggtcatcaacccaga

SEQ ID NO: 13669 - DNA, 1095 bp, Glycine max; identical to SEQ ID NO: 13668
  Gm_smallRNAprecursor_6502

SEQ ID NO: 13670 - DNA, 1095 bp, Glycine max; identical to SEQ ID NO: 13668
  Gm_smallRNAprecursor_6503

SEQ ID NO: 13671 - DNA, 1095 bp, Glycine max; identical to SEQ ID NO: 13668
  Gm_smallRNAprecursor_6504

SEQ ID NO: 13672 - DNA, 1166 bp, Glycine max
  Gm_smallRNAprecursor_6505
tgaatggaatgtgatgccattcggactaaagaatgccccttcagaatttcaaaaaattatgaatgatatttttaatccttattcaaaatttgtcattgtctacatagatgatgttttaatctttttccaaaacattgaccaacatttcaaacatctccagaccttcatccatatcatcaaatagaatggtttggcagtctccaaatcaaaaatcaatcttttccaaactcgaattcgattccttggtcacaatatatatcaaggtacaatcattccaatagaaaggtcaatagagtttgctagcaaatttcccaaccaaatcttagacaaaacccagttacaaagatttctaggttgtctaaattacgtaggagaatttgtcccctatttaaacaatattgccaagccattgcatgataggctgaagaaaaatccgtctccttggtctgacctccatacacaaacagttaaagaaatcaaagtcaaagtccaatccataaaatgtctgtatcttcctattccacagacatttaaaattgtcgaaactgatgcttcagacataggttatggtggcatcctcaaacaaagagtccatggccaagatcatgtcattgcatatacatcaaaacattagaatcctgcacaattaaaatattcaactgttaaaaaggaagttttagcaattgttttgtgcattttcaaatttcaatcggatttattaaaccaaaattttttaatcagagttgattgtaaatcagccaaagatattttacaaaaagatgtcaaaaaccttgcctcaaaacaaatttttgcaagatggcaaacaattctaagtgtctttgattttgacatagaatacatcaagggcccctcaaattcattacctaactaccttacccgtgaattcttacagaaaagtggtaatgcctcctaaggcatcgggaatctccctaaggggaggaagaagtacaggcaaaggagccagactggctcttccagagccaaccattaagaaatcatcaacctcttatgggtcaccaacctaggctgggtcatctacccagaaaaccaatttagaagggtcatcaacccagattgtctcaatcaaacctgggccatccactcaggaatctcccaaaccggcaaccgccaaacaaacatcggcc

SEQ ID NO: 13673 - DNA, 1166 bp, Glycine max; identical to SEQ ID NO: 13672
  Gm_smallRNAprecursor_6506

SEQ ID NO: 13674 - DNA, 1167 bp, Glycine max
  Gm_smallRNAprecursor_6507
tgaatggaatgtgatgccattcggactaaagaatgccccttcagaatttcaaaaaattatgaatgatatttttaatccttattcaaaatttgtcattgtctacatagatgatgttttaatctttttccaaaacattgaccaacatttcaaacatctccagaccttcatccatatcatcaaatagaatggtttggcagtctccaaatcaaaaatcaatcttttccaaactcgaattcgattccttggtcacaatatatatcaaggtacaatcattccaatagaaaggtcaatagagtttgctagcaaatttcccaaccaaatcttagacaaaacccagttacaaagatttctaggttgtctaaattacgtaggagaatttgtcccctatttaaacaatattgccaagccattgcatgataggctgaagaaaaatccgtctccttggtctgacctccatacacaaacagttaaagaaatcaaagtcaaagtccaatccataaaatgtctgtatcttcctattccacagacatttaaaattgtcgaaactgatgcttcagacataggttatggtggcatcctcaaacaaagagtccatggccaagatcatgtcattgcatatacatcaaaacattagaatcctgcacaattaaaatattcaactgttaaaaaggaagttttagcaattgttttgtgcattttcaaatttcaatcggatttattaaaccaaaattttttaatcagagttgattgtaaatcagccaaagatattttacaaaaagatgtcaaaaaccttgcctcaaaacaaatttttgcaagatggcaaacaattctaagtgtctttgattttgacatagaatacatcaagggcccctcaaattcattacctaactaccttacccgtgaattcttacagaaaagtggtaatgcctcctaaggcatcgggaatctccctaaggggaggaagaagtacaggcaaaggagccagactggctcttccagagccaaccattaagaaatcatcaacctcttatgggtcaccaacctaggctgggtcatctacccagaaaaccaatttagaagggtcatcaacccagattgtctcaatcaaacctgggccatccactcaggaatctcccaaaccggcaaccgccaaacaaacatcggccg

SEQ ID NO: 13675 - DNA, 1167 bp, Glycine max; identical to SEQ ID NO: 13674
  Gm_smallRNAprecursor_6508

SEQ ID NO: 13676 - DNA, 1113 bp, Glycine max
  Gm_smallRNAprecursor_6509
attgtctacatagatgatgttttaatctttttccaaaacattgaccaacatttcaaacatctccagaccttcatccatatcatcaaatagaatggtttggcagtctccaaatcaaaaatcaatcttttccaaactcgaattcgattccttggtcacaatatatatcaaggtacaatcattccaatagaaaggtcaatagagtttgctagcaaatttcccaaccaaatcttagacaaaacccagttacaaagatttctaggttgtctaaattacgtaggagaatttgtcccctatttaaacaatattgccaagccattgcatgataggctgaagaaaaatccgtctccttggtctgacctccatacacaaacagttaaagaaatcaaagtcaaagtccaatccataaaatgtctgtatcttcctattccacagacatttaaaattgtcgaaactgatgcttcagacataggttatggtggcatcctcaaacaaagagtccatggccaagatcatgtcattgcatatacatcaaaacattagaatcctgcacaattaaaatattcaactgttaaaaaggaagttttagcaattgttttgtgcattttcaaatttcaatcggatttattaaaccaaaattttttaatcagagttgattgtaaatcagccaaagatattttacaaaaagatgtcaaaaaccttgcctcaaaacaaatttttgcaagatggcaaacaattctaagtgtctttgattttgacatagaatacatcaagggcccctcaaattcattacctaactaccttacccgtgaattcttacagaaaagtggtaatgcctcctaaggcatcgggaatctccctaaggggaggaagaagtacaggcaaaggagccagactggctcttccagagccaaccattaagaaatcatcaacctcttatgggtcaccaacctaggctgggtcatctacccagaaaaccaatttagaagggtcatcaacccagattgtctcaatcaaacctgggccatccactcaggaatctcccaaaccggcaaccgccaaacaaacatcggccgactatgcatggccaattgaaacccttcaagcccttcaaga

SEQ ID NO: 13677 - DNA, 1113 bp, Glycine max; identical to SEQ ID NO: 13676
  Gm_smallRNAprecursor_6510

SEQ ID NO: 13678 - DNA, 1114 bp, Glycine max
  Gm_smallRNAprecursor_6511
attgtctacatagatgatgttttaatctttttccaaaacattgaccaacatttcaaacatctccagaccttcatccatatcatcaaatagaatggtttggcagtctccaaatcaaaaatcaatcttttccaaactcgaattcgattccttggtcacaatatatatcaaggtacaatcattccaatagaaaggtcaatagagtttgctagcaaatttcccaaccaaatcttagacaaaacccagttacaaagatttctaggttgtctaaattacgtaggagaatttgtcccctatttaaacaatattgccaagccattgcatgataggctgaagaaaaatccgtctccttggtctgacctccatacacaaacagttaaagaaatcaaagtcaaagtccaatccataaaatgtctgtatcttcctattccacagacatttaaaattgtcgaaactgatgcttcagacataggttatggtggcatcctcaaacaaagagtccatggccaagatcatgtcattgcatatacatcaaaacattagaatcctgcacaattaaaatattcaactgttaaaaaggaagttttagcaattgttttgtgcattttcaaatttcaatcggatttattaaaccaaaattttttaatcagagttgattgtaaatcagccaaagatattttacaaaaagatgtcaaaaaccttgcctcaaaacaaatttttgcaagatggcaaacaattctaagtgtctttgattttgacatagaatacatcaagggcccctcaaattcattacctaactaccttacccgtgaattcttacagaaaagtggtaatgcctcctaaggcatcgggaatctccctaaggggaggaagaagtacaggcaaaggagccagactggctcttccagagccaaccattaagaaatcatcaacctcttatgggtcaccaacctaggctgggtcatctacccagaaaaccaatttagaagggtcatcaacccagattgtctcaatcaaacctgggccatccactcaggaatctcccaaaccggcaaccgccaaacaaacatcggccgactatgcatggccaattgaaacccttcaagcccttcaagac

SEQ ID NO: 13679 - DNA, 1114 bp, Glycine max; identical to SEQ ID NO: 13678
  Gm_smallRNAprecursor_6512

SEQ ID NO: 13680 - DNA, 1208 bp, Glycine max
  Gm_smallRNAprecursor_6513
taaggcatcgggaatctccctaaggggaggaagaagtacaggcaaaggagccagactggctcttccagagccaaccattaagaaatcatcaacctcttatgggtcaccaacctaggctgggtcatctacccagaaaaccaatttagaagggtcatcaacccagattgtctcaatcaaacctgggccatccactcaggaatctcccaaaccggcaaccgccaaacaaacatcggccgactatgcatggccaattgaaacccttcaagcccttcaagacatgggtctaaccaaatttccaaaaataataaaaaaaatccttggcagacattacctcagaatctgatgatgaatctgaatcaaatttacaaacaatgatccaaaatacatcaatgacggaaacagccaccaatcctaaagggaaactacctttagccaaagctcaaacaccacctaccaaacaaactaacaattatatttataaaaataaatttacaactgttttgcagatggaacctgaattttggggcaaaaatcccttcatgacgacgacctaggctttcccaccaacatttcactacaaaccaaccaccatcctgaagacaagaactttttatgaattgattttggtagattcaaactcagtatctatcaaaaatttcaaagacccaaaagaccaaacattaaacacccacttgacaatccaaatactaaaagttcttcaaccaagacactttggtttggacttgaacaaaggaaaaagatttttagttccatttgatccggtaggttatacctatagggattatgttgatgcttggactaaggtgttttggcaccaaaatacccgctttaagcattcatggctgatatatttcaagaccaatacaatttacaattttcccaattggtttttgcaatggtgggacttctttggaccaatcccaaagatattcccagaaacagtccaacaaggatttgctcaatttgagagacaatacaattcgcaggaatcacgaattccagcagatcttaaatacttttcaagctttgcactgtcatggatcttctcatggcaatatcgttatagcaagactgaaaagacaaaccaatatccatcactacaaagacacgcgtttgtaaaatggtggacacaatttgactaatccaaagcggatccagaacaagtaaaactctggttccaatcccat

SEQ ID NO: 13681 - DNA, 1208 bp, Glycine max; identical to SEQ ID NO: 13680
  Gm_smallRNAprecursor_6514

SEQ ID NO: 13682 - DNA, 1211 bp, Glycine max
  Gm_smallRNAprecursor_6515
taaggcatcgggaatctccctaaggggaggaagaagtacaggcaaaggagccagactggctcttccagagccaaccattaagaaatcatcaacctcttatgggtcaccaacctaggctgggtcatctacccagaaaaccaatttagaagggtcatcaacccagattgtctcaatcaaacctgggccatccactcaggaatctcccaaaccggcaaccgccaaacaaacatcggccgactatgcatggccaattgaaacccttcaagcccttcaagacatgggtctaaccaaatttccaaaaataataaaaaaaatccttggcagacattacctcagaatctgatgatgaatctgaatcaaatttacaaacaatgatccaaaatacatcaatgacggaaacagccaccaatcctaaagggaaactacctttagccaaagctcaaacaccacctaccaaacaaactaacaattatatttataaaaataaatttacaactgttttgcagatggaacctgaattttggggcaaaaatcccttcatgacgacgacctaggctttcccaccaacatttcactacaaaccaaccaccatcctgaagacaagaactttttatgaattgattttggtagattcaaactcagtatctatcaaaaatttcaaagacccaaaagaccaaacattaaacacccacttgacaatccaaatactaaaagttcttcaaccaagacactttggtttggacttgaacaaaggaaaaagatttttagttccatttgatccggtaggttatacctatagggattatgttgatgcttggactaaggtgttttggcaccaaaatacccgctttaagcattcatggctgatatatttcaagaccaatacaatttacaattttcccaattggtttttgcaatggtgggacttctttggaccaatcccaaagatattcccagaaacagtccaacaaggatttgctcaatttgagagacaatacaattcgcaggaatcacgaattccagcagatcttaaatacttttcaagctttgcactgtcatggatcttctcatggcaatatcgttatagcaagactgaaaagacaaaccaatatccatcactacaaagacacgcgtttgtaaaatggtggacacaatttgactaatccaaagcggatccagaacaagtaaaactctggttccaatcccatcta

SEQ ID NO: 13683 - DNA, 1171 bp, Glycine max
  Gm_smallRNAprecursor_6516
cccaaaccggcaaccgccaaacaaacatcggccgactatgcatggccaattgaaacccttcaagcccttcaagacatgggtctaaccaaatttccaaaaataataaaaaaaatccttggcagacattacctcagaatctgatgatgaatctgaatcaaatttacaaacaatgatccaaaatacatcaatgacggaaacagccaccaatcctaaagggaaactacctttagccaaagctcaaacaccacctaccaaacaaactaacaattatatttataaaaataaatttacaactgttttgcagatggaacctgaattttggggcaaaaatcccttcatgacgacgacctaggctttcccaccaacatttcactacaaaccaaccaccatcctgaagacaagaactttttatgaattgattttggtagattcaaactcagtatctatcaaaaatttcaaagacccaaaagaccaaacattaaacacccacttgacaatccaaatactaaaagttcttcaaccaagacactttggtttggacttgaacaaaggaaaaagatttttagttccatttgatccggtaggttatacctatagggattatgttgatgcttggactaaggtgttttggcaccaaaatacccgctttaagcattcatggctgatatatttcaagaccaatacaatttacaattttcccaattggtttttgcaatggtgggacttctttggaccaatcccaaagatattcccagaaacagtccaacaaggatttgctcaatttgagagacaatacaattcgcaggaatcacgaattccagcagatcttaaatacttttcaagctttgcactgtcatggatcttctcatggcaatatcgttatagcaagactgaaaagacaaaccaatatccatcactacaaagacacgcgtttgtaaaatggtggacacaatttgactaatccaaagcggatccagaacaagtaaaactctggttccaatcccatctagaattcctcaaagccgctgatccagaaacttctgtgtttttgaaccaaaagtctcatctggcaccatctttagcaggattgaaatcaaaggaggtcttagctaaaaatctaaaggaagttttgcaaatgttacagcaggaagaagaaggttcatcctgaaat

SEQ ID NO: 13684 - DNA, 1166 bp, Glycine max
  Gm_smallRNAprecursor_6517
caaaccggcaaccgccaaacaaacatcggccgactatgcatggccaattgaaacccttcaagcccttcaagacatgggtctaaccaaatttccaaaaataataaaaaaaatccttggcagacattacctcagaatctgatgatgaatctgaatcaaatttacaaacaatgatccaaaatacatcaatgacggaaacagccaccaatcctaaagggaaactacctttagccaaagctcaaacaccacctaccaaacaaactaacaattatatttataaaaataaatttacaactgttttgcagatggaacctgaattttggggcaaaaatcccttcatgacgacgacctaggctttcccaccaacatttcactacaaaccaaccaccatcctgaagacaagaactttttatgaattgattttggtagattcaaactcagtatctatcaaaaatttcaaagacccaaaagaccaaacattaaacacccacttgacaatccaaatactaaaagttcttcaaccaagacactttggtttggacttgaacaaaggaaaaagatttttagttccatttgatccggtaggttatacctatagggattatgttgatgcttggactaaggtgttttggcaccaaaatacccgctttaagcattcatggctgatatatttcaagaccaatacaatttacaattttcccaattggtttttgcaatggtgggacttctttggaccaatcccaaagatattcccagaaacagtccaacaaggatttgctcaatttgagagacaatacaattcgcaggaatcacgaattccagcagatcttaaatacttttcaagctttgcactgtcatggatcttctcatggcaatatcgttatagcaagactgaaaagacaaaccaatatccatcactacaaagacacgcgtttgtaaaatggtggacacaatttgactaatccaaagcggatccagaacaagtaaaactctggttccaatcccatctagaattcctcaaagccgctgatccagaaacttctgtgtttttgaaccaaaagtctcatctggcaccatctttagcaggattgaaatcaaaggaggtcttagctaaaaatctaaaggaagttttgcaaatgttacagcaggaagaagaaggttcatcctga

SEQ ID NO: 13685 - DNA, 1169 bp, Glycine max
  Gm_smallRNAprecursor_6518
caaaccggcaaccgccaaacaaacatcggccgactatgcatggccaattgaaacccttcaagcccttcaagacatgggtctaaccaaatttccaaaaataataaaaaaaatccttggcagacattacctcagaatctgatgatgaatctgaatcaaatttacaaacaatgatccaaaatacatcaatgacggaaacagccaccaatcctaaagggaaactacctttagccaaagctcaaacaccacctaccaaacaaactaacaattatatttataaaaataaatttacaactgttttgcagatggaacctgaattttggggcaaaaatcccttcatgacgacgacctaggctttcccaccaacatttcactacaaaccaaccaccatcctgaagacaagaactttttatgaattgattttggtagattcaaactcagtatctatcaaaaatttcaaagacccaaaagaccaaacattaaacacccacttgacaatccaaatactaaaagttcttcaaccaagacactttggtttggacttgaacaaaggaaaaagatttttagttccatttgatccggtaggttatacctatagggattatgttgatgcttggactaaggtgttttggcaccaaaatacccgctttaagcattcatggctgatatatttcaagaccaatacaatttacaattttcccaattggtttttgcaatggtgggacttctttggaccaatcccaaagatattcccagaaacagtccaacaaggatttgctcaatttgagagacaatacaattcgcaggaatcacgaattccagcagatcttaaatacttttcaagctttgcactgtcatggatcttctcatggcaatatcgttatagcaagactgaaaagacaaaccaatatccatcactacaaagacacgcgtttgtaaaatggtggacacaatttgactaatccaaagcggatccagaacaagtaaaactctggttccaatcccatctagaattcctcaaagccgctgatccagaaacttctgtgtttttgaaccaaaagtctcatctggcaccatctttagcaggattgaaatcaaaggaggtcttagctaaaaatctaaaggaagttttgcaaatgttacagcaggaagaagaaggttcatcctgaaat

SEQ ID NO: 13686 - DNA, 1107 bp, Glycine max
  Gm_smallRNAprecursor_6519
accggcaaccgccaaacaaacatcggccgactatgcatggccaattgaaacccttcaagcccttcaagacatgggtctaaccaaatttccaaaaataataaaaaaaatccttggcagacattacctcagaatctgatgatgaatctgaatcaaatttacaaacaatgatccaaaatacatcaatgacggaaacagccaccaatcctaaagggaaactacctttagccaaagctcaaacaccacctaccaaacaaactaacaattatatttataaaaataaatttacaactgttttgcagatggaacctgaattttggggcaaaaatcccttcatgacgacgacctaggctttcccaccaacatttcactacaaaccaaccaccatcctgaagacaagaactttttatgaattgattttggtagattcaaactcagtatctatcaaaaatttcaaagacccaaaagaccaaacattaaacacccacttgacaatccaaatactaaaagttcttcaaccaagacactttggtttggacttgaacaaaggaaaaagatttttagttccatttgatccggtaggttatacctatagggattatgttgatgcttggactaaggtgttttggcaccaaaatacccgctttaagcattcatggctgatatatttcaagaccaatacaatttacaattttcccaattggtttttgcaatggtgggacttctttggaccaatcccaaagatattcccagaaacagtccaacaaggatttgctcaatttgagagacaatacaattcgcaggaatcacgaattccagcagatcttaaatacttttcaagctttgcactgtcatggatcttctcatggcaatatcgttatagcaagactgaaaagacaaaccaatatccatcactacaaagacacgcgtttgtaaaatggtggacacaatttgactaatccaaagcggatccagaacaagtaaaactctggttccaatcccatctagaattcctcaaagccgctgatccagaaacttctgtgtttttgaaccaaaagtctcatctggcaccatctttagcaggattgaaatcaaaggaggtcttagcta

SEQ ID NO: 13687 - DNA, 1107 bp, Glycine max; identical to SEQ ID NO: 13686
  Gm_smallRNAprecursor_6520

SEQ ID NO: 13688 - DNA, 1108 bp, Glycine max
  Gm_smallRNAprecursor_6521
accggcaaccgccaaacaaacatcggccgactatgcatggccaattgaaacccttcaagcccttcaagacatgggtctaaccaaatttccaaaaataataaaaaaaatccttggcagacattacctcagaatctgatgatgaatctgaatcaaatttacaaacaatgatccaaaatacatcaatgacggaaacagccaccaatcctaaagggaaactacctttagccaaagctcaaacaccacctaccaaacaaactaacaattatatttataaaaataaatttacaactgttttgcagatggaacctgaattttggggcaaaaatcccttcatgacgacgacctaggctttcccaccaacatttcactacaaaccaaccaccatcctgaagacaagaactttttatgaattgattttggtagattcaaactcagtatctatcaaaaatttcaaagacccaaaagaccaaacattaaacacccacttgacaatccaaatactaaaagttcttcaaccaagacactttggtttggacttgaacaaaggaaaaagatttttagttccatttgatccggtaggttatacctatagggattatgttgatgcttggactaaggtgttttggcaccaaaatacccgctttaagcattcatggctgatatatttcaagaccaatacaatttacaattttcccaattggtttttgcaatggtgggacttctttggaccaatcccaaagatattcccagaaacagtccaacaaggatttgctcaatttgagagacaatacaattcgcaggaatcacgaattccagcagatcttaaatacttttcaagctttgcactgtcatggatcttctcatggcaatatcgttatagcaagactgaaaagacaaaccaatatccatcactacaaagacacgcgtttgtaaaatggtggacacaatttgactaatccaaagcggatccagaacaagtaaaactctggttccaatcccatctagaattcctcaaagccgctgatccagaaacttctgtgtttttgaaccaaaagtctcatctggcaccatctttagcaggattgaaatcaaaggaggtcttagctaa

SEQ ID NO: 13689 - DNA, 1108 bp, Glycine max; identical to SEQ ID NO: 13688
  Gm_smallRNAprecursor_6522

SEQ ID NO: 13690 - DNA, 1102 bp, Glycine max
  Gm_smallRNAprecursor_6523
ggcaaccgccaaacaaacatcggccgactatgcatggccaattgaaacccttcaagcccttcaagacatgggtctaaccaaatttccaaaaataataaaaaaaatccttggcagacattacctcagaatctgatgatgaatctgaatcaaatttacaaacaatgatccaaaatacatcaatgacggaaacagccaccaatcctaaagggaaactacctttagccaaagctcaaacaccacctaccaaacaaactaacaattatatttataaaaataaatttacaactgttttgcagatggaacctgaattttggggcaaaaatcccttcatgacgacgacctaggctttcccaccaacatttcactacaaaccaaccaccatcctgaagacaagaactttttatgaattgattttggtagattcaaactcagtatctatcaaaaatttcaaagacccaaaagaccaaacattaaacacccacttgacaatccaaatactaaaagttcttcaaccaagacactttggtttggacttgaacaaaggaaaaagatttttagttccatttgatccggtaggttatacctatagggattatgttgatgcttggactaaggtgttttggcaccaaaatacccgctttaagcattcatggctgatatatttcaagaccaatacaatttacaattttcccaattggtttttgcaatggtgggacttctttggaccaatcccaaagatattcccagaaacagtccaacaaggatttgctcaatttgagagacaatacaattcgcaggaatcacgaattccagcagatcttaaatacttttcaagctttgcactgtcatggatcttctcatggcaatatcgttatagcaagactgaaaagacaaaccaatatccatcactacaaagacacgcgtttgtaaaatggtggacacaatttgactaatccaaagcggatccagaacaagtaaaactctggttccaatcccatctagaattcctcaaagccgctgatccagaaacttctgtgtttttgaaccaaaagtctcatctggcaccatctttagcaggattgaaatcaaaggaggtcttagc

SEQ ID NO: 13691 - DNA, 1098 bp, Glycine max
  Gm_smallRNAprecursor_6524
aagacatgggtctaaccaaatttccaaaaataataaaaaaaatccttggcagacattacctcagaatctgatgatgaatctgaatcaaatttacaaacaatgatccaaaatacatcaatgacggaaacagccaccaatcctaaagggaaactacctttagccaaagctcaaacaccacctaccaaacaaactaacaattatatttataaaaataaatttacaactgttttgcagatggaacctgaattttggggcaaaaatcccttcatgacgacgacctaggctttcccaccaacatttcactacaaaccaaccaccatcctgaagacaagaactttttatgaattgattttggtagattcaaactcagtatctatcaaaaatttcaaagacccaaaagaccaaacattaaacacccacttgacaatccaaatactaaaagttcttcaaccaagacactttggtttggacttgaacaaaggaaaaagatttttagttccatttgatccggtaggttatacctatagggattatgttgatgcttggactaaggtgttttggcaccaaaatacccgctttaagcattcatggctgatatatttcaagaccaatacaatttacaattttcccaattggtttttgcaatggtgggacttctttggaccaatcccaaagatattcccagaaacagtccaacaaggatttgctcaatttgagagacaatacaattcgcaggaatcacgaattccagcagatcttaaatacttttcaagctttgcactgtcatggatcttctcatggcaatatcgttatagcaagactgaaaagacaaaccaatatccatcactacaaagacacgcgtttgtaaaatggtggacacaatttgactaatccaaagcggatccagaacaagtaaaactctggttccaatcccatctagaattcctcaaagccgctgatccagaaacttctgtgtttttgaaccaaaagtctcatctggcaccatctttagcaggattgaaatcaaaggaggtcttagctaaaaatctaaaggaagttttgcaaatgttacagcaggaagaagaaggttcatcctga

SEQ ID NO: 13692 - DNA, 1099 bp, Glycine max
  Gm_smallRNAprecursor_6525
aagacatgggtctaaccaaatttccaaaaataataaaaaaaatccttggcagacattacctcagaatctgatgatgaatctgaatcaaatttacaaacaatgatccaaaatacatcaatgacggaaacagccaccaatcctaaagggaaactacctttagccaaagctcaaacaccacctaccaaacaaactaacaattatatttataaaaataaatttacaactgttttgcagatggaacctgaattttggggcaaaaatcccttcatgacgacgacctaggctttcccaccaacatttcactacaaaccaaccaccatcctgaagacaagaactttttatgaattgattttggtagattcaaactcagtatctatcaaaaatttcaaagacccaaaagaccaaacattaaacacccacttgacaatccaaatactaaaagttcttcaaccaagacactttggtttggacttgaacaaaggaaaaagatttttagttccatttgatccggtaggttatacctatagggattatgttgatgcttggactaaggtgttttggcaccaaaatacccgctttaagcattcatggctgatatatttcaagaccaatacaatttacaattttcccaattggtttttgcaatggtgggacttctttggaccaatcccaaagatattcccagaaacagtccaacaaggatttgctcaatttgagagacaatacaattcgcaggaatcacgaattccagcagatcttaaatacttttcaagctttgcactgtcatggatcttctcatggcaatatcgttatagcaagactgaaaagacaaaccaatatccatcactacaaagacacgcgtttgtaaaatggtggacacaatttgactaatccaaagcggatccagaacaagtaaaactctggttccaatcccatctagaattcctcaaagccgctgatccagaaacttctgtgtttttgaaccaaaagtctcatctggcaccatctttagcaggattgaaatcaaaggaggtcttagctaaaaatctaaaggaagttttgcaaatgttacagcaggaagaagaaggttcatcctgaa

SEQ ID NO: 13693 - DNA, 1244 bp, Glycine max
  Gm_smallRNAprecursor_6526
aagacatgggtctaaccaaatttccaaaaataataaaaaaaatccttggcagacattacctcagaatctgatgatgaatctgaatcaaatttacaaacaatgatccaaaatacatcaatgacggaaacagccaccaatcctaaagggaaactacctttagccaaagctcaaacaccacctaccaaacaaactaacaattatatttataaaaataaatttacaactgttttgcagatggaacctgaattttggggcaaaaatcccttcatgacgacgacctaggctttcccaccaacatttcactacaaaccaaccaccatcctgaagacaagaactttttatgaattgattttggtagattcaaactcagtatctatcaaaaatttcaaagacccaaaagaccaaacattaaacacccacttgacaatccaaatactaaaagttcttcaaccaagacactttggtttggacttgaacaaaggaaaaagatttttagttccatttgatccggtaggttatacctatagggattatgttgatgcttggactaaggtgttttggcaccaaaatacccgctttaagcattcatggctgatatatttcaagaccaatacaatttacaattttcccaattggtttttgcaatggtgggacttctttggaccaatcccaaagatattcccagaaacagtccaacaaggatttgctcaatttgagagacaatacaattcgcaggaatcacgaattccagcagatcttaaatacttttcaagctttgcactgtcatggatcttctcatggcaatatcgttatagcaagactgaaaagacaaaccaatatccatcactacaaagacacgcgtttgtaaaatggtggacacaatttgactaatccaaagcggatccagaacaagtaaaactctggttccaatcccatctagaattcctcaaagccgctgatccagaaacttctgtgtttttgaaccaaaagtctcatctggcaccatctttagcaggattgaaatcaaaggaggtcttagctaaaaatctaaaggaagttttgcaaatgttacagcaggaagaagaaggttcatcctgaaataaggaagaaacaagttctgctgaagaagaagaagaagaccctttttaccaaaacgaagatgattgttttggtatctgtttagattaaatttaatttcggtcacaaaaccgtctgtatgtaattaatgtgtaattaatgctgga

SEQ ID NO: 13694 - DNA, 1146 bp, Glycine max
  Gm_smallRNAprecursor_6527
aatgatccaaaatacatcaatgacggaaacagccaccaatcctaaagggaaactacctttagccaaagctcaaacaccacctaccaaacaaactaacaattatatttataaaaataaatttacaactgttttgcagatggaacctgaattttggggcaaaaatcccttcatgacgacgacctaggctttcccaccaacatttcactacaaaccaaccaccatcctgaagacaagaactttttatgaattgattttggtagattcaaactcagtatctatcaaaaatttcaaagacccaaaagaccaaacattaaacacccacttgacaatccaaatactaaaagttcttcaaccaagacactttggtttggacttgaacaaaggaaaaagatttttagttccatttgatccggtaggttatacctatagggattatgttgatgcttggactaaggtgttttggcaccaaaatacccgctttaagcattcatggctgatatatttcaagaccaatacaatttacaattttcccaattggtttttgcaatggtgggacttctttggaccaatcccaaagatattcccagaaacagtccaacaaggatttgctcaatttgagagacaatacaattcgcaggaatcacgaattccagcagatcttaaatacttttcaagctttgcactgtcatggatcttctcatggcaatatcgttatagcaagactgaaaagacaaaccaatatccatcactacaaagacacgcgtttgtaaaatggtggacacaatttgactaatccaaagcggatccagaacaagtaaaactctggttccaatcccatctagaattcctcaaagccgctgatccagaaacttctgtgtttttgaaccaaaagtctcatctggcaccatctttagcaggattgaaatcaaaggaggtcttagctaaaaatctaaaggaagttttgcaaatgttacagcaggaagaagaaggttcatcctgaaataaggaagaaacaagttctgctgaagaagaagaagaagaccctttttaccaaaacgaagatgattgttttggtatctgtttagattaaatttaatttcggtcacaaaaccgtctgtatgtaattaatgtgtaattaatgctgga

SEQ ID NO: 13695 - DNA, 1144 bp, Glycine max
  Gm_smallRNAprecursor_6528
tgatccaaaatacatcaatgacggaaacagccaccaatcctaaagggaaactacctttagccaaagctcaaacaccacctaccaaacaaactaacaattatatttataaaaataaatttacaactgttttgcagatggaacctgaattttggggcaaaaatcccttcatgacgacgacctaggctttcccaccaacatttcactacaaaccaaccaccatcctgaagacaagaactttttatgaattgattttggtagattcaaactcagtatctatcaaaaatttcaaagacccaaaagaccaaacattaaacacccacttgacaatccaaatactaaaagttcttcaaccaagacactttggtttggacttgaacaaaggaaaaagatttttagttccatttgatccggtaggttatacctatagggattatgttgatgcttggactaaggtgttttggcaccaaaatacccgctttaagcattcatggctgatatatttcaagaccaatacaatttacaattttcccaattggtttttgcaatggtgggacttctttggaccaatcccaaagatattcccagaaacagtccaacaaggatttgctcaatttgagagacaatacaattcgcaggaatcacgaattccagcagatcttaaatacttttcaagctttgcactgtcatggatcttctcatggcaatatcgttatagcaagactgaaaagacaaaccaatatccatcactacaaagacacgcgtttgtaaaatggtggacacaatttgactaatccaaagcggatccagaacaagtaaaactctggttccaatcccatctagaattcctcaaagccgctgatccagaaacttctgtgtttttgaaccaaaagtctcatctggcaccatctttagcaggattgaaatcaaaggaggtcttagctaaaaatctaaaggaagttttgcaaatgttacagcaggaagaagaaggttcatcctgaaataaggaagaaacaagttctgctgaagaagaagaagaagaccctttttaccaaaacgaagatgattgttttggtatctgtttagattaaatttaatttcggtcacaaaaccgtctgtatgtaattaatgtgtaattaatgctgga

SEQ ID NO: 13696 - DNA, 1159 bp, Glycine max
  Gm_smallRNAprecursor_6529
gaattttggggcaaaaatcccttcatgacgacgacctaggctttcccaccaacatttcactacaaaccaaccaccatcctgaagacaagaactttttatgaattgattttggtagattcaaactcagtatctatcaaaaatttcaaagacccaaaagaccaaacattaaacacccacttgacaatccaaatactaaaagttcttcaaccaagacactttggtttggacttgaacaaaggaaaaagatttttagttccatttgatccggtaggttatacctatagggattatgttgatgcttggactaaggtgttttggcaccaaaatacccgctttaagcattcatggctgatatatttcaagaccaatacaatttacaattttcccaattggtttttgcaatggtgggacttctttggaccaatcccaaagatattcccagaaacagtccaacaaggatttgctcaatttgagagacaatacaattcgcaggaatcacgaattccagcagatcttaaatacttttcaagctttgcactgtcatggatcttctcatggcaatatcgttatagcaagactgaaaagacaaaccaatatccatcactacaaagacacgcgtttgtaaaatggtggacacaatttgactaatccaaagcggatccagaacaagtaaaactctggttccaatcccatctagaattcctcaaagccgctgatccagaaacttctgtgtttttgaaccaaaagtctcatctggcaccatctttagcaggattgaaatcaaaggaggtcttagctaaaaatctaaaggaagttttgcaaatgttacagcaggaagaagaaggttcatcctgaaataaggaagaaacaagttctgctgaagaagaagaagaagaccctttttaccaaaacgaagatgattgttttggtatctgtttagattaaatttaatttcggtcacaaaaccgtctgtatgtaattaatgtgtaattaatgctggacaatactacctgtcctgtagccattaaagtcccggtcaaaactacttgtcttgtaacaaacagtcaaatagtcccggtcaaaactaccggcaactaccggtcttagatttttggctatataaggagtcctcaagtatgttgtgaggcaccctttcatt

SEQ ID NO: 13697 - DNA, 1131 bp, Glycine max
  Gm_smallRNAprecursor_6530
cgacgacctaggctttcccaccaacatttcactacaaaccaaccaccatcctgaagacaagaactttttatgaattgattttggtagattcaaactcagtatctatcaaaaatttcaaagacccaaaagaccaaacattaaacacccacttgacaatccaaatactaaaagttcttcaaccaagacactttggtttggacttgaacaaaggaaaaagatttttagttccatttgatccggtaggttatacctatagggattatgttgatgcttggactaaggtgttttggcaccaaaatacccgctttaagcattcatggctgatatatttcaagaccaatacaatttacaattttcccaattggtttttgcaatggtgggacttctttggaccaatcccaaagatattcccagaaacagtccaacaaggatttgctcaatttgagagacaatacaattcgcaggaatcacgaattccagcagatcttaaatacttttcaagctttgcactgtcatggatcttctcatggcaatatcgttatagcaagactgaaaagacaaaccaatatccatcactacaaagacacgcgtttgtaaaatggtggacacaatttgactaatccaaagcggatccagaacaagtaaaactctggttccaatcccatctagaattcctcaaagccgctgatccagaaacttctgtgtttttgaaccaaaagtctcatctggcaccatctttagcaggattgaaatcaaaggaggtcttagctaaaaatctaaaggaagttttgcaaatgttacagcaggaagaagaaggttcatcctgaaataaggaagaaacaagttctgctgaagaagaagaagaagaccctttttaccaaaacgaagatgattgttttggtatctgtttagattaaatttaatttcggtcacaaaaccgtctgtatgtaattaatgtgtaattaatgctggacaatactacctgtcctgtagccattaaagtcccggtcaaaactacttgtcttgtaacaaacagtcaaatagtcccggtcaaaactaccggcaactaccggtcttagatttttggctatataaggagtcctcaagtatgttgtgaggcaccctttcatt

SEQ ID NO: 13698 - DNA, 1056 bp, Glycine max
  Gm_smallRNAprecursor_6531
caagaccaatacaatttacaattttcccaattggtttttgcaatggtgggacttctttggaccaatcccaaagatattcccagaaacagtccaacaaggatttgctcaatttgagagacaatacaattcgcaggaatcacgaattccagcagatcttaaatacttttcaagctttgcactgtcatggatcttctcatggcaatatcgttatagcaagactgaaaagacaaaccaatatccatcactacaaagacacgcgtttgtaaaatggtggacacaatttgactaatccaaagcggatccagaacaagtaaaactctggttccaatcccatctagaattcctcaaagccgctgatccagaaacttctgtgtttttgaaccaaaagtctcatctggcaccatctttagcaggattgaaatcaaaggaggtcttagctaaaaatctaaaggaagttttgcaaatgttacagcaggaagaagaaggttcatcctgaaataaggaagaaacaagttctgctgaagaagaagaagaagaccctttttaccaaaacgaagatgattgttttggtatctgtttagattaaatttaatttcggtcacaaaaccgtctgtatgtaattaatgtgtaattaatgctggacaatactacctgtcctgtagccattaaagtcccggtcaaaactacttgtcttgtaacaaacagtcaaatagtcccggtcaaaactaccggcaactaccggtcttagatttttggctatataaggagtcctcaagtatgttgtgaggcaccctttcatttggccattttcaggtttctgaagagaggtgctctgaaacaagatttttgtaagcgcttctttcaagtttcaataaatttctattttcatccctcttctatctctttaccgatcctgtgcggctctaccgccgcttcagtttctttgtttatgaaaacctgtgatttgtaagccggtctccgatgtacccttgacatctgttttacaagtttatattttcatttccatttatcatactgcattcttacttcctatct

SEQ ID NO: 13699 - DNA, 1056 bp, Glycine max; identical to SEQ ID NO: 13698
  Gm_smallRNAprecursor_6532

SEQ ID NO: 13700 - DNA, 1057 bp, Glycine max
  Gm_smallRNAprecursor_6533
caagaccaatacaatttacaattttcccaattggtttttgcaatggtgggacttctttggaccaatcccaaagatattcccagaaacagtccaacaaggatttgctcaatttgagagacaatacaattcgcaggaatcacgaattccagcagatcttaaatacttttcaagctttgcactgtcatggatcttctcatggcaatatcgttatagcaagactgaaaagacaaaccaatatccatcactacaaagacacgcgtttgtaaaatggtggacacaatttgactaatccaaagcggatccagaacaagtaaaactctggttccaatcccatctagaattcctcaaagccgctgatccagaaacttctgtgtttttgaaccaaaagtctcatctggcaccatctttagcaggattgaaatcaaaggaggtcttagctaaaaatctaaaggaagttttgcaaatgttacagcaggaagaagaaggttcatcctgaaataaggaagaaacaagttctgctgaagaagaagaagaagaccctttttaccaaaacgaagatgattgttttggtatctgtttagattaaatttaatttcggtcacaaaaccgtctgtatgtaattaatgtgtaattaatgctggacaatactacctgtcctgtagccattaaagtcccggtcaaaactacttgtcttgtaacaaacagtcaaatagtcccggtcaaaactaccggcaactaccggtcttagatttttggctatataaggagtcctcaagtatgttgtgaggcaccctttcatttggccattttcaggtttctgaagagaggtgctctgaaacaagatttttgtaagcgcttctttcaagtttcaataaatttctattttcatccctcttctatctctttaccgatcctgtgcggctctaccgccgcttcagtttctttgtttatgaaaacctgtgatttgtaagccggtctccgatgtacccttgacatctgttttacaagtttatattttcatttccatttatcatactgcattcttacttcctatctg

SEQ ID NO: 13701 - DNA, 1057 bp, Glycine max; identical to SEQ ID NO: 13700
  Gm_smallRNAprecursor_6534

SEQ ID NO: 13702 - DNA, 1057 bp, Glycine max; identical to SEQ ID NO: 13700
  Gm_smallRNAprecursor_6535

SEQ ID NO: 13703 - DNA, 1057 bp, Glycine max; identical to SEQ ID NO: 13700
  Gm_smallRNAprecursor_6536

SEQ ID NO: 13704 - DNA, 1155 bp, Glycine max
  Gm_smallRNAprecursor_6537
tgggacttctttggaccaatcccaaagatattcccagaaacagtccaacaaggatttgctcaatttgagagacaatacaattcgcaggaatcacgaattccagcagatcttaaatacttttcaagctttgcactgtcatggatcttctcatggcaatatcgttatagcaagactgaaaagacaaaccaatatccatcactacaaagacacgcgtttgtaaaatggtggacacaatttgactaatccaaagcggatccagaacaagtaaaactctggttccaatcccatctagaattcctcaaagccgctgatccagaaacttctgtgtttttgaaccaaaagtctcatctggcaccatctttagcaggattgaaatcaaaggaggtcttagctaaaaatctaaaggaagttttgcaaatgttacagcaggaagaagaaggttcatcctgaaataaggaagaaacaagttctgctgaagaagaagaagaagaccctttttaccaaaacgaagatgattgttttggtatctgtttagattaaatttaatttcggtcacaaaaccgtctgtatgtaattaatgtgtaattaatgctggacaatactacctgtcctgtagccattaaagtcccggtcaaaactacttgtcttgtaacaaacagtcaaatagtcccggtcaaaactaccggcaactaccggtcttagatttttggctatataaggagtcctcaagtatgttgtgaggcaccctttcatttggccattttcaggtttctgaagagaggtgctctgaaacaagatttttgtaagcgcttctttcaagtttcaataaatttctattttcatccctcttctatctctttaccgatcctgtgcggctctaccgccgcttcagtttctttgtttatgaaaacctgtgatttgtaagccggtctccgatgtacccttgacatctgttttacaagtttatattttcatttccatttatcatactgcattcttacttcctatctgtccgtttgatcttattccgctgacctctctctctctctctctctctctctctctctctctatatatatatatatatatatatatatatatatatatatacacacacacattttattaattaaggaaaaagacttataattccac

SEQ ID NO: 13705 - DNA, 1142 bp, Glycine max
  Gm_smallRNAprecursor_6538
gaccaatcccaaagatattcccagaaacagtccaacaaggatttgctcaatttgagagacaatacaattcgcaggaatcacgaattccagcagatcttaaatacttttcaagctttgcactgtcatggatcttctcatggcaatatcgttatagcaagactgaaaagacaaaccaatatccatcactacaaagacacgcgtttgtaaaatggtggacacaatttgactaatccaaagcggatccagaacaagtaaaactctggttccaatcccatctagaattcctcaaagccgctgatccagaaacttctgtgtttttgaaccaaaagtctcatctggcaccatctttagcaggattgaaatcaaaggaggtcttagctaaaaatctaaaggaagttttgcaaatgttacagcaggaagaagaaggttcatcctgaaataaggaagaaacaagttctgctgaagaagaagaagaagaccctttttaccaaaacgaagatgattgttttggtatctgtttagattaaatttaatttcggtcacaaaaccgtctgtatgtaattaatgtgtaattaatgctggacaatactacctgtcctgtagccattaaagtcccggtcaaaactacttgtcttgtaacaaacagtcaaatagtcccggtcaaaactaccggcaactaccggtcttagatttttggctatataaggagtcctcaagtatgttgtgaggcaccctttcatttggccattttcaggtttctgaagagaggtgctctgaaacaagatttttgtaagcgcttctttcaagtttcaataaatttctattttcatccctcttctatctctttaccgatcctgtgcggctctaccgccgcttcagtttctttgtttatgaaaacctgtgatttgtaagccggtctccgatgtacccttgacatctgttttacaagtttatattttcatttccatttatcatactgcattcttacttcctatctgtccgtttgatcttattccgctgacctctctctctctctctctctctctctctctctctctatatatatatatatatatatatatatatatatatatatacacacacacattttattaattaaggaaaaagacttataattccac

SEQ ID NO: 13706 - DNA, 1151 bp, Glycine max
  Gm_smallRNAprecursor_6539
aagaagaagaccctttttaccaaaacgaagatgattgttttggtatctgtttagattaaatttaatttcggtcacaaaaccgtctgtatgtaattaatgtgtaattaatgctggacaatactacctgtcctgtagccattaaagtcccggtcaaaactacttgtcttgtaacaaacagtcaaatagtcccggtcaaaactaccggcaactaccggtcttagatttttggctatataaggagtcctcaagtatgttgtgaggcaccctttcatttggccattttcaggtttctgaagagaggtgctctgaaacaagatttttgtaagcgcttctttcaagtttcaataaatttctattttcatccctcttctatctctttaccgatcctgtgcggctctaccgccgcttcagtttctttgtttatgaaaacctgtgatttgtaagccggtctccgatgtacccttgacatctgttttacaagtttatattttcatttccatttatcatactgcattcttacttcctatctgtccgtttgatcttattccgctgacctctctctctctctctctctctctctctctctctctatatatatatatatatatatatatatatatatatatatacacacacacattttattaattaaggaaaaagacttataattccactttagctttatctagtttaaattttttgaaactttttttttaaaaacaaatattagattaaattctttttttaaaataaataaatttgatcctgtggccagttgtggtttttttactcaaaacattcgacatattattttcaatctaaatataaggatacttaagttgaaattgggaaatgaaataattttaaagattaaaagtgagaaatttagtgaaaatttgataaaataataagatacaagataaagttttttttaacaggtttgacaaagaaatcaaaataatatatatatatatatatatatatatatattaaaaggcaatttgaaaaatatattgcataagtactgaacgaataagaacaataaattacaaacacataataacaacaataataataataataagtcacaatctattattaacgtccaaatatatttgtcacactttatatactttcgggaattaaatttt

SEQ ID NO: 13707 - DNA, 1157 bp, Glycine max
  Gm_smallRNAprecursor_6540
ttattgccttagggtagttatttgtgaaggaatttgttgatatcatgctaaacttgacatgtttgatgtgagtaaagctacccattatgtttcagggttttatgatgatgctttgtgatatttgtatgctgaaattgttgatagaaaactggtagagatgatggggagagttaacttagggttaaatgtgagaatgataatgttttaggtagaaaagtgtgagattttgagggttagagaagccaaatttggggttagtggaaattggagtctaaagtgagttgatcctagtttaaaatgtcaattaggacttgtagaaaagcttggacagagcaaataagaaaagaatgagtgacaaatgtgaaagaaaagagccatttcttgggtgaattgggtgttgagaggtcaaattttgaatcggtggagttttcaccttaaaacaagtttgaacaagtctaaatcaatgttatagacttgattgagatgagagtttaccccaaaattatccaattctcattttcactcttcaaaccttgaaaattcactaaattgaggggttttggatacctatattttgatttgccttggtctgaagtttgcttttggtttaaatatgatttatacatgatttaggacttgtaggatccaatttgagaaaaattggatgtgggcaagttggatttcgaaatctgccattttatgcagaacaatgctgtcaaaattgtgcagcagtttttttacatagtgcagaaaaatgcttatgcattgctagttacaggaagggtagtacatctcgggttccaggcattttatagaagatcccaacggtcaaaatgtatatttatgtactaggaacctccagtaaaattttcaaggcgatccaacgattaacaaatcagatcgaagagaatgttactgagtaaattttgcctattatgcagaaaaatggtggtgcagtgcaggtcaggggaaaggaagtatatatcgtgttctagatattttatagaagatcccaacggtcaaaattcatatttatgtattaggaacctccagtaaaaaattcaaggcgatccaacggttatcgaatcagatcgaagagaatgttactgaggtatgtgagtaggaaaaactatggaatttgaatgagttttgtgtag

SEQ ID NO: 13708 - DNA, 1157 bp, Glycine max
  Gm_smallRNAprecursor_6541
tattgccttagggtagttatttgtgaaggaatttgttgaaatcatgctaaacttgacatgtttgatgtgagtaaagctacccattatgttttagggttttatgatgatgctttgtgatatttgtatactgaaattgttgatagaaaactggtagagatgatggggagagttaacttagggttaaatgtgagaatgataatgttgtaggtagaaaagtgtgagattttgagggttagagaagccaaatttggggttagtggaaattggagtctaaagtgagttgatcctagtttaaaatgtcaattaagacttgtagaaaagcttgggcagagcaaataagaaaaaaaatgagtgacaaatgtgaaagaaaaaagccatttcttgggtgaattgggtgttgagaggtcaaattttgaatcggtggagttttcaccttaaaaccagtttgagcaagtctaaatcaatgttatagactttattgagatgagattttaccccaaaattatccaattctcattttcactcttcaaaccttgaaaattcactaaattgaggggttttggatacctatattttgattggccttggtctgaagtttgcttttggtttaaatatgatttatacatgatttaggacttgtaggatccaatttgagcaaaattggatgtgggcaagttggatttcgaaatctgtcattttatgcagaacaatgctgtcaaaattgtgcagcagtttttttagcagatctcaacggtcaaaattggaagtatatattgtgttctagatatttgttatcagatcccaacggtcaaaatttatatttttgtattaggaacttccagtaaaaacttcaaggcgatccaacggttagcgaatcagaatgaagagaatgttattgaggtatgtgagtaggaaaaactatggaatttgaatgagttttgtgttgagttttctgcctccactctgtttttcttggtttagggtagtttcatgataaatggaattgaattgttggatattgtgaaatcttggaggggttgatggggacccggtgctgagagaaacgaggataagggctacgtgggagtgcgtgagctcaatttgaaggtgggcaactggggatggtatgcttgtgcctgacttgtggaaatgggaag

SEQ ID NO: 13709 - DNA, 1040 bp, Glycine max
  Gm_smallRNAprecursor_6542
agttgagaatgttggaatcaacaaagtgctcattgatggaggagcggctgtcaacttaatgcctcgatctatgctctacaagatcgggaaacatgacactgatctatctgcccacaacattgtgctttcgaattatgagggtaaaactggctattcgttgggagccattcaagtagatgttgctgtaggcagtatagttcgaccaactctattcctggtgatacagtctaaggctaattttaacttgctattaggaagggaatggattcatggagttggggctgtgccatctacccttcaccagaaactcattatctggagggaggatgggattgttgaaaatatagaggcggatcaaagcttctataagtcggaggtcgataatgttactacacaaacctttgacaaaaagttggctaacatagcaccttgtggtgacaaggaggctgttgtcgaatcaagtgacaatgttatccactctgtcaaactccatccgacctatgggtttatatgggagagggaggaaatcgatgttgttccctctgaagatggagtcattccaccaactgggtggaatatgtatgaagattaatatgactgaggccactgcattggccagaattacggcttatatggccgaaaatagactaaatacggcctttgaggctgaatctcaacaaaatatggcagttgaagccaagatcgaagatcatgaaaataaagaaacaaaggatcgaagactggattgcatttatgacgatgagccgctgggttttgagaaaaatcccataagtgaggtgccaaagatgcaggctcaagatcctttggaggagatcgacattggagatggctcgataaaaaggccaacctatatcagtgccaatatcacctcaagtctaaaagaaaagctggtgcctcttcttagagaattcaaagactgttttgcttgggattaccacgaaatgcctgggttaagcagagaaatggtcgaaatgaaattaccgattaaggagggaaaaagaccagtaaaacaactacca

SEQ ID NO: 13710 - DNA, 1157 bp, Glycine max
  Gm_smallRNAprecursor_6543
aagaccagtaaaacaactaccaagaagattcgcaccagaaattacgttcaaaattaaggaagagatcgaaaggctgctgaggtgtaaattcatcagatctgccaggtatgtcgaatggttagcaaatatagtccctgtcattaaaaagaatggaactcttagagtatgcatagattttagggatttaaataatgctacacctaaagatgaatatgcgatgccagtaacggaaatgttggtagattcagcagctggcttcgaatttttaagcatgttagatggttattctggttataaccaaatatttattgctgaaagtgatgtgtcaaaaacagcatttcgatgtcctggtgctttaggcacttatgaatgggtggttatgccttttgggttgaaaaatgctggggccacttatcaaagggccatgaattccatgtttcatgattttattgacacatttatgcaagtttatattgatgatataatcatcaaatcctcctcagaagatagccatttggattaccttaggcaatctttcgaacgaatgaggaaacatggattaaaaatgaatccattaaagtgtgctttttgtgtacgtgcaggagatttccttggttttgtggtgcataaaaaaggcattgagataaatcaaaacaagacaaaggctattcttgagacgaagcctccttcgaccaaaaaacagcttcagtctttgctaggaaaaattaacttcttgaggcgattcatttcgaatctaagtggcaaagctcaaattttttcgccattacttcgactcaagaaagatgaaccattcagatgggatgaagagcatcaaaaggctttcgatgaaattaaagaatatctgatcaagcctcccgtgttaatgcctcctagtcgaaataagactatgaagttgtatattgctgcgtctgacaagaccattggtagcatgttggctcaggaagatgatgatggcatagaacatgcaatttattatcttagtcgtgtactaaatgatgcagaaactagatatactgccatagaaaaactttgtctttgtctgtatttctcttgtgcaaaacttaagcaatatataaagcctgttgatgtttatgtgtattctcattatgatattattaagcacatgttgtcaaaac

SEQ ID NO: 13711 - DNA, 1175 bp, Glycine max
  Gm_smallRNAprecursor_6544
aagagatcgaaaggctgctgaggtgtaaattcatcagatctgccaggtatgtcgaatggttagcaaatatagtccctgtcattaaaaagaatggaactcttagagtatgcatagattttagggatttaaataatgctacacctaaagatgaatatgcgatgccagtaacggaaatgttggtagattcagcagctggcttcgaatttttaagcatgttagatggttattctggttataaccaaatatttattgctgaaagtgatgtgtcaaaaacagcatttcgatgtcctggtgctttaggcacttatgaatgggtggttatgccttttgggttgaaaaatgctggggccacttatcaaagggccatgaattccatgtttcatgattttattgacacatttatgcaagtttatattgatgatataatcatcaaatcctcctcagaagatagccatttggattaccttaggcaatctttcgaacgaatgaggaaacatggattaaaaatgaatccattaaagtgtgctttttgtgtacgtgcaggagatttccttggttttgtggtgcataaaaaaggcattgagataaatcaaaacaagacaaaggctattcttgagacgaagcctccttcgaccaaaaaacagcttcagtctttgctaggaaaaattaacttcttgaggcgattcatttcgaatctaagtggcaaagctcaaattttttcgccattacttcgactcaagaaagatgaaccattcagatgggatgaagagcatcaaaaggctttcgatgaaattaaagaatatctgatcaagcctcccgtgttaatgcctcctagtcgaaataagactatgaagttgtatattgctgcgtctgacaagaccattggtagcatgttggctcaggaagatgatgatggcatagaacatgcaatttattatcttagtcgtgtactaaatgatgcagaaactagatatactgccatagaaaaactttgtctttgtctgtatttctcttgtgcaaaacttaagcaatatataaagcctgttgatgtttatgtgtattctcattatgatattattaagcacatgttgtcaaaacctattttacacagtagaattggaaaatgggctttagcattaacagaatattctttaacgtacaagcctttgaaatct

SEQ ID NO: 13712 - DNA, 1110 bp, Glycine max
  Gm_smallRNAprecursor_6545
tattgtagatcactcattgatcgaaatgccgcaagactatgtggatacagagccttggattttgtatttcgatggttcgaaacacaaacatggaactggaattggagttttaataatatcccccaataaagttccaactaaattcaaatataaaatcaaagggctttgttctaataatgaggctgagtatgaggctctaattacaggccttgaaattttaattagcctgggggcaagaaatgttaacataaggggtgattcagaattagtattgaagcaattaacacaagaatacaagtgtgttaatgaacacttagcaaaatattttgttgtggccagttctcttctgaatcatttcgattacattaacattgagcatatacctcgacaagaaaaccaagaagcaaatgatttagcccaaatagcttcagggtacaaaatgtcgaaggaaaagttaactcagttgatcgaaataaaagataaactggtgttaccagagccattaagcactaaattgccaatgccaaaacttgtgggggcaagtataccacaaaataatggagatgaaagcatgaatgatcgccaggaaagaattcaaattttggccattgacaatatgttagataatgattggagaaagtccattgttgattatttggaaaatccaataggtaatgtggctcgaaaggtcaaatatagggctttgaattacgtggttatgggaaatgatttgtttaaaaagactgcagaaggagtgttgttaaaatgtctaagtgaatcagaagcatacttagcagtttcccatgttcacagtggggcttgtggatcacatcaagcaggccataaaatgaaatggttgttatttcgacaaggtttgtattggccttcgatgttaaaagactgcatagaatttgctaaaggttgtcaggaatgccaaaagcatgcagggatacagcatgtacctgctagtgagttacactccataatcaaaccttggcctttcagaggatgggctttggacctaattggtgaaatcaagcctgcctcttctaagaaccagcgttatattatagttggtatcgattactttacaaaatggatcgaagcagt

SEQ ID NO: 13713 - DNA, 1082 bp, Glycine max
  Gm_smallRNAprecursor_6546
cattgatcgaaatgccgcaagactatgtggatacagagccttggattttgtatttcgatggttcgaaacacaaacatggaactggaattggagttttaataatatcccccaataaagttccaactaaattcaaatataaaatcaaagggctttgttctaataatgaggctgagtatgaggctctaattacaggccttgaaattttaattagcctgggggcaagaaatgttaacataaggggtgattcagaattagtattgaagcaattaacacaagaatacaagtgtgttaatgaacacttagcaaaatattttgttgtggccagttctcttctgaatcatttcgattacattaacattgagcatatacctcgacaagaaaaccaagaagcaaatgatttagcccaaatagcttcagggtacaaaatgtcgaaggaaaagttaactcagttgatcgaaataaaagataaactggtgttaccagagccattaagcactaaattgccaatgccaaaacttgtgggggcaagtataccacaaaataatggagatgaaagcatgaatgatcgccaggaaagaattcaaattttggccattgacaatatgttagataatgattggagaaagtccattgttgattatttggaaaatccaataggtaatgtggctcgaaaggtcaaatatagggctttgaattacgtggttatgggaaatgatttgtttaaaaagactgcagaaggagtgttgttaaaatgtctaagtgaatcagaagcatacttagcagtttcccatgttcacagtggggcttgtggatcacatcaagcaggccataaaatgaaatggttgttatttcgacaaggtttgtattggccttcgatgttaaaagactgcatagaatttgctaaaggttgtcaggaatgccaaaagcatgcagggatacagcatgtacctgctagtgagttacactccataatcaaaccttggcctttcagaggatgggctttggacctaattggtgaaatcaagcctgcctcttctaagaaccagcgttatattatagttggtatcgattactttacaaaa

SEQ ID NO: 13714 - DNA, 1158 bp, Glycine max
  Gm_smallRNAprecursor_6547
attaaagttttcttcacatgtattatattttattttgcagtagcaatgacatcttcatcatcatcttcatcacatattaacattaaatctggccctaacgatactgatgtattatggatgcaacctaagcatgtttcagaacatgtttggaatggggaagaagaaaggaaattacatattagacgagccgtccccacgtatcaaggggaagaacaaattccagaacaaatttttccttttcttcaacaatctggtttcgggtggattatcaagatgggatacttaaaaataaatgtctcactaattagtgctctgatagaaagatggaggccggaaacacatacgtttcacatgagatgcggagagtgtactatcactctacaagacgtctctgtgttgttaggtataagtgtggatggtttaccattaatcggtgcaacaaatcttgattgggctgatttatgtgaggaattattgggagttagaccacaagaaggtgaaattaaaggtagtgtggttaaattaagttggctggctcaccattttgatcaaattaataatgacaacgacgaagaacaagtacgaaggtttgcccgtgcatggatactgagatttattgaaggtgtcttgttcgttgacaaaacaagtaacagagtttcgctaaggtaccttcaatttttacgtgacttcgaagaatgtagcagatatgcatggggagttgccgtacttggttttctatacagagagatgtgcagtgccaccgattataaaactaaatcaatcggaggtatgtgcatcttactacaattgtgggcatgggaacgatgtccaaccttggctccaaagaggactccttcccaaatagaaaatataccactagggcacaggtcagtcatttttaacagcgtctttcatttcaatagaataaatggttttagggtatattaaattttattctttgtaggtggctgcgacgtggaaaccaacatattggcaatgatgatgtgaaagttttttgtcgcaagttggatattatgaaacgtcataaggtaagaaccatgctactgtatttgtaaaatacaaaattatatgtcttattttactacaatgttcacaactatgttgttatatgcagtttgtgtgggagccttacccatc

SEQ ID NO: 13715 - DNA, 1155 bp, Glycine max
  Gm_smallRNAprecursor_6548
taaagttttcttcacatgtattatattttattttgcagtagcaatgacatcttcatcatcatcttcatcacatattaacattaaatctggccctaacgatactgatgtattatggatgcaacctaagcatgtttcagaacatgtttggaatggggaagaagaaaggaaattacatattagacgagccgtccccacgtatcaaggggaagaacaaattccagaacaaatttttccttttcttcaacaatctggtttcgggtggattatcaagatgggatacttaaaaataaatgtctcactaattagtgctctgatagaaagatggaggccggaaacacatacgtttcacatgagatgcggagagtgtactatcactctacaagacgtctctgtgttgttaggtataagtgtggatggtttaccattaatcggtgcaacaaatcttgattgggctgatttatgtgaggaattattgggagttagaccacaagaaggtgaaattaaaggtagtgtggttaaattaagttggctggctcaccattttgatcaaattaataatgacaacgacgaagaacaagtacgaaggtttgcccgtgcatggatactgagatttattgaaggtgtcttgttcgttgacaaaacaagtaacagagtttcgctaaggtaccttcaatttttacgtgacttcgaagaatgtagcagatatgcatggggagttgccgtacttggttttctatacagagagatgtgcagtgccaccgattataaaactaaatcaatcggaggtatgtgcatcttactacaattgtgggcatgggaacgatgtccaaccttggctccaaagaggactccttcccaaatagaaaatataccactagggcacaggtcagtcatttttaacagcgtctttcatttcaatagaataaatggttttagggtatattaaattttattctttgtaggtggctgcgacgtggaaaccaacatattggcaatgatgatgtgaaagttttttgtcgcaagttggatattatgaaacgtcataaggtaagaaccatgctactgtatttgtaaaatacaaaattatatgtcttattttactacaatgttcacaactatgttgttatatgcagtttgtgtgggagccttacccat

SEQ ID NO: 13716 - DNA, 1153 bp, Glycine max
  Gm_smallRNAprecursor_6549
tactcttgatagactcacctatgtgaatgttgaagtgggggccgcttcatatgaaattttggtaaaaaatttatagagcgttcactatactgggatagacgtgcatggcctttaacgcacgggctttatagaatacacctatgaaaaggttgtgtgtggtttgatgtcggagataaagttcaagacttcgagtcactctagtaaaatctgaatcttactcactatgcaaaggttcaagttgtatgacacatttgtttatgcacaattttatgaaatcctcaaaaatcttcttttcaaatttcaagtgggggattgttagaacaaaggagaaaataggtgaaagtttgaaaaaaaaaggaaaaaaaaaaggcttcaagtcccacatcgctcaggataaacacttgaatagtgtttcactccctatatatagagagctcctttcttcattttttcttgtcccagttgagaagcatttcctcaacttttctttctcccttccatatttcagtcgatgcatttccggcaaacttctccctctttctttctgtcgctctaaaatttcggttggctataatagtgacttttcaagtcatattttcggttgactataaaagtgacttttcaagtcatatttttggtgacttttcaagtcatattttcggttggctataagagtaacttttcaagtcatattttcggttggctattagagtctattagagtgatttttcaagtcatattttcgggtggctttagagtgacttttcaagtcatacaagatggtgtaattctagaaagattccctcagtgcagtgggaatgttatacagtgatctgggctgttttatcctagagacttcgtggttgatagtctgcttgcacaagttttggcaatgccacaaaacgtcttaaagaaagtgacattgtccgcgactcagccagtaattttttcgatttgccataaattaattttccaacacattgtggttttgttggtgatgacctttcttacttattttggctgcagtttgagctatggtaattcgattgatgaattttttgatgcattggaaagctaagagaattatctataagtctactttcattcttcaatatctgagttaacttctatcattgtgaaaactaggatggaa

SEQ ID NO: 13717 - DNA, 1188 bp, Glycine max
  Gm_smallRNAprecursor_6550
ccgtctttgcattttctgggtcaacaaacatctttgtctttcgcctataccagaccatgtagtccgagttaaaactcaataggccttcttgtcggggataagcgtcgaccctaaatgcatgtcgattattccactgctgaatcattggggcgaacaattgccccaaattttcgtcatgtttcccctttaatgttatgccatgaatgtttaggggttgtgaaggagactctggaactggttgctgcatcccaaattgtctcaagactctgtccggttggtgccactcaataacttggaaataaattagtgggaccaccgcgtaccacgcgatacttccgactaaacaaaccagaggcaacaatgatataacggttgatgagtaaggctcccacaaaaactgcatataacaacatagttgtgaacattgtagtaaaataagacatataattttttattttacaaatacaatagcatggttcttacctcatgatgtttcataatatccaacttgcgacgaaaaactttcacatcatcattgccgatatgttggtttccacgtcgcagccacctacaaagaataaaatttaatataccctaaaaccatttattctattgaaatgaaagacgctgttaaaaatgactgacctgtgccctagtggtgtattttctatttgggaaggagtcctctttggagccaaggttggacatcgttcccatgcccacaattgtagtaagatgcacatacctccgattgatttagttttataatcggtggcactgcacatctctctatatagaaaaccaagtgcggcagctccccatgcatatctgccacattcttcaaagtcacgtaaaaattgaaggtaccttactgaaactctgttactggttttgtcaacgaacaagacacctccaataaatctcagtatccatgcacggacaaaccttcgtacttgttcttcatcgtcgtcattatttatttgatcaaaatggtgagccagccaacttaatttaattacattacttttaatttcaccttcttgtggtctgactcccaataattcctcacataaatcagcccaatcaagatttgttggaccgattaatggtaaaccatccacacttatacctaacaacacagagacgtcttgaagagtgatagtacactctccgcatctcatgtgaaac

SEQ ID NO: 13718 - DNA, 1188 bp, Glycine max
  Gm_smallRNAprecursor_6551
gtcgtctttgcattttgtgggtcaacaaacatctttgtctttcgcctataccacaccatgtagtccgagttaaagctcaataggccttcttgtcggggataagcgtcgaccctaaatgcatggcgattattccactgatcaatcattggggcgaacaattggccccaattttcgtcatgtttcccttttaatgttatgccatgaatgtttaagggttgtgaaggagactctggaattggttgttgcatcccaaattgtctcaatactttgtccggttggtgccactcaataacttggaaacaaattagtggcaccaccgcgtaccacgcgagacttccgactaaacaaacgggaggcaacagtgatataacggttgatgggtacggctcccacacaaacggcatataacaacatagttgtgaacattttagtaaaataacacatataattttttattttacaaatacaacagcatgttcttacctcatgacgtttcataatatccaacttgcgacgaaaaactctcacatcatcattgccgatatgttggtttccacgtcgcagccacctacaaagattaaaatttaatatatgctaaaaccatttattctattgaaatgaaagacgctgttaaaaatgactaacctgtgccccaatggtgtattttctacttgggaaggagtcctctttggagccaaggttggacatcgttcccatgcccacatttgtagtaagatacacatacctccgattgatttagttttataatcggtggcattgcacatctctctgtatagaaaaccaagtacggcagctccccatgcatatctgccacattcttcaaagtcacgtaaaaattgaaggtaccttagcgaaactttgttactgcttttgtcaacgaacaagacacctccaatgaatctcagtatccatgcacgggcaaaccttcgtatttgttcttcgtcgtcgtcattatttatttgggcaaaatggtgagccagccaacttaatttaaccacactacctctaatttcatcttcttgtggtctgactcccaataattcctcacataaatcagcccaatcaagatttgttggaccaattaatggtaaaccatccacacttatacctaacaatacagagacgtcttggagagtaatagtacattctccgcatctcatgtgaaag

SEQ ID NO: 13719 - DNA, 1129 bp, Glycine max
  Gm_smallRNAprecursor_6552
tgtttagcatcaggatagaagatgagttttgataaaaataggagtttatttttctaagattgtcaatgctttaatagctgaagcaatcgataacactatgggcatttccatgacaaataacttggagttcccttgtaacatgctagatcggctagggagaaatactcttttatcattgacaaggttgaaaggcatttggttggatagaagactcaaagcctaaagttactttatctctagactttgttatgagccttggttttatagtattcaagagaatagagagtgttgccagttctcctttttattcaactccacattgaatgccaatgacaagcagaattctgcttatctgctattccttccttagttcttgtgcagttgtgccaatgacatttcagttattattttcttcttctggagttggttgaaggaattatcaaaagatttctcgtactcacgcacagtgggcagcatctccaggggattacttctatgctatgaagtacggacactccagtcccttgccgtgtccggtattcgacacgtgtccatgtcagtgtctgacaccgacacgacacccatactacgttctatattttggacattacaggtgtctacgtgtccgtgtcgtgtccggtgtccgtgtcggtgcttcatagcttctatgagcttatgtagaagtgatctttgtgtcttctactgttttgtgcttgtttggatcgtggctgtatggtgattttttagcacatgttttgtaaggattctggtcttcagcatgtggggatggacaattactttgtagggtgcttcatgtggttggttacttcatatttatatgtttgcatggtaaatgtcgagtaaccaattatggaaatatacttgttttttatctatgtaaatgtgttttggtaccccttgtacctctttattaatatacatgttatttgctgataaaaaaataaaatgaagggatatattgattcattcaaattgaagagtagttttacttcatttgaattgacaagaagtcttgctttaatctaaggattataatgtttcatgcaacgcattttcacctgtcacctaaacgacaaatattagtagtaatattgaacgttgagatgag

SEQ ID NO: 13720 - DNA, 1200 bp, Glycine max
  Gm_smallRNAprecursor_6553
acgtttcccctcatcaaagcattgtacccatttttgtttgggtaattgatcaagccattcagctgcacttggcttattcgcacgaatatccccaagatgtcgccagtgcatcttctccgtgtatgcgtaccctgtaaatatttaatcaatgtattatgttataaaatttgattgaaagaaaattataacgaataaataaaatagattttcaccagccaacataagtggtttctttaaatgtttgcagtttgagttaccacgaagaaagttttgtgcaatgtggcacaggcaaaagaaatgggatgtgtcctggacccataagttacttgggttgttgtaggcacttataattgaggagtgtcggtctgaaataagagaaatgttaatttgcggagtaacatgtcttctcaaattctttagaaaaaacctccaagctgaagttgtctccccttctacaatggcataggcaatcgggaagatatggttagctccatcttgtgcggtagctatcaacagtgtgccagtatactttccataaagccatgtaccatctacttgtacaatgggtttgcaatatgcaaaaccattaatgcatggaccaaatgaccaaaagacacgtttaaacaatcttttgctcggtactatttctcccccctcatacaaggattctgtttgagcagcgaccacagtcccgggaacacaagattgcaaagctccgaaaagttttggcagtttggcatatgattcttcccagtttccatgaatcatctccaatgctttttgctttgctaaccatgtcttcttgtaggatggggtataattcatgaacgttttgatctctgcaatcaatgtcttgatgaagacagttgggtttgttttgacaattggttggatgatctgtgttatgacgtgtttgtcgagttggcgatgatcttgtctaagcatcggcacgagacaagtgtgatgacctctgatactcttgataatccatttgttatgcctctttgaattgcatgcgcccaagctccatgtacaaccattttcatgtaacttgcagacgaagtgtagccttctttggtcagagtaaattgttctgcaatcaaaatgatttctgatgttgtattctttgattgctcgaatacattgtgatttgtcatcgaatgtcatgccaacctcgagtacaccgactggtggttgcac

SEQ ID NO: 13721 - DNA, 1052 bp, Glycine max
  Gm_smallRNAprecursor_6554
gaattcaatgtgaaatgcacattttgtcgataacattttcattccatccataaaggtaaagttataagtatacttgagctgaaaataggatagttgacaacatgacatgattcatcattaatttcaatgggattaggttgatgcaaagacagtaacagatagtgattttttaaccgtgtatgtttacgtagtaaacccaagagaatcagcctagcccctcgttgaagattagatgtgcgtaaacaaagaaactttatagaagctgatgcattgcacagacagattatcgagtcaggatatcgattagtcttgtttttctttttattatatctatatttttttaaccaggaaatataggattcgattaagataatgttcaaacaagaactagtgttatagtgttaagttgttgtgaaagttgttaatgaactctagaaacaaaataggagaattgatgtatcaggtacaatgtcatatggttaggaagttaagacggaacttacaaagattgttcaagacagatatttgagaattcgtgttcataagaaagatgactatgatcgctttatagatgatgtatattgtcatgtcatttttgtataggtattcattgatttcaagtatatattttgtcatttcaagtatatatattaatgtatacacaaagagaataacaaaatgtatacttgaaatggatgaatacttatacaaaaatgacatgacaatatacatcacctacaaagtgatcatagttatctttctcgtaaatacggatccacaaatatatatcttgaacaatctttgtaagtttcgtcttagcttcttagccatatggcagtgcaccttgtgcatcaatttcccttatgcattaatttttctattttgtttctagagttcattaacagtttccataacaaattgacactctaacactagttctcgttagagcattatcttaattgaatcatatatttcctgattatgatttcctgatttttaataagaattgtcttaaataagcaaacaattaaaagagaaataccaagaatcga

SEQ ID NO: 13722 - DNA, 1185 bp, Glycine max
  Gm_smallRNAprecursor_6555
aaaggtaaagttataagtatacttgagctgaaaataggatagttgacaacatgacatgattcatcattaatttcaatgggattaggttgatgcaaagacagtaacagatagtgattttttaaccgtgtatgtttacgtagtaaacccaagagaatcagcctagcccctcgttgaagattagatgtgcgtaaacaaagaaactttatagaagctgatgcattgcacagacagattatcgagtcaggatatcgattagtcttgtttttctttttattatatctatatttttttaaccaggaaatataggattcgattaagataatgttcaaacaagaactagtgttatagtgttaagttgttgtgaaagttgttaatgaactctagaaacaaaataggagaattgatgtatcaggtacaatgtcatatggttaggaagttaagacggaacttacaaagattgttcaagacagatatttgagaattcgtgttcataagaaagatgactatgatcgctttatagatgatgtatattgtcatgtcatttttgtataggtattcattgatttcaagtatatattttgtcatttcaagtatatatattaatgtatacacaaagagaataacaaaatgtatacttgaaatggatgaatacttatacaaaaatgacatgacaatatacatcacctacaaagtgatcatagttatctttctcgtaaatacggatccacaaatatatatcttgaacaatctttgtaagtttcgtcttagcttcttagccatatggcagtgcaccttgtgcatcaatttcccttatgcattaatttttctattttgtttctagagttcattaacagtttccataacaaattgacactctaacactagttctcgttagagcattatcttaattgaatcatatatttcctgattatgatttcctgatttttaataagaattgtcttaaataagcaaacaattaaaagagaaataccaagaatcgataatatgtctgtgcaatgcattagcttctataaagttcctttgtttaggcgcatctaatcttcgacgacaggctgcaagtacatggactgggatcaaggctgattttcttgggtctactatgctaacatatacggttaaagaatcattatctgtgactgcctttgcattaacctagtcccattg

SEQ ID NO: 13723 - DNA, 1135 bp, Glycine max
  Gm_smallRNAprecursor_6556
agctgaaaataggatagttgacaacatgacatgattcatcattaatttcaatgggattaggttgatgcaaagacagtaacagatagtgattttttaaccgtgtatgtttacgtagtaaacccaagagaatcagcctagcccctcgttgaagattagatgtgcgtaaacaaagaaactttatagaagctgatgcattgcacagacagattatcgagtcaggatatcgattagtcttgtttttctttttattatatctatatttttttaaccaggaaatataggattcgattaagataatgttcaaacaagaactagtgttatagtgttaagttgttgtgaaagttgttaatgaactctagaaacaaaataggagaattgatgtatcaggtacaatgtcatatggttaggaagttaagacggaacttacaaagattgttcaagacagatatttgagaattcgtgttcataagaaagatgactatgatcgctttatagatgatgtatattgtcatgtcatttttgtataggtattcattgatttcaagtatatattttgtcatttcaagtatatatattaatgtatacacaaagagaataacaaaatgtatacttgaaatggatgaatacttatacaaaaatgacatgacaatatacatcacctacaaagtgatcatagttatctttctcgtaaatacggatccacaaatatatatcttgaacaatctttgtaagtttcgtcttagcttcttagccatatggcagtgcaccttgtgcatcaatttcccttatgcattaatttttctattttgtttctagagttcattaacagtttccataacaaattgacactctaacactagttctcgttagagcattatcttaattgaatcatatatttcctgattatgatttcctgatttttaataagaattgtcttaaataagcaaacaattaaaagagaaataccaagaatcgataatatgtctgtgcaatgcattagcttctataaagttcctttgtttaggcgcatctaatcttcgacgacaggctgcaagtacatggactgggatcaaggctgattttcttgggtctactatgctaacatatacggttaaagaatcattatctgtgactg

SEQ ID NO: 13724 - DNA, 1131 bp, Glycine max
  Gm_smallRNAprecursor_6557
ctgaaaataggatagttgacaacatgacatgattcatcattaatttcaatgggattaggttgatgcaaagacagtaacagatagtgattttttaaccgtgtatgtttacgtagtaaacccaagagaatcagcctagcccctcgttgaagattagatgtgcgtaaacaaagaaactttatagaagctgatgcattgcacagacagattatcgagtcaggatatcgattagtcttgtttttctttttattatatctatatttttttaaccaggaaatataggattcgattaagataatgttcaaacaagaactagtgttatagtgttaagttgttgtgaaagttgttaatgaactctagaaacaaaataggagaattgatgtatcaggtacaatgtcatatggttaggaagttaagacggaacttacaaagattgttcaagacagatatttgagaattcgtgttcataagaaagatgactatgatcgctttatagatgatgtatattgtcatgtcatttttgtataggtattcattgatttcaagtatatattttgtcatttcaagtatatatattaatgtatacacaaagagaataacaaaatgtatacttgaaatggatgaatacttatacaaaaatgacatgacaatatacatcacctacaaagtgatcatagttatctttctcgtaaatacggatccacaaatatatatcttgaacaatctttgtaagtttcgtcttagcttcttagccatatggcagtgcaccttgtgcatcaatttcccttatgcattaatttttctattttgtttctagagttcattaacagtttccataacaaattgacactctaacactagttctcgttagagcattatcttaattgaatcatatatttcctgattatgatttcctgatttttaataagaattgtcttaaataagcaaacaattaaaagagaaataccaagaatcgataatatgtctgtgcaatgcattagcttctataaagttcctttgtttaggcgcatctaatcttcgacgacaggctgcaagtacatggactgggatcaaggctgattttcttgggtctactatgctaacatatacggttaaagaatcattatctgtgac

SEQ ID NO: 13725 - DNA, 1107 bp, Glycine max
  Gm_smallRNAprecursor_6558
tagttgacaacatgacatgattcatcattaatttcaatgggattaggttgatgcaaagacagtaacagatagtgattttttaaccgtgtatgtttacgtagtaaacccaagagaatcagcctagcccctcgttgaagattagatgtgcgtaaacaaagaaactttatagaagctgatgcattgcacagacagattatcgagtcaggatatcgattagtcttgtttttctttttattatatctatatttttttaaccaggaaatataggattcgattaagataatgttcaaacaagaactagtgttatagtgttaagttgttgtgaaagttgttaatgaactctagaaacaaaataggagaattgatgtatcaggtacaatgtcatatggttaggaagttaagacggaacttacaaagattgttcaagacagatatttgagaattcgtgttcataagaaagatgactatgatcgctttatagatgatgtatattgtcatgtcatttttgtataggtattcattgatttcaagtatatattttgtcatttcaagtatatatattaatgtatacacaaagagaataacaaaatgtatacttgaaatggatgaatacttatacaaaaatgacatgacaatatacatcacctacaaagtgatcatagttatctttctcgtaaatacggatccacaaatatatatcttgaacaatctttgtaagtttcgtcttagcttcttagccatatggcagtgcaccttgtgcatcaatttcccttatgcattaatttttctattttgtttctagagttcattaacagtttccataacaaattgacactctaacactagttctcgttagagcattatcttaattgaatcatatatttcctgattatgatttcctgatttttaataagaattgtcttaaataagcaaacaattaaaagagaaataccaagaatcgataatatgtctgtgcaatgcattagcttctataaagttcctttgtttaggcgcatctaatcttcgacgacaggctgcaagtacatggactgggatcaaggctgattttcttgggtctactatgctaacatatacggttaaagaatc

SEQ ID NO: 13726 - DNA, 1071 bp, Glycine max
  Gm_smallRNAprecursor_6559
agcattatcttaattgaatcatatatttcctgattatgatttcctgatttttaataagaattgtcttaaataagcaaacaattaaaagagaaataccaagaatcgataatatgtctgtgcaatgcattagcttctataaagttcctttgtttaggcgcatctaatcttcgacgacaggctgcaagtacatggactgggatcaaggctgattttcttgggtctactatgctaacatatacggttaaagaatcattatctgtgactgcctttgcattaacctagtcccattgagattaatgatgaatcatgtcatgttaattatcacattttcagttcaagtatacttataactttatttttatggatggaatgaaaatattatcgaaaagtgtgtatttcatattgaactccaccagccaagaaaaaagggaatgagtaattgcatgaacaagggtgtgtagtagagaaatatcatagaaagtcaactatctctataaattaagcaacacaaatttcattcacaatgggtatatttttgttattaggtgacttaagtaacatgctcatcgtgaatgagatttgtgttgcttaatttataagaatagttaattttctatgaaattcttccactacaccccccttttttcttgactgattgagttcaatgtgaaatgcacctttgcgggtaacattttcattctctataaaaataaagtcataggtatatttgagctgaaaataggatagttgacaacatgacatggttcatcattaatctcaatgggattaggttgatgcaaaggtagtcacagatgataaatctttaatcgtgtatgttagcgtagtaaatccaagaaaatcagtcttggtctcagtccatgtgcttgcagcccatcgtcgaagattagatgcgcgtaaataaatgaactttacagaagcttatacattgcacagacagattatcgagtcaggatatcggttagtctgtaatttttcaattcatcatatctatgcttttaatcatcgatattttatttctgattgtttgtttatttaaggtgattcctatta

SEQ ID NO: 13727 - DNA, 1076 bp, Glycine max
  Gm_smallRNAprecursor_6560
ctataaaaataaagtcataggtatatttgagctgaaaataggatagttgacaacatgacatggttcatcattaatctcaatgggattaggttgatgcaaaggtagtcacagatgataaatctttaatcgtgtatgttagcgtagtaaatccaagaaaatcagtcttggtctcagtccatgtgcttgcagcccatcgtcgaagattagatgcgcgtaaataaatgaactttacagaagcttatacattgcacagacagattatcgagtcaggatatcggttagtctgtaatttttcaattcatcatatctatgcttttaatcatcgatattttatttctgattgtttgtttatttaaggtgattcctattaaaagttaattttttaaggtaatgctcaaacaagaactagtattagaatgttaagttattgtgaaaactgttaatgaactttagaaacaaaactggagaattgatacaccaggtgcaatgtcatatggttaggaagctaagacggaacttacaaagattgttcaggtagacatttgagaataaatgtctgtcttgaacaatctttttaagtttcgtcttaactttctagtttatgacattgtatcttgtgcatcaatttttcatgttttatttttagttcattaacagcttccacagcaacttaacactctagcattagttcttgttagagtattactttaatcaaatcctatatttcttggctaggattttctacaatatgcggatgataccatttttgtgggagaagctacttgggataatgtaattgctatgaagacaatgcttagaggatttgaattggcatcagggctgaagattaacttctccaaaagcagtgttggtattttcagggctcaatccaattgggttcaagaggctgctcggttccttaattgcagaaccatggagaccccttttttgtacctggggatccctttaggggctaagcattctagttggatggtgtgggaacctctcattaaaaaatttgaatcaaagctgtctaagtggaatcagagatttctatctatggctgggaaggtctc

SEQ ID NO: 13728 - DNA, 1058 bp, Glycine max
  Gm_smallRNAprecursor_6561
taaagtcataggtatatttgagctgaaaataggatagttgacaacatgacatggttcatcattaatctcaatgggattaggttgatgcaaaggtagtcacagatgataaatctttaatcgtgtatgttagcgtagtaaatccaagaaaatcagtcttggtctcagtccatgtgcttgcagcccatcgtcgaagattagatgcgcgtaaataaatgaactttacagaagcttatacattgcacagacagattatcgagtcaggatatcggttagtctgtaatttttcaattcatcatatctatgcttttaatcatcgatattttatttctgattgtttgtttatttaaggtgattcctattaaaagttaattttttaaggtaatgctcaaacaagaactagtattagaatgttaagttattgtgaaaactgttaatgaactttagaaacaaaactggagaattgatacaccaggtgcaatgtcatatggttaggaagctaagacggaacttacaaagattgttcaggtagacatttgagaataaatgtctgtcttgaacaatctttttaagtttcgtcttaactttctagtttatgacattgtatcttgtgcatcaatttttcatgttttatttttagttcattaacagcttccacagcaacttaacactctagcattagttcttgttagagtattactttaatcaaatcctatatttcttggctaggattttctacaatatgcggatgataccatttttgtgggagaagctacttgggataatgtaattgctatgaagacaatgcttagaggatttgaattggcatcagggctgaagattaacttctccaaaagcagtgttggtattttcagggctcaatccaattgggttcaagaggctgctcggttccttaattgcagaaccatggagaccccttttttgtacctggggatccctttaggggctaagcattctagttggatggtgtgggaacctctcattaaaaaatttgaatcaaagctgtctaagtggaatcagagatttctatctatggctgg

SEQ ID NO: 13729 - DNA, 1057 bp, Glycine max
  Gm_smallRNAprecursor_6562
aaagtcataggtatatttgagctgaaaataggatagttgacaacatgacatggttcatcattaatctcaatgggattaggttgatgcaaaggtagtcacagatgataaatctttaatcgtgtatgttagcgtagtaaatccaagaaaatcagtcttggtctcagtccatgtgcttgcagcccatcgtcgaagattagatgcgcgtaaataaatgaactttacagaagcttatacattgcacagacagattatcgagtcaggatatcggttagtctgtaatttttcaattcatcatatctatgcttttaatcatcgatattttatttctgattgtttgtttatttaaggtgattcctattaaaagttaattttttaaggtaatgctcaaacaagaactagtattagaatgttaagttattgtgaaaactgttaatgaactttagaaacaaaactggagaattgatacaccaggtgcaatgtcatatggttaggaagctaagacggaacttacaaagattgttcaggtagacatttgagaataaatgtctgtcttgaacaatctttttaagtttcgtcttaactttctagtttatgacattgtatcttgtgcatcaatttttcatgttttatttttagttcattaacagcttccacagcaacttaacactctagcattagttcttgttagagtattactttaatcaaatcctatatttcttggctaggattttctacaatatgcggatgataccatttttgtgggagaagctacttgggataatgtaattgctatgaagacaatgcttagaggatttgaattggcatcagggctgaagattaacttctccaaaagcagtgttggtattttcagggctcaatccaattgggttcaagaggctgctcggttccttaattgcagaaccatggagaccccttttttgtacctggggatccctttaggggctaagcattctagttggatggtgtgggaacctctcattaaaaaatttgaatcaaagctgtctaagtggaatcagagatttctatctatggctgg

SEQ ID NO: 13730 - DNA, 1057 bp, Glycine max; identical to SEQ ID NO: 13729
  Gm_smallRNAprecursor_6563

SEQ ID NO: 13731 - DNA, 1052 bp, Glycine max
  Gm_smallRNAprecursor_6564
aacatgatgtgattaatcattaatctcaatgggactaggttgctgcaaggatagtcgtagatggtgactctttaatcgtatatgttagcatagtaaacccaagagaatcagcattggtcttaatctatgtgcttgcagcccatcgtcgaagattagctgcgcgtaaataaagaaattttatagaaactgatgcattacacagacagattatcgatttaggatatcggtaatatatagtttttcaaactcattatatttatgtttctaacccttggtattttccttctaattgtttacttatttaagtcgattcctattaaaaaccaagaaatcctaactagaaaatacatgattcgattaagataatgttcaaacaagaactagtgtttgagtcttaagttgttgtgaaagctgttaatgaactctagaaattagaaacaaaacaggagaattgatgcacaagatgcaacgtcatatggctagaaagctaagatgaaacttacaaagattgttcaagacagacatttgtgaattcgtgtttatgagaaagatgactatgatcgctttgtagatattgtatattatcatgtcatttttgtacaggtattcattcatttaaaataagaataataaaatgtatatttaaaatgaatgtatacatgtaaaaaaatgacatgataatatacatcacctacaaagcgatcatattcatatttctcataaacacggatccacaaatgtctgtcttgaacaatttttgtaaattccgtcttagcttcctagccatatggcattgcacctgatgcatcaatccccctgttttgtttctagagtttattaacagttttcacaacaatttaatattctaccattagtttttgtttgagcagcattatcttaatcaaatcctctattttctttcttgatttttaataggaattagcttaaataagcaaacaagtaggaaggaaataccaagggttagaagcatagatataatgaattgaaaaactacatattaaccgatatatcctacatcgattatctgtctt

SEQ ID NO: 13732 - DNA, 1199 bp, Glycine max
  Gm_smallRNAprecursor_6565
atctcaatgggactaggttgctgcaaggatagtcgtagatggtgactctttaatcgtatatgttagcatagtaaacccaagagaatcagcattggtcttaatctatgtgcttgcagcccatcgtcgaagattagctgcgcgtaaataaagaaattttatagaaactgatgcattacacagacagattatcgatttaggatatcggtaatatatagtttttcaaactcattatatttatgtttctaacccttggtattttccttctaattgtttacttatttaagtcgattcctattaaaaaccaagaaatcctaactagaaaatacatgattcgattaagataatgttcaaacaagaactagtgtttgagtcttaagttgttgtgaaagctgttaatgaactctagaaattagaaacaaaacaggagaattgatgcacaagatgcaacgtcatatggctagaaagctaagatgaaacttacaaagattgttcaagacagacatttgtgaattcgtgtttatgagaaagatgactatgatcgctttgtagatattgtatattatcatgtcatttttgtacaggtattcattcatttaaaataagaataataaaatgtatatttaaaatgaatgtatacatgtaaaaaaatgacatgataatatacatcacctacaaagcgatcatattcatatttctcataaacacggatccacaaatgtctgtcttgaacaatttttgtaaattccgtcttagcttcctagccatatggcattgcacctgatgcatcaatccccctgttttgtttctagagtttattaacagttttcacaacaatttaatattctaccattagtttttgtttgagcagcattatcttaatcaaatcctctattttctttcttgatttttaataggaattagcttaaataagcaaacaagtaggaaggaaataccaagggttagaagcatagatataatgaattgaaaaactacatattaaccgatatatcctacatcgattatctgtctttgcaatgcatcagcttctataaagttttgtttacgagcatctaatcttcgatgatgggctgcaaacacatggactgagaccaaggctaaggctgattctcttgggtctactacgctaacatatagagtcaccatatgcgactgattttgcatcaatctaatcctattga

SEQ ID NO: 13733 - DNA, 1181 bp, Glycine max
  Gm_smallRNAprecursor_6566
ggactaggttgctgcaaggatagtcgtagatggtgactctttaatcgtatatgttagcatagtaaacccaagagaatcagcattggtcttaatctatgtgcttgcagcccatcgtcgaagattagctgcgcgtaaataaagaaattttatagaaactgatgcattacacagacagattatcgatttaggatatcggtaatatatagtttttcaaactcattatatttatgtttctaacccttggtattttccttctaattgtttacttatttaagtcgattcctattaaaaaccaagaaatcctaactagaaaatacatgattcgattaagataatgttcaaacaagaactagtgtttgagtcttaagttgttgtgaaagctgttaatgaactctagaaattagaaacaaaacaggagaattgatgcacaagatgcaacgtcatatggctagaaagctaagatgaaacttacaaagattgttcaagacagacatttgtgaattcgtgtttatgagaaagatgactatgatcgctttgtagatattgtatattatcatgtcatttttgtacaggtattcattcatttaaaataagaataataaaatgtatatttaaaatgaatgtatacatgtaaaaaaatgacatgataatatacatcacctacaaagcgatcatattcatatttctcataaacacggatccacaaatgtctgtcttgaacaatttttgtaaattccgtcttagcttcctagccatatggcattgcacctgatgcatcaatccccctgttttgtttctagagtttattaacagttttcacaacaatttaatattctaccattagtttttgtttgagcagcattatcttaatcaaatcctctattttctttcttgatttttaataggaattagcttaaataagcaaacaagtaggaaggaaataccaagggttagaagcatagatataatgaattgaaaaactacatattaaccgatatatcctacatcgattatctgtctttgcaatgcatcagcttctataaagttttgtttacgagcatctaatcttcgatgatgggctgcaaacacatggactgagaccaaggctaaggctgattctcttgggtctactacgctaacatatagagtcaccatatgcgactgattttgcatcaatctaa

SEQ ID NO: 13734 - DNA, 1167 bp, Glycine max
  Gm_smallRNAprecursor_6567
gttgctgcaaggatagtcgtagatggtgactctttaatcgtatatgttagcatagtaaacccaagagaatcagcattggtcttaatctatgtgcttgcagcccatcgtcgaagattagctgcgcgtaaataaagaaattttatagaaactgatgcattacacagacagattatcgatttaggatatcggtaatatatagtttttcaaactcattatatttatgtttctaacccttggtattttccttctaattgtttacttatttaagtcgattcctattaaaaaccaagaaatcctaactagaaaatacatgattcgattaagataatgttcaaacaagaactagtgtttgagtcttaagttgttgtgaaagctgttaatgaactctagaaattagaaacaaaacaggagaattgatgcacaagatgcaacgtcatatggctagaaagctaagatgaaacttacaaagattgttcaagacagacatttgtgaattcgtgtttatgagaaagatgactatgatcgctttgtagatattgtatattatcatgtcatttttgtacaggtattcattcatttaaaataagaataataaaatgtatatttaaaatgaatgtatacatgtaaaaaaatgacatgataatatacatcacctacaaagcgatcatattcatatttctcataaacacggatccacaaatgtctgtcttgaacaatttttgtaaattccgtcttagcttcctagccatatggcattgcacctgatgcatcaatccccctgttttgtttctagagtttattaacagttttcacaacaatttaatattctaccattagtttttgtttgagcagcattatcttaatcaaatcctctattttctttcttgatttttaataggaattagcttaaataagcaaacaagtaggaaggaaataccaagggttagaagcatagatataatgaattgaaaaactacatattaaccgatatatcctacatcgattatctgtctttgcaatgcatcagcttctataaagttttgtttacgagcatctaatcttcgatgatgggctgcaaacacatggactgagaccaaggctaaggctgattctcttgggtctactacgctaacatatagagtcaccatatgcgactgattttgcatc

SEQ ID NO: 13735 - DNA, 1142 bp, Glycine max
  Gm_smallRNAprecursor_6568
tagtcgtagatggtgactctttaatcgtatatgttagcatagtaaacccaagagaatcagcattggtcttaatctatgtgcttgcagcccatcgtcgaagattagctgcgcgtaaataaagaaattttatagaaactgatgcattacacagacagattatcgatttaggatatcggtaatatatagtttttcaaactcattatatttatgtttctaacccttggtattttccttctaattgtttacttatttaagtcgattcctattaaaaaccaagaaatcctaactagaaaatacatgattcgattaagataatgttcaaacaagaactagtgtttgagtcttaagttgttgtgaaagctgttaatgaactctagaaattagaaacaaaacaggagaattgatgcacaagatgcaacgtcatatggctagaaagctaagatgaaacttacaaagattgttcaagacagacatttgtgaattcgtgtttatgagaaagatgactatgatcgctttgtagatattgtatattatcatgtcatttttgtacaggtattcattcatttaaaataagaataataaaatgtatatttaaaatgaatgtatacatgtaaaaaaatgacatgataatatacatcacctacaaagcgatcatattcatatttctcataaacacggatccacaaatgtctgtcttgaacaatttttgtaaattccgtcttagcttcctagccatatggcattgcacctgatgcatcaatccccctgttttgtttctagagtttattaacagttttcacaacaatttaatattctaccattagtttttgtttgagcagcattatcttaatcaaatcctctattttctttcttgatttttaataggaattagcttaaataagcaaacaagtaggaaggaaataccaagggttagaagcatagatataatgaattgaaaaactacatattaaccgatatatcctacatcgattatctgtctttgcaatgcatcagcttctataaagttttgtttacgagcatctaatcttcgatgatgggctgcaaacacatggactgagaccaaggctaaggctgattctcttgggtctactacgctaacatatagagtcaccatatgcgac

SEQ ID NO: 13736 - DNA, 1043 bp, Glycine max
  Gm_smallRNAprecursor_6569
aataatgttataataaacatctgaaatatcatatctatttttaaattactaccaaaattattgattaatatttatatatatcaacatattttaacaatcaaataagtaaagctatggggcttatacgcgtgagattaggcccagtgaatttgcctaatgcaaatccgacaattactttctgcacccatgggcacattttcacctttttaatgtaattattttcttaagacgtgaagtggaagagtggttcacatttcacacgcaagatccatacatgtcgtcagaaaggtctgaaaaagaaaggaaaggagtagcagcaagcagtcaaagttgcacagttagcatgaattgaatagcccacttctttatctggtggttaccctaagagtgttgctaggtgcacccagcattattactggtgcacccagcatttaattaaaataccaaaactgcccctgtacttttttcgcatttgtgatgaatgtgtgtgagggttatccgtaaatcgtacagatcaagttaatctgtaagattgatacggatcaacttgatccgtaagccttttacggaacaacttaaatggcttacagatcaagggtattttcgtcattttatcttaagtgctgggtgcaccagcaataatgctaccctgggtttttccatattttcacgcttattggacattcaagcaaacccgcaagaaacagttctactgggttcaggagcccaatttcactggaaagagatcatccatgaaggcatagaatggttgcaagttgtaaacctacaacatgatcctcactcacactccatgataaatcattttccaagactcatcgctttaccttttctaaaacttctcgccaaaggccaacgtcttaatctatgaatattaaacgataaaagttgaaaatctgaaacagttgcccctgaaaatcagaaaatcaggcttatcactttttcagccagcttgctgttttgtaaactctgtatacagtatttgatcagcccctgaaaatcgcttgtaaccaagtcctagcagc

SEQ ID NO: 13737 - DNA, 1043 bp, Glycine max; identical to SEQ ID NO: 13736
  Gm_smallRNAprecursor_6570

SEQ ID NO: 13738 - DNA, 1132 bp, Glycine max
  Gm_smallRNAprecursor_6571
gcttagacctttctatacagaaagatagatagattgaataaattaatccaagcctgaagaagaacatatcaaaaacaaagttatgcagaagcgaagacacaaaagatcagtcaccccaacacagaaatacttgtaactgattatcgtcatatcagatataccaccgaaattcttgaaagaaagaaaaaactagtttttcagattaaaggaaaataagataatatatacaaagagagacgacacgacactcatgatgggattcatgaattttattttattttcgtttctttatccagtagtggacaagttgggagagtcctatcttgttgaaatcttcttcctgtaacatacattaaaaaaagtacgcagaatgaaaggacaaaccacatgcatgaataacatatgcaacaataccgatagatataatatcaaaatcttttcacctctcatggcatgcttcccttcgatctgaatcgggaattctagtcatgtatttgctgatgcagcatcatcaagattcccacatctaaaatagaactttattccgcactccacaaagagctaacatatatgtatatatgtatgtataattaagcgtgtgcagtcctgaagtcctagcaaattaggcggtgtgaatcttgatgctgctgcacctgcagatactgactgttttctgcaactctttctccttaagtttgaagataactagaagtcaccctgggagccaaaaagtaagtatatatatatagatatacacatacatacatgtatgcattaattaagatcagagcagctagcaggggtaaaaagtgctttaaagaaacatgaaggaaacagaagtgaagagtaaataaactataaatctagtcggtgaccgaccttaattagtgttcccaagaagcagcacctgaggctgagagtgagaggctcagagatcagatctttgcaattaactagtagctaacagaggatttaagtttaggaatgttggtgaaagatatgaataggaaggaaagactgcagtagaaaaattcccacacattgcctagctagtacgtaatgtgacatcaggtgatgaaagaaaggtctttgcgggattgcaataattaacttgtgccaaagcttagaaggt

SEQ ID NO: 13739 - DNA, 1129 bp, Glycine max
  Gm_smallRNAprecursor_6572
cttagacctttctatacagaaagatagatagattgaataaattaatccaagcctgaagaagaacatatcaaaaacaaagttatgcagaagcgaagacacaaaagatcagtcaccccaacacagaaatacttgtaactgattatcgtcatatcagatataccaccgaaattcttgaaagaaagaaaaaactagtttttcagattaaaggaaaataagataatatatacaaagagagacgacacgacactcatgatgggattcatgaattttattttattttcgtttctttatccagtagtggacaagttgggagagtcctatcttgttgaaatcttcttcctgtaacatacattaaaaaaagtacgcagaatgaaaggacaaaccacatgcatgaataacatatgcaacaataccgatagatataatatcaaaatcttttcacctctcatggcatgcttcccttcgatctgaatcgggaattctagtcatgtatttgctgatgcagcatcatcaagattcccacatctaaaatagaactttattccgcactccacaaagagctaacatatatgtatatatgtatgtataattaagcgtgtgcagtcctgaagtcctagcaaattaggcggtgtgaatcttgatgctgctgcacctgcagatactgactgttttctgcaactctttctccttaagtttgaagataactagaagtcaccctgggagccaaaaagtaagtatatatatatagatatacacatacatacatgtatgcattaattaagatcagagcagctagcaggggtaaaaagtgctttaaagaaacatgaaggaaacagaagtgaagagtaaataaactataaatctagtcggtgaccgaccttaattagtgttcccaagaagcagcacctgaggctgagagtgagaggctcagagatcagatctttgcaattaactagtagctaacagaggatttaagtttaggaatgttggtgaaagatatgaataggaaggaaagactgcagtagaaaaattcccacacattgcctagctagtacgtaatgtgacatcaggtgatgaaagaaaggtctttgcgggattgcaataattaacttgtgccaaagcttagaag

SEQ ID NO: 13740 - DNA, 1134 bp, Glycine max
  Gm_smallRNAprecursor_6573
ctaaagatgctacagctgggaaacctatatactgacaaaatacaaaatttcaaagttccttgggtttctcaacgcatattatttaacttaaaaaaaactaatatcaatcactcactaatcataatccaagaaaaatataaagattttggagcctgatccttttagcacaaatctcaagtctcaaccgttaaattaactcacgagagaggtgttgaaagaaatgaagatatataagtataatggagccataagaaagatgacaaacaaagcaccaactacaaggtcaaaggcatcttgttcaacagagtttttgacaaatgtttcaagttttgtcccatgcaatgtctgaatttacaaacacaaacaagaggaatgttaacttcatcattgacaagtaggcactatcacaagagtcttgttttggcatcaccttaattaattaccaccataagccatccatgggagaagatctctagagagagagagagagataaggtttacgggaatgaagcctggtccgagaaagcctcaaaatccaacctttaaagctttctttgtttcaagggatcaaagagatcgaaacccataaattaaagcttcaaagatgaacaaaattaagaccatgcatagttacctcgagccaaacaacattcccatcaaccccaatctctcatttcgaaccatatctgagaaagatgaaagaacaatatataaaaccatgcatgtataactttcgatctgaaccaaattttcttctctgcaagggaagaaacccttggttctctcagcacaaacccgagtttgagagagagagagagaggaaaatggatacagaacgtaagctaaagcaagcagtgatagagaaagagaaagagacagcaaaagcacaggagactctcacccatatatataaaacctaacctttttatttttatttttataacccaattaatgtctctctcttctaattattttcatcacataacataacacatcccctgcatccataagccataagaaatgtgaaatcatcatatcatattatatttttatacaaaacctaacccatccatatgcatgcatccagttggcatcagtgatatgcagcgggcgaaggaaagattaacaattaat

SEQ ID NO: 13741 - DNA, 1031 bp, Glycine max
  Gm_smallRNAprecursor_6574
aaaggtgtaggaagcaatttgtaaggtgcattggaattattgttactttgtataggcctagttaaggacattaaatgaaacaattgctttttgaaaaggttgttgctatttgcaccttatttactactatactctacttttcttcttaaattaccattatctttttcttcctctaatataacctttactgtttttttttccaagataaacactcccttctctaaacactacctttatttggattaggagattgcttagagtcttattcttcctcaaatacaacctttacttgtttttcttctacatagacacccccttctctagacattatctttatttgaattaggagacgttgtttagaatctttgggcattcaagagaaacttttacctggtttttttcaagataaacacctgagtgttgctaggtgcacccaacattctttaaaaatggaaaaattgtccctgctaatttctccccttatgaatcaagttgatccgtaaaagacttacggatcaagttgatccgtaaaagacttacggatcaagttgatccgtaagtcttaaaaattaacttacggatcaacttgatccgtaagggatatttttgtctttttgtggtcagtgctgggtgcacctagcagcactctaaacacctcctctaggcactacctttatttggattaggagacgtttagaatcttcgatcattctagagtgctacaaaaatatccttgtttttggtgcatggtagtgttttcttcatgtgtttgtgtcatggtgattgtcgctttggtgtggataacagaagattcgtaggttcaagtttttcttagttgagggaagcctaccacataattaagaaattcaattaaggtaaaaagggtttaatgtaagtaaattaataattttaatttgtgaaattgtgatggtgagaaattgatgccgattttggctagaagtgggtttcagaacctaatctgtatccaagtgaagttgaatttgtatgacgttctccaaaagccttagttg

SEQ ID NO: 13742 - DNA, 1041 bp, Glycine max
  Gm_smallRNAprecursor_6575
aggtgtaggaagcaatttgtaaggtgcattggaattattgttactttgtataggcctagttaaggacattaaatgaaacaattgctttttgaaaaggttgttgctatttgcaccttatttactactatactctacttttcttcttaaattaccattatctttttcttcctctaatataacctttactgtttttttttccaagataaacactcccttctctaaacactacctttatttggattaggagattgcttagagtcttattcttcctcaaatacaacctttacttgtttttcttctacatagacacccccttctctagacattatctttatttgaattaggagacgttgtttagaatctttgggcattcaagagaaacttttacctggtttttttcaagataaacacctgagtgttgctaggtgcacccaacattctttaaaaatggaaaaattgtccctgctaatttctccccttatgaatcaagttgatccgtaaaagacttacggatcaagttgatccgtaaaagacttacggatcaagttgatccgtaagtcttaaaaattaacttacggatcaacttgatccgtaagggatatttttgtctttttgtggtcagtgctgggtgcacctagcagcactctaaacacctcctctaggcactacctttatttggattaggagacgtttagaatcttcgatcattctagagtgctacaaaaatatccttgtttttggtgcatggtagtgttttcttcatgtgtttgtgtcatggtgattgtcgctttggtgtggataacagaagattcgtaggttcaagtttttcttagttgagggaagcctaccacataattaagaaattcaattaaggtaaaaagggtttaatgtaagtaaattaataattttaatttgtgaaattgtgatggtgagaaattgatgccgattttggctagaagtgggtttcagaacctaatctgtatccaagtgaagttgaatttgtatgacgttctccaaaagccttagttgctttagggcaat

SEQ ID NO: 13743 - DNA, 1094 bp, Glycine max
  Gm_smallRNAprecursor_6576
attagcaattatgcttctcaaaaaataaattagtcgtattaacttagaatgtgtttagataagataatttaattaggtaatgtattttttatagggaattaaattcttttttattaaaagtaactgtttgaatattttagtataaagaatttaaaattttagaagtttaaaagggatttagttagtggaaataatataatttcaaattctatcttcaagggagtattctttccatccccgccatgcccctcctttgccaccttcacctccacctctgtggcaacttcttatccgcccagatccctcccgaatacgacacctagcagcacctccagtacctcgtcctagcaacgagctcgtcgacaacatcgcgtcctagcaacgagctcgtcgacaacatcgcgctcgagctcgaaaacctctccgccctctttggccagaggaagagagaaccggtaccacacccagcgtcgcaaatcataacgccttgaagggaaccttcgtccttcaacatgctcagcgtgttctctaccatcttggcgtggcccaacctcgtcggtgttgttgaagtactccctcaccacctccttgtcgccgtcggagttgttgaagtactccctcaccacgaaaagagagggagtttgggcagtttgtgagagaatcaagtagaaatgacagttctgtttgggttcgcaacggagagggaagaccatagagaggatgagaacgccattgtgattttgggcgtcgttgtatccaagcacaaaattttaaaaataaaggaatttaaattaaaatatttgaaattctcagaatttaaaatttttaaaattttaaattgtctcatccaaacacactaatgatcaggaatcaagaaattaagtgacatgaaatttattgtttaatctgctgaaacattttaaaagatgcaggtcacatgtcgaagtaatgcagacgtggggtgtttattggagaaagggaatgaacatatattttcttgattgattaaagtaatacacaaggagtgtatttatacaactcaagtgataacaatttcaaataacaagttgctataaaataggattgaaattgct

SEQ ID NO: 13744 - DNA, 1052 bp, Glycine max
  Gm_smallRNAprecursor_6577
taaattggtcaatgatattgtctttgttgtgaacaattttaaacaaaaatgtatcattgcgggcaaagtatatgtaactataatgacactagagtgtatcaatagtattattactctctgttcatctcttattaaactttctacatataacaacattatatatgtaaaaaaattaggaaaaattgtagatattttgtttcttcttgaaaaacataatgtaaacgtaaacgtaaccattatgcttgagaaaagaatatagcattagtctgacccaaacaggaaacagaacgaataaagagtgttgctaggtacacccaacatttaattaaaataccaaaattgcccctgcactttttttgcatttgtgatggatgtgtgtgagggtgatccgtaaatcgtacggatcaagttaatttgtaagattgatacggattaacttgatctgtaagccttttacggaacaataaggatgaacatgatccgtaaaagtcttacggatcaagttgatccgtaaaaagcttacggatcatgttgatccgtattgttccgtaaaaggcttacggatcaagttgatccgtaaggtttctacggatcatgttgatccgtattgttctgtaagacttttatggatcaacttaaatgacttacggatcaaggatattttcatcattttaccttaagtgttgggtgcaccagcaataatgctgggtgcacctagcaacacccacgaataaaaaaggtcggcccacaacatacattttggtacggcccatatgaaaaagtggtgggcccagcaaattctgaaaccggttctttaaacaagtggcttgccaaataagaataagcattttctgaaataaagaaaagagagaaaatcaaacatttgtatttatttcgttagctcacccaacctaaggaatgaaaaagctcggtgaagaaattacaattgcgttcatatttgattatattccaaagtcagaaagattgcctccacctgcagacagagatcactttctttcctttcctttccttattagaagaagaccatacgt

SEQ ID NO: 13745 - DNA, 1079 bp, Glycine max
  Gm_smallRNAprecursor_6578
attactaatcggaagtgtgatttcgtagtgtaatgtacaatggaatcacacttttgttgtaccatcattttttaacctcccttgcataacaaaatcatggttttgttatgtatttttttccacactaagatgtattatgaaatcgtgattccattgcataacggagtgtgcgaaaattgtgcacaagattccattgcacaaatgtacaacaaaatcgtgattatgttatgcagaacctttaccttcttaattctctttgggaataggtaattttgaaattttgaggaattatatggccaatagtaaaacccattggagccaatagcaacatccagtacaaaagagtgttgttaggtgcacccagcattattgctggtgcacccagcatttaattaaaataccaaaattgcccctacgcttttttcgcatttgtgatgggtgtgtgtgagggtgatccgtaaatcgtacggatcaagttgatccgtaagattgatacggatcaacttgatctgtaagccttttacgaaacaatacggatcaacatgatccgtaaaaatcttatggatcaagttgatctgtaaaaagcttacggatcatgttgatccgtaaaaggcttacggatcaagggtattttcgtcattttaccttaagtactgggtgcaccagcaataatgctgggtgcacctagcaacacccagtacaaaatagcagccagcccatcccacaaaacccagttttccacgaaacgaggagagtccaattgttacaactccagcccaagtcttcccatttccgacctttttttgtgtgtaaaatttctatgttatcccctctcttcagatgtaatgtaaagtttttcaagaaggtgatcaccaggtagttaatcagttacggaagatgtgtctttggtaacgaaaagcttcgaacgttcaacaaaaaagttaggatacatgattgactgagtgagaatgacaatgttagcatagagtatatgataacgtgttcatcaacttcataaaagtaagaggaagggttaagagttaagacttaagagtcgatcttgacacgcccaataatga

SEQ ID NO: 13746 - DNA, 1188 bp, Glycine max
  Gm_smallRNAprecursor_6579
agtccttggttgcttggtcagtagtttgttctccgaaaaaagaagggggtttaggcctttttaatctcaaggactggaaccttgcgtttctttcccgtatcctgtggaactttcattgtaagaaagattctctatgggtttggtgggttcaccattactatttcagagggagcgatgtgtggaattacaatacttcttcatcagattcagttttgataaagaaaatcattcaaataagggactttattatctctaaagagttaaatacggaagaggccaaaaaaaggattcaatcttggagcaccaatgaacaattgcttgttggcaaagtctatgaatacattagaggtgtcaagcctactgttagttggtgttctgttatatggaacccaacaatcccccctaaaatgtctttcattttgtggcttgctaaaaggaatcggctgcttactcttgacaaagttgcttttttgaacaagggttccctctgccctttatgttcaaatgagtctgagtcaaatgctcatttgttcttttcttgcaggaaatctctccaagtttgggctcacattcatgatttggctcctttccgcaggcgtttcatttctttacagcgcattactgactctttaattaggggcagatccacatcaggtgttcaaagaaaattacgttgtctagctatagcaattacagtctactgcatttggctgtctaggaacaagctgatttttgaagattatcaattttctgtaatagagattattagcaagattaagtttcttatgtataaacaagcacacctattgcatttgttttagcatcttgatataggtcttcttatattagggagacttttgattttctttaactgcggggtatgccccgtttattattgtatcattttgggtttaatataatttacattttttctaaaaaaaatactcttaaattgtaacttaaaatgaaaattttcccatctacctcgttgagaggggataatagcacgaattagagaaaattagttagtttacgtgagagaatgatggacaaatcaatagccaaaggtgtgttgcggcttgagagtgtgtatgaaaatactccacaagaaaatttatggtttaattctgttaaaatatccccttgattaggggaagtatatatccatgtcgttcgattttccaaaac

SEQ ID NO: 13747 - DNA, 1043 bp, Glycine max
  Gm_smallRNAprecursor_6580
taaatttaaattttttatttgcaaatattaaaataattatactatgtaaaaattaaattcttattttctcattatagttttttcatttaaaacaaaaaaaactaactgatgatgttttgtagagtaaaaagaaaaactaaggatgatttttaaaaaacttaattattaatttagtctttaatcattttaaaataattagttcctttattttcaaacgcttcctcttacatttttaaaaaatgcatcaatccactcgtcagctccattaagttgattgatgaagttgtcttacgtgacactaagggctattatcaccaaccatccaccacgcacaacacaaccctctcatcttccacttccgcaacatatcaccccctcctaactccttggcttccaatcacacgaatgactaatgctaggtgcacctagcattttttaaaatgtcaaaattgtttgtgtgctttctttgtatttgtgttgggtgtgcgtaagggtagtccgtaaatcgtacagatcaagttgatccataagattgatatggatcaagttgatccgtatgttgatattaagcatacggatcaagttgatccgtaaaagacttacagatcgacttaaaaggcttacggatcaaggatatttcagtcttttccccttaagtgttgggtgcaccaacaataatgttaagtgcacttaacatcagcccccacaaatcctctgtgctcaacatcttccaatgggcctaaagcctatactaattactgggcccaccccttcatcttgacaattactttgtgcacccaacaaattatgtaaagtgacaaaaataccatttacttaaaatttaaaaaagctttcctctccctctccctctccctttatgtatgttgcgcgttcctcctctctcttcttcttctccgccattgtatttatttaattacttaaatttgtttttttaagttggtttttaataattaattaattcaataaaaaattaatttattatttttgtttaatcaatttaattatatttgatatttgaaata

SEQ ID NO: 13748 - DNA, 1054 bp, Glycine max
  Gm_smallRNAprecursor_6581
tcttgggtcgttcaacaagcttctcctggtttcgtcgggataaatcgtgtgcctggtgaagccgtagattgtctcaagatagccgctgactttgttggcaattagagcggtctcgatgtaatcatcaatctgggaagcatcacacgatgaaggaatgagacaattttttatgtcccaccaaacacaaatttgcatgaggttggtgggacttgatgacaacgatgacgagggataatgggaccaaaaggacgagtagaggggcctgatacggggtggacgacgctcaagaagagcgtcatttgcattgtctctctcaactgtacaaaatacataaacagtcgaaatgttactactcttttttggccgtcgatgaaccttcatcaagcacgtatccatcaggggatcgttcaaatgttttcctaagggtttcttctctaatatggcagaccacttccacaatatacttgctatatcactgaacaccttggaaggaggcgcatcccgcgtgacaagtaatatattatacttgttctctctcagctgtcttaaggttcgagcatagcctctgtcaccagctatcaacatgacatgcgccggtggaggattttcagagacccaccgcttaaggtgctcaagaagagcgtcatctgcattgtctctcccaactgcacaaaatacatacacagcaacaggctctgaaacgtttcctcttctgttactcaggggagtgctaacaaccttgaaatagcaactttaggaccacatgaggaggaggccgtttcctcttcagattgatgattacatcgagaccgctcgctctgattgccaacaaagtcagcggctatcttgaggcaatctacggcttcaccagcgcacacgtcttatcccgacgaaaccgggagaagcttcttgaacgacccaaaataagaatcatcttcaatcaaggtaacctttcttattcagtgattcagcattaccacacatccagagtagtttatttcggctgtttatgtattttgtgcacttgggagagacaatgcagatgacgctcttc

SEQ ID NO: 13749 - DNA, 1045 bp, Glycine max
  Gm_smallRNAprecursor_6582
tagagttttaaatggcttgggctcccaatctatgataaaaattttcatcacaataaggcaacgatctgaaaaactcctattaaggatgtattgtatgctgcccagccatatatcaatccatgtatcagagacaaggatgcgatctagtctactattagaatgaccatgcaacctatacctagtatactttcttcccaccgttgggagatcctccacccccatatcaaagatgaatttgttgaacatatccatatccctagcacccaccccaatttgtttcttacatcccttttttcctcctttctttttactgaattaaaatcgccaaggatataccaactttcccccctccccaacgacctttttgggacacaagatgagtgaataggcaatttagtccctgagattatacccattttgcatattagtccttaacttaatattaaattcaaaatagtccatatctttgcataagtgttgcaaaacagtcattccgttaaattttaaagtaacgccgttagtgaggtcaattttagtgccacgtgaactatccaacgtggcactaaaggatgacgtgacatgacacgtggacgtgcctcctaaaagatgccacgtcatttaatgataacaaaatgagtaaataggcaatttagtccctgactttgtacccctgttgcatattagtccctaacttaatgaaaaattcaaaatagtccctatcatttgcataagtgttgcaaaatagtccctaacttaaaagatgccagaaatcatgcttaaagtgtccatgcattgcaaaggttgtgccttgcacgatttctggcggcgcagattcctccttggattccttgtcatcttttgattcctctggttttttctcttcttctttcttttcttcttcatttgcgtttttctcctccactttattttcctttggttttttctcttcctattcaaaacacacaaaaaaaaaaaatcagaacccaaaatgatacattgatggtaattgaagaaaaaaaaagaggaaaagagaatggttatgcag

SEQ ID NO: 13750 - DNA, 1046 bp, Glycine max
  Gm_smallRNAprecursor_6583
tagagttttaaatggcttgggctcccaatctatgataaaaattttcatcacaataaggcaacgatctgaaaaactcctattaaggatgtattgtatgctgcccagccatatatcaatccatgtatcagagacaaggatgcgatctagtctactattagaatgaccatgcaacctatacctagtatactttcttcccaccgttgggagatcctccacccccatatcaaagatgaatttgttgaacatatccatatccctagcacccaccccaatttgtttcttacatcccttttttcctcctttctttttactgaattaaaatcgccaaggatataccaactttcccccctccccaacgacctttttgggacacaagatgagtgaataggcaatttagtccctgagattatacccattttgcatattagtccttaacttaatattaaattcaaaatagtccatatctttgcataagtgttgcaaaacagtcattccgttaaattttaaagtaacgccgttagtgaggtcaattttagtgccacgtgaactatccaacgtggcactaaaggatgacgtgacatgacacgtggacgtgcctcctaaaagatgccacgtcatttaatgataacaaaatgagtaaataggcaatttagtccctgactttgtacccctgttgcatattagtccctaacttaatgaaaaattcaaaatagtccctatcatttgcataagtgttgcaaaatagtccctaacttaaaagatgccagaaatcatgcttaaagtgtccatgcattgcaaaggttgtgccttgcacgatttctggcggcgcagattcctccttggattccttgtcatcttttgattcctctggttttttctcttcttctttcttttcttcttcatttgcgtttttctcctccactttattttcctttggttttttctcttcctattcaaaacacacaaaaaaaaaaaatcagaacccaaaatgatacattgatggtaattgaagaaaaaaaaagaggaaaagagaatggttatgcaga

SEQ ID NO: 13751 - DNA, 1044 bp, Glycine max
  Gm_smallRNAprecursor_6584
agagttttaaatggcttgggctcccaatctatgataaaaattttcatcacaataaggcaacgatctgaaaaactcctattaaggatgtattgtatgctgcccagccatatatcaatccatgtatcagagacaaggatgcgatctagtctactattagaatgaccatgcaacctatacctagtatactttcttcccaccgttgggagatcctccacccccatatcaaagatgaatttgttgaacatatccatatccctagcacccaccccaatttgtttcttacatcccttttttcctcctttctttttactgaattaaaatcgccaaggatataccaactttcccccctccccaacgacctttttgggacacaagatgagtgaataggcaatttagtccctgagattatacccattttgcatattagtccttaacttaatattaaattcaaaatagtccatatctttgcataagtgttgcaaaacagtcattccgttaaattttaaagtaacgccgttagtgaggtcaattttagtgccacgtgaactatccaacgtggcactaaaggatgacgtgacatgacacgtggacgtgcctcctaaaagatgccacgtcatttaatgataacaaaatgagtaaataggcaatttagtccctgactttgtacccctgttgcatattagtccctaacttaatgaaaaattcaaaatagtccctatcatttgcataagtgttgcaaaatagtccctaacttaaaagatgccagaaatcatgcttaaagtgtccatgcattgcaaaggttgtgccttgcacgatttctggcggcgcagattcctccttggattccttgtcatcttttgattcctctggttttttctcttcttctttcttttcttcttcatttgcgtttttctcctccactttattttcctttggttttttctcttcctattcaaaacacacaaaaaaaaaaaatcagaacccaaaatgatacattgatggtaattgaagaaaaaaaaagaggaaaagagaatggttatgcag

SEQ ID NO: 13752 - DNA, 1044 bp, Glycine max; identical to SEQ ID NO: 13751
  Gm_smallRNAprecursor_6585

SEQ ID NO: 13753 - DNA, 1044 bp, Glycine max; identical to SEQ ID NO: 13751
  Gm_smallRNAprecursor_6586

SEQ ID NO: 13754 - DNA, 1045 bp, Glycine max
  Gm_smallRNAprecursor_6587
agagttttaaatggcttgggctcccaatctatgataaaaattttcatcacaataaggcaacgatctgaaaaactcctattaaggatgtattgtatgctgcccagccatatatcaatccatgtatcagagacaaggatgcgatctagtctactattagaatgaccatgcaacctatacctagtatactttcttcccaccgttgggagatcctccacccccatatcaaagatgaatttgttgaacatatccatatccctagcacccaccccaatttgtttcttacatcccttttttcctcctttctttttactgaattaaaatcgccaaggatataccaactttcccccctccccaacgacctttttgggacacaagatgagtgaataggcaatttagtccctgagattatacccattttgcatattagtccttaacttaatattaaattcaaaatagtccatatctttgcataagtgttgcaaaacagtcattccgttaaattttaaagtaacgccgttagtgaggtcaattttagtgccacgtgaactatccaacgtggcactaaaggatgacgtgacatgacacgtggacgtgcctcctaaaagatgccacgtcatttaatgataacaaaatgagtaaataggcaatttagtccctgactttgtacccctgttgcatattagtccctaacttaatgaaaaattcaaaatagtccctatcatttgcataagtgttgcaaaatagtccctaacttaaaagatgccagaaatcatgcttaaagtgtccatgcattgcaaaggttgtgccttgcacgatttctggcggcgcagattcctccttggattccttgtcatcttttgattcctctggttttttctcttcttctttcttttcttcttcatttgcgtttttctcctccactttattttcctttggttttttctcttcctattcaaaacacacaaaaaaaaaaaatcagaacccaaaatgatacattgatggtaattgaagaaaaaaaaagaggaaaagagaatggttatgcaga

SEQ ID NO: 13755 - DNA, 1043 bp, Glycine max
  Gm_smallRNAprecursor_6588
gagttttaaatggcttgggctcccaatctatgataaaaattttcatcacaataaggcaacgatctgaaaaactcctattaaggatgtattgtatgctgcccagccatatatcaatccatgtatcagagacaaggatgcgatctagtctactattagaatgaccatgcaacctatacctagtatactttcttcccaccgttgggagatcctccacccccatatcaaagatgaatttgttgaacatatccatatccctagcacccaccccaatttgtttcttacatcccttttttcctcctttctttttactgaattaaaatcgccaaggatataccaactttcccccctccccaacgacctttttgggacacaagatgagtgaataggcaatttagtccctgagattatacccattttgcatattagtccttaacttaatattaaattcaaaatagtccatatctttgcataagtgttgcaaaacagtcattccgttaaattttaaagtaacgccgttagtgaggtcaattttagtgccacgtgaactatccaacgtggcactaaaggatgacgtgacatgacacgtggacgtgcctcctaaaagatgccacgtcatttaatgataacaaaatgagtaaataggcaatttagtccctgactttgtacccctgttgcatattagtccctaacttaatgaaaaattcaaaatagtccctatcatttgcataagtgttgcaaaatagtccctaacttaaaagatgccagaaatcatgcttaaagtgtccatgcattgcaaaggttgtgccttgcacgatttctggcggcgcagattcctccttggattccttgtcatcttttgattcctctggttttttctcttcttctttcttttcttcttcatttgcgtttttctcctccactttattttcctttggttttttctcttcctattcaaaacacacaaaaaaaaaaaatcagaacccaaaatgatacattgatggtaattgaagaaaaaaaaagaggaaaagagaatggttatgcag

SEQ ID NO: 13756 - DNA, 1043 bp, Glycine max; identical to SEQ ID NO: 13755
  Gm_smallRNAprecursor_6589

SEQ ID NO: 13757 - DNA, 1053 bp, Glycine max
  Gm_smallRNAprecursor_6590
ctgagggagcaacacaactctcctttgtgctgacacgaggacctgagggaccaacctctggctctggaggtagtgcaattccctgtgattgcatctaagactgaaactgggactgcatctggctgaaggattccatcatctttcgagtcactttttctgtgattgactcctccagttggtctctgatttgttgggtcagctattctaggtcttcaagaggcatggatgaagaactgcgggatgttcatgaaggtgatccaaagtattgctttatggtgacaccggctccaacagcacgaacacggccagggtgctctggtcgcccaatggcagcagtcaggatatcctgacgtccatgggggacgaacgatccctgtgacgcctgctcgtccaaagaatcctgtaccgaacacatatttgtccaaggaattcacaaaatacacaaagataattacaattattaattaaaaatgacttacaatcctgtcagctatttcctttgctgcctcagacgtcatctgtccagttttcttcgtgcgggccatcttccatttcacgtggcgtctgatgggagatggagggtcaatgatgccctcagtgcttccagactgggcagtttcttctagtcttttctttgtcttctcagccatgagcttttcttctaaatattcataacccccacaagacaatacgtggggggcagtgttttgcttctgggaggcttgtgcctttttctgtacatcttgcaaaagtttaacattaatgaaaatgattattacaataaattataagaagtgattttgttgtggaaaacaactaaaatgacaaagtacatacctcccatgaggggtctctgtgggtctgacaaaactgagtccatttctccttgctaatgccatatttttcacagacaatgtcgtccgcaccgtccttgtcgactgcaagtgcccatttcctagtcaagtcagatttaaactgccttcagcgctcgccgacaatctgaagaattttcttctttgtcctactgtcagaagcttcagggatttgaaattc

SEQ ID NO: 13758 - DNA, 1184 bp, Glycine max
  Gm_smallRNAprecursor_6591
tcattatatttgtgtgaaatatttattaattttgttgaatactaattttagtcaaaaaatttgactgatcacttttagtgaagttttttctttcaattgtactgttttttccccccacaatactcgaactcaagacttagattaagggaactaagtctaattttacttatatataaatatttgaaaatgtaagcatatttacataaaaaaaaatagacacataatttcaataaaaatgttatctttgattacattaagaaaataatattgttttaacaaatttcaacaagtaaaaagttgcatcacaaattgcgtcacccaaaaattacatgcacaaaaatatttatatatagggtctcatccaaaagaaaaaagataggcaaaattgtatttttggtccctcaatttatcttcaattttggatttggtcccccagtaatttaattcacaaatttggttcccctattttgtaaaatcatgcaatgttggtctccctgaccacaattggacgttgaccgttaacaagtgatgttgactgtcacgtgtcacattcttatcggatgatgactgtcacatgtcatattctgattggtcaatgaaaataacaattcatttcatctttcatggagttgacattcaatcagaatatgacacgtagcagtcataatccaataagaacgtgacacgtgacagtcaacatcacttgttaacggtcaacaaccaattgtggcttgagggaccaacattgcacgattttacaaaatagggggaccaaatttgtgaattaaattattgggggaccaaatccgaaactaaagataaattgggggaccaaatttacaattttgccaaatatagaatttttggattggttggtaatacttctatcataattgttaatgttgcttagtgaaacctcatgtcttttctatagaggttacttggtaggatctctatcatgacatttataagagttgcttagtatcaatcttgtcatgataatgattgaggttgctttgtaggatttctcttgtgttattggattcacatgaacaattttcagtatttacttggaaataaaagtatggttgcgtagctaagaacatgtacaatgttttgcatgttcatctatatgatgatatccattgaaggtcagacgccttgcatgcgatgcatgattgttg

SEQ ID NO: 13759 - DNA, 1158 bp, Glycine max
  Gm_smallRNAprecursor_6592
attaattttgttgaatactaattttagtcaaaaaatttgactgatcacttttagtgaagttttttctttcaattgtactgttttttccccccacaatactcgaactcaagacttagattaagggaactaagtctaattttacttatatataaatatttgaaaatgtaagcatatttacataaaaaaaaatagacacataatttcaataaaaatgttatctttgattacattaagaaaataatattgttttaacaaatttcaacaagtaaaaagttgcatcacaaattgcgtcacccaaaaattacatgcacaaaaatatttatatatagggtctcatccaaaagaaaaaagataggcaaaattgtatttttggtccctcaatttatcttcaattttggatttggtcccccagtaatttaattcacaaatttggttcccctattttgtaaaatcatgcaatgttggtctccctgaccacaattggacgttgaccgttaacaagtgatgttgactgtcacgtgtcacattcttatcggatgatgactgtcacatgtcatattctgattggtcaatgaaaataacaattcatttcatctttcatggagttgacattcaatcagaatatgacacgtagcagtcataatccaataagaacgtgacacgtgacagtcaacatcacttgttaacggtcaacaaccaattgtggcttgagggaccaacattgcacgattttacaaaatagggggaccaaatttgtgaattaaattattgggggaccaaatccgaaactaaagataaattgggggaccaaatttacaattttgccaaatatagaatttttggattggttggtaatacttctatcataattgttaatgttgcttagtgaaacctcatgtcttttctatagaggttacttggtaggatctctatcatgacatttataagagttgcttagtatcaatcttgtcatgataatgattgaggttgctttgtaggatttctcttgtgttattggattcacatgaacaattttcagtatttacttggaaataaaagtatggttgcgtagctaagaacatgtacaatgttttgcatgttcatctatatgatgatatccattgaaggtcagacgccttgcatgcgatgcatgattgt

SEQ ID NO: 13760 - DNA, 1157 bp, Glycine max
  Gm_smallRNAprecursor_6593
atatagagaggtgctctgatcctactccactgaacttatggatctgaagcatgtacagtaattttaatttaaacagtatgtgtttgaacagtattttctggaagcacagtagtctgatattttagttggatgatactgtagcagtaagttccgtggatgagaaagggcagtaaggctaaggtgtattgttcaaataaaatattgagacataatatactggtggctataggagtaatgttcaaactatattgtctgaaaaaaaaaaaatcttctttttcatttattcagatccaagaagttctgtaacatatagccttatggagagattcctatggaaccaaatgaaggcaaagatattagagaatgttttaattatgtctagattattgcgatccttttcccgtatttcttttcgctcgaattcctccacttcatcttcttcaagaaacaccaatctcttaaatgatcaagataaccagacccaagaggtcgtcccaaaacacaatctcttcgatgaggaagtccgattcgaagatattaatcaaaacatggatgactggaacattccagaaatccctcaggatcaactatacgttcctaaaacaattaaagacaaacacaactttgattacataatcaaaacagtagaaaacaatattcctctaggacaagatataggggaagaatttcatctactttcaaaaaattcaatttatgaacatagccgtaagtataaatatttacacatcggttgtgtgcaagtagccatcaagcccttaattgatatgggcatagatgcagcagttttaatgtgtctaagagatattaggcataatcaatttgaagactccctaattggaacagtcgaaaccagcctaggacaaggtccaatatattttaattgttatccaaacaaaacagtgagtctgatggacagaaacattcttgactctctgttcttaaacatccactttcatggccttgacatgaaagaaggatcaatcccagcagccttaatttataggatccagtacaaggtcatgaatacttgtgcatctagagtcctgttaaaacctcaaaaaggagaaacaaccttgtttatcactgaaatgacaaaggctaacgtgtctctcccaagaaaaataaaatgggatgaa

SEQ ID NO: 13761 - DNA, 1080 bp, Glycine max
  Gm_smallRNAprecursor_6594
atgatttcgttttagaaacaatggccctatttgatacaggggctgattcaaactgcattttagaaggattaattcctacaaaattctttgagaaaacctcagaaaaattaagtacggcaaacggctcaaaattaaaaattaattttaagctatcaaatgcaatcattgaaaaccaaggtcttaagattaacacaaactttcttctggtaaaaaaccttaagaatgaagtaatcttaggaacgcccttcattagagccctgtttcccatccaaatatctaatgaaggaataaccacaaattatttaggaagaaaaattacatttaatttttctactaaaccaatttctagaaatataaatcttatagaaaataagattaatcaaattaacttcttaaaagaagaagtatcttttaataatattcagatacaactgggaaaaccccaagtaaaagaaagaattcaatctttattaaatcatattgaatcgaccgtttgttctgaattgccacatgcattttgggacagaaagaaacatattgtcgatctcccttatgagaaagactttagggaaaaacaaattcccacaaaagccagaccaatccaaatgaatgaagaacttcttcaatactgtcaaaaggaaatcaaggatttgcttgataaaggcctaatccggaaaagcaaaagcccatggtcttgtgcggctttttatgttaacaaacaatctgagattgagcgtgggacaccccgcttagtcataaattacaaaccattaaatcaagcattacaatggattagatatcctattccaaacaaaaaagatttgcttaacagattaaattctgcaaagatattctcaaaatttgatatgaaatctggattttggcaaatccaaatccaagaatcagataggtacaaaacagcatttactgtacctttcgggcaatatgaatggaacgtgatgccattcggactgaagaatgccccttcagaattccaaaaaattatgaacgatattcttaatccttattcaaaatttgtcattgtctacatagatgatgttttaatcttttcccaaaaca

SEQ ID NO: 13762 - DNA, 1073 bp, Glycine max
  Gm_smallRNAprecursor_6595
tgtacctttcgggcaatatgaatggaacgtgatgccattcggactgaagaatgccccttcagaattccaaaaaattatgaacgatattcttaatccttattcaaaatttgtcattgtctacatagatgatgttttaatcttttcccaaaacattgaccaacatttcaaacatctccaaaccttcatacatatcatcaaacaaaatggtttggcagtctccaaatcaaaaatcaatcttttccaaactcgaattcgattccttggtcacaacatatatcaaggaacaatcattccaatcgaaaggtcaatagagtttgctagcaaattccccaaccaaatcttagacaaaacccagttacaaagatttctaggttgtctaaattacgtaggagaatttgtcccctatttaaataatattgtcaagccattacatgataggctgaagaaaaatccgcctccttggtctgacctccatacacaaacggttaaagaaatcaaagtcaaagtccaatccattaaatgtttgtatcttcctattccacaggcatttaaaattgtcgaaactgatgcttcagacataggttatggtggcatcctcaaacaaagagtccatggccaagatcatgtcattgcatatacatcaaaacattggaatcctgcacaattaaaatattcaactgttaaaaaagaggttttagcaattgttttgtgcatttccaaatttcaatcggatttattaaaccaaaaatttttaatcagggttgattgtaaatcagccaaagatattttacaaaaagatgttaaaaaccttgcctcaaaacaaatttttgcacgatggcaagcaattttaagtgtctttgattttgacatagaatacatcaagggcacctcaaattcactacctgactaccttacccgtgaattcttacagaaaagtggtaatgcctcctaaggcatcgggaatctccctacggggaggaaggagtacaggaaaaggagccaggctggctcttccagaaccaaccatgaagaaatcatctacctcttctgggtcaccaacccaggctgggtca

SEQ ID NO: 13763 - DNA, 1115 bp, Glycine max
  Gm_smallRNAprecursor_6596
tcaatagagtttgctagcaaattccccaaccaaatcttagacaaaacccagttacaaagatttctaggttgtctaaattacgtaggagaatttgtcccctatttaaataatattgtcaagccattacatgataggctgaagaaaaatccgcctccttggtctgacctccatacacaaacggttaaagaaatcaaagtcaaagtccaatccattaaatgtttgtatcttcctattccacaggcatttaaaattgtcgaaactgatgcttcagacataggttatggtggcatcctcaaacaaagagtccatggccaagatcatgtcattgcatatacatcaaaacattggaatcctgcacaattaaaatattcaactgttaaaaaagaggttttagcaattgttttgtgcatttccaaatttcaatcggatttattaaaccaaaaatttttaatcagggttgattgtaaatcagccaaagatattttacaaaaagatgttaaaaaccttgcctcaaaacaaatttttgcacgatggcaagcaattttaagtgtctttgattttgacatagaatacatcaagggcacctcaaattcactacctgactaccttacccgtgaattcttacagaaaagtggtaatgcctcctaaggcatcgggaatctccctacggggaggaaggagtacaggaaaaggagccaggctggctcttccagaaccaaccatgaagaaatcatctacctcttctgggtcaccaacccaggctgggtcatctacccagaaaaccaatttagaagggtcatcaacccagattgcctcaatcaaacctgagccatccactcaggaatctcccaaaccggcaaccgccaaacaaacatcggccgactatgcatggccaattgaaacccttcaggcccttcaagacatgagtctgaccaaatttccaaaaataatcaaaaaatcttgggcagacattgcctcagaatctgatgatgaatctgaatcaaatttacaaacaatgatccaaaatgcgtcaatgaccaaaacagccaccaatactaaaggaaaactacctttagccaaagctcaaacaccacctaccaaacaaactaacaatt

SEQ ID NO: 13764 - DNA, 1174 bp, Glycine max
  Gm_smallRNAprecursor_6597
acaaagagtccatggccaagatcatgtcattgcatatacatcaaaacattggaatcctgcacaattaaaatattcaactgttaaaaaagaggttttagcaattgttttgtgcatttccaaatttcaatcggatttattaaaccaaaaatttttaatcagggttgattgtaaatcagccaaagatattttacaaaaagatgttaaaaaccttgcctcaaaacaaatttttgcacgatggcaagcaattttaagtgtctttgattttgacatagaatacatcaagggcacctcaaattcactacctgactaccttacccgtgaattcttacagaaaagtggtaatgcctcctaaggcatcgggaatctccctacggggaggaaggagtacaggaaaaggagccaggctggctcttccagaaccaaccatgaagaaatcatctacctcttctgggtcaccaacccaggctgggtcatctacccagaaaaccaatttagaagggtcatcaacccagattgcctcaatcaaacctgagccatccactcaggaatctcccaaaccggcaaccgccaaacaaacatcggccgactatgcatggccaattgaaacccttcaggcccttcaagacatgagtctgaccaaatttccaaaaataatcaaaaaatcttgggcagacattgcctcagaatctgatgatgaatctgaatcaaatttacaaacaatgatccaaaatgcgtcaatgaccaaaacagccaccaatactaaaggaaaactacctttagccaaagctcaaacaccacctaccaaacaaactaacaattatatttataaaaataaattgttaactgttttgcagatggaacctgaattttgggacaaaaatcccttcaaggcgacggccaaggctttcccaccaggatttcactacaaaccaaccaccatcctgaagacaagaactttttatgaattgattttggtagattcaaactcagtatctatcaaacatttcaaagatccaaaagaccaaaccttaaacacccactcaaccatccaaatactaaaagttcttcaaccaagacactttggttcagacttgaacaaagggaagagattttcagttccatttgatcccgtaggttatacctattgggattacgttgatgcttggactaaggt

SEQ ID NO: 13765 - DNA, 1173 bp, Glycine max
  Gm_smallRNAprecursor_6598
caaagagtccatggccaagatcatgtcattgcatatacatcaaaacattggaatcctgcacaattaaaatattcaactgttaaaaaagaggttttagcaattgttttgtgcatttccaaatttcaatcggatttattaaaccaaaaatttttaatcagggttgattgtaaatcagccaaagatattttacaaaaagatgttaaaaaccttgcctcaaaacaaatttttgcacgatggcaagcaattttaagtgtctttgattttgacatagaatacatcaagggcacctcaaattcactacctgactaccttacccgtgaattcttacagaaaagtggtaatgcctcctaaggcatcgggaatctccctacggggaggaaggagtacaggaaaaggagccaggctggctcttccagaaccaaccatgaagaaatcatctacctcttctgggtcaccaacccaggctgggtcatctacccagaaaaccaatttagaagggtcatcaacccagattgcctcaatcaaacctgagccatccactcaggaatctcccaaaccggcaaccgccaaacaaacatcggccgactatgcatggccaattgaaacccttcaggcccttcaagacatgagtctgaccaaatttccaaaaataatcaaaaaatcttgggcagacattgcctcagaatctgatgatgaatctgaatcaaatttacaaacaatgatccaaaatgcgtcaatgaccaaaacagccaccaatactaaaggaaaactacctttagccaaagctcaaacaccacctaccaaacaaactaacaattatatttataaaaataaattgttaactgttttgcagatggaacctgaattttgggacaaaaatcccttcaaggcgacggccaaggctttcccaccaggatttcactacaaaccaaccaccatcctgaagacaagaactttttatgaattgattttggtagattcaaactcagtatctatcaaacatttcaaagatccaaaagaccaaaccttaaacacccactcaaccatccaaatactaaaagttcttcaaccaagacactttggttcagacttgaacaaagggaagagattttcagttccatttgatcccgtaggttatacctattgggattacgttgatgcttggactaaggt

SEQ ID NO: 13766 - DNA, 1173 bp, Glycine max; identical to SEQ ID NO: 13765
  Gm_smallRNAprecursor_6599

SEQ ID NO: 13767 - DNA, 1130 bp, Glycine max
  Gm_smallRNAprecursor_6600
caaacctgagccatccactcaggaatctcccaaaccggcaaccgccaaacaaacatcggccgactatgcatggccaattgaaacccttcaggcccttcaagacatgagtctgaccaaatttccaaaaataatcaaaaaatcttgggcagacattgcctcagaatctgatgatgaatctgaatcaaatttacaaacaatgatccaaaatgcgtcaatgaccaaaacagccaccaatactaaaggaaaactacctttagccaaagctcaaacaccacctaccaaacaaactaacaattatatttataaaaataaattgttaactgttttgcagatggaacctgaattttgggacaaaaatcccttcaaggcgacggccaaggctttcccaccaggatttcactacaaaccaaccaccatcctgaagacaagaactttttatgaattgattttggtagattcaaactcagtatctatcaaacatttcaaagatccaaaagaccaaaccttaaacacccactcaaccatccaaatactaaaagttcttcaaccaagacactttggttcagacttgaacaaagggaagagattttcagttccatttgatcccgtaggttatacctattgggattacgttgatgcttggactaaggtgttttggcaccaaaatacccgcttcaagcattcatggctgatatatttcaagaccaacacaatttacaattttcccaattggtttttgcaatggtgggacttctttggaccaatcccagagatattcccagaaacggtccaacaaggattttcccaatttaagagacaatacaattcgcaggaatcacgaattccagcagatcttaaatacttttcaagctttgcactgtcatggatattctcatggcaatatcgctacagcaagactgaaaagacaaatcaatatccatcactacaaagacacgcatttgtaaaatggtggacacaatttgactcatccaaagcggatgcagaacaagtaaaactatggttcaaatcccatccagaattcctcaaagcggctgatccaaagacttctgtgttcttgaaccaaaagtctcatctggcagcatttttagcaggatcgacatcaaaggagg

SEQ ID NO: 13768 - DNA, 1124 bp, Glycine max
  Gm_smallRNAprecursor_6601
tgagccatccactcaggaatctcccaaaccggcaaccgccaaacaaacatcggccgactatgcatggccaattgaaacccttcaggcccttcaagacatgagtctgaccaaatttccaaaaataatcaaaaaatcttgggcagacattgcctcagaatctgatgatgaatctgaatcaaatttacaaacaatgatccaaaatgcgtcaatgaccaaaacagccaccaatactaaaggaaaactacctttagccaaagctcaaacaccacctaccaaacaaactaacaattatatttataaaaataaattgttaactgttttgcagatggaacctgaattttgggacaaaaatcccttcaaggcgacggccaaggctttcccaccaggatttcactacaaaccaaccaccatcctgaagacaagaactttttatgaattgattttggtagattcaaactcagtatctatcaaacatttcaaagatccaaaagaccaaaccttaaacacccactcaaccatccaaatactaaaagttcttcaaccaagacactttggttcagacttgaacaaagggaagagattttcagttccatttgatcccgtaggttatacctattgggattacgttgatgcttggactaaggtgttttggcaccaaaatacccgcttcaagcattcatggctgatatatttcaagaccaacacaatttacaattttcccaattggtttttgcaatggtgggacttctttggaccaatcccagagatattcccagaaacggtccaacaaggattttcccaatttaagagacaatacaattcgcaggaatcacgaattccagcagatcttaaatacttttcaagctttgcactgtcatggatattctcatggcaatatcgctacagcaagactgaaaagacaaatcaatatccatcactacaaagacacgcatttgtaaaatggtggacacaatttgactcatccaaagcggatgcagaacaagtaaaactatggttcaaatcccatccagaattcctcaaagcggctgatccaaagacttctgtgttcttgaaccaaaagtctcatctggcagcatttttagcaggatcgacatcaaaggagg

SEQ ID NO: 13769 - DNA, 1146 bp, Glycine max
  Gm_smallRNAprecursor_6602
acaatgatccaaaatgcgtcaatgaccaaaacagccaccaatactaaaggaaaactacctttagccaaagctcaaacaccacctaccaaacaaactaacaattatatttataaaaataaattgttaactgttttgcagatggaacctgaattttgggacaaaaatcccttcaaggcgacggccaaggctttcccaccaggatttcactacaaaccaaccaccatcctgaagacaagaactttttatgaattgattttggtagattcaaactcagtatctatcaaacatttcaaagatccaaaagaccaaaccttaaacacccactcaaccatccaaatactaaaagttcttcaaccaagacactttggttcagacttgaacaaagggaagagattttcagttccatttgatcccgtaggttatacctattgggattacgttgatgcttggactaaggtgttttggcaccaaaatacccgcttcaagcattcatggctgatatatttcaagaccaacacaatttacaattttcccaattggtttttgcaatggtgggacttctttggaccaatcccagagatattcccagaaacggtccaacaaggattttcccaatttaagagacaatacaattcgcaggaatcacgaattccagcagatcttaaatacttttcaagctttgcactgtcatggatattctcatggcaatatcgctacagcaagactgaaaagacaaatcaatatccatcactacaaagacacgcatttgtaaaatggtggacacaatttgactcatccaaagcggatgcagaacaagtaaaactatggttcaaatcccatccagaattcctcaaagcggctgatccaaagacttctgtgttcttgaaccaaaagtctcatctggcagcatttttagcaggatcgacatcaaaggaggtcttagctaaaaatctgaaggaagttctacaaatgttacaacaggaagaagaagcttcatcctcaaagaaggaagaaacaagttctgttgaagaagacgaagaagatcccttttaccaaaacgaagatgattgttttggtatctgtttagattaattttaatttcggtcacaaaaccgtctgtttgtaattaatgtgtaattaatgctg

SEQ ID NO: 13770 - DNA, 1146 bp, Glycine max; identical to SEQ ID NO: 13769
  Gm_smallRNAprecursor_6603

SEQ ID NO: 13771 - DNA, 1147 bp, Glycine max
  Gm_smallRNAprecursor_6604
acaatgatccaaaatgcgtcaatgaccaaaacagccaccaatactaaaggaaaactacctttagccaaagctcaaacaccacctaccaaacaaactaacaattatatttataaaaataaattgttaactgttttgcagatggaacctgaattttgggacaaaaatcccttcaaggcgacggccaaggctttcccaccaggatttcactacaaaccaaccaccatcctgaagacaagaactttttatgaattgattttggtagattcaaactcagtatctatcaaacatttcaaagatccaaaagaccaaaccttaaacacccactcaaccatccaaatactaaaagttcttcaaccaagacactttggttcagacttgaacaaagggaagagattttcagttccatttgatcccgtaggttatacctattgggattacgttgatgcttggactaaggtgttttggcaccaaaatacccgcttcaagcattcatggctgatatatttcaagaccaacacaatttacaattttcccaattggtttttgcaatggtgggacttctttggaccaatcccagagatattcccagaaacggtccaacaaggattttcccaatttaagagacaatacaattcgcaggaatcacgaattccagcagatcttaaatacttttcaagctttgcactgtcatggatattctcatggcaatatcgctacagcaagactgaaaagacaaatcaatatccatcactacaaagacacgcatttgtaaaatggtggacacaatttgactcatccaaagcggatgcagaacaagtaaaactatggttcaaatcccatccagaattcctcaaagcggctgatccaaagacttctgtgttcttgaaccaaaagtctcatctggcagcatttttagcaggatcgacatcaaaggaggtcttagctaaaaatctgaaggaagttctacaaatgttacaacaggaagaagaagcttcatcctcaaagaaggaagaaacaagttctgttgaagaagacgaagaagatcccttttaccaaaacgaagatgattgttttggtatctgtttagattaattttaatttcggtcacaaaaccgtctgtttgtaattaatgtgtaattaatgctgg

SEQ ID NO: 13772 - DNA, 1071 bp, Glycine max
  Gm_smallRNAprecursor_6605
tacctttcaggcaatatgaatggaatgtgatgtcattcggactaaagaatgccccttcaaaatttcaaaaaattatgaatgatatttttaatccctattcaaaatttgtcattgtctacatagatgatgttttaatctttttccaaaacattgaccaacatttcaaacatctccagactttcatccatatcatcaaacaaaatggtttggcagtcttcaaatcaaaaatcaatcttttccaaactcgaattcgattccttggtcacaatatatatcaaggtacaatcattccaataagaaggtcaatagagtttgctagcaaattttccaaccaaatcttaaacaaaacccagttacaaagatttctaagttgtctaaattacgtaggagaatttgtcccctatttaaacaattttgtcaagccattgcatgataggctgaagtaaaatccgcctccttggtctgacctccatacacaaacagttaaagaaatcaaagtcaaagtccaatccataaaatgtctgtatcatcctattccacaggcatttaaaattgtcggaactgatgcttcagacataggttatggtggcatcgtcaaacaaagagtccatggccaagatcatgtcattgcatacacatcaaaacattagaatcctgcacaattaaaatattcaactgttaaaaaggaagttttagcaattgttttgtgcatttccaaatttcaattggatttattaaaccaaaattttttaatcagagttgattgtaaatcagccaaagatattttacaaaaagatgttaaaaaccttgccttaaaacaaatttttgcaagatggcaagcaattttaagtgtctttgattttgacatagaatacatcaagggcacctcaaattcattacctgactaccttacacgtgaattcttacagaaaagtggtaatgcctcctaaggcatcgggaatctccctaaggggaggaagaagtacaaggaaaggagccagactggctcttccaaagccaactactaagaaattatctacctcttctgggtcaccaacccaggctaggtca

SEQ ID NO: 13773 - DNA, 1045 bp, Glycine max
  Gm_smallRNAprecursor_6606
ctaaccaaatttccaaaaataatcaaaaaatcttgggcagacattgcctcagaatctgaatcaaatttacaaacaatgatccaaaatgcatcaatgaccaaaacaactatcaatcctaaagggaaactacctttagccaaagctcaaacaccacctaccaaaaaaaactaacaattatatttataaaaataaatttgtaattgttttgcagatggaacctgaattttgggacaaaaatgccttcaaggcgacggccaaggctttcccaccaggatttcactacaaaccaaccaccatcctgaagacaagaaatttttatgaattgattttggtagattcaaattcagtatctatcaaacatttcaaagatccaaaagaccaaacattaaacacccattccacaatccaaatactaaaagttcttcaaccaagacactttggttcaaacttgaacaaaggaaagagattttcagttccatttgatccagtaggttatacctattgggattatgttgatgcttggactaaggtgttttggcaccaaaatacccgcttcaagcattcatggctgatatatttcaagaccaatacaatttacaattttcccaattggtttttgcaatggtaggacttctttggaccaattccagagatatttccagaaacagtccaacaaggatttgctcaatttgagagacaatacaattcgcaggaatcacgaattccagcagatcttaaatacttctcaagctttgcactgtcatggatcttctcatggcaatatcgttacagcaagactaaaaagacaaactaatatccatcactacaaagacacgcatttttaaaatggtggtcacagtttgactcatccaaagcagatccagaacaagtaaaactctggtttcaatcccatccagaattcctcaaagcagttgatccagaaacttctgtgtttttgaaccaaaagtctcatctggcagcatttttagcaggatcgaaatcaaaggaggtcctaactaaaaatctaaaggaagttctgcaaatg

SEQ ID NO: 13774 - DNA, 1163 bp, Glycine max
  Gm_smallRNAprecursor_6607
accaaatttccaaaaataatcaaaaaatcttgggcagacattgcctcagaatctgaatcaaatttacaaacaatgatccaaaatgcatcaatgaccaaaacaactatcaatcctaaagggaaactacctttagccaaagctcaaacaccacctaccaaaaaaaactaacaattatatttataaaaataaatttgtaattgttttgcagatggaacctgaattttgggacaaaaatgccttcaaggcgacggccaaggctttcccaccaggatttcactacaaaccaaccaccatcctgaagacaagaaatttttatgaattgattttggtagattcaaattcagtatctatcaaacatttcaaagatccaaaagaccaaacattaaacacccattccacaatccaaatactaaaagttcttcaaccaagacactttggttcaaacttgaacaaaggaaagagattttcagttccatttgatccagtaggttatacctattgggattatgttgatgcttggactaaggtgttttggcaccaaaatacccgcttcaagcattcatggctgatatatttcaagaccaatacaatttacaattttcccaattggtttttgcaatggtaggacttctttggaccaattccagagatatttccagaaacagtccaacaaggatttgctcaatttgagagacaatacaattcgcaggaatcacgaattccagcagatcttaaatacttctcaagctttgcactgtcatggatcttctcatggcaatatcgttacagcaagactaaaaagacaaactaatatccatcactacaaagacacgcatttttaaaatggtggtcacagtttgactcatccaaagcagatccagaacaagtaaaactctggtttcaatcccatccagaattcctcaaagcagttgatccagaaacttctgtgtttttgaaccaaaagtctcatctggcagcatttttagcaggatcgaaatcaaaggaggtcctaactaaaaatctaaaggaagttctgcaaatgttacagtaggaagaagaaggttcatcctcaaagaaggaagaaacaagttctgctgaagaagaagaagaagaccccttttaccaaaacgaagatgattgttttggtatctgtttagattaaa

SEQ ID NO: 13775 - DNA, 1060 bp, Glycine max
  Gm_smallRNAprecursor_6608
aattatatttataaaaataaatttgtaattgttttgcagatggaacctgaattttgggacaaaaatgccttcaaggcgacggccaaggctttcccaccaggatttcactacaaaccaaccaccatcctgaagacaagaaatttttatgaattgattttggtagattcaaattcagtatctatcaaacatttcaaagatccaaaagaccaaacattaaacacccattccacaatccaaatactaaaagttcttcaaccaagacactttggttcaaacttgaacaaaggaaagagattttcagttccatttgatccagtaggttatacctattgggattatgttgatgcttggactaaggtgttttggcaccaaaatacccgcttcaagcattcatggctgatatatttcaagaccaatacaatttacaattttcccaattggtttttgcaatggtaggacttctttggaccaattccagagatatttccagaaacagtccaacaaggatttgctcaatttgagagacaatacaattcgcaggaatcacgaattccagcagatcttaaatacttctcaagctttgcactgtcatggatcttctcatggcaatatcgttacagcaagactaaaaagacaaactaatatccatcactacaaagacacgcatttttaaaatggtggtcacagtttgactcatccaaagcagatccagaacaagtaaaactctggtttcaatcccatccagaattcctcaaagcagttgatccagaaacttctgtgtttttgaaccaaaagtctcatctggcagcatttttagcaggatcgaaatcaaaggaggtcctaactaaaaatctaaaggaagttctgcaaatgttacagtaggaagaagaaggttcatcctcaaagaaggaagaaacaagttctgctgaagaagaagaagaagaccccttttaccaaaacgaagatgattgttttggtatctgtttagattaaatttaaattcggtcacaaaaccgtctgtttgtaattaatgtgtaattaatgctgaacaatactacct

SEQ ID NO: 13776 - DNA, 1080 bp, Glycine max
  Gm_smallRNAprecursor_6609
aattatatttataaaaataaatttgtaattgttttgcagatggaacctgaattttgggacaaaaatgccttcaaggcgacggccaaggctttcccaccaggatttcactacaaaccaaccaccatcctgaagacaagaaatttttatgaattgattttggtagattcaaattcagtatctatcaaacatttcaaagatccaaaagaccaaacattaaacacccattccacaatccaaatactaaaagttcttcaaccaagacactttggttcaaacttgaacaaaggaaagagattttcagttccatttgatccagtaggttatacctattgggattatgttgatgcttggactaaggtgttttggcaccaaaatacccgcttcaagcattcatggctgatatatttcaagaccaatacaatttacaattttcccaattggtttttgcaatggtaggacttctttggaccaattccagagatatttccagaaacagtccaacaaggatttgctcaatttgagagacaatacaattcgcaggaatcacgaattccagcagatcttaaatacttctcaagctttgcactgtcatggatcttctcatggcaatatcgttacagcaagactaaaaagacaaactaatatccatcactacaaagacacgcatttttaaaatggtggtcacagtttgactcatccaaagcagatccagaacaagtaaaactctggtttcaatcccatccagaattcctcaaagcagttgatccagaaacttctgtgtttttgaaccaaaagtctcatctggcagcatttttagcaggatcgaaatcaaaggaggtcctaactaaaaatctaaaggaagttctgcaaatgttacagtaggaagaagaaggttcatcctcaaagaaggaagaaacaagttctgctgaagaagaagaagaagaccccttttaccaaaacgaagatgattgttttggtatctgtttagattaaatttaaattcggtcacaaaaccgtctgtttgtaattaatgtgtaattaatgctgaacaatactacctgtcctgtagccattaaagtc

SEQ ID NO: 13777 - DNA, 1046 bp, Glycine max
  Gm_smallRNAprecursor_6610
tcaagaccaatacaatttacaattttcccaattggtttttgcaatggtaggacttctttggaccaattccagagatatttccagaaacagtccaacaaggatttgctcaatttgagagacaatacaattcgcaggaatcacgaattccagcagatcttaaatacttctcaagctttgcactgtcatggatcttctcatggcaatatcgttacagcaagactaaaaagacaaactaatatccatcactacaaagacacgcatttttaaaatggtggtcacagtttgactcatccaaagcagatccagaacaagtaaaactctggtttcaatcccatccagaattcctcaaagcagttgatccagaaacttctgtgtttttgaaccaaaagtctcatctggcagcatttttagcaggatcgaaatcaaaggaggtcctaactaaaaatctaaaggaagttctgcaaatgttacagtaggaagaagaaggttcatcctcaaagaaggaagaaacaagttctgctgaagaagaagaagaagaccccttttaccaaaacgaagatgattgttttggtatctgtttagattaaatttaaattcggtcacaaaaccgtctgtttgtaattaatgtgtaattaatgctgaacaatactacctgtcctgtagccattaaagtcccggtcaaaactacttgtcttgtaacaaacagtcaaatagtcccggtcaaaactaccgacaactaccggtcttagatttttggctatataaggagtcctcaagtatgttgtgaggcaccctttcatttggccatttttcaggtttctgaagagaggtgctctgaaacaagatttttgtaagcgcttctttcaagtttcaataaatttatattttcattcctcttctctctctttaccgatcctgtgcggctctgccaccgcttcggtttatttatttatgaaaacctgggatttgtaagccggtctccggtgtgcccttgatatctgttttacaagtttatattttcttttccatttatcgtattgcattct

SEQ ID NO: 13778 - DNA, 1079 bp, Glycine max
  Gm_smallRNAprecursor_6611
taaggaaattcctagaaccttctcttcttctggaagtttctccataatttttctttcctccattttctttgttttggggctgaaatttaaactttgactgtaagccattttcaagtgtatcttctttatgcctatgcagtctttgctcatatgcttcaagagagcccacaagttctgtctctgatagagtggacaaatctttggtttcctcaatcgttgtcacgattgggtcaaacttttggggcatagtaattagaattttctcaacaattttcttgtcaagaatatcttccccaaaagctctcatttgattaactatttctttaactttagaatagtaatctttaactgtcttagactccttcatcttcaatagttcaaaatctcttcttagagattgaagtttaacggcacgtaccttaacacttccttgaaactcctcctgcaatgtgttccatgcttctttggcagtcttagctcccataattcttgggaaaattggatcagtcaccgcttgttgcaaggtgaataatgcttttgaatttttctgtttatttttcttcaactctttttcttgagatgcattaagagctgaagtatccgcaggaatggtgaagccttcttctactatgtcccataaatcttgagatgaaaaatatgtttccattttaacacaccagaaatcataattttcaccattgaagatagggacagaaatagttgacgattgactagtgttatccatagcttagaaaaaatattattggagtgggttaatagtacaaaggaaaattttgaagtagttgggaagattttggaatggtaggtaggtaatataactacgcccaatgtatgaccgaacgtagctctgataccactgttggtagtttattagatgatagttgatagttaatagttttagagaattgttttagaaagaaggctatgtcattgatttcttggatgatcaattacaacataccaattgcctatttataggctcaagtcaccaacctctcaatggtggtgaatgattctacattactttaggtctttctagagttttcatgatagattag

SEQ ID NO: 13779 - DNA, 1101 bp, Glycine max
  Gm_smallRNAprecursor_6612
gttatcttaagtattttggaaaacgtaatctagaatattgattttcacgttgcaggttactcaattcgtaaaatcacatcctattcacattctaaattctttgagaaaataatattatcagatctaagaaaaaagagcatgtaaacgagggaaatttagaaattttgataattacaaaattagaaggctgtaggatgaaagtcgtggtatgttggaagtaacaacctttcagaaattgaaataagtgctcattttgtatggagtgttgctaggtgaacccaacattctttaaaaatggccaaattacccctgcctttttttctccctttatgaatcaagttgatccgcaagttgattttaagacttacggatcaagttgatccataagtcttttactgatcaacttgatctgtaactctcaaaaatcaacttgcggatcaacttgatccgtaagaagcttgtggatcaagttgatccgtaaaagacttacgaatcaacttgatccgtaagtcttaaaaattagcttgcggatcaacttgatccgtaagtcttaaaaatcaacttgcggatcaagttgatccgcaagcttcttacggatcaagttgatccgtaagtcacttgcgaatcaacttgattcataagaagcttgtggatcatctatatcaactgtggatcaactaaaacctatgtggatcaactcattgcatatgcggatcaacctaaatgagctgggtgcacaaaaacatttttaaaaatacataagggtatttttatcttttcatgttaagtgctgggtgcactagcaataatgctgggtgcacctagcaacacccttttgtatggctacgtttggaggctattgggctcgcaaggcctgcccaaagattttggcaacagcttgggacacctagcagttttcataaatgtcgaaaataccattatgggtattttcagttataaatagcagcacccatttttcatttctgcagtgccttcttttttctgaaaatctcagtcccttagtgtaagttgcttttgttagggtcatttttgaagcattttttgtcttcgggggtgtacggtgagttggatcattattcg

SEQ ID NO: 13780 - DNA, 1100 bp, Glycine max
  Gm_smallRNAprecursor_6613
ttatcttaagtattttggaaaacgtaatctagaatattgattttcacgttgcaggttactcaattcgtaaaatcacatcctattcacattctaaattctttgagaaaataatattatcagatctaagaaaaaagagcatgtaaacgagggaaatttagaaattttgataattacaaaattagaaggctgtaggatgaaagtcgtggtatgttggaagtaacaacctttcagaaattgaaataagtgctcattttgtatggagtgttgctaggtgaacccaacattctttaaaaatggccaaattacccctgcctttttttctccctttatgaatcaagttgatccgcaagttgattttaagacttacggatcaagttgatccataagtcttttactgatcaacttgatctgtaactctcaaaaatcaacttgcggatcaacttgatccgtaagaagcttgtggatcaagttgatccgtaaaagacttacgaatcaacttgatccgtaagtcttaaaaattagcttgcggatcaacttgatccgtaagtcttaaaaatcaacttgcggatcaagttgatccgcaagcttcttacggatcaagttgatccgtaagtcacttgcgaatcaacttgattcataagaagcttgtggatcatctatatcaactgtggatcaactaaaacctatgtggatcaactcattgcatatgcggatcaacctaaatgagctgggtgcacaaaaacatttttaaaaatacataagggtatttttatcttttcatgttaagtgctgggtgcactagcaataatgctgggtgcacctagcaacacccttttgtatggctacgtttggaggctattgggctcgcaaggcctgcccaaagattttggcaacagcttgggacacctagcagttttcataaatgtcgaaaataccattatgggtattttcagttataaatagcagcacccatttttcatttctgcagtgccttcttttttctgaaaatctcagtcccttagtgtaagttgcttttgttagggtcatttttgaagcattttttgtcttcgggggtgtacggtgagttggatcattattcg

SEQ ID NO: 13781 - DNA, 1062 bp, Glycine max
  Gm_smallRNAprecursor_6614
gattttcacgttgcaggttactcaattcgtaaaatcacatcctattcacattctaaattctttgagaaaataatattatcagatctaagaaaaaagagcatgtaaacgagggaaatttagaaattttgataattacaaaattagaaggctgtaggatgaaagtcgtggtatgttggaagtaacaacctttcagaaattgaaataagtgctcattttgtatggagtgttgctaggtgaacccaacattctttaaaaatggccaaattacccctgcctttttttctccctttatgaatcaagttgatccgcaagttgattttaagacttacggatcaagttgatccataagtcttttactgatcaacttgatctgtaactctcaaaaatcaacttgcggatcaacttgatccgtaagaagcttgtggatcaagttgatccgtaaaagacttacgaatcaacttgatccgtaagtcttaaaaattagcttgcggatcaacttgatccgtaagtcttaaaaatcaacttgcggatcaagttgatccgcaagcttcttacggatcaagttgatccgtaagtcacttgcgaatcaacttgattcataagaagcttgtggatcatctatatcaactgtggatcaactaaaacctatgtggatcaactcattgcatatgcggatcaacctaaatgagctgggtgcacaaaaacatttttaaaaatacataagggtatttttatcttttcatgttaagtgctgggtgcactagcaataatgctgggtgcacctagcaacacccttttgtatggctacgtttggaggctattgggctcgcaaggcctgcccaaagattttggcaacagcttgggacacctagcagttttcataaatgtcgaaaataccattatgggtattttcagttataaatagcagcacccatttttcatttctgcagtgccttcttttttctgaaaatctcagtcccttagtgtaagttgcttttgttagggtcatttttgaagcattttttgtcttcgggggtgtacggtgagttggatcattattcg

SEQ ID NO: 13782 - DNA, 1035 bp, Glycine max
  Gm_smallRNAprecursor_6615
ccaatgtagccgtctttgcattttgtgggtcaacaaacatctttgtctttcacctataccaggccatgtagtccgagttaaagctcaataggccttcttgtcggggataagcgtcgaccctaaatgcatgacgattattccactgatgaatcattggggcgaacaattgcccccaattttcgtcatgtttcccttttaatgttatgccatgaatgtttaagggttgtgaaggagactctggaactggttgctgcatcccaaattgtctcaacactctgtccggttggtgccactcaataacttggaaacaaattagtggcaccaccgcgtaccacacgagacttccgactaaacaaacgggaggcaataatgatataacggttaatgggtaaggctcccacacaaactgcatataacaacatagttgtgaacaatgtagtaaaaaaagacataattttttattttacaaatacaatagcatggttcttacctcatgacgtttcataatatccaacttgcgacgaaaaactttcacatcatcattgccgatatgttggtttccacgtcacagccacctacaaagaataaaatttaatataccctaaaaccatttattctattgaaatgaaagacgctgttaaaaaggactgacctgtgccccagtggtgtattttctacttgggaaggagtcctctctggagccaaggttggacatcgttcccatgcccacaattgtagtaagatgcacatacctccgattgatttagttctataatcggtggcactgcacatctctctgtatagaaaaccaagtacggctgctccccatgcatatctgccacattcttcaaagttacgtaaaaattgaaggtaccttagcgaaactctgttattggttttgtcaacgaataagacacctccaatgaatctcagtatccatgcacgagcaaaccctcgtacttgttcttcgtcgtcgtcattatttatttgtacaaaatggtgagccagccaacttaatttaaccacactaccttt

SEQ ID NO: 13783 - DNA, 1157 bp, Glycine max
  Gm_smallRNAprecursor_6616
gaggcaataatgatataacggttaatgggtaaggctcccacacaaactgcatataacaacatagttgtgaacaatgtagtaaaaaaagacataattttttattttacaaatacaatagcatggttcttacctcatgacgtttcataatatccaacttgcgacgaaaaactttcacatcatcattgccgatatgttggtttccacgtcacagccacctacaaagaataaaatttaatataccctaaaaccatttattctattgaaatgaaagacgctgttaaaaaggactgacctgtgccccagtggtgtattttctacttgggaaggagtcctctctggagccaaggttggacatcgttcccatgcccacaattgtagtaagatgcacatacctccgattgatttagttctataatcggtggcactgcacatctctctgtatagaaaaccaagtacggctgctccccatgcatatctgccacattcttcaaagttacgtaaaaattgaaggtaccttagcgaaactctgttattggttttgtcaacgaataagacacctccaatgaatctcagtatccatgcacgagcaaaccctcgtacttgttcttcgtcgtcgtcattatttatttgtacaaaatggtgagccagccaacttaatttaaccacactacctttaatttcatcttcttgtggtctgactcccaataattcctcacataaatcagcccaatcaagattttttggaccgattaatggtaaaccatccacacttatacctaacaatatagagacgtcttgtagagtaatagtacactctctgcatctcatgtgaaacatatgtgtttccggcctccatctttctatcagagcactaattaatgagacatttatttttaagtatcccatcttgataatccagccgaaaccagattgttgaagaaaaggaaaaatttgctctggaatttgttcttccccttgatacgtggggacagctcgtctgatatgtaatttcctttcttcttcctcattccaaacatgttctgaaacatgcttaggttgcatccataatacatcagtatcaatggggccagacttaatgttaatatgtgatgaagatgatgatgaagatgtcattgctactgcaaaataaaatttaa

SEQ ID NO: 13784 - DNA, 1158 bp, Glycine max
  Gm_smallRNAprecursor_6617
gaggcaataatgatataacggttaatgggtaaggctcccacacaaactgcatataacaacatagttgtgaacaatgtagtaaaaaaagacataattttttattttacaaatacaatagcatggttcttacctcatgacgtttcataatatccaacttgcgacgaaaaactttcacatcatcattgccgatatgttggtttccacgtcacagccacctacaaagaataaaatttaatataccctaaaaccatttattctattgaaatgaaagacgctgttaaaaaggactgacctgtgccccagtggtgtattttctacttgggaaggagtcctctctggagccaaggttggacatcgttcccatgcccacaattgtagtaagatgcacatacctccgattgatttagttctataatcggtggcactgcacatctctctgtatagaaaaccaagtacggctgctccccatgcatatctgccacattcttcaaagttacgtaaaaattgaaggtaccttagcgaaactctgttattggttttgtcaacgaataagacacctccaatgaatctcagtatccatgcacgagcaaaccctcgtacttgttcttcgtcgtcgtcattatttatttgtacaaaatggtgagccagccaacttaatttaaccacactacctttaatttcatcttcttgtggtctgactcccaataattcctcacataaatcagcccaatcaagattttttggaccgattaatggtaaaccatccacacttatacctaacaatatagagacgtcttgtagagtaatagtacactctctgcatctcatgtgaaacatatgtgtttccggcctccatctttctatcagagcactaattaatgagacatttatttttaagtatcccatcttgataatccagccgaaaccagattgttgaagaaaaggaaaaatttgctctggaatttgttcttccccttgatacgtggggacagctcgtctgatatgtaatttcctttcttcttcctcattccaaacatgttctgaaacatgcttaggttgcatccataatacatcagtatcaatggggccagacttaatgttaatatgtgatgaagatgatgatgaagatgtcattgctactgcaaaataaaatttaat

SEQ ID NO: 13785 - DNA, 1155 bp, Glycine max
  Gm_smallRNAprecursor_6618
ggcaataatgatataacggttaatgggtaaggctcccacacaaactgcatataacaacatagttgtgaacaatgtagtaaaaaaagacataattttttattttacaaatacaatagcatggttcttacctcatgacgtttcataatatccaacttgcgacgaaaaactttcacatcatcattgccgatatgttggtttccacgtcacagccacctacaaagaataaaatttaatataccctaaaaccatttattctattgaaatgaaagacgctgttaaaaaggactgacctgtgccccagtggtgtattttctacttgggaaggagtcctctctggagccaaggttggacatcgttcccatgcccacaattgtagtaagatgcacatacctccgattgatttagttctataatcggtggcactgcacatctctctgtatagaaaaccaagtacggctgctccccatgcatatctgccacattcttcaaagttacgtaaaaattgaaggtaccttagcgaaactctgttattggttttgtcaacgaataagacacctccaatgaatctcagtatccatgcacgagcaaaccctcgtacttgttcttcgtcgtcgtcattatttatttgtacaaaatggtgagccagccaacttaatttaaccacactacctttaatttcatcttcttgtggtctgactcccaataattcctcacataaatcagcccaatcaagattttttggaccgattaatggtaaaccatccacacttatacctaacaatatagagacgtcttgtagagtaatagtacactctctgcatctcatgtgaaacatatgtgtttccggcctccatctttctatcagagcactaattaatgagacatttatttttaagtatcccatcttgataatccagccgaaaccagattgttgaagaaaaggaaaaatttgctctggaatttgttcttccccttgatacgtggggacagctcgtctgatatgtaatttcctttcttcttcctcattccaaacatgttctgaaacatgcttaggttgcatccataatacatcagtatcaatggggccagacttaatgttaatatgtgatgaagatgatgatgaagatgtcattgctactgcaaaataaaatttaa

SEQ ID NO: 13786 - DNA, 1050 bp, Glycine max
  Gm_smallRNAprecursor_6619
aaaattattttaaacattgtggtaggttttagctaccaatataataatttttatttataaaaatatccaactcattctcaaaaatccctaatattcaaaatcaatttcaaaaatcaattaccaattcagattttaatcacacaatacacaaatagtgtgtaatgtgtgactatcaaacccatcatctatcacattttacaacatgttcatgtcaacatcattcaatttcacttccttattttaattcttttctcactcattaaaaccatgcacaaagattctttttttcccatgacaccctcttccaattcaacttccatcacctactcccaccacaatgaccacactaactccccacctgcaccttctatcaaaaaatcactatcattaactccaaagccagttggctgcagtggctaatccagcggtaggacacagtggacatcatgcacaccaattgccttgagaagctatgaatgagagtgaataggcaatttagtccctgagattgtacctattttgcatattagtccctaacttaatattaaattcaaaatagtccttatctttgcataagtgttgcaaaatagtccttccattaaattgtaaagtaacgtcgttaatgaggtcaattttagtgccacgtggactatccacgtggcactaaaggatgacgtggcatgacacgtggacgtgcctgatgccacgtcatttgatgataacaaaacgagtaaatatgaaatttagtccctgactttgcacccttgttgcatattagtccctaacttaatgaaaaattcaaaatagtccctatcttttacataagtattgcaaaatagtccttccgttaaattttaaagtaatgttgttagtaaggtcaattttagtgtcacgccatttgatgatgatagaatgagtgacttcttcaaatttgatgattttgaaccaattgaggcatatatacgaaaaagaactcacacacacttgcacaaataaaaagaaccaaaaatccacagcaacaaccttatctctgtagctgtcaacaccaat

SEQ ID NO: 13787 - DNA, 1041 bp, Glycine max
  Gm_smallRNAprecursor_6620
tcttcctagggcaaccaggcgggaaggattttcttcaatgtatagcccgcatttgtctgagtcacctgtccctggatcgttccctgagggagcaacacaactctcctttgtgctgacacgaggacctgagggaccaacctctggctctggaggtagtgcaagtccctgtgattgcatctgagactaaaactgggactgcatctggctgaaggataccatcatctttcgagtcactttttctgtggctgactcctccagttggtctctgatttgttgggtcagctgttctaggtcttcatgaggcatggaggaagaactgcgggacgttcgtgaagccgatccaaagtattactttatggtgacaccggctccaacaacacgaacatggtcagggtgctctggtcgcccaatggcagcagtcaggatatcctgacgtccatgggggatgaacgatccctgtgacacctgctcgtccaaagaatcctgtaccgaacacatatttgtccaaggaattcacagaatatacaaagataattacaattattaattaaaaatgacttacaatcctgtcagctatttcctttgctgcctcggacatcatcagtccagttttcttcgtgcgggccatcttccatttcacgtggcgtctgatgggagatagagagtcaatgatgcccttagtgcttccagattgggcagcttcttccagtcttttctttatcttctcagccatgagcttttcttctaaatattcataacccccacgagacaatatatggggggcagtgttttgcttctgagaggcctgtgccttatataaaagtaaacatgaaaaaacttctatatatgagtttatattagctaattttaacttatataaaagttgttttttctcttcataattttttatgaataaaattatctgaacatggccaaaattatttcattctttttaactttgttatattcctgtaataagggtacagccttatgtgcttttatgatgaaagatattttaaataattattagagttattacaa

SEQ ID NO: 13788 - DNA, 1078 bp, Glycine max
  Gm_smallRNAprecursor_6621
ggacggtaactgtggatatcggtccattgccgctttattaggtatgggggaagattcgtggtcattagtgcgtaatgaattgattaaagaacttgacaggtggtcgtatgagtacatgaacctcttcggtggcacagagagatttgaacaattaaagttgtccctacttgttgatgggttttcgaaggtatgtttttaggttaatttttttaataacaaactttaaattacttacatgtgtatgtttggttgattcaggttagtgtggacaagtggatggatataacggagatgggatatgtgattgcatcatggtataatataatccttgtatcgttgtcccgacaacaaagcatgacattttttcctattagaagtcaaccaccacctgattcttctaggcaccgcatgatatgtgttggtcacgtgtttggaaatcattttgttcaggtacattgaatatagttagtataacaattatgcaatgacttcgctggttcatttgacacggtcaccgcatgatataatctttgttcatgtacaacaggtttatttgaaagatcattgtcccttaccacctccagcgttgttgtggtcaaacaattgttattctcaggcaaagcagtggacaattccatatattagtagaatgcaacaatacacaagcttaatgtcattcaaaagacactatgtcgacctaaatgaagactaaacatgcattgtttatgtaattgtattaattatgcgatataatttgttgtaacccattactaactaattaatattattaagtactcgtttggttaagcaaaaaaattgtcggtccaacaaaaatcatttacgcgtatagcatacatcattgtcataattgacaacacataatgacatgcatgcgtattaaaatttgagcgcgacaacacattgactgacttgactacacattctgaaggaaacataaacacgaaaatgttcacgcgtgtctatttttttttaaacaaagttaagcaatcgctcggtcacaatcatctatatatatagcagacacgactaataaatcacacattatcttgctttcaaa

SEQ ID NO: 13789 - DNA, 1187 bp, Glycine max
  Gm_smallRNAprecursor_6622
cggagtaagatcaaacggacaaataggaagtaagaatgcagtatgataaaatcaaacgtaagaattataaacttgtaaagcagatatcaagggcacaccgaaacggcttacaaacccaggtttttgaaaacaaagaaatcgaagcggcggcagagccgcacaggatcggtgaggggagaagggagatatgaaaaatagaacttgaaatttattgaaaccgaaagaaaagcttacaaagagtttttccctaggcagagcttctctctctaaaacctgattctgagtctatctgaaagggtgcctcacaaaggggacgaggactcctttaaatagacccaatttttactgtttctacagtatcggtaatgtttaccggaactgttacaaaactttttacaaattacattatttaaaagaaactgacaagttagttacaataattcatgattattacaactaattaatcgtcgtccaatgatataccaaaacagtcatcttcattctggtagaatggatcatcttcttggtcatcattagtctctgatgattcagtttccttcttggaaggttcttcttccacttcctgttgaagtagttggagaacttctttgagattctgagcaagactttctttagattttgcgcttgctaagaatgctgctagttgcgacttctgatttagaaacaaagatgtctctggatcagcaggtttaaggaactcaggattgctctggaaccagttcttgacttgatctggagcagcctttgaagtatcgaattgtgaccaccattttacaaaggcgtgtctctgtaacggtggatattgtttgttgttttcagtttttccgtatatgtattgccatgaaaagatccatgacaaggcaaaactggaaaaatactttaaatctgccggaattcgtgattccttgctattatagagcttgttgaattgttcgaatccctgttggacttcttctggaaatatttgtggaattggtccgaagtagttccaccattgaaggaaccaatttggaaaattatatgcagtattatttttgaagtaaatcagcaatgaatgcttgaatttactattttgatgccagaacacattggtccaggcgtcaacgtaatcccaataattataccctgcaggatcaaatggtgcagagaattttttgggttggttt

SEQ ID NO: 13790 - DNA, 1213 bp, Glycine max
  Gm_smallRNAprecursor_6623
accggaactgttacaaaactttttacaaattacattatttaaaagaaactgacaagttagttacaataattcatgattattacaactaattaatcgtcgtccaatgatataccaaaacagtcatcttcattctggtagaatggatcatcttcttggtcatcattagtctctgatgattcagtttccttcttggaaggttcttcttccacttcctgttgaagtagttggagaacttctttgagattctgagcaagactttctttagattttgcgcttgctaagaatgctgctagttgcgacttctgatttagaaacaaagatgtctctggatcagcaggtttaaggaactcaggattgctctggaaccagttcttgacttgatctggagcagcctttgaagtatcgaattgtgaccaccattttacaaaggcgtgtctctgtaacggtggatattgtttgttgttttcagtttttccgtatatgtattgccatgaaaagatccatgacaaggcaaaactggaaaaatactttaaatctgccggaattcgtgattccttgctattatagagcttgttgaattgttcgaatccctgttggacttcttctggaaatatttgtggaattggtccgaagtagttccaccattgaaggaaccaatttggaaaattatatgcagtattatttttgaagtaaatcagcaatgaatgcttgaatttactattttgatgccagaacacattggtccaggcgtcaacgtaatcccaataattataccctgcaggatcaaatggtgcagagaattttttgggttggtttaagtttgagccataatgtcgttgctgcataaccttcaggatttggattgtggaatgagtatttaaatttggatctttggggtctttgaagtgtttaatagatactgagtttgtatctattaggatgaattcatagaatttgcgggttttgtttgcggctattggcctgtaatggaatccctggggaatactttggcggttgctttgaaaggattcttgtcccagtattctggttccatttgtaaaacattgaaaaatttgttttttgaaatgcaactgttaccgggttgtggtgttgattcttgttgagtcaacgattcgcttggtttttggttacagacggttttggtctgtttggctttttggatttgtttttgtagatctgtttcagaatcatc

SEQ ID NO: 13791 - DNA, 1061 bp, Glycine max
  Gm_smallRNAprecursor_6624
aaaacaacccaaaactgccccacaaatatgagcacattctcacaatttatagcaccaaaagatgaacaaaatgcaccaatggaaagctaaaaactcaaggattaaatacttacttgctggagtgagtaggaataccaaaaatgaaagcaaaatgcaaccaaaaagtggcttgggggagcaaaaaccgcaagcctcgtgagctctctccttttgaataagggggggggggaagtttttttaggtgcagaaaacgttcccctccctcgttttttataatctggtgcaggggttgctcgtccaagcgagctcagctcgcccaggcgagctaacctgcaaaattttttttaagggaaacataaccatggccccctacaggttagcattcgcctattcgaacctacttaagttagatcaggcatccattacttattttaaataaacaatagtaataattactgtgaattcaaaggatactgggctgccttgcagcgacgttttctgcttgtccagcgccgggaagggatgacgatctgtcggtcgtgaccctatcctccattcgcatccgtccctaagtacctgcaagtaagaaacaaacaatgtgcagccaatcttgaccgggtcgtcgtcttaccttggttgatttctgccgtcaactttgtctcgagttctgaccgtggcctaagacgatttttccccttttatcacaagatatgcatgtgcatgcatgaatgtttttaatgcaatgatcttcttagtgaaagctgattaggttcagttttatttaagcgtttggggcaccccatgaactgagcgaaaagggctcagtttattacaaactaatacaaggtttaaaaccaaagttaggactgaagcctcaacccatgttctcttcttttaaagaaacgtcacgggacaatttacagtggatgggaatccctggaggaaaccaagaagaacaaaaaaaactcagaaaaaaaaaaagaacatgcagcggttccctcaattgccccagacttcaagcgtaatatcgcttaacgacatcagagttcaccggcgagggt

SEQ ID NO: 13792 - DNA, 1112 bp, Glycine max
  Gm_smallRNAprecursor_6625
ttcccgagtgtccttcgcaaccactgaatatccatggcctaacgctgaaaggcaaacaagatgaaaattggttccaactgttggccccaatggtcaatcaatggaataatcgagctgagtttagggtcgacatttatccttgacaggacggcctattgagttttaactccgtctacatggtctagtataggcgagaaacaaagatgtttgttgacccaaagaatgcaaacacagctacattggtatttatttattttacaatatttaacttcaatttattttttaaagcattgacattaatttcctgaccctaataattgcagcctgaagtttcggagacattacagtatatggtgtcaccataagggaggaacacatggacagttgatgatctcgtgccttatgtggagaagataatgattttatccgaagagcaagagaggatcactaagcctgtgacacatggtccagcatcagagcgtcgatttccaccacaagagtttcacatgcttcagtcaagtgctgaaacttggggttttggcagatgaagggaggttgttgaagcggaacaattttcccaacaaatggagcagcgtggccatggaatgtattacacgccaccaacattttctcagtatccttcacagatgtattagtatcctttcgaaggtcatgacactgatatgtctgcaagcaaacattcgtttggtggtgttgcggaaacacatcctcatttttcatggccgactatgaccccttcacaacaacatgatgccccaatggcaacacctaacgccccattagctccgcaatggaatgtacccgaagcaatacctgatatgggtgacttattaggtgttgatttgcgtcacgagttttctactgaggctgagcaagtagaagcaaggagacagcgcggcagaagaaatcctgatcgtcaagcccgaagatgggatcgaccatgtggcacatcctcacggcatcacggacaccataatgaatgattttgatgtctctgtttaaatttgtcgttgtatgtttgtaatttgaatttgacacttaatttattgtatctcatttattaagccttactaatggatacagtttatgtc

SEQ ID NO: 13793 - DNA, 1157 bp, Glycine max
  Gm_smallRNAprecursor_6626
cctattccaaacaaaaaaaatttgcttaacagattaaattctgcaaagatattttcaaaatttgatatgaaatcttgattttggcaaatccaaatccaagaatcagataggtacaaaacatcgtttactgtacctttcgggcaatatgaatggaatgtaatgtcattcggactgaagaataccccttcagagtttcacaaaattatgaatgatatttttaatccctattcaaaatttgtcattgtttacatagatgatgttttaatcttttcccaaaacattgaccaatatttcaaacacctccaaaccttcatccatatcatcaaacaaaatggtttggcagtctccaaatcaaaaatcaatcttttccaaacacgaattcgattccttggtcacaatatttatcaaggtacaatcgttccaatcgaaaggtcaattgagtttgctagcaaattcccctaccaaattttagacaaaacccagttacaaagatttctaggttgtctaaattacgtaggtgaatttgtcccctacttaaacaatattgtcaaaccattgcatgataggctaaagaaaaatccgcctccttggtctgacctccatacccaaacagttaaagaaatcaaagtcaaagtccagtccataaaatgtctgtatcttcccattccacaggcattcaaaattgtcgaaactgatgcatcagacatcggttacggtggcatcctcaaacaacaagtacatggtcaagaacatgtcatcgcatatacttcaaaacattggaatcccacacaattaaagtattcaactgttaaaaaagaagttttagcaattgttttgtgcatttccaaatttcaatctgatttattaaatcaaaaatttttagtaagagttgactgcaaatcagccaaagacattttacagaaggatgtaaaaaaccttgcctcaaaacagatttttgcaagatggcaagcaattttaagtgtctttgattttaatatagaatatatcaagggctcttccaactctctacctgactacctcacccgtgaatttttacagaaaattcctgatgcctcctaaggtgtctaattcctccggcagaggaggaagatccagtacaaaaggtaaagaagttctactagctctaccagagccaa

SEQ ID NO: 13794 - DNA, 1049 bp, Glycine max
  Gm_smallRNAprecursor_6627
ttacacactcaaattaagtgattcttgagcctaaattgaatttcaaaacgagacctttcacctcgttttggaatcacctcatttggagccctgtagcttccgttattgccatttctatatttctgtccagccaccacttaacctacgttttaccatcccattcatccattttatgccagaaaccaccttattaagacccacgaaattaaccaccttattttccatcctttccttaatcaatttccgcattttccatcaaggtttaatcctagacgatcctaagtcagcccttgttccatgagggttcatatcaattgacgcctggaccaatgtgttctagcatcaaaatagtaaattcaagcattcatggctgatttacttcaaaaataatactgcatataattttccaaattggttcctccaatggtggaactacttcggaccaattccacaaatatttccagaagaagtccaacagggattcgaacaattcaacaagctctataatagcaaggaatcacgtattccggcagacttaaagtacttttccagttttgccttgtcatggatcttttcatggcaatacagaagtggaagaagaaccttccaagaaggaagctgaatcatccgagactaatgatgaccaagaagatgatccattctaccagaatgaagatgactgttttggtatatcattggacgacgattaattagttgtagtaatcaggaattattgtaactaatttgtcagtttctttttaaaaaaatgtaatttgtaaaagttttgtaacagttctggtaaacattaccgatactgtagaaacagtaaaaattgggtctatttaaaggagtcctcgtcccctttgtgaggcaccctttcagatagtcccagaatcaggtttttagagagagaagctctgcctagggaaaaactctttgtaagcttttctttcagttttaataaatttcaagttctatttttcatatctcccttctcccctcaccgatcctgtgcggctctaccgccgcttcggtttctttgttttcaa

SEQ ID NO: 13795 - DNA, 1108 bp, Glycine max
  Gm_smallRNAprecursor_6628
taagtgattcttgagcctaaattgaatttcaaaacgagacctttcacctcgttttggaatcacctcatttggagccctgtagcttccgttattgccatttctatatttctgtccagccaccacttaacctacgttttaccatcccattcatccattttatgccagaaaccaccttattaagacccacgaaattaaccaccttattttccatcctttccttaatcaatttccgcattttccatcaaggtttaatcctagacgatcctaagtcagcccttgttccatgagggttcatatcaattgacgcctggaccaatgtgttctagcatcaaaatagtaaattcaagcattcatggctgatttacttcaaaaataatactgcatataattttccaaattggttcctccaatggtggaactacttcggaccaattccacaaatatttccagaagaagtccaacagggattcgaacaattcaacaagctctataatagcaaggaatcacgtattccggcagacttaaagtacttttccagttttgccttgtcatggatcttttcatggcaatacagaagtggaagaagaaccttccaagaaggaagctgaatcatccgagactaatgatgaccaagaagatgatccattctaccagaatgaagatgactgttttggtatatcattggacgacgattaattagttgtagtaatcaggaattattgtaactaatttgtcagtttctttttaaaaaaatgtaatttgtaaaagttttgtaacagttctggtaaacattaccgatactgtagaaacagtaaaaattgggtctatttaaaggagtcctcgtcccctttgtgaggcaccctttcagatagtcccagaatcaggtttttagagagagaagctctgcctagggaaaaactctttgtaagcttttctttcagttttaataaatttcaagttctatttttcatatctcccttctcccctcaccgatcctgtgcggctctaccgccgcttcggtttctttgttttcaaaaacctgggtttgtaagccgtttcggtgtgcccttgatatctgctttacaattttataattcttattttttga

SEQ ID NO: 13796 - DNA, 1077 bp, Glycine max
  Gm_smallRNAprecursor_6629
aaacgagacctttcacctcgttttggaatcacctcatttggagccctgtagcttccgttattgccatttctatatttctgtccagccaccacttaacctacgttttaccatcccattcatccattttatgccagaaaccaccttattaagacccacgaaattaaccaccttattttccatcctttccttaatcaatttccgcattttccatcaaggtttaatcctagacgatcctaagtcagcccttgttccatgagggttcatatcaattgacgcctggaccaatgtgttctagcatcaaaatagtaaattcaagcattcatggctgatttacttcaaaaataatactgcatataattttccaaattggttcctccaatggtggaactacttcggaccaattccacaaatatttccagaagaagtccaacagggattcgaacaattcaacaagctctataatagcaaggaatcacgtattccggcagacttaaagtacttttccagttttgccttgtcatggatcttttcatggcaatacagaagtggaagaagaaccttccaagaaggaagctgaatcatccgagactaatgatgaccaagaagatgatccattctaccagaatgaagatgactgttttggtatatcattggacgacgattaattagttgtagtaatcaggaattattgtaactaatttgtcagtttctttttaaaaaaatgtaatttgtaaaagttttgtaacagttctggtaaacattaccgatactgtagaaacagtaaaaattgggtctatttaaaggagtcctcgtcccctttgtgaggcaccctttcagatagtcccagaatcaggtttttagagagagaagctctgcctagggaaaaactctttgtaagcttttctttcagttttaataaatttcaagttctatttttcatatctcccttctcccctcaccgatcctgtgcggctctaccgccgcttcggtttctttgttttcaaaaacctgggtttgtaagccgtttcggtgtgcccttgatatctgctttacaattttataattcttattttttga

SEQ ID NO: 13797 - DNA, 1076 bp, Glycine max
  Gm_smallRNAprecursor_6630
aacgagacctttcacctcgttttggaatcacctcatttggagccctgtagcttccgttattgccatttctatatttctgtccagccaccacttaacctacgttttaccatcccattcatccattttatgccagaaaccaccttattaagacccacgaaattaaccaccttattttccatcctttccttaatcaatttccgcattttccatcaaggtttaatcctagacgatcctaagtcagcccttgttccatgagggttcatatcaattgacgcctggaccaatgtgttctagcatcaaaatagtaaattcaagcattcatggctgatttacttcaaaaataatactgcatataattttccaaattggttcctccaatggtggaactacttcggaccaattccacaaatatttccagaagaagtccaacagggattcgaacaattcaacaagctctataatagcaaggaatcacgtattccggcagacttaaagtacttttccagttttgccttgtcatggatcttttcatggcaatacagaagtggaagaagaaccttccaagaaggaagctgaatcatccgagactaatgatgaccaagaagatgatccattctaccagaatgaagatgactgttttggtatatcattggacgacgattaattagttgtagtaatcaggaattattgtaactaatttgtcagtttctttttaaaaaaatgtaatttgtaaaagttttgtaacagttctggtaaacattaccgatactgtagaaacagtaaaaattgggtctatttaaaggagtcctcgtcccctttgtgaggcaccctttcagatagtcccagaatcaggtttttagagagagaagctctgcctagggaaaaactctttgtaagcttttctttcagttttaataaatttcaagttctatttttcatatctcccttctcccctcaccgatcctgtgcggctctaccgccgcttcggtttctttgttttcaaaaacctgggtttgtaagccgtttcggtgtgcccttgatatctgctttacaattttataattcttattttttga

SEQ ID NO: 13798 - DNA, 1046 bp, Glycine max
  Gm_smallRNAprecursor_6631
aggtatgtcgaatggttagcaaatatagtccctgtcattaaaaagaatggaactcttagagtatgcatagattttagggatttaaataatgctacacctaaagatgaatatgctatgccagtagcggaaatgttggtagattcagcagctggcttcgaatttttaagcatgttagatggttattctggttataaccaaatatttattgctgaaagtgatgtgtcaaaaacagcatttcgatgccctggtgctttaggcacttatgaatgggtagttatgccctttgggttgaaaaatgctggggccacttatcaaagggccatgaattccatgtttcatgattttattgacacatttatgcaagtttatattgatgatataatcatcaaatcctcctcagaagatagccatttggattaccttaggcaatctttcgaacgaatgaggaaacatggattaaaaatgaatccattaaagtgtgctttttgtgtgcgtgcaggagatttccttggttttgtggtgcataaaaaaggcattgagataaatcaaaacaagacaaaggctattcttgagacgaagcctccttcgaccaaaaaacagcttcagtctttgctaggaaaaatcaacttcttgaggcgattcatctcgaatctaagtggcaaagctcaaattttttcgccattacttcgactcaagaaaaatgaaccattcaaatgggatgaagtgcatcaaaaggctttcgatgaaattaaagaatatctgatcaagcctcctgtgttaatgcctcctagtcgaaacaagactatgaagttgtatattgctgcgtctgacaagaccattggtagcatgttggctcaggaagatgatgatggcgtagagcatgcaatttattatcttagtcgtgtactaaatgatgcagaaactagatataatgccatagaaaaactttgtctttgtttgtatttctcttgtgcaaaacttaagcaatatataaagcctgttgatgtttatgtatattctcattatgatattattaagcacatgtt

SEQ ID NO: 13799 - DNA, 1066 bp, Glycine max
  Gm_smallRNAprecursor_6632
tcacaacaatatctatacatatctagacatgacaatgaggcggggcgggacgggtacgggtattgtttccccaattccttatcccgacttcccaatatatctccgtatccgtacctaatatccgacgggtttaagtttattgtaccatccccatacccgtcgggtattgggtatccccgattccgtcccatacacgattcaaattagaaaaatattttttctctaaaaaaaatattaaaaatttaatttttgaaaaaataaattgattgttaaacatatatttttaactacttatatatcaataaatttattataacgcgtgtgtctacaaaaatagttaagaaaataatattaaattatgtaataattctaaaataaaattaactaataataaaaattctatgtcatttgattaaattatgcaaaaatcctaaagattttaagtggcggggcgagttcgggtttggggtcaggacaggtctaataattccataccagtatccgtatccgacttttggttatcgggaaaaacccgaatccgaacccatacccggtcaactcaggtattatccgtcaaagtcgggacggatttggacgggtacccacggatacagattttcttgtcatgtctatacatatgtacatgatgaacaagccaggcattttgtgatcattagcaactttattcatgaaattgtatgatattattttatatgcatcttactaaataattaaagagtaaactcaatgtatattaaaataaattccataaatttcgcataataataataataatgtgcaaaaatatatttttaatatttttgtgccataatatttattagaatacaaaaagggcactgtattttaaatcgccttccatcaattgaattaattttatagttcaaaattattaatgaaatattccgtcaaaattaagtattgtcaatatacatttcttttgttatttcttaggatataagatgataaacacaattaaagaatctcaaatgaaacgttataatcggaattcagatatggaagaaagcatttaataataataaaaatg

SEQ ID NO: 13800 - DNA, 1064 bp, Glycine max
  Gm_smallRNAprecursor_6633
ttgattggatctatggatggatgatgaataattgttgaatgtgggtgttgaataatgaatgttgtgtaagctcatgatgtttgcctatgttttcttgctaattgtgattatttggatttagcattggttctttttataatgaactcacctttgcaattttgtattgtgtgattgatacatgtgatgatcgcgaaccttgtttgtgggagcataatgacaacagtaggatgtaggaatgagattctgttgaggagccgtcaagccgacgtgatgacgttgggattattttgggagagagttatgttttgttaatcaactccttcatagttggttcatgattccttttgttgaactaaagatgtaaatttcagattttaattatatgtatgaacagattttaatttttattatgtgtatgatgtgtacgaagtttctattcctatatatatatatatatacacacacatactggtatcagagcctgatggggaagtaggaatagtgtccgtaagggcatatgttaactgaacttatggatctgaaccatgtacagtaattttaatttaaacagtatgtgtttgaacagtattttctggaagcacagcagtctgatattttagttgaatgatactgtagcagtaagtcacgtggttgagaaagggcagtaaggctaaggtgtattgttcaaataaaatattgagacataatatactggtggctataggagtttcaaactatattgtctgttataaaaaaaaaactttttcatttattcagatccaagaagttctgtaacatatagccttatggaaatatttctatggaaccaaatgaaggcaaagatattagagaatgttataatcatgtctagactattgcgatctttttcccgtatctcttttcgctcaaattcctcctcatcatcttcttcaagaaactccaatctattaaatgatcaagataaccagacccaagaggtcgccccaaaacacaatctcttcgatgaggaagtccgattcgaagatatcaatcaaaacatggatgactggaacattccagaaatc

SEQ ID NO: 13801 - DNA, 1079 bp, Glycine max
  Gm_smallRNAprecursor_6634
ttgattggatctatggatggatgatgaataattgttgaatgtgggtgttgaataatgaatgttgtgtaagctcatgatgtttgcctatgttttcttgctaattgtgattatttggatttagcattggttctttttataatgaactcacctttgcaattttgtattgtgtgattgatacatgtgatgatcgcgaaccttgtttgtgggagcataatgacaacagtaggatgtaggaatgagattctgttgaggagccgtcaagccgacgtgatgacgttgggattattttgggagagagttatgttttgttaatcaactccttcatagttggttcatgattccttttgttgaactaaagatgtaaatttcagattttaattatatgtatgaacagattttaatttttattatgtgtatgatgtgtacgaagtttctattcctatatatatatatatatacacacacatactggtatcagagcctgatggggaagtaggaatagtgtccgtaagggcatatgttaactgaacttatggatctgaaccatgtacagtaattttaatttaaacagtatgtgtttgaacagtattttctggaagcacagcagtctgatattttagttgaatgatactgtagcagtaagtcacgtggttgagaaagggcagtaaggctaaggtgtattgttcaaataaaatattgagacataatatactggtggctataggagtttcaaactatattgtctgttataaaaaaaaaactttttcatttattcagatccaagaagttctgtaacatatagccttatggaaatatttctatggaaccaaatgaaggcaaagatattagagaatgttataatcatgtctagactattgcgatctttttcccgtatctcttttcgctcaaattcctcctcatcatcttcttcaagaaactccaatctattaaatgatcaagataaccagacccaagaggtcgccccaaaacacaatctcttcgatgaggaagtccgattcgaagatatcaatcaaaacatggatgactggaacattccagaaatccctcaggatcaacta

SEQ ID NO: 13802 - DNA, 1080 bp, Glycine max
  Gm_smallRNAprecursor_6635
ttgattggatctatggatggatgatgaataattgttgaatgtgggtgttgaataatgaatgttgtgtaagctcatgatgtttgcctatgttttcttgctaattgtgattatttggatttagcattggttctttttataatgaactcacctttgcaattttgtattgtgtgattgatacatgtgatgatcgcgaaccttgtttgtgggagcataatgacaacagtaggatgtaggaatgagattctgttgaggagccgtcaagccgacgtgatgacgttgggattattttgggagagagttatgttttgttaatcaactccttcatagttggttcatgattccttttgttgaactaaagatgtaaatttcagattttaattatatgtatgaacagattttaatttttattatgtgtatgatgtgtacgaagtttctattcctatatatatatatatatacacacacatactggtatcagagcctgatggggaagtaggaatagtgtccgtaagggcatatgttaactgaacttatggatctgaaccatgtacagtaattttaatttaaacagtatgtgtttgaacagtattttctggaagcacagcagtctgatattttagttgaatgatactgtagcagtaagtcacgtggttgagaaagggcagtaaggctaaggtgtattgttcaaataaaatattgagacataatatactggtggctataggagtttcaaactatattgtctgttataaaaaaaaaactttttcatttattcagatccaagaagttctgtaacatatagccttatggaaatatttctatggaaccaaatgaaggcaaagatattagagaatgttataatcatgtctagactattgcgatctttttcccgtatctcttttcgctcaaattcctcctcatcatcttcttcaagaaactccaatctattaaatgatcaagataaccagacccaagaggtcgccccaaaacacaatctcttcgatgaggaagtccgattcgaagatatcaatcaaaacatggatgactggaacattccagaaatccctcaggatcaactat

SEQ ID NO: 13803 - DNA, 1051 bp, Glycine max
  Gm_smallRNAprecursor_6636
tggatggatgatgaataattgttgaatgtgggtgttgaataatgaatgttgtgtaagctcatgatgtttgcctatgttttcttgctaattgtgattatttggatttagcattggttctttttataatgaactcacctttgcaattttgtattgtgtgattgatacatgtgatgatcgcgaaccttgtttgtgggagcataatgacaacagtaggatgtaggaatgagattctgttgaggagccgtcaagccgacgtgatgacgttgggattattttgggagagagttatgttttgttaatcaactccttcatagttggttcatgattccttttgttgaactaaagatgtaaatttcagattttaattatatgtatgaacagattttaatttttattatgtgtatgatgtgtacgaagtttctattcctatatatatatatatatacacacacatactggtatcagagcctgatggggaagtaggaatagtgtccgtaagggcatatgttaactgaacttatggatctgaaccatgtacagtaattttaatttaaacagtatgtgtttgaacagtattttctggaagcacagcagtctgatattttagttgaatgatactgtagcagtaagtcacgtggttgagaaagggcagtaaggctaaggtgtattgttcaaataaaatattgagacataatatactggtggctataggagtttcaaactatattgtctgttataaaaaaaaaactttttcatttattcagatccaagaagttctgtaacatatagccttatggaaatatttctatggaaccaaatgaaggcaaagatattagagaatgttataatcatgtctagactattgcgatctttttcccgtatctcttttcgctcaaattcctcctcatcatcttcttcaagaaactccaatctattaaatgatcaagataaccagacccaagaggtcgccccaaaacacaatctcttcgatgaggaagtccgattcgaagatatcaatcaaaacatggatgactggaacattccagaaatc

SEQ ID NO: 13804 - DNA, 1157 bp, Glycine max
  Gm_smallRNAprecursor_6637
gaagtaggaatagtgtccgtaagggcatatgttaactgaacttatggatctgaaccatgtacagtaattttaatttaaacagtatgtgtttgaacagtattttctggaagcacagcagtctgatattttagttgaatgatactgtagcagtaagtcacgtggttgagaaagggcagtaaggctaaggtgtattgttcaaataaaatattgagacataatatactggtggctataggagtttcaaactatattgtctgttataaaaaaaaaactttttcatttattcagatccaagaagttctgtaacatatagccttatggaaatatttctatggaaccaaatgaaggcaaagatattagagaatgttataatcatgtctagactattgcgatctttttcccgtatctcttttcgctcaaattcctcctcatcatcttcttcaagaaactccaatctattaaatgatcaagataaccagacccaagaggtcgccccaaaacacaatctcttcgatgaggaagtccgattcgaagatatcaatcaaaacatggatgactggaacattccagaaatccctcaggatcaactatacattcctgaaacaattaaagacaaacacaactttgattacataatcaaaacagtagaaaacaatattcctctaggacaagatataggggaagaatttcatttactttcaaaaatttcaatttatgaacatagccgtaagtataaatatctacacatcggttgtgtacaagtagccatcaagcccttaattgatatgggcatagatgcaacagttttaatgtgtctaagagatattaggcataatcaatttgaagactccctaattggaacagtcgaaaccagcctaggacaaggtctaatatattttaattgttatccaaacaaaacagtgagtctgatggacagaaacattcttgactctctgttcttaaacatccactttcatggcctcgacatgaaagaaggatcaatcccagcagccttaatttataggatccagtacaaggtcatgaatacttgtgcatctagagtcctgttaaaacctcaaaaaggagaaacaactttgtttatcactgatatgacaaaggctaacgtttctctcccgagaaaaataaaatgggatgaa

SEQ ID NO: 13805 - DNA, 1198 bp, Glycine max
  Gm_smallRNAprecursor_6638
acagaaagaaacatattgttgatctcccttatgagaaagactttagggaaaaacaaattcccacaaaagccagaccaatccaaatgaatgaagaacttcttcaatactgtcaaaaggaaatcaaggatttgcttgataaaggcctaatctggaaaagcaaaagcccatggtcttgtgcggctttttatgtcaataaacaatctgagattgagcatggaacaccccgcttagtcataaattacaaaccactaaatcaagcattacaatggattagatatcctattccaaacaaaaaagatttgcttaacagattaaattctgcaaagatattttcaaaatttgatatgaaatctggattttggcaaatccaaatccaagaatcagataggtacaaaacgacatttactgtacctttcgggcaatatgaatggaacgtgatgtcattcggactgaagaatgccccttcagaatttcaaaaaattatgaacgatatttttaatccctattcaaaatttgtcattgtctacatagatgatgttttaatcttttcccaaaacattgaccaacatttcaaacatctccaaaccttcatacatatcatcaaacaaaatggtttggcagtctccaaatcaaaaattaatcttttccaaactcgaattcgattccttggtcacaatatatatcaaggtacaatcattccaatcgaaaggtcaatagagtttgctagcaaattccccaaccaaatcttagacaaaacccagttacaaagatttctaggttgtctaaattacgtaggagaatttgtcccatatttaagcaatattgtcaagccattgcatgataggctgaagaaaaatccgcctccttggtctgacctccatacacaaacagttaaagaaatcaaagtcaaagtccaatccataaaatgtttgtatcctcctattccacaggcattcaaaattgtcgaaactgatgcttcagacataggttatggtggcatcctcaaacaaagagtccatggccaagatcatgtcattgcatatacatcaaaacattggaatcctgcacaattaaaatattcaactgttaaaaaagaagttttagcaattgttttgtgcatttccaaatttcaatcggatttatttaatcaaaattttttaatcagggttgattgtaaatcagccaaagatattttaca

SEQ ID NO: 13806 - DNA, 1234 bp, Glycine max
  Gm_smallRNAprecursor_6639
acagaaagaaacatattgttgatctcccttatgagaaagactttagggaaaaacaaattcccacaaaagccagaccaatccaaatgaatgaagaacttcttcaatactgtcaaaaggaaatcaaggatttgcttgataaaggcctaatctggaaaagcaaaagcccatggtcttgtgcggctttttatgtcaataaacaatctgagattgagcatggaacaccccgcttagtcataaattacaaaccactaaatcaagcattacaatggattagatatcctattccaaacaaaaaagatttgcttaacagattaaattctgcaaagatattttcaaaatttgatatgaaatctggattttggcaaatccaaatccaagaatcagataggtacaaaacgacatttactgtacctttcgggcaatatgaatggaacgtgatgtcattcggactgaagaatgccccttcagaatttcaaaaaattatgaacgatatttttaatccctattcaaaatttgtcattgtctacatagatgatgttttaatcttttcccaaaacattgaccaacatttcaaacatctccaaaccttcatacatatcatcaaacaaaatggtttggcagtctccaaatcaaaaattaatcttttccaaactcgaattcgattccttggtcacaatatatatcaaggtacaatcattccaatcgaaaggtcaatagagtttgctagcaaattccccaaccaaatcttagacaaaacccagttacaaagatttctaggttgtctaaattacgtaggagaatttgtcccatatttaagcaatattgtcaagccattgcatgataggctgaagaaaaatccgcctccttggtctgacctccatacacaaacagttaaagaaatcaaagtcaaagtccaatccataaaatgtttgtatcctcctattccacaggcattcaaaattgtcgaaactgatgcttcagacataggttatggtggcatcctcaaacaaagagtccatggccaagatcatgtcattgcatatacatcaaaacattggaatcctgcacaattaaaatattcaactgttaaaaaagaagttttagcaattgttttgtgcatttccaaatttcaatcggatttatttaatcaaaattttttaatcagggttgattgtaaatcagccaaagatattttacaaaaagatgttaaaaaccttgcctcaaaacaaatttt

SEQ ID NO: 13807 - DNA, 1115 bp, Glycine max
  Gm_smallRNAprecursor_6640
tcaatagagtttgctagcaaattccccaaccaaatcttagacaaaacccagttacaaagatttctaggttgtctaaattacgtaggagaatttgtcccatatttaagcaatattgtcaagccattgcatgataggctgaagaaaaatccgcctccttggtctgacctccatacacaaacagttaaagaaatcaaagtcaaagtccaatccataaaatgtttgtatcctcctattccacaggcattcaaaattgtcgaaactgatgcttcagacataggttatggtggcatcctcaaacaaagagtccatggccaagatcatgtcattgcatatacatcaaaacattggaatcctgcacaattaaaatattcaactgttaaaaaagaagttttagcaattgttttgtgcatttccaaatttcaatcggatttatttaatcaaaattttttaatcagggttgattgtaaatcagccaaagatattttacaaaaagatgttaaaaaccttgcctcaaaacaaatttttgcaagatggcaagcaattctaagtgtctttgattttgacatagaatacatcaagggcacctcaaattcattacctgactaccttacccgtgaattcttacagaaaagtggtaatgcctcctaaggcatcgagaatctccctaaggggaggaaggagtacaggcaaaggagccagactggctcttccagagccaaccatcaagaaatcatcaacctcttctgggtcatcaacccaggctgggtcatctacccagaaaaccaatttagaagggtcatcaacccaaattgcttcaatcaaacctgagccatccactcaggaatctcccaaaccggcaaccgccaaacaaacatcagccgactatgcatggccaattgaaacccttcaggcccttcaagacatgggtctaaccaaatttccaaaaataatcaaaaaatcttgggcagacattgcctcagaatctgatgatgaatctgaatcaaatctacaaacaatgatccaaaatgcgtcaatgaccaaaacagccaccaatactaaaggaaaactacctttagccaaagctcaaacaccaaccaccaaacaaactaacaatt

SEQ ID NO: 13808 - DNA, 1189 bp, Glycine max
  Gm_smallRNAprecursor_6641
gacaatccaaatactaaaagttcttcaaccaagacactttggttcggacttgaacaaaggaatgagattttcagttccatttgatccggtaggttatacctattgggattacgttgatgcttggactaaggtgttttggcaccaaaatacccgcttcaagcattcatggctgatatatttcaagaccaatacaatttacaattttcccaattggtttttgcaatggtgggacttctttggaccaatcccagagatattcctagaaacagtccaacaaggattttctcaatttaagaaacaatacaattcgcaggaatcacgaattcccacagatcttaaatacttttcaagctttgcactgtcatggatattctcatggcaatatcgttacagcaagactgaaaagacaaaccaatatccatcattacaaagacacgcatttgtaaaatggtggacacaatttgactcatccaaagcggatccagaacaagtaaaactctggttccaatcccatccagaattcctcaaagcagctgatccagaaacttctgcgtttttgaaccaaaagtctcatctggcagcatttttagcaggatcgacatcaaaggaagtcttagctaaaaatctgaaggaagttctgcaaatgttacagcaggaagaagaagcttcatcctcaaagaaggaagaaacaagttctgctgaagaagaagaagaagaagaagatcccttttaccaaaacgaagatgattgttttggtatctgcttagattaaatttaatttcggtcacaaaaccgcatgtttgtaattaatgtgtaattaatgctggacaatactacctgtcctgtagccattaaagtcccggtcaaaactacttgtcttgtaacaaacagtcaaatagtcccggtcaaaactaccggtcttagatttttggctatataaggggtcctcaagtatgttgtgaggcaccctttcatttagccattttttcaggtttctgaagagagatgctctgaaacaagatttttgtaagtgcttctttctagattcaataaatttctatttttcatccttctctcttctccctttaccgatcctgtgcggctctgccgccgcttcagtttctttgtttatgaaaacctggggtttgtaagccggtctccggtgtgcccttgatatgtgtttttcaag

SEQ ID NO: 13809 - DNA, 1052 bp, Glycine max
  Gm_smallRNAprecursor_6642
tcaagaccaatacaatttacaattttcccaattggtttttgcaatggtgggacttctttggaccaatcccagagatattcctagaaacagtccaacaaggattttctcaatttaagaaacaatacaattcgcaggaatcacgaattcccacagatcttaaatacttttcaagctttgcactgtcatggatattctcatggcaatatcgttacagcaagactgaaaagacaaaccaatatccatcattacaaagacacgcatttgtaaaatggtggacacaatttgactcatccaaagcggatccagaacaagtaaaactctggttccaatcccatccagaattcctcaaagcagctgatccagaaacttctgcgtttttgaaccaaaagtctcatctggcagcatttttagcaggatcgacatcaaaggaagtcttagctaaaaatctgaaggaagttctgcaaatgttacagcaggaagaagaagcttcatcctcaaagaaggaagaaacaagttctgctgaagaagaagaagaagaagaagatcccttttaccaaaacgaagatgattgttttggtatctgcttagattaaatttaatttcggtcacaaaaccgcatgtttgtaattaatgtgtaattaatgctggacaatactacctgtcctgtagccattaaagtcccggtcaaaactacttgtcttgtaacaaacagtcaaatagtcccggtcaaaactaccggtcttagatttttggctatataaggggtcctcaagtatgttgtgaggcaccctttcatttagccattttttcaggtttctgaagagagatgctctgaaacaagatttttgtaagtgcttctttctagattcaataaatttctatttttcatccttctctcttctccctttaccgatcctgtgcggctctgccgccgcttcagtttctttgtttatgaaaacctggggtttgtaagccggtctccggtgtgcccttgatatgtgtttttcaagaataagtatatatattctggctttatatatatattcacttaa

SEQ ID NO: 13810 - DNA, 1159 bp, Glycine max
  Gm_smallRNAprecursor_6643
acccatctttcgggaagagttacctcatcccattttatttttctcgggagagaaacgttagcctttgtcatatcagtgataaacaaggttgtttctccttttcgaggttttaacaggactctagatgcacaagtattcatgaccttgtactggatcctataaattaaggctgctgggattgacccttctttcatgtcaaggccatgaaagtggatgtttaagaacagacagtcaagaatgtttctgtccatcagactcactgttttgtttggataacagttaaaatatattggaccttgtcctaggctggtttcgactgttccaattagggagtcttcaaattgattatgcctaatgtctcttagacacattaaaactgccgcatctatgcccatatcaattaagggcttgatggctacttgtacacaaccgatgtgtagatatttatacttacggctatgttcataaattgaattttttgaaagtaaatgaaattcttcccctatatcttgtcctagaggaatattgttttcgactgttttgattatgtaatcaaagttgtgtttgtcttttattgtttcaggaacgtatagttgatcctgagggatttctggaatgttccagtcatccatgttttgattgatatcttcgaatcggacttcctcatcgaagagattgtgttttggggcgacctcttgggtctagatatcttgatcatttaataaattggaatttcttgaagaagatgatgaggaggagtttgagcaaaaagaaatacggaaaaaagatcataatggtctagacatgattatatatatatatatatattccaaagcaatttaggttagaatagattggagcagaatcatattttaaatcgaaattgacaggacataaaagaagaaaaatcaatataaaatggtttgacttgttactgataaaatccagcttaattgatatataaacatgttaactcaggttcaattcctcgcatcgtgtatgcaagccgcaaaactacgttagaagaggcaagactaatgtctttgattactaggtgaaagatacgcatatgatatattaaataatcgtatggccttctttttaaaagctgtaaaccgcaaatgcctccttagttgtcaaggaagctgagtgtataatt

SEQ ID NO: 13811 - DNA, 1218 bp, Glycine max
  Gm_smallRNAprecursor_6644
tccctaggcagagcttctctctctaaaaacctgattctgagactatctaaaagggtgcctcaaagggaacgaggactccttaaaatagacctagaattttactgtttctacagtgtcggtaatgtttaccggagctgttacaaaaaaattttacaaattacattattatcgggtaccgagtaattagttacaataattcgttattactacaactaactaatcatcatctaacgatataccaaaacagtcatcctcattctggtagaatgggtcatcttcttggtcatcattattttcggatgattcggcttccttcttggggggttcttcttcttcttcctattgaagtaattggagaacctccttaagattttgagcaagactttctttagattttgagcttgccatgaatgctgcaagttgagacttctgattcagaaacaaagatgtctctggatcagcaggtttgagaaacttagggttgctctgaaaccagttcttgacttgttctggagcagcctttgaggtatcgaattgtgaccaccactttacaaaggcgtgtctttgcaatggtggatactgcttgctattttcagagcctgatggggaagtaggaatactgtccgtaaggacatatgttaacaaattttatggatctgaaactgaaacattgtatagtacgagtaatattttattttgatttgtacagtacatgtttgaacagtacttcctggaagtacaacagtctaatattttagttgaatggtactgtagcagtaagacccgtggtggataaagggcagtaaggctaaggtgtactgtttaaccaaaatatcaagacataatatactggtggctataggatcaccgttcaaactaaaaaaaaaaagagtattttcttaaaaataattcagatccagaaaattttgttacgtatctacttacggaaatatttctatggaaccaaatgagggcgaagatattagaggattttataatcatgtctggactcctgcgttctttttcgcgtatttcctttcggtctaattcctcttcattaacttcttccagaaattcaaacttattaaatgatcaagataaccaggcccaagaggttgcccctaaacacaatctcttcgatgaggaagtccgattcgaagatattaatcaaaacatggatgactggaacatcccagaaatccctcaggatcaactata

SEQ ID NO: 13812 - DNA, 1233 bp, Glycine max
  Gm_smallRNAprecursor_6645
taatcatcatctaacgatataccaaaacagtcatcctcattctggtagaatgggtcatcttcttggtcatcattattttcggatgattcggcttccttcttggggggttcttcttcttcttcctattgaagtaattggagaacctccttaagattttgagcaagactttctttagattttgagcttgccatgaatgctgcaagttgagacttctgattcagaaacaaagatgtctctggatcagcaggtttgagaaacttagggttgctctgaaaccagttcttgacttgttctggagcagcctttgaggtatcgaattgtgaccaccactttacaaaggcgtgtctttgcaatggtggatactgcttgctattttcagagcctgatggggaagtaggaatactgtccgtaaggacatatgttaacaaattttatggatctgaaactgaaacattgtatagtacgagtaatattttattttgatttgtacagtacatgtttgaacagtacttcctggaagtacaacagtctaatattttagttgaatggtactgtagcagtaagacccgtggtggataaagggcagtaaggctaaggtgtactgtttaaccaaaatatcaagacataatatactggtggctataggatcaccgttcaaactaaaaaaaaaaagagtattttcttaaaaataattcagatccagaaaattttgttacgtatctacttacggaaatatttctatggaaccaaatgagggcgaagatattagaggattttataatcatgtctggactcctgcgttctttttcgcgtatttcctttcggtctaattcctcttcattaacttcttccagaaattcaaacttattaaatgatcaagataaccaggcccaagaggttgcccctaaacacaatctcttcgatgaggaagtccgattcgaagatattaatcaaaacatggatgactggaacatcccagaaatccctcaggatcaactatacattcctgaaacaattaaagataaacacaactttgactacataatcaaaacagtagaaaacaatattcctctagggcaagacataggggaagaattccatttactttcaaaaaattcaatttatgaacatagtcgaaagtataaatatttacacatcggctgggtacaagtagtcatcaagcccttaatagacatgggtatagatgcagcagtgttaatgtgtctaagagat

SEQ ID NO: 13813 - DNA, 1121 bp, Glycine max
  Gm_smallRNAprecursor_6646
gtaatgtcattcagactaaagaatgccccttcaaaatttcaaaaaatcatgaatgatattttcaatccttattcaaaattcgtcattgtttacattgatgatgttttaatcttctcccaagatattgatcaacatttcaaacacctccaaactttcatccatattattaaacaaaatggtttggcagtctccaaatcaaaaatcaatcttttccagacacgaatatgattccttgggcacaatatataccaaggcacaatcatcccaatagaaagatcaatagaatttgccagcaaattccctaaccaaatcttggataaaacccagttacaacgatttctggggtgcctaaattatgtaggataatttgtcccctatctaaacaatattgtcaaaccattacatgataggctgaaaaagaatccacctccttggtctgacgtccatactcaaacagttaaagaaatcaaagtcaaagtccaatccataaaatgtttgtatcttcccattccacaggcattcaaaattgtcgaaactgatgcatcacacatcggttatggtggcatcctcaaacaacaagtacatggtcaagaacatgtcattgcatatacttcaaaacattggaatcctgcacaattaaaatattcaactgttaaaaaagaagttttagcaattgttttgtgcatttccaaatttaaatctgatttattgaatcaaaaatttttagtaagggttgactgcaaatcagccaaagatattttacaaaaggatgtaaaaaaccttgcctcaaaacaaatttttgcaagatggcaaacaattttaagcgtctttgattttaacatagaatatatcaagggctcttcaaactctctacctgactacctcacctgtgaatttttacagaaaattctcgatgcctcctaaggtgtctagctcctctccagcagaggaggaagatcaggtactaaaggaaaagatgttctattggctctaccagagccaataaccaagaaggcaaccgcgtcatcttctgggtcacctacccagactgggtcatcaacccagaaaggaaagcttgaagggtcattgacccagataactaccattaaacctgagtcatc

SEQ ID NO: 13814 - DNA, 1122 bp, Glycine max
  Gm_smallRNAprecursor_6647
gtaatgtcattcagactaaagaatgccccttcaaaatttcaaaaaatcatgaatgatattttcaatccttattcaaaattcgtcattgtttacattgatgatgttttaatcttctcccaagatattgatcaacatttcaaacacctccaaactttcatccatattattaaacaaaatggtttggcagtctccaaatcaaaaatcaatcttttccagacacgaatatgattccttgggcacaatatataccaaggcacaatcatcccaatagaaagatcaatagaatttgccagcaaattccctaaccaaatcttggataaaacccagttacaacgatttctggggtgcctaaattatgtaggataatttgtcccctatctaaacaatattgtcaaaccattacatgataggctgaaaaagaatccacctccttggtctgacgtccatactcaaacagttaaagaaatcaaagtcaaagtccaatccataaaatgtttgtatcttcccattccacaggcattcaaaattgtcgaaactgatgcatcacacatcggttatggtggcatcctcaaacaacaagtacatggtcaagaacatgtcattgcatatacttcaaaacattggaatcctgcacaattaaaatattcaactgttaaaaaagaagttttagcaattgttttgtgcatttccaaatttaaatctgatttattgaatcaaaaatttttagtaagggttgactgcaaatcagccaaagatattttacaaaaggatgtaaaaaaccttgcctcaaaacaaatttttgcaagatggcaaacaattttaagcgtctttgattttaacatagaatatatcaagggctcttcaaactctctacctgactacctcacctgtgaatttttacagaaaattctcgatgcctcctaaggtgtctagctcctctccagcagaggaggaagatcaggtactaaaggaaaagatgttctattggctctaccagagccaataaccaagaaggcaaccgcgtcatcttctgggtcacctacccagactgggtcatcaacccagaaaggaaagcttgaagggtcattgacccagataactaccattaaacctgagtcatca

SEQ ID NO: 13815 - DNA, 1032 bp, Glycine max
  Gm_smallRNAprecursor_6648
gccccttcaaaatttcaaaaaatcatgaatgatattttcaatccttattcaaaattcgtcattgtttacattgatgatgttttaatcttctcccaagatattgatcaacatttcaaacacctccaaactttcatccatattattaaacaaaatggtttggcagtctccaaatcaaaaatcaatcttttccagacacgaatatgattccttgggcacaatatataccaaggcacaatcatcccaatagaaagatcaatagaatttgccagcaaattccctaaccaaatcttggataaaacccagttacaacgatttctggggtgcctaaattatgtaggataatttgtcccctatctaaacaatattgtcaaaccattacatgataggctgaaaaagaatccacctccttggtctgacgtccatactcaaacagttaaagaaatcaaagtcaaagtccaatccataaaatgtttgtatcttcccattccacaggcattcaaaattgtcgaaactgatgcatcacacatcggttatggtggcatcctcaaacaacaagtacatggtcaagaacatgtcattgcatatacttcaaaacattggaatcctgcacaattaaaatattcaactgttaaaaaagaagttttagcaattgttttgtgcatttccaaatttaaatctgatttattgaatcaaaaatttttagtaagggttgactgcaaatcagccaaagatattttacaaaaggatgtaaaaaaccttgcctcaaaacaaatttttgcaagatggcaaacaattttaagcgtctttgattttaacatagaatatatcaagggctcttcaaactctctacctgactacctcacctgtgaatttttacagaaaattctcgatgcctcctaaggtgtctagctcctctccagcagaggaggaagatcaggtactaaaggaaaagatgttctattggctctaccagagccaataaccaagaaggcaaccgcgtcatcttctgggtcacctacccagactgggtca

SEQ ID NO: 13816 - DNA, 1198 bp, Glycine max
  Gm_smallRNAprecursor_6649
tagctcctctccagcagaggaggaagatcaggtactaaaggaaaagatgttctattggctctaccagagccaataaccaagaaggcaaccgcgtcatcttctgggtcacctacccagactgggtcatcaacccagaaaggaaagcttgaagggtcattgacccagataactaccattaaacctgagtcatcaactcaggaatctccaaaaccaacaacaacaaaacagatcgtggctgactatgcctagtcaatacaaactctcctggccttagaagacataggcctcaccagagtaccaaaattggccaaaaagacctgggcagaaatggcctcagaatcagacgatgattctgaaacagacctgcaaaaacaaatccaaaaggccaaacaaaccaaaactgtccgtaaccagaaaccaagccaatcgttgactcaacaagaatcaacaccacaacccagcaacaactatatttcaaaaaacaaattcttcaatattttacaaatggaaccagaatactgggacaagaatccttttaaggcaactgccaaagtatttcccccgggatttcattataggccaacagccacaaacaaaaccagaaaattctatgaattcattctaatagatacaaactccgtatctattaaacatttcaaagaccccaaagatccaaacctaaacacccactccacaatccagatcctaaaggtgatgcagccatgacattatggctcaaacttaaaccaacccaaaaaattttctgcaccttttgaccttgcaggatataattattgggattacattgacgcctggaccaatgtgttctagcatcaaaatagtaaattcaagcattcatggctaatttacttcaaaaataacactgtgtataattttcaaaattggttcctccaatggtggaactacttcgtaccaattccacagatatttccagaagaagtccaacaggtattccaacaattcggcaagctcttcaatagcaaggaatcaagaattccggcagatttaaaatacttttccagttttgccttgtcatggattttttcatggcaatacggatatggaaaaactgaaaatagcaagcagtatccaccattgtagagacacgccattgtaaagtggtggtcacaattcgatacctcaaaggctgctccagaacaagtcaagaactggtttc

SEQ ID NO: 13817 - DNA, 1137 bp, Glycine max
  Gm_smallRNAprecursor_6650
taaggcaactgccaaagtatttcccccgggatttcattataggccaacagccacaaacaaaaccagaaaattctatgaattcattctaatagatacaaactccgtatctattaaacatttcaaagaccccaaagatccaaacctaaacacccactccacaatccagatcctaaaggtgatgcagccatgacattatggctcaaacttaaaccaacccaaaaaattttctgcaccttttgaccttgcaggatataattattgggattacattgacgcctggaccaatgtgttctagcatcaaaatagtaaattcaagcattcatggctaatttacttcaaaaataacactgtgtataattttcaaaattggttcctccaatggtggaactacttcgtaccaattccacagatatttccagaagaagtccaacaggtattccaacaattcggcaagctcttcaatagcaaggaatcaagaattccggcagatttaaaatacttttccagttttgccttgtcatggattttttcatggcaatacggatatggaaaaactgaaaatagcaagcagtatccaccattgtagagacacgccattgtaaagtggtggtcacaattcgatacctcaaaggctgctccagaacaagtcaagaactggtttcagagcaaccctgagtttctcaaacctgctgattcagaaacaaagatgtctctggctcagaagtctcaacttgcagcattcttggcaagctcaaaatctaaagaaagtcttgctcagaatcttaaggaggttctccaattacttcaacaggaagaagaagaagaaccccccaagaaggaagccgaatcatccgaaaataatgatgaccaagaagatgacccattctaccaaaatgaggatgactgttttggtatatcgttagatgatgattagttagttgtagtaatcacaaattattgtaactaattactcggtacccgataataatgtaatttgtaaaacgtttttgtaacagttccggtaaacattaccgacactgtagaaacagtaaaattctaggtctatttaaaggagtcctcgttccctttgggaggcacccttttagatagtctcagaatcaggtttttagagagaga

SEQ ID NO: 13818 - DNA, 1136 bp, Glycine max
  Gm_smallRNAprecursor_6651
aaggcaactgccaaagtatttcccccgggatttcattataggccaacagccacaaacaaaaccagaaaattctatgaattcattctaatagatacaaactccgtatctattaaacatttcaaagaccccaaagatccaaacctaaacacccactccacaatccagatcctaaaggtgatgcagccatgacattatggctcaaacttaaaccaacccaaaaaattttctgcaccttttgaccttgcaggatataattattgggattacattgacgcctggaccaatgtgttctagcatcaaaatagtaaattcaagcattcatggctaatttacttcaaaaataacactgtgtataattttcaaaattggttcctccaatggtggaactacttcgtaccaattccacagatatttccagaagaagtccaacaggtattccaacaattcggcaagctcttcaatagcaaggaatcaagaattccggcagatttaaaatacttttccagttttgccttgtcatggattttttcatggcaatacggatatggaaaaactgaaaatagcaagcagtatccaccattgtagagacacgccattgtaaagtggtggtcacaattcgatacctcaaaggctgctccagaacaagtcaagaactggtttcagagcaaccctgagtttctcaaacctgctgattcagaaacaaagatgtctctggctcagaagtctcaacttgcagcattcttggcaagctcaaaatctaaagaaagtcttgctcagaatcttaaggaggttctccaattacttcaacaggaagaagaagaagaaccccccaagaaggaagccgaatcatccgaaaataatgatgaccaagaagatgacccattctaccaaaatgaggatgactgttttggtatatcgttagatgatgattagttagttgtagtaatcacaaattattgtaactaattactcggtacccgataataatgtaatttgtaaaacgtttttgtaacagttccggtaaacattaccgacactgtagaaacagtaaaattctaggtctatttaaaggagtcctcgttccctttgggaggcacccttttagatagtctcagaatcaggtttttagagagaga

SEQ ID NO: 13819 - DNA, 1080 bp, Glycine max
  Gm_smallRNAprecursor_6652
atgattttgttttagaaacaatggccctatttgatacaggggctgattcaaactgcattttagaaggattaattcctacaaaattctttgagaaaacctcagaaaaattaagtacggcaaacggctcaaaattaaaaattaattttaagctatcaaatgcaataattgaaaaccaaggtcttaagattaacacaaactttcttctagtaaaaaaccttaagaatgaagtaatcttaggaacacccttcattagagccctgtttcccatccaaatatctaatgaaggaataaccacaaattatttaggaagaaaaattatatttaatttttctactaaaccaatttccagaaatataaatcttatagaaaataagattaatcaaattaacttcttaaaagaagaagtatcttttaataatattcagatacaactgggaaaaccccaagtaaaagaaagaattcaatctttattaaatcatattgaatcgaccgtttgttctgaattgccacatgcattttgggacagaaagaaacatattgtcgatctcccttatgagaaagacttaagggaaaaacaaattcccacaaaagccagaccaatccaaatgaatgaagaacttcttcaatattgtcaaaaggaaatcaaggatttgcttgataaaggcctaatccggaaaagcaaaagcccatggtcttgtgcggctttttatgttaacaaacaatctgagattgagcgtggaacaccccgcttagtcataaattacaaaccattaaatcaagcattacaatggattagatatcctattccaaacaaaaaagatttgcgtaacagattaaattctgcaaagatattttcaaaatttgatatgaaatctggattttggcaaatccaaatccaagaatcagataggtacaaaacagcgtttactgtacctttcgggcaatatgaatggaacgtgatgccattcggactgaagaatgccccttcagaatttcaaaaaattatgaacgatatttttaatccttattcaaaatttgtcattgtctacatagatgatgttttaatcttttcccaaaaca

SEQ ID NO: 13820 - DNA, 1073 bp, Glycine max
  Gm_smallRNAprecursor_6653
tgtacctttcgggcaatatgaatggaacgtgatgccattcggactgaagaatgccccttcagaatttcaaaaaattatgaacgatatttttaatccttattcaaaatttgtcattgtctacatagatgatgttttaatcttttcccaaaacattgaccaacatttcaaacatctccaaaccttcatacatatcatcaaacaaaatggtttggcagtctccaaatcaaaaatcaatcttttccaaactcgaattcgattccttggtcacaatatatatcaaggtacaatcattccaatcgaaaggtcaatagagtttgctagcaaattccccaaccaaatcttagacaaaacccagttacaaagatttctaggttgtctaaattacgtaggagaatttgtcccttatttaaataatattgtcaagccattacatgataggctgaagaaaaatccgcctccttggtctgacctccatacacaaacggttaaagaaatcaaagtcaaagtccaatccattaaatgtctgtatcttcctattccacaggcatttaaaattgtcgaaactgatgcttcagacataggttatggtggcatcctcaaataaagagtccatggccaagatcatgtcattgcatatacatcaaaacattggaatcctgcacaattaaaatattcaactattaaaaaagaggctttagcaattgttttgtgcatttccaaatttcaatcggatttattaaaccaaaaatttttaatcagggttgattgtaaatcagccaaagatattttacaaaaagatgttaaaaaccttgcctcaaaacaaatttttgcacgatggcaagcaattttaagtgtctttgattttgacatagaatacatcaagggcacctcaaattcactacctgactaccttacccgtgaattcttacagaaaagtggtaatgcctcctaaggcatcgggaatctccctacggggaggaaggagtacaggcaaaggagccaggctggctcttccagagccaaccatcaagaaatcatctacctcttctgggtcaccaacccaggctgggtca

SEQ ID NO: 13821 - DNA, 1071 bp, Glycine max
  Gm_smallRNAprecursor_6654
tacctttcgggcaatatgaatggaacgtgatgccattcggactgaagaatgccccttcagaatttcaaaaaattatgaacgatatttttaatccttattcaaaatttgtcattgtctacatagatgatgttttaatcttttcccaaaacattgaccaacatttcaaacatctccaaaccttcatacatatcatcaaacaaaatggtttggcagtctccaaatcaaaaatcaatcttttccaaactcgaattcgattccttggtcacaatatatatcaaggtacaatcattccaatcgaaaggtcaatagagtttgctagcaaattccccaaccaaatcttagacaaaacccagttacaaagatttctaggttgtctaaattacgtaggagaatttgtcccttatttaaataatattgtcaagccattacatgataggctgaagaaaaatccgcctccttggtctgacctccatacacaaacggttaaagaaatcaaagtcaaagtccaatccattaaatgtctgtatcttcctattccacaggcatttaaaattgtcgaaactgatgcttcagacataggttatggtggcatcctcaaataaagagtccatggccaagatcatgtcattgcatatacatcaaaacattggaatcctgcacaattaaaatattcaactattaaaaaagaggctttagcaattgttttgtgcatttccaaatttcaatcggatttattaaaccaaaaatttttaatcagggttgattgtaaatcagccaaagatattttacaaaaagatgttaaaaaccttgcctcaaaacaaatttttgcacgatggcaagcaattttaagtgtctttgattttgacatagaatacatcaagggcacctcaaattcactacctgactaccttacccgtgaattcttacagaaaagtggtaatgcctcctaaggcatcgggaatctccctacggggaggaaggagtacaggcaaaggagccaggctggctcttccagagccaaccatcaagaaatcatctacctcttctgggtcaccaacccaggctgggtca

SEQ ID NO: 13822 - DNA, 1115 bp, Glycine max
  Gm_smallRNAprecursor_6655
tcaatagagtttgctagcaaattccccaaccaaatcttagacaaaacccagttacaaagatttctaggttgtctaaattacgtaggagaatttgtcccttatttaaataatattgtcaagccattacatgataggctgaagaaaaatccgcctccttggtctgacctccatacacaaacggttaaagaaatcaaagtcaaagtccaatccattaaatgtctgtatcttcctattccacaggcatttaaaattgtcgaaactgatgcttcagacataggttatggtggcatcctcaaataaagagtccatggccaagatcatgtcattgcatatacatcaaaacattggaatcctgcacaattaaaatattcaactattaaaaaagaggctttagcaattgttttgtgcatttccaaatttcaatcggatttattaaaccaaaaatttttaatcagggttgattgtaaatcagccaaagatattttacaaaaagatgttaaaaaccttgcctcaaaacaaatttttgcacgatggcaagcaattttaagtgtctttgattttgacatagaatacatcaagggcacctcaaattcactacctgactaccttacccgtgaattcttacagaaaagtggtaatgcctcctaaggcatcgggaatctccctacggggaggaaggagtacaggcaaaggagccaggctggctcttccagagccaaccatcaagaaatcatctacctcttctgggtcaccaacccaggctgggtcatctacccagaaaaccaatttagaagggtcatcaacccagattgcctcaatcaaacctgagccatccactcaggaatctcccaaaccggcaaccgccaaacaaacatcggccgactatgcatggccaattgaaacccttcaggcccttcaagacatgggtctgaccaaatttccaaaaataatcaaaaaatcttgggcagacattgcctcagaatctgatgatgaatctgaatcaaatttacaaacaatgatccaaaatgcgtcaatgaccaaaacaaccaccaatactaaaggaaaactacctttagccaaagctcaaacaccacctaccaaacaaactaacaatt

SEQ ID NO: 13823 - DNA, 1174 bp, Glycine max
  Gm_smallRNAprecursor_6656
ataaagagtccatggccaagatcatgtcattgcatatacatcaaaacattggaatcctgcacaattaaaatattcaactattaaaaaagaggctttagcaattgttttgtgcatttccaaatttcaatcggatttattaaaccaaaaatttttaatcagggttgattgtaaatcagccaaagatattttacaaaaagatgttaaaaaccttgcctcaaaacaaatttttgcacgatggcaagcaattttaagtgtctttgattttgacatagaatacatcaagggcacctcaaattcactacctgactaccttacccgtgaattcttacagaaaagtggtaatgcctcctaaggcatcgggaatctccctacggggaggaaggagtacaggcaaaggagccaggctggctcttccagagccaaccatcaagaaatcatctacctcttctgggtcaccaacccaggctgggtcatctacccagaaaaccaatttagaagggtcatcaacccagattgcctcaatcaaacctgagccatccactcaggaatctcccaaaccggcaaccgccaaacaaacatcggccgactatgcatggccaattgaaacccttcaggcccttcaagacatgggtctgaccaaatttccaaaaataatcaaaaaatcttgggcagacattgcctcagaatctgatgatgaatctgaatcaaatttacaaacaatgatccaaaatgcgtcaatgaccaaaacaaccaccaatactaaaggaaaactacctttagccaaagctcaaacaccacctaccaaacaaactaacaattatatttataaaaataaattgttaactgttttgcagatggaacctgaattttgggacaaaaatcccttcaaggcaacggccaaggctttcccactaggatttcactacaaaccaaccaccatcctgaagacaagaactttttatgaattgattttggtagattcaaactcagtatctatcaaacatttcaaagatccaaaagaccaaaccttaaacacccactcaaccatccaaatactaaaagttcttcaaccaagacactttggtttggacttgaacaaaggaaagagattttcagttccatttgatccggtaggttatacctattgggattacgttgatgcttggactaaggt

SEQ ID NO: 13824 - DNA, 1173 bp, Glycine max
  Gm_smallRNAprecursor_6657
taaagagtccatggccaagatcatgtcattgcatatacatcaaaacattggaatcctgcacaattaaaatattcaactattaaaaaagaggctttagcaattgttttgtgcatttccaaatttcaatcggatttattaaaccaaaaatttttaatcagggttgattgtaaatcagccaaagatattttacaaaaagatgttaaaaaccttgcctcaaaacaaatttttgcacgatggcaagcaattttaagtgtctttgattttgacatagaatacatcaagggcacctcaaattcactacctgactaccttacccgtgaattcttacagaaaagtggtaatgcctcctaaggcatcgggaatctccctacggggaggaaggagtacaggcaaaggagccaggctggctcttccagagccaaccatcaagaaatcatctacctcttctgggtcaccaacccaggctgggtcatctacccagaaaaccaatttagaagggtcatcaacccagattgcctcaatcaaacctgagccatccactcaggaatctcccaaaccggcaaccgccaaacaaacatcggccgactatgcatggccaattgaaacccttcaggcccttcaagacatgggtctgaccaaatttccaaaaataatcaaaaaatcttgggcagacattgcctcagaatctgatgatgaatctgaatcaaatttacaaacaatgatccaaaatgcgtcaatgaccaaaacaaccaccaatactaaaggaaaactacctttagccaaagctcaaacaccacctaccaaacaaactaacaattatatttataaaaataaattgttaactgttttgcagatggaacctgaattttgggacaaaaatcccttcaaggcaacggccaaggctttcccactaggatttcactacaaaccaaccaccatcctgaagacaagaactttttatgaattgattttggtagattcaaactcagtatctatcaaacatttcaaagatccaaaagaccaaaccttaaacacccactcaaccatccaaatactaaaagttcttcaaccaagacactttggtttggacttgaacaaaggaaagagattttcagttccatttgatccggtaggttatacctattgggattacgttgatgcttggactaaggt

SEQ ID NO: 13825 - DNA, 1173 bp, Glycine max; identical to SEQ ID NO: 13824
  Gm_smallRNAprecursor_6658

SEQ ID NO: 13826 - DNA, 1130 bp, Glycine max
  Gm_smallRNAprecursor_6659
caaacctgagccatccactcaggaatctcccaaaccggcaaccgccaaacaaacatcggccgactatgcatggccaattgaaacccttcaggcccttcaagacatgggtctgaccaaatttccaaaaataatcaaaaaatcttgggcagacattgcctcagaatctgatgatgaatctgaatcaaatttacaaacaatgatccaaaatgcgtcaatgaccaaaacaaccaccaatactaaaggaaaactacctttagccaaagctcaaacaccacctaccaaacaaactaacaattatatttataaaaataaattgttaactgttttgcagatggaacctgaattttgggacaaaaatcccttcaaggcaacggccaaggctttcccactaggatttcactacaaaccaaccaccatcctgaagacaagaactttttatgaattgattttggtagattcaaactcagtatctatcaaacatttcaaagatccaaaagaccaaaccttaaacacccactcaaccatccaaatactaaaagttcttcaaccaagacactttggtttggacttgaacaaaggaaagagattttcagttccatttgatccggtaggttatacctattgggattacgttgatgcttggactaaggtgttttggcaccaaaatacccgcttcaaacattcatggctgatatatttcaagaccaacacaatttacaattttcccaattggtttttacaatggtgggacttctttggaccaatcccagagatattcccagaaacggtccaacaaggattttcccaatttaagaaacaatacaattcgcaggaatcacgaattccagcagatcttaaatacttttcaagctttgcactgtcatggatattctcatggcaatatcgttacagcaagactgaaaagacaaaccaatatccatcactacaaagacacgcatttgtaaaatggtggacacaatttgactcatccaaagcggatccagaacaagtaaaactatggttccaatcccatctagaattcctcaaagcagctgatccagagacttctgtgtttttgaaccaaaagtctcatctggcagcatttttagcaggatcgacatcaaaggagg

SEQ ID NO: 13827 - DNA, 1087 bp, Glycine max
  Gm_smallRNAprecursor_6660
tgagccatccactcaggaatctcccaaaccggcaaccgccaaacaaacatcggccgactatgcatggccaattgaaacccttcaggcccttcaagacatgggtctgaccaaatttccaaaaataatcaaaaaatcttgggcagacattgcctcagaatctgatgatgaatctgaatcaaatttacaaacaatgatccaaaatgcgtcaatgaccaaaacaaccaccaatactaaaggaaaactacctttagccaaagctcaaacaccacctaccaaacaaactaacaattatatttataaaaataaattgttaactgttttgcagatggaacctgaattttgggacaaaaatcccttcaaggcaacggccaaggctttcccactaggatttcactacaaaccaaccaccatcctgaagacaagaactttttatgaattgattttggtagattcaaactcagtatctatcaaacatttcaaagatccaaaagaccaaaccttaaacacccactcaaccatccaaatactaaaagttcttcaaccaagacactttggtttggacttgaacaaaggaaagagattttcagttccatttgatccggtaggttatacctattgggattacgttgatgcttggactaaggtgttttggcaccaaaatacccgcttcaaacattcatggctgatatatttcaagaccaacacaatttacaattttcccaattggtttttacaatggtgggacttctttggaccaatcccagagatattcccagaaacggtccaacaaggattttcccaatttaagaaacaatacaattcgcaggaatcacgaattccagcagatcttaaatacttttcaagctttgcactgtcatggatattctcatggcaatatcgttacagcaagactgaaaagacaaaccaatatccatcactacaaagacacgcatttgtaaaatggtggacacaatttgactcatccaaagcggatccagaacaagtaaaactatggttccaatcccatctagaattcctcaaagcagctgatccagagacttctgtgtttttgaaccaaaagtctcat

SEQ ID NO: 13828 - DNA, 1124 bp, Glycine max
  Gm_smallRNAprecursor_6661
tgagccatccactcaggaatctcccaaaccggcaaccgccaaacaaacatcggccgactatgcatggccaattgaaacccttcaggcccttcaagacatgggtctgaccaaatttccaaaaataatcaaaaaatcttgggcagacattgcctcagaatctgatgatgaatctgaatcaaatttacaaacaatgatccaaaatgcgtcaatgaccaaaacaaccaccaatactaaaggaaaactacctttagccaaagctcaaacaccacctaccaaacaaactaacaattatatttataaaaataaattgttaactgttttgcagatggaacctgaattttgggacaaaaatcccttcaaggcaacggccaaggctttcccactaggatttcactacaaaccaaccaccatcctgaagacaagaactttttatgaattgattttggtagattcaaactcagtatctatcaaacatttcaaagatccaaaagaccaaaccttaaacacccactcaaccatccaaatactaaaagttcttcaaccaagacactttggtttggacttgaacaaaggaaagagattttcagttccatttgatccggtaggttatacctattgggattacgttgatgcttggactaaggtgttttggcaccaaaatacccgcttcaaacattcatggctgatatatttcaagaccaacacaatttacaattttcccaattggtttttacaatggtgggacttctttggaccaatcccagagatattcccagaaacggtccaacaaggattttcccaatttaagaaacaatacaattcgcaggaatcacgaattccagcagatcttaaatacttttcaagctttgcactgtcatggatattctcatggcaatatcgttacagcaagactgaaaagacaaaccaatatccatcactacaaagacacgcatttgtaaaatggtggacacaatttgactcatccaaagcggatccagaacaagtaaaactatggttccaatcccatctagaattcctcaaagcagctgatccagagacttctgtgtttttgaaccaaaagtctcatctggcagcatttttagcaggatcgacatcaaaggagg

SEQ ID NO: 13829 - DNA, 1157 bp, Glycine max
  Gm_smallRNAprecursor_6662
cactcaggaatctcccaaaccggcaaccgccaaacaaacatcggccgactatgcatggccaattgaaacccttcaggcccttcaagacatgggtctgaccaaatttccaaaaataatcaaaaaatcttgggcagacattgcctcagaatctgatgatgaatctgaatcaaatttacaaacaatgatccaaaatgcgtcaatgaccaaaacaaccaccaatactaaaggaaaactacctttagccaaagctcaaacaccacctaccaaacaaactaacaattatatttataaaaataaattgttaactgttttgcagatggaacctgaattttgggacaaaaatcccttcaaggcaacggccaaggctttcccactaggatttcactacaaaccaaccaccatcctgaagacaagaactttttatgaattgattttggtagattcaaactcagtatctatcaaacatttcaaagatccaaaagaccaaaccttaaacacccactcaaccatccaaatactaaaagttcttcaaccaagacactttggtttggacttgaacaaaggaaagagattttcagttccatttgatccggtaggttatacctattgggattacgttgatgcttggactaaggtgttttggcaccaaaatacccgcttcaaacattcatggctgatatatttcaagaccaacacaatttacaattttcccaattggtttttacaatggtgggacttctttggaccaatcccagagatattcccagaaacggtccaacaaggattttcccaatttaagaaacaatacaattcgcaggaatcacgaattccagcagatcttaaatacttttcaagctttgcactgtcatggatattctcatggcaatatcgttacagcaagactgaaaagacaaaccaatatccatcactacaaagacacgcatttgtaaaatggtggacacaatttgactcatccaaagcggatccagaacaagtaaaactatggttccaatcccatctagaattcctcaaagcagctgatccagagacttctgtgtttttgaaccaaaagtctcatctggcagcatttttagcaggatcgacatcaaaggaggtcttagctaaaaatctgaaggaagttctacaaatgttacaac

SEQ ID NO: 13830 - DNA, 1247 bp, Glycine max
  Gm_smallRNAprecursor_6663
cccttcaagacatgggtctgaccaaatttccaaaaataatcaaaaaatcttgggcagacattgcctcagaatctgatgatgaatctgaatcaaatttacaaacaatgatccaaaatgcgtcaatgaccaaaacaaccaccaatactaaaggaaaactacctttagccaaagctcaaacaccacctaccaaacaaactaacaattatatttataaaaataaattgttaactgttttgcagatggaacctgaattttgggacaaaaatcccttcaaggcaacggccaaggctttcccactaggatttcactacaaaccaaccaccatcctgaagacaagaactttttatgaattgattttggtagattcaaactcagtatctatcaaacatttcaaagatccaaaagaccaaaccttaaacacccactcaaccatccaaatactaaaagttcttcaaccaagacactttggtttggacttgaacaaaggaaagagattttcagttccatttgatccggtaggttatacctattgggattacgttgatgcttggactaaggtgttttggcaccaaaatacccgcttcaaacattcatggctgatatatttcaagaccaacacaatttacaattttcccaattggtttttacaatggtgggacttctttggaccaatcccagagatattcccagaaacggtccaacaaggattttcccaatttaagaaacaatacaattcgcaggaatcacgaattccagcagatcttaaatacttttcaagctttgcactgtcatggatattctcatggcaatatcgttacagcaagactgaaaagacaaaccaatatccatcactacaaagacacgcatttgtaaaatggtggacacaatttgactcatccaaagcggatccagaacaagtaaaactatggttccaatcccatctagaattcctcaaagcagctgatccagagacttctgtgtttttgaaccaaaagtctcatctggcagcatttttagcaggatcgacatcaaaggaggtcttagctaaaaatctgaaggaagttctacaaatgttacaacaggaagaagaagcttcatcctcaaaaaaggaagaaacaagttctgctgaagacgaagaagatcccttttaccaaaacgaagatgattgttttggtatctgtttagattaaatttaatttcggtcacaaaaccgtctgtttgtaatttatgtgtaattaatgctggac

SEQ ID NO: 13831 - DNA, 1248 bp, Glycine max
  Gm_smallRNAprecursor_6664
cccttcaagacatgggtctgaccaaatttccaaaaataatcaaaaaatcttgggcagacattgcctcagaatctgatgatgaatctgaatcaaatttacaaacaatgatccaaaatgcgtcaatgaccaaaacaaccaccaatactaaaggaaaactacctttagccaaagctcaaacaccacctaccaaacaaactaacaattatatttataaaaataaattgttaactgttttgcagatggaacctgaattttgggacaaaaatcccttcaaggcaacggccaaggctttcccactaggatttcactacaaaccaaccaccatcctgaagacaagaactttttatgaattgattttggtagattcaaactcagtatctatcaaacatttcaaagatccaaaagaccaaaccttaaacacccactcaaccatccaaatactaaaagttcttcaaccaagacactttggtttggacttgaacaaaggaaagagattttcagttccatttgatccggtaggttatacctattgggattacgttgatgcttggactaaggtgttttggcaccaaaatacccgcttcaaacattcatggctgatatatttcaagaccaacacaatttacaattttcccaattggtttttacaatggtgggacttctttggaccaatcccagagatattcccagaaacggtccaacaaggattttcccaatttaagaaacaatacaattcgcaggaatcacgaattccagcagatcttaaatacttttcaagctttgcactgtcatggatattctcatggcaatatcgttacagcaagactgaaaagacaaaccaatatccatcactacaaagacacgcatttgtaaaatggtggacacaatttgactcatccaaagcggatccagaacaagtaaaactatggttccaatcccatctagaattcctcaaagcagctgatccagagacttctgtgtttttgaaccaaaagtctcatctggcagcatttttagcaggatcgacatcaaaggaggtcttagctaaaaatctgaaggaagttctacaaatgttacaacaggaagaagaagcttcatcctcaaaaaaggaagaaacaagttctgctgaagacgaagaagatcccttttaccaaaacgaagatgattgttttggtatctgtttagattaaatttaatttcggtcacaaaaccgtctgtttgtaatttatgtgtaattaatgctggaca

SEQ ID NO: 13832 - DNA, 1146 bp, Glycine max
  Gm_smallRNAprecursor_6665
acaatgatccaaaatgcgtcaatgaccaaaacaaccaccaatactaaaggaaaactacctttagccaaagctcaaacaccacctaccaaacaaactaacaattatatttataaaaataaattgttaactgttttgcagatggaacctgaattttgggacaaaaatcccttcaaggcaacggccaaggctttcccactaggatttcactacaaaccaaccaccatcctgaagacaagaactttttatgaattgattttggtagattcaaactcagtatctatcaaacatttcaaagatccaaaagaccaaaccttaaacacccactcaaccatccaaatactaaaagttcttcaaccaagacactttggtttggacttgaacaaaggaaagagattttcagttccatttgatccggtaggttatacctattgggattacgttgatgcttggactaaggtgttttggcaccaaaatacccgcttcaaacattcatggctgatatatttcaagaccaacacaatttacaattttcccaattggtttttacaatggtgggacttctttggaccaatcccagagatattcccagaaacggtccaacaaggattttcccaatttaagaaacaatacaattcgcaggaatcacgaattccagcagatcttaaatacttttcaagctttgcactgtcatggatattctcatggcaatatcgttacagcaagactgaaaagacaaaccaatatccatcactacaaagacacgcatttgtaaaatggtggacacaatttgactcatccaaagcggatccagaacaagtaaaactatggttccaatcccatctagaattcctcaaagcagctgatccagagacttctgtgtttttgaaccaaaagtctcatctggcagcatttttagcaggatcgacatcaaaggaggtcttagctaaaaatctgaaggaagttctacaaatgttacaacaggaagaagaagcttcatcctcaaaaaaggaagaaacaagttctgctgaagacgaagaagatcccttttaccaaaacgaagatgattgttttggtatctgtttagattaaatttaatttcggtcacaaaaccgtctgtttgtaatttatgtgtaattaatgctggac

SEQ ID NO: 13833 - DNA, 1146 bp, Glycine max; identical to SEQ ID NO: 13832
  Gm_smallRNAprecursor_6666

SEQ ID NO: 13834 - DNA, 1147 bp, Glycine max
  Gm_smallRNAprecursor_6667
acaatgatccaaaatgcgtcaatgaccaaaacaaccaccaatactaaaggaaaactacctttagccaaagctcaaacaccacctaccaaacaaactaacaattatatttataaaaataaattgttaactgttttgcagatggaacctgaattttgggacaaaaatcccttcaaggcaacggccaaggctttcccactaggatttcactacaaaccaaccaccatcctgaagacaagaactttttatgaattgattttggtagattcaaactcagtatctatcaaacatttcaaagatccaaaagaccaaaccttaaacacccactcaaccatccaaatactaaaagttcttcaaccaagacactttggtttggacttgaacaaaggaaagagattttcagttccatttgatccggtaggttatacctattgggattacgttgatgcttggactaaggtgttttggcaccaaaatacccgcttcaaacattcatggctgatatatttcaagaccaacacaatttacaattttcccaattggtttttacaatggtgggacttctttggaccaatcccagagatattcccagaaacggtccaacaaggattttcccaatttaagaaacaatacaattcgcaggaatcacgaattccagcagatcttaaatacttttcaagctttgcactgtcatggatattctcatggcaatatcgttacagcaagactgaaaagacaaaccaatatccatcactacaaagacacgcatttgtaaaatggtggacacaatttgactcatccaaagcggatccagaacaagtaaaactatggttccaatcccatctagaattcctcaaagcagctgatccagagacttctgtgtttttgaaccaaaagtctcatctggcagcatttttagcaggatcgacatcaaaggaggtcttagctaaaaatctgaaggaagttctacaaatgttacaacaggaagaagaagcttcatcctcaaaaaaggaagaaacaagttctgctgaagacgaagaagatcccttttaccaaaacgaagatgattgttttggtatctgtttagattaaatttaatttcggtcacaaaaccgtctgtttgtaatttatgtgtaattaatgctggaca

SEQ ID NO: 13835 - DNA, 1043 bp, Glycine max
  Gm_smallRNAprecursor_6668
tcaagaccaacacaatttacaattttcccaattggtttttacaatggtgggacttctttggaccaatcccagagatattcccagaaacggtccaacaaggattttcccaatttaagaaacaatacaattcgcaggaatcacgaattccagcagatcttaaatacttttcaagctttgcactgtcatggatattctcatggcaatatcgttacagcaagactgaaaagacaaaccaatatccatcactacaaagacacgcatttgtaaaatggtggacacaatttgactcatccaaagcggatccagaacaagtaaaactatggttccaatcccatctagaattcctcaaagcagctgatccagagacttctgtgtttttgaaccaaaagtctcatctggcagcatttttagcaggatcgacatcaaaggaggtcttagctaaaaatctgaaggaagttctacaaatgttacaacaggaagaagaagcttcatcctcaaaaaaggaagaaacaagttctgctgaagacgaagaagatcccttttaccaaaacgaagatgattgttttggtatctgtttagattaaatttaatttcggtcacaaaaccgtctgtttgtaatttatgtgtaattaatgctggacaatactacctgtcctgtagtcattaaagtcccggtcaaaactacttgtcttgtaacaaacagtcaaatagtcccagtcaaaactaccggcaactaccggtcttagatttttggctatataaggagtcctcaagtatgttgtggggcaccctttcatttagccattttttcaggtttcggaagagaggtgctctgaaacaagatttttgtaagcgcttctttctagattcaataaatttctatttttcatccttctctcttctcccttcaccgatcctgtgcggctctgccgccgcttcggtttctttgtttatgaaaacctggggtttgtaagccggtcttcggtgtgcccttgatatctgttttcaagtttatattttcatttcatcaatcatactgcatt

SEQ ID NO: 13836 - DNA, 1031 bp, Glycine max
  Gm_smallRNAprecursor_6669
cattaaagtcccggtcaaaactacttgtcttgtaacaaacagtcaaatagtcccagtcaaaactaccggcaactaccggtcttagatttttggctatataaggagtcctcaagtatgttgtggggcaccctttcatttagccattttttcaggtttcggaagagaggtgctctgaaacaagatttttgtaagcgcttctttctagattcaataaatttctatttttcatccttctctcttctcccttcaccgatcctgtgcggctctgccgccgcttcggtttctttgtttatgaaaacctggggtttgtaagccggtcttcggtgtgcccttgatatctgttttcaagtttatattttcatttcatcaatcatactgcattcttacttcctatctgtccgtttgatcctactgggtttagacaacctagaaatctttgtaactgggttttgtctaagatttggttggggaatttactagcaaactctattgacctttcgattggaatgattgtaccttgatatatattgtgaccaaggaatcgaattcgagtttggaaaagattgatttttgatttggagactgccaaaccattttgtttgatgatatgtatgaaggtttggagatgtttgaaatgttggtcaatgttttgggaaaagattaaaacatcatctatgtagacaatgacaaattttgaatagggattaaaaatatcgttcataattttttgaaattctgaaggggcattcttcagtccgaatggcatcacgttccattcatattgcccgaaaggtacagtaaacgctgttttgtacctatctgattcttggatttggatttgccaaaatccagatttaatatcaaattttgaaaatatctttgcagaatttaatctgttaagcaaatcttttttgtttggaataggatatctaatccattgtaatgcttgatttaatggtttgtaatttatgactaagcggggtgttccacgctcaatctcagattgtttgttaacataaaaagctgcacaa

SEQ ID NO: 13837 - DNA, 1234 bp, Glycine max
  Gm_smallRNAprecursor_6670
tgtaacaaacagtcaaatagtcccagtcaaaactaccggcaactaccggtcttagatttttggctatataaggagtcctcaagtatgttgtggggcaccctttcatttagccattttttcaggtttcggaagagaggtgctctgaaacaagatttttgtaagcgcttctttctagattcaataaatttctatttttcatccttctctcttctcccttcaccgatcctgtgcggctctgccgccgcttcggtttctttgtttatgaaaacctggggtttgtaagccggtcttcggtgtgcccttgatatctgttttcaagtttatattttcatttcatcaatcatactgcattcttacttcctatctgtccgtttgatcctactgggtttagacaacctagaaatctttgtaactgggttttgtctaagatttggttggggaatttactagcaaactctattgacctttcgattggaatgattgtaccttgatatatattgtgaccaaggaatcgaattcgagtttggaaaagattgatttttgatttggagactgccaaaccattttgtttgatgatatgtatgaaggtttggagatgtttgaaatgttggtcaatgttttgggaaaagattaaaacatcatctatgtagacaatgacaaattttgaatagggattaaaaatatcgttcataattttttgaaattctgaaggggcattcttcagtccgaatggcatcacgttccattcatattgcccgaaaggtacagtaaacgctgttttgtacctatctgattcttggatttggatttgccaaaatccagatttaatatcaaattttgaaaatatctttgcagaatttaatctgttaagcaaatcttttttgtttggaataggatatctaatccattgtaatgcttgatttaatggtttgtaatttatgactaagcggggtgttccacgctcaatctcagattgtttgttaacataaaaagctgcacaagaccataggcttttgcttttccggattaggcctttatcaagcaaatccttgatttccttttgacagtattgaagaagttcttcattcatttggattggtctggcttttgtgggaatttgtttttccctaaagtctttctcataagggagatcgacaatatgtttctttctgtcccaaaatgcatgtggcaattcagaacaaacggtcgattcaatatgatttaataaagattg

SEQ ID NO: 13838 - DNA, 1061 bp, Glycine max
  Gm_smallRNAprecursor_6671
tacttcctatctgtccgtttgatcctactgggtttagacaacctagaaatctttgtaactgggttttgtctaagatttggttggggaatttactagcaaactctattgacctttcgattggaatgattgtaccttgatatatattgtgaccaaggaatcgaattcgagtttggaaaagattgatttttgatttggagactgccaaaccattttgtttgatgatatgtatgaaggtttggagatgtttgaaatgttggtcaatgttttgggaaaagattaaaacatcatctatgtagacaatgacaaattttgaatagggattaaaaatatcgttcataattttttgaaattctgaaggggcattcttcagtccgaatggcatcacgttccattcatattgcccgaaaggtacagtaaacgctgttttgtacctatctgattcttggatttggatttgccaaaatccagatttaatatcaaattttgaaaatatctttgcagaatttaatctgttaagcaaatcttttttgtttggaataggatatctaatccattgtaatgcttgatttaatggtttgtaatttatgactaagcggggtgttccacgctcaatctcagattgtttgttaacataaaaagctgcacaagaccataggcttttgcttttccggattaggcctttatcaagcaaatccttgatttccttttgacagtattgaagaagttcttcattcatttggattggtctggcttttgtgggaatttgtttttccctaaagtctttctcataagggagatcgacaatatgtttctttctgtcccaaaatgcatgtggcaattcagaacaaacggtcgattcaatatgatttaataaagattgaattctttcttttacttggggttttcccagttgtatctgaatattattaaaagatacttcttcttttaagaagttaatttgattaatcttattttctataagatttatatttctggaaattggtttagtagaaaaattaaatataatttttcttcctaaataatttgtggttattccttca

SEQ ID NO: 13839 - DNA, 1165 bp, Glycine max
  Gm_smallRNAprecursor_6672
aattttgctcaaattggatcctacaagtcctaaatcatgtataaatcatatctaaaccaaagacaagcttcagaccaaagcagttcaaaatctaggtatctaaaacccctcaatttagtggattttcaaggtttgagaagtgaaaatgagaatggggtaattttggagcaaactctcatctcaaacaagtctatataacattaatttaaactcgctcaaactggttttacggtgaaaactccaccgattcaaaatttgacccctcaacacccaatttaccctagaaatggctcatgctttcacctttgtcactcatttttctcatttgctcagcccaagccttcccacaagtcctaaacgacattttaagctaggattaactcactttagcccccaattaccactaaccccaagtttagcttttcaaaccctcaaatcctcacacttttccactcacatcactaccattctcacatttaaccctaggttaactctccccatcatctctaccagttttctaccaacaatttcagcccacaagcatcacaaaacatcactataaaaccctaaaacagaatgggtaaatttggctcacaacaaatatgtcaagtttagcatgctttcaacaaattctttcacaaataactaccataaggcataaacttagtagaactacccatcatatctcccaaaaacccaatacccacgaaattcatgtgagaagaagtctacccatacctgaaatttgaagtctcacaacgtagaggtgcgcttcacgactccgaaaatggcttcctttcgcaatttggagtagaactagtgagtaaagtttggagctttgatgggcaacaatggtggatgaggaagggagaagaaaagcaacgtgggagatgagaaaagcttcttaatttttctgagtgaggagagagaacgtggcttttatgaggaaaaaaaatgatttccttttcctattattttattttttttaaagcacttgccacttgtcccattttgagtggaacaaaaagggcccactttttctcttgatgtgactcatactcagccacaagaagagaaaaaaatttgaccttttgaaatgctaaaatcctacctcggtttgcattccgtttctctggttctagtccctcgcgtttctctgcacccg

SEQ ID NO: 13840 - DNA, 1165 bp, Glycine max
  Gm_smallRNAprecursor_6673
agctgaatctcccatcttcagcatagttgaaactcctgtctcattgtccaatgccacactttgatggcctgtatctcttttcttcgtatgttctagtgcttcagcttcagaatgcataaagcaatcagaatttccgagtgatcaccaaaggcttctgcatcagcattgacactctccaccctctttggtttatgcttatgtgttttcttccgtgcctcctcgttataaatctcagctttattcgaggttgcactagaacgatcaccaccaatctgtgcttcttcctcgtctatcaggtcaatatctttcctttcaacttttgttttgtaaattacagtgtagttttcaaaagcaaaggtgaaacgaaagatattgagctggtagaggaggaataggcacggattggtgctgatccttctagtgggacctccaataaatctgagaattataaggaggaagcatggaagaaaacacagaagcataaaccaaagagggtggagagtgtcaacgctgatgcagaagcctttggtgatgactggaaaattctgattgctctatgcattgtgaagctgaagcagtagaacatacgaacaaaagagatacaggccatcaaaatgtggcattggacaataagacaggagattcaactatgctgaagatgggagattcagctaaagttgtgatcaaacaagacatgaagggaaggaggcataaattgggtttaacaacaatgaacttgagaaggcacagaagaaaagggtggtggatgatgaaactgccgacaaacatcagctggatgaagtcctatgaagatcctcctcattctcaaagaggggaacgagcaacaatttgaaggttgtatattcaggaactaaagaattcaaaatagctagtaataagagggatttgtttttgggattttctgagcaccaagagcggctacgcaagaagtttgcacttgaggagggaaggatatttgcagctaatgaacaagtttcttaactatttgtccttaagattttactatttctttttgctaatatgtaaatataaatggtataagggtatggcgtaaaaatatggtctatatttacttctaagattgttaggggtaaaaatgaccatgtccctatggcataaccttatattatttatatttacatat

SEQ ID NO: 13841 - DNA, 1036 bp, Glycine max
  Gm_smallRNAprecursor_6674
ttggatattaattaaacgttaactacaattagtgtacacacacataaaatatatataagtagaacttttatttaaatcacgtaccttaacaacaatccacctagcagcagccttggatttcggttgtggagtatcatcaagtcctttcaaagcactagtgttgaatataaggaacattaaaatattgatgttgttgacggctagtaaactacgccccaaccccatcaatactgacctgttaattattcccttaaggtagttgtctggcctgttatgcaaagaacaaaaccagacaactaggttttccttaggtagaatgacgaccatttgccagtgtccattgcagtagagacgaatatagtttattgtagtagtatagattatttaaattcaattattgtgtttgacttacctattcagataggctccaaggtaaacatctcgttttgaactctgtatccaactcttgatgtaactttcggattcaaattgtgagtgtccagatctctgaatggactgtggctcgaggaatccatacacatcagaattccccgctcgcacacttgtctcagtcagatggctgtgttgttaagtcaaagttaattatgtatgaatttaaaacaattactttggtaattaatagtaatctaaaatgacttacagaatccacaactgtataactgatatgctgagacattgaccaccatgtgcaatttcagagagatcttcgtgctttatatacaacgggaagttttgattaaacaccccgaatatggtagcatcccacataacctggagcggcttcaaaaacagttgtgggatggtcaatgtcatcaggtacaggggatcatcgacctcttcatccgggctttctggaggttttgctggagacacagctgcctattgataaaacatagttaattagcaagttttgattacagtgaacaaattaattgaaaaaaataaacatataatcagagtaaaaataaacatataatcgaaaaccgatgttaactgtcaacattaacacattcgt

SEQ ID NO: 13842 - DNA, 1241 bp, Glycine max
  Gm_smallRNAprecursor_6675
actctatattatttaaacttgtacggtggaaagccaatttaatgtttttttaaatttatttgctatgctatagtttgacccccaatccataaaatgtctgtatcttcccattccacaggcattcaaagttgtcgaaactgatgcatcagatatcggttatggtgatatcctcaaacagcaaatacatggtcaagaacatgtcatcgcctatacttcaaaacattggaatcctgcacaattaaagtattcaactgtgaaaaaagaagttttagcaattgttttgtgcatttccaaatttcaatctgatttattaaatcaaaaatttttagttagggttgactgcaaatcagccaaagacattttaccgagagatctctggtatcagagcctgatggggaagtaggaatactgtccgtaaggacatatgttaacaaattttatggatctgacgtcttgtatagtacatgtaatattttactttgatttgtacagtaagtgtttgaacagtacttcctggaagtacaacagtctaatattttagttgaatggtactgtagcagtaagacccgtgttggataaagggcggtaaggctaaggtgtactgtttaaccaaaatatcaagacataatacactggcggctataggattgccattcaaactatttttcaaaaaaaaaaagagtttttcttaaaaataattcagatccagaaaaaattttgttacatatttacttacggagatatttctatggaaccaaatgaaggcaaagatattagagaatattataatcatgtgtagactattacgatctttttcccgtatctcttttcgctcaaactcctcctcatcatcttcttcaagaaactccaatttattaaatgatcaagataaccagacccaagaggtcgccccaaaacacaatctcttcgatgaggaagtccgattcgaagatatcaatcaaaacatggatgactggaacattccagaaatccctcaggatcaactatacgttcctgaaacaataaaggataaacacaactttgattacataatcaaaacagtagaaaacaatattcctctaggacaagatataggggaagaatttcatttactttcaaaaaattcaatttatgaacatagccgtaagtataaatatctacacatcggttgtgtacaagtagtcatcaagcccttaattgatatgggcatagatgcggcagttttaatgtgtctaagagac

SEQ ID NO: 13843 - DNA, 1157 bp, Glycine max
  Gm_smallRNAprecursor_6676
aggacatatgttaacaaattttatggatctgacgtcttgtatagtacatgtaatattttactttgatttgtacagtaagtgtttgaacagtacttcctggaagtacaacagtctaatattttagttgaatggtactgtagcagtaagacccgtgttggataaagggcggtaaggctaaggtgtactgtttaaccaaaatatcaagacataatacactggcggctataggattgccattcaaactatttttcaaaaaaaaaaagagtttttcttaaaaataattcagatccagaaaaaattttgttacatatttacttacggagatatttctatggaaccaaatgaaggcaaagatattagagaatattataatcatgtgtagactattacgatctttttcccgtatctcttttcgctcaaactcctcctcatcatcttcttcaagaaactccaatttattaaatgatcaagataaccagacccaagaggtcgccccaaaacacaatctcttcgatgaggaagtccgattcgaagatatcaatcaaaacatggatgactggaacattccagaaatccctcaggatcaactatacgttcctgaaacaataaaggataaacacaactttgattacataatcaaaacagtagaaaacaatattcctctaggacaagatataggggaagaatttcatttactttcaaaaaattcaatttatgaacatagccgtaagtataaatatctacacatcggttgtgtacaagtagtcatcaagcccttaattgatatgggcatagatgcggcagttttaatgtgtctaagagacattaggcataatcaatttgaagactccctaattggaacagtcgaaaccagcctaggacaaggtccaatatattttaactgatatccaaacaaaacagtgagtctgatggacagaaacattcttgactctctgttcttaaacatccactttcatggccttgacatgaaagacggatcaatcccagcagccttaatttataggatccagtacaaggtcatgaatacttgtgcatctagagtcctattaaaacctcaaaaaggagaaacaaccttgtttatcactgatatgacaaaggctaacgtttctctcccgagaaaaataaaatgggatgag

SEQ ID NO: 13844 - DNA, 1232 bp, Glycine max
  Gm_smallRNAprecursor_6677
atagaaagaaacatattgttgatctcccttatgagaaagactttagggaaaaacaaattcccaccaaagccagaccaatccaaatgaatgaagaacttcttcaatattgtcaaaaagaaatcaaggatttgcttgataaaggcctaatccggaaaagcaaaagcccatggtcttgtgcggctttctatgtcaacaaacaatctgagattgagcatggaacaccccgcttagccataaattacaaaccactaaatcaagcattacaatggattagatatcctattccaaacaaaaaagatttgcttaacagattaaattatgcaaagatattttcaaaatttgatatgaaatctggattttggcaaatccaaatccaacaatcagataggtacaaaacagcatttatggtacttttcgggcaatatgaatggaatgtgatgccattcgaactgaagaatgccccttcagaatttcaaaaaattatgaatgatatttttaacccctattcaaaatttgtcattgtctacatagatgatgttttaatcttttcccaaaacattgaccaacatttcaaacatctccaaaccttcatccatatcatcaaacaaaatggtttggcagtctccaaatcaaaaatcaatcttttccaaactcgaattcgattccttggccacaatatttatcaaggtacaatcattccaatcgaaaggtccatagaatttgctagcaaatttcccaaccaaatcttagacaaaacccagttacaaagatttctaggttgtctaaattacgtaggagaatttgtcccctacttaaacaatattgtcaaaccattgcatgataggctaaagaaaaatctgcctccttggtctgacctccatacccaaacagttaaagaaatcaaagtcaaagttcaatccataaaatgtctgtatcttcccattccacaggcattcaaagttgtcgaaactgatgcatcagacatcggttacggtggtatcctcaaacagcaaatacatggtcaagaacatgtcatcgcctatacttcaaaacattggaatcctgcacaattaaagtatgcaactgttaaaaaagaagttttagcaattgttttgtgcatttccaaatttcaatctgatttattaaatcaaaaatttttagtaagggttgactgcaaatcagccaaagacattttacagaaggatgtaaaaaaccttgcctcaaaacagatt

SEQ ID NO: 13845 - DNA, 1108 bp, Glycine max
  Gm_smallRNAprecursor_6678
aagtgtctttgattttaatatagaatatatcaagggctcttccaactctctacctgactacctcacccgagaatttttacagaaaattcccgatgcctcctaaggtgtctagttcctccggcagaggaggaagatccagtacaaaaggaaaagaggttctactggctctaccagagccaataaccaaaaaggcaactacaacatcttctgggtcacctacccagactgggtcatcaacccagaaaggaaagcttgaagggtcattgacccagataactaccgtcaaacctgagtcatcaactcaggaatccccaaaaccaacaacaaccaaacagactgtggctgactatgcctggtcaatacaaactctcttggccttagaagatataggcctcaccaaagtaccaaaattggccaaaaagacctgggcagaaatggcctcagaattagacgatgattctgaaacaggtctgcaaaaacaaatccaaaaggccaaacagaccaaaactgtctgtaaccaaagaccaagccaatcgttgactcaacaagaatcaacaccacaacccggcaacagttatatttcaaaaaacaaatttttcaatgttttacaaatggaaccagaatactgggacaagaatcctttcaaagcgaccgccaaagtattccccccaggattccattacaagccaatagccacaaacaaaacccgcaaattctacgaattcattctaatagatacgaactcagtatctattaaacacttcaaagaccccaaagatccaaatctaaatacccattccacaatccaaatcctaaaggttatgcagccacgacattatggctcaaacttaaaccaacccaaaaaaatttctgctccatttgaccccgcaggatataactattgggattacatcgacgcttggaccaacgtgttctggcatcaaaatagtaaattcaagcattcatggctaatttacttcaaaaataatactgtgtataattttccaaattggttcctccaatggtggaactacttcggaccaattccacaaatattctcagaagaagtccaacagggattccaacaattcaacaagctctataatag

SEQ ID NO: 13846 - DNA, 1071 bp, Glycine max
  Gm_smallRNAprecursor_6679
caaacagaccaaaactgtctgtaaccaaagaccaagccaatcgttgactcaacaagaatcaacaccacaacccggcaacagttatatttcaaaaaacaaatttttcaatgttttacaaatggaaccagaatactgggacaagaatcctttcaaagcgaccgccaaagtattccccccaggattccattacaagccaatagccacaaacaaaacccgcaaattctacgaattcattctaatagatacgaactcagtatctattaaacacttcaaagaccccaaagatccaaatctaaatacccattccacaatccaaatcctaaaggttatgcagccacgacattatggctcaaacttaaaccaacccaaaaaaatttctgctccatttgaccccgcaggatataactattgggattacatcgacgcttggaccaacgtgttctggcatcaaaatagtaaattcaagcattcatggctaatttacttcaaaaataatactgtgtataattttccaaattggttcctccaatggtggaactacttcggaccaattccacaaatattctcagaagaagtccaacagggattccaacaattcaacaagctctataatagcaaggaatcacgtattccagcagatttaaagtacttttccagttttgccttgtcatggattttttcatggcaatacagatacggaaaaactgaaaacagcaagcaatatccaccgttacagagacacgcctttgtaaaatggtggtcacaattcgatacttcaaaggctgctccagatcaagtcaataactggttccagagcaatcctgagttcctcaaacctgctgatcaagagacatctttgttcctgaatcagaagtcgcaactagcagcattcttagcaagctcaaaatctaaagagagtcttgctcagaatttcaaagaagttctccaactacttcaacaggaagtggaagaagaaccttccaagaaggaagctgaatcatccgagactaatgatgaccaagaagacgatccattctaccagaatgaagatgactgttttggtatatcgtt

SEQ ID NO: 13847 - DNA, 1191 bp, Glycine max
  Gm_smallRNAprecursor_6680
gttatatttcaaaaaacaaatttttcaatgttttacaaatggaaccagaatactgggacaagaatcctttcaaagcgaccgccaaagtattccccccaggattccattacaagccaatagccacaaacaaaacccgcaaattctacgaattcattctaatagatacgaactcagtatctattaaacacttcaaagaccccaaagatccaaatctaaatacccattccacaatccaaatcctaaaggttatgcagccacgacattatggctcaaacttaaaccaacccaaaaaaatttctgctccatttgaccccgcaggatataactattgggattacatcgacgcttggaccaacgtgttctggcatcaaaatagtaaattcaagcattcatggctaatttacttcaaaaataatactgtgtataattttccaaattggttcctccaatggtggaactacttcggaccaattccacaaatattctcagaagaagtccaacagggattccaacaattcaacaagctctataatagcaaggaatcacgtattccagcagatttaaagtacttttccagttttgccttgtcatggattttttcatggcaatacagatacggaaaaactgaaaacagcaagcaatatccaccgttacagagacacgcctttgtaaaatggtggtcacaattcgatacttcaaaggctgctccagatcaagtcaataactggttccagagcaatcctgagttcctcaaacctgctgatcaagagacatctttgttcctgaatcagaagtcgcaactagcagcattcttagcaagctcaaaatctaaagagagtcttgctcagaatttcaaagaagttctccaactacttcaacaggaagtggaagaagaaccttccaagaaggaagctgaatcatccgagactaatgatgaccaagaagacgatccattctaccagaatgaagatgactgttttggtatatcgttagacgacgattaattagttgtagtaatcatgaattattgtaactaatttgtcagtaatgtaatttgtaaaagttttgtaacaattccggtaaacattaccgacactgtagaaacagtaaaaattgagtctatttaaaggagtcctcgttccctttgtgaggcaccctttcagataatctcataatcaggttttgagagag

SEQ ID NO: 13848 - DNA, 1066 bp, Glycine max
  Gm_smallRNAprecursor_6681
atttcaaaaaacaaatttttcaatgttttacaaatggaaccagaatactgggacaagaatcctttcaaagcgaccgccaaagtattccccccaggattccattacaagccaatagccacaaacaaaacccgcaaattctacgaattcattctaatagatacgaactcagtatctattaaacacttcaaagaccccaaagatccaaatctaaatacccattccacaatccaaatcctaaaggttatgcagccacgacattatggctcaaacttaaaccaacccaaaaaaatttctgctccatttgaccccgcaggatataactattgggattacatcgacgcttggaccaacgtgttctggcatcaaaatagtaaattcaagcattcatggctaatttacttcaaaaataatactgtgtataattttccaaattggttcctccaatggtggaactacttcggaccaattccacaaatattctcagaagaagtccaacagggattccaacaattcaacaagctctataatagcaaggaatcacgtattccagcagatttaaagtacttttccagttttgccttgtcatggattttttcatggcaatacagatacggaaaaactgaaaacagcaagcaatatccaccgttacagagacacgcctttgtaaaatggtggtcacaattcgatacttcaaaggctgctccagatcaagtcaataactggttccagagcaatcctgagttcctcaaacctgctgatcaagagacatctttgttcctgaatcagaagtcgcaactagcagcattcttagcaagctcaaaatctaaagagagtcttgctcagaatttcaaagaagttctccaactacttcaacaggaagtggaagaagaaccttccaagaaggaagctgaatcatccgagactaatgatgaccaagaagacgatccattctaccagaatgaagatgactgttttggtatatcgttagacgacgattaattagttgtagtaatcatgaattattgtaactaatttgtcagtaatgtaatttgtaaaagttttgtaa

SEQ ID NO: 13849 - DNA, 1067 bp, Glycine max
  Gm_smallRNAprecursor_6682
atttcaaaaaacaaatttttcaatgttttacaaatggaaccagaatactgggacaagaatcctttcaaagcgaccgccaaagtattccccccaggattccattacaagccaatagccacaaacaaaacccgcaaattctacgaattcattctaatagatacgaactcagtatctattaaacacttcaaagaccccaaagatccaaatctaaatacccattccacaatccaaatcctaaaggttatgcagccacgacattatggctcaaacttaaaccaacccaaaaaaatttctgctccatttgaccccgcaggatataactattgggattacatcgacgcttggaccaacgtgttctggcatcaaaatagtaaattcaagcattcatggctaatttacttcaaaaataatactgtgtataattttccaaattggttcctccaatggtggaactacttcggaccaattccacaaatattctcagaagaagtccaacagggattccaacaattcaacaagctctataatagcaaggaatcacgtattccagcagatttaaagtacttttccagttttgccttgtcatggattttttcatggcaatacagatacggaaaaactgaaaacagcaagcaatatccaccgttacagagacacgcctttgtaaaatggtggtcacaattcgatacttcaaaggctgctccagatcaagtcaataactggttccagagcaatcctgagttcctcaaacctgctgatcaagagacatctttgttcctgaatcagaagtcgcaactagcagcattcttagcaagctcaaaatctaaagagagtcttgctcagaatttcaaagaagttctccaactacttcaacaggaagtggaagaagaaccttccaagaaggaagctgaatcatccgagactaatgatgaccaagaagacgatccattctaccagaatgaagatgactgttttggtatatcgttagacgacgattaattagttgtagtaatcatgaattattgtaactaatttgtcagtaatgtaatttgtaaaagttttgtaac

SEQ ID NO: 13850 - DNA, 1069 bp, Glycine max
  Gm_smallRNAprecursor_6683
atttcaaaaaacaaatttttcaatgttttacaaatggaaccagaatactgggacaagaatcctttcaaagcgaccgccaaagtattccccccaggattccattacaagccaatagccacaaacaaaacccgcaaattctacgaattcattctaatagatacgaactcagtatctattaaacacttcaaagaccccaaagatccaaatctaaatacccattccacaatccaaatcctaaaggttatgcagccacgacattatggctcaaacttaaaccaacccaaaaaaatttctgctccatttgaccccgcaggatataactattgggattacatcgacgcttggaccaacgtgttctggcatcaaaatagtaaattcaagcattcatggctaatttacttcaaaaataatactgtgtataattttccaaattggttcctccaatggtggaactacttcggaccaattccacaaatattctcagaagaagtccaacagggattccaacaattcaacaagctctataatagcaaggaatcacgtattccagcagatttaaagtacttttccagttttgccttgtcatggattttttcatggcaatacagatacggaaaaactgaaaacagcaagcaatatccaccgttacagagacacgcctttgtaaaatggtggtcacaattcgatacttcaaaggctgctccagatcaagtcaataactggttccagagcaatcctgagttcctcaaacctgctgatcaagagacatctttgttcctgaatcagaagtcgcaactagcagcattcttagcaagctcaaaatctaaagagagtcttgctcagaatttcaaagaagttctccaactacttcaacaggaagtggaagaagaaccttccaagaaggaagctgaatcatccgagactaatgatgaccaagaagacgatccattctaccagaatgaagatgactgttttggtatatcgttagacgacgattaattagttgtagtaatcatgaattattgtaactaatttgtcagtaatgtaatttgtaaaagttttgtaacaa

SEQ ID NO: 13851 - DNA, 1049 bp, Glycine max
  Gm_smallRNAprecursor_6684
caatgttttacaaatggaaccagaatactgggacaagaatcctttcaaagcgaccgccaaagtattccccccaggattccattacaagccaatagccacaaacaaaacccgcaaattctacgaattcattctaatagatacgaactcagtatctattaaacacttcaaagaccccaaagatccaaatctaaatacccattccacaatccaaatcctaaaggttatgcagccacgacattatggctcaaacttaaaccaacccaaaaaaatttctgctccatttgaccccgcaggatataactattgggattacatcgacgcttggaccaacgtgttctggcatcaaaatagtaaattcaagcattcatggctaatttacttcaaaaataatactgtgtataattttccaaattggttcctccaatggtggaactacttcggaccaattccacaaatattctcagaagaagtccaacagggattccaacaattcaacaagctctataatagcaaggaatcacgtattccagcagatttaaagtacttttccagttttgccttgtcatggattttttcatggcaatacagatacggaaaaactgaaaacagcaagcaatatccaccgttacagagacacgcctttgtaaaatggtggtcacaattcgatacttcaaaggctgctccagatcaagtcaataactggttccagagcaatcctgagttcctcaaacctgctgatcaagagacatctttgttcctgaatcagaagtcgcaactagcagcattcttagcaagctcaaaatctaaagagagtcttgctcagaatttcaaagaagttctccaactacttcaacaggaagtggaagaagaaccttccaagaaggaagctgaatcatccgagactaatgatgaccaagaagacgatccattctaccagaatgaagatgactgttttggtatatcgttagacgacgattaattagttgtagtaatcatgaattattgtaactaatttgtcagtaatgtaatttgtaaaagttttgtaacaa

SEQ ID NO: 13852 - DNA, 1131 bp, Glycine max
  Gm_smallRNAprecursor_6685
caatgttttacaaatggaaccagaatactgggacaagaatcctttcaaagcgaccgccaaagtattccccccaggattccattacaagccaatagccacaaacaaaacccgcaaattctacgaattcattctaatagatacgaactcagtatctattaaacacttcaaagaccccaaagatccaaatctaaatacccattccacaatccaaatcctaaaggttatgcagccacgacattatggctcaaacttaaaccaacccaaaaaaatttctgctccatttgaccccgcaggatataactattgggattacatcgacgcttggaccaacgtgttctggcatcaaaatagtaaattcaagcattcatggctaatttacttcaaaaataatactgtgtataattttccaaattggttcctccaatggtggaactacttcggaccaattccacaaatattctcagaagaagtccaacagggattccaacaattcaacaagctctataatagcaaggaatcacgtattccagcagatttaaagtacttttccagttttgccttgtcatggattttttcatggcaatacagatacggaaaaactgaaaacagcaagcaatatccaccgttacagagacacgcctttgtaaaatggtggtcacaattcgatacttcaaaggctgctccagatcaagtcaataactggttccagagcaatcctgagttcctcaaacctgctgatcaagagacatctttgttcctgaatcagaagtcgcaactagcagcattcttagcaagctcaaaatctaaagagagtcttgctcagaatttcaaagaagttctccaactacttcaacaggaagtggaagaagaaccttccaagaaggaagctgaatcatccgagactaatgatgaccaagaagacgatccattctaccagaatgaagatgactgttttggtatatcgttagacgacgattaattagttgtagtaatcatgaattattgtaactaatttgtcagtaatgtaatttgtaaaagttttgtaacaattccggtaaacattaccgacactgtagaaacagtaaaaattgagtctatttaaaggagtcctcgttccctttgtgaggcacc

SEQ ID NO: 13853 - DNA, 1131 bp, Glycine max; identical to SEQ ID NO: 13852
  Gm_smallRNAprecursor_6686

SEQ ID NO: 13854 - DNA, 1086 bp, Glycine max
  Gm_smallRNAprecursor_6687
caaagcgaccgccaaagtattccccccaggattccattacaagccaatagccacaaacaaaacccgcaaattctacgaattcattctaatagatacgaactcagtatctattaaacacttcaaagaccccaaagatccaaatctaaatacccattccacaatccaaatcctaaaggttatgcagccacgacattatggctcaaacttaaaccaacccaaaaaaatttctgctccatttgaccccgcaggatataactattgggattacatcgacgcttggaccaacgtgttctggcatcaaaatagtaaattcaagcattcatggctaatttacttcaaaaataatactgtgtataattttccaaattggttcctccaatggtggaactacttcggaccaattccacaaatattctcagaagaagtccaacagggattccaacaattcaacaagctctataatagcaaggaatcacgtattccagcagatttaaagtacttttccagttttgccttgtcatggattttttcatggcaatacagatacggaaaaactgaaaacagcaagcaatatccaccgttacagagacacgcctttgtaaaatggtggtcacaattcgatacttcaaaggctgctccagatcaagtcaataactggttccagagcaatcctgagttcctcaaacctgctgatcaagagacatctttgttcctgaatcagaagtcgcaactagcagcattcttagcaagctcaaaatctaaagagagtcttgctcagaatttcaaagaagttctccaactacttcaacaggaagtggaagaagaaccttccaagaaggaagctgaatcatccgagactaatgatgaccaagaagacgatccattctaccagaatgaagatgactgttttggtatatcgttagacgacgattaattagttgtagtaatcatgaattattgtaactaatttgtcagtaatgtaatttgtaaaagttttgtaacaattccggtaaacattaccgacactgtagaaacagtaaaaattgagtctatttaaaggagtcctcgttccctttgtgaggcacc

SEQ ID NO: 13855 - DNA, 1086 bp, Glycine max; identical to SEQ ID NO: 13854
  Gm_smallRNAprecursor_6688

SEQ ID NO: 13856 - DNA, 1085 bp, Glycine max
  Gm_smallRNAprecursor_6689
aaagcgaccgccaaagtattccccccaggattccattacaagccaatagccacaaacaaaacccgcaaattctacgaattcattctaatagatacgaactcagtatctattaaacacttcaaagaccccaaagatccaaatctaaatacccattccacaatccaaatcctaaaggttatgcagccacgacattatggctcaaacttaaaccaacccaaaaaaatttctgctccatttgaccccgcaggatataactattgggattacatcgacgcttggaccaacgtgttctggcatcaaaatagtaaattcaagcattcatggctaatttacttcaaaaataatactgtgtataattttccaaattggttcctccaatggtggaactacttcggaccaattccacaaatattctcagaagaagtccaacagggattccaacaattcaacaagctctataatagcaaggaatcacgtattccagcagatttaaagtacttttccagttttgccttgtcatggattttttcatggcaatacagatacggaaaaactgaaaacagcaagcaatatccaccgttacagagacacgcctttgtaaaatggtggtcacaattcgatacttcaaaggctgctccagatcaagtcaataactggttccagagcaatcctgagttcctcaaacctgctgatcaagagacatctttgttcctgaatcagaagtcgcaactagcagcattcttagcaagctcaaaatctaaagagagtcttgctcagaatttcaaagaagttctccaactacttcaacaggaagtggaagaagaaccttccaagaaggaagctgaatcatccgagactaatgatgaccaagaagacgatccattctaccagaatgaagatgactgttttggtatatcgttagacgacgattaattagttgtagtaatcatgaattattgtaactaatttgtcagtaatgtaatttgtaaaagttttgtaacaattccggtaaacattaccgacactgtagaaacagtaaaaattgagtctatttaaaggagtcctcgttccctttgtgaggcacc

SEQ ID NO: 13857 - DNA, 1085 bp, Glycine max; identical to SEQ ID NO: 13856
  Gm_smallRNAprecursor_6690

SEQ ID NO: 13858 - DNA, 1165 bp, Glycine max
  Gm_smallRNAprecursor_6691
ctaatagatacgaactcagtatctattaaacacttcaaagaccccaaagatccaaatctaaatacccattccacaatccaaatcctaaaggttatgcagccacgacattatggctcaaacttaaaccaacccaaaaaaatttctgctccatttgaccccgcaggatataactattgggattacatcgacgcttggaccaacgtgttctggcatcaaaatagtaaattcaagcattcatggctaatttacttcaaaaataatactgtgtataattttccaaattggttcctccaatggtggaactacttcggaccaattccacaaatattctcagaagaagtccaacagggattccaacaattcaacaagctctataatagcaaggaatcacgtattccagcagatttaaagtacttttccagttttgccttgtcatggattttttcatggcaatacagatacggaaaaactgaaaacagcaagcaatatccaccgttacagagacacgcctttgtaaaatggtggtcacaattcgatacttcaaaggctgctccagatcaagtcaataactggttccagagcaatcctgagttcctcaaacctgctgatcaagagacatctttgttcctgaatcagaagtcgcaactagcagcattcttagcaagctcaaaatctaaagagagtcttgctcagaatttcaaagaagttctccaactacttcaacaggaagtggaagaagaaccttccaagaaggaagctgaatcatccgagactaatgatgaccaagaagacgatccattctaccagaatgaagatgactgttttggtatatcgttagacgacgattaattagttgtagtaatcatgaattattgtaactaatttgtcagtaatgtaatttgtaaaagttttgtaacaattccggtaaacattaccgacactgtagaaacagtaaaaattgagtctatttaaaggagtcctcgttccctttgtgaggcaccctttcagataatctcataatcaggttttgagagagagaagctctgcctagggaaaatctctttgtaagcttttctttcggtttcaataaatttcaagttctatttttcatatctcccttctcccctcaccgatcttgtgcggctctgccgtcgctttggtttct

SEQ ID NO: 13859 - DNA, 1098 bp, Glycine max
  Gm_smallRNAprecursor_6692
attccacaatccaaatcctaaaggttatgcagccacgacattatggctcaaacttaaaccaacccaaaaaaatttctgctccatttgaccccgcaggatataactattgggattacatcgacgcttggaccaacgtgttctggcatcaaaatagtaaattcaagcattcatggctaatttacttcaaaaataatactgtgtataattttccaaattggttcctccaatggtggaactacttcggaccaattccacaaatattctcagaagaagtccaacagggattccaacaattcaacaagctctataatagcaaggaatcacgtattccagcagatttaaagtacttttccagttttgccttgtcatggattttttcatggcaatacagatacggaaaaactgaaaacagcaagcaatatccaccgttacagagacacgcctttgtaaaatggtggtcacaattcgatacttcaaaggctgctccagatcaagtcaataactggttccagagcaatcctgagttcctcaaacctgctgatcaagagacatctttgttcctgaatcagaagtcgcaactagcagcattcttagcaagctcaaaatctaaagagagtcttgctcagaatttcaaagaagttctccaactacttcaacaggaagtggaagaagaaccttccaagaaggaagctgaatcatccgagactaatgatgaccaagaagacgatccattctaccagaatgaagatgactgttttggtatatcgttagacgacgattaattagttgtagtaatcatgaattattgtaactaatttgtcagtaatgtaatttgtaaaagttttgtaacaattccggtaaacattaccgacactgtagaaacagtaaaaattgagtctatttaaaggagtcctcgttccctttgtgaggcaccctttcagataatctcataatcaggttttgagagagagaagctctgcctagggaaaatctctttgtaagcttttctttcggtttcaataaatttcaagttctatttttcatatctcccttctcccctcaccgatcttgtgcggctctgccgtcgctttggtttct

SEQ ID NO: 13860 - DNA, 1106 bp, Glycine max
  Gm_smallRNAprecursor_6693
tactgtgtataattttccaaattggttcctccaatggtggaactacttcggaccaattccacaaatattctcagaagaagtccaacagggattccaacaattcaacaagctctataatagcaaggaatcacgtattccagcagatttaaagtacttttccagttttgccttgtcatggattttttcatggcaatacagatacggaaaaactgaaaacagcaagcaatatccaccgttacagagacacgcctttgtaaaatggtggtcacaattcgatacttcaaaggctgctccagatcaagtcaataactggttccagagcaatcctgagttcctcaaacctgctgatcaagagacatctttgttcctgaatcagaagtcgcaactagcagcattcttagcaagctcaaaatctaaagagagtcttgctcagaatttcaaagaagttctccaactacttcaacaggaagtggaagaagaaccttccaagaaggaagctgaatcatccgagactaatgatgaccaagaagacgatccattctaccagaatgaagatgactgttttggtatatcgttagacgacgattaattagttgtagtaatcatgaattattgtaactaatttgtcagtaatgtaatttgtaaaagttttgtaacaattccggtaaacattaccgacactgtagaaacagtaaaaattgagtctatttaaaggagtcctcgttccctttgtgaggcaccctttcagataatctcataatcaggttttgagagagagaagctctgcctagggaaaatctctttgtaagcttttctttcggtttcaataaatttcaagttctatttttcatatctcccttctcccctcaccgatcttgtgcggctctgccgtcgctttggtttctttgttttcaaaaacctgggtttgtaagccgtttcggtgtgcccttgatatctgctttacaagtttatagtttcctttcatttatcatactgcattcttacttcctatccgtttgatcttattccgttgatctctggatatatatatatatatatattactagactattttattattgttagaaatatatattgtctaagat

SEQ ID NO: 13861 - DNA, 1113 bp, Glycine max
  Gm_smallRNAprecursor_6694
gaagaagtccaacagggattccaacaattcaacaagctctataatagcaaggaatcacgtattccagcagatttaaagtacttttccagttttgccttgtcatggattttttcatggcaatacagatacggaaaaactgaaaacagcaagcaatatccaccgttacagagacacgcctttgtaaaatggtggtcacaattcgatacttcaaaggctgctccagatcaagtcaataactggttccagagcaatcctgagttcctcaaacctgctgatcaagagacatctttgttcctgaatcagaagtcgcaactagcagcattcttagcaagctcaaaatctaaagagagtcttgctcagaatttcaaagaagttctccaactacttcaacaggaagtggaagaagaaccttccaagaaggaagctgaatcatccgagactaatgatgaccaagaagacgatccattctaccagaatgaagatgactgttttggtatatcgttagacgacgattaattagttgtagtaatcatgaattattgtaactaatttgtcagtaatgtaatttgtaaaagttttgtaacaattccggtaaacattaccgacactgtagaaacagtaaaaattgagtctatttaaaggagtcctcgttccctttgtgaggcaccctttcagataatctcataatcaggttttgagagagagaagctctgcctagggaaaatctctttgtaagcttttctttcggtttcaataaatttcaagttctatttttcatatctcccttctcccctcaccgatcttgtgcggctctgccgtcgctttggtttctttgttttcaaaaacctgggtttgtaagccgtttcggtgtgcccttgatatctgctttacaagtttatagtttcctttcatttatcatactgcattcttacttcctatccgtttgatcttattccgttgatctctggatatatatatatatatatattactagactattttattattgttagaaatatatattgtctaagattatatacagggcaaagtattaaaaagttttataaattattactattttataaattattataaaacagtaataatttataa

SEQ ID NO: 13862 - DNA, 1053 bp, Glycine max
  Gm_smallRNAprecursor_6695
tcaacttaatttaaccacactacctttaatttcaccttcttgtggtctgactctcaataattcctcacataaatcagctcaattaagatttgttggaccgattaatggtaaaccatccacacgtatacataaaaatacagagacgtcttggagagtaatagtacactctccgcatctcatgtgaaacgtatgtgtttccggcctccatctttctatcagagcactaattaatgaggcatttatttttaagtatctcatcttcataatccagtaaaaaccagattgtcgaagaaaaggaataatttgctctggaatttcatcttccccttgatacgtggggacaactcgtctgatatgtaatttccgatcttcttccccattcccaacatgttctgaaacatgcttaggttgcatccataatacatcaccatcgatgggaccagacttaattttaatatgtgatggacatgacgatgaagatgtcattgctactgcaaaataaaatataatacaataaatttacaaatcaatttatacattatttgcagataatataaattaaactacgcacatttataaaaacgttattaaatatataacaataaatttgtaataaataaaactgggcaattttgaatatattctatagataaattaaaatacatgtgaagacaaatttaaataaataaaaaaatatattctacaattaacaaaaaaataattaaataaaatatggactaacaaattatttataatacaaaaaaatattgaaatgcaaaaaattatttaaacaatatatatacaaaaataataataatgtacaatgtatcatatatttaataacataaatttcctaaaacaaataatattaacctaccaactaaaactaacactatcttatcatatatatatatatatatatatatatatatatataactaaaaactaaaaataattaactcaaacaatattaacttatcaattcatttatttaaaactatactatctatatataacatacaaaattataacactaaaaaggaaaatttatgt

SEQ ID NO: 13863 - DNA, 1165 bp, Glycine max
  Gm_smallRNAprecursor_6696
aatcgattaccagaaacctgtaattgattaccagtgaagaatttcagaaaaagcttttgaaaagacacatatcttcaaaccattttaaaaaggcacgaagggtaatttgaaaaggcacgaagggcctatatatatgtgtgtttgacttcaaaaagtaagagagagatattccaagagaacctcattgtcaaatgcttctgtgttttcttccgtgcctcctcgttataaatctcagctttattcgaggttgcactagaacgatcaccaccaatctgtgcttcttcctcgtctatcaggtcaatatctttcctttcaacttttgttttgtaaattacagtgtagttttcaaaagcaaaggtgaaaggaaagatattgagctggtagaggaggaacaggcacggattggtgctgatccttctagtgggacctccaataaatctgagaattataaggaggaagcatggaagaaaacacagaagcataaaccaaagagggtggagagtgtcaacgctgatgcagaagcctttggtgatgacttgaaaattctgattgctctatgcattgtgaagctgaagcagtagaacatatgaacaaaagagatacaggccatcaaaatttggcattggacaataagacaggagattcaactatgctgaagatgggagattcagctaaagttgtgatcaaacaagacatgaagggaagaaggcataaatatgggtttaacaacaatgaacgtgagaaggcacagaagaaaagggtggtggatgatgaaactgccgacaaacatcagctggatgaagtcctatgaagatcctcctcattctcaaagaggggaacgagcaacaatttgaaggttgtacattcaggaactaaagaattcaaaatagctagtcataagagggatttgtttttgggattttctgagcaccaagagcggctacacaagaagtttgcacttgaggagggaaggatatttgcagctaatgaacaagtttcttaactatttgtccttaagattttactgtttctttttgctaatatgtaaatataaatggtataagggtatggcgtaaaaacatggtctatatttacttctaagattgttaggggtaaaaatgaccatgtccctatggcataaccttatattatttatatttacata

SEQ ID NO: 13864 - DNA, 1086 bp, Glycine max
  Gm_smallRNAprecursor_6697
agctgccttgagaaattctggatgcgattggaaccaaagctttacttgttctggatcagctttggatgtatcaaattgtgcccaacattttacaaatgcatgcctctgtagagatggatattgattagttttctcagtcttactgtaacgatattgccatgaaaagatccatgacaaagcaaaactagagaaatactttaggtctgccggaattagtgtttattgagaattgatttgtttttcaaatttggcaagtccttgttgaacctgctctagaaaaatctccagaatgaggccaaagaaatcccaccattgtaagaaccagtttgggaaattatagattgtgtttgttttgaaatatattaaccatgagtgcttgaagcgggtattttggtgccaaaaaaattttgtccaagcatcaacataatcccaataggtataacctataggatcaaatggtactaaaatttttttccctttgtttaagtctgaaccaaagtgtcttggttgaagaacttttaggatctgtattgttgagtgagtgttcaacgtctgatcctttgggtctttgaagtgcttgatagacactgaatttgagtctaccaatatcagttcatataaggttcttgagttgttgatggcagttggtttaaagtgaaatcctgtcgggaacgccttggctgttgccttgaatgggttcttatcccagaattcaagttccatctgcgaaacaataaaaagaaaatttgtttttataattgttagtttgtttggtggttggtgtttgagttttggctagggtttgtttccctttaggattgataactattttgggcattgaaacatcttggatcattttttgtaaatttgtttcagaatcgttgtcagattctgaggcaatgtctgcccaagattttttaattatttttgggaatttagtcaaacccatttcttgaagggcttgaagtgtttgaattgaccaagcatagtcggctgatgtttgtttggcggttgccggtttggaagattcctgaggggatgactcaggtttgactgagatgatttgggtcgatgacccttcaattt

SEQ ID NO: 13865 - DNA, 1085 bp, Glycine max
  Gm_smallRNAprecursor_6698
gctgccttgagaaattctggatgcgattggaaccaaagctttacttgttctggatcagctttggatgtatcaaattgtgcccaacattttacaaatgcatgcctctgtagagatggatattgattagttttctcagtcttactgtaacgatattgccatgaaaagatccatgacaaagcaaaactagagaaatactttaggtctgccggaattagtgtttattgagaattgatttgtttttcaaatttggcaagtccttgttgaacctgctctagaaaaatctccagaatgaggccaaagaaatcccaccattgtaagaaccagtttgggaaattatagattgtgtttgttttgaaatatattaaccatgagtgcttgaagcgggtattttggtgccaaaaaaattttgtccaagcatcaacataatcccaataggtataacctataggatcaaatggtactaaaatttttttccctttgtttaagtctgaaccaaagtgtcttggttgaagaacttttaggatctgtattgttgagtgagtgttcaacgtctgatcctttgggtctttgaagtgcttgatagacactgaatttgagtctaccaatatcagttcatataaggttcttgagttgttgatggcagttggtttaaagtgaaatcctgtcgggaacgccttggctgttgccttgaatgggttcttatcccagaattcaagttccatctgcgaaacaataaaaagaaaatttgtttttataattgttagtttgtttggtggttggtgtttgagttttggctagggtttgtttccctttaggattgataactattttgggcattgaaacatcttggatcattttttgtaaatttgtttcagaatcgttgtcagattctgaggcaatgtctgcccaagattttttaattatttttgggaatttagtcaaacccatttcttgaagggcttgaagtgtttgaattgaccaagcatagtcggctgatgtttgtttggcggttgccggtttggaagattcctgaggggatgactcaggtttgactgagatgatttgggtcgatgacccttcaattt

SEQ ID NO: 13866 - DNA, 1239 bp, Glycine max
  Gm_smallRNAprecursor_6699
aattaaattactcgttgatgaaaaataaatgtgtggtttgaataaaatgacaatttttttttaatttcacttaaattttaaaattttatgtcaaatacacaaacttaagtatgagagaaacattttaaaatataatatacataaataaaaaaaaatagtaaaatgtaaacaattaaattaaattttatctcttttattgaaagcatcttcgtacgccgttttaatctacacattttgtatatgtcaagttgcggttgaaatcatgatagtaattcatgatattcatcatatagaaacaaaaaaaaagtaggaaggaaaaaaattataaagtgatagttaagtacccttaagaaaataataacttgatatatatatatatagcctgatggggaagtaggaatactatccgtaaggacatatgttaacaaattttatggatctggaactaaagtcttgtatagtacacataatgttttactttgatttgtacaataagtgtttgaacagtacttcctggaagtacagcagtctaatattttagttgaatggtactgtagcagtaagacccgtgttggataaagggcggtaaggctaaggtgtactgtttaaccaaaatatcaagacataatacactggtggctataggattgccgttcaaactatttttcataaaaaaaaaagtttttcttaaaaataattcagatccagaaaaattttgtgacatatttacttacggagatatttctatggaaccaaatgaaggcaaagatattagagaatattataatcatgtctagactattacgatctcttttcgctcaaactcctcctcatcctcttcttcaagaaactccaatttattaaatgatcaagataaccagacccaagaggtcgccccaaaacacaatctcttcgatcaggaagttcgattcgaagatatcaatcaaaacatggatgactggaacattccagaaatccctcaggatcaactatacgttcctgaaacaataaagaacaaacacaactttgattacataatcaaaacagtagaaaacaatattcctctaggacaagatataggggaagaatttcatttactttcaaaaaattcaatttatgaacatagtcgtaagtataaatatctacacatcggttgtgtacaagtagccatcaagcccttaattgatatgggcatagatgcagcagttttaatgtgtctaagagacatttggcataatc

SEQ ID NO: 13867 - DNA, 1196 bp, Glycine max
  Gm_smallRNAprecursor_6700
tgatgaaaaataaatgtgtggtttgaataaaatgacaatttttttttaatttcacttaaattttaaaattttatgtcaaatacacaaacttaagtatgagagaaacattttaaaatataatatacataaataaaaaaaaatagtaaaatgtaaacaattaaattaaattttatctcttttattgaaagcatcttcgtacgccgttttaatctacacattttgtatatgtcaagttgcggttgaaatcatgatagtaattcatgatattcatcatatagaaacaaaaaaaaagtaggaaggaaaaaaattataaagtgatagttaagtacccttaagaaaataataacttgatatatatatatatagcctgatggggaagtaggaatactatccgtaaggacatatgttaacaaattttatggatctggaactaaagtcttgtatagtacacataatgttttactttgatttgtacaataagtgtttgaacagtacttcctggaagtacagcagtctaatattttagttgaatggtactgtagcagtaagacccgtgttggataaagggcggtaaggctaaggtgtactgtttaaccaaaatatcaagacataatacactggtggctataggattgccgttcaaactatttttcataaaaaaaaaagtttttcttaaaaataattcagatccagaaaaattttgtgacatatttacttacggagatatttctatggaaccaaatgaaggcaaagatattagagaatattataatcatgtctagactattacgatctcttttcgctcaaactcctcctcatcctcttcttcaagaaactccaatttattaaatgatcaagataaccagacccaagaggtcgccccaaaacacaatctcttcgatcaggaagttcgattcgaagatatcaatcaaaacatggatgactggaacattccagaaatccctcaggatcaactatacgttcctgaaacaataaagaacaaacacaactttgattacataatcaaaacagtagaaaacaatattcctctaggacaagatataggggaagaatttcatttactttcaaaaaattcaatttatgaacatagtcgtaagtataaatatctacacatcggttgtgtacaagtagccatcaagcccttaattgatatgggcatagatgcagcagtttta

SEQ ID NO: 13868 - DNA, 1167 bp, Glycine max
  Gm_smallRNAprecursor_6701
taaataaaaaaaaatagtaaaatgtaaacaattaaattaaattttatctcttttattgaaagcatcttcgtacgccgttttaatctacacattttgtatatgtcaagttgcggttgaaatcatgatagtaattcatgatattcatcatatagaaacaaaaaaaaagtaggaaggaaaaaaattataaagtgatagttaagtacccttaagaaaataataacttgatatatatatatatagcctgatggggaagtaggaatactatccgtaaggacatatgttaacaaattttatggatctggaactaaagtcttgtatagtacacataatgttttactttgatttgtacaataagtgtttgaacagtacttcctggaagtacagcagtctaatattttagttgaatggtactgtagcagtaagacccgtgttggataaagggcggtaaggctaaggtgtactgtttaaccaaaatatcaagacataatacactggtggctataggattgccgttcaaactatttttcataaaaaaaaaagtttttcttaaaaataattcagatccagaaaaattttgtgacatatttacttacggagatatttctatggaaccaaatgaaggcaaagatattagagaatattataatcatgtctagactattacgatctcttttcgctcaaactcctcctcatcctcttcttcaagaaactccaatttattaaatgatcaagataaccagacccaagaggtcgccccaaaacacaatctcttcgatcaggaagttcgattcgaagatatcaatcaaaacatggatgactggaacattccagaaatccctcaggatcaactatacgttcctgaaacaataaagaacaaacacaactttgattacataatcaaaacagtagaaaacaatattcctctaggacaagatataggggaagaatttcatttactttcaaaaaattcaatttatgaacatagtcgtaagtataaatatctacacatcggttgtgtacaagtagccatcaagcccttaattgatatgggcatagatgcagcagttttaatgtgtctaagagacatttggcataatcaatttgaagactccctaattggaacagtcaaaaccagcctaggacaaggtctgatatattttaactgtt

SEQ ID NO: 13869 - DNA, 1080 bp, Glycine max
  Gm_smallRNAprecursor_6702
atgatttcgttttagaaacaatggccctatttgacacaggggctgattcaaactgcattttagaaggattaattcctacaaaattctttgagaaaacctcagaaaaattaagtacggaaaacggctcaaaattaaaaattaattttaagctatcaaatgcaatcattgaaaaccaaggtcttaggattaacacaaactttcttctggtaaaaaaccttaagaatgaagtaatcttaggaacgcccttcattagagccctgtttcccatccaaatatctaatgaaggaataaccacaaattatttaggaagaaagattatatttaatttttctactaaaccaatttccagaaatataaatcttatagaaaataagattaatcaaattaacttcttaaaagaagaagtatcttttaataatattcagatacaactaggaaaaccctaagtaaaagaaaaaattcaatctttattaaatcatattgaatcaaccgtctgttctgaattgccacatgcattttgggatagaaagaaacatattgttgatctcccctatgagaaagactttagggaaaaacaaattcccacaaaagccagaccaatccaaatgaatgaagaacttcttcaatactgtcaaaaggaaatcaaggatttgcttgataaaggcctaatccggaaaagcaagagcccatggtcttgtgcggctttttatgtcaacaaacaatctgagattgagcatggaacaccccgcttagtcataaattacaaaccactaaatcaaacattacaatggattagatatcctattccaaacaaaaaagatttgcttaacagattaaattctgcaaagatattttcaaaatttgatatgaaatctggattttggcaaatccaaatccaagaatcagataggtacaaaacaacgtttactgtacctttcgggcaatatgaatggaatgtaatgccattcggactgaagaatgccccttccgaatttcaaaaaattatgaatgatatttttaatccctattcaaaatttgtcattgtctacatagatgatgttttaatcttttcccaaaaca

SEQ ID NO: 13870 - DNA, 1198 bp, Glycine max
  Gm_smallRNAprecursor_6703
atagaaagaaacatattgttgatctcccctatgagaaagactttagggaaaaacaaattcccacaaaagccagaccaatccaaatgaatgaagaacttcttcaatactgtcaaaaggaaatcaaggatttgcttgataaaggcctaatccggaaaagcaagagcccatggtcttgtgcggctttttatgtcaacaaacaatctgagattgagcatggaacaccccgcttagtcataaattacaaaccactaaatcaaacattacaatggattagatatcctattccaaacaaaaaagatttgcttaacagattaaattctgcaaagatattttcaaaatttgatatgaaatctggattttggcaaatccaaatccaagaatcagataggtacaaaacaacgtttactgtacctttcgggcaatatgaatggaatgtaatgccattcggactgaagaatgccccttccgaatttcaaaaaattatgaatgatatttttaatccctattcaaaatttgtcattgtctacatagatgatgttttaatcttttcccaaaacattgaccaacatttcaaacatctccaaaccttcatccatatcatcaaacaaaatggtttggcagtctccaaatcaaaaatcaatcttttccaaacacgaattcgattccttggtcacaatatttatcaaggaacaatcgttccaatcgaaaggtcaatagagtttgctagcaaattccccaaccaaatcttagacaaaacccagttacaaagatttctaggttgtctaaattacgtaggtgaatttgtcccctacttaaacaatactgtcaaacctttgcatgataggctaaagaaaaatctgcctccttggtctgacctccatacccaaacggttaaagaaatcaaagtcaaagtccaatccataaaatgtctgtatcttcccattccacaggcattcaaaattgtcgaaactgatgcatcagacatcggttacggtggcatcctcaaacaacaagtacatggtcaagaacatgtcatcgcatatacttcaaaacactggaatcctgcacaattaaagtattcaactgttaaaaaagaagttttagcaattgttttgtgcatttccaaatttcaatctgatttattaaatcaaaagtttttagtaagggttgactgcaaatcagccaaagacattttaca

SEQ ID NO: 13871 - DNA, 1234 bp, Glycine max
  Gm_smallRNAprecursor_6704
atagaaagaaacatattgttgatctcccctatgagaaagactttagggaaaaacaaattcccacaaaagccagaccaatccaaatgaatgaagaacttcttcaatactgtcaaaaggaaatcaaggatttgcttgataaaggcctaatccggaaaagcaagagcccatggtcttgtgcggctttttatgtcaacaaacaatctgagattgagcatggaacaccccgcttagtcataaattacaaaccactaaatcaaacattacaatggattagatatcctattccaaacaaaaaagatttgcttaacagattaaattctgcaaagatattttcaaaatttgatatgaaatctggattttggcaaatccaaatccaagaatcagataggtacaaaacaacgtttactgtacctttcgggcaatatgaatggaatgtaatgccattcggactgaagaatgccccttccgaatttcaaaaaattatgaatgatatttttaatccctattcaaaatttgtcattgtctacatagatgatgttttaatcttttcccaaaacattgaccaacatttcaaacatctccaaaccttcatccatatcatcaaacaaaatggtttggcagtctccaaatcaaaaatcaatcttttccaaacacgaattcgattccttggtcacaatatttatcaaggaacaatcgttccaatcgaaaggtcaatagagtttgctagcaaattccccaaccaaatcttagacaaaacccagttacaaagatttctaggttgtctaaattacgtaggtgaatttgtcccctacttaaacaatactgtcaaacctttgcatgataggctaaagaaaaatctgcctccttggtctgacctccatacccaaacggttaaagaaatcaaagtcaaagtccaatccataaaatgtctgtatcttcccattccacaggcattcaaaattgtcgaaactgatgcatcagacatcggttacggtggcatcctcaaacaacaagtacatggtcaagaacatgtcatcgcatatacttcaaaacactggaatcctgcacaattaaagtattcaactgttaaaaaagaagttttagcaattgttttgtgcatttccaaatttcaatctgatttattaaatcaaaagtttttagtaagggttgactgcaaatcagccaaagacattttacagaaggatgtaaaacccttgcctcaaaacagattttt

SEQ ID NO: 13872 - DNA, 1157 bp, Glycine max
  Gm_smallRNAprecursor_6705
cctattccaaacaaaaaagatttgcttaacagattaaattctgcaaagatattttcaaaatttgatatgaaatctggattttggcaaatccaaatccaagaatcagataggtacaaaacaacgtttactgtacctttcgggcaatatgaatggaatgtaatgccattcggactgaagaatgccccttccgaatttcaaaaaattatgaatgatatttttaatccctattcaaaatttgtcattgtctacatagatgatgttttaatcttttcccaaaacattgaccaacatttcaaacatctccaaaccttcatccatatcatcaaacaaaatggtttggcagtctccaaatcaaaaatcaatcttttccaaacacgaattcgattccttggtcacaatatttatcaaggaacaatcgttccaatcgaaaggtcaatagagtttgctagcaaattccccaaccaaatcttagacaaaacccagttacaaagatttctaggttgtctaaattacgtaggtgaatttgtcccctacttaaacaatactgtcaaacctttgcatgataggctaaagaaaaatctgcctccttggtctgacctccatacccaaacggttaaagaaatcaaagtcaaagtccaatccataaaatgtctgtatcttcccattccacaggcattcaaaattgtcgaaactgatgcatcagacatcggttacggtggcatcctcaaacaacaagtacatggtcaagaacatgtcatcgcatatacttcaaaacactggaatcctgcacaattaaagtattcaactgttaaaaaagaagttttagcaattgttttgtgcatttccaaatttcaatctgatttattaaatcaaaagtttttagtaagggttgactgcaaatcagccaaagacattttacagaaggatgtaaaacccttgcctcaaaacagatttttgcaagatggcaagcaattttaagtgtctttgattttaatatagaatatatcaagggctcttccaactctctacctgactacctcacccgtgaatttttacagaaaattcccgatgcctcctaaggtgtctagttcctccggcagaggaggaagatccagtacaaaaggtaaagaagttttactggctctaccagagccaat

SEQ ID NO: 13873 - DNA, 1038 bp, Glycine max
  Gm_smallRNAprecursor_6706
tacctttcgggcaatatgaatggaatgtaatgccattcggactgaagaatgccccttccgaatttcaaaaaattatgaatgatatttttaatccctattcaaaatttgtcattgtctacatagatgatgttttaatcttttcccaaaacattgaccaacatttcaaacatctccaaaccttcatccatatcatcaaacaaaatggtttggcagtctccaaatcaaaaatcaatcttttccaaacacgaattcgattccttggtcacaatatttatcaaggaacaatcgttccaatcgaaaggtcaatagagtttgctagcaaattccccaaccaaatcttagacaaaacccagttacaaagatttctaggttgtctaaattacgtaggtgaatttgtcccctacttaaacaatactgtcaaacctttgcatgataggctaaagaaaaatctgcctccttggtctgacctccatacccaaacggttaaagaaatcaaagtcaaagtccaatccataaaatgtctgtatcttcccattccacaggcattcaaaattgtcgaaactgatgcatcagacatcggttacggtggcatcctcaaacaacaagtacatggtcaagaacatgtcatcgcatatacttcaaaacactggaatcctgcacaattaaagtattcaactgttaaaaaagaagttttagcaattgttttgtgcatttccaaatttcaatctgatttattaaatcaaaagtttttagtaagggttgactgcaaatcagccaaagacattttacagaaggatgtaaaacccttgcctcaaaacagatttttgcaagatggcaagcaattttaagtgtctttgattttaatatagaatatatcaagggctcttccaactctctacctgactacctcacccgtgaatttttacagaaaattcccgatgcctcctaaggtgtctagttcctccggcagaggaggaagatccagtacaaaaggtaaagaagttttactggctctaccagagccaataaccaaaaagg

SEQ ID NO: 13874 - DNA, 1108 bp, Glycine max
  Gm_smallRNAprecursor_6707
aagtgtctttgattttaatatagaatatatcaagggctcttccaactctctacctgactacctcacccgtgaatttttacagaaaattcccgatgcctcctaaggtgtctagttcctccggcagaggaggaagatccagtacaaaaggtaaagaagttttactggctctaccagagccaataaccaaaaaggcaactacaacatcttctgggtcacctacccagactgggtcatcaacccagaaaggaaaacttgaaggttcattaacccagacaactaccgtcaaatctgagtcatcaactcaggaatccccaaaaccaacaacaaccaaacagactgtggctgactatgcctggtcaatacaaactctcttggccttagaagatataggcctcaccaaaataccaaaattagccaaaaagacctgggcagaaatggcctcagaatcagacgatgattctgaaacagatctgcaaaaacaaatccaaaaagccaaacagaccaaaactgtctgtaaccaaaaaccaagccaatcgttgactcaacaagaatcaacaccacaacccggtaacagttacatttcaaaaaacaaatttttcaatgttttacaaatggaaccagaatactgggacaagaatcctttcaaagcaaccgccaaagtattccccccgggattccattacaggccaatagccacaaacaaaacccgcaaattctacgaattcattctaatagatacaaactcagtatctattaaacacttcaaagaccccaaagatccaaatctaaatacccattccacaatccaaatcttgaaggttatgcagccacgacattatggctcaaacttaaaccaacccaaaaaattttctgcaccatttgaccctgcaggatataattattgggattacattgacgcctggaccaatgtgttctggcatcaaaatagtaaattcaagcattcatggctgatttacttcaaaaataatactgcgtataattttccaaattggttcctccaatggtggaactacttcggaccaattccacaaatatttccagaagaagtccaacagggattccaacaattcaacaagctctataatag

SEQ ID NO: 13875 - DNA, 1122 bp, Glycine max
  Gm_smallRNAprecursor_6708
agatataggcctcaccaaaataccaaaattagccaaaaagacctgggcagaaatggcctcagaatcagacgatgattctgaaacagatctgcaaaaacaaatccaaaaagccaaacagaccaaaactgtctgtaaccaaaaaccaagccaatcgttgactcaacaagaatcaacaccacaacccggtaacagttacatttcaaaaaacaaatttttcaatgttttacaaatggaaccagaatactgggacaagaatcctttcaaagcaaccgccaaagtattccccccgggattccattacaggccaatagccacaaacaaaacccgcaaattctacgaattcattctaatagatacaaactcagtatctattaaacacttcaaagaccccaaagatccaaatctaaatacccattccacaatccaaatcttgaaggttatgcagccacgacattatggctcaaacttaaaccaacccaaaaaattttctgcaccatttgaccctgcaggatataattattgggattacattgacgcctggaccaatgtgttctggcatcaaaatagtaaattcaagcattcatggctgatttacttcaaaaataatactgcgtataattttccaaattggttcctccaatggtggaactacttcggaccaattccacaaatatttccagaagaagtccaacagggattccaacaattcaacaagctctataatagcaagtaatcacgtattctggcagatttaaagtacttttccagttttgccttgtcatggatcttttcatggcaatacagatacggaaaaactaaaaacagcaagcaatatccaccgttacagagacacgcctttgtaaaatggtggtcacaattcgatacttcaaaggctgctccagatcaagtcaagaactggttccagagcaatcctgagttccttaaacctgctgatccggagacatctttgtttctaaatcagaagtcgcaactggcagcattcttagcaagctcaaaatctaaagagagtcttgctcagaatctcaaagaagttctccaactacttcaacaggaagtggaagaagaaccttccaagaaggaagctgaatcatccgagactaa

SEQ ID NO: 13876 - DNA, 1191 bp, Glycine max
  Gm_smallRNAprecursor_6709
gttacatttcaaaaaacaaatttttcaatgttttacaaatggaaccagaatactgggacaagaatcctttcaaagcaaccgccaaagtattccccccgggattccattacaggccaatagccacaaacaaaacccgcaaattctacgaattcattctaatagatacaaactcagtatctattaaacacttcaaagaccccaaagatccaaatctaaatacccattccacaatccaaatcttgaaggttatgcagccacgacattatggctcaaacttaaaccaacccaaaaaattttctgcaccatttgaccctgcaggatataattattgggattacattgacgcctggaccaatgtgttctggcatcaaaatagtaaattcaagcattcatggctgatttacttcaaaaataatactgcgtataattttccaaattggttcctccaatggtggaactacttcggaccaattccacaaatatttccagaagaagtccaacagggattccaacaattcaacaagctctataatagcaagtaatcacgtattctggcagatttaaagtacttttccagttttgccttgtcatggatcttttcatggcaatacagatacggaaaaactaaaaacagcaagcaatatccaccgttacagagacacgcctttgtaaaatggtggtcacaattcgatacttcaaaggctgctccagatcaagtcaagaactggttccagagcaatcctgagttccttaaacctgctgatccggagacatctttgtttctaaatcagaagtcgcaactggcagcattcttagcaagctcaaaatctaaagagagtcttgctcagaatctcaaagaagttctccaactacttcaacaggaagtggaagaagaaccttccaagaaggaagctgaatcatccgagactaatgatgaccaagaagatgatccattctaccagaatgaagatgactgttttggtatatcattagacgacgattaattagttgtagtaatcatgaattattgtaactaatttgtcagtttcttttaaataatgtaatttgtaaaagttttgtaacagttccggtaaacattaccgatactgtagaaatagtaaaaattgggtctatttaaaggagtcctcgtcccctttgtgaggcaccctttcagatagtctcagaatcagg

SEQ ID NO: 13877 - DNA, 1066 bp, Glycine max
  Gm_smallRNAprecursor_6710
atttcaaaaaacaaatttttcaatgttttacaaatggaaccagaatactgggacaagaatcctttcaaagcaaccgccaaagtattccccccgggattccattacaggccaatagccacaaacaaaacccgcaaattctacgaattcattctaatagatacaaactcagtatctattaaacacttcaaagaccccaaagatccaaatctaaatacccattccacaatccaaatcttgaaggttatgcagccacgacattatggctcaaacttaaaccaacccaaaaaattttctgcaccatttgaccctgcaggatataattattgggattacattgacgcctggaccaatgtgttctggcatcaaaatagtaaattcaagcattcatggctgatttacttcaaaaataatactgcgtataattttccaaattggttcctccaatggtggaactacttcggaccaattccacaaatatttccagaagaagtccaacagggattccaacaattcaacaagctctataatagcaagtaatcacgtattctggcagatttaaagtacttttccagttttgccttgtcatggatcttttcatggcaatacagatacggaaaaactaaaaacagcaagcaatatccaccgttacagagacacgcctttgtaaaatggtggtcacaattcgatacttcaaaggctgctccagatcaagtcaagaactggttccagagcaatcctgagttccttaaacctgctgatccggagacatctttgtttctaaatcagaagtcgcaactggcagcattcttagcaagctcaaaatctaaagagagtcttgctcagaatctcaaagaagttctccaactacttcaacaggaagtggaagaagaaccttccaagaaggaagctgaatcatccgagactaatgatgaccaagaagatgatccattctaccagaatgaagatgactgttttggtatatcattagacgacgattaattagttgtagtaatcatgaattattgtaactaatttgtcagtttcttttaaataatgtaatttgtaa

SEQ ID NO: 13878 - DNA, 1067 bp, Glycine max
  Gm_smallRNAprecursor_6711
atttcaaaaaacaaatttttcaatgttttacaaatggaaccagaatactgggacaagaatcctttcaaagcaaccgccaaagtattccccccgggattccattacaggccaatagccacaaacaaaacccgcaaattctacgaattcattctaatagatacaaactcagtatctattaaacacttcaaagaccccaaagatccaaatctaaatacccattccacaatccaaatcttgaaggttatgcagccacgacattatggctcaaacttaaaccaacccaaaaaattttctgcaccatttgaccctgcaggatataattattgggattacattgacgcctggaccaatgtgttctggcatcaaaatagtaaattcaagcattcatggctgatttacttcaaaaataatactgcgtataattttccaaattggttcctccaatggtggaactacttcggaccaattccacaaatatttccagaagaagtccaacagggattccaacaattcaacaagctctataatagcaagtaatcacgtattctggcagatttaaagtacttttccagttttgccttgtcatggatcttttcatggcaatacagatacggaaaaactaaaaacagcaagcaatatccaccgttacagagacacgcctttgtaaaatggtggtcacaattcgatacttcaaaggctgctccagatcaagtcaagaactggttccagagcaatcctgagttccttaaacctgctgatccggagacatctttgtttctaaatcagaagtcgcaactggcagcattcttagcaagctcaaaatctaaagagagtcttgctcagaatctcaaagaagttctccaactacttcaacaggaagtggaagaagaaccttccaagaaggaagctgaatcatccgagactaatgatgaccaagaagatgatccattctaccagaatgaagatgactgttttggtatatcattagacgacgattaattagttgtagtaatcatgaattattgtaactaatttgtcagtttcttttaaataatgtaatttgtaaa

SEQ ID NO: 13879 - DNA, 1069 bp, Glycine max
  Gm_smallRNAprecursor_6712
atttcaaaaaacaaatttttcaatgttttacaaatggaaccagaatactgggacaagaatcctttcaaagcaaccgccaaagtattccccccgggattccattacaggccaatagccacaaacaaaacccgcaaattctacgaattcattctaatagatacaaactcagtatctattaaacacttcaaagaccccaaagatccaaatctaaatacccattccacaatccaaatcttgaaggttatgcagccacgacattatggctcaaacttaaaccaacccaaaaaattttctgcaccatttgaccctgcaggatataattattgggattacattgacgcctggaccaatgtgttctggcatcaaaatagtaaattcaagcattcatggctgatttacttcaaaaataatactgcgtataattttccaaattggttcctccaatggtggaactacttcggaccaattccacaaatatttccagaagaagtccaacagggattccaacaattcaacaagctctataatagcaagtaatcacgtattctggcagatttaaagtacttttccagttttgccttgtcatggatcttttcatggcaatacagatacggaaaaactaaaaacagcaagcaatatccaccgttacagagacacgcctttgtaaaatggtggtcacaattcgatacttcaaaggctgctccagatcaagtcaagaactggttccagagcaatcctgagttccttaaacctgctgatccggagacatctttgtttctaaatcagaagtcgcaactggcagcattcttagcaagctcaaaatctaaagagagtcttgctcagaatctcaaagaagttctccaactacttcaacaggaagtggaagaagaaccttccaagaaggaagctgaatcatccgagactaatgatgaccaagaagatgatccattctaccagaatgaagatgactgttttggtatatcattagacgacgattaattagttgtagtaatcatgaattattgtaactaatttgtcagtttcttttaaataatgtaatttgtaaaag

SEQ ID NO: 13880 - DNA, 1086 bp, Glycine max
  Gm_smallRNAprecursor_6713
caaagcaaccgccaaagtattccccccgggattccattacaggccaatagccacaaacaaaacccgcaaattctacgaattcattctaatagatacaaactcagtatctattaaacacttcaaagaccccaaagatccaaatctaaatacccattccacaatccaaatcttgaaggttatgcagccacgacattatggctcaaacttaaaccaacccaaaaaattttctgcaccatttgaccctgcaggatataattattgggattacattgacgcctggaccaatgtgttctggcatcaaaatagtaaattcaagcattcatggctgatttacttcaaaaataatactgcgtataattttccaaattggttcctccaatggtggaactacttcggaccaattccacaaatatttccagaagaagtccaacagggattccaacaattcaacaagctctataatagcaagtaatcacgtattctggcagatttaaagtacttttccagttttgccttgtcatggatcttttcatggcaatacagatacggaaaaactaaaaacagcaagcaatatccaccgttacagagacacgcctttgtaaaatggtggtcacaattcgatacttcaaaggctgctccagatcaagtcaagaactggttccagagcaatcctgagttccttaaacctgctgatccggagacatctttgtttctaaatcagaagtcgcaactggcagcattcttagcaagctcaaaatctaaagagagtcttgctcagaatctcaaagaagttctccaactacttcaacaggaagtggaagaagaaccttccaagaaggaagctgaatcatccgagactaatgatgaccaagaagatgatccattctaccagaatgaagatgactgttttggtatatcattagacgacgattaattagttgtagtaatcatgaattattgtaactaatttgtcagtttcttttaaataatgtaatttgtaaaagttttgtaacagttccggtaaacattaccgatactgtagaaatagtaaaaattgggtctatttaaaggagtcctcgtcccctt

SEQ ID NO: 13881 - DNA, 1086 bp, Glycine max; identical to SEQ ID NO: 13880
  Gm_smallRNAprecursor_6714

SEQ ID NO: 13882 - DNA, 1085 bp, Glycine max
  Gm_smallRNAprecursor_6715
aaagcaaccgccaaagtattccccccgggattccattacaggccaatagccacaaacaaaacccgcaaattctacgaattcattctaatagatacaaactcagtatctattaaacacttcaaagaccccaaagatccaaatctaaatacccattccacaatccaaatcttgaaggttatgcagccacgacattatggctcaaacttaaaccaacccaaaaaattttctgcaccatttgaccctgcaggatataattattgggattacattgacgcctggaccaatgtgttctggcatcaaaatagtaaattcaagcattcatggctgatttacttcaaaaataatactgcgtataattttccaaattggttcctccaatggtggaactacttcggaccaattccacaaatatttccagaagaagtccaacagggattccaacaattcaacaagctctataatagcaagtaatcacgtattctggcagatttaaagtacttttccagttttgccttgtcatggatcttttcatggcaatacagatacggaaaaactaaaaacagcaagcaatatccaccgttacagagacacgcctttgtaaaatggtggtcacaattcgatacttcaaaggctgctccagatcaagtcaagaactggttccagagcaatcctgagttccttaaacctgctgatccggagacatctttgtttctaaatcagaagtcgcaactggcagcattcttagcaagctcaaaatctaaagagagtcttgctcagaatctcaaagaagttctccaactacttcaacaggaagtggaagaagaaccttccaagaaggaagctgaatcatccgagactaatgatgaccaagaagatgatccattctaccagaatgaagatgactgttttggtatatcattagacgacgattaattagttgtagtaatcatgaattattgtaactaatttgtcagtttcttttaaataatgtaatttgtaaaagttttgtaacagttccggtaaacattaccgatactgtagaaatagtaaaaattgggtctatttaaaggagtcctcgtcccctt

SEQ ID NO: 13883 - DNA, 1085 bp, Glycine max; identical to SEQ ID NO: 13882
  Gm_smallRNAprecursor_6716

SEQ ID NO: 13884 - DNA, 1149 bp, Glycine max
  Gm_smallRNAprecursor_6717
agcaaccgccaaagtattccccccgggattccattacaggccaatagccacaaacaaaacccgcaaattctacgaattcattctaatagatacaaactcagtatctattaaacacttcaaagaccccaaagatccaaatctaaatacccattccacaatccaaatcttgaaggttatgcagccacgacattatggctcaaacttaaaccaacccaaaaaattttctgcaccatttgaccctgcaggatataattattgggattacattgacgcctggaccaatgtgttctggcatcaaaatagtaaattcaagcattcatggctgatttacttcaaaaataatactgcgtataattttccaaattggttcctccaatggtggaactacttcggaccaattccacaaatatttccagaagaagtccaacagggattccaacaattcaacaagctctataatagcaagtaatcacgtattctggcagatttaaagtacttttccagttttgccttgtcatggatcttttcatggcaatacagatacggaaaaactaaaaacagcaagcaatatccaccgttacagagacacgcctttgtaaaatggtggtcacaattcgatacttcaaaggctgctccagatcaagtcaagaactggttccagagcaatcctgagttccttaaacctgctgatccggagacatctttgtttctaaatcagaagtcgcaactggcagcattcttagcaagctcaaaatctaaagagagtcttgctcagaatctcaaagaagttctccaactacttcaacaggaagtggaagaagaaccttccaagaaggaagctgaatcatccgagactaatgatgaccaagaagatgatccattctaccagaatgaagatgactgttttggtatatcattagacgacgattaattagttgtagtaatcatgaattattgtaactaatttgtcagtttcttttaaataatgtaatttgtaaaagttttgtaacagttccggtaaacattaccgatactgtagaaatagtaaaaattgggtctatttaaaggagtcctcgtcccctttgtgaggcaccctttcagatagtctcagaatcaggtttttagagagagaagctctgcctagggaaa

SEQ ID NO: 13885 - DNA, 1165 bp, Glycine max
  Gm_smallRNAprecursor_6718
ctaatagatacaaactcagtatctattaaacacttcaaagaccccaaagatccaaatctaaatacccattccacaatccaaatcttgaaggttatgcagccacgacattatggctcaaacttaaaccaacccaaaaaattttctgcaccatttgaccctgcaggatataattattgggattacattgacgcctggaccaatgtgttctggcatcaaaatagtaaattcaagcattcatggctgatttacttcaaaaataatactgcgtataattttccaaattggttcctccaatggtggaactacttcggaccaattccacaaatatttccagaagaagtccaacagggattccaacaattcaacaagctctataatagcaagtaatcacgtattctggcagatttaaagtacttttccagttttgccttgtcatggatcttttcatggcaatacagatacggaaaaactaaaaacagcaagcaatatccaccgttacagagacacgcctttgtaaaatggtggtcacaattcgatacttcaaaggctgctccagatcaagtcaagaactggttccagagcaatcctgagttccttaaacctgctgatccggagacatctttgtttctaaatcagaagtcgcaactggcagcattcttagcaagctcaaaatctaaagagagtcttgctcagaatctcaaagaagttctccaactacttcaacaggaagtggaagaagaaccttccaagaaggaagctgaatcatccgagactaatgatgaccaagaagatgatccattctaccagaatgaagatgactgttttggtatatcattagacgacgattaattagttgtagtaatcatgaattattgtaactaatttgtcagtttcttttaaataatgtaatttgtaaaagttttgtaacagttccggtaaacattaccgatactgtagaaatagtaaaaattgggtctatttaaaggagtcctcgtcccctttgtgaggcaccctttcagatagtctcagaatcaggtttttagagagagaagctctgcctagggaaaaaactttgtaagcttttctttcggtttcaataaatttcaagttctgttttccatatctcccttctcccctcaccgatcctgtgcggctctgccgccgc

SEQ ID NO: 13886 - DNA, 1086 bp, Glycine max
  Gm_smallRNAprecursor_6719
taaatacccattccacaatccaaatcttgaaggttatgcagccacgacattatggctcaaacttaaaccaacccaaaaaattttctgcaccatttgaccctgcaggatataattattgggattacattgacgcctggaccaatgtgttctggcatcaaaatagtaaattcaagcattcatggctgatttacttcaaaaataatactgcgtataattttccaaattggttcctccaatggtggaactacttcggaccaattccacaaatatttccagaagaagtccaacagggattccaacaattcaacaagctctataatagcaagtaatcacgtattctggcagatttaaagtacttttccagttttgccttgtcatggatcttttcatggcaatacagatacggaaaaactaaaaacagcaagcaatatccaccgttacagagacacgcctttgtaaaatggtggtcacaattcgatacttcaaaggctgctccagatcaagtcaagaactggttccagagcaatcctgagttccttaaacctgctgatccggagacatctttgtttctaaatcagaagtcgcaactggcagcattcttagcaagctcaaaatctaaagagagtcttgctcagaatctcaaagaagttctccaactacttcaacaggaagtggaagaagaaccttccaagaaggaagctgaatcatccgagactaatgatgaccaagaagatgatccattctaccagaatgaagatgactgttttggtatatcattagacgacgattaattagttgtagtaatcatgaattattgtaactaatttgtcagtttcttttaaataatgtaatttgtaaaagttttgtaacagttccggtaaacattaccgatactgtagaaatagtaaaaattgggtctatttaaaggagtcctcgtcccctttgtgaggcaccctttcagatagtctcagaatcaggtttttagagagagaagctctgcctagggaaaaaactttgtaagcttttctttcggtttcaataaatttcaagttctgttttccatatctcccttctcccctcaccgat

SEQ ID NO: 13887 - DNA, 1137 bp, Glycine max
  Gm_smallRNAprecursor_6720
taaatacccattccacaatccaaatcttgaaggttatgcagccacgacattatggctcaaacttaaaccaacccaaaaaattttctgcaccatttgaccctgcaggatataattattgggattacattgacgcctggaccaatgtgttctggcatcaaaatagtaaattcaagcattcatggctgatttacttcaaaaataatactgcgtataattttccaaattggttcctccaatggtggaactacttcggaccaattccacaaatatttccagaagaagtccaacagggattccaacaattcaacaagctctataatagcaagtaatcacgtattctggcagatttaaagtacttttccagttttgccttgtcatggatcttttcatggcaatacagatacggaaaaactaaaaacagcaagcaatatccaccgttacagagacacgcctttgtaaaatggtggtcacaattcgatacttcaaaggctgctccagatcaagtcaagaactggttccagagcaatcctgagttccttaaacctgctgatccggagacatctttgtttctaaatcagaagtcgcaactggcagcattcttagcaagctcaaaatctaaagagagtcttgctcagaatctcaaagaagttctccaactacttcaacaggaagtggaagaagaaccttccaagaaggaagctgaatcatccgagactaatgatgaccaagaagatgatccattctaccagaatgaagatgactgttttggtatatcattagacgacgattaattagttgtagtaatcatgaattattgtaactaatttgtcagtttcttttaaataatgtaatttgtaaaagttttgtaacagttccggtaaacattaccgatactgtagaaatagtaaaaattgggtctatttaaaggagtcctcgtcccctttgtgaggcaccctttcagatagtctcagaatcaggtttttagagagagaagctctgcctagggaaaaaactttgtaagcttttctttcggtttcaataaatttcaagttctgttttccatatctcccttctcccctcaccgatcctgtgcggctctgccgccgcttcggtttctttcttttcaaaaacctgggt

SEQ ID NO: 13888 - DNA, 1121 bp, Glycine max
  Gm_smallRNAprecursor_6721
cattccacaatccaaatcttgaaggttatgcagccacgacattatggctcaaacttaaaccaacccaaaaaattttctgcaccatttgaccctgcaggatataattattgggattacattgacgcctggaccaatgtgttctggcatcaaaatagtaaattcaagcattcatggctgatttacttcaaaaataatactgcgtataattttccaaattggttcctccaatggtggaactacttcggaccaattccacaaatatttccagaagaagtccaacagggattccaacaattcaacaagctctataatagcaagtaatcacgtattctggcagatttaaagtacttttccagttttgccttgtcatggatcttttcatggcaatacagatacggaaaaactaaaaacagcaagcaatatccaccgttacagagacacgcctttgtaaaatggtggtcacaattcgatacttcaaaggctgctccagatcaagtcaagaactggttccagagcaatcctgagttccttaaacctgctgatccggagacatctttgtttctaaatcagaagtcgcaactggcagcattcttagcaagctcaaaatctaaagagagtcttgctcagaatctcaaagaagttctccaactacttcaacaggaagtggaagaagaaccttccaagaaggaagctgaatcatccgagactaatgatgaccaagaagatgatccattctaccagaatgaagatgactgttttggtatatcattagacgacgattaattagttgtagtaatcatgaattattgtaactaatttgtcagtttcttttaaataatgtaatttgtaaaagttttgtaacagttccggtaaacattaccgatactgtagaaatagtaaaaattgggtctatttaaaggagtcctcgtcccctttgtgaggcaccctttcagatagtctcagaatcaggtttttagagagagaagctctgcctagggaaaaaactttgtaagcttttctttcggtttcaataaatttcaagttctgttttccatatctcccttctcccctcaccgatcctgtgcggctctgccgccgcttcggtttctttcttttcaaaa

SEQ ID NO: 13889 - DNA, 1048 bp, Glycine max
  Gm_smallRNAprecursor_6722
attccacaatccaaatcttgaaggttatgcagccacgacattatggctcaaacttaaaccaacccaaaaaattttctgcaccatttgaccctgcaggatataattattgggattacattgacgcctggaccaatgtgttctggcatcaaaatagtaaattcaagcattcatggctgatttacttcaaaaataatactgcgtataattttccaaattggttcctccaatggtggaactacttcggaccaattccacaaatatttccagaagaagtccaacagggattccaacaattcaacaagctctataatagcaagtaatcacgtattctggcagatttaaagtacttttccagttttgccttgtcatggatcttttcatggcaatacagatacggaaaaactaaaaacagcaagcaatatccaccgttacagagacacgcctttgtaaaatggtggtcacaattcgatacttcaaaggctgctccagatcaagtcaagaactggttccagagcaatcctgagttccttaaacctgctgatccggagacatctttgtttctaaatcagaagtcgcaactggcagcattcttagcaagctcaaaatctaaagagagtcttgctcagaatctcaaagaagttctccaactacttcaacaggaagtggaagaagaaccttccaagaaggaagctgaatcatccgagactaatgatgaccaagaagatgatccattctaccagaatgaagatgactgttttggtatatcattagacgacgattaattagttgtagtaatcatgaattattgtaactaatttgtcagtttcttttaaataatgtaatttgtaaaagttttgtaacagttccggtaaacattaccgatactgtagaaatagtaaaaattgggtctatttaaaggagtcctcgtcccctttgtgaggcaccctttcagatagtctcagaatcaggtttttagagagagaagctctgcctagggaaaaaactttgtaagcttttctttcggtttcaataaatttcaagttctgtt

SEQ ID NO: 13890 - DNA, 1048 bp, Glycine max; identical to SEQ ID NO: 13889
  Gm_smallRNAprecursor_6723

SEQ ID NO: 13891 - DNA, 1080 bp, Glycine max
  Gm_smallRNAprecursor_6724
attccacaatccaaatcttgaaggttatgcagccacgacattatggctcaaacttaaaccaacccaaaaaattttctgcaccatttgaccctgcaggatataattattgggattacattgacgcctggaccaatgtgttctggcatcaaaatagtaaattcaagcattcatggctgatttacttcaaaaataatactgcgtataattttccaaattggttcctccaatggtggaactacttcggaccaattccacaaatatttccagaagaagtccaacagggattccaacaattcaacaagctctataatagcaagtaatcacgtattctggcagatttaaagtacttttccagttttgccttgtcatggatcttttcatggcaatacagatacggaaaaactaaaaacagcaagcaatatccaccgttacagagacacgcctttgtaaaatggtggtcacaattcgatacttcaaaggctgctccagatcaagtcaagaactggttccagagcaatcctgagttccttaaacctgctgatccggagacatctttgtttctaaatcagaagtcgcaactggcagcattcttagcaagctcaaaatctaaagagagtcttgctcagaatctcaaagaagttctccaactacttcaacaggaagtggaagaagaaccttccaagaaggaagctgaatcatccgagactaatgatgaccaagaagatgatccattctaccagaatgaagatgactgttttggtatatcattagacgacgattaattagttgtagtaatcatgaattattgtaactaatttgtcagtttcttttaaataatgtaatttgtaaaagttttgtaacagttccggtaaacattaccgatactgtagaaatagtaaaaattgggtctatttaaaggagtcctcgtcccctttgtgaggcaccctttcagatagtctcagaatcaggtttttagagagagaagctctgcctagggaaaaaactttgtaagcttttctttcggtttcaataaatttcaagttctgttttccatatctcccttctcccctcaccgatcct

SEQ ID NO: 13892 - DNA, 1098 bp, Glycine max
  Gm_smallRNAprecursor_6725
attccacaatccaaatcttgaaggttatgcagccacgacattatggctcaaacttaaaccaacccaaaaaattttctgcaccatttgaccctgcaggatataattattgggattacattgacgcctggaccaatgtgttctggcatcaaaatagtaaattcaagcattcatggctgatttacttcaaaaataatactgcgtataattttccaaattggttcctccaatggtggaactacttcggaccaattccacaaatatttccagaagaagtccaacagggattccaacaattcaacaagctctataatagcaagtaatcacgtattctggcagatttaaagtacttttccagttttgccttgtcatggatcttttcatggcaatacagatacggaaaaactaaaaacagcaagcaatatccaccgttacagagacacgcctttgtaaaatggtggtcacaattcgatacttcaaaggctgctccagatcaagtcaagaactggttccagagcaatcctgagttccttaaacctgctgatccggagacatctttgtttctaaatcagaagtcgcaactggcagcattcttagcaagctcaaaatctaaagagagtcttgctcagaatctcaaagaagttctccaactacttcaacaggaagtggaagaagaaccttccaagaaggaagctgaatcatccgagactaatgatgaccaagaagatgatccattctaccagaatgaagatgactgttttggtatatcattagacgacgattaattagttgtagtaatcatgaattattgtaactaatttgtcagtttcttttaaataatgtaatttgtaaaagttttgtaacagttccggtaaacattaccgatactgtagaaatagtaaaaattgggtctatttaaaggagtcctcgtcccctttgtgaggcaccctttcagatagtctcagaatcaggtttttagagagagaagctctgcctagggaaaaaactttgtaagcttttctttcggtttcaataaatttcaagttctgttttccatatctcccttctcccctcaccgatcctgtgcggctctgccgccgc

SEQ ID NO: 13893 - DNA, 1120 bp, Glycine max
  Gm_smallRNAprecursor_6726
attccacaatccaaatcttgaaggttatgcagccacgacattatggctcaaacttaaaccaacccaaaaaattttctgcaccatttgaccctgcaggatataattattgggattacattgacgcctggaccaatgtgttctggcatcaaaatagtaaattcaagcattcatggctgatttacttcaaaaataatactgcgtataattttccaaattggttcctccaatggtggaactacttcggaccaattccacaaatatttccagaagaagtccaacagggattccaacaattcaacaagctctataatagcaagtaatcacgtattctggcagatttaaagtacttttccagttttgccttgtcatggatcttttcatggcaatacagatacggaaaaactaaaaacagcaagcaatatccaccgttacagagacacgcctttgtaaaatggtggtcacaattcgatacttcaaaggctgctccagatcaagtcaagaactggttccagagcaatcctgagttccttaaacctgctgatccggagacatctttgtttctaaatcagaagtcgcaactggcagcattcttagcaagctcaaaatctaaagagagtcttgctcagaatctcaaagaagttctccaactacttcaacaggaagtggaagaagaaccttccaagaaggaagctgaatcatccgagactaatgatgaccaagaagatgatccattctaccagaatgaagatgactgttttggtatatcattagacgacgattaattagttgtagtaatcatgaattattgtaactaatttgtcagtttcttttaaataatgtaatttgtaaaagttttgtaacagttccggtaaacattaccgatactgtagaaatagtaaaaattgggtctatttaaaggagtcctcgtcccctttgtgaggcaccctttcagatagtctcagaatcaggtttttagagagagaagctctgcctagggaaaaaactttgtaagcttttctttcggtttcaataaatttcaagttctgttttccatatctcccttctcccctcaccgatcctgtgcggctctgccgccgcttcggtttctttcttttcaaaa

SEQ ID NO: 13894 - DNA, 1070 bp, Glycine max
  Gm_smallRNAprecursor_6727
tcaaacttaaaccaacccaaaaaattttctgcaccatttgaccctgcaggatataattattgggattacattgacgcctggaccaatgtgttctggcatcaaaatagtaaattcaagcattcatggctgatttacttcaaaaataatactgcgtataattttccaaattggttcctccaatggtggaactacttcggaccaattccacaaatatttccagaagaagtccaacagggattccaacaattcaacaagctctataatagcaagtaatcacgtattctggcagatttaaagtacttttccagttttgccttgtcatggatcttttcatggcaatacagatacggaaaaactaaaaacagcaagcaatatccaccgttacagagacacgcctttgtaaaatggtggtcacaattcgatacttcaaaggctgctccagatcaagtcaagaactggttccagagcaatcctgagttccttaaacctgctgatccggagacatctttgtttctaaatcagaagtcgcaactggcagcattcttagcaagctcaaaatctaaagagagtcttgctcagaatctcaaagaagttctccaactacttcaacaggaagtggaagaagaaccttccaagaaggaagctgaatcatccgagactaatgatgaccaagaagatgatccattctaccagaatgaagatgactgttttggtatatcattagacgacgattaattagttgtagtaatcatgaattattgtaactaatttgtcagtttcttttaaataatgtaatttgtaaaagttttgtaacagttccggtaaacattaccgatactgtagaaatagtaaaaattgggtctatttaaaggagtcctcgtcccctttgtgaggcaccctttcagatagtctcagaatcaggtttttagagagagaagctctgcctagggaaaaaactttgtaagcttttctttcggtttcaataaatttcaagttctgttttccatatctcccttctcccctcaccgatcctgtgcggctctgccgccgcttcggtttctttcttttca

SEQ ID NO: 13895 - DNA, 1071 bp, Glycine max
  Gm_smallRNAprecursor_6728
tcaaacttaaaccaacccaaaaaattttctgcaccatttgaccctgcaggatataattattgggattacattgacgcctggaccaatgtgttctggcatcaaaatagtaaattcaagcattcatggctgatttacttcaaaaataatactgcgtataattttccaaattggttcctccaatggtggaactacttcggaccaattccacaaatatttccagaagaagtccaacagggattccaacaattcaacaagctctataatagcaagtaatcacgtattctggcagatttaaagtacttttccagttttgccttgtcatggatcttttcatggcaatacagatacggaaaaactaaaaacagcaagcaatatccaccgttacagagacacgcctttgtaaaatggtggtcacaattcgatacttcaaaggctgctccagatcaagtcaagaactggttccagagcaatcctgagttccttaaacctgctgatccggagacatctttgtttctaaatcagaagtcgcaactggcagcattcttagcaagctcaaaatctaaagagagtcttgctcagaatctcaaagaagttctccaactacttcaacaggaagtggaagaagaaccttccaagaaggaagctgaatcatccgagactaatgatgaccaagaagatgatccattctaccagaatgaagatgactgttttggtatatcattagacgacgattaattagttgtagtaatcatgaattattgtaactaatttgtcagtttcttttaaataatgtaatttgtaaaagttttgtaacagttccggtaaacattaccgatactgtagaaatagtaaaaattgggtctatttaaaggagtcctcgtcccctttgtgaggcaccctttcagatagtctcagaatcaggtttttagagagagaagctctgcctagggaaaaaactttgtaagcttttctttcggtttcaataaatttcaagttctgttttccatatctcccttctcccctcaccgatcctgtgcggctctgccgccgcttcggtttctttcttttcaa

SEQ ID NO: 13896 - DNA, 1041 bp, Glycine max
  Gm_smallRNAprecursor_6729
tgcaccatttgaccctgcaggatataattattgggattacattgacgcctggaccaatgtgttctggcatcaaaatagtaaattcaagcattcatggctgatttacttcaaaaataatactgcgtataattttccaaattggttcctccaatggtggaactacttcggaccaattccacaaatatttccagaagaagtccaacagggattccaacaattcaacaagctctataatagcaagtaatcacgtattctggcagatttaaagtacttttccagttttgccttgtcatggatcttttcatggcaatacagatacggaaaaactaaaaacagcaagcaatatccaccgttacagagacacgcctttgtaaaatggtggtcacaattcgatacttcaaaggctgctccagatcaagtcaagaactggttccagagcaatcctgagttccttaaacctgctgatccggagacatctttgtttctaaatcagaagtcgcaactggcagcattcttagcaagctcaaaatctaaagagagtcttgctcagaatctcaaagaagttctccaactacttcaacaggaagtggaagaagaaccttccaagaaggaagctgaatcatccgagactaatgatgaccaagaagatgatccattctaccagaatgaagatgactgttttggtatatcattagacgacgattaattagttgtagtaatcatgaattattgtaactaatttgtcagtttcttttaaataatgtaatttgtaaaagttttgtaacagttccggtaaacattaccgatactgtagaaatagtaaaaattgggtctatttaaaggagtcctcgtcccctttgtgaggcaccctttcagatagtctcagaatcaggtttttagagagagaagctctgcctagggaaaaaactttgtaagcttttctttcggtttcaataaatttcaagttctgttttccatatctcccttctcccctcaccgatcctgtgcggctctgccgccgcttcggtttctttcttttca

SEQ ID NO: 13897 - DNA, 1172 bp, Glycine max
  Gm_smallRNAprecursor_6730
gaccaatgtgttctggcatcaaaatagtaaattcaagcattcatggctgatttacttcaaaaataatactgcgtataattttccaaattggttcctccaatggtggaactacttcggaccaattccacaaatatttccagaagaagtccaacagggattccaacaattcaacaagctctataatagcaagtaatcacgtattctggcagatttaaagtacttttccagttttgccttgtcatggatcttttcatggcaatacagatacggaaaaactaaaaacagcaagcaatatccaccgttacagagacacgcctttgtaaaatggtggtcacaattcgatacttcaaaggctgctccagatcaagtcaagaactggttccagagcaatcctgagttccttaaacctgctgatccggagacatctttgtttctaaatcagaagtcgcaactggcagcattcttagcaagctcaaaatctaaagagagtcttgctcagaatctcaaagaagttctccaactacttcaacaggaagtggaagaagaaccttccaagaaggaagctgaatcatccgagactaatgatgaccaagaagatgatccattctaccagaatgaagatgactgttttggtatatcattagacgacgattaattagttgtagtaatcatgaattattgtaactaatttgtcagtttcttttaaataatgtaatttgtaaaagttttgtaacagttccggtaaacattaccgatactgtagaaatagtaaaaattgggtctatttaaaggagtcctcgtcccctttgtgaggcaccctttcagatagtctcagaatcaggtttttagagagagaagctctgcctagggaaaaaactttgtaagcttttctttcggtttcaataaatttcaagttctgttttccatatctcccttctcccctcaccgatcctgtgcggctctgccgccgcttcggtttctttcttttcaaaaacctgggtttgtaagccgttacggtgtgcccttgatatctgctttacagtttatatttagctttcatttatcatactgcattcttacttcctatctgtccgtttgatcttattccgctgatctatatatataatattttaataacaaaatttattatttttatttaacgactttgatta

SEQ ID NO: 13898 - DNA, 1106 bp, Glycine max
  Gm_smallRNAprecursor_6731
tactgcgtataattttccaaattggttcctccaatggtggaactacttcggaccaattccacaaatatttccagaagaagtccaacagggattccaacaattcaacaagctctataatagcaagtaatcacgtattctggcagatttaaagtacttttccagttttgccttgtcatggatcttttcatggcaatacagatacggaaaaactaaaaacagcaagcaatatccaccgttacagagacacgcctttgtaaaatggtggtcacaattcgatacttcaaaggctgctccagatcaagtcaagaactggttccagagcaatcctgagttccttaaacctgctgatccggagacatctttgtttctaaatcagaagtcgcaactggcagcattcttagcaagctcaaaatctaaagagagtcttgctcagaatctcaaagaagttctccaactacttcaacaggaagtggaagaagaaccttccaagaaggaagctgaatcatccgagactaatgatgaccaagaagatgatccattctaccagaatgaagatgactgttttggtatatcattagacgacgattaattagttgtagtaatcatgaattattgtaactaatttgtcagtttcttttaaataatgtaatttgtaaaagttttgtaacagttccggtaaacattaccgatactgtagaaatagtaaaaattgggtctatttaaaggagtcctcgtcccctttgtgaggcaccctttcagatagtctcagaatcaggtttttagagagagaagctctgcctagggaaaaaactttgtaagcttttctttcggtttcaataaatttcaagttctgttttccatatctcccttctcccctcaccgatcctgtgcggctctgccgccgcttcggtttctttcttttcaaaaacctgggtttgtaagccgttacggtgtgcccttgatatctgctttacagtttatatttagctttcatttatcatactgcattcttacttcctatctgtccgtttgatcttattccgctgatctatatatataatattttaataacaaaatttattatttttatttaacgactttgatta

SEQ ID NO: 13899 - DNA, 1130 bp, Glycine max
  Gm_smallRNAprecursor_6732
gaatatcagtgttcaaaacataggcaacttttttcatagaaaacatcatcttttgtttccaacgtttgaaatgatacccttcaaacctaaaaggtttgttaaggtcattgctgtttgagccagtaatatctacggtagccatagcagagccgaaatcgtcttaaaattgttgtagcaatagtttatggcaaaccgaaaaaattactggctgagtcacggacaatgtcgctttctttaagacgttttgtggcactgccaaaaaattgtgcaagcagactatcaaccacgacgtccccaggataaaacagctcagatcactgtataagattctcactgcactgagggaaccttttctagaattacaccctcttgtatgacttgaaaagtcactctaaagttacccgaaaatatgacttgaaaagtcactctaacagccaaccaaaatatgacttaaaaagtcattcttatagccaaccaaaattatgacttaaaaagtcgctcttatagccaaccgaaaatatgacttaaaaagtcactcttatagccaaccgaaattatgacttaaaaagtcactcttatagctaaccgaaatttttagagcgacagaaagaaagagggagaagtttgccggaaatgcatcgactgaaatatgagagggagaaagaaaagttgaggaaatgcttctcaactggggcaaagaaaaataaagaaaggagctctctatatatagggagtgaaacactattcaagtgtttatcctgagcgatgtgagacttgaaaccatttttttcttcttttttttcctttctttttttcaaactttcatccacattctcctttgttctaacaaagactaattaaggtagacatattgaaacacttctgtttgtctttaatcgtgtatggccaacccaaaatggtgaaaaaatagaatgaaaaagaaaacaaaacaagcattgaagttaaagaatgcaatatgcaatgcgaaacttcaaaaaattgttttgtcgtcctgttttgtgacaattgttagctgagtgtgttagttagtatgttgtgacattctttgagattagtgtgaagacgatcgagtaaaataagattactctatttctagttaataacatttt

SEQ ID NO: 13900 - DNA, 1133 bp, Glycine max
  Gm_smallRNAprecursor_6733
tatggcagatggcgtaacggaaaatagcggacaaaaaaaaacataaatataaattcattgaaattgaaaaaaacaaaggattgcattcaaataaactaaaaaagtttcatgagttcatacaataatcaagtaccaacaccaaataaactcattaaagagttcaaaataagaaaatgataaaaacataatgcaaagtgcaaagtgaaggttgaggctctaatcatcttctccaatcccaacataatcatcttcgttgttatcatatggtaatggagcatctccctctccctcttccccattagacgcctcaaaattgaccatgatttcttcttcttcagattcaacattaatattctcctcaacatctagatcctcatcattttcttggactgcattttgcttccttgatgaaaatccaacaaccattgcctgtttttttagaagtttgggcagcagcaacacttgttttttgctttttccccctagtatacatcctacactctccaacccccgaagcctgatacacagttgcccaatttagagcatcatcatcttcaaatatcaaatcatttccagcatcattatcatcatcttgatccatctctcccacgagccattcattgcatacatcaatatcattaagagaaattggatcaatttcatctcttgcattatatctttgcttcaattgttggttgtatttgacaaacaccaaatcatgcaacctcttgtgctgaagcctatttctttttttggaatgaatctacaacataacaaataaatgttgatttcaatctcaaatatactccaaataaaacttgatcatctaaattaaataaaattaaaaagtatagttcgagttttgtcacaattacttgctcaaacacactccaatttctttcacatcccgaagcactgcaagtcactcaaaattttaatagctagcttctgcaaatttggagtttgtgacccaaacattcaccaccaatatgctgcaataccaattaccaaccaagagcataacttagaattctgaattataacactaatacataaaaaaatagtatgataaaagtttcttactaggagaatgggttttcctttgagccattgcaaagtcgaaaccaaagtgg

SEQ ID NO: 13901 - DNA, 1105 bp, Glycine max
  Gm_smallRNAprecursor_6734
aatcaaagatttcgggtggcaaaaattggattccattagatgataaagttgtcactaaaggattagtatttatcctatatctggggatatttgtcacttattcttcctataaaggtaatatctaagtgtaagttatgtcccataaaatttcttccaaaacctattgtctgaacttctaggtttatgttttgtatgaaatcattaagattcattgtataattaggggcaatataaattagggagactgtttggtttagatctatttttatcatccctattatggtatgagaattattatctctaaacctttgatcgaagagcactacaaaagctttcgctcctatgaaaaatcttgttagagatctgacgcctatggcaatcaaccctaggtgtacatatcttctatttgtgttcagaaattgtcatctggtttgttctgagattaatctgataatctcatgtgttccattaggaagatgaaaatcatcaatccttctatatctgtataagctagttctatcagaacttaaccagtttaagttgtatagttgtctaggattaagaaagtctgtcattgagtttgacctaatatcaatattggattctatatctactatttgttccaattgtctggtttgagagtttgttctcctaaagaatctatctaggattccaggacgttggtttatggattctgtaacaggattatgtcctcaaattgtttgtgaggtgcctatgaatgctatggtcctcatttttgtggctttgctaagacaaatttgtttgaagtttgactagtagtctttcctaaagataatttggaaagttgtgttgtgattttatcaagttcgtttgtagaaaaacggatttgttggtctttagttttaaggatatccaaaatatcattaattttattttctaaagtttgcattttgttaaccaaaaaattttgggtttttgttagactttctaaggtttcagataagtcttcaaaagatttagtagaaaatttgttagtaggattgttgcaagaaattttattaaagacttaggaaaatacacagctcctctttacaacaaaacatctttaactgaacaaagaaaa

SEQ ID NO: 13902 - DNA, 1039 bp, Glycine max
  Gm_smallRNAprecursor_6735
gaaattttcagccatccacaactgaattaaacactccttgtcaaactcataatccttggggaataaagcacagtaagcaaagcatgtcttgagatggggaggaaggtggtgatagctcaatgctaaagcaggaacaatactgtcctttaattcccatatttcactttggaatacgctttcccattcccaggcaaatggtttgttgtgtaatagacttcccattgacttcaaggccagaggaagtcctttacattttttaacaatcttcttaccaatatctgtgcatactggatctcgtggaagattatcatctctgaatgcatgttttgcgaacaattcccagcaataatcttcttgtaattgctccagcttgtgttgttctgaccccatggtagaagcaacttcctcactgcgtgttgtgacaaggatcttacttccctgagctccataaacaagagcattctgcacagcttcccatttaggtctgctttcgttccaaacgtcatccaaaacgaggagaaattttttatctgccaatttttcttttagtcttctctgaactatttctagctctctaccatgatcagtcgaatcagtaatcgtgtcaagaattgctcttgatacgttgaaaacatcaaattcctctgaaacacagatccaagctttgacatcaaacttactcactattcttgggtcattgtatacaagttgggcaagcgtggtcttacccaacccgcccatgcccacgatagaaagtattgacagcttgttatcagtgttagaagtgagccagttaatgataatttctttatcatcatctctgccacaaatatcactttctaccaccaaagatgttgattgtggcactttaccaccagatcctgatccaactacaagatcactaggctttttcaaacctagattatccatccggcttgcaagatcatctaggtcatcaaggacatttttcatgctggaattaatttccttgttaaaggaagtaacaggggaagatttgaagaaattgggtaccttgcaa

SEQ ID NO: 13903 - DNA, 1039 bp, Glycine max
  Gm_smallRNAprecursor_6736
attttcagccatccacaactgaattaaacactccctgtgaaactcataatccttggggaataaagcacagtaagcaaagcatgtcttgagatggagaggaaggtggtgatagctcaatgctaaagcaggaacaataccactgtcctttaattcccatatttcactttggaacacgctttcccattcccaggcaaatggtttgttgtgtaatagacttcccattgacttcaaggccagaggaagtcctttacattttttaacaatcttcctaccaatcactgggcatcctggatctcgtggaagattatcatctctgaatgcatgttttgcgaacaattgccagcaataatcttcttgtaattgctccagcttgtgttcttttgacctcatggcagaagcaacttcctcactgcgtgttgtgacaaggatcctacttccctgagctccacaaacaagagcattcagcacagcttcccatttaggcctgctttcgttccaaacgtcatccaaaacgaggagaaattttttatctgccaatttttcttttagtcttctctgaactatttctagctctctaccatcatcagtcgaatcagtaatcgtgtcaagaattgctcttgatacgttgaaaacatcaaattcctctgaaacacagatccaagctttgacatcaaacttactcactattcttgggtcattgtatacaagttgggcaagcgtggtcttacccaacccgcccatgcccacgatagaaagtattgatagcttttcatcagtgtcagaagtgatccagtccaagatcaattttttgtcatcatctctgccataaatatcactttctaccaccgaagatgttgatggcaatttctctaacactttactacccgatcctgatccaaccccaacaccactagtccttgtcaaacctagataaccacctcggctttcaagatcatccaggtcttcaaggatttgttccatccttgattcaatttccttgtcaaaagagctcaaagaagaaggtctgaagaaattgctc

SEQ ID NO: 13904 - DNA, 1039 bp, Glycine max
  Gm_smallRNAprecursor_6737
attttcagccatccacaactgaattaaacactccctgtcaaactcataatccttggggaataaagcacagtaagcaaagcatgtcctgagatggggaggaaggtgatgatagctcaatgctaaagcaggaagaatatcactgtcctttaattcccatatttggcttttcaacacgctttcccattcccaggcagatggtttgttgtgtaatagacttcccattgacttcaaggccagaggaagtcttttacattttttaacaatcttcataccaatatctgtgcatactggatctcgtggaagattatcatctctgaatgcatgtttagcgaacaattgccagcaatcatcttcttgtaattgccccagcatgtgtttttctgaccgcatggtagaagcaacttcctcactgcgtgttgtgacaaggatcctacttccctgagctccacaaacaagagcattctgcacagcttcccatttaggcctgctttcgttccaaacgtcatccaaaacgaggagaaattttttatctgccaatttttcttttagtcttctctgaactatttctagctctctaccatgatcagtcgaatcagtaatcgtgtcaagaattgctcttgatacgttgaaaacatcaaattcctctgaaacacagatccaagctttgacatcaaacttactcactattcttgggtcattgtatacaagttgggcaagcgtggtcttacccaacccgcccatgcccacgatagaaagtattgacggcttgttatcagtgttagaagtgagccagttaatgataatttctttatcaccatctctgccacaaatatcactttctaccaccaaagatgttgattgtggcactttaccaccagatcctgatccaactacaagatcactaggctttttcaagcctagattatccatccggcttgcaagatcatctaggtcatcaaggacatttttcatgctggaattgatttccttgttaaaggaagtaacaggggaagatttgaagaaattgggtaccttgcaa

SEQ ID NO: 13905 - DNA, 1039 bp, Glycine max
  Gm_smallRNAprecursor_6738
gaaattttcagccatccacaactgaattaaacactccttgtcaaacacataatccttggggaataaagcacagtaagcaaagcatgtcttgagatggggaggaaggtggtgatagctcaatgctaaagcaggaacaatatcactgtcctttaattcccatatttcgcttttcaatacgctttcccattcccaggctggtttgttgtgtaatagacttcccattgacttcaaggccagaggaagtcttttacattttttaagaatcttcataccaatatctgagcatactggatctcgtggaagattatcatctctgaatgcatgtttagcgaacaattgccagcaataatcttcttgtaattgccccagcctgtgtttttctgaccgcatggtagaagcaacttcctcactgcgtgttgtgacaaggatcctacttccctgagctccacaaacaagagcattctgcacagcttcccatttaggcctgctttcgttccaaacgtcatccaaaacgaggagaaattttttatctgccaaattttcttttagtcttctctgaactatttctagctctctaccatgatcagtcgaatcagtaatcgtgtcaagaattgctcttgatacgttgaaaacatcaaattcctctgaaacacagatccaagctttgacatcaaacttactcactattcttgggtcattgtatacaagttgggcaagcgtggtcttacccaacccgcccatgcccacgatagtaagtattgacagcttgttatcagtgttagaagtgagccagttaatgatgatttctttatcaccatctctgccacaaatatcactttctaccaccaaagatgttgattgtggcactttaccaccagatcctgatccaactacaagatcactaggctttttcaaacctagattatccatccggcttgcaagatcatctaggtcatcaaggacatttttcatgctggaattaatttccttgttaaaggaagtaacaggggaagatttgaagaaattgggtaccttgcaa

SEQ ID NO: 13906 - DNA, 1109 bp, Glycine max
  Gm_smallRNAprecursor_6739
aatacccttcacatgtttatattcccattcttcccatcatagaattccaaggaagcttatgaaaaagtagaagaacataaaacatggcaatcaatacccactgtctcagggagaacaagtcatacatcaggaagagagacatgaaccaaaactcatatttctaacaattttcttcatgtaactgttctagttgacttgctttatttgactgcacgattgaagcaactctcttactacatgtagtgaagacaaccttgatttcttgagtcttgtaattaacaggagttttcaaaacttcccatttgatggcattagagggtgactccgattgtggacaattgagtatatcttatcggagaaagagaagggaggagggtctgcatacaattaggcaatgattttaagttcttcaatatctgaatttgaagcaactcttgcctaggtgcccaagtcctccttgggaaaatgatacaaatttaggacagctccaaataaacaaactatcaaagagatgcaattatgatttatgagcatgctcctaccaaatcatttcaagatcaagattgtctttagtgtcactatactaggtcacattccaatcatccgccaacgatagacttaatcttggaggacagtcatacatcaatgagcatgacaaatgacaaaatccatacatacaaaggcctcaaaccttttagaaacttcatatctatctcaatggtagaaacataagcaagctgttagccttatgtaaggcatcaaaccttttagaaacatcatatctatcgtctagaaatgacaaattctgtccaaaaactcttgtgcttctttgacttccaacataaacaaaagtcccccaaacatattttgccaaatcattgagaaggtcatgcatgactaaacacatttgtctctgcttgattgtttaacaacatacccacataatatatcatctaaatactctcatgagggcattgtataaaattttcagccattcacaacaaaattaaaagctctcttacaaacatatgtaaatctcttgggaatatggcacaataagcaaagcatctcttgagatgagaaggaatgtggtgataaattaaagcaga

SEQ ID NO: 13907 - DNA, 1184 bp, Glycine max
  Gm_smallRNAprecursor_6740
cttcaatatctgaatttgaagcaactcttgcctaggtgcccaagtcctccttgggaaaatgatacaaatttaggacagctccaaataaacaaactatcaaagagatgcaattatgatttatgagcatgctcctaccaaatcatttcaagatcaagattgtctttagtgtcactatactaggtcacattccaatcatccgccaacgatagacttaatcttggaggacagtcatacatcaatgagcatgacaaatgacaaaatccatacatacaaaggcctcaaaccttttagaaacttcatatctatctcaatggtagaaacataagcaagctgttagccttatgtaaggcatcaaaccttttagaaacatcatatctatcgtctagaaatgacaaattctgtccaaaaactcttgtgcttctttgacttccaacataaacaaaagtcccccaaacatattttgccaaatcattgagaaggtcatgcatgactaaacacatttgtctctgcttgattgtttaacaacatacccacataatatatcatctaaatactctcatgagggcattgtataaaattttcagccattcacaacaaaattaaaagctctcttacaaacatatgtaaatctcttgggaatatggcacaataagcaaagcatctcttgagatgagaaggaatgtggtgataaattaaagcagagacaatattgctatcctctcttgaaaattctcaaatcttgtttctcaatacactttctcattccaaaacatctcaaacatgtgttctttttgtttctcttttagaaagacaaccttctggtcctcttttagatcctcctcctcgtcggcagcatgtaaagattcttgttacattctattctcattccaaacatcgtccaaaccatgaggaaacttcttccccgaatttttctagaatgaaatctaattcttttgtatcattagttgatctagtaatatccttaaaacatcaaactcatgcgaaacaaagacacaggccttgagaacaaattcaccttccatccttggctccttgtataaatgttgggcaagtaaggtctcatcccatccatacccacaaataaatatcacttatcagccaattaaagatgatttctttgtcattctctctaccatatacggtttcgcccacaaaatgttgtt

SEQ ID NO: 13908 - DNA, 1078 bp, Glycine max
  Gm_smallRNAprecursor_6741
tggcggggtggcggaaaatggcgtccctcccgcaccccacacgcgcacccagccgcgtccctcccgcaccccacacgcgcacccagccgcgacacccgcagccgcacgcgcacgcagccgcgacgacctccggcagcgacgcaccggcacaaacggcggtgacgagctccggcagcgacgcatctgtcacaaacggcggcctgcagcgaggagttctcgcggagaagacgaagctgctgtcgcgaagaagaagaaggcgtcgcgaagaagaagaaggcgtaggttttagttttatttttgctgtttgacaccccctgttttctgtctgcagctttttttttccttttgctatttgacacccctttttacttttaacagtcccattttttttttcgtatttgacatcacaattttttttttctgttcagtcctcttttaaatggctgagtttatttggtgttggtacttgattattgtatgaactcatgaaacttttttagtttatttgaatgcaatcctttgtttttttcaatttcaatgagtttatatatatgtttttttttttttggtccgccatgacatccgccattttccgctacgccatccgccatatttttatggcggattttttactttccgccatgaaccgccatccgccattaacaacattggtttggggggagcttatgatacatccataacctgttttccacttattccaataagctctccataataacttgtgaaaacagcttaaaacttttacaaaaataatttaaccttattttctcttcaattataaaaacttacacaaaagtgcttacatgataagtaattatttaataagtgcttaatgaagttgttcaccaaaacaaaccccaagtccaattgaattcataaataacaaataaatacaaccaaataaaagaaacttcataagaaaactgataaaaacaggaatgttgtataaaataattttatgaactgcagagagagaaggaagacagcaaatgagaaaacaaatttacccaacaagccaatggaagatggaaccatcataactcccactgacaaagta

SEQ ID NO: 13909 - DNA, 1036 bp, Glycine max
  Gm_smallRNAprecursor_6742
tttggatattaattaaacgttaattacaattagtgtacacacacataaaatatatataagtagaacttttatttaaatcacgtaccttaacaacaatccacttagcagcagccttggatttcggttgtggagtatcatcaagtcctttcaaagcactagtgttgaatatgaggaacattaaaatattgatgttgttgagttatgccaatgaaaatgtattgaaaacaatactgacctgttaattattcccttaaggtagttgtctagcctgttatgtaaagaacaaaaccagacaactaggttttccttagacagaatgacgaccatttgccagtgtccgctgcagtagagacgaatatgggttattgtagtagtatagattatttaaattcaattattgtgtttgacttacccattcagataggctccaaggtaaacatctcgttttgaactctgtatccaactcttgatgtaactttcagattcaaattgtgattgcccagatctctgaatggactgtggctcgaggaatccatacacatcagaattccccgctcgcacacttgtctcggtcagatggctgtgttgttaagtcaaagttaattatgtatgaatttaaaacaattactttggtaattaatagtaatctaaaatgacttacagaatccacaactgtataacagatatgctgagacattgaccaccgtgtgcaatttcagagagatcttcgtgctttatatacaacgggaagttttgattaaacaccccgaatatggtagcatcccacataacctggagcggcttcaaaaacagttgtgggatggtcaatgtcatcaggtacaggggatcgtcgacctcttcatccgggctttctagagattttgctggagacacagctgcctgttgataaaacatagttaattagcaagttttgattacagtgaacaaaataattgaaaaaaataaacatataatcagagtaaaatacctgttctgataaacacttcacaagatgtgttggccaagcaaggaaggt

SEQ ID NO: 13910 - DNA, 1084 bp, Glycine max
  Gm_smallRNAprecursor_6743
caagttacaggtttcatatatgtccaccaaagatcttactcgtcttggagtagactctggtgatgatagttcttgatcttgttgttgtgatagaggtaaaggtggttcacctgggtcttcttcctcatcttcttcttgaggtagttgagcgggtataagaacgttcttctccactttttcttcatcccaattccatgaagcatattcatcaacttcaacatctcgactgatgacgagtttcttagtttgcaagttgtagacacggtagcccttagagatattgctatacccaaggaagatacctcgtatagtcttgtcttcaagcttgtgcctcttcacgtctggaatatgaatgtagcatatagatccaaagacccttaggtgctttgctgatggcttcttcccgttccaagcttcaattggagtcctgtcttttacagacttagttggacatctgttgagtatgtaaacagcagtgtagactgcttcagcccagaatgtgttaggtagtcccttctccttgagcatcgatctagccatctccatagctgtgcgattctttctctcggacactccattttgttgaggagaatatgcgactgtaagttgtctctcaatgccttcatcctcacaaaatctttcaaactcgcgagaggtgttctctttgccgcgatcacttcttagtacttttatccgttttccactttgattttcagcaagggccttgaactttttgaatactccaaggacttctgatttttcttttagaaaatatacccatgtcattctagagaagtcatcaatgaagagtatgaagtacctattgttcccatgtgatggcgtcctcattggtccacaaacgtccatatgtatcagctccaatagatctttcgctctccatgctccacttgttgagaaaggaaatcggtgttgcttaccaagaagacatccttcacacacttcattgttctcctttatgcttggaagatctctcatcatgttcttctcatgtaacaacttcaaggcatgtgagttgaagtggccaaatcttcgatgccatagccatgaatcatcaacttgtacc

SEQ ID NO: 13911 - DNA, 1079 bp, Glycine max
  Gm_smallRNAprecursor_6744
taaggaaattcctagagccttctcttcttttggaagtttctccataatttttctttcctctattttctttgttttggggctgaaatttaaactttgacgggaaggcattttcaattgtatcttctttatgcatatacagtctttgctcatatgcttcaagagagcccacaagttctgtctctgatagagtggacagatctttggtttcctcaatcgttgtcacgattgggtcaaacttttggggcatagtaattagaattttctcaacaattttcttgtcaagaatatcttccccaaaagctctcatttgattaactattcctttaactttagaatagtaatctttaactgtctcggactccttcatcttcaatagttcaaaatctcttcttagagattgaagtttaacggcatgtaccttaacacttccttgaaactcctcctgcaatgtgttccacgcttctttggcagtcttagctcccataattcttgggaaaattggatcagtcaccgcttgttgcaaggtgaacaacgcctttgaatttttttgtttatttttcttcaactctttttcttgagatgcattaagagctgaagtatccgcaggaatggtgaagccttcttctactatgtcccataaatcttgagatgaaaaatatgtttccattttaacatgccagaaatcataattttcaccattgaagatagggacagaaatagttgacgattaagtagtgttatccatagcttagaaaaaatattattagagtgggttaatagtacaaaggaaatttttgaagtagttgggaggattttggaatggtaggtaggtaatataactacgcccaatgtatgaccgaacgtagctctgatgccactgttggtagttggttagatgatagttgatagttgatagttgatagttttagagaattgttttagaaagaaggctatgtcattgatttcttggattgatcaattacaacataccaattgcctatttataggctcaagtcaccaacctctcaatggtggtgaatgtttctacattactttaggtctttctagagttttcatga

SEQ ID NO: 13912 - DNA, 1105 bp, Glycine max
  Gm_smallRNAprecursor_6745
tcaaatattttgggtggcaaaaattggattccatcagatgataaggttgtcactaatggattagtgtttatcctgtatctaggggatatttgatcacttattctaccaatgaagttaatatccaagtataaattatgtccctcaaagtttcttccaaaacctattgtttggacttctaggtttatgttttgtatgaaatcactaagattcatagtgtaattaggtgaaatataaattagggagactgtttggtttagatctatttctatcatccctattatggcctgagaattgttatctctgaacctttgatcaaagaggactacaaaagcttttactcctacgaaagatcttgttagagacttgacgcctatggcaattaaccctaggtgtacatatcttctatttgtgttaaggagttgtcgtccggtttgttctgagattaatttgataatctcatgtctcccgtcagggagatgaaaatcatcaatccttctatatctgtataagctagttctatcagaagcaaaccagtttagattgtataattgtctaggattaagagagtctatcctagaatttgatccaatattaatattggattctatatctactatttgttccagttgtttggttcaggagtttgtccttctaaagaatctatccaagattccaggatgttggtttatggattcagtaacaggattgtgtcctgaaactgtttgtgaggttcctgtaagaggtcttgtcctcattttctaggtattgctaaaacaaatttggttgaggtttgacttgtttttcctaaatcaagtttagaaagctgcgttgtaattttatcaaattcatttgtggaaaaacgaatttgttattctttagatttaagaatattcaaaatgtcgttaactttattttctaaagtttgtattttgttaaacaacaaattttgtgtttttattaggctatctaaaatttcagataagtcctcaaaagattttatcgaaagtttgttaacaaaactattattattaattatatcgcggtgtctatctaaagttaatatagcaactcatatatatatatatatatatatatatatatatga

SEQ ID NO: 13913 - DNA, 1146 bp, Glycine max
  Gm_smallRNAprecursor_6746
ccaaagtgatgaccaaaccaatgacgagggtgttggcggaccaacgacacctccgtcacctctgttgcaatatcagcaacctaggtgtccagtagacttgaactttgaccacctaccacactacattgattgacaccattttgttcatcaacaacacaatgtacaactaccagtcggtgtactcgaggttggcatgaccttcgatgaaaaaacacaatgtattcgagcaatcaaagaatacaacatcagaaatcattttggttgcagaacaatttactctgaccaaagaaggctaaacttcgtctgcaagttacatgaaaatgcttgtacatggagcttgggcgcatgcaattcaaagaggcataacaaatggattatctagagtatcagaggtcatcacacttgtctcgtgccgatgctcagacaagatcatcgccaactcgacaaacacgtcatagcacatatcatccaaccaattgtcaaaacaaacccaactgtctccatcaagacgttgattgcagagatcaaaacgttcatgaattataccccatcctacaagaaggcatggttagcaaagcaaaaagcattggagatgattcatggaaatcgggaagaatcatatgccaaactgccaaaacttttcggagctttgcaatcttgtgttcccaggactgtggtcgctgctcaaacagaatccttgtatgaggggggagaaatagtaccgggcaaaagattgtttaaacgtgtcttttggtcatttggtccatgcattaatggttttgcatattgcaaacccattgtacaagtagatgatacatggctttacagaaagtatactgacacactgttgatagctatcgcacaagatggagctaaccatatcttcccgattacctatgccattgtagaaggggagacaacttcagcttggggttttttctaaagaatttgagaagacatgttactctgcaaattaacatttctctcatttcagaccgacacccctcaattataagtgcctacaacaacccaagtaacttatgggttcaggacacatcccatttcttttgcctgcgccacattacacaaaactttcttcatggtaactcaaactacaaacatttaaagaaaccacttatgttggct

SEQ ID NO: 13914 - DNA, 1076 bp, Glycine max
  Gm_smallRNAprecursor_6747
catcaacaacacaatgtacaactaccagtcggtgtactcgaggttggcatgaccttcgatgaaaaaacacaatgtattcgagcaatcaaagaatacaacatcagaaatcattttggttgcagaacaatttactctgaccaaagaaggctaaacttcgtctgcaagttacatgaaaatgcttgtacatggagcttgggcgcatgcaattcaaagaggcataacaaatggattatctagagtatcagaggtcatcacacttgtctcgtgccgatgctcagacaagatcatcgccaactcgacaaacacgtcatagcacatatcatccaaccaattgtcaaaacaaacccaactgtctccatcaagacgttgattgcagagatcaaaacgttcatgaattataccccatcctacaagaaggcatggttagcaaagcaaaaagcattggagatgattcatggaaatcgggaagaatcatatgccaaactgccaaaacttttcggagctttgcaatcttgtgttcccaggactgtggtcgctgctcaaacagaatccttgtatgaggggggagaaatagtaccgggcaaaagattgtttaaacgtgtcttttggtcatttggtccatgcattaatggttttgcatattgcaaacccattgtacaagtagatgatacatggctttacagaaagtatactgacacactgttgatagctatcgcacaagatggagctaaccatatcttcccgattacctatgccattgtagaaggggagacaacttcagcttggggttttttctaaagaatttgagaagacatgttactctgcaaattaacatttctctcatttcagaccgacacccctcaattataagtgcctacaacaacccaagtaacttatgggttcaggacacatcccatttcttttgcctgcgccacattacacaaaactttcttcatggtaactcaaactacaaacatttaaagaaaccacttatgttggctggtgagaatctattttatttattcgttataattttctttcaatcaaatgttataacataatacattgattaaata

SEQ ID NO: 13915 - DNA, 1065 bp, Glycine max
  Gm_smallRNAprecursor_6748
caacacaatgtacaactaccagtcggtgtactcgaggttggcatgaccttcgatgaaaaaacacaatgtattcgagcaatcaaagaatacaacatcagaaatcattttggttgcagaacaatttactctgaccaaagaaggctaaacttcgtctgcaagttacatgaaaatgcttgtacatggagcttgggcgcatgcaattcaaagaggcataacaaatggattatctagagtatcagaggtcatcacacttgtctcgtgccgatgctcagacaagatcatcgccaactcgacaaacacgtcatagcacatatcatccaaccaattgtcaaaacaaacccaactgtctccatcaagacgttgattgcagagatcaaaacgttcatgaattataccccatcctacaagaaggcatggttagcaaagcaaaaagcattggagatgattcatggaaatcgggaagaatcatatgccaaactgccaaaacttttcggagctttgcaatcttgtgttcccaggactgtggtcgctgctcaaacagaatccttgtatgaggggggagaaatagtaccgggcaaaagattgtttaaacgtgtcttttggtcatttggtccatgcattaatggttttgcatattgcaaacccattgtacaagtagatgatacatggctttacagaaagtatactgacacactgttgatagctatcgcacaagatggagctaaccatatcttcccgattacctatgccattgtagaaggggagacaacttcagcttggggttttttctaaagaatttgagaagacatgttactctgcaaattaacatttctctcatttcagaccgacacccctcaattataagtgcctacaacaacccaagtaacttatgggttcaggacacatcccatttcttttgcctgcgccacattacacaaaactttcttcatggtaactcaaactacaaacatttaaagaaaccacttatgttggctggtgagaatctattttatttattcgttataattttctttcaatcaaatgttataacataatacattgatt

SEQ ID NO: 13916 - DNA, 1047 bp, Glycine max
  Gm_smallRNAprecursor_6749
caacatcaataactttatttgctgcagcaacaatttcatttgctttcttgagccagttctgtacaatattttcaatcttctctccattcctttcagcctcaacaacccggtgttgcacaccgtcttgagtatccttcagacgttgaacctcggtcataagcttttcaaggttttcctcgtaggaggatatgtacccaatttgatccttaataaatgtaatcacagtagcaatttgagaaacacccggcaaatgagctatttcagaaacatctgggacatgagctatcgcatccatcgccagccccttgtactatctgtgaattataacggaagacaacgaaccgaagcaataaatagttaattatattaaatgctattgtactgctctcaaattcataaattcattcaatactctattttttcttatataatgatccattagagataggggtgggaataggctttgagagtttagtctacaatgaatttttgagacatgagtctggcctatagtctatcaaaaatttttattttggtttgggcttgacctttttaaaagcctagcctggcctgataacctctttaaaagtctttttcaaatcaaatctttaatattctagagtaggaggaacgtaacagtaggaatagcaaagtcaataaataaaaataatgagaaatataaagggacacatgactcacacctaaattgtaattaaagttttacttgattataggaatagaagttatggagcagtaatgtctaatcaaagtctgctagtttcaaaaataaaattaattgtacccaaaaaataatataaatatatattggtacccaaaaaataatataagtatatatacatatatatatatatatatatatatatatatatatatatatatatatatatatatatatatatatatatatatatatatatatatatatatatatatatatatatatatatatatatatatatatatatatatatatatatatatatatatatatatataggccggcctatcaggcttataaggtttttt

SEQ ID NO: 13917 - DNA, 1092 bp, Glycine max
  Gm_smallRNAprecursor_6750
acccttcaaacttaaaaggtttgttgaggtcattgttgttcgagccagtaatatctacgatagccatagcagaaccgaaaccgtcttaaaattgttgtaacaataagttatggcaaaccaaaaaaattactagctgagtcgcggacaatgtcgctttctttaatacatttcgtggtactgccaaaaattgtgcaagcagactatcaaccacaaagttcccaggataaaacagtccagatcactgtataagattcatactgcactgaggaaacctttctagaattacaccctcttgtatgacttgaaaagtcactttaaagccacccaaaaatatgacttgaaaagtcactctaatagccaaccgaaaatatgattagaaaagtcactctaatagccaaccgaaaaatatgacttgaaaagtcattattatagccaaccgaaaatatgacttaaaaagtcactcttatagccaaccgaaaaatatgacttgaaaagtcactcttatagccaaccgaaaatatgacttaaaaagtcactattatagccaaccgaaatattagagcgacagaaagaaagaggaagaagtttgtcggaaatgcatcgactgaaatatgagagggagaaagaaaagttgaggaaatgcttctcaactggaataagaaaaaatgaagaaagaagctctctctatatagggagtcaaacactattcaaatgtttatcgtaagcgatgtgagacttaaagtttttttttttcaaactttcatccatattctcctttgttctaacaaaatgttatttgggttatattcagcaacactaacaaaaaagaaaagatgattgaaagctgaaaaattagtttattaaattataagtgttcaataaaattagttgttaaagtaattaaaaagtgtaaaatgacataaaaataataaaatcatgatttatataaaaatggtaactaagaaattggataaatatattgaggataaaaatagaaaaaaaaatataaaagggtaaaaactaacatttttaaaaatgctacttcaagttgcattttaaaaaaatgctagaagctactaaagaaacttattt

SEQ ID NO: 13918 - DNA, 1076 bp, Glycine max
  Gm_smallRNAprecursor_6751
cattagcaacacaatgtacaaccaccagtcggtgtactcgaggttggcatgaccttcgatgacaaatcacaatgtattcgagcaataaaagaatacaacatcagaaatcattttgattgcagaacaatttactctgaccaaagaaggctacacttcttctgcaagttacatgaaaatggttgtacatggagcttgggcgcatgcaattcaaagaggcataacaaatggattatcaagagtatcagaggtcatcacacttgtctcgtgccgatgctcagacaagatcatcgccaactcgacaaacacgtcatagcacagatcatccaaccaattctcaaaacaaacccaactgtctccatcaagacattgattgcagagatcaaaacattcatgaattataccccatcctacaagaagacatggttagcaaagcaaaaagcgttggagatgattcatggaaactgggaagaatcatatgccaaactgccaaaacttttcggagctttgcaatcttgtgttcccgggactgtggtcgctgctcaaacaaaatccttgtatgaggggggagaaatagtaccgggcaaaagattgtttaaacgtgtcttttggtcatttggtccatgcattaatggttttgcatattgcaaacccattgtacaagtagatggtacatggctttacgaaaagtatactggcacactgttaatagctaccgcacaagatggagctaaccatatcttcccgattgcctatgccattgtagaaggggagacaacttcagcttgggggttttttctaaagaatttgagaagacatgttactttgcaaattaacatttctcttatttcagaccgacacccctcaattataagtgcctacaacaacccaagtaacttatgggtccaggacacatcccatttcttttgcctgcgccacattgcacaaaactttcttcgtggtaactcaaactgcaaacatttaaagaaaccacttatgttggctggtgagaatctattttatttattcgttataattttctttcaatcaaattttataacataatacattgattagat

SEQ ID NO: 13919 - DNA, 1075 bp, Glycine max
  Gm_smallRNAprecursor_6752
attagcaacacaatgtacaaccaccagtcggtgtactcgaggttggcatgaccttcgatgacaaatcacaatgtattcgagcaataaaagaatacaacatcagaaatcattttgattgcagaacaatttactctgaccaaagaaggctacacttcttctgcaagttacatgaaaatggttgtacatggagcttgggcgcatgcaattcaaagaggcataacaaatggattatcaagagtatcagaggtcatcacacttgtctcgtgccgatgctcagacaagatcatcgccaactcgacaaacacgtcatagcacagatcatccaaccaattctcaaaacaaacccaactgtctccatcaagacattgattgcagagatcaaaacattcatgaattataccccatcctacaagaagacatggttagcaaagcaaaaagcgttggagatgattcatggaaactgggaagaatcatatgccaaactgccaaaacttttcggagctttgcaatcttgtgttcccgggactgtggtcgctgctcaaacaaaatccttgtatgaggggggagaaatagtaccgggcaaaagattgtttaaacgtgtcttttggtcatttggtccatgcattaatggttttgcatattgcaaacccattgtacaagtagatggtacatggctttacgaaaagtatactggcacactgttaatagctaccgcacaagatggagctaaccatatcttcccgattgcctatgccattgtagaaggggagacaacttcagcttgggggttttttctaaagaatttgagaagacatgttactttgcaaattaacatttctcttatttcagaccgacacccctcaattataagtgcctacaacaacccaagtaacttatgggtccaggacacatcccatttcttttgcctgcgccacattgcacaaaactttcttcgtggtaactcaaactgcaaacatttaaagaaaccacttatgttggctggtgagaatctattttatttattcgttataattttctttcaatcaaattttataacataatacattgattagat

SEQ ID NO: 13920 - DNA, 1066 bp, Glycine max
  Gm_smallRNAprecursor_6753
gcaacacaatgtacaaccaccagtcggtgtactcgaggttggcatgaccttcgatgacaaatcacaatgtattcgagcaataaaagaatacaacatcagaaatcattttgattgcagaacaatttactctgaccaaagaaggctacacttcttctgcaagttacatgaaaatggttgtacatggagcttgggcgcatgcaattcaaagaggcataacaaatggattatcaagagtatcagaggtcatcacacttgtctcgtgccgatgctcagacaagatcatcgccaactcgacaaacacgtcatagcacagatcatccaaccaattctcaaaacaaacccaactgtctccatcaagacattgattgcagagatcaaaacattcatgaattataccccatcctacaagaagacatggttagcaaagcaaaaagcgttggagatgattcatggaaactgggaagaatcatatgccaaactgccaaaacttttcggagctttgcaatcttgtgttcccgggactgtggtcgctgctcaaacaaaatccttgtatgaggggggagaaatagtaccgggcaaaagattgtttaaacgtgtcttttggtcatttggtccatgcattaatggttttgcatattgcaaacccattgtacaagtagatggtacatggctttacgaaaagtatactggcacactgttaatagctaccgcacaagatggagctaaccatatcttcccgattgcctatgccattgtagaaggggagacaacttcagcttgggggttttttctaaagaatttgagaagacatgttactttgcaaattaacatttctcttatttcagaccgacacccctcaattataagtgcctacaacaacccaagtaacttatgggtccaggacacatcccatttcttttgcctgcgccacattgcacaaaactttcttcgtggtaactcaaactgcaaacatttaaagaaaccacttatgttggctggtgagaatctattttatttattcgttataattttctttcaatcaaattttataacataatacattgat

SEQ ID NO: 13921 - DNA, 1067 bp, Glycine max
  Gm_smallRNAprecursor_6754
gcaacacaatgtacaaccaccagtcggtgtactcgaggttggcatgaccttcgatgacaaatcacaatgtattcgagcaataaaagaatacaacatcagaaatcattttgattgcagaacaatttactctgaccaaagaaggctacacttcttctgcaagttacatgaaaatggttgtacatggagcttgggcgcatgcaattcaaagaggcataacaaatggattatcaagagtatcagaggtcatcacacttgtctcgtgccgatgctcagacaagatcatcgccaactcgacaaacacgtcatagcacagatcatccaaccaattctcaaaacaaacccaactgtctccatcaagacattgattgcagagatcaaaacattcatgaattataccccatcctacaagaagacatggttagcaaagcaaaaagcgttggagatgattcatggaaactgggaagaatcatatgccaaactgccaaaacttttcggagctttgcaatcttgtgttcccgggactgtggtcgctgctcaaacaaaatccttgtatgaggggggagaaatagtaccgggcaaaagattgtttaaacgtgtcttttggtcatttggtccatgcattaatggttttgcatattgcaaacccattgtacaagtagatggtacatggctttacgaaaagtatactggcacactgttaatagctaccgcacaagatggagctaaccatatcttcccgattgcctatgccattgtagaaggggagacaacttcagcttgggggttttttctaaagaatttgagaagacatgttactttgcaaattaacatttctcttatttcagaccgacacccctcaattataagtgcctacaacaacccaagtaacttatgggtccaggacacatcccatttcttttgcctgcgccacattgcacaaaactttcttcgtggtaactcaaactgcaaacatttaaagaaaccacttatgttggctggtgagaatctattttatttattcgttataattttctttcaatcaaattttataacataatacattgatt

SEQ ID NO: 13922 - DNA, 1065 bp, Glycine max
  Gm_smallRNAprecursor_6755
caacacaatgtacaaccaccagtcggtgtactcgaggttggcatgaccttcgatgacaaatcacaatgtattcgagcaataaaagaatacaacatcagaaatcattttgattgcagaacaatttactctgaccaaagaaggctacacttcttctgcaagttacatgaaaatggttgtacatggagcttgggcgcatgcaattcaaagaggcataacaaatggattatcaagagtatcagaggtcatcacacttgtctcgtgccgatgctcagacaagatcatcgccaactcgacaaacacgtcatagcacagatcatccaaccaattctcaaaacaaacccaactgtctccatcaagacattgattgcagagatcaaaacattcatgaattataccccatcctacaagaagacatggttagcaaagcaaaaagcgttggagatgattcatggaaactgggaagaatcatatgccaaactgccaaaacttttcggagctttgcaatcttgtgttcccgggactgtggtcgctgctcaaacaaaatccttgtatgaggggggagaaatagtaccgggcaaaagattgtttaaacgtgtcttttggtcatttggtccatgcattaatggttttgcatattgcaaacccattgtacaagtagatggtacatggctttacgaaaagtatactggcacactgttaatagctaccgcacaagatggagctaaccatatcttcccgattgcctatgccattgtagaaggggagacaacttcagcttgggggttttttctaaagaatttgagaagacatgttactttgcaaattaacatttctcttatttcagaccgacacccctcaattataagtgcctacaacaacccaagtaacttatgggtccaggacacatcccatttcttttgcctgcgccacattgcacaaaactttcttcgtggtaactcaaactgcaaacatttaaagaaaccacttatgttggctggtgagaatctattttatttattcgttataattttctttcaatcaaattttataacataatacattgat

SEQ ID NO: 13923 - DNA, 1039 bp, Glycine max
  Gm_smallRNAprecursor_6756
tagggaaccattactataaaaacttcgtaccccattgcccagaggctctttgctatgcgaaggtatgggggagggatgttgtacgcagccttacccttgcatatgcaaagaggctgtttccggattcgaacccatgaccaacaagtcaccaaggcacaactttaccgttgcaccagggctcgtcctcgggaaccattactatataagcccgaaaaaaaaggcaggtgaatgctagcttttttgtgtttttatgctttttatgtttttaattttggtgtggtcgacaagggtgtttccctcgctcctgggtttgaatattatctaatattatctaattgtggttctttatgtgcatatcagcgacactggtgaggtgtgtaacatgtttaagcacgaagaagacatcccaaatgcctttatttgggcaccatcctatacaaaagtttattccgctaagtcttccttcaagtggttagctatgaagcacggacaccctagcctcagccctttgtcgtgttcggtgtccgactcgacaccaacaccgacacgacaccgacgcttgtgtctgggttgagtttgatgtgtttggcagatatccacatgtttatgtccgtgtcatgtccggtgtccgtatcagtgtcggtgtttcatagtgtcggtgtttcataggtggttagactgtgatattcctacaagaaggaaagctgggcttgggtttggaagctgccattactataaaatctcaaacacttcctttggttcacttatagaggatgtttacacaccaactttttctctttaagcgtcattttccttctttacttcgtgttgcaggtgtggtggagtagtagacaaaacttggattcacactctaatgcttttgtcatctgggggaagctccattttgatgtcaactgcaatttcttcacaatcaacgaagctgagtggctgcgtttcaaacctcacgaattctagaggtcaaatgttcggtattacctgctagacaattttggaagggtcgcaatgcaaatgtttttca

SEQ ID NO: 13924 - DNA, 1037 bp, Glycine max
  Gm_smallRNAprecursor_6757
aatcaaatttttttattttaacatgtttgcggtataattacaaacctgattccatgccctggtccacacttgacatctatggctcgtacattttgggacccacttactatggaaatacagtcatcaccttcattaaaaacagtgagaaaagcaaattagaaaatttaaaattcaagtgatttttttctaattttgtgttggttttggttttcacctgtcccaatgatactattgcttatgagaatatttcgtgtctctgtgacgtgaattccatcagtgttggggctgttccccggtgctctcacgatcaaattcgaagctgtaacattgttgcatttttgaaaccttatatgcatttgctgtgcatttttgaacctcaggtttgtcactctcaagttgttgcattgatagaaagtcacagcctatgcaacaatttttttttccagaaattaaagaaaaaaaatagtcagtatagaaaattctatgaagtacggacacctcagtctcttgtcgtgtccggtgttcgacacgacactgacaccgacaccgacacgataccgacacccgtgtccgggttgaatttgatgtatttgacaggtgttcacgtgtctgtgtcagtgtctgtgttcgtgtcgtgtccggtgtccgtgtcagtgtcggtgcttcataaataaaaatagagcactgtgcatcaacgtgtaagattgttattgtattacaatgaaacatcatgttatgaagaagaaaattaacttacagttggcgcaggtttgcatggctgtgaaacaaaaggagagtaaagaaatcatggtcagtatcgaaaatcacaaaaacaaaaagttggaataaaaaaaaatgagaacaaaaatatagatatagaataattaaatattggttcattaaaattcaaacttctgaattgaataataataataaatggttatccaaatatctaatattcattgatttatatgagaatataaatctaatgaatgtgactcggttgacaatagtacaagatgaattatttgggacaa

SEQ ID NO: 13925 - DNA, 1038 bp, Glycine max
  Gm_smallRNAprecursor_6758
aatcaaatttttttattttaacatgtttgcggtataattacaaacctgattccatgccctggtccacacttgacatctatggctcgtacattttgggacccacttactatggaaatacagtcatcaccttcattaaaaacagtgagaaaagcaaattagaaaatttaaaattcaagtgatttttttctaattttgtgttggttttggttttcacctgtcccaatgatactattgcttatgagaatatttcgtgtctctgtgacgtgaattccatcagtgttggggctgttccccggtgctctcacgatcaaattcgaagctgtaacattgttgcatttttgaaaccttatatgcatttgctgtgcatttttgaacctcaggtttgtcactctcaagttgttgcattgatagaaagtcacagcctatgcaacaatttttttttccagaaattaaagaaaaaaaatagtcagtatagaaaattctatgaagtacggacacctcagtctcttgtcgtgtccggtgttcgacacgacactgacaccgacaccgacacgataccgacacccgtgtccgggttgaatttgatgtatttgacaggtgttcacgtgtctgtgtcagtgtctgtgttcgtgtcgtgtccggtgtccgtgtcagtgtcggtgcttcataaataaaaatagagcactgtgcatcaacgtgtaagattgttattgtattacaatgaaacatcatgttatgaagaagaaaattaacttacagttggcgcaggtttgcatggctgtgaaacaaaaggagagtaaagaaatcatggtcagtatcgaaaatcacaaaaacaaaaagttggaataaaaaaaaatgagaacaaaaatatagatatagaataattaaatattggttcattaaaattcaaacttctgaattgaataataataataaatggttatccaaatatctaatattcattgatttatatgagaatataaatctaatgaatgtgactcggttgacaatagtacaagatgaattatttgggacaat

SEQ ID NO: 13926 - DNA, 1044 bp, Glycine max
  Gm_smallRNAprecursor_6759
aatcaaatttttttattttaacatgtttgcggtataattacaaacctgattccatgccctggtccacacttgacatctatggctcgtacattttgggacccacttactatggaaatacagtcatcaccttcattaaaaacagtgagaaaagcaaattagaaaatttaaaattcaagtgatttttttctaattttgtgttggttttggttttcacctgtcccaatgatactattgcttatgagaatatttcgtgtctctgtgacgtgaattccatcagtgttggggctgttccccggtgctctcacgatcaaattcgaagctgtaacattgttgcatttttgaaaccttatatgcatttgctgtgcatttttgaacctcaggtttgtcactctcaagttgttgcattgatagaaagtcacagcctatgcaacaatttttttttccagaaattaaagaaaaaaaatagtcagtatagaaaattctatgaagtacggacacctcagtctcttgtcgtgtccggtgttcgacacgacactgacaccgacaccgacacgataccgacacccgtgtccgggttgaatttgatgtatttgacaggtgttcacgtgtctgtgtcagtgtctgtgttcgtgtcgtgtccggtgtccgtgtcagtgtcggtgcttcataaataaaaatagagcactgtgcatcaacgtgtaagattgttattgtattacaatgaaacatcatgttatgaagaagaaaattaacttacagttggcgcaggtttgcatggctgtgaaacaaaaggagagtaaagaaatcatggtcagtatcgaaaatcacaaaaacaaaaagttggaataaaaaaaaatgagaacaaaaatatagatatagaataattaaatattggttcattaaaattcaaacttctgaattgaataataataataaatggttatccaaatatctaatattcattgatttatatgagaatataaatctaatgaatgtgactcggttgacaatagtacaagatgaattatttgggacaatctaggc

SEQ ID NO: 13927 - DNA, 1096 bp, Glycine max
  Gm_smallRNAprecursor_6760
tataattacaaacctgattccatgccctggtccacacttgacatctatggctcgtacattttgggacccacttactatggaaatacagtcatcaccttcattaaaaacagtgagaaaagcaaattagaaaatttaaaattcaagtgatttttttctaattttgtgttggttttggttttcacctgtcccaatgatactattgcttatgagaatatttcgtgtctctgtgacgtgaattccatcagtgttggggctgttccccggtgctctcacgatcaaattcgaagctgtaacattgttgcatttttgaaaccttatatgcatttgctgtgcatttttgaacctcaggtttgtcactctcaagttgttgcattgatagaaagtcacagcctatgcaacaatttttttttccagaaattaaagaaaaaaaatagtcagtatagaaaattctatgaagtacggacacctcagtctcttgtcgtgtccggtgttcgacacgacactgacaccgacaccgacacgataccgacacccgtgtccgggttgaatttgatgtatttgacaggtgttcacgtgtctgtgtcagtgtctgtgttcgtgtcgtgtccggtgtccgtgtcagtgtcggtgcttcataaataaaaatagagcactgtgcatcaacgtgtaagattgttattgtattacaatgaaacatcatgttatgaagaagaaaattaacttacagttggcgcaggtttgcatggctgtgaaacaaaaggagagtaaagaaatcatggtcagtatcgaaaatcacaaaaacaaaaagttggaataaaaaaaaatgagaacaaaaatatagatatagaataattaaatattggttcattaaaattcaaacttctgaattgaataataataataaatggttatccaaatatctaatattcattgatttatatgagaatataaatctaatgaatgtgactcggttgacaatagtacaagatgaattatttgggacaatctaggctcaattgacgaaagtttatagcatcggagagctaaaacctataattgtggtggttataaaaaataatgtaaacgacaatgtgaa

SEQ ID NO: 13928 - DNA, 1102 bp, Glycine max
  Gm_smallRNAprecursor_6761
tataattacaaacctgattccatgccctggtccacacttgacatctatggctcgtacattttgggacccacttactatggaaatacagtcatcaccttcattaaaaacagtgagaaaagcaaattagaaaatttaaaattcaagtgatttttttctaattttgtgttggttttggttttcacctgtcccaatgatactattgcttatgagaatatttcgtgtctctgtgacgtgaattccatcagtgttggggctgttccccggtgctctcacgatcaaattcgaagctgtaacattgttgcatttttgaaaccttatatgcatttgctgtgcatttttgaacctcaggtttgtcactctcaagttgttgcattgatagaaagtcacagcctatgcaacaatttttttttccagaaattaaagaaaaaaaatagtcagtatagaaaattctatgaagtacggacacctcagtctcttgtcgtgtccggtgttcgacacgacactgacaccgacaccgacacgataccgacacccgtgtccgggttgaatttgatgtatttgacaggtgttcacgtgtctgtgtcagtgtctgtgttcgtgtcgtgtccggtgtccgtgtcagtgtcggtgcttcataaataaaaatagagcactgtgcatcaacgtgtaagattgttattgtattacaatgaaacatcatgttatgaagaagaaaattaacttacagttggcgcaggtttgcatggctgtgaaacaaaaggagagtaaagaaatcatggtcagtatcgaaaatcacaaaaacaaaaagttggaataaaaaaaaatgagaacaaaaatatagatatagaataattaaatattggttcattaaaattcaaacttctgaattgaataataataataaatggttatccaaatatctaatattcattgatttatatgagaatataaatctaatgaatgtgactcggttgacaatagtacaagatgaattatttgggacaatctaggctcaattgacgaaagtttatagcatcggagagctaaaacctataattgtggtggttataaaaaataatgtaaacgacaatgtgaatggagc

SEQ ID NO: 13929 - DNA, 1109 bp, Glycine max
  Gm_smallRNAprecursor_6762
tataattacaaacctgattccatgccctggtccacacttgacatctatggctcgtacattttgggacccacttactatggaaatacagtcatcaccttcattaaaaacagtgagaaaagcaaattagaaaatttaaaattcaagtgatttttttctaattttgtgttggttttggttttcacctgtcccaatgatactattgcttatgagaatatttcgtgtctctgtgacgtgaattccatcagtgttggggctgttccccggtgctctcacgatcaaattcgaagctgtaacattgttgcatttttgaaaccttatatgcatttgctgtgcatttttgaacctcaggtttgtcactctcaagttgttgcattgatagaaagtcacagcctatgcaacaatttttttttccagaaattaaagaaaaaaaatagtcagtatagaaaattctatgaagtacggacacctcagtctcttgtcgtgtccggtgttcgacacgacactgacaccgacaccgacacgataccgacacccgtgtccgggttgaatttgatgtatttgacaggtgttcacgtgtctgtgtcagtgtctgtgttcgtgtcgtgtccggtgtccgtgtcagtgtcggtgcttcataaataaaaatagagcactgtgcatcaacgtgtaagattgttattgtattacaatgaaacatcatgttatgaagaagaaaattaacttacagttggcgcaggtttgcatggctgtgaaacaaaaggagagtaaagaaatcatggtcagtatcgaaaatcacaaaaacaaaaagttggaataaaaaaaaatgagaacaaaaatatagatatagaataattaaatattggttcattaaaattcaaacttctgaattgaataataataataaatggttatccaaatatctaatattcattgatttatatgagaatataaatctaatgaatgtgactcggttgacaatagtacaagatgaattatttgggacaatctaggctcaattgacgaaagtttatagcatcggagagctaaaacctataattgtggtggttataaaaaataatgtaaacgacaatgtgaatggagcaggaatt

SEQ ID NO: 13930 - DNA, 1109 bp, Glycine max; identical to SEQ ID NO: 13929
  Gm_smallRNAprecursor_6763

SEQ ID NO: 13931 - DNA, 1105 bp, Glycine max
  Gm_smallRNAprecursor_6764
attacaaacctgattccatgccctggtccacacttgacatctatggctcgtacattttgggacccacttactatggaaatacagtcatcaccttcattaaaaacagtgagaaaagcaaattagaaaatttaaaattcaagtgatttttttctaattttgtgttggttttggttttcacctgtcccaatgatactattgcttatgagaatatttcgtgtctctgtgacgtgaattccatcagtgttggggctgttccccggtgctctcacgatcaaattcgaagctgtaacattgttgcatttttgaaaccttatatgcatttgctgtgcatttttgaacctcaggtttgtcactctcaagttgttgcattgatagaaagtcacagcctatgcaacaatttttttttccagaaattaaagaaaaaaaatagtcagtatagaaaattctatgaagtacggacacctcagtctcttgtcgtgtccggtgttcgacacgacactgacaccgacaccgacacgataccgacacccgtgtccgggttgaatttgatgtatttgacaggtgttcacgtgtctgtgtcagtgtctgtgttcgtgtcgtgtccggtgtccgtgtcagtgtcggtgcttcataaataaaaatagagcactgtgcatcaacgtgtaagattgttattgtattacaatgaaacatcatgttatgaagaagaaaattaacttacagttggcgcaggtttgcatggctgtgaaacaaaaggagagtaaagaaatcatggtcagtatcgaaaatcacaaaaacaaaaagttggaataaaaaaaaatgagaacaaaaatatagatatagaataattaaatattggttcattaaaattcaaacttctgaattgaataataataataaatggttatccaaatatctaatattcattgatttatatgagaatataaatctaatgaatgtgactcggttgacaatagtacaagatgaattatttgggacaatctaggctcaattgacgaaagtttatagcatcggagagctaaaacctataattgtggtggttataaaaaataatgtaaacgacaatgtgaatggagcaggaatt

SEQ ID NO: 13932 - DNA, 1091 bp, Glycine max
  Gm_smallRNAprecursor_6765
acctgattccatgccctggtccacacttgacatctatggctcgtacattttgggacccacttactatggaaatacagtcatcaccttcattaaaaacagtgagaaaagcaaattagaaaatttaaaattcaagtgatttttttctaattttgtgttggttttggttttcacctgtcccaatgatactattgcttatgagaatatttcgtgtctctgtgacgtgaattccatcagtgttggggctgttccccggtgctctcacgatcaaattcgaagctgtaacattgttgcatttttgaaaccttatatgcatttgctgtgcatttttgaacctcaggtttgtcactctcaagttgttgcattgatagaaagtcacagcctatgcaacaatttttttttccagaaattaaagaaaaaaaatagtcagtatagaaaattctatgaagtacggacacctcagtctcttgtcgtgtccggtgttcgacacgacactgacaccgacaccgacacgataccgacacccgtgtccgggttgaatttgatgtatttgacaggtgttcacgtgtctgtgtcagtgtctgtgttcgtgtcgtgtccggtgtccgtgtcagtgtcggtgcttcataaataaaaatagagcactgtgcatcaacgtgtaagattgttattgtattacaatgaaacatcatgttatgaagaagaaaattaacttacagttggcgcaggtttgcatggctgtgaaacaaaaggagagtaaagaaatcatggtcagtatcgaaaatcacaaaaacaaaaagttggaataaaaaaaaatgagaacaaaaatatagatatagaataattaaatattggttcattaaaattcaaacttctgaattgaataataataataaatggttatccaaatatctaatattcattgatttatatgagaatataaatctaatgaatgtgactcggttgacaatagtacaagatgaattatttgggacaatctaggctcaattgacgaaagtttatagcatcggagagctaaaacctataattgtggtggttataaaaaataatgtaaacgacaatgtgaatggagc

SEQ ID NO: 13933 - DNA, 1098 bp, Glycine max
  Gm_smallRNAprecursor_6766
acctgattccatgccctggtccacacttgacatctatggctcgtacattttgggacccacttactatggaaatacagtcatcaccttcattaaaaacagtgagaaaagcaaattagaaaatttaaaattcaagtgatttttttctaattttgtgttggttttggttttcacctgtcccaatgatactattgcttatgagaatatttcgtgtctctgtgacgtgaattccatcagtgttggggctgttccccggtgctctcacgatcaaattcgaagctgtaacattgttgcatttttgaaaccttatatgcatttgctgtgcatttttgaacctcaggtttgtcactctcaagttgttgcattgatagaaagtcacagcctatgcaacaatttttttttccagaaattaaagaaaaaaaatagtcagtatagaaaattctatgaagtacggacacctcagtctcttgtcgtgtccggtgttcgacacgacactgacaccgacaccgacacgataccgacacccgtgtccgggttgaatttgatgtatttgacaggtgttcacgtgtctgtgtcagtgtctgtgttcgtgtcgtgtccggtgtccgtgtcagtgtcggtgcttcataaataaaaatagagcactgtgcatcaacgtgtaagattgttattgtattacaatgaaacatcatgttatgaagaagaaaattaacttacagttggcgcaggtttgcatggctgtgaaacaaaaggagagtaaagaaatcatggtcagtatcgaaaatcacaaaaacaaaaagttggaataaaaaaaaatgagaacaaaaatatagatatagaataattaaatattggttcattaaaattcaaacttctgaattgaataataataataaatggttatccaaatatctaatattcattgatttatatgagaatataaatctaatgaatgtgactcggttgacaatagtacaagatgaattatttgggacaatctaggctcaattgacgaaagtttatagcatcggagagctaaaacctataattgtggtggttataaaaaataatgtaaacgacaatgtgaatggagcaggaatt

SEQ ID NO: 13934 - DNA, 1098 bp, Glycine max; identical to SEQ ID NO: 13933
  Gm_smallRNAprecursor_6767

SEQ ID NO: 13935 - DNA, 1040 bp, Glycine max
  Gm_smallRNAprecursor_6768
agttgagaatgttggaatcaacaaagtgctcattgatggaggagcggctgtcaacttaatgcctcgatctatgctctacaagatcgggaaacatgacactgatctatctgcccacaacattgtgctttcgaattatgagggtaaaactggctattctttgggagccattcaagtagatgttgctgtaggcagtatagttcgaccaactcttttcctggtgatacagtctaaggctaattttaacttgctattaggaagggagtggattcatggagttggggctgtgccatctacccttcaccagaagctcattatctggagggaggatgggattgttgaaaatatagaggcggatcaaagcttctataagtcagaggtcgataatgttactgcacaaacctttgacaaaaagttggctaacatagcaccttgtggtgacaaggaggctgttgtcgaatcgagtgacaatgttgtccactctgtcaaactccatcctacctatgggtttatatgggagagggaggaaattgatgctgttccctctgaagatggagtcattccaccaactgggtggaatatatatgaagattaatatgactgaggccactgcatgggccagaattacaacttatatggccgaaaatagactaaatacggcctttgaggctgaatctcaacaaaatatggcagttgaagccaagatcgaagatcatgaaaacaaagaaacaaaggatcgaagactggattgtatttatgatgatgagccgctgggttttgagaaaaatcccataagtgaggcgccaaagatgcaggctcaagatcctttggaagaggtcaatattggagatggctcgattaaaaggccaacttatatcagtgccaatatcacctcaagtttaaaagaaaagctggtgcctcttcttagagagtttaaagactgttttgcttgggattaccacgaaatgcctgggttaagcagagaaatggtcgaaatgaagttacctattaaggaaggaaaaagaccagtaaaacaactacca

SEQ ID NO: 13936 - DNA, 1072 bp, Glycine max
  Gm_smallRNAprecursor_6769
tgattacgactatatattatttcttatatttaatgaacacgcactgaagaattatataagagcctaaataaaagaaaagtctaggtaacaaaaaaattaaataatcataattttttttcatcattagtcatttttaattactatagtaattcttatggaaaatctctagttacttacatatcaaactctgtggtttatatcgtcttaaaatttgccacaaatgttaaagaattggtaaatccatgaccaatattgtattggttgaagaggtataagattgattggtagattataaaagaaagaaaaaagataaatgttacgggttttgatttctctcgattcttactaacaaaaattagtaaactagttattaatatttattgataaaaaagattcgctgaacaaatatatagttttaagtcaattactttatcaaatgacttgtatgtcaacaatatcatcaaatgacttgtaatatatattactatgaagcaccgacaccgacacggacatcggacacgacacggatacggacacgtggacacctataatatccaaaatatagaacgtagtacgggtgttgtgtcggtgtcagacactgacacggacgcgtgtcggacaccgaacacgacaagggactggagtgtccatacttcataaatatataattcattaattgtgatcacattcattggctgatgctgtttcaacttttggtccaaagtgaggagtagtatgaagaaaataagtgtttcaattcaaccgttaagacaaagatgttgtataaggtgggaagctgttcaaggagaatattgaaagctaaagagcatagtctcatctagatttgttatcagtagttctgtttgattctagtttatgtagaaaaagccggtcttcacaaccatgtttaatttgcttcacttttctcattaacaaatgacttcatcgaattaagtattctggtatgagtaattccttttcaagccatatccaacaaataatgaaaaggtattttaatagtatattaagttaattaggggattatgtatataatgaaaaaaatcatttttaa

SEQ ID NO: 13937 - DNA, 1059 bp, Glycine max
  Gm_smallRNAprecursor_6770
atattatttcttatatttaatgaacacgcactgaagaattatataagagcctaaataaaagaaaagtctaggtaacaaaaaaattaaataatcataattttttttcatcattagtcatttttaattactatagtaattcttatggaaaatctctagttacttacatatcaaactctgtggtttatatcgtcttaaaatttgccacaaatgttaaagaattggtaaatccatgaccaatattgtattggttgaagaggtataagattgattggtagattataaaagaaagaaaaaagataaatgttacgggttttgatttctctcgattcttactaacaaaaattagtaaactagttattaatatttattgataaaaaagattcgctgaacaaatatatagttttaagtcaattactttatcaaatgacttgtatgtcaacaatatcatcaaatgacttgtaatatatattactatgaagcaccgacaccgacacggacatcggacacgacacggatacggacacgtggacacctataatatccaaaatatagaacgtagtacgggtgttgtgtcggtgtcagacactgacacggacgcgtgtcggacaccgaacacgacaagggactggagtgtccatacttcataaatatataattcattaattgtgatcacattcattggctgatgctgtttcaacttttggtccaaagtgaggagtagtatgaagaaaataagtgtttcaattcaaccgttaagacaaagatgttgtataaggtgggaagctgttcaaggagaatattgaaagctaaagagcatagtctcatctagatttgttatcagtagttctgtttgattctagtttatgtagaaaaagccggtcttcacaaccatgtttaatttgcttcacttttctcattaacaaatgacttcatcgaattaagtattctggtatgagtaattccttttcaagccatatccaacaaataatgaaaaggtattttaatagtatattaagttaattaggggattatgtatataatgaaaaaaatcatttttaa

SEQ ID NO: 13938 - DNA, 1093 bp, Glycine max
  Gm_smallRNAprecursor_6771
atattatttcttatatttaatgaacacgcactgaagaattatataagagcctaaataaaagaaaagtctaggtaacaaaaaaattaaataatcataattttttttcatcattagtcatttttaattactatagtaattcttatggaaaatctctagttacttacatatcaaactctgtggtttatatcgtcttaaaatttgccacaaatgttaaagaattggtaaatccatgaccaatattgtattggttgaagaggtataagattgattggtagattataaaagaaagaaaaaagataaatgttacgggttttgatttctctcgattcttactaacaaaaattagtaaactagttattaatatttattgataaaaaagattcgctgaacaaatatatagttttaagtcaattactttatcaaatgacttgtatgtcaacaatatcatcaaatgacttgtaatatatattactatgaagcaccgacaccgacacggacatcggacacgacacggatacggacacgtggacacctataatatccaaaatatagaacgtagtacgggtgttgtgtcggtgtcagacactgacacggacgcgtgtcggacaccgaacacgacaagggactggagtgtccatacttcataaatatataattcattaattgtgatcacattcattggctgatgctgtttcaacttttggtccaaagtgaggagtagtatgaagaaaataagtgtttcaattcaaccgttaagacaaagatgttgtataaggtgggaagctgttcaaggagaatattgaaagctaaagagcatagtctcatctagatttgttatcagtagttctgtttgattctagtttatgtagaaaaagccggtcttcacaaccatgtttaatttgcttcacttttctcattaacaaatgacttcatcgaattaagtattctggtatgagtaattccttttcaagccatatccaacaaataatgaaaaggtattttaatagtatattaagttaattaggggattatgtatataatgaaaaaaatcatttttaaatatgagaaaaatatatcttgattatataacctt

SEQ ID NO: 13939 - DNA, 1082 bp, Glycine max
  Gm_smallRNAprecursor_6772
tatatttaatgaacacgcactgaagaattatataagagcctaaataaaagaaaagtctaggtaacaaaaaaattaaataatcataattttttttcatcattagtcatttttaattactatagtaattcttatggaaaatctctagttacttacatatcaaactctgtggtttatatcgtcttaaaatttgccacaaatgttaaagaattggtaaatccatgaccaatattgtattggttgaagaggtataagattgattggtagattataaaagaaagaaaaaagataaatgttacgggttttgatttctctcgattcttactaacaaaaattagtaaactagttattaatatttattgataaaaaagattcgctgaacaaatatatagttttaagtcaattactttatcaaatgacttgtatgtcaacaatatcatcaaatgacttgtaatatatattactatgaagcaccgacaccgacacggacatcggacacgacacggatacggacacgtggacacctataatatccaaaatatagaacgtagtacgggtgttgtgtcggtgtcagacactgacacggacgcgtgtcggacaccgaacacgacaagggactggagtgtccatacttcataaatatataattcattaattgtgatcacattcattggctgatgctgtttcaacttttggtccaaagtgaggagtagtatgaagaaaataagtgtttcaattcaaccgttaagacaaagatgttgtataaggtgggaagctgttcaaggagaatattgaaagctaaagagcatagtctcatctagatttgttatcagtagttctgtttgattctagtttatgtagaaaaagccggtcttcacaaccatgtttaatttgcttcacttttctcattaacaaatgacttcatcgaattaagtattctggtatgagtaattccttttcaagccatatccaacaaataatgaaaaggtattttaatagtatattaagttaattaggggattatgtatataatgaaaaaaatcatttttaaatatgagaaaaatatatcttgattatataacctt

SEQ ID NO: 13940 - DNA, 1033 bp, Glycine max
  Gm_smallRNAprecursor_6773
taaaagaaaagtctaggtaacaaaaaaattaaataatcataattttttttcatcattagtcatttttaattactatagtaattcttatggaaaatctctagttacttacatatcaaactctgtggtttatatcgtcttaaaatttgccacaaatgttaaagaattggtaaatccatgaccaatattgtattggttgaagaggtataagattgattggtagattataaaagaaagaaaaaagataaatgttacgggttttgatttctctcgattcttactaacaaaaattagtaaactagttattaatatttattgataaaaaagattcgctgaacaaatatatagttttaagtcaattactttatcaaatgacttgtatgtcaacaatatcatcaaatgacttgtaatatatattactatgaagcaccgacaccgacacggacatcggacacgacacggatacggacacgtggacacctataatatccaaaatatagaacgtagtacgggtgttgtgtcggtgtcagacactgacacggacgcgtgtcggacaccgaacacgacaagggactggagtgtccatacttcataaatatataattcattaattgtgatcacattcattggctgatgctgtttcaacttttggtccaaagtgaggagtagtatgaagaaaataagtgtttcaattcaaccgttaagacaaagatgttgtataaggtgggaagctgttcaaggagaatattgaaagctaaagagcatagtctcatctagatttgttatcagtagttctgtttgattctagtttatgtagaaaaagccggtcttcacaaccatgtttaatttgcttcacttttctcattaacaaatgacttcatcgaattaagtattctggtatgagtaattccttttcaagccatatccaacaaataatgaaaaggtattttaatagtatattaagttaattaggggattatgtatataatgaaaaaaatcatttttaaatatgagaaaaatatatcttgattatata

SEQ ID NO: 13941 - DNA, 1035 bp, Glycine max
  Gm_smallRNAprecursor_6774
taaaagaaaagtctaggtaacaaaaaaattaaataatcataattttttttcatcattagtcatttttaattactatagtaattcttatggaaaatctctagttacttacatatcaaactctgtggtttatatcgtcttaaaatttgccacaaatgttaaagaattggtaaatccatgaccaatattgtattggttgaagaggtataagattgattggtagattataaaagaaagaaaaaagataaatgttacgggttttgatttctctcgattcttactaacaaaaattagtaaactagttattaatatttattgataaaaaagattcgctgaacaaatatatagttttaagtcaattactttatcaaatgacttgtatgtcaacaatatcatcaaatgacttgtaatatatattactatgaagcaccgacaccgacacggacatcggacacgacacggatacggacacgtggacacctataatatccaaaatatagaacgtagtacgggtgttgtgtcggtgtcagacactgacacggacgcgtgtcggacaccgaacacgacaagggactggagtgtccatacttcataaatatataattcattaattgtgatcacattcattggctgatgctgtttcaacttttggtccaaagtgaggagtagtatgaagaaaataagtgtttcaattcaaccgttaagacaaagatgttgtataaggtgggaagctgttcaaggagaatattgaaagctaaagagcatagtctcatctagatttgttatcagtagttctgtttgattctagtttatgtagaaaaagccggtcttcacaaccatgtttaatttgcttcacttttctcattaacaaatgacttcatcgaattaagtattctggtatgagtaattccttttcaagccatatccaacaaataatgaaaaggtattttaatagtatattaagttaattaggggattatgtatataatgaaaaaaatcatttttaaatatgagaaaaatatatcttgattatataac

SEQ ID NO: 13942 - DNA, 1040 bp, Glycine max
  Gm_smallRNAprecursor_6775
agttgagaatgttggaatcaacaaagtgctcattgatggaggagcggctgtcaacttaatgcctcgatctatgctctacaagatcgggaaacatgacactgatctatctgcccacaacattgtgctttcgaattatgagggtaaaactggctattctttgggagccattcaagtagatgttgctgtaggcagtatagttcgaccaactcttttcctggtgatacagtctaaggctaattttaacttgctattaggaagggagtggattcatggagttggagctgtgccatctacccttcaccagaagctcattatctggagggaggatgggattgtggaaaatatagaggcggatcaaagcttctataagtcagaggtcgataatgttactgcacaaacctttgacaaaaagttggctaacatagcaccttgtggtgacaaggaggctgttgtcgaatcgagtgacaatgttgtccactctgtcaaactccatcctacctatgggtttatatgggagagggaggaaattgatgctgttccctctgaagatggagtcattccaccaactgggtggaatatatatgaagattaatatgactgaggccactgcatgggctagaattacggcttatatggccgaaaatagactaaatacggcctttgaggctgaatctcaacaaaatatggcagttgaagccaagatcgaagatcatgaaaacaaagaaacaaaggatcgaagactggattgtatttatgatgatgagccgctgggttttgagaaaaatcccataagtgaggcgccaaagatgcaggctcaagattctttggaagaggtcgatattggagatggctcgattaaaaggccaacttatatcagtgccaatatcacctcaagtttaaaagaaaagctggtgcctcttcttagagagtttaaagactgttttgcttgggattaccacgaaatgcctgggttaagcagagaaatggtcgaaatgaaattacctattaaggagggaaaaagaccagtaaaacaactacca

SEQ ID NO: 13943 - DNA, 1157 bp, Glycine max
  Gm_smallRNAprecursor_6776
aagaccagtaaaacaactaccaagaagattcgcaccagaaatcatgtccaagattaaggaagagatcgaaaggttgctgaggtgtaaattcatcagggctgccaggtatgtcgaatggttagccaatatagtccctgtcattaaaaagaatggaactcttagagtatgcatagattttagggatttaaataatgctacacctaaagatgaatatgctatgccagtagcggaaatgttggtagattcggcagctggtttcgaatttttaagcatgttagatggttattctggctataaccaaatatttattgctgaaagtgatgtgtcgaaaacagcatttcgatgccctggtgctttaggcacttatgaatgggtagttatgccctttgggttgaaaaatgctggggccacttatcaaagggccatgaattctatgtttcatgattttattgacacatttatgcaagtttatattgatgatataatcatcaaatcctcttcagaagatagccatttggattaccttaggcaatcttttgaacgaatgaggaaacatggattaaagatgaatccattaaaatgtgctttttgtgtgcgtgcaggagacttccttggttttgtggtgcataaaaaaggcattgagataaatcaaaacaagacaaaggctattcttgagacgaagcctccttcgaccaaaaaacagcttcagtctttactaggaaaaatcaacttcttgaggcgattcatttcgaatctaagtggcaaagctcaaattttttcgccattacttcgactcaagaaagatgaaccattcaaatggaatgaagagcatcaaaaggctttcgatgaaattaaagaatatctgatcaagcctcccgtgttaatgcctcctagtcgaaacaagtccatgaagttgtatattgctgcgtctgacaagaccattggtagcatgttggctcaggaagatgatgatggcatagaacatgcaatttattatcttagtcgtgtactaaatgatgcagaaactagatatactgccatagaaaaactctgtctttgtctgtatttctcttgtgcaaaacttaagcaatatataaagcctgttgatgtttatgtgtattctcattatgatattattaagcacatgttgtcaaaac

SEQ ID NO: 13944 - DNA, 1082 bp, Glycine max
  Gm_smallRNAprecursor_6777
cactgatcgaaatgccgcaagactatgtggatacagagccttggattttgtatttcgatggttcgaaacacaaacatggaactggaattggagttttaataatatcccccaataaagttccaactaaatttaaatataaaatcaaagggctttgttctaataatgaggctgagtatgaggctttaattacaggccttgaaattttaattagcctgggggcaagaaatgttaacataaggggtgattcagaattagtagtgaagcaattaacacaagaatacaaatgtgttaatgaacacttagcaaaatattttgttatggctagctctcttctgaatcatttcgattacattaacattgagcatatacctcgactagaaaaccaagaagcaaatgatttagcccaaatagcttcagggtacaaaatgtcgaagaaaaaactaactcagttgatcgagataaaagataaactggtgttaccagagccattaagcactaaattgccaatgccaaaacttgtgggggcaagtacaccacaaaataatgaagatgaaagcatgaatgttctccaggaaaaaattcaaattttggccattgacaatatgttacataatgattggagaaagtccattatcgaatatttggaaaatccaattggcaatgtggctcgaaagatcaaatatagggctttaaattacgtaattgtgggaaatgatttgtttaaaaagactgcagaaggagtattgctgaaatgtctaagtgaatcagaggcatacttggcagtttcccatgttcacagtggggcctgtggatcacatcaagcaggccataaaatgaaatggcttttatttcgacaaggtttgtattggccttcaatgttaaaagactgcatagaatttgctaaaggctgtcaggaatgccaaaagcatgcagggatacagtatgtacctgctagtgaattacactccataatcaaaccttggcctttcagaggatgggctttagacctaattggtgaaatcaagcctgcttcttctaagaaccagcgttatattatagttggtatcgattactttacaaaa

SEQ ID NO: 13945 - DNA, 1086 bp, Glycine max
  Gm_smallRNAprecursor_6778
gtttctgaatcgagttagcgtccttctcctggagttccttgcgtttggcctgctctgttacaattttctgccttagatcatcgacctgagacagtaaattcgtaatagttgcctcccaggaggaaatgttatcatcacaggctttgacgtcagaagacctttcttttgcctctttggtgagacgttcgacttcttgttgagcagctcgggctttctcgagcagaaggatatgtgcctgtttctgggcatccagtctggcgtcattttcgcgttttttctgcacggcacttgcaaactggtcgatgatggcctcgatttgaataactttgcctagaatctcatcagatgtaagggggttgtgcaatttcttcaaaaaattcaggtgtccaaaagcagcagaggggttctcttcaatggatttaagtacgtctgcccgtgcgtattccattgataacttcaaaagcaggcaatcttggcgtactgaagaggttatgtcagcatcagatgaggacgaagcaccaggaattttttcactcgaagtgttgccttgacttgtggtcagtaggagtcgaagggctgcagcagggtcttcgtcttgcatttgaatgaatatatcctctgcgatccctatgctagcggaaagcttagatgtcgaagacgccgggaaaatgtctgaacctccagcttcagcctcttgtatggcctcttcatcggaaaagttttcttcagatgaacttttctgacttgatccatgaggactgctggatctaatacctcgaccttcaccctgttcctcaacatgcactgcatccgtctcaggagcgggagatgttcgagcacatgagggtatttcttctatagaaacatcttgttgtacctgattcgaattgtcatggaaaaggttaacaaatagtttcgtattagctatgattaaaatcacattaagaatgatacctcgacggtaggttgttcttgtggtaagttcggttgctcgacagggttgcccatttcagcaatagagggagtagcctctacttcagtaccgtcaacatcagtcgaaggtggttgaatgtcaacgggttgatt

SEQ ID NO: 13946 - DNA, 1143 bp, Glycine max
  Gm_smallRNAprecursor_6779
aaaaagcaaatatttaaaagattaaaaaaaattaagaactaaagcaaaataaaagaaacacattaatttataaggaccaaaagttatttaaacagttaaacctattaaaaaatactattagctttccacattagacaccaccatgagtttgtacttgaaagagaaaatcaagagaaagtataaatattaaaagaagaaggacatgaaattttaatgatgaagattttcacataaaggagatccaagtgaaaattacacatgagagatccattttcaaaaaaacaattagctactgacgtgcagtaccaattaattagaaaatgattttgtactattgtactctttctagccaaggcagcaaggcagcagtacatgtgtactaccgagctgaattttcacaataatttcatttcagctaatggtagcctataaatgttgcactagctttccttcactaccagtaccaacaagcagtttttacattttctcctaactttgagagcatgggtaacttctatttttttggcgctgtccccttctccatcatctttacttcaacctttaaacttcctttttcaactattaaaattcctgactatgttgaggaaattaagaaaatgggtttgttgccgatgccagcagaatagaagctccccatgttctcaccgttagcagaaaacgggtgttatctggataagaccgccaggaaccattcccaagtttgccagcaccaccatcacttcttcactctagtatccggtatggtgagattaattaatatataaatgatagatttataccttctcggattttttttttcttttgctgagttcttggcataaattttggagggattctgatgtgacaaaatataaggggtgtttggttgaattgtttttttatttttattttcaatagaaatagaaaatagtgataaaaatgtgtttggttgaatttttgttttcattttcagtgaaaatattttctcaaacaaatcaaaaatgaaaaacaataaaattttattttcagttgaaatcagaacctcattttgattaaaatgaaaatacacaaggaatataattttaagcaatatttccttttgaaagcatgttcagtgtttttattttttgaaagcaaaaaaca

SEQ ID NO: 13947 - DNA, 1050 bp, Glycine max
  Gm_smallRNAprecursor_6780
gaacaagcaatattgcaatagtgcataatttgtgagtgaatctaaagaaataactgagagcacattaccatgttgcatatttgcattaatgatattaatttatgcaagcaatgcacaagtggggaggggaagattgaaggctgggtcgtgcttggatagcgaagaaactttaccttcacttcctattggggaattcagtcttcgcaagtgagataaagtggatgcataagttaaacgatttagtacctgaagcagaagataaaaaaaagatcagacttatttcttctatagaagacagcagaactcttacttgaatcataatgcaataaattatattcaaacctgtgaaactccagcttgagtccctgccgcattcggttgcccccaattaccagtagcaagtgagtatttaagtatgaagcaccgacaccgacacggacactgaacacgacacagatacggactcgtggacacctgtaatgtccaaaatatagaacatagtacgggtgtcgtgtcggtgtaggacattgacacgggcgcgtaacggacaccggacacggcaagggactgaagtgtccgtacttcataggtatttaagtccacttgtgatggtggttactttgatagcaaattgcatattgacatctttcccattatcaacacactgcaacagccattggcataaaggtttgagcaattcaacatgaaaacaacaatagatgtactttgaagtcagaaaaaaccttctttaaatgcaccctgacatctcttgttaactttctgaatagctgtgtcataagttacaagttacagtaacaaggaaaagagaatcagaaagtaactacattaaaagatgaatgggattaggcaatatcaatcattagagaaacaaactgttctgaaaagaccgccaactaagggaccagccagctcccgcctcttattgccgtaatgatccctatcatcctcggccctccgcccaagtgcacacagaagtagccggtgaatgatatatctgtggggcaatggtcatattgtaaagacttacta

SEQ ID NO: 13948 - DNA, 1128 bp, Glycine max
  Gm_smallRNAprecursor_6781
attaatgagtgtaagacataaggaaatactcgtttaaaaaaaaaaaaaagagacaaggaaacacaaggggattaaattgtgttttcaaatttgcaactccttttcaaaagatgcgcgttttgtctgatagatagacatgcagaagacttttgttataaatccagacaagataataatagaatttataacagggttagataataagagaaatagaaagaacaaaaagaacataaaattttgctcgttcgcgaggaatttgacttagcacccccgttacattacataatttagtctgcctttacaactgagagtacatcgaatttttttaggcaaaattatatttttggtcccttagtttatcttgagtcttagatttgattctccagtaatttaatttgcaaatttggtcttcctattttataaaatcgtgcaatgttgatcccccagaccacaattgaacgttcatgttgattgtcacgtgttacgttcttattgaatgatgattgtcacgtgtcatgttctgattggtcaatgaaaataataattcatttcatctttcacggagttgacatctaatcacaacatgacacatgacagtcatcatccaataagaacatggcacgctcaacatcacttgttaacggtcaacattcaatttcaacctgggagaccaacattgtacgattttataaaataaggatcaaatttgtgaattaaattattggaggatcaaattcgaaactgaagataaactggaggaccaaatttacaattttaccaattttttactcgccatcacttgtcattatatcttcacaagatataaatattatttttcaagtcacttctaattaactcaagtcaagtagttttacgcttgcttgttcagataaatatcccaagtatattcttgattttaagcatctttaggcttcaaccaatcacaaagatttggttaagcgtaagatacaatcctaatcatcttataagaaggatatacaaatataagctctagatttttctaatattgagattacaagagagcgtttgaaagcactaatacaatggaattgtttgcaaagtctataacgctcttgaaaacttctagcatatatatatatatatata

SEQ ID NO: 13949 - DNA, 1054 bp, Glycine max
  Gm_smallRNAprecursor_6782
cccaccgcttaaggtgctcaagaagagcgtcatctgcattgtctctcccaactgcacaaaatacatacacagcaacaggctctgaaacgtttcctcttctgttactcaggggagtgctaacaaccttgaaatagcaactttaggaccacatgaggaggaggccgtttcctcttcagattgatgattacatcgagaccgctcgctctgattgccaacaaagtcagcggctatcttgaggcaatctacggcttcaccagcgcacacgtcttatcccgacgaaaccgggagaagcttcttgaacgacccaaaataagaatcatcttcaatcaaggtaacctttcttattcagtgattcagcattaccacacatccagagtagtttatttcggctgtttatgtattttgtgcacttgggagagacaatgcagatgacgctcttcttgagcaccttaagcggtgggtctatgaaaatcctccaccgacacatgtcatgttgatagctggtgacagaggctatgctcgaaccttaagacagctgagagagaacaagtataatatattacttgtcacgcgggatgcgcctctttccaaggtgttcaatatagcaagtatagtgtggaagtggtctgtcatattagagaagaaacccttaggagaagaaattcttagaaaaacatttgaacgatccccctgatggatacttgcttgctgaaggcggcctaaaaagagtagtaacatgcgacgtgtaaaaaaaaaagcaatatatgagaaaatgatgcatagtttttttaagaacaaaaatgtatttttttattttattgcattgacctttgactgaatcccaacaatactggcctccgattcttccacttagtttttccttctttaagccagaaggtaataatggtatttgtaggtgtccattatttattattatttttctacatgtgaatattccaatagaaccaatggatcatgtaaccatccattggtcaatttatatatgatttgagactatcctgaagatacgaagatcctctcctgcttaatctgc

SEQ ID NO: 13950 - DNA, 1080 bp, Glycine max
  Gm_smallRNAprecursor_6783
agtgctaacaaccttgaaatagcaactttaggaccacatgaggaggaggccgtttcctcttcagattgatgattacatcgagaccgctcgctctgattgccaacaaagtcagcggctatcttgaggcaatctacggcttcaccagcgcacacgtcttatcccgacgaaaccgggagaagcttcttgaacgacccaaaataagaatcatcttcaatcaaggtaacctttcttattcagtgattcagcattaccacacatccagagtagtttatttcggctgtttatgtattttgtgcacttgggagagacaatgcagatgacgctcttcttgagcaccttaagcggtgggtctatgaaaatcctccaccgacacatgtcatgttgatagctggtgacagaggctatgctcgaaccttaagacagctgagagagaacaagtataatatattacttgtcacgcgggatgcgcctctttccaaggtgttcaatatagcaagtatagtgtggaagtggtctgtcatattagagaagaaacccttaggagaagaaattcttagaaaaacatttgaacgatccccctgatggatacttgcttgctgaaggcggcctaaaaagagtagtaacatgcgacgtgtaaaaaaaaaagcaatatatgagaaaatgatgcatagtttttttaagaacaaaaatgtatttttttattttattgcattgacctttgactgaatcccaacaatactggcctccgattcttccacttagtttttccttctttaagccagaaggtaataatggtatttgtaggtgtccattatttattattatttttctacatgtgaatattccaatagaaccaatggatcatgtaaccatccattggtcaatttatatatgatttgagactatcctgaagatacgaagatcctctcctgcttaatctgccacttttgagacttgaaaagcatgtgaacacggattaggcctaccaaatcactgatatttatcacaaaactgttgataatcgtggttttcccaatataatgtgcagatcatggtaatttattttgaaactttttaaaa

SEQ ID NO: 13951 - DNA, 1138 bp, Glycine max
  Gm_smallRNAprecursor_6784
gttgcatttataaaaaataattatcaacatataatatacgtgtcatgtaataaacgacattaatatcatatgtgtgagaaggaactaaaaacacgtttttaataaaatacaaaaactaaattaaataatataaaaagttgaaaaactaaaaacaagaaaaagtaaaaatacaagaaccaaaaacatatttcaccggataactaattataaaacacataaaacaacttatactggtccatttggaaaacacagggggtgttactaggtgcaaccagtattattgttggtgtacttagtattttttttaaatactaaaattgtccctatgttttttttgtatttgtgataggtgtgcgtgagagtggtccataaatcgtacagatcaagttgattcgtaaggttgatatggatcaagttgatccgtatgttgatattaagcatacggatcaatttgatccgtaagccttttacggatgaagttgatccgtgttgttctgtaaaaggcttacggatcaagttgattcgtaaaaggcatagggatcaacgtgatccgtaagccttttacagaacaacatagatcaacttgatccgtagaagccttatagatcaacttgatccgtaaaagacttatggatcaagttgattcgtaaggcttctacggatcaagttgatccataaaagacttatggatcaagggtattttcgtcatttcatcttaagtgctgggtacaccagcaataatgctgggtgcacctagcaacacccaagcacaggccagcaaggcccaaccgaagcccaagaggcagctgacaacacaacccaacactccactctagggtttctataagttagcaaaagctttgcctcttgaagccttcttcaattcagagagagcgaaacggcagcacgcgcaaaaatggtgaagtttctgaaaccaaacaaagccgtcatcgtccttcagggacgctacgccggcaaaaaagccgtgatagtgcgaaccttcgatgaaggcacgcgcgagcgcccctacgggcactgcttggtggcagggataaagaagtaccctgcgaaggtgatcaagaaggattcggccaagaagacggccaagaagtcgcgtgtgaaggcgttcgtgaagctc

SEQ ID NO: 13952 - DNA, 1083 bp, Glycine max
  Gm_smallRNAprecursor_6785
taatctatcattttataattatataaaatttatacaaccgtttttgagataaaattgtgaagtaacaagttgttatttctataatgttgcgtaacaagttgctatttctgcagatctaaatttatatggttcatgatgaaactagtacctggtgttcattataaaatgaataagcgaacgtgtgcagcctcaaagcaaaacgcgtggcactttccttatgtggctactagcaacccaccaccgtccctttctgagagtcatagtgaagagtgtgaggacgtacagttgcaacttgcaagagaatatgcttattggtatatgagacactgatgtgtctctcttccctggctatataataatagatgatgttgaatggttttgcacttgaaaaatttggtgcagcatgctcactaatcttcaatattagatagtgcattggcacatgtaatgaatataattttctcttctaagctcacaccaagaggcagaaagtggagtgcagccaagggtgatttgccggcacaggcactaattagttcaatattgaatagttagttctgtttgattgatttacttctgtgccggcaagtttctcttggctacatttcgctttcttcttctcctgtgatgctctctgaggaccctttatcaatccttttgcattgttgcagcatcatcattcgtccagtatatattctcaattatgagtgagtaattaatcatccgttgattgagcagtgtccgtaactagctgtaaattttctaatactttgatttttaccaataaaaaaaattatgagtcattacttcatatctcaacatcaacattgacaataaactgtttataattttaaactaaatttgaacaataaaattaatagaacccttcattatttatacatatgttttgttgaatcagcgctcttttattctcccatatgattgtggataacatataattagaagggggtaagattgtgttcgtatttggaatgaaaaggttgggagagaaacttgtggtagtaaaggtgggattgatccggtcttatctttagactgtgggttgtgcttcttttatggccc

SEQ ID NO: 13953 - DNA, 1077 bp, Glycine max
  Gm_smallRNAprecursor_6786
tctatcattttataattatataaaatttatacaaccgtttttgagataaaattgtgaagtaacaagttgttatttctataatgttgcgtaacaagttgctatttctgcagatctaaatttatatggttcatgatgaaactagtacctggtgttcattataaaatgaataagcgaacgtgtgcagcctcaaagcaaaacgcgtggcactttccttatgtggctactagcaacccaccaccgtccctttctgagagtcatagtgaagagtgtgaggacgtacagttgcaacttgcaagagaatatgcttattggtatatgagacactgatgtgtctctcttccctggctatataataatagatgatgttgaatggttttgcacttgaaaaatttggtgcagcatgctcactaatcttcaatattagatagtgcattggcacatgtaatgaatataattttctcttctaagctcacaccaagaggcagaaagtggagtgcagccaagggtgatttgccggcacaggcactaattagttcaatattgaatagttagttctgtttgattgatttacttctgtgccggcaagtttctcttggctacatttcgctttcttcttctcctgtgatgctctctgaggaccctttatcaatccttttgcattgttgcagcatcatcattcgtccagtatatattctcaattatgagtgagtaattaatcatccgttgattgagcagtgtccgtaactagctgtaaattttctaatactttgatttttaccaataaaaaaaattatgagtcattacttcatatctcaacatcaacattgacaataaactgtttataattttaaactaaatttgaacaataaaattaatagaacccttcattatttatacatatgttttgttgaatcagcgctcttttattctcccatatgattgtggataacatataattagaagggggtaagattgtgttcgtatttggaatgaaaaggttgggagagaaacttgtggtagtaaaggtgggattgatccggtcttatctttagactgtgggttgtgcttcttttatgg

SEQ ID NO: 13954 - DNA, 1037 bp, Glycine max
  Gm_smallRNAprecursor_6787
ttagtggggcagtcacttaacaccttccttgcttggccaacacatcttgtgaagtgtttatcagaacatgtattttactttgattatatgtttatttttttcaattaatttgttcactgtaatcaaaacttgctaattaactatgtttgatcaataggcagttgtgtctccagcaaaacctctagaaagcccggatgaagaggtcgatgatcccttgtacctgatgacattgaccatcccacaattgtttttgaagcctctccaggttatgtgggatgctaccatattcggggtgtttaatcaaaacttcctgttgtatataaagcacgaagatctctctgaaattgcacacggtcgtcaatgtctcagtatatctgttatacaattgtggattctgtaagtcattttagattactgttaattaccaaagtaattgttttaaattcatacataattaactttggcttaacaacacagccatctgactgagacaagtgtgcgagcggggaattctgatgtgtatagattccttgagccacagtccattcagagatctggacaatcacaatttgaatctgaaagttacatcaagagttggatacagagttcaaaacgagatgtttaccttggagcctacctgaatgggtaagtcaaacacaacaattgaatttaaataatctatactactacaataacccatattcgtctctactgcagcggacactggcaaatggttgtcattctgcctaaggaaaacctagttgtctgattttgttctttacataataggccagacaactaccttaagggaataattaacaggtcaatattgtttacaatacatttttattggcataactcaacaacatcaatattttaatgtttctcatattcaatactagtgctttcaaaggacttgatgatactccacaacctaaatctaaggctgctgctaggtggattgttgttaaggtacgtgatttaaataaaaattttacttatatatattttatgtgtgtgtacactaattgtagtta

SEQ ID NO: 13955 - DNA, 1098 bp, Glycine max
  Gm_smallRNAprecursor_6788
tttctgagaacatgatcccatgctagttggctatctcaaagaattgattcaacaattttttatgagaggcaatatcttttgagaaaaggaggatgtcatctatgtagacaagagtgttctctagaataggttcaaagattttggtcatggctttctggaagagagagggtgctacttttagaccaaaaggtaggactgtccattaatactgagcatttggaatacaaaaggttgttttataccgatcttttggttttaggccaagttgccaaaaacctgattttaaatcaaactttgaaaataaaataagtttgattctctgatcaaggttaggagagatgaagcctttgggattggaaacttatcatctttaagaaaattattaagaggcttatagtcaatgactaaccttttctttccccttaatttttcaactcttttttctacataaaaagcttggcatgcctagtttgactaggttggctcaatcaatccttgcctcagtagatcttggcattcttgtctggctgcttgtagatctgaaggtgtcatcgctggatgggttgcttttgttggattgatatcttcatttagtctgaatggtagatcaacaaagtattctttgtttttccataaaggatatggatggttgaaatcttgtttgcgcatagggaggaaattttttgtttaaactctccaacttctggcggggcttctactaaagagaagagccttgtaattcctgaaaaaaggcttcaattctcttttgaaattgatcccggcagtatgtatttggagtttattggcagccgtatagacatccattcctataaggaggtctctatcaggcaatttgcttccaatgactttggtccagatgatacaatcaggggaaaacttgatgtctatcggagcatgtgttactaagtcagttctacaaactttcccatcagccgctacaaaataggctacttcacttttccaatgttcttgtggaagaatatctggatccatcatcctctttcgagctccagtgtctataaaggcaataactttgataggtttttcaaatttttttggcaacacttgaatttcaaa

SEQ ID NO: 13956 - DNA, 1039 bp, Glycine max
  Gm_smallRNAprecursor_6789
tcaaaaatctttaatttgacttttatactaaacatgtcaggttagactaaccttcactagactaggccgaaggtccttacctaattgtctatgtacttttagtcaaatttggttaaaatatttctaccaatgcaaaaaaaaaacaaaaaactttttacctaaaataatcaatgtaaaaaaaaaaacattttcttcatcgattacaaatataattaatatagaaagtcaaaaatactactataggaaaaatggacatatgaaacaacccttgccatgtaaatacttctcaaaagaagttatttatgtatttacttcaagagtgttgctaggtgcaccagcaacatatgaaacaacccttgtcatgtaaatacttctcaaaagaagttatttatgtatttacttcaagagtgttgctaggtgcatccagcattctttgaaaatggtaaaattgcccctgctattttctccccttcataagtcttaaaaatcaatttacaaatcaacttgatccgtaaaagacttacggatcaacccgtaaaagacttacggatcaacttgatccgtaaggggtatttctgtcttttcatggttaatgctgggtgtacctagcagcactcttacttcaaaatccccatttttgtcaaatagtcccaaactggcctggctgccattgataatgaaacgaaatgcatggttttggttattaaacagttcgatcaagttgtttcacagttgctgttgcaaaaagtcagactggctgctgaattattgcacatgccaaggccatcatagtttggtatgtatgttttaggagaagcttggactatatagccaccctagcgagctagcttgttgcttgccatcaagcgtcgccactgataacgatcaaactaaagatcctttacaatcaaaattaaatacaaggatcgaatgatcttaggtataaaaacatatttattttgccataaaaaaagaaaattataactacagctccgtatgaaggttttgatgagaacttcctaaaatctgttcaatattc

SEQ ID NO: 13957 - DNA, 1050 bp, Glycine max
  Gm_smallRNAprecursor_6790
atggttatgcagacctcgcccattggtgttggcagctacagagataaggttgttgctgtggatttttggttctttttatttgtgcaagtgtgtgtgagttctttttcgtatatatgcctcaattggtttaaaaccatcaaatttgaagaagtcactcattctatcatcatcaaatgacgtgacactaaaattgaacttactaacaacattactttaaaatttaatggaaggactattttgcaatacttatgtaaaagatagggactattttgaatttttcattaagttagggactaatatgcaacaggggtacaaagttagggactaaattgtctatttactcgctttgttatcatcaaatgacgtggcatcaggcacgtccatgtgtcatgccacgtcatcctttagtgccacgtggatagtccacgtggcactaaaattgacctcactaatggcgttactttaaaatttaacggaaggactattttgcaacacttatgcaaagataaggactattttgaatttaatattaagttaaggactaatatgcaaaataggtacaatctcagggactaaattgcctattcactcattcatcaactattgatattgttgtgctgtaagctagaattgtgttgaataaactgagagagaaagaaaagagagagaactgaagaagagtgaaactaatttttattgatctagaaagttagttacatacagaggtatatatagacctctgttttgttaacctaacagaaagcagattctaactaacactaacagaatatagccttgtatcctaataaggtgcagttagtcaaagctaactgcccttaccatcatactacaactgtttatcactagatgggtgttgttagcaaaaactaacaaccttacaattagattacaaaactgttttcacagttgtacaataatatactccaataccctcgtcaaactcaagaggaagagttttaagaagaaacactcttcacattgagtttgcctcggagaacttcagatcttaatgcagaaaaaggcttagtg

SEQ ID NO: 13958 - DNA, 1117 bp, Glycine max
  Gm_smallRNAprecursor_6791
accgtttgagaattctgtgtaagaagcaggtagcttcttggttgtaatagtgaacacaaggaagggtacatcctttgtggttcgcttcaagtaaaaggtacatctacttggttgttcaaagagaacaagagagggtacatcctttgtggctctttgcttgtaaaggatttttacaaggaaaggaaatctcaagaggttgcttgagaactggatgtaggcatgggttgttgccgaaccaatataaaacttgtgtttgctttcttcttccttacactttttacttttccgttgtgcactttttatttccgctttacgtttgtctaagttattgtttctgttctttactttctcataacttagtagtaaagcctaattgaatctagtgacattaagaagaataaatttttaattagtcaagacacgttcataattaattcaacccccccttcttaattattctgaggccacttgtaggagtgggaataggccaggccggcctacgacctggcctacataaagcctgacttgaactgacctatttaattaaaaggttagacctagacttttttaaaagcctattaaattatatagaccaggcttaggcttattaaaaagtcttataagtctgataggtcggcatatatatatatatatatatatatatatatatatatatatatatattattttttggatacaattaattttttttaaaactattagactttgattacacattactgctccataacttctattcctataatcaaggactttaattaccatttaggtgtgagtcatgtgccattttatattcctcattattttgattgactttcctttttctttaactttcctattacgttcctattccataaaatattaaatatttattgtgaagaaggctatcaagccaggccagacttttaaaaaggtcaggccaagccaaaataaaagcctttgataggctataggccaggctcaggtctcaaagattcatcgtaggctaggctcaggcctttcaaaacctggtctggcctggcctattcccacccctagccacttgttccaacaacctatttttcaggtatgaacaacttatgtaaatcatatataa

SEQ ID NO: 13959 - DNA, 1116 bp, Glycine max
  Gm_smallRNAprecursor_6792
ttcataacccccacaagacaatacgtggggggcagtgttttgcttctgggaggcttgtgcctttttctgtacatcttgcaaaagtttaacattaatgaaaatgattattacaataaattataagaagtgattttgttgtggaaaacaactaaaatgacaaagtacatacctcccatgaggggtctctgtgggtctgacaaaactgagtccatttctccttgctaatgccatatttttcacagacaatgtcgtccgcaccgtccttgtcgactgcaagtgcccatttcctagtcaagtcagatttaaactgccttcagcgctcgccgacaatctgaagaattttcttctttgtcctactgtcagaagcttcagggatttgaaattccgcctgacaaacaataaattaggttttattgtaagtaaataacaaatttagactattaaagaaaatcaacgaagaaaactcaaatacctgaatatcctcccatatcaaatccttctgagcagtagggacttccttctaggtgtcatatgtcacgtcgaccttatcacgagcgacaatccccaaatatgttcttaatttcttcttgtggggaccgtcgaccttgccggtagcaggatcgacgttgaccacaggtctttctgccccaggtggtcttgtggccaatgatcgtagtcgtgtcgccttgcgtgtccgcttcaacgtacatggagatgcatcagcgtctacaggaggaggaggaagaggaggaggaggcgaggcaagtggagtagccatggtcctttaaagagaaaaagttgagttagttaatattatcaaaaaacactgtatgagttatgtaaatgaatgtaccgaaatgaaatattatattagaaaattacgttagacgatgttaattaattctccttcatcatgatcattacgattagcatgaacgtcgtcagcttcttcttctccgacgttgttagaagtcatttgtgtagacaaaggactaacataagtgtccatgtatgaatcatcatcttctacattaacaccaattgttttcccgtttagaaccacagaccacctttcatcacaagggtcttgcacataaaatacttgcttagcttgtt

SEQ ID NO: 13960 - DNA, 1085 bp, Glycine max
  Gm_smallRNAprecursor_6793
aaacatttccatgaaggtacaagttgaagattcatgactatggcatcaaagatttggacacttcaacacacatgccttgaagttgttacatgagaagaacatgatgagagatcttccacttccaagcataaaggagaacaatgaagtgtgtgaaggatgtctccttggtaagaaacaccgatttcctttctcaacaagcggagcatggagagcgaaagatctattggagctgatacatacggacttctgtggaccaatgaggacaccatcacatgagaacaataggtacttcatactcttcattgatgacttctctagaatgacatgggtatattttctaaaagaaaaatcagaagtctttggagtattcaaaaagttcaaggcccttgctaaaaatcaaagtggaaaatggattaaagtactaagaagtgatcgcggcaaagagtacacctctcgcgagtttgaaaaattttgtgaggatgaaggcattgagtgacaacttacagtcgcatattctcctcaacaaaatggagtgttcgagagaaagaatcgcacagttatggagatggctagatcgatgctcaaggagaagggactacctaacatatcctgggttgaagcagtctacactgctgacatactcaacagatgtccaactaagtttgtaaaagacaagactccaattgaagcttggaacgggaagaagccatcagtaaagcacctaagggtctttggatctatatgctacatttatattccagatgtgaagaggtacaagcttgaagacaagactatacgaggtatcttccttgggtatagcaatatctctaagggctaccgtgtctacaacttgcaaactgagaaactcgtcatcaattgagatgttgaaattgatgagtacgcttcttggaattgggatgaagaaaaagcggagaagaacattcttatacccgctcaactacctcaagaagaagctgaggaagaaaacccaggtgaaccacctttacctccaccacaacaacaagattaagatctatcatcaccagagtctactccaagacaagtaagatctttggtggacatat

SEQ ID NO: 13961 - DNA, 1158 bp, Glycine max
  Gm_smallRNAprecursor_6794
taattttgttgaatactaattttagtcaaaaaatttgactgatcacttttagtgaagttttttctttcaattgtactgttttttccccccacaatactcgaactcaagacttagattaagggaactaagtctaattttacttatatataaatatttgaaaatgtaagcatatttacataaaaaaaaatagacacataatttcaataaaaatgttatctttgattacattaagaaaataatattgttttaacaaatttcaacaagtaaaaagttgcatcacaaattgcgtcacccaaaaattacatgcacaaaaatatttatatatagggtctcatccaaaagaaaaaagataggcaaaattgtatttttggtccctcaatttatcttcaattttggatttggtcccccagtaatttaattcacaaatttggttcccctattttgtaaaatcatgcaatgttggtctccctgaccacaattggacgttgaccgttaacaagtgatgttgactgtcacgtgtcacattcttatcggatgatgactgtcacatgtcatattctgattggtcaatgaaaataacaattcatttcatctttcatggagttgacattcaatcagaatatgacacgtagcagtcataatccaataagaacgtgacacgtgacagtcaacatcacttgttaacggtcaacaaccaattgtggcttgagggaccaacattgcacgattttacaaaatagggggaccaaatttgtgaattaaattattgggggaccaaatccgaaactaaagataaattgggggaccaaatttacaattttgccaaatatagaatttttggattggttggtaatacttctatcataattgttaatgttgcttagtgaaacctcatgtcttttctatagaggttacttggtaggatctctatcatgacatttataagagttgcttagtatcaatcttgtcatgataatgattgaggttgctttgtaggatttctcttgtgttattggattcacatgaacaattttcagtatttacttggaaataaaagtatggttgcgtagctaagaacatgtacaatgttttgcatgttcatctatatgatgatatccattgaaggtcagacgccttgcatgcgatgcatgattgttg

SEQ ID NO: 13962 - DNA, 1157 bp, Glycine max
  Gm_smallRNAprecursor_6795
atagagaggtgctctgatcctactccactgaacttatggatctgaagcatgtacagtaattttaatttaaacagtatgtgtttgaacagtattttctggaagcacagtagtctgatattttagttggatgatactgtagcagtaagttccgtggatgagaaagggcagtaaggctaaggtgtattgttcaaataaaatattgagacataatatactggtggctataggagtaatgttcaaactatattgtctgaaaaaaaaaaaatcttctttttcatttattcagatccaagaagttctgtaacatatagccttatggagagattcctatggaaccaaatgaaggcaaagatattagagaatgttttaattatgtctagattattgcgatccttttcccgtatttcttttcgctcgaattcctccacttcatcttcttcaagaaacaccaatctcttaaatgatcaagataaccagacccaagaggtcgtcccaaaacacaatctcttcgatgaggaagtccgattcgaagatattaatcaaaacatggatgactggaacattccagaaatccctcaggatcaactatacgttcctaaaacaattaaagacaaacacaactttgattacataatcaaaacagtagaaaacaatattcctctaggacaagatataggggaagaatttcatctactttcaaaaaattcaatttatgaacatagccgtaagtataaatatttacacatcggttgtgtgcaagtagccatcaagcccttaattgatatgggcatagatgcagcagttttaatgtgtctaagagatattaggcataatcaatttgaagactccctaattggaacagtcgaaaccagcctaggacaaggtccaatatattttaattgttatccaaacaaaacagtgagtctgatggacagaaacattcttgactctctgttcttaaacatccactttcatggccttgacatgaaagaaggatcaatcccagcagccttaatttataggatccagtacaaggtcatgaatacttgtgcatctagagtcctgttaaaacctcaaaaaggagaaacaaccttgtttatcactgaaatgacaaaggctaacgtgtctctcccaagaaaaataaaatgggatgaagt

SEQ ID NO: 13963 - DNA, 1126 bp, Glycine max
  Gm_smallRNAprecursor_6796
aagattaacacaaactttcttctggtaaaaaaccttaagaatgaagtaatcttaggaacgcccttcattagagccctgtttcccatccaaatatctaatgaaggaataaccacaaattatttaggaagaaaaattacatttaatttttctactaaaccaatttctagaaatataaatcttatagaaaataagattaatcaaattaacttcttaaaagaagaagtatcttttaataatattcagatacaactgggaaaaccccaagtaaaagaaagaattcaatctttattaaatcatattgaatcgaccgtttgttctgaattgccacatgcattttgggacagaaagaaacatattgtcgatctcccttatgagaaagactttagggaaaaacaaattcccacaaaagccagaccaatccaaatgaatgaagaacttcttcaatactgtcaaaaggaaatcaaggatttgcttgataaaggcctaatccggaaaagcaaaagcccatggtcttgtgcggctttttatgttaacaaacaatctgagattgagcgtgggacaccccgcttagtcataaattacaaaccattaaatcaagcattacaatggattagatatcctattccaaacaaaaaagatttgcttaacagattaaattctgcaaagatattctcaaaatttgatatgaaatctggattttggcaaatccaaatccaagaatcagataggtacaaaacagcatttactgtacctttcgggcaatatgaatggaacgtgatgccattcggactgaagaatgccccttcagaattccaaaaaattatgaacgatattcttaatccttattcaaaatttgtcattgtctacatagatgatgttttaatcttttcccaaaacattgaccaacatttcaaacatctccaaaccttcatacatatcatcaaacaaaatggtttggcagtctccaaatcaaaaatcaatcttttccaaactcgaattcgattccttggtcacaacatatatcaaggaacaatcattccaatcgaaaggtcaatagagtttgctagcaaattccccaaccaaatcttagacaaaacccagttacaaagatttctaggttgtctaa

SEQ ID NO: 13964 - DNA, 1063 bp, Glycine max
  Gm_smallRNAprecursor_6797
gtttcccatccaaatatctaatgaaggaataaccacaaattatttaggaagaaaaattacatttaatttttctactaaaccaatttctagaaatataaatcttatagaaaataagattaatcaaattaacttcttaaaagaagaagtatcttttaataatattcagatacaactgggaaaaccccaagtaaaagaaagaattcaatctttattaaatcatattgaatcgaccgtttgttctgaattgccacatgcattttgggacagaaagaaacatattgtcgatctcccttatgagaaagactttagggaaaaacaaattcccacaaaagccagaccaatccaaatgaatgaagaacttcttcaatactgtcaaaaggaaatcaaggatttgcttgataaaggcctaatccggaaaagcaaaagcccatggtcttgtgcggctttttatgttaacaaacaatctgagattgagcgtgggacaccccgcttagtcataaattacaaaccattaaatcaagcattacaatggattagatatcctattccaaacaaaaaagatttgcttaacagattaaattctgcaaagatattctcaaaatttgatatgaaatctggattttggcaaatccaaatccaagaatcagataggtacaaaacagcatttactgtacctttcgggcaatatgaatggaacgtgatgccattcggactgaagaatgccccttcagaattccaaaaaattatgaacgatattcttaatccttattcaaaatttgtcattgtctacatagatgatgttttaatcttttcccaaaacattgaccaacatttcaaacatctccaaaccttcatacatatcatcaaacaaaatggtttggcagtctccaaatcaaaaatcaatcttttccaaactcgaattcgattccttggtcacaacatatatcaaggaacaatcattccaatcgaaaggtcaatagagtttgctagcaaattccccaaccaaatcttagacaaaacccagttacaaagatttctaggttgtctaaattacgtaggagaa

SEQ ID NO: 13965 - DNA, 1234 bp, Glycine max
  Gm_smallRNAprecursor_6798
cccaagtaaaagaaagaattcaatctttattaaatcatattgaatcgaccgtttgttctgaattgccacatgcattttgggacagaaagaaacatattgtcgatctcccttatgagaaagactttagggaaaaacaaattcccacaaaagccagaccaatccaaatgaatgaagaacttcttcaatactgtcaaaaggaaatcaaggatttgcttgataaaggcctaatccggaaaagcaaaagcccatggtcttgtgcggctttttatgttaacaaacaatctgagattgagcgtgggacaccccgcttagtcataaattacaaaccattaaatcaagcattacaatggattagatatcctattccaaacaaaaaagatttgcttaacagattaaattctgcaaagatattctcaaaatttgatatgaaatctggattttggcaaatccaaatccaagaatcagataggtacaaaacagcatttactgtacctttcgggcaatatgaatggaacgtgatgccattcggactgaagaatgccccttcagaattccaaaaaattatgaacgatattcttaatccttattcaaaatttgtcattgtctacatagatgatgttttaatcttttcccaaaacattgaccaacatttcaaacatctccaaaccttcatacatatcatcaaacaaaatggtttggcagtctccaaatcaaaaatcaatcttttccaaactcgaattcgattccttggtcacaacatatatcaaggaacaatcattccaatcgaaaggtcaatagagtttgctagcaaattccccaaccaaatcttagacaaaacccagttacaaagatttctaggttgtctaaattacgtaggagaatttgtcccctatttaaataatattgtcaagccattacatgataggctgaagaaaaatccgcctccttggtctgacctccatacacaaacggttaaagaaatcaaagtcaaagtccaatccattaaatgtttgtatcttcctattccacaggcatttaaaattgtcgaaactgatgcttcagacataggttatggtggcatcctcaaacaaagagtccatggccaagatcatgtcattgcatatacatcaaaacattggaatcctgcacaattaaaatattcaactgttaaaaaagaggttttagcaattgttttgtgcatttccaaatttcaatcggatttattaaaccaaaa

SEQ ID NO: 13966 - DNA, 1080 bp, Glycine max
  Gm_smallRNAprecursor_6799
aaaagcaaaagcccatggtcttgtgcggctttttatgttaacaaacaatctgagattgagcgtgggacaccccgcttagtcataaattacaaaccattaaatcaagcattacaatggattagatatcctattccaaacaaaaaagatttgcttaacagattaaattctgcaaagatattctcaaaatttgatatgaaatctggattttggcaaatccaaatccaagaatcagataggtacaaaacagcatttactgtacctttcgggcaatatgaatggaacgtgatgccattcggactgaagaatgccccttcagaattccaaaaaattatgaacgatattcttaatccttattcaaaatttgtcattgtctacatagatgatgttttaatcttttcccaaaacattgaccaacatttcaaacatctccaaaccttcatacatatcatcaaacaaaatggtttggcagtctccaaatcaaaaatcaatcttttccaaactcgaattcgattccttggtcacaacatatatcaaggaacaatcattccaatcgaaaggtcaatagagtttgctagcaaattccccaaccaaatcttagacaaaacccagttacaaagatttctaggttgtctaaattacgtaggagaatttgtcccctatttaaataatattgtcaagccattacatgataggctgaagaaaaatccgcctccttggtctgacctccatacacaaacggttaaagaaatcaaagtcaaagtccaatccattaaatgtttgtatcttcctattccacaggcatttaaaattgtcgaaactgatgcttcagacataggttatggtggcatcctcaaacaaagagtccatggccaagatcatgtcattgcatatacatcaaaacattggaatcctgcacaattaaaatattcaactgttaaaaaagaggttttagcaattgttttgtgcatttccaaatttcaatcggatttattaaaccaaaaatttttaatcagggttgattgtaaatcagccaaagatattttacaaaaagatgttaaaaaccttgcctcaaaacaaatt

SEQ ID NO: 13967 - DNA, 1035 bp, Glycine max
  Gm_smallRNAprecursor_6800
attgtctacatagatgatgttttaatcttttcccaaaacattgaccaacatttcaaacatctccaaaccttcatacatatcatcaaacaaaatggtttggcagtctccaaatcaaaaatcaatcttttccaaactcgaattcgattccttggtcacaacatatatcaaggaacaatcattccaatcgaaaggtcaatagagtttgctagcaaattccccaaccaaatcttagacaaaacccagttacaaagatttctaggttgtctaaattacgtaggagaatttgtcccctatttaaataatattgtcaagccattacatgataggctgaagaaaaatccgcctccttggtctgacctccatacacaaacggttaaagaaatcaaagtcaaagtccaatccattaaatgtttgtatcttcctattccacaggcatttaaaattgtcgaaactgatgcttcagacataggttatggtggcatcctcaaacaaagagtccatggccaagatcatgtcattgcatatacatcaaaacattggaatcctgcacaattaaaatattcaactgttaaaaaagaggttttagcaattgttttgtgcatttccaaatttcaatcggatttattaaaccaaaaatttttaatcagggttgattgtaaatcagccaaagatattttacaaaaagatgttaaaaaccttgcctcaaaacaaatttttgcacgatggcaagcaattttaagtgtctttgattttgacatagaatacatcaagggcacctcaaattcactacctgactaccttacccgtgaattcttacagaaaagtggtaatgcctcctaaggcatcgggaatctccctacggggaggaaggagtacaggaaaaggagccaggctggctcttccagaaccaaccatgaagaaatcatctacctcttctgggtcaccaacccaggctgggtcatctacccagaaaaccaatttagaagggtcatcaacccagattgcctcaatcaaacctgagccatccactcagga

SEQ ID NO: 13968 - DNA, 1035 bp, Glycine max; identical to SEQ ID NO: 13967
  Gm_smallRNAprecursor_6801

SEQ ID NO: 13969 - DNA, 1113 bp, Glycine max
  Gm_smallRNAprecursor_6802
attgtctacatagatgatgttttaatcttttcccaaaacattgaccaacatttcaaacatctccaaaccttcatacatatcatcaaacaaaatggtttggcagtctccaaatcaaaaatcaatcttttccaaactcgaattcgattccttggtcacaacatatatcaaggaacaatcattccaatcgaaaggtcaatagagtttgctagcaaattccccaaccaaatcttagacaaaacccagttacaaagatttctaggttgtctaaattacgtaggagaatttgtcccctatttaaataatattgtcaagccattacatgataggctgaagaaaaatccgcctccttggtctgacctccatacacaaacggttaaagaaatcaaagtcaaagtccaatccattaaatgtttgtatcttcctattccacaggcatttaaaattgtcgaaactgatgcttcagacataggttatggtggcatcctcaaacaaagagtccatggccaagatcatgtcattgcatatacatcaaaacattggaatcctgcacaattaaaatattcaactgttaaaaaagaggttttagcaattgttttgtgcatttccaaatttcaatcggatttattaaaccaaaaatttttaatcagggttgattgtaaatcagccaaagatattttacaaaaagatgttaaaaaccttgcctcaaaacaaatttttgcacgatggcaagcaattttaagtgtctttgattttgacatagaatacatcaagggcacctcaaattcactacctgactaccttacccgtgaattcttacagaaaagtggtaatgcctcctaaggcatcgggaatctccctacggggaggaaggagtacaggaaaaggagccaggctggctcttccagaaccaaccatgaagaaatcatctacctcttctgggtcaccaacccaggctgggtcatctacccagaaaaccaatttagaagggtcatcaacccagattgcctcaatcaaacctgagccatccactcaggaatctcccaaaccggcaaccgccaaacaaacatcggccgactatgcatggccaattgaaacccttcaggcccttcaaga

SEQ ID NO: 13970 - DNA, 1113 bp, Glycine max; identical to SEQ ID NO: 13969
  Gm_smallRNAprecursor_6803

SEQ ID NO: 13971 - DNA, 1114 bp, Glycine max
  Gm_smallRNAprecursor_6804
attgtctacatagatgatgttttaatcttttcccaaaacattgaccaacatttcaaacatctccaaaccttcatacatatcatcaaacaaaatggtttggcagtctccaaatcaaaaatcaatcttttccaaactcgaattcgattccttggtcacaacatatatcaaggaacaatcattccaatcgaaaggtcaatagagtttgctagcaaattccccaaccaaatcttagacaaaacccagttacaaagatttctaggttgtctaaattacgtaggagaatttgtcccctatttaaataatattgtcaagccattacatgataggctgaagaaaaatccgcctccttggtctgacctccatacacaaacggttaaagaaatcaaagtcaaagtccaatccattaaatgtttgtatcttcctattccacaggcatttaaaattgtcgaaactgatgcttcagacataggttatggtggcatcctcaaacaaagagtccatggccaagatcatgtcattgcatatacatcaaaacattggaatcctgcacaattaaaatattcaactgttaaaaaagaggttttagcaattgttttgtgcatttccaaatttcaatcggatttattaaaccaaaaatttttaatcagggttgattgtaaatcagccaaagatattttacaaaaagatgttaaaaaccttgcctcaaaacaaatttttgcacgatggcaagcaattttaagtgtctttgattttgacatagaatacatcaagggcacctcaaattcactacctgactaccttacccgtgaattcttacagaaaagtggtaatgcctcctaaggcatcgggaatctccctacggggaggaaggagtacaggaaaaggagccaggctggctcttccagaaccaaccatgaagaaatcatctacctcttctgggtcaccaacccaggctgggtcatctacccagaaaaccaatttagaagggtcatcaacccagattgcctcaatcaaacctgagccatccactcaggaatctcccaaaccggcaaccgccaaacaaacatcggccgactatgcatggccaattgaaacccttcaggcccttcaagac

SEQ ID NO: 13972 - DNA, 1114 bp, Glycine max; identical to SEQ ID NO: 13971
  Gm_smallRNAprecursor_6805

SEQ ID NO: 13973 - DNA, 1141 bp, Glycine max
  Gm_smallRNAprecursor_6806
aaaccttcatacatatcatcaaacaaaatggtttggcagtctccaaatcaaaaatcaatcttttccaaactcgaattcgattccttggtcacaacatatatcaaggaacaatcattccaatcgaaaggtcaatagagtttgctagcaaattccccaaccaaatcttagacaaaacccagttacaaagatttctaggttgtctaaattacgtaggagaatttgtcccctatttaaataatattgtcaagccattacatgataggctgaagaaaaatccgcctccttggtctgacctccatacacaaacggttaaagaaatcaaagtcaaagtccaatccattaaatgtttgtatcttcctattccacaggcatttaaaattgtcgaaactgatgcttcagacataggttatggtggcatcctcaaacaaagagtccatggccaagatcatgtcattgcatatacatcaaaacattggaatcctgcacaattaaaatattcaactgttaaaaaagaggttttagcaattgttttgtgcatttccaaatttcaatcggatttattaaaccaaaaatttttaatcagggttgattgtaaatcagccaaagatattttacaaaaagatgttaaaaaccttgcctcaaaacaaatttttgcacgatggcaagcaattttaagtgtctttgattttgacatagaatacatcaagggcacctcaaattcactacctgactaccttacccgtgaattcttacagaaaagtggtaatgcctcctaaggcatcgggaatctccctacggggaggaaggagtacaggaaaaggagccaggctggctcttccagaaccaaccatgaagaaatcatctacctcttctgggtcaccaacccaggctgggtcatctacccagaaaaccaatttagaagggtcatcaacccagattgcctcaatcaaacctgagccatccactcaggaatctcccaaaccggcaaccgccaaacaaacatcggccgactatgcatggccaattgaaacccttcaggcccttcaagacatgagtctgaccaaatttccaaaaataatcaaaaaatcttgggcagacattgcctcagaatctgatgatgaatctgaatcaaatttacaaa

SEQ ID NO: 13974 - DNA, 1091 bp, Glycine max
  Gm_smallRNAprecursor_6807
caattttaagtgtctttgattttgacatagaatacatcaagggcacctcaaattcactacctgactaccttacccgtgaattcttacagaaaagtggtaatgcctcctaaggcatcgggaatctccctacggggaggaaggagtacaggaaaaggagccaggctggctcttccagaaccaaccatgaagaaatcatctacctcttctgggtcaccaacccaggctgggtcatctacccagaaaaccaatttagaagggtcatcaacccagattgcctcaatcaaacctgagccatccactcaggaatctcccaaaccggcaaccgccaaacaaacatcggccgactatgcatggccaattgaaacccttcaggcccttcaagacatgagtctgaccaaatttccaaaaataatcaaaaaatcttgggcagacattgcctcagaatctgatgatgaatctgaatcaaatttacaaacaatgatccaaaatgcgtcaatgaccaaaacagccaccaatactaaaggaaaactacctttagccaaagctcaaacaccacctaccaaacaaactaacaattatatttataaaaataaattgttaactgttttgcagatggaacctgaattttgggacaaaaatcccttcaaggcgacggccaaggctttcccaccaggatttcactacaaaccaaccaccatcctgaagacaagaactttttatgaattgattttggtagattcaaactcagtatctatcaaacatttcaaagatccaaaagaccaaaccttaaacacccactcaaccatccaaatactaaaagttcttcaaccaagacactttggttcagacttgaacaaagggaagagattttcagttccatttgatcccgtaggttatacctattgggattacgttgatgcttggactaaggtgttttggcaccaaaatacccgcttcaagcattcatggctgatatatttcaagaccaacacaatttacaattttcccaattggtttttgcaatggtgggacttctttggaccaatcccagagatattcccagaaacggtccaacaaggattttcccaatt

SEQ ID NO: 13975 - DNA, 1192 bp, Glycine max
  Gm_smallRNAprecursor_6808
aaagtggtaatgcctcctaaggcatcgggaatctccctacggggaggaaggagtacaggaaaaggagccaggctggctcttccagaaccaaccatgaagaaatcatctacctcttctgggtcaccaacccaggctgggtcatctacccagaaaaccaatttagaagggtcatcaacccagattgcctcaatcaaacctgagccatccactcaggaatctcccaaaccggcaaccgccaaacaaacatcggccgactatgcatggccaattgaaacccttcaggcccttcaagacatgagtctgaccaaatttccaaaaataatcaaaaaatcttgggcagacattgcctcagaatctgatgatgaatctgaatcaaatttacaaacaatgatccaaaatgcgtcaatgaccaaaacagccaccaatactaaaggaaaactacctttagccaaagctcaaacaccacctaccaaacaaactaacaattatatttataaaaataaattgttaactgttttgcagatggaacctgaattttgggacaaaaatcccttcaaggcgacggccaaggctttcccaccaggatttcactacaaaccaaccaccatcctgaagacaagaactttttatgaattgattttggtagattcaaactcagtatctatcaaacatttcaaagatccaaaagaccaaaccttaaacacccactcaaccatccaaatactaaaagttcttcaaccaagacactttggttcagacttgaacaaagggaagagattttcagttccatttgatcccgtaggttatacctattgggattacgttgatgcttggactaaggtgttttggcaccaaaatacccgcttcaagcattcatggctgatatatttcaagaccaacacaatttacaattttcccaattggtttttgcaatggtgggacttctttggaccaatcccagagatattcccagaaacggtccaacaaggattttcccaatttaagagacaatacaattcgcaggaatcacgaattccagcagatcttaaatacttttcaagctttgcactgtcatggatattctcatggcaatatcgctacagcaagactgaaaagacaaatcaatatccatcactacaaagacacgcatttgtaaaatggtggacacaatttgactcatccaaagcggatg

SEQ ID NO: 13976 - DNA, 1099 bp, Glycine max
  Gm_smallRNAprecursor_6809
gtaatgcctcctaaggcatcgggaatctccctacggggaggaaggagtacaggaaaaggagccaggctggctcttccagaaccaaccatgaagaaatcatctacctcttctgggtcaccaacccaggctgggtcatctacccagaaaaccaatttagaagggtcatcaacccagattgcctcaatcaaacctgagccatccactcaggaatctcccaaaccggcaaccgccaaacaaacatcggccgactatgcatggccaattgaaacccttcaggcccttcaagacatgagtctgaccaaatttccaaaaataatcaaaaaatcttgggcagacattgcctcagaatctgatgatgaatctgaatcaaatttacaaacaatgatccaaaatgcgtcaatgaccaaaacagccaccaatactaaaggaaaactacctttagccaaagctcaaacaccacctaccaaacaaactaacaattatatttataaaaataaattgttaactgttttgcagatggaacctgaattttgggacaaaaatcccttcaaggcgacggccaaggctttcccaccaggatttcactacaaaccaaccaccatcctgaagacaagaactttttatgaattgattttggtagattcaaactcagtatctatcaaacatttcaaagatccaaaagaccaaaccttaaacacccactcaaccatccaaatactaaaagttcttcaaccaagacactttggttcagacttgaacaaagggaagagattttcagttccatttgatcccgtaggttatacctattgggattacgttgatgcttggactaaggtgttttggcaccaaaatacccgcttcaagcattcatggctgatatatttcaagaccaacacaatttacaattttcccaattggtttttgcaatggtgggacttctttggaccaatcccagagatattcccagaaacggtccaacaaggattttcccaatttaagagacaatacaattcgcaggaatcacgaattccagcagatcttaaatacttttcaagctttgcactgtcatggatattctcatggcaatatcgctacagca

SEQ ID NO: 13977 - DNA, 1158 bp, Glycine max
  Gm_smallRNAprecursor_6810
ctaaggcatcgggaatctccctacggggaggaaggagtacaggaaaaggagccaggctggctcttccagaaccaaccatgaagaaatcatctacctcttctgggtcaccaacccaggctgggtcatctacccagaaaaccaatttagaagggtcatcaacccagattgcctcaatcaaacctgagccatccactcaggaatctcccaaaccggcaaccgccaaacaaacatcggccgactatgcatggccaattgaaacccttcaggcccttcaagacatgagtctgaccaaatttccaaaaataatcaaaaaatcttgggcagacattgcctcagaatctgatgatgaatctgaatcaaatttacaaacaatgatccaaaatgcgtcaatgaccaaaacagccaccaatactaaaggaaaactacctttagccaaagctcaaacaccacctaccaaacaaactaacaattatatttataaaaataaattgttaactgttttgcagatggaacctgaattttgggacaaaaatcccttcaaggcgacggccaaggctttcccaccaggatttcactacaaaccaaccaccatcctgaagacaagaactttttatgaattgattttggtagattcaaactcagtatctatcaaacatttcaaagatccaaaagaccaaaccttaaacacccactcaaccatccaaatactaaaagttcttcaaccaagacactttggttcagacttgaacaaagggaagagattttcagttccatttgatcccgtaggttatacctattgggattacgttgatgcttggactaaggtgttttggcaccaaaatacccgcttcaagcattcatggctgatatatttcaagaccaacacaatttacaattttcccaattggtttttgcaatggtgggacttctttggaccaatcccagagatattcccagaaacggtccaacaaggattttcccaatttaagagacaatacaattcgcaggaatcacgaattccagcagatcttaaatacttttcaagctttgcactgtcatggatattctcatggcaatatcgctacagcaagactgaaaagacaaatcaatatccatcactacaaagacacgcatttgtaaaatggtggacacaatttg

SEQ ID NO: 13978 - DNA, 1167 bp, Glycine max
  Gm_smallRNAprecursor_6811
ctaaggcatcgggaatctccctacggggaggaaggagtacaggaaaaggagccaggctggctcttccagaaccaaccatgaagaaatcatctacctcttctgggtcaccaacccaggctgggtcatctacccagaaaaccaatttagaagggtcatcaacccagattgcctcaatcaaacctgagccatccactcaggaatctcccaaaccggcaaccgccaaacaaacatcggccgactatgcatggccaattgaaacccttcaggcccttcaagacatgagtctgaccaaatttccaaaaataatcaaaaaatcttgggcagacattgcctcagaatctgatgatgaatctgaatcaaatttacaaacaatgatccaaaatgcgtcaatgaccaaaacagccaccaatactaaaggaaaactacctttagccaaagctcaaacaccacctaccaaacaaactaacaattatatttataaaaataaattgttaactgttttgcagatggaacctgaattttgggacaaaaatcccttcaaggcgacggccaaggctttcccaccaggatttcactacaaaccaaccaccatcctgaagacaagaactttttatgaattgattttggtagattcaaactcagtatctatcaaacatttcaaagatccaaaagaccaaaccttaaacacccactcaaccatccaaatactaaaagttcttcaaccaagacactttggttcagacttgaacaaagggaagagattttcagttccatttgatcccgtaggttatacctattgggattacgttgatgcttggactaaggtgttttggcaccaaaatacccgcttcaagcattcatggctgatatatttcaagaccaacacaatttacaattttcccaattggtttttgcaatggtgggacttctttggaccaatcccagagatattcccagaaacggtccaacaaggattttcccaatttaagagacaatacaattcgcaggaatcacgaattccagcagatcttaaatacttttcaagctttgcactgtcatggatattctcatggcaatatcgctacagcaagactgaaaagacaaatcaatatccatcactacaaagacacgcatttgtaaaatggtggacacaatttgactcatcca

SEQ ID NO: 13979 - DNA, 1208 bp, Glycine max
  Gm_smallRNAprecursor_6812
ctaaggcatcgggaatctccctacggggaggaaggagtacaggaaaaggagccaggctggctcttccagaaccaaccatgaagaaatcatctacctcttctgggtcaccaacccaggctgggtcatctacccagaaaaccaatttagaagggtcatcaacccagattgcctcaatcaaacctgagccatccactcaggaatctcccaaaccggcaaccgccaaacaaacatcggccgactatgcatggccaattgaaacccttcaggcccttcaagacatgagtctgaccaaatttccaaaaataatcaaaaaatcttgggcagacattgcctcagaatctgatgatgaatctgaatcaaatttacaaacaatgatccaaaatgcgtcaatgaccaaaacagccaccaatactaaaggaaaactacctttagccaaagctcaaacaccacctaccaaacaaactaacaattatatttataaaaataaattgttaactgttttgcagatggaacctgaattttgggacaaaaatcccttcaaggcgacggccaaggctttcccaccaggatttcactacaaaccaaccaccatcctgaagacaagaactttttatgaattgattttggtagattcaaactcagtatctatcaaacatttcaaagatccaaaagaccaaaccttaaacacccactcaaccatccaaatactaaaagttcttcaaccaagacactttggttcagacttgaacaaagggaagagattttcagttccatttgatcccgtaggttatacctattgggattacgttgatgcttggactaaggtgttttggcaccaaaatacccgcttcaagcattcatggctgatatatttcaagaccaacacaatttacaattttcccaattggtttttgcaatggtgggacttctttggaccaatcccagagatattcccagaaacggtccaacaaggattttcccaatttaagagacaatacaattcgcaggaatcacgaattccagcagatcttaaatacttttcaagctttgcactgtcatggatattctcatggcaatatcgctacagcaagactgaaaagacaaatcaatatccatcactacaaagacacgcatttgtaaaatggtggacacaatttgactcatccaaagcggatgcagaacaagtaaaactatggttcaaatcccat

SEQ ID NO: 13980 - DNA, 1208 bp, Glycine max; identical to SEQ ID NO: 13979
  Gm_smallRNAprecursor_6813

SEQ ID NO: 13981 - DNA, 1211 bp, Glycine max
  Gm_smallRNAprecursor_6814
ctaaggcatcgggaatctccctacggggaggaaggagtacaggaaaaggagccaggctggctcttccagaaccaaccatgaagaaatcatctacctcttctgggtcaccaacccaggctgggtcatctacccagaaaaccaatttagaagggtcatcaacccagattgcctcaatcaaacctgagccatccactcaggaatctcccaaaccggcaaccgccaaacaaacatcggccgactatgcatggccaattgaaacccttcaggcccttcaagacatgagtctgaccaaatttccaaaaataatcaaaaaatcttgggcagacattgcctcagaatctgatgatgaatctgaatcaaatttacaaacaatgatccaaaatgcgtcaatgaccaaaacagccaccaatactaaaggaaaactacctttagccaaagctcaaacaccacctaccaaacaaactaacaattatatttataaaaataaattgttaactgttttgcagatggaacctgaattttgggacaaaaatcccttcaaggcgacggccaaggctttcccaccaggatttcactacaaaccaaccaccatcctgaagacaagaactttttatgaattgattttggtagattcaaactcagtatctatcaaacatttcaaagatccaaaagaccaaaccttaaacacccactcaaccatccaaatactaaaagttcttcaaccaagacactttggttcagacttgaacaaagggaagagattttcagttccatttgatcccgtaggttatacctattgggattacgttgatgcttggactaaggtgttttggcaccaaaatacccgcttcaagcattcatggctgatatatttcaagaccaacacaatttacaattttcccaattggtttttgcaatggtgggacttctttggaccaatcccagagatattcccagaaacggtccaacaaggattttcccaatttaagagacaatacaattcgcaggaatcacgaattccagcagatcttaaatacttttcaagctttgcactgtcatggatattctcatggcaatatcgctacagcaagactgaaaagacaaatcaatatccatcactacaaagacacgcatttgtaaaatggtggacacaatttgactcatccaaagcggatgcagaacaagtaaaactatggttcaaatcccatcca

SEQ ID NO: 13982 - DNA, 1098 bp, Glycine max
  Gm_smallRNAprecursor_6815
ggaatctccctacggggaggaaggagtacaggaaaaggagccaggctggctcttccagaaccaaccatgaagaaatcatctacctcttctgggtcaccaacccaggctgggtcatctacccagaaaaccaatttagaagggtcatcaacccagattgcctcaatcaaacctgagccatccactcaggaatctcccaaaccggcaaccgccaaacaaacatcggccgactatgcatggccaattgaaacccttcaggcccttcaagacatgagtctgaccaaatttccaaaaataatcaaaaaatcttgggcagacattgcctcagaatctgatgatgaatctgaatcaaatttacaaacaatgatccaaaatgcgtcaatgaccaaaacagccaccaatactaaaggaaaactacctttagccaaagctcaaacaccacctaccaaacaaactaacaattatatttataaaaataaattgttaactgttttgcagatggaacctgaattttgggacaaaaatcccttcaaggcgacggccaaggctttcccaccaggatttcactacaaaccaaccaccatcctgaagacaagaactttttatgaattgattttggtagattcaaactcagtatctatcaaacatttcaaagatccaaaagaccaaaccttaaacacccactcaaccatccaaatactaaaagttcttcaaccaagacactttggttcagacttgaacaaagggaagagattttcagttccatttgatcccgtaggttatacctattgggattacgttgatgcttggactaaggtgttttggcaccaaaatacccgcttcaagcattcatggctgatatatttcaagaccaacacaatttacaattttcccaattggtttttgcaatggtgggacttctttggaccaatcccagagatattcccagaaacggtccaacaaggattttcccaatttaagagacaatacaattcgcaggaatcacgaattccagcagatcttaaatacttttcaagctttgcactgtcatggatattctcatggcaatatcgctacagcaagactgaaaagacaaatcaa

SEQ ID NO: 13983 - DNA, 1148 bp, Glycine max
  Gm_smallRNAprecursor_6816
tgcctcaatcaaacctgagccatccactcaggaatctcccaaaccggcaaccgccaaacaaacatcggccgactatgcatggccaattgaaacccttcaggcccttcaagacatgagtctgaccaaatttccaaaaataatcaaaaaatcttgggcagacattgcctcagaatctgatgatgaatctgaatcaaatttacaaacaatgatccaaaatgcgtcaatgaccaaaacagccaccaatactaaaggaaaactacctttagccaaagctcaaacaccacctaccaaacaaactaacaattatatttataaaaataaattgttaactgttttgcagatggaacctgaattttgggacaaaaatcccttcaaggcgacggccaaggctttcccaccaggatttcactacaaaccaaccaccatcctgaagacaagaactttttatgaattgattttggtagattcaaactcagtatctatcaaacatttcaaagatccaaaagaccaaaccttaaacacccactcaaccatccaaatactaaaagttcttcaaccaagacactttggttcagacttgaacaaagggaagagattttcagttccatttgatcccgtaggttatacctattgggattacgttgatgcttggactaaggtgttttggcaccaaaatacccgcttcaagcattcatggctgatatatttcaagaccaacacaatttacaattttcccaattggtttttgcaatggtgggacttctttggaccaatcccagagatattcccagaaacggtccaacaaggattttcccaatttaagagacaatacaattcgcaggaatcacgaattccagcagatcttaaatacttttcaagctttgcactgtcatggatattctcatggcaatatcgctacagcaagactgaaaagacaaatcaatatccatcactacaaagacacgcatttgtaaaatggtggacacaatttgactcatccaaagcggatgcagaacaagtaaaactatggttcaaatcccatccagaattcctcaaagcggctgatccaaagacttctgtgttcttgaaccaaaagtctcatctggcagcatttttagcaggatcgacatcaaaggaggtcttagcta

SEQ ID NO: 13984 - DNA, 1149 bp, Glycine max
  Gm_smallRNAprecursor_6817
tgcctcaatcaaacctgagccatccactcaggaatctcccaaaccggcaaccgccaaacaaacatcggccgactatgcatggccaattgaaacccttcaggcccttcaagacatgagtctgaccaaatttccaaaaataatcaaaaaatcttgggcagacattgcctcagaatctgatgatgaatctgaatcaaatttacaaacaatgatccaaaatgcgtcaatgaccaaaacagccaccaatactaaaggaaaactacctttagccaaagctcaaacaccacctaccaaacaaactaacaattatatttataaaaataaattgttaactgttttgcagatggaacctgaattttgggacaaaaatcccttcaaggcgacggccaaggctttcccaccaggatttcactacaaaccaaccaccatcctgaagacaagaactttttatgaattgattttggtagattcaaactcagtatctatcaaacatttcaaagatccaaaagaccaaaccttaaacacccactcaaccatccaaatactaaaagttcttcaaccaagacactttggttcagacttgaacaaagggaagagattttcagttccatttgatcccgtaggttatacctattgggattacgttgatgcttggactaaggtgttttggcaccaaaatacccgcttcaagcattcatggctgatatatttcaagaccaacacaatttacaattttcccaattggtttttgcaatggtgggacttctttggaccaatcccagagatattcccagaaacggtccaacaaggattttcccaatttaagagacaatacaattcgcaggaatcacgaattccagcagatcttaaatacttttcaagctttgcactgtcatggatattctcatggcaatatcgctacagcaagactgaaaagacaaatcaatatccatcactacaaagacacgcatttgtaaaatggtggacacaatttgactcatccaaagcggatgcagaacaagtaaaactatggttcaaatcccatccagaattcctcaaagcggctgatccaaagacttctgtgttcttgaaccaaaagtctcatctggcagcatttttagcaggatcgacatcaaaggaggtcttagctaa

SEQ ID NO: 13985 - DNA, 1249 bp, Glycine max
  Gm_smallRNAprecursor_6818
tgcctcaatcaaacctgagccatccactcaggaatctcccaaaccggcaaccgccaaacaaacatcggccgactatgcatggccaattgaaacccttcaggcccttcaagacatgagtctgaccaaatttccaaaaataatcaaaaaatcttgggcagacattgcctcagaatctgatgatgaatctgaatcaaatttacaaacaatgatccaaaatgcgtcaatgaccaaaacagccaccaatactaaaggaaaactacctttagccaaagctcaaacaccacctaccaaacaaactaacaattatatttataaaaataaattgttaactgttttgcagatggaacctgaattttgggacaaaaatcccttcaaggcgacggccaaggctttcccaccaggatttcactacaaaccaaccaccatcctgaagacaagaactttttatgaattgattttggtagattcaaactcagtatctatcaaacatttcaaagatccaaaagaccaaaccttaaacacccactcaaccatccaaatactaaaagttcttcaaccaagacactttggttcagacttgaacaaagggaagagattttcagttccatttgatcccgtaggttatacctattgggattacgttgatgcttggactaaggtgttttggcaccaaaatacccgcttcaagcattcatggctgatatatttcaagaccaacacaatttacaattttcccaattggtttttgcaatggtgggacttctttggaccaatcccagagatattcccagaaacggtccaacaaggattttcccaatttaagagacaatacaattcgcaggaatcacgaattccagcagatcttaaatacttttcaagctttgcactgtcatggatattctcatggcaatatcgctacagcaagactgaaaagacaaatcaatatccatcactacaaagacacgcatttgtaaaatggtggacacaatttgactcatccaaagcggatgcagaacaagtaaaactatggttcaaatcccatccagaattcctcaaagcggctgatccaaagacttctgtgttcttgaaccaaaagtctcatctggcagcatttttagcaggatcgacatcaaaggaggtcttagctaaaaatctgaaggaagttctacaaatgttacaacaggaagaagaagcttcatcctcaaagaaggaagaaacaagttctgttgaagaagacgaagaagatccc

SEQ ID NO: 13986 - DNA, 1134 bp, Glycine max
  Gm_smallRNAprecursor_6819
caaacctgagccatccactcaggaatctcccaaaccggcaaccgccaaacaaacatcggccgactatgcatggccaattgaaacccttcaggcccttcaagacatgagtctgaccaaatttccaaaaataatcaaaaaatcttgggcagacattgcctcagaatctgatgatgaatctgaatcaaatttacaaacaatgatccaaaatgcgtcaatgaccaaaacagccaccaatactaaaggaaaactacctttagccaaagctcaaacaccacctaccaaacaaactaacaattatatttataaaaataaattgttaactgttttgcagatggaacctgaattttgggacaaaaatcccttcaaggcgacggccaaggctttcccaccaggatttcactacaaaccaaccaccatcctgaagacaagaactttttatgaattgattttggtagattcaaactcagtatctatcaaacatttcaaagatccaaaagaccaaaccttaaacacccactcaaccatccaaatactaaaagttcttcaaccaagacactttggttcagacttgaacaaagggaagagattttcagttccatttgatcccgtaggttatacctattgggattacgttgatgcttggactaaggtgttttggcaccaaaatacccgcttcaagcattcatggctgatatatttcaagaccaacacaatttacaattttcccaattggtttttgcaatggtgggacttctttggaccaatcccagagatattcccagaaacggtccaacaaggattttcccaatttaagagacaatacaattcgcaggaatcacgaattccagcagatcttaaatacttttcaagctttgcactgtcatggatattctcatggcaatatcgctacagcaagactgaaaagacaaatcaatatccatcactacaaagacacgcatttgtaaaatggtggacacaatttgactcatccaaagcggatgcagaacaagtaaaactatggttcaaatcccatccagaattcctcaaagcggctgatccaaagacttctgtgttcttgaaccaaaagtctcatctggcagcatttttagcaggatcgacatcaaaggaggtctt

SEQ ID NO: 13987 - DNA, 1129 bp, Glycine max
  Gm_smallRNAprecursor_6820
agccatccactcaggaatctcccaaaccggcaaccgccaaacaaacatcggccgactatgcatggccaattgaaacccttcaggcccttcaagacatgagtctgaccaaatttccaaaaataatcaaaaaatcttgggcagacattgcctcagaatctgatgatgaatctgaatcaaatttacaaacaatgatccaaaatgcgtcaatgaccaaaacagccaccaatactaaaggaaaactacctttagccaaagctcaaacaccacctaccaaacaaactaacaattatatttataaaaataaattgttaactgttttgcagatggaacctgaattttgggacaaaaatcccttcaaggcgacggccaaggctttcccaccaggatttcactacaaaccaaccaccatcctgaagacaagaactttttatgaattgattttggtagattcaaactcagtatctatcaaacatttcaaagatccaaaagaccaaaccttaaacacccactcaaccatccaaatactaaaagttcttcaaccaagacactttggttcagacttgaacaaagggaagagattttcagttccatttgatcccgtaggttatacctattgggattacgttgatgcttggactaaggtgttttggcaccaaaatacccgcttcaagcattcatggctgatatatttcaagaccaacacaatttacaattttcccaattggtttttgcaatggtgggacttctttggaccaatcccagagatattcccagaaacggtccaacaaggattttcccaatttaagagacaatacaattcgcaggaatcacgaattccagcagatcttaaatacttttcaagctttgcactgtcatggatattctcatggcaatatcgctacagcaagactgaaaagacaaatcaatatccatcactacaaagacacgcatttgtaaaatggtggacacaatttgactcatccaaagcggatgcagaacaagtaaaactatggttcaaatcccatccagaattcctcaaagcggctgatccaaagacttctgtgttcttgaaccaaaagtctcatctggcagcatttttagcaggatcgacatcaaaggaggtcttagc

SEQ ID NO: 13988 - DNA, 1107 bp, Glycine max
  Gm_smallRNAprecursor_6821
aaccggcaaccgccaaacaaacatcggccgactatgcatggccaattgaaacccttcaggcccttcaagacatgagtctgaccaaatttccaaaaataatcaaaaaatcttgggcagacattgcctcagaatctgatgatgaatctgaatcaaatttacaaacaatgatccaaaatgcgtcaatgaccaaaacagccaccaatactaaaggaaaactacctttagccaaagctcaaacaccacctaccaaacaaactaacaattatatttataaaaataaattgttaactgttttgcagatggaacctgaattttgggacaaaaatcccttcaaggcgacggccaaggctttcccaccaggatttcactacaaaccaaccaccatcctgaagacaagaactttttatgaattgattttggtagattcaaactcagtatctatcaaacatttcaaagatccaaaagaccaaaccttaaacacccactcaaccatccaaatactaaaagttcttcaaccaagacactttggttcagacttgaacaaagggaagagattttcagttccatttgatcccgtaggttatacctattgggattacgttgatgcttggactaaggtgttttggcaccaaaatacccgcttcaagcattcatggctgatatatttcaagaccaacacaatttacaattttcccaattggtttttgcaatggtgggacttctttggaccaatcccagagatattcccagaaacggtccaacaaggattttcccaatttaagagacaatacaattcgcaggaatcacgaattccagcagatcttaaatacttttcaagctttgcactgtcatggatattctcatggcaatatcgctacagcaagactgaaaagacaaatcaatatccatcactacaaagacacgcatttgtaaaatggtggacacaatttgactcatccaaagcggatgcagaacaagtaaaactatggttcaaatcccatccagaattcctcaaagcggctgatccaaagacttctgtgttcttgaaccaaaagtctcatctggcagcatttttagcaggatcgacatcaaaggaggtcttagcta

SEQ ID NO: 13989 - DNA, 1107 bp, Glycine max; identical to SEQ ID NO: 13988
  Gm_smallRNAprecursor_6822

SEQ ID NO: 13990 - DNA, 1108 bp, Glycine max
  Gm_smallRNAprecursor_6823
aaccggcaaccgccaaacaaacatcggccgactatgcatggccaattgaaacccttcaggcccttcaagacatgagtctgaccaaatttccaaaaataatcaaaaaatcttgggcagacattgcctcagaatctgatgatgaatctgaatcaaatttacaaacaatgatccaaaatgcgtcaatgaccaaaacagccaccaatactaaaggaaaactacctttagccaaagctcaaacaccacctaccaaacaaactaacaattatatttataaaaataaattgttaactgttttgcagatggaacctgaattttgggacaaaaatcccttcaaggcgacggccaaggctttcccaccaggatttcactacaaaccaaccaccatcctgaagacaagaactttttatgaattgattttggtagattcaaactcagtatctatcaaacatttcaaagatccaaaagaccaaaccttaaacacccactcaaccatccaaatactaaaagttcttcaaccaagacactttggttcagacttgaacaaagggaagagattttcagttccatttgatcccgtaggttatacctattgggattacgttgatgcttggactaaggtgttttggcaccaaaatacccgcttcaagcattcatggctgatatatttcaagaccaacacaatttacaattttcccaattggtttttgcaatggtgggacttctttggaccaatcccagagatattcccagaaacggtccaacaaggattttcccaatttaagagacaatacaattcgcaggaatcacgaattccagcagatcttaaatacttttcaagctttgcactgtcatggatattctcatggcaatatcgctacagcaagactgaaaagacaaatcaatatccatcactacaaagacacgcatttgtaaaatggtggacacaatttgactcatccaaagcggatgcagaacaagtaaaactatggttcaaatcccatccagaattcctcaaagcggctgatccaaagacttctgtgttcttgaaccaaaagtctcatctggcagcatttttagcaggatcgacatcaaaggaggtcttagctaa

SEQ ID NO: 13991 - DNA, 1108 bp, Glycine max; identical to SEQ ID NO: 13990
  Gm_smallRNAprecursor_6824

SEQ ID NO: 13992 - DNA, 1102 bp, Glycine max
  Gm_smallRNAprecursor_6825
cggcaaccgccaaacaaacatcggccgactatgcatggccaattgaaacccttcaggcccttcaagacatgagtctgaccaaatttccaaaaataatcaaaaaatcttgggcagacattgcctcagaatctgatgatgaatctgaatcaaatttacaaacaatgatccaaaatgcgtcaatgaccaaaacagccaccaatactaaaggaaaactacctttagccaaagctcaaacaccacctaccaaacaaactaacaattatatttataaaaataaattgttaactgttttgcagatggaacctgaattttgggacaaaaatcccttcaaggcgacggccaaggctttcccaccaggatttcactacaaaccaaccaccatcctgaagacaagaactttttatgaattgattttggtagattcaaactcagtatctatcaaacatttcaaagatccaaaagaccaaaccttaaacacccactcaaccatccaaatactaaaagttcttcaaccaagacactttggttcagacttgaacaaagggaagagattttcagttccatttgatcccgtaggttatacctattgggattacgttgatgcttggactaaggtgttttggcaccaaaatacccgcttcaagcattcatggctgatatatttcaagaccaacacaatttacaattttcccaattggtttttgcaatggtgggacttctttggaccaatcccagagatattcccagaaacggtccaacaaggattttcccaatttaagagacaatacaattcgcaggaatcacgaattccagcagatcttaaatacttttcaagctttgcactgtcatggatattctcatggcaatatcgctacagcaagactgaaaagacaaatcaatatccatcactacaaagacacgcatttgtaaaatggtggacacaatttgactcatccaaagcggatgcagaacaagtaaaactatggttcaaatcccatccagaattcctcaaagcggctgatccaaagacttctgtgttcttgaaccaaaagtctcatctggcagcatttttagcaggatcgacatcaaaggaggtcttagc

SEQ ID NO: 13993 - DNA, 1080 bp, Glycine max
  Gm_smallRNAprecursor_6826
ccaaaaataatcaaaaaatcttgggcagacattgcctcagaatctgatgatgaatctgaatcaaatttacaaacaatgatccaaaatgcgtcaatgaccaaaacagccaccaatactaaaggaaaactacctttagccaaagctcaaacaccacctaccaaacaaactaacaattatatttataaaaataaattgttaactgttttgcagatggaacctgaattttgggacaaaaatcccttcaaggcgacggccaaggctttcccaccaggatttcactacaaaccaaccaccatcctgaagacaagaactttttatgaattgattttggtagattcaaactcagtatctatcaaacatttcaaagatccaaaagaccaaaccttaaacacccactcaaccatccaaatactaaaagttcttcaaccaagacactttggttcagacttgaacaaagggaagagattttcagttccatttgatcccgtaggttatacctattgggattacgttgatgcttggactaaggtgttttggcaccaaaatacccgcttcaagcattcatggctgatatatttcaagaccaacacaatttacaattttcccaattggtttttgcaatggtgggacttctttggaccaatcccagagatattcccagaaacggtccaacaaggattttcccaatttaagagacaatacaattcgcaggaatcacgaattccagcagatcttaaatacttttcaagctttgcactgtcatggatattctcatggcaatatcgctacagcaagactgaaaagacaaatcaatatccatcactacaaagacacgcatttgtaaaatggtggacacaatttgactcatccaaagcggatgcagaacaagtaaaactatggttcaaatcccatccagaattcctcaaagcggctgatccaaagacttctgtgttcttgaaccaaaagtctcatctggcagcatttttagcaggatcgacatcaaaggaggtcttagctaaaaatctgaaggaagttctacaaatgttacaacaggaagaagaagcttcatcctcaaagaag

SEQ ID NO: 13994 - DNA, 1062 bp, Glycine max
  Gm_smallRNAprecursor_6827
tcttgggcagacattgcctcagaatctgatgatgaatctgaatcaaatttacaaacaatgatccaaaatgcgtcaatgaccaaaacagccaccaatactaaaggaaaactacctttagccaaagctcaaacaccacctaccaaacaaactaacaattatatttataaaaataaattgttaactgttttgcagatggaacctgaattttgggacaaaaatcccttcaaggcgacggccaaggctttcccaccaggatttcactacaaaccaaccaccatcctgaagacaagaactttttatgaattgattttggtagattcaaactcagtatctatcaaacatttcaaagatccaaaagaccaaaccttaaacacccactcaaccatccaaatactaaaagttcttcaaccaagacactttggttcagacttgaacaaagggaagagattttcagttccatttgatcccgtaggttatacctattgggattacgttgatgcttggactaaggtgttttggcaccaaaatacccgcttcaagcattcatggctgatatatttcaagaccaacacaatttacaattttcccaattggtttttgcaatggtgggacttctttggaccaatcccagagatattcccagaaacggtccaacaaggattttcccaatttaagagacaatacaattcgcaggaatcacgaattccagcagatcttaaatacttttcaagctttgcactgtcatggatattctcatggcaatatcgctacagcaagactgaaaagacaaatcaatatccatcactacaaagacacgcatttgtaaaatggtggacacaatttgactcatccaaagcggatgcagaacaagtaaaactatggttcaaatcccatccagaattcctcaaagcggctgatccaaagacttctgtgttcttgaaccaaaagtctcatctggcagcatttttagcaggatcgacatcaaaggaggtcttagctaaaaatctgaaggaagttctacaaatgttacaacaggaagaagaagcttcatcctcaaagaag

SEQ ID NO: 13995 - DNA, 1146 bp, Glycine max
  Gm_smallRNAprecursor_6828
aatgatccaaaatgcgtcaatgaccaaaacagccaccaatactaaaggaaaactacctttagccaaagctcaaacaccacctaccaaacaaactaacaattatatttataaaaataaattgttaactgttttgcagatggaacctgaattttgggacaaaaatcccttcaaggcgacggccaaggctttcccaccaggatttcactacaaaccaaccaccatcctgaagacaagaactttttatgaattgattttggtagattcaaactcagtatctatcaaacatttcaaagatccaaaagaccaaaccttaaacacccactcaaccatccaaatactaaaagttcttcaaccaagacactttggttcagacttgaacaaagggaagagattttcagttccatttgatcccgtaggttatacctattgggattacgttgatgcttggactaaggtgttttggcaccaaaatacccgcttcaagcattcatggctgatatatttcaagaccaacacaatttacaattttcccaattggtttttgcaatggtgggacttctttggaccaatcccagagatattcccagaaacggtccaacaaggattttcccaatttaagagacaatacaattcgcaggaatcacgaattccagcagatcttaaatacttttcaagctttgcactgtcatggatattctcatggcaatatcgctacagcaagactgaaaagacaaatcaatatccatcactacaaagacacgcatttgtaaaatggtggacacaatttgactcatccaaagcggatgcagaacaagtaaaactatggttcaaatcccatccagaattcctcaaagcggctgatccaaagacttctgtgttcttgaaccaaaagtctcatctggcagcatttttagcaggatcgacatcaaaggaggtcttagctaaaaatctgaaggaagttctacaaatgttacaacaggaagaagaagcttcatcctcaaagaaggaagaaacaagttctgttgaagaagacgaagaagatcccttttaccaaaacgaagatgattgttttggtatctgtttagattaattttaatttcggtcacaaaaccgtctgtttgtaattaatgtgtaattaatgctgga

SEQ ID NO: 13996 - DNA, 1080 bp, Glycine max
  Gm_smallRNAprecursor_6829
tcaagcattcatggctgatatatttcaagaccaacacaatttacaattttcccaattggtttttgcaatggtgggacttctttggaccaatcccagagatattcccagaaacggtccaacaaggattttcccaatttaagagacaatacaattcgcaggaatcacgaattccagcagatcttaaatacttttcaagctttgcactgtcatggatattctcatggcaatatcgctacagcaagactgaaaagacaaatcaatatccatcactacaaagacacgcatttgtaaaatggtggacacaatttgactcatccaaagcggatgcagaacaagtaaaactatggttcaaatcccatccagaattcctcaaagcggctgatccaaagacttctgtgttcttgaaccaaaagtctcatctggcagcatttttagcaggatcgacatcaaaggaggtcttagctaaaaatctgaaggaagttctacaaatgttacaacaggaagaagaagcttcatcctcaaagaaggaagaaacaagttctgttgaagaagacgaagaagatcccttttaccaaaacgaagatgattgttttggtatctgtttagattaattttaatttcggtcacaaaaccgtctgtttgtaattaatgtgtaattaatgctggacaatactacctgtcctgtagccattaaagtcccggtcaaagctacttgtcttgtaacaaacagtcaaatagtcccggtcaaaactaccggcaactaccggtcttaaattttggctatataaggagtcctcaagcatattgtgaggcaccctttcatttagccattttttcaggtttcggaagagaggtgctctgaaacaagatttttgtaagcgcttctttctagattcaataaatttctatttttcatctttctctcttctcccttcaccgatcctgtgcggctctgccgccgcttcggtttctttgtttatgaaaacctgggttttgtaagccggtctccggtgtgaccttgatatctgttttcaaagtttatattttcatcaatcatactgcattcttacttcctatctg

SEQ ID NO: 13997 - DNA, 1081 bp, Glycine max
  Gm_smallRNAprecursor_6830
tcaagcattcatggctgatatatttcaagaccaacacaatttacaattttcccaattggtttttgcaatggtgggacttctttggaccaatcccagagatattcccagaaacggtccaacaaggattttcccaatttaagagacaatacaattcgcaggaatcacgaattccagcagatcttaaatacttttcaagctttgcactgtcatggatattctcatggcaatatcgctacagcaagactgaaaagacaaatcaatatccatcactacaaagacacgcatttgtaaaatggtggacacaatttgactcatccaaagcggatgcagaacaagtaaaactatggttcaaatcccatccagaattcctcaaagcggctgatccaaagacttctgtgttcttgaaccaaaagtctcatctggcagcatttttagcaggatcgacatcaaaggaggtcttagctaaaaatctgaaggaagttctacaaatgttacaacaggaagaagaagcttcatcctcaaagaaggaagaaacaagttctgttgaagaagacgaagaagatcccttttaccaaaacgaagatgattgttttggtatctgtttagattaattttaatttcggtcacaaaaccgtctgtttgtaattaatgtgtaattaatgctggacaatactacctgtcctgtagccattaaagtcccggtcaaagctacttgtcttgtaacaaacagtcaaatagtcccggtcaaaactaccggcaactaccggtcttaaattttggctatataaggagtcctcaagcatattgtgaggcaccctttcatttagccattttttcaggtttcggaagagaggtgctctgaaacaagatttttgtaagcgcttctttctagattcaataaatttctatttttcatctttctctcttctcccttcaccgatcctgtgcggctctgccgccgcttcggtttctttgtttatgaaaacctgggttttgtaagccggtctccggtgtgaccttgatatctgttttcaaagtttatattttcatcaatcatactgcattcttacttcctatctgt

SEQ ID NO: 13998 - DNA, 1082 bp, Glycine max
  Gm_smallRNAprecursor_6831
tcaagcattcatggctgatatatttcaagaccaacacaatttacaattttcccaattggtttttgcaatggtgggacttctttggaccaatcccagagatattcccagaaacggtccaacaaggattttcccaatttaagagacaatacaattcgcaggaatcacgaattccagcagatcttaaatacttttcaagctttgcactgtcatggatattctcatggcaatatcgctacagcaagactgaaaagacaaatcaatatccatcactacaaagacacgcatttgtaaaatggtggacacaatttgactcatccaaagcggatgcagaacaagtaaaactatggttcaaatcccatccagaattcctcaaagcggctgatccaaagacttctgtgttcttgaaccaaaagtctcatctggcagcatttttagcaggatcgacatcaaaggaggtcttagctaaaaatctgaaggaagttctacaaatgttacaacaggaagaagaagcttcatcctcaaagaaggaagaaacaagttctgttgaagaagacgaagaagatcccttttaccaaaacgaagatgattgttttggtatctgtttagattaattttaatttcggtcacaaaaccgtctgtttgtaattaatgtgtaattaatgctggacaatactacctgtcctgtagccattaaagtcccggtcaaagctacttgtcttgtaacaaacagtcaaatagtcccggtcaaaactaccggcaactaccggtcttaaattttggctatataaggagtcctcaagcatattgtgaggcaccctttcatttagccattttttcaggtttcggaagagaggtgctctgaaacaagatttttgtaagcgcttctttctagattcaataaatttctatttttcatctttctctcttctcccttcaccgatcctgtgcggctctgccgccgcttcggtttctttgtttatgaaaacctgggttttgtaagccggtctccggtgtgaccttgatatctgttttcaaagtttatattttcatcaatcatactgcattcttacttcctatctgtc

SEQ ID NO: 13999 - DNA, 1057 bp, Glycine max
  Gm_smallRNAprecursor_6832
atttcaagaccaacacaatttacaattttcccaattggtttttgcaatggtgggacttctttggaccaatcccagagatattcccagaaacggtccaacaaggattttcccaatttaagagacaatacaattcgcaggaatcacgaattccagcagatcttaaatacttttcaagctttgcactgtcatggatattctcatggcaatatcgctacagcaagactgaaaagacaaatcaatatccatcactacaaagacacgcatttgtaaaatggtggacacaatttgactcatccaaagcggatgcagaacaagtaaaactatggttcaaatcccatccagaattcctcaaagcggctgatccaaagacttctgtgttcttgaaccaaaagtctcatctggcagcatttttagcaggatcgacatcaaaggaggtcttagctaaaaatctgaaggaagttctacaaatgttacaacaggaagaagaagcttcatcctcaaagaaggaagaaacaagttctgttgaagaagacgaagaagatcccttttaccaaaacgaagatgattgttttggtatctgtttagattaattttaatttcggtcacaaaaccgtctgtttgtaattaatgtgtaattaatgctggacaatactacctgtcctgtagccattaaagtcccggtcaaagctacttgtcttgtaacaaacagtcaaatagtcccggtcaaaactaccggcaactaccggtcttaaattttggctatataaggagtcctcaagcatattgtgaggcaccctttcatttagccattttttcaggtttcggaagagaggtgctctgaaacaagatttttgtaagcgcttctttctagattcaataaatttctatttttcatctttctctcttctcccttcaccgatcctgtgcggctctgccgccgcttcggtttctttgtttatgaaaacctgggttttgtaagccggtctccggtgtgaccttgatatctgttttcaaagtttatattttcatcaatcatactgcattcttacttcctatc

SEQ ID NO: 14000 - DNA, 1064 bp, Glycine max
  Gm_smallRNAprecursor_6833
atttcaagaccaacacaatttacaattttcccaattggtttttgcaatggtgggacttctttggaccaatcccagagatattcccagaaacggtccaacaaggattttcccaatttaagagacaatacaattcgcaggaatcacgaattccagcagatcttaaatacttttcaagctttgcactgtcatggatattctcatggcaatatcgctacagcaagactgaaaagacaaatcaatatccatcactacaaagacacgcatttgtaaaatggtggacacaatttgactcatccaaagcggatgcagaacaagtaaaactatggttcaaatcccatccagaattcctcaaagcggctgatccaaagacttctgtgttcttgaaccaaaagtctcatctggcagcatttttagcaggatcgacatcaaaggaggtcttagctaaaaatctgaaggaagttctacaaatgttacaacaggaagaagaagcttcatcctcaaagaaggaagaaacaagttctgttgaagaagacgaagaagatcccttttaccaaaacgaagatgattgttttggtatctgtttagattaattttaatttcggtcacaaaaccgtctgtttgtaattaatgtgtaattaatgctggacaatactacctgtcctgtagccattaaagtcccggtcaaagctacttgtcttgtaacaaacagtcaaatagtcccggtcaaaactaccggcaactaccggtcttaaattttggctatataaggagtcctcaagcatattgtgaggcaccctttcatttagccattttttcaggtttcggaagagaggtgctctgaaacaagatttttgtaagcgcttctttctagattcaataaatttctatttttcatctttctctcttctcccttcaccgatcctgtgcggctctgccgccgcttcggtttctttgtttatgaaaacctgggttttgtaagccggtctccggtgtgaccttgatatctgttttcaaagtttatattttcatcaatcatactgcattcttacttcctatctgtccgt

SEQ ID NO: 14001 - DNA, 1155 bp, Glycine max
  Gm_smallRNAprecursor_6834
tgggacttctttggaccaatcccagagatattcccagaaacggtccaacaaggattttcccaatttaagagacaatacaattcgcaggaatcacgaattccagcagatcttaaatacttttcaagctttgcactgtcatggatattctcatggcaatatcgctacagcaagactgaaaagacaaatcaatatccatcactacaaagacacgcatttgtaaaatggtggacacaatttgactcatccaaagcggatgcagaacaagtaaaactatggttcaaatcccatccagaattcctcaaagcggctgatccaaagacttctgtgttcttgaaccaaaagtctcatctggcagcatttttagcaggatcgacatcaaaggaggtcttagctaaaaatctgaaggaagttctacaaatgttacaacaggaagaagaagcttcatcctcaaagaaggaagaaacaagttctgttgaagaagacgaagaagatcccttttaccaaaacgaagatgattgttttggtatctgtttagattaattttaatttcggtcacaaaaccgtctgtttgtaattaatgtgtaattaatgctggacaatactacctgtcctgtagccattaaagtcccggtcaaagctacttgtcttgtaacaaacagtcaaatagtcccggtcaaaactaccggcaactaccggtcttaaattttggctatataaggagtcctcaagcatattgtgaggcaccctttcatttagccattttttcaggtttcggaagagaggtgctctgaaacaagatttttgtaagcgcttctttctagattcaataaatttctatttttcatctttctctcttctcccttcaccgatcctgtgcggctctgccgccgcttcggtttctttgtttatgaaaacctgggttttgtaagccggtctccggtgtgaccttgatatctgttttcaaagtttatattttcatcaatcatactgcattcttacttcctatctgtccgtctgatcctactccgctgacctctgttaatgcactcacgcatgtcttatgggttttataatttttaaaagcaaataaatcttaaccaattagtacaatagatatttaattttgttgcccaattgatttttgattttccaatt

SEQ ID NO: 14002 - DNA, 1142 bp, Glycine max
  Gm_smallRNAprecursor_6835
gaccaatcccagagatattcccagaaacggtccaacaaggattttcccaatttaagagacaatacaattcgcaggaatcacgaattccagcagatcttaaatacttttcaagctttgcactgtcatggatattctcatggcaatatcgctacagcaagactgaaaagacaaatcaatatccatcactacaaagacacgcatttgtaaaatggtggacacaatttgactcatccaaagcggatgcagaacaagtaaaactatggttcaaatcccatccagaattcctcaaagcggctgatccaaagacttctgtgttcttgaaccaaaagtctcatctggcagcatttttagcaggatcgacatcaaaggaggtcttagctaaaaatctgaaggaagttctacaaatgttacaacaggaagaagaagcttcatcctcaaagaaggaagaaacaagttctgttgaagaagacgaagaagatcccttttaccaaaacgaagatgattgttttggtatctgtttagattaattttaatttcggtcacaaaaccgtctgtttgtaattaatgtgtaattaatgctggacaatactacctgtcctgtagccattaaagtcccggtcaaagctacttgtcttgtaacaaacagtcaaatagtcccggtcaaaactaccggcaactaccggtcttaaattttggctatataaggagtcctcaagcatattgtgaggcaccctttcatttagccattttttcaggtttcggaagagaggtgctctgaaacaagatttttgtaagcgcttctttctagattcaataaatttctatttttcatctttctctcttctcccttcaccgatcctgtgcggctctgccgccgcttcggtttctttgtttatgaaaacctgggttttgtaagccggtctccggtgtgaccttgatatctgttttcaaagtttatattttcatcaatcatactgcattcttacttcctatctgtccgtctgatcctactccgctgacctctgttaatgcactcacgcatgtcttatgggttttataatttttaaaagcaaataaatcttaaccaattagtacaatagatatttaattttgttgcccaattgatttttgattttccaatt

SEQ ID NO: 14003 - DNA, 1047 bp, Glycine max
  Gm_smallRNAprecursor_6836
tattgagacataatatactgtggctataggagtagtgttcaaactatattgtccgtaaaaaaaaatctttttcatttgttcagatccaagaagttctgtaacatatagccttatggaaatatttctatggaaccaaatgaaggcaaagatattagagaatgttataatcatgtctagactattgcgctcttttttccgtatctcttttcgaccaaattcttcttcatcatcttcttcaagaaattccaatttattaagtgatcaagataaccaaacccaagaggtcgcccccaaacacaatctctttgatgaggaagtccgattcgaagatatcaatcaaaacatggatgactagaacattccagaaatccctcaggatcaactatacgttcctgaaacaattaaggacaaacacaactttgattacataatcaaaacagtaaaaagcaatattcctctaggacaagatacaggggaagaatttcatttactttcaaaaaattcaatttatgaacatagccgtaagtataaatatctacacatcagttgtgtacaagtagccatcaagcccttaattgacatgggcatagatgcagcagttttaatgtgtctaagagatattaggcataataaatttgaagactccctaattggaacagtcgaaaccagcctaggacaaggtccaatatattttaattgttatccaaacaaaacagtgagtctgatggacagaaacattcttgactctctgttcttaaacatccactttcatggccttgacatgaaagaaggatcaatcccagcaaccttaatttataggatccaatataaggtcatgaatacttgtgcatctagagtcctgttaaaacctcaaaaaggagaaacaactttgtttatcactgatatgacaaaggctaacgtttctctcccgagaaaaataaaatgggatgaagtaactcttcccgaaaggtgggttatggataaggccacaccgtctattccacgacccgctccaaccataaagcatattaagcaagataactccgg

SEQ ID NO: 14004 - DNA, 1158 bp, Glycine max
  Gm_smallRNAprecursor_6837
ggtaatgcctcctaaggcatcgggaatctccctaaggggaggaagaagtacaaggaaaggagccagactggctcttccaaagccaactactaagaaattatctacctcttctgggtcaccaacccaggctaggtcatctacccagaaaaccaatttagaagggtcatcaacccagattacctcaatcaaacctgagtcatccactcaggaatctcctaaactagcaaccgccaaacaaacatcggccgactatgcatggccaattgaaacccttcaggcccttcaagacatgggtctaaccaaatttccaaaaataatcaaaaaatcttgggcagacattgcctcagaatctgaatcaaatttacaaacaatgatccaaaatgcatcaatgaccaaaacaactatcaatcctaaagggaaactacctttagccaaagctcaaacaccacctaccaaaaaaaactaacaattatatttataaaaataaatttgtaattgttttgcagatggaacctgaattttgggacaaaaatgccttcaaggcgacggccaaggctttcccaccaggatttcactacaaaccaaccaccatcctgaagacaagaaatttttatgaattgattttggtagattcaaattcagtatctatcaaacatttcaaagatccaaaagaccaaacattaaacacccattccacaatccaaatactaaaagttcttcaaccaagacactttggttcaaacttgaacaaaggaaagagattttcagttccatttgatccagtaggttatacctattgggattatgttgatgcttggactaaggtgttttggcaccaaaatacccgcttcaagcattcatggctgatatatttcaagaccaatacaatttacaattttcccaattggtttttgcaatggtaggacttctttggaccaattccagagatatttccagaaacagtccaacaaggatttgctcaatttgagagacaatacaattcgcaggaatcacgaattccagcagatcttaaatacttctcaagctttgcactgtcatggatcttctcatggcaatatcgttacagcaagactaaaaagacaaactaatatccatcactacaaagacacgcatttttaaaatggtggtcacagtttg

SEQ ID NO: 14005 - DNA, 1208 bp, Glycine max
  Gm_smallRNAprecursor_6838
ggtaatgcctcctaaggcatcgggaatctccctaaggggaggaagaagtacaaggaaaggagccagactggctcttccaaagccaactactaagaaattatctacctcttctgggtcaccaacccaggctaggtcatctacccagaaaaccaatttagaagggtcatcaacccagattacctcaatcaaacctgagtcatccactcaggaatctcctaaactagcaaccgccaaacaaacatcggccgactatgcatggccaattgaaacccttcaggcccttcaagacatgggtctaaccaaatttccaaaaataatcaaaaaatcttgggcagacattgcctcagaatctgaatcaaatttacaaacaatgatccaaaatgcatcaatgaccaaaacaactatcaatcctaaagggaaactacctttagccaaagctcaaacaccacctaccaaaaaaaactaacaattatatttataaaaataaatttgtaattgttttgcagatggaacctgaattttgggacaaaaatgccttcaaggcgacggccaaggctttcccaccaggatttcactacaaaccaaccaccatcctgaagacaagaaatttttatgaattgattttggtagattcaaattcagtatctatcaaacatttcaaagatccaaaagaccaaacattaaacacccattccacaatccaaatactaaaagttcttcaaccaagacactttggttcaaacttgaacaaaggaaagagattttcagttccatttgatccagtaggttatacctattgggattatgttgatgcttggactaaggtgttttggcaccaaaatacccgcttcaagcattcatggctgatatatttcaagaccaatacaatttacaattttcccaattggtttttgcaatggtaggacttctttggaccaattccagagatatttccagaaacagtccaacaaggatttgctcaatttgagagacaatacaattcgcaggaatcacgaattccagcagatcttaaatacttctcaagctttgcactgtcatggatcttctcatggcaatatcgttacagcaagactaaaaagacaaactaatatccatcactacaaagacacgcatttttaaaatggtggtcacagtttgactcatccaaagcagatccagaacaagtaaaactctggtttcaatcccat

SEQ ID NO: 14006 - DNA, 1208 bp, Glycine max; identical to SEQ ID NO: 14005
  Gm_smallRNAprecursor_6839

SEQ ID NO: 14007 - DNA, 1211 bp, Glycine max
  Gm_smallRNAprecursor_6840
ggtaatgcctcctaaggcatcgggaatctccctaaggggaggaagaagtacaaggaaaggagccagactggctcttccaaagccaactactaagaaattatctacctcttctgggtcaccaacccaggctaggtcatctacccagaaaaccaatttagaagggtcatcaacccagattacctcaatcaaacctgagtcatccactcaggaatctcctaaactagcaaccgccaaacaaacatcggccgactatgcatggccaattgaaacccttcaggcccttcaagacatgggtctaaccaaatttccaaaaataatcaaaaaatcttgggcagacattgcctcagaatctgaatcaaatttacaaacaatgatccaaaatgcatcaatgaccaaaacaactatcaatcctaaagggaaactacctttagccaaagctcaaacaccacctaccaaaaaaaactaacaattatatttataaaaataaatttgtaattgttttgcagatggaacctgaattttgggacaaaaatgccttcaaggcgacggccaaggctttcccaccaggatttcactacaaaccaaccaccatcctgaagacaagaaatttttatgaattgattttggtagattcaaattcagtatctatcaaacatttcaaagatccaaaagaccaaacattaaacacccattccacaatccaaatactaaaagttcttcaaccaagacactttggttcaaacttgaacaaaggaaagagattttcagttccatttgatccagtaggttatacctattgggattatgttgatgcttggactaaggtgttttggcaccaaaatacccgcttcaagcattcatggctgatatatttcaagaccaatacaatttacaattttcccaattggtttttgcaatggtaggacttctttggaccaattccagagatatttccagaaacagtccaacaaggatttgctcaatttgagagacaatacaattcgcaggaatcacgaattccagcagatcttaaatacttctcaagctttgcactgtcatggatcttctcatggcaatatcgttacagcaagactaaaaagacaaactaatatccatcactacaaagacacgcatttttaaaatggtggtcacagtttgactcatccaaagcagatccagaacaagtaaaactctggtttcaatcccatcca

SEQ ID NO: 14008 - DNA, 1098 bp, Glycine max
  Gm_smallRNAprecursor_6841
ctaaggcatcgggaatctccctaaggggaggaagaagtacaaggaaaggagccagactggctcttccaaagccaactactaagaaattatctacctcttctgggtcaccaacccaggctaggtcatctacccagaaaaccaatttagaagggtcatcaacccagattacctcaatcaaacctgagtcatccactcaggaatctcctaaactagcaaccgccaaacaaacatcggccgactatgcatggccaattgaaacccttcaggcccttcaagacatgggtctaaccaaatttccaaaaataatcaaaaaatcttgggcagacattgcctcagaatctgaatcaaatttacaaacaatgatccaaaatgcatcaatgaccaaaacaactatcaatcctaaagggaaactacctttagccaaagctcaaacaccacctaccaaaaaaaactaacaattatatttataaaaataaatttgtaattgttttgcagatggaacctgaattttgggacaaaaatgccttcaaggcgacggccaaggctttcccaccaggatttcactacaaaccaaccaccatcctgaagacaagaaatttttatgaattgattttggtagattcaaattcagtatctatcaaacatttcaaagatccaaaagaccaaacattaaacacccattccacaatccaaatactaaaagttcttcaaccaagacactttggttcaaacttgaacaaaggaaagagattttcagttccatttgatccagtaggttatacctattgggattatgttgatgcttggactaaggtgttttggcaccaaaatacccgcttcaagcattcatggctgatatatttcaagaccaatacaatttacaattttcccaattggtttttgcaatggtaggacttctttggaccaattccagagatatttccagaaacagtccaacaaggatttgctcaatttgagagacaatacaattcgcaggaatcacgaattccagcagatcttaaatacttctcaagctttgcactgtcatggatcttctcatggcaatatcgttacagcaagactaaaaagacaaactaa

SEQ ID NO: 14009 - DNA, 1034 bp, Glycine max
  Gm_smallRNAprecursor_6842
caggctaggtcatctacccagaaaaccaatttagaagggtcatcaacccagattacctcaatcaaacctgagtcatccactcaggaatctcctaaactagcaaccgccaaacaaacatcggccgactatgcatggccaattgaaacccttcaggcccttcaagacatgggtctaaccaaatttccaaaaataatcaaaaaatcttgggcagacattgcctcagaatctgaatcaaatttacaaacaatgatccaaaatgcatcaatgaccaaaacaactatcaatcctaaagggaaactacctttagccaaagctcaaacaccacctaccaaaaaaaactaacaattatatttataaaaataaatttgtaattgttttgcagatggaacctgaattttgggacaaaaatgccttcaaggcgacggccaaggctttcccaccaggatttcactacaaaccaaccaccatcctgaagacaagaaatttttatgaattgattttggtagattcaaattcagtatctatcaaacatttcaaagatccaaaagaccaaacattaaacacccattccacaatccaaatactaaaagttcttcaaccaagacactttggttcaaacttgaacaaaggaaagagattttcagttccatttgatccagtaggttatacctattgggattatgttgatgcttggactaaggtgttttggcaccaaaatacccgcttcaagcattcatggctgatatatttcaagaccaatacaatttacaattttcccaattggtttttgcaatggtaggacttctttggaccaattccagagatatttccagaaacagtccaacaaggatttgctcaatttgagagacaatacaattcgcaggaatcacgaattccagcagatcttaaatacttctcaagctttgcactgtcatggatcttctcatggcaatatcgttacagcaagactaaaaagacaaactaatatccatcactacaaagacacgcatttttaaaatggtggtcacagtttg

SEQ ID NO: 14010 - DNA, 1082 bp, Glycine max
  Gm_smallRNAprecursor_6843
caggctaggtcatctacccagaaaaccaatttagaagggtcatcaacccagattacctcaatcaaacctgagtcatccactcaggaatctcctaaactagcaaccgccaaacaaacatcggccgactatgcatggccaattgaaacccttcaggcccttcaagacatgggtctaaccaaatttccaaaaataatcaaaaaatcttgggcagacattgcctcagaatctgaatcaaatttacaaacaatgatccaaaatgcatcaatgaccaaaacaactatcaatcctaaagggaaactacctttagccaaagctcaaacaccacctaccaaaaaaaactaacaattatatttataaaaataaatttgtaattgttttgcagatggaacctgaattttgggacaaaaatgccttcaaggcgacggccaaggctttcccaccaggatttcactacaaaccaaccaccatcctgaagacaagaaatttttatgaattgattttggtagattcaaattcagtatctatcaaacatttcaaagatccaaaagaccaaacattaaacacccattccacaatccaaatactaaaagttcttcaaccaagacactttggttcaaacttgaacaaaggaaagagattttcagttccatttgatccagtaggttatacctattgggattatgttgatgcttggactaaggtgttttggcaccaaaatacccgcttcaagcattcatggctgatatatttcaagaccaatacaatttacaattttcccaattggtttttgcaatggtaggacttctttggaccaattccagagatatttccagaaacagtccaacaaggatttgctcaatttgagagacaatacaattcgcaggaatcacgaattccagcagatcttaaatacttctcaagctttgcactgtcatggatcttctcatggcaatatcgttacagcaagactaaaaagacaaactaatatccatcactacaaagacacgcatttttaaaatggtggtcacagtttgactcatccaaagcagatccagaacaagtaaaactctggtttcaatccc

SEQ ID NO: 14011 - DNA, 1082 bp, Glycine max; identical to SEQ ID NO: 14010
  Gm_smallRNAprecursor_6844

SEQ ID NO: 14012 - DNA, 1084 bp, Glycine max
  Gm_smallRNAprecursor_6845
caggctaggtcatctacccagaaaaccaatttagaagggtcatcaacccagattacctcaatcaaacctgagtcatccactcaggaatctcctaaactagcaaccgccaaacaaacatcggccgactatgcatggccaattgaaacccttcaggcccttcaagacatgggtctaaccaaatttccaaaaataatcaaaaaatcttgggcagacattgcctcagaatctgaatcaaatttacaaacaatgatccaaaatgcatcaatgaccaaaacaactatcaatcctaaagggaaactacctttagccaaagctcaaacaccacctaccaaaaaaaactaacaattatatttataaaaataaatttgtaattgttttgcagatggaacctgaattttgggacaaaaatgccttcaaggcgacggccaaggctttcccaccaggatttcactacaaaccaaccaccatcctgaagacaagaaatttttatgaattgattttggtagattcaaattcagtatctatcaaacatttcaaagatccaaaagaccaaacattaaacacccattccacaatccaaatactaaaagttcttcaaccaagacactttggttcaaacttgaacaaaggaaagagattttcagttccatttgatccagtaggttatacctattgggattatgttgatgcttggactaaggtgttttggcaccaaaatacccgcttcaagcattcatggctgatatatttcaagaccaatacaatttacaattttcccaattggtttttgcaatggtaggacttctttggaccaattccagagatatttccagaaacagtccaacaaggatttgctcaatttgagagacaatacaattcgcaggaatcacgaattccagcagatcttaaatacttctcaagctttgcactgtcatggatcttctcatggcaatatcgttacagcaagactaaaaagacaaactaatatccatcactacaaagacacgcatttttaaaatggtggtcacagtttgactcatccaaagcagatccagaacaagtaaaactctggtttcaatcccat

SEQ ID NO: 14013 - DNA, 1084 bp, Glycine max; identical to SEQ ID NO: 14012
  Gm_smallRNAprecursor_6846

SEQ ID NO: 14014 - DNA, 1171 bp, Glycine max
  Gm_smallRNAprecursor_6847
actcaggaatctcctaaactagcaaccgccaaacaaacatcggccgactatgcatggccaattgaaacccttcaggcccttcaagacatgggtctaaccaaatttccaaaaataatcaaaaaatcttgggcagacattgcctcagaatctgaatcaaatttacaaacaatgatccaaaatgcatcaatgaccaaaacaactatcaatcctaaagggaaactacctttagccaaagctcaaacaccacctaccaaaaaaaactaacaattatatttataaaaataaatttgtaattgttttgcagatggaacctgaattttgggacaaaaatgccttcaaggcgacggccaaggctttcccaccaggatttcactacaaaccaaccaccatcctgaagacaagaaatttttatgaattgattttggtagattcaaattcagtatctatcaaacatttcaaagatccaaaagaccaaacattaaacacccattccacaatccaaatactaaaagttcttcaaccaagacactttggttcaaacttgaacaaaggaaagagattttcagttccatttgatccagtaggttatacctattgggattatgttgatgcttggactaaggtgttttggcaccaaaatacccgcttcaagcattcatggctgatatatttcaagaccaatacaatttacaattttcccaattggtttttgcaatggtaggacttctttggaccaattccagagatatttccagaaacagtccaacaaggatttgctcaatttgagagacaatacaattcgcaggaatcacgaattccagcagatcttaaatacttctcaagctttgcactgtcatggatcttctcatggcaatatcgttacagcaagactaaaaagacaaactaatatccatcactacaaagacacgcatttttaaaatggtggtcacagtttgactcatccaaagcagatccagaacaagtaaaactctggtttcaatcccatccagaattcctcaaagcagttgatccagaaacttctgtgtttttgaaccaaaagtctcatctggcagcatttttagcaggatcgaaatcaaaggaggtcctaactaaaaatctaaaggaagttctgcaaatgttacagtaggaagaagaaggttcatcctcaaag

SEQ ID NO: 14015 - DNA, 1166 bp, Glycine max
  Gm_smallRNAprecursor_6848
tcaggaatctcctaaactagcaaccgccaaacaaacatcggccgactatgcatggccaattgaaacccttcaggcccttcaagacatgggtctaaccaaatttccaaaaataatcaaaaaatcttgggcagacattgcctcagaatctgaatcaaatttacaaacaatgatccaaaatgcatcaatgaccaaaacaactatcaatcctaaagggaaactacctttagccaaagctcaaacaccacctaccaaaaaaaactaacaattatatttataaaaataaatttgtaattgttttgcagatggaacctgaattttgggacaaaaatgccttcaaggcgacggccaaggctttcccaccaggatttcactacaaaccaaccaccatcctgaagacaagaaatttttatgaattgattttggtagattcaaattcagtatctatcaaacatttcaaagatccaaaagaccaaacattaaacacccattccacaatccaaatactaaaagttcttcaaccaagacactttggttcaaacttgaacaaaggaaagagattttcagttccatttgatccagtaggttatacctattgggattatgttgatgcttggactaaggtgttttggcaccaaaatacccgcttcaagcattcatggctgatatatttcaagaccaatacaatttacaattttcccaattggtttttgcaatggtaggacttctttggaccaattccagagatatttccagaaacagtccaacaaggatttgctcaatttgagagacaatacaattcgcaggaatcacgaattccagcagatcttaaatacttctcaagctttgcactgtcatggatcttctcatggcaatatcgttacagcaagactaaaaagacaaactaatatccatcactacaaagacacgcatttttaaaatggtggtcacagtttgactcatccaaagcagatccagaacaagtaaaactctggtttcaatcccatccagaattcctcaaagcagttgatccagaaacttctgtgtttttgaaccaaaagtctcatctggcagcatttttagcaggatcgaaatcaaaggaggtcctaactaaaaatctaaaggaagttctgcaaatgttacagtaggaagaagaaggttcatcctca

SEQ ID NO: 14016 - DNA, 1169 bp, Glycine max
  Gm_smallRNAprecursor_6849
tcaggaatctcctaaactagcaaccgccaaacaaacatcggccgactatgcatggccaattgaaacccttcaggcccttcaagacatgggtctaaccaaatttccaaaaataatcaaaaaatcttgggcagacattgcctcagaatctgaatcaaatttacaaacaatgatccaaaatgcatcaatgaccaaaacaactatcaatcctaaagggaaactacctttagccaaagctcaaacaccacctaccaaaaaaaactaacaattatatttataaaaataaatttgtaattgttttgcagatggaacctgaattttgggacaaaaatgccttcaaggcgacggccaaggctttcccaccaggatttcactacaaaccaaccaccatcctgaagacaagaaatttttatgaattgattttggtagattcaaattcagtatctatcaaacatttcaaagatccaaaagaccaaacattaaacacccattccacaatccaaatactaaaagttcttcaaccaagacactttggttcaaacttgaacaaaggaaagagattttcagttccatttgatccagtaggttatacctattgggattatgttgatgcttggactaaggtgttttggcaccaaaatacccgcttcaagcattcatggctgatatatttcaagaccaatacaatttacaattttcccaattggtttttgcaatggtaggacttctttggaccaattccagagatatttccagaaacagtccaacaaggatttgctcaatttgagagacaatacaattcgcaggaatcacgaattccagcagatcttaaatacttctcaagctttgcactgtcatggatcttctcatggcaatatcgttacagcaagactaaaaagacaaactaatatccatcactacaaagacacgcatttttaaaatggtggtcacagtttgactcatccaaagcagatccagaacaagtaaaactctggtttcaatcccatccagaattcctcaaagcagttgatccagaaacttctgtgtttttgaaccaaaagtctcatctggcagcatttttagcaggatcgaaatcaaaggaggtcctaactaaaaatctaaaggaagttctgcaaatgttacagtaggaagaagaaggttcatcctcaaag

SEQ ID NO: 14017 - DNA, 1107 bp, Glycine max
  Gm_smallRNAprecursor_6850
ggaatctcctaaactagcaaccgccaaacaaacatcggccgactatgcatggccaattgaaacccttcaggcccttcaagacatgggtctaaccaaatttccaaaaataatcaaaaaatcttgggcagacattgcctcagaatctgaatcaaatttacaaacaatgatccaaaatgcatcaatgaccaaaacaactatcaatcctaaagggaaactacctttagccaaagctcaaacaccacctaccaaaaaaaactaacaattatatttataaaaataaatttgtaattgttttgcagatggaacctgaattttgggacaaaaatgccttcaaggcgacggccaaggctttcccaccaggatttcactacaaaccaaccaccatcctgaagacaagaaatttttatgaattgattttggtagattcaaattcagtatctatcaaacatttcaaagatccaaaagaccaaacattaaacacccattccacaatccaaatactaaaagttcttcaaccaagacactttggttcaaacttgaacaaaggaaagagattttcagttccatttgatccagtaggttatacctattgggattatgttgatgcttggactaaggtgttttggcaccaaaatacccgcttcaagcattcatggctgatatatttcaagaccaatacaatttacaattttcccaattggtttttgcaatggtaggacttctttggaccaattccagagatatttccagaaacagtccaacaaggatttgctcaatttgagagacaatacaattcgcaggaatcacgaattccagcagatcttaaatacttctcaagctttgcactgtcatggatcttctcatggcaatatcgttacagcaagactaaaaagacaaactaatatccatcactacaaagacacgcatttttaaaatggtggtcacagtttgactcatccaaagcagatccagaacaagtaaaactctggtttcaatcccatccagaattcctcaaagcagttgatccagaaacttctgtgtttttgaaccaaaagtctcatctggcagcatttttagcaggatcgaaatcaaaggaggtcctaacta

SEQ ID NO: 14018 - DNA, 1107 bp, Glycine max; identical to SEQ ID NO: 14017
  Gm_smallRNAprecursor_6851

SEQ ID NO: 14019 - DNA, 1108 bp, Glycine max
  Gm_smallRNAprecursor_6852
ggaatctcctaaactagcaaccgccaaacaaacatcggccgactatgcatggccaattgaaacccttcaggcccttcaagacatgggtctaaccaaatttccaaaaataatcaaaaaatcttgggcagacattgcctcagaatctgaatcaaatttacaaacaatgatccaaaatgcatcaatgaccaaaacaactatcaatcctaaagggaaactacctttagccaaagctcaaacaccacctaccaaaaaaaactaacaattatatttataaaaataaatttgtaattgttttgcagatggaacctgaattttgggacaaaaatgccttcaaggcgacggccaaggctttcccaccaggatttcactacaaaccaaccaccatcctgaagacaagaaatttttatgaattgattttggtagattcaaattcagtatctatcaaacatttcaaagatccaaaagaccaaacattaaacacccattccacaatccaaatactaaaagttcttcaaccaagacactttggttcaaacttgaacaaaggaaagagattttcagttccatttgatccagtaggttatacctattgggattatgttgatgcttggactaaggtgttttggcaccaaaatacccgcttcaagcattcatggctgatatatttcaagaccaatacaatttacaattttcccaattggtttttgcaatggtaggacttctttggaccaattccagagatatttccagaaacagtccaacaaggatttgctcaatttgagagacaatacaattcgcaggaatcacgaattccagcagatcttaaatacttctcaagctttgcactgtcatggatcttctcatggcaatatcgttacagcaagactaaaaagacaaactaatatccatcactacaaagacacgcatttttaaaatggtggtcacagtttgactcatccaaagcagatccagaacaagtaaaactctggtttcaatcccatccagaattcctcaaagcagttgatccagaaacttctgtgtttttgaaccaaaagtctcatctggcagcatttttagcaggatcgaaatcaaaggaggtcctaactaa

SEQ ID NO: 14020 - DNA, 1108 bp, Glycine max; identical to SEQ ID NO: 14019
  Gm_smallRNAprecursor_6853

SEQ ID NO: 14021 - DNA, 1102 bp, Glycine max
  Gm_smallRNAprecursor_6854
atctcctaaactagcaaccgccaaacaaacatcggccgactatgcatggccaattgaaacccttcaggcccttcaagacatgggtctaaccaaatttccaaaaataatcaaaaaatcttgggcagacattgcctcagaatctgaatcaaatttacaaacaatgatccaaaatgcatcaatgaccaaaacaactatcaatcctaaagggaaactacctttagccaaagctcaaacaccacctaccaaaaaaaactaacaattatatttataaaaataaatttgtaattgttttgcagatggaacctgaattttgggacaaaaatgccttcaaggcgacggccaaggctttcccaccaggatttcactacaaaccaaccaccatcctgaagacaagaaatttttatgaattgattttggtagattcaaattcagtatctatcaaacatttcaaagatccaaaagaccaaacattaaacacccattccacaatccaaatactaaaagttcttcaaccaagacactttggttcaaacttgaacaaaggaaagagattttcagttccatttgatccagtaggttatacctattgggattatgttgatgcttggactaaggtgttttggcaccaaaatacccgcttcaagcattcatggctgatatatttcaagaccaatacaatttacaattttcccaattggtttttgcaatggtaggacttctttggaccaattccagagatatttccagaaacagtccaacaaggatttgctcaatttgagagacaatacaattcgcaggaatcacgaattccagcagatcttaaatacttctcaagctttgcactgtcatggatcttctcatggcaatatcgttacagcaagactaaaaagacaaactaatatccatcactacaaagacacgcatttttaaaatggtggtcacagtttgactcatccaaagcagatccagaacaagtaaaactctggtttcaatcccatccagaattcctcaaagcagttgatccagaaacttctgtgtttttgaaccaaaagtctcatctggcagcatttttagcaggatcgaaatcaaaggaggtcctaac

SEQ ID NO: 14022 - DNA, 1146 bp, Glycine max
  Gm_smallRNAprecursor_6855
atgatccaaaatgcatcaatgaccaaaacaactatcaatcctaaagggaaactacctttagccaaagctcaaacaccacctaccaaaaaaaactaacaattatatttataaaaataaatttgtaattgttttgcagatggaacctgaattttgggacaaaaatgccttcaaggcgacggccaaggctttcccaccaggatttcactacaaaccaaccaccatcctgaagacaagaaatttttatgaattgattttggtagattcaaattcagtatctatcaaacatttcaaagatccaaaagaccaaacattaaacacccattccacaatccaaatactaaaagttcttcaaccaagacactttggttcaaacttgaacaaaggaaagagattttcagttccatttgatccagtaggttatacctattgggattatgttgatgcttggactaaggtgttttggcaccaaaatacccgcttcaagcattcatggctgatatatttcaagaccaatacaatttacaattttcccaattggtttttgcaatggtaggacttctttggaccaattccagagatatttccagaaacagtccaacaaggatttgctcaatttgagagacaatacaattcgcaggaatcacgaattccagcagatcttaaatacttctcaagctttgcactgtcatggatcttctcatggcaatatcgttacagcaagactaaaaagacaaactaatatccatcactacaaagacacgcatttttaaaatggtggtcacagtttgactcatccaaagcagatccagaacaagtaaaactctggtttcaatcccatccagaattcctcaaagcagttgatccagaaacttctgtgtttttgaaccaaaagtctcatctggcagcatttttagcaggatcgaaatcaaaggaggtcctaactaaaaatctaaaggaagttctgcaaatgttacagtaggaagaagaaggttcatcctcaaagaaggaagaaacaagttctgctgaagaagaagaagaagaccccttttaccaaaacgaagatgattgttttggtatctgtttagattaaatttaaattcggtcacaaaaccgtctgtttgtaattaatgtgtaattaatgctgaa

SEQ ID NO: 14023 - DNA, 1144 bp, Glycine max
  Gm_smallRNAprecursor_6856
gatccaaaatgcatcaatgaccaaaacaactatcaatcctaaagggaaactacctttagccaaagctcaaacaccacctaccaaaaaaaactaacaattatatttataaaaataaatttgtaattgttttgcagatggaacctgaattttgggacaaaaatgccttcaaggcgacggccaaggctttcccaccaggatttcactacaaaccaaccaccatcctgaagacaagaaatttttatgaattgattttggtagattcaaattcagtatctatcaaacatttcaaagatccaaaagaccaaacattaaacacccattccacaatccaaatactaaaagttcttcaaccaagacactttggttcaaacttgaacaaaggaaagagattttcagttccatttgatccagtaggttatacctattgggattatgttgatgcttggactaaggtgttttggcaccaaaatacccgcttcaagcattcatggctgatatatttcaagaccaatacaatttacaattttcccaattggtttttgcaatggtaggacttctttggaccaattccagagatatttccagaaacagtccaacaaggatttgctcaatttgagagacaatacaattcgcaggaatcacgaattccagcagatcttaaatacttctcaagctttgcactgtcatggatcttctcatggcaatatcgttacagcaagactaaaaagacaaactaatatccatcactacaaagacacgcatttttaaaatggtggtcacagtttgactcatccaaagcagatccagaacaagtaaaactctggtttcaatcccatccagaattcctcaaagcagttgatccagaaacttctgtgtttttgaaccaaaagtctcatctggcagcatttttagcaggatcgaaatcaaaggaggtcctaactaaaaatctaaaggaagttctgcaaatgttacagtaggaagaagaaggttcatcctcaaagaaggaagaaacaagttctgctgaagaagaagaagaagaccccttttaccaaaacgaagatgattgttttggtatctgtttagattaaatttaaattcggtcacaaaaccgtctgtttgtaattaatgtgtaattaatgctgaa

SEQ ID NO: 14024 - DNA, 1159 bp, Glycine max
  Gm_smallRNAprecursor_6857
gaattttgggacaaaaatgccttcaaggcgacggccaaggctttcccaccaggatttcactacaaaccaaccaccatcctgaagacaagaaatttttatgaattgattttggtagattcaaattcagtatctatcaaacatttcaaagatccaaaagaccaaacattaaacacccattccacaatccaaatactaaaagttcttcaaccaagacactttggttcaaacttgaacaaaggaaagagattttcagttccatttgatccagtaggttatacctattgggattatgttgatgcttggactaaggtgttttggcaccaaaatacccgcttcaagcattcatggctgatatatttcaagaccaatacaatttacaattttcccaattggtttttgcaatggtaggacttctttggaccaattccagagatatttccagaaacagtccaacaaggatttgctcaatttgagagacaatacaattcgcaggaatcacgaattccagcagatcttaaatacttctcaagctttgcactgtcatggatcttctcatggcaatatcgttacagcaagactaaaaagacaaactaatatccatcactacaaagacacgcatttttaaaatggtggtcacagtttgactcatccaaagcagatccagaacaagtaaaactctggtttcaatcccatccagaattcctcaaagcagttgatccagaaacttctgtgtttttgaaccaaaagtctcatctggcagcatttttagcaggatcgaaatcaaaggaggtcctaactaaaaatctaaaggaagttctgcaaatgttacagtaggaagaagaaggttcatcctcaaagaaggaagaaacaagttctgctgaagaagaagaagaagaccccttttaccaaaacgaagatgattgttttggtatctgtttagattaaatttaaattcggtcacaaaaccgtctgtttgtaattaatgtgtaattaatgctgaacaatactacctgtcctgtagccattaaagtcccggtcaaaactacttgtcttgtaacaaacagtcaaatagtcccggtcaaaactaccgacaactaccggtcttagatttttggctatataaggagtcctcaagtatgttgtgaggcaccctttcatt

SEQ ID NO: 14025 - DNA, 1131 bp, Glycine max
  Gm_smallRNAprecursor_6858
cgacggccaaggctttcccaccaggatttcactacaaaccaaccaccatcctgaagacaagaaatttttatgaattgattttggtagattcaaattcagtatctatcaaacatttcaaagatccaaaagaccaaacattaaacacccattccacaatccaaatactaaaagttcttcaaccaagacactttggttcaaacttgaacaaaggaaagagattttcagttccatttgatccagtaggttatacctattgggattatgttgatgcttggactaaggtgttttggcaccaaaatacccgcttcaagcattcatggctgatatatttcaagaccaatacaatttacaattttcccaattggtttttgcaatggtaggacttctttggaccaattccagagatatttccagaaacagtccaacaaggatttgctcaatttgagagacaatacaattcgcaggaatcacgaattccagcagatcttaaatacttctcaagctttgcactgtcatggatcttctcatggcaatatcgttacagcaagactaaaaagacaaactaatatccatcactacaaagacacgcatttttaaaatggtggtcacagtttgactcatccaaagcagatccagaacaagtaaaactctggtttcaatcccatccagaattcctcaaagcagttgatccagaaacttctgtgtttttgaaccaaaagtctcatctggcagcatttttagcaggatcgaaatcaaaggaggtcctaactaaaaatctaaaggaagttctgcaaatgttacagtaggaagaagaaggttcatcctcaaagaaggaagaaacaagttctgctgaagaagaagaagaagaccccttttaccaaaacgaagatgattgttttggtatctgtttagattaaatttaaattcggtcacaaaaccgtctgtttgtaattaatgtgtaattaatgctgaacaatactacctgtcctgtagccattaaagtcccggtcaaaactacttgtcttgtaacaaacagtcaaatagtcccggtcaaaactaccgacaactaccggtcttagatttttggctatataaggagtcctcaagtatgttgtgaggcaccctttcatt

SEQ ID NO: 14026 - DNA, 1057 bp, Glycine max
  Gm_smallRNAprecursor_6859
atttcaagaccaatacaatttacaattttcccaattggtttttgcaatggtaggacttctttggaccaattccagagatatttccagaaacagtccaacaaggatttgctcaatttgagagacaatacaattcgcaggaatcacgaattccagcagatcttaaatacttctcaagctttgcactgtcatggatcttctcatggcaatatcgttacagcaagactaaaaagacaaactaatatccatcactacaaagacacgcatttttaaaatggtggtcacagtttgactcatccaaagcagatccagaacaagtaaaactctggtttcaatcccatccagaattcctcaaagcagttgatccagaaacttctgtgtttttgaaccaaaagtctcatctggcagcatttttagcaggatcgaaatcaaaggaggtcctaactaaaaatctaaaggaagttctgcaaatgttacagtaggaagaagaaggttcatcctcaaagaaggaagaaacaagttctgctgaagaagaagaagaagaccccttttaccaaaacgaagatgattgttttggtatctgtttagattaaatttaaattcggtcacaaaaccgtctgtttgtaattaatgtgtaattaatgctgaacaatactacctgtcctgtagccattaaagtcccggtcaaaactacttgtcttgtaacaaacagtcaaatagtcccggtcaaaactaccgacaactaccggtcttagatttttggctatataaggagtcctcaagtatgttgtgaggcaccctttcatttggccatttttcaggtttctgaagagaggtgctctgaaacaagatttttgtaagcgcttctttcaagtttcaataaatttatattttcattcctcttctctctctttaccgatcctgtgcggctctgccaccgcttcggtttatttatttatgaaaacctgggatttgtaagccggtctccggtgtgcccttgatatctgttttacaagtttatattttcttttccatttatcgtattgcattcttacttcct

SEQ ID NO: 14027 - DNA, 1064 bp, Glycine max
  Gm_smallRNAprecursor_6860
atttcaagaccaatacaatttacaattttcccaattggtttttgcaatggtaggacttctttggaccaattccagagatatttccagaaacagtccaacaaggatttgctcaatttgagagacaatacaattcgcaggaatcacgaattccagcagatcttaaatacttctcaagctttgcactgtcatggatcttctcatggcaatatcgttacagcaagactaaaaagacaaactaatatccatcactacaaagacacgcatttttaaaatggtggtcacagtttgactcatccaaagcagatccagaacaagtaaaactctggtttcaatcccatccagaattcctcaaagcagttgatccagaaacttctgtgtttttgaaccaaaagtctcatctggcagcatttttagcaggatcgaaatcaaaggaggtcctaactaaaaatctaaaggaagttctgcaaatgttacagtaggaagaagaaggttcatcctcaaagaaggaagaaacaagttctgctgaagaagaagaagaagaccccttttaccaaaacgaagatgattgttttggtatctgtttagattaaatttaaattcggtcacaaaaccgtctgtttgtaattaatgtgtaattaatgctgaacaatactacctgtcctgtagccattaaagtcccggtcaaaactacttgtcttgtaacaaacagtcaaatagtcccggtcaaaactaccgacaactaccggtcttagatttttggctatataaggagtcctcaagtatgttgtgaggcaccctttcatttggccatttttcaggtttctgaagagaggtgctctgaaacaagatttttgtaagcgcttctttcaagtttcaataaatttatattttcattcctcttctctctctttaccgatcctgtgcggctctgccaccgcttcggtttatttatttatgaaaacctgggatttgtaagccggtctccggtgtgcccttgatatctgttttacaagtttatattttcttttccatttatcgtattgcattcttacttcctatttatc

SEQ ID NO: 14028 - DNA, 1059 bp, Glycine max
  Gm_smallRNAprecursor_6861
tttcaagaccaatacaatttacaattttcccaattggtttttgcaatggtaggacttctttggaccaattccagagatatttccagaaacagtccaacaaggatttgctcaatttgagagacaatacaattcgcaggaatcacgaattccagcagatcttaaatacttctcaagctttgcactgtcatggatcttctcatggcaatatcgttacagcaagactaaaaagacaaactaatatccatcactacaaagacacgcatttttaaaatggtggtcacagtttgactcatccaaagcagatccagaacaagtaaaactctggtttcaatcccatccagaattcctcaaagcagttgatccagaaacttctgtgtttttgaaccaaaagtctcatctggcagcatttttagcaggatcgaaatcaaaggaggtcctaactaaaaatctaaaggaagttctgcaaatgttacagtaggaagaagaaggttcatcctcaaagaaggaagaaacaagttctgctgaagaagaagaagaagaccccttttaccaaaacgaagatgattgttttggtatctgtttagattaaatttaaattcggtcacaaaaccgtctgtttgtaattaatgtgtaattaatgctgaacaatactacctgtcctgtagccattaaagtcccggtcaaaactacttgtcttgtaacaaacagtcaaatagtcccggtcaaaactaccgacaactaccggtcttagatttttggctatataaggagtcctcaagtatgttgtgaggcaccctttcatttggccatttttcaggtttctgaagagaggtgctctgaaacaagatttttgtaagcgcttctttcaagtttcaataaatttatattttcattcctcttctctctctttaccgatcctgtgcggctctgccaccgcttcggtttatttatttatgaaaacctgggatttgtaagccggtctccggtgtgcccttgatatctgttttacaagtttatattttcttttccatttatcgtattgcattcttacttcctatt

SEQ ID NO: 14029 - DNA, 1060 bp, Glycine max
  Gm_smallRNAprecursor_6862
tttcaagaccaatacaatttacaattttcccaattggtttttgcaatggtaggacttctttggaccaattccagagatatttccagaaacagtccaacaaggatttgctcaatttgagagacaatacaattcgcaggaatcacgaattccagcagatcttaaatacttctcaagctttgcactgtcatggatcttctcatggcaatatcgttacagcaagactaaaaagacaaactaatatccatcactacaaagacacgcatttttaaaatggtggtcacagtttgactcatccaaagcagatccagaacaagtaaaactctggtttcaatcccatccagaattcctcaaagcagttgatccagaaacttctgtgtttttgaaccaaaagtctcatctggcagcatttttagcaggatcgaaatcaaaggaggtcctaactaaaaatctaaaggaagttctgcaaatgttacagtaggaagaagaaggttcatcctcaaagaaggaagaaacaagttctgctgaagaagaagaagaagaccccttttaccaaaacgaagatgattgttttggtatctgtttagattaaatttaaattcggtcacaaaaccgtctgtttgtaattaatgtgtaattaatgctgaacaatactacctgtcctgtagccattaaagtcccggtcaaaactacttgtcttgtaacaaacagtcaaatagtcccggtcaaaactaccgacaactaccggtcttagatttttggctatataaggagtcctcaagtatgttgtgaggcaccctttcatttggccatttttcaggtttctgaagagaggtgctctgaaacaagatttttgtaagcgcttctttcaagtttcaataaatttatattttcattcctcttctctctctttaccgatcctgtgcggctctgccaccgcttcggtttatttatttatgaaaacctgggatttgtaagccggtctccggtgtgcccttgatatctgttttacaagtttatattttcttttccatttatcgtattgcattcttacttcctattt

SEQ ID NO: 14030 - DNA, 1060 bp, Glycine max; identical to SEQ ID NO: 14029
  Gm_smallRNAprecursor_6863

SEQ ID NO: 14031 - DNA, 1063 bp, Glycine max
  Gm_smallRNAprecursor_6864
tttcaagaccaatacaatttacaattttcccaattggtttttgcaatggtaggacttctttggaccaattccagagatatttccagaaacagtccaacaaggatttgctcaatttgagagacaatacaattcgcaggaatcacgaattccagcagatcttaaatacttctcaagctttgcactgtcatggatcttctcatggcaatatcgttacagcaagactaaaaagacaaactaatatccatcactacaaagacacgcatttttaaaatggtggtcacagtttgactcatccaaagcagatccagaacaagtaaaactctggtttcaatcccatccagaattcctcaaagcagttgatccagaaacttctgtgtttttgaaccaaaagtctcatctggcagcatttttagcaggatcgaaatcaaaggaggtcctaactaaaaatctaaaggaagttctgcaaatgttacagtaggaagaagaaggttcatcctcaaagaaggaagaaacaagttctgctgaagaagaagaagaagaccccttttaccaaaacgaagatgattgttttggtatctgtttagattaaatttaaattcggtcacaaaaccgtctgtttgtaattaatgtgtaattaatgctgaacaatactacctgtcctgtagccattaaagtcccggtcaaaactacttgtcttgtaacaaacagtcaaatagtcccggtcaaaactaccgacaactaccggtcttagatttttggctatataaggagtcctcaagtatgttgtgaggcaccctttcatttggccatttttcaggtttctgaagagaggtgctctgaaacaagatttttgtaagcgcttctttcaagtttcaataaatttatattttcattcctcttctctctctttaccgatcctgtgcggctctgccaccgcttcggtttatttatttatgaaaacctgggatttgtaagccggtctccggtgtgcccttgatatctgttttacaagtttatattttcttttccatttatcgtattgcattcttacttcctatttatc

SEQ ID NO: 14032 - DNA, 1056 bp, Glycine max
  Gm_smallRNAprecursor_6865
caagaccaatacaatttacaattttcccaattggtttttgcaatggtaggacttctttggaccaattccagagatatttccagaaacagtccaacaaggatttgctcaatttgagagacaatacaattcgcaggaatcacgaattccagcagatcttaaatacttctcaagctttgcactgtcatggatcttctcatggcaatatcgttacagcaagactaaaaagacaaactaatatccatcactacaaagacacgcatttttaaaatggtggtcacagtttgactcatccaaagcagatccagaacaagtaaaactctggtttcaatcccatccagaattcctcaaagcagttgatccagaaacttctgtgtttttgaaccaaaagtctcatctggcagcatttttagcaggatcgaaatcaaaggaggtcctaactaaaaatctaaaggaagttctgcaaatgttacagtaggaagaagaaggttcatcctcaaagaaggaagaaacaagttctgctgaagaagaagaagaagaccccttttaccaaaacgaagatgattgttttggtatctgtttagattaaatttaaattcggtcacaaaaccgtctgtttgtaattaatgtgtaattaatgctgaacaatactacctgtcctgtagccattaaagtcccggtcaaaactacttgtcttgtaacaaacagtcaaatagtcccggtcaaaactaccgacaactaccggtcttagatttttggctatataaggagtcctcaagtatgttgtgaggcaccctttcatttggccatttttcaggtttctgaagagaggtgctctgaaacaagatttttgtaagcgcttctttcaagtttcaataaatttatattttcattcctcttctctctctttaccgatcctgtgcggctctgccaccgcttcggtttatttatttatgaaaacctgggatttgtaagccggtctccggtgtgcccttgatatctgttttacaagtttatattttcttttccatttatcgtattgcattcttacttcctatt

SEQ ID NO: 14033 - DNA, 1056 bp, Glycine max; identical to SEQ ID NO: 14032
  Gm_smallRNAprecursor_6866

SEQ ID NO: 14034 - DNA, 1057 bp, Glycine max
  Gm_smallRNAprecursor_6867
caagaccaatacaatttacaattttcccaattggtttttgcaatggtaggacttctttggaccaattccagagatatttccagaaacagtccaacaaggatttgctcaatttgagagacaatacaattcgcaggaatcacgaattccagcagatcttaaatacttctcaagctttgcactgtcatggatcttctcatggcaatatcgttacagcaagactaaaaagacaaactaatatccatcactacaaagacacgcatttttaaaatggtggtcacagtttgactcatccaaagcagatccagaacaagtaaaactctggtttcaatcccatccagaattcctcaaagcagttgatccagaaacttctgtgtttttgaaccaaaagtctcatctggcagcatttttagcaggatcgaaatcaaaggaggtcctaactaaaaatctaaaggaagttctgcaaatgttacagtaggaagaagaaggttcatcctcaaagaaggaagaaacaagttctgctgaagaagaagaagaagaccccttttaccaaaacgaagatgattgttttggtatctgtttagattaaatttaaattcggtcacaaaaccgtctgtttgtaattaatgtgtaattaatgctgaacaatactacctgtcctgtagccattaaagtcccggtcaaaactacttgtcttgtaacaaacagtcaaatagtcccggtcaaaactaccgacaactaccggtcttagatttttggctatataaggagtcctcaagtatgttgtgaggcaccctttcatttggccatttttcaggtttctgaagagaggtgctctgaaacaagatttttgtaagcgcttctttcaagtttcaataaatttatattttcattcctcttctctctctttaccgatcctgtgcggctctgccaccgcttcggtttatttatttatgaaaacctgggatttgtaagccggtctccggtgtgcccttgatatctgttttacaagtttatattttcttttccatttatcgtattgcattcttacttcctattt

SEQ ID NO: 14035 - DNA, 1057 bp, Glycine max; identical to SEQ ID NO: 14034
  Gm_smallRNAprecursor_6868

SEQ ID NO: 14036 - DNA, 1057 bp, Glycine max; identical to SEQ ID NO: 14034
  Gm_smallRNAprecursor_6869

SEQ ID NO: 14037 - DNA, 1057 bp, Glycine max; identical to SEQ ID NO: 14034
  Gm_smallRNAprecursor_6870

SEQ ID NO: 14038 - DNA, 1155 bp, Glycine max
  Gm_smallRNAprecursor_6871
taggacttctttggaccaattccagagatatttccagaaacagtccaacaaggatttgctcaatttgagagacaatacaattcgcaggaatcacgaattccagcagatcttaaatacttctcaagctttgcactgtcatggatcttctcatggcaatatcgttacagcaagactaaaaagacaaactaatatccatcactacaaagacacgcatttttaaaatggtggtcacagtttgactcatccaaagcagatccagaacaagtaaaactctggtttcaatcccatccagaattcctcaaagcagttgatccagaaacttctgtgtttttgaaccaaaagtctcatctggcagcatttttagcaggatcgaaatcaaaggaggtcctaactaaaaatctaaaggaagttctgcaaatgttacagtaggaagaagaaggttcatcctcaaagaaggaagaaacaagttctgctgaagaagaagaagaagaccccttttaccaaaacgaagatgattgttttggtatctgtttagattaaatttaaattcggtcacaaaaccgtctgtttgtaattaatgtgtaattaatgctgaacaatactacctgtcctgtagccattaaagtcccggtcaaaactacttgtcttgtaacaaacagtcaaatagtcccggtcaaaactaccgacaactaccggtcttagatttttggctatataaggagtcctcaagtatgttgtgaggcaccctttcatttggccatttttcaggtttctgaagagaggtgctctgaaacaagatttttgtaagcgcttctttcaagtttcaataaatttatattttcattcctcttctctctctttaccgatcctgtgcggctctgccaccgcttcggtttatttatttatgaaaacctgggatttgtaagccggtctccggtgtgcccttgatatctgttttacaagtttatattttcttttccatttatcgtattgcattcttacttcctatttatccgtttgatcttattctgctgatcttattcctatatatatatagattttggacacacaataattttgctttggacttaaatattacattcaacttgttattgttaaatattattttgttctcaaattattttttttaataaa

SEQ ID NO: 14039 - DNA, 1142 bp, Glycine max
  Gm_smallRNAprecursor_6872
gaccaattccagagatatttccagaaacagtccaacaaggatttgctcaatttgagagacaatacaattcgcaggaatcacgaattccagcagatcttaaatacttctcaagctttgcactgtcatggatcttctcatggcaatatcgttacagcaagactaaaaagacaaactaatatccatcactacaaagacacgcatttttaaaatggtggtcacagtttgactcatccaaagcagatccagaacaagtaaaactctggtttcaatcccatccagaattcctcaaagcagttgatccagaaacttctgtgtttttgaaccaaaagtctcatctggcagcatttttagcaggatcgaaatcaaaggaggtcctaactaaaaatctaaaggaagttctgcaaatgttacagtaggaagaagaaggttcatcctcaaagaaggaagaaacaagttctgctgaagaagaagaagaagaccccttttaccaaaacgaagatgattgttttggtatctgtttagattaaatttaaattcggtcacaaaaccgtctgtttgtaattaatgtgtaattaatgctgaacaatactacctgtcctgtagccattaaagtcccggtcaaaactacttgtcttgtaacaaacagtcaaatagtcccggtcaaaactaccgacaactaccggtcttagatttttggctatataaggagtcctcaagtatgttgtgaggcaccctttcatttggccatttttcaggtttctgaagagaggtgctctgaaacaagatttttgtaagcgcttctttcaagtttcaataaatttatattttcattcctcttctctctctttaccgatcctgtgcggctctgccaccgcttcggtttatttatttatgaaaacctgggatttgtaagccggtctccggtgtgcccttgatatctgttttacaagtttatattttcttttccatttatcgtattgcattcttacttcctatttatccgtttgatcttattctgctgatcttattcctatatatatatagattttggacacacaataattttgctttggacttaaatattacattcaacttgttattgttaaatattattttgttctcaaattattttttttaataaa

SEQ ID NO: 14040 - DNA, 1079 bp, Glycine max
  Gm_smallRNAprecursor_6873
tgagatagaagaatctagaactatcatgatactaatctatcatgaaaactctagaaagacctaaagtaatgtagaaacattcaccaccattgagaggttggtgacttgagcctataaataggcaattggtatgttgtaattgataatccaagaaatcaatgacatagccttctttctaaaacaattctctaaaactatcaactatcatctaataaactaccaacaatggtatcaaagctacgttcggtcatacattgggcatagttatattacctacctaccattccaaaatcctcccaactacttcaaaaatttcctttgtactattaacccactccaataatattttttctaagctatggataacactactcaatcgtctatttctgtccctatcttcaatggtgaaaattatgatttttggcatgttaaaatggaaacatatttttcatctcaagatttatgggacatagtagaagaaggcctcaccgttcccgcagatacttcagctcttaatgcatctcaagaaaaagagttgaagaaaaataaacagaaaaattcaaaggcgttgttcaccttgcaacaagcggtgactgatccaattttcccaagaattatgggagctaagactgccaaagaagcgtggaacacattgcaggaggagtttcaaggaagtgttaaggtacgtgtcgttaaacttcaatctctaagaagagattttgaactattgaagatgaaggagtctgagacagttaaagattactattctaaagttaaagaaatagttaatcaaatgagagcttttgggcaagatattcttgacaagaaaattgttgaaaaaattctaattactatgccccaaaagtttgacccaatcgtgacaacgattgaggaaaccaaagatctgtccactctatcaaagacagaacttgtgggctctcttgaagcatatgagcaaatactgtataggcataaagaagatacacttgaaaatgccttccagtcaaagtttaaattttagccccaaaacaaagaaaatggaggaaaggaaaattatggagaaacttccagaagaagag

SEQ ID NO: 14041 - DNA, 1037 bp, Glycine max
  Gm_smallRNAprecursor_6874
aaagacccaaaagaaggataaaaataagagttgcatatggaagaagagatccattttctttgatcttccgtactggtctgatctagatgttagacattgtattgatgttatgtatgtagagaaaaatgtatgtgacagtgtcattgggacactccttaatattcagggcaagacgaaagatggtctaaatacccgtcaagatctagctgacatgggcatacgatcgcaattgcatccaaggtctgatggtaaaaaaatatatttgcctccagcttgtcatactttatccagaaaggagaagatcagtttgtgccagtgtctgcgtcgggttaaagtcccacaaggatatcagtttggtcaatgtctcagcatatctgttatacagttgtggattctgtaagtcattttagattactattaattaccaaagtaattgttttaaattcatacataattaactttgacttaacaacacagccatctgactgagacaagtgtgcgagcggggaattctgatgtgtatggattcctcgagccacagtccattcagagatctgggcaatcacaatttgaatccgaaagttacatcaagagttggatacagagttcaaaacgagatgtttaccttggagcctacctgaatgggtaagtcaaacacaataattgaatttaaataatctatactactacaataacccatattcgtctctactgcagcggacactggcaaatggtcgtcattctgcctaaggaaaacctagttatctggttttgttctttacataacaggccagacaactaccttaagggaataattaacaggtcagtattgttttcaatacattttcattggcataactcagcaacatcaatagtttaatgttcctcatattcaacactagttctttgaaaggacttgatgatactccacaaccgaaatccaaggctgctgctaggtggattgttgttaaggtacgtgatttaaataaaagttctacttatatatattttatgtgtgtgtacactaattgtagtta

SEQ ID NO: 14042 - DNA, 1052 bp, Glycine max
  Gm_smallRNAprecursor_6875
ataaatattcaaatcaaatgttatcttaagtattttggaaaacgtaatctagaatattgattttcacgttgcaggttactcaattcgtaaaatcacatcctattcacattctaaattctttgagaaaataatattatcagatctaagaaaaaagagcatgtaaacgagggaaatttagaaattttgataattacaaaattagaaggctgtaggatgaaagtcgtggtatgttggaagtaacaacctttcagaaattgaaataagtgctcattttgtatggagtgttgctaggtgaacccaacattctttaaaaatggccaaattacccctgcctttttttctccctttatgaatcaagttgatccgcaagttgattttaagacttacggatcaagttgatccataagtcttttactgatcaacttgatctgtaactctcaaaaatcaacttgcggatcaacttgatccgtaagaagcttgtggatcaagttgatccgtaaaagacttacgaatcaacttgatccgtaagtcttaaaaattagcttgcggatcaacttgatccgtaagtcttaaaaatcaacttgcggatcaagttgatccgcaagcttcttacggatcaagttgatccgtaagtcacttgcgaatcaacttgattcataagaagcttgtggatcatctatatcaactgtggatcaactaaaacctatgtggatcaactcattgcatatgcggatcaacctaaatgagctgggtgcacaaaaacatttttaaaaatacataagggtatttttatcttttcatgttaagtgctgggtgcactagcaataatgctgggtgcacctagcaacacccttttgtatggctacgtttggaggctattgggctcgcaaggcctgcccaaagattttggcaacagcttgggacacctagcagttttcataaatgtcgaaaataccattatgggtattttcagttataaatagcagcacccatttttcatttctgcagtgccttcttttttctgaaaatctcagtcccttagtgtaagttgc

SEQ ID NO: 14043 - DNA, 1051 bp, Glycine max
  Gm_smallRNAprecursor_6876
taaatattcaaatcaaatgttatcttaagtattttggaaaacgtaatctagaatattgattttcacgttgcaggttactcaattcgtaaaatcacatcctattcacattctaaattctttgagaaaataatattatcagatctaagaaaaaagagcatgtaaacgagggaaatttagaaattttgataattacaaaattagaaggctgtaggatgaaagtcgtggtatgttggaagtaacaacctttcagaaattgaaataagtgctcattttgtatggagtgttgctaggtgaacccaacattctttaaaaatggccaaattacccctgcctttttttctccctttatgaatcaagttgatccgcaagttgattttaagacttacggatcaagttgatccataagtcttttactgatcaacttgatctgtaactctcaaaaatcaacttgcggatcaacttgatccgtaagaagcttgtggatcaagttgatccgtaaaagacttacgaatcaacttgatccgtaagtcttaaaaattagcttgcggatcaacttgatccgtaagtcttaaaaatcaacttgcggatcaagttgatccgcaagcttcttacggatcaagttgatccgtaagtcacttgcgaatcaacttgattcataagaagcttgtggatcatctatatcaactgtggatcaactaaaacctatgtggatcaactcattgcatatgcggatcaacctaaatgagctgggtgcacaaaaacatttttaaaaatacataagggtatttttatcttttcatgttaagtgctgggtgcactagcaataatgctgggtgcacctagcaacacccttttgtatggctacgtttggaggctattgggctcgcaaggcctgcccaaagattttggcaacagcttgggacacctagcagttttcataaatgtcgaaaataccattatgggtattttcagttataaatagcagcacccatttttcatttctgcagtgccttcttttttctgaaaatctcagtcccttagtgtaagttgc

SEQ ID NO: 14044 - DNA, 1063 bp, Glycine max
  Gm_smallRNAprecursor_6877
aggcgatgtgagttcattgaaggctaacaaggctgaagatgaagaggagccactcgatgaaaatgacctcacttaacctggctctttttctatctgtgtctatttagtaggaatgttgatgaacccatttcaatttaatgagtgaattgaattgatcagttatagattggtttttgtataaaaaaaacagttcttttgtgatacatgtgcaatgcaggtaataagaggagcgctgttgtttattcgattgagatatgtcacttggatgtacttgttgataagcttattttttttggtgatggctaagtatttggcacaattttagtgtattatgaaattcacaacctttactggtgattagggaaggggcgatgctaggtgcaccagctttattgcttgtgcaccccgtattttttgttaattccaaaattaccctatggttgatccatatgatttgtatggatgaacttaatccgtaagtataatttaaacatacgaatcaacttgatccgtatgactcatacggatcaacttgatccatatgactcatggatcaactataactcatacggatcaacttgatccgtatgagtcatatggatcaactatgactcatatggatcaacttgatccgtatgactcatacgaatcaacttgagtgaagaacattttcgttcattcatttaaaatgctgggtgcaccaacaataatgctgggtgcacctagcatcacctttagggaagactatggtattaaaaactcgataacacattaaaatatggactcaactcaagttttaggacatttatcttttaattttaatatttcaaataagattcaatgattaatagtattcattattctcatattttacaataataaaaaattcatctctttctcaaaatcaactttaacatatcattgtgactttgcttttattttatttttttcttgtgtgagagagagataataagtgacactacatttgtcacgtgtctgaaataaaattttgtatattttgatactattatgatattcttttacctcttttcttacatgtcct

SEQ ID NO: 14045 - DNA, 1107 bp, Glycine max
  Gm_smallRNAprecursor_6878
ttgaaggctaacaaggctgaagatgaagaggagccactcgatgaaaatgacctcacttaacctggctctttttctatctgtgtctatttagtaggaatgttgatgaacccatttcaatttaatgagtgaattgaattgatcagttatagattggtttttgtataaaaaaaacagttcttttgtgatacatgtgcaatgcaggtaataagaggagcgctgttgtttattcgattgagatatgtcacttggatgtacttgttgataagcttattttttttggtgatggctaagtatttggcacaattttagtgtattatgaaattcacaacctttactggtgattagggaaggggcgatgctaggtgcaccagctttattgcttgtgcaccccgtattttttgttaattccaaaattaccctatggttgatccatatgatttgtatggatgaacttaatccgtaagtataatttaaacatacgaatcaacttgatccgtatgactcatacggatcaacttgatccatatgactcatggatcaactataactcatacggatcaacttgatccgtatgagtcatatggatcaactatgactcatatggatcaacttgatccgtatgactcatacgaatcaacttgagtgaagaacattttcgttcattcatttaaaatgctgggtgcaccaacaataatgctgggtgcacctagcatcacctttagggaagactatggtattaaaaactcgataacacattaaaatatggactcaactcaagttttaggacatttatcttttaattttaatatttcaaataagattcaatgattaatagtattcattattctcatattttacaataataaaaaattcatctctttctcaaaatcaactttaacatatcattgtgactttgcttttattttatttttttcttgtgtgagagagagataataagtgacactacatttgtcacgtgtctgaaataaaattttgtatattttgatactattatgatattcttttacctcttttcttacatgtccttttaaaactttcatctaagcgaaaccttttctaattagaatttattttatactaaaatat

SEQ ID NO: 14046 - DNA, 1061 bp, Glycine max
  Gm_smallRNAprecursor_6879
atgacctcacttaacctggctctttttctatctgtgtctatttagtaggaatgttgatgaacccatttcaatttaatgagtgaattgaattgatcagttatagattggtttttgtataaaaaaaacagttcttttgtgatacatgtgcaatgcaggtaataagaggagcgctgttgtttattcgattgagatatgtcacttggatgtacttgttgataagcttattttttttggtgatggctaagtatttggcacaattttagtgtattatgaaattcacaacctttactggtgattagggaaggggcgatgctaggtgcaccagctttattgcttgtgcaccccgtattttttgttaattccaaaattaccctatggttgatccatatgatttgtatggatgaacttaatccgtaagtataatttaaacatacgaatcaacttgatccgtatgactcatacggatcaacttgatccatatgactcatggatcaactataactcatacggatcaacttgatccgtatgagtcatatggatcaactatgactcatatggatcaacttgatccgtatgactcatacgaatcaacttgagtgaagaacattttcgttcattcatttaaaatgctgggtgcaccaacaataatgctgggtgcacctagcatcacctttagggaagactatggtattaaaaactcgataacacattaaaatatggactcaactcaagttttaggacatttatcttttaattttaatatttcaaataagattcaatgattaatagtattcattattctcatattttacaataataaaaaattcatctctttctcaaaatcaactttaacatatcattgtgactttgcttttattttatttttttcttgtgtgagagagagataataagtgacactacatttgtcacgtgtctgaaataaaattttgtatattttgatactattatgatattcttttacctcttttcttacatgtccttttaaaactttcatctaagcgaaaccttttctaattagaatttattttatactaaaatat

SEQ ID NO: 14047 - DNA, 1051 bp, Glycine max
  Gm_smallRNAprecursor_6880
tatttcaagatcacacaactttttgctaatagaagtcgacaaactcaagcaatgatcaactctggatcacaatattctgaagtcgtcttcgatgcaatgaatagcagtcaacaacaatctaatacacaaattgtaaatgaattcgacagacacaatcacacttttattataacagagactcaatccccactcgaaacacccaaaccacccgaaaggtttagagtaatgttataatcccaaaagtgtgattgtggtgaatatcaggctaaacacttaccgtgttctcacatcatagctgcctataaatctatcaatgttgatcccatgacccatgtgccgatgttattcactttacaacacatttttcacatttacgacaactcctttggtttattgccacacgaatcaatgtggcaagaatatgaaggagattagtggggtcctgatccaaggagaaagagaactgcaaagggtcatcccgtttcaactcgcattcctactgagatggacgaagacgaaaatgaacgagcacatagaaaaaaatgtggactttgtcggcaacatggtcatagcagaaacaattgtcctaatatatcctcatcttaagtttttccttaaccaaatgtcattgtttaaatattttattgataatgcagtgtaatattcttctgtagataacttgttaaaagctttagttttatcatttgtaattaaatctaatgacataaataaactaattatatttagtaaaataattaaattaaaaattaaaatttttgactaaaatcaatatattattatacaaaattcagattttaaaacaaatattcaacaaaaaatatcttagataaattaaataatataatgaaaataattaaatttaataatatcatttttttaataaaaaattataaaataatccttcaaaaattaatttaataaatatataattttaatatataataaaaataattttatataatataatatttaattttaattaaattttaatttatatatatatatatatatatatataaaatcaaaacat

SEQ ID NO: 14048 - DNA, 1079 bp, Glycine max
  Gm_smallRNAprecursor_6881
gtgtaccaattgggagactatgtgaaagcaagataatgtgtgatttattagccgtggctgctatatatatagatggttgtgaccgagcgattacttcactttgtttacaaaaaaatagacacgcatgaacatgtttcgtgtttatgtttccttcagaatgtatagtcaagttagtcaatgtattgtcgcgctcaaactttaatacgcatacatgtcattatgtgttgtcaattatgacaatgatgtatgctatacgcgtaaatgatttttgttggaccgacaatttttttgcttaacgaaacgagtacttaataatattaattggttagtagtggcttacaacaaattatatcgcataatgaatacaattacataaacaatgcatgtttagtcttcatataggtcgacatagtgtcttttgaatgacatcaagcttgtgtattgatgcattctactaatatatggaattgtccactgctttgcctgagaataacaattgcttgaccacaacaacgctggaggcggtaagagggacaatggtctttcaataaacctgttgtacatgaacaaagattatatcatgcggtgaccgtgtcaaatgaaccagcgaagtcattgcataattgttatactaactatattcaatgtacctgaacaaaatgatttccaaacacgtgaccgacacatatcatgcggtgctcagaagaatcaggtggtggttgacttctaagaggaaaaaatgtcatgctttgttgtcgggacaacgatacaaggattacgttataccgtgatgcaatcacatatcccatcttcgttatatccatccacttgtccacactaacctgaatcaaccaaacatacacatgtaagtaatttaaagtttgttattaaaaaaattaacctaaaaacataccttcgaaaacccatcaacaagtagggacaactttaattgttcaaatctctctgtgccaccgaagaggttcatgtactcatgcgaccacctgccaagttctttaatcaattcattacgcactaacggccatgaatcttcccccatacctaataaagcggcaatggac

SEQ ID NO: 14049 - DNA, 1091 bp, Glycine max
  Gm_smallRNAprecursor_6882
ttgacttgcaatgcttcaggatgtgaaagaaattggagtgtgtttgagcaagtaattgtgacaaaactctaactatactttttaattttatttaattttgatgatcaagttttatttggagtatatttgagattgaaatcaacatttatttgttatgttgtagattcattccaaaaaaagaaataggcttgagcacaagaggttgcatgatttggtgtttgtcaaatacaaccaacaattgaagcaaaaatataatgcaagagatgaaattgatccaatttctcttaatgatattgatgtgtgcaatgaatggcttgtgggagagatggatcaagatgatgataatgatgctagaaatgatttggtatttgaagatgatgatactctaaattgggcaactgtgtatcaggcttcgagggttggagagtgtaggatgtatactaggcgcaaaaagcaaaaaacaacaagtgttgttgctgcccaaacttctaaaaaacaggcaatggttgttggatcttcatcaaggaagcaaaaaacagtccagaaaatgatgaggatctagattttgaggagaatattgatcttgaatctgaagaagaagaaatcatggtcaattttgaggcgtctgatggggaagagggagagggagatgctccattaccatatgataacaacgaagatgattatgttgggattggagaagatgattagagcctcaactttcactttgcactttacattatgtttttatcattttcttattttgaactttttaatgagtttatttggtgtttgtaattgattattgtatgaactcatgaaacttttttagtttatttgaatacaattcattatttttttttcaattttaatgagtttatatatatgtattttttttgtctgccatgacatccgccattttccgccatgccatccgcaatatttttatggcggatttttggctttctgcaatgaaccgccatccgccattaacaacattgtttttatttaataatatttatactgcatggattggttctgattttaatttgttggtttgatttcatttaacaaatagtcaaaaccgatgt

SEQ ID NO: 14050 - DNA, 1091 bp, Glycine max; identical to SEQ ID NO: 14049
  Gm_smallRNAprecursor_6883

SEQ ID NO: 14051 - DNA, 1056 bp, Glycine max
  Gm_smallRNAprecursor_6884
attgattgggtatttgacctcgaatgttaaaattgaccctatctttgaaatctatattgaattgtctttgatttggtatatagagctctatgtttggacaaacatagatgaacctaagatatctcaaaacaaggctatgaggagctaacagggatatatatatatatatatatataccagaggtcagcggagtaagatcaaacggacaaataggaagtaagaatgcagtatgataaaatcaaacgtaagaattataaacttgtaaagcagatatcaagggcacaccgaaacggcttacaaacccaggtttttgaaaacaaagaaatcgaagcggcggcagagccgcacaggatcggtgaggggagaagggagatatgaaaaatagaacttgaaatttattgaaaccgaaagaaaagcttacaaagagtttttccctaggcagagcttctctctctaaaacctgattctgagtctatctgaaagggtgcctcacaaaggggacgaggactcctttaaatagacccaatttttactgtttctacagtatcggtaatgtttaccggaactgttacaaaactttttacaaattacattatttaaaagaaactgacaagttagttacaataattcatgattattacaactaattaatcgtcgtccaatgatataccaaaacagtcatcttcattctggtagaatggatcatcttcttggtcatcattagtctctgatgattcagtttccttcttggaaggttcttcttccacttcctgttgaagtagttggagaacttctttgagattctgagcaagactttctttagattttgcgcttgctaagaatgctgctagttgcgacttctgatttagaaacaaagatgtctctggatcagcaggtttaaggaactcaggattgctctggaaccagttcttgacttgatctggagcagcctttgaagtatcgaattgtgaccaccattttacaaaggcgtgtctctgtaacggtggatattgtttgttgttttcagtttttccgtatatgtattgccatgaaaag

SEQ ID NO: 14052 - DNA, 1216 bp, Glycine max
  Gm_smallRNAprecursor_6885
attgaattgtctttgatttggtatatagagctctatgtttggacaaacatagatgaacctaagatatctcaaaacaaggctatgaggagctaacagggatatatatatatatatatatataccagaggtcagcggagtaagatcaaacggacaaataggaagtaagaatgcagtatgataaaatcaaacgtaagaattataaacttgtaaagcagatatcaagggcacaccgaaacggcttacaaacccaggtttttgaaaacaaagaaatcgaagcggcggcagagccgcacaggatcggtgaggggagaagggagatatgaaaaatagaacttgaaatttattgaaaccgaaagaaaagcttacaaagagtttttccctaggcagagcttctctctctaaaacctgattctgagtctatctgaaagggtgcctcacaaaggggacgaggactcctttaaatagacccaatttttactgtttctacagtatcggtaatgtttaccggaactgttacaaaactttttacaaattacattatttaaaagaaactgacaagttagttacaataattcatgattattacaactaattaatcgtcgtccaatgatataccaaaacagtcatcttcattctggtagaatggatcatcttcttggtcatcattagtctctgatgattcagtttccttcttggaaggttcttcttccacttcctgttgaagtagttggagaacttctttgagattctgagcaagactttctttagattttgcgcttgctaagaatgctgctagttgcgacttctgatttagaaacaaagatgtctctggatcagcaggtttaaggaactcaggattgctctggaaccagttcttgacttgatctggagcagcctttgaagtatcgaattgtgaccaccattttacaaaggcgtgtctctgtaacggtggatattgtttgttgttttcagtttttccgtatatgtattgccatgaaaagatccatgacaaggcaaaactggaaaaatactttaaatctgccggaattcgtgattccttgctattatagagcttgttgaattgttcgaatccctgttggacttcttctggaaatatttgtggaattggtccgaagtagttccaccattgaaggaaccaatttggaaaattatatgcagtattatttttgaagtaaatcagcaatgaatgcttgaa

SEQ ID NO: 14053 - DNA, 1138 bp, Glycine max
  Gm_smallRNAprecursor_6886
cacaccgaaacggcttacaaacccaggtttttgaaaacaaagaaatcgaagcggcggcagagccgcacaggatcggtgaggggagaagggagatatgaaaaatagaacttgaaatttattgaaaccgaaagaaaagcttacaaagagtttttccctaggcagagcttctctctctaaaacctgattctgagtctatctgaaagggtgcctcacaaaggggacgaggactcctttaaatagacccaatttttactgtttctacagtatcggtaatgtttaccggaactgttacaaaactttttacaaattacattatttaaaagaaactgacaagttagttacaataattcatgattattacaactaattaatcgtcgtccaatgatataccaaaacagtcatcttcattctggtagaatggatcatcttcttggtcatcattagtctctgatgattcagtttccttcttggaaggttcttcttccacttcctgttgaagtagttggagaacttctttgagattctgagcaagactttctttagattttgcgcttgctaagaatgctgctagttgcgacttctgatttagaaacaaagatgtctctggatcagcaggtttaaggaactcaggattgctctggaaccagttcttgacttgatctggagcagcctttgaagtatcgaattgtgaccaccattttacaaaggcgtgtctctgtaacggtggatattgtttgttgttttcagtttttccgtatatgtattgccatgaaaagatccatgacaaggcaaaactggaaaaatactttaaatctgccggaattcgtgattccttgctattatagagcttgttgaattgttcgaatccctgttggacttcttctggaaatatttgtggaattggtccgaagtagttccaccattgaaggaaccaatttggaaaattatatgcagtattatttttgaagtaaatcagcaatgaatgcttgaatttactattttgatgccagaacacattggtccaggcgtcaacgtaatcccaataattataccctgcaggatcaaatggtgcagagaattttttgggttggtttaagtttgagccataatgtcgttgctgcataaccttcaggatttg

SEQ ID NO: 14054 - DNA, 1071 bp, Glycine max
  Gm_smallRNAprecursor_6887
cggcttacaaacccaggtttttgaaaacaaagaaatcgaagcggcggcagagccgcacaggatcggtgaggggagaagggagatatgaaaaatagaacttgaaatttattgaaaccgaaagaaaagcttacaaagagtttttccctaggcagagcttctctctctaaaacctgattctgagtctatctgaaagggtgcctcacaaaggggacgaggactcctttaaatagacccaatttttactgtttctacagtatcggtaatgtttaccggaactgttacaaaactttttacaaattacattatttaaaagaaactgacaagttagttacaataattcatgattattacaactaattaatcgtcgtccaatgatataccaaaacagtcatcttcattctggtagaatggatcatcttcttggtcatcattagtctctgatgattcagtttccttcttggaaggttcttcttccacttcctgttgaagtagttggagaacttctttgagattctgagcaagactttctttagattttgcgcttgctaagaatgctgctagttgcgacttctgatttagaaacaaagatgtctctggatcagcaggtttaaggaactcaggattgctctggaaccagttcttgacttgatctggagcagcctttgaagtatcgaattgtgaccaccattttacaaaggcgtgtctctgtaacggtggatattgtttgttgttttcagtttttccgtatatgtattgccatgaaaagatccatgacaaggcaaaactggaaaaatactttaaatctgccggaattcgtgattccttgctattatagagcttgttgaattgttcgaatccctgttggacttcttctggaaatatttgtggaattggtccgaagtagttccaccattgaaggaaccaatttggaaaattatatgcagtattatttttgaagtaaatcagcaatgaatgcttgaatttactattttgatgccagaacacattggtccaggcgtcaacgtaatcccaataattataccctgcaggatcaaatggtgcagagaattt

SEQ ID NO: 14055 - DNA, 1072 bp, Glycine max
  Gm_smallRNAprecursor_6888
cggcttacaaacccaggtttttgaaaacaaagaaatcgaagcggcggcagagccgcacaggatcggtgaggggagaagggagatatgaaaaatagaacttgaaatttattgaaaccgaaagaaaagcttacaaagagtttttccctaggcagagcttctctctctaaaacctgattctgagtctatctgaaagggtgcctcacaaaggggacgaggactcctttaaatagacccaatttttactgtttctacagtatcggtaatgtttaccggaactgttacaaaactttttacaaattacattatttaaaagaaactgacaagttagttacaataattcatgattattacaactaattaatcgtcgtccaatgatataccaaaacagtcatcttcattctggtagaatggatcatcttcttggtcatcattagtctctgatgattcagtttccttcttggaaggttcttcttccacttcctgttgaagtagttggagaacttctttgagattctgagcaagactttctttagattttgcgcttgctaagaatgctgctagttgcgacttctgatttagaaacaaagatgtctctggatcagcaggtttaaggaactcaggattgctctggaaccagttcttgacttgatctggagcagcctttgaagtatcgaattgtgaccaccattttacaaaggcgtgtctctgtaacggtggatattgtttgttgttttcagtttttccgtatatgtattgccatgaaaagatccatgacaaggcaaaactggaaaaatactttaaatctgccggaattcgtgattccttgctattatagagcttgttgaattgttcgaatccctgttggacttcttctggaaatatttgtggaattggtccgaagtagttccaccattgaaggaaccaatttggaaaattatatgcagtattatttttgaagtaaatcagcaatgaatgcttgaatttactattttgatgccagaacacattggtccaggcgtcaacgtaatcccaataattataccctgcaggatcaaatggtgcagagaatttt

SEQ ID NO: 14056 - DNA, 1068 bp, Glycine max
  Gm_smallRNAprecursor_6889
cttacaaacccaggtttttgaaaacaaagaaatcgaagcggcggcagagccgcacaggatcggtgaggggagaagggagatatgaaaaatagaacttgaaatttattgaaaccgaaagaaaagcttacaaagagtttttccctaggcagagcttctctctctaaaacctgattctgagtctatctgaaagggtgcctcacaaaggggacgaggactcctttaaatagacccaatttttactgtttctacagtatcggtaatgtttaccggaactgttacaaaactttttacaaattacattatttaaaagaaactgacaagttagttacaataattcatgattattacaactaattaatcgtcgtccaatgatataccaaaacagtcatcttcattctggtagaatggatcatcttcttggtcatcattagtctctgatgattcagtttccttcttggaaggttcttcttccacttcctgttgaagtagttggagaacttctttgagattctgagcaagactttctttagattttgcgcttgctaagaatgctgctagttgcgacttctgatttagaaacaaagatgtctctggatcagcaggtttaaggaactcaggattgctctggaaccagttcttgacttgatctggagcagcctttgaagtatcgaattgtgaccaccattttacaaaggcgtgtctctgtaacggtggatattgtttgttgttttcagtttttccgtatatgtattgccatgaaaagatccatgacaaggcaaaactggaaaaatactttaaatctgccggaattcgtgattccttgctattatagagcttgttgaattgttcgaatccctgttggacttcttctggaaatatttgtggaattggtccgaagtagttccaccattgaaggaaccaatttggaaaattatatgcagtattatttttgaagtaaatcagcaatgaatgcttgaatttactattttgatgccagaacacattggtccaggcgtcaacgtaatcccaataattataccctgcaggatcaaatggtgcagagaattt

SEQ ID NO: 14057 - DNA, 1069 bp, Glycine max
  Gm_smallRNAprecursor_6890
cttacaaacccaggtttttgaaaacaaagaaatcgaagcggcggcagagccgcacaggatcggtgaggggagaagggagatatgaaaaatagaacttgaaatttattgaaaccgaaagaaaagcttacaaagagtttttccctaggcagagcttctctctctaaaacctgattctgagtctatctgaaagggtgcctcacaaaggggacgaggactcctttaaatagacccaatttttactgtttctacagtatcggtaatgtttaccggaactgttacaaaactttttacaaattacattatttaaaagaaactgacaagttagttacaataattcatgattattacaactaattaatcgtcgtccaatgatataccaaaacagtcatcttcattctggtagaatggatcatcttcttggtcatcattagtctctgatgattcagtttccttcttggaaggttcttcttccacttcctgttgaagtagttggagaacttctttgagattctgagcaagactttctttagattttgcgcttgctaagaatgctgctagttgcgacttctgatttagaaacaaagatgtctctggatcagcaggtttaaggaactcaggattgctctggaaccagttcttgacttgatctggagcagcctttgaagtatcgaattgtgaccaccattttacaaaggcgtgtctctgtaacggtggatattgtttgttgttttcagtttttccgtatatgtattgccatgaaaagatccatgacaaggcaaaactggaaaaatactttaaatctgccggaattcgtgattccttgctattatagagcttgttgaattgttcgaatccctgttggacttcttctggaaatatttgtggaattggtccgaagtagttccaccattgaaggaaccaatttggaaaattatatgcagtattatttttgaagtaaatcagcaatgaatgcttgaatttactattttgatgccagaacacattggtccaggcgtcaacgtaatcccaataattataccctgcaggatcaaatggtgcagagaatttt

SEQ ID NO: 14058 - DNA, 1048 bp, Glycine max
  Gm_smallRNAprecursor_6891
gggagaagggagatatgaaaaatagaacttgaaatttattgaaaccgaaagaaaagcttacaaagagtttttccctaggcagagcttctctctctaaaacctgattctgagtctatctgaaagggtgcctcacaaaggggacgaggactcctttaaatagacccaatttttactgtttctacagtatcggtaatgtttaccggaactgttacaaaactttttacaaattacattatttaaaagaaactgacaagttagttacaataattcatgattattacaactaattaatcgtcgtccaatgatataccaaaacagtcatcttcattctggtagaatggatcatcttcttggtcatcattagtctctgatgattcagtttccttcttggaaggttcttcttccacttcctgttgaagtagttggagaacttctttgagattctgagcaagactttctttagattttgcgcttgctaagaatgctgctagttgcgacttctgatttagaaacaaagatgtctctggatcagcaggtttaaggaactcaggattgctctggaaccagttcttgacttgatctggagcagcctttgaagtatcgaattgtgaccaccattttacaaaggcgtgtctctgtaacggtggatattgtttgttgttttcagtttttccgtatatgtattgccatgaaaagatccatgacaaggcaaaactggaaaaatactttaaatctgccggaattcgtgattccttgctattatagagcttgttgaattgttcgaatccctgttggacttcttctggaaatatttgtggaattggtccgaagtagttccaccattgaaggaaccaatttggaaaattatatgcagtattatttttgaagtaaatcagcaatgaatgcttgaatttactattttgatgccagaacacattggtccaggcgtcaacgtaatcccaataattataccctgcaggatcaaatggtgcagagaattttttgggttggtttaagtttgagccataatgtcgttgctgcataacct

SEQ ID NO: 14059 - DNA, 1047 bp, Glycine max
  Gm_smallRNAprecursor_6892
ggagaagggagatatgaaaaatagaacttgaaatttattgaaaccgaaagaaaagcttacaaagagtttttccctaggcagagcttctctctctaaaacctgattctgagtctatctgaaagggtgcctcacaaaggggacgaggactcctttaaatagacccaatttttactgtttctacagtatcggtaatgtttaccggaactgttacaaaactttttacaaattacattatttaaaagaaactgacaagttagttacaataattcatgattattacaactaattaatcgtcgtccaatgatataccaaaacagtcatcttcattctggtagaatggatcatcttcttggtcatcattagtctctgatgattcagtttccttcttggaaggttcttcttccacttcctgttgaagtagttggagaacttctttgagattctgagcaagactttctttagattttgcgcttgctaagaatgctgctagttgcgacttctgatttagaaacaaagatgtctctggatcagcaggtttaaggaactcaggattgctctggaaccagttcttgacttgatctggagcagcctttgaagtatcgaattgtgaccaccattttacaaaggcgtgtctctgtaacggtggatattgtttgttgttttcagtttttccgtatatgtattgccatgaaaagatccatgacaaggcaaaactggaaaaatactttaaatctgccggaattcgtgattccttgctattatagagcttgttgaattgttcgaatccctgttggacttcttctggaaatatttgtggaattggtccgaagtagttccaccattgaaggaaccaatttggaaaattatatgcagtattatttttgaagtaaatcagcaatgaatgcttgaatttactattttgatgccagaacacattggtccaggcgtcaacgtaatcccaataattataccctgcaggatcaaatggtgcagagaattttttgggttggtttaagtttgagccataatgtcgttgctgcataacct

SEQ ID NO: 14060 - DNA, 1198 bp, Glycine max
  Gm_smallRNAprecursor_6893
aagaaaagcttacaaagagtttttccctaggcagagcttctctctctaaaacctgattctgagtctatctgaaagggtgcctcacaaaggggacgaggactcctttaaatagacccaatttttactgtttctacagtatcggtaatgtttaccggaactgttacaaaactttttacaaattacattatttaaaagaaactgacaagttagttacaataattcatgattattacaactaattaatcgtcgtccaatgatataccaaaacagtcatcttcattctggtagaatggatcatcttcttggtcatcattagtctctgatgattcagtttccttcttggaaggttcttcttccacttcctgttgaagtagttggagaacttctttgagattctgagcaagactttctttagattttgcgcttgctaagaatgctgctagttgcgacttctgatttagaaacaaagatgtctctggatcagcaggtttaaggaactcaggattgctctggaaccagttcttgacttgatctggagcagcctttgaagtatcgaattgtgaccaccattttacaaaggcgtgtctctgtaacggtggatattgtttgttgttttcagtttttccgtatatgtattgccatgaaaagatccatgacaaggcaaaactggaaaaatactttaaatctgccggaattcgtgattccttgctattatagagcttgttgaattgttcgaatccctgttggacttcttctggaaatatttgtggaattggtccgaagtagttccaccattgaaggaaccaatttggaaaattatatgcagtattatttttgaagtaaatcagcaatgaatgcttgaatttactattttgatgccagaacacattggtccaggcgtcaacgtaatcccaataattataccctgcaggatcaaatggtgcagagaattttttgggttggtttaagtttgagccataatgtcgttgctgcataaccttcaggatttggattgtggaatgagtatttaaatttggatctttggggtctttgaagtgtttaatagatactgagtttgtatctattaggatgaattcatagaatttgcgggttttgtttgcggctattggcctgtaatggaatccctggggaatactttggcggttgctttgaaaggattcttgtcccagtattctgg

SEQ ID NO: 14061 - DNA, 1086 bp, Glycine max
  Gm_smallRNAprecursor_6894
atctgaaagggtgcctcacaaaggggacgaggactcctttaaatagacccaatttttactgtttctacagtatcggtaatgtttaccggaactgttacaaaactttttacaaattacattatttaaaagaaactgacaagttagttacaataattcatgattattacaactaattaatcgtcgtccaatgatataccaaaacagtcatcttcattctggtagaatggatcatcttcttggtcatcattagtctctgatgattcagtttccttcttggaaggttcttcttccacttcctgttgaagtagttggagaacttctttgagattctgagcaagactttctttagattttgcgcttgctaagaatgctgctagttgcgacttctgatttagaaacaaagatgtctctggatcagcaggtttaaggaactcaggattgctctggaaccagttcttgacttgatctggagcagcctttgaagtatcgaattgtgaccaccattttacaaaggcgtgtctctgtaacggtggatattgtttgttgttttcagtttttccgtatatgtattgccatgaaaagatccatgacaaggcaaaactggaaaaatactttaaatctgccggaattcgtgattccttgctattatagagcttgttgaattgttcgaatccctgttggacttcttctggaaatatttgtggaattggtccgaagtagttccaccattgaaggaaccaatttggaaaattatatgcagtattatttttgaagtaaatcagcaatgaatgcttgaatttactattttgatgccagaacacattggtccaggcgtcaacgtaatcccaataattataccctgcaggatcaaatggtgcagagaattttttgggttggtttaagtttgagccataatgtcgttgctgcataaccttcaggatttggattgtggaatgagtatttaaatttggatctttggggtctttgaagtgtttaatagatactgagtttgtatctattaggatgaattcatagaatttgcgggttttgtttgcggctattggcctgtaatggaatccctgggga

SEQ ID NO: 14062 - DNA, 1086 bp, Glycine max; identical to SEQ ID NO: 14061
  Gm_smallRNAprecursor_6895

SEQ ID NO: 14063 - DNA, 1085 bp, Glycine max
  Gm_smallRNAprecursor_6896
tctgaaagggtgcctcacaaaggggacgaggactcctttaaatagacccaatttttactgtttctacagtatcggtaatgtttaccggaactgttacaaaactttttacaaattacattatttaaaagaaactgacaagttagttacaataattcatgattattacaactaattaatcgtcgtccaatgatataccaaaacagtcatcttcattctggtagaatggatcatcttcttggtcatcattagtctctgatgattcagtttccttcttggaaggttcttcttccacttcctgttgaagtagttggagaacttctttgagattctgagcaagactttctttagattttgcgcttgctaagaatgctgctagttgcgacttctgatttagaaacaaagatgtctctggatcagcaggtttaaggaactcaggattgctctggaaccagttcttgacttgatctggagcagcctttgaagtatcgaattgtgaccaccattttacaaaggcgtgtctctgtaacggtggatattgtttgttgttttcagtttttccgtatatgtattgccatgaaaagatccatgacaaggcaaaactggaaaaatactttaaatctgccggaattcgtgattccttgctattatagagcttgttgaattgttcgaatccctgttggacttcttctggaaatatttgtggaattggtccgaagtagttccaccattgaaggaaccaatttggaaaattatatgcagtattatttttgaagtaaatcagcaatgaatgcttgaatttactattttgatgccagaacacattggtccaggcgtcaacgtaatcccaataattataccctgcaggatcaaatggtgcagagaattttttgggttggtttaagtttgagccataatgtcgttgctgcataaccttcaggatttggattgtggaatgagtatttaaatttggatctttggggtctttgaagtgtttaatagatactgagtttgtatctattaggatgaattcatagaatttgcgggttttgtttgcggctattggcctgtaatggaatccctgggga

SEQ ID NO: 14064 - DNA, 1180 bp, Glycine max
  Gm_smallRNAprecursor_6897
cctacataatttagacaacctagaaatatttgtaactgggttttgtctaagatttggttggggaatttgctagcaaattcaattgacctttcgattggaacaattgtaccttgataaatattgtgaccaaggaatcgaattcgtgtttggaaaagattgatttttgatttggagactgccaaaccattttgtttgatgatatggatgaaagtttggagatgtttgaaatgctggtcaatgttttgggaaaagattaaaacatcatctatgtagacaatgacaaattttgaatagggattaaaaatatcattcataattttttgaaattctgaaggggcattcttcagtccgaatggcattacgttccactcatattgcccgaaaggtacagtaaacgctgttttgtacctatctgattcttggatttggatttgccaaaatccagatttcatatcaaactttgaaaatatctttgcagaatttaatctgttaagcaaatctcttttgtttggaataggatatctaatccattgtaatgcttgatttagtggtttgtaatttatgactaagcggggtgttccacgctcaatctcagattgtttgttgacataaaaagccgcacaagaccatgggcttttgcttttccggatcaggcctttatcaagcaaatccttgatttccttttgacagtattgaagaagttcttcattcatttggatcggtctggcttttgtgggaatttgtttttccctaaagtctttctcataggggagatcaacaatatgtttctttctgtcccaaaatgcatgtggcaaatcagaacagacagttgattcaatatgatttagtaaagattgaattttatcttttacttggggttttcctagttgtatctgaatattattaaaagatacttcttcttttaagaagttaatttgattaatcttattttctatgaaatttatatttctggaaattggtttagtagaaaaattaaatataatctttcttcctaaataatttgtggttattccttcattagatatttggatgggaaacagggctctaatgaagggcgttcctaagattacttcattcttaaggttttttaccagaagaaagtttgtgttgatcctaagaccttggttttcaatgattgcatttgatagcttaaaattaa

SEQ ID NO: 14065 - DNA, 1105 bp, Glycine max
  Gm_smallRNAprecursor_6898
ctgttttgtttggataacaattaaaatatattggaccttgtcctaggctggtttcgactgttccaattagggagtcttcaaattggttatgcctaatgtctcttagacacattaaaactgctgcatctatgcccatatcaattaagggcttgatggctacttgtacacaaccgatgtgtagatatttatatttacggctatgttcataaattgaattttttgaaagtaaatgaaattcttcccctacttcttgtcctagaggaatattgttttctactgttttgattatgtaatcaaagttgtgtttgtcttttattgtctcaggaacgtatagttgatcctgagggatttctggaatgttctagtcatccatattttgattgatatcttcgaatcggacttcctcattgaagagattgtgttttggggcgacctcttgggtctggttgtcttgatcgtttaatagattggagtttcttgaagaagatgataaggaggagtttgagcgaaaagagatacgagaaaaagatcgtaagagtctagacatgattatgatattctctaatatctttgccctcatttggttccatagaaacatctccgtaagtaaatatgtcacaaaatttttctggatctgaattatttttaaaaaaaaaactctttttttttgtttgaaaaatagtttgaacgacaatcctatagccaccagtatattatgtcttgatattttcgttaaacagtacaccttagccttactgccctttatccaacacgggtcttactgctacagtaccattcaactaaaatattagactgttgtacttccaagaagtactgttcaaacgcttactgtacaaatcaaagtaaaatattaaatgtactatacaaaacttttagtttcagatccataaaattcgttaacatatgtccttacggacagtattcctacttccccatcaggctatatatatatataggtaagaggagtttatagcttttgatcccatagtttttaagcaaaatttgtgttttaaatgaatgggatgtgatatatttattattgatgaatataactgtgaatgatgttgttgttgtattggttgga

SEQ ID NO: 14066 - DNA, 1164 bp, Glycine max
  Gm_smallRNAprecursor_6899
ttcgaaaatgggccccgacgggtgcagagaaacgcgagggacgggaaccagagaaacggtatgcaaaccgaggctggatcttagcattcaaaaggtaaaattttttctctccttgtggctgagtatgaagtcacatcaagagaaaaagtgggccctttttgttccactcaaaatgggacaagtggcaagtgctttaaaaaaataaaataataggaaaaagaaaatctttttttttcttaaaaagccacattctctctcttcactcagcagaaaattcagaagctcttcttctcatctcccacgctgcttttcttctccctttctcctccaccattgttgcccattaaagctccaaactttgctcatcatttctactctagattgcaaagggaagccatttttgaagtcgtgaagcgcacctctacgttgtgggacttcgaatttcagctatgggtggacttcttctcacatgaatttcgtgggtattgggtttttgggagatatgatgggtagttctactaggtttatgccttatggtagttatttgtgaaggaatttgttgaaaacatgctaaacttgacacgttttatgtgactaacgctacccattctgttttagggttttatgatgatgctttgtgatgtttgtctgctgaaattgttggtagaaaactggtagagatgatggggacagttaacctagggttaaatgtgagaatggtggagatgtgagtggaaaagtgtgaggttttgagggtttgaaaagctaaatttggtgttagtggtaattggaggctaaagtgagttaatcctagtttaaaatgtcaattaggacttatgggaaagcttgggcagagcaaatgagaaaaatgagtgataaatgtgaaagcaagagtcatttctagggtaaattggatgttgaggggtcaaatcttgaatcggtggagttttcgccttaaaatcagtttgagcaagtctaaattaatgtaatagacttgtttgagatgagattttactccaaaattaccctattctcattttcacttctcaaacctagaaaattcactcaattaatgggttttagatacctagattttgaattgccttggtctgaagcttgtttttggtttaaatatgatttatgcatgatttaggacttgtagga

SEQ ID NO: 14067 - DNA, 1146 bp, Glycine max
  Gm_smallRNAprecursor_6900
taagaatgcagtatgataatcaaaaaataagaattataaaattgtaaagcagatatcaagggcacaccgaaacggcttacaaacccaggtttttgaaaacaaagaaaccgaagcggcggcagagccgcacaggatcggtgaggggagaagggagatatgaaaaatagaacttgaaatttattaaaactgaaagaaaagcttacaaagagtttttccctaggcagagcttctctctctaaaaacctgattctgggactatctgaaagggtgcctcacaaaggggacgaggactcctttaaatagacccaatttttactgtttctacagtatcggtaatgtttaccggaattgttacaaaacttttacaaattacattttttttaaaagaaactgacaaattagttacaataattcctgattactacaactaattaatcgtcgtccaatgatataccaaaacagtcatcttcattctagtagaatggatcatcttcttggtcatcattagtctcggatgattcagcttccttcttggaaggttcttcttccacttcctgttgaagtagttggagaacttctttgagattctgagcaagactctctttagattttgagctcgctaagaatgctgccagttgcgacttttgatttagaaacaaagatgtctccggatcagcaggtttaaggaactcaggattgctctggaaccagttcttgacttggtctggagcagcctttgaagtatcgaattgtgaccaccattttacaaaggcgtgtctctgtaacggtggatattgtttgttgttttcagtttttccgtatctgtattgccatgaaaagatccatgacaaggcaaaactggaaaagtactttaagtctgccggaatacgtgattccttgctattatagagcttgttgaattgttcgaatccctgttggacttcttctggaaatatttgtggaattggtccgaagtagttccaccattggaggaaccaatttggaaaattatatgcagtattatttttgaagtaaatcagccatgaatgcttgaatttactattttgatgctagaacacattggtccaggcgtcaattgatatgaaccctcatggaacaagggctgacttaggatcgtctaggatt

SEQ ID NO: 14068 - DNA, 1138 bp, Glycine max
  Gm_smallRNAprecursor_6901
caccgaaacggcttacaaacccaggtttttgaaaacaaagaaaccgaagcggcggcagagccgcacaggatcggtgaggggagaagggagatatgaaaaatagaacttgaaatttattaaaactgaaagaaaagcttacaaagagtttttccctaggcagagcttctctctctaaaaacctgattctgggactatctgaaagggtgcctcacaaaggggacgaggactcctttaaatagacccaatttttactgtttctacagtatcggtaatgtttaccggaattgttacaaaacttttacaaattacattttttttaaaagaaactgacaaattagttacaataattcctgattactacaactaattaatcgtcgtccaatgatataccaaaacagtcatcttcattctagtagaatggatcatcttcttggtcatcattagtctcggatgattcagcttccttcttggaaggttcttcttccacttcctgttgaagtagttggagaacttctttgagattctgagcaagactctctttagattttgagctcgctaagaatgctgccagttgcgacttttgatttagaaacaaagatgtctccggatcagcaggtttaaggaactcaggattgctctggaaccagttcttgacttggtctggagcagcctttgaagtatcgaattgtgaccaccattttacaaaggcgtgtctctgtaacggtggatattgtttgttgttttcagtttttccgtatctgtattgccatgaaaagatccatgacaaggcaaaactggaaaagtactttaagtctgccggaatacgtgattccttgctattatagagcttgttgaattgttcgaatccctgttggacttcttctggaaatatttgtggaattggtccgaagtagttccaccattggaggaaccaatttggaaaattatatgcagtattatttttgaagtaaatcagccatgaatgcttgaatttactattttgatgctagaacacattggtccaggcgtcaattgatatgaaccctcatggaacaagggctgacttaggatcgtctaggattaaaccttgatggaaaatgcggaaattgattaaggaaaggatggaaaataaggtggt

SEQ ID NO: 14069 - DNA, 1072 bp, Glycine max
  Gm_smallRNAprecursor_6902
gcttacaaacccaggtttttgaaaacaaagaaaccgaagcggcggcagagccgcacaggatcggtgaggggagaagggagatatgaaaaatagaacttgaaatttattaaaactgaaagaaaagcttacaaagagtttttccctaggcagagcttctctctctaaaaacctgattctgggactatctgaaagggtgcctcacaaaggggacgaggactcctttaaatagacccaatttttactgtttctacagtatcggtaatgtttaccggaattgttacaaaacttttacaaattacattttttttaaaagaaactgacaaattagttacaataattcctgattactacaactaattaatcgtcgtccaatgatataccaaaacagtcatcttcattctagtagaatggatcatcttcttggtcatcattagtctcggatgattcagcttccttcttggaaggttcttcttccacttcctgttgaagtagttggagaacttctttgagattctgagcaagactctctttagattttgagctcgctaagaatgctgccagttgcgacttttgatttagaaacaaagatgtctccggatcagcaggtttaaggaactcaggattgctctggaaccagttcttgacttggtctggagcagcctttgaagtatcgaattgtgaccaccattttacaaaggcgtgtctctgtaacggtggatattgtttgttgttttcagtttttccgtatctgtattgccatgaaaagatccatgacaaggcaaaactggaaaagtactttaagtctgccggaatacgtgattccttgctattatagagcttgttgaattgttcgaatccctgttggacttcttctggaaatatttgtggaattggtccgaagtagttccaccattggaggaaccaatttggaaaattatatgcagtattatttttgaagtaaatcagccatgaatgcttgaatttactattttgatgctagaacacattggtccaggcgtcaattgatatgaaccctcatggaacaagggctgacttaggatcgtctaggatt

SEQ ID NO: 14070 - DNA, 1069 bp, Glycine max
  Gm_smallRNAprecursor_6903
tacaaacccaggtttttgaaaacaaagaaaccgaagcggcggcagagccgcacaggatcggtgaggggagaagggagatatgaaaaatagaacttgaaatttattaaaactgaaagaaaagcttacaaagagtttttccctaggcagagcttctctctctaaaaacctgattctgggactatctgaaagggtgcctcacaaaggggacgaggactcctttaaatagacccaatttttactgtttctacagtatcggtaatgtttaccggaattgttacaaaacttttacaaattacattttttttaaaagaaactgacaaattagttacaataattcctgattactacaactaattaatcgtcgtccaatgatataccaaaacagtcatcttcattctagtagaatggatcatcttcttggtcatcattagtctcggatgattcagcttccttcttggaaggttcttcttccacttcctgttgaagtagttggagaacttctttgagattctgagcaagactctctttagattttgagctcgctaagaatgctgccagttgcgacttttgatttagaaacaaagatgtctccggatcagcaggtttaaggaactcaggattgctctggaaccagttcttgacttggtctggagcagcctttgaagtatcgaattgtgaccaccattttacaaaggcgtgtctctgtaacggtggatattgtttgttgttttcagtttttccgtatctgtattgccatgaaaagatccatgacaaggcaaaactggaaaagtactttaagtctgccggaatacgtgattccttgctattatagagcttgttgaattgttcgaatccctgttggacttcttctggaaatatttgtggaattggtccgaagtagttccaccattggaggaaccaatttggaaaattatatgcagtattatttttgaagtaaatcagccatgaatgcttgaatttactattttgatgctagaacacattggtccaggcgtcaattgatatgaaccctcatggaacaagggctgacttaggatcgtctaggatt

SEQ ID NO: 14071 - DNA, 1047 bp, Glycine max
  Gm_smallRNAprecursor_6904
agaagggagatatgaaaaatagaacttgaaatttattaaaactgaaagaaaagcttacaaagagtttttccctaggcagagcttctctctctaaaaacctgattctgggactatctgaaagggtgcctcacaaaggggacgaggactcctttaaatagacccaatttttactgtttctacagtatcggtaatgtttaccggaattgttacaaaacttttacaaattacattttttttaaaagaaactgacaaattagttacaataattcctgattactacaactaattaatcgtcgtccaatgatataccaaaacagtcatcttcattctagtagaatggatcatcttcttggtcatcattagtctcggatgattcagcttccttcttggaaggttcttcttccacttcctgttgaagtagttggagaacttctttgagattctgagcaagactctctttagattttgagctcgctaagaatgctgccagttgcgacttttgatttagaaacaaagatgtctccggatcagcaggtttaaggaactcaggattgctctggaaccagttcttgacttggtctggagcagcctttgaagtatcgaattgtgaccaccattttacaaaggcgtgtctctgtaacggtggatattgtttgttgttttcagtttttccgtatctgtattgccatgaaaagatccatgacaaggcaaaactggaaaagtactttaagtctgccggaatacgtgattccttgctattatagagcttgttgaattgttcgaatccctgttggacttcttctggaaatatttgtggaattggtccgaagtagttccaccattggaggaaccaatttggaaaattatatgcagtattatttttgaagtaaatcagccatgaatgcttgaatttactattttgatgctagaacacattggtccaggcgtcaattgatatgaaccctcatggaacaagggctgacttaggatcgtctaggattaaaccttgatggaaaatgcggaaattgattaaggaaaggatggaaa

SEQ ID NO: 14072 - DNA, 1120 bp, Glycine max
  Gm_smallRNAprecursor_6905
agaaaagcttacaaagagtttttccctaggcagagcttctctctctaaaaacctgattctgggactatctgaaagggtgcctcacaaaggggacgaggactcctttaaatagacccaatttttactgtttctacagtatcggtaatgtttaccggaattgttacaaaacttttacaaattacattttttttaaaagaaactgacaaattagttacaataattcctgattactacaactaattaatcgtcgtccaatgatataccaaaacagtcatcttcattctagtagaatggatcatcttcttggtcatcattagtctcggatgattcagcttccttcttggaaggttcttcttccacttcctgttgaagtagttggagaacttctttgagattctgagcaagactctctttagattttgagctcgctaagaatgctgccagttgcgacttttgatttagaaacaaagatgtctccggatcagcaggtttaaggaactcaggattgctctggaaccagttcttgacttggtctggagcagcctttgaagtatcgaattgtgaccaccattttacaaaggcgtgtctctgtaacggtggatattgtttgttgttttcagtttttccgtatctgtattgccatgaaaagatccatgacaaggcaaaactggaaaagtactttaagtctgccggaatacgtgattccttgctattatagagcttgttgaattgttcgaatccctgttggacttcttctggaaatatttgtggaattggtccgaagtagttccaccattggaggaaccaatttggaaaattatatgcagtattatttttgaagtaaatcagccatgaatgcttgaatttactattttgatgctagaacacattggtccaggcgtcaattgatatgaaccctcatggaacaagggctgacttaggatcgtctaggattaaaccttgatggaaaatgcggaaattgattaaggaaaggatggaaaataaggtggttaatttcgtgggtcttaataaggtggtttctggcataaaatggatgaatgggatggtaaaacgtaggttaagtggtggctggacagaaatatagaaatggcaataacgg

SEQ ID NO: 14073 - DNA, 1198 bp, Glycine max
  Gm_smallRNAprecursor_6906
gaaaagcttacaaagagtttttccctaggcagagcttctctctctaaaaacctgattctgggactatctgaaagggtgcctcacaaaggggacgaggactcctttaaatagacccaatttttactgtttctacagtatcggtaatgtttaccggaattgttacaaaacttttacaaattacattttttttaaaagaaactgacaaattagttacaataattcctgattactacaactaattaatcgtcgtccaatgatataccaaaacagtcatcttcattctagtagaatggatcatcttcttggtcatcattagtctcggatgattcagcttccttcttggaaggttcttcttccacttcctgttgaagtagttggagaacttctttgagattctgagcaagactctctttagattttgagctcgctaagaatgctgccagttgcgacttttgatttagaaacaaagatgtctccggatcagcaggtttaaggaactcaggattgctctggaaccagttcttgacttggtctggagcagcctttgaagtatcgaattgtgaccaccattttacaaaggcgtgtctctgtaacggtggatattgtttgttgttttcagtttttccgtatctgtattgccatgaaaagatccatgacaaggcaaaactggaaaagtactttaagtctgccggaatacgtgattccttgctattatagagcttgttgaattgttcgaatccctgttggacttcttctggaaatatttgtggaattggtccgaagtagttccaccattggaggaaccaatttggaaaattatatgcagtattatttttgaagtaaatcagccatgaatgcttgaatttactattttgatgctagaacacattggtccaggcgtcaattgatatgaaccctcatggaacaagggctgacttaggatcgtctaggattaaaccttgatggaaaatgcggaaattgattaaggaaaggatggaaaataaggtggttaatttcgtgggtcttaataaggtggtttctggcataaaatggatgaatgggatggtaaaacgtaggttaagtggtggctggacagaaatatagaaatggcaataacggaagctacagggctccaaatgaggtgattccaaaacgaggtgaaaggtctcgttttgaaattcaatttaggctcaagaat

SEQ ID NO: 14074 - DNA, 1086 bp, Glycine max
  Gm_smallRNAprecursor_6907
tctgaaagggtgcctcacaaaggggacgaggactcctttaaatagacccaatttttactgtttctacagtatcggtaatgtttaccggaattgttacaaaacttttacaaattacattttttttaaaagaaactgacaaattagttacaataattcctgattactacaactaattaatcgtcgtccaatgatataccaaaacagtcatcttcattctagtagaatggatcatcttcttggtcatcattagtctcggatgattcagcttccttcttggaaggttcttcttccacttcctgttgaagtagttggagaacttctttgagattctgagcaagactctctttagattttgagctcgctaagaatgctgccagttgcgacttttgatttagaaacaaagatgtctccggatcagcaggtttaaggaactcaggattgctctggaaccagttcttgacttggtctggagcagcctttgaagtatcgaattgtgaccaccattttacaaaggcgtgtctctgtaacggtggatattgtttgttgttttcagtttttccgtatctgtattgccatgaaaagatccatgacaaggcaaaactggaaaagtactttaagtctgccggaatacgtgattccttgctattatagagcttgttgaattgttcgaatccctgttggacttcttctggaaatatttgtggaattggtccgaagtagttccaccattggaggaaccaatttggaaaattatatgcagtattatttttgaagtaaatcagccatgaatgcttgaatttactattttgatgctagaacacattggtccaggcgtcaattgatatgaaccctcatggaacaagggctgacttaggatcgtctaggattaaaccttgatggaaaatgcggaaattgattaaggaaaggatggaaaataaggtggttaatttcgtgggtcttaataaggtggtttctggcataaaatggatgaatgggatggtaaaacgtaggttaagtggtggctggacagaaatatagaaatggcaataacggaagctacagggctccaaatgaggtgattccaaa

SEQ ID NO: 14075 - DNA, 1086 bp, Glycine max; identical to SEQ ID NO: 14074
  Gm_smallRNAprecursor_6908

SEQ ID NO: 14076 - DNA, 1085 bp, Glycine max
  Gm_smallRNAprecursor_6909
ctgaaagggtgcctcacaaaggggacgaggactcctttaaatagacccaatttttactgtttctacagtatcggtaatgtttaccggaattgttacaaaacttttacaaattacattttttttaaaagaaactgacaaattagttacaataattcctgattactacaactaattaatcgtcgtccaatgatataccaaaacagtcatcttcattctagtagaatggatcatcttcttggtcatcattagtctcggatgattcagcttccttcttggaaggttcttcttccacttcctgttgaagtagttggagaacttctttgagattctgagcaagactctctttagattttgagctcgctaagaatgctgccagttgcgacttttgatttagaaacaaagatgtctccggatcagcaggtttaaggaactcaggattgctctggaaccagttcttgacttggtctggagcagcctttgaagtatcgaattgtgaccaccattttacaaaggcgtgtctctgtaacggtggatattgtttgttgttttcagtttttccgtatctgtattgccatgaaaagatccatgacaaggcaaaactggaaaagtactttaagtctgccggaatacgtgattccttgctattatagagcttgttgaattgttcgaatccctgttggacttcttctggaaatatttgtggaattggtccgaagtagttccaccattggaggaaccaatttggaaaattatatgcagtattatttttgaagtaaatcagccatgaatgcttgaatttactattttgatgctagaacacattggtccaggcgtcaattgatatgaaccctcatggaacaagggctgacttaggatcgtctaggattaaaccttgatggaaaatgcggaaattgattaaggaaaggatggaaaataaggtggttaatttcgtgggtcttaataaggtggtttctggcataaaatggatgaatgggatggtaaaacgtaggttaagtggtggctggacagaaatatagaaatggcaataacggaagctacagggctccaaatgaggtgattccaaa

SEQ ID NO: 14077 - DNA, 1032 bp, Glycine max
  Gm_smallRNAprecursor_6910
ttttactgtttctacagtatcggtaatgtttaccggaattgttacaaaacttttacaaattacattttttttaaaagaaactgacaaattagttacaataattcctgattactacaactaattaatcgtcgtccaatgatataccaaaacagtcatcttcattctagtagaatggatcatcttcttggtcatcattagtctcggatgattcagcttccttcttggaaggttcttcttccacttcctgttgaagtagttggagaacttctttgagattctgagcaagactctctttagattttgagctcgctaagaatgctgccagttgcgacttttgatttagaaacaaagatgtctccggatcagcaggtttaaggaactcaggattgctctggaaccagttcttgacttggtctggagcagcctttgaagtatcgaattgtgaccaccattttacaaaggcgtgtctctgtaacggtggatattgtttgttgttttcagtttttccgtatctgtattgccatgaaaagatccatgacaaggcaaaactggaaaagtactttaagtctgccggaatacgtgattccttgctattatagagcttgttgaattgttcgaatccctgttggacttcttctggaaatatttgtggaattggtccgaagtagttccaccattggaggaaccaatttggaaaattatatgcagtattatttttgaagtaaatcagccatgaatgcttgaatttactattttgatgctagaacacattggtccaggcgtcaattgatatgaaccctcatggaacaagggctgacttaggatcgtctaggattaaaccttgatggaaaatgcggaaattgattaaggaaaggatggaaaataaggtggttaatttcgtgggtcttaataaggtggtttctggcataaaatggatgaatgggatggtaaaacgtaggttaagtggtggctggacagaaatatagaaatggcaataacggaagctacagggctccaaatgaggtgattcca

SEQ ID NO: 14078 - DNA, 1148 bp, Glycine max
  Gm_smallRNAprecursor_6911
cgagaagcctctgggcggcaaacacctctctttttccctataaataggggaggggggctgtttcaaaaatatttcggacccctaagctatgcatttcggttattttgggcaaaaaacacgttttcgtgaagaaaaatcgagtcaaagtgcttccgtaaagcttccgtaatgctttcgtaagcgattttgtggaaattcttcatcgttcttcaccgtttttcgttcattctttatcgttcttcagtcttcagtttgctataggtgtgagttcgaatcatgacaagggtctttttccaatattcatgtttaaatgaatgcaacatatagtagtggcccgaaatccgtagttcaacagttaaaactgagggtgttgctaggtgcacccaacattattgctagtgcacccagcactaactgtgaaaagacagaaatacccctgtgtattttttaagacttgcgaatcaagttgatccataagttgatttttaagacttacaaatcaacttgatccgtaagtcttttacagatcaagttgatccgtaagttgatttttaagaattttggatcaacttgctctgtaagtcataaaaatcaacttgcggatcaagttgatccgtaaaagacttgcggatcaagttgatccgtaaaagacttacggatcaacttgatccataaaaaacttacggatcaactcgatccgtaaaagacttatggatcaagttgatctataagtcttaaaaatcaacttacggatcaacttgatccgtaaagggagaaagaaggcaggggcagttttgccatttttaaagaatgttgggtacaccagcaataatgctgggtgcacctagcaacaccctaaaactggaagtccagcctggtcgcataggttgcaccgattatgcaacatgcaacaatgacccagaacccgcagtttagcagttcattcggaaacctggccaggtcacataggttgaaccagtttccaccaagctgattgcatgcccaacccaatagggttttaaaaaactatgctctaaggttgatggatttgtcgttggctttagtttaaagcctttctagatgcaactagaagttgatgggaaacacagcaacttgcaggcaaacttgttggaatcttctatgacacc

SEQ ID NO: 14079 - DNA, 1145 bp, Glycine max
  Gm_smallRNAprecursor_6912
agaagcctctgggcggcaaacacctctctttttccctataaataggggaggggggctgtttcaaaaatatttcggacccctaagctatgcatttcggttattttgggcaaaaaacacgttttcgtgaagaaaaatcgagtcaaagtgcttccgtaaagcttccgtaatgctttcgtaagcgattttgtggaaattcttcatcgttcttcaccgtttttcgttcattctttatcgttcttcagtcttcagtttgctataggtgtgagttcgaatcatgacaagggtctttttccaatattcatgtttaaatgaatgcaacatatagtagtggcccgaaatccgtagttcaacagttaaaactgagggtgttgctaggtgcacccaacattattgctagtgcacccagcactaactgtgaaaagacagaaatacccctgtgtattttttaagacttgcgaatcaagttgatccataagttgatttttaagacttacaaatcaacttgatccgtaagtcttttacagatcaagttgatccgtaagttgatttttaagaattttggatcaacttgctctgtaagtcataaaaatcaacttgcggatcaagttgatccgtaaaagacttgcggatcaagttgatccgtaaaagacttacggatcaacttgatccataaaaaacttacggatcaactcgatccgtaaaagacttatggatcaagttgatctataagtcttaaaaatcaacttacggatcaacttgatccgtaaagggagaaagaaggcaggggcagttttgccatttttaaagaatgttgggtacaccagcaataatgctgggtgcacctagcaacaccctaaaactggaagtccagcctggtcgcataggttgcaccgattatgcaacatgcaacaatgacccagaacccgcagtttagcagttcattcggaaacctggccaggtcacataggttgaaccagtttccaccaagctgattgcatgcccaacccaatagggttttaaaaaactatgctctaaggttgatggatttgtcgttggctttagtttaaagcctttctagatgcaactagaagttgatgggaaacacagcaacttgcaggcaaacttgttggaatcttctatgacac

SEQ ID NO: 14080 - DNA, 1157 bp, Glycine max
  Gm_smallRNAprecursor_6913
aagaccagtaaaacaactaccaagaagattcgcaccagaaatcatgtccaagattaaggaagagatcgaaaggctgctgaggtgtaaattcatcagatctgccaggtatgtcgaatggttagcaaatatagtccctgtcattaaaaagaatggaactcttagagtatgcatagattttagggatttaaataatgctacacctaaagatgaatatgctatgccagtagcggaaatgttggtagattcagcagctggcttcgaatttttaagcatgttagatggttattctggttataaccaaatatttattgctgaaagtgatgtgtcaaaaacagcatttcgatgccctggtgctttaggcacttatgaatgggtagttatgccctttgggttgaaaaatgctggggccacttatcaaagggccatgaattccatgtttcatgattttattgacacatttatgcaagtttatattgatgatataatcatcaaatcctcctcagaagatagccatttggattaccttaggcaatctttcgaacgaatgaggaaacatggattaaaaatgaatccattaaagtgtgctttttgtgtgcgtgcaggagatttccttggttttgtggtgcataaaaaaggcattgagataaatcaaaacaagacaaaggctattcttgagacgaagcctccttcgaccaaaaaacagcttcagtctttgctaggaaaaatcaacttcttgaggcgattcatctcgaatctaagtggcaaagctcaaattttttcgccattacttcgactcaagaaaaatgaaccattcaaatgggatgaagtgcatcaaaaggctttcgatgaaattaaagaatatctgatcaagcctcctgtgttaatgcctcctagtcgaaacaagactatgaagttgtatattgctgcgtctgacaagaccattggtagcatgttggctcaggaagatgatgatggcgtagagcatgcaatttattatcttagtcgtgtactaaatgatgcagaaactagatataatgccatagaaaaactttgtctttgtttgtatttctcttgtgcaaaacttaagcaatatataaagcctgttgatgtttatgtatattctcattatgatattattaagcacatgttgtcaaaac

SEQ ID NO: 14081 - DNA, 1110 bp, Glycine max
  Gm_smallRNAprecursor_6914
tattgtagatcactcagtgatcgaaatgccgcaagactatgtcgatacagagccttggattttgtatttcgatggttcgaaacacaaacgtggaactggaattggagttttaataatatctcccaataaagttccaactaaattcaaatataaaatcaaagggctttgttctaataatgaggctgagtatgaggctctaattacaggccttgaaattttaattagcttgggggcaagaaatgttaacataaggggtgattcagaactagtgttgagacaattaacacaagaatacaaatgtattaatgaacacttagcaaaatattttgttatggcaagttctcttctgaatcatttcgattacattaacattgagcatatacctcgacaagaaaaccaagaagcaaatgatttagcccaaatagcttcagggtacaaaatgtcgaaggaaaagttaactcagttgatcgaaataaaagataaactggtattaccagagccattaagcactaaattgccaatgccaaaacttgtgggggcaagtacaccacaaaataatgaagatgaaagcatggatgatctccagagaaaaattcaaattttggccattgacaatatgttagataatgattggagaaagtccattgttgaatatttggaaaatccaataggtaatgtggctcgaaagatcaaatatagggctttaaattacatgattgtgggaaatgatttgtttaaaaagactgcagaaggagtgttgctgaaatgtctaagtgaatcagaagcatacttggtagtttcccatgttcacagtggggcttgtggatcacatcaagcaggcgataaaatgaaatggcttttatttcgacgaggtttgtattggccttcgatgttaaaagactgcatagaatttgctaaaggctgtcaggaatgccaaaagcatgcaggaatacagcatgtacctgctagtgagttacactctataatcaaaccttggcctttcagaggatgggctttggacctaattggtgaaatcaagcctgcttcttctaagaaccagcgttatatcatagttggtgtcgattactttacaaaatggatcgaagcagt

SEQ ID NO: 14082 - DNA, 1082 bp, Glycine max
  Gm_smallRNAprecursor_6915
cagtgatcgaaatgccgcaagactatgtcgatacagagccttggattttgtatttcgatggttcgaaacacaaacgtggaactggaattggagttttaataatatctcccaataaagttccaactaaattcaaatataaaatcaaagggctttgttctaataatgaggctgagtatgaggctctaattacaggccttgaaattttaattagcttgggggcaagaaatgttaacataaggggtgattcagaactagtgttgagacaattaacacaagaatacaaatgtattaatgaacacttagcaaaatattttgttatggcaagttctcttctgaatcatttcgattacattaacattgagcatatacctcgacaagaaaaccaagaagcaaatgatttagcccaaatagcttcagggtacaaaatgtcgaaggaaaagttaactcagttgatcgaaataaaagataaactggtattaccagagccattaagcactaaattgccaatgccaaaacttgtgggggcaagtacaccacaaaataatgaagatgaaagcatggatgatctccagagaaaaattcaaattttggccattgacaatatgttagataatgattggagaaagtccattgttgaatatttggaaaatccaataggtaatgtggctcgaaagatcaaatatagggctttaaattacatgattgtgggaaatgatttgtttaaaaagactgcagaaggagtgttgctgaaatgtctaagtgaatcagaagcatacttggtagtttcccatgttcacagtggggcttgtggatcacatcaagcaggcgataaaatgaaatggcttttatttcgacgaggtttgtattggccttcgatgttaaaagactgcatagaatttgctaaaggctgtcaggaatgccaaaagcatgcaggaatacagcatgtacctgctagtgagttacactctataatcaaaccttggcctttcagaggatgggctttggacctaattggtgaaatcaagcctgcttcttctaagaaccagcgttatatcatagttggtgtcgattactttacaaaa

SEQ ID NO: 14083 - DNA, 1157 bp, Glycine max
  Gm_smallRNAprecursor_6916
agtaggaatagtgtccgtaagggcatatgttaactgaacttatggatctgaaccatgtacagtaattttaatttaaacagtatgtgtttgaacagtattttctggaagcacagcagtctgatattttagttgaatgatactgtagcagtaagtcacgtggttgagaaagggcagtaaggctaaggtgtattgttcaaataaaatattgagacataatatactggtggctataggagtttcaaactatattgtctgttataaaaaaaaaactttttcatttattcagatccaagaagttctgtaacatatagccttatggaaatatttctatggaaccaaatgaaggcaaagatattagagaatgttataatcatgtctagactattgcgatctttttcccgtatctcttttcgctcaaattcctcctcatcatcttcttcaagaaactccaatctattaaatgatcaagataaccagacccaagaggtcgccccaaaacacaatctcttcgatgaggaagtccgattcgaagatatcaatcaaaacatggatgactggaacattccagaaatccctcaggatcaactatacattcctgaaacaattaaagacaaacacaactttgattacataatcaaaacagtagaaaacaatattcctctaggacaagatataggggaagaatttcatttactttcaaaaatttcaatttatgaacatagccgtaagtataaatatctacacatcggttgtgtacaagtagccatcaagcccttaattgatatgggcatagatgcaacagttttaatgtgtctaagagatattaggcataatcaatttgaagactccctaattggaacagtcgaaaccagcctaggacaaggtctaatatattttaattgttatccaaacaaaacagtgagtctgatggacagaaacattcttgactctctgttcttaaacatccactttcatggcctcgacatgaaagaaggatcaatcccagcagccttaatttataggatccagtacaaggtcatgaatacttgtgcatctagagtcctgttaaaacctcaaaaaggagaaacaactttgtttatcactgatatgacaaaggctaacgtttctctcccgagaaaaataaaatgggatgaagt

SEQ ID NO: 14084 - DNA, 1126 bp, Glycine max
  Gm_smallRNAprecursor_6917
aagattaacacaaactttcttctggtaaaaaaccttaagaatgaagtaatcttaggaacgcccttcattagagccctgtttcccatccaaatatctaatgaaggaataaccacgaattatttaggaagaaaaattatatttaatttttctactaaaccaatttctagaaatataaatcttatagaaaataagattaatcaaattaacttcttaaaagaagaagtatcttttaataatattcagatacaactgggaaaaccccaagtaaaagaaaaaattcaatctttattaaatcatattgaagcgaccgtctgttctgaattgcctcatgcattttgggacagaaagaaacatattgttgatctcccttatgagaaagactttagggaaaaacaaattcccacaaaagccagaccaatccaaatgaatgaagaacttcttcaatactgtcaaaaggaaatcaaggatttgcttgataaaggcctaatctggaaaagcaaaagcccatggtcttgtgcggctttttatgtcaataaacaatctgagattgagcatggaacaccccgcttagtcataaattacaaaccactaaatcaagcattacaatggattagatatcctattccaaacaaaaaagatttgcttaacagattaaattctgcaaagatattttcaaaatttgatatgaaatctggattttggcaaatccaaatccaagaatcagataggtacaaaacgacatttactgtacctttcgggcaatatgaatggaacgtgatgtcattcggactgaagaatgccccttcagaatttcaaaaaattatgaacgatatttttaatccctattcaaaatttgtcattgtctacatagatgatgttttaatcttttcccaaaacattgaccaacatttcaaacatctccaaaccttcatacatatcatcaaacaaaatggtttggcagtctccaaatcaaaaattaatcttttccaaactcgaattcgattccttggtcacaatatatatcaaggtacaatcattccaatcgaaaggtcaatagagtttgctagcaaattccccaaccaaatcttagacaaaacccagttacaaagatttctaggttgtctaa

SEQ ID NO: 14085 - DNA, 1234 bp, Glycine max
  Gm_smallRNAprecursor_6918
cccaagtaaaagaaaaaattcaatctttattaaatcatattgaagcgaccgtctgttctgaattgcctcatgcattttgggacagaaagaaacatattgttgatctcccttatgagaaagactttagggaaaaacaaattcccacaaaagccagaccaatccaaatgaatgaagaacttcttcaatactgtcaaaaggaaatcaaggatttgcttgataaaggcctaatctggaaaagcaaaagcccatggtcttgtgcggctttttatgtcaataaacaatctgagattgagcatggaacaccccgcttagtcataaattacaaaccactaaatcaagcattacaatggattagatatcctattccaaacaaaaaagatttgcttaacagattaaattctgcaaagatattttcaaaatttgatatgaaatctggattttggcaaatccaaatccaagaatcagataggtacaaaacgacatttactgtacctttcgggcaatatgaatggaacgtgatgtcattcggactgaagaatgccccttcagaatttcaaaaaattatgaacgatatttttaatccctattcaaaatttgtcattgtctacatagatgatgttttaatcttttcccaaaacattgaccaacatttcaaacatctccaaaccttcatacatatcatcaaacaaaatggtttggcagtctccaaatcaaaaattaatcttttccaaactcgaattcgattccttggtcacaatatatatcaaggtacaatcattccaatcgaaaggtcaatagagtttgctagcaaattccccaaccaaatcttagacaaaacccagttacaaagatttctaggttgtctaaattacgtaggagaatttgtcccatatttaagcaatattgtcaagccattgcatgataggctgaagaaaaatccgcctccttggtctgacctccatacacaaacagttaaagaaatcaaagtcaaagtccaatccataaaatgtttgtatcctcctattccacaggcattcaaaattgtcgaaactgatgcttcagacataggttatggtggcatcctcaaacaaagagtccatggccaagatcatgtcattgcatatacatcaaaacattggaatcctgcacaattaaaatattcaactgttaaaaaagaagttttagcaattgttttgtgcatttccaaatttcaatcggatttatttaatcaaaa

SEQ ID NO: 14086 - DNA, 1080 bp, Glycine max
  Gm_smallRNAprecursor_6919
aaaagcaaaagcccatggtcttgtgcggctttttatgtcaataaacaatctgagattgagcatggaacaccccgcttagtcataaattacaaaccactaaatcaagcattacaatggattagatatcctattccaaacaaaaaagatttgcttaacagattaaattctgcaaagatattttcaaaatttgatatgaaatctggattttggcaaatccaaatccaagaatcagataggtacaaaacgacatttactgtacctttcgggcaatatgaatggaacgtgatgtcattcggactgaagaatgccccttcagaatttcaaaaaattatgaacgatatttttaatccctattcaaaatttgtcattgtctacatagatgatgttttaatcttttcccaaaacattgaccaacatttcaaacatctccaaaccttcatacatatcatcaaacaaaatggtttggcagtctccaaatcaaaaattaatcttttccaaactcgaattcgattccttggtcacaatatatatcaaggtacaatcattccaatcgaaaggtcaatagagtttgctagcaaattccccaaccaaatcttagacaaaacccagttacaaagatttctaggttgtctaaattacgtaggagaatttgtcccatatttaagcaatattgtcaagccattgcatgataggctgaagaaaaatccgcctccttggtctgacctccatacacaaacagttaaagaaatcaaagtcaaagtccaatccataaaatgtttgtatcctcctattccacaggcattcaaaattgtcgaaactgatgcttcagacataggttatggtggcatcctcaaacaaagagtccatggccaagatcatgtcattgcatatacatcaaaacattggaatcctgcacaattaaaatattcaactgttaaaaaagaagttttagcaattgttttgtgcatttccaaatttcaatcggatttatttaatcaaaattttttaatcagggttgattgtaaatcagccaaagatattttacaaaaagatgttaaaaaccttgcctcaaaacaaatt

SEQ ID NO: 14087 - DNA, 1168 bp, Glycine max
  Gm_smallRNAprecursor_6920
atggtcttgtgcggctttttatgtcaataaacaatctgagattgagcatggaacaccccgcttagtcataaattacaaaccactaaatcaagcattacaatggattagatatcctattccaaacaaaaaagatttgcttaacagattaaattctgcaaagatattttcaaaatttgatatgaaatctggattttggcaaatccaaatccaagaatcagataggtacaaaacgacatttactgtacctttcgggcaatatgaatggaacgtgatgtcattcggactgaagaatgccccttcagaatttcaaaaaattatgaacgatatttttaatccctattcaaaatttgtcattgtctacatagatgatgttttaatcttttcccaaaacattgaccaacatttcaaacatctccaaaccttcatacatatcatcaaacaaaatggtttggcagtctccaaatcaaaaattaatcttttccaaactcgaattcgattccttggtcacaatatatatcaaggtacaatcattccaatcgaaaggtcaatagagtttgctagcaaattccccaaccaaatcttagacaaaacccagttacaaagatttctaggttgtctaaattacgtaggagaatttgtcccatatttaagcaatattgtcaagccattgcatgataggctgaagaaaaatccgcctccttggtctgacctccatacacaaacagttaaagaaatcaaagtcaaagtccaatccataaaatgtttgtatcctcctattccacaggcattcaaaattgtcgaaactgatgcttcagacataggttatggtggcatcctcaaacaaagagtccatggccaagatcatgtcattgcatatacatcaaaacattggaatcctgcacaattaaaatattcaactgttaaaaaagaagttttagcaattgttttgtgcatttccaaatttcaatcggatttatttaatcaaaattttttaatcagggttgattgtaaatcagccaaagatattttacaaaaagatgttaaaaaccttgcctcaaaacaaatttttgcaagatggcaagcaattctaagtgtctttgattttgacatagaatacatcaagggcacctcaaattcattacctgactaccttacccgtgaattctta

SEQ ID NO: 14088 - DNA, 1035 bp, Glycine max
  Gm_smallRNAprecursor_6921
attgtctacatagatgatgttttaatcttttcccaaaacattgaccaacatttcaaacatctccaaaccttcatacatatcatcaaacaaaatggtttggcagtctccaaatcaaaaattaatcttttccaaactcgaattcgattccttggtcacaatatatatcaaggtacaatcattccaatcgaaaggtcaatagagtttgctagcaaattccccaaccaaatcttagacaaaacccagttacaaagatttctaggttgtctaaattacgtaggagaatttgtcccatatttaagcaatattgtcaagccattgcatgataggctgaagaaaaatccgcctccttggtctgacctccatacacaaacagttaaagaaatcaaagtcaaagtccaatccataaaatgtttgtatcctcctattccacaggcattcaaaattgtcgaaactgatgcttcagacataggttatggtggcatcctcaaacaaagagtccatggccaagatcatgtcattgcatatacatcaaaacattggaatcctgcacaattaaaatattcaactgttaaaaaagaagttttagcaattgttttgtgcatttccaaatttcaatcggatttatttaatcaaaattttttaatcagggttgattgtaaatcagccaaagatattttacaaaaagatgttaaaaaccttgcctcaaaacaaatttttgcaagatggcaagcaattctaagtgtctttgattttgacatagaatacatcaagggcacctcaaattcattacctgactaccttacccgtgaattcttacagaaaagtggtaatgcctcctaaggcatcgagaatctccctaaggggaggaaggagtacaggcaaaggagccagactggctcttccagagccaaccatcaagaaatcatcaacctcttctgggtcatcaacccaggctgggtcatctacccagaaaaccaatttagaagggtcatcaacccaaattgcttcaatcaaacctgagccatccactcagga

SEQ ID NO: 14089 - DNA, 1035 bp, Glycine max; identical to SEQ ID NO: 14088
  Gm_smallRNAprecursor_6922

SEQ ID NO: 14090 - DNA, 1091 bp, Glycine max
  Gm_smallRNAprecursor_6923
caattctaagtgtctttgattttgacatagaatacatcaagggcacctcaaattcattacctgactaccttacccgtgaattcttacagaaaagtggtaatgcctcctaaggcatcgagaatctccctaaggggaggaaggagtacaggcaaaggagccagactggctcttccagagccaaccatcaagaaatcatcaacctcttctgggtcatcaacccaggctgggtcatctacccagaaaaccaatttagaagggtcatcaacccaaattgcttcaatcaaacctgagccatccactcaggaatctcccaaaccggcaaccgccaaacaaacatcagccgactatgcatggccaattgaaacccttcaggcccttcaagacatgggtctaaccaaatttccaaaaataatcaaaaaatcttgggcagacattgcctcagaatctgatgatgaatctgaatcaaatctacaaacaatgatccaaaatgcgtcaatgaccaaaacagccaccaatactaaaggaaaactacctttagccaaagctcaaacaccaaccaccaaacaaactaacaattatatttataaaaataaattgttaactgttttgcagatggaacctaaattttgggacaaaaatcccttcaaggcgacggccaaggctttcccaccaggatttcactacaaaccaaccaccatcctgaagacaagaactttttatgaattgattttggtagattcaaactcagtatctatcaaacatttcaaagatccaaaagaccaaacattaaacacccactcgacaatccaaatactaaaagttcttcaaccaagacactttggttcggacttgaacaaaggaatgagattttcagttccatttgatccggtaggttatacctattgggattacgttgatgcttggactaaggtgttttggcaccaaaatacccgcttcaagcattcatggctgatatatttcaagaccaatacaatttacaattttcccaattggtttttgcaatggtgggacttctttggaccaatcccagagatattcctagaaacagtccaacaaggattttctcaatt

SEQ ID NO: 14091 - DNA, 1099 bp, Glycine max
  Gm_smallRNAprecursor_6924
gtaatgcctcctaaggcatcgagaatctccctaaggggaggaaggagtacaggcaaaggagccagactggctcttccagagccaaccatcaagaaatcatcaacctcttctgggtcatcaacccaggctgggtcatctacccagaaaaccaatttagaagggtcatcaacccaaattgcttcaatcaaacctgagccatccactcaggaatctcccaaaccggcaaccgccaaacaaacatcagccgactatgcatggccaattgaaacccttcaggcccttcaagacatgggtctaaccaaatttccaaaaataatcaaaaaatcttgggcagacattgcctcagaatctgatgatgaatctgaatcaaatctacaaacaatgatccaaaatgcgtcaatgaccaaaacagccaccaatactaaaggaaaactacctttagccaaagctcaaacaccaaccaccaaacaaactaacaattatatttataaaaataaattgttaactgttttgcagatggaacctaaattttgggacaaaaatcccttcaaggcgacggccaaggctttcccaccaggatttcactacaaaccaaccaccatcctgaagacaagaactttttatgaattgattttggtagattcaaactcagtatctatcaaacatttcaaagatccaaaagaccaaacattaaacacccactcgacaatccaaatactaaaagttcttcaaccaagacactttggttcggacttgaacaaaggaatgagattttcagttccatttgatccggtaggttatacctattgggattacgttgatgcttggactaaggtgttttggcaccaaaatacccgcttcaagcattcatggctgatatatttcaagaccaatacaatttacaattttcccaattggtttttgcaatggtgggacttctttggaccaatcccagagatattcctagaaacagtccaacaaggattttctcaatttaagaaacaatacaattcgcaggaatcacgaattcccacagatcttaaatacttttcaagctttgcactgtcatggatattctcatggcaatatcgttacagca

SEQ ID NO: 14092 - DNA, 1190 bp, Glycine max
  Gm_smallRNAprecursor_6925
acaggcaaaggagccagactggctcttccagagccaaccatcaagaaatcatcaacctcttctgggtcatcaacccaggctgggtcatctacccagaaaaccaatttagaagggtcatcaacccaaattgcttcaatcaaacctgagccatccactcaggaatctcccaaaccggcaaccgccaaacaaacatcagccgactatgcatggccaattgaaacccttcaggcccttcaagacatgggtctaaccaaatttccaaaaataatcaaaaaatcttgggcagacattgcctcagaatctgatgatgaatctgaatcaaatctacaaacaatgatccaaaatgcgtcaatgaccaaaacagccaccaatactaaaggaaaactacctttagccaaagctcaaacaccaaccaccaaacaaactaacaattatatttataaaaataaattgttaactgttttgcagatggaacctaaattttgggacaaaaatcccttcaaggcgacggccaaggctttcccaccaggatttcactacaaaccaaccaccatcctgaagacaagaactttttatgaattgattttggtagattcaaactcagtatctatcaaacatttcaaagatccaaaagaccaaacattaaacacccactcgacaatccaaatactaaaagttcttcaaccaagacactttggttcggacttgaacaaaggaatgagattttcagttccatttgatccggtaggttatacctattgggattacgttgatgcttggactaaggtgttttggcaccaaaatacccgcttcaagcattcatggctgatatatttcaagaccaatacaatttacaattttcccaattggtttttgcaatggtgggacttctttggaccaatcccagagatattcctagaaacagtccaacaaggattttctcaatttaagaaacaatacaattcgcaggaatcacgaattcccacagatcttaaatacttttcaagctttgcactgtcatggatattctcatggcaatatcgttacagcaagactgaaaagacaaaccaatatccatcattacaaagacacgcatttgtaaaatggtggacacaatttgactcatccaaagcggatccagaacaagtaaaactctggttccaatcccatccagaattcctcaaagcagc

SEQ ID NO: 14093 - DNA, 1171 bp, Glycine max
  Gm_smallRNAprecursor_6926
tcccaaaccggcaaccgccaaacaaacatcagccgactatgcatggccaattgaaacccttcaggcccttcaagacatgggtctaaccaaatttccaaaaataatcaaaaaatcttgggcagacattgcctcagaatctgatgatgaatctgaatcaaatctacaaacaatgatccaaaatgcgtcaatgaccaaaacagccaccaatactaaaggaaaactacctttagccaaagctcaaacaccaaccaccaaacaaactaacaattatatttataaaaataaattgttaactgttttgcagatggaacctaaattttgggacaaaaatcccttcaaggcgacggccaaggctttcccaccaggatttcactacaaaccaaccaccatcctgaagacaagaactttttatgaattgattttggtagattcaaactcagtatctatcaaacatttcaaagatccaaaagaccaaacattaaacacccactcgacaatccaaatactaaaagttcttcaaccaagacactttggttcggacttgaacaaaggaatgagattttcagttccatttgatccggtaggttatacctattgggattacgttgatgcttggactaaggtgttttggcaccaaaatacccgcttcaagcattcatggctgatatatttcaagaccaatacaatttacaattttcccaattggtttttgcaatggtgggacttctttggaccaatcccagagatattcctagaaacagtccaacaaggattttctcaatttaagaaacaatacaattcgcaggaatcacgaattcccacagatcttaaatacttttcaagctttgcactgtcatggatattctcatggcaatatcgttacagcaagactgaaaagacaaaccaatatccatcattacaaagacacgcatttgtaaaatggtggacacaatttgactcatccaaagcggatccagaacaagtaaaactctggttccaatcccatccagaattcctcaaagcagctgatccagaaacttctgcgtttttgaaccaaaagtctcatctggcagcatttttagcaggatcgacatcaaaggaagtcttagctaaaaatctgaaggaagttctgcaaatgttacagcaggaagaagaagcttcatcctcaaag

SEQ ID NO: 14094 - DNA, 1166 bp, Glycine max
  Gm_smallRNAprecursor_6927
ccaaaccggcaaccgccaaacaaacatcagccgactatgcatggccaattgaaacccttcaggcccttcaagacatgggtctaaccaaatttccaaaaataatcaaaaaatcttgggcagacattgcctcagaatctgatgatgaatctgaatcaaatctacaaacaatgatccaaaatgcgtcaatgaccaaaacagccaccaatactaaaggaaaactacctttagccaaagctcaaacaccaaccaccaaacaaactaacaattatatttataaaaataaattgttaactgttttgcagatggaacctaaattttgggacaaaaatcccttcaaggcgacggccaaggctttcccaccaggatttcactacaaaccaaccaccatcctgaagacaagaactttttatgaattgattttggtagattcaaactcagtatctatcaaacatttcaaagatccaaaagaccaaacattaaacacccactcgacaatccaaatactaaaagttcttcaaccaagacactttggttcggacttgaacaaaggaatgagattttcagttccatttgatccggtaggttatacctattgggattacgttgatgcttggactaaggtgttttggcaccaaaatacccgcttcaagcattcatggctgatatatttcaagaccaatacaatttacaattttcccaattggtttttgcaatggtgggacttctttggaccaatcccagagatattcctagaaacagtccaacaaggattttctcaatttaagaaacaatacaattcgcaggaatcacgaattcccacagatcttaaatacttttcaagctttgcactgtcatggatattctcatggcaatatcgttacagcaagactgaaaagacaaaccaatatccatcattacaaagacacgcatttgtaaaatggtggacacaatttgactcatccaaagcggatccagaacaagtaaaactctggttccaatcccatccagaattcctcaaagcagctgatccagaaacttctgcgtttttgaaccaaaagtctcatctggcagcatttttagcaggatcgacatcaaaggaagtcttagctaaaaatctgaaggaagttctgcaaatgttacagcaggaagaagaagcttcatcctca

SEQ ID NO: 14095 - DNA, 1169 bp, Glycine max
  Gm_smallRNAprecursor_6928
ccaaaccggcaaccgccaaacaaacatcagccgactatgcatggccaattgaaacccttcaggcccttcaagacatgggtctaaccaaatttccaaaaataatcaaaaaatcttgggcagacattgcctcagaatctgatgatgaatctgaatcaaatctacaaacaatgatccaaaatgcgtcaatgaccaaaacagccaccaatactaaaggaaaactacctttagccaaagctcaaacaccaaccaccaaacaaactaacaattatatttataaaaataaattgttaactgttttgcagatggaacctaaattttgggacaaaaatcccttcaaggcgacggccaaggctttcccaccaggatttcactacaaaccaaccaccatcctgaagacaagaactttttatgaattgattttggtagattcaaactcagtatctatcaaacatttcaaagatccaaaagaccaaacattaaacacccactcgacaatccaaatactaaaagttcttcaaccaagacactttggttcggacttgaacaaaggaatgagattttcagttccatttgatccggtaggttatacctattgggattacgttgatgcttggactaaggtgttttggcaccaaaatacccgcttcaagcattcatggctgatatatttcaagaccaatacaatttacaattttcccaattggtttttgcaatggtgggacttctttggaccaatcccagagatattcctagaaacagtccaacaaggattttctcaatttaagaaacaatacaattcgcaggaatcacgaattcccacagatcttaaatacttttcaagctttgcactgtcatggatattctcatggcaatatcgttacagcaagactgaaaagacaaaccaatatccatcattacaaagacacgcatttgtaaaatggtggacacaatttgactcatccaaagcggatccagaacaagtaaaactctggttccaatcccatccagaattcctcaaagcagctgatccagaaacttctgcgtttttgaaccaaaagtctcatctggcagcatttttagcaggatcgacatcaaaggaagtcttagctaaaaatctgaaggaagttctgcaaatgttacagcaggaagaagaagcttcatcctcaaag

SEQ ID NO: 14096 - DNA, 1107 bp, Glycine max
  Gm_smallRNAprecursor_6929
aaccggcaaccgccaaacaaacatcagccgactatgcatggccaattgaaacccttcaggcccttcaagacatgggtctaaccaaatttccaaaaataatcaaaaaatcttgggcagacattgcctcagaatctgatgatgaatctgaatcaaatctacaaacaatgatccaaaatgcgtcaatgaccaaaacagccaccaatactaaaggaaaactacctttagccaaagctcaaacaccaaccaccaaacaaactaacaattatatttataaaaataaattgttaactgttttgcagatggaacctaaattttgggacaaaaatcccttcaaggcgacggccaaggctttcccaccaggatttcactacaaaccaaccaccatcctgaagacaagaactttttatgaattgattttggtagattcaaactcagtatctatcaaacatttcaaagatccaaaagaccaaacattaaacacccactcgacaatccaaatactaaaagttcttcaaccaagacactttggttcggacttgaacaaaggaatgagattttcagttccatttgatccggtaggttatacctattgggattacgttgatgcttggactaaggtgttttggcaccaaaatacccgcttcaagcattcatggctgatatatttcaagaccaatacaatttacaattttcccaattggtttttgcaatggtgggacttctttggaccaatcccagagatattcctagaaacagtccaacaaggattttctcaatttaagaaacaatacaattcgcaggaatcacgaattcccacagatcttaaatacttttcaagctttgcactgtcatggatattctcatggcaatatcgttacagcaagactgaaaagacaaaccaatatccatcattacaaagacacgcatttgtaaaatggtggacacaatttgactcatccaaagcggatccagaacaagtaaaactctggttccaatcccatccagaattcctcaaagcagctgatccagaaacttctgcgtttttgaaccaaaagtctcatctggcagcatttttagcaggatcgacatcaaaggaagtcttagcta

SEQ ID NO: 14097 - DNA, 1107 bp, Glycine max; identical to SEQ ID NO: 14096
  Gm_smallRNAprecursor_6930

SEQ ID NO: 14098 - DNA, 1108 bp, Glycine max
  Gm_smallRNAprecursor_6931
aaccggcaaccgccaaacaaacatcagccgactatgcatggccaattgaaacccttcaggcccttcaagacatgggtctaaccaaatttccaaaaataatcaaaaaatcttgggcagacattgcctcagaatctgatgatgaatctgaatcaaatctacaaacaatgatccaaaatgcgtcaatgaccaaaacagccaccaatactaaaggaaaactacctttagccaaagctcaaacaccaaccaccaaacaaactaacaattatatttataaaaataaattgttaactgttttgcagatggaacctaaattttgggacaaaaatcccttcaaggcgacggccaaggctttcccaccaggatttcactacaaaccaaccaccatcctgaagacaagaactttttatgaattgattttggtagattcaaactcagtatctatcaaacatttcaaagatccaaaagaccaaacattaaacacccactcgacaatccaaatactaaaagttcttcaaccaagacactttggttcggacttgaacaaaggaatgagattttcagttccatttgatccggtaggttatacctattgggattacgttgatgcttggactaaggtgttttggcaccaaaatacccgcttcaagcattcatggctgatatatttcaagaccaatacaatttacaattttcccaattggtttttgcaatggtgggacttctttggaccaatcccagagatattcctagaaacagtccaacaaggattttctcaatttaagaaacaatacaattcgcaggaatcacgaattcccacagatcttaaatacttttcaagctttgcactgtcatggatattctcatggcaatatcgttacagcaagactgaaaagacaaaccaatatccatcattacaaagacacgcatttgtaaaatggtggacacaatttgactcatccaaagcggatccagaacaagtaaaactctggttccaatcccatccagaattcctcaaagcagctgatccagaaacttctgcgtttttgaaccaaaagtctcatctggcagcatttttagcaggatcgacatcaaaggaagtcttagctaa

SEQ ID NO: 14099 - DNA, 1108 bp, Glycine max; identical to SEQ ID NO: 14098
  Gm_smallRNAprecursor_6932

SEQ ID NO: 14100 - DNA, 1102 bp, Glycine max
  Gm_smallRNAprecursor_6933
cggcaaccgccaaacaaacatcagccgactatgcatggccaattgaaacccttcaggcccttcaagacatgggtctaaccaaatttccaaaaataatcaaaaaatcttgggcagacattgcctcagaatctgatgatgaatctgaatcaaatctacaaacaatgatccaaaatgcgtcaatgaccaaaacagccaccaatactaaaggaaaactacctttagccaaagctcaaacaccaaccaccaaacaaactaacaattatatttataaaaataaattgttaactgttttgcagatggaacctaaattttgggacaaaaatcccttcaaggcgacggccaaggctttcccaccaggatttcactacaaaccaaccaccatcctgaagacaagaactttttatgaattgattttggtagattcaaactcagtatctatcaaacatttcaaagatccaaaagaccaaacattaaacacccactcgacaatccaaatactaaaagttcttcaaccaagacactttggttcggacttgaacaaaggaatgagattttcagttccatttgatccggtaggttatacctattgggattacgttgatgcttggactaaggtgttttggcaccaaaatacccgcttcaagcattcatggctgatatatttcaagaccaatacaatttacaattttcccaattggtttttgcaatggtgggacttctttggaccaatcccagagatattcctagaaacagtccaacaaggattttctcaatttaagaaacaatacaattcgcaggaatcacgaattcccacagatcttaaatacttttcaagctttgcactgtcatggatattctcatggcaatatcgttacagcaagactgaaaagacaaaccaatatccatcattacaaagacacgcatttgtaaaatggtggacacaatttgactcatccaaagcggatccagaacaagtaaaactctggttccaatcccatccagaattcctcaaagcagctgatccagaaacttctgcgtttttgaaccaaaagtctcatctggcagcatttttagcaggatcgacatcaaaggaagtcttagc

SEQ ID NO: 14101 - DNA, 1098 bp, Glycine max
  Gm_smallRNAprecursor_6934
caagacatgggtctaaccaaatttccaaaaataatcaaaaaatcttgggcagacattgcctcagaatctgatgatgaatctgaatcaaatctacaaacaatgatccaaaatgcgtcaatgaccaaaacagccaccaatactaaaggaaaactacctttagccaaagctcaaacaccaaccaccaaacaaactaacaattatatttataaaaataaattgttaactgttttgcagatggaacctaaattttgggacaaaaatcccttcaaggcgacggccaaggctttcccaccaggatttcactacaaaccaaccaccatcctgaagacaagaactttttatgaattgattttggtagattcaaactcagtatctatcaaacatttcaaagatccaaaagaccaaacattaaacacccactcgacaatccaaatactaaaagttcttcaaccaagacactttggttcggacttgaacaaaggaatgagattttcagttccatttgatccggtaggttatacctattgggattacgttgatgcttggactaaggtgttttggcaccaaaatacccgcttcaagcattcatggctgatatatttcaagaccaatacaatttacaattttcccaattggtttttgcaatggtgggacttctttggaccaatcccagagatattcctagaaacagtccaacaaggattttctcaatttaagaaacaatacaattcgcaggaatcacgaattcccacagatcttaaatacttttcaagctttgcactgtcatggatattctcatggcaatatcgttacagcaagactgaaaagacaaaccaatatccatcattacaaagacacgcatttgtaaaatggtggacacaatttgactcatccaaagcggatccagaacaagtaaaactctggttccaatcccatccagaattcctcaaagcagctgatccagaaacttctgcgtttttgaaccaaaagtctcatctggcagcatttttagcaggatcgacatcaaaggaagtcttagctaaaaatctgaaggaagttctgcaaatgttacagcaggaagaagaagcttcatcctca

SEQ ID NO: 14102 - DNA, 1099 bp, Glycine max
  Gm_smallRNAprecursor_6935
caagacatgggtctaaccaaatttccaaaaataatcaaaaaatcttgggcagacattgcctcagaatctgatgatgaatctgaatcaaatctacaaacaatgatccaaaatgcgtcaatgaccaaaacagccaccaatactaaaggaaaactacctttagccaaagctcaaacaccaaccaccaaacaaactaacaattatatttataaaaataaattgttaactgttttgcagatggaacctaaattttgggacaaaaatcccttcaaggcgacggccaaggctttcccaccaggatttcactacaaaccaaccaccatcctgaagacaagaactttttatgaattgattttggtagattcaaactcagtatctatcaaacatttcaaagatccaaaagaccaaacattaaacacccactcgacaatccaaatactaaaagttcttcaaccaagacactttggttcggacttgaacaaaggaatgagattttcagttccatttgatccggtaggttatacctattgggattacgttgatgcttggactaaggtgttttggcaccaaaatacccgcttcaagcattcatggctgatatatttcaagaccaatacaatttacaattttcccaattggtttttgcaatggtgggacttctttggaccaatcccagagatattcctagaaacagtccaacaaggattttctcaatttaagaaacaatacaattcgcaggaatcacgaattcccacagatcttaaatacttttcaagctttgcactgtcatggatattctcatggcaatatcgttacagcaagactgaaaagacaaaccaatatccatcattacaaagacacgcatttgtaaaatggtggacacaatttgactcatccaaagcggatccagaacaagtaaaactctggttccaatcccatccagaattcctcaaagcagctgatccagaaacttctgcgtttttgaaccaaaagtctcatctggcagcatttttagcaggatcgacatcaaaggaagtcttagctaaaaatctgaaggaagttctgcaaatgttacagcaggaagaagaagcttcatcctcaa

SEQ ID NO: 14103 - DNA, 1190 bp, Glycine max
  Gm_smallRNAprecursor_6936
caatgatccaaaatgcgtcaatgaccaaaacagccaccaatactaaaggaaaactacctttagccaaagctcaaacaccaaccaccaaacaaactaacaattatatttataaaaataaattgttaactgttttgcagatggaacctaaattttgggacaaaaatcccttcaaggcgacggccaaggctttcccaccaggatttcactacaaaccaaccaccatcctgaagacaagaactttttatgaattgattttggtagattcaaactcagtatctatcaaacatttcaaagatccaaaagaccaaacattaaacacccactcgacaatccaaatactaaaagttcttcaaccaagacactttggttcggacttgaacaaaggaatgagattttcagttccatttgatccggtaggttatacctattgggattacgttgatgcttggactaaggtgttttggcaccaaaatacccgcttcaagcattcatggctgatatatttcaagaccaatacaatttacaattttcccaattggtttttgcaatggtgggacttctttggaccaatcccagagatattcctagaaacagtccaacaaggattttctcaatttaagaaacaatacaattcgcaggaatcacgaattcccacagatcttaaatacttttcaagctttgcactgtcatggatattctcatggcaatatcgttacagcaagactgaaaagacaaaccaatatccatcattacaaagacacgcatttgtaaaatggtggacacaatttgactcatccaaagcggatccagaacaagtaaaactctggttccaatcccatccagaattcctcaaagcagctgatccagaaacttctgcgtttttgaaccaaaagtctcatctggcagcatttttagcaggatcgacatcaaaggaagtcttagctaaaaatctgaaggaagttctgcaaatgttacagcaggaagaagaagcttcatcctcaaagaaggaagaaacaagttctgctgaagaagaagaagaagaagaagatcccttttaccaaaacgaagatgattgttttggtatctgcttagattaaatttaatttcggtcacaaaaccgcatgtttgtaattaatgtgtaattaatgctggacaatactacctgtcctgtagccattaaagtcccggtc

SEQ ID NO: 14104 - DNA, 1189 bp, Glycine max
  Gm_smallRNAprecursor_6937
aatgatccaaaatgcgtcaatgaccaaaacagccaccaatactaaaggaaaactacctttagccaaagctcaaacaccaaccaccaaacaaactaacaattatatttataaaaataaattgttaactgttttgcagatggaacctaaattttgggacaaaaatcccttcaaggcgacggccaaggctttcccaccaggatttcactacaaaccaaccaccatcctgaagacaagaactttttatgaattgattttggtagattcaaactcagtatctatcaaacatttcaaagatccaaaagaccaaacattaaacacccactcgacaatccaaatactaaaagttcttcaaccaagacactttggttcggacttgaacaaaggaatgagattttcagttccatttgatccggtaggttatacctattgggattacgttgatgcttggactaaggtgttttggcaccaaaatacccgcttcaagcattcatggctgatatatttcaagaccaatacaatttacaattttcccaattggtttttgcaatggtgggacttctttggaccaatcccagagatattcctagaaacagtccaacaaggattttctcaatttaagaaacaatacaattcgcaggaatcacgaattcccacagatcttaaatacttttcaagctttgcactgtcatggatattctcatggcaatatcgttacagcaagactgaaaagacaaaccaatatccatcattacaaagacacgcatttgtaaaatggtggacacaatttgactcatccaaagcggatccagaacaagtaaaactctggttccaatcccatccagaattcctcaaagcagctgatccagaaacttctgcgtttttgaaccaaaagtctcatctggcagcatttttagcaggatcgacatcaaaggaagtcttagctaaaaatctgaaggaagttctgcaaatgttacagcaggaagaagaagcttcatcctcaaagaaggaagaaacaagttctgctgaagaagaagaagaagaagaagatcccttttaccaaaacgaagatgattgttttggtatctgcttagattaaatttaatttcggtcacaaaaccgcatgtttgtaattaatgtgtaattaatgctggacaatactacctgtcctgtagccattaaagtcccggtc

SEQ ID NO: 14105 - DNA, 1131 bp, Glycine max
  Gm_smallRNAprecursor_6938
cgacggccaaggctttcccaccaggatttcactacaaaccaaccaccatcctgaagacaagaactttttatgaattgattttggtagattcaaactcagtatctatcaaacatttcaaagatccaaaagaccaaacattaaacacccactcgacaatccaaatactaaaagttcttcaaccaagacactttggttcggacttgaacaaaggaatgagattttcagttccatttgatccggtaggttatacctattgggattacgttgatgcttggactaaggtgttttggcaccaaaatacccgcttcaagcattcatggctgatatatttcaagaccaatacaatttacaattttcccaattggtttttgcaatggtgggacttctttggaccaatcccagagatattcctagaaacagtccaacaaggattttctcaatttaagaaacaatacaattcgcaggaatcacgaattcccacagatcttaaatacttttcaagctttgcactgtcatggatattctcatggcaatatcgttacagcaagactgaaaagacaaaccaatatccatcattacaaagacacgcatttgtaaaatggtggacacaatttgactcatccaaagcggatccagaacaagtaaaactctggttccaatcccatccagaattcctcaaagcagctgatccagaaacttctgcgtttttgaaccaaaagtctcatctggcagcatttttagcaggatcgacatcaaaggaagtcttagctaaaaatctgaaggaagttctgcaaatgttacagcaggaagaagaagcttcatcctcaaagaaggaagaaacaagttctgctgaagaagaagaagaagaagaagatcccttttaccaaaacgaagatgattgttttggtatctgcttagattaaatttaatttcggtcacaaaaccgcatgtttgtaattaatgtgtaattaatgctggacaatactacctgtcctgtagccattaaagtcccggtcaaaactacttgtcttgtaacaaacagtcaaatagtcccggtcaaaactaccggtcttagatttttggctatataaggggtcctcaagtatgttgtgaggcaccctttcatttagc

SEQ ID NO: 14106 - DNA, 1169 bp, Glycine max
  Gm_smallRNAprecursor_6939
cgacggccaaggctttcccaccaggatttcactacaaaccaaccaccatcctgaagacaagaactttttatgaattgattttggtagattcaaactcagtatctatcaaacatttcaaagatccaaaagaccaaacattaaacacccactcgacaatccaaatactaaaagttcttcaaccaagacactttggttcggacttgaacaaaggaatgagattttcagttccatttgatccggtaggttatacctattgggattacgttgatgcttggactaaggtgttttggcaccaaaatacccgcttcaagcattcatggctgatatatttcaagaccaatacaatttacaattttcccaattggtttttgcaatggtgggacttctttggaccaatcccagagatattcctagaaacagtccaacaaggattttctcaatttaagaaacaatacaattcgcaggaatcacgaattcccacagatcttaaatacttttcaagctttgcactgtcatggatattctcatggcaatatcgttacagcaagactgaaaagacaaaccaatatccatcattacaaagacacgcatttgtaaaatggtggacacaatttgactcatccaaagcggatccagaacaagtaaaactctggttccaatcccatccagaattcctcaaagcagctgatccagaaacttctgcgtttttgaaccaaaagtctcatctggcagcatttttagcaggatcgacatcaaaggaagtcttagctaaaaatctgaaggaagttctgcaaatgttacagcaggaagaagaagcttcatcctcaaagaaggaagaaacaagttctgctgaagaagaagaagaagaagaagatcccttttaccaaaacgaagatgattgttttggtatctgcttagattaaatttaatttcggtcacaaaaccgcatgtttgtaattaatgtgtaattaatgctggacaatactacctgtcctgtagccattaaagtcccggtcaaaactacttgtcttgtaacaaacagtcaaatagtcccggtcaaaactaccggtcttagatttttggctatataaggggtcctcaagtatgttgtgaggcaccctttcatttagccattttttcaggtttctgaagagagatgctctgaaaca

SEQ ID NO: 14107 - DNA, 1173 bp, Glycine max
  Gm_smallRNAprecursor_6940
cgacggccaaggctttcccaccaggatttcactacaaaccaaccaccatcctgaagacaagaactttttatgaattgattttggtagattcaaactcagtatctatcaaacatttcaaagatccaaaagaccaaacattaaacacccactcgacaatccaaatactaaaagttcttcaaccaagacactttggttcggacttgaacaaaggaatgagattttcagttccatttgatccggtaggttatacctattgggattacgttgatgcttggactaaggtgttttggcaccaaaatacccgcttcaagcattcatggctgatatatttcaagaccaatacaatttacaattttcccaattggtttttgcaatggtgggacttctttggaccaatcccagagatattcctagaaacagtccaacaaggattttctcaatttaagaaacaatacaattcgcaggaatcacgaattcccacagatcttaaatacttttcaagctttgcactgtcatggatattctcatggcaatatcgttacagcaagactgaaaagacaaaccaatatccatcattacaaagacacgcatttgtaaaatggtggacacaatttgactcatccaaagcggatccagaacaagtaaaactctggttccaatcccatccagaattcctcaaagcagctgatccagaaacttctgcgtttttgaaccaaaagtctcatctggcagcatttttagcaggatcgacatcaaaggaagtcttagctaaaaatctgaaggaagttctgcaaatgttacagcaggaagaagaagcttcatcctcaaagaaggaagaaacaagttctgctgaagaagaagaagaagaagaagatcccttttaccaaaacgaagatgattgttttggtatctgcttagattaaatttaatttcggtcacaaaaccgcatgtttgtaattaatgtgtaattaatgctggacaatactacctgtcctgtagccattaaagtcccggtcaaaactacttgtcttgtaacaaacagtcaaatagtcccggtcaaaactaccggtcttagatttttggctatataaggggtcctcaagtatgttgtgaggcaccctttcatttagccattttttcaggtttctgaagagagatgctctgaaacaagat

SEQ ID NO: 14108 - DNA, 1078 bp, Glycine max
  Gm_smallRNAprecursor_6941
attcaaactcagtatctatcaaacatttcaaagatccaaaagaccaaacattaaacacccactcgacaatccaaatactaaaagttcttcaaccaagacactttggttcggacttgaacaaaggaatgagattttcagttccatttgatccggtaggttatacctattgggattacgttgatgcttggactaaggtgttttggcaccaaaatacccgcttcaagcattcatggctgatatatttcaagaccaatacaatttacaattttcccaattggtttttgcaatggtgggacttctttggaccaatcccagagatattcctagaaacagtccaacaaggattttctcaatttaagaaacaatacaattcgcaggaatcacgaattcccacagatcttaaatacttttcaagctttgcactgtcatggatattctcatggcaatatcgttacagcaagactgaaaagacaaaccaatatccatcattacaaagacacgcatttgtaaaatggtggacacaatttgactcatccaaagcggatccagaacaagtaaaactctggttccaatcccatccagaattcctcaaagcagctgatccagaaacttctgcgtttttgaaccaaaagtctcatctggcagcatttttagcaggatcgacatcaaaggaagtcttagctaaaaatctgaaggaagttctgcaaatgttacagcaggaagaagaagcttcatcctcaaagaaggaagaaacaagttctgctgaagaagaagaagaagaagaagatcccttttaccaaaacgaagatgattgttttggtatctgcttagattaaatttaatttcggtcacaaaaccgcatgtttgtaattaatgtgtaattaatgctggacaatactacctgtcctgtagccattaaagtcccggtcaaaactacttgtcttgtaacaaacagtcaaatagtcccggtcaaaactaccggtcttagatttttggctatataaggggtcctcaagtatgttgtgaggcaccctttcatttagccattttttcaggtttctgaagagagatgctctga

SEQ ID NO: 14109 - DNA, 1079 bp, Glycine max
  Gm_smallRNAprecursor_6942
attcaaactcagtatctatcaaacatttcaaagatccaaaagaccaaacattaaacacccactcgacaatccaaatactaaaagttcttcaaccaagacactttggttcggacttgaacaaaggaatgagattttcagttccatttgatccggtaggttatacctattgggattacgttgatgcttggactaaggtgttttggcaccaaaatacccgcttcaagcattcatggctgatatatttcaagaccaatacaatttacaattttcccaattggtttttgcaatggtgggacttctttggaccaatcccagagatattcctagaaacagtccaacaaggattttctcaatttaagaaacaatacaattcgcaggaatcacgaattcccacagatcttaaatacttttcaagctttgcactgtcatggatattctcatggcaatatcgttacagcaagactgaaaagacaaaccaatatccatcattacaaagacacgcatttgtaaaatggtggacacaatttgactcatccaaagcggatccagaacaagtaaaactctggttccaatcccatccagaattcctcaaagcagctgatccagaaacttctgcgtttttgaaccaaaagtctcatctggcagcatttttagcaggatcgacatcaaaggaagtcttagctaaaaatctgaaggaagttctgcaaatgttacagcaggaagaagaagcttcatcctcaaagaaggaagaaacaagttctgctgaagaagaagaagaagaagaagatcccttttaccaaaacgaagatgattgttttggtatctgcttagattaaatttaatttcggtcacaaaaccgcatgtttgtaattaatgtgtaattaatgctggacaatactacctgtcctgtagccattaaagtcccggtcaaaactacttgtcttgtaacaaacagtcaaatagtcccggtcaaaactaccggtcttagatttttggctatataaggggtcctcaagtatgttgtgaggcaccctttcatttagccattttttcaggtttctgaagagagatgctctgaa

SEQ ID NO: 14110 - DNA, 1055 bp, Glycine max
  Gm_smallRNAprecursor_6943
tcttcaaccaagacactttggttcggacttgaacaaaggaatgagattttcagttccatttgatccggtaggttatacctattgggattacgttgatgcttggactaaggtgttttggcaccaaaatacccgcttcaagcattcatggctgatatatttcaagaccaatacaatttacaattttcccaattggtttttgcaatggtgggacttctttggaccaatcccagagatattcctagaaacagtccaacaaggattttctcaatttaagaaacaatacaattcgcaggaatcacgaattcccacagatcttaaatacttttcaagctttgcactgtcatggatattctcatggcaatatcgttacagcaagactgaaaagacaaaccaatatccatcattacaaagacacgcatttgtaaaatggtggacacaatttgactcatccaaagcggatccagaacaagtaaaactctggttccaatcccatccagaattcctcaaagcagctgatccagaaacttctgcgtttttgaaccaaaagtctcatctggcagcatttttagcaggatcgacatcaaaggaagtcttagctaaaaatctgaaggaagttctgcaaatgttacagcaggaagaagaagcttcatcctcaaagaaggaagaaacaagttctgctgaagaagaagaagaagaagaagatcccttttaccaaaacgaagatgattgttttggtatctgcttagattaaatttaatttcggtcacaaaaccgcatgtttgtaattaatgtgtaattaatgctggacaatactacctgtcctgtagccattaaagtcccggtcaaaactacttgtcttgtaacaaacagtcaaatagtcccggtcaaaactaccggtcttagatttttggctatataaggggtcctcaagtatgttgtgaggcaccctttcatttagccattttttcaggtttctgaagagagatgctctgaaacaagatttttgtaagtgcttctttctagattcaataaatttctatttttcatccttctct

SEQ ID NO: 14111 - DNA, 1221 bp, Glycine max
  Gm_smallRNAprecursor_6944
tcttcaaccaagacactttggttcggacttgaacaaaggaatgagattttcagttccatttgatccggtaggttatacctattgggattacgttgatgcttggactaaggtgttttggcaccaaaatacccgcttcaagcattcatggctgatatatttcaagaccaatacaatttacaattttcccaattggtttttgcaatggtgggacttctttggaccaatcccagagatattcctagaaacagtccaacaaggattttctcaatttaagaaacaatacaattcgcaggaatcacgaattcccacagatcttaaatacttttcaagctttgcactgtcatggatattctcatggcaatatcgttacagcaagactgaaaagacaaaccaatatccatcattacaaagacacgcatttgtaaaatggtggacacaatttgactcatccaaagcggatccagaacaagtaaaactctggttccaatcccatccagaattcctcaaagcagctgatccagaaacttctgcgtttttgaaccaaaagtctcatctggcagcatttttagcaggatcgacatcaaaggaagtcttagctaaaaatctgaaggaagttctgcaaatgttacagcaggaagaagaagcttcatcctcaaagaaggaagaaacaagttctgctgaagaagaagaagaagaagaagatcccttttaccaaaacgaagatgattgttttggtatctgcttagattaaatttaatttcggtcacaaaaccgcatgtttgtaattaatgtgtaattaatgctggacaatactacctgtcctgtagccattaaagtcccggtcaaaactacttgtcttgtaacaaacagtcaaatagtcccggtcaaaactaccggtcttagatttttggctatataaggggtcctcaagtatgttgtgaggcaccctttcatttagccattttttcaggtttctgaagagagatgctctgaaacaagatttttgtaagtgcttctttctagattcaataaatttctatttttcatccttctctcttctccctttaccgatcctgtgcggctctgccgccgcttcagtttctttgtttatgaaaacctggggtttgtaagccggtctccggtgtgcccttgatatgtgtttttcaagaataagtatatatattctggctttatatatatattcacttaagtaatggagtg

SEQ ID NO: 14112 - DNA, 1086 bp, Glycine max
  Gm_smallRNAprecursor_6945
tcaagcattcatggctgatatatttcaagaccaatacaatttacaattttcccaattggtttttgcaatggtgggacttctttggaccaatcccagagatattcctagaaacagtccaacaaggattttctcaatttaagaaacaatacaattcgcaggaatcacgaattcccacagatcttaaatacttttcaagctttgcactgtcatggatattctcatggcaatatcgttacagcaagactgaaaagacaaaccaatatccatcattacaaagacacgcatttgtaaaatggtggacacaatttgactcatccaaagcggatccagaacaagtaaaactctggttccaatcccatccagaattcctcaaagcagctgatccagaaacttctgcgtttttgaaccaaaagtctcatctggcagcatttttagcaggatcgacatcaaaggaagtcttagctaaaaatctgaaggaagttctgcaaatgttacagcaggaagaagaagcttcatcctcaaagaaggaagaaacaagttctgctgaagaagaagaagaagaagaagatcccttttaccaaaacgaagatgattgttttggtatctgcttagattaaatttaatttcggtcacaaaaccgcatgtttgtaattaatgtgtaattaatgctggacaatactacctgtcctgtagccattaaagtcccggtcaaaactacttgtcttgtaacaaacagtcaaatagtcccggtcaaaactaccggtcttagatttttggctatataaggggtcctcaagtatgttgtgaggcaccctttcatttagccattttttcaggtttctgaagagagatgctctgaaacaagatttttgtaagtgcttctttctagattcaataaatttctatttttcatccttctctcttctccctttaccgatcctgtgcggctctgccgccgcttcagtttctttgtttatgaaaacctggggtttgtaagccggtctccggtgtgcccttgatatgtgtttttcaagaataagtatatatattctggctttatatatatattcacttaagtaatggagt

SEQ ID NO: 14113 - DNA, 1087 bp, Glycine max
  Gm_smallRNAprecursor_6946
tcaagcattcatggctgatatatttcaagaccaatacaatttacaattttcccaattggtttttgcaatggtgggacttctttggaccaatcccagagatattcctagaaacagtccaacaaggattttctcaatttaagaaacaatacaattcgcaggaatcacgaattcccacagatcttaaatacttttcaagctttgcactgtcatggatattctcatggcaatatcgttacagcaagactgaaaagacaaaccaatatccatcattacaaagacacgcatttgtaaaatggtggacacaatttgactcatccaaagcggatccagaacaagtaaaactctggttccaatcccatccagaattcctcaaagcagctgatccagaaacttctgcgtttttgaaccaaaagtctcatctggcagcatttttagcaggatcgacatcaaaggaagtcttagctaaaaatctgaaggaagttctgcaaatgttacagcaggaagaagaagcttcatcctcaaagaaggaagaaacaagttctgctgaagaagaagaagaagaagaagatcccttttaccaaaacgaagatgattgttttggtatctgcttagattaaatttaatttcggtcacaaaaccgcatgtttgtaattaatgtgtaattaatgctggacaatactacctgtcctgtagccattaaagtcccggtcaaaactacttgtcttgtaacaaacagtcaaatagtcccggtcaaaactaccggtcttagatttttggctatataaggggtcctcaagtatgttgtgaggcaccctttcatttagccattttttcaggtttctgaagagagatgctctgaaacaagatttttgtaagtgcttctttctagattcaataaatttctatttttcatccttctctcttctccctttaccgatcctgtgcggctctgccgccgcttcagtttctttgtttatgaaaacctggggtttgtaagccggtctccggtgtgcccttgatatgtgtttttcaagaataagtatatatattctggctttatatatatattcacttaagtaatggagtg

SEQ ID NO: 14114 - DNA, 1063 bp, Glycine max
  Gm_smallRNAprecursor_6947
atttcaagaccaatacaatttacaattttcccaattggtttttgcaatggtgggacttctttggaccaatcccagagatattcctagaaacagtccaacaaggattttctcaatttaagaaacaatacaattcgcaggaatcacgaattcccacagatcttaaatacttttcaagctttgcactgtcatggatattctcatggcaatatcgttacagcaagactgaaaagacaaaccaatatccatcattacaaagacacgcatttgtaaaatggtggacacaatttgactcatccaaagcggatccagaacaagtaaaactctggttccaatcccatccagaattcctcaaagcagctgatccagaaacttctgcgtttttgaaccaaaagtctcatctggcagcatttttagcaggatcgacatcaaaggaagtcttagctaaaaatctgaaggaagttctgcaaatgttacagcaggaagaagaagcttcatcctcaaagaaggaagaaacaagttctgctgaagaagaagaagaagaagaagatcccttttaccaaaacgaagatgattgttttggtatctgcttagattaaatttaatttcggtcacaaaaccgcatgtttgtaattaatgtgtaattaatgctggacaatactacctgtcctgtagccattaaagtcccggtcaaaactacttgtcttgtaacaaacagtcaaatagtcccggtcaaaactaccggtcttagatttttggctatataaggggtcctcaagtatgttgtgaggcaccctttcatttagccattttttcaggtttctgaagagagatgctctgaaacaagatttttgtaagtgcttctttctagattcaataaatttctatttttcatccttctctcttctccctttaccgatcctgtgcggctctgccgccgcttcagtttctttgtttatgaaaacctggggtttgtaagccggtctccggtgtgcccttgatatgtgtttttcaagaataagtatatatattctggctttatatatatattcacttaagtaatgga

SEQ ID NO: 14115 - DNA, 1155 bp, Glycine max
  Gm_smallRNAprecursor_6948
ttctttggaccaatcccagagatattcctagaaacagtccaacaaggattttctcaatttaagaaacaatacaattcgcaggaatcacgaattcccacagatcttaaatacttttcaagctttgcactgtcatggatattctcatggcaatatcgttacagcaagactgaaaagacaaaccaatatccatcattacaaagacacgcatttgtaaaatggtggacacaatttgactcatccaaagcggatccagaacaagtaaaactctggttccaatcccatccagaattcctcaaagcagctgatccagaaacttctgcgtttttgaaccaaaagtctcatctggcagcatttttagcaggatcgacatcaaaggaagtcttagctaaaaatctgaaggaagttctgcaaatgttacagcaggaagaagaagcttcatcctcaaagaaggaagaaacaagttctgctgaagaagaagaagaagaagaagatcccttttaccaaaacgaagatgattgttttggtatctgcttagattaaatttaatttcggtcacaaaaccgcatgtttgtaattaatgtgtaattaatgctggacaatactacctgtcctgtagccattaaagtcccggtcaaaactacttgtcttgtaacaaacagtcaaatagtcccggtcaaaactaccggtcttagatttttggctatataaggggtcctcaagtatgttgtgaggcaccctttcatttagccattttttcaggtttctgaagagagatgctctgaaacaagatttttgtaagtgcttctttctagattcaataaatttctatttttcatccttctctcttctccctttaccgatcctgtgcggctctgccgccgcttcagtttctttgtttatgaaaacctggggtttgtaagccggtctccggtgtgcccttgatatgtgtttttcaagaataagtatatatattctggctttatatatatattcacttaagtaatggagtgttttttcgtgaatgtatgtcgagacaaaaaaaaatacttttattttcataagcaaattaagggaagttttcatttaaaaattgaaattatcgcatattagagtggtgatatcgtagcaacgaggcgggttgttacaaaggtagta

SEQ ID NO: 14116 - DNA, 1188 bp, Glycine max
  Gm_smallRNAprecursor_6949
ccaacaaggattttctcaatttaagaaacaatacaattcgcaggaatcacgaattcccacagatcttaaatacttttcaagctttgcactgtcatggatattctcatggcaatatcgttacagcaagactgaaaagacaaaccaatatccatcattacaaagacacgcatttgtaaaatggtggacacaatttgactcatccaaagcggatccagaacaagtaaaactctggttccaatcccatccagaattcctcaaagcagctgatccagaaacttctgcgtttttgaaccaaaagtctcatctggcagcatttttagcaggatcgacatcaaaggaagtcttagctaaaaatctgaaggaagttctgcaaatgttacagcaggaagaagaagcttcatcctcaaagaaggaagaaacaagttctgctgaagaagaagaagaagaagaagatcccttttaccaaaacgaagatgattgttttggtatctgcttagattaaatttaatttcggtcacaaaaccgcatgtttgtaattaatgtgtaattaatgctggacaatactacctgtcctgtagccattaaagtcccggtcaaaactacttgtcttgtaacaaacagtcaaatagtcccggtcaaaactaccggtcttagatttttggctatataaggggtcctcaagtatgttgtgaggcaccctttcatttagccattttttcaggtttctgaagagagatgctctgaaacaagatttttgtaagtgcttctttctagattcaataaatttctatttttcatccttctctcttctccctttaccgatcctgtgcggctctgccgccgcttcagtttctttgtttatgaaaacctggggtttgtaagccggtctccggtgtgcccttgatatgtgtttttcaagaataagtatatatattctggctttatatatatattcacttaagtaatggagtgttttttcgtgaatgtatgtcgagacaaaaaaaaatacttttattttcataagcaaattaagggaagttttcatttaaaaattgaaattatcgcatattagagtggtgatatcgtagcaacgaggcgggttgttacaaaggtagtactccctacatgagtcaacatattcattttctagccaataagtttctctttaatattatccagaataaagtc

SEQ ID NO: 14117 - DNA, 1076 bp, Glycine max
  Gm_smallRNAprecursor_6950
ccatctttcgggaagagttacctcatcccattttatttttctcgggagagaaacgttagcctttgtcatatcagtgataaacaaggttgtttctccttttcgaggttttaacaggactctagatgcacaagtattcatgaccttgtactggatcctataaattaaggctgctgggattgacccttctttcatgtcaaggccatgaaagtggatgtttaagaacagacagtcaagaatgtttctgtccatcagactcactgttttgtttggataacagttaaaatatattggaccttgtcctaggctggtttcgactgttccaattagggagtcttcaaattgattatgcctaatgtctcttagacacattaaaactgccgcatctatgcccatatcaattaagggcttgatggctacttgtacacaaccgatgtgtagatatttatacttacggctatgttcataaattgaattttttgaaagtaaatgaaattcttcccctatatcttgtcctagaggaatattgttttcgactgttttgattatgtaatcaaagttgtgtttgtcttttattgtttcaggaacgtatagttgatcctgagggatttctggaatgttccagtcatccatgttttgattgatatcttcgaatcggacttcctcatcgaagagattgtgttttggggcgacctcttgggtctagatatcttgatcatttaataaattggaatttcttgaagaagatgatgaggaggagtttgagcaaaaagaaatacggaaaaaagatcataatggtctagacatgattatatatatatatatatattccaaagcaatttaggttagaatagattggagcagaatcatattttaaatcgaaattgacaggacataaaagaagaaaaatcaatataaaatggtttgacttgttactgataaaatccagcttaattgatatataaacatgttaactcaggttcaattcctcgcatcgtgtatgcaagccgcaaaactacgttagaagaggcaagactaatgtctttgattactaggtgaaagatacgcatatgatatat

SEQ ID NO: 14118 - DNA, 1159 bp, Glycine max
  Gm_smallRNAprecursor_6951
ccatctttcgggaagagttacctcatcccattttatttttctcgggagagaaacgttagcctttgtcatatcagtgataaacaaggttgtttctccttttcgaggttttaacaggactctagatgcacaagtattcatgaccttgtactggatcctataaattaaggctgctgggattgacccttctttcatgtcaaggccatgaaagtggatgtttaagaacagacagtcaagaatgtttctgtccatcagactcactgttttgtttggataacagttaaaatatattggaccttgtcctaggctggtttcgactgttccaattagggagtcttcaaattgattatgcctaatgtctcttagacacattaaaactgccgcatctatgcccatatcaattaagggcttgatggctacttgtacacaaccgatgtgtagatatttatacttacggctatgttcataaattgaattttttgaaagtaaatgaaattcttcccctatatcttgtcctagaggaatattgttttcgactgttttgattatgtaatcaaagttgtgtttgtcttttattgtttcaggaacgtatagttgatcctgagggatttctggaatgttccagtcatccatgttttgattgatatcttcgaatcggacttcctcatcgaagagattgtgttttggggcgacctcttgggtctagatatcttgatcatttaataaattggaatttcttgaagaagatgatgaggaggagtttgagcaaaaagaaatacggaaaaaagatcataatggtctagacatgattatatatatatatatatattccaaagcaatttaggttagaatagattggagcagaatcatattttaaatcgaaattgacaggacataaaagaagaaaaatcaatataaaatggtttgacttgttactgataaaatccagcttaattgatatataaacatgttaactcaggttcaattcctcgcatcgtgtatgcaagccgcaaaactacgttagaagaggcaagactaatgtctttgattactaggtgaaagatacgcatatgatatattaaataatcgtatggccttctttttaaaagctgtaaaccgcaaatgcctccttagttgtcaaggaagctgagtgtataattaa

SEQ ID NO: 14119 - DNA, 1168 bp, Glycine max
  Gm_smallRNAprecursor_6952
accaattccacagatatttccagaagaagtccaacaggtattccaacaattcggcaagctcttcaatagcaaggaatcaagaattccggcagatttaaaatacttttccagttttgccttgtcatggattttttcatggcaatacggatatggaaaaactgaaaatagcaagcagtatccaccattgtagagacacgccattgtaaagtggtggtcacaattcgatacctcaaaggctgctccagaacaagtcaagaactggtttcagagcaaccctgagtttctcaaacctgctgattcagaaacaaagatgtctctggctcagaagtctcaacttgcagcattcttggcaagctcaaaatctaaagaaagtcttgctcagaatcttaaggaggttctccaattacttcaacaggaagaagaagaagaaccccccaagaaggaagccgaatcatccgaaaataatgatgaccaagaagatgacccattctaccaaaatgaggatgactgttttggtatatcgttagatgatgattagttagttgtagtaatcacaaattattgtaactaattactcggtacccgataataatgtaatttgtaaaacgtttttgtaacagttccggtaaacattaccgacactgtagaaacagtaaaattctaggtctatttaaaggagtcctcgttccctttgggaggcacccttttagatagtctcagaatcaggtttttagagagagaagctctgcctagggaaaaactctttgtaagcttttctttcgatttgaataaactcaaagttttattttcacatctcccttctcccttcactgatcctgtgcggctctgctgccgcttcggtttctttgctttcgaaaacctggggtttgtaagccggattccggtgtgcccttgatatctgttttacaagttttaaatatctgcatttgacatattgcattactcttacttcctagctgtccgtttgatcttattccgcttatctctctctctctctctctctctctctctctctctctctctctttatatatatatatatatatatatatatatatatatatatatatatatataatataaaaatccccttagactttacttcgggaaggtataaaatataaatttgtttattttgatagctttat

SEQ ID NO: 14120 - DNA, 1234 bp, Glycine max
  Gm_smallRNAprecursor_6953
cccaagtaaaagaaagaattcaatctttattaaatcatattgaatcgaccgtttgttctgaattgccacatgcattttgggacagaaagaaacatattgtcgatctcccttatgagaaagacttaagggaaaaacaaattcccacaaaagccagaccaatccaaatgaatgaagaacttcttcaatattgtcaaaaggaaatcaaggatttgcttgataaaggcctaatccggaaaagcaaaagcccatggtcttgtgcggctttttatgttaacaaacaatctgagattgagcgtggaacaccccgcttagtcataaattacaaaccattaaatcaagcattacaatggattagatatcctattccaaacaaaaaagatttgcgtaacagattaaattctgcaaagatattttcaaaatttgatatgaaatctggattttggcaaatccaaatccaagaatcagataggtacaaaacagcgtttactgtacctttcgggcaatatgaatggaacgtgatgccattcggactgaagaatgccccttcagaatttcaaaaaattatgaacgatatttttaatccttattcaaaatttgtcattgtctacatagatgatgttttaatcttttcccaaaacattgaccaacatttcaaacatctccaaaccttcatacatatcatcaaacaaaatggtttggcagtctccaaatcaaaaatcaatcttttccaaactcgaattcgattccttggtcacaatatatatcaaggtacaatcattccaatcgaaaggtcaatagagtttgctagcaaattccccaaccaaatcttagacaaaacccagttacaaagatttctaggttgtctaaattacgtaggagaatttgtcccttatttaaataatattgtcaagccattacatgataggctgaagaaaaatccgcctccttggtctgacctccatacacaaacggttaaagaaatcaaagtcaaagtccaatccattaaatgtctgtatcttcctattccacaggcatttaaaattgtcgaaactgatgcttcagacataggttatggtggcatcctcaaataaagagtccatggccaagatcatgtcattgcatatacatcaaaacattggaatcctgcacaattaaaatattcaactattaaaaaagaggctttagcaattgttttgtgcatttccaaatttcaatcggatttattaaaccaaaa

SEQ ID NO: 14121 - DNA, 1080 bp, Glycine max
  Gm_smallRNAprecursor_6954
aaaagcaaaagcccatggtcttgtgcggctttttatgttaacaaacaatctgagattgagcgtggaacaccccgcttagtcataaattacaaaccattaaatcaagcattacaatggattagatatcctattccaaacaaaaaagatttgcgtaacagattaaattctgcaaagatattttcaaaatttgatatgaaatctggattttggcaaatccaaatccaagaatcagataggtacaaaacagcgtttactgtacctttcgggcaatatgaatggaacgtgatgccattcggactgaagaatgccccttcagaatttcaaaaaattatgaacgatatttttaatccttattcaaaatttgtcattgtctacatagatgatgttttaatcttttcccaaaacattgaccaacatttcaaacatctccaaaccttcatacatatcatcaaacaaaatggtttggcagtctccaaatcaaaaatcaatcttttccaaactcgaattcgattccttggtcacaatatatatcaaggtacaatcattccaatcgaaaggtcaatagagtttgctagcaaattccccaaccaaatcttagacaaaacccagttacaaagatttctaggttgtctaaattacgtaggagaatttgtcccttatttaaataatattgtcaagccattacatgataggctgaagaaaaatccgcctccttggtctgacctccatacacaaacggttaaagaaatcaaagtcaaagtccaatccattaaatgtctgtatcttcctattccacaggcatttaaaattgtcgaaactgatgcttcagacataggttatggtggcatcctcaaataaagagtccatggccaagatcatgtcattgcatatacatcaaaacattggaatcctgcacaattaaaatattcaactattaaaaaagaggctttagcaattgttttgtgcatttccaaatttcaatcggatttattaaaccaaaaatttttaatcagggttgattgtaaatcagccaaagatattttacaaaaagatgttaaaaaccttgcctcaaaacaaatt

SEQ ID NO: 14122 - DNA, 1095 bp, Glycine max
  Gm_smallRNAprecursor_6955
tgaatggaacgtgatgccattcggactgaagaatgccccttcagaatttcaaaaaattatgaacgatatttttaatccttattcaaaatttgtcattgtctacatagatgatgttttaatcttttcccaaaacattgaccaacatttcaaacatctccaaaccttcatacatatcatcaaacaaaatggtttggcagtctccaaatcaaaaatcaatcttttccaaactcgaattcgattccttggtcacaatatatatcaaggtacaatcattccaatcgaaaggtcaatagagtttgctagcaaattccccaaccaaatcttagacaaaacccagttacaaagatttctaggttgtctaaattacgtaggagaatttgtcccttatttaaataatattgtcaagccattacatgataggctgaagaaaaatccgcctccttggtctgacctccatacacaaacggttaaagaaatcaaagtcaaagtccaatccattaaatgtctgtatcttcctattccacaggcatttaaaattgtcgaaactgatgcttcagacataggttatggtggcatcctcaaataaagagtccatggccaagatcatgtcattgcatatacatcaaaacattggaatcctgcacaattaaaatattcaactattaaaaaagaggctttagcaattgttttgtgcatttccaaatttcaatcggatttattaaaccaaaaatttttaatcagggttgattgtaaatcagccaaagatattttacaaaaagatgttaaaaaccttgcctcaaaacaaatttttgcacgatggcaagcaattttaagtgtctttgattttgacatagaatacatcaagggcacctcaaattcactacctgactaccttacccgtgaattcttacagaaaagtggtaatgcctcctaaggcatcgggaatctccctacggggaggaaggagtacaggcaaaggagccaggctggctcttccagagccaaccatcaagaaatcatctacctcttctgggtcaccaacccaggctgggtcatctacccagaaaaccaatttagaagggtcatcaacccaga

SEQ ID NO: 14123 - DNA, 1095 bp, Glycine max; identical to SEQ ID NO: 14122
  Gm_smallRNAprecursor_6956

SEQ ID NO: 14124 - DNA, 1095 bp, Glycine max; identical to SEQ ID NO: 14122
  Gm_smallRNAprecursor_6957

SEQ ID NO: 14125 - DNA, 1095 bp, Glycine max; identical to SEQ ID NO: 14122
  Gm_smallRNAprecursor_6958

SEQ ID NO: 14126 - DNA, 1035 bp, Glycine max
  Gm_smallRNAprecursor_6959
attgtctacatagatgatgttttaatcttttcccaaaacattgaccaacatttcaaacatctccaaaccttcatacatatcatcaaacaaaatggtttggcagtctccaaatcaaaaatcaatcttttccaaactcgaattcgattccttggtcacaatatatatcaaggtacaatcattccaatcgaaaggtcaatagagtttgctagcaaattccccaaccaaatcttagacaaaacccagttacaaagatttctaggttgtctaaattacgtaggagaatttgtcccttatttaaataatattgtcaagccattacatgataggctgaagaaaaatccgcctccttggtctgacctccatacacaaacggttaaagaaatcaaagtcaaagtccaatccattaaatgtctgtatcttcctattccacaggcatttaaaattgtcgaaactgatgcttcagacataggttatggtggcatcctcaaataaagagtccatggccaagatcatgtcattgcatatacatcaaaacattggaatcctgcacaattaaaatattcaactattaaaaaagaggctttagcaattgttttgtgcatttccaaatttcaatcggatttattaaaccaaaaatttttaatcagggttgattgtaaatcagccaaagatattttacaaaaagatgttaaaaaccttgcctcaaaacaaatttttgcacgatggcaagcaattttaagtgtctttgattttgacatagaatacatcaagggcacctcaaattcactacctgactaccttacccgtgaattcttacagaaaagtggtaatgcctcctaaggcatcgggaatctccctacggggaggaaggagtacaggcaaaggagccaggctggctcttccagagccaaccatcaagaaatcatctacctcttctgggtcaccaacccaggctgggtcatctacccagaaaaccaatttagaagggtcatcaacccagattgcctcaatcaaacctgagccatccactcagga

SEQ ID NO: 14127 - DNA, 1035 bp, Glycine max; identical to SEQ ID NO: 14126
  Gm_smallRNAprecursor_6960

SEQ ID NO: 14128 - DNA, 1113 bp, Glycine max
  Gm_smallRNAprecursor_6961
attgtctacatagatgatgttttaatcttttcccaaaacattgaccaacatttcaaacatctccaaaccttcatacatatcatcaaacaaaatggtttggcagtctccaaatcaaaaatcaatcttttccaaactcgaattcgattccttggtcacaatatatatcaaggtacaatcattccaatcgaaaggtcaatagagtttgctagcaaattccccaaccaaatcttagacaaaacccagttacaaagatttctaggttgtctaaattacgtaggagaatttgtcccttatttaaataatattgtcaagccattacatgataggctgaagaaaaatccgcctccttggtctgacctccatacacaaacggttaaagaaatcaaagtcaaagtccaatccattaaatgtctgtatcttcctattccacaggcatttaaaattgtcgaaactgatgcttcagacataggttatggtggcatcctcaaataaagagtccatggccaagatcatgtcattgcatatacatcaaaacattggaatcctgcacaattaaaatattcaactattaaaaaagaggctttagcaattgttttgtgcatttccaaatttcaatcggatttattaaaccaaaaatttttaatcagggttgattgtaaatcagccaaagatattttacaaaaagatgttaaaaaccttgcctcaaaacaaatttttgcacgatggcaagcaattttaagtgtctttgattttgacatagaatacatcaagggcacctcaaattcactacctgactaccttacccgtgaattcttacagaaaagtggtaatgcctcctaaggcatcgggaatctccctacggggaggaaggagtacaggcaaaggagccaggctggctcttccagagccaaccatcaagaaatcatctacctcttctgggtcaccaacccaggctgggtcatctacccagaaaaccaatttagaagggtcatcaacccagattgcctcaatcaaacctgagccatccactcaggaatctcccaaaccggcaaccgccaaacaaacatcggccgactatgcatggccaattgaaacccttcaggcccttcaaga

SEQ ID NO: 14129 - DNA, 1113 bp, Glycine max; identical to SEQ ID NO: 14128
  Gm_smallRNAprecursor_6962

SEQ ID NO: 14130 - DNA, 1114 bp, Glycine max
  Gm_smallRNAprecursor_6963
attgtctacatagatgatgttttaatcttttcccaaaacattgaccaacatttcaaacatctccaaaccttcatacatatcatcaaacaaaatggtttggcagtctccaaatcaaaaatcaatcttttccaaactcgaattcgattccttggtcacaatatatatcaaggtacaatcattccaatcgaaaggtcaatagagtttgctagcaaattccccaaccaaatcttagacaaaacccagttacaaagatttctaggttgtctaaattacgtaggagaatttgtcccttatttaaataatattgtcaagccattacatgataggctgaagaaaaatccgcctccttggtctgacctccatacacaaacggttaaagaaatcaaagtcaaagtccaatccattaaatgtctgtatcttcctattccacaggcatttaaaattgtcgaaactgatgcttcagacataggttatggtggcatcctcaaataaagagtccatggccaagatcatgtcattgcatatacatcaaaacattggaatcctgcacaattaaaatattcaactattaaaaaagaggctttagcaattgttttgtgcatttccaaatttcaatcggatttattaaaccaaaaatttttaatcagggttgattgtaaatcagccaaagatattttacaaaaagatgttaaaaaccttgcctcaaaacaaatttttgcacgatggcaagcaattttaagtgtctttgattttgacatagaatacatcaagggcacctcaaattcactacctgactaccttacccgtgaattcttacagaaaagtggtaatgcctcctaaggcatcgggaatctccctacggggaggaaggagtacaggcaaaggagccaggctggctcttccagagccaaccatcaagaaatcatctacctcttctgggtcaccaacccaggctgggtcatctacccagaaaaccaatttagaagggtcatcaacccagattgcctcaatcaaacctgagccatccactcaggaatctcccaaaccggcaaccgccaaacaaacatcggccgactatgcatggccaattgaaacccttcaggcccttcaagac

SEQ ID NO: 14131 - DNA, 1114 bp, Glycine max; identical to SEQ ID NO: 14130
  Gm_smallRNAprecursor_6964

SEQ ID NO: 14132 - DNA, 1192 bp, Glycine max
  Gm_smallRNAprecursor_6965
aaagtggtaatgcctcctaaggcatcgggaatctccctacggggaggaaggagtacaggcaaaggagccaggctggctcttccagagccaaccatcaagaaatcatctacctcttctgggtcaccaacccaggctgggtcatctacccagaaaaccaatttagaagggtcatcaacccagattgcctcaatcaaacctgagccatccactcaggaatctcccaaaccggcaaccgccaaacaaacatcggccgactatgcatggccaattgaaacccttcaggcccttcaagacatgggtctgaccaaatttccaaaaataatcaaaaaatcttgggcagacattgcctcagaatctgatgatgaatctgaatcaaatttacaaacaatgatccaaaatgcgtcaatgaccaaaacaaccaccaatactaaaggaaaactacctttagccaaagctcaaacaccacctaccaaacaaactaacaattatatttataaaaataaattgttaactgttttgcagatggaacctgaattttgggacaaaaatcccttcaaggcaacggccaaggctttcccactaggatttcactacaaaccaaccaccatcctgaagacaagaactttttatgaattgattttggtagattcaaactcagtatctatcaaacatttcaaagatccaaaagaccaaaccttaaacacccactcaaccatccaaatactaaaagttcttcaaccaagacactttggtttggacttgaacaaaggaaagagattttcagttccatttgatccggtaggttatacctattgggattacgttgatgcttggactaaggtgttttggcaccaaaatacccgcttcaaacattcatggctgatatatttcaagaccaacacaatttacaattttcccaattggtttttacaatggtgggacttctttggaccaatcccagagatattcccagaaacggtccaacaaggattttcccaatttaagaaacaatacaattcgcaggaatcacgaattccagcagatcttaaatacttttcaagctttgcactgtcatggatattctcatggcaatatcgttacagcaagactgaaaagacaaaccaatatccatcactacaaagacacgcatttgtaaaatggtggacacaatttgactcatccaaagcggatc

SEQ ID NO: 14133 - DNA, 1099 bp, Glycine max
  Gm_smallRNAprecursor_6966
gtaatgcctcctaaggcatcgggaatctccctacggggaggaaggagtacaggcaaaggagccaggctggctcttccagagccaaccatcaagaaatcatctacctcttctgggtcaccaacccaggctgggtcatctacccagaaaaccaatttagaagggtcatcaacccagattgcctcaatcaaacctgagccatccactcaggaatctcccaaaccggcaaccgccaaacaaacatcggccgactatgcatggccaattgaaacccttcaggcccttcaagacatgggtctgaccaaatttccaaaaataatcaaaaaatcttgggcagacattgcctcagaatctgatgatgaatctgaatcaaatttacaaacaatgatccaaaatgcgtcaatgaccaaaacaaccaccaatactaaaggaaaactacctttagccaaagctcaaacaccacctaccaaacaaactaacaattatatttataaaaataaattgttaactgttttgcagatggaacctgaattttgggacaaaaatcccttcaaggcaacggccaaggctttcccactaggatttcactacaaaccaaccaccatcctgaagacaagaactttttatgaattgattttggtagattcaaactcagtatctatcaaacatttcaaagatccaaaagaccaaaccttaaacacccactcaaccatccaaatactaaaagttcttcaaccaagacactttggtttggacttgaacaaaggaaagagattttcagttccatttgatccggtaggttatacctattgggattacgttgatgcttggactaaggtgttttggcaccaaaatacccgcttcaaacattcatggctgatatatttcaagaccaacacaatttacaattttcccaattggtttttacaatggtgggacttctttggaccaatcccagagatattcccagaaacggtccaacaaggattttcccaatttaagaaacaatacaattcgcaggaatcacgaattccagcagatcttaaatacttttcaagctttgcactgtcatggatattctcatggcaatatcgttacagca

SEQ ID NO: 14134 - DNA, 1158 bp, Glycine max
  Gm_smallRNAprecursor_6967
ctaaggcatcgggaatctccctacggggaggaaggagtacaggcaaaggagccaggctggctcttccagagccaaccatcaagaaatcatctacctcttctgggtcaccaacccaggctgggtcatctacccagaaaaccaatttagaagggtcatcaacccagattgcctcaatcaaacctgagccatccactcaggaatctcccaaaccggcaaccgccaaacaaacatcggccgactatgcatggccaattgaaacccttcaggcccttcaagacatgggtctgaccaaatttccaaaaataatcaaaaaatcttgggcagacattgcctcagaatctgatgatgaatctgaatcaaatttacaaacaatgatccaaaatgcgtcaatgaccaaaacaaccaccaatactaaaggaaaactacctttagccaaagctcaaacaccacctaccaaacaaactaacaattatatttataaaaataaattgttaactgttttgcagatggaacctgaattttgggacaaaaatcccttcaaggcaacggccaaggctttcccactaggatttcactacaaaccaaccaccatcctgaagacaagaactttttatgaattgattttggtagattcaaactcagtatctatcaaacatttcaaagatccaaaagaccaaaccttaaacacccactcaaccatccaaatactaaaagttcttcaaccaagacactttggtttggacttgaacaaaggaaagagattttcagttccatttgatccggtaggttatacctattgggattacgttgatgcttggactaaggtgttttggcaccaaaatacccgcttcaaacattcatggctgatatatttcaagaccaacacaatttacaattttcccaattggtttttacaatggtgggacttctttggaccaatcccagagatattcccagaaacggtccaacaaggattttcccaatttaagaaacaatacaattcgcaggaatcacgaattccagcagatcttaaatacttttcaagctttgcactgtcatggatattctcatggcaatatcgttacagcaagactgaaaagacaaaccaatatccatcactacaaagacacgcatttgtaaaatggtggacacaatttg

SEQ ID NO: 14135 - DNA, 1167 bp, Glycine max
  Gm_smallRNAprecursor_6968
ctaaggcatcgggaatctccctacggggaggaaggagtacaggcaaaggagccaggctggctcttccagagccaaccatcaagaaatcatctacctcttctgggtcaccaacccaggctgggtcatctacccagaaaaccaatttagaagggtcatcaacccagattgcctcaatcaaacctgagccatccactcaggaatctcccaaaccggcaaccgccaaacaaacatcggccgactatgcatggccaattgaaacccttcaggcccttcaagacatgggtctgaccaaatttccaaaaataatcaaaaaatcttgggcagacattgcctcagaatctgatgatgaatctgaatcaaatttacaaacaatgatccaaaatgcgtcaatgaccaaaacaaccaccaatactaaaggaaaactacctttagccaaagctcaaacaccacctaccaaacaaactaacaattatatttataaaaataaattgttaactgttttgcagatggaacctgaattttgggacaaaaatcccttcaaggcaacggccaaggctttcccactaggatttcactacaaaccaaccaccatcctgaagacaagaactttttatgaattgattttggtagattcaaactcagtatctatcaaacatttcaaagatccaaaagaccaaaccttaaacacccactcaaccatccaaatactaaaagttcttcaaccaagacactttggtttggacttgaacaaaggaaagagattttcagttccatttgatccggtaggttatacctattgggattacgttgatgcttggactaaggtgttttggcaccaaaatacccgcttcaaacattcatggctgatatatttcaagaccaacacaatttacaattttcccaattggtttttacaatggtgggacttctttggaccaatcccagagatattcccagaaacggtccaacaaggattttcccaatttaagaaacaatacaattcgcaggaatcacgaattccagcagatcttaaatacttttcaagctttgcactgtcatggatattctcatggcaatatcgttacagcaagactgaaaagacaaaccaatatccatcactacaaagacacgcatttgtaaaatggtggacacaatttgactcatcca

SEQ ID NO: 14136 - DNA, 1208 bp, Glycine max
  Gm_smallRNAprecursor_6969
ctaaggcatcgggaatctccctacggggaggaaggagtacaggcaaaggagccaggctggctcttccagagccaaccatcaagaaatcatctacctcttctgggtcaccaacccaggctgggtcatctacccagaaaaccaatttagaagggtcatcaacccagattgcctcaatcaaacctgagccatccactcaggaatctcccaaaccggcaaccgccaaacaaacatcggccgactatgcatggccaattgaaacccttcaggcccttcaagacatgggtctgaccaaatttccaaaaataatcaaaaaatcttgggcagacattgcctcagaatctgatgatgaatctgaatcaaatttacaaacaatgatccaaaatgcgtcaatgaccaaaacaaccaccaatactaaaggaaaactacctttagccaaagctcaaacaccacctaccaaacaaactaacaattatatttataaaaataaattgttaactgttttgcagatggaacctgaattttgggacaaaaatcccttcaaggcaacggccaaggctttcccactaggatttcactacaaaccaaccaccatcctgaagacaagaactttttatgaattgattttggtagattcaaactcagtatctatcaaacatttcaaagatccaaaagaccaaaccttaaacacccactcaaccatccaaatactaaaagttcttcaaccaagacactttggtttggacttgaacaaaggaaagagattttcagttccatttgatccggtaggttatacctattgggattacgttgatgcttggactaaggtgttttggcaccaaaatacccgcttcaaacattcatggctgatatatttcaagaccaacacaatttacaattttcccaattggtttttacaatggtgggacttctttggaccaatcccagagatattcccagaaacggtccaacaaggattttcccaatttaagaaacaatacaattcgcaggaatcacgaattccagcagatcttaaatacttttcaagctttgcactgtcatggatattctcatggcaatatcgttacagcaagactgaaaagacaaaccaatatccatcactacaaagacacgcatttgtaaaatggtggacacaatttgactcatccaaagcggatccagaacaagtaaaactatggttccaatcccat

SEQ ID NO: 14137 - DNA, 1208 bp, Glycine max; identical to SEQ ID NO: 14136
  Gm_smallRNAprecursor_6970

SEQ ID NO: 14138 - DNA, 1211 bp, Glycine max
  Gm_smallRNAprecursor_6971
ctaaggcatcgggaatctccctacggggaggaaggagtacaggcaaaggagccaggctggctcttccagagccaaccatcaagaaatcatctacctcttctgggtcaccaacccaggctgggtcatctacccagaaaaccaatttagaagggtcatcaacccagattgcctcaatcaaacctgagccatccactcaggaatctcccaaaccggcaaccgccaaacaaacatcggccgactatgcatggccaattgaaacccttcaggcccttcaagacatgggtctgaccaaatttccaaaaataatcaaaaaatcttgggcagacattgcctcagaatctgatgatgaatctgaatcaaatttacaaacaatgatccaaaatgcgtcaatgaccaaaacaaccaccaatactaaaggaaaactacctttagccaaagctcaaacaccacctaccaaacaaactaacaattatatttataaaaataaattgttaactgttttgcagatggaacctgaattttgggacaaaaatcccttcaaggcaacggccaaggctttcccactaggatttcactacaaaccaaccaccatcctgaagacaagaactttttatgaattgattttggtagattcaaactcagtatctatcaaacatttcaaagatccaaaagaccaaaccttaaacacccactcaaccatccaaatactaaaagttcttcaaccaagacactttggtttggacttgaacaaaggaaagagattttcagttccatttgatccggtaggttatacctattgggattacgttgatgcttggactaaggtgttttggcaccaaaatacccgcttcaaacattcatggctgatatatttcaagaccaacacaatttacaattttcccaattggtttttacaatggtgggacttctttggaccaatcccagagatattcccagaaacggtccaacaaggattttcccaatttaagaaacaatacaattcgcaggaatcacgaattccagcagatcttaaatacttttcaagctttgcactgtcatggatattctcatggcaatatcgttacagcaagactgaaaagacaaaccaatatccatcactacaaagacacgcatttgtaaaatggtggacacaatttgactcatccaaagcggatccagaacaagtaaaactatggttccaatcccatcta

SEQ ID NO: 14139 - DNA, 1098 bp, Glycine max
  Gm_smallRNAprecursor_6972
ggaatctccctacggggaggaaggagtacaggcaaaggagccaggctggctcttccagagccaaccatcaagaaatcatctacctcttctgggtcaccaacccaggctgggtcatctacccagaaaaccaatttagaagggtcatcaacccagattgcctcaatcaaacctgagccatccactcaggaatctcccaaaccggcaaccgccaaacaaacatcggccgactatgcatggccaattgaaacccttcaggcccttcaagacatgggtctgaccaaatttccaaaaataatcaaaaaatcttgggcagacattgcctcagaatctgatgatgaatctgaatcaaatttacaaacaatgatccaaaatgcgtcaatgaccaaaacaaccaccaatactaaaggaaaactacctttagccaaagctcaaacaccacctaccaaacaaactaacaattatatttataaaaataaattgttaactgttttgcagatggaacctgaattttgggacaaaaatcccttcaaggcaacggccaaggctttcccactaggatttcactacaaaccaaccaccatcctgaagacaagaactttttatgaattgattttggtagattcaaactcagtatctatcaaacatttcaaagatccaaaagaccaaaccttaaacacccactcaaccatccaaatactaaaagttcttcaaccaagacactttggtttggacttgaacaaaggaaagagattttcagttccatttgatccggtaggttatacctattgggattacgttgatgcttggactaaggtgttttggcaccaaaatacccgcttcaaacattcatggctgatatatttcaagaccaacacaatttacaattttcccaattggtttttacaatggtgggacttctttggaccaatcccagagatattcccagaaacggtccaacaaggattttcccaatttaagaaacaatacaattcgcaggaatcacgaattccagcagatcttaaatacttttcaagctttgcactgtcatggatattctcatggcaatatcgttacagcaagactgaaaagacaaaccaa

SEQ ID NO: 14140 - DNA, 1148 bp, Glycine max
  Gm_smallRNAprecursor_6973
tgcctcaatcaaacctgagccatccactcaggaatctcccaaaccggcaaccgccaaacaaacatcggccgactatgcatggccaattgaaacccttcaggcccttcaagacatgggtctgaccaaatttccaaaaataatcaaaaaatcttgggcagacattgcctcagaatctgatgatgaatctgaatcaaatttacaaacaatgatccaaaatgcgtcaatgaccaaaacaaccaccaatactaaaggaaaactacctttagccaaagctcaaacaccacctaccaaacaaactaacaattatatttataaaaataaattgttaactgttttgcagatggaacctgaattttgggacaaaaatcccttcaaggcaacggccaaggctttcccactaggatttcactacaaaccaaccaccatcctgaagacaagaactttttatgaattgattttggtagattcaaactcagtatctatcaaacatttcaaagatccaaaagaccaaaccttaaacacccactcaaccatccaaatactaaaagttcttcaaccaagacactttggtttggacttgaacaaaggaaagagattttcagttccatttgatccggtaggttatacctattgggattacgttgatgcttggactaaggtgttttggcaccaaaatacccgcttcaaacattcatggctgatatatttcaagaccaacacaatttacaattttcccaattggtttttacaatggtgggacttctttggaccaatcccagagatattcccagaaacggtccaacaaggattttcccaatttaagaaacaatacaattcgcaggaatcacgaattccagcagatcttaaatacttttcaagctttgcactgtcatggatattctcatggcaatatcgttacagcaagactgaaaagacaaaccaatatccatcactacaaagacacgcatttgtaaaatggtggacacaatttgactcatccaaagcggatccagaacaagtaaaactatggttccaatcccatctagaattcctcaaagcagctgatccagagacttctgtgtttttgaaccaaaagtctcatctggcagcatttttagcaggatcgacatcaaaggaggtcttagcta

SEQ ID NO: 14141 - DNA, 1149 bp, Glycine max
  Gm_smallRNAprecursor_6974
tgcctcaatcaaacctgagccatccactcaggaatctcccaaaccggcaaccgccaaacaaacatcggccgactatgcatggccaattgaaacccttcaggcccttcaagacatgggtctgaccaaatttccaaaaataatcaaaaaatcttgggcagacattgcctcagaatctgatgatgaatctgaatcaaatttacaaacaatgatccaaaatgcgtcaatgaccaaaacaaccaccaatactaaaggaaaactacctttagccaaagctcaaacaccacctaccaaacaaactaacaattatatttataaaaataaattgttaactgttttgcagatggaacctgaattttgggacaaaaatcccttcaaggcaacggccaaggctttcccactaggatttcactacaaaccaaccaccatcctgaagacaagaactttttatgaattgattttggtagattcaaactcagtatctatcaaacatttcaaagatccaaaagaccaaaccttaaacacccactcaaccatccaaatactaaaagttcttcaaccaagacactttggtttggacttgaacaaaggaaagagattttcagttccatttgatccggtaggttatacctattgggattacgttgatgcttggactaaggtgttttggcaccaaaatacccgcttcaaacattcatggctgatatatttcaagaccaacacaatttacaattttcccaattggtttttacaatggtgggacttctttggaccaatcccagagatattcccagaaacggtccaacaaggattttcccaatttaagaaacaatacaattcgcaggaatcacgaattccagcagatcttaaatacttttcaagctttgcactgtcatggatattctcatggcaatatcgttacagcaagactgaaaagacaaaccaatatccatcactacaaagacacgcatttgtaaaatggtggacacaatttgactcatccaaagcggatccagaacaagtaaaactatggttccaatcccatctagaattcctcaaagcagctgatccagagacttctgtgtttttgaaccaaaagtctcatctggcagcatttttagcaggatcgacatcaaaggaggtcttagctaa

SEQ ID NO: 14142 - DNA, 1249 bp, Glycine max
  Gm_smallRNAprecursor_6975
tgcctcaatcaaacctgagccatccactcaggaatctcccaaaccggcaaccgccaaacaaacatcggccgactatgcatggccaattgaaacccttcaggcccttcaagacatgggtctgaccaaatttccaaaaataatcaaaaaatcttgggcagacattgcctcagaatctgatgatgaatctgaatcaaatttacaaacaatgatccaaaatgcgtcaatgaccaaaacaaccaccaatactaaaggaaaactacctttagccaaagctcaaacaccacctaccaaacaaactaacaattatatttataaaaataaattgttaactgttttgcagatggaacctgaattttgggacaaaaatcccttcaaggcaacggccaaggctttcccactaggatttcactacaaaccaaccaccatcctgaagacaagaactttttatgaattgattttggtagattcaaactcagtatctatcaaacatttcaaagatccaaaagaccaaaccttaaacacccactcaaccatccaaatactaaaagttcttcaaccaagacactttggtttggacttgaacaaaggaaagagattttcagttccatttgatccggtaggttatacctattgggattacgttgatgcttggactaaggtgttttggcaccaaaatacccgcttcaaacattcatggctgatatatttcaagaccaacacaatttacaattttcccaattggtttttacaatggtgggacttctttggaccaatcccagagatattcccagaaacggtccaacaaggattttcccaatttaagaaacaatacaattcgcaggaatcacgaattccagcagatcttaaatacttttcaagctttgcactgtcatggatattctcatggcaatatcgttacagcaagactgaaaagacaaaccaatatccatcactacaaagacacgcatttgtaaaatggtggacacaatttgactcatccaaagcggatccagaacaagtaaaactatggttccaatcccatctagaattcctcaaagcagctgatccagagacttctgtgtttttgaaccaaaagtctcatctggcagcatttttagcaggatcgacatcaaaggaggtcttagctaaaaatctgaaggaagttctacaaatgttacaacaggaagaagaagcttcatcctcaaaaaaggaagaaacaagttctgctgaagacgaagaagatcccttt

SEQ ID NO: 14143 - DNA, 1134 bp, Glycine max
  Gm_smallRNAprecursor_6976
caaacctgagccatccactcaggaatctcccaaaccggcaaccgccaaacaaacatcggccgactatgcatggccaattgaaacccttcaggcccttcaagacatgggtctgaccaaatttccaaaaataatcaaaaaatcttgggcagacattgcctcagaatctgatgatgaatctgaatcaaatttacaaacaatgatccaaaatgcgtcaatgaccaaaacaaccaccaatactaaaggaaaactacctttagccaaagctcaaacaccacctaccaaacaaactaacaattatatttataaaaataaattgttaactgttttgcagatggaacctgaattttgggacaaaaatcccttcaaggcaacggccaaggctttcccactaggatttcactacaaaccaaccaccatcctgaagacaagaactttttatgaattgattttggtagattcaaactcagtatctatcaaacatttcaaagatccaaaagaccaaaccttaaacacccactcaaccatccaaatactaaaagttcttcaaccaagacactttggtttggacttgaacaaaggaaagagattttcagttccatttgatccggtaggttatacctattgggattacgttgatgcttggactaaggtgttttggcaccaaaatacccgcttcaaacattcatggctgatatatttcaagaccaacacaatttacaattttcccaattggtttttacaatggtgggacttctttggaccaatcccagagatattcccagaaacggtccaacaaggattttcccaatttaagaaacaatacaattcgcaggaatcacgaattccagcagatcttaaatacttttcaagctttgcactgtcatggatattctcatggcaatatcgttacagcaagactgaaaagacaaaccaatatccatcactacaaagacacgcatttgtaaaatggtggacacaatttgactcatccaaagcggatccagaacaagtaaaactatggttccaatcccatctagaattcctcaaagcagctgatccagagacttctgtgtttttgaaccaaaagtctcatctggcagcatttttagcaggatcgacatcaaaggaggtctt

SEQ ID NO: 14144 - DNA, 1087 bp, Glycine max
  Gm_smallRNAprecursor_6977
agccatccactcaggaatctcccaaaccggcaaccgccaaacaaacatcggccgactatgcatggccaattgaaacccttcaggcccttcaagacatgggtctgaccaaatttccaaaaataatcaaaaaatcttgggcagacattgcctcagaatctgatgatgaatctgaatcaaatttacaaacaatgatccaaaatgcgtcaatgaccaaaacaaccaccaatactaaaggaaaactacctttagccaaagctcaaacaccacctaccaaacaaactaacaattatatttataaaaataaattgttaactgttttgcagatggaacctgaattttgggacaaaaatcccttcaaggcaacggccaaggctttcccactaggatttcactacaaaccaaccaccatcctgaagacaagaactttttatgaattgattttggtagattcaaactcagtatctatcaaacatttcaaagatccaaaagaccaaaccttaaacacccactcaaccatccaaatactaaaagttcttcaaccaagacactttggtttggacttgaacaaaggaaagagattttcagttccatttgatccggtaggttatacctattgggattacgttgatgcttggactaaggtgttttggcaccaaaatacccgcttcaaacattcatggctgatatatttcaagaccaacacaatttacaattttcccaattggtttttacaatggtgggacttctttggaccaatcccagagatattcccagaaacggtccaacaaggattttcccaatttaagaaacaatacaattcgcaggaatcacgaattccagcagatcttaaatacttttcaagctttgcactgtcatggatattctcatggcaatatcgttacagcaagactgaaaagacaaaccaatatccatcactacaaagacacgcatttgtaaaatggtggacacaatttgactcatccaaagcggatccagaacaagtaaaactatggttccaatcccatctagaattcctcaaagcagctgatccagagacttctgtgtttttgaaccaaaagtctcatct

SEQ ID NO: 14145 - DNA, 1090 bp, Glycine max
  Gm_smallRNAprecursor_6978
agccatccactcaggaatctcccaaaccggcaaccgccaaacaaacatcggccgactatgcatggccaattgaaacccttcaggcccttcaagacatgggtctgaccaaatttccaaaaataatcaaaaaatcttgggcagacattgcctcagaatctgatgatgaatctgaatcaaatttacaaacaatgatccaaaatgcgtcaatgaccaaaacaaccaccaatactaaaggaaaactacctttagccaaagctcaaacaccacctaccaaacaaactaacaattatatttataaaaataaattgttaactgttttgcagatggaacctgaattttgggacaaaaatcccttcaaggcaacggccaaggctttcccactaggatttcactacaaaccaaccaccatcctgaagacaagaactttttatgaattgattttggtagattcaaactcagtatctatcaaacatttcaaagatccaaaagaccaaaccttaaacacccactcaaccatccaaatactaaaagttcttcaaccaagacactttggtttggacttgaacaaaggaaagagattttcagttccatttgatccggtaggttatacctattgggattacgttgatgcttggactaaggtgttttggcaccaaaatacccgcttcaaacattcatggctgatatatttcaagaccaacacaatttacaattttcccaattggtttttacaatggtgggacttctttggaccaatcccagagatattcccagaaacggtccaacaaggattttcccaatttaagaaacaatacaattcgcaggaatcacgaattccagcagatcttaaatacttttcaagctttgcactgtcatggatattctcatggcaatatcgttacagcaagactgaaaagacaaaccaatatccatcactacaaagacacgcatttgtaaaatggtggacacaatttgactcatccaaagcggatccagaacaagtaaaactatggttccaatcccatctagaattcctcaaagcagctgatccagagacttctgtgtttttgaaccaaaagtctcatctggc

SEQ ID NO: 14146 - DNA, 1129 bp, Glycine max
  Gm_smallRNAprecursor_6979
agccatccactcaggaatctcccaaaccggcaaccgccaaacaaacatcggccgactatgcatggccaattgaaacccttcaggcccttcaagacatgggtctgaccaaatttccaaaaataatcaaaaaatcttgggcagacattgcctcagaatctgatgatgaatctgaatcaaatttacaaacaatgatccaaaatgcgtcaatgaccaaaacaaccaccaatactaaaggaaaactacctttagccaaagctcaaacaccacctaccaaacaaactaacaattatatttataaaaataaattgttaactgttttgcagatggaacctgaattttgggacaaaaatcccttcaaggcaacggccaaggctttcccactaggatttcactacaaaccaaccaccatcctgaagacaagaactttttatgaattgattttggtagattcaaactcagtatctatcaaacatttcaaagatccaaaagaccaaaccttaaacacccactcaaccatccaaatactaaaagttcttcaaccaagacactttggtttggacttgaacaaaggaaagagattttcagttccatttgatccggtaggttatacctattgggattacgttgatgcttggactaaggtgttttggcaccaaaatacccgcttcaaacattcatggctgatatatttcaagaccaacacaatttacaattttcccaattggtttttacaatggtgggacttctttggaccaatcccagagatattcccagaaacggtccaacaaggattttcccaatttaagaaacaatacaattcgcaggaatcacgaattccagcagatcttaaatacttttcaagctttgcactgtcatggatattctcatggcaatatcgttacagcaagactgaaaagacaaaccaatatccatcactacaaagacacgcatttgtaaaatggtggacacaatttgactcatccaaagcggatccagaacaagtaaaactatggttccaatcccatctagaattcctcaaagcagctgatccagagacttctgtgtttttgaaccaaaagtctcatctggcagcatttttagcaggatcgacatcaaaggaggtcttagc

SEQ ID NO: 14147 - DNA, 1107 bp, Glycine max
  Gm_smallRNAprecursor_6980
aaccggcaaccgccaaacaaacatcggccgactatgcatggccaattgaaacccttcaggcccttcaagacatgggtctgaccaaatttccaaaaataatcaaaaaatcttgggcagacattgcctcagaatctgatgatgaatctgaatcaaatttacaaacaatgatccaaaatgcgtcaatgaccaaaacaaccaccaatactaaaggaaaactacctttagccaaagctcaaacaccacctaccaaacaaactaacaattatatttataaaaataaattgttaactgttttgcagatggaacctgaattttgggacaaaaatcccttcaaggcaacggccaaggctttcccactaggatttcactacaaaccaaccaccatcctgaagacaagaactttttatgaattgattttggtagattcaaactcagtatctatcaaacatttcaaagatccaaaagaccaaaccttaaacacccactcaaccatccaaatactaaaagttcttcaaccaagacactttggtttggacttgaacaaaggaaagagattttcagttccatttgatccggtaggttatacctattgggattacgttgatgcttggactaaggtgttttggcaccaaaatacccgcttcaaacattcatggctgatatatttcaagaccaacacaatttacaattttcccaattggtttttacaatggtgggacttctttggaccaatcccagagatattcccagaaacggtccaacaaggattttcccaatttaagaaacaatacaattcgcaggaatcacgaattccagcagatcttaaatacttttcaagctttgcactgtcatggatattctcatggcaatatcgttacagcaagactgaaaagacaaaccaatatccatcactacaaagacacgcatttgtaaaatggtggacacaatttgactcatccaaagcggatccagaacaagtaaaactatggttccaatcccatctagaattcctcaaagcagctgatccagagacttctgtgtttttgaaccaaaagtctcatctggcagcatttttagcaggatcgacatcaaaggaggtcttagcta

SEQ ID NO: 14148 - DNA, 1107 bp, Glycine max; identical to SEQ ID NO: 14147
  Gm_smallRNAprecursor_6981

SEQ ID NO: 14149 - DNA, 1108 bp, Glycine max
  Gm_smallRNAprecursor_6982
aaccggcaaccgccaaacaaacatcggccgactatgcatggccaattgaaacccttcaggcccttcaagacatgggtctgaccaaatttccaaaaataatcaaaaaatcttgggcagacattgcctcagaatctgatgatgaatctgaatcaaatttacaaacaatgatccaaaatgcgtcaatgaccaaaacaaccaccaatactaaaggaaaactacctttagccaaagctcaaacaccacctaccaaacaaactaacaattatatttataaaaataaattgttaactgttttgcagatggaacctgaattttgggacaaaaatcccttcaaggcaacggccaaggctttcccactaggatttcactacaaaccaaccaccatcctgaagacaagaactttttatgaattgattttggtagattcaaactcagtatctatcaaacatttcaaagatccaaaagaccaaaccttaaacacccactcaaccatccaaatactaaaagttcttcaaccaagacactttggtttggacttgaacaaaggaaagagattttcagttccatttgatccggtaggttatacctattgggattacgttgatgcttggactaaggtgttttggcaccaaaatacccgcttcaaacattcatggctgatatatttcaagaccaacacaatttacaattttcccaattggtttttacaatggtgggacttctttggaccaatcccagagatattcccagaaacggtccaacaaggattttcccaatttaagaaacaatacaattcgcaggaatcacgaattccagcagatcttaaatacttttcaagctttgcactgtcatggatattctcatggcaatatcgttacagcaagactgaaaagacaaaccaatatccatcactacaaagacacgcatttgtaaaatggtggacacaatttgactcatccaaagcggatccagaacaagtaaaactatggttccaatcccatctagaattcctcaaagcagctgatccagagacttctgtgtttttgaaccaaaagtctcatctggcagcatttttagcaggatcgacatcaaaggaggtcttagctaa

SEQ ID NO: 14150 - DNA, 1108 bp, Glycine max; identical to SEQ ID NO: 14149
  Gm_smallRNAprecursor_6983

SEQ ID NO: 14151 - DNA, 1102 bp, Glycine max
  Gm_smallRNAprecursor_6984
cggcaaccgccaaacaaacatcggccgactatgcatggccaattgaaacccttcaggcccttcaagacatgggtctgaccaaatttccaaaaataatcaaaaaatcttgggcagacattgcctcagaatctgatgatgaatctgaatcaaatttacaaacaatgatccaaaatgcgtcaatgaccaaaacaaccaccaatactaaaggaaaactacctttagccaaagctcaaacaccacctaccaaacaaactaacaattatatttataaaaataaattgttaactgttttgcagatggaacctgaattttgggacaaaaatcccttcaaggcaacggccaaggctttcccactaggatttcactacaaaccaaccaccatcctgaagacaagaactttttatgaattgattttggtagattcaaactcagtatctatcaaacatttcaaagatccaaaagaccaaaccttaaacacccactcaaccatccaaatactaaaagttcttcaaccaagacactttggtttggacttgaacaaaggaaagagattttcagttccatttgatccggtaggttatacctattgggattacgttgatgcttggactaaggtgttttggcaccaaaatacccgcttcaaacattcatggctgatatatttcaagaccaacacaatttacaattttcccaattggtttttacaatggtgggacttctttggaccaatcccagagatattcccagaaacggtccaacaaggattttcccaatttaagaaacaatacaattcgcaggaatcacgaattccagcagatcttaaatacttttcaagctttgcactgtcatggatattctcatggcaatatcgttacagcaagactgaaaagacaaaccaatatccatcactacaaagacacgcatttgtaaaatggtggacacaatttgactcatccaaagcggatccagaacaagtaaaactatggttccaatcccatctagaattcctcaaagcagctgatccagagacttctgtgtttttgaaccaaaagtctcatctggcagcatttttagcaggatcgacatcaaaggaggtcttagc

SEQ ID NO: 14152 - DNA, 1244 bp, Glycine max
  Gm_smallRNAprecursor_6985
caagacatgggtctgaccaaatttccaaaaataatcaaaaaatcttgggcagacattgcctcagaatctgatgatgaatctgaatcaaatttacaaacaatgatccaaaatgcgtcaatgaccaaaacaaccaccaatactaaaggaaaactacctttagccaaagctcaaacaccacctaccaaacaaactaacaattatatttataaaaataaattgttaactgttttgcagatggaacctgaattttgggacaaaaatcccttcaaggcaacggccaaggctttcccactaggatttcactacaaaccaaccaccatcctgaagacaagaactttttatgaattgattttggtagattcaaactcagtatctatcaaacatttcaaagatccaaaagaccaaaccttaaacacccactcaaccatccaaatactaaaagttcttcaaccaagacactttggtttggacttgaacaaaggaaagagattttcagttccatttgatccggtaggttatacctattgggattacgttgatgcttggactaaggtgttttggcaccaaaatacccgcttcaaacattcatggctgatatatttcaagaccaacacaatttacaattttcccaattggtttttacaatggtgggacttctttggaccaatcccagagatattcccagaaacggtccaacaaggattttcccaatttaagaaacaatacaattcgcaggaatcacgaattccagcagatcttaaatacttttcaagctttgcactgtcatggatattctcatggcaatatcgttacagcaagactgaaaagacaaaccaatatccatcactacaaagacacgcatttgtaaaatggtggacacaatttgactcatccaaagcggatccagaacaagtaaaactatggttccaatcccatctagaattcctcaaagcagctgatccagagacttctgtgtttttgaaccaaaagtctcatctggcagcatttttagcaggatcgacatcaaaggaggtcttagctaaaaatctgaaggaagttctacaaatgttacaacaggaagaagaagcttcatcctcaaaaaaggaagaaacaagttctgctgaagacgaagaagatcccttttaccaaaacgaagatgattgttttggtatctgtttagattaaatttaatttcggtcacaaaaccgtctgtttgtaatttatgtgtaattaatgctggacaa

SEQ ID NO: 14153 - DNA, 1080 bp, Glycine max
  Gm_smallRNAprecursor_6986
ccaaaaataatcaaaaaatcttgggcagacattgcctcagaatctgatgatgaatctgaatcaaatttacaaacaatgatccaaaatgcgtcaatgaccaaaacaaccaccaatactaaaggaaaactacctttagccaaagctcaaacaccacctaccaaacaaactaacaattatatttataaaaataaattgttaactgttttgcagatggaacctgaattttgggacaaaaatcccttcaaggcaacggccaaggctttcccactaggatttcactacaaaccaaccaccatcctgaagacaagaactttttatgaattgattttggtagattcaaactcagtatctatcaaacatttcaaagatccaaaagaccaaaccttaaacacccactcaaccatccaaatactaaaagttcttcaaccaagacactttggtttggacttgaacaaaggaaagagattttcagttccatttgatccggtaggttatacctattgggattacgttgatgcttggactaaggtgttttggcaccaaaatacccgcttcaaacattcatggctgatatatttcaagaccaacacaatttacaattttcccaattggtttttacaatggtgggacttctttggaccaatcccagagatattcccagaaacggtccaacaaggattttcccaatttaagaaacaatacaattcgcaggaatcacgaattccagcagatcttaaatacttttcaagctttgcactgtcatggatattctcatggcaatatcgttacagcaagactgaaaagacaaaccaatatccatcactacaaagacacgcatttgtaaaatggtggacacaatttgactcatccaaagcggatccagaacaagtaaaactatggttccaatcccatctagaattcctcaaagcagctgatccagagacttctgtgtttttgaaccaaaagtctcatctggcagcatttttagcaggatcgacatcaaaggaggtcttagctaaaaatctgaaggaagttctacaaatgttacaacaggaagaagaagcttcatcctcaaaaaag

SEQ ID NO: 14154 - DNA, 1062 bp, Glycine max
  Gm_smallRNAprecursor_6987
tcttgggcagacattgcctcagaatctgatgatgaatctgaatcaaatttacaaacaatgatccaaaatgcgtcaatgaccaaaacaaccaccaatactaaaggaaaactacctttagccaaagctcaaacaccacctaccaaacaaactaacaattatatttataaaaataaattgttaactgttttgcagatggaacctgaattttgggacaaaaatcccttcaaggcaacggccaaggctttcccactaggatttcactacaaaccaaccaccatcctgaagacaagaactttttatgaattgattttggtagattcaaactcagtatctatcaaacatttcaaagatccaaaagaccaaaccttaaacacccactcaaccatccaaatactaaaagttcttcaaccaagacactttggtttggacttgaacaaaggaaagagattttcagttccatttgatccggtaggttatacctattgggattacgttgatgcttggactaaggtgttttggcaccaaaatacccgcttcaaacattcatggctgatatatttcaagaccaacacaatttacaattttcccaattggtttttacaatggtgggacttctttggaccaatcccagagatattcccagaaacggtccaacaaggattttcccaatttaagaaacaatacaattcgcaggaatcacgaattccagcagatcttaaatacttttcaagctttgcactgtcatggatattctcatggcaatatcgttacagcaagactgaaaagacaaaccaatatccatcactacaaagacacgcatttgtaaaatggtggacacaatttgactcatccaaagcggatccagaacaagtaaaactatggttccaatcccatctagaattcctcaaagcagctgatccagagacttctgtgtttttgaaccaaaagtctcatctggcagcatttttagcaggatcgacatcaaaggaggtcttagctaaaaatctgaaggaagttctacaaatgttacaacaggaagaagaagcttcatcctcaaaaaag

SEQ ID NO: 14155 - DNA, 1146 bp, Glycine max
  Gm_smallRNAprecursor_6988
aatgatccaaaatgcgtcaatgaccaaaacaaccaccaatactaaaggaaaactacctttagccaaagctcaaacaccacctaccaaacaaactaacaattatatttataaaaataaattgttaactgttttgcagatggaacctgaattttgggacaaaaatcccttcaaggcaacggccaaggctttcccactaggatttcactacaaaccaaccaccatcctgaagacaagaactttttatgaattgattttggtagattcaaactcagtatctatcaaacatttcaaagatccaaaagaccaaaccttaaacacccactcaaccatccaaatactaaaagttcttcaaccaagacactttggtttggacttgaacaaaggaaagagattttcagttccatttgatccggtaggttatacctattgggattacgttgatgcttggactaaggtgttttggcaccaaaatacccgcttcaaacattcatggctgatatatttcaagaccaacacaatttacaattttcccaattggtttttacaatggtgggacttctttggaccaatcccagagatattcccagaaacggtccaacaaggattttcccaatttaagaaacaatacaattcgcaggaatcacgaattccagcagatcttaaatacttttcaagctttgcactgtcatggatattctcatggcaatatcgttacagcaagactgaaaagacaaaccaatatccatcactacaaagacacgcatttgtaaaatggtggacacaatttgactcatccaaagcggatccagaacaagtaaaactatggttccaatcccatctagaattcctcaaagcagctgatccagagacttctgtgtttttgaaccaaaagtctcatctggcagcatttttagcaggatcgacatcaaaggaggtcttagctaaaaatctgaaggaagttctacaaatgttacaacaggaagaagaagcttcatcctcaaaaaaggaagaaacaagttctgctgaagacgaagaagatcccttttaccaaaacgaagatgattgttttggtatctgtttagattaaatttaatttcggtcacaaaaccgtctgtttgtaatttatgtgtaattaatgctggacaa

SEQ ID NO: 14156 - DNA, 1169 bp, Glycine max
  Gm_smallRNAprecursor_6989
caacggccaaggctttcccactaggatttcactacaaaccaaccaccatcctgaagacaagaactttttatgaattgattttggtagattcaaactcagtatctatcaaacatttcaaagatccaaaagaccaaaccttaaacacccactcaaccatccaaatactaaaagttcttcaaccaagacactttggtttggacttgaacaaaggaaagagattttcagttccatttgatccggtaggttatacctattgggattacgttgatgcttggactaaggtgttttggcaccaaaatacccgcttcaaacattcatggctgatatatttcaagaccaacacaatttacaattttcccaattggtttttacaatggtgggacttctttggaccaatcccagagatattcccagaaacggtccaacaaggattttcccaatttaagaaacaatacaattcgcaggaatcacgaattccagcagatcttaaatacttttcaagctttgcactgtcatggatattctcatggcaatatcgttacagcaagactgaaaagacaaaccaatatccatcactacaaagacacgcatttgtaaaatggtggacacaatttgactcatccaaagcggatccagaacaagtaaaactatggttccaatcccatctagaattcctcaaagcagctgatccagagacttctgtgtttttgaaccaaaagtctcatctggcagcatttttagcaggatcgacatcaaaggaggtcttagctaaaaatctgaaggaagttctacaaatgttacaacaggaagaagaagcttcatcctcaaaaaaggaagaaacaagttctgctgaagacgaagaagatcccttttaccaaaacgaagatgattgttttggtatctgtttagattaaatttaatttcggtcacaaaaccgtctgtttgtaatttatgtgtaattaatgctggacaatactacctgtcctgtagtcattaaagtcccggtcaaaactacttgtcttgtaacaaacagtcaaatagtcccagtcaaaactaccggcaactaccggtcttagatttttggctatataaggagtcctcaagtatgttgtggggcaccctttcatttagccattttttcaggtttcggaagagaggtgctctgaaac

SEQ ID NO: 14157 - DNA, 1173 bp, Glycine max
  Gm_smallRNAprecursor_6990
caacggccaaggctttcccactaggatttcactacaaaccaaccaccatcctgaagacaagaactttttatgaattgattttggtagattcaaactcagtatctatcaaacatttcaaagatccaaaagaccaaaccttaaacacccactcaaccatccaaatactaaaagttcttcaaccaagacactttggtttggacttgaacaaaggaaagagattttcagttccatttgatccggtaggttatacctattgggattacgttgatgcttggactaaggtgttttggcaccaaaatacccgcttcaaacattcatggctgatatatttcaagaccaacacaatttacaattttcccaattggtttttacaatggtgggacttctttggaccaatcccagagatattcccagaaacggtccaacaaggattttcccaatttaagaaacaatacaattcgcaggaatcacgaattccagcagatcttaaatacttttcaagctttgcactgtcatggatattctcatggcaatatcgttacagcaagactgaaaagacaaaccaatatccatcactacaaagacacgcatttgtaaaatggtggacacaatttgactcatccaaagcggatccagaacaagtaaaactatggttccaatcccatctagaattcctcaaagcagctgatccagagacttctgtgtttttgaaccaaaagtctcatctggcagcatttttagcaggatcgacatcaaaggaggtcttagctaaaaatctgaaggaagttctacaaatgttacaacaggaagaagaagcttcatcctcaaaaaaggaagaaacaagttctgctgaagacgaagaagatcccttttaccaaaacgaagatgattgttttggtatctgtttagattaaatttaatttcggtcacaaaaccgtctgtttgtaatttatgtgtaattaatgctggacaatactacctgtcctgtagtcattaaagtcccggtcaaaactacttgtcttgtaacaaacagtcaaatagtcccagtcaaaactaccggcaactaccggtcttagatttttggctatataaggagtcctcaagtatgttgtggggcaccctttcatttagccattttttcaggtttcggaagagaggtgctctgaaacaaga

SEQ ID NO: 14158 - DNA, 1058 bp, Glycine max
  Gm_smallRNAprecursor_6991
accttaaacacccactcaaccatccaaatactaaaagttcttcaaccaagacactttggtttggacttgaacaaaggaaagagattttcagttccatttgatccggtaggttatacctattgggattacgttgatgcttggactaaggtgttttggcaccaaaatacccgcttcaaacattcatggctgatatatttcaagaccaacacaatttacaattttcccaattggtttttacaatggtgggacttctttggaccaatcccagagatattcccagaaacggtccaacaaggattttcccaatttaagaaacaatacaattcgcaggaatcacgaattccagcagatcttaaatacttttcaagctttgcactgtcatggatattctcatggcaatatcgttacagcaagactgaaaagacaaaccaatatccatcactacaaagacacgcatttgtaaaatggtggacacaatttgactcatccaaagcggatccagaacaagtaaaactatggttccaatcccatctagaattcctcaaagcagctgatccagagacttctgtgtttttgaaccaaaagtctcatctggcagcatttttagcaggatcgacatcaaaggaggtcttagctaaaaatctgaaggaagttctacaaatgttacaacaggaagaagaagcttcatcctcaaaaaaggaagaaacaagttctgctgaagacgaagaagatcccttttaccaaaacgaagatgattgttttggtatctgtttagattaaatttaatttcggtcacaaaaccgtctgtttgtaatttatgtgtaattaatgctggacaatactacctgtcctgtagtcattaaagtcccggtcaaaactacttgtcttgtaacaaacagtcaaatagtcccagtcaaaactaccggcaactaccggtcttagatttttggctatataaggagtcctcaagtatgttgtggggcaccctttcatttagccattttttcaggtttcggaagagaggtgctctgaaacaagatttttgtaagcgcttcttt

SEQ ID NO: 14159 - DNA, 1055 bp, Glycine max
  Gm_smallRNAprecursor_6992
tcttcaaccaagacactttggtttggacttgaacaaaggaaagagattttcagttccatttgatccggtaggttatacctattgggattacgttgatgcttggactaaggtgttttggcaccaaaatacccgcttcaaacattcatggctgatatatttcaagaccaacacaatttacaattttcccaattggtttttacaatggtgggacttctttggaccaatcccagagatattcccagaaacggtccaacaaggattttcccaatttaagaaacaatacaattcgcaggaatcacgaattccagcagatcttaaatacttttcaagctttgcactgtcatggatattctcatggcaatatcgttacagcaagactgaaaagacaaaccaatatccatcactacaaagacacgcatttgtaaaatggtggacacaatttgactcatccaaagcggatccagaacaagtaaaactatggttccaatcccatctagaattcctcaaagcagctgatccagagacttctgtgtttttgaaccaaaagtctcatctggcagcatttttagcaggatcgacatcaaaggaggtcttagctaaaaatctgaaggaagttctacaaatgttacaacaggaagaagaagcttcatcctcaaaaaaggaagaaacaagttctgctgaagacgaagaagatcccttttaccaaaacgaagatgattgttttggtatctgtttagattaaatttaatttcggtcacaaaaccgtctgtttgtaatttatgtgtaattaatgctggacaatactacctgtcctgtagtcattaaagtcccggtcaaaactacttgtcttgtaacaaacagtcaaatagtcccagtcaaaactaccggcaactaccggtcttagatttttggctatataaggagtcctcaagtatgttgtggggcaccctttcatttagccattttttcaggtttcggaagagaggtgctctgaaacaagatttttgtaagcgcttctttctagattcaataaatttctatttttcatccttctc

SEQ ID NO: 14160 - DNA, 1212 bp, Glycine max
  Gm_smallRNAprecursor_6993
tcttcaaccaagacactttggtttggacttgaacaaaggaaagagattttcagttccatttgatccggtaggttatacctattgggattacgttgatgcttggactaaggtgttttggcaccaaaatacccgcttcaaacattcatggctgatatatttcaagaccaacacaatttacaattttcccaattggtttttacaatggtgggacttctttggaccaatcccagagatattcccagaaacggtccaacaaggattttcccaatttaagaaacaatacaattcgcaggaatcacgaattccagcagatcttaaatacttttcaagctttgcactgtcatggatattctcatggcaatatcgttacagcaagactgaaaagacaaaccaatatccatcactacaaagacacgcatttgtaaaatggtggacacaatttgactcatccaaagcggatccagaacaagtaaaactatggttccaatcccatctagaattcctcaaagcagctgatccagagacttctgtgtttttgaaccaaaagtctcatctggcagcatttttagcaggatcgacatcaaaggaggtcttagctaaaaatctgaaggaagttctacaaatgttacaacaggaagaagaagcttcatcctcaaaaaaggaagaaacaagttctgctgaagacgaagaagatcccttttaccaaaacgaagatgattgttttggtatctgtttagattaaatttaatttcggtcacaaaaccgtctgtttgtaatttatgtgtaattaatgctggacaatactacctgtcctgtagtcattaaagtcccggtcaaaactacttgtcttgtaacaaacagtcaaatagtcccagtcaaaactaccggcaactaccggtcttagatttttggctatataaggagtcctcaagtatgttgtggggcaccctttcatttagccattttttcaggtttcggaagagaggtgctctgaaacaagatttttgtaagcgcttctttctagattcaataaatttctatttttcatccttctctcttctcccttcaccgatcctgtgcggctctgccgccgcttcggtttctttgtttatgaaaacctggggtttgtaagccggtcttcggtgtgcccttgatatctgttttcaagtttatattttcatttcatcaatcatactgcattcttacttccta

SEQ ID NO: 14161 - DNA, 1213 bp, Glycine max
  Gm_smallRNAprecursor_6994
tcttcaaccaagacactttggtttggacttgaacaaaggaaagagattttcagttccatttgatccggtaggttatacctattgggattacgttgatgcttggactaaggtgttttggcaccaaaatacccgcttcaaacattcatggctgatatatttcaagaccaacacaatttacaattttcccaattggtttttacaatggtgggacttctttggaccaatcccagagatattcccagaaacggtccaacaaggattttcccaatttaagaaacaatacaattcgcaggaatcacgaattccagcagatcttaaatacttttcaagctttgcactgtcatggatattctcatggcaatatcgttacagcaagactgaaaagacaaaccaatatccatcactacaaagacacgcatttgtaaaatggtggacacaatttgactcatccaaagcggatccagaacaagtaaaactatggttccaatcccatctagaattcctcaaagcagctgatccagagacttctgtgtttttgaaccaaaagtctcatctggcagcatttttagcaggatcgacatcaaaggaggtcttagctaaaaatctgaaggaagttctacaaatgttacaacaggaagaagaagcttcatcctcaaaaaaggaagaaacaagttctgctgaagacgaagaagatcccttttaccaaaacgaagatgattgttttggtatctgtttagattaaatttaatttcggtcacaaaaccgtctgtttgtaatttatgtgtaattaatgctggacaatactacctgtcctgtagtcattaaagtcccggtcaaaactacttgtcttgtaacaaacagtcaaatagtcccagtcaaaactaccggcaactaccggtcttagatttttggctatataaggagtcctcaagtatgttgtggggcaccctttcatttagccattttttcaggtttcggaagagaggtgctctgaaacaagatttttgtaagcgcttctttctagattcaataaatttctatttttcatccttctctcttctcccttcaccgatcctgtgcggctctgccgccgcttcggtttctttgtttatgaaaacctggggtttgtaagccggtcttcggtgtgcccttgatatctgttttcaagtttatattttcatttcatcaatcatactgcattcttacttcctat

SEQ ID NO: 14162 - DNA, 1053 bp, Glycine max
  Gm_smallRNAprecursor_6995
cttcaaccaagacactttggtttggacttgaacaaaggaaagagattttcagttccatttgatccggtaggttatacctattgggattacgttgatgcttggactaaggtgttttggcaccaaaatacccgcttcaaacattcatggctgatatatttcaagaccaacacaatttacaattttcccaattggtttttacaatggtgggacttctttggaccaatcccagagatattcccagaaacggtccaacaaggattttcccaatttaagaaacaatacaattcgcaggaatcacgaattccagcagatcttaaatacttttcaagctttgcactgtcatggatattctcatggcaatatcgttacagcaagactgaaaagacaaaccaatatccatcactacaaagacacgcatttgtaaaatggtggacacaatttgactcatccaaagcggatccagaacaagtaaaactatggttccaatcccatctagaattcctcaaagcagctgatccagagacttctgtgtttttgaaccaaaagtctcatctggcagcatttttagcaggatcgacatcaaaggaggtcttagctaaaaatctgaaggaagttctacaaatgttacaacaggaagaagaagcttcatcctcaaaaaaggaagaaacaagttctgctgaagacgaagaagatcccttttaccaaaacgaagatgattgttttggtatctgtttagattaaatttaatttcggtcacaaaaccgtctgtttgtaatttatgtgtaattaatgctggacaatactacctgtcctgtagtcattaaagtcccggtcaaaactacttgtcttgtaacaaacagtcaaatagtcccagtcaaaactaccggcaactaccggtcttagatttttggctatataaggagtcctcaagtatgttgtggggcaccctttcatttagccattttttcaggtttcggaagagaggtgctctgaaacaagatttttgtaagcgcttctttctagattcaataaatttctatttttcatccttct

SEQ ID NO: 14163 - DNA, 1054 bp, Glycine max
  Gm_smallRNAprecursor_6996
cttcaaccaagacactttggtttggacttgaacaaaggaaagagattttcagttccatttgatccggtaggttatacctattgggattacgttgatgcttggactaaggtgttttggcaccaaaatacccgcttcaaacattcatggctgatatatttcaagaccaacacaatttacaattttcccaattggtttttacaatggtgggacttctttggaccaatcccagagatattcccagaaacggtccaacaaggattttcccaatttaagaaacaatacaattcgcaggaatcacgaattccagcagatcttaaatacttttcaagctttgcactgtcatggatattctcatggcaatatcgttacagcaagactgaaaagacaaaccaatatccatcactacaaagacacgcatttgtaaaatggtggacacaatttgactcatccaaagcggatccagaacaagtaaaactatggttccaatcccatctagaattcctcaaagcagctgatccagagacttctgtgtttttgaaccaaaagtctcatctggcagcatttttagcaggatcgacatcaaaggaggtcttagctaaaaatctgaaggaagttctacaaatgttacaacaggaagaagaagcttcatcctcaaaaaaggaagaaacaagttctgctgaagacgaagaagatcccttttaccaaaacgaagatgattgttttggtatctgtttagattaaatttaatttcggtcacaaaaccgtctgtttgtaatttatgtgtaattaatgctggacaatactacctgtcctgtagtcattaaagtcccggtcaaaactacttgtcttgtaacaaacagtcaaatagtcccagtcaaaactaccggcaactaccggtcttagatttttggctatataaggagtcctcaagtatgttgtggggcaccctttcatttagccattttttcaggtttcggaagagaggtgctctgaaacaagatttttgtaagcgcttctttctagattcaataaatttctatttttcatccttctc

SEQ ID NO: 14164 - DNA, 1041 bp, Glycine max
  Gm_smallRNAprecursor_6997
accaagacactttggtttggacttgaacaaaggaaagagattttcagttccatttgatccggtaggttatacctattgggattacgttgatgcttggactaaggtgttttggcaccaaaatacccgcttcaaacattcatggctgatatatttcaagaccaacacaatttacaattttcccaattggtttttacaatggtgggacttctttggaccaatcccagagatattcccagaaacggtccaacaaggattttcccaatttaagaaacaatacaattcgcaggaatcacgaattccagcagatcttaaatacttttcaagctttgcactgtcatggatattctcatggcaatatcgttacagcaagactgaaaagacaaaccaatatccatcactacaaagacacgcatttgtaaaatggtggacacaatttgactcatccaaagcggatccagaacaagtaaaactatggttccaatcccatctagaattcctcaaagcagctgatccagagacttctgtgtttttgaaccaaaagtctcatctggcagcatttttagcaggatcgacatcaaaggaggtcttagctaaaaatctgaaggaagttctacaaatgttacaacaggaagaagaagcttcatcctcaaaaaaggaagaaacaagttctgctgaagacgaagaagatcccttttaccaaaacgaagatgattgttttggtatctgtttagattaaatttaatttcggtcacaaaaccgtctgtttgtaatttatgtgtaattaatgctggacaatactacctgtcctgtagtcattaaagtcccggtcaaaactacttgtcttgtaacaaacagtcaaatagtcccagtcaaaactaccggcaactaccggtcttagatttttggctatataaggagtcctcaagtatgttgtggggcaccctttcatttagccattttttcaggtttcggaagagaggtgctctgaaacaagatttttgtaagcgcttctttctagattcaataaatttctatttttca

SEQ ID NO: 14165 - DNA, 1031 bp, Glycine max
  Gm_smallRNAprecursor_6998
gacactttggtttggacttgaacaaaggaaagagattttcagttccatttgatccggtaggttatacctattgggattacgttgatgcttggactaaggtgttttggcaccaaaatacccgcttcaaacattcatggctgatatatttcaagaccaacacaatttacaattttcccaattggtttttacaatggtgggacttctttggaccaatcccagagatattcccagaaacggtccaacaaggattttcccaatttaagaaacaatacaattcgcaggaatcacgaattccagcagatcttaaatacttttcaagctttgcactgtcatggatattctcatggcaatatcgttacagcaagactgaaaagacaaaccaatatccatcactacaaagacacgcatttgtaaaatggtggacacaatttgactcatccaaagcggatccagaacaagtaaaactatggttccaatcccatctagaattcctcaaagcagctgatccagagacttctgtgtttttgaaccaaaagtctcatctggcagcatttttagcaggatcgacatcaaaggaggtcttagctaaaaatctgaaggaagttctacaaatgttacaacaggaagaagaagcttcatcctcaaaaaaggaagaaacaagttctgctgaagacgaagaagatcccttttaccaaaacgaagatgattgttttggtatctgtttagattaaatttaatttcggtcacaaaaccgtctgtttgtaatttatgtgtaattaatgctggacaatactacctgtcctgtagtcattaaagtcccggtcaaaactacttgtcttgtaacaaacagtcaaatagtcccagtcaaaactaccggcaactaccggtcttagatttttggctatataaggagtcctcaagtatgttgtggggcaccctttcatttagccattttttcaggtttcggaagagaggtgctctgaaacaagatttttgtaagcgcttctttctagattcaataaatttctatt

SEQ ID NO: 14166 - DNA, 1141 bp, Glycine max
  Gm_smallRNAprecursor_6999
ggtttggacttgaacaaaggaaagagattttcagttccatttgatccggtaggttatacctattgggattacgttgatgcttggactaaggtgttttggcaccaaaatacccgcttcaaacattcatggctgatatatttcaagaccaacacaatttacaattttcccaattggtttttacaatggtgggacttctttggaccaatcccagagatattcccagaaacggtccaacaaggattttcccaatttaagaaacaatacaattcgcaggaatcacgaattccagcagatcttaaatacttttcaagctttgcactgtcatggatattctcatggcaatatcgttacagcaagactgaaaagacaaaccaatatccatcactacaaagacacgcatttgtaaaatggtggacacaatttgactcatccaaagcggatccagaacaagtaaaactatggttccaatcccatctagaattcctcaaagcagctgatccagagacttctgtgtttttgaaccaaaagtctcatctggcagcatttttagcaggatcgacatcaaaggaggtcttagctaaaaatctgaaggaagttctacaaatgttacaacaggaagaagaagcttcatcctcaaaaaaggaagaaacaagttctgctgaagacgaagaagatcccttttaccaaaacgaagatgattgttttggtatctgtttagattaaatttaatttcggtcacaaaaccgtctgtttgtaatttatgtgtaattaatgctggacaatactacctgtcctgtagtcattaaagtcccggtcaaaactacttgtcttgtaacaaacagtcaaatagtcccagtcaaaactaccggcaactaccggtcttagatttttggctatataaggagtcctcaagtatgttgtggggcaccctttcatttagccattttttcaggtttcggaagagaggtgctctgaaacaagatttttgtaagcgcttctttctagattcaataaatttctatttttcatccttctctcttctcccttcaccgatcctgtgcggctctgccgccgcttcggtttctttgtttatgaaaacctggggtttgtaagccggtcttcggtgtgcccttgatatctg

SEQ ID NO: 14167 - DNA, 1184 bp, Glycine max
  Gm_smallRNAprecursor_7000
ggtttggacttgaacaaaggaaagagattttcagttccatttgatccggtaggttatacctattgggattacgttgatgcttggactaaggtgttttggcaccaaaatacccgcttcaaacattcatggctgatatatttcaagaccaacacaatttacaattttcccaattggtttttacaatggtgggacttctttggaccaatcccagagatattcccagaaacggtccaacaaggattttcccaatttaagaaacaatacaattcgcaggaatcacgaattccagcagatcttaaatacttttcaagctttgcactgtcatggatattctcatggcaatatcgttacagcaagactgaaaagacaaaccaatatccatcactacaaagacacgcatttgtaaaatggtggacacaatttgactcatccaaagcggatccagaacaagtaaaactatggttccaatcccatctagaattcctcaaagcagctgatccagagacttctgtgtttttgaaccaaaagtctcatctggcagcatttttagcaggatcgacatcaaaggaggtcttagctaaaaatctgaaggaagttctacaaatgttacaacaggaagaagaagcttcatcctcaaaaaaggaagaaacaagttctgctgaagacgaagaagatcccttttaccaaaacgaagatgattgttttggtatctgtttagattaaatttaatttcggtcacaaaaccgtctgtttgtaatttatgtgtaattaatgctggacaatactacctgtcctgtagtcattaaagtcccggtcaaaactacttgtcttgtaacaaacagtcaaatagtcccagtcaaaactaccggcaactaccggtcttagatttttggctatataaggagtcctcaagtatgttgtggggcaccctttcatttagccattttttcaggtttcggaagagaggtgctctgaaacaagatttttgtaagcgcttctttctagattcaataaatttctatttttcatccttctctcttctcccttcaccgatcctgtgcggctctgccgccgcttcggtttctttgtttatgaaaacctggggtttgtaagccggtcttcggtgtgcccttgatatctgttttcaagtttatattttcatttcatcaatcatactgcattct

SEQ ID NO: 14168 - DNA, 1077 bp, Glycine max
  Gm_smallRNAprecursor_7001
tcaaacattcatggctgatatatttcaagaccaacacaatttacaattttcccaattggtttttacaatggtgggacttctttggaccaatcccagagatattcccagaaacggtccaacaaggattttcccaatttaagaaacaatacaattcgcaggaatcacgaattccagcagatcttaaatacttttcaagctttgcactgtcatggatattctcatggcaatatcgttacagcaagactgaaaagacaaaccaatatccatcactacaaagacacgcatttgtaaaatggtggacacaatttgactcatccaaagcggatccagaacaagtaaaactatggttccaatcccatctagaattcctcaaagcagctgatccagagacttctgtgtttttgaaccaaaagtctcatctggcagcatttttagcaggatcgacatcaaaggaggtcttagctaaaaatctgaaggaagttctacaaatgttacaacaggaagaagaagcttcatcctcaaaaaaggaagaaacaagttctgctgaagacgaagaagatcccttttaccaaaacgaagatgattgttttggtatctgtttagattaaatttaatttcggtcacaaaaccgtctgtttgtaatttatgtgtaattaatgctggacaatactacctgtcctgtagtcattaaagtcccggtcaaaactacttgtcttgtaacaaacagtcaaatagtcccagtcaaaactaccggcaactaccggtcttagatttttggctatataaggagtcctcaagtatgttgtggggcaccctttcatttagccattttttcaggtttcggaagagaggtgctctgaaacaagatttttgtaagcgcttctttctagattcaataaatttctatttttcatccttctctcttctcccttcaccgatcctgtgcggctctgccgccgcttcggtttctttgtttatgaaaacctggggtttgtaagccggtcttcggtgtgcccttgatatctgttttcaagtttatattttcatttcatcaatcatactgcattcttacttcct

SEQ ID NO: 14169 - DNA, 1078 bp, Glycine max
  Gm_smallRNAprecursor_7002
tcaaacattcatggctgatatatttcaagaccaacacaatttacaattttcccaattggtttttacaatggtgggacttctttggaccaatcccagagatattcccagaaacggtccaacaaggattttcccaatttaagaaacaatacaattcgcaggaatcacgaattccagcagatcttaaatacttttcaagctttgcactgtcatggatattctcatggcaatatcgttacagcaagactgaaaagacaaaccaatatccatcactacaaagacacgcatttgtaaaatggtggacacaatttgactcatccaaagcggatccagaacaagtaaaactatggttccaatcccatctagaattcctcaaagcagctgatccagagacttctgtgtttttgaaccaaaagtctcatctggcagcatttttagcaggatcgacatcaaaggaggtcttagctaaaaatctgaaggaagttctacaaatgttacaacaggaagaagaagcttcatcctcaaaaaaggaagaaacaagttctgctgaagacgaagaagatcccttttaccaaaacgaagatgattgttttggtatctgtttagattaaatttaatttcggtcacaaaaccgtctgtttgtaatttatgtgtaattaatgctggacaatactacctgtcctgtagtcattaaagtcccggtcaaaactacttgtcttgtaacaaacagtcaaatagtcccagtcaaaactaccggcaactaccggtcttagatttttggctatataaggagtcctcaagtatgttgtggggcaccctttcatttagccattttttcaggtttcggaagagaggtgctctgaaacaagatttttgtaagcgcttctttctagattcaataaatttctatttttcatccttctctcttctcccttcaccgatcctgtgcggctctgccgccgcttcggtttctttgtttatgaaaacctggggtttgtaagccggtcttcggtgtgcccttgatatctgttttcaagtttatattttcatttcatcaatcatactgcattcttacttccta

SEQ ID NO: 14170 - DNA, 1079 bp, Glycine max
  Gm_smallRNAprecursor_7003
tcaaacattcatggctgatatatttcaagaccaacacaatttacaattttcccaattggtttttacaatggtgggacttctttggaccaatcccagagatattcccagaaacggtccaacaaggattttcccaatttaagaaacaatacaattcgcaggaatcacgaattccagcagatcttaaatacttttcaagctttgcactgtcatggatattctcatggcaatatcgttacagcaagactgaaaagacaaaccaatatccatcactacaaagacacgcatttgtaaaatggtggacacaatttgactcatccaaagcggatccagaacaagtaaaactatggttccaatcccatctagaattcctcaaagcagctgatccagagacttctgtgtttttgaaccaaaagtctcatctggcagcatttttagcaggatcgacatcaaaggaggtcttagctaaaaatctgaaggaagttctacaaatgttacaacaggaagaagaagcttcatcctcaaaaaaggaagaaacaagttctgctgaagacgaagaagatcccttttaccaaaacgaagatgattgttttggtatctgtttagattaaatttaatttcggtcacaaaaccgtctgtttgtaatttatgtgtaattaatgctggacaatactacctgtcctgtagtcattaaagtcccggtcaaaactacttgtcttgtaacaaacagtcaaatagtcccagtcaaaactaccggcaactaccggtcttagatttttggctatataaggagtcctcaagtatgttgtggggcaccctttcatttagccattttttcaggtttcggaagagaggtgctctgaaacaagatttttgtaagcgcttctttctagattcaataaatttctatttttcatccttctctcttctcccttcaccgatcctgtgcggctctgccgccgcttcggtttctttgtttatgaaaacctggggtttgtaagccggtcttcggtgtgcccttgatatctgttttcaagtttatattttcatttcatcaatcatactgcattcttacttcctat

SEQ ID NO: 14171 - DNA, 1053 bp, Glycine max
  Gm_smallRNAprecursor_7004
caagaccaacacaatttacaattttcccaattggtttttacaatggtgggacttctttggaccaatcccagagatattcccagaaacggtccaacaaggattttcccaatttaagaaacaatacaattcgcaggaatcacgaattccagcagatcttaaatacttttcaagctttgcactgtcatggatattctcatggcaatatcgttacagcaagactgaaaagacaaaccaatatccatcactacaaagacacgcatttgtaaaatggtggacacaatttgactcatccaaagcggatccagaacaagtaaaactatggttccaatcccatctagaattcctcaaagcagctgatccagagacttctgtgtttttgaaccaaaagtctcatctggcagcatttttagcaggatcgacatcaaaggaggtcttagctaaaaatctgaaggaagttctacaaatgttacaacaggaagaagaagcttcatcctcaaaaaaggaagaaacaagttctgctgaagacgaagaagatcccttttaccaaaacgaagatgattgttttggtatctgtttagattaaatttaatttcggtcacaaaaccgtctgtttgtaatttatgtgtaattaatgctggacaatactacctgtcctgtagtcattaaagtcccggtcaaaactacttgtcttgtaacaaacagtcaaatagtcccagtcaaaactaccggcaactaccggtcttagatttttggctatataaggagtcctcaagtatgttgtggggcaccctttcatttagccattttttcaggtttcggaagagaggtgctctgaaacaagatttttgtaagcgcttctttctagattcaataaatttctatttttcatccttctctcttctcccttcaccgatcctgtgcggctctgccgccgcttcggtttctttgtttatgaaaacctggggtttgtaagccggtcttcggtgtgcccttgatatctgttttcaagtttatattttcatttcatcaatcatactgcattcttacttccta

SEQ ID NO: 14172 - DNA, 1053 bp, Glycine max; identical to SEQ ID NO: 14171
  Gm_smallRNAprecursor_7005

SEQ ID NO: 14173 - DNA, 1054 bp, Glycine max
  Gm_smallRNAprecursor_7006
caagaccaacacaatttacaattttcccaattggtttttacaatggtgggacttctttggaccaatcccagagatattcccagaaacggtccaacaaggattttcccaatttaagaaacaatacaattcgcaggaatcacgaattccagcagatcttaaatacttttcaagctttgcactgtcatggatattctcatggcaatatcgttacagcaagactgaaaagacaaaccaatatccatcactacaaagacacgcatttgtaaaatggtggacacaatttgactcatccaaagcggatccagaacaagtaaaactatggttccaatcccatctagaattcctcaaagcagctgatccagagacttctgtgtttttgaaccaaaagtctcatctggcagcatttttagcaggatcgacatcaaaggaggtcttagctaaaaatctgaaggaagttctacaaatgttacaacaggaagaagaagcttcatcctcaaaaaaggaagaaacaagttctgctgaagacgaagaagatcccttttaccaaaacgaagatgattgttttggtatctgtttagattaaatttaatttcggtcacaaaaccgtctgtttgtaatttatgtgtaattaatgctggacaatactacctgtcctgtagtcattaaagtcccggtcaaaactacttgtcttgtaacaaacagtcaaatagtcccagtcaaaactaccggcaactaccggtcttagatttttggctatataaggagtcctcaagtatgttgtggggcaccctttcatttagccattttttcaggtttcggaagagaggtgctctgaaacaagatttttgtaagcgcttctttctagattcaataaatttctatttttcatccttctctcttctcccttcaccgatcctgtgcggctctgccgccgcttcggtttctttgtttatgaaaacctggggtttgtaagccggtcttcggtgtgcccttgatatctgttttcaagtttatattttcatttcatcaatcatactgcattcttacttcctat

SEQ ID NO: 14174 - DNA, 1054 bp, Glycine max; identical to SEQ ID NO: 14173
  Gm_smallRNAprecursor_7007

SEQ ID NO: 14175 - DNA, 1054 bp, Glycine max; identical to SEQ ID NO: 14173
  Gm_smallRNAprecursor_7008

SEQ ID NO: 14176 - DNA, 1054 bp, Glycine max; identical to SEQ ID NO: 14173
  Gm_smallRNAprecursor_7009

SEQ ID NO: 14177 - DNA, 1097 bp, Glycine max
  Gm_smallRNAprecursor_7010
gaagatgattgttttggtatctgtttagattaaatttaatttcggtcacaaaaccgtctgtttgtaatttatgtgtaattaatgctggacaatactacctgtcctgtagtcattaaagtcccggtcaaaactacttgtcttgtaacaaacagtcaaatagtcccagtcaaaactaccggcaactaccggtcttagatttttggctatataaggagtcctcaagtatgttgtggggcaccctttcatttagccattttttcaggtttcggaagagaggtgctctgaaacaagatttttgtaagcgcttctttctagattcaataaatttctatttttcatccttctctcttctcccttcaccgatcctgtgcggctctgccgccgcttcggtttctttgtttatgaaaacctggggtttgtaagccggtcttcggtgtgcccttgatatctgttttcaagtttatattttcatttcatcaatcatactgcattcttacttcctatctgtccgtttgatcctactgggtttagacaacctagaaatctttgtaactgggttttgtctaagatttggttggggaatttactagcaaactctattgacctttcgattggaatgattgtaccttgatatatattgtgaccaaggaatcgaattcgagtttggaaaagattgatttttgatttggagactgccaaaccattttgtttgatgatatgtatgaaggtttggagatgtttgaaatgttggtcaatgttttgggaaaagattaaaacatcatctatgtagacaatgacaaattttgaatagggattaaaaatatcgttcataattttttgaaattctgaaggggcattcttcagtccgaatggcatcacgttccattcatattgcccgaaaggtacagtaaacgctgttttgtacctatctgattcttggatttggatttgccaaaatccagatttaatatcaaattttgaaaatatctttgcagaatttaatctgttaagcaaatcttttttgtttggaataggatatctaatccattgtaatgcttgatttaatggtttgtaatttatgactaagcggggtgttc

SEQ ID NO: 14178 - DNA, 1196 bp, Glycine max
  Gm_smallRNAprecursor_7011
acctgtcctgtagtcattaaagtcccggtcaaaactacttgtcttgtaacaaacagtcaaatagtcccagtcaaaactaccggcaactaccggtcttagatttttggctatataaggagtcctcaagtatgttgtggggcaccctttcatttagccattttttcaggtttcggaagagaggtgctctgaaacaagatttttgtaagcgcttctttctagattcaataaatttctatttttcatccttctctcttctcccttcaccgatcctgtgcggctctgccgccgcttcggtttctttgtttatgaaaacctggggtttgtaagccggtcttcggtgtgcccttgatatctgttttcaagtttatattttcatttcatcaatcatactgcattcttacttcctatctgtccgtttgatcctactgggtttagacaacctagaaatctttgtaactgggttttgtctaagatttggttggggaatttactagcaaactctattgacctttcgattggaatgattgtaccttgatatatattgtgaccaaggaatcgaattcgagtttggaaaagattgatttttgatttggagactgccaaaccattttgtttgatgatatgtatgaaggtttggagatgtttgaaatgttggtcaatgttttgggaaaagattaaaacatcatctatgtagacaatgacaaattttgaatagggattaaaaatatcgttcataattttttgaaattctgaaggggcattcttcagtccgaatggcatcacgttccattcatattgcccgaaaggtacagtaaacgctgttttgtacctatctgattcttggatttggatttgccaaaatccagatttaatatcaaattttgaaaatatctttgcagaatttaatctgttaagcaaatcttttttgtttggaataggatatctaatccattgtaatgcttgatttaatggtttgtaatttatgactaagcggggtgttccacgctcaatctcagattgtttgttaacataaaaagctgcacaagaccataggcttttgcttttccggattaggcctttatcaagcaaatccttgatttccttttgacagtattgaagaagttcttcattcatttggattggtctggcttttgtgggaatttgtttttccctaaagtctttctcataagggagat

SEQ ID NO: 14179 - DNA, 1080 bp, Glycine max
  Gm_smallRNAprecursor_7012
gatgtttgaaatgttggtcaatgttttgggaaaagattaaaacatcatctatgtagacaatgacaaattttgaatagggattaaaaatatcgttcataattttttgaaattctgaaggggcattcttcagtccgaatggcatcacgttccattcatattgcccgaaaggtacagtaaacgctgttttgtacctatctgattcttggatttggatttgccaaaatccagatttaatatcaaattttgaaaatatctttgcagaatttaatctgttaagcaaatcttttttgtttggaataggatatctaatccattgtaatgcttgatttaatggtttgtaatttatgactaagcggggtgttccacgctcaatctcagattgtttgttaacataaaaagctgcacaagaccataggcttttgcttttccggattaggcctttatcaagcaaatccttgatttccttttgacagtattgaagaagttcttcattcatttggattggtctggcttttgtgggaatttgtttttccctaaagtctttctcataagggagatcgacaatatgtttctttctgtcccaaaatgcatgtggcaattcagaacaaacggtcgattcaatatgatttaataaagattgaattctttcttttacttggggttttcccagttgtatctgaatattattaaaagatacttcttcttttaagaagttaatttgattaatcttattttctataagatttatatttctggaaattggtttagtagaaaaattaaatataatttttcttcctaaataatttgtggttattccttcattagatatttggatgggaaacagggctctaatgaagggcgttcctaagattacttcattcttaaggttttttaccagaagaaagtttgtgttaatcttaagaccttggttttcaattattgcatttgatagcttaaaattaatttttaattttgagccgtttgccgtacttaatttttctgaggttttctcaaagaattttgtaggaattaatccttctaaaatgcagtttgaatcagcccctgtatcaaatagggcca

SEQ ID NO: 14180 - DNA, 1075 bp, Glycine max
  Gm_smallRNAprecursor_7013
tatcaatctttgtcaaagcaagataatgtctatgtccctattaacttgagacatgtgcataaaaatgatcaatcaacattaaggtctagtggtccctatggaaactcaagcaacttggatcaagaagattctgcctcataggtccaattcccacttgagtccctatggaaactactgctaacctatcacaaagcgaggctagggagtactaagttattctttctcacctccattaagacttaattatttaaattattagcttggttcttaatagaataatgccatagtagtattagtctactctatatggcctggtttatttccgcaagtatgcattccattctttatcatattactctactctatattatttaaacttgtacggtggaaagccaatttaatgtttttttaaatttatttgctatgctatagtttgacccccaatccataaaatgtctgtatcttcccattccacaggcattcaaagttgtcgaaactgatgcatcagatatcggttatggtgatatcctcaaacagcaaatacatggtcaagaacatgtcatcgcctatacttcaaaacattggaatcctgcacaattaaagtattcaactgtgaaaaaagaagttttagcaattgttttgtgcatttccaaatttcaatctgatttattaaatcaaaaatttttagttagggttgactgcaaatcagccaaagacattttaccgagagatctctggtatcagagcctgatggggaagtaggaatactgtccgtaaggacatatgttaacaaattttatggatctgacgtcttgtatagtacatgtaatattttactttgatttgtacagtaagtgtttgaacagtacttcctggaagtacaacagtctaatattttagttgaatggtactgtagcagtaagacccgtgttggataaagggcggtaaggctaaggtgtactgtttaaccaaaatatcaagacataatacactggcggctataggattgccattcaaactatttttcaaaaaaaaaaagagtttttcttaaaaataattcagatccagaaaaaat

SEQ ID NO: 14181 - DNA, 1197 bp, Glycine max
  Gm_smallRNAprecursor_7014
aattgttttgtgcatttccaaatttcaatctgatttattaaatcaaaaatttttagttagggttgactgcaaatcagccaaagacattttaccgagagatctctggtatcagagcctgatggggaagtaggaatactgtccgtaaggacatatgttaacaaattttatggatctgacgtcttgtatagtacatgtaatattttactttgatttgtacagtaagtgtttgaacagtacttcctggaagtacaacagtctaatattttagttgaatggtactgtagcagtaagacccgtgttggataaagggcggtaaggctaaggtgtactgtttaaccaaaatatcaagacataatacactggcggctataggattgccattcaaactatttttcaaaaaaaaaaagagtttttcttaaaaataattcagatccagaaaaaattttgttacatatttacttacggagatatttctatggaaccaaatgaaggcaaagatattagagaatattataatcatgtgtagactattacgatctttttcccgtatctcttttcgctcaaactcctcctcatcatcttcttcaagaaactccaatttattaaatgatcaagataaccagacccaagaggtcgccccaaaacacaatctcttcgatgaggaagtccgattcgaagatatcaatcaaaacatggatgactggaacattccagaaatccctcaggatcaactatacgttcctgaaacaataaaggataaacacaactttgattacataatcaaaacagtagaaaacaatattcctctaggacaagatataggggaagaatttcatttactttcaaaaaattcaatttatgaacatagccgtaagtataaatatctacacatcggttgtgtacaagtagtcatcaagcccttaattgatatgggcatagatgcggcagttttaatgtgtctaagagacattaggcataatcaatttgaagactccctaattggaacagtcgaaaccagcctaggacaaggtccaatatattttaactgatatccaaacaaaacagtgagtctgatggacagaaacattcttgactctctgttcttaaacatccactttcatggccttgacatgaaagacggatcaatcccagcagccttaatttataggatccagtacaaggtcatgaatacttgtg

SEQ ID NO: 14182 - DNA, 1157 bp, Glycine max
  Gm_smallRNAprecursor_7015
gacatatgttaacaaattttatggatctgacgtcttgtatagtacatgtaatattttactttgatttgtacagtaagtgtttgaacagtacttcctggaagtacaacagtctaatattttagttgaatggtactgtagcagtaagacccgtgttggataaagggcggtaaggctaaggtgtactgtttaaccaaaatatcaagacataatacactggcggctataggattgccattcaaactatttttcaaaaaaaaaaagagtttttcttaaaaataattcagatccagaaaaaattttgttacatatttacttacggagatatttctatggaaccaaatgaaggcaaagatattagagaatattataatcatgtgtagactattacgatctttttcccgtatctcttttcgctcaaactcctcctcatcatcttcttcaagaaactccaatttattaaatgatcaagataaccagacccaagaggtcgccccaaaacacaatctcttcgatgaggaagtccgattcgaagatatcaatcaaaacatggatgactggaacattccagaaatccctcaggatcaactatacgttcctgaaacaataaaggataaacacaactttgattacataatcaaaacagtagaaaacaatattcctctaggacaagatataggggaagaatttcatttactttcaaaaaattcaatttatgaacatagccgtaagtataaatatctacacatcggttgtgtacaagtagtcatcaagcccttaattgatatgggcatagatgcggcagttttaatgtgtctaagagacattaggcataatcaatttgaagactccctaattggaacagtcgaaaccagcctaggacaaggtccaatatattttaactgatatccaaacaaaacagtgagtctgatggacagaaacattcttgactctctgttcttaaacatccactttcatggccttgacatgaaagacggatcaatcccagcagccttaatttataggatccagtacaaggtcatgaatacttgtgcatctagagtcctattaaaacctcaaaaaggagaaacaaccttgtttatcactgatatgacaaaggctaacgtttctctcccgagaaaaataaaatgggatgaggt

SEQ ID NO: 14183 - DNA, 1033 bp, Glycine max
  Gm_smallRNAprecursor_7016
gctaaggtgtactgtttaaccaaaatatcaagacataatacactggcggctataggattgccattcaaactatttttcaaaaaaaaaaagagtttttcttaaaaataattcagatccagaaaaaattttgttacatatttacttacggagatatttctatggaaccaaatgaaggcaaagatattagagaatattataatcatgtgtagactattacgatctttttcccgtatctcttttcgctcaaactcctcctcatcatcttcttcaagaaactccaatttattaaatgatcaagataaccagacccaagaggtcgccccaaaacacaatctcttcgatgaggaagtccgattcgaagatatcaatcaaaacatggatgactggaacattccagaaatccctcaggatcaactatacgttcctgaaacaataaaggataaacacaactttgattacataatcaaaacagtagaaaacaatattcctctaggacaagatataggggaagaatttcatttactttcaaaaaattcaatttatgaacatagccgtaagtataaatatctacacatcggttgtgtacaagtagtcatcaagcccttaattgatatgggcatagatgcggcagttttaatgtgtctaagagacattaggcataatcaatttgaagactccctaattggaacagtcgaaaccagcctaggacaaggtccaatatattttaactgatatccaaacaaaacagtgagtctgatggacagaaacattcttgactctctgttcttaaacatccactttcatggccttgacatgaaagacggatcaatcccagcagccttaatttataggatccagtacaaggtcatgaatacttgtgcatctagagtcctattaaaacctcaaaaaggagaaacaaccttgtttatcactgatatgacaaaggctaacgtttctctcccgagaaaaataaaatgggatgaggtaactcttcccgaaagatgggttatggataaggcaacaccgtctattc

SEQ ID NO: 14184 - DNA, 1126 bp, Glycine max
  Gm_smallRNAprecursor_7017
aagattaacacaaactttcttctggtaaaaaaccttaagaatgaggtaatcttaggaacgcccttcattagagctctgtttcccattcaaatatctaatgaaggaataaccacaaattacttaggaagaaaaattacatttaatttttctactaaaccaatctccagaaatataaatcttatagaaaataagattaatcaaattaacttcttaaaagaagaagtatcttttaataatattcagatacaactgggaaaaccccaggtaaaagaaaaaattcaatctttattaaatcatattgaatcgaccgtctgttctgaactgccacatgcattttgggatagaaagaaacatattgttgatctcccttatgagaaagactttagggaaaaacaaattcccaccaaagccagaccaatccaaatgaatgaagaacttcttcaatattgtcaaaaagaaatcaaggatttgcttgataaaggcctaatccggaaaagcaaaagcccatggtcttgtgcggctttctatgtcaacaaacaatctgagattgagcatggaacaccccgcttagccataaattacaaaccactaaatcaagcattacaatggattagatatcctattccaaacaaaaaagatttgcttaacagattaaattatgcaaagatattttcaaaatttgatatgaaatctggattttggcaaatccaaatccaacaatcagataggtacaaaacagcatttatggtacttttcgggcaatatgaatggaatgtgatgccattcgaactgaagaatgccccttcagaatttcaaaaaattatgaatgatatttttaacccctattcaaaatttgtcattgtctacatagatgatgttttaatcttttcccaaaacattgaccaacatttcaaacatctccaaaccttcatccatatcatcaaacaaaatggtttggcagtctccaaatcaaaaatcaatcttttccaaactcgaattcgattccttggccacaatatttatcaaggtacaatcattccaatcgaaaggtccatagaatttgctagcaaatttcccaaccaaatcttagacaaaacccagttacaaagatttctaggttgtctaa

SEQ ID NO: 14185 - DNA, 1057 bp, Glycine max
  Gm_smallRNAprecursor_7018
caaaaaacaaatttttcaatgttttacaaatggaaccagaatactgggacaagaatcctttcaaagcgaccgccaaagtattccccccaggattccattacaagccaatagccacaaacaaaacccgcaaattctacgaattcattctaatagatacgaactcagtatctattaaacacttcaaagaccccaaagatccaaatctaaatacccattccacaatccaaatcctaaaggttatgcagccacgacattatggctcaaacttaaaccaacccaaaaaaatttctgctccatttgaccccgcaggatataactattgggattacatcgacgcttggaccaacgtgttctggcatcaaaatagtaaattcaagcattcatggctaatttacttcaaaaataatactgtgtataattttccaaattggttcctccaatggtggaactacttcggaccaattccacaaatattctcagaagaagtccaacagggattccaacaattcaacaagctctataatagcaaggaatcacgtattccagcagatttaaagtacttttccagttttgccttgtcatggattttttcatggcaatacagatacggaaaaactgaaaacagcaagcaatatccaccgttacagagacacgcctttgtaaaatggtggtcacaattcgatacttcaaaggctgctccagatcaagtcaataactggttccagagcaatcctgagttcctcaaacctgctgatcaagagacatctttgttcctgaatcagaagtcgcaactagcagcattcttagcaagctcaaaatctaaagagagtcttgctcagaatttcaaagaagttctccaactacttcaacaggaagtggaagaagaaccttccaagaaggaagctgaatcatccgagactaatgatgaccaagaagacgatccattctaccagaatgaagatgactgttttggtatatcgttagacgacgattaattagttgtagtaatcatgaattattgtaactaatttgtcagtaatgtaatttgtaaaagttt

SEQ ID NO: 14186 - DNA, 1155 bp, Glycine max
  Gm_smallRNAprecursor_7019
accaattccacaaatattctcagaagaagtccaacagggattccaacaattcaacaagctctataatagcaaggaatcacgtattccagcagatttaaagtacttttccagttttgccttgtcatggattttttcatggcaatacagatacggaaaaactgaaaacagcaagcaatatccaccgttacagagacacgcctttgtaaaatggtggtcacaattcgatacttcaaaggctgctccagatcaagtcaataactggttccagagcaatcctgagttcctcaaacctgctgatcaagagacatctttgttcctgaatcagaagtcgcaactagcagcattcttagcaagctcaaaatctaaagagagtcttgctcagaatttcaaagaagttctccaactacttcaacaggaagtggaagaagaaccttccaagaaggaagctgaatcatccgagactaatgatgaccaagaagacgatccattctaccagaatgaagatgactgttttggtatatcgttagacgacgattaattagttgtagtaatcatgaattattgtaactaatttgtcagtaatgtaatttgtaaaagttttgtaacaattccggtaaacattaccgacactgtagaaacagtaaaaattgagtctatttaaaggagtcctcgttccctttgtgaggcaccctttcagataatctcataatcaggttttgagagagagaagctctgcctagggaaaatctctttgtaagcttttctttcggtttcaataaatttcaagttctatttttcatatctcccttctcccctcaccgatcttgtgcggctctgccgtcgctttggtttctttgttttcaaaaacctgggtttgtaagccgtttcggtgtgcccttgatatctgctttacaagtttatagtttcctttcatttatcatactgcattcttacttcctatccgtttgatcttattccgttgatctctggatatatatatatatatatattactagactattttattattgttagaaatatatattgtctaagattatatacagggcaaagtattaaaaagttttataaattattactattttataaattattataaaacagtaataatttataaatgaataaaattaattgaac

SEQ ID NO: 14187 - DNA, 1035 bp, Glycine max
  Gm_smallRNAprecursor_7020
ttattttgtaatttattgtattatattttattttacagtatcaatggcatcttcgtcgtcatgtccatcaaatattaaaattaagtctggcccgatcaatggtgacgtattatggatgcaagttaagcatgtttcagaacatgtttggaatggggaagaagaccggaaattacacatcagaggagttgtccctacgtattaaggggaagaagaaatcccagaggaaattattcatttccttcgacaatctggtttttactagattatgaagatgagatacttaaaaataaatgtctcattaattagtgctttgatagaaagatggaggccggaaacacatacgtttcacatgagatgcggagagtatattattactcttcaagatgtctctgtattgttaggtctacatgtggatggtttatcattaattggtccaacaaatcttaattgagctaatttatgtgaggaattgttgggagtcaaaccacaagaaggtaaaattaaaggtagtgtggttaaattaagttggttggctcaccattttgcacaaataaataaccatgatgacgaagaacaagtacgaaggtttacccgtgcatggatactaagattcattggaggtgtcttattcgttaacaaaagcagtaacaaagtttccctaaggtaccttcaatttttacgtgactttagagactgtaacacatatgcatgggacctgccgtacttgcttttttatacagagagatgtgcagtgccaccaattataaaactaaatcaatcggaatgagaacgatgtataactttagctccaaaaaggactccttccctagtagaaaataaaccactcgggcacaggttagtcatttttaaaagcgtttttcatttcaaaagaataaatggttttagggtatattaaattttaatctttgtacgtggctccgacgtgaaaatcaacatatcagcaatgatgatgtgagagtttttcgtcgcaagttagatattatgaaacgtcatgaggtaagaacatgatattgt

SEQ ID NO: 14188 - DNA, 1184 bp, Glycine max
  Gm_smallRNAprecursor_7021
attcatgatattcatcatatagaaacaaaaaaaaagtaggaaggaaaaaaattataaagtgatagttaagtacccttaagaaaataataacttgatatatatatatatagcctgatggggaagtaggaatactatccgtaaggacatatgttaacaaattttatggatctggaactaaagtcttgtatagtacacataatgttttactttgatttgtacaataagtgtttgaacagtacttcctggaagtacagcagtctaatattttagttgaatggtactgtagcagtaagacccgtgttggataaagggcggtaaggctaaggtgtactgtttaaccaaaatatcaagacataatacactggtggctataggattgccgttcaaactatttttcataaaaaaaaaagtttttcttaaaaataattcagatccagaaaaattttgtgacatatttacttacggagatatttctatggaaccaaatgaaggcaaagatattagagaatattataatcatgtctagactattacgatctcttttcgctcaaactcctcctcatcctcttcttcaagaaactccaatttattaaatgatcaagataaccagacccaagaggtcgccccaaaacacaatctcttcgatcaggaagttcgattcgaagatatcaatcaaaacatggatgactggaacattccagaaatccctcaggatcaactatacgttcctgaaacaataaagaacaaacacaactttgattacataatcaaaacagtagaaaacaatattcctctaggacaagatataggggaagaatttcatttactttcaaaaaattcaatttatgaacatagtcgtaagtataaatatctacacatcggttgtgtacaagtagccatcaagcccttaattgatatgggcatagatgcagcagttttaatgtgtctaagagacatttggcataatcaatttgaagactccctaattggaacagtcaaaaccagcctaggacaaggtctgatatattttaactgttatccaaacaaaacagtgagtctgatggacagaaacattcttgactctctgttcttaaacatccactttcatggccttgacatgaaagaaggatcaatccgagcagccttaatctataggatccagtacaaggtcatgaatacttgtg

SEQ ID NO: 14189 - DNA, 1150 bp, Glycine max
  Gm_smallRNAprecursor_7022
acccttgcctcaaaacagatttttgcaagatggcaagcaattttaagtgtctttgattttaatatagaatatatcaagggctcttccaactctctacctgactacctcacccgtgaatttttacagaaaattcccgatgcctcctaaggtgtctagttcctccggcagaggaggaagatccagtacaaaaggtaaagaagttttactggctctaccagagccaataaccaaaaaggcaactacaacatcttctgggtcacctacccagactgggtcatcaacccagaaaggaaaacttgaaggttcattaacccagacaactaccgtcaaatctgagtcatcaactcaggaatccccaaaaccaacaacaaccaaacagactgtggctgactatgcctggtcaatacaaactctcttggccttagaagatataggcctcaccaaaataccaaaattagccaaaaagacctgggcagaaatggcctcagaatcagacgatgattctgaaacagatctgcaaaaacaaatccaaaaagccaaacagaccaaaactgtctgtaaccaaaaaccaagccaatcgttgactcaacaagaatcaacaccacaacccggtaacagttacatttcaaaaaacaaatttttcaatgttttacaaatggaaccagaatactgggacaagaatcctttcaaagcaaccgccaaagtattccccccgggattccattacaggccaatagccacaaacaaaacccgcaaattctacgaattcattctaatagatacaaactcagtatctattaaacacttcaaagaccccaaagatccaaatctaaatacccattccacaatccaaatcttgaaggttatgcagccacgacattatggctcaaacttaaaccaacccaaaaaattttctgcaccatttgaccctgcaggatataattattgggattacattgacgcctggaccaatgtgttctggcatcaaaatagtaaattcaagcattcatggctgatttacttcaaaaataatactgcgtataattttccaaattggttcctccaatggtggaactacttcggaccaattccacaaatatttccagaagaagtccaacagggattccaacaattcaacaagctctataat

SEQ ID NO: 14190 - DNA, 1148 bp, Glycine max
  Gm_smallRNAprecursor_7023
cccttgcctcaaaacagatttttgcaagatggcaagcaattttaagtgtctttgattttaatatagaatatatcaagggctcttccaactctctacctgactacctcacccgtgaatttttacagaaaattcccgatgcctcctaaggtgtctagttcctccggcagaggaggaagatccagtacaaaaggtaaagaagttttactggctctaccagagccaataaccaaaaaggcaactacaacatcttctgggtcacctacccagactgggtcatcaacccagaaaggaaaacttgaaggttcattaacccagacaactaccgtcaaatctgagtcatcaactcaggaatccccaaaaccaacaacaaccaaacagactgtggctgactatgcctggtcaatacaaactctcttggccttagaagatataggcctcaccaaaataccaaaattagccaaaaagacctgggcagaaatggcctcagaatcagacgatgattctgaaacagatctgcaaaaacaaatccaaaaagccaaacagaccaaaactgtctgtaaccaaaaaccaagccaatcgttgactcaacaagaatcaacaccacaacccggtaacagttacatttcaaaaaacaaatttttcaatgttttacaaatggaaccagaatactgggacaagaatcctttcaaagcaaccgccaaagtattccccccgggattccattacaggccaatagccacaaacaaaacccgcaaattctacgaattcattctaatagatacaaactcagtatctattaaacacttcaaagaccccaaagatccaaatctaaatacccattccacaatccaaatcttgaaggttatgcagccacgacattatggctcaaacttaaaccaacccaaaaaattttctgcaccatttgaccctgcaggatataattattgggattacattgacgcctggaccaatgtgttctggcatcaaaatagtaaattcaagcattcatggctgatttacttcaaaaataatactgcgtataattttccaaattggttcctccaatggtggaactacttcggaccaattccacaaatatttccagaagaagtccaacagggattccaacaattcaacaagctctataa

SEQ ID NO: 14191 - DNA, 1149 bp, Glycine max
  Gm_smallRNAprecursor_7024
cccttgcctcaaaacagatttttgcaagatggcaagcaattttaagtgtctttgattttaatatagaatatatcaagggctcttccaactctctacctgactacctcacccgtgaatttttacagaaaattcccgatgcctcctaaggtgtctagttcctccggcagaggaggaagatccagtacaaaaggtaaagaagttttactggctctaccagagccaataaccaaaaaggcaactacaacatcttctgggtcacctacccagactgggtcatcaacccagaaaggaaaacttgaaggttcattaacccagacaactaccgtcaaatctgagtcatcaactcaggaatccccaaaaccaacaacaaccaaacagactgtggctgactatgcctggtcaatacaaactctcttggccttagaagatataggcctcaccaaaataccaaaattagccaaaaagacctgggcagaaatggcctcagaatcagacgatgattctgaaacagatctgcaaaaacaaatccaaaaagccaaacagaccaaaactgtctgtaaccaaaaaccaagccaatcgttgactcaacaagaatcaacaccacaacccggtaacagttacatttcaaaaaacaaatttttcaatgttttacaaatggaaccagaatactgggacaagaatcctttcaaagcaaccgccaaagtattccccccgggattccattacaggccaatagccacaaacaaaacccgcaaattctacgaattcattctaatagatacaaactcagtatctattaaacacttcaaagaccccaaagatccaaatctaaatacccattccacaatccaaatcttgaaggttatgcagccacgacattatggctcaaacttaaaccaacccaaaaaattttctgcaccatttgaccctgcaggatataattattgggattacattgacgcctggaccaatgtgttctggcatcaaaatagtaaattcaagcattcatggctgatttacttcaaaaataatactgcgtataattttccaaattggttcctccaatggtggaactacttcggaccaattccacaaatatttccagaagaagtccaacagggattccaacaattcaacaagctctataat

SEQ ID NO: 14192 - DNA, 1058 bp, Glycine max
  Gm_smallRNAprecursor_7025
acaacaaccaaacagactgtggctgactatgcctggtcaatacaaactctcttggccttagaagatataggcctcaccaaaataccaaaattagccaaaaagacctgggcagaaatggcctcagaatcagacgatgattctgaaacagatctgcaaaaacaaatccaaaaagccaaacagaccaaaactgtctgtaaccaaaaaccaagccaatcgttgactcaacaagaatcaacaccacaacccggtaacagttacatttcaaaaaacaaatttttcaatgttttacaaatggaaccagaatactgggacaagaatcctttcaaagcaaccgccaaagtattccccccgggattccattacaggccaatagccacaaacaaaacccgcaaattctacgaattcattctaatagatacaaactcagtatctattaaacacttcaaagaccccaaagatccaaatctaaatacccattccacaatccaaatcttgaaggttatgcagccacgacattatggctcaaacttaaaccaacccaaaaaattttctgcaccatttgaccctgcaggatataattattgggattacattgacgcctggaccaatgtgttctggcatcaaaatagtaaattcaagcattcatggctgatttacttcaaaaataatactgcgtataattttccaaattggttcctccaatggtggaactacttcggaccaattccacaaatatttccagaagaagtccaacagggattccaacaattcaacaagctctataatagcaagtaatcacgtattctggcagatttaaagtacttttccagttttgccttgtcatggatcttttcatggcaatacagatacggaaaaactaaaaacagcaagcaatatccaccgttacagagacacgcctttgtaaaatggtggtcacaattcgatacttcaaaggctgctccagatcaagtcaagaactggttccagagcaatcctgagttccttaaacctgctgatccggagacatctttgtttctaaatcagaagtcgcaactggc

SEQ ID NO: 14193 - DNA, 1182 bp, Glycine max
  Gm_smallRNAprecursor_7026
aagatataggcctcaccaaaataccaaaattagccaaaaagacctgggcagaaatggcctcagaatcagacgatgattctgaaacagatctgcaaaaacaaatccaaaaagccaaacagaccaaaactgtctgtaaccaaaaaccaagccaatcgttgactcaacaagaatcaacaccacaacccggtaacagttacatttcaaaaaacaaatttttcaatgttttacaaatggaaccagaatactgggacaagaatcctttcaaagcaaccgccaaagtattccccccgggattccattacaggccaatagccacaaacaaaacccgcaaattctacgaattcattctaatagatacaaactcagtatctattaaacacttcaaagaccccaaagatccaaatctaaatacccattccacaatccaaatcttgaaggttatgcagccacgacattatggctcaaacttaaaccaacccaaaaaattttctgcaccatttgaccctgcaggatataattattgggattacattgacgcctggaccaatgtgttctggcatcaaaatagtaaattcaagcattcatggctgatttacttcaaaaataatactgcgtataattttccaaattggttcctccaatggtggaactacttcggaccaattccacaaatatttccagaagaagtccaacagggattccaacaattcaacaagctctataatagcaagtaatcacgtattctggcagatttaaagtacttttccagttttgccttgtcatggatcttttcatggcaatacagatacggaaaaactaaaaacagcaagcaatatccaccgttacagagacacgcctttgtaaaatggtggtcacaattcgatacttcaaaggctgctccagatcaagtcaagaactggttccagagcaatcctgagttccttaaacctgctgatccggagacatctttgtttctaaatcagaagtcgcaactggcagcattcttagcaagctcaaaatctaaagagagtcttgctcagaatctcaaagaagttctccaactacttcaacaggaagtggaagaagaaccttccaagaaggaagctgaatcatccgagactaatgatgaccaagaagatgatccattctaccagaatgaagatgactgttttggtatatcat

SEQ ID NO: 14194 - DNA, 1057 bp, Glycine max
  Gm_smallRNAprecursor_7027
caaaaaacaaatttttcaatgttttacaaatggaaccagaatactgggacaagaatcctttcaaagcaaccgccaaagtattccccccgggattccattacaggccaatagccacaaacaaaacccgcaaattctacgaattcattctaatagatacaaactcagtatctattaaacacttcaaagaccccaaagatccaaatctaaatacccattccacaatccaaatcttgaaggttatgcagccacgacattatggctcaaacttaaaccaacccaaaaaattttctgcaccatttgaccctgcaggatataattattgggattacattgacgcctggaccaatgtgttctggcatcaaaatagtaaattcaagcattcatggctgatttacttcaaaaataatactgcgtataattttccaaattggttcctccaatggtggaactacttcggaccaattccacaaatatttccagaagaagtccaacagggattccaacaattcaacaagctctataatagcaagtaatcacgtattctggcagatttaaagtacttttccagttttgccttgtcatggatcttttcatggcaatacagatacggaaaaactaaaaacagcaagcaatatccaccgttacagagacacgcctttgtaaaatggtggtcacaattcgatacttcaaaggctgctccagatcaagtcaagaactggttccagagcaatcctgagttccttaaacctgctgatccggagacatctttgtttctaaatcagaagtcgcaactggcagcattcttagcaagctcaaaatctaaagagagtcttgctcagaatctcaaagaagttctccaactacttcaacaggaagtggaagaagaaccttccaagaaggaagctgaatcatccgagactaatgatgaccaagaagatgatccattctaccagaatgaagatgactgttttggtatatcattagacgacgattaattagttgtagtaatcatgaattattgtaactaatttgtcagtttcttttaaataatgtaatt

SEQ ID NO: 14195 - DNA, 1231 bp, Glycine max
  Gm_smallRNAprecursor_7028
taaatacccattccacaatccaaatcttgaaggttatgcagccacgacattatggctcaaacttaaaccaacccaaaaaattttctgcaccatttgaccctgcaggatataattattgggattacattgacgcctggaccaatgtgttctggcatcaaaatagtaaattcaagcattcatggctgatttacttcaaaaataatactgcgtataattttccaaattggttcctccaatggtggaactacttcggaccaattccacaaatatttccagaagaagtccaacagggattccaacaattcaacaagctctataatagcaagtaatcacgtattctggcagatttaaagtacttttccagttttgccttgtcatggatcttttcatggcaatacagatacggaaaaactaaaaacagcaagcaatatccaccgttacagagacacgcctttgtaaaatggtggtcacaattcgatacttcaaaggctgctccagatcaagtcaagaactggttccagagcaatcctgagttccttaaacctgctgatccggagacatctttgtttctaaatcagaagtcgcaactggcagcattcttagcaagctcaaaatctaaagagagtcttgctcagaatctcaaagaagttctccaactacttcaacaggaagtggaagaagaaccttccaagaaggaagctgaatcatccgagactaatgatgaccaagaagatgatccattctaccagaatgaagatgactgttttggtatatcattagacgacgattaattagttgtagtaatcatgaattattgtaactaatttgtcagtttcttttaaataatgtaatttgtaaaagttttgtaacagttccggtaaacattaccgatactgtagaaatagtaaaaattgggtctatttaaaggagtcctcgtcccctttgtgaggcaccctttcagatagtctcagaatcaggtttttagagagagaagctctgcctagggaaaaaactttgtaagcttttctttcggtttcaataaatttcaagttctgttttccatatctcccttctcccctcaccgatcctgtgcggctctgccgccgcttcggtttctttcttttcaaaaacctgggtttgtaagccgttacggtgtgcccttgatatctgctttacagtttatatttagctttcatttatcatactgcattcttacttcctatctgtccgt

SEQ ID NO: 14196 - DNA, 1124 bp, Glycine max
  Gm_smallRNAprecursor_7029
attccacaatccaaatcttgaaggttatgcagccacgacattatggctcaaacttaaaccaacccaaaaaattttctgcaccatttgaccctgcaggatataattattgggattacattgacgcctggaccaatgtgttctggcatcaaaatagtaaattcaagcattcatggctgatttacttcaaaaataatactgcgtataattttccaaattggttcctccaatggtggaactacttcggaccaattccacaaatatttccagaagaagtccaacagggattccaacaattcaacaagctctataatagcaagtaatcacgtattctggcagatttaaagtacttttccagttttgccttgtcatggatcttttcatggcaatacagatacggaaaaactaaaaacagcaagcaatatccaccgttacagagacacgcctttgtaaaatggtggtcacaattcgatacttcaaaggctgctccagatcaagtcaagaactggttccagagcaatcctgagttccttaaacctgctgatccggagacatctttgtttctaaatcagaagtcgcaactggcagcattcttagcaagctcaaaatctaaagagagtcttgctcagaatctcaaagaagttctccaactacttcaacaggaagtggaagaagaaccttccaagaaggaagctgaatcatccgagactaatgatgaccaagaagatgatccattctaccagaatgaagatgactgttttggtatatcattagacgacgattaattagttgtagtaatcatgaattattgtaactaatttgtcagtttcttttaaataatgtaatttgtaaaagttttgtaacagttccggtaaacattaccgatactgtagaaatagtaaaaattgggtctatttaaaggagtcctcgtcccctttgtgaggcaccctttcagatagtctcagaatcaggtttttagagagagaagctctgcctagggaaaaaactttgtaagcttttctttcggtttcaataaatttcaagttctgttttccatatctcccttctcccctcaccgatcctgtgcggctctgccgccgcttcggtttctttcttttcaaaaacct

SEQ ID NO: 14197 - DNA, 1123 bp, Glycine max
  Gm_smallRNAprecursor_7030
ttccacaatccaaatcttgaaggttatgcagccacgacattatggctcaaacttaaaccaacccaaaaaattttctgcaccatttgaccctgcaggatataattattgggattacattgacgcctggaccaatgtgttctggcatcaaaatagtaaattcaagcattcatggctgatttacttcaaaaataatactgcgtataattttccaaattggttcctccaatggtggaactacttcggaccaattccacaaatatttccagaagaagtccaacagggattccaacaattcaacaagctctataatagcaagtaatcacgtattctggcagatttaaagtacttttccagttttgccttgtcatggatcttttcatggcaatacagatacggaaaaactaaaaacagcaagcaatatccaccgttacagagacacgcctttgtaaaatggtggtcacaattcgatacttcaaaggctgctccagatcaagtcaagaactggttccagagcaatcctgagttccttaaacctgctgatccggagacatctttgtttctaaatcagaagtcgcaactggcagcattcttagcaagctcaaaatctaaagagagtcttgctcagaatctcaaagaagttctccaactacttcaacaggaagtggaagaagaaccttccaagaaggaagctgaatcatccgagactaatgatgaccaagaagatgatccattctaccagaatgaagatgactgttttggtatatcattagacgacgattaattagttgtagtaatcatgaattattgtaactaatttgtcagtttcttttaaataatgtaatttgtaaaagttttgtaacagttccggtaaacattaccgatactgtagaaatagtaaaaattgggtctatttaaaggagtcctcgtcccctttgtgaggcaccctttcagatagtctcagaatcaggtttttagagagagaagctctgcctagggaaaaaactttgtaagcttttctttcggtttcaataaatttcaagttctgttttccatatctcccttctcccctcaccgatcctgtgcggctctgccgccgcttcggtttctttcttttcaaaaacct

SEQ ID NO: 14198 - DNA, 1040 bp, Glycine max
  Gm_smallRNAprecursor_7031
gttgagaatgttggaatcaacaaagtgctcattgatggaggagcggctgtcaacttaatgcctcgatctatgctctacaagatcgggaaacatgacactgatctatctgcccacaacattgtgctttcgaattatgagggtaaaactggctattctttgggagccattcaagtagatgttgctgtaggcagtatagttcgaccaactcttttcctggtgatacagtctaaggctaattttaacttgctattaggaagggagtggattcatggagttggggctgtgccatctacccttcaccagaagctcattatctggagggaggatgggattgttgaaaatatagaggcggatcaaagcttctataactcagaggtcggtaatgttactgcacagacctttgacaaaaagttggctaacatagcaccttgtggtgacaaggaggcgtgttgtcgaatcgagtgacaatgttgtccactctgtcaaactccatcctacttatgggtttatatgggagagggaggaaattaatgatgttccctctgaagatggagtcattccaccaactgggtggaatatttatgaagattaatatgactgaggccgctgcatgggccagaattacggcttatatggccgaaaatagactaaatacggccttcgaggctgagtctcaacaaaatatggcagttgaagccaagatcgaagatcatgagaataaagaaacaaaggatcgaagactggattgcatatatgacgatgagccgctgggtttcgagaaaaatcccgtaagtgaggtgccaaagatgcaggctcaagatcctttggaagaagtcgatatgggagatggctcgattaaaaggccaacttatatcagtgccaatatcacctcaagtttaaaagaaaagctggtgcctcttcttagagagtttaaagactgttttgcttgggattaccacgaaatgcctgggttaagcagagaattggtcgaaatgaagttacctatcaaggagggaaaaagaccagtaaaacaactacca

SEQ ID NO: 14199 - DNA, 1039 bp, Glycine max
  Gm_smallRNAprecursor_7032
cagcccatttttaacaaggtgagcaatttcttcaaaccttcttctttgagctcttttgaaaaggaaattgaatcaaggatggaacaaatccttgatgacctggatgatcttgaaagccaaagtggctatctaggtttgacaaggactagtggtgttggggttggatcaggatcgggtagtaaagtgttagagaaattgccatcagcatcttcggtggtagaaagtgatatttatggcagagatgatgacaaaaaattgatcttcgactggatcagttctgacactgatgaaaagctatcaatactttctatcgtgggcatgggcgggttgggtaagaccacgcttgcccaacttgtatacaatgacccaagaatagtgagtaagtttgatgtcaaagcttggatctgtgtttcagaagaatttgatgttttcaacgtatcaagagcaattcttgacacgattactgattcgactgatcatagtagagagctagaaatagttcagagaagactaaaagaaaaattggcagataaaaaatttctcctcgttttggatgacgtttggaacgaaagcaggcctaaatgggaagctgtgcagaatgctcttgtttgtggagctcagggaagtaagatccttgtcacaacacgcagtgaggaagttgcttctaccatgcggtcaaaagaacacaggctggggcaattacaagaagattattgctggcaattgtttgcaaaacatgcattcagagatgataatcttccacgagatccaggatgcccagagattggtatgaagattgttaaaaaatgtaaaggacttcctctggccttgaagtcaatgggaagtctattacacaacaaaccattttccggggaatgggaaagcttgttgcaaagcgaaatatgggaattaaaggacagtgatattgttcctgctttagcattgagctatcaccaccttcctccccatctcaagacatgctttgcttactgtgctttattccccaaggattatgtgtttgacaaggagtgtttaattc

SEQ ID NO: 14200 - DNA, 1039 bp, Glycine max
  Gm_smallRNAprecursor_7033
ggaatgggaaagcgtgttgcaaagcgaaatatgggaattaaaggacagtgatattgttcctgctttagcattgagctatcaccaccttcctccccatctcaagacatgctttgcttactgtgctttattccccaaggattatgtgtttgacagggagtgtttaattcagttgtggatggctgaaaatttcctaaactgccatcaaggcagtaagagtccagaagaagttggccaacagtacttcaatgatctactatccaggtccttctttcaacaatcaagcgaatatgaatatgaagaagtatttgtcatgcatgaccttctaaatgatttggcaaaatatgtttgtggagacatctattttaggttgggagttgatgaagaaggaaaaagtacacagaaaacaacccgctatttttcagtttcaatcattaccaaaaaaagttttgatgggtttgcaacttcatgtgatgataaaaggttacgtacatttatgccaacaagtaggaacatgaatggagattgccctggttggcagtgcaagatgtcgatacatgaattgttctccaagtttaagttcttacgtgtcttatctctgtctcattgtctagacattaaagagctgcctgactctgtttgcaattttaaacatcttcgttcattagacctttcccatactgacattgaaaaactaactgaatccacatgttcactctacaacttgcaaacactgaagctgaatcattgtagatctttgaaggagctgcctgactctgtttgcaatttaaaacatcttcgttcattagacctttcccatactgacattgaaaaactacctgaatccacatgttcactctacaacttgcaaatactgaagctgaatgattgtatatatttgatggagctgccctcgaatttgcatgaactcatcaatttgcgtcgccttgaatttgtagatactgaaattataaaggtgccaccgcatctgggaaagctgaagaatcttcaagtattgatgagagggtttattgttggtaaa

SEQ ID NO: 14201 - DNA, 1131 bp, Glycine max
  Gm_smallRNAprecursor_7034
ggcagatggcgtaacggaaaatagcggacaaaaaaaaacataaatataaattcattgaaattgaaaaaaacaaaggattgcattcaaataaactaaaaaagtttcatgagttcatacaataatcaagtaccaacaccaaataaactcattaaagagttcaaaataagaaaatgataaaaacataatgcaaagtgcaaagtgaaggttgaggctctaatcatcttctccaatcccaacataatcatcttcgttgttatcatatggtaatggagcatctccctctccctcttccccattagacgcctcaaaattgaccatgatttcttcttcttcagattcaacattaatattctcctcaacatctagatcctcatcattttcttggactgcattttgcttccttgatgaaaatccaacaaccattgcctgtttttttagaagtttgggcagcagcaacacttgttttttgctttttccccctagtatacatcctacactctccaacccccgaagcctgatacacagttgcccaatttagagcatcatcatcttcaaatatcaaatcatttccagcatcattatcatcatcttgatccatctctcccacgagccattcattgcatacatcaatatcattaagagaaattggatcaatttcatctcttgcattatatctttgcttcaattgttggttgtatttgacaaacaccaaatcatgcaacctcttgtgctgaagcctatttctttttttggaatgaatctacaacataacaaataaatgttgatttcaatctcaaatatactccaaataaaacttgatcatctaaattaaataaaattaaaaagtatagttcgagttttgtcacaattacttgctcaaacacactccaatttctttcacatcccgaagcactgcaagtcactcaaaattttaatagctagcttctgcaaatttggagtttgtgacccaaacattcaccaccaatatgctgcaataccaattaccaaccaagagcataacttagaattctgaattataacactaatacataaaaaaatagtatgataaaagtttcttactaggagaatgggttttcctttgagccattgcaaagtcgaaaccaaagtggt

SEQ ID NO: 14202 - DNA, 1166 bp, Glycine max
  Gm_smallRNAprecursor_7035
tttactattttttttcttatatgtaaatataaataatataaggttatgccatagggacatggtcatttttacccctaacaatcttagaagtaaatatagaccatgtttttacgccatacccttataccatttatatttacatattagcaaaaaaaaaaacagtaaaatcttaaggacaaatagttaagaaacttgttcattagctgcaaatatccttccctcctcaagtgcaaacttcttgcgtagccgctcttggtgctcagaaaatcccaaaaacaaatccctcttattactagctattttgaattctttagttcctgaatgtacaaccttcaaattgttgctcgttcccctctttgagaatgaggaggatcttcataggacttcatccagctgatgtttgtcggcagtttcatcatccaccacccttttcttctgtgccttctcacgttcattgttgttaaacccatatttatgccttcttcccttcatgtcttgtttgatcacaactttagctgaatctcccatcttcagcatagttgaatctcctgtcttattgtccaatgccaaattttgatggcttgtatctcttttgttcgtatgttctactgcttcagcttcacaatgcatagagcaatcagaattttcgagtcatcaccaaaggcttctgcatcagcgttgacactctccaccctctttggtttatgcttctgtgttttcttccatgcttcctccttataattctcagatttattggaggtcccactagcaggatcagcaccaatccgtgcctgttcctcctctaccagctcaatatctttcctttcacctttgcttttgaaaactacactgtaatttacaaaacaaaagttgaaaggaaagatattgacctgatagacgaggaagaagcacatattggtggtgatcgtgctagtgcaaccttgaataaagctgagatttataacgaggaggcacagaagaaaacacagaagcataaaccaaagagggtgaagagtgtcaatgctgatgcagaagcctttggtgatcactcggaaattctgattgctttatgcattctgaagctgaagcactagaacatacgaagaaaagagatacatgccatctaagtgtggcattggacaatgagacaggagtttcaactatgc

SEQ ID NO: 14203 - DNA, 1177 bp, Glycine max
  Gm_smallRNAprecursor_7036
ggaaggttgtagattctcaattacatccctttctttggcagaatcatcagggttccggtgcgaattccattcaaactctagttccacaatgcgtgttttatttttcaaatctgcagctaatgcatctgagggattctcaatattctgcagctccctaaatgataatctttcatgaacaagattgagctctcctaattgctgaatagtgaactcgctacttttaccaacgtcaaacgaactcatggatacttgaagattcttcaactttcctagatgcggtggcacctttataatgttagtatttacaaattcaaggcgatgcaaattggtgagttcatgcaaatttgagggcagctccttcaaagatctacaatgattcagcttcagtatttgcaacttgtagagtgaacatgtggattcaggtagttttttaatgcgagtatgggaaaggtctaacgaacgaagatgtttaaaattgcaaacagagtcaggcagctcttcaatgtttgaacagtgagacagagataagacgcgtaagaacttaaacttggagaacaattcatgtatcgacatcttgcaattccaactacggtcataatattcattcattccccaccatgttggcataaatgtacgcaattttttagtatcacatgaagttccaaactcatcaaaatatcgttcggtaatcattgaaactgaaaaatgacgggttgttttctgtgtacattttgcttgatcaactctcaacctgaaatagatgtccccacaaacatattttgccaaatcatttagaaggtcatgcatgacaaatccttctctttttttttgctcagcaaagacaaatccttctttatatatgcttgattgttgaaagaaggaccttgatagtagatcattgaagtactgttggccaacttcctctggactcgtactgcattgatggcagtttaggaaattttcagccatccacaactgaattaaacactccttgtcaaactcataatccttggggaataaagcacagtaagcaaagcatgtcttgagatggggaggaaggtggtgatagctcaatgctaaagcaggaacaatactgtcctttaattcccatatttcactttggaatacgctttcccattcccaggcaaatggtttgttgtgtaatagacttcccatt

SEQ ID NO: 14204 - DNA, 1153 bp, Glycine max
  Gm_smallRNAprecursor_7037
taatgcatctgagggattctcaatattctgcagctccctaaatgataatctttcatgaacaagattgagctctcctaattgctgaatagtgaactcgctacttttaccaacgtcaaacgaactcatggatacttgaagattcttcaactttcctagatgcggtggcacctttataatgttagtatttacaaattcaaggcgatgcaaattggtgagttcatgcaaatttgagggcagctccttcaaagatctacaatgattcagcttcagtatttgcaacttgtagagtgaacatgtggattcaggtagttttttaatgcgagtatgggaaaggtctaacgaacgaagatgtttaaaattgcaaacagagtcaggcagctcttcaatgtttgaacagtgagacagagataagacgcgtaagaacttaaacttggagaacaattcatgtatcgacatcttgcaattccaactacggtcataatattcattcattccccaccatgttggcataaatgtacgcaattttttagtatcacatgaagttccaaactcatcaaaatatcgttcggtaatcattgaaactgaaaaatgacgggttgttttctgtgtacattttgcttgatcaactctcaacctgaaatagatgtccccacaaacatattttgccaaatcatttagaaggtcatgcatgacaaatccttctctttttttttgctcagcaaagacaaatccttctttatatatgcttgattgttgaaagaaggaccttgatagtagatcattgaagtactgttggccaacttcctctggactcgtactgcattgatggcagtttaggaaattttcagccatccacaactgaattaaacactccttgtcaaactcataatccttggggaataaagcacagtaagcaaagcatgtcttgagatggggaggaaggtggtgatagctcaatgctaaagcaggaacaatactgtcctttaattcccatatttcactttggaatacgctttcccattcccaggcaaatggtttgttgtgtaatagacttcccattgacttcaaggccagaggaagtcctttacattttttaacaatcttcttaccaatatctgtgcatactggatctcgtggaagattatcatctctg

SEQ ID NO: 14205 - DNA, 1153 bp, Glycine max
  Gm_smallRNAprecursor_7038
attgttttgtgaatttattgtattatattttattttgcagtatcaatggcatcttcatcgccatgtccatcacatatcaaaattaagtctagcccgatcgatggtgatgtattacggatgcaacctaagcatgattcagaacatgtttggaatggggaagaagatcggaaattacatatcagacgagttgtccccacgtatcaaggggaagaaattccagagcaaatttttcctttccttcgacaatctggtttttactggattatgaagatgggatacttaaaaataaatgcctcattaattagtgctttgatagaaagatggaggccggaaacacatacgtttcacatgagatgcagaaagtgtactattactcttcaagacgtctctatattgttaggtctacgtgtggatggtttaccattaatcggtccaacaaatcttaattgggctgatttatgtgaggaattattgggaatcagaccacaagaaggaggtgaaattaaaggtagtgtggttaaattaagttggttggctcaccattttgcacaaataaataaccacgacgacgaagaacaagtacgaaggtttgcccatgcatggatactaagattcattggaggtgtcttgttcgttgacaaataacaaagtttcgctaaggtaccttcaatttttatgtgactttggagactgtagcacatatgcatggggaccttccgtacttgcttttctatacagagagatgtgcagtaccaccgatcataaaactaaatcaatcggaggtatgtgcatcttactacaaatgtgggcatgggaacaatgtccaaccttggctccaaagaggactccttcccaagtagaaaataaatcactggggtacaggttagtcatttttaaaagcgtctttcatttcaaaagaataaatgattttagggtatattaaattttaatctttgtaggtggctgcgacgtggaaaccaacatattgacaatgatgatgtgagagttttttgttgcaagttggatattatgaaacgtcatgaggtaagaacatggtattgtatttgtaaaataaaaaatgatgtgttattttactaaaatgatgtcaactatgttgttatatgcagtttgtgtgggagccttacacaacaac

SEQ ID NO: 14206 - DNA, 1035 bp, Glycine max
  Gm_smallRNAprecursor_7039
tgttttgtgaatttattgtattatattttattttgcagtatcaatggcatcttcatcgccatgtccatcacatatcaaaattaagtctagcccgatcgatggtgatgtattacggatgcaacctaagcatgattcagaacatgtttggaatggggaagaagatcggaaattacatatcagacgagttgtccccacgtatcaaggggaagaaattccagagcaaatttttcctttccttcgacaatctggtttttactggattatgaagatgggatacttaaaaataaatgcctcattaattagtgctttgatagaaagatggaggccggaaacacatacgtttcacatgagatgcagaaagtgtactattactcttcaagacgtctctatattgttaggtctacgtgtggatggtttaccattaatcggtccaacaaatcttaattgggctgatttatgtgaggaattattgggaatcagaccacaagaaggaggtgaaattaaaggtagtgtggttaaattaagttggttggctcaccattttgcacaaataaataaccacgacgacgaagaacaagtacgaaggtttgcccatgcatggatactaagattcattggaggtgtcttgttcgttgacaaataacaaagtttcgctaaggtaccttcaatttttatgtgactttggagactgtagcacatatgcatggggaccttccgtacttgcttttctatacagagagatgtgcagtaccaccgatcataaaactaaatcaatcggaggtatgtgcatcttactacaaatgtgggcatgggaacaatgtccaaccttggctccaaagaggactccttcccaagtagaaaataaatcactggggtacaggttagtcatttttaaaagcgtctttcatttcaaaagaataaatgattttagggtatattaaattttaatctttgtaggtggctgcgacgtggaaaccaacatattgacaatgatgatgtgagagttttttgttgcaagttggatattatgaaacg

SEQ ID NO: 14207 - DNA, 1150 bp, Glycine max
  Gm_smallRNAprecursor_7040
tgttttgtgaatttattgtattatattttattttgcagtatcaatggcatcttcatcgccatgtccatcacatatcaaaattaagtctagcccgatcgatggtgatgtattacggatgcaacctaagcatgattcagaacatgtttggaatggggaagaagatcggaaattacatatcagacgagttgtccccacgtatcaaggggaagaaattccagagcaaatttttcctttccttcgacaatctggtttttactggattatgaagatgggatacttaaaaataaatgcctcattaattagtgctttgatagaaagatggaggccggaaacacatacgtttcacatgagatgcagaaagtgtactattactcttcaagacgtctctatattgttaggtctacgtgtggatggtttaccattaatcggtccaacaaatcttaattgggctgatttatgtgaggaattattgggaatcagaccacaagaaggaggtgaaattaaaggtagtgtggttaaattaagttggttggctcaccattttgcacaaataaataaccacgacgacgaagaacaagtacgaaggtttgcccatgcatggatactaagattcattggaggtgtcttgttcgttgacaaataacaaagtttcgctaaggtaccttcaatttttatgtgactttggagactgtagcacatatgcatggggaccttccgtacttgcttttctatacagagagatgtgcagtaccaccgatcataaaactaaatcaatcggaggtatgtgcatcttactacaaatgtgggcatgggaacaatgtccaaccttggctccaaagaggactccttcccaagtagaaaataaatcactggggtacaggttagtcatttttaaaagcgtctttcatttcaaaagaataaatgattttagggtatattaaattttaatctttgtaggtggctgcgacgtggaaaccaacatattgacaatgatgatgtgagagttttttgttgcaagttggatattatgaaacgtcatgaggtaagaacatggtattgtatttgtaaaataaaaaatgatgtgttattttactaaaatgatgtcaactatgttgttatatgcagtttgtgtgggagccttacacaacaa

SEQ ID NO: 14208 - DNA, 1055 bp, Glycine max
  Gm_smallRNAprecursor_7041
actagtaactgactatcaactactaactatatctctaactgggcccctacataaccctacaatttggtaaagccaatagctgaagcatttggaacagaagctacaagctgttggcaattgtaaataattagttctttaaacatcaaagttgctctggcaactgtatagaaagctgtcttaggcaagagaaaatacccttcacatgtttatattcccattcttcccatcatagaattccaaggaagcttatgaaaaagtagaagaacataaaacatggcaatcaatacccactgtctcagggagaacaagtcatacatcaggaagagagacatgaaccaaaactcatatttctaacaattttcttcatgtaactgttctagttgacttgctttatttgactgcacgattgaagcaactctcttactacatgtagtgaagacaaccttgatttcttgagtcttgtaattaacaggagttttcaaaacttcccatttgatggcattagagggtgactccgattgtggacaattgagtatatcttatcggagaaagagaagggaggagggtctgcatacaattaggcaatgattttaagttcttcaatatctgaatttgaagcaactcttgcctaggtgcccaagtcctccttgggaaaatgatacaaatttaggacagctccaaataaacaaactatcaaagagatgcaattatgatttatgagcatgctcctaccaaatcatttcaagatcaagattgtctttagtgtcactatactaggtcacattccaatcatccgccaacgatagacttaatcttggaggacagtcatacatcaatgagcatgacaaatgacaaaatccatacatacaaaggcctcaaaccttttagaaacttcatatctatctcaatggtagaaacataagcaagctgttagccttatgtaaggcatcaaaccttttagaaacatcatatctatcgtctagaaatgacaaattctgtccaaaaactcttgtgcttctttgacttccaacataaacaaaagtcccccaaacata

SEQ ID NO: 14209 - DNA, 1118 bp, Glycine max
  Gm_smallRNAprecursor_7042
gcaactgtatagaaagctgtcttaggcaagagaaaatacccttcacatgtttatattcccattcttcccatcatagaattccaaggaagcttatgaaaaagtagaagaacataaaacatggcaatcaatacccactgtctcagggagaacaagtcatacatcaggaagagagacatgaaccaaaactcatatttctaacaattttcttcatgtaactgttctagttgacttgctttatttgactgcacgattgaagcaactctcttactacatgtagtgaagacaaccttgatttcttgagtcttgtaattaacaggagttttcaaaacttcccatttgatggcattagagggtgactccgattgtggacaattgagtatatcttatcggagaaagagaagggaggagggtctgcatacaattaggcaatgattttaagttcttcaatatctgaatttgaagcaactcttgcctaggtgcccaagtcctccttgggaaaatgatacaaatttaggacagctccaaataaacaaactatcaaagagatgcaattatgatttatgagcatgctcctaccaaatcatttcaagatcaagattgtctttagtgtcactatactaggtcacattccaatcatccgccaacgatagacttaatcttggaggacagtcatacatcaatgagcatgacaaatgacaaaatccatacatacaaaggcctcaaaccttttagaaacttcatatctatctcaatggtagaaacataagcaagctgttagccttatgtaaggcatcaaaccttttagaaacatcatatctatcgtctagaaatgacaaattctgtccaaaaactcttgtgcttctttgacttccaacataaacaaaagtcccccaaacatattttgccaaatcattgagaaggtcatgcatgactaaacacatttgtctctgcttgattgtttaacaacatacccacataatatatcatctaaatactctcatgagggcattgtataaaattttcagccattcacaacaaaattaaaagctctcttacaaacatatgtaaatctcttgggaatatggcacaataagcaaagcatctcttgagatgagaag

SEQ ID NO: 14210 - DNA, 1107 bp, Glycine max
  Gm_smallRNAprecursor_7043
attcccattcttcccatcatagaattccaaggaagcttatgaaaaagtagaagaacataaaacatggcaatcaatacccactgtctcagggagaacaagtcatacatcaggaagagagacatgaaccaaaactcatatttctaacaattttcttcatgtaactgttctagttgacttgctttatttgactgcacgattgaagcaactctcttactacatgtagtgaagacaaccttgatttcttgagtcttgtaattaacaggagttttcaaaacttcccatttgatggcattagagggtgactccgattgtggacaattgagtatatcttatcggagaaagagaagggaggagggtctgcatacaattaggcaatgattttaagttcttcaatatctgaatttgaagcaactcttgcctaggtgcccaagtcctccttgggaaaatgatacaaatttaggacagctccaaataaacaaactatcaaagagatgcaattatgatttatgagcatgctcctaccaaatcatttcaagatcaagattgtctttagtgtcactatactaggtcacattccaatcatccgccaacgatagacttaatcttggaggacagtcatacatcaatgagcatgacaaatgacaaaatccatacatacaaaggcctcaaaccttttagaaacttcatatctatctcaatggtagaaacataagcaagctgttagccttatgtaaggcatcaaaccttttagaaacatcatatctatcgtctagaaatgacaaattctgtccaaaaactcttgtgcttctttgacttccaacataaacaaaagtcccccaaacatattttgccaaatcattgagaaggtcatgcatgactaaacacatttgtctctgcttgattgtttaacaacatacccacataatatatcatctaaatactctcatgagggcattgtataaaattttcagccattcacaacaaaattaaaagctctcttacaaacatatgtaaatctcttgggaatatggcacaataagcaaagcatctcttgagatgagaaggaatgtggtgataaattaaagcagagacaatattgctatcctc

SEQ ID NO: 14211 - DNA, 1089 bp, Glycine max
  Gm_smallRNAprecursor_7044
ttgacttgctttatttgactgcacgattgaagcaactctcttactacatgtagtgaagacaaccttgatttcttgagtcttgtaattaacaggagttttcaaaacttcccatttgatggcattagagggtgactccgattgtggacaattgagtatatcttatcggagaaagagaagggaggagggtctgcatacaattaggcaatgattttaagttcttcaatatctgaatttgaagcaactcttgcctaggtgcccaagtcctccttgggaaaatgatacaaatttaggacagctccaaataaacaaactatcaaagagatgcaattatgatttatgagcatgctcctaccaaatcatttcaagatcaagattgtctttagtgtcactatactaggtcacattccaatcatccgccaacgatagacttaatcttggaggacagtcatacatcaatgagcatgacaaatgacaaaatccatacatacaaaggcctcaaaccttttagaaacttcatatctatctcaatggtagaaacataagcaagctgttagccttatgtaaggcatcaaaccttttagaaacatcatatctatcgtctagaaatgacaaattctgtccaaaaactcttgtgcttctttgacttccaacataaacaaaagtcccccaaacatattttgccaaatcattgagaaggtcatgcatgactaaacacatttgtctctgcttgattgtttaacaacatacccacataatatatcatctaaatactctcatgagggcattgtataaaattttcagccattcacaacaaaattaaaagctctcttacaaacatatgtaaatctcttgggaatatggcacaataagcaaagcatctcttgagatgagaaggaatgtggtgataaattaaagcagagacaatattgctatcctctcttgaaaattctcaaatcttgtttctcaatacactttctcattccaaaacatctcaaacatgtgttctttttgtttctcttttagaaagacaaccttctggtcctcttttagatcctcctcctcgtcggcagcatgtaaagattcttgtta

SEQ ID NO: 14212 - DNA, 1200 bp, Glycine max
  Gm_smallRNAprecursor_7045
gaaagagaagggaggagggtctgcatacaattaggcaatgattttaagttcttcaatatctgaatttgaagcaactcttgcctaggtgcccaagtcctccttgggaaaatgatacaaatttaggacagctccaaataaacaaactatcaaagagatgcaattatgatttatgagcatgctcctaccaaatcatttcaagatcaagattgtctttagtgtcactatactaggtcacattccaatcatccgccaacgatagacttaatcttggaggacagtcatacatcaatgagcatgacaaatgacaaaatccatacatacaaaggcctcaaaccttttagaaacttcatatctatctcaatggtagaaacataagcaagctgttagccttatgtaaggcatcaaaccttttagaaacatcatatctatcgtctagaaatgacaaattctgtccaaaaactcttgtgcttctttgacttccaacataaacaaaagtcccccaaacatattttgccaaatcattgagaaggtcatgcatgactaaacacatttgtctctgcttgattgtttaacaacatacccacataatatatcatctaaatactctcatgagggcattgtataaaattttcagccattcacaacaaaattaaaagctctcttacaaacatatgtaaatctcttgggaatatggcacaataagcaaagcatctcttgagatgagaaggaatgtggtgataaattaaagcagagacaatattgctatcctctcttgaaaattctcaaatcttgtttctcaatacactttctcattccaaaacatctcaaacatgtgttctttttgtttctcttttagaaagacaaccttctggtcctcttttagatcctcctcctcgtcggcagcatgtaaagattcttgttacattctattctcattccaaacatcgtccaaaccatgaggaaacttcttccccgaatttttctagaatgaaatctaattcttttgtatcattagttgatctagtaatatccttaaaacatcaaactcatgcgaaacaaagacacaggccttgagaacaaattcaccttccatccttggctccttgtataaatgttgggcaagtaaggtctcatcccatccatacccacaaataaatatcacttatcagccaattaaagatgatttctttgtcattctct

SEQ ID NO: 14213 - DNA, 1101 bp, Glycine max
  Gm_smallRNAprecursor_7046
gaagggaggagggtctgcatacaattaggcaatgattttaagttcttcaatatctgaatttgaagcaactcttgcctaggtgcccaagtcctccttgggaaaatgatacaaatttaggacagctccaaataaacaaactatcaaagagatgcaattatgatttatgagcatgctcctaccaaatcatttcaagatcaagattgtctttagtgtcactatactaggtcacattccaatcatccgccaacgatagacttaatcttggaggacagtcatacatcaatgagcatgacaaatgacaaaatccatacatacaaaggcctcaaaccttttagaaacttcatatctatctcaatggtagaaacataagcaagctgttagccttatgtaaggcatcaaaccttttagaaacatcatatctatcgtctagaaatgacaaattctgtccaaaaactcttgtgcttctttgacttccaacataaacaaaagtcccccaaacatattttgccaaatcattgagaaggtcatgcatgactaaacacatttgtctctgcttgattgtttaacaacatacccacataatatatcatctaaatactctcatgagggcattgtataaaattttcagccattcacaacaaaattaaaagctctcttacaaacatatgtaaatctcttgggaatatggcacaataagcaaagcatctcttgagatgagaaggaatgtggtgataaattaaagcagagacaatattgctatcctctcttgaaaattctcaaatcttgtttctcaatacactttctcattccaaaacatctcaaacatgtgttctttttgtttctcttttagaaagacaaccttctggtcctcttttagatcctcctcctcgtcggcagcatgtaaagattcttgttacattctattctcattccaaacatcgtccaaaccatgaggaaacttcttccccgaatttttctagaatgaaatctaattcttttgtatcattagttgatctagtaatatccttaaaacatcaaactcatgcgaaacaaagacacaggccttgagaacaaattcaccttccatccttggctccttgt

SEQ ID NO: 14214 - DNA, 1169 bp, Glycine max
  Gm_smallRNAprecursor_7047
agttcttcaatatctgaatttgaagcaactcttgcctaggtgcccaagtcctccttgggaaaatgatacaaatttaggacagctccaaataaacaaactatcaaagagatgcaattatgatttatgagcatgctcctaccaaatcatttcaagatcaagattgtctttagtgtcactatactaggtcacattccaatcatccgccaacgatagacttaatcttggaggacagtcatacatcaatgagcatgacaaatgacaaaatccatacatacaaaggcctcaaaccttttagaaacttcatatctatctcaatggtagaaacataagcaagctgttagccttatgtaaggcatcaaaccttttagaaacatcatatctatcgtctagaaatgacaaattctgtccaaaaactcttgtgcttctttgacttccaacataaacaaaagtcccccaaacatattttgccaaatcattgagaaggtcatgcatgactaaacacatttgtctctgcttgattgtttaacaacatacccacataatatatcatctaaatactctcatgagggcattgtataaaattttcagccattcacaacaaaattaaaagctctcttacaaacatatgtaaatctcttgggaatatggcacaataagcaaagcatctcttgagatgagaaggaatgtggtgataaattaaagcagagacaatattgctatcctctcttgaaaattctcaaatcttgtttctcaatacactttctcattccaaaacatctcaaacatgtgttctttttgtttctcttttagaaagacaaccttctggtcctcttttagatcctcctcctcgtcggcagcatgtaaagattcttgttacattctattctcattccaaacatcgtccaaaccatgaggaaacttcttccccgaatttttctagaatgaaatctaattcttttgtatcattagttgatctagtaatatccttaaaacatcaaactcatgcgaaacaaagacacaggccttgagaacaaattcaccttccatccttggctccttgtataaatgttgggcaagtaaggtctcatcccatccatacccacaaataaatatcacttatcagccaattaaagatgatttctttgtcattctctctaccatatacggtt

SEQ ID NO: 14215 - DNA, 1094 bp, Glycine max
  Gm_smallRNAprecursor_7048
aaatgatacaaatttaggacagctccaaataaacaaactatcaaagagatgcaattatgatttatgagcatgctcctaccaaatcatttcaagatcaagattgtctttagtgtcactatactaggtcacattccaatcatccgccaacgatagacttaatcttggaggacagtcatacatcaatgagcatgacaaatgacaaaatccatacatacaaaggcctcaaaccttttagaaacttcatatctatctcaatggtagaaacataagcaagctgttagccttatgtaaggcatcaaaccttttagaaacatcatatctatcgtctagaaatgacaaattctgtccaaaaactcttgtgcttctttgacttccaacataaacaaaagtcccccaaacatattttgccaaatcattgagaaggtcatgcatgactaaacacatttgtctctgcttgattgtttaacaacatacccacataatatatcatctaaatactctcatgagggcattgtataaaattttcagccattcacaacaaaattaaaagctctcttacaaacatatgtaaatctcttgggaatatggcacaataagcaaagcatctcttgagatgagaaggaatgtggtgataaattaaagcagagacaatattgctatcctctcttgaaaattctcaaatcttgtttctcaatacactttctcattccaaaacatctcaaacatgtgttctttttgtttctcttttagaaagacaaccttctggtcctcttttagatcctcctcctcgtcggcagcatgtaaagattcttgttacattctattctcattccaaacatcgtccaaaccatgaggaaacttcttccccgaatttttctagaatgaaatctaattcttttgtatcattagttgatctagtaatatccttaaaacatcaaactcatgcgaaacaaagacacaggccttgagaacaaattcaccttccatccttggctccttgtataaatgttgggcaagtaaggtctcatcccatccatacccacaaataaatatcacttatcagccaattaaagatgatttctttgtcattctct

SEQ ID NO: 14216 - DNA, 1091 bp, Glycine max
  Gm_smallRNAprecursor_7049
acagctccaaataaacaaactatcaaagagatgcaattatgatttatgagcatgctcctaccaaatcatttcaagatcaagattgtctttagtgtcactatactaggtcacattccaatcatccgccaacgatagacttaatcttggaggacagtcatacatcaatgagcatgacaaatgacaaaatccatacatacaaaggcctcaaaccttttagaaacttcatatctatctcaatggtagaaacataagcaagctgttagccttatgtaaggcatcaaaccttttagaaacatcatatctatcgtctagaaatgacaaattctgtccaaaaactcttgtgcttctttgacttccaacataaacaaaagtcccccaaacatattttgccaaatcattgagaaggtcatgcatgactaaacacatttgtctctgcttgattgtttaacaacatacccacataatatatcatctaaatactctcatgagggcattgtataaaattttcagccattcacaacaaaattaaaagctctcttacaaacatatgtaaatctcttgggaatatggcacaataagcaaagcatctcttgagatgagaaggaatgtggtgataaattaaagcagagacaatattgctatcctctcttgaaaattctcaaatcttgtttctcaatacactttctcattccaaaacatctcaaacatgtgttctttttgtttctcttttagaaagacaaccttctggtcctcttttagatcctcctcctcgtcggcagcatgtaaagattcttgttacattctattctcattccaaacatcgtccaaaccatgaggaaacttcttccccgaatttttctagaatgaaatctaattcttttgtatcattagttgatctagtaatatccttaaaacatcaaactcatgcgaaacaaagacacaggccttgagaacaaattcaccttccatccttggctccttgtataaatgttgggcaagtaaggtctcatcccatccatacccacaaataaatatcacttatcagccaattaaagatgatttctttgtcattctctctaccatatacggtt

SEQ ID NO: 14217 - DNA, 1149 bp, Glycine max
  Gm_smallRNAprecursor_7050
acagctccaaataaacaaactatcaaagagatgcaattatgatttatgagcatgctcctaccaaatcatttcaagatcaagattgtctttagtgtcactatactaggtcacattccaatcatccgccaacgatagacttaatcttggaggacagtcatacatcaatgagcatgacaaatgacaaaatccatacatacaaaggcctcaaaccttttagaaacttcatatctatctcaatggtagaaacataagcaagctgttagccttatgtaaggcatcaaaccttttagaaacatcatatctatcgtctagaaatgacaaattctgtccaaaaactcttgtgcttctttgacttccaacataaacaaaagtcccccaaacatattttgccaaatcattgagaaggtcatgcatgactaaacacatttgtctctgcttgattgtttaacaacatacccacataatatatcatctaaatactctcatgagggcattgtataaaattttcagccattcacaacaaaattaaaagctctcttacaaacatatgtaaatctcttgggaatatggcacaataagcaaagcatctcttgagatgagaaggaatgtggtgataaattaaagcagagacaatattgctatcctctcttgaaaattctcaaatcttgtttctcaatacactttctcattccaaaacatctcaaacatgtgttctttttgtttctcttttagaaagacaaccttctggtcctcttttagatcctcctcctcgtcggcagcatgtaaagattcttgttacattctattctcattccaaacatcgtccaaaccatgaggaaacttcttccccgaatttttctagaatgaaatctaattcttttgtatcattagttgatctagtaatatccttaaaacatcaaactcatgcgaaacaaagacacaggccttgagaacaaattcaccttccatccttggctccttgtataaatgttgggcaagtaaggtctcatcccatccatacccacaaataaatatcacttatcagccaattaaagatgatttctttgtcattctctctaccatatacggtttcgcccacaaaatgttgttgttgacaactttggtgacaatgatataacactagaacca

SEQ ID NO: 14218 - DNA, 1041 bp, Glycine max
  Gm_smallRNAprecursor_7051
gcagtttaaatctgacttgacttgaaaataggcacttgcagccgacaaggacggtgtggacgacattgtctgtgaaaaatatggcattagcaaggagaaatgggcccagttttgtcagacccacagagatccctcatgggaggtatgtactttgtcattttagttgttttccacaacaaaatcacttcttataattcattgtaataatcattttcattaatgttaaacttttgcaggatgtgcggaaaaaggcacaagtcatccagaagcaaaacactgccccccacgtattgtctcgtgggggttataagtatttagaacaaaagctcatggctgagaagacaaagaaaagactggaagaagctgcccagtctggaagcactgagagcatcattgaccctccatctcccatcagacgccacgtgaagtggaagatggcccgcacgaagaaaactggacagatgacgtctaaggcagcaaaggaaatagctgacaggattgtaagtcatttttaattaataattataattatctttgtgtattctgtgaattccttggacaaatatgtgttcggtacaagattctttggacgagcaggcgtcacagggatcgttcgttccccatggacgtcaagatatcctgattgctgccattgggcgaccagagcaccctggccgtgctcgtgctactggagccagtgtccccataaagcaatactttggatcggcttcacgaacgtcccgcagttcttcctccatgcctcctgaagacctacaacagttgacccaacaaatcagagaccaactaaaggagtcaatcacagaaaaagtgacttgaaagctgatggcatccttcagccagatgtagtcccaatttcagtctcagatgcaatcacagggacttgcactacctctagagccagaggttggtccctcaggtcctcgtgtcagcacaaaggagagttgtgttaatccctcaaggatcgatcttgggacgggtgactcagacaaatgcgggctatacattgaagaaaatccttcc

SEQ ID NO: 14219 - DNA, 1039 bp, Glycine max
  Gm_smallRNAprecursor_7052
agcaatcaaagaatacaacatcagaaatcattttggttgcagaacaatttactctgaccaaagaaggctaaacttcgtctgcaagttacatgaaaatgcttgtacatggagcttgggcgcatgcaattcaaagaggcataacaaatggattatctagagtatcagaggtcatcacacttgtctcgtgccgatgctcagacaagatcatcgccaactcgacaaacacgtcatagcacatatcatccaaccaattgtcaaaacaaacccaactgtctccatcaagacgttgattgcagagatcaaaacgttcatgaattataccccatcctacaagaaggcatggttagcaaagcaaaaagcattggagatgattcatggaaatcgggaagaatcatatgccaaactgccaaaacttttcggagctttgcaatcttgtgttcccaggactgtggtcgctgctcaaacagaatccttgtatgaggggggagaaatagtaccgggcaaaagattgtttaaacgtgtcttttggtcatttggtccatgcattaatggttttgcatattgcaaacccattgtacaagtagatgatacatggctttacagaaagtatactgacacactgttgatagctatcgcacaagatggagctaaccatatcttcccgattacctatgccattgtagaaggggagacaacttcagcttggggttttttctaaagaatttgagaagacatgttactctgcaaattaacatttctctcatttcagaccgacacccctcaattataagtgcctacaacaacccaagtaacttatgggttcaggacacatcccatttcttttgcctgcgccacattacacaaaactttcttcatggtaactcaaactacaaacatttaaagaaaccacttatgttggctggtgagaatctattttatttattcgttataattttctttcaatcaaatgttataacataatacattgattaaatatttacagggtacgcatacacagagaagatgcactggcgacatc

SEQ ID NO: 14220 - DNA, 1168 bp, Glycine max
  Gm_smallRNAprecursor_7053
ataaattatttatatcgcggcatgatggcattataaagttgatggtgtgacatgatgaaatctcaaataacgtgaattacgtgcattttttgttcaatcctccaaatgatttattttgggtcaatgtgtgttcattctttttaaataattggtgttatataacatgaatcatatgcaggcaagaattcgtttttttgggaaggtaccaaaccaaaagagatcatcaccgaccctgagcaaatcaaagaagacgcatgttctacatcggtcaaattcgggattcaacaacggtgcttgatcgttttttattgtaatgatgttgaaacttaaaaatttcaacaacggtccataagtgaccgttgtagaattgcatttatttctaaatcggtgttatattaatgaccgatgtagaaaccttagtttcaaatacgttgttgacatcaacaacgacgtggatctcagattttctacatcagtattgacgtaggcaccgatgtagtaagatgctcttctaagtcgtttttaaagtgagcaacgatgttgatcttggattttctacatcgatgctgatgtaggcaccgatgtagtaagctgctcttctaagttgtttttaagttaagcaatgatgttgatcttggattttctacatcggtgctgacttaggcaccgatgtagtaagatgctcttctgagtcttttttaagttaagcaacgatgttaaaaacatatttaacctgcagagtaatttgaggttaattaaaataaattatttataatgaaaaaattatctataaataaaattatataacatattaaaaaaaacttattgtttataaatatgactatagtgatatttgctagctataaaacataaatagctataaaacaagaatacaatccccacttatgctcagacttgaaagaaatagcaaaaatagaagatataactattaatctgataaaaaaaaaagataaagctattaattcagatgactttacaggctagaataagactattgaagatcataaaaaatacctttccaagattaggtgtcattccaggagttgtgaagcatttgtcaactttgagcttatttttaccacctataagtgtatatagctatgttagatatgtataatgtagtttataaactttaatattgttggga

SEQ ID NO: 14221 - DNA, 1079 bp, Glycine max
  Gm_smallRNAprecursor_7054
gacgaaggaagacattcaaatgggtgaagcttttcatatagcgatcacacaataatgccgacaatgacgatgtgcatatgtggttgatgaagatagggtgagagggaaatacaaaaggggagtgggggagggaggcaccagagaggtaggtgtgagagggattttttttttgagggggtggtgagacgaaaagggttgagtatatttgtcattcaatttcttttaatgagaagggtgaacttagaatagataatgtatgggatagcaatgtctaacaaaagtcattcatcaatatgacaataatggacccggccgcttttaggcctaagtttctatttttcaatttattactaaaagggtgttgctaggtgcacccagcattattgctggtgcacccagcacttaaggtaaaatgacgaaaatacccttgatccgtaagccatttaagttgatccgtagaaaccttgatccgtaagccttttatggaacaatacggattaacatgatccgtaagctttttacggatcaacttgatccgtaagacttttacggatcatgttgatccgtattgtttcgtaaaaggcttacggatcaagttgatccgtacgatttatggatcaccctcatacacacccatcacaaatgtgaaaaaaacgcagggacaattttggtattttaattaaatgctgggtgcacctagcaacactcttactaaaattgatttgatcaagttcacgagtccataagtagttgattggtagaaaattgaattaaattaattttgacggaattaattttaaattattaagtataattaaaatttatgttcaaattaatttaagtcgcaccttcatattaaagtaactatttttttattaaaacgtaccgaaattaattttgtaacttcaaaatatacagaaactaaaaaaaatgaaaaataaataaatgttacagaatatttttttgacagaaaaaaattccagaattacagaatataatttgtccgtttgtctattttctttgaacgggaaagaaatgaagactttcgtttcgtagaccatgtaggtactgatatttca

SEQ ID NO: 14222 - DNA, 1080 bp, Glycine max
  Gm_smallRNAprecursor_7055
gacgaaggaagacattcaaatgggtgaagcttttcatatagcgatcacacaataatgccgacaatgacgatgtgcatatgtggttgatgaagatagggtgagagggaaatacaaaaggggagtgggggagggaggcaccagagaggtaggtgtgagagggattttttttttgagggggtggtgagacgaaaagggttgagtatatttgtcattcaatttcttttaatgagaagggtgaacttagaatagataatgtatgggatagcaatgtctaacaaaagtcattcatcaatatgacaataatggacccggccgcttttaggcctaagtttctatttttcaatttattactaaaagggtgttgctaggtgcacccagcattattgctggtgcacccagcacttaaggtaaaatgacgaaaatacccttgatccgtaagccatttaagttgatccgtagaaaccttgatccgtaagccttttatggaacaatacggattaacatgatccgtaagctttttacggatcaacttgatccgtaagacttttacggatcatgttgatccgtattgtttcgtaaaaggcttacggatcaagttgatccgtacgatttatggatcaccctcatacacacccatcacaaatgtgaaaaaaacgcagggacaattttggtattttaattaaatgctgggtgcacctagcaacactcttactaaaattgatttgatcaagttcacgagtccataagtagttgattggtagaaaattgaattaaattaattttgacggaattaattttaaattattaagtataattaaaatttatgttcaaattaatttaagtcgcaccttcatattaaagtaactatttttttattaaaacgtaccgaaattaattttgtaacttcaaaatatacagaaactaaaaaaaatgaaaaataaataaatgttacagaatatttttttgacagaaaaaaattccagaattacagaatataatttgtccgtttgtctattttctttgaacgggaaagaaatgaagactttcgtttcgtagaccatgtaggtactgatatttcag

SEQ ID NO: 14223 - DNA, 1052 bp, Glycine max
  Gm_smallRNAprecursor_7056
agcttttcatatagcgatcacacaataatgccgacaatgacgatgtgcatatgtggttgatgaagatagggtgagagggaaatacaaaaggggagtgggggagggaggcaccagagaggtaggtgtgagagggattttttttttgagggggtggtgagacgaaaagggttgagtatatttgtcattcaatttcttttaatgagaagggtgaacttagaatagataatgtatgggatagcaatgtctaacaaaagtcattcatcaatatgacaataatggacccggccgcttttaggcctaagtttctatttttcaatttattactaaaagggtgttgctaggtgcacccagcattattgctggtgcacccagcacttaaggtaaaatgacgaaaatacccttgatccgtaagccatttaagttgatccgtagaaaccttgatccgtaagccttttatggaacaatacggattaacatgatccgtaagctttttacggatcaacttgatccgtaagacttttacggatcatgttgatccgtattgtttcgtaaaaggcttacggatcaagttgatccgtacgatttatggatcaccctcatacacacccatcacaaatgtgaaaaaaacgcagggacaattttggtattttaattaaatgctgggtgcacctagcaacactcttactaaaattgatttgatcaagttcacgagtccataagtagttgattggtagaaaattgaattaaattaattttgacggaattaattttaaattattaagtataattaaaatttatgttcaaattaatttaagtcgcaccttcatattaaagtaactatttttttattaaaacgtaccgaaattaattttgtaacttcaaaatatacagaaactaaaaaaaatgaaaaataaataaatgttacagaatatttttttgacagaaaaaaattccagaattacagaatataatttgtccgtttgtctattttctttgaacgggaaagaaatgaagactttcgtttcgtagaccatgtaggtactgatatttca

SEQ ID NO: 14224 - DNA, 1053 bp, Glycine max
  Gm_smallRNAprecursor_7057
agcttttcatatagcgatcacacaataatgccgacaatgacgatgtgcatatgtggttgatgaagatagggtgagagggaaatacaaaaggggagtgggggagggaggcaccagagaggtaggtgtgagagggattttttttttgagggggtggtgagacgaaaagggttgagtatatttgtcattcaatttcttttaatgagaagggtgaacttagaatagataatgtatgggatagcaatgtctaacaaaagtcattcatcaatatgacaataatggacccggccgcttttaggcctaagtttctatttttcaatttattactaaaagggtgttgctaggtgcacccagcattattgctggtgcacccagcacttaaggtaaaatgacgaaaatacccttgatccgtaagccatttaagttgatccgtagaaaccttgatccgtaagccttttatggaacaatacggattaacatgatccgtaagctttttacggatcaacttgatccgtaagacttttacggatcatgttgatccgtattgtttcgtaaaaggcttacggatcaagttgatccgtacgatttatggatcaccctcatacacacccatcacaaatgtgaaaaaaacgcagggacaattttggtattttaattaaatgctgggtgcacctagcaacactcttactaaaattgatttgatcaagttcacgagtccataagtagttgattggtagaaaattgaattaaattaattttgacggaattaattttaaattattaagtataattaaaatttatgttcaaattaatttaagtcgcaccttcatattaaagtaactatttttttattaaaacgtaccgaaattaattttgtaacttcaaaatatacagaaactaaaaaaaatgaaaaataaataaatgttacagaatatttttttgacagaaaaaaattccagaattacagaatataatttgtccgtttgtctattttctttgaacgggaaagaaatgaagactttcgtttcgtagaccatgtaggtactgatatttcag

SEQ ID NO: 14225 - DNA, 1107 bp, Glycine max
  Gm_smallRNAprecursor_7058
tgaggaataactgtgatgaagatttgtgtgtttcactgcagctgggtgacaatgaagcaaagagaaggcgttctgaagcctcaactagtactgaggaacctcagtgaaacagattatttgcataagctggaaaaactgacttataagtctaatcacctcagaatgtgttgtttatggccactgtggtactgtgtttatgcttagcagctctgacagtgtgcaatgatgtgattggagttcacattgtcattgaagttcaagtaaatttgtgaccttggagagccatttagttcctaaaatgcttgaatttctgaactgaattatgtcacttttcaattaacatgggcatacattgccaattaactgttgctcacatcacatggccctgaccatggtttatatgctgtgataaactgatgccttgagttggatttttatcatgtcattttgcttcccctatcctaggtctgcaaagccttccacataatagctatgaagcaccgacaccgacacggacaccggacacgacacggacacggatacgtggatacctataatgtccaaaatatagaacgtagtacgggtgtcgtgtcggtgtcagacactgacacggacgcgtgtcggacaccggacacggcaaggagctggagtgtccgtgcttcatagcataatagaaagagcagtgctagcaattttttaatggacaaaacttaacatgtagttccataagtgttgttggtgctattttccaatcagaattagaaattcaccttggtaacctgcatttacatttaatagaatcctttgttaggcggattactgtgaaattccaattttgattgaaaaacaacacttacaacacctatagaaatgcatttaattttggcccttttttacacgtcttctaatatactattgtaggtaaaacaatatttgaaaccacaagcatgagcgagactcatttaataagaagtgcaacttagaatttttgtgctttttaataattttcatttaaaaataaagtgtattaaaacatgtgtgttaaagaatatgttgttaataattctctaataaagaagggggatattttcaaaagaaaaaacattt

SEQ ID NO: 14226 - DNA, 1112 bp, Glycine max
  Gm_smallRNAprecursor_7059
tgaggaataactgtgatgaagatttgtgtgtttcactgcagctgggtgacaatgaagcaaagagaaggcgttctgaagcctcaactagtactgaggaacctcagtgaaacagattatttgcataagctggaaaaactgacttataagtctaatcacctcagaatgtgttgtttatggccactgtggtactgtgtttatgcttagcagctctgacagtgtgcaatgatgtgattggagttcacattgtcattgaagttcaagtaaatttgtgaccttggagagccatttagttcctaaaatgcttgaatttctgaactgaattatgtcacttttcaattaacatgggcatacattgccaattaactgttgctcacatcacatggccctgaccatggtttatatgctgtgataaactgatgccttgagttggatttttatcatgtcattttgcttcccctatcctaggtctgcaaagccttccacataatagctatgaagcaccgacaccgacacggacaccggacacgacacggacacggatacgtggatacctataatgtccaaaatatagaacgtagtacgggtgtcgtgtcggtgtcagacactgacacggacgcgtgtcggacaccggacacggcaaggagctggagtgtccgtgcttcatagcataatagaaagagcagtgctagcaattttttaatggacaaaacttaacatgtagttccataagtgttgttggtgctattttccaatcagaattagaaattcaccttggtaacctgcatttacatttaatagaatcctttgttaggcggattactgtgaaattccaattttgattgaaaaacaacacttacaacacctatagaaatgcatttaattttggcccttttttacacgtcttctaatatactattgtaggtaaaacaatatttgaaaccacaagcatgagcgagactcatttaataagaagtgcaacttagaatttttgtgctttttaataattttcatttaaaaataaagtgtattaaaacatgtgtgttaaagaatatgttgttaataattctctaataaagaagggggatattttcaaaagaaaaaacattttatag

SEQ ID NO: 14227 - DNA, 1113 bp, Glycine max
  Gm_smallRNAprecursor_7060
tgaggaataactgtgatgaagatttgtgtgtttcactgcagctgggtgacaatgaagcaaagagaaggcgttctgaagcctcaactagtactgaggaacctcagtgaaacagattatttgcataagctggaaaaactgacttataagtctaatcacctcagaatgtgttgtttatggccactgtggtactgtgtttatgcttagcagctctgacagtgtgcaatgatgtgattggagttcacattgtcattgaagttcaagtaaatttgtgaccttggagagccatttagttcctaaaatgcttgaatttctgaactgaattatgtcacttttcaattaacatgggcatacattgccaattaactgttgctcacatcacatggccctgaccatggtttatatgctgtgataaactgatgccttgagttggatttttatcatgtcattttgcttcccctatcctaggtctgcaaagccttccacataatagctatgaagcaccgacaccgacacggacaccggacacgacacggacacggatacgtggatacctataatgtccaaaatatagaacgtagtacgggtgtcgtgtcggtgtcagacactgacacggacgcgtgtcggacaccggacacggcaaggagctggagtgtccgtgcttcatagcataatagaaagagcagtgctagcaattttttaatggacaaaacttaacatgtagttccataagtgttgttggtgctattttccaatcagaattagaaattcaccttggtaacctgcatttacatttaatagaatcctttgttaggcggattactgtgaaattccaattttgattgaaaaacaacacttacaacacctatagaaatgcatttaattttggcccttttttacacgtcttctaatatactattgtaggtaaaacaatatttgaaaccacaagcatgagcgagactcatttaataagaagtgcaacttagaatttttgtgctttttaataattttcatttaaaaataaagtgtattaaaacatgtgtgttaaagaatatgttgttaataattctctaataaagaagggggatattttcaaaagaaaaaacattttataga

SEQ ID NO: 14228 - DNA, 1113 bp, Glycine max; identical to SEQ ID NO: 14227
  Gm_smallRNAprecursor_7061

SEQ ID NO: 14229 - DNA, 1118 bp, Glycine max
  Gm_smallRNAprecursor_7062
tgaggaataactgtgatgaagatttgtgtgtttcactgcagctgggtgacaatgaagcaaagagaaggcgttctgaagcctcaactagtactgaggaacctcagtgaaacagattatttgcataagctggaaaaactgacttataagtctaatcacctcagaatgtgttgtttatggccactgtggtactgtgtttatgcttagcagctctgacagtgtgcaatgatgtgattggagttcacattgtcattgaagttcaagtaaatttgtgaccttggagagccatttagttcctaaaatgcttgaatttctgaactgaattatgtcacttttcaattaacatgggcatacattgccaattaactgttgctcacatcacatggccctgaccatggtttatatgctgtgataaactgatgccttgagttggatttttatcatgtcattttgcttcccctatcctaggtctgcaaagccttccacataatagctatgaagcaccgacaccgacacggacaccggacacgacacggacacggatacgtggatacctataatgtccaaaatatagaacgtagtacgggtgtcgtgtcggtgtcagacactgacacggacgcgtgtcggacaccggacacggcaaggagctggagtgtccgtgcttcatagcataatagaaagagcagtgctagcaattttttaatggacaaaacttaacatgtagttccataagtgttgttggtgctattttccaatcagaattagaaattcaccttggtaacctgcatttacatttaatagaatcctttgttaggcggattactgtgaaattccaattttgattgaaaaacaacacttacaacacctatagaaatgcatttaattttggcccttttttacacgtcttctaatatactattgtaggtaaaacaatatttgaaaccacaagcatgagcgagactcatttaataagaagtgcaacttagaatttttgtgctttttaataattttcatttaaaaataaagtgtattaaaacatgtgtgttaaagaatatgttgttaataattctctaataaagaagggggatattttcaaaagaaaaaacattttatagacttag

SEQ ID NO: 14230 - DNA, 1119 bp, Glycine max
  Gm_smallRNAprecursor_7063
tgaggaataactgtgatgaagatttgtgtgtttcactgcagctgggtgacaatgaagcaaagagaaggcgttctgaagcctcaactagtactgaggaacctcagtgaaacagattatttgcataagctggaaaaactgacttataagtctaatcacctcagaatgtgttgtttatggccactgtggtactgtgtttatgcttagcagctctgacagtgtgcaatgatgtgattggagttcacattgtcattgaagttcaagtaaatttgtgaccttggagagccatttagttcctaaaatgcttgaatttctgaactgaattatgtcacttttcaattaacatgggcatacattgccaattaactgttgctcacatcacatggccctgaccatggtttatatgctgtgataaactgatgccttgagttggatttttatcatgtcattttgcttcccctatcctaggtctgcaaagccttccacataatagctatgaagcaccgacaccgacacggacaccggacacgacacggacacggatacgtggatacctataatgtccaaaatatagaacgtagtacgggtgtcgtgtcggtgtcagacactgacacggacgcgtgtcggacaccggacacggcaaggagctggagtgtccgtgcttcatagcataatagaaagagcagtgctagcaattttttaatggacaaaacttaacatgtagttccataagtgttgttggtgctattttccaatcagaattagaaattcaccttggtaacctgcatttacatttaatagaatcctttgttaggcggattactgtgaaattccaattttgattgaaaaacaacacttacaacacctatagaaatgcatttaattttggcccttttttacacgtcttctaatatactattgtaggtaaaacaatatttgaaaccacaagcatgagcgagactcatttaataagaagtgcaacttagaatttttgtgctttttaataattttcatttaaaaataaagtgtattaaaacatgtgtgttaaagaatatgttgttaataattctctaataaagaagggggatattttcaaaagaaaaaacattttatagacttagc

SEQ ID NO: 14231 - DNA, 1119 bp, Glycine max; identical to SEQ ID NO: 14230
  Gm_smallRNAprecursor_7064

SEQ ID NO: 14232 - DNA, 1120 bp, Glycine max
  Gm_smallRNAprecursor_7065
tgaggaataactgtgatgaagatttgtgtgtttcactgcagctgggtgacaatgaagcaaagagaaggcgttctgaagcctcaactagtactgaggaacctcagtgaaacagattatttgcataagctggaaaaactgacttataagtctaatcacctcagaatgtgttgtttatggccactgtggtactgtgtttatgcttagcagctctgacagtgtgcaatgatgtgattggagttcacattgtcattgaagttcaagtaaatttgtgaccttggagagccatttagttcctaaaatgcttgaatttctgaactgaattatgtcacttttcaattaacatgggcatacattgccaattaactgttgctcacatcacatggccctgaccatggtttatatgctgtgataaactgatgccttgagttggatttttatcatgtcattttgcttcccctatcctaggtctgcaaagccttccacataatagctatgaagcaccgacaccgacacggacaccggacacgacacggacacggatacgtggatacctataatgtccaaaatatagaacgtagtacgggtgtcgtgtcggtgtcagacactgacacggacgcgtgtcggacaccggacacggcaaggagctggagtgtccgtgcttcatagcataatagaaagagcagtgctagcaattttttaatggacaaaacttaacatgtagttccataagtgttgttggtgctattttccaatcagaattagaaattcaccttggtaacctgcatttacatttaatagaatcctttgttaggcggattactgtgaaattccaattttgattgaaaaacaacacttacaacacctatagaaatgcatttaattttggcccttttttacacgtcttctaatatactattgtaggtaaaacaatatttgaaaccacaagcatgagcgagactcatttaataagaagtgcaacttagaatttttgtgctttttaataattttcatttaaaaataaagtgtattaaaacatgtgtgttaaagaatatgttgttaataattctctaataaagaagggggatattttcaaaagaaaaaacattttatagacttagca

SEQ ID NO: 14233 - DNA, 1117 bp, Glycine max
  Gm_smallRNAprecursor_7066
gaggaataactgtgatgaagatttgtgtgtttcactgcagctgggtgacaatgaagcaaagagaaggcgttctgaagcctcaactagtactgaggaacctcagtgaaacagattatttgcataagctggaaaaactgacttataagtctaatcacctcagaatgtgttgtttatggccactgtggtactgtgtttatgcttagcagctctgacagtgtgcaatgatgtgattggagttcacattgtcattgaagttcaagtaaatttgtgaccttggagagccatttagttcctaaaatgcttgaatttctgaactgaattatgtcacttttcaattaacatgggcatacattgccaattaactgttgctcacatcacatggccctgaccatggtttatatgctgtgataaactgatgccttgagttggatttttatcatgtcattttgcttcccctatcctaggtctgcaaagccttccacataatagctatgaagcaccgacaccgacacggacaccggacacgacacggacacggatacgtggatacctataatgtccaaaatatagaacgtagtacgggtgtcgtgtcggtgtcagacactgacacggacgcgtgtcggacaccggacacggcaaggagctggagtgtccgtgcttcatagcataatagaaagagcagtgctagcaattttttaatggacaaaacttaacatgtagttccataagtgttgttggtgctattttccaatcagaattagaaattcaccttggtaacctgcatttacatttaatagaatcctttgttaggcggattactgtgaaattccaattttgattgaaaaacaacacttacaacacctatagaaatgcatttaattttggcccttttttacacgtcttctaatatactattgtaggtaaaacaatatttgaaaccacaagcatgagcgagactcatttaataagaagtgcaacttagaatttttgtgctttttaataattttcatttaaaaataaagtgtattaaaacatgtgtgttaaagaatatgttgttaataattctctaataaagaagggggatattttcaaaagaaaaaacattttatagacttag

SEQ ID NO: 14234 - DNA, 1117 bp, Glycine max; identical to SEQ ID NO: 14233
  Gm_smallRNAprecursor_7067

SEQ ID NO: 14235 - DNA, 1118 bp, Glycine max
  Gm_smallRNAprecursor_7068
gaggaataactgtgatgaagatttgtgtgtttcactgcagctgggtgacaatgaagcaaagagaaggcgttctgaagcctcaactagtactgaggaacctcagtgaaacagattatttgcataagctggaaaaactgacttataagtctaatcacctcagaatgtgttgtttatggccactgtggtactgtgtttatgcttagcagctctgacagtgtgcaatgatgtgattggagttcacattgtcattgaagttcaagtaaatttgtgaccttggagagccatttagttcctaaaatgcttgaatttctgaactgaattatgtcacttttcaattaacatgggcatacattgccaattaactgttgctcacatcacatggccctgaccatggtttatatgctgtgataaactgatgccttgagttggatttttatcatgtcattttgcttcccctatcctaggtctgcaaagccttccacataatagctatgaagcaccgacaccgacacggacaccggacacgacacggacacggatacgtggatacctataatgtccaaaatatagaacgtagtacgggtgtcgtgtcggtgtcagacactgacacggacgcgtgtcggacaccggacacggcaaggagctggagtgtccgtgcttcatagcataatagaaagagcagtgctagcaattttttaatggacaaaacttaacatgtagttccataagtgttgttggtgctattttccaatcagaattagaaattcaccttggtaacctgcatttacatttaatagaatcctttgttaggcggattactgtgaaattccaattttgattgaaaaacaacacttacaacacctatagaaatgcatttaattttggcccttttttacacgtcttctaatatactattgtaggtaaaacaatatttgaaaccacaagcatgagcgagactcatttaataagaagtgcaacttagaatttttgtgctttttaataattttcatttaaaaataaagtgtattaaaacatgtgtgttaaagaatatgttgttaataattctctaataaagaagggggatattttcaaaagaaaaaacattttatagacttagc

SEQ ID NO: 14236 - DNA, 1072 bp, Glycine max
  Gm_smallRNAprecursor_7069
aataactgtgatgaagatttgtgtgtttcactgcagctgggtgacaatgaagcaaagagaaggcgttctgaagcctcaactagtactgaggaacctcagtgaaacagattatttgcataagctggaaaaactgacttataagtctaatcacctcagaatgtgttgtttatggccactgtggtactgtgtttatgcttagcagctctgacagtgtgcaatgatgtgattggagttcacattgtcattgaagttcaagtaaatttgtgaccttggagagccatttagttcctaaaatgcttgaatttctgaactgaattatgtcacttttcaattaacatgggcatacattgccaattaactgttgctcacatcacatggccctgaccatggtttatatgctgtgataaactgatgccttgagttggatttttatcatgtcattttgcttcccctatcctaggtctgcaaagccttccacataatagctatgaagcaccgacaccgacacggacaccggacacgacacggacacggatacgtggatacctataatgtccaaaatatagaacgtagtacgggtgtcgtgtcggtgtcagacactgacacggacgcgtgtcggacaccggacacggcaaggagctggagtgtccgtgcttcatagcataatagaaagagcagtgctagcaattttttaatggacaaaacttaacatgtagttccataagtgttgttggtgctattttccaatcagaattagaaattcaccttggtaacctgcatttacatttaatagaatcctttgttaggcggattactgtgaaattccaattttgattgaaaaacaacacttacaacacctatagaaatgcatttaattttggcccttttttacacgtcttctaatatactattgtaggtaaaacaatatttgaaaccacaagcatgagcgagactcatttaataagaagtgcaacttagaatttttgtgctttttaataattttcatttaaaaataaagtgtattaaaacatgtgtgttaaagaatatgttgttaataattctctaataaaga

SEQ ID NO: 14237 - DNA, 1073 bp, Glycine max
  Gm_smallRNAprecursor_7070
aataactgtgatgaagatttgtgtgtttcactgcagctgggtgacaatgaagcaaagagaaggcgttctgaagcctcaactagtactgaggaacctcagtgaaacagattatttgcataagctggaaaaactgacttataagtctaatcacctcagaatgtgttgtttatggccactgtggtactgtgtttatgcttagcagctctgacagtgtgcaatgatgtgattggagttcacattgtcattgaagttcaagtaaatttgtgaccttggagagccatttagttcctaaaatgcttgaatttctgaactgaattatgtcacttttcaattaacatgggcatacattgccaattaactgttgctcacatcacatggccctgaccatggtttatatgctgtgataaactgatgccttgagttggatttttatcatgtcattttgcttcccctatcctaggtctgcaaagccttccacataatagctatgaagcaccgacaccgacacggacaccggacacgacacggacacggatacgtggatacctataatgtccaaaatatagaacgtagtacgggtgtcgtgtcggtgtcagacactgacacggacgcgtgtcggacaccggacacggcaaggagctggagtgtccgtgcttcatagcataatagaaagagcagtgctagcaattttttaatggacaaaacttaacatgtagttccataagtgttgttggtgctattttccaatcagaattagaaattcaccttggtaacctgcatttacatttaatagaatcctttgttaggcggattactgtgaaattccaattttgattgaaaaacaacacttacaacacctatagaaatgcatttaattttggcccttttttacacgtcttctaatatactattgtaggtaaaacaatatttgaaaccacaagcatgagcgagactcatttaataagaagtgcaacttagaatttttgtgctttttaataattttcatttaaaaataaagtgtattaaaacatgtgtgttaaagaatatgttgttaataattctctaataaagaa

SEQ ID NO: 14238 - DNA, 1070 bp, Glycine max
  Gm_smallRNAprecursor_7071
ataactgtgatgaagatttgtgtgtttcactgcagctgggtgacaatgaagcaaagagaaggcgttctgaagcctcaactagtactgaggaacctcagtgaaacagattatttgcataagctggaaaaactgacttataagtctaatcacctcagaatgtgttgtttatggccactgtggtactgtgtttatgcttagcagctctgacagtgtgcaatgatgtgattggagttcacattgtcattgaagttcaagtaaatttgtgaccttggagagccatttagttcctaaaatgcttgaatttctgaactgaattatgtcacttttcaattaacatgggcatacattgccaattaactgttgctcacatcacatggccctgaccatggtttatatgctgtgataaactgatgccttgagttggatttttatcatgtcattttgcttcccctatcctaggtctgcaaagccttccacataatagctatgaagcaccgacaccgacacggacaccggacacgacacggacacggatacgtggatacctataatgtccaaaatatagaacgtagtacgggtgtcgtgtcggtgtcagacactgacacggacgcgtgtcggacaccggacacggcaaggagctggagtgtccgtgcttcatagcataatagaaagagcagtgctagcaattttttaatggacaaaacttaacatgtagttccataagtgttgttggtgctattttccaatcagaattagaaattcaccttggtaacctgcatttacatttaatagaatcctttgttaggcggattactgtgaaattccaattttgattgaaaaacaacacttacaacacctatagaaatgcatttaattttggcccttttttacacgtcttctaatatactattgtaggtaaaacaatatttgaaaccacaagcatgagcgagactcatttaataagaagtgcaacttagaatttttgtgctttttaataattttcatttaaaaataaagtgtattaaaacatgtgtgttaaagaatatgttgttaataattctctaataaag

SEQ ID NO: 14239 - DNA, 1070 bp, Glycine max; identical to SEQ ID NO: 14238
  Gm_smallRNAprecursor_7072

SEQ ID NO: 14240 - DNA, 1071 bp, Glycine max
  Gm_smallRNAprecursor_7073
ataactgtgatgaagatttgtgtgtttcactgcagctgggtgacaatgaagcaaagagaaggcgttctgaagcctcaactagtactgaggaacctcagtgaaacagattatttgcataagctggaaaaactgacttataagtctaatcacctcagaatgtgttgtttatggccactgtggtactgtgtttatgcttagcagctctgacagtgtgcaatgatgtgattggagttcacattgtcattgaagttcaagtaaatttgtgaccttggagagccatttagttcctaaaatgcttgaatttctgaactgaattatgtcacttttcaattaacatgggcatacattgccaattaactgttgctcacatcacatggccctgaccatggtttatatgctgtgataaactgatgccttgagttggatttttatcatgtcattttgcttcccctatcctaggtctgcaaagccttccacataatagctatgaagcaccgacaccgacacggacaccggacacgacacggacacggatacgtggatacctataatgtccaaaatatagaacgtagtacgggtgtcgtgtcggtgtcagacactgacacggacgcgtgtcggacaccggacacggcaaggagctggagtgtccgtgcttcatagcataatagaaagagcagtgctagcaattttttaatggacaaaacttaacatgtagttccataagtgttgttggtgctattttccaatcagaattagaaattcaccttggtaacctgcatttacatttaatagaatcctttgttaggcggattactgtgaaattccaattttgattgaaaaacaacacttacaacacctatagaaatgcatttaattttggcccttttttacacgtcttctaatatactattgtaggtaaaacaatatttgaaaccacaagcatgagcgagactcatttaataagaagtgcaacttagaatttttgtgctttttaataattttcatttaaaaataaagtgtattaaaacatgtgtgttaaagaatatgttgttaataattctctaataaaga

SEQ ID NO: 14241 - DNA, 1071 bp, Glycine max; identical to SEQ ID NO: 14240
  Gm_smallRNAprecursor_7074

SEQ ID NO: 14242 - DNA, 1072 bp, Glycine max
  Gm_smallRNAprecursor_7075
ataactgtgatgaagatttgtgtgtttcactgcagctgggtgacaatgaagcaaagagaaggcgttctgaagcctcaactagtactgaggaacctcagtgaaacagattatttgcataagctggaaaaactgacttataagtctaatcacctcagaatgtgttgtttatggccactgtggtactgtgtttatgcttagcagctctgacagtgtgcaatgatgtgattggagttcacattgtcattgaagttcaagtaaatttgtgaccttggagagccatttagttcctaaaatgcttgaatttctgaactgaattatgtcacttttcaattaacatgggcatacattgccaattaactgttgctcacatcacatggccctgaccatggtttatatgctgtgataaactgatgccttgagttggatttttatcatgtcattttgcttcccctatcctaggtctgcaaagccttccacataatagctatgaagcaccgacaccgacacggacaccggacacgacacggacacggatacgtggatacctataatgtccaaaatatagaacgtagtacgggtgtcgtgtcggtgtcagacactgacacggacgcgtgtcggacaccggacacggcaaggagctggagtgtccgtgcttcatagcataatagaaagagcagtgctagcaattttttaatggacaaaacttaacatgtagttccataagtgttgttggtgctattttccaatcagaattagaaattcaccttggtaacctgcatttacatttaatagaatcctttgttaggcggattactgtgaaattccaattttgattgaaaaacaacacttacaacacctatagaaatgcatttaattttggcccttttttacacgtcttctaatatactattgtaggtaaaacaatatttgaaaccacaagcatgagcgagactcatttaataagaagtgcaacttagaatttttgtgctttttaataattttcatttaaaaataaagtgtattaaaacatgtgtgttaaagaatatgttgttaataattctctaataaagaa

SEQ ID NO: 14243 - DNA, 1072 bp, Glycine max; identical to SEQ ID NO: 14242
  Gm_smallRNAprecursor_7076

SEQ ID NO: 14244 - DNA, 1101 bp, Glycine max
  Gm_smallRNAprecursor_7077
ataactgtgatgaagatttgtgtgtttcactgcagctgggtgacaatgaagcaaagagaaggcgttctgaagcctcaactagtactgaggaacctcagtgaaacagattatttgcataagctggaaaaactgacttataagtctaatcacctcagaatgtgttgtttatggccactgtggtactgtgtttatgcttagcagctctgacagtgtgcaatgatgtgattggagttcacattgtcattgaagttcaagtaaatttgtgaccttggagagccatttagttcctaaaatgcttgaatttctgaactgaattatgtcacttttcaattaacatgggcatacattgccaattaactgttgctcacatcacatggccctgaccatggtttatatgctgtgataaactgatgccttgagttggatttttatcatgtcattttgcttcccctatcctaggtctgcaaagccttccacataatagctatgaagcaccgacaccgacacggacaccggacacgacacggacacggatacgtggatacctataatgtccaaaatatagaacgtagtacgggtgtcgtgtcggtgtcagacactgacacggacgcgtgtcggacaccggacacggcaaggagctggagtgtccgtgcttcatagcataatagaaagagcagtgctagcaattttttaatggacaaaacttaacatgtagttccataagtgttgttggtgctattttccaatcagaattagaaattcaccttggtaacctgcatttacatttaatagaatcctttgttaggcggattactgtgaaattccaattttgattgaaaaacaacacttacaacacctatagaaatgcatttaattttggcccttttttacacgtcttctaatatactattgtaggtaaaacaatatttgaaaccacaagcatgagcgagactcatttaataagaagtgcaacttagaatttttgtgctttttaataattttcatttaaaaataaagtgtattaaaacatgtgtgttaaagaatatgttgttaataattctctaataaagaagggggatattttcaaaagaaaaaacattt

SEQ ID NO: 14245 - DNA, 1101 bp, Glycine max; identical to SEQ ID NO: 14244
  Gm_smallRNAprecursor_7078

SEQ ID NO: 14246 - DNA, 1112 bp, Glycine max
  Gm_smallRNAprecursor_7079
ataactgtgatgaagatttgtgtgtttcactgcagctgggtgacaatgaagcaaagagaaggcgttctgaagcctcaactagtactgaggaacctcagtgaaacagattatttgcataagctggaaaaactgacttataagtctaatcacctcagaatgtgttgtttatggccactgtggtactgtgtttatgcttagcagctctgacagtgtgcaatgatgtgattggagttcacattgtcattgaagttcaagtaaatttgtgaccttggagagccatttagttcctaaaatgcttgaatttctgaactgaattatgtcacttttcaattaacatgggcatacattgccaattaactgttgctcacatcacatggccctgaccatggtttatatgctgtgataaactgatgccttgagttggatttttatcatgtcattttgcttcccctatcctaggtctgcaaagccttccacataatagctatgaagcaccgacaccgacacggacaccggacacgacacggacacggatacgtggatacctataatgtccaaaatatagaacgtagtacgggtgtcgtgtcggtgtcagacactgacacggacgcgtgtcggacaccggacacggcaaggagctggagtgtccgtgcttcatagcataatagaaagagcagtgctagcaattttttaatggacaaaacttaacatgtagttccataagtgttgttggtgctattttccaatcagaattagaaattcaccttggtaacctgcatttacatttaatagaatcctttgttaggcggattactgtgaaattccaattttgattgaaaaacaacacttacaacacctatagaaatgcatttaattttggcccttttttacacgtcttctaatatactattgtaggtaaaacaatatttgaaaccacaagcatgagcgagactcatttaataagaagtgcaacttagaatttttgtgctttttaataattttcatttaaaaataaagtgtattaaaacatgtgtgttaaagaatatgttgttaataattctctaataaagaagggggatattttcaaaagaaaaaacattttatagacttag

SEQ ID NO: 14247 - DNA, 1112 bp, Glycine max; identical to SEQ ID NO: 14246
  Gm_smallRNAprecursor_7080

SEQ ID NO: 14248 - DNA, 1113 bp, Glycine max
  Gm_smallRNAprecursor_7081
ataactgtgatgaagatttgtgtgtttcactgcagctgggtgacaatgaagcaaagagaaggcgttctgaagcctcaactagtactgaggaacctcagtgaaacagattatttgcataagctggaaaaactgacttataagtctaatcacctcagaatgtgttgtttatggccactgtggtactgtgtttatgcttagcagctctgacagtgtgcaatgatgtgattggagttcacattgtcattgaagttcaagtaaatttgtgaccttggagagccatttagttcctaaaatgcttgaatttctgaactgaattatgtcacttttcaattaacatgggcatacattgccaattaactgttgctcacatcacatggccctgaccatggtttatatgctgtgataaactgatgccttgagttggatttttatcatgtcattttgcttcccctatcctaggtctgcaaagccttccacataatagctatgaagcaccgacaccgacacggacaccggacacgacacggacacggatacgtggatacctataatgtccaaaatatagaacgtagtacgggtgtcgtgtcggtgtcagacactgacacggacgcgtgtcggacaccggacacggcaaggagctggagtgtccgtgcttcatagcataatagaaagagcagtgctagcaattttttaatggacaaaacttaacatgtagttccataagtgttgttggtgctattttccaatcagaattagaaattcaccttggtaacctgcatttacatttaatagaatcctttgttaggcggattactgtgaaattccaattttgattgaaaaacaacacttacaacacctatagaaatgcatttaattttggcccttttttacacgtcttctaatatactattgtaggtaaaacaatatttgaaaccacaagcatgagcgagactcatttaataagaagtgcaacttagaatttttgtgctttttaataattttcatttaaaaataaagtgtattaaaacatgtgtgttaaagaatatgttgttaataattctctaataaagaagggggatattttcaaaagaaaaaacattttatagacttagc

SEQ ID NO: 14249 - DNA, 1113 bp, Glycine max; identical to SEQ ID NO: 14248
  Gm_smallRNAprecursor_7082

SEQ ID NO: 14250 - DNA, 1113 bp, Glycine max; identical to SEQ ID NO: 14248
  Gm_smallRNAprecursor_7083

SEQ ID NO: 14251 - DNA, 1113 bp, Glycine max; identical to SEQ ID NO: 14248
  Gm_smallRNAprecursor_7084

SEQ ID NO: 14252 - DNA, 1114 bp, Glycine max
  Gm_smallRNAprecursor_7085
ataactgtgatgaagatttgtgtgtttcactgcagctgggtgacaatgaagcaaagagaaggcgttctgaagcctcaactagtactgaggaacctcagtgaaacagattatttgcataagctggaaaaactgacttataagtctaatcacctcagaatgtgttgtttatggccactgtggtactgtgtttatgcttagcagctctgacagtgtgcaatgatgtgattggagttcacattgtcattgaagttcaagtaaatttgtgaccttggagagccatttagttcctaaaatgcttgaatttctgaactgaattatgtcacttttcaattaacatgggcatacattgccaattaactgttgctcacatcacatggccctgaccatggtttatatgctgtgataaactgatgccttgagttggatttttatcatgtcattttgcttcccctatcctaggtctgcaaagccttccacataatagctatgaagcaccgacaccgacacggacaccggacacgacacggacacggatacgtggatacctataatgtccaaaatatagaacgtagtacgggtgtcgtgtcggtgtcagacactgacacggacgcgtgtcggacaccggacacggcaaggagctggagtgtccgtgcttcatagcataatagaaagagcagtgctagcaattttttaatggacaaaacttaacatgtagttccataagtgttgttggtgctattttccaatcagaattagaaattcaccttggtaacctgcatttacatttaatagaatcctttgttaggcggattactgtgaaattccaattttgattgaaaaacaacacttacaacacctatagaaatgcatttaattttggcccttttttacacgtcttctaatatactattgtaggtaaaacaatatttgaaaccacaagcatgagcgagactcatttaataagaagtgcaacttagaatttttgtgctttttaataattttcatttaaaaataaagtgtattaaaacatgtgtgttaaagaatatgttgttaataattctctaataaagaagggggatattttcaaaagaaaaaacattttatagacttagca

SEQ ID NO: 14253 - DNA, 1114 bp, Glycine max; identical to SEQ ID NO: 14252
  Gm_smallRNAprecursor_7086

SEQ ID NO: 14254 - DNA, 1115 bp, Glycine max
  Gm_smallRNAprecursor_7087
ataactgtgatgaagatttgtgtgtttcactgcagctgggtgacaatgaagcaaagagaaggcgttctgaagcctcaactagtactgaggaacctcagtgaaacagattatttgcataagctggaaaaactgacttataagtctaatcacctcagaatgtgttgtttatggccactgtggtactgtgtttatgcttagcagctctgacagtgtgcaatgatgtgattggagttcacattgtcattgaagttcaagtaaatttgtgaccttggagagccatttagttcctaaaatgcttgaatttctgaactgaattatgtcacttttcaattaacatgggcatacattgccaattaactgttgctcacatcacatggccctgaccatggtttatatgctgtgataaactgatgccttgagttggatttttatcatgtcattttgcttcccctatcctaggtctgcaaagccttccacataatagctatgaagcaccgacaccgacacggacaccggacacgacacggacacggatacgtggatacctataatgtccaaaatatagaacgtagtacgggtgtcgtgtcggtgtcagacactgacacggacgcgtgtcggacaccggacacggcaaggagctggagtgtccgtgcttcatagcataatagaaagagcagtgctagcaattttttaatggacaaaacttaacatgtagttccataagtgttgttggtgctattttccaatcagaattagaaattcaccttggtaacctgcatttacatttaatagaatcctttgttaggcggattactgtgaaattccaattttgattgaaaaacaacacttacaacacctatagaaatgcatttaattttggcccttttttacacgtcttctaatatactattgtaggtaaaacaatatttgaaaccacaagcatgagcgagactcatttaataagaagtgcaacttagaatttttgtgctttttaataattttcatttaaaaataaagtgtattaaaacatgtgtgttaaagaatatgttgttaataattctctaataaagaagggggatattttcaaaagaaaaaacattttatagacttagcat

SEQ ID NO: 14255 - DNA, 1115 bp, Glycine max; identical to SEQ ID NO: 14254
  Gm_smallRNAprecursor_7088

SEQ ID NO: 14256 - DNA, 1116 bp, Glycine max
  Gm_smallRNAprecursor_7089
ataactgtgatgaagatttgtgtgtttcactgcagctgggtgacaatgaagcaaagagaaggcgttctgaagcctcaactagtactgaggaacctcagtgaaacagattatttgcataagctggaaaaactgacttataagtctaatcacctcagaatgtgttgtttatggccactgtggtactgtgtttatgcttagcagctctgacagtgtgcaatgatgtgattggagttcacattgtcattgaagttcaagtaaatttgtgaccttggagagccatttagttcctaaaatgcttgaatttctgaactgaattatgtcacttttcaattaacatgggcatacattgccaattaactgttgctcacatcacatggccctgaccatggtttatatgctgtgataaactgatgccttgagttggatttttatcatgtcattttgcttcccctatcctaggtctgcaaagccttccacataatagctatgaagcaccgacaccgacacggacaccggacacgacacggacacggatacgtggatacctataatgtccaaaatatagaacgtagtacgggtgtcgtgtcggtgtcagacactgacacggacgcgtgtcggacaccggacacggcaaggagctggagtgtccgtgcttcatagcataatagaaagagcagtgctagcaattttttaatggacaaaacttaacatgtagttccataagtgttgttggtgctattttccaatcagaattagaaattcaccttggtaacctgcatttacatttaatagaatcctttgttaggcggattactgtgaaattccaattttgattgaaaaacaacacttacaacacctatagaaatgcatttaattttggcccttttttacacgtcttctaatatactattgtaggtaaaacaatatttgaaaccacaagcatgagcgagactcatttaataagaagtgcaacttagaatttttgtgctttttaataattttcatttaaaaataaagtgtattaaaacatgtgtgttaaagaatatgttgttaataattctctaataaagaagggggatattttcaaaagaaaaaacattttatagacttagcatg

SEQ ID NO: 14257 - DNA, 1116 bp, Glycine max; identical to SEQ ID NO: 14256
  Gm_smallRNAprecursor_7090

SEQ ID NO: 14258 - DNA, 1069 bp, Glycine max
  Gm_smallRNAprecursor_7091
taactgtgatgaagatttgtgtgtttcactgcagctgggtgacaatgaagcaaagagaaggcgttctgaagcctcaactagtactgaggaacctcagtgaaacagattatttgcataagctggaaaaactgacttataagtctaatcacctcagaatgtgttgtttatggccactgtggtactgtgtttatgcttagcagctctgacagtgtgcaatgatgtgattggagttcacattgtcattgaagttcaagtaaatttgtgaccttggagagccatttagttcctaaaatgcttgaatttctgaactgaattatgtcacttttcaattaacatgggcatacattgccaattaactgttgctcacatcacatggccctgaccatggtttatatgctgtgataaactgatgccttgagttggatttttatcatgtcattttgcttcccctatcctaggtctgcaaagccttccacataatagctatgaagcaccgacaccgacacggacaccggacacgacacggacacggatacgtggatacctataatgtccaaaatatagaacgtagtacgggtgtcgtgtcggtgtcagacactgacacggacgcgtgtcggacaccggacacggcaaggagctggagtgtccgtgcttcatagcataatagaaagagcagtgctagcaattttttaatggacaaaacttaacatgtagttccataagtgttgttggtgctattttccaatcagaattagaaattcaccttggtaacctgcatttacatttaatagaatcctttgttaggcggattactgtgaaattccaattttgattgaaaaacaacacttacaacacctatagaaatgcatttaattttggcccttttttacacgtcttctaatatactattgtaggtaaaacaatatttgaaaccacaagcatgagcgagactcatttaataagaagtgcaacttagaatttttgtgctttttaataattttcatttaaaaataaagtgtattaaaacatgtgtgttaaagaatatgttgttaataattctctaataaag

SEQ ID NO: 14259 - DNA, 1069 bp, Glycine max; identical to SEQ ID NO: 14258
  Gm_smallRNAprecursor_7092

SEQ ID NO: 14260 - DNA, 1069 bp, Glycine max; identical to SEQ ID NO: 14258
  Gm_smallRNAprecursor_7093

SEQ ID NO: 14261 - DNA, 1069 bp, Glycine max; identical to SEQ ID NO: 14258
  Gm_smallRNAprecursor_7094

SEQ ID NO: 14262 - DNA, 1071 bp, Glycine max
  Gm_smallRNAprecursor_7095
taactgtgatgaagatttgtgtgtttcactgcagctgggtgacaatgaagcaaagagaaggcgttctgaagcctcaactagtactgaggaacctcagtgaaacagattatttgcataagctggaaaaactgacttataagtctaatcacctcagaatgtgttgtttatggccactgtggtactgtgtttatgcttagcagctctgacagtgtgcaatgatgtgattggagttcacattgtcattgaagttcaagtaaatttgtgaccttggagagccatttagttcctaaaatgcttgaatttctgaactgaattatgtcacttttcaattaacatgggcatacattgccaattaactgttgctcacatcacatggccctgaccatggtttatatgctgtgataaactgatgccttgagttggatttttatcatgtcattttgcttcccctatcctaggtctgcaaagccttccacataatagctatgaagcaccgacaccgacacggacaccggacacgacacggacacggatacgtggatacctataatgtccaaaatatagaacgtagtacgggtgtcgtgtcggtgtcagacactgacacggacgcgtgtcggacaccggacacggcaaggagctggagtgtccgtgcttcatagcataatagaaagagcagtgctagcaattttttaatggacaaaacttaacatgtagttccataagtgttgttggtgctattttccaatcagaattagaaattcaccttggtaacctgcatttacatttaatagaatcctttgttaggcggattactgtgaaattccaattttgattgaaaaacaacacttacaacacctatagaaatgcatttaattttggcccttttttacacgtcttctaatatactattgtaggtaaaacaatatttgaaaccacaagcatgagcgagactcatttaataagaagtgcaacttagaatttttgtgctttttaataattttcatttaaaaataaagtgtattaaaacatgtgtgttaaagaatatgttgttaataattctctaataaagaa

SEQ ID NO: 14263 - DNA, 1071 bp, Glycine max; identical to SEQ ID NO: 14262
  Gm_smallRNAprecursor_7096

SEQ ID NO: 14264 - DNA, 1060 bp, Glycine max
  Gm_smallRNAprecursor_7097
gaagatttgtgtgtttcactgcagctgggtgacaatgaagcaaagagaaggcgttctgaagcctcaactagtactgaggaacctcagtgaaacagattatttgcataagctggaaaaactgacttataagtctaatcacctcagaatgtgttgtttatggccactgtggtactgtgtttatgcttagcagctctgacagtgtgcaatgatgtgattggagttcacattgtcattgaagttcaagtaaatttgtgaccttggagagccatttagttcctaaaatgcttgaatttctgaactgaattatgtcacttttcaattaacatgggcatacattgccaattaactgttgctcacatcacatggccctgaccatggtttatatgctgtgataaactgatgccttgagttggatttttatcatgtcattttgcttcccctatcctaggtctgcaaagccttccacataatagctatgaagcaccgacaccgacacggacaccggacacgacacggacacggatacgtggatacctataatgtccaaaatatagaacgtagtacgggtgtcgtgtcggtgtcagacactgacacggacgcgtgtcggacaccggacacggcaaggagctggagtgtccgtgcttcatagcataatagaaagagcagtgctagcaattttttaatggacaaaacttaacatgtagttccataagtgttgttggtgctattttccaatcagaattagaaattcaccttggtaacctgcatttacatttaatagaatcctttgttaggcggattactgtgaaattccaattttgattgaaaaacaacacttacaacacctatagaaatgcatttaattttggcccttttttacacgtcttctaatatactattgtaggtaaaacaatatttgaaaccacaagcatgagcgagactcatttaataagaagtgcaacttagaatttttgtgctttttaataattttcatttaaaaataaagtgtattaaaacatgtgtgttaaagaatatgttgttaataattctctaataaaga

SEQ ID NO: 14265 - DNA, 1061 bp, Glycine max
  Gm_smallRNAprecursor_7098
gaagatttgtgtgtttcactgcagctgggtgacaatgaagcaaagagaaggcgttctgaagcctcaactagtactgaggaacctcagtgaaacagattatttgcataagctggaaaaactgacttataagtctaatcacctcagaatgtgttgtttatggccactgtggtactgtgtttatgcttagcagctctgacagtgtgcaatgatgtgattggagttcacattgtcattgaagttcaagtaaatttgtgaccttggagagccatttagttcctaaaatgcttgaatttctgaactgaattatgtcacttttcaattaacatgggcatacattgccaattaactgttgctcacatcacatggccctgaccatggtttatatgctgtgataaactgatgccttgagttggatttttatcatgtcattttgcttcccctatcctaggtctgcaaagccttccacataatagctatgaagcaccgacaccgacacggacaccggacacgacacggacacggatacgtggatacctataatgtccaaaatatagaacgtagtacgggtgtcgtgtcggtgtcagacactgacacggacgcgtgtcggacaccggacacggcaaggagctggagtgtccgtgcttcatagcataatagaaagagcagtgctagcaattttttaatggacaaaacttaacatgtagttccataagtgttgttggtgctattttccaatcagaattagaaattcaccttggtaacctgcatttacatttaatagaatcctttgttaggcggattactgtgaaattccaattttgattgaaaaacaacacttacaacacctatagaaatgcatttaattttggcccttttttacacgtcttctaatatactattgtaggtaaaacaatatttgaaaccacaagcatgagcgagactcatttaataagaagtgcaacttagaatttttgtgctttttaataattttcatttaaaaataaagtgtattaaaacatgtgtgttaaagaatatgttgttaataattctctaataaagaa

SEQ ID NO: 14266 - DNA, 1076 bp, Glycine max
  Gm_smallRNAprecursor_7099
ggaaatcattctctttgcagtctcccttgaaactcttcaaatcaccctcttgcatcttatagtagagagagatgccaatggacttgatagtgattccacgctcagcttcatattgaagagtatctgtcatcctcacatctcctgcagtctcttgtgctatgataccagcagcagccacaagagaatctatcagtgtggattttcctgcattcccaaagctagttagataaaactctgtactggtactacaaagtaaacaaaacaatgatgcagtacgtgatatgaagtaaaacttgacatcaacacaaaaaagtatattaacataccatgttcaacatgagcaataacagacatgttcctattgttgtgattgcgatccataatctgccggagttcatcaactgtgaacttcacctgcacatgatgaccactttgtcttagcatcccataaggagaaaaatattaaaaggaaaacaatgttgttaatggcggatggcgcatagcggaaaatggcggatgtcatggtggacaaaaaaaaaaatacatatatataaactcattgaaattgaaaaaaacaaaggattgcattcaaataaactaaaaaagtttcatgagtccatacaataatcaagtatcaacaccaaataaactcattaaagagttcaaaataagaaaatgataaaaacataatgcaaggttgtggtgtcaaacagaaaaaaaaaaataaaaaaagggactgtcgaaagtaaaaagagggtgtcaaatagaaaaagggaaaaaaaagctgcagacagaaaaaagggtgtcaaacagcaaaaacatatccaaaaaaaaagcttcaagatgcccaccagagttggatcacgatgttcgcgtttgggtcgtcgcctccgtgctcgtcgccgccgttctcgccgtgggtcgtcgctgctgtgctcgttgctgccgttcatgccgtgggtcgtcgctgctggcagctgtgtgcagcgggtcacgtgtggctgttgtcgtggttggttgcaggggccacacctgggttccgaggtcgcgctttgtgttggagcttggaggggtcg

SEQ ID NO: 14267 - DNA, 1190 bp, Glycine max
  Gm_smallRNAprecursor_7100
attgtaaagattgaaaaaaatattgttgacctgcatctatgaatggctgtcggtagtagatttcatccagtaattgatcgttggttagttgaaggatgttgtgcattctacgcttgagtgtatcaaaagaacagttgttaggaactcgcattggtgttggaatgagactttgaaaataaacaccagttttgttgtaactgattgatccatttggaaaaatgaaagctaatctggagttagtaatggtctgactacttttttctcccaaaaaatgacatagtaataagattgaatttggtttgtgaaattatgttgtgtgagattgtgtgtttatattgtgtctgtgttgtgttatttatagttgtatgagtattctgccacgttgatgtgtattggaatccaatgtttctttttccctagtaagtgatgtagcaagcgtccattataatttcagagtgaacaaagagattatgagttgtccatctcatgtcagttttgcacacgtctctaaaaattaaatgtatcacctgtaaaactgacatgaaatggacagctcataatgcagagtgttgttaatttggactgtgatttttcccatgtaattaaagcaacagacgttcatgatgattttcagagtgaataaagagatgataggctgtccatttcatgacagttttgcaggtgagatatttaatttttagagacgtgtgcaaattgcagagtattgtcaatttggattgtgagccaacaagtctcgtattcacctgataagtcctcaagattagaggttgagccatgttggttgcctggtgggtcattattgtgacagattatggcaaataactccacaaatggtagtgatgggttgttgtaaaaaatgttgaacatttgtcgaacatcagcatcatctcgcagaataaaagatgtgtacatataacgttgtcctgactcaaatatagggcgccgaaaatggagatgttggatatgttgttctgggtcaatgtttagtttttggtgaacaagttcaagcaattgtgtaaaggttatgaccttatcgaccatgaaagtttttgtgttgttactaacgaaggtggtgccctcattagtgttgcaaatttggccgtcgtagtaaacacaaacatatgtagttaggtgacacattgtggtaggcattgagatgaaaatttgaa

SEQ ID NO: 14268 - DNA, 1185 bp, Glycine max
  Gm_smallRNAprecursor_7101
ctatattgatcgaccccattttgttcattagcaacacaatgtacaaccaccagtcggtgtactcgaggttggcatgaccttcgatgacaaatcacaatgtattcgagcaataaaagaatacaacatcagaaatcattttgattgcagaacaatttactctgaccaaagaaggctacacttcttctgcaagttacatgaaaatggttgtacatggagcttgggcgcatgcaattcaaagaggcataacaaatggattatcaagagtatcagaggtcatcacacttgtctcgtgccgatgctcagacaagatcatcgccaactcgacaaacacgtcatagcacagatcatccaaccaattctcaaaacaaacccaactgtctccatcaagacattgattgcagagatcaaaacattcatgaattataccccatcctacaagaagacatggttagcaaagcaaaaagcgttggagatgattcatggaaactgggaagaatcatatgccaaactgccaaaacttttcggagctttgcaatcttgtgttcccgggactgtggtcgctgctcaaacaaaatccttgtatgaggggggagaaatagtaccgggcaaaagattgtttaaacgtgtcttttggtcatttggtccatgcattaatggttttgcatattgcaaacccattgtacaagtagatggtacatggctttacgaaaagtatactggcacactgttaatagctaccgcacaagatggagctaaccatatcttcccgattgcctatgccattgtagaaggggagacaacttcagcttgggggttttttctaaagaatttgagaagacatgttactttgcaaattaacatttctcttatttcagaccgacacccctcaattataagtgcctacaacaacccaagtaacttatgggtccaggacacatcccatttcttttgcctgcgccacattgcacaaaactttcttcgtggtaactcaaactgcaaacatttaaagaaaccacttatgttggctggtgagaatctattttatttattcgttataattttctttcaatcaaattttataacataatacattgattagatatttacagggtacgcatacacggagaagatgcactggcgacatcttggggatattcgtgcgaataagccaagtgcagctgaatg

SEQ ID NO: 14269 - DNA, 1039 bp, Glycine max
  Gm_smallRNAprecursor_7102
agcaataaaagaatacaacatcagaaatcattttgattgcagaacaatttactctgaccaaagaaggctacacttcttctgcaagttacatgaaaatggttgtacatggagcttgggcgcatgcaattcaaagaggcataacaaatggattatcaagagtatcagaggtcatcacacttgtctcgtgccgatgctcagacaagatcatcgccaactcgacaaacacgtcatagcacagatcatccaaccaattctcaaaacaaacccaactgtctccatcaagacattgattgcagagatcaaaacattcatgaattataccccatcctacaagaagacatggttagcaaagcaaaaagcgttggagatgattcatggaaactgggaagaatcatatgccaaactgccaaaacttttcggagctttgcaatcttgtgttcccgggactgtggtcgctgctcaaacaaaatccttgtatgaggggggagaaatagtaccgggcaaaagattgtttaaacgtgtcttttggtcatttggtccatgcattaatggttttgcatattgcaaacccattgtacaagtagatggtacatggctttacgaaaagtatactggcacactgttaatagctaccgcacaagatggagctaaccatatcttcccgattgcctatgccattgtagaaggggagacaacttcagcttgggggttttttctaaagaatttgagaagacatgttactttgcaaattaacatttctcttatttcagaccgacacccctcaattataagtgcctacaacaacccaagtaacttatgggtccaggacacatcccatttcttttgcctgcgccacattgcacaaaactttcttcgtggtaactcaaactgcaaacatttaaagaaaccacttatgttggctggtgagaatctattttatttattcgttataattttctttcaatcaaattttataacataatacattgattagatatttacagggtacgcatacacggagaagatgcactggcgacat

SEQ ID NO: 14270 - DNA, 1116 bp, Glycine max
  Gm_smallRNAprecursor_7103
ttacatgatcaagccgcaagtcacgtatccaggaaatggcttctataaatataaggcttccactttatgcactgggggtacgccataattccaactttgttttggcagaaacaaaattgcccctataatctcacaaacaaattccaaaaccaaactaaccattttcagcaaaagtaggaacattgatattgcactttaggaagataacatttggttccttccagtcgagggaagttgtgaccactgcacttattacgttggatatatacaacaagctcaatctaattggcaatcacaaacagcttccttagaggttctatcaaacacattcgaggatgtttatataaataccgtaccatctgataccttttcattcattctacgccatgcacatgcacagcaccaggaaatggttgctaggttaaccttgaagtttgggagaattctcaacaacatgaataaagcttcaaagcaatcttctgcaccatgaagcatcgacacggacacggacaccggacaccggacaccggacacagacacgtggacacctgtaatgtccaaaatatagaatgtagtacgggtgttgtgtcggtgtcggacactgacacggacacatgtcggacaccggacacgacaagggactagaatgtccgtgcttcataattttttgctaaataaatgttcataaacctaaaacttgccagaccttcatgtgatcgcatccaaaaaatagatgtcaagtatatatattcttgattgttatcataaaaaggacaggtgctagggcattgaacgtctttggaaatgagatgttgttttgtaggtagattctccctggccattctccataatataaaagctttcattttctgtgaattttttacacaccaaatgagcatccaatcaccctagtgcggtaggcttcattctgatcgaatgatagattccacaaattattttaaacaataaagcttgctaatatattaaacttgataacgagaattttaaaggtattgattgaagaaattttaatatattctacttaatgtttttaattattaaaaataaattactatttttttaaaattttaatgacgtaatttttaattaaataat

SEQ ID NO: 14271 - DNA, 1036 bp, Glycine max
  Gm_smallRNAprecursor_7104
ccataattccaactttgttttggcagaaacaaaattgcccctataatctcacaaacaaattccaaaaccaaactaaccattttcagcaaaagtaggaacattgatattgcactttaggaagataacatttggttccttccagtcgagggaagttgtgaccactgcacttattacgttggatatatacaacaagctcaatctaattggcaatcacaaacagcttccttagaggttctatcaaacacattcgaggatgtttatataaataccgtaccatctgataccttttcattcattctacgccatgcacatgcacagcaccaggaaatggttgctaggttaaccttgaagtttgggagaattctcaacaacatgaataaagcttcaaagcaatcttctgcaccatgaagcatcgacacggacacggacaccggacaccggacaccggacacagacacgtggacacctgtaatgtccaaaatatagaatgtagtacgggtgttgtgtcggtgtcggacactgacacggacacatgtcggacaccggacacgacaagggactagaatgtccgtgcttcataattttttgctaaataaatgttcataaacctaaaacttgccagaccttcatgtgatcgcatccaaaaaatagatgtcaagtatatatattcttgattgttatcataaaaaggacaggtgctagggcattgaacgtctttggaaatgagatgttgttttgtaggtagattctccctggccattctccataatataaaagctttcattttctgtgaattttttacacaccaaatgagcatccaatcaccctagtgcggtaggcttcattctgatcgaatgatagattccacaaattattttaaacaataaagcttgctaatatattaaacttgataacgagaattttaaaggtattgattgaagaaattttaatatattctacttaatgtttttaattattaaaaataaattactatttttttaaaattttaatgacgtaatttttaattaaataataa

SEQ ID NO: 14272 - DNA, 1037 bp, Glycine max
  Gm_smallRNAprecursor_7105
tgacatttattgtcaaataataatatgataaagatcatgttacgttgttgctaaccataatcttacatcaagtgattggacacaaatgttaatgtgttgaagttaaggttaaatcatttgcataataccgagttcgatcattgacggaaataattattaatcaagtttttaaggttatgatttgtaaaaaacactcacctcctttgaaatactttttttaaggttatgattttttaaatgatcattctcttaaacattttcattgtataatttcaattgaaatacacacaaaaagaaaactaattcgtatcaggagtatttttatttttattaaaaagaaaagtgagtaataaaaataggaaaaaaacaggacaatgtaattcgcatgggcctcttaggtccttcccctgagagaaagaagggtgttgttaggtgcacccagcattattgctagtgcacccaacacttaatggtaaaagtaaaaaatgttcctatataaaaggtttacggatcaagttgattcatatgcttaaaatatcaacatacggatcaacttgatctatatgcttaaaataaaaacatatgaatcaatttgatccataaaaggcttacagatcaacttgatccgtaagccttttacggatcaacttgatccgtatgcttaaaatatcaacatatggatcaacttgatcttaaaaggcttatggatcaagttgatccctaagaattttatggatcaagttgatccgtatatttaaaatatcaacatatgaattaacttgatccataagtcttttacgaaccaccctctcatgcacacccagcacaaatgaggggtagttttggcattttgaaaagaatgcaggggttcacctagcaaacccgagaacgaacgagtattttcacaaagcccggcccaacagaaacaacaacacggtgcgttttcaggcgcatatataaaccattgttagggttttgtgtcaccagcctcagcagaagcagaacgaggagaagcagaaggagcaaaagcaatggcg

SEQ ID NO: 14273 - DNA, 1116 bp, Glycine max
  Gm_smallRNAprecursor_7106
tgacatttattgtcaaataataatatgataaagatcatgttacgttgttgctaaccataatcttacatcaagtgattggacacaaatgttaatgtgttgaagttaaggttaaatcatttgcataataccgagttcgatcattgacggaaataattattaatcaagtttttaaggttatgatttgtaaaaaacactcacctcctttgaaatactttttttaaggttatgattttttaaatgatcattctcttaaacattttcattgtataatttcaattgaaatacacacaaaaagaaaactaattcgtatcaggagtatttttatttttattaaaaagaaaagtgagtaataaaaataggaaaaaaacaggacaatgtaattcgcatgggcctcttaggtccttcccctgagagaaagaagggtgttgttaggtgcacccagcattattgctagtgcacccaacacttaatggtaaaagtaaaaaatgttcctatataaaaggtttacggatcaagttgattcatatgcttaaaatatcaacatacggatcaacttgatctatatgcttaaaataaaaacatatgaatcaatttgatccataaaaggcttacagatcaacttgatccgtaagccttttacggatcaacttgatccgtatgcttaaaatatcaacatatggatcaacttgatcttaaaaggcttatggatcaagttgatccctaagaattttatggatcaagttgatccgtatatttaaaatatcaacatatgaattaacttgatccataagtcttttacgaaccaccctctcatgcacacccagcacaaatgaggggtagttttggcattttgaaaagaatgcaggggttcacctagcaaacccgagaacgaacgagtattttcacaaagcccggcccaacagaaacaacaacacggtgcgttttcaggcgcatatataaaccattgttagggttttgtgtcaccagcctcagcagaagcagaacgaggagaagcagaaggagcaaaagcaatggcgccgaagaagccgagaaccacgacaaggaaccctgatttggttagggggattggcaagtattcgaggtcgcagatgtacc

SEQ ID NO: 14274 - DNA, 1058 bp, Glycine max
  Gm_smallRNAprecursor_7107
aatgtctgtcatttcaggactgttatcagttttcagccacgagtccctaacttttttttatcctaccacgctacaacctatccgctattctactggttcaaccagaacctccaacacctgggttaatcccaatgctaagtccactgttcctggtcccaatcaacccagtgtcatgcttacaaactcatcatctcatggtaatggtgcaactggctctacttggataccagattctagagccagttttcatgttactaatgattctcaaaacattaaacaatttactcattttgatggacttgagcagattttcataggcaatggtgatggtttaagtatctgcaacactggttcctcaacttttctttctcctaatgatactagcataacctttaaacttcataaattgttacatgttccttcaatttcaaaaaacctgttaagcatggttatcaaactctcgagttaactcttacgagtttacgagtccacttgtcctctacgagttgactcttgagtaaactctttttttagtagactctgggtaaactctataaactctaagtaaactcggtagactctcgagtttaccaccgagtcaatgagttagcaagttaaaaaaattagaccaaaatgtaagtcatttttgatttttttttgtctatttagcattcaacataccttcatttagcttgttattctcaaatacaaaattctcacctttaataatatcaaacatttgttctctaataacatcaaaccttcgatgagaatgatctatcactactataacctctacaagttattgtctagtggtgatgtattactagacttggttatttaaatattctgaactttatgatttactgttttggtttattatattattgaaatgtttaattaatatgttatttatagatattttgttattatttttatatgaagtagactcttacgagtctacgaatcgagtctatgaaactctcacgattctatgtaaactctcgagtttgataaccttgctgttaaatgtgagtcagtttgccaaagataactct

SEQ ID NO: 14275 - DNA, 1053 bp, Glycine max
  Gm_smallRNAprecursor_7108
tgtctgtcatttcaggactgttatcagttttcagccacgagtccctaacttttttttatcctaccacgctacaacctatccgctattctactggttcaaccagaacctccaacacctgggttaatcccaatgctaagtccactgttcctggtcccaatcaacccagtgtcatgcttacaaactcatcatctcatggtaatggtgcaactggctctacttggataccagattctagagccagttttcatgttactaatgattctcaaaacattaaacaatttactcattttgatggacttgagcagattttcataggcaatggtgatggtttaagtatctgcaacactggttcctcaacttttctttctcctaatgatactagcataacctttaaacttcataaattgttacatgttccttcaatttcaaaaaacctgttaagcatggttatcaaactctcgagttaactcttacgagtttacgagtccacttgtcctctacgagttgactcttgagtaaactctttttttagtagactctgggtaaactctataaactctaagtaaactcggtagactctcgagtttaccaccgagtcaatgagttagcaagttaaaaaaattagaccaaaatgtaagtcatttttgatttttttttgtctatttagcattcaacataccttcatttagcttgttattctcaaatacaaaattctcacctttaataatatcaaacatttgttctctaataacatcaaaccttcgatgagaatgatctatcactactataacctctacaagttattgtctagtggtgatgtattactagacttggttatttaaatattctgaactttatgatttactgttttggtttattatattattgaaatgtttaattaatatgttatttatagatattttgttattatttttatatgaagtagactcttacgagtctacgaatcgagtctatgaaactctcacgattctatgtaaactctcgagtttgataaccttgctgttaaatgtgagtcagtttgccaaagataac

SEQ ID NO: 14276 - DNA, 1035 bp, Glycine max
  Gm_smallRNAprecursor_7109
caatgctaattccactcttttttttttttttgagaatctgctaattgattgcgtcaatttaacttgaaacaggttttgatagtagttttgtatcagcaggagtggggattgtggggccaaaaatagaggggaacaggaacagatttttaaactgtggaattcggtcaatccgcaaatggattgaagttgtattttgatggatattggataacggtttttttacgagggggcttttgtttactattttgaatttgcatgcagtgttgctgttttttcaaatattgttttatttttttaattacctgtattgactaatgaattatacttgtttgcagttatttgctggaaatgatgctgatgaattcggttcaattttgaatcaacaacaaactcccaagatattaatcaccacttgccgcttccattctactgtatgttccctatatgcaatttgtttttaatctctgtctagtcctatgaagcacggacaccgcagtcccttgccgtgtccggtgtccgacacgcgtccatgtcagtgtccgacaccgacatgacacccgtactacgttctatattttggacattataggtgtccacgtgtccgtgtcgtgtcggtgtcggtgcttcataggtttagtttgtctggcagaagttcttttgaagcaataactctttactccttagtttgtttttatgttttaggttcacacttttagaagtgtagaataagaatattaccaatgaaataatgacttaattgtatagcatgtttccgacttttggctaaaatatgaattgatctgcagaggggacctgcctttatatcggagttgctttcagttataccaaatgcacattacttcaagagaggaacatatgatctgaaaaaggtgttgtgtttctctctgtctcttctccatgtgagggaaaaacataaaacattagaacttgtttgagcatttctttctaattacattttaaattgcagattgtagaatatgcaaagaagaaggacttcacctctgttatagttgt

SEQ ID NO: 14277 - DNA, 1035 bp, Glycine max; identical to SEQ ID NO: 14276
  Gm_smallRNAprecursor_7110

SEQ ID NO: 14278 - DNA, 1034 bp, Glycine max
  Gm_smallRNAprecursor_7111
aatgctaattccactcttttttttttttttgagaatctgctaattgattgcgtcaatttaacttgaaacaggttttgatagtagttttgtatcagcaggagtggggattgtggggccaaaaatagaggggaacaggaacagatttttaaactgtggaattcggtcaatccgcaaatggattgaagttgtattttgatggatattggataacggtttttttacgagggggcttttgtttactattttgaatttgcatgcagtgttgctgttttttcaaatattgttttatttttttaattacctgtattgactaatgaattatacttgtttgcagttatttgctggaaatgatgctgatgaattcggttcaattttgaatcaacaacaaactcccaagatattaatcaccacttgccgcttccattctactgtatgttccctatatgcaatttgtttttaatctctgtctagtcctatgaagcacggacaccgcagtcccttgccgtgtccggtgtccgacacgcgtccatgtcagtgtccgacaccgacatgacacccgtactacgttctatattttggacattataggtgtccacgtgtccgtgtcgtgtcggtgtcggtgcttcataggtttagtttgtctggcagaagttcttttgaagcaataactctttactccttagtttgtttttatgttttaggttcacacttttagaagtgtagaataagaatattaccaatgaaataatgacttaattgtatagcatgtttccgacttttggctaaaatatgaattgatctgcagaggggacctgcctttatatcggagttgctttcagttataccaaatgcacattacttcaagagaggaacatatgatctgaaaaaggtgttgtgtttctctctgtctcttctccatgtgagggaaaaacataaaacattagaacttgtttgagcatttctttctaattacattttaaattgcagattgtagaatatgcaaagaagaaggacttcacctctgttatagttgt

SEQ ID NO: 14279 - DNA, 1034 bp, Glycine max; identical to SEQ ID NO: 14278
  Gm_smallRNAprecursor_7112

SEQ ID NO: 14280 - DNA, 1101 bp, Glycine max
  Gm_smallRNAprecursor_7113
agatttatcaagttcaaataatactggggagagtatctccatttgtttctgaagtggcattggatctataggttaaaattgtagtgtgcattgtggttatgtgaatgttgccacatttttgcattggatctataggttatgtcatgttttgttgtgattcatgatcatgaatgattcacggctgatactttagagcatgcttggatgaagggaatagttaggaaagggaacaaaatggagataaaccaatctatttctgtacccatttttacccttccttgcatctcttccctaacatacatcctaggatttcagaatcacaagtactcttttcttaggtttctgatatttgtttagtttattttgagctcttcaagaattgaattcatctacttactttcttctgaaatcattacaggatgacaatattgtggatatttcaacagcatgtaatgattatcctaattcagatgaatactattcatcaaaaaggtttaaatcatcacatgatgctgtccatggtggaatatgttttctaccttctaaccttgaagcaaaccaagagaaaaacgagagtatgtttcaagatagtttctggggagcagagacatcatcttgtgactcgacactagataaacctttggagatcaattatattgatatttctagttctcctttcactccatggagatgagaaaattaatatcattgaagaccagtcaatttcgtatgatgggaactaagatctaagttacctccattagattggtagtagctattttggagtatgtcataaaatatgactagttctacaatagcaaatttattagaaaacaattctgtattagaaattgcataatggtagttatgcataaaaaataactatgggcagttatgtattaagatttaggagcttatatcctaacagtaaatctattagaaagtattaaaaactgcatgatagcagttatgcatagaaaacagccactagtagttatgtattaagagcatatatgtgatggtattagtagattgtgtaattaggaagtatgtgtagttgtttgcagtttatggacagagaatactctatgtaggagactt

SEQ ID NO: 14281 - DNA, 1097 bp, Glycine max
  Gm_smallRNAprecursor_7114
atttatcaagttcaaataatactggggagagtatctccatttgtttctgaagtggcattggatctataggttaaaattgtagtgtgcattgtggttatgtgaatgttgccacatttttgcattggatctataggttatgtcatgttttgttgtgattcatgatcatgaatgattcacggctgatactttagagcatgcttggatgaagggaatagttaggaaagggaacaaaatggagataaaccaatctatttctgtacccatttttacccttccttgcatctcttccctaacatacatcctaggatttcagaatcacaagtactcttttcttaggtttctgatatttgtttagtttattttgagctcttcaagaattgaattcatctacttactttcttctgaaatcattacaggatgacaatattgtggatatttcaacagcatgtaatgattatcctaattcagatgaatactattcatcaaaaaggtttaaatcatcacatgatgctgtccatggtggaatatgttttctaccttctaaccttgaagcaaaccaagagaaaaacgagagtatgtttcaagatagtttctggggagcagagacatcatcttgtgactcgacactagataaacctttggagatcaattatattgatatttctagttctcctttcactccatggagatgagaaaattaatatcattgaagaccagtcaatttcgtatgatgggaactaagatctaagttacctccattagattggtagtagctattttggagtatgtcataaaatatgactagttctacaatagcaaatttattagaaaacaattctgtattagaaattgcataatggtagttatgcataaaaaataactatgggcagttatgtattaagatttaggagcttatatcctaacagtaaatctattagaaagtattaaaaactgcatgatagcagttatgcatagaaaacagccactagtagttatgtattaagagcatatatgtgatggtattagtagattgtgtaattaggaagtatgtgtagttgtttgcagtttatggacagagaatactctatgtaggagac

SEQ ID NO: 14282 - DNA, 1043 bp, Glycine max
  Gm_smallRNAprecursor_7115
taggttaaaattgtagtgtgcattgtggttatgtgaatgttgccacatttttgcattggatctataggttatgtcatgttttgttgtgattcatgatcatgaatgattcacggctgatactttagagcatgcttggatgaagggaatagttaggaaagggaacaaaatggagataaaccaatctatttctgtacccatttttacccttccttgcatctcttccctaacatacatcctaggatttcagaatcacaagtactcttttcttaggtttctgatatttgtttagtttattttgagctcttcaagaattgaattcatctacttactttcttctgaaatcattacaggatgacaatattgtggatatttcaacagcatgtaatgattatcctaattcagatgaatactattcatcaaaaaggtttaaatcatcacatgatgctgtccatggtggaatatgttttctaccttctaaccttgaagcaaaccaagagaaaaacgagagtatgtttcaagatagtttctggggagcagagacatcatcttgtgactcgacactagataaacctttggagatcaattatattgatatttctagttctcctttcactccatggagatgagaaaattaatatcattgaagaccagtcaatttcgtatgatgggaactaagatctaagttacctccattagattggtagtagctattttggagtatgtcataaaatatgactagttctacaatagcaaatttattagaaaacaattctgtattagaaattgcataatggtagttatgcataaaaaataactatgggcagttatgtattaagatttaggagcttatatcctaacagtaaatctattagaaagtattaaaaactgcatgatagcagttatgcatagaaaacagccactagtagttatgtattaagagcatatatgtgatggtattagtagattgtgtaattaggaagtatgtgtagttgtttgcagtttatggacagagaatactctatgtaggagacttttgtctctag

SEQ ID NO: 14283 - DNA, 1043 bp, Glycine max
  Gm_smallRNAprecursor_7116
tcaatttcactggctacgtctccaagaccgcgcaaacgtcgccggattttgccaagaagctcgccaccttcgtcggtgaattagtgatctccgtgatcagcgaacagtgctccgacattgctaaggctttcttgcccgctctctcgcaggatattcttctaatttcgtcctccgacaccaccatccccgccgccgcctaaaggaacgttgtcatcgtcaccgaagagaaaccacttgttcctagcgtcattgaagagaacctctttgacgactctagagcatctcaaataccaatcggatgcagagatgtggatttggatttcatttttttgcagatctaattgtgtgccagatctagttttgatcttttggtagatctagttttgggtgttgctagatgcacccagcattattgctggtgcacccaacattttttaaaaatgtcaaaattatctctgtgcttttttcgtatttgtgctgggtgtgtatgagggtggtctgtaaatcgtacagatcaagttgatccgtaaggttgatacggatcaagttgatccgtatgttgatgttaaacatacggattaacttgatccgtaaaaggcttacggatcaacttaaaaggcttacggatcaaggatatttcaatcttttcctcttaagtgctaggtgtaccaacaataatgctgggtgcacctagcaacaccctctagttttgtggaatgcaaggtaacgagcacgagtttcatatactcgatagtcaaccagtagattactaagaattcattatcaaaataataatagaatatttataaataacatactagttaaacatttggataatataattaaataaaataataaataataaattttacaatatttgtagatgttacagcagtattaggtcatttgttgttattaaacgtgagaattcttttattcgaaaacaacacactagataaaggtatgataaacactaaatagataagaaacaatccaaaatgacttccatttaagaatttataaagtttattaaaaaagaattt

SEQ ID NO: 14284 - DNA, 1221 bp, Glycine max
  Gm_smallRNAprecursor_7117
gagctgtgccttgagtgaactttggatcctcacatctatagcttccatctggtccgattccaaagccttttggatcagcaaagacattctccagaagctgactgcggggtggaagagggcttttgtctgcaaactcaacagcgtcctcgaggatctcatcgattttcttctctatggtcttcaattcttgctcattggctaaattgttctcaaaaaggtatttcttcaatgcagtgatggggtccctaccggcatagtgttccttctcagctgccaaagcagaaagagatttatgattagtagttggttatccattttttgggtaaatggcaaaccaatcaaatcttcatttacatagcttggggtagaacatataaatgcttatacgaattggttcagcataaacataaatcttctcctttaaatcaagacctgttaagaatagtcccacatcgggtaattcatgaacatgataagtgcttatatagctgggtagatcacccccttatgaaccggtttttaaggggacctttcggatgccttggctgcactataaaatttaatatggtatcagagccatattctgcttctgtccggtgggtgccgtcagccctcgctttgtggtgacgagccctgactcgagggggcgtgttaagaatagtcccacatcgggtaattcatgaacatgataagtgcttatatagctgggtagaccacttccttatgaaccgatttttaaggggacctttcggatgccttggctgcactataaaatttaataagaccatgtttataattttatgtatactctcagccaggttaataacagcagtaaccttcgtttcaactccacttaccattggcttttaaaactttctttttaatgaagatatgtagctaaggaatcaaaatatattgtagtcaagccttaacaatttttgaaaaactattccaaatttgaagataataactaaagttcaagaaattgtttgtttaggccattgaactcttcaccaattaagcataatacttttacactgttaaaaggtttagaatgcaaccgcaagttcaactccatcatttaatattgctaatccaagactaaattaagcaaactaaacgccatagtaaatggattatgcatagtgaaactgaagatgaataccaccagaaatgcaaaggaacatcagcacatgtacttcaaaattaagaacataggga

SEQ ID NO: 14285 - DNA, 1125 bp, Glycine max
  Gm_smallRNAprecursor_7118
gccaatatcacctcaagtctaaaagaaaagctggtgcctcttcttagagaatttaaagactgttttgcttgggattaccacgaaatgcctgggttaagcagagaaatggtcgaaatgaaattacctattaaggaaggaaaaagaccagtaaaacaactaccaagaagattcgcaccagaagtcatgtccaaaattaaggaagagatcgaaaggctgctgaggtgtaaattcatcagatctgccaggtatgtcgaatggttagcaaatatagtccctgttattaaaaagaatggaactcttagagtatgcatagattttagggatttaaataatgctacacctaaagatgaatatgctatgccagtagcggaaatgttggtagattcggcagctggcttcgaatttttaagcatgttagatggttattctggttataaccaaatttttattgctgaaagtgatgtgtcaaaaacagcgtttcgatgcccaggtgctttaggcacttatgaatgggtggttatgccctttgggttgaaaaatgctggggccacttatcaaagggccatgaattccatgtttcatgattttattgacacatttatgcaagtttatattgatgatataatcatcaaatcctcttcagaagatagccatttggattaccttaggcaatctttcgaacgaatgaggaaacatggattaaaaatgaatccattaaaatgtgctttttgtgtgcgtgcaggagatttccttggttttgtggtgcataaaaaaggcattgagataaatcaaaacaagacaaaggctattcttgagacgaagcatccttcgaccaaaaaacagcttcagtctttgctaggaaaaatcaacttcttgaggcgattcatttcgaatctaagtggcaaagctcaaattttttcgccattacttcgactcaagaaagatgaaccattcagatgggatgaagagcatcaaaaggctttcgatgaaattaaagaatatctgatcaagcctcccgtgttaatgcctcctagtcgaaataagactatgaagttgtatattgctgcgtctgacaagaccattggtagcatgttggctcaggaagatgatgatggcatagaacat

SEQ ID NO: 14286 - DNA, 1046 bp, Glycine max
  Gm_smallRNAprecursor_7119
aggtatgtcgaatggttagcaaatatagtccctgttattaaaaagaatggaactcttagagtatgcatagattttagggatttaaataatgctacacctaaagatgaatatgctatgccagtagcggaaatgttggtagattcggcagctggcttcgaatttttaagcatgttagatggttattctggttataaccaaatttttattgctgaaagtgatgtgtcaaaaacagcgtttcgatgcccaggtgctttaggcacttatgaatgggtggttatgccctttgggttgaaaaatgctggggccacttatcaaagggccatgaattccatgtttcatgattttattgacacatttatgcaagtttatattgatgatataatcatcaaatcctcttcagaagatagccatttggattaccttaggcaatctttcgaacgaatgaggaaacatggattaaaaatgaatccattaaaatgtgctttttgtgtgcgtgcaggagatttccttggttttgtggtgcataaaaaaggcattgagataaatcaaaacaagacaaaggctattcttgagacgaagcatccttcgaccaaaaaacagcttcagtctttgctaggaaaaatcaacttcttgaggcgattcatttcgaatctaagtggcaaagctcaaattttttcgccattacttcgactcaagaaagatgaaccattcagatgggatgaagagcatcaaaaggctttcgatgaaattaaagaatatctgatcaagcctcccgtgttaatgcctcctagtcgaaataagactatgaagttgtatattgctgcgtctgacaagaccattggtagcatgttggctcaggaagatgatgatggcatagaacatgcaatttattatcttagtcgtgtactaaatgatgcagaaactagatatactgccatagaaaaactttgtctttgtctgtatttctcttgtgcaaaacttaagcaatatataaagcctgttgatgtttatgtgttttctcattatgatattattaagcacatgtt

SEQ ID NO: 14287 - DNA, 1083 bp, Glycine max
  Gm_smallRNAprecursor_7120
attccaagtatgttggcacccatcaacaaacttacaagttgaaataatctcgcacccatctacaaactaagtggtataactgtgttagtgtaataagtacttatttatgcatgtatttacttacttattcaatcattcttctcacgacaatctattttcttgcataggtacaaataacgggcgttagttttcaagtcctccctatttaaaaatgtaagtgagtaagcccgtatatcaaatatgcctcgaagcctttgaatctgggccttctgaagcaggccttgtcttctacatttgccagactatttttcttattattagtttagcaaaattatatttttggtcctctattttattagtcttccaataatttaatttacgaattgtgtcttcttattttgtaaaatcgtgcaatgttggtcccccaggtcacaattgggcgttgaccgttagcaagtgatgttgattaccatgtgtcatgttcttattgaatgatgactgtcacgtgtcatgttctgattggacgtcaactccatgaaagatgaaatgtattgttgttttcattgaccaatcagaacatgacacgtgacagtcaacatcacttgtcacgtgtcatgttctgattggacatcaactccaacattgcacgattttacaaaataggataactcaatttgtgaattaaattactaggggaccaaatccgaaactaaagataaactaggagatcaaaaatgcaattttgcgtattagttttaagaaagttttttatttgtaccttcttttttctctcgctacatccttattttttttatttttaatatttaataaattagtttgcaaaaaaaataatataattctaatttcttaaatataaaaaaatgtttaaagagaaaaaaggaggttgcaaatagaattaccggccttatatttaatcctactgttatagaaaagaattaattttttattttttgaacttgcagtgaggttgacaaaaaaaaaaaaaaacttgcttgtccaatattatttttttatataaaaatggtcgaaatatagatagggatattatcaaactgtggagtt

SEQ ID NO: 14288 - DNA, 1085 bp, Glycine max
  Gm_smallRNAprecursor_7121
tacttgggagaagatctctggctaatgatgaacgaagaaaaaggtagttacacccccctgacaacaaaacaccatcataacttgatcagagaaaaagaaagaaacgaaaaggaagtaatgatgaaaaccttttgcgcacaagtgaaaccccccaggtcaaaatgcttcatcattacaccaatctgcaaactaccaacatctttaattcatccaaaaacaaaaccccacgactcagatctacctatatttaagaaaaaaacaaaaatttattactaattcaaaaatcccccaaaaaaaaaacatagagagtgggagaccaataaacctagtatgttactatgttgtcatggtttgattccatacatccgtatgtatttaatgtaagaaaaaatatctgttaaaagatgtaaacctcggatgaatctcggtgtatgtttctggtcctcggccggaggataccaaggtttcggtcgaaaaagaatttggaagcatataattggggggaatgaagcctggtccgacaacactatgtattccttgaccacaagcatagtagtctacacaagatcaagatgaagaagggtcctcgagccagacaacattcccctcaaaagacaaagcttccgtcccaaatggcccttttttcttgttgaaccgctcagaaagaggaagagagagagagagggtttaatttgttaatttcatggctcactcactcactattactctcttttcactctatatccctcccccatgagtctcgcctatcttcaaggggggtctgagagagacatggagagagagagaagatagtattgtggttgtgatgatgaatgggtgaatgagaatgatatgagaaagaagagaagggggggttataacaagagtaaaaataaaggaggagaggaaagccaacgtcaaaaaagacaaaggattggtgcagggtagaccctaccagctcggttctcacttccagaaatgaccacgaccccatgcactcattctttatttctctttctaattaaagacttttttttcttttaactcaatgtatctcctatttgagaattttttctgaatatcca

SEQ ID NO: 14289 - DNA, 1085 bp, Glycine max; identical to SEQ ID NO: 14288
  Gm_smallRNAprecursor_7122

SEQ ID NO: 14290 - DNA, 1086 bp, Glycine max
  Gm_smallRNAprecursor_7123
tacttgggagaagatctctggctaatgatgaacgaagaaaaaggtagttacacccccctgacaacaaaacaccatcataacttgatcagagaaaaagaaagaaacgaaaaggaagtaatgatgaaaaccttttgcgcacaagtgaaaccccccaggtcaaaatgcttcatcattacaccaatctgcaaactaccaacatctttaattcatccaaaaacaaaaccccacgactcagatctacctatatttaagaaaaaaacaaaaatttattactaattcaaaaatcccccaaaaaaaaaacatagagagtgggagaccaataaacctagtatgttactatgttgtcatggtttgattccatacatccgtatgtatttaatgtaagaaaaaatatctgttaaaagatgtaaacctcggatgaatctcggtgtatgtttctggtcctcggccggaggataccaaggtttcggtcgaaaaagaatttggaagcatataattggggggaatgaagcctggtccgacaacactatgtattccttgaccacaagcatagtagtctacacaagatcaagatgaagaagggtcctcgagccagacaacattcccctcaaaagacaaagcttccgtcccaaatggcccttttttcttgttgaaccgctcagaaagaggaagagagagagagagggtttaatttgttaatttcatggctcactcactcactattactctcttttcactctatatccctcccccatgagtctcgcctatcttcaaggggggtctgagagagacatggagagagagagaagatagtattgtggttgtgatgatgaatgggtgaatgagaatgatatgagaaagaagagaagggggggttataacaagagtaaaaataaaggaggagaggaaagccaacgtcaaaaaagacaaaggattggtgcagggtagaccctaccagctcggttctcacttccagaaatgaccacgaccccatgcactcattctttatttctctttctaattaaagacttttttttcttttaactcaatgtatctcctatttgagaattttttctgaatatccat

SEQ ID NO: 14291 - DNA, 1126 bp, Glycine max
  Gm_smallRNAprecursor_7124
gcatcattcaagtatccaatagtggtatagaaattagcacctaccttgttttttgtcaacacataatcaatgtctttttgagaccacaatctactacgtttgcctggatcatttggagattcttgaaatacaatattccttcccatttcttgtagcaaatcatgcatccccaacttcttcatcctatccagagttaccaaacatctttcgatcaaaatgtcaattccaatttcgggatgataaccgcagttttttaagatatttttcacttcatctatgtccatccctttgaagaaacaggcaatatctaaaaacattttctgatacggaggttgtaaactatcataactaattttcagtgtgtcttggattttggagtgcggaaaacttcttatttgttctaaagcactatgccaaacctcaacggttcttccataaagatgggaacccaatacctcaagtgccaatggaagacctcttgcatattcaaccacttctttgcacaaattcagatactcttctttaggttgatcttgcttaaatgctttcaaacaaaagagcttcagggcttcattttgggctaagcctttagccttacaagtcagatgcactccatgcgtctttagcaggtgcttatctctagttgtgattattactctactccctgaaccaaaccattcttgctttccagccaaattctccagttggcttaactcacttacatcatcaagaacaagaagaatctttttgttgcttaaagaatttgctattatatttttcccatcatgaagattataaaaatcactgcttcttacattaagatgaaaaagaagttccttttgaatgtgaactaagccatttgtcttagacacctctctaatgttttcaagaaagcaactaacattgaaatcccctttgattgcttcgtagacaaatctagcaatggttgtcttacctatgcctcccatgccccatagtcctatgaagcgaacatcatttaaacttatgcccatgagtgaatacacttccttcatccgtgaatcaatcccaacaaggttatctgtgcaacatggcaacctgggaattatttttttctgtatgtgtccaacaattgtttcaatcaatg

SEQ ID NO: 14292 - DNA, 1037 bp, Glycine max
  Gm_smallRNAprecursor_7125
agggtatacgtgtttcaattcagtttagctcgaacgcctaattcgattctgtggtcacacctagatagaggggtatgttgaaagtcccacatgactatgaggaaaaataagacatgttgaagtcccacattgaataaagatagtaccgaaataaactatataagtggggagcaatcaggcttaactcaaccctacaaaatcggcttgtaaggtgaggattgctcctcacttatatagtttatctcggcactatctttatttgatgtgggacttcaacatgccccatttttcctcatgtttaccaatcatgtggaactttcaacacacacctctatctaggtgtgaccacagattcactcaattatcccccatccctatagaacaaccaatacttttattggcattaacaggggcttccatatcaactttcaaagagtatctcaagaagaaaacagcacacagatttggttttgatctatgaagcacggacaccccaactccttgccgtgtccggtgtccgacacgcatctgtgtcagtgtccgacaccgacacgacacccgtactacattttatattttggacattacaggtgtatccgtgtcgtgtccggtgtccggtgtccgtgtcggtgcttcatagtagacaaacaaaaaacaaatccagagcacaaatcaaataagttttttttaattgaaaactatcaaagctgagaaaatattgcatacattatcatccaatagcaaacgtgcaacatatttgatgcctaaaaaacctaacggcagcgcgtgcaaaataaattacaaggaaatatgaaagcagcaacaacttgttggagttcataactgaatatacccgatactttatgcgagtaagtattagggtttacttagttgagcgtgtgggggaaaaaacaaaagtgaaaacgactttgcatagaaagagaaaaggggtttcaacgaagcagaggctaattgcgaaggataagtgtaaaaagagagtgaaaatgaatggatttgaggtgttggagagaaaagaa

SEQ ID NO: 14293 - DNA, 1038 bp, Glycine max
  Gm_smallRNAprecursor_7126
agggtatacgtgtttcaattcagtttagctcgaacgcctaattcgattctgtggtcacacctagatagaggggtatgttgaaagtcccacatgactatgaggaaaaataagacatgttgaagtcccacattgaataaagatagtaccgaaataaactatataagtggggagcaatcaggcttaactcaaccctacaaaatcggcttgtaaggtgaggattgctcctcacttatatagtttatctcggcactatctttatttgatgtgggacttcaacatgccccatttttcctcatgtttaccaatcatgtggaactttcaacacacacctctatctaggtgtgaccacagattcactcaattatcccccatccctatagaacaaccaatacttttattggcattaacaggggcttccatatcaactttcaaagagtatctcaagaagaaaacagcacacagatttggttttgatctatgaagcacggacaccccaactccttgccgtgtccggtgtccgacacgcatctgtgtcagtgtccgacaccgacacgacacccgtactacattttatattttggacattacaggtgtatccgtgtcgtgtccggtgtccggtgtccgtgtcggtgcttcatagtagacaaacaaaaaacaaatccagagcacaaatcaaataagttttttttaattgaaaactatcaaagctgagaaaatattgcatacattatcatccaatagcaaacgtgcaacatatttgatgcctaaaaaacctaacggcagcgcgtgcaaaataaattacaaggaaatatgaaagcagcaacaacttgttggagttcataactgaatatacccgatactttatgcgagtaagtattagggtttacttagttgagcgtgtgggggaaaaaacaaaagtgaaaacgactttgcatagaaagagaaaaggggtttcaacgaagcagaggctaattgcgaaggataagtgtaaaaagagagtgaaaatgaatggatttgaggtgttggagagaaaagaag

SEQ ID NO: 14294 - DNA, 1039 bp, Glycine max
  Gm_smallRNAprecursor_7127
agggtatacgtgtttcaattcagtttagctcgaacgcctaattcgattctgtggtcacacctagatagaggggtatgttgaaagtcccacatgactatgaggaaaaataagacatgttgaagtcccacattgaataaagatagtaccgaaataaactatataagtggggagcaatcaggcttaactcaaccctacaaaatcggcttgtaaggtgaggattgctcctcacttatatagtttatctcggcactatctttatttgatgtgggacttcaacatgccccatttttcctcatgtttaccaatcatgtggaactttcaacacacacctctatctaggtgtgaccacagattcactcaattatcccccatccctatagaacaaccaatacttttattggcattaacaggggcttccatatcaactttcaaagagtatctcaagaagaaaacagcacacagatttggttttgatctatgaagcacggacaccccaactccttgccgtgtccggtgtccgacacgcatctgtgtcagtgtccgacaccgacacgacacccgtactacattttatattttggacattacaggtgtatccgtgtcgtgtccggtgtccggtgtccgtgtcggtgcttcatagtagacaaacaaaaaacaaatccagagcacaaatcaaataagttttttttaattgaaaactatcaaagctgagaaaatattgcatacattatcatccaatagcaaacgtgcaacatatttgatgcctaaaaaacctaacggcagcgcgtgcaaaataaattacaaggaaatatgaaagcagcaacaacttgttggagttcataactgaatatacccgatactttatgcgagtaagtattagggtttacttagttgagcgtgtgggggaaaaaacaaaagtgaaaacgactttgcatagaaagagaaaaggggtttcaacgaagcagaggctaattgcgaaggataagtgtaaaaagagagtgaaaatgaatggatttgaggtgttggagagaaaagaagg

SEQ ID NO: 14295 - DNA, 1035 bp, Glycine max
  Gm_smallRNAprecursor_7128
gggtatacgtgtttcaattcagtttagctcgaacgcctaattcgattctgtggtcacacctagatagaggggtatgttgaaagtcccacatgactatgaggaaaaataagacatgttgaagtcccacattgaataaagatagtaccgaaataaactatataagtggggagcaatcaggcttaactcaaccctacaaaatcggcttgtaaggtgaggattgctcctcacttatatagtttatctcggcactatctttatttgatgtgggacttcaacatgccccatttttcctcatgtttaccaatcatgtggaactttcaacacacacctctatctaggtgtgaccacagattcactcaattatcccccatccctatagaacaaccaatacttttattggcattaacaggggcttccatatcaactttcaaagagtatctcaagaagaaaacagcacacagatttggttttgatctatgaagcacggacaccccaactccttgccgtgtccggtgtccgacacgcatctgtgtcagtgtccgacaccgacacgacacccgtactacattttatattttggacattacaggtgtatccgtgtcgtgtccggtgtccggtgtccgtgtcggtgcttcatagtagacaaacaaaaaacaaatccagagcacaaatcaaataagttttttttaattgaaaactatcaaagctgagaaaatattgcatacattatcatccaatagcaaacgtgcaacatatttgatgcctaaaaaacctaacggcagcgcgtgcaaaataaattacaaggaaatatgaaagcagcaacaacttgttggagttcataactgaatatacccgatactttatgcgagtaagtattagggtttacttagttgagcgtgtgggggaaaaaacaaaagtgaaaacgactttgcatagaaagagaaaaggggtttcaacgaagcagaggctaattgcgaaggataagtgtaaaaagagagtgaaaatgaatggatttgaggtgttggagagaaaaga

SEQ ID NO: 14296 - DNA, 1035 bp, Glycine max; identical to SEQ ID NO: 14295
  Gm_smallRNAprecursor_7129

SEQ ID NO: 14297 - DNA, 1036 bp, Glycine max
  Gm_smallRNAprecursor_7130
gggtatacgtgtttcaattcagtttagctcgaacgcctaattcgattctgtggtcacacctagatagaggggtatgttgaaagtcccacatgactatgaggaaaaataagacatgttgaagtcccacattgaataaagatagtaccgaaataaactatataagtggggagcaatcaggcttaactcaaccctacaaaatcggcttgtaaggtgaggattgctcctcacttatatagtttatctcggcactatctttatttgatgtgggacttcaacatgccccatttttcctcatgtttaccaatcatgtggaactttcaacacacacctctatctaggtgtgaccacagattcactcaattatcccccatccctatagaacaaccaatacttttattggcattaacaggggcttccatatcaactttcaaagagtatctcaagaagaaaacagcacacagatttggttttgatctatgaagcacggacaccccaactccttgccgtgtccggtgtccgacacgcatctgtgtcagtgtccgacaccgacacgacacccgtactacattttatattttggacattacaggtgtatccgtgtcgtgtccggtgtccggtgtccgtgtcggtgcttcatagtagacaaacaaaaaacaaatccagagcacaaatcaaataagttttttttaattgaaaactatcaaagctgagaaaatattgcatacattatcatccaatagcaaacgtgcaacatatttgatgcctaaaaaacctaacggcagcgcgtgcaaaataaattacaaggaaatatgaaagcagcaacaacttgttggagttcataactgaatatacccgatactttatgcgagtaagtattagggtttacttagttgagcgtgtgggggaaaaaacaaaagtgaaaacgactttgcatagaaagagaaaaggggtttcaacgaagcagaggctaattgcgaaggataagtgtaaaaagagagtgaaaatgaatggatttgaggtgttggagagaaaagaa

SEQ ID NO: 14298 - DNA, 1037 bp, Glycine max
  Gm_smallRNAprecursor_7131
gggtatacgtgtttcaattcagtttagctcgaacgcctaattcgattctgtggtcacacctagatagaggggtatgttgaaagtcccacatgactatgaggaaaaataagacatgttgaagtcccacattgaataaagatagtaccgaaataaactatataagtggggagcaatcaggcttaactcaaccctacaaaatcggcttgtaaggtgaggattgctcctcacttatatagtttatctcggcactatctttatttgatgtgggacttcaacatgccccatttttcctcatgtttaccaatcatgtggaactttcaacacacacctctatctaggtgtgaccacagattcactcaattatcccccatccctatagaacaaccaatacttttattggcattaacaggggcttccatatcaactttcaaagagtatctcaagaagaaaacagcacacagatttggttttgatctatgaagcacggacaccccaactccttgccgtgtccggtgtccgacacgcatctgtgtcagtgtccgacaccgacacgacacccgtactacattttatattttggacattacaggtgtatccgtgtcgtgtccggtgtccggtgtccgtgtcggtgcttcatagtagacaaacaaaaaacaaatccagagcacaaatcaaataagttttttttaattgaaaactatcaaagctgagaaaatattgcatacattatcatccaatagcaaacgtgcaacatatttgatgcctaaaaaacctaacggcagcgcgtgcaaaataaattacaaggaaatatgaaagcagcaacaacttgttggagttcataactgaatatacccgatactttatgcgagtaagtattagggtttacttagttgagcgtgtgggggaaaaaacaaaagtgaaaacgactttgcatagaaagagaaaaggggtttcaacgaagcagaggctaattgcgaaggataagtgtaaaaagagagtgaaaatgaatggatttgaggtgttggagagaaaagaag

SEQ ID NO: 14299 - DNA, 1034 bp, Glycine max
  Gm_smallRNAprecursor_7132
ggtatacgtgtttcaattcagtttagctcgaacgcctaattcgattctgtggtcacacctagatagaggggtatgttgaaagtcccacatgactatgaggaaaaataagacatgttgaagtcccacattgaataaagatagtaccgaaataaactatataagtggggagcaatcaggcttaactcaaccctacaaaatcggcttgtaaggtgaggattgctcctcacttatatagtttatctcggcactatctttatttgatgtgggacttcaacatgccccatttttcctcatgtttaccaatcatgtggaactttcaacacacacctctatctaggtgtgaccacagattcactcaattatcccccatccctatagaacaaccaatacttttattggcattaacaggggcttccatatcaactttcaaagagtatctcaagaagaaaacagcacacagatttggttttgatctatgaagcacggacaccccaactccttgccgtgtccggtgtccgacacgcatctgtgtcagtgtccgacaccgacacgacacccgtactacattttatattttggacattacaggtgtatccgtgtcgtgtccggtgtccggtgtccgtgtcggtgcttcatagtagacaaacaaaaaacaaatccagagcacaaatcaaataagttttttttaattgaaaactatcaaagctgagaaaatattgcatacattatcatccaatagcaaacgtgcaacatatttgatgcctaaaaaacctaacggcagcgcgtgcaaaataaattacaaggaaatatgaaagcagcaacaacttgttggagttcataactgaatatacccgatactttatgcgagtaagtattagggtttacttagttgagcgtgtgggggaaaaaacaaaagtgaaaacgactttgcatagaaagagaaaaggggtttcaacgaagcagaggctaattgcgaaggataagtgtaaaaagagagtgaaaatgaatggatttgaggtgttggagagaaaaga

SEQ ID NO: 14300 - DNA, 1034 bp, Glycine max; identical to SEQ ID NO: 14299
  Gm_smallRNAprecursor_7133

SEQ ID NO: 14301 - DNA, 1035 bp, Glycine max
  Gm_smallRNAprecursor_7134
ggtatacgtgtttcaattcagtttagctcgaacgcctaattcgattctgtggtcacacctagatagaggggtatgttgaaagtcccacatgactatgaggaaaaataagacatgttgaagtcccacattgaataaagatagtaccgaaataaactatataagtggggagcaatcaggcttaactcaaccctacaaaatcggcttgtaaggtgaggattgctcctcacttatatagtttatctcggcactatctttatttgatgtgggacttcaacatgccccatttttcctcatgtttaccaatcatgtggaactttcaacacacacctctatctaggtgtgaccacagattcactcaattatcccccatccctatagaacaaccaatacttttattggcattaacaggggcttccatatcaactttcaaagagtatctcaagaagaaaacagcacacagatttggttttgatctatgaagcacggacaccccaactccttgccgtgtccggtgtccgacacgcatctgtgtcagtgtccgacaccgacacgacacccgtactacattttatattttggacattacaggtgtatccgtgtcgtgtccggtgtccggtgtccgtgtcggtgcttcatagtagacaaacaaaaaacaaatccagagcacaaatcaaataagttttttttaattgaaaactatcaaagctgagaaaatattgcatacattatcatccaatagcaaacgtgcaacatatttgatgcctaaaaaacctaacggcagcgcgtgcaaaataaattacaaggaaatatgaaagcagcaacaacttgttggagttcataactgaatatacccgatactttatgcgagtaagtattagggtttacttagttgagcgtgtgggggaaaaaacaaaagtgaaaacgactttgcatagaaagagaaaaggggtttcaacgaagcagaggctaattgcgaaggataagtgtaaaaagagagtgaaaatgaatggatttgaggtgttggagagaaaagaa

SEQ ID NO: 14302 - DNA, 1109 bp, Glycine max
  Gm_smallRNAprecursor_7135
ggtatacgtgtttcaattcagtttagctcgaacgcctaattcgattctgtggtcacacctagatagaggggtatgttgaaagtcccacatgactatgaggaaaaataagacatgttgaagtcccacattgaataaagatagtaccgaaataaactatataagtggggagcaatcaggcttaactcaaccctacaaaatcggcttgtaaggtgaggattgctcctcacttatatagtttatctcggcactatctttatttgatgtgggacttcaacatgccccatttttcctcatgtttaccaatcatgtggaactttcaacacacacctctatctaggtgtgaccacagattcactcaattatcccccatccctatagaacaaccaatacttttattggcattaacaggggcttccatatcaactttcaaagagtatctcaagaagaaaacagcacacagatttggttttgatctatgaagcacggacaccccaactccttgccgtgtccggtgtccgacacgcatctgtgtcagtgtccgacaccgacacgacacccgtactacattttatattttggacattacaggtgtatccgtgtcgtgtccggtgtccggtgtccgtgtcggtgcttcatagtagacaaacaaaaaacaaatccagagcacaaatcaaataagttttttttaattgaaaactatcaaagctgagaaaatattgcatacattatcatccaatagcaaacgtgcaacatatttgatgcctaaaaaacctaacggcagcgcgtgcaaaataaattacaaggaaatatgaaagcagcaacaacttgttggagttcataactgaatatacccgatactttatgcgagtaagtattagggtttacttagttgagcgtgtgggggaaaaaacaaaagtgaaaacgactttgcatagaaagagaaaaggggtttcaacgaagcagaggctaattgcgaaggataagtgtaaaaagagagtgaaaatgaatggatttgaggtgttggagagaaaagaaggaagaaagaggagaaaaatacctgagaatttgtttgtgctgtgtcacggagagaaagaccacacgccgcagct

SEQ ID NO: 14303 - DNA, 1076 bp, Glycine max
  Gm_smallRNAprecursor_7136
gcctaattcgattctgtggtcacacctagatagaggggtatgttgaaagtcccacatgactatgaggaaaaataagacatgttgaagtcccacattgaataaagatagtaccgaaataaactatataagtggggagcaatcaggcttaactcaaccctacaaaatcggcttgtaaggtgaggattgctcctcacttatatagtttatctcggcactatctttatttgatgtgggacttcaacatgccccatttttcctcatgtttaccaatcatgtggaactttcaacacacacctctatctaggtgtgaccacagattcactcaattatcccccatccctatagaacaaccaatacttttattggcattaacaggggcttccatatcaactttcaaagagtatctcaagaagaaaacagcacacagatttggttttgatctatgaagcacggacaccccaactccttgccgtgtccggtgtccgacacgcatctgtgtcagtgtccgacaccgacacgacacccgtactacattttatattttggacattacaggtgtatccgtgtcgtgtccggtgtccggtgtccgtgtcggtgcttcatagtagacaaacaaaaaacaaatccagagcacaaatcaaataagttttttttaattgaaaactatcaaagctgagaaaatattgcatacattatcatccaatagcaaacgtgcaacatatttgatgcctaaaaaacctaacggcagcgcgtgcaaaataaattacaaggaaatatgaaagcagcaacaacttgttggagttcataactgaatatacccgatactttatgcgagtaagtattagggtttacttagttgagcgtgtgggggaaaaaacaaaagtgaaaacgactttgcatagaaagagaaaaggggtttcaacgaagcagaggctaattgcgaaggataagtgtaaaaagagagtgaaaatgaatggatttgaggtgttggagagaaaagaaggaagaaagaggagaaaaatacctgagaatttgtttgtgctgtgtcacggagagaaagaccacacgccgcagct

SEQ ID NO: 14304 - DNA, 1068 bp, Glycine max
  Gm_smallRNAprecursor_7137
cgattctgtggtcacacctagatagaggggtatgttgaaagtcccacatgactatgaggaaaaataagacatgttgaagtcccacattgaataaagatagtaccgaaataaactatataagtggggagcaatcaggcttaactcaaccctacaaaatcggcttgtaaggtgaggattgctcctcacttatatagtttatctcggcactatctttatttgatgtgggacttcaacatgccccatttttcctcatgtttaccaatcatgtggaactttcaacacacacctctatctaggtgtgaccacagattcactcaattatcccccatccctatagaacaaccaatacttttattggcattaacaggggcttccatatcaactttcaaagagtatctcaagaagaaaacagcacacagatttggttttgatctatgaagcacggacaccccaactccttgccgtgtccggtgtccgacacgcatctgtgtcagtgtccgacaccgacacgacacccgtactacattttatattttggacattacaggtgtatccgtgtcgtgtccggtgtccggtgtccgtgtcggtgcttcatagtagacaaacaaaaaacaaatccagagcacaaatcaaataagttttttttaattgaaaactatcaaagctgagaaaatattgcatacattatcatccaatagcaaacgtgcaacatatttgatgcctaaaaaacctaacggcagcgcgtgcaaaataaattacaaggaaatatgaaagcagcaacaacttgttggagttcataactgaatatacccgatactttatgcgagtaagtattagggtttacttagttgagcgtgtgggggaaaaaacaaaagtgaaaacgactttgcatagaaagagaaaaggggtttcaacgaagcagaggctaattgcgaaggataagtgtaaaaagagagtgaaaatgaatggatttgaggtgttggagagaaaagaaggaagaaagaggagaaaaatacctgagaatttgtttgtgctgtgtcacggagagaaagaccacacgccgcagct

SEQ ID NO: 14305 - DNA, 1182 bp, Glycine max
  Gm_smallRNAprecursor_7138
ttaccacaaaaaaacagataaagtttctagcttttagcctcggatgcagctggggctatcgccaaccctcagaccaattaaaccgccaaggaaactccctctccatcaaagccattcataatgaaaaaaccccaattccctttatttatttatttttattttttacctttttaagttacctatcaattaaaagcaaattgatcaaatgggttccttttagaaatttatttccaaaagggatctctttccaaactttttcgggaggggattagtttttgaagggattttgccagtggagttggcgagtttgacatgtgtcagtggagttggcgaattggacacgtgacagcagctggagaactcgccaagtggagatggcgagacacggtccacgtagcgggttccccattcataatagtaaaatgtttttttttttacaagaaaatttttttaacttgaaacaggtataacttttgatagaaatgtccgtttgaggccaataatatgtcaaaatgctcgaaattgaatgaggaatctcctggaaaattcttgaaagagatttaagattcaaccacccatttttttaatcttaaatcctatttttgagttacttaaagacatgttttgaaaaaatgagttgatgaaatctcctttggacatttcacaagggattccttattcaatttcgagcattttgacatattatgggtctcaaacggacattcatatcaaaagttatactcatttcaaattaaaaaaaaattccgtaaaatcgtcaactccactggcgaaatccttccaaaaattgaccccctcaagaaaaaatgtagaaacagacaccttttgagaataaatttctaaaaggaacccgctttggtcaatttgtcatcaattaaaatatattcataggtgcacggtgtttttctttttttttgtgtgtaattttttttcaaatatatgtttcttgtcctgtgttagaaataatggacgattctaacttattgcttcagacactaattgttcacgatgcatgtagctagttcgacccatttaacttgtgggttaaatgattttatccaaaagctcttaggctttttatttttacatttcaatatcaagaaatattatactaacaaataagggatgcaaagtaaaaaaatataaaatttaagtatttttata

SEQ ID NO: 14306 - DNA, 1182 bp, Glycine max; identical to SEQ ID NO: 14305
  Gm_smallRNAprecursor_7139

SEQ ID NO: 14307 - DNA, 1183 bp, Glycine max
  Gm_smallRNAprecursor_7140
ttaccacaaaaaaacagataaagtttctagcttttagcctcggatgcagctggggctatcgccaaccctcagaccaattaaaccgccaaggaaactccctctccatcaaagccattcataatgaaaaaaccccaattccctttatttatttatttttattttttacctttttaagttacctatcaattaaaagcaaattgatcaaatgggttccttttagaaatttatttccaaaagggatctctttccaaactttttcgggaggggattagtttttgaagggattttgccagtggagttggcgagtttgacatgtgtcagtggagttggcgaattggacacgtgacagcagctggagaactcgccaagtggagatggcgagacacggtccacgtagcgggttccccattcataatagtaaaatgtttttttttttacaagaaaatttttttaacttgaaacaggtataacttttgatagaaatgtccgtttgaggccaataatatgtcaaaatgctcgaaattgaatgaggaatctcctggaaaattcttgaaagagatttaagattcaaccacccatttttttaatcttaaatcctatttttgagttacttaaagacatgttttgaaaaaatgagttgatgaaatctcctttggacatttcacaagggattccttattcaatttcgagcattttgacatattatgggtctcaaacggacattcatatcaaaagttatactcatttcaaattaaaaaaaaattccgtaaaatcgtcaactccactggcgaaatccttccaaaaattgaccccctcaagaaaaaatgtagaaacagacaccttttgagaataaatttctaaaaggaacccgctttggtcaatttgtcatcaattaaaatatattcataggtgcacggtgtttttctttttttttgtgtgtaattttttttcaaatatatgtttcttgtcctgtgttagaaataatggacgattctaacttattgcttcagacactaattgttcacgatgcatgtagctagttcgacccatttaacttgtgggttaaatgattttatccaaaagctcttaggctttttatttttacatttcaatatcaagaaatattatactaacaaataagggatgcaaagtaaaaaaatataaaatttaagtatttttatat

SEQ ID NO: 14308 - DNA, 1182 bp, Glycine max
  Gm_smallRNAprecursor_7141
caattgcttatcaaataatgatttctgattgtgtatttgctggaaactcatcccaatcaagcaaatcaactatcacaaaaatacgacaaccatatgattttttaattgttcatttggtgtactggaattcgttagtgtacattgaaattcacaaaattattttcgaaaaatccaaacataaccctaattcctgaggtttgattaacaaatccggaaagtcagttagggtcttagggatgatttccctcgcaaaaatagctttgcttcctcagttgcttgtagcaatcaggcgagcccaaatcggcccttatgttgagtgttgctaggtgcacccagcattctaaaaaaatgatgaaattgcccttgcttggttttccctcttccagatcaagttgatccggaagaggaaaaataaaatttttgttaattatacaagatatttattttattaattataatatatttataaatattgatttattataaataattaatgctaatcaatcataatcataattcatactaatcaatcaatcatgctaatcaatcataattctctaaaagaggatataaataaattcagagtaagcaatcttgatgacctctttcacattataaactaccaatcaacatatatcctcttttagggcaatatgattgattagcataattgattgattagcatgaattatgattatgattgattgattagcatgattgattgatttctgaaaattgctaactctgaaattatttatatcctcttttagggaattatgattgattaacatgattgattgattagcatgaattatgattatgattgattagcattaattatttataataagtcaatatttataaatatattataattaataaaataaataaatatatttaattatattataattaatgaaataaatatctttaaatatcttgtataattaacaaaaattttatttttcttcttccggatcaagttgatccggatcttccggatcaacttgatccgtaagagacttccggattaagttgatccagaagttacggatcaagttaatccagaagagactttcggatcaactgatccggaagaggaaaattaagcaaggataattttgtcatttttttagaatgctgggtgcaccagcaataatgctagatgcacctagtaacact

SEQ ID NO: 14309 - DNA, 1035 bp, Glycine max
  Gm_smallRNAprecursor_7142
aatgtagccgtctttgcattttctgggtcaacaaacatctttgtctttcgcctataccagaccatgtagtccgagttaaaactcaataggccttcttgtcggggataagcgtcgaccctaaatgcatggcgattattccactgctgaatcattggggcgaacaattgcccccaattttcgtcatgtttcccttttaatgttatgccatgaatgtttaagggttgtgaaggagactctggaactggttgttgcatcccaaattgtctcaacactctgtccggttggtgccactcaataacttgaagacaaattagtggcaccaccgcgtaccacgcgagacttccgactaaacaaaagggaggcaacaatgatataacggttgatgggtaaggctcccacacaaactgcatataacaacatagttgtgaacattgtagtaaaataagacatataattttgtattttacaaatacagtagcatggttcttacctcatgacgtttcataatatccaacttgcgacaaaaaactttcacatcatcattgccgatatgttggtttccacgtcgcagccacctacaaagaataaaatttaatataccctaaaaccatttattctattgaaatgaaagacgctgttaaaaatgactgacctgtgccctagtggtatattttctatttgggaaggagtcctctttggagccaaggttggacatcgttcccatgcccacaattgtagtaagatgtgcatacctccgactgatttagttttataatcggtggcactgcacatctctctgtatagaaaaccaagtacagcagctccccatgcatatctgctacattcttcaaagtcacgtaaaaattgaaggtaccttagtgaaactctgttattggttttgtcaacgaacaagacaccttcaataaatctcagtatccatgcacgggcaaaccttcgtacttgttcttcgtcgtcgtcattattaatttgatcaaaatggtgagccaaccaacttaatttaaccacactaccttt

SEQ ID NO: 14310 - DNA, 1112 bp, Glycine max
  Gm_smallRNAprecursor_7143
tgcgacaagtgtccttcgcaaccactgaatatccatggcctaacgttgaaaggcaaacaagatgaaaattatttccaactgttggccccaatgattagtcaatggaacaatcgagctgagtttagggtcgacgtttatcctcgacaggagggcctattgagttttaactccgactacatgatctggtataggcgaaaaacgaatatgtttgtcgatccaaagaatgcaaacacaactacattggtatttatttctttttcaatatttaacttcaaattattttttaaagcacaacattaatttcctgaccctaatatgtgcagggtgaagttgcggagacattacagtatatggtgtcaccacaagggaggaacacatggacatttgatgatcacgtgccttatgtagagaagataacgattttatccgaagagcaagagaggatcactaagcctgtggcacatggttcagcatcagagcatcgatttccatgacaagagtttcacatgcttcagtcaagtgttgaaactcggggttttgacaaacaaatggaggctgttgaagcgcaagaattttcccaacaaatggaggagcgtggccatggaatgtattacacgccaccaacattttctcagtatccttcatagatgtatcaatatccttttgaaggtcatcacactgatatgtctgcaagcgaacattcgttcggtggtgttgcggaaacacatcctcattttttatggccgactatgatcccttcacagcaacatgatgccccaatggcaacacctaacgccccattagcttcacaatggaatgtaccccgagcaatacatgatatgggtgacttattaggtgttgatttgcatcacgagttttctgctgaggttgagcaagtagaagcggggagacatcacgcagaagcaatcctgatcgtcaagcgcgaagatgggatcgaccatgtggcacatcctcacgtcatcatagacatcataatgaatgattttcatgtctctatttaactttgttgttgtatgtttgtcatttgaatttgacacttaatgtatcgtatctcatttattaaggcttactaatggatacattttatgtcg

SEQ ID NO: 14311 - DNA, 1092 bp, Glycine max
  Gm_smallRNAprecursor_7144
ctagaatcagaatattaattctgattttcaacaggtgcatctgggacatgactttggtagtttgttaatttgaatgccttttcctttatatctttaaatctatagcaatgttgttaatggcggatggcggttcatggcggaaagtcaaaaatccgccataaaaatatggcggatggcgtagcggaaaatggcggatgtcatggcggacacaaaaaaaaaaaaaaaacatatatataaactcattgaaattgaaaaaaacaaaggattgcattcaaataaactaaaaaagtttcatgagttcatacaataatcaagtaccaacaccaaataaactcattaaagagttcaaaataagaaaatgataaaaacataatgcaaagtgcaaagtgaaggttgaggctctaatcatcttctccaatcccaacataatcatcttcgttgttatcatatggtaatggagcatctccctctccctcttccccatcagacgcctcaaaattgaccatgatttcttcttcttcagattcaacatcaatattctcctcaacatctagatcctcatcattttcttggactgctttttgcttccttgatgaagatccaacaaccattgcctgttttttagaagtttgggcagcagcaacacttgttttttgctttttccgcctagtatacatcctacactctccaacccccgaagcctgatacacagttgcccaatttagagcatcatcatcttcaaataccaaatcatttccagcatcattatcatcatcttgatccatctctcccacgagccattcattgcatacatcaatatcattaagagaaattggatcaatttcatctcatgcattatatctttgcttcaattgttggttgtatttgacaaacaccaaatcatgcaacctcttgtgctcaagcctatttctttttttggaatgaatctacaacataacaaataaatgttgatttcaatctcaaatatactccaaatataacttgatcatcaaaattaaataaaattaaaaagtatagttagagttttgtcacaattacttgctcaaacacactccaatttctttcacatcc

SEQ ID NO: 14312 - DNA, 1133 bp, Glycine max
  Gm_smallRNAprecursor_7145
aaaatggcggatgtcatggcggacacaaaaaaaaaaaaaaaacatatatataaactcattgaaattgaaaaaaacaaaggattgcattcaaataaactaaaaaagtttcatgagttcatacaataatcaagtaccaacaccaaataaactcattaaagagttcaaaataagaaaatgataaaaacataatgcaaagtgcaaagtgaaggttgaggctctaatcatcttctccaatcccaacataatcatcttcgttgttatcatatggtaatggagcatctccctctccctcttccccatcagacgcctcaaaattgaccatgatttcttcttcttcagattcaacatcaatattctcctcaacatctagatcctcatcattttcttggactgctttttgcttccttgatgaagatccaacaaccattgcctgttttttagaagtttgggcagcagcaacacttgttttttgctttttccgcctagtatacatcctacactctccaacccccgaagcctgatacacagttgcccaatttagagcatcatcatcttcaaataccaaatcatttccagcatcattatcatcatcttgatccatctctcccacgagccattcattgcatacatcaatatcattaagagaaattggatcaatttcatctcatgcattatatctttgcttcaattgttggttgtatttgacaaacaccaaatcatgcaacctcttgtgctcaagcctatttctttttttggaatgaatctacaacataacaaataaatgttgatttcaatctcaaatatactccaaatataacttgatcatcaaaattaaataaaattaaaaagtatagttagagttttgtcacaattacttgctcaaacacactccaatttctttcacatcctgaagcactgcaagtcaaactcaaaatcttaatagccagcttctgcaaatttggagtttgtgacccaaacattcgccaccaatatgctgcaataccaattaccaaccaagagcataacttagaattctgaattctaacactaatacataaaaaaaatagtatgataaaagtttcttactaggagaatgggttttcctttgagccattgcaaagtcggaaccaaag

SEQ ID NO: 14313 - DNA, 1192 bp, Glycine max
  Gm_smallRNAprecursor_7146
atgatgactattttttgagtgtgtattggactaatgaatgttggtgcaagcttataatacttgttaatgttttcttactaattgtgtttatttgatttttgtattaatttcttttataataaactcacccctcgcaatgtttgtaccgtgtgattggtacctgtgatgatcgcgaacctttgttcgtgggagcagaatgacagcagtagtggacgagaagtgagattcttttatggagccgtcgaggcgacgtgatgacattgggattattttgggagatagttgtgttttgttaatcaactcctctatagctggttccgtaattctttttgttgatttgaatatgtaaatcacaaatttaattatatgtatgaacaaatttattttccactatgtgaatgatgtgtactaggtaggggtgggaataggccaggccggcctacaggggcctacgacctgaactacataaagtttggtctgaactgacctatttaattaaaaggttaggctcaggcttttttaaaagcctattaaattaaatagaccaggcttaggcttattaaaaagcgagtgaataggcaatttagtccctgagattgtacccattttgcatattagtccctaacataatgttaaattcaaaatagtccttatctttgcataagtgttgcaaaatagtccttccgttaaattttaaagtaacgccgttagtgaggtcaattttagtgccacgtggactatccaacgtggcactaaaggatggtgtggcatgacacgtggacgtgtctcctaaaagatgccacgtcatttgatgataacaaaacgagtaaatagaaataatccttggattgatcagaaaatcctttcaattggctagaacccgttacttgaatgatatccattaatgtgtaacaaaaaacttatataccatggataatccatcaacaagtagggaccgctttaaatgctcatatctatctatgccaccaaataagactatatagtcatcacaccattttccaagttctttgagcaaatgattacgaaccaaagaccattaatcttcacccaaatctaataaggcagcaattacacgatatccataattaccatcagctttgacatcaacaatgtcttcaatgaaatcttgcatgcatggatgaattgatcctacattggcatgttcctcttc

SEQ ID NO: 14314 - DNA, 1193 bp, Glycine max
  Gm_smallRNAprecursor_7147
atgatgactattttttgagtgtgtattggactaatgaatgttggtgcaagcttataatacttgttaatgttttcttactaattgtgtttatttgatttttgtattaatttcttttataataaactcacccctcgcaatgtttgtaccgtgtgattggtacctgtgatgatcgcgaacctttgttcgtgggagcagaatgacagcagtagtggacgagaagtgagattcttttatggagccgtcgaggcgacgtgatgacattgggattattttgggagatagttgtgttttgttaatcaactcctctatagctggttccgtaattctttttgttgatttgaatatgtaaatcacaaatttaattatatgtatgaacaaatttattttccactatgtgaatgatgtgtactaggtaggggtgggaataggccaggccggcctacaggggcctacgacctgaactacataaagtttggtctgaactgacctatttaattaaaaggttaggctcaggcttttttaaaagcctattaaattaaatagaccaggcttaggcttattaaaaagcgagtgaataggcaatttagtccctgagattgtacccattttgcatattagtccctaacataatgttaaattcaaaatagtccttatctttgcataagtgttgcaaaatagtccttccgttaaattttaaagtaacgccgttagtgaggtcaattttagtgccacgtggactatccaacgtggcactaaaggatggtgtggcatgacacgtggacgtgtctcctaaaagatgccacgtcatttgatgataacaaaacgagtaaatagaaataatccttggattgatcagaaaatcctttcaattggctagaacccgttacttgaatgatatccattaatgtgtaacaaaaaacttatataccatggataatccatcaacaagtagggaccgctttaaatgctcatatctatctatgccaccaaataagactatatagtcatcacaccattttccaagttctttgagcaaatgattacgaaccaaagaccattaatcttcacccaaatctaataaggcagcaattacacgatatccataattaccatcagctttgacatcaacaatgtcttcaatgaaatcttgcatgcatggatgaattgatcctacattggcatgttcctcttcg

SEQ ID NO: 14315 - DNA, 1036 bp, Glycine max
  Gm_smallRNAprecursor_7148
ttttgatattaattaaacgttaactacaattagtgtacacacacataaaatatatataagtagaacttttatttaaatcacgtaccttaacaacaatccacctagcagcagccttggatttcggttgtggagtatcatcaagtcctttcaaagcactagtgttgaatataaggaacattaaaatattgatgttgttgagttatgccaatgaaaatgtattgaaaacaatacggacctgttaattattcccttaaggtagttgtctggcctgttatgcaaagaacaaaaccagacaactaggttttccttaggtagaatgacgaccatttgccagtgtccactgcagtagagacgaatatgggttattgtagtagtatagattatttaaattcaattattgtgtttgacttacctattcagataggctccaaggtaaacatctcgttttgaactctgtatccaactcttgatgtaactttcggattcaaattgtgattgcccagatctctgaatggactgtggctcgaggaatccatacacatcagaattccccgctcgcacacttgtctcaatcagatggctgtgttgttaagtcaaagttaattatgtatgaatttaaaacaattactttggtaattaatagtaatctaaaatgacttacagaatccataactgtataacagatatgctaagacattgaccaccatgtgcaatttcagagagatcttcgtgctttatatacaacgggaagttttgattaaacaccccgaatatggtagcatcccacataacctggagcggcttcaaaaacagttgtgggatggtcaatgtcatcaggtacaggggatcatcgacctcttcatccgggctttctggaggttttgctggagaaacaattgcctattgataaaacatagttaattagcaagttttgattacagtgaacaaattaattgagaaaaataaacatataatcagagtaaaatacctgttctgataaacgcttcacaagatgtgttggccaagcaaggaaagt

SEQ ID NO: 14316 - DNA, 1035 bp, Glycine max
  Gm_smallRNAprecursor_7149
caatgtagccgtctttgcattttgtgggtcaacaaacatctttgtctttcgcctataccagaccatgtagtccgagttaaagctcaataggccttcttgtcggggataagcgtcgaccctaaatgcatgacgattattccactgatgaatcattggggcgaacaattgcccccaattttcgtcatgtttcccttttaatgttatgccatgaatgtttaagggttgtgaaggagactctggaattggttgctgcatcccaaattgtctcaacactctgtccggttggtgccactcaataacttggaaacaaattagtggcaccaccgcgtaccacgcgagactttcgactaaacaaacgggaggcaacagtgatataacggttgatgggtacggctcccacacaaactgcatataacaacatagttgtgaacattttagtaaaataacacatataattttttattttacaaatacaatagcatgttcttacctcatgacgtttcataatatccaacttgcgacacaaaactctcacatcatcattgccgatatgttggtttccacgtcgcagccacctacaaagattaaaatttaatatatgctaaaaccatttattctattgaaatgaaagacgctgttaaaaatgactaacctatgccccagtggtgtattttctacttggaaaggagtcctctttggagccaaggttggacatcgttcccatgcccacatttgtagtaagatgcacatacctccgattgatttagttttataatcggtggcattgcacatctctctgtatagaaaaccaagtacggcggctccccatgcatatctgccacattcttcaaagtcacgtaaaaattgaaggtaccttagcgaaactttgttactgattttgtcaacgaacaagacacctccaatgaatctcagtatccatgcacgagcaaaccttcgtacttgttcttcgtcgtcgtcgttatttatttgtgcaaaatggtgagccaaccaacttaatttaaccacactacctct

SEQ ID NO: 14317 - DNA, 1138 bp, Glycine max
  Gm_smallRNAprecursor_7150
taagtggtccacccatcaaagtgggaaaagcctatagctttcacaagaggcactgtataataacttaaggtttcactactgtatttaatatgcaactttaattgttgtctcgtttagaacgagataagtatataaaaaaaaataatgatgtgtgttttctgaatttagataaaaatatttcgtaaatttaatttactttaaattaaaggtggatatatatatttttacttttaatttctcatttgttgacaaaagaaaaaatcaaggaatttcattgatgataattgttatagataaagtaggaatagtatgaaaaactgcatctagcatgatatattgttgcctttgcaagaccatgagttgcaatatttgcttgtcaacaaaaataaccatatagttttttatgaggacatgaccaagagcaagggcaaggatccacttgaaggacttggaggacctatgacaagggctagagcaaggaaagcaaaggaagctcttcaacaagtgttgttcatactatttgaatacaagcccaagtttcaaggagaaaagtccaaggttgtgagttgtatcatggcccaaatggaggaggactaaatggcgccagttcgtctcaattttagagtgtttagtttgtctaaataatgacccaatccttgtaaagttggctgaccaaaaatatgttttaggttaatcaactaaaggggctttagtttggtttagttcaaattgtaataagggcccaattggcagcttaggcatcagcctttggaagagcaaatggtgattggcttgatggcttttggggtgactcttggttgtcacaatttcagttacactctagctattaagttcttaagttctttcattcccaacattaatggctcattattaaatttaagtgaattgtaattttctttaatgaagcttatgtaaaatttgatggtaaagcttctttataagttgaaccattttatcaataaagagaagttgagttttattcagaaaaattagagtttatctcttttatcttagtgggagtgattctcctaagttcttgagtgattcaagaacaccttggctatatcaaaggtctttcacatcctttgtgtattgtcctcgccggaaagagtgattc

SEQ ID NO: 14318 - DNA, 1185 bp, Glycine max
  Gm_smallRNAprecursor_7151
taattgatcaagccatttagctgtacttggcttattcgcacggatatccccaagatgtcgccagtgcatcttctcagtgtatgcgtaacctgtaaatattcaatcaatctattacgttataaaatttaattgaaagtaaaatttaaagaatatataaaataaattctcaccagccagcaagagtggtttttttttttaaatgtttgcagtttgagttaccacgaagaaagctttgtgcaatgtggcacagacaaaagaaatgggatgtgtcctgaacccataagttagttaggttgttgtaggcacttataattgaggggtgtctgtttgatatgagagaaatgttaatttgtggagtaacatgtcttcacaaattctttagaaaaaccctaaagctgaagttgtctccctccccttctacaatggcataggcaatcgggaagatatggttagctccatcttgtgcggtagctatcaacagtgtgttagtatacttcccgtaaagccatgtaccatctacttgtattatgggtttgcaatatgcaaagcctttaatgcatgaaccaaatgatcaaaagacacgtttaaacattcttttgtctggtacaatttctcctctgtcatacacatattctgtttgagcagcgatcacagtcccgggaacagaagattgcaaagatcccaaaagttttggcagtttggcatatgattcttccccgtttccatgaatcatctccaacgctctttgctttgctaaccatgtcttcttgtaggatgggatataattcatgaacgttttgatctctgcaatcaatgtcttgatggagacggttgggtttattttgaaattggttggatgatctgtgctatgacgtgtttgtcaagttaccgatgatcttgtctgagcattggcgcgagacaagtgtgatgacctttgatactcttgataatccatttgctatgtctctttgaattgcatgcgcctaagctccacgtataaccattttcatgtaatttacacacgaagtttagccttctctggtcagagtaaatttttctgcagtcaaaaggatttcttatattgtattctttgactgctcgaatacattgtgctttttcatcgaaagccatgccaacctcaagtgcacctgttggtggttgtacattatgttgttgctaaaaaaa

SEQ ID NO: 14319 - DNA, 1036 bp, Glycine max
  Gm_smallRNAprecursor_7152
tgttcttacctcatgacgttacataatatccaacttgcgacgaaaaactctgacaccatcattgttgatatgttggtttccacgtcgcagccacctacaaagattaaaatttaatataccctaaaaccatttattctattcaaatgaaagacacttttaaaaatgattaacctgtgccctagtggtttattttctacttgggaaggagtcctctttggagccaaggttggacatcgttcccatgtccacgtttgtagtaagatgcacatgcctccgattgatttagttttataatcagtggcactacacatctctctgtatagaaaagcaagtatggcaggtccctatgcatatgtgccacagtctgcaaagtcacgtaaaaattgaaggtatcttagcgaaactttgttactgcttttgtcaacgaacaagacacctccaatgaatctcaatatccatgcatgggcaaaccttcgtacttcttcttcgtcgtcgtcgttatttatttgtgcaaaatggtgagccagccaactcaatttaaccacactacctttaatttcaccttcttgtggtctgactcccaataattcctcacataaatcagcccaatcaagatttgttggaccgattaatgataaaccatccacacgtatacctaacaatacagagacgtcttggagagtaatagtacactctccgcatctcatgtgaaacgtatgtatttctggcctccatctttctatcagagcactaattaacgaggcatttatttttaagtatcccatctttataatccagtaaaaaccagattgtcgaagaaaaggaaaaattgactctagaatttcttcttccccttgatacatggggacagctcttctgatatgtaatttccgatcttcttccccattccaaacatgttctgaaacatgcttaggttgcatccataatacatcatcatcgatggggccagacttaattttaatatgtgatggacataacgatgaagatgccattgctactgcaaaataaaatataa

SEQ ID NO: 14320 - DNA, 1037 bp, Glycine max
  Gm_smallRNAprecursor_7153
tgttcttacctcatgacgttacataatatccaacttgcgacgaaaaactctgacaccatcattgttgatatgttggtttccacgtcgcagccacctacaaagattaaaatttaatataccctaaaaccatttattctattcaaatgaaagacacttttaaaaatgattaacctgtgccctagtggtttattttctacttgggaaggagtcctctttggagccaaggttggacatcgttcccatgtccacgtttgtagtaagatgcacatgcctccgattgatttagttttataatcagtggcactacacatctctctgtatagaaaagcaagtatggcaggtccctatgcatatgtgccacagtctgcaaagtcacgtaaaaattgaaggtatcttagcgaaactttgttactgcttttgtcaacgaacaagacacctccaatgaatctcaatatccatgcatgggcaaaccttcgtacttcttcttcgtcgtcgtcgttatttatttgtgcaaaatggtgagccagccaactcaatttaaccacactacctttaatttcaccttcttgtggtctgactcccaataattcctcacataaatcagcccaatcaagatttgttggaccgattaatgataaaccatccacacgtatacctaacaatacagagacgtcttggagagtaatagtacactctccgcatctcatgtgaaacgtatgtatttctggcctccatctttctatcagagcactaattaacgaggcatttatttttaagtatcccatctttataatccagtaaaaaccagattgtcgaagaaaaggaaaaattgactctagaatttcttcttccccttgatacatggggacagctcttctgatatgtaatttccgatcttcttccccattccaaacatgttctgaaacatgcttaggttgcatccataatacatcatcatcgatggggccagacttaattttaatatgtgatggacataacgatgaagatgccattgctactgcaaaataaaatataat

SEQ ID NO: 14321 - DNA, 1036 bp, Glycine max
  Gm_smallRNAprecursor_7154
aaatttggatattaattaaacgttaactacaattagtgtacacacacataagtagtatatataagtagaataaatttaaatcacgtaccttaacaacaatccacctagcagcagccttggatttaggttgtggagtatcatcaagtcttttcaaagcactattgaataagaggaacattaaaatattgatgttgttgagttatgctaatgcaaatgtattaaaaacaacactgacctgttaattattcccttaagatagttgtctggcctgttatgtaaagatcaaaaccagacaactaggttttccttaggcagaatgacgaccatttgccagtgtccgttgcagtagagacgaataggggttattgtagtactattgattatttaaattcagttattgtgtttgacttacccattcaggtaggctccaaggtagacatctcgttttgaactctgcatccaactcttgatgtaactttccgattcaaattgtgattgcccagatctctgaatggactgtggctcgaggaatccatacacatcagaattccccgctcgcagacttgtctcagtcagatgcttgtgttgttaagacaaagttaattatgtatgaatttaaaacaattactttggtaattaacagtaatccaaattgacttacaaaatccacaactgtataacagatatgctgagacattgaccaccgtgtgcaatttcagagagatcttcatgctttatgtacaacgagaagttttgattaaacacctggaacatggtagcatcccacataacctggagagacttcaaaaacagttgtgggatggtcaatgtcatcaggtataggggatcatcaacctcatgatccgggctttctggaggttttgctggagacacagctgcctattgatcaaacatagttaattaacaagttttgattacagtgaacaaatcaattgaaaaaaagaaacatataattagagtaaattaacaagttttgattacagtgaacaaatcaattgaaaaaaagaaacatata

SEQ ID NO: 14322 - DNA, 1069 bp, Glycine max
  Gm_smallRNAprecursor_7155
ttgcgacgaaaaaatttcaaatcatcattaccaatattttgattttcccgtcgcaaccacctaaaaaaaatgataaattaacataacttacattattaattattttaaaatgaaatctaatttttttaaacaactaacctatgtccaagtggtttgttttctattatgggaggagtcattcttggagtcagagttgtacatcgttcctatgcccacatttgtattaagatgcacatacctccaattgatttagttttataattggtggcgctgtcaacaaataagacacctccaatgaatcgaaagatccatgcatgagtaaacctttctacctgttctaacccaccatggttatttaaatctacaaaatgatgagtcaaccaacttaatttaatcatactgctttgaagttcaccttcttctggtctgactcctaacaattcttcacataaatcaacccaactaaggtttgttggactaattaatggtgacctatccacacagagacctcataaaacagagacatcttgaagagtaatagtacactctctgtatctcatgtgaaaattatgtgttttcgacctccatctttctatcaagacagtgattaatgcaacatttatttctaaatatcccatcttcatgatccagttacaaccagattgacgaagtagaggaataatctcttctggtatttcttcttgaccttgatatgtggggacaactcttctaatatgtagttttatatcttcttcccccattctaaatatgctgtgaaatatgcttatcttgcatccacagtcaccctcaacaggaccagaaataattgaaatatttgacaaacatgatgaagaagaagccattaatactgcaccacaaaaattatgtgtttagtttaaaaatttaatcttgtcctcaaaagaaaaaaagtcttcctacttattcatattcaaatatatttaaataaagataatattaataacaaattctcgtcctaaggtttgtcaaaatacacttagggttgcaatttcaacatctcaattaaaattagtattaatattaaaaaatc

SEQ ID NO: 14323 - DNA, 1137 bp, Glycine max
  Gm_smallRNAprecursor_7156
gctgtccttaggagaagaagaaatatcagaggaaatattcctctacttcgacaatgtagtttttattagataatgaagatgggctacctaaaaataaatgcatcattaatgactgtcttgattgaaagatggaggcccgaaacacatacgtttcacatgagatgagatgcgaagagtgtacaattactcttcaagatgtctctgtattattaggtctgcgtgttgatgggacaccattaattggtcaaactaatcttgattgggctgaattatgtgaagaattgttgggagtcagaccacaggaaggtgaacttcaaggcagtgtggttaaattaagttggatggctcaccatttttcacaaataaataaccatgacggcaacgtagaacaactacaaaggtttacccgtgcatgaatccttagatttcataggaggtgtcctatttgctgacaaaagcagcagcaaagtttccctaaggtacctgcaacttttacgtgactttgaacagtgcaacacgtatgcatgaggacctgtcgtgcttgctttttcacatagagagatgtgcagcgccaccgattacaaaattaaatcaatcagaggtatgtgcatcttaatccaaatgtgggcatgggaacaatgcacgactttggctccaaagagaactactcccgtaatagaaaataaaccactcggacacaggttagttgtttaaaaaataaaatttcttttaaaaataattaataatgtaacgtgtcgccactgatgatttcatattttttgtaggtggctgcgacgtgaaaatcaacatattggcaatgatgatctgatagtttttcgtcacaaattgaatatcatgaaacgacatgaggtaagaagatcgtaatgtattcgttaaataataaataaaatgtcatgtttaagtgaaaattaacaactatgttattgtatacagtttccgtgggagccttacacaacaactattatgtcaatgttgtctccaatttgtttggttggtagtgtagcgtggtgcgtggtggtgtcactcatttgtttccatgttgttgagtggcaccaacccgatagagtgctgcgacaatttggaatgcaacaacctattcccgaatgtcattcgcaa

SEQ ID NO: 14324 - DNA, 1135 bp, Glycine max
  Gm_smallRNAprecursor_7157
tatttgctgacaaaagcagcagcaaagtttccctaaggtacctgcaacttttacgtgactttgaacagtgcaacacgtatgcatgaggacctgtcgtgcttgctttttcacatagagagatgtgcagcgccaccgattacaaaattaaatcaatcagaggtatgtgcatcttaatccaaatgtgggcatgggaacaatgcacgactttggctccaaagagaactactcccgtaatagaaaataaaccactcggacacaggttagttgtttaaaaaataaaatttcttttaaaaataattaataatgtaacgtgtcgccactgatgatttcatattttttgtaggtggctgcgacgtgaaaatcaacatattggcaatgatgatctgatagtttttcgtcacaaattgaatatcatgaaacgacatgaggtaagaagatcgtaatgtattcgttaaataataaataaaatgtcatgtttaagtgaaaattaacaactatgttattgtatacagtttccgtgggagccttacacaacaactattatgtcaatgttgtctccaatttgtttggttggtagtgtagcgtggtgcgtggtggtgtcactcatttgtttccatgttgttgagtggcaccaacccgatagagtgctgcgacaatttggaatgcaacaacctattcccgaatgtcattcgcaaccactgaatatccatggtctaacgctaaaaggcaagcaagatgaaaattggtttcagctgttggccccaatgatcagtcaatggaccaatcgagctgagtttagggtcgacgtttatcctcgacaggatgacctattgagttttaactccgactacatggtctgatataggcgaaaaacgaagatgtttgtcgacccaaagaatgcaaacacaactacattggtatttatatctttttaaatatttaacttcaatttattttttaaagcatgtgcattaatttcctgaccctaataactgcaggctgaagttgcggagacattacagtatatggtgtcaccacaaggtatatggtgtcaccacaagagaggaacacatgaacagttgatgatcccgtgccttatgtagagaagataatgattttatctgaagagcaagag

SEQ ID NO: 14325 - DNA, 1168 bp, Glycine max
  Gm_smallRNAprecursor_7158
tatttgctgacaaaagcagcagcaaagtttccctaaggtacctgcaacttttacgtgactttgaacagtgcaacacgtatgcatgaggacctgtcgtgcttgctttttcacatagagagatgtgcagcgccaccgattacaaaattaaatcaatcagaggtatgtgcatcttaatccaaatgtgggcatgggaacaatgcacgactttggctccaaagagaactactcccgtaatagaaaataaaccactcggacacaggttagttgtttaaaaaataaaatttcttttaaaaataattaataatgtaacgtgtcgccactgatgatttcatattttttgtaggtggctgcgacgtgaaaatcaacatattggcaatgatgatctgatagtttttcgtcacaaattgaatatcatgaaacgacatgaggtaagaagatcgtaatgtattcgttaaataataaataaaatgtcatgtttaagtgaaaattaacaactatgttattgtatacagtttccgtgggagccttacacaacaactattatgtcaatgttgtctccaatttgtttggttggtagtgtagcgtggtgcgtggtggtgtcactcatttgtttccatgttgttgagtggcaccaacccgatagagtgctgcgacaatttggaatgcaacaacctattcccgaatgtcattcgcaaccactgaatatccatggtctaacgctaaaaggcaagcaagatgaaaattggtttcagctgttggccccaatgatcagtcaatggaccaatcgagctgagtttagggtcgacgtttatcctcgacaggatgacctattgagttttaactccgactacatggtctgatataggcgaaaaacgaagatgtttgtcgacccaaagaatgcaaacacaactacattggtatttatatctttttaaatatttaacttcaatttattttttaaagcatgtgcattaatttcctgaccctaataactgcaggctgaagttgcggagacattacagtatatggtgtcaccacaaggtatatggtgtcaccacaagagaggaacacatgaacagttgatgatcccgtgccttatgtagagaagataatgattttatctgaagagcaagagagaatcactaagcttgtggcacatggtccagca

SEQ ID NO: 14326 - DNA, 1122 bp, Glycine max
  Gm_smallRNAprecursor_7159
acttttacgtgactttgaacagtgcaacacgtatgcatgaggacctgtcgtgcttgctttttcacatagagagatgtgcagcgccaccgattacaaaattaaatcaatcagaggtatgtgcatcttaatccaaatgtgggcatgggaacaatgcacgactttggctccaaagagaactactcccgtaatagaaaataaaccactcggacacaggttagttgtttaaaaaataaaatttcttttaaaaataattaataatgtaacgtgtcgccactgatgatttcatattttttgtaggtggctgcgacgtgaaaatcaacatattggcaatgatgatctgatagtttttcgtcacaaattgaatatcatgaaacgacatgaggtaagaagatcgtaatgtattcgttaaataataaataaaatgtcatgtttaagtgaaaattaacaactatgttattgtatacagtttccgtgggagccttacacaacaactattatgtcaatgttgtctccaatttgtttggttggtagtgtagcgtggtgcgtggtggtgtcactcatttgtttccatgttgttgagtggcaccaacccgatagagtgctgcgacaatttggaatgcaacaacctattcccgaatgtcattcgcaaccactgaatatccatggtctaacgctaaaaggcaagcaagatgaaaattggtttcagctgttggccccaatgatcagtcaatggaccaatcgagctgagtttagggtcgacgtttatcctcgacaggatgacctattgagttttaactccgactacatggtctgatataggcgaaaaacgaagatgtttgtcgacccaaagaatgcaaacacaactacattggtatttatatctttttaaatatttaacttcaatttattttttaaagcatgtgcattaatttcctgaccctaataactgcaggctgaagttgcggagacattacagtatatggtgtcaccacaaggtatatggtgtcaccacaagagaggaacacatgaacagttgatgatcccgtgccttatgtagagaagataatgattttatctgaagagcaagagagaatcactaagcttgtggcacatggtccagca

SEQ ID NO: 14327 - DNA, 1130 bp, Glycine max
  Gm_smallRNAprecursor_7160
ctttggctccaaagagaactactcccgtaatagaaaataaaccactcggacacaggttagttgtttaaaaaataaaatttcttttaaaaataattaataatgtaacgtgtcgccactgatgatttcatattttttgtaggtggctgcgacgtgaaaatcaacatattggcaatgatgatctgatagtttttcgtcacaaattgaatatcatgaaacgacatgaggtaagaagatcgtaatgtattcgttaaataataaataaaatgtcatgtttaagtgaaaattaacaactatgttattgtatacagtttccgtgggagccttacacaacaactattatgtcaatgttgtctccaatttgtttggttggtagtgtagcgtggtgcgtggtggtgtcactcatttgtttccatgttgttgagtggcaccaacccgatagagtgctgcgacaatttggaatgcaacaacctattcccgaatgtcattcgcaaccactgaatatccatggtctaacgctaaaaggcaagcaagatgaaaattggtttcagctgttggccccaatgatcagtcaatggaccaatcgagctgagtttagggtcgacgtttatcctcgacaggatgacctattgagttttaactccgactacatggtctgatataggcgaaaaacgaagatgtttgtcgacccaaagaatgcaaacacaactacattggtatttatatctttttaaatatttaacttcaatttattttttaaagcatgtgcattaatttcctgaccctaataactgcaggctgaagttgcggagacattacagtatatggtgtcaccacaaggtatatggtgtcaccacaagagaggaacacatgaacagttgatgatcccgtgccttatgtagagaagataatgattttatctgaagagcaagagagaatcactaagcttgtggcacatggtccagcatctccaccagaagagtttcacatgcttcagtcaagtgttgaaactcggggtgttgacagacgaatggaggttgttgaagcgcaagaattttcccaacaaattgaggagcatggccatgaaatgtattacacgccaccaacattttcttagtatccttcacagatgt

SEQ ID NO: 14328 - DNA, 1193 bp, Glycine max
  Gm_smallRNAprecursor_7161
aaaaataaaatttcttttaaaaataattaataatgtaacgtgtcgccactgatgatttcatattttttgtaggtggctgcgacgtgaaaatcaacatattggcaatgatgatctgatagtttttcgtcacaaattgaatatcatgaaacgacatgaggtaagaagatcgtaatgtattcgttaaataataaataaaatgtcatgtttaagtgaaaattaacaactatgttattgtatacagtttccgtgggagccttacacaacaactattatgtcaatgttgtctccaatttgtttggttggtagtgtagcgtggtgcgtggtggtgtcactcatttgtttccatgttgttgagtggcaccaacccgatagagtgctgcgacaatttggaatgcaacaacctattcccgaatgtcattcgcaaccactgaatatccatggtctaacgctaaaaggcaagcaagatgaaaattggtttcagctgttggccccaatgatcagtcaatggaccaatcgagctgagtttagggtcgacgtttatcctcgacaggatgacctattgagttttaactccgactacatggtctgatataggcgaaaaacgaagatgtttgtcgacccaaagaatgcaaacacaactacattggtatttatatctttttaaatatttaacttcaatttattttttaaagcatgtgcattaatttcctgaccctaataactgcaggctgaagttgcggagacattacagtatatggtgtcaccacaaggtatatggtgtcaccacaagagaggaacacatgaacagttgatgatcccgtgccttatgtagagaagataatgattttatctgaagagcaagagagaatcactaagcttgtggcacatggtccagcatctccaccagaagagtttcacatgcttcagtcaagtgttgaaactcggggtgttgacagacgaatggaggttgttgaagcgcaagaattttcccaacaaattgaggagcatggccatgaaatgtattacacgccaccaacattttcttagtatccttcacagatgtatcagtatccattcgaaggtcatcacactgatatgtttgcaagcgaacattcattcggtgatgttacaaaaacacatcctcattttttcatgaccgactatgaccccttcacaacaacatgatgccccaa

SEQ ID NO: 14329 - DNA, 1081 bp, Glycine max
  Gm_smallRNAprecursor_7162
ctgatagtttttcgtcacaaattgaatatcatgaaacgacatgaggtaagaagatcgtaatgtattcgttaaataataaataaaatgtcatgtttaagtgaaaattaacaactatgttattgtatacagtttccgtgggagccttacacaacaactattatgtcaatgttgtctccaatttgtttggttggtagtgtagcgtggtgcgtggtggtgtcactcatttgtttccatgttgttgagtggcaccaacccgatagagtgctgcgacaatttggaatgcaacaacctattcccgaatgtcattcgcaaccactgaatatccatggtctaacgctaaaaggcaagcaagatgaaaattggtttcagctgttggccccaatgatcagtcaatggaccaatcgagctgagtttagggtcgacgtttatcctcgacaggatgacctattgagttttaactccgactacatggtctgatataggcgaaaaacgaagatgtttgtcgacccaaagaatgcaaacacaactacattggtatttatatctttttaaatatttaacttcaatttattttttaaagcatgtgcattaatttcctgaccctaataactgcaggctgaagttgcggagacattacagtatatggtgtcaccacaaggtatatggtgtcaccacaagagaggaacacatgaacagttgatgatcccgtgccttatgtagagaagataatgattttatctgaagagcaagagagaatcactaagcttgtggcacatggtccagcatctccaccagaagagtttcacatgcttcagtcaagtgttgaaactcggggtgttgacagacgaatggaggttgttgaagcgcaagaattttcccaacaaattgaggagcatggccatgaaatgtattacacgccaccaacattttcttagtatccttcacagatgtatcagtatccattcgaaggtcatcacactgatatgtttgcaagcgaacattcattcggtgatgttacaaaaacacatcctcattttttcatgaccgactatgaccccttcacaacaacatgatgccccaa

SEQ ID NO: 14330 - DNA, 1112 bp, Glycine max
  Gm_smallRNAprecursor_7163
tgtcattcgcaaccactgaatatccatggtctaacgctaaaaggcaagcaagatgaaaattggtttcagctgttggccccaatgatcagtcaatggaccaatcgagctgagtttagggtcgacgtttatcctcgacaggatgacctattgagttttaactccgactacatggtctgatataggcgaaaaacgaagatgtttgtcgacccaaagaatgcaaacacaactacattggtatttatatctttttaaatatttaacttcaatttattttttaaagcatgtgcattaatttcctgaccctaataactgcaggctgaagttgcggagacattacagtatatggtgtcaccacaaggtatatggtgtcaccacaagagaggaacacatgaacagttgatgatcccgtgccttatgtagagaagataatgattttatctgaagagcaagagagaatcactaagcttgtggcacatggtccagcatctccaccagaagagtttcacatgcttcagtcaagtgttgaaactcggggtgttgacagacgaatggaggttgttgaagcgcaagaattttcccaacaaattgaggagcatggccatgaaatgtattacacgccaccaacattttcttagtatccttcacagatgtatcagtatccattcgaaggtcatcacactgatatgtttgcaagcgaacattcattcggtgatgttacaaaaacacatcctcattttttcatgaccgactatgaccccttcacaacaacatgatgccccaatggcaacacctaactccccattagctccacaatggaatgtatccgaagcaatacctgatatgggtgacttattaggtgttgatttgcgttaggagtttttcgctgaggttgagcaagtagaagcggggagacatcgcagcagaataaattctgatcgtcaggcgcgaagatgggatcgaccatgtgacatatcctcacgtcatcacggatatcataatgaatgattttcatgtctctgtttaaatttgttgtatgtaagtataaatttgaacaaattaagtgtcaaattcaaatgacaaacatataacaactaatttaaatataaacatga

SEQ ID NO: 14331 - DNA, 1037 bp, Glycine max
  Gm_smallRNAprecursor_7164
tcattcgcaaccactgaatatccatggtctaacgctaaaaggcaagcaagatgaaaattggtttcagctgttggccccaatgatcagtcaatggaccaatcgagctgagtttagggtcgacgtttatcctcgacaggatgacctattgagttttaactccgactacatggtctgatataggcgaaaaacgaagatgtttgtcgacccaaagaatgcaaacacaactacattggtatttatatctttttaaatatttaacttcaatttattttttaaagcatgtgcattaatttcctgaccctaataactgcaggctgaagttgcggagacattacagtatatggtgtcaccacaaggtatatggtgtcaccacaagagaggaacacatgaacagttgatgatcccgtgccttatgtagagaagataatgattttatctgaagagcaagagagaatcactaagcttgtggcacatggtccagcatctccaccagaagagtttcacatgcttcagtcaagtgttgaaactcggggtgttgacagacgaatggaggttgttgaagcgcaagaattttcccaacaaattgaggagcatggccatgaaatgtattacacgccaccaacattttcttagtatccttcacagatgtatcagtatccattcgaaggtcatcacactgatatgtttgcaagcgaacattcattcggtgatgttacaaaaacacatcctcattttttcatgaccgactatgaccccttcacaacaacatgatgccccaatggcaacacctaactccccattagctccacaatggaatgtatccgaagcaatacctgatatgggtgacttattaggtgttgatttgcgttaggagtttttcgctgaggttgagcaagtagaagcggggagacatcgcagcagaataaattctgatcgtcaggcgcgaagatgggatcgaccatgtgacatatcctcacgtcatcacggatatcataatgaatgattttcatgtctctgtttaaatttgttgtatgtaa

SEQ ID NO: 14332 - DNA, 1037 bp, Glycine max; identical to SEQ ID NO: 14331
  Gm_smallRNAprecursor_7165

SEQ ID NO: 14333 - DNA, 1128 bp, Glycine max
  Gm_smallRNAprecursor_7166
ctaacgctaaaaggcaagcaagatgaaaattggtttcagctgttggccccaatgatcagtcaatggaccaatcgagctgagtttagggtcgacgtttatcctcgacaggatgacctattgagttttaactccgactacatggtctgatataggcgaaaaacgaagatgtttgtcgacccaaagaatgcaaacacaactacattggtatttatatctttttaaatatttaacttcaatttattttttaaagcatgtgcattaatttcctgaccctaataactgcaggctgaagttgcggagacattacagtatatggtgtcaccacaaggtatatggtgtcaccacaagagaggaacacatgaacagttgatgatcccgtgccttatgtagagaagataatgattttatctgaagagcaagagagaatcactaagcttgtggcacatggtccagcatctccaccagaagagtttcacatgcttcagtcaagtgttgaaactcggggtgttgacagacgaatggaggttgttgaagcgcaagaattttcccaacaaattgaggagcatggccatgaaatgtattacacgccaccaacattttcttagtatccttcacagatgtatcagtatccattcgaaggtcatcacactgatatgtttgcaagcgaacattcattcggtgatgttacaaaaacacatcctcattttttcatgaccgactatgaccccttcacaacaacatgatgccccaatggcaacacctaactccccattagctccacaatggaatgtatccgaagcaatacctgatatgggtgacttattaggtgttgatttgcgttaggagtttttcgctgaggttgagcaagtagaagcggggagacatcgcagcagaataaattctgatcgtcaggcgcgaagatgggatcgaccatgtgacatatcctcacgtcatcacggatatcataatgaatgattttcatgtctctgtttaaatttgttgtatgtaagtataaatttgaacaaattaagtgtcaaattcaaatgacaaacatataacaactaatttaaatataaacatgaaaatcattcattatgatgtctgtgatgacgtgagaatgtgtcacat

SEQ ID NO: 14334 - DNA, 1128 bp, Glycine max; identical to SEQ ID NO: 14333
  Gm_smallRNAprecursor_7167

SEQ ID NO: 14335 - DNA, 1129 bp, Glycine max
  Gm_smallRNAprecursor_7168
ctaacgctaaaaggcaagcaagatgaaaattggtttcagctgttggccccaatgatcagtcaatggaccaatcgagctgagtttagggtcgacgtttatcctcgacaggatgacctattgagttttaactccgactacatggtctgatataggcgaaaaacgaagatgtttgtcgacccaaagaatgcaaacacaactacattggtatttatatctttttaaatatttaacttcaatttattttttaaagcatgtgcattaatttcctgaccctaataactgcaggctgaagttgcggagacattacagtatatggtgtcaccacaaggtatatggtgtcaccacaagagaggaacacatgaacagttgatgatcccgtgccttatgtagagaagataatgattttatctgaagagcaagagagaatcactaagcttgtggcacatggtccagcatctccaccagaagagtttcacatgcttcagtcaagtgttgaaactcggggtgttgacagacgaatggaggttgttgaagcgcaagaattttcccaacaaattgaggagcatggccatgaaatgtattacacgccaccaacattttcttagtatccttcacagatgtatcagtatccattcgaaggtcatcacactgatatgtttgcaagcgaacattcattcggtgatgttacaaaaacacatcctcattttttcatgaccgactatgaccccttcacaacaacatgatgccccaatggcaacacctaactccccattagctccacaatggaatgtatccgaagcaatacctgatatgggtgacttattaggtgttgatttgcgttaggagtttttcgctgaggttgagcaagtagaagcggggagacatcgcagcagaataaattctgatcgtcaggcgcgaagatgggatcgaccatgtgacatatcctcacgtcatcacggatatcataatgaatgattttcatgtctctgtttaaatttgttgtatgtaagtataaatttgaacaaattaagtgtcaaattcaaatgacaaacatataacaactaatttaaatataaacatgaaaatcattcattatgatgtctgtgatgacgtgagaatgtgtcacatg

SEQ ID NO: 14336 - DNA, 1116 bp, Glycine max
  Gm_smallRNAprecursor_7169
ctaaaaggcaagcaagatgaaaattggtttcagctgttggccccaatgatcagtcaatggaccaatcgagctgagtttagggtcgacgtttatcctcgacaggatgacctattgagttttaactccgactacatggtctgatataggcgaaaaacgaagatgtttgtcgacccaaagaatgcaaacacaactacattggtatttatatctttttaaatatttaacttcaatttattttttaaagcatgtgcattaatttcctgaccctaataactgcaggctgaagttgcggagacattacagtatatggtgtcaccacaaggtatatggtgtcaccacaagagaggaacacatgaacagttgatgatcccgtgccttatgtagagaagataatgattttatctgaagagcaagagagaatcactaagcttgtggcacatggtccagcatctccaccagaagagtttcacatgcttcagtcaagtgttgaaactcggggtgttgacagacgaatggaggttgttgaagcgcaagaattttcccaacaaattgaggagcatggccatgaaatgtattacacgccaccaacattttcttagtatccttcacagatgtatcagtatccattcgaaggtcatcacactgatatgtttgcaagcgaacattcattcggtgatgttacaaaaacacatcctcattttttcatgaccgactatgaccccttcacaacaacatgatgccccaatggcaacacctaactccccattagctccacaatggaatgtatccgaagcaatacctgatatgggtgacttattaggtgttgatttgcgttaggagtttttcgctgaggttgagcaagtagaagcggggagacatcgcagcagaataaattctgatcgtcaggcgcgaagatgggatcgaccatgtgacatatcctcacgtcatcacggatatcataatgaatgattttcatgtctctgtttaaatttgttgtatgtaagtataaatttgaacaaattaagtgtcaaattcaaatgacaaacatataacaactaatttaaatataaacatgaaaatcattcattatgatgtctgtgatgacgtgagaatgtg

SEQ ID NO: 14337 - DNA, 1112 bp, Glycine max
  Gm_smallRNAprecursor_7170
aaaaggcaagcaagatgaaaattggtttcagctgttggccccaatgatcagtcaatggaccaatcgagctgagtttagggtcgacgtttatcctcgacaggatgacctattgagttttaactccgactacatggtctgatataggcgaaaaacgaagatgtttgtcgacccaaagaatgcaaacacaactacattggtatttatatctttttaaatatttaacttcaatttattttttaaagcatgtgcattaatttcctgaccctaataactgcaggctgaagttgcggagacattacagtatatggtgtcaccacaaggtatatggtgtcaccacaagagaggaacacatgaacagttgatgatcccgtgccttatgtagagaagataatgattttatctgaagagcaagagagaatcactaagcttgtggcacatggtccagcatctccaccagaagagtttcacatgcttcagtcaagtgttgaaactcggggtgttgacagacgaatggaggttgttgaagcgcaagaattttcccaacaaattgaggagcatggccatgaaatgtattacacgccaccaacattttcttagtatccttcacagatgtatcagtatccattcgaaggtcatcacactgatatgtttgcaagcgaacattcattcggtgatgttacaaaaacacatcctcattttttcatgaccgactatgaccccttcacaacaacatgatgccccaatggcaacacctaactccccattagctccacaatggaatgtatccgaagcaatacctgatatgggtgacttattaggtgttgatttgcgttaggagtttttcgctgaggttgagcaagtagaagcggggagacatcgcagcagaataaattctgatcgtcaggcgcgaagatgggatcgaccatgtgacatatcctcacgtcatcacggatatcataatgaatgattttcatgtctctgtttaaatttgttgtatgtaagtataaatttgaacaaattaagtgtcaaattcaaatgacaaacatataacaactaatttaaatataaacatgaaaatcattcattatgatgtctgtgatgacgtgagaatg

SEQ ID NO: 14338 - DNA, 1072 bp, Glycine max
  Gm_smallRNAprecursor_7171
aaggcaagcaagatgaaaattggtttcagctgttggccccaatgatcagtcaatggaccaatcgagctgagtttagggtcgacgtttatcctcgacaggatgacctattgagttttaactccgactacatggtctgatataggcgaaaaacgaagatgtttgtcgacccaaagaatgcaaacacaactacattggtatttatatctttttaaatatttaacttcaatttattttttaaagcatgtgcattaatttcctgaccctaataactgcaggctgaagttgcggagacattacagtatatggtgtcaccacaaggtatatggtgtcaccacaagagaggaacacatgaacagttgatgatcccgtgccttatgtagagaagataatgattttatctgaagagcaagagagaatcactaagcttgtggcacatggtccagcatctccaccagaagagtttcacatgcttcagtcaagtgttgaaactcggggtgttgacagacgaatggaggttgttgaagcgcaagaattttcccaacaaattgaggagcatggccatgaaatgtattacacgccaccaacattttcttagtatccttcacagatgtatcagtatccattcgaaggtcatcacactgatatgtttgcaagcgaacattcattcggtgatgttacaaaaacacatcctcattttttcatgaccgactatgaccccttcacaacaacatgatgccccaatggcaacacctaactccccattagctccacaatggaatgtatccgaagcaatacctgatatgggtgacttattaggtgttgatttgcgttaggagtttttcgctgaggttgagcaagtagaagcggggagacatcgcagcagaataaattctgatcgtcaggcgcgaagatgggatcgaccatgtgacatatcctcacgtcatcacggatatcataatgaatgattttcatgtctctgtttaaatttgttgtatgtaagtataaatttgaacaaattaagtgtcaaattcaaatgacaaacatataacaactaatttaaatataaacatga

SEQ ID NO: 14339 - DNA, 1041 bp, Glycine max
  Gm_smallRNAprecursor_7172
caggatgacctattgagttttaactccgactacatggtctgatataggcgaaaaacgaagatgtttgtcgacccaaagaatgcaaacacaactacattggtatttatatctttttaaatatttaacttcaatttattttttaaagcatgtgcattaatttcctgaccctaataactgcaggctgaagttgcggagacattacagtatatggtgtcaccacaaggtatatggtgtcaccacaagagaggaacacatgaacagttgatgatcccgtgccttatgtagagaagataatgattttatctgaagagcaagagagaatcactaagcttgtggcacatggtccagcatctccaccagaagagtttcacatgcttcagtcaagtgttgaaactcggggtgttgacagacgaatggaggttgttgaagcgcaagaattttcccaacaaattgaggagcatggccatgaaatgtattacacgccaccaacattttcttagtatccttcacagatgtatcagtatccattcgaaggtcatcacactgatatgtttgcaagcgaacattcattcggtgatgttacaaaaacacatcctcattttttcatgaccgactatgaccccttcacaacaacatgatgccccaatggcaacacctaactccccattagctccacaatggaatgtatccgaagcaatacctgatatgggtgacttattaggtgttgatttgcgttaggagtttttcgctgaggttgagcaagtagaagcggggagacatcgcagcagaataaattctgatcgtcaggcgcgaagatgggatcgaccatgtgacatatcctcacgtcatcacggatatcataatgaatgattttcatgtctctgtttaaatttgttgtatgtaagtataaatttgaacaaattaagtgtcaaattcaaatgacaaacatataacaactaatttaaatataaacatgaaaatcattcattatgatgtctgtgatgacgtgagaatgtgtcacatggtcgacctcatcttcgc

SEQ ID NO: 14340 - DNA, 1078 bp, Glycine max
  Gm_smallRNAprecursor_7173
gctgaagttgcggagacattacagtatatggtgtcaccacaaggtatatggtgtcaccacaagagaggaacacatgaacagttgatgatcccgtgccttatgtagagaagataatgattttatctgaagagcaagagagaatcactaagcttgtggcacatggtccagcatctccaccagaagagtttcacatgcttcagtcaagtgttgaaactcggggtgttgacagacgaatggaggttgttgaagcgcaagaattttcccaacaaattgaggagcatggccatgaaatgtattacacgccaccaacattttcttagtatccttcacagatgtatcagtatccattcgaaggtcatcacactgatatgtttgcaagcgaacattcattcggtgatgttacaaaaacacatcctcattttttcatgaccgactatgaccccttcacaacaacatgatgccccaatggcaacacctaactccccattagctccacaatggaatgtatccgaagcaatacctgatatgggtgacttattaggtgttgatttgcgttaggagtttttcgctgaggttgagcaagtagaagcggggagacatcgcagcagaataaattctgatcgtcaggcgcgaagatgggatcgaccatgtgacatatcctcacgtcatcacggatatcataatgaatgattttcatgtctctgtttaaatttgttgtatgtaagtataaatttgaacaaattaagtgtcaaattcaaatgacaaacatataacaactaatttaaatataaacatgaaaatcattcattatgatgtctgtgatgacgtgagaatgtgtcacatggtcgacctcatcttcgcgcttgacgatcaggatttcttctgccgcgatgtctccccgcttctacttgctcaatctcagcagaaaactcctcacgtaaatcaacacctaataagtcactcatataaggtattgttacgggtacattccattgcggagctaatgagacgttaggtgttgccattaggacatcatgttgctgtgaaggggtcatagtcggctataaaaaatgaggat

SEQ ID NO: 14341 - DNA, 1079 bp, Glycine max
  Gm_smallRNAprecursor_7174
gctgaagttgcggagacattacagtatatggtgtcaccacaaggtatatggtgtcaccacaagagaggaacacatgaacagttgatgatcccgtgccttatgtagagaagataatgattttatctgaagagcaagagagaatcactaagcttgtggcacatggtccagcatctccaccagaagagtttcacatgcttcagtcaagtgttgaaactcggggtgttgacagacgaatggaggttgttgaagcgcaagaattttcccaacaaattgaggagcatggccatgaaatgtattacacgccaccaacattttcttagtatccttcacagatgtatcagtatccattcgaaggtcatcacactgatatgtttgcaagcgaacattcattcggtgatgttacaaaaacacatcctcattttttcatgaccgactatgaccccttcacaacaacatgatgccccaatggcaacacctaactccccattagctccacaatggaatgtatccgaagcaatacctgatatgggtgacttattaggtgttgatttgcgttaggagtttttcgctgaggttgagcaagtagaagcggggagacatcgcagcagaataaattctgatcgtcaggcgcgaagatgggatcgaccatgtgacatatcctcacgtcatcacggatatcataatgaatgattttcatgtctctgtttaaatttgttgtatgtaagtataaatttgaacaaattaagtgtcaaattcaaatgacaaacatataacaactaatttaaatataaacatgaaaatcattcattatgatgtctgtgatgacgtgagaatgtgtcacatggtcgacctcatcttcgcgcttgacgatcaggatttcttctgccgcgatgtctccccgcttctacttgctcaatctcagcagaaaactcctcacgtaaatcaacacctaataagtcactcatataaggtattgttacgggtacattccattgcggagctaatgagacgttaggtgttgccattaggacatcatgttgctgtgaaggggtcatagtcggctataaaaaatgaggatg

SEQ ID NO: 14342 - DNA, 1077 bp, Glycine max
  Gm_smallRNAprecursor_7175
ctgaagttgcggagacattacagtatatggtgtcaccacaaggtatatggtgtcaccacaagagaggaacacatgaacagttgatgatcccgtgccttatgtagagaagataatgattttatctgaagagcaagagagaatcactaagcttgtggcacatggtccagcatctccaccagaagagtttcacatgcttcagtcaagtgttgaaactcggggtgttgacagacgaatggaggttgttgaagcgcaagaattttcccaacaaattgaggagcatggccatgaaatgtattacacgccaccaacattttcttagtatccttcacagatgtatcagtatccattcgaaggtcatcacactgatatgtttgcaagcgaacattcattcggtgatgttacaaaaacacatcctcattttttcatgaccgactatgaccccttcacaacaacatgatgccccaatggcaacacctaactccccattagctccacaatggaatgtatccgaagcaatacctgatatgggtgacttattaggtgttgatttgcgttaggagtttttcgctgaggttgagcaagtagaagcggggagacatcgcagcagaataaattctgatcgtcaggcgcgaagatgggatcgaccatgtgacatatcctcacgtcatcacggatatcataatgaatgattttcatgtctctgtttaaatttgttgtatgtaagtataaatttgaacaaattaagtgtcaaattcaaatgacaaacatataacaactaatttaaatataaacatgaaaatcattcattatgatgtctgtgatgacgtgagaatgtgtcacatggtcgacctcatcttcgcgcttgacgatcaggatttcttctgccgcgatgtctccccgcttctacttgctcaatctcagcagaaaactcctcacgtaaatcaacacctaataagtcactcatataaggtattgttacgggtacattccattgcggagctaatgagacgttaggtgttgccattaggacatcatgttgctgtgaaggggtcatagtcggctataaaaaatgaggat

SEQ ID NO: 14343 - DNA, 1155 bp, Glycine max
  Gm_smallRNAprecursor_7176
ctgaagttgcggagacattacagtatatggtgtcaccacaaggtatatggtgtcaccacaagagaggaacacatgaacagttgatgatcccgtgccttatgtagagaagataatgattttatctgaagagcaagagagaatcactaagcttgtggcacatggtccagcatctccaccagaagagtttcacatgcttcagtcaagtgttgaaactcggggtgttgacagacgaatggaggttgttgaagcgcaagaattttcccaacaaattgaggagcatggccatgaaatgtattacacgccaccaacattttcttagtatccttcacagatgtatcagtatccattcgaaggtcatcacactgatatgtttgcaagcgaacattcattcggtgatgttacaaaaacacatcctcattttttcatgaccgactatgaccccttcacaacaacatgatgccccaatggcaacacctaactccccattagctccacaatggaatgtatccgaagcaatacctgatatgggtgacttattaggtgttgatttgcgttaggagtttttcgctgaggttgagcaagtagaagcggggagacatcgcagcagaataaattctgatcgtcaggcgcgaagatgggatcgaccatgtgacatatcctcacgtcatcacggatatcataatgaatgattttcatgtctctgtttaaatttgttgtatgtaagtataaatttgaacaaattaagtgtcaaattcaaatgacaaacatataacaactaatttaaatataaacatgaaaatcattcattatgatgtctgtgatgacgtgagaatgtgtcacatggtcgacctcatcttcgcgcttgacgatcaggatttcttctgccgcgatgtctccccgcttctacttgctcaatctcagcagaaaactcctcacgtaaatcaacacctaataagtcactcatataaggtattgttacgggtacattccattgcggagctaatgagacgttaggtgttgccattaggacatcatgttgctgtgaaggggtcatagtcggctataaaaaatgaggatgtgttttcgcaacatcaccgaacgaatgttcgcttgcaaacatatcagtgtgatgaccttcgaaccgatattgataca

SEQ ID NO: 14344 - DNA, 1117 bp, Glycine max
  Gm_smallRNAprecursor_7177
attacagtatatggtgtcaccacaaggtatatggtgtcaccacaagagaggaacacatgaacagttgatgatcccgtgccttatgtagagaagataatgattttatctgaagagcaagagagaatcactaagcttgtggcacatggtccagcatctccaccagaagagtttcacatgcttcagtcaagtgttgaaactcggggtgttgacagacgaatggaggttgttgaagcgcaagaattttcccaacaaattgaggagcatggccatgaaatgtattacacgccaccaacattttcttagtatccttcacagatgtatcagtatccattcgaaggtcatcacactgatatgtttgcaagcgaacattcattcggtgatgttacaaaaacacatcctcattttttcatgaccgactatgaccccttcacaacaacatgatgccccaatggcaacacctaactccccattagctccacaatggaatgtatccgaagcaatacctgatatgggtgacttattaggtgttgatttgcgttaggagtttttcgctgaggttgagcaagtagaagcggggagacatcgcagcagaataaattctgatcgtcaggcgcgaagatgggatcgaccatgtgacatatcctcacgtcatcacggatatcataatgaatgattttcatgtctctgtttaaatttgttgtatgtaagtataaatttgaacaaattaagtgtcaaattcaaatgacaaacatataacaactaatttaaatataaacatgaaaatcattcattatgatgtctgtgatgacgtgagaatgtgtcacatggtcgacctcatcttcgcgcttgacgatcaggatttcttctgccgcgatgtctccccgcttctacttgctcaatctcagcagaaaactcctcacgtaaatcaacacctaataagtcactcatataaggtattgttacgggtacattccattgcggagctaatgagacgttaggtgttgccattaggacatcatgttgctgtgaaggggtcatagtcggctataaaaaatgaggatgtgttttcgcaacatcaccgaacgaatgttcgcttgcaaacatatcagtgtgatga

SEQ ID NO: 14345 - DNA, 1136 bp, Glycine max
  Gm_smallRNAprecursor_7178
attacagtatatggtgtcaccacaaggtatatggtgtcaccacaagagaggaacacatgaacagttgatgatcccgtgccttatgtagagaagataatgattttatctgaagagcaagagagaatcactaagcttgtggcacatggtccagcatctccaccagaagagtttcacatgcttcagtcaagtgttgaaactcggggtgttgacagacgaatggaggttgttgaagcgcaagaattttcccaacaaattgaggagcatggccatgaaatgtattacacgccaccaacattttcttagtatccttcacagatgtatcagtatccattcgaaggtcatcacactgatatgtttgcaagcgaacattcattcggtgatgttacaaaaacacatcctcattttttcatgaccgactatgaccccttcacaacaacatgatgccccaatggcaacacctaactccccattagctccacaatggaatgtatccgaagcaatacctgatatgggtgacttattaggtgttgatttgcgttaggagtttttcgctgaggttgagcaagtagaagcggggagacatcgcagcagaataaattctgatcgtcaggcgcgaagatgggatcgaccatgtgacatatcctcacgtcatcacggatatcataatgaatgattttcatgtctctgtttaaatttgttgtatgtaagtataaatttgaacaaattaagtgtcaaattcaaatgacaaacatataacaactaatttaaatataaacatgaaaatcattcattatgatgtctgtgatgacgtgagaatgtgtcacatggtcgacctcatcttcgcgcttgacgatcaggatttcttctgccgcgatgtctccccgcttctacttgctcaatctcagcagaaaactcctcacgtaaatcaacacctaataagtcactcatataaggtattgttacgggtacattccattgcggagctaatgagacgttaggtgttgccattaggacatcatgttgctgtgaaggggtcatagtcggctataaaaaatgaggatgtgttttcgcaacatcaccgaacgaatgttcgcttgcaaacatatcagtgtgatgaccttcgaaccgatattgat

SEQ ID NO: 14346 - DNA, 1068 bp, Glycine max
  Gm_smallRNAprecursor_7179
cagttgatgatcccgtgccttatgtagagaagataatgattttatctgaagagcaagagagaatcactaagcttgtggcacatggtccagcatctccaccagaagagtttcacatgcttcagtcaagtgttgaaactcggggtgttgacagacgaatggaggttgttgaagcgcaagaattttcccaacaaattgaggagcatggccatgaaatgtattacacgccaccaacattttcttagtatccttcacagatgtatcagtatccattcgaaggtcatcacactgatatgtttgcaagcgaacattcattcggtgatgttacaaaaacacatcctcattttttcatgaccgactatgaccccttcacaacaacatgatgccccaatggcaacacctaactccccattagctccacaatggaatgtatccgaagcaatacctgatatgggtgacttattaggtgttgatttgcgttaggagtttttcgctgaggttgagcaagtagaagcggggagacatcgcagcagaataaattctgatcgtcaggcgcgaagatgggatcgaccatgtgacatatcctcacgtcatcacggatatcataatgaatgattttcatgtctctgtttaaatttgttgtatgtaagtataaatttgaacaaattaagtgtcaaattcaaatgacaaacatataacaactaatttaaatataaacatgaaaatcattcattatgatgtctgtgatgacgtgagaatgtgtcacatggtcgacctcatcttcgcgcttgacgatcaggatttcttctgccgcgatgtctccccgcttctacttgctcaatctcagcagaaaactcctcacgtaaatcaacacctaataagtcactcatataaggtattgttacgggtacattccattgcggagctaatgagacgttaggtgttgccattaggacatcatgttgctgtgaaggggtcatagtcggctataaaaaatgaggatgtgttttcgcaacatcaccgaacgaatgttcgcttgcaaacatatcagtgtgatgaccttcgaaccga

SEQ ID NO: 14347 - DNA, 1031 bp, Glycine max
  Gm_smallRNAprecursor_7180
agagagaatcactaagcttgtggcacatggtccagcatctccaccagaagagtttcacatgcttcagtcaagtgttgaaactcggggtgttgacagacgaatggaggttgttgaagcgcaagaattttcccaacaaattgaggagcatggccatgaaatgtattacacgccaccaacattttcttagtatccttcacagatgtatcagtatccattcgaaggtcatcacactgatatgtttgcaagcgaacattcattcggtgatgttacaaaaacacatcctcattttttcatgaccgactatgaccccttcacaacaacatgatgccccaatggcaacacctaactccccattagctccacaatggaatgtatccgaagcaatacctgatatgggtgacttattaggtgttgatttgcgttaggagtttttcgctgaggttgagcaagtagaagcggggagacatcgcagcagaataaattctgatcgtcaggcgcgaagatgggatcgaccatgtgacatatcctcacgtcatcacggatatcataatgaatgattttcatgtctctgtttaaatttgttgtatgtaagtataaatttgaacaaattaagtgtcaaattcaaatgacaaacatataacaactaatttaaatataaacatgaaaatcattcattatgatgtctgtgatgacgtgagaatgtgtcacatggtcgacctcatcttcgcgcttgacgatcaggatttcttctgccgcgatgtctccccgcttctacttgctcaatctcagcagaaaactcctcacgtaaatcaacacctaataagtcactcatataaggtattgttacgggtacattccattgcggagctaatgagacgttaggtgttgccattaggacatcatgttgctgtgaaggggtcatagtcggctataaaaaatgaggatgtgttttcgcaacatcaccgaacgaatgttcgcttgcaaacatatcagtgtgatgaccttcgaaccgatattgatacatctgtgaa

SEQ ID NO: 14348 - DNA, 1043 bp, Glycine max
  Gm_smallRNAprecursor_7181
agagagaatcactaagcttgtggcacatggtccagcatctccaccagaagagtttcacatgcttcagtcaagtgttgaaactcggggtgttgacagacgaatggaggttgttgaagcgcaagaattttcccaacaaattgaggagcatggccatgaaatgtattacacgccaccaacattttcttagtatccttcacagatgtatcagtatccattcgaaggtcatcacactgatatgtttgcaagcgaacattcattcggtgatgttacaaaaacacatcctcattttttcatgaccgactatgaccccttcacaacaacatgatgccccaatggcaacacctaactccccattagctccacaatggaatgtatccgaagcaatacctgatatgggtgacttattaggtgttgatttgcgttaggagtttttcgctgaggttgagcaagtagaagcggggagacatcgcagcagaataaattctgatcgtcaggcgcgaagatgggatcgaccatgtgacatatcctcacgtcatcacggatatcataatgaatgattttcatgtctctgtttaaatttgttgtatgtaagtataaatttgaacaaattaagtgtcaaattcaaatgacaaacatataacaactaatttaaatataaacatgaaaatcattcattatgatgtctgtgatgacgtgagaatgtgtcacatggtcgacctcatcttcgcgcttgacgatcaggatttcttctgccgcgatgtctccccgcttctacttgctcaatctcagcagaaaactcctcacgtaaatcaacacctaataagtcactcatataaggtattgttacgggtacattccattgcggagctaatgagacgttaggtgttgccattaggacatcatgttgctgtgaaggggtcatagtcggctataaaaaatgaggatgtgttttcgcaacatcaccgaacgaatgttcgcttgcaaacatatcagtgtgatgaccttcgaaccgatattgatacatctgtgaaggatacaaagaa

SEQ ID NO: 14349 - DNA, 1169 bp, Glycine max
  Gm_smallRNAprecursor_7182
agagagaatcactaagcttgtggcacatggtccagcatctccaccagaagagtttcacatgcttcagtcaagtgttgaaactcggggtgttgacagacgaatggaggttgttgaagcgcaagaattttcccaacaaattgaggagcatggccatgaaatgtattacacgccaccaacattttcttagtatccttcacagatgtatcagtatccattcgaaggtcatcacactgatatgtttgcaagcgaacattcattcggtgatgttacaaaaacacatcctcattttttcatgaccgactatgaccccttcacaacaacatgatgccccaatggcaacacctaactccccattagctccacaatggaatgtatccgaagcaatacctgatatgggtgacttattaggtgttgatttgcgttaggagtttttcgctgaggttgagcaagtagaagcggggagacatcgcagcagaataaattctgatcgtcaggcgcgaagatgggatcgaccatgtgacatatcctcacgtcatcacggatatcataatgaatgattttcatgtctctgtttaaatttgttgtatgtaagtataaatttgaacaaattaagtgtcaaattcaaatgacaaacatataacaactaatttaaatataaacatgaaaatcattcattatgatgtctgtgatgacgtgagaatgtgtcacatggtcgacctcatcttcgcgcttgacgatcaggatttcttctgccgcgatgtctccccgcttctacttgctcaatctcagcagaaaactcctcacgtaaatcaacacctaataagtcactcatataaggtattgttacgggtacattccattgcggagctaatgagacgttaggtgttgccattaggacatcatgttgctgtgaaggggtcatagtcggctataaaaaatgaggatgtgttttcgcaacatcaccgaacgaatgttcgcttgcaaacatatcagtgtgatgaccttcgaaccgatattgatacatctgtgaaggatacaaagaaaatgttgctggcttgtaatacattccatggccacgctcctcaatttgttgggaaaattcttgcggttcaacagcctcccttcgcctgtcaaaaccccgagttttaacacttaactgaagcatgtga

SEQ ID NO: 14350 - DNA, 1170 bp, Glycine max
  Gm_smallRNAprecursor_7183
agagagaatcactaagcttgtggcacatggtccagcatctccaccagaagagtttcacatgcttcagtcaagtgttgaaactcggggtgttgacagacgaatggaggttgttgaagcgcaagaattttcccaacaaattgaggagcatggccatgaaatgtattacacgccaccaacattttcttagtatccttcacagatgtatcagtatccattcgaaggtcatcacactgatatgtttgcaagcgaacattcattcggtgatgttacaaaaacacatcctcattttttcatgaccgactatgaccccttcacaacaacatgatgccccaatggcaacacctaactccccattagctccacaatggaatgtatccgaagcaatacctgatatgggtgacttattaggtgttgatttgcgttaggagtttttcgctgaggttgagcaagtagaagcggggagacatcgcagcagaataaattctgatcgtcaggcgcgaagatgggatcgaccatgtgacatatcctcacgtcatcacggatatcataatgaatgattttcatgtctctgtttaaatttgttgtatgtaagtataaatttgaacaaattaagtgtcaaattcaaatgacaaacatataacaactaatttaaatataaacatgaaaatcattcattatgatgtctgtgatgacgtgagaatgtgtcacatggtcgacctcatcttcgcgcttgacgatcaggatttcttctgccgcgatgtctccccgcttctacttgctcaatctcagcagaaaactcctcacgtaaatcaacacctaataagtcactcatataaggtattgttacgggtacattccattgcggagctaatgagacgttaggtgttgccattaggacatcatgttgctgtgaaggggtcatagtcggctataaaaaatgaggatgtgttttcgcaacatcaccgaacgaatgttcgcttgcaaacatatcagtgtgatgaccttcgaaccgatattgatacatctgtgaaggatacaaagaaaatgttgctggcttgtaatacattccatggccacgctcctcaatttgttgggaaaattcttgcggttcaacagcctcccttcgcctgtcaaaaccccgagttttaacacttaactgaagcatgtgaa

SEQ ID NO: 14351 - DNA, 1178 bp, Glycine max
  Gm_smallRNAprecursor_7184
gagagaatcactaagcttgtggcacatggtccagcatctccaccagaagagtttcacatgcttcagtcaagtgttgaaactcggggtgttgacagacgaatggaggttgttgaagcgcaagaattttcccaacaaattgaggagcatggccatgaaatgtattacacgccaccaacattttcttagtatccttcacagatgtatcagtatccattcgaaggtcatcacactgatatgtttgcaagcgaacattcattcggtgatgttacaaaaacacatcctcattttttcatgaccgactatgaccccttcacaacaacatgatgccccaatggcaacacctaactccccattagctccacaatggaatgtatccgaagcaatacctgatatgggtgacttattaggtgttgatttgcgttaggagtttttcgctgaggttgagcaagtagaagcggggagacatcgcagcagaataaattctgatcgtcaggcgcgaagatgggatcgaccatgtgacatatcctcacgtcatcacggatatcataatgaatgattttcatgtctctgtttaaatttgttgtatgtaagtataaatttgaacaaattaagtgtcaaattcaaatgacaaacatataacaactaatttaaatataaacatgaaaatcattcattatgatgtctgtgatgacgtgagaatgtgtcacatggtcgacctcatcttcgcgcttgacgatcaggatttcttctgccgcgatgtctccccgcttctacttgctcaatctcagcagaaaactcctcacgtaaatcaacacctaataagtcactcatataaggtattgttacgggtacattccattgcggagctaatgagacgttaggtgttgccattaggacatcatgttgctgtgaaggggtcatagtcggctataaaaaatgaggatgtgttttcgcaacatcaccgaacgaatgttcgcttgcaaacatatcagtgtgatgaccttcgaaccgatattgatacatctgtgaaggatacaaagaaaatgttgctggcttgtaatacattccatggccacgctcctcaatttgttgggaaaattcttgcggttcaacagcctcccttcgcctgtcaaaaccccgagttttaacacttaactgaagcatgtgaaactcttgtg

SEQ ID NO: 14352 - DNA, 1200 bp, Glycine max
  Gm_smallRNAprecursor_7185
gagagaatcactaagcttgtggcacatggtccagcatctccaccagaagagtttcacatgcttcagtcaagtgttgaaactcggggtgttgacagacgaatggaggttgttgaagcgcaagaattttcccaacaaattgaggagcatggccatgaaatgtattacacgccaccaacattttcttagtatccttcacagatgtatcagtatccattcgaaggtcatcacactgatatgtttgcaagcgaacattcattcggtgatgttacaaaaacacatcctcattttttcatgaccgactatgaccccttcacaacaacatgatgccccaatggcaacacctaactccccattagctccacaatggaatgtatccgaagcaatacctgatatgggtgacttattaggtgttgatttgcgttaggagtttttcgctgaggttgagcaagtagaagcggggagacatcgcagcagaataaattctgatcgtcaggcgcgaagatgggatcgaccatgtgacatatcctcacgtcatcacggatatcataatgaatgattttcatgtctctgtttaaatttgttgtatgtaagtataaatttgaacaaattaagtgtcaaattcaaatgacaaacatataacaactaatttaaatataaacatgaaaatcattcattatgatgtctgtgatgacgtgagaatgtgtcacatggtcgacctcatcttcgcgcttgacgatcaggatttcttctgccgcgatgtctccccgcttctacttgctcaatctcagcagaaaactcctcacgtaaatcaacacctaataagtcactcatataaggtattgttacgggtacattccattgcggagctaatgagacgttaggtgttgccattaggacatcatgttgctgtgaaggggtcatagtcggctataaaaaatgaggatgtgttttcgcaacatcaccgaacgaatgttcgcttgcaaacatatcagtgtgatgaccttcgaaccgatattgatacatctgtgaaggatacaaagaaaatgttgctggcttgtaatacattccatggccacgctcctcaatttgttgggaaaattcttgcggttcaacagcctcccttcgcctgtcaaaaccccgagttttaacacttaactgaagcatgtgaaactcttgtggtaggaatcaacgcatgctggt

SEQ ID NO: 14353 - DNA, 1248 bp, Glycine max
  Gm_smallRNAprecursor_7186
gagagaatcactaagcttgtggcacatggtccagcatctccaccagaagagtttcacatgcttcagtcaagtgttgaaactcggggtgttgacagacgaatggaggttgttgaagcgcaagaattttcccaacaaattgaggagcatggccatgaaatgtattacacgccaccaacattttcttagtatccttcacagatgtatcagtatccattcgaaggtcatcacactgatatgtttgcaagcgaacattcattcggtgatgttacaaaaacacatcctcattttttcatgaccgactatgaccccttcacaacaacatgatgccccaatggcaacacctaactccccattagctccacaatggaatgtatccgaagcaatacctgatatgggtgacttattaggtgttgatttgcgttaggagtttttcgctgaggttgagcaagtagaagcggggagacatcgcagcagaataaattctgatcgtcaggcgcgaagatgggatcgaccatgtgacatatcctcacgtcatcacggatatcataatgaatgattttcatgtctctgtttaaatttgttgtatgtaagtataaatttgaacaaattaagtgtcaaattcaaatgacaaacatataacaactaatttaaatataaacatgaaaatcattcattatgatgtctgtgatgacgtgagaatgtgtcacatggtcgacctcatcttcgcgcttgacgatcaggatttcttctgccgcgatgtctccccgcttctacttgctcaatctcagcagaaaactcctcacgtaaatcaacacctaataagtcactcatataaggtattgttacgggtacattccattgcggagctaatgagacgttaggtgttgccattaggacatcatgttgctgtgaaggggtcatagtcggctataaaaaatgaggatgtgttttcgcaacatcaccgaacgaatgttcgcttgcaaacatatcagtgtgatgaccttcgaaccgatattgatacatctgtgaaggatacaaagaaaatgttgctggcttgtaatacattccatggccacgctcctcaatttgttgggaaaattcttgcggttcaacagcctcccttcgcctgtcaaaaccccgagttttaacacttaactgaagcatgtgaaactcttgtggtaggaatcaacgcatgctggttcatgtgccataagctcagtgattctctcttgcttttcgaataaaatc

SEQ ID NO: 14354 - DNA, 1165 bp, Glycine max
  Gm_smallRNAprecursor_7187
aatcactaagcttgtggcacatggtccagcatctccaccagaagagtttcacatgcttcagtcaagtgttgaaactcggggtgttgacagacgaatggaggttgttgaagcgcaagaattttcccaacaaattgaggagcatggccatgaaatgtattacacgccaccaacattttcttagtatccttcacagatgtatcagtatccattcgaaggtcatcacactgatatgtttgcaagcgaacattcattcggtgatgttacaaaaacacatcctcattttttcatgaccgactatgaccccttcacaacaacatgatgccccaatggcaacacctaactccccattagctccacaatggaatgtatccgaagcaatacctgatatgggtgacttattaggtgttgatttgcgttaggagtttttcgctgaggttgagcaagtagaagcggggagacatcgcagcagaataaattctgatcgtcaggcgcgaagatgggatcgaccatgtgacatatcctcacgtcatcacggatatcataatgaatgattttcatgtctctgtttaaatttgttgtatgtaagtataaatttgaacaaattaagtgtcaaattcaaatgacaaacatataacaactaatttaaatataaacatgaaaatcattcattatgatgtctgtgatgacgtgagaatgtgtcacatggtcgacctcatcttcgcgcttgacgatcaggatttcttctgccgcgatgtctccccgcttctacttgctcaatctcagcagaaaactcctcacgtaaatcaacacctaataagtcactcatataaggtattgttacgggtacattccattgcggagctaatgagacgttaggtgttgccattaggacatcatgttgctgtgaaggggtcatagtcggctataaaaaatgaggatgtgttttcgcaacatcaccgaacgaatgttcgcttgcaaacatatcagtgtgatgaccttcgaaccgatattgatacatctgtgaaggatacaaagaaaatgttgctggcttgtaatacattccatggccacgctcctcaatttgttgggaaaattcttgcggttcaacagcctcccttcgcctgtcaaaaccccgagttttaacacttaactgaagcatgtgaaa

SEQ ID NO: 14355 - DNA, 1167 bp, Glycine max
  Gm_smallRNAprecursor_7188
aatcactaagcttgtggcacatggtccagcatctccaccagaagagtttcacatgcttcagtcaagtgttgaaactcggggtgttgacagacgaatggaggttgttgaagcgcaagaattttcccaacaaattgaggagcatggccatgaaatgtattacacgccaccaacattttcttagtatccttcacagatgtatcagtatccattcgaaggtcatcacactgatatgtttgcaagcgaacattcattcggtgatgttacaaaaacacatcctcattttttcatgaccgactatgaccccttcacaacaacatgatgccccaatggcaacacctaactccccattagctccacaatggaatgtatccgaagcaatacctgatatgggtgacttattaggtgttgatttgcgttaggagtttttcgctgaggttgagcaagtagaagcggggagacatcgcagcagaataaattctgatcgtcaggcgcgaagatgggatcgaccatgtgacatatcctcacgtcatcacggatatcataatgaatgattttcatgtctctgtttaaatttgttgtatgtaagtataaatttgaacaaattaagtgtcaaattcaaatgacaaacatataacaactaatttaaatataaacatgaaaatcattcattatgatgtctgtgatgacgtgagaatgtgtcacatggtcgacctcatcttcgcgcttgacgatcaggatttcttctgccgcgatgtctccccgcttctacttgctcaatctcagcagaaaactcctcacgtaaatcaacacctaataagtcactcatataaggtattgttacgggtacattccattgcggagctaatgagacgttaggtgttgccattaggacatcatgttgctgtgaaggggtcatagtcggctataaaaaatgaggatgtgttttcgcaacatcaccgaacgaatgttcgcttgcaaacatatcagtgtgatgaccttcgaaccgatattgatacatctgtgaaggatacaaagaaaatgttgctggcttgtaatacattccatggccacgctcctcaatttgttgggaaaattcttgcggttcaacagcctcccttcgcctgtcaaaaccccgagttttaacacttaactgaagcatgtgaaact

SEQ ID NO: 14356 - DNA, 1188 bp, Glycine max
  Gm_smallRNAprecursor_7189
aatcactaagcttgtggcacatggtccagcatctccaccagaagagtttcacatgcttcagtcaagtgttgaaactcggggtgttgacagacgaatggaggttgttgaagcgcaagaattttcccaacaaattgaggagcatggccatgaaatgtattacacgccaccaacattttcttagtatccttcacagatgtatcagtatccattcgaaggtcatcacactgatatgtttgcaagcgaacattcattcggtgatgttacaaaaacacatcctcattttttcatgaccgactatgaccccttcacaacaacatgatgccccaatggcaacacctaactccccattagctccacaatggaatgtatccgaagcaatacctgatatgggtgacttattaggtgttgatttgcgttaggagtttttcgctgaggttgagcaagtagaagcggggagacatcgcagcagaataaattctgatcgtcaggcgcgaagatgggatcgaccatgtgacatatcctcacgtcatcacggatatcataatgaatgattttcatgtctctgtttaaatttgttgtatgtaagtataaatttgaacaaattaagtgtcaaattcaaatgacaaacatataacaactaatttaaatataaacatgaaaatcattcattatgatgtctgtgatgacgtgagaatgtgtcacatggtcgacctcatcttcgcgcttgacgatcaggatttcttctgccgcgatgtctccccgcttctacttgctcaatctcagcagaaaactcctcacgtaaatcaacacctaataagtcactcatataaggtattgttacgggtacattccattgcggagctaatgagacgttaggtgttgccattaggacatcatgttgctgtgaaggggtcatagtcggctataaaaaatgaggatgtgttttcgcaacatcaccgaacgaatgttcgcttgcaaacatatcagtgtgatgaccttcgaaccgatattgatacatctgtgaaggatacaaagaaaatgttgctggcttgtaatacattccatggccacgctcctcaatttgttgggaaaattcttgcggttcaacagcctcccttcgcctgtcaaaaccccgagttttaacacttaactgaagcatgtgaaactcttgtggtaggaatcaacgca

SEQ ID NO: 14357 - DNA, 1189 bp, Glycine max
  Gm_smallRNAprecursor_7190
aatcactaagcttgtggcacatggtccagcatctccaccagaagagtttcacatgcttcagtcaagtgttgaaactcggggtgttgacagacgaatggaggttgttgaagcgcaagaattttcccaacaaattgaggagcatggccatgaaatgtattacacgccaccaacattttcttagtatccttcacagatgtatcagtatccattcgaaggtcatcacactgatatgtttgcaagcgaacattcattcggtgatgttacaaaaacacatcctcattttttcatgaccgactatgaccccttcacaacaacatgatgccccaatggcaacacctaactccccattagctccacaatggaatgtatccgaagcaatacctgatatgggtgacttattaggtgttgatttgcgttaggagtttttcgctgaggttgagcaagtagaagcggggagacatcgcagcagaataaattctgatcgtcaggcgcgaagatgggatcgaccatgtgacatatcctcacgtcatcacggatatcataatgaatgattttcatgtctctgtttaaatttgttgtatgtaagtataaatttgaacaaattaagtgtcaaattcaaatgacaaacatataacaactaatttaaatataaacatgaaaatcattcattatgatgtctgtgatgacgtgagaatgtgtcacatggtcgacctcatcttcgcgcttgacgatcaggatttcttctgccgcgatgtctccccgcttctacttgctcaatctcagcagaaaactcctcacgtaaatcaacacctaataagtcactcatataaggtattgttacgggtacattccattgcggagctaatgagacgttaggtgttgccattaggacatcatgttgctgtgaaggggtcatagtcggctataaaaaatgaggatgtgttttcgcaacatcaccgaacgaatgttcgcttgcaaacatatcagtgtgatgaccttcgaaccgatattgatacatctgtgaaggatacaaagaaaatgttgctggcttgtaatacattccatggccacgctcctcaatttgttgggaaaattcttgcggttcaacagcctcccttcgcctgtcaaaaccccgagttttaacacttaactgaagcatgtgaaactcttgtggtaggaatcaacgcat

SEQ ID NO: 14358 - DNA, 1187 bp, Glycine max
  Gm_smallRNAprecursor_7191
atcactaagcttgtggcacatggtccagcatctccaccagaagagtttcacatgcttcagtcaagtgttgaaactcggggtgttgacagacgaatggaggttgttgaagcgcaagaattttcccaacaaattgaggagcatggccatgaaatgtattacacgccaccaacattttcttagtatccttcacagatgtatcagtatccattcgaaggtcatcacactgatatgtttgcaagcgaacattcattcggtgatgttacaaaaacacatcctcattttttcatgaccgactatgaccccttcacaacaacatgatgccccaatggcaacacctaactccccattagctccacaatggaatgtatccgaagcaatacctgatatgggtgacttattaggtgttgatttgcgttaggagtttttcgctgaggttgagcaagtagaagcggggagacatcgcagcagaataaattctgatcgtcaggcgcgaagatgggatcgaccatgtgacatatcctcacgtcatcacggatatcataatgaatgattttcatgtctctgtttaaatttgttgtatgtaagtataaatttgaacaaattaagtgtcaaattcaaatgacaaacatataacaactaatttaaatataaacatgaaaatcattcattatgatgtctgtgatgacgtgagaatgtgtcacatggtcgacctcatcttcgcgcttgacgatcaggatttcttctgccgcgatgtctccccgcttctacttgctcaatctcagcagaaaactcctcacgtaaatcaacacctaataagtcactcatataaggtattgttacgggtacattccattgcggagctaatgagacgttaggtgttgccattaggacatcatgttgctgtgaaggggtcatagtcggctataaaaaatgaggatgtgttttcgcaacatcaccgaacgaatgttcgcttgcaaacatatcagtgtgatgaccttcgaaccgatattgatacatctgtgaaggatacaaagaaaatgttgctggcttgtaatacattccatggccacgctcctcaatttgttgggaaaattcttgcggttcaacagcctcccttcgcctgtcaaaaccccgagttttaacacttaactgaagcatgtgaaactcttgtggtaggaatcaacgca

SEQ ID NO: 14359 - DNA, 1182 bp, Glycine max
  Gm_smallRNAprecursor_7192
cactaagcttgtggcacatggtccagcatctccaccagaagagtttcacatgcttcagtcaagtgttgaaactcggggtgttgacagacgaatggaggttgttgaagcgcaagaattttcccaacaaattgaggagcatggccatgaaatgtattacacgccaccaacattttcttagtatccttcacagatgtatcagtatccattcgaaggtcatcacactgatatgtttgcaagcgaacattcattcggtgatgttacaaaaacacatcctcattttttcatgaccgactatgaccccttcacaacaacatgatgccccaatggcaacacctaactccccattagctccacaatggaatgtatccgaagcaatacctgatatgggtgacttattaggtgttgatttgcgttaggagtttttcgctgaggttgagcaagtagaagcggggagacatcgcagcagaataaattctgatcgtcaggcgcgaagatgggatcgaccatgtgacatatcctcacgtcatcacggatatcataatgaatgattttcatgtctctgtttaaatttgttgtatgtaagtataaatttgaacaaattaagtgtcaaattcaaatgacaaacatataacaactaatttaaatataaacatgaaaatcattcattatgatgtctgtgatgacgtgagaatgtgtcacatggtcgacctcatcttcgcgcttgacgatcaggatttcttctgccgcgatgtctccccgcttctacttgctcaatctcagcagaaaactcctcacgtaaatcaacacctaataagtcactcatataaggtattgttacgggtacattccattgcggagctaatgagacgttaggtgttgccattaggacatcatgttgctgtgaaggggtcatagtcggctataaaaaatgaggatgtgttttcgcaacatcaccgaacgaatgttcgcttgcaaacatatcagtgtgatgaccttcgaaccgatattgatacatctgtgaaggatacaaagaaaatgttgctggcttgtaatacattccatggccacgctcctcaatttgttgggaaaattcttgcggttcaacagcctcccttcgcctgtcaaaaccccgagttttaacacttaactgaagcatgtgaaactcttgtggtaggaatcaac

SEQ ID NO: 14360 - DNA, 1183 bp, Glycine max
  Gm_smallRNAprecursor_7193
cactaagcttgtggcacatggtccagcatctccaccagaagagtttcacatgcttcagtcaagtgttgaaactcggggtgttgacagacgaatggaggttgttgaagcgcaagaattttcccaacaaattgaggagcatggccatgaaatgtattacacgccaccaacattttcttagtatccttcacagatgtatcagtatccattcgaaggtcatcacactgatatgtttgcaagcgaacattcattcggtgatgttacaaaaacacatcctcattttttcatgaccgactatgaccccttcacaacaacatgatgccccaatggcaacacctaactccccattagctccacaatggaatgtatccgaagcaatacctgatatgggtgacttattaggtgttgatttgcgttaggagtttttcgctgaggttgagcaagtagaagcggggagacatcgcagcagaataaattctgatcgtcaggcgcgaagatgggatcgaccatgtgacatatcctcacgtcatcacggatatcataatgaatgattttcatgtctctgtttaaatttgttgtatgtaagtataaatttgaacaaattaagtgtcaaattcaaatgacaaacatataacaactaatttaaatataaacatgaaaatcattcattatgatgtctgtgatgacgtgagaatgtgtcacatggtcgacctcatcttcgcgcttgacgatcaggatttcttctgccgcgatgtctccccgcttctacttgctcaatctcagcagaaaactcctcacgtaaatcaacacctaataagtcactcatataaggtattgttacgggtacattccattgcggagctaatgagacgttaggtgttgccattaggacatcatgttgctgtgaaggggtcatagtcggctataaaaaatgaggatgtgttttcgcaacatcaccgaacgaatgttcgcttgcaaacatatcagtgtgatgaccttcgaaccgatattgatacatctgtgaaggatacaaagaaaatgttgctggcttgtaatacattccatggccacgctcctcaatttgttgggaaaattcttgcggttcaacagcctcccttcgcctgtcaaaaccccgagttttaacacttaactgaagcatgtgaaactcttgtggtaggaatcaacg

SEQ ID NO: 14361 - DNA, 1180 bp, Glycine max
  Gm_smallRNAprecursor_7194
actaagcttgtggcacatggtccagcatctccaccagaagagtttcacatgcttcagtcaagtgttgaaactcggggtgttgacagacgaatggaggttgttgaagcgcaagaattttcccaacaaattgaggagcatggccatgaaatgtattacacgccaccaacattttcttagtatccttcacagatgtatcagtatccattcgaaggtcatcacactgatatgtttgcaagcgaacattcattcggtgatgttacaaaaacacatcctcattttttcatgaccgactatgaccccttcacaacaacatgatgccccaatggcaacacctaactccccattagctccacaatggaatgtatccgaagcaatacctgatatgggtgacttattaggtgttgatttgcgttaggagtttttcgctgaggttgagcaagtagaagcggggagacatcgcagcagaataaattctgatcgtcaggcgcgaagatgggatcgaccatgtgacatatcctcacgtcatcacggatatcataatgaatgattttcatgtctctgtttaaatttgttgtatgtaagtataaatttgaacaaattaagtgtcaaattcaaatgacaaacatataacaactaatttaaatataaacatgaaaatcattcattatgatgtctgtgatgacgtgagaatgtgtcacatggtcgacctcatcttcgcgcttgacgatcaggatttcttctgccgcgatgtctccccgcttctacttgctcaatctcagcagaaaactcctcacgtaaatcaacacctaataagtcactcatataaggtattgttacgggtacattccattgcggagctaatgagacgttaggtgttgccattaggacatcatgttgctgtgaaggggtcatagtcggctataaaaaatgaggatgtgttttcgcaacatcaccgaacgaatgttcgcttgcaaacatatcagtgtgatgaccttcgaaccgatattgatacatctgtgaaggatacaaagaaaatgttgctggcttgtaatacattccatggccacgctcctcaatttgttgggaaaattcttgcggttcaacagcctcccttcgcctgtcaaaaccccgagttttaacacttaactgaagcatgtgaaactcttgtggtaggaatcaa

SEQ ID NO: 14362 - DNA, 1181 bp, Glycine max
  Gm_smallRNAprecursor_7195
actaagcttgtggcacatggtccagcatctccaccagaagagtttcacatgcttcagtcaagtgttgaaactcggggtgttgacagacgaatggaggttgttgaagcgcaagaattttcccaacaaattgaggagcatggccatgaaatgtattacacgccaccaacattttcttagtatccttcacagatgtatcagtatccattcgaaggtcatcacactgatatgtttgcaagcgaacattcattcggtgatgttacaaaaacacatcctcattttttcatgaccgactatgaccccttcacaacaacatgatgccccaatggcaacacctaactccccattagctccacaatggaatgtatccgaagcaatacctgatatgggtgacttattaggtgttgatttgcgttaggagtttttcgctgaggttgagcaagtagaagcggggagacatcgcagcagaataaattctgatcgtcaggcgcgaagatgggatcgaccatgtgacatatcctcacgtcatcacggatatcataatgaatgattttcatgtctctgtttaaatttgttgtatgtaagtataaatttgaacaaattaagtgtcaaattcaaatgacaaacatataacaactaatttaaatataaacatgaaaatcattcattatgatgtctgtgatgacgtgagaatgtgtcacatggtcgacctcatcttcgcgcttgacgatcaggatttcttctgccgcgatgtctccccgcttctacttgctcaatctcagcagaaaactcctcacgtaaatcaacacctaataagtcactcatataaggtattgttacgggtacattccattgcggagctaatgagacgttaggtgttgccattaggacatcatgttgctgtgaaggggtcatagtcggctataaaaaatgaggatgtgttttcgcaacatcaccgaacgaatgttcgcttgcaaacatatcagtgtgatgaccttcgaaccgatattgatacatctgtgaaggatacaaagaaaatgttgctggcttgtaatacattccatggccacgctcctcaatttgttgggaaaattcttgcggttcaacagcctcccttcgcctgtcaaaaccccgagttttaacacttaactgaagcatgtgaaactcttgtggtaggaatcaac

SEQ ID NO: 14363 - DNA, 1178 bp, Glycine max
  Gm_smallRNAprecursor_7196
ctaagcttgtggcacatggtccagcatctccaccagaagagtttcacatgcttcagtcaagtgttgaaactcggggtgttgacagacgaatggaggttgttgaagcgcaagaattttcccaacaaattgaggagcatggccatgaaatgtattacacgccaccaacattttcttagtatccttcacagatgtatcagtatccattcgaaggtcatcacactgatatgtttgcaagcgaacattcattcggtgatgttacaaaaacacatcctcattttttcatgaccgactatgaccccttcacaacaacatgatgccccaatggcaacacctaactccccattagctccacaatggaatgtatccgaagcaatacctgatatgggtgacttattaggtgttgatttgcgttaggagtttttcgctgaggttgagcaagtagaagcggggagacatcgcagcagaataaattctgatcgtcaggcgcgaagatgggatcgaccatgtgacatatcctcacgtcatcacggatatcataatgaatgattttcatgtctctgtttaaatttgttgtatgtaagtataaatttgaacaaattaagtgtcaaattcaaatgacaaacatataacaactaatttaaatataaacatgaaaatcattcattatgatgtctgtgatgacgtgagaatgtgtcacatggtcgacctcatcttcgcgcttgacgatcaggatttcttctgccgcgatgtctccccgcttctacttgctcaatctcagcagaaaactcctcacgtaaatcaacacctaataagtcactcatataaggtattgttacgggtacattccattgcggagctaatgagacgttaggtgttgccattaggacatcatgttgctgtgaaggggtcatagtcggctataaaaaatgaggatgtgttttcgcaacatcaccgaacgaatgttcgcttgcaaacatatcagtgtgatgaccttcgaaccgatattgatacatctgtgaaggatacaaagaaaatgttgctggcttgtaatacattccatggccacgctcctcaatttgttgggaaaattcttgcggttcaacagcctcccttcgcctgtcaaaaccccgagttttaacacttaactgaagcatgtgaaactcttgtggtaggaatca

SEQ ID NO: 14364 - DNA, 1179 bp, Glycine max
  Gm_smallRNAprecursor_7197
ctaagcttgtggcacatggtccagcatctccaccagaagagtttcacatgcttcagtcaagtgttgaaactcggggtgttgacagacgaatggaggttgttgaagcgcaagaattttcccaacaaattgaggagcatggccatgaaatgtattacacgccaccaacattttcttagtatccttcacagatgtatcagtatccattcgaaggtcatcacactgatatgtttgcaagcgaacattcattcggtgatgttacaaaaacacatcctcattttttcatgaccgactatgaccccttcacaacaacatgatgccccaatggcaacacctaactccccattagctccacaatggaatgtatccgaagcaatacctgatatgggtgacttattaggtgttgatttgcgttaggagtttttcgctgaggttgagcaagtagaagcggggagacatcgcagcagaataaattctgatcgtcaggcgcgaagatgggatcgaccatgtgacatatcctcacgtcatcacggatatcataatgaatgattttcatgtctctgtttaaatttgttgtatgtaagtataaatttgaacaaattaagtgtcaaattcaaatgacaaacatataacaactaatttaaatataaacatgaaaatcattcattatgatgtctgtgatgacgtgagaatgtgtcacatggtcgacctcatcttcgcgcttgacgatcaggatttcttctgccgcgatgtctccccgcttctacttgctcaatctcagcagaaaactcctcacgtaaatcaacacctaataagtcactcatataaggtattgttacgggtacattccattgcggagctaatgagacgttaggtgttgccattaggacatcatgttgctgtgaaggggtcatagtcggctataaaaaatgaggatgtgttttcgcaacatcaccgaacgaatgttcgcttgcaaacatatcagtgtgatgaccttcgaaccgatattgatacatctgtgaaggatacaaagaaaatgttgctggcttgtaatacattccatggccacgctcctcaatttgttgggaaaattcttgcggttcaacagcctcccttcgcctgtcaaaaccccgagttttaacacttaactgaagcatgtgaaactcttgtggtaggaatcaa

SEQ ID NO: 14365 - DNA, 1177 bp, Glycine max
  Gm_smallRNAprecursor_7198
taagcttgtggcacatggtccagcatctccaccagaagagtttcacatgcttcagtcaagtgttgaaactcggggtgttgacagacgaatggaggttgttgaagcgcaagaattttcccaacaaattgaggagcatggccatgaaatgtattacacgccaccaacattttcttagtatccttcacagatgtatcagtatccattcgaaggtcatcacactgatatgtttgcaagcgaacattcattcggtgatgttacaaaaacacatcctcattttttcatgaccgactatgaccccttcacaacaacatgatgccccaatggcaacacctaactccccattagctccacaatggaatgtatccgaagcaatacctgatatgggtgacttattaggtgttgatttgcgttaggagtttttcgctgaggttgagcaagtagaagcggggagacatcgcagcagaataaattctgatcgtcaggcgcgaagatgggatcgaccatgtgacatatcctcacgtcatcacggatatcataatgaatgattttcatgtctctgtttaaatttgttgtatgtaagtataaatttgaacaaattaagtgtcaaattcaaatgacaaacatataacaactaatttaaatataaacatgaaaatcattcattatgatgtctgtgatgacgtgagaatgtgtcacatggtcgacctcatcttcgcgcttgacgatcaggatttcttctgccgcgatgtctccccgcttctacttgctcaatctcagcagaaaactcctcacgtaaatcaacacctaataagtcactcatataaggtattgttacgggtacattccattgcggagctaatgagacgttaggtgttgccattaggacatcatgttgctgtgaaggggtcatagtcggctataaaaaatgaggatgtgttttcgcaacatcaccgaacgaatgttcgcttgcaaacatatcagtgtgatgaccttcgaaccgatattgatacatctgtgaaggatacaaagaaaatgttgctggcttgtaatacattccatggccacgctcctcaatttgttgggaaaattcttgcggttcaacagcctcccttcgcctgtcaaaaccccgagttttaacacttaactgaagcatgtgaaactcttgtggtaggaatca

SEQ ID NO: 14366 - DNA, 1157 bp, Glycine max
  Gm_smallRNAprecursor_7199
gcacatggtccagcatctccaccagaagagtttcacatgcttcagtcaagtgttgaaactcggggtgttgacagacgaatggaggttgttgaagcgcaagaattttcccaacaaattgaggagcatggccatgaaatgtattacacgccaccaacattttcttagtatccttcacagatgtatcagtatccattcgaaggtcatcacactgatatgtttgcaagcgaacattcattcggtgatgttacaaaaacacatcctcattttttcatgaccgactatgaccccttcacaacaacatgatgccccaatggcaacacctaactccccattagctccacaatggaatgtatccgaagcaatacctgatatgggtgacttattaggtgttgatttgcgttaggagtttttcgctgaggttgagcaagtagaagcggggagacatcgcagcagaataaattctgatcgtcaggcgcgaagatgggatcgaccatgtgacatatcctcacgtcatcacggatatcataatgaatgattttcatgtctctgtttaaatttgttgtatgtaagtataaatttgaacaaattaagtgtcaaattcaaatgacaaacatataacaactaatttaaatataaacatgaaaatcattcattatgatgtctgtgatgacgtgagaatgtgtcacatggtcgacctcatcttcgcgcttgacgatcaggatttcttctgccgcgatgtctccccgcttctacttgctcaatctcagcagaaaactcctcacgtaaatcaacacctaataagtcactcatataaggtattgttacgggtacattccattgcggagctaatgagacgttaggtgttgccattaggacatcatgttgctgtgaaggggtcatagtcggctataaaaaatgaggatgtgttttcgcaacatcaccgaacgaatgttcgcttgcaaacatatcagtgtgatgaccttcgaaccgatattgatacatctgtgaaggatacaaagaaaatgttgctggcttgtaatacattccatggccacgctcctcaatttgttgggaaaattcttgcggttcaacagcctcccttcgcctgtcaaaaccccgagttttaacacttaactgaagcatgtgaaactcttgtg

SEQ ID NO: 14367 - DNA, 1145 bp, Glycine max
  Gm_smallRNAprecursor_7200
ggtccagcatctccaccagaagagtttcacatgcttcagtcaagtgttgaaactcggggtgttgacagacgaatggaggttgttgaagcgcaagaattttcccaacaaattgaggagcatggccatgaaatgtattacacgccaccaacattttcttagtatccttcacagatgtatcagtatccattcgaaggtcatcacactgatatgtttgcaagcgaacattcattcggtgatgttacaaaaacacatcctcattttttcatgaccgactatgaccccttcacaacaacatgatgccccaatggcaacacctaactccccattagctccacaatggaatgtatccgaagcaatacctgatatgggtgacttattaggtgttgatttgcgttaggagtttttcgctgaggttgagcaagtagaagcggggagacatcgcagcagaataaattctgatcgtcaggcgcgaagatgggatcgaccatgtgacatatcctcacgtcatcacggatatcataatgaatgattttcatgtctctgtttaaatttgttgtatgtaagtataaatttgaacaaattaagtgtcaaattcaaatgacaaacatataacaactaatttaaatataaacatgaaaatcattcattatgatgtctgtgatgacgtgagaatgtgtcacatggtcgacctcatcttcgcgcttgacgatcaggatttcttctgccgcgatgtctccccgcttctacttgctcaatctcagcagaaaactcctcacgtaaatcaacacctaataagtcactcatataaggtattgttacgggtacattccattgcggagctaatgagacgttaggtgttgccattaggacatcatgttgctgtgaaggggtcatagtcggctataaaaaatgaggatgtgttttcgcaacatcaccgaacgaatgttcgcttgcaaacatatcagtgtgatgaccttcgaaccgatattgatacatctgtgaaggatacaaagaaaatgttgctggcttgtaatacattccatggccacgctcctcaatttgttgggaaaattcttgcggttcaacagcctcccttcgcctgtcaaaaccccgagttttaacacttaactgaagcatgtgaaact

SEQ ID NO: 14368 - DNA, 1140 bp, Glycine max
  Gm_smallRNAprecursor_7201
tccagcatctccaccagaagagtttcacatgcttcagtcaagtgttgaaactcggggtgttgacagacgaatggaggttgttgaagcgcaagaattttcccaacaaattgaggagcatggccatgaaatgtattacacgccaccaacattttcttagtatccttcacagatgtatcagtatccattcgaaggtcatcacactgatatgtttgcaagcgaacattcattcggtgatgttacaaaaacacatcctcattttttcatgaccgactatgaccccttcacaacaacatgatgccccaatggcaacacctaactccccattagctccacaatggaatgtatccgaagcaatacctgatatgggtgacttattaggtgttgatttgcgttaggagtttttcgctgaggttgagcaagtagaagcggggagacatcgcagcagaataaattctgatcgtcaggcgcgaagatgggatcgaccatgtgacatatcctcacgtcatcacggatatcataatgaatgattttcatgtctctgtttaaatttgttgtatgtaagtataaatttgaacaaattaagtgtcaaattcaaatgacaaacatataacaactaatttaaatataaacatgaaaatcattcattatgatgtctgtgatgacgtgagaatgtgtcacatggtcgacctcatcttcgcgcttgacgatcaggatttcttctgccgcgatgtctccccgcttctacttgctcaatctcagcagaaaactcctcacgtaaatcaacacctaataagtcactcatataaggtattgttacgggtacattccattgcggagctaatgagacgttaggtgttgccattaggacatcatgttgctgtgaaggggtcatagtcggctataaaaaatgaggatgtgttttcgcaacatcaccgaacgaatgttcgcttgcaaacatatcagtgtgatgaccttcgaaccgatattgatacatctgtgaaggatacaaagaaaatgttgctggcttgtaatacattccatggccacgctcctcaatttgttgggaaaattcttgcggttcaacagcctcccttcgcctgtcaaaaccccgagttttaacacttaactgaagcatgtgaa

SEQ ID NO: 14369 - DNA, 1141 bp, Glycine max
  Gm_smallRNAprecursor_7202
tccagcatctccaccagaagagtttcacatgcttcagtcaagtgttgaaactcggggtgttgacagacgaatggaggttgttgaagcgcaagaattttcccaacaaattgaggagcatggccatgaaatgtattacacgccaccaacattttcttagtatccttcacagatgtatcagtatccattcgaaggtcatcacactgatatgtttgcaagcgaacattcattcggtgatgttacaaaaacacatcctcattttttcatgaccgactatgaccccttcacaacaacatgatgccccaatggcaacacctaactccccattagctccacaatggaatgtatccgaagcaatacctgatatgggtgacttattaggtgttgatttgcgttaggagtttttcgctgaggttgagcaagtagaagcggggagacatcgcagcagaataaattctgatcgtcaggcgcgaagatgggatcgaccatgtgacatatcctcacgtcatcacggatatcataatgaatgattttcatgtctctgtttaaatttgttgtatgtaagtataaatttgaacaaattaagtgtcaaattcaaatgacaaacatataacaactaatttaaatataaacatgaaaatcattcattatgatgtctgtgatgacgtgagaatgtgtcacatggtcgacctcatcttcgcgcttgacgatcaggatttcttctgccgcgatgtctccccgcttctacttgctcaatctcagcagaaaactcctcacgtaaatcaacacctaataagtcactcatataaggtattgttacgggtacattccattgcggagctaatgagacgttaggtgttgccattaggacatcatgttgctgtgaaggggtcatagtcggctataaaaaatgaggatgtgttttcgcaacatcaccgaacgaatgttcgcttgcaaacatatcagtgtgatgaccttcgaaccgatattgatacatctgtgaaggatacaaagaaaatgttgctggcttgtaatacattccatggccacgctcctcaatttgttgggaaaattcttgcggttcaacagcctcccttcgcctgtcaaaaccccgagttttaacacttaactgaagcatgtgaaa

SEQ ID NO: 14370 - DNA, 1138 bp, Glycine max
  Gm_smallRNAprecursor_7203
ccagcatctccaccagaagagtttcacatgcttcagtcaagtgttgaaactcggggtgttgacagacgaatggaggttgttgaagcgcaagaattttcccaacaaattgaggagcatggccatgaaatgtattacacgccaccaacattttcttagtatccttcacagatgtatcagtatccattcgaaggtcatcacactgatatgtttgcaagcgaacattcattcggtgatgttacaaaaacacatcctcattttttcatgaccgactatgaccccttcacaacaacatgatgccccaatggcaacacctaactccccattagctccacaatggaatgtatccgaagcaatacctgatatgggtgacttattaggtgttgatttgcgttaggagtttttcgctgaggttgagcaagtagaagcggggagacatcgcagcagaataaattctgatcgtcaggcgcgaagatgggatcgaccatgtgacatatcctcacgtcatcacggatatcataatgaatgattttcatgtctctgtttaaatttgttgtatgtaagtataaatttgaacaaattaagtgtcaaattcaaatgacaaacatataacaactaatttaaatataaacatgaaaatcattcattatgatgtctgtgatgacgtgagaatgtgtcacatggtcgacctcatcttcgcgcttgacgatcaggatttcttctgccgcgatgtctccccgcttctacttgctcaatctcagcagaaaactcctcacgtaaatcaacacctaataagtcactcatataaggtattgttacgggtacattccattgcggagctaatgagacgttaggtgttgccattaggacatcatgttgctgtgaaggggtcatagtcggctataaaaaatgaggatgtgttttcgcaacatcaccgaacgaatgttcgcttgcaaacatatcagtgtgatgaccttcgaaccgatattgatacatctgtgaaggatacaaagaaaatgttgctggcttgtaatacattccatggccacgctcctcaatttgttgggaaaattcttgcggttcaacagcctcccttcgcctgtcaaaaccccgagttttaacacttaactgaagcatgtga

SEQ ID NO: 14371 - DNA, 1139 bp, Glycine max
  Gm_smallRNAprecursor_7204
ccagcatctccaccagaagagtttcacatgcttcagtcaagtgttgaaactcggggtgttgacagacgaatggaggttgttgaagcgcaagaattttcccaacaaattgaggagcatggccatgaaatgtattacacgccaccaacattttcttagtatccttcacagatgtatcagtatccattcgaaggtcatcacactgatatgtttgcaagcgaacattcattcggtgatgttacaaaaacacatcctcattttttcatgaccgactatgaccccttcacaacaacatgatgccccaatggcaacacctaactccccattagctccacaatggaatgtatccgaagcaatacctgatatgggtgacttattaggtgttgatttgcgttaggagtttttcgctgaggttgagcaagtagaagcggggagacatcgcagcagaataaattctgatcgtcaggcgcgaagatgggatcgaccatgtgacatatcctcacgtcatcacggatatcataatgaatgattttcatgtctctgtttaaatttgttgtatgtaagtataaatttgaacaaattaagtgtcaaattcaaatgacaaacatataacaactaatttaaatataaacatgaaaatcattcattatgatgtctgtgatgacgtgagaatgtgtcacatggtcgacctcatcttcgcgcttgacgatcaggatttcttctgccgcgatgtctccccgcttctacttgctcaatctcagcagaaaactcctcacgtaaatcaacacctaataagtcactcatataaggtattgttacgggtacattccattgcggagctaatgagacgttaggtgttgccattaggacatcatgttgctgtgaaggggtcatagtcggctataaaaaatgaggatgtgttttcgcaacatcaccgaacgaatgttcgcttgcaaacatatcagtgtgatgaccttcgaaccgatattgatacatctgtgaaggatacaaagaaaatgttgctggcttgtaatacattccatggccacgctcctcaatttgttgggaaaattcttgcggttcaacagcctcccttcgcctgtcaaaaccccgagttttaacacttaactgaagcatgtgaa

SEQ ID NO: 14372 - DNA, 1136 bp, Glycine max
  Gm_smallRNAprecursor_7205
cagcatctccaccagaagagtttcacatgcttcagtcaagtgttgaaactcggggtgttgacagacgaatggaggttgttgaagcgcaagaattttcccaacaaattgaggagcatggccatgaaatgtattacacgccaccaacattttcttagtatccttcacagatgtatcagtatccattcgaaggtcatcacactgatatgtttgcaagcgaacattcattcggtgatgttacaaaaacacatcctcattttttcatgaccgactatgaccccttcacaacaacatgatgccccaatggcaacacctaactccccattagctccacaatggaatgtatccgaagcaatacctgatatgggtgacttattaggtgttgatttgcgttaggagtttttcgctgaggttgagcaagtagaagcggggagacatcgcagcagaataaattctgatcgtcaggcgcgaagatgggatcgaccatgtgacatatcctcacgtcatcacggatatcataatgaatgattttcatgtctctgtttaaatttgttgtatgtaagtataaatttgaacaaattaagtgtcaaattcaaatgacaaacatataacaactaatttaaatataaacatgaaaatcattcattatgatgtctgtgatgacgtgagaatgtgtcacatggtcgacctcatcttcgcgcttgacgatcaggatttcttctgccgcgatgtctccccgcttctacttgctcaatctcagcagaaaactcctcacgtaaatcaacacctaataagtcactcatataaggtattgttacgggtacattccattgcggagctaatgagacgttaggtgttgccattaggacatcatgttgctgtgaaggggtcatagtcggctataaaaaatgaggatgtgttttcgcaacatcaccgaacgaatgttcgcttgcaaacatatcagtgtgatgaccttcgaaccgatattgatacatctgtgaaggatacaaagaaaatgttgctggcttgtaatacattccatggccacgctcctcaatttgttgggaaaattcttgcggttcaacagcctcccttcgcctgtcaaaaccccgagttttaacacttaactgaagcatgtg

SEQ ID NO: 14373 - DNA, 1137 bp, Glycine max
  Gm_smallRNAprecursor_7206
cagcatctccaccagaagagtttcacatgcttcagtcaagtgttgaaactcggggtgttgacagacgaatggaggttgttgaagcgcaagaattttcccaacaaattgaggagcatggccatgaaatgtattacacgccaccaacattttcttagtatccttcacagatgtatcagtatccattcgaaggtcatcacactgatatgtttgcaagcgaacattcattcggtgatgttacaaaaacacatcctcattttttcatgaccgactatgaccccttcacaacaacatgatgccccaatggcaacacctaactccccattagctccacaatggaatgtatccgaagcaatacctgatatgggtgacttattaggtgttgatttgcgttaggagtttttcgctgaggttgagcaagtagaagcggggagacatcgcagcagaataaattctgatcgtcaggcgcgaagatgggatcgaccatgtgacatatcctcacgtcatcacggatatcataatgaatgattttcatgtctctgtttaaatttgttgtatgtaagtataaatttgaacaaattaagtgtcaaattcaaatgacaaacatataacaactaatttaaatataaacatgaaaatcattcattatgatgtctgtgatgacgtgagaatgtgtcacatggtcgacctcatcttcgcgcttgacgatcaggatttcttctgccgcgatgtctccccgcttctacttgctcaatctcagcagaaaactcctcacgtaaatcaacacctaataagtcactcatataaggtattgttacgggtacattccattgcggagctaatgagacgttaggtgttgccattaggacatcatgttgctgtgaaggggtcatagtcggctataaaaaatgaggatgtgttttcgcaacatcaccgaacgaatgttcgcttgcaaacatatcagtgtgatgaccttcgaaccgatattgatacatctgtgaaggatacaaagaaaatgttgctggcttgtaatacattccatggccacgctcctcaatttgttgggaaaattcttgcggttcaacagcctcccttcgcctgtcaaaaccccgagttttaacacttaactgaagcatgtga

SEQ ID NO: 14374 - DNA, 1135 bp, Glycine max
  Gm_smallRNAprecursor_7207
agcatctccaccagaagagtttcacatgcttcagtcaagtgttgaaactcggggtgttgacagacgaatggaggttgttgaagcgcaagaattttcccaacaaattgaggagcatggccatgaaatgtattacacgccaccaacattttcttagtatccttcacagatgtatcagtatccattcgaaggtcatcacactgatatgtttgcaagcgaacattcattcggtgatgttacaaaaacacatcctcattttttcatgaccgactatgaccccttcacaacaacatgatgccccaatggcaacacctaactccccattagctccacaatggaatgtatccgaagcaatacctgatatgggtgacttattaggtgttgatttgcgttaggagtttttcgctgaggttgagcaagtagaagcggggagacatcgcagcagaataaattctgatcgtcaggcgcgaagatgggatcgaccatgtgacatatcctcacgtcatcacggatatcataatgaatgattttcatgtctctgtttaaatttgttgtatgtaagtataaatttgaacaaattaagtgtcaaattcaaatgacaaacatataacaactaatttaaatataaacatgaaaatcattcattatgatgtctgtgatgacgtgagaatgtgtcacatggtcgacctcatcttcgcgcttgacgatcaggatttcttctgccgcgatgtctccccgcttctacttgctcaatctcagcagaaaactcctcacgtaaatcaacacctaataagtcactcatataaggtattgttacgggtacattccattgcggagctaatgagacgttaggtgttgccattaggacatcatgttgctgtgaaggggtcatagtcggctataaaaaatgaggatgtgttttcgcaacatcaccgaacgaatgttcgcttgcaaacatatcagtgtgatgaccttcgaaccgatattgatacatctgtgaaggatacaaagaaaatgttgctggcttgtaatacattccatggccacgctcctcaatttgttgggaaaattcttgcggttcaacagcctcccttcgcctgtcaaaaccccgagttttaacacttaactgaagcatgtg

SEQ ID NO: 14375 - DNA, 1160 bp, Glycine max
  Gm_smallRNAprecursor_7208
tgggtgacttattaggtgttgatttgcgttaggagtttttcgctgaggttgagcaagtagaagcggggagacatcgcagcagaataaattctgatcgtcaggcgcgaagatgggatcgaccatgtgacatatcctcacgtcatcacggatatcataatgaatgattttcatgtctctgtttaaatttgttgtatgtaagtataaatttgaacaaattaagtgtcaaattcaaatgacaaacatataacaactaatttaaatataaacatgaaaatcattcattatgatgtctgtgatgacgtgagaatgtgtcacatggtcgacctcatcttcgcgcttgacgatcaggatttcttctgccgcgatgtctccccgcttctacttgctcaatctcagcagaaaactcctcacgtaaatcaacacctaataagtcactcatataaggtattgttacgggtacattccattgcggagctaatgagacgttaggtgttgccattaggacatcatgttgctgtgaaggggtcatagtcggctataaaaaatgaggatgtgttttcgcaacatcaccgaacgaatgttcgcttgcaaacatatcagtgtgatgaccttcgaaccgatattgatacatctgtgaaggatacaaagaaaatgttgctggcttgtaatacattccatggccacgctcctcaatttgttgggaaaattcttgcggttcaacagcctcccttcgcctgtcaaaaccccgagttttaacacttaactgaagcatgtgaaactcttgtggtaggaatcaacgcatgctggttcatgtgccataagctcagtgattctctcttgcttttcgaataaaatcattatcttcttcacataagacacgagatcatcaactgtccatgtgttcctcccttataatagtgacaccatatactataatgtctctgcaacttcagtctataattattagggtcaggaaattaatgctcatgctttaaaaaataaattgaagttaaataataaaaaagaaataaatatcaatgtagctatgtttgcattctttgggtcgacaaacatcttcgtttttcgcctatatcagactatgtagtctaagttaaaacttaataggtcctcttgtcgaggataaacattgaccataaact

SEQ ID NO: 14376 - DNA, 1213 bp, Glycine max
  Gm_smallRNAprecursor_7209
aatgattttcatgtctctgtttaaatttgttgtatgtaagtataaatttgaacaaattaagtgtcaaattcaaatgacaaacatataacaactaatttaaatataaacatgaaaatcattcattatgatgtctgtgatgacgtgagaatgtgtcacatggtcgacctcatcttcgcgcttgacgatcaggatttcttctgccgcgatgtctccccgcttctacttgctcaatctcagcagaaaactcctcacgtaaatcaacacctaataagtcactcatataaggtattgttacgggtacattccattgcggagctaatgagacgttaggtgttgccattaggacatcatgttgctgtgaaggggtcatagtcggctataaaaaatgaggatgtgttttcgcaacatcaccgaacgaatgttcgcttgcaaacatatcagtgtgatgaccttcgaaccgatattgatacatctgtgaaggatacaaagaaaatgttgctggcttgtaatacattccatggccacgctcctcaatttgttgggaaaattcttgcggttcaacagcctcccttcgcctgtcaaaaccccgagttttaacacttaactgaagcatgtgaaactcttgtggtaggaatcaacgcatgctggttcatgtgccataagctcagtgattctctcttgcttttcgaataaaatcattatcttcttcacataagacacgagatcatcaactgtccatgtgttcctcccttataatagtgacaccatatactataatgtctctgcaacttcagtctataattattagggtcaggaaattaatgctcatgctttaaaaaataaattgaagttaaataataaaaaagaaataaatatcaatgtagctatgtttgcattctttgggtcgacaaacatcttcgtttttcgcctatatcagactatgtagtctaagttaaaacttaataggtcctcttgtcgaggataaacattgaccataaactcagctcaattgtttcattgactgatcattgaggccaacagcaggaaccaattttcatcttgtttgcctttcaacattaagccaatagatattcagtggttgcgaaggacactggggaataggttgttgcattccaaattgtcgcaacactctatcgggttgatgtcactcaacaacatggaaacaaatgagtgacaccaccacgcaccatta

SEQ ID NO: 14377 - DNA, 1034 bp, Glycine max
  Gm_smallRNAprecursor_7210
ataaatttgaacaaattaagtgtcaaattcaaatgacaaacatataacaactaatttaaatataaacatgaaaatcattcattatgatgtctgtgatgacgtgagaatgtgtcacatggtcgacctcatcttcgcgcttgacgatcaggatttcttctgccgcgatgtctccccgcttctacttgctcaatctcagcagaaaactcctcacgtaaatcaacacctaataagtcactcatataaggtattgttacgggtacattccattgcggagctaatgagacgttaggtgttgccattaggacatcatgttgctgtgaaggggtcatagtcggctataaaaaatgaggatgtgttttcgcaacatcaccgaacgaatgttcgcttgcaaacatatcagtgtgatgaccttcgaaccgatattgatacatctgtgaaggatacaaagaaaatgttgctggcttgtaatacattccatggccacgctcctcaatttgttgggaaaattcttgcggttcaacagcctcccttcgcctgtcaaaaccccgagttttaacacttaactgaagcatgtgaaactcttgtggtaggaatcaacgcatgctggttcatgtgccataagctcagtgattctctcttgcttttcgaataaaatcattatcttcttcacataagacacgagatcatcaactgtccatgtgttcctcccttataatagtgacaccatatactataatgtctctgcaacttcagtctataattattagggtcaggaaattaatgctcatgctttaaaaaataaattgaagttaaataataaaaaagaaataaatatcaatgtagctatgtttgcattctttgggtcgacaaacatcttcgtttttcgcctatatcagactatgtagtctaagttaaaacttaataggtcctcttgtcgaggataaacattgaccataaactcagctcaattgtttcattgactgatcattgaggccaacagcaggaaccaattttcatcttgtttgcctttcaac

SEQ ID NO: 14378 - DNA, 1159 bp, Glycine max
  Gm_smallRNAprecursor_7211
aaaaccccgagttttaacacttaactgaagcatgtgaaactcttgtggtaggaatcaacgcatgctggttcatgtgccataagctcagtgattctctcttgcttttcgaataaaatcattatcttcttcacataagacacgagatcatcaactgtccatgtgttcctcccttataatagtgacaccatatactataatgtctctgcaacttcagtctataattattagggtcaggaaattaatgctcatgctttaaaaaataaattgaagttaaataataaaaaagaaataaatatcaatgtagctatgtttgcattctttgggtcgacaaacatcttcgtttttcgcctatatcagactatgtagtctaagttaaaacttaataggtcctcttgtcgaggataaacattgaccataaactcagctcaattgtttcattgactgatcattgaggccaacagcaggaaccaattttcatcttgtttgcctttcaacattaagccaatagatattcagtggttgcgaaggacactggggaataggttgttgcattccaaattgtcgcaacactctatcgggttgatgtcactcaacaacatggaaacaaatgagtgacaccaccacgcaccattatacactaccaaccaaacaaattggaggcaacgctgacataacagttgttgtgtaaggctccgacaaaaattgcatacaataatacaattgttaattttcacttaaacatgacattttatttattaaatacattacgatcttcttacctcatatcgtttcatgatatccaatttgcgacgaaaaactatcagatcatcattgctaatatgctgatttccacgtcgcaaccacttataaaaaaatatgaaatcaccagtggcgacgcgttatattattaattattttcaaatgaaattttattttttaaacaactaacctgtgtccaagtggtttattttctattacgggaggaatcctcctcggagccaaggtcgtgcatcgttctcatgtcaacatttggattaagatgcacatacctccgattgatttaagtttgtaatcggtgacggtgtacatctctctatataaaaaagcaagcacgacatgttcccatacatacatgctgcactgttcaaagtcacgtaaa

SEQ ID NO: 14379 - DNA, 1135 bp, Glycine max
  Gm_smallRNAprecursor_7212
aacgcatgctggttcatgtgccataagctcagtgattctctcttgcttttcgaataaaatcattatcttcttcacataagacacgagatcatcaactgtccatgtgttcctcccttataatagtgacaccatatactataatgtctctgcaacttcagtctataattattagggtcaggaaattaatgctcatgctttaaaaaataaattgaagttaaataataaaaaagaaataaatatcaatgtagctatgtttgcattctttgggtcgacaaacatcttcgtttttcgcctatatcagactatgtagtctaagttaaaacttaataggtcctcttgtcgaggataaacattgaccataaactcagctcaattgtttcattgactgatcattgaggccaacagcaggaaccaattttcatcttgtttgcctttcaacattaagccaatagatattcagtggttgcgaaggacactggggaataggttgttgcattccaaattgtcgcaacactctatcgggttgatgtcactcaacaacatggaaacaaatgagtgacaccaccacgcaccattatacactaccaaccaaacaaattggaggcaacgctgacataacagttgttgtgtaaggctccgacaaaaattgcatacaataatacaattgttaattttcacttaaacatgacattttatttattaaatacattacgatcttcttacctcatatcgtttcatgatatccaatttgcgacgaaaaactatcagatcatcattgctaatatgctgatttccacgtcgcaaccacttataaaaaaatatgaaatcaccagtggcgacgcgttatattattaattattttcaaatgaaattttattttttaaacaactaacctgtgtccaagtggtttattttctattacgggaggaatcctcctcggagccaaggtcgtgcatcgttctcatgtcaacatttggattaagatgcacatacctccgattgatttaagtttgtaatcggtgacggtgtacatctctctatataaaaaagcaagcacgacatgttcccatacatacatgctgcactgttcaaagtcacgtaaaaattgtatgtaccttgagaaaactttgttgct

SEQ ID NO: 14380 - DNA, 1039 bp, Glycine max
  Gm_smallRNAprecursor_7213
caccattccaatactcttaaagaattcggaagatgtttgggacctttggaaaaacaagcactcttgataataagtgttttgagattttccatcttctttaaggcatctccgtcccattctacttcttttccaaatgaggaaaaattcatacatatgatttcaatctttccagtccccttttaacacaaaaatcatgaatcagccacagtacatggatatgggactttaaaatgcctatttagagaaatgtacacattataaagcaaaaaatacttgggacaagagcatataataattaaaagagataattcacgtttaaagatgaaaaccaaaccattcagtgtattaattttacttacctttttttcttgtaaaacttcctttatatcctcatgggaccataacctgctacgtttcccaggctcttttggtgattctcttcggacaatttctttacccacgtcttctatcaagtcatgcaatctcatgacctccttatcataccatgacctatgaatgtttatcagagatttttcaaccaacaccccaatatcatatttcatggaacgaccataatgagcataaagtatatcttgaacctttgccaattcataatctttgaagcaacaagcaatatcaagaaaaatacttttctcatcttcattcaaagcatcataacttactttaagtgtcatatagatacttttatcaggacttctttcatatccatctagaacagattcccattcttctatactttttccaaataagttggaacctattacttttaaagccaatggaaggcctgaagcataagttaccgctcgattcaaaatatcatggtaacttggatcaacttttttttccaacccaaaagccttctgagtaagtaattgaagagcatgtttctcattcaactctctcaccttatatgttcttttaacattgtgaagcactaacaattgttcatctcgagtggtgatgatgactctactaccacgaccaaaccaatcagggctgtcaataatcgcttgtaact

SEQ ID NO: 14381 - DNA, 1036 bp, Glycine max
  Gm_smallRNAprecursor_7214
aattgcacaaatatatcgtttcataatatctaacttgcgacgaaaaattctcaaatcatcattgtcgatatgttgattttcacgtcgcagctacctaaaaagattaaaatttaatatacattacattattaattcttttgaaatgaaatataatttccaaaacgactaacatgtacccgagtggcttattttctactaggggaggagtcctctttggaaccaaagttatatattgttctcatgcccacatttgtattaagatgcacatacctccgattgatttagttttataatcggtgacactgcacatctctatgtataaataagcaagtaagcaagtacgacaggtctccatgcatacgtgctaagtcatgtaaaaattgaaggtaccttagggaaactttgttactacttttgtcaacgaataagacacctccaatgaatcttagtatccatgcacggataaacctttctacttgttcttggttaccttcatggttatttatttgtgcaaaatggtgagtcaaccaacttaatttaaccacactacctttaagttcaccttcttgtggtctgattcctaacaatttctcacataaataagcccaattaagatttgttggactaattaatggtgatccatccacatggagacctaataaaacagagacatattgaagagtaatagtacactcttcgcatctgatgttcacatatgtgtttctggcctccatctttctatcaaggcactaattaatgagacatttatttttaagtattccatcttcataatccagtaaaaaccagattgctgaaggaaaaaaataatttcctctggtatttcttcttgaccttgatacgtggggacagctcgtttaatgtgtagttttatgtcttctttcccattccaaatatgttctgaaacatgtttaccttacatccataaaacgtcaccatcaattagaccaaacttaatttttatatttgatgaacatgatgacgaagatgtcattgatactgcaaaataaaatataat

SEQ ID NO: 14382 - DNA, 1046 bp, Glycine max
  Gm_smallRNAprecursor_7215
aggtatgtcgaatggttagcaaatatagtccctgtcattaaaaagaatggaactcttagagtatgcatagattttagggatttaaataatgctacacctaaagatgaatatgctatgccagtagcggaaatgttggtagattcagcagctggcttcgaatttttaagcatgttagatggttattctggttataaccaaatatttattactgaaagtgatgtgtcaaaaacagcatttcgatgccctggtgctttaggcacttatgaatgggtggttatgacctttgggttgaaaaatgctggggccacttatcaaagggccatgaattccatgtttcatgattttattgacacatttatgcaagtttatattgatgatataatcatcaaatcctcctcggaagatagccatttggattaccttaggcaatcttttgaacgaatgaggaaacatggattaaaaatgaatccattaaagtgtgctttttgtgtgcgtgcaggagatttccttggttttgtggtgcataaaaaaggcattgagataaatcaaaacaagacaaaggctattcttgagacgaagcctccttcgaccaaaaaacagcttcagtctttgctaggaaaaatcaacttcttgaggcgattcatctcaaatctaagtggcaaagctcaaattttttcgccattacttcgactcaagaaagatgaaccattcaaatgggatgaagtgcatcaaaaggctttcgatgaaattaaagaatatctgatcaagcctcctgtgttaatgcctcctagtcgaaacaagactatgaagttgtatattgctgcgtctgacaagaccattggtagcatgttggctcaggaagatgatgatggcgtagagcatgcaatttattatcttagtcgtgtactaaatgatgcagaaactagatataatgccatagaaaaactttgtctttgtttgtatttctcttgtgcaaaacttaagcaatatataaagcctgttgatgtttatgtatattctcattatgatattattaagcacatgtt

SEQ ID NO: 14383 - DNA, 1152 bp, Glycine max
  Gm_smallRNAprecursor_7216
taataaaatagacattagctaaggcaaatttcaaagaatatactacgaaactaggaaaaaggggggcagtggtaaataaagtaccttaaaaaaatatggggaagcttgtgcagagcgagatcaataatcagagactataggttagtgatagtgggtggggtgtgtggaatttgatgttcctttttattatatgtgaaaaatgtcgttttgtgtctctattctctatgtagctttgaaattgaatcgctgcctcactcactactgtggctagtgattatgaattatatgataaatataacaagtgcgttctgtgttttgatggagaagggggtcaagtccccgtgcccaaattgaagcacgaaacaaaggttctatttttttattattattttgtcttgataaaattatatttttggtccccaatccaagattgaacattgaccgttacaaaaggaatgttgacagtcacgtgtcacgtttttattggatgatgattgttatgtgtcatgttctgattggatgtcgaatccataaaagatgaaatgcattgttgttgtcattggtgaaataaaacatgacacgtggtcgtcattatttaataagaacgtgatatgtgaccgtcatcatttaataagaacgtaacacgtgaccgtcatcatccaaacgttgacatgtgacggtatatttgtaatagtcaatattaaattctgaattgggggatcaagattgcataatgggataaaataggatgataaaatttgtcaataatttcaaagggaaatcaaaatcgaatttaaaaacaaattgaagggccaaaaatataattttaccttttatcttttttaggagtattattatttcatgtaccaaggtctaagaggggttttgtggtgttgaaaaaaaaagatttgactaagagggggttggattccaagtatgatccacgttttataacaagttcaagtccaaatttgaaaataacccaaaaattccattatattttttgtgttagcaaaaaaaattgttcaaaaataattatattttagtttttcaattgtaattactttacttatatcttttataatattaataattgataacaaaatatatagatgaattaatgataatataagattaattttgtaaaaatat

SEQ ID NO: 14384 - DNA, 1151 bp, Glycine max
  Gm_smallRNAprecursor_7217
aataaaatagacattagctaaggcaaatttcaaagaatatactacgaaactaggaaaaaggggggcagtggtaaataaagtaccttaaaaaaatatggggaagcttgtgcagagcgagatcaataatcagagactataggttagtgatagtgggtggggtgtgtggaatttgatgttcctttttattatatgtgaaaaatgtcgttttgtgtctctattctctatgtagctttgaaattgaatcgctgcctcactcactactgtggctagtgattatgaattatatgataaatataacaagtgcgttctgtgttttgatggagaagggggtcaagtccccgtgcccaaattgaagcacgaaacaaaggttctatttttttattattattttgtcttgataaaattatatttttggtccccaatccaagattgaacattgaccgttacaaaaggaatgttgacagtcacgtgtcacgtttttattggatgatgattgttatgtgtcatgttctgattggatgtcgaatccataaaagatgaaatgcattgttgttgtcattggtgaaataaaacatgacacgtggtcgtcattatttaataagaacgtgatatgtgaccgtcatcatttaataagaacgtaacacgtgaccgtcatcatccaaacgttgacatgtgacggtatatttgtaatagtcaatattaaattctgaattgggggatcaagattgcataatgggataaaataggatgataaaatttgtcaataatttcaaagggaaatcaaaatcgaatttaaaaacaaattgaagggccaaaaatataattttaccttttatcttttttaggagtattattatttcatgtaccaaggtctaagaggggttttgtggtgttgaaaaaaaaagatttgactaagagggggttggattccaagtatgatccacgttttataacaagttcaagtccaaatttgaaaataacccaaaaattccattatattttttgtgttagcaaaaaaaattgttcaaaaataattatattttagtttttcaattgtaattactttacttatatcttttataatattaataattgataacaaaatatatagatgaattaatgataatataagattaattttgtaaaaatat

SEQ ID NO: 14385 - DNA, 1130 bp, Glycine max
  Gm_smallRNAprecursor_7218
agattggtgttgaacactttggttctgactttgcaatggctcaaaggaaaactcattctcctagtaagaaacttttaccatttgacagaaatttttttatgtattagtgttataattcagaattctaagttatgctcttagttggtaattggtattgcagcatattggtggcgaatatttgggtcacaaactccaaatttgcaaaagctagctattaaaattttgagtttgacttgcagtgcttcaggatgtgaaagaaattggagtgtgtttgagcaagtaattgtgacaaaactctaactatactttttaattttgtttaattttgatgatcaagttttatttggagtatatttgaaattgaaatcaacatttatttgttatgttgtagattcattccaaaaaaagaaataggcttgagcacaagaggttgcatgatttggtgtttgtcaaatacaaccaacaattgaagcaaagatataatgcaagagatgaaattgatccaatttctcttaatgatattgatgtgtgcaatgaatggctcgtggaagagatggatcaagatgatgataatgatgctggaaatgatttggtatttgaagatgatgatgctctaaattggacaactgtgtatcaggcttcgggggttggagagtgtaggatgtatactaggcggaaaaagcaaaaaacaacaagtgttgctgctgcccaaacttctaaaaaaaggcaatggttgttggatcaaggaagcaaaaagcagtccaagaaaatgatgaggatctagattttgaggagaatattgatcttgaatctgaagaagaagaaatcatggtcaattttgaggcgtctaatggggaagagggagagggagatgctccattaccatatgataacaacgaagatgattatgttgggattggagaagatgattagagcctcaaccttcactttgcactttacattatgttttaatcattttcttattttgaactctttaatgagtttatttggtgttggtaattgattattgtatgaactcatgaaacttttttagtttatttgaatgcaatccattgtttttttcaatttcaatgagtttatatatatgtattttttttttgtccgccatg

SEQ ID NO: 14386 - DNA, 1188 bp, Glycine max
  Gm_smallRNAprecursor_7219
tattagtatgcattagttagtgtcctacatcattatatatttcttataagcactaaaacatgatattttttcgtacaggaactggcttctaaattaatggcactcatatataaaaattaaaggattctctatgggtgattcggtgggttcaccattattatttcagagggagcgatgtgtggaattacaattcttcttcatcagattcagttttgataaagaaaatcattcaaataagggactttattatctctaaagagctaagtacggaagaggccaaaaagatgattcaatcttggagcaccaatgaacaattgcttgttgacaaagtctatgaatacattagaggtgtcaagcctactgttagttggtgttctgttatatggaacccagcaatcccccctaagatgtctttcattttgtggcttgctaaaaggaatcggctgcttactcttgacaaagttgcttttttgaacaagggttccctctgccctttatgttcaaatgagtctgagtcaaatgctcatttgttcttttcttgcaggaaatctctccaagtttgggctcacatttgtgatttggctcctttccgcaagcgtttcacttctttacagcgcattactgactctttaattaggggcagatccacatcaggtgttcaaggaaaattacgttgtatggctatagcaattacagtctactgcatttggctgtctaggaacaagctgatttttaaagattatcaattttctgtcatagaggttattagcaagattaagtttcttatgtatagacaaacacacctgttgtatttgttttagcatcttgatatatgtcttcttgtattagagagacttttgattttctttaactgcggggtatgccccgtttattattgtatcattttgggtttaatataatttacatttttttccaaaaaaaaaattaaaggattattttaatcgttgaaaacattgatttggtgattgcttacacatagatgatattcaaaataggtgggctcaatttaaagatgtgcagcccaactaccaagtattgggtcttcgcaacgttaatccttatcaatactactctttccaatctaactagttaaactacacgtcagtttcacttgctttaatcattggatatgtgaactcatttttaccaaaaaaaaaaaacaaccgt

SEQ ID NO: 14387 - DNA, 1037 bp, Glycine max
  Gm_smallRNAprecursor_7220
tacaatggttttaccggttttttatgaggttgatccctctgatgtacgacaccaaagaggtagctacgaagaagcactgaataaacataaggagaagttcaatgacgacgaagagaaattgcagaaatggaggattgctctgcgtcaagcagctaacttgtctggttatcattttaaacatgggtaatgcactaatgttttacatttatttattgtttctttggttttaatttgtctattgatttaatttattgttgaaattcatggatgtgtgttgcatttagtatgacttcactcaattgcacaggaacgaaaatgaatatgattttgttggcaagattattaaagaggtctcccaaagaattagtcgcactcatttgcatgttgcgaataacctggttggattggagtctcgagtgctgcatgtaacctcccttttagatgataaatatgatggagttctcatggtagggatctatgaagcacggacacttcagccctttgccgtgtccggtgtccgacacgcgtccgtgtcagtgtccgacaccgacacgacacccgtattacgttctatattttggacattacaggtgtccacgtgtccgtatccgtgtcgtgtccggtgtccgtgtcggtgtcagtgcttcataggtagggatccatggaattggcggggtaggaaaaacaacgattgctcgagaagtttataatttgattgctgatcaatttgaatggttgtgttttcttgataatgtgagagaaaactcaattaaacatggattggtgcatctccaaaagacacttctttctaaaacaattggagagagtagtattaagttaggaagtgttcacgaaggaattccaataataaagcataggttcctcctaaagaaggttcttttggttgttgatgatgttgacgatctagatcagttgcaggcaattgttggagggaccgattggtttggttctgccagcagagtcatcattaccactcgagacaaacatttactaacatgccatggggttacaagcac

SEQ ID NO: 14388 - DNA, 1038 bp, Glycine max
  Gm_smallRNAprecursor_7221
tacaatggttttaccggttttttatgaggttgatccctctgatgtacgacaccaaagaggtagctacgaagaagcactgaataaacataaggagaagttcaatgacgacgaagagaaattgcagaaatggaggattgctctgcgtcaagcagctaacttgtctggttatcattttaaacatgggtaatgcactaatgttttacatttatttattgtttctttggttttaatttgtctattgatttaatttattgttgaaattcatggatgtgtgttgcatttagtatgacttcactcaattgcacaggaacgaaaatgaatatgattttgttggcaagattattaaagaggtctcccaaagaattagtcgcactcatttgcatgttgcgaataacctggttggattggagtctcgagtgctgcatgtaacctcccttttagatgataaatatgatggagttctcatggtagggatctatgaagcacggacacttcagccctttgccgtgtccggtgtccgacacgcgtccgtgtcagtgtccgacaccgacacgacacccgtattacgttctatattttggacattacaggtgtccacgtgtccgtatccgtgtcgtgtccggtgtccgtgtcggtgtcagtgcttcataggtagggatccatggaattggcggggtaggaaaaacaacgattgctcgagaagtttataatttgattgctgatcaatttgaatggttgtgttttcttgataatgtgagagaaaactcaattaaacatggattggtgcatctccaaaagacacttctttctaaaacaattggagagagtagtattaagttaggaagtgttcacgaaggaattccaataataaagcataggttcctcctaaagaaggttcttttggttgttgatgatgttgacgatctagatcagttgcaggcaattgttggagggaccgattggtttggttctgccagcagagtcatcattaccactcgagacaaacatttactaacatgccatggggttacaagcaca

SEQ ID NO: 14389 - DNA, 1039 bp, Glycine max
  Gm_smallRNAprecursor_7222
tacaatggttttaccggttttttatgaggttgatccctctgatgtacgacaccaaagaggtagctacgaagaagcactgaataaacataaggagaagttcaatgacgacgaagagaaattgcagaaatggaggattgctctgcgtcaagcagctaacttgtctggttatcattttaaacatgggtaatgcactaatgttttacatttatttattgtttctttggttttaatttgtctattgatttaatttattgttgaaattcatggatgtgtgttgcatttagtatgacttcactcaattgcacaggaacgaaaatgaatatgattttgttggcaagattattaaagaggtctcccaaagaattagtcgcactcatttgcatgttgcgaataacctggttggattggagtctcgagtgctgcatgtaacctcccttttagatgataaatatgatggagttctcatggtagggatctatgaagcacggacacttcagccctttgccgtgtccggtgtccgacacgcgtccgtgtcagtgtccgacaccgacacgacacccgtattacgttctatattttggacattacaggtgtccacgtgtccgtatccgtgtcgtgtccggtgtccgtgtcggtgtcagtgcttcataggtagggatccatggaattggcggggtaggaaaaacaacgattgctcgagaagtttataatttgattgctgatcaatttgaatggttgtgttttcttgataatgtgagagaaaactcaattaaacatggattggtgcatctccaaaagacacttctttctaaaacaattggagagagtagtattaagttaggaagtgttcacgaaggaattccaataataaagcataggttcctcctaaagaaggttcttttggttgttgatgatgttgacgatctagatcagttgcaggcaattgttggagggaccgattggtttggttctgccagcagagtcatcattaccactcgagacaaacatttactaacatgccatggggttacaagcacat

SEQ ID NO: 14390 - DNA, 1035 bp, Glycine max
  Gm_smallRNAprecursor_7223
acaatggttttaccggttttttatgaggttgatccctctgatgtacgacaccaaagaggtagctacgaagaagcactgaataaacataaggagaagttcaatgacgacgaagagaaattgcagaaatggaggattgctctgcgtcaagcagctaacttgtctggttatcattttaaacatgggtaatgcactaatgttttacatttatttattgtttctttggttttaatttgtctattgatttaatttattgttgaaattcatggatgtgtgttgcatttagtatgacttcactcaattgcacaggaacgaaaatgaatatgattttgttggcaagattattaaagaggtctcccaaagaattagtcgcactcatttgcatgttgcgaataacctggttggattggagtctcgagtgctgcatgtaacctcccttttagatgataaatatgatggagttctcatggtagggatctatgaagcacggacacttcagccctttgccgtgtccggtgtccgacacgcgtccgtgtcagtgtccgacaccgacacgacacccgtattacgttctatattttggacattacaggtgtccacgtgtccgtatccgtgtcgtgtccggtgtccgtgtcggtgtcagtgcttcataggtagggatccatggaattggcggggtaggaaaaacaacgattgctcgagaagtttataatttgattgctgatcaatttgaatggttgtgttttcttgataatgtgagagaaaactcaattaaacatggattggtgcatctccaaaagacacttctttctaaaacaattggagagagtagtattaagttaggaagtgttcacgaaggaattccaataataaagcataggttcctcctaaagaaggttcttttggttgttgatgatgttgacgatctagatcagttgcaggcaattgttggagggaccgattggtttggttctgccagcagagtcatcattaccactcgagacaaacatttactaacatgccatggggttacaagca

SEQ ID NO: 14391 - DNA, 1035 bp, Glycine max; identical to SEQ ID NO: 14390
  Gm_smallRNAprecursor_7224

SEQ ID NO: 14392 - DNA, 1036 bp, Glycine max
  Gm_smallRNAprecursor_7225
acaatggttttaccggttttttatgaggttgatccctctgatgtacgacaccaaagaggtagctacgaagaagcactgaataaacataaggagaagttcaatgacgacgaagagaaattgcagaaatggaggattgctctgcgtcaagcagctaacttgtctggttatcattttaaacatgggtaatgcactaatgttttacatttatttattgtttctttggttttaatttgtctattgatttaatttattgttgaaattcatggatgtgtgttgcatttagtatgacttcactcaattgcacaggaacgaaaatgaatatgattttgttggcaagattattaaagaggtctcccaaagaattagtcgcactcatttgcatgttgcgaataacctggttggattggagtctcgagtgctgcatgtaacctcccttttagatgataaatatgatggagttctcatggtagggatctatgaagcacggacacttcagccctttgccgtgtccggtgtccgacacgcgtccgtgtcagtgtccgacaccgacacgacacccgtattacgttctatattttggacattacaggtgtccacgtgtccgtatccgtgtcgtgtccggtgtccgtgtcggtgtcagtgcttcataggtagggatccatggaattggcggggtaggaaaaacaacgattgctcgagaagtttataatttgattgctgatcaatttgaatggttgtgttttcttgataatgtgagagaaaactcaattaaacatggattggtgcatctccaaaagacacttctttctaaaacaattggagagagtagtattaagttaggaagtgttcacgaaggaattccaataataaagcataggttcctcctaaagaaggttcttttggttgttgatgatgttgacgatctagatcagttgcaggcaattgttggagggaccgattggtttggttctgccagcagagtcatcattaccactcgagacaaacatttactaacatgccatggggttacaagcac

SEQ ID NO: 14393 - DNA, 1037 bp, Glycine max
  Gm_smallRNAprecursor_7226
acaatggttttaccggttttttatgaggttgatccctctgatgtacgacaccaaagaggtagctacgaagaagcactgaataaacataaggagaagttcaatgacgacgaagagaaattgcagaaatggaggattgctctgcgtcaagcagctaacttgtctggttatcattttaaacatgggtaatgcactaatgttttacatttatttattgtttctttggttttaatttgtctattgatttaatttattgttgaaattcatggatgtgtgttgcatttagtatgacttcactcaattgcacaggaacgaaaatgaatatgattttgttggcaagattattaaagaggtctcccaaagaattagtcgcactcatttgcatgttgcgaataacctggttggattggagtctcgagtgctgcatgtaacctcccttttagatgataaatatgatggagttctcatggtagggatctatgaagcacggacacttcagccctttgccgtgtccggtgtccgacacgcgtccgtgtcagtgtccgacaccgacacgacacccgtattacgttctatattttggacattacaggtgtccacgtgtccgtatccgtgtcgtgtccggtgtccgtgtcggtgtcagtgcttcataggtagggatccatggaattggcggggtaggaaaaacaacgattgctcgagaagtttataatttgattgctgatcaatttgaatggttgtgttttcttgataatgtgagagaaaactcaattaaacatggattggtgcatctccaaaagacacttctttctaaaacaattggagagagtagtattaagttaggaagtgttcacgaaggaattccaataataaagcataggttcctcctaaagaaggttcttttggttgttgatgatgttgacgatctagatcagttgcaggcaattgttggagggaccgattggtttggttctgccagcagagtcatcattaccactcgagacaaacatttactaacatgccatggggttacaagcaca

SEQ ID NO: 14394 - DNA, 1113 bp, Glycine max
  Gm_smallRNAprecursor_7227
acaatggttttaccggttttttatgaggttgatccctctgatgtacgacaccaaagaggtagctacgaagaagcactgaataaacataaggagaagttcaatgacgacgaagagaaattgcagaaatggaggattgctctgcgtcaagcagctaacttgtctggttatcattttaaacatgggtaatgcactaatgttttacatttatttattgtttctttggttttaatttgtctattgatttaatttattgttgaaattcatggatgtgtgttgcatttagtatgacttcactcaattgcacaggaacgaaaatgaatatgattttgttggcaagattattaaagaggtctcccaaagaattagtcgcactcatttgcatgttgcgaataacctggttggattggagtctcgagtgctgcatgtaacctcccttttagatgataaatatgatggagttctcatggtagggatctatgaagcacggacacttcagccctttgccgtgtccggtgtccgacacgcgtccgtgtcagtgtccgacaccgacacgacacccgtattacgttctatattttggacattacaggtgtccacgtgtccgtatccgtgtcgtgtccggtgtccgtgtcggtgtcagtgcttcataggtagggatccatggaattggcggggtaggaaaaacaacgattgctcgagaagtttataatttgattgctgatcaatttgaatggttgtgttttcttgataatgtgagagaaaactcaattaaacatggattggtgcatctccaaaagacacttctttctaaaacaattggagagagtagtattaagttaggaagtgttcacgaaggaattccaataataaagcataggttcctcctaaagaaggttcttttggttgttgatgatgttgacgatctagatcagttgcaggcaattgttggagggaccgattggtttggttctgccagcagagtcatcattaccactcgagacaaacatttactaacatgccatggggttacaagcacatatgaggttgatgggttaaataaggaagaggctcttaaattgcttagtgggactgctttcaaaattgacaaagttg

SEQ ID NO: 14395 - DNA, 1114 bp, Glycine max
  Gm_smallRNAprecursor_7228
acaatggttttaccggttttttatgaggttgatccctctgatgtacgacaccaaagaggtagctacgaagaagcactgaataaacataaggagaagttcaatgacgacgaagagaaattgcagaaatggaggattgctctgcgtcaagcagctaacttgtctggttatcattttaaacatgggtaatgcactaatgttttacatttatttattgtttctttggttttaatttgtctattgatttaatttattgttgaaattcatggatgtgtgttgcatttagtatgacttcactcaattgcacaggaacgaaaatgaatatgattttgttggcaagattattaaagaggtctcccaaagaattagtcgcactcatttgcatgttgcgaataacctggttggattggagtctcgagtgctgcatgtaacctcccttttagatgataaatatgatggagttctcatggtagggatctatgaagcacggacacttcagccctttgccgtgtccggtgtccgacacgcgtccgtgtcagtgtccgacaccgacacgacacccgtattacgttctatattttggacattacaggtgtccacgtgtccgtatccgtgtcgtgtccggtgtccgtgtcggtgtcagtgcttcataggtagggatccatggaattggcggggtaggaaaaacaacgattgctcgagaagtttataatttgattgctgatcaatttgaatggttgtgttttcttgataatgtgagagaaaactcaattaaacatggattggtgcatctccaaaagacacttctttctaaaacaattggagagagtagtattaagttaggaagtgttcacgaaggaattccaataataaagcataggttcctcctaaagaaggttcttttggttgttgatgatgttgacgatctagatcagttgcaggcaattgttggagggaccgattggtttggttctgccagcagagtcatcattaccactcgagacaaacatttactaacatgccatggggttacaagcacatatgaggttgatgggttaaataaggaagaggctcttaaattgcttagtgggactgctttcaaaattgacaaagttga

SEQ ID NO: 14396 - DNA, 1034 bp, Glycine max
  Gm_smallRNAprecursor_7229
caatggttttaccggttttttatgaggttgatccctctgatgtacgacaccaaagaggtagctacgaagaagcactgaataaacataaggagaagttcaatgacgacgaagagaaattgcagaaatggaggattgctctgcgtcaagcagctaacttgtctggttatcattttaaacatgggtaatgcactaatgttttacatttatttattgtttctttggttttaatttgtctattgatttaatttattgttgaaattcatggatgtgtgttgcatttagtatgacttcactcaattgcacaggaacgaaaatgaatatgattttgttggcaagattattaaagaggtctcccaaagaattagtcgcactcatttgcatgttgcgaataacctggttggattggagtctcgagtgctgcatgtaacctcccttttagatgataaatatgatggagttctcatggtagggatctatgaagcacggacacttcagccctttgccgtgtccggtgtccgacacgcgtccgtgtcagtgtccgacaccgacacgacacccgtattacgttctatattttggacattacaggtgtccacgtgtccgtatccgtgtcgtgtccggtgtccgtgtcggtgtcagtgcttcataggtagggatccatggaattggcggggtaggaaaaacaacgattgctcgagaagtttataatttgattgctgatcaatttgaatggttgtgttttcttgataatgtgagagaaaactcaattaaacatggattggtgcatctccaaaagacacttctttctaaaacaattggagagagtagtattaagttaggaagtgttcacgaaggaattccaataataaagcataggttcctcctaaagaaggttcttttggttgttgatgatgttgacgatctagatcagttgcaggcaattgttggagggaccgattggtttggttctgccagcagagtcatcattaccactcgagacaaacatttactaacatgccatggggttacaagca

SEQ ID NO: 14397 - DNA, 1034 bp, Glycine max; identical to SEQ ID NO: 14396
  Gm_smallRNAprecursor_7230

SEQ ID NO: 14398 - DNA, 1035 bp, Glycine max
  Gm_smallRNAprecursor_7231
caatggttttaccggttttttatgaggttgatccctctgatgtacgacaccaaagaggtagctacgaagaagcactgaataaacataaggagaagttcaatgacgacgaagagaaattgcagaaatggaggattgctctgcgtcaagcagctaacttgtctggttatcattttaaacatgggtaatgcactaatgttttacatttatttattgtttctttggttttaatttgtctattgatttaatttattgttgaaattcatggatgtgtgttgcatttagtatgacttcactcaattgcacaggaacgaaaatgaatatgattttgttggcaagattattaaagaggtctcccaaagaattagtcgcactcatttgcatgttgcgaataacctggttggattggagtctcgagtgctgcatgtaacctcccttttagatgataaatatgatggagttctcatggtagggatctatgaagcacggacacttcagccctttgccgtgtccggtgtccgacacgcgtccgtgtcagtgtccgacaccgacacgacacccgtattacgttctatattttggacattacaggtgtccacgtgtccgtatccgtgtcgtgtccggtgtccgtgtcggtgtcagtgcttcataggtagggatccatggaattggcggggtaggaaaaacaacgattgctcgagaagtttataatttgattgctgatcaatttgaatggttgtgttttcttgataatgtgagagaaaactcaattaaacatggattggtgcatctccaaaagacacttctttctaaaacaattggagagagtagtattaagttaggaagtgttcacgaaggaattccaataataaagcataggttcctcctaaagaaggttcttttggttgttgatgatgttgacgatctagatcagttgcaggcaattgttggagggaccgattggtttggttctgccagcagagtcatcattaccactcgagacaaacatttactaacatgccatggggttacaagcac

SEQ ID NO: 14399 - DNA, 1089 bp, Glycine max
  Gm_smallRNAprecursor_7232
caatggttttaccggttttttatgaggttgatccctctgatgtacgacaccaaagaggtagctacgaagaagcactgaataaacataaggagaagttcaatgacgacgaagagaaattgcagaaatggaggattgctctgcgtcaagcagctaacttgtctggttatcattttaaacatgggtaatgcactaatgttttacatttatttattgtttctttggttttaatttgtctattgatttaatttattgttgaaattcatggatgtgtgttgcatttagtatgacttcactcaattgcacaggaacgaaaatgaatatgattttgttggcaagattattaaagaggtctcccaaagaattagtcgcactcatttgcatgttgcgaataacctggttggattggagtctcgagtgctgcatgtaacctcccttttagatgataaatatgatggagttctcatggtagggatctatgaagcacggacacttcagccctttgccgtgtccggtgtccgacacgcgtccgtgtcagtgtccgacaccgacacgacacccgtattacgttctatattttggacattacaggtgtccacgtgtccgtatccgtgtcgtgtccggtgtccgtgtcggtgtcagtgcttcataggtagggatccatggaattggcggggtaggaaaaacaacgattgctcgagaagtttataatttgattgctgatcaatttgaatggttgtgttttcttgataatgtgagagaaaactcaattaaacatggattggtgcatctccaaaagacacttctttctaaaacaattggagagagtagtattaagttaggaagtgttcacgaaggaattccaataataaagcataggttcctcctaaagaaggttcttttggttgttgatgatgttgacgatctagatcagttgcaggcaattgttggagggaccgattggtttggttctgccagcagagtcatcattaccactcgagacaaacatttactaacatgccatggggttacaagcacatatgaggttgatgggttaaataaggaagaggctcttaaattgcttagtgggac

SEQ ID NO: 14400 - DNA, 1112 bp, Glycine max
  Gm_smallRNAprecursor_7233
caatggttttaccggttttttatgaggttgatccctctgatgtacgacaccaaagaggtagctacgaagaagcactgaataaacataaggagaagttcaatgacgacgaagagaaattgcagaaatggaggattgctctgcgtcaagcagctaacttgtctggttatcattttaaacatgggtaatgcactaatgttttacatttatttattgtttctttggttttaatttgtctattgatttaatttattgttgaaattcatggatgtgtgttgcatttagtatgacttcactcaattgcacaggaacgaaaatgaatatgattttgttggcaagattattaaagaggtctcccaaagaattagtcgcactcatttgcatgttgcgaataacctggttggattggagtctcgagtgctgcatgtaacctcccttttagatgataaatatgatggagttctcatggtagggatctatgaagcacggacacttcagccctttgccgtgtccggtgtccgacacgcgtccgtgtcagtgtccgacaccgacacgacacccgtattacgttctatattttggacattacaggtgtccacgtgtccgtatccgtgtcgtgtccggtgtccgtgtcggtgtcagtgcttcataggtagggatccatggaattggcggggtaggaaaaacaacgattgctcgagaagtttataatttgattgctgatcaatttgaatggttgtgttttcttgataatgtgagagaaaactcaattaaacatggattggtgcatctccaaaagacacttctttctaaaacaattggagagagtagtattaagttaggaagtgttcacgaaggaattccaataataaagcataggttcctcctaaagaaggttcttttggttgttgatgatgttgacgatctagatcagttgcaggcaattgttggagggaccgattggtttggttctgccagcagagtcatcattaccactcgagacaaacatttactaacatgccatggggttacaagcacatatgaggttgatgggttaaataaggaagaggctcttaaattgcttagtgggactgctttcaaaattgacaaagttg

SEQ ID NO: 14401 - DNA, 1112 bp, Glycine max; identical to SEQ ID NO: 14400
  Gm_smallRNAprecursor_7234

SEQ ID NO: 14402 - DNA, 1112 bp, Glycine max; identical to SEQ ID NO: 14400
  Gm_smallRNAprecursor_7235

SEQ ID NO: 14403 - DNA, 1112 bp, Glycine max; identical to SEQ ID NO: 14400
  Gm_smallRNAprecursor_7236

SEQ ID NO: 14404 - DNA, 1113 bp, Glycine max
  Gm_smallRNAprecursor_7237
caatggttttaccggttttttatgaggttgatccctctgatgtacgacaccaaagaggtagctacgaagaagcactgaataaacataaggagaagttcaatgacgacgaagagaaattgcagaaatggaggattgctctgcgtcaagcagctaacttgtctggttatcattttaaacatgggtaatgcactaatgttttacatttatttattgtttctttggttttaatttgtctattgatttaatttattgttgaaattcatggatgtgtgttgcatttagtatgacttcactcaattgcacaggaacgaaaatgaatatgattttgttggcaagattattaaagaggtctcccaaagaattagtcgcactcatttgcatgttgcgaataacctggttggattggagtctcgagtgctgcatgtaacctcccttttagatgataaatatgatggagttctcatggtagggatctatgaagcacggacacttcagccctttgccgtgtccggtgtccgacacgcgtccgtgtcagtgtccgacaccgacacgacacccgtattacgttctatattttggacattacaggtgtccacgtgtccgtatccgtgtcgtgtccggtgtccgtgtcggtgtcagtgcttcataggtagggatccatggaattggcggggtaggaaaaacaacgattgctcgagaagtttataatttgattgctgatcaatttgaatggttgtgttttcttgataatgtgagagaaaactcaattaaacatggattggtgcatctccaaaagacacttctttctaaaacaattggagagagtagtattaagttaggaagtgttcacgaaggaattccaataataaagcataggttcctcctaaagaaggttcttttggttgttgatgatgttgacgatctagatcagttgcaggcaattgttggagggaccgattggtttggttctgccagcagagtcatcattaccactcgagacaaacatttactaacatgccatggggttacaagcacatatgaggttgatgggttaaataaggaagaggctcttaaattgcttagtgggactgctttcaaaattgacaaagttga

SEQ ID NO: 14405 - DNA, 1113 bp, Glycine max; identical to SEQ ID NO: 14404
  Gm_smallRNAprecursor_7238

SEQ ID NO: 14406 - DNA, 1114 bp, Glycine max
  Gm_smallRNAprecursor_7239
caatggttttaccggttttttatgaggttgatccctctgatgtacgacaccaaagaggtagctacgaagaagcactgaataaacataaggagaagttcaatgacgacgaagagaaattgcagaaatggaggattgctctgcgtcaagcagctaacttgtctggttatcattttaaacatgggtaatgcactaatgttttacatttatttattgtttctttggttttaatttgtctattgatttaatttattgttgaaattcatggatgtgtgttgcatttagtatgacttcactcaattgcacaggaacgaaaatgaatatgattttgttggcaagattattaaagaggtctcccaaagaattagtcgcactcatttgcatgttgcgaataacctggttggattggagtctcgagtgctgcatgtaacctcccttttagatgataaatatgatggagttctcatggtagggatctatgaagcacggacacttcagccctttgccgtgtccggtgtccgacacgcgtccgtgtcagtgtccgacaccgacacgacacccgtattacgttctatattttggacattacaggtgtccacgtgtccgtatccgtgtcgtgtccggtgtccgtgtcggtgtcagtgcttcataggtagggatccatggaattggcggggtaggaaaaacaacgattgctcgagaagtttataatttgattgctgatcaatttgaatggttgtgttttcttgataatgtgagagaaaactcaattaaacatggattggtgcatctccaaaagacacttctttctaaaacaattggagagagtagtattaagttaggaagtgttcacgaaggaattccaataataaagcataggttcctcctaaagaaggttcttttggttgttgatgatgttgacgatctagatcagttgcaggcaattgttggagggaccgattggtttggttctgccagcagagtcatcattaccactcgagacaaacatttactaacatgccatggggttacaagcacatatgaggttgatgggttaaataaggaagaggctcttaaattgcttagtgggactgctttcaaaattgacaaagttgat

SEQ ID NO: 14407 - DNA, 1110 bp, Glycine max
  Gm_smallRNAprecursor_7240
aatggttttaccggttttttatgaggttgatccctctgatgtacgacaccaaagaggtagctacgaagaagcactgaataaacataaggagaagttcaatgacgacgaagagaaattgcagaaatggaggattgctctgcgtcaagcagctaacttgtctggttatcattttaaacatgggtaatgcactaatgttttacatttatttattgtttctttggttttaatttgtctattgatttaatttattgttgaaattcatggatgtgtgttgcatttagtatgacttcactcaattgcacaggaacgaaaatgaatatgattttgttggcaagattattaaagaggtctcccaaagaattagtcgcactcatttgcatgttgcgaataacctggttggattggagtctcgagtgctgcatgtaacctcccttttagatgataaatatgatggagttctcatggtagggatctatgaagcacggacacttcagccctttgccgtgtccggtgtccgacacgcgtccgtgtcagtgtccgacaccgacacgacacccgtattacgttctatattttggacattacaggtgtccacgtgtccgtatccgtgtcgtgtccggtgtccgtgtcggtgtcagtgcttcataggtagggatccatggaattggcggggtaggaaaaacaacgattgctcgagaagtttataatttgattgctgatcaatttgaatggttgtgttttcttgataatgtgagagaaaactcaattaaacatggattggtgcatctccaaaagacacttctttctaaaacaattggagagagtagtattaagttaggaagtgttcacgaaggaattccaataataaagcataggttcctcctaaagaaggttcttttggttgttgatgatgttgacgatctagatcagttgcaggcaattgttggagggaccgattggtttggttctgccagcagagtcatcattaccactcgagacaaacatttactaacatgccatggggttacaagcacatatgaggttgatgggttaaataaggaagaggctcttaaattgcttagtgggactgctttcaaaattgacaaagtt

SEQ ID NO: 14408 - DNA, 1111 bp, Glycine max
  Gm_smallRNAprecursor_7241
aatggttttaccggttttttatgaggttgatccctctgatgtacgacaccaaagaggtagctacgaagaagcactgaataaacataaggagaagttcaatgacgacgaagagaaattgcagaaatggaggattgctctgcgtcaagcagctaacttgtctggttatcattttaaacatgggtaatgcactaatgttttacatttatttattgtttctttggttttaatttgtctattgatttaatttattgttgaaattcatggatgtgtgttgcatttagtatgacttcactcaattgcacaggaacgaaaatgaatatgattttgttggcaagattattaaagaggtctcccaaagaattagtcgcactcatttgcatgttgcgaataacctggttggattggagtctcgagtgctgcatgtaacctcccttttagatgataaatatgatggagttctcatggtagggatctatgaagcacggacacttcagccctttgccgtgtccggtgtccgacacgcgtccgtgtcagtgtccgacaccgacacgacacccgtattacgttctatattttggacattacaggtgtccacgtgtccgtatccgtgtcgtgtccggtgtccgtgtcggtgtcagtgcttcataggtagggatccatggaattggcggggtaggaaaaacaacgattgctcgagaagtttataatttgattgctgatcaatttgaatggttgtgttttcttgataatgtgagagaaaactcaattaaacatggattggtgcatctccaaaagacacttctttctaaaacaattggagagagtagtattaagttaggaagtgttcacgaaggaattccaataataaagcataggttcctcctaaagaaggttcttttggttgttgatgatgttgacgatctagatcagttgcaggcaattgttggagggaccgattggtttggttctgccagcagagtcatcattaccactcgagacaaacatttactaacatgccatggggttacaagcacatatgaggttgatgggttaaataaggaagaggctcttaaattgcttagtgggactgctttcaaaattgacaaagttg

SEQ ID NO: 14409 - DNA, 1111 bp, Glycine max; identical to SEQ ID NO: 14408
  Gm_smallRNAprecursor_7242

SEQ ID NO: 14410 - DNA, 1033 bp, Glycine max
  Gm_smallRNAprecursor_7243
ttttaccggttttttatgaggttgatccctctgatgtacgacaccaaagaggtagctacgaagaagcactgaataaacataaggagaagttcaatgacgacgaagagaaattgcagaaatggaggattgctctgcgtcaagcagctaacttgtctggttatcattttaaacatgggtaatgcactaatgttttacatttatttattgtttctttggttttaatttgtctattgatttaatttattgttgaaattcatggatgtgtgttgcatttagtatgacttcactcaattgcacaggaacgaaaatgaatatgattttgttggcaagattattaaagaggtctcccaaagaattagtcgcactcatttgcatgttgcgaataacctggttggattggagtctcgagtgctgcatgtaacctcccttttagatgataaatatgatggagttctcatggtagggatctatgaagcacggacacttcagccctttgccgtgtccggtgtccgacacgcgtccgtgtcagtgtccgacaccgacacgacacccgtattacgttctatattttggacattacaggtgtccacgtgtccgtatccgtgtcgtgtccggtgtccgtgtcggtgtcagtgcttcataggtagggatccatggaattggcggggtaggaaaaacaacgattgctcgagaagtttataatttgattgctgatcaatttgaatggttgtgttttcttgataatgtgagagaaaactcaattaaacatggattggtgcatctccaaaagacacttctttctaaaacaattggagagagtagtattaagttaggaagtgttcacgaaggaattccaataataaagcataggttcctcctaaagaaggttcttttggttgttgatgatgttgacgatctagatcagttgcaggcaattgttggagggaccgattggtttggttctgccagcagagtcatcattaccactcgagacaaacatttactaacatgccatggggttacaagcacatat

SEQ ID NO: 14411 - DNA, 1032 bp, Glycine max
  Gm_smallRNAprecursor_7244
tttaccggttttttatgaggttgatccctctgatgtacgacaccaaagaggtagctacgaagaagcactgaataaacataaggagaagttcaatgacgacgaagagaaattgcagaaatggaggattgctctgcgtcaagcagctaacttgtctggttatcattttaaacatgggtaatgcactaatgttttacatttatttattgtttctttggttttaatttgtctattgatttaatttattgttgaaattcatggatgtgtgttgcatttagtatgacttcactcaattgcacaggaacgaaaatgaatatgattttgttggcaagattattaaagaggtctcccaaagaattagtcgcactcatttgcatgttgcgaataacctggttggattggagtctcgagtgctgcatgtaacctcccttttagatgataaatatgatggagttctcatggtagggatctatgaagcacggacacttcagccctttgccgtgtccggtgtccgacacgcgtccgtgtcagtgtccgacaccgacacgacacccgtattacgttctatattttggacattacaggtgtccacgtgtccgtatccgtgtcgtgtccggtgtccgtgtcggtgtcagtgcttcataggtagggatccatggaattggcggggtaggaaaaacaacgattgctcgagaagtttataatttgattgctgatcaatttgaatggttgtgttttcttgataatgtgagagaaaactcaattaaacatggattggtgcatctccaaaagacacttctttctaaaacaattggagagagtagtattaagttaggaagtgttcacgaaggaattccaataataaagcataggttcctcctaaagaaggttcttttggttgttgatgatgttgacgatctagatcagttgcaggcaattgttggagggaccgattggtttggttctgccagcagagtcatcattaccactcgagacaaacatttactaacatgccatggggttacaagcacatat

SEQ ID NO: 14412 - DNA, 1082 bp, Glycine max
  Gm_smallRNAprecursor_7245
tttaccggttttttatgaggttgatccctctgatgtacgacaccaaagaggtagctacgaagaagcactgaataaacataaggagaagttcaatgacgacgaagagaaattgcagaaatggaggattgctctgcgtcaagcagctaacttgtctggttatcattttaaacatgggtaatgcactaatgttttacatttatttattgtttctttggttttaatttgtctattgatttaatttattgttgaaattcatggatgtgtgttgcatttagtatgacttcactcaattgcacaggaacgaaaatgaatatgattttgttggcaagattattaaagaggtctcccaaagaattagtcgcactcatttgcatgttgcgaataacctggttggattggagtctcgagtgctgcatgtaacctcccttttagatgataaatatgatggagttctcatggtagggatctatgaagcacggacacttcagccctttgccgtgtccggtgtccgacacgcgtccgtgtcagtgtccgacaccgacacgacacccgtattacgttctatattttggacattacaggtgtccacgtgtccgtatccgtgtcgtgtccggtgtccgtgtcggtgtcagtgcttcataggtagggatccatggaattggcggggtaggaaaaacaacgattgctcgagaagtttataatttgattgctgatcaatttgaatggttgtgttttcttgataatgtgagagaaaactcaattaaacatggattggtgcatctccaaaagacacttctttctaaaacaattggagagagtagtattaagttaggaagtgttcacgaaggaattccaataataaagcataggttcctcctaaagaaggttcttttggttgttgatgatgttgacgatctagatcagttgcaggcaattgttggagggaccgattggtttggttctgccagcagagtcatcattaccactcgagacaaacatttactaacatgccatggggttacaagcacatatgaggttgatgggttaaataaggaagaggctcttaaattgcttagtgggac

SEQ ID NO: 14413 - DNA, 1094 bp, Glycine max
  Gm_smallRNAprecursor_7246
tttaccggttttttatgaggttgatccctctgatgtacgacaccaaagaggtagctacgaagaagcactgaataaacataaggagaagttcaatgacgacgaagagaaattgcagaaatggaggattgctctgcgtcaagcagctaacttgtctggttatcattttaaacatgggtaatgcactaatgttttacatttatttattgtttctttggttttaatttgtctattgatttaatttattgttgaaattcatggatgtgtgttgcatttagtatgacttcactcaattgcacaggaacgaaaatgaatatgattttgttggcaagattattaaagaggtctcccaaagaattagtcgcactcatttgcatgttgcgaataacctggttggattggagtctcgagtgctgcatgtaacctcccttttagatgataaatatgatggagttctcatggtagggatctatgaagcacggacacttcagccctttgccgtgtccggtgtccgacacgcgtccgtgtcagtgtccgacaccgacacgacacccgtattacgttctatattttggacattacaggtgtccacgtgtccgtatccgtgtcgtgtccggtgtccgtgtcggtgtcagtgcttcataggtagggatccatggaattggcggggtaggaaaaacaacgattgctcgagaagtttataatttgattgctgatcaatttgaatggttgtgttttcttgataatgtgagagaaaactcaattaaacatggattggtgcatctccaaaagacacttctttctaaaacaattggagagagtagtattaagttaggaagtgttcacgaaggaattccaataataaagcataggttcctcctaaagaaggttcttttggttgttgatgatgttgacgatctagatcagttgcaggcaattgttggagggaccgattggtttggttctgccagcagagtcatcattaccactcgagacaaacatttactaacatgccatggggttacaagcacatatgaggttgatgggttaaataaggaagaggctcttaaattgcttagtgggactgctttcaaaat

SEQ ID NO: 14414 - DNA, 1101 bp, Glycine max
  Gm_smallRNAprecursor_7247
ccggttttttatgaggttgatccctctgatgtacgacaccaaagaggtagctacgaagaagcactgaataaacataaggagaagttcaatgacgacgaagagaaattgcagaaatggaggattgctctgcgtcaagcagctaacttgtctggttatcattttaaacatgggtaatgcactaatgttttacatttatttattgtttctttggttttaatttgtctattgatttaatttattgttgaaattcatggatgtgtgttgcatttagtatgacttcactcaattgcacaggaacgaaaatgaatatgattttgttggcaagattattaaagaggtctcccaaagaattagtcgcactcatttgcatgttgcgaataacctggttggattggagtctcgagtgctgcatgtaacctcccttttagatgataaatatgatggagttctcatggtagggatctatgaagcacggacacttcagccctttgccgtgtccggtgtccgacacgcgtccgtgtcagtgtccgacaccgacacgacacccgtattacgttctatattttggacattacaggtgtccacgtgtccgtatccgtgtcgtgtccggtgtccgtgtcggtgtcagtgcttcataggtagggatccatggaattggcggggtaggaaaaacaacgattgctcgagaagtttataatttgattgctgatcaatttgaatggttgtgttttcttgataatgtgagagaaaactcaattaaacatggattggtgcatctccaaaagacacttctttctaaaacaattggagagagtagtattaagttaggaagtgttcacgaaggaattccaataataaagcataggttcctcctaaagaaggttcttttggttgttgatgatgttgacgatctagatcagttgcaggcaattgttggagggaccgattggtttggttctgccagcagagtcatcattaccactcgagacaaacatttactaacatgccatggggttacaagcacatatgaggttgatgggttaaataaggaagaggctcttaaattgcttagtgggactgctttcaaaattgacaaagttg

SEQ ID NO: 14415 - DNA, 1101 bp, Glycine max; identical to SEQ ID NO: 14414
  Gm_smallRNAprecursor_7248

SEQ ID NO: 14416 - DNA, 1102 bp, Glycine max
  Gm_smallRNAprecursor_7249
ccggttttttatgaggttgatccctctgatgtacgacaccaaagaggtagctacgaagaagcactgaataaacataaggagaagttcaatgacgacgaagagaaattgcagaaatggaggattgctctgcgtcaagcagctaacttgtctggttatcattttaaacatgggtaatgcactaatgttttacatttatttattgtttctttggttttaatttgtctattgatttaatttattgttgaaattcatggatgtgtgttgcatttagtatgacttcactcaattgcacaggaacgaaaatgaatatgattttgttggcaagattattaaagaggtctcccaaagaattagtcgcactcatttgcatgttgcgaataacctggttggattggagtctcgagtgctgcatgtaacctcccttttagatgataaatatgatggagttctcatggtagggatctatgaagcacggacacttcagccctttgccgtgtccggtgtccgacacgcgtccgtgtcagtgtccgacaccgacacgacacccgtattacgttctatattttggacattacaggtgtccacgtgtccgtatccgtgtcgtgtccggtgtccgtgtcggtgtcagtgcttcataggtagggatccatggaattggcggggtaggaaaaacaacgattgctcgagaagtttataatttgattgctgatcaatttgaatggttgtgttttcttgataatgtgagagaaaactcaattaaacatggattggtgcatctccaaaagacacttctttctaaaacaattggagagagtagtattaagttaggaagtgttcacgaaggaattccaataataaagcataggttcctcctaaagaaggttcttttggttgttgatgatgttgacgatctagatcagttgcaggcaattgttggagggaccgattggtttggttctgccagcagagtcatcattaccactcgagacaaacatttactaacatgccatggggttacaagcacatatgaggttgatgggttaaataaggaagaggctcttaaattgcttagtgggactgctttcaaaattgacaaagttga

SEQ ID NO: 14417 - DNA, 1103 bp, Glycine max
  Gm_smallRNAprecursor_7250
ccggttttttatgaggttgatccctctgatgtacgacaccaaagaggtagctacgaagaagcactgaataaacataaggagaagttcaatgacgacgaagagaaattgcagaaatggaggattgctctgcgtcaagcagctaacttgtctggttatcattttaaacatgggtaatgcactaatgttttacatttatttattgtttctttggttttaatttgtctattgatttaatttattgttgaaattcatggatgtgtgttgcatttagtatgacttcactcaattgcacaggaacgaaaatgaatatgattttgttggcaagattattaaagaggtctcccaaagaattagtcgcactcatttgcatgttgcgaataacctggttggattggagtctcgagtgctgcatgtaacctcccttttagatgataaatatgatggagttctcatggtagggatctatgaagcacggacacttcagccctttgccgtgtccggtgtccgacacgcgtccgtgtcagtgtccgacaccgacacgacacccgtattacgttctatattttggacattacaggtgtccacgtgtccgtatccgtgtcgtgtccggtgtccgtgtcggtgtcagtgcttcataggtagggatccatggaattggcggggtaggaaaaacaacgattgctcgagaagtttataatttgattgctgatcaatttgaatggttgtgttttcttgataatgtgagagaaaactcaattaaacatggattggtgcatctccaaaagacacttctttctaaaacaattggagagagtagtattaagttaggaagtgttcacgaaggaattccaataataaagcataggttcctcctaaagaaggttcttttggttgttgatgatgttgacgatctagatcagttgcaggcaattgttggagggaccgattggtttggttctgccagcagagtcatcattaccactcgagacaaacatttactaacatgccatggggttacaagcacatatgaggttgatgggttaaataaggaagaggctcttaaattgcttagtgggactgctttcaaaattgacaaagttgat

SEQ ID NO: 14418 - DNA, 1080 bp, Glycine max
  Gm_smallRNAprecursor_7251
cctctgatgtacgacaccaaagaggtagctacgaagaagcactgaataaacataaggagaagttcaatgacgacgaagagaaattgcagaaatggaggattgctctgcgtcaagcagctaacttgtctggttatcattttaaacatgggtaatgcactaatgttttacatttatttattgtttctttggttttaatttgtctattgatttaatttattgttgaaattcatggatgtgtgttgcatttagtatgacttcactcaattgcacaggaacgaaaatgaatatgattttgttggcaagattattaaagaggtctcccaaagaattagtcgcactcatttgcatgttgcgaataacctggttggattggagtctcgagtgctgcatgtaacctcccttttagatgataaatatgatggagttctcatggtagggatctatgaagcacggacacttcagccctttgccgtgtccggtgtccgacacgcgtccgtgtcagtgtccgacaccgacacgacacccgtattacgttctatattttggacattacaggtgtccacgtgtccgtatccgtgtcgtgtccggtgtccgtgtcggtgtcagtgcttcataggtagggatccatggaattggcggggtaggaaaaacaacgattgctcgagaagtttataatttgattgctgatcaatttgaatggttgtgttttcttgataatgtgagagaaaactcaattaaacatggattggtgcatctccaaaagacacttctttctaaaacaattggagagagtagtattaagttaggaagtgttcacgaaggaattccaataataaagcataggttcctcctaaagaaggttcttttggttgttgatgatgttgacgatctagatcagttgcaggcaattgttggagggaccgattggtttggttctgccagcagagtcatcattaccactcgagacaaacatttactaacatgccatggggttacaagcacatatgaggttgatgggttaaataaggaagaggctcttaaattgcttagtgggactgctttcaaaattgacaaagttga

SEQ ID NO: 14419 - DNA, 1081 bp, Glycine max
  Gm_smallRNAprecursor_7252
cctctgatgtacgacaccaaagaggtagctacgaagaagcactgaataaacataaggagaagttcaatgacgacgaagagaaattgcagaaatggaggattgctctgcgtcaagcagctaacttgtctggttatcattttaaacatgggtaatgcactaatgttttacatttatttattgtttctttggttttaatttgtctattgatttaatttattgttgaaattcatggatgtgtgttgcatttagtatgacttcactcaattgcacaggaacgaaaatgaatatgattttgttggcaagattattaaagaggtctcccaaagaattagtcgcactcatttgcatgttgcgaataacctggttggattggagtctcgagtgctgcatgtaacctcccttttagatgataaatatgatggagttctcatggtagggatctatgaagcacggacacttcagccctttgccgtgtccggtgtccgacacgcgtccgtgtcagtgtccgacaccgacacgacacccgtattacgttctatattttggacattacaggtgtccacgtgtccgtatccgtgtcgtgtccggtgtccgtgtcggtgtcagtgcttcataggtagggatccatggaattggcggggtaggaaaaacaacgattgctcgagaagtttataatttgattgctgatcaatttgaatggttgtgttttcttgataatgtgagagaaaactcaattaaacatggattggtgcatctccaaaagacacttctttctaaaacaattggagagagtagtattaagttaggaagtgttcacgaaggaattccaataataaagcataggttcctcctaaagaaggttcttttggttgttgatgatgttgacgatctagatcagttgcaggcaattgttggagggaccgattggtttggttctgccagcagagtcatcattaccactcgagacaaacatttactaacatgccatggggttacaagcacatatgaggttgatgggttaaataaggaagaggctcttaaattgcttagtgggactgctttcaaaattgacaaagttgat

SEQ ID NO: 14420 - DNA, 1067 bp, Glycine max
  Gm_smallRNAprecursor_7253
ctctgatgtacgacaccaaagaggtagctacgaagaagcactgaataaacataaggagaagttcaatgacgacgaagagaaattgcagaaatggaggattgctctgcgtcaagcagctaacttgtctggttatcattttaaacatgggtaatgcactaatgttttacatttatttattgtttctttggttttaatttgtctattgatttaatttattgttgaaattcatggatgtgtgttgcatttagtatgacttcactcaattgcacaggaacgaaaatgaatatgattttgttggcaagattattaaagaggtctcccaaagaattagtcgcactcatttgcatgttgcgaataacctggttggattggagtctcgagtgctgcatgtaacctcccttttagatgataaatatgatggagttctcatggtagggatctatgaagcacggacacttcagccctttgccgtgtccggtgtccgacacgcgtccgtgtcagtgtccgacaccgacacgacacccgtattacgttctatattttggacattacaggtgtccacgtgtccgtatccgtgtcgtgtccggtgtccgtgtcggtgtcagtgcttcataggtagggatccatggaattggcggggtaggaaaaacaacgattgctcgagaagtttataatttgattgctgatcaatttgaatggttgtgttttcttgataatgtgagagaaaactcaattaaacatggattggtgcatctccaaaagacacttctttctaaaacaattggagagagtagtattaagttaggaagtgttcacgaaggaattccaataataaagcataggttcctcctaaagaaggttcttttggttgttgatgatgttgacgatctagatcagttgcaggcaattgttggagggaccgattggtttggttctgccagcagagtcatcattaccactcgagacaaacatttactaacatgccatggggttacaagcacatatgaggttgatgggttaaataaggaagaggctcttaaattgcttagtgggactgctttcaaaat

SEQ ID NO: 14421 - DNA, 1078 bp, Glycine max
  Gm_smallRNAprecursor_7254
ctctgatgtacgacaccaaagaggtagctacgaagaagcactgaataaacataaggagaagttcaatgacgacgaagagaaattgcagaaatggaggattgctctgcgtcaagcagctaacttgtctggttatcattttaaacatgggtaatgcactaatgttttacatttatttattgtttctttggttttaatttgtctattgatttaatttattgttgaaattcatggatgtgtgttgcatttagtatgacttcactcaattgcacaggaacgaaaatgaatatgattttgttggcaagattattaaagaggtctcccaaagaattagtcgcactcatttgcatgttgcgaataacctggttggattggagtctcgagtgctgcatgtaacctcccttttagatgataaatatgatggagttctcatggtagggatctatgaagcacggacacttcagccctttgccgtgtccggtgtccgacacgcgtccgtgtcagtgtccgacaccgacacgacacccgtattacgttctatattttggacattacaggtgtccacgtgtccgtatccgtgtcgtgtccggtgtccgtgtcggtgtcagtgcttcataggtagggatccatggaattggcggggtaggaaaaacaacgattgctcgagaagtttataatttgattgctgatcaatttgaatggttgtgttttcttgataatgtgagagaaaactcaattaaacatggattggtgcatctccaaaagacacttctttctaaaacaattggagagagtagtattaagttaggaagtgttcacgaaggaattccaataataaagcataggttcctcctaaagaaggttcttttggttgttgatgatgttgacgatctagatcagttgcaggcaattgttggagggaccgattggtttggttctgccagcagagtcatcattaccactcgagacaaacatttactaacatgccatggggttacaagcacatatgaggttgatgggttaaataaggaagaggctcttaaattgcttagtgggactgctttcaaaattgacaaagttg

SEQ ID NO: 14422 - DNA, 1078 bp, Glycine max; identical to SEQ ID NO: 14421
  Gm_smallRNAprecursor_7255

SEQ ID NO: 14423 - DNA, 1079 bp, Glycine max
  Gm_smallRNAprecursor_7256
ctctgatgtacgacaccaaagaggtagctacgaagaagcactgaataaacataaggagaagttcaatgacgacgaagagaaattgcagaaatggaggattgctctgcgtcaagcagctaacttgtctggttatcattttaaacatgggtaatgcactaatgttttacatttatttattgtttctttggttttaatttgtctattgatttaatttattgttgaaattcatggatgtgtgttgcatttagtatgacttcactcaattgcacaggaacgaaaatgaatatgattttgttggcaagattattaaagaggtctcccaaagaattagtcgcactcatttgcatgttgcgaataacctggttggattggagtctcgagtgctgcatgtaacctcccttttagatgataaatatgatggagttctcatggtagggatctatgaagcacggacacttcagccctttgccgtgtccggtgtccgacacgcgtccgtgtcagtgtccgacaccgacacgacacccgtattacgttctatattttggacattacaggtgtccacgtgtccgtatccgtgtcgtgtccggtgtccgtgtcggtgtcagtgcttcataggtagggatccatggaattggcggggtaggaaaaacaacgattgctcgagaagtttataatttgattgctgatcaatttgaatggttgtgttttcttgataatgtgagagaaaactcaattaaacatggattggtgcatctccaaaagacacttctttctaaaacaattggagagagtagtattaagttaggaagtgttcacgaaggaattccaataataaagcataggttcctcctaaagaaggttcttttggttgttgatgatgttgacgatctagatcagttgcaggcaattgttggagggaccgattggtttggttctgccagcagagtcatcattaccactcgagacaaacatttactaacatgccatggggttacaagcacatatgaggttgatgggttaaataaggaagaggctcttaaattgcttagtgggactgctttcaaaattgacaaagttga

SEQ ID NO: 14424 - DNA, 1066 bp, Glycine max
  Gm_smallRNAprecursor_7257
tctgatgtacgacaccaaagaggtagctacgaagaagcactgaataaacataaggagaagttcaatgacgacgaagagaaattgcagaaatggaggattgctctgcgtcaagcagctaacttgtctggttatcattttaaacatgggtaatgcactaatgttttacatttatttattgtttctttggttttaatttgtctattgatttaatttattgttgaaattcatggatgtgtgttgcatttagtatgacttcactcaattgcacaggaacgaaaatgaatatgattttgttggcaagattattaaagaggtctcccaaagaattagtcgcactcatttgcatgttgcgaataacctggttggattggagtctcgagtgctgcatgtaacctcccttttagatgataaatatgatggagttctcatggtagggatctatgaagcacggacacttcagccctttgccgtgtccggtgtccgacacgcgtccgtgtcagtgtccgacaccgacacgacacccgtattacgttctatattttggacattacaggtgtccacgtgtccgtatccgtgtcgtgtccggtgtccgtgtcggtgtcagtgcttcataggtagggatccatggaattggcggggtaggaaaaacaacgattgctcgagaagtttataatttgattgctgatcaatttgaatggttgtgttttcttgataatgtgagagaaaactcaattaaacatggattggtgcatctccaaaagacacttctttctaaaacaattggagagagtagtattaagttaggaagtgttcacgaaggaattccaataataaagcataggttcctcctaaagaaggttcttttggttgttgatgatgttgacgatctagatcagttgcaggcaattgttggagggaccgattggtttggttctgccagcagagtcatcattaccactcgagacaaacatttactaacatgccatggggttacaagcacatatgaggttgatgggttaaataaggaagaggctcttaaattgcttagtgggactgctttcaaaat

SEQ ID NO: 14425 - DNA, 1076 bp, Glycine max
  Gm_smallRNAprecursor_7258
tctgatgtacgacaccaaagaggtagctacgaagaagcactgaataaacataaggagaagttcaatgacgacgaagagaaattgcagaaatggaggattgctctgcgtcaagcagctaacttgtctggttatcattttaaacatgggtaatgcactaatgttttacatttatttattgtttctttggttttaatttgtctattgatttaatttattgttgaaattcatggatgtgtgttgcatttagtatgacttcactcaattgcacaggaacgaaaatgaatatgattttgttggcaagattattaaagaggtctcccaaagaattagtcgcactcatttgcatgttgcgaataacctggttggattggagtctcgagtgctgcatgtaacctcccttttagatgataaatatgatggagttctcatggtagggatctatgaagcacggacacttcagccctttgccgtgtccggtgtccgacacgcgtccgtgtcagtgtccgacaccgacacgacacccgtattacgttctatattttggacattacaggtgtccacgtgtccgtatccgtgtcgtgtccggtgtccgtgtcggtgtcagtgcttcataggtagggatccatggaattggcggggtaggaaaaacaacgattgctcgagaagtttataatttgattgctgatcaatttgaatggttgtgttttcttgataatgtgagagaaaactcaattaaacatggattggtgcatctccaaaagacacttctttctaaaacaattggagagagtagtattaagttaggaagtgttcacgaaggaattccaataataaagcataggttcctcctaaagaaggttcttttggttgttgatgatgttgacgatctagatcagttgcaggcaattgttggagggaccgattggtttggttctgccagcagagtcatcattaccactcgagacaaacatttactaacatgccatggggttacaagcacatatgaggttgatgggttaaataaggaagaggctcttaaattgcttagtgggactgctttcaaaattgacaaagtt

SEQ ID NO: 14426 - DNA, 1077 bp, Glycine max
  Gm_smallRNAprecursor_7259
tctgatgtacgacaccaaagaggtagctacgaagaagcactgaataaacataaggagaagttcaatgacgacgaagagaaattgcagaaatggaggattgctctgcgtcaagcagctaacttgtctggttatcattttaaacatgggtaatgcactaatgttttacatttatttattgtttctttggttttaatttgtctattgatttaatttattgttgaaattcatggatgtgtgttgcatttagtatgacttcactcaattgcacaggaacgaaaatgaatatgattttgttggcaagattattaaagaggtctcccaaagaattagtcgcactcatttgcatgttgcgaataacctggttggattggagtctcgagtgctgcatgtaacctcccttttagatgataaatatgatggagttctcatggtagggatctatgaagcacggacacttcagccctttgccgtgtccggtgtccgacacgcgtccgtgtcagtgtccgacaccgacacgacacccgtattacgttctatattttggacattacaggtgtccacgtgtccgtatccgtgtcgtgtccggtgtccgtgtcggtgtcagtgcttcataggtagggatccatggaattggcggggtaggaaaaacaacgattgctcgagaagtttataatttgattgctgatcaatttgaatggttgtgttttcttgataatgtgagagaaaactcaattaaacatggattggtgcatctccaaaagacacttctttctaaaacaattggagagagtagtattaagttaggaagtgttcacgaaggaattccaataataaagcataggttcctcctaaagaaggttcttttggttgttgatgatgttgacgatctagatcagttgcaggcaattgttggagggaccgattggtttggttctgccagcagagtcatcattaccactcgagacaaacatttactaacatgccatggggttacaagcacatatgaggttgatgggttaaataaggaagaggctcttaaattgcttagtgggactgctttcaaaattgacaaagttg

SEQ ID NO: 14427 - DNA, 1077 bp, Glycine max; identical to SEQ ID NO: 14426
  Gm_smallRNAprecursor_7260

SEQ ID NO: 14428 - DNA, 1080 bp, Glycine max
  Gm_smallRNAprecursor_7261
gcagcgccatggcggccgccataaccatggcggtcgtggcggttatggccccacacgcgcacccagccgcgtccctcccgcaccccacacgtgcacccagccgcgacacccgcagccgcacgcgcacgcagccgcgacgacctccggcagcgacgcaccagcacaaacggcggcgacaagctccggcagcgacgcacctgtcacaaacggcggcctgcagcaagaagttctcgcggagaagacgaagctgtcgcaaagggttttagttttatttttgctgtttgacaccccctgttttctgtctgcagctttttttttccttttgctatttgacacccctttttacttttaacagtcccattttttttttcgtatttgacaccacaatttttttttttctgttcagtcctcttttaaatggctgagtttatttgaactctttaatgagtttatttggtgttggtacttgattattgtatgaactcatgaaacttttttagtttatttgaatgcaatcctttgtttttttcaatttcaatgagtttatatatatgtttttttttttttttggtccgccatgacatccgccattttccgctacgccatccgccatatttttatggcggattttttactttccgccatgaaccgccatccgccattaacaacattgatgtactatcacaaggaaaggtgaaactttgcttattcaatttataatgaacatgtatatgttgtcaagacaagcttaaagaggggaaaaaatacatatcacttttcccagatgtttaccaaagaaaagacacagtcctggaaattgatagatcaatgccagagtaaaaacattattgcactacctaaacgtatccttggttgaaatgttaaaaactagtgtccagatcagactaaatagcatgttccaagataccatgcataatatcagatcagacgatcatgttggaaggacaagtgacattggtaacttccacccatgcccattaaagccatgcagcaaatttctaataggttttgtgtgctgtgctgtgcagtgcagtgcagcagacaagtgccatattagat

SEQ ID NO: 14429 - DNA, 1086 bp, Glycine max
  Gm_smallRNAprecursor_7262
tcaacagaacaaggtgacaatcaacctgttgacgtccaaccaccttcgaccgatattgacggcactgaagtagaggctactccttctattgctgagatgggcaaccctgtcgatcaaccggactcaccacaagaacaacctgccgtcgaggtatcatcctcttaatgtgttttaaatcatagcttatacgaaactatttgttaacctttttccatgataattcgaatcaggtacaacaaaatgtttctgtagaagaaataccctcacatgctcgaacatctcccgctcctgagacggatgcagtgaatgttgaggaacagggtgaaggtcaaggcattggatccagcagtcctcatggatcgagtcagaaaagttcatccgaagaaaacttttccgatgaagaggccataaaagaggctgaagctggaggttcggacatttacccggcgtcttcaacatctaagctttccgctagcatagggatcgcagaagatacattcattcaaatgcaagacgaagaccctgctgcagcccttcgactcctgctaaacacaagtcaagccaacacctcaagtgaaaagattcctggtgcttcgtcctcatctgatgccgaaataaactcttcagtacgccaagattctctgctcttgaagttatccatggaatacgcacgggaagatgtgcttaaatccattgaagagaacccctctgctgcctttgggcacctgaactttttgaagaaattgcacaacccccttacctctgatgagattctaggcaaagttatccaaatcgaggccatcattgaccaatttgcaagtactgtgcagaaaaaacgcgaaaatggcgccagactggatgcccagaaacaggcacatatccttctgctcgagaaagcccgagctgctcaacatgaagtcgaacgtctcaccaaagaggcgaaagaaggatcttctgagatcaaagcctgtgatgataacatctcctcctgggaggcaactattacgaatttgttgtctcaggtcgatgatctaaggcagaaaattgtagcagagcaggccaaacgcaaagaactccaggagaagg

SEQ ID NO: 14430 - DNA, 1137 bp, Glycine max
  Gm_smallRNAprecursor_7263
acgtttctgaggggttagctcctctaactcataagcaccattcgaatagatctgaattattttaaacggtccttcccaatttggggaccatttgcccaaggctcgatccttactatctatgggcaggataaccttccaaactaaatctccaacattaaaagtttttgacttcactttcttattataagctttagcaactctttctttttgtttagtcaaaacttctaatgctcttaatctctcctcatctaaatcaactaactcatctgacatcattttccaataatggtcgattggaatgtccatttgtttttgtaccctggctgattgcaaatgtatttcgaccggaagtacagcatcatgcccataagtcagtcgaaatggggtagtattagttgattccttaggagaatttctacatgcccatagaacttgatctaacgttttattccaatttcttggctttagggcaatgtgttttttgatcaagttaattacaatcttattggctgcttcgacctgaccatttgcttgcgcgtaatatggtgttgaggttaataatcgaaagccagttttttgggcaaattcttgcattttccgtccagtaaaaactgaaccttgatcagtggtaattgtttcaggaataccatacctataattaatatgattttgaatgaaactaattactgcttcctgatcaacatttggcaaagggactgcttcgatccattttgtaaagtaatcgataccaactataatataacgctggttcttagaagaagcgggcttgatttcaccaattaagtccaaagcccatcctctgaaaggccaaggtttgattatggagtgtaactcactagcaggtacatgctgtatccctgcatgcttttggcattcctgacagcctttagcaaattctatgcagtcttttaacatcgaaggccaatacaaaccttgtcgaaataaaagccatttcattttatggcctgcttgatgtgatccacaagccccactgtgaacatgggaaactgctaagtatgcttctgattcacttagacattttaacaacactccttctgcagtctttttaaacaaatcatttcccataaccacgtaatttaaagccctatatttgac

SEQ ID NO: 14431 - DNA, 1110 bp, Glycine max
  Gm_smallRNAprecursor_7264
tgatcaacatttggcaaagggactgcttcgatccattttgtaaagtaatcgataccaactataatataacgctggttcttagaagaagcgggcttgatttcaccaattaagtccaaagcccatcctctgaaaggccaaggtttgattatggagtgtaactcactagcaggtacatgctgtatccctgcatgcttttggcattcctgacagcctttagcaaattctatgcagtcttttaacatcgaaggccaatacaaaccttgtcgaaataaaagccatttcattttatggcctgcttgatgtgatccacaagccccactgtgaacatgggaaactgctaagtatgcttctgattcacttagacattttaacaacactccttctgcagtctttttaaacaaatcatttcccataaccacgtaatttaaagccctatatttgacctttcgagccacattgcctattggattttccaaatattcaacaatggactttctccaatcattatctaacatattgtcaatggccaaaatttgaatttttccctggagatcatccatgctttcatcttcattattttgtggtatacttgcccccacaagttttggcattggcaatttagtgcttaatggctctggtaataccagtttatcttttattttgatcaactgagttaatttttccttcgacattttataccctgaagctatttgggctaaatcatttgcttcttggttttcttgtcgagatatatgctcaatgttaatgtaatcaaaatgattcagaagagaactcgccataacaaaatattttgctaagtgctcattaacacatttgtattcttgtgtcaattgcttcaacactaattctgaatcaccccttatgtttacatttcttgcccccagactaattaaaatttcaaggcctgtaattagagcttcatactcagcctcattattagaacaaagtcctttgattttaaatttgaatttagttggaactttattgggggatattattaaaattccaattccagttccatgtttgtgtttcgaaccatcgaaatacaaaatccaaggctctgtatcgacatagtcttgcggcatttcg

SEQ ID NO: 14432 - DNA, 1083 bp, Glycine max
  Gm_smallRNAprecursor_7265
caaagggactgcttcgatccattttgtaaagtaatcgataccaactataatataacgctggttcttagaagaagcgggcttgatttcaccaattaagtccaaagcccatcctctgaaaggccaaggtttgattatggagtgtaactcactagcaggtacatgctgtatccctgcatgcttttggcattcctgacagcctttagcaaattctatgcagtcttttaacatcgaaggccaatacaaaccttgtcgaaataaaagccatttcattttatggcctgcttgatgtgatccacaagccccactgtgaacatgggaaactgctaagtatgcttctgattcacttagacattttaacaacactccttctgcagtctttttaaacaaatcatttcccataaccacgtaatttaaagccctatatttgacctttcgagccacattgcctattggattttccaaatattcaacaatggactttctccaatcattatctaacatattgtcaatggccaaaatttgaatttttccctggagatcatccatgctttcatcttcattattttgtggtatacttgcccccacaagttttggcattggcaatttagtgcttaatggctctggtaataccagtttatcttttattttgatcaactgagttaatttttccttcgacattttataccctgaagctatttgggctaaatcatttgcttcttggttttcttgtcgagatatatgctcaatgttaatgtaatcaaaatgattcagaagagaactcgccataacaaaatattttgctaagtgctcattaacacatttgtattcttgtgtcaattgcttcaacactaattctgaatcaccccttatgtttacatttcttgcccccagactaattaaaatttcaaggcctgtaattagagcttcatactcagcctcattattagaacaaagtcctttgattttaaatttgaatttagttggaactttattgggggatattattaaaattccaattccagttccatgtttgtgtttcgaaccatcgaaatacaaaatccaaggctctgtatcgacatagtc

SEQ ID NO: 14433 - DNA, 1176 bp, Glycine max
  Gm_smallRNAprecursor_7266
tgccacaatttgacccttaacagatttcaaaggcttgtacgttaaagaatattctgttaatgctaaagcccattttccaattctactgtgtagaataggttttgacaacatgtgcttaataatatcataatgagaatatacataaacatcaacaggctttatatattgcttaagttttgcacaagagaaatacaaacaaagacaaagtttttctatggcagtatatctagtttctgcatcatttagtacacgactaagataataaattgcatgctctacgccatcatcatcttcctgagccaacatgctaccaatggtcttgtcagatgcagcaatatacaacttcatagtcttgtttcgactaggaggcattaacacaggaggcttgatcagatattctttaatttcatcgaaagccttttgatgctcttcattccatttgaatggttcatctttcttgagtcgaagtaatggcgaaaaaatttgagctttgccacttagattcgaaatgaatcgcctcaagaagttgatttttcctagcaaagactgaagctgttttttggtcgaaggaggcttcgtctcaagaatagcctttgtcttattttgatttatctcaatgccttttttatgcaccacaaaaccaaggaaatctcctgcacgcacacaaaaagcacactttaatggattcatttttaatccatgtttcctcattcgttcgaaagattgcctaagataatccaaatggctatcttctgaggaggatttgatgattatatcatcaatataaatttgcataaatgtgtcaataaaatcatgaaacatggaattcatggccctttgataagtggccccagcatttttcaacccaaagggcataaccacccattcataagtgcctaaagcaccagggcatcgaaatgctgtttttgacacatcactttcagcaataaatatttggttataaccagaataaccatctaacatgcttaaaaattcgaagccagctgccgaatctaccaacatttccgctactggcatagcatattcatctttaggtgtagcattatttaaatccctaaaatctatgcatactctaagagttccattctttttaatgacagggactatatttgctaaccattcgacatacctggcagatctgatgaatttacacct

SEQ ID NO: 14434 - DNA, 1157 bp, Glycine max
  Gm_smallRNAprecursor_7267
caattctactgtgtagaataggttttgacaacatgtgcttaataatatcataatgagaatatacataaacatcaacaggctttatatattgcttaagttttgcacaagagaaatacaaacaaagacaaagtttttctatggcagtatatctagtttctgcatcatttagtacacgactaagataataaattgcatgctctacgccatcatcatcttcctgagccaacatgctaccaatggtcttgtcagatgcagcaatatacaacttcatagtcttgtttcgactaggaggcattaacacaggaggcttgatcagatattctttaatttcatcgaaagccttttgatgctcttcattccatttgaatggttcatctttcttgagtcgaagtaatggcgaaaaaatttgagctttgccacttagattcgaaatgaatcgcctcaagaagttgatttttcctagcaaagactgaagctgttttttggtcgaaggaggcttcgtctcaagaatagcctttgtcttattttgatttatctcaatgccttttttatgcaccacaaaaccaaggaaatctcctgcacgcacacaaaaagcacactttaatggattcatttttaatccatgtttcctcattcgttcgaaagattgcctaagataatccaaatggctatcttctgaggaggatttgatgattatatcatcaatataaatttgcataaatgtgtcaataaaatcatgaaacatggaattcatggccctttgataagtggccccagcatttttcaacccaaagggcataaccacccattcataagtgcctaaagcaccagggcatcgaaatgctgtttttgacacatcactttcagcaataaatatttggttataaccagaataaccatctaacatgcttaaaaattcgaagccagctgccgaatctaccaacatttccgctactggcatagcatattcatctttaggtgtagcattatttaaatccctaaaatctatgcatactctaagagttccattctttttaatgacagggactatatttgctaaccattcgacatacctggcagatctgatgaatttacacctcagcagcctttcgatctcttctttaattttggacatgatttctggtgcgaatcttctt

SEQ ID NO: 14435 - DNA, 1039 bp, Glycine max
  Gm_smallRNAprecursor_7268
atttctggtgcgaatcttcttggtagttgttttactggtctttttccctccttaatcggtaatttcatttcgaccatttctctgcttaacccaggcatttcgtggtaatcccaagcaaaacagtctttaaattctctaagaagaggcaccagcttttcttttagacttgaggtgatattggcactgatataggttggcctttttatcgagccatttccaatgtcgatctcctccaaaggatcttgagcctgcatctttggcacctcacttatgggatttttctcaaaacccagcggctcatcgtcataaatgcaatccagtcttcgatcctttgtttctttgttttcatgatcttcgatcttggcttcaactgccatattttgttgggattcagcctcaaaggccgtatttagtctattttcggccatataagccgtaattctggcccatgcagtggcctcagtcatattaatcttcatatatattccacccagttggtggaatgactccatcttcagagggaacagcatcaatttcctccctctcccatataaacccataggtaggatggagtttgacagagtggataacattgtcacttgattcgaaaacagcctccttgtcaccacaaggtgctatgttagccaactttttgtcaaaggtttgtgcagtaacattatcaacctctgacttatagaagctttgatctgcctctatattttcaacaatcccatcttccctccagataatgagtttctggtggagggtagatggcacagccccaactccatgaatccattcccttcctaatagcaagttaaaattagccttagactgtatcaccaggaatagagttggtcgaactatactgcctacagcaacatctacttgaatggctcccaaagaatagccagttttaccctcataattcgaaagcacaatgttatgggcagatagatcagtgtcatgtttcccgatcttgtggagcatagatcgaggcattaagttaacagccgctcctccatctatgagcactttg

SEQ ID NO: 14436 - DNA, 1081 bp, Glycine max
  Gm_smallRNAprecursor_7269
cacagcttgcgttcagaacacctagccgtccctccaacagcttccattccctcccgaacctgcctgcgtccctcccgaaccccgccgctcccagccgccgccgcgacaccaccccctccccgccgcacccagccgccgccgcgacgaggcccgcaacgcacgaacggcgccgacgagccccggcaacgcgcgacaccccccatttttctgtctcgcgtttgaagaagacgaagaagaggaaggaagaagacgcgggtcagctgatctgtttcttttttttttttttgggctttttgctgtttgacaccccccatttttctgtctacagttttttttttccttttgctatttgacaccccccatttttctgtctacaactttttttttccttttgctatttgacaccccccatttttctgtctacaacttttttgaactctttaatgagtttatttggtgttggtacttgattattgtatgaactcatgaaacttttttagtttatttgaatgcaatcctttgtttttttcaatttcaatgagtttatatatatgtttttttttttttttgtgtccgccatgacatccgccattttccgctacgccatccgccatatttttatggcggatttttgactttccgccatgaaccgccatccgccattaacaacattgttactttaatgaaatggtgctgtatttcttataattatggtcttctgtttttccttcgttattaattgctatattttttggttactttgcttaatattgtcaggcacctgcagcacctgctgtaaaaactactgaaaaggctcccaaaaaatcttctgataaagccactgaaaagaagggtaagacagtagaaccaataaaggaagaaccattagatcctgtggctgaaaaacttcgccaacaaaggtatattgttttccacccaatttggtcatcttgatgttccttttataatgttctgttatgggtataattatcacattttattaaactctatacctgacaatgtgtaggtttgccatatatgctggttaggaaaatatgattatgatgagctagggaagatt

SEQ ID NO: 14437 - DNA, 1032 bp, Glycine max
  Gm_smallRNAprecursor_7270
ccctttcttcagttcagtgtgtcctcgaactcaaaactttcgcactttctcatcatctttttattttgtagtaaaggaaaaacgatgggaccaggctgcaataaacagtgaaggtcgcttttccttttggcccatgcattcaccactcactctcactgcctttcccttcattcatttcacaccctcactcttctgtctcaacaattccaacataccagcctctgtacccgcatgactcagaaaattactaaactgccattgtaccttttttttcctgtgagactttacttagaattcaaatcttgattaatagttatatgaaattgtccttccttctgctagacccaatttcattagttatactatcggcaaaattgtaaaattggtctcccaccttatctctaattacggatttggttctcctataatttaatttacaaatttggtctctcgattttataaattcctgcaaaattagttttgaaagcccgatttggacgttgaccgttaacctcagacgttgactgccacgtgtgactgtcacatgtcaatgccacgtgtcaacatttgagttgttccctgcaaatgcttcattttttgtaggtaaaattgcacttttggtcccccagttttactccaatttcgattttggtccccctatagtttaattcacacatttagtcccccagttttataaattgtttctgcaaaattggtcttttgaatggtttagccactggtgctagagacatggtaggtcttaataaatctcgcacttcttttttattgcaagttttttactcacttggaacccagagaaaaatcactttttgtctctctcccacttccggggttgttcaacttgggaaagtggtgcatgaatcccaacctgggcctgaaattttcagatctcttactttaacaggttttataataacccccttttttttcttttttttgctcccctgtgtggtattatgtgtatatgactgcttaagtggtttatgtatgacaatggtatttttgtttaaa

SEQ ID NO: 14438 - DNA, 1157 bp, Glycine max
  Gm_smallRNAprecursor_7271
aagaccagtaaaacaactaccaagaagattcgcaccagaagtcatgtccaaaattaaggaagagatcgaaaggctgctgaggtgtaaattcatcagatctgccaggtatgtcgaatggttagcaaatatagtccctgttattaaaaagaatggaactcttagagtatgcatagattttagggatttaaataatgctacacctaaagatgaatatgctatgccagtagcggaaatgttggtagattcggcagctggcttcgaatttttaagcatgttagatggttattctggttataaccaaatttttattgctgaaagtgatgtgtcaaaaacagcgtttcgatgcccaggtgctttaggcacttatgaatgggtggttatgccctttgggttgaaaaatgctggggccacttatcaaagggccatgaattccatgtttcatgattttattgacacatttatgcaagtttatattgatgatataatcatcaaatcctcttcagaagatagccatttggattaccttaggcaatctttcgaacgaatgaggaaacatggattaaaaatgaatccattaaaatgtgctttttgtgtgcgtgcaggagatttccttggttttgtggtgcataaaaaaggcattgagataaatcaaaacaagacaaaggctattcttgagacgaagcatccttcgaccaaaaaacagcttcagtctttgctaggaaaaatcaacttcttgaggcgattcatttcgaatctaagtggcaaagctcaaattttttcgccattacttcgactcaagaaagatgaaccattcagatgggatgaagagcatcaaaaggctttcgatgaaattaaagaatatctgatcaagcctcccgtgttaatgcctcctagtcgaaataagactatgaagttgtatattgctgcgtctgacaagaccattggtagcatgttggctcaggaagatgatgatggcatagaacatgcaatttattatcttagtcgtgtactaaatgatgcagaaactagatatactgccatagaaaaactttgtctttgtctgtatttctcttgtgcaaaacttaagcaatatataaagcctgttgatgtttatgtgttttctcattatgatattattaagcacatgttgtcaaaac

SEQ ID NO: 14439 - DNA, 1114 bp, Glycine max
  Gm_smallRNAprecursor_7272
aatctaagtggcaaagctcaaattttttcgccattacttcgactcaagaaagatgaaccattcagatgggatgaagagcatcaaaaggctttcgatgaaattaaagaatatctgatcaagcctcccgtgttaatgcctcctagtcgaaataagactatgaagttgtatattgctgcgtctgacaagaccattggtagcatgttggctcaggaagatgatgatggcatagaacatgcaatttattatcttagtcgtgtactaaatgatgcagaaactagatatactgccatagaaaaactttgtctttgtctgtatttctcttgtgcaaaacttaagcaatatataaagcctgttgatgtttatgtgttttctcattatgatattattaagcacatgttgtcaaaacctattttacacagtagaattggaaaatgggctttagcattaacagaatattctttaacgtacaagcctttgaaatctgttaagggtcaaattgtggcagattttattgtagatcactcagtgatcgagatgccgcaagactatgtcgatacagagccttggattttgtatttcgatggatcgaaacacaaacatggaactggaattggagttttaataatatcccccaataaagttccaactaagttcaaatataaaatcaaagggctttgttctaataatgaggctgagtatgaagctctaattacaggccttgaaattttaattagcctgggggcaagaaatgttaacataaggggtgattcagaattagtgttgaagcaattaacacaagaatacaaatgtgttaatgaacacttagcaaaatattttgttatggcgagttctcttctgaatcatttcgattacattaacattgagcatatacctcgacaagaaaaccaagaagcaaatgatttagctcaaatagcttcagggtacaaaatgtcgaaggaaaaattaactcagttgatcgaaataaaagataaactggtgataccagagccattaagtactaaaccctaaacccatcattaattccgactccccagcatgacacgtgtcccactctgcctaaaaaggtggaattaatgatgggtagtgggagatc

SEQ ID NO: 14440 - DNA, 1064 bp, Glycine max
  Gm_smallRNAprecursor_7273
ggtttagggattggccgacaaagtttggaattaacaactggctcaggcttgattaggccataggtctccccaaagtgtcacactccttgcgaggccatcatgctctccaggcacaaaatggttgttggctataacctttattgctttcaagtgtttctttctccccctctcaacaggaacttgtacactacagtgcgtttcgctgtcaagaaaagagatggttcaattggcaaaaggtgaacataattaactagctaaagtgtcttattagggcatcagagatgaaattaagagagttaatcacggtaggtgtaagtggggtcacggggtaatgtacaggcaaggtgtaacatctaaatcaaaacggatacacattcaataattctaatttagatgggttgaaaggggtttagctttagaagcccccttatctttcttttttgaaaaacatgtgttagcccatattttcgatgagctaaaatatgctctaagtatgcattagatgtcgtctcgagtttcgaagcatattacagagccagagtctggtcaggacctgctcgaatcgaaaagagaggagagtctttaagaaggaattcccaggttcagagaagtatttacgaagtacaaagccaagacaagaaagaggacttcgagctattgggcaattcgaactggtgtatggacgagtcgaagtcgaggcagcaagagttctggacttagcataatttctgaacgaatcttcaccaaatcagttcgatctcgagtaatgtggataaccgttctggggagcggttatgcaaggtgtacgtagcaggacacttggcgttaggatagcgttcgaccgttagggcagtttattttcgaatgtctatatatagcagtttttagttagatttcgaggtcgcaaatcatttctacagaatccttatacactcaaagtatccagcgcagagagaaacgagtacacaaggagaatgtatgtttgtttgtgaaccattttaaatttctctaaactttacatttcgaatgcaatgcaatttacgcttcactttagaattcctgtc

SEQ ID NO: 14441 - DNA, 1040 bp, Glycine max
  Gm_smallRNAprecursor_7274
agttgagaatgttggaatcaacaaagtgctcattgatggaggagcggctgtcaacttaatgcctcgatctatgctctacaagatcgggaaacatgacactgatctatctgcccacaacattgtgctttcgaattatgagggtaaaactggctactctttgggagccattcaagtagatgttgcagtaggcagtatagttcgaccaactcttttcctggtgatacagtctaaggctaattttaacttgctattaggaagggagtggattcatggagttggggctgtgccatctacccttcaccagaagctcattatctggagggaggatgggattgttgaaaatatagaggcggatcaaagcttctataagtcagaggtcgataatgttactgcacaaacctttgacaaaaagttggctaacatagcaccttgtggtgacaaggaggctgttgtcgaatcgagtgacaatgttgtccactctgtcaaactccatcctacctatgggtttatatgggagagggaggaaattgatgttgttccctctgaagatggagtcattccaccaactgggtggaatatatatgaagattaatatgactgaggccgctgcatgggccagaattacggcttatatggccgaaaatagactaaatacggccttcgaggctgagtctcaacaaaatatggcagttgaagccaagatcgaagatcatgagaataaagaaacaaaggatcgaagactggattgcatatatgacgatgagccgctgggtttcgagaaaaatcccgtaagtgaggtgccaaagatgcaggctcaagatcctttggaagaggtcgatatgggagatggctcgattaaaaggccaacttatatcagtgccaatatcacctcaagtttaaaagaaaagctggtgcctcttcttaaagagtttaaagactgttttgcttgggattaccacgaaatgcctgggttaagcagagaattggtcgaaatgaagttacctattaaggagggaaaaagaccagtaaaacaactacca

SEQ ID NO: 14442 - DNA, 1157 bp, Glycine max
  Gm_smallRNAprecursor_7275
aagaccagtaaaacaactaccaagaagattcgcaccagaaatcatgtccaagatcaaggaagagatcgaaaggctgctgaggtgtaaattcatcagagctgccaggtatgtcgaatggttagcaaatatagtccctgtcattaaaaagaatggaactcttagagtatgcatagattttagggatttaaataatgctacacctaaagatgaatatgctatgccagtagcggaaatgttggtagattcggcagctggtttcgaatttttaagcatgttagatggttattctggttataaccaaatatttattgctgaaaatgatgtgtcgaaaacagcatttcgatgccctggtgctttaggcacttatgaatgggtggttatgccctttgggttgaaaaatgctggggccacttatcaaagggctatgaattccatgtttcatgattttattgacacatttatgcaaatttatattgatgatataatcatcaaatcctcctcagaagatagccatttggattatcttaggcaatctttcgaacgaatgaggaaacatggattaaaaatgaatccattaaaatgtgctttttgtgtgcgtgcaggagatttccttggttttgtggtgcataaaaaaggcattgagataaatcaaaataagacaaaggctattcttgagacgaagcctccttcgactaaaaaacagcttcagtctttgctaggaaaaatcaacttcttgaggcgattcatttcgaatctaagtggcaaagctcagattttttcgccattacttcgactcaagaaagatgaaccattcaaatggaatgaagagcatcaaaaggctttcgatgaaattaaagaatatctgatcaagcctcctgtgttaatgcctcctagtcgaaacaagtctatgaaattgtatattgctgcgtctgacaagaccattggtagcatgttggctcaggaagatgatgatagcatagaacatgcaatttattatcttagtcgtgtactaaatgatgcagaaactagatatactgccatagaaaaactttgtctttgtctgtatttctcttgtgcaaaacttaagcaatatataaagcctgttgatgtttatgtgtattctcattatgatgttattaagcacatgttgtcaaaac

SEQ ID NO: 14443 - DNA, 1114 bp, Glycine max
  Gm_smallRNAprecursor_7276
aatctaagtggcaaagctcagattttttcgccattacttcgactcaagaaagatgaaccattcaaatggaatgaagagcatcaaaaggctttcgatgaaattaaagaatatctgatcaagcctcctgtgttaatgcctcctagtcgaaacaagtctatgaaattgtatattgctgcgtctgacaagaccattggtagcatgttggctcaggaagatgatgatagcatagaacatgcaatttattatcttagtcgtgtactaaatgatgcagaaactagatatactgccatagaaaaactttgtctttgtctgtatttctcttgtgcaaaacttaagcaatatataaagcctgttgatgtttatgtgtattctcattatgatgttattaagcacatgttgtcaaaaccgattttacacagtagaattgggaaatgggctttagcattaacagaatattctttaacgtacaagcctttgaaatctgttaagggtcaaattgtggcagattttattgtagatcactcagtggtcgaaatgtcgcaagactatgtcgatacagagccatggattttgtatttcgatggttcgaaacacaaacatggaactggaattggagttttaataatatcccccaataaaattccaactaaagtcaagtgtaaaatcaaagggctttgttctaataatgaggctgagtatgaagctctaattagaggccttgaaattttaattagcctgggggcaagaaatgttaatataaggggtgattcagaattagtgttgaggcaattaacacaagaatacaaatgtgttaatgaacacttagtaaaatattttgttatagcaagttctcttctgaatcatttcgattatattaacattgagcatgtacctcgacaagaaaaccgagaagcaaatgatttagcccaaatagcttcagggtacaaaatgtcgaaggaaaagttaactcagttgatcgaaataaaagataaattggtgttaccagagccattaagcactaaattgccaatgccaaaacttgtgggggcaagtataccacaaaataatgaagatgaaagtatgaatgatcttcagggaaaaattcaaattttgg

SEQ ID NO: 14444 - DNA, 1110 bp, Glycine max
  Gm_smallRNAprecursor_7277
tattgtagatcactcagtggtcgaaatgtcgcaagactatgtcgatacagagccatggattttgtatttcgatggttcgaaacacaaacatggaactggaattggagttttaataatatcccccaataaaattccaactaaagtcaagtgtaaaatcaaagggctttgttctaataatgaggctgagtatgaagctctaattagaggccttgaaattttaattagcctgggggcaagaaatgttaatataaggggtgattcagaattagtgttgaggcaattaacacaagaatacaaatgtgttaatgaacacttagtaaaatattttgttatagcaagttctcttctgaatcatttcgattatattaacattgagcatgtacctcgacaagaaaaccgagaagcaaatgatttagcccaaatagcttcagggtacaaaatgtcgaaggaaaagttaactcagttgatcgaaataaaagataaattggtgttaccagagccattaagcactaaattgccaatgccaaaacttgtgggggcaagtataccacaaaataatgaagatgaaagtatgaatgatcttcagggaaaaattcaaattttggccattgacaatatgttagataatgattggagaaagtccattattgaatatttggaaaatccaataggcaatgtggctcgaaagattaaatatagggccttaaattacgtgattatgggaaatgatttgtttaaaaagactgcagaaggagtgttgttaaaatgtctaaatgaatcagaagcatacttagcagtttcccatgttcacagtggggcttgtggatcacatcaagcaggccataaaatgaaatggcttttatttcgacaaggtttgtattggccttcgatgttaaaagactgcatagaatttgctaaaggctgtcaggaatgccaaaagcatgcagggatacagcatgtacctgctagtgagttacactccataatcaaaccttggcctttcagaggatgggctttggatttaattggcgaaatcaagcctgcttcttctaagaaccagcgttatattatagttggtatcgattactttacaaaatggatcgaagcagt

SEQ ID NO: 14445 - DNA, 1082 bp, Glycine max
  Gm_smallRNAprecursor_7278
cagtggtcgaaatgtcgcaagactatgtcgatacagagccatggattttgtatttcgatggttcgaaacacaaacatggaactggaattggagttttaataatatcccccaataaaattccaactaaagtcaagtgtaaaatcaaagggctttgttctaataatgaggctgagtatgaagctctaattagaggccttgaaattttaattagcctgggggcaagaaatgttaatataaggggtgattcagaattagtgttgaggcaattaacacaagaatacaaatgtgttaatgaacacttagtaaaatattttgttatagcaagttctcttctgaatcatttcgattatattaacattgagcatgtacctcgacaagaaaaccgagaagcaaatgatttagcccaaatagcttcagggtacaaaatgtcgaaggaaaagttaactcagttgatcgaaataaaagataaattggtgttaccagagccattaagcactaaattgccaatgccaaaacttgtgggggcaagtataccacaaaataatgaagatgaaagtatgaatgatcttcagggaaaaattcaaattttggccattgacaatatgttagataatgattggagaaagtccattattgaatatttggaaaatccaataggcaatgtggctcgaaagattaaatatagggccttaaattacgtgattatgggaaatgatttgtttaaaaagactgcagaaggagtgttgttaaaatgtctaaatgaatcagaagcatacttagcagtttcccatgttcacagtggggcttgtggatcacatcaagcaggccataaaatgaaatggcttttatttcgacaaggtttgtattggccttcgatgttaaaagactgcatagaatttgctaaaggctgtcaggaatgccaaaagcatgcagggatacagcatgtacctgctagtgagttacactccataatcaaaccttggcctttcagaggatgggctttggatttaattggcgaaatcaagcctgcttcttctaagaaccagcgttatattatagttggtatcgattactttacaaaa

SEQ ID NO: 14446 - DNA, 1086 bp, Glycine max
  Gm_smallRNAprecursor_7279
gcttctgaatcgaatcagcagccttctcctggagttctttgcgtttggcctgctctgttacaattttctgccttagatcatcgacctgagacagcaaatttgtaatagttgcctcccaggaggagatgttatcatcacaggctttgatctcagaagatccttctttcgcctctttggtgagacgctcgacttcacgttgggccgctcgggctttctcgagcagaaggatatgtgcttgtttctgggcatcgagtctggcgccattttcgcgttttttctgcacagtatttgcaaattgatcgataatggactcgatttgtataactttgcccagaatctcatcagaagtaagggggttatgcaatttcttcaaaaagttcaggtgcccaaaagcagcagaagggttctcttcaatggatttaagtacgtctgcccgtgcgtattccattgataacttcaaaagcaggcaatcttggcgtactgtagaggttatatcagcatcagatgaggacgaagcaccaggattattttcacttgaggtgttggcttgactggtgctcagcaggagtcgaagggctgcagcagggtcttcgtcttgcatttgaatgaatgtatcctctgcgatccctatgctagcggaaagcttagatgtcgaagacgctgggaaaatgtctgaacctccagcttcagcctcttgtatggcctcttcatcggaaaaatgttcttcagatgaacttctctgactcgatccctgaggactgctgggtccaataccttgaccttcaccctgttcctcaacattcactgcatccgtctcaggagcaggagagattcgagcacatgagggtatttcttctacagaaacattttgttgtacctgattcgaattgtcatggaaaaggttaacaaatagtttcgtattagctatgattaaaatcatattaagaatgatacctcgacggtagggtgttcttgtgataagtccggttgttcgacaaggttgcccatctcagcaatagagggagtagtttctgtttcagcgccaccaacatcagtcgaaggtggttggatgtcaacaggttgatt

SEQ ID NO: 14447 - DNA, 1064 bp, Glycine max
  Gm_smallRNAprecursor_7280
tgcggtgaggttgatgatgaaaggagtagcaagttgttatctgaaagaaaggaagcttcgccggagataatggatataaagcaaagaagaagaagggtttcgggagccaggaagaagaaagggtttttgaaacaagaagctgaaggggttttctggggttctctgtactatttatgggatttcacttttaaaaaggggaaaaaacaatataataagaatcaagggtcagaaatcaatcacatcagatttcccttttaactccccagcgtgacacgtgtcccactctgcctagaaaggtgggattaatgatgggtagtgggagatcgaggcgacggttacattaaacgtgccatcgtgtcgccattccagggaaagctggtagaagaagaaaaatgtcaacttctcatcttccttcgatctcgaatcgaagcggacattttttgggggcaatttgttagcccatattttcgatgagctaaaatatgctctaagtatgcattagatgtcgtctcgagtttcgaagcatattacagagccagagtctggtcaggacctgctcgaatcgaaaagagaggagagtctttaagaaggaattcccaggttcagagaagtatttacgaagtataaagccaagacaagaaagaggacttcgagctattgggcaattcgaactggtgtatggacgagtcgaagtcgaggcagcaagagttctggacttagcataatttctgaacgaatcttcaccaaatcagttcgatctcgagtaatgtggataaccgttctggggagcggttatgcaaggtgtacgtagcaggacacttggcgttaggataacgttcgaccgttagggcagtttattttcgaatgtctatatatagcagtttttagttagatttcgaggtcgcaaatcatttctacagaatccttatacactcaaagtatccagcgcagagagaaacgagtacacaaggagaatgtatgtttgtttgtgaaccattttaaatttctctaaactttacatttcgaatgcaatgcaatttacgcttcactttagaattcctgtc

SEQ ID NO: 14448 - DNA, 1050 bp, Glycine max
  Gm_smallRNAprecursor_7281
ttaactttttttttaataaaaaagaagaggagtgagagagaaaaatgagtatatgacattccaagtatgttggcacccatcaacaaacttacaagttgaaataatctcgcacccatctacaaactaagtggtataactgtgttagtgtaataagtacttatttatgcatgtatttacttacttattcaatcattcttctcacgacaatctattttcttgcataggtacaaataacgggcgttagttttcaagtcctccctatttaaaaatgtaagtgagtaagcccgtatatcaaatatgcctcgaagcctttgaatctgggccttctgaagcaggccttgtcttctacatttgccagactatttttcttattattagtttagcaaaattatatttttggtcctctattttattagtcttccaataatttaatttacgaattgtgtcttcttattttgtaaaatcgtgcaatgttggtcccccaggtcacaattgggcgttgaccgttagcaagtgatgttgattaccatgtgtcatgttcttattgaatgatgactgtcacgtgtcatgttctgattggacgtcaactccatgaaagatgaaatgtattgttgttttcattgaccaatcagaacatgacacgtgacagtcaacatcacttgtcacgtgtcatgttctgattggacatcaactccaacattgcacgattttacaaaataggataactcaatttgtgaattaaattactaggggaccaaatccgaaactaaagataaactaggagatcaaaaatgcaattttgcgtattagttttaagaaagttttttatttgtaccttcttttttctctcgctacatccttattttttttatttttaatatttaataaattagtttgcaaaaaaaataatataattctaatttcttaaatataaaaaaatgtttaaagagaaaaaaggaggttgcaaatagaattaccggccttatatttaatcctactgttatagaaaagaattaattttttattttttgaacttgcagtgaggttgac

SEQ ID NO: 14449 - DNA, 1049 bp, Glycine max
  Gm_smallRNAprecursor_7282
agatcaattgaataaattacaatgatttaataataaatatcaattgagaatcaagattataaaagattttggcaccaagttgatccacacagattctcaaacactgaatcacccacccacctctcttggttgagcttccctaagctaatacaaccaacataaacaaaattcactttatattcattttaaaataatttgtaacatttttttattttaaaaatattttataattatatattcttaaactctttaccttttctttaataaattattactacatttataacaaatatgattaactttaagagtaacagatttaacgatattctttatttgggccagaaaataatactcaacacaacaattagtccaaattgtcgaggtccaaatttcacaaaccaaaagactgatgctaggtgcacccatcacttaaggaaaaaagactgaaatacccctaatctgtaaaccttttaagttgatccgtaaaaggcttactgatcaagttgatctgtaagccttttacagatcaacttatccgtatgcttaatatcaacatacggatcaacttgatccgtatcaaccctatagatcaacttgatccgtatcaaccttacggatcaatttgatccgtacgatttacggatcaccctcacgcacacccagaacaaatacgaagaaagcgcagagacactttagacattttaaaaaaatgctggatgcacctagcatcagcccaaccaaaacacgcaacaatgggtccacaaaaattagcccacaagtcgggggagtcgaaatgatttttaagtaaaaaatggcctcagtctctaaacttgaaatgccaaacaccattagtgcaaaagacctttatgcccacagcccagcttacactcagtaggtgggctccataaaggtacaccaactccacctgaattttcacaaacatttaattattttttgaaaaatgcgatcccacacgttaggcaaccaatatatctgacactctacaaaaatttccccccaccgcaagacctatcacactctccaattct

SEQ ID NO: 14450 - DNA, 1200 bp, Glycine max
  Gm_smallRNAprecursor_7283
tgggaacttgagtgcttacaggcctttgttgcttcttgaaccttgagaaagctagataggtaggcacacacacaagatggagcctgctaggaattcaagagcctcactcatatatatatatataacatggttggaagaagcaacctaattaagttctatctcccaatatatatatcattcctttatttagtatttatatataacctttcttctcttatattcattcctattctttagtgagacaaatatttaaagcactcaattagctaggtgtttggaggttagatttcttgtgaggcttatttgcttttttaacttgttgaatttgaatcatcttgtgaaaaacagactcgatcgttattgaagaaggaaagtagggtgtttggaatgaagtttgatccgaaatcattgtctcagtttcattcatttaattttaactttgcttgttgtcagagagagagagatttgtcatgatctgagaaggaaagggggtgtgtggaatgaggtttgatccaagatcatcacatcatatatatatatatatatatatatatatatatatatatatatatatatatatatatatatatatatatatatatcttcttcaatttccctttccttcttgatttaattacttaccttcatacatatactgttattattatcatctcttaattcatgcattggatgggactgatctcggaccaggcttcattcctcacacctagctttccttgtagaagcaatcaaccacaacaagacaaaggtaatccttttttcccctccgatccaaaatcacatatgtgtctatctatcagatctaaatagataaattcctgctttctatgtccttttatgttctacctagccaaaaagaatttatccagatattgtgacattcagtttattttcatttattattattattgctctttgaatgaggatggagtacttaaatttaatgtattttcaatatttaatcttatgtatttgtaaggagcttgcaacaacaaaagaaagaacgaatacttatgcatttatgacaccgaacattagatcagctagaatgggatttgttctagctaaatctggtcaagttaatttgagtataataaatccagtttcgttaagagttgatgatttggaaaatgttgttattttttgtcgtctcgcatatttgaactggaagagagtgat

SEQ ID NO: 14451 - DNA, 1042 bp, Glycine max
  Gm_smallRNAprecursor_7284
cttctccctatgcaatctaatgcatgttcatttgaatttacattttttactgaagttataattactaccttggaaaccacgtcaattatacttgcaaacatagaagttataattactagcttctcagtaaacatgaaaaaccacatttaggatgagaatccaaacattctcttagtttagttcaccttaatccatcttcataattaagaaaagaaacaaaaaattattatgttgaaatcaatccacgtttattgacccaaacagaattggacttttgccagaaaggaataatatcaagggtgttgctaggtgcacccaacatttttaaaaaataccaaaactgtccttgcatttttttcgcatttatgatagatgtgtatgagggtgattcgtaaatcgtacggatcaacttgatccgtaaggttgatacggatcaagttgatccgtatgttgatattaagcatacagatcaacttaatccgtaaaaggcttacagatcaagttgattcgtaaggcttctaccgatcaagttgatccataaaaggcttacggatcaagttgatccgtaaaccttttacgaatcaacttaaaagacttacggatcaagagtattttcatcatttcatcttaaatgctgggtgcacctagcaacaccctaatatcaatgtgaatcaaatcagtatccaatctagatactagaattctacattcttttttctaagcggataccaatttatgggccaaacataacccattaatttaaaaccaacattttcacatctgattttgcacggaacatgtttaattataagttgaaaggttgagttcagaaacagaagagagaatgaagaagaaagtatataaagtaagaaaaaaaaaaggttcttaatgcagtagcatggcgtttaacaattgaccagaagaaccaaatctactatccctcttcatgctttcttctgtttaacttctggtggtgatggtggtggaaagacagcgcggaacagccaagcagccaatattgctccggcgaaggggcaaatcc

SEQ ID NO: 14452 - DNA, 1102 bp, Glycine max
  Gm_smallRNAprecursor_7285
caatgattttttccctatgttatttaaagaaaaataaaaaaatatcatattaacaaaattttaagaatactaattaaagataattactataaaaaagaaaactaattaaggaaaatgaaatatattctatttatcatttttattttttattttaaaaatcaattaataaattttcatttttaaggagtgtttgtttcacgaaatcttatagtatttctaggaatgttatttccaaaaatattatatgaaaatgacattcatgggtatttcaagaaaaataattttatttaactattaaaattggttgagaatctttttatatttccaggaatatttaaagaatatgtttggttcacgatatgttttcataaaaatatgttatattactaaaatctaaaatgtcattttatatattaaagaacttattatatacaacttgaattatcggctctgataccaattgttggtcagattcgaggggtacacctgtggaccatgagtcaccacataaggagacctgacaccacactttaacccaaaaccttaaggctcaggtttatgggtcttctcctcacttatatggtatggtgctcaacctcttcacttctactcgatgtgggacttcacctcacacatgtaacccaacacttacacgaaaagatatgatgagactagacacttgtagtttgcaaataacaataaagaatcttacaattttttctaataaattccttaactacatcttactattaaaaaaacgtaacaccaaaatattttcttcactcttgtaaagaactagcaacacaaaagacttgtacaacaaaattttaataggataggaaacataccgagaagacttataggaaaagatgcaagatgaaatttgtattaattaaaaacaatctaaaataagagttctagataatgaaataataagtattggtattgagggtgtaatagaaattttacatgattaatatgattctcaccacataaaaatccatattttcattcatgagaatcatttcaatataaaatcaagttaaacatgaacttctcattttcccgtgaataaaagataccccaagaatatttttaaatt

SEQ ID NO: 14453 - DNA, 1182 bp, Glycine max
  Gm_smallRNAprecursor_7286
accacaaaaaaacagataaagtttctagcttttagcctcggatgcagctggggctatcgccaaccctcagaccaattaaaccgccaaggaaactccctctccatcaaagccattcataatgaaaaaaccccaattccctttatttatttatttttattttttacctttttaagttacctatcaattaaaagcaaattgatcaaatgggttccttttagaaatttatttccaaaagggatctctttccaaactttttcgggaggggattagtttttgaagggattttgccagtggagttggcgagtttgacatgtgtcagtggagttggcgaattggacacgtgacagcagctggagaactcgccaagtggagatggcgagacacggtccacgtagcgggttccccattcataatagtaaaatgtttttttttttacaagaaaatttttttaacttgaaacaggtataacttttgatagaaatgtccgtttgaggccaataatatgtcaaaatgctcgaaattgaatgaggaatctcctggaaaattcttgaaagagatttaagattcaaccacccatttttttaatcttaaatcctatttttgagttacttaaagacatgttttgaaaaaatgagttgatgaaatctcctttggacatttcacaagggattccttattcaatttcgagcattttgacatattatgggtctcaaacggacattcatatcaaaagttatactcatttcaaattaaaaaaaaattccgtaaaatcgtcaactccactggcgaaatccttccaaaaattgaccccctcaagaaaaaatgtagaaacagacaccttttgagaataaatttctaaaaggaacccgctttggtcaatttgtcatcaattaaaatatattcataggtgcacggtgtttttctttttttttgtgtgtaattttttttcaaatatatgtttcttgtcctgtgttagaaataatggacgattctaacttattgcttcagacactaattgttcacgatgcatgtagctagttcgacccatttaacttgtgggttaaatgattttatccaaaagctcttaggctttttatttttacatttcaatatcaagaaatattatactaacaaataagggatgcaaagtaaaaaaatataaaatttaagtatttttatatg

SEQ ID NO: 14454 - DNA, 1182 bp, Glycine max; identical to SEQ ID NO: 14453
  Gm_smallRNAprecursor_7287

SEQ ID NO: 14455 - DNA, 1183 bp, Glycine max
  Gm_smallRNAprecursor_7288
accacaaaaaaacagataaagtttctagcttttagcctcggatgcagctggggctatcgccaaccctcagaccaattaaaccgccaaggaaactccctctccatcaaagccattcataatgaaaaaaccccaattccctttatttatttatttttattttttacctttttaagttacctatcaattaaaagcaaattgatcaaatgggttccttttagaaatttatttccaaaagggatctctttccaaactttttcgggaggggattagtttttgaagggattttgccagtggagttggcgagtttgacatgtgtcagtggagttggcgaattggacacgtgacagcagctggagaactcgccaagtggagatggcgagacacggtccacgtagcgggttccccattcataatagtaaaatgtttttttttttacaagaaaatttttttaacttgaaacaggtataacttttgatagaaatgtccgtttgaggccaataatatgtcaaaatgctcgaaattgaatgaggaatctcctggaaaattcttgaaagagatttaagattcaaccacccatttttttaatcttaaatcctatttttgagttacttaaagacatgttttgaaaaaatgagttgatgaaatctcctttggacatttcacaagggattccttattcaatttcgagcattttgacatattatgggtctcaaacggacattcatatcaaaagttatactcatttcaaattaaaaaaaaattccgtaaaatcgtcaactccactggcgaaatccttccaaaaattgaccccctcaagaaaaaatgtagaaacagacaccttttgagaataaatttctaaaaggaacccgctttggtcaatttgtcatcaattaaaatatattcataggtgcacggtgtttttctttttttttgtgtgtaattttttttcaaatatatgtttcttgtcctgtgttagaaataatggacgattctaacttattgcttcagacactaattgttcacgatgcatgtagctagttcgacccatttaacttgtgggttaaatgattttatccaaaagctcttaggctttttatttttacatttcaatatcaagaaatattatactaacaaataagggatgcaaagtaaaaaaatataaaatttaagtatttttatatga

SEQ ID NO: 14456 - DNA, 1183 bp, Glycine max; identical to SEQ ID NO: 14455
  Gm_smallRNAprecursor_7289

SEQ ID NO: 14457 - DNA, 1097 bp, Glycine max
  Gm_smallRNAprecursor_7290
caatttattgagatattatagtaaaatctgccagaaaaaaaaatgaaatgataaatggatgaagattattaatattatcaagtccaaaatgtcacagcctatgtgccttaggacaatcaatctctcaattttagtttggtctctcatctagaaaaacaacaatttgtagtgacaaaaatatccttaataaatggagtacattgacactacattagtcatttcaaaactcaaaataaatggctatttgttgtcataataaataaataaaaacatcaaaatgaacttctaataaaaaatagagtgatactgagcccaatggatagccaatcttcttatgtgtacgaataaaaagtaaataaaaattggcaagtcttaatcaaaattcaaaataatgtacaacaagagagcaactcacctaatttaaatcttccaaacattcttccaagctatcatttcatgaaaaagatcttgaaaaatcttttgtgcattctcaagtcttccacctttgcataatctttaattttcttgaataatgcaattgcttttgaataatgcaattgtttaatcaaaataagatttctacacaaaacatttaataaagaatattgattgagtgacttttaacatatatctcttattaaagagattcataaccttatttattattcttatgatattataactaaacaatacccatccattaaaaaatatctaagaatgataagtaataacattaggtttttcaactatttcagtcaacaaacccacttgttattctaatggattaaggaattgtaagtgatgatatggaaagaaattttcttaccaaccatttcagaaacaaacattatttttgcataagctatcgataattgtgttgtacattatcacaacagttttatcgaacaaccatgcaattttcaccattaagacagagacctttgtcacataaaaaaggcaaatttcatatgacccaggtggcaggaacagctgaccaagatcttgaaaataccaagacctggttcaacaattccaacaatccccttaacatgcatgtgcttgaaaagggtaatagcattaaggtcacgcttcatctt

SEQ ID NO: 14458 - DNA, 1159 bp, Glycine max
  Gm_smallRNAprecursor_7291
aaaaaaatgaaatgataaatggatgaagattattaatattatcaagtccaaaatgtcacagcctatgtgccttaggacaatcaatctctcaattttagtttggtctctcatctagaaaaacaacaatttgtagtgacaaaaatatccttaataaatggagtacattgacactacattagtcatttcaaaactcaaaataaatggctatttgttgtcataataaataaataaaaacatcaaaatgaacttctaataaaaaatagagtgatactgagcccaatggatagccaatcttcttatgtgtacgaataaaaagtaaataaaaattggcaagtcttaatcaaaattcaaaataatgtacaacaagagagcaactcacctaatttaaatcttccaaacattcttccaagctatcatttcatgaaaaagatcttgaaaaatcttttgtgcattctcaagtcttccacctttgcataatctttaattttcttgaataatgcaattgcttttgaataatgcaattgtttaatcaaaataagatttctacacaaaacatttaataaagaatattgattgagtgacttttaacatatatctcttattaaagagattcataaccttatttattattcttatgatattataactaaacaatacccatccattaaaaaatatctaagaatgataagtaataacattaggtttttcaactatttcagtcaacaaacccacttgttattctaatggattaaggaattgtaagtgatgatatggaaagaaattttcttaccaaccatttcagaaacaaacattatttttgcataagctatcgataattgtgttgtacattatcacaacagttttatcgaacaaccatgcaattttcaccattaagacagagacctttgtcacataaaaaaggcaaatttcatatgacccaggtggcaggaacagctgaccaagatcttgaaaataccaagacctggttcaacaattccaacaatccccttaacatgcatgtgcttgaaaagggtaatagcattaaggtcacgcttcatcttcacacgggacccaaaaatcgtgttaaattcgaagatgggtggggctggacgcaaatggaaaacactgtgaatgaaaatggagattgagaattagaaac

SEQ ID NO: 14459 - DNA, 1129 bp, Glycine max
  Gm_smallRNAprecursor_7292
caataatatatactacacaaatttttatagtttcagcttattagtatcttttactttatttattattatattatattatgtttaattattattatttattaatgtaattaagttatatttgaaatactggttgataattatttatcattatgttgcttatttatataatattaaattaagtaaaaccataatagtacaaaaattatatttacttataatattaattagttgacaataataatttataaattttcatcttatacataggttttagttaacgcaatattatattattacatttattttaaatttttaatataaaaaccaacattttaaatagtttattagtaaattaaagctaatttataaaaaaaaaaataataattttcttactaagtcgatgcttacgtcagcagcgacataataatgctggatttcaaagtcggtgcttaagtaaacattgtcgttgaaatcgtctattactacgttggtattgtcataagcacgacgtagaaagcacgggtttcaactacggtactaacctaagcacgacatagaaagaacaagtattgtcatcgtcactcatgtcaacaacgtcttcgaaagcttacgttcaattactgtcgtggctgaccccgtcgcaggattcagtgctttctaaaacggtgtgttgcgaccgtcgtagattggggcgagatctactacgacgtcatatttaaagacgcgcgagcaccatcgttgaacgtcgattaggaccaatgtaaaaggcttttttttagcagtgttttagtgtcattaaaatattagtaatattatcaattataattaactataaaaatattaacaagtaattcataattaatttatcgtaaaataatttataataaaaaaataattaataatttttttaactaattatttttatatacttttttagtaagaatttaaaggtaattaaaattcaaattataggaattaaaaaaattattttcaaattatatagaataaaagagaattaaaatagaaattataaaaataaaaaaatcattaaaaaaattaaaatataaatgataaaaaacagtaaaataatcgaaccaaactctgaacagtctgtgtgaggattgtgaca

SEQ ID NO: 14460 - DNA, 1081 bp, Glycine max
  Gm_smallRNAprecursor_7293
ggtcgcgggtatagagaagctgggagaaatgtgaaagaagttgctagaaaaggagatagggtttatcggaagagggtagcgagcaaaagggctcatcaaggacccactgtccttggtgagggatggtttttccttattccttcaacctagctctagataccatgtaaaattgaagaaaataaagggaaataaagtgaatacttttgttagagtacacaacaaatgtttggttatataggataattacattaattatacataaatagaggatattttgttttctctaaatcaaagatgatattcctataaactgtaattaatactagaatcagaatattaattctgattttcaacaggtgcatctgggacatgactttggtagtttgttaatttgaatgccttttcctttatatctttaaatctatagcaatgttgttaatggcggatggcggttcatggcggaaagtcaaaaatccgccataaaaatatggcggatggcgtagcggaaaatggcggatgtcatggcggacacaaaaaaaaaaaaaaaacatatatataaactcattgaaattgaaaaaaacaaaggattgcattcaaataaactaaaaaagtttcatgagttcatacaataatcaagtaccaacaccaaataaactcattaaagagttcaaaataagaaaatgataaaaacataatgcaaagtgcaaagtgaaggttgaggctctaatcatcttctccaatcccaacataatcatcttcgttgttatcatatggtaatggagcatctccctctccctcttccccatcagacgcctcaaaattgaccatgatttcttcttcttcagattcaacatcaatattctcctcaacatctagatcctcatcattttcttggactgctttttgcttccttgatgaagatccaacaaccattgcctgttttttagaagtttgggcagcagcaacacttgttttttgctttttccgcctagtatacatcctacactctccaacccccgaagcctgatacacagttgcccaatttagagcatcatcatcttcaaataccaaatcatttcca

SEQ ID NO: 14461 - DNA, 1131 bp, Glycine max
  Gm_smallRNAprecursor_7294
atggcggatgtcatggcggacacaaaaaaaaaaaaaaaacatatatataaactcattgaaattgaaaaaaacaaaggattgcattcaaataaactaaaaaagtttcatgagttcatacaataatcaagtaccaacaccaaataaactcattaaagagttcaaaataagaaaatgataaaaacataatgcaaagtgcaaagtgaaggttgaggctctaatcatcttctccaatcccaacataatcatcttcgttgttatcatatggtaatggagcatctccctctccctcttccccatcagacgcctcaaaattgaccatgatttcttcttcttcagattcaacatcaatattctcctcaacatctagatcctcatcattttcttggactgctttttgcttccttgatgaagatccaacaaccattgcctgttttttagaagtttgggcagcagcaacacttgttttttgctttttccgcctagtatacatcctacactctccaacccccgaagcctgatacacagttgcccaatttagagcatcatcatcttcaaataccaaatcatttccagcatcattatcatcatcttgatccatctctcccacgagccattcattgcatacatcaatatcattaagagaaattggatcaatttcatctcatgcattatatctttgcttcaattgttggttgtatttgacaaacaccaaatcatgcaacctcttgtgctcaagcctatttctttttttggaatgaatctacaacataacaaataaatgttgatttcaatctcaaatatactccaaatataacttgatcatcaaaattaaataaaattaaaaagtatagttagagttttgtcacaattacttgctcaaacacactccaatttctttcacatcctgaagcactgcaagtcaaactcaaaatcttaatagccagcttctgcaaatttggagtttgtgacccaaacattcgccaccaatatgctgcaataccaattaccaaccaagagcataacttagaattctgaattctaacactaatacataaaaaaaatagtatgataaaagtttcttactaggagaatgggttttcctttgagccattgcaaagtcggaaccaaagt

SEQ ID NO: 14462 - DNA, 1188 bp, Glycine max
  Gm_smallRNAprecursor_7295
gaagcaatctctgctgcttgaatgcaatttcagagccaatccctcaatagcttttgtcccctaggaagataagagcaaataaataatatatttggaaatctcttttgttagctcactaaaaggtgaaacttaaaagcaaacacttttttcaaaactgtatataaaaaatgtatacttacagtattctttgtcaatacattaagtgaatcctcttgaaaccacaatcgactgcgcttcccaggtttctttgttgaactttcacgaattatctctctatccatgtctcgtattaatggatgcatttcaagtttgttgttctttgcaacttttacgaggctacgctccatgagaactgttattccaatatcagcatgtagtccacagccatttagtatctctgtaacataggctctatctttaccaataaagaaacaacaaatatcaagaaatatatccttttccatgtgatcacctaagccattatagcttatccttaatttctcttgaacttgatcattgggaattatttttagttttgacaatacactttcccactctttcttcctcctctcacttaaataagaaccaatgacttcaagagctagcggtagtcctccacaataagcaactacatttcttgcaagttcatcgaactcttctgttggttttgcttctccaaaagcatgccaactaaaaagctcaagggacttattttcgtccatttcctccattttataaacaaaatcaactttaagtttgtgaagtaggcgtacatctctagttgtaatgattactatacttccttgaccaaaccatttacgatttccgcataggacttttaactggccaaactcaataacatcatcaagtacaatgagtgcctttcttctagaaagtttgctctcaatcatagctcttcctatcccaacgctttgtatgttcacctttgttttaaggacatttgaaagaagttgttcttgcaaatgaagatgccctcttctatctgtttcacaaacttctcgaatatcttcaatgaaacatctacccatgaatctacgatgaattcgattgtagatggctttggctgtggtagttttacccaatcctcccattccccatatccctacgatacaaactttggttgactgattttcaatatatccaatcacttcttgcacatgggattct

SEQ ID NO: 14463 - DNA, 1188 bp, Glycine max
  Gm_smallRNAprecursor_7296
aatctctgctgcttgaatgcaatttcagagccaatccctcaatagcttttgtcccctgggatgataagagcaaagaaataataaatttggaaatctcttttgttagctcactaaaaggtgatacttaaaagcaaacacttttcaagtttcaaaactgtatataaagaatgtatacttacagtattctttgtcaatacattaagtgaatcctcatgaaaccacaatcgactgcgcttcccaggtttctttgttgaactttcacgaattatctctcttcccatgtctcgtagtaatggatgcattccaagtttgttgttctttgcaacttttacgaggctacgctccatgagaactgttattcctatatcagcatgtagtccacagccatttagtatctctgtaacataggctctatctttaccaataaagaaacaacatacatcaagaaatatatccttttccatgtgatcgcataagccattatagcttatccttaatttctcttgaacttgatcattgggaattatttttagttttgacaatacactttcccactctttcttcgtcctctcacttaaataagaaccaatgacttcaagagctagtggtagtcctccacaataagcaactacatttcttgcaagttcatcgaactcttctattggttttgcttctccaaaagcatgccaactaaaaagctcaagggacttattttcgtccatttcctccattttataaacaaaatcaactttaagtttgtgaagtaggcgtacatctctagttgtaatgattactatacttccttgaccaaaccatttacgatttccgcataggacttttaactgaccaaactcattaacatcatcaagtacaatgagtgcctttgttccagaaagtttgctctccatcatagctcttcctatcccaacgctttttatgttcacctttgttttaaggacatctgaaagaagttgttcttgcaaatgaacatgccctcttcgatctgtttcacaaacttctcgaatatcttcaatgaaacatctacccgtgaatctacgatgaattcgattgtagatggctttggctgtggtagttttacccaatccacccatcccccatatccctacgatacaaactttggttgactgattttcaatatatccaatcacttcttgcacatgggattct

SEQ ID NO: 14464 - DNA, 1188 bp, Glycine max
  Gm_smallRNAprecursor_7297
aatccctcaatagccactgtcccctgtgatgataagagcaaaggaaaaaaaaatgggaaactcctttgttagtgcacaagaaagttataattaaagctcagcctaatcgcacgggtattgcatgtgaaaaggaaaacactttaaagtttcaaaactatatatataaagaatgtacttacagtattatttgtcaatacatcaagtacatcctcatgaaaccacaatcgactccgcttccctggttcctttcttgaactttcacaaattatctctcttcccatgtcccgtagcaattgatgcattccaagtttgttgttcttttcaacttttaagaggctacgatctatcagaactgttattccaatatcagcatgtagcccacaaccttttagtatctcagtaatataggctctgtctttaccaataaagaaacaacatatatcaagaaatatatccttttccatgtgatcgcttaaaccgtcaaagcttattcttaatttctcttgaacttgatcattgggtattctttctagttttgataatacactctcccaatctttctttctcctctcatttaaataagaaccaaggacttcaagagctagtggtagtcctccacaataagcaactacatttcttgcaagctcattgaagtcttcttttggttttgcttcattgaatgcatgccaactaaaaagctcaagggactcgttttcgtccattttatccacatcataaacataatcaactttaagttggtcaagcagacgtcgatctctagttgtaatgattattacacttccttgaccgaaccatttacgatttccacataggttttttaattggccaaactcattcacgtcatcaagtacaatgaacgtcctttttccagaaagtcttttgtcaatcatagttgttcccatcccaatgctacgtaccttctcctttgtttttagaacatctgaaagaagttgttcttgtaaatgaacatgtcctctaccatctgtctcacaaacttctctaatattttcaatgaaactcttgtccatgaatctacgatgaatttgattgtagatggctttggcaatggtagttttacccgatccacccattccccatatccctatgatacagaccttggtggattgattttctataactccaatcacttcttgcacgcggggttcc

SEQ ID NO: 14465 - DNA, 1100 bp, Glycine max
  Gm_smallRNAprecursor_7298
ttccatgtgatcgcttaaaccgtcaaagcttattcttaatttctcttgaacttgatcattgggtattctttctagttttgataatacactctcccaatctttctttctcctctcatttaaataagaaccaaggacttcaagagctagtggtagtcctccacaataagcaactacatttcttgcaagctcattgaagtcttcttttggttttgcttcattgaatgcatgccaactaaaaagctcaagggactcgttttcgtccattttatccacatcataaacataatcaactttaagttggtcaagcagacgtcgatctctagttgtaatgattattacacttccttgaccgaaccatttacgatttccacataggttttttaattggccaaactcattcacgtcatcaagtacaatgaacgtcctttttccagaaagtcttttgtcaatcatagttgttcccatcccaatgctacgtaccttctcctttgtttttagaacatctgaaagaagttgttcttgtaaatgaacatgtcctctaccatctgtctcacaaacttctctaatattttcaatgaaactcttgtccatgaatctacgatgaatttgattgtagatggctttggcaatggtagttttacccgatccacccattccccatatccctatgatacagaccttggtggattgattttctataactccaatcacttcttgcacgcggggttccaatccaataggaaattcggtaatagacaagagtgcatagtctagctttgtgagaatgtcttcaacaattttcttcactagtttagctttattccttcaaattcaataacgattacaaaacagtcagaaattggtcatgtattagaaagatactctttcttgtactgtttataagaaccaattaactaattcataaagactaaaaaaattagttaatttagttagtagcattatatctctcctaaatgtatatgttctttccaaaattactcctactattaataacaaggcatacacttactctattttcaaatactgttattggctttaattcctttttttaggaggctttaattcttttaatctctttg

SEQ ID NO: 14466 - DNA, 1137 bp, Glycine max
  Gm_smallRNAprecursor_7299
atctttctttctcctctcatttaaataagaaccaaggacttcaagagctagtggtagtcctccacaataagcaactacatttcttgcaagctcattgaagtcttcttttggttttgcttcattgaatgcatgccaactaaaaagctcaagggactcgttttcgtccattttatccacatcataaacataatcaactttaagttggtcaagcagacgtcgatctctagttgtaatgattattacacttccttgaccgaaccatttacgatttccacataggttttttaattggccaaactcattcacgtcatcaagtacaatgaacgtcctttttccagaaagtcttttgtcaatcatagttgttcccatcccaatgctacgtaccttctcctttgtttttagaacatctgaaagaagttgttcttgtaaatgaacatgtcctctaccatctgtctcacaaacttctctaatattttcaatgaaactcttgtccatgaatctacgatgaatttgattgtagatggctttggcaatggtagttttacccgatccacccattccccatatccctatgatacagaccttggtggattgattttctataactccaatcacttcttgcacgcggggttccaatccaataggaaattcggtaatagacaagagtgcatagtctagctttgtgagaatgtcttcaacaattttcttcactagtttagctttattccttcaaattcaataacgattacaaaacagtcagaaattggtcatgtattagaaagatactctttcttgtactgtttataagaaccaattaactaattcataaagactaaaaaaattagttaatttagttagtagcattatatctctcctaaatgtatatgttctttccaaaattactcctactattaataacaaggcatacacttactctattttcaaatactgttattggctttaattcctttttttaggaggctttaattcttttaatctctttgatatgttatatatttatgactttaatttttattacctatatgtatctgaataagggcctaaaggaaaagttagacatccaaagagcctaaagctctatttagattaacttctccaaaagcacttctaggagag

SEQ ID NO: 14467 - DNA, 1164 bp, Glycine max
  Gm_smallRNAprecursor_7300
tgcgtgcacctaaaaatttaacaaaaccaacctctttaccatgctcatatatatatatatctatatatatatatatatatatatatatatatatatatatatatatatatatatatatatatatatatatatatatatatatattgcctactttcgaaaacgggccccgacgggtgcagagaaacgcgaggaactggaaccagagaagtggcacgcaaaccgaggcaggattttagcattcaaaaggtcaaacttttctctccttgtggctgagtatgaagtcacctcaaagggaagaggtgggcccatttttgttccactcaaaatgggacaagtggcaagtgctttatgagaaaaaaaaataggaaaaagaaaatcatttttcttaaaaagccacattctctctcttccttctgcacctctacgttgtgggacttcgaatttaaggtatgggtggacttcttctcacatgaaattcatgggtattgggtttttgggagatatgatgggtagttctactaggtttatgccttatggtagttatttgtgaaggaatttgttgaaagcatgctaaacttgacatgtttaatgtgagtaacgctacccattctgttttagggttttatgatgatgctttgtgatgtttgtgtgctgaaattgttggtagaaaactggtagagatgatggggagagttaacctagggttaaatgtgagaatggtagtgatgtgagtgggaaaatgtgagattttgagggtttgaaaagctaaatttggggttagtggtaattggaggctaaagtgagttgatcctagtttaaaatgtcaattaggacttgtaagaaagcctgggcaagagcaaatgagaaaaaaatgagtgacaaatgtgaaagcaagagtcatttctagggtaaattgggtgttgaggggtcaaatcttgaatcggtggagttttcgccttaaaatcagtttgagcaagtctaaattaatgttatagacttgtttgacatgagagtttaccccaaaattacccaattctcattttcacttctcaaaccttgaaaatccactaaattgataggagtctgccctattttcttggtttagggtagttcttgagattggaaattgaattgcttggatattgtggaagcttggaggggttg

SEQ ID NO: 14468 - DNA, 1164 bp, Glycine max
  Gm_smallRNAprecursor_7301
ctactttcgaaaatgggccctgacgagtgcagagaaacgtaaggaactggaaccagagaagcggcatgcaaaccgaggcaggattttagcattcaaaaggtcaaacttttctctccttgtggctgagtatgaagtcacctcaaagggaagaggtgggcccctttttgttccactcaaaatgggacaagtggcaagtgctttatgagaaaaaaaataggaaaaagaaaatcatttttcttaaaaagccacattctctctcttccttcagcagaaaatttagaagctctttttctcactcccacgttgcttttcttcttcctttcttctccacttttgttctccaataaagctccaaactttgctcatcatttctactccaaattgcaaaaggaagccattttcggagtcgtgaagcgcacctctacgttgtgggacttcgaatttcaggtatgggtggacttcttctcacatgaaattcgtgggtattgggtttttgggagatatgatgggtagttctactaggtttatgccttatggtagttatttgtgaaggaatttgttgaaagcatgttaaacttgacatgtttaatgtgagtaacgctacccattctgttttagggttttatgataatgctttatgatgtttgtgtgctgaaattgttggtagaaaactggtagagatgatgaggagagttaacctagggttaaatgtgagaatggtagtgatgtgagtagaaaagtgtgagattttgagggtttgaaaagctaaatttggggttagtggtaattggaggctaaagtgagttgatcctagtttaaaatgtcaattaggacttgtaagaaagcctgggcaagagaaaatgagaaaaaaatgagtgacaaatgtgaaagcaagagtcatttctagggtaaattgggtgttgaggggtcaactcttgaatcgatggagttttcgccttaaaatcagtttgagcaagtctaaattaatgttatagacttgtttgagatgagagtttaccccaaaattacccaattctcattttcacttctcaaaccttgaaaatccactaaattgatgggttttggatacctagattttgatttaccttgatatgaagcttgcctttgatttaaatatgatttatacatgatttaggacttgta

SEQ ID NO: 14469 - DNA, 1051 bp, Glycine max
  Gm_smallRNAprecursor_7302
ttaaccaaaaaatggacatcattcgttatctaagatcgtatataacgtactaatatttttaaattctcttataattacaattttcccacttatactaatgatcatgtaaaaaaatgtattgtaaagtagttagtattttaattttttatataatactaattattttttttatattctttataatattaataatgatatgattaattctttataatattatcttttatgtatttattgatttttattaatatgtataaaataaccttaaacaataattataatgggactgagtaagtatgttaatatcatcttctaaacaaatttattctaaaaaaatatattaaaaaattaattatttataataaatcaatatttataaatatattatatttaataaaataaaaaatagatttaattatattataaataaatatgttgtatttaaaagtatattatacttttttttcctcttacggatctacttgatctggaagttacggatcaagttgatccggaagtctcttacggatcaagttgatccggaagagacttacggatcaacttacggatcaagctgatccggaagtggaaaactaaacaaggacaattttggcatttttcaagaatgctgggtgcacctagcaacactctacttataatcctatcttgtgatgatgaatattcgatggctccattgagcttgttgtacttctaagaaactgcattagaagcaatgagtttgccagggaagatcaaggaaacaatagaggtaggtgcgtcatattcagatgatgtaattctactactcatggctgcagtgagtgtggagaattcaagggaaccaaattgaatgcaatcaaatttgcacgcattcataattaccatatttttaactattggatgaagatcaaacgtttcaaattttaaatgcatgttttaactctgatttaccggtataaaatataagtcaccagatcatcatctagcagtttaaaattatttcccgcgaaaaatgcatgaaaagttgaatgcgaacaatccggatctgaaa

SEQ ID NO: 14470 - DNA, 1051 bp, Glycine max; identical to SEQ ID NO: 14469
  Gm_smallRNAprecursor_7303

SEQ ID NO: 14471 - DNA, 1166 bp, Glycine max
  Gm_smallRNAprecursor_7304
aaacgggccccgacgggtgcagagaaacgcgcgggactggaaccaaagaaacgacatgcaaaccgaggcaggattttagcatttcaaaaggtcagattttttctcttcttgtggctgagtatgagtcatatcaagagaaaaagtgggcccttttgttccactcaaaatgggacaagtggcaagtgctttagaaaataaaataataggaaaaggaaatcattcttttgtataaaaaagtcacgttctctctcctcactcaacaacaaaaaaaaaaatcagaagcttttccctcattctcaagttgcttttcttatccccttctcattcaccattgaagcctccattaaagctccaaactttgctcaccatttctactccaaatcgcaaaaggaagccattttcggagtcgtgaagcacacctctacgttgtgggacttcaaatttcaggtttgggtagacttcttctcacataaattttgtgggtattgggtttttgggagatatgatgggtagttctactaggtttatgccttatggtagttatttgtgaaggaatttgttgaaagcatgctaaacttgtcatgcttgatgtgagccaaatatacccattctgttttagggttttcataatgatgctttgtgatgcttgtgtgctgaaatcattggtagaaaactggtagagatgatggggagagttaacctagggttgaatgtgagaatggtagtgatgtgagtggaaaagtgtgaggttttgagggtttgaaaagctaaatttggggttagtggtaattgaaggctaaagtgagttaatcctagtttaaaatgtcatttaggacttgtgggaaaacttgggctgagcaaatgaggaaaatgagtgaccaaagtgaaagcaagagccatttctagggtaaattgggtgttgaggggtcaaattctgaattggtggagttttcatcataaaaccagtttgagcaagtttaaattaatgttatagacttgtttgagatgagagtttgctccaaaattaccccattctcattttcacttctcaaaccttgaaaatccactaaattgaggggttttagacacctatattttgaattgctttggtttgaagcttgtctttggtttagatatgatttatacatgatttaggacttgtagga

SEQ ID NO: 14472 - DNA, 1187 bp, Glycine max
  Gm_smallRNAprecursor_7305
ggtagaatgacgaccatttgccagtgtccactgcagtagagacgaatatgggttattgtagtagtatagattatttaaattcaattattgtgtttgacttacctattcagataggctccaaggtaaacatctcgttttgaactctgtatccaactcttgatgtaactttcggattcaaattgtgattgcccagatctctgaatggactgtggctcgaggaatccatacacatcagaattccccgctcgcacacttgtctcaatcagatggctgtgttgttaagtcaaagttaattatgtatgaatttaaaacaattactttggtaattaatagtaatctaaaatgacttacagaatccataactgtataacagatatgctaagacattgaccaccatgtgcaatttcagagagatcttcgtgctttatatacaacgggaagttttgattaaacaccccgaatatggtagcatcccacataacctggagcggcttcaaaaacagttgtgggatggtcaatgtcatcaggtacaggggatcatcgacctcttcatccgggctttctggaggttttgctggagaaacaattgcctattgataaaacatagttaattagcaagttttgattacagtgaacaaattaattgagaaaaataaacatataatcagagtaaaatacctgttctgataaacgcttcacaagatgtgttggccaagcaaggaaagtgttaagtgtctgccccactaaggtaacctcgtcagtgggtacaggaacgagagcctctgtatctttaacctcctcaacaccaaccttgacttggccatgcaacaaagggatgttgtgaactgttgtggatccctcgtaaagtcttcctagggcaaccaagcgggaaggattttcttcaatatataggccgtatttgtctgagtcacccttccctggatcgttccctgagggagcaacacaactctccattgtgctgacacgaggacctgagggaccaacctctggctctggaggtagtgcaattccctgtgattgcatctgagactgaaactgggactgcatctggctgaaggattccatcatctttcgagtcactttttctgtgattgactcctccagttggtctttgatttgttgggtcagctgttctaggtcttcaagaggcatggaggaagaactgc

SEQ ID NO: 14473 - DNA, 1092 bp, Glycine max
  Gm_smallRNAprecursor_7306
agtagattgggtggtatgagattgaggtgaaggttgagtaggtcgaggttgagttcgagatcgggtttgagacaaaactttttaattttatttaattttgatgatcaagttttatttggagtatatttgagattgaaatcaacatttatttgctatgttgtagattcattccaaaaaaagaaataggcttgagcacaaaaggttgcattatttggtgtttgtcaaatacaaccaacaattgaagcaaagatataatgcaagagatgaaattgatccaatttctcttaatgatattgatgtgtgcaatgaatgactcgtgggagagatggatcaagatgatgataatgatgctggaaataatttggtatttgaagatgatgatgctctaaattgggcaactgtgtagcaggcttcgggggttggagagtgtaggatgtatactaggcagaaaaagcaaaaaacaacaagtgttgctgctgcccaaacttttaaaaaacaggcaatggttgttggatcttcatcaaggaagcaaaaaacagtccaagaaaatgatgaagatctagattttgaggagaatattgatcttgaatctgaagaagaagaaatcatggtcaattttgaggcgtctgatggggaagagggagagggagatgttccattaccatatgataacaactaagatgattatgttgggattggagaagatgattagagcctcaactttcactttgctctttgcattatgtttttatcattttcttattttgaactctttaatgagtttatttggtgttggtacttgattattgtatgaactcatgaaacttttttagtttatttgaatgcaatcctttgttttttcaatttcaatgagtttatatatatgtatttttttttccgccatgacatccgtcatttttcgctatgccatccgtcatatttttatggcagatttttggctttccgccatgaaccgccatccgtcattaacaacattagattctagtgccattcaatgtactaattcataggaagggcgaaagggaaggaagaagtacctgtaactgatttttaatggtattcacaatgctg

SEQ ID NO: 14474 - DNA, 1092 bp, Glycine max; identical to SEQ ID NO: 14473
  Gm_smallRNAprecursor_7307

SEQ ID NO: 14475 - DNA, 1078 bp, Glycine max
  Gm_smallRNAprecursor_7308
gtgtatcaattgggagactatttgaaagcaagataatgtgtgatttattagccgtgtctgctatatatatagatggttgtgaccgagctattgcttaactttgtttacaaaaaaatagacacgcgtgaacatgtttcgtgtttatgtttccttcagaatgtgtagtcaagtcaatcaatgtgttgtcgcgctcaaactttaatacacatgcatgtcattatgtgttgtcaattatgacaatgatgtatgctacacgcgtaaatgatttttgttggaccaacaattttcttgcttaaccaaatgagtacttaataatattaattggttagtaatggattataacaaattatatcgcataatgaatacaattacataaacaatgcatgtttagtcttcatttaggtcgacatagtgtcttttgaatgacatcaagcttgtgtattgttgcattctactaatatatggaattgtccactgctttgcttgagaataacaattgcttgaccacaacaacgctggaggcggtaagggacaatggtctttcaaataaacctgttgtacatgaacaaagattatatcatgcggtgaccgtgtcaaatgaaccagcgaagtcattgcataattgttatactaactatattcaatgtacctgaacaaaatgatttccaaacacgtgactgacacatatcatgcggtgcccagaagaatcaggtggtgattgacttctaagaggaaaaaatgtcatgctttgttgtcgggacaacgatacaaggattacattataccgtgatacaatcacatatcccatctccgttatatccatccacttgtccacactaacctgaatcaaccaaacatacacatgtaagtaatttaaagtttgtaattaaaaaaattaacctaaaaacatacctttgaaaacccatcaacaagtagggacaactttaattgttcaaatctctttgtcccaccaaagaggttcatgtactcatgcgaccacctgccaagttctttaatcaattcattacgcactaacggccacgaatcttcccccatacctaataaagtggcaatggac

SEQ ID NO: 14476 - DNA, 1188 bp, Glycine max
  Gm_smallRNAprecursor_7309
tagccgtgtttgcattttgtgggtcaacaaacatctttgtctttcgcctataccagaccatgtagtccgagttaaagctcaataggccttcttgtcggggataagcgtcgaccctaaaagcatggcgattgttccattgatgaatcattggggcgaacaattgcccccaattttcatcatgtttcccttttaatgttatgccatgaatgtttaagggttgcgaaggagactctggaattggttgctgcatcccaaattatctcaatactctgtccggttggtgccactcaataacttggaaacaaattagtggcaccaccgcgcaccacgcgacttccaagtacacaaatgggaggcaacaatgatataacgattgctgtgtaaggctcccacacaaactgcatataacaacatagttgtcaacattttagtaaaataacacatatcattttttattttacaaatacaataccatgttcttacctcatgacgttacataatatccaacttgcgacgaaaaactctgacaccatcattgttgatatgttggtttccacgtcgcagccacctacaaagattaaaatttaatataccctaaaaccatttattctattcaaatgaaagacacttttaaaaatgattaacctgtgccctagtggtttattttctacttgggaaggagtcctctttggagccaaggttggacatcgttcccatgtccacgtttgtagtaagatgcacatgcctccgattgatttagttttataatcagtggcactacacatctctctgtatagaaaagcaagtatggcaggtccctatgcatatgtgccacagtctgcaaagtcacgtaaaaattgaaggtatcttagcgaaactttgttactgcttttgtcaacgaacaagacacctccaatgaatctcaatatccatgcatgggcaaaccttcgtacttcttcttcgtcgtcgtcgttatttatttgtgcaaaatggtgagccagccaactcaatttaaccacactacctttaatttcaccttcttgtggtctgactcccaataattcctcacataaatcagcccaatcaagatttgttggaccgattaatgataaaccatccacacgtatacctaacaatacagagacgtcttggagagtaatagtacactctccgcatctcatgtgaaac

SEQ ID NO: 14477 - DNA, 1079 bp, Glycine max
  Gm_smallRNAprecursor_7310
tagaagaatgtagaactatcatgatactaatctatcatgaaaactctagaaagacataaagtaatgtagaaacattcaccaccattgagaggttggtgacttgaacctataaatatgcaattggtatgttgtaattgatcatccaagaaatcaatgacatagacttctttctaaaacaattctctaaaactatcaactatcatctaatcaactatcagcagtggcatcagagctacgttcggtcatacattgggcgtagttatattacctacctaccattccaaaatcctcccaactacttcaaaaatttcctttgtactattaacccactccaataatattttttttctaagctatggataacactactcaatcgttaactatttttgtccctatcttcaatggtgaaaattatgatttctggcgtgttaaaatggaaacatatttttcatctcaagatttatgggacatagtagaagaaggcttcaccgttcccgcggatacttcagctcttaatgcatctcaagaaaaagagttgaagaaaaataaacagaaaaattcaaaggcgttgttcaccttgcaacaagcggtgactgatccagttttcccaagaattatgggagctaagactgccaaagaagcatggaacacattgcatgaggagtttcaaggaagtgttaaggtacgtgccgttaaacttcaatctctaagaagagattttgaactattgaatatgaaggagtctgagacagttaaagaaatagttaatcagatgagagcttttggggaagatattcttgacaaaaaaattgttgagaaaattctaattactatgccccaaaagtttgacccaatcgtgacaacgattgaggaaaccaaagatctgtccactctatgagagacagaacttgtgggctctcttgaagcatatgagcaaagactgtataggcataaaaaagatacacttgaaaatgtcttccaattaaagtttaaatttcagccccaaaacaaagaaaatggaggaaagaaaaattatggagaaacttccagaagaagagaaggttctaggaatttcctta

SEQ ID NO: 14478 - DNA, 1249 bp, Glycine max
  Gm_smallRNAprecursor_7311
ggcagaatgacgaccatttgccagtgtccgttgcagtagagacgaataggggttattgtagtactattgattatttaaattcagttattgtgtttgacttacccattcaggtaggctccaaggtagacatctcgttttgaactctgcatccaactcttgatgtaactttccgattcaaattgtgattgcccagatctctgaatggactgtggctcgaggaatccatacacatcagaattccccgctcgcagacttgtctcagtcagatgcttgtgttgttaagacaaagttaattatgtatgaatttaaaacaattactttggtaattaacagtaatccaaattgacttacaaaatccacaactgtataacagatatgctgagacattgaccaccgtgtgcaatttcagagagatcttcatgctttatgtacaacgagaagttttgattaaacacctggaacatggtagcatcccacataacctggagagacttcaaaaacagttgtgggatggtcaatgtcatcaggtataggggatcatcaacctcatgatccgggctttctggaggttttgctggagacacagctgcctattgatcaaacatagttaattaacaagttttgattacagtgaacaaatcaattgaaaaaaagaaacatataattagagtaaattaacaagttttgattacagtgaacaaatcaattgaaaaaaagaaacatataattagagtaaatacctgttctgataaacgcttcacaagatgtgtcggccaagcaaggaaggtgttaagtgcctgccccacttaggtaacctcgtcaatgggtacaggaacgagagcctccgcatctttaacctcctcaacaccaaccttgacttggccatgcaacaaagggatgttgtaaactgttgtggatccctcataaagtcttcctaaggcaaccaggcgggaaggattttcttcaatgtatagcccgcatttgtctgagtcacccgtctctggattgttccctgagggagcaacacaactctcctttgtgctgacacgagcacctgaggaaccaacctctggctctggaggcagtgcaagtccctgtgaatgcatctgagactggaactgggactgcatctggctgaaggatgccatcagctgtcaagtcactttttctgtgatcgactcctccagttggtcgttgatttgttgggtctgctgttgtaggtcttcaggaggcatggaggaagaaatgc

SEQ ID NO: 14479 - DNA, 1033 bp, Glycine max
  Gm_smallRNAprecursor_7312
ctaaggtgtattgttgaactaaaatattaggacataacaaactggtggctatagatataccgttcaaactatacatgtgaaaaaaaaacgtgtttttcttttaaaaaaatttcagatccaagaaattttgctacatatttacttacggaaatatttctatggaaccatatgaaggcaaagatattagagaatgttataatcatgtctagacttttacgctctttttcccgtatctcttttcgatccaattctttctcatcatcttcttcaagaaatacaaacttattaaatgaacaagaaaaccagacccacgaggtcgcccccaaacacaatctcttcgatgaggaagtccgattcgaggatatcaatcaaaacatggatgactggaacattccagaaatccctcaagatcaactatacgttcctgaaacaattaaagataaacacaactttgattacataatcaaaacagtagataacaatattcctctagaacaggatataggggaagaatttcatttactttcaaaaaattcaatttatgaacatagccgtaagtataaatatctacacatcggttgtgtacaagtagctatcaagcccttaattgacatgggcatagatgcagcagttttaatgtgtctaagagatattaggcataataaaattgaagacttcttaattggaacggtcgaaaccagtttaggacaaggtccaatatattttaattgttatccaaataagacagtgagtttaatggacaaaaatattcttgactctctgttcttaaatatccactttcatggccttaacatgaaagaaagatcaatcccagcagctttgatttataggatccagtacagggtcatcactacttgtgtgtctagagtcctattgcaaccacaaaagggagaaacaaccttatttatcactgatatgacaaaagccaatgtttctttaccaagagtaataaaatgggatgaagtaactctccctgaaaaaatgggtcatggagaaggccacactgtctgat

SEQ ID NO: 14480 - DNA, 1110 bp, Glycine max
  Gm_smallRNAprecursor_7313
tattgtagatcattcagtgatcgaaatgccgcaagactatgtcgatacagagccttggattttgtatttcgatggttcgaaacacaaacgtggaactggaattggagttttaataatatctcccaataaagttccaactaaattcaaatataaaatcaaagggctttgttctaataatgaggctgagtatgaggctctaattacaggccttgaaattttaattagcttgggggcaagaaatgttaacataaggggtgattcagaactagtgttgagacaattaacacaagaatacaaatgtgttaatgaacacttagcaaaatattttgttatggcaagttctcttctgaatcatttcgattacattaacattgagcatatacctcgacaagaaaaccaagaagcaaatgatttagcccaaatagcttcagggtacaaaatgtcgaaggaaaagttaactcagttgatcgaaataaaagataaactggtattaccagagccattaagcactaaattgccaatgccaaaacttgtgggggcaagtacaccacaaaataatgaagatgaaagcatggatgatctccaggaaaaaattcaaattttggccattgacaatatgttagataatgattggagaaagtccattgttgaatatttggaaaatccaataggtaatgtggctcgaaagatcaaatatagggctttaaattacgtgattgtgggaaatgatttgtttaaaaagactgcagaaggagtgttgctaaaatgtctaagtgaatcagaagcatacttggcagtttcccatgttcacagtggggcttgtggatcacatcaagcaggccataaaatgaaatggcttttatttcgacaaggtttgtattgaccttcgatgttaaaagactgcatagaatttgctaaaggctgtcaggaatgccaaaagcatgcagggatacagcatgtacctgctagagagttacactccataatcaaaccttggcctttcagaggatgggctttggacctaattggtgaaatcaagcctgcttcttctaagaaccagcgttatatcatagttggtgtcgattactttacaaaatggatcgaagcagt

SEQ ID NO: 14481 - DNA, 1082 bp, Glycine max
  Gm_smallRNAprecursor_7314
cagtgatcgaaatgccgcaagactatgtcgatacagagccttggattttgtatttcgatggttcgaaacacaaacgtggaactggaattggagttttaataatatctcccaataaagttccaactaaattcaaatataaaatcaaagggctttgttctaataatgaggctgagtatgaggctctaattacaggccttgaaattttaattagcttgggggcaagaaatgttaacataaggggtgattcagaactagtgttgagacaattaacacaagaatacaaatgtgttaatgaacacttagcaaaatattttgttatggcaagttctcttctgaatcatttcgattacattaacattgagcatatacctcgacaagaaaaccaagaagcaaatgatttagcccaaatagcttcagggtacaaaatgtcgaaggaaaagttaactcagttgatcgaaataaaagataaactggtattaccagagccattaagcactaaattgccaatgccaaaacttgtgggggcaagtacaccacaaaataatgaagatgaaagcatggatgatctccaggaaaaaattcaaattttggccattgacaatatgttagataatgattggagaaagtccattgttgaatatttggaaaatccaataggtaatgtggctcgaaagatcaaatatagggctttaaattacgtgattgtgggaaatgatttgtttaaaaagactgcagaaggagtgttgctaaaatgtctaagtgaatcagaagcatacttggcagtttcccatgttcacagtggggcttgtggatcacatcaagcaggccataaaatgaaatggcttttatttcgacaaggtttgtattgaccttcgatgttaaaagactgcatagaatttgctaaaggctgtcaggaatgccaaaagcatgcagggatacagcatgtacctgctagagagttacactccataatcaaaccttggcctttcagaggatgggctttggacctaattggtgaaatcaagcctgcttcttctaagaaccagcgttatatcatagttggtgtcgattactttacaaaa

SEQ ID NO: 14482 - DNA, 1175 bp, Glycine max
  Gm_smallRNAprecursor_7315
gaatgctcttctctatattattatacatcagagttaaaactaaaaaatatttatgattttctctatgttttatgatgttttcaacaaaactctctcataaaagtatttttacaatgttttttgttatgttagtagaaggtaaacaaaaataattgttgccctttactttttatatatatatatatatatatatactatgaagtggtgaacttcattctcctaacgcatatctatatatcttcttatacttttaaatttcaattaaatgatttaacaatacgtaactaaatataagaaattgattttaagtatatataaagagaaagaggatgtatcatatgaaaataatcattttatgtaagaataagaatgattaatcttaattgttatattaaaataaaaatgttaagattaaaacattttaaatttaaattctcatttatccataaaatctctgtaaaatttattagacaaaaaataaaatatcttaaagatttaatttatgtcaagatcgtcactacaatcaccatcattgtcatcataaccatcgttatcaccaccaacatgaaattgtctttatgaccatcgttgtcactaccaacatggacaatgtcgttgccgccgtcaacaacgatagtgacatcggtcttattggtggtgacaacagtggtcaaagcgacgacaatgacaacaacaacaaccatgttggtggtgattgcagtaacgactatgacagttgtaacgaaacgatcatgacagaggtggtgttggaaacgatcatgattatggtgataataagtttgaaatatttttaggacttcataaattaaaatatttaattttttatttggtaaatcttatgcaaattttatggttaaatgaagttttaatttgaattaaaaatattttaatcttgaccttttattttaatctaacgatcgatattagttattctgattctcacataaaatatgtattttcatatatgatacatcctctctctatataatcttgaaaatgcaaatttgtgcgtgatcacccacaatacacacaaacaaaaagtagttttcaatttaatctgagttttaatttgaatttatcaatgtaaatcttgcttcttctttttttcgtgtttaacaaaatttagagaaggagatcagtcaaaatctcaaact

SEQ ID NO: 14483 - DNA, 1132 bp, Glycine max
  Gm_smallRNAprecursor_7316
gattggtgttgaacactttggttctgactttgcaatggctcaaaggaaaactcattctcctagtaagaaacttttaccatttgacagaaatttttttatgtattagtgttataattcagaattctaagttatgctcttagttggtaattggtattgcagcatattggtggcgaatatttgggtcacaaactccaaatttgcaaaagctagctattaaaattttgagtttgacttgcagtgcttcaggatgtgaaagaaattggagtgtgtttgagcaagtaattgtgacaaaactctaactatactttttaattttgtttaattttgatgatcaagttttatttggagtatatttgaaattgaaatcaacatttatttgttatgttgtagattcattccaaaaaaagaaataggcttgagcacaagaggttgcatgatttggtgtttgtcaaatacaaccaacaattgaagcaaagatataatgcaagagatgaaattgatccaatttctcttaatgatattgatgtgtgcaatgaatggctcgtggaagagatggatcaagatgatgataatgatgctggaaatgatttggtatttgaagatgatgatgctctaaattggacaactgtgtatcaggcttcgggggttggagagtgtaggatgtatactaggcggaaaaagcaaaaaacaacaagtgttgctgctgcccaaacttctaaaaaaaggcaatggttgttggatcaaggaagcaaaaagcagtccaagaaaatgatgaggatctagattttgaggagaatattgatcttgaatctgaagaagaagaaatcatggtcaattttgaggcgtctaatggggaagagggagagggagatgctccattaccatatgataacaacgaagatgattatgttgggattggagaagatgattagagcctcaaccttcactttgcactttacattatgttttaatcattttcttattttgaactctttaatgagtttatttggtgttggtaattgattattgtatgaactcatgaaacttttttagtttatttgaatgcaatccattgtttttttcaatttcaatgagtttatatatatgtattttttttttgtccgccatgaca

SEQ ID NO: 14484 - DNA, 1111 bp, Glycine max
  Gm_smallRNAprecursor_7317
cacttggatgactcagccctagtttcctatgctatttatttatagcaatcccaaacactatgtggtcatcaatgttaaggataaacacaaagatatgcctcctctctggttatcactctcttcccatttagattcatcttatgtttcccttttttcttctttgttatgccacaagcctccactctctgcctcagcctcatcctccactcattcacttcacttagtcaatcgcatgttccatctgcaactgcatcctattcaatcaaatcttccactaataatatttatttcaggatctgttcccttgtgtcaacactacaaggtctctgtcttaatggtgagtttaatggtgtccgatttgtgtatcaaattgcaccttcaaaggtcctccaagagcacccacaattccctgtttgggtgacacgggccggagccaggtttcaattgatcctgcattatccatgccaaagtattagtagctcaaggatctaagttgaaccaagttagttatgggactttgatcaatgatttatgcaaaataggagaaacaaggactgccatacagttgctcagaaagattgaaggaccattaattgagtctaccatgatgatgtagaatactatcacttggggataacctatgcaaacataaacatgtaattggacgtgtgatttataaatcacagtctgaaatggctgtctagggaattttttccgatattgtaattttttcaatgactgtgagaaaattttcatgacttttgtggtcaaagttagcttactggaattatagaaatcttattagttttgtaaattaagccgctgttttctttattttggatagaagcagatgaagagatttatggttttatttttatcctatgttcggtttacatgtcaacttgctttagagctcgatgtgaatttgattcatccacgtaacaatgtaagagaacaatctgtaagtcaatgtatatctcttatgcaagccccccatcttatgtgtacgcctgaaatttctgtggcagcacatgtggagttagaggctttttgagctaaattttgtcttcattatactgagcaagattgaataatttctttcatatttcaa

SEQ ID NO: 14485 - DNA, 1048 bp, Glycine max
  Gm_smallRNAprecursor_7318
ttaaaaaaaaataatttttaacaatactttcatatttcaacaattcctaatataacctatttcattacttgaaattttgaatcccattgattaacaaatgaaatctactagatttttagtagaattaatatgaatttgacctaacatcggtttttcacttttaaaaataaataaattcgcaatattaaaatagtactaacctactttattggttcagccagtgcgttatgacgtggatccttttcagccgttcacgtgcgacgatagttacgaagattcgctggcttttcacatttcacgaggtagggttcatggatttaaattagagccaaaggtaacacaattggtgaatcaattgaattgaatctctccaaatttcacttcaaatgagagtagtgttgctctttgttttcattgttgactaagtagttgtgaatcttttgcccttaaccatatgaaggtgttaactcgttctctatgttggattttatggaactggagggataggtaaaacaatgactgctgtataagtaattgttatagttagttgttgttttacctattccacccattccatgtatccctttcctgagggcgcggttaatttcttacttttcactgccgattccgttgaagctttgggttttaatcagacgaatgaaagtatattaagtttttgctctggatttatgtgcctgtaaaatgatcttaagattctaactttattatttgtttatgggattttttttttcttttttggccaatagttcacagatctgagagtttcaagttttccctcttgttttctatgccagtaaattgattttaagattgttaactggatttttgtttttttttgtttatttggtattttttttctccagatgttcatagatctgggagtttaagctttgatggttgttgatttgtcttagttatatctgattgtgatgtgtttggtgttccgattttgaagatctattatttcaaaattgagaattctattaagtttatttaaggttcatgaatcggtggaaagagctcagat

SEQ ID NO: 14486 - DNA, 1079 bp, Glycine max
  Gm_smallRNAprecursor_7319
gaatctagaactatcatgatactaatctatcatgaaaactctagaaagacctaaagtaatgtagaaacattcaccaccattgagaggttggtgacttgagcctataaatagacaattggtatgttgtaatggacaatccaagaaatcaatgacatagccttctttctaaaacaattctctaaaactatcaactatcaactatcatctaaccaactaccaacagtgacatcagagctacgttcggtcatacattgagcgtagttatattacctacctaccatttcaaaatcctcccaactacttcaaaaatttcctttgtactattaacccactctaataatattttttctaagctatggataacactactcaatcgtcaactatttctgtccctatcttcaatggtgaaaattatgatttctggcgtgttaaaatggaaacatatttttcatctcaagatttatgggacatagtagaagaaggcttcaccattcttgcggatacttcagctcttaatgcatctcaacaaaaagagttgaagaaaaataaacagaaaaattcaaaggcgttgttcaccttgcaacaagcggtgactgatccaattttcccaagaattatgggagctaagactgccaaagaagcgtggaacacattgcaggaggagtttcaaggaagtgttaaggtacgtgccattaaacttcaatctctaagaagagattttgaactattgaagatgaaggagtctgagacagttaaagattactattctaaagttaaaggaatagttaatcaaatgagagcttttggggaagatattcttgacaagaaaattgttgagaaaattctaattactatgccccaaaagtttgacccaatcgtgacaacgattgaggaaaccaaagatctgtccactctatcagagacataacttgtgggctctcttgaagcatatgagcaaagactgtataggcataaagaagatacaattgaaaatgccttccagccaaagtttaattttcagccccaaaacaaagaaaatagaggaaagaaaaattatggagaaacttctagaagaagag

SEQ ID NO: 14487 - DNA, 1109 bp, Glycine max
  Gm_smallRNAprecursor_7320
caaacacaatccattcaacacaacaatgtcattctcattctcattgttaagaaggttaagctcttctccctctctttccattcccaactttcctcattttcttccaaaccccacttccactctttcctttcactcccagactccatccactgaaaatgttgttgatgatgcctttttcccagttcaatcgcatgctccttgtgcgtcatatcccaccatcatcgaatttaacaggattttaggatcccttgtaaagatgaagcattatcctactgtcaattctccctttctagacaaatggaagtcaaaggaattaagccaaatcttgttactttgagcatcctcatcaattgtttctgccacttgggccaaatggccttttctttttctgtattgggcaaaattctaaaattaggttatcagccggataccataaccttgaatacactcctgagaggtctatgtctcaagggtgaggtcaagaaatcactgcactttcatgacaaggtcgtagcacaaggatttcagatgaaccaggttagttatgggaccctgctcgatggactatgtaagataggagagacgagatgtgccatcaagttgctgagaatgattgaagacagatcaactaggcctgatgtggtaatgtacaacatcatcattgatggcttatgcaaagataaacttgtagacgaggcttgtgatttttattctgaaatgaatgctagaggaatttttcctaatgttatcacttacaatactctaatatgtggcttttgccttgcgggtcagttgatgggagcattcattttattaaatgaaatgatactgaagaacatcaatccagatgtttatacctataatacattgattgatgcattatgtaaagaaggaaaagtgaaagaaacaaaaaaactattagctgtgatgacgaaagaaggggtaaaacctgatgttgtttcttataatactttaatggatgggtattgtttaattggtgaagtgcataatgcaaaacagatattccacactctgatccagaggggagtaaatcctgatgtttacagctacagtacaatgattaatggattatgtaagtgtaaaatggt

SEQ ID NO: 14488 - DNA, 1186 bp, Glycine max
  Gm_smallRNAprecursor_7321
aacaaacacaatccattcaacacaacaatgtcattctcattctcattgtcaagaaggttaagctcttctccctctctttccattcccacctttcctccttctcttccaaaccccactttcactctttgctttcactctcagcctccatccattgaaaatgttgttgatgatgctgtttcccagttcaatcgcatgctccttgtgcgtcgtaccccacccatcattgaatttggcaagattttaggataccttgtaaagatggagcattatcctactgccattcccctttttagacaaatggaagtcaaaggaattgagccaaatcttgttactttgagcatcctcatcaattgtttctgccacttgggccaaatggccttttctttttctgtattggccaaaattctaaaattaggttatcagccggataccataaccttgactacactcctgaaaggtctatgtctcaaaggtgaggtcaagaaatcactgcactttcatgacaaggtcgtagcacaaggatttcagatgaaccaggttagttacgggatcctgctcaatggactatgtaaaataggagaaactagatgcgccatcaagttgctgagaaagattgaagacagatcaattaggcctgatgtggtaatgtacagcacaatcattgatagcttatgcaaagataaacttgtaaacgaggcttatgatttttattctgaaatggatgctagaggaattttccctgatgttatcacttacactactctaatatgtggcttttgccttgccagtcagttaatgggagcattcagtttattaaatgaaatgatattgaagaacatcaacccggatgttcatacctttagtatattgattgatgcattatgtaaagaaggaaaggtgaaagaagccaaaaatttattagctgtgatgatgaaagaaggagtaaaacctaatgttgttacttataatactttaatggatggatattgtttagttggtgaagtgcagaatacaaaacagatattacacgccatggtccaaacgggagtaaatcctaatgttcgtagctacactataatgattaatggattatgtaagagtaaaaggatggatgaggccatgaatctcctaagagaaatgctgtataaagatatgattcctgatacagtgacatacagttctctta

SEQ ID NO: 14489 - DNA, 1109 bp, Glycine max
  Gm_smallRNAprecursor_7322
aacaaacacaatccattcaacacaacaatgtcattctcattctcattgtcaagaaggttaagctcttctccctctctttccatcccaaactttcctccttttcttccaaaccccactttccctctttgctttcactctcagcctccatccattgaaaatgttgttgatgatactgtttcccagttcaaccgccttctccttgtgcgtcataccccacccatcattgaatttggcaagattttaggataccttgtaaagatgaagcattatcctactgccatttccctttctagacaaatggaagtcaaaggaattgagccaaatcttgttactttgaacatcctcatcaattgtttctgccacttgggccaaatggccttttctttttctgtattgggcaaaattctaaaattaggttatcagccggataccataaccttgaatacactcatgaaaggtctatgtctcaagggtgaggtcaagagatcactgcactttcatgacaaggtcgtagcacaaggatttcagatgaaccaggttagttacgggacactgctcaacggactatgtaaaataggagaaacgagatgcgccgtcaagttgctgagaatgattgaagacagatcaactaggcctgatgtggtaatgtacagcaccatcattgatggcttatgcaaagataaaattgtaaaccaggcttatgattttttttctgaaatgaatgctagaggaatttttcctaatgttattacttacagtactctaatatggggcttttgccttgcgggtcagttgatgggagcattcagtttattaaatgaaatgatattgaaaaacatcaacccgaatgtttatacctataatatattgattgatgcattatgtaaagaaggaaaggtgaaagaagcaaaaaaattattagctgtaatgatgaaagaaggggtaaaacttgatgttgtttcttataatactttaatggatgggtattgtttagttggtgaagtgcagaatgcaaaagagatattccagattatggtccaaacaggagtaaatcctaatgtttgtagctccaatatcatgattaatggattatgtaagagtaaaagggt

SEQ ID NO: 14490 - DNA, 1053 bp, Glycine max
  Gm_smallRNAprecursor_7323
cggcaggggtggggccggggttgacggtggcgctgtcgacgtcgcagaagccggtgatgggaggcctctggtggcgagggactgggattagggattcagattggggtaagaaggatgggaagggttgtttttgacatttcacttaaagagtgggggcgagtgtaatcccaacagataagaaaagaaagaaattctatcctcatctctgttattttctttactcctaatgacacgtgtatcaagtaactggacttatgggcctgagggctctatttatttatcccctataaagggcacgagttagttcaatctgatgtctaacctaatttggatacctgcctttttagcttgcagctgccgtccgtgcacagaggagtcttaggaggaacaactgtagagaaaaggatctgccaaattcgctagaaaattcaccagaaacaccacccgttatccaattaaaccagatttttggatcatttgtgaagttgaattgctatccaactgctattcccatttctaaaccttgttacacgagcatcttgatcaatggtctagaaagggaaatagcagttgagtggtgcttcaacgataagttattggatttagtatttatcttagcctgttttcgtgtactttgttttgccggatggaggtatgtgattttgtctatgattcttaatacaataacctacacttactctcattgatggtttgtgcagatctaatagctatgaagcatcgataccagacacgacacggtcacgtgacacatgtaatgtctaaaatattaaaatatagaacgtaatacgagtgtcgtgttggtgttggacactgatagggacgcgtgtcagacaccggacacgacaagggactgaaatgttcatgcttcatagtctaatagaatcgtttatgtttgagatcttgttgatgagaggcagatagaggtcaacttgccaatatgataacctacagttctatattagatgctttttgcaaaaacgatcatccaaaggctattggattattcaagaaaactaaagaccaaggagttca

SEQ ID NO: 14491 - DNA, 1111 bp, Glycine max
  Gm_smallRNAprecursor_7324
tgtacacatgattacacacacaataaaccaaaaattaaataaaatcgaaagtgtatatatatatatatattaacactattataataataaagtatagacgtacgtgtgcgcacttactaggtgttactatttaagcgcaactatgaagagacaagataaagcgcgcagtagaagaatgtttgacgttcacataataaatactagtgaaagctgcttcagtaatttcacaagggcaagcaagcacacacattgcgtactcatctacgtttcatcatgtcacaccaagtgaatgtgaagtgaaacaaacttcacagtgacataactttggcaccaatagcccctaccctttctctttgttattctataaatcagaaaccaacccacaactactttttggaccacaccacatacacaatacaagctcatctggtcctgaatttggagaagaagaaagttgtttaatggtggatgagtagtggtgccttattgtgggtggagagttccaaagggatcgcattgatctaattcttgtagatgcctgaacttgcaatcttgaatcttgcatgcaattcctggatttaggtttgctttaaggggttcagttattggatcatgcgatcccttaggaactttccatcaattttaaattttctttgatccatttaaggtaaaactgaatcttttaatatatatgtgaaactctactttgagtctttcatcttcttatttttttattggtaaatgttagtttgttagttttgttaaaaagtttttggtactctatgtaatgattgtatatattatcatcttgcataaattaattgtgtagattttaattttcttggtatgatttttagacatgcatatagctaattaatgactctcattgaagtatcagtttgtgtcttaattagtctgcctgttgatttagttttttagaattatgcctttttaagattattacttttttgcttatagtaaatttttgttgaaaataaacttgtttgaaagcaattattagcccatatactatactttgtttatatattatgctcatgtcgaaatgttatagaatgaaatacaacagccaagttgattaatcttttttaga

SEQ ID NO: 14492 - DNA, 1109 bp, Glycine max
  Gm_smallRNAprecursor_7325
gtacacatgattacacacacaataaaccaaaaattaaataaaatcgaaagtgtatatatatatatatattaacactattataataataaagtatagacgtacgtgtgcgcacttactaggtgttactatttaagcgcaactatgaagagacaagataaagcgcgcagtagaagaatgtttgacgttcacataataaatactagtgaaagctgcttcagtaatttcacaagggcaagcaagcacacacattgcgtactcatctacgtttcatcatgtcacaccaagtgaatgtgaagtgaaacaaacttcacagtgacataactttggcaccaatagcccctaccctttctctttgttattctataaatcagaaaccaacccacaactactttttggaccacaccacatacacaatacaagctcatctggtcctgaatttggagaagaagaaagttgtttaatggtggatgagtagtggtgccttattgtgggtggagagttccaaagggatcgcattgatctaattcttgtagatgcctgaacttgcaatcttgaatcttgcatgcaattcctggatttaggtttgctttaaggggttcagttattggatcatgcgatcccttaggaactttccatcaattttaaattttctttgatccatttaaggtaaaactgaatcttttaatatatatgtgaaactctactttgagtctttcatcttcttatttttttattggtaaatgttagtttgttagttttgttaaaaagtttttggtactctatgtaatgattgtatatattatcatcttgcataaattaattgtgtagattttaattttcttggtatgatttttagacatgcatatagctaattaatgactctcattgaagtatcagtttgtgtcttaattagtctgcctgttgatttagttttttagaattatgcctttttaagattattacttttttgcttatagtaaatttttgttgaaaataaacttgtttgaaagcaattattagcccatatactatactttgtttatatattatgctcatgtcgaaatgttatagaatgaaatacaacagccaagttgattaatcttttttag

SEQ ID NO: 14493 - DNA, 1109 bp, Glycine max; identical to SEQ ID NO: 14492
  Gm_smallRNAprecursor_7326

SEQ ID NO: 14494 - DNA, 1110 bp, Glycine max
  Gm_smallRNAprecursor_7327
gtacacatgattacacacacaataaaccaaaaattaaataaaatcgaaagtgtatatatatatatatattaacactattataataataaagtatagacgtacgtgtgcgcacttactaggtgttactatttaagcgcaactatgaagagacaagataaagcgcgcagtagaagaatgtttgacgttcacataataaatactagtgaaagctgcttcagtaatttcacaagggcaagcaagcacacacattgcgtactcatctacgtttcatcatgtcacaccaagtgaatgtgaagtgaaacaaacttcacagtgacataactttggcaccaatagcccctaccctttctctttgttattctataaatcagaaaccaacccacaactactttttggaccacaccacatacacaatacaagctcatctggtcctgaatttggagaagaagaaagttgtttaatggtggatgagtagtggtgccttattgtgggtggagagttccaaagggatcgcattgatctaattcttgtagatgcctgaacttgcaatcttgaatcttgcatgcaattcctggatttaggtttgctttaaggggttcagttattggatcatgcgatcccttaggaactttccatcaattttaaattttctttgatccatttaaggtaaaactgaatcttttaatatatatgtgaaactctactttgagtctttcatcttcttatttttttattggtaaatgttagtttgttagttttgttaaaaagtttttggtactctatgtaatgattgtatatattatcatcttgcataaattaattgtgtagattttaattttcttggtatgatttttagacatgcatatagctaattaatgactctcattgaagtatcagtttgtgtcttaattagtctgcctgttgatttagttttttagaattatgcctttttaagattattacttttttgcttatagtaaatttttgttgaaaataaacttgtttgaaagcaattattagcccatatactatactttgtttatatattatgctcatgtcgaaatgttatagaatgaaatacaacagccaagttgattaatcttttttaga

SEQ ID NO: 14495 - DNA, 1110 bp, Glycine max; identical to SEQ ID NO: 14494
  Gm_smallRNAprecursor_7328

SEQ ID NO: 14496 - DNA, 1110 bp, Glycine max; identical to SEQ ID NO: 14494
  Gm_smallRNAprecursor_7329

SEQ ID NO: 14497 - DNA, 1110 bp, Glycine max; identical to SEQ ID NO: 14494
  Gm_smallRNAprecursor_7330

SEQ ID NO: 14498 - DNA, 1035 bp, Glycine max
  Gm_smallRNAprecursor_7331
tagcagacaagatcatgcttatgcttttttgctatcgtgctcctgttccttgccactggtcttgatgaagccaagcattgcctctttgccttttaagttgtacatagttgcaaaacgggtacatgtgaaagaataatgcttattaaaggtaaggttgattttaaagtgggcatgcaagaatgcattcattatctcaagtaaataaaattcaagcgaatatgtgatttggattagagaatagtattatccagtgcacactaaattggagagattcccaacatgtggtttcaaaactaaaagaacttaccaactatttgaattttaatctacgtgatctagctaatgttttctatcagagaattacaactagttgatcttaagtacaaaactatactaaatatgcaaatctttacatctaaaaacagaatttaaataaggctctcaaatttgaagaaaaaaaagaagatagtgttagcccatatttttgatgagctaaaatatgctctaaatacgcattagatgtcgtcttgaatttcgaagcgtattaaagagcaagagtctggtcagatcctgttcgaatcgaaaagaaagaagaggtgattgaaagggattcacgggatcaaagaagtatttataaagtataaggctaagacaagaaagagggcttcgaaccattgggcgattcgaactggtgtatggtcgagtcgaagtcgaggcagcaagagttctggacttagcgcaatttctgacaaaacttcacaaaatcagttcgatttcgagtaatgtggataaccgttctaaggagcagttatatgcatgcaaggtatacgtagcaggacacttggcattaggatagtgttcgaccgttagggcagtttattttcgaatgtctatatatagcagttttttagtcagatttcagggtcgcaaatcattactacaagtccttatatactcaaagtacccagcgcagagagaaacgagtacgcaaggaaaatgtatgattgtgaaccattttaagtttctgtaaacttt

SEQ ID NO: 14499 - DNA, 1040 bp, Glycine max
  Gm_smallRNAprecursor_7332
agttgagaatgttggaatcaacaaagtgctcattgatggaggagcggctgtcaacttaatgcctcgatctatgctctacaagatcgggaaacatgacactgatctatctgctcacaacattgtgctttcgaattatgagggtaaaactggctattctttgggagccattcaagtagatgttgctgtaggcagtatagttcgaccaactctattcctggtgatacagtccaaggctaattttaacttgctattaggaagggaatggatccatggagttggggctgtgccatctacccttcaccagaaactcattatctggagggaggatgggattgttgaaaatatggaggcggatcaaagcttctataagtctgaggtcgataatgttactgcacaaacctttgacaaaaagttggctaacatagcaccttgtggtgataaggaggctattgtcgaatcaagtgacaatgttatccactctgtcaaactccatcctacctatgggtttatatgggagagggaggaaattgatgctgttccctctgaagatggagtcattccaccaactgggtggaatatgtatgaagattaatatgactgaggccactgcattggccagaattacggcttatatggccgaaaatagactaaatacggcctttgaggctgaatctcaacaaaatatggcagttgaagccaagatcgaagatcataaaaacaaagaaacaaaggatcgaagactggattgcatttatgacgatgagccgctgggtttcgagaaaaatcccgtaagtgaggtgccaaagatgcaggctcaagatcctttggaggaaatcgacattggagatggcttgatgaaaaggccaacatatatcagtgccaatatcacctcaagtctaaaagaaaagttggtgcttcttcttagagaatttaaagactgttttgcttgggattaccacgaaatgcctgggttaagcagagaaatggtcgaaatgaaattaccaattaaggagggaaaaagaccagtaaaacaactacca

SEQ ID NO: 14500 - DNA, 1157 bp, Glycine max
  Gm_smallRNAprecursor_7333
aagaccagtaaaacaactaccaagaagattcgcaccagaaatcatgtccaaaattaaggaagagatcgaaaggctgctgaggtgtaaattcatcagatctgccaggtatgtcgaatggctagcaaatatagtccctgtcattaaaaagaatggaactcttagagtatgcatagattttagggatttaaataatgctacacctaaagatgaatatgctatgccagtagcggaaatgttggtagattcagcagctggcttcgaatttttaagcatgttagatggttattctgggtataaccaaatatttattgctgaaagtgatgtgtcaaaaacagcatttcgatgtcctggtgctttaggcacttatgaatgggtggttatgccctttgggttgaaaaatgctggggccacttatcaaagggccatgaattccatgtttcatgattttattgacacatttatgcaagtttatattgatgatataatcatcaaatcctcctcagaagatagccatttggattaccttaggcaatctttcgaactaatgaggaaacatggattaaaaatgaatccattaaagtgtgctttttgtgtgcgtgcaggagatttccttggttttgtggtgcataaaaaaggcattgagataaatcaaaataagacaaaggctattcttgagacgaagcctccttcgaccaaaaaacagcttcaatctttgctaggaaaaatcaacttcttgaggcgattcatttcgaatctaagtggcaaagctcaaattttttcgccattacttcgactcaagaaagatgaaccattcaaatggaatgaagaccatcaaaaggctttcgatgaaattaaagaatatctgatcaagcctcctgtgttaatgcctcctagtcgaaacaagactatgaagttgtatattgctgcgtctgacaagaccattggtagcatgttggctcaggaatatgatgatggcatagaacatgcaatttattatcttagtcgtgtactaaatgatgcagaaactagatatactgccatagaaaaactttgtctttgtttgtatttctcttgtgcaaaacttaagcaatatataaagcctgttgatgtttatgtgtattctcattatgatattattaagcacatgttgtcaaaac

SEQ ID NO: 14501 - DNA, 1175 bp, Glycine max
  Gm_smallRNAprecursor_7334
aagagatcgaaaggctgctgaggtgtaaattcatcagatctgccaggtatgtcgaatggctagcaaatatagtccctgtcattaaaaagaatggaactcttagagtatgcatagattttagggatttaaataatgctacacctaaagatgaatatgctatgccagtagcggaaatgttggtagattcagcagctggcttcgaatttttaagcatgttagatggttattctgggtataaccaaatatttattgctgaaagtgatgtgtcaaaaacagcatttcgatgtcctggtgctttaggcacttatgaatgggtggttatgccctttgggttgaaaaatgctggggccacttatcaaagggccatgaattccatgtttcatgattttattgacacatttatgcaagtttatattgatgatataatcatcaaatcctcctcagaagatagccatttggattaccttaggcaatctttcgaactaatgaggaaacatggattaaaaatgaatccattaaagtgtgctttttgtgtgcgtgcaggagatttccttggttttgtggtgcataaaaaaggcattgagataaatcaaaataagacaaaggctattcttgagacgaagcctccttcgaccaaaaaacagcttcaatctttgctaggaaaaatcaacttcttgaggcgattcatttcgaatctaagtggcaaagctcaaattttttcgccattacttcgactcaagaaagatgaaccattcaaatggaatgaagaccatcaaaaggctttcgatgaaattaaagaatatctgatcaagcctcctgtgttaatgcctcctagtcgaaacaagactatgaagttgtatattgctgcgtctgacaagaccattggtagcatgttggctcaggaatatgatgatggcatagaacatgcaatttattatcttagtcgtgtactaaatgatgcagaaactagatatactgccatagaaaaactttgtctttgtttgtatttctcttgtgcaaaacttaagcaatatataaagcctgttgatgtttatgtgtattctcattatgatattattaagcacatgttgtcaaaacctattctacacagtagaattggaaaatgggctttagcattaacagaatattctttaacgtacaagcctttgaaatct

SEQ ID NO: 14502 - DNA, 1110 bp, Glycine max
  Gm_smallRNAprecursor_7335
tattgtagatcactcagtggtcgaaatgccgcaagactatgtcgatacagagccttggattttgtatttcgatggttcgaaacacaaacatggaactggaattggaattttaataatatcccccaataaagttccaactaaattcaaatttaaaatcaaaggactttgttctaataatgaggctgagtatgaggctctaattacatgccttgaaattttaattagcctgggggcaagaaatgttaacataaggggtgattcagaattagtgttgaggcaattaacacaagaatacaaatgtgttaatgaacatttagcaaaatattttgttatagcaagttctcttctgaatcatttcgattacattaacattgagcatatacctcgacaagaaaaccaagaagcaaatgatctagcccaaatagcttcagggtacaaaatgtcgaaggaaaagttaactcagttgatcgaaataaaagataaactggtgttaccagagccattaagcactaaattgccaatgccaaaacttgtgggggcaagtacaccacaaaataatgaagatgaaagcatggatgatctccagggaaaaattcaaattttggccattgacaatatgttagataatgattggagaaagtccatggttgaatatttggaaaatccaataggtaatgtggctcgaaagatcaaatatagggctttaaattacgtgattatgggaaatgatttgtttaaaaagactgcagaaggagtgttgctgaaatgtctaagcgaatcagaagcatacttggcagtttcccatgttcacagtggggcttgtggatcacatcaagcaggccacaaaatgaaatggcttctatttcgacaaggtttgtattggccttcgatgttaaaagactgcatagaatttgctaaaggttgtcaggaatgccaaaagcatgcagggattcagcatgtacctgctagtgagttacactccataatcaaaccttggcctttcagaggatgggctttggacctaattggtgaaatcaagcctgcctcttctaagaaccagcgttatattatagttggtatcgattactttacaaaatggatcgaagcagt

SEQ ID NO: 14503 - DNA, 1082 bp, Glycine max
  Gm_smallRNAprecursor_7336
cagtggtcgaaatgccgcaagactatgtcgatacagagccttggattttgtatttcgatggttcgaaacacaaacatggaactggaattggaattttaataatatcccccaataaagttccaactaaattcaaatttaaaatcaaaggactttgttctaataatgaggctgagtatgaggctctaattacatgccttgaaattttaattagcctgggggcaagaaatgttaacataaggggtgattcagaattagtgttgaggcaattaacacaagaatacaaatgtgttaatgaacatttagcaaaatattttgttatagcaagttctcttctgaatcatttcgattacattaacattgagcatatacctcgacaagaaaaccaagaagcaaatgatctagcccaaatagcttcagggtacaaaatgtcgaaggaaaagttaactcagttgatcgaaataaaagataaactggtgttaccagagccattaagcactaaattgccaatgccaaaacttgtgggggcaagtacaccacaaaataatgaagatgaaagcatggatgatctccagggaaaaattcaaattttggccattgacaatatgttagataatgattggagaaagtccatggttgaatatttggaaaatccaataggtaatgtggctcgaaagatcaaatatagggctttaaattacgtgattatgggaaatgatttgtttaaaaagactgcagaaggagtgttgctgaaatgtctaagcgaatcagaagcatacttggcagtttcccatgttcacagtggggcttgtggatcacatcaagcaggccacaaaatgaaatggcttctatttcgacaaggtttgtattggccttcgatgttaaaagactgcatagaatttgctaaaggttgtcaggaatgccaaaagcatgcagggattcagcatgtacctgctagtgagttacactccataatcaaaccttggcctttcagaggatgggctttggacctaattggtgaaatcaagcctgcctcttctaagaaccagcgttatattatagttggtatcgattactttacaaaa

SEQ ID NO: 14504 - DNA, 1086 bp, Glycine max
  Gm_smallRNAprecursor_7337
gtttctgaatcgagttagcggccttctcctggagttccttgcgtttggcctgctctgttacaattttctgccttagatcatcgacctgagacagcaaattcgtaatagttgcctcccaagaggaaatgttatcatcacaggctttgatctcagaagatccttctttcgcctctttggtgagacgttcgacttcatgttgagcagctcgggctttctcgagtagaaggatatgtgcctgtttctgggcatccagtctggcgtcattttcgcgttttttctgcacagtacttgcaaattgatcgataatggactcgatttggataactttgcctagaatctcatcagaggtaagggggttgtgcaatttcttcaaaaaattcaggtgcccaaaagcagcagaggggttctcttcaatggatttaagtacgtctgcccgtgcgtattccattgataacttcaagagcaggcaatcttggcgtactgaggagtttatgtcggcatcagatgaggacgaagcaccaggaatcttttcacttgaagtattggcttgacttgtgttcatcaggagtcgaagggctgcagcagggtcttcgtcttgcatttgaatgaatgtatcttctgcgatccctatgctagcggaaagcttagatgtcgaagacgccgggtaaatgtccgaacctccagcttcagcctcttgtatggcctcttcatcggaaaagttttcttcagatgaacttttctgactcgatccatgaggactgctggatccaataccttgaccttcaccctgttcctcaacattcactgcatccgtctcaggagcgggagatgttcgagcacatgagggtatttcttctacagaaacattttgttgtacctgattcgaattgtcatggaaaaggttaacaaatagtttcgtataagctatgattaaaatcacattaagaatgatacctcgatggtaggttgttcttgtggtaagttcggttgctcgacagggttgcccatctcagcaatagagggagtagcctctgcttcagtgccgtcaacatcagtcgaaggtggttggacgtcaacaggttgatt

SEQ ID NO: 14505 - DNA, 1035 bp, Glycine max
  Gm_smallRNAprecursor_7338
gaagaacagtggcgaagttcggaaatgcggtgaggttgatgatgaaaggaataacgagtatctggaaataggaaagtttcgccggaaataatggaagcaaagaagaagaaaaggttttggaagcaaagaagaagaaaggttttggaagaagctgaaggggttttgtctggagttctggcgctatttatggagtttcactttaaaaaagggaaaaaaacaatataataagaatcaagggtcaaaaatcaatcacatcagatttcccttttgactccccagcgtgacacgtgtcccactctgcctagaaaggtggaattaatgatgggtagtgggaaatcgaggcgacggttacacagtgaacgtgcgatcatgacgccgtttcaggaagactggtagaagaagagaaaaaatgtcaacttctcatcttccttcgatctcgaatcgaagcacacattttttgggggcaatttgttagcccatatttttgatgagctaaaatatgctctaaatacgcattagatgtcgtcttgaatttcgaagcgtattaaagagcaagagtctggtcagatcctgttcgaatcgaaaagaaagaagaggtgattgaaagggattcacgggatcaaagaagtatttataaagtataaggctaagacaagaaagagggcttcgaaccattgggcgattcgaactggtgtatggtcgagtcgaagtcgaggcagcaagagttctggacttagcgcaatttctgacaaaacttcacaaaatcagttcgatttcgagtaatgtggataaccgttctaaggagcagttatatgcatgcaaggtatacgtagcaggacacttggcattaggatagtgttcgaccgttagggcagtttattttcgaatgtctatatatagcagttttttagtcagatttcagggtcgcaaatcattactacaagtccttatatactcaaagtacccagcgcagagagaaacgagtacgcaaggaaaatgtatgattgtgaaccattttaagtttctgtaaacttt

SEQ ID NO: 14506 - DNA, 1051 bp, Glycine max
  Gm_smallRNAprecursor_7339
ggaaacaagaagagaaggtaactcttctgaacttatcttttactcttaacgtcttgcctcatatttctttattttttcagagtcaaaagaaagatgatagcattgatactaccacgacttcaaaacgctcgaagcatgcggtcgtcgaattagacgaagagaaagatgcaagttttatttctaatgtcaatattatagctttctttcaagtctatattctgacaaatctttaccctcgtaatgcaggaagaagaggaaagacctcttataagaaaaagaaagttacctgcgacttcgaccaagtctgctgaacaaacagaggcaggcaattcccaggctcaaatgcctaagaagaaaaagaaagtgaagcaggtcgagcctgaaccttctgtggctgttgagggtggtgagccaatcaagaagaaaaagaaaaagaccaagccttcaacagaacaaggtgacaatcaacctgttgacgtccaaccaccttcgaccgatattgacggcactgaagtagaggctactccttctattgctgagatgggcaaccctgtcgatcaaccggactcaccacaagaacaacctgccgtcgaggtatcatcctcttaatgtgttttaaatcatagcttatacgaaactatttgttaacctttttccatgataattcgaatcaggtacaacaaaatgtttctgtagaagaaataccctcacatgctcgaacatctcccgctcctgagacggatgcagtgaatgttgaggaacagggtgaaggtcaaggcattggatccagcagtcctcatggatcgagtcagaaaagttcatccgaagaaaacttttccgatgaagaggccataaaagaggctgaagctggaggttcggacatttacccggcgtcttcaacatctaagctttccgctagcatagggatcgcagaagatacattcattcaaatgcaagacgaagaccctgctgcagcccttcgactcctgctaaacacaagtcaagccaacacctcaagtgaaaagattcctggtgcttcgtcctcatctga

SEQ ID NO: 14507 - DNA, 1038 bp, Glycine max
  Gm_smallRNAprecursor_7340
ggttataaccagaataaccatctaacatgcttaaaaattcgaagccagctgccgaatctaccaacatttccgctactggcatagcatattcatctttaggtgtagcattatttaaatccctaaaatctatgcatactctaagagttccattctttttaatgacagggactatatttgctaaccattcgacatacctggcagatctgatgaatttacacctcagcagcctttcgatctcttctttaattttggacatgatttctggtgcgaatcttcttggtagttgttttactggtctttttccctccttaatcggtaatttcatttcgaccatttctctgcttaacccaggcatttcgtggtaatcccaagcaaaacagtctttaaattctctaagaagaggcaccagcttttcttttagacttgaggtgatattggcactgatataggttggcctttttatcgagccatttccaatgtcgatctcctccaaaggatcttgagcctgcatctttggcacctcacttatgggatttttctcaaaacccagcggctcatcgtcataaatgcaatccagtcttcgatcctttgtttctttgttttcatgatcttcgatcttggcttcaactgccatattttgttgggattcagcctcaaaggccgtatttagtctattttcggccatataagccgtaattctggcccatgcagtggcctcagtcatattaatcttcatatatattccacccagttggtggaatgactccatcttcagagggaacagcatcaatttcctccctctcccatataaacccataggtaggatggagtttgacagagtggataacattgtcacttgattcgaaaacagcctccttgtcaccacaaggtgctatgttagccaactttttgtcaaaggtttgtgcagtaacattatcaacctctgacttatagaagctttgatctgcctctatattttcaacaatcccatcttccctccagataatgagtttctggtggagggtagatggcacagcc

SEQ ID NO: 14508 - DNA, 1040 bp, Glycine max
  Gm_smallRNAprecursor_7341
agttgagaatgttggaatcaacaaagagctcattgatggaggagcagctgtcaacttaatgcctcgatctatgctctacaagatcgggaaacatgacactgatctatctgcccacaacattgtgctttcgaattatgagggtaaaactggctattctttgggagccattcaagtagatgttgctgtaggcagtatagttcgaccaactcttttcctggtgatacagtctaaggctaattttaacttgctattaggaagggagtggattcatggagttggggctgtgccatctacccttcaccagaaactcgttatctggagggaggatgggattgttgaaaatatagaggcggatcaaagcttctataagtcagaggtcgatagtgttactgcacaaactttcgacaaaaagttggctaacatagcaccttgtggtgacaaggaggctgttgtcgaatcaagtgacaatgttatccactctgtcaaactccatcctacctatgggtttatatgggagagggaggaaattgatgctgttccctctgaagatggagtcattccaccaactgggtggaatatgtatgaagattaatatgactgaggccactacattggccagaattacggcttatatggccgaaaatagactaaatacggcctttgaggctgaatctcaacaaaatatggcagttgaagccaagatcgaagatcatgaaaataaagaaacaaaggatcgaagactggattgcatttatgacgatgagccgctgggtttcgagaaaaatcccgtaagtgaggtgccaaagatgcaggctcaagatcctttggaggaaattgacattggagatggctcgatgaaaaggccaacatatatcagtgccaatatcacctcaagtctaaaagaaaagttggtgcctcttcttagagaatttaaagactgttttgcttgggattaccacgaaatgcctgggttaagcagagaaatggtcgaaatgaaattaccgattaaggagggaaaaagaccagtaaaacaactacca

SEQ ID NO: 14509 - DNA, 1175 bp, Glycine max
  Gm_smallRNAprecursor_7342
aagagatcgaaaggctgctgaggtgtaaattcatcagatctgccaggtatgtcgaatggttagcaaatatagtccctgtcattaaaaagaatggaactcttagagtatgcatagattttagggatttaaataatgctacacctaaagatgaatatgctatgccagtagcggaaatgttggtagattcggcagctggcttcgaatttttaagcatgttagatggttattctggttataaccaaatatttattgctgaaagtgatgtgtcgaaaacagcatttcgatgccctggtgctttaggcacttatgaatgggtggttatgccctttgggttgaaaaatgctggggccacttatcaaagggccatgaattctatgtttcatgattttattgacacatttatgcaaatttatattgatgatataatcatcaaatcctcctcagaagatagccatttggattaccttaggcaatctttcgaacgaatgaggaaacatggattaaaaatgaatccattaaagtgtgctttttgtgtgcgtgcaggagatttccttggttttgtggtgcataaaaaaggcattgagataaatcaaaataagacaaaggctattcttgaaacgaagcctccttctaccaaaaaacagcttcaatctttgctaggaaaaatcaacttcttgaggcgattcatttcgaatctaagtggcaaagctcaaattttttcgccattacttcgactcaagaaagatgaaccattcaaatggaatgaagagcatcaaaaggctttcgatgaaattaaagaatatctgatcaagcctcctgtgttaatgcctcctagtcgaaacaagactatgaagttgtatattgctgcgtctgacaagaccattggtagcatgttggctcaggaagatgatgatggcatagaacatgcaatttattatcttagtcgtgtactaaatgatgcagaaactagatatactgccatagaaaaactttgtctatgtctgtatttctcttgtgcaaaacttaagcaatatataaagcctgttgatgtttatgtgtattctcattatgatattattaagcacatgttgtcaaaacctattttacacagtagaattggaaaatgggctttagccttaacagaatattctttaacatacaagcctttgaaatct

SEQ ID NO: 14510 - DNA, 1110 bp, Glycine max
  Gm_smallRNAprecursor_7343
tattgtagatcactcactgatcgaaatgccgcaagactatgtcgatacagagccttggattttgtatttcgatggttcgaaacacaaacatggaactggaattggagttttaataatatcccccaataaagttccaactaaattcaaatataaaatcaaagggctttgttctaataatgaggctgagtatgaggctctaattacaggccttgaaattttaattagcctgggggcaagaaatgttaacataaggggtgattcagaattagtattgaagcaattaacacaagaatacaaatgtgttaatgaacacttagcaaaatattttgttatggccagttctcttctgaatcatttcgattacattaacattgagcatatacctcgacaagaaaaccaagaagcaaatgatttagcccaaatagcttcagggtacaaaatgtcgaaggaaaagttaactcaattgatcgaaataaaagataaactggtgttaccagagccattaagcactaaattgccaatgccaaaacttgtgggggcaagtataccacaaaataatgaagatggaagtatgaatgatctccaggaaaaaattcaaattttggccattgacaatatgttagataatgattggagaaagtccattatcgaatatttggaaaatccagtaggcaatgtggctcgaaagatcaaatatagggctttaaattacgtgattatgggaaatgatttgtttaaaaagactgcagaaggagtattgctgaaatgtctaagtgaatcagaagcatacttggcagtttcccatgttcacagtggggcttgtggatcacatcaagcaggccataaaatgaaatggcttttatttcgacaaggtttgtattggccttcgatgttaaaagactgcatagaatttgccaaaggctgtcaggaatgccaaaagcatgcagggatacagcatgtacctgctagtgagttacactccatactcaaaccttggcctttcagaggatgggctttggacctaattggtgaaatcaagcctgcttcttctaagaaccagcgttatattatagttggtatcgattactttacaaaatggatcgaagcagt

SEQ ID NO: 14511 - DNA, 1082 bp, Glycine max
  Gm_smallRNAprecursor_7344
cactgatcgaaatgccgcaagactatgtcgatacagagccttggattttgtatttcgatggttcgaaacacaaacatggaactggaattggagttttaataatatcccccaataaagttccaactaaattcaaatataaaatcaaagggctttgttctaataatgaggctgagtatgaggctctaattacaggccttgaaattttaattagcctgggggcaagaaatgttaacataaggggtgattcagaattagtattgaagcaattaacacaagaatacaaatgtgttaatgaacacttagcaaaatattttgttatggccagttctcttctgaatcatttcgattacattaacattgagcatatacctcgacaagaaaaccaagaagcaaatgatttagcccaaatagcttcagggtacaaaatgtcgaaggaaaagttaactcaattgatcgaaataaaagataaactggtgttaccagagccattaagcactaaattgccaatgccaaaacttgtgggggcaagtataccacaaaataatgaagatggaagtatgaatgatctccaggaaaaaattcaaattttggccattgacaatatgttagataatgattggagaaagtccattatcgaatatttggaaaatccagtaggcaatgtggctcgaaagatcaaatatagggctttaaattacgtgattatgggaaatgatttgtttaaaaagactgcagaaggagtattgctgaaatgtctaagtgaatcagaagcatacttggcagtttcccatgttcacagtggggcttgtggatcacatcaagcaggccataaaatgaaatggcttttatttcgacaaggtttgtattggccttcgatgttaaaagactgcatagaatttgccaaaggctgtcaggaatgccaaaagcatgcagggatacagcatgtacctgctagtgagttacactccatactcaaaccttggcctttcagaggatgggctttggacctaattggtgaaatcaagcctgcttcttctaagaaccagcgttatattatagttggtatcgattactttacaaaa

SEQ ID NO: 14512 - DNA, 1137 bp, Glycine max
  Gm_smallRNAprecursor_7345
gtaggcaatgtggctcgaaagatcaaatatagggctttaaattacgtgattatgggaaatgatttgtttaaaaagactgcagaaggagtattgctgaaatgtctaagtgaatcagaagcatacttggcagtttcccatgttcacagtggggcttgtggatcacatcaagcaggccataaaatgaaatggcttttatttcgacaaggtttgtattggccttcgatgttaaaagactgcatagaatttgccaaaggctgtcaggaatgccaaaagcatgcagggatacagcatgtacctgctagtgagttacactccatactcaaaccttggcctttcagaggatgggctttggacctaattggtgaaatcaagcctgcttcttctaagaaccagcgttatattatagttggtatcgattactttacaaaatggatcgaagcagtccctttgccaaatgttgatcaggaagcagtaattagttttattcaaaatcatattatttataggtatggtattcctgaaacaattaccactgatcaaggttcagtttttactggacgaaagatgcaagaatttgcccaaaaaactggctttcgattattaacctcaacaccatattacgcgcaagcaaatggtcaggtcgaagcagccaataagattgtaattaacttgattaaaaaacacattgcccaaaagccaagaaattggaataaaacgttagatcaagttctatgggcatgtagaaattctcctaaggaatcaactaatactaccccatttcgactgacttatgggcatgatgctgtacttccggtcgaaatacatttgcaatcagccagggtacaaaaacaaatggacattccaatcaaccattattggaaaatgatgtcagatgagttagttgatttagatgaggagagattaagagcattagaagttttgactaaacaaaaagaaagagttgctaaagcttataataagaaagtgaagtcaaaaacttttaatgttggagatttagtttggaaggttatcctgcccatggatagtaaggatcgagccttgggcaaatggtccccaaattgggaaggaccgtttaaaataattcagatctattcgaatggtgcttatgaattagag

SEQ ID NO: 14513 - DNA, 1165 bp, Glycine max
  Gm_smallRNAprecursor_7346
tgcttgttgaccttgacaatatgcgtatcaagacatggatacatgcaaggcttttagtttaacttgttaaaatttgttttgtttgaaacagagatggatatgaattcaagtttattgagaagattgttgagcgggtatctagggagattaatcctcgtactttacatgttgcggattacccagttggactagagtcacgagtgctagatgtaaggagacttttggatgctggatctgatgatggtgtccacatgatagggattcatggaatgggcgggctaggaaaatcaacacttgctcgagctgtctacaatgaattgataattgctgagaagtttgatggtttttgctttcttgcaaatgtgagggaaaagtcagacaaaaaagacgggttagaacacctccaaagaatccttctttcagaaatactcggagagaagaacatcagcttaacaagtacgcaacaaggaatttcaatcatacagtctaggctcaagggaaagaaggttctcttgattctagatgatgttaacacacatgggcaattacaagcaattggaagacgtgattggtttggtcccggcagcaaaatcatcatcacaactcgggacgaacaattgctagcatatcatgaagttaatgaaacatatgagatgaaggaattgaatcagaaagacgctcttcagttgcttacatggaacgcttttaagaaggaaaaagctgatccaacttacgtggaggtcttgcatcgtgtagtagcatatgcttctggtcttccattggcgttggaagtaataggttcccacctggttggaaaaagtatagaagcatgggaatctgccatcaaacaatataaaagaattcccaagaaggaaattctagatgtacttacagtaagctttgatgctttggaggaagaagagcagaaagtttttcttgacattgcttgttgcttgaaaggatggacattgacagaggtcgaacatatacttccgggtctttatgatgactgcatgaaacataatattggggtgttggttgaaaaatctctaataaaggttagttggggggatggtgtagttaacatgcatgacttgattcaggacatgggcaggcgaatagaccaacaaagatcctcaaaagagccagggaagcgaaggagatt

SEQ ID NO: 14514 - DNA, 1194 bp, Glycine max
  Gm_smallRNAprecursor_7347
tttctggaaaatattcaagactggaacattgagaaagttcaagtgtttgaagagaggtcaagttgagaggcggaaaactcttaagcttgctgcaaccatacgcactcaattttttaagtttattcagaaaaccaattgagtcatcaactgcaactaaactctcacactcttcaaatgaaagttccctcaaatttgggagatcagatacatcaggtatctgtgttaaaaatttgcagttgtcaaacttcaaaactgttagatgcccgaacttctgcaaaggaaaaaaaaaaataaaataaataagaaccaaatgaataaatttaaagtgactttattaattcacgggattcaggaaacagtctctttgcatatgcaagggtaaggctgcgtacaacatctctcccccataccttcgcatagcgaagagcctgtgggctacgaagtttattaattcacgggatgaggaaaatatactctttaaacttgccttcgatgggccatggaactcaaacgacgtcatacaactgtcaggtaacttgcatataacaagattgttcggatgaaagttagatggtaaacaatttgaaggatatctgtgccattccagtactctcaaaccttctggaaaataattgggacctttggaaaatttgtcatttctaataataagtattttaaggttttccatcttcatgaaggcgttttcattccattccactgtttcttctttgtcagatatggaggaatccaggcatatgatttcaattttactagttccctgttaatacaaaaaggcacgaatcaaccacaatacaacttgtgtgaaatatcaattgactcgcttagagaaattacaaattatcaagaaaaagataactacaatgtaactttgagatagaaaaaaaaacaaaaatcaactattcatgagttcactcacggtgttgtctttaaaaacttgaattatatcttttggtaaccataatctcttgcacttccctggctcttgtggtgatctcttccgctcaatttctctagccatgtcctgaatcaagtcgtgcatttcaacagtatcagtaccataacagttaagctttatgagagatttttcaaccaacaccccaatatgatgcttcttgcagttaccataaagagcacggagtatatcatcaacctctgtccatttataccctctga

SEQ ID NO: 14515 - DNA, 1194 bp, Glycine max
  Gm_smallRNAprecursor_7348
aactgaacaattccacagccaaacatggataactgttggagtccaataagattttgaaatgaaaatggcaattcttttatcggaaggccatgcaaatcaagtctctctatgttttccatctctcctaatatttctggaaaatactcaagactggaacagtgagaaagttcaagtgtttcaagagaggtcaagtggagaggcggaaaactcgtaagcttcctgcaaccataagcattcaattttttaagtttattcagaaaaccaattgagtcatcaactgcaactaaactctcacaccattgaaatgaaagttccctcaaatttgggagatcagatacatcaggtatctgtgttaaaaatttgcaccagtcaaacttcaaaactgttagatgccccaacttctgcaaaggaaaaaaaaaaaaagaactaagaaacaaatgaacaaatttaattcatggaatgaggaaaatatactctttaaacttgccttcgatgagccatggaactcaaatgacgtcatggaactgtcaggtaacttgcatataacaaggttgatcggatcaaagttagacggtaaacaatttgaaggatatctgtgccattccagtactctcaaaccttgtggaaaataattgggacctttggaaaattttccatttctaataataagtattttaaggttttccatcttcatgaaggcgttttcattccattccactgtttcttctttgtcagatatggagaaatccacatatatgatttcaattttactagttccctattaatgcaaaaaggcacgaatcaaccacaaatccacaatacaacttgtgtgaaatatcaattgactcgcttagaaaaatttacaaattataaagaaaaagttaactacgatgtacatatgagaaagacaaaaaaaaaaaaaaaattcaactattcatgagctcactcaccgtgttgtgttttaaaacttgaattatatcttttggtgaccataatctcttgcgcttccctggctcttctggtgatctctgccgctcaatttctctacccatgtcctgaattaggtcatgcatttcaactataccatgcctaacctttgtgagagatttgtcaaccaacacatcaatgtgatgtttcatgcagttatcataaagaccgcgtagcatatgttcaacctctgtcaatttgcatcct

SEQ ID NO: 14516 - DNA, 1054 bp, Glycine max
  Gm_smallRNAprecursor_7349
aactcttttattccaactttctttctttctcctttgcttcttttttcccccctccctgcactctctttctttgtttaatgttacgtgcacaagtaattcttacacgaacataatgtttataaatataatcaattgaaagcttaagatatatttaaatcattataaaatttatgctcaaagtcacgttaagttagttacttaactgttatattagattgctaatttcatatgttagtttgcacaaacattgctttatacttagatgtgaatgggcttgaatactttttgagctagcctgacaagaagtgtggctaggctagaaaatgttagagtgttgctaggtgcacccagcattattgctggtgcacccagcattcttttaaaataacaaaactgtccttactaatttctccccttatagatcaagttgatccgtaaattgatttttaagacttacggatcaacttgatctgtaagtcttaaaaatcaacttacggatcaacttgatccgtaaaagacttacggatcaagttgatccgtaaaatacttatggatcaagttgatccgtaagttttaaaaattaacttacggatcaacttgatcggtaagaaatatttttgtctttttgtgattaatgctgggtgcaccaccaataatgctaggtgcacctagcagcactcaaaatatttaagcccgaacaactttattggctcgagttgtgaacaacccaataatcaatctcttacacactgtatcaggctgctattcctacccccgttttttctcagcccatattgtgtttgctgcttgtcccaataatcaatctcttacacactgtatcaggctgctattcctacccccgttttttctcagcccatattgtgtttgctgcttgtcccataaatattcctgtcagaactgtgtttcggttacataatatacacagtgcaaacaactttaaaaataagacaccgactattttcaattatcattttattttttagattttattatttaagctagttttttttaactgacatagcgagtgaagtag

SEQ ID NO: 14517 - DNA, 1041 bp, Glycine max
  Gm_smallRNAprecursor_7350
caactttctttctttctcctttgcttcttttttcccccctccctgcactctctttctttgtttaatgttacgtgcacaagtaattcttacacgaacataatgtttataaatataatcaattgaaagcttaagatatatttaaatcattataaaatttatgctcaaagtcacgttaagttagttacttaactgttatattagattgctaatttcatatgttagtttgcacaaacattgctttatacttagatgtgaatgggcttgaatactttttgagctagcctgacaagaagtgtggctaggctagaaaatgttagagtgttgctaggtgcacccagcattattgctggtgcacccagcattcttttaaaataacaaaactgtccttactaatttctccccttatagatcaagttgatccgtaaattgatttttaagacttacggatcaacttgatctgtaagtcttaaaaatcaacttacggatcaacttgatccgtaaaagacttacggatcaagttgatccgtaaaatacttatggatcaagttgatccgtaagttttaaaaattaacttacggatcaacttgatcggtaagaaatatttttgtctttttgtgattaatgctgggtgcaccaccaataatgctaggtgcacctagcagcactcaaaatatttaagcccgaacaactttattggctcgagttgtgaacaacccaataatcaatctcttacacactgtatcaggctgctattcctacccccgttttttctcagcccatattgtgtttgctgcttgtcccaataatcaatctcttacacactgtatcaggctgctattcctacccccgttttttctcagcccatattgtgtttgctgcttgtcccataaatattcctgtcagaactgtgtttcggttacataatatacacagtgcaaacaactttaaaaataagacaccgactattttcaattatcattttattttttagattttattatttaagctagttttttttaactgacatagcgagtgaagtag

SEQ ID NO: 14518 - DNA, 1064 bp, Glycine max
  Gm_smallRNAprecursor_7351
caacatacgtacatgcaatattgtaaatgcatacgtacagagcagaaattaattcgagtcccataattgcaagttcttgcatcatcttgtttgggatatctaaggaactgcatgatcaccagagccagcatatacaaacagtcttttggcaatcctcaaaatatatatagacatcataggataaaattcagtcagtacgtataaagagtagtacatcttcatatggttggcatacaatgaagaagctagaaaatttaagaacacattaacagtcacatataggaacagaatccatgatcgttaatttgatttctttttctttatatacctaagattacccagttacctgttatttaataagtggcaaatgaaatatgcatgtgatgatttgcacttgagtatatcatgcaattgtagtattaatatagaactttcaagtatatatatgctacagacaaaagactagtatgaaatgaagaggagagggagtaaaaggaggtggtgacagatagagaatgagcacacagcttttagcacgaaagatccatgctaggaaagagccaagtgctcactctcttctgtcacctccacaaattaacaaacctgaagcatacatagactattctgtaattgattcacttctttgttaattatcaacccaatggcagaattgaaggagatacatattatgagttttcttagaatatatatatatatatatatatatatcttctgtaattaacttgatggtgaagactacagagtggtttggctctcaatatataggggagggactgatgagaaggtatctacctcccaataatgaaatatgcccgtagctgacgaagataaattctctttcatttcatctaacgattctaattggttcttttttctgccaaactaataaccatacaatgctttcaaaagaaaaatttggggcaatgatatactttgtaaaggatgtactttgcctcatagttgttgcaagttagcagccgtgccagctattcggttgcagttacctgagaataaatgtacaacaggtgtctactttgtttaat

SEQ ID NO: 14519 - DNA, 1064 bp, Glycine max; identical to SEQ ID NO: 14518
  Gm_smallRNAprecursor_7352

SEQ ID NO: 14520 - DNA, 1080 bp, Glycine max
  Gm_smallRNAprecursor_7353
attgaatggatctgcaggagaattctttttttttttttttttttacttctaataaatgaatctatcataaagaatgtaaacatacttgctctggttttgagtttcgtagtcattttaaatttgttgcattccagcacaaataagactcttttaagtcctaactctttcgtttttgaaacattttaaaatagtatatatcatatcaataaaaacatactccaaggattatgtttcagatagatgagcactgaaaagttattatatcatacttactaaagggtgttgctaggtgcacccagcattattgctggtgcacccagcacttaacgtgaaaaggtaaaaatattcctgtgtatttttaaaaatatttttttgcatccagctcattcaggttgatccgcatatgcaatgagttgatccgcataggttttaattgatccgcagttgatatagatgattcacaagcttcttacggatcaagttgatccgcaagtagatttttaagacttacggatcaagttgatccataagtcttttacggatcaagttgatccgcaagttgatttttaagacttacggatcaagttgattcgtaagtcttgtacggatcaagttgatccgcaagttgatttttaagacttatggatcaacttgattcgtaagtcttttacggatcaagttgatccgtaaaggaagaaagaaggcagggataatttttccgttttaaaagaatgttgggtgcaccagcaataatgctcagtgcacctagtaacactccttactaaaagatgtgccatattgatgttggtactgacagatgaaactggagttataagatgttggattgatagcttttcggtgggtcaaagttagcttaattgtagttttttttttttttgggggggggggggggggggggtggtcaaagttaatttatttctgttaatcatagatctccttcacagttaaaacctaatccagatctgtgttgattgtcttggtcccggcccactcccggagttccggtcgatccattaggtccatgccaatatagatggcccagtgacccatgcctcatat

SEQ ID NO: 14521 - DNA, 1080 bp, Glycine max; identical to SEQ ID NO: 14520
  Gm_smallRNAprecursor_7354

SEQ ID NO: 14522 - DNA, 1052 bp, Glycine max
  Gm_smallRNAprecursor_7355
ttttttttttttttttacttctaataaatgaatctatcataaagaatgtaaacatacttgctctggttttgagtttcgtagtcattttaaatttgttgcattccagcacaaataagactcttttaagtcctaactctttcgtttttgaaacattttaaaatagtatatatcatatcaataaaaacatactccaaggattatgtttcagatagatgagcactgaaaagttattatatcatacttactaaagggtgttgctaggtgcacccagcattattgctggtgcacccagcacttaacgtgaaaaggtaaaaatattcctgtgtatttttaaaaatatttttttgcatccagctcattcaggttgatccgcatatgcaatgagttgatccgcataggttttaattgatccgcagttgatatagatgattcacaagcttcttacggatcaagttgatccgcaagtagatttttaagacttacggatcaagttgatccataagtcttttacggatcaagttgatccgcaagttgatttttaagacttacggatcaagttgattcgtaagtcttgtacggatcaagttgatccgcaagttgatttttaagacttatggatcaacttgattcgtaagtcttttacggatcaagttgatccgtaaaggaagaaagaaggcagggataatttttccgttttaaaagaatgttgggtgcaccagcaataatgctcagtgcacctagtaacactccttactaaaagatgtgccatattgatgttggtactgacagatgaaactggagttataagatgttggattgatagcttttcggtgggtcaaagttagcttaattgtagttttttttttttttgggggggggggggggggggggtggtcaaagttaatttatttctgttaatcatagatctccttcacagttaaaacctaatccagatctgtgttgattgtcttggtcccggcccactcccggagttccggtcgatccattaggtccatgccaatatagatggcccagtgacccatgcctcatat

SEQ ID NO: 14523 - DNA, 1052 bp, Glycine max; identical to SEQ ID NO: 14522
  Gm_smallRNAprecursor_7356

SEQ ID NO: 14524 - DNA, 1068 bp, Glycine max
  Gm_smallRNAprecursor_7357
ccaacagaaaaagaacctacccattttttcacagaaaacaggactgttaaattcggacattaattaaattaaagtgggtattttccaattctttccttaaattaaattaaacagaaagaaaacaatttgaccggatcaaattacagaattatgcatcggcaaggctataaattcatcaggtaaagtgaatcctatatataacaaagccatatatatataaaatctctagattaagagattattatgtatatcacactgaaaaatcttccagagaaagagatcacatatatttactttacacacatcaacatcacacccccggtatataacaaagatgaaagagggttgtgagagttaccgtgaaagaaagataattaggatgagaaaagagaattgaagaggaagaagatgtgttcaccttgtatactctgaatcttgcaagtggtggtaagccagctaggataccaaattaaggcaattaaaagcctgaattgccatattctcccacagctttcttgagcttctagggcttaaaatgctggaagtggagagatataagatgcataagaagttcaagaaagctgtggaaaagcatgaccaggacttgagaggaaaattgagctcagatctcacacacacagcatctagactaatgaaggcaccaaaagttataatgagaaaaagggattgaggggtgtgtggagatataggggaaggaggaattagcataagaaagtaaaggagggtgagaagcgagaaataaccatgcccatacaaagtttctcgtggaccactctaccatttataatatcaatctaccagctttatagagaggagagagggagggggtgagagtagggttcacttacaaaggtgcaatttacccacaaaatggcttactttcccggtgagtgcgcagtgggtcacatacaaacacgtcagatgggtaaagaacaataatctttccaaaaaagacaaatcaagaaaagaaatgtaattgacaggcaaatgagattttaagcaacaaaaagaaaaatataaatatagagagagagcttttgtaatttg

SEQ ID NO: 14525 - DNA, 1068 bp, Glycine max; identical to SEQ ID NO: 14524
  Gm_smallRNAprecursor_7358

SEQ ID NO: 14526 - DNA, 1069 bp, Glycine max
  Gm_smallRNAprecursor_7359
ccaacagaaaaagaacctacccattttttcacagaaaacaggactgttaaattcggacattaattaaattaaagtgggtattttccaattctttccttaaattaaattaaacagaaagaaaacaatttgaccggatcaaattacagaattatgcatcggcaaggctataaattcatcaggtaaagtgaatcctatatataacaaagccatatatatataaaatctctagattaagagattattatgtatatcacactgaaaaatcttccagagaaagagatcacatatatttactttacacacatcaacatcacacccccggtatataacaaagatgaaagagggttgtgagagttaccgtgaaagaaagataattaggatgagaaaagagaattgaagaggaagaagatgtgttcaccttgtatactctgaatcttgcaagtggtggtaagccagctaggataccaaattaaggcaattaaaagcctgaattgccatattctcccacagctttcttgagcttctagggcttaaaatgctggaagtggagagatataagatgcataagaagttcaagaaagctgtggaaaagcatgaccaggacttgagaggaaaattgagctcagatctcacacacacagcatctagactaatgaaggcaccaaaagttataatgagaaaaagggattgaggggtgtgtggagatataggggaaggaggaattagcataagaaagtaaaggagggtgagaagcgagaaataaccatgcccatacaaagtttctcgtggaccactctaccatttataatatcaatctaccagctttatagagaggagagagggagggggtgagagtagggttcacttacaaaggtgcaatttacccacaaaatggcttactttcccggtgagtgcgcagtgggtcacatacaaacacgtcagatgggtaaagaacaataatctttccaaaaaagacaaatcaagaaaagaaatgtaattgacaggcaaatgagattttaagcaacaaaaagaaaaatataaatatagagagagagcttttgtaatttga

SEQ ID NO: 14527 - DNA, 1033 bp, Glycine max
  Gm_smallRNAprecursor_7360
agagaggatggtttggaaataagggaaacggattagggacgtagaaaagagaggagggtagcaaggatcatttacactttataagggtgagaataataatttgggggtaagaatagtaactcccaacccaataagtaagaagactagccgaagcctcgtcgcccgtcagtccgactttctaggcttccttttccttggttaggatatctgtaagatgttttcaagaattctccttgaatgttttaattatggatcatctactcatgacgaggatcccataaacatttgtcttggatagtaattgtgaaatagttagttagtatatgtaagtgaaataattcttcacatagtacatcttattccaaaggtaaaattataaaattgatcccccactttatcttcaatcacggatttggtccccctataatttaattcacaaatttggtcccctggttatataaattcctgcgaaattggtcctggaagcccgatttggacgttgaccgttaacctcagacgttgactgccacatgtcaatgccacatgtcaacgtcttagtagttccatgtaaagacttcatttttgtaggtaaaattacacttttggtccctcagttttactccaattttaattttggtcttcctataatttaattcacacatttggttccccagttttataaatccttttataaattattcctgcaaaattggtcttttgaatggtttagccacaggtgctagagacatggtaggtcttgataaatctcacacttttttttcatcgcaagtttttcactcacttggaacccagagaaaaaccactctatgtctctctcccactttcggggttgttcaacttgggaaagtggtgcatgaatcccaacctgggtctaaaattttcagatctcttactttaacaggttctgtaataatccccttttttttttttctttttttgctcccccatgcgatattatgtgtatacgactgcttaagtggtctatgtatgataatgatatttttgtttgaaa

SEQ ID NO: 14528 - DNA, 1098 bp, Glycine max
  Gm_smallRNAprecursor_7361
gaaagttaaatctcagaaaaaaaatctcaccaaaaaacaaaaaacaaaggaagacgtgagaacacatttaaatttatattatgattttgtatattatatatagataatacaattttaaataaatgaattgataagttaatattatttgagttaattatttttagttagaatgttatatatattatttgttaattttagtttgtaggttaatattattagttttagaaaatttacgtgattaaatatatgatacattgtacattattattatttttgtattacacgttgtttaaataaatttttgtatttcaatatttgtttgtattttaatttatttggtagtctatattttatttaattatttatttgttaattgtagaatatattatgttatttaattaaatttgtctatgtgtatgtatttgtagaatatatttaaattttattatttgtataatatattttgttatttatttaaagttatcttcacatctattttaatttatgtatagaatatattcaaaattgtccaattttatttattacaaatttatttatatatatatttaataacgtttttataaatgtgcgtaattttatttatattatctacaaataatttataaattgttttgggaatttattgcagtatcaatgacatcttcatcgtcgtgtccatcacatattaaaattaagtttggccctatcgatgctgatgtattatggatgcaacctaagcatgtttcagaacatttggaatgtagaagaagatcggaaattacatatcagacgagttgttcctacgtatcaaggggaagaagaaatttcagagcaaatttttccttttcttcgacaatctggtttcgcctagattaccaagatgggatacttaaaaataaatgtctcgttaattagtgctctgatagaaaaatggaggcaggaaacacatacgtttcacatgagatgcggagagtgtactgttactctccaagacgtctctgtattggtaggtataggtgtgaatggtttaccattaatcggtccaacaaatcttgattgggctgatttatgcgaggaattattgggagtcaaaccaca

SEQ ID NO: 14529 - DNA, 1076 bp, Glycine max
  Gm_smallRNAprecursor_7362
tgtattatggatgcaacctaagcatgtttcagaacatttggaatgtagaagaagatcggaaattacatatcagacgagttgttcctacgtatcaaggggaagaagaaatttcagagcaaatttttccttttcttcgacaatctggtttcgcctagattaccaagatgggatacttaaaaataaatgtctcgttaattagtgctctgatagaaaaatggaggcaggaaacacatacgtttcacatgagatgcggagagtgtactgttactctccaagacgtctctgtattggtaggtataggtgtgaatggtttaccattaatcggtccaacaaatcttgattgggctgatttatgcgaggaattattgggagtcaaaccacaagaaagtgaaattaaaggtagtgtggttaaattaagttggctggctcaccattttgcacaaataaataacgacgacgaagaacaaatacgaaggtttgcccgtgcatggatactaagattcattagaggtgtcttgttcattgacaaaagcagtaacaaagtttcgccaaggtaccttcaatttttacgtgactatgaagaatgtgacacatatgcatgggaagctgccatacttgattttctatacagagagatgtgcagtgccactgattataaaactaagaggtatacgcatcttactacaaatgtggacatactcattcccaagtagaaaatacatcattggggcacaggttagtcatttttaacagtgtctttcatttcaatagaataaatggttttagggtatattaaattttaatctttgtagatgactgcgacgtggaaaccaacatatcgacaatgatgatgtgagagtttttcgtcgcaagttggatattatgaaacgtcatgaggtaagaacatgctattgtatttgtaaaataaaaaattatatgtgttattttactaaaatgttcacaactatgttattatatgcaatttgtgtgggagccttacacatcaattgttatataattgttgcctcacgtttgtttagtcagaagtctcgcgtggtacgcggtggtgccactaa

SEQ ID NO: 14530 - DNA, 1057 bp, Glycine max
  Gm_smallRNAprecursor_7363
caatactctgtccggttgatgccactcaataacttggaaacaaattagtggcaccatcgcgtaccacgcgagacttccgactaaacaaacgggacgcaacaatgatataacgcttgatgtgtaagactctcacacaaacggcatataacaacatagttgtgaacattttagtaaaatagcacataactttttattttacaaatacaatagcatgttcttacttcatgacgtttcataatatccaacttacgacgaaaaactctcacatcatcattgtcgatatgttggtttccacgttgcagccacctacaaagattaaaatttaatataccctaaaaccatttattctattgaaatgaaaaacgctgttaaaaatgactaacatgtgccccaatggtgtattttctacttgggaaggagtcctctttggagccaaggttggacatcgttcctatgcccacatttgtaataagatgcacatacctcaaattgatttagttttataatcaatggcattgcatatctctctgtatagaaaaccaagtacggcagcttcccatgcatatgtgccacattcttcaaagtcacataaaaattgaaggtaccttagcgaaactttgttaccgcttttgtcaacgaacaagacacctccaatgaatctcagtatccatgcacggacaaaccttcgtacttgttcttcgtcgtcgttatttatttgtgcaaaatggtgagccagccaacttaatttaaccacactacctttaatttcgccttcttgtggttcgactcccaataattcctcacataaatcagtccaatcaaaatttgttggaccgattaatgataaaccatccacacttatacctaacaatacagagacgtcttggagagtaatagtacactctccgcatctcatgtgaaacgtatgtgttttcgacctccatctttctatcagagcactaattaatgagacatttatttttaagtatcccatcttgataatccaggcgaaaccagattgtcgaagaaaaggaaaaatttgctctggaattttttc

SEQ ID NO: 14531 - DNA, 1154 bp, Glycine max
  Gm_smallRNAprecursor_7364
ggacgcaacaatgatataacgcttgatgtgtaagactctcacacaaacggcatataacaacatagttgtgaacattttagtaaaatagcacataactttttattttacaaatacaatagcatgttcttacttcatgacgtttcataatatccaacttacgacgaaaaactctcacatcatcattgtcgatatgttggtttccacgttgcagccacctacaaagattaaaatttaatataccctaaaaccatttattctattgaaatgaaaaacgctgttaaaaatgactaacatgtgccccaatggtgtattttctacttgggaaggagtcctctttggagccaaggttggacatcgttcctatgcccacatttgtaataagatgcacatacctcaaattgatttagttttataatcaatggcattgcatatctctctgtatagaaaaccaagtacggcagcttcccatgcatatgtgccacattcttcaaagtcacataaaaattgaaggtaccttagcgaaactttgttaccgcttttgtcaacgaacaagacacctccaatgaatctcagtatccatgcacggacaaaccttcgtacttgttcttcgtcgtcgttatttatttgtgcaaaatggtgagccagccaacttaatttaaccacactacctttaatttcgccttcttgtggttcgactcccaataattcctcacataaatcagtccaatcaaaatttgttggaccgattaatgataaaccatccacacttatacctaacaatacagagacgtcttggagagtaatagtacactctccgcatctcatgtgaaacgtatgtgttttcgacctccatctttctatcagagcactaattaatgagacatttatttttaagtatcccatcttgataatccaggcgaaaccagattgtcgaagaaaaggaaaaatttgctctggaattttttcttccccttgatacgtaggaacaactcgtccgatatgtaattttcgatcttcttccaccttccaaacatgttctgaaacatgcttaggttgcatccataatacatcagcatcgatggggccagacttaattttaatatgtgatggacacgacgatgaagatgtcattgatattgcaataaattcccaaa

SEQ ID NO: 14532 - DNA, 1155 bp, Glycine max
  Gm_smallRNAprecursor_7365
ggacgcaacaatgatataacgcttgatgtgtaagactctcacacaaacggcatataacaacatagttgtgaacattttagtaaaatagcacataactttttattttacaaatacaatagcatgttcttacttcatgacgtttcataatatccaacttacgacgaaaaactctcacatcatcattgtcgatatgttggtttccacgttgcagccacctacaaagattaaaatttaatataccctaaaaccatttattctattgaaatgaaaaacgctgttaaaaatgactaacatgtgccccaatggtgtattttctacttgggaaggagtcctctttggagccaaggttggacatcgttcctatgcccacatttgtaataagatgcacatacctcaaattgatttagttttataatcaatggcattgcatatctctctgtatagaaaaccaagtacggcagcttcccatgcatatgtgccacattcttcaaagtcacataaaaattgaaggtaccttagcgaaactttgttaccgcttttgtcaacgaacaagacacctccaatgaatctcagtatccatgcacggacaaaccttcgtacttgttcttcgtcgtcgttatttatttgtgcaaaatggtgagccagccaacttaatttaaccacactacctttaatttcgccttcttgtggttcgactcccaataattcctcacataaatcagtccaatcaaaatttgttggaccgattaatgataaaccatccacacttatacctaacaatacagagacgtcttggagagtaatagtacactctccgcatctcatgtgaaacgtatgtgttttcgacctccatctttctatcagagcactaattaatgagacatttatttttaagtatcccatcttgataatccaggcgaaaccagattgtcgaagaaaaggaaaaatttgctctggaattttttcttccccttgatacgtaggaacaactcgtccgatatgtaattttcgatcttcttccaccttccaaacatgttctgaaacatgcttaggttgcatccataatacatcagcatcgatggggccagacttaattttaatatgtgatggacacgacgatgaagatgtcattgatattgcaataaattcccaaaa

SEQ ID NO: 14533 - DNA, 1174 bp, Glycine max
  Gm_smallRNAprecursor_7366
ggacgcaacaatgatataacgcttgatgtgtaagactctcacacaaacggcatataacaacatagttgtgaacattttagtaaaatagcacataactttttattttacaaatacaatagcatgttcttacttcatgacgtttcataatatccaacttacgacgaaaaactctcacatcatcattgtcgatatgttggtttccacgttgcagccacctacaaagattaaaatttaatataccctaaaaccatttattctattgaaatgaaaaacgctgttaaaaatgactaacatgtgccccaatggtgtattttctacttgggaaggagtcctctttggagccaaggttggacatcgttcctatgcccacatttgtaataagatgcacatacctcaaattgatttagttttataatcaatggcattgcatatctctctgtatagaaaaccaagtacggcagcttcccatgcatatgtgccacattcttcaaagtcacataaaaattgaaggtaccttagcgaaactttgttaccgcttttgtcaacgaacaagacacctccaatgaatctcagtatccatgcacggacaaaccttcgtacttgttcttcgtcgtcgttatttatttgtgcaaaatggtgagccagccaacttaatttaaccacactacctttaatttcgccttcttgtggttcgactcccaataattcctcacataaatcagtccaatcaaaatttgttggaccgattaatgataaaccatccacacttatacctaacaatacagagacgtcttggagagtaatagtacactctccgcatctcatgtgaaacgtatgtgttttcgacctccatctttctatcagagcactaattaatgagacatttatttttaagtatcccatcttgataatccaggcgaaaccagattgtcgaagaaaaggaaaaatttgctctggaattttttcttccccttgatacgtaggaacaactcgtccgatatgtaattttcgatcttcttccaccttccaaacatgttctgaaacatgcttaggttgcatccataatacatcagcatcgatggggccagacttaattttaatatgtgatggacacgacgatgaagatgtcattgatattgcaataaattcccaaaataatttatacattatttgt

SEQ ID NO: 14534 - DNA, 1152 bp, Glycine max
  Gm_smallRNAprecursor_7367
acgcaacaatgatataacgcttgatgtgtaagactctcacacaaacggcatataacaacatagttgtgaacattttagtaaaatagcacataactttttattttacaaatacaatagcatgttcttacttcatgacgtttcataatatccaacttacgacgaaaaactctcacatcatcattgtcgatatgttggtttccacgttgcagccacctacaaagattaaaatttaatataccctaaaaccatttattctattgaaatgaaaaacgctgttaaaaatgactaacatgtgccccaatggtgtattttctacttgggaaggagtcctctttggagccaaggttggacatcgttcctatgcccacatttgtaataagatgcacatacctcaaattgatttagttttataatcaatggcattgcatatctctctgtatagaaaaccaagtacggcagcttcccatgcatatgtgccacattcttcaaagtcacataaaaattgaaggtaccttagcgaaactttgttaccgcttttgtcaacgaacaagacacctccaatgaatctcagtatccatgcacggacaaaccttcgtacttgttcttcgtcgtcgttatttatttgtgcaaaatggtgagccagccaacttaatttaaccacactacctttaatttcgccttcttgtggttcgactcccaataattcctcacataaatcagtccaatcaaaatttgttggaccgattaatgataaaccatccacacttatacctaacaatacagagacgtcttggagagtaatagtacactctccgcatctcatgtgaaacgtatgtgttttcgacctccatctttctatcagagcactaattaatgagacatttatttttaagtatcccatcttgataatccaggcgaaaccagattgtcgaagaaaaggaaaaatttgctctggaattttttcttccccttgatacgtaggaacaactcgtccgatatgtaattttcgatcttcttccaccttccaaacatgttctgaaacatgcttaggttgcatccataatacatcagcatcgatggggccagacttaattttaatatgtgatggacacgacgatgaagatgtcattgatattgcaataaattcccaaa

SEQ ID NO: 14535 - DNA, 1172 bp, Glycine max
  Gm_smallRNAprecursor_7368
acgcaacaatgatataacgcttgatgtgtaagactctcacacaaacggcatataacaacatagttgtgaacattttagtaaaatagcacataactttttattttacaaatacaatagcatgttcttacttcatgacgtttcataatatccaacttacgacgaaaaactctcacatcatcattgtcgatatgttggtttccacgttgcagccacctacaaagattaaaatttaatataccctaaaaccatttattctattgaaatgaaaaacgctgttaaaaatgactaacatgtgccccaatggtgtattttctacttgggaaggagtcctctttggagccaaggttggacatcgttcctatgcccacatttgtaataagatgcacatacctcaaattgatttagttttataatcaatggcattgcatatctctctgtatagaaaaccaagtacggcagcttcccatgcatatgtgccacattcttcaaagtcacataaaaattgaaggtaccttagcgaaactttgttaccgcttttgtcaacgaacaagacacctccaatgaatctcagtatccatgcacggacaaaccttcgtacttgttcttcgtcgtcgttatttatttgtgcaaaatggtgagccagccaacttaatttaaccacactacctttaatttcgccttcttgtggttcgactcccaataattcctcacataaatcagtccaatcaaaatttgttggaccgattaatgataaaccatccacacttatacctaacaatacagagacgtcttggagagtaatagtacactctccgcatctcatgtgaaacgtatgtgttttcgacctccatctttctatcagagcactaattaatgagacatttatttttaagtatcccatcttgataatccaggcgaaaccagattgtcgaagaaaaggaaaaatttgctctggaattttttcttccccttgatacgtaggaacaactcgtccgatatgtaattttcgatcttcttccaccttccaaacatgttctgaaacatgcttaggttgcatccataatacatcagcatcgatggggccagacttaattttaatatgtgatggacacgacgatgaagatgtcattgatattgcaataaattcccaaaataatttatacattatttgt

SEQ ID NO: 14536 - DNA, 1092 bp, Glycine max
  Gm_smallRNAprecursor_7369
gtgtaagactctcacacaaacggcatataacaacatagttgtgaacattttagtaaaatagcacataactttttattttacaaatacaatagcatgttcttacttcatgacgtttcataatatccaacttacgacgaaaaactctcacatcatcattgtcgatatgttggtttccacgttgcagccacctacaaagattaaaatttaatataccctaaaaccatttattctattgaaatgaaaaacgctgttaaaaatgactaacatgtgccccaatggtgtattttctacttgggaaggagtcctctttggagccaaggttggacatcgttcctatgcccacatttgtaataagatgcacatacctcaaattgatttagttttataatcaatggcattgcatatctctctgtatagaaaaccaagtacggcagcttcccatgcatatgtgccacattcttcaaagtcacataaaaattgaaggtaccttagcgaaactttgttaccgcttttgtcaacgaacaagacacctccaatgaatctcagtatccatgcacggacaaaccttcgtacttgttcttcgtcgtcgttatttatttgtgcaaaatggtgagccagccaacttaatttaaccacactacctttaatttcgccttcttgtggttcgactcccaataattcctcacataaatcagtccaatcaaaatttgttggaccgattaatgataaaccatccacacttatacctaacaatacagagacgtcttggagagtaatagtacactctccgcatctcatgtgaaacgtatgtgttttcgacctccatctttctatcagagcactaattaatgagacatttatttttaagtatcccatcttgataatccaggcgaaaccagattgtcgaagaaaaggaaaaatttgctctggaattttttcttccccttgatacgtaggaacaactcgtccgatatgtaattttcgatcttcttccaccttccaaacatgttctgaaacatgcttaggttgcatccataatacatcagcatcgatggggccagacttaattttaatatgtgatggacacgacga

SEQ ID NO: 14537 - DNA, 1036 bp, Glycine max
  Gm_smallRNAprecursor_7370
gcatgttcttacttcatgacgtttcataatatccaacttacgacgaaaaactctcacatcatcattgtcgatatgttggtttccacgttgcagccacctacaaagattaaaatttaatataccctaaaaccatttattctattgaaatgaaaaacgctgttaaaaatgactaacatgtgccccaatggtgtattttctacttgggaaggagtcctctttggagccaaggttggacatcgttcctatgcccacatttgtaataagatgcacatacctcaaattgatttagttttataatcaatggcattgcatatctctctgtatagaaaaccaagtacggcagcttcccatgcatatgtgccacattcttcaaagtcacataaaaattgaaggtaccttagcgaaactttgttaccgcttttgtcaacgaacaagacacctccaatgaatctcagtatccatgcacggacaaaccttcgtacttgttcttcgtcgtcgttatttatttgtgcaaaatggtgagccagccaacttaatttaaccacactacctttaatttcgccttcttgtggttcgactcccaataattcctcacataaatcagtccaatcaaaatttgttggaccgattaatgataaaccatccacacttatacctaacaatacagagacgtcttggagagtaatagtacactctccgcatctcatgtgaaacgtatgtgttttcgacctccatctttctatcagagcactaattaatgagacatttatttttaagtatcccatcttgataatccaggcgaaaccagattgtcgaagaaaaggaaaaatttgctctggaattttttcttccccttgatacgtaggaacaactcgtccgatatgtaattttcgatcttcttccaccttccaaacatgttctgaaacatgcttaggttgcatccataatacatcagcatcgatggggccagacttaattttaatatgtgatggacacgacgatgaagatgtcattgatattgcaataaattcccaaa

SEQ ID NO: 14538 - DNA, 1037 bp, Glycine max
  Gm_smallRNAprecursor_7371
gcatgttcttacttcatgacgtttcataatatccaacttacgacgaaaaactctcacatcatcattgtcgatatgttggtttccacgttgcagccacctacaaagattaaaatttaatataccctaaaaccatttattctattgaaatgaaaaacgctgttaaaaatgactaacatgtgccccaatggtgtattttctacttgggaaggagtcctctttggagccaaggttggacatcgttcctatgcccacatttgtaataagatgcacatacctcaaattgatttagttttataatcaatggcattgcatatctctctgtatagaaaaccaagtacggcagcttcccatgcatatgtgccacattcttcaaagtcacataaaaattgaaggtaccttagcgaaactttgttaccgcttttgtcaacgaacaagacacctccaatgaatctcagtatccatgcacggacaaaccttcgtacttgttcttcgtcgtcgttatttatttgtgcaaaatggtgagccagccaacttaatttaaccacactacctttaatttcgccttcttgtggttcgactcccaataattcctcacataaatcagtccaatcaaaatttgttggaccgattaatgataaaccatccacacttatacctaacaatacagagacgtcttggagagtaatagtacactctccgcatctcatgtgaaacgtatgtgttttcgacctccatctttctatcagagcactaattaatgagacatttatttttaagtatcccatcttgataatccaggcgaaaccagattgtcgaagaaaaggaaaaatttgctctggaattttttcttccccttgatacgtaggaacaactcgtccgatatgtaattttcgatcttcttccaccttccaaacatgttctgaaacatgcttaggttgcatccataatacatcagcatcgatggggccagacttaattttaatatgtgatggacacgacgatgaagatgtcattgatattgcaataaattcccaaaa

SEQ ID NO: 14539 - DNA, 1106 bp, Glycine max
  Gm_smallRNAprecursor_7372
tgtcgatatgttggtttccacgttgcagccacctacaaagattaaaatttaatataccctaaaaccatttattctattgaaatgaaaaacgctgttaaaaatgactaacatgtgccccaatggtgtattttctacttgggaaggagtcctctttggagccaaggttggacatcgttcctatgcccacatttgtaataagatgcacatacctcaaattgatttagttttataatcaatggcattgcatatctctctgtatagaaaaccaagtacggcagcttcccatgcatatgtgccacattcttcaaagtcacataaaaattgaaggtaccttagcgaaactttgttaccgcttttgtcaacgaacaagacacctccaatgaatctcagtatccatgcacggacaaaccttcgtacttgttcttcgtcgtcgttatttatttgtgcaaaatggtgagccagccaacttaatttaaccacactacctttaatttcgccttcttgtggttcgactcccaataattcctcacataaatcagtccaatcaaaatttgttggaccgattaatgataaaccatccacacttatacctaacaatacagagacgtcttggagagtaatagtacactctccgcatctcatgtgaaacgtatgtgttttcgacctccatctttctatcagagcactaattaatgagacatttatttttaagtatcccatcttgataatccaggcgaaaccagattgtcgaagaaaaggaaaaatttgctctggaattttttcttccccttgatacgtaggaacaactcgtccgatatgtaattttcgatcttcttccaccttccaaacatgttctgaaacatgcttaggttgcatccataatacatcagcatcgatggggccagacttaattttaatatgtgatggacacgacgatgaagatgtcattgatattgcaataaattcccaaaataatttatacattatttgtaaataatataaataaaactacgcacatttataaaaacgttattaaatatatataaataaatttgtaataaataaaactgagcaattttgaatatattctatacataaattaaaat

SEQ ID NO: 14540 - DNA, 1043 bp, Glycine max
  Gm_smallRNAprecursor_7373
gaatctcagtatccatgcacggacaaaccttcgtacttgttcttcgtcgtcgttatttatttgtgcaaaatggtgagccagccaacttaatttaaccacactacctttaatttcgccttcttgtggttcgactcccaataattcctcacataaatcagtccaatcaaaatttgttggaccgattaatgataaaccatccacacttatacctaacaatacagagacgtcttggagagtaatagtacactctccgcatctcatgtgaaacgtatgtgttttcgacctccatctttctatcagagcactaattaatgagacatttatttttaagtatcccatcttgataatccaggcgaaaccagattgtcgaagaaaaggaaaaatttgctctggaattttttcttccccttgatacgtaggaacaactcgtccgatatgtaattttcgatcttcttccaccttccaaacatgttctgaaacatgcttaggttgcatccataatacatcagcatcgatggggccagacttaattttaatatgtgatggacacgacgatgaagatgtcattgatattgcaataaattcccaaaataatttatacattatttgtaaataatataaataaaactacgcacatttataaaaacgttattaaatatatataaataaatttgtaataaataaaactgagcaattttgaatatattctatacataaattaaaatagatgtgaagacaaatttaaataaataacaaaatatattatacaaataataaaatttaaatatattctacaaatactttcaaatacatacacatagacaaatttaattaaataacataatatattctacaatttgcaaataaataattaaataaaatatggactaccaaataaattaaaatacaaatattgaaatgcaaaaaattatttaaacgtgtaatacaaaaataataataatgtacaatgtattatatatttaatcacgtaaatttcctaaatctaataatattaacctacaaactaaaattaacaaataata

SEQ ID NO: 14541 - DNA, 1059 bp, Glycine max
  Gm_smallRNAprecursor_7374
ttccaccttccaaacatgttctgaaacatgcttaggttgcatccataatacatcagcatcgatggggccagacttaattttaatatgtgatggacacgacgatgaagatgtcattgatattgcaataaattcccaaaataatttatacattatttgtaaataatataaataaaactacgcacatttataaaaacgttattaaatatatataaataaatttgtaataaataaaactgagcaattttgaatatattctatacataaattaaaatagatgtgaagacaaatttaaataaataacaaaatatattatacaaataataaaatttaaatatattctacaaatactttcaaatacatacacatagacaaatttaattaaataacataatatattctacaatttgcaaataaataattaaataaaatatggactaccaaataaattaaaatacaaatattgaaatgcaaaaaattatttaaacgtgtaatacaaaaataataataatgtacaatgtattatatatttaatcacgtaaatttcctaaatctaataatattaacctacaaactaaaattaacaaataatatatataacattctaactaaaaataattaactcaaataatattaacttatcaattcatttatttaaaattgtattatttatatataacatacaaaatcataatataaatttaaatgtgttctcacgtcttcctttgtttaacttcctttgttttttgttttttggtgagatttttgttctgagatttaactttaactttcttttgttaaagcacaactacttaggatgatcattttcacaatggagctcgtttccattcttttcatctaccttaagatttgaactttttagaaaataataaaataaaaaagtaaaattacaacaaatattttattttccaaaacgtcacatcttattttagacttatgttacaattatttatttacgtgtaagtatttaatattataaaaactaaaaatttaggtgtgcctaaaatttacaaatatacctaaagctaatattaacttgtt

SEQ ID NO: 14542 - DNA, 1075 bp, Glycine max
  Gm_smallRNAprecursor_7375
aaatctaagaatatatacaacaactaaataatattttcatactaactaaccaaataatattttcatattaattaaccaaatattattttcaaccaaataatattttcacatatatatatatcacacgtataatatctaacaatatatacaacaattaaataaatttttcattctaactaaccaaataaatttttcatactaactcacctaacatttgaatatctattaatacataaaaattaacaacacaatacatagtaatactaactaacttaaatatataatattattaacaaaatatataaatactaacacaatatctattaatactaattaacctactatttttataatataattaacaaaatatacaaattgtatttactttaaaaatacttaccaagactttatggaggataagggcacacaccaaactttgaaggaaacaaagcaacccccaaggacaagctcacagcaagaaggaaagcaaggaaactcacaccaacgaaaaactcagattcaaaagctcacactcaagaagaaagaggaagaactcagcaagggcaagcattacgttgatgagcatttttttataggtgaaaacgttcacagcaacgttaaaattttaacgttcacctcctccaaaataggcttttcagactaactctgcaatcctaaccttgcatgcattcagactggtgttcagacctcgtgaagggggacatcagacacgtgaaggtgtctcgcagaggctaagggcaagactatccacgttggcatgttccgccattcgtagtggcggcatgggcttgcttagcatgtctcgccattccaactggcgagatcaccacttcaagctccaggtaagcaagcttatcgccatcttcaatggcggcacccatccttctcgtcattgcagatggcggaacagccatcccgccattaccacttgcgggatccattgaaaaaacaggtccccaatgttaaaactttgcaaacagaccctgaatggtaaatagtttttaaaactaaccccctacagtaaatttgccacttagccaacgtctctctctaa

SEQ ID NO: 14543 - DNA, 1067 bp, Glycine max
  Gm_smallRNAprecursor_7376
aacaacacaatacatagtaatactaactaacttaaatatataatattattaacaaaatatataaatactaacacaatatctattaatactaattaacctactatttttataatataattaacaaaatatacaaattgtatttactttaaaaatacttaccaagactttatggaggataagggcacacaccaaactttgaaggaaacaaagcaacccccaaggacaagctcacagcaagaaggaaagcaaggaaactcacaccaacgaaaaactcagattcaaaagctcacactcaagaagaaagaggaagaactcagcaagggcaagcattacgttgatgagcatttttttataggtgaaaacgttcacagcaacgttaaaattttaacgttcacctcctccaaaataggcttttcagactaactctgcaatcctaaccttgcatgcattcagactggtgttcagacctcgtgaagggggacatcagacacgtgaaggtgtctcgcagaggctaagggcaagactatccacgttggcatgttccgccattcgtagtggcggcatgggcttgcttagcatgtctcgccattccaactggcgagatcaccacttcaagctccaggtaagcaagcttatcgccatcttcaatggcggcacccatccttctcgtcattgcagatggcggaacagccatcccgccattaccacttgcgggatccattgaaaaaacaggtccccaatgttaaaactttgcaaacagaccctgaatggtaaatagtttttaaaactaaccccctacagtaaatttgccacttagccaacgtctctctctaacccagagaagggttagggtctctttgtcaccctcacgagtcagtgcacatcacatgaactccttttgacaagtaaatttcggctcttactatttataccctatttttctaagtagacccctatacccttcctttctacctctcagttatgtattatatcattttttcttaacgaagcacacccattttgttttccaaatatgtctttatgaaattacatatatctatttcaaa

SEQ ID NO: 14544 - DNA, 1115 bp, Glycine max
  Gm_smallRNAprecursor_7377
tatttcaatggaagggtatatgaagataacgatggtgtaatatttgaaggtagtaaaaaaaacgattcagattaaacgtagaattagtttcaatgctttgaagaaaaaaattggagataaggtaaagttacaaaataatgaaattatttatgctatcagttgtagatttttagtgtcaggaaaatatattgccttgtaaatttgtgatgaggaagacgttgaaacgatgctggaaagttttaaacaacaagaacaaatgtcagttcctgaattgtacatgtctctatgtaaataagcaagcacagcagatccccatgcatacgtgctacactgttcaaagtcacgcaatttgtcaacaaaaagaacacctcctatgaatctgaagatccatgcacgggtaaacctttgtagttgttctacgttaccgtcatggatatttatttgtgaaaaatggtgagctagccaacttaatttgaccacactgccttgaagttcaccttcctgtggtctgactctcaacaattcttcacacaattcagtccaaccaagataagtctaaccaattaatggttccccgttagtatgaagacctaataaaactgacatatcttaaagagtaatggtagtctctccgcatctcaagtgaaacgtgtgtgtttcaggcctccatctttcaattaagacggtaattaatgacgaatttattgttaggtaccccatcttcattatcaaataaaatttagattgtgaagcagaagaataattttccctagtatttcttcttgtccttgatagatggggacaactcatctgatgtgtaatggttcctcattccaaacatgttatgaaacatgtttagcttgcatccataaaacgtcttcatctattggaccagacttaatgtgtatactagatgaagatgacgaagatgtcattgatattgtaaaataaaatataatacaaaaaattgacaacaaaaattttacattaaaataattaactacagttacaaaaaatcaattaaatatacataccacataattaaaatatgaataaataataaaattaaaaataacaatacgtacacaaatttaaataaatgttctaaaatacta

SEQ ID NO: 14545 - DNA, 1076 bp, Glycine max
  Gm_smallRNAprecursor_7378
ctctttgggaggcaaagccttggagcaaaccttatttttaatttccatatgtttctcacttaatctttgaagtgatgatttgatattcacagttcatttgtgttgggaaaattcggactttcccgcttcgtgaagttaaaataggcacttagtaattaaaggtagtaataggagcacacgattataattctccaatatggagattcttccactatacaaaaaaaatagtagggttacaagaatgtgtttacaaaattgattcactctacggtggttcattcaagcttgagggtagagacttcccaaactatttatcttctctctcaaagaggctctctaactttttagctttctcactctaagaagtggattcactcttgtcttggatggttaagaatgaaggctcatacccttatttatactactctacctccacaatgaatcgtagagattacttgtatcctaagtgacaaagtacaatgcaccaccaatggatctctcggacattgaacacacatcggtgtgtacaaggtcaagaatgttatttctccttgtgggcggggaagatcttttgaaaacaactctgtgttgttttccagctaaacagtgagcacaaggatcaagtggcttacctttcatgttagtgaagagatgtttccgagctagcatgtgaagacccttctcacttatatgcccaagttgtttatgccatacttccatatcatcagtggttatgtttacctctcctttgcagagcttagcttgcatcacgtataatgatccttccttctttcctcgagccatgactagacttcctttggtgagcttccactttccttcacctaagtagttcatcaaaccagtatcgtctagcttcctagcggagataagattgaggcgcatagccgagacatacctcacatcttttaggacaatcttgcatctggtgcttgttgttagggtgatgtttcctatcccgacgatcttgctcctatctcgatttcccatttgcactataccaaagtcaccgctttggtagaatgagaagaaactttcatgtggagtaacatggaagg

SEQ ID NO: 14546 - DNA, 1080 bp, Glycine max
  Gm_smallRNAprecursor_7379
atgatttcgttttagaaacaatggccctatttgatacaggggctgattcaaactgcattttagaaggattaattcctacaaaattctttgagaaaacctcagaaaaattaagtacggcaaacggctcaaaattaaaaattaattttaagctatcaaatgcaataattgaaaaccaaggtcttaagattaacacaaactttcttctggtaaaaaaccttaagaatgaagtaatcttaggaacacccttcattagagccctgtttcccatccaaatatctaatgaaggaataaccacaaattatttaggaagaaaaattacatttaatttttctactaaaccaatttccagaaatataaatcttatagagaataagattaatcaaattaacttcttaaaagaagaagtatcttttaataatattctgacacaactgggaaaaccccaagtaaaagaaagaattcaatctttattaaatcatattgaatcgaccgtttggtctgaattgccacatgcattttgggacagaaagaaacatattgtcgatctcccttatgagaaagactttagggaaaaacaaattcccacaaaagccagaccaatccaaatgaatgaagaacttcttcaatactgtcaaaaggaaatcaaggatttgcttgataaaggcctaatccggaaaagcaaaagcccatggtcttgtgcggctttttatgttaacaaacaatctgagattgagcgtggaacaccccgcttagtcataaattacaaaccattaaatcaagcattacaatggattagatatcctattccaaacaaaaaagatttgcttaacagattaaattctgcaaagatattttcaaaattttgatatgaaatctggattttggcaaatccaaatccaagaatcagataggtacaaaacagcgtttactgtacctttcgggcaatatgaatggaacgtgatgccattcggactgaagaatgccccttcagaatttcaaaaaattatgaacgatatttttaatccttattcaaaatttgtcattgtctacatagatgatgttttaatcttttcccaaaac

SEQ ID NO: 14547 - DNA, 1073 bp, Glycine max
  Gm_smallRNAprecursor_7380
tgtacctttcgggcaatatgaatggaacgtgatgccattcggactgaagaatgccccttcagaatttcaaaaaattatgaacgatatttttaatccttattcaaaatttgtcattgtctacatagatgatgttttaatcttttcccaaaacattgaccaacatttcaaacatctccaaaccttcatacatatcatcaaacaaaatggtttggcagtctccaaatcaaaaatcaatcttttccaaactcgaattcgattccttggtcacaatatatatcagggtacaatcattccaatcgaaaggtcaatagagtttgctagcaaattccccaaccaaatcttagacaaaacccagttacaaagatttctaggttgtctaaattacgtaggagaatttgtcccctatttaaataatattgtcaagccattacatgataggctgaagaaaaatccgcctccttggtctgacctccatacacaaacggttaaagaaatcaaagtcaaagtccaatccattaaatgtctgtatcttcctattccacaggcatttaaaattgtcgaaactgatgcttcagacataggttatggtggcatcctcaaacaaagagtccatggccaagatcatgtcattgcatatacatcaaaacattggaatcctgcacaattaaaatattcaactgttaaaaaagaggttttagcaattgttttgtgcatttccaaatttcaatcggatttattaaaccaaaaatttttaatcagggttgattgtaaatcagccaaagatattttacaaaaagatgttaaaaaccttgcctcaaaacaaatttttgcacgatggcaagcaattttaagtgtctttgattttgacatagaatacatcaagggcacctcaaattcactacctgactaccttacccgtgaattcttacagaaaagtggtaatgcctcctaaggcatcgggaatctccctacggggaggaaggagtacaggcaaaggagccaggctggctcttccagagccaaccatcaagaaattatctacctcttctgggtcaccaacccaggctgggtca

SEQ ID NO: 14548 - DNA, 1071 bp, Glycine max
  Gm_smallRNAprecursor_7381
tacctttcgggcaatatgaatggaacgtgatgccattcggactgaagaatgccccttcagaatttcaaaaaattatgaacgatatttttaatccttattcaaaatttgtcattgtctacatagatgatgttttaatcttttcccaaaacattgaccaacatttcaaacatctccaaaccttcatacatatcatcaaacaaaatggtttggcagtctccaaatcaaaaatcaatcttttccaaactcgaattcgattccttggtcacaatatatatcagggtacaatcattccaatcgaaaggtcaatagagtttgctagcaaattccccaaccaaatcttagacaaaacccagttacaaagatttctaggttgtctaaattacgtaggagaatttgtcccctatttaaataatattgtcaagccattacatgataggctgaagaaaaatccgcctccttggtctgacctccatacacaaacggttaaagaaatcaaagtcaaagtccaatccattaaatgtctgtatcttcctattccacaggcatttaaaattgtcgaaactgatgcttcagacataggttatggtggcatcctcaaacaaagagtccatggccaagatcatgtcattgcatatacatcaaaacattggaatcctgcacaattaaaatattcaactgttaaaaaagaggttttagcaattgttttgtgcatttccaaatttcaatcggatttattaaaccaaaaatttttaatcagggttgattgtaaatcagccaaagatattttacaaaaagatgttaaaaaccttgcctcaaaacaaatttttgcacgatggcaagcaattttaagtgtctttgattttgacatagaatacatcaagggcacctcaaattcactacctgactaccttacccgtgaattcttacagaaaagtggtaatgcctcctaaggcatcgggaatctccctacggggaggaaggagtacaggcaaaggagccaggctggctcttccagagccaaccatcaagaaattatctacctcttctgggtcaccaacccaggctgggtca

SEQ ID NO: 14549 - DNA, 1115 bp, Glycine max
  Gm_smallRNAprecursor_7382
tcaatagagtttgctagcaaattccccaaccaaatcttagacaaaacccagttacaaagatttctaggttgtctaaattacgtaggagaatttgtcccctatttaaataatattgtcaagccattacatgataggctgaagaaaaatccgcctccttggtctgacctccatacacaaacggttaaagaaatcaaagtcaaagtccaatccattaaatgtctgtatcttcctattccacaggcatttaaaattgtcgaaactgatgcttcagacataggttatggtggcatcctcaaacaaagagtccatggccaagatcatgtcattgcatatacatcaaaacattggaatcctgcacaattaaaatattcaactgttaaaaaagaggttttagcaattgttttgtgcatttccaaatttcaatcggatttattaaaccaaaaatttttaatcagggttgattgtaaatcagccaaagatattttacaaaaagatgttaaaaaccttgcctcaaaacaaatttttgcacgatggcaagcaattttaagtgtctttgattttgacatagaatacatcaagggcacctcaaattcactacctgactaccttacccgtgaattcttacagaaaagtggtaatgcctcctaaggcatcgggaatctccctacggggaggaaggagtacaggcaaaggagccaggctggctcttccagagccaaccatcaagaaattatctacctcttctgggtcaccaacccaggctgggtcatctacccagaaaaccaatttagaagggtcatcaacccagattgcctcaatcaaacctgagccatccactcaggaatctcccaaaccggcaaccgccaaacaaacatcgcccgactatgcatggccaattgaaacccttcaggcccttcaagacatgggtctgaccaaacttccaaaaataatcaaaaaatcttgggcagacattgcctcagaatctgatgatgaatctgaatcaaatttacaaacaatgatccaaaatgcgtcaatgaccaaaacagccaccaatactaaaggaaaactacctttagccaaagctcaaacaccacctaccaaacaaactaacaatt

SEQ ID NO: 14550 - DNA, 1174 bp, Glycine max
  Gm_smallRNAprecursor_7383
acaaagagtccatggccaagatcatgtcattgcatatacatcaaaacattggaatcctgcacaattaaaatattcaactgttaaaaaagaggttttagcaattgttttgtgcatttccaaatttcaatcggatttattaaaccaaaaatttttaatcagggttgattgtaaatcagccaaagatattttacaaaaagatgttaaaaaccttgcctcaaaacaaatttttgcacgatggcaagcaattttaagtgtctttgattttgacatagaatacatcaagggcacctcaaattcactacctgactaccttacccgtgaattcttacagaaaagtggtaatgcctcctaaggcatcgggaatctccctacggggaggaaggagtacaggcaaaggagccaggctggctcttccagagccaaccatcaagaaattatctacctcttctgggtcaccaacccaggctgggtcatctacccagaaaaccaatttagaagggtcatcaacccagattgcctcaatcaaacctgagccatccactcaggaatctcccaaaccggcaaccgccaaacaaacatcgcccgactatgcatggccaattgaaacccttcaggcccttcaagacatgggtctgaccaaacttccaaaaataatcaaaaaatcttgggcagacattgcctcagaatctgatgatgaatctgaatcaaatttacaaacaatgatccaaaatgcgtcaatgaccaaaacagccaccaatactaaaggaaaactacctttagccaaagctcaaacaccacctaccaaacaaactaacaattatatttataaaaataaattgttaactgttttgcagatggaacctgaattttgggacaaaaatcccttcaaggcgacggccaaggctttcccaccagaatttcactacaaaccaactaccatcctgaagacaagaactttttatgaattgattttggtagattcaaactcagtatctatcaaacatttcaaagatccaaaagaccaaaccttaaacacccactcaaccatccaaatactaaaagtccgaaccaaagtgtaagcgtaaatatatatatatatatatatatatatatatatatatatatatatatatatatatatatatatatatatatatatatcctaaaaactaag

SEQ ID NO: 14551 - DNA, 1173 bp, Glycine max
  Gm_smallRNAprecursor_7384
caaagagtccatggccaagatcatgtcattgcatatacatcaaaacattggaatcctgcacaattaaaatattcaactgttaaaaaagaggttttagcaattgttttgtgcatttccaaatttcaatcggatttattaaaccaaaaatttttaatcagggttgattgtaaatcagccaaagatattttacaaaaagatgttaaaaaccttgcctcaaaacaaatttttgcacgatggcaagcaattttaagtgtctttgattttgacatagaatacatcaagggcacctcaaattcactacctgactaccttacccgtgaattcttacagaaaagtggtaatgcctcctaaggcatcgggaatctccctacggggaggaaggagtacaggcaaaggagccaggctggctcttccagagccaaccatcaagaaattatctacctcttctgggtcaccaacccaggctgggtcatctacccagaaaaccaatttagaagggtcatcaacccagattgcctcaatcaaacctgagccatccactcaggaatctcccaaaccggcaaccgccaaacaaacatcgcccgactatgcatggccaattgaaacccttcaggcccttcaagacatgggtctgaccaaacttccaaaaataatcaaaaaatcttgggcagacattgcctcagaatctgatgatgaatctgaatcaaatttacaaacaatgatccaaaatgcgtcaatgaccaaaacagccaccaatactaaaggaaaactacctttagccaaagctcaaacaccacctaccaaacaaactaacaattatatttataaaaataaattgttaactgttttgcagatggaacctgaattttgggacaaaaatcccttcaaggcgacggccaaggctttcccaccagaatttcactacaaaccaactaccatcctgaagacaagaactttttatgaattgattttggtagattcaaactcagtatctatcaaacatttcaaagatccaaaagaccaaaccttaaacacccactcaaccatccaaatactaaaagtccgaaccaaagtgtaagcgtaaatatatatatatatatatatatatatatatatatatatatatatatatatatatatatatatatatatatatatatcctaaaaactaag

SEQ ID NO: 14552 - DNA, 1173 bp, Glycine max; identical to SEQ ID NO: 14551
  Gm_smallRNAprecursor_7385

SEQ ID NO: 14553 - DNA, 1043 bp, Glycine max
  Gm_smallRNAprecursor_7386
gaatattgtctacaccgattagtgattcaacttcatttctagggggctcaatattggataaagaaggcctataacacgacttttggttggtggagggtgatggttgactacaaaattatggattttgagaactaccattggtaggtggctctacattggatgaatgatgcatatatcacatgtgtgagggtgttggatacataacatactgtggtggattttgagaattttcactggtatagggtggtggtggatacataacatattgcggtggatttaaaaaaatttcactggtaaaggatgattgattttgcaaataactataataacattgataattatattgattgggatctattttagagagaatataaaagattgaggcttgataggaacaagaaaaaaaaaggaaaaattgcacttttggtcccccagttttactccaatttcaattttggtccctttataatttaattcatacatttggtcccccaattttataaatccctgcaaaattggtcatggaagcctgatttggacgttgaccgttaacctcagacgttgactgccatgtgtcaatgccacgtgtcaacgtctgagtggttccctgtaaatgcttcatttttttaggtaaaattgcacttttggtcccccagttttactccaatttcaattttggtccctttataatttaattcatacatttggtcccccagttttataaatccctttataaattcagccaaatttcattactggagaagttgtatttcaaatttcaaacaaaaataccattacataggtcacttaagcagtcgtatacacataataccgcataggggagcaaaaaaagaaaaaaaaagggggggggggttattacagaacctgttaaagtaagatatctgaaaatttcaaacccaggttgggattcatgcgctactttcccaagttaaacaactccgaaagtgggagagagacaaatagtgatttttctttgggttccaagtgagtgaaaaacttgcgatgaaaaagaagtgcgagat

SEQ ID NO: 14554 - DNA, 1083 bp, Glycine max
  Gm_smallRNAprecursor_7387
tatatgatacatatgaaccattaatagtaaaaaacatttattcttcaacaaaaatgttggctttatatgatacatatgaaccattaatagtaaaaaacatttattcttcaacaaaaatgttgacaatgtcttcaattgtacttccttccaaaatatgtttttgtcaatccaaaatatattagattttatcaaaattaaataatttttctatatatgaaaaattgcacatctcaatgtttagtgaagcacaactactttcagttaaagaatgtttcatagtttcacaatattgtcaatctttataaatacttacaaatcttaactcaatcataataaccaacagacaatagatcatattgaccataaatgatggtgatgggcttcataattgagtattgctaggtgcacccagcattttttaaaaatgacaaaatgatctctgccttctttattcctttatggatcaagtcaatccgcaagttgatttttaagacttatgaatcaagttgattcgtaagtcttttacgaataaagttgatccgtaagtcttaaaaatcaacttgcggatcaacatgatccgtgaaagacttacggatcaacttgatccgtaagtcttaaaaatcaacttgcagatcaacttgatctgtaaaaaacttacgaatcaacttgatccgtaaaagacttacgaatcaacttgatctgtaagaaacttgcgtatcatctatatcctgcggatcaactaaaacctatgtgaatcaactcattgcatatgtgaatcaacctaaatgagttgggtgcacaaaaatatttttaaaaatacacaggaatatttttatcttttcatgttaaatgttggatgcagctagcgacaccctttataatttctattttgatggatgcttttgcatctttgcagccttaataacaatccaagtgatttgttgatttgaaggaaatatagtgatcacgtgttaggatgaaatagttaatattaataaatttggacaaccaaactcattaggacaacaattctgctcacaaattgcctcgcaacaaaagaaacaaggacgaagttaacaaaat

SEQ ID NO: 14555 - DNA, 1083 bp, Glycine max; identical to SEQ ID NO: 14554
  Gm_smallRNAprecursor_7388

SEQ ID NO: 14556 - DNA, 1164 bp, Glycine max
  Gm_smallRNAprecursor_7389
cctattttgctcaaattggatcctacaagtcctaaatcatgtataaatcatatttaaaccaaaaacaagcttcagaccaaggcaattcaaaatctaggtatctaaaacccatcaatttagtggattttcaaggtttgagaagtgaaaatgagaatggggtaattttggagtaaactctcatctcaaacaagtctataacattaatttaaacttgctcaaactggttttacagcgaaaactccaccgattcaaaatttgacccttcaacacccaatttaccctagaaatggcttttgctttcacctttgtcactcatttttctcatttgctctgcccaagctttcccacaagtcctaattgacattttaaactaggattaactcactttagcctccaattaccactaaccccaaatttagcttttcaaactgtcaaaacctcacacttttccactcacatcactatcattctcacatttaaccctaggttaactctccccatcatctctaccagttttctaccaacaatttcagcacacaaacatcacaaagcatcatcataaagccctaaaacagaatgggtagctttactcacattaaacatgtcaagtttagcatgctttcaacagattccttcacaaataactaccataaggcataaacctagtagaactacccatcatatctcccaaaaaacccaatacccatgaatttcatgtgaaaagaagtccacccatacctgaaattcgaagtcccacaacgtagaggtgcgcttcacgactccgaaaatggcttcctttttcaatttggagtagaaatgatgagcaaagtttggagctttaatgggcaacaatggtggaggagaaagggagaagaaaagcaatgtgggaaggtgaggaaaagctttttgaatttctgctgaaggaagagagagaatgtggctttttaagaaaaaaatgattttctttttcttattattttatttctttaaagcacttgccacttgtcccatttttgagtggaacaaaaagggcccactttttctcttgatgtgacttcatactcagccacaagaagagaaaaaaaattgaccttttgaatgctaaaattctgcctcgatttgcatgccgcttctctggttctagttcctcgcgtttctctacac

SEQ ID NO: 14557 - DNA, 1069 bp, Glycine max
  Gm_smallRNAprecursor_7390
aatgtttttaaatggtacttgaagtaatatttttaaaaatattaatttctaattatatatatatatatatatatatttttaatatattcatttaaatttctgtttaatcttttaaaataaattatgattatattagttttcaatcattttatttttcatttattttaataattaattttactaaatatttataatttaataaattaatttttaaacttggaattgcttttacttccagcttgtaagtaactttttaattcttacttaaccttctaatttttaactaattttttaattaattttatctgacattaccatgatgtatattagaagattattttgctctgcggtaaatatgtggcatattttaaaatataggtaaaattataaatttggtctctcagtttgtctccagttttagatttggtcccccaataatttaattcatgaatttggttcccttatttttttaaaattatgcaatattggtctcccatgccacaattggacgttgaccgttaacaagtgatgttgactgtcatatgtcacgttcttattggatgacgactgtcacgtgtcatgttctgattggatgtcaactccatgaaagatgaaatgcattgctgttttcattgaccaattagaatatgacatgtgacagtcatcatccaatcagaacgtgatacgtgacagttaacatcacttgttaacggttaatgtctaattgtggcctggagtaccaacattgcatgattttacaaaatagggggaccaaattcgtaaattaaattactgggggaccaaatccgaaactggagataaattggaggaccaaaaatgcaattttatctataatatatttttcttttttctcctcttcttataaatagacatgataagaaaacctgtagtcgtgggtacccgcccgaatccttcctgactttgatgggtaatactcgagttgaccgggtataggttcgggttcgggttttccccgataatcaaaagtcggatacgggtatgagtatgagattattagacccgtcccgaccgcgaacccaaacctatc

SEQ ID NO: 14558 - DNA, 1147 bp, Glycine max
  Gm_smallRNAprecursor_7391
gtgttcaaacatatactgtttaaattaaaattattgtacacagttcagatccatgaattaaattaagatatgcccttacggacactattcctacttccccatcaggctctgataccagagatatgtggacagggatcagtggaaagggatcaaatggacaaatagtgagtaagaatgtagtatgatcaacggaatgtgaaatctaaactttaaaaacaagtaccaagggcacactggagattggcttacaaatctcaggttttcataaacaaagaaaccgaagcggcggcagagccgcataggatcggtaaagagggagaagagagatggacaaaaataaaaatttattgaaacttgaaaaaagtgcttacaaaagttgttctttcagagcacctcgtctcaaaaacctgaaattggctaaatggaagggtgcctcacaatatggttgaggactccttatatagccaaaattctttgaccggtagttgccggtagttttgaccggaactatttgactgtttgttacatgacaattagttttgatcgggacttatttgctacaggataggtagtattgtccgaaattacaaattaattacatacaggcggttttgtaacagaaattagaattaatctaaacaaataccaaaacaatcatcttcgttttggtaaaaagggtcatcttcttcttcagctagcagagcttgtttcttccttctttgaggatgaaccttcttcctcttgctgtaacatttgcagaacttccttaagagttttagttaggatctctttcgattttgatcctgctaaaaatgctgctagatgggacttttggtttcaaaacacaaaattttctagatcaactgctttgaggaattttggatgggattggaaccagagtttcacttgttctggatctactttggatgagtcgaattgagtccaccattttacaaatgcgtgtctttgcaatgatggatattggtttgttttttcagtcttactataacgatacttccatgagaaaatccatggcaaagcaaaactggaaaaatatttaagatctgttgcaattcgtgattccagagaattgtattgtttttcaaattaagcaaatccttgttcgactattttcgggaatatctct

SEQ ID NO: 14559 - DNA, 1107 bp, Glycine max
  Gm_smallRNAprecursor_7392
gcagaacttccttaagagttttagttaggatctctttcgattttgatcctgctaaaaatgctgctagatgggacttttggtttcaaaacacaaaattttctagatcaactgctttgaggaattttggatgggattggaaccagagtttcacttgttctggatctactttggatgagtcgaattgagtccaccattttacaaatgcgtgtctttgcaatgatggatattggtttgttttttcagtcttactataacgatacttccatgagaaaatccatggcaaagcaaaactggaaaaatatttaagatctgttgcaattcgtgattccagagaattgtattgtttttcaaattaagcaaatccttgttcgactattttcgggaatatctctggaattggaccaaagaaatcccgccattgtaaaaaccaatttggaaaattataaattgtgttggttttgaaatatatcaaccatgaatgcttgaagcgggtattttggtgccaaaaaaccttagtccaaacatcaatataatcccaataggtataccctactgggtcaaatggtactgaaaatctctttcctctatttaagtctgaaccaaaatgtcttggttgaagaacttttagtatttggattgttgagtgggtgttcaatgtttgatcttttgggtctttgaaatgcttgatagacactgaatttgagtccaccaaaatcaattcataaaaagtccttgacttcaggatggtagttggtttgtagcgaaatcttgacgggaaagccttggctgttttcttaaatgggtttttgtcccaaaattcatgttccatctgcaaaacagttgaaaatttatttttataaatataattgttagtttgtttaataggtggtgtttgtactttggctaggggtagtttccctttaggattggtagttgttttggtcattgatgtattttagatcattgtttgtaaatttgattcagaatcatcgtcagattttgaggcaatatctgcccaagattttttgattatttttggaaatttggttagacccatgtcttgaagggcctgaagggtttcaattggccaggcatagtcgactgatg

SEQ ID NO: 14560 - DNA, 1108 bp, Glycine max
  Gm_smallRNAprecursor_7393
gcagaacttccttaagagttttagttaggatctctttcgattttgatcctgctaaaaatgctgctagatgggacttttggtttcaaaacacaaaattttctagatcaactgctttgaggaattttggatgggattggaaccagagtttcacttgttctggatctactttggatgagtcgaattgagtccaccattttacaaatgcgtgtctttgcaatgatggatattggtttgttttttcagtcttactataacgatacttccatgagaaaatccatggcaaagcaaaactggaaaaatatttaagatctgttgcaattcgtgattccagagaattgtattgtttttcaaattaagcaaatccttgttcgactattttcgggaatatctctggaattggaccaaagaaatcccgccattgtaaaaaccaatttggaaaattataaattgtgttggttttgaaatatatcaaccatgaatgcttgaagcgggtattttggtgccaaaaaaccttagtccaaacatcaatataatcccaataggtataccctactgggtcaaatggtactgaaaatctctttcctctatttaagtctgaaccaaaatgtcttggttgaagaacttttagtatttggattgttgagtgggtgttcaatgtttgatcttttgggtctttgaaatgcttgatagacactgaatttgagtccaccaaaatcaattcataaaaagtccttgacttcaggatggtagttggtttgtagcgaaatcttgacgggaaagccttggctgttttcttaaatgggtttttgtcccaaaattcatgttccatctgcaaaacagttgaaaatttatttttataaatataattgttagtttgtttaataggtggtgtttgtactttggctaggggtagtttccctttaggattggtagttgttttggtcattgatgtattttagatcattgtttgtaaatttgattcagaatcatcgtcagattttgaggcaatatctgcccaagattttttgattatttttggaaatttggttagacccatgtcttgaagggcctgaagggtttcaattggccaggcatagtcgactgatgt

SEQ ID NO: 14561 - DNA, 1199 bp, Glycine max
  Gm_smallRNAprecursor_7394
tgttttgcagatggaacctgaattttgggacaaaaacccatttaaggcaacaggcaaggctttcccgtcaggatttcactacaaaccaactaccatcctgaagtcaaagactttttatgaattgattttggtagactcaaattcagtatctatcaaacatttcaaagacccaaaagatcaaacattgaacacccactcaacaatccaaatactaaaagttcttcaaccaagacattttggttcggacttaaacaacggaaagagattttcagtaccatttgacctagtagggtatacctattgggattatattgattcttggactaaggttttttggcaccaaaatacccgcttcaagcattcatggttgatatatttcaaaaccaacacaatttataattttccaaattggtttttacaatggcgggatttctttggtccaattccagagatattcccgaaaacagtccaacaaggatttgctcaatttgaaaaacaatacaattctcaggaatcacgaattccagtagatcttaaatatttttctagttttgctttgtcatggattttctcatggcagtatcgttatagtaagactgaaaaaacaaaccaatatccatcattccaaagacatgcatttgtaaaatggtggactcaatttgactcatccaaagcagatccagaacaagtgaaaatctggttccaatcccatccagaattcctcaaagtagccgatctagaaacttctgtgtttttaaaccaaaagtcccatctagcagcatttttagcaggatcaaaatcgaaagagatcctaactaaaaatcttaaggaagttctgcaaatgttatagcaagaggaagaaggttcatcctcaaagaaggaagaaacaagctctattgaagaagaagatgactctttttaccaaaacgaagatgattattttggtatttgtttagattaattgtaatttctgttacaaaaccgtctgtatgtaattaatttgtaattttggacaatactacctatcctgtagaaaataagtcccggtcaaaactaattgtcctgtaacaaacagtcaaatagttctggtcaaaactaccggcaactacctatcctatagcaaataagtcccgatttgcttacgttattgttaatcccaacttttgatatttcatctaatttgaagaattactttttat

SEQ ID NO: 14562 - DNA, 1105 bp, Glycine max
  Gm_smallRNAprecursor_7395
tgcggacgatgcttgatcaggattaggctaaactatcatgaggaatcggggtttagtatctcaggagacaccataggaacacatgagcattgttagatagagaatatttgttttagcatcaggcacctattaggaaggccaacgtgttttctacttgtttttacacatcatttctctcgcgtgattttcctttttgcacaaatagtttacacacctattcatattcacacttatctttacacaccagacacctatttgctgaaatagcttaccaaataacacaagttccccgagagttcgatacttggttcttaccgttttatactacttgtgcgatctagtgcacttgccagaagcgaacacctgatgcctatggcaattaaccctaggtacacatatcttctatttgtataaaggagtttttgtccggtttgttctgagattaatctgataatctcgtgtcttctatcagggagatgaaaatcatcaatccttatgtatctgtataagctagttctatcagaagctaaccagtttagattgtataaatgtctaggattgagggagtctatcctagaattttatccaatatcaatattggattctatatctactatttgttccaattgtctggttcaggagtttgttcttctaaagaatctatcaaagattccaggatgttggtttatagattcagtaacaagattgtgtcctgaaacagtttgtgaggttcctataaaaggtattgtcctcattttctaggctttgctaaaatgaatctggttgaggtttgacttgttgtctttcctaaatcaagtttagaaagctgcgttgtaattttatcgagttcgtttgtggaaaaatgaatttgttggtctttagatttaagaatattcaaaatgtcattaactttattttctaaagttttgtattttgttaaacaataaattttgtgtttttgttaggctatctaaagtttcagataagtcctcaaaagattttatcgaaagtttgttagtagaactattattattaattatatctcgatgtctatccagagctaaataacgactctaataccaaagtggtactgagtcgcttgtat

SEQ ID NO: 14563 - DNA, 1128 bp, Glycine max
  Gm_smallRNAprecursor_7396
catttccatgggatttaaaggatgtcaaagtggggtcaatgcaagcaaacttttcttagatttttggaatcgtagacaaatcatttagaacagtacttaaaactctcggggaaggaatgacatgaagacgttgaatgatgaaagaatgacatgaagaccttcaaaaatacacatctacatggcagccttaggacttcaaataggtcatgtttgtcgccagtttcatcatccaccagtctttccttctctggcttctcacgtttattgttgttaaacccatatttatgctctcctcctttcatgtcttgttttatcacaactttagccgaatctcctatcttcagcacagttgaatctcctgtcttattctccaatgacacactttgatggcctgtatctgttttcttcatatgttctagtgctttagcttcagaatgcatagaccaatgtgaactttccagtgatcaccataggcttctgcatcagcattgacactctccaccctctttggtttatgcttttgtgctgcattcgctacttcctcgttataaatctcattggtgctgatttttctagtgtaacctcttataaatatgagatttataacgaggaagcagcaaatgcagcacaaaagcataaaccaaagagggtggagagtgtcaatgctgatgcagaagcctttggtgatcactggaaagttcacattggtctatgcattctgaagctaaagcactagaacatatgaagaaaacagatacaggccatcaaagtgtgtcattggagaataagacaggagattcaactgtgctgaagataggagattcggctaaagttgtgataaaacaagacatgaagggaggagagcataaatatgggtttaacaacaataaacgtgagaagccagagaaggtaaggctggtggatgatgaaactggcgacaaacatgacctgtatgattgttcttacatagaattgtacaagtattgggtgtcggggtttctctaatctgattaacgacttaatttttaatcataatgtgtctgttgtaaagtcattcaaatgtgagtaaagcggaattcattatcaaaaggatgcagtttaacactacacacaacagtctatgaaagt

SEQ ID NO: 14564 - DNA, 1078 bp, Glycine max
  Gm_smallRNAprecursor_7397
cccacttccacaagtcaaatataaaccgaccatccccggttgcccacctttcaactgagctcacgcactcctgcgtagcccttatcctcgttcctctcagcatcgggtccccatcaacccctccaagcttccacaatattcaagcaattcaattccaaatatcatgaaactaccctcaaccaagaaaacaaagtagaggcagaaaactctacccaaaacacattcaaataccacaactttccttactcatataccccagtaacattctctttgttccgattcgttaaccgttggatcgccttgaaacttttactggaggttcctagtacataaatatacattttgaccgttgggatttgctaaaaaatgtctggaacccgatatgtactactcttcccatgagtagcaatgccaaccatttttctgcactatgttacaaaaaaaaaactgttgcacaattcaacagcatttttttgcataatagggcagatttcgaaatccaacttgcccacatccaattttgctcaaattggatcctacaagtcctaaatcatgtataagtcatatttaaaccaaaagcaagcttcagatcaaggtaaatcaaaatctaggtatccaaaacccatcaattgagtgaattttcaaggtttgagaagtgaaaatgagaatggggtaattttggggtaaactctcatctcaaacaagtctataacattaatttagacttgctcaaactggttttaaggtgaaaaccccagccattcaaaatttgacctctcaacacccaatttaccctagaaatggctctcctttttcacatttgtcacttatttttctcatttgctctgcccaagctttcctacaagtcctaattgaaattttaaactaggatcaacccactttaaactccaatttccactaaccccaaattgggcttttcaaaaccctcaaaatctcacatttttccactcacaccactaccattctcacatttaaccctaagttaactctccccatcatctctaccagttttctatcaacaatttcagcatacaaatatcacaaagaatcatcataa

SEQ ID NO: 14565 - DNA, 1170 bp, Glycine max
  Gm_smallRNAprecursor_7398
ttatgaagtcaaatcaagggaaaatggtgggcccttattgctccacttaaaatgggacatgtggcattgctaaaaaaaaggaaaagaaaatctttttttaaaaaacaggccaaaatcttctttctcttcattcagaaatttcagcagctcttcttctcccttccacgtagcttttcttcttccttcttctccaccattgaagcctccattgaagctctaaaattgctcatcatttctactccaaattgcaaagagaagccattttcggagtcttgaagcacacctctacttcgtggggcttcaaatttcaggtatgggtggacttcttctcacatgaaattcgtgggtgttgagtttttgggagttatgatgggtagttctactaggttattgccttagggtagttatttgtgaaggaatttgttgaaatcatgcaaaacttgacatgtttgatgtgagtaaagctacccattctgttttaggattttatgatgatgctttgtgatatttgtatgctgaaattgttgatagaaaactggtagagatgatggggagagttaacttagggttaaatgtgagaatgataatgttgtaggtagaaaagtgtgagattttgagggttagagaagccaaatttggggttagtggaaattggagtctaaagtgagttgatcctagtttaaaatgtcaatttggacttgtagaaaagcttgggcagagcaaataagaaaaatgagtgacaaatgtgaaagaaaagagccatttctagggtgaattgggtgttgagaggtcaaattttgaatcggtggagtttttgcctaaaaaccagtttgagcaagtctaaatcaatgttatagacttgattaagatgagagtttaccccaaaattacccaattctcattttcacttctcaaaccttgaaaattcactaaattgatgggttttggatacctagattttgatttaccttgatctgaagtttgtttttggtttaaatatgatttatacatgattgaggacttgtaggatccaatttgagcaaaattggatgtggccaagtgggatttcgaaatctgccatagtatgcaaaaaaatgctgtcagaattgtgcagtagttttttttaacatagtgcagaaaatgcttgtgcatcactagtcacgggaaaag

SEQ ID NO: 14566 - DNA, 1034 bp, Glycine max
  Gm_smallRNAprecursor_7399
tagctcacactaattaattaattaggaattataaaattcctaacaatctcccacttgagtttcatattaaccttaatcatttatattgcaaaagtctttacgcgcgcaaccgtatgttatttacttttagactttccttagacaatctggtccatcttatatagtaacacagaaccattgcagttttcttcacaatccaacgtgattgagccacaatgatcaccaatgtcacatatacttgatgacatagatcaaatatggataagcgacatgaaaataacatgcaatgtgatatcattcatgttcatttccaactagtccaaactttattctttaggcaaaattgcaaatttgatcccccagtttatctccagttttggatttggtcccccggtaatttaattcacgaatttggtcctcctattttgtaaaatcgtgcaatgttggtcccccaggccacaattggacgttgaccattaacaagtgatgttgactgccacgtgtcacgttcttattggatgatgactggtcatgtgtcatgttctgattggatgtcaactccatgaaagatgaaatgcattggtgttttcattgaccaagcagaatatgacacgtgacaatcatcatccaataagaacgtgacatgtggtagtcaacatcacttgttaacagtcaacgtccaattgtggcctaggggaccaacattgcatgcttttacaaaataggaggaccaaattcgtgaattaaattactgggggaccaaatccgaaactagagataaactgggggaccaaaaatacaattttgcctattctttatagagatcaatccaaacacaatataaatattgcaaacaaaacaagctcagaatgaaatgataaccttcaactttattttatagaaaaacaatctatacaaatatctaaacaacataaggcatatatagaacataaatgagacttctactaaactaaggtactataaggaattactcccatatgagcagtgtgctcatgaaaaactttaggtaccaa

SEQ ID NO: 14567 - DNA, 1077 bp, Glycine max
  Gm_smallRNAprecursor_7400
aaattcctaacaatctcccacttgagtttcatattaaccttaatcatttatattgcaaaagtctttacgcgcgcaaccgtatgttatttacttttagactttccttagacaatctggtccatcttatatagtaacacagaaccattgcagttttcttcacaatccaacgtgattgagccacaatgatcaccaatgtcacatatacttgatgacatagatcaaatatggataagcgacatgaaaataacatgcaatgtgatatcattcatgttcatttccaactagtccaaactttattctttaggcaaaattgcaaatttgatcccccagtttatctccagttttggatttggtcccccggtaatttaattcacgaatttggtcctcctattttgtaaaatcgtgcaatgttggtcccccaggccacaattggacgttgaccattaacaagtgatgttgactgccacgtgtcacgttcttattggatgatgactggtcatgtgtcatgttctgattggatgtcaactccatgaaagatgaaatgcattggtgttttcattgaccaagcagaatatgacacgtgacaatcatcatccaataagaacgtgacatgtggtagtcaacatcacttgttaacagtcaacgtccaattgtggcctaggggaccaacattgcatgcttttacaaaataggaggaccaaattcgtgaattaaattactgggggaccaaatccgaaactagagataaactgggggaccaaaaatacaattttgcctattctttatagagatcaatccaaacacaatataaatattgcaaacaaaacaagctcagaatgaaatgataaccttcaactttattttatagaaaaacaatctatacaaatatctaaacaacataaggcatatatagaacataaatgagacttctactaaactaaggtactataaggaattactcccatatgagcagtgtgctcatgaaaaactttaggtaccaaacctttcataagtgggtcagctagcatatcattagtccttaaatgttctatggaaatctgtctattatgaagtatt

SEQ ID NO: 14568 - DNA, 1190 bp, Glycine max
  Gm_smallRNAprecursor_7401
cattgcacattaacattgtgtaaacatcatcatcatttttcaattgtagagattgaaaaaaatattgttgacctgcatctatgaatggttgtcgatagtagatttcatccagtaattgatcggtggttagttgaagggtgttgtgcattctacgcttgagtgtatcaaaagaacagttgttaggaactcgcattggtgttggagtgagactttaaaaataaacaccagtttggttgtgagtgattgatccatttggaaaaatgaaagctaatctggagttagcaatagtctgactgcttatttctcccaaaaatgacatagtaataagattgaatttggtttgtgaaattatgttgtgtgagattgtgtgtttgtattgtgtatgtgatgtgtattggaatccaatatttctttttcccaagtaagtgatgtagcagacgtccattataatttcagagcgaacaaagagattatgagttgtccatctcatgtcagttttgcacacgtctctaaaaattaaatgtctcacctgcaaaactgacatgaaatggacagctcataatgcagagtattgtcaatttggactgtgatttttcccatgtaattaaagcagcaggcgttcgtgatgattttcaaagtgaacaaagagattatgagttgtccatttcatgtcagttttgcaggtgagacatttaatttttagagacgtgtgcaaattgcagagtattgtcaatttggattgtgatttttcccttgtaattaaagcagcaaacgtccataattattttcagagtgaacaaagcgattatgagttgtccattttatgtcagttttgtcgatgagacatttaatttttagaaatagtgtagtgtaaatggcaaagtattgtgaattttgatagttatgttaccatgtcaactactgcagtaaaagtgggtaaactgaaaattgctaatttaaatttaaagaaaaaattatttcaatacgtaaagtgataactgaagacagacataagacattacatgaaatcttaaagaagaaataacttagacatgaatgatccgtagattaccaatcccgtttgaatataggttcgtgggatggagacaggttacttccttcgggcccggaagaggagtcaatatcactatcatggtttttgacccaataagtctcgtattcatctgata

SEQ ID NO: 14569 - DNA, 1162 bp, Glycine max
  Gm_smallRNAprecursor_7402
tagttatggacaatactacctgtcctgtagcaaataagtactggtcaaaactaccaatcatgtaacaaatagtcaaatagtttcggtcaaccggtcaaaactactggtcttatagaaaatttttggctctgataccggagatcagcgaaaaaggatcaaacggacagatatgaagtaagaatgatgcagtatgaaagatgaagatgcatttttcaaaacaaatatcaaggacacacctttacaagcttacaaatcctaggttttcgcaaacaaagaaactgaagtagcggcagagtcacacaggatcggtggaagggggagaagggagatgatagaaaacttcaaatttattcaaatcgaaagaagagcttacaaagtttttcttatgcagagcgcctctctctcaagactcctgaaaatggctgaatcaaagggtgactcacattatggttgaggactccttatatagtcaaaattttgctataagaccggtagttttgaccggaactatttgactgtttgttacatgacttgtagttttggctagtacttatttgctacaggacaggtagtattgcccggaactattacaagattaaaaatacaaacggttatgtgaccgtaattacaattaacttttaatcatcatttaaagggataccaaaacaatcatcttcgttttggtagaaaaggtcttcttctaattcttcttctgatgaacttgcctcttccttctttgatgaagagccttcttgaacctgctttgagcaaatctcaggaattggtccaaagaaatcccaccattggagaaaccagtttgggaaattgtagattatgttagtcttgaaatatatgagccaggagtgcttgaagcgtacgttctgatgccagaaaaccttggtccaagcctcaacgtaatcccaataggtataacctacaagatcaaaaggcactgaaaatttctttcctttgtttaagtccggaccaaaatgtcttggttgaagcacttttaatatttgaattgttgagtgagtgttcaacaattgatcctttgggtctttgaaatgtttgatagacactgaatttgagtctaccaaaataagttatagaaggttctggttgtgttgactgctgttggtttgaaatgaaagtctgacgggaa

SEQ ID NO: 14570 - DNA, 1153 bp, Glycine max
  Gm_smallRNAprecursor_7403
tatggacaatactacctgtcctgtagcaaataagtactggtcaaaactaccaatcatgtaacaaatagtcaaatagtttcggtcaaccggtcaaaactactggtcttatagaaaatttttggctctgataccggagatcagcgaaaaaggatcaaacggacagatatgaagtaagaatgatgcagtatgaaagatgaagatgcatttttcaaaacaaatatcaaggacacacctttacaagcttacaaatcctaggttttcgcaaacaaagaaactgaagtagcggcagagtcacacaggatcggtggaagggggagaagggagatgatagaaaacttcaaatttattcaaatcgaaagaagagcttacaaagtttttcttatgcagagcgcctctctctcaagactcctgaaaatggctgaatcaaagggtgactcacattatggttgaggactccttatatagtcaaaattttgctataagaccggtagttttgaccggaactatttgactgtttgttacatgacttgtagttttggctagtacttatttgctacaggacaggtagtattgcccggaactattacaagattaaaaatacaaacggttatgtgaccgtaattacaattaacttttaatcatcatttaaagggataccaaaacaatcatcttcgttttggtagaaaaggtcttcttctaattcttcttctgatgaacttgcctcttccttctttgatgaagagccttcttgaacctgctttgagcaaatctcaggaattggtccaaagaaatcccaccattggagaaaccagtttgggaaattgtagattatgttagtcttgaaatatatgagccaggagtgcttgaagcgtacgttctgatgccagaaaaccttggtccaagcctcaacgtaatcccaataggtataacctacaagatcaaaaggcactgaaaatttctttcctttgtttaagtccggaccaaaatgtcttggttgaagcacttttaatatttgaattgttgagtgagtgttcaacaattgatcctttgggtctttgaaatgtttgatagacactgaatttgagtctaccaaaataagttatagaaggttctggttgtgttgactgctgttggtttgaaatgaaagtctgac

SEQ ID NO: 14571 - DNA, 1088 bp, Glycine max
  Gm_smallRNAprecursor_7404
tcctttgtttatagctttccacacctttattcttacgccaatcttctccttcttcatctttcttcgtcttctttgttcatctacattaagcactttctaaagtagcttaggaacccatattcaagaagcagagtccccttggaataaattgtttgaccattatttgtgatatgtcaaagcaaggctgatcgaaatatattttggctgacttttcattcttacacaacaacaaaatgtttataaaatatgacacctgaacattttttcaccatgagaaaaagattttgaaaattatatactcttttatttaagagaaaaatatttttgcattgtccgtgtaaaattacaaattacacagacagctaatagtattttgacatgccaattttattgctttaattaaatcaaataaaaataattgaaaaaaaaagaaacaaatcacatataaggattggagtattggaagtaggggtgggaataggccaggccggcttacaagggcctacgacctgacctacataaagtctggcctgaactgacctatttaattaaaatgttagattcaggcttttttaaaagcctattaaattaaatagatcagacttagacttattaaaaagccttataagcctgataggccggcctatatatatgtatatatacttatattattttttgggtaccaatatatacttatattattttttgggtacaactattttttttgtaaactatcagattttgattactactccataacttctattcctataatcaagtaagactttaattacaatttaggtgtgagtcatgtgctcatttatatttctcattatttttattggctttcctatttctgttaaagtctcattttcctttaactttcctattacgttcctacttcaaagcaaagtgatattaaagatttaatgtaaagaagggcttttaaaaaagttaccaggttaaacttttaaaaatgtcaagccgaatcaaaataaaagtctttgataggctatatgtcaggctcaggcctcaaaaattcattgtagactagactcaggtctttcaaagcctgacctgacctattc

SEQ ID NO: 14572 - DNA, 1183 bp, Glycine max
  Gm_smallRNAprecursor_7405
gcttatatgttcataccatgccctaggggcttgtttcacaccatataaagcctttttcaatctataaacatgatttggcttatctgatatttcaaaacctggagattgttcaacatatacttcttcttgaattaagccatttagaaaagcacttttaacatccatttgataaagcttaaaattcattatgaatgtataagctaagagcattctaatggcttctaatcttgcaactggagcatatgtttcttcataatctataacttcttcttgattgtatccttttgcaactaatctagccttatttctaatgattatgccatgttcatctaacttattcctaaatacccattttgttcctatgatggggtagttttcaggtttctctactagttcccacacattgtttctttcaaacggatttagttcttcttgcatagcaacaatccaatgatcatctattatggcttcatttatatttttaggttcaatcatagacacaaaagtcatattattgcataaatctttaagagaatgtctagttgttaccccttttgagatatcaccaatagtgttgtcaaggggatgatcttttgaagctttccattcttttggaagttcatcatttgatttggcttcttctggaggatcttcattgcttcctttcctttttcctttagaatcttgtccatgaatatgcatttgttctaaagattctgcaacatcatctaaaatatcctttcttggagaaataacattagattcatcaaaggaaacatgaatagattcttcaatagtcatagttattttattatatattctataagctttactatgcaaggaaaggaattcacatgagtaatcaatttatttttaagataagcataaattcaaaaacaaagggggagaatttatgagagtaatcgactaggaaaaagtgtgtgtatgtttcttgatttcagaagttgtcatcataaaaaagggggagattgtagaagcaaggcttcatggtgaatgtgattcaaaggtgttttgatgataacaatgatgacaacaaaagatgatgacaaaggtgatgaaaaaaaagctcaaagatcaaagaacaactcaagtgaatcaaagaacatctcaagtgaatcaagaacaagtcaagagttcaagaatcaagaagaattcaagaatc

SEQ ID NO: 14573 - DNA, 1084 bp, Glycine max
  Gm_smallRNAprecursor_7406
tgaccaagttacaggtttcatatatgtccaccaaagatcttactcgtcttggagtagaggtgatgataattttttatcttgttgttgtggtggaggtgaaggtggttcacctgggtcttcttcttcagcttcttcttgagatagttgagcgggtataagaacgttcttctccactttttcttcatcccaattccaagaagcatattcatcaacttcaacatctcgactgatgacgagtttcttagtttgcaagttgtagacacggtagcccttagagatattgctatacccaaggaagatacctcgtatagtcttgtcttcaagcttgtgcctcttcacgtctggaatatgaatgcagcatatagatccaaagacccttaggtgctttgctgatggcttcttcccgttccaagcttcaattggagtcttgtcttttacagacttagttggacatctgttgagtatgtaaacagcagtgtagactgcttcagcccataatgtgttaggtagtcccttctccttgagcatcgatctagccatctccataactgtgcgattctttctctcggacactccattttgttgaggagaatatgcgactgtaagttgtctctcaacgccttcatcctaacaaaatctttcaaactcgtgaaaggtgtactctttgccgcgatcacttcatagaacttttatccgttttccactttgattttcagcaagggccttgaactttttgaatactccaaagacttctgatttttcttttagaaaatatacccatgtcattctagagaagtcgtcaatgaagagtatgaagtacctgttgttcccatgtgatggcgtcctcattggtccacaaatgtccctatgtatcagctccaatagatctttcgctctccatgctccgcttgttgagaaaggaaatcggtgttgcttaccaagaagacatccttcacacacttcattgttctcctttatgcttggaagatctctcatcatgttcttctcatgtaacaacttcaaggcatgtgagttgaagtggccaaatcttcgatgccatagccatgaatcatcaacttgtacc

SEQ ID NO: 14574 - DNA, 1165 bp, Glycine max
  Gm_smallRNAprecursor_7407
agctgaatctcccatcttcagcatagttgaaactcctgtctcattgtccaatgccacactttgatggcctgtatctcttttcttcgtatgttctagtgcttcagcttcagaatgcataaagcaatcagaatttccgagtgatcaccaaaggcttctgcatcagcattgacactctccaccctctttggtttatgcttctgtgttttcttccgtgcctcctcgttataaatcttagctttattcgaggttgcactagaacgatcaccaccaatctgtgcttcttcctcgtctatcaggtcaatatctttcctttcaacttttgttttgtaaattacagtgtagttttcaaaagcaaaggtgaaacgaaagatattgagctggtagaggaggaataggcacggattggtgttgatccttctagtgggacctccaataaatatgagaattataaggaggaagcatggaataaaacacagaagcataaaccaaagagggtggagagtgtcaacgctgatgcagaagcctttggtgatgactggaaaattctgattgctctatgcattgtgaagctgaagcagtagaacatacgaacaaaagagatacaggccatcaaaatgtgacattggacaataagacaggagtttcaactatgctgaagatgggagattcagctaaagttgtgatcaaacaagacatgaagggaagaaggcataaatatgggtttaacaacaatgaacgtgagaaggcacagaagaaaagggtgatggatgatgaaactgccgacaaacatcagctggatgaagtcctatgaatatcctcctcattctcaaagaggggaacgagcaacaatttgaaggttgtatattcaggaactaaagaattcaaaatagctagtaataagagggatttgtttttgggattttctgagcactaagagctgctacgcaagaagtttgcacttgaggagggaaggatatttgcagctaatgaacaagtttcttaactatttgtccttaagattttactatttctttttgctaatatgtaaatataaatggtataagggtatggcgtaaaaacatggtctatatttacttctaagattgttaggggtaaaaatgaccatgtccctatggcataaccttatattatttatatttacata

SEQ ID NO: 14575 - DNA, 1036 bp, Glycine max
  Gm_smallRNAprecursor_7408
tttagatattaattaaacgttaactacaattagtgtacacacacataaaatatatataagtagaacttttatttaaatcacgtaccttaacaacaatccaccaagcagcagtcttggatttcggttgtggagtatcatcaagtcctttcaaagcactagtgttgaatatgaggaacattaaaatattgatgttgttgagttatgccaatgaaaatgtattgaaaacaatactgacctgttaattattcctttaaggtagttgtctggcctgttatgtaaagaacaaaaccagacaactaggtttttcttaggcagaatgacgaccatttgccagtgtccactacagtagagacgaatatgagttattgtggtagtatagattatttaaattcaattattgtgtttgacttacccattcaggtaggctccaaggtaaacatctttttttgaactctgtacccaactcttgatgtaactttcgcattcaaattgtgattgtccagatctctgaatggactgtggctcgagaaatccatacacatcagaattccccgctcgcacacttgtctcagtcagatggctatgttgttaagtcaaagttaattatgtatgaatttaaaataattactttggtaattaatagtaatctaaaatgacttacagaatccacaactgtataacagatatgctgagacattgaccaccgtgtgcaatttcagggagatcttcgtgctttatatacaacgggaagttttgattaaacaccccgaatatggtaccatcccacataacctggagcggcttcaaaaacagttgtgggatggtcaatgtcatcaggtacaggggatcatcgacctcttcatctaggctttctggaggttttgctggagacacagttgcatgttgataaaacatagttaattagcaagttttgattacagtgaacaaattaattgaaaaaaataaacatataatcagagtaaaatacatgttctgataaacgcttcacaagatgtgttggccaagcaaggaaggt

SEQ ID NO: 14576 - DNA, 1036 bp, Glycine max
  Gm_smallRNAprecursor_7409
atgttcttacctcacgacgtttcataatatccaacttgcgacgaaaaactctcacatcatcatttccgatatgttggtttccacgtcgcagccacctacaaagattaaaatttaatataccctaaaaccatttattcttttgaaatgaaagacgcttttaaaaatgactaacctgtgcccggtgctttattttgtacttgggaaggagtcctctttaaagccaaggttggacatcgttcccatgcccacatttgtagtaagatgcacatacctccgattgatttagttttataatcggtggcactacacatctctctgtatagaaaagcaagtacagcaggtccccatgcatatgtgctacagtcttgaaagtcacgtaaaaattgaaggtatcttagcgaaactttgttactgcttttgtcaatgaacaagacacctctaatgaatcatagtatccatgcacggacaaaccttcgtacttgttcttcatcgtcgtggttatttatttgtgcaaaatggtgagccagccaactcaatttaaccacactacctttaatttcaccttcttgtggtctcactcccaataattcctcacataaatcagtccaattaagatttgttggaccgattaatggtagaccatccacacgtagacctaacaatacagagacgtcttggagagtaatagtacactctctacatctcatgtgaaacgtatgtgtttccggcctccatctttctatcaaagcacttattaatgagtcatttatttttaagtatcccatctttataatccagtaaaaaccaaattgtcgaagaaaagaaaaaatttgctctggaatttcttcttccccttgatacgtggggacaactcgtctgatatgtaatttccgatcttcttccctattccaaacatgttctgaaacatgcttaggatgcttccataatacatcactatcgatcgggccagacttaattttaatatgtgatggagatgacgatgaagatgccattgatactgcaataaattcacaaa

SEQ ID NO: 14577 - DNA, 1037 bp, Glycine max
  Gm_smallRNAprecursor_7410
atgttcttacctcacgacgtttcataatatccaacttgcgacgaaaaactctcacatcatcatttccgatatgttggtttccacgtcgcagccacctacaaagattaaaatttaatataccctaaaaccatttattcttttgaaatgaaagacgcttttaaaaatgactaacctgtgcccggtgctttattttgtacttgggaaggagtcctctttaaagccaaggttggacatcgttcccatgcccacatttgtagtaagatgcacatacctccgattgatttagttttataatcggtggcactacacatctctctgtatagaaaagcaagtacagcaggtccccatgcatatgtgctacagtcttgaaagtcacgtaaaaattgaaggtatcttagcgaaactttgttactgcttttgtcaatgaacaagacacctctaatgaatcatagtatccatgcacggacaaaccttcgtacttgttcttcatcgtcgtggttatttatttgtgcaaaatggtgagccagccaactcaatttaaccacactacctttaatttcaccttcttgtggtctcactcccaataattcctcacataaatcagtccaattaagatttgttggaccgattaatggtagaccatccacacgtagacctaacaatacagagacgtcttggagagtaatagtacactctctacatctcatgtgaaacgtatgtgtttccggcctccatctttctatcaaagcacttattaatgagtcatttatttttaagtatcccatctttataatccagtaaaaaccaaattgtcgaagaaaagaaaaaatttgctctggaatttcttcttccccttgatacgtggggacaactcgtctgatatgtaatttccgatcttcttccctattccaaacatgttctgaaacatgcttaggatgcttccataatacatcactatcgatcgggccagacttaattttaatatgtgatggagatgacgatgaagatgccattgatactgcaataaattcacaaaa

SEQ ID NO: 14578 - DNA, 1130 bp, Glycine max
  Gm_smallRNAprecursor_7411
tttacaagattggtgctgaccactttggttccgactttgcaatggctcaaaggaaaacccattctcctagtaagaaacttttatcatactattttttttatgtattagtgttataattcagaattctaagttatgctcttggttggtaattggtattgcagcatattggtggcgaatgtttgggtcacaaactccaaatttgcagaagctggctattaagattttgagtttgacttgcagtgcttcaggatgtgaaagaaattggagtgtgtttgagcaagtaattgtgacaaaactctaactatactttttaattttatttaattttgatgatcaagttatatttggagtatatttgagattgaaatcaacatttattgttatgttgtagattcattccaaaaaaagaaataggcttgagcacaagaggttgcatgatttggtgtttgtcaaatacaaccaacaattgaagcaaagatataatgcaagagatgaaattgatccaatttctcttaatgatattgatgtatgcaatgaatggctcgtgggagagatggatcaagatgatgataatgatgctggaaatgatttggtatttgaagatgatgatgctctaaattgggcaactgtgtatcaggcttcgggggttggagagtgtaggatgtatactaggcggaaaaagcaaaaaacaagtgttgctgctgcccaaacttctaaaaaacaggcaatggttgttggatcttcatcaaggaagcaaaaagcagtccaagaaaaatgatgaggatctagatgttgaggagaatattgatgttgaatctgaagaagaagaaatcatggtcaattttgaggcgtctgatggggaagagggagagggagatgctccattaccatatgataacaacgaagatgattatgttgggattggagaagatgattagagcctcaaccttcactttgcagtttgcattatgtttttatcattttcttattttgaactctttaatgagtttatttggtgttggtatttgattattgtatgaactcatgaaacttttttagtttatttgaatgcaatcctttgtttttttcaatttcaatgagtttatatatatgttttttttttttttgtg

SEQ ID NO: 14579 - DNA, 1124 bp, Glycine max
  Gm_smallRNAprecursor_7412
tttaactaaacttggggtgatgtcatttctgttatccttctttttatagtgacaaggtataacttagtttgccttaaaaaagtataactttgtttaaggtttaactgcacttttggtcttcatgtgtgattttagtcctcataggtttcaattatgcaattttagtcccccaagtttcaattgtaattttatttagatgcactagttatggtgagtatgtaattttagtctctcacgcttcaattacgcaaattaggttcctagacatcacaaatgtgtgattttcatcccctaccccatggcccgtgtgtgtgtgcaattaatgttttaagaaatggactggactggtcgatcgccacattagttcgattcatttaattcacgaattgggtcctcctattttgtaaaatcatgcaatgttagtctcccaagccacaattggacattgaccgttagcaagtgatgttgactgccacgtgtcacattcttattgaatgatgactgtcacgtgtcatgttctgattggatgtcaattccatgaaagatgaaatgcattgttgttttcattgatcaaccagaacatgacatgtggtagtcatcatccaataagaacgtgacacgtgacagtcaacatcacttgctaacggtcaactttcaattgtggtctgggggaccaacattgcatgattttataaaataggaggacctaattcgtgaattaaattactagaggaccaaatccaaaactagagataaactgtgggaccaaaaatgcaattttgccctcattttatcattcttttaaaactaatttttagtacgaatgaagaactgacagttgattttagttttgtccctggattctgtttcaagcctgattaatgaatgtttccattaaatgttaacgtaggtataataaaactataaatgctatataatcaaccaaaaacctattatatattttatgaacatgatgctcttccatgacttttgttgcttctatatcccaatcgtacttttatttgtttgttccttctttcttatcacttcaatccgttcagtccaacaaggacaatcttatcgtttcttataacgacacctcatcagtttttgtctttgtaaga

SEQ ID NO: 14580 - DNA, 1115 bp, Glycine max
  Gm_smallRNAprecursor_7413
aactaaacttggggtgatgtcatttctgttatccttctttttatagtgacaaggtataacttagtttgccttaaaaaagtataactttgtttaaggtttaactgcacttttggtcttcatgtgtgattttagtcctcataggtttcaattatgcaattttagtcccccaagtttcaattgtaattttatttagatgcactagttatggtgagtatgtaattttagtctctcacgcttcaattacgcaaattaggttcctagacatcacaaatgtgtgattttcatcccctaccccatggcccgtgtgtgtgtgcaattaatgttttaagaaatggactggactggtcgatcgccacattagttcgattcatttaattcacgaattgggtcctcctattttgtaaaatcatgcaatgttagtctcccaagccacaattggacattgaccgttagcaagtgatgttgactgccacgtgtcacattcttattgaatgatgactgtcacgtgtcatgttctgattggatgtcaattccatgaaagatgaaatgcattgttgttttcattgatcaaccagaacatgacatgtggtagtcatcatccaataagaacgtgacacgtgacagtcaacatcacttgctaacggtcaactttcaattgtggtctgggggaccaacattgcatgattttataaaataggaggacctaattcgtgaattaaattactagaggaccaaatccaaaactagagataaactgtgggaccaaaaatgcaattttgccctcattttatcattcttttaaaactaatttttagtacgaatgaagaactgacagttgattttagttttgtccctggattctgtttcaagcctgattaatgaatgtttccattaaatgttaacgtaggtataataaaactataaatgctatataatcaaccaaaaacctattatatattttatgaacatgatgctcttccatgacttttgttgcttctatatcccaatcgtacttttatttgtttgttccttctttcttatcacttcaatccgttcagtccaacaaggacaatcttatcgtttcttataacgacacctcatcagtttttgtcttt

SEQ ID NO: 14581 - DNA, 1108 bp, Glycine max
  Gm_smallRNAprecursor_7414
aacttggggtgatgtcatttctgttatccttctttttatagtgacaaggtataacttagtttgccttaaaaaagtataactttgtttaaggtttaactgcacttttggtcttcatgtgtgattttagtcctcataggtttcaattatgcaattttagtcccccaagtttcaattgtaattttatttagatgcactagttatggtgagtatgtaattttagtctctcacgcttcaattacgcaaattaggttcctagacatcacaaatgtgtgattttcatcccctaccccatggcccgtgtgtgtgtgcaattaatgttttaagaaatggactggactggtcgatcgccacattagttcgattcatttaattcacgaattgggtcctcctattttgtaaaatcatgcaatgttagtctcccaagccacaattggacattgaccgttagcaagtgatgttgactgccacgtgtcacattcttattgaatgatgactgtcacgtgtcatgttctgattggatgtcaattccatgaaagatgaaatgcattgttgttttcattgatcaaccagaacatgacatgtggtagtcatcatccaataagaacgtgacacgtgacagtcaacatcacttgctaacggtcaactttcaattgtggtctgggggaccaacattgcatgattttataaaataggaggacctaattcgtgaattaaattactagaggaccaaatccaaaactagagataaactgtgggaccaaaaatgcaattttgccctcattttatcattcttttaaaactaatttttagtacgaatgaagaactgacagttgattttagttttgtccctggattctgtttcaagcctgattaatgaatgtttccattaaatgttaacgtaggtataataaaactataaatgctatataatcaaccaaaaacctattatatattttatgaacatgatgctcttccatgacttttgttgcttctatatcccaatcgtacttttatttgtttgttccttctttcttatcacttcaatccgttcagtccaacaaggacaatcttatcgtttcttataacgacacctcatcagtttttgtct

SEQ ID NO: 14582 - DNA, 1121 bp, Glycine max
  Gm_smallRNAprecursor_7415
aacttggggtgatgtcatttctgttatccttctttttatagtgacaaggtataacttagtttgccttaaaaaagtataactttgtttaaggtttaactgcacttttggtcttcatgtgtgattttagtcctcataggtttcaattatgcaattttagtcccccaagtttcaattgtaattttatttagatgcactagttatggtgagtatgtaattttagtctctcacgcttcaattacgcaaattaggttcctagacatcacaaatgtgtgattttcatcccctaccccatggcccgtgtgtgtgtgcaattaatgttttaagaaatggactggactggtcgatcgccacattagttcgattcatttaattcacgaattgggtcctcctattttgtaaaatcatgcaatgttagtctcccaagccacaattggacattgaccgttagcaagtgatgttgactgccacgtgtcacattcttattgaatgatgactgtcacgtgtcatgttctgattggatgtcaattccatgaaagatgaaatgcattgttgttttcattgatcaaccagaacatgacatgtggtagtcatcatccaataagaacgtgacacgtgacagtcaacatcacttgctaacggtcaactttcaattgtggtctgggggaccaacattgcatgattttataaaataggaggacctaattcgtgaattaaattactagaggaccaaatccaaaactagagataaactgtgggaccaaaaatgcaattttgccctcattttatcattcttttaaaactaatttttagtacgaatgaagaactgacagttgattttagttttgtccctggattctgtttcaagcctgattaatgaatgtttccattaaatgttaacgtaggtataataaaactataaatgctatataatcaaccaaaaacctattatatattttatgaacatgatgctcttccatgacttttgttgcttctatatcccaatcgtacttttatttgtttgttccttctttcttatcacttcaatccgttcagtccaacaaggacaatcttatcgtttcttataacgacacctcatcagtttttgtctttgtaagagacta

SEQ ID NO: 14583 - DNA, 1050 bp, Glycine max
  Gm_smallRNAprecursor_7416
agagtttaaggtgcccttgatatattctgtcaaaatcaaagacacttaaaaatgcttgtcatcttgcaaaaatttgtttcagggcaaggtttttaacatccttttgtaaaatatctttgtctgacttgcaatcaaccctgattaaaaatttttgatttaataaatctgattgaaatttggaaatgcactaaacaattgctaaaacttcttttttaacagttgaatattttaattgtgcagaattccaatgctttgatgtatatgcaatgacatgatcttggccatggactctttgtttgaggatgccaccataacctatgtctgatgcatcggttttgacaattttgaatgcctgcggaatgggaagatacaaacattttatagattggactttgagtttgatctctttaactatttgggtatggagatcagaccaatgaggcaaatttttattcagcctatcatataatggtttgacaatattgtttaaataagggacaaattctcctacataatttagacaaccgagaaatctttgtcactgggttttgtctaagatttggttggggaatttgttagcaaattctattgacctttctattggaatgattgtaccttgatatatatatatatatatatatatatatatatatatatatatatatatatatatatatatatatatatatatatatatatatatatatatatatatatatatatatatatatatatatatatatggaaaagattgatttttgatttagagactgccaaaccattctgtttgatgatatggatgaaagtttgaagatatttgaaatgttggtcaatgttttgggaaaagattaaaacatcatctatgtagacaatgacaaattttgaatagggatttaaaatatcattcataattttttaaaattctgaaggggcattcttcagttcgaatggcattacattccactcgtatttcccgaaaggtacagtgaacgttgttttgtacctatctgattcttggatctagatttgccaaaatctggatttcatatc

SEQ ID NO: 14584 - DNA, 1084 bp, Glycine max
  Gm_smallRNAprecursor_7417
caagttacaggtttcatatatgtccaccaaagatcttactcgtcttggagtagactctagtgacaatagttcttgatcttgttgttgtggtggaggtgaaggtggttcacttgggtcttcttcctcagcttcttcttgaggtagttgagcgagtataagaatgttcttctccactttttcttcatcccaattccaagaagcgtactcatcaactacaacatctcgactgatgacgagtttcttagtttgcaagttgtagacacggtagcccttagagatattgctatacccaaggaagataccttgtatagtcttgtcttcaagcttgtgcctcttcacgtttggaatatgaaagtagcatatagatccaaacacccttaggtgctttgctgatggcttcttcccattccaagcttcaattggagtcttgtcttttacagacttagttggacatctgttgagtatgtaaatagcagtgtagactgcttcagcccagaatgtgttaggtagtcccttctccttgagcatcgatctagccatctccataattgtgcgattctttctctcggacactccattttgttgaggagaatatgcgactgtaagttgtcgctcaatgccttcatcctcacaaaatctttcaaactcgcgagaggtgtactctttgccgcgatcacttcttagtacttttattcgttttccactttgattttcagcaagggccttgaactttttgaatactccaaagacttctgatttttcttttagaaaatatacccatgtcattctagagaagtcatcaatgaagagtatgaagtacatgttgttcccatgtgatggcgtcctcattggtccacaaacgtccgtatgtatcagctccaatagatctttcgctctccatgctccgcttgttgagaaaggaaatcggtgttgcttaccaaggagacatccttcacacacttcattgttctcctttatgcttggaagatctctcatcatgttcttctcatgtaacaacttcaaggcatgtgtgttgaagtggccaaatcttcgatgccatagccatgaattatcaacttgtacc

SEQ ID NO: 14585 - DNA, 1079 bp, Glycine max
  Gm_smallRNAprecursor_7418
taaggaaattcctagaaccttctcttcttctggaagtttctccataatttttctttcctccattttctttgttttggggctgaaatttaaactttgactggaaggcattttcaattgtatcttctttatgcctatacagtctttgctcatatgcttcaagagagcccacaagttctgtctctgataaagtggacagatctttggtctcctcaatcgttgtcacgattgggtcaaacttttggggcatagtaattagaattttctcaacaattttcttgtcaagtatatcttccccaaaagctctcatttgattaactattcctttaactttagaataataatctttaattgtcttagactccttcatcttcaatagttcaaaatctcttcttagagattgaagtttaatggcacgtaccttaacacttccttgaaactcctcctgcaatgtgttccacgcttctttggcagtcttagctcccataattcttgagaaaattggatcagtcaccgcttgttgcaaggtgaacaacgcctttgaatttttttgtttatttttctttaactctttttcttgagatgcattaagagctgaagtatccgcgagaatggtgaagccttcttctactttgtcccataaatcttgagatgaaaaatatgtttccattttaacacgccagaaatcataattttcaccattgaagatagggacagaaatagttgacgattgagtagtgttatccatagcttagaaaaaatattattagagtgggttaatagtacaaaggaaatttttgaaatagggaggattttggaatggtaggtaggtaagataactacgcccaatgtatgaccgaacatagctctgatgccactgttggtagttggttagatgatagttgataattttagagaattgttttagaaagaagactatgtcattgatttcttggattttcaattacaacataccaattgcttatttataggctcaagtcaccaacctctcaatggtggtaaatgtttttacattactttaggtctttctagagttttcatgatagattagtatcatgata

SEQ ID NO: 14586 - DNA, 1214 bp, Glycine max
  Gm_smallRNAprecursor_7419
acattaacaaagcaatgctgatcagtgatgcaatggagacaggaacagttcaaattaattcagcaccagctcgtggacctgatcactttccttttcaggtgaaacatttgtcctccatcttgctaagttgccataaaaattttgtaggtagtaataccaattgtaaaattccttttttataagaaacaaattcaaaagtttttacaaaaaaaaaaaaaaaaaaaacaggaaaacattcctcctttattcccacacaacatcattaattgatgagtttaacttatataccctcacatctaatcattttttacagagattgatgggtcattgagcttcgggtgttgctaggtgcacccagcattattgaccttcgggtgttgctaggtgtacccagcattattgctggtgcacccaacattttttaaaaataccaaaattgttcatgtattttttttgcatttgtgataagtgtgcgtgagggtggtccgtaaatcgtatggatcaagttgatccgtaagattgatacgaatcaagttgattcgtaagtttgatacagatcaagttgatccgtatgttgatattaagcatacggatcaacttgatccgtaagccttttacagtactacacggatcaacttcatccataaaagccttacgcatcaacttgatccgtaaaagacttacggatcaaggacggatcaaattgatccgtaaaagacttacggatcaagttgatccgcaaaccttttacggatcaacttaaaagacttacggatcaaagatattttcgtcatttcatcttaaatgttgggtgcaccaacaataatgctgggtacacctaacaacacccttgaccttcacccgtttcctagcataaacccgtgaaagattgtttggacccaatggcctatcacagatattcaataagatatgatcacattatcatgccatcttattcgttaatattatgtggcaataaggtaactcaactgatgatatcatgaatttaatgctaaaaggtgtataaaaaatattaagctcaattgatattacgaaatttaagaataaatataaaaccaagcagagtcataaatgtcatttagtaacatatttttccgtctaaacaagcaaatatgattcgtggcagggtctgaaggatagtggaattggttctcaagggatcaccaacagtattaacatgatgacaaaggtta

SEQ ID NO: 14587 - DNA, 1052 bp, Glycine max
  Gm_smallRNAprecursor_7420
ttcaggtgaaacatttgtcctccatcttgctaagttgccataaaaattttgtaggtagtaataccaattgtaaaattccttttttataagaaacaaattcaaaagtttttacaaaaaaaaaaaaaaaaaaaacaggaaaacattcctcctttattcccacacaacatcattaattgatgagtttaacttatataccctcacatctaatcattttttacagagattgatgggtcattgagcttcgggtgttgctaggtgcacccagcattattgaccttcgggtgttgctaggtgtacccagcattattgctggtgcacccaacattttttaaaaataccaaaattgttcatgtattttttttgcatttgtgataagtgtgcgtgagggtggtccgtaaatcgtatggatcaagttgatccgtaagattgatacgaatcaagttgattcgtaagtttgatacagatcaagttgatccgtatgttgatattaagcatacggatcaacttgatccgtaagccttttacagtactacacggatcaacttcatccataaaagccttacgcatcaacttgatccgtaaaagacttacggatcaaggacggatcaaattgatccgtaaaagacttacggatcaagttgatccgcaaaccttttacggatcaacttaaaagacttacggatcaaagatattttcgtcatttcatcttaaatgttgggtgcaccaacaataatgctgggtacacctaacaacacccttgaccttcacccgtttcctagcataaacccgtgaaagattgtttggacccaatggcctatcacagatattcaataagatatgatcacattatcatgccatcttattcgttaatattatgtggcaataaggtaactcaactgatgatatcatgaatttaatgctaaaaggtgtataaaaaatattaagctcaattgatattacgaaatttaagaataaatataaaaccaagcagagtcataaatgtcatttagtaacatatttttccgtctaaacaagcaaatatgattcgtggc

SEQ ID NO: 14588 - DNA, 1052 bp, Glycine max; identical to SEQ ID NO: 14587
  Gm_smallRNAprecursor_7421

SEQ ID NO: 14589 - DNA, 1119 bp, Glycine max
  Gm_smallRNAprecursor_7422
ttcaggtgaaacatttgtcctccatcttgctaagttgccataaaaattttgtaggtagtaataccaattgtaaaattccttttttataagaaacaaattcaaaagtttttacaaaaaaaaaaaaaaaaaaaacaggaaaacattcctcctttattcccacacaacatcattaattgatgagtttaacttatataccctcacatctaatcattttttacagagattgatgggtcattgagcttcgggtgttgctaggtgcacccagcattattgaccttcgggtgttgctaggtgtacccagcattattgctggtgcacccaacattttttaaaaataccaaaattgttcatgtattttttttgcatttgtgataagtgtgcgtgagggtggtccgtaaatcgtatggatcaagttgatccgtaagattgatacgaatcaagttgattcgtaagtttgatacagatcaagttgatccgtatgttgatattaagcatacggatcaacttgatccgtaagccttttacagtactacacggatcaacttcatccataaaagccttacgcatcaacttgatccgtaaaagacttacggatcaaggacggatcaaattgatccgtaaaagacttacggatcaagttgatccgcaaaccttttacggatcaacttaaaagacttacggatcaaagatattttcgtcatttcatcttaaatgttgggtgcaccaacaataatgctgggtacacctaacaacacccttgaccttcacccgtttcctagcataaacccgtgaaagattgtttggacccaatggcctatcacagatattcaataagatatgatcacattatcatgccatcttattcgttaatattatgtggcaataaggtaactcaactgatgatatcatgaatttaatgctaaaaggtgtataaaaaatattaagctcaattgatattacgaaatttaagaataaatataaaaccaagcagagtcataaatgtcatttagtaacatatttttccgtctaaacaagcaaatatgattcgtggcagggtctgaaggatagtggaattggttctcaagggatcaccaacagtattaacatgatgacaaaggt

SEQ ID NO: 14590 - DNA, 1119 bp, Glycine max; identical to SEQ ID NO: 14589
  Gm_smallRNAprecursor_7423

SEQ ID NO: 14591 - DNA, 1068 bp, Glycine max
  Gm_smallRNAprecursor_7424
taggtagtaataccaattgtaaaattccttttttataagaaacaaattcaaaagtttttacaaaaaaaaaaaaaaaaaaaacaggaaaacattcctcctttattcccacacaacatcattaattgatgagtttaacttatataccctcacatctaatcattttttacagagattgatgggtcattgagcttcgggtgttgctaggtgcacccagcattattgaccttcgggtgttgctaggtgtacccagcattattgctggtgcacccaacattttttaaaaataccaaaattgttcatgtattttttttgcatttgtgataagtgtgcgtgagggtggtccgtaaatcgtatggatcaagttgatccgtaagattgatacgaatcaagttgattcgtaagtttgatacagatcaagttgatccgtatgttgatattaagcatacggatcaacttgatccgtaagccttttacagtactacacggatcaacttcatccataaaagccttacgcatcaacttgatccgtaaaagacttacggatcaaggacggatcaaattgatccgtaaaagacttacggatcaagttgatccgcaaaccttttacggatcaacttaaaagacttacggatcaaagatattttcgtcatttcatcttaaatgttgggtgcaccaacaataatgctgggtacacctaacaacacccttgaccttcacccgtttcctagcataaacccgtgaaagattgtttggacccaatggcctatcacagatattcaataagatatgatcacattatcatgccatcttattcgttaatattatgtggcaataaggtaactcaactgatgatatcatgaatttaatgctaaaaggtgtataaaaaatattaagctcaattgatattacgaaatttaagaataaatataaaaccaagcagagtcataaatgtcatttagtaacatatttttccgtctaaacaagcaaatatgattcgtggcagggtctgaaggatagtggaattggttctcaagggatcaccaacagtattaacatgatgacaaaggt

SEQ ID NO: 14592 - DNA, 1051 bp, Glycine max
  Gm_smallRNAprecursor_7425
tgtaaaattccttttttataagaaacaaattcaaaagtttttacaaaaaaaaaaaaaaaaaaaacaggaaaacattcctcctttattcccacacaacatcattaattgatgagtttaacttatataccctcacatctaatcattttttacagagattgatgggtcattgagcttcgggtgttgctaggtgcacccagcattattgaccttcgggtgttgctaggtgtacccagcattattgctggtgcacccaacattttttaaaaataccaaaattgttcatgtattttttttgcatttgtgataagtgtgcgtgagggtggtccgtaaatcgtatggatcaagttgatccgtaagattgatacgaatcaagttgattcgtaagtttgatacagatcaagttgatccgtatgttgatattaagcatacggatcaacttgatccgtaagccttttacagtactacacggatcaacttcatccataaaagccttacgcatcaacttgatccgtaaaagacttacggatcaaggacggatcaaattgatccgtaaaagacttacggatcaagttgatccgcaaaccttttacggatcaacttaaaagacttacggatcaaagatattttcgtcatttcatcttaaatgttgggtgcaccaacaataatgctgggtacacctaacaacacccttgaccttcacccgtttcctagcataaacccgtgaaagattgtttggacccaatggcctatcacagatattcaataagatatgatcacattatcatgccatcttattcgttaatattatgtggcaataaggtaactcaactgatgatatcatgaatttaatgctaaaaggtgtataaaaaatattaagctcaattgatattacgaaatttaagaataaatataaaaccaagcagagtcataaatgtcatttagtaacatatttttccgtctaaacaagcaaatatgattcgtggcagggtctgaaggatagtggaattggttctcaagggatcaccaacagtattaacatgatgacaaaggt

SEQ ID NO: 14593 - DNA, 1054 bp, Glycine max
  Gm_smallRNAprecursor_7426
ttgaaggaattaataattaagattgattagaaaattttcgtttttgttaggcatctctttgaaactatgtagcataactgatgatatattctgtttagaaaaacttatttttaagagaatttatctctaacgcaacatttttattgaattcattcatatctctcatattccaatatatttaattttcattttcaatattatataaaatgcaacatatgccaagaatcaagaactatatttactttgacttaaacaaaaataactaaatttacttttgtaatattggagtattaaaatcggccgcggggtacacggagtggagaatagtagggccggagaaggtgttggatgaagcctgcgaaggctattgggctgaaagaaactaggctaattaatgcttaatttttggagtgctaggtgcaccctgtactaatcacaaaaagacagaaatactccttacggatcaagttgatctgtaagttaatttttaagacttacagatcaagttgatccgtaagtcttttacggatcaagttgattcgtaagttaatttttaagacttacggatcaagttgatctgtaaggggagaaattagcagagacagttttgtcattttcaaaaaatactgggtgcacctaacaatattttaatttttgtggcattgcatcatgtaattatttaaagcaccccattatttgatttgatgcaccaaagtgtattacagattgaataatttgtaatacaacataatgcatttgagatgcaccaaagtaaataatggggtgcgttaaataattcccattgcatttggatccaaaaatggaccaggatttgcctagtggtttaatacaataataacttaaatactaatgacaataataaaaatatcatcagataattctcttaatgaaaatactaattagaattggaattctatctctgcaattagtataataaaagtttgcatttaaaaattatacagttttctaagctaaaacataaattccgattgaagaagaacaaaataacacccaagatattgtatttaagttt

SEQ ID NO: 14594 - DNA, 1092 bp, Glycine max
  Gm_smallRNAprecursor_7427
cgccctccttatttcttcctcattaaaacttcccaccagcgattgattttcttgctgtccaatgctgttaaagctgatcccattcagttttggcctgcactgctggggatcttggaatcaatgttgttaatggcggatggcggttcatggcagaaagtcaaaatttcgccataaaaatatggcggatggcgtagcggaaaatggcggatgtcatggcggacaaaaaaaaaaaacatatatataaactcattgaaattgaaaaaaacaaaggattgcattcaaataaactaaaaaagtttcatgagttcatacaataatcaagtaccaacaccaaataaactcattaaagagttcaaaataagaaaatgataaaaacataatgcaaagtgcaaagtgaggctctaatcatcttctccaatctcaacataatcatcttcgttgttatcatatggtaatggagcatctccctctccttcttccccatcagacgcctcaaaattgaccatgatttcttcttcttcagattcaacatcaatattttcctcagcatctagatcctcatcattttcttggactgctttttgcttccttgatgaagatccaacaaccattgcctgttttttagaagtttgggcagcagcaacacttgttttttgctttttccgcctagtatacatcctacactctccaacccccgaagcctgatacacagttgcccaatttagagcatcatcatcttcaaataccaaatcatttccagcatcattatcatcatcttgatccatctctcccacgagccattcattgcatacatcaatatcattaagagaaattggatcaatttcatctcttgcattatatctttgcttcaattgttggttgtatttgacaaacaccaaatcatgcaacctcttgtgctcaagcctatttctttttttggaatgaatctacaacataacaaataaatgttgatttcaatctcaaatatactccaaataaaacttgatcatcaaaattaaataaaattaaaaagtatagttagagttttgtcacaattacttgctcaaacacactccaatttctttcacatcc

SEQ ID NO: 14595 - DNA, 1133 bp, Glycine max
  Gm_smallRNAprecursor_7428
gatggcgtagcggaaaatggcggatgtcatggcggacaaaaaaaaaaaacatatatataaactcattgaaattgaaaaaaacaaaggattgcattcaaataaactaaaaaagtttcatgagttcatacaataatcaagtaccaacaccaaataaactcattaaagagttcaaaataagaaaatgataaaaacataatgcaaagtgcaaagtgaggctctaatcatcttctccaatctcaacataatcatcttcgttgttatcatatggtaatggagcatctccctctccttcttccccatcagacgcctcaaaattgaccatgatttcttcttcttcagattcaacatcaatattttcctcagcatctagatcctcatcattttcttggactgctttttgcttccttgatgaagatccaacaaccattgcctgttttttagaagtttgggcagcagcaacacttgttttttgctttttccgcctagtatacatcctacactctccaacccccgaagcctgatacacagttgcccaatttagagcatcatcatcttcaaataccaaatcatttccagcatcattatcatcatcttgatccatctctcccacgagccattcattgcatacatcaatatcattaagagaaattggatcaatttcatctcttgcattatatctttgcttcaattgttggttgtatttgacaaacaccaaatcatgcaacctcttgtgctcaagcctatttctttttttggaatgaatctacaacataacaaataaatgttgatttcaatctcaaatatactccaaataaaacttgatcatcaaaattaaataaaattaaaaagtatagttagagttttgtcacaattacttgctcaaacacactccaatttctttcacatcctgaagcactgcaagtcaaactcaaaatcttaatagctagcttctgcaaatttggagtttgtgacccaaacattcgccaccaatatgctgcaataccaattaccaaccaagagcataacttagaattctgaattataacactagtacataaaaaaatagtatgataaaagtttcttactaggagaatgggttttcctttgagccattgcaaagtcggaaccaaagt

SEQ ID NO: 14596 - DNA, 1058 bp, Glycine max
  Gm_smallRNAprecursor_7429
aaatgtggttggcagcagaccaacttaccctctgaggctcataataaatataaaaacctggaaccaagactcggtttgttgtctcactggcctttctcttcttgtcacaattcaaaatatgcctttctccatttgtttccactctcacaatttaatgtgcccctcctattttttgcttggtcgttggcaaattaaatgccaccttatttaaggctctgcatctctctgtctctgtccacggtacccctctctcttccattatattttaagaatctcacaggacactatagttacttctagggaacataatactactaccttcttcatcaaactttccaactattatgttttctggtgatggatatataggagtgttaccataggggtaagcttttcttatcacgttcattattaacaaatggttctttgtttcttttcaaagtgcaggaataggaagtgtgtaggatcaaacttctaacgaatagcttgagaacttgagatattggtgcggttcaatcagaaggcagtgttttatgatccaaaaactctgtgttatttgattgagccgtgccaatatcacatgtaattcatctcgggctatgacattttttttctctatatatggaactttgcagcaccataaaggtttttttatttatttagttttatgtttttttttatatatgttgattgttgcatgttcttagagttcataagtagcaatggtaactggaaatgagtgttgacaaagagagtaagtaccgttaattgtttttttttctaccgcagatttggtgttcatcatgcttgctactttgcggtgaccaccttattagcatgttttgttgtgtctccgaaaagcggtgatcaattttttgatgtgggatagagtgaaattggtatgataggtaggaaatttgttttaacttttgtttttttcttttcagggtggtagggacttcattagaggcggatcaagttgcaagtggcaattggcaaagataaatctttctttacttttactttgcttctatttaaaggttcatctttttgttttt

SEQ ID NO: 14597 - DNA, 1071 bp, Glycine max
  Gm_smallRNAprecursor_7430
aaagtttatattttaattcttaaaatgttttgttattaaaaaattttaactaaaagatttaaaaaaatttaaccagaggagccttttggtatttaagatctaaacttaaaaaattaaaaaaatcacttattaaattttagagactaaaaaatttatatcaaaaaataaaatataagtttaaaactatgtagtatttatttatctaaaactaagttgaagctaggtcgaaaagacgaaaacaaggctgaaaaactagggctgacgtgatatgaagcctatttattttggtgttatgtggatctgaaaatcaagaagccgaacgaaggaacacaaatttatattagatctgaaagaaaagagaagagttttaggtttgtgggagaagaagaagatgaagaagatgaggcgcagttgtcctcttcacttgaaatcaaattcaagaccgctttgccttccttttcagtacattccatttcgaatggaaacagtgctttgctattttcatttttaaaatagacattgggcttcttcttgttcctcttttttccttccaattccgatttggtcctaatgcctattttaaaatgaaaacaatgatacactgcttttgtttgaaactattgttaaggaagataacgccgacgagttcttcaatttgattttagctgacgaggacttttttattcatccacagtctctgaatctgtacgactaaacaaggttttctccattgactcctaattttatgagctactcattgaatttgtgtctgtgtgttttagcgatgcacatttcaaacataattacagtctcaattgattttctctgctctgatggactttagcccaagggagctttttaattgtccctcttttctatctaccttcccctatatacccaaaacttaagaactgcacgctttttgtcttttcttttctgcttgctcctctttcttctttaacactttttagtgtgaaacaaacatgctagtttaaggaaatactatttgttgaaaatatgcatgtgctcaaccactatcttgtaatcatggagcaaacagaaaaaaaaaag

SEQ ID NO: 14598 - DNA, 1065 bp, Glycine max
  Gm_smallRNAprecursor_7431
cctttctgaacgagatctcagatctctggttgatgcttcaaagaaccctaatctcatggctattgtttcctgcacttccatcattgcttccaaatgaatgaatgaatgaatgaatatactactctgtctctctctatctctctctctctctcgctcactcactcactcgctatgccatgcttcttgctatgatatgtttctttctttttctttttatgcgacctctggggtccttcactcgctctcttatctgtctctcactttcctaaccctaagaggctgtgaagacggtttcggagtgtggacccgatggatccgtcgccgtcaaacatcctcgccggtggcgcggcaacgttatcggttttttgatttcgttgcagccatccatggcggtgttgttttttaacgaccgatctcattgctgtgccagatctgagcctcaccaaatccctaactgaagatctctccttcgctgacgttatcttaacgcaatgtttgacagagatgtatggagtgagagaagggaaatgatattttccgatcccatcgttactctcttccctctctcattccatacatcgtctgacgaacctagcgttgatttgttctgcatgtttagtttactgtttgtttcagcctagaaagctttattttcttcccgtgaaagtaatgaatgtctgttgttacttattttttctaatttctgatgtttgttgatgttgaaatattgtgtcatgcaagcagctcttatggcaggattagcttcattaaggactggtgcgtaaatgctctgaaattcggtagtaatgttctgcttttggtgatgaacttgagtcatgtgttaacactagttatcgtgtgttaagcgatttatagaactgggagaatgatttttgtactattacctatttgccattttataatctttatcagagtttatttttctgattttctgtataatggtcaacggtttggtttcgagtcttgaggcaagtaatgaagacttactgcaatgcatttatgtttttccaattttaagaaacccatgtgattgtgagagtactt

SEQ ID NO: 14599 - DNA, 1066 bp, Glycine max
  Gm_smallRNAprecursor_7432
cctttctgaacgagatctcagatctctggttgatgcttcaaagaaccctaatctcatggctattgtttcctgcacttccatcattgcttccaaatgaatgaatgaatgaatgaatatactactctgtctctctctatctctctctctctctcgctcactcactcactcgctatgccatgcttcttgctatgatatgtttctttctttttctttttatgcgacctctggggtccttcactcgctctcttatctgtctctcactttcctaaccctaagaggctgtgaagacggtttcggagtgtggacccgatggatccgtcgccgtcaaacatcctcgccggtggcgcggcaacgttatcggttttttgatttcgttgcagccatccatggcggtgttgttttttaacgaccgatctcattgctgtgccagatctgagcctcaccaaatccctaactgaagatctctccttcgctgacgttatcttaacgcaatgtttgacagagatgtatggagtgagagaagggaaatgatattttccgatcccatcgttactctcttccctctctcattccatacatcgtctgacgaacctagcgttgatttgttctgcatgtttagtttactgtttgtttcagcctagaaagctttattttcttcccgtgaaagtaatgaatgtctgttgttacttattttttctaatttctgatgtttgttgatgttgaaatattgtgtcatgcaagcagctcttatggcaggattagcttcattaaggactggtgcgtaaatgctctgaaattcggtagtaatgttctgcttttggtgatgaacttgagtcatgtgttaacactagttatcgtgtgttaagcgatttatagaactgggagaatgatttttgtactattacctatttgccattttataatctttatcagagtttatttttctgattttctgtataatggtcaacggtttggtttcgagtcttgaggcaagtaatgaagacttactgcaatgcatttatgtttttccaattttaagaaacccatgtgattgtgagagtacttt

SEQ ID NO: 14600 - DNA, 1066 bp, Glycine max; identical to SEQ ID NO: 14599
  Gm_smallRNAprecursor_7433

SEQ ID NO: 14601 - DNA, 1064 bp, Glycine max
  Gm_smallRNAprecursor_7434
ctttctgaacgagatctcagatctctggttgatgcttcaaagaaccctaatctcatggctattgtttcctgcacttccatcattgcttccaaatgaatgaatgaatgaatgaatatactactctgtctctctctatctctctctctctctcgctcactcactcactcgctatgccatgcttcttgctatgatatgtttctttctttttctttttatgcgacctctggggtccttcactcgctctcttatctgtctctcactttcctaaccctaagaggctgtgaagacggtttcggagtgtggacccgatggatccgtcgccgtcaaacatcctcgccggtggcgcggcaacgttatcggttttttgatttcgttgcagccatccatggcggtgttgttttttaacgaccgatctcattgctgtgccagatctgagcctcaccaaatccctaactgaagatctctccttcgctgacgttatcttaacgcaatgtttgacagagatgtatggagtgagagaagggaaatgatattttccgatcccatcgttactctcttccctctctcattccatacatcgtctgacgaacctagcgttgatttgttctgcatgtttagtttactgtttgtttcagcctagaaagctttattttcttcccgtgaaagtaatgaatgtctgttgttacttattttttctaatttctgatgtttgttgatgttgaaatattgtgtcatgcaagcagctcttatggcaggattagcttcattaaggactggtgcgtaaatgctctgaaattcggtagtaatgttctgcttttggtgatgaacttgagtcatgtgttaacactagttatcgtgtgttaagcgatttatagaactgggagaatgatttttgtactattacctatttgccattttataatctttatcagagtttatttttctgattttctgtataatggtcaacggtttggtttcgagtcttgaggcaagtaatgaagacttactgcaatgcatttatgtttttccaattttaagaaacccatgtgattgtgagagtactt

SEQ ID NO: 14602 - DNA, 1064 bp, Glycine max; identical to SEQ ID NO: 14601
  Gm_smallRNAprecursor_7435

SEQ ID NO: 14603 - DNA, 1065 bp, Glycine max
  Gm_smallRNAprecursor_7436
ctttctgaacgagatctcagatctctggttgatgcttcaaagaaccctaatctcatggctattgtttcctgcacttccatcattgcttccaaatgaatgaatgaatgaatgaatatactactctgtctctctctatctctctctctctctcgctcactcactcactcgctatgccatgcttcttgctatgatatgtttctttctttttctttttatgcgacctctggggtccttcactcgctctcttatctgtctctcactttcctaaccctaagaggctgtgaagacggtttcggagtgtggacccgatggatccgtcgccgtcaaacatcctcgccggtggcgcggcaacgttatcggttttttgatttcgttgcagccatccatggcggtgttgttttttaacgaccgatctcattgctgtgccagatctgagcctcaccaaatccctaactgaagatctctccttcgctgacgttatcttaacgcaatgtttgacagagatgtatggagtgagagaagggaaatgatattttccgatcccatcgttactctcttccctctctcattccatacatcgtctgacgaacctagcgttgatttgttctgcatgtttagtttactgtttgtttcagcctagaaagctttattttcttcccgtgaaagtaatgaatgtctgttgttacttattttttctaatttctgatgtttgttgatgttgaaatattgtgtcatgcaagcagctcttatggcaggattagcttcattaaggactggtgcgtaaatgctctgaaattcggtagtaatgttctgcttttggtgatgaacttgagtcatgtgttaacactagttatcgtgtgttaagcgatttatagaactgggagaatgatttttgtactattacctatttgccattttataatctttatcagagtttatttttctgattttctgtataatggtcaacggtttggtttcgagtcttgaggcaagtaatgaagacttactgcaatgcatttatgtttttccaattttaagaaacccatgtgattgtgagagtacttt

SEQ ID NO: 14604 - DNA, 1036 bp, Glycine max
  Gm_smallRNAprecursor_7437
gcattccagcacaaataagactcttttaagtcctaactctttcgtttttgaaacattttaaaatagtatatatcatatcaataaaaacatactccaaggattatgtttcagatagatgagcactgaaaagttattatatcatacttactaaagggtgttgctaggtgcacccagcattattgctggtgcacccagcacttaacgtgaaaaggtaaaaatattcctgtgtatttttaaaaatatttttttgcatccagctcattcaggttgatccgcatatgcaatgagttgatccgcataggttttaattgatccgcagttgatatagatgattcacaagcttcttacggatcaagttgatccgcaagtagatttttaagacttacggatcaagttgatccataagtcttttacggatcaagttgatccgcaagttgatttttaagacttacggatcaagttgattcgtaagtcttgtacggatcaagttgatccgcaagttgatttttaagacttatggatcaacttgattcgtaagtcttttacggatcaagttgatccgtaaaggaagaaagaaggcagggataatttttccgttttaaaagaatgttgggtgcaccagcaataatgctcagtgcacctagtaacactccttactaaaagatgtgccatattgatgttggtactgacagatgaaactggagttataagatgttggattgatagcttttcggtgggtcaaagttagcttaattgtagttttttttttttttgggggggggggggggggggggtggtcaaagttaatttatttctgttaatcatagatctccttcacagttaaaacctaatccagatctgtgttgattgtcttggtcccggcccactcccggagttccggtcgatccattaggtccatgccaatatagatggcccagtgacccatgcctcatatgtttggtctcttcatcgagacctgaggatctaagcctatatacatagccttggactgtgagcggaaaaagttagcaatatt

SEQ ID NO: 14605 - DNA, 1083 bp, Glycine max
  Gm_smallRNAprecursor_7438
gaatcatagccgcacaaatattaaatgacattttacaccaataaaaagaaaactttacatacgtttgttgattgtaaattatactttatgggtctaatgtaatctctaatgggatcaaactagtcagctttttaattagggttcgagaaagccggggttcagtaatatgtagtctcttgggtcagatattcttctagggattgatggaaaaacaaaattaaattaaaatataaataataaaaagtttataaaaacgcctaaattctcctataaataccacaccatctcctcccctacaccaacagcttttctctctcttagcttggcgttctcttattctggacctctctcccttccctcttgattagggttctgattatgttatgaaccttcaatgattcttttttttcttcaaagaaaacaaagagaaagaaaaccctatatatgggcttgtggagtatttatcttcagtcttcaatatcatggccctctttgtattcttccacagctttcttgaactgcatccatagagttcctttgcatgcatgccaaggcactcttgctcccacaccttgttttgcggttcaataaagctgtgggaagatacagatagggtcaacaacaacgaactagcttatctcaaactccagattcctctctaaagcttcctatccaattgtatatatatatatatatatatatatatatagggataaattattgcaatgtatcttttttcctttatcttttgtgatttgacttaaatctttttcagatttaagacattgaattttcagatatatatctctattgtgtgatcagaattctcagatgcagtattttgtgagagaataaacttgtaccagttgggtagatttgtgactatgaggatgatgattccccaacaaattggcttcttcttctggaattaaacggatcaggtatcgattcgatctatgtaaaatcaagggaatttcggctcacgattttggtagatgcggaatcactatgcaaactttattttcagatcttataataattaatatgtttgaaatccgttatatatatgtgtgtgtgtttgcc

SEQ ID NO: 14606 - DNA, 1083 bp, Glycine max; identical to SEQ ID NO: 14605
  Gm_smallRNAprecursor_7439

SEQ ID NO: 14607 - DNA, 1084 bp, Glycine max
  Gm_smallRNAprecursor_7440
gaatcatagccgcacaaatattaaatgacattttacaccaataaaaagaaaactttacatacgtttgttgattgtaaattatactttatgggtctaatgtaatctctaatgggatcaaactagtcagctttttaattagggttcgagaaagccggggttcagtaatatgtagtctcttgggtcagatattcttctagggattgatggaaaaacaaaattaaattaaaatataaataataaaaagtttataaaaacgcctaaattctcctataaataccacaccatctcctcccctacaccaacagcttttctctctcttagcttggcgttctcttattctggacctctctcccttccctcttgattagggttctgattatgttatgaaccttcaatgattcttttttttcttcaaagaaaacaaagagaaagaaaaccctatatatgggcttgtggagtatttatcttcagtcttcaatatcatggccctctttgtattcttccacagctttcttgaactgcatccatagagttcctttgcatgcatgccaaggcactcttgctcccacaccttgttttgcggttcaataaagctgtgggaagatacagatagggtcaacaacaacgaactagcttatctcaaactccagattcctctctaaagcttcctatccaattgtatatatatatatatatatatatatatatagggataaattattgcaatgtatcttttttcctttatcttttgtgatttgacttaaatctttttcagatttaagacattgaattttcagatatatatctctattgtgtgatcagaattctcagatgcagtattttgtgagagaataaacttgtaccagttgggtagatttgtgactatgaggatgatgattccccaacaaattggcttcttcttctggaattaaacggatcaggtatcgattcgatctatgtaaaatcaagggaatttcggctcacgattttggtagatgcggaatcactatgcaaactttattttcagatcttataataattaatatgtttgaaatccgttatatatatgtgtgtgtgtttgcct

SEQ ID NO: 14608 - DNA, 1084 bp, Glycine max; identical to SEQ ID NO: 14607
  Gm_smallRNAprecursor_7441

SEQ ID NO: 14609 - DNA, 1079 bp, Glycine max
  Gm_smallRNAprecursor_7442
atcatagccgcacaaatattaaatgacattttacaccaataaaaagaaaactttacatacgtttgttgattgtaaattatactttatgggtctaatgtaatctctaatgggatcaaactagtcagctttttaattagggttcgagaaagccggggttcagtaatatgtagtctcttgggtcagatattcttctagggattgatggaaaaacaaaattaaattaaaatataaataataaaaagtttataaaaacgcctaaattctcctataaataccacaccatctcctcccctacaccaacagcttttctctctcttagcttggcgttctcttattctggacctctctcccttccctcttgattagggttctgattatgttatgaaccttcaatgattcttttttttcttcaaagaaaacaaagagaaagaaaaccctatatatgggcttgtggagtatttatcttcagtcttcaatatcatggccctctttgtattcttccacagctttcttgaactgcatccatagagttcctttgcatgcatgccaaggcactcttgctcccacaccttgttttgcggttcaataaagctgtgggaagatacagatagggtcaacaacaacgaactagcttatctcaaactccagattcctctctaaagcttcctatccaattgtatatatatatatatatatatatatatatagggataaattattgcaatgtatcttttttcctttatcttttgtgatttgacttaaatctttttcagatttaagacattgaattttcagatatatatctctattgtgtgatcagaattctcagatgcagtattttgtgagagaataaacttgtaccagttgggtagatttgtgactatgaggatgatgattccccaacaaattggcttcttcttctggaattaaacggatcaggtatcgattcgatctatgtaaaatcaagggaatttcggctcacgattttggtagatgcggaatcactatgcaaactttattttcagatcttataataattaatatgtttgaaatccgttatatatatgtgtgtgtgtttg

SEQ ID NO: 14610 - DNA, 1073 bp, Glycine max
  Gm_smallRNAprecursor_7443
gctttgtagatctgaaaccataagttaatcaacaattgtattttgtattctcacaacctatttcttctttctcactcaaatattcagtttatttttgcctttacccttcttgattgagtcatcaacattgacatttcagatctattcttattttgtggaatatttgataatccgcccaaaaagatttgatgttgcccaaatccatgataggaccaactaaaactgtcaatccaccaaaccgcaatccgacaaactccatgtttgttttggacgattcggtccacgtatatcggccttcggttttcggcagattgggcttcacgggtccgaattcgaccgaaaccgacccgtgctcaggcctagtgaaaataataattgtgagggatagaataacaacgcaaaagaggatgaaccttaaccctaatttttttcactatataaatacatgttgaccccctgtagttgcaaacaagtagctgtttttgattcactgcatcttcttaatcaaggaaatcacggtcgcgtgtgtgccggaaagaaagtggcctgtgatctccggtttctctttctcgaccgtgtttccttggttaacgatatgtgctggatcataggttatacgttcgctgaacaataatcgattctctttctctctttctgatgtaatgatccatttgattttatttttttatgcataaactataaatcatgtttttcttagtgatccactcggttgcgatctaatccttttacctctttcccttgtgttgtgtttgaaactcgctgaaggtccttgatctaggtttcacttcagttacttttcgcttttcgttttatttcggttattggtaactaaagacacattgttgttctgtttaggctttactgtattcgattcggggaatttttttaatctgaatctagcctaagatttaatctccaatttcttatttttctttttttatatgtttattagaaatatatttcgtgtttacacagattcgattagggtaattctttgaaatctgaaactcgcgtaggttttaatctgacaccttgtcgttctgtttacgtgt

SEQ ID NO: 14611 - DNA, 1069 bp, Glycine max
  Gm_smallRNAprecursor_7444
tttgtagatctgaaaccataagttaatcaacaattgtattttgtattctcacaacctatttcttctttctcactcaaatattcagtttatttttgcctttacccttcttgattgagtcatcaacattgacatttcagatctattcttattttgtggaatatttgataatccgcccaaaaagatttgatgttgcccaaatccatgataggaccaactaaaactgtcaatccaccaaaccgcaatccgacaaactccatgtttgttttggacgattcggtccacgtatatcggccttcggttttcggcagattgggcttcacgggtccgaattcgaccgaaaccgacccgtgctcaggcctagtgaaaataataattgtgagggatagaataacaacgcaaaagaggatgaaccttaaccctaatttttttcactatataaatacatgttgaccccctgtagttgcaaacaagtagctgtttttgattcactgcatcttcttaatcaaggaaatcacggtcgcgtgtgtgccggaaagaaagtggcctgtgatctccggtttctctttctcgaccgtgtttccttggttaacgatatgtgctggatcataggttatacgttcgctgaacaataatcgattctctttctctctttctgatgtaatgatccatttgattttatttttttatgcataaactataaatcatgtttttcttagtgatccactcggttgcgatctaatccttttacctctttcccttgtgttgtgtttgaaactcgctgaaggtccttgatctaggtttcacttcagttacttttcgcttttcgttttatttcggttattggtaactaaagacacattgttgttctgtttaggctttactgtattcgattcggggaatttttttaatctgaatctagcctaagatttaatctccaatttcttatttttctttttttatatgtttattagaaatatatttcgtgtttacacagattcgattagggtaattctttgaaatctgaaactcgcgtaggttttaatctgacaccttgtcgttctgtttacgt

SEQ ID NO: 14612 - DNA, 1071 bp, Glycine max
  Gm_smallRNAprecursor_7445
tttgtagatctgaaaccataagttaatcaacaattgtattttgtattctcacaacctatttcttctttctcactcaaatattcagtttatttttgcctttacccttcttgattgagtcatcaacattgacatttcagatctattcttattttgtggaatatttgataatccgcccaaaaagatttgatgttgcccaaatccatgataggaccaactaaaactgtcaatccaccaaaccgcaatccgacaaactccatgtttgttttggacgattcggtccacgtatatcggccttcggttttcggcagattgggcttcacgggtccgaattcgaccgaaaccgacccgtgctcaggcctagtgaaaataataattgtgagggatagaataacaacgcaaaagaggatgaaccttaaccctaatttttttcactatataaatacatgttgaccccctgtagttgcaaacaagtagctgtttttgattcactgcatcttcttaatcaaggaaatcacggtcgcgtgtgtgccggaaagaaagtggcctgtgatctccggtttctctttctcgaccgtgtttccttggttaacgatatgtgctggatcataggttatacgttcgctgaacaataatcgattctctttctctctttctgatgtaatgatccatttgattttatttttttatgcataaactataaatcatgtttttcttagtgatccactcggttgcgatctaatccttttacctctttcccttgtgttgtgtttgaaactcgctgaaggtccttgatctaggtttcacttcagttacttttcgcttttcgttttatttcggttattggtaactaaagacacattgttgttctgtttaggctttactgtattcgattcggggaatttttttaatctgaatctagcctaagatttaatctccaatttcttatttttctttttttatatgtttattagaaatatatttcgtgtttacacagattcgattagggtaattctttgaaatctgaaactcgcgtaggttttaatctgacaccttgtcgttctgtttacgtgt

SEQ ID NO: 14613 - DNA, 1066 bp, Glycine max
  Gm_smallRNAprecursor_7446
aaacaaaaaatgcagaatgattggccttagaaaagttagtgtggatctgtgactcaaaacagagagagagaaagggattcacacacttgccgcaatggtgcaatggtgactccacagattcctggtttatatcatatattcctctttgtctctctcttccctctctatcatattgttttgttttctttaatattatttattgtttagcttcatattactcatatttttcgcccgtttgtgtgtgcgtggattgtgatggaagagaaactgcctctacctttctctttatgttcagatctatgttttccacatcacggatcgtatttgctgtttttagctaccgtctttgcgtgtcaattttttttaatccaaaaacacaaaaaaagaagaaaaaaatgaaaaagaaaaactacagagcggtgttggttgttttgatttttgttattttgcggatattgtttttttttttttggaggtgtatggagatgaggtgaagtcactggaggcagcggttcatcgatctcttcctgaatttggttgtggaagaacacaaagcaagaatcggtcgataaacctctgcatccagcgctcactttgcctctctttaccagcaatttctttttctctttcttctaaataataacactgtttttattcttcctcttgctttcatatggaaaaattagttagcgttgacgaattctctgtatcagcatttctcttaaaagtatttttcttcttcttcttggtagcgagttattaaatctagatgcctctggtgtggtttgaaataattttatattacttcgtttgcgctttcttccgagataatgcctatagtgttacagctgctaatgttccgatttgtgttgattttgctatgaaaggagggagaaaataaatctaatatctgcttgcattattgtttgttgctgctaaattttgaggaatactctgttaatttttccatttcagtattctttccttgggcgttaattaactagtttgaactctgaagtaattgcttgtttgattaaatttattttgaatgaataatctctttttt

SEQ ID NO: 14614 - DNA, 1065 bp, Glycine max
  Gm_smallRNAprecursor_7447
aacaaaaaatgcagaatgattggccttagaaaagttagtgtggatctgtgactcaaaacagagagagagaaagggattcacacacttgccgcaatggtgcaatggtgactccacagattcctggtttatatcatatattcctctttgtctctctcttccctctctatcatattgttttgttttctttaatattatttattgtttagcttcatattactcatatttttcgcccgtttgtgtgtgcgtggattgtgatggaagagaaactgcctctacctttctctttatgttcagatctatgttttccacatcacggatcgtatttgctgtttttagctaccgtctttgcgtgtcaattttttttaatccaaaaacacaaaaaaagaagaaaaaaatgaaaaagaaaaactacagagcggtgttggttgttttgatttttgttattttgcggatattgtttttttttttttggaggtgtatggagatgaggtgaagtcactggaggcagcggttcatcgatctcttcctgaatttggttgtggaagaacacaaagcaagaatcggtcgataaacctctgcatccagcgctcactttgcctctctttaccagcaatttctttttctctttcttctaaataataacactgtttttattcttcctcttgctttcatatggaaaaattagttagcgttgacgaattctctgtatcagcatttctcttaaaagtatttttcttcttcttcttggtagcgagttattaaatctagatgcctctggtgtggtttgaaataattttatattacttcgtttgcgctttcttccgagataatgcctatagtgttacagctgctaatgttccgatttgtgttgattttgctatgaaaggagggagaaaataaatctaatatctgcttgcattattgtttgttgctgctaaattttgaggaatactctgttaatttttccatttcagtattctttccttgggcgttaattaactagtttgaactctgaagtaattgcttgtttgattaaatttattttgaatgaataatctctttttt

SEQ ID NO: 14615 - DNA, 1065 bp, Glycine max; identical to SEQ ID NO: 14614
  Gm_smallRNAprecursor_7448

SEQ ID NO: 14616 - DNA, 1032 bp, Glycine max
  Gm_smallRNAprecursor_7449
caatattattatctataattatcttcaacaataattaacaattttatattattataaaataaaaaacaaagcactaaaaatataacacactatcaaactaataataattacctctacaaataaatccactaaaaaatataaactgcctatctgcaaaaaaaaatatacatatatatatatatatatatatatatatataaatataacaatttatatacattaaataaaaaataaaaaaaactaaccaaacaagggaaggggaacctgcaaacaggggagaagctggctgcaaaaaaaaattatatatatataaaaagataaaaatataatcatttatataaataaaataaattaaaaaaaaaaaaaaaaaaacctgctgctggggaggggggaatgggaaggggactgctgtgggggggggaacacgaagggggagtttgggggagggggggacagctttcgtgggggggtttgggggagggggggaccccatttaagggcgcttggacgcgcctggggccagggcgcgaaccaaggcgcctcgggaacggcacgatggaacgcgcctgcgtgcagggcgcgaccagtagcgcctgcatgcagggcgcgaccttcggcgctttgttgcagggcgcttccagcaccgtctgcaccacctgcagcaccgcctgcagcagcggccacgtgtcgctttcctccggtaagcgcccctcaggtaagcactttccctgccaaaacagcaccccttagtaaataaaaagcaaagagacccattctggtaaataatttctaaaagtaacccagaatggtgattttgccccaaatagcaccataaaaatgcttaatgatgtactacagagaaaatcttggtattgtcaccgaaaagaagtactaaattagtattttacacagtagtccctttttcttgttttgtgagggaatcccttaaagcagaacaaagcaagacgaaacacaaaacagtattcagaaggtgagaacttttggcatcacaatacgagaaattgctctcat

SEQ ID NO: 14617 - DNA, 1079 bp, Glycine max
  Gm_smallRNAprecursor_7450
tttttaaataacatattaaactaaaatttgaaataaatttgattttagttatcatgatctctagacacagctcagagaatgtgagtgtaaactataaaaaatgtgattattgtacataaaaaaattaaaaactagaaaaactaacaataattttctacaaatctgagtggaagccaataaattccaacgttgatggaaatcccgtatgtaacaaacaatcttcgactagcatagttatttcgtagttcatacctagcgtttttctaacgttgacaatgacaaccttttgataagtgaagatttgggttttttttatggacgttatacaatggcgaggtgaggggtgagcccacaaactatctcgataaatcaattgagcttcttttggataaaaaataaagggtgttgctaggtgcactaatgctggtgcacccagcacttaatgtaaaatgacgaaaatatctttgattcgtaagtcttttacggaacaatacggatcaacatgatccgtaagctttttatggatcaacttgatccgtaagacttttacggatcatgttgatccgtattgtttcgtaaaaggcttacggatcaacttgatccttacgatttacggatcaccctcatacacactcatcactgtgaaaaaagcgcatggacaattttggtattttaattaaatgctgggtgcaccagcaataatgctaggtgcacctagcaacactcaaaaataaatgggtgttactgttggcccaatgcaaattgctcttggtccatgccaaggagctgtgtttttttttcccaaaaaatatcctccacgtccaatcataattctgttatataactgcatacaaaatttacaaggtaaatgtatttttgttgtaacgcacgactataaacaaattacacaataaaaatatatttttgttctagatcttgatacaaattatattaatgaaaacatatattatatttttttaacaataatcaaattaattgttacataaattatcttttttatttaaatttaaattaatgatgacataaattactctttttttttcaatcaaaataatatc

SEQ ID NO: 14618 - DNA, 1052 bp, Glycine max
  Gm_smallRNAprecursor_7451
ttgaaataaatttgattttagttatcatgatctctagacacagctcagagaatgtgagtgtaaactataaaaaatgtgattattgtacataaaaaaattaaaaactagaaaaactaacaataattttctacaaatctgagtggaagccaataaattccaacgttgatggaaatcccgtatgtaacaaacaatcttcgactagcatagttatttcgtagttcatacctagcgtttttctaacgttgacaatgacaaccttttgataagtgaagatttgggttttttttatggacgttatacaatggcgaggtgaggggtgagcccacaaactatctcgataaatcaattgagcttcttttggataaaaaataaagggtgttgctaggtgcactaatgctggtgcacccagcacttaatgtaaaatgacgaaaatatctttgattcgtaagtcttttacggaacaatacggatcaacatgatccgtaagctttttatggatcaacttgatccgtaagacttttacggatcatgttgatccgtattgtttcgtaaaaggcttacggatcaacttgatccttacgatttacggatcaccctcatacacactcatcactgtgaaaaaagcgcatggacaattttggtattttaattaaatgctgggtgcaccagcaataatgctaggtgcacctagcaacactcaaaaataaatgggtgttactgttggcccaatgcaaattgctcttggtccatgccaaggagctgtgtttttttttcccaaaaaatatcctccacgtccaatcataattctgttatataactgcatacaaaatttacaaggtaaatgtatttttgttgtaacgcacgactataaacaaattacacaataaaaatatatttttgttctagatcttgatacaaattatattaatgaaaacatatattatatttttttaacaataatcaaattaattgttacataaattatcttttttatttaaatttaaattaatgatgacataaattactctttttttttcaatcaaaataatatc

SEQ ID NO: 14619 - DNA, 1086 bp, Glycine max
  Gm_smallRNAprecursor_7452
cccaaagatttaggatgatttgcatttcctaaaattaggaaaatttgatgtgatttgatttgatttgtataatttttattcttttatttccttgactaggtgagataaagtctataaatatcatatgtaatctctgtaaacacaagtaaaaaatacaattcagatgcattcctttcacgtctttctttcaacatataagcttgtcagtatttgacatattttctacttgcatacacaggtgaaatggggtagtgatcttcagagtgaacatgagcgttatataactgaagaggtattcagtggatgccctgtgataattagagactatccaaaggcatgctacttttcccctcatcttttggatatggcatatggaagacattagaggatggcattgtaattattttttaggtccctcataaatgactgttttgttttaggtcccttataaattttttcattgcattggatcccttatatatcaaaacttttgttttgaatctgtgtcgttaattaagtgatgatgtgacaccttgtgaataaattttttcaatataatcagtggttcaaatggtgtcacatcatcacttaattgacggtacagactcaacaaaaaatttgatgtattagggatccaatgtaatggaaaaatttattagatacctaaaataaaaatcgatcatttatcagggacctaaaacatattaagcctattttttaaaaagagtgtcagtgtaaaagaaagaccaacaacttttgaccttggaggcaagatatacaatccacaaaatctgaaagaagtggctgagaaaatagagtagaagtaacattcttctaaactttttttcttctgctcaacttacaccccttctcctttccctgctcaaaaactataaaggaaaaaaaatgcaaaattttaccttcggtttgtcatctttttactaaggtcaccaccacacacttaagtagtatgaaatgaaccaaccgtcaagatttattgacactcttactaaatatgctccacacacatatattgaaccaaatgaaatgaagttattgacttttatttttttcaggatattaaag

SEQ ID NO: 14620 - DNA, 1035 bp, Glycine max
  Gm_smallRNAprecursor_7453
ctacaaataatttataaattgttttgggaatttattgcagtatcaatgacatcttcatcgtcgtgtccatcacatattaaaattaagtttggccctatcgatgctgatgtattatggatgcaacctaagcatgtttcagaacatttggaatgtagaagaagatcggaaattacatatcagacgagttgttcctacgtatcaaggggaagaagaaatttcagagcaaatttttccttttcttcgacaatctggtttcgcctagattaccaagatgggatacttaaaaataaatgtctcgttaattagtgctctgatagaaaaatggaggcaggaaacacatacgtttcacatgagatgcggagagtgtactgttactctccaagacgtctctgtattggtaggtataggtgtgaatggtttaccattaatcggtccaacaaatcttgattgggctgatttatgcgaggaattattgggagtcaaaccacaagaaagtgaaattaaaggtagtgtggttaaattaagttggctggctcaccattttgcacaaataaataacgacgacgaagaacaaatacgaaggtttgcccgtgcatggatactaagattcattagaggtgtcttgttcattgacaaaagcagtaacaaagtttcgccaaggtaccttcaatttttacgtgactatgaagaatgtgacacatatgcatgggaagctgccatacttgattttctatacagagagatgtgcagtgccactgattataaaactaagaggtatacgcatcttactacaaatgtggacatactcattcccaagtagaaaatacatcattggggcacaggttagtcatttttaacagtgtctttcatttcaatagaataaatggttttagggtatattaaattttaatctttgtagatgactgcgacgtggaaaccaacatatcgacaatgatgatgtgagagtttttcgtcgcaagttggatattatgaaacgtcatgaggtaagaacatgctattgtatttgtaaaataa

SEQ ID NO: 14621 - DNA, 1126 bp, Glycine max
  Gm_smallRNAprecursor_7454
aagattaacacaaactttcttctggtaaaaaaccttaagaatgaagtaatcttaggaacacccttcattagagccctgtttcccatccaaatatctaatgaaggaataaccacaaattatttaggaagaaaaattacatttaatttttctactaaaccaatttccagaaatataaatcttatagagaataagattaatcaaattaacttcttaaaagaagaagtatcttttaataatattctgacacaactgggaaaaccccaagtaaaagaaagaattcaatctttattaaatcatattgaatcgaccgtttggtctgaattgccacatgcattttgggacagaaagaaacatattgtcgatctcccttatgagaaagactttagggaaaaacaaattcccacaaaagccagaccaatccaaatgaatgaagaacttcttcaatactgtcaaaaggaaatcaaggatttgcttgataaaggcctaatccggaaaagcaaaagcccatggtcttgtgcggctttttatgttaacaaacaatctgagattgagcgtggaacaccccgcttagtcataaattacaaaccattaaatcaagcattacaatggattagatatcctattccaaacaaaaaagatttgcttaacagattaaattctgcaaagatattttcaaaattttgatatgaaatctggattttggcaaatccaaatccaagaatcagataggtacaaaacagcgtttactgtacctttcgggcaatatgaatggaacgtgatgccattcggactgaagaatgccccttcagaatttcaaaaaattatgaacgatatttttaatccttattcaaaatttgtcattgtctacatagatgatgttttaatcttttcccaaaacattgaccaacatttcaaacatctccaaaccttcatacatatcatcaaacaaaatggtttggcagtctccaaatcaaaaatcaatcttttccaaactcgaattcgattccttggtcacaatatatatcagggtacaatcattccaatcgaaaggtcaatagagtttgctagcaaattccccaaccaaatcttagacaaaacccagttacaaagatttctaggttgtcta

SEQ ID NO: 14622 - DNA, 1063 bp, Glycine max
  Gm_smallRNAprecursor_7455
gtttcccatccaaatatctaatgaaggaataaccacaaattatttaggaagaaaaattacatttaatttttctactaaaccaatttccagaaatataaatcttatagagaataagattaatcaaattaacttcttaaaagaagaagtatcttttaataatattctgacacaactgggaaaaccccaagtaaaagaaagaattcaatctttattaaatcatattgaatcgaccgtttggtctgaattgccacatgcattttgggacagaaagaaacatattgtcgatctcccttatgagaaagactttagggaaaaacaaattcccacaaaagccagaccaatccaaatgaatgaagaacttcttcaatactgtcaaaaggaaatcaaggatttgcttgataaaggcctaatccggaaaagcaaaagcccatggtcttgtgcggctttttatgttaacaaacaatctgagattgagcgtggaacaccccgcttagtcataaattacaaaccattaaatcaagcattacaatggattagatatcctattccaaacaaaaaagatttgcttaacagattaaattctgcaaagatattttcaaaattttgatatgaaatctggattttggcaaatccaaatccaagaatcagataggtacaaaacagcgtttactgtacctttcgggcaatatgaatggaacgtgatgccattcggactgaagaatgccccttcagaatttcaaaaaattatgaacgatatttttaatccttattcaaaatttgtcattgtctacatagatgatgttttaatcttttcccaaaacattgaccaacatttcaaacatctccaaaccttcatacatatcatcaaacaaaatggtttggcagtctccaaatcaaaaatcaatcttttccaaactcgaattcgattccttggtcacaatatatatcagggtacaatcattccaatcgaaaggtcaatagagtttgctagcaaattccccaaccaaatcttagacaaaacccagttacaaagatttctaggttgtctaaattacgtaggaga

SEQ ID NO: 14623 - DNA, 1234 bp, Glycine max
  Gm_smallRNAprecursor_7456
ccaagtaaaagaaagaattcaatctttattaaatcatattgaatcgaccgtttggtctgaattgccacatgcattttgggacagaaagaaacatattgtcgatctcccttatgagaaagactttagggaaaaacaaattcccacaaaagccagaccaatccaaatgaatgaagaacttcttcaatactgtcaaaaggaaatcaaggatttgcttgataaaggcctaatccggaaaagcaaaagcccatggtcttgtgcggctttttatgttaacaaacaatctgagattgagcgtggaacaccccgcttagtcataaattacaaaccattaaatcaagcattacaatggattagatatcctattccaaacaaaaaagatttgcttaacagattaaattctgcaaagatattttcaaaattttgatatgaaatctggattttggcaaatccaaatccaagaatcagataggtacaaaacagcgtttactgtacctttcgggcaatatgaatggaacgtgatgccattcggactgaagaatgccccttcagaatttcaaaaaattatgaacgatatttttaatccttattcaaaatttgtcattgtctacatagatgatgttttaatcttttcccaaaacattgaccaacatttcaaacatctccaaaccttcatacatatcatcaaacaaaatggtttggcagtctccaaatcaaaaatcaatcttttccaaactcgaattcgattccttggtcacaatatatatcagggtacaatcattccaatcgaaaggtcaatagagtttgctagcaaattccccaaccaaatcttagacaaaacccagttacaaagatttctaggttgtctaaattacgtaggagaatttgtcccctatttaaataatattgtcaagccattacatgataggctgaagaaaaatccgcctccttggtctgacctccatacacaaacggttaaagaaatcaaagtcaaagtccaatccattaaatgtctgtatcttcctattccacaggcatttaaaattgtcgaaactgatgcttcagacataggttatggtggcatcctcaaacaaagagtccatggccaagatcatgtcattgcatatacatcaaaacattggaatcctgcacaattaaaatattcaactgttaaaaaagaggttttagcaattgttttgtgcatttccaaatttcaatcggatttattaaaccaaaa

SEQ ID NO: 14624 - DNA, 1080 bp, Glycine max
  Gm_smallRNAprecursor_7457
aaagcaaaagcccatggtcttgtgcggctttttatgttaacaaacaatctgagattgagcgtggaacaccccgcttagtcataaattacaaaccattaaatcaagcattacaatggattagatatcctattccaaacaaaaaagatttgcttaacagattaaattctgcaaagatattttcaaaattttgatatgaaatctggattttggcaaatccaaatccaagaatcagataggtacaaaacagcgtttactgtacctttcgggcaatatgaatggaacgtgatgccattcggactgaagaatgccccttcagaatttcaaaaaattatgaacgatatttttaatccttattcaaaatttgtcattgtctacatagatgatgttttaatcttttcccaaaacattgaccaacatttcaaacatctccaaaccttcatacatatcatcaaacaaaatggtttggcagtctccaaatcaaaaatcaatcttttccaaactcgaattcgattccttggtcacaatatatatcagggtacaatcattccaatcgaaaggtcaatagagtttgctagcaaattccccaaccaaatcttagacaaaacccagttacaaagatttctaggttgtctaaattacgtaggagaatttgtcccctatttaaataatattgtcaagccattacatgataggctgaagaaaaatccgcctccttggtctgacctccatacacaaacggttaaagaaatcaaagtcaaagtccaatccattaaatgtctgtatcttcctattccacaggcatttaaaattgtcgaaactgatgcttcagacataggttatggtggcatcctcaaacaaagagtccatggccaagatcatgtcattgcatatacatcaaaacattggaatcctgcacaattaaaatattcaactgttaaaaaagaggttttagcaattgttttgtgcatttccaaatttcaatcggatttattaaaccaaaaatttttaatcagggttgattgtaaatcagccaaagatattttacaaaaagatgttaaaaaccttgcctcaaaacaaatt

SEQ ID NO: 14625 - DNA, 1095 bp, Glycine max
  Gm_smallRNAprecursor_7458
tgaatggaacgtgatgccattcggactgaagaatgccccttcagaatttcaaaaaattatgaacgatatttttaatccttattcaaaatttgtcattgtctacatagatgatgttttaatcttttcccaaaacattgaccaacatttcaaacatctccaaaccttcatacatatcatcaaacaaaatggtttggcagtctccaaatcaaaaatcaatcttttccaaactcgaattcgattccttggtcacaatatatatcagggtacaatcattccaatcgaaaggtcaatagagtttgctagcaaattccccaaccaaatcttagacaaaacccagttacaaagatttctaggttgtctaaattacgtaggagaatttgtcccctatttaaataatattgtcaagccattacatgataggctgaagaaaaatccgcctccttggtctgacctccatacacaaacggttaaagaaatcaaagtcaaagtccaatccattaaatgtctgtatcttcctattccacaggcatttaaaattgtcgaaactgatgcttcagacataggttatggtggcatcctcaaacaaagagtccatggccaagatcatgtcattgcatatacatcaaaacattggaatcctgcacaattaaaatattcaactgttaaaaaagaggttttagcaattgttttgtgcatttccaaatttcaatcggatttattaaaccaaaaatttttaatcagggttgattgtaaatcagccaaagatattttacaaaaagatgttaaaaaccttgcctcaaaacaaatttttgcacgatggcaagcaattttaagtgtctttgattttgacatagaatacatcaagggcacctcaaattcactacctgactaccttacccgtgaattcttacagaaaagtggtaatgcctcctaaggcatcgggaatctccctacggggaggaaggagtacaggcaaaggagccaggctggctcttccagagccaaccatcaagaaattatctacctcttctgggtcaccaacccaggctgggtcatctacccagaaaaccaatttagaagggtcatcaacccaga

SEQ ID NO: 14626 - DNA, 1095 bp, Glycine max; identical to SEQ ID NO: 14625
  Gm_smallRNAprecursor_7459

SEQ ID NO: 14627 - DNA, 1095 bp, Glycine max; identical to SEQ ID NO: 14625
  Gm_smallRNAprecursor_7460

SEQ ID NO: 14628 - DNA, 1095 bp, Glycine max; identical to SEQ ID NO: 14625
  Gm_smallRNAprecursor_7461

SEQ ID NO: 14629 - DNA, 1035 bp, Glycine max
  Gm_smallRNAprecursor_7462
attgtctacatagatgatgttttaatcttttcccaaaacattgaccaacatttcaaacatctccaaaccttcatacatatcatcaaacaaaatggtttggcagtctccaaatcaaaaatcaatcttttccaaactcgaattcgattccttggtcacaatatatatcagggtacaatcattccaatcgaaaggtcaatagagtttgctagcaaattccccaaccaaatcttagacaaaacccagttacaaagatttctaggttgtctaaattacgtaggagaatttgtcccctatttaaataatattgtcaagccattacatgataggctgaagaaaaatccgcctccttggtctgacctccatacacaaacggttaaagaaatcaaagtcaaagtccaatccattaaatgtctgtatcttcctattccacaggcatttaaaattgtcgaaactgatgcttcagacataggttatggtggcatcctcaaacaaagagtccatggccaagatcatgtcattgcatatacatcaaaacattggaatcctgcacaattaaaatattcaactgttaaaaaagaggttttagcaattgttttgtgcatttccaaatttcaatcggatttattaaaccaaaaatttttaatcagggttgattgtaaatcagccaaagatattttacaaaaagatgttaaaaaccttgcctcaaaacaaatttttgcacgatggcaagcaattttaagtgtctttgattttgacatagaatacatcaagggcacctcaaattcactacctgactaccttacccgtgaattcttacagaaaagtggtaatgcctcctaaggcatcgggaatctccctacggggaggaaggagtacaggcaaaggagccaggctggctcttccagagccaaccatcaagaaattatctacctcttctgggtcaccaacccaggctgggtcatctacccagaaaaccaatttagaagggtcatcaacccagattgcctcaatcaaacctgagccatccactcagga

SEQ ID NO: 14630 - DNA, 1035 bp, Glycine max; identical to SEQ ID NO: 14629
  Gm_smallRNAprecursor_7463

SEQ ID NO: 14631 - DNA, 1113 bp, Glycine max
  Gm_smallRNAprecursor_7464
attgtctacatagatgatgttttaatcttttcccaaaacattgaccaacatttcaaacatctccaaaccttcatacatatcatcaaacaaaatggtttggcagtctccaaatcaaaaatcaatcttttccaaactcgaattcgattccttggtcacaatatatatcagggtacaatcattccaatcgaaaggtcaatagagtttgctagcaaattccccaaccaaatcttagacaaaacccagttacaaagatttctaggttgtctaaattacgtaggagaatttgtcccctatttaaataatattgtcaagccattacatgataggctgaagaaaaatccgcctccttggtctgacctccatacacaaacggttaaagaaatcaaagtcaaagtccaatccattaaatgtctgtatcttcctattccacaggcatttaaaattgtcgaaactgatgcttcagacataggttatggtggcatcctcaaacaaagagtccatggccaagatcatgtcattgcatatacatcaaaacattggaatcctgcacaattaaaatattcaactgttaaaaaagaggttttagcaattgttttgtgcatttccaaatttcaatcggatttattaaaccaaaaatttttaatcagggttgattgtaaatcagccaaagatattttacaaaaagatgttaaaaaccttgcctcaaaacaaatttttgcacgatggcaagcaattttaagtgtctttgattttgacatagaatacatcaagggcacctcaaattcactacctgactaccttacccgtgaattcttacagaaaagtggtaatgcctcctaaggcatcgggaatctccctacggggaggaaggagtacaggcaaaggagccaggctggctcttccagagccaaccatcaagaaattatctacctcttctgggtcaccaacccaggctgggtcatctacccagaaaaccaatttagaagggtcatcaacccagattgcctcaatcaaacctgagccatccactcaggaatctcccaaaccggcaaccgccaaacaaacatcgcccgactatgcatggccaattgaaacccttcaggcccttcaaga

SEQ ID NO: 14632 - DNA, 1113 bp, Glycine max; identical to SEQ ID NO: 14631
  Gm_smallRNAprecursor_7465

SEQ ID NO: 14633 - DNA, 1114 bp, Glycine max
  Gm_smallRNAprecursor_7466
attgtctacatagatgatgttttaatcttttcccaaaacattgaccaacatttcaaacatctccaaaccttcatacatatcatcaaacaaaatggtttggcagtctccaaatcaaaaatcaatcttttccaaactcgaattcgattccttggtcacaatatatatcagggtacaatcattccaatcgaaaggtcaatagagtttgctagcaaattccccaaccaaatcttagacaaaacccagttacaaagatttctaggttgtctaaattacgtaggagaatttgtcccctatttaaataatattgtcaagccattacatgataggctgaagaaaaatccgcctccttggtctgacctccatacacaaacggttaaagaaatcaaagtcaaagtccaatccattaaatgtctgtatcttcctattccacaggcatttaaaattgtcgaaactgatgcttcagacataggttatggtggcatcctcaaacaaagagtccatggccaagatcatgtcattgcatatacatcaaaacattggaatcctgcacaattaaaatattcaactgttaaaaaagaggttttagcaattgttttgtgcatttccaaatttcaatcggatttattaaaccaaaaatttttaatcagggttgattgtaaatcagccaaagatattttacaaaaagatgttaaaaaccttgcctcaaaacaaatttttgcacgatggcaagcaattttaagtgtctttgattttgacatagaatacatcaagggcacctcaaattcactacctgactaccttacccgtgaattcttacagaaaagtggtaatgcctcctaaggcatcgggaatctccctacggggaggaaggagtacaggcaaaggagccaggctggctcttccagagccaaccatcaagaaattatctacctcttctgggtcaccaacccaggctgggtcatctacccagaaaaccaatttagaagggtcatcaacccagattgcctcaatcaaacctgagccatccactcaggaatctcccaaaccggcaaccgccaaacaaacatcgcccgactatgcatggccaattgaaacccttcaggcccttcaagac

SEQ ID NO: 14634 - DNA, 1114 bp, Glycine max; identical to SEQ ID NO: 14633
  Gm_smallRNAprecursor_7467

SEQ ID NO: 14635 - DNA, 1141 bp, Glycine max
  Gm_smallRNAprecursor_7468
aaaccttcatacatatcatcaaacaaaatggtttggcagtctccaaatcaaaaatcaatcttttccaaactcgaattcgattccttggtcacaatatatatcagggtacaatcattccaatcgaaaggtcaatagagtttgctagcaaattccccaaccaaatcttagacaaaacccagttacaaagatttctaggttgtctaaattacgtaggagaatttgtcccctatttaaataatattgtcaagccattacatgataggctgaagaaaaatccgcctccttggtctgacctccatacacaaacggttaaagaaatcaaagtcaaagtccaatccattaaatgtctgtatcttcctattccacaggcatttaaaattgtcgaaactgatgcttcagacataggttatggtggcatcctcaaacaaagagtccatggccaagatcatgtcattgcatatacatcaaaacattggaatcctgcacaattaaaatattcaactgttaaaaaagaggttttagcaattgttttgtgcatttccaaatttcaatcggatttattaaaccaaaaatttttaatcagggttgattgtaaatcagccaaagatattttacaaaaagatgttaaaaaccttgcctcaaaacaaatttttgcacgatggcaagcaattttaagtgtctttgattttgacatagaatacatcaagggcacctcaaattcactacctgactaccttacccgtgaattcttacagaaaagtggtaatgcctcctaaggcatcgggaatctccctacggggaggaaggagtacaggcaaaggagccaggctggctcttccagagccaaccatcaagaaattatctacctcttctgggtcaccaacccaggctgggtcatctacccagaaaaccaatttagaagggtcatcaacccagattgcctcaatcaaacctgagccatccactcaggaatctcccaaaccggcaaccgccaaacaaacatcgcccgactatgcatggccaattgaaacccttcaggcccttcaagacatgggtctgaccaaacttccaaaaataatcaaaaaatcttgggcagacattgcctcagaatctgatgatgaatctgaatcaaatttacaaa

SEQ ID NO: 14636 - DNA, 1091 bp, Glycine max
  Gm_smallRNAprecursor_7469
caattttaagtgtctttgattttgacatagaatacatcaagggcacctcaaattcactacctgactaccttacccgtgaattcttacagaaaagtggtaatgcctcctaaggcatcgggaatctccctacggggaggaaggagtacaggcaaaggagccaggctggctcttccagagccaaccatcaagaaattatctacctcttctgggtcaccaacccaggctgggtcatctacccagaaaaccaatttagaagggtcatcaacccagattgcctcaatcaaacctgagccatccactcaggaatctcccaaaccggcaaccgccaaacaaacatcgcccgactatgcatggccaattgaaacccttcaggcccttcaagacatgggtctgaccaaacttccaaaaataatcaaaaaatcttgggcagacattgcctcagaatctgatgatgaatctgaatcaaatttacaaacaatgatccaaaatgcgtcaatgaccaaaacagccaccaatactaaaggaaaactacctttagccaaagctcaaacaccacctaccaaacaaactaacaattatatttataaaaataaattgttaactgttttgcagatggaacctgaattttgggacaaaaatcccttcaaggcgacggccaaggctttcccaccagaatttcactacaaaccaactaccatcctgaagacaagaactttttatgaattgattttggtagattcaaactcagtatctatcaaacatttcaaagatccaaaagaccaaaccttaaacacccactcaaccatccaaatactaaaagtccgaaccaaagtgtaagcgtaaatatatatatatatatatatatatatatatatatatatatatatatatatatatatatatatatatatatatatatcctaaaaactaagaagatgagtaatggaaaataattattattttattcatgtgaagtgcataataaaaacaatatgggaaaatgtttagtgacaatttttaggacattatccatgatggaagcatgcctccataattgtcatacgtgggtaattactaaattactagaaaat

SEQ ID NO: 14637 - DNA, 1192 bp, Glycine max
  Gm_smallRNAprecursor_7470
aaagtggtaatgcctcctaaggcatcgggaatctccctacggggaggaaggagtacaggcaaaggagccaggctggctcttccagagccaaccatcaagaaattatctacctcttctgggtcaccaacccaggctgggtcatctacccagaaaaccaatttagaagggtcatcaacccagattgcctcaatcaaacctgagccatccactcaggaatctcccaaaccggcaaccgccaaacaaacatcgcccgactatgcatggccaattgaaacccttcaggcccttcaagacatgggtctgaccaaacttccaaaaataatcaaaaaatcttgggcagacattgcctcagaatctgatgatgaatctgaatcaaatttacaaacaatgatccaaaatgcgtcaatgaccaaaacagccaccaatactaaaggaaaactacctttagccaaagctcaaacaccacctaccaaacaaactaacaattatatttataaaaataaattgttaactgttttgcagatggaacctgaattttgggacaaaaatcccttcaaggcgacggccaaggctttcccaccagaatttcactacaaaccaactaccatcctgaagacaagaactttttatgaattgattttggtagattcaaactcagtatctatcaaacatttcaaagatccaaaagaccaaaccttaaacacccactcaaccatccaaatactaaaagtccgaaccaaagtgtaagcgtaaatatatatatatatatatatatatatatatatatatatatatatatatatatatatatatatatatatatatatatcctaaaaactaagaagatgagtaatggaaaataattattattttattcatgtgaagtgcataataaaaacaatatgggaaaatgtttagtgacaatttttaggacattatccatgatggaagcatgcctccataattgtcatacgtgggtaattactaaattactagaaaatgactgatgtactcaagaaatggttaatgcttgtaataatttagaaaatattatatatagtagaaaacatgatataaaacaagtccctaaccaaattgatcaaatttatcttttttagtcatttgtcttatatttattgccttgtttacaacatttttttattgttaattcattcataagagtaacatagta

SEQ ID NO: 14638 - DNA, 1099 bp, Glycine max
  Gm_smallRNAprecursor_7471
gtaatgcctcctaaggcatcgggaatctccctacggggaggaaggagtacaggcaaaggagccaggctggctcttccagagccaaccatcaagaaattatctacctcttctgggtcaccaacccaggctgggtcatctacccagaaaaccaatttagaagggtcatcaacccagattgcctcaatcaaacctgagccatccactcaggaatctcccaaaccggcaaccgccaaacaaacatcgcccgactatgcatggccaattgaaacccttcaggcccttcaagacatgggtctgaccaaacttccaaaaataatcaaaaaatcttgggcagacattgcctcagaatctgatgatgaatctgaatcaaatttacaaacaatgatccaaaatgcgtcaatgaccaaaacagccaccaatactaaaggaaaactacctttagccaaagctcaaacaccacctaccaaacaaactaacaattatatttataaaaataaattgttaactgttttgcagatggaacctgaattttgggacaaaaatcccttcaaggcgacggccaaggctttcccaccagaatttcactacaaaccaactaccatcctgaagacaagaactttttatgaattgattttggtagattcaaactcagtatctatcaaacatttcaaagatccaaaagaccaaaccttaaacacccactcaaccatccaaatactaaaagtccgaaccaaagtgtaagcgtaaatatatatatatatatatatatatatatatatatatatatatatatatatatatatatatatatatatatatatatcctaaaaactaagaagatgagtaatggaaaataattattattttattcatgtgaagtgcataataaaaacaatatgggaaaatgtttagtgacaatttttaggacattatccatgatggaagcatgcctccataattgtcatacgtgggtaattactaaattactagaaaatgactgatgtactcaagaaatggttaatgcttgtaataatttagaaaatattatatatagtagaaaacatgatataaaacaagtccctaaccaaattgatcaaat

SEQ ID NO: 14639 - DNA, 1158 bp, Glycine max
  Gm_smallRNAprecursor_7472
ctaaggcatcgggaatctccctacggggaggaaggagtacaggcaaaggagccaggctggctcttccagagccaaccatcaagaaattatctacctcttctgggtcaccaacccaggctgggtcatctacccagaaaaccaatttagaagggtcatcaacccagattgcctcaatcaaacctgagccatccactcaggaatctcccaaaccggcaaccgccaaacaaacatcgcccgactatgcatggccaattgaaacccttcaggcccttcaagacatgggtctgaccaaacttccaaaaataatcaaaaaatcttgggcagacattgcctcagaatctgatgatgaatctgaatcaaatttacaaacaatgatccaaaatgcgtcaatgaccaaaacagccaccaatactaaaggaaaactacctttagccaaagctcaaacaccacctaccaaacaaactaacaattatatttataaaaataaattgttaactgttttgcagatggaacctgaattttgggacaaaaatcccttcaaggcgacggccaaggctttcccaccagaatttcactacaaaccaactaccatcctgaagacaagaactttttatgaattgattttggtagattcaaactcagtatctatcaaacatttcaaagatccaaaagaccaaaccttaaacacccactcaaccatccaaatactaaaagtccgaaccaaagtgtaagcgtaaatatatatatatatatatatatatatatatatatatatatatatatatatatatatatatatatatatatatatatcctaaaaactaagaagatgagtaatggaaaataattattattttattcatgtgaagtgcataataaaaacaatatgggaaaatgtttagtgacaatttttaggacattatccatgatggaagcatgcctccataattgtcatacgtgggtaattactaaattactagaaaatgactgatgtactcaagaaatggttaatgcttgtaataatttagaaaatattatatatagtagaaaacatgatataaaacaagtccctaaccaaattgatcaaatttatcttttttagtcatttgtcttatatttattgccttgtttacaacatttttttattgttaattcatt

SEQ ID NO: 14640 - DNA, 1167 bp, Glycine max
  Gm_smallRNAprecursor_7473
ctaaggcatcgggaatctccctacggggaggaaggagtacaggcaaaggagccaggctggctcttccagagccaaccatcaagaaattatctacctcttctgggtcaccaacccaggctgggtcatctacccagaaaaccaatttagaagggtcatcaacccagattgcctcaatcaaacctgagccatccactcaggaatctcccaaaccggcaaccgccaaacaaacatcgcccgactatgcatggccaattgaaacccttcaggcccttcaagacatgggtctgaccaaacttccaaaaataatcaaaaaatcttgggcagacattgcctcagaatctgatgatgaatctgaatcaaatttacaaacaatgatccaaaatgcgtcaatgaccaaaacagccaccaatactaaaggaaaactacctttagccaaagctcaaacaccacctaccaaacaaactaacaattatatttataaaaataaattgttaactgttttgcagatggaacctgaattttgggacaaaaatcccttcaaggcgacggccaaggctttcccaccagaatttcactacaaaccaactaccatcctgaagacaagaactttttatgaattgattttggtagattcaaactcagtatctatcaaacatttcaaagatccaaaagaccaaaccttaaacacccactcaaccatccaaatactaaaagtccgaaccaaagtgtaagcgtaaatatatatatatatatatatatatatatatatatatatatatatatatatatatatatatatatatatatatatatcctaaaaactaagaagatgagtaatggaaaataattattattttattcatgtgaagtgcataataaaaacaatatgggaaaatgtttagtgacaatttttaggacattatccatgatggaagcatgcctccataattgtcatacgtgggtaattactaaattactagaaaatgactgatgtactcaagaaatggttaatgcttgtaataatttagaaaatattatatatagtagaaaacatgatataaaacaagtccctaaccaaattgatcaaatttatcttttttagtcatttgtcttatatttattgccttgtttacaacatttttttattgttaattcattcataagagt

SEQ ID NO: 14641 - DNA, 1098 bp, Glycine max
  Gm_smallRNAprecursor_7474
ggaatctccctacggggaggaaggagtacaggcaaaggagccaggctggctcttccagagccaaccatcaagaaattatctacctcttctgggtcaccaacccaggctgggtcatctacccagaaaaccaatttagaagggtcatcaacccagattgcctcaatcaaacctgagccatccactcaggaatctcccaaaccggcaaccgccaaacaaacatcgcccgactatgcatggccaattgaaacccttcaggcccttcaagacatgggtctgaccaaacttccaaaaataatcaaaaaatcttgggcagacattgcctcagaatctgatgatgaatctgaatcaaatttacaaacaatgatccaaaatgcgtcaatgaccaaaacagccaccaatactaaaggaaaactacctttagccaaagctcaaacaccacctaccaaacaaactaacaattatatttataaaaataaattgttaactgttttgcagatggaacctgaattttgggacaaaaatcccttcaaggcgacggccaaggctttcccaccagaatttcactacaaaccaactaccatcctgaagacaagaactttttatgaattgattttggtagattcaaactcagtatctatcaaacatttcaaagatccaaaagaccaaaccttaaacacccactcaaccatccaaatactaaaagtccgaaccaaagtgtaagcgtaaatatatatatatatatatatatatatatatatatatatatatatatatatatatatatatatatatatatatatatcctaaaaactaagaagatgagtaatggaaaataattattattttattcatgtgaagtgcataataaaaacaatatgggaaaatgtttagtgacaatttttaggacattatccatgatggaagcatgcctccataattgtcatacgtgggtaattactaaattactagaaaatgactgatgtactcaagaaatggttaatgcttgtaataatttagaaaatattatatatagtagaaaacatgatataaaacaagtccctaaccaaattgatcaaatttatcttttttagtcatttg

SEQ ID NO: 14642 - DNA, 1044 bp, Glycine max
  Gm_smallRNAprecursor_7475
agttttataaatccctttataaattcagccaaatttcattactggagaagttgtatttcaaatttcaaacaaaaataccattacataggtcacttaagcagtcgtatacacataataccgcataggggagcaaaaaaagaaaaaaaaagggggggggggttattacagaacctgttaaagtaagatatctgaaaatttcaaacccaggttgggattcatgcgctactttcccaagttaaacaactccgaaagtgggagagagacaaatagtgatttttctttgggttccaagtgagtgaaaaacttgcgatgaaaaagaagtgcgagatttatcaagacctaccatgtctctagcaccagtggctaaaccattcaaaagaccaattttgcaggaacaatttataaagagatttataaaattgagggaccaaaagtgcaattttacctacaaaaaatgaagtctttacagggaaccactcaggcgttgacacgtggcagtcaacgtctgaggttaacggtcaacgtccaaattgggcttctaggaccaattttgcagggatttataaaactgagggaccaaatttgtgaattaaattatagggggaccaaatccaaaattggagataaagtggggaccaattttgcaattttgccaaaaaaaaattaggagtacaaatattatatgcaaaactccgccacattaactcaaatttatagtgaatagtgtccttaatggtaaaaaaaaaaatttgtgtgcacaacgataatattctcaacggacaacatcccccaacccatttctcttttctcttttcaatggtaatattctaaaatttttatccaaaatgttccaattctccacaacgttcacatccaacgttccaattctccacaacattcacatccaacgttccaattattcacttctctcttctcgacattccaattatgtttttttttcaaccttcccaatacataacttcttcggacacttctagagccttccccacttccccacacgttcagtgtctttcccacttctcc

SEQ ID NO: 14643 - DNA, 1079 bp, Glycine max
  Gm_smallRNAprecursor_7476
gaacttagaactatcatgatactaatctatcatgaaaactataaaaagacctaaagtaatgtagaaacattcaccaccattgagagattggtgacttgagcctataaataggcaattgatatgttgtaatttatcatccaagaaatcaatgacataaccttctttctaaaacaattctctaaaactatcaactatcaactatcatctaataaactaccaacagtggtatcaaacctacgtttggtcatacattgggcgtagttatattacctacctaccattccaaaatcctcccaactacttcaaaagtttcctttgtactattaacccactccaataatattttttctaagctatggataacactactcaatcgtcaactatttctatccttatcttcaatggtgaaaattatgatttctgacgtgttaaaatggaaacatatttttcatctcaagatttatgggacatagtagaagaaggcttcaccgttcccgtggatacttcagctcttaatgcatctcaagaaaaagagttgaagaaaaataaacagaaaaattcaaaggcgttgttcaccttgcaacaagcggtgactgatccaattttcccaagaattatgggagctaagactgccaaagaagcgtggaacacattgcaggaggagtttcaaggaagtgttaaggtacgtgtcgttaaacttcaatctctaagaagagattttgaactattgaagatgaaggagtctgagacagttaaagattattattctaaagttaaagaaatagttaatcaaatgagagcttttggggaagatattcttgacaagaaaattgttgagaaaattctaattactatgccccaaaagtttgacccaatcgtgacaatgattgaggaaatcaaagatctgtccactctattagagacagaacttgtgggctctcttgaagcatatgagcaaagactgtataggcataaagaagatacacttgaaaatgccttctagtcaaagtttaaatttcagccccaaaacaaagaaaatggaggaaagaaaaattatgaataaacttccagaagaagag

SEQ ID NO: 14644 - DNA, 1085 bp, Glycine max
  Gm_smallRNAprecursor_7477
tgcaacaaacattgccatgaaggtacaagttgatgattcatggctatggcatcgaagatttggccacttcaacacacatgcctcgaagttgctacatgagaagaacatgatgagagatcttcccagcataaaggagaacaatgaagtgtgtgaaggatgtctccttggtaagcaacactgattttctttctcaacaagcagagcatggagagcgaaagatctattggagcttatacatacggacgtctgtggaccaatgaggacgccattacatgagaacaacaggtacttcatactcttcattgatgacttctctagaatgacatgggtatattttctaaaagaaaaatcagaagtctttggagtattcaaaaagttcaaggcccttgctgaaaatcaaagtggaaaacagataaaagtactaagaagtgatcgcggcaaagagtacacttctcgcgagtttgaaagattttgtgaggataaaggcattgagtgacaacttacagtcgcatattctcctcaacaaaatggagtgttcgagagaaagaatcgcacagttatggaaatggctagatcaatgctcaaggagaagggactacctaacacattatgggctgaagcagtctacactgctgtttacataatcaacagatgtccaactaagtctgtaaaagacaagactccaattgaagcttggaacgggaagaagccatcagcaaagcacctaagggtctttggatgctacattcatattccagacgtgaagaggcacaagcttgaagacaagactatacgaggtatcttccttgggtataacaatatctctaagggctaccgtgtctacaacttgcaaactaagaaactcgtcatcagtcgagatgttgaagttgatgagtacgcttcttggaattgggatgaagaaaaagtggagaagaacgttcttatacccgctcaactacctcaagaagaagctgaggaagaagacccaggtgaaccacctttacctccaccacaacaacaagatcaagaactatcatcaccagagtctactccaagacaagtaagatctttggtggacatatatg

SEQ ID NO: 14645 - DNA, 1033 bp, Glycine max
  Gm_smallRNAprecursor_7478
acttagtaaaaatcacttttttattatacatgcatcatatgcccattttttttaattaaaaaagacattcaaatatgaatattcatagataaatgaaaactatttgagaaaagtattatgatgactagtgaaaggcccgacacttaactagttcaaaaacataaaataatgcaaacaaatagaaaaagaatggccaaaataacaattctaaaaggcaaaattgtaaatttggttccccctagtttatttccagttttggatttggtcccccaataatttaattcacaaatttggttcccctattttgtaaaatcgtgcaatgttgatcccccaggccacaattggacgttgatcattaacaaatgatgttgactgccacgtgtcacgttcttattggatgatgacgaccacgtgtcatgttctaattggatgtcaactccatgaaagatgaaatgaattgttgttttcattgatcaatcagaacatgacacgtgcaaccatcatccaataagaacgtgacacttggcagttaacatcacttgttaacggtcaacgtccaattgtggcctgggagaccaacattgcataattttacaaaatagggggaccaaatttgtgaattaaattactgggggaccaaatccgaaactggagataaattgggagaccaaaaatgaaattttgccattctaaaatagagaaagtcataatgaagcaggaaggatccacactttcttgtttatttattatttagcttatttaacaaatttataacatagcaacacacaatgctaacataacagtagatattgcaatcatccaatgtacaaataaatatttaataactaattataatatcaagaattaaaatactttaagagtgtgtttgaatgatgaattttaactgagtaattcattttaataatgtaattgaaatatttcaaggtgaaattacacgtttggataaattatttaaagagaaattgaattcagtcaatttaataaggaatttcattcagaattgaaattcttt

SEQ ID NO: 14646 - DNA, 1082 bp, Glycine max
  Gm_smallRNAprecursor_7479
acatttattcttcaacaaaaatgttgacaatgtcttcaattgtacttccttccaaaatatgtttttgtcaatccaaaatatattagattttatcaaaattaaataatttttctatatatgaaaaattgcacatctcaatgtttagtgaagcacaactactttcagttaaagaatgtttcatagtttcacaatattgtcaatctttataaatacttacaaatcttaactcaatcataataaccaacagacaatagatcatattgaccataaatgatggtgatgggcttcataattgagtattgctaggtgcacccagcattttttaaaaatgacaaaatgatctctgccttctttattcctttatggatcaagtcaatccgcaagttgatttttaagacttatgaatcaagttgattcgtaagtcttttacgaataaagttgatccgtaagtcttaaaaatcaacttgcggatcaacatgatccgtgaaagacttacggatcaacttgatccgtaagtcttaaaaatcaacttgcagatcaacttgatctgtaaaaaacttacgaatcaacttgatccgtaaaagacttacgaatcaacttgatctgtaagaaacttgcgtatcatctatatcctgcggatcaactaaaacctatgtgaatcaactcattgcatatgtgaatcaacctaaatgagttgggtgcacaaaaatatttttaaaaatacacaggaatatttttatcttttcatgttaaatgttggatgcagctagcgacaccctttataatttctattttgatggatgcttttgcatctttgcagccttaataacaatccaagtgatttgttgatttgaaggaaatatagtgatcacgtgttaggatgaaatagttaatattaataaatttggacaaccaaactcattaggacaacaattctgctcacaaattgcctcgcaacaaaagaaacaaggacgaagttaacaaaatcgaaaatctcaccaaacaacaagctcatagacgttgctccaacctcaatggtggaagaggaagcaaaaggataaagaaaatcgaaaatctcacca

SEQ ID NO: 14647 - DNA, 1083 bp, Glycine max
  Gm_smallRNAprecursor_7480
acatttattcttcaacaaaaatgttgacaatgtcttcaattgtacttccttccaaaatatgtttttgtcaatccaaaatatattagattttatcaaaattaaataatttttctatatatgaaaaattgcacatctcaatgtttagtgaagcacaactactttcagttaaagaatgtttcatagtttcacaatattgtcaatctttataaatacttacaaatcttaactcaatcataataaccaacagacaatagatcatattgaccataaatgatggtgatgggcttcataattgagtattgctaggtgcacccagcattttttaaaaatgacaaaatgatctctgccttctttattcctttatggatcaagtcaatccgcaagttgatttttaagacttatgaatcaagttgattcgtaagtcttttacgaataaagttgatccgtaagtcttaaaaatcaacttgcggatcaacatgatccgtgaaagacttacggatcaacttgatccgtaagtcttaaaaatcaacttgcagatcaacttgatctgtaaaaaacttacgaatcaacttgatccgtaaaagacttacgaatcaacttgatctgtaagaaacttgcgtatcatctatatcctgcggatcaactaaaacctatgtgaatcaactcattgcatatgtgaatcaacctaaatgagttgggtgcacaaaaatatttttaaaaatacacaggaatatttttatcttttcatgttaaatgttggatgcagctagcgacaccctttataatttctattttgatggatgcttttgcatctttgcagccttaataacaatccaagtgatttgttgatttgaaggaaatatagtgatcacgtgttaggatgaaatagttaatattaataaatttggacaaccaaactcattaggacaacaattctgctcacaaattgcctcgcaacaaaagaaacaaggacgaagttaacaaaatcgaaaatctcaccaaacaacaagctcatagacgttgctccaacctcaatggtggaagaggaagcaaaaggataaagaaaatcgaaaatctcaccaa

SEQ ID NO: 14648 - DNA, 1170 bp, Glycine max
  Gm_smallRNAprecursor_7481
tgcctggaacccaagatggactacccttcctgtgactagcaaggcttaagcatttttctgcactatgttaaaaatctgctgcacaattcaacaacatttttctgcataatagggcagatttcgaaatccatcttgcctacatccaatttttctcaaattggatcctacaagtcctaaatcatgtataaaacatatttaaaccaaaaacaagcttcagatcaaggtaaatcaaaatctaggtatccaaaacccatcaatttagtgaattttcaaggtttaagaagtgaaaatgagaattggttaattttggggtaaactctcatctcaatcaagtctataacattgatttagacttgctcaaattggttttaaagcgaaaactccaccgattcaaaatttgacccctcaacacccaatttaccctagaaatggctcttgctttcaccttgatcactcatttttcttatttgctctgcccaagcttttctacaagtcctaattgacattttaaactaggatcaactcactttagattccaatttacactaaccccaaatttggcttttcaaaaccctcaaaatctcacacttttccactcacatcactaccattctcacatttaaccctaagttaactctccccatcatctctaccagttttccatcaacaatttcagcatacaaatatcacaaagcatcatcataaaaccctaaaacagaatgggtagctttactcacatcaaacatgtcaagtttagcatgatttcaacaaattccttcacaaataactaccctaaggcaataacctagtagaactacccatcataactcccaaaaacccatcacccatgaatttcatgtgagaagaagtccacccatacctgaaattcgaagccccacaacgtagaggtgtgcttcacgactccgaaaatggcttctccttgcaatttggagtagaaataaggagaaattttggagctttaatggagaacaaaggtggagaagaaggaagaagaaaaagctacgtggaaagggagaagaagagctgctgaaatttctgaagaaggagagagaaatttggcttttataaaaaaaaaattttcttttcccttttttttttctcataaagcaatgccacttgtcccattttaagtggagcaaaaaggggccc

SEQ ID NO: 14649 - DNA, 1157 bp, Glycine max
  Gm_smallRNAprecursor_7482
ttattgccttagggtagtcatttgtgaaggaatttgtggaaatcatgctaaacttgacatgtttgatgtgagccaaattacccatgctgatttagggttttatgatgatgctttgtgatatttgtatgctgaaaatgttgttggaaaactggtagagatgatggggagagttaacttagggttaaatgtgagaatggtagtgttgtgagtggaaaagtgtgagattttgagggttagaaaagccaaacttggtgttagtggaaattggagtctaaagtgggttgattctagtttagaatgtcaattaggacttgtaggaaagcttgggtagagcaaatgagaaaaaaatgagtgacaaatgtgaaagaaaagagccatttctagggtaaattgggtgttgagaggtcaaattttgaatggctggggttttcaccttaaaaccagtttgagcaagtctaaatcaatgttatagacttgattgagatgagagtttaccccaaaattatccaattctcattttcacttttcaaaccttgagaattcaataaattggtgggttttggatacctatattttgatttgccttggtctgaagtttgtctttggtttaagtatgatttatacatgatttaggacttgtaggatccaatttgagcaaaattggatgtgggcaagttggatttcgaaatctgccatattatgcagaaaaatgatgtcaaaattgtgcagcagtttttttttaacatagtgcagaaaaatggttgtacattgctagtcatgggaagagtagtacatctcgggttccaagaattttctagcagatcccaacggtcaaaatgtagatttatgtactaggaacctccagtataattttcaagtcgatccaatggttaacgaatcggaacgaagagaatgttactggggtatatgagtaaggaaagttgtggtatttgaatgagttttggacaaagttttctgcctttactctgttttcttggtttagggtagtttcatgataaatgagatcgaattgtttggatattgaggaaggttggaggggttgatggggacccggtgttgaaaggaacgaggataagggctacgtaagagtgcgtgagctcaagttaaaggtgggcaactggggatggtatgcttgt

SEQ ID NO: 14650 - DNA, 1106 bp, Glycine max
  Gm_smallRNAprecursor_7483
ctatctttttcgttgtttatgatataagcgactgggtacctcattggtatcagaaccgttatttagctctggatagacatcgagatataactaataataatagttatgctaacaaactttctataaaatcttttgaagacttatctgaaactttagatagcctaacaaaaacacaaaatttgttgtttaacaaaatacaaactttagaaaataaagttaacaacattttgaaaattcttaaatctaaagaccaacaaattcatttttccacaaacgaactcgataaaattacaacgcaactttcaaaacttgatttaggaaagacaacaagtcaaacctcaaccaaattcgttttagcaaagcctagaaaatgaggacaacaccttttacaggaacctcacaaactgtttcaggacacaatcctattactaaatctataaaccaacatcctggaatcttggatagattctttagaagaacaaactcccgaaccaaacaactggaacaaatagtagatatagaatccaatattgatattggatcaaattctaggatagactccctcaatcctagacaattatacaatctaaactggttggcttctaatagaactagcttatacagatacagaaggattgatgatttttatctccctgacggaagacatgagattatcagaataatctcaaaacaaaccggacgacaactccttaatacaaatagaaaatatgtacacctagggttaattgccataggtgtcaagtctctaacaagatcttccgtaggagctaaagcttttgtagtcctctttgatcaaaggttcagagataataattctcaggccataatagggatgatagaaatagatctaaaccaaacagtctccctaatctatattgcccctaattacacaatgaatcttagtgatttcataaaaaacataaacctagaagtctagacaataggttttggaagaaactttgagggacataacttacacttggatattaccttcattggcagaataagtgatcaaatatcccctaaatacaggataaacactaatccactagtgacaaccttatcatctgatggaatccaatttt

SEQ ID NO: 14651 - DNA, 1054 bp, Glycine max
  Gm_smallRNAprecursor_7484
taatttattgtttgccaggcggaatttgaaatccttgaagcttctgacagtaggacaaagaagaaatttttttagacagtcggggagcggtggaggcagtttaaatctgacttgactaggaaatgggcacttgcagccgacaaggacggtgtggacgacattgtctatgaaaaatacgacattagcaaggagaaatgggcccagttttgtcagacccgcaaagacccctcgtgggaggtatgtactttttcattttcgttattttccacaaaaatatcagttcttataattcattgtagtaatcattttcattaatgtttgattttttcaggatgtgcggaaaaaggcacagaccatctagaagcaaaacactgccccccacgtgttgtctcgtgggggttatgaatatttagaacaaaagctcatggctgagaagacaaataaaatactggaagaagctgcccagtccggaagcactgagggcatcattgaccctccatctcccatcagacgccacgtgaagtggaagctggcccgcaccaagaaaactgggcagatgacgtctgaggcagcaaaggaaatagctgagaagattgtaagtcatttataattaataattgtaattatctttgtgtattctatgaattccttggacaaatatgtgttttgtacaggattctttggatgagcaggcgtcacagggatcgttcgtccccccatggatgtcaagatgtcctaactgctgccattgggcaaccagagcaccctggccgggtccgtgccgctggagccggtgtcaccataaagcaatacttcggatcggctccacgaatgtcgtgtagttcttcctctatgcttcctgaagacctacagcagctgacccaagaaatcagggacctgcttgatgagtcgatcacaaaaaatgtgactcgatagctgatgacatccttcagctagatgcagtcccagttccagtctcaaatgcattcatagggacttgcactgccttcggagccagaggttggtccctcaggtgctcgtgtcaacacaaaag

SEQ ID NO: 14652 - DNA, 1048 bp, Glycine max
  Gm_smallRNAprecursor_7485
aaaatatttttgcagaatttaatctgttaagtaaatcttttttgtttggaataggatacctaatccattgtaatgcttgattcagtggtttgtaatttatgactaagcgaggtgttccacactcaagctcagattttttattgacataaaaagccgcacaagaccatgggcttttgctcttccggattaggcctttaacaagcaaatccttgatttccttttggcagtattgaaggagttcttcattcatttgaattggtctggcttttatgggaatttttttccctaaagtctttctcataagggatatcaacaatatgtttctttctatcccaaaatgcatgtggcaaatcagaacagacagttgattccatatgacttaataaagattgaattttttcttttacttggggttttccctgttgtatctgaatattattaaaagatacttcttcttttaagaagttaatttggttaatcttattttctataagatttatatttctggagattggtttagtagagaaattaaatataatttttcttcctaaataatttgtagttattccttcattagatatttgaatgggaaacaaggctctaatgaagggagttcctgggatcacttcattcttaaggttttttaccaaaagaaattttgtgttaatcctaagaccttggttttcaattattgcattcgatagtttgtaattgatctttaatttggatccatttgctgtgctgaggttttctcgaagaattttgtaggaattaatccttctaaaatacaatttgaatcagcccctgtgtcaaatagggccattgtatctaaaacaaaatcattaataattatttttatgtttatgtaaaatttttggattttaatcttgttgattaatcccataaacatatcatcttctagattatctggttggtttccttcactgttgttgacactttcagaatcactatcttcctcaatccgagaaagaataatctgatgaatttcttgttgttgacgaagttctttcacttccttttttagatt

SEQ ID NO: 14653 - DNA, 1118 bp, Glycine max
  Gm_smallRNAprecursor_7486
taccttacccgtgaattcttacagaaaagcggtaatgcctcctaaggcatcaggagcctccctgagaggaggtcgaagtacagataaaggatctaggctggctctaccagagttgtccactaaaaaatcatcctcaacttcttttgtgtcaccaacccaggctgggtcatccacccaaaaaaccaattttgaagggtcatcaacccaaattatctcagtcaaacctgagccatccactcaggaatctcccaaaccggcaactgccaaacaaacatcagccgactatgcctggccaattgaaaccctttaggcccttcaagacatgggtctaaccaaatttccaaaaataatcaaaaaatcttgggcagataatgctccaaaatacatcaatgaccaaaacaactacctatcctaaagggaaactaccgctagccaaagtacaaacaccacctatcaaacaaactaacaattatatttattaaaataaattttcaactgttttgcagatggaacctgaattttgggacaaaaacccatttaaggcaacaggcaaggctttcccgtcaggatttcactacaaaccaactaccatcctgaagtcaaagactttttatgaattgattttggtagactcaaattcagtatctatcaaacatttcaaagacccaaaagatcaaacattgaacacccactcaacaatccaaatactaaaagttcttcaaccaagacattttggttcggacttaaacaacggaaagagattttcagtaccatttgacctagtagggtatacctattgggattatattgattcttggactaaggttttttggcaccaaaatacccgcttcaagcattcatggttgatatatttcaaaaccaacacaatttataattttccaaattggtttttacaatggcgggatttctttggtccaattccagagatattcccgaaaacagtccaacaaggatttgctcaatttgaaaaacaatacaattctcaggaatcacgaattccagtagatcttaaatatttttctagttttgctttgtcatggattttctcatggcagtatcgttatagtaagactgaaaaaacaaaccaatatccatca

SEQ ID NO: 14654 - DNA, 1208 bp, Glycine max
  Gm_smallRNAprecursor_7487
taccttacccgtgaattcttacagaaaagcggtaatgcctcctaaggcatcaggagcctccctgagaggaggtcgaagtacagataaaggatctaggctggctctaccagagttgtccactaaaaaatcatcctcaacttcttttgtgtcaccaacccaggctgggtcatccacccaaaaaaccaattttgaagggtcatcaacccaaattatctcagtcaaacctgagccatccactcaggaatctcccaaaccggcaactgccaaacaaacatcagccgactatgcctggccaattgaaaccctttaggcccttcaagacatgggtctaaccaaatttccaaaaataatcaaaaaatcttgggcagataatgctccaaaatacatcaatgaccaaaacaactacctatcctaaagggaaactaccgctagccaaagtacaaacaccacctatcaaacaaactaacaattatatttattaaaataaattttcaactgttttgcagatggaacctgaattttgggacaaaaacccatttaaggcaacaggcaaggctttcccgtcaggatttcactacaaaccaactaccatcctgaagtcaaagactttttatgaattgattttggtagactcaaattcagtatctatcaaacatttcaaagacccaaaagatcaaacattgaacacccactcaacaatccaaatactaaaagttcttcaaccaagacattttggttcggacttaaacaacggaaagagattttcagtaccatttgacctagtagggtatacctattgggattatattgattcttggactaaggttttttggcaccaaaatacccgcttcaagcattcatggttgatatatttcaaaaccaacacaatttataattttccaaattggtttttacaatggcgggatttctttggtccaattccagagatattcccgaaaacagtccaacaaggatttgctcaatttgaaaaacaatacaattctcaggaatcacgaattccagtagatcttaaatatttttctagttttgctttgtcatggattttctcatggcagtatcgttatagtaagactgaaaaaacaaaccaatatccatcattccaaagacatgcatttgtaaaatggtggactcaatttgactcatccaaagcagatccagaacaagtgaaaatctggttccaatcccat

SEQ ID NO: 14655 - DNA, 1208 bp, Glycine max; identical to SEQ ID NO: 14654
  Gm_smallRNAprecursor_7488

SEQ ID NO: 14656 - DNA, 1107 bp, Glycine max
  Gm_smallRNAprecursor_7489
aattatctcagtcaaacctgagccatccactcaggaatctcccaaaccggcaactgccaaacaaacatcagccgactatgcctggccaattgaaaccctttaggcccttcaagacatgggtctaaccaaatttccaaaaataatcaaaaaatcttgggcagataatgctccaaaatacatcaatgaccaaaacaactacctatcctaaagggaaactaccgctagccaaagtacaaacaccacctatcaaacaaactaacaattatatttattaaaataaattttcaactgttttgcagatggaacctgaattttgggacaaaaacccatttaaggcaacaggcaaggctttcccgtcaggatttcactacaaaccaactaccatcctgaagtcaaagactttttatgaattgattttggtagactcaaattcagtatctatcaaacatttcaaagacccaaaagatcaaacattgaacacccactcaacaatccaaatactaaaagttcttcaaccaagacattttggttcggacttaaacaacggaaagagattttcagtaccatttgacctagtagggtatacctattgggattatattgattcttggactaaggttttttggcaccaaaatacccgcttcaagcattcatggttgatatatttcaaaaccaacacaatttataattttccaaattggtttttacaatggcgggatttctttggtccaattccagagatattcccgaaaacagtccaacaaggatttgctcaatttgaaaaacaatacaattctcaggaatcacgaattccagtagatcttaaatatttttctagttttgctttgtcatggattttctcatggcagtatcgttatagtaagactgaaaaaacaaaccaatatccatcattccaaagacatgcatttgtaaaatggtggactcaatttgactcatccaaagcagatccagaacaagtgaaaatctggttccaatcccatccagaattcctcaaagtagccgatctagaaacttctgtgtttttaaaccaaaagtcccatctagcagcatttttagcaggatcaaaatcgaaagagatcctaacta

SEQ ID NO: 14657 - DNA, 1107 bp, Glycine max; identical to SEQ ID NO: 14656
  Gm_smallRNAprecursor_7490

SEQ ID NO: 14658 - DNA, 1108 bp, Glycine max
  Gm_smallRNAprecursor_7491
aattatctcagtcaaacctgagccatccactcaggaatctcccaaaccggcaactgccaaacaaacatcagccgactatgcctggccaattgaaaccctttaggcccttcaagacatgggtctaaccaaatttccaaaaataatcaaaaaatcttgggcagataatgctccaaaatacatcaatgaccaaaacaactacctatcctaaagggaaactaccgctagccaaagtacaaacaccacctatcaaacaaactaacaattatatttattaaaataaattttcaactgttttgcagatggaacctgaattttgggacaaaaacccatttaaggcaacaggcaaggctttcccgtcaggatttcactacaaaccaactaccatcctgaagtcaaagactttttatgaattgattttggtagactcaaattcagtatctatcaaacatttcaaagacccaaaagatcaaacattgaacacccactcaacaatccaaatactaaaagttcttcaaccaagacattttggttcggacttaaacaacggaaagagattttcagtaccatttgacctagtagggtatacctattgggattatattgattcttggactaaggttttttggcaccaaaatacccgcttcaagcattcatggttgatatatttcaaaaccaacacaatttataattttccaaattggtttttacaatggcgggatttctttggtccaattccagagatattcccgaaaacagtccaacaaggatttgctcaatttgaaaaacaatacaattctcaggaatcacgaattccagtagatcttaaatatttttctagttttgctttgtcatggattttctcatggcagtatcgttatagtaagactgaaaaaacaaaccaatatccatcattccaaagacatgcatttgtaaaatggtggactcaatttgactcatccaaagcagatccagaacaagtgaaaatctggttccaatcccatccagaattcctcaaagtagccgatctagaaacttctgtgtttttaaaccaaaagtcccatctagcagcatttttagcaggatcaaaatcgaaagagatcctaactaa

SEQ ID NO: 14659 - DNA, 1108 bp, Glycine max; identical to SEQ ID NO: 14658
  Gm_smallRNAprecursor_7492

SEQ ID NO: 14660 - DNA, 1128 bp, Glycine max
  Gm_smallRNAprecursor_7493
tccaaactatctaatgcaatcattgaaaaccaaggtcttaggattaacacaaactttcttctagtaaaaaaccttaagaacgaagtgatcccaggaactcccttcattagagccttgtttcccattcaaatatctaatgaaggaataactacaaattatttaggaagaaaaattatatttaatttctctattaaaccaatctccagaaatataaatcttatagaaaataagattaaccaaattaacttcttaaaagaagaagtatcttttaataatatttagatacaactgggaaaatcccaagtaaaagaaaaaattcaatctttattaagtcatatcgaatcaactgtctgttctgatttgccacatgaattttgggatagaaaaaaatatattgttgatctcccttatgagaaagactttagggaaaaacaaattcccacaaaagccagaccaattcaaatgaatgaagaactccttcaatactgccaaaaggaaatcaaggatttgcttgataaaggcctaatccgaaagagcaaaagcccatggtcttgtgcgtctttttatgtcaataaacaatatgagcttgagcgtggaacacctcgcttagtcataaattacaaaccactgaatcaagcattacaatggattaggtatcatattccaaacaaaaaagatttacttaacagattaaattctgcaaaaatattttcaaaatttgatatgaaatctggattttggcaaatccaaattcaagaattagataggtacaaaatagtgtttactgtacctttcgggcaatatgaatggaatgtcatgccattcggactgaagaatgccccttcagaatttcaaaaaattatgaacgatatttttaatccatattcaaaatttgtcattgtctacatagatgatgttttaatcttttcccaaatcattgaccaatatttcaaacatctccagactttcatccatatcatcaaatagaatggtttggcagtctccaaatcaaaaatcaatcttttccaaactcaaattcgattccttggtcataatatatatcaaggtgtaatcattccaatagaaaggtcaatagaatttgctaacaaatttcccaaccaaatctta

SEQ ID NO: 14661 - DNA, 1118 bp, Glycine max
  Gm_smallRNAprecursor_7494
ctcctaaggcatcaggagcctccctgagaggaggtcgaagtacagataaaggatctaggctggctctaccagagttgtccactaaaaaatcatcctcaacttcttttgtgtcaccaacccaggctgggtcatccacccagaaaaccaattttgaagggtcatcaacccaaattatctcagtcaaacctgagccatccactcagcccaaatcggcaactgccaaacaaacatcagccgactatgcctggccaattgaaaccctttaggcccttgaagacatgggtgtaaccaaatttccaaaaataatcaaaaaatcttgggcagatattgcctcaaaatctgacgatgattctgaatcaaatttacaaacaatgctccaaaataaatcaatgaccaaaacaactaccaatcctaaagggaaactaccggtagccaaagtacaaacaccacctatcaaacaaactaacaattatatttataaaaataaattttcaactgttttgcagatggaacctgaattttgggacaaaaacccatttaaggcaacagccaaggctttcccgtcaggatttcactacaaaccaactaccatcctgaagtcaaggactttttatgaattgattttggtagactcaaattcagtatctatcaaacatttcaaagacccaaaagatcaaacattgaacacccactcaacaatccaaatactaaaagttcttcaaccaagacattttggttcgaacttaaacaaaggaaagagattttcagtaccatttgacctagtagggtatacctattgggattatattgatgcttggactaaggttttttggcaccaaaatacccgcttcaagcattcatggttgatatatttcaaaaccaacacaatttataattttccaaattggtttttacaatggcgggatttctttggtccaattccagagatattcctgaaaacaatccaacaaggatttgcttaatttgaaaaacaatacaattcttaggaatcacgaatttcagctgatcttaaatatttttccagttttgctttgtcatggattttctcatggcagtatccttatagtaagactgaaaaaacaaaccaatatccatca

SEQ ID NO: 14662 - DNA, 1208 bp, Glycine max
  Gm_smallRNAprecursor_7495
ctcctaaggcatcaggagcctccctgagaggaggtcgaagtacagataaaggatctaggctggctctaccagagttgtccactaaaaaatcatcctcaacttcttttgtgtcaccaacccaggctgggtcatccacccagaaaaccaattttgaagggtcatcaacccaaattatctcagtcaaacctgagccatccactcagcccaaatcggcaactgccaaacaaacatcagccgactatgcctggccaattgaaaccctttaggcccttgaagacatgggtgtaaccaaatttccaaaaataatcaaaaaatcttgggcagatattgcctcaaaatctgacgatgattctgaatcaaatttacaaacaatgctccaaaataaatcaatgaccaaaacaactaccaatcctaaagggaaactaccggtagccaaagtacaaacaccacctatcaaacaaactaacaattatatttataaaaataaattttcaactgttttgcagatggaacctgaattttgggacaaaaacccatttaaggcaacagccaaggctttcccgtcaggatttcactacaaaccaactaccatcctgaagtcaaggactttttatgaattgattttggtagactcaaattcagtatctatcaaacatttcaaagacccaaaagatcaaacattgaacacccactcaacaatccaaatactaaaagttcttcaaccaagacattttggttcgaacttaaacaaaggaaagagattttcagtaccatttgacctagtagggtatacctattgggattatattgatgcttggactaaggttttttggcaccaaaatacccgcttcaagcattcatggttgatatatttcaaaaccaacacaatttataattttccaaattggtttttacaatggcgggatttctttggtccaattccagagatattcctgaaaacaatccaacaaggatttgcttaatttgaaaaacaatacaattcttaggaatcacgaatttcagctgatcttaaatatttttccagttttgctttgtcatggattttctcatggcagtatccttatagtaagactgaaaaaacaaaccaatatccatcattgcaaagacatgcatttgtaaaatggtggactcaattcgactcatccaaagcagatccagaacaagtgaaactctggttccaatcccat

SEQ ID NO: 14663 - DNA, 1208 bp, Glycine max; identical to SEQ ID NO: 14662
  Gm_smallRNAprecursor_7496

SEQ ID NO: 14664 - DNA, 1107 bp, Glycine max
  Gm_smallRNAprecursor_7497
aatcggcaactgccaaacaaacatcagccgactatgcctggccaattgaaaccctttaggcccttgaagacatgggtgtaaccaaatttccaaaaataatcaaaaaatcttgggcagatattgcctcaaaatctgacgatgattctgaatcaaatttacaaacaatgctccaaaataaatcaatgaccaaaacaactaccaatcctaaagggaaactaccggtagccaaagtacaaacaccacctatcaaacaaactaacaattatatttataaaaataaattttcaactgttttgcagatggaacctgaattttgggacaaaaacccatttaaggcaacagccaaggctttcccgtcaggatttcactacaaaccaactaccatcctgaagtcaaggactttttatgaattgattttggtagactcaaattcagtatctatcaaacatttcaaagacccaaaagatcaaacattgaacacccactcaacaatccaaatactaaaagttcttcaaccaagacattttggttcgaacttaaacaaaggaaagagattttcagtaccatttgacctagtagggtatacctattgggattatattgatgcttggactaaggttttttggcaccaaaatacccgcttcaagcattcatggttgatatatttcaaaaccaacacaatttataattttccaaattggtttttacaatggcgggatttctttggtccaattccagagatattcctgaaaacaatccaacaaggatttgcttaatttgaaaaacaatacaattcttaggaatcacgaatttcagctgatcttaaatatttttccagttttgctttgtcatggattttctcatggcagtatccttatagtaagactgaaaaaacaaaccaatatccatcattgcaaagacatgcatttgtaaaatggtggactcaattcgactcatccaaagcagatccagaacaagtgaaactctggttccaatcccatccaaaattcctcaaagcaactgatctagaaacttatgtgtttttaaaccaaaagtcgcatctagcagcatttttagcatgatcaaaatcgaaagagatcctaacta

SEQ ID NO: 14665 - DNA, 1107 bp, Glycine max; identical to SEQ ID NO: 14664
  Gm_smallRNAprecursor_7498

SEQ ID NO: 14666 - DNA, 1108 bp, Glycine max
  Gm_smallRNAprecursor_7499
aatcggcaactgccaaacaaacatcagccgactatgcctggccaattgaaaccctttaggcccttgaagacatgggtgtaaccaaatttccaaaaataatcaaaaaatcttgggcagatattgcctcaaaatctgacgatgattctgaatcaaatttacaaacaatgctccaaaataaatcaatgaccaaaacaactaccaatcctaaagggaaactaccggtagccaaagtacaaacaccacctatcaaacaaactaacaattatatttataaaaataaattttcaactgttttgcagatggaacctgaattttgggacaaaaacccatttaaggcaacagccaaggctttcccgtcaggatttcactacaaaccaactaccatcctgaagtcaaggactttttatgaattgattttggtagactcaaattcagtatctatcaaacatttcaaagacccaaaagatcaaacattgaacacccactcaacaatccaaatactaaaagttcttcaaccaagacattttggttcgaacttaaacaaaggaaagagattttcagtaccatttgacctagtagggtatacctattgggattatattgatgcttggactaaggttttttggcaccaaaatacccgcttcaagcattcatggttgatatatttcaaaaccaacacaatttataattttccaaattggtttttacaatggcgggatttctttggtccaattccagagatattcctgaaaacaatccaacaaggatttgcttaatttgaaaaacaatacaattcttaggaatcacgaatttcagctgatcttaaatatttttccagttttgctttgtcatggattttctcatggcagtatccttatagtaagactgaaaaaacaaaccaatatccatcattgcaaagacatgcatttgtaaaatggtggactcaattcgactcatccaaagcagatccagaacaagtgaaactctggttccaatcccatccaaaattcctcaaagcaactgatctagaaacttatgtgtttttaaaccaaaagtcgcatctagcagcatttttagcatgatcaaaatcgaaagagatcctaactaa

SEQ ID NO: 14667 - DNA, 1108 bp, Glycine max; identical to SEQ ID NO: 14666
  Gm_smallRNAprecursor_7500

SEQ ID NO: 14668 - DNA, 1239 bp, Glycine max
  Gm_smallRNAprecursor_7501
attgaacacccactcaacaatccaaatactaaaagttcttcaaccaagacattttggttcgaacttaaacaaaggaaagagattttcagtaccatttgacctagtagggtatacctattgggattatattgatgcttggactaaggttttttggcaccaaaatacccgcttcaagcattcatggttgatatatttcaaaaccaacacaatttataattttccaaattggtttttacaatggcgggatttctttggtccaattccagagatattcctgaaaacaatccaacaaggatttgcttaatttgaaaaacaatacaattcttaggaatcacgaatttcagctgatcttaaatatttttccagttttgctttgtcatggattttctcatggcagtatccttatagtaagactgaaaaaacaaaccaatatccatcattgcaaagacatgcatttgtaaaatggtggactcaattcgactcatccaaagcagatccagaacaagtgaaactctggttccaatcccatccaaaattcctcaaagcaactgatctagaaacttatgtgtttttaaaccaaaagtcgcatctagcagcatttttagcatgatcaaaatcgaaagagatcctaactaaaaatcttaaggaagttctgtaaatgatatagcaagaggaagaaggttcatcctcaaagaaggaagaaacaagctctattgaagaaaaagatgactctttttaccaaaacgaagatgattgttttggtatttgtttagattaattgtaatttctgttacaaaaccgtatgtgtgtaattaatttgtaatttcgaacaatactacctatcctgtagcaaataagtcccggtcaaaactaattgtcctgtaacaaacagtcaaatagtttcggtcaaaactaccggcaactaccggtcaaagaattttggctatataaggagtcctcaaccatattgtgaggcacccttccatttagccaatttcaggtttttgagatgaggtgctctgaaagaacaacttttgtaagcacttctttcaagtttcaataaatttttatttttatccatctctcttctccctctttagtgatcatgtgcggctctgccgccgcttcggtttctttgtttatgaaaacctgggatttgtaagccagtctccggtgtgcccttgatacttgtttttaaagtttagatttcgcattccgtttatcatactgcattcttac

SEQ ID NO: 14669 - DNA, 1240 bp, Glycine max
  Gm_smallRNAprecursor_7502
attgaacacccactcaacaatccaaatactaaaagttcttcaaccaagacattttggttcgaacttaaacaaaggaaagagattttcagtaccatttgacctagtagggtatacctattgggattatattgatgcttggactaaggttttttggcaccaaaatacccgcttcaagcattcatggttgatatatttcaaaaccaacacaatttataattttccaaattggtttttacaatggcgggatttctttggtccaattccagagatattcctgaaaacaatccaacaaggatttgcttaatttgaaaaacaatacaattcttaggaatcacgaatttcagctgatcttaaatatttttccagttttgctttgtcatggattttctcatggcagtatccttatagtaagactgaaaaaacaaaccaatatccatcattgcaaagacatgcatttgtaaaatggtggactcaattcgactcatccaaagcagatccagaacaagtgaaactctggttccaatcccatccaaaattcctcaaagcaactgatctagaaacttatgtgtttttaaaccaaaagtcgcatctagcagcatttttagcatgatcaaaatcgaaagagatcctaactaaaaatcttaaggaagttctgtaaatgatatagcaagaggaagaaggttcatcctcaaagaaggaagaaacaagctctattgaagaaaaagatgactctttttaccaaaacgaagatgattgttttggtatttgtttagattaattgtaatttctgttacaaaaccgtatgtgtgtaattaatttgtaatttcgaacaatactacctatcctgtagcaaataagtcccggtcaaaactaattgtcctgtaacaaacagtcaaatagtttcggtcaaaactaccggcaactaccggtcaaagaattttggctatataaggagtcctcaaccatattgtgaggcacccttccatttagccaatttcaggtttttgagatgaggtgctctgaaagaacaacttttgtaagcacttctttcaagtttcaataaatttttatttttatccatctctcttctccctctttagtgatcatgtgcggctctgccgccgcttcggtttctttgtttatgaaaacctgggatttgtaagccagtctccggtgtgcccttgatacttgtttttaaagtttagatttcgcattccgtttatcatactgcattcttact

SEQ ID NO: 14670 - DNA, 1079 bp, Glycine max
  Gm_smallRNAprecursor_7503
taatctagaactatcatgatactaatctatcatgaaaactctagaaagacctaaagtaatgtagaaacattcaccaccattgagaggttggtgacttgagcctataaataggcaattggtatgttgtaattgatcatccaaaaaatcaatgacatagacttctatctaaaacaattctctaaaactatcaactatcaactatcatctaaccaactatcaacagtggcatcagagctacgttcggtcatacattgggcgtagttatattacctacctaccattccaaaatcctcccaactacttcaaaaatttcctttgtactattaaccaactgcaataatattttttctaagctatggataacactactcaatcgtcaactatttctatccctatcttcaatggtgaaaattatgatttctggcgtgttaaaatggaaacatatttttcatctcaagatttatgggacatagtagaagaaggcttcaccattctcgcggatacttcagctcttaatgcatctcaagaaaaagagttgaagaaaaataaacaaaaaaattcaaaggcgttgttcaccttgcaacaagcggtgactgatccaattttcctaagaattatgggagttaagactgccaaagaagtgtggaacacattgcaggaggagtttcaaggaagtgttaaggtacgtgccgttaaacttcaatctctaagaagagattttgaactattgaagatgaaggagtctgagacagttaaaaattactattctaaagttaaagaaatagttaatcaaataagagattttggggaagacattcttgaaaagaaaattgtctagaaaattataattactatgccccaaaagtttgacccaatcatgacaaagattgaggaaaccaaagatctgtccactctatcagaaggttctaggaatttccttaagaacgaaacagataaaaatcctccatgcaatatatgcaaaaggcaaggccacacagagaaaaattgttggttccgtaatatgccacaatgcaaccattgcaagaagttcgggcacgtagagaaaaattgtcgcaaca

SEQ ID NO: 14671 - DNA, 1128 bp, Glycine max
  Gm_smallRNAprecursor_7504
tttccatgggatttaaaggatgtcaaagtggggtcaatgcaagcaaacttttcttagatttttggaatcgtagacaaatcatttagaacagtacttaaaactctcggggaaggaatgacatgaagacgttgaatgatgaaagaatgacatgaagaccttcaaaaatacacatctacatggcagccttaggacttcaaataggtcatgtttgtcgccagtttcatcatccaccagtctttccttctctggcttctcacgtttattgttgttaaacccatatttatgctctcctcctttcatgtcttgttttatcacaactttagccgaatctcctatcttcagcacagttgaatctcctgtcttattctccaatgacacactttgatggcctgtatctgttttcttcatatgttctagtgctttagcttcagaatgcatagaccaatgtgaactttccagtgatcaccataggcttctgcatcagcattgacactctccaccctctttggtttatgcttttgtgctgcattcgctacttcctcgttataaatctcattggtgctgatttttctagtgtaacctcttataaatatgagatttataacgaggaagcagcaaatgcagcacaaaagcataaaccaaagagggtggagagtgtcaatgctgatgcagaagcctttggtgatcactggaaagttcacattggtctatgcattctgaagctaaagcactagaacatatgaagaaaacagatacaggccatcaaagtgtgtcattggagaataagacaggagattcaactgtgctgaagataggagattcggctaaagttgtgataaaacaagacatgaagggaggagagcataaatatgggtttaacaacaataaacgtgagaagccagagaaggtaaggctggtggatgatgaaactggcgacaaacatgacctgtatgattgttcttacatagaattgtacaagtattgggtgtcggggtttctctaatctgattaacgacttaatttttaatcataatgtgtctgttgtaaagtcattcaaatgtgagtaaagcggaattcattatcaaaaggatgcagtttaacactacacacaacagtctatgaaagtca

SEQ ID NO: 14672 - DNA, 1110 bp, Glycine max
  Gm_smallRNAprecursor_7505
acattattcgttatctaagatcgtgtataacgtactaatattttaaaattctcttataattacaattttcccacttatactaatgatcatgtaaaaaaatgtattgtaaagtagttagtattataattttttatataatactaattattttttttatattatttataaatattaataatgatatgattaattctttataatattatcttttatgtatttattgatttttattaatatgtataaaataaccttaaacaataattataatgggactgagtaagtattttaatatcatcttctaaacaaatttattctaaaaaaatatattaaaaaaattaattatttataataaatcaatatttataaatatattatatttaataaaataaaaaatagatttaattatattataaataaatatgttgtatttaaaagtatattataattttttttcctcttacggatcaagttgatccgtaagagaattccggatcagcttgatctgtaagttgatccgtaagtctcttccggatcaacttgatccgtaagagacttccggatcaacttgatccgtaagagacttccggatcaacttgatccggaattctcttacggatcaacttacggatcaagctgatccggaagtggaaaactaagcaagggcaattttgacatttttcaagaatgttgggtgcaccagcaataatgctgggtgcacctagcaacactcaactcttattaccactttattaggcccaaacttctcaagtaaaaaatatattttaataaatttatcctctttgaaaaataatttttttaataatataaattattgtaacactttcatatctaagaaagttccattgaaactaagcataaaatctttactttaaaaaaaaaagtacaaatatactctaaaaatatctataactatattttaattattccttaaaatcatgatattcataattcatgatttccagttatgaaaaaaaataggaacgttttttgccccaaattttaattctattattagttttctttcatctaaaatgtttaaattattttctatccaaatatttacaaatttaccatgaatttggaaaataa

SEQ ID NO: 14673 - DNA, 1042 bp, Glycine max
  Gm_smallRNAprecursor_7506
ctaatattttaaaattctcttataattacaattttcccacttatactaatgatcatgtaaaaaaatgtattgtaaagtagttagtattataattttttatataatactaattattttttttatattatttataaatattaataatgatatgattaattctttataatattatcttttatgtatttattgatttttattaatatgtataaaataaccttaaacaataattataatgggactgagtaagtattttaatatcatcttctaaacaaatttattctaaaaaaatatattaaaaaaattaattatttataataaatcaatatttataaatatattatatttaataaaataaaaaatagatttaattatattataaataaatatgttgtatttaaaagtatattataattttttttcctcttacggatcaagttgatccgtaagagaattccggatcagcttgatctgtaagttgatccgtaagtctcttccggatcaacttgatccgtaagagacttccggatcaacttgatccgtaagagacttccggatcaacttgatccggaattctcttacggatcaacttacggatcaagctgatccggaagtggaaaactaagcaagggcaattttgacatttttcaagaatgttgggtgcaccagcaataatgctgggtgcacctagcaacactcaactcttattaccactttattaggcccaaacttctcaagtaaaaaatatattttaataaatttatcctctttgaaaaataatttttttaataatataaattattgtaacactttcatatctaagaaagttccattgaaactaagcataaaatctttactttaaaaaaaaaagtacaaatatactctaaaaatatctataactatattttaattattccttaaaatcatgatattcataattcatgatttccagttatgaaaaaaaataggaacgttttttgccccaaattttaattctattattagttttctttcatctaaaatgtttaaattattttctatccaa

SEQ ID NO: 14674 - DNA, 1040 bp, Glycine max
  Gm_smallRNAprecursor_7507
taatattttaaaattctcttataattacaattttcccacttatactaatgatcatgtaaaaaaatgtattgtaaagtagttagtattataattttttatataatactaattattttttttatattatttataaatattaataatgatatgattaattctttataatattatcttttatgtatttattgatttttattaatatgtataaaataaccttaaacaataattataatgggactgagtaagtattttaatatcatcttctaaacaaatttattctaaaaaaatatattaaaaaaattaattatttataataaatcaatatttataaatatattatatttaataaaataaaaaatagatttaattatattataaataaatatgttgtatttaaaagtatattataattttttttcctcttacggatcaagttgatccgtaagagaattccggatcagcttgatctgtaagttgatccgtaagtctcttccggatcaacttgatccgtaagagacttccggatcaacttgatccgtaagagacttccggatcaacttgatccggaattctcttacggatcaacttacggatcaagctgatccggaagtggaaaactaagcaagggcaattttgacatttttcaagaatgttgggtgcaccagcaataatgctgggtgcacctagcaacactcaactcttattaccactttattaggcccaaacttctcaagtaaaaaatatattttaataaatttatcctctttgaaaaataatttttttaataatataaattattgtaacactttcatatctaagaaagttccattgaaactaagcataaaatctttactttaaaaaaaaaagtacaaatatactctaaaaatatctataactatattttaattattccttaaaatcatgatattcataattcatgatttccagttatgaaaaaaaataggaacgttttttgccccaaattttaattctattattagttttctttcatctaaaatgtttaaattattttctatcca

SEQ ID NO: 14675 - DNA, 1041 bp, Glycine max
  Gm_smallRNAprecursor_7508
taatattttaaaattctcttataattacaattttcccacttatactaatgatcatgtaaaaaaatgtattgtaaagtagttagtattataattttttatataatactaattattttttttatattatttataaatattaataatgatatgattaattctttataatattatcttttatgtatttattgatttttattaatatgtataaaataaccttaaacaataattataatgggactgagtaagtattttaatatcatcttctaaacaaatttattctaaaaaaatatattaaaaaaattaattatttataataaatcaatatttataaatatattatatttaataaaataaaaaatagatttaattatattataaataaatatgttgtatttaaaagtatattataattttttttcctcttacggatcaagttgatccgtaagagaattccggatcagcttgatctgtaagttgatccgtaagtctcttccggatcaacttgatccgtaagagacttccggatcaacttgatccgtaagagacttccggatcaacttgatccggaattctcttacggatcaacttacggatcaagctgatccggaagtggaaaactaagcaagggcaattttgacatttttcaagaatgttgggtgcaccagcaataatgctgggtgcacctagcaacactcaactcttattaccactttattaggcccaaacttctcaagtaaaaaatatattttaataaatttatcctctttgaaaaataatttttttaataatataaattattgtaacactttcatatctaagaaagttccattgaaactaagcataaaatctttactttaaaaaaaaaagtacaaatatactctaaaaatatctataactatattttaattattccttaaaatcatgatattcataattcatgatttccagttatgaaaaaaaataggaacgttttttgccccaaattttaattctattattagttttctttcatctaaaatgtttaaattattttctatccaa

SEQ ID NO: 14676 - DNA, 1190 bp, Glycine max
  Gm_smallRNAprecursor_7509
ttgcacattaacattgtgtaaacatcatcatcatttttcaattgtagagattgaaaaaaatattgttgacctgcatctatgaatggttgtcgatagtagatttcatccagtaattgatcggtggttagttgaagggtgttgtgcattctacgcttgagtgtatcaaaagaacagttgttaggaactcgcattggtgttggagtgagactttaaaaataaacaccagtttggttgtgagtgattgatccatttggaaaaatgaaagctaatctggagttagcaatagtctgactgcttatttctcccaaaaatgacatagtaataagattgaatttggtttgtgaaattatgttgtgtgagattgtgtgtttgtattgtgtatgtgatgtgtattggaatccaatatttctttttcccaagtaagtgatgtagcagacgtccattataatttcagagcgaacaaagagattatgagttgtccatctcatgtcagttttgcacacgtctctaaaaattaaatgtctcacctgcaaaactgacatgaaatggacagctcataatgcagagtattgtcaatttggactgtgatttttcccatgtaattaaagcagcaggcgttcgtgatgattttcaaagtgaacaaagagattatgagttgtccatttcatgtcagttttgcaggtgagacatttaatttttagagacgtgtgcaaattgcagagtattgtcaatttggattgtgatttttcccttgtaattaaagcagcaaacgtccataattattttcagagtgaacaaagcgattatgagttgtccattttatgtcagttttgtcgatgagacatttaatttttagaaatagtgtagtgtaaatggcaaagtattgtgaattttgatagttatgttaccatgtcaactactgcagtaaaagtgggtaaactgaaaattgctaatttaaatttaaagaaaaaattatttcaatacgtaaagtgataactgaagacagacataagacattacatgaaatcttaaagaagaaataacttagacatgaatgatccgtagattaccaatcccgtttgaatataggttcgtgggatggagacaggttacttccttcgggcccggaagaggagtcaatatcactatcatggtttttgacccaataagtctcgtattcatctgataag

SEQ ID NO: 14677 - DNA, 1039 bp, Glycine max
  Gm_smallRNAprecursor_7510
agcaatcaaagaatacaacatcagaaatcattttgattgcagaataatttactctgatcaaagaaggctaaacttcgtctgcaagttacatgaaaatggttgtacatggagcttggacgcatgcaattcaaagaggcataacaaatggattatcaaaagtatcagaggtcatcacacttgtctcgtgctgatgctcaaacaagatcattgccaactcgacaaacacgtcatagcatagatcatccaaccaattatcaaaacaaacccaaccgtctccatcaagacgttgattgcagagatcaaaacgttcatgaattataccccatcctacaagaagacatggttagcaaagcaaaaagcgtcggagattattcatggaaactgggaagaatcatatgctaaactgccaaaacttttcagagctttgcaatcttatgttccctggactgtggtcgctgctcaaacagaatccttgtatgaggggggagaaatagtaccgggcaaaagattgtttaaacgtgtcttttggtcatttggtccatgcattaatggttttgcatattgcaaactcatagtacaagtagatggtacatggctttacgggaagtatactggcacactgttgatagctaccgcacaagatagagctaaccatatctttccgattgcctatgccattgtagaaggggagacaacttcagcttggggggtttttctaaagaatttgagaagacatgttactccgcaaattaacatttgtcttatttcataccgacactcctcaattataagtgcctacaacaacccaagtaacttatgggtctaggacacatcccatttcttttgcctgcgccacattgcacaaaactttcttcgcggtaactcaaaccgcaaacatttaaagaaaccactcatgttggctggtgagaatctattttatttattcattataattttctttcaatcaaattttataacataatacattgattgaatatttacatgttatgcatacacggagaagatgcactggcgacat

SEQ ID NO: 14678 - DNA, 1051 bp, Glycine max
  Gm_smallRNAprecursor_7511
actggcgacatcttggggatattcgtgcgaataagccaagtgcagctgaatgacttgatcaattacccaaacaaaaatgggtacaatgcttcgatgaggggaaacgttggggacatatgactaccaatttgccggagtctgttaattccatgttaaaaaacacaagacattttccggtgtcatcgttggttgaggagacgtatttcaagatcgcacaactctttgctaatagaggtcaacaaactcaggcaatgatcaactccggctcacagttttctgaagtcatcttcgatgcaatgaatagcggtcaacaagaatctaatacacacattgtaaatgaattcgacagacacaatcacacttttattataacaaagactcaatccccacttgaaacacccagaccacctggaaggtttagagtaatgttacaatcccaaaagtgtgattgtggtgaatatcaggctaaacatttaccatattctcacatcatggctgcctgtaaatctgtcaatgttgatcccatgacctatgtgccgatgttattcactttacaacacattttgcacatctacgacaactcctttggtttactgccacacacacaaatcaatgtggcaagaatatgaaggagatcagtggggtcttgatctaaggagaaagaggactgcaaagggtcgtcccgtttcaactcgcattcctagtgagatggacgaagacgaaaataaacgagcaagtagaaaaaaatgtgaactttgtcggcaacatggtcatagcagaaacaattttcctaatatatcctgatcttaaatttttctttagccaaatgtcattgtttaaatattttattaataatgcagtataatattcttttataaataaattgtgaaaagctttatttttatcatttttaattaaatctaatgacataaacaaactaattatatttagtaaaataattaaatttaatatttaaaattttttctaaaataaatatattattatacaaaattcagattttaaaacaaatattcaaccaaaaatatcttaa

SEQ ID NO: 14679 - DNA, 1052 bp, Glycine max
  Gm_smallRNAprecursor_7512
actggcgacatcttggggatattcgtgcgaataagccaagtgcagctgaatgacttgatcaattacccaaacaaaaatgggtacaatgcttcgatgaggggaaacgttggggacatatgactaccaatttgccggagtctgttaattccatgttaaaaaacacaagacattttccggtgtcatcgttggttgaggagacgtatttcaagatcgcacaactctttgctaatagaggtcaacaaactcaggcaatgatcaactccggctcacagttttctgaagtcatcttcgatgcaatgaatagcggtcaacaagaatctaatacacacattgtaaatgaattcgacagacacaatcacacttttattataacaaagactcaatccccacttgaaacacccagaccacctggaaggtttagagtaatgttacaatcccaaaagtgtgattgtggtgaatatcaggctaaacatttaccatattctcacatcatggctgcctgtaaatctgtcaatgttgatcccatgacctatgtgccgatgttattcactttacaacacattttgcacatctacgacaactcctttggtttactgccacacacacaaatcaatgtggcaagaatatgaaggagatcagtggggtcttgatctaaggagaaagaggactgcaaagggtcgtcccgtttcaactcgcattcctagtgagatggacgaagacgaaaataaacgagcaagtagaaaaaaatgtgaactttgtcggcaacatggtcatagcagaaacaattttcctaatatatcctgatcttaaatttttctttagccaaatgtcattgtttaaatattttattaataatgcagtataatattcttttataaataaattgtgaaaagctttatttttatcatttttaattaaatctaatgacataaacaaactaattatatttagtaaaataattaaatttaatatttaaaattttttctaaaataaatatattattatacaaaattcagattttaaaacaaatattcaaccaaaaatatcttaaa

SEQ ID NO: 14680 - DNA, 1051 bp, Glycine max
  Gm_smallRNAprecursor_7513
tcaagatcgcacaactctttgctaatagaggtcaacaaactcaggcaatgatcaactccggctcacagttttctgaagtcatcttcgatgcaatgaatagcggtcaacaagaatctaatacacacattgtaaatgaattcgacagacacaatcacacttttattataacaaagactcaatccccacttgaaacacccagaccacctggaaggtttagagtaatgttacaatcccaaaagtgtgattgtggtgaatatcaggctaaacatttaccatattctcacatcatggctgcctgtaaatctgtcaatgttgatcccatgacctatgtgccgatgttattcactttacaacacattttgcacatctacgacaactcctttggtttactgccacacacacaaatcaatgtggcaagaatatgaaggagatcagtggggtcttgatctaaggagaaagaggactgcaaagggtcgtcccgtttcaactcgcattcctagtgagatggacgaagacgaaaataaacgagcaagtagaaaaaaatgtgaactttgtcggcaacatggtcatagcagaaacaattttcctaatatatcctgatcttaaatttttctttagccaaatgtcattgtttaaatattttattaataatgcagtataatattcttttataaataaattgtgaaaagctttatttttatcatttttaattaaatctaatgacataaacaaactaattatatttagtaaaataattaaatttaatatttaaaattttttctaaaataaatatattattatacaaaattcagattttaaaacaaatattcaaccaaaaatatcttaaataaattaaataatgtaaaaaaatagttaaattctataatatcaatttgttaataaaaaattaatttaatcaatattaaaaaaaataatttagtaattaaataattttaaaagtaattaaaaatatttttatataatataatatttaatttttttaaaaaaaaagcacacgaagggaagtcggggtgcccaaactcgactcccc

SEQ ID NO: 14681 - DNA, 1187 bp, Glycine max
  Gm_smallRNAprecursor_7514
ggcagaatgacgaccatttgccagtgtccactacagtagagacgaatatgagttattgtggtagtatagattatttaaattcaattattgtgtttgacttacccattcaggtaggctccaaggtaaacatctttttttgaactctgtacccaactcttgatgtaactttcgcattcaaattgtgattgtccagatctctgaatggactgtggctcgagaaatccatacacatcagaattccccgctcgcacacttgtctcagtcagatggctatgttgttaagtcaaagttaattatgtatgaatttaaaataattactttggtaattaatagtaatctaaaatgacttacagaatccacaactgtataacagatatgctgagacattgaccaccgtgtgcaatttcagggagatcttcgtgctttatatacaacgggaagttttgattaaacaccccgaatatggtaccatcccacataacctggagcggcttcaaaaacagttgtgggatggtcaatgtcatcaggtacaggggatcatcgacctcttcatctaggctttctggaggttttgctggagacacagttgcatgttgataaaacatagttaattagcaagttttgattacagtgaacaaattaattgaaaaaaataaacatataatcagagtaaaatacatgttctgataaacgcttcacaagatgtgttggccaagcaaggaaggtgttaagtgcctgccccactaaggtaacctcgtcagtgggtacaggaacgagagcctctgcatctttaacctcctcaacaccaaccttgacttggccatgcaacaaagggatgttgtgaactgttgtggatccctcgtaaagtcttcctagggcaaccaagcgggaaggattttcttcaatatatagcccgcatttgtctgagtcacccgtccctggatcgttccctgagggagcaacacaactctcctttgtgttgacacgaggacctgagggaccaacctctggctctagaggtagtgcaattccctgtgattgcatctgagactgaaactgggactgcatctggctgaaggattccatcatctttcgagtcactttttctgttgggtcagctgttctaggtcttcaagaggcatggaggaagaaccgcgggacgttcgtgaagttgatccaaagtattg

SEQ ID NO: 14682 - DNA, 1096 bp, Glycine max
  Gm_smallRNAprecursor_7515
acctttaatttcaccttcttgtggtctcactcccaataattcctcacataaatcagtccaattaagatttgttggaccgattaatggtagaccatccacacgtagacctaacaatacagagacgtcttggagagtaatagtacactctctacatctcatgtgaaacgtatgtgtttccggcctccatctttctatcaaagcacttattaatgagtcatttatttttaagtatcccatctttataatccagtaaaaaccaaattgtcgaagaaaagaaaaaatttgctctggaatttcttcttccccttgatacgtggggacaactcgtctgatatgtaatttccgatcttcttccctattccaaacatgttctgaaacatgcttaggatgcttccataatacatcactatcgatcgggccagacttaattttaatatgtgatggagatgacgatgaagatgccattgatactgcaataaattcacaaaacaatttatacattatttgtagataatataaataaaactacgcacatttataaaaatgttattaaatatatataaataagtttgtaataaataaaactgggcaattttgaatatattctatacataaattaaaatacatgtgaagacaaatttaaataaataaatatagcaaaatatattatacaaataataaaatttaaatatattctacaaatactttcaaatacatacacatagacaatttaaataaataacataatatattctacaattaacaaataaataattaaataaaatatggactaccaaataaattaaaatagaaacaaatattgaaatgcaaagaattatttaaacaacgtgtaatacaaaaataataataatgtacaatgtatcatatatttaatcacgtaaattttctaaaacaaataatattaacctacaaactaaaactaacaaataatatatatagcattctaactaaaaataattaactcaaataatattaacttatcaactcatttatttaaaattgtactatctgtatataatatactaaattataatactaaaaagataaatttacatgtgtgaagtgtctaatatta

SEQ ID NO: 14683 - DNA, 1132 bp, Glycine max
  Gm_smallRNAprecursor_7516
ttacaagattggtgctgaccactttggttccgactttgcaatggctcaaaggaaaacccattctcctagtaagaaacttttatcatactattttttttatgtattagtgttataattcagaattctaagttatgctcttggttggtaattggtattgcagcatattggtggcgaatgtttgggtcacaaactccaaatttgcagaagctggctattaagattttgagtttgacttgcagtgcttcaggatgtgaaagaaattggagtgtgtttgagcaagtaattgtgacaaaactctaactatactttttaattttatttaattttgatgatcaagttatatttggagtatatttgagattgaaatcaacatttattgttatgttgtagattcattccaaaaaaagaaataggcttgagcacaagaggttgcatgatttggtgtttgtcaaatacaaccaacaattgaagcaaagatataatgcaagagatgaaattgatccaatttctcttaatgatattgatgtatgcaatgaatggctcgtgggagagatggatcaagatgatgataatgatgctggaaatgatttggtatttgaagatgatgatgctctaaattgggcaactgtgtatcaggcttcgggggttggagagtgtaggatgtatactaggcggaaaaagcaaaaaacaagtgttgctgctgcccaaacttctaaaaaacaggcaatggttgttggatcttcatcaaggaagcaaaaagcagtccaagaaaaatgatgaggatctagatgttgaggagaatattgatgttgaatctgaagaagaagaaatcatggtcaattttgaggcgtctgatggggaagagggagagggagatgctccattaccatatgataacaacgaagatgattatgttgggattggagaagatgattagagcctcaaccttcactttgcagtttgcattatgtttttatcattttcttattttgaactctttaatgagtttatttggtgttggtatttgattattgtatgaactcatgaaacttttttagtttatttgaatgcaatcctttgtttttttcaatttcaatgagtttatatatatgttttttttttttttgtgtcc

SEQ ID NO: 14684 - DNA, 1093 bp, Glycine max
  Gm_smallRNAprecursor_7517
gagtttgacttgcagtgcttcaggatgtgaaagaaattggagtgtgtttgagcaagtaattgtgacaaaactctaactatactttttaattttatttaattttgatgatcaagttatatttggagtatatttgagattgaaatcaacatttattgttatgttgtagattcattccaaaaaaagaaataggcttgagcacaagaggttgcatgatttggtgtttgtcaaatacaaccaacaattgaagcaaagatataatgcaagagatgaaattgatccaatttctcttaatgatattgatgtatgcaatgaatggctcgtgggagagatggatcaagatgatgataatgatgctggaaatgatttggtatttgaagatgatgatgctctaaattgggcaactgtgtatcaggcttcgggggttggagagtgtaggatgtatactaggcggaaaaagcaaaaaacaagtgttgctgctgcccaaacttctaaaaaacaggcaatggttgttggatcttcatcaaggaagcaaaaagcagtccaagaaaaatgatgaggatctagatgttgaggagaatattgatgttgaatctgaagaagaagaaatcatggtcaattttgaggcgtctgatggggaagagggagagggagatgctccattaccatatgataacaacgaagatgattatgttgggattggagaagatgattagagcctcaaccttcactttgcagtttgcattatgtttttatcattttcttattttgaactctttaatgagtttatttggtgttggtatttgattattgtatgaactcatgaaacttttttagtttatttgaatgcaatcctttgtttttttcaatttcaatgagtttatatatatgttttttttttttttgtgtccgccatgacatccgtcattttccgctacgtcatccgccatatttttatggcggatttttgactttctgccatgaaccgccatccgccattaacaacattggttgaaactaatttacacaatattagaacttcaaaataactttgttcatttgctttgagtagtggttgttgtttctaatggcttga

SEQ ID NO: 14685 - DNA, 1093 bp, Glycine max; identical to SEQ ID NO: 14684
  Gm_smallRNAprecursor_7518

SEQ ID NO: 14686 - DNA, 1050 bp, Glycine max
  Gm_smallRNAprecursor_7519
gcatgtggttgtcccacactacacaatattttttcttttccatgactcgatccctttaactaaacttggggtgatgtcatttctgttatccttctttttatagtgacaaggtataacttagtttgccttaaaaaagtataactttgtttaaggtttaactgcacttttggtcttcatgtgtgattttagtcctcataggtttcaattatgcaattttagtcccccaagtttcaattgtaattttatttagatgcactagttatggtgagtatgtaattttagtctctcacgcttcaattacgcaaattaggttcctagacatcacaaatgtgtgattttcatcccctaccccatggcccgtgtgtgtgtgcaattaatgttttaagaaatggactggactggtcgatcgccacattagttcgattcatttaattcacgaattgggtcctcctattttgtaaaatcatgcaatgttagtctcccaagccacaattggacattgaccgttagcaagtgatgttgactgccacgtgtcacattcttattgaatgatgactgtcacgtgtcatgttctgattggatgtcaattccatgaaagatgaaatgcattgttgttttcattgatcaaccagaacatgacatgtggtagtcatcatccaataagaacgtgacacgtgacagtcaacatcacttgctaacggtcaactttcaattgtggtctgggggaccaacattgcatgattttataaaataggaggacctaattcgtgaattaaattactagaggaccaaatccaaaactagagataaactgtgggaccaaaaatgcaattttgccctcattttatcattcttttaaaactaatttttagtacgaatgaagaactgacagttgattttagttttgtccctggattctgtttcaagcctgattaatgaatgtttccattaaatgttaacgtaggtataataaaactataaatgctatataatcaaccaaaaacctattatatattttatgaacatgatgctcttccatgacttttgttg

SEQ ID NO: 14687 - DNA, 1107 bp, Glycine max
  Gm_smallRNAprecursor_7520
ttggggtgatgtcatttctgttatccttctttttatagtgacaaggtataacttagtttgccttaaaaaagtataactttgtttaaggtttaactgcacttttggtcttcatgtgtgattttagtcctcataggtttcaattatgcaattttagtcccccaagtttcaattgtaattttatttagatgcactagttatggtgagtatgtaattttagtctctcacgcttcaattacgcaaattaggttcctagacatcacaaatgtgtgattttcatcccctaccccatggcccgtgtgtgtgtgcaattaatgttttaagaaatggactggactggtcgatcgccacattagttcgattcatttaattcacgaattgggtcctcctattttgtaaaatcatgcaatgttagtctcccaagccacaattggacattgaccgttagcaagtgatgttgactgccacgtgtcacattcttattgaatgatgactgtcacgtgtcatgttctgattggatgtcaattccatgaaagatgaaatgcattgttgttttcattgatcaaccagaacatgacatgtggtagtcatcatccaataagaacgtgacacgtgacagtcaacatcacttgctaacggtcaactttcaattgtggtctgggggaccaacattgcatgattttataaaataggaggacctaattcgtgaattaaattactagaggaccaaatccaaaactagagataaactgtgggaccaaaaatgcaattttgccctcattttatcattcttttaaaactaatttttagtacgaatgaagaactgacagttgattttagttttgtccctggattctgtttcaagcctgattaatgaatgtttccattaaatgttaacgtaggtataataaaactataaatgctatataatcaaccaaaaacctattatatattttatgaacatgatgctcttccatgacttttgttgcttctatatcccaatcgtacttttatttgtttgttccttctttcttatcacttcaatccgttcagtccaacaaggacaatcttatcgtttcttataacgacacctcatcagtttttgtcttt

SEQ ID NO: 14688 - DNA, 1100 bp, Glycine max
  Gm_smallRNAprecursor_7521
ctataattaagtaaaattttaattataaggtgtgagtcaggtgttcctttatatttctattaggtttcgtttttcttgcattcctatattttagagcaaataaaaatcatatcctcctatacaaaaatcatatcttttttctattaggtttccttttttttaaaaaaaaaaaaactttcctattatgtttctaaccaaacaaaaatcatatcctagtacgttcctatacaaaaatcatatcctattatatcctattaagttcctatacaaaaatcatatcttttttctgttaggtttcttttttttttaactttcctattacgttcctaaccaaacaaaaatcatatccttctcacttcaagctttttgatagaagtaattaacatttagcctattatagaaggtgtgttatttatttatttatttatttatttttggtaaaaacaactaggaatattaaagatttaatgtgaagaagacttttaaataagctaccaggccaggctaggcttttaaaaaggtcaggacgagccaaactaaaaatctttgataggctatagactcaggcctcaaaaattaatcgtagactaagatcagaccttttaaagcctggtctgacctggctggcctattcccacccttactcggcacatcttattctgatccaatggcttctataataaattttcattttgcttcttaaaaaaaaacatgaaacggacgaggtttttactttttataagcataaaattaaagaaacgaagttaatggcataagatatttgaagtgtaacgaaatcggtttctgtgtctcttttttgataattttctagattaaccttattgaggagtagccaaatgatgacaagaaatgggtaaaccctcgtattcgtcttagaaagatataggctttggtagtttagtgtccttgaaatttttttattgacaaaataattccttacccactttttcttgaaagagaaccagttgctaatagtagcgactctcaatttaaatgtgtcccactagttatgagatttatattaaagttgtacacaatatatatagttatctaatgtaaccaataaattctaccattaa

SEQ ID NO: 14689 - DNA, 1075 bp, Glycine max
  Gm_smallRNAprecursor_7522
caatgattacactatgcagcagctgtctaccatctatgaaagcagattgtctttcatctatgatgattggcatgactttcttcagcctatttgatagcagcttggccacgatcttgtatacacagcctattagtgaaataggtctagggtaataaatgaggcattgcttccctttgggaaaatcccatttgcatggaattcatcaaggaaccggagaatgtcaggtttcagtaactgccagaattgcttgataaacttgaaattaagtccatccgggcctggacttttctcactaccgccgtcccataccgccctccttatttcttcctcattaaaacttcccaccagcgattgattttcttgctgtccaatgctgttaaagctgatcccattcagttttggcctgcactgctggggatcttggaatcaatgttgttaatggcggatggcggttcatggcagaaagtcaaaatttcgccataaaaatatggcggatggcgtagcggaaaatggcggatgtcatggcggacaaaaaaaaaaaacatatatataaactcattgaaattgaaaaaaacaaaggattgcattcaaataaactaaaaaagtttcatgagttcatacaataatcaagtaccaacaccaaataaactcattaaagagttcaaaataagaaaatgataaaaacataatgcaaagtgcaaagtgaggctctaatcatcttctccaatctcaacataatcatcttcgttgttatcatatggtaatggagcatctccctctccttcttccccatcagacgcctcaaaattgaccatgatttcttcttcttcagattcaacatcaatattttcctcagcatctagatcctcatcattttcttggactgctttttgcttccttgatgaagatccaacaaccattgcctgttttttagaagtttgggcagcagcaacacttgttttttgctttttccgcctagtatacatcctacactctccaacccccgaagcctgatacacagttgcccaatttagagcatcatcatcttcaaataccaaatcatttccagcatcat

SEQ ID NO: 14690 - DNA, 1131 bp, Glycine max
  Gm_smallRNAprecursor_7523
ggcgtagcggaaaatggcggatgtcatggcggacaaaaaaaaaaaacatatatataaactcattgaaattgaaaaaaacaaaggattgcattcaaataaactaaaaaagtttcatgagttcatacaataatcaagtaccaacaccaaataaactcattaaagagttcaaaataagaaaatgataaaaacataatgcaaagtgcaaagtgaggctctaatcatcttctccaatctcaacataatcatcttcgttgttatcatatggtaatggagcatctccctctccttcttccccatcagacgcctcaaaattgaccatgatttcttcttcttcagattcaacatcaatattttcctcagcatctagatcctcatcattttcttggactgctttttgcttccttgatgaagatccaacaaccattgcctgttttttagaagtttgggcagcagcaacacttgttttttgctttttccgcctagtatacatcctacactctccaacccccgaagcctgatacacagttgcccaatttagagcatcatcatcttcaaataccaaatcatttccagcatcattatcatcatcttgatccatctctcccacgagccattcattgcatacatcaatatcattaagagaaattggatcaatttcatctcttgcattatatctttgcttcaattgttggttgtatttgacaaacaccaaatcatgcaacctcttgtgctcaagcctatttctttttttggaatgaatctacaacataacaaataaatgttgatttcaatctcaaatatactccaaataaaacttgatcatcaaaattaaataaaattaaaaagtatagttagagttttgtcacaattacttgctcaaacacactccaatttctttcacatcctgaagcactgcaagtcaaactcaaaatcttaatagctagcttctgcaaatttggagtttgtgacccaaacattcgccaccaatatgctgcaataccaattaccaaccaagagcataacttagaattctgaattataacactagtacataaaaaaatagtatgataaaagtttcttactaggagaatgggttttcctttgagccattgcaaagtcggaaccaaagtg

SEQ ID NO: 14691 - DNA, 1040 bp, Glycine max
  Gm_smallRNAprecursor_7524
agttgagaatgttggaatcaacaaagtgctcattgatggaggagcggctgtcaacttaatgcctcgatctatgctctacaagatcgggaaacatgacactgatctatctgcccacaacattgtgctttcgaattatgagggtaaaactggctattctttgggagccattcaagtagatgttgctgtaggcagtatagttcgaccaactcttttcctggtgatacagtctaaggctaattttaacttgctattaggaagggagtggattcatggagttggagctgtgccatctacccttcaccagaagctcattatctggagggaagatgggattgtggaaaatatagaggcggatcaaagcttctataagtcagaggtcgataatgttactgcacaaacctttgacaaaaagttggctaacatagcgccttgtggtgacaaggaggctgttgtcgaatcgagtgacaatgttgtccactctgtcaaactccatcctacttatgggtttatatgggagagggaggaaattaatgatgttccctctgaagatggagtcattccaccaactgggtggaatatatatgaaaattaatatgactgaggccactgcatgggccagaattacggcttatatggccgaaaatagactaaatacggcctttgaggctgaatctcaacaaaatatggcagttgaagccaagatcgaagatcatgaaaacaaagaaacaaaggatcgaagactggattgtatttatgatgatgagccgctgggttttgagagaaatcccataagtgaggcgccaaagatgcaggctcaagatcctttggaagaggtcgatattggagatggctcgattaaaaggccaacttatatcagtgccaatatcacctcaagtttaaaagaaaagctggtgcctcttcttagagattttaaagactgttttgcttgggattaccacgaaatgcctgggttaagcagagaaatggtcgaaatgaagttacctattaaggaggaaaaaagaccagtaaaacaactacca

SEQ ID NO: 14692 - DNA, 1157 bp, Glycine max
  Gm_smallRNAprecursor_7525
aagaccagtaaaacaactaccaagaagattcgcaccagaaatcatgtccaagatcaaggaagagatcgaaaggctgctgaggtgtaaattcatcagagctgccaggtatgtcgaatggttagcaaatatagtccctgtcattaaaaagaatggaactcttagagtatgcatagattttagggatttaaataatgctacacctaaagatgaatatgctatgccagtagcggaaatgttggtagattcggcagctggtttcgaatttttaagcatgttagatggttattctggttataaccaaatatttattgctgaaaatgatgtgtcgaaaacagcatttcgatgccctggtgctttaggcacttatgaatgggtggttatgccctttgggttgaaaaatgctggggccacttatcaaagggctatgaattccatgtttcatgattttattgacacatttatgcaaatttatattgatgatataatcatcaaatcctcctcagaagatagccatttggattatcttaggcaatctttcgaacgaatgaggaaacatggattaaaaatgaatccattaaaatgtgctttttgtgtgcgtgcaggagatttccttggtttcgtggtgcataaaaaaggcattgagataaatcaaaataagacaaaggctattcttgagacgaagcctccttcgactaaaaaacagcttcagtgtttgctaggaaaaatcaacttcttgaggcgattcatttcgaatctaagtggcaaagctcagattttttcgccattacttcgactcaagaaagatgaaccattcaaatggaatgaagagcatcaaaaggctttcgatgaaattaaagaatatttgatcaagcctcctgtgttaatgcctcctagtcgaaacaagtctatgaaattgtatattgctgcgtctgacaagaccattggtagcatgttggctcaggaagatgatgatggcatagaacatgcaatttattatcttagtcgtgtactaaatgatgcagaaactagatatactgccatagaaaaactctgtctttgtctgtatttctcttgtgcaaaacttaagcaatatataaagcctgttgatgtttatgtgtattctcattatgatattattaagcacatgttgtcaaaac

SEQ ID NO: 14693 - DNA, 1114 bp, Glycine max
  Gm_smallRNAprecursor_7526
aatctaagtggcaaagctcagattttttcgccattacttcgactcaagaaagatgaaccattcaaatggaatgaagagcatcaaaaggctttcgatgaaattaaagaatatttgatcaagcctcctgtgttaatgcctcctagtcgaaacaagtctatgaaattgtatattgctgcgtctgacaagaccattggtagcatgttggctcaggaagatgatgatggcatagaacatgcaatttattatcttagtcgtgtactaaatgatgcagaaactagatatactgccatagaaaaactctgtctttgtctgtatttctcttgtgcaaaacttaagcaatatataaagcctgttgatgtttatgtgtattctcattatgatattattaagcacatgttgtcaaaaccgattttacacagtagaattggaaaatgggctttagcattaacagaatattctttaacgtacaagcctttgaaatctgttaagggtcaaattgtggcagattttattgtagatcactcagtggtcgaaatgtcgcaagactatgtcgatacagagccatggattttgtatttcgatggttcgaaacacaaacatggaactggaattggagttttaataatatcccccaataaaattccaactaaattcaagtataaaatcaaagggctttgttctaataatgaggctgagtatgaagctctaattacaggccttgaaattttaattagcctgggggcaagaaatgttaatataagaggtgattcagaattagtgttgaggcaattaacacaagaatacaaatgtgttaatgaacacttagcaaaatattttgttatagcaagttctcttctgaatcatttcgattatattaacattgagcatgtacctcgacaagaaaaccgagaagcaaatgatttagcccaaatagcttcagggtacaaaatgtcgaaggaaaagttaactcagttgatcgaaataaaagataaactggtgttaccagagccattaggcactaaattgccaatgccaaaacttgtgggggcaagtataccacaaaataatgaagatgaaagtatgaatgatcttcaggaaaaaattcaaattttgg

SEQ ID NO: 14694 - DNA, 1082 bp, Glycine max
  Gm_smallRNAprecursor_7527
cagtggtcgaaatgtcgcaagactatgtcgatacagagccatggattttgtatttcgatggttcgaaacacaaacatggaactggaattggagttttaataatatcccccaataaaattccaactaaattcaagtataaaatcaaagggctttgttctaataatgaggctgagtatgaagctctaattacaggccttgaaattttaattagcctgggggcaagaaatgttaatataagaggtgattcagaattagtgttgaggcaattaacacaagaatacaaatgtgttaatgaacacttagcaaaatattttgttatagcaagttctcttctgaatcatttcgattatattaacattgagcatgtacctcgacaagaaaaccgagaagcaaatgatttagcccaaatagcttcagggtacaaaatgtcgaaggaaaagttaactcagttgatcgaaataaaagataaactggtgttaccagagccattaggcactaaattgccaatgccaaaacttgtgggggcaagtataccacaaaataatgaagatgaaagtatgaatgatcttcaggaaaaaattcaaattttggccattgacaatatgttagataatgattggagaaagtccattattgaatatttggaaaatccaataggcaatgtggctcgaaagatcaaatatagggctttaaattatgtgattgtgggaaatgatttgtttaaaaagactgcagaaggagtgttgttaaaatgtctaaatgaatcagaagcatacttagcagtttcccatgttcacagtggggcttgtggatcacatcaagcaggccataaaatgaaatggcttttatttcgacaaggtttgtattggccttcgatgttaaaagactgcatagaatttgctaaaggctgtcaggaatgccaaaagcatgcagggatacagcatgtacctgctagtgagttacactccataatcaaaccttggcctttcagaggatgggctttggatttaattggcgaaatcaagcctgcttcttctaagaaccagcgttatattatagttggtatcgattactttacaaaa

SEQ ID NO: 14695 - DNA, 1086 bp, Glycine max
  Gm_smallRNAprecursor_7528
gcttctgaatcgaatcagcggccttctcctggagttctttgcgtttggcctgctctgttacaattttctgccttagatcatcgacctgagacagcaaatttgtaatagttgcctcccaggaggagatgttatcatcacaggctttgatctcagaagatccttctttcgcttctttggtgagacgctcgacttcacgttgagccgctcgggctttctcgagcagaaggatatgtgcctgtttctgggcatcgagtctggcgccattttcgcgttttttctgcacagtatttgcaaattgatcgataatggactcgatttgtataactttgcccagaatctcatcagaagtaagggggttatgcaatttcttcaaaaagttcaggtgcccaaaagcagcagaagggttctcttcaatggatttaagtacgtctgcccgtgcgtattccattgataacttcaaaagcaggcaatcttggcgtactgtagaggttatatcagcatcagatgaggacgaagcaccaggattcttttcacttgaggtgttggcttgactggtgttcagcaggagtcgaagggctgcagcagggtcttcgtcttgcatttgaatgaatgtatcctctgcgatccctatgctagcggaaagcttagatgtcgaagacgctgggaaaatgtctgaacctccagcttcagcctcttgtatggcctcttcatcggaaaagtgttcttcagatgaacttctttgactcgatccctgaggactgctgggtccaataccttgaccttcaccctgttcctcaacattcactgcatctgtctcaggagcaggagaggttcgagcacatgagggtatttcttctacagaaacattttgttgtacctgattcgaattgtcatggaaaaggttaacaaatagtttcgtattagctatgattaaaatcatattaagaatgatacctcgacggtagggtgttcttgtggtaagtctggttgttcgacaaggttgcccatctcagcaatagaaggagtagtttctgtttcagcgccgccagcatcagtcgaaggtggttggacgtcaacaggttgatt

SEQ ID NO: 14696 - DNA, 1105 bp, Glycine max
  Gm_smallRNAprecursor_7529
ctattatatttttaagtctattttatagtgaccatacaagagagacaagtgcgttttgtaggtgaaatatcatgaaaatcgagggtgtgggtgggatttcatcaagaacgagacgagggggaggatgtaagaataattatgatgatccttcctttgatcctctaaatatgtctagtctcaggaatgaacaatctaatctaaatcgcttatcaatcttttgctcctgcgactacgtctcctgtccctcacctttatctttttcttttctcagttaattaaataattactagttaattaaattctccctctctctttctctctctctctctctctcatttactgtgaaagtaagcaagtgaagctccatcacatattaaatacctaccgctgccaagtcccaacccatcacaccctcagcttctttcttattcactcctccacactatctatcttctttggccttgatcgatttttgtcttcatgatcatgagggtttagcaaagtgttgctaacagagtttattggcattctgtccacctccacttcctactctctctctctctctctctacccatgaatatggaggtgggcatactgtcaactgagctctgttggctacactttgtaaagccttcatgatatatatttactattcatttctcaacaattaaaagaaagagccaccacagcgacttccctaaaccaatatttttacgtttctatactaactcgcaattcttgtgatcgatgcttataataaaatactgtatgttctcgatctgttatcgtctaacttatcaagaccatgactctgtacggtcacgaaaggattattacttaccaccatactgcttgctgttttttttcttttcttttctttttcttcttctgcagaccctaataagtttgctacgcaaatcagaggtaaagggagaggtaggtagcactaacacgccttatataatttccttctttgtattaggttgtgttctcactaagtatttatatttgttggttggcttaggagatggaaaccctaatgtcttccttcctttcttcgatctgttaatgttggaagttttcatttttcctggtggatccacct

SEQ ID NO: 14697 - DNA, 1063 bp, Glycine max
  Gm_smallRNAprecursor_7530
tttatagtgaccatacaagagagacaagtgcgttttgtaggtgaaatatcatgaaaatcgagggtgtgggtgggatttcatcaagaacgagacgagggggaggatgtaagaataattatgatgatccttcctttgatcctctaaatatgtctagtctcaggaatgaacaatctaatctaaatcgcttatcaatcttttgctcctgcgactacgtctcctgtccctcacctttatctttttcttttctcagttaattaaataattactagttaattaaattctccctctctctttctctctctctctctctctcatttactgtgaaagtaagcaagtgaagctccatcacatattaaatacctaccgctgccaagtcccaacccatcacaccctcagcttctttcttattcactcctccacactatctatcttctttggccttgatcgatttttgtcttcatgatcatgagggtttagcaaagtgttgctaacagagtttattggcattctgtccacctccacttcctactctctctctctctctctctacccatgaatatggaggtgggcatactgtcaactgagctctgttggctacactttgtaaagccttcatgatatatatttactattcatttctcaacaattaaaagaaagagccaccacagcgacttccctaaaccaatatttttacgtttctatactaactcgcaattcttgtgatcgatgcttataataaaatactgtatgttctcgatctgttatcgtctaacttatcaagaccatgactctgtacggtcacgaaaggattattacttaccaccatactgcttgctgttttttttcttttcttttctttttcttcttctgcagaccctaataagtttgctacgcaaatcagaggtaaagggagaggtaggtagcactaacacgccttatataatttccttctttgtattaggttgtgttctcactaagtatttatatttgttggttggcttaggagatggaaaccctaatgtcttccttcctttcttcgatctgttaatgttggaagttttca

SEQ ID NO: 14698 - DNA, 1046 bp, Glycine max
  Gm_smallRNAprecursor_7531
atggtcattttattgtattgctagatcatatcatcatgcaacttataaagacattatcacgttaaacgttactctagcgtagttttgctcgtggcattacgagttgtatatcatatcattactaagtgataataaatattattttaaaaaataaaatttatgaaagtaatttaaatgtcttcattttatatccgtgttcattttttttaatctgttttggctacattccaaaattgtgagtaatttgttaactatggtattgagttgctgaaactttgacgcttgtattataaatatcttatcaatatacttgacattatatcttgctaattctaagaaaaatgatgtaatgaaaagaaacttgttcatatatttaaagagtgaatagacaatttagtctctgagattgtacctattttgcatattagttcctaacttaatattaaattcaaaatagtccctatctttgcataagtgttgcaaaatagtcattccattaaattttaaagtaacgccgttagtgaggtcaattttagtgccacgtggactatccacgtggcactaaaagatgatgtggcatgacacgtggacgtgcctaatgccacgtcatttgataataacaaaatgagtaaataggcaatttagtccctgactttgtacccttgttgcatattagtccctaacttaatgaaaaattcaaaatagtccctatcttttacataactattgcaaaatagtccttccgttaaattttaaagtaatgttgttagtaaggtcaattttagtatcatgccatttgatgatgatagaatgagtgacttcttcaaatttgatgattttgaaccaattgaggcatatatacgaaaaagaactcacacacacttacacaaataaaaagaaccaaaaatccacaacaacaaccttatctctgtagctgtcaacaccaatgggcgaggtttgcataaccattctcttttcctctttttttttcttcaattaccatcaatgtatcattctgggttctgatttttttgtgtgttttgaat

SEQ ID NO: 14699 - DNA, 1045 bp, Glycine max
  Gm_smallRNAprecursor_7532
tggtcattttattgtattgctagatcatatcatcatgcaacttataaagacattatcacgttaaacgttactctagcgtagttttgctcgtggcattacgagttgtatatcatatcattactaagtgataataaatattattttaaaaaataaaatttatgaaagtaatttaaatgtcttcattttatatccgtgttcattttttttaatctgttttggctacattccaaaattgtgagtaatttgttaactatggtattgagttgctgaaactttgacgcttgtattataaatatcttatcaatatacttgacattatatcttgctaattctaagaaaaatgatgtaatgaaaagaaacttgttcatatatttaaagagtgaatagacaatttagtctctgagattgtacctattttgcatattagttcctaacttaatattaaattcaaaatagtccctatctttgcataagtgttgcaaaatagtcattccattaaattttaaagtaacgccgttagtgaggtcaattttagtgccacgtggactatccacgtggcactaaaagatgatgtggcatgacacgtggacgtgcctaatgccacgtcatttgataataacaaaatgagtaaataggcaatttagtccctgactttgtacccttgttgcatattagtccctaacttaatgaaaaattcaaaatagtccctatcttttacataactattgcaaaatagtccttccgttaaattttaaagtaatgttgttagtaaggtcaattttagtatcatgccatttgatgatgatagaatgagtgacttcttcaaatttgatgattttgaaccaattgaggcatatatacgaaaaagaactcacacacacttacacaaataaaaagaaccaaaaatccacaacaacaaccttatctctgtagctgtcaacaccaatgggcgaggtttgcataaccattctcttttcctctttttttttcttcaattaccatcaatgtatcattctgggttctgatttttttgtgtgttttgaat

SEQ ID NO: 14700 - DNA, 1080 bp, Glycine max
  Gm_smallRNAprecursor_7533
caaaaataattactttctacctcaagggtcggatccagtccctccctggctggctgcagtgcgaagtgggtctatgggaatttcaaaaatgcttatatagaaacgtgaaataacgcaatcaaagacctgtttttacgaatagtatactatatattactggattctgatcatagaaaaactatttgcatctgtgaaattattaatttcttagattgagaaagaagatatatatatatatatatatatcgagagagagagagagagagagagagcgcgctaaggaaatagccaaggcaagtgttaagagcagctaaaagggtttgaaaaggaaaagaatatggacttacataaatgatcgagttatgtgattttctttgagccacaaccacagaatgcatgagtgagtagtagcattagaggcgtatatggaagtgtttgtgttgtggtgcagcaagcagaatccatgagagagccatcattatagaagccattaaaggagaaatccaaagggatagcatgatcccaaataaattaatattattgagtgagaagagagaaaaatattaaagcttggatttgggatcaatgcgatccctttggatgcctcctccagttgcagtggaagaataacccacacctctacttctgatgaatattggttcgaagttgagggtattataacactataacccccctttctctcttgtgaggggaagtgggtaggtttgagattgaggcttttagcgtaaggagaaacaaactagcttagtagtgcttatattaataaagaccactgtttccattatcattttttttatttgttttcataaattaatttatttatacttgtcaatgtagatttgccaaatcatccgagaaaattaagatattttgttgaatgtagaccccattccctatcaattcaaacacacggaaataaattttacccggcagtgggccagctatatccattattggaaattcccaactagttgccttgcaattatgtactgttgtaattatattcttcgcattgtttatcattaaacgtggagatgaatctcgcccaggaggaacttt

SEQ ID NO: 14701 - DNA, 1084 bp, Glycine max
  Gm_smallRNAprecursor_7534
caagttacaggtttcatatatgtccaccaaagatcttactcgtcttggagtagactctggtgatgatagttcttaatcttgttgttgtggtggaggtgaaggtggttcacctgggtcttcttcctcagcttcttcttgaggtagttgaacgggtataagaacgttcttctccactttttcttcatcccaattccaagaagcgtactcatcaacttcaacatctcgactgatgacgagtttcttagtttgcaagttgtagacacggtagcccttaaagatattgctatacccaaggaagatacctcatatagtcttgtcttcaagcttgtgcctcttcacgtctggaatatgaatgtagcatatagatccaaagacccttaggtgctttgttgattgcttcttcccgttccaagcttcaattggagtcttgtcttttacagacttagttggacatctgttaagtatgtaaacagcagtgtagactgcttcaacccagaatgtgttaggtagtcccttctccttgagcatcgatctatccatttccataactgtgcgattctttctctcagacactccattttgttgaggagaatatgcgactgtaagttgtcgctcaatgccttcatcctcacaaaatctttcaaactcgcgagaggtgtactctttgccgcgatcacttcttagtacttttatccgttttccactttgattttcaacaagggccttgaactttttgaaaactccaaagacttttgatttttcttttagaaaatatacccatgtcattctagagaagtcatcaatgaagagtatgaagtacctgttgttctcatgtgatggcgtcctcattggtccacagacgtccgtatgtatcagctccaatagatctttcgatctccatgctccgcttattgagaaaggaaatcggtgttgcttaccaaggagacatccttcacacacttcattgttcttctttatgcttggaagatctctcatcatgttcttctcatgtaacaacttcaaggtatgtgtgttgaagtggccaaatcttcaatgccatagccatgaatcatcaacttgtacc

SEQ ID NO: 14702 - DNA, 1058 bp, Glycine max
  Gm_smallRNAprecursor_7535
aacacactaataataggttgaagaaagctagattactttttattgaagaagttgaagaagattactaaaaagtacaaagcattaatttgttcacctttctcttgttttacatgaatcgatcagaagcacaaaaagaaattaaggaaacgaaaacaagaaatagcatgcatacaagttataacctgagataggaggggtaattaagaagaagaaaatgcaaagtgaggaagtaaaagttcagtcaaaacaaaacaaaaaacttgctgataaaggtcacattcatacaactattaatcgtccacaaagattcaaagctaccaagatcttaataatttctgaaccactatgatcatattcatatatagcaagcaaattaagtaacattcagagagagaaaaaaaagtatagttttcagtgagttgatcggagagacaaggaggggcatggtgattggaacttgcacttgcacctttgatgatatatacagtaagaaaaacccgtgaaactcaggatagatagcgccaaatacactatgatgtgaaaatcatgagtgtcgtggcgctatccctcctgagctttacagattcttctgtactctcttagcggcaacactttttttttccatgccacaaatccaaaaagactgaaaaaatttctgagaaagagagagaataaaacaggaagctggggttgatgggtgaggagggagaatggaaggtggagaagccaatttataggagagaaacaaagaacgtggcaattgaaaattgaaatgaagagtttggaaaaagttaaaagcgcttttgcttttggaaatcatgtatacgaaagcagcagcttaattagactggtaaaatgagcatgccattgcttttgtggctgaattagtgggcaaaagacctttttttttttctttttttaatttgtgttttttcaaaaagtttatcacataaaactattttttaattgctgctacgtattcttaaccttgtacgctgccgactacgatatttttcttgtcaaaacttggaattacggggatcacaggaatgggaagt

SEQ ID NO: 14703 - DNA, 1058 bp, Glycine max; identical to SEQ ID NO: 14702
  Gm_smallRNAprecursor_7536

SEQ ID NO: 14704 - DNA, 1057 bp, Glycine max
  Gm_smallRNAprecursor_7537
acacactaataataggttgaagaaagctagattactttttattgaagaagttgaagaagattactaaaaagtacaaagcattaatttgttcacctttctcttgttttacatgaatcgatcagaagcacaaaaagaaattaaggaaacgaaaacaagaaatagcatgcatacaagttataacctgagataggaggggtaattaagaagaagaaaatgcaaagtgaggaagtaaaagttcagtcaaaacaaaacaaaaaacttgctgataaaggtcacattcatacaactattaatcgtccacaaagattcaaagctaccaagatcttaataatttctgaaccactatgatcatattcatatatagcaagcaaattaagtaacattcagagagagaaaaaaaagtatagttttcagtgagttgatcggagagacaaggaggggcatggtgattggaacttgcacttgcacctttgatgatatatacagtaagaaaaacccgtgaaactcaggatagatagcgccaaatacactatgatgtgaaaatcatgagtgtcgtggcgctatccctcctgagctttacagattcttctgtactctcttagcggcaacactttttttttccatgccacaaatccaaaaagactgaaaaaatttctgagaaagagagagaataaaacaggaagctggggttgatgggtgaggagggagaatggaaggtggagaagccaatttataggagagaaacaaagaacgtggcaattgaaaattgaaatgaagagtttggaaaaagttaaaagcgcttttgcttttggaaatcatgtatacgaaagcagcagcttaattagactggtaaaatgagcatgccattgcttttgtggctgaattagtgggcaaaagacctttttttttttctttttttaatttgtgttttttcaaaaagtttatcacataaaactattttttaattgctgctacgtattcttaaccttgtacgctgccgactacgatatttttcttgtcaaaacttggaattacggggatcacaggaatgggaagt

SEQ ID NO: 14705 - DNA, 1057 bp, Glycine max; identical to SEQ ID NO: 14704
  Gm_smallRNAprecursor_7538

SEQ ID NO: 14706 - DNA, 1117 bp, Glycine max
  Gm_smallRNAprecursor_7539
ctccttgtaccaagaggttatcttcttgtgaagcttcattagattccaattccttggttacccgtttcatgaattcccttgctagcctcaatgaactcagcttcatctgcatgcagccaaatatactaggttaatcaattattgtcatgtcattagttaatagttaactaccttggttcttgaataaacaaaaaaaatacttcttacccattggttaactaaccaatatatcctatttcttcaaagtgcctacgttgtttagagcaattaaaagcttctcttactttccaagtgtagatgtcattttttttataaaaaaattcaaaaaggaataaagggtattgtgctcttagtaggtgttgattatcaatgaaaaatttatatataatcaattaatcagaaatcatagttatatgacttttaacatagttattataaaagttgataaatttatcatacataataattttttttaaccttaacccttaggttcatcaaaagaaagagatcctaactaatttggagttcggccgggaggtaagtaaagtctgaccaataattgttttcaagtaggatcaaactcaagtattacctaaacaatttaacctttaacttcagcacatacattaatcacttgtgtccaatcacttggtttcataaatagtaatttgtgattggatgatccttgacttttacactattaatgcatagtgcgtgtattatttattcattaattattattagttcaacaagcaagttttattacaaattgcaaaaataagccaaatattgcctacctgaccaatgagacctgtgtccagcatccattcccaagggatatgaaaactcctatatcttttacttgcactctcccttgtcctctccgcactgttcacacttctctccaacctgcacattgaaaatggatcttggaatgactttaaagcactgcataaacacactaagctactgaacattctagttttgtacatgctcgcctgtcctggagtgctagaatctttttcaaagccagagccaatggctcttttggattgccctcaaatgatgagacttctgattcaaggttcttcagatctcggtagttgcaagaagcttc

SEQ ID NO: 14707 - DNA, 1084 bp, Glycine max
  Gm_smallRNAprecursor_7540
caagttacaggttttatatatgtccaccaaagatcttactcgtcttggagtagactctggtgacgatagttcttgatcttgttgttgtggtggaggtgaaggtggtttacctgggtcttcttcctcagcttcttcttgaggtagttgagcgggtataagaacgttcgtctccactttttcttcatcccaattccaagaagcgtactcatcaacttcaacatctcgactgatgacaagtttcttagtttgcaagttgtagacacggtagcccttagagatattgttatacccaaggaagatacctcgtatagtcttgtcttcaagcttgtgcctcttcatgtttggaatacgaatatagcatacagatccaaagacccttaggtgctttgctgatggcttcttcccgttccaagcttcaattggagtcttgtcttttacagacttagttggacatctgttgagtatgtaaacagcagtgtagactgcttcagcccagaatgtgttaggtagtcccttctccttgagcatcgatctagccatctccataactgtgcgattctttctctcggacactccattttgttgaggagaatatgcgactgtaagttgtcgctcaatgccttcatcctcacaaaatctttcaaactcgcgagaggtgtactctttgccgcggtcacttcttagtacttttatccgttttccactttgattttcagcaagggccttgaactttttgaatactccaaagacttttgatttttcttttagaaaatatacccatgtcattctagagaagtcatcaatgaagagtatgaagtacctgttgttctcatgtgatagcatcctcattggtccacaaacgttcgtatgtatcagctccaatagatttttcgctctccatgctccgcttgttgaaaaaggaaatcagtgttgcttaccaagaagacatccttcacacatttcattgttctcctttatgcttggaagatctctcatcatgttcttctcatgtaacaacttcaaggcatgtgtgttgaagtggccaaatcttcgatgccatagccatgaatcatcaacttgtacc

SEQ ID NO: 14708 - DNA, 1046 bp, Glycine max
  Gm_smallRNAprecursor_7541
aggtatgttgaatggttagcaaatatagtccctgtcattaaaaagaatggaactcttagagtatgcatagattttagggatttaaataatgctacacctaaagatgaatatgctatgccagtagcagaaatgttggtagattcagcagctggcttcgaatttttaagcatgttagatggttattctggttataaccaaatatttattgctgaaagtgatgtgtcaaaaacagcatttcgatgccctggtgctttaggcacttatgaatgggtagttatgccttttgggttgaaaaatgctggggccacttatcaaagggccatgaattccatgtttcatgattttattgacacatttatgcaagtttatattgatgatataatcatcaaatcctcctcggaagatagccatttggattaccttaggcaatctttcgaacgaatgaggaaacatggattaaaaatgaatccattaaagtgtgctttttgtgtgcatgcaggagatttccttggttttgtggtgcataaaaaaggcattgagataaatcaaaacaagacaaaggctattcttgagacgaagcctccttcgaccaaaaaacagcttcagtctttgctaggaaaaattaacttcttgaggcgattcatctcgaatctaagtggcaaagctcaaactttttcgccattacttcgactcaagaaagatgaaccattcaaatgggatgaagagcatcaaaaggctttcgatgaaattaaagagtatctgatcaagcctcctgtgttaatgcctcctagtcgaaacaagactatgaagttgtatattgctgcgtctgacaagaccattggtagcatgttggctcaggaatatgatgatggcgtagagcatgcaatttattatcttagtcgtgtactaaatgatgcagaaactagatatactgccatagaaaaactttgtctttgtttgtatttctcttgtgcaaaacttaagcaatatataaagcctgttgatgtttatgtgtattctcattatgatattattaagcacatgtt

SEQ ID NO: 14709 - DNA, 1153 bp, Glycine max
  Gm_smallRNAprecursor_7542
cattgaattaaacccgtaaaataagacagaagatggcgtagcttagtaagcttactaatctcctctggcatctcagacacatgtgtgtctcttatatccaaggtctccaaattctggagcttaccaatggattttggtagacttgctatccctgtataccggaagcttaaatacttcaagtggcataaattccccaaattttcaggaacatcacgtaaaccagaaccttcaaaatctagtaccttcactagcatgtaattggtagggattttgtttactaagtgttgagatacttcatcttctccggtgctaataaaaattgaccgaatgggtgagcttcctatacttccactaaaatcatcggttgcaattgtcaggcgtcgaacaatcttacttgatacagattgatcaggcccgtcaatatactgacaaaatcctgtatccttgacttttctaaggatcatgtcgtgtattaagtcatgaacacgacaccttttaactttgccatcaattctaagtgaggatacttgcaccaaacttctacggaccaaccctgataaatattgatgcccaacttcttccaaagattttccggtttcatgtctgacaaacccttcagctatccactgtctaatcaatctatcagattgaacttcatagtcctccggatacattccgaaatacaataaacatgatctgagattgatcggcaaatcatcataacttaaacctaaaatttttgttatactatttaactcagaattcctctccaagtctaaacttagatctcgactaaactgtccccattcaggtgcattttcatctttttgagacaaaagaccaccaatgacaactattgctagaggtaaacctttacactttctaacaatttgaagagatatatctttaagttcttctggacaatctccattggaactattctgaaatgccttcttacagaacaatttcaatgattcttcttcagttaaaggtttttctagcttatgcacctcaacaaatgatgatttcctacaatatcccgcaaccttctcatccctggttgtgattaatatcctacttccatttttattatcaattacagcagattcaatgtgatcccaaaatgtttcattccatacgtcatcaaacaaga

SEQ ID NO: 14710 - DNA, 1153 bp, Glycine max
  Gm_smallRNAprecursor_7543
tgaattgaagatatatagtaactaagaagatgacgtagctttttaagcttcgtaatctcctctagcatctcagacacatctgtgcctcttatatccaaggtctccaaattctggagcttaccaatggattttgatagactttctatccctgtataccggaagcttaaatacttcaagtggcataaattccccaaattttcaggaacataacgtaaaccagaaccttcaaaatcaagtaccttcaatagcatgtaatttgtagggattttgtttactaagtgttcagatacttcttcatcttctcctgtcctaataaaaattgaccgaatgggtgagcttcctatacttccactaaaatcatcggttgcaattgtcaggcatcgaacaatcttacttgatacagattgatcacgctcgtcaatatactgacaaaatcctgtatccttgacttttccaagtatcatgttgtgtattaagtcatgaacacgacaccttttaactttgccatcaattctaagtgaggatacttgcaccaaacttctacggaccaaccctgataaatattgttgcccaacttcttccaaagattttccggtttcatgtttgacaaacccttcagctatccactgtctaatcagtctatcagattgaacttcatagtcctccggatacattccgaaatacaataaacatgatctgagattgatcggcaaatcatcataacttaaacctaaaatttttgttatgctatttaactcagaattcctctccaagtctaaacttagatctcgactaaactgtccccattcaggtgcactttcatctttttgagacaaaagaccaccaatggacactattgctagaggtaaacctttacactttctaacaatttcaagagatatatcttcaagttcttctggacaatctccatcggaactatactgaaatgccttcttacagaacaatttcaaagattcttcttcagttaaaggtttttctagcttatgcaccttaacaaatgatgatttcctacaatatgctgcaaccttctcatccctggttgtgattaataccctacttccatttttattatcaattacagcagattcaatgtgatcccaaaattttccattccatacgtcatcaaacaaga

SEQ ID NO: 14711 - DNA, 1065 bp, Glycine max
  Gm_smallRNAprecursor_7544
gaagatgacgtagctttttaagcttcgtaatctcctctagcatctcagacacatctgtgcctcttatatccaaggtctccaaattctggagcttaccaatggattttgatagactttctatccctgtataccggaagcttaaatacttcaagtggcataaattccccaaattttcaggaacataacgtaaaccagaaccttcaaaatcaagtaccttcaatagcatgtaatttgtagggattttgtttactaagtgttcagatacttcttcatcttctcctgtcctaataaaaattgaccgaatgggtgagcttcctatacttccactaaaatcatcggttgcaattgtcaggcatcgaacaatcttacttgatacagattgatcacgctcgtcaatatactgacaaaatcctgtatccttgacttttccaagtatcatgttgtgtattaagtcatgaacacgacaccttttaactttgccatcaattctaagtgaggatacttgcaccaaacttctacggaccaaccctgataaatattgttgcccaacttcttccaaagattttccggtttcatgtttgacaaacccttcagctatccactgtctaatcagtctatcagattgaacttcatagtcctccggatacattccgaaatacaataaacatgatctgagattgatcggcaaatcatcataacttaaacctaaaatttttgttatgctatttaactcagaattcctctccaagtctaaacttagatctcgactaaactgtccccattcaggtgcactttcatctttttgagacaaaagaccaccaatggacactattgctagaggtaaacctttacactttctaacaatttcaagagatatatcttcaagttcttctggacaatctccatcggaactatactgaaatgccttcttacagaacaatttcaaagattcttcttcagttaaaggtttttctagcttatgcaccttaacaaatgatgatttcctacaatatgctgcaaccttctcatccctggttgtgattaataccctacttccatttttat

SEQ ID NO: 14712 - DNA, 1065 bp, Glycine max
  Gm_smallRNAprecursor_7545
acagaagatggcgtagcttagtaagcttactaatctcctctggcatctcagacacacctgtgtctcttatatccaaggtctccaaattctggagcttgccaattgattttggtagactttctatccctgtataccggaagcttaaatacttcaagtggcataaattccccaaattttcaggaacataacgtaaaccagaaccttcaaaatcaagtaccttcaatagcatgtaatttgtagggattttgtttactaagtgttcagatatttcatcttctcctgtgctaataaaaattgaccgaatggatgagcttcctatactttcactaaaatcatcggtggcaattgtcaggcgtcgaacaatcttacttgatacagattgatcacacccgtcaatatactgacaaaaccctgtatccttgacttttctaaggatcatgtcgtgtattaagtcatgaacaccacaacttttaactttgccatcaattctaaatgaggatacttgcaccaaacttctacggaccaaccctgataaatattgttgcccaacttcttccaatgtttttccggtttcatgtttgacaaacccttcagctatccactgtctaatcaatctatcagatttaatttcatagtcctccggatatattccgaaatacaataaacatgatctgagattgatcggcaaatattcataacttagacctaaaatttttgttatactatttaactcagaattcctctccaagtctaaacttagatctcgactaaactgtccccattcaggtgcactttcatctttttgagacaaaagaccaccaacggccactattgctagaggtaaacctttacactttctaacaatgtgaagagatatatctttaagttcttctggacaatctccatcggaactatactgaaatgccttcttagaaaacaatttcaatgattcttgttcagttaatggctcttctagcttaagcacctcaacaaaagaagatttcttacaatatcccgcaaccttctcatccctggttgtgattaaaatcctacttccatttttat

SEQ ID NO: 14713 - DNA, 1065 bp, Glycine max
  Gm_smallRNAprecursor_7546
gaagatgacgtagcttagtaagcttacgaatctcctctggcatcttagacacacttgtgtttcttatatccaaggtctctaaattctggagcttgccaatggattttggtagactttcaatacatgtattccggaagcttaaatacttcaagtggcataaattccccaaattttcaggaacataaagtaaatcagaaccttcaaaatcaagtaccttcaatagcatgtaattggtagggattttgtttactaagtgttcagatacttcttcctcttctcctgtgctaataataattgaccgaatgggtgagcttcctatacttccactaaaatcatgggttgcaattgttaggcgtcgaacaatcttacttgatacagattgatcaggctcgtcaatatactgacaaaatcctgtatccttgacttttctaaggatcatgtcgtgtattaagtcgtgaacacgacaccttttaactttgccatcaattctaaatgaggatacttgcaccaaacttctacggaccaaccctgataaatattgttgcccaacttcttccaaagattttccggtttcatgtttgacaaacccttcagctatccactgtctaatcaatctatcagattgaacttcatagtcctctggatacattccgaaatacaataaacatgatctgagattgatcggcaaatcatcattacttaaacctaaaatttttgttatactatttaactcagaattcctctccaagtctaaacttagatctcgactaaactgtccccattcaggtgcactttcatctttttgagacaaaagaccaccaatggccactattgctagaggtaaacctttacactttctaacaatttcaagagatatatctttaagttcttctggacaatctccatcggaactatactgaaatgccttcttacagaacaatttcaaagattcttcttccgttaaaggtttttctagcttatgcacctcaacaaatgatgatttcctacaatattctgcaaccatctcatccctggttgtgattaatatcctacttccatttttat

SEQ ID NO: 14714 - DNA, 1153 bp, Glycine max
  Gm_smallRNAprecursor_7547
tgaattgaacagctagaattagccagaagatgacgtagctttttaagcttcgtaatctcctctgtcatctccgacacatatgtggctcttatatccaaggtctccaaattctggagcttaccaatggattttggaagactttctatccatgtatactggaagcttaaatacttcaagtggcataaattccccaaattttcaggaacataacttaaaacagaaccttcaaaatcaagtaccttcaataacatgtaatttgtagggattttgtttactaagcgttcagataatttttcatactttcctgtgatgataagaattgaccgaatgggtgagcttcccatacttccacataaatcatgggttgcaattgtcaggcgtcgaacaatcccacttgacagagattgatcaagccctccaatatactgacaaaaccctgtatccatggcttttttaagtatcatgtcatgtattaagtcatgaacacgacaccttttaactttgccatcaattctaagtgaggatacttgcaccaaacttctacggaccaaccctgataaatattgttgcccaacttcttccaaagtctttccggtttcatgtttgacaaacccttcagctatccactgtctaatcaatctatcagatttaacttcatagtcctccggatacattccaaaatacaataaacatgatctgagattgatcggcaaatcatcataacttaaacctaaaattttttttatgctatttaactcagaattcctctccaagtctaaacttagatctcgactaaactgtccccattcaggtgcactttcatctttttgagacaaaagaccaccaatggccactattgccagaggtaaacctttacactttctaacaatttcaagagatatctctttaagttcttctggacaatctccatcggaactatactgaaatgccttcttatagaacaatttcaaagattcttcttcagttaaaggtttttctagcttaaacacctcaacaaatgatgatttcctacaatattctgcaaccttctcatccctggttgtgattaatatcctacttccatttttattatcaattacagcagattcaatgtgatcccaaaattttccattccatacgtcatcaaacaaga

SEQ ID NO: 14715 - DNA, 1065 bp, Glycine max
  Gm_smallRNAprecursor_7548
gaagatgacgtagctttttaagcttcgtaatctcctctgtcatctccgacacatatgtggctcttatatccaaggtctccaaattctggagcttaccaatggattttggaagactttctatccatgtatactggaagcttaaatacttcaagtggcataaattccccaaattttcaggaacataacttaaaacagaaccttcaaaatcaagtaccttcaataacatgtaatttgtagggattttgtttactaagcgttcagataatttttcatactttcctgtgatgataagaattgaccgaatgggtgagcttcccatacttccacataaatcatgggttgcaattgtcaggcgtcgaacaatcccacttgacagagattgatcaagccctccaatatactgacaaaaccctgtatccatggcttttttaagtatcatgtcatgtattaagtcatgaacacgacaccttttaactttgccatcaattctaagtgaggatacttgcaccaaacttctacggaccaaccctgataaatattgttgcccaacttcttccaaagtctttccggtttcatgtttgacaaacccttcagctatccactgtctaatcaatctatcagatttaacttcatagtcctccggatacattccaaaatacaataaacatgatctgagattgatcggcaaatcatcataacttaaacctaaaattttttttatgctatttaactcagaattcctctccaagtctaaacttagatctcgactaaactgtccccattcaggtgcactttcatctttttgagacaaaagaccaccaatggccactattgccagaggtaaacctttacactttctaacaatttcaagagatatctctttaagttcttctggacaatctccatcggaactatactgaaatgccttcttatagaacaatttcaaagattcttcttcagttaaaggtttttctagcttaaacacctcaacaaatgatgatttcctacaatattctgcaaccttctcatccctggttgtgattaatatcctacttccatttttat

SEQ ID NO: 14716 - DNA, 1153 bp, Glycine max
  Gm_smallRNAprecursor_7549
tgaattgaacacctagaataagccagaagatgacgtagctttttaagcttactaatctcctctggcatctcagacacacctgtgcctcttatatccaaggtctccaaattcaggagcttaccaatggattttggtagacttgctatccatgtataccggaagcttaaatacttcaagtggcataaattccccaaattttcaggaacataactaaaagcagaaccttcaaaatcaagtaccttcagtagcatgtaatttgtagggaatttgttaaccaagtcttgagataagttttcatcttttcctgtcatgataagaattgaccgaatgggtgagcttcttgtacttccactaaaatcatgggttgcaattgtcaggcgtcgaacaatattacttgatacagattgatcacgcccgtcaatatactgacaaaaccctgtatccttgacttttctaaggatcatgtcgtgtattaagtcatgaacacgacaccttttaactttgccatcaattctaagtgaggatacttgcaccaaacttctatggaccaaccctgataaatatggttgcccaacttcttccaaagattttccggtttcatgtttgacaaacccttcagttatccactgtctaatcaatctatcagatttaacttcatagtcctccggatacattccgaaatacaataaacatgatctgagattgatcggcaaatcatcataacttaaacctaaaatttttgttatactatttaactcagaattcctctccaagtctaaacttagatctcgactaaactgtccccattcaggtgcactttcatctttttgagacaaaagaccaccaatggccactattgctagaggtaaatctttacactttctgacaatttcaagagatatatctttaagttcttctggacaatctccatcggaactatactgaaatgccttcttacagaacaatttcaaagattcttcttcagttaaaggtttttctaggttatgcacctcaacaaatgatgatttcctacaatattctgcaaccttctcatccctggttgtgattaatatcctacttccatttttattatcaattacagcagattcaatgtgatcccaaaatgtttcattccatacgtcatcaaacaaga

SEQ ID NO: 14717 - DNA, 1153 bp, Glycine max
  Gm_smallRNAprecursor_7550
atcatctatagtcactgtaggtatctcatgtaaggatgtcatgcctccaatatccttccattgaattgaacacgtagaatcagccagaagatgacgtagcattttaagcctactaatctccaaattctggagcttaccaatggattttggtagaatttctatccctgtattgcgaaagcttaaatacttcaagtggcatgaattccccaaattttgaggaacataacttaatccagtaccttcagtagcatgtaatttgtagggatcttgtttaccaagtgttcagataatttttcatattttcctgtggtgataagaattgaccgaatgggtgagcttcttatactttcacataaatcatcggttgcaattgtcaggtgtcagacaatcccacttgacatagattgatcatgtctgccaatatactgacaaaaccctgtatcctggatttttttaagtatcatgtcatgtattaagtcatgaacgtgacaccttttaactttgccatcaattctaagtgaggatacttgtaccaaacttctaccgaccaaccctgataaatattgttgggcaacttcttccaaagtttttccagtttcatgtttgacaaacccttctgctatccaatgtccaatcaatctatcagatctaacttcatagtcctccggatacattccgaaatataataagcaggatctgacattgctcggcaaatcttcataacttaaacctaaaatttttgttatactcactactacaaaaatagcgttttacatcggtggaaaacgattttcaaagacggtggacgactgtctttgaaagtagtgtcgttgaatgcgaaaccttctacgacggtcataaaaggaccgtcttagaaacacgtcataaagcaaattgttacttagctagcaacgacgtagaaaacactagtttctacatcggttagtctacgatcgatgtagaaacctgtgttttctacgtcgttgctgtcgtaagcaacgacttagaatgagcatagccaacgtcggttaatttacaatcgatgtagaaacctgtgttttcagcttattcatttgcctcagatcttgagccaagtttccaaataaacaagtatcataatttcaaaagccaaaactctttagataataggaga

SEQ ID NO: 14718 - DNA, 1069 bp, Glycine max
  Gm_smallRNAprecursor_7551
ttgggttaattagatttaaatatttaaaaaatgtttctattttttgaaaatatttttttaaaataacaatttatttttgtctaaagctttgtaaatctataatgattaaatacacttaaaagagatcaaattgtgaaaatattttattaatataattaatgatttcaatgctagtatgatactattattttagataaaaattaagtatgatattaacatgcaaaaatataaataaaattaagatagagaaaaaataacttaaaaaggaaaaaattatgaatgttttaatttaataatttaataaactatatgagctaaaaattattaatatgttttgtatttaataattaatttatatatatatatatataaattaaaggcaaaattacatttttgatctcccggtttatctctaattttagatttggttccccaataatttaattcacgaattgggtccctctattttgtaaaatcgtgcaatgttggtccctcataccacaattggacgttgaccgttaggaagtgatgttgattaccatgtgtcacattcttattggatgataattgtcacgtgtcatgttctgattggtcaatgaaaacaacaatgcatttcatctttaatggagttgacattcaatcagaacatgacatgtgacacttatcatccaataaaaacgtgacacgtggcagtcaatgtcactgcttaatggtcaacatccaattgaggtgttcgaaatcaacattgcaggattttataaaacagaggactaaatttgtgaattaaattacctgggaccaaatgcgatattggagttaaagtaagggaccgaaagtgtaattttgcctaaattaaattatatatgagataggtcgggttcaaaataaataaaactctttactcaactcgttcatgatcaggtcttaattgggttgagttggattcgacctaaacactttagaaattcaatccaatataattaggtcgggttaggttggattatagttctaaccattattctgtccgtacattaattaattagatggaacaaagcaatatgattagtct

SEQ ID NO: 14719 - DNA, 1079 bp, Glycine max
  Gm_smallRNAprecursor_7552
ttttgttcttaaggaaattcctagaaccttctcttcttctggaagtttctccataatttttctttcctccattttctttgttttggggctgaaatttatggaaggcattttcaattgtatcttctttatgcctatacagtctttgctcatatgcttcaagagagcccgcaagttctgtctctgatagagtggacagatctttggtttcttcaatcgttgtcacgattgggtcaaacttttggggcatagtaattaaaattttctcaacaattttcttgtcaagaatatcttccccaaaagctctcatttgattaactatttctttaactttagaatagtaatctttaactgtctcagactccttcatcttcaatagttcaaaatctcttcttagagattgaagtttaacgacacgtaccttaacacttccttgaaactcctcctgcaatgtgttccacgcttctttggcagtcttagctcccataattcttggaaaaattggatcagtcaccgcttgttgcaaggtgaacaacgcctttgaatttttctgtttatttttcttcaactctttttcttgagatgcattaagagctgaagtatccgcaggaatggtgaagccttcttctactatgtcccataaatcttgagataaaaaatatgtttccattttaacacgccagaaatcataattttcaccattgaagatagggacaaaaatagttgacgattgagtagtgttatccatagcttagaaaaaaatattattagagtgggttaatagtacaaagaaaattttcgaagtagttgggaggattttggaatggtaggtaggtaatataactacgcccaatgtatgaccgaacgtagctctgataccactgttggtagttgattagatgatagttgatagttgataattttagagaattgttttagaaagaaggctatgtcattgatttcttgaatgatcaattacaacataccaattgcctatttataggctcaagtcaccaacctctcaatggtggtgaatgtttctacattactttaggtctttctagagttttcatgatagatta

SEQ ID NO: 14720 - DNA, 1041 bp, Glycine max
  Gm_smallRNAprecursor_7553
atcctcgacaggagggcctattgagttttaactccgactacatggtctggtataggcaaaaaacgaagatgtttgtcgacccaaagaatgcaaacacagctacatttatatttatttctttttgaatatttaacttcaaattattttttaaagcatcggcattaatttcctgaccctaataattgcaggctgaagttacggagacattacagtatatggtgtcactacaagggaggaacacatggacaattgatgatctcgtgccttatgtagagaagataacgattttatccgaagagcaagagagaatcactgagtctatggcacatggtccagcatcagagcgtcgatttccaccacaagagtttcacatgcttcagtcaagtgttgaaactcggggttttggcagatgaagggaggttgttgaagtgcaagaattttcccaacaaatggaggagcgtggccatggaatgtattacatgccaccaacatttcctcagtatccttcacagatgtatcagtatcctttcgaaggtcatcacactgatatgtttgcaagcgaacattcgttcgatggtgttgcggaaacacatcctcatttttcatggccgactatgaccccttcgcagcaacatgatgccccaatggtaacacctaacgccccattagctccgcaatggaatgtaccgggaccaatacctaatatcgatgacttattaggtgttgatttgcgtcacgaattttctgcgggggtgacgaagaagaagagaggagacatcggggtaggagaaatcctgatcgtcaagcgcgaagatgggatcgaccatgtggcacatcctcacgtcatcacggacactataatgaatgattttgatgtctctatttaaatttgttgttgtatgtttgacatttgaatttgacacttaatctatcatatctcatttattaaaccttactaatggatacagtttatgtcgcacatcaaactataataataaataaagtttaaaaataaaactaaagtagacaaacgaaaataag

SEQ ID NO: 14721 - DNA, 1083 bp, Glycine max
  Gm_smallRNAprecursor_7554
caaagggactacttcgatccattttgtaaagtaatcgataccaactataatataacgctggttcttagaagaagcaggcttgatttcaccaattaaatccaaagcccatcctctgaaaggccaaggtttgattatggagtgtaactcactagcaggtacatgctgtatccctgcatgcttttggcattcctgacagcctttagcgaattctatgcagtcttttaacatcgaaggccaatacaaaccttgtcgaaataaaagccatttcattttatggcctgcttgatgtgatccacaagccccactgtgaacatgggaaactgataagtatgcttctgattcacttagacattttaacaacactccttctgcagtctttttaaacaaatcatttcccataatcacgtaatttaaagccctatatttgatctttcgagccacattacctattggattttccaaatattcaacaatggactttctccaatcattatccaacatattgtcaatggccaaaatttgaatttttccctggagatcatccatgctttcatctccattattttgtggtgtacttgcccccacaagttttggcattggcaatttagtgcttaatggctctggtaacaccagtttatcttttatttcgatcaactgagttaacttttccttcgacattttgtaccctgaagctatttgggctaaatcatttgcttcttggttttcttgtcgaggtatatgttcaatgttaatgtaatcgaaatgattcagaagagaactggccaaaacaaaatattttgctaagtgttcattaacacatttgtattcttgtgttaattgcttcaacactaattctgaatcacctcttacgttaacatttcttgcccccaagctaattaaaatttcaaggcctgtaattagagcttcatactcagcctcattattagaacaaagccctttgattttatatttgaatttagttggaattttattgggggatattattaaaactccaattccagttccatgtttgtgtttcgatccatcgaaatacaaaatccaaggctctgtatcgacataatc

SEQ ID NO: 14722 - DNA, 1176 bp, Glycine max
  Gm_smallRNAprecursor_7555
agccacaatctgacccttaacagatttcaaaggcttgtaagttaaagaatattctgttaatgctaaagcccattttccaattctactgtgtaaaatcggttttgacaacatgtgcttaataatatcataatgagaatacacataaacatcaacaggctttatatattgcttaagttttgcacaagagaaatacagacaaagacaaagtttttctatggcagtatatctagtttctgcatcatttagtacacgactaagataataaattgcatgttctatgccatcatcatcttcctgagccaacatgctaccaatggtcttgtcagacgcagcaatatacaacttcatagacttgtttcgactaggaggcattaacacaggaggcttgatcagatattctttaatttcattgaaagccttttgatgctcttcattccatttgaatggttcatctttcttgagtcgaagtaatggcgaaaaaatctgagctttgccacttagattcgaaatgaatcgcctcaagaagttgatttttcctagcaaagactgaagctgttttttggtcgaaggaggcttcgtctcaagaatagcctttgtcttattttgatttatctcaatgccttttttatgcaccacaaaaccaaggaaatctcctgcacgcacacaaaaagcacactttaatggattcatttttaatccatgtttcctcattcgttcgaaagattgcctaagataatccaaatggctatcttctgaggaggatttgatgattatatcatcaatataaatttgcataaatgtgtcaataaaatcatgaaacatggaattcatggccctttgataagtggccccaacatttttcaacccaaagggcataaccacccattcataagtgcctaaagcaccagggcatcgaaatgctgttttcgacacatcattttcagcaataaatatttggttataaccagaataaccatctaacatgcttaaaaattcgaaaccagctgccgaatctaccaacatttccgctactggcatagcatattcatctttaggtgtagcattatttaaatccctaaaatctatgcatactctaagagttccattctttttaatgacagggactatatttgctaaccattcgacatacctggcagccctgatgaatttacacct

SEQ ID NO: 14723 - DNA, 1157 bp, Glycine max
  Gm_smallRNAprecursor_7556
caattctactgtgtaaaatcggttttgacaacatgtgcttaataatatcataatgagaatacacataaacatcaacaggctttatatattgcttaagttttgcacaagagaaatacagacaaagacaaagtttttctatggcagtatatctagtttctgcatcatttagtacacgactaagataataaattgcatgttctatgccatcatcatcttcctgagccaacatgctaccaatggtcttgtcagacgcagcaatatacaacttcatagacttgtttcgactaggaggcattaacacaggaggcttgatcagatattctttaatttcattgaaagccttttgatgctcttcattccatttgaatggttcatctttcttgagtcgaagtaatggcgaaaaaatctgagctttgccacttagattcgaaatgaatcgcctcaagaagttgatttttcctagcaaagactgaagctgttttttggtcgaaggaggcttcgtctcaagaatagcctttgtcttattttgatttatctcaatgccttttttatgcaccacaaaaccaaggaaatctcctgcacgcacacaaaaagcacactttaatggattcatttttaatccatgtttcctcattcgttcgaaagattgcctaagataatccaaatggctatcttctgaggaggatttgatgattatatcatcaatataaatttgcataaatgtgtcaataaaatcatgaaacatggaattcatggccctttgataagtggccccaacatttttcaacccaaagggcataaccacccattcataagtgcctaaagcaccagggcatcgaaatgctgttttcgacacatcattttcagcaataaatatttggttataaccagaataaccatctaacatgcttaaaaattcgaaaccagctgccgaatctaccaacatttccgctactggcatagcatattcatctttaggtgtagcattatttaaatccctaaaatctatgcatactctaagagttccattctttttaatgacagggactatatttgctaaccattcgacatacctggcagccctgatgaatttacacctcagcagcctttcgatctcttccttaatcttggacatgatttctggtgcgaatcttctt

SEQ ID NO: 14724 - DNA, 1039 bp, Glycine max
  Gm_smallRNAprecursor_7557
atttctggtgcgaatcttcttggtagttgttttactggtctttttccctccttaataggtaacttcatttcgaccatttctctgcttaacccaggcatttcgtggtaatcccaagcaaaacagtctttaaactctctaagaagaggcaccagcttttcttttaaacttgaggtgatattggcactgatataagttggccttttaatcgagccatctccaatatcgacctcttccaaaggatcttgagcctgcatctttggcgcctcacttatgggatttttctcaaaacccagcggctcatcatcataaatacaatccagtcttcgatcctttgtttctttgttttcatgatcttcgatcttggcttcaactgccatattttgttgagattcagcctcaaaggccgtatttagtctattttcggccatataagccgtaattctggcccatgcagtggcctcagtcatattaatcttcatatgtattccacccagttggtggaatgactccatcttcagagggaacagcatcaatttcctccctctcccatataaacccataggtaggatggagtttgacagagtggacaacattgtcactcgattcgacaacagcctccttgtcaccacaaggtgctatgttagccaactttttgtcaaaggtttatgcagtaacattattgacctctgacttatagaagctttgatccgcctctatattttccacaatcccatcctccctccagataatgagcttctggtgaagggtagatggcacagccccaactccatgaatccactcccttcctaatagcaagttaaaattagccttagactgtatcaccaggaaaagagttggtcgaactatactgcctacagcaacatctacttgaatggctcccaaagaatagtcagttttaccctcataattcgaaagcacaatgttgtgggcagatagatcagtgtcatgtttcccgatcttgtagagcatagatcgaggcattaagttgacagccgctcctccatcaatgagcactttg

SEQ ID NO: 14725 - DNA, 1130 bp, Glycine max
  Gm_smallRNAprecursor_7558
ttacaagattggtgctgaccactttggttccgactttgcaatggctcaaaggaaaacccattctcctagtaagaaacttttatcatactattttttttatgtattagtgttagaattcagaattctaagttatgctcttggttggtaattggtattgtagaatattggtggcgaatgtttgggtcacaaactccaaatttgcagaagctggctattaagattttgagtttgacttgcagtgcttcaggatgtgaaagaaattggagtgtgtttgagcaagtaattgtgacaaaactctaactatactttttaattttatttaattttgatgatcaagttatatttggagtatatttgagattgaaatcaacatttatttgttatgttgtagattcattccaaaaaaagaaataagcttgagcacaagaggttgcatgatttggtgtttgtcaaatacaaccaacaattgaagcaaagatataatgcaagagatgaaattgatccaatttctcttaatgatattgatgtatgcaatgaatggctcgtgggagagatggatcaagatgatgataatgatgctggaaatgatttggtatttgaagatgatgatgctctaaattgggcaactgtgtatcaggcttcgggggttggagagtgtaggatgtatactaggcggaaaaagcaaaaaacaagtgttgctgctgcccaaacttctaaaaaacaggcaatggttgttggatcttcatcaaggaagcaaaaagcagtccaagaaaatgatgaggatctagatgttgaggagaatattgatgttgaatctgaagaagaagaaatcatggtcaattttgaggcgtctgatggggaagagggagagggagatgctccattaccatatgataacaacgaagatgattatgttgggattggagaagatgattagagcctcaaccttcactttgcactttgcattatgtttttatcattttcttattttgaactctttaatgagtttatttggtgttggtacttgattattgtatgaacttatgaaacttttttagtttatttgaatgcaatcttttgtttttttcaatttcaatgagtttatatatatgttttttttttttttgtgt

SEQ ID NO: 14726 - DNA, 1079 bp, Glycine max
  Gm_smallRNAprecursor_7559
taaggaaattcctagaaccttcttttcttctggaagcttctccataatttttcttttttctattttctttgttttggggctgaaatttaaactttgactggaaggcattttcaagtgtatcttctttatgcctatacagtctttgctcatatgcttcaagagagcccacaagttttgtctctgatagagtggaccgatctttggtttcctcaatcgttgtcacgattgggtcaaacttttggggcatagtaattagaattttctcaacaattttcttgtcaagaatatcttccccaaaagctctcatttgattaactatttctttaactttagaatagtaatctttaactgtctcaaactccttcatcttcaatagttcaaaatatcttcttagagattgaagtttaatggcacgtaccttaacacttccttgaaactcctcctgcaatgtgttccacgcttctttagcagtcttagctcccataattcttgggaaaattggatcagtcaccgcttgttgcaaggtgaacaacgcctttgaatttttctgtttatttttcttcaactctttttcttgagatgcattaagagctgaagtatccgtgggaatggtgaagccttcttctactatgtcccataaatcttaagatgaaaaatatgtttcctgccagaaatcataattttcaccattgaagatagggacagaaatagttgacgattgagtagtgttatacatagcttagaaaaatattattagagtgggtttatagtacaaaggaaattttggaagtagttgggaggattttggaatggtaggtaggtaatattactacgcccaatgtatgaccgaacgtatctttgataccactgttggtagttggttagatgatagttgatagttttagaaagaaggctatgtcattgatttgttggattgatcaattacaacatgccaatggtaggtaggtaatattactacgcccaatgtatgaccgaacgtagctctgataccactgttggtagttggttagatgatagttgatagtttttgagaatttttttagaaagaaggatatgtc

SEQ ID NO: 14727 - DNA, 1198 bp, Glycine max
  Gm_smallRNAprecursor_7560
atttgctttgctgttttgacttttgttttttcatttaagcctcagttaatttaaatgaaagagaaatattagatttaatttctgtttctttcattatcgctaccaaaaaaacagtaattatcagttgtgttaacaagataacatccatacagctagtttgaattaagcgtgtatgtataatgagtggtattagctattactgactcagttgattattaattcagggaatggttcctctcataatttttttttctcggcaaagataacttttatatgttaacaaatgttaacaaatttctaggattcctacttcatccgctgatcttacttcccatctttcattatcgctgatctctggtatcagagcctgatggggaagtaggaatactgtccgtaaggacatatgttaacaaattttatggatctggaactaaagtcttgtatagtacatgtaatattttactttgatttgtacagtaagtgtttgaacagtacttcctggaagtacagcagtctaatattttagttgaatggtactgtagcagtaagacccgtgttggataaagggcagtaaggctaaggtgtactgtttaaccaaaatatcaagacataatacactggtggctataggattgccgttcaaactatttttcaaaaaaaaaaaagagtttttcttaaaaataattcagatccagaaaaattttgtgacatatttacttacatcaaatttgttgttcgtgataaaatccttttgtctaggttttacctctaatgttttcttgagtttttccaggaaaaccttcttttcctgggggttaggtatggaattgattgcttcaaacaagagatcttgttctctcgttagagtattgatttgcccatcatcatctgttgatgatagttggtcatcttgttggattaggtttaggttttcatcggaaagcacggaggatgaagtttctgtttctgtttcctcctccgaggtttctatgagcaaattgtttatttgctcttcaattgagggttctaggttaaggtttcttaacttcttttttagtctacaatatttgctaatgtggccatgttttccacaattgtagcacgttatttttggttttattttttgtttaggattttccatttctctactggttgagggtttttgagagtatcttcgttttgaaaatcttcttctatt

SEQ ID NO: 14728 - DNA, 1197 bp, Glycine max
  Gm_smallRNAprecursor_7561
gttttaacaggactctagatgcacaagtattcatgaccttgtactggatcctatatattaaggctgctgggattgatccttctttcatgtcaaggccatgaaagtggatgtttaagaacagagagtcaagaatgtttctgtccatcagactcactgttttgtttggataacagttaaaatatattggaccttgtcctaggctggtttcgattgttccaattagggagtcttcaaattaattatccctaatgtctcttagacacattaaaactgttgcatctatacccatatcaattaagggcttgatggctacttctacacaaccgatgtgtagatatttatacttacggctatgttcataaattgaattttttgaaagcaaatgaaattcttcccctacatcttgtcctagaggaatattgttttctactgttttgattatgtaatcaaagttgtgtttgtcctttattgtttcaggaacgtatagttgatcctgagggatttctggaatgttccagtcatccatgttttgattgatatcttcgaatcggacttcctcatcgaagagattgtgttttggggcgacctcttgggtctggttgtcttgatcatttaataaattagagtttcttgaagaggataatgaggaggagtttgagcgaaaagagatacgggaaaaagatcgtaatagtctagacatgattataatattctctaatatctttgccctcatttggttccatagaaatatctccgtaagtaaatatgtcacaaaatttttcgggatctgaattatttttaagaaaaactcttttttttttgaaaaatagtttgaacggaaatcctatagccaccagtgtattatgtcttgatattttggttaaatagtacaccttagccttactgccctttatccaacacgggtcttactgctacagtaccattcaactaaaatattagactgctgtacttccaggaagtactgttcaaacacttactgtacaaatcaaagtaaaatattacatgtactatacaagactttagttccagatccataaaatttgttaacatatgtccttacagatagtattcctacttccccatcaggctctgtgaccaccattttacaaaagcgtgtctctgtaacggtggatattgcttgctgttttcagtttttccgtatctgtattgccatga

SEQ ID NO: 14729 - DNA, 1213 bp, Glycine max
  Gm_smallRNAprecursor_7562
tataatattctctaatatctttgccctcatttggttccatagaaatatctccgtaagtaaatatgtcacaaaatttttcgggatctgaattatttttaagaaaaactcttttttttttgaaaaatagtttgaacggaaatcctatagccaccagtgtattatgtcttgatattttggttaaatagtacaccttagccttactgccctttatccaacacgggtcttactgctacagtaccattcaactaaaatattagactgctgtacttccaggaagtactgttcaaacacttactgtacaaatcaaagtaaaatattacatgtactatacaagactttagttccagatccataaaatttgttaacatatgtccttacagatagtattcctacttccccatcaggctctgtgaccaccattttacaaaagcgtgtctctgtaacggtggatattgcttgctgttttcagtttttccgtatctgtattgccatgaaaagatccatgacaaggcaaaactggaaaagtactttaaatctgccggaatacatgattccttgctattatagagcttgttgaattgttggaatccctgttggacttcttctggaaatatttgtggaattggtccgaagtagttccaccattggaggaaccaatttggaaaattatacacagtattatttttgaagtaaatcagccatgaatgcttgaatttactattttgatgccagaacacattggtccaggcgtcaatgtaatcccaataattatatcctgtagggtcaaatggtgcagaaaactttttgggttggtttaagtttgagccataatgtcggggctgcataaccttcaagatttggattgtggaatgggtatttagatttggatctttggggtctttgaagtgtttaatagatactgagtttgtatctattagaatgaattcgtagaatttgcgggttttgtttgtggctattggcctgtaatggaatcctggggggaatactttggcggttgctttgaaaggattcttgtcccagtattctggttccatttgtaaaacattgaaaaatttgtttttttgaaatgtaactgttaccgggttgtgacgttgattcttgttgagttaacgattggcttggtttttggttacaaacagttttggtctgtttggctttttggatttgtttttgcaggtctgtttcagaatca

SEQ ID NO: 14730 - DNA, 1035 bp, Glycine max
  Gm_smallRNAprecursor_7563
aatgtagccgtctttgcattttctgggtcaacaaacatctttgtctttcgcctataccagaccatgtagtccgagttaaagctcaataggccttcttgtcggggataagcaccgaccctaaatgcatggcgattattccactgatgaatcattggggcgaacaattgcccccaattttcgtcatgtttcccttttaatgttatgccatgaatgtttaagggttgtgaaggagactctggaactggttgctgcatcccaaattgtctcaacactctgtccggttggtgccactcaataacttggaaacaaattagtggcaccactgcgtaccacgcgagacttccgactaaacaaatgggaggcaaaaatgatataacggttgatgggtaaggctcccacacaaactgcatataacaacatagttgtgaacattgtagtaaaataacacatataattttttattttacaaatacaatagcatggttcttacctcatgacgtttcataatatccaacttgcgacgataaactttcacatcatcattgccgatatgttggtttccacgtcgcagccacctacaaagaataaaatttaatataccctaaaaccatttattctattgaaatgaaagacgttgttaaaaatgactgacctgtgccctagtggtgtattttctacttgggaggagtcctttttgagccaaggttggacatcgttcccatgcccacaattgtagtaagatgcacataccttcgattgatttagttttataatcggtggcactgcacatctctctgtatagaaaaccaagtacggcaactccccatgcatatcggccacattcttcaaagtcacgtaaaaattgaaggtaccttagcgaaactctgttactggttttgtcaacaaacaagacacctccaatgaatctcagtatccatgcacgggcaaaccttcgtacttgttcttcgtcgtcgtcattatttatttgatcaaaatggtagccagccaacttaatttaaccacactacctttaat

SEQ ID NO: 14731 - DNA, 1156 bp, Glycine max
  Gm_smallRNAprecursor_7564
gaggcaaaaatgatataacggttgatgggtaaggctcccacacaaactgcatataacaacatagttgtgaacattgtagtaaaataacacatataattttttattttacaaatacaatagcatggttcttacctcatgacgtttcataatatccaacttgcgacgataaactttcacatcatcattgccgatatgttggtttccacgtcgcagccacctacaaagaataaaatttaatataccctaaaaccatttattctattgaaatgaaagacgttgttaaaaatgactgacctgtgccctagtggtgtattttctacttgggaggagtcctttttgagccaaggttggacatcgttcccatgcccacaattgtagtaagatgcacataccttcgattgatttagttttataatcggtggcactgcacatctctctgtatagaaaaccaagtacggcaactccccatgcatatcggccacattcttcaaagtcacgtaaaaattgaaggtaccttagcgaaactctgttactggttttgtcaacaaacaagacacctccaatgaatctcagtatccatgcacgggcaaaccttcgtacttgttcttcgtcgtcgtcattatttatttgatcaaaatggtagccagccaacttaatttaaccacactacctttaatttcaccttcttgtggtctgactcccaataattcctcacataaatcagcccaatcaagatttgttggaccgattaatggtaaaccatccacacttatacctaacaatacagagacgtcttgtagagtaataatacactctccgaatcttatgtgaaatgtatgtgtttccggcctccatctttctattagaacactaattaatgaggcatttatttttaagtatcccatcttgatgatccagccgaaaccatattgttgaagaaaagaaaaaatttgctctggaatttgttcttccccttgatacgtggggacagctcgtcgtctgatatgtaatttcctttcttcttccccattccaaacatgttctgaaacatgcttaggttgcatccataatacatcagtatcaatgggaccagacttaatgttaatatgtgatgaagatgatgatgaagatgtcattgctactgcaaaataaaatt

SEQ ID NO: 14732 - DNA, 1157 bp, Glycine max
  Gm_smallRNAprecursor_7565
gaggcaaaaatgatataacggttgatgggtaaggctcccacacaaactgcatataacaacatagttgtgaacattgtagtaaaataacacatataattttttattttacaaatacaatagcatggttcttacctcatgacgtttcataatatccaacttgcgacgataaactttcacatcatcattgccgatatgttggtttccacgtcgcagccacctacaaagaataaaatttaatataccctaaaaccatttattctattgaaatgaaagacgttgttaaaaatgactgacctgtgccctagtggtgtattttctacttgggaggagtcctttttgagccaaggttggacatcgttcccatgcccacaattgtagtaagatgcacataccttcgattgatttagttttataatcggtggcactgcacatctctctgtatagaaaaccaagtacggcaactccccatgcatatcggccacattcttcaaagtcacgtaaaaattgaaggtaccttagcgaaactctgttactggttttgtcaacaaacaagacacctccaatgaatctcagtatccatgcacgggcaaaccttcgtacttgttcttcgtcgtcgtcattatttatttgatcaaaatggtagccagccaacttaatttaaccacactacctttaatttcaccttcttgtggtctgactcccaataattcctcacataaatcagcccaatcaagatttgttggaccgattaatggtaaaccatccacacttatacctaacaatacagagacgtcttgtagagtaataatacactctccgaatcttatgtgaaatgtatgtgtttccggcctccatctttctattagaacactaattaatgaggcatttatttttaagtatcccatcttgatgatccagccgaaaccatattgttgaagaaaagaaaaaatttgctctggaatttgttcttccccttgatacgtggggacagctcgtcgtctgatatgtaatttcctttcttcttccccattccaaacatgttctgaaacatgcttaggttgcatccataatacatcagtatcaatgggaccagacttaatgttaatatgtgatgaagatgatgatgaagatgtcattgctactgcaaaataaaattt

SEQ ID NO: 14733 - DNA, 1154 bp, Glycine max
  Gm_smallRNAprecursor_7566
ggcaaaaatgatataacggttgatgggtaaggctcccacacaaactgcatataacaacatagttgtgaacattgtagtaaaataacacatataattttttattttacaaatacaatagcatggttcttacctcatgacgtttcataatatccaacttgcgacgataaactttcacatcatcattgccgatatgttggtttccacgtcgcagccacctacaaagaataaaatttaatataccctaaaaccatttattctattgaaatgaaagacgttgttaaaaatgactgacctgtgccctagtggtgtattttctacttgggaggagtcctttttgagccaaggttggacatcgttcccatgcccacaattgtagtaagatgcacataccttcgattgatttagttttataatcggtggcactgcacatctctctgtatagaaaaccaagtacggcaactccccatgcatatcggccacattcttcaaagtcacgtaaaaattgaaggtaccttagcgaaactctgttactggttttgtcaacaaacaagacacctccaatgaatctcagtatccatgcacgggcaaaccttcgtacttgttcttcgtcgtcgtcattatttatttgatcaaaatggtagccagccaacttaatttaaccacactacctttaatttcaccttcttgtggtctgactcccaataattcctcacataaatcagcccaatcaagatttgttggaccgattaatggtaaaccatccacacttatacctaacaatacagagacgtcttgtagagtaataatacactctccgaatcttatgtgaaatgtatgtgtttccggcctccatctttctattagaacactaattaatgaggcatttatttttaagtatcccatcttgatgatccagccgaaaccatattgttgaagaaaagaaaaaatttgctctggaatttgttcttccccttgatacgtggggacagctcgtcgtctgatatgtaatttcctttcttcttccccattccaaacatgttctgaaacatgcttaggttgcatccataatacatcagtatcaatgggaccagacttaatgttaatatgtgatgaagatgatgatgaagatgtcattgctactgcaaaataaaatt

SEQ ID NO: 14734 - DNA, 1079 bp, Glycine max
  Gm_smallRNAprecursor_7567
taaggaaattcctagaaccttctcttcttttggaagtttctccataatttttctttcctccattttttttgttttggggctgaaatttaaactttgactggaaggcattttcaattgtatcttttttatgcttatacagtctttgctcatatacttcaagagagcccacaagttctgtctctgatagagtggacagatctttggtttcctcaatcgttgtcacgattgggtcaaacttttggggcatagtaattagaattttctcaacaattgtcttgtcaagaatattttccccaaaagctctcatttgattaactattcctttaactttagaatagtaatctttaactgtctcagactccttcatcttcaatagttcaaaatctcttcttagagattgaagtttaacggcacgtaccttaacacttccttgaaactcctcctgcaatgtgttccacgcttctttggcagtcttagctcccataattcttgggaaaattggatcagtcaccgcttgttgcaaggtgaataacgcctttgaatttttctgtttatttttcttcaactctttttcttgagatgcattaagagctgaagtatccgcgggaatggtgaagccttcttctactatgtcccataaatcttgagatgaaaaatatgtttccattttaacacgccaaaaatcataattttcaccattaaagatagggacagaaatagttgacgattgagtagtgttatccataacttagaaaaaatattattagagtgggttaatagtacaaaggaaatttttgaagtagttgggaggattttggaatggtaggtaggtaatataactacgcccaatgtatgaccgaacgtagctctgatgccactgttggtagttgtttagatgatagttgatagttgatagttttagagaattgttttagaaagaaggctatgtcattgatttcgtgaattatcaattacaatataccaattgcctatttataggctcaactcaccaacctctcaatggtggtgaatgtttctacattactttaggtctttctagagttttcatgatagattag

SEQ ID NO: 14735 - DNA, 1092 bp, Glycine max
  Gm_smallRNAprecursor_7568
cacatgacatttcaagacacgtgtcagccttgtaataggatcatggacactcgacccttagcggtgaggctccctaactgacaagttatctctaacatattaatatcaatgttgttaatggcgaatggcggttcatggcggaaagtcaaaaatccgccataaaaatatggcggatggcgtagcggaaaatggcggatgtcatggcggacacaaaaaaaaaaaaaaacatatatataaactcattgaaattgaaaaaaacaaaggattgcattcaaataaactaaaaaagtttcatgagttcatacaataatcaagtaccaacaccaaataaactcattaaagagttcaaaataagaaaatgataaaaacataatgcaaagtgcaaagtgaaggttgaggctctaatcatcttctccaatcccaacataatcatcttcgttgttatcatatggtaatggagcatctccctctccctcttccccatcagacgcctcaaaattgaccatgatttcttcttcttcagattcaacatcaatattctcctcaacatctagatcctcatcattttcttggactgctttttgcttccttgatgaagatccaacaaccattgcctgttttttagaagtttgggcagcagcaacacttgttttttgctttttccgcctagtatacatcctacactctccaacccccgaagcctgatacacagttgcccaatttagagcatcatcatcttcaaataccaaatcatttccagcatcattatcatcatcttgatccatctctcccacgagccattcattgcatacatcaatatcattaagagaaattggatcaatttcatctcttgcattatatctttgcttcaattgttggttgtatttgacaaacaccaaatcatgcaacctcttgtgctcaagcctatttctttttttggaatgaatctacaacataacaaataaatgttgatttcaatctcaaatatactccaaatataacttgatcatcaaaattaaataaaattaaaaagtatagttagagttttgtcacaattacttgctcaaacacactccaatttctttcacatcc

SEQ ID NO: 14736 - DNA, 1130 bp, Glycine max
  Gm_smallRNAprecursor_7569
ttacaagattggtgctgaccactttggttccgactttgcaatggctcaaaggaaaacccattctcctagtaagaaacttttatcatactattttttttatgtattagtgttagaattcagaattctaagttatgctcttggttggtaattggtattgcagcatattggtggcgaatgtttgggtcacaaactccaaatttgcagaagctggctattaagattttgagtttgacttgcagtgcttcaggatgtgaaagaaattggagtgtgtttgagcaagtaattgtgacaaaactctaactatactttttaattttatttaattttgatgatcaagttatatttggagtatatttgagattgaaatcaacatttatttgttatgttgtagattcattccaaaaaaagaaataggcttgagcacaagaggttgcatgatttggtgtttgtcaaatacaaccaacaattgaagcaaagatataatgcaagagatgaaattgatccaatttctcttaatgatattgatgtatgcaatgaatggctcgtgggagagatggatcaagatgatgataatgatgctggaaatgatttggtatttgaagatgatgatgctctaaattgggcaactgtgtatcaggcttcgggggttggagagtgtaggatgtatactaggcggaaaaagcaaaaaacaagtgttgctgctgcccaaacttctaaaaaacaggcaatggttgttggatcttcatcaaggaagcaaaaagcagtccaagaaaatgatgaggatctagatgttgaggagaatattgatgttgaatctgaagaagaagaaatcatggtcaattttgaggcgtctgatggggaagagggagagggagatgctccattaccatatgataacaacgaagatgattgtgttgggattggagaagatgattagagcctcaaccttcactttgcactttgcattatgtttttatcattttcttattttgaactctttaatgagtttatttggtgttggtacttgattattgtatgaactcatgaaacttttttagtttatttgaatgcaatcctttgtttttttcaatttcaatgagtttatatatatgtttttttttttgtgtccg

SEQ ID NO: 14737 - DNA, 1077 bp, Glycine max
  Gm_smallRNAprecursor_7570
tcaagatgatgataatgatgctggaaatgatttggtatttgaagatgatgatgctctaaattgggcaactgtgtatcaggcttcgggggttggagagtgtaggatgtatactaggcggaaaaagcaaaaaacaagtgttgctgctgcccaaacttctaaaaaacaggcaatggttgttggatcttcatcaaggaagcaaaaagcagtccaagaaaatgatgaggatctagatgttgaggagaatattgatgttgaatctgaagaagaagaaatcatggtcaattttgaggcgtctgatggggaagagggagagggagatgctccattaccatatgataacaacgaagatgattgtgttgggattggagaagatgattagagcctcaaccttcactttgcactttgcattatgtttttatcattttcttattttgaactctttaatgagtttatttggtgttggtacttgattattgtatgaactcatgaaacttttttagtttatttgaatgcaatcctttgtttttttcaatttcaatgagtttatatatatgtttttttttttgtgtccgccatgacatccgccattttccgctacgccatccgccatatttttatggcggatttttgactttccgccatgaaccgccatccgccattaacaacattgcactgcattttgtaggcatgtcacataacttattcataatcgtttacttaaagttagagtttcactttaataatctacataatactgaaaagtccgtataagatattggagtgaaactctaattttttaacttttaattagagaatggtgttcgataatcaacgctctcacaatacaaaattattcacacccataaaggatcgtgagaacacaacaaatattacattatagtaaaaataataacaaacacaagaatataatatggttcaacacctcttgtctatgcccacagaaccatctaaaaagtatttcactatcacaaaaatgattacaagattgtaacccatcctaaatagtgtatcactctacaaactcgagtacatcactaaatgattacaagaaatgat

SEQ ID NO: 14738 - DNA, 1092 bp, Glycine max
  Gm_smallRNAprecursor_7571
tcattcatgagagcattagttagaaacttataccagagccaaggaaattacagaacgcaacacaatacaaaatactgtccctataagtgaaagagcttgaggccaaaccaacaacaatgttgttaatggcggatggcggttcatggcggaaagtcaaaaatccgccataaaaatatggcggatggcgtagcggaaaatggcggatgttatggcggacaaaaaaaaacatatatataaactcattgaaattgaaaaaaacaaaggattgcattcaaataaactaaaaaagtttcatgagttcatacaataatcaagtaccaacaccaaataaactcattaaagagttcaaaataagaaaatgataaaaacataatgcaaagtgcaaagtgaaggttgaggctctaatcatcttctccaatcccaacataatcatcttcgttgttatcatatggtaatgaagcatctccctctccctcttccccatcagacacctcaaaattgaccatgatttcttcttcttcagattcaacatcaatattctcctcaacatctagatcctcatcattttcttggactgctttttgcttccttgatgaagatccaacaaccattgcctattttttagaagtttgggcaacatcaacacttgttttttgctttttccgcctagtatacatcctacactctccaacccccgaagcctgatacacagttgcccaatttagagcatcatcatcttcaaataccaaatcatttccagcatcattatcatcatcttgatccatctctcccacgagccattcattgcatacatcaatatcattaagagaaattggatcaatttcatctcttgcattatatcttggcttcaattgttggttgtatttgacaaacaccaaatcatgcaacctcttgtgctcaagcctatttctttttttggaatgaatctacaacataacaaataaatgttgatttcaatcttaaatatactccaaataaaacttgatcatcaaaattaaataaaattaaaaagtatagttagagttttgtcacaattacttgctcaaacacactccaatttctttcacatcc

SEQ ID NO: 14739 - DNA, 1133 bp, Glycine max
  Gm_smallRNAprecursor_7572
gcgtagcggaaaatggcggatgttatggcggacaaaaaaaaacatatatataaactcattgaaattgaaaaaaacaaaggattgcattcaaataaactaaaaaagtttcatgagttcatacaataatcaagtaccaacaccaaataaactcattaaagagttcaaaataagaaaatgataaaaacataatgcaaagtgcaaagtgaaggttgaggctctaatcatcttctccaatcccaacataatcatcttcgttgttatcatatggtaatgaagcatctccctctccctcttccccatcagacacctcaaaattgaccatgatttcttcttcttcagattcaacatcaatattctcctcaacatctagatcctcatcattttcttggactgctttttgcttccttgatgaagatccaacaaccattgcctattttttagaagtttgggcaacatcaacacttgttttttgctttttccgcctagtatacatcctacactctccaacccccgaagcctgatacacagttgcccaatttagagcatcatcatcttcaaataccaaatcatttccagcatcattatcatcatcttgatccatctctcccacgagccattcattgcatacatcaatatcattaagagaaattggatcaatttcatctcttgcattatatcttggcttcaattgttggttgtatttgacaaacaccaaatcatgcaacctcttgtgctcaagcctatttctttttttggaatgaatctacaacataacaaataaatgttgatttcaatcttaaatatactccaaataaaacttgatcatcaaaattaaataaaattaaaaagtatagttagagttttgtcacaattacttgctcaaacacactccaatttctttcacatcctgaagcactgcaagtcaaactcaaaatcttaatagctagcttctgcaaatttggagtttgtgacccaaacattcgccaccaatatgctgcaataccaattaccaaccaagagcataacttagaattctgcattataacactaatacataaaaaaatagtatgataaaagtttcttactaggagaatgggttttcctttgagccattgcaaagtcggaaccaaagt

SEQ ID NO: 14740 - DNA, 1177 bp, Glycine max
  Gm_smallRNAprecursor_7573
tgttttgtgtttaggattttccattcctctactggttgatggtttgtgtgagtatctcctccttggaaatctctttgtattgaccggtttattctcatggatttcttttttagaggattgttttttcttttgttttggacaggccggtagaccaaattgttcgcagaaagaacctaaatctctctttgtttgagccttttctttggctaattgcctctgaattttgtcatcctgacaaatttttaaggctaccttttggacgtaagaaattagttgaccatagcttaaactttcatatggaatatctccattgacagattgactacggattttatctctaaccttgtctcctaatgatctgggaagaccagctagaaatttttctttccaaaaaggttgttgactatcttctcttgtgtaaaccctagttaggaaagtatctctataccacctaaaatccgctaaggttctacacttaagatttgacaataattctgcagacctatctttccacaaggatgggtctccaatgaaatgttgggctattgtaaaaattaatgtgttaacagcgtcaggaatctctttatcatcgtcattagtaatgacttttccattgagatccgtcttaactgcgctgtaaatttttgatttctcttcgttagtgagataattatcccaccatccttttaattgtccagaaaatcctgccactaagatatctataatggtctcttctgaacattcatgggaggtttggtaagccgtagccaccatggtcatatgttggagtgtattcatgatgttatactccgtttgtgcatctatgttccattcatagatgttgtttgcactaaaactcttaaaattgttttcacctctttcttctaatagaaggtcgggggcagttggacgttgataatataatttggagggtgtttccagtgtttggaattaattggatttatattcttttctgacactgatcctatctcagttgtgttatctgagttttggtcactatcttcattaataacattgattaatttggaggtacttcttgttaccattttggaagtattttctgaggcttggggggtatctggaatgactttaagtaaactaccaatcttgtttagtaattcactatggttgtcacctacgccttcaattaaggatt

SEQ ID NO: 14741 - DNA, 1080 bp, Glycine max
  Gm_smallRNAprecursor_7574
atgatttcgttttagaaacaatggccctatttgatacaggggctgattcaaactgcattttagaaggattaattcctacaaaattctttgagaaaacctcagaaaaattaagtacggcaaacggctcaaaattaaaaattaattttaagctatcaaatgcaattattgaaaaccaaggtcttaagattaacacaaactttcttctggtaaaaaaccttaagaatgaagtaatcttaggaacgcccttcattagagccctgtttcccatccaaatatctaatgaaggaataaccacaaattatttaggaagaaaaattacatttaatttttctactaaaccaatttccagaaatataaatcttatagaaaataagattaatcaaattaacttcttaaaagaagaagtatcttttaataatattcagatacaactgggaaaaccccaagtaaaagaaagaattcaatctttattaaatcatattgaatcgaccgtttgttctgaattgccacatgcattttgggacagaaagaaacatattgtcgatctcccttatgagaaagactttagggaaaaacaaattcccacaaaagccagaccaatccaaatgaatgaagaacttcttcaatactgtcaaaaggaaatcaaggatttgcttgataaaggcctaatccggaaaagcaaaagcccatggtcttgtgcggctttttatgttaacaaacaatctgagattgagcgtgggacaccccgcttagtcataaattacaaaccattaaatcaagcattacaatggattaggtattctattccaaacaaaaaatatttgcttaacagattaaattctgcaaagatattttcaaaatttgatatgaaatctggattttggcaaatccaaatccaagaatcagacaggtacaaaacagcgtttactgtacctttcgggcaatatgaatggaacgtgatgccattcggactgaagaatgccccttcagaatttcaaaaaattatgaacgatatttttaatccctattcaaaatttgtcattgtctacatagatgatgttttaatcttttcccaaaaca

SEQ ID NO: 14742 - DNA, 1198 bp, Glycine max
  Gm_smallRNAprecursor_7575
acagaaagaaacatattgtcgatctcccttatgagaaagactttagggaaaaacaaattcccacaaaagccagaccaatccaaatgaatgaagaacttcttcaatactgtcaaaaggaaatcaaggatttgcttgataaaggcctaatccggaaaagcaaaagcccatggtcttgtgcggctttttatgttaacaaacaatctgagattgagcgtgggacaccccgcttagtcataaattacaaaccattaaatcaagcattacaatggattaggtattctattccaaacaaaaaatatttgcttaacagattaaattctgcaaagatattttcaaaatttgatatgaaatctggattttggcaaatccaaatccaagaatcagacaggtacaaaacagcgtttactgtacctttcgggcaatatgaatggaacgtgatgccattcggactgaagaatgccccttcagaatttcaaaaaattatgaacgatatttttaatccctattcaaaatttgtcattgtctacatagatgatgttttaatcttttcccaaaacattgaccaacatttcaaacatctccaaaccttcatacatatcatcaaacaaaatggtttggcagtctccaaatcaaaaatcaatcttttccaaactcgaattcgattccttggtcacaatatatatcagggtacaatcattccaatcgaaaggtcaatagagtttgccagcaaattccccaaccaaatcttagacaaaacccagttacaaagatttctaggttgtctaaattacgtaggagaatttgtcccctatttaaataatattgtcaagccattacatgataggctgaagaaaaatccgcctccttggtctgacctccatacacaaacggttaaagaaatcaaagtcaaagtccaatccattaaatgtctgtatcttcctattccacaggcatttaaaattgttgaaactgatgcttcagacataggttatggtggcatcctcaaacaaagagtccatggccaagatcatgtcattgcatatacatcaaaacattggaatcctgcacaattaaaatattcaactgttaaaaaagaagttttagcaattgttttgtgcatttccaaatttcaatcggatttattaaaccaaaaatttttaatcagggttgattgtaaatcagccaaagatattttaca

SEQ ID NO: 14743 - DNA, 1234 bp, Glycine max
  Gm_smallRNAprecursor_7576
acagaaagaaacatattgtcgatctcccttatgagaaagactttagggaaaaacaaattcccacaaaagccagaccaatccaaatgaatgaagaacttcttcaatactgtcaaaaggaaatcaaggatttgcttgataaaggcctaatccggaaaagcaaaagcccatggtcttgtgcggctttttatgttaacaaacaatctgagattgagcgtgggacaccccgcttagtcataaattacaaaccattaaatcaagcattacaatggattaggtattctattccaaacaaaaaatatttgcttaacagattaaattctgcaaagatattttcaaaatttgatatgaaatctggattttggcaaatccaaatccaagaatcagacaggtacaaaacagcgtttactgtacctttcgggcaatatgaatggaacgtgatgccattcggactgaagaatgccccttcagaatttcaaaaaattatgaacgatatttttaatccctattcaaaatttgtcattgtctacatagatgatgttttaatcttttcccaaaacattgaccaacatttcaaacatctccaaaccttcatacatatcatcaaacaaaatggtttggcagtctccaaatcaaaaatcaatcttttccaaactcgaattcgattccttggtcacaatatatatcagggtacaatcattccaatcgaaaggtcaatagagtttgccagcaaattccccaaccaaatcttagacaaaacccagttacaaagatttctaggttgtctaaattacgtaggagaatttgtcccctatttaaataatattgtcaagccattacatgataggctgaagaaaaatccgcctccttggtctgacctccatacacaaacggttaaagaaatcaaagtcaaagtccaatccattaaatgtctgtatcttcctattccacaggcatttaaaattgttgaaactgatgcttcagacataggttatggtggcatcctcaaacaaagagtccatggccaagatcatgtcattgcatatacatcaaaacattggaatcctgcacaattaaaatattcaactgttaaaaaagaagttttagcaattgttttgtgcatttccaaatttcaatcggatttattaaaccaaaaatttttaatcagggttgattgtaaatcagccaaagatattttacaaaaagatgttaaaaaccttgcctcaaaacaaatttt

SEQ ID NO: 14744 - DNA, 1073 bp, Glycine max
  Gm_smallRNAprecursor_7577
tgtacctttcgggcaatatgaatggaacgtgatgccattcggactgaagaatgccccttcagaatttcaaaaaattatgaacgatatttttaatccctattcaaaatttgtcattgtctacatagatgatgttttaatcttttcccaaaacattgaccaacatttcaaacatctccaaaccttcatacatatcatcaaacaaaatggtttggcagtctccaaatcaaaaatcaatcttttccaaactcgaattcgattccttggtcacaatatatatcagggtacaatcattccaatcgaaaggtcaatagagtttgccagcaaattccccaaccaaatcttagacaaaacccagttacaaagatttctaggttgtctaaattacgtaggagaatttgtcccctatttaaataatattgtcaagccattacatgataggctgaagaaaaatccgcctccttggtctgacctccatacacaaacggttaaagaaatcaaagtcaaagtccaatccattaaatgtctgtatcttcctattccacaggcatttaaaattgttgaaactgatgcttcagacataggttatggtggcatcctcaaacaaagagtccatggccaagatcatgtcattgcatatacatcaaaacattggaatcctgcacaattaaaatattcaactgttaaaaaagaagttttagcaattgttttgtgcatttccaaatttcaatcggatttattaaaccaaaaatttttaatcagggttgattgtaaatcagccaaagatattttacaaaaagatgttaaaaaccttgcctcaaaacaaatttttgcacgatggcaagcaattttaagtgtctttgattttgacatagaatacatcaagggcacctcaaattcactacctgactaccttacccgtgaattcttacagaaaagtggtaatgcctcctaaggcatcgggaatctccctacggggaggaaggagtacaggcaaaggagccaggctggctcttccagagccaaccatcaagaaatcatctacctcttctgggtcaccaacccaggctgggtca

SEQ ID NO: 14745 - DNA, 1071 bp, Glycine max
  Gm_smallRNAprecursor_7578
tacctttcgggcaatatgaatggaacgtgatgccattcggactgaagaatgccccttcagaatttcaaaaaattatgaacgatatttttaatccctattcaaaatttgtcattgtctacatagatgatgttttaatcttttcccaaaacattgaccaacatttcaaacatctccaaaccttcatacatatcatcaaacaaaatggtttggcagtctccaaatcaaaaatcaatcttttccaaactcgaattcgattccttggtcacaatatatatcagggtacaatcattccaatcgaaaggtcaatagagtttgccagcaaattccccaaccaaatcttagacaaaacccagttacaaagatttctaggttgtctaaattacgtaggagaatttgtcccctatttaaataatattgtcaagccattacatgataggctgaagaaaaatccgcctccttggtctgacctccatacacaaacggttaaagaaatcaaagtcaaagtccaatccattaaatgtctgtatcttcctattccacaggcatttaaaattgttgaaactgatgcttcagacataggttatggtggcatcctcaaacaaagagtccatggccaagatcatgtcattgcatatacatcaaaacattggaatcctgcacaattaaaatattcaactgttaaaaaagaagttttagcaattgttttgtgcatttccaaatttcaatcggatttattaaaccaaaaatttttaatcagggttgattgtaaatcagccaaagatattttacaaaaagatgttaaaaaccttgcctcaaaacaaatttttgcacgatggcaagcaattttaagtgtctttgattttgacatagaatacatcaagggcacctcaaattcactacctgactaccttacccgtgaattcttacagaaaagtggtaatgcctcctaaggcatcgggaatctccctacggggaggaaggagtacaggcaaaggagccaggctggctcttccagagccaaccatcaagaaatcatctacctcttctgggtcaccaacccaggctgggtca

SEQ ID NO: 14746 - DNA, 1115 bp, Glycine max
  Gm_smallRNAprecursor_7579
tcaatagagtttgccagcaaattccccaaccaaatcttagacaaaacccagttacaaagatttctaggttgtctaaattacgtaggagaatttgtcccctatttaaataatattgtcaagccattacatgataggctgaagaaaaatccgcctccttggtctgacctccatacacaaacggttaaagaaatcaaagtcaaagtccaatccattaaatgtctgtatcttcctattccacaggcatttaaaattgttgaaactgatgcttcagacataggttatggtggcatcctcaaacaaagagtccatggccaagatcatgtcattgcatatacatcaaaacattggaatcctgcacaattaaaatattcaactgttaaaaaagaagttttagcaattgttttgtgcatttccaaatttcaatcggatttattaaaccaaaaatttttaatcagggttgattgtaaatcagccaaagatattttacaaaaagatgttaaaaaccttgcctcaaaacaaatttttgcacgatggcaagcaattttaagtgtctttgattttgacatagaatacatcaagggcacctcaaattcactacctgactaccttacccgtgaattcttacagaaaagtggtaatgcctcctaaggcatcgggaatctccctacggggaggaaggagtacaggcaaaggagccaggctggctcttccagagccaaccatcaagaaatcatctacctcttctgggtcaccaacccaggctgggtcatctacccagaaaaacaatttagaagggtcatcaacccagattgcctcaatcaaacctgagccatccactcaggaatctcccaaaccggcaaccgccaaacaaacatcggccgactatgcatggccaattgaaacccttcaggcccttcaagatatgggtctgaccaaatttccaaaaataatcaaaaaatcttgggcagacattgcctcagaatctgatgatgaatctgaatcaaatttacaaacaatgatccaaaatgcgtcaatgaccaaaacagccaccaatactaaaggaaaactacctttagccaaagcccaaacaccacctaccaaacaaactaacaatt

SEQ ID NO: 14747 - DNA, 1174 bp, Glycine max
  Gm_smallRNAprecursor_7580
acaaagagtccatggccaagatcatgtcattgcatatacatcaaaacattggaatcctgcacaattaaaatattcaactgttaaaaaagaagttttagcaattgttttgtgcatttccaaatttcaatcggatttattaaaccaaaaatttttaatcagggttgattgtaaatcagccaaagatattttacaaaaagatgttaaaaaccttgcctcaaaacaaatttttgcacgatggcaagcaattttaagtgtctttgattttgacatagaatacatcaagggcacctcaaattcactacctgactaccttacccgtgaattcttacagaaaagtggtaatgcctcctaaggcatcgggaatctccctacggggaggaaggagtacaggcaaaggagccaggctggctcttccagagccaaccatcaagaaatcatctacctcttctgggtcaccaacccaggctgggtcatctacccagaaaaacaatttagaagggtcatcaacccagattgcctcaatcaaacctgagccatccactcaggaatctcccaaaccggcaaccgccaaacaaacatcggccgactatgcatggccaattgaaacccttcaggcccttcaagatatgggtctgaccaaatttccaaaaataatcaaaaaatcttgggcagacattgcctcagaatctgatgatgaatctgaatcaaatttacaaacaatgatccaaaatgcgtcaatgaccaaaacagccaccaatactaaaggaaaactacctttagccaaagcccaaacaccacctaccaaacaaactaacaattatatttataaaaataaattgttaactgttttgcagatggaacctgaattttgggacaaaaatcccttcaaggcgacggccaaggctttcccaccaggatttcactacaaaccaaccaccatcctgaagacaagaactttttatgaattgattttggtagattcaaactcagtatctatcaaacatttcaaagatccaaaagaccaaaccttaaacacccactcaaccatccaaatactaaaagttcttcaaccaagacactttggtacggacttgaacaaaggaaagagattctcagttccatttgatccggtaggttatacctattgggattacgttgatgcttggactaaggt

SEQ ID NO: 14748 - DNA, 1173 bp, Glycine max
  Gm_smallRNAprecursor_7581
caaagagtccatggccaagatcatgtcattgcatatacatcaaaacattggaatcctgcacaattaaaatattcaactgttaaaaaagaagttttagcaattgttttgtgcatttccaaatttcaatcggatttattaaaccaaaaatttttaatcagggttgattgtaaatcagccaaagatattttacaaaaagatgttaaaaaccttgcctcaaaacaaatttttgcacgatggcaagcaattttaagtgtctttgattttgacatagaatacatcaagggcacctcaaattcactacctgactaccttacccgtgaattcttacagaaaagtggtaatgcctcctaaggcatcgggaatctccctacggggaggaaggagtacaggcaaaggagccaggctggctcttccagagccaaccatcaagaaatcatctacctcttctgggtcaccaacccaggctgggtcatctacccagaaaaacaatttagaagggtcatcaacccagattgcctcaatcaaacctgagccatccactcaggaatctcccaaaccggcaaccgccaaacaaacatcggccgactatgcatggccaattgaaacccttcaggcccttcaagatatgggtctgaccaaatttccaaaaataatcaaaaaatcttgggcagacattgcctcagaatctgatgatgaatctgaatcaaatttacaaacaatgatccaaaatgcgtcaatgaccaaaacagccaccaatactaaaggaaaactacctttagccaaagcccaaacaccacctaccaaacaaactaacaattatatttataaaaataaattgttaactgttttgcagatggaacctgaattttgggacaaaaatcccttcaaggcgacggccaaggctttcccaccaggatttcactacaaaccaaccaccatcctgaagacaagaactttttatgaattgattttggtagattcaaactcagtatctatcaaacatttcaaagatccaaaagaccaaaccttaaacacccactcaaccatccaaatactaaaagttcttcaaccaagacactttggtacggacttgaacaaaggaaagagattctcagttccatttgatccggtaggttatacctattgggattacgttgatgcttggactaaggt

SEQ ID NO: 14749 - DNA, 1173 bp, Glycine max; identical to SEQ ID NO: 14748
  Gm_smallRNAprecursor_7582

SEQ ID NO: 14750 - DNA, 1130 bp, Glycine max
  Gm_smallRNAprecursor_7583
caaacctgagccatccactcaggaatctcccaaaccggcaaccgccaaacaaacatcggccgactatgcatggccaattgaaacccttcaggcccttcaagatatgggtctgaccaaatttccaaaaataatcaaaaaatcttgggcagacattgcctcagaatctgatgatgaatctgaatcaaatttacaaacaatgatccaaaatgcgtcaatgaccaaaacagccaccaatactaaaggaaaactacctttagccaaagcccaaacaccacctaccaaacaaactaacaattatatttataaaaataaattgttaactgttttgcagatggaacctgaattttgggacaaaaatcccttcaaggcgacggccaaggctttcccaccaggatttcactacaaaccaaccaccatcctgaagacaagaactttttatgaattgattttggtagattcaaactcagtatctatcaaacatttcaaagatccaaaagaccaaaccttaaacacccactcaaccatccaaatactaaaagttcttcaaccaagacactttggtacggacttgaacaaaggaaagagattctcagttccatttgatccggtaggttatacctattgggattacgttgatgcttggactaaggtgttttggcaccaaaatacccgcttcaagcattcatggctgatatatttcaagaccaacacaatttacaattttcccaattggtttttgcaatggtgggacttctttggaccaatcccagagatattcccagaaacggtccaacaaggattttcccaatttaagaaacaatacaattcgcaggaatcacgaattccagcagatcttaaatacttttcaagctttgcactgtcatggatattctcatggcaatatcgttacagcaagactgaaaagacaaaccaatatccatcactacaaagacacgcatttgtaaaatggtggacacaatttgactcatccaaagcggatccagaacaagtaaaactatggttcaaatcccatccagaattcctcaaaatggctgatccagagacttctgtgtttttgaaccaaaagtctcacctggcagcatttttagcaggatcgacatcaaaggagg

SEQ ID NO: 14751 - DNA, 1087 bp, Glycine max
  Gm_smallRNAprecursor_7584
tgagccatccactcaggaatctcccaaaccggcaaccgccaaacaaacatcggccgactatgcatggccaattgaaacccttcaggcccttcaagatatgggtctgaccaaatttccaaaaataatcaaaaaatcttgggcagacattgcctcagaatctgatgatgaatctgaatcaaatttacaaacaatgatccaaaatgcgtcaatgaccaaaacagccaccaatactaaaggaaaactacctttagccaaagcccaaacaccacctaccaaacaaactaacaattatatttataaaaataaattgttaactgttttgcagatggaacctgaattttgggacaaaaatcccttcaaggcgacggccaaggctttcccaccaggatttcactacaaaccaaccaccatcctgaagacaagaactttttatgaattgattttggtagattcaaactcagtatctatcaaacatttcaaagatccaaaagaccaaaccttaaacacccactcaaccatccaaatactaaaagttcttcaaccaagacactttggtacggacttgaacaaaggaaagagattctcagttccatttgatccggtaggttatacctattgggattacgttgatgcttggactaaggtgttttggcaccaaaatacccgcttcaagcattcatggctgatatatttcaagaccaacacaatttacaattttcccaattggtttttgcaatggtgggacttctttggaccaatcccagagatattcccagaaacggtccaacaaggattttcccaatttaagaaacaatacaattcgcaggaatcacgaattccagcagatcttaaatacttttcaagctttgcactgtcatggatattctcatggcaatatcgttacagcaagactgaaaagacaaaccaatatccatcactacaaagacacgcatttgtaaaatggtggacacaatttgactcatccaaagcggatccagaacaagtaaaactatggttcaaatcccatccagaattcctcaaaatggctgatccagagacttctgtgtttttgaaccaaaagtctcac

SEQ ID NO: 14752 - DNA, 1124 bp, Glycine max
  Gm_smallRNAprecursor_7585
tgagccatccactcaggaatctcccaaaccggcaaccgccaaacaaacatcggccgactatgcatggccaattgaaacccttcaggcccttcaagatatgggtctgaccaaatttccaaaaataatcaaaaaatcttgggcagacattgcctcagaatctgatgatgaatctgaatcaaatttacaaacaatgatccaaaatgcgtcaatgaccaaaacagccaccaatactaaaggaaaactacctttagccaaagcccaaacaccacctaccaaacaaactaacaattatatttataaaaataaattgttaactgttttgcagatggaacctgaattttgggacaaaaatcccttcaaggcgacggccaaggctttcccaccaggatttcactacaaaccaaccaccatcctgaagacaagaactttttatgaattgattttggtagattcaaactcagtatctatcaaacatttcaaagatccaaaagaccaaaccttaaacacccactcaaccatccaaatactaaaagttcttcaaccaagacactttggtacggacttgaacaaaggaaagagattctcagttccatttgatccggtaggttatacctattgggattacgttgatgcttggactaaggtgttttggcaccaaaatacccgcttcaagcattcatggctgatatatttcaagaccaacacaatttacaattttcccaattggtttttgcaatggtgggacttctttggaccaatcccagagatattcccagaaacggtccaacaaggattttcccaatttaagaaacaatacaattcgcaggaatcacgaattccagcagatcttaaatacttttcaagctttgcactgtcatggatattctcatggcaatatcgttacagcaagactgaaaagacaaaccaatatccatcactacaaagacacgcatttgtaaaatggtggacacaatttgactcatccaaagcggatccagaacaagtaaaactatggttcaaatcccatccagaattcctcaaaatggctgatccagagacttctgtgtttttgaaccaaaagtctcacctggcagcatttttagcaggatcgacatcaaaggagg

SEQ ID NO: 14753 - DNA, 1247 bp, Glycine max
  Gm_smallRNAprecursor_7586
cccttcaagatatgggtctgaccaaatttccaaaaataatcaaaaaatcttgggcagacattgcctcagaatctgatgatgaatctgaatcaaatttacaaacaatgatccaaaatgcgtcaatgaccaaaacagccaccaatactaaaggaaaactacctttagccaaagcccaaacaccacctaccaaacaaactaacaattatatttataaaaataaattgttaactgttttgcagatggaacctgaattttgggacaaaaatcccttcaaggcgacggccaaggctttcccaccaggatttcactacaaaccaaccaccatcctgaagacaagaactttttatgaattgattttggtagattcaaactcagtatctatcaaacatttcaaagatccaaaagaccaaaccttaaacacccactcaaccatccaaatactaaaagttcttcaaccaagacactttggtacggacttgaacaaaggaaagagattctcagttccatttgatccggtaggttatacctattgggattacgttgatgcttggactaaggtgttttggcaccaaaatacccgcttcaagcattcatggctgatatatttcaagaccaacacaatttacaattttcccaattggtttttgcaatggtgggacttctttggaccaatcccagagatattcccagaaacggtccaacaaggattttcccaatttaagaaacaatacaattcgcaggaatcacgaattccagcagatcttaaatacttttcaagctttgcactgtcatggatattctcatggcaatatcgttacagcaagactgaaaagacaaaccaatatccatcactacaaagacacgcatttgtaaaatggtggacacaatttgactcatccaaagcggatccagaacaagtaaaactatggttcaaatcccatccagaattcctcaaaatggctgatccagagacttctgtgtttttgaaccaaaagtctcacctggcagcatttttagcaggatcgacatcaaaggaggtcttagctaaaaatctgaaggaagttctacaaatgttacaacaagaagaagaagtttcatcctcaaagaaggaagaaacaagttctgccgaagaagacgaagaagatcccttttaccaaaacgaagatgattgttttggtatctgtttagattaaatttaatttcggtcacaaaaccgtttgtttgtaattaatgtgtaattaatgatg

SEQ ID NO: 14754 - DNA, 1248 bp, Glycine max
  Gm_smallRNAprecursor_7587
cccttcaagatatgggtctgaccaaatttccaaaaataatcaaaaaatcttgggcagacattgcctcagaatctgatgatgaatctgaatcaaatttacaaacaatgatccaaaatgcgtcaatgaccaaaacagccaccaatactaaaggaaaactacctttagccaaagcccaaacaccacctaccaaacaaactaacaattatatttataaaaataaattgttaactgttttgcagatggaacctgaattttgggacaaaaatcccttcaaggcgacggccaaggctttcccaccaggatttcactacaaaccaaccaccatcctgaagacaagaactttttatgaattgattttggtagattcaaactcagtatctatcaaacatttcaaagatccaaaagaccaaaccttaaacacccactcaaccatccaaatactaaaagttcttcaaccaagacactttggtacggacttgaacaaaggaaagagattctcagttccatttgatccggtaggttatacctattgggattacgttgatgcttggactaaggtgttttggcaccaaaatacccgcttcaagcattcatggctgatatatttcaagaccaacacaatttacaattttcccaattggtttttgcaatggtgggacttctttggaccaatcccagagatattcccagaaacggtccaacaaggattttcccaatttaagaaacaatacaattcgcaggaatcacgaattccagcagatcttaaatacttttcaagctttgcactgtcatggatattctcatggcaatatcgttacagcaagactgaaaagacaaaccaatatccatcactacaaagacacgcatttgtaaaatggtggacacaatttgactcatccaaagcggatccagaacaagtaaaactatggttcaaatcccatccagaattcctcaaaatggctgatccagagacttctgtgtttttgaaccaaaagtctcacctggcagcatttttagcaggatcgacatcaaaggaggtcttagctaaaaatctgaaggaagttctacaaatgttacaacaagaagaagaagtttcatcctcaaagaaggaagaaacaagttctgccgaagaagacgaagaagatcccttttaccaaaacgaagatgattgttttggtatctgtttagattaaatttaatttcggtcacaaaaccgtttgtttgtaattaatgtgtaattaatgatgg

SEQ ID NO: 14755 - DNA, 1146 bp, Glycine max
  Gm_smallRNAprecursor_7588
acaatgatccaaaatgcgtcaatgaccaaaacagccaccaatactaaaggaaaactacctttagccaaagcccaaacaccacctaccaaacaaactaacaattatatttataaaaataaattgttaactgttttgcagatggaacctgaattttgggacaaaaatcccttcaaggcgacggccaaggctttcccaccaggatttcactacaaaccaaccaccatcctgaagacaagaactttttatgaattgattttggtagattcaaactcagtatctatcaaacatttcaaagatccaaaagaccaaaccttaaacacccactcaaccatccaaatactaaaagttcttcaaccaagacactttggtacggacttgaacaaaggaaagagattctcagttccatttgatccggtaggttatacctattgggattacgttgatgcttggactaaggtgttttggcaccaaaatacccgcttcaagcattcatggctgatatatttcaagaccaacacaatttacaattttcccaattggtttttgcaatggtgggacttctttggaccaatcccagagatattcccagaaacggtccaacaaggattttcccaatttaagaaacaatacaattcgcaggaatcacgaattccagcagatcttaaatacttttcaagctttgcactgtcatggatattctcatggcaatatcgttacagcaagactgaaaagacaaaccaatatccatcactacaaagacacgcatttgtaaaatggtggacacaatttgactcatccaaagcggatccagaacaagtaaaactatggttcaaatcccatccagaattcctcaaaatggctgatccagagacttctgtgtttttgaaccaaaagtctcacctggcagcatttttagcaggatcgacatcaaaggaggtcttagctaaaaatctgaaggaagttctacaaatgttacaacaagaagaagaagtttcatcctcaaagaaggaagaaacaagttctgccgaagaagacgaagaagatcccttttaccaaaacgaagatgattgttttggtatctgtttagattaaatttaatttcggtcacaaaaccgtttgtttgtaattaatgtgtaattaatgatg

SEQ ID NO: 14756 - DNA, 1146 bp, Glycine max; identical to SEQ ID NO: 14755
  Gm_smallRNAprecursor_7589

SEQ ID NO: 14757 - DNA, 1147 bp, Glycine max
  Gm_smallRNAprecursor_7590
acaatgatccaaaatgcgtcaatgaccaaaacagccaccaatactaaaggaaaactacctttagccaaagcccaaacaccacctaccaaacaaactaacaattatatttataaaaataaattgttaactgttttgcagatggaacctgaattttgggacaaaaatcccttcaaggcgacggccaaggctttcccaccaggatttcactacaaaccaaccaccatcctgaagacaagaactttttatgaattgattttggtagattcaaactcagtatctatcaaacatttcaaagatccaaaagaccaaaccttaaacacccactcaaccatccaaatactaaaagttcttcaaccaagacactttggtacggacttgaacaaaggaaagagattctcagttccatttgatccggtaggttatacctattgggattacgttgatgcttggactaaggtgttttggcaccaaaatacccgcttcaagcattcatggctgatatatttcaagaccaacacaatttacaattttcccaattggtttttgcaatggtgggacttctttggaccaatcccagagatattcccagaaacggtccaacaaggattttcccaatttaagaaacaatacaattcgcaggaatcacgaattccagcagatcttaaatacttttcaagctttgcactgtcatggatattctcatggcaatatcgttacagcaagactgaaaagacaaaccaatatccatcactacaaagacacgcatttgtaaaatggtggacacaatttgactcatccaaagcggatccagaacaagtaaaactatggttcaaatcccatccagaattcctcaaaatggctgatccagagacttctgtgtttttgaaccaaaagtctcacctggcagcatttttagcaggatcgacatcaaaggaggtcttagctaaaaatctgaaggaagttctacaaatgttacaacaagaagaagaagtttcatcctcaaagaaggaagaaacaagttctgccgaagaagacgaagaagatcccttttaccaaaacgaagatgattgttttggtatctgtttagattaaatttaatttcggtcacaaaaccgtttgtttgtaattaatgtgtaattaatgatgg

SEQ ID NO: 14758 - DNA, 1153 bp, Glycine max
  Gm_smallRNAprecursor_7591
gattaaatttaatttcggtcacaaaaccgtttgtttgtaattaatgtgtaattaatgatggacaatactacctgtcctgtagccattaaagtcccggtcaaaactacttgtcttgtaacaaacagtcaaatagtcccggtcaaaactacttgtcttgtaacaaacagtcaaatagtcccggtcaaaactaccggcaactaccggtcttagattttttggctatataaggagtcctcaagtatgttgtgaggcaccctttcatttagtcatttttcaggtttcggaagagaggtgctctgaaacaagatttttgtaagcgcttctttctagattcaataaatttctatttttcatctttctctcttctcccttcaccgatcctgtgcggctctgccgccgcttcggtttctttgtttatgaaaacctgggttttgtaagccggtctccggtgtgaccttgatatctgttttcaaagtttataattcttccgtttgattttatcatactgcattcttacttcctatctgtccgtttgatcctattccgctgacctctggtatcagagcctgatggggaagtaggaatagtgtccgtaagggcatatgttaactgaacttatggatctgaagcatgtacagtaattttaatttaaacagtatgtgtttgaacagtattttctggaagcacagcagtctgatattttagttgaatgatactgtagcagtaagtcccgtggatgagaaagggcagtaaggctaaggtgtattgttcaaataaaatattgagacataatatactggtggctataggagtaatgttcaaactatattgtctgtaattcatcaaaaaaaaaaaaataatcttcttttcatttattcagatccaagaagttctgtaacatatagccttatggaaagattcctatggaaccaaatgaaggcaaagatattagagaatgttttaattatgtctagattattgcgatccttttcccgtatctcttttcgctcaaattcctcctcttcatcttcttcaagaaacaccaatctcttaaatgatcaagataaccagacccaagaggtcgccccaaaacataatctcttcgatgaggaagtccgattcgaagatattaaccaaaacatggatgactgga

SEQ ID NO: 14759 - DNA, 1064 bp, Glycine max
  Gm_smallRNAprecursor_7592
ttaaagtcccggtcaaaactacttgtcttgtaacaaacagtcaaatagtcccggtcaaaactacttgtcttgtaacaaacagtcaaatagtcccggtcaaaactaccggcaactaccggtcttagattttttggctatataaggagtcctcaagtatgttgtgaggcaccctttcatttagtcatttttcaggtttcggaagagaggtgctctgaaacaagatttttgtaagcgcttctttctagattcaataaatttctatttttcatctttctctcttctcccttcaccgatcctgtgcggctctgccgccgcttcggtttctttgtttatgaaaacctgggttttgtaagccggtctccggtgtgaccttgatatctgttttcaaagtttataattcttccgtttgattttatcatactgcattcttacttcctatctgtccgtttgatcctattccgctgacctctggtatcagagcctgatggggaagtaggaatagtgtccgtaagggcatatgttaactgaacttatggatctgaagcatgtacagtaattttaatttaaacagtatgtgtttgaacagtattttctggaagcacagcagtctgatattttagttgaatgatactgtagcagtaagtcccgtggatgagaaagggcagtaaggctaaggtgtattgttcaaataaaatattgagacataatatactggtggctataggagtaatgttcaaactatattgtctgtaattcatcaaaaaaaaaaaaataatcttcttttcatttattcagatccaagaagttctgtaacatatagccttatggaaagattcctatggaaccaaatgaaggcaaagatattagagaatgttttaattatgtctagattattgcgatccttttcccgtatctcttttcgctcaaattcctcctcttcatcttcttcaagaaacaccaatctcttaaatgatcaagataaccagacccaagaggtcgccccaaaacataatctcttcgatgaggaagtccgattcgaagatattaaccaaaacatggatgac

SEQ ID NO: 14760 - DNA, 1079 bp, Glycine max
  Gm_smallRNAprecursor_7593
ttaaagtcccggtcaaaactacttgtcttgtaacaaacagtcaaatagtcccggtcaaaactacttgtcttgtaacaaacagtcaaatagtcccggtcaaaactaccggcaactaccggtcttagattttttggctatataaggagtcctcaagtatgttgtgaggcaccctttcatttagtcatttttcaggtttcggaagagaggtgctctgaaacaagatttttgtaagcgcttctttctagattcaataaatttctatttttcatctttctctcttctcccttcaccgatcctgtgcggctctgccgccgcttcggtttctttgtttatgaaaacctgggttttgtaagccggtctccggtgtgaccttgatatctgttttcaaagtttataattcttccgtttgattttatcatactgcattcttacttcctatctgtccgtttgatcctattccgctgacctctggtatcagagcctgatggggaagtaggaatagtgtccgtaagggcatatgttaactgaacttatggatctgaagcatgtacagtaattttaatttaaacagtatgtgtttgaacagtattttctggaagcacagcagtctgatattttagttgaatgatactgtagcagtaagtcccgtggatgagaaagggcagtaaggctaaggtgtattgttcaaataaaatattgagacataatatactggtggctataggagtaatgttcaaactatattgtctgtaattcatcaaaaaaaaaaaaataatcttcttttcatttattcagatccaagaagttctgtaacatatagccttatggaaagattcctatggaaccaaatgaaggcaaagatattagagaatgttttaattatgtctagattattgcgatccttttcccgtatctcttttcgctcaaattcctcctcttcatcttcttcaagaaacaccaatctcttaaatgatcaagataaccagacccaagaggtcgccccaaaacataatctcttcgatgaggaagtccgattcgaagatattaaccaaaacatggatgactggaacattccagaa

SEQ ID NO: 14761 - DNA, 1080 bp, Glycine max
  Gm_smallRNAprecursor_7594
ttaaagtcccggtcaaaactacttgtcttgtaacaaacagtcaaatagtcccggtcaaaactacttgtcttgtaacaaacagtcaaatagtcccggtcaaaactaccggcaactaccggtcttagattttttggctatataaggagtcctcaagtatgttgtgaggcaccctttcatttagtcatttttcaggtttcggaagagaggtgctctgaaacaagatttttgtaagcgcttctttctagattcaataaatttctatttttcatctttctctcttctcccttcaccgatcctgtgcggctctgccgccgcttcggtttctttgtttatgaaaacctgggttttgtaagccggtctccggtgtgaccttgatatctgttttcaaagtttataattcttccgtttgattttatcatactgcattcttacttcctatctgtccgtttgatcctattccgctgacctctggtatcagagcctgatggggaagtaggaatagtgtccgtaagggcatatgttaactgaacttatggatctgaagcatgtacagtaattttaatttaaacagtatgtgtttgaacagtattttctggaagcacagcagtctgatattttagttgaatgatactgtagcagtaagtcccgtggatgagaaagggcagtaaggctaaggtgtattgttcaaataaaatattgagacataatatactggtggctataggagtaatgttcaaactatattgtctgtaattcatcaaaaaaaaaaaaataatcttcttttcatttattcagatccaagaagttctgtaacatatagccttatggaaagattcctatggaaccaaatgaaggcaaagatattagagaatgttttaattatgtctagattattgcgatccttttcccgtatctcttttcgctcaaattcctcctcttcatcttcttcaagaaacaccaatctcttaaatgatcaagataaccagacccaagaggtcgccccaaaacataatctcttcgatgaggaagtccgattcgaagatattaaccaaaacatggatgactggaacattccagaaa

SEQ ID NO: 14762 - DNA, 1051 bp, Glycine max
  Gm_smallRNAprecursor_7595
caaaactacttgtcttgtaacaaacagtcaaatagtcccggtcaaaactacttgtcttgtaacaaacagtcaaatagtcccggtcaaaactaccggcaactaccggtcttagattttttggctatataaggagtcctcaagtatgttgtgaggcaccctttcatttagtcatttttcaggtttcggaagagaggtgctctgaaacaagatttttgtaagcgcttctttctagattcaataaatttctatttttcatctttctctcttctcccttcaccgatcctgtgcggctctgccgccgcttcggtttctttgtttatgaaaacctgggttttgtaagccggtctccggtgtgaccttgatatctgttttcaaagtttataattcttccgtttgattttatcatactgcattcttacttcctatctgtccgtttgatcctattccgctgacctctggtatcagagcctgatggggaagtaggaatagtgtccgtaagggcatatgttaactgaacttatggatctgaagcatgtacagtaattttaatttaaacagtatgtgtttgaacagtattttctggaagcacagcagtctgatattttagttgaatgatactgtagcagtaagtcccgtggatgagaaagggcagtaaggctaaggtgtattgttcaaataaaatattgagacataatatactggtggctataggagtaatgttcaaactatattgtctgtaattcatcaaaaaaaaaaaaataatcttcttttcatttattcagatccaagaagttctgtaacatatagccttatggaaagattcctatggaaccaaatgaaggcaaagatattagagaatgttttaattatgtctagattattgcgatccttttcccgtatctcttttcgctcaaattcctcctcttcatcttcttcaagaaacaccaatctcttaaatgatcaagataaccagacccaagaggtcgccccaaaacataatctcttcgatgaggaagtccgattcgaagatattaaccaaaacatggatgac

SEQ ID NO: 14763 - DNA, 1110 bp, Glycine max
  Gm_smallRNAprecursor_7596
tgatcaacatttggcaaagggactgcttcgatccattttgtaaagtaatcgacaccaactatgatataacgctggttcttagaagaagcaggcttgatttcaccaattaggtccaaagcccatcctctgaaaggccaaggtttgattatggagtgtaactcactagcaggtacatgctgtatccctgcatgcttttggcattcttgacagcctttggcaaattctatgcagtcttttaacatagaaggccaatataaaccttgtcgaaacaaaagccatttcattttatggcctgcttgatgtgatccacaagccccactgtgaacatgggaaactgccaagtatgcttctgattcacttaaacatttcaacaacactccttctgcagtctttttaaacaaatcatttcccacaatcacgtaatttaaagccctatatttgacctttcgagccacattgcctattggattttccaaatattcaacaatggactttctccaatcattatctaacatattgtcaatggccaaaatttgaattttttcctggagatcatccatgctttcatcttcataattttgtggtgtacttgcccccacaagttttggcattggcaatttagtgcttaatggctctggtaacaccagtttatcttttatttcgatcaactgagttaacttttccttcgacattttgtaccctgaagctatttgggctaaatcatttgcttcttggttttctagtcgaggtatatgttcaatattaatgtaatcgaaatgattcagaagagaacttgctataacaaaatattttgctaagtgttctttaacacatttgtattcttgtgttaattgtctcaacactaattctgaatcaccccttatgttaacatttcttgcccccaagctaattaaaatttcaaggcctgtaattaaagcctcatactcagcctcattattagaacaaagccctttgattttatatttaaatttagttggaattttattgggggatattattaaaactccaattccagttccatgtttgtgtttcgaaccatcgaaatacaaaatccaaggctctgtatcgacatagtcttgcggcatttcg

SEQ ID NO: 14764 - DNA, 1083 bp, Glycine max
  Gm_smallRNAprecursor_7597
caaagggactgcttcgatccattttgtaaagtaatcgacaccaactatgatataacgctggttcttagaagaagcaggcttgatttcaccaattaggtccaaagcccatcctctgaaaggccaaggtttgattatggagtgtaactcactagcaggtacatgctgtatccctgcatgcttttggcattcttgacagcctttggcaaattctatgcagtcttttaacatagaaggccaatataaaccttgtcgaaacaaaagccatttcattttatggcctgcttgatgtgatccacaagccccactgtgaacatgggaaactgccaagtatgcttctgattcacttaaacatttcaacaacactccttctgcagtctttttaaacaaatcatttcccacaatcacgtaatttaaagccctatatttgacctttcgagccacattgcctattggattttccaaatattcaacaatggactttctccaatcattatctaacatattgtcaatggccaaaatttgaattttttcctggagatcatccatgctttcatcttcataattttgtggtgtacttgcccccacaagttttggcattggcaatttagtgcttaatggctctggtaacaccagtttatcttttatttcgatcaactgagttaacttttccttcgacattttgtaccctgaagctatttgggctaaatcatttgcttcttggttttctagtcgaggtatatgttcaatattaatgtaatcgaaatgattcagaagagaacttgctataacaaaatattttgctaagtgttctttaacacatttgtattcttgtgttaattgtctcaacactaattctgaatcaccccttatgttaacatttcttgcccccaagctaattaaaatttcaaggcctgtaattaaagcctcatactcagcctcattattagaacaaagccctttgattttatatttaaatttagttggaattttattgggggatattattaaaactccaattccagttccatgtttgtgtttcgaaccatcgaaatacaaaatccaaggctctgtatcgacatagtc

SEQ ID NO: 14765 - DNA, 1114 bp, Glycine max
  Gm_smallRNAprecursor_7598
tatctaacatattgtcaatggccaaaatttgaattttttcctggagatcatccatgctttcatcttcataattttgtggtgtacttgcccccacaagttttggcattggcaatttagtgcttaatggctctggtaacaccagtttatcttttatttcgatcaactgagttaacttttccttcgacattttgtaccctgaagctatttgggctaaatcatttgcttcttggttttctagtcgaggtatatgttcaatattaatgtaatcgaaatgattcagaagagaacttgctataacaaaatattttgctaagtgttctttaacacatttgtattcttgtgttaattgtctcaacactaattctgaatcaccccttatgttaacatttcttgcccccaagctaattaaaatttcaaggcctgtaattaaagcctcatactcagcctcattattagaacaaagccctttgattttatatttaaatttagttggaattttattgggggatattattaaaactccaattccagttccatgtttgtgtttcgaaccatcgaaatacaaaatccaaggctctgtatcgacatagtcttgcggcatttcgatcactgagtgatctacaataaaatctgccacaatttgacccttaacagatttcaaaggcttgtacgttaaagaatattctgttaatgctaaagcccattttccaattctactgtgtaaaataggtttcgataacatgtgcttaataatatcataatgagaatacacataaacatcaacaggctttatatattgcttaagttttgtacaagagaaatacaaacaaagacaaagtttttctatggcagtatatctagtttctgcatcatttagtacacgactaagataataaattgcatgctctacgccatcatcatcttcctgagccaacatgctaccaatggtcttgttagacgcagcaatatacaacttcatagctttgtttcgactaggaggcattaacacaggaggcttgatcagatactctttaatttcatcgaaagccttttgatgctcttcatcccatttgaatggttcatctttcttgagtcgaagtaatggcgaaaaagt

SEQ ID NO: 14766 - DNA, 1078 bp, Glycine max
  Gm_smallRNAprecursor_7599
tgccgaaccagtataaaaacttttgtgtgtttgtttccttcttccctactcttttactttccgctgtgcatttaatttttgcttttactttctgttaagtttctcttctactccatattctcttaacaacaaaagtaaaagccttaaaagagtaatttttaattggtaaaattttaggaataattaattcaacccccccttcttaattattctgaggccactcgatccaacattaattacatacagatggttttttgaccgaaattaaatttaatctaaacagataccaaaacaatcatcttcattttggtaaaaggggtcttcttcttcttcttcagcagagcttgtttcttccttctttgaggatgaaccttcttcctcctgctgtaaaatttgcagaacttcttttagatttttagttaggatctcctttgattttgatcctgctaaaaatgctgtcagatgtgacttttggtttaaaaacacaagtttttggatcagctgctttgaggaattctggatgggattggaactagagttttacttattctggatctgctttggatgagtcaaattgtgtccaccattttacaaatgcatgtctttgtagtgatggatattggtttgttttttcagtcttgttgtaacgatattgccattagaaaatccatgacagagcaaaacttgagaagtatttaagatctgctggaatttgtgattcctgcgaattgtattgtctttcaaattgagtaaatccttgttggactgtttccgggaagatctctggaattggaccaaagaaatcccaccattgtaaaaaccaatttggaaaattgtaaattgtgttggtcttgaaatatatcaaccatgaatgcttgaagcgggtattttggtgccaaaacaccttagtccaagcatcaacataatcccaataggtataacctaccgggtcaaacagcactgaaaatctctttcctttgtttaagtctgaaccaaagtgtcttggttgaagaacttttagtatttggattgtggaatgggtgtttaatgtctggtcttttggatctttgaaatattt

SEQ ID NO: 14767 - DNA, 1079 bp, Glycine max
  Gm_smallRNAprecursor_7600
tgccgaaccagtataaaaacttttgtgtgtttgtttccttcttccctactcttttactttccgctgtgcatttaatttttgcttttactttctgttaagtttctcttctactccatattctcttaacaacaaaagtaaaagccttaaaagagtaatttttaattggtaaaattttaggaataattaattcaacccccccttcttaattattctgaggccactcgatccaacattaattacatacagatggttttttgaccgaaattaaatttaatctaaacagataccaaaacaatcatcttcattttggtaaaaggggtcttcttcttcttcttcagcagagcttgtttcttccttctttgaggatgaaccttcttcctcctgctgtaaaatttgcagaacttcttttagatttttagttaggatctcctttgattttgatcctgctaaaaatgctgtcagatgtgacttttggtttaaaaacacaagtttttggatcagctgctttgaggaattctggatgggattggaactagagttttacttattctggatctgctttggatgagtcaaattgtgtccaccattttacaaatgcatgtctttgtagtgatggatattggtttgttttttcagtcttgttgtaacgatattgccattagaaaatccatgacagagcaaaacttgagaagtatttaagatctgctggaatttgtgattcctgcgaattgtattgtctttcaaattgagtaaatccttgttggactgtttccgggaagatctctggaattggaccaaagaaatcccaccattgtaaaaaccaatttggaaaattgtaaattgtgttggtcttgaaatatatcaaccatgaatgcttgaagcgggtattttggtgccaaaacaccttagtccaagcatcaacataatcccaataggtataacctaccgggtcaaacagcactgaaaatctctttcctttgtttaagtctgaaccaaagtgtcttggttgaagaacttttagtatttggattgtggaatgggtgtttaatgtctggtcttttggatctttgaaatatttg

SEQ ID NO: 14768 - DNA, 1077 bp, Glycine max
  Gm_smallRNAprecursor_7601
gccgaaccagtataaaaacttttgtgtgtttgtttccttcttccctactcttttactttccgctgtgcatttaatttttgcttttactttctgttaagtttctcttctactccatattctcttaacaacaaaagtaaaagccttaaaagagtaatttttaattggtaaaattttaggaataattaattcaacccccccttcttaattattctgaggccactcgatccaacattaattacatacagatggttttttgaccgaaattaaatttaatctaaacagataccaaaacaatcatcttcattttggtaaaaggggtcttcttcttcttcttcagcagagcttgtttcttccttctttgaggatgaaccttcttcctcctgctgtaaaatttgcagaacttcttttagatttttagttaggatctcctttgattttgatcctgctaaaaatgctgtcagatgtgacttttggtttaaaaacacaagtttttggatcagctgctttgaggaattctggatgggattggaactagagttttacttattctggatctgctttggatgagtcaaattgtgtccaccattttacaaatgcatgtctttgtagtgatggatattggtttgttttttcagtcttgttgtaacgatattgccattagaaaatccatgacagagcaaaacttgagaagtatttaagatctgctggaatttgtgattcctgcgaattgtattgtctttcaaattgagtaaatccttgttggactgtttccgggaagatctctggaattggaccaaagaaatcccaccattgtaaaaaccaatttggaaaattgtaaattgtgttggtcttgaaatatatcaaccatgaatgcttgaagcgggtattttggtgccaaaacaccttagtccaagcatcaacataatcccaataggtataacctaccgggtcaaacagcactgaaaatctctttcctttgtttaagtctgaaccaaagtgtcttggttgaagaacttttagtatttggattgtggaatgggtgtttaatgtctggtcttttggatctttgaaatattt

SEQ ID NO: 14769 - DNA, 1146 bp, Glycine max
  Gm_smallRNAprecursor_7602
acccccccttcttaattattctgaggccactcgatccaacattaattacatacagatggttttttgaccgaaattaaatttaatctaaacagataccaaaacaatcatcttcattttggtaaaaggggtcttcttcttcttcttcagcagagcttgtttcttccttctttgaggatgaaccttcttcctcctgctgtaaaatttgcagaacttcttttagatttttagttaggatctcctttgattttgatcctgctaaaaatgctgtcagatgtgacttttggtttaaaaacacaagtttttggatcagctgctttgaggaattctggatgggattggaactagagttttacttattctggatctgctttggatgagtcaaattgtgtccaccattttacaaatgcatgtctttgtagtgatggatattggtttgttttttcagtcttgttgtaacgatattgccattagaaaatccatgacagagcaaaacttgagaagtatttaagatctgctggaatttgtgattcctgcgaattgtattgtctttcaaattgagtaaatccttgttggactgtttccgggaagatctctggaattggaccaaagaaatcccaccattgtaaaaaccaatttggaaaattgtaaattgtgttggtcttgaaatatatcaaccatgaatgcttgaagcgggtattttggtgccaaaacaccttagtccaagcatcaacataatcccaataggtataacctaccgggtcaaacagcactgaaaatctctttcctttgtttaagtctgaaccaaagtgtcttggttgaagaacttttagtatttggattgtggaatgggtgtttaatgtctggtcttttggatctttgaaatatttgatagatactgaatttgaatctacgaaaatcaattcataaaaagttcttgacttcaggatgatagttggtttgtagtgaaatcctgatgagaaagccttggtcgtcgccttaaagggatttgtgtcccaaaattcaagttccatttgcaaaatagttaaaaatttaattttataaatataattgttagtttgtttggtaggtggtatttgtactttggctaggggtagtttccctttaggattggtagctgttttgatc

SEQ ID NO: 14770 - DNA, 1107 bp, Glycine max
  Gm_smallRNAprecursor_7603
ttgcagaacttcttttagatttttagttaggatctcctttgattttgatcctgctaaaaatgctgtcagatgtgacttttggtttaaaaacacaagtttttggatcagctgctttgaggaattctggatgggattggaactagagttttacttattctggatctgctttggatgagtcaaattgtgtccaccattttacaaatgcatgtctttgtagtgatggatattggtttgttttttcagtcttgttgtaacgatattgccattagaaaatccatgacagagcaaaacttgagaagtatttaagatctgctggaatttgtgattcctgcgaattgtattgtctttcaaattgagtaaatccttgttggactgtttccgggaagatctctggaattggaccaaagaaatcccaccattgtaaaaaccaatttggaaaattgtaaattgtgttggtcttgaaatatatcaaccatgaatgcttgaagcgggtattttggtgccaaaacaccttagtccaagcatcaacataatcccaataggtataacctaccgggtcaaacagcactgaaaatctctttcctttgtttaagtctgaaccaaagtgtcttggttgaagaacttttagtatttggattgtggaatgggtgtttaatgtctggtcttttggatctttgaaatatttgatagatactgaatttgaatctacgaaaatcaattcataaaaagttcttgacttcaggatgatagttggtttgtagtgaaatcctgatgagaaagccttggtcgtcgccttaaagggatttgtgtcccaaaattcaagttccatttgcaaaatagttaaaaatttaattttataaatataattgttagtttgtttggtaggtggtatttgtactttggctaggggtagtttccctttaggattggtagctgttttgatcattgatacattttggatcattgtttgtaaatttgattcagaatcatcgtcagattctgaggcaatatctgcctaagattttttgattatttttggaaatttggttagacccatgtcttgaagggcctgaagggtttcaattggtcaggcatagtcgcccgatg

SEQ ID NO: 14771 - DNA, 1107 bp, Glycine max; identical to SEQ ID NO: 14770
  Gm_smallRNAprecursor_7604

SEQ ID NO: 14772 - DNA, 1108 bp, Glycine max
  Gm_smallRNAprecursor_7605
ttgcagaacttcttttagatttttagttaggatctcctttgattttgatcctgctaaaaatgctgtcagatgtgacttttggtttaaaaacacaagtttttggatcagctgctttgaggaattctggatgggattggaactagagttttacttattctggatctgctttggatgagtcaaattgtgtccaccattttacaaatgcatgtctttgtagtgatggatattggtttgttttttcagtcttgttgtaacgatattgccattagaaaatccatgacagagcaaaacttgagaagtatttaagatctgctggaatttgtgattcctgcgaattgtattgtctttcaaattgagtaaatccttgttggactgtttccgggaagatctctggaattggaccaaagaaatcccaccattgtaaaaaccaatttggaaaattgtaaattgtgttggtcttgaaatatatcaaccatgaatgcttgaagcgggtattttggtgccaaaacaccttagtccaagcatcaacataatcccaataggtataacctaccgggtcaaacagcactgaaaatctctttcctttgtttaagtctgaaccaaagtgtcttggttgaagaacttttagtatttggattgtggaatgggtgtttaatgtctggtcttttggatctttgaaatatttgatagatactgaatttgaatctacgaaaatcaattcataaaaagttcttgacttcaggatgatagttggtttgtagtgaaatcctgatgagaaagccttggtcgtcgccttaaagggatttgtgtcccaaaattcaagttccatttgcaaaatagttaaaaatttaattttataaatataattgttagtttgtttggtaggtggtatttgtactttggctaggggtagtttccctttaggattggtagctgttttgatcattgatacattttggatcattgtttgtaaatttgattcagaatcatcgtcagattctgaggcaatatctgcctaagattttttgattatttttggaaatttggttagacccatgtcttgaagggcctgaagggtttcaattggtcaggcatagtcgcccgatgt

SEQ ID NO: 14773 - DNA, 1101 bp, Glycine max
  Gm_smallRNAprecursor_7606
cagaacttcttttagatttttagttaggatctcctttgattttgatcctgctaaaaatgctgtcagatgtgacttttggtttaaaaacacaagtttttggatcagctgctttgaggaattctggatgggattggaactagagttttacttattctggatctgctttggatgagtcaaattgtgtccaccattttacaaatgcatgtctttgtagtgatggatattggtttgttttttcagtcttgttgtaacgatattgccattagaaaatccatgacagagcaaaacttgagaagtatttaagatctgctggaatttgtgattcctgcgaattgtattgtctttcaaattgagtaaatccttgttggactgtttccgggaagatctctggaattggaccaaagaaatcccaccattgtaaaaaccaatttggaaaattgtaaattgtgttggtcttgaaatatatcaaccatgaatgcttgaagcgggtattttggtgccaaaacaccttagtccaagcatcaacataatcccaataggtataacctaccgggtcaaacagcactgaaaatctctttcctttgtttaagtctgaaccaaagtgtcttggttgaagaacttttagtatttggattgtggaatgggtgtttaatgtctggtcttttggatctttgaaatatttgatagatactgaatttgaatctacgaaaatcaattcataaaaagttcttgacttcaggatgatagttggtttgtagtgaaatcctgatgagaaagccttggtcgtcgccttaaagggatttgtgtcccaaaattcaagttccatttgcaaaatagttaaaaatttaattttataaatataattgttagtttgtttggtaggtggtatttgtactttggctaggggtagtttccctttaggattggtagctgttttgatcattgatacattttggatcattgtttgtaaatttgattcagaatcatcgtcagattctgaggcaatatctgcctaagattttttgattatttttggaaatttggttagacccatgtcttgaagggcctgaagggtttcaattggtcaggcatagtcgcccg

SEQ ID NO: 14774 - DNA, 1207 bp, Glycine max
  Gm_smallRNAprecursor_7607
aatttggttagacccatgtcttgaagggcctgaagggtttcaattggtcaggcatagtcgcccgatgtttgtttggcggttgccggtttgggagattcctgagtggatggctcaggtttgattgagataatctgggtcgatgacccgtctaaattggttttctaggtagatgacccagccttggttggtgacccagaagaatctgaggatgattttttagtggacaactctggaagagccagcctagatccttttcctgtacctcgacctcctcacagggaggctcccgatgccttaggaggcattatcgcttttctgtaagaattcacgggtaaggtagtcaggtagcgagtttgaggtgcccttgatatattctatgtcaaaatcaaagacacttaaaatttcttgccatcttgcaaaaatatgttttgaggcaaggtttttaacatctttttgtaaaatatctttggctgatttacaatcaaccctgattaaaaaattttggtttaataaatccgattgaaatttggaaatgcacaaaacaattgctaaaacttcttttttaacagttgaatattttaattgtgcaggattccaatgttttgatgtatatgcaatgacatgatcttgaccatgtattctttgtttgaggatgccaccataacctatgtctgatgcaatggtttcgacaattttaaatgcctgtggaataggaagatacagacattttatggattggactttgagtttgatctctttaactgtttgtgtatggagatcagaccaaggaggcggatttttcttcagcctatcatgcaatggcttgacaatattttttaaataggggacaaattctcctacataatttagacaacctagaaatctttgtcactggattttgtctaagatttggttgggaaattttcaagaaaattctatcgacctttctattggaatgattgtgccttgatgtatattgtgaccaaggaatcgaattcgagtttggaaaagattgatttttgatttggagactgccaaaccattctgtttgatgatatggatgacagtatggagatgtttgaaatgtttgtcaatgttttgggaaaagattaaaacatcatctatgtagacaatgacaaattttgaataaggattaaaaatatcattcataattttttgaaactctgaaggagcattcttcagtccg

SEQ ID NO: 14775 - DNA, 1084 bp, Glycine max
  Gm_smallRNAprecursor_7608
gccaagttacaagtttcatatatgtccaccaaagatcttactcgtcttggagtagactctggtgatgatagtttttgatcttgttgttgtggtggaggtgaaggtggttcacctaggtcttcttcctcagcttcttcttgaggtagttgagcgggtataagaacgttcttctccactttttcttcatcccaattccaagaagcgtactcatcaacttcaacatctcgactgatgaagagtttcttagtttgcaagttgtagacacggtagcccttagagatatttctatacccaaggaagatacctcgtatagtcttgtcttcaagcttgtgcctcttcacgtctggaatatgaatagcatatagatccaaagacccttaggtgctttgctgatggcttcttcccgttccaagcttcaattggagtcttgtcttttacagacttagttggacatctgttgagtatgtaaacagcaatgtagactacttcagcccaaaatgtgttaggtagtcccttctccttgagcatcgatctagccatttccataactgtgcgattttttctctcagacactccattttgttgaggagaatatgcgactgtaagttttcgctcaatgccttcatcctcacaaaatctttcaaacttgcgagaggtgtactcttttccgtgatcacttcttagtacttttatccattttccactttgatttttcagcaagggccttgaactttttgaatactccaaagacttctgatttttcttttagaaaatatacccatgtcattctagaaaagtcatcaatgaagagtatgaagtacatgttgttctcatgtgatggcgtcctcattggtccataggcatccgtatgtattagttccaatagatctttcgctctccatgctccgcttgttgagaaaggaaatcggtgttgcttaccaaggagacatccttcacatacttcattgttctcctttatgcttggaagatctctcatcatgttcttctcatgtaacaactttaaggcatgtgtgttgaagtggccaaatcttcgatgccatagccatgaatcatcaacttgtat

SEQ ID NO: 14776 - DNA, 1046 bp, Glycine max
  Gm_smallRNAprecursor_7609
aaataaatgatattttaggaatgataatattaaatatgataaatttagttaaatttatttatatttaaattcaaacatgactattttatttatttatatatgcattcatagagagtacaactttataagtgttgttggtgcagttgttaaatgaaatttggagttttatttggtgaattggcataatcaaaacttgttttgaagtaatatatattagcgaaattctaattttggttaaaaaaatatttctaaaattgtatctaagttttgtttatttttagatattgatttttattttatttatagaaattaaagatgacataaaaaatttataatactcaaattatattcaatcaattgaattagacttcttaattgaagtgaataggcaatttagtccctgagattgtagccattttgcatattagtccctaacttaatattaaattcaaaatagtctctatctttgcataagtgttgcaaaatagtccttccgttaaattttaaagtaacgccgttagtgaggtcaattttagtgccacgtggactatccacgtggcactaaaggatgacgtggcatgacacgtggacatgcctgatgccacatcatttgatgataacaaaacgagtaaataggtaatttagtccctgactttgtacccatgttgcatattagtccctaacttaatgaaaaattcaaaatagtccctatcttttgcataagtattgcaaaatagtccctaacttaaaagatgctagaaatcatgcttaaagtgtccatgcattgcaaaagttgtgcctagcacgatttctggccgcgcagattcctcattggattccttgtgatcttttgattcctctggttttttctcttcttctttcttttcttcttcatttgcttttttctcatccactttgttttcctctggttttttctctttctattcaaaacacacaaaaaaatcagaacccagaatgatacattgatgataattgaagaaaaaaaaaagaggaaaagagaatggttatgcagacctcgcccatta

SEQ ID NO: 14777 - DNA, 1045 bp, Glycine max
  Gm_smallRNAprecursor_7610
aataaatgatattttaggaatgataatattaaatatgataaatttagttaaatttatttatatttaaattcaaacatgactattttatttatttatatatgcattcatagagagtacaactttataagtgttgttggtgcagttgttaaatgaaatttggagttttatttggtgaattggcataatcaaaacttgttttgaagtaatatatattagcgaaattctaattttggttaaaaaaatatttctaaaattgtatctaagttttgtttatttttagatattgatttttattttatttatagaaattaaagatgacataaaaaatttataatactcaaattatattcaatcaattgaattagacttcttaattgaagtgaataggcaatttagtccctgagattgtagccattttgcatattagtccctaacttaatattaaattcaaaatagtctctatctttgcataagtgttgcaaaatagtccttccgttaaattttaaagtaacgccgttagtgaggtcaattttagtgccacgtggactatccacgtggcactaaaggatgacgtggcatgacacgtggacatgcctgatgccacatcatttgatgataacaaaacgagtaaataggtaatttagtccctgactttgtacccatgttgcatattagtccctaacttaatgaaaaattcaaaatagtccctatcttttgcataagtattgcaaaatagtccctaacttaaaagatgctagaaatcatgcttaaagtgtccatgcattgcaaaagttgtgcctagcacgatttctggccgcgcagattcctcattggattccttgtgatcttttgattcctctggttttttctcttcttctttcttttcttcttcatttgcttttttctcatccactttgttttcctctggttttttctctttctattcaaaacacacaaaaaaatcagaacccagaatgatacattgatgataattgaagaaaaaaaaaagaggaaaagagaatggttatgcagacctcgcccatta

SEQ ID NO: 14778 - DNA, 1053 bp, Glycine max
  Gm_smallRNAprecursor_7611
ggatcgttccctgagggatcaacataactctcctttgtgatgacatgaggacttgagggaccaaccataagctctggaggcagtgcaagcccctgagattgcatctgggattgcatttggctgaaagatgctatcagctaccaagtcactttttgtgtgatcgactcctcttgttggtccctgatttgttgggtcagctgttgtaggtctttaagaggcagggaggaagagttgcgggacgtttgtggagccgatccaaaatattgcttgatggtgacacgagctccaacaccacagacatgactagggtgctctgctcgcccaatggcggcagtcaggacatcctgacgtccatgagggacgaacgatccctgtgacgcctgctcctccaaagaatcttgtacaaaacaaatatatttgtcttaggcattcacaaaataaacaaacatagttagaattcttaattgaaaatgacttacgatcttctcagcgatttcctttgctgcctcagacgtcatctgcccagttttcttgatgcagaccatcttccacttcacgtggcgtctgatgggagatggagggtcaatgacgccgtcagcggttccaaactgggcagcttcctccagtttctttttggtcaaccactagctttttgttctaaatattcataaccctcataagacaacacgtggggggcagtgttttgcttctggatggtctgtgcctttttccgcacatcctgaaaaaatcaaacattaatggtacaaattactataatgaattataacaactgaatcttttgtcgaaaacaaataaaatgacaaagtacatacctcccaagaagggtctctgcgtctctggcaaaacttggcccatttctccttgctaatgtcgtatttttcacagacagtgtcgtccacaccgtcttggtcggctgaaagggcccatttactagtcaagtccgatttaaactgccgccacctctcgccaacaatctgaagaattttcttctttgtcctattgtcagaagcttcagggatttcaaattccgcc

SEQ ID NO: 14779 - DNA, 1170 bp, Glycine max
  Gm_smallRNAprecursor_7612
tgaagtcacatcaaggggaaaaggtgggcccctttttgctccacttaaaatgggacaagcggcattgctttatgagaaaaaaaaagggaaaagaaaatcattttttttataaaagccaaatttctctctccttcagaaatttcagcagctcttcttctcccttccacaaagctttttcttcttccttcttctccaccattgttctccattaaagctccaaaatttcttctcatttctactccaaattgcaaggagaagccatttttggagtcttggagcacacctctacattgtggggcttcgaatttcaggtatgggtggacttcttctcacatgaaattcgtgggtgttgggttttttggagttatgatgggtagttctactaggttattgtcttagagtaattatttgtgaaggaatttgttgaaatcatgctaaacttgacatgtttgatgtgagtaaagctacccattctgttttagggttttatgatgatgctttgtgatatttgtatgctgaaattgttggtagaaaattggtggagatgatgggaagagttaacttagggttaaatgtgagaatgataatgttgtaggtagaaaagtgtgagattttgagggttagagaagccaaatttggggttagtggaaattggagtttaaagtgggttgatcctagtttaaaatgtcaattaggacttgtaggaaagcttgggcagagcaaatgagaaaaatgagtgacaaatgtgaaagaggagagccatttctagggtaaattgggtgttgaggggtcaaattttgaatcggtggagttttcaccttaaaaccagtttgagcaagtctaaatcaatgttatagacttgattgagatgagagtttaccccaaaattacccaattctcattttcacttcctaaaccttgaaaattcactaaattgaggggttttggatacctatattttgatttgtcttggtctgaagtttgcttttggtttaaatatgatttatacatgatttaggacttttaggatccaatttgagcaaaattggatgtgggcaagatggatttcgaaatctgccctattatgcagaaaaaaggctgtcaaaattgtgtagcagtttttttaacatagtgcagaaaatgcttgtgcattgctagtcatgggaagag

SEQ ID NO: 14780 - DNA, 1159 bp, Glycine max
  Gm_smallRNAprecursor_7613
cagtagcattcaactaaaatattagactgttgtacttccaggaagtactgttcaaacatttactgtacaaatcaaagtaaaatattactcgtattatacaagattttagtttcagatccataaaatttgttaacatatgtcctttacggacaatattcctacttccccatcaggctctgataccagagatcagcgaaataagatcaaacggacagataggaagtaagaatgcagtatgataaatgaaagacaaatataaacttgtaaagcagatatcaagggcgcaccgaaacggcttacaaacccagattttagaaaacaaagaaaccaaagcgacggcagagccgcacaggatcggtgaggggagaagggagatatgaaaaatagaacttgaaatttattgaaatcgaaagaaaagcttacaaagagtttttccctaggcagagcttctctctctaaaacctggttttggaactatctgaaagagtgcctcacaaagagaacgaggactcctttaaatagactcaatttttactgtttctacagtgtcggtaatgtttaccggaactgttacaaaacttttacaaattacattaataaaaccgaaaattagttacaataattcattattactacaactaattaatcgtcgtctaacgatataccaaaacagtcatcttcattctggtagaatggatcatcttcttggtcatcattagtctcggatgattcggcttccttcttgggaggttcgtcttccacttcttgttgaagtagttggagaacttctttgagattatgagtaagactctctttagattttgagcttgctaagaatgctgctagttgcgacttctgatttagaaacaaagatgtctccggattaccaggtttgaggaactcaggatatatatatatatatatatatatatatatatatatatatatatatatatatatatatatatatatatatatatatttgtgtgtgggtgggagagatcattattattaacatatgataagtttagataatgtttgcgcaagcatcacaaaatatgcttagcaatatgtacctaccgcctgtaatatataaatgaatatataaaaatagttaagcttatatacaaatatattagatatagaaagtaaaaattaa

SEQ ID NO: 14781 - DNA, 1048 bp, Glycine max
  Gm_smallRNAprecursor_7614
aatattcctacttccccatcaggctctgataccagagatcagcgaaataagatcaaacggacagataggaagtaagaatgcagtatgataaatgaaagacaaatataaacttgtaaagcagatatcaagggcgcaccgaaacggcttacaaacccagattttagaaaacaaagaaaccaaagcgacggcagagccgcacaggatcggtgaggggagaagggagatatgaaaaatagaacttgaaatttattgaaatcgaaagaaaagcttacaaagagtttttccctaggcagagcttctctctctaaaacctggttttggaactatctgaaagagtgcctcacaaagagaacgaggactcctttaaatagactcaatttttactgtttctacagtgtcggtaatgtttaccggaactgttacaaaacttttacaaattacattaataaaaccgaaaattagttacaataattcattattactacaactaattaatcgtcgtctaacgatataccaaaacagtcatcttcattctggtagaatggatcatcttcttggtcatcattagtctcggatgattcggcttccttcttgggaggttcgtcttccacttcttgttgaagtagttggagaacttctttgagattatgagtaagactctctttagattttgagcttgctaagaatgctgctagttgcgacttctgatttagaaacaaagatgtctccggattaccaggtttgaggaactcaggatatatatatatatatatatatatatatatatatatatatatatatatatatatatatatatatatatatatatatttgtgtgtgggtgggagagatcattattattaacatatgataagtttagataatgtttgcgcaagcatcacaaaatatgcttagcaatatgtacctaccgcctgtaatatataaatgaatatataaaaatagttaagcttatatacaaatatattagatatagaaagtaaaaattaacaacacatcatataaaatatataagagtcttaccggaatt

SEQ ID NO: 14782 - DNA, 1218 bp, Glycine max
  Gm_smallRNAprecursor_7615
aataattcatgattactacaacttattaatcgtcgtctaatgatataccaaaacaatcatcttcattctggtagaacggatcatcttcttggtcatcattagtctcggatgattcagcttccttcttggaaggttcttcttccacttcctgttgaagtagttggagaacttctttgagattctgagcaagactcgctttagattttgagcttgctaagaatgctgccagttgcgacttctgatttagaaacaaagatgtctccggatcagcaggtttaaggaactcaggattgctctggaaccagttcttgacttgatttggagcagcctttgaagtatcgaattgtgaccactattttacaaaggcgtgtctctgtaacggtggatattgcttgctgttttcagtttttccgtatctgtattgccatgaaaagatccatgacaaggcaaaactggaaaagtactttaaatctgccggaatatgtgattccttgatattatagagcttgttgaattgttggaatccctgttggacttcttctgggaatatttgtggaattggtccgaagtagttccaccattggaggaaccaatttggaaaattatacgcaatattattttagaagtaaattagccatgaatgcttgaatttactattttgatgccaaaacacattggtccaggcgtcaatgtaatcccaataattatatcctgcagggtcaaatggtgcagaaaattttttgggttggtttaagtttgagccataatgtcgtggctgcataacctttaagatttggattgtggaatgggtatttagatttggatctttggggtctttgaagtgtttaatagatactgagtttgtatctattagaatgaattcgtagaatttgcgggtttttttttgtggctattggcctgtaatggaatcccggggggaatactttggcggttgctttgaaaggattcttgtcccagtattctggttccatttgtaaaacattgaaaaatttgttttttgaaatataactgttgctgggttgtggcattgattcttgttgagtcaacgattggcttggtttttggttacagacagttttggtctgtttggttttttggatttgtttttgcatatctgtttcagaatcatcgtctgattctgaggccatttttgcccaggtctttttggataattttggtattttggtgaggcctata

SEQ ID NO: 14783 - DNA, 1217 bp, Glycine max
  Gm_smallRNAprecursor_7616
ataattcatgattactacaacttattaatcgtcgtctaatgatataccaaaacaatcatcttcattctggtagaacggatcatcttcttggtcatcattagtctcggatgattcagcttccttcttggaaggttcttcttccacttcctgttgaagtagttggagaacttctttgagattctgagcaagactcgctttagattttgagcttgctaagaatgctgccagttgcgacttctgatttagaaacaaagatgtctccggatcagcaggtttaaggaactcaggattgctctggaaccagttcttgacttgatttggagcagcctttgaagtatcgaattgtgaccactattttacaaaggcgtgtctctgtaacggtggatattgcttgctgttttcagtttttccgtatctgtattgccatgaaaagatccatgacaaggcaaaactggaaaagtactttaaatctgccggaatatgtgattccttgatattatagagcttgttgaattgttggaatccctgttggacttcttctgggaatatttgtggaattggtccgaagtagttccaccattggaggaaccaatttggaaaattatacgcaatattattttagaagtaaattagccatgaatgcttgaatttactattttgatgccaaaacacattggtccaggcgtcaatgtaatcccaataattatatcctgcagggtcaaatggtgcagaaaattttttgggttggtttaagtttgagccataatgtcgtggctgcataacctttaagatttggattgtggaatgggtatttagatttggatctttggggtctttgaagtgtttaatagatactgagtttgtatctattagaatgaattcgtagaatttgcgggtttttttttgtggctattggcctgtaatggaatcccggggggaatactttggcggttgctttgaaaggattcttgtcccagtattctggttccatttgtaaaacattgaaaaatttgttttttgaaatataactgttgctgggttgtggcattgattcttgttgagtcaacgattggcttggtttttggttacagacagttttggtctgtttggttttttggatttgtttttgcatatctgtttcagaatcatcgtctgattctgaggccatttttgcccaggtctttttggataattttggtattttggtgaggcctata

SEQ ID NO: 14784 - DNA, 1184 bp, Glycine max
  Gm_smallRNAprecursor_7617
caacttattaatcgtcgtctaatgatataccaaaacaatcatcttcattctggtagaacggatcatcttcttggtcatcattagtctcggatgattcagcttccttcttggaaggttcttcttccacttcctgttgaagtagttggagaacttctttgagattctgagcaagactcgctttagattttgagcttgctaagaatgctgccagttgcgacttctgatttagaaacaaagatgtctccggatcagcaggtttaaggaactcaggattgctctggaaccagttcttgacttgatttggagcagcctttgaagtatcgaattgtgaccactattttacaaaggcgtgtctctgtaacggtggatattgcttgctgttttcagtttttccgtatctgtattgccatgaaaagatccatgacaaggcaaaactggaaaagtactttaaatctgccggaatatgtgattccttgatattatagagcttgttgaattgttggaatccctgttggacttcttctgggaatatttgtggaattggtccgaagtagttccaccattggaggaaccaatttggaaaattatacgcaatattattttagaagtaaattagccatgaatgcttgaatttactattttgatgccaaaacacattggtccaggcgtcaatgtaatcccaataattatatcctgcagggtcaaatggtgcagaaaattttttgggttggtttaagtttgagccataatgtcgtggctgcataacctttaagatttggattgtggaatgggtatttagatttggatctttggggtctttgaagtgtttaatagatactgagtttgtatctattagaatgaattcgtagaatttgcgggtttttttttgtggctattggcctgtaatggaatcccggggggaatactttggcggttgctttgaaaggattcttgtcccagtattctggttccatttgtaaaacattgaaaaatttgttttttgaaatataactgttgctgggttgtggcattgattcttgttgagtcaacgattggcttggtttttggttacagacagttttggtctgtttggttttttggatttgtttttgcatatctgtttcagaatcatcgtctgattctgaggccatttttgcccaggtctttttggataattttggtat

SEQ ID NO: 14785 - DNA, 1057 bp, Glycine max
  Gm_smallRNAprecursor_7618
ttgagcttgctaagaatgctgccagttgcgacttctgatttagaaacaaagatgtctccggatcagcaggtttaaggaactcaggattgctctggaaccagttcttgacttgatttggagcagcctttgaagtatcgaattgtgaccactattttacaaaggcgtgtctctgtaacggtggatattgcttgctgttttcagtttttccgtatctgtattgccatgaaaagatccatgacaaggcaaaactggaaaagtactttaaatctgccggaatatgtgattccttgatattatagagcttgttgaattgttggaatccctgttggacttcttctgggaatatttgtggaattggtccgaagtagttccaccattggaggaaccaatttggaaaattatacgcaatattattttagaagtaaattagccatgaatgcttgaatttactattttgatgccaaaacacattggtccaggcgtcaatgtaatcccaataattatatcctgcagggtcaaatggtgcagaaaattttttgggttggtttaagtttgagccataatgtcgtggctgcataacctttaagatttggattgtggaatgggtatttagatttggatctttggggtctttgaagtgtttaatagatactgagtttgtatctattagaatgaattcgtagaatttgcgggtttttttttgtggctattggcctgtaatggaatcccggggggaatactttggcggttgctttgaaaggattcttgtcccagtattctggttccatttgtaaaacattgaaaaatttgttttttgaaatataactgttgctgggttgtggcattgattcttgttgagtcaacgattggcttggtttttggttacagacagttttggtctgtttggttttttggatttgtttttgcatatctgtttcagaatcatcgtctgattctgaggccatttttgcccaggtctttttggataattttggtattttggtgaggcctatatcctctaaggccaagagagtttgtattgaccaggcataatcag

SEQ ID NO: 14786 - DNA, 1127 bp, Glycine max
  Gm_smallRNAprecursor_7619
ggacaaattctcctacgtaatttagacaacctagaaatctttgtaattgggttttgtctaagatttggttgggaaatttgctagcaaactctattgacctttcgattggaatgattgtaccttgataaatattatggccaaggaatcgaattcgagtttggaaaagattgatttttgatttggagactgccaaaccattttgtttgatgatgtggatgaaggtttggagatgtttgaaatgttggtcaatgttttgggaaaagattaaaacatcatctatgtagacaatgacaaattttgaatagggattaaaaatatcattcataattttttgaaattctgaaggggcattcttcagtccgaatggcatcacattccattcatattgcctgaaaggtacagtaaacgctgttttgtacctatctaattcttggatttggatttgccaaaatccagatttcatatcaaattttgaaaatatctttgcagaatttaatctgttaagcaaatcttttttgtttggaataggatatctaatccattgtaatgcttgatttagtggtttgtaatttatgaccaagcgaggtgttccacgctcaatctcagattgcttgttgacataaaaagccgcacaagaccatgggcttttgcttttccggattaggcctttatcaagcaaatccttgatttcttttttacaatactgaagaagttcttcattcatttggattggtctggctttggtgggaatttgtttttccctaaagtctttctcataagggagatcaacaatatgtttctttctatcccaaaatgcatgtggcaattcagaacagacggttgattcaatatgatctaataaagattgaattttttcttttacctggggttttcccagttgtatctgaatattactaaaagatacttcttcttttaagaagttaatttgattaatcttattttctataagatttatatttctggaaattggtttagtagaaaaattaaatataatttttcttcctaaataatttgtgattattccttcattagatatttggatgggaaacagggctctaatgaaaggctttcctaagattacctcattcttaaggtttttacaagaa

SEQ ID NO: 14787 - DNA, 1159 bp, Glycine max
  Gm_smallRNAprecursor_7620
acccatctttcaggaagagttacttcatcccattttatttttctcgggagagaaacgttagcctttgtcatatcagtgataaaaaaggttgtttctcctttttgaggttttaacaggactctagatgcacaagtattcatgaccttgtattggatcctataaattaaggctgctgggattgatccttctttcatgtcaaggccatgaaagtggatgtttaagaacagagagtcaagaatgtttatgttcatcagactcactgttttgtttggataacagttaaaatatattggaccttgtcctaggctggtttcgactgttccaattagggagtcttcaaattgattatgcctaatgtctcttagacacattaaaactgctgcatctatgcccatatcaattaagggcttgatggctacttgtacacaaccgatgtgtagatatttatacttacggctatgttcataaattgaattttttgaaagtaaatgaaattcttcccctatatcttgtcctagaggaatattgttttctactgttttgattatgtaatcaaagttgtgtttgtactttattgtttcaggaacgtatagttgatcctgagggatttctggaatgttccagtcatccatgttttgattgatatcttcgaatcgaacttcctcatcgaagagattgtgttttggggcgacctcttgggtctggttatcttgatcatttaataaattggggtttcttgaagaagatgatgaggaggagtttgagcgaaaagagatacgggaaaaagatcgtaatagtatatacatgattataatattctctaatatctttgccttcctttggttccatagaaatatctccgtaagtaaatatgtcacaaaatttttctggatctgaattatttttaagaaaaactttttttttttggaaaatagtttgaacggcaatcctatagccaccagtattttgtgtcttgatattttggttaaacaatacaccttagccttaccgccctttatccatcacgggtcttactgctacagtactattcaactaaaatattagactgctgtacttccaggaagtactgttcaaacacttactgtacaattcaaagtaaaatatttcttgtactatacaaggttttagtttcagatcc

SEQ ID NO: 14788 - DNA, 1197 bp, Glycine max
  Gm_smallRNAprecursor_7621
gttttaacaggactctagatgcacaagtattcatgaccttgtattggatcctataaattaaggctgctgggattgatccttctttcatgtcaaggccatgaaagtggatgtttaagaacagagagtcaagaatgtttatgttcatcagactcactgttttgtttggataacagttaaaatatattggaccttgtcctaggctggtttcgactgttccaattagggagtcttcaaattgattatgcctaatgtctcttagacacattaaaactgctgcatctatgcccatatcaattaagggcttgatggctacttgtacacaaccgatgtgtagatatttatacttacggctatgttcataaattgaattttttgaaagtaaatgaaattcttcccctatatcttgtcctagaggaatattgttttctactgttttgattatgtaatcaaagttgtgtttgtactttattgtttcaggaacgtatagttgatcctgagggatttctggaatgttccagtcatccatgttttgattgatatcttcgaatcgaacttcctcatcgaagagattgtgttttggggcgacctcttgggtctggttatcttgatcatttaataaattggggtttcttgaagaagatgatgaggaggagtttgagcgaaaagagatacgggaaaaagatcgtaatagtatatacatgattataatattctctaatatctttgccttcctttggttccatagaaatatctccgtaagtaaatatgtcacaaaatttttctggatctgaattatttttaagaaaaactttttttttttggaaaatagtttgaacggcaatcctatagccaccagtattttgtgtcttgatattttggttaaacaatacaccttagccttaccgccctttatccatcacgggtcttactgctacagtactattcaactaaaatattagactgctgtacttccaggaagtactgttcaaacacttactgtacaattcaaagtaaaatatttcttgtactatacaaggttttagtttcagatccataaaatttgttaacatatgtccttacgaatagtattcctacttccccatcaggctctgataccagagatcagcgggaataagatcaaacggacagataggaagtaagaatgcagtatgataaatgaggaaaatataaacttgt

SEQ ID NO: 14789 - DNA, 1041 bp, Glycine max
  Gm_smallRNAprecursor_7622
gtttattgcaattattaagcaaacaaaatgcttaatttttggtataaatcaggtaaaaaaagcagcttgatatttttgtccaaaatatttagaacggtaaataatttttaatcctccaaactacaatttataagtcaattgattttggtccctaactgtacaattaatatacctatatttgggtattgatttgaattcaaattatattttggcataaatgtgatttgttacccaattaaacatttacgaatcatgacatgtcattcaaatcttaagagttcgtcatatggactcgttgtttttgaacttataaatttattactagattataaataaatccttcaaaatttgtatttttcactttaatccttccaccctcaaattgaatcaatattcttacgagtgttgctaggtgcacccagcattcttaaaaaatggtaaaattgtccttgcttagtttttctcctacggatcaagttgatctgtaagtctcttacggatcaagttgatccggaagtctcttacggatcaagttgatccggaagtctcttacggatcaagttgatccgtaagaggaaaaataattataatatactttaaaatacaacatatttatttataatataattaaatctattttttattttattaattataatatatttataaatattgatttattataaataattaattttttaatatatttttttagaataaatttgtttagaagatgatattaaaatacttactcagtctcattataattattgtttaaggttattttatacatattaataaaaatcaataaatacataaaatataatatcataaagaattaatcatatcattattaatattataaagaatataaaaaaaataattagtattatataaaaaattaaaatactaactattttataatacatttttttacatgatcattagtataagtgggaaaattgtaattataagagaatttaaaaatattagtacattatataagatcttagataacgaatgatgtccattttttggtta

SEQ ID NO: 14790 - DNA, 1042 bp, Glycine max
  Gm_smallRNAprecursor_7623
gtttattgcaattattaagcaaacaaaatgcttaatttttggtataaatcaggtaaaaaaagcagcttgatatttttgtccaaaatatttagaacggtaaataatttttaatcctccaaactacaatttataagtcaattgattttggtccctaactgtacaattaatatacctatatttgggtattgatttgaattcaaattatattttggcataaatgtgatttgttacccaattaaacatttacgaatcatgacatgtcattcaaatcttaagagttcgtcatatggactcgttgtttttgaacttataaatttattactagattataaataaatccttcaaaatttgtatttttcactttaatccttccaccctcaaattgaatcaatattcttacgagtgttgctaggtgcacccagcattcttaaaaaatggtaaaattgtccttgcttagtttttctcctacggatcaagttgatctgtaagtctcttacggatcaagttgatccggaagtctcttacggatcaagttgatccggaagtctcttacggatcaagttgatccgtaagaggaaaaataattataatatactttaaaatacaacatatttatttataatataattaaatctattttttattttattaattataatatatttataaatattgatttattataaataattaattttttaatatatttttttagaataaatttgtttagaagatgatattaaaatacttactcagtctcattataattattgtttaaggttattttatacatattaataaaaatcaataaatacataaaatataatatcataaagaattaatcatatcattattaatattataaagaatataaaaaaaataattagtattatataaaaaattaaaatactaactattttataatacatttttttacatgatcattagtataagtgggaaaattgtaattataagagaatttaaaaatattagtacattatataagatcttagataacgaatgatgtccattttttggttaa

SEQ ID NO: 14791 - DNA, 1040 bp, Glycine max
  Gm_smallRNAprecursor_7624
tttattgcaattattaagcaaacaaaatgcttaatttttggtataaatcaggtaaaaaaagcagcttgatatttttgtccaaaatatttagaacggtaaataatttttaatcctccaaactacaatttataagtcaattgattttggtccctaactgtacaattaatatacctatatttgggtattgatttgaattcaaattatattttggcataaatgtgatttgttacccaattaaacatttacgaatcatgacatgtcattcaaatcttaagagttcgtcatatggactcgttgtttttgaacttataaatttattactagattataaataaatccttcaaaatttgtatttttcactttaatccttccaccctcaaattgaatcaatattcttacgagtgttgctaggtgcacccagcattcttaaaaaatggtaaaattgtccttgcttagtttttctcctacggatcaagttgatctgtaagtctcttacggatcaagttgatccggaagtctcttacggatcaagttgatccggaagtctcttacggatcaagttgatccgtaagaggaaaaataattataatatactttaaaatacaacatatttatttataatataattaaatctattttttattttattaattataatatatttataaatattgatttattataaataattaattttttaatatatttttttagaataaatttgtttagaagatgatattaaaatacttactcagtctcattataattattgtttaaggttattttatacatattaataaaaatcaataaatacataaaatataatatcataaagaattaatcatatcattattaatattataaagaatataaaaaaaataattagtattatataaaaaattaaaatactaactattttataatacatttttttacatgatcattagtataagtgggaaaattgtaattataagagaatttaaaaatattagtacattatataagatcttagataacgaatgatgtccattttttggtta

SEQ ID NO: 14792 - DNA, 1039 bp, Glycine max
  Gm_smallRNAprecursor_7625
ttattgcaattattaagcaaacaaaatgcttaatttttggtataaatcaggtaaaaaaagcagcttgatatttttgtccaaaatatttagaacggtaaataatttttaatcctccaaactacaatttataagtcaattgattttggtccctaactgtacaattaatatacctatatttgggtattgatttgaattcaaattatattttggcataaatgtgatttgttacccaattaaacatttacgaatcatgacatgtcattcaaatcttaagagttcgtcatatggactcgttgtttttgaacttataaatttattactagattataaataaatccttcaaaatttgtatttttcactttaatccttccaccctcaaattgaatcaatattcttacgagtgttgctaggtgcacccagcattcttaaaaaatggtaaaattgtccttgcttagtttttctcctacggatcaagttgatctgtaagtctcttacggatcaagttgatccggaagtctcttacggatcaagttgatccggaagtctcttacggatcaagttgatccgtaagaggaaaaataattataatatactttaaaatacaacatatttatttataatataattaaatctattttttattttattaattataatatatttataaatattgatttattataaataattaattttttaatatatttttttagaataaatttgtttagaagatgatattaaaatacttactcagtctcattataattattgtttaaggttattttatacatattaataaaaatcaataaatacataaaatataatatcataaagaattaatcatatcattattaatattataaagaatataaaaaaaataattagtattatataaaaaattaaaatactaactattttataatacatttttttacatgatcattagtataagtgggaaaattgtaattataagagaatttaaaaatattagtacattatataagatcttagataacgaatgatgtccattttttggtta

SEQ ID NO: 14793 - DNA, 1065 bp, Glycine max
  Gm_smallRNAprecursor_7626
ctagtcaagctcgtccacaaaaatagggtttttgaaagtttatcatttcagtttcttactaagtaaaaaggatcatttttaaggtccaacgccttaaaatgatcacctttcaagtaaaaagaatcacttgattcacgcataagaaagaactacgtaggtctgatttcctctccaaagtagggtacgtaggagcaaaagccccacttttgtcgacctcaaaaaataaaaagaaataaaagttaagataacacaattccacaattctaaaaaataggctgttgtccttcgagacaaacgtaagaggtgctaataccttcctcaagcataaatataactcccgaacttagaattttcattttgaccggtttccttcggttttcccgacgttttccacaaataaacgttggtggcgactccgtgcacctttcctcctttggaaagcgcacccgtgagcctcgccctcgcttgcccgcgaagggcacgttgcgacaggttctttctgtgaacaatttggtctactggcctgtccaaagcaaaagaaaaaacaatcttcaagaaaagaaatccatgagaataaaccggtcaatacaaagagatttccaaggaggagatactcacacaaaccatcaaccagtagagaaatagaaaatcctagacaaaaaacaaaatcaaaaataacgtcctacaattgtggaaaacaaggccacatcagcaaatattgtagactaaaaaagaagttaagaaacctcaacctagaaccagcaattgaagaacaaataaacaatttgcttatagaaacctcagaggaagaaacagaaacgtcatcctccgagccttccgatgaaaacctaaatctaatccaacaagatgaccaactatcatcaacagatgatgatgatgatgggcaaatcaatactctaacgagagaacaagatctcttgtttgaagcaatcaattccatacctgacccccaggaaaagaaggttttcttggaaaaactcaagaaaacattagaggtaaaacctagacaaaaggattttatcacaaacaacaaatttgatgtaa

SEQ ID NO: 14794 - DNA, 1080 bp, Glycine max
  Gm_smallRNAprecursor_7627
atgatttcgttttagaaacaatggccctatttgacacaggggctgattcaaactgcattttagaaggattaattcctacaaaattctttgagaaaacctcagaaaaattaagtacggcaaacggctcaaaactaaaaattaattttaagctatcaaatgcaatcattgaaaaccaaggtcttaagattaacacaaactttcttctggtaaaaaaccttaataatgaagtaatcttaggaacgcccttcattagagccctgtttcccatccaaatatctaatgaaggaataaccacaaattatttaggaagaaaaattatatttaacttttctactaaaccaatttccagaaatataaatcttatagaaaataagattaatcaaattaacttcttaaaagaagaggtatcttttaataatattcagatacaactgggaaaaccccaagtaaaagaaaaaattcaatctttattaaatcatattgaatcgactgtctgttctgaattgccacatgcattttgggacagaaagaaacatattgttgatctcccttatgagaaatactttagggaaaaacaaattcccacaaaagccagaccaatccaaatgaatgaagaacttcttcaataccgtcaaaaggaaatcaaggatttgcttgataaaggcctaatccggaaaagcaagagcccatggtcttgtgcggctttttatgtcaacaaacaatctgagattgagcgtggaacaccccgcttagtcataaattacaaaccactaaatcaagaattacaatggattagatatcctattccaaacaaaaaagatttgcttaacagattaaattctgcaaagatattttcaaaatttgatatgaaatctggattttggcaaatccaaatccaagaatcagataggtacaaaacagcgtttactgtacctttcgggcaatatgaatggaacgtgatgccattcggactgaagaatgccccttcagaatttcaaaaaattatgaacgatatttttaatccctattcaaaatttgtcattgtctacatagatgatgttttaatcttttcccaaaaca

SEQ ID NO: 14795 - DNA, 1174 bp, Glycine max
  Gm_smallRNAprecursor_7628
aaaaacaaattcccacaaaagccagaccaatccaaatgaatgaagaacttcttcaataccgtcaaaaggaaatcaaggatttgcttgataaaggcctaatccggaaaagcaagagcccatggtcttgtgcggctttttatgtcaacaaacaatctgagattgagcgtggaacaccccgcttagtcataaattacaaaccactaaatcaagaattacaatggattagatatcctattccaaacaaaaaagatttgcttaacagattaaattctgcaaagatattttcaaaatttgatatgaaatctggattttggcaaatccaaatccaagaatcagataggtacaaaacagcgtttactgtacctttcgggcaatatgaatggaacgtgatgccattcggactgaagaatgccccttcagaatttcaaaaaattatgaacgatatttttaatccctattcaaaatttgtcattgtctacatagatgatgttttaatcttttcccaaaacattgaccaacatttcaaacatctccaaaccttcatccatatcaccaaacaaaatggtttggcagtctccaaatcaaaaatcaatcttttccaaacacgaattcgattccttggtcaccatatttatcaaggaatacgtgattccttgctattatagagcttgttgaattgttggaatccctgttggacttcttctggaaatatttgtggaattggtccgatgtagttccaccattggaggaaccaatttggaaaattatacgcagtattatttttgaagtaaatcagccatgaatgcttgaatttactattttgatgccagaacacattggtccaggcatcaatgtaatcccaataattatatcctgcagggtcaaatggtgaagaaaattttttgggttggtttaagtttgagccatcatgtcgtggctgcataaccttcaagatctggattgtggaataggtatttagatttggaacgattgtaccttgataaatatggtgaccaaggaatcgaattcgtgtttggaaaagattgatttttgatttggagactgccaaaccattttgtttgatgatatggatgaaggtttggagatgtttgaaatgttggtcaatgttttgggaaaagattaaaacatcatctatgtagacaatgacaaattt

SEQ ID NO: 14796 - DNA, 1148 bp, Glycine max
  Gm_smallRNAprecursor_7629
cacaaaagccagaccaatccaaatgaatgaagaacttcttcaataccgtcaaaaggaaatcaaggatttgcttgataaaggcctaatccggaaaagcaagagcccatggtcttgtgcggctttttatgtcaacaaacaatctgagattgagcgtggaacaccccgcttagtcataaattacaaaccactaaatcaagaattacaatggattagatatcctattccaaacaaaaaagatttgcttaacagattaaattctgcaaagatattttcaaaatttgatatgaaatctggattttggcaaatccaaatccaagaatcagataggtacaaaacagcgtttactgtacctttcgggcaatatgaatggaacgtgatgccattcggactgaagaatgccccttcagaatttcaaaaaattatgaacgatatttttaatccctattcaaaatttgtcattgtctacatagatgatgttttaatcttttcccaaaacattgaccaacatttcaaacatctccaaaccttcatccatatcaccaaacaaaatggtttggcagtctccaaatcaaaaatcaatcttttccaaacacgaattcgattccttggtcaccatatttatcaaggaatacgtgattccttgctattatagagcttgttgaattgttggaatccctgttggacttcttctggaaatatttgtggaattggtccgatgtagttccaccattggaggaaccaatttggaaaattatacgcagtattatttttgaagtaaatcagccatgaatgcttgaatttactattttgatgccagaacacattggtccaggcatcaatgtaatcccaataattatatcctgcagggtcaaatggtgaagaaaattttttgggttggtttaagtttgagccatcatgtcgtggctgcataaccttcaagatctggattgtggaataggtatttagatttggaacgattgtaccttgataaatatggtgaccaaggaatcgaattcgtgtttggaaaagattgatttttgatttggagactgccaaaccattttgtttgatgatatggatgaaggtttggagatgtttgaaatgttggtcaatgttttgggaaaagattaaaacatcatctatgtaga

SEQ ID NO: 14797 - DNA, 1134 bp, Glycine max
  Gm_smallRNAprecursor_7630
atccaaatgaatgaagaacttcttcaataccgtcaaaaggaaatcaaggatttgcttgataaaggcctaatccggaaaagcaagagcccatggtcttgtgcggctttttatgtcaacaaacaatctgagattgagcgtggaacaccccgcttagtcataaattacaaaccactaaatcaagaattacaatggattagatatcctattccaaacaaaaaagatttgcttaacagattaaattctgcaaagatattttcaaaatttgatatgaaatctggattttggcaaatccaaatccaagaatcagataggtacaaaacagcgtttactgtacctttcgggcaatatgaatggaacgtgatgccattcggactgaagaatgccccttcagaatttcaaaaaattatgaacgatatttttaatccctattcaaaatttgtcattgtctacatagatgatgttttaatcttttcccaaaacattgaccaacatttcaaacatctccaaaccttcatccatatcaccaaacaaaatggtttggcagtctccaaatcaaaaatcaatcttttccaaacacgaattcgattccttggtcaccatatttatcaaggaatacgtgattccttgctattatagagcttgttgaattgttggaatccctgttggacttcttctggaaatatttgtggaattggtccgatgtagttccaccattggaggaaccaatttggaaaattatacgcagtattatttttgaagtaaatcagccatgaatgcttgaatttactattttgatgccagaacacattggtccaggcatcaatgtaatcccaataattatatcctgcagggtcaaatggtgaagaaaattttttgggttggtttaagtttgagccatcatgtcgtggctgcataaccttcaagatctggattgtggaataggtatttagatttggaacgattgtaccttgataaatatggtgaccaaggaatcgaattcgtgtttggaaaagattgatttttgatttggagactgccaaaccattttgtttgatgatatggatgaaggtttggagatgtttgaaatgttggtcaatgttttgggaaaagattaaaacatcatctatgtagaca

SEQ ID NO: 14798 - DNA, 1134 bp, Glycine max; identical to SEQ ID NO: 14797
  Gm_smallRNAprecursor_7631

SEQ ID NO: 14799 - DNA, 1135 bp, Glycine max
  Gm_smallRNAprecursor_7632
atccaaatgaatgaagaacttcttcaataccgtcaaaaggaaatcaaggatttgcttgataaaggcctaatccggaaaagcaagagcccatggtcttgtgcggctttttatgtcaacaaacaatctgagattgagcgtggaacaccccgcttagtcataaattacaaaccactaaatcaagaattacaatggattagatatcctattccaaacaaaaaagatttgcttaacagattaaattctgcaaagatattttcaaaatttgatatgaaatctggattttggcaaatccaaatccaagaatcagataggtacaaaacagcgtttactgtacctttcgggcaatatgaatggaacgtgatgccattcggactgaagaatgccccttcagaatttcaaaaaattatgaacgatatttttaatccctattcaaaatttgtcattgtctacatagatgatgttttaatcttttcccaaaacattgaccaacatttcaaacatctccaaaccttcatccatatcaccaaacaaaatggtttggcagtctccaaatcaaaaatcaatcttttccaaacacgaattcgattccttggtcaccatatttatcaaggaatacgtgattccttgctattatagagcttgttgaattgttggaatccctgttggacttcttctggaaatatttgtggaattggtccgatgtagttccaccattggaggaaccaatttggaaaattatacgcagtattatttttgaagtaaatcagccatgaatgcttgaatttactattttgatgccagaacacattggtccaggcatcaatgtaatcccaataattatatcctgcagggtcaaatggtgaagaaaattttttgggttggtttaagtttgagccatcatgtcgtggctgcataaccttcaagatctggattgtggaataggtatttagatttggaacgattgtaccttgataaatatggtgaccaaggaatcgaattcgtgtttggaaaagattgatttttgatttggagactgccaaaccattttgtttgatgatatggatgaaggtttggagatgtttgaaatgttggtcaatgttttgggaaaagattaaaacatcatctatgtagacaa

SEQ ID NO: 14800 - DNA, 1184 bp, Glycine max
  Gm_smallRNAprecursor_7633
tagtcataaattacaaaccactaaatcaagaattacaatggattagatatcctattccaaacaaaaaagatttgcttaacagattaaattctgcaaagatattttcaaaatttgatatgaaatctggattttggcaaatccaaatccaagaatcagataggtacaaaacagcgtttactgtacctttcgggcaatatgaatggaacgtgatgccattcggactgaagaatgccccttcagaatttcaaaaaattatgaacgatatttttaatccctattcaaaatttgtcattgtctacatagatgatgttttaatcttttcccaaaacattgaccaacatttcaaacatctccaaaccttcatccatatcaccaaacaaaatggtttggcagtctccaaatcaaaaatcaatcttttccaaacacgaattcgattccttggtcaccatatttatcaaggaatacgtgattccttgctattatagagcttgttgaattgttggaatccctgttggacttcttctggaaatatttgtggaattggtccgatgtagttccaccattggaggaaccaatttggaaaattatacgcagtattatttttgaagtaaatcagccatgaatgcttgaatttactattttgatgccagaacacattggtccaggcatcaatgtaatcccaataattatatcctgcagggtcaaatggtgaagaaaattttttgggttggtttaagtttgagccatcatgtcgtggctgcataaccttcaagatctggattgtggaataggtatttagatttggaacgattgtaccttgataaatatggtgaccaaggaatcgaattcgtgtttggaaaagattgatttttgatttggagactgccaaaccattttgtttgatgatatggatgaaggtttggagatgtttgaaatgttggtcaatgttttgggaaaagattaaaacatcatctatgtagacaatgacaaattttgaatagggattaaaaatatcgttcataattttttgaaattctgaaggggcattcttcagtccgaatggcatcacgttccattcatattgcccgaaaggtacagtaaacgctgttttgtacctatctgattcttggatttggatttgccaaaatccagatttcatatcaaattttgaaaatatctttgca

SEQ ID NO: 14801 - DNA, 1114 bp, Glycine max
  Gm_smallRNAprecursor_7634
gaaggttatctctacctttccggagttatcttgcttgatatgttctatggttggagcgggtcggggaatagacggtgttgccttatccataacccatctttcaggaagagttacctcatcccattttatttttctcgggagagaaacgttagcctttgtcatatcagtgataaacaaggttgtttctcctttttgaggttttaacaggactctagatgcacaagtattcatgaccttgtactggatcctataaattaaggctgctgggattgattcttctttcatgtcaaggccatgaaagtggatgtttaagaacagagagtcaagaatgtttctgtccatcagactcaccgttttgtttggataacagttaaaatatattggaccttgtcctaggctggtttcgactgttccaattagggagtcttcaaattgattatgcctaatgtctcttagacacattaaaactgctgcatctatgcccatatcaattaagggcttgatggctacttgtacacaaccgatgtgtagatatttatacttacggctatgttcataaattgaattttttgaaagtaaatgaaattcttcccctattgcaatctaatattttagttgaatagtactgtagcagtatgacccatgttggataaagggcggtaaggctaaggtgtactgtttaaccaaaatatcaagacataatacactggtggctataggattgccgttcaaatagatccaattttactgtttctacagtatcggtaatgtttaccggaactgttacaaaacttttacaaattacattatttaaaagaaactaacaaattagttacaataattcatgattactacaactaattaatcatcgtctaatgatataccaaaacagtcatcttcattctggtagaatggatcatcttcttggtcatcattagtctcggatgattcagcttccttcttggaaggttcttcttccacttcctgttgaagtagttggagaacttctttgagattctgagcaagactctctttagattttgagcttgctaagaatgctgccagttgcgacttctgatttagaaacaaagatgtctccggatcagcaggttta

SEQ ID NO: 14802 - DNA, 1197 bp, Glycine max
  Gm_smallRNAprecursor_7635
ttttaacaggactctagatgcacaagtattcatgaccttgtactggatcctataaattaaggctgctgggattgatccttctttcatgtcaaggccatgaaagtggatgtttaagaacagagagtcaagaatgtttctgtccatcagactcactgttttgtttggataacagttaaaatatattggaccttgtcctaggctggtttcgactgttccaattagggagtcttcaaattgattatgcctaatgtctcttagacacattaaaactgctgcatctatgcccatatcaattaagggcttgatggctacttgtacataaccgatgtgtagatatttatacttacgcctatgttcataaattgaatttttttgaaagtaaatgaaattcttcccctatatcttgtcctagaggaatattgttttctactattttgattatgtaatcaaagttgtgtttgtcttttattgttttaggaacgtatagttgatcctgagggatttctggaatgttccagtcatccatgttttgattgatatcttagaatcggacttcctcatcgaagagattatgttttggggcgacctcttgggtctggttgtcttggtcatttaataaattggagttttttgaagaagatgatgaggaggagtttgagcgaaaagagatacgggaaaaagatcgtaatagtctagacatgattataatattctctaatatctttgccctcatttggttccatagaaatatctccgtaagtaaatatgtcacaaaatttttctggtaaaaaaccttaagaatgaagtaatcttaggaacgcccttcattagagctctgtttcccatccaaatatctaatgaaggaataaccacaaattatttaggacgattatatatatatatatgtatgtatgtatgtatgtttaggtagcaagatacttgggatatgcatctatattgcaaaaatgcaacacaaaaatatacatatgtttagatagcaaaatacctcatgaaaaaaaaaacaacagaaaagtaaaatattgtctagctgaaaagccaacatgattttgagaagagataacttccagcttttctttgaaaaaaaattcactgatcatagctagtttttgaaaaaaaaatggtgtacacatttgaagggtaaatgctgtgaaagtttttccgaacacccaagataga

SEQ ID NO: 14803 - DNA, 1186 bp, Glycine max
  Gm_smallRNAprecursor_7636
attggctccacgaacgtcccgcagttcttcctccatgcctcctgaagacctacaacagctgacccaacaaatcagggaccaactgtaggagtcaatcgcagaaaaagtgactcgacagctgatggcatccttcagccagatacagtcccagtttcagtattagatacattcacagggacttgcattgcctccggagccagaggttggtcccttaggtgcttgtgtcagcacaaaggagagttgtgttgctccctcagggaacgatccagggacgggtgactcagacaaatgcgggctatacattgaagaaaatccttcctgcctggttgccctaggaagactttatgagggatccacaacagttcacaacatccctttgttgcattgccaagtcaaggttggtgttaaggaggttaaagatgcagaggctctcgttcctgtacccactgacgaggttaccttagtgggacagacagttaacaccttccttgcttggtcgacacatcttgtgaagcgtttatcagaacaggtattttactctggttatatgtttctttttttcaattaatttgttcactgtaatcaaaacttgttaatatctatgtttgatcaacaggcagctgtgtctccagcaaaacctccagaaagcttggttgatgaggtcgatgatccgctgtacctgatgacattgaccatcccacaactgtttttgaagcctctccaggttatgtgggatgctaccatattcagggtgtttaatcaaaacttcccgttgtacataaagcacgaagatctctctgaaattacacacggtggtcaatgtctcagcatatctgttatacaattgtgaattttgtaagtcattttagattactgtcaattaccaaagtaattgttttaaattcatacataattaactttgtcttaacaacacagacatctgactgagacaagtctgcgagccgggaattccgatgtgtatggattcctcgagccatagtccattcagagatctgggcaatcgcaatttgaatcgaaaagctacatcaagagttggatgtagagttcaaaacgagatatttaccttggagcctacctgaatgggtaagtcaaacacaacaactaaatttaaataatctatattactacaacaacccatatttgtctctattgcagcggacactgg

SEQ ID NO: 14804 - DNA, 1157 bp, Glycine max
  Gm_smallRNAprecursor_7637
ctaaaaattgtttcaactatgcttaaaatagaagaaaacagaagtaaatgatgatagaacatctctcaactgtttatatattttagtttttaaaacttgtttggaaaaattttcaaaacttatgaaatttagatgaaaaattgattgtgtaatgcaaaattattttagaaaataatttttaagacgagtaaagagaagatcaaacaagcgtcaatctattgcttttccatcttcacctccaggaatccaaaagacaatagggcctagcccaacacccaataatatagtgagtgttgctaggtgcacccagcattctaaaaaaatgacaaaattgtccttgcttggttttcctcttccggatcaacttgatccggaagaggaaaaataaaaattttgttaattatacaagatatttatttcattaattataatatatttatttattttattaattataatatatttataaatattgatttataataaataattaatgttaatcaatcataatcataattcatgctaatcaatcataattccctaaaagaggatataaataatttcagaattaccaatcataatgcaatttttgaaattgcaaattatttatatcttcttttagggaattatgattgattgacataattgattgattagcatgaattatgattatgattgattaacaagattgattgattctgaaaattgctaactctgaaattatttatatcctcttttaggaaattatgattgattagcatgattgattgattagcatgaattatgattatgattgattagcattaattatttataataaatcaatatttataaatatattataactaataaaataaataaatatatttaattatattataattaatgaaataaatatctttaaatatcttgtataattaacaaaatttttatttttcctctttcggatcaagttgatccggaaaagacttccggaacaacttgatcaggaagtactttcggatcaacttacggatcaacatgttgattcagaagaggaaaatcaagcaagggtaattttgtcagttttttagaatgctgggtgcaccagcaataatgctgggtgcacctaacaacactctaatatagcaatgtgaaggcccagcccaatattatgg

SEQ ID NO: 14805 - DNA, 1061 bp, Glycine max
  Gm_smallRNAprecursor_7638
gtcagtggaataagatcaaacggacagataggaagtaagaatgcagtatgacaaatgaaagacaaatataaacttgaaaaacggatatcaagggcacaccggagaccggcttacaaatcccaggttttcataaacaaggaaaccgaagcgacggtagagctgcacaggatcggtgaagggagaagagataaggatgaaaaatagaaatttattgaatttagaaagaagcgcttacaaaaatcttttttcagagcacctcttcagaaacctgaaaaatggctaaatgaaagggtacctcacaacatacttgaggactccttatatagccaaaaatctaagccggtagttgccggtagttttgactgggactatttgactgtttgttacaagacaagtagttttgaccgggactttaatggctacaagacaggtagtattgtccagcattaattacacattaattacaaacagacggttttgtgaccgaaattaaatttaatctaaacagataccaaaacaatcatcttcgttttggtaaaagggatcttcttcttctttttcagcagaacttgtttcttccttctttgaggatgaagcttcttcttcctgctgtaacatttgtagaacttccttcagatttttaactaagacctcctttgatgtcgatcctgctaaaaatgctgtcagatgagacttttggttcaaaaacacagaagtttctgggtcagctgctttgaggaattctggatgggattggaaccagagttttacttgttctggatccgctttggatgagtcaaattgtgtccaccattttacaaatgcgtgttgccatgagaatatccatgacaatgcatagcttgaaaagtatttaagatctgctggaattcgtgattcctgcaaattgtattgtttcttaaattgggcaaatccttgttggaccgtttctgggaatatctctgggattggtccaaagaagtgccaccattgcaaaaaccaattgggaaaattgtaaattgtgttggtcttgaaatatatcaaccatgaatgcttgaagcgag

SEQ ID NO: 14806 - DNA, 1063 bp, Glycine max
  Gm_smallRNAprecursor_7639
gtcagtggaataagatcaaacggacagataggaagtaagaatgcagtatgacaaatgaaagacaaatataaacttgaaaaacggatatcaagggcacaccggagaccggcttacaaatcccaggttttcataaacaaggaaaccgaagcgacggtagagctgcacaggatcggtgaagggagaagagataaggatgaaaaatagaaatttattgaatttagaaagaagcgcttacaaaaatcttttttcagagcacctcttcagaaacctgaaaaatggctaaatgaaagggtacctcacaacatacttgaggactccttatatagccaaaaatctaagccggtagttgccggtagttttgactgggactatttgactgtttgttacaagacaagtagttttgaccgggactttaatggctacaagacaggtagtattgtccagcattaattacacattaattacaaacagacggttttgtgaccgaaattaaatttaatctaaacagataccaaaacaatcatcttcgttttggtaaaagggatcttcttcttctttttcagcagaacttgtttcttccttctttgaggatgaagcttcttcttcctgctgtaacatttgtagaacttccttcagatttttaactaagacctcctttgatgtcgatcctgctaaaaatgctgtcagatgagacttttggttcaaaaacacagaagtttctgggtcagctgctttgaggaattctggatgggattggaaccagagttttacttgttctggatccgctttggatgagtcaaattgtgtccaccattttacaaatgcgtgttgccatgagaatatccatgacaatgcatagcttgaaaagtatttaagatctgctggaattcgtgattcctgcaaattgtattgtttcttaaattgggcaaatccttgttggaccgtttctgggaatatctctgggattggtccaaagaagtgccaccattgcaaaaaccaattgggaaaattgtaaattgtgttggtcttgaaatatatcaaccatgaatgcttgaagcgagta

SEQ ID NO: 14807 - DNA, 1063 bp, Glycine max; identical to SEQ ID NO: 14806
  Gm_smallRNAprecursor_7640

SEQ ID NO: 14808 - DNA, 1064 bp, Glycine max
  Gm_smallRNAprecursor_7641
gtcagtggaataagatcaaacggacagataggaagtaagaatgcagtatgacaaatgaaagacaaatataaacttgaaaaacggatatcaagggcacaccggagaccggcttacaaatcccaggttttcataaacaaggaaaccgaagcgacggtagagctgcacaggatcggtgaagggagaagagataaggatgaaaaatagaaatttattgaatttagaaagaagcgcttacaaaaatcttttttcagagcacctcttcagaaacctgaaaaatggctaaatgaaagggtacctcacaacatacttgaggactccttatatagccaaaaatctaagccggtagttgccggtagttttgactgggactatttgactgtttgttacaagacaagtagttttgaccgggactttaatggctacaagacaggtagtattgtccagcattaattacacattaattacaaacagacggttttgtgaccgaaattaaatttaatctaaacagataccaaaacaatcatcttcgttttggtaaaagggatcttcttcttctttttcagcagaacttgtttcttccttctttgaggatgaagcttcttcttcctgctgtaacatttgtagaacttccttcagatttttaactaagacctcctttgatgtcgatcctgctaaaaatgctgtcagatgagacttttggttcaaaaacacagaagtttctgggtcagctgctttgaggaattctggatgggattggaaccagagttttacttgttctggatccgctttggatgagtcaaattgtgtccaccattttacaaatgcgtgttgccatgagaatatccatgacaatgcatagcttgaaaagtatttaagatctgctggaattcgtgattcctgcaaattgtattgtttcttaaattgggcaaatccttgttggaccgtttctgggaatatctctgggattggtccaaagaagtgccaccattgcaaaaaccaattgggaaaattgtaaattgtgttggtcttgaaatatatcaaccatgaatgcttgaagcgagtat

SEQ ID NO: 14809 - DNA, 1057 bp, Glycine max
  Gm_smallRNAprecursor_7642
agtggaataagatcaaacggacagataggaagtaagaatgcagtatgacaaatgaaagacaaatataaacttgaaaaacggatatcaagggcacaccggagaccggcttacaaatcccaggttttcataaacaaggaaaccgaagcgacggtagagctgcacaggatcggtgaagggagaagagataaggatgaaaaatagaaatttattgaatttagaaagaagcgcttacaaaaatcttttttcagagcacctcttcagaaacctgaaaaatggctaaatgaaagggtacctcacaacatacttgaggactccttatatagccaaaaatctaagccggtagttgccggtagttttgactgggactatttgactgtttgttacaagacaagtagttttgaccgggactttaatggctacaagacaggtagtattgtccagcattaattacacattaattacaaacagacggttttgtgaccgaaattaaatttaatctaaacagataccaaaacaatcatcttcgttttggtaaaagggatcttcttcttctttttcagcagaacttgtttcttccttctttgaggatgaagcttcttcttcctgctgtaacatttgtagaacttccttcagatttttaactaagacctcctttgatgtcgatcctgctaaaaatgctgtcagatgagacttttggttcaaaaacacagaagtttctgggtcagctgctttgaggaattctggatgggattggaaccagagttttacttgttctggatccgctttggatgagtcaaattgtgtccaccattttacaaatgcgtgttgccatgagaatatccatgacaatgcatagcttgaaaagtatttaagatctgctggaattcgtgattcctgcaaattgtattgtttcttaaattgggcaaatccttgttggaccgtttctgggaatatctctgggattggtccaaagaagtgccaccattgcaaaaaccaattgggaaaattgtaaattgtgttggtcttgaaatatatcaaccatgaatgcttgaagcga

SEQ ID NO: 14810 - DNA, 1058 bp, Glycine max
  Gm_smallRNAprecursor_7643
agtggaataagatcaaacggacagataggaagtaagaatgcagtatgacaaatgaaagacaaatataaacttgaaaaacggatatcaagggcacaccggagaccggcttacaaatcccaggttttcataaacaaggaaaccgaagcgacggtagagctgcacaggatcggtgaagggagaagagataaggatgaaaaatagaaatttattgaatttagaaagaagcgcttacaaaaatcttttttcagagcacctcttcagaaacctgaaaaatggctaaatgaaagggtacctcacaacatacttgaggactccttatatagccaaaaatctaagccggtagttgccggtagttttgactgggactatttgactgtttgttacaagacaagtagttttgaccgggactttaatggctacaagacaggtagtattgtccagcattaattacacattaattacaaacagacggttttgtgaccgaaattaaatttaatctaaacagataccaaaacaatcatcttcgttttggtaaaagggatcttcttcttctttttcagcagaacttgtttcttccttctttgaggatgaagcttcttcttcctgctgtaacatttgtagaacttccttcagatttttaactaagacctcctttgatgtcgatcctgctaaaaatgctgtcagatgagacttttggttcaaaaacacagaagtttctgggtcagctgctttgaggaattctggatgggattggaaccagagttttacttgttctggatccgctttggatgagtcaaattgtgtccaccattttacaaatgcgtgttgccatgagaatatccatgacaatgcatagcttgaaaagtatttaagatctgctggaattcgtgattcctgcaaattgtattgtttcttaaattgggcaaatccttgttggaccgtttctgggaatatctctgggattggtccaaagaagtgccaccattgcaaaaaccaattgggaaaattgtaaattgtgttggtcttgaaatatatcaaccatgaatgcttgaagcgag

SEQ ID NO: 14811 - DNA, 1083 bp, Glycine max
  Gm_smallRNAprecursor_7644
agtggaataagatcaaacggacagataggaagtaagaatgcagtatgacaaatgaaagacaaatataaacttgaaaaacggatatcaagggcacaccggagaccggcttacaaatcccaggttttcataaacaaggaaaccgaagcgacggtagagctgcacaggatcggtgaagggagaagagataaggatgaaaaatagaaatttattgaatttagaaagaagcgcttacaaaaatcttttttcagagcacctcttcagaaacctgaaaaatggctaaatgaaagggtacctcacaacatacttgaggactccttatatagccaaaaatctaagccggtagttgccggtagttttgactgggactatttgactgtttgttacaagacaagtagttttgaccgggactttaatggctacaagacaggtagtattgtccagcattaattacacattaattacaaacagacggttttgtgaccgaaattaaatttaatctaaacagataccaaaacaatcatcttcgttttggtaaaagggatcttcttcttctttttcagcagaacttgtttcttccttctttgaggatgaagcttcttcttcctgctgtaacatttgtagaacttccttcagatttttaactaagacctcctttgatgtcgatcctgctaaaaatgctgtcagatgagacttttggttcaaaaacacagaagtttctgggtcagctgctttgaggaattctggatgggattggaaccagagttttacttgttctggatccgctttggatgagtcaaattgtgtccaccattttacaaatgcgtgttgccatgagaatatccatgacaatgcatagcttgaaaagtatttaagatctgctggaattcgtgattcctgcaaattgtattgtttcttaaattgggcaaatccttgttggaccgtttctgggaatatctctgggattggtccaaagaagtgccaccattgcaaaaaccaattgggaaaattgtaaattgtgttggtcttgaaatatatcaaccatgaatgcttgaagcgagtattttggtgccaaaacaccttagt

SEQ ID NO: 14812 - DNA, 1056 bp, Glycine max
  Gm_smallRNAprecursor_7645
gtggaataagatcaaacggacagataggaagtaagaatgcagtatgacaaatgaaagacaaatataaacttgaaaaacggatatcaagggcacaccggagaccggcttacaaatcccaggttttcataaacaaggaaaccgaagcgacggtagagctgcacaggatcggtgaagggagaagagataaggatgaaaaatagaaatttattgaatttagaaagaagcgcttacaaaaatcttttttcagagcacctcttcagaaacctgaaaaatggctaaatgaaagggtacctcacaacatacttgaggactccttatatagccaaaaatctaagccggtagttgccggtagttttgactgggactatttgactgtttgttacaagacaagtagttttgaccgggactttaatggctacaagacaggtagtattgtccagcattaattacacattaattacaaacagacggttttgtgaccgaaattaaatttaatctaaacagataccaaaacaatcatcttcgttttggtaaaagggatcttcttcttctttttcagcagaacttgtttcttccttctttgaggatgaagcttcttcttcctgctgtaacatttgtagaacttccttcagatttttaactaagacctcctttgatgtcgatcctgctaaaaatgctgtcagatgagacttttggttcaaaaacacagaagtttctgggtcagctgctttgaggaattctggatgggattggaaccagagttttacttgttctggatccgctttggatgagtcaaattgtgtccaccattttacaaatgcgtgttgccatgagaatatccatgacaatgcatagcttgaaaagtatttaagatctgctggaattcgtgattcctgcaaattgtattgtttcttaaattgggcaaatccttgttggaccgtttctgggaatatctctgggattggtccaaagaagtgccaccattgcaaaaaccaattgggaaaattgtaaattgtgttggtcttgaaatatatcaaccatgaatgcttgaagcga

SEQ ID NO: 14813 - DNA, 1056 bp, Glycine max; identical to SEQ ID NO: 14812
  Gm_smallRNAprecursor_7646

SEQ ID NO: 14814 - DNA, 1057 bp, Glycine max
  Gm_smallRNAprecursor_7647
gtggaataagatcaaacggacagataggaagtaagaatgcagtatgacaaatgaaagacaaatataaacttgaaaaacggatatcaagggcacaccggagaccggcttacaaatcccaggttttcataaacaaggaaaccgaagcgacggtagagctgcacaggatcggtgaagggagaagagataaggatgaaaaatagaaatttattgaatttagaaagaagcgcttacaaaaatcttttttcagagcacctcttcagaaacctgaaaaatggctaaatgaaagggtacctcacaacatacttgaggactccttatatagccaaaaatctaagccggtagttgccggtagttttgactgggactatttgactgtttgttacaagacaagtagttttgaccgggactttaatggctacaagacaggtagtattgtccagcattaattacacattaattacaaacagacggttttgtgaccgaaattaaatttaatctaaacagataccaaaacaatcatcttcgttttggtaaaagggatcttcttcttctttttcagcagaacttgtttcttccttctttgaggatgaagcttcttcttcctgctgtaacatttgtagaacttccttcagatttttaactaagacctcctttgatgtcgatcctgctaaaaatgctgtcagatgagacttttggttcaaaaacacagaagtttctgggtcagctgctttgaggaattctggatgggattggaaccagagttttacttgttctggatccgctttggatgagtcaaattgtgtccaccattttacaaatgcgtgttgccatgagaatatccatgacaatgcatagcttgaaaagtatttaagatctgctggaattcgtgattcctgcaaattgtattgtttcttaaattgggcaaatccttgttggaccgtttctgggaatatctctgggattggtccaaagaagtgccaccattgcaaaaaccaattgggaaaattgtaaattgtgttggtcttgaaatatatcaaccatgaatgcttgaagcgag

SEQ ID NO: 14815 - DNA, 1059 bp, Glycine max
  Gm_smallRNAprecursor_7648
gtggaataagatcaaacggacagataggaagtaagaatgcagtatgacaaatgaaagacaaatataaacttgaaaaacggatatcaagggcacaccggagaccggcttacaaatcccaggttttcataaacaaggaaaccgaagcgacggtagagctgcacaggatcggtgaagggagaagagataaggatgaaaaatagaaatttattgaatttagaaagaagcgcttacaaaaatcttttttcagagcacctcttcagaaacctgaaaaatggctaaatgaaagggtacctcacaacatacttgaggactccttatatagccaaaaatctaagccggtagttgccggtagttttgactgggactatttgactgtttgttacaagacaagtagttttgaccgggactttaatggctacaagacaggtagtattgtccagcattaattacacattaattacaaacagacggttttgtgaccgaaattaaatttaatctaaacagataccaaaacaatcatcttcgttttggtaaaagggatcttcttcttctttttcagcagaacttgtttcttccttctttgaggatgaagcttcttcttcctgctgtaacatttgtagaacttccttcagatttttaactaagacctcctttgatgtcgatcctgctaaaaatgctgtcagatgagacttttggttcaaaaacacagaagtttctgggtcagctgctttgaggaattctggatgggattggaaccagagttttacttgttctggatccgctttggatgagtcaaattgtgtccaccattttacaaatgcgtgttgccatgagaatatccatgacaatgcatagcttgaaaagtatttaagatctgctggaattcgtgattcctgcaaattgtattgtttcttaaattgggcaaatccttgttggaccgtttctgggaatatctctgggattggtccaaagaagtgccaccattgcaaaaaccaattgggaaaattgtaaattgtgttggtcttgaaatatatcaaccatgaatgcttgaagcgagta

SEQ ID NO: 14816 - DNA, 1059 bp, Glycine max; identical to SEQ ID NO: 14815
  Gm_smallRNAprecursor_7649

SEQ ID NO: 14817 - DNA, 1082 bp, Glycine max
  Gm_smallRNAprecursor_7650
gtggaataagatcaaacggacagataggaagtaagaatgcagtatgacaaatgaaagacaaatataaacttgaaaaacggatatcaagggcacaccggagaccggcttacaaatcccaggttttcataaacaaggaaaccgaagcgacggtagagctgcacaggatcggtgaagggagaagagataaggatgaaaaatagaaatttattgaatttagaaagaagcgcttacaaaaatcttttttcagagcacctcttcagaaacctgaaaaatggctaaatgaaagggtacctcacaacatacttgaggactccttatatagccaaaaatctaagccggtagttgccggtagttttgactgggactatttgactgtttgttacaagacaagtagttttgaccgggactttaatggctacaagacaggtagtattgtccagcattaattacacattaattacaaacagacggttttgtgaccgaaattaaatttaatctaaacagataccaaaacaatcatcttcgttttggtaaaagggatcttcttcttctttttcagcagaacttgtttcttccttctttgaggatgaagcttcttcttcctgctgtaacatttgtagaacttccttcagatttttaactaagacctcctttgatgtcgatcctgctaaaaatgctgtcagatgagacttttggttcaaaaacacagaagtttctgggtcagctgctttgaggaattctggatgggattggaaccagagttttacttgttctggatccgctttggatgagtcaaattgtgtccaccattttacaaatgcgtgttgccatgagaatatccatgacaatgcatagcttgaaaagtatttaagatctgctggaattcgtgattcctgcaaattgtattgtttcttaaattgggcaaatccttgttggaccgtttctgggaatatctctgggattggtccaaagaagtgccaccattgcaaaaaccaattgggaaaattgtaaattgtgttggtcttgaaatatatcaaccatgaatgcttgaagcgagtattttggtgccaaaacaccttagt

SEQ ID NO: 14818 - DNA, 1055 bp, Glycine max
  Gm_smallRNAprecursor_7651
tggaataagatcaaacggacagataggaagtaagaatgcagtatgacaaatgaaagacaaatataaacttgaaaaacggatatcaagggcacaccggagaccggcttacaaatcccaggttttcataaacaaggaaaccgaagcgacggtagagctgcacaggatcggtgaagggagaagagataaggatgaaaaatagaaatttattgaatttagaaagaagcgcttacaaaaatcttttttcagagcacctcttcagaaacctgaaaaatggctaaatgaaagggtacctcacaacatacttgaggactccttatatagccaaaaatctaagccggtagttgccggtagttttgactgggactatttgactgtttgttacaagacaagtagttttgaccgggactttaatggctacaagacaggtagtattgtccagcattaattacacattaattacaaacagacggttttgtgaccgaaattaaatttaatctaaacagataccaaaacaatcatcttcgttttggtaaaagggatcttcttcttctttttcagcagaacttgtttcttccttctttgaggatgaagcttcttcttcctgctgtaacatttgtagaacttccttcagatttttaactaagacctcctttgatgtcgatcctgctaaaaatgctgtcagatgagacttttggttcaaaaacacagaagtttctgggtcagctgctttgaggaattctggatgggattggaaccagagttttacttgttctggatccgctttggatgagtcaaattgtgtccaccattttacaaatgcgtgttgccatgagaatatccatgacaatgcatagcttgaaaagtatttaagatctgctggaattcgtgattcctgcaaattgtattgtttcttaaattgggcaaatccttgttggaccgtttctgggaatatctctgggattggtccaaagaagtgccaccattgcaaaaaccaattgggaaaattgtaaattgtgttggtcttgaaatatatcaaccatgaatgcttgaagcga

SEQ ID NO: 14819 - DNA, 1058 bp, Glycine max
  Gm_smallRNAprecursor_7652
tggaataagatcaaacggacagataggaagtaagaatgcagtatgacaaatgaaagacaaatataaacttgaaaaacggatatcaagggcacaccggagaccggcttacaaatcccaggttttcataaacaaggaaaccgaagcgacggtagagctgcacaggatcggtgaagggagaagagataaggatgaaaaatagaaatttattgaatttagaaagaagcgcttacaaaaatcttttttcagagcacctcttcagaaacctgaaaaatggctaaatgaaagggtacctcacaacatacttgaggactccttatatagccaaaaatctaagccggtagttgccggtagttttgactgggactatttgactgtttgttacaagacaagtagttttgaccgggactttaatggctacaagacaggtagtattgtccagcattaattacacattaattacaaacagacggttttgtgaccgaaattaaatttaatctaaacagataccaaaacaatcatcttcgttttggtaaaagggatcttcttcttctttttcagcagaacttgtttcttccttctttgaggatgaagcttcttcttcctgctgtaacatttgtagaacttccttcagatttttaactaagacctcctttgatgtcgatcctgctaaaaatgctgtcagatgagacttttggttcaaaaacacagaagtttctgggtcagctgctttgaggaattctggatgggattggaaccagagttttacttgttctggatccgctttggatgagtcaaattgtgtccaccattttacaaatgcgtgttgccatgagaatatccatgacaatgcatagcttgaaaagtatttaagatctgctggaattcgtgattcctgcaaattgtattgtttcttaaattgggcaaatccttgttggaccgtttctgggaatatctctgggattggtccaaagaagtgccaccattgcaaaaaccaattgggaaaattgtaaattgtgttggtcttgaaatatatcaaccatgaatgcttgaagcgagta

SEQ ID NO: 14820 - DNA, 1058 bp, Glycine max; identical to SEQ ID NO: 14819
  Gm_smallRNAprecursor_7653

SEQ ID NO: 14821 - DNA, 1081 bp, Glycine max
  Gm_smallRNAprecursor_7654
tggaataagatcaaacggacagataggaagtaagaatgcagtatgacaaatgaaagacaaatataaacttgaaaaacggatatcaagggcacaccggagaccggcttacaaatcccaggttttcataaacaaggaaaccgaagcgacggtagagctgcacaggatcggtgaagggagaagagataaggatgaaaaatagaaatttattgaatttagaaagaagcgcttacaaaaatcttttttcagagcacctcttcagaaacctgaaaaatggctaaatgaaagggtacctcacaacatacttgaggactccttatatagccaaaaatctaagccggtagttgccggtagttttgactgggactatttgactgtttgttacaagacaagtagttttgaccgggactttaatggctacaagacaggtagtattgtccagcattaattacacattaattacaaacagacggttttgtgaccgaaattaaatttaatctaaacagataccaaaacaatcatcttcgttttggtaaaagggatcttcttcttctttttcagcagaacttgtttcttccttctttgaggatgaagcttcttcttcctgctgtaacatttgtagaacttccttcagatttttaactaagacctcctttgatgtcgatcctgctaaaaatgctgtcagatgagacttttggttcaaaaacacagaagtttctgggtcagctgctttgaggaattctggatgggattggaaccagagttttacttgttctggatccgctttggatgagtcaaattgtgtccaccattttacaaatgcgtgttgccatgagaatatccatgacaatgcatagcttgaaaagtatttaagatctgctggaattcgtgattcctgcaaattgtattgtttcttaaattgggcaaatccttgttggaccgtttctgggaatatctctgggattggtccaaagaagtgccaccattgcaaaaaccaattgggaaaattgtaaattgtgttggtcttgaaatatatcaaccatgaatgcttgaagcgagtattttggtgccaaaacaccttagt

SEQ ID NO: 14822 - DNA, 1078 bp, Glycine max
  Gm_smallRNAprecursor_7655
gcgcttacaaaaatcttttttcagagcacctcttcagaaacctgaaaaatggctaaatgaaagggtacctcacaacatacttgaggactccttatatagccaaaaatctaagccggtagttgccggtagttttgactgggactatttgactgtttgttacaagacaagtagttttgaccgggactttaatggctacaagacaggtagtattgtccagcattaattacacattaattacaaacagacggttttgtgaccgaaattaaatttaatctaaacagataccaaaacaatcatcttcgttttggtaaaagggatcttcttcttctttttcagcagaacttgtttcttccttctttgaggatgaagcttcttcttcctgctgtaacatttgtagaacttccttcagatttttaactaagacctcctttgatgtcgatcctgctaaaaatgctgtcagatgagacttttggttcaaaaacacagaagtttctgggtcagctgctttgaggaattctggatgggattggaaccagagttttacttgttctggatccgctttggatgagtcaaattgtgtccaccattttacaaatgcgtgttgccatgagaatatccatgacaatgcatagcttgaaaagtatttaagatctgctggaattcgtgattcctgcaaattgtattgtttcttaaattgggcaaatccttgttggaccgtttctgggaatatctctgggattggtccaaagaagtgccaccattgcaaaaaccaattgggaaaattgtaaattgtgttggtcttgaaatatatcaaccatgaatgcttgaagcgagtattttggtgccaaaacaccttagtccaagcatcaacgtaatcccaataggtataacctaccggatcaaatggaactgaaaatctctttcctttgttcaagtccgaaccaaagtgtcttggttgaagaacttttagtatttggattgtcgagtgggtgtttaaggtttggtcttttggatctttgaaatgtttgatagatactgagtttgaatctaccaaaatcaattcataaaaagttattgt

SEQ ID NO: 14823 - DNA, 1077 bp, Glycine max
  Gm_smallRNAprecursor_7656
cgcttacaaaaatcttttttcagagcacctcttcagaaacctgaaaaatggctaaatgaaagggtacctcacaacatacttgaggactccttatatagccaaaaatctaagccggtagttgccggtagttttgactgggactatttgactgtttgttacaagacaagtagttttgaccgggactttaatggctacaagacaggtagtattgtccagcattaattacacattaattacaaacagacggttttgtgaccgaaattaaatttaatctaaacagataccaaaacaatcatcttcgttttggtaaaagggatcttcttcttctttttcagcagaacttgtttcttccttctttgaggatgaagcttcttcttcctgctgtaacatttgtagaacttccttcagatttttaactaagacctcctttgatgtcgatcctgctaaaaatgctgtcagatgagacttttggttcaaaaacacagaagtttctgggtcagctgctttgaggaattctggatgggattggaaccagagttttacttgttctggatccgctttggatgagtcaaattgtgtccaccattttacaaatgcgtgttgccatgagaatatccatgacaatgcatagcttgaaaagtatttaagatctgctggaattcgtgattcctgcaaattgtattgtttcttaaattgggcaaatccttgttggaccgtttctgggaatatctctgggattggtccaaagaagtgccaccattgcaaaaaccaattgggaaaattgtaaattgtgttggtcttgaaatatatcaaccatgaatgcttgaagcgagtattttggtgccaaaacaccttagtccaagcatcaacgtaatcccaataggtataacctaccggatcaaatggaactgaaaatctctttcctttgttcaagtccgaaccaaagtgtcttggttgaagaacttttagtatttggattgtcgagtgggtgtttaaggtttggtcttttggatctttgaaatgtttgatagatactgagtttgaatctaccaaaatcaattcataaaaagttattgt

SEQ ID NO: 14824 - DNA, 1146 bp, Glycine max
  Gm_smallRNAprecursor_7657
actatttgactgtttgttacaagacaagtagttttgaccgggactttaatggctacaagacaggtagtattgtccagcattaattacacattaattacaaacagacggttttgtgaccgaaattaaatttaatctaaacagataccaaaacaatcatcttcgttttggtaaaagggatcttcttcttctttttcagcagaacttgtttcttccttctttgaggatgaagcttcttcttcctgctgtaacatttgtagaacttccttcagatttttaactaagacctcctttgatgtcgatcctgctaaaaatgctgtcagatgagacttttggttcaaaaacacagaagtttctgggtcagctgctttgaggaattctggatgggattggaaccagagttttacttgttctggatccgctttggatgagtcaaattgtgtccaccattttacaaatgcgtgttgccatgagaatatccatgacaatgcatagcttgaaaagtatttaagatctgctggaattcgtgattcctgcaaattgtattgtttcttaaattgggcaaatccttgttggaccgtttctgggaatatctctgggattggtccaaagaagtgccaccattgcaaaaaccaattgggaaaattgtaaattgtgttggtcttgaaatatatcaaccatgaatgcttgaagcgagtattttggtgccaaaacaccttagtccaagcatcaacgtaatcccaataggtataacctaccggatcaaatggaactgaaaatctctttcctttgttcaagtccgaaccaaagtgtcttggttgaagaacttttagtatttggattgtcgagtgggtgtttaaggtttggtcttttggatctttgaaatgtttgatagatactgagtttgaatctaccaaaatcaattcataaaaagttattgtcttcaggatggtggttggtttgtagtgaaatcctggtgggaaagccttggccgtcaccttgaaggggtttttgtcccaaaattcaggttccatctgcaaaacagttaacaatttatttttataaatataattgttagtttgtttggtaggtggtgtttgtgttttggctaaaggtagttttcctttagtattggtggttgttttggtc

SEQ ID NO: 14825 - DNA, 1080 bp, Glycine max
  Gm_smallRNAprecursor_7658
gataccaaaacaatcatcttcgttttggtaaaagggatcttcttcttctttttcagcagaacttgtttcttccttctttgaggatgaagcttcttcttcctgctgtaacatttgtagaacttccttcagatttttaactaagacctcctttgatgtcgatcctgctaaaaatgctgtcagatgagacttttggttcaaaaacacagaagtttctgggtcagctgctttgaggaattctggatgggattggaaccagagttttacttgttctggatccgctttggatgagtcaaattgtgtccaccattttacaaatgcgtgttgccatgagaatatccatgacaatgcatagcttgaaaagtatttaagatctgctggaattcgtgattcctgcaaattgtattgtttcttaaattgggcaaatccttgttggaccgtttctgggaatatctctgggattggtccaaagaagtgccaccattgcaaaaaccaattgggaaaattgtaaattgtgttggtcttgaaatatatcaaccatgaatgcttgaagcgagtattttggtgccaaaacaccttagtccaagcatcaacgtaatcccaataggtataacctaccggatcaaatggaactgaaaatctctttcctttgttcaagtccgaaccaaagtgtcttggttgaagaacttttagtatttggattgtcgagtgggtgtttaaggtttggtcttttggatctttgaaatgtttgatagatactgagtttgaatctaccaaaatcaattcataaaaagttattgtcttcaggatggtggttggtttgtagtgaaatcctggtgggaaagccttggccgtcaccttgaaggggtttttgtcccaaaattcaggttccatctgcaaaacagttaacaatttatttttataaatataattgttagtttgtttggtaggtggtgtttgtgttttggctaaaggtagttttcctttagtattggtggttgttttggtcattgacgcattttggatcattgtttgtaaatttgattcagattcatcatcagattctgaggcaatgtctgccca

SEQ ID NO: 14826 - DNA, 1104 bp, Glycine max
  Gm_smallRNAprecursor_7659
gataccaaaacaatcatcttcgttttggtaaaagggatcttcttcttctttttcagcagaacttgtttcttccttctttgaggatgaagcttcttcttcctgctgtaacatttgtagaacttccttcagatttttaactaagacctcctttgatgtcgatcctgctaaaaatgctgtcagatgagacttttggttcaaaaacacagaagtttctgggtcagctgctttgaggaattctggatgggattggaaccagagttttacttgttctggatccgctttggatgagtcaaattgtgtccaccattttacaaatgcgtgttgccatgagaatatccatgacaatgcatagcttgaaaagtatttaagatctgctggaattcgtgattcctgcaaattgtattgtttcttaaattgggcaaatccttgttggaccgtttctgggaatatctctgggattggtccaaagaagtgccaccattgcaaaaaccaattgggaaaattgtaaattgtgttggtcttgaaatatatcaaccatgaatgcttgaagcgagtattttggtgccaaaacaccttagtccaagcatcaacgtaatcccaataggtataacctaccggatcaaatggaactgaaaatctctttcctttgttcaagtccgaaccaaagtgtcttggttgaagaacttttagtatttggattgtcgagtgggtgtttaaggtttggtcttttggatctttgaaatgtttgatagatactgagtttgaatctaccaaaatcaattcataaaaagttattgtcttcaggatggtggttggtttgtagtgaaatcctggtgggaaagccttggccgtcaccttgaaggggtttttgtcccaaaattcaggttccatctgcaaaacagttaacaatttatttttataaatataattgttagtttgtttggtaggtggtgtttgtgttttggctaaaggtagttttcctttagtattggtggttgttttggtcattgacgcattttggatcattgtttgtaaatttgattcagattcatcatcagattctgaggcaatgtctgcccaagattttttgatcatttttggaat

SEQ ID NO: 14827 - DNA, 1107 bp, Glycine max
  Gm_smallRNAprecursor_7660
ttgtttcttccttctttgaggatgaagcttcttcttcctgctgtaacatttgtagaacttccttcagatttttaactaagacctcctttgatgtcgatcctgctaaaaatgctgtcagatgagacttttggttcaaaaacacagaagtttctgggtcagctgctttgaggaattctggatgggattggaaccagagttttacttgttctggatccgctttggatgagtcaaattgtgtccaccattttacaaatgcgtgttgccatgagaatatccatgacaatgcatagcttgaaaagtatttaagatctgctggaattcgtgattcctgcaaattgtattgtttcttaaattgggcaaatccttgttggaccgtttctgggaatatctctgggattggtccaaagaagtgccaccattgcaaaaaccaattgggaaaattgtaaattgtgttggtcttgaaatatatcaaccatgaatgcttgaagcgagtattttggtgccaaaacaccttagtccaagcatcaacgtaatcccaataggtataacctaccggatcaaatggaactgaaaatctctttcctttgttcaagtccgaaccaaagtgtcttggttgaagaacttttagtatttggattgtcgagtgggtgtttaaggtttggtcttttggatctttgaaatgtttgatagatactgagtttgaatctaccaaaatcaattcataaaaagttattgtcttcaggatggtggttggtttgtagtgaaatcctggtgggaaagccttggccgtcaccttgaaggggtttttgtcccaaaattcaggttccatctgcaaaacagttaacaatttatttttataaatataattgttagtttgtttggtaggtggtgtttgtgttttggctaaaggtagttttcctttagtattggtggttgttttggtcattgacgcattttggatcattgtttgtaaatttgattcagattcatcatcagattctgaggcaatgtctgcccaagattttttgatcatttttggaattttggtcagacccatgtcttgaagggcctaaagggtttcaattggccatgcatagtcggccgatg

SEQ ID NO: 14828 - DNA, 1107 bp, Glycine max; identical to SEQ ID NO: 14827
  Gm_smallRNAprecursor_7661

SEQ ID NO: 14829 - DNA, 1108 bp, Glycine max
  Gm_smallRNAprecursor_7662
ttgtttcttccttctttgaggatgaagcttcttcttcctgctgtaacatttgtagaacttccttcagatttttaactaagacctcctttgatgtcgatcctgctaaaaatgctgtcagatgagacttttggttcaaaaacacagaagtttctgggtcagctgctttgaggaattctggatgggattggaaccagagttttacttgttctggatccgctttggatgagtcaaattgtgtccaccattttacaaatgcgtgttgccatgagaatatccatgacaatgcatagcttgaaaagtatttaagatctgctggaattcgtgattcctgcaaattgtattgtttcttaaattgggcaaatccttgttggaccgtttctgggaatatctctgggattggtccaaagaagtgccaccattgcaaaaaccaattgggaaaattgtaaattgtgttggtcttgaaatatatcaaccatgaatgcttgaagcgagtattttggtgccaaaacaccttagtccaagcatcaacgtaatcccaataggtataacctaccggatcaaatggaactgaaaatctctttcctttgttcaagtccgaaccaaagtgtcttggttgaagaacttttagtatttggattgtcgagtgggtgtttaaggtttggtcttttggatctttgaaatgtttgatagatactgagtttgaatctaccaaaatcaattcataaaaagttattgtcttcaggatggtggttggtttgtagtgaaatcctggtgggaaagccttggccgtcaccttgaaggggtttttgtcccaaaattcaggttccatctgcaaaacagttaacaatttatttttataaatataattgttagtttgtttggtaggtggtgtttgtgttttggctaaaggtagttttcctttagtattggtggttgttttggtcattgacgcattttggatcattgtttgtaaatttgattcagattcatcatcagattctgaggcaatgtctgcccaagattttttgatcatttttggaattttggtcagacccatgtcttgaagggcctaaagggtttcaattggccatgcatagtcggccgatgt

SEQ ID NO: 14830 - DNA, 1101 bp, Glycine max
  Gm_smallRNAprecursor_7663
tttcttccttctttgaggatgaagcttcttcttcctgctgtaacatttgtagaacttccttcagatttttaactaagacctcctttgatgtcgatcctgctaaaaatgctgtcagatgagacttttggttcaaaaacacagaagtttctgggtcagctgctttgaggaattctggatgggattggaaccagagttttacttgttctggatccgctttggatgagtcaaattgtgtccaccattttacaaatgcgtgttgccatgagaatatccatgacaatgcatagcttgaaaagtatttaagatctgctggaattcgtgattcctgcaaattgtattgtttcttaaattgggcaaatccttgttggaccgtttctgggaatatctctgggattggtccaaagaagtgccaccattgcaaaaaccaattgggaaaattgtaaattgtgttggtcttgaaatatatcaaccatgaatgcttgaagcgagtattttggtgccaaaacaccttagtccaagcatcaacgtaatcccaataggtataacctaccggatcaaatggaactgaaaatctctttcctttgttcaagtccgaaccaaagtgtcttggttgaagaacttttagtatttggattgtcgagtgggtgtttaaggtttggtcttttggatctttgaaatgtttgatagatactgagtttgaatctaccaaaatcaattcataaaaagttattgtcttcaggatggtggttggtttgtagtgaaatcctggtgggaaagccttggccgtcaccttgaaggggtttttgtcccaaaattcaggttccatctgcaaaacagttaacaatttatttttataaatataattgttagtttgtttggtaggtggtgtttgtgttttggctaaaggtagttttcctttagtattggtggttgttttggtcattgacgcattttggatcattgtttgtaaatttgattcagattcatcatcagattctgaggcaatgtctgcccaagattttttgatcatttttggaattttggtcagacccatgtcttgaagggcctaaagggtttcaattggccatgcatagtcggccg

SEQ ID NO: 14831 - DNA, 1140 bp, Glycine max
  Gm_smallRNAprecursor_7664
gaggatgaagcttcttcttcctgctgtaacatttgtagaacttccttcagatttttaactaagacctcctttgatgtcgatcctgctaaaaatgctgtcagatgagacttttggttcaaaaacacagaagtttctgggtcagctgctttgaggaattctggatgggattggaaccagagttttacttgttctggatccgctttggatgagtcaaattgtgtccaccattttacaaatgcgtgttgccatgagaatatccatgacaatgcatagcttgaaaagtatttaagatctgctggaattcgtgattcctgcaaattgtattgtttcttaaattgggcaaatccttgttggaccgtttctgggaatatctctgggattggtccaaagaagtgccaccattgcaaaaaccaattgggaaaattgtaaattgtgttggtcttgaaatatatcaaccatgaatgcttgaagcgagtattttggtgccaaaacaccttagtccaagcatcaacgtaatcccaataggtataacctaccggatcaaatggaactgaaaatctctttcctttgttcaagtccgaaccaaagtgtcttggttgaagaacttttagtatttggattgtcgagtgggtgtttaaggtttggtcttttggatctttgaaatgtttgatagatactgagtttgaatctaccaaaatcaattcataaaaagttattgtcttcaggatggtggttggtttgtagtgaaatcctggtgggaaagccttggccgtcaccttgaaggggtttttgtcccaaaattcaggttccatctgcaaaacagttaacaatttatttttataaatataattgttagtttgtttggtaggtggtgtttgtgttttggctaaaggtagttttcctttagtattggtggttgttttggtcattgacgcattttggatcattgtttgtaaatttgattcagattcatcatcagattctgaggcaatgtctgcccaagattttttgatcatttttggaattttggtcagacccatgtcttgaagggcctaaagggtttcaattggccatgcatagtcggccgatgtttgtttgacggttaccggtttgggagattcctgagtggatggctcaggt

SEQ ID NO: 14832 - DNA, 1224 bp, Glycine max
  Gm_smallRNAprecursor_7665
tgctgtcagatgagacttttggttcaaaaacacagaagtttctgggtcagctgctttgaggaattctggatgggattggaaccagagttttacttgttctggatccgctttggatgagtcaaattgtgtccaccattttacaaatgcgtgttgccatgagaatatccatgacaatgcatagcttgaaaagtatttaagatctgctggaattcgtgattcctgcaaattgtattgtttcttaaattgggcaaatccttgttggaccgtttctgggaatatctctgggattggtccaaagaagtgccaccattgcaaaaaccaattgggaaaattgtaaattgtgttggtcttgaaatatatcaaccatgaatgcttgaagcgagtattttggtgccaaaacaccttagtccaagcatcaacgtaatcccaataggtataacctaccggatcaaatggaactgaaaatctctttcctttgttcaagtccgaaccaaagtgtcttggttgaagaacttttagtatttggattgtcgagtgggtgtttaaggtttggtcttttggatctttgaaatgtttgatagatactgagtttgaatctaccaaaatcaattcataaaaagttattgtcttcaggatggtggttggtttgtagtgaaatcctggtgggaaagccttggccgtcaccttgaaggggtttttgtcccaaaattcaggttccatctgcaaaacagttaacaatttatttttataaatataattgttagtttgtttggtaggtggtgtttgtgttttggctaaaggtagttttcctttagtattggtggttgttttggtcattgacgcattttggatcattgtttgtaaatttgattcagattcatcatcagattctgaggcaatgtctgcccaagattttttgatcatttttggaattttggtcagacccatgtcttgaagggcctaaagggtttcaattggccatgcatagtcggccgatgtttgtttgacggttaccggtttgggagattcctgagtggatggctcaggtttgattgaggcaatctgggttgatgacccttctaaattggttttctgggtagatgacccagcctgggttggtgacccagaagaggttgatgatttcttgattgttggctctggaagagccagtctggctcctttgcctgtactccttcctccccttagggagattcccgatgcctt

SEQ ID NO: 14833 - DNA, 1222 bp, Glycine max
  Gm_smallRNAprecursor_7666
ctgtcagatgagacttttggttcaaaaacacagaagtttctgggtcagctgctttgaggaattctggatgggattggaaccagagttttacttgttctggatccgctttggatgagtcaaattgtgtccaccattttacaaatgcgtgttgccatgagaatatccatgacaatgcatagcttgaaaagtatttaagatctgctggaattcgtgattcctgcaaattgtattgtttcttaaattgggcaaatccttgttggaccgtttctgggaatatctctgggattggtccaaagaagtgccaccattgcaaaaaccaattgggaaaattgtaaattgtgttggtcttgaaatatatcaaccatgaatgcttgaagcgagtattttggtgccaaaacaccttagtccaagcatcaacgtaatcccaataggtataacctaccggatcaaatggaactgaaaatctctttcctttgttcaagtccgaaccaaagtgtcttggttgaagaacttttagtatttggattgtcgagtgggtgtttaaggtttggtcttttggatctttgaaatgtttgatagatactgagtttgaatctaccaaaatcaattcataaaaagttattgtcttcaggatggtggttggtttgtagtgaaatcctggtgggaaagccttggccgtcaccttgaaggggtttttgtcccaaaattcaggttccatctgcaaaacagttaacaatttatttttataaatataattgttagtttgtttggtaggtggtgtttgtgttttggctaaaggtagttttcctttagtattggtggttgttttggtcattgacgcattttggatcattgtttgtaaatttgattcagattcatcatcagattctgaggcaatgtctgcccaagattttttgatcatttttggaattttggtcagacccatgtcttgaagggcctaaagggtttcaattggccatgcatagtcggccgatgtttgtttgacggttaccggtttgggagattcctgagtggatggctcaggtttgattgaggcaatctgggttgatgacccttctaaattggttttctgggtagatgacccagcctgggttggtgacccagaagaggttgatgatttcttgattgttggctctggaagagccagtctggctcctttgcctgtactccttcctccccttagggagattcccgatgcctt

SEQ ID NO: 14834 - DNA, 1058 bp, Glycine max
  Gm_smallRNAprecursor_7667
ttctgggtcagctgctttgaggaattctggatgggattggaaccagagttttacttgttctggatccgctttggatgagtcaaattgtgtccaccattttacaaatgcgtgttgccatgagaatatccatgacaatgcatagcttgaaaagtatttaagatctgctggaattcgtgattcctgcaaattgtattgtttcttaaattgggcaaatccttgttggaccgtttctgggaatatctctgggattggtccaaagaagtgccaccattgcaaaaaccaattgggaaaattgtaaattgtgttggtcttgaaatatatcaaccatgaatgcttgaagcgagtattttggtgccaaaacaccttagtccaagcatcaacgtaatcccaataggtataacctaccggatcaaatggaactgaaaatctctttcctttgttcaagtccgaaccaaagtgtcttggttgaagaacttttagtatttggattgtcgagtgggtgtttaaggtttggtcttttggatctttgaaatgtttgatagatactgagtttgaatctaccaaaatcaattcataaaaagttattgtcttcaggatggtggttggtttgtagtgaaatcctggtgggaaagccttggccgtcaccttgaaggggtttttgtcccaaaattcaggttccatctgcaaaacagttaacaatttatttttataaatataattgttagtttgtttggtaggtggtgtttgtgttttggctaaaggtagttttcctttagtattggtggttgttttggtcattgacgcattttggatcattgtttgtaaatttgattcagattcatcatcagattctgaggcaatgtctgcccaagattttttgatcatttttggaattttggtcagacccatgtcttgaagggcctaaagggtttcaattggccatgcatagtcggccgatgtttgtttgacggttaccggtttgggagattcctgagtggatggctcaggtttgattgaggcaatctgggttgatgacccttctaaattggttttctggg

SEQ ID NO: 14835 - DNA, 1176 bp, Glycine max
  Gm_smallRNAprecursor_7668
ttctgggtcagctgctttgaggaattctggatgggattggaaccagagttttacttgttctggatccgctttggatgagtcaaattgtgtccaccattttacaaatgcgtgttgccatgagaatatccatgacaatgcatagcttgaaaagtatttaagatctgctggaattcgtgattcctgcaaattgtattgtttcttaaattgggcaaatccttgttggaccgtttctgggaatatctctgggattggtccaaagaagtgccaccattgcaaaaaccaattgggaaaattgtaaattgtgttggtcttgaaatatatcaaccatgaatgcttgaagcgagtattttggtgccaaaacaccttagtccaagcatcaacgtaatcccaataggtataacctaccggatcaaatggaactgaaaatctctttcctttgttcaagtccgaaccaaagtgtcttggttgaagaacttttagtatttggattgtcgagtgggtgtttaaggtttggtcttttggatctttgaaatgtttgatagatactgagtttgaatctaccaaaatcaattcataaaaagttattgtcttcaggatggtggttggtttgtagtgaaatcctggtgggaaagccttggccgtcaccttgaaggggtttttgtcccaaaattcaggttccatctgcaaaacagttaacaatttatttttataaatataattgttagtttgtttggtaggtggtgtttgtgttttggctaaaggtagttttcctttagtattggtggttgttttggtcattgacgcattttggatcattgtttgtaaatttgattcagattcatcatcagattctgaggcaatgtctgcccaagattttttgatcatttttggaattttggtcagacccatgtcttgaagggcctaaagggtttcaattggccatgcatagtcggccgatgtttgtttgacggttaccggtttgggagattcctgagtggatggctcaggtttgattgaggcaatctgggttgatgacccttctaaattggttttctgggtagatgacccagcctgggttggtgacccagaagaggttgatgatttcttgattgttggctctggaagagccagtctggctcctttgcctgtactccttcctccccttagggagattcc

SEQ ID NO: 14836 - DNA, 1183 bp, Glycine max
  Gm_smallRNAprecursor_7669
ttctgggtcagctgctttgaggaattctggatgggattggaaccagagttttacttgttctggatccgctttggatgagtcaaattgtgtccaccattttacaaatgcgtgttgccatgagaatatccatgacaatgcatagcttgaaaagtatttaagatctgctggaattcgtgattcctgcaaattgtattgtttcttaaattgggcaaatccttgttggaccgtttctgggaatatctctgggattggtccaaagaagtgccaccattgcaaaaaccaattgggaaaattgtaaattgtgttggtcttgaaatatatcaaccatgaatgcttgaagcgagtattttggtgccaaaacaccttagtccaagcatcaacgtaatcccaataggtataacctaccggatcaaatggaactgaaaatctctttcctttgttcaagtccgaaccaaagtgtcttggttgaagaacttttagtatttggattgtcgagtgggtgtttaaggtttggtcttttggatctttgaaatgtttgatagatactgagtttgaatctaccaaaatcaattcataaaaagttattgtcttcaggatggtggttggtttgtagtgaaatcctggtgggaaagccttggccgtcaccttgaaggggtttttgtcccaaaattcaggttccatctgcaaaacagttaacaatttatttttataaatataattgttagtttgtttggtaggtggtgtttgtgttttggctaaaggtagttttcctttagtattggtggttgttttggtcattgacgcattttggatcattgtttgtaaatttgattcagattcatcatcagattctgaggcaatgtctgcccaagattttttgatcatttttggaattttggtcagacccatgtcttgaagggcctaaagggtttcaattggccatgcatagtcggccgatgtttgtttgacggttaccggtttgggagattcctgagtggatggctcaggtttgattgaggcaatctgggttgatgacccttctaaattggttttctgggtagatgacccagcctgggttggtgacccagaagaggttgatgatttcttgattgttggctctggaagagccagtctggctcctttgcctgtactccttcctccccttagggagattcccgatgcc

SEQ ID NO: 14837 - DNA, 1159 bp, Glycine max
  Gm_smallRNAprecursor_7670
cagctgctttgaggaattctggatgggattggaaccagagttttacttgttctggatccgctttggatgagtcaaattgtgtccaccattttacaaatgcgtgttgccatgagaatatccatgacaatgcatagcttgaaaagtatttaagatctgctggaattcgtgattcctgcaaattgtattgtttcttaaattgggcaaatccttgttggaccgtttctgggaatatctctgggattggtccaaagaagtgccaccattgcaaaaaccaattgggaaaattgtaaattgtgttggtcttgaaatatatcaaccatgaatgcttgaagcgagtattttggtgccaaaacaccttagtccaagcatcaacgtaatcccaataggtataacctaccggatcaaatggaactgaaaatctctttcctttgttcaagtccgaaccaaagtgtcttggttgaagaacttttagtatttggattgtcgagtgggtgtttaaggtttggtcttttggatctttgaaatgtttgatagatactgagtttgaatctaccaaaatcaattcataaaaagttattgtcttcaggatggtggttggtttgtagtgaaatcctggtgggaaagccttggccgtcaccttgaaggggtttttgtcccaaaattcaggttccatctgcaaaacagttaacaatttatttttataaatataattgttagtttgtttggtaggtggtgtttgtgttttggctaaaggtagttttcctttagtattggtggttgttttggtcattgacgcattttggatcattgtttgtaaatttgattcagattcatcatcagattctgaggcaatgtctgcccaagattttttgatcatttttggaattttggtcagacccatgtcttgaagggcctaaagggtttcaattggccatgcatagtcggccgatgtttgtttgacggttaccggtttgggagattcctgagtggatggctcaggtttgattgaggcaatctgggttgatgacccttctaaattggttttctgggtagatgacccagcctgggttggtgacccagaagaggttgatgatttcttgattgttggctctggaagagccagtctggctcctttgcctgtactccttcctccccttag

SEQ ID NO: 14838 - DNA, 1113 bp, Glycine max
  Gm_smallRNAprecursor_7671
ggaattttggtcagacccatgtcttgaagggcctaaagggtttcaattggccatgcatagtcggccgatgtttgtttgacggttaccggtttgggagattcctgagtggatggctcaggtttgattgaggcaatctgggttgatgacccttctaaattggttttctgggtagatgacccagcctgggttggtgacccagaagaggttgatgatttcttgattgttggctctggaagagccagtctggctcctttgcctgtactccttcctccccttagggagattcccgatgccttaggaggcattaccacttttctgtaagaattcacgggtaaggtagtcaagtaatgagtttgaggtgcccttgatgtattctatgtcaaaatcaaagacacttagaattgcttgtcatcttgcaaaaatttgttttgaggcaaggtttttaacatctttttgtaaaatatctttggctgatttacaatcaaccctgattagaaatttttggtttaataaatccgattgaaattttgaaatgcacaaaacaattgctaaaagttcttttttaacagttgaatattttaattgtgcaggattccaatgttttgatgtatatgcaatgacatgatcttggccatggactctttgtttgaggatgccaccataacctatgtctgaagcatcagtttcgacaattttaaatgcctgtggaataggaagatacagacatttaatggattggactttgactttgatttctttaaccgtttgtgtatggaggtcagaccaaggaggcgaatttttcttcagcctatcatgcaatggcttgacaatattgtttaaataggggacaaattctcctacgtaatttagacaacctagaaatctttgtaactgggttttgtctaagatttggttggggaatttgctagcaaactctattgacctttcgattggattgattgtaccttgatatatattgtgaccaaggaatcgaattcttgtttggaaaagattaatttttgatttggagactgccaaaccattttgtttgatgatatgtatgaaggtttggagatgtttgaaatgttggtcaatgttttgggaaaagattaa

SEQ ID NO: 14839 - DNA, 1113 bp, Glycine max; identical to SEQ ID NO: 14838
  Gm_smallRNAprecursor_7672

SEQ ID NO: 14840 - DNA, 1114 bp, Glycine max
  Gm_smallRNAprecursor_7673
ggaattttggtcagacccatgtcttgaagggcctaaagggtttcaattggccatgcatagtcggccgatgtttgtttgacggttaccggtttgggagattcctgagtggatggctcaggtttgattgaggcaatctgggttgatgacccttctaaattggttttctgggtagatgacccagcctgggttggtgacccagaagaggttgatgatttcttgattgttggctctggaagagccagtctggctcctttgcctgtactccttcctccccttagggagattcccgatgccttaggaggcattaccacttttctgtaagaattcacgggtaaggtagtcaagtaatgagtttgaggtgcccttgatgtattctatgtcaaaatcaaagacacttagaattgcttgtcatcttgcaaaaatttgttttgaggcaaggtttttaacatctttttgtaaaatatctttggctgatttacaatcaaccctgattagaaatttttggtttaataaatccgattgaaattttgaaatgcacaaaacaattgctaaaagttcttttttaacagttgaatattttaattgtgcaggattccaatgttttgatgtatatgcaatgacatgatcttggccatggactctttgtttgaggatgccaccataacctatgtctgaagcatcagtttcgacaattttaaatgcctgtggaataggaagatacagacatttaatggattggactttgactttgatttctttaaccgtttgtgtatggaggtcagaccaaggaggcgaatttttcttcagcctatcatgcaatggcttgacaatattgtttaaataggggacaaattctcctacgtaatttagacaacctagaaatctttgtaactgggttttgtctaagatttggttggggaatttgctagcaaactctattgacctttcgattggattgattgtaccttgatatatattgtgaccaaggaatcgaattcttgtttggaaaagattaatttttgatttggagactgccaaaccattttgtttgatgatatgtatgaaggtttggagatgtttgaaatgttggtcaatgttttgggaaaagattaaa

SEQ ID NO: 14841 - DNA, 1207 bp, Glycine max
  Gm_smallRNAprecursor_7674
ggaattttggtcagacccatgtcttgaagggcctaaagggtttcaattggccatgcatagtcggccgatgtttgtttgacggttaccggtttgggagattcctgagtggatggctcaggtttgattgaggcaatctgggttgatgacccttctaaattggttttctgggtagatgacccagcctgggttggtgacccagaagaggttgatgatttcttgattgttggctctggaagagccagtctggctcctttgcctgtactccttcctccccttagggagattcccgatgccttaggaggcattaccacttttctgtaagaattcacgggtaaggtagtcaagtaatgagtttgaggtgcccttgatgtattctatgtcaaaatcaaagacacttagaattgcttgtcatcttgcaaaaatttgttttgaggcaaggtttttaacatctttttgtaaaatatctttggctgatttacaatcaaccctgattagaaatttttggtttaataaatccgattgaaattttgaaatgcacaaaacaattgctaaaagttcttttttaacagttgaatattttaattgtgcaggattccaatgttttgatgtatatgcaatgacatgatcttggccatggactctttgtttgaggatgccaccataacctatgtctgaagcatcagtttcgacaattttaaatgcctgtggaataggaagatacagacatttaatggattggactttgactttgatttctttaaccgtttgtgtatggaggtcagaccaaggaggcgaatttttcttcagcctatcatgcaatggcttgacaatattgtttaaataggggacaaattctcctacgtaatttagacaacctagaaatctttgtaactgggttttgtctaagatttggttggggaatttgctagcaaactctattgacctttcgattggattgattgtaccttgatatatattgtgaccaaggaatcgaattcttgtttggaaaagattaatttttgatttggagactgccaaaccattttgtttgatgatatgtatgaaggtttggagatgtttgaaatgttggtcaatgttttgggaaaagattaaaacatcatctatgtagacaatgacaaattttgaataaggattaaaaatatcgttcataattttttgaaattctgaaggggcatttttcagtccg

SEQ ID NO: 14842 - DNA, 1035 bp, Glycine max
  Gm_smallRNAprecursor_7675
acggttaccggtttgggagattcctgagtggatggctcaggtttgattgaggcaatctgggttgatgacccttctaaattggttttctgggtagatgacccagcctgggttggtgacccagaagaggttgatgatttcttgattgttggctctggaagagccagtctggctcctttgcctgtactccttcctccccttagggagattcccgatgccttaggaggcattaccacttttctgtaagaattcacgggtaaggtagtcaagtaatgagtttgaggtgcccttgatgtattctatgtcaaaatcaaagacacttagaattgcttgtcatcttgcaaaaatttgttttgaggcaaggtttttaacatctttttgtaaaatatctttggctgatttacaatcaaccctgattagaaatttttggtttaataaatccgattgaaattttgaaatgcacaaaacaattgctaaaagttcttttttaacagttgaatattttaattgtgcaggattccaatgttttgatgtatatgcaatgacatgatcttggccatggactctttgtttgaggatgccaccataacctatgtctgaagcatcagtttcgacaattttaaatgcctgtggaataggaagatacagacatttaatggattggactttgactttgatttctttaaccgtttgtgtatggaggtcagaccaaggaggcgaatttttcttcagcctatcatgcaatggcttgacaatattgtttaaataggggacaaattctcctacgtaatttagacaacctagaaatctttgtaactgggttttgtctaagatttggttggggaatttgctagcaaactctattgacctttcgattggattgattgtaccttgatatatattgtgaccaaggaatcgaattcttgtttggaaaagattaatttttgatttggagactgccaaaccattttgtttgatgatatgtatgaaggtttggagatgtttgaaatgttggtcaatgttttgggaaaagattaa

SEQ ID NO: 14843 - DNA, 1168 bp, Glycine max
  Gm_smallRNAprecursor_7676
ggaggcattaccacttttctgtaagaattcacgggtaaggtagtcaagtaatgagtttgaggtgcccttgatgtattctatgtcaaaatcaaagacacttagaattgcttgtcatcttgcaaaaatttgttttgaggcaaggtttttaacatctttttgtaaaatatctttggctgatttacaatcaaccctgattagaaatttttggtttaataaatccgattgaaattttgaaatgcacaaaacaattgctaaaagttcttttttaacagttgaatattttaattgtgcaggattccaatgttttgatgtatatgcaatgacatgatcttggccatggactctttgtttgaggatgccaccataacctatgtctgaagcatcagtttcgacaattttaaatgcctgtggaataggaagatacagacatttaatggattggactttgactttgatttctttaaccgtttgtgtatggaggtcagaccaaggaggcgaatttttcttcagcctatcatgcaatggcttgacaatattgtttaaataggggacaaattctcctacgtaatttagacaacctagaaatctttgtaactgggttttgtctaagatttggttggggaatttgctagcaaactctattgacctttcgattggattgattgtaccttgatatatattgtgaccaaggaatcgaattcttgtttggaaaagattaatttttgatttggagactgccaaaccattttgtttgatgatatgtatgaaggtttggagatgtttgaaatgttggtcaatgttttgggaaaagattaaaacatcatctatgtagacaatgacaaattttgaataaggattaaaaatatcgttcataattttttgaaattctgaaggggcatttttcagtccgaatggcatcacgttccatttatattgcccgaaaggtacagtccgaatggcatcacgttccatcacgttccagatttcatatcaaattttgaaaatatctttgcagaatttaatctgttaagcaaatcttttttgtttggaataggatatctaatctattgtaatgcatgatttagcggtttgtaatttatgactaagcggggtgttccacgctcaatctcagattgtttattgacataaaaagccacacaagaccatg

SEQ ID NO: 14844 - DNA, 1213 bp, Glycine max
  Gm_smallRNAprecursor_7677
tactggaactgttacaaaacttttacaaattacattacttaaaagattctgacaaattagttacaataattcatgattactacaactaattaatcttcgtctaatgatataccgaaacagtcatcttcattctggtagaatggatcgtctccttggtcatcattagtctctgatgattcagcttccttcttggaaggttcttcttccacttcctgttgaagtagttggagaacttctttgagattctgagcaagactctctttagattttgagcttgctaagaatgctgccagttgcgactactgattcaggaacagagatgtctctggattagcaggtttaaggaactcaggattgctctagaaccagttcttgacttgatctggagcagcctttgaagtatcgaattgtgacaaccattttacaaaggcgtgtctttgtaacggtggatattgcttgttgttttcagtttttccgtatctgtactgctatgaaaaaatccatgacaaggcaaaactggaaaagtattttaaatctgctggaatacgtgattccttgctattatagagcttgttgaattgttggaatccctgttggacttcttctgggaatatctgtggaattggtccgaagtagttccaccattggaggaaccaatttggaaaattatacacagtattatttttgaagtaaattagccatgaatgcttgaatttactattttgatgccagaacacattggtccaggcgtcgatgtaatcccaataattatatcctgcggggtcaaatggagcagaaaattttttgggttggtttaggtttgagccataatgtcgtggctgcataacctttaggatttggattgtggaatgggtatttagatttggatctttggggtctttgaagtgtttaatagatactgagtttgtatctatcagaatgaattcgtagaatttgcgggttttgtttgtggctattggcctgtaatggaatcctggggggaatactttggcggttgctttgaagggattcttgtcccagtattctggttccatttgtaaaacattgaaaaacttgttttttgaaatataactgttgctgggttgtgatgttgattcttgttgagtcaacgattggcttggtctttggttgtagacagttttggtctgtttggccttttggatttgtttttgcagatctgtttcagaatcat

SEQ ID NO: 14845 - DNA, 1148 bp, Glycine max
  Gm_smallRNAprecursor_7678
ggaatacgtgattccttgctattatagagcttgttgaattgttggaatccctgttggacttcttctgggaatatctgtggaattggtccgaagtagttccaccattggaggaaccaatttggaaaattatacacagtattatttttgaagtaaattagccatgaatgcttgaatttactattttgatgccagaacacattggtccaggcgtcgatgtaatcccaataattatatcctgcggggtcaaatggagcagaaaattttttgggttggtttaggtttgagccataatgtcgtggctgcataacctttaggatttggattgtggaatgggtatttagatttggatctttggggtctttgaagtgtttaatagatactgagtttgtatctatcagaatgaattcgtagaatttgcgggttttgtttgtggctattggcctgtaatggaatcctggggggaatactttggcggttgctttgaagggattcttgtcccagtattctggttccatttgtaaaacattgaaaaacttgttttttgaaatataactgttgctgggttgtgatgttgattcttgttgagtcaacgattggcttggtctttggttgtagacagttttggtctgtttggccttttggatttgtttttgcagatctgtttcagaatcatcgtctgattctgaggccatttctgcccaggtctttttggccaattttggtattttggtgaggcctatatcttctaaggccaagagagtttgtattgaccaggcatagtcagccacagtctgtttggttgttgttggttttggggattcctgagttgatgacttaggtttggcggtagttatctgggtcaatgacccttcaatctttcctttctgggttgatgacccagtctgggtaggtgacccagaagatgttgtagttgcctttttggttattggctctggtagagccagtagaacctcttttccttttgtactggatctacctcctctgtcggaggaactagacaccttaggaggcatcgagaattttctgtaaaaattcacgggtgaggtagtcaggtagagagttggaagagcccttgatatattctatattaaaatcaaagacacttaaaattgcttgccatcttgcaa

SEQ ID NO: 14846 - DNA, 1149 bp, Glycine max
  Gm_smallRNAprecursor_7679
ggaatacgtgattccttgctattatagagcttgttgaattgttggaatccctgttggacttcttctgggaatatctgtggaattggtccgaagtagttccaccattggaggaaccaatttggaaaattatacacagtattatttttgaagtaaattagccatgaatgcttgaatttactattttgatgccagaacacattggtccaggcgtcgatgtaatcccaataattatatcctgcggggtcaaatggagcagaaaattttttgggttggtttaggtttgagccataatgtcgtggctgcataacctttaggatttggattgtggaatgggtatttagatttggatctttggggtctttgaagtgtttaatagatactgagtttgtatctatcagaatgaattcgtagaatttgcgggttttgtttgtggctattggcctgtaatggaatcctggggggaatactttggcggttgctttgaagggattcttgtcccagtattctggttccatttgtaaaacattgaaaaacttgttttttgaaatataactgttgctgggttgtgatgttgattcttgttgagtcaacgattggcttggtctttggttgtagacagttttggtctgtttggccttttggatttgtttttgcagatctgtttcagaatcatcgtctgattctgaggccatttctgcccaggtctttttggccaattttggtattttggtgaggcctatatcttctaaggccaagagagtttgtattgaccaggcatagtcagccacagtctgtttggttgttgttggttttggggattcctgagttgatgacttaggtttggcggtagttatctgggtcaatgacccttcaatctttcctttctgggttgatgacccagtctgggtaggtgacccagaagatgttgtagttgcctttttggttattggctctggtagagccagtagaacctcttttccttttgtactggatctacctcctctgtcggaggaactagacaccttaggaggcatcgagaattttctgtaaaaattcacgggtgaggtagtcaggtagagagttggaagagcccttgatatattctatattaaaatcaaagacacttaaaattgcttgccatcttgcaaa

SEQ ID NO: 14847 - DNA, 1147 bp, Glycine max
  Gm_smallRNAprecursor_7680
gaatacgtgattccttgctattatagagcttgttgaattgttggaatccctgttggacttcttctgggaatatctgtggaattggtccgaagtagttccaccattggaggaaccaatttggaaaattatacacagtattatttttgaagtaaattagccatgaatgcttgaatttactattttgatgccagaacacattggtccaggcgtcgatgtaatcccaataattatatcctgcggggtcaaatggagcagaaaattttttgggttggtttaggtttgagccataatgtcgtggctgcataacctttaggatttggattgtggaatgggtatttagatttggatctttggggtctttgaagtgtttaatagatactgagtttgtatctatcagaatgaattcgtagaatttgcgggttttgtttgtggctattggcctgtaatggaatcctggggggaatactttggcggttgctttgaagggattcttgtcccagtattctggttccatttgtaaaacattgaaaaacttgttttttgaaatataactgttgctgggttgtgatgttgattcttgttgagtcaacgattggcttggtctttggttgtagacagttttggtctgtttggccttttggatttgtttttgcagatctgtttcagaatcatcgtctgattctgaggccatttctgcccaggtctttttggccaattttggtattttggtgaggcctatatcttctaaggccaagagagtttgtattgaccaggcatagtcagccacagtctgtttggttgttgttggttttggggattcctgagttgatgacttaggtttggcggtagttatctgggtcaatgacccttcaatctttcctttctgggttgatgacccagtctgggtaggtgacccagaagatgttgtagttgcctttttggttattggctctggtagagccagtagaacctcttttccttttgtactggatctacctcctctgtcggaggaactagacaccttaggaggcatcgagaattttctgtaaaaattcacgggtgaggtagtcaggtagagagttggaagagcccttgatatattctatattaaaatcaaagacacttaaaattgcttgccatcttgcaa

SEQ ID NO: 14848 - DNA, 1031 bp, Glycine max
  Gm_smallRNAprecursor_7681
ccttttgtaaaatgtctttggctgatttgcagtcaacccttactaaacattttttatttaataaatcagattgaaatttggaaatgcacaaaacaatttctaaaacttcttttttgacaattgaatactttaattgtgttggattccagtgttttgaagtatatgcgatgacatgttcttgaccatgtacttgttgtttgaggataccaccgtaaccgatgtctgatgcatcagtttcgacaattttgaatgcctgtggaatgggaagatacagacattttatggattggactttgactttgatttctttaactgtttgggtatggaggtcagaccaaggaggcggatttttctttagcctatcatgtaatggtgtgacaatattgtttaagtaggggacaaattctcctacgtaatttagacaacctagaaatctttgtaactgggttttgtctaagatttggttggagaatttgctagcaaactctattgacctttcgattggaatgattgtaccttgataaatattgtgaccaaggaatcgaattcgagtttggaaaagattgatttttgatttggagactgccaaaccattttgtttgatgatatggatgaaggtttggagatgtttgaaatgttggtcaatgttttgggaaaagattaaaacatcatctatgcatacaatgacaaattttgaatagggattaaaaatatcattcaaaattttttgaaattctgaaggggcattctttagtccgaatgacattacattccattcatattgcccgaaaggtacagtaaacgctgttttgtacctatctgattcttggatttggatttgccaaaatccagatttcatatcaaattttgaaaatatctttgcagaatttaatctgttaagcaaatcttttttgtttggaataggatatctaatccattgtaatgcttgatttagtggtttgtaatttatgactaagcagagtgttccacgctcaatctcagattgtttgttgacataaaaagccgcacaa

SEQ ID NO: 14849 - DNA, 1148 bp, Glycine max
  Gm_smallRNAprecursor_7682
ggaatacgtgattccttgctattatagagcttgttgaattgttggaatccctgttggacttcttctgggaatatatgtggaattggtccgaagtagttccaccattggaggaaccaatttggaaaattatacacagtattatttttgaagtaaatttgccatgaatgcttgaatttactattttgatgccagaacacattggtccaggcatcgatgtaatcccaataattatatcctgcggggtcaaatggagtagaaaattttttgggtttgtttaggtttgagccataatgtcgtggctgcataacctttaggatttggattgtggaatgggtatttagatttggatctttggggtctttgaagtgtttaatagatactgagttcgtatctatcagaatgaattcgtagaatttgcgggttttgtttgtggctattggcctgtaatggaatcctggggggaatactttggcggttgctttgaagggattcttgtcccagtattctggttccatttgtaaaacattgaaaaacttgttttttgaaatataattgttgttgggttgtgatgttgattcttgttgagtcaacgattggcttggtctttggttgcagacagttttggtctgtttggccttttggatttgtttttgcagatctgtttcagaatcatcgtctgattctgaggccatttctgcccaggtctttttggccaattttggtattttggtgaggcctatatcttctaagtccaagagagtttgtattgaccaagcatagtcagtcacagtctgtttggttgttgttggttttggggattcctgagttgatgactcaggtttggcggtagttatctaggtcaatgacccttcaatctttcctttctgggttgatgacccagtctgggtaggtgacccagaagatgttgtagttgcctttttggttattggctctggtagagccagtagaacctcttttccttttgtactggatcttcctcctctgccggaggaactagacaccttaggaggcatcgggaattttctgtaaaaattcacgggtgaggtagtcaggtagagagttggaagagcccttgatatattctatatttaaatcaaagacacttaaaattgcttgccatcttgcaa

SEQ ID NO: 14850 - DNA, 1149 bp, Glycine max
  Gm_smallRNAprecursor_7683
ggaatacgtgattccttgctattatagagcttgttgaattgttggaatccctgttggacttcttctgggaatatatgtggaattggtccgaagtagttccaccattggaggaaccaatttggaaaattatacacagtattatttttgaagtaaatttgccatgaatgcttgaatttactattttgatgccagaacacattggtccaggcatcgatgtaatcccaataattatatcctgcggggtcaaatggagtagaaaattttttgggtttgtttaggtttgagccataatgtcgtggctgcataacctttaggatttggattgtggaatgggtatttagatttggatctttggggtctttgaagtgtttaatagatactgagttcgtatctatcagaatgaattcgtagaatttgcgggttttgtttgtggctattggcctgtaatggaatcctggggggaatactttggcggttgctttgaagggattcttgtcccagtattctggttccatttgtaaaacattgaaaaacttgttttttgaaatataattgttgttgggttgtgatgttgattcttgttgagtcaacgattggcttggtctttggttgcagacagttttggtctgtttggccttttggatttgtttttgcagatctgtttcagaatcatcgtctgattctgaggccatttctgcccaggtctttttggccaattttggtattttggtgaggcctatatcttctaagtccaagagagtttgtattgaccaagcatagtcagtcacagtctgtttggttgttgttggttttggggattcctgagttgatgactcaggtttggcggtagttatctaggtcaatgacccttcaatctttcctttctgggttgatgacccagtctgggtaggtgacccagaagatgttgtagttgcctttttggttattggctctggtagagccagtagaacctcttttccttttgtactggatcttcctcctctgccggaggaactagacaccttaggaggcatcgggaattttctgtaaaaattcacgggtgaggtagtcaggtagagagttggaagagcccttgatatattctatatttaaatcaaagacacttaaaattgcttgccatcttgcaaa

SEQ ID NO: 14851 - DNA, 1147 bp, Glycine max
  Gm_smallRNAprecursor_7684
gaatacgtgattccttgctattatagagcttgttgaattgttggaatccctgttggacttcttctgggaatatatgtggaattggtccgaagtagttccaccattggaggaaccaatttggaaaattatacacagtattatttttgaagtaaatttgccatgaatgcttgaatttactattttgatgccagaacacattggtccaggcatcgatgtaatcccaataattatatcctgcggggtcaaatggagtagaaaattttttgggtttgtttaggtttgagccataatgtcgtggctgcataacctttaggatttggattgtggaatgggtatttagatttggatctttggggtctttgaagtgtttaatagatactgagttcgtatctatcagaatgaattcgtagaatttgcgggttttgtttgtggctattggcctgtaatggaatcctggggggaatactttggcggttgctttgaagggattcttgtcccagtattctggttccatttgtaaaacattgaaaaacttgttttttgaaatataattgttgttgggttgtgatgttgattcttgttgagtcaacgattggcttggtctttggttgcagacagttttggtctgtttggccttttggatttgtttttgcagatctgtttcagaatcatcgtctgattctgaggccatttctgcccaggtctttttggccaattttggtattttggtgaggcctatatcttctaagtccaagagagtttgtattgaccaagcatagtcagtcacagtctgtttggttgttgttggttttggggattcctgagttgatgactcaggtttggcggtagttatctaggtcaatgacccttcaatctttcctttctgggttgatgacccagtctgggtaggtgacccagaagatgttgtagttgcctttttggttattggctctggtagagccagtagaacctcttttccttttgtactggatcttcctcctctgccggaggaactagacaccttaggaggcatcgggaattttctgtaaaaattcacgggtgaggtagtcaggtagagagttggaagagcccttgatatattctatatttaaatcaaagacacttaaaattgcttgccatcttgcaa

SEQ ID NO: 14852 - DNA, 1031 bp, Glycine max
  Gm_smallRNAprecursor_7685
ccttctgtaaaatgtctttggctgatttgcagtcaacccttactaaaaatttttgatttaataaatcagattgaaatttggaaatgcacaaaacaattgctaaaaattcttttttgatagttgaatactttaattgtgctggattccagtgttttgaaatatatgcgatgacatgttcttgaccatgtacttgttgtttgaggataccaccgtaaccgacgtctgatgcatcagtttcgacaattttgaatgcctgtggaatgggaagatacaaacattttatggattggactttgactttgatttctttaactgtttgggtatggaggtcagaccaaggaggcggatttttctttagcctatcatgtaatggtttgacaatattgtttaagtaggggacaaattctcctacgtaatttagacaacctagaaatctttgtaactgggttttgtctaagatttggttggggaatttgctagcaaactctattgacctttcgattggaatgattgtaccttgataaatattgtgaccaaggaatcgaattcgagtttggaaaagattgatttttgatttggagactgccaaaccattttgtttgatgatatggatgaaggtttggagatgtttgaaatgttggtcaatgttttgggaaaagattaaaacatcatctatgtagacaatgacaaattttgaatagggattaaaaatatcattcataattttttgaaattctgaaggggcattcttcagtccgaatggcattacattccattcatattgcccgaaaggtacagtaaacactgttttgtacctatctgattcttggatttggatttgccaaaatccagatttcatatcaaattttgaaaatatctttgcagaatttaatctgttaagcaaatcttttttgtttggaataggatatctaatccattgtaatgcttgatttagtggtttgtaatttatgactaagcggggtattccacgctcaatctcagattgtttgttgacataaaaagctgcacaa

SEQ ID NO: 14853 - DNA, 1159 bp, Glycine max
  Gm_smallRNAprecursor_7686
acccatctttcgggaagagttacctcatcccattttatttttctcgggagagaaacgttagcctttgtcatatcagtgataaacaaggttgtttctcctttttgaggttttaacaggactctagattcacaagtgttcatgaccttgtactagatcctatagattaaggctgttgggattgatccttctttcatgtcaaggccatgaaaatggatgtttaagaacagagagtcaagaatgtttctgtccatcagactaactgttttgtttggataacagttaaaatatattggaccttgtcctaggctggtttcgactattccaattagggagtcttcaaattgattatgcctaatgtctcttagacacattaaaactgctgcatctatgcccatatcaattaagggcttgatggctacttgtacacaaccgatgtgtagatatttatacttacggctatgttcataaattgaattttttgaaagtaaatgaaattcttcccctatatcttgtcctagaggaatattgttttctactgttttgattatgtaatcaaagttgtgtttgtcttttattgtttcaggaacgtatagttgatcctgagggatttctggaatgttctagtcatccatgttttgattgatatcttcgaatcggacttcctcatcgaagagattgtgttttggggcgacctcttgggtctggttatcttgatcatttaataaattggagtttcttgaagaagatgatgaggaggagtttgagcgaaaagagatacgagaaaaagatcgtaatagtctagacatgattataatattctctaatatctttgccctcatttggttccatagaaatatctccgtaagtaaatatgtcacaaaatttttctggatctgaattatttttaagaaaaactattttttttttttgaaaaacagtttgaacggcaatcctatagccaccagtgtattatgtcttgatattttggttaaacagtacaccttagccttaccgccctttatccaacacgggtcttactgctacagtactattcaactaaaatattagactgttgtacttccaggaagtactgttcaaacacttactgtacaaatcaaagtaaaatattacgtgtactatacaaaactttagttccaga

SEQ ID NO: 14854 - DNA, 1239 bp, Glycine max
  Gm_smallRNAprecursor_7687
gtatagtacattcatagattaatatgtatagtacattcttttgcctatgattctttaatggacattctctcctacttaattttttcagtttaaggtgaaagtttatttagaaggaacattaattttgagttgcagagaaaattccttgttgcttttggtagggataaaagatcttcatatattgtgctatttacttttgaatgatgagtagatatggttgcacattatacataaattaggttagtgttttttaatgaatttaattacttatatcgatacctatattatatttattaagttagaaatatgtagacacaaaataacataacaccatgacataaacttttgcagtttccaattgaaattcacagaattggaaggaattatagtatatatatatatatattagtgtccgtaaggatgtatgttaacaaattttatggatctgaaaccttgtatagtatgagtaatattttattttaatttgtatagtacatgtttgaacagtacttcctggaagtacaacagtctaatattttagttgaatggtactgtagcagtaagacccgtggtggataaagggcagtaaggctaaggtgtactgtttaaccaaaatatcaagacataatatactggtggctataggatttccgttcaaactattttccacaaaaaaaagagttttttcttaaaaataatttagatccagaaaattttgttacgtatttacttatggaaatatttctatggaaccaaatgagggcaaagatattagaggattttataatcatgtctagactcctgcgttctttttcgcgtatttcctttcggtctaattcctcttcatcaacttcttccagaaattcaaacttattaagtgatcaagataaccagacccaagaggtcgcccctaaacacaatctcttcgatgaggaagtccgattcaaagatatcaatcaaaacatggatgactagaacatcccagaaatccctcaggatcaactatacgttcctgaaacaatgaaagataaacacaactttgattatataatcaaaacagtagaaaacaatattcctctagggcaagacataggggaagaattccatttactttcaaaaaattcaatttatgaacatagtcgaaagtataaatatttacacatcggctgtgtacaagtagccatcaagcccttaatagacatgggcatagatgcagcaatgttaatgtgtctaagagat

SEQ ID NO: 14855 - DNA, 1107 bp, Glycine max
  Gm_smallRNAprecursor_7688
ggttagtgttttttaatgaatttaattacttatatcgatacctatattatatttattaagttagaaatatgtagacacaaaataacataacaccatgacataaacttttgcagtttccaattgaaattcacagaattggaaggaattatagtatatatatatatatattagtgtccgtaaggatgtatgttaacaaattttatggatctgaaaccttgtatagtatgagtaatattttattttaatttgtatagtacatgtttgaacagtacttcctggaagtacaacagtctaatattttagttgaatggtactgtagcagtaagacccgtggtggataaagggcagtaaggctaaggtgtactgtttaaccaaaatatcaagacataatatactggtggctataggatttccgttcaaactattttccacaaaaaaaagagttttttcttaaaaataatttagatccagaaaattttgttacgtatttacttatggaaatatttctatggaaccaaatgagggcaaagatattagaggattttataatcatgtctagactcctgcgttctttttcgcgtatttcctttcggtctaattcctcttcatcaacttcttccagaaattcaaacttattaagtgatcaagataaccagacccaagaggtcgcccctaaacacaatctcttcgatgaggaagtccgattcaaagatatcaatcaaaacatggatgactagaacatcccagaaatccctcaggatcaactatacgttcctgaaacaatgaaagataaacacaactttgattatataatcaaaacagtagaaaacaatattcctctagggcaagacataggggaagaattccatttactttcaaaaaattcaatttatgaacatagtcgaaagtataaatatttacacatcggctgtgtacaagtagccatcaagcccttaatagacatgggcatagatgcagcaatgttaatgtgtctaagagatattaggcataataaatttgaagactccttaattggaacagtcgaaaccatcctaggacagggtccagtatattttaattgttatccaaataaaacagtgagtctaa

SEQ ID NO: 14856 - DNA, 1238 bp, Glycine max
  Gm_smallRNAprecursor_7689
actttcgactatgttcataaattgaattttttgaaagtaaatggaattcttcccgtatgtcttgccctagaggaatattgttttctactgttttgattatataatcaaagttgtgtttatctttcattgtttcaggaacgtatagttgatcctgagggatttctgggatgttctagtcatccatgttttgattgatatcttcgaatcggacttcctcatcgaagagattgtgtttaggggcgacctcttgggtctggttatcttgatcacttaataagtttgaatttctggaagaagttgatgaagaggaattagaccgaaaggaaatacgtaaaaaagaacgcaggagtctagacatgattataaaatcctctaatatcttcgccctcatttggttccatagaaatatttccgtaagtaaatacgtaacaaaattttctggatctgaattatttttaagaaaaaactcttttttttgtggaaaatagattgaacggcaatcctatagccaccagtatattatgtcttgatattttggttaaacagtacaccttagccttactgccctttatccaccacaagtcttactgctatagtaccattcaactaaaatattagactgctgtacttccaggaagtactgttcaagcatgtactgtacaaattaaaataaaatattactcatactatacaaggtttcagatccataaaatttgttaacatacgtccttacggacactattcctacttccccatcaggctctgataccagagatcagcggaaaggatacaaacggacagataggaattaagagatcagcaataatgaatgcagaaaatatatatatatatatatatatatatatatatatatatatatatatatatatatatatacgtcaaatattaatactctctctggtctcatatataagccaaaataattacttcccatagattaagaaatcatttaattttactaatctcaagtagtaagtaaggttattcttaaaatgtcctccattcaaacctgataccttgaataaaaatgactccataaaaattgaattacaattagatgaagattgttttaggaatgacatcaataaatagggtgaaattagttatattttcttaatttgagtccaagaaacaaggggacttttttgcttatatatgagtatagaggagtataatctatgaaagatgtccaaaattaatgaaagattgtatcattt

SEQ ID NO: 14857 - DNA, 1036 bp, Glycine max
  Gm_smallRNAprecursor_7690
tttggatattaattaaacgttaactacaattagtgtacacacacataaaatatatataagtagaacttttatttaaatcacgtaccttaacaacaatccacctagcagcagccttggatttcggttgtggagtatcatcaagtcctttcaaaacactagtgttgaatatgaggaacattaaaatattgatgttgttgagttatgccaatgaaaatgtattgaaaacaatactgacctgttaattattcccttaaggtagttgtctggcctgttatgtaaagaacaaaaccagacaactaggttttccttaggcagaatgacgaccatttgccagtgtccgctgcagtagagacgaatatgggttattgtagtagtatagattatttaaattcaattattgtgtttgacttacccattcagataggctccaaggtaaacatctcgttttgaactctgtatccaactcttgatgtaactttcagattcaaattgtgattgcccagatctctgaatggactgtggctcgaggaatccatacacatcagaattccccgctcgcacacttgtctcggtcagatggctgtgttgttaagtcaaagttaattatgtatgaatttaaaacaattactttggtaattaatagtaatctaaaatgacttacagaatccacaattgtataacagatatgctgagacattgaccaccgtgtgcaatttcagagagatcttcgtgctttatatacaacgggaagttttgattaaacaccccgaatatggtagcatcccacataacctggagcggattcaaaaatagttgtgggatggtcaatgtcatcaggtacaggggatcgtcgacctcttcatccgggctttctagagattttgctggagacacagctgcctattgataaaacatagttaattagcaagttttgattacagtgaacaaaataattgaaaaaaataaacatataataagagtaaaatacttgttctgataaacacttcacaacatgtgttggccaagcaaggaaggt

SEQ ID NO: 14858 - DNA, 1046 bp, Glycine max
  Gm_smallRNAprecursor_7691
tacgcgaagattttcaattgttcttcgacattcatcgttcgttcttcgttgttcttcggtcttcaaccggtaagtaccccaaatcgagcttttcaattcattctatgtacccgtggtggtccccattcgtttcgtgtaattttattctcgtttcatttactttctgtccccccttttgacgtgcttcagtcatttacttaagtcatcttcttgcctaatcaaaaaataaaataaatttccaccgatcatttgatttgtaatacctgttaatttctgttaaaatgaaatccgaccgttcggtcatgccgtaaccacgttggaaatcaaagaggtaaaataataatataataataaaaaaatatcttttagtaaaataaagagtgaataggcaatttagtccctgagattgtacccattttgcatattagtccctaacttaatattaaattcaaaatagtccctatctttgcataagtgttgcaaaatagtccttccgttaaattttaaagtaacgccgttagtgaggtcaattttagtgccacgtggactatccacgtggcactaaaggatggcgaggcatgacatgtggacgtgcctgatgccacgtcatttgatgataacaaaacgagtaaataggtaatttagtccctgactttgtacccctgttgcatattagtccctaacttaacgaaaaattcaaaatagtccttatcttttgcataagtgttgcaaatagtccctaacttaaaagatgctagaaatcatgcttaaagtgtctatgcattgcaaaggttgtgctagcacgatttttggcagcgcagattcctccttggattccttgtcatcttttgattcctctggttttttctcttcttctttcttttcttcttcatttgcttttttctcctccactttgttttcctctagttttttctcttcctattcaaaacacacaaaaaaatcagaacccagaatgatacattgatggtaattgaagaaaaaaaaagaggaaaagagaatggttatgcagacctcgcccattggtg

SEQ ID NO: 14859 - DNA, 1045 bp, Glycine max
  Gm_smallRNAprecursor_7692
acgcgaagattttcaattgttcttcgacattcatcgttcgttcttcgttgttcttcggtcttcaaccggtaagtaccccaaatcgagcttttcaattcattctatgtacccgtggtggtccccattcgtttcgtgtaattttattctcgtttcatttactttctgtccccccttttgacgtgcttcagtcatttacttaagtcatcttcttgcctaatcaaaaaataaaataaatttccaccgatcatttgatttgtaatacctgttaatttctgttaaaatgaaatccgaccgttcggtcatgccgtaaccacgttggaaatcaaagaggtaaaataataatataataataaaaaaatatcttttagtaaaataaagagtgaataggcaatttagtccctgagattgtacccattttgcatattagtccctaacttaatattaaattcaaaatagtccctatctttgcataagtgttgcaaaatagtccttccgttaaattttaaagtaacgccgttagtgaggtcaattttagtgccacgtggactatccacgtggcactaaaggatggcgaggcatgacatgtggacgtgcctgatgccacgtcatttgatgataacaaaacgagtaaataggtaatttagtccctgactttgtacccctgttgcatattagtccctaacttaacgaaaaattcaaaatagtccttatcttttgcataagtgttgcaaatagtccctaacttaaaagatgctagaaatcatgcttaaagtgtctatgcattgcaaaggttgtgctagcacgatttttggcagcgcagattcctccttggattccttgtcatcttttgattcctctggttttttctcttcttctttcttttcttcttcatttgcttttttctcctccactttgttttcctctagttttttctcttcctattcaaaacacacaaaaaaatcagaacccagaatgatacattgatggtaattgaagaaaaaaaaagaggaaaagagaatggttatgcagacctcgcccattggtg

SEQ ID NO: 14860 - DNA, 1096 bp, Glycine max
  Gm_smallRNAprecursor_7693
tagggttggcgcagcgaaggcggaagcgctcgatggcgggcgcgtcgtggaggaggagcacggagtagacgaattcggcgaagccagtgagacctccgggatggtggaactccggggaggactcgtcgtcgaagtcgaggaccgagacggcgggccagagcggacgccaccgcttggagagaatgccggtgatgacggcctgcttggtggggaggagggagaggatttggaggaggagcacatcggggaggtggctgattctgtcgtcatcgccggtggttggtttctgccgatgcgacggtggctcggaggattccgccataggtggtggtagtggtggtggggttaattgaaagaagaacaagtgaatatatagtgtttcgttttgggtctaatgaccaatgtggggctgatgctaggtgcacccagcattattgctggtgcacccaacacttaagggggcaaagactgaaatatccttgatccgtaagccttttaagttgatctgtaagtcttttacggatcaacttgatctgtatgcttaatatcaacatacatatcaacttgatcagtatcaattttacggatcaacttgatccgtacgatttacgaatcacccttaggcacacccaacacaaatgcgaagaaagtgcaagggcagttttgacatttttaaaaaatgctgagtgcaccagcaataatgttgggtgcaccatcagccccaatgaggttgggcattgcatagtgcacactatgttatcatagtgcctactcgatcgtgtgaattgttttctttacttcattaataacttcattagtattttgtttttttattttatttttatcatcgggatctcgtttcgcccatgtcatccttgttttttttttcttgtatttttgtacttgctctataacgccttttagagaatgattcatccttttaggtttctttttattaaaatgggttctttctataataaattattgacatatgaacctattttaaataaagtccagggttgaattgacaatttaagaacttagccaatcaacacaaaaagatgaaacaacaattttaaataattgtttcacccta

SEQ ID NO: 14861 - DNA, 1038 bp, Glycine max
  Gm_smallRNAprecursor_7694
tacctttcgggcaatatgaatggaatgtaatgccattcggactgaagaatgccccttcagaatttcaaaaaattatgaatgatattttcaatccctattcaaaatttgttattgtctacatagatgatgttttaatcttttcccaaaacattgaccagcatttcaaacatctccaaaccttcatccatatcatcaaacaaaatggtttggcagtctccaaatcaaaaatcaatcttttccaaacacgaattcgattccttggtcacaatatttatcaaggaacaatcgttccaatcgaaaggtcaattgagttttctagcaaattccccaaccaaatcttagacaaaacccagttacaaagatttctaggttgtctaaattacgtaggtgaatttgtcccctacttaaacaatattgtcaaaccattgcatgataggctaaagaaaaatccgcctccttggtctgacctccatacccaaacagttaaagaaatcaaagtcaaagtccaatccataaaatgtctgtatcttcccataccacaggcattcaaaattgtcgaaactgatgcatcagacatcggttacggtggcatcctcaaacaataagtacatggtcaagaacatgtcatcgcatatacttcaaaacactggaatcctgcacaattaaagtattcaactgttaaaaaagaagttttagcaatttttttgtgcatttccaaatttcaatctgatttattaaatcaaaaatttttagtaagagttgactgcaaatcagctaaagatattttacagaaggatgtataaaaccttgcctcaaaacagatttttgcaagatgaaaatttccgatgcctcctaaggtgtctagttcctccggcagaggaggaagatccagtacaaaaggtaaagaagttctactggctctaccagagccaataaccaaaaaggcaactacaacatcttctgggtcacctacccagactgggtcatcgacccataaaggaaaacttgaagggtcattgacccagacaactaccatca

SEQ ID NO: 14862 - DNA, 1122 bp, Glycine max
  Gm_smallRNAprecursor_7695
agatataggcctcaccaaaataccaaaattagcaaaaaagacctgggcagaaatggcctcagaatcagacgatgattctgaaacagatctacaaaaacaaatccaaaaagccaaacagaccaaaatcgtctgtaaccaaaaaccaagccaatcattgactaaacaagaatcaacaccacaacccggtaacagttacatttcaaaaaacaaatttttcaatgttttacaaatggaaccagaatactgggacaagaatcctttcaaagcaaccgccaaagcattccccccgggattccattacaagccaatagccacaaacaaaacccgcaaattctacgaattcatcctaatagatacaaactcagtatctattaaacacttcaaagaccccaaagatccaaatctaaatacccattccacaatccaaatcttgaaggtgatgcagccacggcattatggctcaaacttaaaccaacccaaaaaattctctgcaccatttgaccctgcaggatataattattgggattacattgacgcctggaccaatgtgttctggcatcaaaatagtaaattcaagcattcatggctgatttacttcaaaaataatactgcatataattttccaaattggttcctccaatggtggaactacttcggaccaattccacaaatatttccagaagaagtccaacagggattcgaacaattcaacaagctctataatagcaaggaatcacgtattccggcagacttaaagtacttttccagttttgccttgtcatggatcttttcatggcaatacagatacggaaaaactgaaaacaacaagcaatatccaccgttacaaagacacgcctttgtaaaatggtggtcacaattcgatacttcaaaggctgctccagatcaagtcaagaactggttccagagcaatcctgagttccttaaacctgctgatccggagacatctttgtttctaaatcaaaagtcgcaactagcagcattcttagcaagctcaaaatctaaagagagtcttgctcagaatctcaaagaagttctccaactacttcaacaggaagtggaagaagaaccttccaagaaggaagctgaatcatccgagactaa

SEQ ID NO: 14863 - DNA, 1049 bp, Glycine max
  Gm_smallRNAprecursor_7696
caatgttttacaaatggaaccagaatactgggacaagaatcctttcaaagcaaccgccaaagcattccccccgggattccattacaagccaatagccacaaacaaaacccgcaaattctacgaattcatcctaatagatacaaactcagtatctattaaacacttcaaagaccccaaagatccaaatctaaatacccattccacaatccaaatcttgaaggtgatgcagccacggcattatggctcaaacttaaaccaacccaaaaaattctctgcaccatttgaccctgcaggatataattattgggattacattgacgcctggaccaatgtgttctggcatcaaaatagtaaattcaagcattcatggctgatttacttcaaaaataatactgcatataattttccaaattggttcctccaatggtggaactacttcggaccaattccacaaatatttccagaagaagtccaacagggattcgaacaattcaacaagctctataatagcaaggaatcacgtattccggcagacttaaagtacttttccagttttgccttgtcatggatcttttcatggcaatacagatacggaaaaactgaaaacaacaagcaatatccaccgttacaaagacacgcctttgtaaaatggtggtcacaattcgatacttcaaaggctgctccagatcaagtcaagaactggttccagagcaatcctgagttccttaaacctgctgatccggagacatctttgtttctaaatcaaaagtcgcaactagcagcattcttagcaagctcaaaatctaaagagagtcttgctcagaatctcaaagaagttctccaactacttcaacaggaagtggaagaagaaccttccaagaaggaagctgaatcatccgagactaatgatgaccaagaagatgatccattctaccagaatgaagatgactgttttggtatatcattggacgacgattaattagttgtagtaatcatgaattattgtgactaatttaaataatgtaatttgtaaaagttttgtaacagtt

SEQ ID NO: 14864 - DNA, 1149 bp, Glycine max
  Gm_smallRNAprecursor_7697
agcaaccgccaaagcattccccccgggattccattacaagccaatagccacaaacaaaacccgcaaattctacgaattcatcctaatagatacaaactcagtatctattaaacacttcaaagaccccaaagatccaaatctaaatacccattccacaatccaaatcttgaaggtgatgcagccacggcattatggctcaaacttaaaccaacccaaaaaattctctgcaccatttgaccctgcaggatataattattgggattacattgacgcctggaccaatgtgttctggcatcaaaatagtaaattcaagcattcatggctgatttacttcaaaaataatactgcatataattttccaaattggttcctccaatggtggaactacttcggaccaattccacaaatatttccagaagaagtccaacagggattcgaacaattcaacaagctctataatagcaaggaatcacgtattccggcagacttaaagtacttttccagttttgccttgtcatggatcttttcatggcaatacagatacggaaaaactgaaaacaacaagcaatatccaccgttacaaagacacgcctttgtaaaatggtggtcacaattcgatacttcaaaggctgctccagatcaagtcaagaactggttccagagcaatcctgagttccttaaacctgctgatccggagacatctttgtttctaaatcaaaagtcgcaactagcagcattcttagcaagctcaaaatctaaagagagtcttgctcagaatctcaaagaagttctccaactacttcaacaggaagtggaagaagaaccttccaagaaggaagctgaatcatccgagactaatgatgaccaagaagatgatccattctaccagaatgaagatgactgttttggtatatcattggacgacgattaattagttgtagtaatcatgaattattgtgactaatttaaataatgtaatttgtaaaagttttgtaacagttccggtaaacattaccgttactgtagaaacaataaaaattgggtctatttaaaggagtcctcgtcccctttgtgaggcaccctttcagatagtcccagaatcaggtttttagagagagaagctctgcctagggaaaaactctttgtaag

SEQ ID NO: 14865 - DNA, 1137 bp, Glycine max
  Gm_smallRNAprecursor_7698
taaatacccattccacaatccaaatcttgaaggtgatgcagccacggcattatggctcaaacttaaaccaacccaaaaaattctctgcaccatttgaccctgcaggatataattattgggattacattgacgcctggaccaatgtgttctggcatcaaaatagtaaattcaagcattcatggctgatttacttcaaaaataatactgcatataattttccaaattggttcctccaatggtggaactacttcggaccaattccacaaatatttccagaagaagtccaacagggattcgaacaattcaacaagctctataatagcaaggaatcacgtattccggcagacttaaagtacttttccagttttgccttgtcatggatcttttcatggcaatacagatacggaaaaactgaaaacaacaagcaatatccaccgttacaaagacacgcctttgtaaaatggtggtcacaattcgatacttcaaaggctgctccagatcaagtcaagaactggttccagagcaatcctgagttccttaaacctgctgatccggagacatctttgtttctaaatcaaaagtcgcaactagcagcattcttagcaagctcaaaatctaaagagagtcttgctcagaatctcaaagaagttctccaactacttcaacaggaagtggaagaagaaccttccaagaaggaagctgaatcatccgagactaatgatgaccaagaagatgatccattctaccagaatgaagatgactgttttggtatatcattggacgacgattaattagttgtagtaatcatgaattattgtgactaatttaaataatgtaatttgtaaaagttttgtaacagttccggtaaacattaccgttactgtagaaacaataaaaattgggtctatttaaaggagtcctcgtcccctttgtgaggcaccctttcagatagtcccagaatcaggtttttagagagagaagctctgcctagggaaaaactctttgtaagcttttctttcagttttaataaatctcaagttctatttttcatatctcccttctcccctcactgatcctgtgcggctctgccgccgcttcggtttctttgttttcaaaaacctgggtttgtaagccgtt

SEQ ID NO: 14866 - DNA, 1121 bp, Glycine max
  Gm_smallRNAprecursor_7699
cattccacaatccaaatcttgaaggtgatgcagccacggcattatggctcaaacttaaaccaacccaaaaaattctctgcaccatttgaccctgcaggatataattattgggattacattgacgcctggaccaatgtgttctggcatcaaaatagtaaattcaagcattcatggctgatttacttcaaaaataatactgcatataattttccaaattggttcctccaatggtggaactacttcggaccaattccacaaatatttccagaagaagtccaacagggattcgaacaattcaacaagctctataatagcaaggaatcacgtattccggcagacttaaagtacttttccagttttgccttgtcatggatcttttcatggcaatacagatacggaaaaactgaaaacaacaagcaatatccaccgttacaaagacacgcctttgtaaaatggtggtcacaattcgatacttcaaaggctgctccagatcaagtcaagaactggttccagagcaatcctgagttccttaaacctgctgatccggagacatctttgtttctaaatcaaaagtcgcaactagcagcattcttagcaagctcaaaatctaaagagagtcttgctcagaatctcaaagaagttctccaactacttcaacaggaagtggaagaagaaccttccaagaaggaagctgaatcatccgagactaatgatgaccaagaagatgatccattctaccagaatgaagatgactgttttggtatatcattggacgacgattaattagttgtagtaatcatgaattattgtgactaatttaaataatgtaatttgtaaaagttttgtaacagttccggtaaacattaccgttactgtagaaacaataaaaattgggtctatttaaaggagtcctcgtcccctttgtgaggcaccctttcagatagtcccagaatcaggtttttagagagagaagctctgcctagggaaaaactctttgtaagcttttctttcagttttaataaatctcaagttctatttttcatatctcccttctcccctcactgatcctgtgcggctctgccgccgcttcggtttctttgttttcaaaaacctgggtttgt

SEQ ID NO: 14867 - DNA, 1048 bp, Glycine max
  Gm_smallRNAprecursor_7700
attccacaatccaaatcttgaaggtgatgcagccacggcattatggctcaaacttaaaccaacccaaaaaattctctgcaccatttgaccctgcaggatataattattgggattacattgacgcctggaccaatgtgttctggcatcaaaatagtaaattcaagcattcatggctgatttacttcaaaaataatactgcatataattttccaaattggttcctccaatggtggaactacttcggaccaattccacaaatatttccagaagaagtccaacagggattcgaacaattcaacaagctctataatagcaaggaatcacgtattccggcagacttaaagtacttttccagttttgccttgtcatggatcttttcatggcaatacagatacggaaaaactgaaaacaacaagcaatatccaccgttacaaagacacgcctttgtaaaatggtggtcacaattcgatacttcaaaggctgctccagatcaagtcaagaactggttccagagcaatcctgagttccttaaacctgctgatccggagacatctttgtttctaaatcaaaagtcgcaactagcagcattcttagcaagctcaaaatctaaagagagtcttgctcagaatctcaaagaagttctccaactacttcaacaggaagtggaagaagaaccttccaagaaggaagctgaatcatccgagactaatgatgaccaagaagatgatccattctaccagaatgaagatgactgttttggtatatcattggacgacgattaattagttgtagtaatcatgaattattgtgactaatttaaataatgtaatttgtaaaagttttgtaacagttccggtaaacattaccgttactgtagaaacaataaaaattgggtctatttaaaggagtcctcgtcccctttgtgaggcaccctttcagatagtcccagaatcaggtttttagagagagaagctctgcctagggaaaaactctttgtaagcttttctttcagttttaataaatctcaagttctatttttcatatctcc

SEQ ID NO: 14868 - DNA, 1098 bp, Glycine max
  Gm_smallRNAprecursor_7701
attccacaatccaaatcttgaaggtgatgcagccacggcattatggctcaaacttaaaccaacccaaaaaattctctgcaccatttgaccctgcaggatataattattgggattacattgacgcctggaccaatgtgttctggcatcaaaatagtaaattcaagcattcatggctgatttacttcaaaaataatactgcatataattttccaaattggttcctccaatggtggaactacttcggaccaattccacaaatatttccagaagaagtccaacagggattcgaacaattcaacaagctctataatagcaaggaatcacgtattccggcagacttaaagtacttttccagttttgccttgtcatggatcttttcatggcaatacagatacggaaaaactgaaaacaacaagcaatatccaccgttacaaagacacgcctttgtaaaatggtggtcacaattcgatacttcaaaggctgctccagatcaagtcaagaactggttccagagcaatcctgagttccttaaacctgctgatccggagacatctttgtttctaaatcaaaagtcgcaactagcagcattcttagcaagctcaaaatctaaagagagtcttgctcagaatctcaaagaagttctccaactacttcaacaggaagtggaagaagaaccttccaagaaggaagctgaatcatccgagactaatgatgaccaagaagatgatccattctaccagaatgaagatgactgttttggtatatcattggacgacgattaattagttgtagtaatcatgaattattgtgactaatttaaataatgtaatttgtaaaagttttgtaacagttccggtaaacattaccgttactgtagaaacaataaaaattgggtctatttaaaggagtcctcgtcccctttgtgaggcaccctttcagatagtcccagaatcaggtttttagagagagaagctctgcctagggaaaaactctttgtaagcttttctttcagttttaataaatctcaagttctatttttcatatctcccttctcccctcactgatcctgtgcggctctgccgccgcttcggtttcttt

SEQ ID NO: 14869 - DNA, 1120 bp, Glycine max
  Gm_smallRNAprecursor_7702
attccacaatccaaatcttgaaggtgatgcagccacggcattatggctcaaacttaaaccaacccaaaaaattctctgcaccatttgaccctgcaggatataattattgggattacattgacgcctggaccaatgtgttctggcatcaaaatagtaaattcaagcattcatggctgatttacttcaaaaataatactgcatataattttccaaattggttcctccaatggtggaactacttcggaccaattccacaaatatttccagaagaagtccaacagggattcgaacaattcaacaagctctataatagcaaggaatcacgtattccggcagacttaaagtacttttccagttttgccttgtcatggatcttttcatggcaatacagatacggaaaaactgaaaacaacaagcaatatccaccgttacaaagacacgcctttgtaaaatggtggtcacaattcgatacttcaaaggctgctccagatcaagtcaagaactggttccagagcaatcctgagttccttaaacctgctgatccggagacatctttgtttctaaatcaaaagtcgcaactagcagcattcttagcaagctcaaaatctaaagagagtcttgctcagaatctcaaagaagttctccaactacttcaacaggaagtggaagaagaaccttccaagaaggaagctgaatcatccgagactaatgatgaccaagaagatgatccattctaccagaatgaagatgactgttttggtatatcattggacgacgattaattagttgtagtaatcatgaattattgtgactaatttaaataatgtaatttgtaaaagttttgtaacagttccggtaaacattaccgttactgtagaaacaataaaaattgggtctatttaaaggagtcctcgtcccctttgtgaggcaccctttcagatagtcccagaatcaggtttttagagagagaagctctgcctagggaaaaactctttgtaagcttttctttcagttttaataaatctcaagttctatttttcatatctcccttctcccctcactgatcctgtgcggctctgccgccgcttcggtttctttgttttcaaaaacctgggtttgt

SEQ ID NO: 14870 - DNA, 1070 bp, Glycine max
  Gm_smallRNAprecursor_7703
tcaaacttaaaccaacccaaaaaattctctgcaccatttgaccctgcaggatataattattgggattacattgacgcctggaccaatgtgttctggcatcaaaatagtaaattcaagcattcatggctgatttacttcaaaaataatactgcatataattttccaaattggttcctccaatggtggaactacttcggaccaattccacaaatatttccagaagaagtccaacagggattcgaacaattcaacaagctctataatagcaaggaatcacgtattccggcagacttaaagtacttttccagttttgccttgtcatggatcttttcatggcaatacagatacggaaaaactgaaaacaacaagcaatatccaccgttacaaagacacgcctttgtaaaatggtggtcacaattcgatacttcaaaggctgctccagatcaagtcaagaactggttccagagcaatcctgagttccttaaacctgctgatccggagacatctttgtttctaaatcaaaagtcgcaactagcagcattcttagcaagctcaaaatctaaagagagtcttgctcagaatctcaaagaagttctccaactacttcaacaggaagtggaagaagaaccttccaagaaggaagctgaatcatccgagactaatgatgaccaagaagatgatccattctaccagaatgaagatgactgttttggtatatcattggacgacgattaattagttgtagtaatcatgaattattgtgactaatttaaataatgtaatttgtaaaagttttgtaacagttccggtaaacattaccgttactgtagaaacaataaaaattgggtctatttaaaggagtcctcgtcccctttgtgaggcaccctttcagatagtcccagaatcaggtttttagagagagaagctctgcctagggaaaaactctttgtaagcttttctttcagttttaataaatctcaagttctatttttcatatctcccttctcccctcactgatcctgtgcggctctgccgccgcttcggtttctttgttttcaaaaacctgggtt

SEQ ID NO: 14871 - DNA, 1071 bp, Glycine max
  Gm_smallRNAprecursor_7704
tcaaacttaaaccaacccaaaaaattctctgcaccatttgaccctgcaggatataattattgggattacattgacgcctggaccaatgtgttctggcatcaaaatagtaaattcaagcattcatggctgatttacttcaaaaataatactgcatataattttccaaattggttcctccaatggtggaactacttcggaccaattccacaaatatttccagaagaagtccaacagggattcgaacaattcaacaagctctataatagcaaggaatcacgtattccggcagacttaaagtacttttccagttttgccttgtcatggatcttttcatggcaatacagatacggaaaaactgaaaacaacaagcaatatccaccgttacaaagacacgcctttgtaaaatggtggtcacaattcgatacttcaaaggctgctccagatcaagtcaagaactggttccagagcaatcctgagttccttaaacctgctgatccggagacatctttgtttctaaatcaaaagtcgcaactagcagcattcttagcaagctcaaaatctaaagagagtcttgctcagaatctcaaagaagttctccaactacttcaacaggaagtggaagaagaaccttccaagaaggaagctgaatcatccgagactaatgatgaccaagaagatgatccattctaccagaatgaagatgactgttttggtatatcattggacgacgattaattagttgtagtaatcatgaattattgtgactaatttaaataatgtaatttgtaaaagttttgtaacagttccggtaaacattaccgttactgtagaaacaataaaaattgggtctatttaaaggagtcctcgtcccctttgtgaggcaccctttcagatagtcccagaatcaggtttttagagagagaagctctgcctagggaaaaactctttgtaagcttttctttcagttttaataaatctcaagttctatttttcatatctcccttctcccctcactgatcctgtgcggctctgccgccgcttcggtttctttgttttcaaaaacctgggttt

SEQ ID NO: 14872 - DNA, 1038 bp, Glycine max; identical to SEQ ID NO: 14861
  Gm_smallRNAprecursor_7705

SEQ ID NO: 14873 - DNA, 1122 bp, Glycine max
  Gm_smallRNAprecursor_7706
agatataggcctcaccaaaataccaaaattagcaaaaaagacctgggcagaaatggcctcagaatcagacgatgattctgaaacagatctacaaaaacaaatccaaaaagccaaacagaccaaaatcgtctgtaaccaaaaaccaagccaatcattgactaaacaagaatcaacaccacaacccggtaacagttacatttcaaaaaacaaatttttcaatgttttacaaatggaaccagaatactgggacaagaatcctttcaaagcaaccgccaaagcattccccccgggattccattacaagccaatagccacaaacaaaacccgcaaattctacgaattcatcctaatagatacaaactcagtatctattaaacacttcaaagaccccaaagatccaaatctaaatacccattccacaatccaaatcttgaaggtgatgcagccacggcattatggctcaaacttaaaccaacccaaaaaattctctgcaccatttgaccctgcaggatataattattgggattacattgacgcctggaccaatgtgttctggcatcaaaatagtaaattcaagcattcatggctgatttacttcaaaaataatactgcatataattttccaaattggttcctccaatggtggaactacttcggaccaattccacaaatatttccagaagaagtccaacagggattcgaacaattcaacaagctctataatagcaaggaatcacgtattccggcagacttaaagtacttttccagttttgccttgtcatggatcttttcatggcaatacagatacgaaaaaactgaaaacaacaagcaatatccaccgttacagagacacgcctttgtaaaatggtggtcacaattcgatacttcaaaggctgctccagatcaagtcaagaactggttccagagcaatcctgagttccttaaacctgctgatccggagacatctttgtttctaaatcaaaagtcgcaactagcagcattcttagcaagctcaaaatctaaagagagtcttgctcagaatctcaaagaagttctccaactacttcaacaggaagtggaagaagaaccttccaagaaggaagctgaatcatccgagactaa

SEQ ID NO: 14874 - DNA, 1049 bp, Glycine max
  Gm_smallRNAprecursor_7707
caatgttttacaaatggaaccagaatactgggacaagaatcctttcaaagcaaccgccaaagcattccccccgggattccattacaagccaatagccacaaacaaaacccgcaaattctacgaattcatcctaatagatacaaactcagtatctattaaacacttcaaagaccccaaagatccaaatctaaatacccattccacaatccaaatcttgaaggtgatgcagccacggcattatggctcaaacttaaaccaacccaaaaaattctctgcaccatttgaccctgcaggatataattattgggattacattgacgcctggaccaatgtgttctggcatcaaaatagtaaattcaagcattcatggctgatttacttcaaaaataatactgcatataattttccaaattggttcctccaatggtggaactacttcggaccaattccacaaatatttccagaagaagtccaacagggattcgaacaattcaacaagctctataatagcaaggaatcacgtattccggcagacttaaagtacttttccagttttgccttgtcatggatcttttcatggcaatacagatacgaaaaaactgaaaacaacaagcaatatccaccgttacagagacacgcctttgtaaaatggtggtcacaattcgatacttcaaaggctgctccagatcaagtcaagaactggttccagagcaatcctgagttccttaaacctgctgatccggagacatctttgtttctaaatcaaaagtcgcaactagcagcattcttagcaagctcaaaatctaaagagagtcttgctcagaatctcaaagaagttctccaactacttcaacaggaagtggaagaagaaccttccaagaaggaagctgaatcatccgagactaatgatgaccaagaagatgatccattctaccagaatgaagatgactgttttggtatatcattggacgacgattaattagttgtagtaatcatgaattattgtgactaatttaaataatgtaatttgtaaaagttttgtaacagtt

SEQ ID NO: 14875 - DNA, 1131 bp, Glycine max
  Gm_smallRNAprecursor_7708
caatgttttacaaatggaaccagaatactgggacaagaatcctttcaaagcaaccgccaaagcattccccccgggattccattacaagccaatagccacaaacaaaacccgcaaattctacgaattcatcctaatagatacaaactcagtatctattaaacacttcaaagaccccaaagatccaaatctaaatacccattccacaatccaaatcttgaaggtgatgcagccacggcattatggctcaaacttaaaccaacccaaaaaattctctgcaccatttgaccctgcaggatataattattgggattacattgacgcctggaccaatgtgttctggcatcaaaatagtaaattcaagcattcatggctgatttacttcaaaaataatactgcatataattttccaaattggttcctccaatggtggaactacttcggaccaattccacaaatatttccagaagaagtccaacagggattcgaacaattcaacaagctctataatagcaaggaatcacgtattccggcagacttaaagtacttttccagttttgccttgtcatggatcttttcatggcaatacagatacgaaaaaactgaaaacaacaagcaatatccaccgttacagagacacgcctttgtaaaatggtggtcacaattcgatacttcaaaggctgctccagatcaagtcaagaactggttccagagcaatcctgagttccttaaacctgctgatccggagacatctttgtttctaaatcaaaagtcgcaactagcagcattcttagcaagctcaaaatctaaagagagtcttgctcagaatctcaaagaagttctccaactacttcaacaggaagtggaagaagaaccttccaagaaggaagctgaatcatccgagactaatgatgaccaagaagatgatccattctaccagaatgaagatgactgttttggtatatcattggacgacgattaattagttgtagtaatcatgaattattgtgactaatttaaataatgtaatttgtaaaagttttgtaacagttccggtaaacattaccgttactgtagaaacaataaaaattgggtctttttaaaggagtcctcgtcccctttgtgaggcaccct

SEQ ID NO: 14876 - DNA, 1131 bp, Glycine max; identical to SEQ ID NO: 14875
  Gm_smallRNAprecursor_7709

SEQ ID NO: 14877 - DNA, 1086 bp, Glycine max
  Gm_smallRNAprecursor_7710
caaagcaaccgccaaagcattccccccgggattccattacaagccaatagccacaaacaaaacccgcaaattctacgaattcatcctaatagatacaaactcagtatctattaaacacttcaaagaccccaaagatccaaatctaaatacccattccacaatccaaatcttgaaggtgatgcagccacggcattatggctcaaacttaaaccaacccaaaaaattctctgcaccatttgaccctgcaggatataattattgggattacattgacgcctggaccaatgtgttctggcatcaaaatagtaaattcaagcattcatggctgatttacttcaaaaataatactgcatataattttccaaattggttcctccaatggtggaactacttcggaccaattccacaaatatttccagaagaagtccaacagggattcgaacaattcaacaagctctataatagcaaggaatcacgtattccggcagacttaaagtacttttccagttttgccttgtcatggatcttttcatggcaatacagatacgaaaaaactgaaaacaacaagcaatatccaccgttacagagacacgcctttgtaaaatggtggtcacaattcgatacttcaaaggctgctccagatcaagtcaagaactggttccagagcaatcctgagttccttaaacctgctgatccggagacatctttgtttctaaatcaaaagtcgcaactagcagcattcttagcaagctcaaaatctaaagagagtcttgctcagaatctcaaagaagttctccaactacttcaacaggaagtggaagaagaaccttccaagaaggaagctgaatcatccgagactaatgatgaccaagaagatgatccattctaccagaatgaagatgactgttttggtatatcattggacgacgattaattagttgtagtaatcatgaattattgtgactaatttaaataatgtaatttgtaaaagttttgtaacagttccggtaaacattaccgttactgtagaaacaataaaaattgggtctttttaaaggagtcctcgtcccctttgtgaggcaccct

SEQ ID NO: 14878 - DNA, 1086 bp, Glycine max; identical to SEQ ID NO: 14877
  Gm_smallRNAprecursor_7711

SEQ ID NO: 14879 - DNA, 1085 bp, Glycine max
  Gm_smallRNAprecursor_7712
aaagcaaccgccaaagcattccccccgggattccattacaagccaatagccacaaacaaaacccgcaaattctacgaattcatcctaatagatacaaactcagtatctattaaacacttcaaagaccccaaagatccaaatctaaatacccattccacaatccaaatcttgaaggtgatgcagccacggcattatggctcaaacttaaaccaacccaaaaaattctctgcaccatttgaccctgcaggatataattattgggattacattgacgcctggaccaatgtgttctggcatcaaaatagtaaattcaagcattcatggctgatttacttcaaaaataatactgcatataattttccaaattggttcctccaatggtggaactacttcggaccaattccacaaatatttccagaagaagtccaacagggattcgaacaattcaacaagctctataatagcaaggaatcacgtattccggcagacttaaagtacttttccagttttgccttgtcatggatcttttcatggcaatacagatacgaaaaaactgaaaacaacaagcaatatccaccgttacagagacacgcctttgtaaaatggtggtcacaattcgatacttcaaaggctgctccagatcaagtcaagaactggttccagagcaatcctgagttccttaaacctgctgatccggagacatctttgtttctaaatcaaaagtcgcaactagcagcattcttagcaagctcaaaatctaaagagagtcttgctcagaatctcaaagaagttctccaactacttcaacaggaagtggaagaagaaccttccaagaaggaagctgaatcatccgagactaatgatgaccaagaagatgatccattctaccagaatgaagatgactgttttggtatatcattggacgacgattaattagttgtagtaatcatgaattattgtgactaatttaaataatgtaatttgtaaaagttttgtaacagttccggtaaacattaccgttactgtagaaacaataaaaattgggtctttttaaaggagtcctcgtcccctttgtgaggcaccct

SEQ ID NO: 14880 - DNA, 1085 bp, Glycine max; identical to SEQ ID NO: 14879
  Gm_smallRNAprecursor_7713

SEQ ID NO: 14881 - DNA, 1149 bp, Glycine max
  Gm_smallRNAprecursor_7714
agcaaccgccaaagcattccccccgggattccattacaagccaatagccacaaacaaaacccgcaaattctacgaattcatcctaatagatacaaactcagtatctattaaacacttcaaagaccccaaagatccaaatctaaatacccattccacaatccaaatcttgaaggtgatgcagccacggcattatggctcaaacttaaaccaacccaaaaaattctctgcaccatttgaccctgcaggatataattattgggattacattgacgcctggaccaatgtgttctggcatcaaaatagtaaattcaagcattcatggctgatttacttcaaaaataatactgcatataattttccaaattggttcctccaatggtggaactacttcggaccaattccacaaatatttccagaagaagtccaacagggattcgaacaattcaacaagctctataatagcaaggaatcacgtattccggcagacttaaagtacttttccagttttgccttgtcatggatcttttcatggcaatacagatacgaaaaaactgaaaacaacaagcaatatccaccgttacagagacacgcctttgtaaaatggtggtcacaattcgatacttcaaaggctgctccagatcaagtcaagaactggttccagagcaatcctgagttccttaaacctgctgatccggagacatctttgtttctaaatcaaaagtcgcaactagcagcattcttagcaagctcaaaatctaaagagagtcttgctcagaatctcaaagaagttctccaactacttcaacaggaagtggaagaagaaccttccaagaaggaagctgaatcatccgagactaatgatgaccaagaagatgatccattctaccagaatgaagatgactgttttggtatatcattggacgacgattaattagttgtagtaatcatgaattattgtgactaatttaaataatgtaatttgtaaaagttttgtaacagttccggtaaacattaccgttactgtagaaacaataaaaattgggtctttttaaaggagtcctcgtcccctttgtgaggcaccctttcagatagtcccagaatcaggtttttagagagagaagctctgcctagggaaaaactctttgtaag

SEQ ID NO: 14882 - DNA, 1165 bp, Glycine max
  Gm_smallRNAprecursor_7715
ctaatagatacaaactcagtatctattaaacacttcaaagaccccaaagatccaaatctaaatacccattccacaatccaaatcttgaaggtgatgcagccacggcattatggctcaaacttaaaccaacccaaaaaattctctgcaccatttgaccctgcaggatataattattgggattacattgacgcctggaccaatgtgttctggcatcaaaatagtaaattcaagcattcatggctgatttacttcaaaaataatactgcatataattttccaaattggttcctccaatggtggaactacttcggaccaattccacaaatatttccagaagaagtccaacagggattcgaacaattcaacaagctctataatagcaaggaatcacgtattccggcagacttaaagtacttttccagttttgccttgtcatggatcttttcatggcaatacagatacgaaaaaactgaaaacaacaagcaatatccaccgttacagagacacgcctttgtaaaatggtggtcacaattcgatacttcaaaggctgctccagatcaagtcaagaactggttccagagcaatcctgagttccttaaacctgctgatccggagacatctttgtttctaaatcaaaagtcgcaactagcagcattcttagcaagctcaaaatctaaagagagtcttgctcagaatctcaaagaagttctccaactacttcaacaggaagtggaagaagaaccttccaagaaggaagctgaatcatccgagactaatgatgaccaagaagatgatccattctaccagaatgaagatgactgttttggtatatcattggacgacgattaattagttgtagtaatcatgaattattgtgactaatttaaataatgtaatttgtaaaagttttgtaacagttccggtaaacattaccgttactgtagaaacaataaaaattgggtctttttaaaggagtcctcgtcccctttgtgaggcaccctttcagatagtcccagaatcaggtttttagagagagaagctctgcctagggaaaaactctttgtaagcttttctttcagttttaataaatctcaagttctatttttcatatctcccttctcccctcactgatcctgtgcggctctgccgccgcttcggtttcttt

SEQ ID NO: 14883 - DNA, 1137 bp, Glycine max
  Gm_smallRNAprecursor_7716
taaatacccattccacaatccaaatcttgaaggtgatgcagccacggcattatggctcaaacttaaaccaacccaaaaaattctctgcaccatttgaccctgcaggatataattattgggattacattgacgcctggaccaatgtgttctggcatcaaaatagtaaattcaagcattcatggctgatttacttcaaaaataatactgcatataattttccaaattggttcctccaatggtggaactacttcggaccaattccacaaatatttccagaagaagtccaacagggattcgaacaattcaacaagctctataatagcaaggaatcacgtattccggcagacttaaagtacttttccagttttgccttgtcatggatcttttcatggcaatacagatacgaaaaaactgaaaacaacaagcaatatccaccgttacagagacacgcctttgtaaaatggtggtcacaattcgatacttcaaaggctgctccagatcaagtcaagaactggttccagagcaatcctgagttccttaaacctgctgatccggagacatctttgtttctaaatcaaaagtcgcaactagcagcattcttagcaagctcaaaatctaaagagagtcttgctcagaatctcaaagaagttctccaactacttcaacaggaagtggaagaagaaccttccaagaaggaagctgaatcatccgagactaatgatgaccaagaagatgatccattctaccagaatgaagatgactgttttggtatatcattggacgacgattaattagttgtagtaatcatgaattattgtgactaatttaaataatgtaatttgtaaaagttttgtaacagttccggtaaacattaccgttactgtagaaacaataaaaattgggtctttttaaaggagtcctcgtcccctttgtgaggcaccctttcagatagtcccagaatcaggtttttagagagagaagctctgcctagggaaaaactctttgtaagcttttctttcagttttaataaatctcaagttctatttttcatatctcccttctcccctcactgatcctgtgcggctctgccgccgcttcggtttctttgttttcaaaaacctgggtttgtaagccgtt

SEQ ID NO: 14884 - DNA, 1121 bp, Glycine max
  Gm_smallRNAprecursor_7717
cattccacaatccaaatcttgaaggtgatgcagccacggcattatggctcaaacttaaaccaacccaaaaaattctctgcaccatttgaccctgcaggatataattattgggattacattgacgcctggaccaatgtgttctggcatcaaaatagtaaattcaagcattcatggctgatttacttcaaaaataatactgcatataattttccaaattggttcctccaatggtggaactacttcggaccaattccacaaatatttccagaagaagtccaacagggattcgaacaattcaacaagctctataatagcaaggaatcacgtattccggcagacttaaagtacttttccagttttgccttgtcatggatcttttcatggcaatacagatacgaaaaaactgaaaacaacaagcaatatccaccgttacagagacacgcctttgtaaaatggtggtcacaattcgatacttcaaaggctgctccagatcaagtcaagaactggttccagagcaatcctgagttccttaaacctgctgatccggagacatctttgtttctaaatcaaaagtcgcaactagcagcattcttagcaagctcaaaatctaaagagagtcttgctcagaatctcaaagaagttctccaactacttcaacaggaagtggaagaagaaccttccaagaaggaagctgaatcatccgagactaatgatgaccaagaagatgatccattctaccagaatgaagatgactgttttggtatatcattggacgacgattaattagttgtagtaatcatgaattattgtgactaatttaaataatgtaatttgtaaaagttttgtaacagttccggtaaacattaccgttactgtagaaacaataaaaattgggtctttttaaaggagtcctcgtcccctttgtgaggcaccctttcagatagtcccagaatcaggtttttagagagagaagctctgcctagggaaaaactctttgtaagcttttctttcagttttaataaatctcaagttctatttttcatatctcccttctcccctcactgatcctgtgcggctctgccgccgcttcggtttctttgttttcaaaaacctgggtttgt

SEQ ID NO: 14885 - DNA, 1048 bp, Glycine max
  Gm_smallRNAprecursor_7718
attccacaatccaaatcttgaaggtgatgcagccacggcattatggctcaaacttaaaccaacccaaaaaattctctgcaccatttgaccctgcaggatataattattgggattacattgacgcctggaccaatgtgttctggcatcaaaatagtaaattcaagcattcatggctgatttacttcaaaaataatactgcatataattttccaaattggttcctccaatggtggaactacttcggaccaattccacaaatatttccagaagaagtccaacagggattcgaacaattcaacaagctctataatagcaaggaatcacgtattccggcagacttaaagtacttttccagttttgccttgtcatggatcttttcatggcaatacagatacgaaaaaactgaaaacaacaagcaatatccaccgttacagagacacgcctttgtaaaatggtggtcacaattcgatacttcaaaggctgctccagatcaagtcaagaactggttccagagcaatcctgagttccttaaacctgctgatccggagacatctttgtttctaaatcaaaagtcgcaactagcagcattcttagcaagctcaaaatctaaagagagtcttgctcagaatctcaaagaagttctccaactacttcaacaggaagtggaagaagaaccttccaagaaggaagctgaatcatccgagactaatgatgaccaagaagatgatccattctaccagaatgaagatgactgttttggtatatcattggacgacgattaattagttgtagtaatcatgaattattgtgactaatttaaataatgtaatttgtaaaagttttgtaacagttccggtaaacattaccgttactgtagaaacaataaaaattgggtctttttaaaggagtcctcgtcccctttgtgaggcaccctttcagatagtcccagaatcaggtttttagagagagaagctctgcctagggaaaaactctttgtaagcttttctttcagttttaataaatctcaagttctatttttcatatctcc

SEQ ID NO: 14886 - DNA, 1098 bp, Glycine max
  Gm_smallRNAprecursor_7719
attccacaatccaaatcttgaaggtgatgcagccacggcattatggctcaaacttaaaccaacccaaaaaattctctgcaccatttgaccctgcaggatataattattgggattacattgacgcctggaccaatgtgttctggcatcaaaatagtaaattcaagcattcatggctgatttacttcaaaaataatactgcatataattttccaaattggttcctccaatggtggaactacttcggaccaattccacaaatatttccagaagaagtccaacagggattcgaacaattcaacaagctctataatagcaaggaatcacgtattccggcagacttaaagtacttttccagttttgccttgtcatggatcttttcatggcaatacagatacgaaaaaactgaaaacaacaagcaatatccaccgttacagagacacgcctttgtaaaatggtggtcacaattcgatacttcaaaggctgctccagatcaagtcaagaactggttccagagcaatcctgagttccttaaacctgctgatccggagacatctttgtttctaaatcaaaagtcgcaactagcagcattcttagcaagctcaaaatctaaagagagtcttgctcagaatctcaaagaagttctccaactacttcaacaggaagtggaagaagaaccttccaagaaggaagctgaatcatccgagactaatgatgaccaagaagatgatccattctaccagaatgaagatgactgttttggtatatcattggacgacgattaattagttgtagtaatcatgaattattgtgactaatttaaataatgtaatttgtaaaagttttgtaacagttccggtaaacattaccgttactgtagaaacaataaaaattgggtctttttaaaggagtcctcgtcccctttgtgaggcaccctttcagatagtcccagaatcaggtttttagagagagaagctctgcctagggaaaaactctttgtaagcttttctttcagttttaataaatctcaagttctatttttcatatctcccttctcccctcactgatcctgtgcggctctgccgccgcttcggtttcttt

SEQ ID NO: 14887 - DNA, 1120 bp, Glycine max
  Gm_smallRNAprecursor_7720
attccacaatccaaatcttgaaggtgatgcagccacggcattatggctcaaacttaaaccaacccaaaaaattctctgcaccatttgaccctgcaggatataattattgggattacattgacgcctggaccaatgtgttctggcatcaaaatagtaaattcaagcattcatggctgatttacttcaaaaataatactgcatataattttccaaattggttcctccaatggtggaactacttcggaccaattccacaaatatttccagaagaagtccaacagggattcgaacaattcaacaagctctataatagcaaggaatcacgtattccggcagacttaaagtacttttccagttttgccttgtcatggatcttttcatggcaatacagatacgaaaaaactgaaaacaacaagcaatatccaccgttacagagacacgcctttgtaaaatggtggtcacaattcgatacttcaaaggctgctccagatcaagtcaagaactggttccagagcaatcctgagttccttaaacctgctgatccggagacatctttgtttctaaatcaaaagtcgcaactagcagcattcttagcaagctcaaaatctaaagagagtcttgctcagaatctcaaagaagttctccaactacttcaacaggaagtggaagaagaaccttccaagaaggaagctgaatcatccgagactaatgatgaccaagaagatgatccattctaccagaatgaagatgactgttttggtatatcattggacgacgattaattagttgtagtaatcatgaattattgtgactaatttaaataatgtaatttgtaaaagttttgtaacagttccggtaaacattaccgttactgtagaaacaataaaaattgggtctttttaaaggagtcctcgtcccctttgtgaggcaccctttcagatagtcccagaatcaggtttttagagagagaagctctgcctagggaaaaactctttgtaagcttttctttcagttttaataaatctcaagttctatttttcatatctcccttctcccctcactgatcctgtgcggctctgccgccgcttcggtttctttgttttcaaaaacctgggtttgt

SEQ ID NO: 14888 - DNA, 1070 bp, Glycine max
  Gm_smallRNAprecursor_7721
tcaaacttaaaccaacccaaaaaattctctgcaccatttgaccctgcaggatataattattgggattacattgacgcctggaccaatgtgttctggcatcaaaatagtaaattcaagcattcatggctgatttacttcaaaaataatactgcatataattttccaaattggttcctccaatggtggaactacttcggaccaattccacaaatatttccagaagaagtccaacagggattcgaacaattcaacaagctctataatagcaaggaatcacgtattccggcagacttaaagtacttttccagttttgccttgtcatggatcttttcatggcaatacagatacgaaaaaactgaaaacaacaagcaatatccaccgttacagagacacgcctttgtaaaatggtggtcacaattcgatacttcaaaggctgctccagatcaagtcaagaactggttccagagcaatcctgagttccttaaacctgctgatccggagacatctttgtttctaaatcaaaagtcgcaactagcagcattcttagcaagctcaaaatctaaagagagtcttgctcagaatctcaaagaagttctccaactacttcaacaggaagtggaagaagaaccttccaagaaggaagctgaatcatccgagactaatgatgaccaagaagatgatccattctaccagaatgaagatgactgttttggtatatcattggacgacgattaattagttgtagtaatcatgaattattgtgactaatttaaataatgtaatttgtaaaagttttgtaacagttccggtaaacattaccgttactgtagaaacaataaaaattgggtctttttaaaggagtcctcgtcccctttgtgaggcaccctttcagatagtcccagaatcaggtttttagagagagaagctctgcctagggaaaaactctttgtaagcttttctttcagttttaataaatctcaagttctatttttcatatctcccttctcccctcactgatcctgtgcggctctgccgccgcttcggtttctttgttttcaaaaacctgggtt

SEQ ID NO: 14889 - DNA, 1071 bp, Glycine max
  Gm_smallRNAprecursor_7722
tcaaacttaaaccaacccaaaaaattctctgcaccatttgaccctgcaggatataattattgggattacattgacgcctggaccaatgtgttctggcatcaaaatagtaaattcaagcattcatggctgatttacttcaaaaataatactgcatataattttccaaattggttcctccaatggtggaactacttcggaccaattccacaaatatttccagaagaagtccaacagggattcgaacaattcaacaagctctataatagcaaggaatcacgtattccggcagacttaaagtacttttccagttttgccttgtcatggatcttttcatggcaatacagatacgaaaaaactgaaaacaacaagcaatatccaccgttacagagacacgcctttgtaaaatggtggtcacaattcgatacttcaaaggctgctccagatcaagtcaagaactggttccagagcaatcctgagttccttaaacctgctgatccggagacatctttgtttctaaatcaaaagtcgcaactagcagcattcttagcaagctcaaaatctaaagagagtcttgctcagaatctcaaagaagttctccaactacttcaacaggaagtggaagaagaaccttccaagaaggaagctgaatcatccgagactaatgatgaccaagaagatgatccattctaccagaatgaagatgactgttttggtatatcattggacgacgattaattagttgtagtaatcatgaattattgtgactaatttaaataatgtaatttgtaaaagttttgtaacagttccggtaaacattaccgttactgtagaaacaataaaaattgggtctttttaaaggagtcctcgtcccctttgtgaggcaccctttcagatagtcccagaatcaggtttttagagagagaagctctgcctagggaaaaactctttgtaagcttttctttcagttttaataaatctcaagttctatttttcatatctcccttctcccctcactgatcctgtgcggctctgccgccgcttcggtttctttgttttcaaaaacctgggttt

SEQ ID NO: 14890 - DNA, 1112 bp, Glycine max
  Gm_smallRNAprecursor_7723
cctattctcgagtgtccttcgcaaccactgaatttccatggcataacgctgaaaggcaaacaagatgaaaattggttccaactgttggccccaatgatcagtcaatggaacaatctaagtttagggtcgacgtttatcctcgacaggagggcctattgagttttaactccgactacatggtctggtataggcgaaaaacgaagatgtttgtcgacccgaagaatgcaaacacagctacattggtatttatttctttttgaatatttaacttcaaattattttttaaagcataggcattaatttcctcaccttaataattgcaggctgaagttgcggagacattatagtatatggtgtcaccacaagggaggaacatgtggacagttgatgatctcgtgccttatgtggagaagataacgattttatccgaagagcaagagataatcattgagcctgtggcacatggtccatcatctgagcgtcgatttccaccacaagagtttcacatgcttcagtcaagtgttgaaactcggggttttggcagatgaagggaggttgttgaagtagaagaatttttccaacaaatagaggagcgtggctatggaatgtattacacgccaccaacattttctcagtatccttcacaaatatatcaatatcctttcgaaggtcatgacactgatatgtttgcaagcatacattcgtttggtggtgttgcggaaacacatccttatttttcatggccgactatgaccctttcacagcaacatgatgccctaatggcaacacctaatgccccattagcttcgcaatagaatgtacccagagaaatacctaatatgggtgacttattaggtgttgatttgcgtcacgagttttctgctgaggctgagcaattagaagcggggagacatcgcggcagaagaaatcctgatcgtcaagcgcgaagatgggatcgaccatgtggcacatcctcacgtcatcacggatatcataatgaatgattttcatgtctctgtttaaatatgttgttgtatgtttgtcatttgaatttgacacttaatctatcgtatctcatttattaatccttacaatggatacaatttatgtcg

SEQ ID NO: 14891 - DNA, 1088 bp, Glycine max
  Gm_smallRNAprecursor_7724
aaaaaaatcaataaataaataaaaagagaataataattttataaaattaactttattatcattaatttattttttatttttgtaacccatgtcattaatattataagggatataagtagaaaaattaattaatgttatatttaaaaattaaaataacaattattttgagacaatttttttcttagaatgattattacgggaaggaagaaatatttttttatgagtagtacaaatattgtaaaagaaaaatcgagtattaagttccttatttttaataccgatatagaaagaaaaataaagggaatctcattacatcttccaaaatcaatattatgatttatcaattagcctgatgtacacggtgaggttattggtgagatcttcccggaaccacactaaatgctttgaacttttgttgtttagtagacatggcaagaaaactcgtactcgttaatatccgtctgaatttgtctcgattttgatagataatacccgatttgatcgggtatgggttcgggttcgggttcaggttttttcagataaccaaaagttggatacgagtacggatatgggattactagacccgtcccgatcccaaacccgaacccgccccgccacttaaaatctttagaatttttgtataatttaattaaaaggcataaaatttttattactagttaattttattttagaacttttatataatttaatattattttcttaactatttttgtagacacattcgttataataaatttattgatatataagtagttaaaaataaatgtttaacaatcaatttattttttctaaaatcaaaattttaatatttttttttttaaaaaaaatatttttctaatttgaatcgtgtatgtaacaggatcggagatacccgatagccgacgggtacgaaaatgagacaataaacttaaatccgtcagatatcagatacgagtatgaggatatgttgggaggtcgggataagggatcggggagacaatactcatacccgtacccgccacaccccatttccatgcctattgtttagccttgttttcttttttgataaatattgttgaagtctttga

SEQ ID NO: 14892 - DNA, 1190 bp, Glycine max
  Gm_smallRNAprecursor_7725
ttttcagttgtagagattgaaaaaaatattgttgacctacatctatgaatggttgtcggtagtagatttcatccagtaattgatcgttggttagttgaagggtgttgtgcattctacgcttgagtgtatcaaaagaacaattgttaggaactcacattggtgttgggtgagactttgaaaataaacaccagtttggttgtgagtgattgatcaatttggaaaaatgaaagctaatatggagttagcaatggtctaactggttgtttctcccaaaaatgacatagtaataagattgaatttggtttgtgaaattatgttatgtgagattgtgtgtttgtattgtgtgtgttgtgttatttatagttgtatgagtattctgccaccttgatgtgtattggaatccaatgtttcttttttcctagttagtgatgtaacaaacgcccattataatttcagagtgaacaaagagattatgagttgtccatctcatgtcagttttgcacacgtctctaaaaattaaatgtctcacctgcaaaactgacatgaaatggacaactcataatgcagagtgttgtcaatttggattgtgatttttcccatgtaattaaagcagcagacgttcatgatgattttcagagtgaacaaagagattatgagctgtccatttcatgtcagttttgcaggtgagacatttaatttttagagacgtgtgcaaattgcagagtgttgtcaatttggactgtgatttttcccttgtaattaaagcaacaaacgcccatgattattttcagagtgaacaaagagattttgagttgtccatttcatgtcagttttgtcgatgagacatttaatttttagaaataatgtagtgtaaatggcaaagtattatgaattttgatagttatgttaccatgtcaactactgcagtaaaagtgggtaaactgaaaattgctaatttaaatttaaaggaaaaattatttcaatacataaagtgataactgaagacggacataagacattacatggaaatctcaaagaagaaataacttagacatgaataatccgtagattaccaatcttgtttgaatataggttcgtgggatggaaataggttacttccttcgagcccggaagaggagtcagtatcactatcatggtttttgacccaacaagtctcgtattcatttgat

SEQ ID NO: 14893 - DNA, 1151 bp, Glycine max
  Gm_smallRNAprecursor_7726
ttaatagactaaattcagcaaaaatattttcaaaatttgatatgaaatctggattctggcaaatccaaatccaagaatcagataggtacaaatcaacgtttactgtacctttcgggcaatatgaatggaacgtaatgccatttggactgaagaatgccccttctgaatttcaaaaaattatgaatgatatttttaatccctattcaaaatttgtcattgtctacattgatgatgttttaatcttttcccagaacattgatcaacatttcaaacatctccagactttcatccatatcattaaacagaatggtttggcagtctccaaatcaaaaatcaatcttttccaaacacgaattcgattccttggtcacaatatatatcaaggtacaatcattccaatagaaagatcaatagagtttgctagcaaattccccaagcaaatcttagacaaaacccagttacaacgatttcttggttgtctaaattatgtaggagaatttgtcccctatttaaacaatattgtcaagccatcgcatgataggctgaaaaagaatccgcctccttggtctgacctccatactcaaacagttaaagaaatcaaggtcaaagtccaatccataaagtgtctgtatcatcctattccacaggcattcaaaattgtcgaaactgatgcatcatacataggttatggtggcatcctcaaacaaagaatacatggtcaagaacatgtcattgcatatacttcaaaacattagaatcctgcacaattaaaatattcaactgttaaaaaagaggttttagcaattgttttgtgcatttccaaatttcagtcagatttgttaaatcaaaaatttttaatcagagttgactgtaaatcaagcaaagacattttacaaaaagatgttaaaaaccttgccttaaaacaaatttttgcaagatggcaagcaattttaagtgtctttgatttcgacatagaatatatcaagggcacctcaaattctctacctgactacctcacccgtgaatttttacagaacattcctgatgcctcctaaggtgtccagctcctccgggagaggaggaagaaccagtagtaaagggaaggatgttctattggctctaccagagtcagtaaccaagaaaacaaccgc

SEQ ID NO: 14894 - DNA, 1032 bp, Glycine max
  Gm_smallRNAprecursor_7727
gccccttctgaatttcaaaaaattatgaatgatatttttaatccctattcaaaatttgtcattgtctacattgatgatgttttaatcttttcccagaacattgatcaacatttcaaacatctccagactttcatccatatcattaaacagaatggtttggcagtctccaaatcaaaaatcaatcttttccaaacacgaattcgattccttggtcacaatatatatcaaggtacaatcattccaatagaaagatcaatagagtttgctagcaaattccccaagcaaatcttagacaaaacccagttacaacgatttcttggttgtctaaattatgtaggagaatttgtcccctatttaaacaatattgtcaagccatcgcatgataggctgaaaaagaatccgcctccttggtctgacctccatactcaaacagttaaagaaatcaaggtcaaagtccaatccataaagtgtctgtatcatcctattccacaggcattcaaaattgtcgaaactgatgcatcatacataggttatggtggcatcctcaaacaaagaatacatggtcaagaacatgtcattgcatatacttcaaaacattagaatcctgcacaattaaaatattcaactgttaaaaaagaggttttagcaattgttttgtgcatttccaaatttcagtcagatttgttaaatcaaaaatttttaatcagagttgactgtaaatcaagcaaagacattttacaaaaagatgttaaaaaccttgccttaaaacaaatttttgcaagatggcaagcaattttaagtgtctttgatttcgacatagaatatatcaagggcacctcaaattctctacctgactacctcacccgtgaatttttacagaacattcctgatgcctcctaaggtgtccagctcctccgggagaggaggaagaaccagtagtaaagggaaggatgttctattggctctaccagagtcagtaaccaagaaaacaaccgcatcatcttctgggtcacctagccagactgggtcatc

SEQ ID NO: 14895 - DNA, 1182 bp, Glycine max
  Gm_smallRNAprecursor_7728
atcgactccacaaacatcccgcagttcttcctccatgcctcctgaagacctacaacagctgacccaacaaatcagggaccaactggaggagtcaatcacagaaaaagtgactcgatagctgatagcatccttcagccagatgcagtcccagtttcagtctcagatgcaatcacagggacttgcactacctccggagccagaggttggtccctcaggtgctcgtgtcagtacaaaggagagttgtgttgctccctcagggaacgacccagggacgagtgactaagacaaatgcgggctatacattgaagaaaatccttcccacctggttgtcctaggaagactttatgagggatccacaacagctcacaacatccctttgttgcatggtcaagtcaaggttggtgttgaagaggttaaagatgcagaggctctcgttcatgtacccactaacgaggttaccttagtggggcagacacttaacactttccttgcttggccgacacatcttgtgaagcgtttatcagaacatgtattttactctgattatatgtttctttgttttaattaatttgttcactgtaatcaaagcgcttatcagaacattaatttgtggcagcagtgtctccagcaaaaccttcagaaagctcggatgatgaggtcgatgatcccctgtacctgatgacattgaccatcccacaactgttttttaagcctctccaggttatgtggggtgctaccatattcggggtgtttaatcaaaacttctcattctacataaagcacgaagatctctctgaaattgtacacggtggtcaatgtctcagtctatctgttatatagttgtggattctgtaatcattttagattactgttaattaccaaagtaattgttttaaattcatacataattaactttgtcttaacaacacaggcatctgactgagacaagtctgcgagcagggaatttcgatgtgtatggattcctcgagccacagtccattcagagatctgggcaatcgcaatttgaatccgaaagttacatcaagagttagatgcaaagttcaaaataacatgtttaccttggagcctacctgaatgggtaagtcaaacacaaaaactgaatttaaataatctatactactacaataacccatattcgtctctactgcagcggacactaat

SEQ ID NO: 14896 - DNA, 1046 bp, Glycine max
  Gm_smallRNAprecursor_7729
ttttatgtgaaagtgaaaacaaaattaactataaatcttataagaatgattaaaattgaaaaaaaaatacaagtaatgtttaaaaactcattacttttttaagtagtcaatatatatgacattaaatcttgattttatatatatatatatatatatatatatatatatatatatatgattaattacttaaaaaactaatcacttaaatttctaatattgatcttatgcaaataatattatgattaaaatttactcgtctcacgcttataaatatatatagggcatcttctagcatgtattggttcatatcattcaaaggcacagtatagaaacactcgtttcatctggtacaccagctaccgtaaaggaactccaatagctgtgcaatcaaatataataaacacaagaatataaaactcttgaaataaagaaggccaggatatcgattttattgaactggtgttcaaatgctcttcatattggtcataacataaggacgtggtaatctacatcccaaggattagacccgataaacatattgtttctaaacctcaggatgcagattacctgatcctaaaccaatactcactcttccaagaaggtttgaaaccaatgacagtacgtagaagaatgttgaggtgaattgagtttgtcctttgatcatatcttcagtctcagaaatttatatatagttgttcttaaagtggagaattgtattcttccttgatttaatattgatatttgctaaaaattattaattgcagcagcctctaactaagaatcatttcatgtgttcctttttttttttatcaaatattgatcttttccttgtaggcttgtagaataaataaaattcctctagccattttagaaagcatcctattgtccctaataatggatgagatcgtaaatctgtaaagagttaaaagtcactaacacagatgaagatgaaaaagtaatattcaggcatgcttttgagctgttttaatcaccacattttgtttttttccagctcatgttgtcttttctacaagatatcggtagtc

SEQ ID NO: 14897 - DNA, 1111 bp, Glycine max
  Gm_smallRNAprecursor_7730
gcctaagaaatgggcacttgtaggcgacaaggacgatgtggatgacattgtctgtgaaaaatatggcattagcaaggagaaatgaactcagttttgtcagacccgcagagacccctcatgaaaggtatatactttgtcattttagttgttttccacaacaaatcacttcttataatttattgtaataatcattttcattaatgtgcagaaaaaggtacaggccatccagaagcaaaatactgcccctcacgtattgtctcgtgggggttatgaatatttaaaacaaaagttcatggctgagaagacaaagaaaagactggaagaagctgcccagtctggaaacactgagggcgtcattgaccctccatctcccatcagacgccacgtgaagtggaagatggcccgcacgaaaaaaactggacaaatgacgtttgaggcaccaaaggaaatagctgatagaattgtaagtcatttttaattaataattgtaattatctttgtgtattctgtgaattccttggacaaatatgtgttcggtacaagattctttggaagagcaggcgtcacagggatctttcgtccgccatggacattaggatgtcctcactgctaccattggacgaccagagcatcctggccgtgttcgtgttgctggagtcggtgtcaccataaagcaatactttggatcgccttcacgaacgtcccgtagttcttccgacatttctcttgaagaccttcaacagctgacccaacaaatcagagaccaactagaggagtcaatcacagaaaaagtgacttgaaagctgatggcatctttcagccagatgcagtcctagtttctgtctcagatgcaatcacagggacttgcactacctccagagccagagattggtcccctaggtcctcgtgtcagcacaaaggagagttgtgttgctctctcagggaacgattcagggacgagtgactcagaaaaatgcgggctatacattgaagaaaatctttcccgcctggttgccctaggaagactttatgagggatccacaacagttcacaacatccctttgttgcatggccaagtcaaggtttgtgttgaggaggttaaagatgcaga

SEQ ID NO: 14898 - DNA, 1127 bp, Glycine max
  Gm_smallRNAprecursor_7731
cggtttttcaaccgatgttgaaagtaccgacgttgatagtattatcgttaacatcggtttttcaaaaaccgatgttaacgtaaaattaccaacatcggttatataaataaccgatgttgctaatatgaattacacccagaaaatttatattaatgttgaaagttaacatcagtttttataaaaaaccgatgttaacgaatgtgttactgttgacagttaacattggtttttttacatagttgtctaacaccctatgtttgatttctaacttttagataatactgtgcccactgtatacgaagtgccttgaatctctctgcttccaatggtctaacttcattaaaatactacatgatcaaataaaaaaataaattaataatgtaataacaattataaaaaaaccaaatttgtttgtaataaacaattaccgtctcccaattattcctgaaagatcctaagattatcgtggacatccagttcatcacgtagtagccacattcagtgattcctttttgtctattacactaaatacataatgaaatttggatattaattaaacgttaactacaattagtgtacacacacataaaatatatataagtagaacttttatttaaatcatgtatcttaataacaatccacttagcagcagccttggatttcggttgtggagtatcatcaagtcctttcaaagcactagtgttgaatataaggaacattaaaatattgatgttgagttatgccaatgaaaatgtattgaaaacaatattgacctgttaattattcccttaaggtaattgtctggcctgttatgcaaagaacaaaattagacaactaggttttccttaggtagaatgacgaccatttgccagtgttattgtagtagtatagattatctaaattcaattattgtgtttgacttacctattcagataggctccaaggtaaacatctcgttttgaactttgtatccaactcttgatgtaactttcggattcaaattgtgaatgcccagatctctgaatggactgtggctcgaggcatccatacacatcagaattccctgctcgcacacttgtctcagtcagatggctgtgttgttatgtcaaagttaattatgtatgaat

SEQ ID NO: 14899 - DNA, 1036 bp, Glycine max
  Gm_smallRNAprecursor_7732
ttgtctattacactaaatacataatgaaatttggatattaattaaacgttaactacaattagtgtacacacacataaaatatatataagtagaacttttatttaaatcatgtatcttaataacaatccacttagcagcagccttggatttcggttgtggagtatcatcaagtcctttcaaagcactagtgttgaatataaggaacattaaaatattgatgttgagttatgccaatgaaaatgtattgaaaacaatattgacctgttaattattcccttaaggtaattgtctggcctgttatgcaaagaacaaaattagacaactaggttttccttaggtagaatgacgaccatttgccagtgttattgtagtagtatagattatctaaattcaattattgtgtttgacttacctattcagataggctccaaggtaaacatctcgttttgaactttgtatccaactcttgatgtaactttcggattcaaattgtgaatgcccagatctctgaatggactgtggctcgaggcatccatacacatcagaattccctgctcgcacacttgtctcagtcagatggctgtgttgttatgtcaaagttaattatgtatgaatttaaaacaattactttgttaattaatattaatctaaaatgacttacagaatccacaactgtataacacatatgctgagacattgaccaccatgtgtaatttcagagagatcttcgtgctttatatacaacgggaagttttgattaaacaccccgaatatggtagaatcccacataacctggagcggcttcaaaaacagttatgagatggtcaatgtcatcaggtacaggggatcatcgacctcttcatccaggctttctggaggttttgctggagacacagctgcctattgataaaacatagttaattaacaagttttgattacagtgaacaaattaattgaaaaaaataaacatataatcagagtaaaatacctgttctgataaacgcttcacaagatgtgttggccaagcaaggaaagt

SEQ ID NO: 14900 - DNA, 1183 bp, Glycine max
  Gm_smallRNAprecursor_7733
ggatattaattaaacgttaactacaattagtgtacacacacataaaatatatataagtagaacttttatttaaatcatgtatcttaataacaatccacttagcagcagccttggatttcggttgtggagtatcatcaagtcctttcaaagcactagtgttgaatataaggaacattaaaatattgatgttgagttatgccaatgaaaatgtattgaaaacaatattgacctgttaattattcccttaaggtaattgtctggcctgttatgcaaagaacaaaattagacaactaggttttccttaggtagaatgacgaccatttgccagtgttattgtagtagtatagattatctaaattcaattattgtgtttgacttacctattcagataggctccaaggtaaacatctcgttttgaactttgtatccaactcttgatgtaactttcggattcaaattgtgaatgcccagatctctgaatggactgtggctcgaggcatccatacacatcagaattccctgctcgcacacttgtctcagtcagatggctgtgttgttatgtcaaagttaattatgtatgaatttaaaacaattactttgttaattaatattaatctaaaatgacttacagaatccacaactgtataacacatatgctgagacattgaccaccatgtgtaatttcagagagatcttcgtgctttatatacaacgggaagttttgattaaacaccccgaatatggtagaatcccacataacctggagcggcttcaaaaacagttatgagatggtcaatgtcatcaggtacaggggatcatcgacctcttcatccaggctttctggaggttttgctggagacacagctgcctattgataaaacatagttaattaacaagttttgattacagtgaacaaattaattgaaaaaaataaacatataatcagagtaaaatacctgttctgataaacgcttcacaagatgtgttggccaagcaaggaaagtgttaagtgcctgccccactaaggtaacctcgtcagtgggtacaggaacgagagcctctgtatctttaacctcctcaacaccaaccttgacttggccatgcaacaaagggatattgtgaactgttgtggatccctcgtaaagtcttcctagggcaaccaagcgggaaggattttcttcaa

SEQ ID NO: 14901 - DNA, 1156 bp, Glycine max
  Gm_smallRNAprecursor_7734
atattaattaaacgttaactacaattagtgtacacacacataaaatatatataagtagaacttttatttaaatcatgtatcttaataacaatccacttagcagcagccttggatttcggttgtggagtatcatcaagtcctttcaaagcactagtgttgaatataaggaacattaaaatattgatgttgagttatgccaatgaaaatgtattgaaaacaatattgacctgttaattattcccttaaggtaattgtctggcctgttatgcaaagaacaaaattagacaactaggttttccttaggtagaatgacgaccatttgccagtgttattgtagtagtatagattatctaaattcaattattgtgtttgacttacctattcagataggctccaaggtaaacatctcgttttgaactttgtatccaactcttgatgtaactttcggattcaaattgtgaatgcccagatctctgaatggactgtggctcgaggcatccatacacatcagaattccctgctcgcacacttgtctcagtcagatggctgtgttgttatgtcaaagttaattatgtatgaatttaaaacaattactttgttaattaatattaatctaaaatgacttacagaatccacaactgtataacacatatgctgagacattgaccaccatgtgtaatttcagagagatcttcgtgctttatatacaacgggaagttttgattaaacaccccgaatatggtagaatcccacataacctggagcggcttcaaaaacagttatgagatggtcaatgtcatcaggtacaggggatcatcgacctcttcatccaggctttctggaggttttgctggagacacagctgcctattgataaaacatagttaattaacaagttttgattacagtgaacaaattaattgaaaaaaataaacatataatcagagtaaaatacctgttctgataaacgcttcacaagatgtgttggccaagcaaggaaagtgttaagtgcctgccccactaaggtaacctcgtcagtgggtacaggaacgagagcctctgtatctttaacctcctcaacaccaaccttgacttggccatgcaacaaagggatattgtgaactgttgtggatccctcgtaaagtcttcctagggca

SEQ ID NO: 14902 - DNA, 1041 bp, Glycine max
  Gm_smallRNAprecursor_7735
tcttcctagggcaaccaggcgggaaagattttcttcaatgtatagcccgcagttttctgagtcactcgtccctgaatcgttccctgagagagcaacacaactctcctttgtgctgacacgaggacctaggggaccaatctctggctctggaggtagtgcaagtccctgtgattgcatctgagacagaaactaggactgcatctggctgaaagatgccatcagctttcaagtcactttttctgtgattgactcctcaagttggtctctgatttgttgggtcagctgttgaaggtcttcaagagaaatgtcggaagaactgcgggacgttcgtgaaggcgatccaaagtattgctttatggtgacaccggctccagcaacacgaacacggccaggatgctctggtcgtccaatggtagcagtgaggacatcctaatgtccatggcggacgaaagatccctgtgacgcctgctcttccaaagaatcttgtaccgaacacatatttgtccaaggaattcacagaatacacaaagataattacaattattaattaaaaatgacttacaattctatcagctatttcctttggtgcctcaaacgtcatttgtccagtttttttcgtgcgggccatcttccacttcacgtggcttctgatgggagatggagggtcaatgacgccctcagtgtttccagactgggcagcttcttccagtcttttctttgtcttctcagccatgaacttttgttttaaatattcataacccccacgagacaatacgtgaggggcagtattttgcttctggatggcctgtacctttttctgcacattaatgaaaatgattattacaataaattataagaagtgatttgttgtggaaaacaactaaaatgacaaagtatatacctttcatgaggggtctctgcgggtctgacaaaactgagttcatttctccttgctaatgccatatttttcacagacaatgtcgtccacatcgtccttgtcgcctacaagtgcccatttcttaggcaagtcagatttaaact

SEQ ID NO: 14903 - DNA, 1086 bp, Glycine max
  Gm_smallRNAprecursor_7736
aagtcttcaaaagaacaaggtgagaatcaacctgttgacgtccaaccaccttcgactgatgttgacggcactgcagcagaaactactccctctattgctgagatgggcaaccctgtcgagcaaccggacttaccacaagaacaacctcccgtcgaggtatcattcttaatgtaattttaatcatagcttatacgaaactatttgttaaccttttccatgacaattcgaatcaggtacaaaatgtttctgtagaagaaataccctcatgtgctcgaacctctcctgctcctgagacggatgcagtgaatgttgaggaacagggtgaaggtcaaggtattcgatccagcagtcctcatggatcgagtcagaaaagttcctctgaagaacatttttccgatgaagaggccatacaagaggctgaagctggaggttcagacattttcccggcgtcttcgacatctaagctttccgctagcatagggatgacagaggatacattcattcaaatgcaagacgaagaccctgctgcagcccttcgactcctactgaacaccagtcaagccaacacttcgagtgaaaaaattcctggtgcttcgtcctcatctgatgctgacataacctcttcagtacgccaagattgcctgcttttgaagttatcaatggaatacgcatgggcagacgtacttaaatccattgaagagaacccctctgctgcttttggacacctgaatttcttgaagaaattgcacaacccccttacttctgatgagattctaggcaaagttattcaaatcgaggccatcatcgaccagtttacaagtgccgtgcagaaaaaacgcgaaaatgacgccagactggatgcccagaaacaggcacatatccttctgctcgagaaagcccgagcagctcaacaagaagtcgaacgtctcaccaaagaggcaaaagaaaggtcttctgacgtcaaagcctgtgatgataacatttcctcctgggaggcaactattacgaatttactgtctcaggtcgatgatctaaggcagaaaattgtaacagagcaggccaaacgcaaggaactccaggagaagg

SEQ ID NO: 14904 - DNA, 1110 bp, Glycine max; identical to SEQ ID NO: 8016
  Gm_smallRNAprecursor_7737

SEQ ID NO: 14905 - DNA, 1083 bp, Glycine max; identical to SEQ ID NO: 8017
  Gm_smallRNAprecursor_7738

SEQ ID NO: 14906 - DNA, 1176 bp, Glycine max
  Gm_smallRNAprecursor_7739
agccacaatttgacccttaacagatttcaaaggcttgtatgttaaagaatattctgttaaggctaaagcccattttccaattctactgtgtaaaataggttttgacaacatgtgtttaataatatcataatgagaatacacataaacatcaacaggctttatatattgcttaagttttgcacaagagaaatacagacaaagacaaagtttttctatggccgtatatctagtttctgcatcatttagtacacgactaagataataaattgcatgttctatgccatcatcatcttcctgagccaacatgctaccaatggtcttgtcagacgcagcaatatacaacttcatagtcttgtttcgactaggaggcattaacgcaggaggcttgatcagatattctttaatttcatcgaaagccttttgatgctcttcattccatttgaatggttcatctttcttgagtcgaagtaatggcgaaaaaatttgagctttgccacttagattcgaaatgaatcgcctcaagaagttgatttttcctagcaaagactgaagctgttttttggtcgaaggaggcttcgtctcaaaaatagcctttgtcttattttgatttatctcaatgccctttttatgtaccacaaatcccaggaaatctcctgcacgcacacaaaaagcacactttaatggattcatttttaatccatgtttcctcattcgttcgaaagattgcctaagataatccaaatggctatcttctgaggaggatttgatgattatatcatcaatataaatttgcataaatgtgtcaataaaatcatgaaacatggaattcatggccctttgataagtggccccagcatttttcaacccaaagggcataaccacccattcataagtgcctaaagcaccagggcatcgaaatgctgttttcgacacatcattttcagcaataaatatttggttataaccagaataaccatctaacatgctcaaaaattcgaaaccagctgccgaatctaccaacatttccgctactggcatagcatattcatctttaggtgtagcattatttaaatccctaaaatctatgcatactctaagagttccattctttttaatgacagggactatatttgctaaccattcgacatacctggcagccctgatgaatttacacct

SEQ ID NO: 14907 - DNA, 1110 bp, Glycine max; identical to SEQ ID NO: 8016
  Gm_smallRNAprecursor_7740

SEQ ID NO: 14908 - DNA, 1083 bp, Glycine max; identical to SEQ ID NO: 8017
  Gm_smallRNAprecursor_7741

SEQ ID NO: 14909 - DNA, 1176 bp, Glycine max; identical to SEQ ID NO: 14906
  Gm_smallRNAprecursor_7742

SEQ ID NO: 14910 - DNA, 1039 bp, Glycine max
  Gm_smallRNAprecursor_7743
atttctggtgcgaatcttcttggtagttgttttactggtctttttccctccttaataggtaatttcatttcgaccatttctctgcttaacccaggcatttcgtggtagtcccaagcaaaacagtctttaaactctctaagaagaggcaccagcttttcttttaaacttgaggtgatattggcactgatataagttggccttttaatcgagccatctccaatatcaacctcttccaaaggatcttgagcctgcatctttggcgcctcacttatgggatttttctcaaaacccagcggctcatcatcataaatacaatccagtcttcgatcctttgtttctttgttttcatgatcttcgatcttggcttcaactgccatattttgttgagattcagcctcaaaggccgtatttagtctattttcggccatataagccgtaattctggcccatgcagtggcctcagtcatattaatcttcgtatgtattccacccagttggtggaatgactccatcttcagagggaacaacatcaatttcctccctctcccatataaacccataggtaggatggagtttgacagagtggacaacattgtcactcgattcgacaacagcctccttgtcaccacaaggtgctatgttagccaactttttgtcaaaggtttgtgcagtaacattatcgacctctgacttatagaagctttgatccgcctctatattttccacaatcccatcctccctccagataatgagcttctggtgaagggtagatggcacagccccaactccatgaatccactcccttcctaatagcaagttaaaattagccttagactgtatcaccaggaaaagagttggtcgaactacactgcctacagcaacatctacttgaatggctcccaaagaatagccagttttaccctcataattcgaaagcacaatgttgtgggcagatagatctgtgtcatgtttcccgatcttgtagagcatagatcgaggcattaagttgacagccgctcctccatcaatgagcactttg

SEQ ID NO: 14911 - DNA, 1184 bp, Glycine max
  Gm_smallRNAprecursor_7744
tggtttgttcatgtgaaggtgctcaattatggtgtgggggtgttggtatttgggatttgggtttttggattcacacttggtgcgaggattaatcaattgacatggtgacacatgcaagggccatgctaccttaaggtgctgtcttagtttacacaattggtttcatgacaagtaagacagagaagttcagaaatgaagccaagtaagatagagaagtgacacagattttttgatctggcaggctgtgaggtgaataaagaatcttatgctactacaccactaagcaagcaagtcagaattttcactttatgaaactatgcaaattgagactattaatagggcaatatatattatacttttacaaatcaaattaaaaagaaggtaaaattgtattttgaattctctagtttatttttagttttggatttggttcccgaataatttaatttacaaattgagttttcttattttgtaaaatcgtgcaatgttgatcctaggtcacaattggacgttgaccgttagcaagtgatgttgactgtcatatgtcacgttcttattggataatgtttgtcatgtgtcatgttctgattggtcaatgaaaacaacaatgcatctcatttttcatggagttgacatctaattagaatatgacacgtgacaatcatcatccaataaaaacgtgacacgtgacagtcaacatcacttgctaacggtcaacgtctaattatagtgtagggaactaacattgcacgatattacaaaataagaggatcgaattagtgaattaaattactgggagaccaaatctaaaactgaagataaattaggagaccaaaaatataattttgtctaaaaagaattagtactttgcatagtgaaaggggtaatatcctaaaatgtaattatgcatcattatgattccaaccgttgtggccatgcatgtgagttctgcattttgttgatgcacatcagtttctttagacatacgttgatgcacatcaataatactagttatattgtctgatatataacggtttattatattaataatgcatgacttctattcaaacctttgtagtcagataacgttacattactagatattttattttcttggcggtgacacatgaaaataattaatgggcgcgtttgttgttactacagttttataaagctaaaaacct

SEQ ID NO: 14912 - DNA, 1053 bp, Glycine max
  Gm_smallRNAprecursor_7745
atacatgtatatggctataattaaaccaatttataattaatgttatcaaactcaagagtttatgcatattcgtgaaagttctatacattcgactcattaactcaactcgtagatttgtaagagtctacttcatataaaaataataataaaatatctataaataacatattaaataaacatttcaacaatataataaaacagaacagtaaatcataatattcataatatttaaataattaagtctagtaataatacatcactactagataataacttacagacgttatagtagtggtagatcattctcatcgagagtttgatattattagagataagagttttatattattaaaggtgagaattttgtatttgaaaataacacactaaatgaatgtatcttgaatgctaaacagacaaaaaataataaaaaaatgacttacattttggtctaatttttttaacttgttaactcgttgacttgatggtaaactcgagagtctaccgagtttacttagagtttataaaatttgtccagagtctactaaaaaaaagagtttactcaagagtcaactcgcagtggacaagtgaactcgtaaactcgtaagaattagcaagttaactcgagtgtttaataaccatgtttataattagttaatttgtatttccaacatataacttatatgactacgatatataggatcatatcttttatgttacataatggattgtgtacaagttttgtatttttcttctattaattttaataagctctcctacttatttatatagtatatatttatcaagaaagaaatggacacagaacttatctatgacattgtcatatatataaactttgaacatgagaaagtcattcttaaggaaataggggaggagtcattgtaatgtaatgcagttaatgctaaaattatgtgattgcgcggagataaggagaacttattaagtagttttagactattacagcccccattaatcttatcaagtcttactaactcattatagtaaattgtaaaatttgaatatgtattatgtaat

SEQ ID NO: 14913 - DNA, 1055 bp, Glycine max
  Gm_smallRNAprecursor_7746
tcttaataaactttttattccaattcttgactcccaaactatgtcacacttcacacaatatatcattaaaaattatgcgatactcacaaaaagtaagttggttactatatccaacaccaactgctcttgtatgggaaacatgagttgcttttagcattgttcccaaagttacaatttcgatggcaactaatggcctcacatgcaacaaatttcttgaactatatttaacatcactaaacaagcttgaatattaaatcaatagacaaatatgttcattggagattttaaaaacgtgtaggttggtgtaggagtaactaacattgtagtactcaggtttttatcccccctctatattcttccctcataatgagaagaaaactttggacaataccacattttaatcccaaggtgtctcatttgggtgttgctaggtgcacccagcattattgctagtgcacccagcacttaaggtaaaatgatgaaaatatccttgatccgtaagccatttaagttgatccgtaaaagtcttacggatcaacttgatctgtagaaaccttacggatcaacttgattcgtaagccttttacggaacaatacggatcaacatgatccgtaagctttttatggatcaacttgatccgtaagacttttacggatcatgttgattcgtattgtttcgtaaaaggcttacggatcaagttgatccgtatcaatcttacggatcaacttgatctgtacgatttacagatcaccctcacacacacccatcacaaatgtgaaaaaagcgcagggacaattttgatattttaattaaatgctgagtgcacctagcaacactctttgggttaaacttgaagctaagcccattaaacacaagtaatcagtgctgtacggctaaacgcttgcattgaaattcaaggaataggtgtttataatgtcaagggctctttgtttttcagcaatatctctactgtagttgatagtgatgttgcgtctttgatgttatacattaaaattctctgactcttctgaaaatttgttgctgggaaaattga

SEQ ID NO: 14914 - DNA, 1035 bp, Glycine max
  Gm_smallRNAprecursor_7747
atcaaagttagaaattaaattgatatcaattagattaaattgaataattgaacttttacaagagttagcaattatatgatatctcatggacaaatgctattgtgggccacctttatagtggtacaccatatattttttaccattagaatcattggaatatgtctccctaactttttttctcagccccttatcgtaagaaccattgcaaatcgccatcaaaaacaattttcggtgatggcaccacttcctccttcaggaatgtggttcaggcccttcccaacccgtgacatccaaacactgccttatcgagaggaaccacattgacaaaagcaccttcacaacactattcaagtcccaacaaagatatttaaacttctttttttaccacattgagctccccaaaaccctaaccttatcgtacaagagaccattttattaactagcatcagcaaggtcagcttcattgcgcacaagctatgaaatacggacatttcagtcctttgtcgtgtccggtgttcgacacgagtccgtgtcagtgtccgacaccgacacgacacccgtactacgttctatattttgaacattacaggtgtccacgtgtccgtgcctgtgtcgtgtccggtgtcgttgcttcatagcgcacaagatgtcacacgcgctcatcttccttggcatttgctttgcgttcttgttgtcaatgaacacgtttcacagcaacattgggatcttcatcatgttcaacaaatttgacaccaccaagaaggagctcctcaccctcggaatcggcttctctattatcctttttcatgttatttatgtgctgtcttattaaaataataatatataacaattgtgttaatatttattggtgatatttaattttaaaaatcataaaaactatataattttaaaagacagcacataaaacgacaacataaaaatcaaatttctcaccctggtgttgtgcacaaggacgaagggcaattctagcctcgggactggagtttgttttaaggtgcaacagcctaggaccta

SEQ ID NO: 14915 - DNA, 1035 bp, Glycine max; identical to SEQ ID NO: 14914
  Gm_smallRNAprecursor_7748

SEQ ID NO: 14916 - DNA, 1036 bp, Glycine max
  Gm_smallRNAprecursor_7749
atcaaagttagaaattaaattgatatcaattagattaaattgaataattgaacttttacaagagttagcaattatatgatatctcatggacaaatgctattgtgggccacctttatagtggtacaccatatattttttaccattagaatcattggaatatgtctccctaactttttttctcagccccttatcgtaagaaccattgcaaatcgccatcaaaaacaattttcggtgatggcaccacttcctccttcaggaatgtggttcaggcccttcccaacccgtgacatccaaacactgccttatcgagaggaaccacattgacaaaagcaccttcacaacactattcaagtcccaacaaagatatttaaacttctttttttaccacattgagctccccaaaaccctaaccttatcgtacaagagaccattttattaactagcatcagcaaggtcagcttcattgcgcacaagctatgaaatacggacatttcagtcctttgtcgtgtccggtgttcgacacgagtccgtgtcagtgtccgacaccgacacgacacccgtactacgttctatattttgaacattacaggtgtccacgtgtccgtgcctgtgtcgtgtccggtgtcgttgcttcatagcgcacaagatgtcacacgcgctcatcttccttggcatttgctttgcgttcttgttgtcaatgaacacgtttcacagcaacattgggatcttcatcatgttcaacaaatttgacaccaccaagaaggagctcctcaccctcggaatcggcttctctattatcctttttcatgttatttatgtgctgtcttattaaaataataatatataacaattgtgttaatatttattggtgatatttaattttaaaaatcataaaaactatataattttaaaagacagcacataaaacgacaacataaaaatcaaatttctcaccctggtgttgtgcacaaggacgaagggcaattctagcctcgggactggagtttgttttaaggtgcaacagcctaggacctat

SEQ ID NO: 14917 - DNA, 1037 bp, Glycine max
  Gm_smallRNAprecursor_7750
atcaaagttagaaattaaattgatatcaattagattaaattgaataattgaacttttacaagagttagcaattatatgatatctcatggacaaatgctattgtgggccacctttatagtggtacaccatatattttttaccattagaatcattggaatatgtctccctaactttttttctcagccccttatcgtaagaaccattgcaaatcgccatcaaaaacaattttcggtgatggcaccacttcctccttcaggaatgtggttcaggcccttcccaacccgtgacatccaaacactgccttatcgagaggaaccacattgacaaaagcaccttcacaacactattcaagtcccaacaaagatatttaaacttctttttttaccacattgagctccccaaaaccctaaccttatcgtacaagagaccattttattaactagcatcagcaaggtcagcttcattgcgcacaagctatgaaatacggacatttcagtcctttgtcgtgtccggtgttcgacacgagtccgtgtcagtgtccgacaccgacacgacacccgtactacgttctatattttgaacattacaggtgtccacgtgtccgtgcctgtgtcgtgtccggtgtcgttgcttcatagcgcacaagatgtcacacgcgctcatcttccttggcatttgctttgcgttcttgttgtcaatgaacacgtttcacagcaacattgggatcttcatcatgttcaacaaatttgacaccaccaagaaggagctcctcaccctcggaatcggcttctctattatcctttttcatgttatttatgtgctgtcttattaaaataataatatataacaattgtgttaatatttattggtgatatttaattttaaaaatcataaaaactatataattttaaaagacagcacataaaacgacaacataaaaatcaaatttctcaccctggtgttgtgcacaaggacgaagggcaattctagcctcgggactggagtttgttttaaggtgcaacagcctaggacctata

SEQ ID NO: 14918 - DNA, 1066 bp, Glycine max
  Gm_smallRNAprecursor_7751
ccttcagctgttcaaccctaaaccctagttctgcagcagccatccgttttgtaaggtttcgtaatttttgattcatgcatttccactaagccattttattttgaatctgaatgctgaagcttgttttcgtgtagctttcgttttattttaaaaaaacttgcttatgctttaattggctgatgcagtttagtgttattaatgtatatgcaggaggttgtaagaattgccggtgagtgattacaatggctcctgctaagggtgggtcttgcattattctttttatggtcatttcttcaatattatcaatctatttatctagaggctcatgtatgtaatgttgatatttatgttttgttgctgaaaaagttggatgctagtaatggtctgttttgtgctaaaacatatcctgttttctgatgttggatactcggtgcatatggtacttattatctatgaagcactgacatccagccccttgccgtgtcacgcgtccgtgtcagtgtccgacaccgacacgacacctgtattacgttttatattttggatattacaggtgtccatgtgtccgtgtccgtgtcgtgtccggtgttggtgttggtgtcggtgtcggtgcttcatagcttattatggtgaatgcactacttttttttttggttcttttggttacggggctcttgaattccagtgtgtgcttgtgaactgactgaatgtattcctaatttaaagaaaatggatgtgccactggtcattttctttaatattacctgaatgaagaatattttgtttttcatttataccagcgagtttggagtgtttgtcgagatattgacaaataatacataagtatttggctttcctttagtttgcatttccttttaactctccagtcataagtcatgtcctgctcttccttgtaatgcatctttttgtcagtttttgctagtttgattttctgtttccaaattgtcttttaggttgatgcattgttttatagacattggtggcaaatgctcaaagcagtactggtttcctggtaattatctaattactttttttttccttgtgc

SEQ ID NO: 14919 - DNA, 1052 bp, Glycine max
  Gm_smallRNAprecursor_7752
actaaattgcagcatgaacactcaatgcatgtaattcagttagtaatacaggctgaatttatgaagaaaaaaaatatgaatttgattcctacgtgatccaatcttgcagatgaataaagactaaaccctaaacaaagtgattatagttattgctaataaaaaaattacaacatctactttcatggcttgcgatgctatgcacaaacagaatcacatggctaaactgtcaacaaagttagagaacaaagtctcttaaagcctaagatagactcgagatatatatttgttgcgtgactaaggtgtgatagtggcagaaagaaagtatgcaaagaaacttgatgagtactacgtacaaacatacaaaaagacaatcatattacaattaattttatatcaataaaagaaagaaaaggagagaagaattaccaataccattgaacagaatggaaaataagggacatgcaaaaggcaaaaggaaagggaagaagcatcagaaatcataggaatgggcggaattgggaagaaattaaatgtattgctcaatctcattacttcccaatcagcccattcccacaaattctgattgctccaatctcccgttcccagctcttgaaattgaatactgattcacctcttagctaggttaactcctttatttatataactcactcacgctcttaaaagtagtgctttacgtaaagttcaaggctcaatggcttcatgtaagattccccaacaccaaagtatatggtataaagcacctggaaaattagtgacctcacactcaccatcaatatacatattctgttttttctttcatatatattgttgtctagtgaaattctttttattcttttattttttttccgattcatgtgttggagtgattaggtgaatgttaatcaatcttctaaaaatattgattaaaaaatttaaagtaaaaatatttttattagaaaacgaataattattatttatgatttttcttacgtttttttaaatttatataataaatattttttttttcttttaagatactgaatactaattca

SEQ ID NO: 14920 - DNA, 1186 bp, Glycine max
  Gm_smallRNAprecursor_7753
tgtgtgtttgataggaattatagtgaaaaggaaattaacgtattgttgtgaatgtgaaacatgtatatcgtatattttgtttaagaatcaatataaaaagggagcataactaaagtatctatactttttctcaacaaaccagtaataaatgaaattaactttcaatgatgataaacttgacatgtgttacaatatatgttaatatttgataactgctaaataattatgaatttataggagttaaatagttaaattttggcttaaaattaattatttagcagttatttgtaattaaaagtgagaaaattaatttaaattgaatttctggttgcagatacaaaaaaataaggttgcatttagcaaaagtagcacagaaaggaagaaaaaaagaagaaattctgaagcaggcccaatccaataggggcgctcagcgcgcatcaggcgctaagcccagctaggcgcccagcgcccgatccaacagacgcacaggcgcccagcgcccgatccaagagaagcacaggcccagcgtgcatggcgcgcccagcgcgcgatctgaacgcactaagcgcgaggtgtggcgctgagcgcaactacgaaggcccgtaagcccacttcagccactataaatagagaggcagtcccaaggaaagatcatcccatctcagagcatcactctcagtacttcaagcctgagttttcttccctctttatattctttgttttgttagcctattctttctttcattcccagttgtaagccctcaatggccatgagtggctaaacccctagctagggcctggcaggcctaaaaagtcaacgatgtacaatgagcttcaagagttatcaatgcaaaggaatttattccaggtttttctgttctatttcttttcttttattcttgcattcatccttagatctctttttgggtcttaatcgctcgggagaggataattctcaataatatttaagattcaatgcatgcatcagttttaggggttatacgcttgggaaagggtaacacctaatagaacatctaaagaaaagaatcattgggttagcattgctaggcatagaatgataactcactgcccatgcatctaagcaacatctagaacttaatcttaacgcattttaattattaaatcttcgcaaaggcatttgggagataggtagttaaaataggct

SEQ ID NO: 14921 - DNA, 1186 bp, Glycine max
  Gm_smallRNAprecursor_7754
gccagatttgatcaagattccaaaggactgactaaccacttgtgtgttttatgctttcattttgagatgttgacagatgcggaaaggaccactggaagaaggaggaactaaggccattgacagtgttgaaacactcagaacttgcttggaaattatttctattcttggtttgcttggggacaagcaaagtttaatttgggggattttgataactgttaaataattgtgaatttataggagttaaatagtcaaattttggcttaaaattaattatttagcagttatttgtaattaaaagtgagaaaattaatttaaattgaatttctggttgcagatacaaaaaaataaggttgcatttagcaaaagtggcacagaaaggaagaaaaaaagaagaaattctgaagcaggcccaatccaataggggcgctcagcgcgcatcaggcgctaagcccagctaggcgcccagcgcccgatccaacagacgcacaggcgcccagcgcccgatccaagagaagcacaggcccagcgtgcatggcgcgcccagcgcgcgatctgaacgcgctaagcgcgaggtgtggcgctgagcgcaactacgaaggcccgtaagctcacttcagccactataaatagagaggcagtcccaaggaaagatcatcccatctcagagcatcactctcagtacttcaagcctgagttttcttccctctttatattctttgttttgttagcctattctttctttcattcccagttgtaagccctcaatggccatgagtggctaaacccctagctagggcctggcaggcctaaaaagccaacgatgtacaatgagcttcaagagttatcaatgcaaaggaatttattccaggtttttctgttctatttcttttcttttattcttgcattcattcttagatctctttttgggtcttaatcgctcgggagaggataattctcaataatatttaagattcaatgcatgcatcagttttaggggttatacgcttgggaaagggtaacacctaatagaacatctaaagaaaagaatcattgggttagcattgctaggcatagaatgataactcactgcccatgcatctaagcaacatctagaacttaatcttaacgcattttaattattaaatcttcgcaaaggcatttgggagataggtagttaaaataggct

SEQ ID NO: 14922 - DNA, 1182 bp, Glycine max
  Gm_smallRNAprecursor_7755
tatcataatcaatcttcacaaaagtttggtgtacttacagaaaccacaacaattggaaattatctcatcacacataacctcaataactaggataaagagactagagaattgaaagagatgaaaggggttccgcccaccccatgggaaatcaaatatcaatgaagtcaatatacggcaaaatttgaatcggtgcatatggttttcattttaggtttgaaatggcattctgccccaagtcccatacacgatagcagtagcagctgttcttacatatactgttaaggataaacacatattattcacattaaagaaggtcaaagcaaatatcaaagacattcaagaaggtcaaatccaagcaaatatgcgctgacaatataactactataggcgtgtaaacatgatggcaatgcatatccatatagctgtcaaagtatatcaggaaattgtatcataattgtataggatttctattataggcaattatagactagacaattataggcaattagtatacagattcttgtactcttatatatatatgtacatcaaattacaagaaaaatatcaacaaattccgatacaatattcaagtgctttctttatatatatatatgtacatcaatttgttgatatttttcttgtaatttgatgtacgtacgagaatctgtatactaattgcctataattgtctagtctataattgcctataatagaaatcctatacaattatgatataattgcctataatagaaatcctatttaaatataattatgatactatttcctgatatactttgacaactatatggatatgcattgccatcatgtttacacgcctatagtagttatattaccagcgcatatttgcttgggtttgaccttcttgaatgtcttgatatttgctttgaccttctttaatgtgaataatatgtgtttatccttaacatatactatgatcacagattagtgttatcatcaaaaacgcctcaataaggccaaaccaggatctccattgtagttaccctaccactcagtcaatgtagataaagccactcgacacttattagctacttgattcaaatatcttcttttttaatattctcatgccaagtaaaaaaaacttgatcccaaaagcaaaacagtgaatacacccaaagtattctatgggctaaagcaggaatg

SEQ ID NO: 14923 - DNA, 1060 bp, Glycine max
  Gm_smallRNAprecursor_7756
ggaaaatgcccctccgccgccagcgccggaggaggggtcgatcgagaaacttggggtggtgaacgagaatggcacgatgtccgatgagttcgaggtgggggatttcgatccgggaatggtggatcagtgggtgaacgagactcaggttgatgagagcgagggttcttcttctgatgtgggatttgggatcaagaagttcgggttgtgcccccgcgagatgagcgagtatataccgtgtttggataacgaggacgagattcggaagctgccttcgacggagaaaggggagaggttcgagcggcattgccctgagcaaggtcgaggcttgaattgcttggttcctgcacccaatgggtaccgtacccctattccatggcccagaagccgagatgaggtcaaaatgttgcctttatgactctctcttccaatttagccaaatagttgtttttttttttaatttggcaaatattagttgttatctaagaagcactgatgctgacaccggacacgacacggacacggacacgtggaaacctataatgtccaaaatatagaacgtagtacgggtgtcgtgtcggtgtcagcgacgcgcgtcggacaccggacacaacaaggagctggagtgtctgtgcttcataggttgttagtttgttagttttttagttagtggcagatttttgttagtgggagattcgaatccacaatctctccctttcccttcttcctccaactaccaagccaaccttataactccgaatgggtgtttcttgtttcaatttggaggatttcgaatcagcttttatttattagacaaaacttagatgcagttgatagatgctttggtgttgttcccccatgggaaagagttccacctcagtaatctactcgataaggttttcattaaatgtcaacgcagaatacctaggtgatattcaattttgattaaggaacaatactaaagcacctatacaacttcatttttcctttttaaggttttcataagtacaactaacaggtactgaatgacgtggtgtgatctatatagccgacttcagtggga

SEQ ID NO: 14924 - DNA, 1061 bp, Glycine max
  Gm_smallRNAprecursor_7757
ggaaaatgcccctccgccgccagcgccggaggaggggtcgatcgagaaacttggggtggtgaacgagaatggcacgatgtccgatgagttcgaggtgggggatttcgatccgggaatggtggatcagtgggtgaacgagactcaggttgatgagagcgagggttcttcttctgatgtgggatttgggatcaagaagttcgggttgtgcccccgcgagatgagcgagtatataccgtgtttggataacgaggacgagattcggaagctgccttcgacggagaaaggggagaggttcgagcggcattgccctgagcaaggtcgaggcttgaattgcttggttcctgcacccaatgggtaccgtacccctattccatggcccagaagccgagatgaggtcaaaatgttgcctttatgactctctcttccaatttagccaaatagttgtttttttttttaatttggcaaatattagttgttatctaagaagcactgatgctgacaccggacacgacacggacacggacacgtggaaacctataatgtccaaaatatagaacgtagtacgggtgtcgtgtcggtgtcagcgacgcgcgtcggacaccggacacaacaaggagctggagtgtctgtgcttcataggttgttagtttgttagttttttagttagtggcagatttttgttagtgggagattcgaatccacaatctctccctttcccttcttcctccaactaccaagccaaccttataactccgaatgggtgtttcttgtttcaatttggaggatttcgaatcagcttttatttattagacaaaacttagatgcagttgatagatgctttggtgttgttcccccatgggaaagagttccacctcagtaatctactcgataaggttttcattaaatgtcaacgcagaatacctaggtgatattcaattttgattaaggaacaatactaaagcacctatacaacttcatttttcctttttaaggttttcataagtacaactaacaggtactgaatgacgtggtgtgatctatatagccgacttcagtgggac

SEQ ID NO: 14925 - DNA, 1085 bp, Glycine max
  Gm_smallRNAprecursor_7758
tgcaacaaacattgccatgaaggtacaagttgatgattcatggctatggcatcgaagatttggccacttcaacacacatgccttgaagttattacataagaagaacatgatgagagatcttccaagcataaaagagaacaatgaagtgtgtgaaggatatctccttggtaagcaacaccgatttcctttctcaacaagcggagcatggagagcgaaagatctattggagctgatacatacggacgtctgtggaccaatgaggacgccatcacatgagaacaacaggtacttcatattcttcattgatgacttctctagaatgacatgggtatattttctaaaagaaaaataagaagtatatggagtattcaaaaagttcaaggcccttgctgaaaatcaaaatgggaaacggataaaagtactaagaagtgatcgcgacaaagagtacacctctcgcaagtttgaaagattttgtgaggatgaaggcattgagcgacaacttacagtcgcatattctcctcaacaaaatggagtgtccgagagaaagaatcgcacaattatgaaaatggctagatcgatgctcaaggagaagggactacctaacatattttgggctgaagtagtctacactgctgtttacatactcaatagatgtccaactaagtctgtaaaagacaagactccaattaaagcttggaacaggaagaagccatcagcaaagcacctaagggtctttggatctatatgctacattcatattccagacgtgaagaggcacaagcttgaagacaagactatacgaggtatcttccttgggtatagcaatatctctaagggctaccgtgtctacaacttgcaaactaagaaactcgtcatcagtcgagatgttgaagttgatgagtacgcttcttggaattgggatgaagaaaaagtggagaagaatgttcttatacccgctcaacgacctcaagaataagctgaggaagaagacccaggtgaaccaccttcacctccaccacaacaacaagatcaagaactatcatcaccagagtctactccaagacgagtaagatctttggtggaca

SEQ ID NO: 14926 - DNA, 1054 bp, Glycine max
  Gm_smallRNAprecursor_7759
taatttattgtttgtcaggcggaatttcaaatccctgaagcttctgacaataggacaaagaagaaaattcttcagattgtcggcgagcgctggaggcaatttaaatctgacttgactaggaaatggccacttgcagtcgacaaggacggtgcggacgacattgtctgtgaaaaatatggcattagcaaggagaaatggactcagttttgtcagacccgtagagacccctcatgggaggtatgtactttgtcattttagttgttttccacaacaaaatcatttcttataatttattgtaataatcattttcattaatgttaaacttttgtaggatgtacgaaaaaaggcacaggcctcccagaagcaaaacactgccccccacgtattgtctcgtgggggttatgaatatttagaagaaaagctcatggctgagaaggcaaagaaaagactggaagaagctgcccagtctggaagcactgaggacatcattgaccctccatctcccatcagacgccacgtgaaatggaagatagcccgcacgaagaaaactggacagatgacgtctgaggcagcaaaggaaatagctgacaggattgtaagtcatttttaattaataattgtaattatctttgtgtattttgtgaattccttggacaaatatgtgttcggtacaggattctttggacgagcaggcgtcacagggatcgtttgtcccccatggacgtcaggatatcctgactgctgccattgggcgaccagagcaccctggccgtgttcgtgctgttggagccggtgtcaccataaagcaatactttggatcagcttcacgaacatcccgcagttcttcctccatgcctcttgaagacctagaacagctgacccaacaaatcagagatcaactggaggagtcaatcacagaaaaagtgactcgaaagatgatggaatccttcagccagatgtagtcacagtttcagtctcagatgcaatcacagggaattgcactacctccagagccagaggttggtccctcaggtcctcgtgtcagtacaaagga

SEQ ID NO: 14927 - DNA, 1037 bp, Glycine max
  Gm_smallRNAprecursor_7760
tagtggggcagacacttaacactttccttgcttggccaacacatcttgtgaagtgtttatcagaacaggtattttactctgattatatgtttattttttttcaattaatttgttcactgtaatcaaaacttgctaattaactatgttttatcaataggcagttgtgtctccagcaaaacctccagaaagcccggatgaagaggtcgatgatcccctgtacctgatgacattgaccatcccacaactgtttttgaagccgctccaggttatgtgggatgctaccatattcggggtgtttaatcaaaacttcccgttgtatataaagcacgaagatctctctgaaattgcacatggtggtcaatgtctcagcatatcagttatacagttgtggattctgtaagtcattttagattactattaattaccaaagtaattgttttaaattcatacataattaactttgacttaacaacacagccatctgactgagacaagtgtgcgagcggggaattctgatgtgtatggattcctcgagccacagtccattcagagatctggacaatcacaatttgaatccgaaagttacatcaagagttggatacagagttcaaaacgagatgtttaccttgaagcctatctgaataggtaagtcaaacacaataattgaatttaaataatctatactactacaataaactatattcgtctctactgcagtggacactggcaaatggtcgtcattctacctaaggaaaacctagttgtctggttttgttctttgcataacaggccagacaactaccttaagggaataattaacaggtcagtattgttttcaatacattttcattggcataactcaacaacatcaatattttaatgttccttatattcaacactagtgctttgaaaggacttgatgatactccacaaccgaaatccaaggctgctgctaggtggattgttgttaaggtacgtgatttaaataaaagttctacttatatatattttatgtgtgtgtacactaattgtagtta

SEQ ID NO: 14928 - DNA, 1129 bp, Glycine max
  Gm_smallRNAprecursor_7761
tctatttcgaagcagcaaaatcaggtcattcagcaaatgggcagctttttcgatgaaggttgggagtgagatttcaaatggagacgcaaactttttgacaagttggatatggttgtgaggtttctagaagacctcaaggtaccagcattcatccagaacgacaagatgagtgggtttggaaggaggatgctttgggtatatatacacagccacgaacgggtacaggttgctcatgtcaaatcaaattaatgaaaatcaggatggtgcttttacagagctgtggaaggtcaaggtccttagtaaagttgctttctttgcatggagactaatcagggatagattaccaactaaaatcaatttgtgcaggaggaatgtggatatacatgatcccacatgcccattttgcaaaaataaagaagaggcttaggtggagggcaaagaaggcctccttctgggggggtcagagccatcaatgagataccactctggaagagctagaattctaaccttgtgccaggacctacgggccgagggacaatctcaggtagacagtttctatggggtgtaggcctcccaaaaggtaacggaggcgtgcaaaggtttcctcgggccagacgaagattggccctcgagtgcaaaggcagaagggagcttgactgcaagacccacccgtcgagcagggacgatgcatcacatctcttttttagttgcagcaaaatcatgctgctttggtgggaatcattatcgtggacaaataccttagaaccatttccagagaatctgcgtatgcacttcctccagcatgtggttgggaatggaaatggcaatagctttcaaaattggaaatgttggtggatgtccttgacatggagtatctggcaacataggaataagattgtttttgaagaggaaaggtttaatgacagtaagctgttggaggatgccatatttctctgctggacctggctaaaaaatctggttaaaggttttgacatgcctttttatcactggtccagcaatatgaaggaggttttcatgggatgagggggggacaatattattagtgggggtaacagtgagattagcatatcgccggtactatggtttcttaattcatgttgtaaactat

SEQ ID NO: 14929 - DNA, 1158 bp, Glycine max
  Gm_smallRNAprecursor_7762
tgtataaattgatttgtgaatttattgtattatattttattttgtagtagcaatgacatcttcatcatcatcttcatcacatattaacattaagtttgacctcatcgatgctgatgtattatggatgcaacctaagcatgtttcaaaacatgtttggaatggggaagaagataggaaattacatatcagacgagttgtccccacgtatcaaggggaagaacaaattcctgagcaaatttttccttttcttctacaatctggttttgcctggattatcaagatggggtacttaaaaataaatgtctcattaattagtgctctgatagaaagatggaggccgggaacacatacgtttcacatcagatgcggagaatgtactattactcttcaagacgtctctgtattgttagatataagtgtggatggtttaccagtcaaacaaatcttgattgggctgatttatgtgaggaattattgggagtcagaccacaagaagatgaaattaaaggtagtgtggttaaattaagttggctggctcaccattttgcacaaataaataacgacgacgacaaagaacaagtacgaaggtttgcccgtgcattgatactaagattcattggaggtgtcttgttcgttgacaaaagcagtaataaagtttcgctaaggtaccttcaatttttacgtgactttgaagaatgtggcagatatgcatggggaactgccgtacttgattttttatacagagagatgtgcaatgccaccgattataaaactaaatcaatcggaggtatgtgcatcttactacaaatgtgggcatgggaacgatgtccaaccttggctccaaagaggactccttcccaagtagaaaatacaccactggggtacaggttagtcatttttaacagcgtttttcatttcaatagaataaatggttttaacatatattaaattttaatctttgtaggtggctgcgacgtggaaaccaacatattgacaatgatgatgtgagagttttttgtcgcaagttgaatattatgaaacgtcatgaggtaagaacatgctattgtatttgtaaaataaaaaattatgtgttattttactaaaatgttcacaactatgttgttatatgcagtttgtgtgggagccgtacccatcaac

SEQ ID NO: 14930 - DNA, 1035 bp, Glycine max
  Gm_smallRNAprecursor_7763
tataaattgatttgtgaatttattgtattatattttattttgtagtagcaatgacatcttcatcatcatcttcatcacatattaacattaagtttgacctcatcgatgctgatgtattatggatgcaacctaagcatgtttcaaaacatgtttggaatggggaagaagataggaaattacatatcagacgagttgtccccacgtatcaaggggaagaacaaattcctgagcaaatttttccttttcttctacaatctggttttgcctggattatcaagatggggtacttaaaaataaatgtctcattaattagtgctctgatagaaagatggaggccgggaacacatacgtttcacatcagatgcggagaatgtactattactcttcaagacgtctctgtattgttagatataagtgtggatggtttaccagtcaaacaaatcttgattgggctgatttatgtgaggaattattgggagtcagaccacaagaagatgaaattaaaggtagtgtggttaaattaagttggctggctcaccattttgcacaaataaataacgacgacgacaaagaacaagtacgaaggtttgcccgtgcattgatactaagattcattggaggtgtcttgttcgttgacaaaagcagtaataaagtttcgctaaggtaccttcaatttttacgtgactttgaagaatgtggcagatatgcatggggaactgccgtacttgattttttatacagagagatgtgcaatgccaccgattataaaactaaatcaatcggaggtatgtgcatcttactacaaatgtgggcatgggaacgatgtccaaccttggctccaaagaggactccttcccaagtagaaaatacaccactggggtacaggttagtcatttttaacagcgtttttcatttcaatagaataaatggttttaacatatattaaattttaatctttgtaggtggctgcgacgtggaaaccaacatattgacaatgatgatgtgagagttttttgtcgcaagttgaatattatg

SEQ ID NO: 14931 - DNA, 1155 bp, Glycine max
  Gm_smallRNAprecursor_7764
tataaattgatttgtgaatttattgtattatattttattttgtagtagcaatgacatcttcatcatcatcttcatcacatattaacattaagtttgacctcatcgatgctgatgtattatggatgcaacctaagcatgtttcaaaacatgtttggaatggggaagaagataggaaattacatatcagacgagttgtccccacgtatcaaggggaagaacaaattcctgagcaaatttttccttttcttctacaatctggttttgcctggattatcaagatggggtacttaaaaataaatgtctcattaattagtgctctgatagaaagatggaggccgggaacacatacgtttcacatcagatgcggagaatgtactattactcttcaagacgtctctgtattgttagatataagtgtggatggtttaccagtcaaacaaatcttgattgggctgatttatgtgaggaattattgggagtcagaccacaagaagatgaaattaaaggtagtgtggttaaattaagttggctggctcaccattttgcacaaataaataacgacgacgacaaagaacaagtacgaaggtttgcccgtgcattgatactaagattcattggaggtgtcttgttcgttgacaaaagcagtaataaagtttcgctaaggtaccttcaatttttacgtgactttgaagaatgtggcagatatgcatggggaactgccgtacttgattttttatacagagagatgtgcaatgccaccgattataaaactaaatcaatcggaggtatgtgcatcttactacaaatgtgggcatgggaacgatgtccaaccttggctccaaagaggactccttcccaagtagaaaatacaccactggggtacaggttagtcatttttaacagcgtttttcatttcaatagaataaatggttttaacatatattaaattttaatctttgtaggtggctgcgacgtggaaaccaacatattgacaatgatgatgtgagagttttttgtcgcaagttgaatattatgaaacgtcatgaggtaagaacatgctattgtatttgtaaaataaaaaattatgtgttattttactaaaatgttcacaactatgttgttatatgcagtttgtgtgggagccgtacccatcaa

SEQ ID NO: 14932 - DNA, 1107 bp, Glycine max
  Gm_smallRNAprecursor_7765
aatattattcaattattcaatcaattaagttaaattctataagtattcaactactcctttgatttttgaaaacagtataaactaggtcatttaatgccataatttgtaaatagaaaactgaattttatattgttttctattattgaagaactgcataataaaaaatttctttaaaacatgaaagtaatgacatttatataattaagtttagacttaagaggattaaaaataagtttactcacaaaaataataatgaattagtgacaaaattttcatcactaatactagtaagtgttaataaaatgataaaattgtaaatttggtctcctaatttatcttccgttttagatttggccaaataatttaattcacgaattttgtctttctattttgtaaaatcgtccaatgttggtcccctaggtcacaattggatgttgacaattagccagtgatgttgactgtcacatgtcacgtttttattggatgatgattgtcatatgtcatgttctgattggatgtcaactccatgaaagatgaaatgcattgttgtttttattaaccaatcagaacttgacatgtgatagtcatcatccaataaaaacgtgacacgtgacagtcaacatcacttgttaatggtcaacgtccaattgtgatatggggatgaacatttcatgattttacaaaataggaggacgaaattcgtgaattaaattattgggggaccaaatccgaaactggagataaattgaaagaccaaaaatacaattttgcctaataaaattttagtgacaaatttttaaaaattatatataaatttctatatcaatattattattttttttaaaaaaattgatacccaatacctcaaatcacaatatatatatatatatatatatatatatatatatatatatatatatatatatatatatatatatatatatatatatatatatatatatatatatatatatagacacacgcgcatacaaacacacactcacacaccaattgacgcaattgttatagccatatgcatttgcattgcatgttatttgtaataaattaagaatcggtaatacaaaatattctttttttacatcgaaa

SEQ ID NO: 14933 - DNA, 1041 bp, Glycine max
  Gm_smallRNAprecursor_7766
tctcactactctctctttttttttttgtcaacttccataggggacaagaaaaaaaaactcaacttgcatgatattttcttgtgagttgataggtgcacccagcattattgttagtgcacccagcaaattttcaaaaacccaaaactgcccctgcaccttctttctcctttaaaaagttttttttatgttttaaatagtccttctttctccatttttgtgcatcctctccttcgttttttgtctttggtgcacagtgtttcgctgtttcttcgtttccttgcgatcggttaggttcggtgaaagtgaaggtaccggtgttcagtgttgcagtggtcgtcggcggcatacgaggtacgcatttgcatcatggtacgttctggtgtacggtagatcgtgcggatcaagttgatccgtaagaaatttacggatcaactttatccgcatgttgattttaaagctacagatcaagttgattatcacggatcaagttgatccaaaaaagacttacgaatcaacttgatccgtaaaagactggcggatcaagttgatccgtaagtcttttgcggatcagcttgatccgtaacattctacatttttgaaattttaacttttatttaagtttaattgtgttttttaattattactttgtttgtattaccattttttattttaattttgttttttaattattactttgtttactaacgatgagttattatgtatagttttgtatgttatgtatagttcggattggtgttatatgtctgtgttgaaatttttgatttattgttaagatggacgaagatcagtggatgtatgaaagtataatgtctgaagaagcggatatggattatgaaaatgaagaagaatatggtgtgaatgaaccacatgttgattgtttggatgcgttcaatacttcttaggtaataatattcatgattgtgagtgatttaataaaataaaatgaatatgttgtaggaaactgaaattatctggattggtttgtaagtgtttgacagccgagaggatattttgcggtgg

SEQ ID NO: 14934 - DNA, 1042 bp, Glycine max
  Gm_smallRNAprecursor_7767
tctcactactctctctttttttttttgtcaacttccataggggacaagaaaaaaaaactcaacttgcatgatattttcttgtgagttgataggtgcacccagcattattgttagtgcacccagcaaattttcaaaaacccaaaactgcccctgcaccttctttctcctttaaaaagttttttttatgttttaaatagtccttctttctccatttttgtgcatcctctccttcgttttttgtctttggtgcacagtgtttcgctgtttcttcgtttccttgcgatcggttaggttcggtgaaagtgaaggtaccggtgttcagtgttgcagtggtcgtcggcggcatacgaggtacgcatttgcatcatggtacgttctggtgtacggtagatcgtgcggatcaagttgatccgtaagaaatttacggatcaactttatccgcatgttgattttaaagctacagatcaagttgattatcacggatcaagttgatccaaaaaagacttacgaatcaacttgatccgtaaaagactggcggatcaagttgatccgtaagtcttttgcggatcagcttgatccgtaacattctacatttttgaaattttaacttttatttaagtttaattgtgttttttaattattactttgtttgtattaccattttttattttaattttgttttttaattattactttgtttactaacgatgagttattatgtatagttttgtatgttatgtatagttcggattggtgttatatgtctgtgttgaaatttttgatttattgttaagatggacgaagatcagtggatgtatgaaagtataatgtctgaagaagcggatatggattatgaaaatgaagaagaatatggtgtgaatgaaccacatgttgattgtttggatgcgttcaatacttcttaggtaataatattcatgattgtgagtgatttaataaaataaaatgaatatgttgtaggaaactgaaattatctggattggtttgtaagtgtttgacagccgagaggatattttgcggtggc

SEQ ID NO: 14935 - DNA, 1040 bp, Glycine max
  Gm_smallRNAprecursor_7768
agttgagaatgttggaatcaacaaagtgctcatagatggaggagcggctgtcaacttaatgcctcaatctatgctctacaagatcgggaaacatgacactgatctatctgcccacaacattgtgctctctaattatgagggcaaaactggctattctttgggagccattcaagtagatgttgctgtaggcagtatagttcgaccaactctattcctggtgatacagtccaaggctaattttaacttgctattaggaagggaatggatccatggagttggggctgtaccatctactctccaccagaaactcattatctggagggaggatgggattgttgaaaatatagaggcagatcaaagcttctataagtcagaggttgacaatgttactccacaaacctttgacaaaaatttggctaacatagcaccttgtggtgacaaggagactgcttttgagccaagtgacaatgttatccactctgtcaaactccatcctacccatgggtttatatgggagagggaagaaattgatgttgtttcctctgaagatggagtcattccaccaactgggtggaatatatattaagattaatatgcctgaggccactgcatgggccagaattacggcttatatggccgaaaatagactaaatacggcccttgaggctgaattccaacaaaatatggcagttgaagccaagatcgaagatcatgaaaacaaagaaacaaaggatcgaagactggactgcatttatgatgatgagccactgggttttgaaaaaaatcccataagtgaggcgccaaagatgcaggctcaagatcctttggaggagatcgacattggagatggctcgataaaaaggccaacctatatcagtgccaatatcacctcaagtctaaaagaaaagctggtgcctcttcttagagaatttaaagactgctttgcttgggattaccacgaaatgcctaggttaagcagggaaatggtcgaactgaaattacctattaaggagggaaaaagaccagtaaaacaactacca

SEQ ID NO: 14936 - DNA, 1114 bp, Glycine max
  Gm_smallRNAprecursor_7769
aatctaagtggcaaagctcaaactttttcgccattacttcgactcaagaaagatgaaccattcaaatgggatgaagagcatcaaaaggctttcgatgaaattaaagagtatctgatcaagcctcctgtgttaatgcctcctagtcgaaacaagactatgaagttgtatattgctgcgtctgacaagaccattggtagcatgttggctcaggaatatgatgatggcgtagagcatgcaatttattatcttagtcgtgtactaaatgatgcagaaactagatatactgccatagaaaaactttgtctttgtttgtatttctcttgtgcaaaacttaagcaatatataaagcctgttgatgtttatgtgtattctcattatgatattattaagcacatgttgtcaaaacctattttacacagtagaattggaaaatgggctttagcattaacagaatattctttaacgtacaagcctttgaaatctgttaagggtcaaattgtggcagattttattgtagatcactcagtgatcgaaatgccgcaagactatgtcgatatagagccttggattttgtatttcgatggttcgaaacacaaacacggaactggaattggagttttaataatatcccccaataaagttccaactaaattcaaatataaaatcaaagggctttgttctaataatgaggctgagtatgaggctctaattgcaggccttgaaattttaattagcttgggggcaagaaatgttaacataaggggtgattcagaattagtgttgaggcaattaacacaagaatacaaatgtgttaatgaacacttagcaaaatattttgttatggcaagttctcttctgaatcatttcgattacattaacattgaacatatacctcgactagaaaaccaagaagcaaatgatttagcccaaatagcttcagggtacaaaatgtcgaaggaaaagttaactcagttgatcgaaataaaagataaactggtgttaccagagccattaagcactaaattgccaatgccaaaacttgtgggggcaagtacaccacaaaataatgaagatgaaagcatggatgatctccaggaaaaaattcaaattttgg

SEQ ID NO: 14937 - DNA, 1110 bp, Glycine max
  Gm_smallRNAprecursor_7770
tattgtagatcactcagtgatcgaaatgccgcaagactatgtcgatatagagccttggattttgtatttcgatggttcgaaacacaaacacggaactggaattggagttttaataatatcccccaataaagttccaactaaattcaaatataaaatcaaagggctttgttctaataatgaggctgagtatgaggctctaattgcaggccttgaaattttaattagcttgggggcaagaaatgttaacataaggggtgattcagaattagtgttgaggcaattaacacaagaatacaaatgtgttaatgaacacttagcaaaatattttgttatggcaagttctcttctgaatcatttcgattacattaacattgaacatatacctcgactagaaaaccaagaagcaaatgatttagcccaaatagcttcagggtacaaaatgtcgaaggaaaagttaactcagttgatcgaaataaaagataaactggtgttaccagagccattaagcactaaattgccaatgccaaaacttgtgggggcaagtacaccacaaaataatgaagatgaaagcatggatgatctccaggaaaaaattcaaattttggccattgacaatatgttagataatgattggagaaagtccattgttgaatatttggaaaatccaataggcaatgtggctcgaaaggtcaaatatagggctttaaattacgtggttgtgggaaatgatttgtttaaaaagactgcagaaggagtgttgctaaaatgtctaagtgaatcagaagcatacttggcagtttcccatgttcacagtggggcctgtggatcacatcaagcaggccataaaatgaaatggcttttatttcgacaaggtttgtattggccttcgatgttaaaagactgcatagaatttgctaaaggctgtcaggaatgccaaaagcatgcagggatacagcatgtacctgctagtgagttacactccataatcaaaccttggcctttcagaggatgggctttggacctaattggtgaaatcaagcctgcttcttctaagaaccagcgttatatcatagttggtgtcgattactttacaaaatggatcgaagcagt

SEQ ID NO: 14938 - DNA, 1082 bp, Glycine max
  Gm_smallRNAprecursor_7771
cagtgatcgaaatgccgcaagactatgtcgatatagagccttggattttgtatttcgatggttcgaaacacaaacacggaactggaattggagttttaataatatcccccaataaagttccaactaaattcaaatataaaatcaaagggctttgttctaataatgaggctgagtatgaggctctaattgcaggccttgaaattttaattagcttgggggcaagaaatgttaacataaggggtgattcagaattagtgttgaggcaattaacacaagaatacaaatgtgttaatgaacacttagcaaaatattttgttatggcaagttctcttctgaatcatttcgattacattaacattgaacatatacctcgactagaaaaccaagaagcaaatgatttagcccaaatagcttcagggtacaaaatgtcgaaggaaaagttaactcagttgatcgaaataaaagataaactggtgttaccagagccattaagcactaaattgccaatgccaaaacttgtgggggcaagtacaccacaaaataatgaagatgaaagcatggatgatctccaggaaaaaattcaaattttggccattgacaatatgttagataatgattggagaaagtccattgttgaatatttggaaaatccaataggcaatgtggctcgaaaggtcaaatatagggctttaaattacgtggttgtgggaaatgatttgtttaaaaagactgcagaaggagtgttgctaaaatgtctaagtgaatcagaagcatacttggcagtttcccatgttcacagtggggcctgtggatcacatcaagcaggccataaaatgaaatggcttttatttcgacaaggtttgtattggccttcgatgttaaaagactgcatagaatttgctaaaggctgtcaggaatgccaaaagcatgcagggatacagcatgtacctgctagtgagttacactccataatcaaaccttggcctttcagaggatgggctttggacctaattggtgaaatcaagcctgcttcttctaagaaccagcgttatatcatagttggtgtcgattactttacaaaa

SEQ ID NO: 14939 - DNA, 1137 bp, Glycine max
  Gm_smallRNAprecursor_7772
ataggcaatgtggctcgaaaggtcaaatatagggctttaaattacgtggttgtgggaaatgatttgtttaaaaagactgcagaaggagtgttgctaaaatgtctaagtgaatcagaagcatacttggcagtttcccatgttcacagtggggcctgtggatcacatcaagcaggccataaaatgaaatggcttttatttcgacaaggtttgtattggccttcgatgttaaaagactgcatagaatttgctaaaggctgtcaggaatgccaaaagcatgcagggatacagcatgtacctgctagtgagttacactccataatcaaaccttggcctttcagaggatgggctttggacctaattggtgaaatcaagcctgcttcttctaagaaccagcgttatatcatagttggtgtcgattactttacaaaatggatcgaagcagtccctttgccaaatgttgatcaggaaacagtaattagtttcattcaaaatcatattatttataggtatggtattcctgaaacaattaccactgatcaaggttcagtttttactggacgaaaaatgcaagaatttgcccaagaaactggctttcgattattaacctcaacaccatattacgcgcaagcaaatggtcaggtcgaagcagccaataagattgtaattaacttgattaaaaaacacattgcccaaaagccaagaaattggaataaaacgttagatcaagttctatgggcatgtagaaattctcctaaggaatcaactaatactaccccatttcgactgacttatgggcatgatgctgtacttccggtcgaaatacatttgcaatcagtcagggtacaaaaacaaatggacattccaatcgaccattattggaaaatgatgtcagatgaattggttgatttagatgaggagagattaagagcattagaagttttgactaaacaaaaagaaagagttgctaaaacttataataagaaagtgaagtcaaaaacttttaatattggagatttagtttggaaggttatcctgcccatggatagtaaggatcgagccttgggcaaatggtccccaaattgggaaggaccgtttaaaataattcagatctattcgaatggtgcttatgagttggag

SEQ ID NO: 14940 - DNA, 1056 bp, Glycine max
  Gm_smallRNAprecursor_7773
atatagtgagggaactgatctaattcttttatttttatttatttaaatgaaaaatcaaagcacgcctgttacatcaagcactcaagttacataagtaaaagtatgattatcacatagaagacaaatacatgctaataaccactgaccgaacccctgttgccaaggttcacaaaaatattcaatcccaagcacctctgccgcataaaagctatcatttaagcaaataattttgaaatggaggagaattaaaatggaggagaaactttacaagtaaaatcccacatgataacccaacccaataggttggcataatggttaggcaccatgcactcaaatattatgggaatgcaaaattgatctctaatttaataaggcaaattttctgcttggggttacttttagaaacatattctcgaaatgggtctgtttctaaagtaatttctgcatggtgtccttttttacgtggaacacatgcaagtcgcaggagtcattggcgcgtttggcgacgaggtgacacctggcactggtctcgccagtggtgttagctctttcaggcaggttggactcgtcagtcaaactggcgagttgagagtaggggagttccgagggttgcaggcagcagaggccatttccgagggtgtagtccgcaacgcgcagaggttgcagggtgtcgccaggctcaatggcgagttggttgggcaaaagcgccatcccctgcagcgatttcagttgcttgaggtgcttaaatcccccctcccccgtagaccattcacgcggaaaaaaaaacgcagaaaagaagaagcttttgttgctgccttcgtgttccacacaggagaaagaagaagggctgttgctagtatttgtgtttgagcaagctttgcttcatttgtaattttttcagtaagtttgtttaattatttttttattttatttgtattctgatgataattagtaatatatgttattagttttttatcttaagttagttttagttagaaatgataaatttaatttaatttgataattatagttttatacagtacatttatttttaga

SEQ ID NO: 14941 - DNA, 1041 bp, Glycine max
  Gm_smallRNAprecursor_7774
gcagtttaaatctgacttgactaggaaatgggcacttgcagccgacaaggacggtgtggacgacattgtctgtgaaaaatatggcattagcaaggagaaatgggcccagttttgtcagacctgcagagacccctcatgggtggtatgtactttgtcattttagttgttttccacaacaaaatcacttcttataatttattgtaataatcattttcattaatgttaaacttttgcaagatgtgcggaaaaagacacaggcctcccagaagcaaaacactgccccccacatattgtctcgtgggggttatgaatatttagaagaaaagctcatggctaagaagataaagaaaagactggaagaagctgcccagtctggaagcactgagggcatcattgaccctccatctcccatcagatgccacatgaaatggaagatggctcgcacgaagaaaactggacagatgacgtctgaggcagcaaaggaaatagctgacaggattgtaagtcatttttaattaataattgtaattatctttgtgtattctgtgaattccttggacaaatatgtgttcagtacaggattctttggacaagaaggcgtcacagggatcgttcatcccccatggacgtcaggatatccagactgctgtcatttggcgaccagagcaccctggccgtgttcgtgctgttggagccagtgtcaccataaagcaatactttggatcggcttcacgaacgtcccgcagttctttctccatgcctcctaaagacctagaacagctgacccaacaaatccgagaccaactggaggagtcaatcacataaaaagtgactcgaaagcttatggcatccttcagccagatgcagtcctagtttcaatctcagatgtaatcacagggacttgcactacctccagagccagaggttggtccctcaggtcctcgtgtcagcacaaaggagagttgtgttgctccctcaaggaacgatccagggacgggtgactcaaacaaatgcgggctatacattgaagaaaatccttcc

SEQ ID NO: 14942 - DNA, 1065 bp, Glycine max
  Gm_smallRNAprecursor_7775
tgaatctgctgtaattgataataaaaatggaagtaggatattaatcacaaccagggatgagaaggttgcagaatattgtaggaaatcatcatttgttgaggtgcttaagctagaagaacctttaactgaaaaagaatctttgaaattgttctgtaagaaggcatttcagtatagttccgatggagattgtccagaagaacttaaagatatatctcttcaaattgttagaaagtgtaaaggtttacctctagcaatagtggccattggtggtcttttgtctcaaaaagatgaaagtgcacctgaatggggacagtttagtcgagatctaagtttagacttggagaggaattctgagttaaatagtataacaaaaattttaggtttaagttatgatgatttgccgatcaatctcaggtcatgtttattgtatttcggaatgtatccagaggactatgaagttcaatctgatagattgattagacagtggatagctgaagggtttgtcaaacatgaaaccggaaaatctttggaagaagttgggcaacaatatttatcagggttggtccgtagaagtttggtgcaagtatcctcacttagaattgatggcaaagttaaaaggtgtcgtgttcatgacttaatacacgacatgatccttagaaaagtcaaggatacaggattttgtcagtatattgacgggcctgatcaatctgtatctagtaagattgttcgacgcctgacaattgcaaccgatgattttagtggaagtataggaagctcacccatgcggtcaattcttatcatgacaggaaagtatgaaaaattatctcaagacttggtaaacaaattccctacaaattacatgctactgaaggtacttgattttgaaggttctcgtttacgtttacgttatgttcctgaaaatttggggaatttatgccacttgaagtatttaagcttccggtatacatggatagcaagtctaccaaaatccattggtaagctccagaatttggagaccttggatataagaggcacacatgtgtctgagatgccaaaggagattac

SEQ ID NO: 14943 - DNA, 1050 bp, Glycine max
  Gm_smallRNAprecursor_7776
gtcagaaaccgcttgtgcaacaagaggtatgttgtcttgtttgatgacatatggaatggaaaattttgggatcacattgaatctgctgtaattgaaaataaaaatggaagtaggatattaatcacaaccagggatgagaaggttgcagaatattgtaggaaatcatcatttgttgaggtgcataagctagaaaaacctttaactgaagaagaatctttgaaattgttctgtaagaaggcatttcagtataattccgatggagattgtccagaagaacttaaagatatatctctagaaattgttagaaagtgtaaaggtttacctctagcaatagtggccattggtggtcttttgtctcaaaaagatgaaagtgcatctgaatggggacaaaaatttagacttggagaggaattctgagttaaatagtataacaaaaattttaggtttaagttatgatgatttgccgatcaatctcagatcatgtttattgtatttcggaatgtatccggaggactatgaagttgggcaacaatatttatcagggttggtccgtagaagtttggtgcaagtatcctcatttagaattgatggcaaagttaaaaagtgtcgtgttcatgacttaatacacgacatgatccttataaaagtcaaggatacagggttttgtcagtatattgacgggtgtgatcaatctgtatcaagtaagattgttcgacacctgacaattgcaaccgatgattttagtggaagtataggaagctcacccattcggtcaatttttattagcacaggagaagatgaagcagtatctgaacacttagtaaacaaaatccctaccaattacatgctattgaaggtacttgattttgaaggttctggtttacgttatgttcctgaaaatttggggaatttatgccacttgaagtatttaagcttccggtttacagggagattagtaagcttaaaaagctacgtcatcttctgagtggctacataccttcaattcaatggaaggatattggaggcatgacatccctacaagagatacct

SEQ ID NO: 14944 - DNA, 1075 bp, Glycine max
  Gm_smallRNAprecursor_7777
gtcagaaaccgcttgtgcaacaagaggtatgttgtcttgtttgatgacatatggaatggaaaattttgggatcacattgaatctgctgtaattgaaaataaaaatggaagtaggatattaatcacaaccagggatgagaaggttgcagaatattgtaggaaatcatcatttgttgaggtgcataagctagaaaaacctttaactgaagaagaatctttgaaattgttctgtaagaaggcatttcagtataattccgatggagattgtccagaagaacttaaagatatatctctagaaattgttagaaagtgtaaaggtttacctctagcaatagtggccattggtggtcttttgtctcaaaaagatgaaagtgcatctgaatggggacaaaaatttagacttggagaggaattctgagttaaatagtataacaaaaattttaggtttaagttatgatgatttgccgatcaatctcagatcatgtttattgtatttcggaatgtatccggaggactatgaagttgggcaacaatatttatcagggttggtccgtagaagtttggtgcaagtatcctcatttagaattgatggcaaagttaaaaagtgtcgtgttcatgacttaatacacgacatgatccttataaaagtcaaggatacagggttttgtcagtatattgacgggtgtgatcaatctgtatcaagtaagattgttcgacacctgacaattgcaaccgatgattttagtggaagtataggaagctcacccattcggtcaatttttattagcacaggagaagatgaagcagtatctgaacacttagtaaacaaaatccctaccaattacatgctattgaaggtacttgattttgaaggttctggtttacgttatgttcctgaaaatttggggaatttatgccacttgaagtatttaagcttccggtttacagggagattagtaagcttaaaaagctacgtcatcttctgagtggctacataccttcaattcaatggaaggatattggaggcatgacatccctacaagagatacctccagtgattatagataatgatggag

SEQ ID NO: 14945 - DNA, 1128 bp, Glycine max
  Gm_smallRNAprecursor_7778
gcgcaacaagaggtatgttgtcttgtttgatgacgtatggaatggaaaattttgggatcacattgaatctgctgtaattgataataaaaatggaagtaggatattaatcacaaccagggatgagaaggttgcagaatattgtaggaaatcatcatttgttgaggtgcataagctagaaaaacctttaactgaagaagaatctttgaaattgttctgtaagaaggcatttcagtatagttccgatggagattgtccagaagaacttaaagatatatctcttgaaattgttagaaagtgtaaaggtttacctctagcaatagtggccattggtggtcttttgcctcaaaaagatgaaagtgcacctgaatggggacaattttgtcgagatctaagtttagacttggagaggaattctgagttaaatagtataacaaaaattttaggtttaagttatgatgatttgccattcaatctcagatcatgtttattgtatttcggaatgtatccggaggactatgaagttcaatctgatagactgattagacagtggatagctgaagggtttgtcaaacatgaaaccggaaaaacattggaagaagttgggcaacaatatttatcaaggttggtccgtagaagtttggtgcaagtatcctcatttagaattgatggcaaagttaaaaggtgtcgtgttcatgacttaatacacgacatgatccttagaaaagtcaaggatacaaggttttgtcagtatattgacgggcgtgatcaatttgtatcaagtaagattgtttgacgcctgacaattgcaaccgatgattttgttggtagttgattagatgatagttgataattttagagaattgttttagaaagaaggctatgtcattgatttcttgaatgatcaattacaacattccaattgcctatttataggctcaagtcaccaacctctcaatggtggtgaatgtttctacattactttaggtctttctagagttttcatgatagattagtatcatgatagttctagattcttctatcttatacatacacttatgattctagattgttctaccatattcatacacgttataggtctagattgttctatcatattcatacacatta

SEQ ID NO: 14946 - DNA, 1153 bp, Glycine max
  Gm_smallRNAprecursor_7779
gcgcaacaagaggtatgttgtcttgtttgatgacgtatggaatggaaaattttgggatcacattgaatctgctgtaattgataataaaaatggaagtaggatattaatcacaaccagggatgagaaggttgcagaatattgtaggaaatcatcatttgttgaggtgcataagctagaaaaacctttaactgaagaagaatctttgaaattgttctgtaagaaggcatttcagtatagttccgatggagattgtccagaagaacttaaagatatatctcttgaaattgttagaaagtgtaaaggtttacctctagcaatagtggccattggtggtcttttgcctcaaaaagatgaaagtgcacctgaatggggacaattttgtcgagatctaagtttagacttggagaggaattctgagttaaatagtataacaaaaattttaggtttaagttatgatgatttgccattcaatctcagatcatgtttattgtatttcggaatgtatccggaggactatgaagttcaatctgatagactgattagacagtggatagctgaagggtttgtcaaacatgaaaccggaaaaacattggaagaagttgggcaacaatatttatcaaggttggtccgtagaagtttggtgcaagtatcctcatttagaattgatggcaaagttaaaaggtgtcgtgttcatgacttaatacacgacatgatccttagaaaagtcaaggatacaaggttttgtcagtatattgacgggcgtgatcaatttgtatcaagtaagattgtttgacgcctgacaattgcaaccgatgattttgttggtagttgattagatgatagttgataattttagagaattgttttagaaagaaggctatgtcattgatttcttgaatgatcaattacaacattccaattgcctatttataggctcaagtcaccaacctctcaatggtggtgaatgtttctacattactttaggtctttctagagttttcatgatagattagtatcatgatagttctagattcttctatcttatacatacacttatgattctagattgttctaccatattcatacacgttataggtctagattgttctatcatattcatacacattatagttctaggatattctactatttt

SEQ ID NO: 14947 - DNA, 1065 bp, Glycine max
  Gm_smallRNAprecursor_7780
tgaatctgctgtaattgataataaaaatggaagtaggatattaatcacaaccagggatgagaaggttgcagaatattgtaggaaatcatcatttgttgaggtgcataagctagaaaaacctttaactgaagaagaatctttgaaattgttctgtaagaaggcatttcagtatagttccgatggagattgtccagaagaacttaaagatatatctcttgaaattgttagaaagtgtaaaggtttacctctagcaatagtggccattggtggtcttttgcctcaaaaagatgaaagtgcacctgaatggggacaattttgtcgagatctaagtttagacttggagaggaattctgagttaaatagtataacaaaaattttaggtttaagttatgatgatttgccattcaatctcagatcatgtttattgtatttcggaatgtatccggaggactatgaagttcaatctgatagactgattagacagtggatagctgaagggtttgtcaaacatgaaaccggaaaaacattggaagaagttgggcaacaatatttatcaaggttggtccgtagaagtttggtgcaagtatcctcatttagaattgatggcaaagttaaaaggtgtcgtgttcatgacttaatacacgacatgatccttagaaaagtcaaggatacaaggttttgtcagtatattgacgggcgtgatcaatttgtatcaagtaagattgtttgacgcctgacaattgcaaccgatgattttgttggtagttgattagatgatagttgataattttagagaattgttttagaaagaaggctatgtcattgatttcttgaatgatcaattacaacattccaattgcctatttataggctcaagtcaccaacctctcaatggtggtgaatgtttctacattactttaggtctttctagagttttcatgatagattagtatcatgatagttctagattcttctatcttatacatacacttatgattctagattgttctaccatattcatacacgttataggtctagattgttctatcatattcatacacatta

SEQ ID NO: 14948 - DNA, 1065 bp, Glycine max
  Gm_smallRNAprecursor_7781
tgaatctgctgtaattgataataaaaatggaagtaggattttaatcacaaccagggatgagaaggttgcgggatattgtaagaaatcttcttttgttgaggtgcttaagctagaagagccattaactgaagaagaatcattgaaattgttttctatgaaggcatttcagtatagttccgatggagattgtccagaagaacttaaagatatatctctagaaattgttagaaagtgtaaaggtttacctctagcaatagtggccattggtggtcttttgtctcaaaaagatgaaagtgcacctgaatggggacaatttagtcgagatcaatgtttagacttggagaggaattctgagttaaatagtataacaaaaattttaggtttaagttatgatgatttgccgatcaatctcagatcatgtttattgtatttcggaatgtatccggaggactatgaaattaaatctgatagattgattagacagtggatagccgaagggtttgtcaaacatgaaaccggaaaaacattggaagaagttgggcaacaatatttatcagggttggtccgtagaagtttggtgcaagtatcctcatttagaattgatggcaaagttaaaaggtgtcgtgttcatgacttaatacacgacatgatccttagaaaagtgaaggatacagggttttgtcagtatattgatgggcgtgatcaatcggtatcaagtaagattgttcgacgcctgacaattgcaaccgatgattttagtggacgtataggaagctcacccattcggtcaatttttattagcacaggagaagatgaagaagtatctgaacacttagtaaacaaaatccctacaaattacatgctattgaaggtacttgattttgaaggttctggtttacgttatgttcctgaaaatttggggaatttatgccacttgaagtatttaagcttccggtatacagggataaaaagtctaccaaaatccattggtaagctcctgaatttggagaccttggatattagagacacaggtgtgtctgagatgccagaggagattagtaagct

SEQ ID NO: 14949 - DNA, 1065 bp, Glycine max
  Gm_smallRNAprecursor_7782
atctgctgtgatggataataaaaatggaagtaggattttaatcacaaccagggatgagaaggttgcgggatattgtaagaaatcatcatttgttgaggtgcataagctagaaaaaccattaactgaagaagaatcattgaaattgtttctaagaaggcatttcagtatagttccgatggagattgtccagaagaacttaaagatatatctcttgaaattgttagaaagtgtaaaggtttacctctagcaatagtggccattggtggtcttttgtctcaaaaagatgaaagtgcacctgaatggggacagtttagtcgagatctaagtttagacatacatggagaggaattctgagttaaatagtataacaaaaattttaggtttaagttatgatgatttgccgatcaatctcagatcatgtttattgtatttcggaatgtatccggaggactatgaaattaaatctgatagattgattagacagtggatagctgaagggtttgtcaaacatgaaaccggaaaaacattggaagaagttgggcaacaatatttatcagggttggtccgtagaagtttggtgcaagtatcctcatttagaattgatggcaaagttaaaaggtgtcgtgttcatgacttaatacacgacatgatccttagaaaagtcaaggatacagggttttgtcagtatattgacgggcgtgatcaatctgttcgatgcctgaaaattgcaaccgatgattttagtggaagtataggaagctcacccattcggtcaatttttattagattaataagcttaaaaagctacgtcatcttctgagtggctatatatcttcaattcaatggaaggatattggaggcatgacatccctacaagagataccaccagtgattatagatgatgatggagtggtcattaaagaggtaggaaagctaaagcagttaagggaactgttggtgctagattttaggggaaaacacgaaaagacttaatttgtgttccttaataaatgagaagccactcttggagaaactacttattgaaagagctgatgtgagtgaagt

SEQ ID NO: 14950 - DNA, 1085 bp, Glycine max
  Gm_smallRNAprecursor_7783
atgccacaaacattgtcatgaaggtacaagttgatgattcctggctatggcataaaagatttggccacttcaacacacatgcctcgaagttgttacaggagaagaacatgatgagagatcttccaagcataaaggagaacaatgaagtgtgtgaaggatgtctccttggtaagcaacaccaatttcctttctcaacaagtggagcatggagagcgaaagatctattggagctgatacatacgaacgtctatggaccaatgagggcgccatcacatgagaacaacaggtacttcatactcttcattgatgacttctctagaatgacatgggtatattttctaaaagaaaaatcagaagtctttggagtattcaaaaagttcaaggcccttgctgaaaatcaaagtggaaaacggataaaagtactaagaagtgattgcggcaaagagtacacctctgccagtttgaaagattttgtgaggatgaaggcattgagcaaaaacttacagtcgcatattctcctcaacaaaatagagtgttcgagagaaagaatcacatagttatggaaatggctagatcgatgctcaaggagaagggactacctaacacattctgggctgaagcagtctacactgctgtttacatactcaacagatgtccaactaagattgtaaaagataagactccaattggcgcttggaacgggaagaagccatcagcaaagcacctaagggtctttggatctatatgctacattcatattccaaacgtgaagaggcacaagcttgaagacaagactatacgaggtatcttccttgggtatagcaatatctctaagggctaccgtgtctacaacttgcaaactaagaaactcgtcatcagtcgagatattgaagttgatgagtatgcttcttggaattgggatgaagaaaaagtggagaagaacgttcttatacccgctcaactacctcatgaagaagctgaggaagaagacccaggtgaaccaccttcacctccaccacaacaacaagatcaagaactatcatcaccagagtctactccaagacgagtaagatctttggtggaca

SEQ ID NO: 14951 - DNA, 1128 bp, Glycine max
  Gm_smallRNAprecursor_7784
gcgcaacaagaggtatgttgtcttgtttgatgacatatggaatgaaaaattttgggatcacattgaatctgctgtaattgataataaaaatggaagtaggatattaatcacaaccagggatgagaaggttgcagaatattgtaggaaatcatcatttgttgaggtgcataagctagaaaaacctttaactgaagaagaatctttgaaattgttctgtatgaaggcatttcagtatagttccgatggagattgtccagaagaacttaaagatgtatctcttgaaattgttagaaagtgtaaaggtttacctctagcaatagtggccattggtggtcttttgtctcaaaaagatgaaagtgcacctgaatggggacagtttagtcgagatctaagtttagacttggagaggaattctgagttaaatagtataacaaaaattttaggtttaagttatgatgatttgccgatcaatctcagatcatgtttactgtatttcggaatgtatccggaggactatgaagttaaatctgatagattgattagacagtggatagctgaagggtttgtcaaacatgaaaccggaaaaacattggaagaagttgggcaacaatatttatcagggttggtccgtagaagtttggtgcaagtatcctcatttagaattgatggcaaagttaaaaggtgtcatgttcatgacttaatacacgacatgatccttagaaaagtcaaggatacaggattttgtcagtatattgacgggcctgatcaatctgtatcaagtaagattgttcgacgcctgacaattgcaaccgatgattttagtggaagtataggaagctcacccattcggtcaattcttatcatgacaggaaagtatgaaaaattatctcaagacttggtaaacaaattccctacaaattacatggtactgaaggtacttgattttgaaggttctggtttacgttatgttcctgaaaatttggggaatttatgctacttgaagtatttaagcttccggtatacatggataacaagtctaccaaaatccattggcaagctccagaatttggagaccttggatataagagacacaagtgtgtctgagatgccagaggagattagtaagct

SEQ ID NO: 14952 - DNA, 1153 bp, Glycine max
  Gm_smallRNAprecursor_7785
gcgcaacaagaggtatgttgtcttgtttgatgacatatggaatgaaaaattttgggatcacattgaatctgctgtaattgataataaaaatggaagtaggatattaatcacaaccagggatgagaaggttgcagaatattgtaggaaatcatcatttgttgaggtgcataagctagaaaaacctttaactgaagaagaatctttgaaattgttctgtatgaaggcatttcagtatagttccgatggagattgtccagaagaacttaaagatgtatctcttgaaattgttagaaagtgtaaaggtttacctctagcaatagtggccattggtggtcttttgtctcaaaaagatgaaagtgcacctgaatggggacagtttagtcgagatctaagtttagacttggagaggaattctgagttaaatagtataacaaaaattttaggtttaagttatgatgatttgccgatcaatctcagatcatgtttactgtatttcggaatgtatccggaggactatgaagttaaatctgatagattgattagacagtggatagctgaagggtttgtcaaacatgaaaccggaaaaacattggaagaagttgggcaacaatatttatcagggttggtccgtagaagtttggtgcaagtatcctcatttagaattgatggcaaagttaaaaggtgtcatgttcatgacttaatacacgacatgatccttagaaaagtcaaggatacaggattttgtcagtatattgacgggcctgatcaatctgtatcaagtaagattgttcgacgcctgacaattgcaaccgatgattttagtggaagtataggaagctcacccattcggtcaattcttatcatgacaggaaagtatgaaaaattatctcaagacttggtaaacaaattccctacaaattacatggtactgaaggtacttgattttgaaggttctggtttacgttatgttcctgaaaatttggggaatttatgctacttgaagtatttaagcttccggtatacatggataacaagtctaccaaaatccattggcaagctccagaatttggagaccttggatataagagacacaagtgtgtctgagatgccagaggagattagtaagcttaaaaagctacgtcatcttctggct

SEQ ID NO: 14953 - DNA, 1065 bp, Glycine max
  Gm_smallRNAprecursor_7786
tgaatctgctgtaattgataataaaaatggaagtaggatattaatcacaaccagggatgagaaggttgcagaatattgtaggaaatcatcatttgttgaggtgcataagctagaaaaacctttaactgaagaagaatctttgaaattgttctgtatgaaggcatttcagtatagttccgatggagattgtccagaagaacttaaagatgtatctcttgaaattgttagaaagtgtaaaggtttacctctagcaatagtggccattggtggtcttttgtctcaaaaagatgaaagtgcacctgaatggggacagtttagtcgagatctaagtttagacttggagaggaattctgagttaaatagtataacaaaaattttaggtttaagttatgatgatttgccgatcaatctcagatcatgtttactgtatttcggaatgtatccggaggactatgaagttaaatctgatagattgattagacagtggatagctgaagggtttgtcaaacatgaaaccggaaaaacattggaagaagttgggcaacaatatttatcagggttggtccgtagaagtttggtgcaagtatcctcatttagaattgatggcaaagttaaaaggtgtcatgttcatgacttaatacacgacatgatccttagaaaagtcaaggatacaggattttgtcagtatattgacgggcctgatcaatctgtatcaagtaagattgttcgacgcctgacaattgcaaccgatgattttagtggaagtataggaagctcacccattcggtcaattcttatcatgacaggaaagtatgaaaaattatctcaagacttggtaaacaaattccctacaaattacatggtactgaaggtacttgattttgaaggttctggtttacgttatgttcctgaaaatttggggaatttatgctacttgaagtatttaagcttccggtatacatggataacaagtctaccaaaatccattggcaagctccagaatttggagaccttggatataagagacacaagtgtgtctgagatgccagaggagattagtaagct

SEQ ID NO: 14954 - DNA, 1128 bp, Glycine max
  Gm_smallRNAprecursor_7787
gcacaacaagaggtatgttgtcttgtttgatgacgtatggaatggaaaattttgggatcacattgaatctgctgtaattgataataaaaatggaagtaggatattaatcacaaccagggatgagaaggttgcagaatattgtaggaaatcatcatttgttgaggtgcataagctagaaaaacctttaactgaagaagaatctttgaaattgttctgtaagaaggcatttcagtatagttccgatggagattgtccagaagaacttaaagatatatctcttgaaattgttagaaagtgtaaagttttacctctagcaatagtggccattggtggtcttttgtctcaaaaagatgaaagtgcacctgaatggggacagtttagtcgagatctaagtttagacttggagaggaattctgagttaaatagtataacaaaaattttaggtttaagttatgatgatttgccaatcaatctcagatcatgtttattgtatttcggaatgtatccggaggactatgaagttgaatctgatagattgattagacagtggatagctgaagggtttgtcaaacatgaaacaggaaaatctttgaaagaagttgggcaacaatatttatcagggttggtccgtagaagtttggtgcaagtatcctcacttagaattgatggcaaagttaataggtgtcttgttcatgacttaatacacgacatgatccttagaaaagtcaaggataccggattttgtcagtatattgacgggcctgatcaatctgtatcaagtaagattgttcgacgcctgacaattgcaaccgatgattttagtggaagtataggaagctcacccattcggtcaattcttatcatgacaggaaagtatgaaaaattatctcaagcacaatcagcttttgaacaccttaaggcagctctgtcctcagctccggtactcaccttaccaaattttcagttcccattcacggtggagacggacgcctccgacgtcggaatgggtgcagttctttcttaatgcggccaccctattgcgtatttcaacaaacctttcagccctaagcttctccgcgcctccacatacattcgagagctgttcacaatcactgccgcaattaaaaa

SEQ ID NO: 14955 - DNA, 1153 bp, Glycine max
  Gm_smallRNAprecursor_7788
gcacaacaagaggtatgttgtcttgtttgatgacgtatggaatggaaaattttgggatcacattgaatctgctgtaattgataataaaaatggaagtaggatattaatcacaaccagggatgagaaggttgcagaatattgtaggaaatcatcatttgttgaggtgcataagctagaaaaacctttaactgaagaagaatctttgaaattgttctgtaagaaggcatttcagtatagttccgatggagattgtccagaagaacttaaagatatatctcttgaaattgttagaaagtgtaaagttttacctctagcaatagtggccattggtggtcttttgtctcaaaaagatgaaagtgcacctgaatggggacagtttagtcgagatctaagtttagacttggagaggaattctgagttaaatagtataacaaaaattttaggtttaagttatgatgatttgccaatcaatctcagatcatgtttattgtatttcggaatgtatccggaggactatgaagttgaatctgatagattgattagacagtggatagctgaagggtttgtcaaacatgaaacaggaaaatctttgaaagaagttgggcaacaatatttatcagggttggtccgtagaagtttggtgcaagtatcctcacttagaattgatggcaaagttaataggtgtcttgttcatgacttaatacacgacatgatccttagaaaagtcaaggataccggattttgtcagtatattgacgggcctgatcaatctgtatcaagtaagattgttcgacgcctgacaattgcaaccgatgattttagtggaagtataggaagctcacccattcggtcaattcttatcatgacaggaaagtatgaaaaattatctcaagcacaatcagcttttgaacaccttaaggcagctctgtcctcagctccggtactcaccttaccaaattttcagttcccattcacggtggagacggacgcctccgacgtcggaatgggtgcagttctttcttaatgcggccaccctattgcgtatttcaacaaacctttcagccctaagcttctccgcgcctccacatacattcgagagctgttcacaatcactgccgcaattaaaaaatggaaccaataccttctcggtcaa

SEQ ID NO: 14956 - DNA, 1128 bp, Glycine max
  Gm_smallRNAprecursor_7789
gcgcaacaagaggtatgttgtcttgtttgatgacgtatggaatgaaaaattttgggatcacattgaatctgctgtaattgataataaaaatggaagtaggatattaatcacaaccagggatgagaaggttgcagaatattgtaggaaatcatcatttgttgaggtgcataagctagaaaaacctttaactgaagaagaatctttgaaattgttctgtaagaaggcatttcagtatagttccgatggagattgtccagaagaacttaaagatatatctcttgaaattgttagaaagtgtaaaggtttacctctagcaatagtggccattggtggtcttttgtctcaaaaagatgaaagtgcacctgaatggggacagtttagtcgagatctaagtttagacttggagaggaattctgagttaaatagtataacaaaaattttaggtttaagttatgatgatttgccgatcaatctcagatcatgtttattgtatttcggaatgtatccggaggactatgaagttacatctgatagattgattagacagtggatagctgaagggtttgtcaaacatgaaaccggaaaaacattggaagaagttgggcaacaatatttatcagggttggtccgtagaagtttggtgcaagtatcctcatttagaattgatggcaaagttaaaaggtgtcatgttcatgacttaatacacgacatgatccttagaaaagtcaaggatacaggattttgtcagtatattgacgggcctgatcaatctgtatcaagtaagattgttcgacgcctgacaattgcaaccgatgattttagtggaagtataggaagctcacccattcggtcaattcttatcatgacaggaaagtatgaaaaattatctcaagacttggtaaacaaattccctacaaattacatggtactgaaggtacttgattttgaaggttctggtttacgttatgttcctgaaaatttggggaatttatgctacttgaagtatttaagcttccggtatacatggataacaagtctaccaaaatccattggcaagctccagaatttggagaccttggatataagagacacaagggtgtctaagatgccagaggagattcgtaagct

SEQ ID NO: 14957 - DNA, 1153 bp, Glycine max
  Gm_smallRNAprecursor_7790
gcgcaacaagaggtatgttgtcttgtttgatgacgtatggaatgaaaaattttgggatcacattgaatctgctgtaattgataataaaaatggaagtaggatattaatcacaaccagggatgagaaggttgcagaatattgtaggaaatcatcatttgttgaggtgcataagctagaaaaacctttaactgaagaagaatctttgaaattgttctgtaagaaggcatttcagtatagttccgatggagattgtccagaagaacttaaagatatatctcttgaaattgttagaaagtgtaaaggtttacctctagcaatagtggccattggtggtcttttgtctcaaaaagatgaaagtgcacctgaatggggacagtttagtcgagatctaagtttagacttggagaggaattctgagttaaatagtataacaaaaattttaggtttaagttatgatgatttgccgatcaatctcagatcatgtttattgtatttcggaatgtatccggaggactatgaagttacatctgatagattgattagacagtggatagctgaagggtttgtcaaacatgaaaccggaaaaacattggaagaagttgggcaacaatatttatcagggttggtccgtagaagtttggtgcaagtatcctcatttagaattgatggcaaagttaaaaggtgtcatgttcatgacttaatacacgacatgatccttagaaaagtcaaggatacaggattttgtcagtatattgacgggcctgatcaatctgtatcaagtaagattgttcgacgcctgacaattgcaaccgatgattttagtggaagtataggaagctcacccattcggtcaattcttatcatgacaggaaagtatgaaaaattatctcaagacttggtaaacaaattccctacaaattacatggtactgaaggtacttgattttgaaggttctggtttacgttatgttcctgaaaatttggggaatttatgctacttgaagtatttaagcttccggtatacatggataacaagtctaccaaaatccattggcaagctccagaatttggagaccttggatataagagacacaagggtgtctaagatgccagaggagattcgtaagcttactaagctacgtcagcttctgtct

SEQ ID NO: 14958 - DNA, 1065 bp, Glycine max
  Gm_smallRNAprecursor_7791
tgaatctgctgtaattgataataaaaatggaagtaggatattaatcacaaccagggatgagaaggttgcagaatattgtaggaaatcatcatttgttgaggtgcataagctagaaaaacctttaactgaagaagaatctttgaaattgttctgtaagaaggcatttcagtatagttccgatggagattgtccagaagaacttaaagatatatctcttgaaattgttagaaagtgtaaaggtttacctctagcaatagtggccattggtggtcttttgtctcaaaaagatgaaagtgcacctgaatggggacagtttagtcgagatctaagtttagacttggagaggaattctgagttaaatagtataacaaaaattttaggtttaagttatgatgatttgccgatcaatctcagatcatgtttattgtatttcggaatgtatccggaggactatgaagttacatctgatagattgattagacagtggatagctgaagggtttgtcaaacatgaaaccggaaaaacattggaagaagttgggcaacaatatttatcagggttggtccgtagaagtttggtgcaagtatcctcatttagaattgatggcaaagttaaaaggtgtcatgttcatgacttaatacacgacatgatccttagaaaagtcaaggatacaggattttgtcagtatattgacgggcctgatcaatctgtatcaagtaagattgttcgacgcctgacaattgcaaccgatgattttagtggaagtataggaagctcacccattcggtcaattcttatcatgacaggaaagtatgaaaaattatctcaagacttggtaaacaaattccctacaaattacatggtactgaaggtacttgattttgaaggttctggtttacgttatgttcctgaaaatttggggaatttatgctacttgaagtatttaagcttccggtatacatggataacaagtctaccaaaatccattggcaagctccagaatttggagaccttggatataagagacacaagggtgtctaagatgccagaggagattcgtaagct

SEQ ID NO: 14959 - DNA, 1085 bp, Glycine max
  Gm_smallRNAprecursor_7792
tgcaacaaacattgccatgaaggtacaagttgatgattcatggctatggcatcgaagatttggccatttcaacacacatgccttgaagttgttacatgagaagaacatgatgagagatcttccaagcataaaggagaacaatgaagtgtgtgaaggatgtctccttggtaagcaacaccgatttcctttctcaacaagtggagcatggagagcaaaagatctattagagctgatacatacggacacttgtggaccaatgaggacgccatcacatgggaacaacaggtacttcatactcttcattgatgacttctctagaatgacatgggtatattttctaaaagaaaaatcagaagtccttggagtattcaaaaatttcaaggcccttgttgaaaatcaaagtggaaaacggataaaagtactaagaagtgatcgcggcaaagagtacacctctcgcgagtttgaaagattttgtgaggatgaaggcattgagtgacaacttacagtcgcatattctcctcaacaaaatggagtgtccgagagaaagaatcgcacagttatggagatggctagatcgatgctcaaggagaagggactacctaacacattctgggctgaagcagtctacactgatgtttacatactcaacagatgtccaactaagtctgtaaaagacaagactccaattgaagcttggaacgggaagaagccatcagcaaagcatctaagggtctttggatctatatgctacattcatattccagacgtgaagagccacaagcttgaagacaagactatacgaggtatcttccttgggtatagcaatatctctaagggctaccgtgtctacaacttgcaaactaagaaactcgtcatcagccgagatgttgaagttgatgagtacgcttcttggaattgggatgaagaaaaagtggagaagaacgttcttatacccactcaactacctcaagaagaagatgaggaagaagacccaggtgaaccaccttcacctccaccacaacaacaagatcaagaactatcatcaccaaagtctactccaagacgagtaagatctttggtggaca

SEQ ID NO: 14960 - DNA, 1106 bp, Glycine max
  Gm_smallRNAprecursor_7793
gagtataaagtccgttgtcgctaacgaagcacttggttgacaacctccccacggttatcatgtctactgcgtgtgacacatagcaagcaacttcaatcggaaattcaataatgccaaacaaaaagaaatgttgaagaaattgggtaagatttcatatttgatggtcacgtttatttaactttcatatatacttaaaattgttattcataactaattttatgcagcctacactccttgcaagcacatttttgatcaaaagttagaaaaatttcgtgaattgagtccagccataacaacatggatttatcgcatttcaaaggaaaaatagacgatggcttatgatagagaaggatgtcgatatgaccacatgacaaccaacctctcagaaagtattaataaggctttgaaggattgtcgcaagattcccataacaacattggtcaaatcaacgtacagtaggtgtcgaaagtactttgttgagcgtagacatggcaatggggcgggtcgggtacgggtattgtcttcccaatcccttaccccgactcctcaacatatccccatacccgtacccgatacccgacgggtttgagtttattgtcccatccccatacccgtcgggtacccgttgggtatcgggtatccccaaccctgttccacacaccatttagaaaaatatttttttttgtaaaagaaatattaaaaatttgattttagaaaaaaataaattgattgttaaacaattatttttaactgcttatatatcaataaatttattataacgtgtgtgtctacataaatagttaagaaaataatattaaattatgtaaaaattctaaaataaaattaactagtaataaaaattatgtcttttgattaaattatgcaaaaattctaaagattttaagtggcggggcgggttcgggtttggggtcgggacgggtctaataatctcatacccgtacccgtacccgacttttggttatcggggaaaacccgaacccgaactcattcctgatcaactcgggtattacccatcaaagtcgggacagattcggacgggttttcttaccatgtctagttgagcgtggccgccaagcctagcgaca

SEQ ID NO: 14961 - DNA, 1103 bp, Glycine max
  Gm_smallRNAprecursor_7794
ttttttttaattctctggtattggcctatgaccaggattttgtcaagagattttttcctagtactttcttggtttcctttgtggctttggtatgtttatgtcaattagcttagcatttgattcatctatgtccgttttaccaagtatctaatatgagccggaaagtatctttaatgagtattatttgaacaacataatgttagagctgatgcattaccctatcttattataaagtattacaattattatatgaaaagtctctttaagataattttttattgtttttatttttttagtgacattaaattgaaacatgttattctcttttatattctttttttccatcgttgtttggtccttgtgtttgctttgttgctttcttttttggaactgaggtcttcatttagatctgtattaattgtgccccatttagatgttgtttttgtcatttcataataatgcttttattattttaaattattttttttccaaaataaaattctaagacggtcgttagctaatgaccgtcttagaaagatacatttctaagacggtgattagcttaacaacgtcttagaaaggcactttctaagacattgcttagctaacgaccgtcttagaaagttacctttcaaagacgttgcttagctaacgtacctttctaagacggtgcttaactaaccaccgttttagaaggcaacgtttttctaagacggattttatagagtcgtcgtcaaaagttttggctttcaacgacgttagattcaaagataggtgacaaccgtctttgaatgctcttttcaaccgatgtagaaagcgcattttttagtagtgtttcaattagttaattaattaataatcccttaaaccaaatagcacttaccggaatagtgatggttaataactacttatctttcttacgctcacgtgagcgaccgaaggcgtagttggcagtttccaaatttcaattttttcaacacctccgtgtgccacgttatctgacagcaccgtaatagactttgcagaccaaataggcaatcatggacaaagaaacaaccttcttgagctgatcttgctacatcttttttttttctttgctcctt

SEQ ID NO: 14962 - DNA, 1054 bp, Glycine max
  Gm_smallRNAprecursor_7795
cctaatttagtttgtcaggcggaatttcaaatccctgaagcttctgacagtaggacaaagaagaaaattcttcagattgtcggcgagcgctggaggcagtttaaatctgacttgactaggaaatgggcacttgcagtcgacaaggacggtgcggacgacattgtctgtgaaaaatatggcattagcaaggagaaatggactcagttttgtcagacccgcagagacccctcatgggaggtatgtactttgtcattttagttgttttccacaacaaaatcacttcttataatttattgtaataatcattttcattaatgttaaacttttgtaggatgtacggaaaaaggcacaggcctcccaaaagcaaaacactgccccccacgtattgtctcgtgggggttatgaatatttagaagaaaagctcatggctgagaagacaaagaaaagactggaagaagctgcccagtcaggaagcactgagggcatcattgaccctccatctcccatcagacgccacgtgaaatggaagatggcccgcacgaagaaaactggacagatgacgtctgaggcagcaaaggaaatagctgacaggattgtaagtcatttttaattaataattgtaattatctttgtgtattttgtgaattccttggacaaatatgtgttcggtacaggattctttagacgagcaggcgtcacagggatcgttcatcccccatggacgtcaggatatcctgactgctgccattgggcgaccagagcaccctggccgtgttcgtgctgttggagccggtgtcaccataaagcaatactttggatcagcttcacgaacatcccgcagttcttcctccatgcctcttgaagacctagaacagctgacccaacaaatcagagaccaattggaggagtcaatcacagaaaaagtgactcgaaggatgatggaatcctttagccagatgcagtcccagtttcagtctcagatgcaatcacagggaattgcactacctccagagccagaggttggtccctcaggtccttgtgtcagcacaaagga

SEQ ID NO: 14963 - DNA, 1132 bp, Glycine max
  Gm_smallRNAprecursor_7796
tacaagattggtgctgaccactttggttccgactttgcaatggctcaaaggaaaacccattctcctagtaagaaacttttatcatactattttttttatgtattagtgttagaattcagaattctaagttatgctcttggttggtaattggtattgtagaatattggtggcgaatgtttgggtcacaaactccaaatttgcagaagctggctattaagattttgagtttgacttgcagtgcttcaggatgtgaaagaaattggagtgtgtttgagcaagtaattgtgacaaaactctaactatactttttaattttatttaattttgatgatcaagttatatttggagtatatttgagattgaaatcaacatttatttgttatgttgtagattcattccaaaaaaagaaataagcttgagcacaagaggttgcatgatttggtgtttgtcaaatacaaccaacaattgaagcaaagatataatgcaagagatgaaattgatccaatttctcttaatgatattgatgtatgcaatgaatggctcgtgggagagatggatcaagatgatgataatgatgctggaaatgatttggtatttgaagatgatgatgctctaaattgggcaactgtgtatcaggcttcgggggttggagagtgtaggatgtatactaggcggaaaaagcaaaaaacaagtgttgctgctgcccaaacttctaaaaaacaggcaatggttgttggatcttcatcaaggaagcaaaaagcagtccaagaaaatgatgaggatctagatgttgaggagaatattgatgttgaatctgaagaagaagaaatcatggtcaattttgaggcgtctgatggggaagagggagagggagatgctccattaccatatgataacaacgaagatgattatgttgggattggagaagatgattagagcctcaaccttcactttgcactttgcattatgtttttatcattttcttattttgaactctttaatgagtttatttggtgttggtacttgattattgtatgaacttatgaaacttttttagtttatttgaatgcaatcttttgtttttttcaatttcaatgagtttatatatatgttttttttttttttgtgtccg

SEQ ID NO: 14964 - DNA, 1092 bp, Glycine max
  Gm_smallRNAprecursor_7797
agtttgacttgcagtgcttcaggatgtgaaagaaattggagtgtgtttgagcaagtaattgtgacaaaactctaactatactttttaattttatttaattttgatgatcaagttatatttggagtatatttgagattgaaatcaacatttatttgttatgttgtagattcattccaaaaaaagaaataagcttgagcacaagaggttgcatgatttggtgtttgtcaaatacaaccaacaattgaagcaaagatataatgcaagagatgaaattgatccaatttctcttaatgatattgatgtatgcaatgaatggctcgtgggagagatggatcaagatgatgataatgatgctggaaatgatttggtatttgaagatgatgatgctctaaattgggcaactgtgtatcaggcttcgggggttggagagtgtaggatgtatactaggcggaaaaagcaaaaaacaagtgttgctgctgcccaaacttctaaaaaacaggcaatggttgttggatcttcatcaaggaagcaaaaagcagtccaagaaaatgatgaggatctagatgttgaggagaatattgatgttgaatctgaagaagaagaaatcatggtcaattttgaggcgtctgatggggaagagggagagggagatgctccattaccatatgataacaacgaagatgattatgttgggattggagaagatgattagagcctcaaccttcactttgcactttgcattatgtttttatcattttcttattttgaactctttaatgagtttatttggtgttggtacttgattattgtatgaacttatgaaacttttttagtttatttgaatgcaatcttttgtttttttcaatttcaatgagtttatatatatgttttttttttttttgtgtccgccatgacatccgccattttccgctacgccatccgccatatttttatggcggatttttgactttccgccatgaaccgccatccgccattaacaacattgcttaaaagtccatccctcttggaaagtgtcctcaatatgtataacccacatatccagtgttttaaataccagatagcggcgcagac

SEQ ID NO: 14965 - DNA, 1092 bp, Glycine max; identical to SEQ ID NO: 14964
  Gm_smallRNAprecursor_7798

SEQ ID NO: 14966 - DNA, 1043 bp, Glycine max
  Gm_smallRNAprecursor_7799
tgctcgtcagtgtacgctggaataatttctcgcacaagttaagccaaacaaaagatacccttctttcatcaatttctgaattgaaaaatgatcttaatcattgccttccttctttcatcaatatgaagttactttaaattttattttaatgaaggaatgacattcaacttctctgtcattttattccatacaatgatttaattcgatgccgtagtttataaaactatatatagtggttctttcataagtttttcatggagtcccaaaatctctcactacatactctcttcacccatcttagaagttagatcttccaatcttttggatgaattgttttgttggtagaatcattctggatttggaatttgcaaactcaaatacacaaggtagctcactatatattcaactattctggattttgtttgtacaggagagccttcaaagatgcaaaattttcaagtgttcaagtgttgacaactatttttagctttcaaaccccctatcttggatcacagccccattgcctatcatggggcttggagtggggcttgatccaagataggaagctggaaagcttgaaagtatgaactgcacgtggagaaaatatcatgtatctcaagtacgtaaagcatttggatgatgatgtaaaatctttgaaaaagttgtctcctgtgctgaggtatgtagaattaaaacaaatctaaaatcattcatccttctgtactgaggtatgtagaattaaaacaaatataaaatcattcatccttctgtgctgaggtatgtagaattaaaatagatctaaaaccattcatcctttgattggagcattaatagaagagaggtatatgtaagtctatatgttataaaatatgtttcatatatatttgttatctaagagcaatgcttagaaaagcagcttaatatacaaaatctttattcatccacagaaatcatattttctgaaattaaacttcttgataattatttagtatgtttaagacatttcccagtcccaccaactctcatgagaaaatcttagtgaa

SEQ ID NO: 14967 - DNA, 1188 bp, Glycine max
  Gm_smallRNAprecursor_7800
gttgtgtttgcattttgtgggtcaacaaacatctttatctttcgcctataccagaccatgtagtcagagttaaagctcaataggccctcttgtcggtgataagcgtcgaccctaaaagcatggcgattgttccactgatcaatcattggggcaaacaattgcctccaatttttgtcatgtttccctttcagtgttatgccgtgaatgttcaagggttgcgaaggagactctggaattggttgctgcattccaaattgtctcaatactctatccggttggtatcactcaataacttggaaacaaattagtggcaccaccgcgcaccacgcgacacttcctattacacaaatgggaggcaacaatgatataagagttgttgtgtaaggctcccacacaaacttcatataacaacatagttgtcagcattttagtaaaataacacatatcattttttattttacaaatacaataccatgttcttacctcatgacgtttcataatatccaacttgcgacgaaaaactctcacatcatcattgttgatatgttggtttccacgtcgcagccacctacaaagattaaaatttaatataccctaaaaccatttattcttttgaaataaaagacgtttttaaaaatgactaacctgtgccccagtggtttattttctacttgggaaggagtcctctttggagccaaggttggacatcgttcccatgcccacatttgtagtaagatgcatatacctccgattgatttagttttataatcggtggcactgcacatctctctgtatagaaaagcaagtacgacaggtccccatgcatatgtgctacagtcttcaaagtcacgtaaaaattgaatgtaccttagcgaaactttgttactgcttttgtcaacgaacaagacacctccaatgaatctcagtatccatgcacgggtaaaccttcgtacttgttcttcgtcatcgtggttatttatttgtgcaaaatggtgagccagccaacttaatttaactacactacctttaatttcaccttcttgtggtttgactcccaataattcctcgcataaattagcccaattaagatttgttggaccgattaatggtaaaccatccatatgtagacctaacaatacagagacgtcttgaagagtaatagtacactcttcgcatctcatgtgaaac

SEQ ID NO: 14968 - DNA, 1075 bp, Glycine max
  Gm_smallRNAprecursor_7801
tccagctgtgcaacaaatttcagtttgtggagcactttaaaatcatgtgtgtcacattgcaatctgcagcccaaattgctgccattcgcacactgctattacacctggagggtaaagccccattttgccccattttctgacttttcatcgtctccaagacatatttgcatttctggccattcccagcatttaccagtatttctggtcaccggagtctcttactacttcaatcatgcacttttggtgcagcccaaaatctcactctctgttgaccctgatcacatcttgtaggtcttgttctttttttgtcgcctgctgttctgttactcaaccctatactgtcctattcttttgactctgacttattaattaggaatgtctttgatttgaatattttttttatttatttagagtatttatatgagtacaatgttgttaatggcggatggcggttcatggcggaaagtcaaaaatctgccataaaaatatggcggatggcgtagcggaaaatggcggatgtcatggcggacaaaaaaaaaaagcatatatataaactcattgaaattgaaaaaaacaaaggattgcattcaaataaactaaaaaagtttgatgagttcatatatataaactcatttaaaagaggactgaacagaaaaaaaaaattgtggtgtcaaatagaaaaaaaaattaaaaatggtactgtcgaaagtaaaaggggggtgtcaaatagaaaaacggaaaaaaaagctgcagacagcaaaaaggggtgtcaagcagcaaaaacaaaaaaaagaaaaaagactttggcccacccaccagtataagtcgcagtcgcggttctggctgggtcgtcttctccgttcgcgttgccgtcattcacgccgtgcttgtcgccgccgttcgcgttgccgtgggcgatcgctgccgtgctcgtcgccgccgttcactccatgggtcatcgctggttgcaggggtcgcgctgtgttggagcttcgaggtcgagggttgcagctgcgttctgaaaggtgggggggggggggtcatggttttcattaagttttcgggtagggttggg

SEQ ID NO: 14969 - DNA, 1105 bp, Glycine max
  Gm_smallRNAprecursor_7802
ctgttttgtttggataacagttaaaatatattggaccttgtcctaggctggtttcgattgttccaattagggagtcttcaaattaattatccctaatgtctcttagacacattaaaactgttgcatctatacccatatcaattaagggcttgatggctacttctacacaaccgatgtgtagatatttatacttacggctatgttcataaattgaattttttgaaagcaaatgaaattcttcccctacatcttgtcctagaggaatattgttttctactgttttgattatgtaatcaaagttgtgtttgtcctttattgtttcaggaacgtatagttgatcctgagggatttctggaatgttccagtcatccatgttttgattgatatcttcgaatcggacttcctcatcgaagagattgtgttttggggcgacctcttgggtctggttgtcttgatcatttaataaattagagtttcttgaagaggataatgaggaggagtttgagcgaaaagagatacgggaaaaagatcgtaatagtctagacatgattataatattctctaatatctttgccctcatttggttccatagaaatatctccgtaagtaaatatgtcacaaaatttttcgggatctgaattatttttaagaaaaactcttttttttttgaaaaatagtttgaacggaaatcctatagccaccagtgtattatgtcttgatattttggttaaatagtacaccttagccttactgccctttatccaacacgggtcttactgctacagtaccattcaactaaaatattagactgctgtacttccaggaagtactgttcaaacacttactgtacaaatcaaagtaaaatattacatgtactatacaagactttagttccagatccataaaatttgttaacatatgtccttacagatagtattcctacttccccatcaggctctgtgaccaccattttacaaaagcgtgtctctgtaacggtggatattgcttgctgttttcagtttttccgtatctgtattgccatgaaaagatccatgacaaggcaaaactggaaaagtactttaaatctgccggaatacatgattcc

SEQ ID NO: 14970 - DNA, 1197 bp, Glycine max
  Gm_smallRNAprecursor_7803
agacacattaaaactgttgcatctatacccatatcaattaagggcttgatggctacttctacacaaccgatgtgtagatatttatacttacggctatgttcataaattgaattttttgaaagcaaatgaaattcttcccctacatcttgtcctagaggaatattgttttctactgttttgattatgtaatcaaagttgtgtttgtcctttattgtttcaggaacgtatagttgatcctgagggatttctggaatgttccagtcatccatgttttgattgatatcttcgaatcggacttcctcatcgaagagattgtgttttggggcgacctcttgggtctggttgtcttgatcatttaataaattagagtttcttgaagaggataatgaggaggagtttgagcgaaaagagatacgggaaaaagatcgtaatagtctagacatgattataatattctctaatatctttgccctcatttggttccatagaaatatctccgtaagtaaatatgtcacaaaatttttcgggatctgaattatttttaagaaaaactcttttttttttgaaaaatagtttgaacggaaatcctatagccaccagtgtattatgtcttgatattttggttaaatagtacaccttagccttactgccctttatccaacacgggtcttactgctacagtaccattcaactaaaatattagactgctgtacttccaggaagtactgttcaaacacttactgtacaaatcaaagtaaaatattacatgtactatacaagactttagttccagatccataaaatttgttaacatatgtccttacagatagtattcctacttccccatcaggctctgtgaccaccattttacaaaagcgtgtctctgtaacggtggatattgcttgctgttttcagtttttccgtatctgtattgccatgaaaagatccatgacaaggcaaaactggaaaagtactttaaatctgccggaatacatgattccttgctattatagagcttgttgaattgttggaatccctgttggacttcttctggaaatatttgtggaattggtccgaagtagttccaccattggaggaaccaatttggaaaattatacacagtattatttttgaagtaaatcagccatgaatgcttgaatttactattttgatgccagaacacattggtccaggcgt

SEQ ID NO: 14971 - DNA, 1250 bp, Glycine max
  Gm_smallRNAprecursor_7804
tgtgtttgtcctttattgtttcaggaacgtatagttgatcctgagggatttctggaatgttccagtcatccatgttttgattgatatcttcgaatcggacttcctcatcgaagagattgtgttttggggcgacctcttgggtctggttgtcttgatcatttaataaattagagtttcttgaagaggataatgaggaggagtttgagcgaaaagagatacgggaaaaagatcgtaatagtctagacatgattataatattctctaatatctttgccctcatttggttccatagaaatatctccgtaagtaaatatgtcacaaaatttttcgggatctgaattatttttaagaaaaactcttttttttttgaaaaatagtttgaacggaaatcctatagccaccagtgtattatgtcttgatattttggttaaatagtacaccttagccttactgccctttatccaacacgggtcttactgctacagtaccattcaactaaaatattagactgctgtacttccaggaagtactgttcaaacacttactgtacaaatcaaagtaaaatattacatgtactatacaagactttagttccagatccataaaatttgttaacatatgtccttacagatagtattcctacttccccatcaggctctgtgaccaccattttacaaaagcgtgtctctgtaacggtggatattgcttgctgttttcagtttttccgtatctgtattgccatgaaaagatccatgacaaggcaaaactggaaaagtactttaaatctgccggaatacatgattccttgctattatagagcttgttgaattgttggaatccctgttggacttcttctggaaatatttgtggaattggtccgaagtagttccaccattggaggaaccaatttggaaaattatacacagtattatttttgaagtaaatcagccatgaatgcttgaatttactattttgatgccagaacacattggtccaggcgtcaatgtaatcccaataattatatcctgtagggtcaaatggtgcagaaaactttttgggttggtttaagtttgagccataatgtcggggctgcataaccttcaagatttggattgtggaatgggtatttagatttggatctttggggtctttgaagtgtttaatagatactgagtttgtatctattagaatgaattcgtagaatttgcgggttttgtttgtggctattggcctgtaatggaatcctgggg

SEQ ID NO: 14972 - DNA, 1032 bp, Glycine max
  Gm_smallRNAprecursor_7805
cgggaaaaagatcgtaatagtctagacatgattataatattctctaatatctttgccctcatttggttccatagaaatatctccgtaagtaaatatgtcacaaaatttttcgggatctgaattatttttaagaaaaactcttttttttttgaaaaatagtttgaacggaaatcctatagccaccagtgtattatgtcttgatattttggttaaatagtacaccttagccttactgccctttatccaacacgggtcttactgctacagtaccattcaactaaaatattagactgctgtacttccaggaagtactgttcaaacacttactgtacaaatcaaagtaaaatattacatgtactatacaagactttagttccagatccataaaatttgttaacatatgtccttacagatagtattcctacttccccatcaggctctgtgaccaccattttacaaaagcgtgtctctgtaacggtggatattgcttgctgttttcagtttttccgtatctgtattgccatgaaaagatccatgacaaggcaaaactggaaaagtactttaaatctgccggaatacatgattccttgctattatagagcttgttgaattgttggaatccctgttggacttcttctggaaatatttgtggaattggtccgaagtagttccaccattggaggaaccaatttggaaaattatacacagtattatttttgaagtaaatcagccatgaatgcttgaatttactattttgatgccagaacacattggtccaggcgtcaatgtaatcccaataattatatcctgtagggtcaaatggtgcagaaaactttttgggttggtttaagtttgagccataatgtcggggctgcataaccttcaagatttggattgtggaatgggtatttagatttggatctttggggtctttgaagtgtttaatagatactgagtttgtatctattagaatgaattcgtagaatttgcgggttttgtttgtggctattggcctgtaatggaatcctgggg

SEQ ID NO: 14973 - DNA, 1069 bp, Glycine max
  Gm_smallRNAprecursor_7806
ttataatattctctaatatctttgccctcatttggttccatagaaatatctccgtaagtaaatatgtcacaaaatttttcgggatctgaattatttttaagaaaaactcttttttttttgaaaaatagtttgaacggaaatcctatagccaccagtgtattatgtcttgatattttggttaaatagtacaccttagccttactgccctttatccaacacgggtcttactgctacagtaccattcaactaaaatattagactgctgtacttccaggaagtactgttcaaacacttactgtacaaatcaaagtaaaatattacatgtactatacaagactttagttccagatccataaaatttgttaacatatgtccttacagatagtattcctacttccccatcaggctctgtgaccaccattttacaaaagcgtgtctctgtaacggtggatattgcttgctgttttcagtttttccgtatctgtattgccatgaaaagatccatgacaaggcaaaactggaaaagtactttaaatctgccggaatacatgattccttgctattatagagcttgttgaattgttggaatccctgttggacttcttctggaaatatttgtggaattggtccgaagtagttccaccattggaggaaccaatttggaaaattatacacagtattatttttgaagtaaatcagccatgaatgcttgaatttactattttgatgccagaacacattggtccaggcgtcaatgtaatcccaataattatatcctgtagggtcaaatggtgcagaaaactttttgggttggtttaagtttgagccataatgtcggggctgcataaccttcaagatttggattgtggaatgggtatttagatttggatctttggggtctttgaagtgtttaatagatactgagtttgtatctattagaatgaattcgtagaatttgcgggttttgtttgtggctattggcctgtaatggaatcctggggggaatactttggcggttgctttgaaaggattcttgtcccagtattctggttccatttgtaaaacattg

SEQ ID NO: 14974 - DNA, 1067 bp, Glycine max
  Gm_smallRNAprecursor_7807
ataatattctctaatatctttgccctcatttggttccatagaaatatctccgtaagtaaatatgtcacaaaatttttcgggatctgaattatttttaagaaaaactcttttttttttgaaaaatagtttgaacggaaatcctatagccaccagtgtattatgtcttgatattttggttaaatagtacaccttagccttactgccctttatccaacacgggtcttactgctacagtaccattcaactaaaatattagactgctgtacttccaggaagtactgttcaaacacttactgtacaaatcaaagtaaaatattacatgtactatacaagactttagttccagatccataaaatttgttaacatatgtccttacagatagtattcctacttccccatcaggctctgtgaccaccattttacaaaagcgtgtctctgtaacggtggatattgcttgctgttttcagtttttccgtatctgtattgccatgaaaagatccatgacaaggcaaaactggaaaagtactttaaatctgccggaatacatgattccttgctattatagagcttgttgaattgttggaatccctgttggacttcttctggaaatatttgtggaattggtccgaagtagttccaccattggaggaaccaatttggaaaattatacacagtattatttttgaagtaaatcagccatgaatgcttgaatttactattttgatgccagaacacattggtccaggcgtcaatgtaatcccaataattatatcctgtagggtcaaatggtgcagaaaactttttgggttggtttaagtttgagccataatgtcggggctgcataaccttcaagatttggattgtggaatgggtatttagatttggatctttggggtctttgaagtgtttaatagatactgagtttgtatctattagaatgaattcgtagaatttgcgggttttgtttgtggctattggcctgtaatggaatcctggggggaatactttggcggttgctttgaaaggattcttgtcccagtattctggttccatttgtaaaacattg

SEQ ID NO: 14975 - DNA, 1067 bp, Glycine max; identical to SEQ ID NO: 14974
  Gm_smallRNAprecursor_7808

SEQ ID NO: 14976 - DNA, 1070 bp, Glycine max
  Gm_smallRNAprecursor_7809
atctgaattatttttaagaaaaactcttttttttttgaaaaatagtttgaacggaaatcctatagccaccagtgtattatgtcttgatattttggttaaatagtacaccttagccttactgccctttatccaacacgggtcttactgctacagtaccattcaactaaaatattagactgctgtacttccaggaagtactgttcaaacacttactgtacaaatcaaagtaaaatattacatgtactatacaagactttagttccagatccataaaatttgttaacatatgtccttacagatagtattcctacttccccatcaggctctgtgaccaccattttacaaaagcgtgtctctgtaacggtggatattgcttgctgttttcagtttttccgtatctgtattgccatgaaaagatccatgacaaggcaaaactggaaaagtactttaaatctgccggaatacatgattccttgctattatagagcttgttgaattgttggaatccctgttggacttcttctggaaatatttgtggaattggtccgaagtagttccaccattggaggaaccaatttggaaaattatacacagtattatttttgaagtaaatcagccatgaatgcttgaatttactattttgatgccagaacacattggtccaggcgtcaatgtaatcccaataattatatcctgtagggtcaaatggtgcagaaaactttttgggttggtttaagtttgagccataatgtcggggctgcataaccttcaagatttggattgtggaatgggtatttagatttggatctttggggtctttgaagtgtttaatagatactgagtttgtatctattagaatgaattcgtagaatttgcgggttttgtttgtggctattggcctgtaatggaatcctggggggaatactttggcggttgctttgaaaggattcttgtcccagtattctggttccatttgtaaaacattgaaaaatttgtttttttgaaatgtaactgttaccgggttgtgacgttgattcttgttgagttaacgattggcttggtttttggtt

SEQ ID NO: 14977 - DNA, 1097 bp, Glycine max
  Gm_smallRNAprecursor_7810
gaattcataatttgtgacaacttttaagagccacaatttgtaaaaacattagaataaaatatgaagacaaaaatgaatatgtgacagtgtttttttcctagttcccttcccttcttgcttctgcccatcccccactgatgctcacttgatctcctcccccaacatgaatgttgactcgcaaatcatgatcgacttggcctttggcacaaattgtaactcgaacaacccgcctgcgagtagatacttcactatggagtctagtttacgtgtgctcatagttgtttgtggtgaaatccttgttgttaaccttcttaatattacggtaaaattatatttttggtctttttaattattttcaatttcgatttaggtatctttttaaaattattgactcatttagtcattcaattatatttaatcctgtaaatgtggttctcaagtttaaatttaaacattgacggttacaaatgaatgttgactatcacgtgttacattctgattggatgatgattgtcacgtgtcacattctgattggacgttgacaacaagaatacattttcatcgtctacagagtcaacatccaatcagaacttgacacgtgacagtcatcatccaatcaaaatgtgacatgtggcagtcaacattcctttgtaatcatcaacgtctaaatatgaacaatcatattcacggaatcaaacataattagaggactaaatgcgttaataattttaaagggagatcaaaatcaaaattgaaaatagttagaaaaaccaaaaatacaattttgcctaatattgcattgtagttctccattgaatcttatttattgtaggtaaagttccatacagtgggatatttttagagtctgaaacaaaaattaaaaaaaaaaatctcgaaacaatgaaaataaattttttatgaatttataaatttaaccataaaaaaataatttacaaaacttatatattaagaagttgagtaaaatgaaattaataaattattttttcaaatttttaaaaagttgtgagatctatcgaaatggaacaatcacctaaagcacgtgtctaaaacggtggttctatatgatgtgttttatt

SEQ ID NO: 14978 - DNA, 1080 bp, Glycine max
  Gm_smallRNAprecursor_7811
ataatgaaagttgtggatgctacatttctattctctacaactacctcttccctcatcatgatttcacatttcttctttcactttttctcaatgtcttatttaaattatttttctaaaattattaaatatcaactaaacatattcatcataataatattcttaaatataatattcctaaaatgtttacattctcaagaataattcgtgattataatcatgagaaacaaacacatcgtaaaatttccatattcatgttgtttcttattttcattataaaagttacttgcatttgtatttgtactatccaagacctataaaatacacatgacatttcaagacacgtgtcagccttgtaataggatcatggacactcgacccttagcggtgaggctccctaactgacaagttatctctaacatattaatatcaatgttgttaatggcgaatggcggttcatggcggaaagtcaaaaatccgccataaaaatatggcggatggcgtagcggaaaatggcggatgtcatggcggacacaaaaaaaaaaaaaaacatatatataaactcattgaaattgaaaaaaacaaaggattgcattcaaataaactaaaaaagtttcatgagttcatacaataatcaagtaccaacaccaaataaactcattaaagagttcaaaataagaaaatgataaaaacataatgcaaagtgcaaagtgaaggttgaggctctaatcatcttctccaatcccaacataatcatcttcgttgttatcatatggtaatggagcatctccctctccctcttccccatcagacgcctcaaaattgaccatgatttcttcttcttcagattcaacatcaatattctcctcaacatctagatcctcatcattttcttggactgctttttgcttccttgatgaagatccaacaaccattgcctgttttttagaagtttgggcagcagcaacacttgttttttgctttttccgcctagtatacatcctacactctccaacccccgaagcctgatacacagttgcccaatttagagcatcatcatcttcaaataccaaatcatttcca

SEQ ID NO: 14979 - DNA, 1117 bp, Glycine max
  Gm_smallRNAprecursor_7812
atgttttaaactatcgaaggttacttatgatgtgtaaggattgaggatcactcaaatataatagtcaactacagttgctatgtaaacttgttggtaagtgttgtgactttggttcttactattacattagatgagcttgctaccggtagctggaggcttgtctgttgcagcactggttgttttggtggttctatttatagatttatttgctgcgtgtgcttatattgatcttgttatgttaattatatttgtcttcactggaaagttgacctggctttaatgtgctgtatgttaagtgcattctctgataggaaaaagcaaacaaactatatatgaatgggttatggtctaaagaagagaaattatatgtatatacatttgaaggatttagtgtttgattttagattctgtatacaagagaattatttttgggatctaaattattaaatatgcatcttcattaggagtgagaatatgctaggtcggcctacaggggcctacgacctgacctacataaagtctggattggcctgacctatttaattaaaaggttaggctcaggcttttttaaaagcctattaaattaaatagaccaagcttaggcttattaaaaagccttataagtctgataggtcggcctatatatatacttatattattttttggatacaattaatattattttttaaaaaattagcaaattccatccctataattaaataaaattttaattacaaggtgtgaatcaggtgttcctttatatttctcattatttttattagttttcttatttctgttaacagttccttttttattcctattagatttccttttttcttttattacgtttatgtattctagagcaaataaaaatcatatcctattacgttcctatacaaaaatcatatcctatcatatcctattacgttcctatacaaaaatcatatcctttttctatcaggtttcttttttttttaactttcctattaagtttctaaccaaacaaaaatcatatcatatcatatcctattacgtttctatacaaaaatcatatcctatcatatcctattaagttcctatacaaaaatcatatcttatcatatcctattaagttcct

SEQ ID NO: 14980 - DNA, 1132 bp, Glycine max
  Gm_smallRNAprecursor_7813
tacaagattggtgctgaccactttggttccgactttgcaatggctcaaaggaaaacccattctcctagtaagaaacttttatcatactattttttttatgtattagtgttagaattcagaattctaagttatgctcttggttggtaattggtattgcagcatattggtggcgaatgtttgggtcacaaactccaaatttgcagaagctggctattaagattttgagtttgacttgcagtgcttcaggatgtgaaagaaattggagtgtgtttgagcaagtaattgtgacaaaactctaactatactttttaattttatttaattttgatgatcaagttatatttggagtatatttgagattgaaatcaacatttatttgttatgttgtagattcattccaaaaaaagaaataggcttgagcacaagaggttgcatgatttggtgtttgtcaaatacaaccaacaattgaagcaaagatataatgcaagagatgaaattgatccaatttctcttaatgatattgatgtatgcaatgaatggctcgtgggagagatggatcaagatgatgataatgatgctggaaatgatttggtatttgaagatgatgatgctctaaattgggcaactgtgtatcaggcttcgggggttggagagtgtaggatgtatactaggcggaaaaagcaaaaaacaagtgttgctgctgcccaaacttctaaaaaacaggcaatggttgttggatcttcatcaaggaagcaaaaagcagtccaagaaaatgatgaggatctagatgttgaggagaatattgatgttgaatctgaagaagaagaaatcatggtcaattttgaggcgtctgatggggaagagggagagggagatgctccattaccatatgataacaacgaagatgattgtgttgggattggagaagatgattagagcctcaaccttcactttgcactttgcattatgtttttatcattttcttattttgaactctttaatgagtttatttggtgttggtacttgattattgtatgaactcatgaaacttttttagtttatttgaatgcaatcctttgtttttttcaatttcaatgagtttatatatatgtttttttttttgtgtccgcca

SEQ ID NO: 14981 - DNA, 1092 bp, Glycine max
  Gm_smallRNAprecursor_7814
agtttgacttgcagtgcttcaggatgtgaaagaaattggagtgtgtttgagcaagtaattgtgacaaaactctaactatactttttaattttatttaattttgatgatcaagttatatttggagtatatttgagattgaaatcaacatttatttgttatgttgtagattcattccaaaaaaagaaataggcttgagcacaagaggttgcatgatttggtgtttgtcaaatacaaccaacaattgaagcaaagatataatgcaagagatgaaattgatccaatttctcttaatgatattgatgtatgcaatgaatggctcgtgggagagatggatcaagatgatgataatgatgctggaaatgatttggtatttgaagatgatgatgctctaaattgggcaactgtgtatcaggcttcgggggttggagagtgtaggatgtatactaggcggaaaaagcaaaaaacaagtgttgctgctgcccaaacttctaaaaaacaggcaatggttgttggatcttcatcaaggaagcaaaaagcagtccaagaaaatgatgaggatctagatgttgaggagaatattgatgttgaatctgaagaagaagaaatcatggtcaattttgaggcgtctgatggggaagagggagagggagatgctccattaccatatgataacaacgaagatgattgtgttgggattggagaagatgattagagcctcaaccttcactttgcactttgcattatgtttttatcattttcttattttgaactctttaatgagtttatttggtgttggtacttgattattgtatgaactcatgaaacttttttagtttatttgaatgcaatcctttgtttttttcaatttcaatgagtttatatatatgtttttttttttgtgtccgccatgacatccgccattttccgctacgccatccgccatatttttatggcggatttttgactttccgccatgaaccgccatccgccattaacaacattgcactgcattttgtaggcatgtcacataacttattcataatcgtttacttaaagttagagtttcactttaataatctacataatactgaa

SEQ ID NO: 14982 - DNA, 1092 bp, Glycine max; identical to SEQ ID NO: 14981
  Gm_smallRNAprecursor_7815

SEQ ID NO: 14983 - DNA, 1073 bp, Glycine max
  Gm_smallRNAprecursor_7816
aagtatatatttcccacttggaaaccatgcacaggagatgaggccaggaccatttttttcataaacttgcaggcacgtaccggtggagacatcccaacgcctaacagcctcctccacaccacatgtgaggagctcttggtcattaggactccatgaaacagaagaaacagatttctggtgaccagacaatttatgcttgatagacagttcaccattcatgtcaacctattaaaagaaaaggcaaaaagcacaaattgtgaaacctaatgtgcaagttttaagtacatttagtttgtttatgtgtgggggggcattgaccaatgtttacagaagcatgatgtacacatgaagcacctaaatagataattcctaccaacaaatcacatagtcaagtaatggcatcatcattaatagaatgtgtcaaaaccaatgttgttaatggcggatggcggttcatggcggaaagtaaaaaatccatcataaaaatatggcggatggcgtagcggaaaatggcggatgtcatggcggacaaaaagaaaacatatatataaactcattgaaattgaaaaaaacaaaggattgcattcaaataaactaaaaaagtttcatgagttcatacaataatcaagtaccaacaccaaataaactcattaaagagttcaaataaactcagccatttaaaagaggactgaacagaaaaaaaaattgtggtgtcaaatacgaaaaaaaaaatgggactgtaaaagtaaaaaggggtgtcaaatagcaaaaggaaaaaaaaaactgcagtcagaaaacagggggtgtcaaacagcaaaaataaaactaagaaatacgattttgcacttctcgacaaatataatttgtttctttattctaagcggttattctattcttggtaatcaagaacttgttcttattaactctttggttcgagaatttatatataatttaagtgacacaataaaagctttttctattcttctattaactgatttatgtataggattccattcaacccatggttgggaactagtgattggtagcttcgtcttctccgcgtgaacttctcg

SEQ ID NO: 14984 - DNA, 1047 bp, Glycine max
  Gm_smallRNAprecursor_7817
ccttatcttcgtagccgtcaacactaatgggccaggtctgcataaccattctcttttcctctttttttttcttcaattaccattaatatatcattccgggttctgatttttttgtgtgtgttttgaataggaagagaaaaacccagaggaaaacaaagtggaggagaaaaaagcaaataaagaagaagagaaaaacccagaggaatcaaaagatgacaaggaatccaaggaggaatctgcgctgccagaaatcgtgctaggcacaacctttgcaatgcatggacactttaagcacgatttccgacatcttttaagttagggactattttgcaatacttatgcaaaagatagagactattttgaatttttcattaagttagggactaatatgcaacaggggtacaaagtcagggactaaattgcctatttactcgttttgttatcatcaaatgacgtgacatcttttaggaggcacgtccacgtgtcatgccacgtcatcctttagtgtcacgttggatagttcacgtggcactaaaattgatctcactaacggcgttactttaaaatttaacggaaagactattttgcaacacttttgtaaagatagagattattttgaatttaatattaagttagggactaatatgtcaaatgagtacaatctcagggactaaattgtctatttactcaatatttcaccgacgtcaatcttaaggtgatctcatattcaaaaaactataaaagaaaaaagactagaaggagactatcttcctatcgaattgtcgtcacccgtgcatcattaatctatattatatatatatatatatatatatatatatatatatatatatatatatataatctcaaaaaaaatgttgaaatagtatgttaaaaaattagattgttgtgagcacgggtaaatattgtttttgagtattttttttaaatatttgaaatatatatttattttaatcatgaaacattttaattgtctattatagataggttattttatatctagtaaactataattttgaaaatataata

SEQ ID NO: 14985 - DNA, 1131 bp, Glycine max
  Gm_smallRNAprecursor_7818
tagcggaaaatggcggatgttatggcggacaaaaaaaaacatatatataaactcattgaaattgaaaaaaacaaaggattgcattcaaataaactaaaaaagtttcatgagttcatacaataatcaagtaccaacaccaaataaactcattaaagagttcaaaataagaaaatgataaaaacataatgcaaagtgcaaagtgaaggttgaggctctaatcatcttctccaatcccaacataatcatcttcgttgttatcatatggtaatgaagcatctccctctccctcttccccatcagacacctcaaaattgaccatgatttcttcttcttcagattcaacatcaatattctcctcaacatctagatcctcatcattttcttggactgctttttgcttccttgatgaagatccaacaaccattgcctattttttagaagtttgggcaacatcaacacttgttttttgctttttccgcctagtatacatcctacactctccaacccccgaagcctgatacacagttgcccaatttagagcatcatcatcttcaaataccaaatcatttccagcatcattatcatcatcttgatccatctctcccacgagccattcattgcatacatcaatatcattaagagaaattggatcaatttcatctcttgcattatatcttggcttcaattgttggttgtatttgacaaacaccaaatcatgcaacctcttgtgctcaagcctatttctttttttggaatgaatctacaacataacaaataaatgttgatttcaatcttaaatatactccaaataaaacttgatcatcaaaattaaataaaattaaaaagtatagttagagttttgtcacaattacttgctcaaacacactccaatttctttcacatcctgaagcactgcaagtcaaactcaaaatcttaatagctagcttctgcaaatttggagtttgtgacccaaacattcgccaccaatatgctgcaataccaattaccaaccaagagcataacttagaattctgcattataacactaatacataaaaaaatagtatgataaaagtttcttactaggagaatgggttttcctttgagccattgcaaagtcggaaccaaagtg

SEQ ID NO: 14986 - DNA, 1079 bp, Glycine max
  Gm_smallRNAprecursor_7819
atctagaactatcatgatactactctatcatgaaaactctagaaagacttaaagtaatgtagaaacattcaccaccattgagaggttggtgacttgagcctataaataggaaattggtatgttgtaatggatcaacccaagaaatcaatgacatagccttctttctgaaacaattctctaaaactatcaaccatcaactatcatctaaccaactaccaacagtggcattagagctacgttcggtcatacattgggcgtagttatattacctacctaccattccaaaatcctcccaactacttcaaaaatttcctttgtactattaacccactttaataatatttttttctaagctatggataacactactgaatcgtcaactatttctgtccctatcttcaatggtgaaaattatgatttttggcgtgttaaaatggaaacatatttttcagctcaagatttatgggacatagtagaagaaggcttcatcattcccgcagatacttcagctcttaatgcatctcaagaaaaagagttgaagaaaaataaacagaaaaattcaaaggcgttgttcaccttgcaacaagcggtgactgatccaattttcccaagaattatgggagctaagactgccaaagaagcgtggaacacattacaggaggagtttcaaggaagtgttaaggtacgtgccgttaaacatcaatctctaagaagagattttgaactattgaagatgaaggagtctgagacagttaaagattactattctaaagttaaagaaatagttagtcaaaggagagcttttggggaagatattcttgacaagaaaattgttgagaaaattctaattactatgccccaaaagtttgacccaatcgtgacaacgattgaggaaaccaaagatctgtccactctatcagagacagaacttgtgggctctcttgaagcatatgagcaaagactgtataggcataaagaagatacaattgaaaattccttccagtcaaagtttaaatttcagccccaaaacaaagaaaatagaggaaagaaaaattatggagaaacttccagaagaagag

SEQ ID NO: 14987 - DNA, 1104 bp, Glycine max
  Gm_smallRNAprecursor_7820
tgtgattgtgggaagcttcaaaagctacacatgctatgtgcatatgtcattgctgtatgtaagcatatcaatataaaatacttgcaatatgttaattcggtgtacacattagattacatgtctataaagtcctgttaacaaacatgtgtcattatgattattgaccaccatatgaaggatcataattatgtgtcaatccagctatgagaagaaatgagtgaatagacaatttagtccctgagattgtatccattttgcatattagtccctaacttaatattaaattcaaaatagtccttatctttgcataagtcttgcaaaattgtccttccattaaattttaaaataacgccgttagtgaggtcaattttagtgccacgtggactatccaacgtggcactaaaggatgatgtggcatgacacgtggacgtgcctcttaaaagatgccacgtcatttgatgataacaaaacgagtaaataggcaatttagtccctgactttgtacctctgttgcatattagtccttaacttaatgaaaaatttaaaatagtccctatcttttgcataagtattgcaaaatagtccttccgttaaattttaaagtaacgctgttagtgaggtcaattttagtgccacgtcatttgatgattatagaatgagtggcttcttcaaatttgatggttctgaaccaattgaggcatatatacgaaaaagaacccacacacacttgcacaaataaaaagaaccaaaaatccacagcaacaaccttatctctgtagccatcaacaccaatgggcgaggtcagcataaccattctcttttcctctttttttttcttcaattaccatcaatgtatcattctaggttctgattttttttttgtgttttgaataggaagagaaaaaaccagaggaaaacaaagtggaggagaaaaaagcaaatgaagaaaagaaagaagaagagaaaaaatcagaggaatcaaaagatgacaaggaatccaaggaggaatctgcgccgccaaaaatcgtgcaaggcacaacctttgcaatgcatggacactttaagcacgatttctgacatcttttaagttaggaactattttgc

SEQ ID NO: 14988 - DNA, 1076 bp, Glycine max
  Gm_smallRNAprecursor_7821
ccatctttcgggaagagttacttcatcccattttatttttcttgggagagacacgttagcctttgtcatatcagtgataaacaaggttgtttctcctttttgaggttttaacaggactctagatgcacaagtattcatgaccttgtactggatcctataaattaaggctgctgggattgatccttctttcatgtcaaggccatgaaagtggatgtttaagaacagagagtcaagaatgtttttgtccatcagactcactgttttgtttggataacaattaaaatatattggaccttgtcctaggctggtttcgactgttccaattagggagtcttcaaattgattatgcctaatatctcttagacacattaaaactgctgcatctatgcccatatcaattaagggcttgatggctacttgtacacaaccgatgtgtagatatttatacttacggctatgttcataaattgaattttttgaaagtagatgaaattcttcccctatatcttgtcctagaggaatattgttttctactgttttgattatgtaatcaaagttgtgtttgtctttaattgtttcaggaacgtatagttgatcttgagggatttctggaatgttccagtcatccatgttttggttaatatcttcgaatcggacttcctcatcgaagagattatgttttggggcgacctcttgggtctggttatcttgatcatttaagagattggtgtttcttgaagaagatgaagaggaggaatttgagcgaaaagagatacgggaaaaggatcgcaataatctagacataattaaaacattctctaatatctttgccttcatttggttccataggaatctttccataaggctatatgttacagaacttcttggatccgtagtcaatctgtcaatggagatattccatatgaaagtttaagctatggtcaactaatttcttacgtccaaaaggtagccttaaaaatttgtcaggatgacaaaattcagaggcaattagccaaagaaaaggctcaaacaaagagagatttaggttctttctgcgaacaatttggtctaccggc

SEQ ID NO: 14989 - DNA, 1063 bp, Glycine max
  Gm_smallRNAprecursor_7822
gtttcccatccaaatatctaatgaaggaataaccacaaattatttaggaagaaaaattacatttaatttttctactaaaccaatttccagaaatataaatcttatagaaaataagattaatcaaattaacttcttaaaagaagaagtatcttttaataatattcagatacaactgggaaaaccccaagtaaaagaaagaattcaatctttattaaatcatattgaatcgaccgtttgttctgaattgccacatgcattttgggacagaaagaaacatattgtcgatctcccttatgagaaagactttagggaaaaacaaattcccacaaaagccagaccaatccaaatgaatgaagaacttcttcaatactgtcaaaaggaaatcaaggatttgcttgataaaggcctaatccggaaaagcaaaagcccatggtcttgtgcggctttttatgttaacaaacaatctgagattgagcgtgggacaccccgcttagtcataaattacaaaccattaaatcaagcattacaatggattaggtattctattccaaacaaaaaatatttgcttaacagattaaattctgcaaagatattttcaaaatttgatatgaaatctggattttggcaaatccaaatccaagaatcagacaggtacaaaacagcgtttactgtacctttcgggcaatatgaatggaacgtgatgccattcggactgaagaatgccccttcagaatttcaaaaaattatgaacgatatttttaatccctattcaaaatttgtcattgtctacatagatgatgttttaatcttttcccaaaacattgaccaacatttcaaacatctccaaaccttcatacatatcatcaaacaaaatggtttggcagtctccaaatcaaaaatcaatcttttccaaactcgaattcgattccttggtcacaatatatatcagggtacaatcattccaatcgaaaggtcaatagagtttgccagcaaattccccaaccaaatcttagacaaaacccagttacaaagatttctaggttgtctaaattacgtaggagaa

SEQ ID NO: 14990 - DNA, 1234 bp, Glycine max
  Gm_smallRNAprecursor_7823
cccaagtaaaagaaagaattcaatctttattaaatcatattgaatcgaccgtttgttctgaattgccacatgcattttgggacagaaagaaacatattgtcgatctcccttatgagaaagactttagggaaaaacaaattcccacaaaagccagaccaatccaaatgaatgaagaacttcttcaatactgtcaaaaggaaatcaaggatttgcttgataaaggcctaatccggaaaagcaaaagcccatggtcttgtgcggctttttatgttaacaaacaatctgagattgagcgtgggacaccccgcttagtcataaattacaaaccattaaatcaagcattacaatggattaggtattctattccaaacaaaaaatatttgcttaacagattaaattctgcaaagatattttcaaaatttgatatgaaatctggattttggcaaatccaaatccaagaatcagacaggtacaaaacagcgtttactgtacctttcgggcaatatgaatggaacgtgatgccattcggactgaagaatgccccttcagaatttcaaaaaattatgaacgatatttttaatccctattcaaaatttgtcattgtctacatagatgatgttttaatcttttcccaaaacattgaccaacatttcaaacatctccaaaccttcatacatatcatcaaacaaaatggtttggcagtctccaaatcaaaaatcaatcttttccaaactcgaattcgattccttggtcacaatatatatcagggtacaatcattccaatcgaaaggtcaatagagtttgccagcaaattccccaaccaaatcttagacaaaacccagttacaaagatttctaggttgtctaaattacgtaggagaatttgtcccctatttaaataatattgtcaagccattacatgataggctgaagaaaaatccgcctccttggtctgacctccatacacaaacggttaaagaaatcaaagtcaaagtccaatccattaaatgtctgtatcttcctattccacaggcatttaaaattgttgaaactgatgcttcagacataggttatggtggcatcctcaaacaaagagtccatggccaagatcatgtcattgcatatacatcaaaacattggaatcctgcacaattaaaatattcaactgttaaaaaagaagttttagcaattgttttgtgcatttccaaatttcaatcggatttattaaaccaaaa

SEQ ID NO: 14991 - DNA, 1080 bp, Glycine max
  Gm_smallRNAprecursor_7824
aaaagcaaaagcccatggtcttgtgcggctttttatgttaacaaacaatctgagattgagcgtgggacaccccgcttagtcataaattacaaaccattaaatcaagcattacaatggattaggtattctattccaaacaaaaaatatttgcttaacagattaaattctgcaaagatattttcaaaatttgatatgaaatctggattttggcaaatccaaatccaagaatcagacaggtacaaaacagcgtttactgtacctttcgggcaatatgaatggaacgtgatgccattcggactgaagaatgccccttcagaatttcaaaaaattatgaacgatatttttaatccctattcaaaatttgtcattgtctacatagatgatgttttaatcttttcccaaaacattgaccaacatttcaaacatctccaaaccttcatacatatcatcaaacaaaatggtttggcagtctccaaatcaaaaatcaatcttttccaaactcgaattcgattccttggtcacaatatatatcagggtacaatcattccaatcgaaaggtcaatagagtttgccagcaaattccccaaccaaatcttagacaaaacccagttacaaagatttctaggttgtctaaattacgtaggagaatttgtcccctatttaaataatattgtcaagccattacatgataggctgaagaaaaatccgcctccttggtctgacctccatacacaaacggttaaagaaatcaaagtcaaagtccaatccattaaatgtctgtatcttcctattccacaggcatttaaaattgttgaaactgatgcttcagacataggttatggtggcatcctcaaacaaagagtccatggccaagatcatgtcattgcatatacatcaaaacattggaatcctgcacaattaaaatattcaactgttaaaaaagaagttttagcaattgttttgtgcatttccaaatttcaatcggatttattaaaccaaaaatttttaatcagggttgattgtaaatcagccaaagatattttacaaaaagatgttaaaaaccttgcctcaaaacaaatt

SEQ ID NO: 14992 - DNA, 1095 bp, Glycine max
  Gm_smallRNAprecursor_7825
tgaatggaacgtgatgccattcggactgaagaatgccccttcagaatttcaaaaaattatgaacgatatttttaatccctattcaaaatttgtcattgtctacatagatgatgttttaatcttttcccaaaacattgaccaacatttcaaacatctccaaaccttcatacatatcatcaaacaaaatggtttggcagtctccaaatcaaaaatcaatcttttccaaactcgaattcgattccttggtcacaatatatatcagggtacaatcattccaatcgaaaggtcaatagagtttgccagcaaattccccaaccaaatcttagacaaaacccagttacaaagatttctaggttgtctaaattacgtaggagaatttgtcccctatttaaataatattgtcaagccattacatgataggctgaagaaaaatccgcctccttggtctgacctccatacacaaacggttaaagaaatcaaagtcaaagtccaatccattaaatgtctgtatcttcctattccacaggcatttaaaattgttgaaactgatgcttcagacataggttatggtggcatcctcaaacaaagagtccatggccaagatcatgtcattgcatatacatcaaaacattggaatcctgcacaattaaaatattcaactgttaaaaaagaagttttagcaattgttttgtgcatttccaaatttcaatcggatttattaaaccaaaaatttttaatcagggttgattgtaaatcagccaaagatattttacaaaaagatgttaaaaaccttgcctcaaaacaaatttttgcacgatggcaagcaattttaagtgtctttgattttgacatagaatacatcaagggcacctcaaattcactacctgactaccttacccgtgaattcttacagaaaagtggtaatgcctcctaaggcatcgggaatctccctacggggaggaaggagtacaggcaaaggagccaggctggctcttccagagccaaccatcaagaaatcatctacctcttctgggtcaccaacccaggctgggtcatctacccagaaaaacaatttagaagggtcatcaacccaga

SEQ ID NO: 14993 - DNA, 1095 bp, Glycine max; identical to SEQ ID NO: 14992
  Gm_smallRNAprecursor_7826

SEQ ID NO: 14994 - DNA, 1095 bp, Glycine max; identical to SEQ ID NO: 14992
  Gm_smallRNAprecursor_7827

SEQ ID NO: 14995 - DNA, 1095 bp, Glycine max; identical to SEQ ID NO: 14992
  Gm_smallRNAprecursor_7828

SEQ ID NO: 14996 - DNA, 1035 bp, Glycine max
  Gm_smallRNAprecursor_7829
attgtctacatagatgatgttttaatcttttcccaaaacattgaccaacatttcaaacatctccaaaccttcatacatatcatcaaacaaaatggtttggcagtctccaaatcaaaaatcaatcttttccaaactcgaattcgattccttggtcacaatatatatcagggtacaatcattccaatcgaaaggtcaatagagtttgccagcaaattccccaaccaaatcttagacaaaacccagttacaaagatttctaggttgtctaaattacgtaggagaatttgtcccctatttaaataatattgtcaagccattacatgataggctgaagaaaaatccgcctccttggtctgacctccatacacaaacggttaaagaaatcaaagtcaaagtccaatccattaaatgtctgtatcttcctattccacaggcatttaaaattgttgaaactgatgcttcagacataggttatggtggcatcctcaaacaaagagtccatggccaagatcatgtcattgcatatacatcaaaacattggaatcctgcacaattaaaatattcaactgttaaaaaagaagttttagcaattgttttgtgcatttccaaatttcaatcggatttattaaaccaaaaatttttaatcagggttgattgtaaatcagccaaagatattttacaaaaagatgttaaaaaccttgcctcaaaacaaatttttgcacgatggcaagcaattttaagtgtctttgattttgacatagaatacatcaagggcacctcaaattcactacctgactaccttacccgtgaattcttacagaaaagtggtaatgcctcctaaggcatcgggaatctccctacggggaggaaggagtacaggcaaaggagccaggctggctcttccagagccaaccatcaagaaatcatctacctcttctgggtcaccaacccaggctgggtcatctacccagaaaaacaatttagaagggtcatcaacccagattgcctcaatcaaacctgagccatccactcagga

SEQ ID NO: 14997 - DNA, 1035 bp, Glycine max; identical to SEQ ID NO: 14996
  Gm_smallRNAprecursor_7830

SEQ ID NO: 14998 - DNA, 1113 bp, Glycine max
  Gm_smallRNAprecursor_7831
attgtctacatagatgatgttttaatcttttcccaaaacattgaccaacatttcaaacatctccaaaccttcatacatatcatcaaacaaaatggtttggcagtctccaaatcaaaaatcaatcttttccaaactcgaattcgattccttggtcacaatatatatcagggtacaatcattccaatcgaaaggtcaatagagtttgccagcaaattccccaaccaaatcttagacaaaacccagttacaaagatttctaggttgtctaaattacgtaggagaatttgtcccctatttaaataatattgtcaagccattacatgataggctgaagaaaaatccgcctccttggtctgacctccatacacaaacggttaaagaaatcaaagtcaaagtccaatccattaaatgtctgtatcttcctattccacaggcatttaaaattgttgaaactgatgcttcagacataggttatggtggcatcctcaaacaaagagtccatggccaagatcatgtcattgcatatacatcaaaacattggaatcctgcacaattaaaatattcaactgttaaaaaagaagttttagcaattgttttgtgcatttccaaatttcaatcggatttattaaaccaaaaatttttaatcagggttgattgtaaatcagccaaagatattttacaaaaagatgttaaaaaccttgcctcaaaacaaatttttgcacgatggcaagcaattttaagtgtctttgattttgacatagaatacatcaagggcacctcaaattcactacctgactaccttacccgtgaattcttacagaaaagtggtaatgcctcctaaggcatcgggaatctccctacggggaggaaggagtacaggcaaaggagccaggctggctcttccagagccaaccatcaagaaatcatctacctcttctgggtcaccaacccaggctgggtcatctacccagaaaaacaatttagaagggtcatcaacccagattgcctcaatcaaacctgagccatccactcaggaatctcccaaaccggcaaccgccaaacaaacatcggccgactatgcatggccaattgaaacccttcaggcccttcaaga

SEQ ID NO: 14999 - DNA, 1113 bp, Glycine max; identical to SEQ ID NO: 14998
  Gm_smallRNAprecursor_7832

SEQ ID NO: 15000 - DNA, 1114 bp, Glycine max
  Gm_smallRNAprecursor_7833
attgtctacatagatgatgttttaatcttttcccaaaacattgaccaacatttcaaacatctccaaaccttcatacatatcatcaaacaaaatggtttggcagtctccaaatcaaaaatcaatcttttccaaactcgaattcgattccttggtcacaatatatatcagggtacaatcattccaatcgaaaggtcaatagagtttgccagcaaattccccaaccaaatcttagacaaaacccagttacaaagatttctaggttgtctaaattacgtaggagaatttgtcccctatttaaataatattgtcaagccattacatgataggctgaagaaaaatccgcctccttggtctgacctccatacacaaacggttaaagaaatcaaagtcaaagtccaatccattaaatgtctgtatcttcctattccacaggcatttaaaattgttgaaactgatgcttcagacataggttatggtggcatcctcaaacaaagagtccatggccaagatcatgtcattgcatatacatcaaaacattggaatcctgcacaattaaaatattcaactgttaaaaaagaagttttagcaattgttttgtgcatttccaaatttcaatcggatttattaaaccaaaaatttttaatcagggttgattgtaaatcagccaaagatattttacaaaaagatgttaaaaaccttgcctcaaaacaaatttttgcacgatggcaagcaattttaagtgtctttgattttgacatagaatacatcaagggcacctcaaattcactacctgactaccttacccgtgaattcttacagaaaagtggtaatgcctcctaaggcatcgggaatctccctacggggaggaaggagtacaggcaaaggagccaggctggctcttccagagccaaccatcaagaaatcatctacctcttctgggtcaccaacccaggctgggtcatctacccagaaaaacaatttagaagggtcatcaacccagattgcctcaatcaaacctgagccatccactcaggaatctcccaaaccggcaaccgccaaacaaacatcggccgactatgcatggccaattgaaacccttcaggcccttcaagat

SEQ ID NO: 15001 - DNA, 1114 bp, Glycine max; identical to SEQ ID NO: 15000
  Gm_smallRNAprecursor_7834

SEQ ID NO: 15002 - DNA, 1091 bp, Glycine max
  Gm_smallRNAprecursor_7835
caattttaagtgtctttgattttgacatagaatacatcaagggcacctcaaattcactacctgactaccttacccgtgaattcttacagaaaagtggtaatgcctcctaaggcatcgggaatctccctacggggaggaaggagtacaggcaaaggagccaggctggctcttccagagccaaccatcaagaaatcatctacctcttctgggtcaccaacccaggctgggtcatctacccagaaaaacaatttagaagggtcatcaacccagattgcctcaatcaaacctgagccatccactcaggaatctcccaaaccggcaaccgccaaacaaacatcggccgactatgcatggccaattgaaacccttcaggcccttcaagatatgggtctgaccaaatttccaaaaataatcaaaaaatcttgggcagacattgcctcagaatctgatgatgaatctgaatcaaatttacaaacaatgatccaaaatgcgtcaatgaccaaaacagccaccaatactaaaggaaaactacctttagccaaagcccaaacaccacctaccaaacaaactaacaattatatttataaaaataaattgttaactgttttgcagatggaacctgaattttgggacaaaaatcccttcaaggcgacggccaaggctttcccaccaggatttcactacaaaccaaccaccatcctgaagacaagaactttttatgaattgattttggtagattcaaactcagtatctatcaaacatttcaaagatccaaaagaccaaaccttaaacacccactcaaccatccaaatactaaaagttcttcaaccaagacactttggtacggacttgaacaaaggaaagagattctcagttccatttgatccggtaggttatacctattgggattacgttgatgcttggactaaggtgttttggcaccaaaatacccgcttcaagcattcatggctgatatatttcaagaccaacacaatttacaattttcccaattggtttttgcaatggtgggacttctttggaccaatcccagagatattcccagaaacggtccaacaaggattttcccaatt

SEQ ID NO: 15003 - DNA, 1192 bp, Glycine max
  Gm_smallRNAprecursor_7836
aaagtggtaatgcctcctaaggcatcgggaatctccctacggggaggaaggagtacaggcaaaggagccaggctggctcttccagagccaaccatcaagaaatcatctacctcttctgggtcaccaacccaggctgggtcatctacccagaaaaacaatttagaagggtcatcaacccagattgcctcaatcaaacctgagccatccactcaggaatctcccaaaccggcaaccgccaaacaaacatcggccgactatgcatggccaattgaaacccttcaggcccttcaagatatgggtctgaccaaatttccaaaaataatcaaaaaatcttgggcagacattgcctcagaatctgatgatgaatctgaatcaaatttacaaacaatgatccaaaatgcgtcaatgaccaaaacagccaccaatactaaaggaaaactacctttagccaaagcccaaacaccacctaccaaacaaactaacaattatatttataaaaataaattgttaactgttttgcagatggaacctgaattttgggacaaaaatcccttcaaggcgacggccaaggctttcccaccaggatttcactacaaaccaaccaccatcctgaagacaagaactttttatgaattgattttggtagattcaaactcagtatctatcaaacatttcaaagatccaaaagaccaaaccttaaacacccactcaaccatccaaatactaaaagttcttcaaccaagacactttggtacggacttgaacaaaggaaagagattctcagttccatttgatccggtaggttatacctattgggattacgttgatgcttggactaaggtgttttggcaccaaaatacccgcttcaagcattcatggctgatatatttcaagaccaacacaatttacaattttcccaattggtttttgcaatggtgggacttctttggaccaatcccagagatattcccagaaacggtccaacaaggattttcccaatttaagaaacaatacaattcgcaggaatcacgaattccagcagatcttaaatacttttcaagctttgcactgtcatggatattctcatggcaatatcgttacagcaagactgaaaagacaaaccaatatccatcactacaaagacacgcatttgtaaaatggtggacacaatttgactcatccaaagcggatc

SEQ ID NO: 15004 - DNA, 1099 bp, Glycine max
  Gm_smallRNAprecursor_7837
gtaatgcctcctaaggcatcgggaatctccctacggggaggaaggagtacaggcaaaggagccaggctggctcttccagagccaaccatcaagaaatcatctacctcttctgggtcaccaacccaggctgggtcatctacccagaaaaacaatttagaagggtcatcaacccagattgcctcaatcaaacctgagccatccactcaggaatctcccaaaccggcaaccgccaaacaaacatcggccgactatgcatggccaattgaaacccttcaggcccttcaagatatgggtctgaccaaatttccaaaaataatcaaaaaatcttgggcagacattgcctcagaatctgatgatgaatctgaatcaaatttacaaacaatgatccaaaatgcgtcaatgaccaaaacagccaccaatactaaaggaaaactacctttagccaaagcccaaacaccacctaccaaacaaactaacaattatatttataaaaataaattgttaactgttttgcagatggaacctgaattttgggacaaaaatcccttcaaggcgacggccaaggctttcccaccaggatttcactacaaaccaaccaccatcctgaagacaagaactttttatgaattgattttggtagattcaaactcagtatctatcaaacatttcaaagatccaaaagaccaaaccttaaacacccactcaaccatccaaatactaaaagttcttcaaccaagacactttggtacggacttgaacaaaggaaagagattctcagttccatttgatccggtaggttatacctattgggattacgttgatgcttggactaaggtgttttggcaccaaaatacccgcttcaagcattcatggctgatatatttcaagaccaacacaatttacaattttcccaattggtttttgcaatggtgggacttctttggaccaatcccagagatattcccagaaacggtccaacaaggattttcccaatttaagaaacaatacaattcgcaggaatcacgaattccagcagatcttaaatacttttcaagctttgcactgtcatggatattctcatggcaatatcgttacagca

SEQ ID NO: 15005 - DNA, 1158 bp, Glycine max
  Gm_smallRNAprecursor_7838
ctaaggcatcgggaatctccctacggggaggaaggagtacaggcaaaggagccaggctggctcttccagagccaaccatcaagaaatcatctacctcttctgggtcaccaacccaggctgggtcatctacccagaaaaacaatttagaagggtcatcaacccagattgcctcaatcaaacctgagccatccactcaggaatctcccaaaccggcaaccgccaaacaaacatcggccgactatgcatggccaattgaaacccttcaggcccttcaagatatgggtctgaccaaatttccaaaaataatcaaaaaatcttgggcagacattgcctcagaatctgatgatgaatctgaatcaaatttacaaacaatgatccaaaatgcgtcaatgaccaaaacagccaccaatactaaaggaaaactacctttagccaaagcccaaacaccacctaccaaacaaactaacaattatatttataaaaataaattgttaactgttttgcagatggaacctgaattttgggacaaaaatcccttcaaggcgacggccaaggctttcccaccaggatttcactacaaaccaaccaccatcctgaagacaagaactttttatgaattgattttggtagattcaaactcagtatctatcaaacatttcaaagatccaaaagaccaaaccttaaacacccactcaaccatccaaatactaaaagttcttcaaccaagacactttggtacggacttgaacaaaggaaagagattctcagttccatttgatccggtaggttatacctattgggattacgttgatgcttggactaaggtgttttggcaccaaaatacccgcttcaagcattcatggctgatatatttcaagaccaacacaatttacaattttcccaattggtttttgcaatggtgggacttctttggaccaatcccagagatattcccagaaacggtccaacaaggattttcccaatttaagaaacaatacaattcgcaggaatcacgaattccagcagatcttaaatacttttcaagctttgcactgtcatggatattctcatggcaatatcgttacagcaagactgaaaagacaaaccaatatccatcactacaaagacacgcatttgtaaaatggtggacacaatttg

SEQ ID NO: 15006 - DNA, 1167 bp, Glycine max
  Gm_smallRNAprecursor_7839
ctaaggcatcgggaatctccctacggggaggaaggagtacaggcaaaggagccaggctggctcttccagagccaaccatcaagaaatcatctacctcttctgggtcaccaacccaggctgggtcatctacccagaaaaacaatttagaagggtcatcaacccagattgcctcaatcaaacctgagccatccactcaggaatctcccaaaccggcaaccgccaaacaaacatcggccgactatgcatggccaattgaaacccttcaggcccttcaagatatgggtctgaccaaatttccaaaaataatcaaaaaatcttgggcagacattgcctcagaatctgatgatgaatctgaatcaaatttacaaacaatgatccaaaatgcgtcaatgaccaaaacagccaccaatactaaaggaaaactacctttagccaaagcccaaacaccacctaccaaacaaactaacaattatatttataaaaataaattgttaactgttttgcagatggaacctgaattttgggacaaaaatcccttcaaggcgacggccaaggctttcccaccaggatttcactacaaaccaaccaccatcctgaagacaagaactttttatgaattgattttggtagattcaaactcagtatctatcaaacatttcaaagatccaaaagaccaaaccttaaacacccactcaaccatccaaatactaaaagttcttcaaccaagacactttggtacggacttgaacaaaggaaagagattctcagttccatttgatccggtaggttatacctattgggattacgttgatgcttggactaaggtgttttggcaccaaaatacccgcttcaagcattcatggctgatatatttcaagaccaacacaatttacaattttcccaattggtttttgcaatggtgggacttctttggaccaatcccagagatattcccagaaacggtccaacaaggattttcccaatttaagaaacaatacaattcgcaggaatcacgaattccagcagatcttaaatacttttcaagctttgcactgtcatggatattctcatggcaatatcgttacagcaagactgaaaagacaaaccaatatccatcactacaaagacacgcatttgtaaaatggtggacacaatttgactcatcca

SEQ ID NO: 15007 - DNA, 1208 bp, Glycine max
  Gm_smallRNAprecursor_7840
ctaaggcatcgggaatctccctacggggaggaaggagtacaggcaaaggagccaggctggctcttccagagccaaccatcaagaaatcatctacctcttctgggtcaccaacccaggctgggtcatctacccagaaaaacaatttagaagggtcatcaacccagattgcctcaatcaaacctgagccatccactcaggaatctcccaaaccggcaaccgccaaacaaacatcggccgactatgcatggccaattgaaacccttcaggcccttcaagatatgggtctgaccaaatttccaaaaataatcaaaaaatcttgggcagacattgcctcagaatctgatgatgaatctgaatcaaatttacaaacaatgatccaaaatgcgtcaatgaccaaaacagccaccaatactaaaggaaaactacctttagccaaagcccaaacaccacctaccaaacaaactaacaattatatttataaaaataaattgttaactgttttgcagatggaacctgaattttgggacaaaaatcccttcaaggcgacggccaaggctttcccaccaggatttcactacaaaccaaccaccatcctgaagacaagaactttttatgaattgattttggtagattcaaactcagtatctatcaaacatttcaaagatccaaaagaccaaaccttaaacacccactcaaccatccaaatactaaaagttcttcaaccaagacactttggtacggacttgaacaaaggaaagagattctcagttccatttgatccggtaggttatacctattgggattacgttgatgcttggactaaggtgttttggcaccaaaatacccgcttcaagcattcatggctgatatatttcaagaccaacacaatttacaattttcccaattggtttttgcaatggtgggacttctttggaccaatcccagagatattcccagaaacggtccaacaaggattttcccaatttaagaaacaatacaattcgcaggaatcacgaattccagcagatcttaaatacttttcaagctttgcactgtcatggatattctcatggcaatatcgttacagcaagactgaaaagacaaaccaatatccatcactacaaagacacgcatttgtaaaatggtggacacaatttgactcatccaaagcggatccagaacaagtaaaactatggttcaaatcccat

SEQ ID NO: 15008 - DNA, 1208 bp, Glycine max; identical to SEQ ID NO: 15007
  Gm_smallRNAprecursor_7841

SEQ ID NO: 15009 - DNA, 1211 bp, Glycine max
  Gm_smallRNAprecursor_7842
ctaaggcatcgggaatctccctacggggaggaaggagtacaggcaaaggagccaggctggctcttccagagccaaccatcaagaaatcatctacctcttctgggtcaccaacccaggctgggtcatctacccagaaaaacaatttagaagggtcatcaacccagattgcctcaatcaaacctgagccatccactcaggaatctcccaaaccggcaaccgccaaacaaacatcggccgactatgcatggccaattgaaacccttcaggcccttcaagatatgggtctgaccaaatttccaaaaataatcaaaaaatcttgggcagacattgcctcagaatctgatgatgaatctgaatcaaatttacaaacaatgatccaaaatgcgtcaatgaccaaaacagccaccaatactaaaggaaaactacctttagccaaagcccaaacaccacctaccaaacaaactaacaattatatttataaaaataaattgttaactgttttgcagatggaacctgaattttgggacaaaaatcccttcaaggcgacggccaaggctttcccaccaggatttcactacaaaccaaccaccatcctgaagacaagaactttttatgaattgattttggtagattcaaactcagtatctatcaaacatttcaaagatccaaaagaccaaaccttaaacacccactcaaccatccaaatactaaaagttcttcaaccaagacactttggtacggacttgaacaaaggaaagagattctcagttccatttgatccggtaggttatacctattgggattacgttgatgcttggactaaggtgttttggcaccaaaatacccgcttcaagcattcatggctgatatatttcaagaccaacacaatttacaattttcccaattggtttttgcaatggtgggacttctttggaccaatcccagagatattcccagaaacggtccaacaaggattttcccaatttaagaaacaatacaattcgcaggaatcacgaattccagcagatcttaaatacttttcaagctttgcactgtcatggatattctcatggcaatatcgttacagcaagactgaaaagacaaaccaatatccatcactacaaagacacgcatttgtaaaatggtggacacaatttgactcatccaaagcggatccagaacaagtaaaactatggttcaaatcccatcca

SEQ ID NO: 15010 - DNA, 1098 bp, Glycine max
  Gm_smallRNAprecursor_7843
ggaatctccctacggggaggaaggagtacaggcaaaggagccaggctggctcttccagagccaaccatcaagaaatcatctacctcttctgggtcaccaacccaggctgggtcatctacccagaaaaacaatttagaagggtcatcaacccagattgcctcaatcaaacctgagccatccactcaggaatctcccaaaccggcaaccgccaaacaaacatcggccgactatgcatggccaattgaaacccttcaggcccttcaagatatgggtctgaccaaatttccaaaaataatcaaaaaatcttgggcagacattgcctcagaatctgatgatgaatctgaatcaaatttacaaacaatgatccaaaatgcgtcaatgaccaaaacagccaccaatactaaaggaaaactacctttagccaaagcccaaacaccacctaccaaacaaactaacaattatatttataaaaataaattgttaactgttttgcagatggaacctgaattttgggacaaaaatcccttcaaggcgacggccaaggctttcccaccaggatttcactacaaaccaaccaccatcctgaagacaagaactttttatgaattgattttggtagattcaaactcagtatctatcaaacatttcaaagatccaaaagaccaaaccttaaacacccactcaaccatccaaatactaaaagttcttcaaccaagacactttggtacggacttgaacaaaggaaagagattctcagttccatttgatccggtaggttatacctattgggattacgttgatgcttggactaaggtgttttggcaccaaaatacccgcttcaagcattcatggctgatatatttcaagaccaacacaatttacaattttcccaattggtttttgcaatggtgggacttctttggaccaatcccagagatattcccagaaacggtccaacaaggattttcccaatttaagaaacaatacaattcgcaggaatcacgaattccagcagatcttaaatacttttcaagctttgcactgtcatggatattctcatggcaatatcgttacagcaagactgaaaagacaaaccaa

SEQ ID NO: 15011 - DNA, 1148 bp, Glycine max
  Gm_smallRNAprecursor_7844
tgcctcaatcaaacctgagccatccactcaggaatctcccaaaccggcaaccgccaaacaaacatcggccgactatgcatggccaattgaaacccttcaggcccttcaagatatgggtctgaccaaatttccaaaaataatcaaaaaatcttgggcagacattgcctcagaatctgatgatgaatctgaatcaaatttacaaacaatgatccaaaatgcgtcaatgaccaaaacagccaccaatactaaaggaaaactacctttagccaaagcccaaacaccacctaccaaacaaactaacaattatatttataaaaataaattgttaactgttttgcagatggaacctgaattttgggacaaaaatcccttcaaggcgacggccaaggctttcccaccaggatttcactacaaaccaaccaccatcctgaagacaagaactttttatgaattgattttggtagattcaaactcagtatctatcaaacatttcaaagatccaaaagaccaaaccttaaacacccactcaaccatccaaatactaaaagttcttcaaccaagacactttggtacggacttgaacaaaggaaagagattctcagttccatttgatccggtaggttatacctattgggattacgttgatgcttggactaaggtgttttggcaccaaaatacccgcttcaagcattcatggctgatatatttcaagaccaacacaatttacaattttcccaattggtttttgcaatggtgggacttctttggaccaatcccagagatattcccagaaacggtccaacaaggattttcccaatttaagaaacaatacaattcgcaggaatcacgaattccagcagatcttaaatacttttcaagctttgcactgtcatggatattctcatggcaatatcgttacagcaagactgaaaagacaaaccaatatccatcactacaaagacacgcatttgtaaaatggtggacacaatttgactcatccaaagcggatccagaacaagtaaaactatggttcaaatcccatccagaattcctcaaaatggctgatccagagacttctgtgtttttgaaccaaaagtctcacctggcagcatttttagcaggatcgacatcaaaggaggtcttagcta

SEQ ID NO: 15012 - DNA, 1149 bp, Glycine max
  Gm_smallRNAprecursor_7845
tgcctcaatcaaacctgagccatccactcaggaatctcccaaaccggcaaccgccaaacaaacatcggccgactatgcatggccaattgaaacccttcaggcccttcaagatatgggtctgaccaaatttccaaaaataatcaaaaaatcttgggcagacattgcctcagaatctgatgatgaatctgaatcaaatttacaaacaatgatccaaaatgcgtcaatgaccaaaacagccaccaatactaaaggaaaactacctttagccaaagcccaaacaccacctaccaaacaaactaacaattatatttataaaaataaattgttaactgttttgcagatggaacctgaattttgggacaaaaatcccttcaaggcgacggccaaggctttcccaccaggatttcactacaaaccaaccaccatcctgaagacaagaactttttatgaattgattttggtagattcaaactcagtatctatcaaacatttcaaagatccaaaagaccaaaccttaaacacccactcaaccatccaaatactaaaagttcttcaaccaagacactttggtacggacttgaacaaaggaaagagattctcagttccatttgatccggtaggttatacctattgggattacgttgatgcttggactaaggtgttttggcaccaaaatacccgcttcaagcattcatggctgatatatttcaagaccaacacaatttacaattttcccaattggtttttgcaatggtgggacttctttggaccaatcccagagatattcccagaaacggtccaacaaggattttcccaatttaagaaacaatacaattcgcaggaatcacgaattccagcagatcttaaatacttttcaagctttgcactgtcatggatattctcatggcaatatcgttacagcaagactgaaaagacaaaccaatatccatcactacaaagacacgcatttgtaaaatggtggacacaatttgactcatccaaagcggatccagaacaagtaaaactatggttcaaatcccatccagaattcctcaaaatggctgatccagagacttctgtgtttttgaaccaaaagtctcacctggcagcatttttagcaggatcgacatcaaaggaggtcttagctaa

SEQ ID NO: 15013 - DNA, 1249 bp, Glycine max
  Gm_smallRNAprecursor_7846
tgcctcaatcaaacctgagccatccactcaggaatctcccaaaccggcaaccgccaaacaaacatcggccgactatgcatggccaattgaaacccttcaggcccttcaagatatgggtctgaccaaatttccaaaaataatcaaaaaatcttgggcagacattgcctcagaatctgatgatgaatctgaatcaaatttacaaacaatgatccaaaatgcgtcaatgaccaaaacagccaccaatactaaaggaaaactacctttagccaaagcccaaacaccacctaccaaacaaactaacaattatatttataaaaataaattgttaactgttttgcagatggaacctgaattttgggacaaaaatcccttcaaggcgacggccaaggctttcccaccaggatttcactacaaaccaaccaccatcctgaagacaagaactttttatgaattgattttggtagattcaaactcagtatctatcaaacatttcaaagatccaaaagaccaaaccttaaacacccactcaaccatccaaatactaaaagttcttcaaccaagacactttggtacggacttgaacaaaggaaagagattctcagttccatttgatccggtaggttatacctattgggattacgttgatgcttggactaaggtgttttggcaccaaaatacccgcttcaagcattcatggctgatatatttcaagaccaacacaatttacaattttcccaattggtttttgcaatggtgggacttctttggaccaatcccagagatattcccagaaacggtccaacaaggattttcccaatttaagaaacaatacaattcgcaggaatcacgaattccagcagatcttaaatacttttcaagctttgcactgtcatggatattctcatggcaatatcgttacagcaagactgaaaagacaaaccaatatccatcactacaaagacacgcatttgtaaaatggtggacacaatttgactcatccaaagcggatccagaacaagtaaaactatggttcaaatcccatccagaattcctcaaaatggctgatccagagacttctgtgtttttgaaccaaaagtctcacctggcagcatttttagcaggatcgacatcaaaggaggtcttagctaaaaatctgaaggaagttctacaaatgttacaacaagaagaagaagtttcatcctcaaagaaggaagaaacaagttctgccgaagaagacgaagaagatccc

SEQ ID NO: 15014 - DNA, 1134 bp, Glycine max
  Gm_smallRNAprecursor_7847
caaacctgagccatccactcaggaatctcccaaaccggcaaccgccaaacaaacatcggccgactatgcatggccaattgaaacccttcaggcccttcaagatatgggtctgaccaaatttccaaaaataatcaaaaaatcttgggcagacattgcctcagaatctgatgatgaatctgaatcaaatttacaaacaatgatccaaaatgcgtcaatgaccaaaacagccaccaatactaaaggaaaactacctttagccaaagcccaaacaccacctaccaaacaaactaacaattatatttataaaaataaattgttaactgttttgcagatggaacctgaattttgggacaaaaatcccttcaaggcgacggccaaggctttcccaccaggatttcactacaaaccaaccaccatcctgaagacaagaactttttatgaattgattttggtagattcaaactcagtatctatcaaacatttcaaagatccaaaagaccaaaccttaaacacccactcaaccatccaaatactaaaagttcttcaaccaagacactttggtacggacttgaacaaaggaaagagattctcagttccatttgatccggtaggttatacctattgggattacgttgatgcttggactaaggtgttttggcaccaaaatacccgcttcaagcattcatggctgatatatttcaagaccaacacaatttacaattttcccaattggtttttgcaatggtgggacttctttggaccaatcccagagatattcccagaaacggtccaacaaggattttcccaatttaagaaacaatacaattcgcaggaatcacgaattccagcagatcttaaatacttttcaagctttgcactgtcatggatattctcatggcaatatcgttacagcaagactgaaaagacaaaccaatatccatcactacaaagacacgcatttgtaaaatggtggacacaatttgactcatccaaagcggatccagaacaagtaaaactatggttcaaatcccatccagaattcctcaaaatggctgatccagagacttctgtgtttttgaaccaaaagtctcacctggcagcatttttagcaggatcgacatcaaaggaggtctt

SEQ ID NO: 15015 - DNA, 1087 bp, Glycine max
  Gm_smallRNAprecursor_7848
agccatccactcaggaatctcccaaaccggcaaccgccaaacaaacatcggccgactatgcatggccaattgaaacccttcaggcccttcaagatatgggtctgaccaaatttccaaaaataatcaaaaaatcttgggcagacattgcctcagaatctgatgatgaatctgaatcaaatttacaaacaatgatccaaaatgcgtcaatgaccaaaacagccaccaatactaaaggaaaactacctttagccaaagcccaaacaccacctaccaaacaaactaacaattatatttataaaaataaattgttaactgttttgcagatggaacctgaattttgggacaaaaatcccttcaaggcgacggccaaggctttcccaccaggatttcactacaaaccaaccaccatcctgaagacaagaactttttatgaattgattttggtagattcaaactcagtatctatcaaacatttcaaagatccaaaagaccaaaccttaaacacccactcaaccatccaaatactaaaagttcttcaaccaagacactttggtacggacttgaacaaaggaaagagattctcagttccatttgatccggtaggttatacctattgggattacgttgatgcttggactaaggtgttttggcaccaaaatacccgcttcaagcattcatggctgatatatttcaagaccaacacaatttacaattttcccaattggtttttgcaatggtgggacttctttggaccaatcccagagatattcccagaaacggtccaacaaggattttcccaatttaagaaacaatacaattcgcaggaatcacgaattccagcagatcttaaatacttttcaagctttgcactgtcatggatattctcatggcaatatcgttacagcaagactgaaaagacaaaccaatatccatcactacaaagacacgcatttgtaaaatggtggacacaatttgactcatccaaagcggatccagaacaagtaaaactatggttcaaatcccatccagaattcctcaaaatggctgatccagagacttctgtgtttttgaaccaaaagtctcacct

SEQ ID NO: 15016 - DNA, 1090 bp, Glycine max
  Gm_smallRNAprecursor_7849
agccatccactcaggaatctcccaaaccggcaaccgccaaacaaacatcggccgactatgcatggccaattgaaacccttcaggcccttcaagatatgggtctgaccaaatttccaaaaataatcaaaaaatcttgggcagacattgcctcagaatctgatgatgaatctgaatcaaatttacaaacaatgatccaaaatgcgtcaatgaccaaaacagccaccaatactaaaggaaaactacctttagccaaagcccaaacaccacctaccaaacaaactaacaattatatttataaaaataaattgttaactgttttgcagatggaacctgaattttgggacaaaaatcccttcaaggcgacggccaaggctttcccaccaggatttcactacaaaccaaccaccatcctgaagacaagaactttttatgaattgattttggtagattcaaactcagtatctatcaaacatttcaaagatccaaaagaccaaaccttaaacacccactcaaccatccaaatactaaaagttcttcaaccaagacactttggtacggacttgaacaaaggaaagagattctcagttccatttgatccggtaggttatacctattgggattacgttgatgcttggactaaggtgttttggcaccaaaatacccgcttcaagcattcatggctgatatatttcaagaccaacacaatttacaattttcccaattggtttttgcaatggtgggacttctttggaccaatcccagagatattcccagaaacggtccaacaaggattttcccaatttaagaaacaatacaattcgcaggaatcacgaattccagcagatcttaaatacttttcaagctttgcactgtcatggatattctcatggcaatatcgttacagcaagactgaaaagacaaaccaatatccatcactacaaagacacgcatttgtaaaatggtggacacaatttgactcatccaaagcggatccagaacaagtaaaactatggttcaaatcccatccagaattcctcaaaatggctgatccagagacttctgtgtttttgaaccaaaagtctcacctggc

SEQ ID NO: 15017 - DNA, 1129 bp, Glycine max
  Gm_smallRNAprecursor_7850
agccatccactcaggaatctcccaaaccggcaaccgccaaacaaacatcggccgactatgcatggccaattgaaacccttcaggcccttcaagatatgggtctgaccaaatttccaaaaataatcaaaaaatcttgggcagacattgcctcagaatctgatgatgaatctgaatcaaatttacaaacaatgatccaaaatgcgtcaatgaccaaaacagccaccaatactaaaggaaaactacctttagccaaagcccaaacaccacctaccaaacaaactaacaattatatttataaaaataaattgttaactgttttgcagatggaacctgaattttgggacaaaaatcccttcaaggcgacggccaaggctttcccaccaggatttcactacaaaccaaccaccatcctgaagacaagaactttttatgaattgattttggtagattcaaactcagtatctatcaaacatttcaaagatccaaaagaccaaaccttaaacacccactcaaccatccaaatactaaaagttcttcaaccaagacactttggtacggacttgaacaaaggaaagagattctcagttccatttgatccggtaggttatacctattgggattacgttgatgcttggactaaggtgttttggcaccaaaatacccgcttcaagcattcatggctgatatatttcaagaccaacacaatttacaattttcccaattggtttttgcaatggtgggacttctttggaccaatcccagagatattcccagaaacggtccaacaaggattttcccaatttaagaaacaatacaattcgcaggaatcacgaattccagcagatcttaaatacttttcaagctttgcactgtcatggatattctcatggcaatatcgttacagcaagactgaaaagacaaaccaatatccatcactacaaagacacgcatttgtaaaatggtggacacaatttgactcatccaaagcggatccagaacaagtaaaactatggttcaaatcccatccagaattcctcaaaatggctgatccagagacttctgtgtttttgaaccaaaagtctcacctggcagcatttttagcaggatcgacatcaaaggaggtcttagc

SEQ ID NO: 15018 - DNA, 1107 bp, Glycine max
  Gm_smallRNAprecursor_7851
aaccggcaaccgccaaacaaacatcggccgactatgcatggccaattgaaacccttcaggcccttcaagatatgggtctgaccaaatttccaaaaataatcaaaaaatcttgggcagacattgcctcagaatctgatgatgaatctgaatcaaatttacaaacaatgatccaaaatgcgtcaatgaccaaaacagccaccaatactaaaggaaaactacctttagccaaagcccaaacaccacctaccaaacaaactaacaattatatttataaaaataaattgttaactgttttgcagatggaacctgaattttgggacaaaaatcccttcaaggcgacggccaaggctttcccaccaggatttcactacaaaccaaccaccatcctgaagacaagaactttttatgaattgattttggtagattcaaactcagtatctatcaaacatttcaaagatccaaaagaccaaaccttaaacacccactcaaccatccaaatactaaaagttcttcaaccaagacactttggtacggacttgaacaaaggaaagagattctcagttccatttgatccggtaggttatacctattgggattacgttgatgcttggactaaggtgttttggcaccaaaatacccgcttcaagcattcatggctgatatatttcaagaccaacacaatttacaattttcccaattggtttttgcaatggtgggacttctttggaccaatcccagagatattcccagaaacggtccaacaaggattttcccaatttaagaaacaatacaattcgcaggaatcacgaattccagcagatcttaaatacttttcaagctttgcactgtcatggatattctcatggcaatatcgttacagcaagactgaaaagacaaaccaatatccatcactacaaagacacgcatttgtaaaatggtggacacaatttgactcatccaaagcggatccagaacaagtaaaactatggttcaaatcccatccagaattcctcaaaatggctgatccagagacttctgtgtttttgaaccaaaagtctcacctggcagcatttttagcaggatcgacatcaaaggaggtcttagcta

SEQ ID NO: 15019 - DNA, 1107 bp, Glycine max; identical to SEQ ID NO: 15018
  Gm_smallRNAprecursor_7852

SEQ ID NO: 15020 - DNA, 1108 bp, Glycine max
  Gm_smallRNAprecursor_7853
aaccggcaaccgccaaacaaacatcggccgactatgcatggccaattgaaacccttcaggcccttcaagatatgggtctgaccaaatttccaaaaataatcaaaaaatcttgggcagacattgcctcagaatctgatgatgaatctgaatcaaatttacaaacaatgatccaaaatgcgtcaatgaccaaaacagccaccaatactaaaggaaaactacctttagccaaagcccaaacaccacctaccaaacaaactaacaattatatttataaaaataaattgttaactgttttgcagatggaacctgaattttgggacaaaaatcccttcaaggcgacggccaaggctttcccaccaggatttcactacaaaccaaccaccatcctgaagacaagaactttttatgaattgattttggtagattcaaactcagtatctatcaaacatttcaaagatccaaaagaccaaaccttaaacacccactcaaccatccaaatactaaaagttcttcaaccaagacactttggtacggacttgaacaaaggaaagagattctcagttccatttgatccggtaggttatacctattgggattacgttgatgcttggactaaggtgttttggcaccaaaatacccgcttcaagcattcatggctgatatatttcaagaccaacacaatttacaattttcccaattggtttttgcaatggtgggacttctttggaccaatcccagagatattcccagaaacggtccaacaaggattttcccaatttaagaaacaatacaattcgcaggaatcacgaattccagcagatcttaaatacttttcaagctttgcactgtcatggatattctcatggcaatatcgttacagcaagactgaaaagacaaaccaatatccatcactacaaagacacgcatttgtaaaatggtggacacaatttgactcatccaaagcggatccagaacaagtaaaactatggttcaaatcccatccagaattcctcaaaatggctgatccagagacttctgtgtttttgaaccaaaagtctcacctggcagcatttttagcaggatcgacatcaaaggaggtcttagctaa

SEQ ID NO: 15021 - DNA, 1108 bp, Glycine max; identical to SEQ ID NO: 15020
  Gm_smallRNAprecursor_7854

SEQ ID NO: 15022 - DNA, 1102 bp, Glycine max
  Gm_smallRNAprecursor_7855
cggcaaccgccaaacaaacatcggccgactatgcatggccaattgaaacccttcaggcccttcaagatatgggtctgaccaaatttccaaaaataatcaaaaaatcttgggcagacattgcctcagaatctgatgatgaatctgaatcaaatttacaaacaatgatccaaaatgcgtcaatgaccaaaacagccaccaatactaaaggaaaactacctttagccaaagcccaaacaccacctaccaaacaaactaacaattatatttataaaaataaattgttaactgttttgcagatggaacctgaattttgggacaaaaatcccttcaaggcgacggccaaggctttcccaccaggatttcactacaaaccaaccaccatcctgaagacaagaactttttatgaattgattttggtagattcaaactcagtatctatcaaacatttcaaagatccaaaagaccaaaccttaaacacccactcaaccatccaaatactaaaagttcttcaaccaagacactttggtacggacttgaacaaaggaaagagattctcagttccatttgatccggtaggttatacctattgggattacgttgatgcttggactaaggtgttttggcaccaaaatacccgcttcaagcattcatggctgatatatttcaagaccaacacaatttacaattttcccaattggtttttgcaatggtgggacttctttggaccaatcccagagatattcccagaaacggtccaacaaggattttcccaatttaagaaacaatacaattcgcaggaatcacgaattccagcagatcttaaatacttttcaagctttgcactgtcatggatattctcatggcaatatcgttacagcaagactgaaaagacaaaccaatatccatcactacaaagacacgcatttgtaaaatggtggacacaatttgactcatccaaagcggatccagaacaagtaaaactatggttcaaatcccatccagaattcctcaaaatggctgatccagagacttctgtgtttttgaaccaaaagtctcacctggcagcatttttagcaggatcgacatcaaaggaggtcttagc

SEQ ID NO: 15023 - DNA, 1244 bp, Glycine max
  Gm_smallRNAprecursor_7856
caagatatgggtctgaccaaatttccaaaaataatcaaaaaatcttgggcagacattgcctcagaatctgatgatgaatctgaatcaaatttacaaacaatgatccaaaatgcgtcaatgaccaaaacagccaccaatactaaaggaaaactacctttagccaaagcccaaacaccacctaccaaacaaactaacaattatatttataaaaataaattgttaactgttttgcagatggaacctgaattttgggacaaaaatcccttcaaggcgacggccaaggctttcccaccaggatttcactacaaaccaaccaccatcctgaagacaagaactttttatgaattgattttggtagattcaaactcagtatctatcaaacatttcaaagatccaaaagaccaaaccttaaacacccactcaaccatccaaatactaaaagttcttcaaccaagacactttggtacggacttgaacaaaggaaagagattctcagttccatttgatccggtaggttatacctattgggattacgttgatgcttggactaaggtgttttggcaccaaaatacccgcttcaagcattcatggctgatatatttcaagaccaacacaatttacaattttcccaattggtttttgcaatggtgggacttctttggaccaatcccagagatattcccagaaacggtccaacaaggattttcccaatttaagaaacaatacaattcgcaggaatcacgaattccagcagatcttaaatacttttcaagctttgcactgtcatggatattctcatggcaatatcgttacagcaagactgaaaagacaaaccaatatccatcactacaaagacacgcatttgtaaaatggtggacacaatttgactcatccaaagcggatccagaacaagtaaaactatggttcaaatcccatccagaattcctcaaaatggctgatccagagacttctgtgtttttgaaccaaaagtctcacctggcagcatttttagcaggatcgacatcaaaggaggtcttagctaaaaatctgaaggaagttctacaaatgttacaacaagaagaagaagtttcatcctcaaagaaggaagaaacaagttctgccgaagaagacgaagaagatcccttttaccaaaacgaagatgattgttttggtatctgtttagattaaatttaatttcggtcacaaaaccgtttgtttgtaattaatgtgtaattaatgatgga

SEQ ID NO: 15024 - DNA, 1080 bp, Glycine max
  Gm_smallRNAprecursor_7857
ccaaaaataatcaaaaaatcttgggcagacattgcctcagaatctgatgatgaatctgaatcaaatttacaaacaatgatccaaaatgcgtcaatgaccaaaacagccaccaatactaaaggaaaactacctttagccaaagcccaaacaccacctaccaaacaaactaacaattatatttataaaaataaattgttaactgttttgcagatggaacctgaattttgggacaaaaatcccttcaaggcgacggccaaggctttcccaccaggatttcactacaaaccaaccaccatcctgaagacaagaactttttatgaattgattttggtagattcaaactcagtatctatcaaacatttcaaagatccaaaagaccaaaccttaaacacccactcaaccatccaaatactaaaagttcttcaaccaagacactttggtacggacttgaacaaaggaaagagattctcagttccatttgatccggtaggttatacctattgggattacgttgatgcttggactaaggtgttttggcaccaaaatacccgcttcaagcattcatggctgatatatttcaagaccaacacaatttacaattttcccaattggtttttgcaatggtgggacttctttggaccaatcccagagatattcccagaaacggtccaacaaggattttcccaatttaagaaacaatacaattcgcaggaatcacgaattccagcagatcttaaatacttttcaagctttgcactgtcatggatattctcatggcaatatcgttacagcaagactgaaaagacaaaccaatatccatcactacaaagacacgcatttgtaaaatggtggacacaatttgactcatccaaagcggatccagaacaagtaaaactatggttcaaatcccatccagaattcctcaaaatggctgatccagagacttctgtgtttttgaaccaaaagtctcacctggcagcatttttagcaggatcgacatcaaaggaggtcttagctaaaaatctgaaggaagttctacaaatgttacaacaagaagaagaagtttcatcctcaaagaag

SEQ ID NO: 15025 - DNA, 1062 bp, Glycine max
  Gm_smallRNAprecursor_7858
tcttgggcagacattgcctcagaatctgatgatgaatctgaatcaaatttacaaacaatgatccaaaatgcgtcaatgaccaaaacagccaccaatactaaaggaaaactacctttagccaaagcccaaacaccacctaccaaacaaactaacaattatatttataaaaataaattgttaactgttttgcagatggaacctgaattttgggacaaaaatcccttcaaggcgacggccaaggctttcccaccaggatttcactacaaaccaaccaccatcctgaagacaagaactttttatgaattgattttggtagattcaaactcagtatctatcaaacatttcaaagatccaaaagaccaaaccttaaacacccactcaaccatccaaatactaaaagttcttcaaccaagacactttggtacggacttgaacaaaggaaagagattctcagttccatttgatccggtaggttatacctattgggattacgttgatgcttggactaaggtgttttggcaccaaaatacccgcttcaagcattcatggctgatatatttcaagaccaacacaatttacaattttcccaattggtttttgcaatggtgggacttctttggaccaatcccagagatattcccagaaacggtccaacaaggattttcccaatttaagaaacaatacaattcgcaggaatcacgaattccagcagatcttaaatacttttcaagctttgcactgtcatggatattctcatggcaatatcgttacagcaagactgaaaagacaaaccaatatccatcactacaaagacacgcatttgtaaaatggtggacacaatttgactcatccaaagcggatccagaacaagtaaaactatggttcaaatcccatccagaattcctcaaaatggctgatccagagacttctgtgtttttgaaccaaaagtctcacctggcagcatttttagcaggatcgacatcaaaggaggtcttagctaaaaatctgaaggaagttctacaaatgttacaacaagaagaagaagtttcatcctcaaagaag

SEQ ID NO: 15026 - DNA, 1146 bp, Glycine max
  Gm_smallRNAprecursor_7859
aatgatccaaaatgcgtcaatgaccaaaacagccaccaatactaaaggaaaactacctttagccaaagcccaaacaccacctaccaaacaaactaacaattatatttataaaaataaattgttaactgttttgcagatggaacctgaattttgggacaaaaatcccttcaaggcgacggccaaggctttcccaccaggatttcactacaaaccaaccaccatcctgaagacaagaactttttatgaattgattttggtagattcaaactcagtatctatcaaacatttcaaagatccaaaagaccaaaccttaaacacccactcaaccatccaaatactaaaagttcttcaaccaagacactttggtacggacttgaacaaaggaaagagattctcagttccatttgatccggtaggttatacctattgggattacgttgatgcttggactaaggtgttttggcaccaaaatacccgcttcaagcattcatggctgatatatttcaagaccaacacaatttacaattttcccaattggtttttgcaatggtgggacttctttggaccaatcccagagatattcccagaaacggtccaacaaggattttcccaatttaagaaacaatacaattcgcaggaatcacgaattccagcagatcttaaatacttttcaagctttgcactgtcatggatattctcatggcaatatcgttacagcaagactgaaaagacaaaccaatatccatcactacaaagacacgcatttgtaaaatggtggacacaatttgactcatccaaagcggatccagaacaagtaaaactatggttcaaatcccatccagaattcctcaaaatggctgatccagagacttctgtgtttttgaaccaaaagtctcacctggcagcatttttagcaggatcgacatcaaaggaggtcttagctaaaaatctgaaggaagttctacaaatgttacaacaagaagaagaagtttcatcctcaaagaaggaagaaacaagttctgccgaagaagacgaagaagatcccttttaccaaaacgaagatgattgttttggtatctgtttagattaaatttaatttcggtcacaaaaccgtttgtttgtaattaatgtgtaattaatgatgga

SEQ ID NO: 15027 - DNA, 1058 bp, Glycine max
  Gm_smallRNAprecursor_7860
accttaaacacccactcaaccatccaaatactaaaagttcttcaaccaagacactttggtacggacttgaacaaaggaaagagattctcagttccatttgatccggtaggttatacctattgggattacgttgatgcttggactaaggtgttttggcaccaaaatacccgcttcaagcattcatggctgatatatttcaagaccaacacaatttacaattttcccaattggtttttgcaatggtgggacttctttggaccaatcccagagatattcccagaaacggtccaacaaggattttcccaatttaagaaacaatacaattcgcaggaatcacgaattccagcagatcttaaatacttttcaagctttgcactgtcatggatattctcatggcaatatcgttacagcaagactgaaaagacaaaccaatatccatcactacaaagacacgcatttgtaaaatggtggacacaatttgactcatccaaagcggatccagaacaagtaaaactatggttcaaatcccatccagaattcctcaaaatggctgatccagagacttctgtgtttttgaaccaaaagtctcacctggcagcatttttagcaggatcgacatcaaaggaggtcttagctaaaaatctgaaggaagttctacaaatgttacaacaagaagaagaagtttcatcctcaaagaaggaagaaacaagttctgccgaagaagacgaagaagatcccttttaccaaaacgaagatgattgttttggtatctgtttagattaaatttaatttcggtcacaaaaccgtttgtttgtaattaatgtgtaattaatgatggacaatactacctgtcctgtagccattaaagtcccggtcaaaactacttgtcttgtaacaaacagtcaaatagtcccggtcaaaactacttgtcttgtaacaaacagtcaaatagtcccggtcaaaactaccggcaactaccggtcttagattttttggctatataaggagtcctcaagtatgttgtgaggcaccctttcatttagtcatttttcaggttt

SEQ ID NO: 15028 - DNA, 1138 bp, Glycine max
  Gm_smallRNAprecursor_7861
ggtacggacttgaacaaaggaaagagattctcagttccatttgatccggtaggttatacctattgggattacgttgatgcttggactaaggtgttttggcaccaaaatacccgcttcaagcattcatggctgatatatttcaagaccaacacaatttacaattttcccaattggtttttgcaatggtgggacttctttggaccaatcccagagatattcccagaaacggtccaacaaggattttcccaatttaagaaacaatacaattcgcaggaatcacgaattccagcagatcttaaatacttttcaagctttgcactgtcatggatattctcatggcaatatcgttacagcaagactgaaaagacaaaccaatatccatcactacaaagacacgcatttgtaaaatggtggacacaatttgactcatccaaagcggatccagaacaagtaaaactatggttcaaatcccatccagaattcctcaaaatggctgatccagagacttctgtgtttttgaaccaaaagtctcacctggcagcatttttagcaggatcgacatcaaaggaggtcttagctaaaaatctgaaggaagttctacaaatgttacaacaagaagaagaagtttcatcctcaaagaaggaagaaacaagttctgccgaagaagacgaagaagatcccttttaccaaaacgaagatgattgttttggtatctgtttagattaaatttaatttcggtcacaaaaccgtttgtttgtaattaatgtgtaattaatgatggacaatactacctgtcctgtagccattaaagtcccggtcaaaactacttgtcttgtaacaaacagtcaaatagtcccggtcaaaactacttgtcttgtaacaaacagtcaaatagtcccggtcaaaactaccggcaactaccggtcttagattttttggctatataaggagtcctcaagtatgttgtgaggcaccctttcatttagtcatttttcaggtttcggaagagaggtgctctgaaacaagatttttgtaagcgcttctttctagattcaataaatttctatttttcatctttctctcttctcccttcaccgatcctgtgcggctctgccgccgcttcggtttctttgtttat

SEQ ID NO: 15029 - DNA, 1139 bp, Glycine max
  Gm_smallRNAprecursor_7862
ggtacggacttgaacaaaggaaagagattctcagttccatttgatccggtaggttatacctattgggattacgttgatgcttggactaaggtgttttggcaccaaaatacccgcttcaagcattcatggctgatatatttcaagaccaacacaatttacaattttcccaattggtttttgcaatggtgggacttctttggaccaatcccagagatattcccagaaacggtccaacaaggattttcccaatttaagaaacaatacaattcgcaggaatcacgaattccagcagatcttaaatacttttcaagctttgcactgtcatggatattctcatggcaatatcgttacagcaagactgaaaagacaaaccaatatccatcactacaaagacacgcatttgtaaaatggtggacacaatttgactcatccaaagcggatccagaacaagtaaaactatggttcaaatcccatccagaattcctcaaaatggctgatccagagacttctgtgtttttgaaccaaaagtctcacctggcagcatttttagcaggatcgacatcaaaggaggtcttagctaaaaatctgaaggaagttctacaaatgttacaacaagaagaagaagtttcatcctcaaagaaggaagaaacaagttctgccgaagaagacgaagaagatcccttttaccaaaacgaagatgattgttttggtatctgtttagattaaatttaatttcggtcacaaaaccgtttgtttgtaattaatgtgtaattaatgatggacaatactacctgtcctgtagccattaaagtcccggtcaaaactacttgtcttgtaacaaacagtcaaatagtcccggtcaaaactacttgtcttgtaacaaacagtcaaatagtcccggtcaaaactaccggcaactaccggtcttagattttttggctatataaggagtcctcaagtatgttgtgaggcaccctttcatttagtcatttttcaggtttcggaagagaggtgctctgaaacaagatttttgtaagcgcttctttctagattcaataaatttctatttttcatctttctctcttctcccttcaccgatcctgtgcggctctgccgccgcttcggtttctttgtttatg

SEQ ID NO: 15030 - DNA, 1187 bp, Glycine max
  Gm_smallRNAprecursor_7863
ggtacggacttgaacaaaggaaagagattctcagttccatttgatccggtaggttatacctattgggattacgttgatgcttggactaaggtgttttggcaccaaaatacccgcttcaagcattcatggctgatatatttcaagaccaacacaatttacaattttcccaattggtttttgcaatggtgggacttctttggaccaatcccagagatattcccagaaacggtccaacaaggattttcccaatttaagaaacaatacaattcgcaggaatcacgaattccagcagatcttaaatacttttcaagctttgcactgtcatggatattctcatggcaatatcgttacagcaagactgaaaagacaaaccaatatccatcactacaaagacacgcatttgtaaaatggtggacacaatttgactcatccaaagcggatccagaacaagtaaaactatggttcaaatcccatccagaattcctcaaaatggctgatccagagacttctgtgtttttgaaccaaaagtctcacctggcagcatttttagcaggatcgacatcaaaggaggtcttagctaaaaatctgaaggaagttctacaaatgttacaacaagaagaagaagtttcatcctcaaagaaggaagaaacaagttctgccgaagaagacgaagaagatcccttttaccaaaacgaagatgattgttttggtatctgtttagattaaatttaatttcggtcacaaaaccgtttgtttgtaattaatgtgtaattaatgatggacaatactacctgtcctgtagccattaaagtcccggtcaaaactacttgtcttgtaacaaacagtcaaatagtcccggtcaaaactacttgtcttgtaacaaacagtcaaatagtcccggtcaaaactaccggcaactaccggtcttagattttttggctatataaggagtcctcaagtatgttgtgaggcaccctttcatttagtcatttttcaggtttcggaagagaggtgctctgaaacaagatttttgtaagcgcttctttctagattcaataaatttctatttttcatctttctctcttctcccttcaccgatcctgtgcggctctgccgccgcttcggtttctttgtttatgaaaacctgggttttgtaagccggtctccggtgtgaccttgatatctgt

SEQ ID NO: 15031 - DNA, 1057 bp, Glycine max
  Gm_smallRNAprecursor_7864
atttcaagaccaacacaatttacaattttcccaattggtttttgcaatggtgggacttctttggaccaatcccagagatattcccagaaacggtccaacaaggattttcccaatttaagaaacaatacaattcgcaggaatcacgaattccagcagatcttaaatacttttcaagctttgcactgtcatggatattctcatggcaatatcgttacagcaagactgaaaagacaaaccaatatccatcactacaaagacacgcatttgtaaaatggtggacacaatttgactcatccaaagcggatccagaacaagtaaaactatggttcaaatcccatccagaattcctcaaaatggctgatccagagacttctgtgtttttgaaccaaaagtctcacctggcagcatttttagcaggatcgacatcaaaggaggtcttagctaaaaatctgaaggaagttctacaaatgttacaacaagaagaagaagtttcatcctcaaagaaggaagaaacaagttctgccgaagaagacgaagaagatcccttttaccaaaacgaagatgattgttttggtatctgtttagattaaatttaatttcggtcacaaaaccgtttgtttgtaattaatgtgtaattaatgatggacaatactacctgtcctgtagccattaaagtcccggtcaaaactacttgtcttgtaacaaacagtcaaatagtcccggtcaaaactacttgtcttgtaacaaacagtcaaatagtcccggtcaaaactaccggcaactaccggtcttagattttttggctatataaggagtcctcaagtatgttgtgaggcaccctttcatttagtcatttttcaggtttcggaagagaggtgctctgaaacaagatttttgtaagcgcttctttctagattcaataaatttctatttttcatctttctctcttctcccttcaccgatcctgtgcggctctgccgccgcttcggtttctttgtttatgaaaacctgggttttgtaagccggtctccggtgtgaccttgatatctgttttcaa

SEQ ID NO: 15032 - DNA, 1064 bp, Glycine max
  Gm_smallRNAprecursor_7865
atttcaagaccaacacaatttacaattttcccaattggtttttgcaatggtgggacttctttggaccaatcccagagatattcccagaaacggtccaacaaggattttcccaatttaagaaacaatacaattcgcaggaatcacgaattccagcagatcttaaatacttttcaagctttgcactgtcatggatattctcatggcaatatcgttacagcaagactgaaaagacaaaccaatatccatcactacaaagacacgcatttgtaaaatggtggacacaatttgactcatccaaagcggatccagaacaagtaaaactatggttcaaatcccatccagaattcctcaaaatggctgatccagagacttctgtgtttttgaaccaaaagtctcacctggcagcatttttagcaggatcgacatcaaaggaggtcttagctaaaaatctgaaggaagttctacaaatgttacaacaagaagaagaagtttcatcctcaaagaaggaagaaacaagttctgccgaagaagacgaagaagatcccttttaccaaaacgaagatgattgttttggtatctgtttagattaaatttaatttcggtcacaaaaccgtttgtttgtaattaatgtgtaattaatgatggacaatactacctgtcctgtagccattaaagtcccggtcaaaactacttgtcttgtaacaaacagtcaaatagtcccggtcaaaactacttgtcttgtaacaaacagtcaaatagtcccggtcaaaactaccggcaactaccggtcttagattttttggctatataaggagtcctcaagtatgttgtgaggcaccctttcatttagtcatttttcaggtttcggaagagaggtgctctgaaacaagatttttgtaagcgcttctttctagattcaataaatttctatttttcatctttctctcttctcccttcaccgatcctgtgcggctctgccgccgcttcggtttctttgtttatgaaaacctgggttttgtaagccggtctccggtgtgaccttgatatctgttttcaaagtttat

SEQ ID NO: 15033 - DNA, 1059 bp, Glycine max
  Gm_smallRNAprecursor_7866
tttcaagaccaacacaatttacaattttcccaattggtttttgcaatggtgggacttctttggaccaatcccagagatattcccagaaacggtccaacaaggattttcccaatttaagaaacaatacaattcgcaggaatcacgaattccagcagatcttaaatacttttcaagctttgcactgtcatggatattctcatggcaatatcgttacagcaagactgaaaagacaaaccaatatccatcactacaaagacacgcatttgtaaaatggtggacacaatttgactcatccaaagcggatccagaacaagtaaaactatggttcaaatcccatccagaattcctcaaaatggctgatccagagacttctgtgtttttgaaccaaaagtctcacctggcagcatttttagcaggatcgacatcaaaggaggtcttagctaaaaatctgaaggaagttctacaaatgttacaacaagaagaagaagtttcatcctcaaagaaggaagaaacaagttctgccgaagaagacgaagaagatcccttttaccaaaacgaagatgattgttttggtatctgtttagattaaatttaatttcggtcacaaaaccgtttgtttgtaattaatgtgtaattaatgatggacaatactacctgtcctgtagccattaaagtcccggtcaaaactacttgtcttgtaacaaacagtcaaatagtcccggtcaaaactacttgtcttgtaacaaacagtcaaatagtcccggtcaaaactaccggcaactaccggtcttagattttttggctatataaggagtcctcaagtatgttgtgaggcaccctttcatttagtcatttttcaggtttcggaagagaggtgctctgaaacaagatttttgtaagcgcttctttctagattcaataaatttctatttttcatctttctctcttctcccttcaccgatcctgtgcggctctgccgccgcttcggtttctttgtttatgaaaacctgggttttgtaagccggtctccggtgtgaccttgatatctgttttcaaagt

SEQ ID NO: 15034 - DNA, 1060 bp, Glycine max
  Gm_smallRNAprecursor_7867
tttcaagaccaacacaatttacaattttcccaattggtttttgcaatggtgggacttctttggaccaatcccagagatattcccagaaacggtccaacaaggattttcccaatttaagaaacaatacaattcgcaggaatcacgaattccagcagatcttaaatacttttcaagctttgcactgtcatggatattctcatggcaatatcgttacagcaagactgaaaagacaaaccaatatccatcactacaaagacacgcatttgtaaaatggtggacacaatttgactcatccaaagcggatccagaacaagtaaaactatggttcaaatcccatccagaattcctcaaaatggctgatccagagacttctgtgtttttgaaccaaaagtctcacctggcagcatttttagcaggatcgacatcaaaggaggtcttagctaaaaatctgaaggaagttctacaaatgttacaacaagaagaagaagtttcatcctcaaagaaggaagaaacaagttctgccgaagaagacgaagaagatcccttttaccaaaacgaagatgattgttttggtatctgtttagattaaatttaatttcggtcacaaaaccgtttgtttgtaattaatgtgtaattaatgatggacaatactacctgtcctgtagccattaaagtcccggtcaaaactacttgtcttgtaacaaacagtcaaatagtcccggtcaaaactacttgtcttgtaacaaacagtcaaatagtcccggtcaaaactaccggcaactaccggtcttagattttttggctatataaggagtcctcaagtatgttgtgaggcaccctttcatttagtcatttttcaggtttcggaagagaggtgctctgaaacaagatttttgtaagcgcttctttctagattcaataaatttctatttttcatctttctctcttctcccttcaccgatcctgtgcggctctgccgccgcttcggtttctttgtttatgaaaacctgggttttgtaagccggtctccggtgtgaccttgatatctgttttcaaagtt

SEQ ID NO: 15035 - DNA, 1060 bp, Glycine max; identical to SEQ ID NO: 15034
  Gm_smallRNAprecursor_7868

SEQ ID NO: 15036 - DNA, 1063 bp, Glycine max
  Gm_smallRNAprecursor_7869
tttcaagaccaacacaatttacaattttcccaattggtttttgcaatggtgggacttctttggaccaatcccagagatattcccagaaacggtccaacaaggattttcccaatttaagaaacaatacaattcgcaggaatcacgaattccagcagatcttaaatacttttcaagctttgcactgtcatggatattctcatggcaatatcgttacagcaagactgaaaagacaaaccaatatccatcactacaaagacacgcatttgtaaaatggtggacacaatttgactcatccaaagcggatccagaacaagtaaaactatggttcaaatcccatccagaattcctcaaaatggctgatccagagacttctgtgtttttgaaccaaaagtctcacctggcagcatttttagcaggatcgacatcaaaggaggtcttagctaaaaatctgaaggaagttctacaaatgttacaacaagaagaagaagtttcatcctcaaagaaggaagaaacaagttctgccgaagaagacgaagaagatcccttttaccaaaacgaagatgattgttttggtatctgtttagattaaatttaatttcggtcacaaaaccgtttgtttgtaattaatgtgtaattaatgatggacaatactacctgtcctgtagccattaaagtcccggtcaaaactacttgtcttgtaacaaacagtcaaatagtcccggtcaaaactacttgtcttgtaacaaacagtcaaatagtcccggtcaaaactaccggcaactaccggtcttagattttttggctatataaggagtcctcaagtatgttgtgaggcaccctttcatttagtcatttttcaggtttcggaagagaggtgctctgaaacaagatttttgtaagcgcttctttctagattcaataaatttctatttttcatctttctctcttctcccttcaccgatcctgtgcggctctgccgccgcttcggtttctttgtttatgaaaacctgggttttgtaagccggtctccggtgtgaccttgatatctgttttcaaagtttat

SEQ ID NO: 15037 - DNA, 1155 bp, Glycine max
  Gm_smallRNAprecursor_7870
tgggacttctttggaccaatcccagagatattcccagaaacggtccaacaaggattttcccaatttaagaaacaatacaattcgcaggaatcacgaattccagcagatcttaaatacttttcaagctttgcactgtcatggatattctcatggcaatatcgttacagcaagactgaaaagacaaaccaatatccatcactacaaagacacgcatttgtaaaatggtggacacaatttgactcatccaaagcggatccagaacaagtaaaactatggttcaaatcccatccagaattcctcaaaatggctgatccagagacttctgtgtttttgaaccaaaagtctcacctggcagcatttttagcaggatcgacatcaaaggaggtcttagctaaaaatctgaaggaagttctacaaatgttacaacaagaagaagaagtttcatcctcaaagaaggaagaaacaagttctgccgaagaagacgaagaagatcccttttaccaaaacgaagatgattgttttggtatctgtttagattaaatttaatttcggtcacaaaaccgtttgtttgtaattaatgtgtaattaatgatggacaatactacctgtcctgtagccattaaagtcccggtcaaaactacttgtcttgtaacaaacagtcaaatagtcccggtcaaaactacttgtcttgtaacaaacagtcaaatagtcccggtcaaaactaccggcaactaccggtcttagattttttggctatataaggagtcctcaagtatgttgtgaggcaccctttcatttagtcatttttcaggtttcggaagagaggtgctctgaaacaagatttttgtaagcgcttctttctagattcaataaatttctatttttcatctttctctcttctcccttcaccgatcctgtgcggctctgccgccgcttcggtttctttgtttatgaaaacctgggttttgtaagccggtctccggtgtgaccttgatatctgttttcaaagtttataattcttccgtttgattttatcatactgcattcttacttcctatctgtccgtttgatcctattccgctgacctctggtatcagagcctgatggggaagtaggaatagtgtccgtaagggcatatgttaactgaacttatgg

SEQ ID NO: 15038 - DNA, 1197 bp, Glycine max
  Gm_smallRNAprecursor_7871
tgggacttctttggaccaatcccagagatattcccagaaacggtccaacaaggattttcccaatttaagaaacaatacaattcgcaggaatcacgaattccagcagatcttaaatacttttcaagctttgcactgtcatggatattctcatggcaatatcgttacagcaagactgaaaagacaaaccaatatccatcactacaaagacacgcatttgtaaaatggtggacacaatttgactcatccaaagcggatccagaacaagtaaaactatggttcaaatcccatccagaattcctcaaaatggctgatccagagacttctgtgtttttgaaccaaaagtctcacctggcagcatttttagcaggatcgacatcaaaggaggtcttagctaaaaatctgaaggaagttctacaaatgttacaacaagaagaagaagtttcatcctcaaagaaggaagaaacaagttctgccgaagaagacgaagaagatcccttttaccaaaacgaagatgattgttttggtatctgtttagattaaatttaatttcggtcacaaaaccgtttgtttgtaattaatgtgtaattaatgatggacaatactacctgtcctgtagccattaaagtcccggtcaaaactacttgtcttgtaacaaacagtcaaatagtcccggtcaaaactacttgtcttgtaacaaacagtcaaatagtcccggtcaaaactaccggcaactaccggtcttagattttttggctatataaggagtcctcaagtatgttgtgaggcaccctttcatttagtcatttttcaggtttcggaagagaggtgctctgaaacaagatttttgtaagcgcttctttctagattcaataaatttctatttttcatctttctctcttctcccttcaccgatcctgtgcggctctgccgccgcttcggtttctttgtttatgaaaacctgggttttgtaagccggtctccggtgtgaccttgatatctgttttcaaagtttataattcttccgtttgattttatcatactgcattcttacttcctatctgtccgtttgatcctattccgctgacctctggtatcagagcctgatggggaagtaggaatagtgtccgtaagggcatatgttaactgaacttatggatctgaagcatgtacagtaattttaatttaaacagtatgtgt

SEQ ID NO: 15039 - DNA, 1142 bp, Glycine max
  Gm_smallRNAprecursor_7872
gaccaatcccagagatattcccagaaacggtccaacaaggattttcccaatttaagaaacaatacaattcgcaggaatcacgaattccagcagatcttaaatacttttcaagctttgcactgtcatggatattctcatggcaatatcgttacagcaagactgaaaagacaaaccaatatccatcactacaaagacacgcatttgtaaaatggtggacacaatttgactcatccaaagcggatccagaacaagtaaaactatggttcaaatcccatccagaattcctcaaaatggctgatccagagacttctgtgtttttgaaccaaaagtctcacctggcagcatttttagcaggatcgacatcaaaggaggtcttagctaaaaatctgaaggaagttctacaaatgttacaacaagaagaagaagtttcatcctcaaagaaggaagaaacaagttctgccgaagaagacgaagaagatcccttttaccaaaacgaagatgattgttttggtatctgtttagattaaatttaatttcggtcacaaaaccgtttgtttgtaattaatgtgtaattaatgatggacaatactacctgtcctgtagccattaaagtcccggtcaaaactacttgtcttgtaacaaacagtcaaatagtcccggtcaaaactacttgtcttgtaacaaacagtcaaatagtcccggtcaaaactaccggcaactaccggtcttagattttttggctatataaggagtcctcaagtatgttgtgaggcaccctttcatttagtcatttttcaggtttcggaagagaggtgctctgaaacaagatttttgtaagcgcttctttctagattcaataaatttctatttttcatctttctctcttctcccttcaccgatcctgtgcggctctgccgccgcttcggtttctttgtttatgaaaacctgggttttgtaagccggtctccggtgtgaccttgatatctgttttcaaagtttataattcttccgtttgattttatcatactgcattcttacttcctatctgtccgtttgatcctattccgctgacctctggtatcagagcctgatggggaagtaggaatagtgtccgtaagggcatatgttaactgaacttatgg

SEQ ID NO: 15040 - DNA, 1184 bp, Glycine max
  Gm_smallRNAprecursor_7873
gaccaatcccagagatattcccagaaacggtccaacaaggattttcccaatttaagaaacaatacaattcgcaggaatcacgaattccagcagatcttaaatacttttcaagctttgcactgtcatggatattctcatggcaatatcgttacagcaagactgaaaagacaaaccaatatccatcactacaaagacacgcatttgtaaaatggtggacacaatttgactcatccaaagcggatccagaacaagtaaaactatggttcaaatcccatccagaattcctcaaaatggctgatccagagacttctgtgtttttgaaccaaaagtctcacctggcagcatttttagcaggatcgacatcaaaggaggtcttagctaaaaatctgaaggaagttctacaaatgttacaacaagaagaagaagtttcatcctcaaagaaggaagaaacaagttctgccgaagaagacgaagaagatcccttttaccaaaacgaagatgattgttttggtatctgtttagattaaatttaatttcggtcacaaaaccgtttgtttgtaattaatgtgtaattaatgatggacaatactacctgtcctgtagccattaaagtcccggtcaaaactacttgtcttgtaacaaacagtcaaatagtcccggtcaaaactacttgtcttgtaacaaacagtcaaatagtcccggtcaaaactaccggcaactaccggtcttagattttttggctatataaggagtcctcaagtatgttgtgaggcaccctttcatttagtcatttttcaggtttcggaagagaggtgctctgaaacaagatttttgtaagcgcttctttctagattcaataaatttctatttttcatctttctctcttctcccttcaccgatcctgtgcggctctgccgccgcttcggtttctttgtttatgaaaacctgggttttgtaagccggtctccggtgtgaccttgatatctgttttcaaagtttataattcttccgtttgattttatcatactgcattcttacttcctatctgtccgtttgatcctattccgctgacctctggtatcagagcctgatggggaagtaggaatagtgtccgtaagggcatatgttaactgaacttatggatctgaagcatgtacagtaattttaatttaaacagtatgtgt

SEQ ID NO: 15041 - DNA, 1241 bp, Glycine max
  Gm_smallRNAprecursor_7874
aacggtccaacaaggattttcccaatttaagaaacaatacaattcgcaggaatcacgaattccagcagatcttaaatacttttcaagctttgcactgtcatggatattctcatggcaatatcgttacagcaagactgaaaagacaaaccaatatccatcactacaaagacacgcatttgtaaaatggtggacacaatttgactcatccaaagcggatccagaacaagtaaaactatggttcaaatcccatccagaattcctcaaaatggctgatccagagacttctgtgtttttgaaccaaaagtctcacctggcagcatttttagcaggatcgacatcaaaggaggtcttagctaaaaatctgaaggaagttctacaaatgttacaacaagaagaagaagtttcatcctcaaagaaggaagaaacaagttctgccgaagaagacgaagaagatcccttttaccaaaacgaagatgattgttttggtatctgtttagattaaatttaatttcggtcacaaaaccgtttgtttgtaattaatgtgtaattaatgatggacaatactacctgtcctgtagccattaaagtcccggtcaaaactacttgtcttgtaacaaacagtcaaatagtcccggtcaaaactacttgtcttgtaacaaacagtcaaatagtcccggtcaaaactaccggcaactaccggtcttagattttttggctatataaggagtcctcaagtatgttgtgaggcaccctttcatttagtcatttttcaggtttcggaagagaggtgctctgaaacaagatttttgtaagcgcttctttctagattcaataaatttctatttttcatctttctctcttctcccttcaccgatcctgtgcggctctgccgccgcttcggtttctttgtttatgaaaacctgggttttgtaagccggtctccggtgtgaccttgatatctgttttcaaagtttataattcttccgtttgattttatcatactgcattcttacttcctatctgtccgtttgatcctattccgctgacctctggtatcagagcctgatggggaagtaggaatagtgtccgtaagggcatatgttaactgaacttatggatctgaagcatgtacagtaattttaatttaaacagtatgtgtttgaacagtattttctggaagcacagcagtctgatattttagttgaatgatactgtagcagtaagtcccgtggatgagaaag

SEQ ID NO: 15042 - DNA, 1097 bp, Glycine max
  Gm_smallRNAprecursor_7875
ttagattaaatttaatttcggtcacaaaaccgtttgtttgtaattaatgtgtaattaatgatggacaatactacctgtcctgtagccattaaagtcccggtcaaaactacttgtcttgtaacaaacagtcaaatagtcccggtcaaaactacttgtcttgtaacaaacagtcaaatagtcccggtcaaaactaccggcaactaccggtcttagattttttggctatataaggagtcctcaagtatgttgtgaggcaccctttcatttagtcatttttcaggtttcggaagagaggtgctctgaaacaagatttttgtaagcgcttctttctagattcaataaatttctatttttcatctttctctcttctcccttcaccgatcctgtgcggctctgccgccgcttcggtttctttgtttatgaaaacctgggttttgtaagccggtctccggtgtgaccttgatatctgttttcaaagtttataattcttccgtttgattttatcatactgcattcttacttcctatctgtccgtttgatcctattccgctgacctctggtatcagagcctgatggggaagtaggaatagtgtccgtaagggcatatgttaactgaacttatggatctgaagcatgtacagtaattttaatttaaacagtatgtgtttgaacagtattttctggaagcacagcagtctgatattttagttgaatgatactgtagcagtaagtcccgtggatgagaaagggcagtaaggctaaggtgtattgttcaaataaaatattgagacataatatactggtggctataggagtaatgttcaaactatattgtctgtaattcatcaaaaaaaaaaaaataatcttcttttcatttattcagatccaagaagttctgtaacatatagccttatggaaagattcctatggaaccaaatgaaggcaaagatattagagaatgttttaattatgtctagattattgcgatccttttcccgtatctcttttcgctcaaattcctcctcttcatcttcttcaagaaacaccaatctcttaaatgatcaagataaccagacccaagaggtcgccccaaaaca

SEQ ID NO: 15043 - DNA, 1097 bp, Glycine max; identical to SEQ ID NO: 15042
  Gm_smallRNAprecursor_7876

SEQ ID NO: 15044 - DNA, 1098 bp, Glycine max
  Gm_smallRNAprecursor_7877
ttagattaaatttaatttcggtcacaaaaccgtttgtttgtaattaatgtgtaattaatgatggacaatactacctgtcctgtagccattaaagtcccggtcaaaactacttgtcttgtaacaaacagtcaaatagtcccggtcaaaactacttgtcttgtaacaaacagtcaaatagtcccggtcaaaactaccggcaactaccggtcttagattttttggctatataaggagtcctcaagtatgttgtgaggcaccctttcatttagtcatttttcaggtttcggaagagaggtgctctgaaacaagatttttgtaagcgcttctttctagattcaataaatttctatttttcatctttctctcttctcccttcaccgatcctgtgcggctctgccgccgcttcggtttctttgtttatgaaaacctgggttttgtaagccggtctccggtgtgaccttgatatctgttttcaaagtttataattcttccgtttgattttatcatactgcattcttacttcctatctgtccgtttgatcctattccgctgacctctggtatcagagcctgatggggaagtaggaatagtgtccgtaagggcatatgttaactgaacttatggatctgaagcatgtacagtaattttaatttaaacagtatgtgtttgaacagtattttctggaagcacagcagtctgatattttagttgaatgatactgtagcagtaagtcccgtggatgagaaagggcagtaaggctaaggtgtattgttcaaataaaatattgagacataatatactggtggctataggagtaatgttcaaactatattgtctgtaattcatcaaaaaaaaaaaaataatcttcttttcatttattcagatccaagaagttctgtaacatatagccttatggaaagattcctatggaaccaaatgaaggcaaagatattagagaatgttttaattatgtctagattattgcgatccttttcccgtatctcttttcgctcaaattcctcctcttcatcttcttcaagaaacaccaatctcttaaatgatcaagataaccagacccaagaggtcgccccaaaacat

SEQ ID NO: 15045 - DNA, 1176 bp, Glycine max
  Gm_smallRNAprecursor_7878
ttaaatttaatttcggtcacaaaaccgtttgtttgtaattaatgtgtaattaatgatggacaatactacctgtcctgtagccattaaagtcccggtcaaaactacttgtcttgtaacaaacagtcaaatagtcccggtcaaaactacttgtcttgtaacaaacagtcaaatagtcccggtcaaaactaccggcaactaccggtcttagattttttggctatataaggagtcctcaagtatgttgtgaggcaccctttcatttagtcatttttcaggtttcggaagagaggtgctctgaaacaagatttttgtaagcgcttctttctagattcaataaatttctatttttcatctttctctcttctcccttcaccgatcctgtgcggctctgccgccgcttcggtttctttgtttatgaaaacctgggttttgtaagccggtctccggtgtgaccttgatatctgttttcaaagtttataattcttccgtttgattttatcatactgcattcttacttcctatctgtccgtttgatcctattccgctgacctctggtatcagagcctgatggggaagtaggaatagtgtccgtaagggcatatgttaactgaacttatggatctgaagcatgtacagtaattttaatttaaacagtatgtgtttgaacagtattttctggaagcacagcagtctgatattttagttgaatgatactgtagcagtaagtcccgtggatgagaaagggcagtaaggctaaggtgtattgttcaaataaaatattgagacataatatactggtggctataggagtaatgttcaaactatattgtctgtaattcatcaaaaaaaaaaaaataatcttcttttcatttattcagatccaagaagttctgtaacatatagccttatggaaagattcctatggaaccaaatgaaggcaaagatattagagaatgttttaattatgtctagattattgcgatccttttcccgtatctcttttcgctcaaattcctcctcttcatcttcttcaagaaacaccaatctcttaaatgatcaagataaccagacccaagaggtcgccccaaaacataatctcttcgatgaggaagtccgattcgaagatattaaccaaaacatggatgactggaacattccagaaatccctcaggatca

SEQ ID NO: 15046 - DNA, 1047 bp, Glycine max
  Gm_smallRNAprecursor_7879
tggtggctataggagtaatgttcaaactatattgtctgtaattcatcaaaaaaaaaaaaataatcttcttttcatttattcagatccaagaagttctgtaacatatagccttatggaaagattcctatggaaccaaatgaaggcaaagatattagagaatgttttaattatgtctagattattgcgatccttttcccgtatctcttttcgctcaaattcctcctcttcatcttcttcaagaaacaccaatctcttaaatgatcaagataaccagacccaagaggtcgccccaaaacataatctcttcgatgaggaagtccgattcgaagatattaaccaaaacatggatgactggaacattccagaaatccctcaggatcaactatacgttcctgaaacaattaaagacaaacacaactttgattacataatcaaaacagtagaaaacaatattcctctaagacaagatataggggaagaatttcatctactttcaaaaaattcaatttatgaacatagccgtaagtataaatatctacacatcggttgtgtacaagtagccatcaagcccttaattgatatgggcatagatgcagcagttttaatgtgtctaagagatattaggcataatcaatttgaagactccctaattggaacagtcgaaaccagcctaggacaaggtccaatatattttaattgttatccaaacaaaacagtgagtctgatggacaaaaacattcttgactctctgttcttaaacatccactttcatggccttgacatgaaagaaggatcaatcccagcagccttaatttataggatccagtacaaggtcatgaatacttgtgcatctagagttctgttaaaacctcaaaaaggagaaacaaccttgtttatcactgatatgacaaaggctaacgtgtctctcccaagaaaaataaaatgggatgaagtaactcttcccgaaagatgggttatggataaggccacaccgtctattccccgacccgctccaaccatagagcatattaagcaagataactccgg

SEQ ID NO: 15047 - DNA, 1177 bp, Glycine max
  Gm_smallRNAprecursor_7880
tagggaacttagaaaaactaaatccttaattgaaggcgtaggtgacaaccatagtgaattactaaacaagattggtagtttacttaaagtcattccagataccccccaagcctcagaaaatacttccaaaatggtaacaagaagtacctccaaattaatcaatgttattaatgaagatagtgaccaaaactcagataacacaattgagataggatcagtgtcagaaaagaatataaatccaattaattccaaacactggaaaacaccctccaaattatattatcaacgtccaactgcccccgaccttctattagaagaaagaggtgaaaacaattttaagagttttagtgcaaacaacatctatgaatggaacatagatgcacaaacggagtataacatcatgaatacactccaacatatgaccatggtggctacggcttaccaaacctcccatgaatgttcagaagagaccattatagatatcttagtggcaggattttctggacaattaaaaggatggtgggataattatctcactaacgaagagaaatcaaaaatttacagcgcagttaagacggatctcaatggaaaagtcattactaatgacgatgataaagagattcctgacgctgttaacacattaatttttacaatagcccaacatttcattggagacccatccttgtggaaagataggtctgcagaattattgtcaaatcttaagtgtagaaccttagcggattttaggtggtatagagatactttcctaactagggtttacacaagagaagatagtcaacaacctttttggaaagaaaaatttctagctggtcttcccagatcattaggagacaaggttagagataaaatccgtagtcaatctgtcaatggagatattccatatgaaagtttaagctatggtcaactaatttcttacgtccaaaaggtagccttaaaaatttgtcaggatgacaaaattcagaggcaattagccaaagaaaaggctcaaacaaagagagatttaggttctttctgcgaacaatttggtctaccggcctgtccaaaacaaaagaaaaaacaatcctctaaaaaagaaatccatgagaatatatatatatatatatatatatatatatatatatatatatatgtatatacttttctgtgttaatgtgtg

SEQ ID NO: 15048 - DNA, 1158 bp, Glycine max
  Gm_smallRNAprecursor_7881
cttgaaaatagaatttcccgattcaaagaaagaaaatgattttggaaataaaattatgaataaccggatctccactctagagaccaggttaaaccaaatagaaaagacggtagattttctttacgaaaatttcggaaaagaaaaaaatccaaacttttctgaagaacatactagtgggcttatggcattacaaaataaagattgcatccctagaatttgtaataaagagaaaaacaaaagcctacatattttagttaaaataaattttcccaaaataaataaatttaagcaaaccgaaataattctgcaagccttggtagatactggttgttcttttacttctatatgccaaagtgttgtacctcagcaaaattgttttaaaagcaacataataaccaaaactagaacaatgtctggagacataataacaaatgatacagaaacacgaaatttcactattcaattatccataaattgtgaaattttcggtaataaaatttttataaataaagcagatgtggtggacttacgacctgctaaagaaaaaatgattttaggacttgattttattatacataataatagatcaattactattacaaaagattacatattaatctctacaaactcacaaatgtcacctataatagatgaaatcacatcagagttacgaacaaagcgtggtgatgcccccaccaataataaacaatgtccttgtgatacacccggtagttgtaaaataaaagaataaaaaaatcatagcaatatagaaacatgcgacacatcccatgattcttactatgaaagtattttaaatgaaacaaggctacaatacgagttatctgtagcagaatctaattacaaatccgtcaaaattaataaaattataacctttgataatatacaacaaattatagatggattaaataaaactagcataataggagaagaccctacaaaatattgggaaaaagatccagttatatgcaaactagaaatcataaacccagatctaataattaaaactaaagatattcagtatgggaatttcgaacaagaggaatgcaaaagccacataaaaatcctattagatctaaaagttatagcacccaacactagtcctcatagaagccctacttttattgttaataaacactc

SEQ ID NO: 15049 - DNA, 1046 bp, Glycine max
  Gm_smallRNAprecursor_7882
tgtgtaaaataggtttcgataacatgtgcttaataatatcataatgagaatacacataaacatcaacaggctttatatattgcttaagttttgtacaagagaaatacaaacaaagacaaagtttttctatggcagtatatctagtttctgcatcatttagtacacgactaagataataaattgcatgctctacgccatcatcatcttcctgagccaacatgctaccaatggtcttgttagacgcagcaatatacaacttcatagctttgtttcgactaggaggcattaacacaggaggcttgatcagatactctttaatttcatcgaaagccttttgatgctcttcatcccatttgaatggttcatctttcttgagtcgaagtaatggcgaaaaagtttgagctttgccacttagattcgagatgaatctcctcaagaagttgatttttcctagcaaagattgaagctgttttttggtcaaaggaggctttgtctcaagaatagcctttgtcttgttttgatttatctcaatgccttttttatgcaccacaaaaccaaggaaatctcctgcatgcacacaaaaagcacactttaatggattcatttttaatccatttttcctcattcgttcgaaagattgcctaaggtaatccaaatggctatcttcagaggaggatttgatgattatatcatcaatgtaaacttgcataaatgtgtctataaaatcatgaaacatggaattcatggccctttgataagtggtgtcgcaacctacccttcggcgggagggcgacgcgtgactcgcgggttgcgtgttccacgaaaggaatacgcgcggagtcgccaccaacgtttatttgaggaaaacatcggaaaaaccggaaaagacgcgatctacgaacttttaagtgaaaggttcgggagttgtatttacgcacggggaaggtattagcaccccacacgtccgtcccaagggacggcagcctttaatcgaatgtgcaaacatgactttgatttttacgttcccttttatgtccttatatcct

SEQ ID NO: 15050 - DNA, 1071 bp, Glycine max
  Gm_smallRNAprecursor_7883
attggttttctaggtagatgacccagccttggttggtgacccagaagaatctgaggatgattttttagtggacaactctggaagagccagcctagatccttttcctgtacctcgacctcctcacagggaggctcccgatgccttaggaggcattatcgcttttctgtaagaattcacgggtaaggtagtcaggtagcgagtttgaggtgcccttgatatattctatgtcaaaatcaaagacacttaaaatttcttgccatcttgcaaaaatatgttttgaggcaaggtttttaacatctttttgtaaaatatctttggctgatttacaatcaaccctgattaaaaaattttggtttaataaatccgattgaaatttggaaatgcacaaaacaattgctaaaacttcttttttaacagttgaatattttaattgtgcaggattccaatgttttgatgtatatgcaatgacatgatcttgaccatgtattctttgtttgaggatgccaccataacctatgtctgatgcaatggtttcgacaattttaaatgcctgtggaataggaagatacagacattttatggattggactttgagtttgatctctttaactgtttgtgtatggagatcagaccaaggaggcggatttttcttcagcctatcatgcaatggcttgacaatattttttaaataggggacaaattctcctacataatttagacaacctagaaatctttgtcactggattttgtctaagatttggttgggaaattttcaagaaaattctatcgacctttctattggaatgattgtgccttgatgtatattgtgaccaaggaatcgaattcgagtttggaaaagattgatttttgatttggagactgccaaaccattctgtttgatgatatggatgacagtatggagatgtttgaaatgtttgtcaatgttttgggaaaagattaaaacatcatctatgtagacaatgacaaattttgaataaggattaaaaatatcattcataattttttgaaactctgaaggagcattcttcagtccgaatggcatcacattcc

SEQ ID NO: 15051 - DNA, 1131 bp, Glycine max
  Gm_smallRNAprecursor_7884
gacaactctggaagagccagcctagatccttttcctgtacctcgacctcctcacagggaggctcccgatgccttaggaggcattatcgcttttctgtaagaattcacgggtaaggtagtcaggtagcgagtttgaggtgcccttgatatattctatgtcaaaatcaaagacacttaaaatttcttgccatcttgcaaaaatatgttttgaggcaaggtttttaacatctttttgtaaaatatctttggctgatttacaatcaaccctgattaaaaaattttggtttaataaatccgattgaaatttggaaatgcacaaaacaattgctaaaacttcttttttaacagttgaatattttaattgtgcaggattccaatgttttgatgtatatgcaatgacatgatcttgaccatgtattctttgtttgaggatgccaccataacctatgtctgatgcaatggtttcgacaattttaaatgcctgtggaataggaagatacagacattttatggattggactttgagtttgatctctttaactgtttgtgtatggagatcagaccaaggaggcggatttttcttcagcctatcatgcaatggcttgacaatattttttaaataggggacaaattctcctacataatttagacaacctagaaatctttgtcactggattttgtctaagatttggttgggaaattttcaagaaaattctatcgacctttctattggaatgattgtgccttgatgtatattgtgaccaaggaatcgaattcgagtttggaaaagattgatttttgatttggagactgccaaaccattctgtttgatgatatggatgacagtatggagatgtttgaaatgtttgtcaatgttttgggaaaagattaaaacatcatctatgtagacaatgacaaattttgaataaggattaaaaatatcattcataattttttgaaactctgaaggagcattcttcagtccgaatggcatcacattccatttgtattgcccgaaaggtacagtaaacgttgttttgtacctatctgattcttggatttggattttccaaaatccagatttcatatcaaattttgaaaatatctttgcagaatttaatctattaagtaa

SEQ ID NO: 15052 - DNA, 1132 bp, Glycine max
  Gm_smallRNAprecursor_7885
gacaactctggaagagccagcctagatccttttcctgtacctcgacctcctcacagggaggctcccgatgccttaggaggcattatcgcttttctgtaagaattcacgggtaaggtagtcaggtagcgagtttgaggtgcccttgatatattctatgtcaaaatcaaagacacttaaaatttcttgccatcttgcaaaaatatgttttgaggcaaggtttttaacatctttttgtaaaatatctttggctgatttacaatcaaccctgattaaaaaattttggtttaataaatccgattgaaatttggaaatgcacaaaacaattgctaaaacttcttttttaacagttgaatattttaattgtgcaggattccaatgttttgatgtatatgcaatgacatgatcttgaccatgtattctttgtttgaggatgccaccataacctatgtctgatgcaatggtttcgacaattttaaatgcctgtggaataggaagatacagacattttatggattggactttgagtttgatctctttaactgtttgtgtatggagatcagaccaaggaggcggatttttcttcagcctatcatgcaatggcttgacaatattttttaaataggggacaaattctcctacataatttagacaacctagaaatctttgtcactggattttgtctaagatttggttgggaaattttcaagaaaattctatcgacctttctattggaatgattgtgccttgatgtatattgtgaccaaggaatcgaattcgagtttggaaaagattgatttttgatttggagactgccaaaccattctgtttgatgatatggatgacagtatggagatgtttgaaatgtttgtcaatgttttgggaaaagattaaaacatcatctatgtagacaatgacaaattttgaataaggattaaaaatatcattcataattttttgaaactctgaaggagcattcttcagtccgaatggcatcacattccatttgtattgcccgaaaggtacagtaaacgttgttttgtacctatctgattcttggatttggattttccaaaatccagatttcatatcaaattttgaaaatatctttgcagaatttaatctattaagtaaa

SEQ ID NO: 15053 - DNA, 1049 bp, Glycine max
  Gm_smallRNAprecursor_7886
tttgaggtgcccttgatatattctatgtcaaaatcaaagacacttaaaatttcttgccatcttgcaaaaatatgttttgaggcaaggtttttaacatctttttgtaaaatatctttggctgatttacaatcaaccctgattaaaaaattttggtttaataaatccgattgaaatttggaaatgcacaaaacaattgctaaaacttcttttttaacagttgaatattttaattgtgcaggattccaatgttttgatgtatatgcaatgacatgatcttgaccatgtattctttgtttgaggatgccaccataacctatgtctgatgcaatggtttcgacaattttaaatgcctgtggaataggaagatacagacattttatggattggactttgagtttgatctctttaactgtttgtgtatggagatcagaccaaggaggcggatttttcttcagcctatcatgcaatggcttgacaatattttttaaataggggacaaattctcctacataatttagacaacctagaaatctttgtcactggattttgtctaagatttggttgggaaattttcaagaaaattctatcgacctttctattggaatgattgtgccttgatgtatattgtgaccaaggaatcgaattcgagtttggaaaagattgatttttgatttggagactgccaaaccattctgtttgatgatatggatgacagtatggagatgtttgaaatgtttgtcaatgttttgggaaaagattaaaacatcatctatgtagacaatgacaaattttgaataaggattaaaaatatcattcataattttttgaaactctgaaggagcattcttcagtccgaatggcatcacattccatttgtattgcccgaaaggtacagtaaacgttgttttgtacctatctgattcttggatttggattttccaaaatccagatttcatatcaaattttgaaaatatctttgcagaatttaatctattaagtaaatcttttttgtttggaataggatacctaatccattgtaatgcttggtt

SEQ ID NO: 15054 - DNA, 1049 bp, Glycine max; identical to SEQ ID NO: 15053
  Gm_smallRNAprecursor_7887

SEQ ID NO: 15055 - DNA, 1050 bp, Glycine max
  Gm_smallRNAprecursor_7888
tttgaggtgcccttgatatattctatgtcaaaatcaaagacacttaaaatttcttgccatcttgcaaaaatatgttttgaggcaaggtttttaacatctttttgtaaaatatctttggctgatttacaatcaaccctgattaaaaaattttggtttaataaatccgattgaaatttggaaatgcacaaaacaattgctaaaacttcttttttaacagttgaatattttaattgtgcaggattccaatgttttgatgtatatgcaatgacatgatcttgaccatgtattctttgtttgaggatgccaccataacctatgtctgatgcaatggtttcgacaattttaaatgcctgtggaataggaagatacagacattttatggattggactttgagtttgatctctttaactgtttgtgtatggagatcagaccaaggaggcggatttttcttcagcctatcatgcaatggcttgacaatattttttaaataggggacaaattctcctacataatttagacaacctagaaatctttgtcactggattttgtctaagatttggttgggaaattttcaagaaaattctatcgacctttctattggaatgattgtgccttgatgtatattgtgaccaaggaatcgaattcgagtttggaaaagattgatttttgatttggagactgccaaaccattctgtttgatgatatggatgacagtatggagatgtttgaaatgtttgtcaatgttttgggaaaagattaaaacatcatctatgtagacaatgacaaattttgaataaggattaaaaatatcattcataattttttgaaactctgaaggagcattcttcagtccgaatggcatcacattccatttgtattgcccgaaaggtacagtaaacgttgttttgtacctatctgattcttggatttggattttccaaaatccagatttcatatcaaattttgaaaatatctttgcagaatttaatctattaagtaaatcttttttgtttggaataggatacctaatccattgtaatgcttggttt

SEQ ID NO: 15056 - DNA, 1050 bp, Glycine max; identical to SEQ ID NO: 15055
  Gm_smallRNAprecursor_7889

SEQ ID NO: 15057 - DNA, 1047 bp, Glycine max
  Gm_smallRNAprecursor_7890
ttgaggtgcccttgatatattctatgtcaaaatcaaagacacttaaaatttcttgccatcttgcaaaaatatgttttgaggcaaggtttttaacatctttttgtaaaatatctttggctgatttacaatcaaccctgattaaaaaattttggtttaataaatccgattgaaatttggaaatgcacaaaacaattgctaaaacttcttttttaacagttgaatattttaattgtgcaggattccaatgttttgatgtatatgcaatgacatgatcttgaccatgtattctttgtttgaggatgccaccataacctatgtctgatgcaatggtttcgacaattttaaatgcctgtggaataggaagatacagacattttatggattggactttgagtttgatctctttaactgtttgtgtatggagatcagaccaaggaggcggatttttcttcagcctatcatgcaatggcttgacaatattttttaaataggggacaaattctcctacataatttagacaacctagaaatctttgtcactggattttgtctaagatttggttgggaaattttcaagaaaattctatcgacctttctattggaatgattgtgccttgatgtatattgtgaccaaggaatcgaattcgagtttggaaaagattgatttttgatttggagactgccaaaccattctgtttgatgatatggatgacagtatggagatgtttgaaatgtttgtcaatgttttgggaaaagattaaaacatcatctatgtagacaatgacaaattttgaataaggattaaaaatatcattcataattttttgaaactctgaaggagcattcttcagtccgaatggcatcacattccatttgtattgcccgaaaggtacagtaaacgttgttttgtacctatctgattcttggatttggattttccaaaatccagatttcatatcaaattttgaaaatatctttgcagaatttaatctattaagtaaatcttttttgtttggaataggatacctaatccattgtaatgcttggt

SEQ ID NO: 15058 - DNA, 1048 bp, Glycine max
  Gm_smallRNAprecursor_7891
ttgaggtgcccttgatatattctatgtcaaaatcaaagacacttaaaatttcttgccatcttgcaaaaatatgttttgaggcaaggtttttaacatctttttgtaaaatatctttggctgatttacaatcaaccctgattaaaaaattttggtttaataaatccgattgaaatttggaaatgcacaaaacaattgctaaaacttcttttttaacagttgaatattttaattgtgcaggattccaatgttttgatgtatatgcaatgacatgatcttgaccatgtattctttgtttgaggatgccaccataacctatgtctgatgcaatggtttcgacaattttaaatgcctgtggaataggaagatacagacattttatggattggactttgagtttgatctctttaactgtttgtgtatggagatcagaccaaggaggcggatttttcttcagcctatcatgcaatggcttgacaatattttttaaataggggacaaattctcctacataatttagacaacctagaaatctttgtcactggattttgtctaagatttggttgggaaattttcaagaaaattctatcgacctttctattggaatgattgtgccttgatgtatattgtgaccaaggaatcgaattcgagtttggaaaagattgatttttgatttggagactgccaaaccattctgtttgatgatatggatgacagtatggagatgtttgaaatgtttgtcaatgttttgggaaaagattaaaacatcatctatgtagacaatgacaaattttgaataaggattaaaaatatcattcataattttttgaaactctgaaggagcattcttcagtccgaatggcatcacattccatttgtattgcccgaaaggtacagtaaacgttgttttgtacctatctgattcttggatttggattttccaaaatccagatttcatatcaaattttgaaaatatctttgcagaatttaatctattaagtaaatcttttttgtttggaataggatacctaatccattgtaatgcttggtt

SEQ ID NO: 15059 - DNA, 1049 bp, Glycine max
  Gm_smallRNAprecursor_7892
ttgaggtgcccttgatatattctatgtcaaaatcaaagacacttaaaatttcttgccatcttgcaaaaatatgttttgaggcaaggtttttaacatctttttgtaaaatatctttggctgatttacaatcaaccctgattaaaaaattttggtttaataaatccgattgaaatttggaaatgcacaaaacaattgctaaaacttcttttttaacagttgaatattttaattgtgcaggattccaatgttttgatgtatatgcaatgacatgatcttgaccatgtattctttgtttgaggatgccaccataacctatgtctgatgcaatggtttcgacaattttaaatgcctgtggaataggaagatacagacattttatggattggactttgagtttgatctctttaactgtttgtgtatggagatcagaccaaggaggcggatttttcttcagcctatcatgcaatggcttgacaatattttttaaataggggacaaattctcctacataatttagacaacctagaaatctttgtcactggattttgtctaagatttggttgggaaattttcaagaaaattctatcgacctttctattggaatgattgtgccttgatgtatattgtgaccaaggaatcgaattcgagtttggaaaagattgatttttgatttggagactgccaaaccattctgtttgatgatatggatgacagtatggagatgtttgaaatgtttgtcaatgttttgggaaaagattaaaacatcatctatgtagacaatgacaaattttgaataaggattaaaaatatcattcataattttttgaaactctgaaggagcattcttcagtccgaatggcatcacattccatttgtattgcccgaaaggtacagtaaacgttgttttgtacctatctgattcttggatttggattttccaaaatccagatttcatatcaaattttgaaaatatctttgcagaatttaatctattaagtaaatcttttttgtttggaataggatacctaatccattgtaatgcttggttt

SEQ ID NO: 15060 - DNA, 1159 bp, Glycine max
  Gm_smallRNAprecursor_7893
ccatctttcgggaagagttacttcatcccattttatttttctcgggagagaaacattagcctttgtcatatcagtgataaacaaagttgtttctcctttttgaggttttaacaggactctagatgcacaagtattcattactttgtattgaatcctatagatcaaagctgctgggattgatccttctttcatgtcaaggccatgaaagtggatatttaaaaacagagagtcatgaatgtttctgtccattagactcatcgttttgtttggataacagttgaagtatactggaccttgtcctaagcttgtttctactgttccaattaaggaatcttcaaacttgttatgcctaatatctctaaggcacattaaaactgcagcatctatgcccaaatcaattaagggcttgatgactacttgtacacaaccgatatgtaaatacttgtatttacggctatgttcgtaaattgaattttttaaaagtagatgaaattcttcccctatgtcttgtcctagaggaatataattttctactgttttgattatgtaatcaaaattatgtttatctttaactgtttcaggaatgtacaacttatcttgagggatttctgaaatgttccagtcatccatattttgatttatgtcttcgaatcggacttcctcatcgaagagattgtgttttgggacgacctcgtgggtctggttatcttgttcattgagtaaattattggttgaattcattgaagaagaggatgaagatgagtttgatctaaaggaaatatgagagaaagaatgtaaaaggcgagacatattggattcatcctctagtatctttaccgtcatatggttccatataaatgtttccataaggttatatgttactgaatgtcttggatctgaaaaataaagaagatttttttttgagatggaaagtatctctgtaccacctaaagtctgttaaggttctacacttaaggtttgacaacaattctgcagacctatctttccacagagatgggtctccaatgaagtgttgagctattgtaaaaattaatgtattaacagcatcaggaatctccttatcttcgtcattagatattcaaatttcaaacccttttaagaagctgatttacaaacttgtcttctagtaatcgattat

SEQ ID NO: 15061 - DNA, 1037 bp, Glycine max
  Gm_smallRNAprecursor_7894
ttagtgaggcaggcacttaacaccttccttgcttggctaacacatcttgtgaagtgtttatcagaacaggtattttactctgattatatgtttatttttttcaattattttgttcactgtaatcaaaacttgctaattaactatgttttatcaacaggtagctgtgtctctagcaaaatctctagaaagcccggatgaagaggtcgacgatcccctgtacctgatgacattgaccatcccacaactgtttttgaagccgctccaggttatgtgggatgctaccatattcggggtgtttaatcaaaacttcccgttgtatataaaacacgaagatctctctgaaattgcacacggtggtcaatgtctcagcatatctgttatacagttgtggattctgtaagtcattttagattactattaattaccaaagtaattgttttaaattcatacataattaactttgacttaacaacacagccatctgaccgagacaagtgtgcgagcggggaattctgatgtgtatggattcctcgagccacagtccattcagagatctgggcaatcacaatttgaatctgaaagttacatcaagagttggatacaaagttcaaaacgagatgtttaccttggagcctatctgaatgggtaagtcaaacacaataattgaatttaaataatctatactactacaataacccatattcgtctctactgcagcggacactggcaaatggtcgtcattctgcctaaggaaaacctagttgtctggttttgttctttacataataggccagacaactaccttaagggaataattaataggtcagtattgttttcaattcattttcattggcataactcaacaacatcaatattttaatgttcctcatattcaacactagtgctttgaaagaacttgatgatactccacaaccgaaatccaaggctgctgctaggtggattgttgttaaggtacgtgatttaaataaaagttctacttatatatattttatgtgtgtgtacactaattgtagtta

SEQ ID NO: 15062 - DNA, 1044 bp, Glycine max
  Gm_smallRNAprecursor_7895
acttctttttcatcgcaagtttttcactcacttagaatccagagaaaaatcactctttgtctctctcccacttccggggttgttcaacttggaaaagtggcgcatgaatcccaacctgggtctgaaattttcagatctcttactttaacaggttctgtaataacctccatttttttttctttttttgctcccccatgcggtattatgtatatacgactgcttaagtggcctatgtatgacaatgatatttttgtttgaaatttgaaatacaacttctccagtaatgaaatttggctgaatgtataaagagatttataaaattgggggcttaaatgtgcgaattgaattataaggggaccaaaatcgaaattagagtaaaactaggagaccaaaagtataattttacctacaaaaaatgaagtctttacagggaaccatgcagatgttgacacgtgacattaacatgtgacagtcacacgtgacattgacacgtgatagtcaacgtctgaggttaacggtcaatgtccaaatcgggcttccaggaccaattttgcagggatttataaaactgggagaccaaatttgtgaattaaattatagggggaccaaatccgaaattgaagataaactaggagatcaaaagtgtaattttgcccaattaaatacaccatagatccaacagccgtgttattttcccaccgtggggaacgtgtcaaagtctcccacgttagccagcctataagtttaagagttaaaactcttttcccacgcaaacccaaacactcggcgtcatctactcacgcttcattcaacagccacagccaccgcttctgtccacttggtgtgtttcgtttcttttctttctttttctggcacttgttttgtttataaaataggtaaactaaaaacccatagcattgaggcagcggcgtatgtttccgctgccttcatacgtaggagaacgatagtgggagaattaaaattcccttggaccagcagcaaccacgtacattagtctctaatttggtgggtttgggcgggtca

SEQ ID NO: 15063 - DNA, 1065 bp, Glycine max
  Gm_smallRNAprecursor_7896
agaattcccttcgtatgcagccgtaggaagaaaacaaaaaaatagaagtgagaatagtaaagcggaggttgaatgaaggagaagatgtgttcggtgctacgtttaagggaaggaaaaaaaaaactgatttgcacggttagagtagacagatcgtgccagtttaaatttttgtttagatattttttttccaaatttattctttaactaatacacattttattttaaaactcaaacaataagggaacaaaacgtccaaataaatatgtacaaatttttttatatatatattgttgtagattattattattattattaattggttcttcatggacttatttgccacttcaatttcagactcatacaatttatttactttctataggctatttgaataataaaaacaaatacaaatggcgctgcattgaaccaatcattatttgtatataaatttttcaaacgcattataatcaaatttaattcttgggtggaatggtttcagccgtggtatcaggtcctgcttcatcaagtggtcttgtgttcaaatccagcctcaagcacatggttaaccaggctctgataccatggtgaatataattatcttccaagagttaattctcttttttttttaacttttaatttttgaaagaaataaaactaagagtaatttgaatacttgtgagaactgagaagacttcgtcggaccctagtagtaatttagaaggaattatgaatatatgaaactttttgtatactgagttgtttgatcgaagtttttctttttatttattaatgctgtgagtgaaccaattcataaatgacacattcacatttatcttcaatttgttaatttgtcgatttagcatttggtcttgaaggattcctatacctaatgttctcactactcatattctttccaacaagtgtaactttcaatgtatagatcatattgctgatctataatcaacagttaatcattcccccaatttaaacatattaaacagcaatcttacaaatttgatccagaagcagaacccttgatatattcttagtgagaaatcggtttac

SEQ ID NO: 15064 - DNA, 1056 bp, Glycine max
  Gm_smallRNAprecursor_7897
gtagcattcaactaaaatattagactgttgtacttccaggaagtactgttcaaacatttactgtacaaatcaaagtaaaatattactcgtattatacaagattttagtttcagatccataaaatttgttaacatatgtcctttacggacaatattcctacttccccatcaggctctgataccagagatcagcgaaataagatcaaacggacagataggaagtaagaatgcagtatgataaatgaaagacaaatataaacttgtaaagcagatatcaagggcgcaccgaaacggcttacaaacccagattttagaaaacaaagaaaccaaagcgacggcagagccgcacaggatcggtgaggggagaagggagatatgaaaaatagaacttgaaatttattgaaatcgaaagaaaagcttacaaagagtttttccctaggcagagcttctctctctaaaacctggttttggaactatctgaaagagtgcctcacaaagagaacgaggactcctttaaatagactcaatttttactgtttctacagtgtcggtaatgtttaccggaactgttacaaaacttttacaaattacattaataaaaccgaaaattagttacaataattcattattactacaactaattaatcgtcgtctaacgatataccaaaacagtcatcttcattctggtagaatggatcatcttcttggtcatcattagtctcggatgattcggcttccttcttgggaggttcgtcttccacttcttgttgaagtagttggagaacttctttgagattatgagtaagactctctttagattttgagcttgctaagaatgctgctagttgcgacttctgatttagaaacaaagatgtctccggattaccaggtttgaggaactcaggatatatatatatatatatatatatatatatatatatatatatatatatatatatatatatatatatatatatatatttgtgtgtgggtgggagagatcattattattaacatatgataagtttagataatgtttgcgcaagcatcacaaaat

SEQ ID NO: 15065 - DNA, 1118 bp, Glycine max
  Gm_smallRNAprecursor_7898
tattagactgttgtacttccaggaagtactgttcaaacatttactgtacaaatcaaagtaaaatattactcgtattatacaagattttagtttcagatccataaaatttgttaacatatgtcctttacggacaatattcctacttccccatcaggctctgataccagagatcagcgaaataagatcaaacggacagataggaagtaagaatgcagtatgataaatgaaagacaaatataaacttgtaaagcagatatcaagggcgcaccgaaacggcttacaaacccagattttagaaaacaaagaaaccaaagcgacggcagagccgcacaggatcggtgaggggagaagggagatatgaaaaatagaacttgaaatttattgaaatcgaaagaaaagcttacaaagagtttttccctaggcagagcttctctctctaaaacctggttttggaactatctgaaagagtgcctcacaaagagaacgaggactcctttaaatagactcaatttttactgtttctacagtgtcggtaatgtttaccggaactgttacaaaacttttacaaattacattaataaaaccgaaaattagttacaataattcattattactacaactaattaatcgtcgtctaacgatataccaaaacagtcatcttcattctggtagaatggatcatcttcttggtcatcattagtctcggatgattcggcttccttcttgggaggttcgtcttccacttcttgttgaagtagttggagaacttctttgagattatgagtaagactctctttagattttgagcttgctaagaatgctgctagttgcgacttctgatttagaaacaaagatgtctccggattaccaggtttgaggaactcaggatatatatatatatatatatatatatatatatatatatatatatatatatatatatatatatatatatatatatatttgtgtgtgggtgggagagatcattattattaacatatgataagtttagataatgtttgcgcaagcatcacaaaatatgcttagcaatatgtacctaccgcctgtaatatataaatgaatatataaaaatagttaagcttatatacaaatatatt

SEQ ID NO: 15066 - DNA, 1145 bp, Glycine max
  Gm_smallRNAprecursor_7899
acagataggaagtaagaatgcagtatgataaatgaaagacaaatataaacttgtaaagcagatatcaagggcgcaccgaaacggcttacaaacccagattttagaaaacaaagaaaccaaagcgacggcagagccgcacaggatcggtgaggggagaagggagatatgaaaaatagaacttgaaatttattgaaatcgaaagaaaagcttacaaagagtttttccctaggcagagcttctctctctaaaacctggttttggaactatctgaaagagtgcctcacaaagagaacgaggactcctttaaatagactcaatttttactgtttctacagtgtcggtaatgtttaccggaactgttacaaaacttttacaaattacattaataaaaccgaaaattagttacaataattcattattactacaactaattaatcgtcgtctaacgatataccaaaacagtcatcttcattctggtagaatggatcatcttcttggtcatcattagtctcggatgattcggcttccttcttgggaggttcgtcttccacttcttgttgaagtagttggagaacttctttgagattatgagtaagactctctttagattttgagcttgctaagaatgctgctagttgcgacttctgatttagaaacaaagatgtctccggattaccaggtttgaggaactcaggatatatatatatatatatatatatatatatatatatatatatatatatatatatatatatatatatatatatatatttgtgtgtgggtgggagagatcattattattaacatatgataagtttagataatgtttgcgcaagcatcacaaaatatgcttagcaatatgtacctaccgcctgtaatatataaatgaatatataaaaatagttaagcttatatacaaatatattagatatagaaagtaaaaattaacaacacatcatataaaatatataagagtcttaccggaattaaaaataaataaaatattttacatatattaaaattaataaaattcaaatttataaggattaaaattagaaaattaaatttacaatgattaaaaaaaatatattaacttatgaggataaaaatatatttaaatatataaataatcatataaaatgttt

SEQ ID NO: 15067 - DNA, 1146 bp, Glycine max
  Gm_smallRNAprecursor_7900
acagataggaagtaagaatgcagtatgataaatgaaagacaaatataaacttgtaaagcagatatcaagggcgcaccgaaacggcttacaaacccagattttagaaaacaaagaaaccaaagcgacggcagagccgcacaggatcggtgaggggagaagggagatatgaaaaatagaacttgaaatttattgaaatcgaaagaaaagcttacaaagagtttttccctaggcagagcttctctctctaaaacctggttttggaactatctgaaagagtgcctcacaaagagaacgaggactcctttaaatagactcaatttttactgtttctacagtgtcggtaatgtttaccggaactgttacaaaacttttacaaattacattaataaaaccgaaaattagttacaataattcattattactacaactaattaatcgtcgtctaacgatataccaaaacagtcatcttcattctggtagaatggatcatcttcttggtcatcattagtctcggatgattcggcttccttcttgggaggttcgtcttccacttcttgttgaagtagttggagaacttctttgagattatgagtaagactctctttagattttgagcttgctaagaatgctgctagttgcgacttctgatttagaaacaaagatgtctccggattaccaggtttgaggaactcaggatatatatatatatatatatatatatatatatatatatatatatatatatatatatatatatatatatatatatatttgtgtgtgggtgggagagatcattattattaacatatgataagtttagataatgtttgcgcaagcatcacaaaatatgcttagcaatatgtacctaccgcctgtaatatataaatgaatatataaaaatagttaagcttatatacaaatatattagatatagaaagtaaaaattaacaacacatcatataaaatatataagagtcttaccggaattaaaaataaataaaatattttacatatattaaaattaataaaattcaaatttataaggattaaaattagaaaattaaatttacaatgattaaaaaaaatatattaacttatgaggataaaaatatatttaaatatataaataatcatataaaatgtttt

SEQ ID NO: 15068 - DNA, 1215 bp, Glycine max
  Gm_smallRNAprecursor_7901
atcaacgaaaattcaaacaaacacaacaatatcagttccacacgcacggtcttcaaacaacacatttcaaacaaccaaaacaatatcattcatcacaatacacacacacacacacacacagacacacacacacacacacacacacacacacacacacacacacagagatatatatatatatatatatatatatatatatatatatatatagcagatatcatgggcacaccgaaacggcttacaaacccaggtttttgaaaacaaagaaaccaaagcgacggcagagccgcacaggatcggtgaggggagaagggagatgtggaaaatagaacttgaaatttattgaaaccgaaagaaaagcttacaaaaagtttttccctaggcagagcttctctctctaaaaacctgattctgagactatctaaaagggtgcctcacaaagggaacgaggattcctttaaatagacccaatttttactgtttctacagtgtcggtaatgtttaccggaactgttacaaaacttttacaaattacattatttaaaagaaactgacaaattagttacaataattcatgattactacaacttattaatcgtcgtctaatgatataccaaaacaatcatcttcattctggtagaacggatcatcttcttggtcatcattagtctcggatgattcagcttccttcttggaaggttcttcttccacttcctgttgaagtagttggagaacttctttgagattctgagcaagactcgctttagattttgagcttgctaagaatgctgccagttgcgacttctgatttagaaacaaagatgtctccggatcagcaggtttaaggaactcaggattgctctggaaccagttcttgacttgatttggagcagcctttgaagtatcgaattgtgaccactattttacaaaggcgtgtctctgtaacggtggatattgcttgctgttttcagtttttccgtatctgtattgccatgaaaagatccatgacaaggcaaaactggaaaagtactttaaatctgccggaatatgtgattccttgatattatagagcttgttgaattgttggaatccctgttggacttcttctgggaatatttgtggaattggtccgaagtagttccaccattggaggaaccaatttggaaaattatacgcaatattattttagaagtaaattagccatgaatgcttgaa

SEQ ID NO: 15069 - DNA, 1145 bp, Glycine max
  Gm_smallRNAprecursor_7902
cacagagatatatatatatatatatatatatatatatatatatatatatagcagatatcatgggcacaccgaaacggcttacaaacccaggtttttgaaaacaaagaaaccaaagcgacggcagagccgcacaggatcggtgaggggagaagggagatgtggaaaatagaacttgaaatttattgaaaccgaaagaaaagcttacaaaaagtttttccctaggcagagcttctctctctaaaaacctgattctgagactatctaaaagggtgcctcacaaagggaacgaggattcctttaaatagacccaatttttactgtttctacagtgtcggtaatgtttaccggaactgttacaaaacttttacaaattacattatttaaaagaaactgacaaattagttacaataattcatgattactacaacttattaatcgtcgtctaatgatataccaaaacaatcatcttcattctggtagaacggatcatcttcttggtcatcattagtctcggatgattcagcttccttcttggaaggttcttcttccacttcctgttgaagtagttggagaacttctttgagattctgagcaagactcgctttagattttgagcttgctaagaatgctgccagttgcgacttctgatttagaaacaaagatgtctccggatcagcaggtttaaggaactcaggattgctctggaaccagttcttgacttgatttggagcagcctttgaagtatcgaattgtgaccactattttacaaaggcgtgtctctgtaacggtggatattgcttgctgttttcagtttttccgtatctgtattgccatgaaaagatccatgacaaggcaaaactggaaaagtactttaaatctgccggaatatgtgattccttgatattatagagcttgttgaattgttggaatccctgttggacttcttctgggaatatttgtggaattggtccgaagtagttccaccattggaggaaccaatttggaaaattatacgcaatattattttagaagtaaattagccatgaatgcttgaatttactattttgatgccaaaacacattggtccaggcgtcaatgtaatcccaataattatatcctgcagggtcaaatggtgcagaaaattt

SEQ ID NO: 15070 - DNA, 1146 bp, Glycine max
  Gm_smallRNAprecursor_7903
cacagagatatatatatatatatatatatatatatatatatatatatatagcagatatcatgggcacaccgaaacggcttacaaacccaggtttttgaaaacaaagaaaccaaagcgacggcagagccgcacaggatcggtgaggggagaagggagatgtggaaaatagaacttgaaatttattgaaaccgaaagaaaagcttacaaaaagtttttccctaggcagagcttctctctctaaaaacctgattctgagactatctaaaagggtgcctcacaaagggaacgaggattcctttaaatagacccaatttttactgtttctacagtgtcggtaatgtttaccggaactgttacaaaacttttacaaattacattatttaaaagaaactgacaaattagttacaataattcatgattactacaacttattaatcgtcgtctaatgatataccaaaacaatcatcttcattctggtagaacggatcatcttcttggtcatcattagtctcggatgattcagcttccttcttggaaggttcttcttccacttcctgttgaagtagttggagaacttctttgagattctgagcaagactcgctttagattttgagcttgctaagaatgctgccagttgcgacttctgatttagaaacaaagatgtctccggatcagcaggtttaaggaactcaggattgctctggaaccagttcttgacttgatttggagcagcctttgaagtatcgaattgtgaccactattttacaaaggcgtgtctctgtaacggtggatattgcttgctgttttcagtttttccgtatctgtattgccatgaaaagatccatgacaaggcaaaactggaaaagtactttaaatctgccggaatatgtgattccttgatattatagagcttgttgaattgttggaatccctgttggacttcttctgggaatatttgtggaattggtccgaagtagttccaccattggaggaaccaatttggaaaattatacgcaatattattttagaagtaaattagccatgaatgcttgaatttactattttgatgccaaaacacattggtccaggcgtcaatgtaatcccaataattatatcctgcagggtcaaatggtgcagaaaatttt

SEQ ID NO: 15071 - DNA, 1138 bp, Glycine max
  Gm_smallRNAprecursor_7904
cacaccgaaacggcttacaaacccaggtttttgaaaacaaagaaaccaaagcgacggcagagccgcacaggatcggtgaggggagaagggagatgtggaaaatagaacttgaaatttattgaaaccgaaagaaaagcttacaaaaagtttttccctaggcagagcttctctctctaaaaacctgattctgagactatctaaaagggtgcctcacaaagggaacgaggattcctttaaatagacccaatttttactgtttctacagtgtcggtaatgtttaccggaactgttacaaaacttttacaaattacattatttaaaagaaactgacaaattagttacaataattcatgattactacaacttattaatcgtcgtctaatgatataccaaaacaatcatcttcattctggtagaacggatcatcttcttggtcatcattagtctcggatgattcagcttccttcttggaaggttcttcttccacttcctgttgaagtagttggagaacttctttgagattctgagcaagactcgctttagattttgagcttgctaagaatgctgccagttgcgacttctgatttagaaacaaagatgtctccggatcagcaggtttaaggaactcaggattgctctggaaccagttcttgacttgatttggagcagcctttgaagtatcgaattgtgaccactattttacaaaggcgtgtctctgtaacggtggatattgcttgctgttttcagtttttccgtatctgtattgccatgaaaagatccatgacaaggcaaaactggaaaagtactttaaatctgccggaatatgtgattccttgatattatagagcttgttgaattgttggaatccctgttggacttcttctgggaatatttgtggaattggtccgaagtagttccaccattggaggaaccaatttggaaaattatacgcaatattattttagaagtaaattagccatgaatgcttgaatttactattttgatgccaaaacacattggtccaggcgtcaatgtaatcccaataattatatcctgcagggtcaaatggtgcagaaaattttttgggttggtttaagtttgagccataatgtcgtggctgcataacctttaagatttg

SEQ ID NO: 15072 - DNA, 1071 bp, Glycine max
  Gm_smallRNAprecursor_7905
cggcttacaaacccaggtttttgaaaacaaagaaaccaaagcgacggcagagccgcacaggatcggtgaggggagaagggagatgtggaaaatagaacttgaaatttattgaaaccgaaagaaaagcttacaaaaagtttttccctaggcagagcttctctctctaaaaacctgattctgagactatctaaaagggtgcctcacaaagggaacgaggattcctttaaatagacccaatttttactgtttctacagtgtcggtaatgtttaccggaactgttacaaaacttttacaaattacattatttaaaagaaactgacaaattagttacaataattcatgattactacaacttattaatcgtcgtctaatgatataccaaaacaatcatcttcattctggtagaacggatcatcttcttggtcatcattagtctcggatgattcagcttccttcttggaaggttcttcttccacttcctgttgaagtagttggagaacttctttgagattctgagcaagactcgctttagattttgagcttgctaagaatgctgccagttgcgacttctgatttagaaacaaagatgtctccggatcagcaggtttaaggaactcaggattgctctggaaccagttcttgacttgatttggagcagcctttgaagtatcgaattgtgaccactattttacaaaggcgtgtctctgtaacggtggatattgcttgctgttttcagtttttccgtatctgtattgccatgaaaagatccatgacaaggcaaaactggaaaagtactttaaatctgccggaatatgtgattccttgatattatagagcttgttgaattgttggaatccctgttggacttcttctgggaatatttgtggaattggtccgaagtagttccaccattggaggaaccaatttggaaaattatacgcaatattattttagaagtaaattagccatgaatgcttgaatttactattttgatgccaaaacacattggtccaggcgtcaatgtaatcccaataattatatcctgcagggtcaaatggtgcagaaaattt

SEQ ID NO: 15073 - DNA, 1072 bp, Glycine max
  Gm_smallRNAprecursor_7906
cggcttacaaacccaggtttttgaaaacaaagaaaccaaagcgacggcagagccgcacaggatcggtgaggggagaagggagatgtggaaaatagaacttgaaatttattgaaaccgaaagaaaagcttacaaaaagtttttccctaggcagagcttctctctctaaaaacctgattctgagactatctaaaagggtgcctcacaaagggaacgaggattcctttaaatagacccaatttttactgtttctacagtgtcggtaatgtttaccggaactgttacaaaacttttacaaattacattatttaaaagaaactgacaaattagttacaataattcatgattactacaacttattaatcgtcgtctaatgatataccaaaacaatcatcttcattctggtagaacggatcatcttcttggtcatcattagtctcggatgattcagcttccttcttggaaggttcttcttccacttcctgttgaagtagttggagaacttctttgagattctgagcaagactcgctttagattttgagcttgctaagaatgctgccagttgcgacttctgatttagaaacaaagatgtctccggatcagcaggtttaaggaactcaggattgctctggaaccagttcttgacttgatttggagcagcctttgaagtatcgaattgtgaccactattttacaaaggcgtgtctctgtaacggtggatattgcttgctgttttcagtttttccgtatctgtattgccatgaaaagatccatgacaaggcaaaactggaaaagtactttaaatctgccggaatatgtgattccttgatattatagagcttgttgaattgttggaatccctgttggacttcttctgggaatatttgtggaattggtccgaagtagttccaccattggaggaaccaatttggaaaattatacgcaatattattttagaagtaaattagccatgaatgcttgaatttactattttgatgccaaaacacattggtccaggcgtcaatgtaatcccaataattatatcctgcagggtcaaatggtgcagaaaatttt

SEQ ID NO: 15074 - DNA, 1040 bp, Glycine max
  Gm_smallRNAprecursor_7907
cttacaaacccaggtttttgaaaacaaagaaaccaaagcgacggcagagccgcacaggatcggtgaggggagaagggagatgtggaaaatagaacttgaaatttattgaaaccgaaagaaaagcttacaaaaagtttttccctaggcagagcttctctctctaaaaacctgattctgagactatctaaaagggtgcctcacaaagggaacgaggattcctttaaatagacccaatttttactgtttctacagtgtcggtaatgtttaccggaactgttacaaaacttttacaaattacattatttaaaagaaactgacaaattagttacaataattcatgattactacaacttattaatcgtcgtctaatgatataccaaaacaatcatcttcattctggtagaacggatcatcttcttggtcatcattagtctcggatgattcagcttccttcttggaaggttcttcttccacttcctgttgaagtagttggagaacttctttgagattctgagcaagactcgctttagattttgagcttgctaagaatgctgccagttgcgacttctgatttagaaacaaagatgtctccggatcagcaggtttaaggaactcaggattgctctggaaccagttcttgacttgatttggagcagcctttgaagtatcgaattgtgaccactattttacaaaggcgtgtctctgtaacggtggatattgcttgctgttttcagtttttccgtatctgtattgccatgaaaagatccatgacaaggcaaaactggaaaagtactttaaatctgccggaatatgtgattccttgatattatagagcttgttgaattgttggaatccctgttggacttcttctgggaatatttgtggaattggtccgaagtagttccaccattggaggaaccaatttggaaaattatacgcaatattattttagaagtaaattagccatgaatgcttgaatttactattttgatgccaaaacacattggtccaggcgtcaatgtaatcccaataattatatc

SEQ ID NO: 15075 - DNA, 1068 bp, Glycine max
  Gm_smallRNAprecursor_7908
cttacaaacccaggtttttgaaaacaaagaaaccaaagcgacggcagagccgcacaggatcggtgaggggagaagggagatgtggaaaatagaacttgaaatttattgaaaccgaaagaaaagcttacaaaaagtttttccctaggcagagcttctctctctaaaaacctgattctgagactatctaaaagggtgcctcacaaagggaacgaggattcctttaaatagacccaatttttactgtttctacagtgtcggtaatgtttaccggaactgttacaaaacttttacaaattacattatttaaaagaaactgacaaattagttacaataattcatgattactacaacttattaatcgtcgtctaatgatataccaaaacaatcatcttcattctggtagaacggatcatcttcttggtcatcattagtctcggatgattcagcttccttcttggaaggttcttcttccacttcctgttgaagtagttggagaacttctttgagattctgagcaagactcgctttagattttgagcttgctaagaatgctgccagttgcgacttctgatttagaaacaaagatgtctccggatcagcaggtttaaggaactcaggattgctctggaaccagttcttgacttgatttggagcagcctttgaagtatcgaattgtgaccactattttacaaaggcgtgtctctgtaacggtggatattgcttgctgttttcagtttttccgtatctgtattgccatgaaaagatccatgacaaggcaaaactggaaaagtactttaaatctgccggaatatgtgattccttgatattatagagcttgttgaattgttggaatccctgttggacttcttctgggaatatttgtggaattggtccgaagtagttccaccattggaggaaccaatttggaaaattatacgcaatattattttagaagtaaattagccatgaatgcttgaatttactattttgatgccaaaacacattggtccaggcgtcaatgtaatcccaataattatatcctgcagggtcaaatggtgcagaaaattt

SEQ ID NO: 15076 - DNA, 1069 bp, Glycine max
  Gm_smallRNAprecursor_7909
cttacaaacccaggtttttgaaaacaaagaaaccaaagcgacggcagagccgcacaggatcggtgaggggagaagggagatgtggaaaatagaacttgaaatttattgaaaccgaaagaaaagcttacaaaaagtttttccctaggcagagcttctctctctaaaaacctgattctgagactatctaaaagggtgcctcacaaagggaacgaggattcctttaaatagacccaatttttactgtttctacagtgtcggtaatgtttaccggaactgttacaaaacttttacaaattacattatttaaaagaaactgacaaattagttacaataattcatgattactacaacttattaatcgtcgtctaatgatataccaaaacaatcatcttcattctggtagaacggatcatcttcttggtcatcattagtctcggatgattcagcttccttcttggaaggttcttcttccacttcctgttgaagtagttggagaacttctttgagattctgagcaagactcgctttagattttgagcttgctaagaatgctgccagttgcgacttctgatttagaaacaaagatgtctccggatcagcaggtttaaggaactcaggattgctctggaaccagttcttgacttgatttggagcagcctttgaagtatcgaattgtgaccactattttacaaaggcgtgtctctgtaacggtggatattgcttgctgttttcagtttttccgtatctgtattgccatgaaaagatccatgacaaggcaaaactggaaaagtactttaaatctgccggaatatgtgattccttgatattatagagcttgttgaattgttggaatccctgttggacttcttctgggaatatttgtggaattggtccgaagtagttccaccattggaggaaccaatttggaaaattatacgcaatattattttagaagtaaattagccatgaatgcttgaatttactattttgatgccaaaacacattggtccaggcgtcaatgtaatcccaataattatatcctgcagggtcaaatggtgcagaaaatttt

SEQ ID NO: 15077 - DNA, 1048 bp, Glycine max
  Gm_smallRNAprecursor_7910
gggagaagggagatgtggaaaatagaacttgaaatttattgaaaccgaaagaaaagcttacaaaaagtttttccctaggcagagcttctctctctaaaaacctgattctgagactatctaaaagggtgcctcacaaagggaacgaggattcctttaaatagacccaatttttactgtttctacagtgtcggtaatgtttaccggaactgttacaaaacttttacaaattacattatttaaaagaaactgacaaattagttacaataattcatgattactacaacttattaatcgtcgtctaatgatataccaaaacaatcatcttcattctggtagaacggatcatcttcttggtcatcattagtctcggatgattcagcttccttcttggaaggttcttcttccacttcctgttgaagtagttggagaacttctttgagattctgagcaagactcgctttagattttgagcttgctaagaatgctgccagttgcgacttctgatttagaaacaaagatgtctccggatcagcaggtttaaggaactcaggattgctctggaaccagttcttgacttgatttggagcagcctttgaagtatcgaattgtgaccactattttacaaaggcgtgtctctgtaacggtggatattgcttgctgttttcagtttttccgtatctgtattgccatgaaaagatccatgacaaggcaaaactggaaaagtactttaaatctgccggaatatgtgattccttgatattatagagcttgttgaattgttggaatccctgttggacttcttctgggaatatttgtggaattggtccgaagtagttccaccattggaggaaccaatttggaaaattatacgcaatattattttagaagtaaattagccatgaatgcttgaatttactattttgatgccaaaacacattggtccaggcgtcaatgtaatcccaataattatatcctgcagggtcaaatggtgcagaaaattttttgggttggtttaagtttgagccataatgtcgtggctgcataacct

SEQ ID NO: 15078 - DNA, 1047 bp, Glycine max
  Gm_smallRNAprecursor_7911
ggagaagggagatgtggaaaatagaacttgaaatttattgaaaccgaaagaaaagcttacaaaaagtttttccctaggcagagcttctctctctaaaaacctgattctgagactatctaaaagggtgcctcacaaagggaacgaggattcctttaaatagacccaatttttactgtttctacagtgtcggtaatgtttaccggaactgttacaaaacttttacaaattacattatttaaaagaaactgacaaattagttacaataattcatgattactacaacttattaatcgtcgtctaatgatataccaaaacaatcatcttcattctggtagaacggatcatcttcttggtcatcattagtctcggatgattcagcttccttcttggaaggttcttcttccacttcctgttgaagtagttggagaacttctttgagattctgagcaagactcgctttagattttgagcttgctaagaatgctgccagttgcgacttctgatttagaaacaaagatgtctccggatcagcaggtttaaggaactcaggattgctctggaaccagttcttgacttgatttggagcagcctttgaagtatcgaattgtgaccactattttacaaaggcgtgtctctgtaacggtggatattgcttgctgttttcagtttttccgtatctgtattgccatgaaaagatccatgacaaggcaaaactggaaaagtactttaaatctgccggaatatgtgattccttgatattatagagcttgttgaattgttggaatccctgttggacttcttctgggaatatttgtggaattggtccgaagtagttccaccattggaggaaccaatttggaaaattatacgcaatattattttagaagtaaattagccatgaatgcttgaatttactattttgatgccaaaacacattggtccaggcgtcaatgtaatcccaataattatatcctgcagggtcaaatggtgcagaaaattttttgggttggtttaagtttgagccataatgtcgtggctgcataacct

SEQ ID NO: 15079 - DNA, 1120 bp, Glycine max
  Gm_smallRNAprecursor_7912
aaagaaaagcttacaaaaagtttttccctaggcagagcttctctctctaaaaacctgattctgagactatctaaaagggtgcctcacaaagggaacgaggattcctttaaatagacccaatttttactgtttctacagtgtcggtaatgtttaccggaactgttacaaaacttttacaaattacattatttaaaagaaactgacaaattagttacaataattcatgattactacaacttattaatcgtcgtctaatgatataccaaaacaatcatcttcattctggtagaacggatcatcttcttggtcatcattagtctcggatgattcagcttccttcttggaaggttcttcttccacttcctgttgaagtagttggagaacttctttgagattctgagcaagactcgctttagattttgagcttgctaagaatgctgccagttgcgacttctgatttagaaacaaagatgtctccggatcagcaggtttaaggaactcaggattgctctggaaccagttcttgacttgatttggagcagcctttgaagtatcgaattgtgaccactattttacaaaggcgtgtctctgtaacggtggatattgcttgctgttttcagtttttccgtatctgtattgccatgaaaagatccatgacaaggcaaaactggaaaagtactttaaatctgccggaatatgtgattccttgatattatagagcttgttgaattgttggaatccctgttggacttcttctgggaatatttgtggaattggtccgaagtagttccaccattggaggaaccaatttggaaaattatacgcaatattattttagaagtaaattagccatgaatgcttgaatttactattttgatgccaaaacacattggtccaggcgtcaatgtaatcccaataattatatcctgcagggtcaaatggtgcagaaaattttttgggttggtttaagtttgagccataatgtcgtggctgcataacctttaagatttggattgtggaatgggtatttagatttggatctttggggtctttgaagtgtttaatagatactgagtttgtatctattagaatgaattcgtagaatttgcgggtttttttt

SEQ ID NO: 15080 - DNA, 1032 bp, Glycine max
  Gm_smallRNAprecursor_7913
atttttactgtttctacagtgtcggtaatgtttaccggaactgttacaaaacttttacaaattacattatttaaaagaaactgacaaattagttacaataattcatgattactacaacttattaatcgtcgtctaatgatataccaaaacaatcatcttcattctggtagaacggatcatcttcttggtcatcattagtctcggatgattcagcttccttcttggaaggttcttcttccacttcctgttgaagtagttggagaacttctttgagattctgagcaagactcgctttagattttgagcttgctaagaatgctgccagttgcgacttctgatttagaaacaaagatgtctccggatcagcaggtttaaggaactcaggattgctctggaaccagttcttgacttgatttggagcagcctttgaagtatcgaattgtgaccactattttacaaaggcgtgtctctgtaacggtggatattgcttgctgttttcagtttttccgtatctgtattgccatgaaaagatccatgacaaggcaaaactggaaaagtactttaaatctgccggaatatgtgattccttgatattatagagcttgttgaattgttggaatccctgttggacttcttctgggaatatttgtggaattggtccgaagtagttccaccattggaggaaccaatttggaaaattatacgcaatattattttagaagtaaattagccatgaatgcttgaatttactattttgatgccaaaacacattggtccaggcgtcaatgtaatcccaataattatatcctgcagggtcaaatggtgcagaaaattttttgggttggtttaagtttgagccataatgtcgtggctgcataacctttaagatttggattgtggaatgggtatttagatttggatctttggggtctttgaagtgtttaatagatactgagtttgtatctattagaatgaattcgtagaatttgcgggtttttttttgtggctattggcctgtaatggaatcccggg

SEQ ID NO: 15081 - DNA, 1069 bp, Glycine max
  Gm_smallRNAprecursor_7914
ttaccggaactgttacaaaacttttacaaattacattatttaaaagaaactgacaaattagttacaataattcatgattactacaacttattaatcgtcgtctaatgatataccaaaacaatcatcttcattctggtagaacggatcatcttcttggtcatcattagtctcggatgattcagcttccttcttggaaggttcttcttccacttcctgttgaagtagttggagaacttctttgagattctgagcaagactcgctttagattttgagcttgctaagaatgctgccagttgcgacttctgatttagaaacaaagatgtctccggatcagcaggtttaaggaactcaggattgctctggaaccagttcttgacttgatttggagcagcctttgaagtatcgaattgtgaccactattttacaaaggcgtgtctctgtaacggtggatattgcttgctgttttcagtttttccgtatctgtattgccatgaaaagatccatgacaaggcaaaactggaaaagtactttaaatctgccggaatatgtgattccttgatattatagagcttgttgaattgttggaatccctgttggacttcttctgggaatatttgtggaattggtccgaagtagttccaccattggaggaaccaatttggaaaattatacgcaatattattttagaagtaaattagccatgaatgcttgaatttactattttgatgccaaaacacattggtccaggcgtcaatgtaatcccaataattatatcctgcagggtcaaatggtgcagaaaattttttgggttggtttaagtttgagccataatgtcgtggctgcataacctttaagatttggattgtggaatgggtatttagatttggatctttggggtctttgaagtgtttaatagatactgagtttgtatctattagaatgaattcgtagaatttgcgggtttttttttgtggctattggcctgtaatggaatcccggggggaatactttggcggttgctttgaaaggattcttgtcccagtattctggttccatttgtaaaacatt

SEQ ID NO: 15082 - DNA, 1067 bp, Glycine max
  Gm_smallRNAprecursor_7915
accggaactgttacaaaacttttacaaattacattatttaaaagaaactgacaaattagttacaataattcatgattactacaacttattaatcgtcgtctaatgatataccaaaacaatcatcttcattctggtagaacggatcatcttcttggtcatcattagtctcggatgattcagcttccttcttggaaggttcttcttccacttcctgttgaagtagttggagaacttctttgagattctgagcaagactcgctttagattttgagcttgctaagaatgctgccagttgcgacttctgatttagaaacaaagatgtctccggatcagcaggtttaaggaactcaggattgctctggaaccagttcttgacttgatttggagcagcctttgaagtatcgaattgtgaccactattttacaaaggcgtgtctctgtaacggtggatattgcttgctgttttcagtttttccgtatctgtattgccatgaaaagatccatgacaaggcaaaactggaaaagtactttaaatctgccggaatatgtgattccttgatattatagagcttgttgaattgttggaatccctgttggacttcttctgggaatatttgtggaattggtccgaagtagttccaccattggaggaaccaatttggaaaattatacgcaatattattttagaagtaaattagccatgaatgcttgaatttactattttgatgccaaaacacattggtccaggcgtcaatgtaatcccaataattatatcctgcagggtcaaatggtgcagaaaattttttgggttggtttaagtttgagccataatgtcgtggctgcataacctttaagatttggattgtggaatgggtatttagatttggatctttggggtctttgaagtgtttaatagatactgagtttgtatctattagaatgaattcgtagaatttgcgggtttttttttgtggctattggcctgtaatggaatcccggggggaatactttggcggttgctttgaaaggattcttgtcccagtattctggttccatttgtaaaacatt

SEQ ID NO: 15083 - DNA, 1067 bp, Glycine max; identical to SEQ ID NO: 15082
  Gm_smallRNAprecursor_7916

SEQ ID NO: 15084 - DNA, 1094 bp, Glycine max
  Gm_smallRNAprecursor_7917
gaactgttacaaaacttttacaaattacattatttaaaagaaactgacaaattagttacaataattcatgattactacaacttattaatcgtcgtctaatgatataccaaaacaatcatcttcattctggtagaacggatcatcttcttggtcatcattagtctcggatgattcagcttccttcttggaaggttcttcttccacttcctgttgaagtagttggagaacttctttgagattctgagcaagactcgctttagattttgagcttgctaagaatgctgccagttgcgacttctgatttagaaacaaagatgtctccggatcagcaggtttaaggaactcaggattgctctggaaccagttcttgacttgatttggagcagcctttgaagtatcgaattgtgaccactattttacaaaggcgtgtctctgtaacggtggatattgcttgctgttttcagtttttccgtatctgtattgccatgaaaagatccatgacaaggcaaaactggaaaagtactttaaatctgccggaatatgtgattccttgatattatagagcttgttgaattgttggaatccctgttggacttcttctgggaatatttgtggaattggtccgaagtagttccaccattggaggaaccaatttggaaaattatacgcaatattattttagaagtaaattagccatgaatgcttgaatttactattttgatgccaaaacacattggtccaggcgtcaatgtaatcccaataattatatcctgcagggtcaaatggtgcagaaaattttttgggttggtttaagtttgagccataatgtcgtggctgcataacctttaagatttggattgtggaatgggtatttagatttggatctttggggtctttgaagtgtttaatagatactgagtttgtatctattagaatgaattcgtagaatttgcgggtttttttttgtggctattggcctgtaatggaatcccggggggaatactttggcggttgctttgaaaggattcttgtcccagtattctggttccatttgtaaaacattgaaaaatttgttttttgaaatataactgttg

SEQ ID NO: 15085 - DNA, 1109 bp, Glycine max
  Gm_smallRNAprecursor_7918
cggaatatgtgattccttgatattatagagcttgttgaattgttggaatccctgttggacttcttctgggaatatttgtggaattggtccgaagtagttccaccattggaggaaccaatttggaaaattatacgcaatattattttagaagtaaattagccatgaatgcttgaatttactattttgatgccaaaacacattggtccaggcgtcaatgtaatcccaataattatatcctgcagggtcaaatggtgcagaaaattttttgggttggtttaagtttgagccataatgtcgtggctgcataacctttaagatttggattgtggaatgggtatttagatttggatctttggggtctttgaagtgtttaatagatactgagtttgtatctattagaatgaattcgtagaatttgcgggtttttttttgtggctattggcctgtaatggaatcccggggggaatactttggcggttgctttgaaaggattcttgtcccagtattctggttccatttgtaaaacattgaaaaatttgttttttgaaatataactgttgctgggttgtggcattgattcttgttgagtcaacgattggcttggtttttggttacagacagttttggtctgtttggttttttggatttgtttttgcatatctgtttcagaatcatcgtctgattctgaggccatttttgcccaggtctttttggataattttggtattttggtgaggcctatatcctctaaggccaagagagtttgtattgaccaggcataatcagccacggtctgtttggttgtaggtaattcctgagttgatgactcaggtttgacggtagttatctgggtcaatgacccttcaagctttcctttctgggttgatgacccagtctgggtaggtgacccaaaagatgatgtagttgcctttttggttattggctctggtagagccaatagaacctcttttccttttgtactggatctccctcctctgccggaggacctagacaccttaggaggcataaggaattttctgtaaaaattcacgagtgaggtagtcaggtagagagttggaagagcccttgatatattctatattaaaatc

SEQ ID NO: 15086 - DNA, 1038 bp, Glycine max
  Gm_smallRNAprecursor_7919
cccaaaagatgatgtagttgcctttttggttattggctctggtagagccaatagaacctcttttccttttgtactggatctccctcctctgccggaggacctagacaccttaggaggcataaggaattttctgtaaaaattcacgagtgaggtagtcaggtagagagttggaagagcccttgatatattctatattaaaatcaaagatgcttaaaattgcttgccatcttgcaaaaatctgttttgaggcaaggttttttacatccttctgtaaaatgtctttggctgatttgcagtcaacccttaccaaaaatttttgatttaatagatcagattgaaatttggaaatgcacaaaacaattgctaaaacttcttttttaacagttgaatactttaattgtgcaggattccaatgttttgaagtatatgcgatgacatgttcttgaccatggacttgttgtttgaggatgccaccgtaaccgatgtctgatgcatcagtttcgacaattttgaatgcctgtggaatgggaagatacagacattttatggattggactttgactttgatttctttaactgtttgggtatggaggtcagactaaggaggcggatttttctttagcctatcatgcaatggcttgacaatattgtttaagtaggggacaaattctcctacgtaatttagacaacctagaaatctttgtaattgggttttgtctaagatttggttgggaaatttgctagcaaactctattgacctttcgattggaatgattgtaccttgataaatattatggccaaggaatcgaattcgagtttggaaaagattgatttttgatttggagactgccaaaccattttgtttgatgatgtggatgaaggtttggagatgtttgaaatgttggtcaatgttttgggaaaagattaaaacatcatctatgtagacaatgacaaattttgaatagggattaaaaatatcattcataattttttgaaattctgaaggggcattcttcagtccgaatggcatcacattcc

SEQ ID NO: 15087 - DNA, 1232 bp, Glycine max
  Gm_smallRNAprecursor_7920
aattgcttgccatcttgcaaaaatctgttttgaggcaaggttttttacatccttctgtaaaatgtctttggctgatttgcagtcaacccttaccaaaaatttttgatttaatagatcagattgaaatttggaaatgcacaaaacaattgctaaaacttcttttttaacagttgaatactttaattgtgcaggattccaatgttttgaagtatatgcgatgacatgttcttgaccatggacttgttgtttgaggatgccaccgtaaccgatgtctgatgcatcagtttcgacaattttgaatgcctgtggaatgggaagatacagacattttatggattggactttgactttgatttctttaactgtttgggtatggaggtcagactaaggaggcggatttttctttagcctatcatgcaatggcttgacaatattgtttaagtaggggacaaattctcctacgtaatttagacaacctagaaatctttgtaattgggttttgtctaagatttggttgggaaatttgctagcaaactctattgacctttcgattggaatgattgtaccttgataaatattatggccaaggaatcgaattcgagtttggaaaagattgatttttgatttggagactgccaaaccattttgtttgatgatgtggatgaaggtttggagatgtttgaaatgttggtcaatgttttgggaaaagattaaaacatcatctatgtagacaatgacaaattttgaatagggattaaaaatatcattcataattttttgaaattctgaaggggcattcttcagtccgaatggcatcacattccattcatattgcctgaaaggtacagtaaacgctgttttgtacctatctaattcttggatttggatttgccaaaatccagatttcatatcaaattttgaaaatatctttgcagaatttaatctgttaagcaaatcttttttgtttggaataggatatctaatccattgtaatgcttgatttagtggtttgtaatttatgaccaagcgaggtgttccacgctcaatctcagattgcttgttgacataaaaagccgcacaagaccatgggcttttgcttttccggattaggcctttatcaagcaaatccttgatttcttttttacaatactgaagaagttcttcattcatttggattggtctggctttggtgggaatttgtttttccctaaagtctttctcataagggagat

SEQ ID NO: 15088 - DNA, 1196 bp, Glycine max
  Gm_smallRNAprecursor_7921
aaggttttttacatccttctgtaaaatgtctttggctgatttgcagtcaacccttaccaaaaatttttgatttaatagatcagattgaaatttggaaatgcacaaaacaattgctaaaacttcttttttaacagttgaatactttaattgtgcaggattccaatgttttgaagtatatgcgatgacatgttcttgaccatggacttgttgtttgaggatgccaccgtaaccgatgtctgatgcatcagtttcgacaattttgaatgcctgtggaatgggaagatacagacattttatggattggactttgactttgatttctttaactgtttgggtatggaggtcagactaaggaggcggatttttctttagcctatcatgcaatggcttgacaatattgtttaagtaggggacaaattctcctacgtaatttagacaacctagaaatctttgtaattgggttttgtctaagatttggttgggaaatttgctagcaaactctattgacctttcgattggaatgattgtaccttgataaatattatggccaaggaatcgaattcgagtttggaaaagattgatttttgatttggagactgccaaaccattttgtttgatgatgtggatgaaggtttggagatgtttgaaatgttggtcaatgttttgggaaaagattaaaacatcatctatgtagacaatgacaaattttgaatagggattaaaaatatcattcataattttttgaaattctgaaggggcattcttcagtccgaatggcatcacattccattcatattgcctgaaaggtacagtaaacgctgttttgtacctatctaattcttggatttggatttgccaaaatccagatttcatatcaaattttgaaaatatctttgcagaatttaatctgttaagcaaatcttttttgtttggaataggatatctaatccattgtaatgcttgatttagtggtttgtaatttatgaccaagcgaggtgttccacgctcaatctcagattgcttgttgacataaaaagccgcacaagaccatgggcttttgcttttccggattaggcctttatcaagcaaatccttgatttcttttttacaatactgaagaagttcttcattcatttggattggtctggctttggtgggaatttgtttttccctaaagtctttctcataagggagat

SEQ ID NO: 15089 - DNA, 1080 bp, Glycine max
  Gm_smallRNAprecursor_7922
gatgtttgaaatgttggtcaatgttttgggaaaagattaaaacatcatctatgtagacaatgacaaattttgaatagggattaaaaatatcattcataattttttgaaattctgaaggggcattcttcagtccgaatggcatcacattccattcatattgcctgaaaggtacagtaaacgctgttttgtacctatctaattcttggatttggatttgccaaaatccagatttcatatcaaattttgaaaatatctttgcagaatttaatctgttaagcaaatcttttttgtttggaataggatatctaatccattgtaatgcttgatttagtggtttgtaatttatgaccaagcgaggtgttccacgctcaatctcagattgcttgttgacataaaaagccgcacaagaccatgggcttttgcttttccggattaggcctttatcaagcaaatccttgatttcttttttacaatactgaagaagttcttcattcatttggattggtctggctttggtgggaatttgtttttccctaaagtctttctcataagggagatcaacaatatgtttctttctatcccaaaatgcatgtggcaattcagaacagacggttgattcaatatgatctaataaagattgaattttttcttttacctggggttttcccagttgtatctgaatattactaaaagatacttcttcttttaagaagttaatttgattaatcttattttctataagatttatatttctggaaattggtttagtagaaaaattaaatataatttttcttcctaaataatttgtgattattccttcattagatatttggatgggaaacagggctctaatgaaaggctttcctaagattacctcattcttaaggtttttacaagaaaaaagtttgtgttaatcttaagaccttggttttcaatgattgcatttgatagcttaaaattaatttttaattttgagctgtttgccatacttaatttttctgaggttttctcaaagaattttgtaggaattaatccttctaaaatgcagtttgaatcagcccctgtgtcaaatagggccat

SEQ ID NO: 15090 - DNA, 1076 bp, Glycine max
  Gm_smallRNAprecursor_7923
ccatctttcaggaagagttacttcatcccattttatttttctcgggagagaaacgttagcctttgtcatatcagtgataaaaaaggttgtttctcctttttgaggttttaacaggactctagatgcacaagtattcatgaccttgtattggatcctataaattaaggctgctgggattgatccttctttcatgtcaaggccatgaaagtggatgtttaagaacagagagtcaagaatgtttatgttcatcagactcactgttttgtttggataacagttaaaatatattggaccttgtcctaggctggtttcgactgttccaattagggagtcttcaaattgattatgcctaatgtctcttagacacattaaaactgctgcatctatgcccatatcaattaagggcttgatggctacttgtacacaaccgatgtgtagatatttatacttacggctatgttcataaattgaattttttgaaagtaaatgaaattcttcccctatatcttgtcctagaggaatattgttttctactgttttgattatgtaatcaaagttgtgtttgtactttattgtttcaggaacgtatagttgatcctgagggatttctggaatgttccagtcatccatgttttgattgatatcttcgaatcgaacttcctcatcgaagagattgtgttttggggcgacctcttgggtctggttatcttgatcatttaataaattggggtttcttgaagaagatgatgaggaggagtttgagcgaaaagagatacgggaaaaagatcgtaatagtatatacatgattataatattctctaatatctttgccttcctttggttccatagaaatatctccgtaagtaaatatgtcacaaaatttttctggatctgaattatttttaagaaaaactttttttttttggaaaatagtttgaacggcaatcctatagccaccagtattttgtgtcttgatattttggttaaacaatacaccttagccttaccgccctttatccatcacgggtcttactgctacagtactattcaactaaaatattagactgctgtacttc

SEQ ID NO: 15091 - DNA, 1159 bp, Glycine max
  Gm_smallRNAprecursor_7924
ccatctttcaggaagagttacttcatcccattttatttttctcgggagagaaacgttagcctttgtcatatcagtgataaaaaaggttgtttctcctttttgaggttttaacaggactctagatgcacaagtattcatgaccttgtattggatcctataaattaaggctgctgggattgatccttctttcatgtcaaggccatgaaagtggatgtttaagaacagagagtcaagaatgtttatgttcatcagactcactgttttgtttggataacagttaaaatatattggaccttgtcctaggctggtttcgactgttccaattagggagtcttcaaattgattatgcctaatgtctcttagacacattaaaactgctgcatctatgcccatatcaattaagggcttgatggctacttgtacacaaccgatgtgtagatatttatacttacggctatgttcataaattgaattttttgaaagtaaatgaaattcttcccctatatcttgtcctagaggaatattgttttctactgttttgattatgtaatcaaagttgtgtttgtactttattgtttcaggaacgtatagttgatcctgagggatttctggaatgttccagtcatccatgttttgattgatatcttcgaatcgaacttcctcatcgaagagattgtgttttggggcgacctcttgggtctggttatcttgatcatttaataaattggggtttcttgaagaagatgatgaggaggagtttgagcgaaaagagatacgggaaaaagatcgtaatagtatatacatgattataatattctctaatatctttgccttcctttggttccatagaaatatctccgtaagtaaatatgtcacaaaatttttctggatctgaattatttttaagaaaaactttttttttttggaaaatagtttgaacggcaatcctatagccaccagtattttgtgtcttgatattttggttaaacaatacaccttagccttaccgccctttatccatcacgggtcttactgctacagtactattcaactaaaatattagactgctgtacttccaggaagtactgttcaaacacttactgtacaattcaaagtaaaatatttcttgtactatacaaggttttagtttcagatccat

SEQ ID NO: 15092 - DNA, 1178 bp, Glycine max
  Gm_smallRNAprecursor_7925
actcactgttttgtttggataacagttaaaatatattggaccttgtcctaggctggtttcgactgttccaattagggagtcttcaaattgattatgcctaatgtctcttagacacattaaaactgctgcatctatgcccatatcaattaagggcttgatggctacttgtacacaaccgatgtgtagatatttatacttacggctatgttcataaattgaattttttgaaagtaaatgaaattcttcccctatatcttgtcctagaggaatattgttttctactgttttgattatgtaatcaaagttgtgtttgtactttattgtttcaggaacgtatagttgatcctgagggatttctggaatgttccagtcatccatgttttgattgatatcttcgaatcgaacttcctcatcgaagagattgtgttttggggcgacctcttgggtctggttatcttgatcatttaataaattggggtttcttgaagaagatgatgaggaggagtttgagcgaaaagagatacgggaaaaagatcgtaatagtatatacatgattataatattctctaatatctttgccttcctttggttccatagaaatatctccgtaagtaaatatgtcacaaaatttttctggatctgaattatttttaagaaaaactttttttttttggaaaatagtttgaacggcaatcctatagccaccagtattttgtgtcttgatattttggttaaacaatacaccttagccttaccgccctttatccatcacgggtcttactgctacagtactattcaactaaaatattagactgctgtacttccaggaagtactgttcaaacacttactgtacaattcaaagtaaaatatttcttgtactatacaaggttttagtttcagatccataaaatttgttaacatatgtccttacgaatagtattcctacttccccatcaggctctgataccagagatcagcgggaataagatcaaacggacagataggaagtaagaatgcagtatgataaatgaggaaaatataaacttgtaaagcagatatcaagggcacaccgaaacggcttacaaacccaggtttttgaaaacaaagaaaccgaagcggcggcagagccgcacaggatcggtgaggggagaagggagatgtggaaaatagaacttga

SEQ ID NO: 15093 - DNA, 1179 bp, Glycine max
  Gm_smallRNAprecursor_7926
actcactgttttgtttggataacagttaaaatatattggaccttgtcctaggctggtttcgactgttccaattagggagtcttcaaattgattatgcctaatgtctcttagacacattaaaactgctgcatctatgcccatatcaattaagggcttgatggctacttgtacacaaccgatgtgtagatatttatacttacggctatgttcataaattgaattttttgaaagtaaatgaaattcttcccctatatcttgtcctagaggaatattgttttctactgttttgattatgtaatcaaagttgtgtttgtactttattgtttcaggaacgtatagttgatcctgagggatttctggaatgttccagtcatccatgttttgattgatatcttcgaatcgaacttcctcatcgaagagattgtgttttggggcgacctcttgggtctggttatcttgatcatttaataaattggggtttcttgaagaagatgatgaggaggagtttgagcgaaaagagatacgggaaaaagatcgtaatagtatatacatgattataatattctctaatatctttgccttcctttggttccatagaaatatctccgtaagtaaatatgtcacaaaatttttctggatctgaattatttttaagaaaaactttttttttttggaaaatagtttgaacggcaatcctatagccaccagtattttgtgtcttgatattttggttaaacaatacaccttagccttaccgccctttatccatcacgggtcttactgctacagtactattcaactaaaatattagactgctgtacttccaggaagtactgttcaaacacttactgtacaattcaaagtaaaatatttcttgtactatacaaggttttagtttcagatccataaaatttgttaacatatgtccttacgaatagtattcctacttccccatcaggctctgataccagagatcagcgggaataagatcaaacggacagataggaagtaagaatgcagtatgataaatgaggaaaatataaacttgtaaagcagatatcaagggcacaccgaaacggcttacaaacccaggtttttgaaaacaaagaaaccgaagcggcggcagagccgcacaggatcggtgaggggagaagggagatgtggaaaatagaacttgaa

SEQ ID NO: 15094 - DNA, 1105 bp, Glycine max
  Gm_smallRNAprecursor_7927
ctgttttgtttggataacagttaaaatatattggaccttgtcctaggctggtttcgactgttccaattagggagtcttcaaattgattatgcctaatgtctcttagacacattaaaactgctgcatctatgcccatatcaattaagggcttgatggctacttgtacacaaccgatgtgtagatatttatacttacggctatgttcataaattgaattttttgaaagtaaatgaaattcttcccctatatcttgtcctagaggaatattgttttctactgttttgattatgtaatcaaagttgtgtttgtactttattgtttcaggaacgtatagttgatcctgagggatttctggaatgttccagtcatccatgttttgattgatatcttcgaatcgaacttcctcatcgaagagattgtgttttggggcgacctcttgggtctggttatcttgatcatttaataaattggggtttcttgaagaagatgatgaggaggagtttgagcgaaaagagatacgggaaaaagatcgtaatagtatatacatgattataatattctctaatatctttgccttcctttggttccatagaaatatctccgtaagtaaatatgtcacaaaatttttctggatctgaattatttttaagaaaaactttttttttttggaaaatagtttgaacggcaatcctatagccaccagtattttgtgtcttgatattttggttaaacaatacaccttagccttaccgccctttatccatcacgggtcttactgctacagtactattcaactaaaatattagactgctgtacttccaggaagtactgttcaaacacttactgtacaattcaaagtaaaatatttcttgtactatacaaggttttagtttcagatccataaaatttgttaacatatgtccttacgaatagtattcctacttccccatcaggctctgataccagagatcagcgggaataagatcaaacggacagataggaagtaagaatgcagtatgataaatgaggaaaatataaacttgtaaagcagatatcaagggcacaccgaaacggcttacaaacccaggtttttgaaaacaaagaa

SEQ ID NO: 15095 - DNA, 1196 bp, Glycine max
  Gm_smallRNAprecursor_7928
agacacattaaaactgctgcatctatgcccatatcaattaagggcttgatggctacttgtacacaaccgatgtgtagatatttatacttacggctatgttcataaattgaattttttgaaagtaaatgaaattcttcccctatatcttgtcctagaggaatattgttttctactgttttgattatgtaatcaaagttgtgtttgtactttattgtttcaggaacgtatagttgatcctgagggatttctggaatgttccagtcatccatgttttgattgatatcttcgaatcgaacttcctcatcgaagagattgtgttttggggcgacctcttgggtctggttatcttgatcatttaataaattggggtttcttgaagaagatgatgaggaggagtttgagcgaaaagagatacgggaaaaagatcgtaatagtatatacatgattataatattctctaatatctttgccttcctttggttccatagaaatatctccgtaagtaaatatgtcacaaaatttttctggatctgaattatttttaagaaaaactttttttttttggaaaatagtttgaacggcaatcctatagccaccagtattttgtgtcttgatattttggttaaacaatacaccttagccttaccgccctttatccatcacgggtcttactgctacagtactattcaactaaaatattagactgctgtacttccaggaagtactgttcaaacacttactgtacaattcaaagtaaaatatttcttgtactatacaaggttttagtttcagatccataaaatttgttaacatatgtccttacgaatagtattcctacttccccatcaggctctgataccagagatcagcgggaataagatcaaacggacagataggaagtaagaatgcagtatgataaatgaggaaaatataaacttgtaaagcagatatcaagggcacaccgaaacggcttacaaacccaggtttttgaaaacaaagaaaccgaagcggcggcagagccgcacaggatcggtgaggggagaagggagatgtggaaaatagaacttgaaatttattgaaaccgaaagaaaagcttactaagagtttttccctaggcagagccatatatatatatatatatatatatatatatatatatatatatatatatatatatatatatcgcatcccattag

SEQ ID NO: 15096 - DNA, 1080 bp, Glycine max
  Gm_smallRNAprecursor_7929
gatgtttgaaatgttggtcaatgttttgggaaaagattaaaacatcatctatgtagacaatgacaaattttgaatagggattaaaaatatcgttcataattttttgaaattctgaaggggcattcttcagtccgaatggcatcacgttccattcatattgcccgaaaggtacagtaaacgctgttttgtacctatctgattcttggatttggatttgccaaaatccagatttcatatcaaattttgaaaatatctttgcagaatttaatctgttaagcaaatcttttttgtttggaataggatatctaatccattgtaatgcttgatttagtggtttgtaatttatgactaagcggggtgttccacgctcaatctcagattgtttgttgacataaaaagccgcacaagaccatgggctcttgcttttccggattaggcctttatcaagcaaatccttgatttccttttgacggtattgaagaagttcttcattcatttggattggtctggcttttgtgggaatttgtttttccctaaagtctttctcataagggagatcaacaatatgtttctttctgtcccaaaatgcatgtggcaattcagaacagacggtcgattcaatatgatttaataaagattgaatttttttttacttggggttttcccagttgtatctgaatattattaaaagatacctcttcttttaagaagttaatttgattaatcttattttctataagatttatatttctggaaattggtttagtagaaaagttaaatgtaatttttcttcctaaataatttgtggttattccttcattagatatttggatgggaaacaggactctaatgaagggcgttcctaagattacttcattcttaaggttttttaccagaagaaagtttgtgttaatcttaagaccttggttttcaatgattgcatttgatagcttaaaattaatttttagttttgagccgtttgccgtacttaatttttctgaggttttctcaaagaattttgtaggaattaatccttctaaaatgcagtttgaatcagcccctgtgtcaaatagggccatt

SEQ ID NO: 15097 - DNA, 1215 bp, Glycine max
  Gm_smallRNAprecursor_7930
tgattcttctttcatgtcaaggccatgaaagtggatgtttaagaacagagagtcaagaatgtttctgtccatcagactcaccgttttgtttggataacagttaaaatatattggaccttgtcctaggctggtttcgactgttccaattagggagtcttcaaattgattatgcctaatgtctcttagacacattaaaactgctgcatctatgcccatatcaattaagggcttgatggctacttgtacacaaccgatgtgtagatatttatacttacggctatgttcataaattgaattttttgaaagtaaatgaaattcttcccctattgcaatctaatattttagttgaatagtactgtagcagtatgacccatgttggataaagggcggtaaggctaaggtgtactgtttaaccaaaatatcaagacataatacactggtggctataggattgccgttcaaatagatccaattttactgtttctacagtatcggtaatgtttaccggaactgttacaaaacttttacaaattacattatttaaaagaaactaacaaattagttacaataattcatgattactacaactaattaatcatcgtctaatgatataccaaaacagtcatcttcattctggtagaatggatcatcttcttggtcatcattagtctcggatgattcagcttccttcttggaaggttcttcttccacttcctgttgaagtagttggagaacttctttgagattctgagcaagactctctttagattttgagcttgctaagaatgctgccagttgcgacttctgatttagaaacaaagatgtctccggatcagcaggtttaaggaactcaggattactctggaaccagttcttgacttgatctggagcagcctttgaagtatcgaattgtgaccaccattttacaaaggcatgtctctgtaataggtgaaatcaggtgcagccatttcccttagagtcctctcacgaggtggaggttgtgccatgttctcagaatgtgcaaaatcagaatgctcagaatcagaatgctcgaaattataatgctcaagatcaggatgttcaaaatcaccaataacagaatgcacagattcaccagttatggaatgctcagaatgatcaaaaggtataaaatgatgcctaactaatctatgaaatgtcttatctatctcaggatcaaagggttgtaagtcagat

SEQ ID NO: 15098 - DNA, 1145 bp, Glycine max
  Gm_smallRNAprecursor_7931
aattgattatgcctaatgtctcttagacacattaaaactgctgcatctatgcccatatcaattaagggcttgatggctacttgtacacaaccgatgtgtagatatttatacttacggctatgttcataaattgaattttttgaaagtaaatgaaattcttcccctattgcaatctaatattttagttgaatagtactgtagcagtatgacccatgttggataaagggcggtaaggctaaggtgtactgtttaaccaaaatatcaagacataatacactggtggctataggattgccgttcaaatagatccaattttactgtttctacagtatcggtaatgtttaccggaactgttacaaaacttttacaaattacattatttaaaagaaactaacaaattagttacaataattcatgattactacaactaattaatcatcgtctaatgatataccaaaacagtcatcttcattctggtagaatggatcatcttcttggtcatcattagtctcggatgattcagcttccttcttggaaggttcttcttccacttcctgttgaagtagttggagaacttctttgagattctgagcaagactctctttagattttgagcttgctaagaatgctgccagttgcgacttctgatttagaaacaaagatgtctccggatcagcaggtttaaggaactcaggattactctggaaccagttcttgacttgatctggagcagcctttgaagtatcgaattgtgaccaccattttacaaaggcatgtctctgtaataggtgaaatcaggtgcagccatttcccttagagtcctctcacgaggtggaggttgtgccatgttctcagaatgtgcaaaatcagaatgctcagaatcagaatgctcgaaattataatgctcaagatcaggatgttcaaaatcaccaataacagaatgcacagattcaccagttatggaatgctcagaatgatcaaaaggtataaaatgatgcctaactaatctatgaaatgtcttatctatctcaggatcaaagggttgtaagtcagatggattgcctctagtcatacactacattcagcatgcacacaactagttgccttgtcatgtaaataaaggtgtaggtttgaactacagctac

SEQ ID NO: 15099 - DNA, 1146 bp, Glycine max
  Gm_smallRNAprecursor_7932
aattgattatgcctaatgtctcttagacacattaaaactgctgcatctatgcccatatcaattaagggcttgatggctacttgtacacaaccgatgtgtagatatttatacttacggctatgttcataaattgaattttttgaaagtaaatgaaattcttcccctattgcaatctaatattttagttgaatagtactgtagcagtatgacccatgttggataaagggcggtaaggctaaggtgtactgtttaaccaaaatatcaagacataatacactggtggctataggattgccgttcaaatagatccaattttactgtttctacagtatcggtaatgtttaccggaactgttacaaaacttttacaaattacattatttaaaagaaactaacaaattagttacaataattcatgattactacaactaattaatcatcgtctaatgatataccaaaacagtcatcttcattctggtagaatggatcatcttcttggtcatcattagtctcggatgattcagcttccttcttggaaggttcttcttccacttcctgttgaagtagttggagaacttctttgagattctgagcaagactctctttagattttgagcttgctaagaatgctgccagttgcgacttctgatttagaaacaaagatgtctccggatcagcaggtttaaggaactcaggattactctggaaccagttcttgacttgatctggagcagcctttgaagtatcgaattgtgaccaccattttacaaaggcatgtctctgtaataggtgaaatcaggtgcagccatttcccttagagtcctctcacgaggtggaggttgtgccatgttctcagaatgtgcaaaatcagaatgctcagaatcagaatgctcgaaattataatgctcaagatcaggatgttcaaaatcaccaataacagaatgcacagattcaccagttatggaatgctcagaatgatcaaaaggtataaaatgatgcctaactaatctatgaaatgtcttatctatctcaggatcaaagggttgtaagtcagatggattgcctctagtcatacactacattcagcatgcacacaactagttgccttgtcatgtaaataaaggtgtaggtttgaactacagctacc

SEQ ID NO: 15100 - DNA, 1138 bp, Glycine max
  Gm_smallRNAprecursor_7933
agggcttgatggctacttgtacacaaccgatgtgtagatatttatacttacggctatgttcataaattgaattttttgaaagtaaatgaaattcttcccctattgcaatctaatattttagttgaatagtactgtagcagtatgacccatgttggataaagggcggtaaggctaaggtgtactgtttaaccaaaatatcaagacataatacactggtggctataggattgccgttcaaatagatccaattttactgtttctacagtatcggtaatgtttaccggaactgttacaaaacttttacaaattacattatttaaaagaaactaacaaattagttacaataattcatgattactacaactaattaatcatcgtctaatgatataccaaaacagtcatcttcattctggtagaatggatcatcttcttggtcatcattagtctcggatgattcagcttccttcttggaaggttcttcttccacttcctgttgaagtagttggagaacttctttgagattctgagcaagactctctttagattttgagcttgctaagaatgctgccagttgcgacttctgatttagaaacaaagatgtctccggatcagcaggtttaaggaactcaggattactctggaaccagttcttgacttgatctggagcagcctttgaagtatcgaattgtgaccaccattttacaaaggcatgtctctgtaataggtgaaatcaggtgcagccatttcccttagagtcctctcacgaggtggaggttgtgccatgttctcagaatgtgcaaaatcagaatgctcagaatcagaatgctcgaaattataatgctcaagatcaggatgttcaaaatcaccaataacagaatgcacagattcaccagttatggaatgctcagaatgatcaaaaggtataaaatgatgcctaactaatctatgaaatgtcttatctatctcaggatcaaagggttgtaagtcagatggattgcctctagtcatacactacattcagcatgcacacaactagttgccttgtcatgtaaataaaggtgtaggtttgaactacagctacccttaaatgatatccaaatgacttgaaattttgtgagcaaccttataaaatgatgag

SEQ ID NO: 15101 - DNA, 1071 bp, Glycine max
  Gm_smallRNAprecursor_7934
ggctacttgtacacaaccgatgtgtagatatttatacttacggctatgttcataaattgaattttttgaaagtaaatgaaattcttcccctattgcaatctaatattttagttgaatagtactgtagcagtatgacccatgttggataaagggcggtaaggctaaggtgtactgtttaaccaaaatatcaagacataatacactggtggctataggattgccgttcaaatagatccaattttactgtttctacagtatcggtaatgtttaccggaactgttacaaaacttttacaaattacattatttaaaagaaactaacaaattagttacaataattcatgattactacaactaattaatcatcgtctaatgatataccaaaacagtcatcttcattctggtagaatggatcatcttcttggtcatcattagtctcggatgattcagcttccttcttggaaggttcttcttccacttcctgttgaagtagttggagaacttctttgagattctgagcaagactctctttagattttgagcttgctaagaatgctgccagttgcgacttctgatttagaaacaaagatgtctccggatcagcaggtttaaggaactcaggattactctggaaccagttcttgacttgatctggagcagcctttgaagtatcgaattgtgaccaccattttacaaaggcatgtctctgtaataggtgaaatcaggtgcagccatttcccttagagtcctctcacgaggtggaggttgtgccatgttctcagaatgtgcaaaatcagaatgctcagaatcagaatgctcgaaattataatgctcaagatcaggatgttcaaaatcaccaataacagaatgcacagattcaccagttatggaatgctcagaatgatcaaaaggtataaaatgatgcctaactaatctatgaaatgtcttatctatctcaggatcaaagggttgtaagtcagatggattgcctctagtcatacactacattcagcatgcacacaactagttgccttgtcatgtaaataaaggtgtaggtttgaactacagctac

SEQ ID NO: 15102 - DNA, 1072 bp, Glycine max
  Gm_smallRNAprecursor_7935
ggctacttgtacacaaccgatgtgtagatatttatacttacggctatgttcataaattgaattttttgaaagtaaatgaaattcttcccctattgcaatctaatattttagttgaatagtactgtagcagtatgacccatgttggataaagggcggtaaggctaaggtgtactgtttaaccaaaatatcaagacataatacactggtggctataggattgccgttcaaatagatccaattttactgtttctacagtatcggtaatgtttaccggaactgttacaaaacttttacaaattacattatttaaaagaaactaacaaattagttacaataattcatgattactacaactaattaatcatcgtctaatgatataccaaaacagtcatcttcattctggtagaatggatcatcttcttggtcatcattagtctcggatgattcagcttccttcttggaaggttcttcttccacttcctgttgaagtagttggagaacttctttgagattctgagcaagactctctttagattttgagcttgctaagaatgctgccagttgcgacttctgatttagaaacaaagatgtctccggatcagcaggtttaaggaactcaggattactctggaaccagttcttgacttgatctggagcagcctttgaagtatcgaattgtgaccaccattttacaaaggcatgtctctgtaataggtgaaatcaggtgcagccatttcccttagagtcctctcacgaggtggaggttgtgccatgttctcagaatgtgcaaaatcagaatgctcagaatcagaatgctcgaaattataatgctcaagatcaggatgttcaaaatcaccaataacagaatgcacagattcaccagttatggaatgctcagaatgatcaaaaggtataaaatgatgcctaactaatctatgaaatgtcttatctatctcaggatcaaagggttgtaagtcagatggattgcctctagtcatacactacattcagcatgcacacaactagttgccttgtcatgtaaataaaggtgtaggtttgaactacagctacc

SEQ ID NO: 15103 - DNA, 1040 bp, Glycine max
  Gm_smallRNAprecursor_7936
tacttgtacacaaccgatgtgtagatatttatacttacggctatgttcataaattgaattttttgaaagtaaatgaaattcttcccctattgcaatctaatattttagttgaatagtactgtagcagtatgacccatgttggataaagggcggtaaggctaaggtgtactgtttaaccaaaatatcaagacataatacactggtggctataggattgccgttcaaatagatccaattttactgtttctacagtatcggtaatgtttaccggaactgttacaaaacttttacaaattacattatttaaaagaaactaacaaattagttacaataattcatgattactacaactaattaatcatcgtctaatgatataccaaaacagtcatcttcattctggtagaatggatcatcttcttggtcatcattagtctcggatgattcagcttccttcttggaaggttcttcttccacttcctgttgaagtagttggagaacttctttgagattctgagcaagactctctttagattttgagcttgctaagaatgctgccagttgcgacttctgatttagaaacaaagatgtctccggatcagcaggtttaaggaactcaggattactctggaaccagttcttgacttgatctggagcagcctttgaagtatcgaattgtgaccaccattttacaaaggcatgtctctgtaataggtgaaatcaggtgcagccatttcccttagagtcctctcacgaggtggaggttgtgccatgttctcagaatgtgcaaaatcagaatgctcagaatcagaatgctcgaaattataatgctcaagatcaggatgttcaaaatcaccaataacagaatgcacagattcaccagttatggaatgctcagaatgatcaaaaggtataaaatgatgcctaactaatctatgaaatgtcttatctatctcaggatcaaagggttgtaagtcagatggattgcctctagtcatacactacattcagcatgcacacaactagttgccttgtcatgtaaa

SEQ ID NO: 15104 - DNA, 1068 bp, Glycine max
  Gm_smallRNAprecursor_7937
tacttgtacacaaccgatgtgtagatatttatacttacggctatgttcataaattgaattttttgaaagtaaatgaaattcttcccctattgcaatctaatattttagttgaatagtactgtagcagtatgacccatgttggataaagggcggtaaggctaaggtgtactgtttaaccaaaatatcaagacataatacactggtggctataggattgccgttcaaatagatccaattttactgtttctacagtatcggtaatgtttaccggaactgttacaaaacttttacaaattacattatttaaaagaaactaacaaattagttacaataattcatgattactacaactaattaatcatcgtctaatgatataccaaaacagtcatcttcattctggtagaatggatcatcttcttggtcatcattagtctcggatgattcagcttccttcttggaaggttcttcttccacttcctgttgaagtagttggagaacttctttgagattctgagcaagactctctttagattttgagcttgctaagaatgctgccagttgcgacttctgatttagaaacaaagatgtctccggatcagcaggtttaaggaactcaggattactctggaaccagttcttgacttgatctggagcagcctttgaagtatcgaattgtgaccaccattttacaaaggcatgtctctgtaataggtgaaatcaggtgcagccatttcccttagagtcctctcacgaggtggaggttgtgccatgttctcagaatgtgcaaaatcagaatgctcagaatcagaatgctcgaaattataatgctcaagatcaggatgttcaaaatcaccaataacagaatgcacagattcaccagttatggaatgctcagaatgatcaaaaggtataaaatgatgcctaactaatctatgaaatgtcttatctatctcaggatcaaagggttgtaagtcagatggattgcctctagtcatacactacattcagcatgcacacaactagttgccttgtcatgtaaataaaggtgtaggtttgaactacagctac

SEQ ID NO: 15105 - DNA, 1069 bp, Glycine max
  Gm_smallRNAprecursor_7938
tacttgtacacaaccgatgtgtagatatttatacttacggctatgttcataaattgaattttttgaaagtaaatgaaattcttcccctattgcaatctaatattttagttgaatagtactgtagcagtatgacccatgttggataaagggcggtaaggctaaggtgtactgtttaaccaaaatatcaagacataatacactggtggctataggattgccgttcaaatagatccaattttactgtttctacagtatcggtaatgtttaccggaactgttacaaaacttttacaaattacattatttaaaagaaactaacaaattagttacaataattcatgattactacaactaattaatcatcgtctaatgatataccaaaacagtcatcttcattctggtagaatggatcatcttcttggtcatcattagtctcggatgattcagcttccttcttggaaggttcttcttccacttcctgttgaagtagttggagaacttctttgagattctgagcaagactctctttagattttgagcttgctaagaatgctgccagttgcgacttctgatttagaaacaaagatgtctccggatcagcaggtttaaggaactcaggattactctggaaccagttcttgacttgatctggagcagcctttgaagtatcgaattgtgaccaccattttacaaaggcatgtctctgtaataggtgaaatcaggtgcagccatttcccttagagtcctctcacgaggtggaggttgtgccatgttctcagaatgtgcaaaatcagaatgctcagaatcagaatgctcgaaattataatgctcaagatcaggatgttcaaaatcaccaataacagaatgcacagattcaccagttatggaatgctcagaatgatcaaaaggtataaaatgatgcctaactaatctatgaaatgtcttatctatctcaggatcaaagggttgtaagtcagatggattgcctctagtcatacactacattcagcatgcacacaactagttgccttgtcatgtaaataaaggtgtaggtttgaactacagctacc

SEQ ID NO: 15106 - DNA, 1038 bp, Glycine max
  Gm_smallRNAprecursor_7939
cccagaagatgttgtagttgcctttttggttattggttctggtagagccagtagaacttctttaccttttgtactggatcttcctcctctgccggaggaactagacaccttaggaggcatcgggaattttctgtaaaaattcacgggtgaggtagtcaggtaaagagttggaagagcccttgatatattctatattaaaatcaaagacacttaaaattgcttgccatcttgctaaaatctgttttgaggcaaggttttttacatccttctgtaaaatgactttggctgatttgcagtcaacccgtactaaaaatttttgatttaataaatcagattgaaatttggaaatgcacaaaacaattgccaaaacttcttttttaacagttgaatactttaattgtgcaggattccagtgttttgaaatatatgcgatgacatgttcttgaccatgtacttgttgtttgaggatgccaccgtaaccaatgtctgatgcatcagtttcgacaattttgaatgcctgtggaatgggaaaatacagacattttatggattggactttgactttgatttctttaactgtttgggtatggaggtcagaccaaggaggcggatttttctttagcctatcatgaaatggtttgacaatattgtttaagtaggggaccaattctcctacgtaatttagacaacctagaaatctttgtaactgggttttgtctaagatttggttggggaatttgctagcaaactctattgacctttcgattggaacgcttgtaccttgataaatatggtaaccaaggaatcgaattcgtgtttggaaaagattgatttttgatttggagactgccaaaccattttgtttgatgatatggatgaaggtttggagatgtttgaaatgttggtcaatgttttgggaaaagatttaaacatcatctatgtagacaatgacaaattttgaatagggattaaaaatatcgttcataattttttgaaattctgaaggggcattcttcagtccgaatggcatcacgttcc

SEQ ID NO: 15107 - DNA, 1196 bp, Glycine max
  Gm_smallRNAprecursor_7940
aaggttttttacatccttctgtaaaatgactttggctgatttgcagtcaacccgtactaaaaatttttgatttaataaatcagattgaaatttggaaatgcacaaaacaattgccaaaacttcttttttaacagttgaatactttaattgtgcaggattccagtgttttgaaatatatgcgatgacatgttcttgaccatgtacttgttgtttgaggatgccaccgtaaccaatgtctgatgcatcagtttcgacaattttgaatgcctgtggaatgggaaaatacagacattttatggattggactttgactttgatttctttaactgtttgggtatggaggtcagaccaaggaggcggatttttctttagcctatcatgaaatggtttgacaatattgtttaagtaggggaccaattctcctacgtaatttagacaacctagaaatctttgtaactgggttttgtctaagatttggttggggaatttgctagcaaactctattgacctttcgattggaacgcttgtaccttgataaatatggtaaccaaggaatcgaattcgtgtttggaaaagattgatttttgatttggagactgccaaaccattttgtttgatgatatggatgaaggtttggagatgtttgaaatgttggtcaatgttttgggaaaagatttaaacatcatctatgtagacaatgacaaattttgaatagggattaaaaatatcgttcataattttttgaaattctgaaggggcattcttcagtccgaatggcatcacgttccattcatattgctcgaaaggtacagtaaacgctgttttgcacctatctgattcttggatttggatttgccaaaatccagatttcatatcaaattttgaaaatatctttgcagaatttaatctgttaagcaaatcttttttgtttggaataggatatctaatccattgtaattcttgatttagtggtttgtaatttatgactaagcggggtgttccacgctcaatctcagattgtttgttgacataaaaagccgcacaagaccatgggctcttgcttttccggattaggcctttatcaagcaaatccttgatttccttttgacggtattgaagaagttcttcattcatttggattggtctggcttttgtgggaatttgtttttccctaaagtctttctcataagggagat

SEQ ID NO: 15108 - DNA, 1080 bp, Glycine max
  Gm_smallRNAprecursor_7941
gatgtttgaaatgttggtcaatgttttgggaaaagatttaaacatcatctatgtagacaatgacaaattttgaatagggattaaaaatatcgttcataattttttgaaattctgaaggggcattcttcagtccgaatggcatcacgttccattcatattgctcgaaaggtacagtaaacgctgttttgcacctatctgattcttggatttggatttgccaaaatccagatttcatatcaaattttgaaaatatctttgcagaatttaatctgttaagcaaatcttttttgtttggaataggatatctaatccattgtaattcttgatttagtggtttgtaatttatgactaagcggggtgttccacgctcaatctcagattgtttgttgacataaaaagccgcacaagaccatgggctcttgcttttccggattaggcctttatcaagcaaatccttgatttccttttgacggtattgaagaagttcttcattcatttggattggtctggcttttgtgggaatttgtttttccctaaagtctttctcataagggagatcaacaatatgtttctttctgtcccaaaatgcatgtggcaattcagaacagacggtcgattcaatatgatttagtaaagattgaattttttcttttacttggggttttcccagttgtatctgaatattattaaaagatacctcttcttttaagaagttaatttgattaatcttattttctataagatttatatttctggaaattggtttagtagaaaaattaaatataatttttcttcctaaataatttgtggttattccttcattagatatttggatgggaaacagggctctaatgaagggcattccaaagattacttcattcttaaggtttttaaccagaagaaagtttgtgttaatcttaagaccttggttttcaatgattgcatttgatagcttaaaattaatttttagttttgagccgtttgccgtacttaatttttttgaggttttctcaaagaattttgtaggaattaatccttctaaaatgcagtttgaatcagcccctgtgtcaaatagggcca

SEQ ID NO: 15109 - DNA, 1105 bp, Glycine max
  Gm_smallRNAprecursor_7942
tgttttgtttggataacagttaaaatatattggaccttgtcctaggctggtttcgactgttccaattagggagtcttcaaattgattatgcctaatgtctcttagacacattaaaactgctgcatctatgcccatatcaattaagggcttgatggctacttgtacataaccgatgtgtagatatttatacttacgcctatgttcataaattgaatttttttgaaagtaaatgaaattcttcccctatatcttgtcctagaggaatattgttttctactattttgattatgtaatcaaagttgtgtttgtcttttattgttttaggaacgtatagttgatcctgagggatttctggaatgttccagtcatccatgttttgattgatatcttagaatcggacttcctcatcgaagagattatgttttggggcgacctcttgggtctggttgtcttggtcatttaataaattggagttttttgaagaagatgatgaggaggagtttgagcgaaaagagatacgggaaaaagatcgtaatagtctagacatgattataatattctctaatatctttgccctcatttggttccatagaaatatctccgtaagtaaatatgtcacaaaatttttctggtaaaaaaccttaagaatgaagtaatcttaggaacgcccttcattagagctctgtttcccatccaaatatctaatgaaggaataaccacaaattatttaggacgattatatatatatatatgtatgtatgtatgtatgtttaggtagcaagatacttgggatatgcatctatattgcaaaaatgcaacacaaaaatatacatatgtttagatagcaaaatacctcatgaaaaaaaaaacaacagaaaagtaaaatattgtctagctgaaaagccaacatgattttgagaagagataacttccagcttttctttgaaaaaaaattcactgatcatagctagtttttgaaaaaaaaatggtgtacacatttgaagggtaaatgctgtgaaagtttttccgaacacccaagatagactcggatgaatgcacaaattgataaaagaacatattttggaaacactaggttgactaaaat

SEQ ID NO: 15110 - DNA, 1054 bp, Glycine max
  Gm_smallRNAprecursor_7943
tattttattgtttgtcaggcggaatttgaaatccctaaagcttctgacagtaagacaaagaagaaaattcttcagactgtcggcgagcgctggaggcagtttaaatctgacttgactaggaaatgggcacttgcagccgacaaggacggtgtggacgacattgtctgtgaaaaatacgacattagcaaggagaaatgggcctagttttgtcagacctgcaaagacccctcgtgggaggtatgtactttgtcattttagttgttttccacaacaaaatcacttcttataattcattgtagtaatcattttcattaatgttcaacttttgcaggatgtgcggaaaaaggcacaggccatccaaaagcaaaacactgccccccacgtgttgtctcgtgtgggttatgaatatttagaacaaaagctcatggctgagaagacaaagaaaagtctggaagaagctgcccagtccggaagcactgagggcgtcattgaccctccatctcccatcagacgccacgtgaagtggaagatgacccgcacgaagaaaactgggcagatgacgtctgaggcagcaaaggaaatggctgagaagattgtaagtcatttttaattaataattgtaattatctttgtgtattctatgaattccttggacaaatatgtgttttgtataggattctttggacgagcaggcgtcatagggatcgttcgtcccccatggacgtcaggatgtcctgaatgctgccattgggcgaccagagcaccctggccgtgtttgtgctgttggagtcgatgtcaccataaagcaatactttggattggctccacgaacgtcccgcagttcttcctccatgcctcctgaagacctacaacagctgacccaacaaatcagggaccaactgtaggagtcaatcgcagaaaaagtgactcgacagctgatggcatccttcagccagatacagtcccagtttcagtattagatacattcacagggacttgcattgcctccggagccagaggttggtcccttaggtgcttgtgtcagcacaaagga

SEQ ID NO: 15111 - DNA, 1157 bp, Glycine max
  Gm_smallRNAprecursor_7944
aaaaattgtttcaactatgcttaaaatagaagaaaacagaagtaaatgatgatagaacatctctcaactgtttatatattttagtttttaaaacttgtttggaaaaattttcaaaacttatgaaatttagatgaaaaattgattgtgtaatgcaaaattattttagaaaataatttttaagacgagtaaagagaagatcaaacaagcgtcaatctattgcttttccatcttcacctccaggaatccaaaagacaatagggcctagcccaacacccaataatatagtgagtgttgctaggtgcacccagcattctaaaaaaatgacaaaattgtccttgcttggttttcctcttccggatcaacttgatccggaagaggaaaaataaaaattttgttaattatacaagatatttatttcattaattataatatatttatttattttattaattataatatatttataaatattgatttataataaataattaatgttaatcaatcataatcataattcatgctaatcaatcataattccctaaaagaggatataaataatttcagaattaccaatcataatgcaatttttgaaattgcaaattatttatatcttcttttagggaattatgattgattgacataattgattgattagcatgaattatgattatgattgattaacaagattgattgattctgaaaattgctaactctgaaattatttatatcctcttttaggaaattatgattgattagcatgattgattgattagcatgaattatgattatgattgattagcattaattatttataataaatcaatatttataaatatattataactaataaaataaataaatatatttaattatattataattaatgaaataaatatctttaaatatcttgtataattaacaaaatttttatttttcctctttcggatcaagttgatccggaaaagacttccggaacaacttgatcaggaagtactttcggatcaacttacggatcaacatgttgattcagaagaggaaaatcaagcaagggtaattttgtcagttttttagaatgctgggtgcaccagcaataatgctgggtgcacctaacaacactctaatatagcaatgtgaaggcccagcccaatattatggtg

SEQ ID NO: 15112 - DNA, 1046 bp, Glycine max
  Gm_smallRNAprecursor_7945
tcaaacggacagataggaagtaagaatgcagtatgacaaatgaaagacaaatataaacttgaaaaacggatatcaagggcacaccggagaccggcttacaaatcccaggttttcataaacaaggaaaccgaagcgacggtagagctgcacaggatcggtgaagggagaagagataaggatgaaaaatagaaatttattgaatttagaaagaagcgcttacaaaaatcttttttcagagcacctcttcagaaacctgaaaaatggctaaatgaaagggtacctcacaacatacttgaggactccttatatagccaaaaatctaagccggtagttgccggtagttttgactgggactatttgactgtttgttacaagacaagtagttttgaccgggactttaatggctacaagacaggtagtattgtccagcattaattacacattaattacaaacagacggttttgtgaccgaaattaaatttaatctaaacagataccaaaacaatcatcttcgttttggtaaaagggatcttcttcttctttttcagcagaacttgtttcttccttctttgaggatgaagcttcttcttcctgctgtaacatttgtagaacttccttcagatttttaactaagacctcctttgatgtcgatcctgctaaaaatgctgtcagatgagacttttggttcaaaaacacagaagtttctgggtcagctgctttgaggaattctggatgggattggaaccagagttttacttgttctggatccgctttggatgagtcaaattgtgtccaccattttacaaatgcgtgttgccatgagaatatccatgacaatgcatagcttgaaaagtatttaagatctgctggaattcgtgattcctgcaaattgtattgtttcttaaattgggcaaatccttgttggaccgtttctgggaatatctctgggattggtccaaagaagtgccaccattgcaaaaaccaattgggaaaattgtaaattgtgttggtcttgaaatatatcaaccatgaatgcttgaagcgag

SEQ ID NO: 15113 - DNA, 1131 bp, Glycine max
  Gm_smallRNAprecursor_7946
atcttttttcagagcacctcttcagaaacctgaaaaatggctaaatgaaagggtacctcacaacatacttgaggactccttatatagccaaaaatctaagccggtagttgccggtagttttgactgggactatttgactgtttgttacaagacaagtagttttgaccgggactttaatggctacaagacaggtagtattgtccagcattaattacacattaattacaaacagacggttttgtgaccgaaattaaatttaatctaaacagataccaaaacaatcatcttcgttttggtaaaagggatcttcttcttctttttcagcagaacttgtttcttccttctttgaggatgaagcttcttcttcctgctgtaacatttgtagaacttccttcagatttttaactaagacctcctttgatgtcgatcctgctaaaaatgctgtcagatgagacttttggttcaaaaacacagaagtttctgggtcagctgctttgaggaattctggatgggattggaaccagagttttacttgttctggatccgctttggatgagtcaaattgtgtccaccattttacaaatgcgtgttgccatgagaatatccatgacaatgcatagcttgaaaagtatttaagatctgctggaattcgtgattcctgcaaattgtattgtttcttaaattgggcaaatccttgttggaccgtttctgggaatatctctgggattggtccaaagaagtgccaccattgcaaaaaccaattgggaaaattgtaaattgtgttggtcttgaaatatatcaaccatgaatgcttgaagcgagtattttggtgccaaaacaccttagtccaagcatcaacgtaatcccaataggtataacctaccggatcaaatggaactgaaaatctctttcctttgttcaagtccgaaccaaagtgtcttggttgaagaacttttagtatttggattgtcgagtgggtgtttaaggtttggtcttttggatctttgaaatgtttgatagatactgagtttgaatctaccaaaatcaattcataaaaagttattgtcttcaggatggtggttggtttgtagtgaaatcctggtgggaaagccttggccgtcaccttgaagg

SEQ ID NO: 15114 - DNA, 1146 bp, Glycine max
  Gm_smallRNAprecursor_7947
tatttgactgtttgttacaagacaagtagttttgaccgggactttaatggctacaagacaggtagtattgtccagcattaattacacattaattacaaacagacggttttgtgaccgaaattaaatttaatctaaacagataccaaaacaatcatcttcgttttggtaaaagggatcttcttcttctttttcagcagaacttgtttcttccttctttgaggatgaagcttcttcttcctgctgtaacatttgtagaacttccttcagatttttaactaagacctcctttgatgtcgatcctgctaaaaatgctgtcagatgagacttttggttcaaaaacacagaagtttctgggtcagctgctttgaggaattctggatgggattggaaccagagttttacttgttctggatccgctttggatgagtcaaattgtgtccaccattttacaaatgcgtgttgccatgagaatatccatgacaatgcatagcttgaaaagtatttaagatctgctggaattcgtgattcctgcaaattgtattgtttcttaaattgggcaaatccttgttggaccgtttctgggaatatctctgggattggtccaaagaagtgccaccattgcaaaaaccaattgggaaaattgtaaattgtgttggtcttgaaatatatcaaccatgaatgcttgaagcgagtattttggtgccaaaacaccttagtccaagcatcaacgtaatcccaataggtataacctaccggatcaaatggaactgaaaatctctttcctttgttcaagtccgaaccaaagtgtcttggttgaagaacttttagtatttggattgtcgagtgggtgtttaaggtttggtcttttggatctttgaaatgtttgatagatactgagtttgaatctaccaaaatcaattcataaaaagttattgtcttcaggatggtggttggtttgtagtgaaatcctggtgggaaagccttggccgtcaccttgaaggggtttttgtcccaaaattcaggttccatctgcaaaacagttaacaatttatttttataaatataattgttagtttgtttggtaggtggtgtttgtgttttggctaaaggtagttttcctttagtattggtggttgttttggtcat

SEQ ID NO: 15115 - DNA, 1146 bp, Glycine max; identical to SEQ ID NO: 15114
  Gm_smallRNAprecursor_7948

SEQ ID NO: 15116 - DNA, 1147 bp, Glycine max
  Gm_smallRNAprecursor_7949
tatttgactgtttgttacaagacaagtagttttgaccgggactttaatggctacaagacaggtagtattgtccagcattaattacacattaattacaaacagacggttttgtgaccgaaattaaatttaatctaaacagataccaaaacaatcatcttcgttttggtaaaagggatcttcttcttctttttcagcagaacttgtttcttccttctttgaggatgaagcttcttcttcctgctgtaacatttgtagaacttccttcagatttttaactaagacctcctttgatgtcgatcctgctaaaaatgctgtcagatgagacttttggttcaaaaacacagaagtttctgggtcagctgctttgaggaattctggatgggattggaaccagagttttacttgttctggatccgctttggatgagtcaaattgtgtccaccattttacaaatgcgtgttgccatgagaatatccatgacaatgcatagcttgaaaagtatttaagatctgctggaattcgtgattcctgcaaattgtattgtttcttaaattgggcaaatccttgttggaccgtttctgggaatatctctgggattggtccaaagaagtgccaccattgcaaaaaccaattgggaaaattgtaaattgtgttggtcttgaaatatatcaaccatgaatgcttgaagcgagtattttggtgccaaaacaccttagtccaagcatcaacgtaatcccaataggtataacctaccggatcaaatggaactgaaaatctctttcctttgttcaagtccgaaccaaagtgtcttggttgaagaacttttagtatttggattgtcgagtgggtgtttaaggtttggtcttttggatctttgaaatgtttgatagatactgagtttgaatctaccaaaatcaattcataaaaagttattgtcttcaggatggtggttggtttgtagtgaaatcctggtgggaaagccttggccgtcaccttgaaggggtttttgtcccaaaattcaggttccatctgcaaaacagttaacaatttatttttataaatataattgttagtttgtttggtaggtggtgtttgtgttttggctaaaggtagttttcctttagtattggtggttgttttggtcatt

SEQ ID NO: 15117 - DNA, 1147 bp, Glycine max; identical to SEQ ID NO: 15116
  Gm_smallRNAprecursor_7950

SEQ ID NO: 15118 - DNA, 1247 bp, Glycine max
  Gm_smallRNAprecursor_7951
tatttgactgtttgttacaagacaagtagttttgaccgggactttaatggctacaagacaggtagtattgtccagcattaattacacattaattacaaacagacggttttgtgaccgaaattaaatttaatctaaacagataccaaaacaatcatcttcgttttggtaaaagggatcttcttcttctttttcagcagaacttgtttcttccttctttgaggatgaagcttcttcttcctgctgtaacatttgtagaacttccttcagatttttaactaagacctcctttgatgtcgatcctgctaaaaatgctgtcagatgagacttttggttcaaaaacacagaagtttctgggtcagctgctttgaggaattctggatgggattggaaccagagttttacttgttctggatccgctttggatgagtcaaattgtgtccaccattttacaaatgcgtgttgccatgagaatatccatgacaatgcatagcttgaaaagtatttaagatctgctggaattcgtgattcctgcaaattgtattgtttcttaaattgggcaaatccttgttggaccgtttctgggaatatctctgggattggtccaaagaagtgccaccattgcaaaaaccaattgggaaaattgtaaattgtgttggtcttgaaatatatcaaccatgaatgcttgaagcgagtattttggtgccaaaacaccttagtccaagcatcaacgtaatcccaataggtataacctaccggatcaaatggaactgaaaatctctttcctttgttcaagtccgaaccaaagtgtcttggttgaagaacttttagtatttggattgtcgagtgggtgtttaaggtttggtcttttggatctttgaaatgtttgatagatactgagtttgaatctaccaaaatcaattcataaaaagttattgtcttcaggatggtggttggtttgtagtgaaatcctggtgggaaagccttggccgtcaccttgaaggggtttttgtcccaaaattcaggttccatctgcaaaacagttaacaatttatttttataaatataattgttagtttgtttggtaggtggtgtttgtgttttggctaaaggtagttttcctttagtattggtggttgttttggtcattgacgcattttggatcattgtttgtaaatttgattcagattcatcatcagattctgaggcaatgtctgcccaagattttttgatcatttttggaattttgg

SEQ ID NO: 15119 - DNA, 1247 bp, Glycine max; identical to SEQ ID NO: 15118
  Gm_smallRNAprecursor_7952

SEQ ID NO: 15120 - DNA, 1174 bp, Glycine max
  Gm_smallRNAprecursor_7953
cgagtattttggtgccaaaacaccttagtccaagcatcaacgtaatcccaataggtataacctaccggatcaaatggaactgaaaatctctttcctttgttcaagtccgaaccaaagtgtcttggttgaagaacttttagtatttggattgtcgagtgggtgtttaaggtttggtcttttggatctttgaaatgtttgatagatactgagtttgaatctaccaaaatcaattcataaaaagttattgtcttcaggatggtggttggtttgtagtgaaatcctggtgggaaagccttggccgtcaccttgaaggggtttttgtcccaaaattcaggttccatctgcaaaacagttaacaatttatttttataaatataattgttagtttgtttggtaggtggtgtttgtgttttggctaaaggtagttttcctttagtattggtggttgttttggtcattgacgcattttggatcattgtttgtaaatttgattcagattcatcatcagattctgaggcaatgtctgcccaagattttttgatcatttttggaattttggtcagacccatgtcttgaagggcctaaagggtttcaattggccatgcatagtcggccgatgtttgtttgacggttaccggtttgggagattcctgagtggatggctcaggtttgattgaggcaatctgggttgatgacccttctaaattggttttctgggtagatgacccagcctgggttggtgacccagaagaggttgatgatttcttgattgttggctctggaagagccagtctggctcctttgcctgtactccttcctccccttagggagattcccgatgccttaggaggcattaccacttttctgtaagaattcacgggtaaggtagtcaagtaatgagtttgaggtgcccttgatgtattctatgtcaaaatcaaagacacttagaattgcttgtcatcttgcaaaaatttgttttgaggcaaggtttttaacatctttttgtaaaatatctttggctgatttacaatcaaccctgattagaaatttttggtttaataaatccgattgaaattttgaaatgcacaaaacaattgctaaaagttcttttttaacagttgaatattttaattgtgcaggattccaatgttttgatgtatatgcaatgacatga

SEQ ID NO: 15121 - DNA, 1173 bp, Glycine max
  Gm_smallRNAprecursor_7954
gagtattttggtgccaaaacaccttagtccaagcatcaacgtaatcccaataggtataacctaccggatcaaatggaactgaaaatctctttcctttgttcaagtccgaaccaaagtgtcttggttgaagaacttttagtatttggattgtcgagtgggtgtttaaggtttggtcttttggatctttgaaatgtttgatagatactgagtttgaatctaccaaaatcaattcataaaaagttattgtcttcaggatggtggttggtttgtagtgaaatcctggtgggaaagccttggccgtcaccttgaaggggtttttgtcccaaaattcaggttccatctgcaaaacagttaacaatttatttttataaatataattgttagtttgtttggtaggtggtgtttgtgttttggctaaaggtagttttcctttagtattggtggttgttttggtcattgacgcattttggatcattgtttgtaaatttgattcagattcatcatcagattctgaggcaatgtctgcccaagattttttgatcatttttggaattttggtcagacccatgtcttgaagggcctaaagggtttcaattggccatgcatagtcggccgatgtttgtttgacggttaccggtttgggagattcctgagtggatggctcaggtttgattgaggcaatctgggttgatgacccttctaaattggttttctgggtagatgacccagcctgggttggtgacccagaagaggttgatgatttcttgattgttggctctggaagagccagtctggctcctttgcctgtactccttcctccccttagggagattcccgatgccttaggaggcattaccacttttctgtaagaattcacgggtaaggtagtcaagtaatgagtttgaggtgcccttgatgtattctatgtcaaaatcaaagacacttagaattgcttgtcatcttgcaaaaatttgttttgaggcaaggtttttaacatctttttgtaaaatatctttggctgatttacaatcaaccctgattagaaatttttggtttaataaatccgattgaaattttgaaatgcacaaaacaattgctaaaagttcttttttaacagttgaatattttaattgtgcaggattccaatgttttgatgtatatgcaatgacatga

SEQ ID NO: 15122 - DNA, 1176 bp, Glycine max
  Gm_smallRNAprecursor_7955
gagtattttggtgccaaaacaccttagtccaagcatcaacgtaatcccaataggtataacctaccggatcaaatggaactgaaaatctctttcctttgttcaagtccgaaccaaagtgtcttggttgaagaacttttagtatttggattgtcgagtgggtgtttaaggtttggtcttttggatctttgaaatgtttgatagatactgagtttgaatctaccaaaatcaattcataaaaagttattgtcttcaggatggtggttggtttgtagtgaaatcctggtgggaaagccttggccgtcaccttgaaggggtttttgtcccaaaattcaggttccatctgcaaaacagttaacaatttatttttataaatataattgttagtttgtttggtaggtggtgtttgtgttttggctaaaggtagttttcctttagtattggtggttgttttggtcattgacgcattttggatcattgtttgtaaatttgattcagattcatcatcagattctgaggcaatgtctgcccaagattttttgatcatttttggaattttggtcagacccatgtcttgaagggcctaaagggtttcaattggccatgcatagtcggccgatgtttgtttgacggttaccggtttgggagattcctgagtggatggctcaggtttgattgaggcaatctgggttgatgacccttctaaattggttttctgggtagatgacccagcctgggttggtgacccagaagaggttgatgatttcttgattgttggctctggaagagccagtctggctcctttgcctgtactccttcctccccttagggagattcccgatgccttaggaggcattaccacttttctgtaagaattcacgggtaaggtagtcaagtaatgagtttgaggtgcccttgatgtattctatgtcaaaatcaaagacacttagaattgcttgtcatcttgcaaaaatttgttttgaggcaaggtttttaacatctttttgtaaaatatctttggctgatttacaatcaaccctgattagaaatttttggtttaataaatccgattgaaattttgaaatgcacaaaacaattgctaaaagttcttttttaacagttgaatattttaattgtgcaggattccaatgttttgatgtatatgcaatgacatgatct

SEQ ID NO: 15123 - DNA, 1129 bp, Glycine max
  Gm_smallRNAprecursor_7956
ctgcaaaacagttaacaatttatttttataaatataattgttagtttgtttggtaggtggtgtttgtgttttggctaaaggtagttttcctttagtattggtggttgttttggtcattgacgcattttggatcattgtttgtaaatttgattcagattcatcatcagattctgaggcaatgtctgcccaagattttttgatcatttttggaattttggtcagacccatgtcttgaagggcctaaagggtttcaattggccatgcatagtcggccgatgtttgtttgacggttaccggtttgggagattcctgagtggatggctcaggtttgattgaggcaatctgggttgatgacccttctaaattggttttctgggtagatgacccagcctgggttggtgacccagaagaggttgatgatttcttgattgttggctctggaagagccagtctggctcctttgcctgtactccttcctccccttagggagattcccgatgccttaggaggcattaccacttttctgtaagaattcacgggtaaggtagtcaagtaatgagtttgaggtgcccttgatgtattctatgtcaaaatcaaagacacttagaattgcttgtcatcttgcaaaaatttgttttgaggcaaggtttttaacatctttttgtaaaatatctttggctgatttacaatcaaccctgattagaaatttttggtttaataaatccgattgaaattttgaaatgcacaaaacaattgctaaaagttcttttttaacagttgaatattttaattgtgcaggattccaatgttttgatgtatatgcaatgacatgatcttggccatggactctttgtttgaggatgccaccataacctatgtctgaagcatcagtttcgacaattttaaatgcctgtggaataggaagatacagacatttaatggattggactttgactttgatttctttaaccgtttgtgtatggaggtcagaccaaggaggcgaatttttcttcagcctatcatgcaatggcttgacaatattgtttaaataggggacaaattctcctacgtaatttagacaacctagaaatctttgtaactgggttttgtctaagatttggttggggaa

SEQ ID NO: 15124 - DNA, 1115 bp, Glycine max
  Gm_smallRNAprecursor_7957
acaatttatttttataaatataattgttagtttgtttggtaggtggtgtttgtgttttggctaaaggtagttttcctttagtattggtggttgttttggtcattgacgcattttggatcattgtttgtaaatttgattcagattcatcatcagattctgaggcaatgtctgcccaagattttttgatcatttttggaattttggtcagacccatgtcttgaagggcctaaagggtttcaattggccatgcatagtcggccgatgtttgtttgacggttaccggtttgggagattcctgagtggatggctcaggtttgattgaggcaatctgggttgatgacccttctaaattggttttctgggtagatgacccagcctgggttggtgacccagaagaggttgatgatttcttgattgttggctctggaagagccagtctggctcctttgcctgtactccttcctccccttagggagattcccgatgccttaggaggcattaccacttttctgtaagaattcacgggtaaggtagtcaagtaatgagtttgaggtgcccttgatgtattctatgtcaaaatcaaagacacttagaattgcttgtcatcttgcaaaaatttgttttgaggcaaggtttttaacatctttttgtaaaatatctttggctgatttacaatcaaccctgattagaaatttttggtttaataaatccgattgaaattttgaaatgcacaaaacaattgctaaaagttcttttttaacagttgaatattttaattgtgcaggattccaatgttttgatgtatatgcaatgacatgatcttggccatggactctttgtttgaggatgccaccataacctatgtctgaagcatcagtttcgacaattttaaatgcctgtggaataggaagatacagacatttaatggattggactttgactttgatttctttaaccgtttgtgtatggaggtcagaccaaggaggcgaatttttcttcagcctatcatgcaatggcttgacaatattgtttaaataggggacaaattctcctacgtaatttagacaacctagaaatctttgtaactgggttttgtctaagatttggttggggaa

SEQ ID NO: 15125 - DNA, 1218 bp, Glycine max
  Gm_smallRNAprecursor_7958
tggctcaggtttgattgaggcaatctgggttgatgacccttctaaattggttttctgggtagatgacccagcctgggttggtgacccagaagaggttgatgatttcttgattgttggctctggaagagccagtctggctcctttgcctgtactccttcctccccttagggagattcccgatgccttaggaggcattaccacttttctgtaagaattcacgggtaaggtagtcaagtaatgagtttgaggtgcccttgatgtattctatgtcaaaatcaaagacacttagaattgcttgtcatcttgcaaaaatttgttttgaggcaaggtttttaacatctttttgtaaaatatctttggctgatttacaatcaaccctgattagaaatttttggtttaataaatccgattgaaattttgaaatgcacaaaacaattgctaaaagttcttttttaacagttgaatattttaattgtgcaggattccaatgttttgatgtatatgcaatgacatgatcttggccatggactctttgtttgaggatgccaccataacctatgtctgaagcatcagtttcgacaattttaaatgcctgtggaataggaagatacagacatttaatggattggactttgactttgatttctttaaccgtttgtgtatggaggtcagaccaaggaggcgaatttttcttcagcctatcatgcaatggcttgacaatattgtttaaataggggacaaattctcctacgtaatttagacaacctagaaatctttgtaactgggttttgtctaagatttggttggggaatttgctagcaaactctattgacctttcgattggattgattgtaccttgatatatattgtgaccaaggaatcgaattcttgtttggaaaagattaatttttgatttggagactgccaaaccattttgtttgatgatatgtatgaaggtttggagatgtttgaaatgttggtcaatgttttgggaaaagattaaaacatcatctatgtagacaatgacaaattttgaataaggattaaaaatatcgttcataattttttgaaattctgaaggggcatttttcagtccgaatggcatcacgttccatttatattgcccgaaaggtacagtccgaatggcatcacgttccatcacgttccagatttcatatcaaattttgaaaatatctttgcagaatttaatctgttaag

SEQ ID NO: 15126 - DNA, 1071 bp, Glycine max
  Gm_smallRNAprecursor_7959
taaattggttttctgggtagatgacccagcctgggttggtgacccagaagaggttgatgatttcttgattgttggctctggaagagccagtctggctcctttgcctgtactccttcctccccttagggagattcccgatgccttaggaggcattaccacttttctgtaagaattcacgggtaaggtagtcaagtaatgagtttgaggtgcccttgatgtattctatgtcaaaatcaaagacacttagaattgcttgtcatcttgcaaaaatttgttttgaggcaaggtttttaacatctttttgtaaaatatctttggctgatttacaatcaaccctgattagaaatttttggtttaataaatccgattgaaattttgaaatgcacaaaacaattgctaaaagttcttttttaacagttgaatattttaattgtgcaggattccaatgttttgatgtatatgcaatgacatgatcttggccatggactctttgtttgaggatgccaccataacctatgtctgaagcatcagtttcgacaattttaaatgcctgtggaataggaagatacagacatttaatggattggactttgactttgatttctttaaccgtttgtgtatggaggtcagaccaaggaggcgaatttttcttcagcctatcatgcaatggcttgacaatattgtttaaataggggacaaattctcctacgtaatttagacaacctagaaatctttgtaactgggttttgtctaagatttggttggggaatttgctagcaaactctattgacctttcgattggattgattgtaccttgatatatattgtgaccaaggaatcgaattcttgtttggaaaagattaatttttgatttggagactgccaaaccattttgtttgatgatatgtatgaaggtttggagatgtttgaaatgttggtcaatgttttgggaaaagattaaaacatcatctatgtagacaatgacaaattttgaataaggattaaaaatatcgttcataattttttgaaattctgaaggggcatttttcagtccgaatggcatcacgttcc

SEQ ID NO: 15127 - DNA, 1073 bp, Glycine max
  Gm_smallRNAprecursor_7960
taaattggttttctgggtagatgacccagcctgggttggtgacccagaagaggttgatgatttcttgattgttggctctggaagagccagtctggctcctttgcctgtactccttcctccccttagggagattcccgatgccttaggaggcattaccacttttctgtaagaattcacgggtaaggtagtcaagtaatgagtttgaggtgcccttgatgtattctatgtcaaaatcaaagacacttagaattgcttgtcatcttgcaaaaatttgttttgaggcaaggtttttaacatctttttgtaaaatatctttggctgatttacaatcaaccctgattagaaatttttggtttaataaatccgattgaaattttgaaatgcacaaaacaattgctaaaagttcttttttaacagttgaatattttaattgtgcaggattccaatgttttgatgtatatgcaatgacatgatcttggccatggactctttgtttgaggatgccaccataacctatgtctgaagcatcagtttcgacaattttaaatgcctgtggaataggaagatacagacatttaatggattggactttgactttgatttctttaaccgtttgtgtatggaggtcagaccaaggaggcgaatttttcttcagcctatcatgcaatggcttgacaatattgtttaaataggggacaaattctcctacgtaatttagacaacctagaaatctttgtaactgggttttgtctaagatttggttggggaatttgctagcaaactctattgacctttcgattggattgattgtaccttgatatatattgtgaccaaggaatcgaattcttgtttggaaaagattaatttttgatttggagactgccaaaccattttgtttgatgatatgtatgaaggtttggagatgtttgaaatgttggtcaatgttttgggaaaagattaaaacatcatctatgtagacaatgacaaattttgaataaggattaaaaatatcgttcataattttttgaaattctgaaggggcatttttcagtccgaatggcatcacgttccat

SEQ ID NO: 15128 - DNA, 1178 bp, Glycine max
  Gm_smallRNAprecursor_7961
ttgttggctctggaagagccagtctggctcctttgcctgtactccttcctccccttagggagattcccgatgccttaggaggcattaccacttttctgtaagaattcacgggtaaggtagtcaagtaatgagtttgaggtgcccttgatgtattctatgtcaaaatcaaagacacttagaattgcttgtcatcttgcaaaaatttgttttgaggcaaggtttttaacatctttttgtaaaatatctttggctgatttacaatcaaccctgattagaaatttttggtttaataaatccgattgaaattttgaaatgcacaaaacaattgctaaaagttcttttttaacagttgaatattttaattgtgcaggattccaatgttttgatgtatatgcaatgacatgatcttggccatggactctttgtttgaggatgccaccataacctatgtctgaagcatcagtttcgacaattttaaatgcctgtggaataggaagatacagacatttaatggattggactttgactttgatttctttaaccgtttgtgtatggaggtcagaccaaggaggcgaatttttcttcagcctatcatgcaatggcttgacaatattgtttaaataggggacaaattctcctacgtaatttagacaacctagaaatctttgtaactgggttttgtctaagatttggttggggaatttgctagcaaactctattgacctttcgattggattgattgtaccttgatatatattgtgaccaaggaatcgaattcttgtttggaaaagattaatttttgatttggagactgccaaaccattttgtttgatgatatgtatgaaggtttggagatgtttgaaatgttggtcaatgttttgggaaaagattaaaacatcatctatgtagacaatgacaaattttgaataaggattaaaaatatcgttcataattttttgaaattctgaaggggcatttttcagtccgaatggcatcacgttccatttatattgcccgaaaggtacagtccgaatggcatcacgttccatcacgttccagatttcatatcaaattttgaaaatatctttgcagaatttaatctgttaagcaaatcttttttgtttggaataggatatctaatctattgtaatgcatgatttagcggtttgtaatttatg

SEQ ID NO: 15129 - DNA, 1109 bp, Glycine max
  Gm_smallRNAprecursor_7962
acgggtaaggtagtcaagtaatgagtttgaggtgcccttgatgtattctatgtcaaaatcaaagacacttagaattgcttgtcatcttgcaaaaatttgttttgaggcaaggtttttaacatctttttgtaaaatatctttggctgatttacaatcaaccctgattagaaatttttggtttaataaatccgattgaaattttgaaatgcacaaaacaattgctaaaagttcttttttaacagttgaatattttaattgtgcaggattccaatgttttgatgtatatgcaatgacatgatcttggccatggactctttgtttgaggatgccaccataacctatgtctgaagcatcagtttcgacaattttaaatgcctgtggaataggaagatacagacatttaatggattggactttgactttgatttctttaaccgtttgtgtatggaggtcagaccaaggaggcgaatttttcttcagcctatcatgcaatggcttgacaatattgtttaaataggggacaaattctcctacgtaatttagacaacctagaaatctttgtaactgggttttgtctaagatttggttggggaatttgctagcaaactctattgacctttcgattggattgattgtaccttgatatatattgtgaccaaggaatcgaattcttgtttggaaaagattaatttttgatttggagactgccaaaccattttgtttgatgatatgtatgaaggtttggagatgtttgaaatgttggtcaatgttttgggaaaagattaaaacatcatctatgtagacaatgacaaattttgaataaggattaaaaatatcgttcataattttttgaaattctgaaggggcatttttcagtccgaatggcatcacgttccatttatattgcccgaaaggtacagtccgaatggcatcacgttccatcacgttccagatttcatatcaaattttgaaaatatctttgcagaatttaatctgttaagcaaatcttttttgtttggaataggatatctaatctattgtaatgcatgatttagcggtttgtaatttatgactaagcggggtgttccacgctcaatctcagattgttt

SEQ ID NO: 15130 - DNA, 1080 bp, Glycine max
  Gm_smallRNAprecursor_7963
atgatatgtatgaaggtttggagatgtttgaaatgttggtcaatgttttgggaaaagattaaaacatcatctatgtagacaatgacaaattttgaataaggattaaaaatatcgttcataattttttgaaattctgaaggggcatttttcagtccgaatggcatcacgttccatttatattgcccgaaaggtacagtccgaatggcatcacgttccatcacgttccagatttcatatcaaattttgaaaatatctttgcagaatttaatctgttaagcaaatcttttttgtttggaataggatatctaatctattgtaatgcatgatttagcggtttgtaatttatgactaagcggggtgttccacgctcaatctcagattgtttattgacataaaaagccacacaagaccatgggcttttgcttttccggattaggcctttatcaagcaaatccttgatttccttttgacagtattgaagaagttcttcattcatttggattggtctggcttttgtgggaatttgtttttccctaaagtctttctcataagggagattaataatatgtttctttctgtcccaaaatgcatgtggcaattcagaacagacggtcgattcaatatgatttaataaagattgaattttttcttttacttggggttttcccagttgtatttgaatattattaaaagatacttcttcttttaagaagttaatttgattaatcttattttctataagatttatatttctggaaattgggttagtagaaaaattaaatataatttttcttcctaaataatttgtggttattccttcattagatatttggatgggaaacagggctctaatgaagggcgttcctaagattacttcattcttaaggttttttaccagaagaaagtttgtgttaatcttaagaccttgattttcaatgattgcatttgatagcttaaaattaatttttaattttgagccgtttgctgtacttaatttttctgaggttttctcaaagaattttgtaggaattaatccttctaaaatgcagtttgaatcagcccctgtgtcaaatagggcca

SEQ ID NO: 15131 - DNA, 1040 bp, Glycine max
  Gm_smallRNAprecursor_7964
gcttacaaacccaggtttttgaaaacaaagaaaccgaagcggtggcagagccgcacaggattggtgaggggagaagggaggtatgaaaacagaacttgaaatttattgaaaccgaaagaaaagcttacaaagagtttttccctaggcagagcttctctctctaaaaacctgattctgagactatctgaaagggtgtctcacaaagggaacgaggactcctttaaatagactcaatttttactatttctacagtatcggtaatgtttactggaactgttacaaaacttttacaaattacattacttaaaagattctgacaaattagttacaataattcatgattactacaactaattaatcttcgtctaatgatataccgaaacagtcatcttcattctggtagaatggatcgtctccttggtcatcattagtctctgatgattcagcttccttcttggaaggttcttcttccacttcctgttgaagtagttggagaacttctttgagattctgagcaagactctctttagattttgagcttgctaagaatgctgccagttgcgactactgattcaggaacagagatgtctctggattagcaggtttaaggaactcaggattgctctagaaccagttcttgacttgatctggagcagcctttgaagtatcgaattgtgacaaccattttacaaaggcgtgtctttgtaacggtggatattgcttgttgttttcagtttttccgtatctgtactgctatgaaaaaatccatgacaaggcaaaactggaaaagtattttaaatctgctggaatacgtgattccttgctattatagagcttgttgaattgttggaatccctgttggacttcttctgggaatatctgtggaattggtccgaagtagttccaccattggaggaaccaatttggaaaattatacacagtattatttttgaagtaaattagccatgaatgcttgaatttactattttgatgccagaacacattggtccaggcgtcgatgtaatcccaataattatatc

SEQ ID NO: 15132 - DNA, 1069 bp, Glycine max
  Gm_smallRNAprecursor_7965
ttactggaactgttacaaaacttttacaaattacattacttaaaagattctgacaaattagttacaataattcatgattactacaactaattaatcttcgtctaatgatataccgaaacagtcatcttcattctggtagaatggatcgtctccttggtcatcattagtctctgatgattcagcttccttcttggaaggttcttcttccacttcctgttgaagtagttggagaacttctttgagattctgagcaagactctctttagattttgagcttgctaagaatgctgccagttgcgactactgattcaggaacagagatgtctctggattagcaggtttaaggaactcaggattgctctagaaccagttcttgacttgatctggagcagcctttgaagtatcgaattgtgacaaccattttacaaaggcgtgtctttgtaacggtggatattgcttgttgttttcagtttttccgtatctgtactgctatgaaaaaatccatgacaaggcaaaactggaaaagtattttaaatctgctggaatacgtgattccttgctattatagagcttgttgaattgttggaatccctgttggacttcttctgggaatatctgtggaattggtccgaagtagttccaccattggaggaaccaatttggaaaattatacacagtattatttttgaagtaaattagccatgaatgcttgaatttactattttgatgccagaacacattggtccaggcgtcgatgtaatcccaataattatatcctgcggggtcaaatggagcagaaaattttttgggttggtttaggtttgagccataatgtcgtggctgcataacctttaggatttggattgtggaatgggtatttagatttggatctttggggtctttgaagtgtttaatagatactgagtttgtatctatcagaatgaattcgtagaatttgcgggttttgtttgtggctattggcctgtaatggaatcctggggggaatactttggcggttgctttgaagggattcttgtcccagtattctggttccatttgtaaaacattg

SEQ ID NO: 15133 - DNA, 1067 bp, Glycine max
  Gm_smallRNAprecursor_7966
actggaactgttacaaaacttttacaaattacattacttaaaagattctgacaaattagttacaataattcatgattactacaactaattaatcttcgtctaatgatataccgaaacagtcatcttcattctggtagaatggatcgtctccttggtcatcattagtctctgatgattcagcttccttcttggaaggttcttcttccacttcctgttgaagtagttggagaacttctttgagattctgagcaagactctctttagattttgagcttgctaagaatgctgccagttgcgactactgattcaggaacagagatgtctctggattagcaggtttaaggaactcaggattgctctagaaccagttcttgacttgatctggagcagcctttgaagtatcgaattgtgacaaccattttacaaaggcgtgtctttgtaacggtggatattgcttgttgttttcagtttttccgtatctgtactgctatgaaaaaatccatgacaaggcaaaactggaaaagtattttaaatctgctggaatacgtgattccttgctattatagagcttgttgaattgttggaatccctgttggacttcttctgggaatatctgtggaattggtccgaagtagttccaccattggaggaaccaatttggaaaattatacacagtattatttttgaagtaaattagccatgaatgcttgaatttactattttgatgccagaacacattggtccaggcgtcgatgtaatcccaataattatatcctgcggggtcaaatggagcagaaaattttttgggttggtttaggtttgagccataatgtcgtggctgcataacctttaggatttggattgtggaatgggtatttagatttggatctttggggtctttgaagtgtttaatagatactgagtttgtatctatcagaatgaattcgtagaatttgcgggttttgtttgtggctattggcctgtaatggaatcctggggggaatactttggcggttgctttgaagggattcttgtcccagtattctggttccatttgtaaaacattg

SEQ ID NO: 15134 - DNA, 1067 bp, Glycine max; identical to SEQ ID NO: 15133
  Gm_smallRNAprecursor_7967

SEQ ID NO: 15135 - DNA, 1109 bp, Glycine max
  Gm_smallRNAprecursor_7968
agattctgacaaattagttacaataattcatgattactacaactaattaatcttcgtctaatgatataccgaaacagtcatcttcattctggtagaatggatcgtctccttggtcatcattagtctctgatgattcagcttccttcttggaaggttcttcttccacttcctgttgaagtagttggagaacttctttgagattctgagcaagactctctttagattttgagcttgctaagaatgctgccagttgcgactactgattcaggaacagagatgtctctggattagcaggtttaaggaactcaggattgctctagaaccagttcttgacttgatctggagcagcctttgaagtatcgaattgtgacaaccattttacaaaggcgtgtctttgtaacggtggatattgcttgttgttttcagtttttccgtatctgtactgctatgaaaaaatccatgacaaggcaaaactggaaaagtattttaaatctgctggaatacgtgattccttgctattatagagcttgttgaattgttggaatccctgttggacttcttctgggaatatctgtggaattggtccgaagtagttccaccattggaggaaccaatttggaaaattatacacagtattatttttgaagtaaattagccatgaatgcttgaatttactattttgatgccagaacacattggtccaggcgtcgatgtaatcccaataattatatcctgcggggtcaaatggagcagaaaattttttgggttggtttaggtttgagccataatgtcgtggctgcataacctttaggatttggattgtggaatgggtatttagatttggatctttggggtctttgaagtgtttaatagatactgagtttgtatctatcagaatgaattcgtagaatttgcgggttttgtttgtggctattggcctgtaatggaatcctggggggaatactttggcggttgctttgaagggattcttgtcccagtattctggttccatttgtaaaacattgaaaaacttgttttttgaaatataactgttgctgggttgtgatgttgattcttgttgagtcaacgattggcttggtctttggttg

SEQ ID NO: 15136 - DNA, 1070 bp, Glycine max
  Gm_smallRNAprecursor_7969
caactaattaatcttcgtctaatgatataccgaaacagtcatcttcattctggtagaatggatcgtctccttggtcatcattagtctctgatgattcagcttccttcttggaaggttcttcttccacttcctgttgaagtagttggagaacttctttgagattctgagcaagactctctttagattttgagcttgctaagaatgctgccagttgcgactactgattcaggaacagagatgtctctggattagcaggtttaaggaactcaggattgctctagaaccagttcttgacttgatctggagcagcctttgaagtatcgaattgtgacaaccattttacaaaggcgtgtctttgtaacggtggatattgcttgttgttttcagtttttccgtatctgtactgctatgaaaaaatccatgacaaggcaaaactggaaaagtattttaaatctgctggaatacgtgattccttgctattatagagcttgttgaattgttggaatccctgttggacttcttctgggaatatctgtggaattggtccgaagtagttccaccattggaggaaccaatttggaaaattatacacagtattatttttgaagtaaattagccatgaatgcttgaatttactattttgatgccagaacacattggtccaggcgtcgatgtaatcccaataattatatcctgcggggtcaaatggagcagaaaattttttgggttggtttaggtttgagccataatgtcgtggctgcataacctttaggatttggattgtggaatgggtatttagatttggatctttggggtctttgaagtgtttaatagatactgagtttgtatctatcagaatgaattcgtagaatttgcgggttttgtttgtggctattggcctgtaatggaatcctggggggaatactttggcggttgctttgaagggattcttgtcccagtattctggttccatttgtaaaacattgaaaaacttgttttttgaaatataactgttgctgggttgtgatgttgattcttgttgagtcaacgattggcttggtctttggttg

SEQ ID NO: 15137 - DNA, 1038 bp, Glycine max
  Gm_smallRNAprecursor_7970
cccagaagatgttgtagttgcctttttggttattggctctggtagagccagtagaacctcttttccttttgtactggatctacctcctctgtcggaggaactagacaccttaggaggcatcgagaattttctgtaaaaattcacgggtgaggtagtcaggtagagagttggaagagcccttgatatattctatattaaaatcaaagacacttaaaattgcttgccatcttgcaaaaatctgttttgaggcaaggttttttacatccttttgtaaaatgtctttggctgatttgcagtcaacccttactaaacattttttatttaataaatcagattgaaatttggaaatgcacaaaacaatttctaaaacttcttttttgacaattgaatactttaattgtgttggattccagtgttttgaagtatatgcgatgacatgttcttgaccatgtacttgttgtttgaggataccaccgtaaccgatgtctgatgcatcagtttcgacaattttgaatgcctgtggaatgggaagatacagacattttatggattggactttgactttgatttctttaactgtttgggtatggaggtcagaccaaggaggcggatttttctttagcctatcatgtaatggtgtgacaatattgtttaagtaggggacaaattctcctacgtaatttagacaacctagaaatctttgtaactgggttttgtctaagatttggttggagaatttgctagcaaactctattgacctttcgattggaatgattgtaccttgataaatattgtgaccaaggaatcgaattcgagtttggaaaagattgatttttgatttggagactgccaaaccattttgtttgatgatatggatgaaggtttggagatgtttgaaatgttggtcaatgttttgggaaaagattaaaacatcatctatgcatacaatgacaaattttgaatagggattaaaaatatcattcaaaattttttgaaattctgaaggggcattctttagtccgaatgacattacattcc

SEQ ID NO: 15138 - DNA, 1196 bp, Glycine max
  Gm_smallRNAprecursor_7971
aaggttttttacatccttttgtaaaatgtctttggctgatttgcagtcaacccttactaaacattttttatttaataaatcagattgaaatttggaaatgcacaaaacaatttctaaaacttcttttttgacaattgaatactttaattgtgttggattccagtgttttgaagtatatgcgatgacatgttcttgaccatgtacttgttgtttgaggataccaccgtaaccgatgtctgatgcatcagtttcgacaattttgaatgcctgtggaatgggaagatacagacattttatggattggactttgactttgatttctttaactgtttgggtatggaggtcagaccaaggaggcggatttttctttagcctatcatgtaatggtgtgacaatattgtttaagtaggggacaaattctcctacgtaatttagacaacctagaaatctttgtaactgggttttgtctaagatttggttggagaatttgctagcaaactctattgacctttcgattggaatgattgtaccttgataaatattgtgaccaaggaatcgaattcgagtttggaaaagattgatttttgatttggagactgccaaaccattttgtttgatgatatggatgaaggtttggagatgtttgaaatgttggtcaatgttttgggaaaagattaaaacatcatctatgcatacaatgacaaattttgaatagggattaaaaatatcattcaaaattttttgaaattctgaaggggcattctttagtccgaatgacattacattccattcatattgcccgaaaggtacagtaaacgctgttttgtacctatctgattcttggatttggatttgccaaaatccagatttcatatcaaattttgaaaatatctttgcagaatttaatctgttaagcaaatcttttttgtttggaataggatatctaatccattgtaatgcttgatttagtggtttgtaatttatgactaagcagagtgttccacgctcaatctcagattgtttgttgacataaaaagccgcacaagaccatgggctcttgcttttccggattaggcctttatcaagcaaatccttgatttctttttgacagtattgaagaagttctttattcatttggattggtctggcttttgtgggaatttgtttttccctaaagtgtttctcattggggagat

SEQ ID NO: 15139 - DNA, 1080 bp, Glycine max
  Gm_smallRNAprecursor_7972
gatgtttgaaatgttggtcaatgttttgggaaaagattaaaacatcatctatgcatacaatgacaaattttgaatagggattaaaaatatcattcaaaattttttgaaattctgaaggggcattctttagtccgaatgacattacattccattcatattgcccgaaaggtacagtaaacgctgttttgtacctatctgattcttggatttggatttgccaaaatccagatttcatatcaaattttgaaaatatctttgcagaatttaatctgttaagcaaatcttttttgtttggaataggatatctaatccattgtaatgcttgatttagtggtttgtaatttatgactaagcagagtgttccacgctcaatctcagattgtttgttgacataaaaagccgcacaagaccatgggctcttgcttttccggattaggcctttatcaagcaaatccttgatttctttttgacagtattgaagaagttctttattcatttggattggtctggcttttgtgggaatttgtttttccctaaagtgtttctcattggggagatcaacaatatgtttctttctatcccaaaatgcatgtggcaattcagaacagacggttgattcaatatgatttaataaagattgaattttttcttttacttggggttttcctagttgtatctgaatattattaaaagatacttcttcttttaagaagttaatttgattaatcttattttctttaagatttatatttctggaaattggtttagtagaaaaattaaatataatctttcttcctaaataatttgtggttattccttcactagatatttggatgggaaacaaggctctaatgaagggcgttcctaagattacttcattcttaaggttttttaccagaagaaagtttgtgttaatcctaagaccttggttttcaatgattgcatttgatagcttaaaattaatttttaattttgagccgtttgccgtacttaatttttctgaggttttctcaaagaattttgtagggattaatccttctaaaatgcagtttgaatcagcccctgtgtcaaatagggcca

SEQ ID NO: 15140 - DNA, 1056 bp, Glycine max
  Gm_smallRNAprecursor_7973
atagaaacaagaatttaaatttgctgataaaaaaatcttcaataaatcttttgttaggcgagaagagacagaatatagggaaacattttaatattaaaattattatgataataaactagagaaaggttcgacaattaaaatgaaatatatatatatatatatatatatatatatatatatatatattgacaccagagatcagtggaataagatcaaaacggacagataggaagtaagaatgcagtatgataaatgaaagtgaaatataaatgataaagggcacaccgaaacggcttacaaacccaggttttttaaaacaaagaaaccgaagcggcggcagagccgcacagtatcggtgaggggagaagggagatatgaaaacagaacttgaaatttattgaaaccgaaagaaaagcttacaaagagtttttccctaggcagagcttctctctctaaaaacctgattctgagactatccgaaagggtgcctcacaaagggaacgaggactcctttaaatagactcaatttttactgtttctacagtatcagtaatgtttaccggaactgttacaaaacttttacaaattacattacttaaaagattctgacaaattagttacaataattcatgattactacaactaattaatcttcgtctaatgatataccgaaacagtcatcttcattctggtagaatggatcgtcttcttggtcatcattagtctctgatgattcagcttccttcttggaaggttcttcttccacttcctgttgaagtagttggagaacttctttgagattctgagcaagactctctttagattttgagcttgctaagaatgctgccagttgcgacttttgattcaggaatagagatgtctttggatcagcaggtttaaggaactcaggattgctctggaaccagttcttgacttgatctggagcagtctttgaagtatcgaattgtgaccaccattttacaaaggcgtgtctctgtaatggtggatattgcttgctgttttcagtttttccgtatctgtactgccatgaaaaaa

SEQ ID NO: 15141 - DNA, 1215 bp, Glycine max
  Gm_smallRNAprecursor_7974
aggcgagaagagacagaatatagggaaacattttaatattaaaattattatgataataaactagagaaaggttcgacaattaaaatgaaatatatatatatatatatatatatatatatatatatatatattgacaccagagatcagtggaataagatcaaaacggacagataggaagtaagaatgcagtatgataaatgaaagtgaaatataaatgataaagggcacaccgaaacggcttacaaacccaggttttttaaaacaaagaaaccgaagcggcggcagagccgcacagtatcggtgaggggagaagggagatatgaaaacagaacttgaaatttattgaaaccgaaagaaaagcttacaaagagtttttccctaggcagagcttctctctctaaaaacctgattctgagactatccgaaagggtgcctcacaaagggaacgaggactcctttaaatagactcaatttttactgtttctacagtatcagtaatgtttaccggaactgttacaaaacttttacaaattacattacttaaaagattctgacaaattagttacaataattcatgattactacaactaattaatcttcgtctaatgatataccgaaacagtcatcttcattctggtagaatggatcgtcttcttggtcatcattagtctctgatgattcagcttccttcttggaaggttcttcttccacttcctgttgaagtagttggagaacttctttgagattctgagcaagactctctttagattttgagcttgctaagaatgctgccagttgcgacttttgattcaggaatagagatgtctttggatcagcaggtttaaggaactcaggattgctctggaaccagttcttgacttgatctggagcagtctttgaagtatcgaattgtgaccaccattttacaaaggcgtgtctctgtaatggtggatattgcttgctgttttcagtttttccgtatctgtactgccatgaaaaaatccatgacaagacaaaactggaaaagtattttaaatctgctggaatacgtgattccttgctattatagagcttgttgaattgttggaatccctgttggacttcttctgggaatatatgtggaattggtccgaagtagttccaccattggaggaaccaatttggaaaattatacacagtattatttttgaagtaaatttgccatgaatgcttgaa

SEQ ID NO: 15142 - DNA, 1138 bp, Glycine max
  Gm_smallRNAprecursor_7975
gcacaccgaaacggcttacaaacccaggttttttaaaacaaagaaaccgaagcggcggcagagccgcacagtatcggtgaggggagaagggagatatgaaaacagaacttgaaatttattgaaaccgaaagaaaagcttacaaagagtttttccctaggcagagcttctctctctaaaaacctgattctgagactatccgaaagggtgcctcacaaagggaacgaggactcctttaaatagactcaatttttactgtttctacagtatcagtaatgtttaccggaactgttacaaaacttttacaaattacattacttaaaagattctgacaaattagttacaataattcatgattactacaactaattaatcttcgtctaatgatataccgaaacagtcatcttcattctggtagaatggatcgtcttcttggtcatcattagtctctgatgattcagcttccttcttggaaggttcttcttccacttcctgttgaagtagttggagaacttctttgagattctgagcaagactctctttagattttgagcttgctaagaatgctgccagttgcgacttttgattcaggaatagagatgtctttggatcagcaggtttaaggaactcaggattgctctggaaccagttcttgacttgatctggagcagtctttgaagtatcgaattgtgaccaccattttacaaaggcgtgtctctgtaatggtggatattgcttgctgttttcagtttttccgtatctgtactgccatgaaaaaatccatgacaagacaaaactggaaaagtattttaaatctgctggaatacgtgattccttgctattatagagcttgttgaattgttggaatccctgttggacttcttctgggaatatatgtggaattggtccgaagtagttccaccattggaggaaccaatttggaaaattatacacagtattatttttgaagtaaatttgccatgaatgcttgaatttactattttgatgccagaacacattggtccaggcatcgatgtaatcccaataattatatcctgcggggtcaaatggagtagaaaattttttgggtttgtttaggtttgagccataatgtcgtggctgcataacctttaggatttg

SEQ ID NO: 15143 - DNA, 1040 bp, Glycine max
  Gm_smallRNAprecursor_7976
gcttacaaacccaggttttttaaaacaaagaaaccgaagcggcggcagagccgcacagtatcggtgaggggagaagggagatatgaaaacagaacttgaaatttattgaaaccgaaagaaaagcttacaaagagtttttccctaggcagagcttctctctctaaaaacctgattctgagactatccgaaagggtgcctcacaaagggaacgaggactcctttaaatagactcaatttttactgtttctacagtatcagtaatgtttaccggaactgttacaaaacttttacaaattacattacttaaaagattctgacaaattagttacaataattcatgattactacaactaattaatcttcgtctaatgatataccgaaacagtcatcttcattctggtagaatggatcgtcttcttggtcatcattagtctctgatgattcagcttccttcttggaaggttcttcttccacttcctgttgaagtagttggagaacttctttgagattctgagcaagactctctttagattttgagcttgctaagaatgctgccagttgcgacttttgattcaggaatagagatgtctttggatcagcaggtttaaggaactcaggattgctctggaaccagttcttgacttgatctggagcagtctttgaagtatcgaattgtgaccaccattttacaaaggcgtgtctctgtaatggtggatattgcttgctgttttcagtttttccgtatctgtactgccatgaaaaaatccatgacaagacaaaactggaaaagtattttaaatctgctggaatacgtgattccttgctattatagagcttgttgaattgttggaatccctgttggacttcttctgggaatatatgtggaattggtccgaagtagttccaccattggaggaaccaatttggaaaattatacacagtattatttttgaagtaaatttgccatgaatgcttgaatttactattttgatgccagaacacattggtccaggcatcgatgtaatcccaataattatatc

SEQ ID NO: 15144 - DNA, 1198 bp, Glycine max
  Gm_smallRNAprecursor_7977
aagaaaagcttacaaagagtttttccctaggcagagcttctctctctaaaaacctgattctgagactatccgaaagggtgcctcacaaagggaacgaggactcctttaaatagactcaatttttactgtttctacagtatcagtaatgtttaccggaactgttacaaaacttttacaaattacattacttaaaagattctgacaaattagttacaataattcatgattactacaactaattaatcttcgtctaatgatataccgaaacagtcatcttcattctggtagaatggatcgtcttcttggtcatcattagtctctgatgattcagcttccttcttggaaggttcttcttccacttcctgttgaagtagttggagaacttctttgagattctgagcaagactctctttagattttgagcttgctaagaatgctgccagttgcgacttttgattcaggaatagagatgtctttggatcagcaggtttaaggaactcaggattgctctggaaccagttcttgacttgatctggagcagtctttgaagtatcgaattgtgaccaccattttacaaaggcgtgtctctgtaatggtggatattgcttgctgttttcagtttttccgtatctgtactgccatgaaaaaatccatgacaagacaaaactggaaaagtattttaaatctgctggaatacgtgattccttgctattatagagcttgttgaattgttggaatccctgttggacttcttctgggaatatatgtggaattggtccgaagtagttccaccattggaggaaccaatttggaaaattatacacagtattatttttgaagtaaatttgccatgaatgcttgaatttactattttgatgccagaacacattggtccaggcatcgatgtaatcccaataattatatcctgcggggtcaaatggagtagaaaattttttgggtttgtttaggtttgagccataatgtcgtggctgcataacctttaggatttggattgtggaatgggtatttagatttggatctttggggtctttgaagtgtttaatagatactgagttcgtatctatcagaatgaattcgtagaatttgcgggttttgtttgtggctattggcctgtaatggaatcctggggggaatactttggcggttgctttgaagggattcttgtcccagtattctg

SEQ ID NO: 15145 - DNA, 1109 bp, Glycine max
  Gm_smallRNAprecursor_7978
agattctgacaaattagttacaataattcatgattactacaactaattaatcttcgtctaatgatataccgaaacagtcatcttcattctggtagaatggatcgtcttcttggtcatcattagtctctgatgattcagcttccttcttggaaggttcttcttccacttcctgttgaagtagttggagaacttctttgagattctgagcaagactctctttagattttgagcttgctaagaatgctgccagttgcgacttttgattcaggaatagagatgtctttggatcagcaggtttaaggaactcaggattgctctggaaccagttcttgacttgatctggagcagtctttgaagtatcgaattgtgaccaccattttacaaaggcgtgtctctgtaatggtggatattgcttgctgttttcagtttttccgtatctgtactgccatgaaaaaatccatgacaagacaaaactggaaaagtattttaaatctgctggaatacgtgattccttgctattatagagcttgttgaattgttggaatccctgttggacttcttctgggaatatatgtggaattggtccgaagtagttccaccattggaggaaccaatttggaaaattatacacagtattatttttgaagtaaatttgccatgaatgcttgaatttactattttgatgccagaacacattggtccaggcatcgatgtaatcccaataattatatcctgcggggtcaaatggagtagaaaattttttgggtttgtttaggtttgagccataatgtcgtggctgcataacctttaggatttggattgtggaatgggtatttagatttggatctttggggtctttgaagtgtttaatagatactgagttcgtatctatcagaatgaattcgtagaatttgcgggttttgtttgtggctattggcctgtaatggaatcctggggggaatactttggcggttgctttgaagggattcttgtcccagtattctggttccatttgtaaaacattgaaaaacttgttttttgaaatataattgttgttgggttgtgatgttgattcttgttgagtcaacgattggcttggtctttggttg

SEQ ID NO: 15146 - DNA, 1070 bp, Glycine max
  Gm_smallRNAprecursor_7979
caactaattaatcttcgtctaatgatataccgaaacagtcatcttcattctggtagaatggatcgtcttcttggtcatcattagtctctgatgattcagcttccttcttggaaggttcttcttccacttcctgttgaagtagttggagaacttctttgagattctgagcaagactctctttagattttgagcttgctaagaatgctgccagttgcgacttttgattcaggaatagagatgtctttggatcagcaggtttaaggaactcaggattgctctggaaccagttcttgacttgatctggagcagtctttgaagtatcgaattgtgaccaccattttacaaaggcgtgtctctgtaatggtggatattgcttgctgttttcagtttttccgtatctgtactgccatgaaaaaatccatgacaagacaaaactggaaaagtattttaaatctgctggaatacgtgattccttgctattatagagcttgttgaattgttggaatccctgttggacttcttctgggaatatatgtggaattggtccgaagtagttccaccattggaggaaccaatttggaaaattatacacagtattatttttgaagtaaatttgccatgaatgcttgaatttactattttgatgccagaacacattggtccaggcatcgatgtaatcccaataattatatcctgcggggtcaaatggagtagaaaattttttgggtttgtttaggtttgagccataatgtcgtggctgcataacctttaggatttggattgtggaatgggtatttagatttggatctttggggtctttgaagtgtttaatagatactgagttcgtatctatcagaatgaattcgtagaatttgcgggttttgtttgtggctattggcctgtaatggaatcctggggggaatactttggcggttgctttgaagggattcttgtcccagtattctggttccatttgtaaaacattgaaaaacttgttttttgaaatataattgttgttgggttgtgatgttgattcttgttgagtcaacgattggcttggtctttggttg

SEQ ID NO: 15147 - DNA, 1196 bp, Glycine max
  Gm_smallRNAprecursor_7980
aaggttttttacatccttctgtaaaatgtctttggctgatttgcagtcaacccttactaaaaatttttgatttaataaatcagattgaaatttggaaatgcacaaaacaattgctaaaaattcttttttgatagttgaatactttaattgtgctggattccagtgttttgaaatatatgcgatgacatgttcttgaccatgtacttgttgtttgaggataccaccgtaaccgacgtctgatgcatcagtttcgacaattttgaatgcctgtggaatgggaagatacaaacattttatggattggactttgactttgatttctttaactgtttgggtatggaggtcagaccaaggaggcggatttttctttagcctatcatgtaatggtttgacaatattgtttaagtaggggacaaattctcctacgtaatttagacaacctagaaatctttgtaactgggttttgtctaagatttggttggggaatttgctagcaaactctattgacctttcgattggaatgattgtaccttgataaatattgtgaccaaggaatcgaattcgagtttggaaaagattgatttttgatttggagactgccaaaccattttgtttgatgatatggatgaaggtttggagatgtttgaaatgttggtcaatgttttgggaaaagattaaaacatcatctatgtagacaatgacaaattttgaatagggattaaaaatatcattcataattttttgaaattctgaaggggcattcttcagtccgaatggcattacattccattcatattgcccgaaaggtacagtaaacactgttttgtacctatctgattcttggatttggatttgccaaaatccagatttcatatcaaattttgaaaatatctttgcagaatttaatctgttaagcaaatcttttttgtttggaataggatatctaatccattgtaatgcttgatttagtggtttgtaatttatgactaagcggggtattccacgctcaatctcagattgtttgttgacataaaaagctgcacaagaccaagggctcttgctttttcggattaggcctttatcaagcaaatccttgatttctttttgacagtattaaagaagttcttcattcatttggattggtctggcttttgtgggaatttgtttttccctaaagtctttctcattgggtagat

SEQ ID NO: 15148 - DNA, 1080 bp, Glycine max
  Gm_smallRNAprecursor_7981
gatgtttgaaatgttggtcaatgttttgggaaaagattaaaacatcatctatgtagacaatgacaaattttgaatagggattaaaaatatcattcataattttttgaaattctgaaggggcattcttcagtccgaatggcattacattccattcatattgcccgaaaggtacagtaaacactgttttgtacctatctgattcttggatttggatttgccaaaatccagatttcatatcaaattttgaaaatatctttgcagaatttaatctgttaagcaaatcttttttgtttggaataggatatctaatccattgtaatgcttgatttagtggtttgtaatttatgactaagcggggtattccacgctcaatctcagattgtttgttgacataaaaagctgcacaagaccaagggctcttgctttttcggattaggcctttatcaagcaaatccttgatttctttttgacagtattaaagaagttcttcattcatttggattggtctggcttttgtgggaatttgtttttccctaaagtctttctcattgggtagatcaacaatatgtttctttctatcccaaaatgcatgtggcaattcagaacagacggttgattcaatatgatttaataaagattgaattttttcttttacttggggttttcctagttgtatctgaatattattaaaagatacttcttcttttaagaagttaatatgattaatcttattttctataagatttatatttctggaaattggtttagtagaaaaattaaatataatctttcttcctaaataatttgtggttattccttcattagatatttggatgggaaacagggctctaatgaagggcgttcctaagattacttcattcttaaggttttttaccagaagaaagtttgtgttaatcctaagaccttggttttcaatgattgcatttgatagcttaaaattaatttttaattttgagccgtttgccgtacttaatttttttgaggttttctcaaagaattttgtagggattaatccttctaaaatgcagtttgaatcagcccctgtgtcaaatagggcca

SEQ ID NO: 15149 - DNA, 1076 bp, Glycine max
  Gm_smallRNAprecursor_7982
ccatctttcgggaagagttacctcatcccattttatttttctcgggagagaaacgttagcctttgtcatatcagtgataaacaaggttgtttctcctttttgaggttttaacaggactctagattcacaagtgttcatgaccttgtactagatcctatagattaaggctgttgggattgatccttctttcatgtcaaggccatgaaaatggatgtttaagaacagagagtcaagaatgtttctgtccatcagactaactgttttgtttggataacagttaaaatatattggaccttgtcctaggctggtttcgactattccaattagggagtcttcaaattgattatgcctaatgtctcttagacacattaaaactgctgcatctatgcccatatcaattaagggcttgatggctacttgtacacaaccgatgtgtagatatttatacttacggctatgttcataaattgaattttttgaaagtaaatgaaattcttcccctatatcttgtcctagaggaatattgttttctactgttttgattatgtaatcaaagttgtgtttgtcttttattgtttcaggaacgtatagttgatcctgagggatttctggaatgttctagtcatccatgttttgattgatatcttcgaatcggacttcctcatcgaagagattgtgttttggggcgacctcttgggtctggttatcttgatcatttaataaattggagtttcttgaagaagatgatgaggaggagtttgagcgaaaagagatacgagaaaaagatcgtaatagtctagacatgattataatattctctaatatctttgccctcatttggttccatagaaatatctccgtaagtaaatatgtcacaaaatttttctggatctgaattatttttaagaaaaactattttttttttttgaaaaacagtttgaacggcaatcctatagccaccagtgtattatgtcttgatattttggttaaacagtacaccttagccttaccgccctttatccaacacgggtcttactgctacagtactattcaactaaaatattagactgttgtac

SEQ ID NO: 15150 - DNA, 1159 bp, Glycine max
  Gm_smallRNAprecursor_7983
ccatctttcgggaagagttacctcatcccattttatttttctcgggagagaaacgttagcctttgtcatatcagtgataaacaaggttgtttctcctttttgaggttttaacaggactctagattcacaagtgttcatgaccttgtactagatcctatagattaaggctgttgggattgatccttctttcatgtcaaggccatgaaaatggatgtttaagaacagagagtcaagaatgtttctgtccatcagactaactgttttgtttggataacagttaaaatatattggaccttgtcctaggctggtttcgactattccaattagggagtcttcaaattgattatgcctaatgtctcttagacacattaaaactgctgcatctatgcccatatcaattaagggcttgatggctacttgtacacaaccgatgtgtagatatttatacttacggctatgttcataaattgaattttttgaaagtaaatgaaattcttcccctatatcttgtcctagaggaatattgttttctactgttttgattatgtaatcaaagttgtgtttgtcttttattgtttcaggaacgtatagttgatcctgagggatttctggaatgttctagtcatccatgttttgattgatatcttcgaatcggacttcctcatcgaagagattgtgttttggggcgacctcttgggtctggttatcttgatcatttaataaattggagtttcttgaagaagatgatgaggaggagtttgagcgaaaagagatacgagaaaaagatcgtaatagtctagacatgattataatattctctaatatctttgccctcatttggttccatagaaatatctccgtaagtaaatatgtcacaaaatttttctggatctgaattatttttaagaaaaactattttttttttttgaaaaacagtttgaacggcaatcctatagccaccagtgtattatgtcttgatattttggttaaacagtacaccttagccttaccgccctttatccaacacgggtcttactgctacagtactattcaactaaaatattagactgttgtacttccaggaagtactgttcaaacacttactgtacaaatcaaagtaaaatattacgtgtactatacaaaactttagttccagatc

SEQ ID NO: 15151 - DNA, 1105 bp, Glycine max
  Gm_smallRNAprecursor_7984
ctgttttgtttggataacagttaaaatatattggaccttgtcctaggctggtttcgactattccaattagggagtcttcaaattgattatgcctaatgtctcttagacacattaaaactgctgcatctatgcccatatcaattaagggcttgatggctacttgtacacaaccgatgtgtagatatttatacttacggctatgttcataaattgaattttttgaaagtaaatgaaattcttcccctatatcttgtcctagaggaatattgttttctactgttttgattatgtaatcaaagttgtgtttgtcttttattgtttcaggaacgtatagttgatcctgagggatttctggaatgttctagtcatccatgttttgattgatatcttcgaatcggacttcctcatcgaagagattgtgttttggggcgacctcttgggtctggttatcttgatcatttaataaattggagtttcttgaagaagatgatgaggaggagtttgagcgaaaagagatacgagaaaaagatcgtaatagtctagacatgattataatattctctaatatctttgccctcatttggttccatagaaatatctccgtaagtaaatatgtcacaaaatttttctggatctgaattatttttaagaaaaactattttttttttttgaaaaacagtttgaacggcaatcctatagccaccagtgtattatgtcttgatattttggttaaacagtacaccttagccttaccgccctttatccaacacgggtcttactgctacagtactattcaactaaaatattagactgttgtacttccaggaagtactgttcaaacacttactgtacaaatcaaagtaaaatattacgtgtactatacaaaactttagttccagatccataaattttgttaacatatgtccttacggacagtattcctacttccctattgaaaaacctttattcaaacttttcttcgttagtgagataattatcccaccaccctttcagatagtctcagaatcaggtttttagagagagaagctctgcctagggaaaaactctttgtaagcttttctttcggtttcaataaatttcaagt

SEQ ID NO: 15152 - DNA, 1166 bp, Glycine max
  Gm_smallRNAprecursor_7985
ttttactgtttttttttcttatatgtaaatataaataatataaggctatgccatagggacatggtcatttttacccctaacaatcttagaagtaaatatagaccatgtttttacagaatacccttataccatttatatttacatactagcaaaaacaaacagtaaaatcttaaggacaaatagttaagaaacttgttcactagctgcaaatatccttccctcctcaagtgcaaacttcttgtgtagccgctcttggtgctcagaaaatcccacaaacaaatcccccttattactagctattttgaattctttagttcctgaatatacaaccttcaaattgttgctcgttcccctctttgagaatgaggaagatcttcataggacttcatccagttgatgtttgtcggcagtttcatcatccaccacccttttcttctgtgccttctcacgttcattgttgttaaacccatatttatgctttcttcccttcatgtcttgtttgatcacaactttagctgaatctcccatcttcaacatagttgaatctcctgtcttgttgtccaatgccacattttgatggcttgcatctcttttgttcgtatgttctactgcttcagcttcacaatgcatagagcaataagaattttccagtcatcaccaaaggcttctgcatcagcgttgacactctccaccctctttggtttatgcttatgtgttttcttccatgcttcctccttataattctcagatttattggaggtcccactagaaggatcagcaccaattcgtgcctgttcctcctctaccagctcaatatctttcatttcacctttgcttttgaaaactacactgtaatttacaaaacaaaagttgaaaggaaagatattgacctgatagacgaggaagaagcacagattggtggtgatcgttctagtgaaacctcgaataaagctgagatttataacgaggaggcacggaagaaaacacaaaagcataaaccaaagagggtggagagtgtcaatgctgatgcagaagcctttggtgatcactcgaaaattctgattgctttatgcattctaaagctgaagcactagaacatacaaagaaaagagatacaggccatcaaagtgtggcattggacaatgagacaggagtttcaactatgc

SEQ ID NO: 15153 - DNA, 1080 bp, Glycine max
  Gm_smallRNAprecursor_7986
ggtgtttgaaatgttgatcaatatcttgggagaagattaaaacatcatcaatgtaaacaatgacgaattttgaataaggattgaaaatatcattcatgattttttggaattctgaaggggcattcttcagtccgaatggcattacattccattcatattgcccgaatggtacagtaaacgccgttttgtacctatacgattcttggatttggatttgccagaatccggatttcatgtcaaattttgaaaatacttttgcagaatttaatctgttaagtaggactttcttatttggaataggatacctgatccattgtaatgcttgatttatcggtttgtaatttatgactaagcggggtgttcctcgctgaatctcggactgtttgttgacgtaaaaagccgcacaagaccatgaacttttacttttccgaattaaacctttattaagtaaatctttaatttccttttggcaatattgaaggagttcttcattcatttggattggtctggcttttgtgggaatttgtttttccctaaaatctttatcataaggaagatcaacaatatgtttctttctgtcccaaaatgcatgtggcaattcggaacaaacagttattctatatgacttaataaagattggattttttcctttatttggggttttcctagttgtacttggatattattaaacgatacttcttcttttaagaagttaatttgattaatcttattttctataagatttatatttctggaaattggtttagtagaaaaattaaatataattttccttcctaaataacttgtagttattccttcattagatatttggatgggaaataaagctcttatgaagggcgttcctaggattacttcgttcttgaggtttttttaccagaagaaagtttgtgttaatcctaagaccttggttttcaataattgcatttgataacttaaaattaatttttaattttgagtcgtttgctgtactaagtttctctgaggttttctcaaagaattttgtaggaattaatccttctaaaatacagtttgagtcagcccctatgtcaaatagggcca

SEQ ID NO: 15154 - DNA, 1105 bp, Glycine max
  Gm_smallRNAprecursor_7987
tcaagaatgtttctgtcgattagactcactattttgtttggataacaattaaaatatattggaccctgtcctaggctggtgtcgactgttccaattaaggagtcttcaaatttattatgcctaatatctcttagacacattaacattgctgcatctatgcccatgtctattaagggcttgatggctacttgtacacagccgatgtgtaaatatttatactttcgactatgttcataaattgaattttttgaaagtaaatggaattcttcccgtatgtcttgccctagaggaatattgttttctactgttttgattatataatcaaagttgtgtttatctttcattgtttcaggaacgtatagttgatcctgagggatttctgggatgttctagtcatccatgttttgattgatatcttcgaatcggacttcctcatcgaagagattgtgtttaggggcgacctcttgggtctggttatcttgatcacttaataagtttgaatttctggaagaagttgatgaagaggaattagaccgaaaggaaatacgtaaaaaagaacgcaggagtctagacatgattataaaatcctctaatatcttcgccctcatttggttccatagaaatatttccgtaagtaaatacgtaacaaaattttctggatctgaattatttttaagaaaaaactcttttttttgtggaaaatagattgaacggcaatcctatagccaccagtatattatgtcttgatattttggttaaacagtacaccttagccttactgccctttatccaccacaagtcttactgctatagtaccattcaactaaaatattagactgctgtacttccaggaagtactgttcaagcatgtactgtacaaattaaaataaaatattactcatactatacaaggtttcagatccataaaatttgttaacatacgtccttacggacactattcctacttccccatcaggctctgataccagagatcagcggaaaggatacaaacggacagataggaattaagagatcagcaataatgaatgcagaaaatatatatatatatatatatatatatatatatatatatatatatatatat

SEQ ID NO: 15155 - DNA, 1116 bp, Glycine max
  Gm_smallRNAprecursor_7988
ttcataacctccacgagacaatacgtggggggcagtgttttgcttttcggaggcttgtgcctttttccgcacatcctgcaaaagtttaacattaatgaaaatgattattacaataaattatacaaagtgattttgttgtggaaaacaactaaaatgacaaagtacatacctcccatgagtggtctttgcgggtctaacaaaactgggtccatttctccttgctaatgccatatttttcacagacaatgtcgtccgcaccgtccttgtcggctccaagtgcccattttctagtcaagtcagatttaaactacctccagcgctcgccgacaatctgaataattttcttctttgtcctactgtcagaagcttcagggatttcaaattccgcctgacaaacaataaattaggttttattgtaagtaaataacaaatttagactattaaagaaaatcaatgaagaaaactcaaatacctgaatatcctcccatatcaaatccttctgagcagtagggacttccttccaggtgtcatatgtcacgtcaaccttatcacgagcgacaatccccaaatatgttcttaatttcttcttgtggggaccgtcggccttaccagtagcaggatcgacgttgaccacaggtctttctgccccaggtggtctagtggccaatgatcgtagccgtgtcaccttgcgtgtccgcttcaacgtagatggagacgctgatgcgtctgcaggaggaggaggaagaggaggaggaggcgaggcaggtggagtagccatggtcctttaaagagaaaaagttgagttagttaatattatcaaaaaacactatatgagttatgtaaatgaatgtaccgaaatgaaatattatattagaaaattacgttagctctatcccgaacatagctctatcctcttctagaaccatctttaaaattttgagtatatttttttttactaatctctttttaaattaatctttgaaaatctgaacatacttctcattctaatagatctatcccgaacactcgcgtaaactccaacaacaacatcttaacactcacattccatggaagagaatcaaagtttacaagaaaactaaaacatccaaaaaaagc

SEQ ID NO: 15156 - DNA, 1047 bp, Glycine max
  Gm_smallRNAprecursor_7989
aacttgtatccacatccttggagatacttcttttagttgaaagcttctaggcatttttagagaatcaacttttgatctttgaggatcagttcagagtctcagaatgtaacttgaataaaaaagttcattgtaaacagttgaaccatttgttgctagagaacttgattatctttgattcactggattcactcgggcagagttggctttaacaatttacaaagtcttcaagccattattgacaatgaaattaatatccggtacatgatcaagtctctcaacattttatctgtacaaatattggcttcacgtgaagatgatccgattcgaagatatcaatcaaaacttggatgactggaacattccagaaatccctcaggatcaactatacgttcctgaaacaataaaagacaaacacaactttgattacataatcaaaacagtagaaaacaatattcctctaggacaagatgtaggggaagaatttcatttactttcaaaaaattcaatttatgaacatagccgtaagtataaatatctacacatcggttgtgtacaagtagccatcaagcccttaattgatatgggcatagatgcagcagttttaatgtgtctaagagacattaggcataatcaatttgaagactccctaattggaacagtcgaaaccagcctaggacaaggtccaatatattttaactgttatccaaacaaaacagtgagtctgatggacagaaacattcttgactctctgttcctaaacatccactttcatggccttgacatgaaagaaggatcaatcccagcagccttaatatataggatccagtacaaggtcatgaatacttgtgcatctagagtcctgttaaaacctcaaaaaggagaaacaactttgtttatcactgatatgacgaaggctaatgtttctctcccgagaaaaataaaatgggatgaagtaactcttcccgaaagatgggttatggataaggcaacaccgtctattccccgacccgctccaaccatagagcatattaagcaagataactccgg

SEQ ID NO: 15157 - DNA, 1126 bp, Glycine max
  Gm_smallRNAprecursor_7990
aggattaacacaaattttcttctggtaaaaaaccttaagaatgaagtaatcttaggaacacccttcattagagccctgtttcccatccaaatatctaatgaaggaataaccacaaattatttaggaagaaagattatatttaatttttctactaaaccaatttccagaaatataaattttatagaaaataagactaatcaaattaacttcttaaaagaagaagtatcttttaataatattcagatacaactaggaaaacctcaagtaaaagaaaaaattcaatctttattaaatcatattgaatcaactgtctgctctaaattgccacatgcattttgggacagaaagaaacatattgttgatctcccctacgagaaggactttagggaaaaacaaattcccacaaaagccaaaccaatccaaatgaatgaagaactttttcaatactgtcaaaaggaaatcaaggatttgcttgataaaggcctaatccggaaaagcaaaagcccatggtcttgtgcggctttttatgtcaacaaacaatctgagattgagcgtggaacaccccgcttagtcataaattacaaaccactaaatcaagcattacaatggattagatatcctattccaaacaaaaaagatttgcttaacaaattaaattctgcaaagatattttcaaaatttgatatgaaatctggattttggcaaatccaaatccaagaatcagataggtacaaaacagcattcactgtacctttcgggcaatatgaatggaatgtaatgccattcggactgaagaatgccccttcagaatttcaaaaaattatgaatgatattttcaatccctattcaaaatttgttattgtctacatagatgatgttttaatcttttcccaaaacattgaccagcatttcaaacatctccaaaccttcatccatatcatcaaacaaaatggtttggcagtctccaaatcaaaaatcaatcttttccaaacacgaattcgattccttggtcacaatatttatcaaggaacaatcgttccaatcgaaaggtcaattgagttttctagcaaattccccaaccaaatcttagacaaaacccagttacaaagatttctaggttgtctaa

SEQ ID NO: 15158 - DNA, 1231 bp, Glycine max
  Gm_smallRNAprecursor_7991
taaatacccattccacaatccaaatcttgaaggtgatgcagccacggcattatggctcaaacttaaaccaacccaaaaaattctctgcaccatttgaccctgcaggatataattattgggattacattgacgcctggaccaatgtgttctggcatcaaaatagtaaattcaagcattcatggctgatttacttcaaaaataatactgcatataattttccaaattggttcctccaatggtggaactacttcggaccaattccacaaatatttccagaagaagtccaacagggattcgaacaattcaacaagctctataatagcaaggaatcacgtattccggcagacttaaagtacttttccagttttgccttgtcatggatcttttcatggcaatacagatacggaaaaactgaaaacaacaagcaatatccaccgttacaaagacacgcctttgtaaaatggtggtcacaattcgatacttcaaaggctgctccagatcaagtcaagaactggttccagagcaatcctgagttccttaaacctgctgatccggagacatctttgtttctaaatcaaaagtcgcaactagcagcattcttagcaagctcaaaatctaaagagagtcttgctcagaatctcaaagaagttctccaactacttcaacaggaagtggaagaagaaccttccaagaaggaagctgaatcatccgagactaatgatgaccaagaagatgatccattctaccagaatgaagatgactgttttggtatatcattggacgacgattaattagttgtagtaatcatgaattattgtgactaatttaaataatgtaatttgtaaaagttttgtaacagttccggtaaacattaccgttactgtagaaacaataaaaattgggtctatttaaaggagtcctcgtcccctttgtgaggcaccctttcagatagtcccagaatcaggtttttagagagagaagctctgcctagggaaaaactctttgtaagcttttctttcagttttaataaatctcaagttctatttttcatatctcccttctcccctcactgatcctgtgcggctctgccgccgcttcggtttctttgttttcaaaaacctgggtttgtaagccgtttcggtgtgcccttgatatctgctttacaattttataattcttattttttattatcatactgcattcttacttcctatctgtccgtttgatctta

SEQ ID NO: 15159 - DNA, 1124 bp, Glycine max
  Gm_smallRNAprecursor_7992
attccacaatccaaatcttgaaggtgatgcagccacggcattatggctcaaacttaaaccaacccaaaaaattctctgcaccatttgaccctgcaggatataattattgggattacattgacgcctggaccaatgtgttctggcatcaaaatagtaaattcaagcattcatggctgatttacttcaaaaataatactgcatataattttccaaattggttcctccaatggtggaactacttcggaccaattccacaaatatttccagaagaagtccaacagggattcgaacaattcaacaagctctataatagcaaggaatcacgtattccggcagacttaaagtacttttccagttttgccttgtcatggatcttttcatggcaatacagatacggaaaaactgaaaacaacaagcaatatccaccgttacaaagacacgcctttgtaaaatggtggtcacaattcgatacttcaaaggctgctccagatcaagtcaagaactggttccagagcaatcctgagttccttaaacctgctgatccggagacatctttgtttctaaatcaaaagtcgcaactagcagcattcttagcaagctcaaaatctaaagagagtcttgctcagaatctcaaagaagttctccaactacttcaacaggaagtggaagaagaaccttccaagaaggaagctgaatcatccgagactaatgatgaccaagaagatgatccattctaccagaatgaagatgactgttttggtatatcattggacgacgattaattagttgtagtaatcatgaattattgtgactaatttaaataatgtaatttgtaaaagttttgtaacagttccggtaaacattaccgttactgtagaaacaataaaaattgggtctatttaaaggagtcctcgtcccctttgtgaggcaccctttcagatagtcccagaatcaggtttttagagagagaagctctgcctagggaaaaactctttgtaagcttttctttcagttttaataaatctcaagttctatttttcatatctcccttctcccctcactgatcctgtgcggctctgccgccgcttcggtttctttgttttcaaaaacctgggtttgtaagc

SEQ ID NO: 15160 - DNA, 1123 bp, Glycine max
  Gm_smallRNAprecursor_7993
ttccacaatccaaatcttgaaggtgatgcagccacggcattatggctcaaacttaaaccaacccaaaaaattctctgcaccatttgaccctgcaggatataattattgggattacattgacgcctggaccaatgtgttctggcatcaaaatagtaaattcaagcattcatggctgatttacttcaaaaataatactgcatataattttccaaattggttcctccaatggtggaactacttcggaccaattccacaaatatttccagaagaagtccaacagggattcgaacaattcaacaagctctataatagcaaggaatcacgtattccggcagacttaaagtacttttccagttttgccttgtcatggatcttttcatggcaatacagatacggaaaaactgaaaacaacaagcaatatccaccgttacaaagacacgcctttgtaaaatggtggtcacaattcgatacttcaaaggctgctccagatcaagtcaagaactggttccagagcaatcctgagttccttaaacctgctgatccggagacatctttgtttctaaatcaaaagtcgcaactagcagcattcttagcaagctcaaaatctaaagagagtcttgctcagaatctcaaagaagttctccaactacttcaacaggaagtggaagaagaaccttccaagaaggaagctgaatcatccgagactaatgatgaccaagaagatgatccattctaccagaatgaagatgactgttttggtatatcattggacgacgattaattagttgtagtaatcatgaattattgtgactaatttaaataatgtaatttgtaaaagttttgtaacagttccggtaaacattaccgttactgtagaaacaataaaaattgggtctatttaaaggagtcctcgtcccctttgtgaggcaccctttcagatagtcccagaatcaggtttttagagagagaagctctgcctagggaaaaactctttgtaagcttttctttcagttttaataaatctcaagttctatttttcatatctcccttctcccctcactgatcctgtgcggctctgccgccgcttcggtttctttgttttcaaaaacctgggtttgtaagc

SEQ ID NO: 15161 - DNA, 1047 bp, Glycine max
  Gm_smallRNAprecursor_7994
aacttgtatccacatccttggagatacttcttttagttgaaagcttctaggcatttttagagaatcaacttttgatctttgaggatcagttcagagtctcagaatgtaacttgaataaaaaagttcattgtaaacagttgaaccatttgttgctagagaacttgattatctttgattcactggattcactcgggcagagttggctttaacaatttacaaagtcttcaagccattattgacaatgaaattaatatccggtacatgatcaagtctctcaacattttatctgtacaaatattggcttcacgtgaagatgatccgattcgaagatatcaatcaaaacatggatgactggaacattccagaaatccctcaggatcaactatacgttcctgaaacaataaaagacaaacacaactttgattacataatcaaaacagtagaaaacaatattcctctaggacaagatgtaggggaagaatttcatttactttcaaaaaattcaatttatgaacatagccgtaagtataaatatctacacatcggttgtgtacaagtagccatcaagcccttaattgatatgggcatagatgcagcagttttaatgtgtctaagagacattaggcataatcaatttgaagactccctaattggaacagtcgaaaccagcctaggacaaggtccaatatattttaactgttatccaaacaaaacagtgagtctgatggacagaaacattcttgactctctgttcctaaacatccactttcatggccttgacatgaaagaaggatcaatcccagcagccttaatatataggatccagtacaaggtcatgaatacttgtgcatctagagtcctgttaaaacctcaaaaaggagaaacaactttgtttatcactgatatgacgaaggctaatgtttctctcccgagaaaaataaaatgggatgaagtaactcttcccgaaagatgggttatggataaggcaacaccgtctattccccgacccgctccaaccatagagcatattaagcaagataactccgg

SEQ ID NO: 15162 - DNA, 1126 bp, Glycine max
  Gm_smallRNAprecursor_7995
aggattaacacaaattttcttctggtaaaaaaccttaagaatgaagtaatcttaggaacacccttcattagagccctgtttcccatccaaatatctaatgaaggaataaccacaaattatttaggaagaaagattatatttaatttttctactaaaccaatttccagaaatataaattttatagaaaataagactaatcaaattaacttcttaaaagaagaagtatcttttaataatattcagatacaactaggaaaacctcaagtaaaagaaaaaattcaatctttattaaatcatattgaatcaactgtctgctctaaattgccacatgcattttgggacagaaagaaacatattgttgatctcccctacgagaaggactttagggaaaaacaaattcccacaaaagccaaaccaatccaaatgaatgaagaactttttcaatactgtcaaaaggaaatcaaggatttgcttgataaaggcctaatccggaaaagcaaaagcccatggtcttgtgcggctttttatgtcaacaaacaatctgagattgagcgtggaacaccccgcttagtcataaattacaaaccactaaatcaagcattacaatggattagatatcctattccaaacaaaaaagatttgcttaacagattaaattctgcaaagatattttcaaaatttgatatgaaatctggattttggcaaatccaaatccaagaatcagataggtacaaaacaacattcactgtacctttcgggcaatatgaatggaatgtaatgccattcggactgaagaatgccccttcagaatttcaaaaaattatgaatgatattttcaatccctattcaaaatttgttattgtctacatagatgatgttttaatcttttcccaaaacattgaccagcatttcaaacatctccaaaccttcatccatatcatcaaacaaaatggtttggcagtctccaaatcaaaaatcaatcttttccaaacacgaattcgattccttggtcacaatatttatcaaggaacaatcgttccaatcgaaaggtcaattgagttttctagcaaattccccaaccaaatcttagacaaaacccagttacaaagatttctaggttgtctaa

SEQ ID NO: 15163 - DNA, 1231 bp, Glycine max
  Gm_smallRNAprecursor_7996
taaatacccattccacaatccaaatcttgaaggtgatgcagccacggcattatggctcaaacttaaaccaacccaaaaaattctctgcaccatttgaccctgcaggatataattattgggattacattgacgcctggaccaatgtgttctggcatcaaaatagtaaattcaagcattcatggctgatttacttcaaaaataatactgcatataattttccaaattggttcctccaatggtggaactacttcggaccaattccacaaatatttccagaagaagtccaacagggattcgaacaattcaacaagctctataatagcaaggaatcacgtattccggcagacttaaagtacttttccagttttgccttgtcatggatcttttcatggcaatacagatacgaaaaaactgaaaacaacaagcaatatccaccgttacagagacacgcctttgtaaaatggtggtcacaattcgatacttcaaaggctgctccagatcaagtcaagaactggttccagagcaatcctgagttccttaaacctgctgatccggagacatctttgtttctaaatcaaaagtcgcaactagcagcattcttagcaagctcaaaatctaaagagagtcttgctcagaatctcaaagaagttctccaactacttcaacaggaagtggaagaagaaccttccaagaaggaagctgaatcatccgagactaatgatgaccaagaagatgatccattctaccagaatgaagatgactgttttggtatatcattggacgacgattaattagttgtagtaatcatgaattattgtgactaatttaaataatgtaatttgtaaaagttttgtaacagttccggtaaacattaccgttactgtagaaacaataaaaattgggtctttttaaaggagtcctcgtcccctttgtgaggcaccctttcagatagtcccagaatcaggtttttagagagagaagctctgcctagggaaaaactctttgtaagcttttctttcagttttaataaatctcaagttctatttttcatatctcccttctcccctcactgatcctgtgcggctctgccgccgcttcggtttctttgttttcaaaaacctgggtttgtaagccgtttcggtgtgcccttgatatctgctttacaattttataattcttatttttttattatcatactgcattcttacttcctatctgtccgtttgatctt

SEQ ID NO: 15164 - DNA, 1124 bp, Glycine max
  Gm_smallRNAprecursor_7997
attccacaatccaaatcttgaaggtgatgcagccacggcattatggctcaaacttaaaccaacccaaaaaattctctgcaccatttgaccctgcaggatataattattgggattacattgacgcctggaccaatgtgttctggcatcaaaatagtaaattcaagcattcatggctgatttacttcaaaaataatactgcatataattttccaaattggttcctccaatggtggaactacttcggaccaattccacaaatatttccagaagaagtccaacagggattcgaacaattcaacaagctctataatagcaaggaatcacgtattccggcagacttaaagtacttttccagttttgccttgtcatggatcttttcatggcaatacagatacgaaaaaactgaaaacaacaagcaatatccaccgttacagagacacgcctttgtaaaatggtggtcacaattcgatacttcaaaggctgctccagatcaagtcaagaactggttccagagcaatcctgagttccttaaacctgctgatccggagacatctttgtttctaaatcaaaagtcgcaactagcagcattcttagcaagctcaaaatctaaagagagtcttgctcagaatctcaaagaagttctccaactacttcaacaggaagtggaagaagaaccttccaagaaggaagctgaatcatccgagactaatgatgaccaagaagatgatccattctaccagaatgaagatgactgttttggtatatcattggacgacgattaattagttgtagtaatcatgaattattgtgactaatttaaataatgtaatttgtaaaagttttgtaacagttccggtaaacattaccgttactgtagaaacaataaaaattgggtctttttaaaggagtcctcgtcccctttgtgaggcaccctttcagatagtcccagaatcaggtttttagagagagaagctctgcctagggaaaaactctttgtaagcttttctttcagttttaataaatctcaagttctatttttcatatctcccttctcccctcactgatcctgtgcggctctgccgccgcttcggtttctttgttttcaaaaacctgggtttgtaagc

SEQ ID NO: 15165 - DNA, 1123 bp, Glycine max
  Gm_smallRNAprecursor_7998
ttccacaatccaaatcttgaaggtgatgcagccacggcattatggctcaaacttaaaccaacccaaaaaattctctgcaccatttgaccctgcaggatataattattgggattacattgacgcctggaccaatgtgttctggcatcaaaatagtaaattcaagcattcatggctgatttacttcaaaaataatactgcatataattttccaaattggttcctccaatggtggaactacttcggaccaattccacaaatatttccagaagaagtccaacagggattcgaacaattcaacaagctctataatagcaaggaatcacgtattccggcagacttaaagtacttttccagttttgccttgtcatggatcttttcatggcaatacagatacgaaaaaactgaaaacaacaagcaatatccaccgttacagagacacgcctttgtaaaatggtggtcacaattcgatacttcaaaggctgctccagatcaagtcaagaactggttccagagcaatcctgagttccttaaacctgctgatccggagacatctttgtttctaaatcaaaagtcgcaactagcagcattcttagcaagctcaaaatctaaagagagtcttgctcagaatctcaaagaagttctccaactacttcaacaggaagtggaagaagaaccttccaagaaggaagctgaatcatccgagactaatgatgaccaagaagatgatccattctaccagaatgaagatgactgttttggtatatcattggacgacgattaattagttgtagtaatcatgaattattgtgactaatttaaataatgtaatttgtaaaagttttgtaacagttccggtaaacattaccgttactgtagaaacaataaaaattgggtctttttaaaggagtcctcgtcccctttgtgaggcaccctttcagatagtcccagaatcaggtttttagagagagaagctctgcctagggaaaaactctttgtaagcttttctttcagttttaataaatctcaagttctatttttcatatctcccttctcccctcactgatcctgtgcggctctgccgccgcttcggtttctttgttttcaaaaacctgggtttgtaagc

SEQ ID NO: 15166 - DNA, 1190 bp, Glycine max
  Gm_smallRNAprecursor_7999
ttcagttgtagagattgaaaaaaatattgttgacctacatctatgaatggttgtcggtagtagatttcatccagtaattgatcgttggttagttgaagggtgttgtgcattctacgcttgagtgtatcaaaagaacaattgttaggaactcacattggtgttgggtgagactttgaaaataaacaccagtttggttgtgagtgattgatcaatttggaaaaatgaaagctaatatggagttagcaatggtctaactggttgtttctcccaaaaatgacatagtaataagattgaatttggtttgtgaaattatgttatgtgagattgtgtgtttgtattgtgtgtgttgtgttatttatagttgtatgagtattctgccaccttgatgtgtattggaatccaatgtttcttttttcctagttagtgatgtaacaaacgcccattataatttcagagtgaacaaagagattatgagttgtccatctcatgtcagttttgcacacgtctctaaaaattaaatgtctcacctgcaaaactgacatgaaatggacaactcataatgcagagtgttgtcaatttggattgtgatttttcccatgtaattaaagcagcagacgttcatgatgattttcagagtgaacaaagagattatgagctgtccatttcatgtcagttttgcaggtgagacatttaatttttagagacgtgtgcaaattgcagagtgttgtcaatttggactgtgatttttcccttgtaattaaagcaacaaacgcccatgattattttcagagtgaacaaagagattttgagttgtccatttcatgtcagttttgtcgatgagacatttaatttttagaaataatgtagtgtaaatggcaaagtattatgaattttgatagttatgttaccatgtcaactactgcagtaaaagtgggtaaactgaaaattgctaatttaaatttaaaggaaaaattatttcaatacataaagtgataactgaagacggacataagacattacatggaaatctcaaagaagaaataacttagacatgaataatccgtagattaccaatcttgtttgaatataggttcgtgggatggaaataggttacttccttcgagcccggaagaggagtcagtatcactatcatggtttttgacccaacaagtctcgtattcatttgataa

SEQ ID NO: 15167 - DNA, 1062 bp, Glycine max
  Gm_smallRNAprecursor_8000
aggttccttctcagaggataatagcagagtcaccaacatgggggtgctctgatactcaccaacatggatggcaaggagctaccctcgcccgtgaactccgatgtcgttaagcgatattacgcttgaagtctggggcaattgagaggaccgtcgcatgttcttttatttctgagtatttttgttcttcttggtttcctccagggattcccattcactgtaattgtcttgtttctttaaagaaagagaagatgggtgaggcttcagtcctcactttagttttaaaccttgtgttagtttgtattaacctaagccctctccttcactaagaaaatcatcgcattagaaacattcatgcatgcacatacacatgcatatcttgtggtaacaggggcagaatcgtcttaggccacggtcagaagtcgagacaagttgacggcagaaatcaaccaaggtaagacgatgacccggtcacgattagccgcacattatttgtttattacttgcaggtacttagggacggatgcaaatgaaggatagggtcacgaccaaccgatcgtcgtcccttcccggcgctggacaagcaaagaacgtcgctgcaaggcagcccaatatcctttgaattcacaatatttattactatagtttgttttaaataaagtaatcgatgcctgattctaacttaagtaggtccgagtaggcaaacgctaacccgtaaggagggggggaggcatggttaatgtttcccctaaaaaaaaaatggcaggttagcacgcctgggtgagcaacccctgcaccagattataaaaaatgagggagggggacgtttttgcacacaaaaactcccccccccccccattcaaaagagagaactcacgaggcttgcggtttttgctcccctaagccacttttggttgcattttgctttcatttttggtgctcctactcactccggcaagtaagtattcaatccttgagttttttagctttccattggtgtattttcttcatcttttggtgctttgaattggagaatgtgctcaaacttggggggcagttttggtt

SEQ ID NO: 15168 - DNA, 1062 bp, Glycine max
  Gm_smallRNAprecursor_8001
aggttccttctcagaggataatagcagagtcaccaacatgggggtgctctgatactcaccaacatggatggcaaggagctaccctcgcccgtgaactccgatgtcgttaagcgatattacgcttgaagtctggggcaattgagaggaccgtcgcatgttcttttatttctgagtatttttgttcttcttggtttcctccagggattcccattcactgtaattgtcttgtttctttaaagaaagagaagatgggtgaggcttcagtcctcactttagttttaaaccttgtgttagtttgtattaacctaagccctctccttcactaagaaaatcatcgcattagaaacattcatgcatgcacatacacatgcatatcttgtggtaacaggggcagaatcgtcttaggccacggtcagaagtcgagacaagttgacggcagaaatcaaccaaggtaagacgatgacccggtcacgattggccgcacattatttgtttattacttgcaggtacttagggacggatgcaaatgaaggatagggtcacgaccaaccgatcgtcgtcccttcccggcgctggacaagcaaagaacgtcgctgcaaggcagcccaatatcctttgaattcacaatatttattactatagtttgttttaaataaagtaatcgacgcctaattctaacttaagtaggtccgagtaggcaaacgctaacccgtaaggagggggggaggcatggttaatgtttcccctaaaaaaaaatggcaggttagcacgcctgggcgtgcaacccctgcaccagattataaaaaatgagggagggggacgtttttgcacacaaaaacttccccccccccattcaaaagagagaactcacgaggcttgcggtttttgctcccctaagccacttttggttgcattttgctttcatttttggtgctcctactcactccggcaagtaagtattcaatccttgaggtttttagctttccattggtgtattttcttcatcttttggtgctttgaattggagaatgtgctcaaacttggggggcagttttggtttgt

SEQ ID NO: 15169 - DNA, 1134 bp, Glycine max
  Gm_smallRNAprecursor_8002
ttgcagggggtaggttccagccctagcatgctgctgcatttttgaacgttgctttttgaacgttaggtgttgttgaacgttcaacatttttgcctataaaaaaagcttcttcataacaacttgaacttacatttgaaactcatagcttctcctccctgaaattgctgagcttctctcctcgtgcagtgctatcccttgttttcttcttcaaatttcgtgtgctctttcttctccataattactggtaagtaatttttaattaaataatatttatgtattttgttcaatattataaaaagattaagttagttagtattaataggtattttaagattaggttagttaattttaatatgtattctattgttaatttttatgtattaataggtattcgaaggttaggttaattaacatgaaaatattatttggttagttagtatgaaaacattatttgattattgtatatattctgagatattatatgtgttgtatatgtatgatattttagttagacatattagctttagttaggcacatgtaatattagttttaggtatatatatttaaaatttaggcacacgtaaattttgagcttttgtaataatattaggctaaacaattttgagttttaaataaatgagttgataagttatattatttgatttagttatttttagtttgaatttttttaatatatatatatatatatatatatatatatatatatatatatataatatatatatatatatggtagtttacgttagtatatggtaggttttatttttagtttgtaggttaatattttttgttttacgaaatttacgttattaaatatatattatgagatattatatgtgttatatatgtatgatattttagtaagacatatattagctttagttaggcacacgtaatattaacttttgtaatattagacacaagttaatattagctttaggtatatatatctaaaatttagacacacgtaaattttcagctttgttaatattaggctaaataatttttaagttttgtaataatattaggctaaataatttttggattttgtaataatatattatttgatttacttatttttagtttgaatttttttaatatatatatatatat

SEQ ID NO: 15170 - DNA, 1103 bp, Glycine max
  Gm_smallRNAprecursor_8003
tatattatgagatattatatgtgttatatatgtatgatattttagtaagacatatattagctttagttaggcacacgtaatattaacttttgtaatattagacacaagttaatattagctttaggtatatatatctaaaatttagacacacgtaaattttcagctttgttaatattaggctaaataatttttaagttttgtaataatattaggctaaataatttttggattttgtaataatatattatttgatttacttatttttagtttgaatttttttaatatatatatatatatttatgatagggtagtttaagttagtacatgataggttaatattgttataatttatttgttagtccatattgtattgaattatttatttgttaattgtagaatatattatgttaattatttaaattagtgtgtgcatgtatttgaatttatttgtataatatgtttaaatttttttatttgtagaatatttttaaattttattatttgtagaatatatttaaattttattatttgtataatatattttgttatgatttttgagattcatgtaaatatgtgatgatggattgtgacattatgatatgttaaaattgtggacatgaaatttggttgtgaataagtgtatggttaatacttaagatgatattacttgtgttgtgagttgtgaattatacaataacccgactagtgtttaacttgagaaaaatgtttatgcgcgatgtgttaaaaggaaagtgtagggttctaagttagtaacctgaggtgttaaattgtggcgcaatgcatgaggtgttaaaggaaagtgtagggttctaaattaagaacctgaggtgttaaattgtagcgcattgtgttaaatgtgtttgaaaataagtgtgaggtcatgggtattgtataattcatgagcagtgtctatgtacagaaattgttttaggagtttgacctaaaccacaaaggtgagaccctaacagattcttcagagtctaggccttgggggtaaatacactcggtttgagtgctcctttaagcctatgttgatcccatatggttggagcattttcgcgagtgaccttgactagtcatct

SEQ ID NO: 15171 - DNA, 1106 bp, Glycine max
  Gm_smallRNAprecursor_8004
ctattttactttttcgttgtttaaaatacaagcgacttggtacctcatttggtatcagagccgttatattagctctggatagacatcgcgatataattaataataacatttttgttaacaaactttcgataaaatcttttgagtacaaaatttgaaatacaaacttacaacacataatttgttgtttaacaaaaacacaaactttagaaaataaagttaacgacattttgaatattcttaaatctaaagaacaacaaattcgtttttccacaaaagaactcgataaacttacaacacagctttctaaacttgatttaggtaagacaacaagtcaaatctcaaccaaattcgttttggcaaagcctagaaaatgaggacaataccttttacgggaaccttacaaacagtttcaagacacaatcctgtcactgaatccataaaccaacatcctggaatcttggatagattctttagaagaacaaacttccgaaccagacaactggaacaaatagtagatatagaatccaatatagatattggatcaaattctaggatagactctcttaatcctagataattatacaatctaaacaagtttgcttctgatagaactagcttatacagatatagaaggattgatgattttcatctccctgacggaagacatgagattatcagattaatctcagaacaaatcagatgacaactccttaatacaaatagaagatatgtacacctagggttaattgccataggcgtcaggtctctaacaagatctttagtaggagctaaagcttttgtagtcctctttgatcaaaggtttagagataacaattcacaggccataatagggatgatagaaatagatctaaaccaaaaagtctccctaatttatattgcccctaattacacaatgaatcttagtgatttcatacaaaacataaacctagaatttgaaggacataatttacacttggatattaccttcattggtagaataagtgatcaaatatcccctagatacaggataaacactaatccattagtgatagccttatcatctgatggaatccaatttttgccacccgaaatctttgattcctcta

SEQ ID NO: 15172 - DNA, 1040 bp, Glycine max
  Gm_smallRNAprecursor_8005
agttgagaatgttggaatcaacaaagtgctcattgatggaggagcggctgtcaacttaatgcctcgatctatgctctacaagatcgggaaacatgacacagatctatctgcccacaacattgtgctttcgaattatgagggtaaaactggctattctttgggagccattcaagtagatgttgctataggcagtatagttcgaccaactcttttcctggtgatacagtctaaggctaattttaacttgctattaggaagggagtggattcatggagttggggctgtgccatctacccttcaccagaaactcattatctggagggaggatgggattgttgaaaatatagaggcagatcaaagcttctataagtcagaggtcgataatgtcactgcacaaacctttgacaaaaagttggctaacatagcaccttgtggtgacaaggaggctattgtcgaatcaagtgacaatgttatccactctgtcaaactccatccgacctatgggtttatatgggagagggaggaaattaatgctgttccctctgaagatggagtcattccaccaactgggtggaatatgtatgaagattaaaatgactgaggccactgcattggccagaattacggcttatatggccgagaatagactaaatacggcctttgaggctgagtctcaacaaaatatggcagttgaagccaagatcgaagatcatgagaaagaagaaacaaaggatcgaagactggattgcatatatgacgatgagccgctgggtttcgagaaaaatcccgtaagtgaggtgccaaagatgcaggctcaagatcctttggaggaaatcgacattggagatggctcgatgaaaaggccaacatatatcagtgccaatatcacctcaagtttaaaagaaaagctggtgcctcttcttagagagtttaaagactgctttgcttgggactaccacgaaatgcctgggttaagcagagaaatggtcgaaatgaagttacctattaaggaaggaaaaagaccagtaaaacaactacca

SEQ ID NO: 15173 - DNA, 1157 bp, Glycine max
  Gm_smallRNAprecursor_8006
aagaccagtaaaacaactaccaagaagattcgcaccagaaatcatgtccaagattaaggaggagatcgaaaggctgctgaggtgtaaattcatcagggctgccaggtatgtcgaatggttagcaaatatagtccctgtcattaaaaagaatggaactcttagagtatgcatagattttagggatttaaataatgctacacctaaagatgaatatgctatgccagtagcagaaatgttggtagattcggcagctggtttcgaatttttgagcatgttagatggttattctggttataaccaaatatttattgctgaaaatgatgtgtcgaaagcagcatttcgatgccctggtgctttaggcacttatgaatgggtggttatgccctttgggttgaaaaatgctggggccacttatcaaagggccatgaattccatgtttcatgattttattgacacatttatgcaaatttatattgatgatataatcgtcaaatcctcctcagaagatagccatttggattatcttaggcaatctttcgaacgaatgaggaaacatggattaaaaatgaatccattaaagtgtgctttttgtgtgcgtgcaggagatttcctgggatttgtggtgcataaaaagggcattgagataaatcaaaataagacaaaggctattcttgagacgaagcctccttcgaccaaaaaacagcttcagtctttgctaggaaaaatcaacttcttgaggcgattcatttcgaatctaagtggcaaagctcaaattttttcgccattacttcgactcaagaaagatgaaccattcaaatggaatgacgagcatcaaaaggctttcgatgaaattaaagaatatctgatcaagcctcctgtgttaatgcctcctagtcgaaacaagactatgaagttgtatattgctgcgtctgacaagaccattggtagcatgttggctcaggaagatgatgatggcatagaacatgcaatttattatcttagtcgtgtattaaatgatgcagaaactagatatacggccatagaaaaactttgtctttgtctgtatttctcttgtgcaaaacttaagcaatatataaagcctgttgatgtttatgtgtattctcattatgatattattaaacacatgttgtcaaaac

SEQ ID NO: 15174 - DNA, 1175 bp, Glycine max
  Gm_smallRNAprecursor_8007
aggagatcgaaaggctgctgaggtgtaaattcatcagggctgccaggtatgtcgaatggttagcaaatatagtccctgtcattaaaaagaatggaactcttagagtatgcatagattttagggatttaaataatgctacacctaaagatgaatatgctatgccagtagcagaaatgttggtagattcggcagctggtttcgaatttttgagcatgttagatggttattctggttataaccaaatatttattgctgaaaatgatgtgtcgaaagcagcatttcgatgccctggtgctttaggcacttatgaatgggtggttatgccctttgggttgaaaaatgctggggccacttatcaaagggccatgaattccatgtttcatgattttattgacacatttatgcaaatttatattgatgatataatcgtcaaatcctcctcagaagatagccatttggattatcttaggcaatctttcgaacgaatgaggaaacatggattaaaaatgaatccattaaagtgtgctttttgtgtgcgtgcaggagatttcctgggatttgtggtgcataaaaagggcattgagataaatcaaaataagacaaaggctattcttgagacgaagcctccttcgaccaaaaaacagcttcagtctttgctaggaaaaatcaacttcttgaggcgattcatttcgaatctaagtggcaaagctcaaattttttcgccattacttcgactcaagaaagatgaaccattcaaatggaatgacgagcatcaaaaggctttcgatgaaattaaagaatatctgatcaagcctcctgtgttaatgcctcctagtcgaaacaagactatgaagttgtatattgctgcgtctgacaagaccattggtagcatgttggctcaggaagatgatgatggcatagaacatgcaatttattatcttagtcgtgtattaaatgatgcagaaactagatatacggccatagaaaaactttgtctttgtctgtatttctcttgtgcaaaacttaagcaatatataaagcctgttgatgtttatgtgtattctcattatgatattattaaacacatgttgtcaaaacctattttacacagtagaattggaaaatgggctttagccttaacagaatattctttaacatacaagcctttgaaatct

SEQ ID NO: 15175 - DNA, 1122 bp, Glycine max
  Gm_smallRNAprecursor_8008
tattgtagatcactcactgatcgaaatgccgcaagactatgtcgatacagagccttggtttttgtatttcgatggttcgaaacacaaatatggaactggaattggaattttaataatatcccccaataaagttccaactaaattcaaatataaaatcaaagggctttgttctaataatgaggctgagtatgaggctctaattacaggccttgaaattttaattagcctgggggcaagaaatgttaacataaggggtgattcagaattagtagtgaagcaattaacacaagaatacaaatgtgttaatgaacacttagcaaaatattttgttatggccagttctcttctgaatcatttcgattacattaacattgagcatatacctcgactagaaaaccaagaagcaaatgatttagcccaaatagcttcagggtacaaaatgtcgaaggaaaaactaactcagttgatcgaaataaaagataaactgatgttactagaaccattaagcactaaattgccaatgccaaaacttgtgggggcaagtacaccacaaaatgataaagatgaaagtatgaatgaaagtatgaatgatcttcaggaaaaaattcaaattttggccattgacaatatgttagataatgattggagaaagtccattattgaatatttggaaaatccaataggcaatgtggctcgaaagatcaaatatagggctttaaattacgtgattgtggggaatgatttgttcaaaaagactgcagaaggagtgttgctaaaatgtctaagtgaatcagaagcatacttggcagtttcccatgttcacagtggggcttgtggatcacatcaagcaggccataaaatgaaatggcttttatttcgacaaggtttgtattggccttcgatgttaaaagactgtatagaatttgctaaagggtgtcaagaatgccaaaagcatgcagggatacagcatgtacctgctagtgagttacactccataatcaaaccttggcctttcagaggatgggctttggatttaattggtgaaatcaagcctgcctcttctaagaaccagcgttatattatagttggtatcgattactttacaaaatggatcgaagcagt

SEQ ID NO: 15176 - DNA, 1094 bp, Glycine max
  Gm_smallRNAprecursor_8009
cactgatcgaaatgccgcaagactatgtcgatacagagccttggtttttgtatttcgatggttcgaaacacaaatatggaactggaattggaattttaataatatcccccaataaagttccaactaaattcaaatataaaatcaaagggctttgttctaataatgaggctgagtatgaggctctaattacaggccttgaaattttaattagcctgggggcaagaaatgttaacataaggggtgattcagaattagtagtgaagcaattaacacaagaatacaaatgtgttaatgaacacttagcaaaatattttgttatggccagttctcttctgaatcatttcgattacattaacattgagcatatacctcgactagaaaaccaagaagcaaatgatttagcccaaatagcttcagggtacaaaatgtcgaaggaaaaactaactcagttgatcgaaataaaagataaactgatgttactagaaccattaagcactaaattgccaatgccaaaacttgtgggggcaagtacaccacaaaatgataaagatgaaagtatgaatgaaagtatgaatgatcttcaggaaaaaattcaaattttggccattgacaatatgttagataatgattggagaaagtccattattgaatatttggaaaatccaataggcaatgtggctcgaaagatcaaatatagggctttaaattacgtgattgtggggaatgatttgttcaaaaagactgcagaaggagtgttgctaaaatgtctaagtgaatcagaagcatacttggcagtttcccatgttcacagtggggcttgtggatcacatcaagcaggccataaaatgaaatggcttttatttcgacaaggtttgtattggccttcgatgttaaaagactgtatagaatttgctaaagggtgtcaagaatgccaaaagcatgcagggatacagcatgtacctgctagtgagttacactccataatcaaaccttggcctttcagaggatgggctttggatttaattggtgaaatcaagcctgcctcttctaagaaccagcgttatattatagttggtatcgattactttacaaaa

SEQ ID NO: 15177 - DNA, 1054 bp, Glycine max
  Gm_smallRNAprecursor_8010
aatttattgtttgacaggcagaatttgaaatccctgaagcttatgacagtaggataaagaagaaaattcttcagactgtcggcgagcggtggaggcaatttaaatatgacttgactaggaaatgggcacttgcagccgacaaggacggtgtggatgacattgtctgtgaaaaatacagcattagcaaggagaaatgggcttagttttgttagacccgcagagacccctcatgggaggtatgtactttgtcattttagttgttttccataaaaaaaatcagttcttataattcattgtagtaatcattttcattaatgttcaatttttgcaggatgtgtggaaaaaggcacaggccatccagaagcaaaacactgccccccatgtgttgtctcgtgggggttatgaatatttagaacaaaagctcatggctgagaagacaaagaaaagactggaagaagctgcccagtccagaagcactgagggcatcattgaccttccatctcccatcagacgccacgtgaagtggaagctgacccgcaccaagaaaactgggcagatgacgtctgaggcagcaaaggaaatagcttagaatattgtaagtcatttataattaataattgtaattatctttgtgtattctgtgaatgccttggacaaatatatgtgttctgtacaggattctttggacgagcagtcatcatagggatcgttcgtccctcatggatgtcaggatgtcctaactgctgccattgggcgaccagagcaccctggtcgtgtccgtgctgctggagccggtgtcaccataaagcaatactttggatcggctccacgaacgtcccgcagttcttcctccatgcctcctgaagacctacagcagctgacccaaaaaattagggaccagctggaggagtcgatcatagaaaaagtgacttgacagctgatggcatcctttagccagatgcaatcctagttctagtctcagatgcattcgcagggacttgcactgcctccagagccaaaggttggtccctcaggtgctcgtgtcagcacaaag

SEQ ID NO: 15178 - DNA, 1053 bp, Glycine max
  Gm_smallRNAprecursor_8011
taaataaatgagttgattagttatattatttgatttagttatttttagtttgaatttttttaatatatatatatatatatatatatatatatatatatatatatatatatatatatatatgatagggtagtttgcgttagtacctggtaggttttatttttagtttgtaggttaatattctatgttttaggaaatttacgttattaaatatatgatacattgtacattattattattttatatatatattgtttaaataatttttggcatttcaatatttgtttatattttaatttatttgttaattgtagaatatattatgttaattatttaaatttgtgtgtgtatgtatttgaaattatttgtaaaatatatttaaatttttttatttgtagaatatatttaaattttattatttttagaatatattttgttatgaaataataatattttgttatttatttaaatttaaataatatatacttaataacgtttttataaatgtgcgtagtttaatttatattatctagaaataatgtataaattgatatgtaaatttattgtattatattttgttttgcagtagtaatgacatcttcatcgtcatgtccatcacatattaaaattaagtctggccccatcgatgatgatgtattatggatgtaacctaagcatgtttcagaacatgtttgggatggggaagaagatcagaaattacatatcagacgagttgtccccacttatcaagggggaagaagaaatttcagagcaaatttttctttttctacgagttgtccccacttatctgactgaagaaggcctattgagctttaactcggactacatggtctggtataggcgaaagacaaatatgtttgttgacccacaaaatgcaagcacgactacattggtattttttaatttttttaatatttaacttgaacatttttttaattatggccattaattttctgaccctaataattgcaggctgaagttgcggagacattacaatacgtggtgtctcctcaagggaggaatacatggacagtt

SEQ ID NO: 15179 - DNA, 1053 bp, Glycine max; identical to SEQ ID NO: 15178
  Gm_smallRNAprecursor_8012

SEQ ID NO: 15180 - DNA, 1119 bp, Glycine max
  Gm_smallRNAprecursor_8013
aataaatgagttgattagttatattatttgatttagttatttttagtttgaatttttttaatatatatatatatatatatatatatatatatatatatatatatatatatatatatatgatagggtagtttgcgttagtacctggtaggttttatttttagtttgtaggttaatattctatgttttaggaaatttacgttattaaatatatgatacattgtacattattattattttatatatatattgtttaaataatttttggcatttcaatatttgtttatattttaatttatttgttaattgtagaatatattatgttaattatttaaatttgtgtgtgtatgtatttgaaattatttgtaaaatatatttaaatttttttatttgtagaatatatttaaattttattatttttagaatatattttgttatgaaataataatattttgttatttatttaaatttaaataatatatacttaataacgtttttataaatgtgcgtagtttaatttatattatctagaaataatgtataaattgatatgtaaatttattgtattatattttgttttgcagtagtaatgacatcttcatcgtcatgtccatcacatattaaaattaagtctggccccatcgatgatgatgtattatggatgtaacctaagcatgtttcagaacatgtttgggatggggaagaagatcagaaattacatatcagacgagttgtccccacttatcaagggggaagaagaaatttcagagcaaatttttctttttctacgagttgtccccacttatctgactgaagaaggcctattgagctttaactcggactacatggtctggtataggcgaaagacaaatatgtttgttgacccacaaaatgcaagcacgactacattggtattttttaatttttttaatatttaacttgaacatttttttaattatggccattaattttctgaccctaataattgcaggctgaagttgcggagacattacaatacgtggtgtctcctcaagggaggaatacatggacagttgatgatctcgtgccttatttggaaaaaaatacaattttatccgaagagcaagagagaattactgagcc

SEQ ID NO: 15181 - DNA, 1041 bp, Glycine max
  Gm_smallRNAprecursor_8014
ctgtcggcgagcgctggaggtagtttaaatctgacttgcctaagaaatgggcacttgtaggcgacaaggacgatgtggatgacattgtctgtgaaaaatatggcattagcaaggagaaatgaactcagttttgtcagacccgcagagacccctcatgaaaggtatatactttgtcattttagttgttttccacaacaaatcacttcttataatttattgtaataatcattttcattaatgtgcagaaaaaggtacaggccatccagaagcaaaatactgcccctcacgtattgtctcgtgggggttatgaatatttaaaacaaaagttcatggctgagaagacaaagaaaagactggaagaagctgcccagtctggaaacactgagggcgtcattgaccctccatctcccatcagacgccacgtgaagtggaagatggcccgcacgaaaaaaactggacaaatgacgtttgaggcaccaaaggaaatagctgatagaattgtaagtcatttttaattaataattgtaattatctttgtgtattctgtgaattccttggacaaatatgtgttcggtacaagattctttggaagagcaggcgtcacagggatctttcgtccgccatggacattaggatgtcctcactgctaccattggacgaccagagcatcctggccgtgttcgtgttgctggagtcggtgtcaccataaagcaatactttggatcgccttcacgaacgtcccgtagttcttccgacatttctcttgaagaccttcaacagctgacccaacaaatcagagaccaactagaggagtcaatcacagaaaaagtgacttgaaagctgatggcatctttcagccagatgcagtcctagtttctgtctcagatgcaatcacagggacttgcactacctccagagccagagattggtcccctaggtcctcgtgtcagcacaaaggagagttgtgttgctctctcagggaacgattcagggacgagtgactcagaaaaatgcgggctatacattgaagaaaatctttcc

SEQ ID NO: 15182 - DNA, 1127 bp, Glycine max
  Gm_smallRNAprecursor_8015
tgggggttatgaatatttaaaacaaaagttcatggctgagaagacaaagaaaagactggaagaagctgcccagtctggaaacactgagggcgtcattgaccctccatctcccatcagacgccacgtgaagtggaagatggcccgcacgaaaaaaactggacaaatgacgtttgaggcaccaaaggaaatagctgatagaattgtaagtcatttttaattaataattgtaattatctttgtgtattctgtgaattccttggacaaatatgtgttcggtacaagattctttggaagagcaggcgtcacagggatctttcgtccgccatggacattaggatgtcctcactgctaccattggacgaccagagcatcctggccgtgttcgtgttgctggagtcggtgtcaccataaagcaatactttggatcgccttcacgaacgtcccgtagttcttccgacatttctcttgaagaccttcaacagctgacccaacaaatcagagaccaactagaggagtcaatcacagaaaaagtgacttgaaagctgatggcatctttcagccagatgcagtcctagtttctgtctcagatgcaatcacagggacttgcactacctccagagccagagattggtcccctaggtcctcgtgtcagcacaaaggagagttgtgttgctctctcagggaacgattcagggacgagtgactcagaaaaatgcgggctatacattgaagaaaatctttcccgcctggttgccctaggaagactttatgagggatccacaacagttcacaacatccctttgttgcatggccaagtcaaggtttgtgttgaggaggttaaagatgcagaggctctcgttcctgtatccactgacgatgttacactattagaaaatatgctttctacatcggtttttcaaccgatgttgaaagtaccgacgttgatagtattatcgttaacatcggtttttcaaaaaccgatgttaacgtaaaattaccaacatcggttatataaataaccgatgttgctaatatgaattacacccagaaaatttatattaatgttgaaagttaacatcagtttttataaaaaaccgatgttaacgaatgtgttactgttgacagtt

SEQ ID NO: 15183 - DNA, 1099 bp, Glycine max
  Gm_smallRNAprecursor_8016
aatactgtgcccactgtatacgaagtgccttgaatctctctgcttccaatggtctaacttcattaaaatactacatgatcaaataaaaaaataaattaataatgtaataacaattataaaaaaaccaaatttgtttgtaataaacaattaccgtctcccaattattcctgaaagatcctaagattatcgtggacatccagttcatcacgtagtagccacattcagtgattcctttttgtctattacactaaatacataatgaaatttggatattaattaaacgttaactacaattagtgtacacacacataaaatatatataagtagaacttttatttaaatcatgtatcttaataacaatccacttagcagcagccttggatttcggttgtggagtatcatcaagtcctttcaaagcactagtgttgaatataaggaacattaaaatattgatgttgagttatgccaatgaaaatgtattgaaaacaatattgacctgttaattattcccttaaggtaattgtctggcctgttatgcaaagaacaaaattagacaactaggttttccttaggtagaatgacgaccatttgccagtgttattgtagtagtatagattatctaaattcaattattgtgtttgacttacctattcagataggctccaaggtaaacatctcgttttgaactttgtatccaactcttgatgtaactttcggattcaaattgtgaatgcccagatctctgaatggactgtggctcgaggcatccatacacatcagaattccctgctcgcacacttgtctcagtcagatggctgtgttgttatgtcaaagttaattatgtatgaatttaaaacaattactttgttaattaatattaatctaaaatgacttacagaatccacaactgtataacacatatgctgagacattgaccaccatgtgtaatttcagagagatcttcgtgctttatatacaacgggaagttttgattaaacaccccgaatatggtagaatcccacataacctggagcggcttcaaaaacagttatgagatggtcaatgtcatcaggtacaggggatcatcgacctcttcatc

SEQ ID NO: 15184 - DNA, 1047 bp, Glycine max
  Gm_smallRNAprecursor_8017
tctttaacctcctcaacaccaaccttgacttggccatgcaacaaagggatattgtgaactgttgtggatccctcgtaaagtcttcctagggcaaccaagcgggaaggattttcttcaatatataggccgcatttgtctgagtcacccgtccttggatcgttccctgagggagcaacacaactctcccttgtgctgacacgaggacctgagggaccaacctctggctctggaggtagtgcaattccctatgattgcatctgagactgaaactgagactgcatctggctgaaggatttcatcatcttttaagtcactttttctgtgattgactcctccagttggtctctgatttgttgggtcaactgttctaggtcttcaagaggcatggaggaaaaactgcgggatgttcgtgaagctgatccaaagtattgctttatgatgacactggttccaacagcacgaagacggccagggtgctctggtcgcccattggcagaagtcaggatatcctgacgtccatgggggacgaacgatccctgtgacgcctgctcgtccaaagagtcctgtatcgaacacatatttgtccaaggaattcacaaaatacacaaagataattacaattattaattaaaaatgacttacaatcctgtcagctattttctttgctgcctcagacgtcatctgtccagttttcttcgtgcgagccatcttccatttcacgtggtgtctgatgggagatggagggtcaatgatgccctcagtgcttccagactaggcaacttcttccagtcttttctttgtcttctcagccatgagctttttttctaaatattcataacccccacgagacaatacgtgggggcagtgttttgcttctgggaggcctgtgcctttttccgtacatcttgcaaaagtttaacattaatgaaaatgattattacaataaattataagaagtgattttgttgtggaaaacaactaaaatgacaaagtacatacctcccatgaggggtctctacgggtctgataaaattgagttcatttctg

SEQ ID NO: 15185 - DNA, 1116 bp, Glycine max
  Gm_smallRNAprecursor_8018
attcataacccccacgagacaatacgtgggggcagtgttttgcttctgggaggcctgtgcctttttccgtacatcttgcaaaagtttaacattaatgaaaatgattattacaataaattataagaagtgattttgttgtggaaaacaactaaaatgacaaagtacatacctcccatgaggggtctctacgggtctgataaaattgagttcatttctgcttgctaatgccatatttttcacagacaatttcgtccacaccgtccttgtcgactgcaagtgcccatttcctagtcaagtcagatttaaactgcctcgagcgctcgccgacaatctgaagaattttcttctttgtcttactgtcaaaagcttcagggatttgaaattctgcctgacaaataataaattaggttttattgtaagtaaataacaaatttagactattaaagaaaatcaacgaagaaaactcaaatacctgaatatcctcccatatcaaatccttctgagcagtagggacttccttccaggtgtcatatgtcacgtcgaccttatcatgagcgacaatccccaaatatgttcttaatttcttcttgtggggaccgtcggccttgccggtagcaggatcgacgttgaccacaggtctttctgccccaggtggtctagtggccaatgatcgtagccgtgtcgccttgcgtgtccgcttcaacgtaaatggagacgcatcagcgtctgcaggaggaggaggaagaggaggaggaggcaaggcaggtggagtagccatggtcctttaaagagaaaaagttgagttagacgatgttaattaattctcattcatcatgatcattacgattagcatgaacgtcgttagcttcttcttctccgacgttgttagaagtcatttgtgtagacaaaggactaacataagtgtccatgtatgaatcatcatcttctacattaacaccaattgttttcccgtttagaaccacagaccacctttcatcacaagggtcttgcacataaaatacttgcttagcttgttctgccatgatgaaagggtcattctggtaagctagtttctttaagtctaccaacgtaaatcctacatcatcagtccgcaca

SEQ ID NO: 15186 - DNA, 1182 bp, Glycine max
  Gm_smallRNAprecursor_8019
agacaaatgcggcctatatattgaagaaaatccttcccgcttggttgccctaggaagactttacgagggatccacaacagttcacaatatccctttgttgcatggccaagtcaaggttggtgttgaggaggttaaagatacagaggctctcgttcctgtacccactgacgaggttaccttagtggggcaggcacttaacactttccttgcttggccaacacatcttgtgaagcgtttatcagaacaggtattttactctgattatatgtttatttttttcaattaatttgttcactgtaatcaaaacttgttaattaactatgttttatcaataggcagctgtgtctccagcaaaacctccagaaagcccggatgaagaggtcgatgatcccctgtacctgatgacattgaccatctcataactgtttttgaagccgctccaggttatgtgggatgctaccatattcggggtgtttaatcaaaacttcccgttgtatataaagcacgaagatctctctgaaattacacatggtggtcaatgtctcagcatatgtgttatacagttgtggattctgtaagtcattttagattaatattaattaacaaagtaattgttttaaattcatacataattaactttgacataacaacacagccatctgactgagacaagtgtgcgagcagggaattctgatgtgtatggatgcctcgagccacagtccattcagagatctgggcattcacaatttgaatccgaaagttacatcaagagttggatacaaagttcaaaacgagatgtttaccttggagcctatctgaataggtaagtcaaacacaataattgaatttagataatctatactactacaataacactggcaaatggtcgtcattctacctaaggaaaacctagttgtctaattttgttctttgcataacaggccagacaactaccttaagggaataattaacaggtcaatattgttttcaatacattttcattggcataactcaacatcaatattttaatgttccttatattcaacactagtgctttgaaaggacttgatgatactccacaaccgaaatccaaggctgctgctaagtggattgttattaagatacgtgatttaaataaaagttctacttatatatattttatgtgtgtgtacactaattgta

SEQ ID NO: 15187 - DNA, 1156 bp, Glycine max
  Gm_smallRNAprecursor_8020
agaaaatccttcccgcttggttgccctaggaagactttacgagggatccacaacagttcacaatatccctttgttgcatggccaagtcaaggttggtgttgaggaggttaaagatacagaggctctcgttcctgtacccactgacgaggttaccttagtggggcaggcacttaacactttccttgcttggccaacacatcttgtgaagcgtttatcagaacaggtattttactctgattatatgtttatttttttcaattaatttgttcactgtaatcaaaacttgttaattaactatgttttatcaataggcagctgtgtctccagcaaaacctccagaaagcccggatgaagaggtcgatgatcccctgtacctgatgacattgaccatctcataactgtttttgaagccgctccaggttatgtgggatgctaccatattcggggtgtttaatcaaaacttcccgttgtatataaagcacgaagatctctctgaaattacacatggtggtcaatgtctcagcatatgtgttatacagttgtggattctgtaagtcattttagattaatattaattaacaaagtaattgttttaaattcatacataattaactttgacataacaacacagccatctgactgagacaagtgtgcgagcagggaattctgatgtgtatggatgcctcgagccacagtccattcagagatctgggcattcacaatttgaatccgaaagttacatcaagagttggatacaaagttcaaaacgagatgtttaccttggagcctatctgaataggtaagtcaaacacaataattgaatttagataatctatactactacaataacactggcaaatggtcgtcattctacctaaggaaaacctagttgtctaattttgttctttgcataacaggccagacaactaccttaagggaataattaacaggtcaatattgttttcaatacattttcattggcataactcaacatcaatattttaatgttccttatattcaacactagtgctttgaaaggacttgatgatactccacaaccgaaatccaaggctgctgctaagtggattgttattaagatacgtgatttaaataaaagttctacttatatatattttatgtgtgtgtacactaattg

SEQ ID NO: 15188 - DNA, 1037 bp, Glycine max
  Gm_smallRNAprecursor_8021
ttagtggggcaggcacttaacactttccttgcttggccaacacatcttgtgaagcgtttatcagaacaggtattttactctgattatatgtttatttttttcaattaatttgttcactgtaatcaaaacttgttaattaactatgttttatcaataggcagctgtgtctccagcaaaacctccagaaagcccggatgaagaggtcgatgatcccctgtacctgatgacattgaccatctcataactgtttttgaagccgctccaggttatgtgggatgctaccatattcggggtgtttaatcaaaacttcccgttgtatataaagcacgaagatctctctgaaattacacatggtggtcaatgtctcagcatatgtgttatacagttgtggattctgtaagtcattttagattaatattaattaacaaagtaattgttttaaattcatacataattaactttgacataacaacacagccatctgactgagacaagtgtgcgagcagggaattctgatgtgtatggatgcctcgagccacagtccattcagagatctgggcattcacaatttgaatccgaaagttacatcaagagttggatacaaagttcaaaacgagatgtttaccttggagcctatctgaataggtaagtcaaacacaataattgaatttagataatctatactactacaataacactggcaaatggtcgtcattctacctaaggaaaacctagttgtctaattttgttctttgcataacaggccagacaactaccttaagggaataattaacaggtcaatattgttttcaatacattttcattggcataactcaacatcaatattttaatgttccttatattcaacactagtgctttgaaaggacttgatgatactccacaaccgaaatccaaggctgctgctaagtggattgttattaagatacgtgatttaaataaaagttctacttatatatattttatgtgtgtgtacactaattgtagttaacgtttaattaatatccaaatttcattat

SEQ ID NO: 15189 - DNA, 1036 bp, Glycine max
  Gm_smallRNAprecursor_8022
gtggggcaggcacttaacactttccttgcttggccaacacatcttgtgaagcgtttatcagaacaggtattttactctgattatatgtttatttttttcaattaatttgttcactgtaatcaaaacttgttaattaactatgttttatcaataggcagctgtgtctccagcaaaacctccagaaagcccggatgaagaggtcgatgatcccctgtacctgatgacattgaccatctcataactgtttttgaagccgctccaggttatgtgggatgctaccatattcggggtgtttaatcaaaacttcccgttgtatataaagcacgaagatctctctgaaattacacatggtggtcaatgtctcagcatatgtgttatacagttgtggattctgtaagtcattttagattaatattaattaacaaagtaattgttttaaattcatacataattaactttgacataacaacacagccatctgactgagacaagtgtgcgagcagggaattctgatgtgtatggatgcctcgagccacagtccattcagagatctgggcattcacaatttgaatccgaaagttacatcaagagttggatacaaagttcaaaacgagatgtttaccttggagcctatctgaataggtaagtcaaacacaataattgaatttagataatctatactactacaataacactggcaaatggtcgtcattctacctaaggaaaacctagttgtctaattttgttctttgcataacaggccagacaactaccttaagggaataattaacaggtcaatattgttttcaatacattttcattggcataactcaacatcaatattttaatgttccttatattcaacactagtgctttgaaaggacttgatgatactccacaaccgaaatccaaggctgctgctaagtggattgttattaagatacgtgatttaaataaaagttctacttatatatattttatgtgtgtgtacactaattgtagttaacgtttaattaatatccaaatttcattatgt

SEQ ID NO: 15190 - DNA, 1127 bp, Glycine max
  Gm_smallRNAprecursor_8023
ttaacaaagtaattgttttaaattcatacataattaactttgacataacaacacagccatctgactgagacaagtgtgcgagcagggaattctgatgtgtatggatgcctcgagccacagtccattcagagatctgggcattcacaatttgaatccgaaagttacatcaagagttggatacaaagttcaaaacgagatgtttaccttggagcctatctgaataggtaagtcaaacacaataattgaatttagataatctatactactacaataacactggcaaatggtcgtcattctacctaaggaaaacctagttgtctaattttgttctttgcataacaggccagacaactaccttaagggaataattaacaggtcaatattgttttcaatacattttcattggcataactcaacatcaatattttaatgttccttatattcaacactagtgctttgaaaggacttgatgatactccacaaccgaaatccaaggctgctgctaagtggattgttattaagatacgtgatttaaataaaagttctacttatatatattttatgtgtgtgtacactaattgtagttaacgtttaattaatatccaaatttcattatgtatttagtgtaatagacaaaaaggaatcactgaatgtggctactacgtgatgaactggatgtccacgataatcttaggatctttcaggaataattgggagacggtaattgtttattacaaacaaatttggtttttttataattgttattacattattaatttatttttttatttgatcatgtagtattttaatgaagttagaccattggaagcagagagattcaaggcacttcgtatacagtggacacagtattatctaaaagttagaaatcaaacatagggtgttagacaactatgtaaaaaaaccaatgttaactgtcaacattaacacattcgttaacatcggttttttataaaaactgatgttaactttcaacattaatataaattttctgggtgtaattcatattagcaacatcggttatttatataaccgatgttggtaattttacgttaacatcggtttttgaaaaaccgatgttaacgataatactatcaacgtcggtactt

SEQ ID NO: 15191 - DNA, 1111 bp, Glycine max
  Gm_smallRNAprecursor_8024
tgggtacaggaacgagagcctctgcatctttaacctcctcaacacaaaccttgacttggccatgcaacaaagggatgttgtgaactgttgtggatccctcataaagtcttcctagggcaaccaggcgggaaagattttcttcaatgtatagcccgcagttttctgagtcactcgtccctgaatcgttccctgagagagcaacacaactctcctttgtgctgacacgaggacctaggggaccaatctctggctctggaggtagtgcaagtccctgtgattgcatctgagacagaaactaggactgcatctggctgaaagatgccatcagctttcaagtcactttttctgtgattgactcctcaagttggtctctgatttgttgggtcagctgttgaaggtcttcaagagaaatgtcggaagaactgcgggacgttcgtgaaggcgatccaaagtattgctttatggtgacaccggctccagcaacacgaacacggccaggatgctctggtcgtccaatggtagcagtgaggacatcctaatgtccatggcggacgaaagatccctgtgacgcctgctcttccaaagaatcttgtaccgaacacatatttgtccaaggaattcacagaatacacaaagataattacaattattaattaaaaatgacttacaattctatcagctatttcctttggtgcctcaaacgtcatttgtccagtttttttcgtgcgggccatcttccacttcacgtggcttctgatgggagatggagggtcaatgacgccctcagtgtttccagactgggcagcttcttccagtcttttctttgtcttctcagccatgaacttttgttttaaatattcataacccccacgagacaatacgtgaggggcagtattttgcttctggatggcctgtacctttttctgcacattaatgaaaatgattattacaataaattataagaagtgatttgttgtggaaaacaactaaaatgacaaagtatatacctttcatgaggggtctctgcgggtctgacaaaactgagttcatttctccttgctaatgccatatttttcacagacaatgtcgtccacatcgtccttgtcgccta

SEQ ID NO: 15192 - DNA, 1064 bp, Glycine max
  Gm_smallRNAprecursor_8025
cagttgatctgtgcagaatgattctggacaacatgaataaaaactcacgaaataatttgatccttcttctatacacactaataaaatatttataattgaaattaagttatacatatatcaattgtgttttagttataccctccaccacctctaatcactggtcaccaccaccattgttgtcatctaccaacctccccccactctcgtctttcccctcttccgatttacaaaccctccaacatccaaccccacccaaaacccttccgtggaaaataacaagaccactaaaatgacaccgttgaacccatccactacaccataaagaaactgaagctaacataccccattactaagtccgagatctgccaagaattctgccacaccactagcacaacgtcgcaaggatcaacaatagcagcctcggtagctatccatgtctgtcctttttgtgtacgtagctcgcatgacctatgaagcaccaataccgacacggacaccgaacacgacacggacacggacacgtggacacctgtaatgtccaaaatataaaatgtagtacgggtgtcgtgtcggtgtcggatactgacacggacgcgtgtcggacaccgaacacagcaagggactggagtgtccgtacttcatagcgcatggcagctccacttcctccatcaacctggtgaattcttcttcaacactttccaaagctctactccccccctcccccccaatgtctcgttgaatgtgttgaacgacatgtcattgagatgaatggatttgggaacagtggcatcaatgagggagtcaaggatgtcgaagcttcatgtctgggccaacttggttagttcctcctaggtggcagagttgttctattaatggttgtgcggtaaaggtggtttttatagtgctcaagggcctttttctatccagacacttttaggtttaattttctaaccgaattgctaaaattatttatgattaaaagttgattttttttaatgaatttgaagtcgtaaccaatttttttttaagactttgaagctctaaagatttttttattaaattgt

SEQ ID NO: 15193 - DNA, 1046 bp, Glycine max
  Gm_smallRNAprecursor_8026
ctgtgcagaatgattctggacaacatgaataaaaactcacgaaataatttgatccttcttctatacacactaataaaatatttataattgaaattaagttatacatatatcaattgtgttttagttataccctccaccacctctaatcactggtcaccaccaccattgttgtcatctaccaacctccccccactctcgtctttcccctcttccgatttacaaaccctccaacatccaaccccacccaaaacccttccgtggaaaataacaagaccactaaaatgacaccgttgaacccatccactacaccataaagaaactgaagctaacataccccattactaagtccgagatctgccaagaattctgccacaccactagcacaacgtcgcaaggatcaacaatagcagcctcggtagctatccatgtctgtcctttttgtgtacgtagctcgcatgacctatgaagcaccaataccgacacggacaccgaacacgacacggacacggacacgtggacacctgtaatgtccaaaatataaaatgtagtacgggtgtcgtgtcggtgtcggatactgacacggacgcgtgtcggacaccgaacacagcaagggactggagtgtccgtacttcatagcgcatggcagctccacttcctccatcaacctggtgaattcttcttcaacactttccaaagctctactccccccctcccccccaatgtctcgttgaatgtgttgaacgacatgtcattgagatgaatggatttgggaacagtggcatcaatgagggagtcaaggatgtcgaagcttcatgtctgggccaacttggttagttcctcctaggtggcagagttgttctattaatggttgtgcggtaaaggtggtttttatagtgctcaagggcctttttctatccagacacttttaggtttaattttctaaccgaattgctaaaattatttatgattaaaagttgattttttttaatgaatttgaagtcgtaaccaatttttttttaagactttgaagctctaaagattttttt

SEQ ID NO: 15194 - DNA, 1082 bp, Glycine max
  Gm_smallRNAprecursor_8027
ctgtgcagaatgattctggacaacatgaataaaaactcacgaaataatttgatccttcttctatacacactaataaaatatttataattgaaattaagttatacatatatcaattgtgttttagttataccctccaccacctctaatcactggtcaccaccaccattgttgtcatctaccaacctccccccactctcgtctttcccctcttccgatttacaaaccctccaacatccaaccccacccaaaacccttccgtggaaaataacaagaccactaaaatgacaccgttgaacccatccactacaccataaagaaactgaagctaacataccccattactaagtccgagatctgccaagaattctgccacaccactagcacaacgtcgcaaggatcaacaatagcagcctcggtagctatccatgtctgtcctttttgtgtacgtagctcgcatgacctatgaagcaccaataccgacacggacaccgaacacgacacggacacggacacgtggacacctgtaatgtccaaaatataaaatgtagtacgggtgtcgtgtcggtgtcggatactgacacggacgcgtgtcggacaccgaacacagcaagggactggagtgtccgtacttcatagcgcatggcagctccacttcctccatcaacctggtgaattcttcttcaacactttccaaagctctactccccccctcccccccaatgtctcgttgaatgtgttgaacgacatgtcattgagatgaatggatttgggaacagtggcatcaatgagggagtcaaggatgtcgaagcttcatgtctgggccaacttggttagttcctcctaggtggcagagttgttctattaatggttgtgcggtaaaggtggtttttatagtgctcaagggcctttttctatccagacacttttaggtttaattttctaaccgaattgctaaaattatttatgattaaaagttgattttttttaatgaatttgaagtcgtaaccaatttttttttaagactttgaagctctaaagatttttttattaaattgtttaagctttttgttttttgaaaaaat

SEQ ID NO: 15195 - DNA, 1082 bp, Glycine max; identical to SEQ ID NO: 15194
  Gm_smallRNAprecursor_8028

SEQ ID NO: 15196 - DNA, 1188 bp, Glycine max
  Gm_smallRNAprecursor_8029
ccgtctttgcattttctgggtcaacaaacatctttgtctttcgcctataccagaccatgtagtccgagttaaaactcaataggccttcttgtcggggataagcgtcgaccctaaatgcatgtcgattattccactgttgaatcattggggcgaataattgcccccaattttcgtcatgtttcccctttaatgttatgctatgaatgtttaggggttgtgaaggagactctagaactggttgctgcatcccgaattgtctcaagactctgtccggttggtgccactcaataacttggaaacaaattagtggcaccaccgcgtaccacgcgatacttccgactaaacaaacgggaggcaacaatgatataacggttgatgggtaaggctcccacacaaactgcatataacaacatagttgtgaacattgtagtaaaataagacatataattttttattttacaaatacaatagcatgcttcttacctcatgacgtttcataatatccaacttgcgacgaaaaactttcacatcatcattgtcgatatgttggtttccacgtcgcagccacctacaaagaataaaatttaatataccctaaaaccatttattctattgaaatgaaagacgctgttaaaaatgactcacctgtgccctagtggtgtattttctatttgggaaggagtcctctttggagccaaggttggacatcgttcccatgcccacaattgtagtaagatgcacatacctccgaatgatttagttttataatcggtggcactgcacatctctctatatagaaaaccaagtacggcagctccccatgcatatctgccacattcttcaaagtcacgtaaaaattgaaggtaccttaccgaaactctgttattggttttgtcaacgaacaagacacctccaataaatctcagtatccatgcacgggcaaaccttcgtacttgttcttcgtcatcatcattatttatttgatcaaaatggtgagccagccaacttaatttaaccacactacctttaatttcaccttcttctggtctgactcccaataattcctcacataaatcagcccaatcaagatttgttggaccgattaatggtaaaccatccacacttatacctaacaacacagagacgtcttgtagagtgatagtacactctccgcatctcatgtgaaac

SEQ ID NO: 15197 - DNA, 1097 bp, Glycine max
  Gm_smallRNAprecursor_8030
atattaggaaaaatggagctagtgaacgaaacttccaagaagtttcctatatattcgctcaactgaaataaaaaggggatacaaagttgctggatatgcatgagatgattcactctcttggaatttcagtgtgatatttggtctaagcaatggtggatgagatgatagtcaaagccagaagataatctgccgtttacaccataagcatagcacatgttatgattggaaggtttatgttatatatctgaagtattgtcccaatgatcattaaagtataatggtcaaattgtgctctttggttaacaaagtctttcttgtgtaagaatttaatgttacaaggagttgttagataaccttaacaagttatttaacactaaactttgacagagaaaagattatgttcaccaaagaaacaagcttgtgatgtttctgatcttgaacattgtctttaccctttgatgatcattggtgtttctgatcttgaacattgtctttaccctttgatgatcattgggacaatactttagatatataacaaaaatcttctaacaatcataacatttgtcctgcttatggtgaaaattgcagttctggctttgagtatcatctcatcaaccattgcttagataagtttgaatttatgcgttggaatgttcacattgcttgactacaactaaagtgctcctgaaggaacctcaggattcttgcccgaagatgctactcatactactgcgtttgctcatgttgagtcttgaaaatttctcagttctaccgtgctttgtggttgttctgtttttctttgttctaacttcagtttggattcttattcagaacgaatcattcttgtgttgatggaaataattttttttaatggtttgtagagaatttcctcttcttctatatttttatgttcttttttattttcttaatgattgatggaggagtttagaataccaaacaacattattttgtttttgccgcttttagtgtactcttatgattagagtttgtagatagaagtcgaccttgatcttctgttgataaactaatgctaaaacaaaactctaaacattgttttagttaagtaaagagaatgc

SEQ ID NO: 15198 - DNA, 1078 bp, Glycine max
  Gm_smallRNAprecursor_8031
agaaattagaagatgtttatggataaataacttaaacatttataaaagtgagcttatcacatgggagcttccatcacaaacttcgaggttattgaaataagttagaaaaggttatggaatgtttataagccattttgataagccaaacaagctctgcataatcatttatgttataagctttcaataagattatgttctgttgtcattggtatgtgtgtcttggttttaacttagtcttcaatggcaggggatgttaagagactgcttgtacacagaactggtttatagcctgaagagcaacgactcttctttggaggaaaagaaaaggacaatgaagggcatttgcatgcagaaggtgtgagggacatgtcaaagcttttgcttttggaggatgcttgtagagaagagaggaaacatgaggaaattagaaaacacaatgaaatgttgaaaggcttctgaaagctgttgctgaagttagctatgaagcaccgacacggacactgacacggacaccggacacgacatggacacggacacgtggacacctataaaaataactaaaaataatgtggacacgggtgtcgtgtcggtgtcggacaccggacacggcaaggggctggggtgtccctgcttcataggaagttagagaagaggtggacaagctcgctgagagggtgaacctgtttatcattttattctttggttatagaaacataataactggagctgagaatgaggatatgactgattttgattagcaggtatctgtcttagaagtggctgtggatggagggaccagggtttctgacaaagagtttttgatgtccacagagttgcttatgaggcaattgctgaaactggatggtattgaggctgaaggtggtgaagtaaagctgcagagaaaagctgaggtagtgtttatggtgttagagcttctaacttaattttaactatttgtgtattagttattgtgtttattttggtattctcaaaatcccatatatttaatatgtcatggacactgacttttcttagtattatatatatatatatatatatatatatatatatatatata

SEQ ID NO: 15199 - DNA, 1079 bp, Glycine max
  Gm_smallRNAprecursor_8032
agaaattagaagatgtttatggataaataacttaaacatttataaaagtgagcttatcacatgggagcttccatcacaaacttcgaggttattgaaataagttagaaaaggttatggaatgtttataagccattttgataagccaaacaagctctgcataatcatttatgttataagctttcaataagattatgttctgttgtcattggtatgtgtgtcttggttttaacttagtcttcaatggcaggggatgttaagagactgcttgtacacagaactggtttatagcctgaagagcaacgactcttctttggaggaaaagaaaaggacaatgaagggcatttgcatgcagaaggtgtgagggacatgtcaaagcttttgcttttggaggatgcttgtagagaagagaggaaacatgaggaaattagaaaacacaatgaaatgttgaaaggcttctgaaagctgttgctgaagttagctatgaagcaccgacacggacactgacacggacaccggacacgacatggacacggacacgtggacacctataaaaataactaaaaataatgtggacacgggtgtcgtgtcggtgtcggacaccggacacggcaaggggctggggtgtccctgcttcataggaagttagagaagaggtggacaagctcgctgagagggtgaacctgtttatcattttattctttggttatagaaacataataactggagctgagaatgaggatatgactgattttgattagcaggtatctgtcttagaagtggctgtggatggagggaccagggtttctgacaaagagtttttgatgtccacagagttgcttatgaggcaattgctgaaactggatggtattgaggctgaaggtggtgaagtaaagctgcagagaaaagctgaggtagtgtttatggtgttagagcttctaacttaattttaactatttgtgtattagttattgtgtttattttggtattctcaaaatcccatatatttaatatgtcatggacactgacttttcttagtattatatatatatatatatatatatatatatatatatatatat

SEQ ID NO: 15200 - DNA, 1080 bp, Glycine max
  Gm_smallRNAprecursor_8033
agaaattagaagatgtttatggataaataacttaaacatttataaaagtgagcttatcacatgggagcttccatcacaaacttcgaggttattgaaataagttagaaaaggttatggaatgtttataagccattttgataagccaaacaagctctgcataatcatttatgttataagctttcaataagattatgttctgttgtcattggtatgtgtgtcttggttttaacttagtcttcaatggcaggggatgttaagagactgcttgtacacagaactggtttatagcctgaagagcaacgactcttctttggaggaaaagaaaaggacaatgaagggcatttgcatgcagaaggtgtgagggacatgtcaaagcttttgcttttggaggatgcttgtagagaagagaggaaacatgaggaaattagaaaacacaatgaaatgttgaaaggcttctgaaagctgttgctgaagttagctatgaagcaccgacacggacactgacacggacaccggacacgacatggacacggacacgtggacacctataaaaataactaaaaataatgtggacacgggtgtcgtgtcggtgtcggacaccggacacggcaaggggctggggtgtccctgcttcataggaagttagagaagaggtggacaagctcgctgagagggtgaacctgtttatcattttattctttggttatagaaacataataactggagctgagaatgaggatatgactgattttgattagcaggtatctgtcttagaagtggctgtggatggagggaccagggtttctgacaaagagtttttgatgtccacagagttgcttatgaggcaattgctgaaactggatggtattgaggctgaaggtggtgaagtaaagctgcagagaaaagctgaggtagtgtttatggtgttagagcttctaacttaattttaactatttgtgtattagttattgtgtttattttggtattctcaaaatcccatatatttaatatgtcatggacactgacttttcttagtattatatatatatatatatatatatatatatatatatatatata

SEQ ID NO: 15201 - DNA, 1086 bp, Glycine max
  Gm_smallRNAprecursor_8034
acaaagatgacgtcagtgctattctgtaaaaataaaaatttaattgatagatgttaaattataataatagattaaaaagcaaacaaactgaaccaaatcaaattaaaaaaacattgatttgattgattatatttaaataaaaccaagcaatacctttattttatatttaattttgaatgatttttagtttagaaattgaagcaaaagtgcacatcaccgaaaggtgaacagcttatatatgtaagagaaccctagcttgtctattattttgcctcgcgagcccataaaatgtgaggacgtacggggcggtgagcttcccacgtccccttcgcttttctctacatctataaatacctctgctacgtccctccccactatgaatcagaagcatttaatttagcacaatgatagctatataaattaattattatatctccagcaaactattctagcttgcttgttgcttcaattcctactttttcagtgtggaagaatttgtaaagctcaggagggatagcgccatggaaggtctttctactaatttgctctatcatgggtgctttggtttcgatcgatcttctctagcgctacccatcctgagtttcatggtttcttcatacttttcatagcttcattttcattataccttacgtgttgctgctctcttgtgggatttggctctttggttgaatatatatattcaaggaagaaccaggaaacaatatttaatggcaccctcgttaacttagaggaatgtaagctccttggttatatatatttccattcatctgtctgtgtctattttaatgtctttattaatttttaacttcgattttttcatactctaattttagtctgcagatttctatatataaatatatatgcatgtatcatcactataagggtttttaccatattaaaaaaatttgcgtacgcttaaacttgctgtgtttgtttttgtgtaattagcacttcaaccagatatcacgtgaatcatgtttataacattaatcaactgtttcaaaagtctccatgcaaaacttcattgagcctgaagtgtggaatcatgtaaaagttaattgaact

SEQ ID NO: 15202 - DNA, 1085 bp, Glycine max
  Gm_smallRNAprecursor_8035
caaagatgacgtcagtgctattctgtaaaaataaaaatttaattgatagatgttaaattataataatagattaaaaagcaaacaaactgaaccaaatcaaattaaaaaaacattgatttgattgattatatttaaataaaaccaagcaatacctttattttatatttaattttgaatgatttttagtttagaaattgaagcaaaagtgcacatcaccgaaaggtgaacagcttatatatgtaagagaaccctagcttgtctattattttgcctcgcgagcccataaaatgtgaggacgtacggggcggtgagcttcccacgtccccttcgcttttctctacatctataaatacctctgctacgtccctccccactatgaatcagaagcatttaatttagcacaatgatagctatataaattaattattatatctccagcaaactattctagcttgcttgttgcttcaattcctactttttcagtgtggaagaatttgtaaagctcaggagggatagcgccatggaaggtctttctactaatttgctctatcatgggtgctttggtttcgatcgatcttctctagcgctacccatcctgagtttcatggtttcttcatacttttcatagcttcattttcattataccttacgtgttgctgctctcttgtgggatttggctctttggttgaatatatatattcaaggaagaaccaggaaacaatatttaatggcaccctcgttaacttagaggaatgtaagctccttggttatatatatttccattcatctgtctgtgtctattttaatgtctttattaatttttaacttcgattttttcatactctaattttagtctgcagatttctatatataaatatatatgcatgtatcatcactataagggtttttaccatattaaaaaaatttgcgtacgcttaaacttgctgtgtttgtttttgtgtaattagcacttcaaccagatatcacgtgaatcatgtttataacattaatcaactgtttcaaaagtctccatgcaaaacttcattgagcctgaagtgtggaatcatgtaaaagttaattgaact

SEQ ID NO: 15203 - DNA, 1064 bp, Glycine max
  Gm_smallRNAprecursor_8036
gaactatcatgatactaatctatcatgaaaactctagaaagacctaaagtaatgtagaaacattcaccaccattgagaggttggtgacttgagcctataaatagacaattggtatgttgtaattgatcatccaagaaatcaatgacatagtcttctttctaaaacaattctctaaaactatcaactatcaactatcaactatcatctaatcaactaccaacagtggtatcagagctacgttcggtcatacattgtgcgtagttatattacctacctaccattccaaaatcctcccaactacttcaaaaattttctttgtactattaacccactccaataatattttttctaagctatggataacactactcaatcgtcaactatttctgtccctatcttcaatggtgaaaattatgatttctgacgtgttaaaatggaaacatatttttcatctcaagatttatgggacatagtagaagaagacttcaatgttctcgcggatacttcagctcttaatgcatctcaagaaaaataaagagaaaaatttaaggcattgttcaccttgcaacaagcggtgactgatccaattttcccaagaattatgggagttaagactaccaaagaaacgtggaacacattgcaggaggagtttcaaggaagtgttaaggtacgtgccgttaaacttcaatctctaagaagagattttgaactattgaagatgaaggagtctgagacagttaatgattactattctaaagttaaagaaatagttaatcaaatgagagcttttggggaagatattcttgacaagaaaattgttgagaaaattctaattactatgtcccaaaagtttgacccaatcgtgacaatgattgaggaaaccaaagatctgtccactctatcagagacagaacttgtgggctctcttgaagcatatgagcaaagactgtataggcataaagaagatacacttgaaaatgcattccaatcaagatttgaagaattacgagctatgctcgaagtcacagaaatttgcatcaaggaggagtgttgaaattgctaca

SEQ ID NO: 15204 - DNA, 1120 bp, Glycine max
  Gm_smallRNAprecursor_8037
ttaaatctttattttaatatatcagaaactcttgattagttgtgtacacttcaaaaaaaaaaaattgtctgtaaatcttgttgccaccctaattttggagcacttcgtgggatatatgagtaattcattgtgtataggccgagtgatcaagtggtgtgtggtcctgttatttatgacttgtgacaagctgtttgggttaaaaactcaggccccgcacccaactaaagcttttttcatttcttgttcccatctcccattcccacctttaaaaacactctcaattccctcttttgttatacatgagtaagcttgaagcaccaaagttgcagtcgggggagtcacagattaaattcaccgcttctttaacctttgtgtttctctttctcataccattttttctttccctatagctcctttaattttcttgtgagagtcagaaaagtatcactatatcaagtgacatgatcatcagaattgaattaggtgcatgttgtgcaagatggagaagcagggcacgtgcaatactaactcatgaacactacacggggcgtgaactcggagaatcatattctcttctgcttcatttcaccaacaagagagatcctattagttagttcttcatgtgcccctcttccccatcatgacaacagcaccttatatatattgcatttggaaatgttgaaggatgaggtttgcttggcttctgctcaaaattcagcaccgagttttaatggtttatgctccatattgaaggtgagtagttgtttatcattaacatattcttcatctttcccccctttattcaacactagcatgtcttccactccacgcatgatgagattgacaacactattaattagtatttgaaatcagtgtaaaggatatataataagtgtgcatagatttggtgacgtttaagattagaaaaataataattatatatgttattttaagttttcttagaaatattgggaaagaaaaagaacataatttctatataaatattatggtggataaacattgaagtgaactattttaattgtgtttagtcaaagaacatgacatattaagcatgtatattaatcaaaatgatgaagggtgttagtgtgagtcacattct

SEQ ID NO: 15205 - DNA, 1121 bp, Glycine max
  Gm_smallRNAprecursor_8038
ttaaatctttattttaatatatcagaaactcttgattagttgtgtacacttcaaaaaaaaaaaattgtctgtaaatcttgttgccaccctaattttggagcacttcgtgggatatatgagtaattcattgtgtataggccgagtgatcaagtggtgtgtggtcctgttatttatgacttgtgacaagctgtttgggttaaaaactcaggccccgcacccaactaaagcttttttcatttcttgttcccatctcccattcccacctttaaaaacactctcaattccctcttttgttatacatgagtaagcttgaagcaccaaagttgcagtcgggggagtcacagattaaattcaccgcttctttaacctttgtgtttctctttctcataccattttttctttccctatagctcctttaattttcttgtgagagtcagaaaagtatcactatatcaagtgacatgatcatcagaattgaattaggtgcatgttgtgcaagatggagaagcagggcacgtgcaatactaactcatgaacactacacggggcgtgaactcggagaatcatattctcttctgcttcatttcaccaacaagagagatcctattagttagttcttcatgtgcccctcttccccatcatgacaacagcaccttatatatattgcatttggaaatgttgaaggatgaggtttgcttggcttctgctcaaaattcagcaccgagttttaatggtttatgctccatattgaaggtgagtagttgtttatcattaacatattcttcatctttcccccctttattcaacactagcatgtcttccactccacgcatgatgagattgacaacactattaattagtatttgaaatcagtgtaaaggatatataataagtgtgcatagatttggtgacgtttaagattagaaaaataataattatatatgttattttaagttttcttagaaatattgggaaagaaaaagaacataatttctatataaatattatggtggataaacattgaagtgaactattttaattgtgtttagtcaaagaacatgacatattaagcatgtatattaatcaaaatgatgaagggtgttagtgtgagtcacattcta

SEQ ID NO: 15206 - DNA, 1083 bp, Glycine max
  Gm_smallRNAprecursor_8039
atatatatatatatatatatatatatattatgtacttctcaattctcactacttgtcgcttaccgtttaataaaggatgggtcatgggtgtattacttcttaacaagtaaattagtttaaataaagcacccattcatatatactcattttgtttaatatataatataattattaaatctctttaaaattgatcaaatttataaattagaagatcttaattattaatttttaaaatatctcaattaagtcattgttattatgattgttatcgtcttcgtcatgatgattgttgttgtaaaataggttattgccacaatccatgagtggttgggctgctacacgacgcaaaatagaagaggggttgctagatgcatataatattattgttggtgtacccaacacttaaggtgaaatgatgaaaatatccttgatccgtaaatcatttaagttgatccgtaaaagtcttatgtatcaacttgatctgtaaactttttacggatcaagttgatccgtaagacttttatgaatcaagttgattcgtattattccgtaaaatgcttacggatcaagttgatccatatcaatcttacggatcaacttgatctgtacgatttaaggaccaccctcacacacacctatcacagatgcggaaaaaaagcatggacaattttgatattttaaaaaaatgctgggtacaccagcaataatgctgggtgcacctaacaacacccaaataatagaagccactcatgtctaacacctgtcatttgcatcctcctgcctttgatattgttcacttgcgttctttttggaaaatcagtatcctatgtctggaaattctacaccctcggtgtatatagttaactgtgtataaatataataaggcttaagtatttctttttccagtaatttagtatttttttatttttattcttatatttttttcctattttaatcttcataaaaggtgtcttttttatttttttcttaaagtgttttagataataatatttttactgtttaaaacatttttttattatttaaagtgttatttaaaatatttttaaaataaaaaataatacg

SEQ ID NO: 15207 - DNA, 1139 bp, Glycine max
  Gm_smallRNAprecursor_8040
atgtcacacttcacacaatatatcattaaaaattatgcgatactcacaaaaagtaagttggttactatatccaacaccaactgctcttgtatgggaaacatgagttgcttttagcattgttcccaaagttacaatttcgatggcaactaatggcctcacatgcaacaaatttcttgaactatatttaacatcactaaacaagcttgaatattaaatcaatagacaaatatgttcattggagattttaaaaacgtgtaggttggtgtaggagtaactaacattgtagtactcaggtttttatcccccctctatattcttccctcataatgagaagaaaactttggacaataccacattttaatcccaaggtgtctcatttgggtgttgctaggtgcacccagcattattgctagtgcacccagcacttaaggtaaaatgatgaaaatatccttgatccgtaagccatttaagttgatccgtaaaagtcttacggatcaacttgatctgtagaaaccttacggatcaacttgattcgtaagccttttacggaacaatacggatcaacatgatccgtaagctttttatggatcaacttgatccgtaagacttttacggatcatgttgattcgtattgtttcgtaaaaggcttacggatcaagttgatccgtatcaatcttacggatcaacttgatctgtacgatttacagatcaccctcacacacacccatcacaaatgtgaaaaaagcgcagggacaattttgatattttaattaaatgctgagtgcacctagcaacactctttgggttaaacttgaagctaagcccattaaacacaagtaatcagtgctgtacggctaaacgcttgcattgaaattcaaggaataggtgtttataatgtcaagggctctttgtttttcagcaatatctctactgtagttgatagtgatgttgcgtctttgatgttatacattaaaattctctgactcttctgaaaatttgttgctgggaaaattgagtacgaaaatcagttatttgatgaagcacattatggggcatcaaatcacaatgcaattagaggatattttctaggcacagcatgttagcccttagcatatatgtacatgtctaggccaaaattt

SEQ ID NO: 15208 - DNA, 1079 bp, Glycine max
  Gm_smallRNAprecursor_8041
actatatccaacaccaactgctcttgtatgggaaacatgagttgcttttagcattgttcccaaagttacaatttcgatggcaactaatggcctcacatgcaacaaatttcttgaactatatttaacatcactaaacaagcttgaatattaaatcaatagacaaatatgttcattggagattttaaaaacgtgtaggttggtgtaggagtaactaacattgtagtactcaggtttttatcccccctctatattcttccctcataatgagaagaaaactttggacaataccacattttaatcccaaggtgtctcatttgggtgttgctaggtgcacccagcattattgctagtgcacccagcacttaaggtaaaatgatgaaaatatccttgatccgtaagccatttaagttgatccgtaaaagtcttacggatcaacttgatctgtagaaaccttacggatcaacttgattcgtaagccttttacggaacaatacggatcaacatgatccgtaagctttttatggatcaacttgatccgtaagacttttacggatcatgttgattcgtattgtttcgtaaaaggcttacggatcaagttgatccgtatcaatcttacggatcaacttgatctgtacgatttacagatcaccctcacacacacccatcacaaatgtgaaaaaagcgcagggacaattttgatattttaattaaatgctgagtgcacctagcaacactctttgggttaaacttgaagctaagcccattaaacacaagtaatcagtgctgtacggctaaacgcttgcattgaaattcaaggaataggtgtttataatgtcaagggctctttgtttttcagcaatatctctactgtagttgatagtgatgttgcgtctttgatgttatacattaaaattctctgactcttctgaaaatttgttgctgggaaaattgagtacgaaaatcagttatttgatgaagcacattatggggcatcaaatcacaatgcaattagaggatattttctaggcacagcatgttagcccttagcatatatgtacatgtctaggccaaaattttta

SEQ ID NO: 15209 - DNA, 1080 bp, Glycine max
  Gm_smallRNAprecursor_8042
actatatccaacaccaactgctcttgtatgggaaacatgagttgcttttagcattgttcccaaagttacaatttcgatggcaactaatggcctcacatgcaacaaatttcttgaactatatttaacatcactaaacaagcttgaatattaaatcaatagacaaatatgttcattggagattttaaaaacgtgtaggttggtgtaggagtaactaacattgtagtactcaggtttttatcccccctctatattcttccctcataatgagaagaaaactttggacaataccacattttaatcccaaggtgtctcatttgggtgttgctaggtgcacccagcattattgctagtgcacccagcacttaaggtaaaatgatgaaaatatccttgatccgtaagccatttaagttgatccgtaaaagtcttacggatcaacttgatctgtagaaaccttacggatcaacttgattcgtaagccttttacggaacaatacggatcaacatgatccgtaagctttttatggatcaacttgatccgtaagacttttacggatcatgttgattcgtattgtttcgtaaaaggcttacggatcaagttgatccgtatcaatcttacggatcaacttgatctgtacgatttacagatcaccctcacacacacccatcacaaatgtgaaaaaagcgcagggacaattttgatattttaattaaatgctgagtgcacctagcaacactctttgggttaaacttgaagctaagcccattaaacacaagtaatcagtgctgtacggctaaacgcttgcattgaaattcaaggaataggtgtttataatgtcaagggctctttgtttttcagcaatatctctactgtagttgatagtgatgttgcgtctttgatgttatacattaaaattctctgactcttctgaaaatttgttgctgggaaaattgagtacgaaaatcagttatttgatgaagcacattatggggcatcaaatcacaatgcaattagaggatattttctaggcacagcatgttagcccttagcatatatgtacatgtctaggccaaaatttttac

SEQ ID NO: 15210 - DNA, 1052 bp, Glycine max
  Gm_smallRNAprecursor_8043
atgggaaacatgagttgcttttagcattgttcccaaagttacaatttcgatggcaactaatggcctcacatgcaacaaatttcttgaactatatttaacatcactaaacaagcttgaatattaaatcaatagacaaatatgttcattggagattttaaaaacgtgtaggttggtgtaggagtaactaacattgtagtactcaggtttttatcccccctctatattcttccctcataatgagaagaaaactttggacaataccacattttaatcccaaggtgtctcatttgggtgttgctaggtgcacccagcattattgctagtgcacccagcacttaaggtaaaatgatgaaaatatccttgatccgtaagccatttaagttgatccgtaaaagtcttacggatcaacttgatctgtagaaaccttacggatcaacttgattcgtaagccttttacggaacaatacggatcaacatgatccgtaagctttttatggatcaacttgatccgtaagacttttacggatcatgttgattcgtattgtttcgtaaaaggcttacggatcaagttgatccgtatcaatcttacggatcaacttgatctgtacgatttacagatcaccctcacacacacccatcacaaatgtgaaaaaagcgcagggacaattttgatattttaattaaatgctgagtgcacctagcaacactctttgggttaaacttgaagctaagcccattaaacacaagtaatcagtgctgtacggctaaacgcttgcattgaaattcaaggaataggtgtttataatgtcaagggctctttgtttttcagcaatatctctactgtagttgatagtgatgttgcgtctttgatgttatacattaaaattctctgactcttctgaaaatttgttgctgggaaaattgagtacgaaaatcagttatttgatgaagcacattatggggcatcaaatcacaatgcaattagaggatattttctaggcacagcatgttagcccttagcatatatgtacatgtctaggccaaaattttta

SEQ ID NO: 15211 - DNA, 1053 bp, Glycine max
  Gm_smallRNAprecursor_8044
atgggaaacatgagttgcttttagcattgttcccaaagttacaatttcgatggcaactaatggcctcacatgcaacaaatttcttgaactatatttaacatcactaaacaagcttgaatattaaatcaatagacaaatatgttcattggagattttaaaaacgtgtaggttggtgtaggagtaactaacattgtagtactcaggtttttatcccccctctatattcttccctcataatgagaagaaaactttggacaataccacattttaatcccaaggtgtctcatttgggtgttgctaggtgcacccagcattattgctagtgcacccagcacttaaggtaaaatgatgaaaatatccttgatccgtaagccatttaagttgatccgtaaaagtcttacggatcaacttgatctgtagaaaccttacggatcaacttgattcgtaagccttttacggaacaatacggatcaacatgatccgtaagctttttatggatcaacttgatccgtaagacttttacggatcatgttgattcgtattgtttcgtaaaaggcttacggatcaagttgatccgtatcaatcttacggatcaacttgatctgtacgatttacagatcaccctcacacacacccatcacaaatgtgaaaaaagcgcagggacaattttgatattttaattaaatgctgagtgcacctagcaacactctttgggttaaacttgaagctaagcccattaaacacaagtaatcagtgctgtacggctaaacgcttgcattgaaattcaaggaataggtgtttataatgtcaagggctctttgtttttcagcaatatctctactgtagttgatagtgatgttgcgtctttgatgttatacattaaaattctctgactcttctgaaaatttgttgctgggaaaattgagtacgaaaatcagttatttgatgaagcacattatggggcatcaaatcacaatgcaattagaggatattttctaggcacagcatgttagcccttagcatatatgtacatgtctaggccaaaatttttac

SEQ ID NO: 15212 - DNA, 1082 bp, Glycine max
  Gm_smallRNAprecursor_8045
atgggaaacatgagttgcttttagcattgttcccaaagttacaatttcgatggcaactaatggcctcacatgcaacaaatttcttgaactatatttaacatcactaaacaagcttgaatattaaatcaatagacaaatatgttcattggagattttaaaaacgtgtaggttggtgtaggagtaactaacattgtagtactcaggtttttatcccccctctatattcttccctcataatgagaagaaaactttggacaataccacattttaatcccaaggtgtctcatttgggtgttgctaggtgcacccagcattattgctagtgcacccagcacttaaggtaaaatgatgaaaatatccttgatccgtaagccatttaagttgatccgtaaaagtcttacggatcaacttgatctgtagaaaccttacggatcaacttgattcgtaagccttttacggaacaatacggatcaacatgatccgtaagctttttatggatcaacttgatccgtaagacttttacggatcatgttgattcgtattgtttcgtaaaaggcttacggatcaagttgatccgtatcaatcttacggatcaacttgatctgtacgatttacagatcaccctcacacacacccatcacaaatgtgaaaaaagcgcagggacaattttgatattttaattaaatgctgagtgcacctagcaacactctttgggttaaacttgaagctaagcccattaaacacaagtaatcagtgctgtacggctaaacgcttgcattgaaattcaaggaataggtgtttataatgtcaagggctctttgtttttcagcaatatctctactgtagttgatagtgatgttgcgtctttgatgttatacattaaaattctctgactcttctgaaaatttgttgctgggaaaattgagtacgaaaatcagttatttgatgaagcacattatggggcatcaaatcacaatgcaattagaggatattttctaggcacagcatgttagcccttagcatatatgtacatgtctaggccaaaatttttaccaatcttaaacccctaagacacaagaact

SEQ ID NO: 15213 - DNA, 1043 bp, Glycine max
  Gm_smallRNAprecursor_8046
gcaactaatggcctcacatgcaacaaatttcttgaactatatttaacatcactaaacaagcttgaatattaaatcaatagacaaatatgttcattggagattttaaaaacgtgtaggttggtgtaggagtaactaacattgtagtactcaggtttttatcccccctctatattcttccctcataatgagaagaaaactttggacaataccacattttaatcccaaggtgtctcatttgggtgttgctaggtgcacccagcattattgctagtgcacccagcacttaaggtaaaatgatgaaaatatccttgatccgtaagccatttaagttgatccgtaaaagtcttacggatcaacttgatctgtagaaaccttacggatcaacttgattcgtaagccttttacggaacaatacggatcaacatgatccgtaagctttttatggatcaacttgatccgtaagacttttacggatcatgttgattcgtattgtttcgtaaaaggcttacggatcaagttgatccgtatcaatcttacggatcaacttgatctgtacgatttacagatcaccctcacacacacccatcacaaatgtgaaaaaagcgcagggacaattttgatattttaattaaatgctgagtgcacctagcaacactctttgggttaaacttgaagctaagcccattaaacacaagtaatcagtgctgtacggctaaacgcttgcattgaaattcaaggaataggtgtttataatgtcaagggctctttgtttttcagcaatatctctactgtagttgatagtgatgttgcgtctttgatgttatacattaaaattctctgactcttctgaaaatttgttgctgggaaaattgagtacgaaaatcagttatttgatgaagcacattatggggcatcaaatcacaatgcaattagaggatattttctaggcacagcatgttagcccttagcatatatgtacatgtctaggccaaaatttttaccaatcttaaacccctaagacacaagaactaggtgaatattta

SEQ ID NO: 15214 - DNA, 1083 bp, Glycine max
  Gm_smallRNAprecursor_8047
tcatctaaagtttcacggaaaaaacagctccacaaattactcattaattaccttttattcttcagttgagagaaatttttatttcgaataaatcacaaaaacttgatgcatcccctctactcattatttttaatttgattagataactttagaaaattaattctactaaataatggattcccaatcatgtccatgtggtaagattaaacagtgataatgcgactaattgcgatgtccttttgttttttatttccggtccgtaactaattggaatgtttcaactacagataaccccagattagtaggtgggccaaaatttcatttgggtccccaaccaacgcataccattcattcatgagtgttgttagatgcacctaacattattgttggtacacccaacatttaaggtgaaatgacaaaaatatatttgatccgtaagtcatttaagttgatccgtaaaagtcttacgaatcaacttgatccgtaagttttttatggatcaacttgatccgtaagctttttacggatcaagttgatccataaaactttcatggatcaagttggttcgtattatttcataaaaggcttacagatcaagttgatccgtatcaaccttccagatcaacttgatccgtatgatttatggaccaccctcacacacacccatcacaaatgcgaaaaaagtgcaatgacatttttggtattttaagaaaatgctgggtgcacctagcaacaccctatttttttcttctgcacaaaaccgcggaagtaggactattgggtcttggtaaagctataaaataataacaattgttatatacacatccatttattactaatatacctcatgttgcatttatattttcaaaaggcaatttctattttcactattcctctttactagtacactctccttttttcttcctaaaataccctattaaaaagtaaatgtacactcctttctccttcatctctctctctctcactttctttagcaaaacgcacactccccttatctggaattgcatcataactccaacaaatgtctttctatttgagttttattctctcctatctttctca

SEQ ID NO: 15215 - DNA, 1044 bp, Glycine max
  Gm_smallRNAprecursor_8048
acataatactgcatgggggagcaaaaaaagaaaaaaaaaaaagaggttattacagaacctgttaaagtaagagatctgaaaatttcagacccaggttggaattcatgcgccactttcccaagttgaacaacccctgaagtgggagagagacaaagagtgatttttctctggattccaagtgagtgaaaaacttgcgatgaaaaagcagtgcgagatttatcaagacctaccatatctctagcaccagtggctaaaccattcaaaagaccaattttacaggcataatttataaaaagatttataaaactgagggactaaatgtgtgaattaaactataggggaatcaaaatcgaaattggagtaaaactgagggaccaaaaatgtaattttacctacaaaaaaatgaagcatttacaggaaaccactcaaacgttgacacgtagcattgacacgtgacattgacacgtgatagtcacacataacattgacacgtgacagtcaacgtctgaggttaacggtcaatattcaaattgagcttccaggaccaattttgcagggatttataaaattgaggatcaaatttatgaattaaattatagggagaccaaatccataattaaagataaaatgagggaccaattttccaatttggcctaataaaatcttcactgtttcaatcgccacatacgacaattgatatggataatgatgttataattttaatttcgtactaatgtaaaagtaattaatgctatcactcaataatctaatatttttaaataatgttaacgtttatcttgtgtttcgaaatatgtgcatggaataataatgataatgagcagagcaacaacagcgagaacagtaggcacaactaaggtgattgtagttcgcaaagagttgttctttcctgcaaaaaccagaatatctttttctcgatgagacatttttaaataggataataaaatatcaataattcaaataattaattactgagggaaaaaagccaacataagaataaggaaagctaaacctaacagagaagaa

SEQ ID NO: 15216 - DNA, 1140 bp, Glycine max
  Gm_smallRNAprecursor_8049
tttatgttataaattgattcatatataatttagagagactaaaaatatgtttaaccatttttaaaaaagacaaaccttaatcaatataggtagcattaaaaaatttattaagaaaaggagtattctgacgataacctattattttgattagaataatttatacattattattctaattattttagccccttcaaattaatttttgaagctcagcagcgactgattagtagaacaattgatttgatgtagtacaggattccagtacatgaagccagtacaacctcaacgggttgtgtgggtgttgttttttgttaagcaaaacggtactaccaatcaacgcagcttggtgtactacatcgagtgcattttccacaatagtcaaatatcaatcaatgtataataaataataatatattgcatgtaacagatctaccaatcccagccaatataatggttgcatctcattgaggcaagtcatgaatcccctagttggctgcagcaagttgtgatgagaatcaatggcaagcagtgacaccaagaaaaaaaaatcccattataaacattttttcccctcaatcttcttctcatagtatatcattaggctaactggtgttgaaggatataaatccacaactgccattgattctcatcacaacatggtccagtctacccgggaacccacattggtactgttttgatacatcctctttccttaagcctaagaacaaaactcaaatgaagtgaattaaacaatgcagaggacttggggttgaaacaggtttgttttttttgtttttatggataaatgttaattgttaatttttgttaagtgggattcaaactctccatctattattcaccctttaacaccaagtcaaacttgtatctccatattgaactaggtactgctttcattctcctttgtatatcagaagttgctgcctggcttggctcaaacaaaaaaagaagagcaaactcggcaccaaagaataacttttgcagttcatacatttggttgacttacaagtatttggtgtaattctcatttttgttgttgttgtgttgtgttaggaaggtcagagaaattgcattgcaggaatcactgaaagagcaagttagaaatgtttgctggtgttatgt

SEQ ID NO: 15217 - DNA, 1036 bp, Glycine max
  Gm_smallRNAprecursor_8050
tgtgattagataataatataaaaattattttatatcattaaactctttttaaaattaataaataaattaaacttaatccaactcactttaactcatgggccagtgcctgagctttcattgccttcctcggctcatactgaatatcatattctgataattcaatagctcataccatcattcttgctgccaactcaggtttatggatcggttcttaccacaatcttgttggatatcttaactctgcaccttgttgcaaagctctgcttgtaaaaaagtacacttgcttttgatcttcaggggggcatgggaatttaatggttcaggttgagccacacagaaatgaccatggactatacaccttccacaacacaaggacctcaaccatgtcttgtccccaagtttgagaatgacatctctccacatcaatatatctccttcttcaaaaaggaaaagtggcttcattaatagttctcatctatgaaacacggacactccagccccttgtcgtgtccggtgtccgatatgcgtccgtgtcagtgtccgacaccgacacgacacccgtactatgttctatattttggacattacatgtattcacgtgttcgtgttggtgtcgtgtcgggtgtccgtatcggtgtcggtgtttcataggttctcatttatccatagttctcaacacatttctgcataccattattggtatacactacattgaataattctcaaagtcattttttttaaaaaaaaattgtaacctactgtttacgctaggtagggaggcaccgaaaaagaactttgctttttgcgaaatgggatgagagcaatagctaaatatgatggtgactattaagcattaagtccatttaccaactttgcaccctacttggttttgtgacaaatctatatacatatatatatattttgagaaggacaatatagatattaactttcttgaaaacgatatgggttgaattatgcaactttaattttgaaggatatatgcacatggcattgcgttgaccgtgttgttaggttt

SEQ ID NO: 15218 - DNA, 1037 bp, Glycine max
  Gm_smallRNAprecursor_8051
tgtgattagataataatataaaaattattttatatcattaaactctttttaaaattaataaataaattaaacttaatccaactcactttaactcatgggccagtgcctgagctttcattgccttcctcggctcatactgaatatcatattctgataattcaatagctcataccatcattcttgctgccaactcaggtttatggatcggttcttaccacaatcttgttggatatcttaactctgcaccttgttgcaaagctctgcttgtaaaaaagtacacttgcttttgatcttcaggggggcatgggaatttaatggttcaggttgagccacacagaaatgaccatggactatacaccttccacaacacaaggacctcaaccatgtcttgtccccaagtttgagaatgacatctctccacatcaatatatctccttcttcaaaaaggaaaagtggcttcattaatagttctcatctatgaaacacggacactccagccccttgtcgtgtccggtgtccgatatgcgtccgtgtcagtgtccgacaccgacacgacacccgtactatgttctatattttggacattacatgtattcacgtgttcgtgttggtgtcgtgtcgggtgtccgtatcggtgtcggtgtttcataggttctcatttatccatagttctcaacacatttctgcataccattattggtatacactacattgaataattctcaaagtcattttttttaaaaaaaaattgtaacctactgtttacgctaggtagggaggcaccgaaaaagaactttgctttttgcgaaatgggatgagagcaatagctaaatatgatggtgactattaagcattaagtccatttaccaactttgcaccctacttggttttgtgacaaatctatatacatatatatatattttgagaaggacaatatagatattaactttcttgaaaacgatatgggttgaattatgcaactttaattttgaaggatatatgcacatggcattgcgttgaccgtgttgttaggtttt

SEQ ID NO: 15219 - DNA, 1038 bp, Glycine max
  Gm_smallRNAprecursor_8052
tgtgattagataataatataaaaattattttatatcattaaactctttttaaaattaataaataaattaaacttaatccaactcactttaactcatgggccagtgcctgagctttcattgccttcctcggctcatactgaatatcatattctgataattcaatagctcataccatcattcttgctgccaactcaggtttatggatcggttcttaccacaatcttgttggatatcttaactctgcaccttgttgcaaagctctgcttgtaaaaaagtacacttgcttttgatcttcaggggggcatgggaatttaatggttcaggttgagccacacagaaatgaccatggactatacaccttccacaacacaaggacctcaaccatgtcttgtccccaagtttgagaatgacatctctccacatcaatatatctccttcttcaaaaaggaaaagtggcttcattaatagttctcatctatgaaacacggacactccagccccttgtcgtgtccggtgtccgatatgcgtccgtgtcagtgtccgacaccgacacgacacccgtactatgttctatattttggacattacatgtattcacgtgttcgtgttggtgtcgtgtcgggtgtccgtatcggtgtcggtgtttcataggttctcatttatccatagttctcaacacatttctgcataccattattggtatacactacattgaataattctcaaagtcattttttttaaaaaaaaattgtaacctactgtttacgctaggtagggaggcaccgaaaaagaactttgctttttgcgaaatgggatgagagcaatagctaaatatgatggtgactattaagcattaagtccatttaccaactttgcaccctacttggttttgtgacaaatctatatacatatatatatattttgagaaggacaatatagatattaactttcttgaaaacgatatgggttgaattatgcaactttaattttgaaggatatatgcacatggcattgcgttgaccgtgttgttaggttttc

SEQ ID NO: 15220 - DNA, 1054 bp, Glycine max
  Gm_smallRNAprecursor_8053
atcacttttgataaattatttattttaaaaatttcattccgatcctttataattttaaaatatatcattttaattattttttaatttttttaaaatttaaagttaatagaacattaaaatttctaacagattttttaaaaaaataaaaataatacatttcaaaaacataaaaaactaaaataaaaatcttaaaatttaatatactaatatgctacaacccgagatataatggacctaattattaaaataaataatcttattttctgaggtcaaacacaattcacagggaacccaaaaccctccatcgttacatgctggtgcgctgaagctgagatcgccgcaaaaccaactttgttctctcccacataaacaaaccaaacacaacaatattcgactcgattcgattacgtacgttgctgtcgatatacaaccagcacaacaatgtcatccaaacaaattggaattgaatcagaccttgtttctttgagcatcctcatcaataagagaattgtaagtcactgtattaattaggaactgttgattagatgcatgatacagtgacttacaattctcttattaatgatttgtgcaaatcggaaaaaagatcagatatcttgagatcttattgatgagatgcatgataaaggtgaacctatcaatataatcaagtcacctatagttccttaattaatagacttgagaatgcacaacaggttttgatcatctattttcttatatacctattttctttcaattttagtggtggagtaaggagtaacctgtcatgtacggttttcatataacttgtcctaaagttttacagaaattaattaaattgctaaactttgttggtgccatgtcgcagcgcgcaatcaccttaccttttaaattgattagctaaaatttaatgcacaatgccactagattgaatttgcatgactggtctactatgatttatttctttttttcctttgtttcttgtttttttatacagtgaggaataatttcaaaactacactcatattttattgtcatcacagagtttcctcacgtt

SEQ ID NO: 15221 - DNA, 1044 bp, Glycine max
  Gm_smallRNAprecursor_8054
cccaacgtttcccctcatcaaagcattgtacccatttttgtttgggtaattgatcaagccattcagctgcacttggcttattcgcacggatatccccaagatgtcgccagtgcatcttctccgtgtatgcgtacccagtaaatatttaatcaatgtattatgttataaaatttgattgaaagaaaattataacgaataaataaaatagattctcaccagccaacataagtggtttctttaaatgtttgcagtttgagttaccacgaagaaagttttgtgcaatgtggcgcaggcaaaagaaatgggatgtgtcctggacccataagttacttgagttgttgtaggcacttataattgaggggtgtcggtctgaaataagagacatgttaatttgcggagtaacatgtcttctcaaattctttagaaaaaacccccaagctgaagttgtctccccttctacaatggcataggcaatcgggaatatatggttagctccatcttgtacggtagcaatcaacagtgtgccagtatactttccgtaaagccatgtaccatctacttgtacaatgggtttgcaatatgcaaaaccattaatgcatggaccaaatgaccaaaagacacgtttaaacaattttttgtccggtactatttctcccccctcatacaaggattctgtttgagcagcgaccacagtcccgggaacacaagattgcaaagctccaaaaagttttgacagtttgacatatgattcttcccagtttccatgaatcatctccaatgctttttgctttgctaaccatgtcttcttgtaggatggggtataattcatgaatgttttgatctctgcaatcaatgtcttgatagagacagttgggtttgttttgacaattggttggatgatctgtgctatgacgtgtttgtcgagttgtcgatgatcttgtctgagcatcggcacgagacaagtgtgatgacctatgatactcttgataatccatttgttatgcctctttgaattgcatgcgcccaagctccatgtacaaccat

SEQ ID NO: 15222 - DNA, 1190 bp, Glycine max
  Gm_smallRNAprecursor_8055
atttgagtcaggacaacgttatatgtacacatcttttattctgcgagatgatgctgatgttcgacaaatgttcaacattttttacaacaacccatcactaccatttgtggagttatttgccataatctgtcacaataatgacacaccaggcaaccaacatggctcaacctctaatcttgaggacttatcaggtgaatacgagacttgttggctcaaaaaccatgatagtgatacagactcctcttccgggcccgaaggaagtaacctgtctccatcccacgaacctatattcaaacaggattggtaatttatggatcattcatgtctaagttatttcttctttgagattttcatttaaaaattcaatgtctcatcaacaaaactgacatgaaatggacaactcataatctctttattcactctgaaaataactatggacgtttgttactttaattacaagggaaaaatcacaatccaaattgacaatactctacaatttgcacacgtctctaaaaattaaatgtctcacctgcaaaactgtcatgaaatggacagcccatcatctctttattcactctgaaaatcatcatgaacgtctgttgctttaattacatgggaaaaatcacagtccaaattaacagcactctgcattatgagctgttcatttcatgtcagttttacaggtgatacatttaatttttagagacgtgtgcaaaactgacatgaaatggacaactcataatctctttgttcaatctgaaattataatggacgtctgctacatcacttactagggaaaaagaaacattggattccaatacacatcaacgtggcagaatactcatacaactataaataacacaacacaaacacaatacaaacacacaatctcacacaacataatttcacaaaccaaattcaatcttattactatgtcatttttgggagaaacaagcagtcagaccattactaactccaaattagctttcatttttccaaatggatcaatcagttacaatcaaactggtttttattttcaaagtctcattccaacaccaatgcgagttcctaacaattgttcttttgatacactcaagcgtagaatgcacaacacccttcaactaaccaacgatcaattactggatgaaatctactaccgacaaccattcatatatgtggaagcaaagctt

SEQ ID NO: 15223 - DNA, 1064 bp, Glycine max
  Gm_smallRNAprecursor_8056
gtgcatcacgtagtagccacattcagtgattcctttttgtctattacactaaatacataatgaaatttggatattaattaaacgttaactacaattagtgtacacacacataaaatatatataagtagaacttttatttaaatcacgtaccttaacaacaatccacctagcagcagccttagatttcggttgtggagtatcatcaaatcctttcaaagcactagtgttgaatataaggaacattaaaatattgatgttgttgagttattccaatgaaaatgtattgaaaacaatactgacctgttaattattcccttaaggtagttgtctggcctgttatgcaaagaacaaaaccagacaactaggttttccttaggtagaatgacgaccatttgtcagtgtccactgcagtagagacgaatatagtttattgtagtagtatagattatttaaattcaattattgtgtttgacttacctattcagataggctccaaggtaaacatctcattttgaactctgtatccaactcttgatgtaactttcggattcaaattgtgattgcccagatctctgaatggactgtggctcgaggaatccatacacatcagaattccccgctcgcacacttgtctcagtcagatggctgtgttgttaagtcaaagttaattatgtatgaatttaaaacaattactttggtaattaatagtaatctaaaatgacttacagaatccacaactgtataacagatatgctgagacattgaccaccatgtgcaatttcagagagatcttcgtgctttatatacaacgggaagttttgattaaacaccccgaatatggtagcatcccacataacctggagcggcttcaaaaacagttgtgggatgatcaatgtcattaggtacaggggatcatcgacctcttcatccgggctttctggaggttttgctggagacacaactgcctattgataaaacatagttaattaacaagttttgattacagtgaacaaattaattgaaaaaaaataaacatataatcagagtaaaatacctgttctgat

SEQ ID NO: 15224 - DNA, 1036 bp, Glycine max
  Gm_smallRNAprecursor_8057
tttggatattaattaaacgttaactacaattagtgtacacacacataaaatatatataagtagaacttttatttaaatcacgtaccttaacaacaatccacctagcagcagccttagatttcggttgtggagtatcatcaaatcctttcaaagcactagtgttgaatataaggaacattaaaatattgatgttgttgagttattccaatgaaaatgtattgaaaacaatactgacctgttaattattcccttaaggtagttgtctggcctgttatgcaaagaacaaaaccagacaactaggttttccttaggtagaatgacgaccatttgtcagtgtccactgcagtagagacgaatatagtttattgtagtagtatagattatttaaattcaattattgtgtttgacttacctattcagataggctccaaggtaaacatctcattttgaactctgtatccaactcttgatgtaactttcggattcaaattgtgattgcccagatctctgaatggactgtggctcgaggaatccatacacatcagaattccccgctcgcacacttgtctcagtcagatggctgtgttgttaagtcaaagttaattatgtatgaatttaaaacaattactttggtaattaatagtaatctaaaatgacttacagaatccacaactgtataacagatatgctgagacattgaccaccatgtgcaatttcagagagatcttcgtgctttatatacaacgggaagttttgattaaacaccccgaatatggtagcatcccacataacctggagcggcttcaaaaacagttgtgggatgatcaatgtcattaggtacaggggatcatcgacctcttcatccgggctttctggaggttttgctggagacacaactgcctattgataaaacatagttaattaacaagttttgattacagtgaacaaattaattgaaaaaaaataaacatataatcagagtaaaatacctgttctgataaacgcttcacaagatgtgttagccaaacaaggaaag

SEQ ID NO: 15225 - DNA, 1053 bp, Glycine max
  Gm_smallRNAprecursor_8058
ctgagggagcaacacaactctcctttgtgctgacacgaggacctgagggaccaacctctggctctggaggtagtgcaattccctatgattgcatctgagactgaaactgcgactgcatctggctaaaggattccatcatttttcgagtcactttttctgtgattgactcctccagttggtctctgatttgttgggtcagctgttctaggtctttaggaggcatggaggaagaactgcgggatgttcgtgaagctgatccaaagtattggtttatggtgacactggctccaacagcacgaacacggccagggtgctctggtcgcccaatggcagtagtcaggatatcctgacgtccatgggggacaaacgatccctttgacgcctgctcgtccaaagaatcctgtaccgaacacatatttgtccaaagaattcacaaaatacacaaagataattacaattattaattaaaaatgacttacaatcctgtcagctatttcctttgctgcctcagacgtcatctgtccaattttcttcgtgcgggccatcttccatttcacgtggcgtctgatgggagatggagggtcaatgatgccctcagtgcttccagactgggaagcttcttccagtcttttctttgtcttctcagccatgaacttttcttctaaatattcataacccccacgagacaatacgtggggggcagtgttttgcttctgggaggcctgtgcctttttccgtacatcctgcaaaagtttaacattaatgaaaatgattattacaataaattataagaagtgattttgttgtggaaaacaactaaaatgacaaagtacatacctcccatgaggggtctctgcgggtctgacaaaactgagtccatttctccttgctaatgccatatttttcacagacaatgtcgtccgcaccgtccttgtcgactgcaagtgcccatttcctagtcaagtcagatttaaactgcctccagcgctcgccgacaatctgaagaattttcttctttgtcctattatcagaagcttcagggatttgaaattc

SEQ ID NO: 15226 - DNA, 1109 bp, Glycine max
  Gm_smallRNAprecursor_8059
atgttacatagaaagagccgttccactttccggagttaaggttgatgaaacgtcggaggttgtcgatgctcatagcggcttcttcaacggttggggaggaagaggaggctctgattctgattctggtgagggaagaagaaaaggaagaagagaaagtaatagagtttggtttaagtgaaagaaagtgaatggtgttagtgttagtgttagtgttgagaagggaaggaacccaaactgaacactgaatagaagaagaagaagaagaagaagccattgttgtgttgagtctcttctcagaatctcaggtgccaccaaaattcagtttacgctaacgtatcttatctctctctcgagtaactctcatgtcttgttgggtgttgctaggtgcacccagcattattgttggtgcatccagcacttaaactgaaataacgaaaatactcttaattcgtaagtcatttaaattgacccgtaaaaagtttacggatcaacttgatccgtaagtcttttatggatcaacttgatccgtaagtcttttacggatcaagttgatccgtaaggcttctatggatcaagttgatctatattttccgtaaaaggcttacggatcaagttgatccgtaagccttttacgaatcaacttgatctgtatcaaccttatggatcaacttgatccgtacaatttacggaccaccctcacacacacccatcacaaaagcgaaaaaagcgcagagatagttttgatattttaaaaaaatgctgggtgcacctagcaactccctgtcttgtttgctaaatgcattggactggactggtttgaggatagtaggtatttttggagttacaatctacactccccttctttttaatacactcctcccccttttttcccaaaataccctttgcttaaataaaaactatgcactctctctttttgtttcaaacattaagtaaaaaatgataataaaaaaaatttgtctcaaacaataggacaacaatctaatgaggaccatttgaatcactttaaaaacataaaacactatattgaacttttttaagaaaaaaaataaggaaacaaattgaatataaccaaggtactaaaagtgcat

SEQ ID NO: 15227 - DNA, 1162 bp, Glycine max
  Gm_smallRNAprecursor_8060
aaaatagtttcataaaaaaatcattgatcacgaaggatttatattggttcactcaacctaggttacgtccaatctcacaattgtaggctttttgtaacaccctaaggagtattaatcttgtaattttacttataacatcaaagaataggataatgaactgccatatatatatatatatatatatatataggaagtaagaatgtactatgataaatggaaatgagagtataagcttgtaaaatagatatcaagggcacaccggagaccggtttacaaatcccaggttttcataaacaaagaaaccgaagaggcggcagagctgcacaggatcggtaaagagagagaagagggatgaaaaatatatatttattgaaacttgaaagaagcgcttacaaaaatcttgtttcagagaacctctcttcagaaacctcaaaaatggccaaatgaaagggtgccttacaacatacttgaggactccttatatagccaaaaatctaagactggtagttgccggtagttttgaccgggactatttgactatttgttacaagacgagtagttttgaccgggactttaatggctacaggacaggtagtattgtccagcattaattacacattaattacaaacagatggttttgtgatcgaaattaaatttaatctaaacagataccaaaacaatcatcttcgttttggtaaaaggggtcttcttcttcttcttcagcagaacttgtttcttccttctttgaggatgaaccttcttcttcctactgtaacatttgcagaacttcctttatatttttagttaggacctcctttgatttcgatcttgctaaaaatgttgccagatgagacttttggttcaaaaacacagaagtttctggatcagctgctttgaggaattctggatgggattggaaccagagttttacttgttctagatctactttggatgagtcaaattgtgtccaccattttacaaatacgtgtctttgtagtgatggatattgatttttcttttcagtcttgctgtaacgatactgccatgagaagatccatgacagtgcaaagcttgaaaagtatttaagatatgttggaattcgtgattcctgcgaattgtattatctctcaaattaagcaaatccttgttggactgtttatg

SEQ ID NO: 15228 - DNA, 1061 bp, Glycine max
  Gm_smallRNAprecursor_8061
catatatatatatatatatatatatataggaagtaagaatgtactatgataaatggaaatgagagtataagcttgtaaaatagatatcaagggcacaccggagaccggtttacaaatcccaggttttcataaacaaagaaaccgaagaggcggcagagctgcacaggatcggtaaagagagagaagagggatgaaaaatatatatttattgaaacttgaaagaagcgcttacaaaaatcttgtttcagagaacctctcttcagaaacctcaaaaatggccaaatgaaagggtgccttacaacatacttgaggactccttatatagccaaaaatctaagactggtagttgccggtagttttgaccgggactatttgactatttgttacaagacgagtagttttgaccgggactttaatggctacaggacaggtagtattgtccagcattaattacacattaattacaaacagatggttttgtgatcgaaattaaatttaatctaaacagataccaaaacaatcatcttcgttttggtaaaaggggtcttcttcttcttcttcagcagaacttgtttcttccttctttgaggatgaaccttcttcttcctactgtaacatttgcagaacttcctttatatttttagttaggacctcctttgatttcgatcttgctaaaaatgttgccagatgagacttttggttcaaaaacacagaagtttctggatcagctgctttgaggaattctggatgggattggaaccagagttttacttgttctagatctactttggatgagtcaaattgtgtccaccattttacaaatacgtgtctttgtagtgatggatattgatttttcttttcagtcttgctgtaacgatactgccatgagaagatccatgacagtgcaaagcttgaaaagtatttaagatatgttggaattcgtgattcctgcgaattgtattatctctcaaattaagcaaatccttgttggactgtttatgggaatatctctggaattggtccaaagaagtcccaccattgcaaaaaccattggggaaatc

SEQ ID NO: 15229 - DNA, 1063 bp, Glycine max
  Gm_smallRNAprecursor_8062
catatatatatatatatatatatatataggaagtaagaatgtactatgataaatggaaatgagagtataagcttgtaaaatagatatcaagggcacaccggagaccggtttacaaatcccaggttttcataaacaaagaaaccgaagaggcggcagagctgcacaggatcggtaaagagagagaagagggatgaaaaatatatatttattgaaacttgaaagaagcgcttacaaaaatcttgtttcagagaacctctcttcagaaacctcaaaaatggccaaatgaaagggtgccttacaacatacttgaggactccttatatagccaaaaatctaagactggtagttgccggtagttttgaccgggactatttgactatttgttacaagacgagtagttttgaccgggactttaatggctacaggacaggtagtattgtccagcattaattacacattaattacaaacagatggttttgtgatcgaaattaaatttaatctaaacagataccaaaacaatcatcttcgttttggtaaaaggggtcttcttcttcttcttcagcagaacttgtttcttccttctttgaggatgaaccttcttcttcctactgtaacatttgcagaacttcctttatatttttagttaggacctcctttgatttcgatcttgctaaaaatgttgccagatgagacttttggttcaaaaacacagaagtttctggatcagctgctttgaggaattctggatgggattggaaccagagttttacttgttctagatctactttggatgagtcaaattgtgtccaccattttacaaatacgtgtctttgtagtgatggatattgatttttcttttcagtcttgctgtaacgatactgccatgagaagatccatgacagtgcaaagcttgaaaagtatttaagatatgttggaattcgtgattcctgcgaattgtattatctctcaaattaagcaaatccttgttggactgtttatgggaatatctctggaattggtccaaagaagtcccaccattgcaaaaaccattggggaaatcgt

SEQ ID NO: 15230 - DNA, 1063 bp, Glycine max; identical to SEQ ID NO: 15229
  Gm_smallRNAprecursor_8063

SEQ ID NO: 15231 - DNA, 1064 bp, Glycine max
  Gm_smallRNAprecursor_8064
catatatatatatatatatatatatataggaagtaagaatgtactatgataaatggaaatgagagtataagcttgtaaaatagatatcaagggcacaccggagaccggtttacaaatcccaggttttcataaacaaagaaaccgaagaggcggcagagctgcacaggatcggtaaagagagagaagagggatgaaaaatatatatttattgaaacttgaaagaagcgcttacaaaaatcttgtttcagagaacctctcttcagaaacctcaaaaatggccaaatgaaagggtgccttacaacatacttgaggactccttatatagccaaaaatctaagactggtagttgccggtagttttgaccgggactatttgactatttgttacaagacgagtagttttgaccgggactttaatggctacaggacaggtagtattgtccagcattaattacacattaattacaaacagatggttttgtgatcgaaattaaatttaatctaaacagataccaaaacaatcatcttcgttttggtaaaaggggtcttcttcttcttcttcagcagaacttgtttcttccttctttgaggatgaaccttcttcttcctactgtaacatttgcagaacttcctttatatttttagttaggacctcctttgatttcgatcttgctaaaaatgttgccagatgagacttttggttcaaaaacacagaagtttctggatcagctgctttgaggaattctggatgggattggaaccagagttttacttgttctagatctactttggatgagtcaaattgtgtccaccattttacaaatacgtgtctttgtagtgatggatattgatttttcttttcagtcttgctgtaacgatactgccatgagaagatccatgacagtgcaaagcttgaaaagtatttaagatatgttggaattcgtgattcctgcgaattgtattatctctcaaattaagcaaatccttgttggactgtttatgggaatatctctggaattggtccaaagaagtcccaccattgcaaaaaccattggggaaatcgta

SEQ ID NO: 15232 - DNA, 1057 bp, Glycine max
  Gm_smallRNAprecursor_8065
atatatatatatatatatatatataggaagtaagaatgtactatgataaatggaaatgagagtataagcttgtaaaatagatatcaagggcacaccggagaccggtttacaaatcccaggttttcataaacaaagaaaccgaagaggcggcagagctgcacaggatcggtaaagagagagaagagggatgaaaaatatatatttattgaaacttgaaagaagcgcttacaaaaatcttgtttcagagaacctctcttcagaaacctcaaaaatggccaaatgaaagggtgccttacaacatacttgaggactccttatatagccaaaaatctaagactggtagttgccggtagttttgaccgggactatttgactatttgttacaagacgagtagttttgaccgggactttaatggctacaggacaggtagtattgtccagcattaattacacattaattacaaacagatggttttgtgatcgaaattaaatttaatctaaacagataccaaaacaatcatcttcgttttggtaaaaggggtcttcttcttcttcttcagcagaacttgtttcttccttctttgaggatgaaccttcttcttcctactgtaacatttgcagaacttcctttatatttttagttaggacctcctttgatttcgatcttgctaaaaatgttgccagatgagacttttggttcaaaaacacagaagtttctggatcagctgctttgaggaattctggatgggattggaaccagagttttacttgttctagatctactttggatgagtcaaattgtgtccaccattttacaaatacgtgtctttgtagtgatggatattgatttttcttttcagtcttgctgtaacgatactgccatgagaagatccatgacagtgcaaagcttgaaaagtatttaagatatgttggaattcgtgattcctgcgaattgtattatctctcaaattaagcaaatccttgttggactgtttatgggaatatctctggaattggtccaaagaagtcccaccattgcaaaaaccattggggaaat

SEQ ID NO: 15233 - DNA, 1058 bp, Glycine max
  Gm_smallRNAprecursor_8066
atatatatatatatatatatatataggaagtaagaatgtactatgataaatggaaatgagagtataagcttgtaaaatagatatcaagggcacaccggagaccggtttacaaatcccaggttttcataaacaaagaaaccgaagaggcggcagagctgcacaggatcggtaaagagagagaagagggatgaaaaatatatatttattgaaacttgaaagaagcgcttacaaaaatcttgtttcagagaacctctcttcagaaacctcaaaaatggccaaatgaaagggtgccttacaacatacttgaggactccttatatagccaaaaatctaagactggtagttgccggtagttttgaccgggactatttgactatttgttacaagacgagtagttttgaccgggactttaatggctacaggacaggtagtattgtccagcattaattacacattaattacaaacagatggttttgtgatcgaaattaaatttaatctaaacagataccaaaacaatcatcttcgttttggtaaaaggggtcttcttcttcttcttcagcagaacttgtttcttccttctttgaggatgaaccttcttcttcctactgtaacatttgcagaacttcctttatatttttagttaggacctcctttgatttcgatcttgctaaaaatgttgccagatgagacttttggttcaaaaacacagaagtttctggatcagctgctttgaggaattctggatgggattggaaccagagttttacttgttctagatctactttggatgagtcaaattgtgtccaccattttacaaatacgtgtctttgtagtgatggatattgatttttcttttcagtcttgctgtaacgatactgccatgagaagatccatgacagtgcaaagcttgaaaagtatttaagatatgttggaattcgtgattcctgcgaattgtattatctctcaaattaagcaaatccttgttggactgtttatgggaatatctctggaattggtccaaagaagtcccaccattgcaaaaaccattggggaaatc

SEQ ID NO: 15234 - DNA, 1056 bp, Glycine max
  Gm_smallRNAprecursor_8067
tatatatatatatatatatatataggaagtaagaatgtactatgataaatggaaatgagagtataagcttgtaaaatagatatcaagggcacaccggagaccggtttacaaatcccaggttttcataaacaaagaaaccgaagaggcggcagagctgcacaggatcggtaaagagagagaagagggatgaaaaatatatatttattgaaacttgaaagaagcgcttacaaaaatcttgtttcagagaacctctcttcagaaacctcaaaaatggccaaatgaaagggtgccttacaacatacttgaggactccttatatagccaaaaatctaagactggtagttgccggtagttttgaccgggactatttgactatttgttacaagacgagtagttttgaccgggactttaatggctacaggacaggtagtattgtccagcattaattacacattaattacaaacagatggttttgtgatcgaaattaaatttaatctaaacagataccaaaacaatcatcttcgttttggtaaaaggggtcttcttcttcttcttcagcagaacttgtttcttccttctttgaggatgaaccttcttcttcctactgtaacatttgcagaacttcctttatatttttagttaggacctcctttgatttcgatcttgctaaaaatgttgccagatgagacttttggttcaaaaacacagaagtttctggatcagctgctttgaggaattctggatgggattggaaccagagttttacttgttctagatctactttggatgagtcaaattgtgtccaccattttacaaatacgtgtctttgtagtgatggatattgatttttcttttcagtcttgctgtaacgatactgccatgagaagatccatgacagtgcaaagcttgaaaagtatttaagatatgttggaattcgtgattcctgcgaattgtattatctctcaaattaagcaaatccttgttggactgtttatgggaatatctctggaattggtccaaagaagtcccaccattgcaaaaaccattggggaaat

SEQ ID NO: 15235 - DNA, 1056 bp, Glycine max; identical to SEQ ID NO: 15234
  Gm_smallRNAprecursor_8068

SEQ ID NO: 15236 - DNA, 1057 bp, Glycine max
  Gm_smallRNAprecursor_8069
tatatatatatatatatatatataggaagtaagaatgtactatgataaatggaaatgagagtataagcttgtaaaatagatatcaagggcacaccggagaccggtttacaaatcccaggttttcataaacaaagaaaccgaagaggcggcagagctgcacaggatcggtaaagagagagaagagggatgaaaaatatatatttattgaaacttgaaagaagcgcttacaaaaatcttgtttcagagaacctctcttcagaaacctcaaaaatggccaaatgaaagggtgccttacaacatacttgaggactccttatatagccaaaaatctaagactggtagttgccggtagttttgaccgggactatttgactatttgttacaagacgagtagttttgaccgggactttaatggctacaggacaggtagtattgtccagcattaattacacattaattacaaacagatggttttgtgatcgaaattaaatttaatctaaacagataccaaaacaatcatcttcgttttggtaaaaggggtcttcttcttcttcttcagcagaacttgtttcttccttctttgaggatgaaccttcttcttcctactgtaacatttgcagaacttcctttatatttttagttaggacctcctttgatttcgatcttgctaaaaatgttgccagatgagacttttggttcaaaaacacagaagtttctggatcagctgctttgaggaattctggatgggattggaaccagagttttacttgttctagatctactttggatgagtcaaattgtgtccaccattttacaaatacgtgtctttgtagtgatggatattgatttttcttttcagtcttgctgtaacgatactgccatgagaagatccatgacagtgcaaagcttgaaaagtatttaagatatgttggaattcgtgattcctgcgaattgtattatctctcaaattaagcaaatccttgttggactgtttatgggaatatctctggaattggtccaaagaagtcccaccattgcaaaaaccattggggaaatc

SEQ ID NO: 15237 - DNA, 1059 bp, Glycine max
  Gm_smallRNAprecursor_8070
tatatatatatatatatatatataggaagtaagaatgtactatgataaatggaaatgagagtataagcttgtaaaatagatatcaagggcacaccggagaccggtttacaaatcccaggttttcataaacaaagaaaccgaagaggcggcagagctgcacaggatcggtaaagagagagaagagggatgaaaaatatatatttattgaaacttgaaagaagcgcttacaaaaatcttgtttcagagaacctctcttcagaaacctcaaaaatggccaaatgaaagggtgccttacaacatacttgaggactccttatatagccaaaaatctaagactggtagttgccggtagttttgaccgggactatttgactatttgttacaagacgagtagttttgaccgggactttaatggctacaggacaggtagtattgtccagcattaattacacattaattacaaacagatggttttgtgatcgaaattaaatttaatctaaacagataccaaaacaatcatcttcgttttggtaaaaggggtcttcttcttcttcttcagcagaacttgtttcttccttctttgaggatgaaccttcttcttcctactgtaacatttgcagaacttcctttatatttttagttaggacctcctttgatttcgatcttgctaaaaatgttgccagatgagacttttggttcaaaaacacagaagtttctggatcagctgctttgaggaattctggatgggattggaaccagagttttacttgttctagatctactttggatgagtcaaattgtgtccaccattttacaaatacgtgtctttgtagtgatggatattgatttttcttttcagtcttgctgtaacgatactgccatgagaagatccatgacagtgcaaagcttgaaaagtatttaagatatgttggaattcgtgattcctgcgaattgtattatctctcaaattaagcaaatccttgttggactgtttatgggaatatctctggaattggtccaaagaagtcccaccattgcaaaaaccattggggaaatcgt

SEQ ID NO: 15238 - DNA, 1059 bp, Glycine max; identical to SEQ ID NO: 15237
  Gm_smallRNAprecursor_8071

SEQ ID NO: 15239 - DNA, 1055 bp, Glycine max
  Gm_smallRNAprecursor_8072
atatatatatatatatatatataggaagtaagaatgtactatgataaatggaaatgagagtataagcttgtaaaatagatatcaagggcacaccggagaccggtttacaaatcccaggttttcataaacaaagaaaccgaagaggcggcagagctgcacaggatcggtaaagagagagaagagggatgaaaaatatatatttattgaaacttgaaagaagcgcttacaaaaatcttgtttcagagaacctctcttcagaaacctcaaaaatggccaaatgaaagggtgccttacaacatacttgaggactccttatatagccaaaaatctaagactggtagttgccggtagttttgaccgggactatttgactatttgttacaagacgagtagttttgaccgggactttaatggctacaggacaggtagtattgtccagcattaattacacattaattacaaacagatggttttgtgatcgaaattaaatttaatctaaacagataccaaaacaatcatcttcgttttggtaaaaggggtcttcttcttcttcttcagcagaacttgtttcttccttctttgaggatgaaccttcttcttcctactgtaacatttgcagaacttcctttatatttttagttaggacctcctttgatttcgatcttgctaaaaatgttgccagatgagacttttggttcaaaaacacagaagtttctggatcagctgctttgaggaattctggatgggattggaaccagagttttacttgttctagatctactttggatgagtcaaattgtgtccaccattttacaaatacgtgtctttgtagtgatggatattgatttttcttttcagtcttgctgtaacgatactgccatgagaagatccatgacagtgcaaagcttgaaaagtatttaagatatgttggaattcgtgattcctgcgaattgtattatctctcaaattaagcaaatccttgttggactgtttatgggaatatctctggaattggtccaaagaagtcccaccattgcaaaaaccattggggaaat

SEQ ID NO: 15240 - DNA, 1058 bp, Glycine max
  Gm_smallRNAprecursor_8073
atatatatatatatatatatataggaagtaagaatgtactatgataaatggaaatgagagtataagcttgtaaaatagatatcaagggcacaccggagaccggtttacaaatcccaggttttcataaacaaagaaaccgaagaggcggcagagctgcacaggatcggtaaagagagagaagagggatgaaaaatatatatttattgaaacttgaaagaagcgcttacaaaaatcttgtttcagagaacctctcttcagaaacctcaaaaatggccaaatgaaagggtgccttacaacatacttgaggactccttatatagccaaaaatctaagactggtagttgccggtagttttgaccgggactatttgactatttgttacaagacgagtagttttgaccgggactttaatggctacaggacaggtagtattgtccagcattaattacacattaattacaaacagatggttttgtgatcgaaattaaatttaatctaaacagataccaaaacaatcatcttcgttttggtaaaaggggtcttcttcttcttcttcagcagaacttgtttcttccttctttgaggatgaaccttcttcttcctactgtaacatttgcagaacttcctttatatttttagttaggacctcctttgatttcgatcttgctaaaaatgttgccagatgagacttttggttcaaaaacacagaagtttctggatcagctgctttgaggaattctggatgggattggaaccagagttttacttgttctagatctactttggatgagtcaaattgtgtccaccattttacaaatacgtgtctttgtagtgatggatattgatttttcttttcagtcttgctgtaacgatactgccatgagaagatccatgacagtgcaaagcttgaaaagtatttaagatatgttggaattcgtgattcctgcgaattgtattatctctcaaattaagcaaatccttgttggactgtttatgggaatatctctggaattggtccaaagaagtcccaccattgcaaaaaccattggggaaatcgt

SEQ ID NO: 15241 - DNA, 1058 bp, Glycine max; identical to SEQ ID NO: 15240
  Gm_smallRNAprecursor_8074

SEQ ID NO: 15242 - DNA, 1173 bp, Glycine max
  Gm_smallRNAprecursor_8075
aaagaagcgcttacaaaaatcttgtttcagagaacctctcttcagaaacctcaaaaatggccaaatgaaagggtgccttacaacatacttgaggactccttatatagccaaaaatctaagactggtagttgccggtagttttgaccgggactatttgactatttgttacaagacgagtagttttgaccgggactttaatggctacaggacaggtagtattgtccagcattaattacacattaattacaaacagatggttttgtgatcgaaattaaatttaatctaaacagataccaaaacaatcatcttcgttttggtaaaaggggtcttcttcttcttcttcagcagaacttgtttcttccttctttgaggatgaaccttcttcttcctactgtaacatttgcagaacttcctttatatttttagttaggacctcctttgatttcgatcttgctaaaaatgttgccagatgagacttttggttcaaaaacacagaagtttctggatcagctgctttgaggaattctggatgggattggaaccagagttttacttgttctagatctactttggatgagtcaaattgtgtccaccattttacaaatacgtgtctttgtagtgatggatattgatttttcttttcagtcttgctgtaacgatactgccatgagaagatccatgacagtgcaaagcttgaaaagtatttaagatatgttggaattcgtgattcctgcgaattgtattatctctcaaattaagcaaatccttgttggactgtttatgggaatatctctggaattggtccaaagaagtcccaccattgcaaaaaccattggggaaatcgtaaattgtattggtcttgaaatatattagccatgaatgcttgaagtgggtattttggtgccaaaacaccttagtccaagcattaacataatcccaataggtataacctacttgatcaaatggaactgaaaatctctttcctttgttcaagtccgaaccaaagtgtcttggttgaagaacttttagtatttggattgtggagtgggtgtttaatgtttggtcttttgggtctttgaaatgtttgatagatactgaatttgaatctaccaaaatcaattcataaaaagtccttgtcttcaggatggtggttggtttgtagtgaaatcctgg

SEQ ID NO: 15243 - DNA, 1164 bp, Glycine max
  Gm_smallRNAprecursor_8076
cttacaaaaatcttgtttcagagaacctctcttcagaaacctcaaaaatggccaaatgaaagggtgccttacaacatacttgaggactccttatatagccaaaaatctaagactggtagttgccggtagttttgaccgggactatttgactatttgttacaagacgagtagttttgaccgggactttaatggctacaggacaggtagtattgtccagcattaattacacattaattacaaacagatggttttgtgatcgaaattaaatttaatctaaacagataccaaaacaatcatcttcgttttggtaaaaggggtcttcttcttcttcttcagcagaacttgtttcttccttctttgaggatgaaccttcttcttcctactgtaacatttgcagaacttcctttatatttttagttaggacctcctttgatttcgatcttgctaaaaatgttgccagatgagacttttggttcaaaaacacagaagtttctggatcagctgctttgaggaattctggatgggattggaaccagagttttacttgttctagatctactttggatgagtcaaattgtgtccaccattttacaaatacgtgtctttgtagtgatggatattgatttttcttttcagtcttgctgtaacgatactgccatgagaagatccatgacagtgcaaagcttgaaaagtatttaagatatgttggaattcgtgattcctgcgaattgtattatctctcaaattaagcaaatccttgttggactgtttatgggaatatctctggaattggtccaaagaagtcccaccattgcaaaaaccattggggaaatcgtaaattgtattggtcttgaaatatattagccatgaatgcttgaagtgggtattttggtgccaaaacaccttagtccaagcattaacataatcccaataggtataacctacttgatcaaatggaactgaaaatctctttcctttgttcaagtccgaaccaaagtgtcttggttgaagaacttttagtatttggattgtggagtgggtgtttaatgtttggtcttttgggtctttgaaatgtttgatagatactgaatttgaatctaccaaaatcaattcataaaaagtccttgtcttcaggatggtggttggtttgtagtgaaatcctgg

SEQ ID NO: 15244 - DNA, 1163 bp, Glycine max
  Gm_smallRNAprecursor_8077
ttacaaaaatcttgtttcagagaacctctcttcagaaacctcaaaaatggccaaatgaaagggtgccttacaacatacttgaggactccttatatagccaaaaatctaagactggtagttgccggtagttttgaccgggactatttgactatttgttacaagacgagtagttttgaccgggactttaatggctacaggacaggtagtattgtccagcattaattacacattaattacaaacagatggttttgtgatcgaaattaaatttaatctaaacagataccaaaacaatcatcttcgttttggtaaaaggggtcttcttcttcttcttcagcagaacttgtttcttccttctttgaggatgaaccttcttcttcctactgtaacatttgcagaacttcctttatatttttagttaggacctcctttgatttcgatcttgctaaaaatgttgccagatgagacttttggttcaaaaacacagaagtttctggatcagctgctttgaggaattctggatgggattggaaccagagttttacttgttctagatctactttggatgagtcaaattgtgtccaccattttacaaatacgtgtctttgtagtgatggatattgatttttcttttcagtcttgctgtaacgatactgccatgagaagatccatgacagtgcaaagcttgaaaagtatttaagatatgttggaattcgtgattcctgcgaattgtattatctctcaaattaagcaaatccttgttggactgtttatgggaatatctctggaattggtccaaagaagtcccaccattgcaaaaaccattggggaaatcgtaaattgtattggtcttgaaatatattagccatgaatgcttgaagtgggtattttggtgccaaaacaccttagtccaagcattaacataatcccaataggtataacctacttgatcaaatggaactgaaaatctctttcctttgttcaagtccgaaccaaagtgtcttggttgaagaacttttagtatttggattgtggagtgggtgtttaatgtttggtcttttgggtctttgaaatgtttgatagatactgaatttgaatctaccaaaatcaattcataaaaagtccttgtcttcaggatggtggttggtttgtagtgaaatcctgg

SEQ ID NO: 15245 - DNA, 1131 bp, Glycine max
  Gm_smallRNAprecursor_8078
acgagtagttttgaccgggactttaatggctacaggacaggtagtattgtccagcattaattacacattaattacaaacagatggttttgtgatcgaaattaaatttaatctaaacagataccaaaacaatcatcttcgttttggtaaaaggggtcttcttcttcttcttcagcagaacttgtttcttccttctttgaggatgaaccttcttcttcctactgtaacatttgcagaacttcctttatatttttagttaggacctcctttgatttcgatcttgctaaaaatgttgccagatgagacttttggttcaaaaacacagaagtttctggatcagctgctttgaggaattctggatgggattggaaccagagttttacttgttctagatctactttggatgagtcaaattgtgtccaccattttacaaatacgtgtctttgtagtgatggatattgatttttcttttcagtcttgctgtaacgatactgccatgagaagatccatgacagtgcaaagcttgaaaagtatttaagatatgttggaattcgtgattcctgcgaattgtattatctctcaaattaagcaaatccttgttggactgtttatgggaatatctctggaattggtccaaagaagtcccaccattgcaaaaaccattggggaaatcgtaaattgtattggtcttgaaatatattagccatgaatgcttgaagtgggtattttggtgccaaaacaccttagtccaagcattaacataatcccaataggtataacctacttgatcaaatggaactgaaaatctctttcctttgttcaagtccgaaccaaagtgtcttggttgaagaacttttagtatttggattgtggagtgggtgtttaatgtttggtcttttgggtctttgaaatgtttgatagatactgaatttgaatctaccaaaatcaattcataaaaagtccttgtcttcaggatggtggttggtttgtagtgaaatcctggtgggaaagccttggccgtcaccttgcagggatttttgtcccaaaattcaggttccatctgcaaaacagttacaaatttatttttataaatataattgttagtttgtttggtaggtggtatttgagctttg

SEQ ID NO: 15246 - DNA, 1170 bp, Glycine max
  Gm_smallRNAprecursor_8079
agcagaacttgtttcttccttctttgaggatgaaccttcttcttcctactgtaacatttgcagaacttcctttatatttttagttaggacctcctttgatttcgatcttgctaaaaatgttgccagatgagacttttggttcaaaaacacagaagtttctggatcagctgctttgaggaattctggatgggattggaaccagagttttacttgttctagatctactttggatgagtcaaattgtgtccaccattttacaaatacgtgtctttgtagtgatggatattgatttttcttttcagtcttgctgtaacgatactgccatgagaagatccatgacagtgcaaagcttgaaaagtatttaagatatgttggaattcgtgattcctgcgaattgtattatctctcaaattaagcaaatccttgttggactgtttatgggaatatctctggaattggtccaaagaagtcccaccattgcaaaaaccattggggaaatcgtaaattgtattggtcttgaaatatattagccatgaatgcttgaagtgggtattttggtgccaaaacaccttagtccaagcattaacataatcccaataggtataacctacttgatcaaatggaactgaaaatctctttcctttgttcaagtccgaaccaaagtgtcttggttgaagaacttttagtatttggattgtggagtgggtgtttaatgtttggtcttttgggtctttgaaatgtttgatagatactgaatttgaatctaccaaaatcaattcataaaaagtccttgtcttcaggatggtggttggtttgtagtgaaatcctggtgggaaagccttggccgtcaccttgcagggatttttgtcccaaaattcaggttccatctgcaaaacagttacaaatttatttttataaatataattgttagtttgtttggtaggtggtatttgagctttggctaaaggtagtttccctttaggattggtagttgctttggtcattgatgcattttggatcattgtttgtaaatttgattcagattcatcatcagattctgaggcaatgtctgcccatgatttttttgattatttttggaaatttggttagacccatgtcttgaagggcctgaagggtttcaattggccatgcatagtcagccgatgtttg

SEQ ID NO: 15247 - DNA, 1107 bp, Glycine max
  Gm_smallRNAprecursor_8080
tgcagaacttcctttatatttttagttaggacctcctttgatttcgatcttgctaaaaatgttgccagatgagacttttggttcaaaaacacagaagtttctggatcagctgctttgaggaattctggatgggattggaaccagagttttacttgttctagatctactttggatgagtcaaattgtgtccaccattttacaaatacgtgtctttgtagtgatggatattgatttttcttttcagtcttgctgtaacgatactgccatgagaagatccatgacagtgcaaagcttgaaaagtatttaagatatgttggaattcgtgattcctgcgaattgtattatctctcaaattaagcaaatccttgttggactgtttatgggaatatctctggaattggtccaaagaagtcccaccattgcaaaaaccattggggaaatcgtaaattgtattggtcttgaaatatattagccatgaatgcttgaagtgggtattttggtgccaaaacaccttagtccaagcattaacataatcccaataggtataacctacttgatcaaatggaactgaaaatctctttcctttgttcaagtccgaaccaaagtgtcttggttgaagaacttttagtatttggattgtggagtgggtgtttaatgtttggtcttttgggtctttgaaatgtttgatagatactgaatttgaatctaccaaaatcaattcataaaaagtccttgtcttcaggatggtggttggtttgtagtgaaatcctggtgggaaagccttggccgtcaccttgcagggatttttgtcccaaaattcaggttccatctgcaaaacagttacaaatttatttttataaatataattgttagtttgtttggtaggtggtatttgagctttggctaaaggtagtttccctttaggattggtagttgctttggtcattgatgcattttggatcattgtttgtaaatttgattcagattcatcatcagattctgaggcaatgtctgcccatgatttttttgattatttttggaaatttggttagacccatgtcttgaagggcctgaagggtttcaattggccatgcatagtcagccgat

SEQ ID NO: 15248 - DNA, 1107 bp, Glycine max; identical to SEQ ID NO: 15247
  Gm_smallRNAprecursor_8081

SEQ ID NO: 15249 - DNA, 1108 bp, Glycine max
  Gm_smallRNAprecursor_8082
tgcagaacttcctttatatttttagttaggacctcctttgatttcgatcttgctaaaaatgttgccagatgagacttttggttcaaaaacacagaagtttctggatcagctgctttgaggaattctggatgggattggaaccagagttttacttgttctagatctactttggatgagtcaaattgtgtccaccattttacaaatacgtgtctttgtagtgatggatattgatttttcttttcagtcttgctgtaacgatactgccatgagaagatccatgacagtgcaaagcttgaaaagtatttaagatatgttggaattcgtgattcctgcgaattgtattatctctcaaattaagcaaatccttgttggactgtttatgggaatatctctggaattggtccaaagaagtcccaccattgcaaaaaccattggggaaatcgtaaattgtattggtcttgaaatatattagccatgaatgcttgaagtgggtattttggtgccaaaacaccttagtccaagcattaacataatcccaataggtataacctacttgatcaaatggaactgaaaatctctttcctttgttcaagtccgaaccaaagtgtcttggttgaagaacttttagtatttggattgtggagtgggtgtttaatgtttggtcttttgggtctttgaaatgtttgatagatactgaatttgaatctaccaaaatcaattcataaaaagtccttgtcttcaggatggtggttggtttgtagtgaaatcctggtgggaaagccttggccgtcaccttgcagggatttttgtcccaaaattcaggttccatctgcaaaacagttacaaatttatttttataaatataattgttagtttgtttggtaggtggtatttgagctttggctaaaggtagtttccctttaggattggtagttgctttggtcattgatgcattttggatcattgtttgtaaatttgattcagattcatcatcagattctgaggcaatgtctgcccatgatttttttgattatttttggaaatttggttagacccatgtcttgaagggcctgaagggtttcaattggccatgcatagtcagccgatg

SEQ ID NO: 15250 - DNA, 1101 bp, Glycine max
  Gm_smallRNAprecursor_8083
agaacttcctttatatttttagttaggacctcctttgatttcgatcttgctaaaaatgttgccagatgagacttttggttcaaaaacacagaagtttctggatcagctgctttgaggaattctggatgggattggaaccagagttttacttgttctagatctactttggatgagtcaaattgtgtccaccattttacaaatacgtgtctttgtagtgatggatattgatttttcttttcagtcttgctgtaacgatactgccatgagaagatccatgacagtgcaaagcttgaaaagtatttaagatatgttggaattcgtgattcctgcgaattgtattatctctcaaattaagcaaatccttgttggactgtttatgggaatatctctggaattggtccaaagaagtcccaccattgcaaaaaccattggggaaatcgtaaattgtattggtcttgaaatatattagccatgaatgcttgaagtgggtattttggtgccaaaacaccttagtccaagcattaacataatcccaataggtataacctacttgatcaaatggaactgaaaatctctttcctttgttcaagtccgaaccaaagtgtcttggttgaagaacttttagtatttggattgtggagtgggtgtttaatgtttggtcttttgggtctttgaaatgtttgatagatactgaatttgaatctaccaaaatcaattcataaaaagtccttgtcttcaggatggtggttggtttgtagtgaaatcctggtgggaaagccttggccgtcaccttgcagggatttttgtcccaaaattcaggttccatctgcaaaacagttacaaatttatttttataaatataattgttagtttgtttggtaggtggtatttgagctttggctaaaggtagtttccctttaggattggtagttgctttggtcattgatgcattttggatcattgtttgtaaatttgattcagattcatcatcagattctgaggcaatgtctgcccatgatttttttgattatttttggaaatttggttagacccatgtcttgaagggcctgaagggtttcaattggccatgcatagtcagcc

SEQ ID NO: 15251 - DNA, 1104 bp, Glycine max
  Gm_smallRNAprecursor_8084
aacacagaagtttctggatcagctgctttgaggaattctggatgggattggaaccagagttttacttgttctagatctactttggatgagtcaaattgtgtccaccattttacaaatacgtgtctttgtagtgatggatattgatttttcttttcagtcttgctgtaacgatactgccatgagaagatccatgacagtgcaaagcttgaaaagtatttaagatatgttggaattcgtgattcctgcgaattgtattatctctcaaattaagcaaatccttgttggactgtttatgggaatatctctggaattggtccaaagaagtcccaccattgcaaaaaccattggggaaatcgtaaattgtattggtcttgaaatatattagccatgaatgcttgaagtgggtattttggtgccaaaacaccttagtccaagcattaacataatcccaataggtataacctacttgatcaaatggaactgaaaatctctttcctttgttcaagtccgaaccaaagtgtcttggttgaagaacttttagtatttggattgtggagtgggtgtttaatgtttggtcttttgggtctttgaaatgtttgatagatactgaatttgaatctaccaaaatcaattcataaaaagtccttgtcttcaggatggtggttggtttgtagtgaaatcctggtgggaaagccttggccgtcaccttgcagggatttttgtcccaaaattcaggttccatctgcaaaacagttacaaatttatttttataaatataattgttagtttgtttggtaggtggtatttgagctttggctaaaggtagtttccctttaggattggtagttgctttggtcattgatgcattttggatcattgtttgtaaatttgattcagattcatcatcagattctgaggcaatgtctgcccatgatttttttgattatttttggaaatttggttagacccatgtcttgaagggcctgaagggtttcaattggccatgcatagtcagccgatgtttgtttggtggctgccggtttgggagattcctgagtggatggctcaggtttgattgaggtaatttgggttaatgacccttct

SEQ ID NO: 15252 - DNA, 1085 bp, Glycine max
  Gm_smallRNAprecursor_8085
cagctgctttgaggaattctggatgggattggaaccagagttttacttgttctagatctactttggatgagtcaaattgtgtccaccattttacaaatacgtgtctttgtagtgatggatattgatttttcttttcagtcttgctgtaacgatactgccatgagaagatccatgacagtgcaaagcttgaaaagtatttaagatatgttggaattcgtgattcctgcgaattgtattatctctcaaattaagcaaatccttgttggactgtttatgggaatatctctggaattggtccaaagaagtcccaccattgcaaaaaccattggggaaatcgtaaattgtattggtcttgaaatatattagccatgaatgcttgaagtgggtattttggtgccaaaacaccttagtccaagcattaacataatcccaataggtataacctacttgatcaaatggaactgaaaatctctttcctttgttcaagtccgaaccaaagtgtcttggttgaagaacttttagtatttggattgtggagtgggtgtttaatgtttggtcttttgggtctttgaaatgtttgatagatactgaatttgaatctaccaaaatcaattcataaaaagtccttgtcttcaggatggtggttggtttgtagtgaaatcctggtgggaaagccttggccgtcaccttgcagggatttttgtcccaaaattcaggttccatctgcaaaacagttacaaatttatttttataaatataattgttagtttgtttggtaggtggtatttgagctttggctaaaggtagtttccctttaggattggtagttgctttggtcattgatgcattttggatcattgtttgtaaatttgattcagattcatcatcagattctgaggcaatgtctgcccatgatttttttgattatttttggaaatttggttagacccatgtcttgaagggcctgaagggtttcaattggccatgcatagtcagccgatgtttgtttggtggctgccggtttgggagattcctgagtggatggctcaggtttgattgaggtaatttgggttaatgacccttct

SEQ ID NO: 15253 - DNA, 1084 bp, Glycine max
  Gm_smallRNAprecursor_8086
agctgctttgaggaattctggatgggattggaaccagagttttacttgttctagatctactttggatgagtcaaattgtgtccaccattttacaaatacgtgtctttgtagtgatggatattgatttttcttttcagtcttgctgtaacgatactgccatgagaagatccatgacagtgcaaagcttgaaaagtatttaagatatgttggaattcgtgattcctgcgaattgtattatctctcaaattaagcaaatccttgttggactgtttatgggaatatctctggaattggtccaaagaagtcccaccattgcaaaaaccattggggaaatcgtaaattgtattggtcttgaaatatattagccatgaatgcttgaagtgggtattttggtgccaaaacaccttagtccaagcattaacataatcccaataggtataacctacttgatcaaatggaactgaaaatctctttcctttgttcaagtccgaaccaaagtgtcttggttgaagaacttttagtatttggattgtggagtgggtgtttaatgtttggtcttttgggtctttgaaatgtttgatagatactgaatttgaatctaccaaaatcaattcataaaaagtccttgtcttcaggatggtggttggtttgtagtgaaatcctggtgggaaagccttggccgtcaccttgcagggatttttgtcccaaaattcaggttccatctgcaaaacagttacaaatttatttttataaatataattgttagtttgtttggtaggtggtatttgagctttggctaaaggtagtttccctttaggattggtagttgctttggtcattgatgcattttggatcattgtttgtaaatttgattcagattcatcatcagattctgaggcaatgtctgcccatgatttttttgattatttttggaaatttggttagacccatgtcttgaagggcctgaagggtttcaattggccatgcatagtcagccgatgtttgtttggtggctgccggtttgggagattcctgagtggatggctcaggtttgattgaggtaatttgggttaatgacccttct

SEQ ID NO: 15254 - DNA, 1082 bp, Glycine max
  Gm_smallRNAprecursor_8087
gctgctttgaggaattctggatgggattggaaccagagttttacttgttctagatctactttggatgagtcaaattgtgtccaccattttacaaatacgtgtctttgtagtgatggatattgatttttcttttcagtcttgctgtaacgatactgccatgagaagatccatgacagtgcaaagcttgaaaagtatttaagatatgttggaattcgtgattcctgcgaattgtattatctctcaaattaagcaaatccttgttggactgtttatgggaatatctctggaattggtccaaagaagtcccaccattgcaaaaaccattggggaaatcgtaaattgtattggtcttgaaatatattagccatgaatgcttgaagtgggtattttggtgccaaaacaccttagtccaagcattaacataatcccaataggtataacctacttgatcaaatggaactgaaaatctctttcctttgttcaagtccgaaccaaagtgtcttggttgaagaacttttagtatttggattgtggagtgggtgtttaatgtttggtcttttgggtctttgaaatgtttgatagatactgaatttgaatctaccaaaatcaattcataaaaagtccttgtcttcaggatggtggttggtttgtagtgaaatcctggtgggaaagccttggccgtcaccttgcagggatttttgtcccaaaattcaggttccatctgcaaaacagttacaaatttatttttataaatataattgttagtttgtttggtaggtggtatttgagctttggctaaaggtagtttccctttaggattggtagttgctttggtcattgatgcattttggatcattgtttgtaaatttgattcagattcatcatcagattctgaggcaatgtctgcccatgatttttttgattatttttggaaatttggttagacccatgtcttgaagggcctgaagggtttcaattggccatgcatagtcagccgatgtttgtttggtggctgccggtttgggagattcctgagtggatggctcaggtttgattgaggtaatttgggttaatgacccttc

SEQ ID NO: 15255 - DNA, 1098 bp, Glycine max
  Gm_smallRNAprecursor_8088
cgtgtctttgtagtgatggatattgatttttcttttcagtcttgctgtaacgatactgccatgagaagatccatgacagtgcaaagcttgaaaagtatttaagatatgttggaattcgtgattcctgcgaattgtattatctctcaaattaagcaaatccttgttggactgtttatgggaatatctctggaattggtccaaagaagtcccaccattgcaaaaaccattggggaaatcgtaaattgtattggtcttgaaatatattagccatgaatgcttgaagtgggtattttggtgccaaaacaccttagtccaagcattaacataatcccaataggtataacctacttgatcaaatggaactgaaaatctctttcctttgttcaagtccgaaccaaagtgtcttggttgaagaacttttagtatttggattgtggagtgggtgtttaatgtttggtcttttgggtctttgaaatgtttgatagatactgaatttgaatctaccaaaatcaattcataaaaagtccttgtcttcaggatggtggttggtttgtagtgaaatcctggtgggaaagccttggccgtcaccttgcagggatttttgtcccaaaattcaggttccatctgcaaaacagttacaaatttatttttataaatataattgttagtttgtttggtaggtggtatttgagctttggctaaaggtagtttccctttaggattggtagttgctttggtcattgatgcattttggatcattgtttgtaaatttgattcagattcatcatcagattctgaggcaatgtctgcccatgatttttttgattatttttggaaatttggttagacccatgtcttgaagggcctgaagggtttcaattggccatgcatagtcagccgatgtttgtttggtggctgccggtttgggagattcctgagtggatggctcaggtttgattgaggtaatttgggttaatgacccttctaaattggttttctgggtagatgacccaacctgggttggtgacccagaagaggttgatgatttcttaatggttggctctggaagagctagtctggctcctttgcctgtacttc

SEQ ID NO: 15256 - DNA, 1113 bp, Glycine max
  Gm_smallRNAprecursor_8089
ggaaatttggttagacccatgtcttgaagggcctgaagggtttcaattggccatgcatagtcagccgatgtttgtttggtggctgccggtttgggagattcctgagtggatggctcaggtttgattgaggtaatttgggttaatgacccttctaaattggttttctgggtagatgacccaacctgggttggtgacccagaagaggttgatgatttcttaatggttggctctggaagagctagtctggctcctttgcctgtacttcttcctccccttagggagattcccgatgccttaggaggcattaccacttttctgtaagaattcatgggtaaggtagtcaggtaatgaatttgaggtgcccttgatgtattctatgtcaaaatcaaagacacttagaattgcttgccatcttgcaaaaatttgttttgaggcaaggtttttaacatctttttgtaaaatatctttggttgatttacaatcaactctgattaaaaaaatttggtttaataaatccgattgaaatttggaaatgcacaaaacaattgctaaaacttcctttttaacagttgaatattttaattgtccaggattccaatgttttgatgtatatgcaatgacatgatcttggccatggactctttgtttgaggatgccaccataacctatgtctgaagtgtcagtttcgacaattttaaatgcctgtagagtaggaagatacagacattttatggattggactttgactttgatttctttaactgtttgtgtatggaggtcagaccaaggaggcagatttttcttcaacctatcatgcaatggtttgacaatattctttaaatagaggacaaattctcctacataatttagacaacctagaaatctttgtaactgggttttgtctaagatttggttgggaaatttgctagcaaactctattaacctttctattggaatgattgtaccttgatatatattgtgaccaaggaatcgaattcgagtttggaaaagattgatttttgatttggagactgccaaaccattatgtttgatgatatggatgaaagtctggagatgtttgaaatgttggtcaatgttttgggaaaagattaa

SEQ ID NO: 15257 - DNA, 1113 bp, Glycine max; identical to SEQ ID NO: 15256
  Gm_smallRNAprecursor_8090

SEQ ID NO: 15258 - DNA, 1114 bp, Glycine max
  Gm_smallRNAprecursor_8091
ggaaatttggttagacccatgtcttgaagggcctgaagggtttcaattggccatgcatagtcagccgatgtttgtttggtggctgccggtttgggagattcctgagtggatggctcaggtttgattgaggtaatttgggttaatgacccttctaaattggttttctgggtagatgacccaacctgggttggtgacccagaagaggttgatgatttcttaatggttggctctggaagagctagtctggctcctttgcctgtacttcttcctccccttagggagattcccgatgccttaggaggcattaccacttttctgtaagaattcatgggtaaggtagtcaggtaatgaatttgaggtgcccttgatgtattctatgtcaaaatcaaagacacttagaattgcttgccatcttgcaaaaatttgttttgaggcaaggtttttaacatctttttgtaaaatatctttggttgatttacaatcaactctgattaaaaaaatttggtttaataaatccgattgaaatttggaaatgcacaaaacaattgctaaaacttcctttttaacagttgaatattttaattgtccaggattccaatgttttgatgtatatgcaatgacatgatcttggccatggactctttgtttgaggatgccaccataacctatgtctgaagtgtcagtttcgacaattttaaatgcctgtagagtaggaagatacagacattttatggattggactttgactttgatttctttaactgtttgtgtatggaggtcagaccaaggaggcagatttttcttcaacctatcatgcaatggtttgacaatattctttaaatagaggacaaattctcctacataatttagacaacctagaaatctttgtaactgggttttgtctaagatttggttgggaaatttgctagcaaactctattaacctttctattggaatgattgtaccttgatatatattgtgaccaaggaatcgaattcgagtttggaaaagattgatttttgatttggagactgccaaaccattatgtttgatgatatggatgaaagtctggagatgtttgaaatgttggtcaatgttttgggaaaagattaaa

SEQ ID NO: 15259 - DNA, 1031 bp, Glycine max
  Gm_smallRNAprecursor_8092
ctttttgtaaaatatctttggttgatttacaatcaactctgattaaaaaaatttggtttaataaatccgattgaaatttggaaatgcacaaaacaattgctaaaacttcctttttaacagttgaatattttaattgtccaggattccaatgttttgatgtatatgcaatgacatgatcttggccatggactctttgtttgaggatgccaccataacctatgtctgaagtgtcagtttcgacaattttaaatgcctgtagagtaggaagatacagacattttatggattggactttgactttgatttctttaactgtttgtgtatggaggtcagaccaaggaggcagatttttcttcaacctatcatgcaatggtttgacaatattctttaaatagaggacaaattctcctacataatttagacaacctagaaatctttgtaactgggttttgtctaagatttggttgggaaatttgctagcaaactctattaacctttctattggaatgattgtaccttgatatatattgtgaccaaggaatcgaattcgagtttggaaaagattgatttttgatttggagactgccaaaccattatgtttgatgatatggatgaaagtctggagatgtttgaaatgttggtcaatgttttgggaaaagattaaaacatcatctatgtagacaatgacaaattttgaatagggattaaaaatatcattcataattttttgaaattctgaaggggcattcttcagtccgaatgacatcacattccattcatattgcccaaaaggtacagtaaacgttgttttctacctatctgattcttggatttggatttgccaaaatccagatttcatatcaaattttgaaaatatctttgcaaaatttaatctgttaagcaaatcttttttgtttggaataggatatctaatccattgtaatgcttgatttagtggtttgtaatttatgactaagcggggtgttccacgctcaatctcaaattgtttgttgacataaaaagccgcacaa

SEQ ID NO: 15260 - DNA, 1127 bp, Glycine max
  Gm_smallRNAprecursor_8093
ggacaaattctcctacataatttagacaacctagaaatctttgtaactgggttttgtctaagatttggttgggaaatttgctagcaaactctattaacctttctattggaatgattgtaccttgatatatattgtgaccaaggaatcgaattcgagtttggaaaagattgatttttgatttggagactgccaaaccattatgtttgatgatatggatgaaagtctggagatgtttgaaatgttggtcaatgttttgggaaaagattaaaacatcatctatgtagacaatgacaaattttgaatagggattaaaaatatcattcataattttttgaaattctgaaggggcattcttcagtccgaatgacatcacattccattcatattgcccaaaaggtacagtaaacgttgttttctacctatctgattcttggatttggatttgccaaaatccagatttcatatcaaattttgaaaatatctttgcaaaatttaatctgttaagcaaatcttttttgtttggaataggatatctaatccattgtaatgcttgatttagtggtttgtaatttatgactaagcggggtgttccacgctcaatctcaaattgtttgttgacataaaaagccgcacaagaccatgggcttttgcttttccggattaggcctttatcaagcaaatccttgatttccttttggcagtattgaaggagttcttcgttcatttggattggtctggcttttgtgggaatttgtttttccctaaagtttttctcataagggagatcaacaatatgtttctttctatcccaaaatgcatgtggcaaatcagaacagacagttgattcaatatgatttaataaagattgaatttttttcttttacttggggttttcccagttgtatctgaatattattaagagatacttcttcttttaagaagttaatttgattaatcttattttctataagatttatatttctggagattggtttagtagaaaaattaaatataatttttcttcctaagtaatttgtggttattcctttattagatatttgaataagaaacaaagctcgaatgaagggggttcctaggattactttgttcttaaggttttttactat

SEQ ID NO: 15261 - DNA, 1069 bp, Glycine max
  Gm_smallRNAprecursor_8094
gctcaagtgtaatcatccttaagtgtgtttcacttttctcattttgcaatgatatatttgtttgtcttttgcaattgggaaaaaaaatagaaaaaaaagagttacttatttggcttacttatatttgaaattttgtaatgttccctacatatagattgtgacatgtgacaatacaatacaaataaattattattttaatttatgttatgttaaccgttgcggtacgtgcacttgagcatataacaagattcattgctcaaaaataaaacatcaaaatattcaatagtcaatgactatttgacagcatatcctccaaactaataacaacacaaatgatagttatagtgtgaattaaaagggagaaagttataaaaaaaatggcaaaattatatttttggtccctcagtttgtctctagtttcagatttggtctcccagtaatttaattcacgaatttggtcccctattttgtaaaatcgtgcaatattggtcttccatgccacaattggacgttgaccgttaacaagcgatgttgactaccacgtgtcacattcttattggatgatgattgtcacgtgtcatgttctgattagtcaatgaaaacagcaatgtatttcatctttcatggtgttgacatccaatcagaacatgacacatgacagtcatcaaccaataagaacatgacacgtggcagtcaacatcacttgttaacagtcaacatccaattgtggcctagaggaccaacattgcacgattttacaaaataagggatcaaatttatgaattaaattactgggggatcaaatccgaaactggagataaactgagggaccaaatttacaattttgcctaaaaaaatacatgtcaaacaaaaacattaatcctattcaaattccccctagaatttcatgtgtcctaaactattttcaggaatactccactaaatttgctaagttagtagaatccaaaatcaaaatggttaaacccaagccttttacatgttcttgcacacctcccacacccactccaaaccctaaccccactccttgatcccctaatctaccttttaa

SEQ ID NO: 15262 - DNA, 1069 bp, Glycine max
  Gm_smallRNAprecursor_8095
ttgcaattgggaaaaaaaatagaaaaaaaagagttacttatttggcttacttatatttgaaattttgtaatgttccctacatatagattgtgacatgtgacaatacaatacaaataaattattattttaatttatgttatgttaaccgttgcggtacgtgcacttgagcatataacaagattcattgctcaaaaataaaacatcaaaatattcaatagtcaatgactatttgacagcatatcctccaaactaataacaacacaaatgatagttatagtgtgaattaaaagggagaaagttataaaaaaaatggcaaaattatatttttggtccctcagtttgtctctagtttcagatttggtctcccagtaatttaattcacgaatttggtcccctattttgtaaaatcgtgcaatattggtcttccatgccacaattggacgttgaccgttaacaagcgatgttgactaccacgtgtcacattcttattggatgatgattgtcacgtgtcatgttctgattagtcaatgaaaacagcaatgtatttcatctttcatggtgttgacatccaatcagaacatgacacatgacagtcatcaaccaataagaacatgacacgtggcagtcaacatcacttgttaacagtcaacatccaattgtggcctagaggaccaacattgcacgattttacaaaataagggatcaaatttatgaattaaattactgggggatcaaatccgaaactggagataaactgagggaccaaatttacaattttgcctaaaaaaatacatgtcaaacaaaaacattaatcctattcaaattccccctagaatttcatgtgtcctaaactattttcaggaatactccactaaatttgctaagttagtagaatccaaaatcaaaatggttaaacccaagccttttacatgttcttgcacacctcccacacccactccaaaccctaaccccactccttgatcccctaatctaccttttaaacacttgacatcttcccaatacaatgagagacatgctaagggattctattattattgtaatgaaaaat

SEQ ID NO: 15263 - DNA, 1079 bp, Glycine max
  Gm_smallRNAprecursor_8096
taaggaaattcctagaaccttttcttcttctggaagtttcttcataatttttctttcctccattttctttattttggggctgaaatttaaactttgactggaagacattttcaagtgtatcttctttatgcctatacagtctttgctcatatgcttcaagagagcccacaagttttgtctctgatagagtggacaaatctttggtttcctccatcgttgtcacaattgggtcaaacttttggggcttagtaattagaattttctcaacaattttcttgtcaagaatatctttcccaaaagctctcatttgattaactatttctttaactttagaataataatctttaactgtctcagactccttcatcttcaacagttcaaaatctcttcttagagattgaagtttaacggcacgcaccttaacacttccttgaaactcctactgcaaggtgttccacgcttctttggcagtcttagctcccataattcttgggaaaattggatcagtcaccgcttgttgcaaggtgaacaacgcctttgaatttttctgtttatttttcttcaactctttttcttgagatgcattaagagctgaagtatccgcgggaacagtgaagccttcttctactatgtcccataaatcttgagatgaaaaatatgtttccattttaacatgccagaaatcataattttcaccattgaagatagggatataaatagttgaagattgagtagtgttatccatagcttagaaaaaatattattggagtgggttaatagtacaaaggaaatttttgaagtagtttggaggattttggaatggtaggtaggtaatataactatgcccaatgtgtgaccgaacatagctctgataccactgttggtagtttagatgatagttgatagttgatagttttagagaattgttttagaaagaaggctatgtcattgatttcttggattattaattacaacataccaattgcctatttataggctcaagtcaccaacctctcaatggtggtgaatgtttctacattactttaggtcattctagagttttcatgatagattagtgt

SEQ ID NO: 15264 - DNA, 1200 bp, Glycine max
  Gm_smallRNAprecursor_8097
ttgttcatcagcaacacaatgtacaaccatcagtcggtgtactcgaggttggcatgaccttcgatgacaaatcacaatgtattcgagcaatcaaagaatacaacatcagaaatcattttgattgcagaacaatttactctgaccaaagaaggctacacttcgtctgcaagttacatgaaaatggttgtacatggagcttgggcgcatgcaattcaaagaggcataacaaatggattatcaagagtatcagaggtcatcacacttgtctcgtgccgatgcttacacaagatcatcgccaactcgacaaacacgtcatagcacagatcatccaaccaattgtcaaaacaaacccaactgtctccatcaagacattgattgcagagattaaaacgttcatgaattataccccatcctacaagaagacatggttagcaaagcaaaaagcattggagatgattcatggaaactgggaagaatcatatgccaaactgccaaaacttttcggagctttgcaatcttgtgttcccgggactgtggtcgctgctcaaacagaatccttgtatgaggggggagaaatagtaccgggcaaaagattgtttaaacgtgtcttttggtcatttggtccatgcattaatggttttgcatattgcaaacccattgtacaagtagatggtacatggctttacggaaagtatactggcacactgttgatagctaccgcacaagatggaactaaccatatcttcccgatttcctatgccattgtagaaggggagacaacttcagcttgggggttttttctaaagaatttgagaagacatgttactccgcaaattaacatttctcttatttcagaccgacacccctcaattataagtgcctacaacaacccaagtaacttatgggtccaggacacatcccatttcttttgcctgcgccacattgcacaaaactttcttcgtggtaactcaaactgcaaacatttaaagaaaccacttatgttggctggtgagaatctattttatttattcgttataattttctttcaatcaaattttataacataatacattgattaaatatttacagggtacgcatacacagagaagatgcactggcgacatcttggggatattcgtgcgaataagccaagtgcagctgaatggcttgatcaattacccaaacaaaaatgggtacaat

SEQ ID NO: 15265 - DNA, 1076 bp, Glycine max
  Gm_smallRNAprecursor_8098
catcagcaacacaatgtacaaccatcagtcggtgtactcgaggttggcatgaccttcgatgacaaatcacaatgtattcgagcaatcaaagaatacaacatcagaaatcattttgattgcagaacaatttactctgaccaaagaaggctacacttcgtctgcaagttacatgaaaatggttgtacatggagcttgggcgcatgcaattcaaagaggcataacaaatggattatcaagagtatcagaggtcatcacacttgtctcgtgccgatgcttacacaagatcatcgccaactcgacaaacacgtcatagcacagatcatccaaccaattgtcaaaacaaacccaactgtctccatcaagacattgattgcagagattaaaacgttcatgaattataccccatcctacaagaagacatggttagcaaagcaaaaagcattggagatgattcatggaaactgggaagaatcatatgccaaactgccaaaacttttcggagctttgcaatcttgtgttcccgggactgtggtcgctgctcaaacagaatccttgtatgaggggggagaaatagtaccgggcaaaagattgtttaaacgtgtcttttggtcatttggtccatgcattaatggttttgcatattgcaaacccattgtacaagtagatggtacatggctttacggaaagtatactggcacactgttgatagctaccgcacaagatggaactaaccatatcttcccgatttcctatgccattgtagaaggggagacaacttcagcttgggggttttttctaaagaatttgagaagacatgttactccgcaaattaacatttctcttatttcagaccgacacccctcaattataagtgcctacaacaacccaagtaacttatgggtccaggacacatcccatttcttttgcctgcgccacattgcacaaaactttcttcgtggtaactcaaactgcaaacatttaaagaaaccacttatgttggctggtgagaatctattttatttattcgttataattttctttcaatcaaattttataacataatacattgattaaat

SEQ ID NO: 15266 - DNA, 1075 bp, Glycine max
  Gm_smallRNAprecursor_8099
atcagcaacacaatgtacaaccatcagtcggtgtactcgaggttggcatgaccttcgatgacaaatcacaatgtattcgagcaatcaaagaatacaacatcagaaatcattttgattgcagaacaatttactctgaccaaagaaggctacacttcgtctgcaagttacatgaaaatggttgtacatggagcttgggcgcatgcaattcaaagaggcataacaaatggattatcaagagtatcagaggtcatcacacttgtctcgtgccgatgcttacacaagatcatcgccaactcgacaaacacgtcatagcacagatcatccaaccaattgtcaaaacaaacccaactgtctccatcaagacattgattgcagagattaaaacgttcatgaattataccccatcctacaagaagacatggttagcaaagcaaaaagcattggagatgattcatggaaactgggaagaatcatatgccaaactgccaaaacttttcggagctttgcaatcttgtgttcccgggactgtggtcgctgctcaaacagaatccttgtatgaggggggagaaatagtaccgggcaaaagattgtttaaacgtgtcttttggtcatttggtccatgcattaatggttttgcatattgcaaacccattgtacaagtagatggtacatggctttacggaaagtatactggcacactgttgatagctaccgcacaagatggaactaaccatatcttcccgatttcctatgccattgtagaaggggagacaacttcagcttgggggttttttctaaagaatttgagaagacatgttactccgcaaattaacatttctcttatttcagaccgacacccctcaattataagtgcctacaacaacccaagtaacttatgggtccaggacacatcccatttcttttgcctgcgccacattgcacaaaactttcttcgtggtaactcaaactgcaaacatttaaagaaaccacttatgttggctggtgagaatctattttatttattcgttataattttctttcaatcaaattttataacataatacattgattaaat

SEQ ID NO: 15267 - DNA, 1066 bp, Glycine max
  Gm_smallRNAprecursor_8100
gcaacacaatgtacaaccatcagtcggtgtactcgaggttggcatgaccttcgatgacaaatcacaatgtattcgagcaatcaaagaatacaacatcagaaatcattttgattgcagaacaatttactctgaccaaagaaggctacacttcgtctgcaagttacatgaaaatggttgtacatggagcttgggcgcatgcaattcaaagaggcataacaaatggattatcaagagtatcagaggtcatcacacttgtctcgtgccgatgcttacacaagatcatcgccaactcgacaaacacgtcatagcacagatcatccaaccaattgtcaaaacaaacccaactgtctccatcaagacattgattgcagagattaaaacgttcatgaattataccccatcctacaagaagacatggttagcaaagcaaaaagcattggagatgattcatggaaactgggaagaatcatatgccaaactgccaaaacttttcggagctttgcaatcttgtgttcccgggactgtggtcgctgctcaaacagaatccttgtatgaggggggagaaatagtaccgggcaaaagattgtttaaacgtgtcttttggtcatttggtccatgcattaatggttttgcatattgcaaacccattgtacaagtagatggtacatggctttacggaaagtatactggcacactgttgatagctaccgcacaagatggaactaaccatatcttcccgatttcctatgccattgtagaaggggagacaacttcagcttgggggttttttctaaagaatttgagaagacatgttactccgcaaattaacatttctcttatttcagaccgacacccctcaattataagtgcctacaacaacccaagtaacttatgggtccaggacacatcccatttcttttgcctgcgccacattgcacaaaactttcttcgtggtaactcaaactgcaaacatttaaagaaaccacttatgttggctggtgagaatctattttatttattcgttataattttctttcaatcaaattttataacataatacattgat

SEQ ID NO: 15268 - DNA, 1067 bp, Glycine max
  Gm_smallRNAprecursor_8101
gcaacacaatgtacaaccatcagtcggtgtactcgaggttggcatgaccttcgatgacaaatcacaatgtattcgagcaatcaaagaatacaacatcagaaatcattttgattgcagaacaatttactctgaccaaagaaggctacacttcgtctgcaagttacatgaaaatggttgtacatggagcttgggcgcatgcaattcaaagaggcataacaaatggattatcaagagtatcagaggtcatcacacttgtctcgtgccgatgcttacacaagatcatcgccaactcgacaaacacgtcatagcacagatcatccaaccaattgtcaaaacaaacccaactgtctccatcaagacattgattgcagagattaaaacgttcatgaattataccccatcctacaagaagacatggttagcaaagcaaaaagcattggagatgattcatggaaactgggaagaatcatatgccaaactgccaaaacttttcggagctttgcaatcttgtgttcccgggactgtggtcgctgctcaaacagaatccttgtatgaggggggagaaatagtaccgggcaaaagattgtttaaacgtgtcttttggtcatttggtccatgcattaatggttttgcatattgcaaacccattgtacaagtagatggtacatggctttacggaaagtatactggcacactgttgatagctaccgcacaagatggaactaaccatatcttcccgatttcctatgccattgtagaaggggagacaacttcagcttgggggttttttctaaagaatttgagaagacatgttactccgcaaattaacatttctcttatttcagaccgacacccctcaattataagtgcctacaacaacccaagtaacttatgggtccaggacacatcccatttcttttgcctgcgccacattgcacaaaactttcttcgtggtaactcaaactgcaaacatttaaagaaaccacttatgttggctggtgagaatctattttatttattcgttataattttctttcaatcaaattttataacataatacattgatt

SEQ ID NO: 15269 - DNA, 1065 bp, Glycine max
  Gm_smallRNAprecursor_8102
caacacaatgtacaaccatcagtcggtgtactcgaggttggcatgaccttcgatgacaaatcacaatgtattcgagcaatcaaagaatacaacatcagaaatcattttgattgcagaacaatttactctgaccaaagaaggctacacttcgtctgcaagttacatgaaaatggttgtacatggagcttgggcgcatgcaattcaaagaggcataacaaatggattatcaagagtatcagaggtcatcacacttgtctcgtgccgatgcttacacaagatcatcgccaactcgacaaacacgtcatagcacagatcatccaaccaattgtcaaaacaaacccaactgtctccatcaagacattgattgcagagattaaaacgttcatgaattataccccatcctacaagaagacatggttagcaaagcaaaaagcattggagatgattcatggaaactgggaagaatcatatgccaaactgccaaaacttttcggagctttgcaatcttgtgttcccgggactgtggtcgctgctcaaacagaatccttgtatgaggggggagaaatagtaccgggcaaaagattgtttaaacgtgtcttttggtcatttggtccatgcattaatggttttgcatattgcaaacccattgtacaagtagatggtacatggctttacggaaagtatactggcacactgttgatagctaccgcacaagatggaactaaccatatcttcccgatttcctatgccattgtagaaggggagacaacttcagcttgggggttttttctaaagaatttgagaagacatgttactccgcaaattaacatttctcttatttcagaccgacacccctcaattataagtgcctacaacaacccaagtaacttatgggtccaggacacatcccatttcttttgcctgcgccacattgcacaaaactttcttcgtggtaactcaaactgcaaacatttaaagaaaccacttatgttggctggtgagaatctattttatttattcgttataattttctttcaatcaaattttataacataatacattgat

SEQ ID NO: 15270 - DNA, 1078 bp, Glycine max
  Gm_smallRNAprecursor_8103
ggacggtaactgtggatatcggtccattgccgctttattaggtatgggggaagattcgtggccgttagtgcgtaatgaattgattaaagaacttggcaggtggtcacatgagtacatgaacctcttcggtggcacagagaaatttgaacaattaaagttgtccctacttgttgatgggttttcgaaggtatgtttttaggttaatttttttaataacaaactttaaattacttacatgtgtatatttggttgattcaggttagtgtggacaagtggatggatataacggagatgggatatgtgattgcatcacggtataacgtaatccttgtatcgttgtcccgacaacaaagcatgacattttttcctcttagaagtcaaccaccacctgatttttctgggcaccacatgatatgtgtcggtcacgtgtttggaaatcattttgttcaggtacattgaatatagttagtataacaattatgcaatgactttgctggttcatttgacacggtcaccgcatgatataatctttgttcatgtacaacaggtttatttgaaagaccattgtcccttaccgcctccagcgttgttgtggtcaagcaattgttattctcaggcaaagcagtggacaactccatatattagtagaatgcagcaatacacaagcttgatgtcattcaaaagacactatgtcgacctaaatgacgactaaacatgcattttttatgtaattgtattcattatgcgatataatttgttgtaaccaattactaaccaattaatattattaagtactcgtttggttaagcaaaaaaattgttggtccaacaaaaatcatttacgcgtgtagcatacatcattgtcataattgacaacacataatgacatgcatgcgtattaaagtttgagttgaggaccaacaaagaactgctgaaggtgttagtacaatctaactactggaaaaaatatggaccgatagaaattttagctgtctttactaaatatgttgtgaaaatcgaagacgaggtcattgcgacatcgctaaacaactgaatgcaatgtttatttttttgttttt

SEQ ID NO: 15271 - DNA, 1146 bp, Glycine max
  Gm_smallRNAprecursor_8104
ccaaagcgatgaccaaatcgatgacgagggtgttggcagaccaacgacacctccgtcacctccgttgtaatatcaccaacctaggtgtccagtagacttgaactttgaccacctaccacactacattaatcaacaacattttgttcattaacaacacaatgtacaaccaccaatcggtatactcgaggttggcatgaccttcgatgacaaagcacaatgtattcgtgcagtcaaagaatacaacatcagaaatcatttagattgcacaacaatttactctgaccagagaaggctaaacttcgtctgtaagttacatgaaaatggttgtccatggagcttgagcgcatgtaattcaaagaggcataacaaatggattatcaagagtatcagaggtcatcacacttgtcttgtgccaatgctcagataagatcatcgtcaactcgacaaacacgtcataacacagatcatccaaccaattgtcaaaacaaacccaactgtctccatcaagacgttgattgcagagatcaaaacattcatgaattataccccatcctacaagaaaacacggttaggaaagtaaagagcgttggagatgattcatggaaactgggaagaatcatacgccaaactgccaaaaattttcggagctttgcaatcttgtgttcccaggactgtggtccctgctcaaacataatccttttatgaggggggagaaatagtaccgggcaaaagattgtttaaacgtgtcttttggtcatttgatccatgcattaatggttttgtatattgcaaacccatagtacaagtagatggtacatggctttacaagaagtatactggcacactgttgatagctaccacacaagatagaactaaccatatcttcccgattgcctacaccattgtagaaggggagacaacttcagcttaggggttttttttaaagaatttgagaagacatgttactccgcaaattaacatttctctcacttcagaccgacacccctcaattataagtgcctacaacaactaaagtaacttatgggtccaggacacatctcatttcttttgcctacgccacattgcacaaaactttgttcgcagtaactcaaactgcaaacatttaaagaaaccactcatgttggc

SEQ ID NO: 15272 - DNA, 1076 bp, Glycine max
  Gm_smallRNAprecursor_8105
cattaacaacacaatgtacaaccaccaatcggtatactcgaggttggcatgaccttcgatgacaaagcacaatgtattcgtgcagtcaaagaatacaacatcagaaatcatttagattgcacaacaatttactctgaccagagaaggctaaacttcgtctgtaagttacatgaaaatggttgtccatggagcttgagcgcatgtaattcaaagaggcataacaaatggattatcaagagtatcagaggtcatcacacttgtcttgtgccaatgctcagataagatcatcgtcaactcgacaaacacgtcataacacagatcatccaaccaattgtcaaaacaaacccaactgtctccatcaagacgttgattgcagagatcaaaacattcatgaattataccccatcctacaagaaaacacggttaggaaagtaaagagcgttggagatgattcatggaaactgggaagaatcatacgccaaactgccaaaaattttcggagctttgcaatcttgtgttcccaggactgtggtccctgctcaaacataatccttttatgaggggggagaaatagtaccgggcaaaagattgtttaaacgtgtcttttggtcatttgatccatgcattaatggttttgtatattgcaaacccatagtacaagtagatggtacatggctttacaagaagtatactggcacactgttgatagctaccacacaagatagaactaaccatatcttcccgattgcctacaccattgtagaaggggagacaacttcagcttaggggttttttttaaagaatttgagaagacatgttactccgcaaattaacatttctctcacttcagaccgacacccctcaattataagtgcctacaacaactaaagtaacttatgggtccaggacacatctcatttcttttgcctacgccacattgcacaaaactttgttcgcagtaactcaaactgcaaacatttaaagaaaccactcatgttggctggtgagaatctattttatttatttattaaaattttctatcaatcaaattttataacataatagattgattgaat

SEQ ID NO: 15273 - DNA, 1065 bp, Glycine max
  Gm_smallRNAprecursor_8106
caacacaatgtacaaccaccaatcggtatactcgaggttggcatgaccttcgatgacaaagcacaatgtattcgtgcagtcaaagaatacaacatcagaaatcatttagattgcacaacaatttactctgaccagagaaggctaaacttcgtctgtaagttacatgaaaatggttgtccatggagcttgagcgcatgtaattcaaagaggcataacaaatggattatcaagagtatcagaggtcatcacacttgtcttgtgccaatgctcagataagatcatcgtcaactcgacaaacacgtcataacacagatcatccaaccaattgtcaaaacaaacccaactgtctccatcaagacgttgattgcagagatcaaaacattcatgaattataccccatcctacaagaaaacacggttaggaaagtaaagagcgttggagatgattcatggaaactgggaagaatcatacgccaaactgccaaaaattttcggagctttgcaatcttgtgttcccaggactgtggtccctgctcaaacataatccttttatgaggggggagaaatagtaccgggcaaaagattgtttaaacgtgtcttttggtcatttgatccatgcattaatggttttgtatattgcaaacccatagtacaagtagatggtacatggctttacaagaagtatactggcacactgttgatagctaccacacaagatagaactaaccatatcttcccgattgcctacaccattgtagaaggggagacaacttcagcttaggggttttttttaaagaatttgagaagacatgttactccgcaaattaacatttctctcacttcagaccgacacccctcaattataagtgcctacaacaactaaagtaacttatgggtccaggacacatctcatttcttttgcctacgccacattgcacaaaactttgttcgcagtaactcaaactgcaaacatttaaagaaaccactcatgttggctggtgagaatctattttatttatttattaaaattttctatcaatcaaattttataacataatagattgat

SEQ ID NO: 15274 - DNA, 1067 bp, Glycine max
  Gm_smallRNAprecursor_8107
atagcaatctgagattgaacaggaatattttgcaagatagattcattaggtcgattaatccagtcctcaaagtcaccatattgattagttgactattgtggcacatcaacttgattaatattttgcaacttatcattaaatggctttaaatcttcatgtatgggttggctttgaaagatgttttgcaagcaattgtttatagatggagaattggaagtttttgaggtaggttgaaaacttgccacttacatatgggacgattaatgtttttgattaacatcctaatcggacttaggataaaccaatgtacactgagtttatatagacactatcagtatcaactattagtctaatatgtgaatcaaattctctgaacaatgtacagtattagcatataaaaatttgggtgatgctaggtgcacccagcattttaagtgaatgggcaaaaatacccttcactcaagttgatccgtacgagtcatacggatcaacatgatctgtatgagtcatatggatcaacttgatctgtaagttgatccatatgacttatacggatttcatacgaatcaagttgatccgtatgtttaaattatacttacggatcaagttcatccgtacaaaccatacggatcaaccataggataattttggaattaacaaaaaatgctgggtgcacaagcaataaagttggtgcacctagcatcaccctaaaaatttccttcatttttaagattgggttctccattattggttgaattgtgtgaacggaagcttatcccactacaataaatagtggtaaattactttatgcttaatatgccactaatgagtttcaccaaaaaacaaaacacaagaaaaaaattctaatagtaaagaaataaaccaaaaacctctcaattttgaacactttttttctttggaaaaaaaacctagtcactaattgtataaaagttttaatttttttttacattatctcatcaatcaaaatttattatatataaaagtttgttaacttttataagaattacattaatagtcatacttcaatttttttggaataaccaaaa

SEQ ID NO: 15275 - DNA, 1035 bp, Glycine max
  Gm_smallRNAprecursor_8108
tgcattgcattcgaaatgtaaagtttgcagaaacttaaaatggttcacaatcatacattttccttgcgtactcgtttctctctgcgctgggtactttgagtatataaggattttgtagaaatgatttgcgacctcgaaatctgactaaaaaactgctatatatagacattcgaaaataaactgccctaacggtcgaacattatcctaatgccaagtgtcctgctacgtacaccttacatgcacataactgctccttagaacggttatccacattgctcgaagtcgaactgatttttgtgaagttttgtcagaaattgtgctaagtccagaaatcttgctgccttgacttcgactcgaccatacaccagttcgaatcgcccaatggttcgaagccctctttcttgtcttagccttatacttcataaatacttctttgatcccgtgaatccctttcaataaactcttctttcttttcgattcgaacaggatctgacaagactcttgctctttaatacgcttcgaaattcaagacgacatctaatgcgtatttagagcatattttagctcatcaaaaatatgggctaacaaattgcccccaaaaaatgtctgcttcgattcgagatcgaaggaagatgagaagttgacattttttctcttcttctaccagttttcctgaaacggcgtcatgatcgcacgttcactgtgtaaccgtcgcctcgatctcccactacccatcattaattccacttttctaggcaaagtgggacacgtgtcatgctggggaatcggaagggaaatctgatgtgattgatttttgaccattgattcttattatattgtttttccccttttaaaagtgaaatcccataaatagcgccagaaaccccagacaaaaccccttcagcttctttgcttccgaaacccttcttcttcttcgcttctgaaacctttcttcttctaattcgtatccattatctccggcgaagctttcttattttcagataacaacttgctactcctttcatcatcaacctc

SEQ ID NO: 15276 - DNA, 1081 bp, Glycine max
  Gm_smallRNAprecursor_8109
tggctgttgagggtggtgagccaatcaagaagaaaaagaaaaagaccaagccttcaaaagaacaaggtgacaatcaacctgttgacgtccaaccaccttcgaccgatattgacggcactgaagtagaggctactccttctgttgctgagatgggcaaccctgtcgatcaaccggactcaccaccagaacaacctgccgtcgaggtatcatcctcttaatgtgttttaaatcatagcttatacgaaactatttgttaacctttttccatgataattcgaatcaggtacaacaaaatgtttctgtagaagaaataccctcacatgctcgaacatctcccgctcctgagacggatgcagtgaatgttgaggaacagggtgaaggtcaaggcattggatccagcagtcctcatggatcgagtcagaaaagttcatctgaagaaaacttttccgatgaagaggccatagaagaggctgaagctggaggttcggacatttacccggcgtcttcgacatctaagctttcgaagaggctgaagctggaggttcggacatttacccggcgtcttcgacatctaagctttccgctagcatagggatcgcagaagatacattcattcaaatgcaagacgaagaccctgctgcagcccttcgactcctgctgaacacaagtcaagccaacacctcaagtgaaaagattcctggtgcttcgtcctcatctgatgccgaaataaactcctcagtacgccaagattgcctgctcttgaagttatcaatggaatacgcacgggaagacgtacttaaatccattgaagagaacccctctgctgcttttgggcacctgaactttttgaagaaattgcacaacccccttacctctgatgagattctaggcaaagttatccaaatcgagtccattatcgatcaatttgcaagtactgtgcagaaaaaacgcgaaaatgacgccagactagatgcccagaaacaggcacatatccttctgctcgagaaagcccgagctgctcaacatgaagtcgaacgtctcaccaaagaggcgaaagaaggatcttctgagatcaaagcct

SEQ ID NO: 15277 - DNA, 1086 bp, Glycine max
  Gm_smallRNAprecursor_8110
cggcactgaagtagaggctactccttctgttgctgagatgggcaaccctgtcgatcaaccggactcaccaccagaacaacctgccgtcgaggtatcatcctcttaatgtgttttaaatcatagcttatacgaaactatttgttaacctttttccatgataattcgaatcaggtacaacaaaatgtttctgtagaagaaataccctcacatgctcgaacatctcccgctcctgagacggatgcagtgaatgttgaggaacagggtgaaggtcaaggcattggatccagcagtcctcatggatcgagtcagaaaagttcatctgaagaaaacttttccgatgaagaggccatagaagaggctgaagctggaggttcggacatttacccggcgtcttcgacatctaagctttcgaagaggctgaagctggaggttcggacatttacccggcgtcttcgacatctaagctttccgctagcatagggatcgcagaagatacattcattcaaatgcaagacgaagaccctgctgcagcccttcgactcctgctgaacacaagtcaagccaacacctcaagtgaaaagattcctggtgcttcgtcctcatctgatgccgaaataaactcctcagtacgccaagattgcctgctcttgaagttatcaatggaatacgcacgggaagacgtacttaaatccattgaagagaacccctctgctgcttttgggcacctgaactttttgaagaaattgcacaacccccttacctctgatgagattctaggcaaagttatccaaatcgagtccattatcgatcaatttgcaagtactgtgcagaaaaaacgcgaaaatgacgccagactagatgcccagaaacaggcacatatccttctgctcgagaaagcccgagctgctcaacatgaagtcgaacgtctcaccaaagaggcgaaagaaggatcttctgagatcaaagcctgtgatgataacatttcctcctgggaggcaactattacgaatttgctgtctcaggtcgatgatctaaggcagaaaattgtaacagagcaggccaaacgcaaggaactccaggagaagg

SEQ ID NO: 15278 - DNA, 1137 bp, Glycine max
  Gm_smallRNAprecursor_8111
acgtttctgaggggttagctcctctaactcataagcaccattcgaatagatctgaattattttaaacggtccttcccaatttggggaccatttgcccaagactcgatccttactatctatgggcaggataaccttccaaactaaatctccaatattaaaagtttttgactttactttcttattataagctttagcaactctttctttttgtttagtcaaaacttctaatgctcttaatctctcctcatctaaatcaaccaactcatctgacatcattttccaataatggtcgattggaatgtccatttgtttttgtaccctggctgattgcaaatgtatttcgaccggaagtacagcatcatgcccataagtcagtcgaaatggggtagtattagttgattccttaggagaatttctacatgcccatagaacttgatctaacgttttattccaatttcttggcttttgggcaatgtgttttttaatcaagttaattacaatcttattggctgcttcgacctgaccatttgcttgcgcgtaatatggtgttgaggttaataatcgaaagccagtttctttggcaaattcttgcatttttcgtccagtaaaaactgaaccttgatcagtggtaattgtttcaggaataccatacctataaataatatgattttgaatgaaactaattactgcttcctgatcaacatttggcaaagggactgcttcgatccattttgtaaaataatcgataccaactataatataacgctggttcttagaagaagcaggcttgatttcaccaattaggtccaaagcccatcctctgaaaggccaaggtttgattatggagtgtaactcactagcaggtacatgctgtatccctgcatgcttttggcattcctgacagcctttagcaaattctatgcagtcttttaatatcgaaggccaatacaaaccttgtcgaaatagaagccatttcattttatgacctgcttgatgcgaaccacaggccccactgtgaacatgggaaactgccaagtatgcttctgattcacttagacattttagcaacactccttctgcagtctttttaaacaaatcatttcccacaatcacgtaatttaaagccctatatttaat

SEQ ID NO: 15279 - DNA, 1110 bp, Glycine max
  Gm_smallRNAprecursor_8112
tgatcaacatttggcaaagggactgcttcgatccattttgtaaaataatcgataccaactataatataacgctggttcttagaagaagcaggcttgatttcaccaattaggtccaaagcccatcctctgaaaggccaaggtttgattatggagtgtaactcactagcaggtacatgctgtatccctgcatgcttttggcattcctgacagcctttagcaaattctatgcagtcttttaatatcgaaggccaatacaaaccttgtcgaaatagaagccatttcattttatgacctgcttgatgcgaaccacaggccccactgtgaacatgggaaactgccaagtatgcttctgattcacttagacattttagcaacactccttctgcagtctttttaaacaaatcatttcccacaatcacgtaatttaaagccctatatttaatctttcgagccacattacctattggattttccaaatattcaacaatggactttctccaatcattatctaacatattgtcaatggccaaaatttgaatttttccctggagatcatccatgctttcatcttcattattttgtggtgtacttgcccccacaagttttggcattggcaatttagtgcttaatggctctggtaacaccagtttatcttttatttcgatcaactgagttaacttttccttcgacattttgtaccctgaagctatttgggctaaatcatttgcttcttggttttcttgtcgaggtatatgctcaatgttaatgtaatcgaaatgattcagaagagaacttgctatcacaaaatattttgctaagtgtttattaacacatttgtattcttgtgttaattgcctcaacactaattctgaatcacctcttatgttaacatttcttgcccccaggctaattaaaatttcaaggcctgtaattagagcctcatactcagcctcattattagaacaaagccctttgattttatatttgaatttagttggaactttattgggggatattattaaaactccaattccagttccatgtttgtgtttcgaaccatcgaaatacaaaatccaaggctctgtatccacatagtcttgcggcatttcg

SEQ ID NO: 15280 - DNA, 1083 bp, Glycine max
  Gm_smallRNAprecursor_8113
caaagggactgcttcgatccattttgtaaaataatcgataccaactataatataacgctggttcttagaagaagcaggcttgatttcaccaattaggtccaaagcccatcctctgaaaggccaaggtttgattatggagtgtaactcactagcaggtacatgctgtatccctgcatgcttttggcattcctgacagcctttagcaaattctatgcagtcttttaatatcgaaggccaatacaaaccttgtcgaaatagaagccatttcattttatgacctgcttgatgcgaaccacaggccccactgtgaacatgggaaactgccaagtatgcttctgattcacttagacattttagcaacactccttctgcagtctttttaaacaaatcatttcccacaatcacgtaatttaaagccctatatttaatctttcgagccacattacctattggattttccaaatattcaacaatggactttctccaatcattatctaacatattgtcaatggccaaaatttgaatttttccctggagatcatccatgctttcatcttcattattttgtggtgtacttgcccccacaagttttggcattggcaatttagtgcttaatggctctggtaacaccagtttatcttttatttcgatcaactgagttaacttttccttcgacattttgtaccctgaagctatttgggctaaatcatttgcttcttggttttcttgtcgaggtatatgctcaatgttaatgtaatcgaaatgattcagaagagaacttgctatcacaaaatattttgctaagtgtttattaacacatttgtattcttgtgttaattgcctcaacactaattctgaatcacctcttatgttaacatttcttgcccccaggctaattaaaatttcaaggcctgtaattagagcctcatactcagcctcattattagaacaaagccctttgattttatatttgaatttagttggaactttattgggggatattattaaaactccaattccagttccatgtttgtgtttcgaaccatcgaaatacaaaatccaaggctctgtatccacatagtc

SEQ ID NO: 15281 - DNA, 1176 bp, Glycine max
  Gm_smallRNAprecursor_8114
agccacaatttgacccttaacagatttcaaaggcttgtacgttaaagaatattctgttaatgctagagcctattttccaattctactgtgtaaaataggttttgacaacatgtgcttaataatatcataatgagaatacacataaacatcaacaggctttatatattgcttaagttttgcacaagagaaatacagacaaagacaaagtttttctatggcagtatatctagtttctgcatcatttagtacacgactaagataataaattgcatgttctatgccatcatcatcttcctgagccaacatgctaccaatggtcttgtcagacgcagcaatatacaacttcatagtcttgtttcgactaggaggcattaacacaggaggcttgatcagatattctttaatttcatcgaaagccttttgatgctcttcattccatttgaatggttcatctttcttgagtcgaagtaatggcgaaaaaatttgagctttgccacttagattcgaaatgaatcgcctcaagaagttgatttttcctagcaaagactgaagctgttttttggtcgaaggaggcttcgtctcaagaatagcctttgtcttattttgatttatctcaatgccttttttatgcaccacaaaaccaaggaaatctcctgcacgcacacaaaaagcacactttaatggattcatttttaatccatgtttcctcattcgttcgaaagattgcctaaggtaatccaaatggctatcttctgaggaggatttgatgattatatcatcaatataaacttgcataaatgtatcaataaaatcatgaaacatggaattcatggccctttgataagtggccccagcatttttcaacccaaagggcataaccacccactcataagtgcctaaagcacctgggcatcgaaacgctgtttttgacacatctttttcagcaataaatatttggttataaccagaataaccatctaacatgcttaaaaattcgaagccagctgctgaatctaccaacatttccgctactggcataggatattcatctttaggtgtggcattatttaaatccctaaaatctatgcatactctaagagttccattctttttaatgacagggactatatttgctaaccattcgacatacctggcagatctgatgaatttacacct

SEQ ID NO: 15282 - DNA, 1157 bp, Glycine max
  Gm_smallRNAprecursor_8115
caattctactgtgtaaaataggttttgacaacatgtgcttaataatatcataatgagaatacacataaacatcaacaggctttatatattgcttaagttttgcacaagagaaatacagacaaagacaaagtttttctatggcagtatatctagtttctgcatcatttagtacacgactaagataataaattgcatgttctatgccatcatcatcttcctgagccaacatgctaccaatggtcttgtcagacgcagcaatatacaacttcatagtcttgtttcgactaggaggcattaacacaggaggcttgatcagatattctttaatttcatcgaaagccttttgatgctcttcattccatttgaatggttcatctttcttgagtcgaagtaatggcgaaaaaatttgagctttgccacttagattcgaaatgaatcgcctcaagaagttgatttttcctagcaaagactgaagctgttttttggtcgaaggaggcttcgtctcaagaatagcctttgtcttattttgatttatctcaatgccttttttatgcaccacaaaaccaaggaaatctcctgcacgcacacaaaaagcacactttaatggattcatttttaatccatgtttcctcattcgttcgaaagattgcctaaggtaatccaaatggctatcttctgaggaggatttgatgattatatcatcaatataaacttgcataaatgtatcaataaaatcatgaaacatggaattcatggccctttgataagtggccccagcatttttcaacccaaagggcataaccacccactcataagtgcctaaagcacctgggcatcgaaacgctgtttttgacacatctttttcagcaataaatatttggttataaccagaataaccatctaacatgcttaaaaattcgaagccagctgctgaatctaccaacatttccgctactggcataggatattcatctttaggtgtggcattatttaaatccctaaaatctatgcatactctaagagttccattctttttaatgacagggactatatttgctaaccattcgacatacctggcagatctgatgaatttacacctcagcagcctttcgatctcttccttaattttggacatgatttctggtgcgaatcttctt

SEQ ID NO: 15283 - DNA, 1039 bp, Glycine max
  Gm_smallRNAprecursor_8116
atttctggtgcgaatcttcttggtagttgttttactggtctttttccctccttaatcggtaatttcatttcgaccatttctctgcttaacccaggcatttcgtggtaatcccaagcaaaacagtctttaaattctctaagaagaagcaccaacttttcttttagacttaaggtgatattggcactgatataggttggcctttttatcgagccatctccaatgtcgatttcctccaaaggatcttgagcctgcatctttggcacctcacttatgggatttttctcaaaacccagcggctcatcatcataaatacaatccagtcttcgatcctttgtttctttgttttcatgatcttcgatcttggcttcaactgccatattttgttgagattcagcctcaaaggccgtatttagtctattttcggccatataagccgtaattctggcccatgcagtggcctcaatcatattaatcttcatatatattccacccagttggtggaatgactccatcttcagagggaacagcatcaatttcctccctctcccatataaacccataagtaggatggagtttgacagagtggataacattgtcacttgattcgacaacagcctccttgtcaccacaaggtgctatgttagccaactttttgtcaaaggtttgtgcagtaacattatcgacctctgacttatagaagctttgatccgcctctatattttcaacaatcccatcctccctccagataatgagtttctggtgaagggtagatggcacagccccaactccatgaatccattcccttcctaatagcaagttaaaattagccttagactgtattaccaggaatagagttggtcgaactatactgcctacagcaacatctacttgaatggctcccaaagaatagccagttttaccttcataattcgaaagcacaatgttgtgggcagatagatcagtgtcatgtttcccgatcttgtggagcatagatcgaggcattaagttaacagccgctcctccatctatgagcactttg

SEQ ID NO: 15284 - DNA, 1035 bp, Glycine max
  Gm_smallRNAprecursor_8117
tgcattgcattcgaaatgtaaagtttgcagaaacttaaaatggttcacaatcatacattttccttgcgtactcgtttctctctgcgctgggtactttgagtatataaggattttgtagaaatgatttgcgacctcgaaatctgactaaaaaactgctatatatagacattcgaaaataaactgccctaacggtcgaacactatcctaatgccaagtgtcctgctacgtacaccttacatgcacataactgctccttagaacggttatccacattgctcgaagtcgaactgatttttgtgaagttttgtcagaaattgtgctaagtccagaaatcttgctgccttgacttcgactcgaccatacaccagttcgaatcgcccaatggttcgaagccctctttcttgtcttagccttatacttcataaatacttctttgatcccgtgaatccctttcaataaactcttctttcttttcgattcgaacaggatctgacaagactcttgctctttaatacgcttcgaaattcaagacgacatctaatgcgtatttagagcatattttagctcatcaaaaatatgggctaacatgtcccatgagaatttatatattatttgtgcccttcgttatattaactttgtcaaatgactcagtactatttgataagagaataaactattggtgtttaacagaatttagaatggaaaaccatgagcaagcagatgctcccattcttctacttctgcatggttttatgttggttagcctgttatcagaaaattgagaggagatcaagttattcctacttggtgaggccaaacatgatagagtttaaattatagaaaaggagtaccatagaagacattcattatattgattaaaattgataaaagatacattgacaggtaggtaagtgctctatattactctttaacacctgtagtattcattttattttttgttacggttcatcaaagtctgctttgtacaatttaatcgcatgtaaagagaattaggaatgtgaacagaggagtgca

SEQ ID NO: 15285 - DNA, 1089 bp, Glycine max
  Gm_smallRNAprecursor_8118
ataattaccaattcgttgggggaagctaacgatgaatacaagctagaggaggctgacacaatagggaaaggcaaaaggagtgcaaaaaaaggtaaagaacggatgcgcctatggtcgagggtgtagtgcttcatagggaggtgaggaggacgaaggtgagaaaaaaatatattttcaaaatataaaaaaaaactgaaaaaaaggaatttaggagaaaaatatgttttcaaaaagaaaaggccaattagtaaaagttggtgaatcaaataagttgactcatgacatgtcacatgaagatcatgtttttcttgcaatctcatggattataataattaggtaaaattgtaaatttggtcccccaatttgtttctaattttgattttggtccccctttaaaattattgacgaattttatcctcctatttgatccaatcacataatcttggtcccccagtccagaattggacgttgactgttacaaaggaatattgactgtcacgtgtcacgttcttattagatgatggttgtcacatgtcatattctgattggtcaatgacaacaacaatgcatgtcatctttcatggagttgacatccaatcagaacatgacacgtgacagtcatcatccaataagaacgtgacacaaggtagtcaacattcctttgtaatagtcaacattcaagtctgaactagggtatcaagattttgtgattggataaaataggaggacaaaatttgtcaataattttaaagggagaccaaaatcaaaattgaagacaaattggggaaccaaatttataattttgcctaataatttcccgaaaggtagttatccatcaagataattgttcttttttttaccagcaaatgtcagtttgctagtttgttaactttattaaaaatatttgttggagagaatttaacttgtgacttctctctcatccctttctttcttgatccttttcttacccttggttaacttatatctcccaagacaattgtcccttaaagatgacaattagtgacatcacaactacaagatcatttgaggcaattgtcttaagcccttgattaaataatttttattttt

SEQ ID NO: 15286 - DNA, 1141 bp, Glycine max
  Gm_smallRNAprecursor_8119
atggataagttggattaatcgttgagtgaatattgaattatccgtttggacagtttaggaagagtcattgtttatagtagattcatatatatatatatatatatatatatatatatatatatatatctgataccagaggtcagcagaataagatcaaatggatagatagaaagtaagaatgcagtatgataaatggaaagaaaaatataaacttgtaaaacagatatcaagggcacaccggagaccagcttacaaatcccaggttttcataaacaaagaaaccgaagcggcggcagagccgcacaagatcagtaaagagagagaagagggatggaaaaatagaaatttattgaaacttgaaagaagcgcttacaaaaatcttgtttcagagcacctctcttctgaaacatgaaaatgcccaaatgaaagggtgcctcccaacatacttgaggactccttatatagccaaaaatctaagaccagtagttgccggtagttttgaccgggactatttgactgtttgttacaagacaagtagttttgactgagactttaatggctacaggataggtagtattgtccagcattaattacacattaattacaaatagacggttttgtgaccgaaattaaatttaatctaaacagataccaaaacaatcatcttcgttttggtaaaaggggtcttcttcttcagaagaagaagaacttgtttcttccttctttgaggatgaaccttcttcttcctgctgtaacatttgcagaacttcctttagatttttagttaggacctcctttgattttgatcctgctaaaaatgctgccagatgagacttttggttcaaaaacacagaagtttctggatcagctgctttgaggaattttggatgggattggaaccagagttttacttgttcttgatctgctttggatgagtcaaattgtgtccaccattttacaaatgtgtgtctttgtagtgatggatattggtttgtcttttcagtcttgctgtaacgatattgccatgagaagatccatgacagtgcaaagcttgaaaagtatttaagatctgctagaattcgtgattcctgcgaattgtattgtctctcaaattgagcaaatccttgttggactatttctg

SEQ ID NO: 15287 - DNA, 1154 bp, Glycine max
  Gm_smallRNAprecursor_8120
atggataagttggattaatcgttgagtgaatattgaattatccgtttggacagtttaggaagagtcattgtttatagtagattcatatatatatatatatatatatatatatatatatatatatatctgataccagaggtcagcagaataagatcaaatggatagatagaaagtaagaatgcagtatgataaatggaaagaaaaatataaacttgtaaaacagatatcaagggcacaccggagaccagcttacaaatcccaggttttcataaacaaagaaaccgaagcggcggcagagccgcacaagatcagtaaagagagagaagagggatggaaaaatagaaatttattgaaacttgaaagaagcgcttacaaaaatcttgtttcagagcacctctcttctgaaacatgaaaatgcccaaatgaaagggtgcctcccaacatacttgaggactccttatatagccaaaaatctaagaccagtagttgccggtagttttgaccgggactatttgactgtttgttacaagacaagtagttttgactgagactttaatggctacaggataggtagtattgtccagcattaattacacattaattacaaatagacggttttgtgaccgaaattaaatttaatctaaacagataccaaaacaatcatcttcgttttggtaaaaggggtcttcttcttcagaagaagaagaacttgtttcttccttctttgaggatgaaccttcttcttcctgctgtaacatttgcagaacttcctttagatttttagttaggacctcctttgattttgatcctgctaaaaatgctgccagatgagacttttggttcaaaaacacagaagtttctggatcagctgctttgaggaattttggatgggattggaaccagagttttacttgttcttgatctgctttggatgagtcaaattgtgtccaccattttacaaatgtgtgtctttgtagtgatggatattggtttgtcttttcagtcttgctgtaacgatattgccatgagaagatccatgacagtgcaaagcttgaaaagtatttaagatctgctagaattcgtgattcctgcgaattgtattgtctctcaaattgagcaaatccttgttggactatttctgggaatatctctgg

SEQ ID NO: 15288 - DNA, 1055 bp, Glycine max
  Gm_smallRNAprecursor_8121
aagatcagtaaagagagagaagagggatggaaaaatagaaatttattgaaacttgaaagaagcgcttacaaaaatcttgtttcagagcacctctcttctgaaacatgaaaatgcccaaatgaaagggtgcctcccaacatacttgaggactccttatatagccaaaaatctaagaccagtagttgccggtagttttgaccgggactatttgactgtttgttacaagacaagtagttttgactgagactttaatggctacaggataggtagtattgtccagcattaattacacattaattacaaatagacggttttgtgaccgaaattaaatttaatctaaacagataccaaaacaatcatcttcgttttggtaaaaggggtcttcttcttcagaagaagaagaacttgtttcttccttctttgaggatgaaccttcttcttcctgctgtaacatttgcagaacttcctttagatttttagttaggacctcctttgattttgatcctgctaaaaatgctgccagatgagacttttggttcaaaaacacagaagtttctggatcagctgctttgaggaattttggatgggattggaaccagagttttacttgttcttgatctgctttggatgagtcaaattgtgtccaccattttacaaatgtgtgtctttgtagtgatggatattggtttgtcttttcagtcttgctgtaacgatattgccatgagaagatccatgacagtgcaaagcttgaaaagtatttaagatctgctagaattcgtgattcctgcgaattgtattgtctctcaaattgagcaaatccttgttggactatttctgggaatatctctggaattggtccaaagaagtcccaccattgcaaaaaccaattgggaaaattgtaaattgtattggtcttgaaatatatcagccatgaatgcttgaagcgggtattttggtgccaaaacaccttagtccaagcatcaacataatcccaataggtataacctaccagatcaaatggaactgaaaatctctttcctttgttcaagtccgaa

SEQ ID NO: 15289 - DNA, 1173 bp, Glycine max
  Gm_smallRNAprecursor_8122
gaaagaagcgcttacaaaaatcttgtttcagagcacctctcttctgaaacatgaaaatgcccaaatgaaagggtgcctcccaacatacttgaggactccttatatagccaaaaatctaagaccagtagttgccggtagttttgaccgggactatttgactgtttgttacaagacaagtagttttgactgagactttaatggctacaggataggtagtattgtccagcattaattacacattaattacaaatagacggttttgtgaccgaaattaaatttaatctaaacagataccaaaacaatcatcttcgttttggtaaaaggggtcttcttcttcagaagaagaagaacttgtttcttccttctttgaggatgaaccttcttcttcctgctgtaacatttgcagaacttcctttagatttttagttaggacctcctttgattttgatcctgctaaaaatgctgccagatgagacttttggttcaaaaacacagaagtttctggatcagctgctttgaggaattttggatgggattggaaccagagttttacttgttcttgatctgctttggatgagtcaaattgtgtccaccattttacaaatgtgtgtctttgtagtgatggatattggtttgtcttttcagtcttgctgtaacgatattgccatgagaagatccatgacagtgcaaagcttgaaaagtatttaagatctgctagaattcgtgattcctgcgaattgtattgtctctcaaattgagcaaatccttgttggactatttctgggaatatctctggaattggtccaaagaagtcccaccattgcaaaaaccaattgggaaaattgtaaattgtattggtcttgaaatatatcagccatgaatgcttgaagcgggtattttggtgccaaaacaccttagtccaagcatcaacataatcccaataggtataacctaccagatcaaatggaactgaaaatctctttcctttgttcaagtccgaaccaaagtgtcttggttgaagaacttttagtatttggattgtggagtgggtgtttaatgtttggtcttttgggtctttgaaatgtttgatagatactgaatttgaatctaccaaaatcaattcataaaaagttcttgtcttcaggatggtggttggttgtagtgaaatcctgg

SEQ ID NO: 15290 - DNA, 1131 bp, Glycine max
  Gm_smallRNAprecursor_8123
acaagtagttttgactgagactttaatggctacaggataggtagtattgtccagcattaattacacattaattacaaatagacggttttgtgaccgaaattaaatttaatctaaacagataccaaaacaatcatcttcgttttggtaaaaggggtcttcttcttcagaagaagaagaacttgtttcttccttctttgaggatgaaccttcttcttcctgctgtaacatttgcagaacttcctttagatttttagttaggacctcctttgattttgatcctgctaaaaatgctgccagatgagacttttggttcaaaaacacagaagtttctggatcagctgctttgaggaattttggatgggattggaaccagagttttacttgttcttgatctgctttggatgagtcaaattgtgtccaccattttacaaatgtgtgtctttgtagtgatggatattggtttgtcttttcagtcttgctgtaacgatattgccatgagaagatccatgacagtgcaaagcttgaaaagtatttaagatctgctagaattcgtgattcctgcgaattgtattgtctctcaaattgagcaaatccttgttggactatttctgggaatatctctggaattggtccaaagaagtcccaccattgcaaaaaccaattgggaaaattgtaaattgtattggtcttgaaatatatcagccatgaatgcttgaagcgggtattttggtgccaaaacaccttagtccaagcatcaacataatcccaataggtataacctaccagatcaaatggaactgaaaatctctttcctttgttcaagtccgaaccaaagtgtcttggttgaagaacttttagtatttggattgtggagtgggtgtttaatgtttggtcttttgggtctttgaaatgtttgatagatactgaatttgaatctaccaaaatcaattcataaaaagttcttgtcttcaggatggtggttggttgtagtgaaatcctggtgggaaagccttggccgtcgccttgaagggatttttgtcccaaaattcaggttccatctgcaaaacagttacaaatttatttttataaatataattgttagtttgtttggtaggtggtgtttgagctttg

SEQ ID NO: 15291 - DNA, 1170 bp, Glycine max
  Gm_smallRNAprecursor_8124
gaagaacttgtttcttccttctttgaggatgaaccttcttcttcctgctgtaacatttgcagaacttcctttagatttttagttaggacctcctttgattttgatcctgctaaaaatgctgccagatgagacttttggttcaaaaacacagaagtttctggatcagctgctttgaggaattttggatgggattggaaccagagttttacttgttcttgatctgctttggatgagtcaaattgtgtccaccattttacaaatgtgtgtctttgtagtgatggatattggtttgtcttttcagtcttgctgtaacgatattgccatgagaagatccatgacagtgcaaagcttgaaaagtatttaagatctgctagaattcgtgattcctgcgaattgtattgtctctcaaattgagcaaatccttgttggactatttctgggaatatctctggaattggtccaaagaagtcccaccattgcaaaaaccaattgggaaaattgtaaattgtattggtcttgaaatatatcagccatgaatgcttgaagcgggtattttggtgccaaaacaccttagtccaagcatcaacataatcccaataggtataacctaccagatcaaatggaactgaaaatctctttcctttgttcaagtccgaaccaaagtgtcttggttgaagaacttttagtatttggattgtggagtgggtgtttaatgtttggtcttttgggtctttgaaatgtttgatagatactgaatttgaatctaccaaaatcaattcataaaaagttcttgtcttcaggatggtggttggttgtagtgaaatcctggtgggaaagccttggccgtcgccttgaagggatttttgtcccaaaattcaggttccatctgcaaaacagttacaaatttatttttataaatataattgttagtttgtttggtaggtggtgtttgagctttggctaaaggcagtttccctttaggattggtagctgttttggtcattgatgcattttggattattgtttgtaaatttgatttagattcatcatcagattctgaggcaatgtctgcccaagattttttgattatttttggaaatttggttagacccatgtcttgaagggcctaaagggtttcaattggccatgcatagtcgaccgatgtttgtt

SEQ ID NO: 15292 - DNA, 1107 bp, Glycine max
  Gm_smallRNAprecursor_8125
gcagaacttcctttagatttttagttaggacctcctttgattttgatcctgctaaaaatgctgccagatgagacttttggttcaaaaacacagaagtttctggatcagctgctttgaggaattttggatgggattggaaccagagttttacttgttcttgatctgctttggatgagtcaaattgtgtccaccattttacaaatgtgtgtctttgtagtgatggatattggtttgtcttttcagtcttgctgtaacgatattgccatgagaagatccatgacagtgcaaagcttgaaaagtatttaagatctgctagaattcgtgattcctgcgaattgtattgtctctcaaattgagcaaatccttgttggactatttctgggaatatctctggaattggtccaaagaagtcccaccattgcaaaaaccaattgggaaaattgtaaattgtattggtcttgaaatatatcagccatgaatgcttgaagcgggtattttggtgccaaaacaccttagtccaagcatcaacataatcccaataggtataacctaccagatcaaatggaactgaaaatctctttcctttgttcaagtccgaaccaaagtgtcttggttgaagaacttttagtatttggattgtggagtgggtgtttaatgtttggtcttttgggtctttgaaatgtttgatagatactgaatttgaatctaccaaaatcaattcataaaaagttcttgtcttcaggatggtggttggttgtagtgaaatcctggtgggaaagccttggccgtcgccttgaagggatttttgtcccaaaattcaggttccatctgcaaaacagttacaaatttatttttataaatataattgttagtttgtttggtaggtggtgtttgagctttggctaaaggcagtttccctttaggattggtagctgttttggtcattgatgcattttggattattgtttgtaaatttgatttagattcatcatcagattctgaggcaatgtctgcccaagattttttgattatttttggaaatttggttagacccatgtcttgaagggcctaaagggtttcaattggccatgcatagtcgaccgatgt

SEQ ID NO: 15293 - DNA, 1107 bp, Glycine max; identical to SEQ ID NO: 15292
  Gm_smallRNAprecursor_8126

SEQ ID NO: 15294 - DNA, 1108 bp, Glycine max
  Gm_smallRNAprecursor_8127
gcagaacttcctttagatttttagttaggacctcctttgattttgatcctgctaaaaatgctgccagatgagacttttggttcaaaaacacagaagtttctggatcagctgctttgaggaattttggatgggattggaaccagagttttacttgttcttgatctgctttggatgagtcaaattgtgtccaccattttacaaatgtgtgtctttgtagtgatggatattggtttgtcttttcagtcttgctgtaacgatattgccatgagaagatccatgacagtgcaaagcttgaaaagtatttaagatctgctagaattcgtgattcctgcgaattgtattgtctctcaaattgagcaaatccttgttggactatttctgggaatatctctggaattggtccaaagaagtcccaccattgcaaaaaccaattgggaaaattgtaaattgtattggtcttgaaatatatcagccatgaatgcttgaagcgggtattttggtgccaaaacaccttagtccaagcatcaacataatcccaataggtataacctaccagatcaaatggaactgaaaatctctttcctttgttcaagtccgaaccaaagtgtcttggttgaagaacttttagtatttggattgtggagtgggtgtttaatgtttggtcttttgggtctttgaaatgtttgatagatactgaatttgaatctaccaaaatcaattcataaaaagttcttgtcttcaggatggtggttggttgtagtgaaatcctggtgggaaagccttggccgtcgccttgaagggatttttgtcccaaaattcaggttccatctgcaaaacagttacaaatttatttttataaatataattgttagtttgtttggtaggtggtgtttgagctttggctaaaggcagtttccctttaggattggtagctgttttggtcattgatgcattttggattattgtttgtaaatttgatttagattcatcatcagattctgaggcaatgtctgcccaagattttttgattatttttggaaatttggttagacccatgtcttgaagggcctaaagggtttcaattggccatgcatagtcgaccgatgtt

SEQ ID NO: 15295 - DNA, 1101 bp, Glycine max
  Gm_smallRNAprecursor_8128
gaacttcctttagatttttagttaggacctcctttgattttgatcctgctaaaaatgctgccagatgagacttttggttcaaaaacacagaagtttctggatcagctgctttgaggaattttggatgggattggaaccagagttttacttgttcttgatctgctttggatgagtcaaattgtgtccaccattttacaaatgtgtgtctttgtagtgatggatattggtttgtcttttcagtcttgctgtaacgatattgccatgagaagatccatgacagtgcaaagcttgaaaagtatttaagatctgctagaattcgtgattcctgcgaattgtattgtctctcaaattgagcaaatccttgttggactatttctgggaatatctctggaattggtccaaagaagtcccaccattgcaaaaaccaattgggaaaattgtaaattgtattggtcttgaaatatatcagccatgaatgcttgaagcgggtattttggtgccaaaacaccttagtccaagcatcaacataatcccaataggtataacctaccagatcaaatggaactgaaaatctctttcctttgttcaagtccgaaccaaagtgtcttggttgaagaacttttagtatttggattgtggagtgggtgtttaatgtttggtcttttgggtctttgaaatgtttgatagatactgaatttgaatctaccaaaatcaattcataaaaagttcttgtcttcaggatggtggttggttgtagtgaaatcctggtgggaaagccttggccgtcgccttgaagggatttttgtcccaaaattcaggttccatctgcaaaacagttacaaatttatttttataaatataattgttagtttgtttggtaggtggtgtttgagctttggctaaaggcagtttccctttaggattggtagctgttttggtcattgatgcattttggattattgtttgtaaatttgatttagattcatcatcagattctgaggcaatgtctgcccaagattttttgattatttttggaaatttggttagacccatgtcttgaagggcctaaagggtttcaattggccatgcatagtcgaccga

SEQ ID NO: 15296 - DNA, 1104 bp, Glycine max
  Gm_smallRNAprecursor_8129
acacagaagtttctggatcagctgctttgaggaattttggatgggattggaaccagagttttacttgttcttgatctgctttggatgagtcaaattgtgtccaccattttacaaatgtgtgtctttgtagtgatggatattggtttgtcttttcagtcttgctgtaacgatattgccatgagaagatccatgacagtgcaaagcttgaaaagtatttaagatctgctagaattcgtgattcctgcgaattgtattgtctctcaaattgagcaaatccttgttggactatttctgggaatatctctggaattggtccaaagaagtcccaccattgcaaaaaccaattgggaaaattgtaaattgtattggtcttgaaatatatcagccatgaatgcttgaagcgggtattttggtgccaaaacaccttagtccaagcatcaacataatcccaataggtataacctaccagatcaaatggaactgaaaatctctttcctttgttcaagtccgaaccaaagtgtcttggttgaagaacttttagtatttggattgtggagtgggtgtttaatgtttggtcttttgggtctttgaaatgtttgatagatactgaatttgaatctaccaaaatcaattcataaaaagttcttgtcttcaggatggtggttggttgtagtgaaatcctggtgggaaagccttggccgtcgccttgaagggatttttgtcccaaaattcaggttccatctgcaaaacagttacaaatttatttttataaatataattgttagtttgtttggtaggtggtgtttgagctttggctaaaggcagtttccctttaggattggtagctgttttggtcattgatgcattttggattattgtttgtaaatttgatttagattcatcatcagattctgaggcaatgtctgcccaagattttttgattatttttggaaatttggttagacccatgtcttgaagggcctaaagggtttcaattggccatgcatagtcgaccgatgtttgtttggcggttgccggtttgggagattcctgagtggatggctcaggtttgattgaggcaatctgggttgatgacccttctaa

SEQ ID NO: 15297 - DNA, 1188 bp, Glycine max
  Gm_smallRNAprecursor_8130
acacagaagtttctggatcagctgctttgaggaattttggatgggattggaaccagagttttacttgttcttgatctgctttggatgagtcaaattgtgtccaccattttacaaatgtgtgtctttgtagtgatggatattggtttgtcttttcagtcttgctgtaacgatattgccatgagaagatccatgacagtgcaaagcttgaaaagtatttaagatctgctagaattcgtgattcctgcgaattgtattgtctctcaaattgagcaaatccttgttggactatttctgggaatatctctggaattggtccaaagaagtcccaccattgcaaaaaccaattgggaaaattgtaaattgtattggtcttgaaatatatcagccatgaatgcttgaagcgggtattttggtgccaaaacaccttagtccaagcatcaacataatcccaataggtataacctaccagatcaaatggaactgaaaatctctttcctttgttcaagtccgaaccaaagtgtcttggttgaagaacttttagtatttggattgtggagtgggtgtttaatgtttggtcttttgggtctttgaaatgtttgatagatactgaatttgaatctaccaaaatcaattcataaaaagttcttgtcttcaggatggtggttggttgtagtgaaatcctggtgggaaagccttggccgtcgccttgaagggatttttgtcccaaaattcaggttccatctgcaaaacagttacaaatttatttttataaatataattgttagtttgtttggtaggtggtgtttgagctttggctaaaggcagtttccctttaggattggtagctgttttggtcattgatgcattttggattattgtttgtaaatttgatttagattcatcatcagattctgaggcaatgtctgcccaagattttttgattatttttggaaatttggttagacccatgtcttgaagggcctaaagggtttcaattggccatgcatagtcgaccgatgtttgtttggcggttgccggtttgggagattcctgagtggatggctcaggtttgattgaggcaatctgggttgatgacccttctaaattggttttctgggtagatgacccagccggggttggtgacccagaagaggttgatgatttcttaatggttggctctggaagagc

SEQ ID NO: 15298 - DNA, 1085 bp, Glycine max
  Gm_smallRNAprecursor_8131
agctgctttgaggaattttggatgggattggaaccagagttttacttgttcttgatctgctttggatgagtcaaattgtgtccaccattttacaaatgtgtgtctttgtagtgatggatattggtttgtcttttcagtcttgctgtaacgatattgccatgagaagatccatgacagtgcaaagcttgaaaagtatttaagatctgctagaattcgtgattcctgcgaattgtattgtctctcaaattgagcaaatccttgttggactatttctgggaatatctctggaattggtccaaagaagtcccaccattgcaaaaaccaattgggaaaattgtaaattgtattggtcttgaaatatatcagccatgaatgcttgaagcgggtattttggtgccaaaacaccttagtccaagcatcaacataatcccaataggtataacctaccagatcaaatggaactgaaaatctctttcctttgttcaagtccgaaccaaagtgtcttggttgaagaacttttagtatttggattgtggagtgggtgtttaatgtttggtcttttgggtctttgaaatgtttgatagatactgaatttgaatctaccaaaatcaattcataaaaagttcttgtcttcaggatggtggttggttgtagtgaaatcctggtgggaaagccttggccgtcgccttgaagggatttttgtcccaaaattcaggttccatctgcaaaacagttacaaatttatttttataaatataattgttagtttgtttggtaggtggtgtttgagctttggctaaaggcagtttccctttaggattggtagctgttttggtcattgatgcattttggattattgtttgtaaatttgatttagattcatcatcagattctgaggcaatgtctgcccaagattttttgattatttttggaaatttggttagacccatgtcttgaagggcctaaagggtttcaattggccatgcatagtcgaccgatgtttgtttggcggttgccggtttgggagattcctgagtggatggctcaggtttgattgaggcaatctgggttgatgacccttctaa

SEQ ID NO: 15299 - DNA, 1084 bp, Glycine max
  Gm_smallRNAprecursor_8132
gctgctttgaggaattttggatgggattggaaccagagttttacttgttcttgatctgctttggatgagtcaaattgtgtccaccattttacaaatgtgtgtctttgtagtgatggatattggtttgtcttttcagtcttgctgtaacgatattgccatgagaagatccatgacagtgcaaagcttgaaaagtatttaagatctgctagaattcgtgattcctgcgaattgtattgtctctcaaattgagcaaatccttgttggactatttctgggaatatctctggaattggtccaaagaagtcccaccattgcaaaaaccaattgggaaaattgtaaattgtattggtcttgaaatatatcagccatgaatgcttgaagcgggtattttggtgccaaaacaccttagtccaagcatcaacataatcccaataggtataacctaccagatcaaatggaactgaaaatctctttcctttgttcaagtccgaaccaaagtgtcttggttgaagaacttttagtatttggattgtggagtgggtgtttaatgtttggtcttttgggtctttgaaatgtttgatagatactgaatttgaatctaccaaaatcaattcataaaaagttcttgtcttcaggatggtggttggttgtagtgaaatcctggtgggaaagccttggccgtcgccttgaagggatttttgtcccaaaattcaggttccatctgcaaaacagttacaaatttatttttataaatataattgttagtttgtttggtaggtggtgtttgagctttggctaaaggcagtttccctttaggattggtagctgttttggtcattgatgcattttggattattgtttgtaaatttgatttagattcatcatcagattctgaggcaatgtctgcccaagattttttgattatttttggaaatttggttagacccatgtcttgaagggcctaaagggtttcaattggccatgcatagtcgaccgatgtttgtttggcggttgccggtttgggagattcctgagtggatggctcaggtttgattgaggcaatctgggttgatgacccttctaa

SEQ ID NO: 15300 - DNA, 1082 bp, Glycine max
  Gm_smallRNAprecursor_8133
ctgctttgaggaattttggatgggattggaaccagagttttacttgttcttgatctgctttggatgagtcaaattgtgtccaccattttacaaatgtgtgtctttgtagtgatggatattggtttgtcttttcagtcttgctgtaacgatattgccatgagaagatccatgacagtgcaaagcttgaaaagtatttaagatctgctagaattcgtgattcctgcgaattgtattgtctctcaaattgagcaaatccttgttggactatttctgggaatatctctggaattggtccaaagaagtcccaccattgcaaaaaccaattgggaaaattgtaaattgtattggtcttgaaatatatcagccatgaatgcttgaagcgggtattttggtgccaaaacaccttagtccaagcatcaacataatcccaataggtataacctaccagatcaaatggaactgaaaatctctttcctttgttcaagtccgaaccaaagtgtcttggttgaagaacttttagtatttggattgtggagtgggtgtttaatgtttggtcttttgggtctttgaaatgtttgatagatactgaatttgaatctaccaaaatcaattcataaaaagttcttgtcttcaggatggtggttggttgtagtgaaatcctggtgggaaagccttggccgtcgccttgaagggatttttgtcccaaaattcaggttccatctgcaaaacagttacaaatttatttttataaatataattgttagtttgtttggtaggtggtgtttgagctttggctaaaggcagtttccctttaggattggtagctgttttggtcattgatgcattttggattattgtttgtaaatttgatttagattcatcatcagattctgaggcaatgtctgcccaagattttttgattatttttggaaatttggttagacccatgtcttgaagggcctaaagggtttcaattggccatgcatagtcgaccgatgtttgtttggcggttgccggtttgggagattcctgagtggatggctcaggtttgattgaggcaatctgggttgatgacccttcta

SEQ ID NO: 15301 - DNA, 1097 bp, Glycine max
  Gm_smallRNAprecursor_8134
gtgtctttgtagtgatggatattggtttgtcttttcagtcttgctgtaacgatattgccatgagaagatccatgacagtgcaaagcttgaaaagtatttaagatctgctagaattcgtgattcctgcgaattgtattgtctctcaaattgagcaaatccttgttggactatttctgggaatatctctggaattggtccaaagaagtcccaccattgcaaaaaccaattgggaaaattgtaaattgtattggtcttgaaatatatcagccatgaatgcttgaagcgggtattttggtgccaaaacaccttagtccaagcatcaacataatcccaataggtataacctaccagatcaaatggaactgaaaatctctttcctttgttcaagtccgaaccaaagtgtcttggttgaagaacttttagtatttggattgtggagtgggtgtttaatgtttggtcttttgggtctttgaaatgtttgatagatactgaatttgaatctaccaaaatcaattcataaaaagttcttgtcttcaggatggtggttggttgtagtgaaatcctggtgggaaagccttggccgtcgccttgaagggatttttgtcccaaaattcaggttccatctgcaaaacagttacaaatttatttttataaatataattgttagtttgtttggtaggtggtgtttgagctttggctaaaggcagtttccctttaggattggtagctgttttggtcattgatgcattttggattattgtttgtaaatttgatttagattcatcatcagattctgaggcaatgtctgcccaagattttttgattatttttggaaatttggttagacccatgtcttgaagggcctaaagggtttcaattggccatgcatagtcgaccgatgtttgtttggcggttgccggtttgggagattcctgagtggatggctcaggtttgattgaggcaatctgggttgatgacccttctaaattggttttctgggtagatgacccagccggggttggtgacccagaagaggttgatgatttcttaatggttggctctggaagagccagtttggctcctttgcctgtacttct

SEQ ID NO: 15302 - DNA, 1113 bp, Glycine max
  Gm_smallRNAprecursor_8135
ggaaatttggttagacccatgtcttgaagggcctaaagggtttcaattggccatgcatagtcgaccgatgtttgtttggcggttgccggtttgggagattcctgagtggatggctcaggtttgattgaggcaatctgggttgatgacccttctaaattggttttctgggtagatgacccagccggggttggtgacccagaagaggttgatgatttcttaatggttggctctggaagagccagtttggctcctttgcctgtacttcttcctccccttagggagattcctgatgccttaggaggcattaccacttttctgtaagaattcacgggtaaggtagtcaggcattgaatttgaggtgcccttgatgtattctatgtcaaaatcaaagacacttagaattgcttgtcatcttgcaaaaatttgttttgaggcaaggtttttaacatctttttgtaaaatatctttggcttatttacaatcaactctgattaaaaaaatttggtttaataaatccgattgaaatttggaaatgcacaaaacaattgctaaaacttcctttttaacagttgaatattttaattgtgtaggattccaaagttttgatgtatatgcaatgacatgatcttggccatggattctttgtttgaggatgccaccataacctatgtctgaagcatcagtttcgacaattttaaatgcctgtggaataggaagatacaaacattttatggattagactttgactttgatttctttaactgtttgtgtatggaggtcagaccaaggaggcggatttttcttcagcctatcatgcaatggcttgacaatattgtttaaatagggggaaaattctcctacgtaatttagacaacctagaaatctttgtaactgggttttgtctaagatttggttgggaaatttgctagcaaactctattgacctttctattggaatgattgtaccttgatatatattgtgaccaaggaatcgaattcgagtttggaaaagattgatttttgatttggagactaccaaaccattttgtttgatgatatggatgaaagtctggagatgtttgaaatgttggtcaatgttttgggaaaagattaa

SEQ ID NO: 15303 - DNA, 1113 bp, Glycine max; identical to SEQ ID NO: 15302
  Gm_smallRNAprecursor_8136

SEQ ID NO: 15304 - DNA, 1114 bp, Glycine max
  Gm_smallRNAprecursor_8137
ggaaatttggttagacccatgtcttgaagggcctaaagggtttcaattggccatgcatagtcgaccgatgtttgtttggcggttgccggtttgggagattcctgagtggatggctcaggtttgattgaggcaatctgggttgatgacccttctaaattggttttctgggtagatgacccagccggggttggtgacccagaagaggttgatgatttcttaatggttggctctggaagagccagtttggctcctttgcctgtacttcttcctccccttagggagattcctgatgccttaggaggcattaccacttttctgtaagaattcacgggtaaggtagtcaggcattgaatttgaggtgcccttgatgtattctatgtcaaaatcaaagacacttagaattgcttgtcatcttgcaaaaatttgttttgaggcaaggtttttaacatctttttgtaaaatatctttggcttatttacaatcaactctgattaaaaaaatttggtttaataaatccgattgaaatttggaaatgcacaaaacaattgctaaaacttcctttttaacagttgaatattttaattgtgtaggattccaaagttttgatgtatatgcaatgacatgatcttggccatggattctttgtttgaggatgccaccataacctatgtctgaagcatcagtttcgacaattttaaatgcctgtggaataggaagatacaaacattttatggattagactttgactttgatttctttaactgtttgtgtatggaggtcagaccaaggaggcggatttttcttcagcctatcatgcaatggcttgacaatattgtttaaatagggggaaaattctcctacgtaatttagacaacctagaaatctttgtaactgggttttgtctaagatttggttgggaaatttgctagcaaactctattgacctttctattggaatgattgtaccttgatatatattgtgaccaaggaatcgaattcgagtttggaaaagattgatttttgatttggagactaccaaaccattttgtttgatgatatggatgaaagtctggagatgtttgaaatgttggtcaatgttttgggaaaagattaaa

SEQ ID NO: 15305 - DNA, 1153 bp, Glycine max
  Gm_smallRNAprecursor_8138
ggaggcattaccacttttctgtaagaattcacgggtaaggtagtcaggcattgaatttgaggtgcccttgatgtattctatgtcaaaatcaaagacacttagaattgcttgtcatcttgcaaaaatttgttttgaggcaaggtttttaacatctttttgtaaaatatctttggcttatttacaatcaactctgattaaaaaaatttggtttaataaatccgattgaaatttggaaatgcacaaaacaattgctaaaacttcctttttaacagttgaatattttaattgtgtaggattccaaagttttgatgtatatgcaatgacatgatcttggccatggattctttgtttgaggatgccaccataacctatgtctgaagcatcagtttcgacaattttaaatgcctgtggaataggaagatacaaacattttatggattagactttgactttgatttctttaactgtttgtgtatggaggtcagaccaaggaggcggatttttcttcagcctatcatgcaatggcttgacaatattgtttaaatagggggaaaattctcctacgtaatttagacaacctagaaatctttgtaactgggttttgtctaagatttggttgggaaatttgctagcaaactctattgacctttctattggaatgattgtaccttgatatatattgtgaccaaggaatcgaattcgagtttggaaaagattgatttttgatttggagactaccaaaccattttgtttgatgatatggatgaaagtctggagatgtttgaaatgttggtcaatgttttgggaaaagattaaaacatcatctatgtagacaatgacaaattttgaatagggattaaaaatatcattcataattttttgaaattctgaaggggcattcttcagtccgaatgacattacattccattcatattgcctgaaaggtacaataaacactgctttgtacctatctgattcttggatttggattttccagaatccagatttcatgtcaaattttgaaaatatctttgcagaatttaatctattaagtaagtcttttttgtttggaataagatacctaatccattgtaatgcttgatttagtggtttgtaatttatgactaagcgaggcgttccacgctcaatctca

SEQ ID NO: 15306 - DNA, 1168 bp, Glycine max
  Gm_smallRNAprecursor_8139
ggaggcattaccacttttctgtaagaattcacgggtaaggtagtcaggcattgaatttgaggtgcccttgatgtattctatgtcaaaatcaaagacacttagaattgcttgtcatcttgcaaaaatttgttttgaggcaaggtttttaacatctttttgtaaaatatctttggcttatttacaatcaactctgattaaaaaaatttggtttaataaatccgattgaaatttggaaatgcacaaaacaattgctaaaacttcctttttaacagttgaatattttaattgtgtaggattccaaagttttgatgtatatgcaatgacatgatcttggccatggattctttgtttgaggatgccaccataacctatgtctgaagcatcagtttcgacaattttaaatgcctgtggaataggaagatacaaacattttatggattagactttgactttgatttctttaactgtttgtgtatggaggtcagaccaaggaggcggatttttcttcagcctatcatgcaatggcttgacaatattgtttaaatagggggaaaattctcctacgtaatttagacaacctagaaatctttgtaactgggttttgtctaagatttggttgggaaatttgctagcaaactctattgacctttctattggaatgattgtaccttgatatatattgtgaccaaggaatcgaattcgagtttggaaaagattgatttttgatttggagactaccaaaccattttgtttgatgatatggatgaaagtctggagatgtttgaaatgttggtcaatgttttgggaaaagattaaaacatcatctatgtagacaatgacaaattttgaatagggattaaaaatatcattcataattttttgaaattctgaaggggcattcttcagtccgaatgacattacattccattcatattgcctgaaaggtacaataaacactgctttgtacctatctgattcttggatttggattttccagaatccagatttcatgtcaaattttgaaaatatctttgcagaatttaatctattaagtaagtcttttttgtttggaataagatacctaatccattgtaatgcttgatttagtggtttgtaatttatgactaagcgaggcgttccacgctcaatctcagattgtttgttgaca

SEQ ID NO: 15307 - DNA, 1031 bp, Glycine max
  Gm_smallRNAprecursor_8140
ctttttgtaaaatatctttggcttatttacaatcaactctgattaaaaaaatttggtttaataaatccgattgaaatttggaaatgcacaaaacaattgctaaaacttcctttttaacagttgaatattttaattgtgtaggattccaaagttttgatgtatatgcaatgacatgatcttggccatggattctttgtttgaggatgccaccataacctatgtctgaagcatcagtttcgacaattttaaatgcctgtggaataggaagatacaaacattttatggattagactttgactttgatttctttaactgtttgtgtatggaggtcagaccaaggaggcggatttttcttcagcctatcatgcaatggcttgacaatattgtttaaatagggggaaaattctcctacgtaatttagacaacctagaaatctttgtaactgggttttgtctaagatttggttgggaaatttgctagcaaactctattgacctttctattggaatgattgtaccttgatatatattgtgaccaaggaatcgaattcgagtttggaaaagattgatttttgatttggagactaccaaaccattttgtttgatgatatggatgaaagtctggagatgtttgaaatgttggtcaatgttttgggaaaagattaaaacatcatctatgtagacaatgacaaattttgaatagggattaaaaatatcattcataattttttgaaattctgaaggggcattcttcagtccgaatgacattacattccattcatattgcctgaaaggtacaataaacactgctttgtacctatctgattcttggatttggattttccagaatccagatttcatgtcaaattttgaaaatatctttgcagaatttaatctattaagtaagtcttttttgtttggaataagatacctaatccattgtaatgcttgatttagtggtttgtaatttatgactaagcgaggcgttccacgctcaatctcagattgtttgttgacataaaaagccgcacaa

SEQ ID NO: 15308 - DNA, 1159 bp, Glycine max
  Gm_smallRNAprecursor_8141
atctttcgagaagagttacttcatcccattttatttttcttgggagagaaacgttagcctttgtcatatcagtgataaacaaagttgtttctcttttttgaggttttagcaggactctagatgcacaagtattcatgaccttgtactggatcctataaattaaggctgctgggattgatcattttttcatttcaaggccatgaaagtggatgtttaagaacaaacagagagtcaagaatgtttctgtccatcagactcactgttttgtttggataacaattaaaatatattggaccttgtcctaggctagtttcgactgttccaattagggagtcttcaaatttattatgcctaatatctcttagacacattaaaactgctgcatctatgcctatgtcaattaagggcttgatggctacttgtacacagccgatgtgtagatatttatacttacgactatgttcataaattgaattttttgaaagtaaatgaaattcttcccctatatcttgtcctagaggaatattgttttctactattttgattatgtaatcaaagttgtgtttgtccttaattgtttcaggaacgtatagttgatcctgagggatttctggaatgttccagtcatccatgttttgattgatatcttcgaatcggacttcctcatcgaagagattgtgtttgggggcgacctcttaggtctggttatcttgatcacttaataaattggaatttcttgaagaagatgatgaagaagaatttgatcgaaaagagatacgggaaaaagagcgcaatagtctagacatgattataacattctctaatatctttgccttcatttggttccatagaaatatttccataaggctatatgttacaaaacttcttggatctgaacaaatgaaaaaagatttttttttacagacaatatagtttgaacactattcctatagccaccagtatattatgtttcaatattttatttgaacaatgcaccttagccttactgccctttctcaaccacaggacttactgctacagtatcattcaactaaaatatcagactgctgtgcttccagaaaatactgttcaaacacatactgtttaaattaaaacaattgtacatggttcagacacataagttcagttaacatatgcc

SEQ ID NO: 15309 - DNA, 1224 bp, Glycine max
  Gm_smallRNAprecursor_8142
tatacttacgactatgttcataaattgaattttttgaaagtaaatgaaattcttcccctatatcttgtcctagaggaatattgttttctactattttgattatgtaatcaaagttgtgtttgtccttaattgtttcaggaacgtatagttgatcctgagggatttctggaatgttccagtcatccatgttttgattgatatcttcgaatcggacttcctcatcgaagagattgtgtttgggggcgacctcttaggtctggttatcttgatcacttaataaattggaatttcttgaagaagatgatgaagaagaatttgatcgaaaagagatacgggaaaaagagcgcaatagtctagacatgattataacattctctaatatctttgccttcatttggttccatagaaatatttccataaggctatatgttacaaaacttcttggatctgaacaaatgaaaaaagatttttttttacagacaatatagtttgaacactattcctatagccaccagtatattatgtttcaatattttatttgaacaatgcaccttagccttactgccctttctcaaccacaggacttactgctacagtatcattcaactaaaatatcagactgctgtgcttccagaaaatactgttcaaacacatactgtttaaattaaaacaattgtacatggttcagacacataagttcagttaacatatgcccttacggatactattcctacttccccatcaagctctgataccggaggtcagcggaataagaacaaacggacaaataggaagtaagaatgcagtatgataaatggaaagaaaaatataaacttgtaaaacagatatcaagggcacaccggagaccggcttacaaatcccaggttttcataaacaaagaaaccgaagcggcggcagagccgcacaggatcggtaaagagagagaagagggatgaaaatatatatatatatatatatatatatatatatatatatatatatatatatatatatatataggttaagtctcttttcttaaatttgataaaattttggtataatgcatttttctttgttctctgggtgcatacttgactgtggtggaattgatgtcatcattttcatgtcgtgtacttagagatcaatgtgaaatgttgttgaaattttatcaaatctaagaaaagagacttaacctacacgcatgaatctactataaaaaaatat

SEQ ID NO: 15310 - DNA, 1099 bp, Glycine max
  Gm_smallRNAprecursor_8143
gatatcttcgaatcggacttcctcatcgaagagattgtgtttgggggcgacctcttaggtctggttatcttgatcacttaataaattggaatttcttgaagaagatgatgaagaagaatttgatcgaaaagagatacgggaaaaagagcgcaatagtctagacatgattataacattctctaatatctttgccttcatttggttccatagaaatatttccataaggctatatgttacaaaacttcttggatctgaacaaatgaaaaaagatttttttttacagacaatatagtttgaacactattcctatagccaccagtatattatgtttcaatattttatttgaacaatgcaccttagccttactgccctttctcaaccacaggacttactgctacagtatcattcaactaaaatatcagactgctgtgcttccagaaaatactgttcaaacacatactgtttaaattaaaacaattgtacatggttcagacacataagttcagttaacatatgcccttacggatactattcctacttccccatcaagctctgataccggaggtcagcggaataagaacaaacggacaaataggaagtaagaatgcagtatgataaatggaaagaaaaatataaacttgtaaaacagatatcaagggcacaccggagaccggcttacaaatcccaggttttcataaacaaagaaaccgaagcggcggcagagccgcacaggatcggtaaagagagagaagagggatgaaaatatatatatatatatatatatatatatatatatatatatatatatatatatatatatataggttaagtctcttttcttaaatttgataaaattttggtataatgcatttttctttgttctctgggtgcatacttgactgtggtggaattgatgtcatcattttcatgtcgtgtacttagagatcaatgtgaaatgttgttgaaattttatcaaatctaagaaaagagacttaacctacacgcatgaatctactataaaaaaatatcttcttgaatgggatagggccacaccttttctgaaaaaaagtgcaatattcatggatggaataactttaaa

SEQ ID NO: 15311 - DNA, 1099 bp, Glycine max; identical to SEQ ID NO: 15310
  Gm_smallRNAprecursor_8144

SEQ ID NO: 15312 - DNA, 1187 bp, Glycine max
  Gm_smallRNAprecursor_8145
atcggcttcacgaatgtcccgcagttcttcctccatgcctcctgaagacctagaacagctgacccaacaaatcagagaccaactggaggagtcaatcacagaaaaagtgactcgaaagatgatggaatctttcagccagatgcagtcccagtttcattctcagatgcaatcacagggacttgcactacctccagagccagaggttggtccctcaggtcctcgtgtcagcacaaaggagagttgtgttgctccctcagggaacgatccagggacgagtgactcagacaaatgcgggctatatattgaagaaaatccttcccgcctggttgccctaggaagactttatgagggatccacaatagttcacaacatccctttgttgcatggccaagtcaaggttggtgttgaggaggttaaagatgcagaggctctcgttcctgtacccattgtcgaggttaccttagtggggcagacacttaacaccttccttgcttggtcaacacatcttgtgaagcgtttatcagaacatgtattttactctgattatatgtttatttttttcaattaatttgttcactgtaatcaaaatttgctaattaactatgttttatcaacaggcaactgtgtctccagcaaaacctccaaaaagcccggatgaagaggttgatgatcccctgtacctgatgacattgaccatcccacaactgtttttgaagccgctccaggttatgtgggatgctaccatattcagggtgtttaatcaaaacttcccattgtatataaagcatgaagatctctctgaaattgcacacggtggtcaatgtcttagcatatctgttatacagttgtggattctgtaagtcattttagattactattaattaccaaagtaattgttttaaattcatacataattaactttaacttaacaacacagccatctgactgagacaagtgtgcgagcggggaattctgatgtgtatggactcctcgagccacagtccattcagagatctgggcaatcacaatttgaatccgaaagttacatcaagagttggatacagagttcaaaacgagatatttaccttggagcctacctgaatgggtaagtcaaacacaataattgaatttaaataatctatactactacaataactcatattcgtctctactgcagcggacactgg

SEQ ID NO: 15313 - DNA, 1036 bp, Glycine max
  Gm_smallRNAprecursor_8146
tttggatattaattaaacgttaactacaattagtgtacacacacataaaatatatataagtagaacttttatttaaatcacgtaccttaacaacaatccacctagcagtagccttggatttcggttgtggagtatcatcaagtcctttcaaagcactagtattgaatataaggaacattaaaatattgatgttgttgagttatgccaatgaaaatgtattgaaaacaatacggacctgttaattattcccttaaggtagttgtctggcctgttatgcaaagaacaaaaccagacaactaggttttccttaggtagaatgacgaccatttgccagtgtccactgtagtagagacgaatatgggttattgtagtagtatagattatttaaattcaattattgtgtttgacttacctattcagataggctccaaggtaaacatctcgttttgaactctgtatccaactcttgatgtaactttcgaattcaaattgtgattgcccagatctctgaatggactgtggctcgaggaatccatacacatcagaattccccgctcgcacacttgtctcagtcagatggctgtgttgttaagtcaaagttaattatgtatgaatttaaaacaattactttggtaattaatagtaatctaaaatgacttacagaatccacaattgtataacagatatgctgagacattgaccaccatgtgcaatttcagagagatcttcgtgctttatatacaacgggaagttttgattaaacaccccgaatatggtagcatcgcacataacctggagcggcttcaaaaacagttgtgggatggtcaatgtcatcaggtacaggggatcatcgacctcttcatccgggctttctagaggttttgctggagacacagctgcctattgataaaacatagttaattagcaagttttgattacagtgaacaaattaattgaaaaaaataaacatataatcagagtaaaatacctgttctgataaacgcttcacaagatgtgttggccaagcaaggaaagt

SEQ ID NO: 15314 - DNA, 1053 bp, Glycine max
  Gm_smallRNAprecursor_8147
ctgagggagcaacacaactctcctttgtgctgacacgaggacctgagggaccaacctctggctctggaggtagtgcaattccctgtgattgcatctgagattgaaactgggactgcatctgactgaaggattccatcatctttcgagtcactttttctgtgattgactcctccagtgggtctctgatttgttgggtcaggtgttctaggtcttcaagaggcatggaggaagaactgcgggatgttcgtgaagctgatccaaagtattgctttatggtgacaccggctccaacagcacgaacacggccagggtgctctggtcgcccaatggcagcagtcaggatatcctgacgtccatgggggacgaacgatccctgtgacgcctgctcgtccaaagaatcctgtaccgaacacatatttgtccaaggaattcacaaaatacacaaagataattacaattattaattaaaaatgacttacaatcctgtcagttatttcctttgctgcctcagacgtcatctgtcaagttttcttcgtgcgggccatcttccatttcacgtggcgtctgatgggagatggagggtcaatgatgccctcagtgcttctagactgggcagcttcttccagtcttttctttgtcttctcagccatgagcttttcttctaaatattcataacccccacgagacaatacgtggggggcagtgttttgcttctgggaggcctgtgcctttttccgtacatcctacaaaaggataacattaatgaaaatgattattacaataaattataagaagtgattttgttgtggaaaacaactaaaatgacaaagtacatacctcccatgaggggtctctgcgggtctgacaaaactgagtccatttctccttgctaatgccatatttttcacagacaatgtcgtccgcactgtccttgtcgactgcaagtgcccatttcctagtcaagtcagatttaaactacctccagcgctcgccgacaatctgaagaattttcttctttgtcctactgtcagaagcttcagggatttgaaattc

SEQ ID NO: 15315 - DNA, 1039 bp, Glycine max
  Gm_smallRNAprecursor_8148
agaatggattcatggagttggggctgtgccatctacccttcaccagaaactcattatctggagggaagatgggattgttgaaaatatagaggcggatcaaagcttctataagtcggaggtcgataatgttactgcacaaacctttgacaaaaagttggctaacatagcaccttgtggtgacaaggaggctgttgtcgaattaggtgacaatgttatccactctgtcaaactccatccgacctatgggtttatatgggagagggaggaaatcgatgctgttccctctgaagatggagtcattccaccaactgggtggaatatgtatgaagattaatatgactgaggccactgcatgggccagaattacggcttatatggccgaaaatagactaaatacggcctttgaggctgagtctcaacaaaatatggcagtcgaagccaaaatcgaagatcatgaaaacaaagaaacaaaggatcgaagactggattgcatttatgatgatgagccgctgggttttgagaaaaatcccataaataaggtgccaaagatgcaggctcaagatcctttggaggagatcgacattggagatggctcgatgaaaaggccaacatatatcagtgccaatatcacctcaagtctaaaagaaaagttggtgcctcttcttagagaatttaaagactgttttgcttgggattaccacgaaatgcctgggttaagcagagaaatggtcgaaatgaaattaccgattaaggagggaaaaagaccagtaaaacaactaccaagaagatttgcaccagaaatcatgtccaaaattaaggaagagatcgaaaggctgctgaggtgtaaattcatcagatctgccaggtatgtcgaatggttagcaaatatagtccctgtcattaaaaagaatggaactcttagagtatgcatagattttagggatttaaataatgctacacctaaagatgaatatgctatgccagtagcagaaatgttggtagattcggcagctggcttcgaatttttaagcatgttaga

SEQ ID NO: 15316 - DNA, 1046 bp, Glycine max
  Gm_smallRNAprecursor_8149
ttcgcgaaaacatgttttttcaccaaaaacagttgaaatgcatagcataggggtcagggaccctttggaacagcccccctttggcctatttatagaaaaaatggggaggaggatgccgcccagctcgcccaggcgagctaggttgcttcctccttaagcaacccagcttgataagttcaccccccctttttcgtaatttacggaaaagttacggaagcatataggacttgattttattattttcctcttctttctcacccatcttaagtaaaatattcttatttagggttacgagaattttatagaagtattacggaagccccgaaatccatttctcaataaaagcagagaggtgcttgccacccaaatttgaaaattgagtgaataggcaatttagtccttgagattgtatcctttttgcatattagtccctaacttaatattaaattcaaaatagtccctatctttgcataagtgttgcaaaatagtccttccgttaaattttaaagtaacgccgttagtgaggtcaattttagtgccacgtggactatccacgtggcactaaaggatgacgtggcatgacatgtggacgtgcctgatgccacatcaatgtatcattaaatgatgtggcatctcatgtggacgtgcctgatgccacatcaatgttttcctcccgaaatctcatggaactttacgaattccacgacgatgggtgttaagccttccaaagcgatcaacaatggtccccggatgaaattagggtgtgtgacagtctatttacacgcccacactttgctaaatacactctcattttcgtgttcttggtcggtttctctccgaaacatcccagaactttacgaattccatgacgatgggtgttaaacattttgaagtggtcaaacgaaagtcgcatgccgacaaacaatggtccacatacgaaattagggtatgatagctgcccctctttacttatcttttattggagataaaagggaagtaaatataagacactaattttgttctagctgaatctttacccgaccgac

SEQ ID NO: 15317 - DNA, 1045 bp, Glycine max
  Gm_smallRNAprecursor_8150
tcgcgaaaacatgttttttcaccaaaaacagttgaaatgcatagcataggggtcagggaccctttggaacagcccccctttggcctatttatagaaaaaatggggaggaggatgccgcccagctcgcccaggcgagctaggttgcttcctccttaagcaacccagcttgataagttcaccccccctttttcgtaatttacggaaaagttacggaagcatataggacttgattttattattttcctcttctttctcacccatcttaagtaaaatattcttatttagggttacgagaattttatagaagtattacggaagccccgaaatccatttctcaataaaagcagagaggtgcttgccacccaaatttgaaaattgagtgaataggcaatttagtccttgagattgtatcctttttgcatattagtccctaacttaatattaaattcaaaatagtccctatctttgcataagtgttgcaaaatagtccttccgttaaattttaaagtaacgccgttagtgaggtcaattttagtgccacgtggactatccacgtggcactaaaggatgacgtggcatgacatgtggacgtgcctgatgccacatcaatgtatcattaaatgatgtggcatctcatgtggacgtgcctgatgccacatcaatgttttcctcccgaaatctcatggaactttacgaattccacgacgatgggtgttaagccttccaaagcgatcaacaatggtccccggatgaaattagggtgtgtgacagtctatttacacgcccacactttgctaaatacactctcattttcgtgttcttggtcggtttctctccgaaacatcccagaactttacgaattccatgacgatgggtgttaaacattttgaagtggtcaaacgaaagtcgcatgccgacaaacaatggtccacatacgaaattagggtatgatagctgcccctctttacttatcttttattggagataaaagggaagtaaatataagacactaattttgttctagctgaatctttacccgaccgac

SEQ ID NO: 15318 - DNA, 1199 bp, Glycine max
  Gm_smallRNAprecursor_8151
tttcaaaaactagttatgatcagcaaattttttcaaagaaaagttggaagtcatctcttttcaaaagcatgttgtttttttagctagacaacctttattataaatattttttttatattttttcttcttcttattcttttcttgctcgctctctttttactcttttttttttccatgaggtattttgctacctaaacatacgtataatatttttgctatatacatgcatatccaaggtatcttgctacctaaacatacatacatatatatatatatatatatatatatatatatatatatatatatatatgaccatggtagtttggagggtgttttcccaggtttttgaaaacaaagaaatcgaagcggcggcagagccgcacaggatcggtggagggagaagagagaaggatgaaaaatagaaatttattgaatctagaaagaagcgcttacaaaaatcttgtttcagagcacctctcttccgaaacctgaaaaaatggctaaatgaaagggtgcctcacaacatacttgaggactccttatatagccaaaaatctaagaccggtagttgccggtagttttgaccgggactatttgactgtttgttacaagacaagtagttttgaccgggactttaatggctacaggacaggtagtattgtccagtattaattacacattaattacagacagacggttttgtgaccgaaattaaatttaatctaaacagataccaaaacaatcatcttcgttttggtaaaagggatcttcttcgtcttcttcagcagaacttgtttcttccttctttgaggatgaagcttcttcttcctgttgtaacatttgtagaacttccttcagatttttagctaagacctcctttgatgtcgatcctgctaaaaatgctgccagatgagacttttggttcaaaaacacagaagtctctagatcagctgctttgaggaattctggatgggattggaaccatagttttacttggtctggatccgctttggatgagtcaaattgtgtccaccattttacaaatgcgtgtctttgtagtgatggatattggtttgtcttttcagtcttcctgtaacgatattgccatgagaatatccatgacagtgcaaagcttgaaaagtatttaagatctgctggaattcgtgattcctgcgaattgtattgtttcttaaattggg

SEQ ID NO: 15319 - DNA, 1141 bp, Glycine max
  Gm_smallRNAprecursor_8152
gctagacaacctttattataaatattttttttatattttttcttcttcttattcttttcttgctcgctctctttttactcttttttttttccatgaggtattttgctacctaaacatacgtataatatttttgctatatacatgcatatccaaggtatcttgctacctaaacatacatacatatatatatatatatatatatatatatatatatatatatatatatatgaccatggtagtttggagggtgttttcccaggtttttgaaaacaaagaaatcgaagcggcggcagagccgcacaggatcggtggagggagaagagagaaggatgaaaaatagaaatttattgaatctagaaagaagcgcttacaaaaatcttgtttcagagcacctctcttccgaaacctgaaaaaatggctaaatgaaagggtgcctcacaacatacttgaggactccttatatagccaaaaatctaagaccggtagttgccggtagttttgaccgggactatttgactgtttgttacaagacaagtagttttgaccgggactttaatggctacaggacaggtagtattgtccagtattaattacacattaattacagacagacggttttgtgaccgaaattaaatttaatctaaacagataccaaaacaatcatcttcgttttggtaaaagggatcttcttcgtcttcttcagcagaacttgtttcttccttctttgaggatgaagcttcttcttcctgttgtaacatttgtagaacttccttcagatttttagctaagacctcctttgatgtcgatcctgctaaaaatgctgccagatgagacttttggttcaaaaacacagaagtctctagatcagctgctttgaggaattctggatgggattggaaccatagttttacttggtctggatccgctttggatgagtcaaattgtgtccaccattttacaaatgcgtgtctttgtagtgatggatattggtttgtcttttcagtcttcctgtaacgatattgccatgagaatatccatgacagtgcaaagcttgaaaagtatttaagatctgctggaattcgtgattcctgcgaattgtattgtttcttaaattgggaaaatccttgttggaccgtttctg

SEQ ID NO: 15320 - DNA, 1154 bp, Glycine max
  Gm_smallRNAprecursor_8153
gctagacaacctttattataaatattttttttatattttttcttcttcttattcttttcttgctcgctctctttttactcttttttttttccatgaggtattttgctacctaaacatacgtataatatttttgctatatacatgcatatccaaggtatcttgctacctaaacatacatacatatatatatatatatatatatatatatatatatatatatatatatatgaccatggtagtttggagggtgttttcccaggtttttgaaaacaaagaaatcgaagcggcggcagagccgcacaggatcggtggagggagaagagagaaggatgaaaaatagaaatttattgaatctagaaagaagcgcttacaaaaatcttgtttcagagcacctctcttccgaaacctgaaaaaatggctaaatgaaagggtgcctcacaacatacttgaggactccttatatagccaaaaatctaagaccggtagttgccggtagttttgaccgggactatttgactgtttgttacaagacaagtagttttgaccgggactttaatggctacaggacaggtagtattgtccagtattaattacacattaattacagacagacggttttgtgaccgaaattaaatttaatctaaacagataccaaaacaatcatcttcgttttggtaaaagggatcttcttcgtcttcttcagcagaacttgtttcttccttctttgaggatgaagcttcttcttcctgttgtaacatttgtagaacttccttcagatttttagctaagacctcctttgatgtcgatcctgctaaaaatgctgccagatgagacttttggttcaaaaacacagaagtctctagatcagctgctttgaggaattctggatgggattggaaccatagttttacttggtctggatccgctttggatgagtcaaattgtgtccaccattttacaaatgcgtgtctttgtagtgatggatattggtttgtcttttcagtcttcctgtaacgatattgccatgagaatatccatgacagtgcaaagcttgaaaagtatttaagatctgctggaattcgtgattcctgcgaattgtattgtttcttaaattgggaaaatccttgttggaccgtttctgggaatatctctgg

SEQ ID NO: 15321 - DNA, 1061 bp, Glycine max
  Gm_smallRNAprecursor_8154
catgcatatccaaggtatcttgctacctaaacatacatacatatatatatatatatatatatatatatatatatatatatatatatatgaccatggtagtttggagggtgttttcccaggtttttgaaaacaaagaaatcgaagcggcggcagagccgcacaggatcggtggagggagaagagagaaggatgaaaaatagaaatttattgaatctagaaagaagcgcttacaaaaatcttgtttcagagcacctctcttccgaaacctgaaaaaatggctaaatgaaagggtgcctcacaacatacttgaggactccttatatagccaaaaatctaagaccggtagttgccggtagttttgaccgggactatttgactgtttgttacaagacaagtagttttgaccgggactttaatggctacaggacaggtagtattgtccagtattaattacacattaattacagacagacggttttgtgaccgaaattaaatttaatctaaacagataccaaaacaatcatcttcgttttggtaaaagggatcttcttcgtcttcttcagcagaacttgtttcttccttctttgaggatgaagcttcttcttcctgttgtaacatttgtagaacttccttcagatttttagctaagacctcctttgatgtcgatcctgctaaaaatgctgccagatgagacttttggttcaaaaacacagaagtctctagatcagctgctttgaggaattctggatgggattggaaccatagttttacttggtctggatccgctttggatgagtcaaattgtgtccaccattttacaaatgcgtgtctttgtagtgatggatattggtttgtcttttcagtcttcctgtaacgatattgccatgagaatatccatgacagtgcaaagcttgaaaagtatttaagatctgctggaattcgtgattcctgcgaattgtattgtttcttaaattgggaaaatccttgttggaccgtttctgggaatatctctgggattggtccaaagaagtcccaccattgcaaaaaccagttgggaaaat

SEQ ID NO: 15322 - DNA, 1063 bp, Glycine max
  Gm_smallRNAprecursor_8155
catgcatatccaaggtatcttgctacctaaacatacatacatatatatatatatatatatatatatatatatatatatatatatatatgaccatggtagtttggagggtgttttcccaggtttttgaaaacaaagaaatcgaagcggcggcagagccgcacaggatcggtggagggagaagagagaaggatgaaaaatagaaatttattgaatctagaaagaagcgcttacaaaaatcttgtttcagagcacctctcttccgaaacctgaaaaaatggctaaatgaaagggtgcctcacaacatacttgaggactccttatatagccaaaaatctaagaccggtagttgccggtagttttgaccgggactatttgactgtttgttacaagacaagtagttttgaccgggactttaatggctacaggacaggtagtattgtccagtattaattacacattaattacagacagacggttttgtgaccgaaattaaatttaatctaaacagataccaaaacaatcatcttcgttttggtaaaagggatcttcttcgtcttcttcagcagaacttgtttcttccttctttgaggatgaagcttcttcttcctgttgtaacatttgtagaacttccttcagatttttagctaagacctcctttgatgtcgatcctgctaaaaatgctgccagatgagacttttggttcaaaaacacagaagtctctagatcagctgctttgaggaattctggatgggattggaaccatagttttacttggtctggatccgctttggatgagtcaaattgtgtccaccattttacaaatgcgtgtctttgtagtgatggatattggtttgtcttttcagtcttcctgtaacgatattgccatgagaatatccatgacagtgcaaagcttgaaaagtatttaagatctgctggaattcgtgattcctgcgaattgtattgtttcttaaattgggaaaatccttgttggaccgtttctgggaatatctctgggattggtccaaagaagtcccaccattgcaaaaaccagttgggaaaattg

SEQ ID NO: 15323 - DNA, 1063 bp, Glycine max; identical to SEQ ID NO: 15322
  Gm_smallRNAprecursor_8156

SEQ ID NO: 15324 - DNA, 1064 bp, Glycine max
  Gm_smallRNAprecursor_8157
catgcatatccaaggtatcttgctacctaaacatacatacatatatatatatatatatatatatatatatatatatatatatatatatgaccatggtagtttggagggtgttttcccaggtttttgaaaacaaagaaatcgaagcggcggcagagccgcacaggatcggtggagggagaagagagaaggatgaaaaatagaaatttattgaatctagaaagaagcgcttacaaaaatcttgtttcagagcacctctcttccgaaacctgaaaaaatggctaaatgaaagggtgcctcacaacatacttgaggactccttatatagccaaaaatctaagaccggtagttgccggtagttttgaccgggactatttgactgtttgttacaagacaagtagttttgaccgggactttaatggctacaggacaggtagtattgtccagtattaattacacattaattacagacagacggttttgtgaccgaaattaaatttaatctaaacagataccaaaacaatcatcttcgttttggtaaaagggatcttcttcgtcttcttcagcagaacttgtttcttccttctttgaggatgaagcttcttcttcctgttgtaacatttgtagaacttccttcagatttttagctaagacctcctttgatgtcgatcctgctaaaaatgctgccagatgagacttttggttcaaaaacacagaagtctctagatcagctgctttgaggaattctggatgggattggaaccatagttttacttggtctggatccgctttggatgagtcaaattgtgtccaccattttacaaatgcgtgtctttgtagtgatggatattggtttgtcttttcagtcttcctgtaacgatattgccatgagaatatccatgacagtgcaaagcttgaaaagtatttaagatctgctggaattcgtgattcctgcgaattgtattgtttcttaaattgggaaaatccttgttggaccgtttctgggaatatctctgggattggtccaaagaagtcccaccattgcaaaaaccagttgggaaaattgt

SEQ ID NO: 15325 - DNA, 1057 bp, Glycine max
  Gm_smallRNAprecursor_8158
gcatatccaaggtatcttgctacctaaacatacatacatatatatatatatatatatatatatatatatatatatatatatatatgaccatggtagtttggagggtgttttcccaggtttttgaaaacaaagaaatcgaagcggcggcagagccgcacaggatcggtggagggagaagagagaaggatgaaaaatagaaatttattgaatctagaaagaagcgcttacaaaaatcttgtttcagagcacctctcttccgaaacctgaaaaaatggctaaatgaaagggtgcctcacaacatacttgaggactccttatatagccaaaaatctaagaccggtagttgccggtagttttgaccgggactatttgactgtttgttacaagacaagtagttttgaccgggactttaatggctacaggacaggtagtattgtccagtattaattacacattaattacagacagacggttttgtgaccgaaattaaatttaatctaaacagataccaaaacaatcatcttcgttttggtaaaagggatcttcttcgtcttcttcagcagaacttgtttcttccttctttgaggatgaagcttcttcttcctgttgtaacatttgtagaacttccttcagatttttagctaagacctcctttgatgtcgatcctgctaaaaatgctgccagatgagacttttggttcaaaaacacagaagtctctagatcagctgctttgaggaattctggatgggattggaaccatagttttacttggtctggatccgctttggatgagtcaaattgtgtccaccattttacaaatgcgtgtctttgtagtgatggatattggtttgtcttttcagtcttcctgtaacgatattgccatgagaatatccatgacagtgcaaagcttgaaaagtatttaagatctgctggaattcgtgattcctgcgaattgtattgtttcttaaattgggaaaatccttgttggaccgtttctgggaatatctctgggattggtccaaagaagtcccaccattgcaaaaaccagttgggaaaa

SEQ ID NO: 15326 - DNA, 1058 bp, Glycine max
  Gm_smallRNAprecursor_8159
gcatatccaaggtatcttgctacctaaacatacatacatatatatatatatatatatatatatatatatatatatatatatatatgaccatggtagtttggagggtgttttcccaggtttttgaaaacaaagaaatcgaagcggcggcagagccgcacaggatcggtggagggagaagagagaaggatgaaaaatagaaatttattgaatctagaaagaagcgcttacaaaaatcttgtttcagagcacctctcttccgaaacctgaaaaaatggctaaatgaaagggtgcctcacaacatacttgaggactccttatatagccaaaaatctaagaccggtagttgccggtagttttgaccgggactatttgactgtttgttacaagacaagtagttttgaccgggactttaatggctacaggacaggtagtattgtccagtattaattacacattaattacagacagacggttttgtgaccgaaattaaatttaatctaaacagataccaaaacaatcatcttcgttttggtaaaagggatcttcttcgtcttcttcagcagaacttgtttcttccttctttgaggatgaagcttcttcttcctgttgtaacatttgtagaacttccttcagatttttagctaagacctcctttgatgtcgatcctgctaaaaatgctgccagatgagacttttggttcaaaaacacagaagtctctagatcagctgctttgaggaattctggatgggattggaaccatagttttacttggtctggatccgctttggatgagtcaaattgtgtccaccattttacaaatgcgtgtctttgtagtgatggatattggtttgtcttttcagtcttcctgtaacgatattgccatgagaatatccatgacagtgcaaagcttgaaaagtatttaagatctgctggaattcgtgattcctgcgaattgtattgtttcttaaattgggaaaatccttgttggaccgtttctgggaatatctctgggattggtccaaagaagtcccaccattgcaaaaaccagttgggaaaat

SEQ ID NO: 15327 - DNA, 1083 bp, Glycine max
  Gm_smallRNAprecursor_8160
gcatatccaaggtatcttgctacctaaacatacatacatatatatatatatatatatatatatatatatatatatatatatatatgaccatggtagtttggagggtgttttcccaggtttttgaaaacaaagaaatcgaagcggcggcagagccgcacaggatcggtggagggagaagagagaaggatgaaaaatagaaatttattgaatctagaaagaagcgcttacaaaaatcttgtttcagagcacctctcttccgaaacctgaaaaaatggctaaatgaaagggtgcctcacaacatacttgaggactccttatatagccaaaaatctaagaccggtagttgccggtagttttgaccgggactatttgactgtttgttacaagacaagtagttttgaccgggactttaatggctacaggacaggtagtattgtccagtattaattacacattaattacagacagacggttttgtgaccgaaattaaatttaatctaaacagataccaaaacaatcatcttcgttttggtaaaagggatcttcttcgtcttcttcagcagaacttgtttcttccttctttgaggatgaagcttcttcttcctgttgtaacatttgtagaacttccttcagatttttagctaagacctcctttgatgtcgatcctgctaaaaatgctgccagatgagacttttggttcaaaaacacagaagtctctagatcagctgctttgaggaattctggatgggattggaaccatagttttacttggtctggatccgctttggatgagtcaaattgtgtccaccattttacaaatgcgtgtctttgtagtgatggatattggtttgtcttttcagtcttcctgtaacgatattgccatgagaatatccatgacagtgcaaagcttgaaaagtatttaagatctgctggaattcgtgattcctgcgaattgtattgtttcttaaattgggaaaatccttgttggaccgtttctgggaatatctctgggattggtccaaagaagtcccaccattgcaaaaaccagttgggaaaattgtagattgtgttggtcttgaaata

SEQ ID NO: 15328 - DNA, 1056 bp, Glycine max
  Gm_smallRNAprecursor_8161
catatccaaggtatcttgctacctaaacatacatacatatatatatatatatatatatatatatatatatatatatatatatatgaccatggtagtttggagggtgttttcccaggtttttgaaaacaaagaaatcgaagcggcggcagagccgcacaggatcggtggagggagaagagagaaggatgaaaaatagaaatttattgaatctagaaagaagcgcttacaaaaatcttgtttcagagcacctctcttccgaaacctgaaaaaatggctaaatgaaagggtgcctcacaacatacttgaggactccttatatagccaaaaatctaagaccggtagttgccggtagttttgaccgggactatttgactgtttgttacaagacaagtagttttgaccgggactttaatggctacaggacaggtagtattgtccagtattaattacacattaattacagacagacggttttgtgaccgaaattaaatttaatctaaacagataccaaaacaatcatcttcgttttggtaaaagggatcttcttcgtcttcttcagcagaacttgtttcttccttctttgaggatgaagcttcttcttcctgttgtaacatttgtagaacttccttcagatttttagctaagacctcctttgatgtcgatcctgctaaaaatgctgccagatgagacttttggttcaaaaacacagaagtctctagatcagctgctttgaggaattctggatgggattggaaccatagttttacttggtctggatccgctttggatgagtcaaattgtgtccaccattttacaaatgcgtgtctttgtagtgatggatattggtttgtcttttcagtcttcctgtaacgatattgccatgagaatatccatgacagtgcaaagcttgaaaagtatttaagatctgctggaattcgtgattcctgcgaattgtattgtttcttaaattgggaaaatccttgttggaccgtttctgggaatatctctgggattggtccaaagaagtcccaccattgcaaaaaccagttgggaaaa

SEQ ID NO: 15329 - DNA, 1056 bp, Glycine max; identical to SEQ ID NO: 15328
  Gm_smallRNAprecursor_8162

SEQ ID NO: 15330 - DNA, 1057 bp, Glycine max
  Gm_smallRNAprecursor_8163
catatccaaggtatcttgctacctaaacatacatacatatatatatatatatatatatatatatatatatatatatatatatatgaccatggtagtttggagggtgttttcccaggtttttgaaaacaaagaaatcgaagcggcggcagagccgcacaggatcggtggagggagaagagagaaggatgaaaaatagaaatttattgaatctagaaagaagcgcttacaaaaatcttgtttcagagcacctctcttccgaaacctgaaaaaatggctaaatgaaagggtgcctcacaacatacttgaggactccttatatagccaaaaatctaagaccggtagttgccggtagttttgaccgggactatttgactgtttgttacaagacaagtagttttgaccgggactttaatggctacaggacaggtagtattgtccagtattaattacacattaattacagacagacggttttgtgaccgaaattaaatttaatctaaacagataccaaaacaatcatcttcgttttggtaaaagggatcttcttcgtcttcttcagcagaacttgtttcttccttctttgaggatgaagcttcttcttcctgttgtaacatttgtagaacttccttcagatttttagctaagacctcctttgatgtcgatcctgctaaaaatgctgccagatgagacttttggttcaaaaacacagaagtctctagatcagctgctttgaggaattctggatgggattggaaccatagttttacttggtctggatccgctttggatgagtcaaattgtgtccaccattttacaaatgcgtgtctttgtagtgatggatattggtttgtcttttcagtcttcctgtaacgatattgccatgagaatatccatgacagtgcaaagcttgaaaagtatttaagatctgctggaattcgtgattcctgcgaattgtattgtttcttaaattgggaaaatccttgttggaccgtttctgggaatatctctgggattggtccaaagaagtcccaccattgcaaaaaccagttgggaaaat

SEQ ID NO: 15331 - DNA, 1059 bp, Glycine max
  Gm_smallRNAprecursor_8164
catatccaaggtatcttgctacctaaacatacatacatatatatatatatatatatatatatatatatatatatatatatatatgaccatggtagtttggagggtgttttcccaggtttttgaaaacaaagaaatcgaagcggcggcagagccgcacaggatcggtggagggagaagagagaaggatgaaaaatagaaatttattgaatctagaaagaagcgcttacaaaaatcttgtttcagagcacctctcttccgaaacctgaaaaaatggctaaatgaaagggtgcctcacaacatacttgaggactccttatatagccaaaaatctaagaccggtagttgccggtagttttgaccgggactatttgactgtttgttacaagacaagtagttttgaccgggactttaatggctacaggacaggtagtattgtccagtattaattacacattaattacagacagacggttttgtgaccgaaattaaatttaatctaaacagataccaaaacaatcatcttcgttttggtaaaagggatcttcttcgtcttcttcagcagaacttgtttcttccttctttgaggatgaagcttcttcttcctgttgtaacatttgtagaacttccttcagatttttagctaagacctcctttgatgtcgatcctgctaaaaatgctgccagatgagacttttggttcaaaaacacagaagtctctagatcagctgctttgaggaattctggatgggattggaaccatagttttacttggtctggatccgctttggatgagtcaaattgtgtccaccattttacaaatgcgtgtctttgtagtgatggatattggtttgtcttttcagtcttcctgtaacgatattgccatgagaatatccatgacagtgcaaagcttgaaaagtatttaagatctgctggaattcgtgattcctgcgaattgtattgtttcttaaattgggaaaatccttgttggaccgtttctgggaatatctctgggattggtccaaagaagtcccaccattgcaaaaaccagttgggaaaattg

SEQ ID NO: 15332 - DNA, 1059 bp, Glycine max; identical to SEQ ID NO: 15331
  Gm_smallRNAprecursor_8165

SEQ ID NO: 15333 - DNA, 1082 bp, Glycine max
  Gm_smallRNAprecursor_8166
catatccaaggtatcttgctacctaaacatacatacatatatatatatatatatatatatatatatatatatatatatatatatgaccatggtagtttggagggtgttttcccaggtttttgaaaacaaagaaatcgaagcggcggcagagccgcacaggatcggtggagggagaagagagaaggatgaaaaatagaaatttattgaatctagaaagaagcgcttacaaaaatcttgtttcagagcacctctcttccgaaacctgaaaaaatggctaaatgaaagggtgcctcacaacatacttgaggactccttatatagccaaaaatctaagaccggtagttgccggtagttttgaccgggactatttgactgtttgttacaagacaagtagttttgaccgggactttaatggctacaggacaggtagtattgtccagtattaattacacattaattacagacagacggttttgtgaccgaaattaaatttaatctaaacagataccaaaacaatcatcttcgttttggtaaaagggatcttcttcgtcttcttcagcagaacttgtttcttccttctttgaggatgaagcttcttcttcctgttgtaacatttgtagaacttccttcagatttttagctaagacctcctttgatgtcgatcctgctaaaaatgctgccagatgagacttttggttcaaaaacacagaagtctctagatcagctgctttgaggaattctggatgggattggaaccatagttttacttggtctggatccgctttggatgagtcaaattgtgtccaccattttacaaatgcgtgtctttgtagtgatggatattggtttgtcttttcagtcttcctgtaacgatattgccatgagaatatccatgacagtgcaaagcttgaaaagtatttaagatctgctggaattcgtgattcctgcgaattgtattgtttcttaaattgggaaaatccttgttggaccgtttctgggaatatctctgggattggtccaaagaagtcccaccattgcaaaaaccagttgggaaaattgtagattgtgttggtcttgaaata

SEQ ID NO: 15334 - DNA, 1055 bp, Glycine max
  Gm_smallRNAprecursor_8167
atatccaaggtatcttgctacctaaacatacatacatatatatatatatatatatatatatatatatatatatatatatatatgaccatggtagtttggagggtgttttcccaggtttttgaaaacaaagaaatcgaagcggcggcagagccgcacaggatcggtggagggagaagagagaaggatgaaaaatagaaatttattgaatctagaaagaagcgcttacaaaaatcttgtttcagagcacctctcttccgaaacctgaaaaaatggctaaatgaaagggtgcctcacaacatacttgaggactccttatatagccaaaaatctaagaccggtagttgccggtagttttgaccgggactatttgactgtttgttacaagacaagtagttttgaccgggactttaatggctacaggacaggtagtattgtccagtattaattacacattaattacagacagacggttttgtgaccgaaattaaatttaatctaaacagataccaaaacaatcatcttcgttttggtaaaagggatcttcttcgtcttcttcagcagaacttgtttcttccttctttgaggatgaagcttcttcttcctgttgtaacatttgtagaacttccttcagatttttagctaagacctcctttgatgtcgatcctgctaaaaatgctgccagatgagacttttggttcaaaaacacagaagtctctagatcagctgctttgaggaattctggatgggattggaaccatagttttacttggtctggatccgctttggatgagtcaaattgtgtccaccattttacaaatgcgtgtctttgtagtgatggatattggtttgtcttttcagtcttcctgtaacgatattgccatgagaatatccatgacagtgcaaagcttgaaaagtatttaagatctgctggaattcgtgattcctgcgaattgtattgtttcttaaattgggaaaatccttgttggaccgtttctgggaatatctctgggattggtccaaagaagtcccaccattgcaaaaaccagttgggaaaa

SEQ ID NO: 15335 - DNA, 1058 bp, Glycine max
  Gm_smallRNAprecursor_8168
atatccaaggtatcttgctacctaaacatacatacatatatatatatatatatatatatatatatatatatatatatatatatgaccatggtagtttggagggtgttttcccaggtttttgaaaacaaagaaatcgaagcggcggcagagccgcacaggatcggtggagggagaagagagaaggatgaaaaatagaaatttattgaatctagaaagaagcgcttacaaaaatcttgtttcagagcacctctcttccgaaacctgaaaaaatggctaaatgaaagggtgcctcacaacatacttgaggactccttatatagccaaaaatctaagaccggtagttgccggtagttttgaccgggactatttgactgtttgttacaagacaagtagttttgaccgggactttaatggctacaggacaggtagtattgtccagtattaattacacattaattacagacagacggttttgtgaccgaaattaaatttaatctaaacagataccaaaacaatcatcttcgttttggtaaaagggatcttcttcgtcttcttcagcagaacttgtttcttccttctttgaggatgaagcttcttcttcctgttgtaacatttgtagaacttccttcagatttttagctaagacctcctttgatgtcgatcctgctaaaaatgctgccagatgagacttttggttcaaaaacacagaagtctctagatcagctgctttgaggaattctggatgggattggaaccatagttttacttggtctggatccgctttggatgagtcaaattgtgtccaccattttacaaatgcgtgtctttgtagtgatggatattggtttgtcttttcagtcttcctgtaacgatattgccatgagaatatccatgacagtgcaaagcttgaaaagtatttaagatctgctggaattcgtgattcctgcgaattgtattgtttcttaaattgggaaaatccttgttggaccgtttctgggaatatctctgggattggtccaaagaagtcccaccattgcaaaaaccagttgggaaaattg

SEQ ID NO: 15336 - DNA, 1058 bp, Glycine max; identical to SEQ ID NO: 15335
  Gm_smallRNAprecursor_8169

SEQ ID NO: 15337 - DNA, 1081 bp, Glycine max
  Gm_smallRNAprecursor_8170
atatccaaggtatcttgctacctaaacatacatacatatatatatatatatatatatatatatatatatatatatatatatatgaccatggtagtttggagggtgttttcccaggtttttgaaaacaaagaaatcgaagcggcggcagagccgcacaggatcggtggagggagaagagagaaggatgaaaaatagaaatttattgaatctagaaagaagcgcttacaaaaatcttgtttcagagcacctctcttccgaaacctgaaaaaatggctaaatgaaagggtgcctcacaacatacttgaggactccttatatagccaaaaatctaagaccggtagttgccggtagttttgaccgggactatttgactgtttgttacaagacaagtagttttgaccgggactttaatggctacaggacaggtagtattgtccagtattaattacacattaattacagacagacggttttgtgaccgaaattaaatttaatctaaacagataccaaaacaatcatcttcgttttggtaaaagggatcttcttcgtcttcttcagcagaacttgtttcttccttctttgaggatgaagcttcttcttcctgttgtaacatttgtagaacttccttcagatttttagctaagacctcctttgatgtcgatcctgctaaaaatgctgccagatgagacttttggttcaaaaacacagaagtctctagatcagctgctttgaggaattctggatgggattggaaccatagttttacttggtctggatccgctttggatgagtcaaattgtgtccaccattttacaaatgcgtgtctttgtagtgatggatattggtttgtcttttcagtcttcctgtaacgatattgccatgagaatatccatgacagtgcaaagcttgaaaagtatttaagatctgctggaattcgtgattcctgcgaattgtattgtttcttaaattgggaaaatccttgttggaccgtttctgggaatatctctgggattggtccaaagaagtcccaccattgcaaaaaccagttgggaaaattgtagattgtgttggtcttgaaata

SEQ ID NO: 15338 - DNA, 1188 bp, Glycine max
  Gm_smallRNAprecursor_8171
ggtatcttgctacctaaacatacatacatatatatatatatatatatatatatatatatatatatatatatatatgaccatggtagtttggagggtgttttcccaggtttttgaaaacaaagaaatcgaagcggcggcagagccgcacaggatcggtggagggagaagagagaaggatgaaaaatagaaatttattgaatctagaaagaagcgcttacaaaaatcttgtttcagagcacctctcttccgaaacctgaaaaaatggctaaatgaaagggtgcctcacaacatacttgaggactccttatatagccaaaaatctaagaccggtagttgccggtagttttgaccgggactatttgactgtttgttacaagacaagtagttttgaccgggactttaatggctacaggacaggtagtattgtccagtattaattacacattaattacagacagacggttttgtgaccgaaattaaatttaatctaaacagataccaaaacaatcatcttcgttttggtaaaagggatcttcttcgtcttcttcagcagaacttgtttcttccttctttgaggatgaagcttcttcttcctgttgtaacatttgtagaacttccttcagatttttagctaagacctcctttgatgtcgatcctgctaaaaatgctgccagatgagacttttggttcaaaaacacagaagtctctagatcagctgctttgaggaattctggatgggattggaaccatagttttacttggtctggatccgctttggatgagtcaaattgtgtccaccattttacaaatgcgtgtctttgtagtgatggatattggtttgtcttttcagtcttcctgtaacgatattgccatgagaatatccatgacagtgcaaagcttgaaaagtatttaagatctgctggaattcgtgattcctgcgaattgtattgtttcttaaattgggaaaatccttgttggaccgtttctgggaatatctctgggattggtccaaagaagtcccaccattgcaaaaaccagttgggaaaattgtagattgtgttggtcttgaaatatatcagccatgaatgcttgaagcgggtattttggtgccaaaacaccttagtccaagcatcaacgtaatcccaataagtataacctaccggatcaaatggaactgaaaatctcttt

SEQ ID NO: 15339 - DNA, 1142 bp, Glycine max
  Gm_smallRNAprecursor_8172
tatatatatatatatatatatatatatatgaccatggtagtttggagggtgttttcccaggtttttgaaaacaaagaaatcgaagcggcggcagagccgcacaggatcggtggagggagaagagagaaggatgaaaaatagaaatttattgaatctagaaagaagcgcttacaaaaatcttgtttcagagcacctctcttccgaaacctgaaaaaatggctaaatgaaagggtgcctcacaacatacttgaggactccttatatagccaaaaatctaagaccggtagttgccggtagttttgaccgggactatttgactgtttgttacaagacaagtagttttgaccgggactttaatggctacaggacaggtagtattgtccagtattaattacacattaattacagacagacggttttgtgaccgaaattaaatttaatctaaacagataccaaaacaatcatcttcgttttggtaaaagggatcttcttcgtcttcttcagcagaacttgtttcttccttctttgaggatgaagcttcttcttcctgttgtaacatttgtagaacttccttcagatttttagctaagacctcctttgatgtcgatcctgctaaaaatgctgccagatgagacttttggttcaaaaacacagaagtctctagatcagctgctttgaggaattctggatgggattggaaccatagttttacttggtctggatccgctttggatgagtcaaattgtgtccaccattttacaaatgcgtgtctttgtagtgatggatattggtttgtcttttcagtcttcctgtaacgatattgccatgagaatatccatgacagtgcaaagcttgaaaagtatttaagatctgctggaattcgtgattcctgcgaattgtattgtttcttaaattgggaaaatccttgttggaccgtttctgggaatatctctgggattggtccaaagaagtcccaccattgcaaaaaccagttgggaaaattgtagattgtgttggtcttgaaatatatcagccatgaatgcttgaagcgggtattttggtgccaaaacaccttagtccaagcatcaacgtaatcccaataagtataacctaccggatcaaatggaactgaaaatctcttt

SEQ ID NO: 15340 - DNA, 1141 bp, Glycine max
  Gm_smallRNAprecursor_8173
atatatatatatatatatatatatatatgaccatggtagtttggagggtgttttcccaggtttttgaaaacaaagaaatcgaagcggcggcagagccgcacaggatcggtggagggagaagagagaaggatgaaaaatagaaatttattgaatctagaaagaagcgcttacaaaaatcttgtttcagagcacctctcttccgaaacctgaaaaaatggctaaatgaaagggtgcctcacaacatacttgaggactccttatatagccaaaaatctaagaccggtagttgccggtagttttgaccgggactatttgactgtttgttacaagacaagtagttttgaccgggactttaatggctacaggacaggtagtattgtccagtattaattacacattaattacagacagacggttttgtgaccgaaattaaatttaatctaaacagataccaaaacaatcatcttcgttttggtaaaagggatcttcttcgtcttcttcagcagaacttgtttcttccttctttgaggatgaagcttcttcttcctgttgtaacatttgtagaacttccttcagatttttagctaagacctcctttgatgtcgatcctgctaaaaatgctgccagatgagacttttggttcaaaaacacagaagtctctagatcagctgctttgaggaattctggatgggattggaaccatagttttacttggtctggatccgctttggatgagtcaaattgtgtccaccattttacaaatgcgtgtctttgtagtgatggatattggtttgtcttttcagtcttcctgtaacgatattgccatgagaatatccatgacagtgcaaagcttgaaaagtatttaagatctgctggaattcgtgattcctgcgaattgtattgtttcttaaattgggaaaatccttgttggaccgtttctgggaatatctctgggattggtccaaagaagtcccaccattgcaaaaaccagttgggaaaattgtagattgtgttggtcttgaaatatatcagccatgaatgcttgaagcgggtattttggtgccaaaacaccttagtccaagcatcaacgtaatcccaataagtataacctaccggatcaaatggaactgaaaatctcttt

SEQ ID NO: 15341 - DNA, 1078 bp, Glycine max
  Gm_smallRNAprecursor_8174
ttacaaaaatcttgtttcagagcacctctcttccgaaacctgaaaaaatggctaaatgaaagggtgcctcacaacatacttgaggactccttatatagccaaaaatctaagaccggtagttgccggtagttttgaccgggactatttgactgtttgttacaagacaagtagttttgaccgggactttaatggctacaggacaggtagtattgtccagtattaattacacattaattacagacagacggttttgtgaccgaaattaaatttaatctaaacagataccaaaacaatcatcttcgttttggtaaaagggatcttcttcgtcttcttcagcagaacttgtttcttccttctttgaggatgaagcttcttcttcctgttgtaacatttgtagaacttccttcagatttttagctaagacctcctttgatgtcgatcctgctaaaaatgctgccagatgagacttttggttcaaaaacacagaagtctctagatcagctgctttgaggaattctggatgggattggaaccatagttttacttggtctggatccgctttggatgagtcaaattgtgtccaccattttacaaatgcgtgtctttgtagtgatggatattggtttgtcttttcagtcttcctgtaacgatattgccatgagaatatccatgacagtgcaaagcttgaaaagtatttaagatctgctggaattcgtgattcctgcgaattgtattgtttcttaaattgggaaaatccttgttggaccgtttctgggaatatctctgggattggtccaaagaagtcccaccattgcaaaaaccagttgggaaaattgtagattgtgttggtcttgaaatatatcagccatgaatgcttgaagcgggtattttggtgccaaaacaccttagtccaagcatcaacgtaatcccaataagtataacctaccggatcaaatggaactgaaaatctctttcctttgttcaagtccgaaccaaagtgtcttggttgaagaacttttagtatttggatggttgagtgggtgtttaaggtttggtcttttggatctttgaaatgttt

SEQ ID NO: 15342 - DNA, 1164 bp, Glycine max
  Gm_smallRNAprecursor_8175
ttacaaaaatcttgtttcagagcacctctcttccgaaacctgaaaaaatggctaaatgaaagggtgcctcacaacatacttgaggactccttatatagccaaaaatctaagaccggtagttgccggtagttttgaccgggactatttgactgtttgttacaagacaagtagttttgaccgggactttaatggctacaggacaggtagtattgtccagtattaattacacattaattacagacagacggttttgtgaccgaaattaaatttaatctaaacagataccaaaacaatcatcttcgttttggtaaaagggatcttcttcgtcttcttcagcagaacttgtttcttccttctttgaggatgaagcttcttcttcctgttgtaacatttgtagaacttccttcagatttttagctaagacctcctttgatgtcgatcctgctaaaaatgctgccagatgagacttttggttcaaaaacacagaagtctctagatcagctgctttgaggaattctggatgggattggaaccatagttttacttggtctggatccgctttggatgagtcaaattgtgtccaccattttacaaatgcgtgtctttgtagtgatggatattggtttgtcttttcagtcttcctgtaacgatattgccatgagaatatccatgacagtgcaaagcttgaaaagtatttaagatctgctggaattcgtgattcctgcgaattgtattgtttcttaaattgggaaaatccttgttggaccgtttctgggaatatctctgggattggtccaaagaagtcccaccattgcaaaaaccagttgggaaaattgtagattgtgttggtcttgaaatatatcagccatgaatgcttgaagcgggtattttggtgccaaaacaccttagtccaagcatcaacgtaatcccaataagtataacctaccggatcaaatggaactgaaaatctctttcctttgttcaagtccgaaccaaagtgtcttggttgaagaacttttagtatttggatggttgagtgggtgtttaaggtttggtcttttggatctttgaaatgtttgatagatactgagtttgaatctaccaaaatcaattcataaaaagttcttgtcttcaggatggtggttggtttatagtgaaatcctg

SEQ ID NO: 15343 - DNA, 1077 bp, Glycine max
  Gm_smallRNAprecursor_8176
tacaaaaatcttgtttcagagcacctctcttccgaaacctgaaaaaatggctaaatgaaagggtgcctcacaacatacttgaggactccttatatagccaaaaatctaagaccggtagttgccggtagttttgaccgggactatttgactgtttgttacaagacaagtagttttgaccgggactttaatggctacaggacaggtagtattgtccagtattaattacacattaattacagacagacggttttgtgaccgaaattaaatttaatctaaacagataccaaaacaatcatcttcgttttggtaaaagggatcttcttcgtcttcttcagcagaacttgtttcttccttctttgaggatgaagcttcttcttcctgttgtaacatttgtagaacttccttcagatttttagctaagacctcctttgatgtcgatcctgctaaaaatgctgccagatgagacttttggttcaaaaacacagaagtctctagatcagctgctttgaggaattctggatgggattggaaccatagttttacttggtctggatccgctttggatgagtcaaattgtgtccaccattttacaaatgcgtgtctttgtagtgatggatattggtttgtcttttcagtcttcctgtaacgatattgccatgagaatatccatgacagtgcaaagcttgaaaagtatttaagatctgctggaattcgtgattcctgcgaattgtattgtttcttaaattgggaaaatccttgttggaccgtttctgggaatatctctgggattggtccaaagaagtcccaccattgcaaaaaccagttgggaaaattgtagattgtgttggtcttgaaatatatcagccatgaatgcttgaagcgggtattttggtgccaaaacaccttagtccaagcatcaacgtaatcccaataagtataacctaccggatcaaatggaactgaaaatctctttcctttgttcaagtccgaaccaaagtgtcttggttgaagaacttttagtatttggatggttgagtgggtgtttaaggtttggtcttttggatctttgaaatgttt

SEQ ID NO: 15344 - DNA, 1163 bp, Glycine max
  Gm_smallRNAprecursor_8177
tacaaaaatcttgtttcagagcacctctcttccgaaacctgaaaaaatggctaaatgaaagggtgcctcacaacatacttgaggactccttatatagccaaaaatctaagaccggtagttgccggtagttttgaccgggactatttgactgtttgttacaagacaagtagttttgaccgggactttaatggctacaggacaggtagtattgtccagtattaattacacattaattacagacagacggttttgtgaccgaaattaaatttaatctaaacagataccaaaacaatcatcttcgttttggtaaaagggatcttcttcgtcttcttcagcagaacttgtttcttccttctttgaggatgaagcttcttcttcctgttgtaacatttgtagaacttccttcagatttttagctaagacctcctttgatgtcgatcctgctaaaaatgctgccagatgagacttttggttcaaaaacacagaagtctctagatcagctgctttgaggaattctggatgggattggaaccatagttttacttggtctggatccgctttggatgagtcaaattgtgtccaccattttacaaatgcgtgtctttgtagtgatggatattggtttgtcttttcagtcttcctgtaacgatattgccatgagaatatccatgacagtgcaaagcttgaaaagtatttaagatctgctggaattcgtgattcctgcgaattgtattgtttcttaaattgggaaaatccttgttggaccgtttctgggaatatctctgggattggtccaaagaagtcccaccattgcaaaaaccagttgggaaaattgtagattgtgttggtcttgaaatatatcagccatgaatgcttgaagcgggtattttggtgccaaaacaccttagtccaagcatcaacgtaatcccaataagtataacctaccggatcaaatggaactgaaaatctctttcctttgttcaagtccgaaccaaagtgtcttggttgaagaacttttagtatttggatggttgagtgggtgtttaaggtttggtcttttggatctttgaaatgtttgatagatactgagtttgaatctaccaaaatcaattcataaaaagttcttgtcttcaggatggtggttggtttatagtgaaatcctg

SEQ ID NO: 15345 - DNA, 1131 bp, Glycine max
  Gm_smallRNAprecursor_8178
acaagtagttttgaccgggactttaatggctacaggacaggtagtattgtccagtattaattacacattaattacagacagacggttttgtgaccgaaattaaatttaatctaaacagataccaaaacaatcatcttcgttttggtaaaagggatcttcttcgtcttcttcagcagaacttgtttcttccttctttgaggatgaagcttcttcttcctgttgtaacatttgtagaacttccttcagatttttagctaagacctcctttgatgtcgatcctgctaaaaatgctgccagatgagacttttggttcaaaaacacagaagtctctagatcagctgctttgaggaattctggatgggattggaaccatagttttacttggtctggatccgctttggatgagtcaaattgtgtccaccattttacaaatgcgtgtctttgtagtgatggatattggtttgtcttttcagtcttcctgtaacgatattgccatgagaatatccatgacagtgcaaagcttgaaaagtatttaagatctgctggaattcgtgattcctgcgaattgtattgtttcttaaattgggaaaatccttgttggaccgtttctgggaatatctctgggattggtccaaagaagtcccaccattgcaaaaaccagttgggaaaattgtagattgtgttggtcttgaaatatatcagccatgaatgcttgaagcgggtattttggtgccaaaacaccttagtccaagcatcaacgtaatcccaataagtataacctaccggatcaaatggaactgaaaatctctttcctttgttcaagtccgaaccaaagtgtcttggttgaagaacttttagtatttggatggttgagtgggtgtttaaggtttggtcttttggatctttgaaatgtttgatagatactgagtttgaatctaccaaaatcaattcataaaaagttcttgtcttcaggatggtggttggtttatagtgaaatcctggtgggaaagccttggccgtcgccttgaagggatttttgtcccaaaattcaggttccatctgcaaaatagttaacaatttatttttataaatataattgttagtttgtttggtaggtggtgtttgagcttt

SEQ ID NO: 15346 - DNA, 1107 bp, Glycine max
  Gm_smallRNAprecursor_8179
gtagaacttccttcagatttttagctaagacctcctttgatgtcgatcctgctaaaaatgctgccagatgagacttttggttcaaaaacacagaagtctctagatcagctgctttgaggaattctggatgggattggaaccatagttttacttggtctggatccgctttggatgagtcaaattgtgtccaccattttacaaatgcgtgtctttgtagtgatggatattggtttgtcttttcagtcttcctgtaacgatattgccatgagaatatccatgacagtgcaaagcttgaaaagtatttaagatctgctggaattcgtgattcctgcgaattgtattgtttcttaaattgggaaaatccttgttggaccgtttctgggaatatctctgggattggtccaaagaagtcccaccattgcaaaaaccagttgggaaaattgtagattgtgttggtcttgaaatatatcagccatgaatgcttgaagcgggtattttggtgccaaaacaccttagtccaagcatcaacgtaatcccaataagtataacctaccggatcaaatggaactgaaaatctctttcctttgttcaagtccgaaccaaagtgtcttggttgaagaacttttagtatttggatggttgagtgggtgtttaaggtttggtcttttggatctttgaaatgtttgatagatactgagtttgaatctaccaaaatcaattcataaaaagttcttgtcttcaggatggtggttggtttatagtgaaatcctggtgggaaagccttggccgtcgccttgaagggatttttgtcccaaaattcaggttccatctgcaaaatagttaacaatttatttttataaatataattgttagtttgtttggtaggtggtgtttgagctttggctaaaggtagttttcctttagtattggtggctgttttggtcattgacgcattttggatcattgtttgtaaatttgattcagattcatcatcagattcggaggcaatgtctgcccaagattttttgattatttttggaaatttggtcagacccatgtcttgaagggcctgaagggtctcaattggccatgcatagtcggccgatg

SEQ ID NO: 15347 - DNA, 1107 bp, Glycine max; identical to SEQ ID NO: 15346
  Gm_smallRNAprecursor_8180

SEQ ID NO: 15348 - DNA, 1108 bp, Glycine max
  Gm_smallRNAprecursor_8181
gtagaacttccttcagatttttagctaagacctcctttgatgtcgatcctgctaaaaatgctgccagatgagacttttggttcaaaaacacagaagtctctagatcagctgctttgaggaattctggatgggattggaaccatagttttacttggtctggatccgctttggatgagtcaaattgtgtccaccattttacaaatgcgtgtctttgtagtgatggatattggtttgtcttttcagtcttcctgtaacgatattgccatgagaatatccatgacagtgcaaagcttgaaaagtatttaagatctgctggaattcgtgattcctgcgaattgtattgtttcttaaattgggaaaatccttgttggaccgtttctgggaatatctctgggattggtccaaagaagtcccaccattgcaaaaaccagttgggaaaattgtagattgtgttggtcttgaaatatatcagccatgaatgcttgaagcgggtattttggtgccaaaacaccttagtccaagcatcaacgtaatcccaataagtataacctaccggatcaaatggaactgaaaatctctttcctttgttcaagtccgaaccaaagtgtcttggttgaagaacttttagtatttggatggttgagtgggtgtttaaggtttggtcttttggatctttgaaatgtttgatagatactgagtttgaatctaccaaaatcaattcataaaaagttcttgtcttcaggatggtggttggtttatagtgaaatcctggtgggaaagccttggccgtcgccttgaagggatttttgtcccaaaattcaggttccatctgcaaaatagttaacaatttatttttataaatataattgttagtttgtttggtaggtggtgtttgagctttggctaaaggtagttttcctttagtattggtggctgttttggtcattgacgcattttggatcattgtttgtaaatttgattcagattcatcatcagattcggaggcaatgtctgcccaagattttttgattatttttggaaatttggtcagacccatgtcttgaagggcctgaagggtctcaattggccatgcatagtcggccgatgt

SEQ ID NO: 15349 - DNA, 1101 bp, Glycine max
  Gm_smallRNAprecursor_8182
gaacttccttcagatttttagctaagacctcctttgatgtcgatcctgctaaaaatgctgccagatgagacttttggttcaaaaacacagaagtctctagatcagctgctttgaggaattctggatgggattggaaccatagttttacttggtctggatccgctttggatgagtcaaattgtgtccaccattttacaaatgcgtgtctttgtagtgatggatattggtttgtcttttcagtcttcctgtaacgatattgccatgagaatatccatgacagtgcaaagcttgaaaagtatttaagatctgctggaattcgtgattcctgcgaattgtattgtttcttaaattgggaaaatccttgttggaccgtttctgggaatatctctgggattggtccaaagaagtcccaccattgcaaaaaccagttgggaaaattgtagattgtgttggtcttgaaatatatcagccatgaatgcttgaagcgggtattttggtgccaaaacaccttagtccaagcatcaacgtaatcccaataagtataacctaccggatcaaatggaactgaaaatctctttcctttgttcaagtccgaaccaaagtgtcttggttgaagaacttttagtatttggatggttgagtgggtgtttaaggtttggtcttttggatctttgaaatgtttgatagatactgagtttgaatctaccaaaatcaattcataaaaagttcttgtcttcaggatggtggttggtttatagtgaaatcctggtgggaaagccttggccgtcgccttgaagggatttttgtcccaaaattcaggttccatctgcaaaatagttaacaatttatttttataaatataattgttagtttgtttggtaggtggtgtttgagctttggctaaaggtagttttcctttagtattggtggctgttttggtcattgacgcattttggatcattgtttgtaaatttgattcagattcatcatcagattcggaggcaatgtctgcccaagattttttgattatttttggaaatttggtcagacccatgtcttgaagggcctgaagggtctcaattggccatgcatagtcggccg

SEQ ID NO: 15350 - DNA, 1134 bp, Glycine max
  Gm_smallRNAprecursor_8183
acttccttcagatttttagctaagacctcctttgatgtcgatcctgctaaaaatgctgccagatgagacttttggttcaaaaacacagaagtctctagatcagctgctttgaggaattctggatgggattggaaccatagttttacttggtctggatccgctttggatgagtcaaattgtgtccaccattttacaaatgcgtgtctttgtagtgatggatattggtttgtcttttcagtcttcctgtaacgatattgccatgagaatatccatgacagtgcaaagcttgaaaagtatttaagatctgctggaattcgtgattcctgcgaattgtattgtttcttaaattgggaaaatccttgttggaccgtttctgggaatatctctgggattggtccaaagaagtcccaccattgcaaaaaccagttgggaaaattgtagattgtgttggtcttgaaatatatcagccatgaatgcttgaagcgggtattttggtgccaaaacaccttagtccaagcatcaacgtaatcccaataagtataacctaccggatcaaatggaactgaaaatctctttcctttgttcaagtccgaaccaaagtgtcttggttgaagaacttttagtatttggatggttgagtgggtgtttaaggtttggtcttttggatctttgaaatgtttgatagatactgagtttgaatctaccaaaatcaattcataaaaagttcttgtcttcaggatggtggttggtttatagtgaaatcctggtgggaaagccttggccgtcgccttgaagggatttttgtcccaaaattcaggttccatctgcaaaatagttaacaatttatttttataaatataattgttagtttgtttggtaggtggtgtttgagctttggctaaaggtagttttcctttagtattggtggctgttttggtcattgacgcattttggatcattgtttgtaaatttgattcagattcatcatcagattcggaggcaatgtctgcccaagattttttgattatttttggaaatttggtcagacccatgtcttgaagggcctgaagggtctcaattggccatgcatagtcggccgatgtttgtttggcggttgccggtttgggagattct

SEQ ID NO: 15351 - DNA, 1140 bp, Glycine max
  Gm_smallRNAprecursor_8184
tttttagctaagacctcctttgatgtcgatcctgctaaaaatgctgccagatgagacttttggttcaaaaacacagaagtctctagatcagctgctttgaggaattctggatgggattggaaccatagttttacttggtctggatccgctttggatgagtcaaattgtgtccaccattttacaaatgcgtgtctttgtagtgatggatattggtttgtcttttcagtcttcctgtaacgatattgccatgagaatatccatgacagtgcaaagcttgaaaagtatttaagatctgctggaattcgtgattcctgcgaattgtattgtttcttaaattgggaaaatccttgttggaccgtttctgggaatatctctgggattggtccaaagaagtcccaccattgcaaaaaccagttgggaaaattgtagattgtgttggtcttgaaatatatcagccatgaatgcttgaagcgggtattttggtgccaaaacaccttagtccaagcatcaacgtaatcccaataagtataacctaccggatcaaatggaactgaaaatctctttcctttgttcaagtccgaaccaaagtgtcttggttgaagaacttttagtatttggatggttgagtgggtgtttaaggtttggtcttttggatctttgaaatgtttgatagatactgagtttgaatctaccaaaatcaattcataaaaagttcttgtcttcaggatggtggttggtttatagtgaaatcctggtgggaaagccttggccgtcgccttgaagggatttttgtcccaaaattcaggttccatctgcaaaatagttaacaatttatttttataaatataattgttagtttgtttggtaggtggtgtttgagctttggctaaaggtagttttcctttagtattggtggctgttttggtcattgacgcattttggatcattgtttgtaaatttgattcagattcatcatcagattcggaggcaatgtctgcccaagattttttgattatttttggaaatttggtcagacccatgtcttgaagggcctgaagggtctcaattggccatgcatagtcggccgatgtttgtttggcggttgccggtttgggagattcttgagtggatgactcaggt

SEQ ID NO: 15352 - DNA, 1087 bp, Glycine max
  Gm_smallRNAprecursor_8185
gatcctgctaaaaatgctgccagatgagacttttggttcaaaaacacagaagtctctagatcagctgctttgaggaattctggatgggattggaaccatagttttacttggtctggatccgctttggatgagtcaaattgtgtccaccattttacaaatgcgtgtctttgtagtgatggatattggtttgtcttttcagtcttcctgtaacgatattgccatgagaatatccatgacagtgcaaagcttgaaaagtatttaagatctgctggaattcgtgattcctgcgaattgtattgtttcttaaattgggaaaatccttgttggaccgtttctgggaatatctctgggattggtccaaagaagtcccaccattgcaaaaaccagttgggaaaattgtagattgtgttggtcttgaaatatatcagccatgaatgcttgaagcgggtattttggtgccaaaacaccttagtccaagcatcaacgtaatcccaataagtataacctaccggatcaaatggaactgaaaatctctttcctttgttcaagtccgaaccaaagtgtcttggttgaagaacttttagtatttggatggttgagtgggtgtttaaggtttggtcttttggatctttgaaatgtttgatagatactgagtttgaatctaccaaaatcaattcataaaaagttcttgtcttcaggatggtggttggtttatagtgaaatcctggtgggaaagccttggccgtcgccttgaagggatttttgtcccaaaattcaggttccatctgcaaaatagttaacaatttatttttataaatataattgttagtttgtttggtaggtggtgtttgagctttggctaaaggtagttttcctttagtattggtggctgttttggtcattgacgcattttggatcattgtttgtaaatttgattcagattcatcatcagattcggaggcaatgtctgcccaagattttttgattatttttggaaatttggtcagacccatgtcttgaagggcctgaagggtctcaattggccatgcatagtcggccgatgtttgtttggcggttgccggtttgg

SEQ ID NO: 15353 - DNA, 1189 bp, Glycine max
  Gm_smallRNAprecursor_8186
acacagaagtctctagatcagctgctttgaggaattctggatgggattggaaccatagttttacttggtctggatccgctttggatgagtcaaattgtgtccaccattttacaaatgcgtgtctttgtagtgatggatattggtttgtcttttcagtcttcctgtaacgatattgccatgagaatatccatgacagtgcaaagcttgaaaagtatttaagatctgctggaattcgtgattcctgcgaattgtattgtttcttaaattgggaaaatccttgttggaccgtttctgggaatatctctgggattggtccaaagaagtcccaccattgcaaaaaccagttgggaaaattgtagattgtgttggtcttgaaatatatcagccatgaatgcttgaagcgggtattttggtgccaaaacaccttagtccaagcatcaacgtaatcccaataagtataacctaccggatcaaatggaactgaaaatctctttcctttgttcaagtccgaaccaaagtgtcttggttgaagaacttttagtatttggatggttgagtgggtgtttaaggtttggtcttttggatctttgaaatgtttgatagatactgagtttgaatctaccaaaatcaattcataaaaagttcttgtcttcaggatggtggttggtttatagtgaaatcctggtgggaaagccttggccgtcgccttgaagggatttttgtcccaaaattcaggttccatctgcaaaatagttaacaatttatttttataaatataattgttagtttgtttggtaggtggtgtttgagctttggctaaaggtagttttcctttagtattggtggctgttttggtcattgacgcattttggatcattgtttgtaaatttgattcagattcatcatcagattcggaggcaatgtctgcccaagattttttgattatttttggaaatttggtcagacccatgtcttgaagggcctgaagggtctcaattggccatgcatagtcggccgatgtttgtttggcggttgccggtttgggagattcttgagtggatgactcaggtttgattgaggcaatctgggttgatgacccttctaaattggttttctgggtagatgacccagcctgggttggtgacccagaagaggtagatgatttcttgatggttggctctggaagagc

SEQ ID NO: 15354 - DNA, 1058 bp, Glycine max
  Gm_smallRNAprecursor_8187
tacttggtctggatccgctttggatgagtcaaattgtgtccaccattttacaaatgcgtgtctttgtagtgatggatattggtttgtcttttcagtcttcctgtaacgatattgccatgagaatatccatgacagtgcaaagcttgaaaagtatttaagatctgctggaattcgtgattcctgcgaattgtattgtttcttaaattgggaaaatccttgttggaccgtttctgggaatatctctgggattggtccaaagaagtcccaccattgcaaaaaccagttgggaaaattgtagattgtgttggtcttgaaatatatcagccatgaatgcttgaagcgggtattttggtgccaaaacaccttagtccaagcatcaacgtaatcccaataagtataacctaccggatcaaatggaactgaaaatctctttcctttgttcaagtccgaaccaaagtgtcttggttgaagaacttttagtatttggatggttgagtgggtgtttaaggtttggtcttttggatctttgaaatgtttgatagatactgagtttgaatctaccaaaatcaattcataaaaagttcttgtcttcaggatggtggttggtttatagtgaaatcctggtgggaaagccttggccgtcgccttgaagggatttttgtcccaaaattcaggttccatctgcaaaatagttaacaatttatttttataaatataattgttagtttgtttggtaggtggtgtttgagctttggctaaaggtagttttcctttagtattggtggctgttttggtcattgacgcattttggatcattgtttgtaaatttgattcagattcatcatcagattcggaggcaatgtctgcccaagattttttgattatttttggaaatttggtcagacccatgtcttgaagggcctgaagggtctcaattggccatgcatagtcggccgatgtttgtttggcggttgccggtttgggagattcttgagtggatgactcaggtttgattgaggcaatctgggttgatgacccttctaaattggttttctggg

SEQ ID NO: 15355 - DNA, 1159 bp, Glycine max
  Gm_smallRNAprecursor_8188
ctggatccgctttggatgagtcaaattgtgtccaccattttacaaatgcgtgtctttgtagtgatggatattggtttgtcttttcagtcttcctgtaacgatattgccatgagaatatccatgacagtgcaaagcttgaaaagtatttaagatctgctggaattcgtgattcctgcgaattgtattgtttcttaaattgggaaaatccttgttggaccgtttctgggaatatctctgggattggtccaaagaagtcccaccattgcaaaaaccagttgggaaaattgtagattgtgttggtcttgaaatatatcagccatgaatgcttgaagcgggtattttggtgccaaaacaccttagtccaagcatcaacgtaatcccaataagtataacctaccggatcaaatggaactgaaaatctctttcctttgttcaagtccgaaccaaagtgtcttggttgaagaacttttagtatttggatggttgagtgggtgtttaaggtttggtcttttggatctttgaaatgtttgatagatactgagtttgaatctaccaaaatcaattcataaaaagttcttgtcttcaggatggtggttggtttatagtgaaatcctggtgggaaagccttggccgtcgccttgaagggatttttgtcccaaaattcaggttccatctgcaaaatagttaacaatttatttttataaatataattgttagtttgtttggtaggtggtgtttgagctttggctaaaggtagttttcctttagtattggtggctgttttggtcattgacgcattttggatcattgtttgtaaatttgattcagattcatcatcagattcggaggcaatgtctgcccaagattttttgattatttttggaaatttggtcagacccatgtcttgaagggcctgaagggtctcaattggccatgcatagtcggccgatgtttgtttggcggttgccggtttgggagattcttgagtggatgactcaggtttgattgaggcaatctgggttgatgacccttctaaattggttttctgggtagatgacccagcctgggttggtgacccagaagaggtagatgatttcttgatggttggctctggaagagccagcctggctcctttgcctgtactccttcctccccgtag

SEQ ID NO: 15356 - DNA, 1098 bp, Glycine max
  Gm_smallRNAprecursor_8189
gtgtctttgtagtgatggatattggtttgtcttttcagtcttcctgtaacgatattgccatgagaatatccatgacagtgcaaagcttgaaaagtatttaagatctgctggaattcgtgattcctgcgaattgtattgtttcttaaattgggaaaatccttgttggaccgtttctgggaatatctctgggattggtccaaagaagtcccaccattgcaaaaaccagttgggaaaattgtagattgtgttggtcttgaaatatatcagccatgaatgcttgaagcgggtattttggtgccaaaacaccttagtccaagcatcaacgtaatcccaataagtataacctaccggatcaaatggaactgaaaatctctttcctttgttcaagtccgaaccaaagtgtcttggttgaagaacttttagtatttggatggttgagtgggtgtttaaggtttggtcttttggatctttgaaatgtttgatagatactgagtttgaatctaccaaaatcaattcataaaaagttcttgtcttcaggatggtggttggtttatagtgaaatcctggtgggaaagccttggccgtcgccttgaagggatttttgtcccaaaattcaggttccatctgcaaaatagttaacaatttatttttataaatataattgttagtttgtttggtaggtggtgtttgagctttggctaaaggtagttttcctttagtattggtggctgttttggtcattgacgcattttggatcattgtttgtaaatttgattcagattcatcatcagattcggaggcaatgtctgcccaagattttttgattatttttggaaatttggtcagacccatgtcttgaagggcctgaagggtctcaattggccatgcatagtcggccgatgtttgtttggcggttgccggtttgggagattcttgagtggatgactcaggtttgattgaggcaatctgggttgatgacccttctaaattggttttctgggtagatgacccagcctgggttggtgacccagaagaggtagatgatttcttgatggttggctctggaagagccagcctggctcctttgcctgtactcct

SEQ ID NO: 15357 - DNA, 1061 bp, Glycine max
  Gm_smallRNAprecursor_8190
tatttaaataggggacaaattctcctacgtaatttagacaacctagaaatctttgtaactgggttttgtctaagatttggttggggaatttgctagcaaactctattgacctttcgattggaatgattgtaccttgatatatattgtgaccaaggaatcaaattcgagtttgaaaaagattgatttttgatttggagactgccaaaccattttgtttgatgatatgtatgaaggtttggagatgtttgaaatgttggtcaatgttttggaaaaagattaaaacatcatctatgtagacaatgacaaattttgagtagggattaaaaatatcgttcataattttttgaaattctgaaggggctttctttagtccgaacggcatcacgttccattcatattgcccgaaaggtacagtaaatgatgttttgtacctatctgattcttggatttggatttgccaaaatccagatttcatatcaaattttgaaaatatctttgcagaatttaatctgttaagcaaattttttttgtttggaataggatatctaatccattgtaatgcttgatttaatggtttgtaatttatgactaagcggggtgttccacgctcaatctcagattgtttgttaacataaaaagccgcacaagaccatgggcttttgcttttccggattaggcctttatcaagcaaatccttgatttccttttgacagtattgaagaagttcttcattcatttggattggtctggcttttgtgggaatttgtttttccctaaagtctttctcataagggagatcgacaatatgtttctttctgtcccaaaatgcatgtgggaactcagaacaaacggtcgattcaatatgatttaataaggattgaattttttcttttacttgtggttttcccagttgtatctgaatactattaaaagatacttcttcttttaagaagttaatttgattaatcttattttctataagatttatatttctggaaattggtttagtagaaaaattaaatataatttttcttcctaaataatttgtggttattccttca

SEQ ID NO: 15358 - DNA, 1198 bp, Glycine max
  Gm_smallRNAprecursor_8191
caagtaaaagaaatattgtcgatctcccttatgagaaagactttagggaaaaacaaattcccacaaaagccagaccaatccaaatgaatgaagaacttcttcaatactgtcaaaaggaaatcaaggatttgcttgataaaggcctaatccggaaaagcaaaagcccatggtcttgtgcggctttttatgttaacaaacaatctgagattgagcgtggaacaccccgcttagtcataaattacaaaccattaaatcaagcattacaatggattagatatcctattccaaacaaaaaagatttgcttaacagattaaaatctgcaaagatattttcaaaatttgatatgaaatctggattttggcaaatccaaatccaagaatcagacaggtacaaaacagcgtttactgtacctttcgggcaatatgaatggaacgtgatgccgttcggactgaagaatgccccttccgaattataaaaaattatgaacgatatttttaatccctattcaaaatttgtcattgtctacatagatgatgttttaatcttttcacaaaacattgaccaacatttcaaacatctccaaacattcatacatatcatcaaacaaaatggtttggcagtctccaaatcaaaaatcaatcttttccaaactcgaattcgattccttggtcacaatatatatcaaggtacaatcattccaatcgaaaggtcaatagagtttgctagcaaattccccaaccaaatcttagacaaaacctagttacaaagatttctaggttgtctaaattacgtaggagaatttgtcccctatttaaataatattgtcaagccattacatgataggctgaagaaaaatccgcctccttggtctgacctccatacacaaacggttaaagaaatcaaagtcaaagtccaatccattaaatgtctgtatcttcctattccacaggcatttaaaattgtcgaaactgatgcttcagacataggttatggtggcatcctcaaacaaagagtccatggctaagatcatgtcattgcatatacatcaaaacattggaatcctgcacaattaaaatattcaactgttaaaaaagaagttttagcaattgttttgtgcatttccaaatttcaatcggatttattaaaccaaaaatttttaatcagggttgattgtaaatcagccaaagatattttaca

SEQ ID NO: 15359 - DNA, 1234 bp, Glycine max
  Gm_smallRNAprecursor_8192
caagtaaaagaaatattgtcgatctcccttatgagaaagactttagggaaaaacaaattcccacaaaagccagaccaatccaaatgaatgaagaacttcttcaatactgtcaaaaggaaatcaaggatttgcttgataaaggcctaatccggaaaagcaaaagcccatggtcttgtgcggctttttatgttaacaaacaatctgagattgagcgtggaacaccccgcttagtcataaattacaaaccattaaatcaagcattacaatggattagatatcctattccaaacaaaaaagatttgcttaacagattaaaatctgcaaagatattttcaaaatttgatatgaaatctggattttggcaaatccaaatccaagaatcagacaggtacaaaacagcgtttactgtacctttcgggcaatatgaatggaacgtgatgccgttcggactgaagaatgccccttccgaattataaaaaattatgaacgatatttttaatccctattcaaaatttgtcattgtctacatagatgatgttttaatcttttcacaaaacattgaccaacatttcaaacatctccaaacattcatacatatcatcaaacaaaatggtttggcagtctccaaatcaaaaatcaatcttttccaaactcgaattcgattccttggtcacaatatatatcaaggtacaatcattccaatcgaaaggtcaatagagtttgctagcaaattccccaaccaaatcttagacaaaacctagttacaaagatttctaggttgtctaaattacgtaggagaatttgtcccctatttaaataatattgtcaagccattacatgataggctgaagaaaaatccgcctccttggtctgacctccatacacaaacggttaaagaaatcaaagtcaaagtccaatccattaaatgtctgtatcttcctattccacaggcatttaaaattgtcgaaactgatgcttcagacataggttatggtggcatcctcaaacaaagagtccatggctaagatcatgtcattgcatatacatcaaaacattggaatcctgcacaattaaaatattcaactgttaaaaaagaagttttagcaattgttttgtgcatttccaaatttcaatcggatttattaaaccaaaaatttttaatcagggttgattgtaaatcagccaaagatattttacaaaaagatgttaaaaaccttgcctcaaaacaaatttt

SEQ ID NO: 15360 - DNA, 1073 bp, Glycine max
  Gm_smallRNAprecursor_8193
tgtacctttcgggcaatatgaatggaacgtgatgccgttcggactgaagaatgccccttccgaattataaaaaattatgaacgatatttttaatccctattcaaaatttgtcattgtctacatagatgatgttttaatcttttcacaaaacattgaccaacatttcaaacatctccaaacattcatacatatcatcaaacaaaatggtttggcagtctccaaatcaaaaatcaatcttttccaaactcgaattcgattccttggtcacaatatatatcaaggtacaatcattccaatcgaaaggtcaatagagtttgctagcaaattccccaaccaaatcttagacaaaacctagttacaaagatttctaggttgtctaaattacgtaggagaatttgtcccctatttaaataatattgtcaagccattacatgataggctgaagaaaaatccgcctccttggtctgacctccatacacaaacggttaaagaaatcaaagtcaaagtccaatccattaaatgtctgtatcttcctattccacaggcatttaaaattgtcgaaactgatgcttcagacataggttatggtggcatcctcaaacaaagagtccatggctaagatcatgtcattgcatatacatcaaaacattggaatcctgcacaattaaaatattcaactgttaaaaaagaagttttagcaattgttttgtgcatttccaaatttcaatcggatttattaaaccaaaaatttttaatcagggttgattgtaaatcagccaaagatattttacaaaaagatgttaaaaaccttgcctcaaaacaaatttttgcacgatggcaagcaattttaagtgtctttgattttgacatagaatacatcaagggcacctcaaattcactacctgactaccttacccgtgaattcttacaaaaaagtggtaatgcctcctaaggcatcgggaatctccctacgaggaggaaggagtacaggcaaaggagccaggctggctcttccagagccaaccatcaagaaatcatctacctcttctgggtcaccaacccaggctgggtca

SEQ ID NO: 15361 - DNA, 1071 bp, Glycine max
  Gm_smallRNAprecursor_8194
tacctttcgggcaatatgaatggaacgtgatgccgttcggactgaagaatgccccttccgaattataaaaaattatgaacgatatttttaatccctattcaaaatttgtcattgtctacatagatgatgttttaatcttttcacaaaacattgaccaacatttcaaacatctccaaacattcatacatatcatcaaacaaaatggtttggcagtctccaaatcaaaaatcaatcttttccaaactcgaattcgattccttggtcacaatatatatcaaggtacaatcattccaatcgaaaggtcaatagagtttgctagcaaattccccaaccaaatcttagacaaaacctagttacaaagatttctaggttgtctaaattacgtaggagaatttgtcccctatttaaataatattgtcaagccattacatgataggctgaagaaaaatccgcctccttggtctgacctccatacacaaacggttaaagaaatcaaagtcaaagtccaatccattaaatgtctgtatcttcctattccacaggcatttaaaattgtcgaaactgatgcttcagacataggttatggtggcatcctcaaacaaagagtccatggctaagatcatgtcattgcatatacatcaaaacattggaatcctgcacaattaaaatattcaactgttaaaaaagaagttttagcaattgttttgtgcatttccaaatttcaatcggatttattaaaccaaaaatttttaatcagggttgattgtaaatcagccaaagatattttacaaaaagatgttaaaaaccttgcctcaaaacaaatttttgcacgatggcaagcaattttaagtgtctttgattttgacatagaatacatcaagggcacctcaaattcactacctgactaccttacccgtgaattcttacaaaaaagtggtaatgcctcctaaggcatcgggaatctccctacgaggaggaaggagtacaggcaaaggagccaggctggctcttccagagccaaccatcaagaaatcatctacctcttctgggtcaccaacccaggctgggtca

SEQ ID NO: 15362 - DNA, 1174 bp, Glycine max
  Gm_smallRNAprecursor_8195
acaaagagtccatggctaagatcatgtcattgcatatacatcaaaacattggaatcctgcacaattaaaatattcaactgttaaaaaagaagttttagcaattgttttgtgcatttccaaatttcaatcggatttattaaaccaaaaatttttaatcagggttgattgtaaatcagccaaagatattttacaaaaagatgttaaaaaccttgcctcaaaacaaatttttgcacgatggcaagcaattttaagtgtctttgattttgacatagaatacatcaagggcacctcaaattcactacctgactaccttacccgtgaattcttacaaaaaagtggtaatgcctcctaaggcatcgggaatctccctacgaggaggaaggagtacaggcaaaggagccaggctggctcttccagagccaaccatcaagaaatcatctacctcttctgggtcaccaacccaggctgggtcatctacccagaaaaccaatttagaagggtcatcaacccagattgcctcaatcaaacccgagccatccactcaggaatctcccaaaccgacaaccgccaaacaaacatcggccgactatgcatggccaattgaaacccttcaggcccttcaagacatgggtctgaccaaatttccaaaaataatcaaaaaatcttgggcagacattgcctcagaatctgatgatgaatctgaatcaaatttacaaacaatgatccaaaatgcgtcaatgaccaaaacaaccaccaatactaaaggaaaactacctttagccaaatctcaaacaccacctaccaaacaaactaacaattatatttataaaaataaattgttaactgttttgcagatggaacctgaattttgggacaaaaatcccttcaaggcgacggccaaggctttcccaccaggatttcactacaaaccaaccaccatcctgaagacaagaactttttatgaattgattttggtagattcaaactcagtatctatcaaacatttcaaagatccaaaagaccaaaccttaaacacccactcaaccatccaaatactaaaagttcttcaaccgagacactttggttcggacttgaacaaaggaaagagattttcagttccatttgatccggtaggttatacctattgggattacgttgatgcttggactaaggt

SEQ ID NO: 15363 - DNA, 1173 bp, Glycine max
  Gm_smallRNAprecursor_8196
caaagagtccatggctaagatcatgtcattgcatatacatcaaaacattggaatcctgcacaattaaaatattcaactgttaaaaaagaagttttagcaattgttttgtgcatttccaaatttcaatcggatttattaaaccaaaaatttttaatcagggttgattgtaaatcagccaaagatattttacaaaaagatgttaaaaaccttgcctcaaaacaaatttttgcacgatggcaagcaattttaagtgtctttgattttgacatagaatacatcaagggcacctcaaattcactacctgactaccttacccgtgaattcttacaaaaaagtggtaatgcctcctaaggcatcgggaatctccctacgaggaggaaggagtacaggcaaaggagccaggctggctcttccagagccaaccatcaagaaatcatctacctcttctgggtcaccaacccaggctgggtcatctacccagaaaaccaatttagaagggtcatcaacccagattgcctcaatcaaacccgagccatccactcaggaatctcccaaaccgacaaccgccaaacaaacatcggccgactatgcatggccaattgaaacccttcaggcccttcaagacatgggtctgaccaaatttccaaaaataatcaaaaaatcttgggcagacattgcctcagaatctgatgatgaatctgaatcaaatttacaaacaatgatccaaaatgcgtcaatgaccaaaacaaccaccaatactaaaggaaaactacctttagccaaatctcaaacaccacctaccaaacaaactaacaattatatttataaaaataaattgttaactgttttgcagatggaacctgaattttgggacaaaaatcccttcaaggcgacggccaaggctttcccaccaggatttcactacaaaccaaccaccatcctgaagacaagaactttttatgaattgattttggtagattcaaactcagtatctatcaaacatttcaaagatccaaaagaccaaaccttaaacacccactcaaccatccaaatactaaaagttcttcaaccgagacactttggttcggacttgaacaaaggaaagagattttcagttccatttgatccggtaggttatacctattgggattacgttgatgcttggactaaggt

SEQ ID NO: 15364 - DNA, 1173 bp, Glycine max; identical to SEQ ID NO: 15363
  Gm_smallRNAprecursor_8197

SEQ ID NO: 15365 - DNA, 1130 bp, Glycine max
  Gm_smallRNAprecursor_8198
caaacccgagccatccactcaggaatctcccaaaccgacaaccgccaaacaaacatcggccgactatgcatggccaattgaaacccttcaggcccttcaagacatgggtctgaccaaatttccaaaaataatcaaaaaatcttgggcagacattgcctcagaatctgatgatgaatctgaatcaaatttacaaacaatgatccaaaatgcgtcaatgaccaaaacaaccaccaatactaaaggaaaactacctttagccaaatctcaaacaccacctaccaaacaaactaacaattatatttataaaaataaattgttaactgttttgcagatggaacctgaattttgggacaaaaatcccttcaaggcgacggccaaggctttcccaccaggatttcactacaaaccaaccaccatcctgaagacaagaactttttatgaattgattttggtagattcaaactcagtatctatcaaacatttcaaagatccaaaagaccaaaccttaaacacccactcaaccatccaaatactaaaagttcttcaaccgagacactttggttcggacttgaacaaaggaaagagattttcagttccatttgatccggtaggttatacctattgggattacgttgatgcttggactaaggtgttttggcaccaaaatacccgcttcaagcattcatggctgatatatttcaagaccaacacaatttacaattttcccaattggtttttgcaatggtgggacttctttggaccaatcccagagatattcccagaaacggtccaacaaggattttcccaatttaagaaacaacacaattcgcaggaatcacgaattccagcagatcttaaatacttttcaagctttgcactgtcatggatattctcatggcaatatcgttacagcaagactgaaaagacaaaccaatatccatcactacaaagacacgcatttgtaaaatggtggacacaatttgactcatccaaagcggatccagaacaagtaaaactatggttccaatcccatccagaattcctcaaggcagctgatccagagacttctgtgtttttgaaccaaaagtctcatctggcagcatttttagcaggatcgacatcaaaggagg

SEQ ID NO: 15366 - DNA, 1087 bp, Glycine max
  Gm_smallRNAprecursor_8199
cgagccatccactcaggaatctcccaaaccgacaaccgccaaacaaacatcggccgactatgcatggccaattgaaacccttcaggcccttcaagacatgggtctgaccaaatttccaaaaataatcaaaaaatcttgggcagacattgcctcagaatctgatgatgaatctgaatcaaatttacaaacaatgatccaaaatgcgtcaatgaccaaaacaaccaccaatactaaaggaaaactacctttagccaaatctcaaacaccacctaccaaacaaactaacaattatatttataaaaataaattgttaactgttttgcagatggaacctgaattttgggacaaaaatcccttcaaggcgacggccaaggctttcccaccaggatttcactacaaaccaaccaccatcctgaagacaagaactttttatgaattgattttggtagattcaaactcagtatctatcaaacatttcaaagatccaaaagaccaaaccttaaacacccactcaaccatccaaatactaaaagttcttcaaccgagacactttggttcggacttgaacaaaggaaagagattttcagttccatttgatccggtaggttatacctattgggattacgttgatgcttggactaaggtgttttggcaccaaaatacccgcttcaagcattcatggctgatatatttcaagaccaacacaatttacaattttcccaattggtttttgcaatggtgggacttctttggaccaatcccagagatattcccagaaacggtccaacaaggattttcccaatttaagaaacaacacaattcgcaggaatcacgaattccagcagatcttaaatacttttcaagctttgcactgtcatggatattctcatggcaatatcgttacagcaagactgaaaagacaaaccaatatccatcactacaaagacacgcatttgtaaaatggtggacacaatttgactcatccaaagcggatccagaacaagtaaaactatggttccaatcccatccagaattcctcaaggcagctgatccagagacttctgtgtttttgaaccaaaagtctcat

SEQ ID NO: 15367 - DNA, 1124 bp, Glycine max
  Gm_smallRNAprecursor_8200
cgagccatccactcaggaatctcccaaaccgacaaccgccaaacaaacatcggccgactatgcatggccaattgaaacccttcaggcccttcaagacatgggtctgaccaaatttccaaaaataatcaaaaaatcttgggcagacattgcctcagaatctgatgatgaatctgaatcaaatttacaaacaatgatccaaaatgcgtcaatgaccaaaacaaccaccaatactaaaggaaaactacctttagccaaatctcaaacaccacctaccaaacaaactaacaattatatttataaaaataaattgttaactgttttgcagatggaacctgaattttgggacaaaaatcccttcaaggcgacggccaaggctttcccaccaggatttcactacaaaccaaccaccatcctgaagacaagaactttttatgaattgattttggtagattcaaactcagtatctatcaaacatttcaaagatccaaaagaccaaaccttaaacacccactcaaccatccaaatactaaaagttcttcaaccgagacactttggttcggacttgaacaaaggaaagagattttcagttccatttgatccggtaggttatacctattgggattacgttgatgcttggactaaggtgttttggcaccaaaatacccgcttcaagcattcatggctgatatatttcaagaccaacacaatttacaattttcccaattggtttttgcaatggtgggacttctttggaccaatcccagagatattcccagaaacggtccaacaaggattttcccaatttaagaaacaacacaattcgcaggaatcacgaattccagcagatcttaaatacttttcaagctttgcactgtcatggatattctcatggcaatatcgttacagcaagactgaaaagacaaaccaatatccatcactacaaagacacgcatttgtaaaatggtggacacaatttgactcatccaaagcggatccagaacaagtaaaactatggttccaatcccatccagaattcctcaaggcagctgatccagagacttctgtgtttttgaaccaaaagtctcatctggcagcatttttagcaggatcgacatcaaaggagg

SEQ ID NO: 15368 - DNA, 1247 bp, Glycine max
  Gm_smallRNAprecursor_8201
cccttcaagacatgggtctgaccaaatttccaaaaataatcaaaaaatcttgggcagacattgcctcagaatctgatgatgaatctgaatcaaatttacaaacaatgatccaaaatgcgtcaatgaccaaaacaaccaccaatactaaaggaaaactacctttagccaaatctcaaacaccacctaccaaacaaactaacaattatatttataaaaataaattgttaactgttttgcagatggaacctgaattttgggacaaaaatcccttcaaggcgacggccaaggctttcccaccaggatttcactacaaaccaaccaccatcctgaagacaagaactttttatgaattgattttggtagattcaaactcagtatctatcaaacatttcaaagatccaaaagaccaaaccttaaacacccactcaaccatccaaatactaaaagttcttcaaccgagacactttggttcggacttgaacaaaggaaagagattttcagttccatttgatccggtaggttatacctattgggattacgttgatgcttggactaaggtgttttggcaccaaaatacccgcttcaagcattcatggctgatatatttcaagaccaacacaatttacaattttcccaattggtttttgcaatggtgggacttctttggaccaatcccagagatattcccagaaacggtccaacaaggattttcccaatttaagaaacaacacaattcgcaggaatcacgaattccagcagatcttaaatacttttcaagctttgcactgtcatggatattctcatggcaatatcgttacagcaagactgaaaagacaaaccaatatccatcactacaaagacacgcatttgtaaaatggtggacacaatttgactcatccaaagcggatccagaacaagtaaaactatggttccaatcccatccagaattcctcaaggcagctgatccagagacttctgtgtttttgaaccaaaagtctcatctggcagcatttttagcaggatcgacatcaaaggaggtcttagctaaaaatctgaaggaagttctacaaatgttacaacaggaagaagaagcttcatcctcaaagaaggaagaaacaagttctgctgaagaagacgaagaagatcccttttaccaaaacgaagatgattgttttagtatctgtttagattaaatttaatttcggtcacaaaaccgtctgtttgtaattaatgtgtaattaatgctg

SEQ ID NO: 15369 - DNA, 1248 bp, Glycine max
  Gm_smallRNAprecursor_8202
cccttcaagacatgggtctgaccaaatttccaaaaataatcaaaaaatcttgggcagacattgcctcagaatctgatgatgaatctgaatcaaatttacaaacaatgatccaaaatgcgtcaatgaccaaaacaaccaccaatactaaaggaaaactacctttagccaaatctcaaacaccacctaccaaacaaactaacaattatatttataaaaataaattgttaactgttttgcagatggaacctgaattttgggacaaaaatcccttcaaggcgacggccaaggctttcccaccaggatttcactacaaaccaaccaccatcctgaagacaagaactttttatgaattgattttggtagattcaaactcagtatctatcaaacatttcaaagatccaaaagaccaaaccttaaacacccactcaaccatccaaatactaaaagttcttcaaccgagacactttggttcggacttgaacaaaggaaagagattttcagttccatttgatccggtaggttatacctattgggattacgttgatgcttggactaaggtgttttggcaccaaaatacccgcttcaagcattcatggctgatatatttcaagaccaacacaatttacaattttcccaattggtttttgcaatggtgggacttctttggaccaatcccagagatattcccagaaacggtccaacaaggattttcccaatttaagaaacaacacaattcgcaggaatcacgaattccagcagatcttaaatacttttcaagctttgcactgtcatggatattctcatggcaatatcgttacagcaagactgaaaagacaaaccaatatccatcactacaaagacacgcatttgtaaaatggtggacacaatttgactcatccaaagcggatccagaacaagtaaaactatggttccaatcccatccagaattcctcaaggcagctgatccagagacttctgtgtttttgaaccaaaagtctcatctggcagcatttttagcaggatcgacatcaaaggaggtcttagctaaaaatctgaaggaagttctacaaatgttacaacaggaagaagaagcttcatcctcaaagaaggaagaaacaagttctgctgaagaagacgaagaagatcccttttaccaaaacgaagatgattgttttagtatctgtttagattaaatttaatttcggtcacaaaaccgtctgtttgtaattaatgtgtaattaatgctgg

SEQ ID NO: 15370 - DNA, 1146 bp, Glycine max
  Gm_smallRNAprecursor_8203
acaatgatccaaaatgcgtcaatgaccaaaacaaccaccaatactaaaggaaaactacctttagccaaatctcaaacaccacctaccaaacaaactaacaattatatttataaaaataaattgttaactgttttgcagatggaacctgaattttgggacaaaaatcccttcaaggcgacggccaaggctttcccaccaggatttcactacaaaccaaccaccatcctgaagacaagaactttttatgaattgattttggtagattcaaactcagtatctatcaaacatttcaaagatccaaaagaccaaaccttaaacacccactcaaccatccaaatactaaaagttcttcaaccgagacactttggttcggacttgaacaaaggaaagagattttcagttccatttgatccggtaggttatacctattgggattacgttgatgcttggactaaggtgttttggcaccaaaatacccgcttcaagcattcatggctgatatatttcaagaccaacacaatttacaattttcccaattggtttttgcaatggtgggacttctttggaccaatcccagagatattcccagaaacggtccaacaaggattttcccaatttaagaaacaacacaattcgcaggaatcacgaattccagcagatcttaaatacttttcaagctttgcactgtcatggatattctcatggcaatatcgttacagcaagactgaaaagacaaaccaatatccatcactacaaagacacgcatttgtaaaatggtggacacaatttgactcatccaaagcggatccagaacaagtaaaactatggttccaatcccatccagaattcctcaaggcagctgatccagagacttctgtgtttttgaaccaaaagtctcatctggcagcatttttagcaggatcgacatcaaaggaggtcttagctaaaaatctgaaggaagttctacaaatgttacaacaggaagaagaagcttcatcctcaaagaaggaagaaacaagttctgctgaagaagacgaagaagatcccttttaccaaaacgaagatgattgttttagtatctgtttagattaaatttaatttcggtcacaaaaccgtctgtttgtaattaatgtgtaattaatgctg

SEQ ID NO: 15371 - DNA, 1146 bp, Glycine max; identical to SEQ ID NO: 15370
  Gm_smallRNAprecursor_8204

SEQ ID NO: 15372 - DNA, 1147 bp, Glycine max
  Gm_smallRNAprecursor_8205
acaatgatccaaaatgcgtcaatgaccaaaacaaccaccaatactaaaggaaaactacctttagccaaatctcaaacaccacctaccaaacaaactaacaattatatttataaaaataaattgttaactgttttgcagatggaacctgaattttgggacaaaaatcccttcaaggcgacggccaaggctttcccaccaggatttcactacaaaccaaccaccatcctgaagacaagaactttttatgaattgattttggtagattcaaactcagtatctatcaaacatttcaaagatccaaaagaccaaaccttaaacacccactcaaccatccaaatactaaaagttcttcaaccgagacactttggttcggacttgaacaaaggaaagagattttcagttccatttgatccggtaggttatacctattgggattacgttgatgcttggactaaggtgttttggcaccaaaatacccgcttcaagcattcatggctgatatatttcaagaccaacacaatttacaattttcccaattggtttttgcaatggtgggacttctttggaccaatcccagagatattcccagaaacggtccaacaaggattttcccaatttaagaaacaacacaattcgcaggaatcacgaattccagcagatcttaaatacttttcaagctttgcactgtcatggatattctcatggcaatatcgttacagcaagactgaaaagacaaaccaatatccatcactacaaagacacgcatttgtaaaatggtggacacaatttgactcatccaaagcggatccagaacaagtaaaactatggttccaatcccatccagaattcctcaaggcagctgatccagagacttctgtgtttttgaaccaaaagtctcatctggcagcatttttagcaggatcgacatcaaaggaggtcttagctaaaaatctgaaggaagttctacaaatgttacaacaggaagaagaagcttcatcctcaaagaaggaagaaacaagttctgctgaagaagacgaagaagatcccttttaccaaaacgaagatgattgttttagtatctgtttagattaaatttaatttcggtcacaaaaccgtctgtttgtaattaatgtgtaattaatgctgg

SEQ ID NO: 15373 - DNA, 1158 bp, Glycine max
  Gm_smallRNAprecursor_8206
cgagacactttggttcggacttgaacaaaggaaagagattttcagttccatttgatccggtaggttatacctattgggattacgttgatgcttggactaaggtgttttggcaccaaaatacccgcttcaagcattcatggctgatatatttcaagaccaacacaatttacaattttcccaattggtttttgcaatggtgggacttctttggaccaatcccagagatattcccagaaacggtccaacaaggattttcccaatttaagaaacaacacaattcgcaggaatcacgaattccagcagatcttaaatacttttcaagctttgcactgtcatggatattctcatggcaatatcgttacagcaagactgaaaagacaaaccaatatccatcactacaaagacacgcatttgtaaaatggtggacacaatttgactcatccaaagcggatccagaacaagtaaaactatggttccaatcccatccagaattcctcaaggcagctgatccagagacttctgtgtttttgaaccaaaagtctcatctggcagcatttttagcaggatcgacatcaaaggaggtcttagctaaaaatctgaaggaagttctacaaatgttacaacaggaagaagaagcttcatcctcaaagaaggaagaaacaagttctgctgaagaagacgaagaagatcccttttaccaaaacgaagatgattgttttagtatctgtttagattaaatttaatttcggtcacaaaaccgtctgtttgtaattaatgtgtaattaatgctggacaatactacctgtcctatagccattaaagtcccggtcaaaactacttgtcttgtaacaaacagtcaaatagtcccggtcaaaactaccggcaactaccggtcttagatttttggctatataaggagtcctcaagtatgttgtgaggcaccctttcatttagccattttttcaggtttcggaagagaggtgctctgaaacaagatttttgtaagcgcttctttctagattcaataaatttctatttttcatccttctctcttctccctccaccgatcctgtgcggctctgccgccgcttcggtttctttgttttcaaaaacctgggtttgtaagccgtttcggtgtgcccttgatatctgctttac

SEQ ID NO: 15374 - DNA, 1172 bp, Glycine max
  Gm_smallRNAprecursor_8207
cgagacactttggttcggacttgaacaaaggaaagagattttcagttccatttgatccggtaggttatacctattgggattacgttgatgcttggactaaggtgttttggcaccaaaatacccgcttcaagcattcatggctgatatatttcaagaccaacacaatttacaattttcccaattggtttttgcaatggtgggacttctttggaccaatcccagagatattcccagaaacggtccaacaaggattttcccaatttaagaaacaacacaattcgcaggaatcacgaattccagcagatcttaaatacttttcaagctttgcactgtcatggatattctcatggcaatatcgttacagcaagactgaaaagacaaaccaatatccatcactacaaagacacgcatttgtaaaatggtggacacaatttgactcatccaaagcggatccagaacaagtaaaactatggttccaatcccatccagaattcctcaaggcagctgatccagagacttctgtgtttttgaaccaaaagtctcatctggcagcatttttagcaggatcgacatcaaaggaggtcttagctaaaaatctgaaggaagttctacaaatgttacaacaggaagaagaagcttcatcctcaaagaaggaagaaacaagttctgctgaagaagacgaagaagatcccttttaccaaaacgaagatgattgttttagtatctgtttagattaaatttaatttcggtcacaaaaccgtctgtttgtaattaatgtgtaattaatgctggacaatactacctgtcctatagccattaaagtcccggtcaaaactacttgtcttgtaacaaacagtcaaatagtcccggtcaaaactaccggcaactaccggtcttagatttttggctatataaggagtcctcaagtatgttgtgaggcaccctttcatttagccattttttcaggtttcggaagagaggtgctctgaaacaagatttttgtaagcgcttctttctagattcaataaatttctatttttcatccttctctcttctccctccaccgatcctgtgcggctctgccgccgcttcggtttctttgttttcaaaaacctgggtttgtaagccgtttcggtgtgcccttgatatctgctttacaagtttataattcg

SEQ ID NO: 15375 - DNA, 1046 bp, Glycine max
  Gm_smallRNAprecursor_8208
tcaagaccaacacaatttacaattttcccaattggtttttgcaatggtgggacttctttggaccaatcccagagatattcccagaaacggtccaacaaggattttcccaatttaagaaacaacacaattcgcaggaatcacgaattccagcagatcttaaatacttttcaagctttgcactgtcatggatattctcatggcaatatcgttacagcaagactgaaaagacaaaccaatatccatcactacaaagacacgcatttgtaaaatggtggacacaatttgactcatccaaagcggatccagaacaagtaaaactatggttccaatcccatccagaattcctcaaggcagctgatccagagacttctgtgtttttgaaccaaaagtctcatctggcagcatttttagcaggatcgacatcaaaggaggtcttagctaaaaatctgaaggaagttctacaaatgttacaacaggaagaagaagcttcatcctcaaagaaggaagaaacaagttctgctgaagaagacgaagaagatcccttttaccaaaacgaagatgattgttttagtatctgtttagattaaatttaatttcggtcacaaaaccgtctgtttgtaattaatgtgtaattaatgctggacaatactacctgtcctatagccattaaagtcccggtcaaaactacttgtcttgtaacaaacagtcaaatagtcccggtcaaaactaccggcaactaccggtcttagatttttggctatataaggagtcctcaagtatgttgtgaggcaccctttcatttagccattttttcaggtttcggaagagaggtgctctgaaacaagatttttgtaagcgcttctttctagattcaataaatttctatttttcatccttctctcttctccctccaccgatcctgtgcggctctgccgccgcttcggtttctttgttttcaaaaacctgggtttgtaagccgtttcggtgtgcccttgatatctgctttacaagtttataattcgtaagtttaattttatcatactgca

SEQ ID NO: 15376 - DNA, 1213 bp, Glycine max
  Gm_smallRNAprecursor_8209
caacacaatttacaattttcccaattggtttttgcaatggtgggacttctttggaccaatcccagagatattcccagaaacggtccaacaaggattttcccaatttaagaaacaacacaattcgcaggaatcacgaattccagcagatcttaaatacttttcaagctttgcactgtcatggatattctcatggcaatatcgttacagcaagactgaaaagacaaaccaatatccatcactacaaagacacgcatttgtaaaatggtggacacaatttgactcatccaaagcggatccagaacaagtaaaactatggttccaatcccatccagaattcctcaaggcagctgatccagagacttctgtgtttttgaaccaaaagtctcatctggcagcatttttagcaggatcgacatcaaaggaggtcttagctaaaaatctgaaggaagttctacaaatgttacaacaggaagaagaagcttcatcctcaaagaaggaagaaacaagttctgctgaagaagacgaagaagatcccttttaccaaaacgaagatgattgttttagtatctgtttagattaaatttaatttcggtcacaaaaccgtctgtttgtaattaatgtgtaattaatgctggacaatactacctgtcctatagccattaaagtcccggtcaaaactacttgtcttgtaacaaacagtcaaatagtcccggtcaaaactaccggcaactaccggtcttagatttttggctatataaggagtcctcaagtatgttgtgaggcaccctttcatttagccattttttcaggtttcggaagagaggtgctctgaaacaagatttttgtaagcgcttctttctagattcaataaatttctatttttcatccttctctcttctccctccaccgatcctgtgcggctctgccgccgcttcggtttctttgttttcaaaaacctgggtttgtaagccgtttcggtgtgcccttgatatctgctttacaagtttataattcgtaagtttaattttatcatactgcattcttacttcctatctgtccgtttgatcttattccgctgatctctggtatcagagccttgatggggaagtaggaatagtgtccgtaagggcatatgttaactgaacttatggatctgaagcatgtacagtgattttaatttaaacagtatgtgtttgaatagtattttctggaa

SEQ ID NO: 15377 - DNA, 1157 bp, Glycine max
  Gm_smallRNAprecursor_8210
gtgtccgtaagggcatatgttaactgaacttatggatctgaagcatgtacagtgattttaatttaaacagtatgtgtttgaatagtattttctggaagcacagcagtctgatattttagttgaatgatactgtagcagtaagtcccgtggatgagaaagggcagtaaggctaaggtgtattgttcaaataaaatattgagacataatatactggtggctataggagtaatgttcaaactatattgtctgtataaaaaaaaaaaaaaatcttctttttcatttattcagatccaagaagttctgtaacatatagccttatggaaagattcctatggaaccaaatgaaggcaaagatattagagaatgttttaatcatgtctagattattgcgatcctcttcccgtatctcttttcgctcaaattcctcctcttcatcttcttcaagaaacaccaatctcttaaatgatcaagataaccagacccaagaggtcgccccaaaacacaatctcttcgatgaggaagtccgattcgaagatattaatcaaaacatggatgactggaacattccagaaatccctcaggatcaactatacgttcctgaaacaattaaagacaaacacaactttgattacataatcaaaacagtagaaaacaatattcctctaggacaagatataggggaagaatttcatctactttcaaaaaattcaatttatgaacatagccgtaagtataaatatctacacatcggttgtgtacaagtagccatcaagcccttaattgatatgggcatagatgcagcagttttaatgtgtctaagagatattaggcataatcaatttgaagactccctaattggaacagtcgagaccagcctaggacaaggtccaatatattttaattgttatccaaacaaaacagtgagtctgatggacagaaacattcttgactctctgttcttaaacatccactttcatggccttggcatgaaagaaggatcaatcccagcagccttaatttataggatccagtacaaggtcatgaatacttgtgcatctagagtccttttaaaacctcaaaaaggagaaacaaccttgtttatcactgatatgacaaaggctaacgtgtctctcccgagaaaaataaaatgggatgaa

SEQ ID NO: 15378 - DNA, 1198 bp, Glycine max
  Gm_smallRNAprecursor_8211
gtaaaagaaaaaattcaatctttattaaatcatattgaatcgaccgtttgttctgaattcccacaaaagccagaccaatccaaatgaatgaagaacttcttcaatactgtcaaaaggaaatcaaggatttgcttgataaaggcctaatccggaaaagcaaaagtccatggtcttgtgcggctttttatgttaacaaacaatctgagattgagcgtggaacaccccgcttagtcataaattacaaaccattaaatcaagcattacaatggattagatatcctattccaaacaaaaaagatttgcttaacagattaaattctgcaaagatattttcaaaatttgatatgaaatatggattttggcaaatccaaatccaagaatcagacaggtacaaaacagcgtttactgtacctttcgggcaatatgaatggaacgtgatgccgttcggactgaagaatgccccttcagaatttcaaaaaattatgaacgatatttttaatccctattcaaaatttgtcattgtctacatagatgatgttttaatcttttcccaaaacattgaccaacatttcaaacatctccaaacattcatacatatcatcaaacaaaatggtttggcagtctccaaatcaaaaatcaatcttttccaaactcgaattcgattccttggtcacaatatatatcaaggtacaatcattccaatcgaaaggtcaatagagtttgctagcaaattccccaaccaaatcttagacaaaacccagttacaaagatttctaggttgtctaaattacgtaggagaatttgtcccctatttaaataatattgtcaagccattacatgataggctgaagaaaaatccgcctccttggtctgacctccatacacaaacggttaaagaaatcaaagtcaaagtccagtccattaaatgtctgtatcttcctattccacaggcatttaaaattgtcgaaactgatgcttcagacataggttatggtggcatcctcaaacaaagagtccatggccaagatcatgtcattgcatatacatcaaaacattggaatcctgcacaattaaaatattcaactgttaaaaaagaagttttagcaattgttttgtgcatttccaaatttcaattggatttattaaaccaaaaatttttaatcagggttgattgtaaatcagccaaagatattttaca

SEQ ID NO: 15379 - DNA, 1234 bp, Glycine max
  Gm_smallRNAprecursor_8212
gtaaaagaaaaaattcaatctttattaaatcatattgaatcgaccgtttgttctgaattcccacaaaagccagaccaatccaaatgaatgaagaacttcttcaatactgtcaaaaggaaatcaaggatttgcttgataaaggcctaatccggaaaagcaaaagtccatggtcttgtgcggctttttatgttaacaaacaatctgagattgagcgtggaacaccccgcttagtcataaattacaaaccattaaatcaagcattacaatggattagatatcctattccaaacaaaaaagatttgcttaacagattaaattctgcaaagatattttcaaaatttgatatgaaatatggattttggcaaatccaaatccaagaatcagacaggtacaaaacagcgtttactgtacctttcgggcaatatgaatggaacgtgatgccgttcggactgaagaatgccccttcagaatttcaaaaaattatgaacgatatttttaatccctattcaaaatttgtcattgtctacatagatgatgttttaatcttttcccaaaacattgaccaacatttcaaacatctccaaacattcatacatatcatcaaacaaaatggtttggcagtctccaaatcaaaaatcaatcttttccaaactcgaattcgattccttggtcacaatatatatcaaggtacaatcattccaatcgaaaggtcaatagagtttgctagcaaattccccaaccaaatcttagacaaaacccagttacaaagatttctaggttgtctaaattacgtaggagaatttgtcccctatttaaataatattgtcaagccattacatgataggctgaagaaaaatccgcctccttggtctgacctccatacacaaacggttaaagaaatcaaagtcaaagtccagtccattaaatgtctgtatcttcctattccacaggcatttaaaattgtcgaaactgatgcttcagacataggttatggtggcatcctcaaacaaagagtccatggccaagatcatgtcattgcatatacatcaaaacattggaatcctgcacaattaaaatattcaactgttaaaaaagaagttttagcaattgttttgtgcatttccaaatttcaattggatttattaaaccaaaaatttttaatcagggttgattgtaaatcagccaaagatattttacaaaaagatgttaaaaaccttgcctcaaaacaaatttt

SEQ ID NO: 15380 - DNA, 1115 bp, Glycine max
  Gm_smallRNAprecursor_8213
tcaatagagtttgctagcaaattccccaaccaaatcttagacaaaacccagttacaaagatttctaggttgtctaaattacgtaggagaatttgtcccctatttaaataatattgtcaagccattacatgataggctgaagaaaaatccgcctccttggtctgacctccatacacaaacggttaaagaaatcaaagtcaaagtccagtccattaaatgtctgtatcttcctattccacaggcatttaaaattgtcgaaactgatgcttcagacataggttatggtggcatcctcaaacaaagagtccatggccaagatcatgtcattgcatatacatcaaaacattggaatcctgcacaattaaaatattcaactgttaaaaaagaagttttagcaattgttttgtgcatttccaaatttcaattggatttattaaaccaaaaatttttaatcagggttgattgtaaatcagccaaagatattttacaaaaagatgttaaaaaccttgcctcaaaacaaatttttgcacgatggcaagcaattttaagtgtctttgattttgacatagaatacatctagggcacctcaaattcactacctgactaccttacccgtgaattcttacagaaaagtggtaatgcctcctaaggcatcgggaatctccctacgaggaggaaggagtacaggcaaaggagccaggctggctcttccagagccaaccatcaagaaatcatctacctcttctgggtcaccatcccaggctgggtcatctacccagaaaaccaatttagaagggtcatcaacccagattgcctcaatcaaacccgagccatccactcaggaatctcccaaaccgacaaccgccaaacaaacatcggccgactatgcatggccaattgaaacccttcaggcccttcaagacatgggtctgaccaaatttccaaaaataatcaaaaaatcttgggcagacattgcctcagaatctgatgatgaatctgaatcaaatttacaaacaatgatccaaaatgcgtcaatgaccaaaacagccaccaatactaaaggaaaactacctttagccaaagctcaaacaccacctaccaaacaaactaacaatt

SEQ ID NO: 15381 - DNA, 1174 bp, Glycine max
  Gm_smallRNAprecursor_8214
acaaagagtccatggccaagatcatgtcattgcatatacatcaaaacattggaatcctgcacaattaaaatattcaactgttaaaaaagaagttttagcaattgttttgtgcatttccaaatttcaattggatttattaaaccaaaaatttttaatcagggttgattgtaaatcagccaaagatattttacaaaaagatgttaaaaaccttgcctcaaaacaaatttttgcacgatggcaagcaattttaagtgtctttgattttgacatagaatacatctagggcacctcaaattcactacctgactaccttacccgtgaattcttacagaaaagtggtaatgcctcctaaggcatcgggaatctccctacgaggaggaaggagtacaggcaaaggagccaggctggctcttccagagccaaccatcaagaaatcatctacctcttctgggtcaccatcccaggctgggtcatctacccagaaaaccaatttagaagggtcatcaacccagattgcctcaatcaaacccgagccatccactcaggaatctcccaaaccgacaaccgccaaacaaacatcggccgactatgcatggccaattgaaacccttcaggcccttcaagacatgggtctgaccaaatttccaaaaataatcaaaaaatcttgggcagacattgcctcagaatctgatgatgaatctgaatcaaatttacaaacaatgatccaaaatgcgtcaatgaccaaaacagccaccaatactaaaggaaaactacctttagccaaagctcaaacaccacctaccaaacaaactaacaattatatttataaaaataaattgttaactgttttgcagatggaacctgaattttgggacaaaaatcccttcaaggcgacggccaaggctttcccaccaggatttcactacaaaccaaccaccatcctgaagacaagaactttttatgaattgattttggtagattcaaactcagtatctatcaaacatttcaaagatccaaaagaccaaaccttaaacacccactcaaccatccaaatactaaaagttcttcaaccgagacactttggttcggacttgaacaaaggaaagagattttcagttccatttgatccggtaggttatacctattgggattacgttgatgcttggactaaggt

SEQ ID NO: 15382 - DNA, 1173 bp, Glycine max
  Gm_smallRNAprecursor_8215
caaagagtccatggccaagatcatgtcattgcatatacatcaaaacattggaatcctgcacaattaaaatattcaactgttaaaaaagaagttttagcaattgttttgtgcatttccaaatttcaattggatttattaaaccaaaaatttttaatcagggttgattgtaaatcagccaaagatattttacaaaaagatgttaaaaaccttgcctcaaaacaaatttttgcacgatggcaagcaattttaagtgtctttgattttgacatagaatacatctagggcacctcaaattcactacctgactaccttacccgtgaattcttacagaaaagtggtaatgcctcctaaggcatcgggaatctccctacgaggaggaaggagtacaggcaaaggagccaggctggctcttccagagccaaccatcaagaaatcatctacctcttctgggtcaccatcccaggctgggtcatctacccagaaaaccaatttagaagggtcatcaacccagattgcctcaatcaaacccgagccatccactcaggaatctcccaaaccgacaaccgccaaacaaacatcggccgactatgcatggccaattgaaacccttcaggcccttcaagacatgggtctgaccaaatttccaaaaataatcaaaaaatcttgggcagacattgcctcagaatctgatgatgaatctgaatcaaatttacaaacaatgatccaaaatgcgtcaatgaccaaaacagccaccaatactaaaggaaaactacctttagccaaagctcaaacaccacctaccaaacaaactaacaattatatttataaaaataaattgttaactgttttgcagatggaacctgaattttgggacaaaaatcccttcaaggcgacggccaaggctttcccaccaggatttcactacaaaccaaccaccatcctgaagacaagaactttttatgaattgattttggtagattcaaactcagtatctatcaaacatttcaaagatccaaaagaccaaaccttaaacacccactcaaccatccaaatactaaaagttcttcaaccgagacactttggttcggacttgaacaaaggaaagagattttcagttccatttgatccggtaggttatacctattgggattacgttgatgcttggactaaggt

SEQ ID NO: 15383 - DNA, 1173 bp, Glycine max; identical to SEQ ID NO: 15382
  Gm_smallRNAprecursor_8216

SEQ ID NO: 15384 - DNA, 1130 bp, Glycine max
  Gm_smallRNAprecursor_8217
caaacccgagccatccactcaggaatctcccaaaccgacaaccgccaaacaaacatcggccgactatgcatggccaattgaaacccttcaggcccttcaagacatgggtctgaccaaatttccaaaaataatcaaaaaatcttgggcagacattgcctcagaatctgatgatgaatctgaatcaaatttacaaacaatgatccaaaatgcgtcaatgaccaaaacagccaccaatactaaaggaaaactacctttagccaaagctcaaacaccacctaccaaacaaactaacaattatatttataaaaataaattgttaactgttttgcagatggaacctgaattttgggacaaaaatcccttcaaggcgacggccaaggctttcccaccaggatttcactacaaaccaaccaccatcctgaagacaagaactttttatgaattgattttggtagattcaaactcagtatctatcaaacatttcaaagatccaaaagaccaaaccttaaacacccactcaaccatccaaatactaaaagttcttcaaccgagacactttggttcggacttgaacaaaggaaagagattttcagttccatttgatccggtaggttatacctattgggattacgttgatgcttggactaaggtgttttggcaccaaaatacccgcttcaagcattcatggttgatatatttcaagaccaacacaatttacaattttcccaattggtttttgcaatggtgggacttctttggaccaatcccagagatattcccagaaacggtccaacaaggattttcccaatttaagaaacaatacaattcgcaggaatcacgaattccagcagatcttaaatacttttcaagctttgcactgtcatggatattctcatggcaatatcgttacagcaagactgaaaagacaaaccaatatccatcactacaaagacacgcatttgtaaaatggtggacacaatttgactcatccaaagcggatccagaacaagtaaaactatggttccaatcccatccagaattcctcaaggcagctgatccagagacttctgtgtttttgaaccaaaagtctcatctggcagcatttttagcaggatcgacatcaaaggagg

SEQ ID NO: 15385 - DNA, 1087 bp, Glycine max
  Gm_smallRNAprecursor_8218
cgagccatccactcaggaatctcccaaaccgacaaccgccaaacaaacatcggccgactatgcatggccaattgaaacccttcaggcccttcaagacatgggtctgaccaaatttccaaaaataatcaaaaaatcttgggcagacattgcctcagaatctgatgatgaatctgaatcaaatttacaaacaatgatccaaaatgcgtcaatgaccaaaacagccaccaatactaaaggaaaactacctttagccaaagctcaaacaccacctaccaaacaaactaacaattatatttataaaaataaattgttaactgttttgcagatggaacctgaattttgggacaaaaatcccttcaaggcgacggccaaggctttcccaccaggatttcactacaaaccaaccaccatcctgaagacaagaactttttatgaattgattttggtagattcaaactcagtatctatcaaacatttcaaagatccaaaagaccaaaccttaaacacccactcaaccatccaaatactaaaagttcttcaaccgagacactttggttcggacttgaacaaaggaaagagattttcagttccatttgatccggtaggttatacctattgggattacgttgatgcttggactaaggtgttttggcaccaaaatacccgcttcaagcattcatggttgatatatttcaagaccaacacaatttacaattttcccaattggtttttgcaatggtgggacttctttggaccaatcccagagatattcccagaaacggtccaacaaggattttcccaatttaagaaacaatacaattcgcaggaatcacgaattccagcagatcttaaatacttttcaagctttgcactgtcatggatattctcatggcaatatcgttacagcaagactgaaaagacaaaccaatatccatcactacaaagacacgcatttgtaaaatggtggacacaatttgactcatccaaagcggatccagaacaagtaaaactatggttccaatcccatccagaattcctcaaggcagctgatccagagacttctgtgtttttgaaccaaaagtctcat

SEQ ID NO: 15386 - DNA, 1124 bp, Glycine max
  Gm_smallRNAprecursor_8219
cgagccatccactcaggaatctcccaaaccgacaaccgccaaacaaacatcggccgactatgcatggccaattgaaacccttcaggcccttcaagacatgggtctgaccaaatttccaaaaataatcaaaaaatcttgggcagacattgcctcagaatctgatgatgaatctgaatcaaatttacaaacaatgatccaaaatgcgtcaatgaccaaaacagccaccaatactaaaggaaaactacctttagccaaagctcaaacaccacctaccaaacaaactaacaattatatttataaaaataaattgttaactgttttgcagatggaacctgaattttgggacaaaaatcccttcaaggcgacggccaaggctttcccaccaggatttcactacaaaccaaccaccatcctgaagacaagaactttttatgaattgattttggtagattcaaactcagtatctatcaaacatttcaaagatccaaaagaccaaaccttaaacacccactcaaccatccaaatactaaaagttcttcaaccgagacactttggttcggacttgaacaaaggaaagagattttcagttccatttgatccggtaggttatacctattgggattacgttgatgcttggactaaggtgttttggcaccaaaatacccgcttcaagcattcatggttgatatatttcaagaccaacacaatttacaattttcccaattggtttttgcaatggtgggacttctttggaccaatcccagagatattcccagaaacggtccaacaaggattttcccaatttaagaaacaatacaattcgcaggaatcacgaattccagcagatcttaaatacttttcaagctttgcactgtcatggatattctcatggcaatatcgttacagcaagactgaaaagacaaaccaatatccatcactacaaagacacgcatttgtaaaatggtggacacaatttgactcatccaaagcggatccagaacaagtaaaactatggttccaatcccatccagaattcctcaaggcagctgatccagagacttctgtgtttttgaaccaaaagtctcatctggcagcatttttagcaggatcgacatcaaaggagg

SEQ ID NO: 15387 - DNA, 1247 bp, Glycine max
  Gm_smallRNAprecursor_8220
cccttcaagacatgggtctgaccaaatttccaaaaataatcaaaaaatcttgggcagacattgcctcagaatctgatgatgaatctgaatcaaatttacaaacaatgatccaaaatgcgtcaatgaccaaaacagccaccaatactaaaggaaaactacctttagccaaagctcaaacaccacctaccaaacaaactaacaattatatttataaaaataaattgttaactgttttgcagatggaacctgaattttgggacaaaaatcccttcaaggcgacggccaaggctttcccaccaggatttcactacaaaccaaccaccatcctgaagacaagaactttttatgaattgattttggtagattcaaactcagtatctatcaaacatttcaaagatccaaaagaccaaaccttaaacacccactcaaccatccaaatactaaaagttcttcaaccgagacactttggttcggacttgaacaaaggaaagagattttcagttccatttgatccggtaggttatacctattgggattacgttgatgcttggactaaggtgttttggcaccaaaatacccgcttcaagcattcatggttgatatatttcaagaccaacacaatttacaattttcccaattggtttttgcaatggtgggacttctttggaccaatcccagagatattcccagaaacggtccaacaaggattttcccaatttaagaaacaatacaattcgcaggaatcacgaattccagcagatcttaaatacttttcaagctttgcactgtcatggatattctcatggcaatatcgttacagcaagactgaaaagacaaaccaatatccatcactacaaagacacgcatttgtaaaatggtggacacaatttgactcatccaaagcggatccagaacaagtaaaactatggttccaatcccatccagaattcctcaaggcagctgatccagagacttctgtgtttttgaaccaaaagtctcatctggcagcatttttagcaggatcgacatcaaaggaggtcttagctaaaaatctgaaggaagttctacaaatgttacaacaggaagaagaagcttcatcctcaaagaaggaagaaacaagttctgctgaagaagacgaagaagatcccttttaccaaaacgaagattattgttttggtatctgtttagattaaatttaatttcggtcacaaaaccgtctgtttgtaattaatgtgtaattaatgctg

SEQ ID NO: 15388 - DNA, 1248 bp, Glycine max
  Gm_smallRNAprecursor_8221
cccttcaagacatgggtctgaccaaatttccaaaaataatcaaaaaatcttgggcagacattgcctcagaatctgatgatgaatctgaatcaaatttacaaacaatgatccaaaatgcgtcaatgaccaaaacagccaccaatactaaaggaaaactacctttagccaaagctcaaacaccacctaccaaacaaactaacaattatatttataaaaataaattgttaactgttttgcagatggaacctgaattttgggacaaaaatcccttcaaggcgacggccaaggctttcccaccaggatttcactacaaaccaaccaccatcctgaagacaagaactttttatgaattgattttggtagattcaaactcagtatctatcaaacatttcaaagatccaaaagaccaaaccttaaacacccactcaaccatccaaatactaaaagttcttcaaccgagacactttggttcggacttgaacaaaggaaagagattttcagttccatttgatccggtaggttatacctattgggattacgttgatgcttggactaaggtgttttggcaccaaaatacccgcttcaagcattcatggttgatatatttcaagaccaacacaatttacaattttcccaattggtttttgcaatggtgggacttctttggaccaatcccagagatattcccagaaacggtccaacaaggattttcccaatttaagaaacaatacaattcgcaggaatcacgaattccagcagatcttaaatacttttcaagctttgcactgtcatggatattctcatggcaatatcgttacagcaagactgaaaagacaaaccaatatccatcactacaaagacacgcatttgtaaaatggtggacacaatttgactcatccaaagcggatccagaacaagtaaaactatggttccaatcccatccagaattcctcaaggcagctgatccagagacttctgtgtttttgaaccaaaagtctcatctggcagcatttttagcaggatcgacatcaaaggaggtcttagctaaaaatctgaaggaagttctacaaatgttacaacaggaagaagaagcttcatcctcaaagaaggaagaaacaagttctgctgaagaagacgaagaagatcccttttaccaaaacgaagattattgttttggtatctgtttagattaaatttaatttcggtcacaaaaccgtctgtttgtaattaatgtgtaattaatgctgg

SEQ ID NO: 15389 - DNA, 1146 bp, Glycine max
  Gm_smallRNAprecursor_8222
acaatgatccaaaatgcgtcaatgaccaaaacagccaccaatactaaaggaaaactacctttagccaaagctcaaacaccacctaccaaacaaactaacaattatatttataaaaataaattgttaactgttttgcagatggaacctgaattttgggacaaaaatcccttcaaggcgacggccaaggctttcccaccaggatttcactacaaaccaaccaccatcctgaagacaagaactttttatgaattgattttggtagattcaaactcagtatctatcaaacatttcaaagatccaaaagaccaaaccttaaacacccactcaaccatccaaatactaaaagttcttcaaccgagacactttggttcggacttgaacaaaggaaagagattttcagttccatttgatccggtaggttatacctattgggattacgttgatgcttggactaaggtgttttggcaccaaaatacccgcttcaagcattcatggttgatatatttcaagaccaacacaatttacaattttcccaattggtttttgcaatggtgggacttctttggaccaatcccagagatattcccagaaacggtccaacaaggattttcccaatttaagaaacaatacaattcgcaggaatcacgaattccagcagatcttaaatacttttcaagctttgcactgtcatggatattctcatggcaatatcgttacagcaagactgaaaagacaaaccaatatccatcactacaaagacacgcatttgtaaaatggtggacacaatttgactcatccaaagcggatccagaacaagtaaaactatggttccaatcccatccagaattcctcaaggcagctgatccagagacttctgtgtttttgaaccaaaagtctcatctggcagcatttttagcaggatcgacatcaaaggaggtcttagctaaaaatctgaaggaagttctacaaatgttacaacaggaagaagaagcttcatcctcaaagaaggaagaaacaagttctgctgaagaagacgaagaagatcccttttaccaaaacgaagattattgttttggtatctgtttagattaaatttaatttcggtcacaaaaccgtctgtttgtaattaatgtgtaattaatgctg

SEQ ID NO: 15390 - DNA, 1146 bp, Glycine max; identical to SEQ ID NO: 15389
  Gm_smallRNAprecursor_8223

SEQ ID NO: 15391 - DNA, 1147 bp, Glycine max
  Gm_smallRNAprecursor_8224
acaatgatccaaaatgcgtcaatgaccaaaacagccaccaatactaaaggaaaactacctttagccaaagctcaaacaccacctaccaaacaaactaacaattatatttataaaaataaattgttaactgttttgcagatggaacctgaattttgggacaaaaatcccttcaaggcgacggccaaggctttcccaccaggatttcactacaaaccaaccaccatcctgaagacaagaactttttatgaattgattttggtagattcaaactcagtatctatcaaacatttcaaagatccaaaagaccaaaccttaaacacccactcaaccatccaaatactaaaagttcttcaaccgagacactttggttcggacttgaacaaaggaaagagattttcagttccatttgatccggtaggttatacctattgggattacgttgatgcttggactaaggtgttttggcaccaaaatacccgcttcaagcattcatggttgatatatttcaagaccaacacaatttacaattttcccaattggtttttgcaatggtgggacttctttggaccaatcccagagatattcccagaaacggtccaacaaggattttcccaatttaagaaacaatacaattcgcaggaatcacgaattccagcagatcttaaatacttttcaagctttgcactgtcatggatattctcatggcaatatcgttacagcaagactgaaaagacaaaccaatatccatcactacaaagacacgcatttgtaaaatggtggacacaatttgactcatccaaagcggatccagaacaagtaaaactatggttccaatcccatccagaattcctcaaggcagctgatccagagacttctgtgtttttgaaccaaaagtctcatctggcagcatttttagcaggatcgacatcaaaggaggtcttagctaaaaatctgaaggaagttctacaaatgttacaacaggaagaagaagcttcatcctcaaagaaggaagaaacaagttctgctgaagaagacgaagaagatcccttttaccaaaacgaagattattgttttggtatctgtttagattaaatttaatttcggtcacaaaaccgtctgtttgtaattaatgtgtaattaatgctgg

SEQ ID NO: 15392 - DNA, 1158 bp, Glycine max
  Gm_smallRNAprecursor_8225
cgagacactttggttcggacttgaacaaaggaaagagattttcagttccatttgatccggtaggttatacctattgggattacgttgatgcttggactaaggtgttttggcaccaaaatacccgcttcaagcattcatggttgatatatttcaagaccaacacaatttacaattttcccaattggtttttgcaatggtgggacttctttggaccaatcccagagatattcccagaaacggtccaacaaggattttcccaatttaagaaacaatacaattcgcaggaatcacgaattccagcagatcttaaatacttttcaagctttgcactgtcatggatattctcatggcaatatcgttacagcaagactgaaaagacaaaccaatatccatcactacaaagacacgcatttgtaaaatggtggacacaatttgactcatccaaagcggatccagaacaagtaaaactatggttccaatcccatccagaattcctcaaggcagctgatccagagacttctgtgtttttgaaccaaaagtctcatctggcagcatttttagcaggatcgacatcaaaggaggtcttagctaaaaatctgaaggaagttctacaaatgttacaacaggaagaagaagcttcatcctcaaagaaggaagaaacaagttctgctgaagaagacgaagaagatcccttttaccaaaacgaagattattgttttggtatctgtttagattaaatttaatttcggtcacaaaaccgtctgtttgtaattaatgtgtaattaatgctggacaatactacctgtcctgtagccattaaagtcccggtcaaaactacttgtcttgtaacaaacagtcaaatagtcccggtaaaaactaccggcaactaccggtcttagattttttgctatataaggagtcctcaagtatgttgtgaggcaccctttcatttagccattttttcaggtttcggaagagaggtgctctgaaacaagatttttgtaagcgcttctttctagattcaataaatttctatttttcatccttctctcttctccctccaccgatcctgtgcggctctgccgccgcttcggtttctttgttttcaaaaacctgggtttgtaagccgtttcagtgtgcccttgatatttgctttac

SEQ ID NO: 15393 - DNA, 1172 bp, Glycine max
  Gm_smallRNAprecursor_8226
cgagacactttggttcggacttgaacaaaggaaagagattttcagttccatttgatccggtaggttatacctattgggattacgttgatgcttggactaaggtgttttggcaccaaaatacccgcttcaagcattcatggttgatatatttcaagaccaacacaatttacaattttcccaattggtttttgcaatggtgggacttctttggaccaatcccagagatattcccagaaacggtccaacaaggattttcccaatttaagaaacaatacaattcgcaggaatcacgaattccagcagatcttaaatacttttcaagctttgcactgtcatggatattctcatggcaatatcgttacagcaagactgaaaagacaaaccaatatccatcactacaaagacacgcatttgtaaaatggtggacacaatttgactcatccaaagcggatccagaacaagtaaaactatggttccaatcccatccagaattcctcaaggcagctgatccagagacttctgtgtttttgaaccaaaagtctcatctggcagcatttttagcaggatcgacatcaaaggaggtcttagctaaaaatctgaaggaagttctacaaatgttacaacaggaagaagaagcttcatcctcaaagaaggaagaaacaagttctgctgaagaagacgaagaagatcccttttaccaaaacgaagattattgttttggtatctgtttagattaaatttaatttcggtcacaaaaccgtctgtttgtaattaatgtgtaattaatgctggacaatactacctgtcctgtagccattaaagtcccggtcaaaactacttgtcttgtaacaaacagtcaaatagtcccggtaaaaactaccggcaactaccggtcttagattttttgctatataaggagtcctcaagtatgttgtgaggcaccctttcatttagccattttttcaggtttcggaagagaggtgctctgaaacaagatttttgtaagcgcttctttctagattcaataaatttctatttttcatccttctctcttctccctccaccgatcctgtgcggctctgccgccgcttcggtttctttgttttcaaaaacctgggtttgtaagccgtttcagtgtgcccttgatatttgctttacaagtttataattct

SEQ ID NO: 15394 - DNA, 1040 bp, Glycine max
  Gm_smallRNAprecursor_8227
atttgcatggatatccccaagatgtcgccagtgcatcttctccgtgtatgcgtaacctgtaaatattcaatcaatctattatgttataaaatttgattgaaagaaaattttaacaaataaataaaatagattctcaccagccaacacgagtggtttctttaaatgtctgcagtttgagttaccgcgaagaaagttttgtgtaatgtggcgcaggcaaaagaaatgggatgtgtcctggacccataagttacttgggttgttgtagacacttataattgaggggtgtcggtctgaaataagagaaatgttaatttgcggagtaacatgtcttctcaaattttttagaaaaaaaccccaagctgaagttgtctccccttctacaatggcgtaggcaatcgggaagatatggttagctctatcttgtgcggtagctatcaacagtgtgccagtatacttcctgtaaagccatgtgccatctacttgtactatgggtttgcaatatgcaaaaccattaatgcatgggccaaatgaccaaaagacacgtttaaacaatcttttgcctagtactatttctctcccctcatacaaggattatgtttgagcagcgaccacagtctcgggaacacaagattgcaaagctctgaaaatttttggtagtttggcgtatgattcttcccagtttccatgaatcatctccaacgctctttgctttgctaaccatgtcttcttgtaggatgtggtataattcatgaacgttttgatatctgcaatcaacgtcttgatggagatggttgggtttgttttgactattgattggatgatctgtgctatgacgtgtttgtcgagttggcgatgatcttgtctgagcatcgacacgagacaagtgtgatgacctctgatattcttgataatccatttgttatgcctctttgaattgcatgcgcccaagctccatgtacaaccatttttatgtaacttgcagacgaagtttagccttctctggtcagagtaaattgttctgcaatcaaaatgatttatga

SEQ ID NO: 15395 - DNA, 1175 bp, Glycine max
  Gm_smallRNAprecursor_8228
atttgattcctgattttttatccaatccgagcaagactatcaaggtgataacttctactcactccttctctttgatattcatggtaaaacccttagctgaaacaaccaaaaccattagggatttccctccagggttggttatccatactctagtagaaattcttcaatatgctaagtcacttccatttccttcacgaaaccatgagattcaaatatactcctgcacaaatatttgaccctgagataccctttggagccatatttgaacttttttgtgagattggatgggatttgtgtgaactaaccatatgggctatttggtgtaatatagttcagtattctattcccatcgccttaaagctcctgatgatataccatatcttgacaaatccatataaagatgaatattttttatggacaatgttagaatggttttctcctctagcttggtggcatatgaagctaaaacagattctagacactgatagaaaaagagaaatcacagaagatcacatgaaatatttggtttttattgtgattattcgccatccttatgttatggaacaaggataactttggtctagaaatgaagctcagatttaggaaacgtttgaagtttatcctttagatgtaagttataggatccagttggcaagacacctctgtgagattaataattattcatgcaaacctctgaacctagacctaccaagttcatcccaatggccaattgattgttatccttctgacagaataatacttcaaaatgatgatgacagttaaattcgcccagatatttatgtttcagatcctgcgttccaaaaggtggaagatctagtggatgacaatctcgctttagaacaagacttggaggactacaatgcccaattgatggaagagttattacacaaagatgataagacttccatacactagatgataataaggataataaggatattggataagacttccatacactagatgataataaggataataaggatattgcattttgtgtaataactcttccattaattgggcattgtagtcctccaagtattgttctaaagcgagattgtcatccactagatcttccaccttttggaacgcaggatttgaaacataaatatctgtgcgaatttgactgtcatcatcattttgaagtattattc

SEQ ID NO: 15396 - DNA, 1175 bp, Glycine max; identical to SEQ ID NO: 15395
  Gm_smallRNAprecursor_8229

SEQ ID NO: 15397 - DNA, 1174 bp, Glycine max
  Gm_smallRNAprecursor_8230
tttgattcctgattttttatccaatccgagcaagactatcaaggtgataacttctactcactccttctctttgatattcatggtaaaacccttagctgaaacaaccaaaaccattagggatttccctccagggttggttatccatactctagtagaaattcttcaatatgctaagtcacttccatttccttcacgaaaccatgagattcaaatatactcctgcacaaatatttgaccctgagataccctttggagccatatttgaacttttttgtgagattggatgggatttgtgtgaactaaccatatgggctatttggtgtaatatagttcagtattctattcccatcgccttaaagctcctgatgatataccatatcttgacaaatccatataaagatgaatattttttatggacaatgttagaatggttttctcctctagcttggtggcatatgaagctaaaacagattctagacactgatagaaaaagagaaatcacagaagatcacatgaaatatttggtttttattgtgattattcgccatccttatgttatggaacaaggataactttggtctagaaatgaagctcagatttaggaaacgtttgaagtttatcctttagatgtaagttataggatccagttggcaagacacctctgtgagattaataattattcatgcaaacctctgaacctagacctaccaagttcatcccaatggccaattgattgttatccttctgacagaataatacttcaaaatgatgatgacagttaaattcgcccagatatttatgtttcagatcctgcgttccaaaaggtggaagatctagtggatgacaatctcgctttagaacaagacttggaggactacaatgcccaattgatggaagagttattacacaaagatgataagacttccatacactagatgataataaggataataaggatattggataagacttccatacactagatgataataaggataataaggatattgcattttgtgtaataactcttccattaattgggcattgtagtcctccaagtattgttctaaagcgagattgtcatccactagatcttccaccttttggaacgcaggatttgaaacataaatatctgtgcgaatttgactgtcatcatcattttgaagtattattc

SEQ ID NO: 15398 - DNA, 1174 bp, Glycine max; identical to SEQ ID NO: 15397
  Gm_smallRNAprecursor_8231

SEQ ID NO: 15399 - DNA, 1155 bp, Glycine max
  Gm_smallRNAprecursor_8232
agtcacttccatttccttcacgaaaccatgagattcaaatatactcctgcacaaatatttgaccctgagataccctttggagccatatttgaacttttttgtgagattggatgggatttgtgtgaactaaccatatgggctatttggtgtaatatagttcagtattctattcccatcgccttaaagctcctgatgatataccatatcttgacaaatccatataaagatgaatattttttatggacaatgttagaatggttttctcctctagcttggtggcatatgaagctaaaacagattctagacactgatagaaaaagagaaatcacagaagatcacatgaaatatttggtttttattgtgattattcgccatccttatgttatggaacaaggataactttggtctagaaatgaagctcagatttaggaaacgtttgaagtttatcctttagatgtaagttataggatccagttggcaagacacctctgtgagattaataattattcatgcaaacctctgaacctagacctaccaagttcatcccaatggccaattgattgttatccttctgacagaataatacttcaaaatgatgatgacagttaaattcgcccagatatttatgtttcagatcctgcgttccaaaaggtggaagatctagtggatgacaatctcgctttagaacaagacttggaggactacaatgcccaattgatggaagagttattacacaaagatgataagacttccatacactagatgataataaggataataaggatattggataagacttccatacactagatgataataaggataataaggatattgcattttgtgtaataactcttccattaattgggcattgtagtcctccaagtattgttctaaagcgagattgtcatccactagatcttccaccttttggaacgcaggatttgaaacataaatatctgtgcgaatttgactgtcatcatcattttgaagtattattctgtcagtaggataacaatccattggcctttgggatgaacttggtaggtctaggttcagaggtttgcatgaataattattaatctcacagaggtgtcttttcaattggatcctataacttacatctaaaggataaacttcaaacatttcctaaat

SEQ ID NO: 15400 - DNA, 1097 bp, Glycine max
  Gm_smallRNAprecursor_8233
ttcctcccaacaatattaaagtttataaactacattatccatatctgatatagctatatacacttataggtggtaaaaataagctaaaagttgacaaatgcttcacaactcctcgaatgacacctaatcttggaaaggtattttttatgatcttcaatagtcttattctagcttgcaaagtcatctgaattaatagctttatctttttttttttatcaaattaatagttatatcttctatttttgttatttctttcaagtctgagcataagtggggattgtattcttgttttatagctaacaaatatcactatagtcatatttataaacagtaatttttttaatatcttatataattttatttatagataattttatcattataaataatttattttaattaacctcaaattactctacaggtcaaatatgtttttacatcggtgttgaagttaccaccgatgaagaaatatcatatttcaatatcgttgcttaatttaaaacgacttagaagagcatcttactacatcggtgcttacgttagcaccgatgtagaaaatccgagatcaacatcgttgcttaatttaaaaacgacttagaagagcatcttactacatcggtgcctacgtcagcaccgatgtagaaaatacgacatcaacatcgttgcttaatttaaaaacgacttagaagagcatcttactacatcggtacctacgtcagcaccgatgttgaaaatccgagatcaacatcgttgcttaatttaaaaacgatgtagaaaatccatcttcaaagttgttgttgacgtcagcaacatatttgaaactaaggtttctacatcggtcattagtaaaacaccgatttagaaaaaaaatgcaattctacaacgttcacttatggaccgttgttgaaatttttaagtttcaacatcattataataaaaaacggttaagcaccgttgttaaatcgtgattttgaccgatgtagaatatgcgttttctagtagtgctattaacaggttttgtaaatataaataaaataagtagttttgttatacctattttaaaagttgttatgaaatttgttaccgttaattgtgta

SEQ ID NO: 15401 - DNA, 1185 bp, Glycine max
  Gm_smallRNAprecursor_8234
ttcctcccaacaatattaaagtttataaactacattatccatatctgatatagctatatacacttataggtggtaaaaataagctaaaagttgacaaatgcttcacaactcctcgaatgacacctaatcttggaaaggtattttttatgatcttcaatagtcttattctagcttgcaaagtcatctgaattaatagctttatctttttttttttatcaaattaatagttatatcttctatttttgttatttctttcaagtctgagcataagtggggattgtattcttgttttatagctaacaaatatcactatagtcatatttataaacagtaatttttttaatatcttatataattttatttatagataattttatcattataaataatttattttaattaacctcaaattactctacaggtcaaatatgtttttacatcggtgttgaagttaccaccgatgaagaaatatcatatttcaatatcgttgcttaatttaaaacgacttagaagagcatcttactacatcggtgcttacgttagcaccgatgtagaaaatccgagatcaacatcgttgcttaatttaaaaacgacttagaagagcatcttactacatcggtgcctacgtcagcaccgatgtagaaaatacgacatcaacatcgttgcttaatttaaaaacgacttagaagagcatcttactacatcggtacctacgtcagcaccgatgttgaaaatccgagatcaacatcgttgcttaatttaaaaacgatgtagaaaatccatcttcaaagttgttgttgacgtcagcaacatatttgaaactaaggtttctacatcggtcattagtaaaacaccgatttagaaaaaaaatgcaattctacaacgttcacttatggaccgttgttgaaatttttaagtttcaacatcattataataaaaaacggttaagcaccgttgttaaatcgtgattttgaccgatgtagaatatgcgttttctagtagtgctattaacaggttttgtaaatataaataaaataagtagttttgttatacctattttaaaagttgttatgaaatttgttaccgttaattgtgtatattaaattttgcttccactatttagttttattttaaatttgaaattcaatattagaataacttattattattttgtctaaagtttat

SEQ ID NO: 15402 - DNA, 1081 bp, Glycine max
  Gm_smallRNAprecursor_8235
aacaatattaaagtttataaactacattatccatatctgatatagctatatacacttataggtggtaaaaataagctaaaagttgacaaatgcttcacaactcctcgaatgacacctaatcttggaaaggtattttttatgatcttcaatagtcttattctagcttgcaaagtcatctgaattaatagctttatctttttttttttatcaaattaatagttatatcttctatttttgttatttctttcaagtctgagcataagtggggattgtattcttgttttatagctaacaaatatcactatagtcatatttataaacagtaatttttttaatatcttatataattttatttatagataattttatcattataaataatttattttaattaacctcaaattactctacaggtcaaatatgtttttacatcggtgttgaagttaccaccgatgaagaaatatcatatttcaatatcgttgcttaatttaaaacgacttagaagagcatcttactacatcggtgcttacgttagcaccgatgtagaaaatccgagatcaacatcgttgcttaatttaaaaacgacttagaagagcatcttactacatcggtgcctacgtcagcaccgatgtagaaaatacgacatcaacatcgttgcttaatttaaaaacgacttagaagagcatcttactacatcggtacctacgtcagcaccgatgttgaaaatccgagatcaacatcgttgcttaatttaaaaacgatgtagaaaatccatcttcaaagttgttgttgacgtcagcaacatatttgaaactaaggtttctacatcggtcattagtaaaacaccgatttagaaaaaaaatgcaattctacaacgttcacttatggaccgttgttgaaatttttaagtttcaacatcattataataaaaaacggttaagcaccgttgttaaatcgtgattttgaccgatgtagaatatgcgttttctagtagtgctattaacaggttttgtaaatataaataaaataagtagttttgttatacctattttaaaagttgttatgaaatttgttaccgtta

SEQ ID NO: 15403 - DNA, 1169 bp, Glycine max
  Gm_smallRNAprecursor_8236
aacaatattaaagtttataaactacattatccatatctgatatagctatatacacttataggtggtaaaaataagctaaaagttgacaaatgcttcacaactcctcgaatgacacctaatcttggaaaggtattttttatgatcttcaatagtcttattctagcttgcaaagtcatctgaattaatagctttatctttttttttttatcaaattaatagttatatcttctatttttgttatttctttcaagtctgagcataagtggggattgtattcttgttttatagctaacaaatatcactatagtcatatttataaacagtaatttttttaatatcttatataattttatttatagataattttatcattataaataatttattttaattaacctcaaattactctacaggtcaaatatgtttttacatcggtgttgaagttaccaccgatgaagaaatatcatatttcaatatcgttgcttaatttaaaacgacttagaagagcatcttactacatcggtgcttacgttagcaccgatgtagaaaatccgagatcaacatcgttgcttaatttaaaaacgacttagaagagcatcttactacatcggtgcctacgtcagcaccgatgtagaaaatacgacatcaacatcgttgcttaatttaaaaacgacttagaagagcatcttactacatcggtacctacgtcagcaccgatgttgaaaatccgagatcaacatcgttgcttaatttaaaaacgatgtagaaaatccatcttcaaagttgttgttgacgtcagcaacatatttgaaactaaggtttctacatcggtcattagtaaaacaccgatttagaaaaaaaatgcaattctacaacgttcacttatggaccgttgttgaaatttttaagtttcaacatcattataataaaaaacggttaagcaccgttgttaaatcgtgattttgaccgatgtagaatatgcgttttctagtagtgctattaacaggttttgtaaatataaataaaataagtagttttgttatacctattttaaaagttgttatgaaatttgttaccgttaattgtgtatattaaattttgcttccactatttagttttattttaaatttgaaattcaatattagaataacttattattattttgtcta

SEQ ID NO: 15404 - DNA, 1097 bp, Glycine max
  Gm_smallRNAprecursor_8237
agttgacaaatgcttcacaactcctcgaatgacacctaatcttggaaaggtattttttatgatcttcaatagtcttattctagcttgcaaagtcatctgaattaatagctttatctttttttttttatcaaattaatagttatatcttctatttttgttatttctttcaagtctgagcataagtggggattgtattcttgttttatagctaacaaatatcactatagtcatatttataaacagtaatttttttaatatcttatataattttatttatagataattttatcattataaataatttattttaattaacctcaaattactctacaggtcaaatatgtttttacatcggtgttgaagttaccaccgatgaagaaatatcatatttcaatatcgttgcttaatttaaaacgacttagaagagcatcttactacatcggtgcttacgttagcaccgatgtagaaaatccgagatcaacatcgttgcttaatttaaaaacgacttagaagagcatcttactacatcggtgcctacgtcagcaccgatgtagaaaatacgacatcaacatcgttgcttaatttaaaaacgacttagaagagcatcttactacatcggtacctacgtcagcaccgatgttgaaaatccgagatcaacatcgttgcttaatttaaaaacgatgtagaaaatccatcttcaaagttgttgttgacgtcagcaacatatttgaaactaaggtttctacatcggtcattagtaaaacaccgatttagaaaaaaaatgcaattctacaacgttcacttatggaccgttgttgaaatttttaagtttcaacatcattataataaaaaacggttaagcaccgttgttaaatcgtgattttgaccgatgtagaatatgcgttttctagtagtgctattaacaggttttgtaaatataaataaaataagtagttttgttatacctattttaaaagttgttatgaaatttgttaccgttaattgtgtatattaaattttgcttccactatttagttttattttaaatttgaaattcaatattagaataacttattattattttgtctaaagtttat

SEQ ID NO: 15405 - DNA, 1081 bp, Glycine max
  Gm_smallRNAprecursor_8238
aatgcttcacaactcctcgaatgacacctaatcttggaaaggtattttttatgatcttcaatagtcttattctagcttgcaaagtcatctgaattaatagctttatctttttttttttatcaaattaatagttatatcttctatttttgttatttctttcaagtctgagcataagtggggattgtattcttgttttatagctaacaaatatcactatagtcatatttataaacagtaatttttttaatatcttatataattttatttatagataattttatcattataaataatttattttaattaacctcaaattactctacaggtcaaatatgtttttacatcggtgttgaagttaccaccgatgaagaaatatcatatttcaatatcgttgcttaatttaaaacgacttagaagagcatcttactacatcggtgcttacgttagcaccgatgtagaaaatccgagatcaacatcgttgcttaatttaaaaacgacttagaagagcatcttactacatcggtgcctacgtcagcaccgatgtagaaaatacgacatcaacatcgttgcttaatttaaaaacgacttagaagagcatcttactacatcggtacctacgtcagcaccgatgttgaaaatccgagatcaacatcgttgcttaatttaaaaacgatgtagaaaatccatcttcaaagttgttgttgacgtcagcaacatatttgaaactaaggtttctacatcggtcattagtaaaacaccgatttagaaaaaaaatgcaattctacaacgttcacttatggaccgttgttgaaatttttaagtttcaacatcattataataaaaaacggttaagcaccgttgttaaatcgtgattttgaccgatgtagaatatgcgttttctagtagtgctattaacaggttttgtaaatataaataaaataagtagttttgttatacctattttaaaagttgttatgaaatttgttaccgttaattgtgtatattaaattttgcttccactatttagttttattttaaatttgaaattcaatattagaataacttattattattttgtcta

SEQ ID NO: 15406 - DNA, 1036 bp, Glycine max
  Gm_smallRNAprecursor_8239
tgttcttacctcatgacgtttcataatatccaacttgcgacgaaaaactctcacatcatcattgccgatatattggtttccacgtcgcagccaactacaaagattaaaatttaatataccctaaaaccatttattcttttgaaatgaaagacgcttttaaaaatgactaacctgtgccctagtgatttattttctacttgggaaggagtcctctttggagccaaggttggacatcgttcccatgcccacatttgtagtaagatacacatacctccgattgatttagttttataatcggtggcactacacatctctctgtatagaaaagcaagtacggtaggtccccatgcatatgtgctacagtcttcaaagtcacgtaaaaattgaaggtacattagcgaaactttgttactgcttttgtcaacgaacaagacacctccaatgaatcttagtatccatgcacgggcaaaccttcgtacttgttcttcatcatcgtggttatttatttgtgcaaaatggtgagccaaccaacttaatttaaccacactacctttaatttcaccttcttgtggtctgactcccaataattcctcacataaatcagcccaattaagatttgttggaccgattaatggtaaaccatccacacgtagacctaacaatacagagacgtcttggagagtaatagtacactctccgcatctcatgtgaaaggtatgtgtttccggccttcatctttctatcaaagcactaattaatgaggcatttatttttaagtatctcattttcataatccagtaaaaaccagattggcgaagaaaatgaaaaatttgctctggaatttcttcttccccttgatacgtggggacagctcgtctgatatgtaatttccaattttcttccccattccaaacatgttctgaaacatgcttaggttgcatccataatacatcactatcgatcgggtcagacttaattttaatatgtgatggacatgacgatgaagatgtcattgatactgcaacataaaatataa

SEQ ID NO: 15407 - DNA, 1037 bp, Glycine max
  Gm_smallRNAprecursor_8240
tgttcttacctcatgacgtttcataatatccaacttgcgacgaaaaactctcacatcatcattgccgatatattggtttccacgtcgcagccaactacaaagattaaaatttaatataccctaaaaccatttattcttttgaaatgaaagacgcttttaaaaatgactaacctgtgccctagtgatttattttctacttgggaaggagtcctctttggagccaaggttggacatcgttcccatgcccacatttgtagtaagatacacatacctccgattgatttagttttataatcggtggcactacacatctctctgtatagaaaagcaagtacggtaggtccccatgcatatgtgctacagtcttcaaagtcacgtaaaaattgaaggtacattagcgaaactttgttactgcttttgtcaacgaacaagacacctccaatgaatcttagtatccatgcacgggcaaaccttcgtacttgttcttcatcatcgtggttatttatttgtgcaaaatggtgagccaaccaacttaatttaaccacactacctttaatttcaccttcttgtggtctgactcccaataattcctcacataaatcagcccaattaagatttgttggaccgattaatggtaaaccatccacacgtagacctaacaatacagagacgtcttggagagtaatagtacactctccgcatctcatgtgaaaggtatgtgtttccggccttcatctttctatcaaagcactaattaatgaggcatttatttttaagtatctcattttcataatccagtaaaaaccagattggcgaagaaaatgaaaaatttgctctggaatttcttcttccccttgatacgtggggacagctcgtctgatatgtaatttccaattttcttccccattccaaacatgttctgaaacatgcttaggttgcatccataatacatcactatcgatcgggtcagacttaattttaatatgtgatggacatgacgatgaagatgtcattgatactgcaacataaaatataat

SEQ ID NO: 15408 - DNA, 1053 bp, Glycine max
  Gm_smallRNAprecursor_8241
ccaacttaatttaaccacactacctttaatttcaccttcttgtggtctgactcccaataattcctcacataaatcagcccaattaagatttgttggaccgattaatggtaaaccatccacacgtagacctaacaatacagagacgtcttggagagtaatagtacactctccgcatctcatgtgaaaggtatgtgtttccggccttcatctttctatcaaagcactaattaatgaggcatttatttttaagtatctcattttcataatccagtaaaaaccagattggcgaagaaaatgaaaaatttgctctggaatttcttcttccccttgatacgtggggacagctcgtctgatatgtaatttccaattttcttccccattccaaacatgttctgaaacatgcttaggttgcatccataatacatcactatcgatcgggtcagacttaattttaatatgtgatggacatgacgatgaagatgtcattgatactgcaacataaaatataatacaataaatttacaaaacaatttatacattatttgtagataatataaataaaactacgcacatttataaaaacgttattaaatatatataaataaatttgtaataaataaaactgggcaattttgaatatattctatagataaattaaaatacatgcgaagacaaatttaaataaataacaaaatatatttatttgataacaaaatatattatacaaataataaaatttaaatatattctacaaatactttcaaatacatacacatagacaaatttaaataaataatataatatattctacaattaacaaataaataagtaaataaaatatggactaccaaataaattaaaatacaaacaaatattcaaatgcaaaaaattatttaaacaacgtgtaatacaaaaataataataatgtacaatgtatcatatatttaatcacgtaaattttctaaaacaaataatattaacctacaaactaaaactaacaaataatatatataacattctaactaaaaatacttgactcaaattatattaact

SEQ ID NO: 15409 - DNA, 1110 bp, Glycine max
  Gm_smallRNAprecursor_8242
tgatcaacatttggcaaagggactgcttcgatccattttgtaaagtaatcgataccaactataatataacgctggttcttagaagaggcaggcttgatttcaccaattaagtccaaagcccatcctctgaaaggccaaggtttgattatggagtgtaactcactagcaggtacatgttgtatccctgcatgcttttggcattcctgacagcctttagcaaattctatacagtcttttaacatcgaaggccaatacaaaccttgtcgaaataaaagccatttcattttatggcctgcttgatgtgatccacaagccccactgtgaacatgggaaactgccaagtatgcttctgattcacttagacatttcagcaacactccttctgcagtctttttaaacaaatcatttcccacaatcacgtaatttaaagccctatatttgacctttcgagccacattgcctattggattttccaaatattcaataatggactttctccaatcattatctaacatattgtcaatggccaaaatttgaattttttcctggagatcatccatgcttttattttcattattttgtggtgtacttgcccccacaagttttggcattggcaatttagtgcttaatggctctggtaacaccagtttatcttttatttcgatcaactgagttaacttttccttcgacattttgtaccctgaagctatttgggctaaatcatttgcttctcggttttcttgtcgaggtatatgctcaatgttaatataatcgaaatgattcagaagagaacttgctataacaaaatattttgctaagtgttcattaacacatttgtattcttgtgttaattgcctcaacactaattctgaatcacctcttatattaacatttctcgcccccaggctaattaaaatttcaaggcctgtaattagagcttcatactcagcctcattattagaacaaagccctttgattttatatttgaacttagttggaactctattgggggatattattaaaactccaattccagttccatgtttgtgtttcgatccatcgaaatacaaaatccaaggctctgtatcgacataatcttgcggcatctcg

SEQ ID NO: 15410 - DNA, 1083 bp, Glycine max
  Gm_smallRNAprecursor_8243
caaagggactgcttcgatccattttgtaaagtaatcgataccaactataatataacgctggttcttagaagaggcaggcttgatttcaccaattaagtccaaagcccatcctctgaaaggccaaggtttgattatggagtgtaactcactagcaggtacatgttgtatccctgcatgcttttggcattcctgacagcctttagcaaattctatacagtcttttaacatcgaaggccaatacaaaccttgtcgaaataaaagccatttcattttatggcctgcttgatgtgatccacaagccccactgtgaacatgggaaactgccaagtatgcttctgattcacttagacatttcagcaacactccttctgcagtctttttaaacaaatcatttcccacaatcacgtaatttaaagccctatatttgacctttcgagccacattgcctattggattttccaaatattcaataatggactttctccaatcattatctaacatattgtcaatggccaaaatttgaattttttcctggagatcatccatgcttttattttcattattttgtggtgtacttgcccccacaagttttggcattggcaatttagtgcttaatggctctggtaacaccagtttatcttttatttcgatcaactgagttaacttttccttcgacattttgtaccctgaagctatttgggctaaatcatttgcttctcggttttcttgtcgaggtatatgctcaatgttaatataatcgaaatgattcagaagagaacttgctataacaaaatattttgctaagtgttcattaacacatttgtattcttgtgttaattgcctcaacactaattctgaatcacctcttatattaacatttctcgcccccaggctaattaaaatttcaaggcctgtaattagagcttcatactcagcctcattattagaacaaagccctttgattttatatttgaacttagttggaactctattgggggatattattaaaactccaattccagttccatgtttgtgtttcgatccatcgaaatacaaaatccaaggctctgtatcgacataatc

SEQ ID NO: 15411 - DNA, 1157 bp, Glycine max
  Gm_smallRNAprecursor_8244
caattctactgtgtaaaataggttttgacaacatgtgcttaataatatcataatgagaatacacataaacatcaacaggctttatatattgcttaagttttgcacaagagaaatacaggcaaagacaaagtttttctatggcagtatatctagtttctgcatcatttagtacacgactaagataataaattgcatgttctatgccatcatcatcttcctgagccaacatgctagcaatggtcttgtcagacgcagcaatatacaacttcatagacttgtttcgactaggaggcattaacacaggaggcttgatcagatattctttaatttcatcgaaagccttttgatgctcttcattccatttgaatggttcatctttcttgagtcgaagtaatggcgaaaaaatttgagctttgccacttaggtttgaaatgaatcgcctcaagaagttgatttttcctagcaaagactgaagctgttttttggtcgaaggaggcttcgtctcaagaatagcctttgtcttattttgatttatctcaatgccttttttatgcaccacaaaaccaaggaaatctcctgcacgtacacaaaaagcacactttaatggattcatttttaatccatgtttcctcattcgttcgaaagattgcctaagataatccaaatggctatcttctgaggaggatttgatgattatatcatcaatataaatttgcataaatgtgtcaataaaatcatgaaacatggaattcatggccctttgataagtggccccagcatttttcaacccaaaaggcataaccacccattcataagtgcctaaagcaccagggcatcgaaatgctgttttcgacacatcactttcagcaataaatatttggttatatccagaataaccatctaacatgcttaaaaattcgaaaccagctgccgaatctaccaacatttccgctactggcatagcatattcatctttaggtgtagcattatttaaatccctaaaatctatgcatactctaagagttccattctttttaatgacagggactatatttgctaaccattcgacatacctggcagccctgatgaatttacacctcagcagcctttcgatctcttccttaatcttggacatgatttctggtgcgaatcttctt

SEQ ID NO: 15412 - DNA, 1039 bp, Glycine max
  Gm_smallRNAprecursor_8245
tttctggtgcgaatcttcttggtagttgttttactggtctttttccctccttaataggtaatttcatttcgaccatttctctgcttaacccaggcatttcgtggtaatcccaagcaaaacagtctttaaactctctaagaagaggcaccagcttttcttttaaacttgaggtaatattggcactgatataggttggcctttttaacgagccatctccaatgtcgacctcttccaaaggatcttgagcctgcatctttggcgtctcacttatgggatttttctcgaaacccagcggctcatcatcataaatacaatccagtcttcgatcctttgtttctttgttttcatgatcttcgatcttggcttcaactgccatattttgttgagattcagcctcaaaggccgtatttagtctattttcggccatataagccgtaattctggcccatgcagtggcctcagccatatttaatcttcatatatattccacccagttggtggaatgactccatcttcagagggaacagcatcaatttcctccctctcccatataaacccataggtaggatggagtttaacagaatggataacattgtcacttgattcgacaatagcctccttatcaccacaaggtgctatgttagccaactttttgtcaaaggtttgtgcagtaacattatcgacttccgacttatagaagctttgatccgcctctatattttcaacaattccatcctccctccagataatgagtttctggtgaagggtagatggcacagccccaactccatggatccattcccttcctaatagcaggttaaaattagccttggactgtatcaccaggaatagagttggtcgaactatactgcctacagcaacatctacttgaatggctcccaaagaatagccagttttaccctcataattcgaaagcacaatgttgtgggcagatagatcagtgtcatgtttcccgatcctgtagagcatagatcgaggcattaagttgacagccgctcctccatcaatgagcactttg

SEQ ID NO: 15413 - DNA, 1096 bp, Glycine max
  Gm_smallRNAprecursor_8246
attctccacacttaaataaataattgtaatattagacacttgacacacgtaaatttatctttttagtattataattttgtattttaaataaatgagttgataagttaatattatttaagttaattatttttagttagaatgctatatatattatttgttagttttagtttgtaggttaatattatttgttttagaaaatttacgtgattaaatatatgatacattgtacaatattattatttttgtattacactttgtttaaataattttttgcatttcaatatttgtttctattttaatttatttggtagtccatattttatttaattatttatttgttaattgtagaatatattatgttatttatttaaatttgtctatgtgtatgtatttgaaagtatttgtagaatatatttaaattttattatttgtataatatattttgttatctaataaatatattttgttatttatttaaatttgtcttcacatgtattttaatttatgtatagaatatattcaaaattgcccagttttatttattacaaatttatttatatatatttaataacgtttttataaatgtgcgtagttttatttatattatctacaaataatgtataaattattttgtgaatttattgcagtatcaatgacatcttcatcgtcatgtccatcacatattaaaattaagtctggcccgatcgatagtgatgtattatggatgcaacctaagcatgtttcagaacatgtttggaatggggaagaagatcggaaattacatatcagacaagttgtccccatgtatcaaggggaagaagaaatttcagagcaaatttttccttttcttcgaaaatctggtttttactgaattatgaagatgggatacttaaaaataaatgtctcattaataagtgctttgatagaaagatggaggccaaaaacacatacgtttcacatgagatgcggagagtgtactattactctccaagacgtctatgtattgttaggtttacgtgtggatggtctaccattaatcggtccaacaaatcttaattgggctgatttatgtgagaaattattgggagtcagacca

SEQ ID NO: 15414 - DNA, 1096 bp, Glycine max
  Gm_smallRNAprecursor_8247
aatatacctttatttaatatttattataatggtacaattattaaagatcaagttattaaataaagatattttagtctatataatttttagttactttaaatggttcttaacctacgtgcaataatcttaaacataaaaaaaaatatgaaaaagaaatggtagcaatttgtaataatttcgagacccatttacaaagattaatataagatataattataattttctttcatgtcagaacctaattaaatcttttaaaataattcaaggacttgttgtattaaaccatttttcttttattagttgactttaacagaaaactcgtgaaattagaagaaagatcttcttaataaatttatttgcaacatttagatctgtttaatgatgggaagtttgataatagagtaaagtatcaaattagtcccttacttttggaggcgttgtcattttggttcctcagatttaaaaaatgtcaaaatgatcatcgactttacatttcgtttgtcacgttagtctctgtcgttagtagtctcttaacaccgttagtgaatgtgtgatgtgacatgttaagtgccacctagatgcacatgtggaactttcacatcagtttcttctacttgtcacgtaaggagggactaaattgacattaaagggactaaaatgacataatttaggtgatcatctttttccccaaaatgttaaaaccctaacggctactttaacattcacgctttcattccatttttcctcctactcatactctcatccaattcttattcttctcctattcatctttctccatctttgtagttcttcttctattattttgcggtttaccatgtctgctaattcaagcacaagggagaatgccacgtcaaaccatctttgctattgtcctagaagatgtaacgatccgcctcatcgctacgatatcaccactctaataactcaagaaattaaattctttttctttcttttatgaaaactccattatttttgcttatgaaaatcatagtaaatttgaattttgtatatatatatatatatatatatatatatatatgtccccaaacaatgtttaaccgaatacatgaattgt

SEQ ID NO: 15415 - DNA, 1200 bp, Glycine max
  Gm_smallRNAprecursor_8248
ttgttcatcagcaacacaatgtacaaccaccagtcggtgtactcgaggttggcatgaccttcgatgacaaagcacaatgtattcgagcaatcaaagaatacaacatcagaaatcattttgattgcagaacaatttactctgaacaaagaaggctaaacttcatctgcaagttacatgaaaatggttgtacatggagcttgggcgcatgcaattcaaagaggcataacaaatggattatcaagagtatcagaggtcatcacacttgtctcgtgccgatgctcagacaagatcatcgccaacttgacaaacacgtcatagcacagattatccaaccaattgtcaaaacaaacccaactgtctccatcaagacgttgattgtagagatcaaaacgttcatgaattataccccatcctacaagaagacatggttagcaaagcaaaaagcattggagatgattcatggaaactgggaagaatcatatgccaaactgccaaaacttttcggagctttgcaatcttgtgttcccgggactgtggtcgctgctcaaacagaatccttgtatgaggggggagaaatagtactaggcaaaagattgtttaaacatgtcttttggtcatttggtccatgcattaatggttttgcatattgcaaacccattgtacaagtagatggtacatggctttacggaaagtatactggcacactgttgatagctaccgcacaagatggagctaaccatatcttcccgattgcctatgccattgtagaaggggagacaacttcagcttgaggggtttttctaaagaatttgagaagacatgttactccacaaattaacatttctcttatttctgaccgacacccctcaattataagtgcctacaacaacccaagtaacttatgagtccaggacacatcccatttcttttgcctgcgccacattgcacaaaactttcttcgtggtaactcaaactgcaaacatttaaagaaaccacttatgttggctggtgagaatctattttatttattcgttataattttctttcaatcaaattttataacataatacattgattaaatatttacagggtacgcatacacggagaagatgcactggcgacatcttggggatattcgtgcgaataagccaagtgcagctgaatggcttgatcaattacccaaacaaaaatgggtacaat

SEQ ID NO: 15416 - DNA, 1112 bp, Glycine max
  Gm_smallRNAprecursor_8249
tagggatagtggttagggtcttaggtttagggttagggtttatggtttggggtttagggtttagggtttagggtttaggtataggggttagggtttagggtttagggttagggttttgggttttggtctatgtttatgtttttacaggagggcctattgagttttaacttcgattgcatggtctggtataggcgataaacaaagatgtttgtagacccaaacaatgcaaacacagctacattggtatttattttttttaaatatttaacttcaatttattttataaagcatcgacattaatttcctgaccctaataattgcagggtgaagttgcagagacattgcagtatatggtgtcaccacgagggcagaacacatggacagttgatgatctcgtgccttatgtggagaagataacgattttatccgaagagcaagagaagatcactgagcctgtggcacatggtccagcatcagagcgtcgatttccgcaacaacagtttcacatgcttcagtcaagtgttgaaactcgaggttttgacagacgaagggagattgttcaagcggaagatttttcccaacaaatggagcagcatggccatggaatgtattacacgccaccaacattttctcagtatcctttcgaaggtcatgacaatgatatgtctgcaagcgaacattcgtttcgtgatattgcggaaacacatcctcatttttcatggccgaccatgaccccttcacatcaacatgatgccccaatggcaacacctaatgccccattagctctgtaatgggatgtaaccggagcaatacctgatatgagtgacttattaggtgttgatttgtgtcacgagttttctgcagaggctgagcaacaagggcggagacagcgcgtaagaagaaatctagatcgtcaagcccgaaggtgggatcgaccatgtggcacatcctcacgccatcacggacaccataatgactgattttgatgtctctatttaaaatttgtgttgtatctttgtaatttgaattttagacttaatttatggtatctcatactacttgttatggaatttcgttttcaatgactatttgttatggaatcaccatcacgg

SEQ ID NO: 15417 - DNA, 1146 bp, Glycine max
  Gm_smallRNAprecursor_8250
ccaaagtgatgaccaaaccgatgacgagggtgttggcagaccaacgacacctccgtcacctccgttgcaatatcagcaacctaggtgtccagtagacttgaactttgaccacctaccacactatattgatcgacaccattttgttcatcagcaacacaatgtacaaccaccagtcggtgtactcgaggttggcatgaccttcgatgacaaagcacaatgtatttgagcaatcaaggaatacaacatcagaaatcattttgattgcaaaacaatttactctgaccaaagaaggctaaacttcatctgcaagttacatgaaaatggttgtacatggagcttgggcgcatgcaattcaaagaggcataacaaatggattatcaagagtatcagaggtcatcacacttgtctcgtgccgatgctcagacaagatcatcgccaactcaacaaacacgtcatagcacagatcatccaaccaattgtcaaaacaaacccaactgtctccatcaagacgttgattgcagagatcaaagcgttcatgaattataccccatcctacaagaagacagggttagcaaagcaaaaagcattggagatgattcatggaaactgggaagaatcatatgccaaactgccaaaacttttcggagctttgcaatcttgtgttctcgggactgtggtcgctgctcaaacagaatccttgtatgagggggggggggggaaatagtaccgggcaaaatattgtttaaacgtgtcttttggtcatttggtccatgcattaatggttctgtatattgcaaacccattgtacaagtagatggtacatggctttacggaaagtatattggcacactgttgatagctaccgcacaagatggagctaaccatatcttcccgattgcctatgccattgtagaaggggagacaacttcagcttgggggttttttctaaagaatttgagaagacatgttactccgcaaattaacatttctcttatttcagaccaacacccctcaattataagtgcctacagcaacccaagtaacttatgggtccaagacacatcccatttcttttgcatgcgccacattgcacaaaactttcttcgtggtaactcaaactgcaaacatttaaagaaaccacttatg

SEQ ID NO: 15418 - DNA, 1205 bp, Glycine max
  Gm_smallRNAprecursor_8251
ttgttcatcagcaacacaatgtacaaccaccagtcggtgtactcgaggttggcatgaccttcgatgacaaagcacaatgtatttgagcaatcaaggaatacaacatcagaaatcattttgattgcaaaacaatttactctgaccaaagaaggctaaacttcatctgcaagttacatgaaaatggttgtacatggagcttgggcgcatgcaattcaaagaggcataacaaatggattatcaagagtatcagaggtcatcacacttgtctcgtgccgatgctcagacaagatcatcgccaactcaacaaacacgtcatagcacagatcatccaaccaattgtcaaaacaaacccaactgtctccatcaagacgttgattgcagagatcaaagcgttcatgaattataccccatcctacaagaagacagggttagcaaagcaaaaagcattggagatgattcatggaaactgggaagaatcatatgccaaactgccaaaacttttcggagctttgcaatcttgtgttctcgggactgtggtcgctgctcaaacagaatccttgtatgagggggggggggggaaatagtaccgggcaaaatattgtttaaacgtgtcttttggtcatttggtccatgcattaatggttctgtatattgcaaacccattgtacaagtagatggtacatggctttacggaaagtatattggcacactgttgatagctaccgcacaagatggagctaaccatatcttcccgattgcctatgccattgtagaaggggagacaacttcagcttgggggttttttctaaagaatttgagaagacatgttactccgcaaattaacatttctcttatttcagaccaacacccctcaattataagtgcctacagcaacccaagtaacttatgggtccaagacacatcccatttcttttgcatgcgccacattgcacaaaactttcttcgtggtaactcaaactgcaaacatttaaagaaaccacttatgttggctggtgagaatctattttatttattcgttataattttctttcaatcaaattttataacataatacattgattaaatatttacagggtacgcatacacggagaagatgcactggcaacatcttggggatattcgtgcgaataagccaagtgcagctgaatggcttgatcaattacccaaacaaaaatgggtacaat

SEQ ID NO: 15419 - DNA, 1159 bp, Glycine max
  Gm_smallRNAprecursor_8252
tttccaactttgcattgtcctggattttttcatgacaatataggtatgggaaaacagaaagcagtaaacaattcccaccattgcagagacatgcttttgtcaaatgggggacccaatttgatacttcaaaggcggcaccagaccaagtcaagaactgatttcaagcacacccagaattcttaaagcctgctaatccggagacttcattgtttctaaatcaaaagtcacaactagcagctttcttagccagctcaaagtctaaggaaagtttagctaagaatttaaaagaagttctccaacttcttcaacaagaggaagaagaaggttcttcatccaaaaaggaagaaaatgaatagtgtctctaaggcacattaaaattgttgatctatgcccatatcaattaagggtttgatggctacttgtacacaacctatgtgtaaatatttatatttacggctatgttcataaatttagttttttgaaagtaaatgaaattcttcccctatatcttgtcctagaggaatattattttctacagttttgattatgtaatcaaaattatgtttgtctttaattgttttaggaacatatatggtgtcctaaggaatttatggaatgttccagtcattcatgttttgatttatatcttcgaattggacttcctcatcgaagagattgtgttttggggtgacctcatgggtctggttttcgtgctcattgagcaaattattattatttttgggagaattcattgaggatgaagataaggatgagttagatctaaacgaaatgcgggagaaagagcacaaaagacgagacatattgaattcatcctctagtatctttgtcgtcatatggttccataaaaatgtttctataagcatatatattactaaatttcttggatctgaaaaatggaaaaaattctctttcttttataaaaaaacaaacaatatagtttgaacgttacttctatagccaccagtatattatgtctcaatatttatttgaacaatacaccttagtcttactgccctttctcaaccacgggtcttactgctacagtatcatccaactaaaatatcagactagccaataacaacaaaacaaactgtggcagactacgcctggtcaattcaaactcttcaggccctcgaag

SEQ ID NO: 15420 - DNA, 1157 bp, Glycine max
  Gm_smallRNAprecursor_8253
aacttccgatattgtttatatcgaattatcataccattttacataatttttttccgtaatcgtttcatatatatatatatatatgtttgaacagtatttttctagaagcacaacaatctgatattttaattaaatgatattgtagcagtaagtcccgtgattgagaaaggacaataagactaaggtgtattgttcaaataaaatattgagacataatatactggtggttataggagtagtgttcaaactatattgtctgtaaaaaaaaaatctttttcatttgttcagatccaagaagttctgtaacatatagccttatggaaatatttctatggaaccaaatgaagacaaagatattagataatgttataatcatgtctagactattacgatctttttcctgtatctcttttcgatcaaattcctcctcatcatcttcttcaagaaactccaatttattaaatgatcaagataaccagacccaagaggtcgccccaaaacacaatctcttcgatgaggaagtccgattcgaagatatcaatcaaaacatggatgactggaacattccagaaatccctcaggatcaactatacgttcctgaaacaattaaggacaaacacaactttgattacataatcaaaacagtagaaaacaatattcctctaggacaagatataggggaagaatttcatttactttcaaaaaattcaatttatgaacatagtcgtaagtataaatatctacacatcggttgtgtacaagtagccatcaagcccttaattgatatgggcatagatgcagcagttttaatgtgtctaagagatattaggcataatcaatttgaagactccctaattggaacagtcgaaaccagcctaggacaaggtccaatatattttaattgttatccaaacaaaacagtgagtctgatagacagaaacattcttgactctctgttcttaaacatccactttcatggccttgacatgaaagaaggatcaatcccagcagccttaatttataggatccagtacaaggtcatgaatacttgtgcatctagagtcctattaaaacctcaaaaaggagaaacaactttgtttatcactgatatgacaaaggctaatatttctctcccgagaaaaataaaatgggatgaa

SEQ ID NO: 15421 - DNA, 1080 bp, Glycine max
  Gm_smallRNAprecursor_8254
atgatttcgttttagaaacaatggccctatttgacacaggggttgattcaaactacattttagaaggattaattcctacaaaattctttgaaaaaacctcagaaaaattaagtacggcaaacgactcaaaattaaaaattaattttaagctatcaaatgcaatcattgaaaaccaaggtcttaagattaacacaaactttcttctggtaaaaaaccttaagaatgaagtaatcttaggaacgcccttcattagagccctgtttcccatccaaatatctaatgaaggaataaccacaaattatttaggaagaaaaattatatttaatttttctactaaatcaatttccagaaatataaatcttatagaaaataagattaatcaaattaacttcttaaaagaagaagtatcttttaataatattcagatacaactgggaaaaccccaagtaaaagaaaaaattcaatctttattaaatcatattgaatcgaccgtctgttctgaattgccacatgcattttgggacagaaagaagcatattgttgatctccctaatgagaaagactttagggaaaaacaaattcccacaaaagccagaccaatccaaatgaatgaagaacttcttcaatactgtcaaaaggaaatcaaggatttgcttgataaaggcctaattcgaaaaagcaaaagcccatggtcttgtgcggctttttatgtcaacaaacaatctaagattgagcgtggaacaccccgcttagtcataaattacaaaccactaaatcaagcattacaatggattagatatcctattccaaacaaaaaagatttacttaacagattaaattctgcaaagatattttcaaaatttgatatgaaatctggattttggcaaatccaaatccaagaatcagataggtacaaaacagcgtttattgtacctttcgggcaatatgaatggaatgtgatgccattcggactgaagaatgccccttcagaatttcaaaaaattatgaatgatatttttaatccctattcaaaatttgtcattgtctacatagatgatgttttaatcttttcccaaaaca

SEQ ID NO: 15422 - DNA, 1234 bp, Glycine max
  Gm_smallRNAprecursor_8255
acagaaagaagcatattgttgatctccctaatgagaaagactttagggaaaaacaaattcccacaaaagccagaccaatccaaatgaatgaagaacttcttcaatactgtcaaaaggaaatcaaggatttgcttgataaaggcctaattcgaaaaagcaaaagcccatggtcttgtgcggctttttatgtcaacaaacaatctaagattgagcgtggaacaccccgcttagtcataaattacaaaccactaaatcaagcattacaatggattagatatcctattccaaacaaaaaagatttacttaacagattaaattctgcaaagatattttcaaaatttgatatgaaatctggattttggcaaatccaaatccaagaatcagataggtacaaaacagcgtttattgtacctttcgggcaatatgaatggaatgtgatgccattcggactgaagaatgccccttcagaatttcaaaaaattatgaatgatatttttaatccctattcaaaatttgtcattgtctacatagatgatgttttaatcttttcccaaaacattgaccaacatttgaaacatctccagaccttcatccatatcatcaaacagaatggtttggcaatctccaaatcaaaaatcaatcttttccaaactcgaatttgattccttggtcacaatatatgtcaaggtacaatcattccaatcgaaaagtcaatagagtttgctagcaaattccccaaccaaatcttagacaaaacccagttacaaagatttctaggttgtctaaattacgtaggagaatttgtcccctatttaaacaatattgtcaagccattgcatgataggctgaagaaaaatccgcctccctggtctgacctccatacacaaacagttaaagaaatcaaagtcaaagtccaatccattaaatgactgtatcttcctattccacaggcatttaaaatcgtcgaaactgatgctttagacataggttatggtggcatccttaaacaaagagtccatggctaagatcatgtcattgcatatacatcaaaacattggaatcctgcacaattaaaatattcaactgttaaaaaagaagttttagcaattgttttgtgcatttccaaatttcaatcggatttattaaaccaaaaatttctaatcagggttgattgtaaatcagccaaagatattttacaaaaagatgttaaaaaccttgcctcaaaacaaatttt

SEQ ID NO: 15423 - DNA, 1045 bp, Glycine max
  Gm_smallRNAprecursor_8256
tccaaaaataatcaaaaaatcttgggcagacattgcctcagaatctgatgatgaatctgaatcaaatttacaaacaatgatccaaaatgcgtcaatgatcaaaacagtcaccaatactaaaggaaaactacctttagccaaagctcaaacaccacctaccaaacaaactaacaattatatttataaaaataaatttacaactgttttgcagatggaacctgaattttgggacaaaaatcccttcaaggcaacggccaaggctttcccaccaggatttcactacaaaccaaccaccgtcctaaagacaagaaccttttatgaattgattttggtagattcaaactcagtatctatcaaacatttcaaagacccaaaagaccaaacattaaacacccactcgacaatccaaatactaaaagttcttcaaccaagacactttggttcggacttgaacaaaggaaaaagattctcagttccatttgatccggtaggttatacctattgggattatgttgatgcttggactaaggtgttttggcaccaaaatacccgcttcaagcattcatggctgatatatttcaagaccaatacaatttacaattttcccaattggtttttacaatggtgggatttctttggaccaatcccagagatattcccagaaacagtccaacaaggatttgctcaatttgagagacaatacaattcacaggaatcacgaattccagcaaatcttaaatacttttcaagctttgcattgtcatggatattctcatggcaatatcgttacagcaagactgaaaagacaaatcaatatccatcactacaaagacacgcatttgtaaaatggtggacacaatttgactcatccaaagcggatccagaacaagtaaaactctggttccaatcccatccagaattcctcaaagcagctgatccagaaacttctgtgtttttaaaccaaaagtctcatctggcagcatttttagcgggatcgacatcaaatgaggtcttagctaaaaatctgaaggaagttctgcaaatg

SEQ ID NO: 15424 - DNA, 1163 bp, Glycine max
  Gm_smallRNAprecursor_8257
aaaaataatcaaaaaatcttgggcagacattgcctcagaatctgatgatgaatctgaatcaaatttacaaacaatgatccaaaatgcgtcaatgatcaaaacagtcaccaatactaaaggaaaactacctttagccaaagctcaaacaccacctaccaaacaaactaacaattatatttataaaaataaatttacaactgttttgcagatggaacctgaattttgggacaaaaatcccttcaaggcaacggccaaggctttcccaccaggatttcactacaaaccaaccaccgtcctaaagacaagaaccttttatgaattgattttggtagattcaaactcagtatctatcaaacatttcaaagacccaaaagaccaaacattaaacacccactcgacaatccaaatactaaaagttcttcaaccaagacactttggttcggacttgaacaaaggaaaaagattctcagttccatttgatccggtaggttatacctattgggattatgttgatgcttggactaaggtgttttggcaccaaaatacccgcttcaagcattcatggctgatatatttcaagaccaatacaatttacaattttcccaattggtttttacaatggtgggatttctttggaccaatcccagagatattcccagaaacagtccaacaaggatttgctcaatttgagagacaatacaattcacaggaatcacgaattccagcaaatcttaaatacttttcaagctttgcattgtcatggatattctcatggcaatatcgttacagcaagactgaaaagacaaatcaatatccatcactacaaagacacgcatttgtaaaatggtggacacaatttgactcatccaaagcggatccagaacaagtaaaactctggttccaatcccatccagaattcctcaaagcagctgatccagaaacttctgtgtttttaaaccaaaagtctcatctggcagcatttttagcgggatcgacatcaaatgaggtcttagctaaaaatctgaaggaagttctgcaaatgttacagcaggaagaagaaggttcatcctcaaagaaggaagaaacaagttctgctgaagaagaagaagaagaccccttttaccaaaacgaagatgattgttttggtatctgtttagattaaa

SEQ ID NO: 15425 - DNA, 1060 bp, Glycine max
  Gm_smallRNAprecursor_8258
aattatatttataaaaataaatttacaactgttttgcagatggaacctgaattttgggacaaaaatcccttcaaggcaacggccaaggctttcccaccaggatttcactacaaaccaaccaccgtcctaaagacaagaaccttttatgaattgattttggtagattcaaactcagtatctatcaaacatttcaaagacccaaaagaccaaacattaaacacccactcgacaatccaaatactaaaagttcttcaaccaagacactttggttcggacttgaacaaaggaaaaagattctcagttccatttgatccggtaggttatacctattgggattatgttgatgcttggactaaggtgttttggcaccaaaatacccgcttcaagcattcatggctgatatatttcaagaccaatacaatttacaattttcccaattggtttttacaatggtgggatttctttggaccaatcccagagatattcccagaaacagtccaacaaggatttgctcaatttgagagacaatacaattcacaggaatcacgaattccagcaaatcttaaatacttttcaagctttgcattgtcatggatattctcatggcaatatcgttacagcaagactgaaaagacaaatcaatatccatcactacaaagacacgcatttgtaaaatggtggacacaatttgactcatccaaagcggatccagaacaagtaaaactctggttccaatcccatccagaattcctcaaagcagctgatccagaaacttctgtgtttttaaaccaaaagtctcatctggcagcatttttagcgggatcgacatcaaatgaggtcttagctaaaaatctgaaggaagttctgcaaatgttacagcaggaagaagaaggttcatcctcaaagaaggaagaaacaagttctgctgaagaagaagaagaagaccccttttaccaaaacgaagatgattgttttggtatctgtttagattaaatttaatttcggtcacaaaaccgttttgtttgtaattaatgtgtaattaatgctggacaatactacc

SEQ ID NO: 15426 - DNA, 1189 bp, Glycine max
  Gm_smallRNAprecursor_8259
gacaatccaaatactaaaagttcttcaaccaagacactttggttcggacttgaacaaaggaaaaagattctcagttccatttgatccggtaggttatacctattgggattatgttgatgcttggactaaggtgttttggcaccaaaatacccgcttcaagcattcatggctgatatatttcaagaccaatacaatttacaattttcccaattggtttttacaatggtgggatttctttggaccaatcccagagatattcccagaaacagtccaacaaggatttgctcaatttgagagacaatacaattcacaggaatcacgaattccagcaaatcttaaatacttttcaagctttgcattgtcatggatattctcatggcaatatcgttacagcaagactgaaaagacaaatcaatatccatcactacaaagacacgcatttgtaaaatggtggacacaatttgactcatccaaagcggatccagaacaagtaaaactctggttccaatcccatccagaattcctcaaagcagctgatccagaaacttctgtgtttttaaaccaaaagtctcatctggcagcatttttagcgggatcgacatcaaatgaggtcttagctaaaaatctgaaggaagttctgcaaatgttacagcaggaagaagaaggttcatcctcaaagaaggaagaaacaagttctgctgaagaagaagaagaagaccccttttaccaaaacgaagatgattgttttggtatctgtttagattaaatttaatttcggtcacaaaaccgttttgtttgtaattaatgtgtaattaatgctggacaatactacctgtcctgtagccattaaagtcccggtcaaaactacttgtcctgtaacaaacagtcaaatagtcttggtcaaaactaccggcaactaccggtcttagatttttggctatataaggagtcgtcaagtatgttgtgaggcaccctttcacttagccatttttcaggtttctgaagagaggtgctctgaaacaagatttttgtaagcgcttctttcaagattcaataaatttctatttttcatccttctctcttctcccttcaccgatcctgtgcggctctgccgccgcttcggtttctttgtttatgaaaacctggggtttgtaagccagtctccggtgtgcccttgatatctgttttt

SEQ ID NO: 15427 - DNA, 1046 bp, Glycine max
  Gm_smallRNAprecursor_8260
tcaagaccaatacaatttacaattttcccaattggtttttacaatggtgggatttctttggaccaatcccagagatattcccagaaacagtccaacaaggatttgctcaatttgagagacaatacaattcacaggaatcacgaattccagcaaatcttaaatacttttcaagctttgcattgtcatggatattctcatggcaatatcgttacagcaagactgaaaagacaaatcaatatccatcactacaaagacacgcatttgtaaaatggtggacacaatttgactcatccaaagcggatccagaacaagtaaaactctggttccaatcccatccagaattcctcaaagcagctgatccagaaacttctgtgtttttaaaccaaaagtctcatctggcagcatttttagcgggatcgacatcaaatgaggtcttagctaaaaatctgaaggaagttctgcaaatgttacagcaggaagaagaaggttcatcctcaaagaaggaagaaacaagttctgctgaagaagaagaagaagaccccttttaccaaaacgaagatgattgttttggtatctgtttagattaaatttaatttcggtcacaaaaccgttttgtttgtaattaatgtgtaattaatgctggacaatactacctgtcctgtagccattaaagtcccggtcaaaactacttgtcctgtaacaaacagtcaaatagtcttggtcaaaactaccggcaactaccggtcttagatttttggctatataaggagtcgtcaagtatgttgtgaggcaccctttcacttagccatttttcaggtttctgaagagaggtgctctgaaacaagatttttgtaagcgcttctttcaagattcaataaatttctatttttcatccttctctcttctcccttcaccgatcctgtgcggctctgccgccgcttcggtttctttgtttatgaaaacctggggtttgtaagccagtctccggtgtgcccttgatatctgtttttcaagtttatattttcctttcatttatcatactgcat

SEQ ID NO: 15428 - DNA, 1214 bp, Glycine max
  Gm_smallRNAprecursor_8261
caatacaatttacaattttcccaattggtttttacaatggtgggatttctttggaccaatcccagagatattcccagaaacagtccaacaaggatttgctcaatttgagagacaatacaattcacaggaatcacgaattccagcaaatcttaaatacttttcaagctttgcattgtcatggatattctcatggcaatatcgttacagcaagactgaaaagacaaatcaatatccatcactacaaagacacgcatttgtaaaatggtggacacaatttgactcatccaaagcggatccagaacaagtaaaactctggttccaatcccatccagaattcctcaaagcagctgatccagaaacttctgtgtttttaaaccaaaagtctcatctggcagcatttttagcgggatcgacatcaaatgaggtcttagctaaaaatctgaaggaagttctgcaaatgttacagcaggaagaagaaggttcatcctcaaagaaggaagaaacaagttctgctgaagaagaagaagaagaccccttttaccaaaacgaagatgattgttttggtatctgtttagattaaatttaatttcggtcacaaaaccgttttgtttgtaattaatgtgtaattaatgctggacaatactacctgtcctgtagccattaaagtcccggtcaaaactacttgtcctgtaacaaacagtcaaatagtcttggtcaaaactaccggcaactaccggtcttagatttttggctatataaggagtcgtcaagtatgttgtgaggcaccctttcacttagccatttttcaggtttctgaagagaggtgctctgaaacaagatttttgtaagcgcttctttcaagattcaataaatttctatttttcatccttctctcttctcccttcaccgatcctgtgcggctctgccgccgcttcggtttctttgtttatgaaaacctggggtttgtaagccagtctccggtgtgcccttgatatctgtttttcaagtttatattttcctttcatttatcatactgcattcttacttcctatctgtccgtttgatcctactccgctgacctctggtatatatatatatatatatatatatatatatatatatatatatatatatatatatatatatatatatatattgaagaagtttcatatgtgttttaagttatggccatttgcaaactttaaaagctttaa

SEQ ID NO: 15429 - DNA, 1202 bp, Glycine max
  Gm_smallRNAprecursor_8262
atgcattgtatggacttaattttttttaaattatataaaattttatatgaaataaatattttacattaatccagtaaaaaaaatgattttaattacattgatttccgttctctaattttgaacagcttggaattaaggacattgcagaatgatggattcaattaagaaaagccagtaatatgcacccagtgatatattgaatgtttggaactgctacaagaaaaagttaaatttatagtaggctgggatttaagaatccatcacttataacatattgagtgttgataggtgcactcagcattgttgccggtgcacccaacattctaataaaatgacaaaattatccttgcttgattttcctcttacggatcaagttgatctgaaagtcatttccggatcaagttgatccgtaacttccggatcaacttgattcgtaagaggaaaaataaaaaatttgttaattatacaatatatttaaagatatttattttgctaatcaatcaatcataatcataattcatgttaatcaatcaattataatcataattcatgctaatcaatcaaattccctaaaagatgatatatctatatataatcataagcatgaattatgattatatatagagaattatgattgattgattagaatgaattatgattatatatagatatatcttcttttaggaaattatgattgattagcatgaattatgattatgattgattagcattaattatttatcataaatcaatatttataaatatattataattaataaaataaataaatatatttaattatattataattaatgaaagaaatatctttaaatatcttgtataattaataaaaattttatttttcctcttacgaatcaagtcgatccggaagtctcttccgaatcaacttgatctgtaagaagaaaaccaaacaaagacaattttgtcaattttttaaaatgctgggtgcaccagcaataatgatattgttaccaaacacaaaatgaacccattaagattataaaaaggaatttgatgctgtttgtgtgggctagttatcctctaaagcctctcataataacttgaacaagaaaccttgtcaccgttcacatccagagcttttagctaagcaaaacacaggctctaaagtagaaggaagcgccacgaaagctgtattggattgggggttgcaaacattgatc

SEQ ID NO: 15430 - DNA, 1128 bp, Glycine max
  Gm_smallRNAprecursor_8263
tgtttggaactgctacaagaaaaagttaaatttatagtaggctgggatttaagaatccatcacttataacatattgagtgttgataggtgcactcagcattgttgccggtgcacccaacattctaataaaatgacaaaattatccttgcttgattttcctcttacggatcaagttgatctgaaagtcatttccggatcaagttgatccgtaacttccggatcaacttgattcgtaagaggaaaaataaaaaatttgttaattatacaatatatttaaagatatttattttgctaatcaatcaatcataatcataattcatgttaatcaatcaattataatcataattcatgctaatcaatcaaattccctaaaagatgatatatctatatataatcataagcatgaattatgattatatatagagaattatgattgattgattagaatgaattatgattatatatagatatatcttcttttaggaaattatgattgattagcatgaattatgattatgattgattagcattaattatttatcataaatcaatatttataaatatattataattaataaaataaataaatatatttaattatattataattaatgaaagaaatatctttaaatatcttgtataattaataaaaattttatttttcctcttacgaatcaagtcgatccggaagtctcttccgaatcaacttgatctgtaagaagaaaaccaaacaaagacaattttgtcaattttttaaaatgctgggtgcaccagcaataatgatattgttaccaaacacaaaatgaacccattaagattataaaaaggaatttgatgctgtttgtgtgggctagttatcctctaaagcctctcataataacttgaacaagaaaccttgtcaccgttcacatccagagcttttagctaagcaaaacacaggctctaaagtagaaggaagcgccacgaaagctgtattggattgggggttgcaaacattgatccttttagtctccaagattagctatattttatgtaatctaagggatacaaccaggatctaagaccatgtgtcacgggacaaaatacatatattcaaaatagaataagagatgtgatatcattatcata

SEQ ID NO: 15431 - DNA, 1189 bp, Glycine max
  Gm_smallRNAprecursor_8264
atgaaggccggaaacacatacgtttcacatgagatgcggagagtgtactattactctacaagacgtctttgtattgttaggtataagtgtggatggtttaccattaatcggtccaacaaatcttgattgggctgatttatgtgaggaattattgggagtcagaccacaagaaggtgaaattaaaggtagtgtggttaaattaagttggctggctcaccattttgatcaaataaataatgacgacgaagaagaacaagtacgaaggtttgcccgtgcatggatactgagattcattggaggtgtcttgtttgttgacaaaaccggtaacagagtttcgctaaggtaccttcaatttttacgtgactttgaagaatgtggcagatatgcatggggagctgccgtacttggttttctatacagagagatgtgcagtgccaccgattataaaactaaatcaatcggaggtatgtgcatcttactacaattgtgggcatgggaacgatgtccaaccttggctccaaagaggactccttcccaagtagaaaatacaccactagggcacatgtcagtcatttttaacagcttctttcatttcaatagaataaatggttttagggtatattaaattttattctttgtaggtggctgcaacgtggaaaccaacatatcggcaatgatgatgtgaaagtttttcgtcgcaagttggatattatgaaacgtcatgaggtaagaaccatgctattgtatttgtaaaataaaaaattatatgtgttattttactacaatgttcacaactatgttgttatatgcagtttgtgtgggagccttacccatcaaccgttatatcattgttgcctcccgtttgtttagtcggaagtctcgcgtggtatgcggtggtgccactaatttgtttccaagttattgagtggcaccaaccggacaaagtgttgagacaatttgggatgcatcaaccagttccagagtctccttcacaacccttaaacattcatggcataacattaaaagggaaacatgacgaaaattgggggcaattgttcgtctcaatgattcatcagtggaataatcgtcatgcatttagggtcgacgcttatccccgacaagaaggcctaaagatgtttgttgacctagaaaatgcaaagacggctacattggtattttttattttttt

SEQ ID NO: 15432 - DNA, 1128 bp, Glycine max
  Gm_smallRNAprecursor_8265
gttatttctaatttggatttgatcactcgatatcttctagtttaaatatgtgagacgactaaaaataacaaaattttctaaatcaactattaaagcaactgtatttattagactcaaattaacttgatcacagatttagctagaacaactcccattctagctgatctaatgtttgggggcataaatgcaaagtatttgttgctagctccttataagtacataaggtaaatgttgaaaatactttaaatctaagtacttcatcttatttcaaaaagcaccaagaccaaataataataataagtagaaaaaaaaactgaatctaacaatatttggctaaagtttttttggctagctaggtagaacataaaaggacatagaaagcagcaatttatctatttagatctgatagatagacacatatgatttggattggaggggaaaaaaggattacctttttcttgttgtggttgattgcttctacaaggaaagttaggtgtgaggaatgaagcctggtccgagatcagtctcatcccatgcatgaagtgatgaaaataataatatatgtatgaaggtaagtaaatcaagaaggaaagggaaattgaagaagaagatatatatatgatgtgatgatcttggatcaaacctcattccaaacaccccctttccttctcagatcatgaccaatctctctctctctctctctttctgcctctctttgacaacaagcaaagttaaaatgaacgaaactgagacaatgatttcggatcaaacttcattccagacaccctcctttccttcttcaataacgagtctgtttctcacaagatgattcaaattaattcaactaatcaaaacagcaaaataggcctcacaagaaatcaaaatctccaaacacctaattaagtgcttgaaatatttgtctcactaaagaataagaatgaatatatataagagaaaaatgattataaatactaaatatatatatatatatatatatatatatatatatatatatatatatatatatatatatatattgagagatagaacttaggttgcttcaaccatgatatatatatagctttatgagtgagtgaggctcttgaattcctagcaggctccatcttg

SEQ ID NO: 15433 - DNA, 1086 bp, Glycine max
  Gm_smallRNAprecursor_8266
catatttaaattcacaaatatcttaggtttgttattccatagatctatgtatatctctcttgaaaatcatcttgggtttttcccaattaatatataatatcaacttgacacgatccagaacaatatacatttgacaggattgaaccacaggaacattaactatgcgtagatatgtacacgatagtttaaatatgttgatttatgaaccatttcaactgggaggtgcccccaacttatattaaccatttcaacgatttcatatagacaatttcaaattggagtttactagctaaatctagctagaaagaatacacaaacaatatgttgtcaactgaaaaataaaaaagatggagctggttttacgtgcttcagaacatcattgttgttaccagtttccaatcacatgaaattcaggttttgataaatccttcgtgcatgtgtagttgcagatataataagaatctacgaagcacggacactccagttccttgtcatgttcggtgtccgacacgcgtccgtgtcagtgtttgacaccgacacgacacctgtactatattctatattttggacattacaggtgttcatgtgtccgtgtccgtgtcgtgtttggtgtcggtatcggtgtcggtgtttcatagataagaattagggggcgagggcgagacccttgaaaccgtgtaagtaatataaatcaagaatgcagatggtagtaaatgctaatctaataaagcaggaataaggctctcagcctgatacataacgacaaaaggaggtataacagaatcaccaaattgctataacagaattccaatatccattccactaacaattccactaatgtttttgcagaacagcatccaacaattgtcatgcgtaatcctcaaggtaagtgggccttctcatgtctctcttgggcctgttattcccttggttggaattgctatcagcagacttgaactttgagacctttaatttcaaaacataccagcagaccaattttcagttatgaaacttgtacaaggaagagaaaaataaataaacaaccatgaaaaatttgaagtcttgagtcttgtgcctttctagcca

SEQ ID NO: 15434 - DNA, 1038 bp, Glycine max
  Gm_smallRNAprecursor_8267
tgagctatgaatccttacaaagcttaaaaaatgaagacaaaagcacctccttttggacaagtatccttgattcctttccttcaaaggttgatttagattatacctcgcttcctggttaggtttacacaagaggatgccggttgctctagaaccattataaaaacccacaatagagtcatcattccacatacatcataacttcctaaacctaagccatacacattggtaacaaatccaaatgaatccaactaaacccattatcatattagtaatgatccaacttttcagtatacgggaggagctcaagtgtttaggaatgggtggatttggcaatttgtttaccattaaaatagttctgatgtcaatggaactaaagcttgagtcatcctcagatgaccccaatgcgtataatttagttcttctatagtttgctgtgctattctggagccttcatggaaaccaagctttaaatatcaatcatccgctggtgattgtaacaagcagcgttcgtgacatgtttctatgatggtgcagatagcaaacaccggtgacccatctttgatcaactatggtatcattttatagttttctatcagttagttctcatttttagtccccagtttgttatgaatgagagatcctcatcccatcaagagtgtaccaggtgtgatacttaagaaaccagttcccttgctacttcatgaagttaatatattttttttttctttttgacaaatgatgaatatggctggcatcttatgtggtagattagtgatgagaagaatctgggcatttgggactaagttgattttgacttatacagtgcaaattggtttccttgtatctttttgttggaaaaatattaacttacagagtaattaacctacaatattacaagttatatataaaactctctctctctctctctctctatatatatatatatatatatatatatatatatatatattagatagatagatcgttgtgatcagttctctccaattttctttacttcaaaactagtttgaaactatc

SEQ ID NO: 15435 - DNA, 1091 bp, Glycine max
  Gm_smallRNAprecursor_8268
aattgggtaatgcatacctaattccctatttgaacttgtcagcccagccttctcagtcaaatcttcttgttatccaccactcttctccaattcgggcttccattctgaattcaccccccttttttacttcactaaatgtaaattcagtgctttatttcacaaacatagcacaataattcaattaaataataaagcaaaatacatactttaattcaaacataacataacattacatgcagacataaaatttaaagcaagaatcatgtatcatggagatcagaactagaaactaattaatacagtacttgtttagtacttaatttggataaaagattggagagacacacatgacatcatattaatcctacagaatggtaagtgaattaaggaagtgaacactcacaaattaaaaaaaagcagaattggagaaactggaattgatgaggaacttacgagcttttgatgaatgaatggtgttatcaaagtttgggcaactctggcctaggtgagagcgacccgtatcgatcaaaacacagtcagtacaaattgttagaacaaaccgtgtgagaccagaactgaacccaatccatcgatacgcgtttctctcacccagatcaaagatgaccataggagaagctttaattttgcttgcttggtgcttatctcttctctttataatcataaatttttacggagccggcacaattgaatccagagtccacaccatatccactagttccaaatatgagttatatatatatatatatatatatatatatatatatataacttttgttgatcagtgcctatacattacgttcatttactaattactattcttaatcttgaattcttaatgaatagatgacgtgtgtataacacgtgaaaaacatatacgagtattttattactatttttatttgtcgtataataataatagtattatgtatattattcaattattattgatatctcaaattgtcatccactgatatagctgtgttttccgaggatatataactcttatcatagactgacaccacattttttggatctaacgtcattacttaccaattcattaaatttaaata

SEQ ID NO: 15436 - DNA, 1091 bp, Glycine max; identical to SEQ ID NO: 15435
  Gm_smallRNAprecursor_8269

SEQ ID NO: 15437 - DNA, 1092 bp, Glycine max
  Gm_smallRNAprecursor_8270
aattgggtaatgcatacctaattccctatttgaacttgtcagcccagccttctcagtcaaatcttcttgttatccaccactcttctccaattcgggcttccattctgaattcaccccccttttttacttcactaaatgtaaattcagtgctttatttcacaaacatagcacaataattcaattaaataataaagcaaaatacatactttaattcaaacataacataacattacatgcagacataaaatttaaagcaagaatcatgtatcatggagatcagaactagaaactaattaatacagtacttgtttagtacttaatttggataaaagattggagagacacacatgacatcatattaatcctacagaatggtaagtgaattaaggaagtgaacactcacaaattaaaaaaaagcagaattggagaaactggaattgatgaggaacttacgagcttttgatgaatgaatggtgttatcaaagtttgggcaactctggcctaggtgagagcgacccgtatcgatcaaaacacagtcagtacaaattgttagaacaaaccgtgtgagaccagaactgaacccaatccatcgatacgcgtttctctcacccagatcaaagatgaccataggagaagctttaattttgcttgcttggtgcttatctcttctctttataatcataaatttttacggagccggcacaattgaatccagagtccacaccatatccactagttccaaatatgagttatatatatatatatatatatatatatatatatatataacttttgttgatcagtgcctatacattacgttcatttactaattactattcttaatcttgaattcttaatgaatagatgacgtgtgtataacacgtgaaaaacatatacgagtattttattactatttttatttgtcgtataataataatagtattatgtatattattcaattattattgatatctcaaattgtcatccactgatatagctgtgttttccgaggatatataactcttatcatagactgacaccacattttttggatctaacgtcattacttaccaattcattaaatttaaatat

SEQ ID NO: 15438 - DNA, 1092 bp, Glycine max; identical to SEQ ID NO: 15437
  Gm_smallRNAprecursor_8271

SEQ ID NO: 15439 - DNA, 1093 bp, Glycine max
  Gm_smallRNAprecursor_8272
aattgggtaatgcatacctaattccctatttgaacttgtcagcccagccttctcagtcaaatcttcttgttatccaccactcttctccaattcgggcttccattctgaattcaccccccttttttacttcactaaatgtaaattcagtgctttatttcacaaacatagcacaataattcaattaaataataaagcaaaatacatactttaattcaaacataacataacattacatgcagacataaaatttaaagcaagaatcatgtatcatggagatcagaactagaaactaattaatacagtacttgtttagtacttaatttggataaaagattggagagacacacatgacatcatattaatcctacagaatggtaagtgaattaaggaagtgaacactcacaaattaaaaaaaagcagaattggagaaactggaattgatgaggaacttacgagcttttgatgaatgaatggtgttatcaaagtttgggcaactctggcctaggtgagagcgacccgtatcgatcaaaacacagtcagtacaaattgttagaacaaaccgtgtgagaccagaactgaacccaatccatcgatacgcgtttctctcacccagatcaaagatgaccataggagaagctttaattttgcttgcttggtgcttatctcttctctttataatcataaatttttacggagccggcacaattgaatccagagtccacaccatatccactagttccaaatatgagttatatatatatatatatatatatatatatatatatataacttttgttgatcagtgcctatacattacgttcatttactaattactattcttaatcttgaattcttaatgaatagatgacgtgtgtataacacgtgaaaaacatatacgagtattttattactatttttatttgtcgtataataataatagtattatgtatattattcaattattattgatatctcaaattgtcatccactgatatagctgtgttttccgaggatatataactcttatcatagactgacaccacattttttggatctaacgtcattacttaccaattcattaaatttaaatata

SEQ ID NO: 15440 - DNA, 1188 bp, Glycine max
  Gm_smallRNAprecursor_8273
agtattgaggatgaaaaaaaaatatacttcattaaaaagaaatatgtcactgaagatgattaattggattcctaaaaaatattattcattgtttaaaccaatatacgttgtatatataacaacatgattgcaaaaaaacaaaaaacaagacaaccaacaagttattgtccccatcagaagggtcattaagctaaacataagaggactttgttgcccaaggaaaataggttatcttcaattatcaacaccggccgcggacattggaaattcagtgaatttaatgcgtgaagaagaggtggaagtgaagttctggtagctacatacaagagtgaattcaacactatgtcaagcctactgctagttggtgttctgttatatggaatccagcaattcctcctaagatgtctttcattttgtggcttgttagaaggaatcggaatcggctgcttactcttgacaaagttgcttttttgaacaagggttccctctgccctttatgttcaaatgagtctgagtcaaatgttcatttgttcttttcttgcaggaaatctctccaagtttgggctcacattcgtgatttggctcctttccgcaggtgtttcacttctttacagcgtattactaactctttaattaggagcagatccacatcaggtgttcaaggaaaattacgttgtctggctatagcaattacagtctactgcatttggctgtctaggaacaaactgatttttgaagattatcaattttttgtcatagaggttattagcacgattaagtttcttatgtatagacaagtgcacttgttgcatttgttttagcatcttgatatatgtcttcttgtattagggagatttttgattttctttaactgcggggtatgccccgtttattattgtatcattctgggtttaatataatttacattttttcccaaaaaaaacttgtactatcataatataaattttttatcataaacctaaaaaaaattatgtttaaaaatatctggtatcataacataaattattgatcacgaatctcaataattttgaatctggtcgattgatggtcggcctagttttatatataaaacaaatatgcaaactttgtcattctctgaaaaatgttttttttttgtagagtatgctaaaaaaagaacagaaaacagacaaaagtaaaaaattacac

SEQ ID NO: 15441 - DNA, 1083 bp, Glycine max
  Gm_smallRNAprecursor_8274
caaagggactgcttcgatccattttgtaaagtaatcgacaccaactatgatataacgctggttcttagaagaagcaggcttgatttcaccaattaagtccaaagcccatcctctgaaaggccaaggtttgattatggagtgtaactcactagcaggtacatgctgtatccctgcatgcttttggcattcctgacagcctttagcaaattctatacagtcttttaacatcgaaggccaatataaaccttgtcgaaataaaagccatttcattttatggcctgcttgatgtgatccacaagccccactgtgaacatgggaaactgccaagtatgcttctgattcacttagacatttcagcaacactccttctgcagtctttttaaacaaatcatttcccataatcacgtaatttaaagccctatatttgacctttcgagccacattgcctattggattttccaaatattcaataatggactttctccaatcatcatctaacatattgtcaatggccaaaatttgaattttttcctggagatcattcatgctttcatcttcgttattttgtggtatacttgcccccacaagttttggcattggcaatttagtgcttaatggctctggtaataccagtttatcttttatttcgatcaactgagttaacttttccttcgacattttgtaccctgaagctatttgggctaaatcatttgcttcttggttttcttgtcgaggtatatgctcaatgttaatataatcgaaatgattcagaagagaacttgctataacaaaatattttgctaagtgttcattaacacatttgtattcttgtgttaattgcctcaacactaattctgaatcacctcttatattaacatttcttgcccccaggctaattaaaatttcaaggcctgtaattaaagcctcatactcagcctcattattagaacaaagccctttgattttatatttgaatttagttggaactttattgggggatattattaaaactccaattccagttccatgtttgtgtttcgaaccatcgaaatacaaaatccaaggctctatacctacatagtc

SEQ ID NO: 15442 - DNA, 1114 bp, Glycine max
  Gm_smallRNAprecursor_8275
catctaacatattgtcaatggccaaaatttgaattttttcctggagatcattcatgctttcatcttcgttattttgtggtatacttgcccccacaagttttggcattggcaatttagtgcttaatggctctggtaataccagtttatcttttatttcgatcaactgagttaacttttccttcgacattttgtaccctgaagctatttgggctaaatcatttgcttcttggttttcttgtcgaggtatatgctcaatgttaatataatcgaaatgattcagaagagaacttgctataacaaaatattttgctaagtgttcattaacacatttgtattcttgtgttaattgcctcaacactaattctgaatcacctcttatattaacatttcttgcccccaggctaattaaaatttcaaggcctgtaattaaagcctcatactcagcctcattattagaacaaagccctttgattttatatttgaatttagttggaactttattgggggatattattaaaactccaattccagttccatgtttgtgtttcgaaccatcgaaatacaaaatccaaggctctatacctacatagtcttgcggcatttcgaccactgagtgatctacaataaaatctgccacaatttgacccttaacagatttcaaaggcttgtacattaaagaatattctgttaatgctaaagcccattttccaattctactgtgtaaaataggttttgacaacatgtgcttaataatatcataatgagaatacacataaacatcaacaggctttatatattgcttaagttttgcacaagagaaatacagacaaagacaaagtttttctatggcagtatatctagtttctgcatcatttagtacacgactaagataataaattgcatgttctatgccatcatcatcttcctgagccaacatgctaccaatggtcttgtcagacgcagcaatatacaacttcatagtcttatttcgactaggaggcattaacacgggaggcttgatcagatattctttaatttcatcgaaagccttttgatgctcttcattccatttgaatggttcatctttcttgagtcgaagtaatggcgaaaaaat

SEQ ID NO: 15443 - DNA, 1176 bp, Glycine max
  Gm_smallRNAprecursor_8276
tgccacaatttgacccttaacagatttcaaaggcttgtacattaaagaatattctgttaatgctaaagcccattttccaattctactgtgtaaaataggttttgacaacatgtgcttaataatatcataatgagaatacacataaacatcaacaggctttatatattgcttaagttttgcacaagagaaatacagacaaagacaaagtttttctatggcagtatatctagtttctgcatcatttagtacacgactaagataataaattgcatgttctatgccatcatcatcttcctgagccaacatgctaccaatggtcttgtcagacgcagcaatatacaacttcatagtcttatttcgactaggaggcattaacacgggaggcttgatcagatattctttaatttcatcgaaagccttttgatgctcttcattccatttgaatggttcatctttcttgagtcgaagtaatggcgaaaaaatttgagctttgccacttagattcgaaatgaatcgcctcaagaaattgatttttcctagcaaagactgaagctgttttttggtcgaaggaggcttcgtctcaagaatagcctttgtcttattttgatttatctcaatgccttttttatgcaccacaaaaccaaggaagtctcctgcatgcacacaaaaagcacactttaatggattcatttttaatccatgtttcctcattcgttcgaaagattgcctaaggtaatccaaatggctatcttctgaggaagatttgatgattatatcatcaatataaacttgcataaatgtgtcaataaaatcataaaacatggaattcatggccctttgataagtggccccagcatttttcaatccaaagggcataaccacccattcataagtgcctaaagcaccagggcatcgaaatgctgttttcgacacatcactttcagcaataaatatttggttataaccagaataaccatctaacatgcttaaaaattcgaaaccagctgccgaatctaccaacatttccgctactggcatagcatattcatctttaggtgtagcattatttaaatccctaaaatctatgcatactctaagagttccattctttttaatgacagggactatatttgctaaccattcgacatacctggcagatctgatgaatttacactt

SEQ ID NO: 15444 - DNA, 1157 bp, Glycine max
  Gm_smallRNAprecursor_8277
caattctactgtgtaaaataggttttgacaacatgtgcttaataatatcataatgagaatacacataaacatcaacaggctttatatattgcttaagttttgcacaagagaaatacagacaaagacaaagtttttctatggcagtatatctagtttctgcatcatttagtacacgactaagataataaattgcatgttctatgccatcatcatcttcctgagccaacatgctaccaatggtcttgtcagacgcagcaatatacaacttcatagtcttatttcgactaggaggcattaacacgggaggcttgatcagatattctttaatttcatcgaaagccttttgatgctcttcattccatttgaatggttcatctttcttgagtcgaagtaatggcgaaaaaatttgagctttgccacttagattcgaaatgaatcgcctcaagaaattgatttttcctagcaaagactgaagctgttttttggtcgaaggaggcttcgtctcaagaatagcctttgtcttattttgatttatctcaatgccttttttatgcaccacaaaaccaaggaagtctcctgcatgcacacaaaaagcacactttaatggattcatttttaatccatgtttcctcattcgttcgaaagattgcctaaggtaatccaaatggctatcttctgaggaagatttgatgattatatcatcaatataaacttgcataaatgtgtcaataaaatcataaaacatggaattcatggccctttgataagtggccccagcatttttcaatccaaagggcataaccacccattcataagtgcctaaagcaccagggcatcgaaatgctgttttcgacacatcactttcagcaataaatatttggttataaccagaataaccatctaacatgcttaaaaattcgaaaccagctgccgaatctaccaacatttccgctactggcatagcatattcatctttaggtgtagcattatttaaatccctaaaatctatgcatactctaagagttccattctttttaatgacagggactatatttgctaaccattcgacatacctggcagatctgatgaatttacactttagcagcctttcgatctcttccttaattttggacatgatttctggtgcgaatcttctg

SEQ ID NO: 15445 - DNA, 1039 bp, Glycine max
  Gm_smallRNAprecursor_8278
atttctggtgcgaatcttctgggtagttgttttactggtctttttccttccttaatcggtaatctcatttcgaccatttctctgcttaacccaggcatttcgtggtaatcccaagcaaaacaatctttaaattctctaagaagaggcaccagcttttcttttagacttgaggtgatattggcactgatatacgttggccttttcatcgagccatctccaatgtcgatttcctccaaaggatcttgagcctgcatctttggcacctcacttacggggtttttctcgaaacccagcggctcatcgtcataaatgcaatccagtcttcgatcctttgtttctttgtttttatgatcttcgatcttggcttcaactgccatattttgttgagattcagcctcaaaggccgtatttagtctattttcggccatataagccgtaattctggcccatgcagtggcctcagccatattaatcttcatatatattccacccagttggtggaatgactccatcttcagagggaacagcatcaatttcctccctctcccatataaacccataggtaggatggagtttgacagaatggataacattgtcacttgattcgacaatagcctccttatcaccgcaaggtgctatgttagccaactttttgtcaaaggtttgtgcagtaacattatcgacctccgacttatagaagctttgatccgcctctatattttcaacaatcccatcctccctccagataatgagtttctggtgaagggtagatggcacagccccaactccatggatccattcccttcctaatagcaagttaaaattagccttggactgtatcaccaggaatagagttggtcgaactatactgcctacagcaacatctacttgaatggctcccaaagaatagccagttttaccctcataattcgaaagcacaatgttgtgggcagatagatcagtgtcgtgtttcccgatcttgtagagcatagatcgaggcattaagttgacagccgctcctccatcaatgagcactttg

SEQ ID NO: 15446 - DNA, 1082 bp, Glycine max
  Gm_smallRNAprecursor_8279
caatgagagtcactgacaagtgtgacgtgtatagttttggagtggtggtgttggagatattgatgggaaagcatcctggagaactcttgactatgctgtcttcaaacaagtatttgtcatcaatggaggaacctcagatgctactgaaggatgtgcttgaccaacggcttcgactaccaacggaccaattagcagaagcagtagtgttcacaatgaccatagctttggcatgcacacgtgcggctccagagtccagacccatgatgcgtgctgtggcacaagaactatcggctactacacaggcttgtcttgcagagccatttggcatgataacaatgagcaagcttgcagggttccagaaatagtgtcatgtaagactgtatttaaaattacaataaaggataggtttgatgattggagtatctgctatctatgtttaaattagtcatgctccaatacactagtcatgtgaagcacggacactccagtcccttgtcgtgttcggtgtccgacacgcgtccgtgtcaatgttcgacaccgacacaacacccgtattacgttctatattttggacattacaggtgtccacgtgtccgtatccgtgtcgtgtccggtgtccgtgtcggtgttggtgcttcatagggtgaagcaaacttgctgatgtagtgatgtgtgtgcatatatattttagccttatagataaaagagcattttgcatacagaaaactttatttctgtcctttattttttattttctttgttctgagtcatgaatgtctttcacttcactgataaaagagtactttgtattcatgttgtgatgcatgactgtcttttattttttattttctttgttgtgatgcatgactgtcctttatttttgtgatgtataactgctgatggtctatggaaattttacccgtagggagattgaatacaaattttcctattaaataatcattctcccacatataaacgcaccaaagccttacgttactacaccaaacctatgagtttctatcttttgtttatttatttatagttgccctttaattttttagttatttaaaaaaggttaaagt

SEQ ID NO: 15447 - DNA, 1094 bp, Glycine max
  Gm_smallRNAprecursor_8280
caatgagagtcactgacaagtgtgacgtgtatagttttggagtggtggtgttggagatattgatgggaaagcatcctggagaactcttgactatgctgtcttcaaacaagtatttgtcatcaatggaggaacctcagatgctactgaaggatgtgcttgaccaacggcttcgactaccaacggaccaattagcagaagcagtagtgttcacaatgaccatagctttggcatgcacacgtgcggctccagagtccagacccatgatgcgtgctgtggcacaagaactatcggctactacacaggcttgtcttgcagagccatttggcatgataacaatgagcaagcttgcagggttccagaaatagtgtcatgtaagactgtatttaaaattacaataaaggataggtttgatgattggagtatctgctatctatgtttaaattagtcatgctccaatacactagtcatgtgaagcacggacactccagtcccttgtcgtgttcggtgtccgacacgcgtccgtgtcaatgttcgacaccgacacaacacccgtattacgttctatattttggacattacaggtgtccacgtgtccgtatccgtgtcgtgtccggtgtccgtgtcggtgttggtgcttcatagggtgaagcaaacttgctgatgtagtgatgtgtgtgcatatatattttagccttatagataaaagagcattttgcatacagaaaactttatttctgtcctttattttttattttctttgttctgagtcatgaatgtctttcacttcactgataaaagagtactttgtattcatgttgtgatgcatgactgtcttttattttttattttctttgttgtgatgcatgactgtcctttatttttgtgatgtataactgctgatggtctatggaaattttacccgtagggagattgaatacaaattttcctattaaataatcattctcccacatataaacgcaccaaagccttacgttactacaccaaacctatgagtttctatcttttgtttatttatttatagttgccctttaattttttagttatttaaaaaaggttaaagtatttatttggtc

SEQ ID NO: 15448 - DNA, 1101 bp, Glycine max
  Gm_smallRNAprecursor_8281
gagagtcactgacaagtgtgacgtgtatagttttggagtggtggtgttggagatattgatgggaaagcatcctggagaactcttgactatgctgtcttcaaacaagtatttgtcatcaatggaggaacctcagatgctactgaaggatgtgcttgaccaacggcttcgactaccaacggaccaattagcagaagcagtagtgttcacaatgaccatagctttggcatgcacacgtgcggctccagagtccagacccatgatgcgtgctgtggcacaagaactatcggctactacacaggcttgtcttgcagagccatttggcatgataacaatgagcaagcttgcagggttccagaaatagtgtcatgtaagactgtatttaaaattacaataaaggataggtttgatgattggagtatctgctatctatgtttaaattagtcatgctccaatacactagtcatgtgaagcacggacactccagtcccttgtcgtgttcggtgtccgacacgcgtccgtgtcaatgttcgacaccgacacaacacccgtattacgttctatattttggacattacaggtgtccacgtgtccgtatccgtgtcgtgtccggtgtccgtgtcggtgttggtgcttcatagggtgaagcaaacttgctgatgtagtgatgtgtgtgcatatatattttagccttatagataaaagagcattttgcatacagaaaactttatttctgtcctttattttttattttctttgttctgagtcatgaatgtctttcacttcactgataaaagagtactttgtattcatgttgtgatgcatgactgtcttttattttttattttctttgttgtgatgcatgactgtcctttatttttgtgatgtataactgctgatggtctatggaaattttacccgtagggagattgaatacaaattttcctattaaataatcattctcccacatataaacgcaccaaagccttacgttactacaccaaacctatgagtttctatcttttgtttatttatttatagttgccctttaattttttagttatttaaaaaaggttaaagtatttatttggtcacaatttttat

SEQ ID NO: 15449 - DNA, 1101 bp, Glycine max; identical to SEQ ID NO: 15448
  Gm_smallRNAprecursor_8282

SEQ ID NO: 15450 - DNA, 1102 bp, Glycine max
  Gm_smallRNAprecursor_8283
gagagtcactgacaagtgtgacgtgtatagttttggagtggtggtgttggagatattgatgggaaagcatcctggagaactcttgactatgctgtcttcaaacaagtatttgtcatcaatggaggaacctcagatgctactgaaggatgtgcttgaccaacggcttcgactaccaacggaccaattagcagaagcagtagtgttcacaatgaccatagctttggcatgcacacgtgcggctccagagtccagacccatgatgcgtgctgtggcacaagaactatcggctactacacaggcttgtcttgcagagccatttggcatgataacaatgagcaagcttgcagggttccagaaatagtgtcatgtaagactgtatttaaaattacaataaaggataggtttgatgattggagtatctgctatctatgtttaaattagtcatgctccaatacactagtcatgtgaagcacggacactccagtcccttgtcgtgttcggtgtccgacacgcgtccgtgtcaatgttcgacaccgacacaacacccgtattacgttctatattttggacattacaggtgtccacgtgtccgtatccgtgtcgtgtccggtgtccgtgtcggtgttggtgcttcatagggtgaagcaaacttgctgatgtagtgatgtgtgtgcatatatattttagccttatagataaaagagcattttgcatacagaaaactttatttctgtcctttattttttattttctttgttctgagtcatgaatgtctttcacttcactgataaaagagtactttgtattcatgttgtgatgcatgactgtcttttattttttattttctttgttgtgatgcatgactgtcctttatttttgtgatgtataactgctgatggtctatggaaattttacccgtagggagattgaatacaaattttcctattaaataatcattctcccacatataaacgcaccaaagccttacgttactacaccaaacctatgagtttctatcttttgtttatttatttatagttgccctttaattttttagttatttaaaaaaggttaaagtatttatttggtcacaatttttatt

SEQ ID NO: 15451 - DNA, 1103 bp, Glycine max
  Gm_smallRNAprecursor_8284
gagagtcactgacaagtgtgacgtgtatagttttggagtggtggtgttggagatattgatgggaaagcatcctggagaactcttgactatgctgtcttcaaacaagtatttgtcatcaatggaggaacctcagatgctactgaaggatgtgcttgaccaacggcttcgactaccaacggaccaattagcagaagcagtagtgttcacaatgaccatagctttggcatgcacacgtgcggctccagagtccagacccatgatgcgtgctgtggcacaagaactatcggctactacacaggcttgtcttgcagagccatttggcatgataacaatgagcaagcttgcagggttccagaaatagtgtcatgtaagactgtatttaaaattacaataaaggataggtttgatgattggagtatctgctatctatgtttaaattagtcatgctccaatacactagtcatgtgaagcacggacactccagtcccttgtcgtgttcggtgtccgacacgcgtccgtgtcaatgttcgacaccgacacaacacccgtattacgttctatattttggacattacaggtgtccacgtgtccgtatccgtgtcgtgtccggtgtccgtgtcggtgttggtgcttcatagggtgaagcaaacttgctgatgtagtgatgtgtgtgcatatatattttagccttatagataaaagagcattttgcatacagaaaactttatttctgtcctttattttttattttctttgttctgagtcatgaatgtctttcacttcactgataaaagagtactttgtattcatgttgtgatgcatgactgtcttttattttttattttctttgttgtgatgcatgactgtcctttatttttgtgatgtataactgctgatggtctatggaaattttacccgtagggagattgaatacaaattttcctattaaataatcattctcccacatataaacgcaccaaagccttacgttactacaccaaacctatgagtttctatcttttgtttatttatttatagttgccctttaattttttagttatttaaaaaaggttaaagtatttatttggtcacaatttttattt

SEQ ID NO: 15452 - DNA, 1061 bp, Glycine max
  Gm_smallRNAprecursor_8285
acaaatgtaaatgtagccaagaagttaactagtcaattgcaacaaaaaataacaacacaataatgaaaaggattggtggatgcgtcaactttaaggtgacaatgatctttactggagggaggacagaagatgtcaattaacctataaaatgataagaaaggaataaaacaaaaaatattattttattttctttgtagctattgacacttacctctcttctatctagctagccaagtcaataacattttgaaccaggtaggctattcacaacctaacacaatattaaacgcaattaagagattaatcattaatcagataccaaaggagagtaggagacctttcaagcctcttctctccatccctcccaactgataagattgaaagaaacaaagacaataggaaatcaaaactgaattgaattaaagagagacataatgaactaagttttgtagaaaacagaaactagttaatttagttttcccttgattaataacgcacaacatgcatggctcctcgcacgccattcgttaaggccatcactgtcctgatgggctctgcaaatggcatacagggagccaggcacgccaagtatgctaatagtaatatacaaaaactaattaaatgcaaacttaaccaatttatctgtaccatggaagatggtaagatttatagagatatgaccaaatgagtgctcttgatgattggtgttgctgagactagaagtgatctgcaagtaatatctatgaggaggtagaagcaattaagaagcatatatgcagcatgaagtaagagaagctaggccttccatgcccccacaaagacaaaaacactcctcagctcctttggctactgtttttacttgggaaacaaccaagcagctagcaatttggcatgaagcaaagctagctttgtaaataactctacctgaaccaaccttgtctccccccctccctctctctttttctattccctactttactttttcaaactcccaaggagtttgaaacatattgatgaagagaaatagtgttacatatatatgagtgaatgaggagggggtg

SEQ ID NO: 15453 - DNA, 1061 bp, Glycine max; identical to SEQ ID NO: 15452
  Gm_smallRNAprecursor_8286

SEQ ID NO: 15454 - DNA, 1062 bp, Glycine max
  Gm_smallRNAprecursor_8287
acaaatgtaaatgtagccaagaagttaactagtcaattgcaacaaaaaataacaacacaataatgaaaaggattggtggatgcgtcaactttaaggtgacaatgatctttactggagggaggacagaagatgtcaattaacctataaaatgataagaaaggaataaaacaaaaaatattattttattttctttgtagctattgacacttacctctcttctatctagctagccaagtcaataacattttgaaccaggtaggctattcacaacctaacacaatattaaacgcaattaagagattaatcattaatcagataccaaaggagagtaggagacctttcaagcctcttctctccatccctcccaactgataagattgaaagaaacaaagacaataggaaatcaaaactgaattgaattaaagagagacataatgaactaagttttgtagaaaacagaaactagttaatttagttttcccttgattaataacgcacaacatgcatggctcctcgcacgccattcgttaaggccatcactgtcctgatgggctctgcaaatggcatacagggagccaggcacgccaagtatgctaatagtaatatacaaaaactaattaaatgcaaacttaaccaatttatctgtaccatggaagatggtaagatttatagagatatgaccaaatgagtgctcttgatgattggtgttgctgagactagaagtgatctgcaagtaatatctatgaggaggtagaagcaattaagaagcatatatgcagcatgaagtaagagaagctaggccttccatgcccccacaaagacaaaaacactcctcagctcctttggctactgtttttacttgggaaacaaccaagcagctagcaatttggcatgaagcaaagctagctttgtaaataactctacctgaaccaaccttgtctccccccctccctctctctttttctattccctactttactttttcaaactcccaaggagtttgaaacatattgatgaagagaaatagtgttacatatatatgagtgaatgaggagggggtga

SEQ ID NO: 15455 - DNA, 1042 bp, Glycine max
  Gm_smallRNAprecursor_8288
tggaaccttgtcaatgtcgctttgtcgtttttgctctttggtcgccatcgcgctcaggttgctagagtcaccaagacgccgagattatcgcgtattcttcgaaaacttgttcaccccttgtcattaacttgcgtagagctctacttccgatcacaggaggccccacaatatcgaggttattgcgtcctctttggaccattagttgtcaaccttcttaaaaatatcccgcaaattgagcaaacggtaatgaaaataggattgaagagttgtttttacctacaatgaaatagtgaattttattagggtgttgttaggtgcacccaatattattgatgcacccacacttaacatgaaaagacaaaaatacccttgtgtatttttaaaaatatttttgtgcaccctgctcattcaagttgatccgcataggttttagttgatccacagttgatatagatgatatgcaagcttctcatggatcaagttgatccacaagtagatttttaagacttacggatcaagttgatccgtaagtcttttacgaatcaagttgatccgtaagttttttacggatcaagttgatctgcaagttgatttataagacttacgaatcaagttgatccgcaagtcttttacggatcaacttgatccgcaagttgatttttaagacttatagatcaagttgatccttaagtcttaaaaatcaacttacgaatcaacttgatccataaagaaaaaaaaacagagataattttaccattttttaaaaatgctgggtgcaccaataataataccaggtgcacctagcaacactcattttattaccattcatggtaaccattaattttttttatttataaattgaggagatacactgttcgaaagaagcactgttcactagttaatttttttttttttaaagtcaaacattcgtacatttgagaaaaaaggagagctaaaatggtactaggccggcggggaaatgcagcgggacctgctgtgctgctgatgcaacgtgtgaacgaaaaaccgactgcgccacgct

SEQ ID NO: 15456 - DNA, 1130 bp, Glycine max
  Gm_smallRNAprecursor_8289
ttacaagattggtgttgaccactttggttccgactttgcaatggctcaaaggaaaacccattctcctagtaagaaacttttatcatactattttttttatgtattagtgttagaattcagaattctaagttatgctcttggttggtaattggtattgcagcatattggtggcgaatgtttgggtcacaaactccaaatttgcagaagctggctattaagattttgagtttgacttgcagtgcttcaggatgtgaaagaaattggagtgtgtttgagcaagtaattgtgacaaaactctaactatactttttaattttatttaattttgatgatcaagttatatttggagtatatttgagattgaaatcaacatttatttgttatgttgtagattcattccaaaaaaagaaataggcttgagcacaagaggttgcatgatttggtgtttgtcaaatacaaccaacaattgaagcaaagatataatgcaagagatgaaattgatccaatttctcttaatgatattgatgtatgcaatgaatggctcgtgggagagatggatcaagatgatgataatgatgctggaaatgatttggtatttgaagatgatgatgttctaaattgggcaactgtgtatcaggcttcgggggttggagagtgtaggatgtatactaggcggaaaaagcaaaaaacaagtgttgctgctgcccaaacttctaaaaaacaggcaatggttgttggatcttcatcaaggaagcaaaaagcagtccaagaaaatgatgaggatctagatgttgaggagaatattgatgttgaatctgaagaagaagaaatcatggtcaattttgaggcgtctgatggggaagagggagagggagatgctccattaccatatgataacaacgaagatgattatgttgggattggagaagatgattagagcctcaaccttcactttgcactttgcattatgtttttatcattttcttattttgaactctttaatgagtttatttggtgttggtacttgattattgtatgaactcatgaaacttttttagtttatttgaatgcaatcctttgtttttttcaatttcaatgagtttatatatatgttttttttttttttgtgt

SEQ ID NO: 15457 - DNA, 1080 bp, Glycine max
  Gm_smallRNAprecursor_8290
tcaagatgatgataatgatgctggaaatgatttggtatttgaagatgatgatgttctaaattgggcaactgtgtatcaggcttcgggggttggagagtgtaggatgtatactaggcggaaaaagcaaaaaacaagtgttgctgctgcccaaacttctaaaaaacaggcaatggttgttggatcttcatcaaggaagcaaaaagcagtccaagaaaatgatgaggatctagatgttgaggagaatattgatgttgaatctgaagaagaagaaatcatggtcaattttgaggcgtctgatggggaagagggagagggagatgctccattaccatatgataacaacgaagatgattatgttgggattggagaagatgattagagcctcaaccttcactttgcactttgcattatgtttttatcattttcttattttgaactctttaatgagtttatttggtgttggtacttgattattgtatgaactcatgaaacttttttagtttatttgaatgcaatcctttgtttttttcaatttcaatgagtttatatatatgttttttttttttttgtgtccgccatgacatccgccattttccgctacgccatccgccatatttttatggcggatttttgactttccgccatgaaccgccatccaccattaacaacattgctctgtacatattgtttattcacaactttatcattctatttttttctaatccagaatatcacctaactaaaaacatataatactaattcttttgaggtaattaatatctttcaacaaatgagggtagattctttgtttagagtttattgatcatatatttcacaatgtaaaaatatagttgaatcataattattgttaatataattattaaaataattaccataaaatttaataaatttatcatatataataaattgtgattatttacactgtgaaaatataattctttttctctattcttaacatataataataaatatatttatatcctgtctagacaagattctcttgactctcttatgtgcgttgaaattctttctctctccttccatcctttgtttatgtga

SEQ ID NO: 15458 - DNA, 1054 bp, Glycine max
  Gm_smallRNAprecursor_8291
cacttttgataaattatttattttaaaaatttcattccgatcctttataattttaaaatatatcattttaattattttttaatttttttaaaatttaaagttaatagaacattaaaatttctaacagattttttaaaaaaataaaaataatacatttcaaaaacataaaaaactaaaataaaaatcttaaaatttaatatactaatatgctacaacccgagatataatggacctaattattaaaataaataatcttattttctgaggtcaaacacaattcacagggaacccaaaaccctccatcgttacatgctggtgcgctgaagctgagatcgccgcaaaaccaactttgttctctcccacataaacaaaccaaacacaacaatattcgactcgattcgattacgtacgttgctgtcgatatacaaccagcacaacaatgtcatccaaacaaattggaattgaatcagaccttgtttctttgagcatcctcatcaataagagaattgtaagtcactgtattaattaggaactgttgattagatgcatgatacagtgacttacaattctcttattaatgatttgtgcaaatcggaaaaaagatcagatatcttgagatcttattgatgagatgcatgataaaggtgaacctatcaatataatcaagtcacctatagttccttaattaatagacttgagaatgcacaacaggttttgatcatctattttcttatatacctattttctttcaattttagtggtggagtaaggagtaacctgtcatgtacggttttcatataacttgtcctaaagttttacagaaattaattaaattgctaaactttgttggtgccatgtcgcagcgcgcaatcaccttaccttttaaattgattagctaaaatttaatgcacaatgccactagattgaatttgcatgactggtctactatgatttatttctttttttcctttgtttcttgtttttttatacagtgaggaataatttcaaaactacactcatattttattgtcatcacagagtttcctcacgttat

SEQ ID NO: 15459 - DNA, 1052 bp, Glycine max
  Gm_smallRNAprecursor_8292
taaaagaaatatgattttagaaactaggtgttagtgtaactagggctaagttaatttgagtgtaatttgttcaaagttttatctttctaattactcttcttttttattattccttaattcattgtcatgtgagcatcgtcaattgagttccttttgcaaattttacttgaatgtgcaattttcactccttaaatcatgcagtttgtgttagtatttttgaactgtcatttaattgtagattattaaaaaaatgttttttttttcagaaacaaatttaagccatttccttcattttaagtaaggggtgttgctaggtgcacccagctttattgcttgtgcacccagcattttttgaaaatgtcaaaactgtccctgcactttcttcgcatttgtgatgggtgtgcatgaggatgatccgtaaatcgtacggatcaagttgatccgtatgttgatattaagtgcatacggatcaagttgatccgtaaaaggcttacggatcaagttgattcgtaaggcttctacggatcaagttgattcgtatgttgatattaagcgcatacggatcaacttgatccgtaaaagacttatggatcaagttgatccgtaaggcttctatggatcaagttgatccgttgattcgtaaggcttttatgaatcaacttaaaaggcttgtaaatcaaaggtattttaatcttttttccttaagtgatgggtgcaccagcaatattgctgggtgcagctagcaacacccttaagtaaggtattcgattgggctggacccaataacgttttatcataatttaagattttatttattttttattttaattaattagagattgttgttgttagagtactgtgtttcttataaataaaaaggagctgcgagtgattgtatcgtgtgcctcttccatcaacactgggtttcggttattcgattatgtcaggttctttctctgttactttcttcagaaattttattttcttcttcttcttcttcatgtgaaacttaaataatattttgtttcttctggcatttttcttttggtata

SEQ ID NO: 15460 - DNA, 1190 bp, Glycine max
  Gm_smallRNAprecursor_8293
ttgagtcaggacaacgttatatgtacacatcttttattctgcgagatgatgctgatgttcgacaaatgttcaacattttttacaacaacccatcactaccatttgtggagttatttgccataatctgtcacaataatgacacaccaggcaaccaacatggctcaacctctaatcttgaggacttatcaggtgaatacgagacttgttggctcaaaaaccatgatagtgatacagactcctcttccgggcccgaaggaagtaacctgtctccatcccacgaacctatattcaaacaggattggtaatttatggatcattcatgtctaagttatttcttctttgagattttcatttaaaaattcaatgtctcatcaacaaaactgacatgaaatggacaactcataatctctttattcactctgaaaataactatggacgtttgttactttaattacaagggaaaaatcacaatccaaattgacaatactctacaatttgcacacgtctctaaaaattaaatgtctcacctgcaaaactgtcatgaaatggacagcccatcatctctttattcactctgaaaatcatcatgaacgtctgttgctttaattacatgggaaaaatcacagtccaaattaacagcactctgcattatgagctgttcatttcatgtcagttttacaggtgatacatttaatttttagagacgtgtgcaaaactgacatgaaatggacaactcataatctctttgttcaatctgaaattataatggacgtctgctacatcacttactagggaaaaagaaacattggattccaatacacatcaacgtggcagaatactcatacaactataaataacacaacacaaacacaatacaaacacacaatctcacacaacataatttcacaaaccaaattcaatcttattactatgtcatttttgggagaaacaagcagtcagaccattactaactccaaattagctttcatttttccaaatggatcaatcagttacaatcaaactggtttttattttcaaagtctcattccaacaccaatgcgagttcctaacaattgttcttttgatacactcaagcgtagaatgcacaacacccttcaactaaccaacgatcaattactggatgaaatctactaccgacaaccattcatatatgtggaagcaaagcttca

SEQ ID NO: 15461 - DNA, 1035 bp, Glycine max
  Gm_smallRNAprecursor_8294
cttgcaaatatatgcaagattttaaagcatatattcagagttacttgcatattataaaggaaaaaaaaactgagaggagcatataattgtcaaaagagataaatcaagataaaagtccaaaacaagagtctcactcactgtgttatcttctaaaacttgaattatatcctcatggaaccataatctactgcgcttccctggatcttttggtgactcctgtcgtacaatttctctacccatgtcctctatcaagtcatgcaatgtcaccattgtaccatgcacactaagctttaagagggatttatcaatcagcaccccaatatgatatttcatgcagtctccataatgagcatgaagtatatcttcaacctcttccaattcacatcctttgaagcaacaagcaatgtcaagaaaaacactcttctcttcttcctccaaagcatcaaaacttactttgagtatctttaagatttggttattaggaattctttggtattgattgatagcagatttccattcttgtatactttttccaaacaagttggaacctattactttcaaagccaatggaaggccagaagcataagttaccacacgattcaacatctcctcataacttggatcaactttttgcattttaaaagcttcccatgtgagcaattgaagagcatcattcctgttcaattcattcacctcatatgttcttctaacctcatgagatgccagcagtttttcgtcgcgcgtcgtgatgatgattctactgccagaaccaaaccaatcaggtcttccaacaatagcctgcaattgctcaggcttatcaacatcatctacaatcaagagaaccttttttcgctggagcctatgttgtatcattgaaattccttgtttcacagttgctatgttcattttattttctttaaccaattcagaaagaatgatgctttggagatgttgtaacccatgtttgtctgaattttctctcacgttttcaagaaaacacgaaccatcaaaatggtcagcaacataattataaac

SEQ ID NO: 15462 - DNA, 1038 bp, Glycine max
  Gm_smallRNAprecursor_8295
cttgcaaatatatgcaagattttaaagcatatattcagagttacttgcatattataaaggaaaaaaaaactgagaggagcatataattgtcaaaagagataaatcaagataaaagtccaaaacaagagtctcactcactgtgttatcttctaaaacttgaattatatcctcatggaaccataatctactgcgcttccctggatcttttggtgactcctgtcgtacaatttctctacccatgtcctctatcaagtcatgcaatgtcaccattgtaccatgcacactaagctttaagagggatttatcaatcagcaccccaatatgatatttcatgcagtctccataatgagcatgaagtatatcttcaacctcttccaattcacatcctttgaagcaacaagcaatgtcaagaaaaacactcttctcttcttcctccaaagcatcaaaacttactttgagtatctttaagatttggttattaggaattctttggtattgattgatagcagatttccattcttgtatactttttccaaacaagttggaacctattactttcaaagccaatggaaggccagaagcataagttaccacacgattcaacatctcctcataacttggatcaactttttgcattttaaaagcttcccatgtgagcaattgaagagcatcattcctgttcaattcattcacctcatatgttcttctaacctcatgagatgccagcagtttttcgtcgcgcgtcgtgatgatgattctactgccagaaccaaaccaatcaggtcttccaacaatagcctgcaattgctcaggcttatcaacatcatctacaatcaagagaaccttttttcgctggagcctatgttgtatcattgaaattccttgtttcacagttgctatgttcattttattttctttaaccaattcagaaagaatgatgctttggagatgttgtaacccatgtttgtctgaattttctctcacgttttcaagaaaacacgaaccatcaaaatggtcagcaacataattataaactgc

SEQ ID NO: 15463 - DNA, 1032 bp, Glycine max
  Gm_smallRNAprecursor_8296
gcaaatatatgcaagattttaaagcatatattcagagttacttgcatattataaaggaaaaaaaaactgagaggagcatataattgtcaaaagagataaatcaagataaaagtccaaaacaagagtctcactcactgtgttatcttctaaaacttgaattatatcctcatggaaccataatctactgcgcttccctggatcttttggtgactcctgtcgtacaatttctctacccatgtcctctatcaagtcatgcaatgtcaccattgtaccatgcacactaagctttaagagggatttatcaatcagcaccccaatatgatatttcatgcagtctccataatgagcatgaagtatatcttcaacctcttccaattcacatcctttgaagcaacaagcaatgtcaagaaaaacactcttctcttcttcctccaaagcatcaaaacttactttgagtatctttaagatttggttattaggaattctttggtattgattgatagcagatttccattcttgtatactttttccaaacaagttggaacctattactttcaaagccaatggaaggccagaagcataagttaccacacgattcaacatctcctcataacttggatcaactttttgcattttaaaagcttcccatgtgagcaattgaagagcatcattcctgttcaattcattcacctcatatgttcttctaacctcatgagatgccagcagtttttcgtcgcgcgtcgtgatgatgattctactgccagaaccaaaccaatcaggtcttccaacaatagcctgcaattgctcaggcttatcaacatcatctacaatcaagagaaccttttttcgctggagcctatgttgtatcattgaaattccttgtttcacagttgctatgttcattttattttctttaaccaattcagaaagaatgatgctttggagatgttgtaacccatgtttgtctgaattttctctcacgttttcaagaaaacacgaaccatcaaaatggtcagcaacataattataaac

SEQ ID NO: 15464 - DNA, 1035 bp, Glycine max
  Gm_smallRNAprecursor_8297
gcaaatatatgcaagattttaaagcatatattcagagttacttgcatattataaaggaaaaaaaaactgagaggagcatataattgtcaaaagagataaatcaagataaaagtccaaaacaagagtctcactcactgtgttatcttctaaaacttgaattatatcctcatggaaccataatctactgcgcttccctggatcttttggtgactcctgtcgtacaatttctctacccatgtcctctatcaagtcatgcaatgtcaccattgtaccatgcacactaagctttaagagggatttatcaatcagcaccccaatatgatatttcatgcagtctccataatgagcatgaagtatatcttcaacctcttccaattcacatcctttgaagcaacaagcaatgtcaagaaaaacactcttctcttcttcctccaaagcatcaaaacttactttgagtatctttaagatttggttattaggaattctttggtattgattgatagcagatttccattcttgtatactttttccaaacaagttggaacctattactttcaaagccaatggaaggccagaagcataagttaccacacgattcaacatctcctcataacttggatcaactttttgcattttaaaagcttcccatgtgagcaattgaagagcatcattcctgttcaattcattcacctcatatgttcttctaacctcatgagatgccagcagtttttcgtcgcgcgtcgtgatgatgattctactgccagaaccaaaccaatcaggtcttccaacaatagcctgcaattgctcaggcttatcaacatcatctacaatcaagagaaccttttttcgctggagcctatgttgtatcattgaaattccttgtttcacagttgctatgttcattttattttctttaaccaattcagaaagaatgatgctttggagatgttgtaacccatgtttgtctgaattttctctcacgttttcaagaaaacacgaaccatcaaaatggtcagcaacataattataaactgc

SEQ ID NO: 15465 - DNA, 1116 bp, Glycine max
  Gm_smallRNAprecursor_8298
ttcataacccccacgagacaatacgtggggggcagtgttttgcttctgggaggcctgtgcctttttccgtacatcctgcaaaagtttaacattaatgaaaatgattattacaataaattataagaagtgattttgttgtggaaaacaactaaaatgacaaagtacatacctcccatgaggggtctctgcgggtctgacaaaactgagtccatttctccttgctaatgccatatttttcacagacaatgtcgtccgcaccgtccttgtcgactgcaagtgcccatttcctagtcaagtcagatttaaactgcctccagcgctcgccgacaatctgaagaattttcttctttgtcctattatcagaagcttcagggatttgaaattccgcctgacaaacaataaattaggttttgttgtaagtaaataacaaatttagactattaaagaaaatcaacgaagaaaactcaaatacctgaatatcctcccatatcaaatccttctgagcagtagggacttccttccaggtgtcatatgtcacgtcgaccttatcacgagcgaaaatccccaaatatgttcttaatttcttcttgtggggaccgtcggccttgccggtagcaggatcgacgttgaccacaggtctttctgccccaggtggtctagtggccaatgatcgtagccgtgtcgccttgcgtgtccgcttcaacgtagatggagacgcatcagcgtctgcaggaggaggaggaagaggaggaggaggcgaggcaggtggagtatccatggtcctttaaagaaaaaaagttgagttagttaatattatcaaaaaacactgtatgagttatgtaaatgaatgtaccgaaatgaaatattatattagaaaattacgttagacgatgttaattaattctcgttcatcatgatcattacgattagcatgaacgtcgtcagcttcttcttctccgacgttgttagaagtcatttgtgtagacaaaggactaacataagtgtccatgtatgaatcatcatcttctacattaacaccaattgttttcccgtttagaaccacagaccacctttcatcacaagggtcttgcacataaaatacttgcttagcttgtt
